United States Patent Application Publication US 2005/0244851 A1 - sequence listing, part 107

SEQ ID NO: 4172125 - DNA, 25 bp, Homo sapien
aactggtatgattatgaactgtgca

SEQ ID NO: 4172126 - DNA, 25 bp, Homo sapien
cagctgcatgcttgtaaaggtttgc

SEQ ID NO: 4172127 - DNA, 25 bp, Homo sapien
tcctcatctctcattctgttgtggt

SEQ ID NO: 4172128 - DNA, 25 bp, Homo sapien
cctcatctctcattctgttgtggtt

SEQ ID NO: 4172129 - DNA, 25 bp, Homo sapien
caattcaatgggataaaggtcagac

SEQ ID NO: 4172130 - DNA, 25 bp, Homo sapien
gatggagcttcctttccctgtaaga

SEQ ID NO: 4172131 - DNA, 25 bp, Homo sapien
tgggaagcaagatcatgaattcagc

SEQ ID NO: 4172132 - DNA, 25 bp, Homo sapien
gaagttgtaaggtcaattcccagat

SEQ ID NO: 4172133 - DNA, 25 bp, Homo sapien
tctcacgtttgtcacctgggtccac

SEQ ID NO: 4172134 - DNA, 25 bp, Homo sapien
agtcctatccgcgtgttccttccat

SEQ ID NO: 4172135 - DNA, 25 bp, Homo sapien
ctgggtccacagtcctatccgcgtg

SEQ ID NO: 4172136 - DNA, 25 bp, Homo sapien
tctgtctcacgtttgtcacctgggt

SEQ ID NO: 4172137 - DNA, 25 bp, Homo sapien
atctggtcccggtaattcttccacg

SEQ ID NO: 4172138 - DNA, 25 bp, Homo sapien
atgacaggacataagagctgccatc

SEQ ID NO: 4172139 - DNA, 25 bp, Homo sapien
gctgccatctggtcccggtaattct

SEQ ID NO: 4172140 - DNA, 25 bp, Homo sapien
gaaaatgttacatatgacaggacat

SEQ ID NO: 4172141 - DNA, 25 bp, Homo sapien
ttaggattcaacttcacaattgtga

SEQ ID NO: 4172142 - DNA, 25 bp, Homo sapien
ggattcaacttcacaattgtgaata

SEQ ID NO: 4172143 - DNA, 25 bp, Homo sapien
ttcaacttcacaattgtgaataaca

SEQ ID NO: 4172144 - DNA, 25 bp, Homo sapien
taggattcaacttcacaattgtgaa

SEQ ID NO: 4172145 - DNA, 25 bp, Homo sapien
tatgtgaaattaccttgtgactttg

SEQ ID NO: 4172146 - DNA, 25 bp, Homo sapien
accccgtttttatctcagctacgag

SEQ ID NO: 4172147 - DNA, 25 bp, Homo sapien
tgtttaggtacactctttgaagcag

SEQ ID NO: 4172148 - DNA, 25 bp, Homo sapien
gaagcccgagtgacactgaatcagc

SEQ ID NO: 4172149 - DNA, 25 bp, Homo sapien
gaggacatatcccagaaataatggg

SEQ ID NO: 4172150 - DNA, 25 bp, Homo sapien
taacaatctttgaacggatgaggac

SEQ ID NO: 4172151 - DNA, 25 bp, Homo sapien
tgatgtgacacccaaaagactaatg

SEQ ID NO: 4172152 - DNA, 25 bp, Homo sapien
caacttagtaatgcttatgaggaac

SEQ ID NO: 4172153 - DNA, 25 bp, Homo sapien
aggaggatcatttaaatacaggagt

SEQ ID NO: 4172154 - DNA, 25 bp, Homo sapien
taacaggtactttcttcagatggct

SEQ ID NO: 4172155 - DNA, 25 bp, Homo sapien
tgtcatctacgcaacagtgcccaaa

SEQ ID NO: 4172156 - DNA, 25 bp, Homo sapien
cccatgtggcattcaaggcgatagg

SEQ ID NO: 4172157 - DNA, 25 bp, Homo sapien
tctgccagttgaacaaagggtatcc

SEQ ID NO: 4172158 - DNA, 25 bp, Homo sapien
gactacacgagaatatccctccatg

SEQ ID NO: 4172159 - DNA, 25 bp, Homo sapien
cttcacatcactgactacacgagaa

SEQ ID NO: 4172160 - DNA, 25 bp, Homo sapien
agttctaacccattccagtctccga

SEQ ID NO: 4172161 - DNA, 25 bp, Homo sapien
cagtctccgatcctggatacatcca

SEQ ID NO: 4172162 - DNA, 25 bp, Homo sapien
cacagtagagacgaatctttatttt

SEQ ID NO: 4172163 - DNA, 25 bp, Homo sapien
ttgtcaaggtaaataggacacaaac

SEQ ID NO: 4172164 - DNA, 25 bp, Homo sapien
cctttgtcaaggtaaataggacaca

SEQ ID NO: 4172165 - DNA, 25 bp, Homo sapien
tcaaggtaaataggacacaaactct

SEQ ID NO: 4172166 - DNA, 25 bp, Homo sapien
gtccttcatttatactccatcttcc

SEQ ID NO: 4172167 - DNA, 25 bp, Homo sapien
gaggaattccatgctggtgtacaaa

SEQ ID NO: 4172168 - DNA, 25 bp, Homo sapien
taaagccgtatgatcagccataggg

SEQ ID NO: 4172169 - DNA, 25 bp, Homo sapien
ccatagggtcaatatgaggaattcc

SEQ ID NO: 4172170 - DNA, 25 bp, Homo sapien
ggtgtacaaaaatggcctccttgtg

SEQ ID NO: 4172171 - DNA, 25 bp, Homo sapien
cacacagcacatgtggtcctgcaaa

SEQ ID NO: 4172172 - DNA, 25 bp, Homo sapien
cttgtacaggtaggccacacagcac

SEQ ID NO: 4172173 - DNA, 25 bp, Homo sapien
gtggtcctgcaaatctattccctgg

SEQ ID NO: 4172174 - DNA, 25 bp, Homo sapien
attgttcctccacatggcttatttc

SEQ ID NO: 4172175 - DNA, 25 bp, Homo sapien
gaccttaggccttgcacagatggaa

SEQ ID NO: 4172176 - DNA, 25 bp, Homo sapien
tggaaaggtcccacttgtgtagaac

SEQ ID NO: 4172177 - DNA, 25 bp, Homo sapien
taatggttctgtgcaaggatagacc

SEQ ID NO: 4172178 - DNA, 25 bp, Homo sapien
gactgaattcccagcaattagtgct

SEQ ID NO: 4172179 - DNA, 25 bp, Homo sapien
aaagtgaagatgtggcagcttccca

SEQ ID NO: 4172180 - DNA, 25 bp, Homo sapien
gtggcagcttcccactaagctccat

SEQ ID NO: 4172181 - DNA, 25 bp, Homo sapien
gaagatgtggcagcttcccactaag

SEQ ID NO: 4172182 - DNA, 25 bp, Homo sapien
tattgaagcaaaagtgaagatgtgg

SEQ ID NO: 4172183 - DNA, 25 bp, Homo sapien
ttaaatatgttgcttcccatcccag

SEQ ID NO: 4172184 - DNA, 25 bp, Homo sapien
gagccttgagactccaacagattgg

SEQ ID NO: 4172185 - DNA, 25 bp, Homo sapien
gcttgtgtgtcaaggcaacagagca

SEQ ID NO: 4172186 - DNA, 25 bp, Homo sapien
actgtgattattttgcattcagcac

SEQ ID NO: 4172187 - DNA, 25 bp, Homo sapien
ggagtgcagttttcatggttagaac

SEQ ID NO: 4172188 - DNA, 25 bp, Homo sapien
tattctctctagttggagtgcagtt

SEQ ID NO: 4172189 - DNA, 25 bp, Homo sapien
ggaaattattctctctagttggagt

SEQ ID NO: 4172190 - DNA, 25 bp, Homo sapien
ttggagtgcagttttcatggttaga

SEQ ID NO: 4172191 - DNA, 25 bp, Homo sapien
gaccccacacggttttatcagtctg

SEQ ID NO: 4172192 - DNA, 25 bp, Homo sapien
tgattcttctagtccaccttgctga

SEQ ID NO: 4172193 - DNA, 25 bp, Homo sapien
gctattgtaactaacaccctcctag

SEQ ID NO: 4172194 - DNA, 25 bp, Homo sapien
gagtaagctacagcgaagcctcatt

SEQ ID NO: 4172195 - DNA, 25 bp, Homo sapien
gctcagaccactgatatttgatggg

SEQ ID NO: 4172196 - DNA, 25 bp, Homo sapien
gcatcaatcattttaaacttggtca

SEQ ID NO: 4172197 - DNA, 25 bp, Homo sapien
tgcctggtgccagagctgtagctca

SEQ ID NO: 4172198 - DNA, 25 bp, Homo sapien
tttaaaagcctgtgaaatacagccc

SEQ ID NO: 4172199 - DNA, 25 bp, Homo sapien
ccagtggatgtgtgagctaggttct

SEQ ID NO: 4172200 - DNA, 25 bp, Homo sapien
tctggttaaccatggcaaagaagca

SEQ ID NO: 4172201 - DNA, 25 bp, Homo sapien
gcttctgtgctgcattggctacatt

SEQ ID NO: 4172202 - DNA, 25 bp, Homo sapien
tctgtgctgcattggctacattcag

SEQ ID NO: 4172203 - DNA, 25 bp, Homo sapien
ctagaggtggctgttggacacacat

SEQ ID NO: 4172204 - DNA, 25 bp, Homo sapien
tataaatatcataacctggcttttt

SEQ ID NO: 4172205 - DNA, 25 bp, Homo sapien
cctggcttttttctagaggtggctg

SEQ ID NO: 4172206 - DNA, 25 bp, Homo sapien
ttttctagaggtggctgttggacac

SEQ ID NO: 4172207 - DNA, 25 bp, Homo sapien
gcttgagcagtgtgaaagatattat

SEQ ID NO: 4172208 - DNA, 25 bp, Homo sapien
catagcaaactgtgaagcttgagca

SEQ ID NO: 4172209 - DNA, 25 bp, Homo sapien
ctctactgcctataagtgccatgta

SEQ ID NO: 4172210 - DNA, 25 bp, Homo sapien
gaccccggtatgagagtcagctgta

SEQ ID NO: 4172211 - DNA, 25 bp, Homo sapien
ttttctgttctcaagtttatgatac

SEQ ID NO: 4172212 - DNA, 25 bp, Homo sapien
attttctgttctcaagtttatgata

SEQ ID NO: 4172213 - DNA, 25 bp, Homo sapien
tctgttctcaagtttatgatacttt

SEQ ID NO: 4172214 - DNA, 25 bp, Homo sapien
tttctgttctcaagtttatgatact

SEQ ID NO: 4172215 - DNA, 25 bp, Homo sapien
caaagacctgggaccattaaaatag

SEQ ID NO: 4172216 - DNA, 25 bp, Homo sapien
ctgtggaatagacactatgcaacac

SEQ ID NO: 4172217 - DNA, 25 bp, Homo sapien
tatgcaacacttggagccaaagacc

SEQ ID NO: 4172218 - DNA, 25 bp, Homo sapien
agacctgggaccattaaaatagaag

SEQ ID NO: 4172219 - DNA, 25 bp, Homo sapien
tgtatttcaggagatattttaagat

SEQ ID NO: 4172220 - DNA, 25 bp, Homo sapien
ttcaggagatattttaagatgtctt

SEQ ID NO: 4172221 - DNA, 25 bp, Homo sapien
atttcaggagatattttaagatgtc

SEQ ID NO: 4172222 - DNA, 25 bp, Homo sapien
gtatttcaggagatattttaagatg

SEQ ID NO: 4172223 - DNA, 25 bp, Homo sapien
taccaaagtcccaggtccggcaaca

SEQ ID NO: 4172224 - DNA, 25 bp, Homo sapien
ccggcaacacagacgttttttgtag

SEQ ID NO: 4172225 - DNA, 25 bp, Homo sapien
ttctaattggaagcaggaggttacc

SEQ ID NO: 4172226 - DNA, 25 bp, Homo sapien
cattagtggcagcttcaagctgagg

SEQ ID NO: 4172227 - DNA, 25 bp, Homo sapien
tactcccagtaccaggcaaacaaca

SEQ ID NO: 4172228 - DNA, 25 bp, Homo sapien
gaaaaggtggcatacagagtaggca

SEQ ID NO: 4172229 - DNA, 25 bp, Homo sapien
ggtggcatacagagtaggcagctac

SEQ ID NO: 4172230 - DNA, 25 bp, Homo sapien
agtaggcagctactcccagtaccag

SEQ ID NO: 4172231 - DNA, 25 bp, Homo sapien
acaaaggccccttaagctgagacag

SEQ ID NO: 4172232 - DNA, 25 bp, Homo sapien
tgaattgccatttcccacaaaggcc

SEQ ID NO: 4172233 - DNA, 25 bp, Homo sapien
tgcagagctgtcaatctacaagtgt

SEQ ID NO: 4172234 - DNA, 25 bp, Homo sapien
gtctccctaaatgggccagtgctga

SEQ ID NO: 4172235 - DNA, 25 bp, Homo sapien
atcagttgagtgacgtggagcttgc

SEQ ID NO: 4172236 - DNA, 25 bp, Homo sapien
tagcatcagttgagtgacgtggagc

SEQ ID NO: 4172237 - DNA, 25 bp, Homo sapien
tcctgggtggtagcatcagttgagt

SEQ ID NO: 4172238 - DNA, 25 bp, Homo sapien
ctgatttctgtcctgggtggtagca

SEQ ID NO: 4172239 - DNA, 25 bp, Homo sapien
tccaatggtgggagttaattgcaac

SEQ ID NO: 4172240 - DNA, 25 bp, Homo sapien
taggcctttgtattgaaagagctac

SEQ ID NO: 4172241 - DNA, 25 bp, Homo sapien
taattgcaactagtataaactccca

SEQ ID NO: 4172242 - DNA, 25 bp, Homo sapien
cagggaaggagatctaggaaagaac

SEQ ID NO: 4172243 - DNA, 25 bp, Homo sapien
aatgctaatgaacaggacttcgcta

SEQ ID NO: 4172244 - DNA, 25 bp, Homo sapien
tcaaaaagagggcaatgtagtactg

SEQ ID NO: 4172245 - DNA, 25 bp, Homo sapien
gactataaagtaccaccaaggctcc

SEQ ID NO: 4172246 - DNA, 25 bp, Homo sapien
gaaacagcatggacaatgtgggaca

SEQ ID NO: 4172247 - DNA, 25 bp, Homo sapien
tacacgaaggctcttacggccagcc

SEQ ID NO: 4172248 - DNA, 25 bp, Homo sapien
gcacagaggaaccaagaggtacacg

SEQ ID NO: 4172249 - DNA, 25 bp, Homo sapien
ccctcagtttgctggaattttagag

SEQ ID NO: 4172250 - DNA, 25 bp, Homo sapien
tcaatccacataggctaccaagtgg

SEQ ID NO: 4172251 - DNA, 25 bp, Homo sapien
ttttcattagtacacgtaggaaata

SEQ ID NO: 4172252 - DNA, 25 bp, Homo sapien
tcattagtacacgtaggaaataccg

SEQ ID NO: 4172253 - DNA, 25 bp, Homo sapien
attagtacacgtaggaaataccgag

SEQ ID NO: 4172254 - DNA, 25 bp, Homo sapien
agtacacgtaggaaataccgagtgg

SEQ ID NO: 4172255 - DNA, 25 bp, Homo sapien
cagtcagaccctccaacaaatgcca

SEQ ID NO: 4172256 - DNA, 25 bp, Homo sapien
ccagtcagaccctccaacaaatgcc

SEQ ID NO: 4172257 - DNA, 25 bp, Homo sapien
agtcagaccctccaacaaatgccat

SEQ ID NO: 4172258 - DNA, 25 bp, Homo sapien
tgggcactgtcatggccgactgttt

SEQ ID NO: 4172259 - DNA, 25 bp, Homo sapien
gggcactgtcatggccgactgtttt

SEQ ID NO: 4172260 - DNA, 25 bp, Homo sapien
ggcactgtcatggccgactgttttc

SEQ ID NO: 4172261 - DNA, 25 bp, Homo sapien
ttttggccattcatcaacagcttta

SEQ ID NO: 4172262 - DNA, 25 bp, Homo sapien
ttttttggccattcatcaacagctt

SEQ ID NO: 4172263 - DNA, 25 bp, Homo sapien
ttggccattcatcaacagctttatc

SEQ ID NO: 4172264 - DNA, 25 bp, Homo sapien
taacttgtccttttttggccattca

SEQ ID NO: 4172265 - DNA, 25 bp, Homo sapien
gagtctgcatatcatctttgctcag

SEQ ID NO: 4172266 - DNA, 25 bp, Homo sapien
tttgctcagggggcacgctaatctt

SEQ ID NO: 4172267 - DNA, 25 bp, Homo sapien
tcatgagtctgcatatcatctttgc

SEQ ID NO: 4172268 - DNA, 25 bp, Homo sapien
catgagtctgcatatcatctttgct

SEQ ID NO: 4172269 - DNA, 25 bp, Homo sapien
tgtggcataagctacattttgagac

SEQ ID NO: 4172270 - DNA, 25 bp, Homo sapien
attccccttctaaccacatttgatg

SEQ ID NO: 4172271 - DNA, 25 bp, Homo sapien
aagagattacttccactactggaga

SEQ ID NO: 4172272 - DNA, 25 bp, Homo sapien
accacatttgatgtctcagtgaaga

SEQ ID NO: 4172273 - DNA, 25 bp, Homo sapien
cacagtggccgcctgatatctgccc

SEQ ID NO: 4172274 - DNA, 25 bp, Homo sapien
tcacagtggccgcctgatatctgcc

SEQ ID NO: 4172275 - DNA, 25 bp, Homo sapien
ccgtggcttgatttaactccaccat

SEQ ID NO: 4172276 - DNA, 25 bp, Homo sapien
actcccgtggcttgatttaactcca

SEQ ID NO: 4172277 - DNA, 25 bp, Homo sapien
caactcccgtggcttgatttaactc

SEQ ID NO: 4172278 - DNA, 25 bp, Homo sapien
tcatcaactcccgtggcttgattta

SEQ ID NO: 4172279 - DNA, 25 bp, Homo sapien
ctactgcccttttctttcacctcct

SEQ ID NO: 4172280 - DNA, 25 bp, Homo sapien
ttctttcacctcctgctcagtctga

SEQ ID NO: 4172281 - DNA, 25 bp, Homo sapien
cctgctcagtctgactgccctccat

SEQ ID NO: 4172282 - DNA, 25 bp, Homo sapien
ccttttctttcacctcctgctcagt

SEQ ID NO: 4172283 - DNA, 25 bp, Homo sapien
ccaggattcgactccacttccaggg

SEQ ID NO: 4172284 - DNA, 25 bp, Homo sapien
tccccatcagatatgtaagcatgtg

SEQ ID NO: 4172285 - DNA, 25 bp, Homo sapien
gcttggagtatggattcttggcact

SEQ ID NO: 4172286 - DNA, 25 bp, Homo sapien
gcttcttcttactgaggcttggagt

SEQ ID NO: 4172287 - DNA, 25 bp, Homo sapien
caccacggggcctgattaatggcag

SEQ ID NO: 4172288 - DNA, 25 bp, Homo sapien
tggcagtgacatcatgacttttaaa

SEQ ID NO: 4172289 - DNA, 25 bp, Homo sapien
gcagacactggtgattaatggatga

SEQ ID NO: 4172290 - DNA, 25 bp, Homo sapien
gacttttaaatatgccattaatgct

SEQ ID NO: 4172291 - DNA, 25 bp, Homo sapien
ctagtctccactgagaagtcgttca

SEQ ID NO: 4172292 - DNA, 25 bp, Homo sapien
gtctccactgagaagtcgttcatgg

SEQ ID NO: 4172293 - DNA, 25 bp, Homo sapien
tccactgagaagtcgttcatggcat

SEQ ID NO: 4172294 - DNA, 25 bp, Homo sapien
cactgagaagtcgttcatggcattc

SEQ ID NO: 4172295 - DNA, 25 bp, Homo sapien
tttggaccaaatgggaccacttctg

SEQ ID NO: 4172296 - DNA, 25 bp, Homo sapien
tggaccaaatgggaccacttctgct

SEQ ID NO: 4172297 - DNA, 25 bp, Homo sapien
ttggaccaaatgggaccacttctgc

SEQ ID NO: 4172298 - DNA, 25 bp, Homo sapien
ggaccaaatgggaccacttctgctt

SEQ ID NO: 4172299 - DNA, 25 bp, Homo sapien
gaaggctgtggagtttgacttcagc

SEQ ID NO: 4172300 - DNA, 25 bp, Homo sapien
aggctgtggagtttgacttcagcat

SEQ ID NO: 4172301 - DNA, 25 bp, Homo sapien
cttcggcaaaatggtgaaggctgtg

SEQ ID NO: 4172302 - DNA, 25 bp, Homo sapien
ggtgaaggctgtggagtttgacttc

SEQ ID NO: 4172303 - DNA, 25 bp, Homo sapien
aaaaccttcgttcatctgcactata

SEQ ID NO: 4172304 - DNA, 25 bp, Homo sapien
aacaccaaggccaatgcccttgtac

SEQ ID NO: 4172305 - DNA, 25 bp, Homo sapien
tttaggataactacattgcatcccc

SEQ ID NO: 4172306 - DNA, 25 bp, Homo sapien
gccttttttaggataactacattgc

SEQ ID NO: 4172307 - DNA, 25 bp, Homo sapien
tttctattacgccaatggtttgctt

SEQ ID NO: 4172308 - DNA, 25 bp, Homo sapien
gattatttctattacgccaatggtt

SEQ ID NO: 4172309 - DNA, 25 bp, Homo sapien
tgtaggatgatatctgattatttct

SEQ ID NO: 4172310 - DNA, 25 bp, Homo sapien
gaaagcctgatcttcatttcttgct

SEQ ID NO: 4172311 - DNA, 25 bp, Homo sapien
ttcactcttccctcgagaggagcaa

SEQ ID NO: 4172312 - DNA, 25 bp, Homo sapien
ttgggcatcattggaccctcttctt

SEQ ID NO: 4172313 - DNA, 25 bp, Homo sapien
ggctcttagtcattctctcattggg

SEQ ID NO: 4172314 - DNA, 25 bp, Homo sapien
cacaatagtgcgctgattaatatca

SEQ ID NO: 4172315 - DNA, 25 bp, Homo sapien
tactgtggcccaatcttcaccctgg

SEQ ID NO: 4172316 - DNA, 25 bp, Homo sapien
taatgaagtgcctcaagctaccctg

SEQ ID NO: 4172317 - DNA, 25 bp, Homo sapien
gaggttgtgtcctccctagtagaga

SEQ ID NO: 4172318 - DNA, 25 bp, Homo sapien
tgacagtaacaaggtatccccgcct

SEQ ID NO: 4172319 - DNA, 25 bp, Homo sapien
ttgttgattttgaagcttgaatcat

SEQ ID NO: 4172320 - DNA, 25 bp, Homo sapien
tgttcttaggttgagagtaacttac

SEQ ID NO: 4172321 - DNA, 25 bp, Homo sapien
tcatgttcttaggttgagagtaact

SEQ ID NO: 4172322 - DNA, 25 bp, Homo sapien
atgttcttaggttgagagtaactta

SEQ ID NO: 4172323 - DNA, 25 bp, Homo sapien
catgttcttaggttgagagtaactt

SEQ ID NO: 4172324 - DNA, 25 bp, Homo sapien
ttcgtgcatatttgttgcacaaaac

SEQ ID NO: 4172325 - DNA, 25 bp, Homo sapien
caaggccgtaattccatttcgtgca

SEQ ID NO: 4172326 - DNA, 25 bp, Homo sapien
tcattatcccctagctgtttggagg

SEQ ID NO: 4172327 - DNA, 25 bp, Homo sapien
tgtgattggagaacacaaggccgta

SEQ ID NO: 4172328 - DNA, 25 bp, Homo sapien
tcttccaaggttccgaggtacgata

SEQ ID NO: 4172329 - DNA, 25 bp, Homo sapien
cgataatgagagaacagactgaacg

SEQ ID NO: 4172330 - DNA, 25 bp, Homo sapien
cagactgaacgaatgctcttttcat

SEQ ID NO: 4172331 - DNA, 25 bp, Homo sapien
tccgaggtacgataatgagagaaca

SEQ ID NO: 4172332 - DNA, 25 bp, Homo sapien
tattcctaatgcttgcattgcccac

SEQ ID NO: 4172333 - DNA, 25 bp, Homo sapien
gaggcctcaatgagaattattccta

SEQ ID NO: 4172334 - DNA, 25 bp, Homo sapien
attattcctaatgcttgcattgccc

SEQ ID NO: 4172335 - DNA, 25 bp, Homo sapien
actgaggcctcaatgagaattattc

SEQ ID NO: 4172336 - DNA, 25 bp, Homo sapien
ctctcaatgagcagggaactgtggg

SEQ ID NO: 4172337 - DNA, 25 bp, Homo sapien
ggtttgagtcttgctcattcatttg

SEQ ID NO: 4172338 - DNA, 25 bp, Homo sapien
tggctttgtaggaggtttgagtctt

SEQ ID NO: 4172339 - DNA, 25 bp, Homo sapien
tctcaatgagcagggaactgtgggc

SEQ ID NO: 4172340 - DNA, 25 bp, Homo sapien
ctggcttatagagttaagttgtctc

SEQ ID NO: 4172341 - DNA, 25 bp, Homo sapien
ggcttatagagttaagttgtctcag

SEQ ID NO: 4172342 - DNA, 25 bp, Homo sapien
cttatagagttaagttgtctcagga

SEQ ID NO: 4172343 - DNA, 25 bp, Homo sapien
gcttatagagttaagttgtctcagg

SEQ ID NO: 4172344 - DNA, 25 bp, Homo sapien
tgtccacgggtagcccagaacctta

SEQ ID NO: 4172345 - DNA, 25 bp, Homo sapien
acagaagctgtccacgggtagccca

SEQ ID NO: 4172346 - DNA, 25 bp, Homo sapien
tagcccagaaccttaatgagtatga

SEQ ID NO: 4172347 - DNA, 25 bp, Homo sapien
taatgagtatgaggtgaggctccat

SEQ ID NO: 4172348 - DNA, 25 bp, Homo sapien
cagctcagagctgtccctgaactga

SEQ ID NO: 4172349 - DNA, 25 bp, Homo sapien
caggaccccagctcagagctgtccc

SEQ ID NO: 4172350 - DNA, 25 bp, Homo sapien
gtccctgaactgagatttttgttgt

SEQ ID NO: 4172351 - DNA, 25 bp, Homo sapien
agctgtccctgaactgagatttttg

SEQ ID NO: 4172352 - DNA, 25 bp, Homo sapien
ttttcagacctgtctgacaggggaa

SEQ ID NO: 4172353 - DNA, 25 bp, Homo sapien
ctagtctcgggtctggatgttttca

SEQ ID NO: 4172354 - DNA, 25 bp, Homo sapien
tagtctcgggtctggatgttttcag

SEQ ID NO: 4172355 - DNA, 25 bp, Homo sapien
gacctgtctgacaggggaatgaaag

SEQ ID NO: 4172356 - DNA, 25 bp, Homo sapien
gagacataatttaaactgacagcag

SEQ ID NO: 4172357 - DNA, 25 bp, Homo sapien
agcagaaccaagcagtgtgaccttg

SEQ ID NO: 4172358 - DNA, 25 bp, Homo sapien
gtgaccttgccaggattcccacaca

SEQ ID NO: 4172359 - DNA, 25 bp, Homo sapien
acagcagaaccaagcagtgtgacct

SEQ ID NO: 4172360 - DNA, 25 bp, Homo sapien
ccttgttcaagcaaactctgcagat

SEQ ID NO: 4172361 - DNA, 25 bp, Homo sapien
tactccttgttcaagcaaactctgc

SEQ ID NO: 4172362 - DNA, 25 bp, Homo sapien
gcctactccttgttcaagcaaactc

SEQ ID NO: 4172363 - DNA, 25 bp, Homo sapien
tgttcaagcaaactctgcagatttc

SEQ ID NO: 4172364 - DNA, 25 bp, Homo sapien
cggaaccaccgcaacaacttcaact

SEQ ID NO: 4172365 - DNA, 25 bp, Homo sapien
cctcatgcagaaatgctgcccgatt

SEQ ID NO: 4172366 - DNA, 25 bp, Homo sapien
gctgcccgatttgtacatgcgttca

SEQ ID NO: 4172367 - DNA, 25 bp, Homo sapien
atcactactaccctcatgcagaaat

SEQ ID NO: 4172368 - DNA, 25 bp, Homo sapien
gaaaatcgaccttgtttgtacagaa

SEQ ID NO: 4172369 - DNA, 25 bp, Homo sapien
cacaactgcagtataatcttcagtg

SEQ ID NO: 4172370 - DNA, 25 bp, Homo sapien
gaagctgtcattcccctccattggc

SEQ ID NO: 4172371 - DNA, 25 bp, Homo sapien
agtgacaggagaaaatcgaccttgt

SEQ ID NO: 4172372 - DNA, 25 bp, Homo sapien
gagtgtaattcaaatgcagggccag

SEQ ID NO: 4172373 - DNA, 25 bp, Homo sapien
tcttctatggaaacatgactgggct

SEQ ID NO: 4172374 - DNA, 25 bp, Homo sapien
gatccactcccaattcgttctgcgg

SEQ ID NO: 4172375 - DNA, 25 bp, Homo sapien
tgaattctaaggctggatccactcc

SEQ ID NO: 4172376 - DNA, 25 bp, Homo sapien
ctctgataatcttctgcaattatac

SEQ ID NO: 4172377 - DNA, 25 bp, Homo sapien
aaaggtctatgaattcctggcgtct

SEQ ID NO: 4172378 - DNA, 25 bp, Homo sapien
ctggcgtcttggaagaagccttttg

SEQ ID NO: 4172379 - DNA, 25 bp, Homo sapien
gtattgtaggtcgaggagtctctga

SEQ ID NO: 4172380 - DNA, 25 bp, Homo sapien
tacatagaaggaagcctaacattca

SEQ ID NO: 4172381 - DNA, 25 bp, Homo sapien
acctctgccaatacacactcataca

SEQ ID NO: 4172382 - DNA, 25 bp, Homo sapien
tcagctttattacctctgccaatac

SEQ ID NO: 4172383 - DNA, 25 bp, Homo sapien
ttaagtagtcaggataacagccaca

SEQ ID NO: 4172384 - DNA, 25 bp, Homo sapien
ccgatgtttaccagcagcaacactg

SEQ ID NO: 4172385 - DNA, 25 bp, Homo sapien
cagccacaacagaggaccattctag

SEQ ID NO: 4172386 - DNA, 25 bp, Homo sapien
tctagaaccagagctatccgatgtt

SEQ ID NO: 4172387 - DNA, 25 bp, Homo sapien
caggcatagcgggtagctcagctcc

SEQ ID NO: 4172388 - DNA, 25 bp, Homo sapien
tgaacacgggcatgcccacgcatat

SEQ ID NO: 4172389 - DNA, 25 bp, Homo sapien
aggatcccctgaacacgggcatgcc

SEQ ID NO: 4172390 - DNA, 25 bp, Homo sapien
cccattgacaggcatagcgggtagc

SEQ ID NO: 4172391 - DNA, 25 bp, Homo sapien
cttggggaacaggaaagcacaagga

SEQ ID NO: 4172392 - DNA, 25 bp, Homo sapien
agcacaaggagctttctggttctga

SEQ ID NO: 4172393 - DNA, 25 bp, Homo sapien
aaagcacaaggagctttctggttct

SEQ ID NO: 4172394 - DNA, 25 bp, Homo sapien
ggaaagcacaaggagctttctggtt

SEQ ID NO: 4172395 - DNA, 25 bp, Homo sapien
tctggctttaccctctatgaggtct

SEQ ID NO: 4172396 - DNA, 25 bp, Homo sapien
ttattggcttcacaagtggatctgg

SEQ ID NO: 4172397 - DNA, 25 bp, Homo sapien
tggctttaccctctatgaggtctgc

SEQ ID NO: 4172398 - DNA, 25 bp, Homo sapien
tattggcttcacaagtggatctggc

SEQ ID NO: 4172399 - DNA, 25 bp, Homo sapien
tgtgactaccccattgactggcttg

SEQ ID NO: 4172400 - DNA, 25 bp, Homo sapien
caccattgacttggcgggacttacc

SEQ ID NO: 4172401 - DNA, 25 bp, Homo sapien
gagcttcagttaaacccatgccgca

SEQ ID NO: 4172402 - DNA, 25 bp, Homo sapien
gcccttgccagttggtgagcttcag

SEQ ID NO: 4172403 - DNA, 25 bp, Homo sapien
agaacctttactcaaatcccaagag

SEQ ID NO: 4172404 - DNA, 25 bp, Homo sapien
caagcaatatagaacctttactcaa

SEQ ID NO: 4172405 - DNA, 25 bp, Homo sapien
caactttctgactatagagtttctt

SEQ ID NO: 4172406 - DNA, 25 bp, Homo sapien
ttcaaaagtccaagcaatatagaac

SEQ ID NO: 4172407 - DNA, 25 bp, Homo sapien
ttcttgattttccttgattgagcga

SEQ ID NO: 4172408 - DNA, 25 bp, Homo sapien
ttgaagcttgacaccagcttcttga

SEQ ID NO: 4172409 - DNA, 25 bp, Homo sapien
gaagcttgacaccagcttcttgatt

SEQ ID NO: 4172410 - DNA, 25 bp, Homo sapien
ccagcttcttgattttccttgattg

SEQ ID NO: 4172411 - DNA, 25 bp, Homo sapien
tccatggatgatagtcctcccctgc

SEQ ID NO: 4172412 - DNA, 25 bp, Homo sapien
ttgagtgacattaaatcatatgctc

SEQ ID NO: 4172413 - DNA, 25 bp, Homo sapien
gctgttttcaatggagtacttctgg

SEQ ID NO: 4172414 - DNA, 25 bp, Homo sapien
atgaacttggcatgtttctcagagc

SEQ ID NO: 4172415 - DNA, 25 bp, Homo sapien
gagaagagggcagatggattctcat

SEQ ID NO: 4172416 - DNA, 25 bp, Homo sapien
ttgtagcccctgcatgatcaaacag

SEQ ID NO: 4172417 - DNA, 25 bp, Homo sapien
gtcactcagacagtgctcagcagct

SEQ ID NO: 4172418 - DNA, 25 bp, Homo sapien
acaagttctttgtgtcgaaggcctt

SEQ ID NO: 4172419 - DNA, 25 bp, Homo sapien
cagctgtctgtcctatttgttaaac

SEQ ID NO: 4172420 - DNA, 25 bp, Homo sapien
tttaaccatgtctcgtaggactgca

SEQ ID NO: 4172421 - DNA, 25 bp, Homo sapien
tagtcctcatgcgaataataagtac

SEQ ID NO: 4172422 - DNA, 25 bp, Homo sapien
gacttgtggaggaatggtccttgat

SEQ ID NO: 4172423 - DNA, 25 bp, Homo sapien
taggactgcatatgctaaaaccaga

SEQ ID NO: 4172424 - DNA, 25 bp, Homo sapien
ttgattctggattaacccaggaacc

SEQ ID NO: 4172425 - DNA, 25 bp, Homo sapien
tggagccatcatggggttgtcaaga

SEQ ID NO: 4172426 - DNA, 25 bp, Homo sapien
tggattaacccaggaaccaagagaa

SEQ ID NO: 4172427 - DNA, 25 bp, Homo sapien
ggttgtcaagaggtatcataccaag

SEQ ID NO: 4172428 - DNA, 25 bp, Homo sapien
tctgtccacagtcctttcagtagca

SEQ ID NO: 4172429 - DNA, 25 bp, Homo sapien
caatcatctccggtgtggctgatag

SEQ ID NO: 4172430 - DNA, 25 bp, Homo sapien
tgtggctgataggtggctctgtcac

SEQ ID NO: 4172431 - DNA, 25 bp, Homo sapien
tcagtagcaatagaagattcagccc

SEQ ID NO: 4172432 - DNA, 25 bp, Homo sapien
tcccaagtctatattcattgtggct

SEQ ID NO: 4172433 - DNA, 25 bp, Homo sapien
catcactatcttcagatcttagatc

SEQ ID NO: 4172434 - DNA, 25 bp, Homo sapien
tgtggctatcattgtcatcctggtt

SEQ ID NO: 4172435 - DNA, 25 bp, Homo sapien
catcaccattatcatgttcggcaac

SEQ ID NO: 4172436 - DNA, 25 bp, Homo sapien
tgtcatcacacctggaggtactgga

SEQ ID NO: 4172437 - DNA, 25 bp, Homo sapien
ctctgagggattcctgagatgcctg

SEQ ID NO: 4172438 - DNA, 25 bp, Homo sapien
gatggaatgctctgagggattcctg

SEQ ID NO: 4172439 - DNA, 25 bp, Homo sapien
tcatcacacctggaggtactggatg

SEQ ID NO: 4172440 - DNA, 25 bp, Homo sapien
ttccatatgaagttgacccatgatg

SEQ ID NO: 4172441 - DNA, 25 bp, Homo sapien
ccatatgaagttgacccatgatgtg

SEQ ID NO: 4172442 - DNA, 25 bp, Homo sapien
ttttccatatgaagttgacccatga

SEQ ID NO: 4172443 - DNA, 25 bp, Homo sapien
gtttttccatatgaagttgacccat

SEQ ID NO: 4172444 - DNA, 25 bp, Homo sapien
ccttctagtacagggctagggaaat

SEQ ID NO: 4172445 - DNA, 25 bp, Homo sapien
tctgtgataggtgctcgggtaagga

SEQ ID NO: 4172446 - DNA, 25 bp, Homo sapien
aatttttatcccaacagatgtcaca

SEQ ID NO: 4172447 - DNA, 25 bp, Homo sapien
gtgccatagactgtagtgcctctga

SEQ ID NO: 4172448 - DNA, 25 bp, Homo sapien
ctgagttactctttcatgtgcatac

SEQ ID NO: 4172449 - DNA, 25 bp, Homo sapien
ctttcatgtgcatactttatttcca

SEQ ID NO: 4172450 - DNA, 25 bp, Homo sapien
gttactctttcatgtgcatacttta

SEQ ID NO: 4172451 - DNA, 25 bp, Homo sapien
ggactgagttactctttcatgtgca

SEQ ID NO: 4172452 - DNA, 25 bp, Homo sapien
ccaaaatgtgtgcatcgaggcataa

SEQ ID NO: 4172453 - DNA, 25 bp, Homo sapien
caaaatgtgtgcatcgaggcataac

SEQ ID NO: 4172454 - DNA, 25 bp, Homo sapien
aaagggtcctgtcttgaccaaaatg

SEQ ID NO: 4172455 - DNA, 25 bp, Homo sapien
accaaaatgtgtgcatcgaggcata

SEQ ID NO: 4172456 - DNA, 25 bp, Homo sapien
caggaagaaagaggagggaatgctt

SEQ ID NO: 4172457 - DNA, 25 bp, Homo sapien
ggaagaaagaggagggaatgcttac

SEQ ID NO: 4172458 - DNA, 25 bp, Homo sapien
accaggaagaaagaggagggaatgc

SEQ ID NO: 4172459 - DNA, 25 bp, Homo sapien
ctaccaggaagaaagaggagggaat

SEQ ID NO: 4172460 - DNA, 25 bp, Homo sapien
tactgtcagattcaaggtcctgatc

SEQ ID NO: 4172461 - DNA, 25 bp, Homo sapien
cctactgtcagattcaaggtcctga

SEQ ID NO: 4172462 - DNA, 25 bp, Homo sapien
gtcagattcaaggtcctgatcaggg

SEQ ID NO: 4172463 - DNA, 25 bp, Homo sapien
cctgatcaggggtctctggttgatg

SEQ ID NO: 4172464 - DNA, 25 bp, Homo sapien
ttcactatatcagcttcaccaccag

SEQ ID NO: 4172465 - DNA, 25 bp, Homo sapien
gggacagtatgtatagcagctcctt

SEQ ID NO: 4172466 - DNA, 25 bp, Homo sapien
gctccttcactatatcagcttcacc

SEQ ID NO: 4172467 - DNA, 25 bp, Homo sapien
catgggacagtatgtatagcagctc

SEQ ID NO: 4172468 - DNA, 25 bp, Homo sapien
tagaatgctaccactgataactgac

SEQ ID NO: 4172469 - DNA, 25 bp, Homo sapien
ttagaatgctaccactgataactga

SEQ ID NO: 4172470 - DNA, 25 bp, Homo sapien
gtactgcactggaccaactgtgaaa

SEQ ID NO: 4172471 - DNA, 25 bp, Homo sapien
ttgtacaatgaggaagcactctctg

SEQ ID NO: 4172472 - DNA, 25 bp, Homo sapien
agcctcattcttcatggtgtactgc

SEQ ID NO: 4172473 - DNA, 25 bp, Homo sapien
aactgtgaaatcttgtacaatgagg

SEQ ID NO: 4172474 - DNA, 25 bp, Homo sapien
ttgcaaagctaatgcccaggcaccc

SEQ ID NO: 4172475 - DNA, 25 bp, Homo sapien
gcctctgacagatctggctcagtgc

SEQ ID NO: 4172476 - DNA, 25 bp, Homo sapien
tcagtgctttctgtacctgtggagc

SEQ ID NO: 4172477 - DNA, 25 bp, Homo sapien
tctgtacctgtggagccaacttgca

SEQ ID NO: 4172478 - DNA, 25 bp, Homo sapien
agacatgtctatggtcaccagcagc

SEQ ID NO: 4172479 - DNA, 25 bp, Homo sapien
acatgtctatggtcaccagcagctg

SEQ ID NO: 4172480 - DNA, 25 bp, Homo sapien
gacatgtctatggtcaccagcagct

SEQ ID NO: 4172481 - DNA, 25 bp, Homo sapien
gagacatgtctatggtcaccagcag

SEQ ID NO: 4172482 - DNA, 25 bp, Homo sapien
tcaccataaacctccaaagcatctg

SEQ ID NO: 4172483 - DNA, 25 bp, Homo sapien
ccacattggtctactactatgttta

SEQ ID NO: 4172484 - DNA, 25 bp, Homo sapien
aagcatctggcaaaaggtacttgcc

SEQ ID NO: 4172485 - DNA, 25 bp, Homo sapien
ggtacttgccattaccacattggtc

SEQ ID NO: 4172486 - DNA, 25 bp, Homo sapien
tgctggaagcacttttaagggaaac

SEQ ID NO: 4172487 - DNA, 25 bp, Homo sapien
ttgggtagtactgcatgctggaagc

SEQ ID NO: 4172488 - DNA, 25 bp, Homo sapien
tttgggtagtactgcatgctggaag

SEQ ID NO: 4172489 - DNA, 25 bp, Homo sapien
tactgcatgctggaagcacttttaa

SEQ ID NO: 4172490 - DNA, 25 bp, Homo sapien
gagagcgtcattaacatatttttgc

SEQ ID NO: 4172491 - DNA, 25 bp, Homo sapien
aagtacagataattgaatggaattg

SEQ ID NO: 4172492 - DNA, 25 bp, Homo sapien
gaaatcaggaggaaaagtacagata

SEQ ID NO: 4172493 - DNA, 25 bp, Homo sapien
taacgtcctgaagtcatggaaatca

SEQ ID NO: 4172494 - DNA, 25 bp, Homo sapien
tgtgcaggctgttaccaaggtttga

SEQ ID NO: 4172495 - DNA, 25 bp, Homo sapien
caaggtttgatgtgtttgacggctc

SEQ ID NO: 4172496 - DNA, 25 bp, Homo sapien
cccataggacttaggaacatgtttg

SEQ ID NO: 4172497 - DNA, 25 bp, Homo sapien
tccgtgtgacatgacatcccatagg

SEQ ID NO: 4172498 - DNA, 25 bp, Homo sapien
cacgcgttcctcaccatggctttga

SEQ ID NO: 4172499 - DNA, 25 bp, Homo sapien
cagggttccaactctatctcagaca

SEQ ID NO: 4172500 - DNA, 25 bp, Homo sapien
tgccagtgattggatccagtgcctg

SEQ ID NO: 4172501 - DNA, 25 bp, Homo sapien
tgatagaggacactgcatctgagat

SEQ ID NO: 4172502 - DNA, 25 bp, Homo sapien
catatagagcggcactggagatttt

SEQ ID NO: 4172503 - DNA, 25 bp, Homo sapien
tgtcttactaagctggttttcctgt

SEQ ID NO: 4172504 - DNA, 25 bp, Homo sapien
caggccatctgtctgcctaggccag

SEQ ID NO: 4172505 - DNA, 25 bp, Homo sapien
ttttcctatgcctggttgttggtag

SEQ ID NO: 4172506 - DNA, 25 bp, Homo sapien
ggaaaggactctgcaatgacggtaa

SEQ ID NO: 4172507 - DNA, 25 bp, Homo sapien
gaaaggactctgcaatgacggtaat

SEQ ID NO: 4172508 - DNA, 25 bp, Homo sapien
tggaaaggactctgcaatgacggta

SEQ ID NO: 4172509 - DNA, 25 bp, Homo sapien
aaggactctgcaatgacggtaattt

SEQ ID NO: 4172510 - DNA, 25 bp, Homo sapien
tttgtgtcacccaggaacatgcagg

SEQ ID NO: 4172511 - DNA, 25 bp, Homo sapien
ttgtgtcacccaggaacatgcaggt

SEQ ID NO: 4172512 - DNA, 25 bp, Homo sapien
tgtgtcacccaggaacatgcaggta

SEQ ID NO: 4172513 - DNA, 25 bp, Homo sapien
cctttgtgtcacccaggaacatgca

SEQ ID NO: 4172514 - DNA, 25 bp, Homo sapien
agcgactgatgtccaaaactgtcca

SEQ ID NO: 4172515 - DNA, 25 bp, Homo sapien
tattagcgactgatgtccaaaactg

SEQ ID NO: 4172516 - DNA, 25 bp, Homo sapien
ttagtattagcgactgatgtccaaa

SEQ ID NO: 4172517 - DNA, 25 bp, Homo sapien
tgaaattagtattagcgactgatgt

SEQ ID NO: 4172518 - DNA, 25 bp, Homo sapien
tctgtgcatgtcattacatggccac

SEQ ID NO: 4172519 - DNA, 25 bp, Homo sapien
cacttgtcaccctggaaaacttctg

SEQ ID NO: 4172520 - DNA, 25 bp, Homo sapien
cgtatactcacaacatctgtgcatg

SEQ ID NO: 4172521 - DNA, 25 bp, Homo sapien
gggtgacccagaggtgcctcgtata

SEQ ID NO: 4172522 - DNA, 25 bp, Homo sapien
tttatgccctctccaagagtggtca

SEQ ID NO: 4172523 - DNA, 25 bp, Homo sapien
ccagcactgtgaaattcagaatgca

SEQ ID NO: 4172524 - DNA, 25 bp, Homo sapien
ttttttatgccctctccaagagtgg

SEQ ID NO: 4172525 - DNA, 25 bp, Homo sapien
gcagttatctatgacttgaaaatca

SEQ ID NO: 4172526 - DNA, 25 bp, Homo sapien
attttgcactttccaccttctgcca

SEQ ID NO: 4172527 - DNA, 25 bp, Homo sapien
tctttgctggctgtcagactctgaa

SEQ ID NO: 4172528 - DNA, 25 bp, Homo sapien
gactctgaatgagcctgtttcattt

SEQ ID NO: 4172529 - DNA, 25 bp, Homo sapien
catctctgctctttgctggctgtca

SEQ ID NO: 4172530 - DNA, 25 bp, Homo sapien
ttctgcagatcacctagctcctgac

SEQ ID NO: 4172531 - DNA, 25 bp, Homo sapien
tcctgactgatcatggcagacctca

SEQ ID NO: 4172532 - DNA, 25 bp, Homo sapien
ggcagacctcaagcagacactgaag

SEQ ID NO: 4172533 - DNA, 25 bp, Homo sapien
tcacctagctcctgactgatcatgg

SEQ ID NO: 4172534 - DNA, 25 bp, Homo sapien
gcatggccgattgttggagaatgtt

SEQ ID NO: 4172535 - DNA, 25 bp, Homo sapien
gcaggtggttggcatggccgattgt

SEQ ID NO: 4172536 - DNA, 25 bp, Homo sapien
tggagaatgttgactgagtatctac

SEQ ID NO: 4172537 - DNA, 25 bp, Homo sapien
tgactgagtatctactgtctgtaag

SEQ ID NO: 4172538 - DNA, 25 bp, Homo sapien
caagcacacaagcagttacgcaaga

SEQ ID NO: 4172539 - DNA, 25 bp, Homo sapien
gggtctgagcaagcaccttggtcaa

SEQ ID NO: 4172540 - DNA, 25 bp, Homo sapien
tactggttgagctctatgggcttgt

SEQ ID NO: 4172541 - DNA, 25 bp, Homo sapien
catttctccattgctctgatgctga

SEQ ID NO: 4172542 - DNA, 25 bp, Homo sapien
tagccactcagggaggcatctattt

SEQ ID NO: 4172543 - DNA, 25 bp, Homo sapien
aagagagcacactgatattgatggg

SEQ ID NO: 4172544 - DNA, 25 bp, Homo sapien
ttcatgaacaacagcacgtgtttcc

SEQ ID NO: 4172545 - DNA, 25 bp, Homo sapien
caacagcacgtgtttcctcagtcat

SEQ ID NO: 4172546 - DNA, 25 bp, Homo sapien
gatggttctaccctaattttgcaga

SEQ ID NO: 4172547 - DNA, 25 bp, Homo sapien
cctaattttgcagatcttgggacca

SEQ ID NO: 4172548 - DNA, 25 bp, Homo sapien
gatcttgggaccaatctcacttttc

SEQ ID NO: 4172549 - DNA, 25 bp, Homo sapien
catggatctcccgatggttctaccc

SEQ ID NO: 4172550 - DNA, 25 bp, Homo sapien
gtttgctgagtccatgtcagacatc

SEQ ID NO: 4172551 - DNA, 25 bp, Homo sapien
aagcaaaagtgtttgctgagtccat

SEQ ID NO: 4172552 - DNA, 25 bp, Homo sapien
atttccatccctctatcaacaaaag

SEQ ID NO: 4172553 - DNA, 25 bp, Homo sapien
gttcacaaaaatggctacagtattt

SEQ ID NO: 4172554 - DNA, 25 bp, Homo sapien
cagtccggatgattgtgcaggttgc

SEQ ID NO: 4172555 - DNA, 25 bp, Homo sapien
ttgtgcaggttgcgtgaaggctcat

SEQ ID NO: 4172556 - DNA, 25 bp, Homo sapien
tctgggctgactgtcagtccggatg

SEQ ID NO: 4172557 - DNA, 25 bp, Homo sapien
gctgactgtcagtccggatgattgt

SEQ ID NO: 4172558 - DNA, 25 bp, Homo sapien
gccagtaacaattgttgctattacc

SEQ ID NO: 4172559 - DNA, 25 bp, Homo sapien
gatctgccgtgatgaatgccagtaa

SEQ ID NO: 4172560 - DNA, 25 bp, Homo sapien
gatgaatgccagtaacaattgttgc

SEQ ID NO: 4172561 - DNA, 25 bp, Homo sapien
caacacttgatttgatctgccgtga

SEQ ID NO: 4172562 - DNA, 25 bp, Homo sapien
tgggtgctgggctttttcctgtccc

SEQ ID NO: 4172563 - DNA, 25 bp, Homo sapien
agcgtctgggtgctgggctttttcc

SEQ ID NO: 4172564 - DNA, 25 bp, Homo sapien
cacagcgtctgggtgctgggctttt

SEQ ID NO: 4172565 - DNA, 25 bp, Homo sapien
cgtctgggtgctgggctttttcctg

SEQ ID NO: 4172566 - DNA, 25 bp, Homo sapien
gcttgcgctcccgaagaggagagca

SEQ ID NO: 4172567 - DNA, 25 bp, Homo sapien
aaggagcggcgcgttttactagaga

SEQ ID NO: 4172568 - DNA, 25 bp, Homo sapien
aagaggcttgtctgtccgggttgcc

SEQ ID NO: 4172569 - DNA, 25 bp, Homo sapien
caaggctgttctgggatccggccgt

SEQ ID NO: 4172570 - DNA, 25 bp, Homo sapien
ggaggataggaagcaggaaagcggg

SEQ ID NO: 4172571 - DNA, 25 bp, Homo sapien
gaggataggaagcaggaaagcggga

SEQ ID NO: 4172572 - DNA, 25 bp, Homo sapien
agggagaggaggataggaagcagga

SEQ ID NO: 4172573 - DNA, 25 bp, Homo sapien
gataggaagcaggaaagcgggagag

SEQ ID NO: 4172574 - DNA, 25 bp, Homo sapien
gcgttggatagacttggcacagaca

SEQ ID NO: 4172575 - DNA, 25 bp, Homo sapien
gcgatgccgttctgtgagcactaga

SEQ ID NO: 4172576 - DNA, 25 bp, Homo sapien
tcggttcgcggtcctataaggcgct

SEQ ID NO: 4172577 - DNA, 25 bp, Homo sapien
agacacacagcgaagaagagccgcg

SEQ ID NO: 4172578 - DNA, 25 bp, Homo sapien
aaggatttaagaaggcaagagcttc

SEQ ID NO: 4172579 - DNA, 25 bp, Homo sapien
caaggatttaagaaggcaagagctt

SEQ ID NO: 4172580 - DNA, 25 bp, Homo sapien
tcaaggatttaagaaggcaagagct

SEQ ID NO: 4172581 - DNA, 25 bp, Homo sapien
aaacatcttgggctggaatcaacac

SEQ ID NO: 4172582 - DNA, 25 bp, Homo sapien
catcttgggctggaatcaacacagg

SEQ ID NO: 4172583 - DNA, 25 bp, Homo sapien
gatgtcaggtcctgctgtagtactc

SEQ ID NO: 4172584 - DNA, 25 bp, Homo sapien
ggtcctgctgtagtactctacttac

SEQ ID NO: 4172585 - DNA, 25 bp, Homo sapien
ggctcctcagctcagggaacagttg

SEQ ID NO: 4172586 - DNA, 25 bp, Homo sapien
gctgtggctcctcagctcagggaac

SEQ ID NO: 4172587 - DNA, 25 bp, Homo sapien
tggctcctcagctcagggaacagtt

SEQ ID NO: 4172588 - DNA, 25 bp, Homo sapien
tgtggctcctcagctcagggaacag

SEQ ID NO: 4172589 - DNA, 25 bp, Homo sapien
aaagttcgaatgtctgttgccttca

SEQ ID NO: 4172590 - DNA, 25 bp, Homo sapien
ggaactctaaagttcgaatgtctgt

SEQ ID NO: 4172591 - DNA, 25 bp, Homo sapien
tgtctggtggaactctaaagttcga

SEQ ID NO: 4172592 - DNA, 25 bp, Homo sapien
tctaaagttcgaatgtctgttgcct

SEQ ID NO: 4172593 - DNA, 25 bp, Homo sapien
cacgtagtctactaaggttagggtg

SEQ ID NO: 4172594 - DNA, 25 bp, Homo sapien
tagatctacccggaccagtaagagt

SEQ ID NO: 4172595 - DNA, 25 bp, Homo sapien
tatcactcacgtagtctactaaggt

SEQ ID NO: 4172596 - DNA, 25 bp, Homo sapien
ctacccggaccagtaagagtatcac

SEQ ID NO: 4172597 - DNA, 25 bp, Homo sapien
gtgtgccttccttgcgtgcacaggg

SEQ ID NO: 4172598 - DNA, 25 bp, Homo sapien
tctagcattatcctgtgaatctgcc

SEQ ID NO: 4172599 - DNA, 25 bp, Homo sapien
caggggaagccttttgttctagcat

SEQ ID NO: 4172600 - DNA, 25 bp, Homo sapien
cttgatgtgtgccttccttgcgtgc

SEQ ID NO: 4172601 - DNA, 25 bp, Homo sapien
tttcatttgctcggtgtgaatagat

SEQ ID NO: 4172602 - DNA, 25 bp, Homo sapien
atttcatttgctcggtgtgaataga

SEQ ID NO: 4172603 - DNA, 25 bp, Homo sapien
aatttcatttgctcggtgtgaatag

SEQ ID NO: 4172604 - DNA, 25 bp, Homo sapien
ttcatttgctcggtgtgaatagatc

SEQ ID NO: 4172605 - DNA, 25 bp, Homo sapien
tgaactgacagcatctcgaagcact

SEQ ID NO: 4172606 - DNA, 25 bp, Homo sapien
ggcgcacttcacctactctgtggag

SEQ ID NO: 4172607 - DNA, 25 bp, Homo sapien
caatctgaaggtaaaggctcatgac

SEQ ID NO: 4172608 - DNA, 25 bp, Homo sapien
gagtgtaaccggtcacgatggcgca

SEQ ID NO: 4172609 - DNA, 25 bp, Homo sapien
ctggcccaactttatgctttgattt

SEQ ID NO: 4172610 - DNA, 25 bp, Homo sapien
caagtcaccatggtctggcccaact

SEQ ID NO: 4172611 - DNA, 25 bp, Homo sapien
taccaagtcaccatggtctggccca

SEQ ID NO: 4172612 - DNA, 25 bp, Homo sapien
gtctggcccaactttatgctttgat

SEQ ID NO: 4172613 - DNA, 25 bp, Homo sapien
tgttagaccccactgccaatatggg

SEQ ID NO: 4172614 - DNA, 25 bp, Homo sapien
gatttggctgaacatccctctgctc

SEQ ID NO: 4172615 - DNA, 25 bp, Homo sapien
gagatgcatattccttgtacacgag

SEQ ID NO: 4172616 - DNA, 25 bp, Homo sapien
tgttgttatggttgttagaccccac

SEQ ID NO: 4172617 - DNA, 25 bp, Homo sapien
ccctcctcggttgcctcctgtgtca

SEQ ID NO: 4172618 - DNA, 25 bp, Homo sapien
aagagactagtctgtttctcagtag

SEQ ID NO: 4172619 - DNA, 25 bp, Homo sapien
tcagcaatgcctggaagagactagt

SEQ ID NO: 4172620 - DNA, 25 bp, Homo sapien
aacagcaactgttgttgttacctcc

SEQ ID NO: 4172621 - DNA, 25 bp, Homo sapien
ttgagtttgtgaactctggccgtag

SEQ ID NO: 4172622 - DNA, 25 bp, Homo sapien
gtttgtgaactctggccgtagaccc

SEQ ID NO: 4172623 - DNA, 25 bp, Homo sapien
tttgtgaactctggccgtagaccca

SEQ ID NO: 4172624 - DNA, 25 bp, Homo sapien
gagtttgtgaactctggccgtagac

SEQ ID NO: 4172625 - DNA, 25 bp, Homo sapien
gttgatgaagtgaatgaataagtga

SEQ ID NO: 4172626 - DNA, 25 bp, Homo sapien
ctgttgatgaagtgaatgaataagt

SEQ ID NO: 4172627 - DNA, 25 bp, Homo sapien
tgttgatgaagtgaatgaataagtg

SEQ ID NO: 4172628 - DNA, 25 bp, Homo sapien
gtgtaaagtaggtgtccatgtatat

SEQ ID NO: 4172629 - DNA, 25 bp, Homo sapien
actgacagctccttacaatctggcc

SEQ ID NO: 4172630 - DNA, 25 bp, Homo sapien
tcaggcctgaatgaggatgtttctt

SEQ ID NO: 4172631 - DNA, 25 bp, Homo sapien
cagacattagcatagctgcctgagc

SEQ ID NO: 4172632 - DNA, 25 bp, Homo sapien
caatctggccttttaatgcagtaga

SEQ ID NO: 4172633 - DNA, 25 bp, Homo sapien
ctccagttgctcgaattgctgtcat

SEQ ID NO: 4172634 - DNA, 25 bp, Homo sapien
ggtgattctgaacttagaagaaaga

SEQ ID NO: 4172635 - DNA, 25 bp, Homo sapien
cttcctccagttgctcgaattgctg

SEQ ID NO: 4172636 - DNA, 25 bp, Homo sapien
aaaaattccgggcttcataatctct

SEQ ID NO: 4172637 - DNA, 25 bp, Homo sapien
taaagttgcagatttcccggcttcc

SEQ ID NO: 4172638 - DNA, 25 bp, Homo sapien
gaacacatctaatggtcgatatgag

SEQ ID NO: 4172639 - DNA, 25 bp, Homo sapien
caggttgtgtctcactatctccaaa

SEQ ID NO: 4172640 - DNA, 25 bp, Homo sapien
tctccaaaccatctgtaaaactctc

SEQ ID NO: 4172641 - DNA, 25 bp, Homo sapien
tctcctgtgttctccttggatgcac

SEQ ID NO: 4172642 - DNA, 25 bp, Homo sapien
ctcctgtgttctccttggatgcaca

SEQ ID NO: 4172643 - DNA, 25 bp, Homo sapien
gtttaggcaaaattgcaatgaaatc

SEQ ID NO: 4172644 - DNA, 25 bp, Homo sapien
tctgtttaggcaaaattgcaatgaa

SEQ ID NO: 4172645 - DNA, 25 bp, Homo sapien
tttaggcaaaattgcaatgaaatct

SEQ ID NO: 4172646 - DNA, 25 bp, Homo sapien
ctgtttaggcaaaattgcaatgaaa

SEQ ID NO: 4172647 - DNA, 25 bp, Homo sapien
tccaaggggtccgaggaatcactca

SEQ ID NO: 4172648 - DNA, 25 bp, Homo sapien
cttctaggcgaatagtccccagagc

SEQ ID NO: 4172649 - DNA, 25 bp, Homo sapien
tccgaggaatcactcactcctggag

SEQ ID NO: 4172650 - DNA, 25 bp, Homo sapien
ctaggcgaatagtccccagagctgt

SEQ ID NO: 4172651 - DNA, 25 bp, Homo sapien
tgtgtttcagccaagtcctatgatg

SEQ ID NO: 4172652 - DNA, 25 bp, Homo sapien
taaggcccaagagctctacatttag

SEQ ID NO: 4172653 - DNA, 25 bp, Homo sapien
ggtggcaaatctagtcacactcgtg

SEQ ID NO: 4172654 - DNA, 25 bp, Homo sapien
tcctaggtgtgtccagagatgccat

SEQ ID NO: 4172655 - DNA, 25 bp, Homo sapien
tcaggttaatctccactttttccaa

SEQ ID NO: 4172656 - DNA, 25 bp, Homo sapien
ttccaaggctccagtagagtcatac

SEQ ID NO: 4172657 - DNA, 25 bp, Homo sapien
ctttttccaaggctccagtagagtc

SEQ ID NO: 4172658 - DNA, 25 bp, Homo sapien
ttcaggttaatctccactttttcca

SEQ ID NO: 4172659 - DNA, 25 bp, Homo sapien
gaaacttagcattatatatcaaccg

SEQ ID NO: 4172660 - DNA, 25 bp, Homo sapien
cagcttgtaagacacaaagtttctc

SEQ ID NO: 4172661 - DNA, 25 bp, Homo sapien
tatatcaaccgtagaaccagcttgt

SEQ ID NO: 4172662 - DNA, 25 bp, Homo sapien
cgtagaaccagcttgtaagacacaa

SEQ ID NO: 4172663 - DNA, 25 bp, Homo sapien
ctctccaggtcatgggttctcttga

SEQ ID NO: 4172664 - DNA, 25 bp, Homo sapien
ctcttgatttacctaaagtggacct

SEQ ID NO: 4172665 - DNA, 25 bp, Homo sapien
tggacctttgttctgaccagccctc

SEQ ID NO: 4172666 - DNA, 25 bp, Homo sapien
gttctcttgatttacctaaagtgga

SEQ ID NO: 4172667 - DNA, 25 bp, Homo sapien
ggcccaagtcaccacagtgactgta

SEQ ID NO: 4172668 - DNA, 25 bp, Homo sapien
gacagttctgtcataggagagctgc

SEQ ID NO: 4172669 - DNA, 25 bp, Homo sapien
caggataatactgggaggttgacaa

SEQ ID NO: 4172670 - DNA, 25 bp, Homo sapien
tgggcaggcccttgactcaggataa

SEQ ID NO: 4172671 - DNA, 25 bp, Homo sapien
cactgactcattccctcccttgctt

SEQ ID NO: 4172672 - DNA, 25 bp, Homo sapien
gcctaggacactctcgctatgtagc

SEQ ID NO: 4172673 - DNA, 25 bp, Homo sapien
ttgtatccgactgcctcactcactc

SEQ ID NO: 4172674 - DNA, 25 bp, Homo sapien
tcgctatgtagccactgactcattc

SEQ ID NO: 4172675 - DNA, 25 bp, Homo sapien
attgcagtcaggctgtctgccatcc

SEQ ID NO: 4172676 - DNA, 25 bp, Homo sapien
tcacgacattgcagtcaggctgtct

SEQ ID NO: 4172677 - DNA, 25 bp, Homo sapien
ctgcctcagcatctttcacgacatt

SEQ ID NO: 4172678 - DNA, 25 bp, Homo sapien
gggaatgactttgctgcatggttct

SEQ ID NO: 4172679 - DNA, 25 bp, Homo sapien
aatttctgcaaatgtgacatgtatc

SEQ ID NO: 4172680 - DNA, 25 bp, Homo sapien
tttccccagagagaatctttgaccg

SEQ ID NO: 4172681 - DNA, 25 bp, Homo sapien
gacatgtatcagtgttgggcagagc

SEQ ID NO: 4172682 - DNA, 25 bp, Homo sapien
gaatctttgaccgtggaggtgcttt

SEQ ID NO: 4172683 - DNA, 25 bp, Homo sapien
tgcttcagcgaggttggcttactct

SEQ ID NO: 4172684 - DNA, 25 bp, Homo sapien
tatcaagttctgtccctttggtgac

SEQ ID NO: 4172685 - DNA, 25 bp, Homo sapien
cgtgattcagcactactcgttttgc

SEQ ID NO: 4172686 - DNA, 25 bp, Homo sapien
tttttgacacccgagactgcctttc

SEQ ID NO: 4172687 - DNA, 25 bp, Homo sapien
ctggtgctcttatattcctgtggtt

SEQ ID NO: 4172688 - DNA, 25 bp, Homo sapien
tgaaaactaaggcccttgtctacca

SEQ ID NO: 4172689 - DNA, 25 bp, Homo sapien
aaactaaggcccttgtctaccacat

SEQ ID NO: 4172690 - DNA, 25 bp, Homo sapien
aaggcccttgtctaccacatagcag

SEQ ID NO: 4172691 - DNA, 25 bp, Homo sapien
actaaggcccttgtctaccacatag

SEQ ID NO: 4172692 - DNA, 25 bp, Homo sapien
atttagctttaggaaccttctgctt

SEQ ID NO: 4172693 - DNA, 25 bp, Homo sapien
agatagtgcccgagcgtaggaagac

SEQ ID NO: 4172694 - DNA, 25 bp, Homo sapien
gaagactgtaaggtggcctgaatga

SEQ ID NO: 4172695 - DNA, 25 bp, Homo sapien
ccttgtcatgtccaggaattctgcc

SEQ ID NO: 4172696 - DNA, 25 bp, Homo sapien
tctgccaaaactaggatgttgacct

SEQ ID NO: 4172697 - DNA, 25 bp, Homo sapien
ccactctgaaagcaatgtggatgga

SEQ ID NO: 4172698 - DNA, 25 bp, Homo sapien
tccagaatggactcctgtgatataa

SEQ ID NO: 4172699 - DNA, 25 bp, Homo sapien
gatggagtcgtctgctatctgagtg

SEQ ID NO: 4172700 - DNA, 25 bp, Homo sapien
gggagcttgagtgctccactctgaa

SEQ ID NO: 4172701 - DNA, 25 bp, Homo sapien
tgtttgggccattccagatttcccc

SEQ ID NO: 4172702 - DNA, 25 bp, Homo sapien
ttctgtttgggccattccagatttc

SEQ ID NO: 4172703 - DNA, 25 bp, Homo sapien
agatttcccctcacgctccagccct

SEQ ID NO: 4172704 - DNA, 25 bp, Homo sapien
ttgggccattccagatttcccctca

SEQ ID NO: 4172705 - DNA, 25 bp, Homo sapien
cacaggatttagaatcaggacaaca

SEQ ID NO: 4172706 - DNA, 25 bp, Homo sapien
tggaacctctgaagctgcatgcatt

SEQ ID NO: 4172707 - DNA, 25 bp, Homo sapien
gacaacaatcattggatatacctga

SEQ ID NO: 4172708 - DNA, 25 bp, Homo sapien
gtttatccatgttgagtcctcttaa

SEQ ID NO: 4172709 - DNA, 25 bp, Homo sapien
tatgtcccaactcccatattttcat

SEQ ID NO: 4172710 - DNA, 25 bp, Homo sapien
ggctgtaaaatatgtcccaactccc

SEQ ID NO: 4172711 - DNA, 25 bp, Homo sapien
tcaggagaaatgaagggaccactcc

SEQ ID NO: 4172712 - DNA, 25 bp, Homo sapien
caaagagggttgtggaaggttctca

SEQ ID NO: 4172713 - DNA, 25 bp, Homo sapien
cttctttataggaaagcctacttct

SEQ ID NO: 4172714 - DNA, 25 bp, Homo sapien
ctttataggaaagcctacttctcat

SEQ ID NO: 4172715 - DNA, 25 bp, Homo sapien
ttctttataggaaagcctacttctc

SEQ ID NO: 4172716 - DNA, 25 bp, Homo sapien
tctttataggaaagcctacttctca

SEQ ID NO: 4172717 - DNA, 25 bp, Homo sapien
aacagcatgaattgtggttagatta

SEQ ID NO: 4172718 - DNA, 25 bp, Homo sapien
gaattgtggttagattattactaga

SEQ ID NO: 4172719 - DNA, 25 bp, Homo sapien
gcatgaattgtggttagattattac

SEQ ID NO: 4172720 - DNA, 25 bp, Homo sapien
ataacagcatgaattgtggttagat

SEQ ID NO: 4172721 - DNA, 25 bp, Homo sapien
gacaggatagctttactgagtacaa

SEQ ID NO: 4172722 - DNA, 25 bp, Homo sapien
tgaaaccacaagcatagcagcagga

SEQ ID NO: 4172723 - DNA, 25 bp, Homo sapien
aattacccgtgtctgagaggagccc

SEQ ID NO: 4172724 - DNA, 25 bp, Homo sapien
cagcaggagtggatgaatggctcat

SEQ ID NO: 4172725 - DNA, 25 bp, Homo sapien
tgttggtttggggcacataaatgaa

SEQ ID NO: 4172726 - DNA, 25 bp, Homo sapien
cattttgttggtttggggcacataa

SEQ ID NO: 4172727 - DNA, 25 bp, Homo sapien
tttgttggtttggggcacataaatg

SEQ ID NO: 4172728 - DNA, 25 bp, Homo sapien
gttggtttggggcacataaatgaat

SEQ ID NO: 4172729 - DNA, 25 bp, Homo sapien
ttctgctcccaaatgcttcctgttg

SEQ ID NO: 4172730 - DNA, 25 bp, Homo sapien
gcttcctgttgctcccaaatgctgt

SEQ ID NO: 4172731 - DNA, 25 bp, Homo sapien
atgctgttaaacatgacacatacca

SEQ ID NO: 4172732 - DNA, 25 bp, Homo sapien
tgctgttaaacatgacacataccat

SEQ ID NO: 4172733 - DNA, 25 bp, Homo sapien
tgcctccaaggaaagattccactcg

SEQ ID NO: 4172734 - DNA, 25 bp, Homo sapien
caaatgggaagtgaagcacatgggt

SEQ ID NO: 4172735 - DNA, 25 bp, Homo sapien
gcacatgggtaacagcttccctggt

SEQ ID NO: 4172736 - DNA, 25 bp, Homo sapien
taatgtcctctgctatcccttctag

SEQ ID NO: 4172737 - DNA, 25 bp, Homo sapien
caggaccgctttcccagctgaagtc

SEQ ID NO: 4172738 - DNA, 25 bp, Homo sapien
gctcaaggcaggaccgctttcccag

SEQ ID NO: 4172739 - DNA, 25 bp, Homo sapien
caaggcaggaccgctttcccagctg

SEQ ID NO: 4172740 - DNA, 25 bp, Homo sapien
caggctcaaggcaggaccgctttcc

SEQ ID NO: 4172741 - DNA, 25 bp, Homo sapien
acagtctcagggctagctttttgtc

SEQ ID NO: 4172742 - DNA, 25 bp, Homo sapien
cagtctcagggctagctttttgtcc

SEQ ID NO: 4172743 - DNA, 25 bp, Homo sapien
caccacgtttagacatagagctgac

SEQ ID NO: 4172744 - DNA, 25 bp, Homo sapien
tgtaccagacacagccatagcaggt

SEQ ID NO: 4172745 - DNA, 25 bp, Homo sapien
gaaggaaggagacacttcaccacgt

SEQ ID NO: 4172746 - DNA, 25 bp, Homo sapien
tgcaggcagatccagtggtaggcac

SEQ ID NO: 4172747 - DNA, 25 bp, Homo sapien
gagccagacaagaggtactagctct

SEQ ID NO: 4172748 - DNA, 25 bp, Homo sapien
caagaggtactagctctgagaggta

SEQ ID NO: 4172749 - DNA, 25 bp, Homo sapien
cagaggtccgtgctgtcttgccagc

SEQ ID NO: 4172750 - DNA, 25 bp, Homo sapien
tcccctttgtagtgatggcttctgg

SEQ ID NO: 4172751 - DNA, 25 bp, Homo sapien
tatcaggatgaacgaactgcctttc

SEQ ID NO: 4172752 - DNA, 25 bp, Homo sapien
tcactgccgttagcctcagtagctc

SEQ ID NO: 4172753 - DNA, 25 bp, Homo sapien
cttcagccatccacttgggggaagc

SEQ ID NO: 4172754 - DNA, 25 bp, Homo sapien
gtagctctatcaggatgaacgaact

SEQ ID NO: 4172755 - DNA, 25 bp, Homo sapien
cacttggcggggtactgcagtcata

SEQ ID NO: 4172756 - DNA, 25 bp, Homo sapien
gggattccaagatcctgacagatgc

SEQ ID NO: 4172757 - DNA, 25 bp, Homo sapien
gggtactgcagtcataaacactccg

SEQ ID NO: 4172758 - DNA, 25 bp, Homo sapien
taaacactccgggattccaagatcc

SEQ ID NO: 4172759 - DNA, 25 bp, Homo sapien
tgcaatgctcacctcaaaaacagtg

SEQ ID NO: 4172760 - DNA, 25 bp, Homo sapien
gcaataggaggtatctttctgggtc

SEQ ID NO: 4172761 - DNA, 25 bp, Homo sapien
tttgcagcatagcaataggaggtat

SEQ ID NO: 4172762 - DNA, 25 bp, Homo sapien
tctgggtcatggcttgatgttgcag

SEQ ID NO: 4172763 - DNA, 25 bp, Homo sapien
tccatctctctaaattgggagcata

SEQ ID NO: 4172764 - DNA, 25 bp, Homo sapien
tggggaaagcaactggcaagtcaag

SEQ ID NO: 4172765 - DNA, 25 bp, Homo sapien
aagcaactggcaagtcaaggcaatg

SEQ ID NO: 4172766 - DNA, 25 bp, Homo sapien
gaaagcaactggcaagtcaaggcaa

SEQ ID NO: 4172767 - DNA, 25 bp, Homo sapien
ctgagtgaagccaggctagggtttt

SEQ ID NO: 4172768 - DNA, 25 bp, Homo sapien
tgttccaccgtgtctcagggacctg

SEQ ID NO: 4172769 - DNA, 25 bp, Homo sapien
cctctatataaagcagggctgtaca

SEQ ID NO: 4172770 - DNA, 25 bp, Homo sapien
tactctgtcaatccaagttgtggct

SEQ ID NO: 4172771 - DNA, 25 bp, Homo sapien
caattgggctacaaaagccatggca

SEQ ID NO: 4172772 - DNA, 25 bp, Homo sapien
gcttgtgtttgatgaatgaaaatgt

SEQ ID NO: 4172773 - DNA, 25 bp, Homo sapien
tgtctgtctttctaggccctgctga

SEQ ID NO: 4172774 - DNA, 25 bp, Homo sapien
tcctgcctgtcaacatttgtgtctg

SEQ ID NO: 4172775 - DNA, 25 bp, Homo sapien
tgctgagttgaccaatttgcttgtg

SEQ ID NO: 4172776 - DNA, 25 bp, Homo sapien
caggtctccaaggtcatcacaataa

SEQ ID NO: 4172777 - DNA, 25 bp, Homo sapien
gcatcctctgtgcttcaggtgaccg

SEQ ID NO: 4172778 - DNA, 25 bp, Homo sapien
aacagtggagatgctaggcagagct

SEQ ID NO: 4172779 - DNA, 25 bp, Homo sapien
agttgaggtttgtcagtctctgtcc

SEQ ID NO: 4172780 - DNA, 25 bp, Homo sapien
tagctcatacatgttggagctcagg

SEQ ID NO: 4172781 - DNA, 25 bp, Homo sapien
tcattttagctcatacatgttggag

SEQ ID NO: 4172782 - DNA, 25 bp, Homo sapien
ctcatacatgttggagctcaggtag

SEQ ID NO: 4172783 - DNA, 25 bp, Homo sapien
tacatgttggagctcaggtagaggt

SEQ ID NO: 4172784 - DNA, 25 bp, Homo sapien
gaagcttttccagattaggtgtccc

SEQ ID NO: 4172785 - DNA, 25 bp, Homo sapien
tatctgttcataagccgggtgcact

SEQ ID NO: 4172786 - DNA, 25 bp, Homo sapien
tagccaggtttcctagcctagaagc

SEQ ID NO: 4172787 - DNA, 25 bp, Homo sapien
tctgcatggtgccagtaaagaccca

SEQ ID NO: 4172788 - DNA, 25 bp, Homo sapien
cttctgtgtgcttattgcgagccat

SEQ ID NO: 4172789 - DNA, 25 bp, Homo sapien
ttcttctgtgtgcttattgcgagcc

SEQ ID NO: 4172790 - DNA, 25 bp, Homo sapien
ttttcttctgtgtgcttattgcgag

SEQ ID NO: 4172791 - DNA, 25 bp, Homo sapien
acaactcctcttcacacattctctt

SEQ ID NO: 4172792 - DNA, 25 bp, Homo sapien
tgttgagaaggtccagcggcactgt

SEQ ID NO: 4172793 - DNA, 25 bp, Homo sapien
agcggcactgtggatctccatccca

SEQ ID NO: 4172794 - DNA, 25 bp, Homo sapien
aaggtccagcggcactgtggatctc

SEQ ID NO: 4172795 - DNA, 25 bp, Homo sapien
gatctccatcccacagagtcctgta

SEQ ID NO: 4172796 - DNA, 25 bp, Homo sapien
tggacacgaagacacaagtcagtac

SEQ ID NO: 4172797 - DNA, 25 bp, Homo sapien
ctggacacgaagacacaagtcagta

SEQ ID NO: 4172798 - DNA, 25 bp, Homo sapien
ctgttccaactttcagatgggcctt

SEQ ID NO: 4172799 - DNA, 25 bp, Homo sapien
ttacccactccaccattccagtgtt

SEQ ID NO: 4172800 - DNA, 25 bp, Homo sapien
ttactcctgctgttacccactccac

SEQ ID NO: 4172801 - DNA, 25 bp, Homo sapien
cccactccaccattccagtgtttac

SEQ ID NO: 4172802 - DNA, 25 bp, Homo sapien
tttactcctgctgttacccactcca

SEQ ID NO: 4172803 - DNA, 25 bp, Homo sapien
taagagggagcattgactgcttact

SEQ ID NO: 4172804 - DNA, 25 bp, Homo sapien
tccagtaaggctgttaagagggagc

SEQ ID NO: 4172805 - DNA, 25 bp, Homo sapien
gactgcttactggtatcattatttc

SEQ ID NO: 4172806 - DNA, 25 bp, Homo sapien
catttgtccatctccagtaaggctg

SEQ ID NO: 4172807 - DNA, 25 bp, Homo sapien
cctgaataaatcgagagcaaactgt

SEQ ID NO: 4172808 - DNA, 25 bp, Homo sapien
gcaaactgtaggtattgaggatcca

SEQ ID NO: 4172809 - DNA, 25 bp, Homo sapien
tgaggatccatttcgtgagtgagag

SEQ ID NO: 4172810 - DNA, 25 bp, Homo sapien
ctggatcagaaggaggcctagactc

SEQ ID NO: 4172811 - DNA, 25 bp, Homo sapien
atgaggttgtctatgagcactgaat

SEQ ID NO: 4172812 - DNA, 25 bp, Homo sapien
tgaggttgtctatgagcactgaata

SEQ ID NO: 4172813 - DNA, 25 bp, Homo sapien
cacattctgccatggaaactgagat

SEQ ID NO: 4172814 - DNA, 25 bp, Homo sapien
aagcattttcactggctagtagcag

SEQ ID NO: 4172815 - DNA, 25 bp, Homo sapien
tgagggagccatgtataatcatagc

SEQ ID NO: 4172816 - DNA, 25 bp, Homo sapien
aaagagtcagtgtaccattggtggc

SEQ ID NO: 4172817 - DNA, 25 bp, Homo sapien
gatggaggtccccaagtgtcaagga

SEQ ID NO: 4172818 - DNA, 25 bp, Homo sapien
tcctcttgtccatttgtaacctctt

SEQ ID NO: 4172819 - DNA, 25 bp, Homo sapien
aatcagggttaaggcttgttgatgc

SEQ ID NO: 4172820 - DNA, 25 bp, Homo sapien
ggcagaatcagggttaaggcttgtt

SEQ ID NO: 4172821 - DNA, 25 bp, Homo sapien
gcttccagggctgtgaaagaataat

SEQ ID NO: 4172822 - DNA, 25 bp, Homo sapien
ctctgcttgtcgacatcaaaggcag

SEQ ID NO: 4172823 - DNA, 25 bp, Homo sapien
tgttgtgacaacgtgattatgcatg

SEQ ID NO: 4172824 - DNA, 25 bp, Homo sapien
ataaacatacttgtgtacgtgtgtg

SEQ ID NO: 4172825 - DNA, 25 bp, Homo sapien
tctgcttgtgagacgggccactgat

SEQ ID NO: 4172826 - DNA, 25 bp, Homo sapien
gagttttcgatatacacctctgctt

SEQ ID NO: 4172827 - DNA, 25 bp, Homo sapien
attcgaaggagctcagtttgtcacc

SEQ ID NO: 4172828 - DNA, 25 bp, Homo sapien
cagtttgtcaccgagcgtcctggtt

SEQ ID NO: 4172829 - DNA, 25 bp, Homo sapien
cctggtttttctattgccactaatt

SEQ ID NO: 4172830 - DNA, 25 bp, Homo sapien
gagcgtcctggtttttctattgcca

SEQ ID NO: 4172831 - DNA, 25 bp, Homo sapien
tctatatgtccctgagagagcagtg

SEQ ID NO: 4172832 - DNA, 25 bp, Homo sapien
tcaacaggggtcataggcatttgag

SEQ ID NO: 4172833 - DNA, 25 bp, Homo sapien
catatttctatatgtccctgagaga

SEQ ID NO: 4172834 - DNA, 25 bp, Homo sapien
atatgtccctgagagagcagtgaac

SEQ ID NO: 4172835 - DNA, 25 bp, Homo sapien
gtgtcctggatgtatattggaccag

SEQ ID NO: 4172836 - DNA, 25 bp, Homo sapien
agcaaacaatagaaagccttgcctt

SEQ ID NO: 4172837 - DNA, 25 bp, Homo sapien
tgtatattggaccagagtctgattt

SEQ ID NO: 4172838 - DNA, 25 bp, Homo sapien
tctgtcctgattttagaccatagca

SEQ ID NO: 4172839 - DNA, 25 bp, Homo sapien
agcagtggctatctggaaaaggatt

SEQ ID NO: 4172840 - DNA, 25 bp, Homo sapien
cagtggctatctggaaaaggattac

SEQ ID NO: 4172841 - DNA, 25 bp, Homo sapien
gcagcagcagtggctatctggaaaa

SEQ ID NO: 4172842 - DNA, 25 bp, Homo sapien
agcagcagtggctatctggaaaagg

SEQ ID NO: 4172843 - DNA, 25 bp, Homo sapien
acttttttcttgatcttgttcatct

SEQ ID NO: 4172844 - DNA, 25 bp, Homo sapien
gaatacttttttcttgatcttgttc

SEQ ID NO: 4172845 - DNA, 25 bp, Homo sapien
ttttcttgatcttgttcatcttcct

SEQ ID NO: 4172846 - DNA, 25 bp, Homo sapien
ttacagagacattagaatacttttt

SEQ ID NO: 4172847 - DNA, 25 bp, Homo sapien
catctcttctttgggaatcaggcat

SEQ ID NO: 4172848 - DNA, 25 bp, Homo sapien
tttcatctcttctttgggaatcagg

SEQ ID NO: 4172849 - DNA, 25 bp, Homo sapien
tgctgatccactttcatctcttctt

SEQ ID NO: 4172850 - DNA, 25 bp, Homo sapien
ctgctgatccactttcatctcttct

SEQ ID NO: 4172851 - DNA, 25 bp, Homo sapien
catgggatggaaagctactcggtag

SEQ ID NO: 4172852 - DNA, 25 bp, Homo sapien
gggaagaactatgctcattagctca

SEQ ID NO: 4172853 - DNA, 25 bp, Homo sapien
gaagcaaatatcctcctcatccaat

SEQ ID NO: 4172854 - DNA, 25 bp, Homo sapien
tttcactttagggaacatgggatgg

SEQ ID NO: 4172855 - DNA, 25 bp, Homo sapien
tgttactgttctagcaactgacctg

SEQ ID NO: 4172856 - DNA, 25 bp, Homo sapien
ccaaggacagggaaacagttagact

SEQ ID NO: 4172857 - DNA, 25 bp, Homo sapien
tatctcgggcagattgtgtacccct

SEQ ID NO: 4172858 - DNA, 25 bp, Homo sapien
gctgatcctaaaaagttctgagcca

SEQ ID NO: 4172859 - DNA, 25 bp, Homo sapien
ctctgtgaatgagaagatgatttct

SEQ ID NO: 4172860 - DNA, 25 bp, Homo sapien
caagctgttcaacccctctacccct

SEQ ID NO: 4172861 - DNA, 25 bp, Homo sapien
ttgctctgtgaatgagaagatgatt

SEQ ID NO: 4172862 - DNA, 25 bp, Homo sapien
agagagcactgggtgcacagaggca

SEQ ID NO: 4172863 - DNA, 25 bp, Homo sapien
tccaagtcttgaggattttacatga

SEQ ID NO: 4172864 - DNA, 25 bp, Homo sapien
ttacatgaaatgcttcatgccagta

SEQ ID NO: 4172865 - DNA, 25 bp, Homo sapien
ctttctatgactgatagcttctgtc

SEQ ID NO: 4172866 - DNA, 25 bp, Homo sapien
gaaatgcttcatgccagtaatagga

SEQ ID NO: 4172867 - DNA, 25 bp, Homo sapien
cccacatctcctgtggtgcagcatg

SEQ ID NO: 4172868 - DNA, 25 bp, Homo sapien
tagcaattagcatggccaactggac

SEQ ID NO: 4172869 - DNA, 25 bp, Homo sapien
ttaagactcctagcaaccaagttct

SEQ ID NO: 4172870 - DNA, 25 bp, Homo sapien
tttctcaggaggatacacagcatcc

SEQ ID NO: 4172871 - DNA, 25 bp, Homo sapien
gggtggggcatccattggttcaaat

SEQ ID NO: 4172872 - DNA, 25 bp, Homo sapien
ggtggggcatccattggttcaaatg

SEQ ID NO: 4172873 - DNA, 25 bp, Homo sapien
gtggggcatccattggttcaaatgt

SEQ ID NO: 4172874 - DNA, 25 bp, Homo sapien
tgggtggggcatccattggttcaaa

SEQ ID NO: 4172875 - DNA, 25 bp, Homo sapien
tatgtgacttgtgcttcttgggaag

SEQ ID NO: 4172876 - DNA, 25 bp, Homo sapien
tgtgacttgtgcttcttgggaagct

SEQ ID NO: 4172877 - DNA, 25 bp, Homo sapien
tgtatgtgacttgtgcttcttggga

SEQ ID NO: 4172878 - DNA, 25 bp, Homo sapien
aacatgtatgtgacttgtgcttctt

SEQ ID NO: 4172879 - DNA, 25 bp, Homo sapien
tttatatttccgagccctcttgaca

SEQ ID NO: 4172880 - DNA, 25 bp, Homo sapien
tgtgcattagagttagccaacttgt

SEQ ID NO: 4172881 - DNA, 25 bp, Homo sapien
gatgaaggctgctattacagatgtg

SEQ ID NO: 4172882 - DNA, 25 bp, Homo sapien
cgagccctcttgacaacggcagtgg

SEQ ID NO: 4172883 - DNA, 25 bp, Homo sapien
ctttccctattgcattcagggagaa

SEQ ID NO: 4172884 - DNA, 25 bp, Homo sapien
ttccctattgcattcagggagaaga

SEQ ID NO: 4172885 - DNA, 25 bp, Homo sapien
tggaggagcagtttgatttgaaaga

SEQ ID NO: 4172886 - DNA, 25 bp, Homo sapien
gagcagtttgatttgaaagagcaaa

SEQ ID NO: 4172887 - DNA, 25 bp, Homo sapien
tggacctttgatccaatcagcttgg

SEQ ID NO: 4172888 - DNA, 25 bp, Homo sapien
caattgacttctgattgcctggaca

SEQ ID NO: 4172889 - DNA, 25 bp, Homo sapien
tcctgagtgacacaagttaagtggc

SEQ ID NO: 4172890 - DNA, 25 bp, Homo sapien
gaaatgttacaaaagacgcaggcct

SEQ ID NO: 4172891 - DNA, 25 bp, Homo sapien
ccagagctaaaaagtgttggtccat

SEQ ID NO: 4172892 - DNA, 25 bp, Homo sapien
tccttggccagagctaaaaagtgtt

SEQ ID NO: 4172893 - DNA, 25 bp, Homo sapien
tggccagagctaaaaagtgttggtc

SEQ ID NO: 4172894 - DNA, 25 bp, Homo sapien
cttggccagagctaaaaagtgttgg

SEQ ID NO: 4172895 - DNA, 25 bp, Homo sapien
gttgctccatagaaaatcctccaca

SEQ ID NO: 4172896 - DNA, 25 bp, Homo sapien
tccacagtactgaaatgaggctgcc

SEQ ID NO: 4172897 - DNA, 25 bp, Homo sapien
tgtagtaggacttagcaaatgttga

SEQ ID NO: 4172898 - DNA, 25 bp, Homo sapien
caggcagatcccatcatgtagtagg

SEQ ID NO: 4172899 - DNA, 25 bp, Homo sapien
ctgtcacttgctgttcctgacagct

SEQ ID NO: 4172900 - DNA, 25 bp, Homo sapien
ttcttctaccaccttgacggctgct

SEQ ID NO: 4172901 - DNA, 25 bp, Homo sapien
ttctaccaccttgacggctgctgct

SEQ ID NO: 4172902 - DNA, 25 bp, Homo sapien
tcttctaccaccttgacggctgctg

SEQ ID NO: 4172903 - DNA, 25 bp, Homo sapien
gagggaagcttcattattagtagcc

SEQ ID NO: 4172904 - DNA, 25 bp, Homo sapien
taagagggaattagctggtgacaaa

SEQ ID NO: 4172905 - DNA, 25 bp, Homo sapien
gaattagctggtgacaaatttgaat

SEQ ID NO: 4172906 - DNA, 25 bp, Homo sapien
aatcctggccaaatgcttgaggaag

SEQ ID NO: 4172907 - DNA, 25 bp, Homo sapien
tcagctctttaaggggcagactttc

SEQ ID NO: 4172908 - DNA, 25 bp, Homo sapien
ttcgccaataccagtggtctgttgg

SEQ ID NO: 4172909 - DNA, 25 bp, Homo sapien
gcagactttcgccaataccagtggt

SEQ ID NO: 4172910 - DNA, 25 bp, Homo sapien
tcatgatagagtttccagtgctcag

SEQ ID NO: 4172911 - DNA, 25 bp, Homo sapien
ccaaaggtgggcacacttgctaagt

SEQ ID NO: 4172912 - DNA, 25 bp, Homo sapien
catggatgggcccagccaaaggtgg

SEQ ID NO: 4172913 - DNA, 25 bp, Homo sapien
tatgccattgatcgtggaggccatg

SEQ ID NO: 4172914 - DNA, 25 bp, Homo sapien
gggtccctaaggtcacatgtaaaca

SEQ ID NO: 4172915 - DNA, 25 bp, Homo sapien
gcttttttgccagtcctctgctgtt

SEQ ID NO: 4172916 - DNA, 25 bp, Homo sapien
tgtcgcttttttgccagtcctctgc

SEQ ID NO: 4172917 - DNA, 25 bp, Homo sapien
tcgcttttttgccagtcctctgctg

SEQ ID NO: 4172918 - DNA, 25 bp, Homo sapien
tttgtcgcttttttgccagtcctct

SEQ ID NO: 4172919 - DNA, 25 bp, Homo sapien
gcgttgttaaagtccctaatgctag

SEQ ID NO: 4172920 - DNA, 25 bp, Homo sapien
cgttgttaaagtccctaatgctagg

SEQ ID NO: 4172921 - DNA, 25 bp, Homo sapien
ttagcgttgttaaagtccctaatgc

SEQ ID NO: 4172922 - DNA, 25 bp, Homo sapien
ttgttaaagtccctaatgctaggtg

SEQ ID NO: 4172923 - DNA, 25 bp, Homo sapien
gatgaacttgtagtgactctccagc

SEQ ID NO: 4172924 - DNA, 25 bp, Homo sapien
agcacagtgacccactcatagagct

SEQ ID NO: 4172925 - DNA, 25 bp, Homo sapien
gataggaagaacagggtaacttcag

SEQ ID NO: 4172926 - DNA, 25 bp, Homo sapien
agaacagggtaacttcagtcctggg

SEQ ID NO: 4172927 - DNA, 25 bp, Homo sapien
aagagcagcaaaacaccaagggatg

SEQ ID NO: 4172928 - DNA, 25 bp, Homo sapien
cagtgtggcaggcacgggaaagagc

SEQ ID NO: 4172929 - DNA, 25 bp, Homo sapien
gggacgaggtctgctccttcggagg

SEQ ID NO: 4172930 - DNA, 25 bp, Homo sapien
gatggagggatatgacaaggaggta

SEQ ID NO: 4172931 - DNA, 25 bp, Homo sapien
tgccaaagggctgtctctcaacttc

SEQ ID NO: 4172932 - DNA, 25 bp, Homo sapien
ctcctgaggcttagtgccaaagggc

SEQ ID NO: 4172933 - DNA, 25 bp, Homo sapien
cttagtgccaaagggctgtctctca

SEQ ID NO: 4172934 - DNA, 25 bp, Homo sapien
tcatagctcctgaggcttagtgcca

SEQ ID NO: 4172935 - DNA, 25 bp, Homo sapien
tgacactgaaaagatgatgctatca

SEQ ID NO: 4172936 - DNA, 25 bp, Homo sapien
tatcaatactaacgagtatgtcatt

SEQ ID NO: 4172937 - DNA, 25 bp, Homo sapien
tacactcagaacctaaccattgcca

SEQ ID NO: 4172938 - DNA, 25 bp, Homo sapien
caagcgtagtcttcacagggagtgg

SEQ ID NO: 4172939 - DNA, 25 bp, Homo sapien
cagagcaaggttgttcagatctccc

SEQ ID NO: 4172940 - DNA, 25 bp, Homo sapien
catcatatcatgaccgagctaggtt

SEQ ID NO: 4172941 - DNA, 25 bp, Homo sapien
tttagtgagctcatagaggtccatc

SEQ ID NO: 4172942 - DNA, 25 bp, Homo sapien
gttactattaatgagggcagcacct

SEQ ID NO: 4172943 - DNA, 25 bp, Homo sapien
ccaggaaagtgaatcccggaagtct

SEQ ID NO: 4172944 - DNA, 25 bp, Homo sapien
ttctggatgagtgtatatcagtcag

SEQ ID NO: 4172945 - DNA, 25 bp, Homo sapien
tgtagaaagagccttccataacctc

SEQ ID NO: 4172946 - DNA, 25 bp, Homo sapien
gaacttgaatgagacggatgaaaac

SEQ ID NO: 4172947 - DNA, 25 bp, Homo sapien
gagtaactgctttttgttcgagccc

SEQ ID NO: 4172948 - DNA, 25 bp, Homo sapien
gccttgtaggacacatggaatgttg

SEQ ID NO: 4172949 - DNA, 25 bp, Homo sapien
cacaatgctgggaggacccctctgg

SEQ ID NO: 4172950 - DNA, 25 bp, Homo sapien
tgttcaagcccgcaggatcctttgt

SEQ ID NO: 4172951 - DNA, 25 bp, Homo sapien
ctctatatgctgcagtctgtcttac

SEQ ID NO: 4172952 - DNA, 25 bp, Homo sapien
attcctcagaggctttaagtaggag

SEQ ID NO: 4172953 - DNA, 25 bp, Homo sapien
ggattctatgtcctgtgctcttttc

SEQ ID NO: 4172954 - DNA, 25 bp, Homo sapien
ggctctggagtcacactagacattg

SEQ ID NO: 4172955 - DNA, 25 bp, Homo sapien
cccagttccatctctgggtctcagt

SEQ ID NO: 4172956 - DNA, 25 bp, Homo sapien
tttttacgccctctgccctcatgtg

SEQ ID NO: 4172957 - DNA, 25 bp, Homo sapien
tcttttaaggttgatgactttcatc

SEQ ID NO: 4172958 - DNA, 25 bp, Homo sapien
gatgatcttcaatactgcagtgcct

SEQ ID NO: 4172959 - DNA, 25 bp, Homo sapien
gacgggaagatggtttgatgctata

SEQ ID NO: 4172960 - DNA, 25 bp, Homo sapien
gaaagttgtagttgatgtcgaggac

SEQ ID NO: 4172961 - DNA, 25 bp, Homo sapien
aggataggcgttgggttcagtatat

SEQ ID NO: 4172962 - DNA, 25 bp, Homo sapien
tatcagagggtatgcactgtgcgaa

SEQ ID NO: 4172963 - DNA, 25 bp, Homo sapien
agttgatgtcgaggactgctgctgc

SEQ ID NO: 4172964 - DNA, 25 bp, Homo sapien
tgttgatatctaacctggataactg

SEQ ID NO: 4172965 - DNA, 25 bp, Homo sapien
tatcgttgtcacaaaaccacagaca

SEQ ID NO: 4172966 - DNA, 25 bp, Homo sapien
cctcagattgtgcacgtatatgttt

SEQ ID NO: 4172967 - DNA, 25 bp, Homo sapien
cattttgcacctagtcatatcgttg

SEQ ID NO: 4172968 - DNA, 25 bp, Homo sapien
gttgcaagaaagacacagtgcgttt

SEQ ID NO: 4172969 - DNA, 25 bp, Homo sapien
cacatacacgggatagaattgctgg

SEQ ID NO: 4172970 - DNA, 25 bp, Homo sapien
cagtgcgtttcagctctttggtaac

SEQ ID NO: 4172971 - DNA, 25 bp, Homo sapien
tacaccatgtgctggttacaaaggt

SEQ ID NO: 4172972 - DNA, 25 bp, Homo sapien
gatgcctagggacatcagctggacc

SEQ ID NO: 4172973 - DNA, 25 bp, Homo sapien
gctgacaacagcaatgatgcctagg

SEQ ID NO: 4172974 - DNA, 25 bp, Homo sapien
ttcttcaaagaagcctaggaccagc

SEQ ID NO: 4172975 - DNA, 25 bp, Homo sapien
caggtgcccgcaagtttcttcaaag

SEQ ID NO: 4172976 - DNA, 25 bp, Homo sapien
taattcgatattaaggaccttttca

SEQ ID NO: 4172977 - DNA, 25 bp, Homo sapien
tgcttggataagtttccttccctgt

SEQ ID NO: 4172978 - DNA, 25 bp, Homo sapien
ttcacagaagagtacttccccattg

SEQ ID NO: 4172979 - DNA, 25 bp, Homo sapien
tggctattgtctataattccctggg

SEQ ID NO: 4172980 - DNA, 25 bp, Homo sapien
tttccctcctcttgtctcagcgtgg

SEQ ID NO: 4172981 - DNA, 25 bp, Homo sapien
tctcagcgtggagggtacacttcat

SEQ ID NO: 4172982 - DNA, 25 bp, Homo sapien
ctcctcttgtctcagcgtggagggt

SEQ ID NO: 4172983 - DNA, 25 bp, Homo sapien
tcttgtctcagcgtggagggtacac

SEQ ID NO: 4172984 - DNA, 25 bp, Homo sapien
tggagatagaatattgttatctccc

SEQ ID NO: 4172985 - DNA, 25 bp, Homo sapien
aatggagatagaatattgttatctc

SEQ ID NO: 4172986 - DNA, 25 bp, Homo sapien
gagatagaatattgttatctccctt

SEQ ID NO: 4172987 - DNA, 25 bp, Homo sapien
ttaatggagatagaatattgttatc

SEQ ID NO: 4172988 - DNA, 25 bp, Homo sapien
taaaactttcctatggttgattcga

SEQ ID NO: 4172989 - DNA, 25 bp, Homo sapien
actttcctatggttgattcgagcaa

SEQ ID NO: 4172990 - DNA, 25 bp, Homo sapien
ggttgattcgagcaaatacagaagc

SEQ ID NO: 4172991 - DNA, 25 bp, Homo sapien
tcctatggttgattcgagcaaatac

SEQ ID NO: 4172992 - DNA, 25 bp, Homo sapien
cttatgtctgctacgtgagtttttc

SEQ ID NO: 4172993 - DNA, 25 bp, Homo sapien
ttatgtctgctacgtgagtttttca

SEQ ID NO: 4172994 - DNA, 25 bp, Homo sapien
tatgtctgctacgtgagtttttcaa

SEQ ID NO: 4172995 - DNA, 25 bp, Homo sapien
aggagtcctgttccatgggtatact

SEQ ID NO: 4172996 - DNA, 25 bp, Homo sapien
gtggttcctgcagggaatcttctca

SEQ ID NO: 4172997 - DNA, 25 bp, Homo sapien
cctgcagggaatcttctcagctctg

SEQ ID NO: 4172998 - DNA, 25 bp, Homo sapien
ttccatgggtatactctgtggttcc

SEQ ID NO: 4172999 - DNA, 25 bp, Homo sapien
cagtgtgacaccctttgtgcctcct

SEQ ID NO: 4173000 - DNA, 25 bp, Homo sapien
agcctcgctcctgggggctgccaca

SEQ ID NO: 4173001 - DNA, 25 bp, Homo sapien
gcctcgctcctgggggctgccacac

SEQ ID NO: 4173002 - DNA, 25 bp, Homo sapien
cccagcttcccagctcccaggaccc

SEQ ID NO: 4173003 - DNA, 25 bp, Homo sapien
gcttcccagctcccaggacccttac

SEQ ID NO: 4173004 - DNA, 25 bp, Homo sapien
cagcttcccagctcccaggaccctt

SEQ ID NO: 4173005 - DNA, 25 bp, Homo sapien
ctggcttccccagcttcccagctcc

SEQ ID NO: 4173006 - DNA, 25 bp, Homo sapien
ttatttgctggaatcgacatatttc

SEQ ID NO: 4173007 - DNA, 25 bp, Homo sapien
gctggaatcgacatatttctgggca

SEQ ID NO: 4173008 - DNA, 25 bp, Homo sapien
atgctgttatttgctggaatcgaca

SEQ ID NO: 4173009 - DNA, 25 bp, Homo sapien
gctgttatttgctggaatcgacata

SEQ ID NO: 4173010 - DNA, 25 bp, Homo sapien
tcagacactttatggaacaggtagg

SEQ ID NO: 4173011 - DNA, 25 bp, Homo sapien
tataagtgagtcttgcaggatctga

SEQ ID NO: 4173012 - DNA, 25 bp, Homo sapien
tcaggttagaagtacaaccagagtc

SEQ ID NO: 4173013 - DNA, 25 bp, Homo sapien
gatttagactagcacagaggtggcc

SEQ ID NO: 4173014 - DNA, 25 bp, Homo sapien
catctggagttgaggttaagttttt

SEQ ID NO: 4173015 - DNA, 25 bp, Homo sapien
tgatgaagaccatgaacacaaaaat

SEQ ID NO: 4173016 - DNA, 25 bp, Homo sapien
atgatgaagaccatgaacacaaaaa

SEQ ID NO: 4173017 - DNA, 25 bp, Homo sapien
gatgaagaccatgaacacaaaaata

SEQ ID NO: 4173018 - DNA, 25 bp, Homo sapien
gagctggacaagtaaggtctcttag

SEQ ID NO: 4173019 - DNA, 25 bp, Homo sapien
gacaagtaaggtctcttagagccct

SEQ ID NO: 4173020 - DNA, 25 bp, Homo sapien
cttagagccctttaattccataatg

SEQ ID NO: 4173021 - DNA, 25 bp, Homo sapien
tggacaagtaaggtctcttagagcc

SEQ ID NO: 4173022 - DNA, 25 bp, Homo sapien
ggccccgggatgacttctcagcgtt

SEQ ID NO: 4173023 - DNA, 25 bp, Homo sapien
gctcctctctctgcacggtgagtag

SEQ ID NO: 4173024 - DNA, 25 bp, Homo sapien
cacttggctcgtctgtgggtctgac

SEQ ID NO: 4173025 - DNA, 25 bp, Homo sapien
gagggtcgggagtccaactttctca

SEQ ID NO: 4173026 - DNA, 25 bp, Homo sapien
gccgcgctctgctccgcgggtgggc

SEQ ID NO: 4173027 - DNA, 25 bp, Homo sapien
gcgtcgcgctggagccgcggttgcc

SEQ ID NO: 4173028 - DNA, 25 bp, Homo sapien
tcccggagctggtggaggcgtgcgg

SEQ ID NO: 4173029 - DNA, 25 bp, Homo sapien
ctaactccggcgaggagggcgccca

SEQ ID NO: 4173030 - DNA, 25 bp, Homo sapien
gcatccaggaaacagcgcaaaacca

SEQ ID NO: 4173031 - DNA, 25 bp, Homo sapien
cagcctctatccacttttcaaggaa

SEQ ID NO: 4173032 - DNA, 25 bp, Homo sapien
taaatgtacataccccactagttaa

SEQ ID NO: 4173033 - DNA, 25 bp, Homo sapien
ttaaggtcagtttaagaaagcacta

SEQ ID NO: 4173034 - DNA, 25 bp, Homo sapien
gctgtacaataaagagcagagccca

SEQ ID NO: 4173035 - DNA, 25 bp, Homo sapien
tgaccaaaatgggttggcatcccct

SEQ ID NO: 4173036 - DNA, 25 bp, Homo sapien
tcccctgggcaggtatgtcctcaaa

SEQ ID NO: 4173037 - DNA, 25 bp, Homo sapien
caatttctgaatggctccgagaacc

SEQ ID NO: 4173038 - DNA, 25 bp, Homo sapien
tcaaaggtgccatatagcagagtct

SEQ ID NO: 4173039 - DNA, 25 bp, Homo sapien
cattttgatgggttgaggagagcct

SEQ ID NO: 4173040 - DNA, 25 bp, Homo sapien
tatagcttctcaggtggtgtctggg

SEQ ID NO: 4173041 - DNA, 25 bp, Homo sapien
gagcctgcctaggattaaaatgtga

SEQ ID NO: 4173042 - DNA, 25 bp, Homo sapien
acctagagtgttaccctcttccttg

SEQ ID NO: 4173043 - DNA, 25 bp, Homo sapien
tgccgagcaaccaggccacggggct

SEQ ID NO: 4173044 - DNA, 25 bp, Homo sapien
gggctccgtgcatcgccacctagag

SEQ ID NO: 4173045 - DNA, 25 bp, Homo sapien
tcacagaggttctccgcagtgtgtg

SEQ ID NO: 4173046 - DNA, 25 bp, Homo sapien
tggccgtcccgctgttgtaagtgga

SEQ ID NO: 4173047 - DNA, 25 bp, Homo sapien
ttgttcgggtcactgcgtgcgtcag

SEQ ID NO: 4173048 - DNA, 25 bp, Homo sapien
cccacgggctttgttcgggtcactg

SEQ ID NO: 4173049 - DNA, 25 bp, Homo sapien
gagagtggccgtcccgctgttgtaa

SEQ ID NO: 4173050 - DNA, 25 bp, Homo sapien
caacgaggccatacaatctgaggtc

SEQ ID NO: 4173051 - DNA, 25 bp, Homo sapien
tctaaggtcagaaacatcagcaggg

SEQ ID NO: 4173052 - DNA, 25 bp, Homo sapien
tcagcagttctttcctccgtcaggc

SEQ ID NO: 4173053 - DNA, 25 bp, Homo sapien
tgcggtcaatctgtacggaaggtct

SEQ ID NO: 4173054 - DNA, 25 bp, Homo sapien
ttgattgcgtatatgataacccttt

SEQ ID NO: 4173055 - DNA, 25 bp, Homo sapien
tatgataaccctttccttggtcaat

SEQ ID NO: 4173056 - DNA, 25 bp, Homo sapien
aagtttgattgcgtatatgataacc

SEQ ID NO: 4173057 - DNA, 25 bp, Homo sapien
tataagtttgattgcgtatatgata

SEQ ID NO: 4173058 - DNA, 25 bp, Homo sapien
tgtttttccatgtattggagtgaaa

SEQ ID NO: 4173059 - DNA, 25 bp, Homo sapien
tttccatgtattggagtgaaacttg

SEQ ID NO: 4173060 - DNA, 25 bp, Homo sapien
gtattggagtgaaacttggtaagga

SEQ ID NO: 4173061 - DNA, 25 bp, Homo sapien
catgtattggagtgaaacttggtaa

SEQ ID NO: 4173062 - DNA, 25 bp, Homo sapien
agcataaaattcagggggtcctctg

SEQ ID NO: 4173063 - DNA, 25 bp, Homo sapien
ggcacagcataaaattcagggggtc

SEQ ID NO: 4173064 - DNA, 25 bp, Homo sapien
ggcttttcatagactaagttttcag

SEQ ID NO: 4173065 - DNA, 25 bp, Homo sapien
ctctggcttttcatagactaagttt

SEQ ID NO: 4173066 - DNA, 25 bp, Homo sapien
acttgaatggtagttacaggtatgt

SEQ ID NO: 4173067 - DNA, 25 bp, Homo sapien
gttgtacgtactttgttctatacac

SEQ ID NO: 4173068 - DNA, 25 bp, Homo sapien
gtactttgttctatacactttgctg

SEQ ID NO: 4173069 - DNA, 25 bp, Homo sapien
cttcataagaattcagagttgtacg

SEQ ID NO: 4173070 - DNA, 25 bp, Homo sapien
aataatgcattcaggtagagtcacc

SEQ ID NO: 4173071 - DNA, 25 bp, Homo sapien
gacacatgattgtaaacaatactga

SEQ ID NO: 4173072 - DNA, 25 bp, Homo sapien
aacagaacatagtattgacacatga

SEQ ID NO: 4173073 - DNA, 25 bp, Homo sapien
gagtcaccactaatgtctattcaaa

SEQ ID NO: 4173074 - DNA, 25 bp, Homo sapien
actcaagtctcctgtaatgttcaaa

SEQ ID NO: 4173075 - DNA, 25 bp, Homo sapien
ctcataccagacagaccaagttaag

SEQ ID NO: 4173076 - DNA, 25 bp, Homo sapien
tacattccacatgatgcagatactc

SEQ ID NO: 4173077 - DNA, 25 bp, Homo sapien
cagttatgatctttaggcagacaca

SEQ ID NO: 4173078 - DNA, 25 bp, Homo sapien
gcattccctaacagatccctcactt

SEQ ID NO: 4173079 - DNA, 25 bp, Homo sapien
tccctaacagatccctcacttcaaa

SEQ ID NO: 4173080 - DNA, 25 bp, Homo sapien
tctctgcattccctaacagatccct

SEQ ID NO: 4173081 - DNA, 25 bp, Homo sapien
tcagtcctcatgaggttttcctctg

SEQ ID NO: 4173082 - DNA, 25 bp, Homo sapien
gcaggaggcacctcacatgggctga

SEQ ID NO: 4173083 - DNA, 25 bp, Homo sapien
agcgcctcctctttctgcgcacacg

SEQ ID NO: 4173084 - DNA, 25 bp, Homo sapien
tttctgcgcacacggtagggcccgc

SEQ ID NO: 4173085 - DNA, 25 bp, Homo sapien
cctctttctgcgcacacggtagggc

SEQ ID NO: 4173086 - DNA, 25 bp, Homo sapien
ccgcagtctgcacccgacccaggtg

SEQ ID NO: 4173087 - DNA, 25 bp, Homo sapien
agagcatatttaaaggctggctggt

SEQ ID NO: 4173088 - DNA, 25 bp, Homo sapien
cagagcatatttaaaggctggctgg

SEQ ID NO: 4173089 - DNA, 25 bp, Homo sapien
catcaagtttgtgggcagcctgcat

SEQ ID NO: 4173090 - DNA, 25 bp, Homo sapien
tggtctctgtcccagttggtgaatg

SEQ ID NO: 4173091 - DNA, 25 bp, Homo sapien
agttggtgaatggtggcccatcaag

SEQ ID NO: 4173092 - DNA, 25 bp, Homo sapien
aatggtggcccatcaagtttgtggg

SEQ ID NO: 4173093 - DNA, 25 bp, Homo sapien
aagatgggtgtggagattgtaggtc

SEQ ID NO: 4173094 - DNA, 25 bp, Homo sapien
tgtaggtcacaacaattgctggtct

SEQ ID NO: 4173095 - DNA, 25 bp, Homo sapien
ggtctgcttcaacttaaggtaggat

SEQ ID NO: 4173096 - DNA, 25 bp, Homo sapien
attgctggtctgcttcaacttaagg

SEQ ID NO: 4173097 - DNA, 25 bp, Homo sapien
cctctgccacagcaatatagtctgg

SEQ ID NO: 4173098 - DNA, 25 bp, Homo sapien
cacagcaatatagtctggtacgttg

SEQ ID NO: 4173099 - DNA, 25 bp, Homo sapien
tatagtctggtacgttgttacgtct

SEQ ID NO: 4173100 - DNA, 25 bp, Homo sapien
ttttcttccatactagcctctgcca

SEQ ID NO: 4173101 - DNA, 25 bp, Homo sapien
gcgtattgcctccttgttcccaaag

SEQ ID NO: 4173102 - DNA, 25 bp, Homo sapien
gaaaagaatatagccttccagagcc

SEQ ID NO: 4173103 - DNA, 25 bp, Homo sapien
ggtagggccaaacacactgagggtc

SEQ ID NO: 4173104 - DNA, 25 bp, Homo sapien
gaatgcatccttctgagtggtggac

SEQ ID NO: 4173105 - DNA, 25 bp, Homo sapien
cgggatttcccacaagctgaaggca

SEQ ID NO: 4173106 - DNA, 25 bp, Homo sapien
ttcgggatttcccacaagctgaagg

SEQ ID NO: 4173107 - DNA, 25 bp, Homo sapien
cttcgggatttcccacaagctgaag

SEQ ID NO: 4173108 - DNA, 25 bp, Homo sapien
tcgggatttcccacaagctgaaggc

SEQ ID NO: 4173109 - DNA, 25 bp, Homo sapien
ccctggaagcaacgaacagttgagt

SEQ ID NO: 4173110 - DNA, 25 bp, Homo sapien
tttccaaaaatcagcaggccctgga

SEQ ID NO: 4173111 - DNA, 25 bp, Homo sapien
gaacagttgagttgtctttggccat

SEQ ID NO: 4173112 - DNA, 25 bp, Homo sapien
agcaggccctggaagcaacgaacag

SEQ ID NO: 4173113 - DNA, 25 bp, Homo sapien
agaattatgattacaggaagtgcag

SEQ ID NO: 4173114 - DNA, 25 bp, Homo sapien
tagaattatgattacaggaagtgca

SEQ ID NO: 4173115 - DNA, 25 bp, Homo sapien
ctagaattatgattacaggaagtgc

SEQ ID NO: 4173116 - DNA, 25 bp, Homo sapien
ttttgattcatctagaattatgatt

SEQ ID NO: 4173117 - DNA, 25 bp, Homo sapien
catcgttgtcggtggcttcaagcag

SEQ ID NO: 4173118 - DNA, 25 bp, Homo sapien
aagaagatgcactccgcagtcaggg

SEQ ID NO: 4173119 - DNA, 25 bp, Homo sapien
aaatatgccgatccaggcagcccca

SEQ ID NO: 4173120 - DNA, 25 bp, Homo sapien
gcagccccatagatgtcatcgttgt

SEQ ID NO: 4173121 - DNA, 25 bp, Homo sapien
gtgttgctgctgtgatacaagatgc

SEQ ID NO: 4173122 - DNA, 25 bp, Homo sapien
gggctgttgttttggtacctctcta

SEQ ID NO: 4173123 - DNA, 25 bp, Homo sapien
gtcatcattgtttggagggctgttg

SEQ ID NO: 4173124 - DNA, 25 bp, Homo sapien
tcatcattgtttggagggctgttgt

SEQ ID NO: 4173125 - DNA, 25 bp, Homo sapien
catcattgtttggagggctgttgtt

SEQ ID NO: 4173126 - DNA, 25 bp, Homo sapien
cagatgtgtatttttgccagtctga

SEQ ID NO: 4173127 - DNA, 25 bp, Homo sapien
ccggaaggcagatgtgtatttttgc

SEQ ID NO: 4173128 - DNA, 25 bp, Homo sapien
ctcagtccggaaggcagatgtgtat

SEQ ID NO: 4173129 - DNA, 25 bp, Homo sapien
gaccatttacgccacagcaattgtc

SEQ ID NO: 4173130 - DNA, 25 bp, Homo sapien
tctttaagattgttcataacacagc

SEQ ID NO: 4173131 - DNA, 25 bp, Homo sapien
ttgacgaggccagggatagtcagca

SEQ ID NO: 4173132 - DNA, 25 bp, Homo sapien
accaggcacgcctagtttacaagcc

SEQ ID NO: 4173133 - DNA, 25 bp, Homo sapien
cctccaggttgagaggttctttaag

SEQ ID NO: 4173134 - DNA, 25 bp, Homo sapien
ctacagttgaccaatatttttctca

SEQ ID NO: 4173135 - DNA, 25 bp, Homo sapien
ggcgcactctatcctagtcactgtg

SEQ ID NO: 4173136 - DNA, 25 bp, Homo sapien
tgagcagcctctaccaaagctctgg

SEQ ID NO: 4173137 - DNA, 25 bp, Homo sapien
caaagttctggagtgatacacgcat

SEQ ID NO: 4173138 - DNA, 25 bp, Homo sapien
tcatgcatgccacaatccagtaagt

SEQ ID NO: 4173139 - DNA, 25 bp, Homo sapien
accccccaggcgtgtcggttcattg

SEQ ID NO: 4173140 - DNA, 25 bp, Homo sapien
ggaccagagatcagttcatagcagc

SEQ ID NO: 4173141 - DNA, 25 bp, Homo sapien
cgtgtcggttcattggaccagagat

SEQ ID NO: 4173142 - DNA, 25 bp, Homo sapien
tggaccagagatcagttcatagcag

SEQ ID NO: 4173143 - DNA, 25 bp, Homo sapien
ccatctagataggtgacagtctttg

SEQ ID NO: 4173144 - DNA, 25 bp, Homo sapien
ctctttagaaggatctgggcatatt

SEQ ID NO: 4173145 - DNA, 25 bp, Homo sapien
agtaggaaaggatgaatctgccaga

SEQ ID NO: 4173146 - DNA, 25 bp, Homo sapien
tctgggcatattagtatcaggcagg

SEQ ID NO: 4173147 - DNA, 25 bp, Homo sapien
cagtagaacatggtacccaggagaa

SEQ ID NO: 4173148 - DNA, 25 bp, Homo sapien
caattctgctccagtagaacatggt

SEQ ID NO: 4173149 - DNA, 25 bp, Homo sapien
attcaattctgctccagtagaacat

SEQ ID NO: 4173150 - DNA, 25 bp, Homo sapien
tagaacatggtacccaggagaaccc

SEQ ID NO: 4173151 - DNA, 25 bp, Homo sapien
taaaggaagtccgtaccatctgact

SEQ ID NO: 4173152 - DNA, 25 bp, Homo sapien
caaacgtggaatattaggagagagc

SEQ ID NO: 4173153 - DNA, 25 bp, Homo sapien
catctgacttggcaatgtaagacac

SEQ ID NO: 4173154 - DNA, 25 bp, Homo sapien
tgtaagacacacacgttagtgtggg

SEQ ID NO: 4173155 - DNA, 25 bp, Homo sapien
gagatacaggcagattgctagccaa

SEQ ID NO: 4173156 - DNA, 25 bp, Homo sapien
ttttgacagtaaacagaaatccctg

SEQ ID NO: 4173157 - DNA, 25 bp, Homo sapien
tgggagctactctagaaagaaatgc

SEQ ID NO: 4173158 - DNA, 25 bp, Homo sapien
taaatcaccccattctattggctgg

SEQ ID NO: 4173159 - DNA, 25 bp, Homo sapien
cgtttaactgtaaggcagcgtttgc

SEQ ID NO: 4173160 - DNA, 25 bp, Homo sapien
gtttaactgtaaggcagcgtttgcc

SEQ ID NO: 4173161 - DNA, 25 bp, Homo sapien
tttaactgtaaggcagcgtttgcca

SEQ ID NO: 4173162 - DNA, 25 bp, Homo sapien
ggagcaggacgccaaagtgttttct

SEQ ID NO: 4173163 - DNA, 25 bp, Homo sapien
tgaagagcattagtctcatcactgc

SEQ ID NO: 4173164 - DNA, 25 bp, Homo sapien
cactgctttcaattgcatgaggtaa

SEQ ID NO: 4173165 - DNA, 25 bp, Homo sapien
cacagttctgcagttagcatgggcg

SEQ ID NO: 4173166 - DNA, 25 bp, Homo sapien
gtctcacactcagcaagctgccaga

SEQ ID NO: 4173167 - DNA, 25 bp, Homo sapien
aagctgccagatccctagagccaag

SEQ ID NO: 4173168 - DNA, 25 bp, Homo sapien
tcacaagatagttgtgtctgggcct

SEQ ID NO: 4173169 - DNA, 25 bp, Homo sapien
ccctagagccaagccgcctggttcc

SEQ ID NO: 4173170 - DNA, 25 bp, Homo sapien
gcctacagatatgttcatttcagta

SEQ ID NO: 4173171 - DNA, 25 bp, Homo sapien
ttgaggcctacagatatgttcattt

SEQ ID NO: 4173172 - DNA, 25 bp, Homo sapien
ggcctacagatatgttcatttcagt

SEQ ID NO: 4173173 - DNA, 25 bp, Homo sapien
gaggcctacagatatgttcatttca

SEQ ID NO: 4173174 - DNA, 25 bp, Homo sapien
tagtagcacacattaagaacctgtt

SEQ ID NO: 4173175 - DNA, 25 bp, Homo sapien
gcagagctcctggtgatgtagagta

SEQ ID NO: 4173176 - DNA, 25 bp, Homo sapien
ggcgacgaatcaggacacagtgaac

SEQ ID NO: 4173177 - DNA, 25 bp, Homo sapien
gaaccagagttgttctcgtccaagg

SEQ ID NO: 4173178 - DNA, 25 bp, Homo sapien
atttatccttgaaaggagtagagga

SEQ ID NO: 4173179 - DNA, 25 bp, Homo sapien
ctcagagtgtggagttatgggttca

SEQ ID NO: 4173180 - DNA, 25 bp, Homo sapien
ggagttatgggttcaagttctggga

SEQ ID NO: 4173181 - DNA, 25 bp, Homo sapien
tttatccttgaaaggagtagaggaa

SEQ ID NO: 4173182 - DNA, 25 bp, Homo sapien
tcagtttgtgctggagtgaatcact

SEQ ID NO: 4173183 - DNA, 25 bp, Homo sapien
cattacggttagtcaaggtccatcg

SEQ ID NO: 4173184 - DNA, 25 bp, Homo sapien
cagttgtcatcaagttcgcaatcag

SEQ ID NO: 4173185 - DNA, 25 bp, Homo sapien
gaactactgagaaaaaccaggcatt

SEQ ID NO: 4173186 - DNA, 25 bp, Homo sapien
ttgttctcatatttgacaggaaatt

SEQ ID NO: 4173187 - DNA, 25 bp, Homo sapien
tattttatccgtcttgtttcatctg

SEQ ID NO: 4173188 - DNA, 25 bp, Homo sapien
ttcaagacttctcagtattttatcc

SEQ ID NO: 4173189 - DNA, 25 bp, Homo sapien
gttctcatatttgacaggaaattgc

SEQ ID NO: 4173190 - DNA, 25 bp, Homo sapien
tgtctgcaaaattacctgataggtt

SEQ ID NO: 4173191 - DNA, 25 bp, Homo sapien
caaaattacctgataggttcagaga

SEQ ID NO: 4173192 - DNA, 25 bp, Homo sapien
ttacctgataggttcagagatgttg

SEQ ID NO: 4173193 - DNA, 25 bp, Homo sapien
ctgtgtctgcaaaattacctgatag

SEQ ID NO: 4173194 - DNA, 25 bp, Homo sapien
tccttctccagcgtttcaacgggga

SEQ ID NO: 4173195 - DNA, 25 bp, Homo sapien
ctccagcgtttcaacggggaaactg

SEQ ID NO: 4173196 - DNA, 25 bp, Homo sapien
gccggcgacctttgacctttctcca

SEQ ID NO: 4173197 - DNA, 25 bp, Homo sapien
gcgtttcaacggggaaactgatcag

SEQ ID NO: 4173198 - DNA, 25 bp, Homo sapien
tcataccccaggtcacgattccggg

SEQ ID NO: 4173199 - DNA, 25 bp, Homo sapien
tcaggtgctggcgttccgcgcggcg

SEQ ID NO: 4173200 - DNA, 25 bp, Homo sapien
gacacgggcgccgtgcgagggtagc

SEQ ID NO: 4173201 - DNA, 25 bp, Homo sapien
tgctgccgggtaggaaaaaatccag

SEQ ID NO: 4173202 - DNA, 25 bp, Homo sapien
tcagctcccttctcaggtcatcaag

SEQ ID NO: 4173203 - DNA, 25 bp, Homo sapien
gatataatcccaatggtgggctcag

SEQ ID NO: 4173204 - DNA, 25 bp, Homo sapien
ggctgcgggagctcacaatttgatg

SEQ ID NO: 4173205 - DNA, 25 bp, Homo sapien
tcttgggtaggtactagttgtagct

SEQ ID NO: 4173206 - DNA, 25 bp, Homo sapien
tcacccgcctttcaacgttccactg

SEQ ID NO: 4173207 - DNA, 25 bp, Homo sapien
aagcaagaacatatgataataggtt

SEQ ID NO: 4173208 - DNA, 25 bp, Homo sapien
caagaacatatgataataggttttc

SEQ ID NO: 4173209 - DNA, 25 bp, Homo sapien
catccaagttgctgtaaagcccatg

SEQ ID NO: 4173210 - DNA, 25 bp, Homo sapien
gcccagacgatgagctcttcaccat

SEQ ID NO: 4173211 - DNA, 25 bp, Homo sapien
agtcccgcccagacgatgagctctt

SEQ ID NO: 4173212 - DNA, 25 bp, Homo sapien
ctgcaaggtagtcccgcccagacga

SEQ ID NO: 4173213 - DNA, 25 bp, Homo sapien
ggtagtcccgcccagacgatgagct

SEQ ID NO: 4173214 - DNA, 25 bp, Homo sapien
gacactttctatttcggtgcccgcc

SEQ ID NO: 4173215 - DNA, 25 bp, Homo sapien
tgacactttctatttcggtgcccgc

SEQ ID NO: 4173216 - DNA, 25 bp, Homo sapien
actttctatttcggtgcccgcctgt

SEQ ID NO: 4173217 - DNA, 25 bp, Homo sapien
cactttctatttcggtgcccgcctg

SEQ ID NO: 4173218 - DNA, 25 bp, Homo sapien
ggaaatcgcgctcttctcgcaggac

SEQ ID NO: 4173219 - DNA, 25 bp, Homo sapien
gaccgtgctggttgggactttcaga

SEQ ID NO: 4173220 - DNA, 25 bp, Homo sapien
tagagaacgcgttctcccgagagca

SEQ ID NO: 4173221 - DNA, 25 bp, Homo sapien
gagagcagttctgcgactccagaga

SEQ ID NO: 4173222 - DNA, 25 bp, Homo sapien
catcggaagatggaagaacttgggc

SEQ ID NO: 4173223 - DNA, 25 bp, Homo sapien
ttggtagagcgaaaaacaagcatcc

SEQ ID NO: 4173224 - DNA, 25 bp, Homo sapien
cacttcctcacttggagtcctaggg

SEQ ID NO: 4173225 - DNA, 25 bp, Homo sapien
tgcttggcaccgctgtaagatgggc

SEQ ID NO: 4173226 - DNA, 25 bp, Homo sapien
agctttccagatactccgtcaggtc

SEQ ID NO: 4173227 - DNA, 25 bp, Homo sapien
cgtttcagcttctgcttagcaccct

SEQ ID NO: 4173228 - DNA, 25 bp, Homo sapien
acgcgctggcggctccctttcgttt

SEQ ID NO: 4173229 - DNA, 25 bp, Homo sapien
tccagatactccgtcaggtcacagc

SEQ ID NO: 4173230 - DNA, 25 bp, Homo sapien
agcagcgctgtgcaccttaagaatc

SEQ ID NO: 4173231 - DNA, 25 bp, Homo sapien
gctgtgcaccttaagaatcgtttat

SEQ ID NO: 4173232 - DNA, 25 bp, Homo sapien
agcctctgcgcgtcgggacagcagc

SEQ ID NO: 4173233 - DNA, 25 bp, Homo sapien
gtgaggcaaacggaaggactgacac

SEQ ID NO: 4173234 - DNA, 25 bp, Homo sapien
gacttgtcaccctcagcattctggg

SEQ ID NO: 4173235 - DNA, 25 bp, Homo sapien
tcagtaaccatgatgtcagtccagg

SEQ ID NO: 4173236 - DNA, 25 bp, Homo sapien
gagtccaggccttgtctatgaatca

SEQ ID NO: 4173237 - DNA, 25 bp, Homo sapien
tcaatacatgtttgggagagtccac

SEQ ID NO: 4173238 - DNA, 25 bp, Homo sapien
tataggcggtgaagacgcttgcttc

SEQ ID NO: 4173239 - DNA, 25 bp, Homo sapien
gtagctttacatacaacttcggaag

SEQ ID NO: 4173240 - DNA, 25 bp, Homo sapien
gatgaggaacttcttaatagccttg

SEQ ID NO: 4173241 - DNA, 25 bp, Homo sapien
agatggtgcagcgaacaggctgcac

SEQ ID NO: 4173242 - DNA, 25 bp, Homo sapien
cagggagggtaaataactggctcca

SEQ ID NO: 4173243 - DNA, 25 bp, Homo sapien
gaaagtttgttcatatcccttagac

SEQ ID NO: 4173244 - DNA, 25 bp, Homo sapien
caggaggatcggaggtttccagaat

SEQ ID NO: 4173245 - DNA, 25 bp, Homo sapien
tggaaaggaagcagctaagccaaag

SEQ ID NO: 4173246 - DNA, 25 bp, Homo sapien
ccatgataatagctacacttatggt

SEQ ID NO: 4173247 - DNA, 25 bp, Homo sapien
ctcagggtgccatgataatagctac

SEQ ID NO: 4173248 - DNA, 25 bp, Homo sapien
aaactcagggtgccatgataatagc

SEQ ID NO: 4173249 - DNA, 25 bp, Homo sapien
tgccatgataatagctacacttatg

SEQ ID NO: 4173250 - DNA, 25 bp, Homo sapien
agactgttcttagcttcagggtagg

SEQ ID NO: 4173251 - DNA, 25 bp, Homo sapien
aggcatctggatggcggccagtgcg

SEQ ID NO: 4173252 - DNA, 25 bp, Homo sapien
tcagggtagggctgaggcaacaagg

SEQ ID NO: 4173253 - DNA, 25 bp, Homo sapien
cccgcagactgttcttagcttcagg

SEQ ID NO: 4173254 - DNA, 25 bp, Homo sapien
tgttcctagtttcaacatgtttccc

SEQ ID NO: 4173255 - DNA, 25 bp, Homo sapien
tcctagtttcaacatgtttccctct

SEQ ID NO: 4173256 - DNA, 25 bp, Homo sapien
tatgggaaaatgtgttcctagtttc

SEQ ID NO: 4173257 - DNA, 25 bp, Homo sapien
catcagctatgggaaaatgtgttcc

SEQ ID NO: 4173258 - DNA, 25 bp, Homo sapien
ctaatggcactggagagtgtgtcca

SEQ ID NO: 4173259 - DNA, 25 bp, Homo sapien
tggcactggagagtgtgtccaccgc

SEQ ID NO: 4173260 - DNA, 25 bp, Homo sapien
aatggcactggagagtgtgtccacc

SEQ ID NO: 4173261 - DNA, 25 bp, Homo sapien
actggagagtgtgtccaccgcttac

SEQ ID NO: 4173262 - DNA, 25 bp, Homo sapien
ctcacccacagccacaaaagcccag

SEQ ID NO: 4173263 - DNA, 25 bp, Homo sapien
tatgcccagagtcctggaacttaga

SEQ ID NO: 4173264 - DNA, 25 bp, Homo sapien
tagctagacttagctaatggcaagg

SEQ ID NO: 4173265 - DNA, 25 bp, Homo sapien
tagacttagctaatggcaagggagg

SEQ ID NO: 4173266 - DNA, 25 bp, Homo sapien
caagagaggtccagaattctcggac

SEQ ID NO: 4173267 - DNA, 25 bp, Homo sapien
taaaactcatactgtacccagagaa

SEQ ID NO: 4173268 - DNA, 25 bp, Homo sapien
tgtctcaaggagtccaaaactggat

SEQ ID NO: 4173269 - DNA, 25 bp, Homo sapien
gctgcccaaggattaacaagagagg

SEQ ID NO: 4173270 - DNA, 25 bp, Homo sapien
catatgttctccatcgacccagaca

SEQ ID NO: 4173271 - DNA, 25 bp, Homo sapien
caaagtgagatcagtaggccaagga

SEQ ID NO: 4173272 - DNA, 25 bp, Homo sapien
gaatcctgacttgcagcagcacttt

SEQ ID NO: 4173273 - DNA, 25 bp, Homo sapien
cagcttgctgccctataaactatgg

SEQ ID NO: 4173274 - DNA, 25 bp, Homo sapien
ggattcactctcaagccagatttac

SEQ ID NO: 4173275 - DNA, 25 bp, Homo sapien
catctatagcataaccgaggaacca

SEQ ID NO: 4173276 - DNA, 25 bp, Homo sapien
tatggcccagcaaaaatccaggact

SEQ ID NO: 4173277 - DNA, 25 bp, Homo sapien
gaaatacagatggaaactagcaggc

SEQ ID NO: 4173278 - DNA, 25 bp, Homo sapien
caggactgagtgaaatgaaatttcc

SEQ ID NO: 4173279 - DNA, 25 bp, Homo sapien
tattaaatcacatcctgcattgttt

SEQ ID NO: 4173280 - DNA, 25 bp, Homo sapien
agaagacggcttgtacttgtgtcag

SEQ ID NO: 4173281 - DNA, 25 bp, Homo sapien
ggcgggtgagaaggaacattacaaa

SEQ ID NO: 4173282 - DNA, 25 bp, Homo sapien
gagggaaagatcctaatccttcaga

SEQ ID NO: 4173283 - DNA, 25 bp, Homo sapien
tcagaccatctatttaaaaaccgtg

SEQ ID NO: 4173284 - DNA, 25 bp, Homo sapien
taatcttaccccatgtcacagtagt

SEQ ID NO: 4173285 - DNA, 25 bp, Homo sapien
ccgtgaacaaactgacaggactctt

SEQ ID NO: 4173286 - DNA, 25 bp, Homo sapien
cactggacattcgtggattcacagc

SEQ ID NO: 4173287 - DNA, 25 bp, Homo sapien
gattcacagccttcctctaacaact

SEQ ID NO: 4173288 - DNA, 25 bp, Homo sapien
ttgagggtcagacactggacattcg

SEQ ID NO: 4173289 - DNA, 25 bp, Homo sapien
tgaaagctgtacacgttttactggg

SEQ ID NO: 4173290 - DNA, 25 bp, Homo sapien
tgggctttttatcattgtccctccc

SEQ ID NO: 4173291 - DNA, 25 bp, Homo sapien
cttgtgtgggctttttatcattgtc

SEQ ID NO: 4173292 - DNA, 25 bp, Homo sapien
gctttttatcattgtccctccctca

SEQ ID NO: 4173293 - DNA, 25 bp, Homo sapien
tgtgtgggctttttatcattgtccc

SEQ ID NO: 4173294 - DNA, 25 bp, Homo sapien
ccaagtttcgctagtttgagaactg

SEQ ID NO: 4173295 - DNA, 25 bp, Homo sapien
gaaagcctcatgtctaagtgccctg

SEQ ID NO: 4173296 - DNA, 25 bp, Homo sapien
ccctgtatccctggagatctttatg

SEQ ID NO: 4173297 - DNA, 25 bp, Homo sapien
tgtagcagcagagaatagacactga

SEQ ID NO: 4173298 - DNA, 25 bp, Homo sapien
cctaatgatcatgtagccccttatt

SEQ ID NO: 4173299 - DNA, 25 bp, Homo sapien
aatgcctaatgatcatgtagcccct

SEQ ID NO: 4173300 - DNA, 25 bp, Homo sapien
aggatgagtatgcttattttgggtt

SEQ ID NO: 4173301 - DNA, 25 bp, Homo sapien
cttagcaataggatgagtatgctta

SEQ ID NO: 4173302 - DNA, 25 bp, Homo sapien
catttggcccaaggttgttgatacc

SEQ ID NO: 4173303 - DNA, 25 bp, Homo sapien
ggttactgcatcatgaaaagttttg

SEQ ID NO: 4173304 - DNA, 25 bp, Homo sapien
gaatttaacatcttcacatttggcc

SEQ ID NO: 4173305 - DNA, 25 bp, Homo sapien
taatcctgaagaataggtgtgcaaa

SEQ ID NO: 4173306 - DNA, 25 bp, Homo sapien
gccgagtttgaagggagcccctctc

SEQ ID NO: 4173307 - DNA, 25 bp, Homo sapien
tgcaaggatggcacaagggagacat

SEQ ID NO: 4173308 - DNA, 25 bp, Homo sapien
ccaccgtctttcgagctggagcgga

SEQ ID NO: 4173309 - DNA, 25 bp, Homo sapien
cggactggccggttctcgtcagaga

SEQ ID NO: 4173310 - DNA, 25 bp, Homo sapien
gcgggcgccaagtgactcagccgtc

SEQ ID NO: 4173311 - DNA, 25 bp, Homo sapien
tgactcagccgtccccgagggcgtt

SEQ ID NO: 4173312 - DNA, 25 bp, Homo sapien
cgagaagcccatccgggcccgaggt

SEQ ID NO: 4173313 - DNA, 25 bp, Homo sapien
gcgggctttcctgtcgccgcagcgt

SEQ ID NO: 4173314 - DNA, 25 bp, Homo sapien
ccaggtaacgaggacagggcttgct

SEQ ID NO: 4173315 - DNA, 25 bp, Homo sapien
gagaacctaaggctccgaggacttg

SEQ ID NO: 4173316 - DNA, 25 bp, Homo sapien
tgtccctcagttcggatgcatcctc

SEQ ID NO: 4173317 - DNA, 25 bp, Homo sapien
gcccaacgtcttggctctcagggtt

SEQ ID NO: 4173318 - DNA, 25 bp, Homo sapien
tccaggagcctgtggtgtttttgtg

SEQ ID NO: 4173319 - DNA, 25 bp, Homo sapien
tggcatgtgcgtgtagttctggtca

SEQ ID NO: 4173320 - DNA, 25 bp, Homo sapien
ggcatgtgcgtgtagttctggtcat

SEQ ID NO: 4173321 - DNA, 25 bp, Homo sapien
ctgctttgtaatggtagatccagcc

SEQ ID NO: 4173322 - DNA, 25 bp, Homo sapien
ctctgggttctctaggatagctgaa

SEQ ID NO: 4173323 - DNA, 25 bp, Homo sapien
tatgatgcccgcacactgagctgat

SEQ ID NO: 4173324 - DNA, 25 bp, Homo sapien
gcaacacagaccatcgggtcatggg

SEQ ID NO: 4173325 - DNA, 25 bp, Homo sapien
gaagtatcagggacaccactaaggg

SEQ ID NO: 4173326 - DNA, 25 bp, Homo sapien
tgtgccagggttgataagtgactct

SEQ ID NO: 4173327 - DNA, 25 bp, Homo sapien
tcacgcaagtgtctggtccgacagg

SEQ ID NO: 4173328 - DNA, 25 bp, Homo sapien
tctttaaaggagttgaggcactgtc

SEQ ID NO: 4173329 - DNA, 25 bp, Homo sapien
agggagctgagagctactatttgga

SEQ ID NO: 4173330 - DNA, 25 bp, Homo sapien
tgagagctactatttggatgtttcc

SEQ ID NO: 4173331 - DNA, 25 bp, Homo sapien
agctgagagctactatttggatgtt

SEQ ID NO: 4173332 - DNA, 25 bp, Homo sapien
gagagctactatttggatgtttcca

SEQ ID NO: 4173333 - DNA, 25 bp, Homo sapien
gaggatgcagggctcattaacaaaa

SEQ ID NO: 4173334 - DNA, 25 bp, Homo sapien
caggttgtgaaacagagagggactc

SEQ ID NO: 4173335 - DNA, 25 bp, Homo sapien
tctactttgaggaatatggccatga

SEQ ID NO: 4173336 - DNA, 25 bp, Homo sapien
caaagcattgctagagctggatgag

SEQ ID NO: 4173337 - DNA, 25 bp, Homo sapien
gataatcaggagaatgatttgttct

SEQ ID NO: 4173338 - DNA, 25 bp, Homo sapien
tggtatgaatatgtggatgggctgg

SEQ ID NO: 4173339 - DNA, 25 bp, Homo sapien
tggggcagggggatgtacctttgga

SEQ ID NO: 4173340 - DNA, 25 bp, Homo sapien
cctctgcatgaacctcctggtggct

SEQ ID NO: 4173341 - DNA, 25 bp, Homo sapien
ccttcccataggtgtctttgtcttc

SEQ ID NO: 4173342 - DNA, 25 bp, Homo sapien
gattgcctctgcatgaacctcctgg

SEQ ID NO: 4173343 - DNA, 25 bp, Homo sapien
ttctaagattgcctctgcatgaacc

SEQ ID NO: 4173344 - DNA, 25 bp, Homo sapien
gggacacctcttgtgatttagcttc

SEQ ID NO: 4173345 - DNA, 25 bp, Homo sapien
tctgactcctatttgccctccaggg

SEQ ID NO: 4173346 - DNA, 25 bp, Homo sapien
agggccaaccttaggcctactcgtg

SEQ ID NO: 4173347 - DNA, 25 bp, Homo sapien
cctactcgtgggacacctcttgtga

SEQ ID NO: 4173348 - DNA, 25 bp, Homo sapien
tgacggattctaaatctataggatc

SEQ ID NO: 4173349 - DNA, 25 bp, Homo sapien
cggattctaaatctataggatctgc

SEQ ID NO: 4173350 - DNA, 25 bp, Homo sapien
gcaggagatgtgacggattctaaat

SEQ ID NO: 4173351 - DNA, 25 bp, Homo sapien
gatgtgacggattctaaatctatag

SEQ ID NO: 4173352 - DNA, 25 bp, Homo sapien
tctcatgattcctgtttaaagaggg

SEQ ID NO: 4173353 - DNA, 25 bp, Homo sapien
ttaaagagggtgtaggcttgcagta

SEQ ID NO: 4173354 - DNA, 25 bp, Homo sapien
taaatagcgagtagctgatcctcag

SEQ ID NO: 4173355 - DNA, 25 bp, Homo sapien
gattgttgcaggcttaaattcactg

SEQ ID NO: 4173356 - DNA, 25 bp, Homo sapien
gaagatgatacgaaggattactgtc

SEQ ID NO: 4173357 - DNA, 25 bp, Homo sapien
cctgtgcagttcatgattgtgttca

SEQ ID NO: 4173358 - DNA, 25 bp, Homo sapien
aatatatacagcagtggtcccagac

SEQ ID NO: 4173359 - DNA, 25 bp, Homo sapien
tactgtcaaatatgtgggcacctcc

SEQ ID NO: 4173360 - DNA, 25 bp, Homo sapien
caacctctcgtggttcgtcaacgaa

SEQ ID NO: 4173361 - DNA, 25 bp, Homo sapien
tgggtccacaagtcatcagtagcga

SEQ ID NO: 4173362 - DNA, 25 bp, Homo sapien
tgactcacacataaaagactggttg

SEQ ID NO: 4173363 - DNA, 25 bp, Homo sapien
tgaccttggtcttagagctggccct

SEQ ID NO: 4173364 - DNA, 25 bp, Homo sapien
caggcccataccaccatgtattttt

SEQ ID NO: 4173365 - DNA, 25 bp, Homo sapien
ttacaggcccataccaccatgtatt

SEQ ID NO: 4173366 - DNA, 25 bp, Homo sapien
ctccgtccttccaggtttaagcaat

SEQ ID NO: 4173367 - DNA, 25 bp, Homo sapien
tgcaacctccgtccttccaggttta

SEQ ID NO: 4173368 - DNA, 25 bp, Homo sapien
caaagcagatgcactgagggcccat

SEQ ID NO: 4173369 - DNA, 25 bp, Homo sapien
tcccagtaccatagctctcagctgc

SEQ ID NO: 4173370 - DNA, 25 bp, Homo sapien
cagatagggacctcccagtaccata

SEQ ID NO: 4173371 - DNA, 25 bp, Homo sapien
cagcccgttctcagatagggacctc

SEQ ID NO: 4173372 - DNA, 25 bp, Homo sapien
ccgttctcagatagggacctcccag

SEQ ID NO: 4173373 - DNA, 25 bp, Homo sapien
cagagaccatagaggtggaaccact

SEQ ID NO: 4173374 - DNA, 25 bp, Homo sapien
ccagagaccatagaggtggaaccac

SEQ ID NO: 4173375 - DNA, 25 bp, Homo sapien
ggccagagaccatagaggtggaacc

SEQ ID NO: 4173376 - DNA, 25 bp, Homo sapien
gagaccatagaggtggaaccacttc

SEQ ID NO: 4173377 - DNA, 25 bp, Homo sapien
cagagcattcccctccagcatacat

SEQ ID NO: 4173378 - DNA, 25 bp, Homo sapien
ctgcctctcaaaggctgtgcattcc

SEQ ID NO: 4173379 - DNA, 25 bp, Homo sapien
tgtgcattcccagagcattcccctc

SEQ ID NO: 4173380 - DNA, 25 bp, Homo sapien
gcattcccagagcattcccctccag

SEQ ID NO: 4173381 - DNA, 25 bp, Homo sapien
aattccctattatgacgtgctctaa

SEQ ID NO: 4173382 - DNA, 25 bp, Homo sapien
tgtggccttcaagtaactgtaattt

SEQ ID NO: 4173383 - DNA, 25 bp, Homo sapien
ttatgacgtgctctaagcattcctt

SEQ ID NO: 4173384 - DNA, 25 bp, Homo sapien
ccctattatgacgtgctctaagcat

SEQ ID NO: 4173385 - DNA, 25 bp, Homo sapien
cacgatgccgtgagtctctataaat

SEQ ID NO: 4173386 - DNA, 25 bp, Homo sapien
tagccgttgtatgtttgaggtgact

SEQ ID NO: 4173387 - DNA, 25 bp, Homo sapien
ggtgactcctgaaagccgatagatt

SEQ ID NO: 4173388 - DNA, 25 bp, Homo sapien
gcacagctcttcaaaacgtatggaa

SEQ ID NO: 4173389 - DNA, 25 bp, Homo sapien
tcctggaggtacacttcccttgtca

SEQ ID NO: 4173390 - DNA, 25 bp, Homo sapien
tccctaaagtagagcttgcaaagcg

SEQ ID NO: 4173391 - DNA, 25 bp, Homo sapien
gacattgatctgagccaaactcttg

SEQ ID NO: 4173392 - DNA, 25 bp, Homo sapien
cccttgtcagatctggacattgatc

SEQ ID NO: 4173393 - DNA, 25 bp, Homo sapien
tccctgtaccactgaaaactcctaa

SEQ ID NO: 4173394 - DNA, 25 bp, Homo sapien
tcctttcttaatatacagttgtgca

SEQ ID NO: 4173395 - DNA, 25 bp, Homo sapien
aaatcccatcactgaaatgaacagt

SEQ ID NO: 4173396 - DNA, 25 bp, Homo sapien
catatttttacagcccaagcccatt

SEQ ID NO: 4173397 - DNA, 25 bp, Homo sapien
tctgccttagatctaaaggagaagg

SEQ ID NO: 4173398 - DNA, 25 bp, Homo sapien
aatgacaactctatgccagctggta

SEQ ID NO: 4173399 - DNA, 25 bp, Homo sapien
tgccagctggtacatgttgacttct

SEQ ID NO: 4173400 - DNA, 25 bp, Homo sapien
gaagggccccataaccaatgacaac

SEQ ID NO: 4173401 - DNA, 25 bp, Homo sapien
gctgcctgtcctagaagccaggaag

SEQ ID NO: 4173402 - DNA, 25 bp, Homo sapien
gagcgttgtccctgaaacctggtgg

SEQ ID NO: 4173403 - DNA, 25 bp, Homo sapien
ctgctgcctgtcctagaagccagga

SEQ ID NO: 4173404 - DNA, 25 bp, Homo sapien
ttccttggcagggataagagcgttg

SEQ ID NO: 4173405 - DNA, 25 bp, Homo sapien
taacattttggattcgggccagttg

SEQ ID NO: 4173406 - DNA, 25 bp, Homo sapien
ttcgggccagttggccttcttcagg

SEQ ID NO: 4173407 - DNA, 25 bp, Homo sapien
cttcagggcaatgcgacactgcctc

SEQ ID NO: 4173408 - DNA, 25 bp, Homo sapien
ggaagctcctggataacattttgga

SEQ ID NO: 4173409 - DNA, 25 bp, Homo sapien
ccttgctgccaatgtccctggtcag

SEQ ID NO: 4173410 - DNA, 25 bp, Homo sapien
tcctttccatgatgccagcctgtct

SEQ ID NO: 4173411 - DNA, 25 bp, Homo sapien
tattacactgcattgagaggccaca

SEQ ID NO: 4173412 - DNA, 25 bp, Homo sapien
tgttctgcaggtgatttggagactg

SEQ ID NO: 4173413 - DNA, 25 bp, Homo sapien
ggccaggtgtcgaatcaggtattcc

SEQ ID NO: 4173414 - DNA, 25 bp, Homo sapien
ctgctgaaggaggcgatatgggcca

SEQ ID NO: 4173415 - DNA, 25 bp, Homo sapien
gtgtcgaatcaggtattccaaggtc

SEQ ID NO: 4173416 - DNA, 25 bp, Homo sapien
ccaggtgtcgaatcaggtattccaa

SEQ ID NO: 4173417 - DNA, 25 bp, Homo sapien
aggaggtttggcgcccacaccaggg

SEQ ID NO: 4173418 - DNA, 25 bp, Homo sapien
ggaggtttggcgcccacaccagggc

SEQ ID NO: 4173419 - DNA, 25 bp, Homo sapien
tgaggaggtttggcgcccacaccag

SEQ ID NO: 4173420 - DNA, 25 bp, Homo sapien
ctgaggaggtttggcgcccacacca

SEQ ID NO: 4173421 - DNA, 25 bp, Homo sapien
ccaggtgcaccgttgttaaagattt

SEQ ID NO: 4173422 - DNA, 25 bp, Homo sapien
tcaatatgaactcaatcaccacctg

SEQ ID NO: 4173423 - DNA, 25 bp, Homo sapien
ccagagacccaggtgcaccgttgtt

SEQ ID NO: 4173424 - DNA, 25 bp, Homo sapien
taaagatttgatctacatgattcaa

SEQ ID NO: 4173425 - DNA, 25 bp, Homo sapien
cgggcttgagcttcctcaaggctca

SEQ ID NO: 4173426 - DNA, 25 bp, Homo sapien
ccatgggagggacaatctcaggcag

SEQ ID NO: 4173427 - DNA, 25 bp, Homo sapien
cctttccttgcgagcaggatggtta

SEQ ID NO: 4173428 - DNA, 25 bp, Homo sapien
tctggtaactcaaggacagtgtgga

SEQ ID NO: 4173429 - DNA, 25 bp, Homo sapien
gtgcacccgagatgtggttgaaagc

SEQ ID NO: 4173430 - DNA, 25 bp, Homo sapien
aaaatgcatttggtagtctttccaa

SEQ ID NO: 4173431 - DNA, 25 bp, Homo sapien
tttgggtatggtgcacccgagatgt

SEQ ID NO: 4173432 - DNA, 25 bp, Homo sapien
gcatttggtagtctttccaaggtat

SEQ ID NO: 4173433 - DNA, 25 bp, Homo sapien
ggtcctgttgggctcctgcactaca

SEQ ID NO: 4173434 - DNA, 25 bp, Homo sapien
ctgctgggacatccacaggcaaaga

SEQ ID NO: 4173435 - DNA, 25 bp, Homo sapien
gtgaagactttcacggactgaaaag

SEQ ID NO: 4173436 - DNA, 25 bp, Homo sapien
tcacggactgaaaagggttggatga

SEQ ID NO: 4173437 - DNA, 25 bp, Homo sapien
gatccagaacgtcccaggttaaata

SEQ ID NO: 4173438 - DNA, 25 bp, Homo sapien
ctttgatttactggagagctttcgc

SEQ ID NO: 4173439 - DNA, 25 bp, Homo sapien
tctactcagttttgatttggagtct

SEQ ID NO: 4173440 - DNA, 25 bp, Homo sapien
tggagtctgatccagaacgtcccag

SEQ ID NO: 4173441 - DNA, 25 bp, Homo sapien
tacgatgattacagatgcagaccca

SEQ ID NO: 4173442 - DNA, 25 bp, Homo sapien
taagctgagttttgccatacgatga

SEQ ID NO: 4173443 - DNA, 25 bp, Homo sapien
tacttcttgggtgtaagtcccattc

SEQ ID NO: 4173444 - DNA, 25 bp, Homo sapien
tgcccttcgcacatagctcttgtac

SEQ ID NO: 4173445 - DNA, 25 bp, Homo sapien
gtcacagaggccgggtagcagctct

SEQ ID NO: 4173446 - DNA, 25 bp, Homo sapien
tcacagaggccgggtagcagctctg

SEQ ID NO: 4173447 - DNA, 25 bp, Homo sapien
cacagaggccgggtagcagctctgt

SEQ ID NO: 4173448 - DNA, 25 bp, Homo sapien
catgtcaaccttgataggcagtgac

SEQ ID NO: 4173449 - DNA, 25 bp, Homo sapien
tgtgtattctaggacatgcactgcc

SEQ ID NO: 4173450 - DNA, 25 bp, Homo sapien
cttgataggcagtgaccaggcgccc

SEQ ID NO: 4173451 - DNA, 25 bp, Homo sapien
tgttttccaggagctgtatttctgg

SEQ ID NO: 4173452 - DNA, 25 bp, Homo sapien
gctggtcggatagtagccttttcca

SEQ ID NO: 4173453 - DNA, 25 bp, Homo sapien
cactgaacatagtgagtccatgctt

SEQ ID NO: 4173454 - DNA, 25 bp, Homo sapien
cttctacaggcactgaacatagtga

SEQ ID NO: 4173455 - DNA, 25 bp, Homo sapien
gagtccatgcttttagctggtcgga

SEQ ID NO: 4173456 - DNA, 25 bp, Homo sapien
aaagaggatggctctttaggcctag

SEQ ID NO: 4173457 - DNA, 25 bp, Homo sapien
gaaaagtagccatggacttcagctg

SEQ ID NO: 4173458 - DNA, 25 bp, Homo sapien
aagtagccatggacttcagctgtgg

SEQ ID NO: 4173459 - DNA, 25 bp, Homo sapien
aaagtagccatggacttcagctgtg

SEQ ID NO: 4173460 - DNA, 25 bp, Homo sapien
caggtttgaatgaaaagtagccatg

SEQ ID NO: 4173461 - DNA, 25 bp, Homo sapien
cagacaggggggtttgatttcccag

SEQ ID NO: 4173462 - DNA, 25 bp, Homo sapien
tcagaggatgagaaactagaaatgt

SEQ ID NO: 4173463 - DNA, 25 bp, Homo sapien
aggcggtaggatgatgtttgctcaa

SEQ ID NO: 4173464 - DNA, 25 bp, Homo sapien
ctgttagaaagcacagttgtgagga

SEQ ID NO: 4173465 - DNA, 25 bp, Homo sapien
cacagataccgcaaagggctcggag

SEQ ID NO: 4173466 - DNA, 25 bp, Homo sapien
tgctggaatgaaaaatccaccggtg

SEQ ID NO: 4173467 - DNA, 25 bp, Homo sapien
gatttgctagggctgtcgttcgaag

SEQ ID NO: 4173468 - DNA, 25 bp, Homo sapien
tcaacaggccggaaaaccttcagct

SEQ ID NO: 4173469 - DNA, 25 bp, Homo sapien
gggaatgtggtgcaaggctcacaaa

SEQ ID NO: 4173470 - DNA, 25 bp, Homo sapien
ggatgcaccctagttattcaaccag

SEQ ID NO: 4173471 - DNA, 25 bp, Homo sapien
tagaacttcactgtgtggatgcacc

SEQ ID NO: 4173472 - DNA, 25 bp, Homo sapien
ggctcacaaagctatggactctata

SEQ ID NO: 4173473 - DNA, 25 bp, Homo sapien
ttttcagcaactgggactcaatccc

SEQ ID NO: 4173474 - DNA, 25 bp, Homo sapien
gaatgtgtcttacaacaatccctcc

SEQ ID NO: 4173475 - DNA, 25 bp, Homo sapien
gttgagttcattcccattttcagca

SEQ ID NO: 4173476 - DNA, 25 bp, Homo sapien
tggtaaccctaagaagcactatgta

SEQ ID NO: 4173477 - DNA, 25 bp, Homo sapien
tatctctaggttgcttatctctagg

SEQ ID NO: 4173478 - DNA, 25 bp, Homo sapien
ttatctctaggttgcttatctctag

SEQ ID NO: 4173479 - DNA, 25 bp, Homo sapien
atctctaggttgcttatctctaggt

SEQ ID NO: 4173480 - DNA, 25 bp, Homo sapien
catggagaagcacagcttcggctct

SEQ ID NO: 4173481 - DNA, 25 bp, Homo sapien
gttgagagctcaaggagctttctgg

SEQ ID NO: 4173482 - DNA, 25 bp, Homo sapien
agacctgccttcttaggtacagaag

SEQ ID NO: 4173483 - DNA, 25 bp, Homo sapien
cactgtccccggtgcttcaggtact

SEQ ID NO: 4173484 - DNA, 25 bp, Homo sapien
tgctctccaggcgaagtgctgtcct

SEQ ID NO: 4173485 - DNA, 25 bp, Homo sapien
gaattactgatctccgctgaggctg

SEQ ID NO: 4173486 - DNA, 25 bp, Homo sapien
cactggtgaggacttaatggctccg

SEQ ID NO: 4173487 - DNA, 25 bp, Homo sapien
cctaatctgtggactgctgtgcccc

SEQ ID NO: 4173488 - DNA, 25 bp, Homo sapien
cagtacagtggcagttggagtccca

SEQ ID NO: 4173489 - DNA, 25 bp, Homo sapien
ggaggccttctaaccccaatagcaa

SEQ ID NO: 4173490 - DNA, 25 bp, Homo sapien
gaaatcatcttggacaggtctccag

SEQ ID NO: 4173491 - DNA, 25 bp, Homo sapien
caaacttgataacgtgtgcctggaa

SEQ ID NO: 4173492 - DNA, 25 bp, Homo sapien
tatatatctgttgcagggcatcagc

SEQ ID NO: 4173493 - DNA, 25 bp, Homo sapien
tggttgtgacgcctacccagaggta

SEQ ID NO: 4173494 - DNA, 25 bp, Homo sapien
aacatggtccttatcagagcgtcga

SEQ ID NO: 4173495 - DNA, 25 bp, Homo sapien
gaacctgagaagagatgccctgtga

SEQ ID NO: 4173496 - DNA, 25 bp, Homo sapien
tcatcagattggactggccgtggta

SEQ ID NO: 4173497 - DNA, 25 bp, Homo sapien
gccgtggtagaatgtggcccaaata

SEQ ID NO: 4173498 - DNA, 25 bp, Homo sapien
catgcttggaaagatgcttgctccc

SEQ ID NO: 4173499 - DNA, 25 bp, Homo sapien
tcttcatgcaggaatggaaggcctg

SEQ ID NO: 4173500 - DNA, 25 bp, Homo sapien
taggttgtaggattgttcacctccc

SEQ ID NO: 4173501 - DNA, 25 bp, Homo sapien
gcaaatatcactaggttgtgaacct

SEQ ID NO: 4173502 - DNA, 25 bp, Homo sapien
cacctttgtggtcatatatataaca

SEQ ID NO: 4173503 - DNA, 25 bp, Homo sapien
ggttctaaatagaaagttgttgcca

SEQ ID NO: 4173504 - DNA, 25 bp, Homo sapien
gggatttttgtatgggatgggaaga

SEQ ID NO: 4173505 - DNA, 25 bp, Homo sapien
ggatttttgtatgggatgggaagaa

SEQ ID NO: 4173506 - DNA, 25 bp, Homo sapien
agggatttttgtatgggatgggaag

SEQ ID NO: 4173507 - DNA, 25 bp, Homo sapien
gaagaaacaatggtgcagaagtaga

SEQ ID NO: 4173508 - DNA, 25 bp, Homo sapien
tattaaaacttacgggatgcagcaa

SEQ ID NO: 4173509 - DNA, 25 bp, Homo sapien
cagttaactgcaccacaaaagggaa

SEQ ID NO: 4173510 - DNA, 25 bp, Homo sapien
gagtgccatacaatcatcagcagag

SEQ ID NO: 4173511 - DNA, 25 bp, Homo sapien
aattttagcggagctatgcgggccg

SEQ ID NO: 4173512 - DNA, 25 bp, Homo sapien
tgaactcaaggcaaactaagctgcc

SEQ ID NO: 4173513 - DNA, 25 bp, Homo sapien
tctccgggacagaatagtattaggc

SEQ ID NO: 4173514 - DNA, 25 bp, Homo sapien
catccttattgagggcagtgtcgtc

SEQ ID NO: 4173515 - DNA, 25 bp, Homo sapien
tctattccttgctgcggtcggagaa

SEQ ID NO: 4173516 - DNA, 25 bp, Homo sapien
ctccaagtgatccatgggccacctg

SEQ ID NO: 4173517 - DNA, 25 bp, Homo sapien
ttcagggcccctatatcagacttct

SEQ ID NO: 4173518 - DNA, 25 bp, Homo sapien
cattctgaggtgtaagctcttaaga

SEQ ID NO: 4173519 - DNA, 25 bp, Homo sapien
aaagtgtgcctattacctatagctg

SEQ ID NO: 4173520 - DNA, 25 bp, Homo sapien
gctactagcgtaacagtggtccctg

SEQ ID NO: 4173521 - DNA, 25 bp, Homo sapien
aagcaggcagttatctaagactcct

SEQ ID NO: 4173522 - DNA, 25 bp, Homo sapien
cccgcttttatgcaagtaccgctta

SEQ ID NO: 4173523 - DNA, 25 bp, Homo sapien
gggtaagtgttaggaggccactcta

SEQ ID NO: 4173524 - DNA, 25 bp, Homo sapien
tgagatgtatcgctgtgttctactg

SEQ ID NO: 4173525 - DNA, 25 bp, Homo sapien
tccattatgctggaaagaatgaagc

SEQ ID NO: 4173526 - DNA, 25 bp, Homo sapien
ttgggatggagatgacagtcaccct

SEQ ID NO: 4173527 - DNA, 25 bp, Homo sapien
gggatgtaattctgcagtaaatgtc

SEQ ID NO: 4173528 - DNA, 25 bp, Homo sapien
gaacttttctgcacggacagcagga

SEQ ID NO: 4173529 - DNA, 25 bp, Homo sapien
tgtcatgctcaccacgcaactgttg

SEQ ID NO: 4173530 - DNA, 25 bp, Homo sapien
gaagttggaacatgggtcctacagc

SEQ ID NO: 4173531 - DNA, 25 bp, Homo sapien
gaccaccagtgcatgtgtgactcag

SEQ ID NO: 4173532 - DNA, 25 bp, Homo sapien
tgctggagtcgctaaaagaacagtt

SEQ ID NO: 4173533 - DNA, 25 bp, Homo sapien
gaagagctccccagataatgaattt

SEQ ID NO: 4173534 - DNA, 25 bp, Homo sapien
gactacaactatgtggttcagcacg

SEQ ID NO: 4173535 - DNA, 25 bp, Homo sapien
gaatttactatcagcaatgtccctc

SEQ ID NO: 4173536 - DNA, 25 bp, Homo sapien
aagaacaagctgtactaaaatgacc

SEQ ID NO: 4173537 - DNA, 25 bp, Homo sapien
gaaacagcctgtttccaacaagaga

SEQ ID NO: 4173538 - DNA, 25 bp, Homo sapien
cgtacacacgtattgggaaaatcct

SEQ ID NO: 4173539 - DNA, 25 bp, Homo sapien
agtgttacagccactatctgaggta

SEQ ID NO: 4173540 - DNA, 25 bp, Homo sapien
cagtgagactacaaaggagggtaaa

SEQ ID NO: 4173541 - DNA, 25 bp, Homo sapien
gcaggtcgcctcacccatagaatga

SEQ ID NO: 4173542 - DNA, 25 bp, Homo sapien
aaagccctccattgtagagcccagt

SEQ ID NO: 4173543 - DNA, 25 bp, Homo sapien
aatacttcttctctgtctgggtgcg

SEQ ID NO: 4173544 - DNA, 25 bp, Homo sapien
aataacaggttgcacagttggtggc

SEQ ID NO: 4173545 - DNA, 25 bp, Homo sapien
tttgcatatatcacagaaaggatcc

SEQ ID NO: 4173546 - DNA, 25 bp, Homo sapien
gaaaggatccctaccctgagaaaga

SEQ ID NO: 4173547 - DNA, 25 bp, Homo sapien
tagagtccgtttattcaccttcagg

SEQ ID NO: 4173548 - DNA, 25 bp, Homo sapien
tagcagtaacgtgaccctaggtgac

SEQ ID NO: 4173549 - DNA, 25 bp, Homo sapien
caagaaggatcagtagcatggtgcc

SEQ ID NO: 4173550 - DNA, 25 bp, Homo sapien
tacatggagtccaagagacagcaag

SEQ ID NO: 4173551 - DNA, 25 bp, Homo sapien
tcttagcaaacaataagcgcagggt

SEQ ID NO: 4173552 - DNA, 25 bp, Homo sapien
ggctattttcaacaagctacttaac

SEQ ID NO: 4173553 - DNA, 25 bp, Homo sapien
tgtgtaaagctactaatccagtgcc

SEQ ID NO: 4173554 - DNA, 25 bp, Homo sapien
cagtgcctgacacaacaaaattctt

SEQ ID NO: 4173555 - DNA, 25 bp, Homo sapien
tagtagaagctatcaaaatgtgaga

SEQ ID NO: 4173556 - DNA, 25 bp, Homo sapien
gcgcggccccgcacaaagatggccc

SEQ ID NO: 4173557 - DNA, 25 bp, Homo sapien
cggcgctggcggaagcgcggccccg

SEQ ID NO: 4173558 - DNA, 25 bp, Homo sapien
cgccggcagacctactgcagattcc

SEQ ID NO: 4173559 - DNA, 25 bp, Homo sapien
tgcagattccccgctgcggcgctgg

SEQ ID NO: 4173560 - DNA, 25 bp, Homo sapien
tgactccttctggcggccctgcgct

SEQ ID NO: 4173561 - DNA, 25 bp, Homo sapien
tctggcggccctgcgctgagggcag

SEQ ID NO: 4173562 - DNA, 25 bp, Homo sapien
cagccagagccgaagcggcgagcta

SEQ ID NO: 4173563 - DNA, 25 bp, Homo sapien
acagcagccagagccgaagcggcga

SEQ ID NO: 4173564 - DNA, 25 bp, Homo sapien
agcggccacggcatcttcccgggag

SEQ ID NO: 4173565 - DNA, 25 bp, Homo sapien
ggccgcgcgggggagcgcctcggga

SEQ ID NO: 4173566 - DNA, 25 bp, Homo sapien
gggcaggctcggcactgcccggagc

SEQ ID NO: 4173567 - DNA, 25 bp, Homo sapien
ccagctccgagctacagcggccacg

SEQ ID NO: 4173568 - DNA, 25 bp, Homo sapien
tcaagtctgttcctctatccggctg

SEQ ID NO: 4173569 - DNA, 25 bp, Homo sapien
ctatggatagtgacgcggactctca

SEQ ID NO: 4173570 - DNA, 25 bp, Homo sapien
tgctcaaccctcagaatgctatgga

SEQ ID NO: 4173571 - DNA, 25 bp, Homo sapien
cccactgatggaaacgaaacgctag

SEQ ID NO: 4173572 - DNA, 25 bp, Homo sapien
cttgaacatggttcgtaattctcca

SEQ ID NO: 4173573 - DNA, 25 bp, Homo sapien
ttgacttgaacatggttcgtaattc

SEQ ID NO: 4173574 - DNA, 25 bp, Homo sapien
gacttgaacatggttcgtaattctc

SEQ ID NO: 4173575 - DNA, 25 bp, Homo sapien
gaacatggttcgtaattctccaaag

SEQ ID NO: 4173576 - DNA, 25 bp, Homo sapien
tgggtccctagcttccgtctgacta

SEQ ID NO: 4173577 - DNA, 25 bp, Homo sapien
tcctcggaaaggagttagatcctct

SEQ ID NO: 4173578 - DNA, 25 bp, Homo sapien
agtgatctgatagtgggtccctagc

SEQ ID NO: 4173579 - DNA, 25 bp, Homo sapien
tgcagtcattttcccggtacagtct

SEQ ID NO: 4173580 - DNA, 25 bp, Homo sapien
caaccagacataccataaattcagc

SEQ ID NO: 4173581 - DNA, 25 bp, Homo sapien
cataccataaattcagcagagtagt

SEQ ID NO: 4173582 - DNA, 25 bp, Homo sapien
cataaattcagcagagtagtgcctg

SEQ ID NO: 4173583 - DNA, 25 bp, Homo sapien
aaattcagcagagtagtgcctgcag

SEQ ID NO: 4173584 - DNA, 25 bp, Homo sapien
tggcaggctccatccatttaggaac

SEQ ID NO: 4173585 - DNA, 25 bp, Homo sapien
tgtcagggagacgcccgatcacttc

SEQ ID NO: 4173586 - DNA, 25 bp, Homo sapien
taggaacctgaggataatctcgtac

SEQ ID NO: 4173587 - DNA, 25 bp, Homo sapien
ttgatcaccatctccatgtcaggga

SEQ ID NO: 4173588 - DNA, 25 bp, Homo sapien
catttacatgaacctgagcactgac

SEQ ID NO: 4173589 - DNA, 25 bp, Homo sapien
catccctgccgatacaacatttaca

SEQ ID NO: 4173590 - DNA, 25 bp, Homo sapien
cacaggtgtatcctagctactccaa

SEQ ID NO: 4173591 - DNA, 25 bp, Homo sapien
actcttaccccatagaatcttccat

SEQ ID NO: 4173592 - DNA, 25 bp, Homo sapien
cccttggaaactagaagtcactgat

SEQ ID NO: 4173593 - DNA, 25 bp, Homo sapien
gaaagttagtataccgacggtcata

SEQ ID NO: 4173594 - DNA, 25 bp, Homo sapien
gataacaaacacgaagtccctactg

SEQ ID NO: 4173595 - DNA, 25 bp, Homo sapien
gctattcaatagaagctgcacaatt

SEQ ID NO: 4173596 - DNA, 25 bp, Homo sapien
caggatctggacagccttggtttag

SEQ ID NO: 4173597 - DNA, 25 bp, Homo sapien
gaggcaactgcaatcatgccacagg

SEQ ID NO: 4173598 - DNA, 25 bp, Homo sapien
ctggacagccttggtttagtgtcac

SEQ ID NO: 4173599 - DNA, 25 bp, Homo sapien
caggtcgtcctaaatcagtcttgga

SEQ ID NO: 4173600 - DNA, 25 bp, Homo sapien
tacatgatatcatggtactctgatg

SEQ ID NO: 4173601 - DNA, 25 bp, Homo sapien
caggatacatgatatcatggtactc

SEQ ID NO: 4173602 - DNA, 25 bp, Homo sapien
aaatgtccaagcaggatacatgata

SEQ ID NO: 4173603 - DNA, 25 bp, Homo sapien
caagcaggatacatgatatcatggt

SEQ ID NO: 4173604 - DNA, 25 bp, Homo sapien
ctgaagaggtcccaccgtccaagac

SEQ ID NO: 4173605 - DNA, 25 bp, Homo sapien
gatcttctctgaagaggtcccaccg

SEQ ID NO: 4173606 - DNA, 25 bp, Homo sapien
ttctctgaagaggtcccaccgtcca

SEQ ID NO: 4173607 - DNA, 25 bp, Homo sapien
tcttctctgaagaggtcccaccgtc

SEQ ID NO: 4173608 - DNA, 25 bp, Homo sapien
cagtctaaggccagaactatcttgt

SEQ ID NO: 4173609 - DNA, 25 bp, Homo sapien
tctaaggccagaactatcttgtttt

SEQ ID NO: 4173610 - DNA, 25 bp, Homo sapien
tctccagtctaaggccagaactatc

SEQ ID NO: 4173611 - DNA, 25 bp, Homo sapien
ctgattctccagtctaaggccagaa

SEQ ID NO: 4173612 - DNA, 25 bp, Homo sapien
acttgcttcgtaggaaccctccctg

SEQ ID NO: 4173613 - DNA, 25 bp, Homo sapien
agatgcatcattcttaacttgcttc

SEQ ID NO: 4173614 - DNA, 25 bp, Homo sapien
gcatcattcttaacttgcttcgtag

SEQ ID NO: 4173615 - DNA, 25 bp, Homo sapien
cattcttaacttgcttcgtaggaac

SEQ ID NO: 4173616 - DNA, 25 bp, Homo sapien
tcctcggaaatatgctgtagagttt

SEQ ID NO: 4173617 - DNA, 25 bp, Homo sapien
cggaaatatgctgtagagtttttct

SEQ ID NO: 4173618 - DNA, 25 bp, Homo sapien
tgatcctcggaaatatgctgtagag

SEQ ID NO: 4173619 - DNA, 25 bp, Homo sapien
cttgatcctcggaaatatgctgtag

SEQ ID NO: 4173620 - DNA, 25 bp, Homo sapien
gaatgagaggatctcgttctggact

SEQ ID NO: 4173621 - DNA, 25 bp, Homo sapien
tttcatagatttccaggcctggttt

SEQ ID NO: 4173622 - DNA, 25 bp, Homo sapien
gtgtattctgcatcaacaagttttg

SEQ ID NO: 4173623 - DNA, 25 bp, Homo sapien
agatttccaggcctggtttttggtg

SEQ ID NO: 4173624 - DNA, 25 bp, Homo sapien
ccaggtggcaatgttctttgagtga

SEQ ID NO: 4173625 - DNA, 25 bp, Homo sapien
tgttcactgctgtagttctagtcag

SEQ ID NO: 4173626 - DNA, 25 bp, Homo sapien
tctttgagtgagaatgttcactgct

SEQ ID NO: 4173627 - DNA, 25 bp, Homo sapien
tgtagttctagtcagatgactggtg

SEQ ID NO: 4173628 - DNA, 25 bp, Homo sapien
caatagagaccatacgacctgcaaa

SEQ ID NO: 4173629 - DNA, 25 bp, Homo sapien
ctaatgctggttcatggaactttct

SEQ ID NO: 4173630 - DNA, 25 bp, Homo sapien
gaatttacatatatgctaatgctgg

SEQ ID NO: 4173631 - DNA, 25 bp, Homo sapien
tagtcataatatggccagaaaagca

SEQ ID NO: 4173632 - DNA, 25 bp, Homo sapien
taagcacacctaaagccatgttgcc

SEQ ID NO: 4173633 - DNA, 25 bp, Homo sapien
tttgaattcagatgtcacagcctgc

SEQ ID NO: 4173634 - DNA, 25 bp, Homo sapien
gctcaaggtcagtgtggctctaaat

SEQ ID NO: 4173635 - DNA, 25 bp, Homo sapien
ccttagcagatggtaaactccttga

SEQ ID NO: 4173636 - DNA, 25 bp, Homo sapien
atccacaagatggacatccttagca

SEQ ID NO: 4173637 - DNA, 25 bp, Homo sapien
gatccacaagatggacatccttagc

SEQ ID NO: 4173638 - DNA, 25 bp, Homo sapien
tctacagtcgccacagaactcaggt

SEQ ID NO: 4173639 - DNA, 25 bp, Homo sapien
tactctgcgtgtcattagcactcct

SEQ ID NO: 4173640 - DNA, 25 bp, Homo sapien
tactgtgattactagctagcatgca

SEQ ID NO: 4173641 - DNA, 25 bp, Homo sapien
gaactcaggtcagtgcatttaggcc

SEQ ID NO: 4173642 - DNA, 25 bp, Homo sapien
cgccaaccagagttgctttcaccat

SEQ ID NO: 4173643 - DNA, 25 bp, Homo sapien
ctgtcgccaaccagagttgctttca

SEQ ID NO: 4173644 - DNA, 25 bp, Homo sapien
tgtcgccaaccagagttgctttcac

SEQ ID NO: 4173645 - DNA, 25 bp, Homo sapien
tcgccaaccagagttgctttcacca

SEQ ID NO: 4173646 - DNA, 25 bp, Homo sapien
ggttcctaatagaccagtaccatgg

SEQ ID NO: 4173647 - DNA, 25 bp, Homo sapien
gtttctatcagccactttaccaggg

SEQ ID NO: 4173648 - DNA, 25 bp, Homo sapien
tagtgtaccccatctggtcgaaggt

SEQ ID NO: 4173649 - DNA, 25 bp, Homo sapien
caattttcagagattgcccacaggg

SEQ ID NO: 4173650 - DNA, 25 bp, Homo sapien
ctacgcctcgaaaattaaacagata

SEQ ID NO: 4173651 - DNA, 25 bp, Homo sapien
gccacacaggaagaggtgtttaaac

SEQ ID NO: 4173652 - DNA, 25 bp, Homo sapien
catggaaaacaagtgagccacacag

SEQ ID NO: 4173653 - DNA, 25 bp, Homo sapien
ttggagagatctgttttgactggga

SEQ ID NO: 4173654 - DNA, 25 bp, Homo sapien
tgggatatagtgaacccatggcttc

SEQ ID NO: 4173655 - DNA, 25 bp, Homo sapien
ttggcactaagtcagaaagacgata

SEQ ID NO: 4173656 - DNA, 25 bp, Homo sapien
actgtgaaatatagaccaacttcat

SEQ ID NO: 4173657 - DNA, 25 bp, Homo sapien
gaaatatagaccaacttcattggca

SEQ ID NO: 4173658 - DNA, 25 bp, Homo sapien
cttcattggcactaagtcagaaaga

SEQ ID NO: 4173659 - DNA, 25 bp, Homo sapien
tcttgagctacatcatcatttgctt

SEQ ID NO: 4173660 - DNA, 25 bp, Homo sapien
tctcttgagctacatcatcatttgc

SEQ ID NO: 4173661 - DNA, 25 bp, Homo sapien
caatctcttgagctacatcatcatt

SEQ ID NO: 4173662 - DNA, 25 bp, Homo sapien
agcaatctcttgagctacatcatca

SEQ ID NO: 4173663 - DNA, 25 bp, Homo sapien
caatattcagataactttggctagg

SEQ ID NO: 4173664 - DNA, 25 bp, Homo sapien
cagatgtcaccatgataacaatatt

SEQ ID NO: 4173665 - DNA, 25 bp, Homo sapien
ataactttggctagggcataatggg

SEQ ID NO: 4173666 - DNA, 25 bp, Homo sapien
ccccaggacaggtttagttctgaat

SEQ ID NO: 4173667 - DNA, 25 bp, Homo sapien
aatgataatagcagtctgcatttga

SEQ ID NO: 4173668 - DNA, 25 bp, Homo sapien
tttgagtgctcaccttgtgccaagc

SEQ ID NO: 4173669 - DNA, 25 bp, Homo sapien
caagaaccaaccctatggcaatcat

SEQ ID NO: 4173670 - DNA, 25 bp, Homo sapien
atacatgcatgtagcaatacaactt

SEQ ID NO: 4173671 - DNA, 25 bp, Homo sapien
tctcccagtaacaggtgatgtcatc

SEQ ID NO: 4173672 - DNA, 25 bp, Homo sapien
attcactcaagaggttctcccagta

SEQ ID NO: 4173673 - DNA, 25 bp, Homo sapien
tccttctcgttacattataagacag

SEQ ID NO: 4173674 - DNA, 25 bp, Homo sapien
ccatctgcaaatggttcctaataaa

SEQ ID NO: 4173675 - DNA, 25 bp, Homo sapien
tatagttcagttttcaacattttgg

SEQ ID NO: 4173676 - DNA, 25 bp, Homo sapien
tttcaacattttgggaataatttga

SEQ ID NO: 4173677 - DNA, 25 bp, Homo sapien
cattttgggaataatttgatcataa

SEQ ID NO: 4173678 - DNA, 25 bp, Homo sapien
caacattttgggaataatttgatca

SEQ ID NO: 4173679 - DNA, 25 bp, Homo sapien
tatggtagccccttactgcctggag

SEQ ID NO: 4173680 - DNA, 25 bp, Homo sapien
gagagtgtgaatgacccctgctgtg

SEQ ID NO: 4173681 - DNA, 25 bp, Homo sapien
gagaatgcttacacctagtagggcc

SEQ ID NO: 4173682 - DNA, 25 bp, Homo sapien
catggccattagctctctgaaaagg

SEQ ID NO: 4173683 - DNA, 25 bp, Homo sapien
tgaataattggcactcctgttgcct

SEQ ID NO: 4173684 - DNA, 25 bp, Homo sapien
tgttgccttaatcaccttccacgta

SEQ ID NO: 4173685 - DNA, 25 bp, Homo sapien
tgtttatcatctcaacggcacagcc

SEQ ID NO: 4173686 - DNA, 25 bp, Homo sapien
ttccacgtatgtatgatgcctctca

SEQ ID NO: 4173687 - DNA, 25 bp, Homo sapien
atccttcatggtataaattaatttt

SEQ ID NO: 4173688 - DNA, 25 bp, Homo sapien
tatccttcatggtataaattaattt

SEQ ID NO: 4173689 - DNA, 25 bp, Homo sapien
ttatccttcatggtataaattaatt

SEQ ID NO: 4173690 - DNA, 25 bp, Homo sapien
gaaatacgacacaggaagtcccgcc

SEQ ID NO: 4173691 - DNA, 25 bp, Homo sapien
tgtgctgagtgcacccccggaagtg

SEQ ID NO: 4173692 - DNA, 25 bp, Homo sapien
tcagtccccggcctcgctttggagt

SEQ ID NO: 4173693 - DNA, 25 bp, Homo sapien
cggcgaagccggagcccaaaagact

SEQ ID NO: 4173694 - DNA, 25 bp, Homo sapien
cgtaactgtacgaggtgagaatccg

SEQ ID NO: 4173695 - DNA, 25 bp, Homo sapien
tgagaatccgtgcatttgacccagg

SEQ ID NO: 4173696 - DNA, 25 bp, Homo sapien
gacttcaagtcctcgcggacgtgcc

SEQ ID NO: 4173697 - DNA, 25 bp, Homo sapien
tacggacaaacttgagcgctcagga

SEQ ID NO: 4173698 - DNA, 25 bp, Homo sapien
ctacagagaaagctccgcggtgccg

SEQ ID NO: 4173699 - DNA, 25 bp, Homo sapien
ctcggggaaataggcacaatgctct

SEQ ID NO: 4173700 - DNA, 25 bp, Homo sapien
tctacagagaaagctccgcggtgcc

SEQ ID NO: 4173701 - DNA, 25 bp, Homo sapien
aaataggcacaatgctctacagaga

SEQ ID NO: 4173702 - DNA, 25 bp, Homo sapien
agccgcttctgacgctcctcaagga

SEQ ID NO: 4173703 - DNA, 25 bp, Homo sapien
tcctcaaggacttccgaatcggcag

SEQ ID NO: 4173704 - DNA, 25 bp, Homo sapien
ctctgggacgtagggaagccgcttc

SEQ ID NO: 4173705 - DNA, 25 bp, Homo sapien
tccagattccgggtaatagggctct

SEQ ID NO: 4173706 - DNA, 25 bp, Homo sapien
taggcggatcgcctaagtccaagag

SEQ ID NO: 4173707 - DNA, 25 bp, Homo sapien
acatggtaagaaccctgtctataaa

SEQ ID NO: 4173708 - DNA, 25 bp, Homo sapien
ctaaaaatgaagcacaccatccttg

SEQ ID NO: 4173709 - DNA, 25 bp, Homo sapien
acgctgcaggacaccgctttcgcgg

SEQ ID NO: 4173710 - DNA, 25 bp, Homo sapien
gctagaactgctaatgaagcttcca

SEQ ID NO: 4173711 - DNA, 25 bp, Homo sapien
aataattgcccttctaggccgggcg

SEQ ID NO: 4173712 - DNA, 25 bp, Homo sapien
caccaactcgtgagattttagggca

SEQ ID NO: 4173713 - DNA, 25 bp, Homo sapien
gagactgctctaacaaatagctgtc

SEQ ID NO: 4173714 - DNA, 25 bp, Homo sapien
tctcagacaaaacgaagctatggtg

SEQ ID NO: 4173715 - DNA, 25 bp, Homo sapien
tattaaaaggaacgtagtctcagac

SEQ ID NO: 4173716 - DNA, 25 bp, Homo sapien
catttctttcttagtgctgggtaca

SEQ ID NO: 4173717 - DNA, 25 bp, Homo sapien
ggatagtggcaactcctgaaaagac

SEQ ID NO: 4173718 - DNA, 25 bp, Homo sapien
agctgccgtcttacagatattagca

SEQ ID NO: 4173719 - DNA, 25 bp, Homo sapien
ttagcaaggtcctttgaaattctct

SEQ ID NO: 4173720 - DNA, 25 bp, Homo sapien
aggtcctttgaaattctctgctgtt

SEQ ID NO: 4173721 - DNA, 25 bp, Homo sapien
ctgtagctgccgtcttacagatatt

SEQ ID NO: 4173722 - DNA, 25 bp, Homo sapien
cacagcatcaaaccggttatgataa

SEQ ID NO: 4173723 - DNA, 25 bp, Homo sapien
taaaagctggtattcccccatacac

SEQ ID NO: 4173724 - DNA, 25 bp, Homo sapien
tgcctggctctgctcaatgtattgt

SEQ ID NO: 4173725 - DNA, 25 bp, Homo sapien
attgttgtttagcatgaataaaagc

SEQ ID NO: 4173726 - DNA, 25 bp, Homo sapien
gatgtaacaaacgagttagcactct

SEQ ID NO: 4173727 - DNA, 25 bp, Homo sapien
taaatgatactgtgggataactagc

SEQ ID NO: 4173728 - DNA, 25 bp, Homo sapien
tgttaacaatggagaatccggatga

SEQ ID NO: 4173729 - DNA, 25 bp, Homo sapien
tactgtcaagtagctcagaacaaat

SEQ ID NO: 4173730 - DNA, 25 bp, Homo sapien
cccagcgccagccataacgaatgaa

SEQ ID NO: 4173731 - DNA, 25 bp, Homo sapien
cgtgtggcagcacgatgtgcagatt

SEQ ID NO: 4173732 - DNA, 25 bp, Homo sapien
gtcacaaacactgcagttctccaac

SEQ ID NO: 4173733 - DNA, 25 bp, Homo sapien
cataacgaatgaagcctcgtgtggc

SEQ ID NO: 4173734 - DNA, 25 bp, Homo sapien
atctttatttcggtatacattcaga

SEQ ID NO: 4173735 - DNA, 25 bp, Homo sapien
ctcctgcaattacaaaatggcttaa

SEQ ID NO: 4173736 - DNA, 25 bp, Homo sapien
tctttatttcggtatacattcagac

SEQ ID NO: 4173737 - DNA, 25 bp, Homo sapien
tctggctgctctaacgctattaatg

SEQ ID NO: 4173738 - DNA, 25 bp, Homo sapien
cagagaacgtaacagcaggagcaag

SEQ ID NO: 4173739 - DNA, 25 bp, Homo sapien
cagataactttttgcacacacacgg

SEQ ID NO: 4173740 - DNA, 25 bp, Homo sapien
taaaagtgggtagacaagacccatg

SEQ ID NO: 4173741 - DNA, 25 bp, Homo sapien
caagatgttgtggttaccctccaga

SEQ ID NO: 4173742 - DNA, 25 bp, Homo sapien
gagaatcacaccttattagagcaga

SEQ ID NO: 4173743 - DNA, 25 bp, Homo sapien
ctgagcttgcatggttgaaacttcc

SEQ ID NO: 4173744 - DNA, 25 bp, Homo sapien
ggctagagcaagagctccctcatgt

SEQ ID NO: 4173745 - DNA, 25 bp, Homo sapien
tacagttgcaagaacccctcattat

SEQ ID NO: 4173746 - DNA, 25 bp, Homo sapien
cgcagataaactgtctagcctagaa

SEQ ID NO: 4173747 - DNA, 25 bp, Homo sapien
taataactgttccagcccaagaatg

SEQ ID NO: 4173748 - DNA, 25 bp, Homo sapien
tctggataacagcaggccattagta

SEQ ID NO: 4173749 - DNA, 25 bp, Homo sapien
agcagatatcacactcctgcactct

SEQ ID NO: 4173750 - DNA, 25 bp, Homo sapien
tgccatctaaggtggtaacactttt

SEQ ID NO: 4173751 - DNA, 25 bp, Homo sapien
tttggcctacaatgctacctggtga

SEQ ID NO: 4173752 - DNA, 25 bp, Homo sapien
tatgcacaatgcaactaatgccatc

SEQ ID NO: 4173753 - DNA, 25 bp, Homo sapien
cacgcaggcctacgtttatcctaaa

SEQ ID NO: 4173754 - DNA, 25 bp, Homo sapien
accaggccacgcaggcctacgttta

SEQ ID NO: 4173755 - DNA, 25 bp, Homo sapien
cagcaaggctccaattatgccacca

SEQ ID NO: 4173756 - DNA, 25 bp, Homo sapien
tatcctaaaaagacttcccgtgaca

SEQ ID NO: 4173757 - DNA, 25 bp, Homo sapien
tagcccggccaagaccttgactttg

SEQ ID NO: 4173758 - DNA, 25 bp, Homo sapien
tctgcctctgcctaggtgaagggta

SEQ ID NO: 4173759 - DNA, 25 bp, Homo sapien
aggtaagagcctagcccggccaaga

SEQ ID NO: 4173760 - DNA, 25 bp, Homo sapien
tgtaaaatcttgagcagggaaaccc

SEQ ID NO: 4173761 - DNA, 25 bp, Homo sapien
agtgcctttcgatccttctgttttc

SEQ ID NO: 4173762 - DNA, 25 bp, Homo sapien
catcagcaggcctcctacaggagtg

SEQ ID NO: 4173763 - DNA, 25 bp, Homo sapien
cagttttagctcatggagtgccttt

SEQ ID NO: 4173764 - DNA, 25 bp, Homo sapien
tgaacagtctcaccagagtacttct

SEQ ID NO: 4173765 - DNA, 25 bp, Homo sapien
gaaaatcatttgtactcaggagcac

SEQ ID NO: 4173766 - DNA, 25 bp, Homo sapien
ggatgatggacctacagctcttaag

SEQ ID NO: 4173767 - DNA, 25 bp, Homo sapien
ttcagtgcatgaacaaccattgtcc

SEQ ID NO: 4173768 - DNA, 25 bp, Homo sapien
caatgctgtcttaggtacccaggaa

SEQ ID NO: 4173769 - DNA, 25 bp, Homo sapien
ggctcaatctcgatagattataggg

SEQ ID NO: 4173770 - DNA, 25 bp, Homo sapien
tgtataagggtaatgctagccttgt

SEQ ID NO: 4173771 - DNA, 25 bp, Homo sapien
gactatgtccgtggtatcagttgta

SEQ ID NO: 4173772 - DNA, 25 bp, Homo sapien
ttgtagaatacattggcctgtaggt

SEQ ID NO: 4173773 - DNA, 25 bp, Homo sapien
gttcatcttcctgtaaactactttc

SEQ ID NO: 4173774 - DNA, 25 bp, Homo sapien
ggtttctaggaaggtttagcagtgc

SEQ ID NO: 4173775 - DNA, 25 bp, Homo sapien
gctcagtaacttgtagtctgccttt

SEQ ID NO: 4173776 - DNA, 25 bp, Homo sapien
tgtttatctattactgaagggtttc

SEQ ID NO: 4173777 - DNA, 25 bp, Homo sapien
taaagtgagagtacaacagccccat

SEQ ID NO: 4173778 - DNA, 25 bp, Homo sapien
tgttggcattcatcggacatggcag

SEQ ID NO: 4173779 - DNA, 25 bp, Homo sapien
gccaccacaggtaccagcacttaaa

SEQ ID NO: 4173780 - DNA, 25 bp, Homo sapien
ccaaagagtggcctgtctgttggca

SEQ ID NO: 4173781 - DNA, 25 bp, Homo sapien
ttccaggacccaagggtttcacaga

SEQ ID NO: 4173782 - DNA, 25 bp, Homo sapien
tttccagtgatttctagaataccct

SEQ ID NO: 4173783 - DNA, 25 bp, Homo sapien
gaccatttgcctacctggttctttc

SEQ ID NO: 4173784 - DNA, 25 bp, Homo sapien
tagatgaaaccaaacactacacatt

SEQ ID NO: 4173785 - DNA, 25 bp, Homo sapien
ccccatatgcaatttgcttaatgta

SEQ ID NO: 4173786 - DNA, 25 bp, Homo sapien
atttgcttaatgtaacctcttcttt

SEQ ID NO: 4173787 - DNA, 25 bp, Homo sapien
tttctccccatatgcaatttgctta

SEQ ID NO: 4173788 - DNA, 25 bp, Homo sapien
ctcctttctccccatatgcaatttg

SEQ ID NO: 4173789 - DNA, 25 bp, Homo sapien
ttaagggctagtcgatttggcaggt

SEQ ID NO: 4173790 - DNA, 25 bp, Homo sapien
acacactccttagtgaattccaact

SEQ ID NO: 4173791 - DNA, 25 bp, Homo sapien
tccttagtgaattccaacttccatg

SEQ ID NO: 4173792 - DNA, 25 bp, Homo sapien
ttttaagggctagtcgatttggcag

SEQ ID NO: 4173793 - DNA, 25 bp, Homo sapien
tctgtgtttccagtagctagagggt

SEQ ID NO: 4173794 - DNA, 25 bp, Homo sapien
cacacttagttctttgccagacttg

SEQ ID NO: 4173795 - DNA, 25 bp, Homo sapien
ctacagctgataaccttcagtgctc

SEQ ID NO: 4173796 - DNA, 25 bp, Homo sapien
gctgataaccttcagtgctctcttc

SEQ ID NO: 4173797 - DNA, 25 bp, Homo sapien
ctgccgagaagataattggagctgg

SEQ ID NO: 4173798 - DNA, 25 bp, Homo sapien
gaatcaacaactctgactgaaaaag

SEQ ID NO: 4173799 - DNA, 25 bp, Homo sapien
gggattctgtatatgctgccgagaa

SEQ ID NO: 4173800 - DNA, 25 bp, Homo sapien
cttgaatcaacaactctgactgaaa

SEQ ID NO: 4173801 - DNA, 25 bp, Homo sapien
ggtgggcagtttccatgcattcgcc

SEQ ID NO: 4173802 - DNA, 25 bp, Homo sapien
agaaggcgagcagcgttgccgtcca

SEQ ID NO: 4173803 - DNA, 25 bp, Homo sapien
ccatgcattcgccagaaggcgagca

SEQ ID NO: 4173804 - DNA, 25 bp, Homo sapien
ccagaaggcgagcagcgttgccgtc

SEQ ID NO: 4173805 - DNA, 25 bp, Homo sapien
agaggctctaacagggcagccctca

SEQ ID NO: 4173806 - DNA, 25 bp, Homo sapien
cagagggaccaatgtgggcagcttt

SEQ ID NO: 4173807 - DNA, 25 bp, Homo sapien
agggaccaatgtgggcagcttttcc

SEQ ID NO: 4173808 - DNA, 25 bp, Homo sapien
ccctcagagggaccaatgtgggcag

SEQ ID NO: 4173809 - DNA, 25 bp, Homo sapien
ttgtttgttactttctgccggatcc

SEQ ID NO: 4173810 - DNA, 25 bp, Homo sapien
gtttgaaattggacgtaatattcca

SEQ ID NO: 4173811 - DNA, 25 bp, Homo sapien
tttggcccatctaaaacatcttggc

SEQ ID NO: 4173812 - DNA, 25 bp, Homo sapien
tattccaataaggatctgggttcat

SEQ ID NO: 4173813 - DNA, 25 bp, Homo sapien
ttccgaaatctggaaaccatgacct

SEQ ID NO: 4173814 - DNA, 25 bp, Homo sapien
gaacagaatcaaattccttttccga

SEQ ID NO: 4173815 - DNA, 25 bp, Homo sapien
accatgacctttgacgttgtggacc

SEQ ID NO: 4173816 - DNA, 25 bp, Homo sapien
aaaatggcaactgtttgattcactt

SEQ ID NO: 4173817 - DNA, 25 bp, Homo sapien
gactttgtaggactgtagtggaccg

SEQ ID NO: 4173818 - DNA, 25 bp, Homo sapien
tctgggccctcacgcataaagtggg

SEQ ID NO: 4173819 - DNA, 25 bp, Homo sapien
cgcttggccgcgctgagtgagctaa

SEQ ID NO: 4173820 - DNA, 25 bp, Homo sapien
tgaagagcgtactgagtgtgccgcc

SEQ ID NO: 4173821 - DNA, 25 bp, Homo sapien
catgcccggctttggaaagaaacgg

SEQ ID NO: 4173822 - DNA, 25 bp, Homo sapien
gcgattttcagacactaggccaaga

SEQ ID NO: 4173823 - DNA, 25 bp, Homo sapien
ggttgacacgctcccacgatttgca

SEQ ID NO: 4173824 - DNA, 25 bp, Homo sapien
gactgggaatcctcatggtcggcca

SEQ ID NO: 4173825 - DNA, 25 bp, Homo sapien
ctgttggccatggaatgcaggctgg

SEQ ID NO: 4173826 - DNA, 25 bp, Homo sapien
aaggtctagttcaagtcaggaggct

SEQ ID NO: 4173827 - DNA, 25 bp, Homo sapien
ccaaggtctagttcaagtcaggagg

SEQ ID NO: 4173828 - DNA, 25 bp, Homo sapien
ggtctagttcaagtcaggaggcttc

SEQ ID NO: 4173829 - DNA, 25 bp, Homo sapien
aatgaaatccctggtaaagcgctgg

SEQ ID NO: 4173830 - DNA, 25 bp, Homo sapien
tggtaaagcgctggcttccctgttg

SEQ ID NO: 4173831 - DNA, 25 bp, Homo sapien
aagcgctggcttccctgttggtgca

SEQ ID NO: 4173832 - DNA, 25 bp, Homo sapien
aaatccctggtaaagcgctggcttc

SEQ ID NO: 4173833 - DNA, 25 bp, Homo sapien
aaattaagacaaaggaaataggatg

SEQ ID NO: 4173834 - DNA, 25 bp, Homo sapien
gacaaaggaaataggatgaggagca

SEQ ID NO: 4173835 - DNA, 25 bp, Homo sapien
ttaagacaaaggaaataggatgagg

SEQ ID NO: 4173836 - DNA, 25 bp, Homo sapien
aaaggaaataggatgaggagcaaga

SEQ ID NO: 4173837 - DNA, 25 bp, Homo sapien
gctgggccaactgccggtgtatctt

SEQ ID NO: 4173838 - DNA, 25 bp, Homo sapien
tgtggccaagtgcatcactgtgtcg

SEQ ID NO: 4173839 - DNA, 25 bp, Homo sapien
ggaggaactcccacttcccattgta

SEQ ID NO: 4173840 - DNA, 25 bp, Homo sapien
ccatgcagtcttggtaatgcttagc

SEQ ID NO: 4173841 - DNA, 25 bp, Homo sapien
tgggaacctgagaccgatgcacatg

SEQ ID NO: 4173842 - DNA, 25 bp, Homo sapien
cataggctgtaaaaagagcagacgc

SEQ ID NO: 4173843 - DNA, 25 bp, Homo sapien
tcatggctgttgaagggaatcctcc

SEQ ID NO: 4173844 - DNA, 25 bp, Homo sapien
caagggtggtctgctattcacagca

SEQ ID NO: 4173845 - DNA, 25 bp, Homo sapien
ctcagggaggtgtagaactgatccc

SEQ ID NO: 4173846 - DNA, 25 bp, Homo sapien
tctccaccatggaaaaaggctcggt

SEQ ID NO: 4173847 - DNA, 25 bp, Homo sapien
tccttcacaccgaaagactcaggga

SEQ ID NO: 4173848 - DNA, 25 bp, Homo sapien
gaacagcatcgtaggcaatcatggg

SEQ ID NO: 4173849 - DNA, 25 bp, Homo sapien
ataaagccctagctgtctcttccag

SEQ ID NO: 4173850 - DNA, 25 bp, Homo sapien
tgtctcttccagccggtttctgtat

SEQ ID NO: 4173851 - DNA, 25 bp, Homo sapien
gaatataaagccctagctgtctctt

SEQ ID NO: 4173852 - DNA, 25 bp, Homo sapien
ccgagagaatataaagccctagctg

SEQ ID NO: 4173853 - DNA, 25 bp, Homo sapien
gggaaattacagtgtcttcttttga

SEQ ID NO: 4173854 - DNA, 25 bp, Homo sapien
agggaaattacagtgtcttcttttg

SEQ ID NO: 4173855 - DNA, 25 bp, Homo sapien
ctaaagggaaattacagtgtcttct

SEQ ID NO: 4173856 - DNA, 25 bp, Homo sapien
ggaaattacagtgtcttcttttgac

SEQ ID NO: 4173857 - DNA, 25 bp, Homo sapien
tgcgagacgctgaccctatcaattg

SEQ ID NO: 4173858 - DNA, 25 bp, Homo sapien
gaaaaaactgagcttaaggtgccca

SEQ ID NO: 4173859 - DNA, 25 bp, Homo sapien
tagcagatattgttaggaccccaca

SEQ ID NO: 4173860 - DNA, 25 bp, Homo sapien
tcaaccagtgtcagatggaagtcag

SEQ ID NO: 4173861 - DNA, 25 bp, Homo sapien
agcatgtgcctaggactgacccaga

SEQ ID NO: 4173862 - DNA, 25 bp, Homo sapien
tgacgatggcatctcatttcccagg

SEQ ID NO: 4173863 - DNA, 25 bp, Homo sapien
cgcttccagctgaaaaccagggatt

SEQ ID NO: 4173864 - DNA, 25 bp, Homo sapien
caatcaaagcaggtttcactcagga

SEQ ID NO: 4173865 - DNA, 25 bp, Homo sapien
ccccattcgttctcatcctcccttc

SEQ ID NO: 4173866 - DNA, 25 bp, Homo sapien
ccattcgttctcatcctcccttctc

SEQ ID NO: 4173867 - DNA, 25 bp, Homo sapien
agaagcaaagtcaccagctgagagc

SEQ ID NO: 4173868 - DNA, 25 bp, Homo sapien
ccccccattcgttctcatcctccct

SEQ ID NO: 4173869 - DNA, 25 bp, Homo sapien
catctttattgatttaccctaatgt

SEQ ID NO: 4173870 - DNA, 25 bp, Homo sapien
atctttattgatttaccctaatgtt

SEQ ID NO: 4173871 - DNA, 25 bp, Homo sapien
ctttattgatttaccctaatgttat

SEQ ID NO: 4173872 - DNA, 25 bp, Homo sapien
tctttattgatttaccctaatgtta

SEQ ID NO: 4173873 - DNA, 25 bp, Homo sapien
tcaatgtcctagtagctcagtggct

SEQ ID NO: 4173874 - DNA, 25 bp, Homo sapien
gaaagagcttcacctactccctagg

SEQ ID NO: 4173875 - DNA, 25 bp, Homo sapien
tgcaagtttactcgctccagatagg

SEQ ID NO: 4173876 - DNA, 25 bp, Homo sapien
aacaaatgatggtaggctgctcccc

SEQ ID NO: 4173877 - DNA, 25 bp, Homo sapien
gtccaatcttgccagattccaattt

SEQ ID NO: 4173878 - DNA, 25 bp, Homo sapien
cttgccagattccaatttgaggtga

SEQ ID NO: 4173879 - DNA, 25 bp, Homo sapien
ccaatttgaggtgaagagcacgatt

SEQ ID NO: 4173880 - DNA, 25 bp, Homo sapien
gagcacgattatggagtctctccac

SEQ ID NO: 4173881 - DNA, 25 bp, Homo sapien
tctcagaaaacacccacgtggattt

SEQ ID NO: 4173882 - DNA, 25 bp, Homo sapien
gctggaaatctcagagctggtatgg

SEQ ID NO: 4173883 - DNA, 25 bp, Homo sapien
ggtatggagtaattccctaaagcca

SEQ ID NO: 4173884 - DNA, 25 bp, Homo sapien
gccaaagagatcatataacccagcc

SEQ ID NO: 4173885 - DNA, 25 bp, Homo sapien
ctgaacttccaacgctgagccacaa

SEQ ID NO: 4173886 - DNA, 25 bp, Homo sapien
ttccaacgctgagccacaaaatgag

SEQ ID NO: 4173887 - DNA, 25 bp, Homo sapien
gaacttccaacgctgagccacaaaa

SEQ ID NO: 4173888 - DNA, 25 bp, Homo sapien
acttccaacgctgagccacaaaatg

SEQ ID NO: 4173889 - DNA, 25 bp, Homo sapien
agaacccaaagtagagcaggttaat

SEQ ID NO: 4173890 - DNA, 25 bp, Homo sapien
catagtgagaaggagtcttctgaga

SEQ ID NO: 4173891 - DNA, 25 bp, Homo sapien
atagtgagaaggagtcttctgagaa

SEQ ID NO: 4173892 - DNA, 25 bp, Homo sapien
tagtgagaaggagtcttctgagaac

SEQ ID NO: 4173893 - DNA, 25 bp, Homo sapien
catgacagccctgttccctccactt

SEQ ID NO: 4173894 - DNA, 25 bp, Homo sapien
agccctgttccctccacttccatca

SEQ ID NO: 4173895 - DNA, 25 bp, Homo sapien
atgacagccctgttccctccacttc

SEQ ID NO: 4173896 - DNA, 25 bp, Homo sapien
gccaggttgatcaaggagctcaaca

SEQ ID NO: 4173897 - DNA, 25 bp, Homo sapien
tcaacaatctaaagctccacagtcc

SEQ ID NO: 4173898 - DNA, 25 bp, Homo sapien
aagggccaggttgatcaaggagctc

SEQ ID NO: 4173899 - DNA, 25 bp, Homo sapien
agctcaagggccaggttgatcaagg

SEQ ID NO: 4173900 - DNA, 25 bp, Homo sapien
cagctcagcactatgggccactgaa

SEQ ID NO: 4173901 - DNA, 25 bp, Homo sapien
accagctcagcactatgggccactg

SEQ ID NO: 4173902 - DNA, 25 bp, Homo sapien
gctcagcactatgggccactgaact

SEQ ID NO: 4173903 - DNA, 25 bp, Homo sapien
gccaccagctcagcactatgggcca

SEQ ID NO: 4173904 - DNA, 25 bp, Homo sapien
cctcccaatagctgacttgagggtg

SEQ ID NO: 4173905 - DNA, 25 bp, Homo sapien
tcccaatagctgacttgagggtggc

SEQ ID NO: 4173906 - DNA, 25 bp, Homo sapien
ccaatagctgacttgagggtggctc

SEQ ID NO: 4173907 - DNA, 25 bp, Homo sapien
cccaatagctgacttgagggtggct

SEQ ID NO: 4173908 - DNA, 25 bp, Homo sapien
ggcagtgacagagttggcacaaaac

SEQ ID NO: 4173909 - DNA, 25 bp, Homo sapien
accacatcagacactttgttatcaa

SEQ ID NO: 4173910 - DNA, 25 bp, Homo sapien
agatgacagaggagccatcggtgca

SEQ ID NO: 4173911 - DNA, 25 bp, Homo sapien
ccatcggtgcatgtgtcgggaagca

SEQ ID NO: 4173912 - DNA, 25 bp, Homo sapien
tctctggcaaaggtaactgcaggcc

SEQ ID NO: 4173913 - DNA, 25 bp, Homo sapien
agcaccttgcaatagatacctttac

SEQ ID NO: 4173914 - DNA, 25 bp, Homo sapien
gggtacatgctgacccgcagaacac

SEQ ID NO: 4173915 - DNA, 25 bp, Homo sapien
acttccatgcatcccaaagggagac

SEQ ID NO: 4173916 - DNA, 25 bp, Homo sapien
tggaagtcagcgcactttggctgtg

SEQ ID NO: 4173917 - DNA, 25 bp, Homo sapien
gctgcccacagctaggattcgaagg

SEQ ID NO: 4173918 - DNA, 25 bp, Homo sapien
tggactttgagatcggtgccttcaa

SEQ ID NO: 4173919 - DNA, 25 bp, Homo sapien
aaaaggttggcgctctggaagtcag

SEQ ID NO: 4173920 - DNA, 25 bp, Homo sapien
gagtggcattgaacccagagttttg

SEQ ID NO: 4173921 - DNA, 25 bp, Homo sapien
ctgaatccatggataattagtttgg

SEQ ID NO: 4173922 - DNA, 25 bp, Homo sapien
acccagagttttggaggtcactgct

SEQ ID NO: 4173923 - DNA, 25 bp, Homo sapien
tggataattagtttggttcccagag

SEQ ID NO: 4173924 - DNA, 25 bp, Homo sapien
cattcttagttgagaagtcctgttg

SEQ ID NO: 4173925 - DNA, 25 bp, Homo sapien
tgttgcccactaacttcttatggta

SEQ ID NO: 4173926 - DNA, 25 bp, Homo sapien
ggtattatggttacttgatcattct

SEQ ID NO: 4173927 - DNA, 25 bp, Homo sapien
tgatcattcttagttgagaagtcct

SEQ ID NO: 4173928 - DNA, 25 bp, Homo sapien
cacggcaatcacattagcattcgtt

SEQ ID NO: 4173929 - DNA, 25 bp, Homo sapien
cacgcagaagggttctaataaatgt

SEQ ID NO: 4173930 - DNA, 25 bp, Homo sapien
gctgagaagtagactcctgtagacc

SEQ ID NO: 4173931 - DNA, 25 bp, Homo sapien
tagacccataaatccagtccacggc

SEQ ID NO: 4173932 - DNA, 25 bp, Homo sapien
agatctcgaggctcaacttaatcac

SEQ ID NO: 4173933 - DNA, 25 bp, Homo sapien
aaaagggagatctcgaggctcaact

SEQ ID NO: 4173934 - DNA, 25 bp, Homo sapien
gggagatctcgaggctcaacttaat

SEQ ID NO: 4173935 - DNA, 25 bp, Homo sapien
ggaaaagggagatctcgaggctcaa

SEQ ID NO: 4173936 - DNA, 25 bp, Homo sapien
attgaggattccgacacacccagca

SEQ ID NO: 4173937 - DNA, 25 bp, Homo sapien
gctaacaccaatgatgtggattgag

SEQ ID NO: 4173938 - DNA, 25 bp, Homo sapien
tctgtcccagctggcctccgaagag

SEQ ID NO: 4173939 - DNA, 25 bp, Homo sapien
tcccagctggcctccgaagagctgt

SEQ ID NO: 4173940 - DNA, 25 bp, Homo sapien
ttccagtgcagatcatagaccctcc

SEQ ID NO: 4173941 - DNA, 25 bp, Homo sapien
gaggtaacctctcaatgacccagtt

SEQ ID NO: 4173942 - DNA, 25 bp, Homo sapien
gagaagagactgatatgagggacct

SEQ ID NO: 4173943 - DNA, 25 bp, Homo sapien
tgggagaattagctgaggaccacct

SEQ ID NO: 4173944 - DNA, 25 bp, Homo sapien
cttccacgaagagggcatctccagc

SEQ ID NO: 4173945 - DNA, 25 bp, Homo sapien
tgtactcaggtccagcggggtccag

SEQ ID NO: 4173946 - DNA, 25 bp, Homo sapien
tgtggatggcttccacgaagagggc

SEQ ID NO: 4173947 - DNA, 25 bp, Homo sapien
gatggcttccacgaagagggcatct

SEQ ID NO: 4173948 - DNA, 25 bp, Homo sapien
aggcctgtgggctttggtttcctat

SEQ ID NO: 4173949 - DNA, 25 bp, Homo sapien
ctaacatagctaggaagaggcctgt

SEQ ID NO: 4173950 - DNA, 25 bp, Homo sapien
gaagaggcctgtgggctttggtttc

SEQ ID NO: 4173951 - DNA, 25 bp, Homo sapien
taacatagctaggaagaggcctgtg

SEQ ID NO: 4173952 - DNA, 25 bp, Homo sapien
ccaggttggtcttggcctccgttga

SEQ ID NO: 4173953 - DNA, 25 bp, Homo sapien
tggtcttggcctccgttgacgaagt

SEQ ID NO: 4173954 - DNA, 25 bp, Homo sapien
gttgacgaagtagtccacatgtcca

SEQ ID NO: 4173955 - DNA, 25 bp, Homo sapien
tgtccaacgggaatccgaataccca

SEQ ID NO: 4173956 - DNA, 25 bp, Homo sapien
gcaaggctctgtagaggatgcagtt

SEQ ID NO: 4173957 - DNA, 25 bp, Homo sapien
tgggctctgaagacatccatccttg

SEQ ID NO: 4173958 - DNA, 25 bp, Homo sapien
ggtgcacagccctcatgtgatcaca

SEQ ID NO: 4173959 - DNA, 25 bp, Homo sapien
tagaggtgcacagccctcatgtgat

SEQ ID NO: 4173960 - DNA, 25 bp, Homo sapien
aagcaatccagacagcgtccagcaa

SEQ ID NO: 4173961 - DNA, 25 bp, Homo sapien
cagcgtccagcaaggaaggccttgt

SEQ ID NO: 4173962 - DNA, 25 bp, Homo sapien
caggaggtagactttcacttccttg

SEQ ID NO: 4173963 - DNA, 25 bp, Homo sapien
tgcagtacggagcactggaagtagt

SEQ ID NO: 4173964 - DNA, 25 bp, Homo sapien
cacttccttggggagcggctctatc

SEQ ID NO: 4173965 - DNA, 25 bp, Homo sapien
tctatcttgacaccaccttgttcca

SEQ ID NO: 4173966 - DNA, 25 bp, Homo sapien
gaaccacatagggtgggcgccaaga

SEQ ID NO: 4173967 - DNA, 25 bp, Homo sapien
caacagtgagaagctggaatgcatc

SEQ ID NO: 4173968 - DNA, 25 bp, Homo sapien
cagtagatagacagtaagaagcccc

SEQ ID NO: 4173969 - DNA, 25 bp, Homo sapien
gcaatcggttggactcactctgaaa

SEQ ID NO: 4173970 - DNA, 25 bp, Homo sapien
gaacagggctcaccaaaaggtgcca

SEQ ID NO: 4173971 - DNA, 25 bp, Homo sapien
catagctagagatgcaatccttcgc

SEQ ID NO: 4173972 - DNA, 25 bp, Homo sapien
taagttgaaggagtgctatggccca

SEQ ID NO: 4173973 - DNA, 25 bp, Homo sapien
tagtctcggaattttcccaggctcc

SEQ ID NO: 4173974 - DNA, 25 bp, Homo sapien
tgtgtgtaggagactgctcctctcc

SEQ ID NO: 4173975 - DNA, 25 bp, Homo sapien
tggagctctcaaagtgagtgtcgcc

SEQ ID NO: 4173976 - DNA, 25 bp, Homo sapien
ccatggtgatacccctgggacctgc

SEQ ID NO: 4173977 - DNA, 25 bp, Homo sapien
gctggttacctatgtggcatccaga

SEQ ID NO: 4173978 - DNA, 25 bp, Homo sapien
gaaggtaacctcgatgttggtgtcc

SEQ ID NO: 4173979 - DNA, 25 bp, Homo sapien
tactgctaaggaaggtaacctcgat

SEQ ID NO: 4173980 - DNA, 25 bp, Homo sapien
gatcttagatgaagaggtgatgtta

SEQ ID NO: 4173981 - DNA, 25 bp, Homo sapien
aagaggtgatgttactgctaaggaa

SEQ ID NO: 4173982 - DNA, 25 bp, Homo sapien
tgtcatgcaccaaggggttagctcc

SEQ ID NO: 4173983 - DNA, 25 bp, Homo sapien
tgcaccaaggggttagctccttacc

SEQ ID NO: 4173984 - DNA, 25 bp, Homo sapien
tacagctttgaatatgaccaagaaa

SEQ ID NO: 4173985 - DNA, 25 bp, Homo sapien
gctttgaatatgaccaagaaagtag

SEQ ID NO: 4173986 - DNA, 25 bp, Homo sapien
tggctccgatcgggctctgctggtg

SEQ ID NO: 4173987 - DNA, 25 bp, Homo sapien
ttggctccgatcgggctctgctggt

SEQ ID NO: 4173988 - DNA, 25 bp, Homo sapien
ggctccgatcgggctctgctggtgg

SEQ ID NO: 4173989 - DNA, 25 bp, Homo sapien
tttggctccgatcgggctctgctgg

SEQ ID NO: 4173990 - DNA, 25 bp, Homo sapien
gggtggcatgggctatgattccttt

SEQ ID NO: 4173991 - DNA, 25 bp, Homo sapien
tgattcctttcccatagcgttgctg

SEQ ID NO: 4173992 - DNA, 25 bp, Homo sapien
ctatgattcctttcccatagcgttg

SEQ ID NO: 4173993 - DNA, 25 bp, Homo sapien
attgtggggtggcatgggctatgat

SEQ ID NO: 4173994 - DNA, 25 bp, Homo sapien
tttccaaactcggttggaagactga

SEQ ID NO: 4173995 - DNA, 25 bp, Homo sapien
aactcggttggaagactgaaacttg

SEQ ID NO: 4173996 - DNA, 25 bp, Homo sapien
cttcccaataatggtagtccggtct

SEQ ID NO: 4173997 - DNA, 25 bp, Homo sapien
caaaagggcagtgcagaacttccca

SEQ ID NO: 4173998 - DNA, 25 bp, Homo sapien
ttgtaagttcactggttcaggtaag

SEQ ID NO: 4173999 - DNA, 25 bp, Homo sapien
agtcacacttgcttgtaagttcact

SEQ ID NO: 4174000 - DNA, 25 bp, Homo sapien
taagttcactggttcaggtaagcag

SEQ ID NO: 4174001 - DNA, 25 bp, Homo sapien
ggtcacaggaaacagtcacacttgc

SEQ ID NO: 4174002 - DNA, 25 bp, Homo sapien
gaatcctaagtacgaatgcccaagg

SEQ ID NO: 4174003 - DNA, 25 bp, Homo sapien
tgtacataagatcggcaaaggaaac

SEQ ID NO: 4174004 - DNA, 25 bp, Homo sapien
cccaaggagataaagcaagtgcagt

SEQ ID NO: 4174005 - DNA, 25 bp, Homo sapien
gggagatgtgtcctgcccaggttaa

SEQ ID NO: 4174006 - DNA, 25 bp, Homo sapien
tgggggttatgaaacccacctcaca

SEQ ID NO: 4174007 - DNA, 25 bp, Homo sapien
ctcatcggtaaacagtgggggttat

SEQ ID NO: 4174008 - DNA, 25 bp, Homo sapien
taagcacctagcacatgccgtggca

SEQ ID NO: 4174009 - DNA, 25 bp, Homo sapien
gaggatccaatgagttgatttaggt

SEQ ID NO: 4174010 - DNA, 25 bp, Homo sapien
ctttggctccaacccacacgcctga

SEQ ID NO: 4174011 - DNA, 25 bp, Homo sapien
tgtgttcacagaatggccactgata

SEQ ID NO: 4174012 - DNA, 25 bp, Homo sapien
tcattggactatcttctctgtggcc

SEQ ID NO: 4174013 - DNA, 25 bp, Homo sapien
cgcctgaactttaaggatcattgga

SEQ ID NO: 4174014 - DNA, 25 bp, Homo sapien
cagcctggggctgctcctgagtcat

SEQ ID NO: 4174015 - DNA, 25 bp, Homo sapien
agcagcctggggctgctcctgagtc

SEQ ID NO: 4174016 - DNA, 25 bp, Homo sapien
ctgccctctggataacagcagcctg

SEQ ID NO: 4174017 - DNA, 25 bp, Homo sapien
gccctctggataacagcagcctggg

SEQ ID NO: 4174018 - DNA, 25 bp, Homo sapien
caggtaagttagaggcagcagttcc

SEQ ID NO: 4174019 - DNA, 25 bp, Homo sapien
ctgccacaggttccattgtcggtca

SEQ ID NO: 4174020 - DNA, 25 bp, Homo sapien
tcggtcaggtaagttagaggcagca

SEQ ID NO: 4174021 - DNA, 25 bp, Homo sapien
tccattgtcggtcaggtaagttaga

SEQ ID NO: 4174022 - DNA, 25 bp, Homo sapien
gcctacagggtagacagttgtctct

SEQ ID NO: 4174023 - DNA, 25 bp, Homo sapien
gatcttaagtttcgtgcctacaggg

SEQ ID NO: 4174024 - DNA, 25 bp, Homo sapien
gcattatgaatctgtacatgggtag

SEQ ID NO: 4174025 - DNA, 25 bp, Homo sapien
aacagctcagtgctatgccatggtg

SEQ ID NO: 4174026 - DNA, 25 bp, Homo sapien
cactgtggacatctaattgaggccc

SEQ ID NO: 4174027 - DNA, 25 bp, Homo sapien
tcgagaaaggagaagaacactgtgg

SEQ ID NO: 4174028 - DNA, 25 bp, Homo sapien
gaagaacactgtggacatctaattg

SEQ ID NO: 4174029 - DNA, 25 bp, Homo sapien
gtatcatcgagaaaggagaagaaca

SEQ ID NO: 4174030 - DNA, 25 bp, Homo sapien
cccggagaccaagaaggcgcgcgat

SEQ ID NO: 4174031 - DNA, 25 bp, Homo sapien
tgaagccctgctgcgcttgcccgga

SEQ ID NO: 4174032 - DNA, 25 bp, Homo sapien
tgccccgcctgagtctcaggagaag

SEQ ID NO: 4174033 - DNA, 25 bp, Homo sapien
tgagtctcaggagaagaagccgctg

SEQ ID NO: 4174034 - DNA, 25 bp, Homo sapien
tttgccgaggctggcatagatttgg

SEQ ID NO: 4174035 - DNA, 25 bp, Homo sapien
actgcggacgaatcggcgtttgccg

SEQ ID NO: 4174036 - DNA, 25 bp, Homo sapien
ccggaagtgactgcggacgaatcgg

SEQ ID NO: 4174037 - DNA, 25 bp, Homo sapien
cgtttgccgaggctggcatagattt

SEQ ID NO: 4174038 - DNA, 25 bp, Homo sapien
aggcctggctactgcgtgcacgtcg

SEQ ID NO: 4174039 - DNA, 25 bp, Homo sapien
ggctactgcgtgcacgtcgctatgg

SEQ ID NO: 4174040 - DNA, 25 bp, Homo sapien
ggtcaggcctggctactgcgtgcac

SEQ ID NO: 4174041 - DNA, 25 bp, Homo sapien
agcaagggaccagcgggtcaggcct

SEQ ID NO: 4174042 - DNA, 25 bp, Homo sapien
catacgctcgattggaggagatgtg

SEQ ID NO: 4174043 - DNA, 25 bp, Homo sapien
cgtacagaaaatcatacgctcgatt

SEQ ID NO: 4174044 - DNA, 25 bp, Homo sapien
tctcccggtaccgagtttgagacac

SEQ ID NO: 4174045 - DNA, 25 bp, Homo sapien
gggctcctcgatggttactgcgtgg

SEQ ID NO: 4174046 - DNA, 25 bp, Homo sapien
gcgacggacgcggaggaaggtctgc

SEQ ID NO: 4174047 - DNA, 25 bp, Homo sapien
ggaggaaggtctgcggcggtcctta

SEQ ID NO: 4174048 - DNA, 25 bp, Homo sapien
gcggaggaaggtctgcggcggtcct

SEQ ID NO: 4174049 - DNA, 25 bp, Homo sapien
cggacgcggaggaaggtctgcggcg

SEQ ID NO: 4174050 - DNA, 25 bp, Homo sapien
gtgcggccacctggagggctcggag

SEQ ID NO: 4174051 - DNA, 25 bp, Homo sapien
tcgtgtttcgttcgccatgcccctg

SEQ ID NO: 4174052 - DNA, 25 bp, Homo sapien
acaaccgtgggcaagaggtcagtcc

SEQ ID NO: 4174053 - DNA, 25 bp, Homo sapien
aggtcagtccagagggtcgtgtttc

SEQ ID NO: 4174054 - DNA, 25 bp, Homo sapien
caggaacgttgagtgaatctccgag

SEQ ID NO: 4174055 - DNA, 25 bp, Homo sapien
tgtagggcattttatgcaggaacgt

SEQ ID NO: 4174056 - DNA, 25 bp, Homo sapien
tgcacactttctgggtaccaaaacg

SEQ ID NO: 4174057 - DNA, 25 bp, Homo sapien
gaatctccgagtgtacaaatcgttg

SEQ ID NO: 4174058 - DNA, 25 bp, Homo sapien
gaggcaaataccctgaccagctagt

SEQ ID NO: 4174059 - DNA, 25 bp, Homo sapien
tacccctaggctgagaataatggca

SEQ ID NO: 4174060 - DNA, 25 bp, Homo sapien
gatatctcagaattggtgaacacgg

SEQ ID NO: 4174061 - DNA, 25 bp, Homo sapien
tgagtattccaagtcagcttacgga

SEQ ID NO: 4174062 - DNA, 25 bp, Homo sapien
cagtctgctgcgaatcagggtagct

SEQ ID NO: 4174063 - DNA, 25 bp, Homo sapien
gcctgtgtatggtctttctcacttg

SEQ ID NO: 4174064 - DNA, 25 bp, Homo sapien
agcttggatatttgcctgtgtatgg

SEQ ID NO: 4174065 - DNA, 25 bp, Homo sapien
tctcacttgacacaataaacaatgg

SEQ ID NO: 4174066 - DNA, 25 bp, Homo sapien
gatcaatgcagtcaggcaaactaga

SEQ ID NO: 4174067 - DNA, 25 bp, Homo sapien
aggttcatcaggtagccttggctga

SEQ ID NO: 4174068 - DNA, 25 bp, Homo sapien
tctgtggaacctaaaatccagtgaa

SEQ ID NO: 4174069 - DNA, 25 bp, Homo sapien
caatgagccacacgtattaagatgc

SEQ ID NO: 4174070 - DNA, 25 bp, Homo sapien
tcttggataatggatcaggttactg

SEQ ID NO: 4174071 - DNA, 25 bp, Homo sapien
atgtcccttccattcccgactgata

SEQ ID NO: 4174072 - DNA, 25 bp, Homo sapien
tccattcccgactgataaatggtgg

SEQ ID NO: 4174073 - DNA, 25 bp, Homo sapien
gacttgctccaatatagagaatatc

SEQ ID NO: 4174074 - DNA, 25 bp, Homo sapien
aggcatctgaaaagaagcgtcagtt

SEQ ID NO: 4174075 - DNA, 25 bp, Homo sapien
ttcaaagtatttatagcgattcttt

SEQ ID NO: 4174076 - DNA, 25 bp, Homo sapien
tggatacggcataaacaacattgaa

SEQ ID NO: 4174077 - DNA, 25 bp, Homo sapien
ttggatacggcataaacaacattga

SEQ ID NO: 4174078 - DNA, 25 bp, Homo sapien
tagtactcttatggcagccagggct

SEQ ID NO: 4174079 - DNA, 25 bp, Homo sapien
ggctttagtactcttatggcagcca

SEQ ID NO: 4174080 - DNA, 25 bp, Homo sapien
tttagtactcttatggcagccaggg

SEQ ID NO: 4174081 - DNA, 25 bp, Homo sapien
ctttagtactcttatggcagccagg

SEQ ID NO: 4174082 - DNA, 25 bp, Homo sapien
cctgagtgatggagcaagactccat

SEQ ID NO: 4174083 - DNA, 25 bp, Homo sapien
gcctgagtgatggagcaagactcca

SEQ ID NO: 4174084 - DNA, 25 bp, Homo sapien
aaatggtatgtatagtaggattcca

SEQ ID NO: 4174085 - DNA, 25 bp, Homo sapien
tgatcacatcaatacgagaattgtt

SEQ ID NO: 4174086 - DNA, 25 bp, Homo sapien
taatgtaatctatacctgtgagcat

SEQ ID NO: 4174087 - DNA, 25 bp, Homo sapien
acagccataatggaatttatgcagc

SEQ ID NO: 4174088 - DNA, 25 bp, Homo sapien
gttcagcattactacattctctggt

SEQ ID NO: 4174089 - DNA, 25 bp, Homo sapien
tttgtttcagttccataccactctc

SEQ ID NO: 4174090 - DNA, 25 bp, Homo sapien
taggtgcttagtagaagtaggagga

SEQ ID NO: 4174091 - DNA, 25 bp, Homo sapien
tgaagggatggataggtgcttagta

SEQ ID NO: 4174092 - DNA, 25 bp, Homo sapien
agggatggataggtgcttagtagaa

SEQ ID NO: 4174093 - DNA, 25 bp, Homo sapien
gatggataggtgcttagtagaagta

SEQ ID NO: 4174094 - DNA, 25 bp, Homo sapien
gaacgtcagcatcccgataatcagt

SEQ ID NO: 4174095 - DNA, 25 bp, Homo sapien
ccaagtaagcgtagccagggtcaag

SEQ ID NO: 4174096 - DNA, 25 bp, Homo sapien
cagggattgagtcctgacatactac

SEQ ID NO: 4174097 - DNA, 25 bp, Homo sapien
catattctgcagagtatggatctgt

SEQ ID NO: 4174098 - DNA, 25 bp, Homo sapien
ccacaattgcctgtacatgggccat

SEQ ID NO: 4174099 - DNA, 25 bp, Homo sapien
tgggccatttgaacagcatgcgtgg

SEQ ID NO: 4174100 - DNA, 25 bp, Homo sapien
gcatgcgtggttatcagcatcgtca

SEQ ID NO: 4174101 - DNA, 25 bp, Homo sapien
gccaatagtcaggagatttaccaac

SEQ ID NO: 4174102 - DNA, 25 bp, Homo sapien
ggcctcaacaatttttctaattgga

SEQ ID NO: 4174103 - DNA, 25 bp, Homo sapien
cccaggtgggaatacagtggcaaga

SEQ ID NO: 4174104 - DNA, 25 bp, Homo sapien
tcatggttcactgtacactgtaacc

SEQ ID NO: 4174105 - DNA, 25 bp, Homo sapien
ggttcactgtacactgtaaccttga

SEQ ID NO: 4174106 - DNA, 25 bp, Homo sapien
gaggcttcccaagcacgcttctcgc

SEQ ID NO: 4174107 - DNA, 25 bp, Homo sapien
cctcttctcaaactgggaggtgtca

SEQ ID NO: 4174108 - DNA, 25 bp, Homo sapien
aaactgggaggtgtcactcagagcg

SEQ ID NO: 4174109 - DNA, 25 bp, Homo sapien
caagcacgcttctcgcgggctcttt

SEQ ID NO: 4174110 - DNA, 25 bp, Homo sapien
cttttagaacttccaggcgaatctc

SEQ ID NO: 4174111 - DNA, 25 bp, Homo sapien
tcttttagaacttccaggcgaatct

SEQ ID NO: 4174112 - DNA, 25 bp, Homo sapien
tagaccaccgggcattcaagtgctt

SEQ ID NO: 4174113 - DNA, 25 bp, Homo sapien
tgattctcttcacgcttcctcaaca

SEQ ID NO: 4174114 - DNA, 25 bp, Homo sapien
ccgggcattcaagtgcttcatattc

SEQ ID NO: 4174115 - DNA, 25 bp, Homo sapien
ctcctgcagtttagaccaccgggca

SEQ ID NO: 4174116 - DNA, 25 bp, Homo sapien
tgatacatgcgtgcgctgaattttt

SEQ ID NO: 4174117 - DNA, 25 bp, Homo sapien
gatacatgcgtgcgctgaatttttg

SEQ ID NO: 4174118 - DNA, 25 bp, Homo sapien
ttgatacatgcgtgcgctgaatttt

SEQ ID NO: 4174119 - DNA, 25 bp, Homo sapien
tacatgcgtgcgctgaatttttgcc

SEQ ID NO: 4174120 - DNA, 25 bp, Homo sapien
cataggtgttgagatagtagttttt

SEQ ID NO: 4174121 - DNA, 25 bp, Homo sapien
cctctgagttgttgtctgggaaaca

SEQ ID NO: 4174122 - DNA, 25 bp, Homo sapien
ggtccatagacctgtgatgcataat

SEQ ID NO: 4174123 - DNA, 25 bp, Homo sapien
tgggaaacacccaagacgagacaga

SEQ ID NO: 4174124 - DNA, 25 bp, Homo sapien
gccaactcatagtccaaccttgctg

SEQ ID NO: 4174125 - DNA, 25 bp, Homo sapien
gaaaaccagctttggtggtaatgac

SEQ ID NO: 4174126 - DNA, 25 bp, Homo sapien
atctgggagacatgactcaagttcc

SEQ ID NO: 4174127 - DNA, 25 bp, Homo sapien
gggttgtgtcacaaaatctgggaga

SEQ ID NO: 4174128 - DNA, 25 bp, Homo sapien
tggaagccgaggttgaggtattggg

SEQ ID NO: 4174129 - DNA, 25 bp, Homo sapien
cgtcatttccaaggttggagttgga

SEQ ID NO: 4174130 - DNA, 25 bp, Homo sapien
attggacgtcatttccaaggttgga

SEQ ID NO: 4174131 - DNA, 25 bp, Homo sapien
ttggagttggaagccgaggttgagg

SEQ ID NO: 4174132 - DNA, 25 bp, Homo sapien
gactctgccccggagtaacttttga

SEQ ID NO: 4174133 - DNA, 25 bp, Homo sapien
cggagtaacttttgaaggtagatca

SEQ ID NO: 4174134 - DNA, 25 bp, Homo sapien
taacttttgaaggtagatcacagcc

SEQ ID NO: 4174135 - DNA, 25 bp, Homo sapien
catgttctgaacgactctgccccgg

SEQ ID NO: 4174136 - DNA, 25 bp, Homo sapien
aatgcagggccagcggttggaccta

SEQ ID NO: 4174137 - DNA, 25 bp, Homo sapien
gaaatgcagggccagcggttggacc

SEQ ID NO: 4174138 - DNA, 25 bp, Homo sapien
gcagggccagcggttggacctacac

SEQ ID NO: 4174139 - DNA, 25 bp, Homo sapien
agggccagcggttggacctacacac

SEQ ID NO: 4174140 - DNA, 25 bp, Homo sapien
ggtcacttgcttctcggcttttttc

SEQ ID NO: 4174141 - DNA, 25 bp, Homo sapien
tgcaagttcctctgccgctgtaagg

SEQ ID NO: 4174142 - DNA, 25 bp, Homo sapien
catcttcttgtagtgcgtggcaggt

SEQ ID NO: 4174143 - DNA, 25 bp, Homo sapien
ggcaggtgcgcaactcctggatcaa

SEQ ID NO: 4174144 - DNA, 25 bp, Homo sapien
aatttttattataatggtgctgtgt

SEQ ID NO: 4174145 - DNA, 25 bp, Homo sapien
ttattataatggtgctgtgtgatga

SEQ ID NO: 4174146 - DNA, 25 bp, Homo sapien
tttattataatggtgctgtgtgatg

SEQ ID NO: 4174147 - DNA, 25 bp, Homo sapien
tttttattataatggtgctgtgtga

SEQ ID NO: 4174148 - DNA, 25 bp, Homo sapien
gaagtcaaacatgtctgctagtgcc

SEQ ID NO: 4174149 - DNA, 25 bp, Homo sapien
tccagtccggccaaatggttttcaa

SEQ ID NO: 4174150 - DNA, 25 bp, Homo sapien
ccagctctttggacaggaagtcaaa

SEQ ID NO: 4174151 - DNA, 25 bp, Homo sapien
gcatgacaaaggcatggatcctcct

SEQ ID NO: 4174152 - DNA, 25 bp, Homo sapien
tgttcttaccagcaacgtgacttgg

SEQ ID NO: 4174153 - DNA, 25 bp, Homo sapien
tatggatcttattgggcaggcaggc

SEQ ID NO: 4174154 - DNA, 25 bp, Homo sapien
gattgcccatatgaccacgttctga

SEQ ID NO: 4174155 - DNA, 25 bp, Homo sapien
gaaggcctacgacctaggagcagaa

SEQ ID NO: 4174156 - DNA, 25 bp, Homo sapien
tgttcttctgcagtattcgcttcgg

SEQ ID NO: 4174157 - DNA, 25 bp, Homo sapien
tcagtattatgtcttctaggtagga

SEQ ID NO: 4174158 - DNA, 25 bp, Homo sapien
ggagcttatagtactatggtgaact

SEQ ID NO: 4174159 - DNA, 25 bp, Homo sapien
gcagtattcgcttcggtattcagta

SEQ ID NO: 4174160 - DNA, 25 bp, Homo sapien
ccatttcataagcaatgtcattgat

SEQ ID NO: 4174161 - DNA, 25 bp, Homo sapien
ctttccatttcataagcaatgtcat

SEQ ID NO: 4174162 - DNA, 25 bp, Homo sapien
tcataagcaatgtcattgattttct

SEQ ID NO: 4174163 - DNA, 25 bp, Homo sapien
cggctttccatttcataagcaatgt

SEQ ID NO: 4174164 - DNA, 25 bp, Homo sapien
gattaagtgatctgaaatatcacat

SEQ ID NO: 4174165 - DNA, 25 bp, Homo sapien
aaatatcacattcctggcaagtttg

SEQ ID NO: 4174166 - DNA, 25 bp, Homo sapien
cattcctggcaagtttgtttaactc

SEQ ID NO: 4174167 - DNA, 25 bp, Homo sapien
cttttccttgattaagtgatctgaa

SEQ ID NO: 4174168 - DNA, 25 bp, Homo sapien
aaccaactcagcaacaatctcctct

SEQ ID NO: 4174169 - DNA, 25 bp, Homo sapien
tcagaaaactataaaccaactcagc

SEQ ID NO: 4174170 - DNA, 25 bp, Homo sapien
tttttgcacctctgggatcagaaaa

SEQ ID NO: 4174171 - DNA, 25 bp, Homo sapien
aacaatctcctctgactgaagatag

SEQ ID NO: 4174172 - DNA, 25 bp, Homo sapien
ttcagcattgaagcacttcatgtga

SEQ ID NO: 4174173 - DNA, 25 bp, Homo sapien
caaatataaagacctagtcttatac

SEQ ID NO: 4174174 - DNA, 25 bp, Homo sapien
agcacttcatgtgagttacatttcg

SEQ ID NO: 4174175 - DNA, 25 bp, Homo sapien
gatatctagagtgtaagtaacttac

SEQ ID NO: 4174176 - DNA, 25 bp, Homo sapien
gctttccgtgtaactgtggatgatc

SEQ ID NO: 4174177 - DNA, 25 bp, Homo sapien
ctgtggatgatctgatgggctgcaa

SEQ ID NO: 4174178 - DNA, 25 bp, Homo sapien
atatgtttccgctgtgcgttcctca

SEQ ID NO: 4174179 - DNA, 25 bp, Homo sapien
tgcaagaatatgtttccgctgtgcg

SEQ ID NO: 4174180 - DNA, 25 bp, Homo sapien
cttgctctccctcagttaatttctt

SEQ ID NO: 4174181 - DNA, 25 bp, Homo sapien
tgctctccctcagttaatttctttt

SEQ ID NO: 4174182 - DNA, 25 bp, Homo sapien
gctctccctcagttaatttcttttg

SEQ ID NO: 4174183 - DNA, 25 bp, Homo sapien
ttgctctccctcagttaatttcttt

SEQ ID NO: 4174184 - DNA, 25 bp, Homo sapien
gctgttgttctcattttgagtttct

SEQ ID NO: 4174185 - DNA, 25 bp, Homo sapien
tcattttgagtttctttctcaagta

SEQ ID NO: 4174186 - DNA, 25 bp, Homo sapien
cattttgagtttctttctcaagtaa

SEQ ID NO: 4174187 - DNA, 25 bp, Homo sapien
ttagctgttgttctcattttgagtt

SEQ ID NO: 4174188 - DNA, 25 bp, Homo sapien
cttccatgattccttttgattgaga

SEQ ID NO: 4174189 - DNA, 25 bp, Homo sapien
cctctcatctcaaccctccttccat

SEQ ID NO: 4174190 - DNA, 25 bp, Homo sapien
agattccattctattggaccaagga

SEQ ID NO: 4174191 - DNA, 25 bp, Homo sapien
cttttgattgagacttaagattcca

SEQ ID NO: 4174192 - DNA, 25 bp, Homo sapien
gaaattttcaatattggcatttacc

SEQ ID NO: 4174193 - DNA, 25 bp, Homo sapien
tcatttttattatgtccagttctct

SEQ ID NO: 4174194 - DNA, 25 bp, Homo sapien
tcttcaaatctgctatatcattttt

SEQ ID NO: 4174195 - DNA, 25 bp, Homo sapien
tgtccagttctcttgaaattttcaa

SEQ ID NO: 4174196 - DNA, 25 bp, Homo sapien
tttatgcagtcaataagccaatcca

SEQ ID NO: 4174197 - DNA, 25 bp, Homo sapien
tatcctttcagagttaccctagagg

SEQ ID NO: 4174198 - DNA, 25 bp, Homo sapien
gccaatccacatacctgtccttaaa

SEQ ID NO: 4174199 - DNA, 25 bp, Homo sapien
tatttccaaccttccaactgggata

SEQ ID NO: 4174200 - DNA, 25 bp, Homo sapien
taagaccatgtcacctgcaaagaaa

SEQ ID NO: 4174201 - DNA, 25 bp, Homo sapien
ttctcttgcccaactgtgctggctg

SEQ ID NO: 4174202 - DNA, 25 bp, Homo sapien
gcccaactgtgctggctgagacttc

SEQ ID NO: 4174203 - DNA, 25 bp, Homo sapien
ctgttgagaatgatgttagttgtgg

SEQ ID NO: 4174204 - DNA, 25 bp, Homo sapien
gagccctagctttgaactcagacag

SEQ ID NO: 4174205 - DNA, 25 bp, Homo sapien
gatcaatacatgcaaaaaattcctg

SEQ ID NO: 4174206 - DNA, 25 bp, Homo sapien
taagccttatggatccagatgtttc

SEQ ID NO: 4174207 - DNA, 25 bp, Homo sapien
tcctgtgatacagtgtgtctgagcc

SEQ ID NO: 4174208 - DNA, 25 bp, Homo sapien
caatacacaggatgggcagattgcc

SEQ ID NO: 4174209 - DNA, 25 bp, Homo sapien
tcatgcctgttggtgcacatactca

SEQ ID NO: 4174210 - DNA, 25 bp, Homo sapien
ccaatgtcctgtgaatagtgaacca

SEQ ID NO: 4174211 - DNA, 25 bp, Homo sapien
tgtgccactgtagaagcagaccaaa

SEQ ID NO: 4174212 - DNA, 25 bp, Homo sapien
ctgctgttcccagctgtatagcatt

SEQ ID NO: 4174213 - DNA, 25 bp, Homo sapien
gttcccagctgtatagcattcccct

SEQ ID NO: 4174214 - DNA, 25 bp, Homo sapien
gctgttcccagctgtatagcattcc

SEQ ID NO: 4174215 - DNA, 25 bp, Homo sapien
cttctatcccatcagcccaacctaa

SEQ ID NO: 4174216 - DNA, 25 bp, Homo sapien
cttaccctacaacggcagagttgag

SEQ ID NO: 4174217 - DNA, 25 bp, Homo sapien
cctaatgtagttaccatctggccct

SEQ ID NO: 4174218 - DNA, 25 bp, Homo sapien
tcagacccgcaaaccctaatgtagt

SEQ ID NO: 4174219 - DNA, 25 bp, Homo sapien
tgagtatgcagttatgatggcgacc

SEQ ID NO: 4174220 - DNA, 25 bp, Homo sapien
tgtcctttattagaagctactttaa

SEQ ID NO: 4174221 - DNA, 25 bp, Homo sapien
cacatgtcctttattagaagctact

SEQ ID NO: 4174222 - DNA, 25 bp, Homo sapien
cattacacatgtcctttattagaag

SEQ ID NO: 4174223 - DNA, 25 bp, Homo sapien
tacacatgtcctttattagaagcta

SEQ ID NO: 4174224 - DNA, 25 bp, Homo sapien
taagtaaaagattgccggtatcaag

SEQ ID NO: 4174225 - DNA, 25 bp, Homo sapien
aaagttggagcattttaactcaagc

SEQ ID NO: 4174226 - DNA, 25 bp, Homo sapien
ccttgactgtctaaatgcaaaacat

SEQ ID NO: 4174227 - DNA, 25 bp, Homo sapien
tcctctcctagtaaacttcaattag

SEQ ID NO: 4174228 - DNA, 25 bp, Homo sapien
ttaaatgagttagctcttaaatgtg

SEQ ID NO: 4174229 - DNA, 25 bp, Homo sapien
tagctcttaaatgtgtgaaacctct

SEQ ID NO: 4174230 - DNA, 25 bp, Homo sapien
tattattaaatgagttagctcttaa

SEQ ID NO: 4174231 - DNA, 25 bp, Homo sapien
gagttagctcttaaatgtgtgaaac

SEQ ID NO: 4174232 - DNA, 25 bp, Homo sapien
aaagccaaagagggtgggaaagctg

SEQ ID NO: 4174233 - DNA, 25 bp, Homo sapien
aagccaaagagggtgggaaagctgg

SEQ ID NO: 4174234 - DNA, 25 bp, Homo sapien
gccaaagagggtgggaaagctggaa

SEQ ID NO: 4174235 - DNA, 25 bp, Homo sapien
caaagagggtgggaaagctggaaag

SEQ ID NO: 4174236 - DNA, 25 bp, Homo sapien
tgagaaacacagatcagaaggccat

SEQ ID NO: 4174237 - DNA, 25 bp, Homo sapien
ctgagaaacacagatcagaaggcca

SEQ ID NO: 4174238 - DNA, 25 bp, Homo sapien
agaaacacagatcagaaggccatgg

SEQ ID NO: 4174239 - DNA, 25 bp, Homo sapien
gagaaacacagatcagaaggccatg

SEQ ID NO: 4174240 - DNA, 25 bp, Homo sapien
tggaagtagcctgaacagtgtgctc

SEQ ID NO: 4174241 - DNA, 25 bp, Homo sapien
cagtggaagtagcctgaacagtgtg

SEQ ID NO: 4174242 - DNA, 25 bp, Homo sapien
taggaggacagcatggggctatatc

SEQ ID NO: 4174243 - DNA, 25 bp, Homo sapien
cagcatggggctatatctggggcct

SEQ ID NO: 4174244 - DNA, 25 bp, Homo sapien
tagagtaagtgaaatattgaatgtc

SEQ ID NO: 4174245 - DNA, 25 bp, Homo sapien
atattgaatgtcatgaggatattgg

SEQ ID NO: 4174246 - DNA, 25 bp, Homo sapien
catgaggatattggaaagaaaaaga

SEQ ID NO: 4174247 - DNA, 25 bp, Homo sapien
gaatgtcatgaggatattggaaaga

SEQ ID NO: 4174248 - DNA, 25 bp, Homo sapien
gactgggacccacagccatagagct

SEQ ID NO: 4174249 - DNA, 25 bp, Homo sapien
acatgggattctgctagggctagga

SEQ ID NO: 4174250 - DNA, 25 bp, Homo sapien
ctggacagaaagttgacttgggcct

SEQ ID NO: 4174251 - DNA, 25 bp, Homo sapien
ggtattggattacaaatcccactgg

SEQ ID NO: 4174252 - DNA, 25 bp, Homo sapien
caagcgcagaatgtaaggtgcttac

SEQ ID NO: 4174253 - DNA, 25 bp, Homo sapien
aaccaagcgcagaatgtaaggtgct

SEQ ID NO: 4174254 - DNA, 25 bp, Homo sapien
tcaaccaagcgcagaatgtaaggtg

SEQ ID NO: 4174255 - DNA, 25 bp, Homo sapien
cgcagaatgtaaggtgcttacacag

SEQ ID NO: 4174256 - DNA, 25 bp, Homo sapien
tcagatgtaggcactaagcggctcc

SEQ ID NO: 4174257 - DNA, 25 bp, Homo sapien
gaggccgagattcccactgaagtaa

SEQ ID NO: 4174258 - DNA, 25 bp, Homo sapien
agttctcgagaatgtgaccccacca

SEQ ID NO: 4174259 - DNA, 25 bp, Homo sapien
gagggagaccacgattgagcaaaca

SEQ ID NO: 4174260 - DNA, 25 bp, Homo sapien
gctgccagcactaacccagcaggcc

SEQ ID NO: 4174261 - DNA, 25 bp, Homo sapien
agggggctgccagcactaacccagc

SEQ ID NO: 4174262 - DNA, 25 bp, Homo sapien
gggctgccagcactaacccagcagg

SEQ ID NO: 4174263 - DNA, 25 bp, Homo sapien
tcagggggctgccagcactaaccca

SEQ ID NO: 4174264 - DNA, 25 bp, Homo sapien
caggtgctctgagggacccctcctt

SEQ ID NO: 4174265 - DNA, 25 bp, Homo sapien
tgtgcaggggtatggcaggtgctct

SEQ ID NO: 4174266 - DNA, 25 bp, Homo sapien
cagcactgtgcaggggtatggcagg

SEQ ID NO: 4174267 - DNA, 25 bp, Homo sapien
ttgaagccaactcagccgcagcact

SEQ ID NO: 4174268 - DNA, 25 bp, Homo sapien
ctgcttctatcacccttgggatgag

SEQ ID NO: 4174269 - DNA, 25 bp, Homo sapien
tcatgggtctgcattccaagggtcc

SEQ ID NO: 4174270 - DNA, 25 bp, Homo sapien
ggctattggatcatctctgcttcta

SEQ ID NO: 4174271 - DNA, 25 bp, Homo sapien
tctatcacccttgggatgagctata

SEQ ID NO: 4174272 - DNA, 25 bp, Homo sapien
ctaaggccagtccaaacttgccgat

SEQ ID NO: 4174273 - DNA, 25 bp, Homo sapien
gccagtccaaacttgccgatggact

SEQ ID NO: 4174274 - DNA, 25 bp, Homo sapien
cttctgcaacagctaaggccagtcc

SEQ ID NO: 4174275 - DNA, 25 bp, Homo sapien
aaggccagtccaaacttgccgatgg

SEQ ID NO: 4174276 - DNA, 25 bp, Homo sapien
agaatcggtcaaagatgacagttct

SEQ ID NO: 4174277 - DNA, 25 bp, Homo sapien
gtcctgtactccacagaatcggtca

SEQ ID NO: 4174278 - DNA, 25 bp, Homo sapien
cacagaatcggtcaaagatgacagt

SEQ ID NO: 4174279 - DNA, 25 bp, Homo sapien
atgtcctgtactccacagaatcggt

SEQ ID NO: 4174280 - DNA, 25 bp, Homo sapien
gcacattatgtggttgagaacggtg

SEQ ID NO: 4174281 - DNA, 25 bp, Homo sapien
ggttgagaacggtggtcaaagataa

SEQ ID NO: 4174282 - DNA, 25 bp, Homo sapien
cccaaagaggatgcacggaatgata

SEQ ID NO: 4174283 - DNA, 25 bp, Homo sapien
gaggatgcacggaatgatattgaca

SEQ ID NO: 4174284 - DNA, 25 bp, Homo sapien
ggcccaaagaggatgcacggaatga

SEQ ID NO: 4174285 - DNA, 25 bp, Homo sapien
caaagaggatgcacggaatgatatt

SEQ ID NO: 4174286 - DNA, 25 bp, Homo sapien
tggctgctcgctccataaggtcgtc

SEQ ID NO: 4174287 - DNA, 25 bp, Homo sapien
agatgtgtcaaagacacatcatcca

SEQ ID NO: 4174288 - DNA, 25 bp, Homo sapien
gctcgctccataaggtcgtcgctca

SEQ ID NO: 4174289 - DNA, 25 bp, Homo sapien
ctgctcgctccataaggtcgtcgct

SEQ ID NO: 4174290 - DNA, 25 bp, Homo sapien
ctgtttggcttccactgcttctgtg

SEQ ID NO: 4174291 - DNA, 25 bp, Homo sapien
gtttggcttccactgcttctgtgaa

SEQ ID NO: 4174292 - DNA, 25 bp, Homo sapien
cttccactgcttctgtgaactcctt

SEQ ID NO: 4174293 - DNA, 25 bp, Homo sapien
ttggcttccactgcttctgtgaact

SEQ ID NO: 4174294 - DNA, 25 bp, Homo sapien
ctgccctgccggcagattggtgatg

SEQ ID NO: 4174295 - DNA, 25 bp, Homo sapien
ctgccggcagattggtgatgttcca

SEQ ID NO: 4174296 - DNA, 25 bp, Homo sapien
tgccggcagattggtgatgttccaa

SEQ ID NO: 4174297 - DNA, 25 bp, Homo sapien
cctgccggcagattggtgatgttcc

SEQ ID NO: 4174298 - DNA, 25 bp, Homo sapien
cctagttggcccatggaggtgcagg

SEQ ID NO: 4174299 - DNA, 25 bp, Homo sapien
gaatcactggggctgtggcctagtt

SEQ ID NO: 4174300 - DNA, 25 bp, Homo sapien
gggctgtggcctagttggcccatgg

SEQ ID NO: 4174301 - DNA, 25 bp, Homo sapien
gaaggcagtgttaagaatcactggg

SEQ ID NO: 4174302 - DNA, 25 bp, Homo sapien
ttactgccactctgaccacatccag

SEQ ID NO: 4174303 - DNA, 25 bp, Homo sapien
actgccactctgaccacatccagag

SEQ ID NO: 4174304 - DNA, 25 bp, Homo sapien
gccactctgaccacatccagaggca

SEQ ID NO: 4174305 - DNA, 25 bp, Homo sapien
cttactgccactctgaccacatcca

SEQ ID NO: 4174306 - DNA, 25 bp, Homo sapien
gtgaactcgggagctgacctctcat

SEQ ID NO: 4174307 - DNA, 25 bp, Homo sapien
gcctgtgaactcgggagctgacctc

SEQ ID NO: 4174308 - DNA, 25 bp, Homo sapien
ctgtgaactcgggagctgacctctc

SEQ ID NO: 4174309 - DNA, 25 bp, Homo sapien
atttgggcctgtgaactcgggagct

SEQ ID NO: 4174310 - DNA, 25 bp, Homo sapien
caaagtcagcatggttccagctttc

SEQ ID NO: 4174311 - DNA, 25 bp, Homo sapien
acaaagtcagcatggttccagcttt

SEQ ID NO: 4174312 - DNA, 25 bp, Homo sapien
gatttggggacctccgacttcctca

SEQ ID NO: 4174313 - DNA, 25 bp, Homo sapien
gacattgaagtgatagccagtggcc

SEQ ID NO: 4174314 - DNA, 25 bp, Homo sapien
ggcagatttggggacctccgacttc

SEQ ID NO: 4174315 - DNA, 25 bp, Homo sapien
ttgtccccacatacacggcagattt

SEQ ID NO: 4174316 - DNA, 25 bp, Homo sapien
aaaaagcccttgcatccttcacatg

SEQ ID NO: 4174317 - DNA, 25 bp, Homo sapien
agcccttgcatccttcacatgtcat

SEQ ID NO: 4174318 - DNA, 25 bp, Homo sapien
aagcccttgcatccttcacatgtca

SEQ ID NO: 4174319 - DNA, 25 bp, Homo sapien
ctgaaaaagcccttgcatccttcac

SEQ ID NO: 4174320 - DNA, 25 bp, Homo sapien
tgaggccctgagacgttacccagtg

SEQ ID NO: 4174321 - DNA, 25 bp, Homo sapien
tgagactaattacaaggcctttggg

SEQ ID NO: 4174322 - DNA, 25 bp, Homo sapien
ttacccagtgggtcagtggtggcac

SEQ ID NO: 4174323 - DNA, 25 bp, Homo sapien
ggtgaaggctgatgggtaactctac

SEQ ID NO: 4174324 - DNA, 25 bp, Homo sapien
gaggcctcgggcctcggaccagtga

SEQ ID NO: 4174325 - DNA, 25 bp, Homo sapien
gattctggtccagagtggaaactga

SEQ ID NO: 4174326 - DNA, 25 bp, Homo sapien
cagtgacctggcaggtttgagcttg

SEQ ID NO: 4174327 - DNA, 25 bp, Homo sapien
cccaggagcatggaacagccaggta

SEQ ID NO: 4174328 - DNA, 25 bp, Homo sapien
ggcagagtggattcccctcgttgac

SEQ ID NO: 4174329 - DNA, 25 bp, Homo sapien
ttctctttcacagccttgttaccag

SEQ ID NO: 4174330 - DNA, 25 bp, Homo sapien
gtgcttttcgctggcgcgggcagcc

SEQ ID NO: 4174331 - DNA, 25 bp, Homo sapien
ttcacagccttgttaccagaaagtt

SEQ ID NO: 4174332 - DNA, 25 bp, Homo sapien
cagccttgttaccagaaagtttcca

SEQ ID NO: 4174333 - DNA, 25 bp, Homo sapien
tttctggccattccggcaggaaatg

SEQ ID NO: 4174334 - DNA, 25 bp, Homo sapien
gccattccggcaggaaatgggacac

SEQ ID NO: 4174335 - DNA, 25 bp, Homo sapien
tggccattccggcaggaaatgggac

SEQ ID NO: 4174336 - DNA, 25 bp, Homo sapien
cttttctggccattccggcaggaaa

SEQ ID NO: 4174337 - DNA, 25 bp, Homo sapien
cagccgggcgttgcgtttcatggcc

SEQ ID NO: 4174338 - DNA, 25 bp, Homo sapien
gtcttccgggtgatctcgcaggcgc

SEQ ID NO: 4174339 - DNA, 25 bp, Homo sapien
ttcatgccgctctccaggcacttgc

SEQ ID NO: 4174340 - DNA, 25 bp, Homo sapien
ctggcactgtcgccgggtcttccgg

SEQ ID NO: 4174341 - DNA, 25 bp, Homo sapien
cagagccgtgcaccccggcgccggc

SEQ ID NO: 4174342 - DNA, 25 bp, Homo sapien
aaaccgtgtttacctcgcaccgctg

SEQ ID NO: 4174343 - DNA, 25 bp, Homo sapien
ctttgtgatccggagaaaccgtgtt

SEQ ID NO: 4174344 - DNA, 25 bp, Homo sapien
caaaggcgctgggtttgcatgaaag

SEQ ID NO: 4174345 - DNA, 25 bp, Homo sapien
gtaatggtgacaagcaattctcccc

SEQ ID NO: 4174346 - DNA, 25 bp, Homo sapien
cctgatcatcatccgctgctcctct

SEQ ID NO: 4174347 - DNA, 25 bp, Homo sapien
gctgagtccctgtccgttcactttt

SEQ ID NO: 4174348 - DNA, 25 bp, Homo sapien
ttccgcttgatcaaggcccgcctct

SEQ ID NO: 4174349 - DNA, 25 bp, Homo sapien
gagaaggtagtgtcaaaggttttca

SEQ ID NO: 4174350 - DNA, 25 bp, Homo sapien
tctttccggacctggctccacttgg

SEQ ID NO: 4174351 - DNA, 25 bp, Homo sapien
cttcaaagagcacagatctttccgg

SEQ ID NO: 4174352 - DNA, 25 bp, Homo sapien
tggcaactcgcagccactgctaagc

SEQ ID NO: 4174353 - DNA, 25 bp, Homo sapien
ttcttccctcgatggggcctgcaga

SEQ ID NO: 4174354 - DNA, 25 bp, Homo sapien
gaacatgtaggttgacatgtcagcc

SEQ ID NO: 4174355 - DNA, 25 bp, Homo sapien
gaagatctctttcccgccactgtcg

SEQ ID NO: 4174356 - DNA, 25 bp, Homo sapien
tgtagttccagacactgccatcctc

SEQ ID NO: 4174357 - DNA, 25 bp, Homo sapien
gctgggggtttgtagttccagacac

SEQ ID NO: 4174358 - DNA, 25 bp, Homo sapien
gccatcccataatccagaagttggg

SEQ ID NO: 4174359 - DNA, 25 bp, Homo sapien
ttggcatccaggtcccttacaggct

SEQ ID NO: 4174360 - DNA, 25 bp, Homo sapien
caacctccgggaactccacccactg

SEQ ID NO: 4174361 - DNA, 25 bp, Homo sapien
cagcagccatcccataatccagaag

SEQ ID NO: 4174362 - DNA, 25 bp, Homo sapien
ctggcagcaaggatggggaggggag

SEQ ID NO: 4174363 - DNA, 25 bp, Homo sapien
aggatggggaggggaggacagctcc

SEQ ID NO: 4174364 - DNA, 25 bp, Homo sapien
caaggatggggaggggaggacagct

SEQ ID NO: 4174365 - DNA, 25 bp, Homo sapien
agcaaggatggggaggggaggacag

SEQ ID NO: 4174366 - DNA, 25 bp, Homo sapien
agtctccgcattgaacactgtgttg

SEQ ID NO: 4174367 - DNA, 25 bp, Homo sapien
tcagttgacacagctcgaaagcggc

SEQ ID NO: 4174368 - DNA, 25 bp, Homo sapien
gatctggtcctcgatgggcaagtcc

SEQ ID NO: 4174369 - DNA, 25 bp, Homo sapien
tcttccaagcagtaggacagccggc

SEQ ID NO: 4174370 - DNA, 25 bp, Homo sapien
ctgcatatcctggcgtagctccctt

SEQ ID NO: 4174371 - DNA, 25 bp, Homo sapien
tgcatatcctggcgtagctcccttc

SEQ ID NO: 4174372 - DNA, 25 bp, Homo sapien
atatcctggcgtagctcccttcctc

SEQ ID NO: 4174373 - DNA, 25 bp, Homo sapien
gcatatcctggcgtagctcccttcc

SEQ ID NO: 4174374 - DNA, 25 bp, Homo sapien
agcttcttcagcatgtagtggaatt

SEQ ID NO: 4174375 - DNA, 25 bp, Homo sapien
tcagcatgtagtggaatttcagcat

SEQ ID NO: 4174376 - DNA, 25 bp, Homo sapien
tagtggaatttcagcatgggctcca

SEQ ID NO: 4174377 - DNA, 25 bp, Homo sapien
catgggctccagtagaagttgctgg

SEQ ID NO: 4174378 - DNA, 25 bp, Homo sapien
gacttcagagtaatggcgaattgct

SEQ ID NO: 4174379 - DNA, 25 bp, Homo sapien
agagtaatggcgaattgctcctgca

SEQ ID NO: 4174380 - DNA, 25 bp, Homo sapien
ttgcattcaatgtaggacttcagag

SEQ ID NO: 4174381 - DNA, 25 bp, Homo sapien
caggctggggccgattgcattcaat

SEQ ID NO: 4174382 - DNA, 25 bp, Homo sapien
caggagctactgaggaccagtgaag

SEQ ID NO: 4174383 - DNA, 25 bp, Homo sapien
gtgaaggtatagaagcccctttctg

SEQ ID NO: 4174384 - DNA, 25 bp, Homo sapien
catggccttgggctccgtaaaatcc

SEQ ID NO: 4174385 - DNA, 25 bp, Homo sapien
ctgggcagtaggtcacaggagctac

SEQ ID NO: 4174386 - DNA, 25 bp, Homo sapien
gtcactgccttcgttaatgtccagg

SEQ ID NO: 4174387 - DNA, 25 bp, Homo sapien
tttgtacacagagacttccgtggga

SEQ ID NO: 4174388 - DNA, 25 bp, Homo sapien
tagtgtctgagatgtaccatatgcc

SEQ ID NO: 4174389 - DNA, 25 bp, Homo sapien
tagatattgcagctaccagtttggg

SEQ ID NO: 4174390 - DNA, 25 bp, Homo sapien
gtgagcatagccatgatcttcagga

SEQ ID NO: 4174391 - DNA, 25 bp, Homo sapien
ctgtgatgccgaacaactcctgcat

SEQ ID NO: 4174392 - DNA, 25 bp, Homo sapien
tgtgatgccgaacaactcctgcatg

SEQ ID NO: 4174393 - DNA, 25 bp, Homo sapien
gagcattgatgctgcggagctcggt

SEQ ID NO: 4174394 - DNA, 25 bp, Homo sapien
gactcaggaagcgaacaaacgtggg

SEQ ID NO: 4174395 - DNA, 25 bp, Homo sapien
gaattccctagggagacaggccagc

SEQ ID NO: 4174396 - DNA, 25 bp, Homo sapien
catcaagtggcaaacagacctacct

SEQ ID NO: 4174397 - DNA, 25 bp, Homo sapien
gggcacccatgtccttcctgaggaa

SEQ ID NO: 4174398 - DNA, 25 bp, Homo sapien
gtgtttaactgattgtcagcgtagc

SEQ ID NO: 4174399 - DNA, 25 bp, Homo sapien
gctttgagaatagatgtgtacacag

SEQ ID NO: 4174400 - DNA, 25 bp, Homo sapien
gtacacagaaatataaggtgcatgt

SEQ ID NO: 4174401 - DNA, 25 bp, Homo sapien
tgtaaatggttcttctccggtgtgt

SEQ ID NO: 4174402 - DNA, 25 bp, Homo sapien
cttaggtgtggaatgccttatataa

SEQ ID NO: 4174403 - DNA, 25 bp, Homo sapien
aaactagttcttaggtgtggaatgc

SEQ ID NO: 4174404 - DNA, 25 bp, Homo sapien
ctagttcttaggtgtggaatgcctt

SEQ ID NO: 4174405 - DNA, 25 bp, Homo sapien
gttcttaggtgtggaatgccttata

SEQ ID NO: 4174406 - DNA, 25 bp, Homo sapien
ttgagtctgctcatttccaatactg

SEQ ID NO: 4174407 - DNA, 25 bp, Homo sapien
atatatggacaccacgaacagtggg

SEQ ID NO: 4174408 - DNA, 25 bp, Homo sapien
tctaaaggctagatataaggtcatg

SEQ ID NO: 4174409 - DNA, 25 bp, Homo sapien
ggctggctcactctgtcaggcctaa

SEQ ID NO: 4174410 - DNA, 25 bp, Homo sapien
ctctgaaagggacagtttttaaatg

SEQ ID NO: 4174411 - DNA, 25 bp, Homo sapien
attccattgtgtagccccaagaggt

SEQ ID NO: 4174412 - DNA, 25 bp, Homo sapien
attgtgtagccccaagaggtgcagc

SEQ ID NO: 4174413 - DNA, 25 bp, Homo sapien
tgtagccccaagaggtgcagcttcc

SEQ ID NO: 4174414 - DNA, 25 bp, Homo sapien
aaacctttggatttgatgtagagga

SEQ ID NO: 4174415 - DNA, 25 bp, Homo sapien
gggcctgtacacataccaattagcg

SEQ ID NO: 4174416 - DNA, 25 bp, Homo sapien
tactacttgaatgcctctgtgactg

SEQ ID NO: 4174417 - DNA, 25 bp, Homo sapien
caactagaagcacagtagagtccca

SEQ ID NO: 4174418 - DNA, 25 bp, Homo sapien
tgtgttgccgatggatcacttgggc

SEQ ID NO: 4174419 - DNA, 25 bp, Homo sapien
cattcagggacttagtgtagcacca

SEQ ID NO: 4174420 - DNA, 25 bp, Homo sapien
tgtctttcctcctcggtagcagtga

SEQ ID NO: 4174421 - DNA, 25 bp, Homo sapien
tacttccctcccaaatgagagagtg

SEQ ID NO: 4174422 - DNA, 25 bp, Homo sapien
gccctagagctggaggatatcgaat

SEQ ID NO: 4174423 - DNA, 25 bp, Homo sapien
tctatatagtttggagtgccttcgc

SEQ ID NO: 4174424 - DNA, 25 bp, Homo sapien
aacagtatctttgccccttccacag

SEQ ID NO: 4174425 - DNA, 25 bp, Homo sapien
taactctgtacagtaggtaccggcc

SEQ ID NO: 4174426 - DNA, 25 bp, Homo sapien
ggtaccggcctgtattattgtaaca

SEQ ID NO: 4174427 - DNA, 25 bp, Homo sapien
tatgggtctcgtcctccagagggtt

SEQ ID NO: 4174428 - DNA, 25 bp, Homo sapien
ggttgtgtgtaacttgccctcaccc

SEQ ID NO: 4174429 - DNA, 25 bp, Homo sapien
gctgtttagctgaggtcttgggcca

SEQ ID NO: 4174430 - DNA, 25 bp, Homo sapien
ccaagagagttgtcctgcctgctga

SEQ ID NO: 4174431 - DNA, 25 bp, Homo sapien
ggtaactgtagggctgcagagctga

SEQ ID NO: 4174432 - DNA, 25 bp, Homo sapien
caaggttagctggtaactgtagggc

SEQ ID NO: 4174433 - DNA, 25 bp, Homo sapien
ttacttgacctatgaatctttaagg

SEQ ID NO: 4174434 - DNA, 25 bp, Homo sapien
atctttaaggcacaatcagttgtac

SEQ ID NO: 4174435 - DNA, 25 bp, Homo sapien
gtgcttatgggccattacttgacct

SEQ ID NO: 4174436 - DNA, 25 bp, Homo sapien
tcacttgagtgatggccgcctttcc

SEQ ID NO: 4174437 - DNA, 25 bp, Homo sapien
tgctaatactggagaccgtggacag

SEQ ID NO: 4174438 - DNA, 25 bp, Homo sapien
ggactttttgacttgcagatgctaa

SEQ ID NO: 4174439 - DNA, 25 bp, Homo sapien
attgctcatgctctctcttgggact

SEQ ID NO: 4174440 - DNA, 25 bp, Homo sapien
agcttggaaggccatacagttcaca

SEQ ID NO: 4174441 - DNA, 25 bp, Homo sapien
attttgatatagacatggaatgtgt

SEQ ID NO: 4174442 - DNA, 25 bp, Homo sapien
cagtgtagttaatggctgccgtggc

SEQ ID NO: 4174443 - DNA, 25 bp, Homo sapien
ccagtgtagttaatggctgccgtgg

SEQ ID NO: 4174444 - DNA, 25 bp, Homo sapien
catgggtgctgatgtagtggtcaaa

SEQ ID NO: 4174445 - DNA, 25 bp, Homo sapien
gatgtagtggtcaaacagatagata

SEQ ID NO: 4174446 - DNA, 25 bp, Homo sapien
ggttcattgtgtcataagatacttc

SEQ ID NO: 4174447 - DNA, 25 bp, Homo sapien
agtgttcgccttcctttgcccccat

SEQ ID NO: 4174448 - DNA, 25 bp, Homo sapien
agatacttctctgtcgtttaagtgt

SEQ ID NO: 4174449 - DNA, 25 bp, Homo sapien
cattgtgtcataagatacttctctg

SEQ ID NO: 4174450 - DNA, 25 bp, Homo sapien
cgtacaagtctctctgccctagagc

SEQ ID NO: 4174451 - DNA, 25 bp, Homo sapien
cctagagcttcttgaggaataggct

SEQ ID NO: 4174452 - DNA, 25 bp, Homo sapien
cacctgattgttgttgatttacgta

SEQ ID NO: 4174453 - DNA, 25 bp, Homo sapien
tgctatactattgtcacctgattgt

SEQ ID NO: 4174454 - DNA, 25 bp, Homo sapien
aatactagcgtttcagagcttgtca

SEQ ID NO: 4174455 - DNA, 25 bp, Homo sapien
tattgctgaagtttggcgacctctg

SEQ ID NO: 4174456 - DNA, 25 bp, Homo sapien
cgacctctggtgttgaactataaaa

SEQ ID NO: 4174457 - DNA, 25 bp, Homo sapien
caacgttgtggaagaaatactagcg

SEQ ID NO: 4174458 - DNA, 25 bp, Homo sapien
ttatggttgtcgcttaaggttctgc

SEQ ID NO: 4174459 - DNA, 25 bp, Homo sapien
tgagttgatctccttcacgtagtca

SEQ ID NO: 4174460 - DNA, 25 bp, Homo sapien
ggacatcgatcccttttatctgaaa

SEQ ID NO: 4174461 - DNA, 25 bp, Homo sapien
catacatgttaccagaatggcaact

SEQ ID NO: 4174462 - DNA, 25 bp, Homo sapien
caggttaaaaactgagcacctttgc

SEQ ID NO: 4174463 - DNA, 25 bp, Homo sapien
gaacatacggtattgctttctggac

SEQ ID NO: 4174464 - DNA, 25 bp, Homo sapien
gcaccaacacgatgtttaaagggag

SEQ ID NO: 4174465 - DNA, 25 bp, Homo sapien
aatgtgtattcaacctgtataggca

SEQ ID NO: 4174466 - DNA, 25 bp, Homo sapien
tccctgagtcgtttcaaaatgaatg

SEQ ID NO: 4174467 - DNA, 25 bp, Homo sapien
tgcctttagacactagcaatcccaa

SEQ ID NO: 4174468 - DNA, 25 bp, Homo sapien
accccattcatgagtggttgacccc

SEQ ID NO: 4174469 - DNA, 25 bp, Homo sapien
tgaggtttggaaagggataaacatc

SEQ ID NO: 4174470 - DNA, 25 bp, Homo sapien
cctatgcatggaagctcagatgtca

SEQ ID NO: 4174471 - DNA, 25 bp, Homo sapien
cctgattggattctagatactccat

SEQ ID NO: 4174472 - DNA, 25 bp, Homo sapien
tttctggtggagacttacgtaaaca

SEQ ID NO: 4174473 - DNA, 25 bp, Homo sapien
tatggccttagtggcatagtctgga

SEQ ID NO: 4174474 - DNA, 25 bp, Homo sapien
taaaggactagtttctcgtgaggta

SEQ ID NO: 4174475 - DNA, 25 bp, Homo sapien
tctagttatggtatgatgaggctcc

SEQ ID NO: 4174476 - DNA, 25 bp, Homo sapien
cctataggatacaaagaaggataaa

SEQ ID NO: 4174477 - DNA, 25 bp, Homo sapien
tatgagagtccctataggatacaaa

SEQ ID NO: 4174478 - DNA, 25 bp, Homo sapien
atccacatttttgcgaagaagccaa

SEQ ID NO: 4174479 - DNA, 25 bp, Homo sapien
tgaatccacatttttgcgaagaagc

SEQ ID NO: 4174480 - DNA, 25 bp, Homo sapien
ccccaggatgcactgcatgataaaa

SEQ ID NO: 4174481 - DNA, 25 bp, Homo sapien
ttctctgctatgaatgtgaacatct

SEQ ID NO: 4174482 - DNA, 25 bp, Homo sapien
ccataatggcttttagggcattctc

SEQ ID NO: 4174483 - DNA, 25 bp, Homo sapien
gcttttagggcattctctgctatga

SEQ ID NO: 4174484 - DNA, 25 bp, Homo sapien
gactgtttgtgtagttattgatgtc

SEQ ID NO: 4174485 - DNA, 25 bp, Homo sapien
ggactgtttgtgtagttattgatgt

SEQ ID NO: 4174486 - DNA, 25 bp, Homo sapien
tggactgtttgtgtagttattgatg

SEQ ID NO: 4174487 - DNA, 25 bp, Homo sapien
cagagccaccctttacatggtgcct

SEQ ID NO: 4174488 - DNA, 25 bp, Homo sapien
gcagagccaccctttacatggtgcc

SEQ ID NO: 4174489 - DNA, 25 bp, Homo sapien
tgtcccataatgtagcctgttcggg

SEQ ID NO: 4174490 - DNA, 25 bp, Homo sapien
gcttggagccgcagccaaatccctg

SEQ ID NO: 4174491 - DNA, 25 bp, Homo sapien
gcagatgtcccataatgtagcctgt

SEQ ID NO: 4174492 - DNA, 25 bp, Homo sapien
tgcttggagccgcagccaaatccct

SEQ ID NO: 4174493 - DNA, 25 bp, Homo sapien
tggtctggggtagccaacaatgatc

SEQ ID NO: 4174494 - DNA, 25 bp, Homo sapien
caagcagggatttgaaagtgttaat

SEQ ID NO: 4174495 - DNA, 25 bp, Homo sapien
agcaagcagggatttgaaagtgtta

SEQ ID NO: 4174496 - DNA, 25 bp, Homo sapien
gagcaagcagggatttgaaagtgtt

SEQ ID NO: 4174497 - DNA, 25 bp, Homo sapien
gcaagcagggatttgaaagtgttaa

SEQ ID NO: 4174498 - DNA, 25 bp, Homo sapien
tgttccctgatacatggtaggtgct

SEQ ID NO: 4174499 - DNA, 25 bp, Homo sapien
tataagcaccattgatgcaaggagt

SEQ ID NO: 4174500 - DNA, 25 bp, Homo sapien
tcccagagttcagggtaatgcctgt

SEQ ID NO: 4174501 - DNA, 25 bp, Homo sapien
ccagagttcagggtaatgcctggca

SEQ ID NO: 4174502 - DNA, 25 bp, Homo sapien
gccacagagctcagtcaggatcact

SEQ ID NO: 4174503 - DNA, 25 bp, Homo sapien
tcctaagagtatgcgaatgtacaga

SEQ ID NO: 4174504 - DNA, 25 bp, Homo sapien
gctacctctggtaacttgaaggcac

SEQ ID NO: 4174505 - DNA, 25 bp, Homo sapien
caacccaggtaatttagtctagagc

SEQ ID NO: 4174506 - DNA, 25 bp, Homo sapien
tcatgacttccaaaatgggagcagg

SEQ ID NO: 4174507 - DNA, 25 bp, Homo sapien
gacaggagattgtcttccggcactg

SEQ ID NO: 4174508 - DNA, 25 bp, Homo sapien
tgggctatggtatcaatataagttg

SEQ ID NO: 4174509 - DNA, 25 bp, Homo sapien
atttctgctctacattggagaagga

SEQ ID NO: 4174510 - DNA, 25 bp, Homo sapien
gacatagagtatacagacacttctg

SEQ ID NO: 4174511 - DNA, 25 bp, Homo sapien
tgcactggttggtaagcacagtacc

SEQ ID NO: 4174512 - DNA, 25 bp, Homo sapien
cattgagcatatgacgctactacgg

SEQ ID NO: 4174513 - DNA, 25 bp, Homo sapien
tggatgactgaaagaaaggacttgg

SEQ ID NO: 4174514 - DNA, 25 bp, Homo sapien
tccgccgccctctagttcgccgggc

SEQ ID NO: 4174515 - DNA, 25 bp, Homo sapien
gatcccgcggcttgccggagctgca

SEQ ID NO: 4174516 - DNA, 25 bp, Homo sapien
ggagctgcagcgtttcccgtcgcat

SEQ ID NO: 4174517 - DNA, 25 bp, Homo sapien
ctctgactgactcgcgactccgccg

SEQ ID NO: 4174518 - DNA, 25 bp, Homo sapien
gggaacagtcgaggagccgctgcct

SEQ ID NO: 4174519 - DNA, 25 bp, Homo sapien
catgtccccggcgaatggggaacag

SEQ ID NO: 4174520 - DNA, 25 bp, Homo sapien
cgaatggggaacagtcgaggagccg

SEQ ID NO: 4174521 - DNA, 25 bp, Homo sapien
gaagcggttgccgggttcccatgtc

SEQ ID NO: 4174522 - DNA, 25 bp, Homo sapien
agcgcggacacttcctgagcgggca

SEQ ID NO: 4174523 - DNA, 25 bp, Homo sapien
tgagcgggcaccgagcagagccgag

SEQ ID NO: 4174524 - DNA, 25 bp, Homo sapien
aaagcgcggacacttcctgagcggg

SEQ ID NO: 4174525 - DNA, 25 bp, Homo sapien
gggcaaagcgcggacacttcctgag

SEQ ID NO: 4174526 - DNA, 25 bp, Homo sapien
caggctgatcggctttttccgggag

SEQ ID NO: 4174527 - DNA, 25 bp, Homo sapien
aggagccgcaaacaaacgacgtccg

SEQ ID NO: 4174528 - DNA, 25 bp, Homo sapien
cccagcgtcactttctaattggttt

SEQ ID NO: 4174529 - DNA, 25 bp, Homo sapien
gattggctccgttcgggcttcggct

SEQ ID NO: 4174530 - DNA, 25 bp, Homo sapien
ggtacgctcccagcggagttttcca

SEQ ID NO: 4174531 - DNA, 25 bp, Homo sapien
caatcaccgaaggaggtacgctccc

SEQ ID NO: 4174532 - DNA, 25 bp, Homo sapien
ttctcttcaccaatcaccgaaggag

SEQ ID NO: 4174533 - DNA, 25 bp, Homo sapien
aaggaggtacgctcccagcggagtt

SEQ ID NO: 4174534 - DNA, 25 bp, Homo sapien
gggccgaaggccaatcacactgcag

SEQ ID NO: 4174535 - DNA, 25 bp, Homo sapien
cagctaggtcttgcgattggacggc

SEQ ID NO: 4174536 - DNA, 25 bp, Homo sapien
tgagacagcgctttatagacgccct

SEQ ID NO: 4174537 - DNA, 25 bp, Homo sapien
caactccagcgcctaagcttcaggc

SEQ ID NO: 4174538 - DNA, 25 bp, Homo sapien
gccgaccgcagcactttccgatttg

SEQ ID NO: 4174539 - DNA, 25 bp, Homo sapien
ttgttcccattttagcgtctgagag

SEQ ID NO: 4174540 - DNA, 25 bp, Homo sapien
cagcaagcctctgtatcaatggccc

SEQ ID NO: 4174541 - DNA, 25 bp, Homo sapien
tttctcatgggcgtttccagaggcc

SEQ ID NO: 4174542 - DNA, 25 bp, Homo sapien
gcaggtagaaattacaggcaccact

SEQ ID NO: 4174543 - DNA, 25 bp, Homo sapien
ctgcaggtagaaattacaggcacca

SEQ ID NO: 4174544 - DNA, 25 bp, Homo sapien
aggtagaaattacaggcaccactgg

SEQ ID NO: 4174545 - DNA, 25 bp, Homo sapien
gtagaaattacaggcaccactggat

SEQ ID NO: 4174546 - DNA, 25 bp, Homo sapien
gccaggtaatctgatcaaatatagg

SEQ ID NO: 4174547 - DNA, 25 bp, Homo sapien
tgttctgtcccaagtccttcatcag

SEQ ID NO: 4174548 - DNA, 25 bp, Homo sapien
aggtcctttaacatgtgctttctgg

SEQ ID NO: 4174549 - DNA, 25 bp, Homo sapien
caaatataggtcctttaacatgtgc

SEQ ID NO: 4174550 - DNA, 25 bp, Homo sapien
gaatctgcaaacactatctagacct

SEQ ID NO: 4174551 - DNA, 25 bp, Homo sapien
catttgctttacttgtctggcctct

SEQ ID NO: 4174552 - DNA, 25 bp, Homo sapien
tcattccccattgtcttacacaagg

SEQ ID NO: 4174553 - DNA, 25 bp, Homo sapien
cattcctgagggcaacaatctgcta

SEQ ID NO: 4174554 - DNA, 25 bp, Homo sapien
ttcatgtagttgcttccctagaggg

SEQ ID NO: 4174555 - DNA, 25 bp, Homo sapien
ttaacttatatgacaaaggattatc

SEQ ID NO: 4174556 - DNA, 25 bp, Homo sapien
tatcagatgcctagcaggtgtctca

SEQ ID NO: 4174557 - DNA, 25 bp, Homo sapien
aattttcgttggaaagctttgctga

SEQ ID NO: 4174558 - DNA, 25 bp, Homo sapien
ctttgtagtaacaaccatattaaca

SEQ ID NO: 4174559 - DNA, 25 bp, Homo sapien
tcctagcgttttgagaagccatggc

SEQ ID NO: 4174560 - DNA, 25 bp, Homo sapien
ttataaataggaatgcatgggcaat

SEQ ID NO: 4174561 - DNA, 25 bp, Homo sapien
atggcacgcagattttgagcccagg

SEQ ID NO: 4174562 - DNA, 25 bp, Homo sapien
atcttcaaatcctactactcctcct

SEQ ID NO: 4174563 - DNA, 25 bp, Homo sapien
gatcactttagattgaagtgtcctc

SEQ ID NO: 4174564 - DNA, 25 bp, Homo sapien
ttagattgaagtgtcctccactcac

SEQ ID NO: 4174565 - DNA, 25 bp, Homo sapien
tcctcctttaagatcactttagatt

SEQ ID NO: 4174566 - DNA, 25 bp, Homo sapien
tttttcctgtaacaaagctccctca

SEQ ID NO: 4174567 - DNA, 25 bp, Homo sapien
tcccatttgggcacacctcactggt

SEQ ID NO: 4174568 - DNA, 25 bp, Homo sapien
cacagtgtatgttacttcagaggct

SEQ ID NO: 4174569 - DNA, 25 bp, Homo sapien
ttcacagtgacagtgtttcaaacac

SEQ ID NO: 4174570 - DNA, 25 bp, Homo sapien
gcatgattaatccactccttggtta

SEQ ID NO: 4174571 - DNA, 25 bp, Homo sapien
tgagggtgaaatctattgggctgca

SEQ ID NO: 4174572 - DNA, 25 bp, Homo sapien
catgacagtttagaccctatgtggt

SEQ ID NO: 4174573 - DNA, 25 bp, Homo sapien
gaaacgaccataaagaatgggcaac

SEQ ID NO: 4174574 - DNA, 25 bp, Homo sapien
tttgatgcacaactactactataat

SEQ ID NO: 4174575 - DNA, 25 bp, Homo sapien
taagctctgtataaaaagtagaacc

SEQ ID NO: 4174576 - DNA, 25 bp, Homo sapien
tagaacccgagtttccgcttaggca

SEQ ID NO: 4174577 - DNA, 25 bp, Homo sapien
tgggagaagtattacctgttttgcc

SEQ ID NO: 4174578 - DNA, 25 bp, Homo sapien
gagccactgtacccagctgttgcct

SEQ ID NO: 4174579 - DNA, 25 bp, Homo sapien
cactgtacccagctgttgcctccat

SEQ ID NO: 4174580 - DNA, 25 bp, Homo sapien
gccactgtacccagctgttgcctcc

SEQ ID NO: 4174581 - DNA, 25 bp, Homo sapien
tgagccactgtacccagctgttgcc

SEQ ID NO: 4174582 - DNA, 25 bp, Homo sapien
ggttacaggtgtccatcatcacact

SEQ ID NO: 4174583 - DNA, 25 bp, Homo sapien
ttacaggtgtccatcatcacacttg

SEQ ID NO: 4174584 - DNA, 25 bp, Homo sapien
ggtgtccatcatcacacttggctat

SEQ ID NO: 4174585 - DNA, 25 bp, Homo sapien
tgtccatcatcacacttggctattt

SEQ ID NO: 4174586 - DNA, 25 bp, Homo sapien
gtgtggaatggaaagcatgtcgtct

SEQ ID NO: 4174587 - DNA, 25 bp, Homo sapien
ttgggaatattcacctcacttctct

SEQ ID NO: 4174588 - DNA, 25 bp, Homo sapien
tgtgagagttggatatgcaccatct

SEQ ID NO: 4174589 - DNA, 25 bp, Homo sapien
catgtcgtcttagccacagtggaag

SEQ ID NO: 4174590 - DNA, 25 bp, Homo sapien
accgcgcctggcaacattaggtaca

SEQ ID NO: 4174591 - DNA, 25 bp, Homo sapien
gcgcctggcaacattaggtacattt

SEQ ID NO: 4174592 - DNA, 25 bp, Homo sapien
caccgcgcctggcaacattaggtac

SEQ ID NO: 4174593 - DNA, 25 bp, Homo sapien
ccgcgcctggcaacattaggtacat

SEQ ID NO: 4174594 - DNA, 25 bp, Homo sapien
cccaagggattaggaggcaatacag

SEQ ID NO: 4174595 - DNA, 25 bp, Homo sapien
gacctgccatccaatccaggcagac

SEQ ID NO: 4174596 - DNA, 25 bp, Homo sapien
ccagaaattcaccagacctagtggt

SEQ ID NO: 4174597 - DNA, 25 bp, Homo sapien
ggcttctcagagattcataccccaa

SEQ ID NO: 4174598 - DNA, 25 bp, Homo sapien
gtaggtctgtgatgcccctaagcca

SEQ ID NO: 4174599 - DNA, 25 bp, Homo sapien
ctaggttcggctgtgcacgtattgt

SEQ ID NO: 4174600 - DNA, 25 bp, Homo sapien
aattaatgatgagggtctaggttcg

SEQ ID NO: 4174601 - DNA, 25 bp, Homo sapien
cggtaggtctgtgatgcccctaagc

SEQ ID NO: 4174602 - DNA, 25 bp, Homo sapien
cagaggcctacgtttgctttgagtt

SEQ ID NO: 4174603 - DNA, 25 bp, Homo sapien
tatgaacaggtttccggcctgaaag

SEQ ID NO: 4174604 - DNA, 25 bp, Homo sapien
cgtacccgttggcaagtcttcagat

SEQ ID NO: 4174605 - DNA, 25 bp, Homo sapien
tatgaagatccctgtgtatgaacag

SEQ ID NO: 4174606 - DNA, 25 bp, Homo sapien
cagagcagaagttttgaccggatct

SEQ ID NO: 4174607 - DNA, 25 bp, Homo sapien
gacactcagtcgacatagcgcacta

SEQ ID NO: 4174608 - DNA, 25 bp, Homo sapien
aagttttgaccggatctgtttctga

SEQ ID NO: 4174609 - DNA, 25 bp, Homo sapien
tgcagacactcagtcgacatagcgc

SEQ ID NO: 4174610 - DNA, 25 bp, Homo sapien
cagagtccagtacgctcagcaccat

SEQ ID NO: 4174611 - DNA, 25 bp, Homo sapien
cccagagtccagtacgctcagcacc

SEQ ID NO: 4174612 - DNA, 25 bp, Homo sapien
ccagagtccagtacgctcagcacca

SEQ ID NO: 4174613 - DNA, 25 bp, Homo sapien
tgctcattttagctacctgggtctt

SEQ ID NO: 4174614 - DNA, 25 bp, Homo sapien
ttcctggtggtaaagtcaggaagaa

SEQ ID NO: 4174615 - DNA, 25 bp, Homo sapien
tgaggcatgctcattttagctacct

SEQ ID NO: 4174616 - DNA, 25 bp, Homo sapien
tcctgtatcttgaggcatgctcatt

SEQ ID NO: 4174617 - DNA, 25 bp, Homo sapien
ccaagaattgggtcaaaatgccatt

SEQ ID NO: 4174618 - DNA, 25 bp, Homo sapien
gccagctcctgacatggtgtttcag

SEQ ID NO: 4174619 - DNA, 25 bp, Homo sapien
ccaatgggtatcctataatgctgac

SEQ ID NO: 4174620 - DNA, 25 bp, Homo sapien
tggtccctaagcctggtgccaagaa

SEQ ID NO: 4174621 - DNA, 25 bp, Homo sapien
tctaggagtttctcttggatcttgc

SEQ ID NO: 4174622 - DNA, 25 bp, Homo sapien
cctaaatctaggagtttctcttgga

SEQ ID NO: 4174623 - DNA, 25 bp, Homo sapien
tctgcctaaatctaggagtttctct

SEQ ID NO: 4174624 - DNA, 25 bp, Homo sapien
ggagtttctcttggatcttgcttct

SEQ ID NO: 4174625 - DNA, 25 bp, Homo sapien
gatctatgacacatccactcgggtt

SEQ ID NO: 4174626 - DNA, 25 bp, Homo sapien
caggctttgaggactaccataggtc

SEQ ID NO: 4174627 - DNA, 25 bp, Homo sapien
gactgaatgtggcatcagcagctgc

SEQ ID NO: 4174628 - DNA, 25 bp, Homo sapien
caaatgtttcctgggtcgcaccatc

SEQ ID NO: 4174629 - DNA, 25 bp, Homo sapien
ttgacttttatgtcctacaagtaag

SEQ ID NO: 4174630 - DNA, 25 bp, Homo sapien
atccatgagcccaatcattttgact

SEQ ID NO: 4174631 - DNA, 25 bp, Homo sapien
gacttttatgtcctacaagtaagtg

SEQ ID NO: 4174632 - DNA, 25 bp, Homo sapien
atccatctctacctccccccgactc

SEQ ID NO: 4174633 - DNA, 25 bp, Homo sapien
ggggcatacctaggcccagatcagg

SEQ ID NO: 4174634 - DNA, 25 bp, Homo sapien
gggcatacctaggcccagatcaggc

SEQ ID NO: 4174635 - DNA, 25 bp, Homo sapien
ttgctgtctgtatctggggcatacc

SEQ ID NO: 4174636 - DNA, 25 bp, Homo sapien
tggggcatacctaggcccagatcag

SEQ ID NO: 4174637 - DNA, 25 bp, Homo sapien
gctgctgtcatctgagctatacatg

SEQ ID NO: 4174638 - DNA, 25 bp, Homo sapien
gaatcctggagaagtaaacattgcc

SEQ ID NO: 4174639 - DNA, 25 bp, Homo sapien
ttaaagggctgaatgtgccatgact

SEQ ID NO: 4174640 - DNA, 25 bp, Homo sapien
gctcttggttgttctgctcttgaag

SEQ ID NO: 4174641 - DNA, 25 bp, Homo sapien
atcaattaattgtagacactactga

SEQ ID NO: 4174642 - DNA, 25 bp, Homo sapien
taattgtagacactactgacttcag

SEQ ID NO: 4174643 - DNA, 25 bp, Homo sapien
caattaattgtagacactactgact

SEQ ID NO: 4174644 - DNA, 25 bp, Homo sapien
attaattgtagacactactgacttc

SEQ ID NO: 4174645 - DNA, 25 bp, Homo sapien
agacatgtggcaccctcacaaacat

SEQ ID NO: 4174646 - DNA, 25 bp, Homo sapien
ccagacatgtggcaccctcacaaac

SEQ ID NO: 4174647 - DNA, 25 bp, Homo sapien
catcctttaacagagtgctcagtat

SEQ ID NO: 4174648 - DNA, 25 bp, Homo sapien
tgtggcaccctcacaaacatccttt

SEQ ID NO: 4174649 - DNA, 25 bp, Homo sapien
cacatgaggagaacccaaacaataa

SEQ ID NO: 4174650 - DNA, 25 bp, Homo sapien
taagtagcacatgaggagaacccaa

SEQ ID NO: 4174651 - DNA, 25 bp, Homo sapien
tttttaagtagcacatgaggagaac

SEQ ID NO: 4174652 - DNA, 25 bp, Homo sapien
tagcacatgaggagaacccaaacaa

SEQ ID NO: 4174653 - DNA, 25 bp, Homo sapien
acatgcaaatattgctgacttccaa

SEQ ID NO: 4174654 - DNA, 25 bp, Homo sapien
catgcaaatattgctgacttccaag

SEQ ID NO: 4174655 - DNA, 25 bp, Homo sapien
atgcaaatattgctgacttccaagg

SEQ ID NO: 4174656 - DNA, 25 bp, Homo sapien
tctgcagtatctatctttcctgcgt

SEQ ID NO: 4174657 - DNA, 25 bp, Homo sapien
tcccttccccctgtagtagtctgca

SEQ ID NO: 4174658 - DNA, 25 bp, Homo sapien
tctttcctgcgtttatgtccatgtg

SEQ ID NO: 4174659 - DNA, 25 bp, Homo sapien
catgggtaaattggacccaggcata

SEQ ID NO: 4174660 - DNA, 25 bp, Homo sapien
gaagagacgggagagtactgtaatt

SEQ ID NO: 4174661 - DNA, 25 bp, Homo sapien
tgcgagtggcaatttcagtggaaga

SEQ ID NO: 4174662 - DNA, 25 bp, Homo sapien
tctgctgaataagcgaccggctgtg

SEQ ID NO: 4174663 - DNA, 25 bp, Homo sapien
tactgtaatttggtgtgaagatggg

SEQ ID NO: 4174664 - DNA, 25 bp, Homo sapien
tatctttatccatccctaggtccag

SEQ ID NO: 4174665 - DNA, 25 bp, Homo sapien
taaggatgatagaccccagctccat

SEQ ID NO: 4174666 - DNA, 25 bp, Homo sapien
tgttgaaccaatgtcgcatgctggg

SEQ ID NO: 4174667 - DNA, 25 bp, Homo sapien
tccgccctgttgaagtaaactccag

SEQ ID NO: 4174668 - DNA, 25 bp, Homo sapien
tggccaggagcgggagcggacagcg

SEQ ID NO: 4174669 - DNA, 25 bp, Homo sapien
ggctggccaggagcgggagcggaca

SEQ ID NO: 4174670 - DNA, 25 bp, Homo sapien
gcccggatctgcagagactgcgggc

SEQ ID NO: 4174671 - DNA, 25 bp, Homo sapien
gggccgagcaggcccggatctgcag

SEQ ID NO: 4174672 - DNA, 25 bp, Homo sapien
gacaagagcaccttccacgggaggg

SEQ ID NO: 4174673 - DNA, 25 bp, Homo sapien
ccgaagacaagagcaccttccacgg

SEQ ID NO: 4174674 - DNA, 25 bp, Homo sapien
tgttgctgagccggtgctcgctcac

SEQ ID NO: 4174675 - DNA, 25 bp, Homo sapien
tttatagtggagtcacagtagggtc

SEQ ID NO: 4174676 - DNA, 25 bp, Homo sapien
ttatagtggagtcacagtagggtct

SEQ ID NO: 4174677 - DNA, 25 bp, Homo sapien
tatagtggagtcacagtagggtctg

SEQ ID NO: 4174678 - DNA, 25 bp, Homo sapien
ctttatagtggagtcacagtagggt

SEQ ID NO: 4174679 - DNA, 25 bp, Homo sapien
cttggcggggcagggtccgcctcaa

SEQ ID NO: 4174680 - DNA, 25 bp, Homo sapien
aggttctcgccttggttcacgtagg

SEQ ID NO: 4174681 - DNA, 25 bp, Homo sapien
ggaaacagcgtgcagcccgcgaagc

SEQ ID NO: 4174682 - DNA, 25 bp, Homo sapien
gtacaggagcatgcgcacgcacatc

SEQ ID NO: 4174683 - DNA, 25 bp, Homo sapien
tgagcaagcagcagtctcggttagt

SEQ ID NO: 4174684 - DNA, 25 bp, Homo sapien
cagcagtctcggttagtgaagtgga

SEQ ID NO: 4174685 - DNA, 25 bp, Homo sapien
ggtcccactgcttgcttgcgagtag

SEQ ID NO: 4174686 - DNA, 25 bp, Homo sapien
actaccaggtcccactgcttgcttg

SEQ ID NO: 4174687 - DNA, 25 bp, Homo sapien
ctgcttgcttgcgagtagtgatgac

SEQ ID NO: 4174688 - DNA, 25 bp, Homo sapien
cccactgcttgcttgcgagtagtga

SEQ ID NO: 4174689 - DNA, 25 bp, Homo sapien
cttggatcgacttttgggctcaggc

SEQ ID NO: 4174690 - DNA, 25 bp, Homo sapien
tcttggatcgacttttgggctcagg

SEQ ID NO: 4174691 - DNA, 25 bp, Homo sapien
ctcttggatcgacttttgggctcag

SEQ ID NO: 4174692 - DNA, 25 bp, Homo sapien
ggccactggtcggtcctcatgatct

SEQ ID NO: 4174693 - DNA, 25 bp, Homo sapien
gccactggtcggtcctcatgatctc

SEQ ID NO: 4174694 - DNA, 25 bp, Homo sapien
gagttccgcaacagcagcacagggt

SEQ ID NO: 4174695 - DNA, 25 bp, Homo sapien
cgagttccgcaacagcagcacaggg

SEQ ID NO: 4174696 - DNA, 25 bp, Homo sapien
gcgcgagttccgcaacagcagcaca

SEQ ID NO: 4174697 - DNA, 25 bp, Homo sapien
gcgagttccgcaacagcagcacagg

SEQ ID NO: 4174698 - DNA, 25 bp, Homo sapien
gtaggaaaaatgcactcagccggcg

SEQ ID NO: 4174699 - DNA, 25 bp, Homo sapien
aggaaaaatgcactcagccggcgaa

SEQ ID NO: 4174700 - DNA, 25 bp, Homo sapien
aaaatgcactcagccggcgaagcca

SEQ ID NO: 4174701 - DNA, 25 bp, Homo sapien
gaaaaatgcactcagccggcgaagc

SEQ ID NO: 4174702 - DNA, 25 bp, Homo sapien
aggaagttgccctggtcacggagga

SEQ ID NO: 4174703 - DNA, 25 bp, Homo sapien
gctgctggtaggcaatgacttgccg

SEQ ID NO: 4174704 - DNA, 25 bp, Homo sapien
gacttgccgtatgccgttgaggaag

SEQ ID NO: 4174705 - DNA, 25 bp, Homo sapien
tcacggaggatgaggccgatgaaga

SEQ ID NO: 4174706 - DNA, 25 bp, Homo sapien
gctgctcctgctccaggttccactg

SEQ ID NO: 4174707 - DNA, 25 bp, Homo sapien
tgctgctcctgctccaggttccact

SEQ ID NO: 4174708 - DNA, 25 bp, Homo sapien
gctcctgctccaggttccactgcag

SEQ ID NO: 4174709 - DNA, 25 bp, Homo sapien
tcctgctccaggttccactgcagga

SEQ ID NO: 4174710 - DNA, 25 bp, Homo sapien
gggcccagccctgggtagccactac

SEQ ID NO: 4174711 - DNA, 25 bp, Homo sapien
ctggaggggcccagccctgggtagc

SEQ ID NO: 4174712 - DNA, 25 bp, Homo sapien
ggaggggcccagccctgggtagcca

SEQ ID NO: 4174713 - DNA, 25 bp, Homo sapien
aggggcccagccctgggtagccact

SEQ ID NO: 4174714 - DNA, 25 bp, Homo sapien
gaggaccgtccttggaagcctcagg

SEQ ID NO: 4174715 - DNA, 25 bp, Homo sapien
caggggtgaggaccgtccttggaag

SEQ ID NO: 4174716 - DNA, 25 bp, Homo sapien
tgctgggcaatcgaagtccccaggg

SEQ ID NO: 4174717 - DNA, 25 bp, Homo sapien
gacgccatcctccatgttgctgggc

SEQ ID NO: 4174718 - DNA, 25 bp, Homo sapien
ccccaggacgtacaaaagatcttat

SEQ ID NO: 4174719 - DNA, 25 bp, Homo sapien
tatgggctacttcaattctaccacc

SEQ ID NO: 4174720 - DNA, 25 bp, Homo sapien
caatcatgtaaagacgtgtgcctgc

SEQ ID NO: 4174721 - DNA, 25 bp, Homo sapien
ctgagcctgctttgtattcatgaga

SEQ ID NO: 4174722 - DNA, 25 bp, Homo sapien
ggtgctactagacttttacctaaca

SEQ ID NO: 4174723 - DNA, 25 bp, Homo sapien
tgttcctttggctgtgaataaattg

SEQ ID NO: 4174724 - DNA, 25 bp, Homo sapien
taaaggatagtattcaatccagtaa

SEQ ID NO: 4174725 - DNA, 25 bp, Homo sapien
cattcaccagaatgtacttgttcct

SEQ ID NO: 4174726 - DNA, 25 bp, Homo sapien
tggtgccaccaaagaatgacagcag

SEQ ID NO: 4174727 - DNA, 25 bp, Homo sapien
catcttatgaagatattgtaaggct

SEQ ID NO: 4174728 - DNA, 25 bp, Homo sapien
ttgtaaggcttagcatattttgcca

SEQ ID NO: 4174729 - DNA, 25 bp, Homo sapien
tcaaagtcataagaatcagggtccc

SEQ ID NO: 4174730 - DNA, 25 bp, Homo sapien
ggtaatctaatatgttcctactgcc

SEQ ID NO: 4174731 - DNA, 25 bp, Homo sapien
caagctgcagactgtacagttatga

SEQ ID NO: 4174732 - DNA, 25 bp, Homo sapien
taggctgtgcctaagtgacaaatgt

SEQ ID NO: 4174733 - DNA, 25 bp, Homo sapien
ctccatgtgggccacagcaagctgc

SEQ ID NO: 4174734 - DNA, 25 bp, Homo sapien
ttatacctaatggaacagtttccag

SEQ ID NO: 4174735 - DNA, 25 bp, Homo sapien
cagaactactttaactatggaagca

SEQ ID NO: 4174736 - DNA, 25 bp, Homo sapien
tattgtatccttaatgtatagcagg

SEQ ID NO: 4174737 - DNA, 25 bp, Homo sapien
tatacagatcagataggcattagaa

SEQ ID NO: 4174738 - DNA, 25 bp, Homo sapien
cacccatgtcatgtactggaccatc

SEQ ID NO: 4174739 - DNA, 25 bp, Homo sapien
tttacacttaatggtaggccacaat

SEQ ID NO: 4174740 - DNA, 25 bp, Homo sapien
catgtcatgtactggaccatctttc

SEQ ID NO: 4174741 - DNA, 25 bp, Homo sapien
tacacttaatggtaggccacaatct

SEQ ID NO: 4174742 - DNA, 25 bp, Homo sapien
cacaactgagtttcattggtactct

SEQ ID NO: 4174743 - DNA, 25 bp, Homo sapien
gcttatcactcaatggccaatagac

SEQ ID NO: 4174744 - DNA, 25 bp, Homo sapien
ccagtatgctagatatttggagagt

SEQ ID NO: 4174745 - DNA, 25 bp, Homo sapien
tttggagagtaggtttgagcacaac

SEQ ID NO: 4174746 - DNA, 25 bp, Homo sapien
caggctccagcgactataaagcgcg

SEQ ID NO: 4174747 - DNA, 25 bp, Homo sapien
accctcaaggcgagataaccgaaca

SEQ ID NO: 4174748 - DNA, 25 bp, Homo sapien
tttgccgaggcagtcttgtagccct

SEQ ID NO: 4174749 - DNA, 25 bp, Homo sapien
aacatccttgggctgtttgccgagg

SEQ ID NO: 4174750 - DNA, 25 bp, Homo sapien
tggttcctctgatccaccaggtgag

SEQ ID NO: 4174751 - DNA, 25 bp, Homo sapien
gaagcaagtgaggtggagtcagcat

SEQ ID NO: 4174752 - DNA, 25 bp, Homo sapien
tacagctggttcctctgatccacca

SEQ ID NO: 4174753 - DNA, 25 bp, Homo sapien
ttgtattacagctggttcctctgat

SEQ ID NO: 4174754 - DNA, 25 bp, Homo sapien
gcctctctaactgagtcacagttga

SEQ ID NO: 4174755 - DNA, 25 bp, Homo sapien
tttgctgtacgaaccaggagctctc

SEQ ID NO: 4174756 - DNA, 25 bp, Homo sapien
gtctactgagtcaagttcacacagc

SEQ ID NO: 4174757 - DNA, 25 bp, Homo sapien
aagtcatttggatctgaagtcagcc

SEQ ID NO: 4174758 - DNA, 25 bp, Homo sapien
cagtgcacctttagtagacaggctt

SEQ ID NO: 4174759 - DNA, 25 bp, Homo sapien
cctttagtagacaggcttccagcac

SEQ ID NO: 4174760 - DNA, 25 bp, Homo sapien
tgcacctttagtagacaggcttcca

SEQ ID NO: 4174761 - DNA, 25 bp, Homo sapien
cacctttagtagacaggcttccagc

SEQ ID NO: 4174762 - DNA, 25 bp, Homo sapien
agtatgttaacagtcaccaaaaaga

SEQ ID NO: 4174763 - DNA, 25 bp, Homo sapien
gaagaagtatgttaacagtcaccaa

SEQ ID NO: 4174764 - DNA, 25 bp, Homo sapien
gaagtatgttaacagtcaccaaaaa

SEQ ID NO: 4174765 - DNA, 25 bp, Homo sapien
atgttaacagtcaccaaaaagaagg

SEQ ID NO: 4174766 - DNA, 25 bp, Homo sapien
caggagagggtaacatcagtgaatg

SEQ ID NO: 4174767 - DNA, 25 bp, Homo sapien
gacaggagagggtaacatcagtgaa

SEQ ID NO: 4174768 - DNA, 25 bp, Homo sapien
acatcagtgaatgggtgggcccgca

SEQ ID NO: 4174769 - DNA, 25 bp, Homo sapien
gtaacatcagtgaatgggtgggccc

SEQ ID NO: 4174770 - DNA, 25 bp, Homo sapien
tagagtcccctcagaaatttcagcc

SEQ ID NO: 4174771 - DNA, 25 bp, Homo sapien
tgtgaaactggtaaaccaacttcga

SEQ ID NO: 4174772 - DNA, 25 bp, Homo sapien
tcagcctggtccacagatactcttc

SEQ ID NO: 4174773 - DNA, 25 bp, Homo sapien
ggctgagcacttgtagatagcttca

SEQ ID NO: 4174774 - DNA, 25 bp, Homo sapien
cgtgaggtactagtcctttgagatg

SEQ ID NO: 4174775 - DNA, 25 bp, Homo sapien
cacaatgggcgtgaggtactagtcc

SEQ ID NO: 4174776 - DNA, 25 bp, Homo sapien
tcaatcctgtcaaattgcacctggg

SEQ ID NO: 4174777 - DNA, 25 bp, Homo sapien
ctgtccggtccagccatgtcacaat

SEQ ID NO: 4174778 - DNA, 25 bp, Homo sapien
ttgacagggtatttcaggatggaga

SEQ ID NO: 4174779 - DNA, 25 bp, Homo sapien
aggatggagaacaccctgtagaagc

SEQ ID NO: 4174780 - DNA, 25 bp, Homo sapien
tccacgatgctgtggttgctcaggt

SEQ ID NO: 4174781 - DNA, 25 bp, Homo sapien
tgttatgtggcagagatatttctca

SEQ ID NO: 4174782 - DNA, 25 bp, Homo sapien
cagcctgccacgtcataaagctgat

SEQ ID NO: 4174783 - DNA, 25 bp, Homo sapien
tcagcctgccacgtcataaagctga

SEQ ID NO: 4174784 - DNA, 25 bp, Homo sapien
agcctgccacgtcataaagctgatg

SEQ ID NO: 4174785 - DNA, 25 bp, Homo sapien
cccaacctcccagggaagatactgc

SEQ ID NO: 4174786 - DNA, 25 bp, Homo sapien
aacctcccagggaagatactgccat

SEQ ID NO: 4174787 - DNA, 25 bp, Homo sapien
gcccaacctcccagggaagatactg

SEQ ID NO: 4174788 - DNA, 25 bp, Homo sapien
caacctcccagggaagatactgcca

SEQ ID NO: 4174789 - DNA, 25 bp, Homo sapien
tataacctaagcttgattccttcat

SEQ ID NO: 4174790 - DNA, 25 bp, Homo sapien
tctataacctaagcttgattccttc

SEQ ID NO: 4174791 - DNA, 25 bp, Homo sapien
cttctataacctaagcttgattcct

SEQ ID NO: 4174792 - DNA, 25 bp, Homo sapien
tcacttctataacctaagcttgatt

SEQ ID NO: 4174793 - DNA, 25 bp, Homo sapien
gccatttgcattggacaccagggaa

SEQ ID NO: 4174794 - DNA, 25 bp, Homo sapien
taggccttggtgcaacctcgagtgg

SEQ ID NO: 4174795 - DNA, 25 bp, Homo sapien
tccaggatcaagatgcacgcacgtg

SEQ ID NO: 4174796 - DNA, 25 bp, Homo sapien
tgccagtgggtaggaacctcaacgt

SEQ ID NO: 4174797 - DNA, 25 bp, Homo sapien
cctcagtgagctggtaagaatgcac

SEQ ID NO: 4174798 - DNA, 25 bp, Homo sapien
tattcccaaggatggcgacaagggc

SEQ ID NO: 4174799 - DNA, 25 bp, Homo sapien
taacctccggctggaaatagaaagc

SEQ ID NO: 4174800 - DNA, 25 bp, Homo sapien
tatggagtcctcatgggtaaagcag

SEQ ID NO: 4174801 - DNA, 25 bp, Homo sapien
ggctagtaaggaaactgcatcacga

SEQ ID NO: 4174802 - DNA, 25 bp, Homo sapien
ccattgccgtcagcatgacagacct

SEQ ID NO: 4174803 - DNA, 25 bp, Homo sapien
catcacgattgaaagaggaacagac

SEQ ID NO: 4174804 - DNA, 25 bp, Homo sapien
tgcctctagatacatagccatactg

SEQ ID NO: 4174805 - DNA, 25 bp, Homo sapien
gagggttccacccagttcactagaa

SEQ ID NO: 4174806 - DNA, 25 bp, Homo sapien
aacaaaatcaggacactcaattggg

SEQ ID NO: 4174807 - DNA, 25 bp, Homo sapien
tggcagccccagacatacttcagtg

SEQ ID NO: 4174808 - DNA, 25 bp, Homo sapien
gactatgagagccaactttaatccc

SEQ ID NO: 4174809 - DNA, 25 bp, Homo sapien
gggtctgctgtttttctcttcccat

SEQ ID NO: 4174810 - DNA, 25 bp, Homo sapien
tgaccgttctgggggtctgctgttt

SEQ ID NO: 4174811 - DNA, 25 bp, Homo sapien
tgtgaccgttctgggggtctgctgt

SEQ ID NO: 4174812 - DNA, 25 bp, Homo sapien
tgggggtctgctgtttttctcttcc

SEQ ID NO: 4174813 - DNA, 25 bp, Homo sapien
gttctgaaggagctgctaccaccat

SEQ ID NO: 4174814 - DNA, 25 bp, Homo sapien
atccctgttctgaaggagctgctac

SEQ ID NO: 4174815 - DNA, 25 bp, Homo sapien
ccctgttctgaaggagctgctacca

SEQ ID NO: 4174816 - DNA, 25 bp, Homo sapien
cctgttctgaaggagctgctaccac

SEQ ID NO: 4174817 - DNA, 25 bp, Homo sapien
tggatgaggtgaatccctggttggt

SEQ ID NO: 4174818 - DNA, 25 bp, Homo sapien
tggccctcaaaaggcagttgcagac

SEQ ID NO: 4174819 - DNA, 25 bp, Homo sapien
tgatggatgaggtgaatccctggtt

SEQ ID NO: 4174820 - DNA, 25 bp, Homo sapien
tgaggtgaatccctggttggttttc

SEQ ID NO: 4174821 - DNA, 25 bp, Homo sapien
tgaccccgggatgcggggtctcctc

SEQ ID NO: 4174822 - DNA, 25 bp, Homo sapien
ggccctgcgcccacttcccggtgcc

SEQ ID NO: 4174823 - DNA, 25 bp, Homo sapien
cgcttcctaggccgcgggacgtctt

SEQ ID NO: 4174824 - DNA, 25 bp, Homo sapien
gacaatgcactgtagaacccacagc

SEQ ID NO: 4174825 - DNA, 25 bp, Homo sapien
gctatgggtacaagccggctctgag

SEQ ID NO: 4174826 - DNA, 25 bp, Homo sapien
acagtgggcactcaacaaaccttgg

SEQ ID NO: 4174827 - DNA, 25 bp, Homo sapien
tatgacaagttcagaggacaacgag

SEQ ID NO: 4174828 - DNA, 25 bp, Homo sapien
gatctcagcggctaaactgccaggc

SEQ ID NO: 4174829 - DNA, 25 bp, Homo sapien
gctacatcaggtggtaccaggtttc

SEQ ID NO: 4174830 - DNA, 25 bp, Homo sapien
gcagctacatcaggtggtaccaggt

SEQ ID NO: 4174831 - DNA, 25 bp, Homo sapien
ctgcagctacatcaggtggtaccag

SEQ ID NO: 4174832 - DNA, 25 bp, Homo sapien
cagctacatcaggtggtaccaggtt

SEQ ID NO: 4174833 - DNA, 25 bp, Homo sapien
ctttctgagcatctctctgcttcat

SEQ ID NO: 4174834 - DNA, 25 bp, Homo sapien
tctttcacaattgctcttctctgct

SEQ ID NO: 4174835 - DNA, 25 bp, Homo sapien
ggatcgtctttcacaattgctcttc

SEQ ID NO: 4174836 - DNA, 25 bp, Homo sapien
ctggggatcgtctttcacaattgct

SEQ ID NO: 4174837 - DNA, 25 bp, Homo sapien
ctgtacctttgtaataagggagatg

SEQ ID NO: 4174838 - DNA, 25 bp, Homo sapien
tgtacctttgtaataagggagatgc

SEQ ID NO: 4174839 - DNA, 25 bp, Homo sapien
gggtgattggtaatggcttggagga

SEQ ID NO: 4174840 - DNA, 25 bp, Homo sapien
attctagggtgattggtaatggctt

SEQ ID NO: 4174841 - DNA, 25 bp, Homo sapien
gcttggaggagagatgtccagcagg

SEQ ID NO: 4174842 - DNA, 25 bp, Homo sapien
gtgattggtaatggcttggaggaga

SEQ ID NO: 4174843 - DNA, 25 bp, Homo sapien
ccctaggcaaggcttctacttgaca

SEQ ID NO: 4174844 - DNA, 25 bp, Homo sapien
taggcaaggcttctacttgacagct

SEQ ID NO: 4174845 - DNA, 25 bp, Homo sapien
gcttctacttgacagctgcctgttt

SEQ ID NO: 4174846 - DNA, 25 bp, Homo sapien
cttcctgttccctaggcaaggcttc

SEQ ID NO: 4174847 - DNA, 25 bp, Homo sapien
tcccagagaaccatcgcagtcaaag

SEQ ID NO: 4174848 - DNA, 25 bp, Homo sapien
taggaagagcattaactcccagaga

SEQ ID NO: 4174849 - DNA, 25 bp, Homo sapien
cattaactcccagagaaccatcgca

SEQ ID NO: 4174850 - DNA, 25 bp, Homo sapien
gctcttctttcaatgttaccatcca

SEQ ID NO: 4174851 - DNA, 25 bp, Homo sapien
gatcacagctggataggagggacaa

SEQ ID NO: 4174852 - DNA, 25 bp, Homo sapien
tcaacttagacgctttggaacagcc

SEQ ID NO: 4174853 - DNA, 25 bp, Homo sapien
gactctgagggctgcatcgcacata

SEQ ID NO: 4174854 - DNA, 25 bp, Homo sapien
tactagtaaatacgtgaggtggcct

SEQ ID NO: 4174855 - DNA, 25 bp, Homo sapien
tattcctagtgcttgggttagcccc

SEQ ID NO: 4174856 - DNA, 25 bp, Homo sapien
ggttagccccttaatgatgtgtgca

SEQ ID NO: 4174857 - DNA, 25 bp, Homo sapien
gataaagacataatctctgcgctgg

SEQ ID NO: 4174858 - DNA, 25 bp, Homo sapien
cataagggaacaggccaagatattt

SEQ ID NO: 4174859 - DNA, 25 bp, Homo sapien
agtctcttgtatctcaccaccctag

SEQ ID NO: 4174860 - DNA, 25 bp, Homo sapien
acacctctgtggcctagagtttctg

SEQ ID NO: 4174861 - DNA, 25 bp, Homo sapien
tgcctccttccctataccatgcaac

SEQ ID NO: 4174862 - DNA, 25 bp, Homo sapien
gggctccttaactccatgatatggg

SEQ ID NO: 4174863 - DNA, 25 bp, Homo sapien
tcacactttcgcattgccattcttc

SEQ ID NO: 4174864 - DNA, 25 bp, Homo sapien
catggctaactgttcacaactttta

SEQ ID NO: 4174865 - DNA, 25 bp, Homo sapien
gataagtaagcgattcactagacag

SEQ ID NO: 4174866 - DNA, 25 bp, Homo sapien
tttccttgcgtaccttacatgtaag

SEQ ID NO: 4174867 - DNA, 25 bp, Homo sapien
ttttggaacatgtactgataacact

SEQ ID NO: 4174868 - DNA, 25 bp, Homo sapien
ccctgaaagtgtacagggaaggaga

SEQ ID NO: 4174869 - DNA, 25 bp, Homo sapien
cttctaagattttcctcagggagat

SEQ ID NO: 4174870 - DNA, 25 bp, Homo sapien
gggagatgggcccagtagaatccta

SEQ ID NO: 4174871 - DNA, 25 bp, Homo sapien
ccagtagaatcctagaggagctgct

SEQ ID NO: 4174872 - DNA, 25 bp, Homo sapien
aatcttcagttaggcccagtgaggg

SEQ ID NO: 4174873 - DNA, 25 bp, Homo sapien
cagcaggttgcaatagttaagcaca

SEQ ID NO: 4174874 - DNA, 25 bp, Homo sapien
ggcaggtgggtcactaaaagttgac

SEQ ID NO: 4174875 - DNA, 25 bp, Homo sapien
taaaacaagacccattgctcttcgg

SEQ ID NO: 4174876 - DNA, 25 bp, Homo sapien
tctagaggcatctggaccgtgtcca

SEQ ID NO: 4174877 - DNA, 25 bp, Homo sapien
aaggcctctagaggcatctggaccg

SEQ ID NO: 4174878 - DNA, 25 bp, Homo sapien
tcacccagagtaattccaaaacaat

SEQ ID NO: 4174879 - DNA, 25 bp, Homo sapien
gaggcatctggaccgtgtccaggat

SEQ ID NO: 4174880 - DNA, 25 bp, Homo sapien
gtgaagtcctcctttattaatgact

SEQ ID NO: 4174881 - DNA, 25 bp, Homo sapien
gatgtcaacatcgttctcattgttt

SEQ ID NO: 4174882 - DNA, 25 bp, Homo sapien
gcagtttactaacatcaatttcaag

SEQ ID NO: 4174883 - DNA, 25 bp, Homo sapien
gactttgcatgtggatccagcagtt

SEQ ID NO: 4174884 - DNA, 25 bp, Homo sapien
tgcgcgaagtgctcttctcgcagtg

SEQ ID NO: 4174885 - DNA, 25 bp, Homo sapien
cgaagtgctcttctcgcagtgcgcc

SEQ ID NO: 4174886 - DNA, 25 bp, Homo sapien
aagtgctcttctcgcagtgcgccct

SEQ ID NO: 4174887 - DNA, 25 bp, Homo sapien
gcgcatgcgcgaagtgctcttctcg

SEQ ID NO: 4174888 - DNA, 25 bp, Homo sapien
tcgttaacaaggagctccgcctctt

SEQ ID NO: 4174889 - DNA, 25 bp, Homo sapien
gatgtcgttaacaaggagctccgcc

SEQ ID NO: 4174890 - DNA, 25 bp, Homo sapien
taacaaggagctccgcctctttctc

SEQ ID NO: 4174891 - DNA, 25 bp, Homo sapien
ttggggatgtcgttaacaaggagct

SEQ ID NO: 4174892 - DNA, 25 bp, Homo sapien
cagggcacaattgcgcctgcgcgat

SEQ ID NO: 4174893 - DNA, 25 bp, Homo sapien
cttggcgaaccagggcacaattgcg

SEQ ID NO: 4174894 - DNA, 25 bp, Homo sapien
cctgcgcgattctgaggccctttgt

SEQ ID NO: 4174895 - DNA, 25 bp, Homo sapien
tctgaggccctttgtctatgctgac

SEQ ID NO: 4174896 - DNA, 25 bp, Homo sapien
ctcgacggcttatactttgggaacg

SEQ ID NO: 4174897 - DNA, 25 bp, Homo sapien
tcaggcagagtgcgcaggctcgacg

SEQ ID NO: 4174898 - DNA, 25 bp, Homo sapien
aggcagagtgcgcaggctcgacggc

SEQ ID NO: 4174899 - DNA, 25 bp, Homo sapien
gcagagtgcgcaggctcgacggctt

SEQ ID NO: 4174900 - DNA, 25 bp, Homo sapien
atcgggagcggtggccgaccctttg

SEQ ID NO: 4174901 - DNA, 25 bp, Homo sapien
cctttgcgtggtctctctcggtctc

SEQ ID NO: 4174902 - DNA, 25 bp, Homo sapien
aggactcgggccctattcccgcctg

SEQ ID NO: 4174903 - DNA, 25 bp, Homo sapien
tgcgtctgagatactgatcgggagc

SEQ ID NO: 4174904 - DNA, 25 bp, Homo sapien
taacgttcttaaggtcacgcaggca

SEQ ID NO: 4174905 - DNA, 25 bp, Homo sapien
ttctgaacacgccttacgaacgagg

SEQ ID NO: 4174906 - DNA, 25 bp, Homo sapien
tctcgagggccaagctctggcaaag

SEQ ID NO: 4174907 - DNA, 25 bp, Homo sapien
gagtaagcactatattacgcccatt

SEQ ID NO: 4174908 - DNA, 25 bp, Homo sapien
ggagttgaagttgcccaaggtaaca

SEQ ID NO: 4174909 - DNA, 25 bp, Homo sapien
gaatcactgtattcccatcaggaga

SEQ ID NO: 4174910 - DNA, 25 bp, Homo sapien
aacagagttagccaatgagtagtgc

SEQ ID NO: 4174911 - DNA, 25 bp, Homo sapien
gagagagcagtatccctatgagctg

SEQ ID NO: 4174912 - DNA, 25 bp, Homo sapien
gatgctgtgggttacacaaaccagg

SEQ ID NO: 4174913 - DNA, 25 bp, Homo sapien
gacagtagtagagcttaatcatcca

SEQ ID NO: 4174914 - DNA, 25 bp, Homo sapien
aaattgaaactaccctgaggcatac

SEQ ID NO: 4174915 - DNA, 25 bp, Homo sapien
tgaggcatacagctagaagacagaa

SEQ ID NO: 4174916 - DNA, 25 bp, Homo sapien
tccctgggcctaagattgtagctgc

SEQ ID NO: 4174917 - DNA, 25 bp, Homo sapien
gaaagtttgttctacaaggacagga

SEQ ID NO: 4174918 - DNA, 25 bp, Homo sapien
acttaaccggacatggtagcgcaca

SEQ ID NO: 4174919 - DNA, 25 bp, Homo sapien
taaagattaggcaagatggccaggc

SEQ ID NO: 4174920 - DNA, 25 bp, Homo sapien
aattagctaaatgcccaagtgattt

SEQ ID NO: 4174921 - DNA, 25 bp, Homo sapien
ttaattagctaaatgcccaagtgat

SEQ ID NO: 4174922 - DNA, 25 bp, Homo sapien
taattagctaaatgcccaagtgatt

SEQ ID NO: 4174923 - DNA, 25 bp, Homo sapien
tctttccaggctacaaataagctgt

SEQ ID NO: 4174924 - DNA, 25 bp, Homo sapien
gaaccatgcagtattcccaatgaag

SEQ ID NO: 4174925 - DNA, 25 bp, Homo sapien
tttaagctgacctagtgtgaaaagc

SEQ ID NO: 4174926 - DNA, 25 bp, Homo sapien
catagggacttttgtgaaggagcac

SEQ ID NO: 4174927 - DNA, 25 bp, Homo sapien
tgttcttgcataggcccaacgaagc

SEQ ID NO: 4174928 - DNA, 25 bp, Homo sapien
cccaacgaagcaaggcaggattttc

SEQ ID NO: 4174929 - DNA, 25 bp, Homo sapien
tattgttcttgcataggcccaacga

SEQ ID NO: 4174930 - DNA, 25 bp, Homo sapien
gacatttattgttcttgcataggcc

SEQ ID NO: 4174931 - DNA, 25 bp, Homo sapien
tacacgaactctaatgggaatgcag

SEQ ID NO: 4174932 - DNA, 25 bp, Homo sapien
taaagcccagggagtgtgcgaagaa

SEQ ID NO: 4174933 - DNA, 25 bp, Homo sapien
caaagctagacgagtgggctccagt

SEQ ID NO: 4174934 - DNA, 25 bp, Homo sapien
aatcatatacccaggctgctgacgg

SEQ ID NO: 4174935 - DNA, 25 bp, Homo sapien
gaggtgaaatgttcgatccaatttt

SEQ ID NO: 4174936 - DNA, 25 bp, Homo sapien
atatgagaggtgaaatgttcgatcc

SEQ ID NO: 4174937 - DNA, 25 bp, Homo sapien
ttaatatgagaggtgaaatgttcga

SEQ ID NO: 4174938 - DNA, 25 bp, Homo sapien
tgagaggtgaaatgttcgatccaat

SEQ ID NO: 4174939 - DNA, 25 bp, Homo sapien
atagatgatttatttaggcaggaat

SEQ ID NO: 4174940 - DNA, 25 bp, Homo sapien
taatagatgatttatttaggcagga

SEQ ID NO: 4174941 - DNA, 25 bp, Homo sapien
gaatacatatagtcatcattgccag

SEQ ID NO: 4174942 - DNA, 25 bp, Homo sapien
taggcaggaatacatatagtcatca

SEQ ID NO: 4174943 - DNA, 25 bp, Homo sapien
tcattcaatgtacagcaaatgtttg

SEQ ID NO: 4174944 - DNA, 25 bp, Homo sapien
cagattcccaacacgggctgcgtct

SEQ ID NO: 4174945 - DNA, 25 bp, Homo sapien
aaatgtttgctgtcactctgacagc

SEQ ID NO: 4174946 - DNA, 25 bp, Homo sapien
ctgacagcagattcccaacacgggc

SEQ ID NO: 4174947 - DNA, 25 bp, Homo sapien
gaggacacatactagagcaaggagc

SEQ ID NO: 4174948 - DNA, 25 bp, Homo sapien
aaattaagccatgaaggtgaccctg

SEQ ID NO: 4174949 - DNA, 25 bp, Homo sapien
catttggcacttggttatacttcac

SEQ ID NO: 4174950 - DNA, 25 bp, Homo sapien
gaaaggcaaggtctatcctcccact

SEQ ID NO: 4174951 - DNA, 25 bp, Homo sapien
attcaggacacaagcaaaggcacag

SEQ ID NO: 4174952 - DNA, 25 bp, Homo sapien
cagttaattagcttggcttggtttg

SEQ ID NO: 4174953 - DNA, 25 bp, Homo sapien
tagcttggcttggtttgtaccacca

SEQ ID NO: 4174954 - DNA, 25 bp, Homo sapien
tcaaatacaagcaattctacaaaac

SEQ ID NO: 4174955 - DNA, 25 bp, Homo sapien
tatgaggatcgccaagtaccaggtg

SEQ ID NO: 4174956 - DNA, 25 bp, Homo sapien
tactgattgccaaggcgagtgttac

SEQ ID NO: 4174957 - DNA, 25 bp, Homo sapien
tgatttcttgatacccattgcctgg

SEQ ID NO: 4174958 - DNA, 25 bp, Homo sapien
cagggcaagctgtttgctgccaaac

SEQ ID NO: 4174959 - DNA, 25 bp, Homo sapien
ttggtcttgaaagggccagagcctg

SEQ ID NO: 4174960 - DNA, 25 bp, Homo sapien
taacaaacacatgataagccagcag

SEQ ID NO: 4174961 - DNA, 25 bp, Homo sapien
tgaacttcatatactgggagctgga

SEQ ID NO: 4174962 - DNA, 25 bp, Homo sapien
caaggtctgaggtcacgtcatcaag

SEQ ID NO: 4174963 - DNA, 25 bp, Homo sapien
catttctgaagattcctgtcatgta

SEQ ID NO: 4174964 - DNA, 25 bp, Homo sapien
gattatacttctgcataagactgta

SEQ ID NO: 4174965 - DNA, 25 bp, Homo sapien
taggacttgctaagttctccacagt

SEQ ID NO: 4174966 - DNA, 25 bp, Homo sapien
tatcctcacagatacagagacacca

SEQ ID NO: 4174967 - DNA, 25 bp, Homo sapien
gaagtgacaatacgggaggtccaaa

SEQ ID NO: 4174968 - DNA, 25 bp, Homo sapien
catcctttggaagagtgagcaagca

SEQ ID NO: 4174969 - DNA, 25 bp, Homo sapien
taaaatgctacccttcagccttacc

SEQ ID NO: 4174970 - DNA, 25 bp, Homo sapien
ctgtccctgtgtatagattatgtaa

SEQ ID NO: 4174971 - DNA, 25 bp, Homo sapien
atatatgggacttaacctgtaactt

SEQ ID NO: 4174972 - DNA, 25 bp, Homo sapien
gatatatgggacttaacctgtaact

SEQ ID NO: 4174973 - DNA, 25 bp, Homo sapien
tatatgggacttaacctgtaactta

SEQ ID NO: 4174974 - DNA, 25 bp, Homo sapien
aggcgaatcctggaacactcccact

SEQ ID NO: 4174975 - DNA, 25 bp, Homo sapien
ccagcgcttcaactaccggcttaaa

SEQ ID NO: 4174976 - DNA, 25 bp, Homo sapien
ttaaatgaaccacgccccttgcgcg

SEQ ID NO: 4174977 - DNA, 25 bp, Homo sapien
gaaaacgcactattcctgcgaccag

SEQ ID NO: 4174978 - DNA, 25 bp, Homo sapien
tcggcgcagccaagcccgccctacc

SEQ ID NO: 4174979 - DNA, 25 bp, Homo sapien
cgccctacccgaggtcgcacacggg

SEQ ID NO: 4174980 - DNA, 25 bp, Homo sapien
aaactccctcggactctcccagttg

SEQ ID NO: 4174981 - DNA, 25 bp, Homo sapien
tgggtccagggccacactcggcgca

SEQ ID NO: 4174982 - DNA, 25 bp, Homo sapien
agcaacgaactccaactttaaatat

SEQ ID NO: 4174983 - DNA, 25 bp, Homo sapien
gcaacgaactccaactttaaatata

SEQ ID NO: 4174984 - DNA, 25 bp, Homo sapien
tagcaacgaactccaactttaaata

SEQ ID NO: 4174985 - DNA, 25 bp, Homo sapien
tgaaagtactactacagacaggaca

SEQ ID NO: 4174986 - DNA, 25 bp, Homo sapien
catttgaaggaagcccggttggtcg

SEQ ID NO: 4174987 - DNA, 25 bp, Homo sapien
tggaacttcagtgaggacatctggg

SEQ ID NO: 4174988 - DNA, 25 bp, Homo sapien
tggctaaccgcttcaatgctgctgg

SEQ ID NO: 4174989 - DNA, 25 bp, Homo sapien
gattcacaaactggataaacctcac

SEQ ID NO: 4174990 - DNA, 25 bp, Homo sapien
ttttaaagattcacaaactggataa

SEQ ID NO: 4174991 - DNA, 25 bp, Homo sapien
taaagattcacaaactggataaacc

SEQ ID NO: 4174992 - DNA, 25 bp, Homo sapien
aagattcacaaactggataaacctc

SEQ ID NO: 4174993 - DNA, 25 bp, Homo sapien
taaaactattcaatcaaatcaggcc

SEQ ID NO: 4174994 - DNA, 25 bp, Homo sapien
cccaaatccagattatatgccctag

SEQ ID NO: 4174995 - DNA, 25 bp, Homo sapien
ttcatctagctaactcttactatct

SEQ ID NO: 4174996 - DNA, 25 bp, Homo sapien
tatgccctagttatatactcctgat

SEQ ID NO: 4174997 - DNA, 25 bp, Homo sapien
gaaaaagcagcctgccctatgaagg

SEQ ID NO: 4174998 - DNA, 25 bp, Homo sapien
tctgtagtcacaagccaagaaggga

SEQ ID NO: 4174999 - DNA, 25 bp, Homo sapien
gaaggcaaactctttaatcaagtct

SEQ ID NO: 4175000 - DNA, 25 bp, Homo sapien
gccatcaggaaatggatctgtccaa

SEQ ID NO: 4175001 - DNA, 25 bp, Homo sapien
ctggatttccagtttggttcttatt

SEQ ID NO: 4175002 - DNA, 25 bp, Homo sapien
cttattcccaaagacaggaatatgc

SEQ ID NO: 4175003 - DNA, 25 bp, Homo sapien
ttggttcttattcccaaagacagga

SEQ ID NO: 4175004 - DNA, 25 bp, Homo sapien
tggatttccagtttggttcttattc

SEQ ID NO: 4175005 - DNA, 25 bp, Homo sapien
tgggctcaatttgttcattaaacct

SEQ ID NO: 4175006 - DNA, 25 bp, Homo sapien
taaaccttgccaaaagtgtgcgtgc

SEQ ID NO: 4175007 - DNA, 25 bp, Homo sapien
ttttgggcattgctgattcatcctc

SEQ ID NO: 4175008 - DNA, 25 bp, Homo sapien
tcccgaagcaatgcataaatgggct

SEQ ID NO: 4175009 - DNA, 25 bp, Homo sapien
aagatgacttgatacagagagctgc

SEQ ID NO: 4175010 - DNA, 25 bp, Homo sapien
tgtaccactaagactcatccaaggc

SEQ ID NO: 4175011 - DNA, 25 bp, Homo sapien
ggtgtcactgtaccactaagactca

SEQ ID NO: 4175012 - DNA, 25 bp, Homo sapien
tttcctgatcagtttatttcctcta

SEQ ID NO: 4175013 - DNA, 25 bp, Homo sapien
tttggtctggctggcagctctagga

SEQ ID NO: 4175014 - DNA, 25 bp, Homo sapien
tggcagctctaggaaccccattctg

SEQ ID NO: 4175015 - DNA, 25 bp, Homo sapien
ctctaggaaccccattctgtctttc

SEQ ID NO: 4175016 - DNA, 25 bp, Homo sapien
tggctggcagctctaggaaccccat

SEQ ID NO: 4175017 - DNA, 25 bp, Homo sapien
tactgaggcaggatggactattaca

SEQ ID NO: 4175018 - DNA, 25 bp, Homo sapien
tcttctcttgtactgaggcaggatg

SEQ ID NO: 4175019 - DNA, 25 bp, Homo sapien
ttggggcaggatgggccatttcaaa

SEQ ID NO: 4175020 - DNA, 25 bp, Homo sapien
caggatggactattacatccttggg

SEQ ID NO: 4175021 - DNA, 25 bp, Homo sapien
tctgcagaggtagcccctagtttct

SEQ ID NO: 4175022 - DNA, 25 bp, Homo sapien
caataggttgacttgctgaaaggat

SEQ ID NO: 4175023 - DNA, 25 bp, Homo sapien
tagtttctgatctagggacaagcta

SEQ ID NO: 4175024 - DNA, 25 bp, Homo sapien
ggttaggcctactgacagttctgca

SEQ ID NO: 4175025 - DNA, 25 bp, Homo sapien
cctgaattatctcctgtgtggagcc

SEQ ID NO: 4175026 - DNA, 25 bp, Homo sapien
gatcctgaattatctcctgtgtgga

SEQ ID NO: 4175027 - DNA, 25 bp, Homo sapien
tgtggagccccgactcattctgaat

SEQ ID NO: 4175028 - DNA, 25 bp, Homo sapien
ggatcctgaattatctcctgtgtgg

SEQ ID NO: 4175029 - DNA, 25 bp, Homo sapien
ctggtctcacgtttctcctttattt

SEQ ID NO: 4175030 - DNA, 25 bp, Homo sapien
gtggtgcccacctgctaggctagca

SEQ ID NO: 4175031 - DNA, 25 bp, Homo sapien
tcataggaaggacctttggtggccc

SEQ ID NO: 4175032 - DNA, 25 bp, Homo sapien
tatcttcagaaccatatgccccttg

SEQ ID NO: 4175033 - DNA, 25 bp, Homo sapien
ccagtgaggctcgatgaagatcttc

SEQ ID NO: 4175034 - DNA, 25 bp, Homo sapien
ttcactgtaggagaacggacggcca

SEQ ID NO: 4175035 - DNA, 25 bp, Homo sapien
agaggtcctcaaacatgcgttgtcc

SEQ ID NO: 4175036 - DNA, 25 bp, Homo sapien
tctcgtttatgcacagccacagctg

SEQ ID NO: 4175037 - DNA, 25 bp, Homo sapien
tttctcgtgaatgagcagtgctcgc

SEQ ID NO: 4175038 - DNA, 25 bp, Homo sapien
gctcaatggtatactggatgcaccc

SEQ ID NO: 4175039 - DNA, 25 bp, Homo sapien
gatttctgctggaatggcctcatta

SEQ ID NO: 4175040 - DNA, 25 bp, Homo sapien
tctgccttagggaaaataccatgct

SEQ ID NO: 4175041 - DNA, 25 bp, Homo sapien
gacaagaggtctgtacccaaaggga

SEQ ID NO: 4175042 - DNA, 25 bp, Homo sapien
tatgccccaagatgttacagaactt

SEQ ID NO: 4175043 - DNA, 25 bp, Homo sapien
caaaggcatcttattgcacaaaaag

SEQ ID NO: 4175044 - DNA, 25 bp, Homo sapien
cacaaaaagtttagatcccatatgc

SEQ ID NO: 4175045 - DNA, 25 bp, Homo sapien
tacgtatacaaggtacaaaggcatc

SEQ ID NO: 4175046 - DNA, 25 bp, Homo sapien
gcaatgaatacctttattcttacct

SEQ ID NO: 4175047 - DNA, 25 bp, Homo sapien
actgctgcaatgaatacctttattc

SEQ ID NO: 4175048 - DNA, 25 bp, Homo sapien
gctgcaatgaatacctttattctta

SEQ ID NO: 4175049 - DNA, 25 bp, Homo sapien
cctccatattcacttgtgacatttt

SEQ ID NO: 4175050 - DNA, 25 bp, Homo sapien
ggtattctctgttgactcccacatc

SEQ ID NO: 4175051 - DNA, 25 bp, Homo sapien
tattgccaggaaatctctgatcaca

SEQ ID NO: 4175052 - DNA, 25 bp, Homo sapien
gatcacagaccctagagttctggta

SEQ ID NO: 4175053 - DNA, 25 bp, Homo sapien
tgtactactctccattggataacag

SEQ ID NO: 4175054 - DNA, 25 bp, Homo sapien
tagaatagggctgattaacgctgac

SEQ ID NO: 4175055 - DNA, 25 bp, Homo sapien
catgttcaaacagaagggcctcacc

SEQ ID NO: 4175056 - DNA, 25 bp, Homo sapien
gatataggtaccgttccaagcatgt

SEQ ID NO: 4175057 - DNA, 25 bp, Homo sapien
taacgctgactccatactgcacaaa

SEQ ID NO: 4175058 - DNA, 25 bp, Homo sapien
atgatctctcttcccatgcaactgg

SEQ ID NO: 4175059 - DNA, 25 bp, Homo sapien
gatgatctctcttcccatgcaactg

SEQ ID NO: 4175060 - DNA, 25 bp, Homo sapien
tgatctctcttcccatgcaactggc

SEQ ID NO: 4175061 - DNA, 25 bp, Homo sapien
tcaaagttccttgttcattgagcaa

SEQ ID NO: 4175062 - DNA, 25 bp, Homo sapien
caaagttccttgttcattgagcaac

SEQ ID NO: 4175063 - DNA, 25 bp, Homo sapien
tggctcttgtgtgcattgttcagga

SEQ ID NO: 4175064 - DNA, 25 bp, Homo sapien
atggtacactggctcttgtgtgcat

SEQ ID NO: 4175065 - DNA, 25 bp, Homo sapien
gtgcctgaaacatctagatcatctg

SEQ ID NO: 4175066 - DNA, 25 bp, Homo sapien
acagtgcctgaaacatctagatcat

SEQ ID NO: 4175067 - DNA, 25 bp, Homo sapien
cgacatgggagccatatttgagagg

SEQ ID NO: 4175068 - DNA, 25 bp, Homo sapien
gacggctgtctgctttgtcatgagc

SEQ ID NO: 4175069 - DNA, 25 bp, Homo sapien
cactgccaggtgctagcgacatggg

SEQ ID NO: 4175070 - DNA, 25 bp, Homo sapien
tgagcgggacggaaacatggttctt

SEQ ID NO: 4175071 - DNA, 25 bp, Homo sapien
aactcctccgaaatcttgccttctt

SEQ ID NO: 4175072 - DNA, 25 bp, Homo sapien
tcaactcctccgaaatcttgccttc

SEQ ID NO: 4175073 - DNA, 25 bp, Homo sapien
ttcaactcctccgaaatcttgcctt

SEQ ID NO: 4175074 - DNA, 25 bp, Homo sapien
ctttcaactcctccgaaatcttgcc

SEQ ID NO: 4175075 - DNA, 25 bp, Homo sapien
taataaatttaaagtgcttcagaat

SEQ ID NO: 4175076 - DNA, 25 bp, Homo sapien
tcctgaagcatatcactaagcaagt

SEQ ID NO: 4175077 - DNA, 25 bp, Homo sapien
tcatcctatatgtctttgttggcac

SEQ ID NO: 4175078 - DNA, 25 bp, Homo sapien
gctggccagcatccaagaacttcac

SEQ ID NO: 4175079 - DNA, 25 bp, Homo sapien
tgatcttgggattatacactcaggt

SEQ ID NO: 4175080 - DNA, 25 bp, Homo sapien
cttcagcagcatcatccagatatcc

SEQ ID NO: 4175081 - DNA, 25 bp, Homo sapien
ggaagtttgcagcatggatagcttc

SEQ ID NO: 4175082 - DNA, 25 bp, Homo sapien
agtacaaactgtcccatgtcccttg

SEQ ID NO: 4175083 - DNA, 25 bp, Homo sapien
gctattacagtgcaggttatcctca

SEQ ID NO: 4175084 - DNA, 25 bp, Homo sapien
ctttctttggttcatagtctggatc

SEQ ID NO: 4175085 - DNA, 25 bp, Homo sapien
tgcgttttgatctttctttggttca

SEQ ID NO: 4175086 - DNA, 25 bp, Homo sapien
cttgcactctgctgcgttttgatct

SEQ ID NO: 4175087 - DNA, 25 bp, Homo sapien
gcctgtcggataatgtaaattcttc

SEQ ID NO: 4175088 - DNA, 25 bp, Homo sapien
aacttgaaaataggcctgtcggata

SEQ ID NO: 4175089 - DNA, 25 bp, Homo sapien
ttgaaaataggcctgtcggataatg

SEQ ID NO: 4175090 - DNA, 25 bp, Homo sapien
aaataggcctgtcggataatgtaaa

SEQ ID NO: 4175091 - DNA, 25 bp, Homo sapien
tgcaaaccacgtccccattatataa

SEQ ID NO: 4175092 - DNA, 25 bp, Homo sapien
tagaaatgggattctagctttaaag

SEQ ID NO: 4175093 - DNA, 25 bp, Homo sapien
ctgaatttagatgaactatggttac

SEQ ID NO: 4175094 - DNA, 25 bp, Homo sapien
tctgcaaaccacgtccccattatat

SEQ ID NO: 4175095 - DNA, 25 bp, Homo sapien
taagtaggctggcccaaatgccttc

SEQ ID NO: 4175096 - DNA, 25 bp, Homo sapien
ttaagtaggctggcccaaatgcctt

SEQ ID NO: 4175097 - DNA, 25 bp, Homo sapien
tttaagtaggctggcccaaatgcct

SEQ ID NO: 4175098 - DNA, 25 bp, Homo sapien
cagttagtcgtctgcactcctttca

SEQ ID NO: 4175099 - DNA, 25 bp, Homo sapien
agacactaacggctggaggcagtta

SEQ ID NO: 4175100 - DNA, 25 bp, Homo sapien
tgaagggacatcctcttggtgtacc

SEQ ID NO: 4175101 - DNA, 25 bp, Homo sapien
cagctgaatggcaaggtcttgaagg

SEQ ID NO: 4175102 - DNA, 25 bp, Homo sapien
cctctgtgctccattgatccaaaat

SEQ ID NO: 4175103 - DNA, 25 bp, Homo sapien
tgtgctccattgatccaaaatcttt

SEQ ID NO: 4175104 - DNA, 25 bp, Homo sapien
tcctctgtgctccattgatccaaaa

SEQ ID NO: 4175105 - DNA, 25 bp, Homo sapien
tctgtgctccattgatccaaaatct

SEQ ID NO: 4175106 - DNA, 25 bp, Homo sapien
gagccagccagcactagtgcaggta

SEQ ID NO: 4175107 - DNA, 25 bp, Homo sapien
aaaattcgacggtagagagccagcc

SEQ ID NO: 4175108 - DNA, 25 bp, Homo sapien
aggtagcaggaccacacctcttggg

SEQ ID NO: 4175109 - DNA, 25 bp, Homo sapien
tcagaaaaattcgacggtagagagc

SEQ ID NO: 4175110 - DNA, 25 bp, Homo sapien
actcagcggaaataagggctctgca

SEQ ID NO: 4175111 - DNA, 25 bp, Homo sapien
tgatccctccaggtagtaaacattg

SEQ ID NO: 4175112 - DNA, 25 bp, Homo sapien
aacattgtgccaattccttttggac

SEQ ID NO: 4175113 - DNA, 25 bp, Homo sapien
gactgagaactagagtcagcagaga

SEQ ID NO: 4175114 - DNA, 25 bp, Homo sapien
actggacatgtcaactgacactttg

SEQ ID NO: 4175115 - DNA, 25 bp, Homo sapien
tggacatgtcaactgacactttgaa

SEQ ID NO: 4175116 - DNA, 25 bp, Homo sapien
ggacatgtcaactgacactttgaac

SEQ ID NO: 4175117 - DNA, 25 bp, Homo sapien
gacatgtcaactgacactttgaaca

SEQ ID NO: 4175118 - DNA, 25 bp, Homo sapien
atatttgctattggcctaccaaatg

SEQ ID NO: 4175119 - DNA, 25 bp, Homo sapien
aatatttgctattggcctaccaaat

SEQ ID NO: 4175120 - DNA, 25 bp, Homo sapien
caatggagggccaaaatcttgttct

SEQ ID NO: 4175121 - DNA, 25 bp, Homo sapien
tctgcagagtccttgatgacagatg

SEQ ID NO: 4175122 - DNA, 25 bp, Homo sapien
tggaccaagcatgtgtgcatcattt

SEQ ID NO: 4175123 - DNA, 25 bp, Homo sapien
gaaaaggcaacagtttgcaatggag

SEQ ID NO: 4175124 - DNA, 25 bp, Homo sapien
catccctatttgtatagctcagtag

SEQ ID NO: 4175125 - DNA, 25 bp, Homo sapien
gctcagtagaatttgtatccttgta

SEQ ID NO: 4175126 - DNA, 25 bp, Homo sapien
gaatacagctatactagccaatcat

SEQ ID NO: 4175127 - DNA, 25 bp, Homo sapien
aaagaggcagcaactaagaatacag

SEQ ID NO: 4175128 - DNA, 25 bp, Homo sapien
tgaattgagatggatttttagctct

SEQ ID NO: 4175129 - DNA, 25 bp, Homo sapien
tattctgtactcagcttcgttaaca

SEQ ID NO: 4175130 - DNA, 25 bp, Homo sapien
taacatgactctatgctgattttct

SEQ ID NO: 4175131 - DNA, 25 bp, Homo sapien
tgtgattgtattgaaggaataacca

SEQ ID NO: 4175132 - DNA, 25 bp, Homo sapien
cattagcaaatgcgaacatttccat

SEQ ID NO: 4175133 - DNA, 25 bp, Homo sapien
ttacattagcaaatgcgaacatttc

SEQ ID NO: 4175134 - DNA, 25 bp, Homo sapien
tacattagcaaatgcgaacatttcc

SEQ ID NO: 4175135 - DNA, 25 bp, Homo sapien
gctggcaattgtttacattagcaaa

SEQ ID NO: 4175136 - DNA, 25 bp, Homo sapien
ccaataatggcttaatggttcgtat

SEQ ID NO: 4175137 - DNA, 25 bp, Homo sapien
tgtatctgtgattaacccctgctgt

SEQ ID NO: 4175138 - DNA, 25 bp, Homo sapien
gcactcaacttgtatctgtgattaa

SEQ ID NO: 4175139 - DNA, 25 bp, Homo sapien
gattaacccctgctgttaccaataa

SEQ ID NO: 4175140 - DNA, 25 bp, Homo sapien
ccttttcacttctgcgagcctcttc

SEQ ID NO: 4175141 - DNA, 25 bp, Homo sapien
gacagtatggtgaactgagcaagtg

SEQ ID NO: 4175142 - DNA, 25 bp, Homo sapien
atggctctggacagtatggtgaact

SEQ ID NO: 4175143 - DNA, 25 bp, Homo sapien
gcctcttcccggtcttcaggagcat

SEQ ID NO: 4175144 - DNA, 25 bp, Homo sapien
gccgaggtaggcgggctccggccgc

SEQ ID NO: 4175145 - DNA, 25 bp, Homo sapien
cttcctcagacgcctctagccgcct

SEQ ID NO: 4175146 - DNA, 25 bp, Homo sapien
ttcctcagacgcctctagccgcctg

SEQ ID NO: 4175147 - DNA, 25 bp, Homo sapien
acgggcattcgcgcgctggtgcgct

SEQ ID NO: 4175148 - DNA, 25 bp, Homo sapien
acacgggcattcgcgcgctggtgcg

SEQ ID NO: 4175149 - DNA, 25 bp, Homo sapien
tcacacgggcattcgcgcgctggtg

SEQ ID NO: 4175150 - DNA, 25 bp, Homo sapien
cgggcattcgcgcgctggtgcgctc

SEQ ID NO: 4175151 - DNA, 25 bp, Homo sapien
ccatcagcttcaacgcttccttttt

SEQ ID NO: 4175152 - DNA, 25 bp, Homo sapien
ccggaccccaaaacatctgcgagtg

SEQ ID NO: 4175153 - DNA, 25 bp, Homo sapien
aacatctgcgagtgacccacagcaa

SEQ ID NO: 4175154 - DNA, 25 bp, Homo sapien
ccttttttgtcactatgaaaggcgg

SEQ ID NO: 4175155 - DNA, 25 bp, Homo sapien
cttcgaaacgttcggctcagagtat

SEQ ID NO: 4175156 - DNA, 25 bp, Homo sapien
gaaacgttcggctcagagtatttta

SEQ ID NO: 4175157 - DNA, 25 bp, Homo sapien
ttccttcttcgaaacgttcggctca

SEQ ID NO: 4175158 - DNA, 25 bp, Homo sapien
ccttcttcgaaacgttcggctcaga

SEQ ID NO: 4175159 - DNA, 25 bp, Homo sapien
atctggaaatactccgaagtcaaag

SEQ ID NO: 4175160 - DNA, 25 bp, Homo sapien
tgcagtccccgccggatgtacggaa

SEQ ID NO: 4175161 - DNA, 25 bp, Homo sapien
agccccaccaccactgttactgcca

SEQ ID NO: 4175162 - DNA, 25 bp, Homo sapien
cagttaagccatccaaaacttttcg

SEQ ID NO: 4175163 - DNA, 25 bp, Homo sapien
aataataggctttaagccaattcaa

SEQ ID NO: 4175164 - DNA, 25 bp, Homo sapien
tttaagttgacgcctaaaatatcta

SEQ ID NO: 4175165 - DNA, 25 bp, Homo sapien
caacagtttcctgttcctggtatgt

SEQ ID NO: 4175166 - DNA, 25 bp, Homo sapien
cagcagactctgatgctgacatctc

SEQ ID NO: 4175167 - DNA, 25 bp, Homo sapien
tattaagccaaactgatctacccac

SEQ ID NO: 4175168 - DNA, 25 bp, Homo sapien
ccagaacacccgctatttttgagtt

SEQ ID NO: 4175169 - DNA, 25 bp, Homo sapien
attttaaagcaatgtcattggcccc

SEQ ID NO: 4175170 - DNA, 25 bp, Homo sapien
tttttgagttcctacaactgcaagt

SEQ ID NO: 4175171 - DNA, 25 bp, Homo sapien
aactgcaagttcttataagcctgtg

SEQ ID NO: 4175172 - DNA, 25 bp, Homo sapien
cacaatttatgtttgccagtatgac

SEQ ID NO: 4175173 - DNA, 25 bp, Homo sapien
tatcacacaatttatgtttgccagt

SEQ ID NO: 4175174 - DNA, 25 bp, Homo sapien
atttatgtttgccagtatgacagaa

SEQ ID NO: 4175175 - DNA, 25 bp, Homo sapien
tatgtttgccagtatgacagaatga

SEQ ID NO: 4175176 - DNA, 25 bp, Homo sapien
ctggtcattggcgatggaagtattg

SEQ ID NO: 4175177 - DNA, 25 bp, Homo sapien
gtttctcagtaagacttacaaatct

SEQ ID NO: 4175178 - DNA, 25 bp, Homo sapien
ctgctcacgtaaacaaccactggtc

SEQ ID NO: 4175179 - DNA, 25 bp, Homo sapien
ggaagtattggtactagtttctcag

SEQ ID NO: 4175180 - DNA, 25 bp, Homo sapien
caaaggctaatgctgtgggctgatg

SEQ ID NO: 4175181 - DNA, 25 bp, Homo sapien
tgttctcgtcccaatagccaagatt

SEQ ID NO: 4175182 - DNA, 25 bp, Homo sapien
attcgtatagcacctgttctcgtcc

SEQ ID NO: 4175183 - DNA, 25 bp, Homo sapien
ctggatcaaaggctaatgctgtggg

SEQ ID NO: 4175184 - DNA, 25 bp, Homo sapien
gtaggacagctgcaccactttcatg

SEQ ID NO: 4175185 - DNA, 25 bp, Homo sapien
gcaatcaacaccaggtctcccgagt

SEQ ID NO: 4175186 - DNA, 25 bp, Homo sapien
ctttcatgttggcaatagcaatcaa

SEQ ID NO: 4175187 - DNA, 25 bp, Homo sapien
ggcaatagcaatcaacaccaggtct

SEQ ID NO: 4175188 - DNA, 25 bp, Homo sapien
tttgtctaaggttccacaaatgaag

SEQ ID NO: 4175189 - DNA, 25 bp, Homo sapien
gaagtgtatcatctgaacttgcact

SEQ ID NO: 4175190 - DNA, 25 bp, Homo sapien
taaatttaagagaatggagtatggc

SEQ ID NO: 4175191 - DNA, 25 bp, Homo sapien
gagaatggagtatggctggcctttt

SEQ ID NO: 4175192 - DNA, 25 bp, Homo sapien
gggaagcttacgaatgtatatagat

SEQ ID NO: 4175193 - DNA, 25 bp, Homo sapien
tatatacagggttatttggagtcca

SEQ ID NO: 4175194 - DNA, 25 bp, Homo sapien
tacgaatgtatatagatagaggcaa

SEQ ID NO: 4175195 - DNA, 25 bp, Homo sapien
gtccagaatgcaccagaattgcagg

SEQ ID NO: 4175196 - DNA, 25 bp, Homo sapien
taccaatttggcagacagtcaccca

SEQ ID NO: 4175197 - DNA, 25 bp, Homo sapien
taaaagttcactgaaccctgatacc

SEQ ID NO: 4175198 - DNA, 25 bp, Homo sapien
ttctcataaaggcagattggttccc

SEQ ID NO: 4175199 - DNA, 25 bp, Homo sapien
tctgggtgaactccatagtcatatc

SEQ ID NO: 4175200 - DNA, 25 bp, Homo sapien
ccacttcctctagatttgatgttag

SEQ ID NO: 4175201 - DNA, 25 bp, Homo sapien
attgcttttgttgcatcccagagat

SEQ ID NO: 4175202 - DNA, 25 bp, Homo sapien
cccagagattttagtaagtcatgtc

SEQ ID NO: 4175203 - DNA, 25 bp, Homo sapien
tttcttttccgatgctagctttagg

SEQ ID NO: 4175204 - DNA, 25 bp, Homo sapien
gttccacatgataacatatccagaa

SEQ ID NO: 4175205 - DNA, 25 bp, Homo sapien
catgataacatatccagaaagaatg

SEQ ID NO: 4175206 - DNA, 25 bp, Homo sapien
gaaaggtagatgacagtaagtaatt

SEQ ID NO: 4175207 - DNA, 25 bp, Homo sapien
ctggaaaggtagatgacagtaagta

SEQ ID NO: 4175208 - DNA, 25 bp, Homo sapien
gggctatcgcttaaatgtacaactg

SEQ ID NO: 4175209 - DNA, 25 bp, Homo sapien
tcatctcttgggctatcgcttaaat

SEQ ID NO: 4175210 - DNA, 25 bp, Homo sapien
ttaaatgtacaactggacctggatg

SEQ ID NO: 4175211 - DNA, 25 bp, Homo sapien
tatcgcttaaatgtacaactggacc

SEQ ID NO: 4175212 - DNA, 25 bp, Homo sapien
tataaaggcaatgttcaagtggttt

SEQ ID NO: 4175213 - DNA, 25 bp, Homo sapien
taaagaactttccatatcaacacag

SEQ ID NO: 4175214 - DNA, 25 bp, Homo sapien
tagtttgcaccattagtcacataaa

SEQ ID NO: 4175215 - DNA, 25 bp, Homo sapien
tcaacacagcattccacagtatgaa

SEQ ID NO: 4175216 - DNA, 25 bp, Homo sapien
ggtcagaagtgtttatcagcgcaat

SEQ ID NO: 4175217 - DNA, 25 bp, Homo sapien
tgaagctgcaacctaggaaatctct

SEQ ID NO: 4175218 - DNA, 25 bp, Homo sapien
tccattcttgtctaggcagctaggc

SEQ ID NO: 4175219 - DNA, 25 bp, Homo sapien
gctgtcagtgctccaagactggcaa

SEQ ID NO: 4175220 - DNA, 25 bp, Homo sapien
attatttctagttacctgtctttgg

SEQ ID NO: 4175221 - DNA, 25 bp, Homo sapien
tctataatacacagtggcccacttt

SEQ ID NO: 4175222 - DNA, 25 bp, Homo sapien
cacagtggcccactttaattgtacc

SEQ ID NO: 4175223 - DNA, 25 bp, Homo sapien
cattatggatcttctataatacaca

SEQ ID NO: 4175224 - DNA, 25 bp, Homo sapien
taccattttcataacctattagcag

SEQ ID NO: 4175225 - DNA, 25 bp, Homo sapien
ttcaagtcccagaatactacagtac

SEQ ID NO: 4175226 - DNA, 25 bp, Homo sapien
taaactctcagttctgctcttttag

SEQ ID NO: 4175227 - DNA, 25 bp, Homo sapien
cagtaccattttcataacctattag

SEQ ID NO: 4175228 - DNA, 25 bp, Homo sapien
ccataaagtcaaactaccatctgaa

SEQ ID NO: 4175229 - DNA, 25 bp, Homo sapien
cacatgaactgtttgccctcatgat

SEQ ID NO: 4175230 - DNA, 25 bp, Homo sapien
ttgtggtctggaaagggcgacttgg

SEQ ID NO: 4175231 - DNA, 25 bp, Homo sapien
ctcatgatgccaatcaattgaatga

SEQ ID NO: 4175232 - DNA, 25 bp, Homo sapien
gacagaacttatcccctatcgtaga

SEQ ID NO: 4175233 - DNA, 25 bp, Homo sapien
tgtgacatgataacgaacgctcaga

SEQ ID NO: 4175234 - DNA, 25 bp, Homo sapien
ggttgggacagtacataactacagc

SEQ ID NO: 4175235 - DNA, 25 bp, Homo sapien
aagtatcaaatgtccagtctagcca

SEQ ID NO: 4175236 - DNA, 25 bp, Homo sapien
ttgttgttactgaagtgagagcact

SEQ ID NO: 4175237 - DNA, 25 bp, Homo sapien
tgccctacaacctgagttctctgat

SEQ ID NO: 4175238 - DNA, 25 bp, Homo sapien
taaactatagttgtttgccctacaa

SEQ ID NO: 4175239 - DNA, 25 bp, Homo sapien
cacactcatgttgttcgaaagtaaa

SEQ ID NO: 4175240 - DNA, 25 bp, Homo sapien
cttgtattctactttaagaattggt

SEQ ID NO: 4175241 - DNA, 25 bp, Homo sapien
ctgtttttgcaggtcttgtattcta

SEQ ID NO: 4175242 - DNA, 25 bp, Homo sapien
gtcttgtattctactttaagaattg

SEQ ID NO: 4175243 - DNA, 25 bp, Homo sapien
tcttgtattctactttaagaattgg

SEQ ID NO: 4175244 - DNA, 25 bp, Homo sapien
gccggatatagctactttaaacaca

SEQ ID NO: 4175245 - DNA, 25 bp, Homo sapien
gatcttaaagtatagacacttggtt

SEQ ID NO: 4175246 - DNA, 25 bp, Homo sapien
caactttatctttcgaacaaactgt

SEQ ID NO: 4175247 - DNA, 25 bp, Homo sapien
aggcagggcacccagccggatatag

SEQ ID NO: 4175248 - DNA, 25 bp, Homo sapien
agagctcttcctaaggttcctgttt

SEQ ID NO: 4175249 - DNA, 25 bp, Homo sapien
ctaaggttcctgtttctgtgacagc

SEQ ID NO: 4175250 - DNA, 25 bp, Homo sapien
tgctgcagcttatatggtagagctc

SEQ ID NO: 4175251 - DNA, 25 bp, Homo sapien
cttcctaaggttcctgtttctgtga

SEQ ID NO: 4175252 - DNA, 25 bp, Homo sapien
aaaaaacatgaatgagactcagaag

SEQ ID NO: 4175253 - DNA, 25 bp, Homo sapien
aaaacatgaatgagactcagaagtc

SEQ ID NO: 4175254 - DNA, 25 bp, Homo sapien
ggaaaaaacatgaatgagactcaga

SEQ ID NO: 4175255 - DNA, 25 bp, Homo sapien
ctacataggaaaaaacatgaatgag

SEQ ID NO: 4175256 - DNA, 25 bp, Homo sapien
atggttaaacttggtcttctacaag

SEQ ID NO: 4175257 - DNA, 25 bp, Homo sapien
gatggttaaacttggtcttctacaa

SEQ ID NO: 4175258 - DNA, 25 bp, Homo sapien
tggttaaacttggtcttctacaagc

SEQ ID NO: 4175259 - DNA, 25 bp, Homo sapien
tttggatagggcgtttcacataaag

SEQ ID NO: 4175260 - DNA, 25 bp, Homo sapien
tagggcgtttcacataaagttagaa

SEQ ID NO: 4175261 - DNA, 25 bp, Homo sapien
gaaattcaacaataggatgatccat

SEQ ID NO: 4175262 - DNA, 25 bp, Homo sapien
caagtactgtaattgcttttccatg

SEQ ID NO: 4175263 - DNA, 25 bp, Homo sapien
tctccagaagtaccacgacagcata

SEQ ID NO: 4175264 - DNA, 25 bp, Homo sapien
gctttgtgtcagatcaactacaatg

SEQ ID NO: 4175265 - DNA, 25 bp, Homo sapien
taccacgacagcatagggttcttga

SEQ ID NO: 4175266 - DNA, 25 bp, Homo sapien
gaagtaccacgacagcatagggttc

SEQ ID NO: 4175267 - DNA, 25 bp, Homo sapien
agtactagaatcaaatccggaggac

SEQ ID NO: 4175268 - DNA, 25 bp, Homo sapien
tatgcttgactcctatagaatacag

SEQ ID NO: 4175269 - DNA, 25 bp, Homo sapien
gacaatctgcaaagtatgctgtgca

SEQ ID NO: 4175270 - DNA, 25 bp, Homo sapien
gctgtgcatgtaactggtgattcat

SEQ ID NO: 4175271 - DNA, 25 bp, Homo sapien
aagctcctccactgattggccactc

SEQ ID NO: 4175272 - DNA, 25 bp, Homo sapien
tgtgctccaaggttccaagctcctc

SEQ ID NO: 4175273 - DNA, 25 bp, Homo sapien
cagtaataataatttctggatatgt

SEQ ID NO: 4175274 - DNA, 25 bp, Homo sapien
gatatgtttgtgctccaaggttcca

SEQ ID NO: 4175275 - DNA, 25 bp, Homo sapien
ttgcagaagcatcccaaaattttat

SEQ ID NO: 4175276 - DNA, 25 bp, Homo sapien
tgcagaagcatcccaaaattttatt

SEQ ID NO: 4175277 - DNA, 25 bp, Homo sapien
aaattttattgatccatctgcatga

SEQ ID NO: 4175278 - DNA, 25 bp, Homo sapien
ccaaaattttattgatccatctgca

SEQ ID NO: 4175279 - DNA, 25 bp, Homo sapien
cttttgaagtttttagcttgtacag

SEQ ID NO: 4175280 - DNA, 25 bp, Homo sapien
gaatttataaattatgacatatgca

SEQ ID NO: 4175281 - DNA, 25 bp, Homo sapien
tctggacaccagtaaatcatctgaa

SEQ ID NO: 4175282 - DNA, 25 bp, Homo sapien
gaatattctgctctctggacaccag

SEQ ID NO: 4175283 - DNA, 25 bp, Homo sapien
gggtcttcctctacaatttcacatg

SEQ ID NO: 4175284 - DNA, 25 bp, Homo sapien
caacagtgttagtgctcccagaaag

SEQ ID NO: 4175285 - DNA, 25 bp, Homo sapien
catcatactgaagtcgtacctctaa

SEQ ID NO: 4175286 - DNA, 25 bp, Homo sapien
tcactagcaacagtgttagtgctcc

SEQ ID NO: 4175287 - DNA, 25 bp, Homo sapien
acggaggacttgtttctggttcagg

SEQ ID NO: 4175288 - DNA, 25 bp, Homo sapien
ggcattcgcactggccgtgtcttca

SEQ ID NO: 4175289 - DNA, 25 bp, Homo sapien
gcttgatatcctggaggcattcgca

SEQ ID NO: 4175290 - DNA, 25 bp, Homo sapien
gcttacagcaagactagtaatctgt

SEQ ID NO: 4175291 - DNA, 25 bp, Homo sapien
gttgtggaggttcaccatctaccca

SEQ ID NO: 4175292 - DNA, 25 bp, Homo sapien
caaagacaaagtctctaacatttca

SEQ ID NO: 4175293 - DNA, 25 bp, Homo sapien
agacaaagtctctaacatttcacca

SEQ ID NO: 4175294 - DNA, 25 bp, Homo sapien
catagagcatatttgctaaaatgta

SEQ ID NO: 4175295 - DNA, 25 bp, Homo sapien
taccaatttgtaagatattttgtta

SEQ ID NO: 4175296 - DNA, 25 bp, Homo sapien
gatctatataggtcaatggtcccca

SEQ ID NO: 4175297 - DNA, 25 bp, Homo sapien
tccccatgcttaacagtactgtctt

SEQ ID NO: 4175298 - DNA, 25 bp, Homo sapien
ggttgtcgctggtataagtcacttg

SEQ ID NO: 4175299 - DNA, 25 bp, Homo sapien
ttttcgaggagaccgtggttgtcgc

SEQ ID NO: 4175300 - DNA, 25 bp, Homo sapien
ctttggcttgtaactaatatgtata

SEQ ID NO: 4175301 - DNA, 25 bp, Homo sapien
cagtctttaatacttcattgttata

SEQ ID NO: 4175302 - DNA, 25 bp, Homo sapien
ctgtgtcatcttgtacactaaacac

SEQ ID NO: 4175303 - DNA, 25 bp, Homo sapien
gttctcactgtgtcatcttgtacac

SEQ ID NO: 4175304 - DNA, 25 bp, Homo sapien
gatccgtttcgttaaatcaggataa

SEQ ID NO: 4175305 - DNA, 25 bp, Homo sapien
ataaaagttagacaggccacgcatg

SEQ ID NO: 4175306 - DNA, 25 bp, Homo sapien
tgataggaagtacggatccgtttcg

SEQ ID NO: 4175307 - DNA, 25 bp, Homo sapien
tctgataggaagtacggatccgttt

SEQ ID NO: 4175308 - DNA, 25 bp, Homo sapien
cagctgtttggagcctaacctatgg

SEQ ID NO: 4175309 - DNA, 25 bp, Homo sapien
cgagtaattttagtgtcagataggc

SEQ ID NO: 4175310 - DNA, 25 bp, Homo sapien
taacctatggaataaggtgaccagt

SEQ ID NO: 4175311 - DNA, 25 bp, Homo sapien
cagataggcataagtttgggtccca

SEQ ID NO: 4175312 - DNA, 25 bp, Homo sapien
aatggcaataacatggaatcagtct

SEQ ID NO: 4175313 - DNA, 25 bp, Homo sapien
gtggtttaccataaaaacacatgca

SEQ ID NO: 4175314 - DNA, 25 bp, Homo sapien
ctattatgtatatacccgaagaaat

SEQ ID NO: 4175315 - DNA, 25 bp, Homo sapien
gaaatataacttgtggtttaccata

SEQ ID NO: 4175316 - DNA, 25 bp, Homo sapien
tatttactcagccaaaccatctttt

SEQ ID NO: 4175317 - DNA, 25 bp, Homo sapien
ctatatattcttttggcggttggga

SEQ ID NO: 4175318 - DNA, 25 bp, Homo sapien
ccaacatatttactcagccaaacca

SEQ ID NO: 4175319 - DNA, 25 bp, Homo sapien
tggcggttgggagcagagtctcact

SEQ ID NO: 4175320 - DNA, 25 bp, Homo sapien
tttggaaccaaaaggtgccttgtga

SEQ ID NO: 4175321 - DNA, 25 bp, Homo sapien
caataagcttgtggtaggtccaaaa

SEQ ID NO: 4175322 - DNA, 25 bp, Homo sapien
tctttgttagaaagtctcacagact

SEQ ID NO: 4175323 - DNA, 25 bp, Homo sapien
gacaacctagcccaactcttgtgtt

SEQ ID NO: 4175324 - DNA, 25 bp, Homo sapien
ctgattgacatgcaagagtatttaa

SEQ ID NO: 4175325 - DNA, 25 bp, Homo sapien
acatggatggtacaaagatataaaa

SEQ ID NO: 4175326 - DNA, 25 bp, Homo sapien
agtaactgattgacatgcaagagta

SEQ ID NO: 4175327 - DNA, 25 bp, Homo sapien
gagtatttaaacatggatggtacaa

SEQ ID NO: 4175328 - DNA, 25 bp, Homo sapien
cgctcaagttctaggggaactggac

SEQ ID NO: 4175329 - DNA, 25 bp, Homo sapien
gacttgcagcgctcaagttctaggg

SEQ ID NO: 4175330 - DNA, 25 bp, Homo sapien
aggagacttgcagcgctcaagttct

SEQ ID NO: 4175331 - DNA, 25 bp, Homo sapien
gtaggagacttgcagcgctcaagtt

SEQ ID NO: 4175332 - DNA, 25 bp, Homo sapien
aagtctgcaaaataccactcatgtt

SEQ ID NO: 4175333 - DNA, 25 bp, Homo sapien
caagtgatatacttgattcctctgt

SEQ ID NO: 4175334 - DNA, 25 bp, Homo sapien
ctggcaagtgatatacttgattcct

SEQ ID NO: 4175335 - DNA, 25 bp, Homo sapien
tataaaagcctagtgctgactcagg

SEQ ID NO: 4175336 - DNA, 25 bp, Homo sapien
ataaaagcctagtgctgactcaggg

SEQ ID NO: 4175337 - DNA, 25 bp, Homo sapien
tccagaatggtcaaagggaccaagc

SEQ ID NO: 4175338 - DNA, 25 bp, Homo sapien
tcctgaatcaaagtctgcatatggc

SEQ ID NO: 4175339 - DNA, 25 bp, Homo sapien
gaccaagctgagtctcttcaggcca

SEQ ID NO: 4175340 - DNA, 25 bp, Homo sapien
gaagataccacctgtatggtctgga

SEQ ID NO: 4175341 - DNA, 25 bp, Homo sapien
cacatgtgggtgcaagaagcagccc

SEQ ID NO: 4175342 - DNA, 25 bp, Homo sapien
gaaaggtaccctactgtctcaagca

SEQ ID NO: 4175343 - DNA, 25 bp, Homo sapien
catacttggcaaggcaggtttcaca

SEQ ID NO: 4175344 - DNA, 25 bp, Homo sapien
tgatgtctcaagtgttacccaggaa

SEQ ID NO: 4175345 - DNA, 25 bp, Homo sapien
aaagttgtgactttaatgattacag

SEQ ID NO: 4175346 - DNA, 25 bp, Homo sapien
tagctaaagtatgtgggtagatgca

SEQ ID NO: 4175347 - DNA, 25 bp, Homo sapien
tactgggttgaaatgttcaggcttc

SEQ ID NO: 4175348 - DNA, 25 bp, Homo sapien
ctctgggcgctttcagaggtgaaga

SEQ ID NO: 4175349 - DNA, 25 bp, Homo sapien
cctagtatgatcttttgggggtact

SEQ ID NO: 4175350 - DNA, 25 bp, Homo sapien
ggaagacctagtatgatcttttggg

SEQ ID NO: 4175351 - DNA, 25 bp, Homo sapien
tgtggaagacctagtatgatctttt

SEQ ID NO: 4175352 - DNA, 25 bp, Homo sapien
gacctagtatgatcttttgggggta

SEQ ID NO: 4175353 - DNA, 25 bp, Homo sapien
tttgcaatggatctcccaggagttc

SEQ ID NO: 4175354 - DNA, 25 bp, Homo sapien
ctttgactttaaatagcttgatgac

SEQ ID NO: 4175355 - DNA, 25 bp, Homo sapien
tttggtcatgggattatgtaatccc

SEQ ID NO: 4175356 - DNA, 25 bp, Homo sapien
ttttaagtttggtcatgggattatg

SEQ ID NO: 4175357 - DNA, 25 bp, Homo sapien
ggccaagggcaatttgggtatgatc

SEQ ID NO: 4175358 - DNA, 25 bp, Homo sapien
aggccaagggcaatttgggtatgat

SEQ ID NO: 4175359 - DNA, 25 bp, Homo sapien
aaaactgttgcagagacaaaattct

SEQ ID NO: 4175360 - DNA, 25 bp, Homo sapien
acaaaagtagttgcatgatcaattc

SEQ ID NO: 4175361 - DNA, 25 bp, Homo sapien
cctctgcctcctgggttcaagtgat

SEQ ID NO: 4175362 - DNA, 25 bp, Homo sapien
tgcagtggtgtaatgtcagctcacc

SEQ ID NO: 4175363 - DNA, 25 bp, Homo sapien
gtggtgtaatgtcagctcaccgcaa

SEQ ID NO: 4175364 - DNA, 25 bp, Homo sapien
gtgattctcttgcctcagcctccca

SEQ ID NO: 4175365 - DNA, 25 bp, Homo sapien
tcttggatatattaagcaacgtcat

SEQ ID NO: 4175366 - DNA, 25 bp, Homo sapien
gagaagttggacttgtgcagtgtcc

SEQ ID NO: 4175367 - DNA, 25 bp, Homo sapien
tgctgactgggcctttcgaaatggt

SEQ ID NO: 4175368 - DNA, 25 bp, Homo sapien
tgaaacatcggcactagaaagacgt

SEQ ID NO: 4175369 - DNA, 25 bp, Homo sapien
gaaagacgttttccagaactgcaac

SEQ ID NO: 4175370 - DNA, 25 bp, Homo sapien
gatgattaacaccattcccagactg

SEQ ID NO: 4175371 - DNA, 25 bp, Homo sapien
ggttccaacgaacagacaaggagag

SEQ ID NO: 4175372 - DNA, 25 bp, Homo sapien
gagtccatgaagtatagtgctgtaa

SEQ ID NO: 4175373 - DNA, 25 bp, Homo sapien
ggtagagtcatttttccgtgcaaag

SEQ ID NO: 4175374 - DNA, 25 bp, Homo sapien
catacaggagaatgttagcacagct

SEQ ID NO: 4175375 - DNA, 25 bp, Homo sapien
tagcacagctcctttcaatgagagg

SEQ ID NO: 4175376 - DNA, 25 bp, Homo sapien
tatggcggttgcattaatccaccca

SEQ ID NO: 4175377 - DNA, 25 bp, Homo sapien
tatgtccgttagcacaaaagcatgc

SEQ ID NO: 4175378 - DNA, 25 bp, Homo sapien
tattttttaggattgtaccttgctg

SEQ ID NO: 4175379 - DNA, 25 bp, Homo sapien
tcttgataacatctgcacataacac

SEQ ID NO: 4175380 - DNA, 25 bp, Homo sapien
gccaagcatttttagcagaaaagaa

SEQ ID NO: 4175381 - DNA, 25 bp, Homo sapien
taatctcagtttgcttcttgataac

SEQ ID NO: 4175382 - DNA, 25 bp, Homo sapien
ggctgtatgttaaccgctgaatttc

SEQ ID NO: 4175383 - DNA, 25 bp, Homo sapien
caacattgggcgaagactaggtagg

SEQ ID NO: 4175384 - DNA, 25 bp, Homo sapien
gacgaggtataatgcctgtccttca

SEQ ID NO: 4175385 - DNA, 25 bp, Homo sapien
gaatttcagtaggagagacgaggta

SEQ ID NO: 4175386 - DNA, 25 bp, Homo sapien
gacagctttggtggtatgtggaagg

SEQ ID NO: 4175387 - DNA, 25 bp, Homo sapien
ccttccctgaaccaagcatagactg

SEQ ID NO: 4175388 - DNA, 25 bp, Homo sapien
ctgaaccaagcatagactgccctat

SEQ ID NO: 4175389 - DNA, 25 bp, Homo sapien
ataggacagctttggtggtatgtgg

SEQ ID NO: 4175390 - DNA, 25 bp, Homo sapien
gggagtaaacaaatctcctagcatg

SEQ ID NO: 4175391 - DNA, 25 bp, Homo sapien
gagtaaacaaatctcctagcatgtc

SEQ ID NO: 4175392 - DNA, 25 bp, Homo sapien
ctatgggagtaaacaaatctcctag

SEQ ID NO: 4175393 - DNA, 25 bp, Homo sapien
tatgggagtaaacaaatctcctagc

SEQ ID NO: 4175394 - DNA, 25 bp, Homo sapien
aacagtcccttgagaaagcctctgt

SEQ ID NO: 4175395 - DNA, 25 bp, Homo sapien
aatgtttgtccgcttccaccaaaca

SEQ ID NO: 4175396 - DNA, 25 bp, Homo sapien
ttgtccgcttccaccaaacagtccc

SEQ ID NO: 4175397 - DNA, 25 bp, Homo sapien
gtttgtccgcttccaccaaacagtc

SEQ ID NO: 4175398 - DNA, 25 bp, Homo sapien
caatttcctaatatgaagtgaccac

SEQ ID NO: 4175399 - DNA, 25 bp, Homo sapien
cacagaaacgtcttctattttgcaa

SEQ ID NO: 4175400 - DNA, 25 bp, Homo sapien
ttgagatcacatattacattaagtt

SEQ ID NO: 4175401 - DNA, 25 bp, Homo sapien
tacgtagtctagaatttgagatcac

SEQ ID NO: 4175402 - DNA, 25 bp, Homo sapien
ccaggaatgtgttgcgcaaggctgc

SEQ ID NO: 4175403 - DNA, 25 bp, Homo sapien
cccttctatactacctggtccagga

SEQ ID NO: 4175404 - DNA, 25 bp, Homo sapien
tgcaatccgtgcacgggtcagctct

SEQ ID NO: 4175405 - DNA, 25 bp, Homo sapien
gcactggtcatcatgcctgcagttt

SEQ ID NO: 4175406 - DNA, 25 bp, Homo sapien
gtttaaagttactcctgtatgaaga

SEQ ID NO: 4175407 - DNA, 25 bp, Homo sapien
cctgtatgaagatgtctgtatttac

SEQ ID NO: 4175408 - DNA, 25 bp, Homo sapien
tttaaagttactcctgtatgaagat

SEQ ID NO: 4175409 - DNA, 25 bp, Homo sapien
tcctgtatgaagatgtctgtattta

SEQ ID NO: 4175410 - DNA, 25 bp, Homo sapien
ttggtaccatttcttatccttgtat

SEQ ID NO: 4175411 - DNA, 25 bp, Homo sapien
gaattggtaccatttcttatccttg

SEQ ID NO: 4175412 - DNA, 25 bp, Homo sapien
tcttatccttgtatttcagcattaa

SEQ ID NO: 4175413 - DNA, 25 bp, Homo sapien
tcagaattggtaccatttcttatcc

SEQ ID NO: 4175414 - DNA, 25 bp, Homo sapien
attttcaaatcaagaggactccccg

SEQ ID NO: 4175415 - DNA, 25 bp, Homo sapien
taaatccttatcgaatgacatgcca

SEQ ID NO: 4175416 - DNA, 25 bp, Homo sapien
ttgggattttaaccagggctccagc

SEQ ID NO: 4175417 - DNA, 25 bp, Homo sapien
tccgtttcagttgggtatggcaaat

SEQ ID NO: 4175418 - DNA, 25 bp, Homo sapien
tttcgattgcagaccctactgggtt

SEQ ID NO: 4175419 - DNA, 25 bp, Homo sapien
gaaaatgctttgaggtgacccaacc

SEQ ID NO: 4175420 - DNA, 25 bp, Homo sapien
caggctgcaagagcacctttcgatt

SEQ ID NO: 4175421 - DNA, 25 bp, Homo sapien
cctatagagtacaagccaggctgaa

SEQ ID NO: 4175422 - DNA, 25 bp, Homo sapien
ttccctggaatggtgcatactagag

SEQ ID NO: 4175423 - DNA, 25 bp, Homo sapien
taagagttgatggagcactgcctgg

SEQ ID NO: 4175424 - DNA, 25 bp, Homo sapien
ccttggaggctttcgcaaatattgg

SEQ ID NO: 4175425 - DNA, 25 bp, Homo sapien
tggacattagaaccgccttggaggc

SEQ ID NO: 4175426 - DNA, 25 bp, Homo sapien
aaggtgtaagcaccctttcagggca

SEQ ID NO: 4175427 - DNA, 25 bp, Homo sapien
tactgcctttgataggctggactct

SEQ ID NO: 4175428 - DNA, 25 bp, Homo sapien
tgcagtcaagaagggtgggccaaca

SEQ ID NO: 4175429 - DNA, 25 bp, Homo sapien
cagagggaaagcagtatgaaaggca

SEQ ID NO: 4175430 - DNA, 25 bp, Homo sapien
tagtcacaattgctgagtgcaacag

SEQ ID NO: 4175431 - DNA, 25 bp, Homo sapien
tgctgagtgcaacagaaaaatagta

SEQ ID NO: 4175432 - DNA, 25 bp, Homo sapien
tctacagactacaagaattttgtta

SEQ ID NO: 4175433 - DNA, 25 bp, Homo sapien
cagactacaagaattttgttaagta

SEQ ID NO: 4175434 - DNA, 25 bp, Homo sapien
agagcacactctccagagaactgtt

SEQ ID NO: 4175435 - DNA, 25 bp, Homo sapien
ctggaataagcccatagtagcttaa

SEQ ID NO: 4175436 - DNA, 25 bp, Homo sapien
ttatgaaagccagaggcgcaggaga

SEQ ID NO: 4175437 - DNA, 25 bp, Homo sapien
cactctccagagaactgttggaggt

SEQ ID NO: 4175438 - DNA, 25 bp, Homo sapien
atacctgatttgtcctaagctagct

SEQ ID NO: 4175439 - DNA, 25 bp, Homo sapien
aatatccaggcactagttgtgctca

SEQ ID NO: 4175440 - DNA, 25 bp, Homo sapien
gcttgtcctaagctagcatgtcctt

SEQ ID NO: 4175441 - DNA, 25 bp, Homo sapien
agctagctgctgtttccttttgaca

SEQ ID NO: 4175442 - DNA, 25 bp, Homo sapien
ctatgtttctcagaagctgaagtgc

SEQ ID NO: 4175443 - DNA, 25 bp, Homo sapien
gtactatgtttctcagaagctgaag

SEQ ID NO: 4175444 - DNA, 25 bp, Homo sapien
tatgtttctcagaagctgaagtgct

SEQ ID NO: 4175445 - DNA, 25 bp, Homo sapien
ctgtactatgtttctcagaagctga

SEQ ID NO: 4175446 - DNA, 25 bp, Homo sapien
tttccttaggtagctcagattgtca

SEQ ID NO: 4175447 - DNA, 25 bp, Homo sapien
ttgactgggcagtttgttaactaca

SEQ ID NO: 4175448 - DNA, 25 bp, Homo sapien
tgaaagtgaaaataggcgccagctg

SEQ ID NO: 4175449 - DNA, 25 bp, Homo sapien
tagcattttaagcaccattgggtga

SEQ ID NO: 4175450 - DNA, 25 bp, Homo sapien
cagatacaccagtgagacatagatt

SEQ ID NO: 4175451 - DNA, 25 bp, Homo sapien
gatacaccagtgagacatagatttg

SEQ ID NO: 4175452 - DNA, 25 bp, Homo sapien
tcagatacaccagtgagacatagat

SEQ ID NO: 4175453 - DNA, 25 bp, Homo sapien
tttcagatacaccagtgagacatag

SEQ ID NO: 4175454 - DNA, 25 bp, Homo sapien
cttggccttctttcctttcggcatc

SEQ ID NO: 4175455 - DNA, 25 bp, Homo sapien
ccttggccttctttcctttcggcat

SEQ ID NO: 4175456 - DNA, 25 bp, Homo sapien
ttagcctcctgcttcttcacgacag

SEQ ID NO: 4175457 - DNA, 25 bp, Homo sapien
cttcttcacgacagcaggggccgga

SEQ ID NO: 4175458 - DNA, 25 bp, Homo sapien
tcttcacgacagcaggggccggagc

SEQ ID NO: 4175459 - DNA, 25 bp, Homo sapien
tgcttcttcacgacagcaggggccg

SEQ ID NO: 4175460 - DNA, 25 bp, Homo sapien
taggccttttcacaaacgggattca

SEQ ID NO: 4175461 - DNA, 25 bp, Homo sapien
ccagcttgatgggatccgcgttgtg

SEQ ID NO: 4175462 - DNA, 25 bp, Homo sapien
cagccagcttgatgggatccgcgtt

SEQ ID NO: 4175463 - DNA, 25 bp, Homo sapien
cttgatgggatccgcgttgtgtgca

SEQ ID NO: 4175464 - DNA, 25 bp, Homo sapien
cagcttgatgggatccgcgttgtgt

SEQ ID NO: 4175465 - DNA, 25 bp, Homo sapien
gttgtaattggtcctgataacttcc

SEQ ID NO: 4175466 - DNA, 25 bp, Homo sapien
tcgttgtaattggtcctgataactt

SEQ ID NO: 4175467 - DNA, 25 bp, Homo sapien
ctcatcctatctgtcgttgtaattg

SEQ ID NO: 4175468 - DNA, 25 bp, Homo sapien
tgtaattggtcctgataacttccac

SEQ ID NO: 4175469 - DNA, 25 bp, Homo sapien
aggacgttgccgccccagtgacggt

SEQ ID NO: 4175470 - DNA, 25 bp, Homo sapien
gacgttgccgccccagtgacggtgg

SEQ ID NO: 4175471 - DNA, 25 bp, Homo sapien
tcgagcttggtgatacgagccacag

SEQ ID NO: 4175472 - DNA, 25 bp, Homo sapien
cgttgccgccccagtgacggtgggt

SEQ ID NO: 4175473 - DNA, 25 bp, Homo sapien
tatatacagaaaactcaacagtgta

SEQ ID NO: 4175474 - DNA, 25 bp, Homo sapien
tatttttatatacagaaaactcaac

SEQ ID NO: 4175475 - DNA, 25 bp, Homo sapien
atacagaaaactcaacagtgtacat

SEQ ID NO: 4175476 - DNA, 25 bp, Homo sapien
tttatatacagaaaactcaacagtg

SEQ ID NO: 4175477 - DNA, 25 bp, Homo sapien
caacttcaatgaaaagggtggcaga

SEQ ID NO: 4175478 - DNA, 25 bp, Homo sapien
ggaaaagtagtagccagaactgaga

SEQ ID NO: 4175479 - DNA, 25 bp, Homo sapien
tcttggcccgttgtgtgaaaggaaa

SEQ ID NO: 4175480 - DNA, 25 bp, Homo sapien
cctatgtttgaggattggactacta

SEQ ID NO: 4175481 - DNA, 25 bp, Homo sapien
cgtggcgccgggctgctggtctttg

SEQ ID NO: 4175482 - DNA, 25 bp, Homo sapien
aaaaacaagtactgagtataataca

SEQ ID NO: 4175483 - DNA, 25 bp, Homo sapien
ttcgggcgtggcgccgggctgctgg

SEQ ID NO: 4175484 - DNA, 25 bp, Homo sapien
gggcgtggcgccgggctgctggtct

SEQ ID NO: 4175485 - DNA, 25 bp, Homo sapien
ctgtcacgaatccccttagagtaac

SEQ ID NO: 4175486 - DNA, 25 bp, Homo sapien
tctgttcctcatggtttctgaaatc

SEQ ID NO: 4175487 - DNA, 25 bp, Homo sapien
cctcatggtttctgaaatctgagat

SEQ ID NO: 4175488 - DNA, 25 bp, Homo sapien
gttcctcatggtttctgaaatctga

SEQ ID NO: 4175489 - DNA, 25 bp, Homo sapien
tcatggtttctgaaatctgagatgg

SEQ ID NO: 4175490 - DNA, 25 bp, Homo sapien
tgtggtggtatcaccttcatgttgg

SEQ ID NO: 4175491 - DNA, 25 bp, Homo sapien
tcaccttcatgttggaataattcct

SEQ ID NO: 4175492 - DNA, 25 bp, Homo sapien
tgggactagctggatcctgtggtgg

SEQ ID NO: 4175493 - DNA, 25 bp, Homo sapien
ggtatcaccttcatgttggaataat

SEQ ID NO: 4175494 - DNA, 25 bp, Homo sapien
tccggtaggtcgagtctcaaagcta

SEQ ID NO: 4175495 - DNA, 25 bp, Homo sapien
cggtaggtcgagtctcaaagctagt

SEQ ID NO: 4175496 - DNA, 25 bp, Homo sapien
ctgttgactccggtaggtcgagtct

SEQ ID NO: 4175497 - DNA, 25 bp, Homo sapien
tgactccggtaggtcgagtctcaaa

SEQ ID NO: 4175498 - DNA, 25 bp, Homo sapien
ttggaggaggcattggaggattctc

SEQ ID NO: 4175499 - DNA, 25 bp, Homo sapien
gaagagggggagattgtggtctgtt

SEQ ID NO: 4175500 - DNA, 25 bp, Homo sapien
tggtctgttattggaggaggcattg

SEQ ID NO: 4175501 - DNA, 25 bp, Homo sapien
gagattgtggtctgttattggagga

SEQ ID NO: 4175502 - DNA, 25 bp, Homo sapien
aagcataaggactgggggatgttct

SEQ ID NO: 4175503 - DNA, 25 bp, Homo sapien
tggtagaactctcagtgaaggtaga

SEQ ID NO: 4175504 - DNA, 25 bp, Homo sapien
tttggaagtcactggtagaactctc

SEQ ID NO: 4175505 - DNA, 25 bp, Homo sapien
gatggaaggatctggtttcgttgct

SEQ ID NO: 4175506 - DNA, 25 bp, Homo sapien
tctggaattccaggctatctgttag

SEQ ID NO: 4175507 - DNA, 25 bp, Homo sapien
tattgggccaggtttgtgcaggaga

SEQ ID NO: 4175508 - DNA, 25 bp, Homo sapien
tgttagactgtaggcttcaaaggct

SEQ ID NO: 4175509 - DNA, 25 bp, Homo sapien
ggcttcaaaggcttggcttgtcata

SEQ ID NO: 4175510 - DNA, 25 bp, Homo sapien
aacaagcttcgagggtagcactcac

SEQ ID NO: 4175511 - DNA, 25 bp, Homo sapien
gcactcacacatccacgtgaatgcc

SEQ ID NO: 4175512 - DNA, 25 bp, Homo sapien
actcacacatccacgtgaatgccca

SEQ ID NO: 4175513 - DNA, 25 bp, Homo sapien
tgtgccaatgttgaaacaagcttcg

SEQ ID NO: 4175514 - DNA, 25 bp, Homo sapien
tctctactggagtggcatttagcag

SEQ ID NO: 4175515 - DNA, 25 bp, Homo sapien
tcagctgcagtagaggacagcgttc

SEQ ID NO: 4175516 - DNA, 25 bp, Homo sapien
gaacccttgattgcaagtaagcgga

SEQ ID NO: 4175517 - DNA, 25 bp, Homo sapien
cagaaatagtccaagtgttgcgaag

SEQ ID NO: 4175518 - DNA, 25 bp, Homo sapien
ccatattcggagttgaggcacggaa

SEQ ID NO: 4175519 - DNA, 25 bp, Homo sapien
tgttgggttccacaggaatgtggca

SEQ ID NO: 4175520 - DNA, 25 bp, Homo sapien
gcaggtggcagcttattaccaggca

SEQ ID NO: 4175521 - DNA, 25 bp, Homo sapien
tggcagtggcggttgaagcatccct

SEQ ID NO: 4175522 - DNA, 25 bp, Homo sapien
gaagaggaccttctgatcctgcagg

SEQ ID NO: 4175523 - DNA, 25 bp, Homo sapien
tggccagcggttccactccatggag

SEQ ID NO: 4175524 - DNA, 25 bp, Homo sapien
catctccccattagttgctgacaga

SEQ ID NO: 4175525 - DNA, 25 bp, Homo sapien
gacagaccatgtggtaccaaaccga

SEQ ID NO: 4175526 - DNA, 25 bp, Homo sapien
catgttatagtcctttgcatccaca

SEQ ID NO: 4175527 - DNA, 25 bp, Homo sapien
ctaccatgttatggccactggaaat

SEQ ID NO: 4175528 - DNA, 25 bp, Homo sapien
ggtttccatggctgtacgaacgtcc

SEQ ID NO: 4175529 - DNA, 25 bp, Homo sapien
cccattgtgcactagatacatgtta

SEQ ID NO: 4175530 - DNA, 25 bp, Homo sapien
tccttgggtgtacaagcaggcatct

SEQ ID NO: 4175531 - DNA, 25 bp, Homo sapien
gaacaaatgtacatcccaagtaggc

SEQ ID NO: 4175532 - DNA, 25 bp, Homo sapien
gcaggcatctgaccaaagtgtatca

SEQ ID NO: 4175533 - DNA, 25 bp, Homo sapien
gcaacctccggcttaatggcaaagg

SEQ ID NO: 4175534 - DNA, 25 bp, Homo sapien
gacttcaggtgctcagacatggagg

SEQ ID NO: 4175535 - DNA, 25 bp, Homo sapien
tgctagtcaaaagaatcgggtcagt

SEQ ID NO: 4175536 - DNA, 25 bp, Homo sapien
ttttgtgctctacaatgttgaaagg

SEQ ID NO: 4175537 - DNA, 25 bp, Homo sapien
ggtgacttcattaaactcccagctc

SEQ ID NO: 4175538 - DNA, 25 bp, Homo sapien
cctcgtggtctgattctaaaggtgg

SEQ ID NO: 4175539 - DNA, 25 bp, Homo sapien
ttaggagacgtatcttcctcgtggt

SEQ ID NO: 4175540 - DNA, 25 bp, Homo sapien
taggagacgtatcttcctcgtggtc

SEQ ID NO: 4175541 - DNA, 25 bp, Homo sapien
gattctaaaggtggagactaagctc

SEQ ID NO: 4175542 - DNA, 25 bp, Homo sapien
gacttgaccgtcaaaacagacccag

SEQ ID NO: 4175543 - DNA, 25 bp, Homo sapien
caccccgataagcaaataggcagtt

SEQ ID NO: 4175544 - DNA, 25 bp, Homo sapien
tccaagaagggtgcatcgagtggca

SEQ ID NO: 4175545 - DNA, 25 bp, Homo sapien
ggcagtttacagaagggagtcctca

SEQ ID NO: 4175546 - DNA, 25 bp, Homo sapien
aggctttcctgctgtatgttgccaa

SEQ ID NO: 4175547 - DNA, 25 bp, Homo sapien
gtgtctcctttggactcccgattta

SEQ ID NO: 4175548 - DNA, 25 bp, Homo sapien
aatgttctccataaatatggtgtct

SEQ ID NO: 4175549 - DNA, 25 bp, Homo sapien
aagattctagcaacagactctgtga

SEQ ID NO: 4175550 - DNA, 25 bp, Homo sapien
gatgatactcaccaagggctctgcc

SEQ ID NO: 4175551 - DNA, 25 bp, Homo sapien
tgaaaggctttggtaccgctgccct

SEQ ID NO: 4175552 - DNA, 25 bp, Homo sapien
tctaggagctggtgactggcgccat

SEQ ID NO: 4175553 - DNA, 25 bp, Homo sapien
gctaggactgctgggaaaatgacac

SEQ ID NO: 4175554 - DNA, 25 bp, Homo sapien
gctgcaaatgtctaaccagatgagg

SEQ ID NO: 4175555 - DNA, 25 bp, Homo sapien
gcaactgtgatttcccatgtccaaa

SEQ ID NO: 4175556 - DNA, 25 bp, Homo sapien
catgtccaaagtggctctgcctcca

SEQ ID NO: 4175557 - DNA, 25 bp, Homo sapien
caaattatgtcaagcttctggagtg

SEQ ID NO: 4175558 - DNA, 25 bp, Homo sapien
aatttgagtccatggctgaggagaa

SEQ ID NO: 4175559 - DNA, 25 bp, Homo sapien
gcttctagtggtacccgtgggctga

SEQ ID NO: 4175560 - DNA, 25 bp, Homo sapien
tgtgtctgcagcttctagtggtacc

SEQ ID NO: 4175561 - DNA, 25 bp, Homo sapien
tgggctgaaggcgaaatttgagtcc

SEQ ID NO: 4175562 - DNA, 25 bp, Homo sapien
tggggctacagacgcacatcaccat

SEQ ID NO: 4175563 - DNA, 25 bp, Homo sapien
tccaccccccatgttcaagtgactc

SEQ ID NO: 4175564 - DNA, 25 bp, Homo sapien
caccccccatgttcaagtgactctc

SEQ ID NO: 4175565 - DNA, 25 bp, Homo sapien
gggctacagacgcacatcaccatgc

SEQ ID NO: 4175566 - DNA, 25 bp, Homo sapien
cttaaatggaaattagaatcacaga

SEQ ID NO: 4175567 - DNA, 25 bp, Homo sapien
gaatcacagagcctcgatcctaatc

SEQ ID NO: 4175568 - DNA, 25 bp, Homo sapien
tataggagtggacagagcttcgttt

SEQ ID NO: 4175569 - DNA, 25 bp, Homo sapien
taaaatctgaccaggtgtggtagtt

SEQ ID NO: 4175570 - DNA, 25 bp, Homo sapien
tggctcaactctagaggtcttaata

SEQ ID NO: 4175571 - DNA, 25 bp, Homo sapien
catgtgccctgggtttagtaagtac

SEQ ID NO: 4175572 - DNA, 25 bp, Homo sapien
gactaatctgcgttcctcatggtta

SEQ ID NO: 4175573 - DNA, 25 bp, Homo sapien
gggaaatattgcctctacttctggc

SEQ ID NO: 4175574 - DNA, 25 bp, Homo sapien
aaaagattgaaacaatggaacaggg

SEQ ID NO: 4175575 - DNA, 25 bp, Homo sapien
ggaggccgaagcacgagagtctctt

SEQ ID NO: 4175576 - DNA, 25 bp, Homo sapien
caagcaacatactgtgaaagcctgg

SEQ ID NO: 4175577 - DNA, 25 bp, Homo sapien
tggcacaagtttctacaactggatg

SEQ ID NO: 4175578 - DNA, 25 bp, Homo sapien
aggccacttcagctcccataactgg

SEQ ID NO: 4175579 - DNA, 25 bp, Homo sapien
gggtctattggattaactgcctccc

SEQ ID NO: 4175580 - DNA, 25 bp, Homo sapien
tcatagaggaagtggaccaaatact

SEQ ID NO: 4175581 - DNA, 25 bp, Homo sapien
tagaattcagggtgacttccttcag

SEQ ID NO: 4175582 - DNA, 25 bp, Homo sapien
ttatagcaccgctcattgccaacca

SEQ ID NO: 4175583 - DNA, 25 bp, Homo sapien
tgagtgaaataaggccataattcta

SEQ ID NO: 4175584 - DNA, 25 bp, Homo sapien
gaaataaggccataattctagggat

SEQ ID NO: 4175585 - DNA, 25 bp, Homo sapien
taattctagggatattatagcaccg

SEQ ID NO: 4175586 - DNA, 25 bp, Homo sapien
tgggaatgccccagcagaataagtt

SEQ ID NO: 4175587 - DNA, 25 bp, Homo sapien
gtggaaatttcagccgactgtcgct

SEQ ID NO: 4175588 - DNA, 25 bp, Homo sapien
gaataagtttggcacccttccaagc

SEQ ID NO: 4175589 - DNA, 25 bp, Homo sapien
ggaaggccgtctagaacactgggaa

SEQ ID NO: 4175590 - DNA, 25 bp, Homo sapien
ccttattgctcatgactatttcaga

SEQ ID NO: 4175591 - DNA, 25 bp, Homo sapien
gatgggaccatcagtcctcattgct

SEQ ID NO: 4175592 - DNA, 25 bp, Homo sapien
atgttttgctgtctccaaccgcatc

SEQ ID NO: 4175593 - DNA, 25 bp, Homo sapien
tgtctccaaccgcatcagggaaagc

SEQ ID NO: 4175594 - DNA, 25 bp, Homo sapien
gcagagagcttctatgtacccttca

SEQ ID NO: 4175595 - DNA, 25 bp, Homo sapien
aattcgcggaccacattcagattcc

SEQ ID NO: 4175596 - DNA, 25 bp, Homo sapien
cccagtttcttccagtggtgacatc

SEQ ID NO: 4175597 - DNA, 25 bp, Homo sapien
gaaactgccattggtacaattcgcg

SEQ ID NO: 4175598 - DNA, 25 bp, Homo sapien
agcaaatgaggatctgcggaggtcc

SEQ ID NO: 4175599 - DNA, 25 bp, Homo sapien
gaaagtatctatatcccagctaaca

SEQ ID NO: 4175600 - DNA, 25 bp, Homo sapien
tactttaggactctatcatgcccag

SEQ ID NO: 4175601 - DNA, 25 bp, Homo sapien
gcggaggtcctttaatgccctacaa

SEQ ID NO: 4175602 - DNA, 25 bp, Homo sapien
gaaaacttggacagtactgtgaccc

SEQ ID NO: 4175603 - DNA, 25 bp, Homo sapien
gatcttgagcgaagactggaacagg

SEQ ID NO: 4175604 - DNA, 25 bp, Homo sapien
gaaactggatgctttgcgcagagaa

SEQ ID NO: 4175605 - DNA, 25 bp, Homo sapien
aagtgaagcagcaagggtcctagca

SEQ ID NO: 4175606 - DNA, 25 bp, Homo sapien
gaagacgttagctacctttctggac

SEQ ID NO: 4175607 - DNA, 25 bp, Homo sapien
tctttggccagaggtaccattgaac

SEQ ID NO: 4175608 - DNA, 25 bp, Homo sapien
catgatgagaggataaagcagctac

SEQ ID NO: 4175609 - DNA, 25 bp, Homo sapien
gaacgtctcaccaagtctctggcag

SEQ ID NO: 4175610 - DNA, 25 bp, Homo sapien
gaagatacagggcaagattttccct

SEQ ID NO: 4175611 - DNA, 25 bp, Homo sapien
caaagcaggatggtgataaatccct

SEQ ID NO: 4175612 - DNA, 25 bp, Homo sapien
gagggtgagggaatagctccaatta

SEQ ID NO: 4175613 - DNA, 25 bp, Homo sapien
ttgaaaaagaacaggcgagcactga

SEQ ID NO: 4175614 - DNA, 25 bp, Homo sapien
tctggcctatgatagagaggcatca

SEQ ID NO: 4175615 - DNA, 25 bp, Homo sapien
tatcagacagtaagttggactcaaa

SEQ ID NO: 4175616 - DNA, 25 bp, Homo sapien
ccttgagaatgggtcactctttcct

SEQ ID NO: 4175617 - DNA, 25 bp, Homo sapien
tagctgggctgctttaagtcagtcc

SEQ ID NO: 4175618 - DNA, 25 bp, Homo sapien
gtctagttgtagcaatcctcctaaa

SEQ ID NO: 4175619 - DNA, 25 bp, Homo sapien
ttctaggctatgtgattcttctatg

SEQ ID NO: 4175620 - DNA, 25 bp, Homo sapien
cattggctgtgatactagttttagg

SEQ ID NO: 4175621 - DNA, 25 bp, Homo sapien
tcagatcatcctcaatcttgtagag

SEQ ID NO: 4175622 - DNA, 25 bp, Homo sapien
gctgaattacctgggactctctaaa

SEQ ID NO: 4175623 - DNA, 25 bp, Homo sapien
cacatagtggtggattaaagcttca

SEQ ID NO: 4175624 - DNA, 25 bp, Homo sapien
taaagcttcatgcatgtgggctgaa

SEQ ID NO: 4175625 - DNA, 25 bp, Homo sapien
tagttcagctggactgtaggccaca

SEQ ID NO: 4175626 - DNA, 25 bp, Homo sapien
tggtaacgtcctgccgatagtcctg

SEQ ID NO: 4175627 - DNA, 25 bp, Homo sapien
tcttattgccaagagagtgcctgaa

SEQ ID NO: 4175628 - DNA, 25 bp, Homo sapien
cagttccgtaagatgggcagccagg

SEQ ID NO: 4175629 - DNA, 25 bp, Homo sapien
tcaacaatcctaatggcagcgggtg

SEQ ID NO: 4175630 - DNA, 25 bp, Homo sapien
tatactatgctgaagatacgttagg

SEQ ID NO: 4175631 - DNA, 25 bp, Homo sapien
ggaattgggcaacagtaaatcacag

SEQ ID NO: 4175632 - DNA, 25 bp, Homo sapien
gggaaatgatcactctctaagggac

SEQ ID NO: 4175633 - DNA, 25 bp, Homo sapien
taagtttgcatttggtatagaggaa

SEQ ID NO: 4175634 - DNA, 25 bp, Homo sapien
tgaagcacatacaagcaccctggtg

SEQ ID NO: 4175635 - DNA, 25 bp, Homo sapien
tacagaggcaccaagtctgaaggag

SEQ ID NO: 4175636 - DNA, 25 bp, Homo sapien
tgctggtagactagggccatcctaa

SEQ ID NO: 4175637 - DNA, 25 bp, Homo sapien
tcttcctaagtagatccaggcctgt

SEQ ID NO: 4175638 - DNA, 25 bp, Homo sapien
cagctatgcccaaggtatagagagc

SEQ ID NO: 4175639 - DNA, 25 bp, Homo sapien
gagaccacaggatgacagctatgcc

SEQ ID NO: 4175640 - DNA, 25 bp, Homo sapien
tgaaaagtagtcaccgagatgatgg

SEQ ID NO: 4175641 - DNA, 25 bp, Homo sapien
gaaggaaggcaacatggaatccaag

SEQ ID NO: 4175642 - DNA, 25 bp, Homo sapien
ttccatttcaggactcagacgtcta

SEQ ID NO: 4175643 - DNA, 25 bp, Homo sapien
gataccacaattgagcacgtaagaa

SEQ ID NO: 4175644 - DNA, 25 bp, Homo sapien
acaggaaactgggactgaattcagt

SEQ ID NO: 4175645 - DNA, 25 bp, Homo sapien
acttagacagcttgttggcctttta

SEQ ID NO: 4175646 - DNA, 25 bp, Homo sapien
ccatggccaatagtggttcaaaaat

SEQ ID NO: 4175647 - DNA, 25 bp, Homo sapien
tattacgaatattgccactccagtt

SEQ ID NO: 4175648 - DNA, 25 bp, Homo sapien
tgaccagcatatcagcactgtacag

SEQ ID NO: 4175649 - DNA, 25 bp, Homo sapien
aggatgtgaagcaccccttgaccag

SEQ ID NO: 4175650 - DNA, 25 bp, Homo sapien
ttctgaggtgaattttctccaaaca

SEQ ID NO: 4175651 - DNA, 25 bp, Homo sapien
tctgaggtgaattttctccaaacat

SEQ ID NO: 4175652 - DNA, 25 bp, Homo sapien
cttctgaggtgaattttctccaaac

SEQ ID NO: 4175653 - DNA, 25 bp, Homo sapien
gattcggagatagcaactgcagaca

SEQ ID NO: 4175654 - DNA, 25 bp, Homo sapien
agaaagaggattcggagatagcaac

SEQ ID NO: 4175655 - DNA, 25 bp, Homo sapien
gaggattcggagatagcaactgcag

SEQ ID NO: 4175656 - DNA, 25 bp, Homo sapien
aagaggattcggagatagcaactgc

SEQ ID NO: 4175657 - DNA, 25 bp, Homo sapien
gtaccagaggaagtttcttgtggtc

SEQ ID NO: 4175658 - DNA, 25 bp, Homo sapien
tttgtaccagaggaagtttcttgtg

SEQ ID NO: 4175659 - DNA, 25 bp, Homo sapien
tgtaccagaggaagtttcttgtggt

SEQ ID NO: 4175660 - DNA, 25 bp, Homo sapien
ttgtaccagaggaagtttcttgtgg

SEQ ID NO: 4175661 - DNA, 25 bp, Homo sapien
tctttagtggaagaacgcgaagcga

SEQ ID NO: 4175662 - DNA, 25 bp, Homo sapien
cgtgggagccccaggttctttagtg

SEQ ID NO: 4175663 - DNA, 25 bp, Homo sapien
gatgaggtaacttatctgaggtggt

SEQ ID NO: 4175664 - DNA, 25 bp, Homo sapien
cgcggcgctgtagtgcggcgtggga

SEQ ID NO: 4175665 - DNA, 25 bp, Homo sapien
ttgactccgaggctcctagtcccgc

SEQ ID NO: 4175666 - DNA, 25 bp, Homo sapien
tagcaaagggcgctccgccccttga

SEQ ID NO: 4175667 - DNA, 25 bp, Homo sapien
gcttattagcaaagggcgctccgcc

SEQ ID NO: 4175668 - DNA, 25 bp, Homo sapien
tctgattggcttattagcaaagggc

SEQ ID NO: 4175669 - DNA, 25 bp, Homo sapien
cagcgctcactatctgccacctcag

SEQ ID NO: 4175670 - DNA, 25 bp, Homo sapien
gcagctgcacttgatcccgccagcc

SEQ ID NO: 4175671 - DNA, 25 bp, Homo sapien
cgccaccagcgctcactatctgcca

SEQ ID NO: 4175672 - DNA, 25 bp, Homo sapien
gccagccaagtcacccagactccac

SEQ ID NO: 4175673 - DNA, 25 bp, Homo sapien
cgacggtctaggtgtgagaatcccg

SEQ ID NO: 4175674 - DNA, 25 bp, Homo sapien
ctcccctaacttgagaacccgctcg

SEQ ID NO: 4175675 - DNA, 25 bp, Homo sapien
gaacccgctcgcgacggtctaggtg

SEQ ID NO: 4175676 - DNA, 25 bp, Homo sapien
ctaacttgagaacccgctcgcgacg

SEQ ID NO: 4175677 - DNA, 25 bp, Homo sapien
gccccgtagtctccaacagtgtaag

SEQ ID NO: 4175678 - DNA, 25 bp, Homo sapien
aaagagagaatattgccccaccagc

SEQ ID NO: 4175679 - DNA, 25 bp, Homo sapien
taagactccgagcaggttagaggat

SEQ ID NO: 4175680 - DNA, 25 bp, Homo sapien
taagaaccctcatctgccagaggtg

SEQ ID NO: 4175681 - DNA, 25 bp, Homo sapien
cttgaagtttccttcccgctctaca

SEQ ID NO: 4175682 - DNA, 25 bp, Homo sapien
ttgaagtttccttcccgctctacaa

SEQ ID NO: 4175683 - DNA, 25 bp, Homo sapien
tcttgaagtttccttcccgctctac

SEQ ID NO: 4175684 - DNA, 25 bp, Homo sapien
aaaatgagaagttataattcagtga

SEQ ID NO: 4175685 - DNA, 25 bp, Homo sapien
tccggaaaatgggactgaagagaga

SEQ ID NO: 4175686 - DNA, 25 bp, Homo sapien
gatactatttgagaaaaaggcatgg

SEQ ID NO: 4175687 - DNA, 25 bp, Homo sapien
catggaaaaaccagataaagacgca

SEQ ID NO: 4175688 - DNA, 25 bp, Homo sapien
taaagacgcatatcacacttccgga

SEQ ID NO: 4175689 - DNA, 25 bp, Homo sapien
tctacccggtaaagcacctgttgct

SEQ ID NO: 4175690 - DNA, 25 bp, Homo sapien
tcttatatcagacaggcagaattgc

SEQ ID NO: 4175691 - DNA, 25 bp, Homo sapien
tatcgttgatagaacatcccatgcc

SEQ ID NO: 4175692 - DNA, 25 bp, Homo sapien
tcacatccgggtttgcctgaagtct

SEQ ID NO: 4175693 - DNA, 25 bp, Homo sapien
aattgctgactttcgtgatccatcc

SEQ ID NO: 4175694 - DNA, 25 bp, Homo sapien
tatttaccttttcgtggacatgtcc

SEQ ID NO: 4175695 - DNA, 25 bp, Homo sapien
tccacatagtggctctagcacagtg

SEQ ID NO: 4175696 - DNA, 25 bp, Homo sapien
aagaagctggattacgggctcccgc

SEQ ID NO: 4175697 - DNA, 25 bp, Homo sapien
tgcccggtagtcctcaactttctaa

SEQ ID NO: 4175698 - DNA, 25 bp, Homo sapien
ccattcttgctgtggacaagctagt

SEQ ID NO: 4175699 - DNA, 25 bp, Homo sapien
tactggaacaccttatggtctgccc

SEQ ID NO: 4175700 - DNA, 25 bp, Homo sapien
gttctgctcatcaatctaaggatta

SEQ ID NO: 4175701 - DNA, 25 bp, Homo sapien
caaagtaatggatatttataagtgg

SEQ ID NO: 4175702 - DNA, 25 bp, Homo sapien
cacgatgacaattaaaatagctgac

SEQ ID NO: 4175703 - DNA, 25 bp, Homo sapien
cccaaagacagaaagtctaaatcca

SEQ ID NO: 4175704 - DNA, 25 bp, Homo sapien
ttgttccaaaagattaatcttcata

SEQ ID NO: 4175705 - DNA, 25 bp, Homo sapien
gtctgtcattctactaccacttgtc

SEQ ID NO: 4175706 - DNA, 25 bp, Homo sapien
cacctttggtgcctactaccacttg

SEQ ID NO: 4175707 - DNA, 25 bp, Homo sapien
gacttagttcatgaatgttggccca

SEQ ID NO: 4175708 - DNA, 25 bp, Homo sapien
tgaatatgtacaccactaaatgatg

SEQ ID NO: 4175709 - DNA, 25 bp, Homo sapien
tcagaagaagtgtcaatagaagcag

SEQ ID NO: 4175710 - DNA, 25 bp, Homo sapien
tcaatagaagcaggtttgaagtcat

SEQ ID NO: 4175711 - DNA, 25 bp, Homo sapien
ttggcagagttatggtcacctgttc

SEQ ID NO: 4175712 - DNA, 25 bp, Homo sapien
agttatggtcacctgttcaccttca

SEQ ID NO: 4175713 - DNA, 25 bp, Homo sapien
gacctgtggttatcatctaaaacca

SEQ ID NO: 4175714 - DNA, 25 bp, Homo sapien
tagacctgtggttatcatctaaaac

SEQ ID NO: 4175715 - DNA, 25 bp, Homo sapien
agagatgcatacatcaatggctatc

SEQ ID NO: 4175716 - DNA, 25 bp, Homo sapien
gagatgcatacatcaatggctatca

SEQ ID NO: 4175717 - DNA, 25 bp, Homo sapien
gtatatttccattgaattacttaat

SEQ ID NO: 4175718 - DNA, 25 bp, Homo sapien
atatttccattgaattacttaatgt

SEQ ID NO: 4175719 - DNA, 25 bp, Homo sapien
aagtatatttccattgaattactta

SEQ ID NO: 4175720 - DNA, 25 bp, Homo sapien
tatatttccattgaattacttaatg

SEQ ID NO: 4175721 - DNA, 25 bp, Homo sapien
ctcccctatcttttgtccctgctcc

SEQ ID NO: 4175722 - DNA, 25 bp, Homo sapien
cctcccctatcttttgtccctgctc

SEQ ID NO: 4175723 - DNA, 25 bp, Homo sapien
cctcaagtgatccacccatctcagt

SEQ ID NO: 4175724 - DNA, 25 bp, Homo sapien
gggactataggcatggacaaccacg

SEQ ID NO: 4175725 - DNA, 25 bp, Homo sapien
tcaagtgatccacccatctcagtct

SEQ ID NO: 4175726 - DNA, 25 bp, Homo sapien
ctataggcatggacaaccacgccca

SEQ ID NO: 4175727 - DNA, 25 bp, Homo sapien
ctttggcctataatgagtaattgag

SEQ ID NO: 4175728 - DNA, 25 bp, Homo sapien
caattcgaacacaaccaatatattt

SEQ ID NO: 4175729 - DNA, 25 bp, Homo sapien
tgtttctttggcctataatgagtaa

SEQ ID NO: 4175730 - DNA, 25 bp, Homo sapien
gagtaattgagattcaattcgaaca

SEQ ID NO: 4175731 - DNA, 25 bp, Homo sapien
caaaatgcattcttttaagtaaggt

SEQ ID NO: 4175732 - DNA, 25 bp, Homo sapien
tagccgacattctccagtatcatgg

SEQ ID NO: 4175733 - DNA, 25 bp, Homo sapien
tgctgagtttttctagccgacattc

SEQ ID NO: 4175734 - DNA, 25 bp, Homo sapien
catggttaataatcaaaatgcattc

SEQ ID NO: 4175735 - DNA, 25 bp, Homo sapien
ttctctactgaattaatgttttaaa

SEQ ID NO: 4175736 - DNA, 25 bp, Homo sapien
tcatttactcagtttctctactgaa

SEQ ID NO: 4175737 - DNA, 25 bp, Homo sapien
tttttctgattcctacattgtttca

SEQ ID NO: 4175738 - DNA, 25 bp, Homo sapien
cattgtttcatttactcagtttctc

SEQ ID NO: 4175739 - DNA, 25 bp, Homo sapien
ctctttcgatatcatctattggaga

SEQ ID NO: 4175740 - DNA, 25 bp, Homo sapien
agattgggagtcctggctgaattcc

SEQ ID NO: 4175741 - DNA, 25 bp, Homo sapien
tacgatactgaattttactgcttcc

SEQ ID NO: 4175742 - DNA, 25 bp, Homo sapien
tgctgttgttctttacgatactgaa

SEQ ID NO: 4175743 - DNA, 25 bp, Homo sapien
tggtgtctcttgagaagattctaga

SEQ ID NO: 4175744 - DNA, 25 bp, Homo sapien
tggatacttatttgtttactgcttg

SEQ ID NO: 4175745 - DNA, 25 bp, Homo sapien
tgcttagtttaattctcttcaagac

SEQ ID NO: 4175746 - DNA, 25 bp, Homo sapien
gctccttcttgaatcggtttaagtg

SEQ ID NO: 4175747 - DNA, 25 bp, Homo sapien
ggatgtcctgagacacaattccctg

SEQ ID NO: 4175748 - DNA, 25 bp, Homo sapien
tactgtgtcatggtaggatgtcctg

SEQ ID NO: 4175749 - DNA, 25 bp, Homo sapien
cctgtatcagaagtagaggatttgc

SEQ ID NO: 4175750 - DNA, 25 bp, Homo sapien
aaggccactgttgtctcgaaatcta

SEQ ID NO: 4175751 - DNA, 25 bp, Homo sapien
atgtcaatgaccagtctaatttatt

SEQ ID NO: 4175752 - DNA, 25 bp, Homo sapien
ctttgaatgtttttagcgtacttat

SEQ ID NO: 4175753 - DNA, 25 bp, Homo sapien
gtcaatgaccagtctaatttattct

SEQ ID NO: 4175754 - DNA, 25 bp, Homo sapien
tttcttcctggcattgttttatcat

SEQ ID NO: 4175755 - DNA, 25 bp, Homo sapien
caataagctgttttcgtgtgcctga

SEQ ID NO: 4175756 - DNA, 25 bp, Homo sapien
tcactatcatgttttgaggtctaga

SEQ ID NO: 4175757 - DNA, 25 bp, Homo sapien
tagctaagagtgtctgctgtcagac

SEQ ID NO: 4175758 - DNA, 25 bp, Homo sapien
catccttgatgttgtgtagtttcac

SEQ ID NO: 4175759 - DNA, 25 bp, Homo sapien
aatttgtggacatataccacctacc

SEQ ID NO: 4175760 - DNA, 25 bp, Homo sapien
accaattggaaaacctaatgataat

SEQ ID NO: 4175761 - DNA, 25 bp, Homo sapien
gacatataccacctaccaagattga

SEQ ID NO: 4175762 - DNA, 25 bp, Homo sapien
catgaacaggtcaagtacaagtaat

SEQ ID NO: 4175763 - DNA, 25 bp, Homo sapien
tagtatgatgtttgtaggagttctg

SEQ ID NO: 4175764 - DNA, 25 bp, Homo sapien
tattagttctatcgtttgctgattc

SEQ ID NO: 4175765 - DNA, 25 bp, Homo sapien
tcctgaatttaacgggaatgctcct

SEQ ID NO: 4175766 - DNA, 25 bp, Homo sapien
caatagagtgctcaacagaaataac

SEQ ID NO: 4175767 - DNA, 25 bp, Homo sapien
gataaagaaatctgcgaggtcgggc

SEQ ID NO: 4175768 - DNA, 25 bp, Homo sapien
taatccgcaatcaaaaaagctggca

SEQ ID NO: 4175769 - DNA, 25 bp, Homo sapien
gagagtcattgatcgtacaggttta

SEQ ID NO: 4175770 - DNA, 25 bp, Homo sapien
caagtctggagctaaaggtagaggc

SEQ ID NO: 4175771 - DNA, 25 bp, Homo sapien
gaggctaagtggtcagattcataat

SEQ ID NO: 4175772 - DNA, 25 bp, Homo sapien
ttggctttgactcaggtagtctggg

SEQ ID NO: 4175773 - DNA, 25 bp, Homo sapien
tacgccataatggtgtggaagaaac

SEQ ID NO: 4175774 - DNA, 25 bp, Homo sapien
gaagttgtaagtctaatgcagtctc

SEQ ID NO: 4175775 - DNA, 25 bp, Homo sapien
taccactaaacttcagcagttttag

SEQ ID NO: 4175776 - DNA, 25 bp, Homo sapien
gcagttttagtatttcctggcatct

SEQ ID NO: 4175777 - DNA, 25 bp, Homo sapien
agtgacacaattagtaactcaaata

SEQ ID NO: 4175778 - DNA, 25 bp, Homo sapien
aatatagcccccaagcgtgattctg

SEQ ID NO: 4175779 - DNA, 25 bp, Homo sapien
tcctgattcactcagctgcaaatca

SEQ ID NO: 4175780 - DNA, 25 bp, Homo sapien
cacttcctgattcactcagctgcaa

SEQ ID NO: 4175781 - DNA, 25 bp, Homo sapien
cactgtcacttcctgattcactcag

SEQ ID NO: 4175782 - DNA, 25 bp, Homo sapien
ctgattcactcagctgcaaatcatt

SEQ ID NO: 4175783 - DNA, 25 bp, Homo sapien
tatacatgctgtataaatttttatt

SEQ ID NO: 4175784 - DNA, 25 bp, Homo sapien
taatacaaaataaattatacatgct

SEQ ID NO: 4175785 - DNA, 25 bp, Homo sapien
tcagtcttaggaatttttattgtta

SEQ ID NO: 4175786 - DNA, 25 bp, Homo sapien
acaaaataaattatacatgctgtat

SEQ ID NO: 4175787 - DNA, 25 bp, Homo sapien
ttttatcatcaaaagttaagacata

SEQ ID NO: 4175788 - DNA, 25 bp, Homo sapien
ttcttttatcatcaaaagttaagac

SEQ ID NO: 4175789 - DNA, 25 bp, Homo sapien
taatttcttttatcatcaaaagtta

SEQ ID NO: 4175790 - DNA, 25 bp, Homo sapien
atttaatttcttttatcatcaaaag

SEQ ID NO: 4175791 - DNA, 25 bp, Homo sapien
cagtatggatcaaaccaaaagtgtg

SEQ ID NO: 4175792 - DNA, 25 bp, Homo sapien
gatgtactgttcagcttgccggaag

SEQ ID NO: 4175793 - DNA, 25 bp, Homo sapien
aatccactagctccctacattttgg

SEQ ID NO: 4175794 - DNA, 25 bp, Homo sapien
gtattcgatccataaaaacaggtct

SEQ ID NO: 4175795 - DNA, 25 bp, Homo sapien
tataatttttggaactgcctattca

SEQ ID NO: 4175796 - DNA, 25 bp, Homo sapien
gaatgccgagccaaaatatatgctt

SEQ ID NO: 4175797 - DNA, 25 bp, Homo sapien
ccatttttctagagtcgtgtgtccc

SEQ ID NO: 4175798 - DNA, 25 bp, Homo sapien
cgtgtgtccccttcttgtaaatttg

SEQ ID NO: 4175799 - DNA, 25 bp, Homo sapien
tattttgctaacatcagatagaagg

SEQ ID NO: 4175800 - DNA, 25 bp, Homo sapien
ccagacagaaatgagcaccaactat

SEQ ID NO: 4175801 - DNA, 25 bp, Homo sapien
agcaaggactggaaccctaggctcc

SEQ ID NO: 4175802 - DNA, 25 bp, Homo sapien
cctaggctcccaaggcatagtcttg

SEQ ID NO: 4175803 - DNA, 25 bp, Homo sapien
catggtgcccctctagttgtttgtc

SEQ ID NO: 4175804 - DNA, 25 bp, Homo sapien
caaatagggccaggataaactgtct

SEQ ID NO: 4175805 - DNA, 25 bp, Homo sapien
gagcaaaaattgtgaaccagttact

SEQ ID NO: 4175806 - DNA, 25 bp, Homo sapien
gattggtgatatacatttgggaacc

SEQ ID NO: 4175807 - DNA, 25 bp, Homo sapien
actcagtttaactctgtgggtgtca

SEQ ID NO: 4175808 - DNA, 25 bp, Homo sapien
cagctgccagcctactctgaaaaga

SEQ ID NO: 4175809 - DNA, 25 bp, Homo sapien
gctttagtaggcagttaggacagct

SEQ ID NO: 4175810 - DNA, 25 bp, Homo sapien
gcaactcagtttaactctgtgggtg

SEQ ID NO: 4175811 - DNA, 25 bp, Homo sapien
ggagggctaggtggtcgaggtggta

SEQ ID NO: 4175812 - DNA, 25 bp, Homo sapien
ctaggtggtcgaggtggtacctctt

SEQ ID NO: 4175813 - DNA, 25 bp, Homo sapien
ggtcgaggtggtacctcttcaatgg

SEQ ID NO: 4175814 - DNA, 25 bp, Homo sapien
tacctcttcaatggagacaggtgaa

SEQ ID NO: 4175815 - DNA, 25 bp, Homo sapien
tgtttagatttggtttcaggtgaat

SEQ ID NO: 4175816 - DNA, 25 bp, Homo sapien
ttgtcttcttatgtaaaggaagctt

SEQ ID NO: 4175817 - DNA, 25 bp, Homo sapien
tcttatgtaaaggaagcttctgttt

SEQ ID NO: 4175818 - DNA, 25 bp, Homo sapien
aaaggaagcttctgtttagatttgg

SEQ ID NO: 4175819 - DNA, 25 bp, Homo sapien
taggaaaagcgctcgcagaattcat

SEQ ID NO: 4175820 - DNA, 25 bp, Homo sapien
atgctcagtggatagttggagccac

SEQ ID NO: 4175821 - DNA, 25 bp, Homo sapien
tcgcagaattcattcaccacaatga

SEQ ID NO: 4175822 - DNA, 25 bp, Homo sapien
cagtggatagttggagccacagatt

SEQ ID NO: 4175823 - DNA, 25 bp, Homo sapien
ctgctgaaggcatggtatatagatg

SEQ ID NO: 4175824 - DNA, 25 bp, Homo sapien
tcattccagtgcaggaaatacagga

SEQ ID NO: 4175825 - DNA, 25 bp, Homo sapien
tatatagatgtggaggtatcttcat

SEQ ID NO: 4175826 - DNA, 25 bp, Homo sapien
ccaaccacgagtcagcaatggctgc

SEQ ID NO: 4175827 - DNA, 25 bp, Homo sapien
ggcacccaaggacttgatcacatgg

SEQ ID NO: 4175828 - DNA, 25 bp, Homo sapien
cacatacaccaaggagagatagatg

SEQ ID NO: 4175829 - DNA, 25 bp, Homo sapien
tattggtaaggcacccaaggacttg

SEQ ID NO: 4175830 - DNA, 25 bp, Homo sapien
ttgtcctcccagtattggtaaggca

SEQ ID NO: 4175831 - DNA, 25 bp, Homo sapien
caaagctattagactcaggccgatc

SEQ ID NO: 4175832 - DNA, 25 bp, Homo sapien
tcctgtccccaaagctattagactc

SEQ ID NO: 4175833 - DNA, 25 bp, Homo sapien
acagggtttgatgcctcctgtcccc

SEQ ID NO: 4175834 - DNA, 25 bp, Homo sapien
gactcaggccgatcaatgataggac

SEQ ID NO: 4175835 - DNA, 25 bp, Homo sapien
tcatacacaggatcccacttgccaa

SEQ ID NO: 4175836 - DNA, 25 bp, Homo sapien
ccaaagtcagcaagcaattatgatc

SEQ ID NO: 4175837 - DNA, 25 bp, Homo sapien
tctatggactctttgacagataaag

SEQ ID NO: 4175838 - DNA, 25 bp, Homo sapien
ccacttatctaatttgtatagttca

SEQ ID NO: 4175839 - DNA, 25 bp, Homo sapien
agaagtatctagtccgttcctctgc

SEQ ID NO: 4175840 - DNA, 25 bp, Homo sapien
ctgcattgatggacaggtagaagac

SEQ ID NO: 4175841 - DNA, 25 bp, Homo sapien
gactgagaagtatctagtccgttcc

SEQ ID NO: 4175842 - DNA, 25 bp, Homo sapien
atgtagaaatcaagctccctgcatt

SEQ ID NO: 4175843 - DNA, 25 bp, Homo sapien
catgagcagtcctggaactccaaaa

SEQ ID NO: 4175844 - DNA, 25 bp, Homo sapien
gtcttctccaaaacattgcacatct

SEQ ID NO: 4175845 - DNA, 25 bp, Homo sapien
tgagcagtcctggaactccaaaagc

SEQ ID NO: 4175846 - DNA, 25 bp, Homo sapien
cagtcctggaactccaaaagccaat

SEQ ID NO: 4175847 - DNA, 25 bp, Homo sapien
gctttacatgtgtcaggtatcaatg

SEQ ID NO: 4175848 - DNA, 25 bp, Homo sapien
acagcttgtgtaaagtgcctacatg

SEQ ID NO: 4175849 - DNA, 25 bp, Homo sapien
tgtaaagtgcctacatgatgcttta

SEQ ID NO: 4175850 - DNA, 25 bp, Homo sapien
taacagttacccaataggcctggtg

SEQ ID NO: 4175851 - DNA, 25 bp, Homo sapien
gagttgtaacatgctcctgctcgtt

SEQ ID NO: 4175852 - DNA, 25 bp, Homo sapien
caagctatgggcagcgggaataaaa

SEQ ID NO: 4175853 - DNA, 25 bp, Homo sapien
tccctgagcaggagctataacacct

SEQ ID NO: 4175854 - DNA, 25 bp, Homo sapien
tgctcgttgaactacaggagtgaac

SEQ ID NO: 4175855 - DNA, 25 bp, Homo sapien
gaaaacttgagccactatgtttcct

SEQ ID NO: 4175856 - DNA, 25 bp, Homo sapien
cactatgtttccttcagggggtggt

SEQ ID NO: 4175857 - DNA, 25 bp, Homo sapien
ttcttgaaacgattggaaatagcaa

SEQ ID NO: 4175858 - DNA, 25 bp, Homo sapien
gcccagtctagccagtgctgtcgct

SEQ ID NO: 4175859 - DNA, 25 bp, Homo sapien
tggaatgtctccagaacggttcttg

SEQ ID NO: 4175860 - DNA, 25 bp, Homo sapien
ggatatttctcagccgcccagtcta

SEQ ID NO: 4175861 - DNA, 25 bp, Homo sapien
ggtcagtgcctttacatccataatg

SEQ ID NO: 4175862 - DNA, 25 bp, Homo sapien
ggaatagtaccctggtcagtgcctt

SEQ ID NO: 4175863 - DNA, 25 bp, Homo sapien
gatataaaggaatagtaccctggtc

SEQ ID NO: 4175864 - DNA, 25 bp, Homo sapien
gcctttacatccataatgagctgct

SEQ ID NO: 4175865 - DNA, 25 bp, Homo sapien
ttcctattcatcctgatggcttgca

SEQ ID NO: 4175866 - DNA, 25 bp, Homo sapien
tcctgatggcttgcaaagtccatcg

SEQ ID NO: 4175867 - DNA, 25 bp, Homo sapien
tggcttgcaaagtccatcgtgaacc

SEQ ID NO: 4175868 - DNA, 25 bp, Homo sapien
tattcatcctgatggcttgcaaagt

SEQ ID NO: 4175869 - DNA, 25 bp, Homo sapien
catctggtccggctgaagcacaaaa

SEQ ID NO: 4175870 - DNA, 25 bp, Homo sapien
tctggtccggctgaagcacaaaaaa

SEQ ID NO: 4175871 - DNA, 25 bp, Homo sapien
tggtccggctgaagcacaaaaaacc

SEQ ID NO: 4175872 - DNA, 25 bp, Homo sapien
ctgcatctggtccggctgaagcaca

SEQ ID NO: 4175873 - DNA, 25 bp, Homo sapien
gagaccagacgataaatgacaaagt

SEQ ID NO: 4175874 - DNA, 25 bp, Homo sapien
agttaattccacacttggagaccag

SEQ ID NO: 4175875 - DNA, 25 bp, Homo sapien
tcaaacaacgggatgaagataagaa

SEQ ID NO: 4175876 - DNA, 25 bp, Homo sapien
gacaaagtcaaacaacgggatgaag

SEQ ID NO: 4175877 - DNA, 25 bp, Homo sapien
caaagggccattttcatctggtaaa

SEQ ID NO: 4175878 - DNA, 25 bp, Homo sapien
taaacttcccaacatttgctcaatg

SEQ ID NO: 4175879 - DNA, 25 bp, Homo sapien
cacagttaagtccacagtaatggct

SEQ ID NO: 4175880 - DNA, 25 bp, Homo sapien
tttggcatgaaacctagacctgccc

SEQ ID NO: 4175881 - DNA, 25 bp, Homo sapien
atccaaactctgtagcctattatta

SEQ ID NO: 4175882 - DNA, 25 bp, Homo sapien
aatccaaactctgtagcctattatt

SEQ ID NO: 4175883 - DNA, 25 bp, Homo sapien
taaactttagactctaaaggatgaa

SEQ ID NO: 4175884 - DNA, 25 bp, Homo sapien
gccaggcatgctaggatcataccaa

SEQ ID NO: 4175885 - DNA, 25 bp, Homo sapien
tatttttatctctacagctgccgca

SEQ ID NO: 4175886 - DNA, 25 bp, Homo sapien
taggatcataccaacagccattttc

SEQ ID NO: 4175887 - DNA, 25 bp, Homo sapien
gccgcaactgcaaatgccaggcatg

SEQ ID NO: 4175888 - DNA, 25 bp, Homo sapien
tctgccagattcaagacttgtagga

SEQ ID NO: 4175889 - DNA, 25 bp, Homo sapien
aaggatttgatggactctatcaaca

SEQ ID NO: 4175890 - DNA, 25 bp, Homo sapien
cagattcaagacttgtaggaaaacc

SEQ ID NO: 4175891 - DNA, 25 bp, Homo sapien
tgaaaggatttgatggactctatca

SEQ ID NO: 4175892 - DNA, 25 bp, Homo sapien
aggtggaagtgaaaatcctggcttt

SEQ ID NO: 4175893 - DNA, 25 bp, Homo sapien
cacgaatgacaagactgtaccagtt

SEQ ID NO: 4175894 - DNA, 25 bp, Homo sapien
catcatgctggagatactgttccca

SEQ ID NO: 4175895 - DNA, 25 bp, Homo sapien
cacagaatgctcagtgtagagagac

SEQ ID NO: 4175896 - DNA, 25 bp, Homo sapien
ggttgtcatcccattggttgttctg

SEQ ID NO: 4175897 - DNA, 25 bp, Homo sapien
tgtcatcccattggttgttctgctt

SEQ ID NO: 4175898 - DNA, 25 bp, Homo sapien
catcccattggttgttctgctttct

SEQ ID NO: 4175899 - DNA, 25 bp, Homo sapien
tcatcccattggttgttctgctttc

SEQ ID NO: 4175900 - DNA, 25 bp, Homo sapien
caaatgtgtgctataccatgatgcc

SEQ ID NO: 4175901 - DNA, 25 bp, Homo sapien
tgacctagaaaatgccccttctggg

SEQ ID NO: 4175902 - DNA, 25 bp, Homo sapien
cacttgaccttggtggccatagacc

SEQ ID NO: 4175903 - DNA, 25 bp, Homo sapien
tatttttctgaacctggcacctaga

SEQ ID NO: 4175904 - DNA, 25 bp, Homo sapien
ctttgcacagttctataagcagaca

SEQ ID NO: 4175905 - DNA, 25 bp, Homo sapien
cacagttctataagcagacacacca

SEQ ID NO: 4175906 - DNA, 25 bp, Homo sapien
tataagcagacacaccatagtcttc

SEQ ID NO: 4175907 - DNA, 25 bp, Homo sapien
gacacaccatagtcttcaccaacat

SEQ ID NO: 4175908 - DNA, 25 bp, Homo sapien
tggaacaggatgaatttaggttaga

SEQ ID NO: 4175909 - DNA, 25 bp, Homo sapien
ggaacaggatgaatttaggttagaa

SEQ ID NO: 4175910 - DNA, 25 bp, Homo sapien
aacaggatgaatttaggttagaata

SEQ ID NO: 4175911 - DNA, 25 bp, Homo sapien
ctggaacaggatgaatttaggttag

SEQ ID NO: 4175912 - DNA, 25 bp, Homo sapien
tgctgcaccaaagtctagaagaccc

SEQ ID NO: 4175913 - DNA, 25 bp, Homo sapien
caaacagatatgctgcaccaaagtc

SEQ ID NO: 4175914 - DNA, 25 bp, Homo sapien
cttctgttctacagtgcactgcagg

SEQ ID NO: 4175915 - DNA, 25 bp, Homo sapien
tagaagacccaaattcagagaaaag

SEQ ID NO: 4175916 - DNA, 25 bp, Homo sapien
gttggctggaatgtcttcaatcttc

SEQ ID NO: 4175917 - DNA, 25 bp, Homo sapien
tgtaaccagggcatattgtggtagc

SEQ ID NO: 4175918 - DNA, 25 bp, Homo sapien
tggtagctgccacgcaatggacatt

SEQ ID NO: 4175919 - DNA, 25 bp, Homo sapien
gctggaatgtcttcaatcttccagg

SEQ ID NO: 4175920 - DNA, 25 bp, Homo sapien
gaactgtgccacaacaagcacgatg

SEQ ID NO: 4175921 - DNA, 25 bp, Homo sapien
tcaatagccaagctgcctggagcac

SEQ ID NO: 4175922 - DNA, 25 bp, Homo sapien
gcacagatttcatgctagagggagc

SEQ ID NO: 4175923 - DNA, 25 bp, Homo sapien
ttcccaactgcaattgtcaatagcc

SEQ ID NO: 4175924 - DNA, 25 bp, Homo sapien
atatgtctattttcctggtaaagtc

SEQ ID NO: 4175925 - DNA, 25 bp, Homo sapien
tatctaacccatttcatgtcacagc

SEQ ID NO: 4175926 - DNA, 25 bp, Homo sapien
ggtaaagtctgtatatctaacccat

SEQ ID NO: 4175927 - DNA, 25 bp, Homo sapien
ttttcctggtaaagtctgtatatct

SEQ ID NO: 4175928 - DNA, 25 bp, Homo sapien
ctttacaggaacatagtagtagccc

SEQ ID NO: 4175929 - DNA, 25 bp, Homo sapien
cccctggatgtgaggaatgtgctta

SEQ ID NO: 4175930 - DNA, 25 bp, Homo sapien
tggtctctagtttgatcatgttccc

SEQ ID NO: 4175931 - DNA, 25 bp, Homo sapien
gtgcttatctgctggaccccgcata

SEQ ID NO: 4175932 - DNA, 25 bp, Homo sapien
tgtactggaaaaccagtcctggaac

SEQ ID NO: 4175933 - DNA, 25 bp, Homo sapien
ggtcaggacagaatctagggagtca

SEQ ID NO: 4175934 - DNA, 25 bp, Homo sapien
tggacgggcagacatagagtctctg

SEQ ID NO: 4175935 - DNA, 25 bp, Homo sapien
ggagatcagctctgatatgctgcta

SEQ ID NO: 4175936 - DNA, 25 bp, Homo sapien
cttgaggcccctgtgaatagcataa

SEQ ID NO: 4175937 - DNA, 25 bp, Homo sapien
tgcatacccacagagaatgatctcc

SEQ ID NO: 4175938 - DNA, 25 bp, Homo sapien
acctagagagctgacaagccaggcc

SEQ ID NO: 4175939 - DNA, 25 bp, Homo sapien
ggctggaccagatcacatcatacat

SEQ ID NO: 4175940 - DNA, 25 bp, Homo sapien
tctaaaggagtagggtcaggttcac

SEQ ID NO: 4175941 - DNA, 25 bp, Homo sapien
ttcactgaagggcatagaccagcgc

SEQ ID NO: 4175942 - DNA, 25 bp, Homo sapien
tcagcaaggttgacaagacaaggtt

SEQ ID NO: 4175943 - DNA, 25 bp, Homo sapien
aaaaactggttggtctggctgccgc

SEQ ID NO: 4175944 - DNA, 25 bp, Homo sapien
gcaggatatctcagagtctttaata

SEQ ID NO: 4175945 - DNA, 25 bp, Homo sapien
tgaggaaccattacaggaaccgaga

SEQ ID NO: 4175946 - DNA, 25 bp, Homo sapien
gacaaattatgcctggtgaggaacc

SEQ ID NO: 4175947 - DNA, 25 bp, Homo sapien
tagggaagagccatgaaagttctcc

SEQ ID NO: 4175948 - DNA, 25 bp, Homo sapien
caggtgctagttcttccagtcagac

SEQ ID NO: 4175949 - DNA, 25 bp, Homo sapien
gcattcctcaaatgtatccctgtca

SEQ ID NO: 4175950 - DNA, 25 bp, Homo sapien
ctatattgcagtttcagtcaatgac

SEQ ID NO: 4175951 - DNA, 25 bp, Homo sapien
tagctggagaaacagtctataccat

SEQ ID NO: 4175952 - DNA, 25 bp, Homo sapien
aacagtctacaccatatagctggag

SEQ ID NO: 4175953 - DNA, 25 bp, Homo sapien
taagtaaatcttccgcaactggctg

SEQ ID NO: 4175954 - DNA, 25 bp, Homo sapien
taagagatgaataagtaacttggcc

SEQ ID NO: 4175955 - DNA, 25 bp, Homo sapien
ggtttcattgcctgcttacactgag

SEQ ID NO: 4175956 - DNA, 25 bp, Homo sapien
ggctagttctatagagtccctgcag

SEQ ID NO: 4175957 - DNA, 25 bp, Homo sapien
tagtcttactatttctcatatgtga

SEQ ID NO: 4175958 - DNA, 25 bp, Homo sapien
ggtgtggatctctttatgtttaggc

SEQ ID NO: 4175959 - DNA, 25 bp, Homo sapien
tctgataagaagcaagttgttagtc

SEQ ID NO: 4175960 - DNA, 25 bp, Homo sapien
tgcatatgttggcatgccagttgtt

SEQ ID NO: 4175961 - DNA, 25 bp, Homo sapien
tatatctggatcatctatctgtccc

SEQ ID NO: 4175962 - DNA, 25 bp, Homo sapien
gaattgggccgtgataaacatatga

SEQ ID NO: 4175963 - DNA, 25 bp, Homo sapien
cgttctatccaagttgcacaaaaga

SEQ ID NO: 4175964 - DNA, 25 bp, Homo sapien
tccactcatggatgggtatttaggt

SEQ ID NO: 4175965 - DNA, 25 bp, Homo sapien
ctaaatactttctgtgtgggcacca

SEQ ID NO: 4175966 - DNA, 25 bp, Homo sapien
cagggaagcactaagtttcaatgca

SEQ ID NO: 4175967 - DNA, 25 bp, Homo sapien
caggacttgtccagtaattgcagtt

SEQ ID NO: 4175968 - DNA, 25 bp, Homo sapien
tgccttggccggtgtctcactaggt

SEQ ID NO: 4175969 - DNA, 25 bp, Homo sapien
gcatttctttagagccgtgtaagaa

SEQ ID NO: 4175970 - DNA, 25 bp, Homo sapien
tctggtggtatgcaatgatacttgc

SEQ ID NO: 4175971 - DNA, 25 bp, Homo sapien
caaaaagaactaacaaggcaagagc

SEQ ID NO: 4175972 - DNA, 25 bp, Homo sapien
tcttgtaggtgacatattctaggtc

SEQ ID NO: 4175973 - DNA, 25 bp, Homo sapien
acttatagctaccaactttccactt

SEQ ID NO: 4175974 - DNA, 25 bp, Homo sapien
ttatagctaccaactttccacttag

SEQ ID NO: 4175975 - DNA, 25 bp, Homo sapien
cttatagctaccaactttccactta

SEQ ID NO: 4175976 - DNA, 25 bp, Homo sapien
ggtgtcattatgtgtccaatgggtc

SEQ ID NO: 4175977 - DNA, 25 bp, Homo sapien
tagctggtagcactatttcctttca

SEQ ID NO: 4175978 - DNA, 25 bp, Homo sapien
tgaaaggcaggtccctcgacatttg

SEQ ID NO: 4175979 - DNA, 25 bp, Homo sapien
gctggattattcatgtggttgctct

SEQ ID NO: 4175980 - DNA, 25 bp, Homo sapien
gctaagtgaaaaatagcagtctgag

SEQ ID NO: 4175981 - DNA, 25 bp, Homo sapien
caactatatgacaggctgggtgagg

SEQ ID NO: 4175982 - DNA, 25 bp, Homo sapien
cactggttgccaagattttagggta

SEQ ID NO: 4175983 - DNA, 25 bp, Homo sapien
gcagtctgagaaagctacatcctgt

SEQ ID NO: 4175984 - DNA, 25 bp, Homo sapien
cagactggatggaactatttgcaga

SEQ ID NO: 4175985 - DNA, 25 bp, Homo sapien
gacaaaatagctgtatagatggcaa

SEQ ID NO: 4175986 - DNA, 25 bp, Homo sapien
caaactcacaataagtaaacaacca

SEQ ID NO: 4175987 - DNA, 25 bp, Homo sapien
aaaatggacaaaatagctgtataga

SEQ ID NO: 4175988 - DNA, 25 bp, Homo sapien
ttccttctaatcttgtcctaagaca

SEQ ID NO: 4175989 - DNA, 25 bp, Homo sapien
tccttctaatcttgtcctaagacat

SEQ ID NO: 4175990 - DNA, 25 bp, Homo sapien
caattgggcctctagatggtgacct

SEQ ID NO: 4175991 - DNA, 25 bp, Homo sapien
catttactgaggcaaagtctgcagg

SEQ ID NO: 4175992 - DNA, 25 bp, Homo sapien
catcatgcagcactggaagttcctg

SEQ ID NO: 4175993 - DNA, 25 bp, Homo sapien
tattgacaaacaagggcttccatgc

SEQ ID NO: 4175994 - DNA, 25 bp, Homo sapien
tcatccgtgtgtctgtgctagtccc

SEQ ID NO: 4175995 - DNA, 25 bp, Homo sapien
agtccctgttacagcagcagagaag

SEQ ID NO: 4175996 - DNA, 25 bp, Homo sapien
ggaaatgaccccactcatccgtgtg

SEQ ID NO: 4175997 - DNA, 25 bp, Homo sapien
gctgtgacctaatatctggaaatga

SEQ ID NO: 4175998 - DNA, 25 bp, Homo sapien
taaatacatagtgacggccgggtgc

SEQ ID NO: 4175999 - DNA, 25 bp, Homo sapien
cactgggtagatgaaagttacttcg

SEQ ID NO: 4176000 - DNA, 25 bp, Homo sapien
tagacctctgcagacagtgctagca

SEQ ID NO: 4176001 - DNA, 25 bp, Homo sapien
ggttcatgaccaatcttcaggcact

SEQ ID NO: 4176002 - DNA, 25 bp, Homo sapien
tgtcacatctcatgtgttcaacatg

SEQ ID NO: 4176003 - DNA, 25 bp, Homo sapien
gcttggtaaatatgctctttccatg

SEQ ID NO: 4176004 - DNA, 25 bp, Homo sapien
tcacatctcatgtgttcaacatgga

SEQ ID NO: 4176005 - DNA, 25 bp, Homo sapien
agcttggtaaatatgctctttccat

SEQ ID NO: 4176006 - DNA, 25 bp, Homo sapien
ggcagctcctgatccaagattaaag

SEQ ID NO: 4176007 - DNA, 25 bp, Homo sapien
tctaaaattcttcctaggccaggtg

SEQ ID NO: 4176008 - DNA, 25 bp, Homo sapien
taaaacaccggcttctcaattcctg

SEQ ID NO: 4176009 - DNA, 25 bp, Homo sapien
taggagcagctacccttcgttgtcc

SEQ ID NO: 4176010 - DNA, 25 bp, Homo sapien
cattggtggccagttttagagtctt

SEQ ID NO: 4176011 - DNA, 25 bp, Homo sapien
catattgtgtttatgtcaccctgta

SEQ ID NO: 4176012 - DNA, 25 bp, Homo sapien
tgtcacctcttgtttggacgattga

SEQ ID NO: 4176013 - DNA, 25 bp, Homo sapien
tcaccatccactttcaattcattgg

SEQ ID NO: 4176014 - DNA, 25 bp, Homo sapien
gccaccacacaagaggcattactcc

SEQ ID NO: 4176015 - DNA, 25 bp, Homo sapien
ctgccaccacacaagaggcattact

SEQ ID NO: 4176016 - DNA, 25 bp, Homo sapien
tgccaccacacaagaggcattactc

SEQ ID NO: 4176017 - DNA, 25 bp, Homo sapien
gaatcatagagttgcaatttttgca

SEQ ID NO: 4176018 - DNA, 25 bp, Homo sapien
gcagaatcatagagttgcaattttt

SEQ ID NO: 4176019 - DNA, 25 bp, Homo sapien
ttccatcacatgctttatctggaag

SEQ ID NO: 4176020 - DNA, 25 bp, Homo sapien
gcagctccctgctacttccatcaca

SEQ ID NO: 4176021 - DNA, 25 bp, Homo sapien
gagagaaataatgccaggactgacg

SEQ ID NO: 4176022 - DNA, 25 bp, Homo sapien
agaaataatgccaggactgacggta

SEQ ID NO: 4176023 - DNA, 25 bp, Homo sapien
gagaaataatgccaggactgacggt

SEQ ID NO: 4176024 - DNA, 25 bp, Homo sapien
gagagagaaataatgccaggactga

SEQ ID NO: 4176025 - DNA, 25 bp, Homo sapien
aaaaggagtatttgcgagctccccg

SEQ ID NO: 4176026 - DNA, 25 bp, Homo sapien
cagatgcataagcacagcagcattc

SEQ ID NO: 4176027 - DNA, 25 bp, Homo sapien
gcagcattcccaaggaacacagaag

SEQ ID NO: 4176028 - DNA, 25 bp, Homo sapien
aaaaagagaccagatgcataagcac

SEQ ID NO: 4176029 - DNA, 25 bp, Homo sapien
gtctaaaagactgatcccacagtgg

SEQ ID NO: 4176030 - DNA, 25 bp, Homo sapien
tgtgctaatcagaccacatcgcttg

SEQ ID NO: 4176031 - DNA, 25 bp, Homo sapien
ccacagtggatgctacaagactctg

SEQ ID NO: 4176032 - DNA, 25 bp, Homo sapien
caaacttatgctgtgcagatggcac

SEQ ID NO: 4176033 - DNA, 25 bp, Homo sapien
tacttgtggttggataagccaggcc

SEQ ID NO: 4176034 - DNA, 25 bp, Homo sapien
tgcctctgggtgtgacatgctgcac

SEQ ID NO: 4176035 - DNA, 25 bp, Homo sapien
gagtagagctccagtgcaacatcag

SEQ ID NO: 4176036 - DNA, 25 bp, Homo sapien
gcacagcgttacttctcagagcacc

SEQ ID NO: 4176037 - DNA, 25 bp, Homo sapien
ccatcacaaagagaatgttactcag

SEQ ID NO: 4176038 - DNA, 25 bp, Homo sapien
cacaaagagaatgttactcagtccc

SEQ ID NO: 4176039 - DNA, 25 bp, Homo sapien
ggccatcacaaagagaatgttactc

SEQ ID NO: 4176040 - DNA, 25 bp, Homo sapien
aggaaggccatcacaaagagaatgt

SEQ ID NO: 4176041 - DNA, 25 bp, Homo sapien
catcaggagacagtaggattccagg

SEQ ID NO: 4176042 - DNA, 25 bp, Homo sapien
cagactcatcaggagacagtaggat

SEQ ID NO: 4176043 - DNA, 25 bp, Homo sapien
caggacttaacaaagctgaaaggtt

SEQ ID NO: 4176044 - DNA, 25 bp, Homo sapien
gtggtcagactcatcaggagacagt

SEQ ID NO: 4176045 - DNA, 25 bp, Homo sapien
tgaaagccagtgctccgaatgaagg

SEQ ID NO: 4176046 - DNA, 25 bp, Homo sapien
ggctaccctactctgagcatctagg

SEQ ID NO: 4176047 - DNA, 25 bp, Homo sapien
ggaacaaaagagtcaagtctcaggg

SEQ ID NO: 4176048 - DNA, 25 bp, Homo sapien
gctcagtagaaagtgagtaaaaccc

SEQ ID NO: 4176049 - DNA, 25 bp, Homo sapien
cttagtggggtggcttccctctcag

SEQ ID NO: 4176050 - DNA, 25 bp, Homo sapien
gggtgctgtagccaaacttcaggct

SEQ ID NO: 4176051 - DNA, 25 bp, Homo sapien
tgtgggtgctgtagccaaacttcag

SEQ ID NO: 4176052 - DNA, 25 bp, Homo sapien
tagccaaacttcaggctcagttcac

SEQ ID NO: 4176053 - DNA, 25 bp, Homo sapien
tgctgtagccaaacttcaggctcag

SEQ ID NO: 4176054 - DNA, 25 bp, Homo sapien
ggacagtggccaagggcctggtgtg

SEQ ID NO: 4176055 - DNA, 25 bp, Homo sapien
tcctcatcatccacagcagacatgg

SEQ ID NO: 4176056 - DNA, 25 bp, Homo sapien
ggccaagggcctggtgtgtggccat

SEQ ID NO: 4176057 - DNA, 25 bp, Homo sapien
catccacagcagacatggggacagt

SEQ ID NO: 4176058 - DNA, 25 bp, Homo sapien
cacaagctcaaggtgctaagcagaa

SEQ ID NO: 4176059 - DNA, 25 bp, Homo sapien
ccacaagctcaaggtgctaagcaga

SEQ ID NO: 4176060 - DNA, 25 bp, Homo sapien
ctgtgaagtacttgaggtataaaat

SEQ ID NO: 4176061 - DNA, 25 bp, Homo sapien
tgtgaagtacttgaggtataaaatg

SEQ ID NO: 4176062 - DNA, 25 bp, Homo sapien
cagggtccaactgtccgaatcaaaa

SEQ ID NO: 4176063 - DNA, 25 bp, Homo sapien
tggtcctgccaaaatactactagct

SEQ ID NO: 4176064 - DNA, 25 bp, Homo sapien
tgtgcggcccatatacttggaatga

SEQ ID NO: 4176065 - DNA, 25 bp, Homo sapien
tcatctggtggatgcgaatcattcc

SEQ ID NO: 4176066 - DNA, 25 bp, Homo sapien
gaaaggtgaagataaaagccgcgtc

SEQ ID NO: 4176067 - DNA, 25 bp, Homo sapien
ggtcatattgctcgtaacatcaggg

SEQ ID NO: 4176068 - DNA, 25 bp, Homo sapien
catcagggaatgaaacagacaagct

SEQ ID NO: 4176069 - DNA, 25 bp, Homo sapien
ctgggtaaccgtgtatagatgagca

SEQ ID NO: 4176070 - DNA, 25 bp, Homo sapien
tgctgaaagaaatagtcttggaaaa

SEQ ID NO: 4176071 - DNA, 25 bp, Homo sapien
gaaagaaatagtcttggaaaacagc

SEQ ID NO: 4176072 - DNA, 25 bp, Homo sapien
gaaatagtcttggaaaacagcttta

SEQ ID NO: 4176073 - DNA, 25 bp, Homo sapien
aagaaatagtcttggaaaacagctt

SEQ ID NO: 4176074 - DNA, 25 bp, Homo sapien
tgccttaagcatttgtgtataatac

SEQ ID NO: 4176075 - DNA, 25 bp, Homo sapien
gggtccttcctaacagcgtcataaa

SEQ ID NO: 4176076 - DNA, 25 bp, Homo sapien
ggacattggatgatctgccttaagc

SEQ ID NO: 4176077 - DNA, 25 bp, Homo sapien
tcttcaagtgcaacataggctcgta

SEQ ID NO: 4176078 - DNA, 25 bp, Homo sapien
ttgaagtttggcagaacagtagttg

SEQ ID NO: 4176079 - DNA, 25 bp, Homo sapien
gaagtttggcagaacagtagttgag

SEQ ID NO: 4176080 - DNA, 25 bp, Homo sapien
tgttgaagtttggcagaacagtagt

SEQ ID NO: 4176081 - DNA, 25 bp, Homo sapien
tgaagtttggcagaacagtagttga

SEQ ID NO: 4176082 - DNA, 25 bp, Homo sapien
tcacttggacaaatggaacagcttc

SEQ ID NO: 4176083 - DNA, 25 bp, Homo sapien
ggcctcagcagcgacctaagaatcg

SEQ ID NO: 4176084 - DNA, 25 bp, Homo sapien
catttgtgccgtgcctgctatcctg

SEQ ID NO: 4176085 - DNA, 25 bp, Homo sapien
cagcctggcccgtgattctggaatc

SEQ ID NO: 4176086 - DNA, 25 bp, Homo sapien
catttataagagttgcgaggccgct

SEQ ID NO: 4176087 - DNA, 25 bp, Homo sapien
ctgttggaagtacagctgtaatcca

SEQ ID NO: 4176088 - DNA, 25 bp, Homo sapien
tccatttccatagaattagacagaa

SEQ ID NO: 4176089 - DNA, 25 bp, Homo sapien
gaaaaccatcacacatataataact

SEQ ID NO: 4176090 - DNA, 25 bp, Homo sapien
aaggcagccagccgattgggaagta

SEQ ID NO: 4176091 - DNA, 25 bp, Homo sapien
gaaggcagccagccgattgggaagt

SEQ ID NO: 4176092 - DNA, 25 bp, Homo sapien
ggcagccagccgattgggaagtagg

SEQ ID NO: 4176093 - DNA, 25 bp, Homo sapien
cagccagccgattgggaagtaggtg

SEQ ID NO: 4176094 - DNA, 25 bp, Homo sapien
gtagagagagtagacatcctcccca

SEQ ID NO: 4176095 - DNA, 25 bp, Homo sapien
cccacattcgccatcttaaggtaaa

SEQ ID NO: 4176096 - DNA, 25 bp, Homo sapien
tatgctaacagaagaatttttggta

SEQ ID NO: 4176097 - DNA, 25 bp, Homo sapien
gcaatcagtcttctatcatgaaata

SEQ ID NO: 4176098 - DNA, 25 bp, Homo sapien
aactccaacaggttgctaacctggg

SEQ ID NO: 4176099 - DNA, 25 bp, Homo sapien
acttgggatgtaaatttctctaggc

SEQ ID NO: 4176100 - DNA, 25 bp, Homo sapien
tgctattgtcccacgtaaactccaa

SEQ ID NO: 4176101 - DNA, 25 bp, Homo sapien
tctctaggctgactgttgtgatgat

SEQ ID NO: 4176102 - DNA, 25 bp, Homo sapien
aagaacaatcttcaaaaatgtattc

SEQ ID NO: 4176103 - DNA, 25 bp, Homo sapien
ctgaaagacaccaagaacaatcttc

SEQ ID NO: 4176104 - DNA, 25 bp, Homo sapien
aacaatcttcaaaaatgtattcctc

SEQ ID NO: 4176105 - DNA, 25 bp, Homo sapien
tgaaagacaccaagaacaatcttca

SEQ ID NO: 4176106 - DNA, 25 bp, Homo sapien
tcttggtctgttcactctcttccct

SEQ ID NO: 4176107 - DNA, 25 bp, Homo sapien
ttggtctgttcactctcttccctct

SEQ ID NO: 4176108 - DNA, 25 bp, Homo sapien
ttcttggtctgttcactctcttccc

SEQ ID NO: 4176109 - DNA, 25 bp, Homo sapien
cttttcttggtctgttcactctctt

SEQ ID NO: 4176110 - DNA, 25 bp, Homo sapien
tgaagatgtcttcgaacttttaaaa

SEQ ID NO: 4176111 - DNA, 25 bp, Homo sapien
tgtatcacttttgtcgcatgaagat

SEQ ID NO: 4176112 - DNA, 25 bp, Homo sapien
agatctttcaggtatatggattttt

SEQ ID NO: 4176113 - DNA, 25 bp, Homo sapien
cgcatgaagatgtcttcgaactttt

SEQ ID NO: 4176114 - DNA, 25 bp, Homo sapien
gcttggcccataagtgtgctctgaa

SEQ ID NO: 4176115 - DNA, 25 bp, Homo sapien
aagtctcctcttggcatacggagca

SEQ ID NO: 4176116 - DNA, 25 bp, Homo sapien
tctggaagaaatcaaaaaggttgcc

SEQ ID NO: 4176117 - DNA, 25 bp, Homo sapien
tacagggaggctattccacttagag

SEQ ID NO: 4176118 - DNA, 25 bp, Homo sapien
cattatcaaggtgatggctctccct

SEQ ID NO: 4176119 - DNA, 25 bp, Homo sapien
gaaacagggttcacaagctctggca

SEQ ID NO: 4176120 - DNA, 25 bp, Homo sapien
catggcagtctataacccttgaggg

SEQ ID NO: 4176121 - DNA, 25 bp, Homo sapien
cccagatagaagtggctccaggttc

SEQ ID NO: 4176122 - DNA, 25 bp, Homo sapien
aaagggcgtgcggtccttcctggct

SEQ ID NO: 4176123 - DNA, 25 bp, Homo sapien
aggtcaagcgttgcctgtgccgcaa

SEQ ID NO: 4176124 - DNA, 25 bp, Homo sapien
gcaagacctcggtgctggcaaacag

SEQ ID NO: 4176125 - DNA, 25 bp, Homo sapien
tctgcaagactcaggtcaagcgttg

SEQ ID NO: 4176126 - DNA, 25 bp, Homo sapien
tccttggcgatggaaagaagcttag

SEQ ID NO: 4176127 - DNA, 25 bp, Homo sapien
caccaacgttctctgtgccgagggt

SEQ ID NO: 4176128 - DNA, 25 bp, Homo sapien
ttagcccgcagagagcttagctgac

SEQ ID NO: 4176129 - DNA, 25 bp, Homo sapien
ggttcccggctctcaaatcctgttc

SEQ ID NO: 4176130 - DNA, 25 bp, Homo sapien
tcacggtcttggagaggcgcgtctg

SEQ ID NO: 4176131 - DNA, 25 bp, Homo sapien
agccccgctccctatgccaaggtca

SEQ ID NO: 4176132 - DNA, 25 bp, Homo sapien
tgatctcaggactgcgcgcagcccc

SEQ ID NO: 4176133 - DNA, 25 bp, Homo sapien
tgggtctccacgaggatgagctctg

SEQ ID NO: 4176134 - DNA, 25 bp, Homo sapien
caacagcaggcgttttggtgcgcgc

SEQ ID NO: 4176135 - DNA, 25 bp, Homo sapien
taacacgtggcaagcgagtcctttc

SEQ ID NO: 4176136 - DNA, 25 bp, Homo sapien
tctgtaaaagctacctgtccccttg

SEQ ID NO: 4176137 - DNA, 25 bp, Homo sapien
gctcccgttcattcgcgtgggcgac

SEQ ID NO: 4176138 - DNA, 25 bp, Homo sapien
gcattgatggttctccaaggaaggg

SEQ ID NO: 4176139 - DNA, 25 bp, Homo sapien
gattcctactctgccccactgtgag

SEQ ID NO: 4176140 - DNA, 25 bp, Homo sapien
tgttcactggtgtactagagatttg

SEQ ID NO: 4176141 - DNA, 25 bp, Homo sapien
tgcgctgagacaagagagactttag

SEQ ID NO: 4176142 - DNA, 25 bp, Homo sapien
agctcttcccttaattaggtctctc

SEQ ID NO: 4176143 - DNA, 25 bp, Homo sapien
aaagcagctcttcccttaattaggt

SEQ ID NO: 4176144 - DNA, 25 bp, Homo sapien
gcagctcttcccttaattaggtctc

SEQ ID NO: 4176145 - DNA, 25 bp, Homo sapien
aggtctctctcatcaatttttgttt

SEQ ID NO: 4176146 - DNA, 25 bp, Homo sapien
ccaacatacggtttatacttgagaa

SEQ ID NO: 4176147 - DNA, 25 bp, Homo sapien
ttatacttgagaatgatccacatgc

SEQ ID NO: 4176148 - DNA, 25 bp, Homo sapien
ttgtgacccaacatacggtttatac

SEQ ID NO: 4176149 - DNA, 25 bp, Homo sapien
tacggtttatacttgagaatgatcc

SEQ ID NO: 4176150 - DNA, 25 bp, Homo sapien
gcttttcagccaaggatcggagatg

SEQ ID NO: 4176151 - DNA, 25 bp, Homo sapien
tagataccagggagtgcaagacact

SEQ ID NO: 4176152 - DNA, 25 bp, Homo sapien
gaaatgatccgtgcaccaggtggtt

SEQ ID NO: 4176153 - DNA, 25 bp, Homo sapien
cagaaaggcgcattataaggacggt

SEQ ID NO: 4176154 - DNA, 25 bp, Homo sapien
tcagttgtcagggtcgaatttgctt

SEQ ID NO: 4176155 - DNA, 25 bp, Homo sapien
cgaatttgcttccaaagctgagggt

SEQ ID NO: 4176156 - DNA, 25 bp, Homo sapien
agtgccttcgtccagctcccatcac

SEQ ID NO: 4176157 - DNA, 25 bp, Homo sapien
tcagggtcgaatttgcttccaaagc

SEQ ID NO: 4176158 - DNA, 25 bp, Homo sapien
cttgctccttaggaattccaccttc

SEQ ID NO: 4176159 - DNA, 25 bp, Homo sapien
gcctcttgctccttaggaattccac

SEQ ID NO: 4176160 - DNA, 25 bp, Homo sapien
gtgcctcttgctccttaggaattcc

SEQ ID NO: 4176161 - DNA, 25 bp, Homo sapien
ttaatcattgtcatatggtgcctct

SEQ ID NO: 4176162 - DNA, 25 bp, Homo sapien
aaaataatagaagacgtggtgtttg

SEQ ID NO: 4176163 - DNA, 25 bp, Homo sapien
gaagacgtggtgtttgaatctccat

SEQ ID NO: 4176164 - DNA, 25 bp, Homo sapien
tgcagtggggacacatgtctacaga

SEQ ID NO: 4176165 - DNA, 25 bp, Homo sapien
gtctctccagggcaagggatgagac

SEQ ID NO: 4176166 - DNA, 25 bp, Homo sapien
actccggccttgatttgagatcttg

SEQ ID NO: 4176167 - DNA, 25 bp, Homo sapien
agaggtgtgccaggtgagtgccaag

SEQ ID NO: 4176168 - DNA, 25 bp, Homo sapien
ccttcttttgggctcgctggtctgg

SEQ ID NO: 4176169 - DNA, 25 bp, Homo sapien
tgatacattccacagactccggcct

SEQ ID NO: 4176170 - DNA, 25 bp, Homo sapien
aaatatcctgtatcccagcgtcaag

SEQ ID NO: 4176171 - DNA, 25 bp, Homo sapien
tccaaggccttagaaacggtgttgc

SEQ ID NO: 4176172 - DNA, 25 bp, Homo sapien
caccacagcaatcgtagagggaatg

SEQ ID NO: 4176173 - DNA, 25 bp, Homo sapien
cgtggagacgcctgagccagttgct

SEQ ID NO: 4176174 - DNA, 25 bp, Homo sapien
tatcattgatattgtggacactgga

SEQ ID NO: 4176175 - DNA, 25 bp, Homo sapien
aaatcataggtcttttgtgccagag

SEQ ID NO: 4176176 - DNA, 25 bp, Homo sapien
gcttcttctgatcctgctcccagtg

SEQ ID NO: 4176177 - DNA, 25 bp, Homo sapien
gccccgcctgagaaggcttgagtac

SEQ ID NO: 4176178 - DNA, 25 bp, Homo sapien
agatcttgcccgtgatattgcgccg

SEQ ID NO: 4176179 - DNA, 25 bp, Homo sapien
tatatatatcttgcaaggcgtgggc

SEQ ID NO: 4176180 - DNA, 25 bp, Homo sapien
tggtgccgccaaccacgtggaagta

SEQ ID NO: 4176181 - DNA, 25 bp, Homo sapien
cttcagagcgaatccaatggtgccg

SEQ ID NO: 4176182 - DNA, 25 bp, Homo sapien
tccataagtagctccaagacatgct

SEQ ID NO: 4176183 - DNA, 25 bp, Homo sapien
tgctcacaggcatagcaccctgggt

SEQ ID NO: 4176184 - DNA, 25 bp, Homo sapien
caacgtctaatctcacactgggaca

SEQ ID NO: 4176185 - DNA, 25 bp, Homo sapien
tccatgacagactatgtgtgctcac

SEQ ID NO: 4176186 - DNA, 25 bp, Homo sapien
ggtccagcctgtgagtgtagggtac

SEQ ID NO: 4176187 - DNA, 25 bp, Homo sapien
gggtccagcctgtgagtgtagggta

SEQ ID NO: 4176188 - DNA, 25 bp, Homo sapien
tggcatagacgttgtaatacccgac

SEQ ID NO: 4176189 - DNA, 25 bp, Homo sapien
gatggaatagttccccaccaggtca

SEQ ID NO: 4176190 - DNA, 25 bp, Homo sapien
gacttccttaaacacgatggagcca

SEQ ID NO: 4176191 - DNA, 25 bp, Homo sapien
gtaaagtttagatgccgtaggtgct

SEQ ID NO: 4176192 - DNA, 25 bp, Homo sapien
ggacagacagcacaaaggtgagtgg

SEQ ID NO: 4176193 - DNA, 25 bp, Homo sapien
tggaggacagacagcacaaaggtga

SEQ ID NO: 4176194 - DNA, 25 bp, Homo sapien
ctggaggacagacagcacaaaggtg

SEQ ID NO: 4176195 - DNA, 25 bp, Homo sapien
gaggacagacagcacaaaggtgagt

SEQ ID NO: 4176196 - DNA, 25 bp, Homo sapien
tctcatcactatactccccatcagg

SEQ ID NO: 4176197 - DNA, 25 bp, Homo sapien
caggcagtctcggctgcagttggag

SEQ ID NO: 4176198 - DNA, 25 bp, Homo sapien
atcaggacactccacacactcaaag

SEQ ID NO: 4176199 - DNA, 25 bp, Homo sapien
cccctcaatgatccctttcctggtc

SEQ ID NO: 4176200 - DNA, 25 bp, Homo sapien
gatgcagagcacgaagctgatgcca

SEQ ID NO: 4176201 - DNA, 25 bp, Homo sapien
tgagtgcgatcccaaagggctccgt

SEQ ID NO: 4176202 - DNA, 25 bp, Homo sapien
taatggctcgtgtcgggtcagcgta

SEQ ID NO: 4176203 - DNA, 25 bp, Homo sapien
ggatggcaatcacctctacggcaga

SEQ ID NO: 4176204 - DNA, 25 bp, Homo sapien
ttatgaattcactacgttttctgta

SEQ ID NO: 4176205 - DNA, 25 bp, Homo sapien
tatgaattcactacgttttctgtaa

SEQ ID NO: 4176206 - DNA, 25 bp, Homo sapien
atgaattcactacgttttctgtaac

SEQ ID NO: 4176207 - DNA, 25 bp, Homo sapien
tttaatccacataagagctctgagg

SEQ ID NO: 4176208 - DNA, 25 bp, Homo sapien
cactctggagggtagtttaaagcca

SEQ ID NO: 4176209 - DNA, 25 bp, Homo sapien
cactgctggagggaacatagctctg

SEQ ID NO: 4176210 - DNA, 25 bp, Homo sapien
cagtctgttgtcaaggcattgggca

SEQ ID NO: 4176211 - DNA, 25 bp, Homo sapien
attgtgtgctaggtaccaggctaaa

SEQ ID NO: 4176212 - DNA, 25 bp, Homo sapien
tattgtgtgctaggtaccaggctaa

SEQ ID NO: 4176213 - DNA, 25 bp, Homo sapien
atgcttattgtgtgctaggtaccag

SEQ ID NO: 4176214 - DNA, 25 bp, Homo sapien
gcttattgtgtgctaggtaccaggc

SEQ ID NO: 4176215 - DNA, 25 bp, Homo sapien
ttgggtcatcctgagtcaccacctt

SEQ ID NO: 4176216 - DNA, 25 bp, Homo sapien
ccaccttctgctcacagtcgcgctc

SEQ ID NO: 4176217 - DNA, 25 bp, Homo sapien
tctgctcacagtcgcgctcccacat

SEQ ID NO: 4176218 - DNA, 25 bp, Homo sapien
tcaccaccttctgctcacagtcgcg

SEQ ID NO: 4176219 - DNA, 25 bp, Homo sapien
ccacagggaccgactggttaggaca

SEQ ID NO: 4176220 - DNA, 25 bp, Homo sapien
gacgctcttcctatctcaaggtcag

SEQ ID NO: 4176221 - DNA, 25 bp, Homo sapien
cacctggataatttgggacgctctt

SEQ ID NO: 4176222 - DNA, 25 bp, Homo sapien
tagctgcaagagctagcaggcccca

SEQ ID NO: 4176223 - DNA, 25 bp, Homo sapien
aaagtcctacaagggtgtcactggg

SEQ ID NO: 4176224 - DNA, 25 bp, Homo sapien
aactcagggaaggagataacaatac

SEQ ID NO: 4176225 - DNA, 25 bp, Homo sapien
cccaagcagatgtagaggaatagaa

SEQ ID NO: 4176226 - DNA, 25 bp, Homo sapien
caaacactagtttgttgaagctacc

SEQ ID NO: 4176227 - DNA, 25 bp, Homo sapien
taagcagtttcccattgttaacaaa

SEQ ID NO: 4176228 - DNA, 25 bp, Homo sapien
ttcaaaagaaatgtaagcagtttcc

SEQ ID NO: 4176229 - DNA, 25 bp, Homo sapien
aaaagtaattaaaaggtgatcatat

SEQ ID NO: 4176230 - DNA, 25 bp, Homo sapien
aaatgtaagcagtttcccattgtta

SEQ ID NO: 4176231 - DNA, 25 bp, Homo sapien
tcctgtgacaggttctaccctgtgc

SEQ ID NO: 4176232 - DNA, 25 bp, Homo sapien
caaggctaaggttcttctttggatc

SEQ ID NO: 4176233 - DNA, 25 bp, Homo sapien
ctttggatccttggaatgcaccttt

SEQ ID NO: 4176234 - DNA, 25 bp, Homo sapien
gccctgttggccttcacctagcagt

SEQ ID NO: 4176235 - DNA, 25 bp, Homo sapien
gagttatctgccactacaggcgcat

SEQ ID NO: 4176236 - DNA, 25 bp, Homo sapien
tgttgatttaaacaggtacccctgc

SEQ ID NO: 4176237 - DNA, 25 bp, Homo sapien
ttgtctccactccaagtgtcctcca

SEQ ID NO: 4176238 - DNA, 25 bp, Homo sapien
ccaagtgtcctccactcttgtccag

SEQ ID NO: 4176239 - DNA, 25 bp, Homo sapien
caatcttcatttataatgagtgtat

SEQ ID NO: 4176240 - DNA, 25 bp, Homo sapien
aattatccattagtccattaccaag

SEQ ID NO: 4176241 - DNA, 25 bp, Homo sapien
gggtgactgacccagtatggtgatt

SEQ ID NO: 4176242 - DNA, 25 bp, Homo sapien
gtatggtgattcctatctaatatga

SEQ ID NO: 4176243 - DNA, 25 bp, Homo sapien
aacaattatccattagtccactacc

SEQ ID NO: 4176244 - DNA, 25 bp, Homo sapien
gaaacaattatccattagtccacta

SEQ ID NO: 4176245 - DNA, 25 bp, Homo sapien
caattatccattagtccactaccaa

SEQ ID NO: 4176246 - DNA, 25 bp, Homo sapien
aattatccattagtccactaccaag

SEQ ID NO: 4176247 - DNA, 25 bp, Homo sapien
ggctctgcatgtggctgatatgaga

SEQ ID NO: 4176248 - DNA, 25 bp, Homo sapien
agcttcagtgaaggttccagtgtcc

SEQ ID NO: 4176249 - DNA, 25 bp, Homo sapien
cagactccttgacagccagggctct

SEQ ID NO: 4176250 - DNA, 25 bp, Homo sapien
tagcaggtcttcctccactatagag

SEQ ID NO: 4176251 - DNA, 25 bp, Homo sapien
acagcatcttgtggatctaccacag

SEQ ID NO: 4176252 - DNA, 25 bp, Homo sapien
ccctgtagcaccctcccctgcagtg

SEQ ID NO: 4176253 - DNA, 25 bp, Homo sapien
aggtgtagttcagcctccagcacag

SEQ ID NO: 4176254 - DNA, 25 bp, Homo sapien
cctgcagtgcaagttcccgctgtct

SEQ ID NO: 4176255 - DNA, 25 bp, Homo sapien
tcagctgtgttgaatcttccatgga

SEQ ID NO: 4176256 - DNA, 25 bp, Homo sapien
actttttttgggcctttcagctgtg

SEQ ID NO: 4176257 - DNA, 25 bp, Homo sapien
ttctgtgtatctgcattgcgtcatt

SEQ ID NO: 4176258 - DNA, 25 bp, Homo sapien
tattttatccggtggcccttgctgc

SEQ ID NO: 4176259 - DNA, 25 bp, Homo sapien
tggtcatttgatgttagcaacctgt

SEQ ID NO: 4176260 - DNA, 25 bp, Homo sapien
ctttaggtgaccagaaacttgagca

SEQ ID NO: 4176261 - DNA, 25 bp, Homo sapien
tgtctttgtgaatagttggctgctg

SEQ ID NO: 4176262 - DNA, 25 bp, Homo sapien
tgactctttgtctacataggcaggg

SEQ ID NO: 4176263 - DNA, 25 bp, Homo sapien
ttgtcctcagctgcattgtgaaggg

SEQ ID NO: 4176264 - DNA, 25 bp, Homo sapien
gttttttgtcctcagctgcattgtg

SEQ ID NO: 4176265 - DNA, 25 bp, Homo sapien
ttttgtcctcagctgcattgtgaag

SEQ ID NO: 4176266 - DNA, 25 bp, Homo sapien
tgtcctcagctgcattgtgaagggt

SEQ ID NO: 4176267 - DNA, 25 bp, Homo sapien
cattgggagaagagggcaaccagcc

SEQ ID NO: 4176268 - DNA, 25 bp, Homo sapien
tccttgaagggcattggataaacat

SEQ ID NO: 4176269 - DNA, 25 bp, Homo sapien
gtccttgaagggcattggataaaca

SEQ ID NO: 4176270 - DNA, 25 bp, Homo sapien
ctcattgggagaagagggcaaccag

SEQ ID NO: 4176271 - DNA, 25 bp, Homo sapien
gcctgtatccatttcaacagcctga

SEQ ID NO: 4176272 - DNA, 25 bp, Homo sapien
cacaagagtctattctactcccata

SEQ ID NO: 4176273 - DNA, 25 bp, Homo sapien
catacttctctaggaacctgcctgt

SEQ ID NO: 4176274 - DNA, 25 bp, Homo sapien
tctgatttgttaaaccacaagagtc

SEQ ID NO: 4176275 - DNA, 25 bp, Homo sapien
ccattgctcagaacggctcttcaga

SEQ ID NO: 4176276 - DNA, 25 bp, Homo sapien
cttattaccacacagttggtgtgtg

SEQ ID NO: 4176277 - DNA, 25 bp, Homo sapien
tgtggtaattgtccccattgctcag

SEQ ID NO: 4176278 - DNA, 25 bp, Homo sapien
ggctcttcagagtctcgtcggttgt

SEQ ID NO: 4176279 - DNA, 25 bp, Homo sapien
cctggagtgtttggtgttgggatct

SEQ ID NO: 4176280 - DNA, 25 bp, Homo sapien
caaagcccctggagtgtttggtgtt

SEQ ID NO: 4176281 - DNA, 25 bp, Homo sapien
ccctggagtgtttggtgttgggatc

SEQ ID NO: 4176282 - DNA, 25 bp, Homo sapien
agcccctggagtgtttggtgttggg

SEQ ID NO: 4176283 - DNA, 25 bp, Homo sapien
tcaattcttcccatactcttcaaaa

SEQ ID NO: 4176284 - DNA, 25 bp, Homo sapien
gttaagtgggcacctagtctctgag

SEQ ID NO: 4176285 - DNA, 25 bp, Homo sapien
aattcttcccatactcttcaaaata

SEQ ID NO: 4176286 - DNA, 25 bp, Homo sapien
tttttcagagttaagtgggcaccta

SEQ ID NO: 4176287 - DNA, 25 bp, Homo sapien
agacagtgcagccagcgggatggca

SEQ ID NO: 4176288 - DNA, 25 bp, Homo sapien
gacagtgcagccagcgggatggcag

SEQ ID NO: 4176289 - DNA, 25 bp, Homo sapien
tgttttaaaagaggcgttcactagc

SEQ ID NO: 4176290 - DNA, 25 bp, Homo sapien
taaaagaggcgttcactagctccgc

SEQ ID NO: 4176291 - DNA, 25 bp, Homo sapien
ggaagtgtggagactcgtgttttaa

SEQ ID NO: 4176292 - DNA, 25 bp, Homo sapien
tagctccgcctatagaatgctttat

SEQ ID NO: 4176293 - DNA, 25 bp, Homo sapien
gattgcttctttgctggacaggatg

SEQ ID NO: 4176294 - DNA, 25 bp, Homo sapien
gctgattgcttctttgctggacagg

SEQ ID NO: 4176295 - DNA, 25 bp, Homo sapien
ggctgattgcttctttgctggacag

SEQ ID NO: 4176296 - DNA, 25 bp, Homo sapien
tttggctgattgcttctttgctgga

SEQ ID NO: 4176297 - DNA, 25 bp, Homo sapien
ctggagtggcgggtttggcctcaga

SEQ ID NO: 4176298 - DNA, 25 bp, Homo sapien
ggcgggtttggcctcagataagcct

SEQ ID NO: 4176299 - DNA, 25 bp, Homo sapien
gagtggcgggtttggcctcagataa

SEQ ID NO: 4176300 - DNA, 25 bp, Homo sapien
gggtttggcctcagataagcctcca

SEQ ID NO: 4176301 - DNA, 25 bp, Homo sapien
tctggttttcatgttcaaccacagc

SEQ ID NO: 4176302 - DNA, 25 bp, Homo sapien
aaccacagcctttccacagggacaa

SEQ ID NO: 4176303 - DNA, 25 bp, Homo sapien
gcattccaagactacttcatcaaat

SEQ ID NO: 4176304 - DNA, 25 bp, Homo sapien
tacacgttggcttcacttggtgaga

SEQ ID NO: 4176305 - DNA, 25 bp, Homo sapien
tgcctcagtttgagtaccagaactg

SEQ ID NO: 4176306 - DNA, 25 bp, Homo sapien
ttctcagaccatttctgaaaggcca

SEQ ID NO: 4176307 - DNA, 25 bp, Homo sapien
ggaccaccactcagttctcctgtaa

SEQ ID NO: 4176308 - DNA, 25 bp, Homo sapien
cttgagaatagacgggaaaagtgtg

SEQ ID NO: 4176309 - DNA, 25 bp, Homo sapien
ccagcaacaacttgagttttatact

SEQ ID NO: 4176310 - DNA, 25 bp, Homo sapien
cagcttccaattttccgtaagtctc

SEQ ID NO: 4176311 - DNA, 25 bp, Homo sapien
cttgagttttatactgcacagcttc

SEQ ID NO: 4176312 - DNA, 25 bp, Homo sapien
ccaattttccgtaagtctcatttgt

SEQ ID NO: 4176313 - DNA, 25 bp, Homo sapien
tcaggcagatgagacgtgatcctcc

SEQ ID NO: 4176314 - DNA, 25 bp, Homo sapien
catgctgggcatcttaatttaggac

SEQ ID NO: 4176315 - DNA, 25 bp, Homo sapien
tggcgctaaagtaggtgctgaactc

SEQ ID NO: 4176316 - DNA, 25 bp, Homo sapien
taaactatgcctagagtgccacaag

SEQ ID NO: 4176317 - DNA, 25 bp, Homo sapien
cagcattgctagacctagtccacca

SEQ ID NO: 4176318 - DNA, 25 bp, Homo sapien
tgagagagccacaggtctacaaaga

SEQ ID NO: 4176319 - DNA, 25 bp, Homo sapien
tgggtctacatcaagtgagagagcc

SEQ ID NO: 4176320 - DNA, 25 bp, Homo sapien
tctacaaagacttctgtccaaaaag

SEQ ID NO: 4176321 - DNA, 25 bp, Homo sapien
gtatccagtaagtaccaagtcctca

SEQ ID NO: 4176322 - DNA, 25 bp, Homo sapien
taaaagcccgtcagctcgtcatcct

SEQ ID NO: 4176323 - DNA, 25 bp, Homo sapien
ctcattttgtccgggaagacttttg

SEQ ID NO: 4176324 - DNA, 25 bp, Homo sapien
cctggtatccagtaagtaccaagtc

SEQ ID NO: 4176325 - DNA, 25 bp, Homo sapien
aagaatgcttctttattgatggtta

SEQ ID NO: 4176326 - DNA, 25 bp, Homo sapien
gccagttgaaggaatcagaacactt

SEQ ID NO: 4176327 - DNA, 25 bp, Homo sapien
tcagcaaggatcatgactcagtagc

SEQ ID NO: 4176328 - DNA, 25 bp, Homo sapien
tgatggttatatttatcagcaagga

SEQ ID NO: 4176329 - DNA, 25 bp, Homo sapien
gagggtggtactatcctttagccag

SEQ ID NO: 4176330 - DNA, 25 bp, Homo sapien
caaggaggctggtgaattgatagtc

SEQ ID NO: 4176331 - DNA, 25 bp, Homo sapien
cacgatccagcctgcctatggtggg

SEQ ID NO: 4176332 - DNA, 25 bp, Homo sapien
tttagccagttgcattaggcttgac

SEQ ID NO: 4176333 - DNA, 25 bp, Homo sapien
ggtcatctcataagagctaagcatg

SEQ ID NO: 4176334 - DNA, 25 bp, Homo sapien
tgatttctgagccaacagtccaaga

SEQ ID NO: 4176335 - DNA, 25 bp, Homo sapien
ttttttaaggactgggtcatctcat

SEQ ID NO: 4176336 - DNA, 25 bp, Homo sapien
tgacagatatcaacagggcgggctt

SEQ ID NO: 4176337 - DNA, 25 bp, Homo sapien
acttttcctacaggaccagtgtaca

SEQ ID NO: 4176338 - DNA, 25 bp, Homo sapien
tgttacacgggtttatctcaaactc

SEQ ID NO: 4176339 - DNA, 25 bp, Homo sapien
gagtctcaccatgttacacgggttt

SEQ ID NO: 4176340 - DNA, 25 bp, Homo sapien
ttcctacaggaccagtgtacaatta

SEQ ID NO: 4176341 - DNA, 25 bp, Homo sapien
gaccagcgcagaacttcgccgggga

SEQ ID NO: 4176342 - DNA, 25 bp, Homo sapien
ccacttgctactccgccgaccagcg

SEQ ID NO: 4176343 - DNA, 25 bp, Homo sapien
gggacggtggcgctggtgagctcaa

SEQ ID NO: 4176344 - DNA, 25 bp, Homo sapien
gcgctggtgagctcaatgtcaccca

SEQ ID NO: 4176345 - DNA, 25 bp, Homo sapien
tgctgccaggcgcagaccgctgagg

SEQ ID NO: 4176346 - DNA, 25 bp, Homo sapien
ctgccaggcgcagaccgctgaggct

SEQ ID NO: 4176347 - DNA, 25 bp, Homo sapien
ccaggcgcagaccgctgaggctccc

SEQ ID NO: 4176348 - DNA, 25 bp, Homo sapien
tgccaggcgcagaccgctgaggctc

SEQ ID NO: 4176349 - DNA, 25 bp, Homo sapien
tcccatatcccgaccggcgtctcac

SEQ ID NO: 4176350 - DNA, 25 bp, Homo sapien
ctcccatatcccgaccggcgtctca

SEQ ID NO: 4176351 - DNA, 25 bp, Homo sapien
tgagggtaattcacgggcagtctcc

SEQ ID NO: 4176352 - DNA, 25 bp, Homo sapien
gacctaaatccttggcctaatcaga

SEQ ID NO: 4176353 - DNA, 25 bp, Homo sapien
tgcgtcatggaatggagccactccg

SEQ ID NO: 4176354 - DNA, 25 bp, Homo sapien
tctgaggaaccgagaaagtgcgtca

SEQ ID NO: 4176355 - DNA, 25 bp, Homo sapien
gcctacatttctatttgatctttca

SEQ ID NO: 4176356 - DNA, 25 bp, Homo sapien
gagccaccacattgagcctacattt

SEQ ID NO: 4176357 - DNA, 25 bp, Homo sapien
agcatgatcgtattatagctcaatg

SEQ ID NO: 4176358 - DNA, 25 bp, Homo sapien
tgtggtagcatgatcgtattatagc

SEQ ID NO: 4176359 - DNA, 25 bp, Homo sapien
gaatgcacaattgaagccatctggg

SEQ ID NO: 4176360 - DNA, 25 bp, Homo sapien
caaatgtattgggaagtgatccctc

SEQ ID NO: 4176361 - DNA, 25 bp, Homo sapien
cgagaacctccagtaagtacagtgt

SEQ ID NO: 4176362 - DNA, 25 bp, Homo sapien
cagcctttcaccattaagtccgatg

SEQ ID NO: 4176363 - DNA, 25 bp, Homo sapien
gaaacatctatttaggtcctctgcc

SEQ ID NO: 4176364 - DNA, 25 bp, Homo sapien
gggtgaggtccagtttatccatctt

SEQ ID NO: 4176365 - DNA, 25 bp, Homo sapien
tataactgtcccagtaggtaggaag

SEQ ID NO: 4176366 - DNA, 25 bp, Homo sapien
caaatatagtctcccactccatggg

SEQ ID NO: 4176367 - DNA, 25 bp, Homo sapien
cagactctcaaatgccacacttgat

SEQ ID NO: 4176368 - DNA, 25 bp, Homo sapien
tgcacatcacgagaatattcaagac

SEQ ID NO: 4176369 - DNA, 25 bp, Homo sapien
gcaaagcagcattacagttattact

SEQ ID NO: 4176370 - DNA, 25 bp, Homo sapien
aaaggttacacaagactcttgctgg

SEQ ID NO: 4176371 - DNA, 25 bp, Homo sapien
aaaatctcacttatgttccattaac

SEQ ID NO: 4176372 - DNA, 25 bp, Homo sapien
tcataattgcactggcaaacagttc

SEQ ID NO: 4176373 - DNA, 25 bp, Homo sapien
taaatctttgcgaagagatagcccc

SEQ ID NO: 4176374 - DNA, 25 bp, Homo sapien
ttgcactggcaaacagttcttataa

SEQ ID NO: 4176375 - DNA, 25 bp, Homo sapien
cagatgaaattataatcacctgagc

SEQ ID NO: 4176376 - DNA, 25 bp, Homo sapien
gatgaaattataatcacctgagctt

SEQ ID NO: 4176377 - DNA, 25 bp, Homo sapien
atgaaattataatcacctgagcttt

SEQ ID NO: 4176378 - DNA, 25 bp, Homo sapien
gactatacttccaacatttcacaga

SEQ ID NO: 4176379 - DNA, 25 bp, Homo sapien
ctttcacataacctaaaacagcttc

SEQ ID NO: 4176380 - DNA, 25 bp, Homo sapien
tctctttcacataacctaaaacagc

SEQ ID NO: 4176381 - DNA, 25 bp, Homo sapien
gaaacatctctttcacataacctaa

SEQ ID NO: 4176382 - DNA, 25 bp, Homo sapien
gatgaggaaacatctctttcacata

SEQ ID NO: 4176383 - DNA, 25 bp, Homo sapien
atggagctccgggactttcctgtgg

SEQ ID NO: 4176384 - DNA, 25 bp, Homo sapien
gatggagctccgggactttcctgtg

SEQ ID NO: 4176385 - DNA, 25 bp, Homo sapien
ggatggagctccgggactttcctgt

SEQ ID NO: 4176386 - DNA, 25 bp, Homo sapien
tgtaaaggcactctgttgtaagtgc

SEQ ID NO: 4176387 - DNA, 25 bp, Homo sapien
caatccgtaggtttgtgtaaaggca

SEQ ID NO: 4176388 - DNA, 25 bp, Homo sapien
tgaccatatgaggatctttttctgc

SEQ ID NO: 4176389 - DNA, 25 bp, Homo sapien
ttcctttttgaagcgacctgaccat

SEQ ID NO: 4176390 - DNA, 25 bp, Homo sapien
gcacaaggacaaatggctgcccagg

SEQ ID NO: 4176391 - DNA, 25 bp, Homo sapien
aagacccttccagagtgattcgtga

SEQ ID NO: 4176392 - DNA, 25 bp, Homo sapien
ggaaccaactattaggcagactgag

SEQ ID NO: 4176393 - DNA, 25 bp, Homo sapien
gaaaagtaatccattccatagggag

SEQ ID NO: 4176394 - DNA, 25 bp, Homo sapien
taaaaagggcctagagatctcatag

SEQ ID NO: 4176395 - DNA, 25 bp, Homo sapien
gaggatgaggcatttttcgtaactc

SEQ ID NO: 4176396 - DNA, 25 bp, Homo sapien
tccctttctgaagttgctcaggata

SEQ ID NO: 4176397 - DNA, 25 bp, Homo sapien
taaatagggagacctagagatctct

SEQ ID NO: 4176398 - DNA, 25 bp, Homo sapien
ccgtcagggcaatcattagatagct

SEQ ID NO: 4176399 - DNA, 25 bp, Homo sapien
cattagatagctgatcttcactcgc

SEQ ID NO: 4176400 - DNA, 25 bp, Homo sapien
aagatgcatcctaccaccgtcaggg

SEQ ID NO: 4176401 - DNA, 25 bp, Homo sapien
ttgccctcaataaccatgaagatgc

SEQ ID NO: 4176402 - DNA, 25 bp, Homo sapien
catgtaatgtagaaagtagcctcct

SEQ ID NO: 4176403 - DNA, 25 bp, Homo sapien
gatttgctatctatccccaaggatg

SEQ ID NO: 4176404 - DNA, 25 bp, Homo sapien
ttctcagagggtaaatacaagggtc

SEQ ID NO: 4176405 - DNA, 25 bp, Homo sapien
ggatgatattccaggcttgttccca

SEQ ID NO: 4176406 - DNA, 25 bp, Homo sapien
actacaattccaacctttgagtggg

SEQ ID NO: 4176407 - DNA, 25 bp, Homo sapien
ccctccatgtaaacggtcagatttc

SEQ ID NO: 4176408 - DNA, 25 bp, Homo sapien
cattgatgatttccacgagtatctg

SEQ ID NO: 4176409 - DNA, 25 bp, Homo sapien
tctatgaagcttacatacaggccag

SEQ ID NO: 4176410 - DNA, 25 bp, Homo sapien
cttctcattgccatttctatcccgt

SEQ ID NO: 4176411 - DNA, 25 bp, Homo sapien
ccaacttatctgcatactcagatcc

SEQ ID NO: 4176412 - DNA, 25 bp, Homo sapien
cattgccatttctatcccgtttttc

SEQ ID NO: 4176413 - DNA, 25 bp, Homo sapien
tccttccccaacttatctgcatact

SEQ ID NO: 4176414 - DNA, 25 bp, Homo sapien
cactcaagcataagtaagaagtgcc

SEQ ID NO: 4176415 - DNA, 25 bp, Homo sapien
caacttcctcgtacgcttccaagaa

SEQ ID NO: 4176416 - DNA, 25 bp, Homo sapien
ggagggtgtctttaccttgcactga

SEQ ID NO: 4176417 - DNA, 25 bp, Homo sapien
tgcacactgagcacggcagtttcct

SEQ ID NO: 4176418 - DNA, 25 bp, Homo sapien
ctgttttggccttcatagctgcttc

SEQ ID NO: 4176419 - DNA, 25 bp, Homo sapien
tgttttggccttcatagctgcttcc

SEQ ID NO: 4176420 - DNA, 25 bp, Homo sapien
taagttcaagcttgttaaagtctcg

SEQ ID NO: 4176421 - DNA, 25 bp, Homo sapien
ttaaagtctcgtgtctttgggcagc

SEQ ID NO: 4176422 - DNA, 25 bp, Homo sapien
aaatcatactttatgaaatggatcc

SEQ ID NO: 4176423 - DNA, 25 bp, Homo sapien
tctacagcagaaatacggaaatggt

SEQ ID NO: 4176424 - DNA, 25 bp, Homo sapien
tacaggcacgttataacataattcc

SEQ ID NO: 4176425 - DNA, 25 bp, Homo sapien
tggtacaggtttgggcaaatcatac

SEQ ID NO: 4176426 - DNA, 25 bp, Homo sapien
gctgagaggctacacttgacttgga

SEQ ID NO: 4176427 - DNA, 25 bp, Homo sapien
gcacctgggccatatactcaactgg

SEQ ID NO: 4176428 - DNA, 25 bp, Homo sapien
tcaaaatgagttcgcctgtggagag

SEQ ID NO: 4176429 - DNA, 25 bp, Homo sapien
tatgagacaactcgatatcccaagg

SEQ ID NO: 4176430 - DNA, 25 bp, Homo sapien
cagcacaatgcactttgaggcaatt

SEQ ID NO: 4176431 - DNA, 25 bp, Homo sapien
taagagttacctgaacactagcact

SEQ ID NO: 4176432 - DNA, 25 bp, Homo sapien
gatagtacccaaccctgcatatact

SEQ ID NO: 4176433 - DNA, 25 bp, Homo sapien
ggctgtatacagtagtcacccctta

SEQ ID NO: 4176434 - DNA, 25 bp, Homo sapien
cctacggagacatgataaacacgca

SEQ ID NO: 4176435 - DNA, 25 bp, Homo sapien
tactagtagggtaggagtgctgtaa

SEQ ID NO: 4176436 - DNA, 25 bp, Homo sapien
tttctgcccactttacctacggaga

SEQ ID NO: 4176437 - DNA, 25 bp, Homo sapien
taatttaactgaaagcaacaagggc

SEQ ID NO: 4176438 - DNA, 25 bp, Homo sapien
tggacaacactcttaaactatggga

SEQ ID NO: 4176439 - DNA, 25 bp, Homo sapien
tagtgtcaggtagctatgatggcct

SEQ ID NO: 4176440 - DNA, 25 bp, Homo sapien
gcatcaggtcagtgtttaaaaacgc

SEQ ID NO: 4176441 - DNA, 25 bp, Homo sapien
aaaacgctcgttgatgacgataacc

SEQ ID NO: 4176442 - DNA, 25 bp, Homo sapien
gaaggcagtcgctttcgcatttgaa

SEQ ID NO: 4176443 - DNA, 25 bp, Homo sapien
aaaagaccggaaatgaacattggcg

SEQ ID NO: 4176444 - DNA, 25 bp, Homo sapien
tggcgacttttttgcgcaggcgcag

SEQ ID NO: 4176445 - DNA, 25 bp, Homo sapien
gcaggcgcagatggccgtctcccat

SEQ ID NO: 4176446 - DNA, 25 bp, Homo sapien
tatggaagcttaagccgtagatgct

SEQ ID NO: 4176447 - DNA, 25 bp, Homo sapien
tcggcctcgggcactctttactgag

SEQ ID NO: 4176448 - DNA, 25 bp, Homo sapien
gagataccgacttctctatggaagc

SEQ ID NO: 4176449 - DNA, 25 bp, Homo sapien
gcagagcaccggcttttaaaggacc

SEQ ID NO: 4176450 - DNA, 25 bp, Homo sapien
gaggcaaaacatagccttagttcct

SEQ ID NO: 4176451 - DNA, 25 bp, Homo sapien
tgggtttatgtccagacgtggtggc

SEQ ID NO: 4176452 - DNA, 25 bp, Homo sapien
aacatttgaggcaaaacatagcctt

SEQ ID NO: 4176453 - DNA, 25 bp, Homo sapien
cctgcagactacattgttttataaa

SEQ ID NO: 4176454 - DNA, 25 bp, Homo sapien
cataagtgacagatgagtagaaaca

SEQ ID NO: 4176455 - DNA, 25 bp, Homo sapien
tatccaaccgacgtggaagctgctg

SEQ ID NO: 4176456 - DNA, 25 bp, Homo sapien
aagctgctggttgccttaggctatt

SEQ ID NO: 4176457 - DNA, 25 bp, Homo sapien
taggctattacacagggatttttcc

SEQ ID NO: 4176458 - DNA, 25 bp, Homo sapien
tgaagaattactgcctcaggaagca

SEQ ID NO: 4176459 - DNA, 25 bp, Homo sapien
cagtgccatggatgcgaatttaaca

SEQ ID NO: 4176460 - DNA, 25 bp, Homo sapien
gatccattcaaacgcacaaatgtgg

SEQ ID NO: 4176461 - DNA, 25 bp, Homo sapien
taaaggaatatcatcccaaggaatg

SEQ ID NO: 4176462 - DNA, 25 bp, Homo sapien
ggatctcccagaactagacttggca

SEQ ID NO: 4176463 - DNA, 25 bp, Homo sapien
tacaacacttagatggctgtccaag

SEQ ID NO: 4176464 - DNA, 25 bp, Homo sapien
tgcttttaggttacacagactggag

SEQ ID NO: 4176465 - DNA, 25 bp, Homo sapien
aagcagtggccacgcagtagttccg

SEQ ID NO: 4176466 - DNA, 25 bp, Homo sapien
tattgtacgtctacccacaggcaac

SEQ ID NO: 4176467 - DNA, 25 bp, Homo sapien
gattgctgccgatttttgcctaaga

SEQ ID NO: 4176468 - DNA, 25 bp, Homo sapien
ggatccacttttagaaaccagcatt

SEQ ID NO: 4176469 - DNA, 25 bp, Homo sapien
taagtatatatctgccaggttggga

SEQ ID NO: 4176470 - DNA, 25 bp, Homo sapien
tctgtgctctgggatggataccgtc

SEQ ID NO: 4176471 - DNA, 25 bp, Homo sapien
tatttggaagttgcccctgacaagc

SEQ ID NO: 4176472 - DNA, 25 bp, Homo sapien
ttggaacttggtactgaagcaggct

SEQ ID NO: 4176473 - DNA, 25 bp, Homo sapien
tgaataccctaccactaaggcgttg

SEQ ID NO: 4176474 - DNA, 25 bp, Homo sapien
atgcaatcagtgtaactaggggctg

SEQ ID NO: 4176475 - DNA, 25 bp, Homo sapien
tcagtgtaactaggggctgtgtttc

SEQ ID NO: 4176476 - DNA, 25 bp, Homo sapien
tgtggtcctgatcaaggtcctcatt

SEQ ID NO: 4176477 - DNA, 25 bp, Homo sapien
gtggtcctgatcaaggtcctcatta

SEQ ID NO: 4176478 - DNA, 25 bp, Homo sapien
gaaaacctccggctctctgtggtgg

SEQ ID NO: 4176479 - DNA, 25 bp, Homo sapien
caggagatctaccaaaaggcctttg

SEQ ID NO: 4176480 - DNA, 25 bp, Homo sapien
ttcgggaccgaagatgaagacagca

SEQ ID NO: 4176481 - DNA, 25 bp, Homo sapien
aatccctaggctttggagatccgca

SEQ ID NO: 4176482 - DNA, 25 bp, Homo sapien
ggcactggcattaacccttactgtg

SEQ ID NO: 4176483 - DNA, 25 bp, Homo sapien
tagaactgggttgtatcaagccgct

SEQ ID NO: 4176484 - DNA, 25 bp, Homo sapien
tgtgatctcctcacggtcatggact

SEQ ID NO: 4176485 - DNA, 25 bp, Homo sapien
tacaggttgccctaaatggcttgga

SEQ ID NO: 4176486 - DNA, 25 bp, Homo sapien
gcattcatcagatgctagttttgag

SEQ ID NO: 4176487 - DNA, 25 bp, Homo sapien
ggactgaatgtaggcattcatcaga

SEQ ID NO: 4176488 - DNA, 25 bp, Homo sapien
ttgtggactgaatgtaggcattcat

SEQ ID NO: 4176489 - DNA, 25 bp, Homo sapien
tgtaggcattcatcagatgctagtt

SEQ ID NO: 4176490 - DNA, 25 bp, Homo sapien
cagttcttcaaaggagcatcatata

SEQ ID NO: 4176491 - DNA, 25 bp, Homo sapien
gactcagccagtcttaactttatgg

SEQ ID NO: 4176492 - DNA, 25 bp, Homo sapien
tacgtaatatcagacaaacatagct

SEQ ID NO: 4176493 - DNA, 25 bp, Homo sapien
gaaaaatggagcctagcctagactc

SEQ ID NO: 4176494 - DNA, 25 bp, Homo sapien
gacttaaatggctcccttggtagca

SEQ ID NO: 4176495 - DNA, 25 bp, Homo sapien
tcttgaattccggagctccggcgat

SEQ ID NO: 4176496 - DNA, 25 bp, Homo sapien
gctgtagcagctcaagacttaaatg

SEQ ID NO: 4176497 - DNA, 25 bp, Homo sapien
tcatgcccgacgagcagcttataag

SEQ ID NO: 4176498 - DNA, 25 bp, Homo sapien
ggttacttgtagaacttgagcccaa

SEQ ID NO: 4176499 - DNA, 25 bp, Homo sapien
tcaagtaagtaccaatcaggcagca

SEQ ID NO: 4176500 - DNA, 25 bp, Homo sapien
cacaaatgcaacttctggaggatca

SEQ ID NO: 4176501 - DNA, 25 bp, Homo sapien
taggcatagtcgaggcttgaggcaa

SEQ ID NO: 4176502 - DNA, 25 bp, Homo sapien
gctggttcccccaataggctacacg

SEQ ID NO: 4176503 - DNA, 25 bp, Homo sapien
ttacatctgtagaagttgtctgctg

SEQ ID NO: 4176504 - DNA, 25 bp, Homo sapien
ccccagaggtggagtgtatagagat

SEQ ID NO: 4176505 - DNA, 25 bp, Homo sapien
acgtttacatctgtagaagttgtct

SEQ ID NO: 4176506 - DNA, 25 bp, Homo sapien
gtgctgtgttgaatacgagtgctga

SEQ ID NO: 4176507 - DNA, 25 bp, Homo sapien
gccctttgtcataggaatgcttgtg

SEQ ID NO: 4176508 - DNA, 25 bp, Homo sapien
tagccctttgtcataggaatgcttg

SEQ ID NO: 4176509 - DNA, 25 bp, Homo sapien
cttccagtgctgtgttgaatacgag

SEQ ID NO: 4176510 - DNA, 25 bp, Homo sapien
ttctgttgcataaattatctcttca

SEQ ID NO: 4176511 - DNA, 25 bp, Homo sapien
tcagcatcctcgccaatatgttatc

SEQ ID NO: 4176512 - DNA, 25 bp, Homo sapien
tctttttgagaaatgactaagttct

SEQ ID NO: 4176513 - DNA, 25 bp, Homo sapien
aggtaatacctcattatggcttcaa

SEQ ID NO: 4176514 - DNA, 25 bp, Homo sapien
caatatactgttatgaactatagtc

SEQ ID NO: 4176515 - DNA, 25 bp, Homo sapien
ctggctaatctgttgtcttaacagt

SEQ ID NO: 4176516 - DNA, 25 bp, Homo sapien
ctaatctgttgtcttaacagtcttc

SEQ ID NO: 4176517 - DNA, 25 bp, Homo sapien
ggctaatctgttgtcttaacagtct

SEQ ID NO: 4176518 - DNA, 25 bp, Homo sapien
ggattacaagtgccttctatcatgc

SEQ ID NO: 4176519 - DNA, 25 bp, Homo sapien
catagcagataagtagaaccaagat

SEQ ID NO: 4176520 - DNA, 25 bp, Homo sapien
tgataaaagttgtactggcacgctg

SEQ ID NO: 4176521 - DNA, 25 bp, Homo sapien
tggcacgctgtgacacaaatcttgt

SEQ ID NO: 4176522 - DNA, 25 bp, Homo sapien
caggattgtgcagcattaggtccac

SEQ ID NO: 4176523 - DNA, 25 bp, Homo sapien
gcgcactgcgaacgccggctgagct

SEQ ID NO: 4176524 - DNA, 25 bp, Homo sapien
tgctcggtgcgaggcggcggagagc

SEQ ID NO: 4176525 - DNA, 25 bp, Homo sapien
gctgagctgagtctcgctgctcggt

SEQ ID NO: 4176526 - DNA, 25 bp, Homo sapien
cagcctctgcgacaagcgccggagg

SEQ ID NO: 4176527 - DNA, 25 bp, Homo sapien
tgccatggtctgcaaacctccttct

SEQ ID NO: 4176528 - DNA, 25 bp, Homo sapien
ccatggtctgcaaacctccttctta

SEQ ID NO: 4176529 - DNA, 25 bp, Homo sapien
ttgccatggtctgcaaacctccttc

SEQ ID NO: 4176530 - DNA, 25 bp, Homo sapien
ctttgccatggtctgcaaacctcct

SEQ ID NO: 4176531 - DNA, 25 bp, Homo sapien
gcaggctgcgctcaagttctagaag

SEQ ID NO: 4176532 - DNA, 25 bp, Homo sapien
tagttttctccataggcagttcgca

SEQ ID NO: 4176533 - DNA, 25 bp, Homo sapien
gaccaggagtctacgcacagtttat

SEQ ID NO: 4176534 - DNA, 25 bp, Homo sapien
tctagaagccgtctgcagttccctg

SEQ ID NO: 4176535 - DNA, 25 bp, Homo sapien
cccttcagatgggaagagtagccag

SEQ ID NO: 4176536 - DNA, 25 bp, Homo sapien
tagagaatgctgactagctgggtca

SEQ ID NO: 4176537 - DNA, 25 bp, Homo sapien
tttgtttggcagaataatgtcctcc

SEQ ID NO: 4176538 - DNA, 25 bp, Homo sapien
tctgcagaagtagttaaggttaccc

SEQ ID NO: 4176539 - DNA, 25 bp, Homo sapien
tgatgccggacaagacagatgtctt

SEQ ID NO: 4176540 - DNA, 25 bp, Homo sapien
caaatatatattgaccaccagatat

SEQ ID NO: 4176541 - DNA, 25 bp, Homo sapien
tttcagtcactttgtgggtcccagg

SEQ ID NO: 4176542 - DNA, 25 bp, Homo sapien
ggtcccaggatatgatgccggacaa

SEQ ID NO: 4176543 - DNA, 25 bp, Homo sapien
tttctagtatataacgcaggccttt

SEQ ID NO: 4176544 - DNA, 25 bp, Homo sapien
ctttgtctgattaactggctctgaa

SEQ ID NO: 4176545 - DNA, 25 bp, Homo sapien
gattttagattttccagagaatatt

SEQ ID NO: 4176546 - DNA, 25 bp, Homo sapien
ccttcctcttgcagttgttctttaa

SEQ ID NO: 4176547 - DNA, 25 bp, Homo sapien
tgtggccggtctaaattgaaagatg

SEQ ID NO: 4176548 - DNA, 25 bp, Homo sapien
cgctagctacatgcggctattgagc

SEQ ID NO: 4176549 - DNA, 25 bp, Homo sapien
gaaatgtggccggtctaaattgaaa

SEQ ID NO: 4176550 - DNA, 25 bp, Homo sapien
cactgttcaatattgtagccgctag

SEQ ID NO: 4176551 - DNA, 25 bp, Homo sapien
ggcaggtgaagtgcataacatctta

SEQ ID NO: 4176552 - DNA, 25 bp, Homo sapien
gaattaggtatcatttggcaggtga

SEQ ID NO: 4176553 - DNA, 25 bp, Homo sapien
tcaacatatgtagcatgatccttgc

SEQ ID NO: 4176554 - DNA, 25 bp, Homo sapien
ggctttagttctctccaaaagagga

SEQ ID NO: 4176555 - DNA, 25 bp, Homo sapien
ctttagtttagcacaagcagggcat

SEQ ID NO: 4176556 - DNA, 25 bp, Homo sapien
aatgcacggttatattttgtctcgg

SEQ ID NO: 4176557 - DNA, 25 bp, Homo sapien
tatcagccctgcttatgactctctg

SEQ ID NO: 4176558 - DNA, 25 bp, Homo sapien
ggagactttgatgacaatggctatc

SEQ ID NO: 4176559 - DNA, 25 bp, Homo sapien
gaatgtgatctcaagtttcgatggg

SEQ ID NO: 4176560 - DNA, 25 bp, Homo sapien
cacaggtggagctctaagtcatagt

SEQ ID NO: 4176561 - DNA, 25 bp, Homo sapien
tacacagaatataactctgccaggg

SEQ ID NO: 4176562 - DNA, 25 bp, Homo sapien
tgacaagagtggagtatagtggacc

SEQ ID NO: 4176563 - DNA, 25 bp, Homo sapien
tttttgagtgtacactatgcaacac

SEQ ID NO: 4176564 - DNA, 25 bp, Homo sapien
tttttaaaataggctggtcatggtg

SEQ ID NO: 4176565 - DNA, 25 bp, Homo sapien
ggattaagaatatgagccagatgca

SEQ ID NO: 4176566 - DNA, 25 bp, Homo sapien
gcaacactatgtagaaaccatcttg

SEQ ID NO: 4176567 - DNA, 25 bp, Homo sapien
agctgggcggtaaaggcgcggcccg

SEQ ID NO: 4176568 - DNA, 25 bp, Homo sapien
tccgggaggcagctgggcggtaaag

SEQ ID NO: 4176569 - DNA, 25 bp, Homo sapien
aagtttcagtttcgcttccctggag

SEQ ID NO: 4176570 - DNA, 25 bp, Homo sapien
gcggactgggcgcaaagtttcagtt

SEQ ID NO: 4176571 - DNA, 25 bp, Homo sapien
gggccggacttgtacacccgcacga

SEQ ID NO: 4176572 - DNA, 25 bp, Homo sapien
cttgtacacccgcacgaggagcggg

SEQ ID NO: 4176573 - DNA, 25 bp, Homo sapien
gccgcccgaggacttagagctctgg

SEQ ID NO: 4176574 - DNA, 25 bp, Homo sapien
cgtgttcctgggtgctgaccgtgca

SEQ ID NO: 4176575 - DNA, 25 bp, Homo sapien
ccaccgagtgttcactgtctcagtg

SEQ ID NO: 4176576 - DNA, 25 bp, Homo sapien
agacccgcaccaggcacatgtgagg

SEQ ID NO: 4176577 - DNA, 25 bp, Homo sapien
catggatggaacaatggaaccatta

SEQ ID NO: 4176578 - DNA, 25 bp, Homo sapien
gtctcttggcagtagggccccgtcc

SEQ ID NO: 4176579 - DNA, 25 bp, Homo sapien
tggagtgcaatggtaggacctcgtc

SEQ ID NO: 4176580 - DNA, 25 bp, Homo sapien
agtgcaatggtaggacctcgtctca

SEQ ID NO: 4176581 - DNA, 25 bp, Homo sapien
atggtaggacctcgtctcactgcaa

SEQ ID NO: 4176582 - DNA, 25 bp, Homo sapien
acccggcccagtctcccatttcaat

SEQ ID NO: 4176583 - DNA, 25 bp, Homo sapien
tgggcacaggtttttcgtcaacaag

SEQ ID NO: 4176584 - DNA, 25 bp, Homo sapien
cagtgggtaccaggaaaatgggcac

SEQ ID NO: 4176585 - DNA, 25 bp, Homo sapien
gacaggaatccacagcattaggaat

SEQ ID NO: 4176586 - DNA, 25 bp, Homo sapien
tgttgatgcatatcaccagacggtg

SEQ ID NO: 4176587 - DNA, 25 bp, Homo sapien
ataaaacctctcagcatgcaggcct

SEQ ID NO: 4176588 - DNA, 25 bp, Homo sapien
gaacaggaacaaataaaacctctca

SEQ ID NO: 4176589 - DNA, 25 bp, Homo sapien
gaacaaataaaacctctcagcatgc

SEQ ID NO: 4176590 - DNA, 25 bp, Homo sapien
aaaacctctcagcatgcaggcctac

SEQ ID NO: 4176591 - DNA, 25 bp, Homo sapien
tggagaacaggttacagttcaggtc

SEQ ID NO: 4176592 - DNA, 25 bp, Homo sapien
tttggagaacaggttacagttcagg

SEQ ID NO: 4176593 - DNA, 25 bp, Homo sapien
ctttggagaacaggttacagttcag

SEQ ID NO: 4176594 - DNA, 25 bp, Homo sapien
gagaacaggttacagttcaggtcag

SEQ ID NO: 4176595 - DNA, 25 bp, Homo sapien
ttctcaattccatcgtgaccttcca

SEQ ID NO: 4176596 - DNA, 25 bp, Homo sapien
ggcacagtgtggttatgtatgccct

SEQ ID NO: 4176597 - DNA, 25 bp, Homo sapien
agtgtggttatgtatgccctctgct

SEQ ID NO: 4176598 - DNA, 25 bp, Homo sapien
atttttctgatactagggcacagtg

SEQ ID NO: 4176599 - DNA, 25 bp, Homo sapien
gctgaaatgtcatcttgggtcccaa

SEQ ID NO: 4176600 - DNA, 25 bp, Homo sapien
tgggtcccaaggagagttaattcgc

SEQ ID NO: 4176601 - DNA, 25 bp, Homo sapien
catgaggcatgttgaaaggcatcga

SEQ ID NO: 4176602 - DNA, 25 bp, Homo sapien
ggaactgctcactcaaaaattgatg

SEQ ID NO: 4176603 - DNA, 25 bp, Homo sapien
gactcttgatttagcacaaagtgta

SEQ ID NO: 4176604 - DNA, 25 bp, Homo sapien
tttggcaaaccagtcaaagtcattg

SEQ ID NO: 4176605 - DNA, 25 bp, Homo sapien
gcacaaagtgtacatttggatgtct

SEQ ID NO: 4176606 - DNA, 25 bp, Homo sapien
tgcttcgcctttgcaaggtgatttg

SEQ ID NO: 4176607 - DNA, 25 bp, Homo sapien
tgctttggaatcatcgctatcaatg

SEQ ID NO: 4176608 - DNA, 25 bp, Homo sapien
gaatcatcgctatcaatgtccatcg

SEQ ID NO: 4176609 - DNA, 25 bp, Homo sapien
cggtgtttcatgaccctctttcaat

SEQ ID NO: 4176610 - DNA, 25 bp, Homo sapien
aatgtccatcggtgtttcatgaccc

SEQ ID NO: 4176611 - DNA, 25 bp, Homo sapien
gggcgcagaattcatgcttgcactt

SEQ ID NO: 4176612 - DNA, 25 bp, Homo sapien
gacagattggcttatatgacatggc

SEQ ID NO: 4176613 - DNA, 25 bp, Homo sapien
aaaggactcataacctggaagtgag

SEQ ID NO: 4176614 - DNA, 25 bp, Homo sapien
cataggaagtctggcatgtgggaca

SEQ ID NO: 4176615 - DNA, 25 bp, Homo sapien
tatgcctgctttcatagaataagta

SEQ ID NO: 4176616 - DNA, 25 bp, Homo sapien
ttgtatgcctgctttcatagaataa

SEQ ID NO: 4176617 - DNA, 25 bp, Homo sapien
gtatgcctgctttcatagaataagt

SEQ ID NO: 4176618 - DNA, 25 bp, Homo sapien
tgtatgcctgctttcatagaataag

SEQ ID NO: 4176619 - DNA, 25 bp, Homo sapien
gaaacccatggacttgagaaatact

SEQ ID NO: 4176620 - DNA, 25 bp, Homo sapien
cagcaaacattgtgacctttaccac

SEQ ID NO: 4176621 - DNA, 25 bp, Homo sapien
ttcagtcccttgcacatgaccctgg

SEQ ID NO: 4176622 - DNA, 25 bp, Homo sapien
cctggtaatcgtagcatagtggcaa

SEQ ID NO: 4176623 - DNA, 25 bp, Homo sapien
ccttccttccttattatcaggcaag

SEQ ID NO: 4176624 - DNA, 25 bp, Homo sapien
cgctgtattccagggtatctctttc

SEQ ID NO: 4176625 - DNA, 25 bp, Homo sapien
aggcaagtatgcagttcgctgtatt

SEQ ID NO: 4176626 - DNA, 25 bp, Homo sapien
tccttattatcaggcaagtatgcag

SEQ ID NO: 4176627 - DNA, 25 bp, Homo sapien
atatcattccaagtgatgacatctg

SEQ ID NO: 4176628 - DNA, 25 bp, Homo sapien
atttctggtcctccaaaccgggatg

SEQ ID NO: 4176629 - DNA, 25 bp, Homo sapien
ggtgaatatcattccaagtgatgac

SEQ ID NO: 4176630 - DNA, 25 bp, Homo sapien
tttgtggtgaatatcattccaagtg

SEQ ID NO: 4176631 - DNA, 25 bp, Homo sapien
tgagcagccattacatcccaaaagg

SEQ ID NO: 4176632 - DNA, 25 bp, Homo sapien
gagtctacttatatccacatccaga

SEQ ID NO: 4176633 - DNA, 25 bp, Homo sapien
gaaattgccgtatttcataatccct

SEQ ID NO: 4176634 - DNA, 25 bp, Homo sapien
aaacaccaattccactgctatagag

SEQ ID NO: 4176635 - DNA, 25 bp, Homo sapien
gacattccgagcatctagccttcag

SEQ ID NO: 4176636 - DNA, 25 bp, Homo sapien
ttacatttcgcatcaaagggcaggg

SEQ ID NO: 4176637 - DNA, 25 bp, Homo sapien
tattcatctcggattcaaaagcccc

SEQ ID NO: 4176638 - DNA, 25 bp, Homo sapien
tagcgagtgagcctagctgtctggc

SEQ ID NO: 4176639 - DNA, 25 bp, Homo sapien
cagctcctctttgacacgtttcagg

SEQ ID NO: 4176640 - DNA, 25 bp, Homo sapien
cctctttgacacgtttcaggtaaga

SEQ ID NO: 4176641 - DNA, 25 bp, Homo sapien
tcaggtaagaaggatcaggatagcc

SEQ ID NO: 4176642 - DNA, 25 bp, Homo sapien
gtaagaaggatcaggatagccatac

SEQ ID NO: 4176643 - DNA, 25 bp, Homo sapien
tttctacataaggatttagactggc

SEQ ID NO: 4176644 - DNA, 25 bp, Homo sapien
cagcgcgagcgacagagcagactcc

SEQ ID NO: 4176645 - DNA, 25 bp, Homo sapien
tgacagactagcagattgttattct

SEQ ID NO: 4176646 - DNA, 25 bp, Homo sapien
gactggcattaaatcagcctcctaa

SEQ ID NO: 4176647 - DNA, 25 bp, Homo sapien
ctctaaccccagtgatgacacaaga

SEQ ID NO: 4176648 - DNA, 25 bp, Homo sapien
ctaaccccagtgatgacacaagagg

SEQ ID NO: 4176649 - DNA, 25 bp, Homo sapien
tctaaccccagtgatgacacaagag

SEQ ID NO: 4176650 - DNA, 25 bp, Homo sapien
gaataaagggatcgcctcaggctgc

SEQ ID NO: 4176651 - DNA, 25 bp, Homo sapien
tggcttactagcaacctgagtcagg

SEQ ID NO: 4176652 - DNA, 25 bp, Homo sapien
aaagagatcaattggcagccgagag

SEQ ID NO: 4176653 - DNA, 25 bp, Homo sapien
ggcaagtgcacccaatatggcagtt

SEQ ID NO: 4176654 - DNA, 25 bp, Homo sapien
gaagtcaagagtagttaagttgtac

SEQ ID NO: 4176655 - DNA, 25 bp, Homo sapien
tctccatgcacatgttatacaactg

SEQ ID NO: 4176656 - DNA, 25 bp, Homo sapien
tgtactgtgatcatatttaggaagc

SEQ ID NO: 4176657 - DNA, 25 bp, Homo sapien
caaaatcaaccaaagatctccatgc

SEQ ID NO: 4176658 - DNA, 25 bp, Homo sapien
tggtgtgactgaaccctagggactt

SEQ ID NO: 4176659 - DNA, 25 bp, Homo sapien
tcgctaacggccatgctgctgagtt

SEQ ID NO: 4176660 - DNA, 25 bp, Homo sapien
gcaaagtggcatgagcaatcgctaa

SEQ ID NO: 4176661 - DNA, 25 bp, Homo sapien
cattgtgaagcagtaaccagggtga

SEQ ID NO: 4176662 - DNA, 25 bp, Homo sapien
ctcgagtttgcgaacagctgcctca

SEQ ID NO: 4176663 - DNA, 25 bp, Homo sapien
gcttccgtcaaagattgaggcctcg

SEQ ID NO: 4176664 - DNA, 25 bp, Homo sapien
ggcttgtgcctcgaacttcttttct

SEQ ID NO: 4176665 - DNA, 25 bp, Homo sapien
tttctctgaaaaccgcttccgtcaa

SEQ ID NO: 4176666 - DNA, 25 bp, Homo sapien
tcccgatctcgtccggctctggaag

SEQ ID NO: 4176667 - DNA, 25 bp, Homo sapien
gaagtaacacctgcaactccgtgca

SEQ ID NO: 4176668 - DNA, 25 bp, Homo sapien
gcaactccgtgcataagttctctgg

SEQ ID NO: 4176669 - DNA, 25 bp, Homo sapien
gaagagcgccgggaggccttccgcg

SEQ ID NO: 4176670 - DNA, 25 bp, Homo sapien
gcgtggcgtggggtctctgcgcccg

SEQ ID NO: 4176671 - DNA, 25 bp, Homo sapien
gctgctgggtcttgcgggccccagg

SEQ ID NO: 4176672 - DNA, 25 bp, Homo sapien
ggcgtggggtctctgcgcccgctcg

SEQ ID NO: 4176673 - DNA, 25 bp, Homo sapien
ctgggtcttgcgggccccaggctca

SEQ ID NO: 4176674 - DNA, 25 bp, Homo sapien
gaaatacccgaaccacatatgaaag

SEQ ID NO: 4176675 - DNA, 25 bp, Homo sapien
gaagcactctctaggaagactagcc

SEQ ID NO: 4176676 - DNA, 25 bp, Homo sapien
tcaagttactgggacagtgacgacc

SEQ ID NO: 4176677 - DNA, 25 bp, Homo sapien
tctaaagcagatgaataaacgggtc

SEQ ID NO: 4176678 - DNA, 25 bp, Homo sapien
tcattgggcatctgggttgattcca

SEQ ID NO: 4176679 - DNA, 25 bp, Homo sapien
ttcagtctatcatcattgggcatct

SEQ ID NO: 4176680 - DNA, 25 bp, Homo sapien
tattcagtctatcatcattgggcat

SEQ ID NO: 4176681 - DNA, 25 bp, Homo sapien
cagtctatcatcattgggcatctgg

SEQ ID NO: 4176682 - DNA, 25 bp, Homo sapien
ctacgttgcctaccctgaatacaca

SEQ ID NO: 4176683 - DNA, 25 bp, Homo sapien
cctacgttgcctaccctgaatacac

SEQ ID NO: 4176684 - DNA, 25 bp, Homo sapien
acgttgcctaccctgaatacacagc

SEQ ID NO: 4176685 - DNA, 25 bp, Homo sapien
tacgttgcctaccctgaatacacag

SEQ ID NO: 4176686 - DNA, 25 bp, Homo sapien
cacaaacattaataaatgtgttgac

SEQ ID NO: 4176687 - DNA, 25 bp, Homo sapien
atcacaaacattaataaatgtgttg

SEQ ID NO: 4176688 - DNA, 25 bp, Homo sapien
ggtgtccatcacaaacattaataaa

SEQ ID NO: 4176689 - DNA, 25 bp, Homo sapien
caaacattaataaatgtgttgacat

SEQ ID NO: 4176690 - DNA, 25 bp, Homo sapien
ccaaaggttctgaggaaatctgaag

SEQ ID NO: 4176691 - DNA, 25 bp, Homo sapien
catattttcaatcttaatggttgtt

SEQ ID NO: 4176692 - DNA, 25 bp, Homo sapien
taatggttgttgtctgttccaaagg

SEQ ID NO: 4176693 - DNA, 25 bp, Homo sapien
aggttctgaggaaatctgaagttgc

SEQ ID NO: 4176694 - DNA, 25 bp, Homo sapien
ttgaagaaaattgttatgtaattac

SEQ ID NO: 4176695 - DNA, 25 bp, Homo sapien
tctcttccatttttgggatttttga

SEQ ID NO: 4176696 - DNA, 25 bp, Homo sapien
gatttttgaagaaaattgttatgta

SEQ ID NO: 4176697 - DNA, 25 bp, Homo sapien
cagggctgaaccctcctctgggaaa

SEQ ID NO: 4176698 - DNA, 25 bp, Homo sapien
ttctgatcaggtgatgcattttagg

SEQ ID NO: 4176699 - DNA, 25 bp, Homo sapien
cctgtgatttgtcattctgatcagg

SEQ ID NO: 4176700 - DNA, 25 bp, Homo sapien
cccttgatacaaggctgtggccaaa

SEQ ID NO: 4176701 - DNA, 25 bp, Homo sapien
ttccatatgcgaggatccagggcca

SEQ ID NO: 4176702 - DNA, 25 bp, Homo sapien
ctgattgaaagacaatctttcttgc

SEQ ID NO: 4176703 - DNA, 25 bp, Homo sapien
ctttcttgctgaacttgttgtctct

SEQ ID NO: 4176704 - DNA, 25 bp, Homo sapien
ttggtttggattgaagctacaacat

SEQ ID NO: 4176705 - DNA, 25 bp, Homo sapien
ttggattgaagctacaacattcctg

SEQ ID NO: 4176706 - DNA, 25 bp, Homo sapien
ccattattccagtatggagccacag

SEQ ID NO: 4176707 - DNA, 25 bp, Homo sapien
cagtccagattgcagccgcttgtca

SEQ ID NO: 4176708 - DNA, 25 bp, Homo sapien
aagattcatgggaacgctgttgaca

SEQ ID NO: 4176709 - DNA, 25 bp, Homo sapien
caaaaatgcccgagatagtggtcct

SEQ ID NO: 4176710 - DNA, 25 bp, Homo sapien
caaaaacagctttgggaaactgcaa

SEQ ID NO: 4176711 - DNA, 25 bp, Homo sapien
gcaaacttcctgttccaatcatggg

SEQ ID NO: 4176712 - DNA, 25 bp, Homo sapien
tcttgtaaagggctagttatcggcc

SEQ ID NO: 4176713 - DNA, 25 bp, Homo sapien
tatataccagaaagtggacttcttg

SEQ ID NO: 4176714 - DNA, 25 bp, Homo sapien
atgcttcatctcttaggtccagcca

SEQ ID NO: 4176715 - DNA, 25 bp, Homo sapien
agtatgcttcatctcttaggtccag

SEQ ID NO: 4176716 - DNA, 25 bp, Homo sapien
gtatgcttcatctcttaggtccagc

SEQ ID NO: 4176717 - DNA, 25 bp, Homo sapien
tatgcttcatctcttaggtccagcc

SEQ ID NO: 4176718 - DNA, 25 bp, Homo sapien
gatcatcagatatcaaagagttgat

SEQ ID NO: 4176719 - DNA, 25 bp, Homo sapien
tcatcagatatcaaagagttgataa

SEQ ID NO: 4176720 - DNA, 25 bp, Homo sapien
tgatcatcagatatcaaagagttga

SEQ ID NO: 4176721 - DNA, 25 bp, Homo sapien
atcatcagatatcaaagagttgata

SEQ ID NO: 4176722 - DNA, 25 bp, Homo sapien
tactgactacaacaatattgtgtaa

SEQ ID NO: 4176723 - DNA, 25 bp, Homo sapien
acagttactgactacaacaatattg

SEQ ID NO: 4176724 - DNA, 25 bp, Homo sapien
gttactgactacaacaatattgtgt

SEQ ID NO: 4176725 - DNA, 25 bp, Homo sapien
cagttactgactacaacaatattgt

SEQ ID NO: 4176726 - DNA, 25 bp, Homo sapien
ggaatcctggccttgttgggattta

SEQ ID NO: 4176727 - DNA, 25 bp, Homo sapien
gaccagttagtgaattcatctaaaa

SEQ ID NO: 4176728 - DNA, 25 bp, Homo sapien
gccttgttgggatttattcttgacc

SEQ ID NO: 4176729 - DNA, 25 bp, Homo sapien
tattcttgaccagttagtgaattca

SEQ ID NO: 4176730 - DNA, 25 bp, Homo sapien
taattgcaccgattttcatttcata

SEQ ID NO: 4176731 - DNA, 25 bp, Homo sapien
catatgctgtgaaacaaggcttaga

SEQ ID NO: 4176732 - DNA, 25 bp, Homo sapien
tgaaaagtaattgcaccgattttca

SEQ ID NO: 4176733 - DNA, 25 bp, Homo sapien
acaaggcttagagacagtcccgacc

SEQ ID NO: 4176734 - DNA, 25 bp, Homo sapien
tgctgttgagtttacaataacatct

SEQ ID NO: 4176735 - DNA, 25 bp, Homo sapien
cagtggctatatctccagtagcaac

SEQ ID NO: 4176736 - DNA, 25 bp, Homo sapien
ccgattaaatgtccttgctgttgag

SEQ ID NO: 4176737 - DNA, 25 bp, Homo sapien
acaataacatctacctgttcagtgg

SEQ ID NO: 4176738 - DNA, 25 bp, Homo sapien
gtacagcacattcactttccacagc

SEQ ID NO: 4176739 - DNA, 25 bp, Homo sapien
agcttgtccagcaccttctaaaata

SEQ ID NO: 4176740 - DNA, 25 bp, Homo sapien
tgtccagcaccttctaaaatagctc

SEQ ID NO: 4176741 - DNA, 25 bp, Homo sapien
ctagtacagcacattcactttccac

SEQ ID NO: 4176742 - DNA, 25 bp, Homo sapien
ggtgtaattataaaatctctgtgag

SEQ ID NO: 4176743 - DNA, 25 bp, Homo sapien
tagaacactggtgaccgttttcctg

SEQ ID NO: 4176744 - DNA, 25 bp, Homo sapien
actttaagcatccacctggtgtaat

SEQ ID NO: 4176745 - DNA, 25 bp, Homo sapien
ctggtgaccgttttcctgacatctt

SEQ ID NO: 4176746 - DNA, 25 bp, Homo sapien
ggctggaagggaaaccgatgtgtac

SEQ ID NO: 4176747 - DNA, 25 bp, Homo sapien
ttccaatggctggaagggaaaccga

SEQ ID NO: 4176748 - DNA, 25 bp, Homo sapien
ctgttccaatggctggaagggaaac

SEQ ID NO: 4176749 - DNA, 25 bp, Homo sapien
caatggctggaagggaaaccgatgt

SEQ ID NO: 4176750 - DNA, 25 bp, Homo sapien
ggaaacgagaaagcccaggagctca

SEQ ID NO: 4176751 - DNA, 25 bp, Homo sapien
gcagctgggagcgtcatggcaccac

SEQ ID NO: 4176752 - DNA, 25 bp, Homo sapien
caacaaagcaaggatggcaggccag

SEQ ID NO: 4176753 - DNA, 25 bp, Homo sapien
ggcaccaccaaaggaggaaacgaga

SEQ ID NO: 4176754 - DNA, 25 bp, Homo sapien
tggaagaagattcagcaggacttgc

SEQ ID NO: 4176755 - DNA, 25 bp, Homo sapien
tatatttagcagctcaggttgaaaa

SEQ ID NO: 4176756 - DNA, 25 bp, Homo sapien
caatagcatcgattatgttatcagc

SEQ ID NO: 4176757 - DNA, 25 bp, Homo sapien
tgttatcagcaactgtgatagggtt

SEQ ID NO: 4176758 - DNA, 25 bp, Homo sapien
tgtagtcatggagaatgtggactga

SEQ ID NO: 4176759 - DNA, 25 bp, Homo sapien
tttgcctctcaggaaaataatcagt

SEQ ID NO: 4176760 - DNA, 25 bp, Homo sapien
tcagttgacaggaggttgcattctc

SEQ ID NO: 4176761 - DNA, 25 bp, Homo sapien
cccatggatcataagaagttgtctg

SEQ ID NO: 4176762 - DNA, 25 bp, Homo sapien
taccattcctatttcccaggcatga

SEQ ID NO: 4176763 - DNA, 25 bp, Homo sapien
tccagggtaagttctcgtgacacag

SEQ ID NO: 4176764 - DNA, 25 bp, Homo sapien
gcaagtccatccagggtaagttctc

SEQ ID NO: 4176765 - DNA, 25 bp, Homo sapien
gacacagggaggcatctaaccctaa

SEQ ID NO: 4176766 - DNA, 25 bp, Homo sapien
cctaatcagtaagctcttttcaaac

SEQ ID NO: 4176767 - DNA, 25 bp, Homo sapien
tggaccatgcaaaacagctgatgat

SEQ ID NO: 4176768 - DNA, 25 bp, Homo sapien
tattgcgtaggaagaacaagttcgg

SEQ ID NO: 4176769 - DNA, 25 bp, Homo sapien
atattctgattgtcctggctctagc

SEQ ID NO: 4176770 - DNA, 25 bp, Homo sapien
tcatgtcagtccagtgttcaggaag

SEQ ID NO: 4176771 - DNA, 25 bp, Homo sapien
ttcccagcacaacttctattaaagc

SEQ ID NO: 4176772 - DNA, 25 bp, Homo sapien
taaagccgtgctgattgacatatgg

SEQ ID NO: 4176773 - DNA, 25 bp, Homo sapien
gtctctcattattcttatggtcatt

SEQ ID NO: 4176774 - DNA, 25 bp, Homo sapien
tggtcattcttgatatccatttgcc

SEQ ID NO: 4176775 - DNA, 25 bp, Homo sapien
taactggcatccacagcaaaatagg

SEQ ID NO: 4176776 - DNA, 25 bp, Homo sapien
gctgtctggcttggagtaggtgtcc

SEQ ID NO: 4176777 - DNA, 25 bp, Homo sapien
taggttccttttccataggatacag

SEQ ID NO: 4176778 - DNA, 25 bp, Homo sapien
ccttggcagaataactggcatccac

SEQ ID NO: 4176779 - DNA, 25 bp, Homo sapien
caaatagctttggagatcgtgtatt

SEQ ID NO: 4176780 - DNA, 25 bp, Homo sapien
cgtgtattgtttgtcactgagtcaa

SEQ ID NO: 4176781 - DNA, 25 bp, Homo sapien
ttgtgaagactccagtaagtactcg

SEQ ID NO: 4176782 - DNA, 25 bp, Homo sapien
gggtgactaatcctgcacgtccctt

SEQ ID NO: 4176783 - DNA, 25 bp, Homo sapien
tatgagatattctgggtaagcctga

SEQ ID NO: 4176784 - DNA, 25 bp, Homo sapien
ttaagccgtgaaagttatgagatat

SEQ ID NO: 4176785 - DNA, 25 bp, Homo sapien
gccgtgaaagttatgagatattctg

SEQ ID NO: 4176786 - DNA, 25 bp, Homo sapien
tctgggtaagcctgattatcaaaga

SEQ ID NO: 4176787 - DNA, 25 bp, Homo sapien
gatagatgcataacggtagccgctc

SEQ ID NO: 4176788 - DNA, 25 bp, Homo sapien
gaattcctgacccataaagactgtg

SEQ ID NO: 4176789 - DNA, 25 bp, Homo sapien
taattaacactgtcccacggcggaa

SEQ ID NO: 4176790 - DNA, 25 bp, Homo sapien
gagagaccctagcagaatgatccag

SEQ ID NO: 4176791 - DNA, 25 bp, Homo sapien
gcctttcaaagtgagatggcttctc

SEQ ID NO: 4176792 - DNA, 25 bp, Homo sapien
cagttccttcgtactgccccacttc

SEQ ID NO: 4176793 - DNA, 25 bp, Homo sapien
ggaagagccagccccatgcttttcc

SEQ ID NO: 4176794 - DNA, 25 bp, Homo sapien
tctccagttccttcgtactgcccca

SEQ ID NO: 4176795 - DNA, 25 bp, Homo sapien
cgttataaaatgtacaatccatacc

SEQ ID NO: 4176796 - DNA, 25 bp, Homo sapien
gttataaaatgtacaatccatacca

SEQ ID NO: 4176797 - DNA, 25 bp, Homo sapien
ttataaaatgtacaatccataccat

SEQ ID NO: 4176798 - DNA, 25 bp, Homo sapien
ctaaacagcttccatctttctccat

SEQ ID NO: 4176799 - DNA, 25 bp, Homo sapien
gagaagagaataaaacgaagtctct

SEQ ID NO: 4176800 - DNA, 25 bp, Homo sapien
aatgtggatgaaaaactggacagac

SEQ ID NO: 4176801 - DNA, 25 bp, Homo sapien
tcaatgtggatgaaaaactggacag

SEQ ID NO: 4176802 - DNA, 25 bp, Homo sapien
aaaacgaagtctctcaccccagtca

SEQ ID NO: 4176803 - DNA, 25 bp, Homo sapien
ttgcagttgcatggttgtgtgctca

SEQ ID NO: 4176804 - DNA, 25 bp, Homo sapien
gggtactcagagtaaagagcacacg

SEQ ID NO: 4176805 - DNA, 25 bp, Homo sapien
cacacggggtatctgttgcagttgc

SEQ ID NO: 4176806 - DNA, 25 bp, Homo sapien
gtactcagagtaaagagcacacggg

SEQ ID NO: 4176807 - DNA, 25 bp, Homo sapien
gatacatagctacttcctccaccag

SEQ ID NO: 4176808 - DNA, 25 bp, Homo sapien
gtttggatacatagctacttcctcc

SEQ ID NO: 4176809 - DNA, 25 bp, Homo sapien
tggtttggatacatagctacttcct

SEQ ID NO: 4176810 - DNA, 25 bp, Homo sapien
ttggatacatagctacttcctccac

SEQ ID NO: 4176811 - DNA, 25 bp, Homo sapien
ctagcagcccgtggagcagtgggaa

SEQ ID NO: 4176812 - DNA, 25 bp, Homo sapien
gatggaacggtcaactgggggcgcc

SEQ ID NO: 4176813 - DNA, 25 bp, Homo sapien
gtgggaaggatggaacggtcaactg

SEQ ID NO: 4176814 - DNA, 25 bp, Homo sapien
aggatggaacggtcaactgggggcg

SEQ ID NO: 4176815 - DNA, 25 bp, Homo sapien
gtgtagggtggcgatttgggaagac

SEQ ID NO: 4176816 - DNA, 25 bp, Homo sapien
gcagtgtagggtggcgatttgggaa

SEQ ID NO: 4176817 - DNA, 25 bp, Homo sapien
ctagaaaagcagtgtagggtggcga

SEQ ID NO: 4176818 - DNA, 25 bp, Homo sapien
aaaagcagtgtagggtggcgatttg

SEQ ID NO: 4176819 - DNA, 25 bp, Homo sapien
ttcacgtggtaaacacactgcactg

SEQ ID NO: 4176820 - DNA, 25 bp, Homo sapien
tgctgggttcacgtggtaaacacac

SEQ ID NO: 4176821 - DNA, 25 bp, Homo sapien
taattccttaattgactcttctgtc

SEQ ID NO: 4176822 - DNA, 25 bp, Homo sapien
tctgtcacgtcatagggtaggttcc

SEQ ID NO: 4176823 - DNA, 25 bp, Homo sapien
tccaagctgtctgtgacaggacgag

SEQ ID NO: 4176824 - DNA, 25 bp, Homo sapien
tcttctaggcgagtagtcatccaag

SEQ ID NO: 4176825 - DNA, 25 bp, Homo sapien
tgtcaaaatcccgatttctctcatg

SEQ ID NO: 4176826 - DNA, 25 bp, Homo sapien
aaaatcccgatttctctcatggcca

SEQ ID NO: 4176827 - DNA, 25 bp, Homo sapien
ccagcgtgggccatcctgatacccc

SEQ ID NO: 4176828 - DNA, 25 bp, Homo sapien
tcatagcaatcctggccgccatatc

SEQ ID NO: 4176829 - DNA, 25 bp, Homo sapien
aatcctggccgccatatcgatccat

SEQ ID NO: 4176830 - DNA, 25 bp, Homo sapien
agcgtgggccatcctgatacccctc

SEQ ID NO: 4176831 - DNA, 25 bp, Homo sapien
gtcattatccctgcggtacccacta

SEQ ID NO: 4176832 - DNA, 25 bp, Homo sapien
cgtctgttgtatcggtcttcagagc

SEQ ID NO: 4176833 - DNA, 25 bp, Homo sapien
tagtcattatccctgcggtacccac

SEQ ID NO: 4176834 - DNA, 25 bp, Homo sapien
tgttgtatcggtcttcagagcggtc

SEQ ID NO: 4176835 - DNA, 25 bp, Homo sapien
atcatcccaagtgtaatcatctctg

SEQ ID NO: 4176836 - DNA, 25 bp, Homo sapien
taatcatcccaagtgtaatcatctc

SEQ ID NO: 4176837 - DNA, 25 bp, Homo sapien
tataatcatcccaagtgtaatcatc

SEQ ID NO: 4176838 - DNA, 25 bp, Homo sapien
catcccaagtgtaatcatctctgga

SEQ ID NO: 4176839 - DNA, 25 bp, Homo sapien
ttgggtctttgcggggacctctatc

SEQ ID NO: 4176840 - DNA, 25 bp, Homo sapien
tttgcggggacctctatcatcacac

SEQ ID NO: 4176841 - DNA, 25 bp, Homo sapien
gggtctttgcggggacctctatcat

SEQ ID NO: 4176842 - DNA, 25 bp, Homo sapien
tctttgcggggacctctatcatcac

SEQ ID NO: 4176843 - DNA, 25 bp, Homo sapien
gcgaccgttccattcttgagtttct

SEQ ID NO: 4176844 - DNA, 25 bp, Homo sapien
cttcctgtccgcgaccgttccattc

SEQ ID NO: 4176845 - DNA, 25 bp, Homo sapien
ctgtccgcgaccgttccattcttga

SEQ ID NO: 4176846 - DNA, 25 bp, Homo sapien
tgggtatggcggaggtctcagtctg

SEQ ID NO: 4176847 - DNA, 25 bp, Homo sapien
tggcattacctttgggtctggtagg

SEQ ID NO: 4176848 - DNA, 25 bp, Homo sapien
ggcattacctttgggtctggtagga

SEQ ID NO: 4176849 - DNA, 25 bp, Homo sapien
gcattacctttgggtctggtaggat

SEQ ID NO: 4176850 - DNA, 25 bp, Homo sapien
tggagcaggagcgttagaacttcac

SEQ ID NO: 4176851 - DNA, 25 bp, Homo sapien
atggagcaggagcgttagaacttca

SEQ ID NO: 4176852 - DNA, 25 bp, Homo sapien
ttttgggactttcatcccatccact

SEQ ID NO: 4176853 - DNA, 25 bp, Homo sapien
tgggactttcatcccatccacttta

SEQ ID NO: 4176854 - DNA, 25 bp, Homo sapien
cctcagatgatcgagctggagctac

SEQ ID NO: 4176855 - DNA, 25 bp, Homo sapien
cagtttgaccttttgggactttcat

SEQ ID NO: 4176856 - DNA, 25 bp, Homo sapien
aagacgggaggacaagcgccctcag

SEQ ID NO: 4176857 - DNA, 25 bp, Homo sapien
tctggacccccgcatgcggaagacg

SEQ ID NO: 4176858 - DNA, 25 bp, Homo sapien
ccgcatgcggaagacgggaggacaa

SEQ ID NO: 4176859 - DNA, 25 bp, Homo sapien
acgggaggacaagcgccctcagcca

SEQ ID NO: 4176860 - DNA, 25 bp, Homo sapien
gccaactccgggccgctaactttga

SEQ ID NO: 4176861 - DNA, 25 bp, Homo sapien
gggccgctaactttgactctttcgc

SEQ ID NO: 4176862 - DNA, 25 bp, Homo sapien
cagctccgctctccgccggactgca

SEQ ID NO: 4176863 - DNA, 25 bp, Homo sapien
gactctttcgctttcgtttcctgga

SEQ ID NO: 4176864 - DNA, 25 bp, Homo sapien
gagccctcgaccagcagcgggaagg

SEQ ID NO: 4176865 - DNA, 25 bp, Homo sapien
tggaagtacatctgcaacttggtgt

SEQ ID NO: 4176866 - DNA, 25 bp, Homo sapien
ctcttcgggctctggaagtacatct

SEQ ID NO: 4176867 - DNA, 25 bp, Homo sapien
caacttggtgttcaagttcttcggg

SEQ ID NO: 4176868 - DNA, 25 bp, Homo sapien
tcctgggatcctggcggacctcaca

SEQ ID NO: 4176869 - DNA, 25 bp, Homo sapien
gggctcctgggatcctggcggacct

SEQ ID NO: 4176870 - DNA, 25 bp, Homo sapien
gggatcctggcggacctcacactcg

SEQ ID NO: 4176871 - DNA, 25 bp, Homo sapien
gctcctgggatcctggcggacctca

SEQ ID NO: 4176872 - DNA, 25 bp, Homo sapien
gagggagggcagaggtgccccctcc

SEQ ID NO: 4176873 - DNA, 25 bp, Homo sapien
ctcaccccacccctcgcgcccctca

SEQ ID NO: 4176874 - DNA, 25 bp, Homo sapien
gcagaggtgccccctcctcacccca

SEQ ID NO: 4176875 - DNA, 25 bp, Homo sapien
tcaccccacccctcgcgcccctcac

SEQ ID NO: 4176876 - DNA, 25 bp, Homo sapien
ggcgggtcaccctcccgtgcgtgcc

SEQ ID NO: 4176877 - DNA, 25 bp, Homo sapien
gcgggtcaccctcccgtgcgtgccc

SEQ ID NO: 4176878 - DNA, 25 bp, Homo sapien
cgggcgggtcaccctcccgtgcgtg

SEQ ID NO: 4176879 - DNA, 25 bp, Homo sapien
ggtcaccctcccgtgcgtgccctgc

SEQ ID NO: 4176880 - DNA, 25 bp, Homo sapien
ggtgcgctcggaatccattctgccg

SEQ ID NO: 4176881 - DNA, 25 bp, Homo sapien
gcagcgccccgggtgcgctcggaat

SEQ ID NO: 4176882 - DNA, 25 bp, Homo sapien
cgggtgcgctcggaatccattctgc

SEQ ID NO: 4176883 - DNA, 25 bp, Homo sapien
gccccgggtgcgctcggaatccatt

SEQ ID NO: 4176884 - DNA, 25 bp, Homo sapien
gaaagacagaaaacgatcgagggat

SEQ ID NO: 4176885 - DNA, 25 bp, Homo sapien
ctacgttgacattcaggcagtgtga

SEQ ID NO: 4176886 - DNA, 25 bp, Homo sapien
tgattttaggtagcgcctctgcccc

SEQ ID NO: 4176887 - DNA, 25 bp, Homo sapien
gataagaggatagactcacttccac

SEQ ID NO: 4176888 - DNA, 25 bp, Homo sapien
cctccaatgtggccgctgtgacggc

SEQ ID NO: 4176889 - DNA, 25 bp, Homo sapien
ccctccaatgtggccgctgtgacgg

SEQ ID NO: 4176890 - DNA, 25 bp, Homo sapien
gcccctccaatgtggccgctgtgac

SEQ ID NO: 4176891 - DNA, 25 bp, Homo sapien
ctccaatgtggccgctgtgacggct

SEQ ID NO: 4176892 - DNA, 25 bp, Homo sapien
tagagactcggagaagaggccccgg

SEQ ID NO: 4176893 - DNA, 25 bp, Homo sapien
tcagaatatcatccttgctcccaat

SEQ ID NO: 4176894 - DNA, 25 bp, Homo sapien
tcacttcagaatatcatccttgctc

SEQ ID NO: 4176895 - DNA, 25 bp, Homo sapien
atccttgctcccaatctgagggcca

SEQ ID NO: 4176896 - DNA, 25 bp, Homo sapien
tatcatccttgctcccaatctgagg

SEQ ID NO: 4176897 - DNA, 25 bp, Homo sapien
gggccggtcaaggatggaagcccag

SEQ ID NO: 4176898 - DNA, 25 bp, Homo sapien
aaacttgaacacattagggtcacct

SEQ ID NO: 4176899 - DNA, 25 bp, Homo sapien
tgggctgccggttaaatacacgctt

SEQ ID NO: 4176900 - DNA, 25 bp, Homo sapien
cattaactacggaaattctgaaact

SEQ ID NO: 4176901 - DNA, 25 bp, Homo sapien
ctggacagttaacttgaatgttcct

SEQ ID NO: 4176902 - DNA, 25 bp, Homo sapien
cctcttcaaagacatgatcgatttc

SEQ ID NO: 4176903 - DNA, 25 bp, Homo sapien
ttttccttgccataccaactcatga

SEQ ID NO: 4176904 - DNA, 25 bp, Homo sapien
aaagacatgatcgatttcatctggg

SEQ ID NO: 4176905 - DNA, 25 bp, Homo sapien
tggttctttaacatcttctttggtc

SEQ ID NO: 4176906 - DNA, 25 bp, Homo sapien
taacatcttctttggtcttggattc

SEQ ID NO: 4176907 - DNA, 25 bp, Homo sapien
ctggttctttaacatcttctttggt

SEQ ID NO: 4176908 - DNA, 25 bp, Homo sapien
tctttaacatcttctttggtcttgg

SEQ ID NO: 4176909 - DNA, 25 bp, Homo sapien
ccaccatcaagagggagttttgtat

SEQ ID NO: 4176910 - DNA, 25 bp, Homo sapien
aatccaccatcaagagggagttttg

SEQ ID NO: 4176911 - DNA, 25 bp, Homo sapien
catcaagagggagttttgtatccaa

SEQ ID NO: 4176912 - DNA, 25 bp, Homo sapien
ctaatccaccatcaagagggagttt

SEQ ID NO: 4176913 - DNA, 25 bp, Homo sapien
gacaggccacttatgttctccacta

SEQ ID NO: 4176914 - DNA, 25 bp, Homo sapien
ttatttccacttgaaagtcatcatt

SEQ ID NO: 4176915 - DNA, 25 bp, Homo sapien
caagattagcattatgtcagtcaca

SEQ ID NO: 4176916 - DNA, 25 bp, Homo sapien
cagcaacatcaaaatctcttattat

SEQ ID NO: 4176917 - DNA, 25 bp, Homo sapien
tatcaggtaaagaggtaagaggaca

SEQ ID NO: 4176918 - DNA, 25 bp, Homo sapien
tttgtctccccaactgtaacatggg

SEQ ID NO: 4176919 - DNA, 25 bp, Homo sapien
gaatgaccatgaaagtgctaaggac

SEQ ID NO: 4176920 - DNA, 25 bp, Homo sapien
catagggaggataataacttggcca

SEQ ID NO: 4176921 - DNA, 25 bp, Homo sapien
ggtgcttggtacaatcatcaacaaa

SEQ ID NO: 4176922 - DNA, 25 bp, Homo sapien
caatcatcaacaaatcttatagtat

SEQ ID NO: 4176923 - DNA, 25 bp, Homo sapien
gaatggtgcttggtacaatcatcaa

SEQ ID NO: 4176924 - DNA, 25 bp, Homo sapien
tggtacaatcatcaacaaatcttat

SEQ ID NO: 4176925 - DNA, 25 bp, Homo sapien
atattcaacattggcaactcttccc

SEQ ID NO: 4176926 - DNA, 25 bp, Homo sapien
ccctccattatagggattttcaaag

SEQ ID NO: 4176927 - DNA, 25 bp, Homo sapien
caaaaaattcaatcagagctgaact

SEQ ID NO: 4176928 - DNA, 25 bp, Homo sapien
gcaggttttcaaccctgattgtgtt

SEQ ID NO: 4176929 - DNA, 25 bp, Homo sapien
aagaagtaaaataatgtaagcccag

SEQ ID NO: 4176930 - DNA, 25 bp, Homo sapien
tgtaagcccaggatgatatatggca

SEQ ID NO: 4176931 - DNA, 25 bp, Homo sapien
gaagtaaaataatgtaagcccagga

SEQ ID NO: 4176932 - DNA, 25 bp, Homo sapien
aaaataatgtaagcccaggatgata

SEQ ID NO: 4176933 - DNA, 25 bp, Homo sapien
taccactgagttgggaccacgtgag

SEQ ID NO: 4176934 - DNA, 25 bp, Homo sapien
tccataagggaagatctagtgactc

SEQ ID NO: 4176935 - DNA, 25 bp, Homo sapien
ttattgaagtcgagttttgtggcca

SEQ ID NO: 4176936 - DNA, 25 bp, Homo sapien
gagctcacagtgacaacgcctcatt

SEQ ID NO: 4176937 - DNA, 25 bp, Homo sapien
gctaagattaccatctccttaagtg

SEQ ID NO: 4176938 - DNA, 25 bp, Homo sapien
gccaggtcttgattctcggtcttcc

SEQ ID NO: 4176939 - DNA, 25 bp, Homo sapien
tatatttagacctgatgctagagag

SEQ ID NO: 4176940 - DNA, 25 bp, Homo sapien
tttggacatcctctgatttccctgc

SEQ ID NO: 4176941 - DNA, 25 bp, Homo sapien
tccagtagactgctgtgacacaaaa

SEQ ID NO: 4176942 - DNA, 25 bp, Homo sapien
gcactccgtgagtaaatggtccagt

SEQ ID NO: 4176943 - DNA, 25 bp, Homo sapien
tgcactaggtcctttcaagcacaag

SEQ ID NO: 4176944 - DNA, 25 bp, Homo sapien
aatctctatctctgggcactccgtg

SEQ ID NO: 4176945 - DNA, 25 bp, Homo sapien
ttcctggatttcacactttgcttta

SEQ ID NO: 4176946 - DNA, 25 bp, Homo sapien
gtttttctgagccatggtgtacacc

SEQ ID NO: 4176947 - DNA, 25 bp, Homo sapien
aaaaatctcaggagaaacctgaatg

SEQ ID NO: 4176948 - DNA, 25 bp, Homo sapien
tggtgtacaccttttcctggatttc

SEQ ID NO: 4176949 - DNA, 25 bp, Homo sapien
gcaaattgtgagtgagccctttcca

SEQ ID NO: 4176950 - DNA, 25 bp, Homo sapien
taaaaccgtgctttatcctggaaga

SEQ ID NO: 4176951 - DNA, 25 bp, Homo sapien
ggctcctggcttatcagtatggaca

SEQ ID NO: 4176952 - DNA, 25 bp, Homo sapien
caagactgtccgagagaagcacttc

SEQ ID NO: 4176953 - DNA, 25 bp, Homo sapien
gaaacaatggtctccacgcatcggc

SEQ ID NO: 4176954 - DNA, 25 bp, Homo sapien
gcattgcccggtaggagtctgccct

SEQ ID NO: 4176955 - DNA, 25 bp, Homo sapien
gcggccaggccaccataatgcttaa

SEQ ID NO: 4176956 - DNA, 25 bp, Homo sapien
tttttcggctagacagagactgagt

SEQ ID NO: 4176957 - DNA, 25 bp, Homo sapien
caaaggcctcaacagtcttctcaga

SEQ ID NO: 4176958 - DNA, 25 bp, Homo sapien
aggcctcaacagtcttctcagatac

SEQ ID NO: 4176959 - DNA, 25 bp, Homo sapien
aaaggcctcaacagtcttctcagat

SEQ ID NO: 4176960 - DNA, 25 bp, Homo sapien
aaggcctcaacagtcttctcagata

SEQ ID NO: 4176961 - DNA, 25 bp, Homo sapien
agctgtatctggcagggtggcttta

SEQ ID NO: 4176962 - DNA, 25 bp, Homo sapien
tggcagggtggctttaaatacagtt

SEQ ID NO: 4176963 - DNA, 25 bp, Homo sapien
taaacctggcggggcagctgtatct

SEQ ID NO: 4176964 - DNA, 25 bp, Homo sapien
cccatgatgttttcccaggccccgc

SEQ ID NO: 4176965 - DNA, 25 bp, Homo sapien
cttagcattctgcacaccctctttc

SEQ ID NO: 4176966 - DNA, 25 bp, Homo sapien
ttagcattctgcacaccctctttca

SEQ ID NO: 4176967 - DNA, 25 bp, Homo sapien
attctgcacaccctctttcaccaac

SEQ ID NO: 4176968 - DNA, 25 bp, Homo sapien
gcacaccctctttcaccaacagcat

SEQ ID NO: 4176969 - DNA, 25 bp, Homo sapien
ggtgttctgtaaaagcgacactcac

SEQ ID NO: 4176970 - DNA, 25 bp, Homo sapien
gagccactgactaagtaaagtcaca

SEQ ID NO: 4176971 - DNA, 25 bp, Homo sapien
gccactgactaagtaaagtcacagt

SEQ ID NO: 4176972 - DNA, 25 bp, Homo sapien
ccactgactaagtaaagtcacagtg

SEQ ID NO: 4176973 - DNA, 25 bp, Homo sapien
tactggaaatctagcaatctgacct

SEQ ID NO: 4176974 - DNA, 25 bp, Homo sapien
tagatttaccaaaacacggcaggtg

SEQ ID NO: 4176975 - DNA, 25 bp, Homo sapien
gaattgtccccacatattgcctggc

SEQ ID NO: 4176976 - DNA, 25 bp, Homo sapien
tcctcactggtgttgggcgctgatg

SEQ ID NO: 4176977 - DNA, 25 bp, Homo sapien
gccgcatggcagtgaatgagaacat

SEQ ID NO: 4176978 - DNA, 25 bp, Homo sapien
ggttaagagcctgaacaaattccaa

SEQ ID NO: 4176979 - DNA, 25 bp, Homo sapien
ctggctctaccatttgctagttggg

SEQ ID NO: 4176980 - DNA, 25 bp, Homo sapien
taataataatcctagaatctgccgc

SEQ ID NO: 4176981 - DNA, 25 bp, Homo sapien
ctgcagcctcaaactcctagggttc

SEQ ID NO: 4176982 - DNA, 25 bp, Homo sapien
tgcagcctcaaactcctagggttca

SEQ ID NO: 4176983 - DNA, 25 bp, Homo sapien
cagcctcaaactcctagggttcaag

SEQ ID NO: 4176984 - DNA, 25 bp, Homo sapien
gcctcaaactcctagggttcaagtg

SEQ ID NO: 4176985 - DNA, 25 bp, Homo sapien
tcgagtgccaagacatctggactcc

SEQ ID NO: 4176986 - DNA, 25 bp, Homo sapien
ctcgagtgccaagacatctggactc

SEQ ID NO: 4176987 - DNA, 25 bp, Homo sapien
tcatcaatgattactatatttgagg

SEQ ID NO: 4176988 - DNA, 25 bp, Homo sapien
atgattactatatttgaggcactgg

SEQ ID NO: 4176989 - DNA, 25 bp, Homo sapien
caaaaagcattcatcaatgattact

SEQ ID NO: 4176990 - DNA, 25 bp, Homo sapien
aacaaaaagcattcatcaatgatta

SEQ ID NO: 4176991 - DNA, 25 bp, Homo sapien
gtgaagcacatagcgacagtccaga

SEQ ID NO: 4176992 - DNA, 25 bp, Homo sapien
gaacggagttgacaacaacatcggt

SEQ ID NO: 4176993 - DNA, 25 bp, Homo sapien
tctactaagcacgagatccaaggga

SEQ ID NO: 4176994 - DNA, 25 bp, Homo sapien
tgtccaactgtgtccaattcctcct

SEQ ID NO: 4176995 - DNA, 25 bp, Homo sapien
tgaaacgcacaaagcacatccttat

SEQ ID NO: 4176996 - DNA, 25 bp, Homo sapien
ctgaaacgcacaaagcacatcctta

SEQ ID NO: 4176997 - DNA, 25 bp, Homo sapien
gctactaaatttgaacacctctgaa

SEQ ID NO: 4176998 - DNA, 25 bp, Homo sapien
taattcagcgaatatgtttttagga

SEQ ID NO: 4176999 - DNA, 25 bp, Homo sapien
aatgattaattcagcgaatatgttt

SEQ ID NO: 4177000 - DNA, 25 bp, Homo sapien
ttgctactaaatttgaacacctctg

SEQ ID NO: 4177001 - DNA, 25 bp, Homo sapien
aattttgtcactgacgagatttcca

SEQ ID NO: 4177002 - DNA, 25 bp, Homo sapien
ttagccttcggaattttgtcactga

SEQ ID NO: 4177003 - DNA, 25 bp, Homo sapien
cactgacgagatttccattagccct

SEQ ID NO: 4177004 - DNA, 25 bp, Homo sapien
tttagccttcggaattttgtcactg

SEQ ID NO: 4177005 - DNA, 25 bp, Homo sapien
cagaatagagggtcaagaaataaag

SEQ ID NO: 4177006 - DNA, 25 bp, Homo sapien
gaatagagggtcaagaaataaagtc

SEQ ID NO: 4177007 - DNA, 25 bp, Homo sapien
aatagagggtcaagaaataaagtca

SEQ ID NO: 4177008 - DNA, 25 bp, Homo sapien
aaaccaattgatcttcagcaaagca

SEQ ID NO: 4177009 - DNA, 25 bp, Homo sapien
gggtggccctagtctcacaacataa

SEQ ID NO: 4177010 - DNA, 25 bp, Homo sapien
cagacagattgaagaaaggtgccaa

SEQ ID NO: 4177011 - DNA, 25 bp, Homo sapien
gacttgggtatcctgctcacatggg

SEQ ID NO: 4177012 - DNA, 25 bp, Homo sapien
gaactctggtgctgaccaaggtgaa

SEQ ID NO: 4177013 - DNA, 25 bp, Homo sapien
cagggctagaaacagtcccataaaa

SEQ ID NO: 4177014 - DNA, 25 bp, Homo sapien
gatgatggagccaatcttcatttca

SEQ ID NO: 4177015 - DNA, 25 bp, Homo sapien
tttcgtgatatctccagaagccacc

SEQ ID NO: 4177016 - DNA, 25 bp, Homo sapien
cacatctgcctcttctttcgtgata

SEQ ID NO: 4177017 - DNA, 25 bp, Homo sapien
ttctttcgtgatatctccagaagcc

SEQ ID NO: 4177018 - DNA, 25 bp, Homo sapien
agattgaatgagtttgatgttgaat

SEQ ID NO: 4177019 - DNA, 25 bp, Homo sapien
cagcacattctaaaattgctttgga

SEQ ID NO: 4177020 - DNA, 25 bp, Homo sapien
tacattttgtccagcacattctaaa

SEQ ID NO: 4177021 - DNA, 25 bp, Homo sapien
tgtccagcacattctaaaattgctt

SEQ ID NO: 4177022 - DNA, 25 bp, Homo sapien
cattctaaaattgctttggagaccc

SEQ ID NO: 4177023 - DNA, 25 bp, Homo sapien
ctcaaaaatccacctccggtgatta

SEQ ID NO: 4177024 - DNA, 25 bp, Homo sapien
atataatcatttttgcgctgctgag

SEQ ID NO: 4177025 - DNA, 25 bp, Homo sapien
tccacctccggtgattatataatca

SEQ ID NO: 4177026 - DNA, 25 bp, Homo sapien
caaaaatccacctccggtgattata

SEQ ID NO: 4177027 - DNA, 25 bp, Homo sapien
acatcatttccaccaattacatgaa

SEQ ID NO: 4177028 - DNA, 25 bp, Homo sapien
atcatttccaccaattacatgaatg

SEQ ID NO: 4177029 - DNA, 25 bp, Homo sapien
gctgggaggcaaatggatgagtaat

SEQ ID NO: 4177030 - DNA, 25 bp, Homo sapien
tgggaggcaaatggatgagtaattt

SEQ ID NO: 4177031 - DNA, 25 bp, Homo sapien
aggtctgtggcacccctaagctgct

SEQ ID NO: 4177032 - DNA, 25 bp, Homo sapien
gaaggtctgtggcacccctaagctg

SEQ ID NO: 4177033 - DNA, 25 bp, Homo sapien
tctgtggcacccctaagctgcttgc

SEQ ID NO: 4177034 - DNA, 25 bp, Homo sapien
gtctgtggcacccctaagctgcttg

SEQ ID NO: 4177035 - DNA, 25 bp, Homo sapien
gggaagaaagctgagtcccttctct

SEQ ID NO: 4177036 - DNA, 25 bp, Homo sapien
gactgggctgatcctttctggacaa

SEQ ID NO: 4177037 - DNA, 25 bp, Homo sapien
tatggcttcagcaaccttatctggg

SEQ ID NO: 4177038 - DNA, 25 bp, Homo sapien
aacacatccagtacttgaggcagaa

SEQ ID NO: 4177039 - DNA, 25 bp, Homo sapien
caatcaggtcttgtagccaggagat

SEQ ID NO: 4177040 - DNA, 25 bp, Homo sapien
caaaggtctcttatggtccagggaa

SEQ ID NO: 4177041 - DNA, 25 bp, Homo sapien
aaactcactgatacaatctgcccgg

SEQ ID NO: 4177042 - DNA, 25 bp, Homo sapien
tcgtgaggcgctgaacagataaact

SEQ ID NO: 4177043 - DNA, 25 bp, Homo sapien
ccaaatagtgttatgcccaaagtag

SEQ ID NO: 4177044 - DNA, 25 bp, Homo sapien
tgaaattctgatgtacgtaccaaat

SEQ ID NO: 4177045 - DNA, 25 bp, Homo sapien
tgacaagtatgaatgtttaactcac

SEQ ID NO: 4177046 - DNA, 25 bp, Homo sapien
gtgttatgcccaaagtagatgtgaa

SEQ ID NO: 4177047 - DNA, 25 bp, Homo sapien
gattaaacttgcttgccaccgtgtt

SEQ ID NO: 4177048 - DNA, 25 bp, Homo sapien
tgctgcttcatatcactccagtgtg

SEQ ID NO: 4177049 - DNA, 25 bp, Homo sapien
gttgtactcaggatcactaggcagc

SEQ ID NO: 4177050 - DNA, 25 bp, Homo sapien
tctattctgaagtgtgagcaggtct

SEQ ID NO: 4177051 - DNA, 25 bp, Homo sapien
gcctgctggctttatcaaggaagca

SEQ ID NO: 4177052 - DNA, 25 bp, Homo sapien
gacagaacttatttccaccatccag

SEQ ID NO: 4177053 - DNA, 25 bp, Homo sapien
tgataaacgagaaaaggcctgctgg

SEQ ID NO: 4177054 - DNA, 25 bp, Homo sapien
gtaacatggtcctgatctaaggagc

SEQ ID NO: 4177055 - DNA, 25 bp, Homo sapien
tacaggcacgaatcatcacattcac

SEQ ID NO: 4177056 - DNA, 25 bp, Homo sapien
ctacaggcacgaatcatcacattca

SEQ ID NO: 4177057 - DNA, 25 bp, Homo sapien
gaaacagcgtgcctgcaaaaatgaa

SEQ ID NO: 4177058 - DNA, 25 bp, Homo sapien
gaccgtttaagcataaatggcgtga

SEQ ID NO: 4177059 - DNA, 25 bp, Homo sapien
ccactgggagtatgttctagagctt

SEQ ID NO: 4177060 - DNA, 25 bp, Homo sapien
gcttgagtcaaagacccaggttggt

SEQ ID NO: 4177061 - DNA, 25 bp, Homo sapien
tactggcagacttatggtggatcaa

SEQ ID NO: 4177062 - DNA, 25 bp, Homo sapien
ggaggcaccttaagtactacccaca

SEQ ID NO: 4177063 - DNA, 25 bp, Homo sapien
cactgtagatattgctggtcaagca

SEQ ID NO: 4177064 - DNA, 25 bp, Homo sapien
tctactaggaagctcagggacaaat

SEQ ID NO: 4177065 - DNA, 25 bp, Homo sapien
ttagaaaatcaacatcctgcaacct

SEQ ID NO: 4177066 - DNA, 25 bp, Homo sapien
acctccagtgtaatgatggattcag

SEQ ID NO: 4177067 - DNA, 25 bp, Homo sapien
cctccagtgtaatgatggattcagg

SEQ ID NO: 4177068 - DNA, 25 bp, Homo sapien
attagaaaatcaacatcctgcaacc

SEQ ID NO: 4177069 - DNA, 25 bp, Homo sapien
cccgtatgggaagtgagcgcctttg

SEQ ID NO: 4177070 - DNA, 25 bp, Homo sapien
ccccgtatgggaagtgagcgccttt

SEQ ID NO: 4177071 - DNA, 25 bp, Homo sapien
cgccccgtatgggaagtgagcgcct

SEQ ID NO: 4177072 - DNA, 25 bp, Homo sapien
aaccgccccgtatgggaagtgagcg

SEQ ID NO: 4177073 - DNA, 25 bp, Homo sapien
tagcagcagatgtctagccagggta

SEQ ID NO: 4177074 - DNA, 25 bp, Homo sapien
taatctctagggtaagcaatgaaag

SEQ ID NO: 4177075 - DNA, 25 bp, Homo sapien
aaaattatcccacatggaagcatgg

SEQ ID NO: 4177076 - DNA, 25 bp, Homo sapien
tacagttcaataagtcaaggatgca

SEQ ID NO: 4177077 - DNA, 25 bp, Homo sapien
gaccatactctttaggcagtggcct

SEQ ID NO: 4177078 - DNA, 25 bp, Homo sapien
catgacatgaattctgctgacccag

SEQ ID NO: 4177079 - DNA, 25 bp, Homo sapien
tagtccccaagtagtagcagtttca

SEQ ID NO: 4177080 - DNA, 25 bp, Homo sapien
tccagttggaagaccggtgcatgaa

SEQ ID NO: 4177081 - DNA, 25 bp, Homo sapien
cagttccaagagcacttgccaatat

SEQ ID NO: 4177082 - DNA, 25 bp, Homo sapien
ccaagagcacttgccaatatacagc

SEQ ID NO: 4177083 - DNA, 25 bp, Homo sapien
taataaaggataatattctgccagt

SEQ ID NO: 4177084 - DNA, 25 bp, Homo sapien
taaaagcacactaaacagcaaatcc

SEQ ID NO: 4177085 - DNA, 25 bp, Homo sapien
tgtcccatggaagagttgcttctca

SEQ ID NO: 4177086 - DNA, 25 bp, Homo sapien
cctggtagctattccagagatctgg

SEQ ID NO: 4177087 - DNA, 25 bp, Homo sapien
cattctttccggcatagctgcggtt

SEQ ID NO: 4177088 - DNA, 25 bp, Homo sapien
catttcgattgacgtgtggcacgga

SEQ ID NO: 4177089 - DNA, 25 bp, Homo sapien
gacagtgtcatacaggtcagtagga

SEQ ID NO: 4177090 - DNA, 25 bp, Homo sapien
caaataaacttggatggtgcacatt

SEQ ID NO: 4177091 - DNA, 25 bp, Homo sapien
tgcatctggtctggagtacgtatca

SEQ ID NO: 4177092 - DNA, 25 bp, Homo sapien
tactctgggtatgcttggtagtcat

SEQ ID NO: 4177093 - DNA, 25 bp, Homo sapien
ctataagaaggcacattggctggtc

SEQ ID NO: 4177094 - DNA, 25 bp, Homo sapien
gagtatccgttgtacatcaggcaca

SEQ ID NO: 4177095 - DNA, 25 bp, Homo sapien
gacagaagccctacccactgggtaa

SEQ ID NO: 4177096 - DNA, 25 bp, Homo sapien
gaagatgtgtagcaggcgttatccc

SEQ ID NO: 4177097 - DNA, 25 bp, Homo sapien
gaaagcacctattttactacctggc

SEQ ID NO: 4177098 - DNA, 25 bp, Homo sapien
tctagaggccatgttctgcagtggg

SEQ ID NO: 4177099 - DNA, 25 bp, Homo sapien
gaccaagattcagttgccggctctg

SEQ ID NO: 4177100 - DNA, 25 bp, Homo sapien
caagactgtcggaggtgttcctgaa

SEQ ID NO: 4177101 - DNA, 25 bp, Homo sapien
tcctagcagattaagtcccttaatc

SEQ ID NO: 4177102 - DNA, 25 bp, Homo sapien
cctccacttcaagtacaggtgttcc

SEQ ID NO: 4177103 - DNA, 25 bp, Homo sapien
caagtacaggtgttcctagcagatt

SEQ ID NO: 4177104 - DNA, 25 bp, Homo sapien
ttaagtcccttaatcctcccagcga

SEQ ID NO: 4177105 - DNA, 25 bp, Homo sapien
taagcaacaaggagtctgccaatcc

SEQ ID NO: 4177106 - DNA, 25 bp, Homo sapien
aaaatccaaaacctctatgttaatg

SEQ ID NO: 4177107 - DNA, 25 bp, Homo sapien
tgttaatgaagcagcaactgtggcc

SEQ ID NO: 4177108 - DNA, 25 bp, Homo sapien
tcttaagcaacaaggagtctgccaa

SEQ ID NO: 4177109 - DNA, 25 bp, Homo sapien
gatattcagccttgccctgagttaa

SEQ ID NO: 4177110 - DNA, 25 bp, Homo sapien
gattgaggataactataacattact

SEQ ID NO: 4177111 - DNA, 25 bp, Homo sapien
gagttaatcaaatcactggagaaca

SEQ ID NO: 4177112 - DNA, 25 bp, Homo sapien
agtgcgatacactctgatattcagc

SEQ ID NO: 4177113 - DNA, 25 bp, Homo sapien
tactcaagtttacgagataatgcca

SEQ ID NO: 4177114 - DNA, 25 bp, Homo sapien
tgtgttgtcacatgtaagctgttca

SEQ ID NO: 4177115 - DNA, 25 bp, Homo sapien
tgctggtccatagggtatacaatac

SEQ ID NO: 4177116 - DNA, 25 bp, Homo sapien
taatactgtgttaaggtagcccata

SEQ ID NO: 4177117 - DNA, 25 bp, Homo sapien
tatgctgacgtcataacaaggctta

SEQ ID NO: 4177118 - DNA, 25 bp, Homo sapien
agcatgacacccaatcatcagactt

SEQ ID NO: 4177119 - DNA, 25 bp, Homo sapien
gcatgacacccaatcatcagactta

SEQ ID NO: 4177120 - DNA, 25 bp, Homo sapien
aaggcttaagggaggcatgtctcac

SEQ ID NO: 4177121 - DNA, 25 bp, Homo sapien
gtatggcctcaaaccatactcctgc

SEQ ID NO: 4177122 - DNA, 25 bp, Homo sapien
gagcagagcagtttgttgaaaggaa

SEQ ID NO: 4177123 - DNA, 25 bp, Homo sapien
aagaggcttcactgttgccctcaag

SEQ ID NO: 4177124 - DNA, 25 bp, Homo sapien
tcctctccaagggatgccagcgatc

SEQ ID NO: 4177125 - DNA, 25 bp, Homo sapien
tcaaagggtttatggttagccgtca

SEQ ID NO: 4177126 - DNA, 25 bp, Homo sapien
caaagggtttatggttagccgtcat

SEQ ID NO: 4177127 - DNA, 25 bp, Homo sapien
cactcctgtgatcgttgcggctggg

SEQ ID NO: 4177128 - DNA, 25 bp, Homo sapien
ttgcggtagccatggcagcaggctc

SEQ ID NO: 4177129 - DNA, 25 bp, Homo sapien
gctccgccttgggttccggcagaac

SEQ ID NO: 4177130 - DNA, 25 bp, Homo sapien
cagcttcgggtctcggagtttggcc

SEQ ID NO: 4177131 - DNA, 25 bp, Homo sapien
aggtcccagacggagggcaggtagc

SEQ ID NO: 4177132 - DNA, 25 bp, Homo sapien
caggtagcgctgaaaaggcagggac

SEQ ID NO: 4177133 - DNA, 25 bp, Homo sapien
tcccagagaggctgtattcgaggag

SEQ ID NO: 4177134 - DNA, 25 bp, Homo sapien
cagcgcagaatagtcctgagcagca

SEQ ID NO: 4177135 - DNA, 25 bp, Homo sapien
cagcggcgcccgtatacccgcccgg

SEQ ID NO: 4177136 - DNA, 25 bp, Homo sapien
agcaccagccagcggcgcccgtata

SEQ ID NO: 4177137 - DNA, 25 bp, Homo sapien
tcttcgctgctccagcgagagccca

SEQ ID NO: 4177138 - DNA, 25 bp, Homo sapien
ctgaacgaacgccagcagcgagaag

SEQ ID NO: 4177139 - DNA, 25 bp, Homo sapien
ggagccacatgaacgcgaagcaggg

SEQ ID NO: 4177140 - DNA, 25 bp, Homo sapien
ggcgcgccgagttctggatgggacc

SEQ ID NO: 4177141 - DNA, 25 bp, Homo sapien
acagcacgagcagcgcgatgtccca

SEQ ID NO: 4177142 - DNA, 25 bp, Homo sapien
tcccagctggagaagccgtaggcct

SEQ ID NO: 4177143 - DNA, 25 bp, Homo sapien
tactgggtaccctacgagatactga

SEQ ID NO: 4177144 - DNA, 25 bp, Homo sapien
tggccatatggtccaataaccaggc

SEQ ID NO: 4177145 - DNA, 25 bp, Homo sapien
ttattaaagcaatctgtggccaggc

SEQ ID NO: 4177146 - DNA, 25 bp, Homo sapien
tattgttactgctgaaggctaccat

SEQ ID NO: 4177147 - DNA, 25 bp, Homo sapien
ataggtatgcatcttagaccagttc

SEQ ID NO: 4177148 - DNA, 25 bp, Homo sapien
cttcttttaaggattaagtctgata

SEQ ID NO: 4177149 - DNA, 25 bp, Homo sapien
taaggattaagtctgatataggtat

SEQ ID NO: 4177150 - DNA, 25 bp, Homo sapien
ataaggaaggatgtcaggagcacag

SEQ ID NO: 4177151 - DNA, 25 bp, Homo sapien
gcacgtgtatcctcacagttaatgg

SEQ ID NO: 4177152 - DNA, 25 bp, Homo sapien
gaaagcacgtgtatcctcacagtta

SEQ ID NO: 4177153 - DNA, 25 bp, Homo sapien
cgtgtatcctcacagttaatggact

SEQ ID NO: 4177154 - DNA, 25 bp, Homo sapien
ctgatgaaagcacgtgtatcctcac

SEQ ID NO: 4177155 - DNA, 25 bp, Homo sapien
actcctgttccttgttgaccaactc

SEQ ID NO: 4177156 - DNA, 25 bp, Homo sapien
cctgttccttgttgaccaactcttt

SEQ ID NO: 4177157 - DNA, 25 bp, Homo sapien
ttttcccaatattctccttagcact

SEQ ID NO: 4177158 - DNA, 25 bp, Homo sapien
tgttccttgttgaccaactcttttc

SEQ ID NO: 4177159 - DNA, 25 bp, Homo sapien
cgtcgtagagagaaatggtgctgca

SEQ ID NO: 4177160 - DNA, 25 bp, Homo sapien
ttcattacagttggacctgccaatc

SEQ ID NO: 4177161 - DNA, 25 bp, Homo sapien
ctgcagaaaaccacgtcgtagagag

SEQ ID NO: 4177162 - DNA, 25 bp, Homo sapien
tggacctgccaatccatttaacatc

SEQ ID NO: 4177163 - DNA, 25 bp, Homo sapien
ccccaagataactgagcattgatgc

SEQ ID NO: 4177164 - DNA, 25 bp, Homo sapien
cagcaagaagaggtgatgtcccatt

SEQ ID NO: 4177165 - DNA, 25 bp, Homo sapien
gagcattgatgcaatagctgtggct

SEQ ID NO: 4177166 - DNA, 25 bp, Homo sapien
tataacacagcctctatgcgatctt

SEQ ID NO: 4177167 - DNA, 25 bp, Homo sapien
agtaatactgaatgagcacctaaaa

SEQ ID NO: 4177168 - DNA, 25 bp, Homo sapien
catattctttgaccatctactggca

SEQ ID NO: 4177169 - DNA, 25 bp, Homo sapien
cacttatcagtagatagacatctgg

SEQ ID NO: 4177170 - DNA, 25 bp, Homo sapien
ccacctgtatgtcttgcatgattgc

SEQ ID NO: 4177171 - DNA, 25 bp, Homo sapien
ggtaaagaggttatactaacaatga

SEQ ID NO: 4177172 - DNA, 25 bp, Homo sapien
gagtctgagacgtatagagataagc

SEQ ID NO: 4177173 - DNA, 25 bp, Homo sapien
tagtatctagccaagattgctcagt

SEQ ID NO: 4177174 - DNA, 25 bp, Homo sapien
tatatgctgatactatggcacacag

SEQ ID NO: 4177175 - DNA, 25 bp, Homo sapien
aaataagctagtgttgcagaaaata

SEQ ID NO: 4177176 - DNA, 25 bp, Homo sapien
aaacgcttctccgataactcagccg

SEQ ID NO: 4177177 - DNA, 25 bp, Homo sapien
cagaaaatattaagcagacaactcc

SEQ ID NO: 4177178 - DNA, 25 bp, Homo sapien
agccgctggctagctgcagcaacac

SEQ ID NO: 4177179 - DNA, 25 bp, Homo sapien
ttaataacttacatcactattacgg

SEQ ID NO: 4177180 - DNA, 25 bp, Homo sapien
ctattacggttcatgttaaagaatt

SEQ ID NO: 4177181 - DNA, 25 bp, Homo sapien
gactatcagaaaatgtaagattact

SEQ ID NO: 4177182 - DNA, 25 bp, Homo sapien
gaagactatcagaaaatgtaagatt

SEQ ID NO: 4177183 - DNA, 25 bp, Homo sapien
tactgaatcaatctcacggctcatt

SEQ ID NO: 4177184 - DNA, 25 bp, Homo sapien
ttgaaagtccggtagaattcaactg

SEQ ID NO: 4177185 - DNA, 25 bp, Homo sapien
aatccatctggccaatctgaccata

SEQ ID NO: 4177186 - DNA, 25 bp, Homo sapien
tggccaatctgaccataaccttttc

SEQ ID NO: 4177187 - DNA, 25 bp, Homo sapien
ttttaacttaggataaacagtgcaa

SEQ ID NO: 4177188 - DNA, 25 bp, Homo sapien
gctcaatgcatactttttcaacggt

SEQ ID NO: 4177189 - DNA, 25 bp, Homo sapien
caacggtaaatttagtgatatctga

SEQ ID NO: 4177190 - DNA, 25 bp, Homo sapien
cagtgcaatacaagagacattgctc

SEQ ID NO: 4177191 - DNA, 25 bp, Homo sapien
tgatcacatcactacaatctggcag

SEQ ID NO: 4177192 - DNA, 25 bp, Homo sapien
caggtggttactgtgtgctatgatc

SEQ ID NO: 4177193 - DNA, 25 bp, Homo sapien
tagcaatcatgttacagggtctgtt

SEQ ID NO: 4177194 - DNA, 25 bp, Homo sapien
gcttagactattttatgacctagca

SEQ ID NO: 4177195 - DNA, 25 bp, Homo sapien
catgcgctggtgttaaaattaagtc

SEQ ID NO: 4177196 - DNA, 25 bp, Homo sapien
cagaccagccagcaaatacaccaag

SEQ ID NO: 4177197 - DNA, 25 bp, Homo sapien
taaagcaatcatcaaaaatcgaaaa

SEQ ID NO: 4177198 - DNA, 25 bp, Homo sapien
tacaccaagtggtatggcatatgct

SEQ ID NO: 4177199 - DNA, 25 bp, Homo sapien
aacacagcctccaactatggaccaa

SEQ ID NO: 4177200 - DNA, 25 bp, Homo sapien
cacagcctccaactatggaccaaaa

SEQ ID NO: 4177201 - DNA, 25 bp, Homo sapien
ctccaactatggaccaaaatccaat

SEQ ID NO: 4177202 - DNA, 25 bp, Homo sapien
gcctccaactatggaccaaaatcca

SEQ ID NO: 4177203 - DNA, 25 bp, Homo sapien
actaaagggcatctggtagagacgc

SEQ ID NO: 4177204 - DNA, 25 bp, Homo sapien
gattaactgttgattgtacgggcac

SEQ ID NO: 4177205 - DNA, 25 bp, Homo sapien
tggaatgctggtaccacccggatct

SEQ ID NO: 4177206 - DNA, 25 bp, Homo sapien
tcttgagaacaaaacatacacggca

SEQ ID NO: 4177207 - DNA, 25 bp, Homo sapien
tggatgacagtgtagctcccgaaaa

SEQ ID NO: 4177208 - DNA, 25 bp, Homo sapien
aagaattagtttcagcatacccctg

SEQ ID NO: 4177209 - DNA, 25 bp, Homo sapien
ggtaggtgtgtgatgctgttcaaac

SEQ ID NO: 4177210 - DNA, 25 bp, Homo sapien
catacccctgataaaatctgcaaac

SEQ ID NO: 4177211 - DNA, 25 bp, Homo sapien
aagttcaaaaatagcctatgctcac

SEQ ID NO: 4177212 - DNA, 25 bp, Homo sapien
tttgatgactggacaagagaaactt

SEQ ID NO: 4177213 - DNA, 25 bp, Homo sapien
agcaagaagaagtcctactgtcaga

SEQ ID NO: 4177214 - DNA, 25 bp, Homo sapien
tgactggacaagagaaacttttttg

SEQ ID NO: 4177215 - DNA, 25 bp, Homo sapien
tagttaagaacagaggcaaaagaca

SEQ ID NO: 4177216 - DNA, 25 bp, Homo sapien
gaaacatgccatgatatctggtaat

SEQ ID NO: 4177217 - DNA, 25 bp, Homo sapien
catgagactttgtcacttttagtcc

SEQ ID NO: 4177218 - DNA, 25 bp, Homo sapien
tctagcctatacatgttgaatgccc

SEQ ID NO: 4177219 - DNA, 25 bp, Homo sapien
ttaagatttttcacaaatccattct

SEQ ID NO: 4177220 - DNA, 25 bp, Homo sapien
gatttttcacaaatccattctcttc

SEQ ID NO: 4177221 - DNA, 25 bp, Homo sapien
ttaatccatattctactttttcttc

SEQ ID NO: 4177222 - DNA, 25 bp, Homo sapien
ttctactttttcttccttgagctgt

SEQ ID NO: 4177223 - DNA, 25 bp, Homo sapien
tagtcaagccctctaactgtaagaa

SEQ ID NO: 4177224 - DNA, 25 bp, Homo sapien
tactattaaatcatggaacgctcac

SEQ ID NO: 4177225 - DNA, 25 bp, Homo sapien
gaacgctcactgatacctagtcaag

SEQ ID NO: 4177226 - DNA, 25 bp, Homo sapien
caacaagcagccagaagaaacattc

SEQ ID NO: 4177227 - DNA, 25 bp, Homo sapien
ctggacaacgtggcgaaaccccatc

SEQ ID NO: 4177228 - DNA, 25 bp, Homo sapien
gccaaggtgggcgaatcgcttaagc

SEQ ID NO: 4177229 - DNA, 25 bp, Homo sapien
aggagttcgagaccagcctggacaa

SEQ ID NO: 4177230 - DNA, 25 bp, Homo sapien
caaggtgggcgaatcgcttaagctc

SEQ ID NO: 4177231 - DNA, 25 bp, Homo sapien
cttgggaagcatctgatagctatga

SEQ ID NO: 4177232 - DNA, 25 bp, Homo sapien
aagaacatactgctggctaaggcag

SEQ ID NO: 4177233 - DNA, 25 bp, Homo sapien
tatgggaactgcagaaagtaaggaa

SEQ ID NO: 4177234 - DNA, 25 bp, Homo sapien
gactcattagtggtacattaggaaa

SEQ ID NO: 4177235 - DNA, 25 bp, Homo sapien
ttttagtttcacactagcggcagtg

SEQ ID NO: 4177236 - DNA, 25 bp, Homo sapien
gagtcatatcagatagatcttcggg

SEQ ID NO: 4177237 - DNA, 25 bp, Homo sapien
cacactagcggcagtgagtcatatc

SEQ ID NO: 4177238 - DNA, 25 bp, Homo sapien
ctttcctaagtattgactcaaaaat

SEQ ID NO: 4177239 - DNA, 25 bp, Homo sapien
aaaaatataggcacgctgctattca

SEQ ID NO: 4177240 - DNA, 25 bp, Homo sapien
aaagtactcccataaacatattact

SEQ ID NO: 4177241 - DNA, 25 bp, Homo sapien
tccttctggaactgggtagacagtt

SEQ ID NO: 4177242 - DNA, 25 bp, Homo sapien
aagtgacaactccacaagtaattcc

SEQ ID NO: 4177243 - DNA, 25 bp, Homo sapien
aacattcatgtatcaccagcagacc

SEQ ID NO: 4177244 - DNA, 25 bp, Homo sapien
ccggaaggaatctgctctgcattaa

SEQ ID NO: 4177245 - DNA, 25 bp, Homo sapien
gacaatctggagactaagtgatgtg

SEQ ID NO: 4177246 - DNA, 25 bp, Homo sapien
gaccaccacctgtatgccggaagga

SEQ ID NO: 4177247 - DNA, 25 bp, Homo sapien
gaaggcaccagttgaaccaagacaa

SEQ ID NO: 4177248 - DNA, 25 bp, Homo sapien
ccgggaaggcaccagttgaaccaag

SEQ ID NO: 4177249 - DNA, 25 bp, Homo sapien
gaggagactgagcaaacacgacccg

SEQ ID NO: 4177250 - DNA, 25 bp, Homo sapien
ctgagcaaacacgacccgggaaggc

SEQ ID NO: 4177251 - DNA, 25 bp, Homo sapien
ttaaacggagacaaccacatcaaga

SEQ ID NO: 4177252 - DNA, 25 bp, Homo sapien
cggagacaaccacatcaagatagag

SEQ ID NO: 4177253 - DNA, 25 bp, Homo sapien
gacaaccacatcaagatagagtctg

SEQ ID NO: 4177254 - DNA, 25 bp, Homo sapien
aacggagacaaccacatcaagatag

SEQ ID NO: 4177255 - DNA, 25 bp, Homo sapien
tcctgttagatgtgcaattctgagc

SEQ ID NO: 4177256 - DNA, 25 bp, Homo sapien
gccatctgtagagttttaaaatccc

SEQ ID NO: 4177257 - DNA, 25 bp, Homo sapien
cagtgtgcagtattgatttccagcc

SEQ ID NO: 4177258 - DNA, 25 bp, Homo sapien
taatcagtagtttagcactggcaca

SEQ ID NO: 4177259 - DNA, 25 bp, Homo sapien
cattaaaattggatacagggtttga

SEQ ID NO: 4177260 - DNA, 25 bp, Homo sapien
tacatgtggctaatttccatcatcg

SEQ ID NO: 4177261 - DNA, 25 bp, Homo sapien
tccatcatcgatatacctcttggct

SEQ ID NO: 4177262 - DNA, 25 bp, Homo sapien
gatatgtgacttagggaaggcgtta

SEQ ID NO: 4177263 - DNA, 25 bp, Homo sapien
caaggataagttgagatggagacac

SEQ ID NO: 4177264 - DNA, 25 bp, Homo sapien
tgtatttcacagaaacaaggataag

SEQ ID NO: 4177265 - DNA, 25 bp, Homo sapien
gatcaccatagtaaagatggccaag

SEQ ID NO: 4177266 - DNA, 25 bp, Homo sapien
ctcacataattatttaagggcctag

SEQ ID NO: 4177267 - DNA, 25 bp, Homo sapien
taggatactcctctaggaccgaggt

SEQ ID NO: 4177268 - DNA, 25 bp, Homo sapien
gagccacttgcactctgtccaggaa

SEQ ID NO: 4177269 - DNA, 25 bp, Homo sapien
gaccgaggtgagttaatgcacagcc

SEQ ID NO: 4177270 - DNA, 25 bp, Homo sapien
caagttagggtcttagaagttgcca

SEQ ID NO: 4177271 - DNA, 25 bp, Homo sapien
catgatctacgaaaaaacttggccc

SEQ ID NO: 4177272 - DNA, 25 bp, Homo sapien
gcttagatctctcattagaagggct

SEQ ID NO: 4177273 - DNA, 25 bp, Homo sapien
tgcaaacagtaagatgaatgcctgg

SEQ ID NO: 4177274 - DNA, 25 bp, Homo sapien
gtaattagctccatcctccagtgaa

SEQ ID NO: 4177275 - DNA, 25 bp, Homo sapien
tggatgggcaagaagacaggaaagg

SEQ ID NO: 4177276 - DNA, 25 bp, Homo sapien
atgaagctgagcttctggcctgcta

SEQ ID NO: 4177277 - DNA, 25 bp, Homo sapien
ggaaaaagtgaccaaatgaagctga

SEQ ID NO: 4177278 - DNA, 25 bp, Homo sapien
tgagcttctggcctgctacagttca

SEQ ID NO: 4177279 - DNA, 25 bp, Homo sapien
accgctggcaactcgtaaaatctgg

SEQ ID NO: 4177280 - DNA, 25 bp, Homo sapien
tagtagggtccatgaagaatctgca

SEQ ID NO: 4177281 - DNA, 25 bp, Homo sapien
caccaggccagggttaagagccaga

SEQ ID NO: 4177282 - DNA, 25 bp, Homo sapien
taaaatctgggtgtcacacagctcg

SEQ ID NO: 4177283 - DNA, 25 bp, Homo sapien
tatccctcgagagctgaaaaggcag

SEQ ID NO: 4177284 - DNA, 25 bp, Homo sapien
ggaatgagactcaaggcccaaggct

SEQ ID NO: 4177285 - DNA, 25 bp, Homo sapien
tacaccttggctcgataacagacag

SEQ ID NO: 4177286 - DNA, 25 bp, Homo sapien
taacaaatacgtctacaggtctggc

SEQ ID NO: 4177287 - DNA, 25 bp, Homo sapien
tcagaggcatcaagtgtcacctggg

SEQ ID NO: 4177288 - DNA, 25 bp, Homo sapien
gctggagcactatttcaccctggca

SEQ ID NO: 4177289 - DNA, 25 bp, Homo sapien
tcagtgttggcaggttttaagctcc

SEQ ID NO: 4177290 - DNA, 25 bp, Homo sapien
tgccaaaaacctctcccaggatggg

SEQ ID NO: 4177291 - DNA, 25 bp, Homo sapien
tgtgaactaggagttctaaaccatt

SEQ ID NO: 4177292 - DNA, 25 bp, Homo sapien
ctgcaagtgatgacgagaagccctg

SEQ ID NO: 4177293 - DNA, 25 bp, Homo sapien
aagccctgttgtgaactaggagttc

SEQ ID NO: 4177294 - DNA, 25 bp, Homo sapien
ggcaaagcaatgcacattaccattt

SEQ ID NO: 4177295 - DNA, 25 bp, Homo sapien
ggcggcttatttggaagctcacacg

SEQ ID NO: 4177296 - DNA, 25 bp, Homo sapien
ggagatcgccatgcctaagtgcgtg

SEQ ID NO: 4177297 - DNA, 25 bp, Homo sapien
caaaaccacaagcacagtaaccata

SEQ ID NO: 4177298 - DNA, 25 bp, Homo sapien
tttcctaacggaacaggagatcgcc

SEQ ID NO: 4177299 - DNA, 25 bp, Homo sapien
tcctttagggaacaaatgatactca

SEQ ID NO: 4177300 - DNA, 25 bp, Homo sapien
gcctgtttccgcaatctgagtcacg

SEQ ID NO: 4177301 - DNA, 25 bp, Homo sapien
tactccgggtttgctgtgaggctga

SEQ ID NO: 4177302 - DNA, 25 bp, Homo sapien
cagtatcaggcatagagcaagcacc

SEQ ID NO: 4177303 - DNA, 25 bp, Homo sapien
tgagggatgaccgtggacttccgaa

SEQ ID NO: 4177304 - DNA, 25 bp, Homo sapien
aaagggcagcctgtacaaatccatg

SEQ ID NO: 4177305 - DNA, 25 bp, Homo sapien
tcagcaggcgctgtcttagatcagt

SEQ ID NO: 4177306 - DNA, 25 bp, Homo sapien
gacttcgtgtagcacaaagggcagc

SEQ ID NO: 4177307 - DNA, 25 bp, Homo sapien
gggtgtgcacctgtcaaaactttta

SEQ ID NO: 4177308 - DNA, 25 bp, Homo sapien
cacaatggaatctaactcagcaata

SEQ ID NO: 4177309 - DNA, 25 bp, Homo sapien
tgagagcaaatcgtgactgcctggg

SEQ ID NO: 4177310 - DNA, 25 bp, Homo sapien
tactcgaaggtgtactgttcatctg

SEQ ID NO: 4177311 - DNA, 25 bp, Homo sapien
gctggtttcaggctgacatatggcc

SEQ ID NO: 4177312 - DNA, 25 bp, Homo sapien
gttcagcccaggtctctcatggtta

SEQ ID NO: 4177313 - DNA, 25 bp, Homo sapien
gctgacatatggccgcaggtccagt

SEQ ID NO: 4177314 - DNA, 25 bp, Homo sapien
tgccttgcctgtggggggtcccatc

SEQ ID NO: 4177315 - DNA, 25 bp, Homo sapien
tgcttcccgctgctctacccatgca

SEQ ID NO: 4177316 - DNA, 25 bp, Homo sapien
ttgcaggagagccggcccgatgcat

SEQ ID NO: 4177317 - DNA, 25 bp, Homo sapien
atctgtcttgctggacgttgcagga

SEQ ID NO: 4177318 - DNA, 25 bp, Homo sapien
tgctctacccatgcatctgtcttgc

SEQ ID NO: 4177319 - DNA, 25 bp, Homo sapien
tcacgggacagaccctgttctcctt

SEQ ID NO: 4177320 - DNA, 25 bp, Homo sapien
gggcctgcatgtcgggcttcccgat

SEQ ID NO: 4177321 - DNA, 25 bp, Homo sapien
ttcccgatgttcctccagcagtagc

SEQ ID NO: 4177322 - DNA, 25 bp, Homo sapien
ttttgtggccgtcctctttctcacg

SEQ ID NO: 4177323 - DNA, 25 bp, Homo sapien
cttgtgtgccggtgttgatgaattt

SEQ ID NO: 4177324 - DNA, 25 bp, Homo sapien
tccttttgggaagtgaataatgatc

SEQ ID NO: 4177325 - DNA, 25 bp, Homo sapien
aaatccttttgggaagtgaataatg

SEQ ID NO: 4177326 - DNA, 25 bp, Homo sapien
cttttgggaagtgaataatgatcac

SEQ ID NO: 4177327 - DNA, 25 bp, Homo sapien
aatccttttgggaagtgaataatga

SEQ ID NO: 4177328 - DNA, 25 bp, Homo sapien
gtagtgatgcctggatgacatggag

SEQ ID NO: 4177329 - DNA, 25 bp, Homo sapien
tggcaatctgcggagctagtggggc

SEQ ID NO: 4177330 - DNA, 25 bp, Homo sapien
ggctggcaatctgcggagctagtgg

SEQ ID NO: 4177331 - DNA, 25 bp, Homo sapien
caatctgcggagctagtggggcagg

SEQ ID NO: 4177332 - DNA, 25 bp, Homo sapien
tctgctcagtttcacccactgtgga

SEQ ID NO: 4177333 - DNA, 25 bp, Homo sapien
caggaggctgttctcctggtttctg

SEQ ID NO: 4177334 - DNA, 25 bp, Homo sapien
tcagccaggaggctgttctcctggt

SEQ ID NO: 4177335 - DNA, 25 bp, Homo sapien
tttctgctcagtttcacccactgtg

SEQ ID NO: 4177336 - DNA, 25 bp, Homo sapien
gctgtgggcacccatatttgcagcc

SEQ ID NO: 4177337 - DNA, 25 bp, Homo sapien
tgcagcccgggctctaggtcagggg

SEQ ID NO: 4177338 - DNA, 25 bp, Homo sapien
ctgctgtgggcacccatatttgcag

SEQ ID NO: 4177339 - DNA, 25 bp, Homo sapien
ggctctaggtcaggggcaagtgtgg

SEQ ID NO: 4177340 - DNA, 25 bp, Homo sapien
gctttatgagtgtctacactttcaa

SEQ ID NO: 4177341 - DNA, 25 bp, Homo sapien
aaggctggctgctttatgagtgtct

SEQ ID NO: 4177342 - DNA, 25 bp, Homo sapien
tatgagtgtctacactttcaaccat

SEQ ID NO: 4177343 - DNA, 25 bp, Homo sapien
tggctgctttatgagtgtctacact

SEQ ID NO: 4177344 - DNA, 25 bp, Homo sapien
gttgttgttgctatcattattctct

SEQ ID NO: 4177345 - DNA, 25 bp, Homo sapien
ccaacacaagccccgaggggcctag

SEQ ID NO: 4177346 - DNA, 25 bp, Homo sapien
caacacaagccccgaggggcctagg

SEQ ID NO: 4177347 - DNA, 25 bp, Homo sapien
ctgggacggaagtcctcccaaagtg

SEQ ID NO: 4177348 - DNA, 25 bp, Homo sapien
tcccaggaagctgtcaaattcgcct

SEQ ID NO: 4177349 - DNA, 25 bp, Homo sapien
aattcgcctggccacacatgaacca

SEQ ID NO: 4177350 - DNA, 25 bp, Homo sapien
tgtcaaattcgcctggccacacatg

SEQ ID NO: 4177351 - DNA, 25 bp, Homo sapien
aagctgtcaaattcgcctggccaca

SEQ ID NO: 4177352 - DNA, 25 bp, Homo sapien
ctctggcttcgaggagctcccagtc

SEQ ID NO: 4177353 - DNA, 25 bp, Homo sapien
tcccagtctcgaggaggacaaggct

SEQ ID NO: 4177354 - DNA, 25 bp, Homo sapien
tgattgaggtgtggtagccctcacg

SEQ ID NO: 4177355 - DNA, 25 bp, Homo sapien
ccctcacgggcatgagagcccagat

SEQ ID NO: 4177356 - DNA, 25 bp, Homo sapien
cgctgactatttcgtgaaatgcttc

SEQ ID NO: 4177357 - DNA, 25 bp, Homo sapien
aaagttgttccccaagagtattcag

SEQ ID NO: 4177358 - DNA, 25 bp, Homo sapien
gcgatgccgctgactatttcgtgaa

SEQ ID NO: 4177359 - DNA, 25 bp, Homo sapien
ttgttccccaagagtattcagcagg

SEQ ID NO: 4177360 - DNA, 25 bp, Homo sapien
ggcggtcgtcgggcagtgtttgctg

SEQ ID NO: 4177361 - DNA, 25 bp, Homo sapien
catggcggtcgtcgggcagtgtttg

SEQ ID NO: 4177362 - DNA, 25 bp, Homo sapien
gcctgaggttgcatcaagctgggaa

SEQ ID NO: 4177363 - DNA, 25 bp, Homo sapien
ctgcctgaggttgcatcaagctggg

SEQ ID NO: 4177364 - DNA, 25 bp, Homo sapien
tgcctcagccaggtacatcactgtc

SEQ ID NO: 4177365 - DNA, 25 bp, Homo sapien
tctgtggtaagaaggccccaaggga

SEQ ID NO: 4177366 - DNA, 25 bp, Homo sapien
tcctcagcatcttgacaggctgtgg

SEQ ID NO: 4177367 - DNA, 25 bp, Homo sapien
atgcctggtctgtggtaagaaggcc

SEQ ID NO: 4177368 - DNA, 25 bp, Homo sapien
tctcccagagggtttgccaaggctc

SEQ ID NO: 4177369 - DNA, 25 bp, Homo sapien
agctctcccagagggtttgccaagg

SEQ ID NO: 4177370 - DNA, 25 bp, Homo sapien
gtttgccaaggctccctgggccttg

SEQ ID NO: 4177371 - DNA, 25 bp, Homo sapien
cagagggtttgccaaggctccctgg

SEQ ID NO: 4177372 - DNA, 25 bp, Homo sapien
cagatgctggcagtcttcatggagc

SEQ ID NO: 4177373 - DNA, 25 bp, Homo sapien
cagcctcccgctccattggtcctgt

SEQ ID NO: 4177374 - DNA, 25 bp, Homo sapien
ggtcctgtctgcatgactgctcctc

SEQ ID NO: 4177375 - DNA, 25 bp, Homo sapien
ggcagtcttcatggagccagcctcc

SEQ ID NO: 4177376 - DNA, 25 bp, Homo sapien
gcactgaaaacagtccttacactgt

SEQ ID NO: 4177377 - DNA, 25 bp, Homo sapien
aaaacagtccttacactgtctcctc

SEQ ID NO: 4177378 - DNA, 25 bp, Homo sapien
tgaaaacagtccttacactgtctcc

SEQ ID NO: 4177379 - DNA, 25 bp, Homo sapien
tggctccattatgcaggaccctgca

SEQ ID NO: 4177380 - DNA, 25 bp, Homo sapien
tagatgaacagtcttgaggcccaga

SEQ ID NO: 4177381 - DNA, 25 bp, Homo sapien
ggaccctattctgtgagcatgagca

SEQ ID NO: 4177382 - DNA, 25 bp, Homo sapien
gacctgggtctcaccaaacctgatc

SEQ ID NO: 4177383 - DNA, 25 bp, Homo sapien
taatctgccgaagccatagatgaac

SEQ ID NO: 4177384 - DNA, 25 bp, Homo sapien
tccagagtgagactttcctcacttt

SEQ ID NO: 4177385 - DNA, 25 bp, Homo sapien
tagaccaggtgccttggggcacatg

SEQ ID NO: 4177386 - DNA, 25 bp, Homo sapien
tgctccctttcaacagctctccagg

SEQ ID NO: 4177387 - DNA, 25 bp, Homo sapien
caaggctgagggtaatgtttctaca

SEQ ID NO: 4177388 - DNA, 25 bp, Homo sapien
gcaatgctgtatgtgctgaatcccg

SEQ ID NO: 4177389 - DNA, 25 bp, Homo sapien
tctgacttgaaatagaaggacaagg

SEQ ID NO: 4177390 - DNA, 25 bp, Homo sapien
caaggattccatcgggctttccctg

SEQ ID NO: 4177391 - DNA, 25 bp, Homo sapien
tggtctgctgattctcctccactct

SEQ ID NO: 4177392 - DNA, 25 bp, Homo sapien
ctctgggatggggactgggtcagga

SEQ ID NO: 4177393 - DNA, 25 bp, Homo sapien
gggatggggactgggtcaggagagt

SEQ ID NO: 4177394 - DNA, 25 bp, Homo sapien
ctgggatggggactgggtcaggaga

SEQ ID NO: 4177395 - DNA, 25 bp, Homo sapien
atggggactgggtcaggagagttta

SEQ ID NO: 4177396 - DNA, 25 bp, Homo sapien
caggctcctggagatctgggcatct

SEQ ID NO: 4177397 - DNA, 25 bp, Homo sapien
ctcctggagatctgggcatctggag

SEQ ID NO: 4177398 - DNA, 25 bp, Homo sapien
gtggtgtaaatagatgcaaagccag

SEQ ID NO: 4177399 - DNA, 25 bp, Homo sapien
ctgtggtgtaaatagatgcaaagcc

SEQ ID NO: 4177400 - DNA, 25 bp, Homo sapien
taacactcccgtgcttagtcttggt

SEQ ID NO: 4177401 - DNA, 25 bp, Homo sapien
tcattaccagccaaccagttcacca

SEQ ID NO: 4177402 - DNA, 25 bp, Homo sapien
tctgagttagcaactcattaccagc

SEQ ID NO: 4177403 - DNA, 25 bp, Homo sapien
caccctcttatatccaatgatctga

SEQ ID NO: 4177404 - DNA, 25 bp, Homo sapien
attggatgtttgcagattccaagga

SEQ ID NO: 4177405 - DNA, 25 bp, Homo sapien
ttggatgtttgcagattccaaggaa

SEQ ID NO: 4177406 - DNA, 25 bp, Homo sapien
tggatgtttgcagattccaaggaac

SEQ ID NO: 4177407 - DNA, 25 bp, Homo sapien
tggaagcagggacgcgagcggcgat

SEQ ID NO: 4177408 - DNA, 25 bp, Homo sapien
tcagggccccgcactcccggctggg

SEQ ID NO: 4177409 - DNA, 25 bp, Homo sapien
gagcggcgatttcccgatttatgtt

SEQ ID NO: 4177410 - DNA, 25 bp, Homo sapien
catggtaatttgtctttgtggttgg

SEQ ID NO: 4177411 - DNA, 25 bp, Homo sapien
gcctgcggagcgtgaactctgccca

SEQ ID NO: 4177412 - DNA, 25 bp, Homo sapien
ggcctgcggagcgtgaactctgccc

SEQ ID NO: 4177413 - DNA, 25 bp, Homo sapien
caggcctgcggagcgtgaactctgc

SEQ ID NO: 4177414 - DNA, 25 bp, Homo sapien
cctgcggagcgtgaactctgcccac

SEQ ID NO: 4177415 - DNA, 25 bp, Homo sapien
tgagagccctcatcgctgctgcgtt

SEQ ID NO: 4177416 - DNA, 25 bp, Homo sapien
ctcggcttgagagccctcatcgctg

SEQ ID NO: 4177417 - DNA, 25 bp, Homo sapien
ccagggctgtggtcggcgcatctgg

SEQ ID NO: 4177418 - DNA, 25 bp, Homo sapien
agccagcttgggtccgggttgcact

SEQ ID NO: 4177419 - DNA, 25 bp, Homo sapien
tgcacccgcctctgggaggtgagtc

SEQ ID NO: 4177420 - DNA, 25 bp, Homo sapien
gggctgcaacttgcaaacttcagca

SEQ ID NO: 4177421 - DNA, 25 bp, Homo sapien
acttcagcaactcgggtgggtatcg

SEQ ID NO: 4177422 - DNA, 25 bp, Homo sapien
tctggcaagttgaagccaggtaggt

SEQ ID NO: 4177423 - DNA, 25 bp, Homo sapien
ctgagcaaggttttggttcacaaat

SEQ ID NO: 4177424 - DNA, 25 bp, Homo sapien
tgagcaaggttttggttcacaaatt

SEQ ID NO: 4177425 - DNA, 25 bp, Homo sapien
ggttcacaaattgacaatgacttct

SEQ ID NO: 4177426 - DNA, 25 bp, Homo sapien
ttggttcacaaattgacaatgactt

SEQ ID NO: 4177427 - DNA, 25 bp, Homo sapien
gaagcctggtgtcatccctgaacca

SEQ ID NO: 4177428 - DNA, 25 bp, Homo sapien
tgtcttccttgcctggagttgagcc

SEQ ID NO: 4177429 - DNA, 25 bp, Homo sapien
tcagcccaaatctgacagtctgtgc

SEQ ID NO: 4177430 - DNA, 25 bp, Homo sapien
taaacatccgaagagttgccactgt

SEQ ID NO: 4177431 - DNA, 25 bp, Homo sapien
atgccttcaagaagggtgaccacac

SEQ ID NO: 4177432 - DNA, 25 bp, Homo sapien
ctagtgttcaaatgccttcaagaag

SEQ ID NO: 4177433 - DNA, 25 bp, Homo sapien
gttcaaatgccttcaagaagggtga

SEQ ID NO: 4177434 - DNA, 25 bp, Homo sapien
tcaaatgccttcaagaagggtgacc

SEQ ID NO: 4177435 - DNA, 25 bp, Homo sapien
ttctaaccctttctggcctgtcttc

SEQ ID NO: 4177436 - DNA, 25 bp, Homo sapien
tcccctccagcgagtatttgggttg

SEQ ID NO: 4177437 - DNA, 25 bp, Homo sapien
ttattgatgagtttactgattgcca

SEQ ID NO: 4177438 - DNA, 25 bp, Homo sapien
gtcttccctcggcagccttgagtta

SEQ ID NO: 4177439 - DNA, 25 bp, Homo sapien
gtcccctagtagcagtgtgcttctg

SEQ ID NO: 4177440 - DNA, 25 bp, Homo sapien
cttctgaggtggatagtggtgtctg

SEQ ID NO: 4177441 - DNA, 25 bp, Homo sapien
gtttgcagtttctgcgggcctcata

SEQ ID NO: 4177442 - DNA, 25 bp, Homo sapien
ttccctaagtggtcccctagtagca

SEQ ID NO: 4177443 - DNA, 25 bp, Homo sapien
gccattggtgtcctttaactcttcc

SEQ ID NO: 4177444 - DNA, 25 bp, Homo sapien
ccattggtgtcctttaactcttcca

SEQ ID NO: 4177445 - DNA, 25 bp, Homo sapien
tggccattggtgtcctttaactctt

SEQ ID NO: 4177446 - DNA, 25 bp, Homo sapien
tgtggccattggtgtcctttaactc

SEQ ID NO: 4177447 - DNA, 25 bp, Homo sapien
tggtcctccagaatagctttttctt

SEQ ID NO: 4177448 - DNA, 25 bp, Homo sapien
caaatcaaaggtcggagctgcctcc

SEQ ID NO: 4177449 - DNA, 25 bp, Homo sapien
agcaaatcaaaggtcggagctgcct

SEQ ID NO: 4177450 - DNA, 25 bp, Homo sapien
tcctcagtgattgcttggtcctcca

SEQ ID NO: 4177451 - DNA, 25 bp, Homo sapien
ggtgaaggttgtgtcctgtctgctc

SEQ ID NO: 4177452 - DNA, 25 bp, Homo sapien
gggtgaaggttgtgtcctgtctgct

SEQ ID NO: 4177453 - DNA, 25 bp, Homo sapien
gtgaaggttgtgtcctgtctgctct

SEQ ID NO: 4177454 - DNA, 25 bp, Homo sapien
tcttgactgaggactctcacagagg

SEQ ID NO: 4177455 - DNA, 25 bp, Homo sapien
gggatgagacgttttcctttgtcat

SEQ ID NO: 4177456 - DNA, 25 bp, Homo sapien
tcccatatctcgtttccaccaaggc

SEQ ID NO: 4177457 - DNA, 25 bp, Homo sapien
tcatctctagctcccatatctcgtt

SEQ ID NO: 4177458 - DNA, 25 bp, Homo sapien
ctgctagctccaccgcggccaacca

SEQ ID NO: 4177459 - DNA, 25 bp, Homo sapien
gcccgcccgcctgctagctccaccg

SEQ ID NO: 4177460 - DNA, 25 bp, Homo sapien
ctccaccgcggccaaccaccacggc

SEQ ID NO: 4177461 - DNA, 25 bp, Homo sapien
cgcctgctagctccaccgcggccaa

SEQ ID NO: 4177462 - DNA, 25 bp, Homo sapien
ccagattgccagcagcagccacgcc

SEQ ID NO: 4177463 - DNA, 25 bp, Homo sapien
gccagcagcagccacgccggcccgg

SEQ ID NO: 4177464 - DNA, 25 bp, Homo sapien
agattgccagcagcagccacgccgg

SEQ ID NO: 4177465 - DNA, 25 bp, Homo sapien
cagcagcagccacgccggcccggcc

SEQ ID NO: 4177466 - DNA, 25 bp, Homo sapien
tgctggcccggcccggatccctgcc

SEQ ID NO: 4177467 - DNA, 25 bp, Homo sapien
gctggcccggcccggatccctgccc

SEQ ID NO: 4177468 - DNA, 25 bp, Homo sapien
tggcccggcccggatccctgcccca

SEQ ID NO: 4177469 - DNA, 25 bp, Homo sapien
gtgctggcccggcccggatccctgc

SEQ ID NO: 4177470 - DNA, 25 bp, Homo sapien
catccccgcaaagttgtggccgtgg

SEQ ID NO: 4177471 - DNA, 25 bp, Homo sapien
ctgcgtccgggagcgcttggcggcg

SEQ ID NO: 4177472 - DNA, 25 bp, Homo sapien
ctgtctcccgcgtagcacccagtgc

SEQ ID NO: 4177473 - DNA, 25 bp, Homo sapien
gagggcaccgggacgcccgctgtct

SEQ ID NO: 4177474 - DNA, 25 bp, Homo sapien
ggcgtcctgcccgaccggctgtgcc

SEQ ID NO: 4177475 - DNA, 25 bp, Homo sapien
ccgccggcgtcctgcccgaccggct

SEQ ID NO: 4177476 - DNA, 25 bp, Homo sapien
ccggcgtcctgcccgaccggctgtg

SEQ ID NO: 4177477 - DNA, 25 bp, Homo sapien
gcgtcctgcccgaccggctgtgccc

SEQ ID NO: 4177478 - DNA, 25 bp, Homo sapien
gctcggagtctggagcggagctcac

SEQ ID NO: 4177479 - DNA, 25 bp, Homo sapien
agggctcggagtctggagcggagct

SEQ ID NO: 4177480 - DNA, 25 bp, Homo sapien
gggctcggagtctggagcggagctc

SEQ ID NO: 4177481 - DNA, 25 bp, Homo sapien
ggctcggagtctggagcggagctca

SEQ ID NO: 4177482 - DNA, 25 bp, Homo sapien
tcccaggttctagtgctttcagcaa

SEQ ID NO: 4177483 - DNA, 25 bp, Homo sapien
aaatttacaaagacccaacgcgctg

SEQ ID NO: 4177484 - DNA, 25 bp, Homo sapien
tgttctacaccaccagtctatggga

SEQ ID NO: 4177485 - DNA, 25 bp, Homo sapien
tatatccctgtacacgaatccctgc

SEQ ID NO: 4177486 - DNA, 25 bp, Homo sapien
catggacggccctagagaagagtca

SEQ ID NO: 4177487 - DNA, 25 bp, Homo sapien
caacaggacaatcagcatggacggc

SEQ ID NO: 4177488 - DNA, 25 bp, Homo sapien
ggacggccctagagaagagtcagct

SEQ ID NO: 4177489 - DNA, 25 bp, Homo sapien
gcatggacggccctagagaagagtc

SEQ ID NO: 4177490 - DNA, 25 bp, Homo sapien
agggaatggacactccacccttgcg

SEQ ID NO: 4177491 - DNA, 25 bp, Homo sapien
ccccgcaactctagtgagctggaaa

SEQ ID NO: 4177492 - DNA, 25 bp, Homo sapien
ttggaggaactgtaggattctttgc

SEQ ID NO: 4177493 - DNA, 25 bp, Homo sapien
tccagaaatctgcctgcgccaaggg

SEQ ID NO: 4177494 - DNA, 25 bp, Homo sapien
gataggtcgatcagggagaatccag

SEQ ID NO: 4177495 - DNA, 25 bp, Homo sapien
cacagatgcagacaagtgggagccc

SEQ ID NO: 4177496 - DNA, 25 bp, Homo sapien
ctgtgtctggcctcagacagaccct

SEQ ID NO: 4177497 - DNA, 25 bp, Homo sapien
gatggggtccaaagagctaagacac

SEQ ID NO: 4177498 - DNA, 25 bp, Homo sapien
tcaaggagccaacgactgtgagttc

SEQ ID NO: 4177499 - DNA, 25 bp, Homo sapien
ggatcaaggagccaacgactgtgag

SEQ ID NO: 4177500 - DNA, 25 bp, Homo sapien
gctgggccccagaagaatcggtgcc

SEQ ID NO: 4177501 - DNA, 25 bp, Homo sapien
ctggggatcaaggagccaacgactg

SEQ ID NO: 4177502 - DNA, 25 bp, Homo sapien
gggtcagagattctctcaatgagcg

SEQ ID NO: 4177503 - DNA, 25 bp, Homo sapien
agatttggagtaaagcaccagtaca

SEQ ID NO: 4177504 - DNA, 25 bp, Homo sapien
acattattccgggttctgagcagtt

SEQ ID NO: 4177505 - DNA, 25 bp, Homo sapien
caatgagcgaggagacctttgcaga

SEQ ID NO: 4177506 - DNA, 25 bp, Homo sapien
ggccactgtggacagtaacctgaga

SEQ ID NO: 4177507 - DNA, 25 bp, Homo sapien
cctttcaccgcctgggccactgtgg

SEQ ID NO: 4177508 - DNA, 25 bp, Homo sapien
tgtggacagtaacctgagatgattt

SEQ ID NO: 4177509 - DNA, 25 bp, Homo sapien
tcccttgtcctttcaccgcctgggc

SEQ ID NO: 4177510 - DNA, 25 bp, Homo sapien
ctccctctgggaagacagaagaaag

SEQ ID NO: 4177511 - DNA, 25 bp, Homo sapien
agaaacacatggaaatagaagaaag

SEQ ID NO: 4177512 - DNA, 25 bp, Homo sapien
aaagaaacacatggaaatagaagaa

SEQ ID NO: 4177513 - DNA, 25 bp, Homo sapien
acacatggaaatagaagaaagtgaa

SEQ ID NO: 4177514 - DNA, 25 bp, Homo sapien
ctgggggcccactccataggtggct

SEQ ID NO: 4177515 - DNA, 25 bp, Homo sapien
caccctgcgctgcatgttttccagg

SEQ ID NO: 4177516 - DNA, 25 bp, Homo sapien
gttctgggggcccactccataggtg

SEQ ID NO: 4177517 - DNA, 25 bp, Homo sapien
accctgcgctgcatgttttccaggc

SEQ ID NO: 4177518 - DNA, 25 bp, Homo sapien
aagggatcctcacccagtaaacagt

SEQ ID NO: 4177519 - DNA, 25 bp, Homo sapien
cagtaaacagttgctgagtgaacaa

SEQ ID NO: 4177520 - DNA, 25 bp, Homo sapien
gagtgaacaagcataccacttctcc

SEQ ID NO: 4177521 - DNA, 25 bp, Homo sapien
cagttgctgagtgaacaagcatacc

SEQ ID NO: 4177522 - DNA, 25 bp, Homo sapien
ccctcccccagccaatgactgaggt

SEQ ID NO: 4177523 - DNA, 25 bp, Homo sapien
tccctcccccagccaatgactgagg

SEQ ID NO: 4177524 - DNA, 25 bp, Homo sapien
cctcccccagccaatgactgaggtt

SEQ ID NO: 4177525 - DNA, 25 bp, Homo sapien
ctccctcccccagccaatgactgag

SEQ ID NO: 4177526 - DNA, 25 bp, Homo sapien
tccccagccctgaaaggactcagta

SEQ ID NO: 4177527 - DNA, 25 bp, Homo sapien
agccctgaaaggactcagtaagggc

SEQ ID NO: 4177528 - DNA, 25 bp, Homo sapien
ctccccagccctgaaaggactcagt

SEQ ID NO: 4177529 - DNA, 25 bp, Homo sapien
cccagccctgaaaggactcagtaag

SEQ ID NO: 4177530 - DNA, 25 bp, Homo sapien
ccttactatagatgggctgtgagag

SEQ ID NO: 4177531 - DNA, 25 bp, Homo sapien
tgaaggccttactatagatgggctg

SEQ ID NO: 4177532 - DNA, 25 bp, Homo sapien
taacttggaattctcaatagcagat

SEQ ID NO: 4177533 - DNA, 25 bp, Homo sapien
gcagatgaaggccttactatagatg

SEQ ID NO: 4177534 - DNA, 25 bp, Homo sapien
tgttgggaaccatttattacctgaa

SEQ ID NO: 4177535 - DNA, 25 bp, Homo sapien
cctgaagtcctcacaaaggtgttga

SEQ ID NO: 4177536 - DNA, 25 bp, Homo sapien
ttattacctgaagtcctcacaaagg

SEQ ID NO: 4177537 - DNA, 25 bp, Homo sapien
agacacaaatgttgggaaccattta

SEQ ID NO: 4177538 - DNA, 25 bp, Homo sapien
tcaacctttttgtccttcgggctca

SEQ ID NO: 4177539 - DNA, 25 bp, Homo sapien
gggctcaggtcaactttcatcttct

SEQ ID NO: 4177540 - DNA, 25 bp, Homo sapien
tcttgcacaattttctactctctgc

SEQ ID NO: 4177541 - DNA, 25 bp, Homo sapien
ccttcgggctcaggtcaactttcat

SEQ ID NO: 4177542 - DNA, 25 bp, Homo sapien
attggaaatgcccatgtgtacttac

SEQ ID NO: 4177543 - DNA, 25 bp, Homo sapien
ttggaaattggaaatgcccatgtgt

SEQ ID NO: 4177544 - DNA, 25 bp, Homo sapien
taatctaactaaaaattgctgttcg

SEQ ID NO: 4177545 - DNA, 25 bp, Homo sapien
ctgttcgctgaaaataccaatgaaa

SEQ ID NO: 4177546 - DNA, 25 bp, Homo sapien
cagctcggttatattcagtatgaaa

SEQ ID NO: 4177547 - DNA, 25 bp, Homo sapien
aatgtcacagctcggttatattcag

SEQ ID NO: 4177548 - DNA, 25 bp, Homo sapien
cttaaatgtcacagctcggttatat

SEQ ID NO: 4177549 - DNA, 25 bp, Homo sapien
tgtcacagctcggttatattcagta

SEQ ID NO: 4177550 - DNA, 25 bp, Homo sapien
ctgagggtggccactaccacagaga

SEQ ID NO: 4177551 - DNA, 25 bp, Homo sapien
gcctgagggtggccactaccacaga

SEQ ID NO: 4177552 - DNA, 25 bp, Homo sapien
agcctgagggtggccactaccacag

SEQ ID NO: 4177553 - DNA, 25 bp, Homo sapien
cctgagggtggccactaccacagag

SEQ ID NO: 4177554 - DNA, 25 bp, Homo sapien
ggttccagaaatacctggtgcaggg

SEQ ID NO: 4177555 - DNA, 25 bp, Homo sapien
ctggggttccagaaatacctggtgc

SEQ ID NO: 4177556 - DNA, 25 bp, Homo sapien
cagaaatacctggtgcaggggttct

SEQ ID NO: 4177557 - DNA, 25 bp, Homo sapien
aatacctggtgcaggggttcttaat

SEQ ID NO: 4177558 - DNA, 25 bp, Homo sapien
tgagaaagatgctggtaggcaccca

SEQ ID NO: 4177559 - DNA, 25 bp, Homo sapien
gagaaagatgctggtaggcacccac

SEQ ID NO: 4177560 - DNA, 25 bp, Homo sapien
actgtcaaggtggacaacatctttg

SEQ ID NO: 4177561 - DNA, 25 bp, Homo sapien
ttcactgtcaaggtggacaacatct

SEQ ID NO: 4177562 - DNA, 25 bp, Homo sapien
tgtcaaggtggacaacatctttggc

SEQ ID NO: 4177563 - DNA, 25 bp, Homo sapien
tcaaggtggacaacatctttggctc

SEQ ID NO: 4177564 - DNA, 25 bp, Homo sapien
ccttcttcaggagccgtctgaagtc

SEQ ID NO: 4177565 - DNA, 25 bp, Homo sapien
tccttcttcaggagccgtctgaagt

SEQ ID NO: 4177566 - DNA, 25 bp, Homo sapien
aaacatgatcaggagcggcttctct

SEQ ID NO: 4177567 - DNA, 25 bp, Homo sapien
tcgcagccttctggaaatgcggcat

SEQ ID NO: 4177568 - DNA, 25 bp, Homo sapien
ctgagtcgcagccttctggaaatgc

SEQ ID NO: 4177569 - DNA, 25 bp, Homo sapien
ctcgcagctgagtcgcagccttctg

SEQ ID NO: 4177570 - DNA, 25 bp, Homo sapien
gcagctgagtcgcagccttctggaa

SEQ ID NO: 4177571 - DNA, 25 bp, Homo sapien
gtcccagcaacttggtggagttctc

SEQ ID NO: 4177572 - DNA, 25 bp, Homo sapien
tgtcaaactctcctggtcccagcaa

SEQ ID NO: 4177573 - DNA, 25 bp, Homo sapien
ctatttcatcactggcctttggcag

SEQ ID NO: 4177574 - DNA, 25 bp, Homo sapien
ggtggagttctcaaccttcacagag

SEQ ID NO: 4177575 - DNA, 25 bp, Homo sapien
cggcctgtggagaagataagaacac

SEQ ID NO: 4177576 - DNA, 25 bp, Homo sapien
gtctcggcctgtggagaagataaga

SEQ ID NO: 4177577 - DNA, 25 bp, Homo sapien
catctgcatgcttggggccactcag

SEQ ID NO: 4177578 - DNA, 25 bp, Homo sapien
tgccatctgcatgcttggggccact

SEQ ID NO: 4177579 - DNA, 25 bp, Homo sapien
catgtggcagtatgtccggctagta

SEQ ID NO: 4177580 - DNA, 25 bp, Homo sapien
cacaaagcagagtggcatagaagcg

SEQ ID NO: 4177581 - DNA, 25 bp, Homo sapien
taccagagaacacagctagaatggc

SEQ ID NO: 4177582 - DNA, 25 bp, Homo sapien
tagaatggcccgacacacaaaggtt

SEQ ID NO: 4177583 - DNA, 25 bp, Homo sapien
agccgcgcacgctgtactcctcctt

SEQ ID NO: 4177584 - DNA, 25 bp, Homo sapien
tcagaggagtagacattcatcccgg

SEQ ID NO: 4177585 - DNA, 25 bp, Homo sapien
ggagtagacattcatcccggccagc

SEQ ID NO: 4177586 - DNA, 25 bp, Homo sapien
gaggagtagacattcatcccggcca

SEQ ID NO: 4177587 - DNA, 25 bp, Homo sapien
ggaggtgagctttagaaggaaagtg

SEQ ID NO: 4177588 - DNA, 25 bp, Homo sapien
ggagggaggtgagctttagaaggaa

SEQ ID NO: 4177589 - DNA, 25 bp, Homo sapien
aggtgagctttagaaggaaagtggg

SEQ ID NO: 4177590 - DNA, 25 bp, Homo sapien
agggagggaggtgagctttagaagg

SEQ ID NO: 4177591 - DNA, 25 bp, Homo sapien
ctgtggacccatagttgtcatactg

SEQ ID NO: 4177592 - DNA, 25 bp, Homo sapien
catactggaacaagaaccgtccttt

SEQ ID NO: 4177593 - DNA, 25 bp, Homo sapien
tcagctgtggacccatagttgtcat

SEQ ID NO: 4177594 - DNA, 25 bp, Homo sapien
gacccatagttgtcatactggaaca

SEQ ID NO: 4177595 - DNA, 25 bp, Homo sapien
aggtaatgatgtcaataaatgtcca

SEQ ID NO: 4177596 - DNA, 25 bp, Homo sapien
cctccatatcttggataactaattc

SEQ ID NO: 4177597 - DNA, 25 bp, Homo sapien
gtttgcacactgtgttcctaaggta

SEQ ID NO: 4177598 - DNA, 25 bp, Homo sapien
cattttcaacctccatatcttggat

SEQ ID NO: 4177599 - DNA, 25 bp, Homo sapien
catgacgaggacagaggagtgttcc

SEQ ID NO: 4177600 - DNA, 25 bp, Homo sapien
catcggtcaggtgataaacggagcc

SEQ ID NO: 4177601 - DNA, 25 bp, Homo sapien
gtgataaacggagccgccctcatct

SEQ ID NO: 4177602 - DNA, 25 bp, Homo sapien
aaactggtcaaagtcttcatcggtc

SEQ ID NO: 4177603 - DNA, 25 bp, Homo sapien
gggactgacacctggaacactgtga

SEQ ID NO: 4177604 - DNA, 25 bp, Homo sapien
ggatgacactgctggtctctggcct

SEQ ID NO: 4177605 - DNA, 25 bp, Homo sapien
aaatcactccgtatttggcctggga

SEQ ID NO: 4177606 - DNA, 25 bp, Homo sapien
gcacttaggaaacgcaggatgacac

SEQ ID NO: 4177607 - DNA, 25 bp, Homo sapien
gaggggtgccgtgtgcctttcctgc

SEQ ID NO: 4177608 - DNA, 25 bp, Homo sapien
tgatgggtaacacagaacggggagg

SEQ ID NO: 4177609 - DNA, 25 bp, Homo sapien
cagcctcacaagcatcccatcagtt

SEQ ID NO: 4177610 - DNA, 25 bp, Homo sapien
tcacaagcatcccatcagttccagg

SEQ ID NO: 4177611 - DNA, 25 bp, Homo sapien
gagcatctccgtcgcctgcagggtg

SEQ ID NO: 4177612 - DNA, 25 bp, Homo sapien
catctccgtcgcctgcagggtggga

SEQ ID NO: 4177613 - DNA, 25 bp, Homo sapien
agagagcatctccgtcgcctgcagg

SEQ ID NO: 4177614 - DNA, 25 bp, Homo sapien
atctccgtcgcctgcagggtgggaa

SEQ ID NO: 4177615 - DNA, 25 bp, Homo sapien
catggcttgcactcaaatagtcgtt

SEQ ID NO: 4177616 - DNA, 25 bp, Homo sapien
taattagtagaactggcaaccaagc

SEQ ID NO: 4177617 - DNA, 25 bp, Homo sapien
tctgaccctgaataagacactaagg

SEQ ID NO: 4177618 - DNA, 25 bp, Homo sapien
caaacagagtttaagatgaggagcc

SEQ ID NO: 4177619 - DNA, 25 bp, Homo sapien
cctccatgatatggatggtgctgtt

SEQ ID NO: 4177620 - DNA, 25 bp, Homo sapien
atgatatggatggtgctgttaggcc

SEQ ID NO: 4177621 - DNA, 25 bp, Homo sapien
ctgttaggccagctgctggcagggc

SEQ ID NO: 4177622 - DNA, 25 bp, Homo sapien
tccatgatatggatggtgctgttag

SEQ ID NO: 4177623 - DNA, 25 bp, Homo sapien
aacagtgtaatcagaggagacctcc

SEQ ID NO: 4177624 - DNA, 25 bp, Homo sapien
gcggatgacaggtcgtgactcaacc

SEQ ID NO: 4177625 - DNA, 25 bp, Homo sapien
tcccactgagctacggaatcggctt

SEQ ID NO: 4177626 - DNA, 25 bp, Homo sapien
cattaactaggatcagcggatgaca

SEQ ID NO: 4177627 - DNA, 25 bp, Homo sapien
gattagacaattgaggcaccaagag

SEQ ID NO: 4177628 - DNA, 25 bp, Homo sapien
taatacgggcaactggtgtgccagg

SEQ ID NO: 4177629 - DNA, 25 bp, Homo sapien
cagcgtgtaggttgtggcaccatgc

SEQ ID NO: 4177630 - DNA, 25 bp, Homo sapien
ggtactgaccagtgccttacagcct

SEQ ID NO: 4177631 - DNA, 25 bp, Homo sapien
ccttctcaaactccggcttcatttt

SEQ ID NO: 4177632 - DNA, 25 bp, Homo sapien
gcttctccatggagggcttctgctg

SEQ ID NO: 4177633 - DNA, 25 bp, Homo sapien
cttctccatggagggcttctgctgc

SEQ ID NO: 4177634 - DNA, 25 bp, Homo sapien
ctgccttctcaaactccggcttcat

SEQ ID NO: 4177635 - DNA, 25 bp, Homo sapien
agaggtactgctggcctccacggac

SEQ ID NO: 4177636 - DNA, 25 bp, Homo sapien
aagtcataatgattccacctgtcag

SEQ ID NO: 4177637 - DNA, 25 bp, Homo sapien
tgctggcctccacggaccacgggag

SEQ ID NO: 4177638 - DNA, 25 bp, Homo sapien
gattctttcaaagagaacggtgagg

SEQ ID NO: 4177639 - DNA, 25 bp, Homo sapien
tgagcacaggcactgcgtatttctc

SEQ ID NO: 4177640 - DNA, 25 bp, Homo sapien
gccttgttgacagtggcatcgacag

SEQ ID NO: 4177641 - DNA, 25 bp, Homo sapien
tacttcaacgtaggaaactctgaga

SEQ ID NO: 4177642 - DNA, 25 bp, Homo sapien
ttgcatccactcgagaaacttcttc

SEQ ID NO: 4177643 - DNA, 25 bp, Homo sapien
gaagctgcgtccagaaggactgcca

SEQ ID NO: 4177644 - DNA, 25 bp, Homo sapien
cacgtgatcagcatatgaacggtgg

SEQ ID NO: 4177645 - DNA, 25 bp, Homo sapien
ggttgaggaagtcagatccgtcttg

SEQ ID NO: 4177646 - DNA, 25 bp, Homo sapien
gcagtgacctgatcaagacacgtga

SEQ ID NO: 4177647 - DNA, 25 bp, Homo sapien
gcacttttcacaggagtctcattta

SEQ ID NO: 4177648 - DNA, 25 bp, Homo sapien
tcatttaattccctagacaagtcta

SEQ ID NO: 4177649 - DNA, 25 bp, Homo sapien
ttaattccctagacaagtctatggg

SEQ ID NO: 4177650 - DNA, 25 bp, Homo sapien
tgctgagcacttttcacaggagtct

SEQ ID NO: 4177651 - DNA, 25 bp, Homo sapien
ccttgacaagagcatagaggcacct

SEQ ID NO: 4177652 - DNA, 25 bp, Homo sapien
tgacaccatttcaggtcagggcagc

SEQ ID NO: 4177653 - DNA, 25 bp, Homo sapien
gaaaagcatctactcagtcaaggaa

SEQ ID NO: 4177654 - DNA, 25 bp, Homo sapien
agttgtgggccacgaactccttgac

SEQ ID NO: 4177655 - DNA, 25 bp, Homo sapien
tagaacatgaccaaggtgtgtttct

SEQ ID NO: 4177656 - DNA, 25 bp, Homo sapien
ggcgtagaacatgaccaaggtgtgt

SEQ ID NO: 4177657 - DNA, 25 bp, Homo sapien
tcttcagggtctcccggaagttgtc

SEQ ID NO: 4177658 - DNA, 25 bp, Homo sapien
aaggggcgtagaacatgaccaaggt

SEQ ID NO: 4177659 - DNA, 25 bp, Homo sapien
catcagcagtagcagtaaagtgcgg

SEQ ID NO: 4177660 - DNA, 25 bp, Homo sapien
ctttcggtcatctttgaaggcatca

SEQ ID NO: 4177661 - DNA, 25 bp, Homo sapien
gaatgaccttcttacagtgtgggca

SEQ ID NO: 4177662 - DNA, 25 bp, Homo sapien
tagcagtaaagtgcggaatgacctt

SEQ ID NO: 4177663 - DNA, 25 bp, Homo sapien
ttcaagtcaagttccccaagtgcac

SEQ ID NO: 4177664 - DNA, 25 bp, Homo sapien
cactcttggtttgcctggacagtaa

SEQ ID NO: 4177665 - DNA, 25 bp, Homo sapien
ttgcacatctagtccacgtcacagg

SEQ ID NO: 4177666 - DNA, 25 bp, Homo sapien
gaaaataactcagcctcttggtgcc

SEQ ID NO: 4177667 - DNA, 25 bp, Homo sapien
gctgtcatacttttctgcgaacttc

SEQ ID NO: 4177668 - DNA, 25 bp, Homo sapien
tttgacacagtcaacagcggcacag

SEQ ID NO: 4177669 - DNA, 25 bp, Homo sapien
tgctggcacaggtcttggttcttgt

SEQ ID NO: 4177670 - DNA, 25 bp, Homo sapien
tcccatagtggtagtagtggaaagt

SEQ ID NO: 4177671 - DNA, 25 bp, Homo sapien
tgagaaaaccctcggcatctggagt

SEQ ID NO: 4177672 - DNA, 25 bp, Homo sapien
gggactctcctccaacaatgtcaag

SEQ ID NO: 4177673 - DNA, 25 bp, Homo sapien
tctcggtgcagtgttccagctgact

SEQ ID NO: 4177674 - DNA, 25 bp, Homo sapien
acatctgtggcaaccccttgggact

SEQ ID NO: 4177675 - DNA, 25 bp, Homo sapien
cccggagggctcgaatataattggt

SEQ ID NO: 4177676 - DNA, 25 bp, Homo sapien
tcatggtctccctcccggagggctc

SEQ ID NO: 4177677 - DNA, 25 bp, Homo sapien
gctcgaatataattggtaaatccca

SEQ ID NO: 4177678 - DNA, 25 bp, Homo sapien
gtctccctcccggagggctcgaata

SEQ ID NO: 4177679 - DNA, 25 bp, Homo sapien
gtacaaaatggccataagcggctat

SEQ ID NO: 4177680 - DNA, 25 bp, Homo sapien
cataagcggctataaaaaatttgtc

SEQ ID NO: 4177681 - DNA, 25 bp, Homo sapien
aggtatcattcacagtgtaatggaa

SEQ ID NO: 4177682 - DNA, 25 bp, Homo sapien
ggtatcattcacagtgtaatggaaa

SEQ ID NO: 4177683 - DNA, 25 bp, Homo sapien
tggagtagtcatgcgatcatagatc

SEQ ID NO: 4177684 - DNA, 25 bp, Homo sapien
cattgatcatcttgacgtatttcct

SEQ ID NO: 4177685 - DNA, 25 bp, Homo sapien
tcaggagtcacctccatgcagatgg

SEQ ID NO: 4177686 - DNA, 25 bp, Homo sapien
cagcaggatattctgcggtccagtt

SEQ ID NO: 4177687 - DNA, 25 bp, Homo sapien
tgtctttcatatccaatccttgggt

SEQ ID NO: 4177688 - DNA, 25 bp, Homo sapien
tcaataattgtgtttcaatgatgtc

SEQ ID NO: 4177689 - DNA, 25 bp, Homo sapien
ccaatccttgggtgaagtccagggg

SEQ ID NO: 4177690 - DNA, 25 bp, Homo sapien
gttcatggtccccaacaggaaggga

SEQ ID NO: 4177691 - DNA, 25 bp, Homo sapien
cccgtgcccggcgcagaacagctcc

SEQ ID NO: 4177692 - DNA, 25 bp, Homo sapien
ggaagcatcaccttcccgtgcccgg

SEQ ID NO: 4177693 - DNA, 25 bp, Homo sapien
cgtgcccggcgcagaacagctcctg

SEQ ID NO: 4177694 - DNA, 25 bp, Homo sapien
tggaagcatcaccttcccgtgcccg

SEQ ID NO: 4177695 - DNA, 25 bp, Homo sapien
tttccagatgagattccacatcttc

SEQ ID NO: 4177696 - DNA, 25 bp, Homo sapien
ttgccttcctaagagggcctgatgc

SEQ ID NO: 4177697 - DNA, 25 bp, Homo sapien
acccctggacataggctttgccttc

SEQ ID NO: 4177698 - DNA, 25 bp, Homo sapien
cctgtgttattccatgtgatgtggg

SEQ ID NO: 4177699 - DNA, 25 bp, Homo sapien
ggaaaacaagttagtggctgccaag

SEQ ID NO: 4177700 - DNA, 25 bp, Homo sapien
gacatacaggcagacatactgaccg

SEQ ID NO: 4177701 - DNA, 25 bp, Homo sapien
agtgacaagactactcagggaggaa

SEQ ID NO: 4177702 - DNA, 25 bp, Homo sapien
tacgaaatttcaagggacccatcca

SEQ ID NO: 4177703 - DNA, 25 bp, Homo sapien
ttaagacagggtggtattactggag

SEQ ID NO: 4177704 - DNA, 25 bp, Homo sapien
tatacccgtgtaagtacagccaact

SEQ ID NO: 4177705 - DNA, 25 bp, Homo sapien
caaagggaagtagaacagctaaagt

SEQ ID NO: 4177706 - DNA, 25 bp, Homo sapien
gagagcccagaaatatacccgtgta

SEQ ID NO: 4177707 - DNA, 25 bp, Homo sapien
caactacattcgaaagggaggctga

SEQ ID NO: 4177708 - DNA, 25 bp, Homo sapien
tgctacaggattctaggctaaaccc

SEQ ID NO: 4177709 - DNA, 25 bp, Homo sapien
tcatgctacggaactctggaaaggc

SEQ ID NO: 4177710 - DNA, 25 bp, Homo sapien
gctgaatgattgtacctagggatgc

SEQ ID NO: 4177711 - DNA, 25 bp, Homo sapien
tttgaagttacggtcaatcattacc

SEQ ID NO: 4177712 - DNA, 25 bp, Homo sapien
tgaagttacggtcaatcattaccac

SEQ ID NO: 4177713 - DNA, 25 bp, Homo sapien
tatttgaagttacggtcaatcatta

SEQ ID NO: 4177714 - DNA, 25 bp, Homo sapien
ttgaagttacggtcaatcattacca

SEQ ID NO: 4177715 - DNA, 25 bp, Homo sapien
tcatggatccagaaagaagccccat

SEQ ID NO: 4177716 - DNA, 25 bp, Homo sapien
tggacaaccatcattgcagtctaat

SEQ ID NO: 4177717 - DNA, 25 bp, Homo sapien
taccttcacaaaattggacaaccat

SEQ ID NO: 4177718 - DNA, 25 bp, Homo sapien
aatatatggtctcttggaaccagct

SEQ ID NO: 4177719 - DNA, 25 bp, Homo sapien
agtgctaatcgtgtccccaggttgg

SEQ ID NO: 4177720 - DNA, 25 bp, Homo sapien
tatccagacctacaagcaacaccat

SEQ ID NO: 4177721 - DNA, 25 bp, Homo sapien
gggcagaaaccacggagggtctatc

SEQ ID NO: 4177722 - DNA, 25 bp, Homo sapien
gaggtggtccatggacgtgagagcc

SEQ ID NO: 4177723 - DNA, 25 bp, Homo sapien
tgcgtctggacgcttgctgggagat

SEQ ID NO: 4177724 - DNA, 25 bp, Homo sapien
gaggtgcgttgactgacccagccaa

SEQ ID NO: 4177725 - DNA, 25 bp, Homo sapien
agctcttggaggtgcgttgactgac

SEQ ID NO: 4177726 - DNA, 25 bp, Homo sapien
ttgctgggagatcagggcaatccgt

SEQ ID NO: 4177727 - DNA, 25 bp, Homo sapien
catcctctgatgacagaactacgtt

SEQ ID NO: 4177728 - DNA, 25 bp, Homo sapien
gacagaactacgttgacttcagaaa

SEQ ID NO: 4177729 - DNA, 25 bp, Homo sapien
tgacttcagaaatagggccaatctc

SEQ ID NO: 4177730 - DNA, 25 bp, Homo sapien
aaatagggccaatctcttccgctcg

SEQ ID NO: 4177731 - DNA, 25 bp, Homo sapien
tgggagggacctttcggcgacgctg

SEQ ID NO: 4177732 - DNA, 25 bp, Homo sapien
gggacctttcggcgacgctgcggcg

SEQ ID NO: 4177733 - DNA, 25 bp, Homo sapien
ctgggagggacctttcggcgacgct

SEQ ID NO: 4177734 - DNA, 25 bp, Homo sapien
ggagggacctttcggcgacgctgcg

SEQ ID NO: 4177735 - DNA, 25 bp, Homo sapien
gtcgagacgggacccgccgctccga

SEQ ID NO: 4177736 - DNA, 25 bp, Homo sapien
gccgctccgagtgacgcgccccgaa

SEQ ID NO: 4177737 - DNA, 25 bp, Homo sapien
ctgtcgagacgggacccgccgctcc

SEQ ID NO: 4177738 - DNA, 25 bp, Homo sapien
ccgagtgacgcgccccgaagtgcat

SEQ ID NO: 4177739 - DNA, 25 bp, Homo sapien
gcagggattcgaacgacccctaaga

SEQ ID NO: 4177740 - DNA, 25 bp, Homo sapien
agaggccggcagggattcgaacgac

SEQ ID NO: 4177741 - DNA, 25 bp, Homo sapien
gagaggccggcagggattcgaacga

SEQ ID NO: 4177742 - DNA, 25 bp, Homo sapien
gaggccggcagggattcgaacgacc

SEQ ID NO: 4177743 - DNA, 25 bp, Homo sapien
tcaatcccgagggcgaaggccgagg

SEQ ID NO: 4177744 - DNA, 25 bp, Homo sapien
caacgcgggcaaatatctgggctca

SEQ ID NO: 4177745 - DNA, 25 bp, Homo sapien
tgtttctgacacctgggcgccaggg

SEQ ID NO: 4177746 - DNA, 25 bp, Homo sapien
caagagatttccgtgagccaacgcg

SEQ ID NO: 4177747 - DNA, 25 bp, Homo sapien
gaaatgccacctcaagctctcatgg

SEQ ID NO: 4177748 - DNA, 25 bp, Homo sapien
ggtcacaggtgtcagagtcaaatac

SEQ ID NO: 4177749 - DNA, 25 bp, Homo sapien
gctgttcccctgactgaagatccca

SEQ ID NO: 4177750 - DNA, 25 bp, Homo sapien
tgtaggtaccgtttaaggcattgcc

SEQ ID NO: 4177751 - DNA, 25 bp, Homo sapien
taggagggactggttctcaagctcg

SEQ ID NO: 4177752 - DNA, 25 bp, Homo sapien
tcaagcccagaaagcttgaggaatt

SEQ ID NO: 4177753 - DNA, 25 bp, Homo sapien
agacctaggcctctttcatatacca

SEQ ID NO: 4177754 - DNA, 25 bp, Homo sapien
ggcacccctgtgataagacctaggc

SEQ ID NO: 4177755 - DNA, 25 bp, Homo sapien
taatccctaaacgagtaggtgacaa

SEQ ID NO: 4177756 - DNA, 25 bp, Homo sapien
aaagcacaagctagaatctaggtaa

SEQ ID NO: 4177757 - DNA, 25 bp, Homo sapien
tttgtacagcagcagttaactcaca

SEQ ID NO: 4177758 - DNA, 25 bp, Homo sapien
acagagaaaatattacacctgcctt

SEQ ID NO: 4177759 - DNA, 25 bp, Homo sapien
gagaaaatattacacctgcctttgt

SEQ ID NO: 4177760 - DNA, 25 bp, Homo sapien
ctgaatagtggctattttttcctct

SEQ ID NO: 4177761 - DNA, 25 bp, Homo sapien
caagagattacaacaattgcatggg

SEQ ID NO: 4177762 - DNA, 25 bp, Homo sapien
caggcctaagctaggttaaagtatc

SEQ ID NO: 4177763 - DNA, 25 bp, Homo sapien
aaggaaatctgtccatgtcaggcct

SEQ ID NO: 4177764 - DNA, 25 bp, Homo sapien
taatcttatctggactgtgctagca

SEQ ID NO: 4177765 - DNA, 25 bp, Homo sapien
cacttgaatttaagcctgacaaacg

SEQ ID NO: 4177766 - DNA, 25 bp, Homo sapien
gaatgtccaatgatcaacgtcaggc

SEQ ID NO: 4177767 - DNA, 25 bp, Homo sapien
aacgtcaggcttaactaatttgtag

SEQ ID NO: 4177768 - DNA, 25 bp, Homo sapien
tacaaggttgtcagagaatggtttc

SEQ ID NO: 4177769 - DNA, 25 bp, Homo sapien
agccgaaatcgcgtcactgagctcc

SEQ ID NO: 4177770 - DNA, 25 bp, Homo sapien
ctgggttcccatgccacagcatagg

SEQ ID NO: 4177771 - DNA, 25 bp, Homo sapien
taaagccaaacttgataagcatatg

SEQ ID NO: 4177772 - DNA, 25 bp, Homo sapien
tcaacaagagtctgaaggcatacct

SEQ ID NO: 4177773 - DNA, 25 bp, Homo sapien
tttcagtgtacatctatcaggaagt

SEQ ID NO: 4177774 - DNA, 25 bp, Homo sapien
aagtggcagtccatctctgacacga

SEQ ID NO: 4177775 - DNA, 25 bp, Homo sapien
gctttgttcataatcagtagaagca

SEQ ID NO: 4177776 - DNA, 25 bp, Homo sapien
tgagcaagtttcctcgaaagcattt

SEQ ID NO: 4177777 - DNA, 25 bp, Homo sapien
caaccctaggtatgtaagaatgcaa

SEQ ID NO: 4177778 - DNA, 25 bp, Homo sapien
taaaatgacaactactgggcaaatg

SEQ ID NO: 4177779 - DNA, 25 bp, Homo sapien
aaatttcccagagccagatacaaag

SEQ ID NO: 4177780 - DNA, 25 bp, Homo sapien
taagttcagaacaatatgatgctcg

SEQ ID NO: 4177781 - DNA, 25 bp, Homo sapien
tcttggcatgtaaaaaagggcttct

SEQ ID NO: 4177782 - DNA, 25 bp, Homo sapien
tatagcttaaaactacccaatggct

SEQ ID NO: 4177783 - DNA, 25 bp, Homo sapien
cagagagtgtcttgaccacaataaa

SEQ ID NO: 4177784 - DNA, 25 bp, Homo sapien
tactaccctagctcgttacaatcag

SEQ ID NO: 4177785 - DNA, 25 bp, Homo sapien
tagctactacgacatgcacaaggaa

SEQ ID NO: 4177786 - DNA, 25 bp, Homo sapien
cattggcgaaacagaagtatccagc

SEQ ID NO: 4177787 - DNA, 25 bp, Homo sapien
gtatccagctactacattcatttga

SEQ ID NO: 4177788 - DNA, 25 bp, Homo sapien
tgcccaatcaacaaggtttctctgg

SEQ ID NO: 4177789 - DNA, 25 bp, Homo sapien
ggtaattacaccatgagagacttgg

SEQ ID NO: 4177790 - DNA, 25 bp, Homo sapien
tgccagatgatggtaacttacaaca

SEQ ID NO: 4177791 - DNA, 25 bp, Homo sapien
gataatccctaacttacatattggg

SEQ ID NO: 4177792 - DNA, 25 bp, Homo sapien
aacagtaattaggttcctaggccag

SEQ ID NO: 4177793 - DNA, 25 bp, Homo sapien
tgtatatacagcattcacaaagtaa

SEQ ID NO: 4177794 - DNA, 25 bp, Homo sapien
ggatcataatcaaattaatttagcc

SEQ ID NO: 4177795 - DNA, 25 bp, Homo sapien
tagccatagcatattgcctttttct

SEQ ID NO: 4177796 - DNA, 25 bp, Homo sapien
tgtatctcttaaggatcataatcaa

SEQ ID NO: 4177797 - DNA, 25 bp, Homo sapien
ctactacggtggcaatgaagatctt

SEQ ID NO: 4177798 - DNA, 25 bp, Homo sapien
tacagagggacacacaatacggttc

SEQ ID NO: 4177799 - DNA, 25 bp, Homo sapien
gaagttatcattgacacaccccaga

SEQ ID NO: 4177800 - DNA, 25 bp, Homo sapien
cacaatttcaaggtgatcactgacc

SEQ ID NO: 4177801 - DNA, 25 bp, Homo sapien
gtagctcactcccagagagctaata

SEQ ID NO: 4177802 - DNA, 25 bp, Homo sapien
tagctcactcccagagagctaataa

SEQ ID NO: 4177803 - DNA, 25 bp, Homo sapien
ccaggaaagagaaggcgagaacatt

SEQ ID NO: 4177804 - DNA, 25 bp, Homo sapien
tagtaatgaactccttctgaagctc

SEQ ID NO: 4177805 - DNA, 25 bp, Homo sapien
tttgggtaattttcagtgcacaaca

SEQ ID NO: 4177806 - DNA, 25 bp, Homo sapien
caatgaaacagtatggtctgacagc

SEQ ID NO: 4177807 - DNA, 25 bp, Homo sapien
tgctttcgagctacaacggcagggc

SEQ ID NO: 4177808 - DNA, 25 bp, Homo sapien
agttgtgacagggactatatgatcc

SEQ ID NO: 4177809 - DNA, 25 bp, Homo sapien
gcactcatttacgtactgcctatgg

SEQ ID NO: 4177810 - DNA, 25 bp, Homo sapien
tctagcctgctgactattctgtaaa

SEQ ID NO: 4177811 - DNA, 25 bp, Homo sapien
gacctgggattattatatcgctgct

SEQ ID NO: 4177812 - DNA, 25 bp, Homo sapien
attattatatcgctgcttggtcctc

SEQ ID NO: 4177813 - DNA, 25 bp, Homo sapien
gggattattatatcgctgcttggtc

SEQ ID NO: 4177814 - DNA, 25 bp, Homo sapien
aaagagacctgggattattatatcg

SEQ ID NO: 4177815 - DNA, 25 bp, Homo sapien
atgctgatgtgactccattggctga

SEQ ID NO: 4177816 - DNA, 25 bp, Homo sapien
ggcctcagcttgatttccgtctgca

SEQ ID NO: 4177817 - DNA, 25 bp, Homo sapien
ggctgaccccagttcgcacatggaa

SEQ ID NO: 4177818 - DNA, 25 bp, Homo sapien
gaaatttgataaggaggcctcagct

SEQ ID NO: 4177819 - DNA, 25 bp, Homo sapien
gatcctctgaggttgctatttgaaa

SEQ ID NO: 4177820 - DNA, 25 bp, Homo sapien
tacacaccgaatatgtacccatgaa

SEQ ID NO: 4177821 - DNA, 25 bp, Homo sapien
aagtattttcccgattagtcacaca

SEQ ID NO: 4177822 - DNA, 25 bp, Homo sapien
tagtcacacatctggtagcttactt

SEQ ID NO: 4177823 - DNA, 25 bp, Homo sapien
attggcctgggcaaagatctcttga

SEQ ID NO: 4177824 - DNA, 25 bp, Homo sapien
tcacaactgttgacgatagtattcc

SEQ ID NO: 4177825 - DNA, 25 bp, Homo sapien
tgggaggtttgagcagacgatcact

SEQ ID NO: 4177826 - DNA, 25 bp, Homo sapien
caaccaatgcaaaagtggacaaatt

SEQ ID NO: 4177827 - DNA, 25 bp, Homo sapien
tgttatctgcttgtttactaactga

SEQ ID NO: 4177828 - DNA, 25 bp, Homo sapien
atctgcttgtttactaactgactgg

SEQ ID NO: 4177829 - DNA, 25 bp, Homo sapien
aacaatgtgggtactagcccactct

SEQ ID NO: 4177830 - DNA, 25 bp, Homo sapien
aatgtgggtactagcccactctccc

SEQ ID NO: 4177831 - DNA, 25 bp, Homo sapien
cttataaggtgtttctgctagtaac

SEQ ID NO: 4177832 - DNA, 25 bp, Homo sapien
atttcttataaggtgtttctgctag

SEQ ID NO: 4177833 - DNA, 25 bp, Homo sapien
tctgctagtaacgaattctcttatc

SEQ ID NO: 4177834 - DNA, 25 bp, Homo sapien
ggtgtttctgctagtaacgaattct

SEQ ID NO: 4177835 - DNA, 25 bp, Homo sapien
tatactatattctaatgagccacag

SEQ ID NO: 4177836 - DNA, 25 bp, Homo sapien
aataccacccatgtcctttttgctg

SEQ ID NO: 4177837 - DNA, 25 bp, Homo sapien
taatgtatttttacgagtcagagtc

SEQ ID NO: 4177838 - DNA, 25 bp, Homo sapien
ggttgctctaagcttaccatgtaca

SEQ ID NO: 4177839 - DNA, 25 bp, Homo sapien
catctaatgtagctggagaacatac

SEQ ID NO: 4177840 - DNA, 25 bp, Homo sapien
gatttagtctctgacccattcacta

SEQ ID NO: 4177841 - DNA, 25 bp, Homo sapien
cataccaatgtttgtcgtaaagtcc

SEQ ID NO: 4177842 - DNA, 25 bp, Homo sapien
gaatctaaggtatgtctcctgaaga

SEQ ID NO: 4177843 - DNA, 25 bp, Homo sapien
cttaaactagaaccacacagtcatg

SEQ ID NO: 4177844 - DNA, 25 bp, Homo sapien
ccattgtcttggcatcactgttgaa

SEQ ID NO: 4177845 - DNA, 25 bp, Homo sapien
ttttggctatgctccatcccttgca

SEQ ID NO: 4177846 - DNA, 25 bp, Homo sapien
ttgcatgtggtatctagttgtccta

SEQ ID NO: 4177847 - DNA, 25 bp, Homo sapien
taacgtttggtgatccaggatgcca

SEQ ID NO: 4177848 - DNA, 25 bp, Homo sapien
accactgcatcttgcccctcttcct

SEQ ID NO: 4177849 - DNA, 25 bp, Homo sapien
tttccaagtgtctaacgtttggtga

SEQ ID NO: 4177850 - DNA, 25 bp, Homo sapien
gccactgccagctacaggtcagggt

SEQ ID NO: 4177851 - DNA, 25 bp, Homo sapien
tcctagtgatggcaaacaacttgtc

SEQ ID NO: 4177852 - DNA, 25 bp, Homo sapien
cccagggatagctaattcctagtga

SEQ ID NO: 4177853 - DNA, 25 bp, Homo sapien
tctagaggatggtggaaattgactg

SEQ ID NO: 4177854 - DNA, 25 bp, Homo sapien
taaaaacagtcgttgtctagaggat

SEQ ID NO: 4177855 - DNA, 25 bp, Homo sapien
ggaagcattaagtgaatactactga

SEQ ID NO: 4177856 - DNA, 25 bp, Homo sapien
tcagattgcaagaggttgaacaact

SEQ ID NO: 4177857 - DNA, 25 bp, Homo sapien
aacaactggcgatgttaagaggtgg

SEQ ID NO: 4177858 - DNA, 25 bp, Homo sapien
gaagcattaagtgaatactactgaa

SEQ ID NO: 4177859 - DNA, 25 bp, Homo sapien
aatgtaccaatggtttatggagact

SEQ ID NO: 4177860 - DNA, 25 bp, Homo sapien
tagtcttcttgaacccaaggatggc

SEQ ID NO: 4177861 - DNA, 25 bp, Homo sapien
gtttatggagactctgcaaaagttc

SEQ ID NO: 4177862 - DNA, 25 bp, Homo sapien
ccaaggatggcatgttgataacaaa

SEQ ID NO: 4177863 - DNA, 25 bp, Homo sapien
taaaagactaaggataaatcctaca

SEQ ID NO: 4177864 - DNA, 25 bp, Homo sapien
aattaaattcagagctccacataaa

SEQ ID NO: 4177865 - DNA, 25 bp, Homo sapien
cctgacagagttgctggttccagtc

SEQ ID NO: 4177866 - DNA, 25 bp, Homo sapien
catgaaagcctcgaattaaattcag

SEQ ID NO: 4177867 - DNA, 25 bp, Homo sapien
tgcataaaaggggagacgagcttta

SEQ ID NO: 4177868 - DNA, 25 bp, Homo sapien
tgtgcataaaaggggagacgagctt

SEQ ID NO: 4177869 - DNA, 25 bp, Homo sapien
gcataaaaggggagacgagctttaa

SEQ ID NO: 4177870 - DNA, 25 bp, Homo sapien
ctgtgcataaaaggggagacgagct

SEQ ID NO: 4177871 - DNA, 25 bp, Homo sapien
caggaaacagaaaggccgagggaca

SEQ ID NO: 4177872 - DNA, 25 bp, Homo sapien
aacagaaaggccgagggacagcagc

SEQ ID NO: 4177873 - DNA, 25 bp, Homo sapien
tggaataaatctgatctggcatggg

SEQ ID NO: 4177874 - DNA, 25 bp, Homo sapien
ctggaataaatctgatctggcatgg

SEQ ID NO: 4177875 - DNA, 25 bp, Homo sapien
tttttccctatacaacgcatccttg

SEQ ID NO: 4177876 - DNA, 25 bp, Homo sapien
tatgttgatatgagaaaacctccca

SEQ ID NO: 4177877 - DNA, 25 bp, Homo sapien
tgagaatcgtgagagtacagaagca

SEQ ID NO: 4177878 - DNA, 25 bp, Homo sapien
tgatttgaattaagggacacctagc

SEQ ID NO: 4177879 - DNA, 25 bp, Homo sapien
gactttaagtgctaagggaacacag

SEQ ID NO: 4177880 - DNA, 25 bp, Homo sapien
taagtcgggctaaggatgtactcgg

SEQ ID NO: 4177881 - DNA, 25 bp, Homo sapien
tcctcgataactggaacaatgggag

SEQ ID NO: 4177882 - DNA, 25 bp, Homo sapien
gaaaaatattcccaagcactagtca

SEQ ID NO: 4177883 - DNA, 25 bp, Homo sapien
gggaggcaattacttttctgtgaaa

SEQ ID NO: 4177884 - DNA, 25 bp, Homo sapien
tttaataaaaagtcatgcggccact

SEQ ID NO: 4177885 - DNA, 25 bp, Homo sapien
tactagcataggcacataatctccc

SEQ ID NO: 4177886 - DNA, 25 bp, Homo sapien
tagatctccgtgtactgatgtgaaa

SEQ ID NO: 4177887 - DNA, 25 bp, Homo sapien
gaggtagaggtacaagtgttcctct

SEQ ID NO: 4177888 - DNA, 25 bp, Homo sapien
gtaacaatatttacaaacagtcaaa

SEQ ID NO: 4177889 - DNA, 25 bp, Homo sapien
tctaagacctaaagagtgtgaggta

SEQ ID NO: 4177890 - DNA, 25 bp, Homo sapien
caatccatcaagataggatgtaaca

SEQ ID NO: 4177891 - DNA, 25 bp, Homo sapien
ggctgctgttccaaggaaaaatgca

SEQ ID NO: 4177892 - DNA, 25 bp, Homo sapien
tgcaatgatgtaattaaaatcatca

SEQ ID NO: 4177893 - DNA, 25 bp, Homo sapien
tactcaaaatggagacataggtcac

SEQ ID NO: 4177894 - DNA, 25 bp, Homo sapien
tactaccataggcagatgacatacc

SEQ ID NO: 4177895 - DNA, 25 bp, Homo sapien
caggttcactgggatgtatgtctac

SEQ ID NO: 4177896 - DNA, 25 bp, Homo sapien
ttgttagaactgatacccgaagtaa

SEQ ID NO: 4177897 - DNA, 25 bp, Homo sapien
ggaattttgcctacagacagcatga

SEQ ID NO: 4177898 - DNA, 25 bp, Homo sapien
tgattatgtgatctcaggacagtac

SEQ ID NO: 4177899 - DNA, 25 bp, Homo sapien
actgaaactgtctccgttttctcac

SEQ ID NO: 4177900 - DNA, 25 bp, Homo sapien
gacagcatgatatagtagacagaac

SEQ ID NO: 4177901 - DNA, 25 bp, Homo sapien
taatccataggtcaaagaggaagtc

SEQ ID NO: 4177902 - DNA, 25 bp, Homo sapien
gatctggcaattgtactcctaggca

SEQ ID NO: 4177903 - DNA, 25 bp, Homo sapien
caggactttcattcccactagatgg

SEQ ID NO: 4177904 - DNA, 25 bp, Homo sapien
tatgtattacgtgatgcctacagca

SEQ ID NO: 4177905 - DNA, 25 bp, Homo sapien
gccggtgtagtagacaagtaaataa

SEQ ID NO: 4177906 - DNA, 25 bp, Homo sapien
aaaagatttgacattccgccagccg

SEQ ID NO: 4177907 - DNA, 25 bp, Homo sapien
gacattccgccagccggtgtagtag

SEQ ID NO: 4177908 - DNA, 25 bp, Homo sapien
tccgccagccggtgtagtagacaag

SEQ ID NO: 4177909 - DNA, 25 bp, Homo sapien
cctgggcttgccttagccagatctg

SEQ ID NO: 4177910 - DNA, 25 bp, Homo sapien
gtaacaaatgctcccacagtcacat

SEQ ID NO: 4177911 - DNA, 25 bp, Homo sapien
gatctgtagtgtaacaaatgctccc

SEQ ID NO: 4177912 - DNA, 25 bp, Homo sapien
ggttgcgcagttcatagagatacat

SEQ ID NO: 4177913 - DNA, 25 bp, Homo sapien
gaagccaaggcaatagatctgaagg

SEQ ID NO: 4177914 - DNA, 25 bp, Homo sapien
gccttgaagagagaaatcccctcct

SEQ ID NO: 4177915 - DNA, 25 bp, Homo sapien
tcttcaggaaggattcaggactgct

SEQ ID NO: 4177916 - DNA, 25 bp, Homo sapien
gcctcacaaaggcaaactcaggttg

SEQ ID NO: 4177917 - DNA, 25 bp, Homo sapien
atttatcacagtcatttatttaaaa

SEQ ID NO: 4177918 - DNA, 25 bp, Homo sapien
tttatcacagtcatttatttaaaac

SEQ ID NO: 4177919 - DNA, 25 bp, Homo sapien
tatcacagtcatttatttaaaacat

SEQ ID NO: 4177920 - DNA, 25 bp, Homo sapien
tcacagtcatttatttaaaacataa

SEQ ID NO: 4177921 - DNA, 25 bp, Homo sapien
gaaacaacggctatagtgtgagtca

SEQ ID NO: 4177922 - DNA, 25 bp, Homo sapien
tactggttttccacttggagcagga

SEQ ID NO: 4177923 - DNA, 25 bp, Homo sapien
taaactcgtagtaccataagtgtgc

SEQ ID NO: 4177924 - DNA, 25 bp, Homo sapien
tacttgtgatgttccacagacgagc

SEQ ID NO: 4177925 - DNA, 25 bp, Homo sapien
tataaacacggagatacaggcacca

SEQ ID NO: 4177926 - DNA, 25 bp, Homo sapien
caagcatttccatagtgcggaccca

SEQ ID NO: 4177927 - DNA, 25 bp, Homo sapien
ggaggtagctcctgaaccaaactgg

SEQ ID NO: 4177928 - DNA, 25 bp, Homo sapien
ccaaactggtgcgagctgtgtcaat

SEQ ID NO: 4177929 - DNA, 25 bp, Homo sapien
ggtaaactcaggcttgctcttagaa

SEQ ID NO: 4177930 - DNA, 25 bp, Homo sapien
agctactactgctcctatgctacaa

SEQ ID NO: 4177931 - DNA, 25 bp, Homo sapien
cagaagatcatacaccatggaggcc

SEQ ID NO: 4177932 - DNA, 25 bp, Homo sapien
aaactatgaggaggtaaactcaggc

SEQ ID NO: 4177933 - DNA, 25 bp, Homo sapien
tgtgtgcttagctatgtgaactggc

SEQ ID NO: 4177934 - DNA, 25 bp, Homo sapien
ggctaagtcattaccatctgatcac

SEQ ID NO: 4177935 - DNA, 25 bp, Homo sapien
tagttccatgctagtgcgaagagcc

SEQ ID NO: 4177936 - DNA, 25 bp, Homo sapien
gaatataacactggtcaccttcact

SEQ ID NO: 4177937 - DNA, 25 bp, Homo sapien
agggtatcttcgctctcatggtaca

SEQ ID NO: 4177938 - DNA, 25 bp, Homo sapien
tatgcttttcacctactgatagggc

SEQ ID NO: 4177939 - DNA, 25 bp, Homo sapien
ggtacaaggtaaggatccaaggcac

SEQ ID NO: 4177940 - DNA, 25 bp, Homo sapien
ggcatcaggaaaggctctcccctaa

SEQ ID NO: 4177941 - DNA, 25 bp, Homo sapien
ttcatgctgtggaactggtctcaca

SEQ ID NO: 4177942 - DNA, 25 bp, Homo sapien
cagggcgggtgtgctcatttgtact

SEQ ID NO: 4177943 - DNA, 25 bp, Homo sapien
gagacacacaagcaaacgaggacgc

SEQ ID NO: 4177944 - DNA, 25 bp, Homo sapien
ctagttgtatgcgtgtaagagacac

SEQ ID NO: 4177945 - DNA, 25 bp, Homo sapien
catgtaatctgcaaaatcgttagca

SEQ ID NO: 4177946 - DNA, 25 bp, Homo sapien
gaatcatgtgatagtgaccgtgaaa

SEQ ID NO: 4177947 - DNA, 25 bp, Homo sapien
gaggttgtgacaggtcaaagccctg

SEQ ID NO: 4177948 - DNA, 25 bp, Homo sapien
aaagccctggatcttccctggactc

SEQ ID NO: 4177949 - DNA, 25 bp, Homo sapien
tgtgctcattccagggtgggcaact

SEQ ID NO: 4177950 - DNA, 25 bp, Homo sapien
gaagtttctgagtgtgcccttggtg

SEQ ID NO: 4177951 - DNA, 25 bp, Homo sapien
tgggcaactctcactaggcgctgca

SEQ ID NO: 4177952 - DNA, 25 bp, Homo sapien
tgcacttgctcaggcacggagagaa

SEQ ID NO: 4177953 - DNA, 25 bp, Homo sapien
gagatgaaagcagacatcaacgcca

SEQ ID NO: 4177954 - DNA, 25 bp, Homo sapien
gaaagcagacatcaacgccaagcag

SEQ ID NO: 4177955 - DNA, 25 bp, Homo sapien
gatgaaagcagacatcaacgccaag

SEQ ID NO: 4177956 - DNA, 25 bp, Homo sapien
ttccccgtcatgttgccatggagat

SEQ ID NO: 4177957 - DNA, 25 bp, Homo sapien
cgcggctccactcgcagcgggagaa

SEQ ID NO: 4177958 - DNA, 25 bp, Homo sapien
tgcacccactatccggctgaggtct

SEQ ID NO: 4177959 - DNA, 25 bp, Homo sapien
tgaggtctcccagagacaggctttc

SEQ ID NO: 4177960 - DNA, 25 bp, Homo sapien
ttttctcctgcaccaacatcgtggg

SEQ ID NO: 4177961 - DNA, 25 bp, Homo sapien
ggctgatagcctgcccagttgggca

SEQ ID NO: 4177962 - DNA, 25 bp, Homo sapien
tgctgcttcctccaaatagggagga

SEQ ID NO: 4177963 - DNA, 25 bp, Homo sapien
gaggaaaagggacactctcctatct

SEQ ID NO: 4177964 - DNA, 25 bp, Homo sapien
atctggtgtcgtgggcttaaattcc

SEQ ID NO: 4177965 - DNA, 25 bp, Homo sapien
tgtggccatctcagctacactcttg

SEQ ID NO: 4177966 - DNA, 25 bp, Homo sapien
ttttaacccaaaagctgttgagagc

SEQ ID NO: 4177967 - DNA, 25 bp, Homo sapien
gcctttggagcgtggcaggaatcat

SEQ ID NO: 4177968 - DNA, 25 bp, Homo sapien
tcacaatcccgctgaaacaggcagg

SEQ ID NO: 4177969 - DNA, 25 bp, Homo sapien
tttgcggtaacttgccaggcagagc

SEQ ID NO: 4177970 - DNA, 25 bp, Homo sapien
atctgctgtttgcggtaacttgcca

SEQ ID NO: 4177971 - DNA, 25 bp, Homo sapien
gggcctgcgttcagattgttcagag

SEQ ID NO: 4177972 - DNA, 25 bp, Homo sapien
gctgtttgcggtaacttgccaggca

SEQ ID NO: 4177973 - DNA, 25 bp, Homo sapien
ggtcatggctctggctgtcgtcttt

SEQ ID NO: 4177974 - DNA, 25 bp, Homo sapien
ttatgatgagaagacccagctgggc

SEQ ID NO: 4177975 - DNA, 25 bp, Homo sapien
agaccttgggtcatttgcattatga

SEQ ID NO: 4177976 - DNA, 25 bp, Homo sapien
cacgctgacgggcttaagaccttgg

SEQ ID NO: 4177977 - DNA, 25 bp, Homo sapien
ggcagcagatggttgctttggtgct

SEQ ID NO: 4177978 - DNA, 25 bp, Homo sapien
agcagatggttgctttggtgctgca

SEQ ID NO: 4177979 - DNA, 25 bp, Homo sapien
cagcagatggttgctttggtgctgc

SEQ ID NO: 4177980 - DNA, 25 bp, Homo sapien
gcagcagatggttgctttggtgctg

SEQ ID NO: 4177981 - DNA, 25 bp, Homo sapien
tttgatcccaagaatagtaactctg

SEQ ID NO: 4177982 - DNA, 25 bp, Homo sapien
taactctgggttggagccatgctct

SEQ ID NO: 4177983 - DNA, 25 bp, Homo sapien
ccaggcagtatgtttggagagtcga

SEQ ID NO: 4177984 - DNA, 25 bp, Homo sapien
ccttaaaaggtcctgcttgtggtct

SEQ ID NO: 4177985 - DNA, 25 bp, Homo sapien
gctgtagtcagaatagcatgtaagg

SEQ ID NO: 4177986 - DNA, 25 bp, Homo sapien
tgtaaactaacactttgtaaatcaa

SEQ ID NO: 4177987 - DNA, 25 bp, Homo sapien
agagaagtgggtcttactcctttct

SEQ ID NO: 4177988 - DNA, 25 bp, Homo sapien
aacacctgtgtgtagctggctgtag

SEQ ID NO: 4177989 - DNA, 25 bp, Homo sapien
tccagagcctcgaggtaatgtgaca

SEQ ID NO: 4177990 - DNA, 25 bp, Homo sapien
gctcggtgaagagggaactgtctct

SEQ ID NO: 4177991 - DNA, 25 bp, Homo sapien
tgtccaaggtcggaaagctcggtga

SEQ ID NO: 4177992 - DNA, 25 bp, Homo sapien
gactgtgtggccttcgctggtgctt

SEQ ID NO: 4177993 - DNA, 25 bp, Homo sapien
ctgagaccccaagataaacacactg

SEQ ID NO: 4177994 - DNA, 25 bp, Homo sapien
gagaccccaagataaacacactgat

SEQ ID NO: 4177995 - DNA, 25 bp, Homo sapien
gaggcccagagttaggtgctgagac

SEQ ID NO: 4177996 - DNA, 25 bp, Homo sapien
cacactgatcagaccacactggtga

SEQ ID NO: 4177997 - DNA, 25 bp, Homo sapien
cagcagctgtcgcaggctctttcct

SEQ ID NO: 4177998 - DNA, 25 bp, Homo sapien
agcagctgtcgcaggctctttcctc

SEQ ID NO: 4177999 - DNA, 25 bp, Homo sapien
ccagcagctgtcgcaggctctttcc

SEQ ID NO: 4178000 - DNA, 25 bp, Homo sapien
gggtgtgcactgatggcgatggcat

SEQ ID NO: 4178001 - DNA, 25 bp, Homo sapien
agagcagtagggtgtctggagaagg

SEQ ID NO: 4178002 - DNA, 25 bp, Homo sapien
agtgtgatgcatgtttaagaagaga

SEQ ID NO: 4178003 - DNA, 25 bp, Homo sapien
tcagagtgggaggataaagcttggc

SEQ ID NO: 4178004 - DNA, 25 bp, Homo sapien
tcagccctctgagtggaccccaatg

SEQ ID NO: 4178005 - DNA, 25 bp, Homo sapien
caggcactagtacgcccttgactgt

SEQ ID NO: 4178006 - DNA, 25 bp, Homo sapien
tggatggcaggctctcctcgaagca

SEQ ID NO: 4178007 - DNA, 25 bp, Homo sapien
cctctgagtggaccccaatggtgga

SEQ ID NO: 4178008 - DNA, 25 bp, Homo sapien
ctggcagggaacttcacagtcatct

SEQ ID NO: 4178009 - DNA, 25 bp, Homo sapien
gcatttacaggattgaggaggctga

SEQ ID NO: 4178010 - DNA, 25 bp, Homo sapien
cacggtcggttggacagggagcatt

SEQ ID NO: 4178011 - DNA, 25 bp, Homo sapien
tgaggagtatctacagaaccgaagt

SEQ ID NO: 4178012 - DNA, 25 bp, Homo sapien
tgatgcaagtctggcaacgtgggta

SEQ ID NO: 4178013 - DNA, 25 bp, Homo sapien
gctgcagatattccgctccaagaag

SEQ ID NO: 4178014 - DNA, 25 bp, Homo sapien
tcggcgtgatcctcatcatggctgt

SEQ ID NO: 4178015 - DNA, 25 bp, Homo sapien
tgctatgcgctcatcgccgtggtgc

SEQ ID NO: 4178016 - DNA, 25 bp, Homo sapien
caagaagttcccgtcggacaaactg

SEQ ID NO: 4178017 - DNA, 25 bp, Homo sapien
ctgatggatgaccagcccgcaagat

SEQ ID NO: 4178018 - DNA, 25 bp, Homo sapien
gatggatgaccagcccgcaagatgc

SEQ ID NO: 4178019 - DNA, 25 bp, Homo sapien
tgaccagcccgcaagatgcccaatg

SEQ ID NO: 4178020 - DNA, 25 bp, Homo sapien
attgcctgatggatgaccagcccgc

SEQ ID NO: 4178021 - DNA, 25 bp, Homo sapien
ttctcaggtggaccaagtgaactgt

SEQ ID NO: 4178022 - DNA, 25 bp, Homo sapien
gctgtgtacataccagaatctcagg

SEQ ID NO: 4178023 - DNA, 25 bp, Homo sapien
gagaagtttaggtcaaacgcagccc

SEQ ID NO: 4178024 - DNA, 25 bp, Homo sapien
catattctcatgtgccctaaaggac

SEQ ID NO: 4178025 - DNA, 25 bp, Homo sapien
ggacaaggagagggactgatgatgc

SEQ ID NO: 4178026 - DNA, 25 bp, Homo sapien
ggtagggacaaggagagggactgat

SEQ ID NO: 4178027 - DNA, 25 bp, Homo sapien
ctggtagggacaaggagagggactg

SEQ ID NO: 4178028 - DNA, 25 bp, Homo sapien
caaggagagggactgatgatgccat

SEQ ID NO: 4178029 - DNA, 25 bp, Homo sapien
cagccaagttttgcctggggagtct

SEQ ID NO: 4178030 - DNA, 25 bp, Homo sapien
ctgcctggggatacggacgtctctg

SEQ ID NO: 4178031 - DNA, 25 bp, Homo sapien
gggatacggacgtctctgcaccaag

SEQ ID NO: 4178032 - DNA, 25 bp, Homo sapien
gagtctgctcggtacttgggggtct

SEQ ID NO: 4178033 - DNA, 25 bp, Homo sapien
cagcattaccaacctggatctcggg

SEQ ID NO: 4178034 - DNA, 25 bp, Homo sapien
gctccctgaggcttgtcatcaagga

SEQ ID NO: 4178035 - DNA, 25 bp, Homo sapien
tggccggcagtgactgcatggctcc

SEQ ID NO: 4178036 - DNA, 25 bp, Homo sapien
gaacaagttccagaatcctagacca

SEQ ID NO: 4178037 - DNA, 25 bp, Homo sapien
ggcctttgtagacgcccctctagca

SEQ ID NO: 4178038 - DNA, 25 bp, Homo sapien
caagtgaaagcgctgcctgcacatc

SEQ ID NO: 4178039 - DNA, 25 bp, Homo sapien
gcacatctgcttccgcggcctttgt

SEQ ID NO: 4178040 - DNA, 25 bp, Homo sapien
tgcttccgcggcctttgtagacgcc

SEQ ID NO: 4178041 - DNA, 25 bp, Homo sapien
gtccctgtggtccattagttcccaa

SEQ ID NO: 4178042 - DNA, 25 bp, Homo sapien
ttcctgctaccgcaagacttgacct

SEQ ID NO: 4178043 - DNA, 25 bp, Homo sapien
ctctcacctcccatgagagcaccaa

SEQ ID NO: 4178044 - DNA, 25 bp, Homo sapien
ttttccacaggcttccaaaccttgc

SEQ ID NO: 4178045 - DNA, 25 bp, Homo sapien
ctcatttttgccgtcttgctcagtg

SEQ ID NO: 4178046 - DNA, 25 bp, Homo sapien
tttttgccgtcttgctcagtgctag

SEQ ID NO: 4178047 - DNA, 25 bp, Homo sapien
tcttgctcagtgctagccttgaggg

SEQ ID NO: 4178048 - DNA, 25 bp, Homo sapien
ccgtcttgctcagtgctagccttga

SEQ ID NO: 4178049 - DNA, 25 bp, Homo sapien
cataaaatactgatctgtgttgcat

SEQ ID NO: 4178050 - DNA, 25 bp, Homo sapien
gactacgcttaactttctatgcatg

SEQ ID NO: 4178051 - DNA, 25 bp, Homo sapien
cctgataatgtagtaataagttgta

SEQ ID NO: 4178052 - DNA, 25 bp, Homo sapien
tgtttttacctgataatgtagtaat

SEQ ID NO: 4178053 - DNA, 25 bp, Homo sapien
tgagaacaaccacaccaccaaatgt

SEQ ID NO: 4178054 - DNA, 25 bp, Homo sapien
gaggtccgcagtagtgcttttgtca

SEQ ID NO: 4178055 - DNA, 25 bp, Homo sapien
tcatttcagggcatagtcaaaggca

SEQ ID NO: 4178056 - DNA, 25 bp, Homo sapien
tgtgtccttcagtaacctctctcag

SEQ ID NO: 4178057 - DNA, 25 bp, Homo sapien
ttttgaattgaacattaaaattctg

SEQ ID NO: 4178058 - DNA, 25 bp, Homo sapien
tagacaaaatatgtgggaaagattt

SEQ ID NO: 4178059 - DNA, 25 bp, Homo sapien
aaagtcagcactcaacttggacatg

SEQ ID NO: 4178060 - DNA, 25 bp, Homo sapien
cttggacatgttgaaattagaatct

SEQ ID NO: 4178061 - DNA, 25 bp, Homo sapien
aacacatattatcccagtgggcacc

SEQ ID NO: 4178062 - DNA, 25 bp, Homo sapien
tcaccatagtcaaatgaataggaga

SEQ ID NO: 4178063 - DNA, 25 bp, Homo sapien
tgcagttttaccacacccggagtaa

SEQ ID NO: 4178064 - DNA, 25 bp, Homo sapien
gtaccatattgggtgactgggaaag

SEQ ID NO: 4178065 - DNA, 25 bp, Homo sapien
caaatgtgcctatcagtgtattcag

SEQ ID NO: 4178066 - DNA, 25 bp, Homo sapien
tcagacagggttggacttctcctca

SEQ ID NO: 4178067 - DNA, 25 bp, Homo sapien
catacagtgttagtggttcttctca

SEQ ID NO: 4178068 - DNA, 25 bp, Homo sapien
tcttataaccaacgacatacagtgt

SEQ ID NO: 4178069 - DNA, 25 bp, Homo sapien
tccagaaataaacagggctcatctt

SEQ ID NO: 4178070 - DNA, 25 bp, Homo sapien
ggtggcaacgggctcttcaccagca

SEQ ID NO: 4178071 - DNA, 25 bp, Homo sapien
ggctcatcttagtccattggtgctg

SEQ ID NO: 4178072 - DNA, 25 bp, Homo sapien
cacctgaggctgaatgatttgaaaa

SEQ ID NO: 4178073 - DNA, 25 bp, Homo sapien
ttagctgagatatctcttgacataa

SEQ ID NO: 4178074 - DNA, 25 bp, Homo sapien
ccattatttatagctggaaattttt

SEQ ID NO: 4178075 - DNA, 25 bp, Homo sapien
gttcagtatgaataagtatattagc

SEQ ID NO: 4178076 - DNA, 25 bp, Homo sapien
taccatcttgaaatacatttctgtg

SEQ ID NO: 4178077 - DNA, 25 bp, Homo sapien
gtggctcccacataccacttctggg

SEQ ID NO: 4178078 - DNA, 25 bp, Homo sapien
ggcagtcatcaggttttgtcaattc

SEQ ID NO: 4178079 - DNA, 25 bp, Homo sapien
ccaggcagtcatcaggttttgtcaa

SEQ ID NO: 4178080 - DNA, 25 bp, Homo sapien
cagtcatcaggttttgtcaattcag

SEQ ID NO: 4178081 - DNA, 25 bp, Homo sapien
caggcagtcatcaggttttgtcaat

SEQ ID NO: 4178082 - DNA, 25 bp, Homo sapien
tccggagtccgtggtggttctgttc

SEQ ID NO: 4178083 - DNA, 25 bp, Homo sapien
gatatctgataagctactgagtggg

SEQ ID NO: 4178084 - DNA, 25 bp, Homo sapien
catatgggacatggagatgctgtac

SEQ ID NO: 4178085 - DNA, 25 bp, Homo sapien
ttgtgcattatgaaagagcccttga

SEQ ID NO: 4178086 - DNA, 25 bp, Homo sapien
cactgaggctgtgtttgagccgctg

SEQ ID NO: 4178087 - DNA, 25 bp, Homo sapien
gaaggaaagcgtgtgcttcccactg

SEQ ID NO: 4178088 - DNA, 25 bp, Homo sapien
atgtaggcccagatccccaggagac

SEQ ID NO: 4178089 - DNA, 25 bp, Homo sapien
tcccagatggagctgtccagaggca

SEQ ID NO: 4178090 - DNA, 25 bp, Homo sapien
gagtgaccattcatttgggcggctg

SEQ ID NO: 4178091 - DNA, 25 bp, Homo sapien
tgcagagtgaccattcatttgggcg

SEQ ID NO: 4178092 - DNA, 25 bp, Homo sapien
gaccattcatttgggcggctgtttt

SEQ ID NO: 4178093 - DNA, 25 bp, Homo sapien
tttcaaaatctgggctgcgctttaa

SEQ ID NO: 4178094 - DNA, 25 bp, Homo sapien
attcggatgttgaacggcgccagca

SEQ ID NO: 4178095 - DNA, 25 bp, Homo sapien
ttcggatgttgaacggcgccagcat

SEQ ID NO: 4178096 - DNA, 25 bp, Homo sapien
cagattcggatgttgaacggcgcca

SEQ ID NO: 4178097 - DNA, 25 bp, Homo sapien
cggccagattcggatgttgaacggc

SEQ ID NO: 4178098 - DNA, 25 bp, Homo sapien
ctgagggcggccgagcgctgaatcg

SEQ ID NO: 4178099 - DNA, 25 bp, Homo sapien
aatcggccccggtggctgcccgcga

SEQ ID NO: 4178100 - DNA, 25 bp, Homo sapien
cgctgggggtcgagccaagttccca

SEQ ID NO: 4178101 - DNA, 25 bp, Homo sapien
tgcccgcgagctccctcctgcgctg

SEQ ID NO: 4178102 - DNA, 25 bp, Homo sapien
ggtgatgacagccgggtgaggctgg

SEQ ID NO: 4178103 - DNA, 25 bp, Homo sapien
caggcagtgcattcccggcgggggg

SEQ ID NO: 4178104 - DNA, 25 bp, Homo sapien
agcggcggggcggataggatcggcg

SEQ ID NO: 4178105 - DNA, 25 bp, Homo sapien
gcgcggcccgccgcaggcagtgcat

SEQ ID NO: 4178106 - DNA, 25 bp, Homo sapien
gaagatgcacttgaacaccagccaa

SEQ ID NO: 4178107 - DNA, 25 bp, Homo sapien
gaaaacttcggaggtggaatctcca

SEQ ID NO: 4178108 - DNA, 25 bp, Homo sapien
aagcactcacggacgacactggatt

SEQ ID NO: 4178109 - DNA, 25 bp, Homo sapien
cactggattctaggccgcctgggct

SEQ ID NO: 4178110 - DNA, 25 bp, Homo sapien
agtctgaagagttcctgccgcatca

SEQ ID NO: 4178111 - DNA, 25 bp, Homo sapien
agatcatcgacctggcagtagaata

SEQ ID NO: 4178112 - DNA, 25 bp, Homo sapien
cagtagaatagccatcacgggatat

SEQ ID NO: 4178113 - DNA, 25 bp, Homo sapien
gaatatcctgatgcatgtatcctag

SEQ ID NO: 4178114 - DNA, 25 bp, Homo sapien
tggcaggactgatcagaattccacc

SEQ ID NO: 4178115 - DNA, 25 bp, Homo sapien
tctcaccttcctgaattgaagatag

SEQ ID NO: 4178116 - DNA, 25 bp, Homo sapien
cctggcctggcaggactgatcagaa

SEQ ID NO: 4178117 - DNA, 25 bp, Homo sapien
tcaccttcctgaattgaagatagct

SEQ ID NO: 4178118 - DNA, 25 bp, Homo sapien
caaagagatgaatctgatatagcca

SEQ ID NO: 4178119 - DNA, 25 bp, Homo sapien
tagccatttcatattaggttgtatc

SEQ ID NO: 4178120 - DNA, 25 bp, Homo sapien
tctcaaagagatgaatctgatatag

SEQ ID NO: 4178121 - DNA, 25 bp, Homo sapien
taggttgtatcaccagccagtctaa

SEQ ID NO: 4178122 - DNA, 25 bp, Homo sapien
tttcaatagcaaagtgtaagagcac

SEQ ID NO: 4178123 - DNA, 25 bp, Homo sapien
gggtcaaaggacacgcataatttta

SEQ ID NO: 4178124 - DNA, 25 bp, Homo sapien
caagctgtcttccagaaagtctatc

SEQ ID NO: 4178125 - DNA, 25 bp, Homo sapien
tcttatacgcctgccaacagggtta

SEQ ID NO: 4178126 - DNA, 25 bp, Homo sapien
gcagctgattagatagtgctggcag

SEQ ID NO: 4178127 - DNA, 25 bp, Homo sapien
taaccatcacagtctgttaaaacct

SEQ ID NO: 4178128 - DNA, 25 bp, Homo sapien
atcacagtctgttaaaacctttttg

SEQ ID NO: 4178129 - DNA, 25 bp, Homo sapien
ctgattagatagtgctggcagctga

SEQ ID NO: 4178130 - DNA, 25 bp, Homo sapien
cttgcacaagcaagggattgaagga

SEQ ID NO: 4178131 - DNA, 25 bp, Homo sapien
ttcttggaaactggacaatctagag

SEQ ID NO: 4178132 - DNA, 25 bp, Homo sapien
gcattagaacaagtgtgaggtcctt

SEQ ID NO: 4178133 - DNA, 25 bp, Homo sapien
agccctgctgcaggttattcttgca

SEQ ID NO: 4178134 - DNA, 25 bp, Homo sapien
gctggagattttagcccataggcct

SEQ ID NO: 4178135 - DNA, 25 bp, Homo sapien
aatgcttataccctgcaggaagcgc

SEQ ID NO: 4178136 - DNA, 25 bp, Homo sapien
caggaagcgcttcatgtcagagact

SEQ ID NO: 4178137 - DNA, 25 bp, Homo sapien
tacccgtgttccaaatgcttatacc

SEQ ID NO: 4178138 - DNA, 25 bp, Homo sapien
catattgaagaatttgttatcagga

SEQ ID NO: 4178139 - DNA, 25 bp, Homo sapien
cttcatattgaagaatttgttatca

SEQ ID NO: 4178140 - DNA, 25 bp, Homo sapien
atattgaagaatttgttatcaggaa

SEQ ID NO: 4178141 - DNA, 25 bp, Homo sapien
tcatattgaagaatttgttatcagg

SEQ ID NO: 4178142 - DNA, 25 bp, Homo sapien
caggttctctcaggaacgaactcta

SEQ ID NO: 4178143 - DNA, 25 bp, Homo sapien
ggttctctcaggaacgaactctatt

SEQ ID NO: 4178144 - DNA, 25 bp, Homo sapien
tctcaggaacgaactctattgtgaa

SEQ ID NO: 4178145 - DNA, 25 bp, Homo sapien
tctctcaggaacgaactctattgtg

SEQ ID NO: 4178146 - DNA, 25 bp, Homo sapien
taaataaaggataccacagtgcatg

SEQ ID NO: 4178147 - DNA, 25 bp, Homo sapien
ggtaaatgagaacactacaactgta

SEQ ID NO: 4178148 - DNA, 25 bp, Homo sapien
cagaatataacctttgtgtgcgtgt

SEQ ID NO: 4178149 - DNA, 25 bp, Homo sapien
tatatgtgtgttacaggttaatgcc

SEQ ID NO: 4178150 - DNA, 25 bp, Homo sapien
gtgcaatcctacacagtatcaacat

SEQ ID NO: 4178151 - DNA, 25 bp, Homo sapien
tgtaaggtgcaacaatttaatattt

SEQ ID NO: 4178152 - DNA, 25 bp, Homo sapien
agtcttatgttatcttccattctat

SEQ ID NO: 4178153 - DNA, 25 bp, Homo sapien
taaaattacttcagtgcaatcctac

SEQ ID NO: 4178154 - DNA, 25 bp, Homo sapien
gaatgcgctcatgaaaaataaggcc

SEQ ID NO: 4178155 - DNA, 25 bp, Homo sapien
ccaaaacaagagttctgggccacag

SEQ ID NO: 4178156 - DNA, 25 bp, Homo sapien
tatcagctctgaacgtgtggtaaag

SEQ ID NO: 4178157 - DNA, 25 bp, Homo sapien
tacctagcagcgttattgatgggca

SEQ ID NO: 4178158 - DNA, 25 bp, Homo sapien
tttaaaagcggggtacatgtatata

SEQ ID NO: 4178159 - DNA, 25 bp, Homo sapien
tatgactttaaaagcggggtacatg

SEQ ID NO: 4178160 - DNA, 25 bp, Homo sapien
tatatgactttaaaagcggggtaca

SEQ ID NO: 4178161 - DNA, 25 bp, Homo sapien
aaaagcggggtacatgtatatacta

SEQ ID NO: 4178162 - DNA, 25 bp, Homo sapien
ttaaaagaaagtggatgtgctgcct

SEQ ID NO: 4178163 - DNA, 25 bp, Homo sapien
gagccactgcttgcaattctcacca

SEQ ID NO: 4178164 - DNA, 25 bp, Homo sapien
tccagcaatgtgactagacaatgcc

SEQ ID NO: 4178165 - DNA, 25 bp, Homo sapien
tacagcagtcaaaacaaactgtgcc

SEQ ID NO: 4178166 - DNA, 25 bp, Homo sapien
cccttcatgggagacaacgataacg

SEQ ID NO: 4178167 - DNA, 25 bp, Homo sapien
tgggacttcgacgacgaggcattcg

SEQ ID NO: 4178168 - DNA, 25 bp, Homo sapien
gctgtcctgctcttgtctctccaga

SEQ ID NO: 4178169 - DNA, 25 bp, Homo sapien
gaggcattcgatgagatctccgacg

SEQ ID NO: 4178170 - DNA, 25 bp, Homo sapien
cttgttttaggcacttgacccagtg

SEQ ID NO: 4178171 - DNA, 25 bp, Homo sapien
ttaagattaagtgagttcacttgtt

SEQ ID NO: 4178172 - DNA, 25 bp, Homo sapien
gttaagattaagtgagttcacttgt

SEQ ID NO: 4178173 - DNA, 25 bp, Homo sapien
gctctagaggcagatacctggcttc

SEQ ID NO: 4178174 - DNA, 25 bp, Homo sapien
tatttggcttaagctgctggtcaca

SEQ ID NO: 4178175 - DNA, 25 bp, Homo sapien
tgcatgagatctccgggcatggacc

SEQ ID NO: 4178176 - DNA, 25 bp, Homo sapien
cactggctgtgaatctttgggcagg

SEQ ID NO: 4178177 - DNA, 25 bp, Homo sapien
tgcagagattaagacctatctttgc

SEQ ID NO: 4178178 - DNA, 25 bp, Homo sapien
cagacacatgctctttaataggaag

SEQ ID NO: 4178179 - DNA, 25 bp, Homo sapien
gcaggattatagttcctaataagga

SEQ ID NO: 4178180 - DNA, 25 bp, Homo sapien
ctgactgtgcccagagttgcagaga

SEQ ID NO: 4178181 - DNA, 25 bp, Homo sapien
gatttgaactcctagacgcaagcat

SEQ ID NO: 4178182 - DNA, 25 bp, Homo sapien
ccctagtggaaagatggaaaccagt

SEQ ID NO: 4178183 - DNA, 25 bp, Homo sapien
ggaacacagtgcactagaaagaggg

SEQ ID NO: 4178184 - DNA, 25 bp, Homo sapien
gatccgagtttcctgcagcataaag

SEQ ID NO: 4178185 - DNA, 25 bp, Homo sapien
tgttcaagctccaggtcacgtcatg

SEQ ID NO: 4178186 - DNA, 25 bp, Homo sapien
aagctgtcactgtccgagtctggag

SEQ ID NO: 4178187 - DNA, 25 bp, Homo sapien
ggtgccaggcctcagtatttgttca

SEQ ID NO: 4178188 - DNA, 25 bp, Homo sapien
gatagagaatgtaggaagggcacca

SEQ ID NO: 4178189 - DNA, 25 bp, Homo sapien
tttgacagcagaactaccctttgaa

SEQ ID NO: 4178190 - DNA, 25 bp, Homo sapien
taattgagccgggttaactcagact

SEQ ID NO: 4178191 - DNA, 25 bp, Homo sapien
gatgagctcctaattgcccgtactg

SEQ ID NO: 4178192 - DNA, 25 bp, Homo sapien
taaaggcagaagtgcctcagaagtc

SEQ ID NO: 4178193 - DNA, 25 bp, Homo sapien
ttcccaccaagactctaggagagct

SEQ ID NO: 4178194 - DNA, 25 bp, Homo sapien
tcaccccatcccagtgctctctcca

SEQ ID NO: 4178195 - DNA, 25 bp, Homo sapien
taggagagctcctcctaatttctcc

SEQ ID NO: 4178196 - DNA, 25 bp, Homo sapien
catctgagctcctatctacctcccc

SEQ ID NO: 4178197 - DNA, 25 bp, Homo sapien
ctgaaggtggaaaattttaaagctg

SEQ ID NO: 4178198 - DNA, 25 bp, Homo sapien
tgaaggtggaaaattttaaagctga

SEQ ID NO: 4178199 - DNA, 25 bp, Homo sapien
tatttttatcccctgggcagccatg

SEQ ID NO: 4178200 - DNA, 25 bp, Homo sapien
tgacacttcaagtggagcgcggcca

SEQ ID NO: 4178201 - DNA, 25 bp, Homo sapien
taagactcaaagcacattacagggt

SEQ ID NO: 4178202 - DNA, 25 bp, Homo sapien
gattaggcacatggcccttcgagcc

SEQ ID NO: 4178203 - DNA, 25 bp, Homo sapien
aagctgaccttcaatgcctgtcctg

SEQ ID NO: 4178204 - DNA, 25 bp, Homo sapien
ccaggaggagaacaagctgaccttc

SEQ ID NO: 4178205 - DNA, 25 bp, Homo sapien
aggagaacaagctgaccttcaatgc

SEQ ID NO: 4178206 - DNA, 25 bp, Homo sapien
tgaccttcaatgcctgtcctggcca

SEQ ID NO: 4178207 - DNA, 25 bp, Homo sapien
gctctgagtctaaggaagcggactt

SEQ ID NO: 4178208 - DNA, 25 bp, Homo sapien
ccaagtttatgctcaattcagaggg

SEQ ID NO: 4178209 - DNA, 25 bp, Homo sapien
tctccttggagatcgtgcgtatatg

SEQ ID NO: 4178210 - DNA, 25 bp, Homo sapien
gcatgggacacattttgaggttctg

SEQ ID NO: 4178211 - DNA, 25 bp, Homo sapien
taaggcatcttgaagcccagcttgg

SEQ ID NO: 4178212 - DNA, 25 bp, Homo sapien
tgtagagcccgtgtcctcattctgg

SEQ ID NO: 4178213 - DNA, 25 bp, Homo sapien
tacaattggtttcctgatcacagag

SEQ ID NO: 4178214 - DNA, 25 bp, Homo sapien
ggttaataaccatcagagacacatc

SEQ ID NO: 4178215 - DNA, 25 bp, Homo sapien
cgaggtccgtgtgggagacttccta

SEQ ID NO: 4178216 - DNA, 25 bp, Homo sapien
gacgacccagcagggtcagccgtga

SEQ ID NO: 4178217 - DNA, 25 bp, Homo sapien
tgtccgagctggcaggacgacccag

SEQ ID NO: 4178218 - DNA, 25 bp, Homo sapien
aagccacaacaaacaagtgtccgag

SEQ ID NO: 4178219 - DNA, 25 bp, Homo sapien
tagtgaccgctatgggtccctgagg

SEQ ID NO: 4178220 - DNA, 25 bp, Homo sapien
agcacactgaggaggcgatccgcca

SEQ ID NO: 4178221 - DNA, 25 bp, Homo sapien
tgccagctgcgaggacctctgtggt

SEQ ID NO: 4178222 - DNA, 25 bp, Homo sapien
ctgaagaggcgcgtggagacgaggc

SEQ ID NO: 4178223 - DNA, 25 bp, Homo sapien
tacaaataggaggtcgtgccacatc

SEQ ID NO: 4178224 - DNA, 25 bp, Homo sapien
ttccaggtaaagcaagtgcgggctc

SEQ ID NO: 4178225 - DNA, 25 bp, Homo sapien
tcttaaaatcctatgccagccctgg

SEQ ID NO: 4178226 - DNA, 25 bp, Homo sapien
caatgggtattgctctccgaggacc

SEQ ID NO: 4178227 - DNA, 25 bp, Homo sapien
cgtagcatctaggaatttgagccca

SEQ ID NO: 4178228 - DNA, 25 bp, Homo sapien
ccatcgaaggctgcggtgctgagtc

SEQ ID NO: 4178229 - DNA, 25 bp, Homo sapien
gcagataggcttttagtccccaatg

SEQ ID NO: 4178230 - DNA, 25 bp, Homo sapien
gaactaaatgtctgccgatcggccg

SEQ ID NO: 4178231 - DNA, 25 bp, Homo sapien
ctgaacattcactcccaatcatttc

SEQ ID NO: 4178232 - DNA, 25 bp, Homo sapien
tctgaacattcactcccaatcattt

SEQ ID NO: 4178233 - DNA, 25 bp, Homo sapien
ttctgaacattcactcccaatcatt

SEQ ID NO: 4178234 - DNA, 25 bp, Homo sapien
tgaacattcactcccaatcatttcc

SEQ ID NO: 4178235 - DNA, 25 bp, Homo sapien
gtcatcagaaggcctgggcatgagc

SEQ ID NO: 4178236 - DNA, 25 bp, Homo sapien
gtaacatcccggccttgtcatcaga

SEQ ID NO: 4178237 - DNA, 25 bp, Homo sapien
tcacttcccgttagttaagtctctc

SEQ ID NO: 4178238 - DNA, 25 bp, Homo sapien
cgtaacatcccggccttgtcatcag

SEQ ID NO: 4178239 - DNA, 25 bp, Homo sapien
gaacaccgaggcttgctttgggaag

SEQ ID NO: 4178240 - DNA, 25 bp, Homo sapien
agccagggccacgagttaagaatgc

SEQ ID NO: 4178241 - DNA, 25 bp, Homo sapien
caggaccttaggacaggcgagcttc

SEQ ID NO: 4178242 - DNA, 25 bp, Homo sapien
tacttaagtccacagaagagtgagc

SEQ ID NO: 4178243 - DNA, 25 bp, Homo sapien
ttcccattggacgacagcccgatca

SEQ ID NO: 4178244 - DNA, 25 bp, Homo sapien
cattggacgacagcccgatcaatcc

SEQ ID NO: 4178245 - DNA, 25 bp, Homo sapien
ggacgacagcccgatcaatcctttt

SEQ ID NO: 4178246 - DNA, 25 bp, Homo sapien
gacagcccgatcaatccttttccat

SEQ ID NO: 4178247 - DNA, 25 bp, Homo sapien
taacagcttcgtctacatggcatcg

SEQ ID NO: 4178248 - DNA, 25 bp, Homo sapien
tggcaaggacggaaaaactccatgg

SEQ ID NO: 4178249 - DNA, 25 bp, Homo sapien
gtttcatgactaggaactggcttca

SEQ ID NO: 4178250 - DNA, 25 bp, Homo sapien
tagtccaggtgatcagcagcagcac

SEQ ID NO: 4178251 - DNA, 25 bp, Homo sapien
acagaaatgtcacccccaatcacat

SEQ ID NO: 4178252 - DNA, 25 bp, Homo sapien
aaaataaacatgcatggccccacac

SEQ ID NO: 4178253 - DNA, 25 bp, Homo sapien
gctctaggccagtgattcataatca

SEQ ID NO: 4178254 - DNA, 25 bp, Homo sapien
ctaggccagtgattcataatcagga

SEQ ID NO: 4178255 - DNA, 25 bp, Homo sapien
tcttggatagagtactggccctggc

SEQ ID NO: 4178256 - DNA, 25 bp, Homo sapien
cagaggttgaactacggaggcacta

SEQ ID NO: 4178257 - DNA, 25 bp, Homo sapien
gctgtgaaccaagagatgggcccat

SEQ ID NO: 4178258 - DNA, 25 bp, Homo sapien
taccaactgggatgcgtctgtgagg

SEQ ID NO: 4178259 - DNA, 25 bp, Homo sapien
tttgacaatgtactctagggctggg

SEQ ID NO: 4178260 - DNA, 25 bp, Homo sapien
tatggtagcaccagccactattaag

SEQ ID NO: 4178261 - DNA, 25 bp, Homo sapien
gttcaaaggccaaagacgttcagca

SEQ ID NO: 4178262 - DNA, 25 bp, Homo sapien
cactattaagaagcccaaaggacag

SEQ ID NO: 4178263 - DNA, 25 bp, Homo sapien
gacagacttcgttgctgtacccacc

SEQ ID NO: 4178264 - DNA, 25 bp, Homo sapien
ggaaactgattatctcaagggagaa

SEQ ID NO: 4178265 - DNA, 25 bp, Homo sapien
taccatgaggtctgacacattgaca

SEQ ID NO: 4178266 - DNA, 25 bp, Homo sapien
tactaaatgctggtagacagacttc

SEQ ID NO: 4178267 - DNA, 25 bp, Homo sapien
cctgggttgcgaagtgaagctgaaa

SEQ ID NO: 4178268 - DNA, 25 bp, Homo sapien
tgtcaacaaactcgtggatgatggc

SEQ ID NO: 4178269 - DNA, 25 bp, Homo sapien
ttccaccagcagtgtgcgacggttc

SEQ ID NO: 4178270 - DNA, 25 bp, Homo sapien
tcttctgacgcgctatgcctgtggt

SEQ ID NO: 4178271 - DNA, 25 bp, Homo sapien
ccttcagtagacctcagtctgtatc

SEQ ID NO: 4178272 - DNA, 25 bp, Homo sapien
tgtcctgctgccacacggggaccag

SEQ ID NO: 4178273 - DNA, 25 bp, Homo sapien
tcctgccccagctcgtagcttggtt

SEQ ID NO: 4178274 - DNA, 25 bp, Homo sapien
accaagaatccttcagtagacctca

SEQ ID NO: 4178275 - DNA, 25 bp, Homo sapien
attcaaacttgccttgtcacatctg

SEQ ID NO: 4178276 - DNA, 25 bp, Homo sapien
tcaaacttgccttgtcacatctggg

SEQ ID NO: 4178277 - DNA, 25 bp, Homo sapien
agattcaaacttgccttgtcacatc

SEQ ID NO: 4178278 - DNA, 25 bp, Homo sapien
tgagattcaaacttgccttgtcaca

SEQ ID NO: 4178279 - DNA, 25 bp, Homo sapien
catctagaagagacatgactggcat

SEQ ID NO: 4178280 - DNA, 25 bp, Homo sapien
gggattgttcatctagaagagacat

SEQ ID NO: 4178281 - DNA, 25 bp, Homo sapien
gtgagaactgtcctgagcctgttgg

SEQ ID NO: 4178282 - DNA, 25 bp, Homo sapien
caggcttagagctggcttacatttc

SEQ ID NO: 4178283 - DNA, 25 bp, Homo sapien
gaggtcaccatttctttccagttag

SEQ ID NO: 4178284 - DNA, 25 bp, Homo sapien
tcagaggtcaccatttctttccagt

SEQ ID NO: 4178285 - DNA, 25 bp, Homo sapien
tctcagaggtcaccatttctttcca

SEQ ID NO: 4178286 - DNA, 25 bp, Homo sapien
gttctcagaggtcaccatttctttc

SEQ ID NO: 4178287 - DNA, 25 bp, Homo sapien
cctgaatagtcccagcatgagtatt

SEQ ID NO: 4178288 - DNA, 25 bp, Homo sapien
tagaggtggccttatgtatagcccg

SEQ ID NO: 4178289 - DNA, 25 bp, Homo sapien
catgagtattcaaagagccctttcc

SEQ ID NO: 4178290 - DNA, 25 bp, Homo sapien
gtatagcccggctcccctgaatagt

SEQ ID NO: 4178291 - DNA, 25 bp, Homo sapien
agccttctgggtcagtgcctacaca

SEQ ID NO: 4178292 - DNA, 25 bp, Homo sapien
cttctgggtcagtgcctacacaggc

SEQ ID NO: 4178293 - DNA, 25 bp, Homo sapien
agggcaggcaccaaatttgacacag

SEQ ID NO: 4178294 - DNA, 25 bp, Homo sapien
ggcaccaaatttgacacagctgcat

SEQ ID NO: 4178295 - DNA, 25 bp, Homo sapien
tctgtctagcaaaggagtaaggaca

SEQ ID NO: 4178296 - DNA, 25 bp, Homo sapien
ccggagtgtgaaataacaggttcct

SEQ ID NO: 4178297 - DNA, 25 bp, Homo sapien
catgtccaaaataacccggagtgtg

SEQ ID NO: 4178298 - DNA, 25 bp, Homo sapien
taaagagtcagaaaccaagacactg

SEQ ID NO: 4178299 - DNA, 25 bp, Homo sapien
ctgtaaagtacacatgaccccctgc

SEQ ID NO: 4178300 - DNA, 25 bp, Homo sapien
gtaaagtacacatgaccccctgctg

SEQ ID NO: 4178301 - DNA, 25 bp, Homo sapien
tctgtaaagtacacatgaccccctg

SEQ ID NO: 4178302 - DNA, 25 bp, Homo sapien
tgtaaagtacacatgaccccctgct

SEQ ID NO: 4178303 - DNA, 25 bp, Homo sapien
cctttctttgcatcattggggccat

SEQ ID NO: 4178304 - DNA, 25 bp, Homo sapien
ccagtattcctttctttgcatcatt

SEQ ID NO: 4178305 - DNA, 25 bp, Homo sapien
gtattcctttctttgcatcattggg

SEQ ID NO: 4178306 - DNA, 25 bp, Homo sapien
ttcctttctttgcatcattggggcc

SEQ ID NO: 4178307 - DNA, 25 bp, Homo sapien
gatgctgctctgactaactctggtt

SEQ ID NO: 4178308 - DNA, 25 bp, Homo sapien
tccaagctggctgaaaactttctcc

SEQ ID NO: 4178309 - DNA, 25 bp, Homo sapien
tggaactttgtgttacctggaccca

SEQ ID NO: 4178310 - DNA, 25 bp, Homo sapien
aaactgttcacactgcacgctgtgg

SEQ ID NO: 4178311 - DNA, 25 bp, Homo sapien
ggtgtcgttaggctcaaataccaaa

SEQ ID NO: 4178312 - DNA, 25 bp, Homo sapien
tgcaacgcaggccttgtacacaggg

SEQ ID NO: 4178313 - DNA, 25 bp, Homo sapien
tctaggagacagtgatgctggttgc

SEQ ID NO: 4178314 - DNA, 25 bp, Homo sapien
gatcaaagaattcgagcagccagct

SEQ ID NO: 4178315 - DNA, 25 bp, Homo sapien
tattaccacttgtagagaaccgggc

SEQ ID NO: 4178316 - DNA, 25 bp, Homo sapien
tccagaatttaagcaaccactaggg

SEQ ID NO: 4178317 - DNA, 25 bp, Homo sapien
aacatgtgggttctaagactatagc

SEQ ID NO: 4178318 - DNA, 25 bp, Homo sapien
taaagctgttgtcttgagctaaccc

SEQ ID NO: 4178319 - DNA, 25 bp, Homo sapien
gctgtgtgccacaggccagtgttgt

SEQ ID NO: 4178320 - DNA, 25 bp, Homo sapien
taatactttgtacaggtcacctgcc

SEQ ID NO: 4178321 - DNA, 25 bp, Homo sapien
tataccaggacttcttagctcagta

SEQ ID NO: 4178322 - DNA, 25 bp, Homo sapien
catgtaagcagcacgttttaactct

SEQ ID NO: 4178323 - DNA, 25 bp, Homo sapien
ggcccatcaggttgtcttagcaaca

SEQ ID NO: 4178324 - DNA, 25 bp, Homo sapien
tgtcttagcaacagccttcaagtga

SEQ ID NO: 4178325 - DNA, 25 bp, Homo sapien
tgaaaggcaatactgtctgtgatgg

SEQ ID NO: 4178326 - DNA, 25 bp, Homo sapien
gaagcaattggtaagatccctgctg

SEQ ID NO: 4178327 - DNA, 25 bp, Homo sapien
gctagaagcactcctgaaaagaaat

SEQ ID NO: 4178328 - DNA, 25 bp, Homo sapien
gctagtcagcaacagcggacttgct

SEQ ID NO: 4178329 - DNA, 25 bp, Homo sapien
taagagcagctacaacacagctagt

SEQ ID NO: 4178330 - DNA, 25 bp, Homo sapien
actttctaagagactatcccctcag

SEQ ID NO: 4178331 - DNA, 25 bp, Homo sapien
aaagtctctgagcttaattatatct

SEQ ID NO: 4178332 - DNA, 25 bp, Homo sapien
ccctatgcaattcaattggttagga

SEQ ID NO: 4178333 - DNA, 25 bp, Homo sapien
ctttgatgacaccctatgcaattca

SEQ ID NO: 4178334 - DNA, 25 bp, Homo sapien
ggttaggaacatctctagtactata

SEQ ID NO: 4178335 - DNA, 25 bp, Homo sapien
cagtatctcatgtagagtttagcac

SEQ ID NO: 4178336 - DNA, 25 bp, Homo sapien
gactactagctcacctgtcagattg

SEQ ID NO: 4178337 - DNA, 25 bp, Homo sapien
gttaagcacgtttttatgctgggca

SEQ ID NO: 4178338 - DNA, 25 bp, Homo sapien
taaatcctgcctcatgactactagc

SEQ ID NO: 4178339 - DNA, 25 bp, Homo sapien
gaatatatgtacgtttagctttggt

SEQ ID NO: 4178340 - DNA, 25 bp, Homo sapien
ctgggagtggaattgttatttcata

SEQ ID NO: 4178341 - DNA, 25 bp, Homo sapien
tttgggctactgcaaatcaagctgc

SEQ ID NO: 4178342 - DNA, 25 bp, Homo sapien
tcagtagacataagcactcatttct

SEQ ID NO: 4178343 - DNA, 25 bp, Homo sapien
gtcaaaagggaagcatctgatatct

SEQ ID NO: 4178344 - DNA, 25 bp, Homo sapien
ttaatttgcgcaaggttactcagct

SEQ ID NO: 4178345 - DNA, 25 bp, Homo sapien
tttgcatacgtatacacccctgtag

SEQ ID NO: 4178346 - DNA, 25 bp, Homo sapien
tgaaaaggaagcataccccaagtca

SEQ ID NO: 4178347 - DNA, 25 bp, Homo sapien
gatcatctggcctgctaaacctaaa

SEQ ID NO: 4178348 - DNA, 25 bp, Homo sapien
gaaaggagcggtagcacctgttcct

SEQ ID NO: 4178349 - DNA, 25 bp, Homo sapien
tgcaatatatgtgactggcagtggg

SEQ ID NO: 4178350 - DNA, 25 bp, Homo sapien
gaaagagtgctaaaccctggcctta

SEQ ID NO: 4178351 - DNA, 25 bp, Homo sapien
tagtgtagtagttacttctggttta

SEQ ID NO: 4178352 - DNA, 25 bp, Homo sapien
cccagaggcaaccatgattaactgt

SEQ ID NO: 4178353 - DNA, 25 bp, Homo sapien
tagtataccatggaaagtgtccctt

SEQ ID NO: 4178354 - DNA, 25 bp, Homo sapien
taagaactctgtcctatatcatgaa

SEQ ID NO: 4178355 - DNA, 25 bp, Homo sapien
cacttcctggtctaatcaggcattc

SEQ ID NO: 4178356 - DNA, 25 bp, Homo sapien
ggactcgatccagggtatagtatta

SEQ ID NO: 4178357 - DNA, 25 bp, Homo sapien
tgccagacatatacctcagacagtg

SEQ ID NO: 4178358 - DNA, 25 bp, Homo sapien
tctaatggttcaggcaaaaagtact

SEQ ID NO: 4178359 - DNA, 25 bp, Homo sapien
ctgagtgaagcatatatagggcatc

SEQ ID NO: 4178360 - DNA, 25 bp, Homo sapien
tatgaagcaaaccaagaccattatt

SEQ ID NO: 4178361 - DNA, 25 bp, Homo sapien
gatagaaaggcttattccaggtttg

SEQ ID NO: 4178362 - DNA, 25 bp, Homo sapien
tagaaaacacaggatttaaaattgc

SEQ ID NO: 4178363 - DNA, 25 bp, Homo sapien
tccactgaaggaaatattatacaac

SEQ ID NO: 4178364 - DNA, 25 bp, Homo sapien
tgaggcttcacttccctcggtctgg

SEQ ID NO: 4178365 - DNA, 25 bp, Homo sapien
ttaactcttttctcggcggctccgc

SEQ ID NO: 4178366 - DNA, 25 bp, Homo sapien
cggagactatgaagcgcggcattcg

SEQ ID NO: 4178367 - DNA, 25 bp, Homo sapien
gtctattgcgtacgcccaaggcgct

SEQ ID NO: 4178368 - DNA, 25 bp, Homo sapien
ggaatcttaacctgaaatccttgga

SEQ ID NO: 4178369 - DNA, 25 bp, Homo sapien
tacagtcctagcatgaccccagtta

SEQ ID NO: 4178370 - DNA, 25 bp, Homo sapien
ggaaatgcaaagattatggcccaat

SEQ ID NO: 4178371 - DNA, 25 bp, Homo sapien
cctgagtgcctctgataacattata

SEQ ID NO: 4178372 - DNA, 25 bp, Homo sapien
tactgagactaagcacaattggcaa

SEQ ID NO: 4178373 - DNA, 25 bp, Homo sapien
catcttttgagccaccacttggtgt

SEQ ID NO: 4178374 - DNA, 25 bp, Homo sapien
tgaacataatccctcaagactgagg

SEQ ID NO: 4178375 - DNA, 25 bp, Homo sapien
gacacttagtcttggtagccttgaa

SEQ ID NO: 4178376 - DNA, 25 bp, Homo sapien
cagctcgccacagtttctctccttt

SEQ ID NO: 4178377 - DNA, 25 bp, Homo sapien
tcgccacagtttctctcctttttat

SEQ ID NO: 4178378 - DNA, 25 bp, Homo sapien
cgccacagtttctctcctttttatc

SEQ ID NO: 4178379 - DNA, 25 bp, Homo sapien
gctcgccacagtttctctccttttt

SEQ ID NO: 4178380 - DNA, 25 bp, Homo sapien
gacgctgagcctccctcaggcggag

SEQ ID NO: 4178381 - DNA, 25 bp, Homo sapien
gcagaggacgctgagcctccctcag

SEQ ID NO: 4178382 - DNA, 25 bp, Homo sapien
ggcgctggccgcctgctgtctggct

SEQ ID NO: 4178383 - DNA, 25 bp, Homo sapien
ctgggggtgcctgccgccagctccc

SEQ ID NO: 4178384 - DNA, 25 bp, Homo sapien
gctgctcggcgcccggtgggcggag

SEQ ID NO: 4178385 - DNA, 25 bp, Homo sapien
cgcggagcttcgagggcgggcgttg

SEQ ID NO: 4178386 - DNA, 25 bp, Homo sapien
ctgtgggagggcgtccgcgggcagc

SEQ ID NO: 4178387 - DNA, 25 bp, Homo sapien
gcgggcagccgggagccgaagaagc

SEQ ID NO: 4178388 - DNA, 25 bp, Homo sapien
aaaggcgtccacgtccgagtctgct

SEQ ID NO: 4178389 - DNA, 25 bp, Homo sapien
gcgtccacgtccgagtctgctgctc

SEQ ID NO: 4178390 - DNA, 25 bp, Homo sapien
aaaaaggcgtccacgtccgagtctg

SEQ ID NO: 4178391 - DNA, 25 bp, Homo sapien
aggcgtccacgtccgagtctgctgc

SEQ ID NO: 4178392 - DNA, 25 bp, Homo sapien
aggcgagaccgatgtcttccgcccc

SEQ ID NO: 4178393 - DNA, 25 bp, Homo sapien
caggcgagaccgatgtcttccgccc

SEQ ID NO: 4178394 - DNA, 25 bp, Homo sapien
ggcgagaccgatgtcttccgcccca

SEQ ID NO: 4178395 - DNA, 25 bp, Homo sapien
gcgagaccgatgtcttccgccccac

SEQ ID NO: 4178396 - DNA, 25 bp, Homo sapien
agagggaccagctccccacacgcac

SEQ ID NO: 4178397 - DNA, 25 bp, Homo sapien
gaccacttcgaatatttcttttgtg

SEQ ID NO: 4178398 - DNA, 25 bp, Homo sapien
gagaccacttcgaatatttcttttg

SEQ ID NO: 4178399 - DNA, 25 bp, Homo sapien
tttgaggacagagaccacttcgaat

SEQ ID NO: 4178400 - DNA, 25 bp, Homo sapien
ggacagagaccacttcgaatatttc

SEQ ID NO: 4178401 - DNA, 25 bp, Homo sapien
agtgtttgggtccaagaaagagagt

SEQ ID NO: 4178402 - DNA, 25 bp, Homo sapien
tgggtccaagaaagagagtatggca

SEQ ID NO: 4178403 - DNA, 25 bp, Homo sapien
gtttgggtccaagaaagagagtatg

SEQ ID NO: 4178404 - DNA, 25 bp, Homo sapien
gaaagagagtatggcatcttctctt

SEQ ID NO: 4178405 - DNA, 25 bp, Homo sapien
ctctggagggtcgtgtgagaccact

SEQ ID NO: 4178406 - DNA, 25 bp, Homo sapien
tgtgagaccactgaggagcctttga

SEQ ID NO: 4178407 - DNA, 25 bp, Homo sapien
cagcaacagccagattcctactccc

SEQ ID NO: 4178408 - DNA, 25 bp, Homo sapien
gttctagggtagataagcctggtgc

SEQ ID NO: 4178409 - DNA, 25 bp, Homo sapien
atttataaactaaagcttggagtgg

SEQ ID NO: 4178410 - DNA, 25 bp, Homo sapien
ggagtggttataacttgcacaaagt

SEQ ID NO: 4178411 - DNA, 25 bp, Homo sapien
ggtaagttcctgttctaagattcta

SEQ ID NO: 4178412 - DNA, 25 bp, Homo sapien
tggaactggtctacactttaggaaa

SEQ ID NO: 4178413 - DNA, 25 bp, Homo sapien
aattaaccatctgccagtctcccgg

SEQ ID NO: 4178414 - DNA, 25 bp, Homo sapien
tcaggatagtaagtagtcagacaca

SEQ ID NO: 4178415 - DNA, 25 bp, Homo sapien
aatccccgcctgtcatgccttggaa

SEQ ID NO: 4178416 - DNA, 25 bp, Homo sapien
aaagctgtgacattactccctatgg

SEQ ID NO: 4178417 - DNA, 25 bp, Homo sapien
tccttcctctatacattagtgtgca

SEQ ID NO: 4178418 - DNA, 25 bp, Homo sapien
gaaaaaatcactggacctgataacc

SEQ ID NO: 4178419 - DNA, 25 bp, Homo sapien
tacacctatggtctagaagcagagc

SEQ ID NO: 4178420 - DNA, 25 bp, Homo sapien
cttttcatccatttcagcccaagca

SEQ ID NO: 4178421 - DNA, 25 bp, Homo sapien
ggcataatactaggcacatggcaga

SEQ ID NO: 4178422 - DNA, 25 bp, Homo sapien
aagcaagtgataaaaggagtcccct

SEQ ID NO: 4178423 - DNA, 25 bp, Homo sapien
tatttgcaaggcactaacctgggca

SEQ ID NO: 4178424 - DNA, 25 bp, Homo sapien
catagccatagaagaaaaggtgacc

SEQ ID NO: 4178425 - DNA, 25 bp, Homo sapien
gaattacagtggcttttctatcctt

SEQ ID NO: 4178426 - DNA, 25 bp, Homo sapien
cctcatatcagcaaacgggttctct

SEQ ID NO: 4178427 - DNA, 25 bp, Homo sapien
atttttcaaatggtctacagttagc

SEQ ID NO: 4178428 - DNA, 25 bp, Homo sapien
aaaggacgagaaggaaatacctcat

SEQ ID NO: 4178429 - DNA, 25 bp, Homo sapien
tcaataatcgaaaaacaaaccatgg

SEQ ID NO: 4178430 - DNA, 25 bp, Homo sapien
ttgccccatataaaggtcaattggc

SEQ ID NO: 4178431 - DNA, 25 bp, Homo sapien
caaacaatgaatggatcctctgtct

SEQ ID NO: 4178432 - DNA, 25 bp, Homo sapien
gagagaaagagtattcactttgacc

SEQ ID NO: 4178433 - DNA, 25 bp, Homo sapien
gtcactatggataatgaattcctct

SEQ ID NO: 4178434 - DNA, 25 bp, Homo sapien
aggtgggcatatgcctggagtccca

SEQ ID NO: 4178435 - DNA, 25 bp, Homo sapien
gaaaatccaagacctcacatgtctc

SEQ ID NO: 4178436 - DNA, 25 bp, Homo sapien
agtgagcaactattgtgccgctgca

SEQ ID NO: 4178437 - DNA, 25 bp, Homo sapien
caggctctgtggcttatctagaaca

SEQ ID NO: 4178438 - DNA, 25 bp, Homo sapien
cagacactgttcctgggaagggaaa

SEQ ID NO: 4178439 - DNA, 25 bp, Homo sapien
tatgcacaacaagccaagcggaaat

SEQ ID NO: 4178440 - DNA, 25 bp, Homo sapien
tatgcacaggtaagcaagcagactt

SEQ ID NO: 4178441 - DNA, 25 bp, Homo sapien
ttggtccttctcataggaaaaccca

SEQ ID NO: 4178442 - DNA, 25 bp, Homo sapien
cacaaagccaaatgtggtaagggat

SEQ ID NO: 4178443 - DNA, 25 bp, Homo sapien
ctgaaggcttaatctccagaggaag

SEQ ID NO: 4178444 - DNA, 25 bp, Homo sapien
aagaaaaagtacaggatatggtcct

SEQ ID NO: 4178445 - DNA, 25 bp, Homo sapien
tgtggtaagggataaatcaatggca

SEQ ID NO: 4178446 - DNA, 25 bp, Homo sapien
caatcacctgttgacagccagcaga

SEQ ID NO: 4178447 - DNA, 25 bp, Homo sapien
tgtatggactcgctacagtgctgcc

SEQ ID NO: 4178448 - DNA, 25 bp, Homo sapien
gaaggccacataagtccaaggcaga

SEQ ID NO: 4178449 - DNA, 25 bp, Homo sapien
aggtgatgcccttgcttccaggtga

SEQ ID NO: 4178450 - DNA, 25 bp, Homo sapien
tgtgtctctggcctaagcacagata

SEQ ID NO: 4178451 - DNA, 25 bp, Homo sapien
gatgctcacatgctgtaacctcaca

SEQ ID NO: 4178452 - DNA, 25 bp, Homo sapien
gaggtgctgctagatgaactctaaa

SEQ ID NO: 4178453 - DNA, 25 bp, Homo sapien
tcactgggccaaccagcctttttgg

SEQ ID NO: 4178454 - DNA, 25 bp, Homo sapien
tagctcctctcccactacatttatc

SEQ ID NO: 4178455 - DNA, 25 bp, Homo sapien
cccactacatttatctggcccaata

SEQ ID NO: 4178456 - DNA, 25 bp, Homo sapien
tctcccactacatttatctggccca

SEQ ID NO: 4178457 - DNA, 25 bp, Homo sapien
gctcctctcccactacatttatctg

SEQ ID NO: 4178458 - DNA, 25 bp, Homo sapien
gggatgccaagccgtcatcggaacg

SEQ ID NO: 4178459 - DNA, 25 bp, Homo sapien
ggatgccaagccgtcatcggaacgt

SEQ ID NO: 4178460 - DNA, 25 bp, Homo sapien
cactggggatgccaagccgtcatcg

SEQ ID NO: 4178461 - DNA, 25 bp, Homo sapien
tggggatgccaagccgtcatcggaa

SEQ ID NO: 4178462 - DNA, 25 bp, Homo sapien
tcttttatgctaatggtctggcccc

SEQ ID NO: 4178463 - DNA, 25 bp, Homo sapien
tatttgccgctgttcttgaagcagg

SEQ ID NO: 4178464 - DNA, 25 bp, Homo sapien
caccaagaagtggaatagcagcaga

SEQ ID NO: 4178465 - DNA, 25 bp, Homo sapien
ggaactgagttcacaacctctagag

SEQ ID NO: 4178466 - DNA, 25 bp, Homo sapien
tttttccagaggtaaacatgaagac

SEQ ID NO: 4178467 - DNA, 25 bp, Homo sapien
catcaattccaaatcccacaggtgg

SEQ ID NO: 4178468 - DNA, 25 bp, Homo sapien
gaacagagtacaagcattaagccaa

SEQ ID NO: 4178469 - DNA, 25 bp, Homo sapien
tgtcaggccagatcatgagctctct

SEQ ID NO: 4178470 - DNA, 25 bp, Homo sapien
ggatccaattctggcagcaggaaca

SEQ ID NO: 4178471 - DNA, 25 bp, Homo sapien
ggttggatccaattctggcagcagg

SEQ ID NO: 4178472 - DNA, 25 bp, Homo sapien
gaacaatgggttggatccaattctg

SEQ ID NO: 4178473 - DNA, 25 bp, Homo sapien
cttgtctggaacaatgggttggatc

SEQ ID NO: 4178474 - DNA, 25 bp, Homo sapien
ttggctcactttcaggctcaaggga

SEQ ID NO: 4178475 - DNA, 25 bp, Homo sapien
atcttggctcactttcaggctcaag

SEQ ID NO: 4178476 - DNA, 25 bp, Homo sapien
tagtagaaacaacatctccctatgt

SEQ ID NO: 4178477 - DNA, 25 bp, Homo sapien
tttagtagaaacaacatctccctat

SEQ ID NO: 4178478 - DNA, 25 bp, Homo sapien
gagattacatcaaagatacttgagg

SEQ ID NO: 4178479 - DNA, 25 bp, Homo sapien
gaggttatgttttccatactagttg

SEQ ID NO: 4178480 - DNA, 25 bp, Homo sapien
tggagattacatcaaagatacttga

SEQ ID NO: 4178481 - DNA, 25 bp, Homo sapien
ggttatgttttccatactagttgcc

SEQ ID NO: 4178482 - DNA, 25 bp, Homo sapien
aaactagttgcgaagatcactttac

SEQ ID NO: 4178483 - DNA, 25 bp, Homo sapien
agggccacccactgttaaatcagaa

SEQ ID NO: 4178484 - DNA, 25 bp, Homo sapien
tttggatggagataagactaatccc

SEQ ID NO: 4178485 - DNA, 25 bp, Homo sapien
gcaagccttcgaggtactgggaaag

SEQ ID NO: 4178486 - DNA, 25 bp, Homo sapien
tcctctgtttccctcgcagccagtc

SEQ ID NO: 4178487 - DNA, 25 bp, Homo sapien
cgcagccagtcatgcagttcctcca

SEQ ID NO: 4178488 - DNA, 25 bp, Homo sapien
ttccctcgcagccagtcatgcagtt

SEQ ID NO: 4178489 - DNA, 25 bp, Homo sapien
tctgtttccctcgcagccagtcatg

SEQ ID NO: 4178490 - DNA, 25 bp, Homo sapien
ttccccaaggcacctacattgcaaa

SEQ ID NO: 4178491 - DNA, 25 bp, Homo sapien
cccaaggcacctacattgcaaagga

SEQ ID NO: 4178492 - DNA, 25 bp, Homo sapien
ctcagcatgaacacctggttggctg

SEQ ID NO: 4178493 - DNA, 25 bp, Homo sapien
tcctactcagcatgaacacctggtt

SEQ ID NO: 4178494 - DNA, 25 bp, Homo sapien
ccatcaggcaactggaggcatgtct

SEQ ID NO: 4178495 - DNA, 25 bp, Homo sapien
ggaacttatacctccaagatgagag

SEQ ID NO: 4178496 - DNA, 25 bp, Homo sapien
tcctaacagaatggtggtctcccag

SEQ ID NO: 4178497 - DNA, 25 bp, Homo sapien
atgagagagggtgcagatttctgaa

SEQ ID NO: 4178498 - DNA, 25 bp, Homo sapien
ttttcagctccatgtgcctcagctt

SEQ ID NO: 4178499 - DNA, 25 bp, Homo sapien
accaccgctgactcgaggaggccgg

SEQ ID NO: 4178500 - DNA, 25 bp, Homo sapien
aggaggccggaatcacttgacgctg

SEQ ID NO: 4178501 - DNA, 25 bp, Homo sapien
ttgacgctgggctcgcacacagcct

SEQ ID NO: 4178502 - DNA, 25 bp, Homo sapien
cagcctgctctaagcaaatgcctgc

SEQ ID NO: 4178503 - DNA, 25 bp, Homo sapien
ctcgatccagcagccggagcaagcg

SEQ ID NO: 4178504 - DNA, 25 bp, Homo sapien
agataccactggtcccagaagcggt

SEQ ID NO: 4178505 - DNA, 25 bp, Homo sapien
caagcggagataccagagataccac

SEQ ID NO: 4178506 - DNA, 25 bp, Homo sapien
actggtcccagaagcggtccgtcat

SEQ ID NO: 4178507 - DNA, 25 bp, Homo sapien
ttgggctgtatagcaaggcttcccc

SEQ ID NO: 4178508 - DNA, 25 bp, Homo sapien
ccaagactattcctcacagagatga

SEQ ID NO: 4178509 - DNA, 25 bp, Homo sapien
cttccacctggtattgatctcccgg

SEQ ID NO: 4178510 - DNA, 25 bp, Homo sapien
tccatcaggagtttgatctcattct

SEQ ID NO: 4178511 - DNA, 25 bp, Homo sapien
gatttctcccctgataagggccctg

SEQ ID NO: 4178512 - DNA, 25 bp, Homo sapien
ggtcacaaagataaggaggattcac

SEQ ID NO: 4178513 - DNA, 25 bp, Homo sapien
ttaacgccctcatctcaagtctggg

SEQ ID NO: 4178514 - DNA, 25 bp, Homo sapien
tctcggtgctagtgagaaactgctt

SEQ ID NO: 4178515 - DNA, 25 bp, Homo sapien
gagccagaacttgagcctaagtttg

SEQ ID NO: 4178516 - DNA, 25 bp, Homo sapien
ccttagccatttattcaagggcact

SEQ ID NO: 4178517 - DNA, 25 bp, Homo sapien
taagtttgtgactcatggattcaag

SEQ ID NO: 4178518 - DNA, 25 bp, Homo sapien
ccatttattcaagggcacttagaag

SEQ ID NO: 4178519 - DNA, 25 bp, Homo sapien
gaggcctgttactttcaagatgaca

SEQ ID NO: 4178520 - DNA, 25 bp, Homo sapien
cgacaatgatgagggcaaaatgata

SEQ ID NO: 4178521 - DNA, 25 bp, Homo sapien
tgacataaggcacgacaatgatgag

SEQ ID NO: 4178522 - DNA, 25 bp, Homo sapien
agatgacataaggcacgacaatgat

SEQ ID NO: 4178523 - DNA, 25 bp, Homo sapien
ccatagcaaccatctccttagtcaa

SEQ ID NO: 4178524 - DNA, 25 bp, Homo sapien
tagcaaccatctccttagtcaacgt

SEQ ID NO: 4178525 - DNA, 25 bp, Homo sapien
tttcttttgatagacagtccccacc

SEQ ID NO: 4178526 - DNA, 25 bp, Homo sapien
ttgatagacagtccccaccatagca

SEQ ID NO: 4178527 - DNA, 25 bp, Homo sapien
tgtcatttgcagcaacatagatgga

SEQ ID NO: 4178528 - DNA, 25 bp, Homo sapien
gtcatttgcagcaacatagatggaa

SEQ ID NO: 4178529 - DNA, 25 bp, Homo sapien
tcctgtcatttgcagcaacatagat

SEQ ID NO: 4178530 - DNA, 25 bp, Homo sapien
ctataaaaaggaaatcctgtcattt

SEQ ID NO: 4178531 - DNA, 25 bp, Homo sapien
ttcttctgaatatagatatcccatt

SEQ ID NO: 4178532 - DNA, 25 bp, Homo sapien
aaggatgtccttttcccaatatatg

SEQ ID NO: 4178533 - DNA, 25 bp, Homo sapien
tcattcttctgaatatagatatccc

SEQ ID NO: 4178534 - DNA, 25 bp, Homo sapien
cttctgaatatagatatcccatttt

SEQ ID NO: 4178535 - DNA, 25 bp, Homo sapien
gccagagctgtgcagatagctgagc

SEQ ID NO: 4178536 - DNA, 25 bp, Homo sapien
agagcaagtcaaagacagggtatct

SEQ ID NO: 4178537 - DNA, 25 bp, Homo sapien
gcaggcaagccaatgacagagcaag

SEQ ID NO: 4178538 - DNA, 25 bp, Homo sapien
cagggtatctgtcagacatagaaga

SEQ ID NO: 4178539 - DNA, 25 bp, Homo sapien
ttcatacacatgctgcgtgcttttc

SEQ ID NO: 4178540 - DNA, 25 bp, Homo sapien
cttttcatacacatgctgcgtgctt

SEQ ID NO: 4178541 - DNA, 25 bp, Homo sapien
catacacatgctgcgtgcttttctc

SEQ ID NO: 4178542 - DNA, 25 bp, Homo sapien
cacatgctgcgtgcttttctcttct

SEQ ID NO: 4178543 - DNA, 25 bp, Homo sapien
caaacaatatgtgcttgctgctacc

SEQ ID NO: 4178544 - DNA, 25 bp, Homo sapien
tcctcccactgcaatctggtttctt

SEQ ID NO: 4178545 - DNA, 25 bp, Homo sapien
tctcattgaggtgctgaaacaatgc

SEQ ID NO: 4178546 - DNA, 25 bp, Homo sapien
taagtagtcaccaatgccttctgtc

SEQ ID NO: 4178547 - DNA, 25 bp, Homo sapien
gctcagggcagcaggtcaacaaaat

SEQ ID NO: 4178548 - DNA, 25 bp, Homo sapien
tccaaataggatagagtaactctgc

SEQ ID NO: 4178549 - DNA, 25 bp, Homo sapien
ttcaaagcaagaggcctaaggtcac

SEQ ID NO: 4178550 - DNA, 25 bp, Homo sapien
tagtatagacccctagctcagggca

SEQ ID NO: 4178551 - DNA, 25 bp, Homo sapien
taattctgctagaaatgggagttcc

SEQ ID NO: 4178552 - DNA, 25 bp, Homo sapien
acaagatggtcagttctaagtgaca

SEQ ID NO: 4178553 - DNA, 25 bp, Homo sapien
agtgacagtcccctcaacatgctcg

SEQ ID NO: 4178554 - DNA, 25 bp, Homo sapien
gaaaagtagggattcttctgttcac

SEQ ID NO: 4178555 - DNA, 25 bp, Homo sapien
tctagagtcataactaaaatctctg

SEQ ID NO: 4178556 - DNA, 25 bp, Homo sapien
tctctgattgcccaacagagagcac

SEQ ID NO: 4178557 - DNA, 25 bp, Homo sapien
catttggcaagtgcaaagcccaaaa

SEQ ID NO: 4178558 - DNA, 25 bp, Homo sapien
tgggacttgtttctagagtcataac

SEQ ID NO: 4178559 - DNA, 25 bp, Homo sapien
gcactgttcacttggccacagtagt

SEQ ID NO: 4178560 - DNA, 25 bp, Homo sapien
aactgaccatataatacacatacgg

SEQ ID NO: 4178561 - DNA, 25 bp, Homo sapien
gctcagagggacttatgacatcatt

SEQ ID NO: 4178562 - DNA, 25 bp, Homo sapien
gaactaaggtccagggaagcgaaca

SEQ ID NO: 4178563 - DNA, 25 bp, Homo sapien
tactaagtgcctcagaaaccaaatt

SEQ ID NO: 4178564 - DNA, 25 bp, Homo sapien
gagctgcctcaaggccgtgctgtga

SEQ ID NO: 4178565 - DNA, 25 bp, Homo sapien
gatcaattggctgttcccagaatgc

SEQ ID NO: 4178566 - DNA, 25 bp, Homo sapien
cagattttcccgaatggagttgggc

SEQ ID NO: 4178567 - DNA, 25 bp, Homo sapien
gggtgggccctccacaatgccacag

SEQ ID NO: 4178568 - DNA, 25 bp, Homo sapien
aggagtgggtctgcaatcacaggca

SEQ ID NO: 4178569 - DNA, 25 bp, Homo sapien
tggcaatagccccagattcctctag

SEQ ID NO: 4178570 - DNA, 25 bp, Homo sapien
catgtgaacgataggggacttggca

SEQ ID NO: 4178571 - DNA, 25 bp, Homo sapien
catggaccacactttagggagcact

SEQ ID NO: 4178572 - DNA, 25 bp, Homo sapien
tgtgctcagaaccagatgcctcatg

SEQ ID NO: 4178573 - DNA, 25 bp, Homo sapien
gattgtatgctctctgagtgccagg

SEQ ID NO: 4178574 - DNA, 25 bp, Homo sapien
gataatctaagcactcaaacaggca

SEQ ID NO: 4178575 - DNA, 25 bp, Homo sapien
taactctagatgttcccctgggcaa

SEQ ID NO: 4178576 - DNA, 25 bp, Homo sapien
gggtttcatacctggctgcctatga

SEQ ID NO: 4178577 - DNA, 25 bp, Homo sapien
tacaggtgatcttccatgagaaagt

SEQ ID NO: 4178578 - DNA, 25 bp, Homo sapien
gggcaaattccacaggttacacaga

SEQ ID NO: 4178579 - DNA, 25 bp, Homo sapien
ccatcagataagcaattatcatctc

SEQ ID NO: 4178580 - DNA, 25 bp, Homo sapien
ggccatcagataagcaattatcatc

SEQ ID NO: 4178581 - DNA, 25 bp, Homo sapien
agaggccatcagataagcaattatc

SEQ ID NO: 4178582 - DNA, 25 bp, Homo sapien
gaggccatcagataagcaattatca

SEQ ID NO: 4178583 - DNA, 25 bp, Homo sapien
ttttttcatctagcacctgctccat

SEQ ID NO: 4178584 - DNA, 25 bp, Homo sapien
cgttttttcatctagcacctgctcc

SEQ ID NO: 4178585 - DNA, 25 bp, Homo sapien
tcgttttttcatctagcacctgctc

SEQ ID NO: 4178586 - DNA, 25 bp, Homo sapien
gttttttcatctagcacctgctcca

SEQ ID NO: 4178587 - DNA, 25 bp, Homo sapien
aggctttgatgtggatgcccacagg

SEQ ID NO: 4178588 - DNA, 25 bp, Homo sapien
taaggctttgatgtggatgcccaca

SEQ ID NO: 4178589 - DNA, 25 bp, Homo sapien
tataaggctttgatgtggatgccca

SEQ ID NO: 4178590 - DNA, 25 bp, Homo sapien
ctataaggctttgatgtggatgccc

SEQ ID NO: 4178591 - DNA, 25 bp, Homo sapien
tgcctcattaggaagactgggacct

SEQ ID NO: 4178592 - DNA, 25 bp, Homo sapien
ccagcaagcatctattccacctaga

SEQ ID NO: 4178593 - DNA, 25 bp, Homo sapien
cctctcctgaccacattaaggcagt

SEQ ID NO: 4178594 - DNA, 25 bp, Homo sapien
tttcagcgaggagacattgcttttt

SEQ ID NO: 4178595 - DNA, 25 bp, Homo sapien
gccatctgttggaaagtcgtgcgca

SEQ ID NO: 4178596 - DNA, 25 bp, Homo sapien
cattaaacatcagtcaggtggccca

SEQ ID NO: 4178597 - DNA, 25 bp, Homo sapien
ccaaggcttggtcatgcagaggtga

SEQ ID NO: 4178598 - DNA, 25 bp, Homo sapien
ggtaaaggatgtctcagccaaggtc

SEQ ID NO: 4178599 - DNA, 25 bp, Homo sapien
gagagagggagtccccataggtgtg

SEQ ID NO: 4178600 - DNA, 25 bp, Homo sapien
tccctttgttatatgctgaacggac

SEQ ID NO: 4178601 - DNA, 25 bp, Homo sapien
tatgctgaacggactcctggagaga

SEQ ID NO: 4178602 - DNA, 25 bp, Homo sapien
ttgttatatgctgaacggactcctg

SEQ ID NO: 4178603 - DNA, 25 bp, Homo sapien
gctgtgtgacttctaggcctcaact

SEQ ID NO: 4178604 - DNA, 25 bp, Homo sapien
tagttcaaacttaagggaggatcag

SEQ ID NO: 4178605 - DNA, 25 bp, Homo sapien
cacaggcaggaattcctcagggaac

SEQ ID NO: 4178606 - DNA, 25 bp, Homo sapien
tgccatcacgtaaagaaactcagtc

SEQ ID NO: 4178607 - DNA, 25 bp, Homo sapien
agtaggcctggacacttcgcagcgc

SEQ ID NO: 4178608 - DNA, 25 bp, Homo sapien
ggcctggacacttcgcagcgcacat

SEQ ID NO: 4178609 - DNA, 25 bp, Homo sapien
gatcaggcctggacactcggcagca

SEQ ID NO: 4178610 - DNA, 25 bp, Homo sapien
tcaggcctggacactcggcagcacg

SEQ ID NO: 4178611 - DNA, 25 bp, Homo sapien
cctgacttttggcacgagcagctgc

SEQ ID NO: 4178612 - DNA, 25 bp, Homo sapien
tatttggttccaattgatatcccaa

SEQ ID NO: 4178613 - DNA, 25 bp, Homo sapien
ttttggcacgagcagctgctttatc

SEQ ID NO: 4178614 - DNA, 25 bp, Homo sapien
tcacagtatttggttccaattgata

SEQ ID NO: 4178615 - DNA, 25 bp, Homo sapien
gatggaagcattgttaccataggag

SEQ ID NO: 4178616 - DNA, 25 bp, Homo sapien
ttattgcagaatagccatgcaccgc

SEQ ID NO: 4178617 - DNA, 25 bp, Homo sapien
tcaggaagtattctagatggaagca

SEQ ID NO: 4178618 - DNA, 25 bp, Homo sapien
gaaacctgcactcccagttgtctaa

SEQ ID NO: 4178619 - DNA, 25 bp, Homo sapien
tgagccacccctagaaaagcacaag

SEQ ID NO: 4178620 - DNA, 25 bp, Homo sapien
catgagtccaacgagggaggtcctc

SEQ ID NO: 4178621 - DNA, 25 bp, Homo sapien
gctgtagtgaatcctcatgagtcca

SEQ ID NO: 4178622 - DNA, 25 bp, Homo sapien
catgggagggcaacctttactgagt

SEQ ID NO: 4178623 - DNA, 25 bp, Homo sapien
caacatataattgccccttcttctg

SEQ ID NO: 4178624 - DNA, 25 bp, Homo sapien
gaaggagcaggtccatcttttaagt

SEQ ID NO: 4178625 - DNA, 25 bp, Homo sapien
ttgtatctctcttgacctataggat

SEQ ID NO: 4178626 - DNA, 25 bp, Homo sapien
caccatatgtatggtgattatggca

SEQ ID NO: 4178627 - DNA, 25 bp, Homo sapien
caggagctaagccagatggagtcaa

SEQ ID NO: 4178628 - DNA, 25 bp, Homo sapien
gccaagacactggagtgaccaggag

SEQ ID NO: 4178629 - DNA, 25 bp, Homo sapien
cactggagtgaccaggagctaagcc

SEQ ID NO: 4178630 - DNA, 25 bp, Homo sapien
aagccagatggagtcaaggacagcc

SEQ ID NO: 4178631 - DNA, 25 bp, Homo sapien
tgcaacctgagctagctctgaagct

SEQ ID NO: 4178632 - DNA, 25 bp, Homo sapien
ctgagctagctctgaagctgctgtg

SEQ ID NO: 4178633 - DNA, 25 bp, Homo sapien
ttgcaacctgagctagctctgaagc

SEQ ID NO: 4178634 - DNA, 25 bp, Homo sapien
aacctgagctagctctgaagctgct

SEQ ID NO: 4178635 - DNA, 25 bp, Homo sapien
ctgagagaaggtgtgcagcttgtcc

SEQ ID NO: 4178636 - DNA, 25 bp, Homo sapien
gattcgagctataactggggtctct

SEQ ID NO: 4178637 - DNA, 25 bp, Homo sapien
cgagctataactggggtctctgtta

SEQ ID NO: 4178638 - DNA, 25 bp, Homo sapien
ttcgagctataactggggtctctgt

SEQ ID NO: 4178639 - DNA, 25 bp, Homo sapien
agcgattcgagctataactggggtc

SEQ ID NO: 4178640 - DNA, 25 bp, Homo sapien
gtcctttctatgttctagttgagtt

SEQ ID NO: 4178641 - DNA, 25 bp, Homo sapien
tgttctagttgagttcctgttaggg

SEQ ID NO: 4178642 - DNA, 25 bp, Homo sapien
tctatgttctagttgagttcctgtt

SEQ ID NO: 4178643 - DNA, 25 bp, Homo sapien
cctttctatgttctagttgagttcc

SEQ ID NO: 4178644 - DNA, 25 bp, Homo sapien
tcctttaggataggaaggacatcag

SEQ ID NO: 4178645 - DNA, 25 bp, Homo sapien
ttcaaaccatcattccgaaaagacc

SEQ ID NO: 4178646 - DNA, 25 bp, Homo sapien
ttcctttaggataggaaggacatca

SEQ ID NO: 4178647 - DNA, 25 bp, Homo sapien
tttcaaaccatcattccgaaaagac

SEQ ID NO: 4178648 - DNA, 25 bp, Homo sapien
ggcacgctggccaaatacgtcacga

SEQ ID NO: 4178649 - DNA, 25 bp, Homo sapien
catgattgctgcgagcagggaaggt

SEQ ID NO: 4178650 - DNA, 25 bp, Homo sapien
atgggtccgcctcgcttatcacgac

SEQ ID NO: 4178651 - DNA, 25 bp, Homo sapien
cgtcacgagtttccgcaggtcttcc

SEQ ID NO: 4178652 - DNA, 25 bp, Homo sapien
ttccactcctttcacgtacaagtaa

SEQ ID NO: 4178653 - DNA, 25 bp, Homo sapien
tgagtattttctttccactcctttc

SEQ ID NO: 4178654 - DNA, 25 bp, Homo sapien
cccctgttgtcctgcatatccacag

SEQ ID NO: 4178655 - DNA, 25 bp, Homo sapien
cctgttgtcctgcatatccacagcc

SEQ ID NO: 4178656 - DNA, 25 bp, Homo sapien
cacccctgttgtcctgcatatccac

SEQ ID NO: 4178657 - DNA, 25 bp, Homo sapien
tgttgtcctgcatatccacagccac

SEQ ID NO: 4178658 - DNA, 25 bp, Homo sapien
aaaacagcttatggtctggagatcc

SEQ ID NO: 4178659 - DNA, 25 bp, Homo sapien
gcttatggtctggagatccaggaca

SEQ ID NO: 4178660 - DNA, 25 bp, Homo sapien
aacagcttatggtctggagatccag

SEQ ID NO: 4178661 - DNA, 25 bp, Homo sapien
cagcttatggtctggagatccagga

SEQ ID NO: 4178662 - DNA, 25 bp, Homo sapien
tcagccaatgagggtgaagcctgaa

SEQ ID NO: 4178663 - DNA, 25 bp, Homo sapien
gccaatgagggtgaagcctgaattt

SEQ ID NO: 4178664 - DNA, 25 bp, Homo sapien
ccaatgagggtgaagcctgaatttc

SEQ ID NO: 4178665 - DNA, 25 bp, Homo sapien
cagccaatgagggtgaagcctgaat

SEQ ID NO: 4178666 - DNA, 25 bp, Homo sapien
ctgccctatagtttcccatctgggc

SEQ ID NO: 4178667 - DNA, 25 bp, Homo sapien
tgccctatagtttcccatctgggcc

SEQ ID NO: 4178668 - DNA, 25 bp, Homo sapien
cctgccctatagtttcccatctggg

SEQ ID NO: 4178669 - DNA, 25 bp, Homo sapien
tgatgacagtgaagccacgtttgca

SEQ ID NO: 4178670 - DNA, 25 bp, Homo sapien
gagccccgcatgtcgatgatgacag

SEQ ID NO: 4178671 - DNA, 25 bp, Homo sapien
gaaaggcttcctgcagcgttttgag

SEQ ID NO: 4178672 - DNA, 25 bp, Homo sapien
gccagaagttgtcgggtttaatgat

SEQ ID NO: 4178673 - DNA, 25 bp, Homo sapien
tgcagttgcgtcctgagaagccgtc

SEQ ID NO: 4178674 - DNA, 25 bp, Homo sapien
cactcctcatggttgtagtccaggg

SEQ ID NO: 4178675 - DNA, 25 bp, Homo sapien
tgtgttcgtcaatgagccgccgaga

SEQ ID NO: 4178676 - DNA, 25 bp, Homo sapien
tcgaagagccgcagctgaaagcact

SEQ ID NO: 4178677 - DNA, 25 bp, Homo sapien
tcaggtttggcctgttcccttccta

SEQ ID NO: 4178678 - DNA, 25 bp, Homo sapien
tcccggctcaggtttggcctgttcc

SEQ ID NO: 4178679 - DNA, 25 bp, Homo sapien
ccatcccggctcaggtttggcctgt

SEQ ID NO: 4178680 - DNA, 25 bp, Homo sapien
cggctcaggtttggcctgttccctt

SEQ ID NO: 4178681 - DNA, 25 bp, Homo sapien
tccgtttccctgcatgtcaagagag

SEQ ID NO: 4178682 - DNA, 25 bp, Homo sapien
gagccactcattgcaggcactcggg

SEQ ID NO: 4178683 - DNA, 25 bp, Homo sapien
cctttggaaacaagtgggtatggca

SEQ ID NO: 4178684 - DNA, 25 bp, Homo sapien
tagacccaagatcaaagaacatccg

SEQ ID NO: 4178685 - DNA, 25 bp, Homo sapien
caaaaatagaggctgaactatcacc

SEQ ID NO: 4178686 - DNA, 25 bp, Homo sapien
gatctggaattagaggcctccgcca

SEQ ID NO: 4178687 - DNA, 25 bp, Homo sapien
tcaagcccttgggaacaagctgtca

SEQ ID NO: 4178688 - DNA, 25 bp, Homo sapien
gagactgcgcccacctcttttacaa

SEQ ID NO: 4178689 - DNA, 25 bp, Homo sapien
tgacactcttcatggtctcagcagg

SEQ ID NO: 4178690 - DNA, 25 bp, Homo sapien
cactcttcatggtctcagcaggcac

SEQ ID NO: 4178691 - DNA, 25 bp, Homo sapien
agcatcagtgacactcttcatggtc

SEQ ID NO: 4178692 - DNA, 25 bp, Homo sapien
cagtgacactcttcatggtctcagc

SEQ ID NO: 4178693 - DNA, 25 bp, Homo sapien
taaagagtttagagcccacgtcaaa

SEQ ID NO: 4178694 - DNA, 25 bp, Homo sapien
ttctcacctgtgcaagtgggaccaa

SEQ ID NO: 4178695 - DNA, 25 bp, Homo sapien
taacttgggctacaaaaactagtgc

SEQ ID NO: 4178696 - DNA, 25 bp, Homo sapien
ccttgggaatgacctcaggaagagc

SEQ ID NO: 4178697 - DNA, 25 bp, Homo sapien
gctgagctgaactgctgcaagcact

SEQ ID NO: 4178698 - DNA, 25 bp, Homo sapien
gccgatggctgagctgaactgctgc

SEQ ID NO: 4178699 - DNA, 25 bp, Homo sapien
gcacctaagccgatggctgagctga

SEQ ID NO: 4178700 - DNA, 25 bp, Homo sapien
ctccttgcacctaagccgatggctg

SEQ ID NO: 4178701 - DNA, 25 bp, Homo sapien
gcagccgctgtgttgcattacagag

SEQ ID NO: 4178702 - DNA, 25 bp, Homo sapien
agcagccgctgtgttgcattacaga

SEQ ID NO: 4178703 - DNA, 25 bp, Homo sapien
cagccgctgtgttgcattacagagc

SEQ ID NO: 4178704 - DNA, 25 bp, Homo sapien
actggtagctgactccgatctccgt

SEQ ID NO: 4178705 - DNA, 25 bp, Homo sapien
tccttgttgtggcttatccagtcaa

SEQ ID NO: 4178706 - DNA, 25 bp, Homo sapien
tgactccgatctccgtgtggctctg

SEQ ID NO: 4178707 - DNA, 25 bp, Homo sapien
tgtggctctggaggaataactcctt

SEQ ID NO: 4178708 - DNA, 25 bp, Homo sapien
tcacctgttaccaattgctttgctg

SEQ ID NO: 4178709 - DNA, 25 bp, Homo sapien
ttaccaattgctttgctgctctaca

SEQ ID NO: 4178710 - DNA, 25 bp, Homo sapien
cctgttaccaattgctttgctgctc

SEQ ID NO: 4178711 - DNA, 25 bp, Homo sapien
ttaatcacctgttaccaattgcttt

SEQ ID NO: 4178712 - DNA, 25 bp, Homo sapien
ccaaaaggcatctgtgggtacccca

SEQ ID NO: 4178713 - DNA, 25 bp, Homo sapien
tgggtaccccaaaaggcatcaagga

SEQ ID NO: 4178714 - DNA, 25 bp, Homo sapien
caaaaggcatctgtgggtaccccaa

SEQ ID NO: 4178715 - DNA, 25 bp, Homo sapien
tgaccccaaaaggcatctgtgggta

SEQ ID NO: 4178716 - DNA, 25 bp, Homo sapien
gaggcataatgaccggcctcagaga

SEQ ID NO: 4178717 - DNA, 25 bp, Homo sapien
gatctgcttgatttgttgtgaggca

SEQ ID NO: 4178718 - DNA, 25 bp, Homo sapien
gggcagcagcgaagctcttccactc

SEQ ID NO: 4178719 - DNA, 25 bp, Homo sapien
gatggtgctgcgttcatccagggca

SEQ ID NO: 4178720 - DNA, 25 bp, Homo sapien
cttgcagagaccatcccatatggga

SEQ ID NO: 4178721 - DNA, 25 bp, Homo sapien
ccatatgggacggaaactgccctca

SEQ ID NO: 4178722 - DNA, 25 bp, Homo sapien
aacaggtctcccactgttgggtcag

SEQ ID NO: 4178723 - DNA, 25 bp, Homo sapien
acggaaactgccctcaacaggtctc

SEQ ID NO: 4178724 - DNA, 25 bp, Homo sapien
gagaccactgtagagggtagagttt

SEQ ID NO: 4178725 - DNA, 25 bp, Homo sapien
tatggagagagggtcagataccttg

SEQ ID NO: 4178726 - DNA, 25 bp, Homo sapien
tgaaagccttcagagaccactgtag

SEQ ID NO: 4178727 - DNA, 25 bp, Homo sapien
taattctatgaacactaactcctag

SEQ ID NO: 4178728 - DNA, 25 bp, Homo sapien
tgcagggtggatcagtgggggagca

SEQ ID NO: 4178729 - DNA, 25 bp, Homo sapien
gagatgcagggtggatcagtggggg

SEQ ID NO: 4178730 - DNA, 25 bp, Homo sapien
aggagatgcagggtggatcagtggg

SEQ ID NO: 4178731 - DNA, 25 bp, Homo sapien
gaaggagatgcagggtggatcagtg

SEQ ID NO: 4178732 - DNA, 25 bp, Homo sapien
cagctctaggtcttgcatctcggat

SEQ ID NO: 4178733 - DNA, 25 bp, Homo sapien
ggatggcagaccaccttcactgcac

SEQ ID NO: 4178734 - DNA, 25 bp, Homo sapien
gcttgggtcacctgctcatacaagg

SEQ ID NO: 4178735 - DNA, 25 bp, Homo sapien
tcactgcacatcttgcaccaggcat

SEQ ID NO: 4178736 - DNA, 25 bp, Homo sapien
agaaccatggttgccctgctccatt

SEQ ID NO: 4178737 - DNA, 25 bp, Homo sapien
aaacagcctcttcttcttagtccca

SEQ ID NO: 4178738 - DNA, 25 bp, Homo sapien
ttcttagtcccacccaggctatttc

SEQ ID NO: 4178739 - DNA, 25 bp, Homo sapien
cacccaggctatttcacagggcaca

SEQ ID NO: 4178740 - DNA, 25 bp, Homo sapien
gcctcttcttcttagtcccacccag

SEQ ID NO: 4178741 - DNA, 25 bp, Homo sapien
tccagccgtcgctggtgatgtaaca

SEQ ID NO: 4178742 - DNA, 25 bp, Homo sapien
aagtagtgctttgccatcctggctg

SEQ ID NO: 4178743 - DNA, 25 bp, Homo sapien
gagccgcaccttgcggtgctgccag

SEQ ID NO: 4178744 - DNA, 25 bp, Homo sapien
gggccgctgcagcacatcaagtagt

SEQ ID NO: 4178745 - DNA, 25 bp, Homo sapien
agggacttgagctcggtctgcctcc

SEQ ID NO: 4178746 - DNA, 25 bp, Homo sapien
cctagaatggataatggacaccggg

SEQ ID NO: 4178747 - DNA, 25 bp, Homo sapien
ggtctgcctcctagaatggataatg

SEQ ID NO: 4178748 - DNA, 25 bp, Homo sapien
tgagctcggtctgcctcctagaatg

SEQ ID NO: 4178749 - DNA, 25 bp, Homo sapien
cagcaacaatgactttctagcagaa

SEQ ID NO: 4178750 - DNA, 25 bp, Homo sapien
gcccgggctcgatgtagggacttcc

SEQ ID NO: 4178751 - DNA, 25 bp, Homo sapien
gaaaggcctcaccatggttttcaat

SEQ ID NO: 4178752 - DNA, 25 bp, Homo sapien
tagggacttcccaactccagtgtgt

SEQ ID NO: 4178753 - DNA, 25 bp, Homo sapien
ttctgcagggcccgggctcgatgta

SEQ ID NO: 4178754 - DNA, 25 bp, Homo sapien
cataaatgtgggcatctattttacc

SEQ ID NO: 4178755 - DNA, 25 bp, Homo sapien
aaagaccataaatgtgggcatctat

SEQ ID NO: 4178756 - DNA, 25 bp, Homo sapien
gaccataaatgtgggcatctatttt

SEQ ID NO: 4178757 - DNA, 25 bp, Homo sapien
aaatgtgggcatctattttaccact

SEQ ID NO: 4178758 - DNA, 25 bp, Homo sapien
aaggtgcattgggacctgtgtctat

SEQ ID NO: 4178759 - DNA, 25 bp, Homo sapien
gtctattacattggcaaagtccacc

SEQ ID NO: 4178760 - DNA, 25 bp, Homo sapien
ctgcatcttgtccatcataaggtgc

SEQ ID NO: 4178761 - DNA, 25 bp, Homo sapien
gcatcttgtccatcataaggtgcat

SEQ ID NO: 4178762 - DNA, 25 bp, Homo sapien
tacagtcttatcagaaagcagagtc

SEQ ID NO: 4178763 - DNA, 25 bp, Homo sapien
gattactcattggaagggccagagg

SEQ ID NO: 4178764 - DNA, 25 bp, Homo sapien
cagagcccctgacaagctggatgac

SEQ ID NO: 4178765 - DNA, 25 bp, Homo sapien
aatggatgtcaataagggtggcaac

SEQ ID NO: 4178766 - DNA, 25 bp, Homo sapien
ccacatagctaagtagaccacacca

SEQ ID NO: 4178767 - DNA, 25 bp, Homo sapien
taagtagaccacaccatgctgaatc

SEQ ID NO: 4178768 - DNA, 25 bp, Homo sapien
caaagcacaggcctactctttccca

SEQ ID NO: 4178769 - DNA, 25 bp, Homo sapien
ggcctactctttcccacatagctaa

SEQ ID NO: 4178770 - DNA, 25 bp, Homo sapien
catagtgtctctctacttctttctc

SEQ ID NO: 4178771 - DNA, 25 bp, Homo sapien
atagtgtctctctacttctttctcc

SEQ ID NO: 4178772 - DNA, 25 bp, Homo sapien
tagtgtctctctacttctttctccc

SEQ ID NO: 4178773 - DNA, 25 bp, Homo sapien
agtgtctctctacttctttctccct

SEQ ID NO: 4178774 - DNA, 25 bp, Homo sapien
taaagagtccataggtcaaagcctc

SEQ ID NO: 4178775 - DNA, 25 bp, Homo sapien
actaaagagtccataggtcaaagcc

SEQ ID NO: 4178776 - DNA, 25 bp, Homo sapien
ctaaagagtccataggtcaaagcct

SEQ ID NO: 4178777 - DNA, 25 bp, Homo sapien
acactaaagagtccataggtcaaag

SEQ ID NO: 4178778 - DNA, 25 bp, Homo sapien
ggatggggcaatatcatcaatctct

SEQ ID NO: 4178779 - DNA, 25 bp, Homo sapien
ggaaactcctgggatggggcaatat

SEQ ID NO: 4178780 - DNA, 25 bp, Homo sapien
tgggtgtgttccagacatgatctca

SEQ ID NO: 4178781 - DNA, 25 bp, Homo sapien
tctgggtgtgttccagacatgatct

SEQ ID NO: 4178782 - DNA, 25 bp, Homo sapien
atcatcatccagcagaaatgtaggt

SEQ ID NO: 4178783 - DNA, 25 bp, Homo sapien
cgtggaatgcagactagccctagaa

SEQ ID NO: 4178784 - DNA, 25 bp, Homo sapien
tagtagctgattaggccccgtggaa

SEQ ID NO: 4178785 - DNA, 25 bp, Homo sapien
ggtgtcaggcacacggctgctctag

SEQ ID NO: 4178786 - DNA, 25 bp, Homo sapien
cacccctgggatttctcagaggtgc

SEQ ID NO: 4178787 - DNA, 25 bp, Homo sapien
taccttcaagaaaacccatcactgc

SEQ ID NO: 4178788 - DNA, 25 bp, Homo sapien
acatctcaggctgtaactgccagga

SEQ ID NO: 4178789 - DNA, 25 bp, Homo sapien
gggagagcgtagagaacctccatac

SEQ ID NO: 4178790 - DNA, 25 bp, Homo sapien
cagcctgcaggcgggcaccagctag

SEQ ID NO: 4178791 - DNA, 25 bp, Homo sapien
ccgcctctcagcaagcgagcagcct

SEQ ID NO: 4178792 - DNA, 25 bp, Homo sapien
agctccctgatctggcactgaggcg

SEQ ID NO: 4178793 - DNA, 25 bp, Homo sapien
tggcacgccgcctctcagcaagcga

SEQ ID NO: 4178794 - DNA, 25 bp, Homo sapien
caacaacagtgaggcaaagtcaagt

SEQ ID NO: 4178795 - DNA, 25 bp, Homo sapien
caaagtcaagttgcagtcgcgcctt

SEQ ID NO: 4178796 - DNA, 25 bp, Homo sapien
agtcaagttgcagtcgcgccttcca

SEQ ID NO: 4178797 - DNA, 25 bp, Homo sapien
cagtgaggcaaagtcaagttgcagt

SEQ ID NO: 4178798 - DNA, 25 bp, Homo sapien
tgctgcttctaggagcttgtccgca

SEQ ID NO: 4178799 - DNA, 25 bp, Homo sapien
tccaggtgtcgagctgccttgtaga

SEQ ID NO: 4178800 - DNA, 25 bp, Homo sapien
cgaagtcttggatgcgcacctccag

SEQ ID NO: 4178801 - DNA, 25 bp, Homo sapien
tccaggagaagcttccgctgctcca

SEQ ID NO: 4178802 - DNA, 25 bp, Homo sapien
gccctctctccactagctcccctta

SEQ ID NO: 4178803 - DNA, 25 bp, Homo sapien
atgccctctctccactagctcccct

SEQ ID NO: 4178804 - DNA, 25 bp, Homo sapien
tggcaggacagaatgccctctctcc

SEQ ID NO: 4178805 - DNA, 25 bp, Homo sapien
cctggcaggacagaatgccctctct

SEQ ID NO: 4178806 - DNA, 25 bp, Homo sapien
gagcagagattccactcagggaaga

SEQ ID NO: 4178807 - DNA, 25 bp, Homo sapien
gcagagattccactcagggaagatg

SEQ ID NO: 4178808 - DNA, 25 bp, Homo sapien
cagagattccactcagggaagatgg

SEQ ID NO: 4178809 - DNA, 25 bp, Homo sapien
gagattccactcagggaagatggga

SEQ ID NO: 4178810 - DNA, 25 bp, Homo sapien
ctgcttgatcagttcctggactgca

SEQ ID NO: 4178811 - DNA, 25 bp, Homo sapien
tgagctgctggataaggtcttcgcc

SEQ ID NO: 4178812 - DNA, 25 bp, Homo sapien
gacattgagtgtggcatctagagtg

SEQ ID NO: 4178813 - DNA, 25 bp, Homo sapien
tccacagaatctgcacagacatcct

SEQ ID NO: 4178814 - DNA, 25 bp, Homo sapien
ctgggctccccgagggagggaggcg

SEQ ID NO: 4178815 - DNA, 25 bp, Homo sapien
ggcctcgctgggctccccgagggag

SEQ ID NO: 4178816 - DNA, 25 bp, Homo sapien
cctcgctgggctccccgagggaggg

SEQ ID NO: 4178817 - DNA, 25 bp, Homo sapien
ctggcctcgctgggctccccgaggg

SEQ ID NO: 4178818 - DNA, 25 bp, Homo sapien
caagttgagtatggtgcaggcattt

SEQ ID NO: 4178819 - DNA, 25 bp, Homo sapien
tatctcacgtctagcccgaggcatt

SEQ ID NO: 4178820 - DNA, 25 bp, Homo sapien
gattttgctgagtcaagactgggac

SEQ ID NO: 4178821 - DNA, 25 bp, Homo sapien
accgaagctcacacaagaccacaaa

SEQ ID NO: 4178822 - DNA, 25 bp, Homo sapien
tatttatgttacttactgatggctg

SEQ ID NO: 4178823 - DNA, 25 bp, Homo sapien
gctgaataacatcctgaatgataaa

SEQ ID NO: 4178824 - DNA, 25 bp, Homo sapien
taacatcctgaatgataaataattc

SEQ ID NO: 4178825 - DNA, 25 bp, Homo sapien
tgttacttactgatggctgaataac

SEQ ID NO: 4178826 - DNA, 25 bp, Homo sapien
cataatgaatggtcgccagtggctc

SEQ ID NO: 4178827 - DNA, 25 bp, Homo sapien
ctaggctagagtcaggttactggca

SEQ ID NO: 4178828 - DNA, 25 bp, Homo sapien
agagcaggcatcacccacattgttg

SEQ ID NO: 4178829 - DNA, 25 bp, Homo sapien
ggtcatatgcctacggtactctctg

SEQ ID NO: 4178830 - DNA, 25 bp, Homo sapien
aagctgctgcaggaccgactcgatg

SEQ ID NO: 4178831 - DNA, 25 bp, Homo sapien
gatcttccgctcgtggaacagctcc

SEQ ID NO: 4178832 - DNA, 25 bp, Homo sapien
actcgatgtggctgatggagctgct

SEQ ID NO: 4178833 - DNA, 25 bp, Homo sapien
tactgctcaaagatgcgcagttgca

SEQ ID NO: 4178834 - DNA, 25 bp, Homo sapien
caattgcaaaatggcatctttctgt

SEQ ID NO: 4178835 - DNA, 25 bp, Homo sapien
aatattctccactgccctacaaatg

SEQ ID NO: 4178836 - DNA, 25 bp, Homo sapien
tggaagacaaatattctccactgcc

SEQ ID NO: 4178837 - DNA, 25 bp, Homo sapien
ctgggttatcaattgcaaaatggca

SEQ ID NO: 4178838 - DNA, 25 bp, Homo sapien
gaagcaagtcttcattccaggcgtc

SEQ ID NO: 4178839 - DNA, 25 bp, Homo sapien
gacctccgtgatgtactggtgcaga

SEQ ID NO: 4178840 - DNA, 25 bp, Homo sapien
tgtccctgctggataacctcaaagg

SEQ ID NO: 4178841 - DNA, 25 bp, Homo sapien
gaagtcattcatctgccgaagcaag

SEQ ID NO: 4178842 - DNA, 25 bp, Homo sapien
ttccagtcttgatgcggatttgttg

SEQ ID NO: 4178843 - DNA, 25 bp, Homo sapien
ttcaggatgctgggcttgggcaaaa

SEQ ID NO: 4178844 - DNA, 25 bp, Homo sapien
tctctggtgttcaggatgctgggct

SEQ ID NO: 4178845 - DNA, 25 bp, Homo sapien
ttgttgtagctcatattcattctgt

SEQ ID NO: 4178846 - DNA, 25 bp, Homo sapien
gtgtctgtttcataattccaagtcc

SEQ ID NO: 4178847 - DNA, 25 bp, Homo sapien
catggtaataatttcagtatctttt

SEQ ID NO: 4178848 - DNA, 25 bp, Homo sapien
tttcataattccaagtcctagctcc

SEQ ID NO: 4178849 - DNA, 25 bp, Homo sapien
tttttctggtgttacatggtaataa

SEQ ID NO: 4178850 - DNA, 25 bp, Homo sapien
ttacaattagtaagctcagccagtc

SEQ ID NO: 4178851 - DNA, 25 bp, Homo sapien
taaattccccgcaagtgtcgcacat

SEQ ID NO: 4178852 - DNA, 25 bp, Homo sapien
tctgacctacaatgggagccttgag

SEQ ID NO: 4178853 - DNA, 25 bp, Homo sapien
gcccactcaaggagagtttgctcaa

SEQ ID NO: 4178854 - DNA, 25 bp, Homo sapien
accagctagtactgtgaaggctaca

SEQ ID NO: 4178855 - DNA, 25 bp, Homo sapien
aaccagctagtactgtgaaggctac

SEQ ID NO: 4178856 - DNA, 25 bp, Homo sapien
gctagtactgtgaaggctacattcc

SEQ ID NO: 4178857 - DNA, 25 bp, Homo sapien
cagctagtactgtgaaggctacatt

SEQ ID NO: 4178858 - DNA, 25 bp, Homo sapien
tgctctgcattgagctccaattcat

SEQ ID NO: 4178859 - DNA, 25 bp, Homo sapien
caattcatgctgcttctcatggaga

SEQ ID NO: 4178860 - DNA, 25 bp, Homo sapien
tagccgcttatgagtctgctctgca

SEQ ID NO: 4178861 - DNA, 25 bp, Homo sapien
ggtgacgtaattggaggcactgctc

SEQ ID NO: 4178862 - DNA, 25 bp, Homo sapien
gcattgactctccattgcggatcca

SEQ ID NO: 4178863 - DNA, 25 bp, Homo sapien
gatggccagttggaactgctcgtgc

SEQ ID NO: 4178864 - DNA, 25 bp, Homo sapien
tctccattgcggatccatcccagaa

SEQ ID NO: 4178865 - DNA, 25 bp, Homo sapien
ctcgatggccagttggaactgctcg

SEQ ID NO: 4178866 - DNA, 25 bp, Homo sapien
ggaacttgactgctatgtgcccaat

SEQ ID NO: 4178867 - DNA, 25 bp, Homo sapien
gctgcttatgactgtgggaacttga

SEQ ID NO: 4178868 - DNA, 25 bp, Homo sapien
tgtgctatacctctaatctgatcgc

SEQ ID NO: 4178869 - DNA, 25 bp, Homo sapien
tatgacacttggtcttacttggcca

SEQ ID NO: 4178870 - DNA, 25 bp, Homo sapien
tccaaagtagatggatagctgggac

SEQ ID NO: 4178871 - DNA, 25 bp, Homo sapien
ccaaagtagatggatagctgggact

SEQ ID NO: 4178872 - DNA, 25 bp, Homo sapien
ctccaaagtagatggatagctggga

SEQ ID NO: 4178873 - DNA, 25 bp, Homo sapien
tgcaaggaagtggcatgaaagaggg

SEQ ID NO: 4178874 - DNA, 25 bp, Homo sapien
gcaaggaagtggcatgaaagaggga

SEQ ID NO: 4178875 - DNA, 25 bp, Homo sapien
ctgcaaggaagtggcatgaaagagg

SEQ ID NO: 4178876 - DNA, 25 bp, Homo sapien
ctggagcagcacctcggctttctgc

SEQ ID NO: 4178877 - DNA, 25 bp, Homo sapien
accttctcagcacattcccggatgg

SEQ ID NO: 4178878 - DNA, 25 bp, Homo sapien
agaggcattgaccaattttagccgg

SEQ ID NO: 4178879 - DNA, 25 bp, Homo sapien
tcccggatggcatcggcatcgtagt

SEQ ID NO: 4178880 - DNA, 25 bp, Homo sapien
tgaaagggtaacacactgcatcgtt

SEQ ID NO: 4178881 - DNA, 25 bp, Homo sapien
tacacagcactatggtggtaacagc

SEQ ID NO: 4178882 - DNA, 25 bp, Homo sapien
tagttccctaatgacagagagctgt

SEQ ID NO: 4178883 - DNA, 25 bp, Homo sapien
tagtactgaaaggacaggcttctcg

SEQ ID NO: 4178884 - DNA, 25 bp, Homo sapien
tgtctttggatagggcattcattga

SEQ ID NO: 4178885 - DNA, 25 bp, Homo sapien
gaacgctctcatagccagacatgct

SEQ ID NO: 4178886 - DNA, 25 bp, Homo sapien
tgaaagctgtcccaggaagaacgct

SEQ ID NO: 4178887 - DNA, 25 bp, Homo sapien
tgaaagatgtctttggatagggcat

SEQ ID NO: 4178888 - DNA, 25 bp, Homo sapien
tctgaggaccttcagcctatagaag

SEQ ID NO: 4178889 - DNA, 25 bp, Homo sapien
gaccttcagcctatagaagcctaca

SEQ ID NO: 4178890 - DNA, 25 bp, Homo sapien
caggaattattctctgaggaccttc

SEQ ID NO: 4178891 - DNA, 25 bp, Homo sapien
tattctctgaggaccttcagcctat

SEQ ID NO: 4178892 - DNA, 25 bp, Homo sapien
ctcatctctccggtattcttgctct

SEQ ID NO: 4178893 - DNA, 25 bp, Homo sapien
ccaaatgtttgctgatgaggggaat

SEQ ID NO: 4178894 - DNA, 25 bp, Homo sapien
ctggccccagcttatctcgtccacc

SEQ ID NO: 4178895 - DNA, 25 bp, Homo sapien
gacatggtcgatctctgctgctggc

SEQ ID NO: 4178896 - DNA, 25 bp, Homo sapien
aaggaggctcacaaggacttcccac

SEQ ID NO: 4178897 - DNA, 25 bp, Homo sapien
atcagaggagaagatcaaaggctgg

SEQ ID NO: 4178898 - DNA, 25 bp, Homo sapien
agcaaatgcagcctttagatgagct

SEQ ID NO: 4178899 - DNA, 25 bp, Homo sapien
cagggctctagcagaatattaggaa

SEQ ID NO: 4178900 - DNA, 25 bp, Homo sapien
tgtatggaatccaagacaatggaga

SEQ ID NO: 4178901 - DNA, 25 bp, Homo sapien
cagcaggtgtatggaatccaagaca

SEQ ID NO: 4178902 - DNA, 25 bp, Homo sapien
caccgccacacctaggtaactttgt

SEQ ID NO: 4178903 - DNA, 25 bp, Homo sapien
tttaggaggctcaagaactctgaag

SEQ ID NO: 4178904 - DNA, 25 bp, Homo sapien
gatgtacttgagaaacacctcagca

SEQ ID NO: 4178905 - DNA, 25 bp, Homo sapien
gacgttgttcctgtggatgtacttg

SEQ ID NO: 4178906 - DNA, 25 bp, Homo sapien
ttcacttgttgctcgggtccccgag

SEQ ID NO: 4178907 - DNA, 25 bp, Homo sapien
gcgacactgggcatgctgacgttgt

SEQ ID NO: 4178908 - DNA, 25 bp, Homo sapien
acaccatcccacatcatacattttc

SEQ ID NO: 4178909 - DNA, 25 bp, Homo sapien
tacatggtatatttcagggaggggc

SEQ ID NO: 4178910 - DNA, 25 bp, Homo sapien
ccatgaatcattactgcccacacca

SEQ ID NO: 4178911 - DNA, 25 bp, Homo sapien
cacaccatcccacatcatacatttt

SEQ ID NO: 4178912 - DNA, 25 bp, Homo sapien
cctagggatgtcattgtggctggtc

SEQ ID NO: 4178913 - DNA, 25 bp, Homo sapien
acaatttgaggagcaagagtctaga

SEQ ID NO: 4178914 - DNA, 25 bp, Homo sapien
tttgggtgtggcctgagattctata

SEQ ID NO: 4178915 - DNA, 25 bp, Homo sapien
gaataactagagctataggcacgcc

SEQ ID NO: 4178916 - DNA, 25 bp, Homo sapien
taaatacacgtggagcaaacaagct

SEQ ID NO: 4178917 - DNA, 25 bp, Homo sapien
gctcagccttttttgggtccaatca

SEQ ID NO: 4178918 - DNA, 25 bp, Homo sapien
gattgtaggtccctgctcaggtgga

SEQ ID NO: 4178919 - DNA, 25 bp, Homo sapien
tatgcagccatataacaaccagcag

SEQ ID NO: 4178920 - DNA, 25 bp, Homo sapien
ccacatattgctggcattggtctaa

SEQ ID NO: 4178921 - DNA, 25 bp, Homo sapien
aatgcagcacgcgattctccctctg

SEQ ID NO: 4178922 - DNA, 25 bp, Homo sapien
taaccgccgcttcttcaaggtccag

SEQ ID NO: 4178923 - DNA, 25 bp, Homo sapien
ttagcgctgcgctcgaacaccacat

SEQ ID NO: 4178924 - DNA, 25 bp, Homo sapien
taaatgctgaactgctgacaggtga

SEQ ID NO: 4178925 - DNA, 25 bp, Homo sapien
cccagaactgagatagtgccaggga

SEQ ID NO: 4178926 - DNA, 25 bp, Homo sapien
ggtaccaaactcaaaacatagagct

SEQ ID NO: 4178927 - DNA, 25 bp, Homo sapien
gactaagccttggtgatgggcctct

SEQ ID NO: 4178928 - DNA, 25 bp, Homo sapien
gtatgtgttgagaggtaaaattcac

SEQ ID NO: 4178929 - DNA, 25 bp, Homo sapien
gaggtatgtgttgagaggtaaaatt

SEQ ID NO: 4178930 - DNA, 25 bp, Homo sapien
ggtatgtgttgagaggtaaaattca

SEQ ID NO: 4178931 - DNA, 25 bp, Homo sapien
tatgtgttgagaggtaaaattcacc

SEQ ID NO: 4178932 - DNA, 25 bp, Homo sapien
tgtgatccaccctatgcagacagga

SEQ ID NO: 4178933 - DNA, 25 bp, Homo sapien
gattttgatcctatgacgttctggg

SEQ ID NO: 4178934 - DNA, 25 bp, Homo sapien
ccaggtgaagggttatacggacaag

SEQ ID NO: 4178935 - DNA, 25 bp, Homo sapien
ttgaatagggttctgtgcatctgcc

SEQ ID NO: 4178936 - DNA, 25 bp, Homo sapien
ttaaattcaatgtactccactgccc

SEQ ID NO: 4178937 - DNA, 25 bp, Homo sapien
taatggactgtctataggcctacca

SEQ ID NO: 4178938 - DNA, 25 bp, Homo sapien
cataagggccactgtatgtattctc

SEQ ID NO: 4178939 - DNA, 25 bp, Homo sapien
ctcttgtggctaaaggtcaatttgg

SEQ ID NO: 4178940 - DNA, 25 bp, Homo sapien
aaatctctgtagtgcttgtccaccg

SEQ ID NO: 4178941 - DNA, 25 bp, Homo sapien
tttttccacaaagctatcggccagc

SEQ ID NO: 4178942 - DNA, 25 bp, Homo sapien
ccttatctccgtggcatgaatgtgg

SEQ ID NO: 4178943 - DNA, 25 bp, Homo sapien
gggctttctccagtgagtatcggta

SEQ ID NO: 4178944 - DNA, 25 bp, Homo sapien
gcttgctgggataatatccagctcc

SEQ ID NO: 4178945 - DNA, 25 bp, Homo sapien
ttgacctcccgatccgaaaggcttg

SEQ ID NO: 4178946 - DNA, 25 bp, Homo sapien
tcgtggttggcgtcccgcagcttga

SEQ ID NO: 4178947 - DNA, 25 bp, Homo sapien
tctcttcattgacttcgtggttggc

SEQ ID NO: 4178948 - DNA, 25 bp, Homo sapien
ggagccagctagctgggcggaagcc

SEQ ID NO: 4178949 - DNA, 25 bp, Homo sapien
gagccagctagctgggcggaagcca

SEQ ID NO: 4178950 - DNA, 25 bp, Homo sapien
tctctgtctggagtagttcagccat

SEQ ID NO: 4178951 - DNA, 25 bp, Homo sapien
ataagccttctctgtctggagtagt

SEQ ID NO: 4178952 - DNA, 25 bp, Homo sapien
ttctctgtctggagtagttcagcca

SEQ ID NO: 4178953 - DNA, 25 bp, Homo sapien
agccttctctgtctggagtagttca

SEQ ID NO: 4178954 - DNA, 25 bp, Homo sapien
ctctaagcactcatgcaaatccctt

SEQ ID NO: 4178955 - DNA, 25 bp, Homo sapien
tgtaagacagtaacagtttcatcac

SEQ ID NO: 4178956 - DNA, 25 bp, Homo sapien
ctgtaagacagtaacagtttcatca

SEQ ID NO: 4178957 - DNA, 25 bp, Homo sapien
aagacagtaacagtttcatcactgg

SEQ ID NO: 4178958 - DNA, 25 bp, Homo sapien
taagacagtaacagtttcatcactg

SEQ ID NO: 4178959 - DNA, 25 bp, Homo sapien
atgctctttattgaggatcccaggg

SEQ ID NO: 4178960 - DNA, 25 bp, Homo sapien
ggatgttgccaaagatgatatgctc

SEQ ID NO: 4178961 - DNA, 25 bp, Homo sapien
tgttatggaaatcgtagatctcttg

SEQ ID NO: 4178962 - DNA, 25 bp, Homo sapien
cgtagatctcttggatgttgccaaa

SEQ ID NO: 4178963 - DNA, 25 bp, Homo sapien
tcttggtcattcttagcacagggct

SEQ ID NO: 4178964 - DNA, 25 bp, Homo sapien
gagatatcgaatatggcagccactt

SEQ ID NO: 4178965 - DNA, 25 bp, Homo sapien
gctattctggagtcttgcctcaggg

SEQ ID NO: 4178966 - DNA, 25 bp, Homo sapien
cagaaggttccatgggacagtgcta

SEQ ID NO: 4178967 - DNA, 25 bp, Homo sapien
gtttgccagtccgatgtcttctcag

SEQ ID NO: 4178968 - DNA, 25 bp, Homo sapien
tttgccagtccgatgtcttctcaga

SEQ ID NO: 4178969 - DNA, 25 bp, Homo sapien
tgccagtccgatgtcttctcagata

SEQ ID NO: 4178970 - DNA, 25 bp, Homo sapien
ccagtccgatgtcttctcagatatc

SEQ ID NO: 4178971 - DNA, 25 bp, Homo sapien
tggtcctgctccttcggagcaggga

SEQ ID NO: 4178972 - DNA, 25 bp, Homo sapien
tcagtgctcccagttcaacctcaca

SEQ ID NO: 4178973 - DNA, 25 bp, Homo sapien
gtggctggtggccaaggccaaatct

SEQ ID NO: 4178974 - DNA, 25 bp, Homo sapien
tccttcggagcagggaacaccaggt

SEQ ID NO: 4178975 - DNA, 25 bp, Homo sapien
ctcaggcagttgctcgtacttctcc

SEQ ID NO: 4178976 - DNA, 25 bp, Homo sapien
agtgtcccacatcctcaggcagttg

SEQ ID NO: 4178977 - DNA, 25 bp, Homo sapien
tcaggcagttgctcgtacttctcca

SEQ ID NO: 4178978 - DNA, 25 bp, Homo sapien
tttacagtaggtgacatacatctga

SEQ ID NO: 4178979 - DNA, 25 bp, Homo sapien
atcaaagaaggtgcccgcatgctcc

SEQ ID NO: 4178980 - DNA, 25 bp, Homo sapien
caggataagctggttggaatcaggc

SEQ ID NO: 4178981 - DNA, 25 bp, Homo sapien
ttgtttttacagtaggtgacataca

SEQ ID NO: 4178982 - DNA, 25 bp, Homo sapien
tggccagaccatgccgctgttgtat

SEQ ID NO: 4178983 - DNA, 25 bp, Homo sapien
caggagcagttgatatttggtgatc

SEQ ID NO: 4178984 - DNA, 25 bp, Homo sapien
gaagagatggagttggccagaccat

SEQ ID NO: 4178985 - DNA, 25 bp, Homo sapien
cctttggacaggcttaattaggtag

SEQ ID NO: 4178986 - DNA, 25 bp, Homo sapien
caggccatccttgagctcccctttc

SEQ ID NO: 4178987 - DNA, 25 bp, Homo sapien
aggccatccttgagctcccctttcc

SEQ ID NO: 4178988 - DNA, 25 bp, Homo sapien
cattggctttctttgggacactgag

SEQ ID NO: 4178989 - DNA, 25 bp, Homo sapien
cccttccggatcagcgacttcgggt

SEQ ID NO: 4178990 - DNA, 25 bp, Homo sapien
gcgacttcgggtcccacacttgaaa

SEQ ID NO: 4178991 - DNA, 25 bp, Homo sapien
taaacatatttcgtgtgtcctgaag

SEQ ID NO: 4178992 - DNA, 25 bp, Homo sapien
gatctcaaagaggaacaagtgccgc

SEQ ID NO: 4178993 - DNA, 25 bp, Homo sapien
tatgagaggcggggaaggggagggc

SEQ ID NO: 4178994 - DNA, 25 bp, Homo sapien
agaggcggggaaggggagggcagtg

SEQ ID NO: 4178995 - DNA, 25 bp, Homo sapien
tgagaggcggggaaggggagggcag

SEQ ID NO: 4178996 - DNA, 25 bp, Homo sapien
ccacaaggcgaatttgcagggatcg

SEQ ID NO: 4178997 - DNA, 25 bp, Homo sapien
agggatcgccctccacgtgctcggt

SEQ ID NO: 4178998 - DNA, 25 bp, Homo sapien
aatttgcagggatcgccctccacgt

SEQ ID NO: 4178999 - DNA, 25 bp, Homo sapien
gggtgcgcccagaccacaaggcgaa

SEQ ID NO: 4179000 - DNA, 25 bp, Homo sapien
tgaagtggctcctttaaagctcctt

SEQ ID NO: 4179001 - DNA, 25 bp, Homo sapien
ctcgaatgttcttgatccactcctg

SEQ ID NO: 4179002 - DNA, 25 bp, Homo sapien
agtggctcctttaaagctcctttca

SEQ ID NO: 4179003 - DNA, 25 bp, Homo sapien
cctttcttgaatcacttctcgaatg

SEQ ID NO: 4179004 - DNA, 25 bp, Homo sapien
gtgtctggttggctgctcccatccc

SEQ ID NO: 4179005 - DNA, 25 bp, Homo sapien
gcaatggagatggtgtctggttggc

SEQ ID NO: 4179006 - DNA, 25 bp, Homo sapien
tgtctggttggctgctcccatcccc

SEQ ID NO: 4179007 - DNA, 25 bp, Homo sapien
tccctggccatctagtatagtcagg

SEQ ID NO: 4179008 - DNA, 25 bp, Homo sapien
gaaaccagcgttccctggccatcta

SEQ ID NO: 4179009 - DNA, 25 bp, Homo sapien
ccacttagaaaccagcgttccctgg

SEQ ID NO: 4179010 - DNA, 25 bp, Homo sapien
tagtcaggggaaaatctgacactgc

SEQ ID NO: 4179011 - DNA, 25 bp, Homo sapien
tcacctgcctgaataagggcagtcc

SEQ ID NO: 4179012 - DNA, 25 bp, Homo sapien
taaacatggcataccttaaggagga

SEQ ID NO: 4179013 - DNA, 25 bp, Homo sapien
gacataaagtagtcctacactcagg

SEQ ID NO: 4179014 - DNA, 25 bp, Homo sapien
ttctgagccagcactggacacatat

SEQ ID NO: 4179015 - DNA, 25 bp, Homo sapien
cacatttgtactgtgtcgaatgtct

SEQ ID NO: 4179016 - DNA, 25 bp, Homo sapien
gcccacacatttgtactgtgtcgaa

SEQ ID NO: 4179017 - DNA, 25 bp, Homo sapien
aaaagcccacacatttgtactgtgt

SEQ ID NO: 4179018 - DNA, 25 bp, Homo sapien
ccacacatttgtactgtgtcgaatg

SEQ ID NO: 4179019 - DNA, 25 bp, Homo sapien
ttgcagacgattggcaattttaatg

SEQ ID NO: 4179020 - DNA, 25 bp, Homo sapien
ttttaatgatgggtttcttgaggga

SEQ ID NO: 4179021 - DNA, 25 bp, Homo sapien
caattttaatgatgggtttcttgag

SEQ ID NO: 4179022 - DNA, 25 bp, Homo sapien
ttgcttttgcagacgattggcaatt

SEQ ID NO: 4179023 - DNA, 25 bp, Homo sapien
tgagccttgtttgccttggactgtc

SEQ ID NO: 4179024 - DNA, 25 bp, Homo sapien
aatccactttaacatcttggcttgc

SEQ ID NO: 4179025 - DNA, 25 bp, Homo sapien
aagcagggatctgccttgccacatc

SEQ ID NO: 4179026 - DNA, 25 bp, Homo sapien
actgtctccagctaatccactttaa

SEQ ID NO: 4179027 - DNA, 25 bp, Homo sapien
tggcagacagtttggcagtagtcac

SEQ ID NO: 4179028 - DNA, 25 bp, Homo sapien
agtttggcagtagtcaccagaagtg

SEQ ID NO: 4179029 - DNA, 25 bp, Homo sapien
cagacagtttggcagtagtcaccag

SEQ ID NO: 4179030 - DNA, 25 bp, Homo sapien
gacagtttggcagtagtcaccagaa

SEQ ID NO: 4179031 - DNA, 25 bp, Homo sapien
tctaagcaggaaacgagggtgctgt

SEQ ID NO: 4179032 - DNA, 25 bp, Homo sapien
tctgtgtctacaatagtgcctggca

SEQ ID NO: 4179033 - DNA, 25 bp, Homo sapien
tgagataaaaagacagcctacatga

SEQ ID NO: 4179034 - DNA, 25 bp, Homo sapien
tcttgcagaaaggacactagctagc

SEQ ID NO: 4179035 - DNA, 25 bp, Homo sapien
gaaaagctacttctacctcagtgtg

SEQ ID NO: 4179036 - DNA, 25 bp, Homo sapien
tatatgggaaacacactgaggaaca

SEQ ID NO: 4179037 - DNA, 25 bp, Homo sapien
acacacattggaggagaggtttgca

SEQ ID NO: 4179038 - DNA, 25 bp, Homo sapien
cacaaaatgctgagggatgggattc

SEQ ID NO: 4179039 - DNA, 25 bp, Homo sapien
acttgatgcagccatcagaattaaa

SEQ ID NO: 4179040 - DNA, 25 bp, Homo sapien
cacttgatgcagccatcagaattaa

SEQ ID NO: 4179041 - DNA, 25 bp, Homo sapien
atcacttgatgcagccatcagaatt

SEQ ID NO: 4179042 - DNA, 25 bp, Homo sapien
tcacttgatgcagccatcagaatta

SEQ ID NO: 4179043 - DNA, 25 bp, Homo sapien
ttttctcgttccactaagaatttga

SEQ ID NO: 4179044 - DNA, 25 bp, Homo sapien
cttttctcgttccactaagaatttg

SEQ ID NO: 4179045 - DNA, 25 bp, Homo sapien
tttctcgttccactaagaatttgag

SEQ ID NO: 4179046 - DNA, 25 bp, Homo sapien
tatagatgtgctacaaggcctacag

SEQ ID NO: 4179047 - DNA, 25 bp, Homo sapien
tttctagtaacccagtgcagagtgc

SEQ ID NO: 4179048 - DNA, 25 bp, Homo sapien
gaaaggttctatcacacttgccgca

SEQ ID NO: 4179049 - DNA, 25 bp, Homo sapien
agaattttaaatcacggccgggcat

SEQ ID NO: 4179050 - DNA, 25 bp, Homo sapien
aaaagggccgggctctgtgatttgc

SEQ ID NO: 4179051 - DNA, 25 bp, Homo sapien
aaaatctgcatgagatcccgtagcc

SEQ ID NO: 4179052 - DNA, 25 bp, Homo sapien
ctgttaagaaaagggccgggctctg

SEQ ID NO: 4179053 - DNA, 25 bp, Homo sapien
tgtgatttgcatataactttgcaaa

SEQ ID NO: 4179054 - DNA, 25 bp, Homo sapien
taaacgtaagtggagaaaggatctc

SEQ ID NO: 4179055 - DNA, 25 bp, Homo sapien
aggtgccaccgaggaacaaggttgc

SEQ ID NO: 4179056 - DNA, 25 bp, Homo sapien
gccaccgaggaacaaggttgccatc

SEQ ID NO: 4179057 - DNA, 25 bp, Homo sapien
ctaaacgtaagtggagaaaggatct

SEQ ID NO: 4179058 - DNA, 25 bp, Homo sapien
ccggtgagctgcagggacaagtccc

SEQ ID NO: 4179059 - DNA, 25 bp, Homo sapien
tgagctgcagggacaagtcccagga

SEQ ID NO: 4179060 - DNA, 25 bp, Homo sapien
agctgcagggacaagtcccaggatg

SEQ ID NO: 4179061 - DNA, 25 bp, Homo sapien
cggtgagctgcagggacaagtccca

SEQ ID NO: 4179062 - DNA, 25 bp, Homo sapien
gaattgcacccagtagagaagaagg

SEQ ID NO: 4179063 - DNA, 25 bp, Homo sapien
gccagggaaataagcccaacttcag

SEQ ID NO: 4179064 - DNA, 25 bp, Homo sapien
gagagaagctcagcaacctcgaatt

SEQ ID NO: 4179065 - DNA, 25 bp, Homo sapien
gaatgtccacgtaccatcatctagt

SEQ ID NO: 4179066 - DNA, 25 bp, Homo sapien
gcccgtgttaaagttctccattgga

SEQ ID NO: 4179067 - DNA, 25 bp, Homo sapien
ttctcagtcatgcaaatgcccgtgt

SEQ ID NO: 4179068 - DNA, 25 bp, Homo sapien
gacatacggaaaaaagacagcagca

SEQ ID NO: 4179069 - DNA, 25 bp, Homo sapien
tgacactttgcattgagagcacgat

SEQ ID NO: 4179070 - DNA, 25 bp, Homo sapien
tctacctttggcactccctaccttc

SEQ ID NO: 4179071 - DNA, 25 bp, Homo sapien
tgatgtactgagtacatcattttct

SEQ ID NO: 4179072 - DNA, 25 bp, Homo sapien
aaaatgatgtactgagtacatcatt

SEQ ID NO: 4179073 - DNA, 25 bp, Homo sapien
atgatgtactgagtacatcattttc

SEQ ID NO: 4179074 - DNA, 25 bp, Homo sapien
tatgctggctattcagagctaggcc

SEQ ID NO: 4179075 - DNA, 25 bp, Homo sapien
tacacaatatgctggctattcagag

SEQ ID NO: 4179076 - DNA, 25 bp, Homo sapien
gtcaaatgcactgtcacacttaaag

SEQ ID NO: 4179077 - DNA, 25 bp, Homo sapien
gagctaggcccacagcgacatgtta

SEQ ID NO: 4179078 - DNA, 25 bp, Homo sapien
tgtggcttctgaaacttacccctgt

SEQ ID NO: 4179079 - DNA, 25 bp, Homo sapien
caagagcagctgtatgtcctggatt

SEQ ID NO: 4179080 - DNA, 25 bp, Homo sapien
cagaatagatgtctcaggcgaaagc

SEQ ID NO: 4179081 - DNA, 25 bp, Homo sapien
cagacttgatagctcaagggaggcc

SEQ ID NO: 4179082 - DNA, 25 bp, Homo sapien
gagagtcaatgggagacctcactgt

SEQ ID NO: 4179083 - DNA, 25 bp, Homo sapien
tatctctactaatggaatgaaagca

SEQ ID NO: 4179084 - DNA, 25 bp, Homo sapien
cagggcctaggacgtgacatagtta

SEQ ID NO: 4179085 - DNA, 25 bp, Homo sapien
tttatggcagaagaaactgatgcag

SEQ ID NO: 4179086 - DNA, 25 bp, Homo sapien
gacagatgagagcagatttagaaat

SEQ ID NO: 4179087 - DNA, 25 bp, Homo sapien
tgggctgctggatagtcaaagacag

SEQ ID NO: 4179088 - DNA, 25 bp, Homo sapien
tgaatggtcccaatggcagtagaga

SEQ ID NO: 4179089 - DNA, 25 bp, Homo sapien
cagtggctcttagagtgtctgatac

SEQ ID NO: 4179090 - DNA, 25 bp, Homo sapien
gagaaaactctcttcagggccagga

SEQ ID NO: 4179091 - DNA, 25 bp, Homo sapien
tgtgtgtactcagaatcgcagacta

SEQ ID NO: 4179092 - DNA, 25 bp, Homo sapien
gtaagcctggatataagcactgtgc

SEQ ID NO: 4179093 - DNA, 25 bp, Homo sapien
cactcagagtgctatccttacaggt

SEQ ID NO: 4179094 - DNA, 25 bp, Homo sapien
cagcaaacgagaacacaggaaagtc

SEQ ID NO: 4179095 - DNA, 25 bp, Homo sapien
cattgctaacttccagctggccttg

SEQ ID NO: 4179096 - DNA, 25 bp, Homo sapien
ggtcagcatccttaacagcaaacga

SEQ ID NO: 4179097 - DNA, 25 bp, Homo sapien
tcaaggccaagatcccaggcaagtc

SEQ ID NO: 4179098 - DNA, 25 bp, Homo sapien
tctttaatgacctattccatctcca

SEQ ID NO: 4179099 - DNA, 25 bp, Homo sapien
ggtagacagagagtactgtgttggc

SEQ ID NO: 4179100 - DNA, 25 bp, Homo sapien
ccaagcctgcctatgtggctttgca

SEQ ID NO: 4179101 - DNA, 25 bp, Homo sapien
catctccaagcctgcctatgtggct

SEQ ID NO: 4179102 - DNA, 25 bp, Homo sapien
catcacttttattctacaacaccaa

SEQ ID NO: 4179103 - DNA, 25 bp, Homo sapien
tgggatggcttcatggcctctcctg

SEQ ID NO: 4179104 - DNA, 25 bp, Homo sapien
tgtgtgtagccctacaagcaacata

SEQ ID NO: 4179105 - DNA, 25 bp, Homo sapien
gcaacatattgctgtgccattaaac

SEQ ID NO: 4179106 - DNA, 25 bp, Homo sapien
tgccagatgccaatagagaactcca

SEQ ID NO: 4179107 - DNA, 25 bp, Homo sapien
gctttgcaacattggtcagtgactc

SEQ ID NO: 4179108 - DNA, 25 bp, Homo sapien
ggcagtgataccacaagctacgtaa

SEQ ID NO: 4179109 - DNA, 25 bp, Homo sapien
tacattggaatttgccctggcagtg

SEQ ID NO: 4179110 - DNA, 25 bp, Homo sapien
tacagatgtgtgcgaccctgcctag

SEQ ID NO: 4179111 - DNA, 25 bp, Homo sapien
ctacagatgtgtgcgaccctgccta

SEQ ID NO: 4179112 - DNA, 25 bp, Homo sapien
tttgatcaccccactagacttccag

SEQ ID NO: 4179113 - DNA, 25 bp, Homo sapien
tggctagaaacaggcattctacccc

SEQ ID NO: 4179114 - DNA, 25 bp, Homo sapien
tatgtagcttagatgccatgactca

SEQ ID NO: 4179115 - DNA, 25 bp, Homo sapien
cattgacgcctggaaactcaaagca

SEQ ID NO: 4179116 - DNA, 25 bp, Homo sapien
tttcagaatttacatgggctctgcc

SEQ ID NO: 4179117 - DNA, 25 bp, Homo sapien
atccttgtcctggcattcaaagccc

SEQ ID NO: 4179118 - DNA, 25 bp, Homo sapien
cagaaagcaaatactcctggtcact

SEQ ID NO: 4179119 - DNA, 25 bp, Homo sapien
gttcagaagaaacagcgcattctaa

SEQ ID NO: 4179120 - DNA, 25 bp, Homo sapien
ttcagaaagcaaatactcctggtca

SEQ ID NO: 4179121 - DNA, 25 bp, Homo sapien
gaagaaacagcgcattctaaatgct

SEQ ID NO: 4179122 - DNA, 25 bp, Homo sapien
tacataagggacatttcgtaaccac

SEQ ID NO: 4179123 - DNA, 25 bp, Homo sapien
ttttcaaagttctcacgttcaccag

SEQ ID NO: 4179124 - DNA, 25 bp, Homo sapien
gcatggaccgctacatacataaggg

SEQ ID NO: 4179125 - DNA, 25 bp, Homo sapien
agctccacagtgatagctgtgctgg

SEQ ID NO: 4179126 - DNA, 25 bp, Homo sapien
tccacgctgcttcgggagtgtgaga

SEQ ID NO: 4179127 - DNA, 25 bp, Homo sapien
ggaagaagcagtccatctccacgct

SEQ ID NO: 4179128 - DNA, 25 bp, Homo sapien
agctcactgctgtggcccgcactga

SEQ ID NO: 4179129 - DNA, 25 bp, Homo sapien
gctccgttcggtggtacggaccaga

SEQ ID NO: 4179130 - DNA, 25 bp, Homo sapien
cacataaaggagtcatggacctcaa

SEQ ID NO: 4179131 - DNA, 25 bp, Homo sapien
aaaatgggtctgtgagacaggtcac

SEQ ID NO: 4179132 - DNA, 25 bp, Homo sapien
gaagaggactttcccgaatgtagtg

SEQ ID NO: 4179133 - DNA, 25 bp, Homo sapien
ggagtttagtctccctggcatgaga

SEQ ID NO: 4179134 - DNA, 25 bp, Homo sapien
tccaggtggtttctaaggtgcatcc

SEQ ID NO: 4179135 - DNA, 25 bp, Homo sapien
ccttggcagctggattaattgttct

SEQ ID NO: 4179136 - DNA, 25 bp, Homo sapien
ccaatcccagtgagaagccctaaga

SEQ ID NO: 4179137 - DNA, 25 bp, Homo sapien
gctacaaaggcttgcctcttgggag

SEQ ID NO: 4179138 - DNA, 25 bp, Homo sapien
taacacaagtcgacattatcaaact

SEQ ID NO: 4179139 - DNA, 25 bp, Homo sapien
aagtcgacattatcaaacttgcccg

SEQ ID NO: 4179140 - DNA, 25 bp, Homo sapien
acttgcccggcattctcaggctgtt

SEQ ID NO: 4179141 - DNA, 25 bp, Homo sapien
gacattatcaaacttgcccggcatt

SEQ ID NO: 4179142 - DNA, 25 bp, Homo sapien
caatatgaatgactgtagggaataa

SEQ ID NO: 4179143 - DNA, 25 bp, Homo sapien
aaggtaattacctgatgcagagaga

SEQ ID NO: 4179144 - DNA, 25 bp, Homo sapien
gctactttagaacaaatagcaatat

SEQ ID NO: 4179145 - DNA, 25 bp, Homo sapien
gaagtggaaaggatcctagaggtaa

SEQ ID NO: 4179146 - DNA, 25 bp, Homo sapien
cccatctgattccctgagaactaaa

SEQ ID NO: 4179147 - DNA, 25 bp, Homo sapien
tctgttccgttttcaaagatttgcc

SEQ ID NO: 4179148 - DNA, 25 bp, Homo sapien
ccatctgattccctgagaactaaat

SEQ ID NO: 4179149 - DNA, 25 bp, Homo sapien
ctgagaactaaattctgttccgttt

SEQ ID NO: 4179150 - DNA, 25 bp, Homo sapien
gggaaggaaacttcagcgccgccgc

SEQ ID NO: 4179151 - DNA, 25 bp, Homo sapien
tcccgcatggcacggggcgccagcc

SEQ ID NO: 4179152 - DNA, 25 bp, Homo sapien
ccgctgtgctctccccgcaccgcgg

SEQ ID NO: 4179153 - DNA, 25 bp, Homo sapien
agcgcggcgggaaggaaacttcagc

SEQ ID NO: 4179154 - DNA, 25 bp, Homo sapien
acctcgggtgtaagccctgtcgccg

SEQ ID NO: 4179155 - DNA, 25 bp, Homo sapien
agcagcacttagcaaagagccaccc

SEQ ID NO: 4179156 - DNA, 25 bp, Homo sapien
tgtaagccctgtcgccgcccttcat

SEQ ID NO: 4179157 - DNA, 25 bp, Homo sapien
agagggacctcgggtgtaagccctg

SEQ ID NO: 4179158 - DNA, 25 bp, Homo sapien
gccagctccccagccctcccctgca

SEQ ID NO: 4179159 - DNA, 25 bp, Homo sapien
ccagctccccagccctcccctgcat

SEQ ID NO: 4179160 - DNA, 25 bp, Homo sapien
agccagctccccagccctcccctgc

SEQ ID NO: 4179161 - DNA, 25 bp, Homo sapien
gagccagctccccagccctcccctg

SEQ ID NO: 4179162 - DNA, 25 bp, Homo sapien
agctcccgctcctacgatagccact

SEQ ID NO: 4179163 - DNA, 25 bp, Homo sapien
tctgagggtcgctagccttttcagc

SEQ ID NO: 4179164 - DNA, 25 bp, Homo sapien
tttaaactggtctcattgcttggac

SEQ ID NO: 4179165 - DNA, 25 bp, Homo sapien
tcctctcctagccacggagccagca

SEQ ID NO: 4179166 - DNA, 25 bp, Homo sapien
accatcgtcctctgatgagcccgtt

SEQ ID NO: 4179167 - DNA, 25 bp, Homo sapien
ctgatgagcccgtttttcatcttca

SEQ ID NO: 4179168 - DNA, 25 bp, Homo sapien
ccccaccatcgtcctctgatgagcc

SEQ ID NO: 4179169 - DNA, 25 bp, Homo sapien
cgtcctctgatgagcccgtttttca

SEQ ID NO: 4179170 - DNA, 25 bp, Homo sapien
gagtcaagctactcaagccgcagga

SEQ ID NO: 4179171 - DNA, 25 bp, Homo sapien
tttaaatcctgcatgactggaagtc

SEQ ID NO: 4179172 - DNA, 25 bp, Homo sapien
gaaatcccaatgtagctcacttagc

SEQ ID NO: 4179173 - DNA, 25 bp, Homo sapien
gaagtcagatggtcaagtccccttg

SEQ ID NO: 4179174 - DNA, 25 bp, Homo sapien
tgcctttcaacaccagtttcaagat

SEQ ID NO: 4179175 - DNA, 25 bp, Homo sapien
caaacctgctttctgtactcatact

SEQ ID NO: 4179176 - DNA, 25 bp, Homo sapien
gcagttataaatgcatttgccttct

SEQ ID NO: 4179177 - DNA, 25 bp, Homo sapien
tactcatactcaatagaaccaaaaa

SEQ ID NO: 4179178 - DNA, 25 bp, Homo sapien
gcccatgacatcagagacaagcagg

SEQ ID NO: 4179179 - DNA, 25 bp, Homo sapien
ccaaagcccatgacatcagagacaa

SEQ ID NO: 4179180 - DNA, 25 bp, Homo sapien
aaagcccatgacatcagagacaagc

SEQ ID NO: 4179181 - DNA, 25 bp, Homo sapien
agcccatgacatcagagacaagcag

SEQ ID NO: 4179182 - DNA, 25 bp, Homo sapien
tcaagtcataaggtttctggctgag

SEQ ID NO: 4179183 - DNA, 25 bp, Homo sapien
ttacgtcaagtcataaggtttctgg

SEQ ID NO: 4179184 - DNA, 25 bp, Homo sapien
aagtcataaggtttctggctgagaa

SEQ ID NO: 4179185 - DNA, 25 bp, Homo sapien
cgtcaagtcataaggtttctggctg

SEQ ID NO: 4179186 - DNA, 25 bp, Homo sapien
gagctggctccagtataccatggaa

SEQ ID NO: 4179187 - DNA, 25 bp, Homo sapien
tgtactaggacatccatgattgcca

SEQ ID NO: 4179188 - DNA, 25 bp, Homo sapien
gactatttaacaatccctgtctgag

SEQ ID NO: 4179189 - DNA, 25 bp, Homo sapien
agaagccccaattcatggtgtctgg

SEQ ID NO: 4179190 - DNA, 25 bp, Homo sapien
gatttcagatggacttgggcctcca

SEQ ID NO: 4179191 - DNA, 25 bp, Homo sapien
cttgatttcatcaagaccagctgga

SEQ ID NO: 4179192 - DNA, 25 bp, Homo sapien
ccaggccattggagtagcccttgat

SEQ ID NO: 4179193 - DNA, 25 bp, Homo sapien
ggttctggaaatcaagctgtgattt

SEQ ID NO: 4179194 - DNA, 25 bp, Homo sapien
ccatagtagttagcaaaacctttcg

SEQ ID NO: 4179195 - DNA, 25 bp, Homo sapien
gttctcccatagtagttagcaaaac

SEQ ID NO: 4179196 - DNA, 25 bp, Homo sapien
catagtagttagcaaaacctttcgg

SEQ ID NO: 4179197 - DNA, 25 bp, Homo sapien
ctcccatagtagttagcaaaacctt

SEQ ID NO: 4179198 - DNA, 25 bp, Homo sapien
tgggttttcttctaggtcttcacta

SEQ ID NO: 4179199 - DNA, 25 bp, Homo sapien
tgccaagtgggttttcttctaggtc

SEQ ID NO: 4179200 - DNA, 25 bp, Homo sapien
ctgtgccaagtgggttttcttctag

SEQ ID NO: 4179201 - DNA, 25 bp, Homo sapien
tttcttctaggtcttcactacctgg

SEQ ID NO: 4179202 - DNA, 25 bp, Homo sapien
gaattggaaactttgactccaatgg

SEQ ID NO: 4179203 - DNA, 25 bp, Homo sapien
ctggtgttaatcgtaatactgaatt

SEQ ID NO: 4179204 - DNA, 25 bp, Homo sapien
aatactgaattggaaactttgactc

SEQ ID NO: 4179205 - DNA, 25 bp, Homo sapien
ggtgttaatcgtaatactgaattgg

SEQ ID NO: 4179206 - DNA, 25 bp, Homo sapien
tacattggcttgagtagtacaactc

SEQ ID NO: 4179207 - DNA, 25 bp, Homo sapien
ttttatctagatggtcaataggtct

SEQ ID NO: 4179208 - DNA, 25 bp, Homo sapien
tatattacttatgaggctggctcac

SEQ ID NO: 4179209 - DNA, 25 bp, Homo sapien
gtattcaagcacaccccaaaggcat

SEQ ID NO: 4179210 - DNA, 25 bp, Homo sapien
gaaagaaacctgtatagacatcggt

SEQ ID NO: 4179211 - DNA, 25 bp, Homo sapien
tgtacacaagtcatcaaagagtgca

SEQ ID NO: 4179212 - DNA, 25 bp, Homo sapien
tactttattgttgcatccacaggac

SEQ ID NO: 4179213 - DNA, 25 bp, Homo sapien
gcaaacataggctctggcgaatact

SEQ ID NO: 4179214 - DNA, 25 bp, Homo sapien
aacaaatcaaaggtgagttgtctct

SEQ ID NO: 4179215 - DNA, 25 bp, Homo sapien
gagttgtctctgtgtatgctgatgc

SEQ ID NO: 4179216 - DNA, 25 bp, Homo sapien
tctgaacaaatcaaaggtgagttgt

SEQ ID NO: 4179217 - DNA, 25 bp, Homo sapien
tgtctctgtgtatgctgatgcttct

SEQ ID NO: 4179218 - DNA, 25 bp, Homo sapien
cagatgtcttcctagttctcagtgc

SEQ ID NO: 4179219 - DNA, 25 bp, Homo sapien
agaaagccctttaagtccacttcag

SEQ ID NO: 4179220 - DNA, 25 bp, Homo sapien
cagtgcttgtttctaccagtattga

SEQ ID NO: 4179221 - DNA, 25 bp, Homo sapien
ctgggcattcgaaagttgcacagga

SEQ ID NO: 4179222 - DNA, 25 bp, Homo sapien
ctgttaagccgacgcacaggactcg

SEQ ID NO: 4179223 - DNA, 25 bp, Homo sapien
gttggccacggactcggacttgcct

SEQ ID NO: 4179224 - DNA, 25 bp, Homo sapien
ggacttgcctccattctcgcttgag

SEQ ID NO: 4179225 - DNA, 25 bp, Homo sapien
gtcaaagctcttccgaccatcgcga

SEQ ID NO: 4179226 - DNA, 25 bp, Homo sapien
ttcatcctgtgtagggtcgttgtca

SEQ ID NO: 4179227 - DNA, 25 bp, Homo sapien
tgtgtgtgactcttcatccggctca

SEQ ID NO: 4179228 - DNA, 25 bp, Homo sapien
gtagggtcgttgtcaaaaatcttca

SEQ ID NO: 4179229 - DNA, 25 bp, Homo sapien
tgtgactcttcatccggctcatctt

SEQ ID NO: 4179230 - DNA, 25 bp, Homo sapien
gatcaaacacattatggaacagcaa

SEQ ID NO: 4179231 - DNA, 25 bp, Homo sapien
tgcacaatattacaacggtgaactt

SEQ ID NO: 4179232 - DNA, 25 bp, Homo sapien
tattagccatagtagcaaacaatgg

SEQ ID NO: 4179233 - DNA, 25 bp, Homo sapien
ggatgtccccaacaggctgatcaaa

SEQ ID NO: 4179234 - DNA, 25 bp, Homo sapien
ctggtaaggcccctgaactggaaca

SEQ ID NO: 4179235 - DNA, 25 bp, Homo sapien
ctccacaaagcatagctggctctgg

SEQ ID NO: 4179236 - DNA, 25 bp, Homo sapien
gctggctctggtaaggcccctgaac

SEQ ID NO: 4179237 - DNA, 25 bp, Homo sapien
aagcatagctggctctggtaaggcc

SEQ ID NO: 4179238 - DNA, 25 bp, Homo sapien
tgcattgacaaggtctgcagcagta

SEQ ID NO: 4179239 - DNA, 25 bp, Homo sapien
aagcctgccgggctgctagcaaaga

SEQ ID NO: 4179240 - DNA, 25 bp, Homo sapien
ctgcagcagtaggtacttcagtgga

SEQ ID NO: 4179241 - DNA, 25 bp, Homo sapien
cagcttgtttttgaccaacttttct

SEQ ID NO: 4179242 - DNA, 25 bp, Homo sapien
agtgtgaaggtgagacacacacaga

SEQ ID NO: 4179243 - DNA, 25 bp, Homo sapien
gcaatcacataggaagaatgaggac

SEQ ID NO: 4179244 - DNA, 25 bp, Homo sapien
ggagaaaacggcagacagatgcaag

SEQ ID NO: 4179245 - DNA, 25 bp, Homo sapien
aaacggcagacagatgcaagcctgg

SEQ ID NO: 4179246 - DNA, 25 bp, Homo sapien
catcgcggtgtactagcttctgggc

SEQ ID NO: 4179247 - DNA, 25 bp, Homo sapien
cattgtagggctaggcactgactct

SEQ ID NO: 4179248 - DNA, 25 bp, Homo sapien
tttgcacgctggaaggctacccaag

SEQ ID NO: 4179249 - DNA, 25 bp, Homo sapien
tgttctgggtctcagcatcgcggtg

SEQ ID NO: 4179250 - DNA, 25 bp, Homo sapien
gctttccatagagagcatccatcat

SEQ ID NO: 4179251 - DNA, 25 bp, Homo sapien
cccaatagaagtctggcagaagcac

SEQ ID NO: 4179252 - DNA, 25 bp, Homo sapien
aaagctaaatgggtgatatggatga

SEQ ID NO: 4179253 - DNA, 25 bp, Homo sapien
ccaagtgattaataagactgcccaa

SEQ ID NO: 4179254 - DNA, 25 bp, Homo sapien
caccttctcaggcaaccaggatgta

SEQ ID NO: 4179255 - DNA, 25 bp, Homo sapien
ttctcaggcaaccaggatgtacttg

SEQ ID NO: 4179256 - DNA, 25 bp, Homo sapien
cactagcagaccagagactttatcc

SEQ ID NO: 4179257 - DNA, 25 bp, Homo sapien
aaccacagtgaagcactagcagacc

SEQ ID NO: 4179258 - DNA, 25 bp, Homo sapien
ccccggtatgagcttccttctagac

SEQ ID NO: 4179259 - DNA, 25 bp, Homo sapien
ctcccccggtatgagcttccttcta

SEQ ID NO: 4179260 - DNA, 25 bp, Homo sapien
caagctcccccggtatgagcttcct

SEQ ID NO: 4179261 - DNA, 25 bp, Homo sapien
aagctcccccggtatgagcttcctt

SEQ ID NO: 4179262 - DNA, 25 bp, Homo sapien
atgcccagatccttgacatagtctt

SEQ ID NO: 4179263 - DNA, 25 bp, Homo sapien
aatgcccagatccttgacatagtct

SEQ ID NO: 4179264 - DNA, 25 bp, Homo sapien
cttatgccagtcataaatctgatga

SEQ ID NO: 4179265 - DNA, 25 bp, Homo sapien
ctcagggacacccttttcttctatt

SEQ ID NO: 4179266 - DNA, 25 bp, Homo sapien
taaatctgatgaatatttccaaaca

SEQ ID NO: 4179267 - DNA, 25 bp, Homo sapien
ttttgtcctttcctcgcatatcctc

SEQ ID NO: 4179268 - DNA, 25 bp, Homo sapien
ttaataaagagctgtgccaatctgt

SEQ ID NO: 4179269 - DNA, 25 bp, Homo sapien
gtgcttaataaagagctgtgccaat

SEQ ID NO: 4179270 - DNA, 25 bp, Homo sapien
gcttaataaagagctgtgccaatct

SEQ ID NO: 4179271 - DNA, 25 bp, Homo sapien
aataaagagctgtgccaatctgtct

SEQ ID NO: 4179272 - DNA, 25 bp, Homo sapien
ctcaaagtaggcgtcatactcagca

SEQ ID NO: 4179273 - DNA, 25 bp, Homo sapien
gacaataccacacgtagatgtgcag

SEQ ID NO: 4179274 - DNA, 25 bp, Homo sapien
ctctgagcgcggcttattctgacaa

SEQ ID NO: 4179275 - DNA, 25 bp, Homo sapien
cagcaacgatgtactctgagcgcgg

SEQ ID NO: 4179276 - DNA, 25 bp, Homo sapien
tgaggagcaactggtattttgttat

SEQ ID NO: 4179277 - DNA, 25 bp, Homo sapien
tgggcttgatgaggaagtcactcag

SEQ ID NO: 4179278 - DNA, 25 bp, Homo sapien
ttttgttattctctgaatgggcttg

SEQ ID NO: 4179279 - DNA, 25 bp, Homo sapien
gatgaggaagtcactcagtgtcagc

SEQ ID NO: 4179280 - DNA, 25 bp, Homo sapien
atatctgaacactccaaaccagcct

SEQ ID NO: 4179281 - DNA, 25 bp, Homo sapien
ctcaatatctgaacactccaaacca

SEQ ID NO: 4179282 - DNA, 25 bp, Homo sapien
ccttctcactgtatctcaggaagtc

SEQ ID NO: 4179283 - DNA, 25 bp, Homo sapien
cagccttctcactgtatctcaggaa

SEQ ID NO: 4179284 - DNA, 25 bp, Homo sapien
tcatgtcattgcagcgtttgggaac

SEQ ID NO: 4179285 - DNA, 25 bp, Homo sapien
ccctgcagacgtcctagattcatca

SEQ ID NO: 4179286 - DNA, 25 bp, Homo sapien
gggaacaaggcacattaactccact

SEQ ID NO: 4179287 - DNA, 25 bp, Homo sapien
cagacgtcctagattcatcatgtca

SEQ ID NO: 4179288 - DNA, 25 bp, Homo sapien
tggccactttcctgttcacacaagg

SEQ ID NO: 4179289 - DNA, 25 bp, Homo sapien
ggccactttcctgttcacacaaggg

SEQ ID NO: 4179290 - DNA, 25 bp, Homo sapien
cttggccactttcctgttcacacaa

SEQ ID NO: 4179291 - DNA, 25 bp, Homo sapien
ccactttcctgttcacacaagggcc

SEQ ID NO: 4179292 - DNA, 25 bp, Homo sapien
aggaacacgcgcctctctttggtcc

SEQ ID NO: 4179293 - DNA, 25 bp, Homo sapien
tttggtccgggactgcatgcctgca

SEQ ID NO: 4179294 - DNA, 25 bp, Homo sapien
gagcagttcactgaagatgacaatc

SEQ ID NO: 4179295 - DNA, 25 bp, Homo sapien
gacaatctgctcgaagaggaacacg

SEQ ID NO: 4179296 - DNA, 25 bp, Homo sapien
agtctctctgttcatgagtgcaaac

SEQ ID NO: 4179297 - DNA, 25 bp, Homo sapien
cagcgttggcggcttgcagaacaac

SEQ ID NO: 4179298 - DNA, 25 bp, Homo sapien
cagaacaaccctctcagaagtctct

SEQ ID NO: 4179299 - DNA, 25 bp, Homo sapien
tttctaagacttgattgatgtcctg

SEQ ID NO: 4179300 - DNA, 25 bp, Homo sapien
cagcccactgtatctgtgagctcca

SEQ ID NO: 4179301 - DNA, 25 bp, Homo sapien
acctagttcagtaatacagtcagcc

SEQ ID NO: 4179302 - DNA, 25 bp, Homo sapien
tctctgtaagtagaagcctggccct

SEQ ID NO: 4179303 - DNA, 25 bp, Homo sapien
tcaaagtaataacaggcccaccaga

SEQ ID NO: 4179304 - DNA, 25 bp, Homo sapien
taagagcaggtggttactctaagct

SEQ ID NO: 4179305 - DNA, 25 bp, Homo sapien
tccaaggctttgtgttaggcatcgt

SEQ ID NO: 4179306 - DNA, 25 bp, Homo sapien
tttgggaatcccacaaggatttgga

SEQ ID NO: 4179307 - DNA, 25 bp, Homo sapien
tggataagtgagaaaaacactaccc

SEQ ID NO: 4179308 - DNA, 25 bp, Homo sapien
gcaggttgagacctcatcacagctg

SEQ ID NO: 4179309 - DNA, 25 bp, Homo sapien
ttgatactcaatgggcgattgcagt

SEQ ID NO: 4179310 - DNA, 25 bp, Homo sapien
cctttctttccgttgatactcaatg

SEQ ID NO: 4179311 - DNA, 25 bp, Homo sapien
tctttccgttgatactcaatgggcg

SEQ ID NO: 4179312 - DNA, 25 bp, Homo sapien
tggcttcgaacttgtccccaggctg

SEQ ID NO: 4179313 - DNA, 25 bp, Homo sapien
aggctggtggtattcaaaccctgga

SEQ ID NO: 4179314 - DNA, 25 bp, Homo sapien
tgccattggaggtagatatcttcag

SEQ ID NO: 4179315 - DNA, 25 bp, Homo sapien
gctggcttcgaacttgtccccaggc

SEQ ID NO: 4179316 - DNA, 25 bp, Homo sapien
aacctggcactggcataggggtatg

SEQ ID NO: 4179317 - DNA, 25 bp, Homo sapien
ctggcactggcataggggtatgtaa

SEQ ID NO: 4179318 - DNA, 25 bp, Homo sapien
cactggcataggggtatgtaagcac

SEQ ID NO: 4179319 - DNA, 25 bp, Homo sapien
gcactggcataggggtatgtaagca

SEQ ID NO: 4179320 - DNA, 25 bp, Homo sapien
agttcacatgggcttgctctgcacc

SEQ ID NO: 4179321 - DNA, 25 bp, Homo sapien
aaggccaaatctcccactagcaggg

SEQ ID NO: 4179322 - DNA, 25 bp, Homo sapien
tgcaccctacccagtggttcaaggc

SEQ ID NO: 4179323 - DNA, 25 bp, Homo sapien
gggcacaaacacaaggacgctagtt

SEQ ID NO: 4179324 - DNA, 25 bp, Homo sapien
gatgctcccgtcactactttctgct

SEQ ID NO: 4179325 - DNA, 25 bp, Homo sapien
tcgctggcaggctggtacaccagac

SEQ ID NO: 4179326 - DNA, 25 bp, Homo sapien
ttctgctggttgacggcgaggacct

SEQ ID NO: 4179327 - DNA, 25 bp, Homo sapien
tagtaatctttgatcacggccatgg

SEQ ID NO: 4179328 - DNA, 25 bp, Homo sapien
tgagcactgtgacgccatcatattg

SEQ ID NO: 4179329 - DNA, 25 bp, Homo sapien
tgttcggaagggtcttgcaaccaaa

SEQ ID NO: 4179330 - DNA, 25 bp, Homo sapien
cctgtggtgggtcaaatgtggcaac

SEQ ID NO: 4179331 - DNA, 25 bp, Homo sapien
cattacaggtacaacgatgagcact

SEQ ID NO: 4179332 - DNA, 25 bp, Homo sapien
agtagctgctatcccctgacctaga

SEQ ID NO: 4179333 - DNA, 25 bp, Homo sapien
tgcaagtcccctgattagtaaaaac

SEQ ID NO: 4179334 - DNA, 25 bp, Homo sapien
tatcccaaggcttacctaaaaggca

SEQ ID NO: 4179335 - DNA, 25 bp, Homo sapien
cactgctcagatagctcatggaagc

SEQ ID NO: 4179336 - DNA, 25 bp, Homo sapien
gggtcttgggagcaacttcttcaca

SEQ ID NO: 4179337 - DNA, 25 bp, Homo sapien
tcttcccacaaagggtcttgggagc

SEQ ID NO: 4179338 - DNA, 25 bp, Homo sapien
ttcacagacctatgaagacaagctc

SEQ ID NO: 4179339 - DNA, 25 bp, Homo sapien
gacaagaactaatgtgtgctcccag

SEQ ID NO: 4179340 - DNA, 25 bp, Homo sapien
tgtcagcctgtagaggtcctagagc

SEQ ID NO: 4179341 - DNA, 25 bp, Homo sapien
ggtctatattctccatatcactcag

SEQ ID NO: 4179342 - DNA, 25 bp, Homo sapien
aagagtttctcggtctatattctcc

SEQ ID NO: 4179343 - DNA, 25 bp, Homo sapien
ttgtgaatatatggctttgtcagcc

SEQ ID NO: 4179344 - DNA, 25 bp, Homo sapien
gtgttctccacttccgcccgctttc

SEQ ID NO: 4179345 - DNA, 25 bp, Homo sapien
ttccgcccgctttctcatgcgtaga

SEQ ID NO: 4179346 - DNA, 25 bp, Homo sapien
gcttcatttttacccgtgttctcca

SEQ ID NO: 4179347 - DNA, 25 bp, Homo sapien
ctcatgcgtagagtatgccatgaac

SEQ ID NO: 4179348 - DNA, 25 bp, Homo sapien
aattggcttgtgagaatgctgcagg

SEQ ID NO: 4179349 - DNA, 25 bp, Homo sapien
aataacccatccacccaaattggct

SEQ ID NO: 4179350 - DNA, 25 bp, Homo sapien
catccacccaaattggcttgtgaga

SEQ ID NO: 4179351 - DNA, 25 bp, Homo sapien
tgggagtggatgacaggtggggacg

SEQ ID NO: 4179352 - DNA, 25 bp, Homo sapien
catgcaaaatcctgctaaactactt

SEQ ID NO: 4179353 - DNA, 25 bp, Homo sapien
aattgaagttgccaggagaaataaa

SEQ ID NO: 4179354 - DNA, 25 bp, Homo sapien
gcatgcaaaatcctgctaaactact

SEQ ID NO: 4179355 - DNA, 25 bp, Homo sapien
aaaataaattgatcttgcatgcaaa

SEQ ID NO: 4179356 - DNA, 25 bp, Homo sapien
acatctgcacagtataaagagaaag

SEQ ID NO: 4179357 - DNA, 25 bp, Homo sapien
ctccatgctagtattagggtcaaga

SEQ ID NO: 4179358 - DNA, 25 bp, Homo sapien
ctgattcctcggaactgttcgtctc

SEQ ID NO: 4179359 - DNA, 25 bp, Homo sapien
tctgattcctcggaactgttcgtct

SEQ ID NO: 4179360 - DNA, 25 bp, Homo sapien
catgctagtattagggtcaagatca

SEQ ID NO: 4179361 - DNA, 25 bp, Homo sapien
ttttatagctgggatgggataccca

SEQ ID NO: 4179362 - DNA, 25 bp, Homo sapien
caatcattgtaggaaataggacaac

SEQ ID NO: 4179363 - DNA, 25 bp, Homo sapien
tggctggtcattttagcaaggtcac

SEQ ID NO: 4179364 - DNA, 25 bp, Homo sapien
ataggacaacaatagctgcttctac

SEQ ID NO: 4179365 - DNA, 25 bp, Homo sapien
gatacaggcgttggttccactccca

SEQ ID NO: 4179366 - DNA, 25 bp, Homo sapien
gtttctataacccaacagactggga

SEQ ID NO: 4179367 - DNA, 25 bp, Homo sapien
tggcaagccacgtaagagccacgtt

SEQ ID NO: 4179368 - DNA, 25 bp, Homo sapien
catggttgttactcagtggcaagcc

SEQ ID NO: 4179369 - DNA, 25 bp, Homo sapien
atctataatacatgctggcaatact

SEQ ID NO: 4179370 - DNA, 25 bp, Homo sapien
aatacatgctggcaatacttaggtc

SEQ ID NO: 4179371 - DNA, 25 bp, Homo sapien
tataatacatgctggcaatacttag

SEQ ID NO: 4179372 - DNA, 25 bp, Homo sapien
catgctggcaatacttaggtctggg

SEQ ID NO: 4179373 - DNA, 25 bp, Homo sapien
gctagttcaggactttcaaccccat

SEQ ID NO: 4179374 - DNA, 25 bp, Homo sapien
tccttgaaggcccaagtcagggagg

SEQ ID NO: 4179375 - DNA, 25 bp, Homo sapien
cttgagcttggtgtaaaaactgggc

SEQ ID NO: 4179376 - DNA, 25 bp, Homo sapien
aaaactgggctgagaatccttatcc

SEQ ID NO: 4179377 - DNA, 25 bp, Homo sapien
cagaaaaggacaagttcctgtggct

SEQ ID NO: 4179378 - DNA, 25 bp, Homo sapien
tagagagttgtttactgggtccact

SEQ ID NO: 4179379 - DNA, 25 bp, Homo sapien
taatgccattgaaccacacactcaa

SEQ ID NO: 4179380 - DNA, 25 bp, Homo sapien
tcagaaactagagcaccttccagtt

SEQ ID NO: 4179381 - DNA, 25 bp, Homo sapien
gtctggccgggttattttgaagctc

SEQ ID NO: 4179382 - DNA, 25 bp, Homo sapien
cagagtagctgatgtggtagttggc

SEQ ID NO: 4179383 - DNA, 25 bp, Homo sapien
tccttcaatccgtctggccgggtta

SEQ ID NO: 4179384 - DNA, 25 bp, Homo sapien
aagtttccttcaatccgtctggccg

SEQ ID NO: 4179385 - DNA, 25 bp, Homo sapien
agctgtatgaccttgacctccctga

SEQ ID NO: 4179386 - DNA, 25 bp, Homo sapien
tgtgaatctgctgtggacgatcttc

SEQ ID NO: 4179387 - DNA, 25 bp, Homo sapien
aaacgacaggaatgtgatgcttcac

SEQ ID NO: 4179388 - DNA, 25 bp, Homo sapien
cttggtggcggaatataaatcggtc

SEQ ID NO: 4179389 - DNA, 25 bp, Homo sapien
gtaaatgcaacataatcccaagcag

SEQ ID NO: 4179390 - DNA, 25 bp, Homo sapien
gcagctgcaagttcctaggctcatg

SEQ ID NO: 4179391 - DNA, 25 bp, Homo sapien
gaggacttggtctgtatgatactga

SEQ ID NO: 4179392 - DNA, 25 bp, Homo sapien
tcccaagcagcgatagacttgtctc

SEQ ID NO: 4179393 - DNA, 25 bp, Homo sapien
ctccttcatgtgctcctccaaaacc

SEQ ID NO: 4179394 - DNA, 25 bp, Homo sapien
aaactccttcatgtgctcctccaaa

SEQ ID NO: 4179395 - DNA, 25 bp, Homo sapien
aactccttcatgtgctcctccaaaa

SEQ ID NO: 4179396 - DNA, 25 bp, Homo sapien
actccttcatgtgctcctccaaaac

SEQ ID NO: 4179397 - DNA, 25 bp, Homo sapien
tcccttatagaggaatccatataaa

SEQ ID NO: 4179398 - DNA, 25 bp, Homo sapien
tcttcccttatagaggaatccatat

SEQ ID NO: 4179399 - DNA, 25 bp, Homo sapien
tgtgttcttcccttatagaggaatc

SEQ ID NO: 4179400 - DNA, 25 bp, Homo sapien
tctgtgtgttcttcccttatagagg

SEQ ID NO: 4179401 - DNA, 25 bp, Homo sapien
atgtatgcatatctttgtgaacatg

SEQ ID NO: 4179402 - DNA, 25 bp, Homo sapien
agccttacaaaatagcccaactggg

SEQ ID NO: 4179403 - DNA, 25 bp, Homo sapien
gtatgcatatctttgtgaacatgca

SEQ ID NO: 4179404 - DNA, 25 bp, Homo sapien
aactggggcctctgcacttatttcc

SEQ ID NO: 4179405 - DNA, 25 bp, Homo sapien
cttcttggatgaaatttggatttaa

SEQ ID NO: 4179406 - DNA, 25 bp, Homo sapien
ccaagcaagcaggtcacatccacca

SEQ ID NO: 4179407 - DNA, 25 bp, Homo sapien
tcactgtgtccccaagcaagcaggt

SEQ ID NO: 4179408 - DNA, 25 bp, Homo sapien
agactttgcactgcagtatcactgt

SEQ ID NO: 4179409 - DNA, 25 bp, Homo sapien
ctttgcactgcagtatcactgtgtc

SEQ ID NO: 4179410 - DNA, 25 bp, Homo sapien
ctggacccttccaagtgatggtggg

SEQ ID NO: 4179411 - DNA, 25 bp, Homo sapien
ctggtctggacccttccaagtgatg

SEQ ID NO: 4179412 - DNA, 25 bp, Homo sapien
tctggacccttccaagtgatggtgg

SEQ ID NO: 4179413 - DNA, 25 bp, Homo sapien
ggtctggacccttccaagtgatggt

SEQ ID NO: 4179414 - DNA, 25 bp, Homo sapien
ggagaccgtgtatgtggctgagctg

SEQ ID NO: 4179415 - DNA, 25 bp, Homo sapien
caagaggagaccgtgtatgtggctg

SEQ ID NO: 4179416 - DNA, 25 bp, Homo sapien
agaccgtgtatgtggctgagctgtt

SEQ ID NO: 4179417 - DNA, 25 bp, Homo sapien
gaggagaccgtgtatgtggctgagc

SEQ ID NO: 4179418 - DNA, 25 bp, Homo sapien
gcactttgactgttgcagacgttga

SEQ ID NO: 4179419 - DNA, 25 bp, Homo sapien
ggtataaatcccactgtcttggggc

SEQ ID NO: 4179420 - DNA, 25 bp, Homo sapien
tgtggtcccgtggtcatttgttgct

SEQ ID NO: 4179421 - DNA, 25 bp, Homo sapien
ggtcatttgttgctatgcaggtata

SEQ ID NO: 4179422 - DNA, 25 bp, Homo sapien
gcagccagcggagaatcacggaggt

SEQ ID NO: 4179423 - DNA, 25 bp, Homo sapien
aatagtgcagtttcctgtgctggag

SEQ ID NO: 4179424 - DNA, 25 bp, Homo sapien
cagcggagaatcacggaggtgcagc

SEQ ID NO: 4179425 - DNA, 25 bp, Homo sapien
acagtgtaaccagaaatagtgcagt

SEQ ID NO: 4179426 - DNA, 25 bp, Homo sapien
cttcgatgacgaggtaagtgtccaa

SEQ ID NO: 4179427 - DNA, 25 bp, Homo sapien
gacgaggtaagtgtccaaggtcgaa

SEQ ID NO: 4179428 - DNA, 25 bp, Homo sapien
aaggtcgaagccactgactgctgcc

SEQ ID NO: 4179429 - DNA, 25 bp, Homo sapien
taagtgtccaaggtcgaagccactg

SEQ ID NO: 4179430 - DNA, 25 bp, Homo sapien
cacaaactccgagggctcgctggga

SEQ ID NO: 4179431 - DNA, 25 bp, Homo sapien
tccccaggggttactggcactgact

SEQ ID NO: 4179432 - DNA, 25 bp, Homo sapien
gaactgataaggacacccgggacta

SEQ ID NO: 4179433 - DNA, 25 bp, Homo sapien
tattctggaagtcgcacaaactccg

SEQ ID NO: 4179434 - DNA, 25 bp, Homo sapien
cagctcagtgtaagctgagtcaaaa

SEQ ID NO: 4179435 - DNA, 25 bp, Homo sapien
gctcagtgtaagctgagtcaaaatt

SEQ ID NO: 4179436 - DNA, 25 bp, Homo sapien
ttcagctcagtgtaagctgagtcaa

SEQ ID NO: 4179437 - DNA, 25 bp, Homo sapien
cagtgtaagctgagtcaaaattttc

SEQ ID NO: 4179438 - DNA, 25 bp, Homo sapien
gactcataggtgtcatggagagtga

SEQ ID NO: 4179439 - DNA, 25 bp, Homo sapien
taggtgctgaagcagggcagcctcg

SEQ ID NO: 4179440 - DNA, 25 bp, Homo sapien
acatctttgcgggtagctttgtgaa

SEQ ID NO: 4179441 - DNA, 25 bp, Homo sapien
tttttgctaacaaatttcacagcca

SEQ ID NO: 4179442 - DNA, 25 bp, Homo sapien
caagggcctcagtagcaccaatctg

SEQ ID NO: 4179443 - DNA, 25 bp, Homo sapien
gaaaatgcaggcacttctctactga

SEQ ID NO: 4179444 - DNA, 25 bp, Homo sapien
tagactaacaagcacgcaagagccg

SEQ ID NO: 4179445 - DNA, 25 bp, Homo sapien
ggttcttgtggagccatactcggca

SEQ ID NO: 4179446 - DNA, 25 bp, Homo sapien
ttcccttgaaacagcagttggcaag

SEQ ID NO: 4179447 - DNA, 25 bp, Homo sapien
cttcccttgaaacagcagttggcaa

SEQ ID NO: 4179448 - DNA, 25 bp, Homo sapien
tcccttgaaacagcagttggcaagt

SEQ ID NO: 4179449 - DNA, 25 bp, Homo sapien
gcctccatgatgtctcggatataga

SEQ ID NO: 4179450 - DNA, 25 bp, Homo sapien
catcagttcatcatgattcataagg

SEQ ID NO: 4179451 - DNA, 25 bp, Homo sapien
ttgtgaaggtactgcagagcctcca

SEQ ID NO: 4179452 - DNA, 25 bp, Homo sapien
ttcataaggtagtctaagagccggc

SEQ ID NO: 4179453 - DNA, 25 bp, Homo sapien
tgacatatgtcagaaccccgatgct

SEQ ID NO: 4179454 - DNA, 25 bp, Homo sapien
tcactcgaggcactggaatccgtag

SEQ ID NO: 4179455 - DNA, 25 bp, Homo sapien
tcttgacattgggaataggccgcac

SEQ ID NO: 4179456 - DNA, 25 bp, Homo sapien
gcagcattgctcacaccacagaagt

SEQ ID NO: 4179457 - DNA, 25 bp, Homo sapien
gaaagcagcattggcctcaaagtac

SEQ ID NO: 4179458 - DNA, 25 bp, Homo sapien
tatcagcggctgcatggtgacaggt

SEQ ID NO: 4179459 - DNA, 25 bp, Homo sapien
gaaaactctgaaacctgaatgggat

SEQ ID NO: 4179460 - DNA, 25 bp, Homo sapien
ccactgacgaggtttaagaggtaca

SEQ ID NO: 4179461 - DNA, 25 bp, Homo sapien
gtataatcgcaattttcaacacaca

SEQ ID NO: 4179462 - DNA, 25 bp, Homo sapien
aactaagggtggatcatgtacaaac

SEQ ID NO: 4179463 - DNA, 25 bp, Homo sapien
tcttcttgcacttctgtactacgtg

SEQ ID NO: 4179464 - DNA, 25 bp, Homo sapien
cccattataggagagaagcaacacc

SEQ ID NO: 4179465 - DNA, 25 bp, Homo sapien
gaaactcatatgatggccatccctg

SEQ ID NO: 4179466 - DNA, 25 bp, Homo sapien
tgtagcagtaacaagacagcaggtc

SEQ ID NO: 4179467 - DNA, 25 bp, Homo sapien
cattagaaacattgacccacctggg

SEQ ID NO: 4179468 - DNA, 25 bp, Homo sapien
tatatgtatatgtgcgatggtccct

SEQ ID NO: 4179469 - DNA, 25 bp, Homo sapien
atccaggaggataatattgctagac

SEQ ID NO: 4179470 - DNA, 25 bp, Homo sapien
ggcaatactttattctagcttaagg

SEQ ID NO: 4179471 - DNA, 25 bp, Homo sapien
aattgattggtatcagggttatcca

SEQ ID NO: 4179472 - DNA, 25 bp, Homo sapien
ctttggcgtacctcaaatgcttagg

SEQ ID NO: 4179473 - DNA, 25 bp, Homo sapien
ttaacttcatagcatctagtacgtg

SEQ ID NO: 4179474 - DNA, 25 bp, Homo sapien
tttgcacataggaatatatagcact

SEQ ID NO: 4179475 - DNA, 25 bp, Homo sapien
tagcacttagatcattacagtattc

SEQ ID NO: 4179476 - DNA, 25 bp, Homo sapien
tacgtgacagttccatagcagtttg

SEQ ID NO: 4179477 - DNA, 25 bp, Homo sapien
tggatggtagcgaacctagcgccag

SEQ ID NO: 4179478 - DNA, 25 bp, Homo sapien
tagcgccagtttgtgcttctcctgg

SEQ ID NO: 4179479 - DNA, 25 bp, Homo sapien
gactgtaggatcatgaagtcccacc

SEQ ID NO: 4179480 - DNA, 25 bp, Homo sapien
gcccagaacagctagattgactgta

SEQ ID NO: 4179481 - DNA, 25 bp, Homo sapien
aggaaagcccgctcttcagcacgaa

SEQ ID NO: 4179482 - DNA, 25 bp, Homo sapien
gatgccccgcagatcgatgtagatg

SEQ ID NO: 4179483 - DNA, 25 bp, Homo sapien
aacttgaaagcctgcacgtcgtaca

SEQ ID NO: 4179484 - DNA, 25 bp, Homo sapien
agaagacgcggtcgagacacgatgc

SEQ ID NO: 4179485 - DNA, 25 bp, Homo sapien
cctgtcctttcccttcctaggccag

SEQ ID NO: 4179486 - DNA, 25 bp, Homo sapien
tcccgccaccaagccctgtcctttc

SEQ ID NO: 4179487 - DNA, 25 bp, Homo sapien
cgccaccaagccctgtcctttccct

SEQ ID NO: 4179488 - DNA, 25 bp, Homo sapien
gtcctttcccttcctaggccagcac

SEQ ID NO: 4179489 - DNA, 25 bp, Homo sapien
ctgggtgacgtaagagagatcccat

SEQ ID NO: 4179490 - DNA, 25 bp, Homo sapien
ctgcaacctcctgattcttctgcct

SEQ ID NO: 4179491 - DNA, 25 bp, Homo sapien
caaagtggtccctagtgaacataaa

SEQ ID NO: 4179492 - DNA, 25 bp, Homo sapien
ccttaagtgggctgaggaaacttat

SEQ ID NO: 4179493 - DNA, 25 bp, Homo sapien
gcaaccttaatagtccaacctatct

SEQ ID NO: 4179494 - DNA, 25 bp, Homo sapien
aagatacaccatagcaagattctgg

SEQ ID NO: 4179495 - DNA, 25 bp, Homo sapien
cacggtgtcaaaactgatgcctgca

SEQ ID NO: 4179496 - DNA, 25 bp, Homo sapien
acagataactgtagccaatggcaaa

SEQ ID NO: 4179497 - DNA, 25 bp, Homo sapien
ccttctaataagcattggaatttga

SEQ ID NO: 4179498 - DNA, 25 bp, Homo sapien
tataaggcactccacacacggtgtc

SEQ ID NO: 4179499 - DNA, 25 bp, Homo sapien
catcagcagatagacacagattggt

SEQ ID NO: 4179500 - DNA, 25 bp, Homo sapien
tgagaagcttcgatgcaactgggtg

SEQ ID NO: 4179501 - DNA, 25 bp, Homo sapien
tctgcacgtgcaccgaagctgagtt

SEQ ID NO: 4179502 - DNA, 25 bp, Homo sapien
gaaccattatgattcgctgccacaa

SEQ ID NO: 4179503 - DNA, 25 bp, Homo sapien
agctcctggatccaaccacgcttga

SEQ ID NO: 4179504 - DNA, 25 bp, Homo sapien
tctatgaatggactttcaatgacat

SEQ ID NO: 4179505 - DNA, 25 bp, Homo sapien
tgctctatgaatggactttcaatga

SEQ ID NO: 4179506 - DNA, 25 bp, Homo sapien
tggatccaaccacgcttgacagcct

SEQ ID NO: 4179507 - DNA, 25 bp, Homo sapien
ttgtttcctttatgtggaattttca

SEQ ID NO: 4179508 - DNA, 25 bp, Homo sapien
caaaacatcatattctgccaaggac

SEQ ID NO: 4179509 - DNA, 25 bp, Homo sapien
aaggacatctgtcaaatttgcttgc

SEQ ID NO: 4179510 - DNA, 25 bp, Homo sapien
tcctttatgtggaattttcattcaa

SEQ ID NO: 4179511 - DNA, 25 bp, Homo sapien
tatagtctgatcacacagttgtaaa

SEQ ID NO: 4179512 - DNA, 25 bp, Homo sapien
tgtcagtcaatcagctaaagtaagc

SEQ ID NO: 4179513 - DNA, 25 bp, Homo sapien
ttaaaagcggacagtaacaagcctg

SEQ ID NO: 4179514 - DNA, 25 bp, Homo sapien
tcttaagcacatgaagaagtcactt

SEQ ID NO: 4179515 - DNA, 25 bp, Homo sapien
ccagggagccggtggagctcatttc

SEQ ID NO: 4179516 - DNA, 25 bp, Homo sapien
catttccgcaataaggaggcacccc

SEQ ID NO: 4179517 - DNA, 25 bp, Homo sapien
gcatttactagatctgcccaggaag

SEQ ID NO: 4179518 - DNA, 25 bp, Homo sapien
caggaagctattttaaagatacctc

SEQ ID NO: 4179519 - DNA, 25 bp, Homo sapien
tgcttccaactgaactcctggagtc

SEQ ID NO: 4179520 - DNA, 25 bp, Homo sapien
ggtttcatgcttactcgggagccag

SEQ ID NO: 4179521 - DNA, 25 bp, Homo sapien
aacaaattcagagtgctcctcagcc

SEQ ID NO: 4179522 - DNA, 25 bp, Homo sapien
tactcgggagccagaaataaaacca

SEQ ID NO: 4179523 - DNA, 25 bp, Homo sapien
gccctaaatattcaccccctcaatg

SEQ ID NO: 4179524 - DNA, 25 bp, Homo sapien
gtcaaattttagatcatctgtagct

SEQ ID NO: 4179525 - DNA, 25 bp, Homo sapien
ctaaatattcaccccctcaatgtca

SEQ ID NO: 4179526 - DNA, 25 bp, Homo sapien
tgtcaaattttagatcatctgtagc

SEQ ID NO: 4179527 - DNA, 25 bp, Homo sapien
ctgcaagaaacacaaaaattgttgt

SEQ ID NO: 4179528 - DNA, 25 bp, Homo sapien
aacctcgtttgccaataacttcttg

SEQ ID NO: 4179529 - DNA, 25 bp, Homo sapien
gagattatgccacgacctacaatga

SEQ ID NO: 4179530 - DNA, 25 bp, Homo sapien
tcttgtgggctattgtactgttggc

SEQ ID NO: 4179531 - DNA, 25 bp, Homo sapien
cctacaatgatgatatcggaacctc

SEQ ID NO: 4179532 - DNA, 25 bp, Homo sapien
tatttgggcaacacattagacagag

SEQ ID NO: 4179533 - DNA, 25 bp, Homo sapien
cctctttggagagtgagcaatggca

SEQ ID NO: 4179534 - DNA, 25 bp, Homo sapien
cctctactaatgaccgttgggacaa

SEQ ID NO: 4179535 - DNA, 25 bp, Homo sapien
taacagccagatactagctcaggag

SEQ ID NO: 4179536 - DNA, 25 bp, Homo sapien
gcagtactgggctgactcttcacaa

SEQ ID NO: 4179537 - DNA, 25 bp, Homo sapien
tacgattctggagctacactttggg

SEQ ID NO: 4179538 - DNA, 25 bp, Homo sapien
gaccaggagttacaatgcccagaga

SEQ ID NO: 4179539 - DNA, 25 bp, Homo sapien
attagaaatgcacacgcccaggctg

SEQ ID NO: 4179540 - DNA, 25 bp, Homo sapien
ctatttcgctgggagagatcgctga

SEQ ID NO: 4179541 - DNA, 25 bp, Homo sapien
taagcatttatcacgctcccaggct

SEQ ID NO: 4179542 - DNA, 25 bp, Homo sapien
tgtaaagaactccaacaggccggga

SEQ ID NO: 4179543 - DNA, 25 bp, Homo sapien
gaagacacgattcatacccacctgt

SEQ ID NO: 4179544 - DNA, 25 bp, Homo sapien
gactgtccttacctgacgattgaga

SEQ ID NO: 4179545 - DNA, 25 bp, Homo sapien
tgagaaccttggttgtgcggcccgt

SEQ ID NO: 4179546 - DNA, 25 bp, Homo sapien
aaagggattgcagggtaactcatac

SEQ ID NO: 4179547 - DNA, 25 bp, Homo sapien
attcagcagcagcacgtgagagccc

SEQ ID NO: 4179548 - DNA, 25 bp, Homo sapien
gacaaaagtcttataagtggctgcc

SEQ ID NO: 4179549 - DNA, 25 bp, Homo sapien
gttaagattgcggagacaaaagtct

SEQ ID NO: 4179550 - DNA, 25 bp, Homo sapien
acaaaagtcttataagtggctgccc

SEQ ID NO: 4179551 - DNA, 25 bp, Homo sapien
tgttcaggttaagattgcggagaca

SEQ ID NO: 4179552 - DNA, 25 bp, Homo sapien
ggccttcagaccctccaggggtgca

SEQ ID NO: 4179553 - DNA, 25 bp, Homo sapien
ttcagaccctccaggggtgcaaaca

SEQ ID NO: 4179554 - DNA, 25 bp, Homo sapien
ccttcagaccctccaggggtgcaaa

SEQ ID NO: 4179555 - DNA, 25 bp, Homo sapien
tcagaccctccaggggtgcaaacat

SEQ ID NO: 4179556 - DNA, 25 bp, Homo sapien
agtgagggtgttttcgtctgacgcc

SEQ ID NO: 4179557 - DNA, 25 bp, Homo sapien
tggttggtctacaactcccaagctc

SEQ ID NO: 4179558 - DNA, 25 bp, Homo sapien
attcttgagccacagatagcaaagg

SEQ ID NO: 4179559 - DNA, 25 bp, Homo sapien
tccacttgacgtggaaagtgagggt

SEQ ID NO: 4179560 - DNA, 25 bp, Homo sapien
atatgatgaaacagagacctggtaa

SEQ ID NO: 4179561 - DNA, 25 bp, Homo sapien
ggcaaatacgaacagattgagtttc

SEQ ID NO: 4179562 - DNA, 25 bp, Homo sapien
gaaatgcctgtcactacatagaacc

SEQ ID NO: 4179563 - DNA, 25 bp, Homo sapien
cagataaattgtggtgttgagactt

SEQ ID NO: 4179564 - DNA, 25 bp, Homo sapien
gctatgccttgcacacaggtgttgg

SEQ ID NO: 4179565 - DNA, 25 bp, Homo sapien
gacttttctgcgtgatggctatgcc

SEQ ID NO: 4179566 - DNA, 25 bp, Homo sapien
gcctgttgaaggtacatcgtttgca

SEQ ID NO: 4179567 - DNA, 25 bp, Homo sapien
gcatttatggtgtagttctgagtcc

SEQ ID NO: 4179568 - DNA, 25 bp, Homo sapien
tgccccgaccatcagtggctgtggg

SEQ ID NO: 4179569 - DNA, 25 bp, Homo sapien
gaggcttggagatcctctaatgtgt

SEQ ID NO: 4179570 - DNA, 25 bp, Homo sapien
taatgtgttccacgtgtccccaaag

SEQ ID NO: 4179571 - DNA, 25 bp, Homo sapien
caaagccatctaaattcagccctgg

SEQ ID NO: 4179572 - DNA, 25 bp, Homo sapien
ggggtcaagcagtccacctgcctca

SEQ ID NO: 4179573 - DNA, 25 bp, Homo sapien
cctgggctcaggcaaacctctttcc

SEQ ID NO: 4179574 - DNA, 25 bp, Homo sapien
tggggtcaagcagtccacctgcctc

SEQ ID NO: 4179575 - DNA, 25 bp, Homo sapien
gggctcaggcaaacctctttcctca

SEQ ID NO: 4179576 - DNA, 25 bp, Homo sapien
agagccaggaatagcgcttcttagg

SEQ ID NO: 4179577 - DNA, 25 bp, Homo sapien
tagcgcttcttaggagggatttccc

SEQ ID NO: 4179578 - DNA, 25 bp, Homo sapien
cagtgagcccatcccgggtctggct

SEQ ID NO: 4179579 - DNA, 25 bp, Homo sapien
cagtccttggaagcttatgtatgtg

SEQ ID NO: 4179580 - DNA, 25 bp, Homo sapien
tgacttctcggctgtagtggactcc

SEQ ID NO: 4179581 - DNA, 25 bp, Homo sapien
ggagtatgggcttctggtcaaacag

SEQ ID NO: 4179582 - DNA, 25 bp, Homo sapien
ggaattacaacttcccagaaggcag

SEQ ID NO: 4179583 - DNA, 25 bp, Homo sapien
gaaatgctctcttcccatagtggta

SEQ ID NO: 4179584 - DNA, 25 bp, Homo sapien
tactggctgccagggatatacagct

SEQ ID NO: 4179585 - DNA, 25 bp, Homo sapien
tcattgagcgttcttcataagccaa

SEQ ID NO: 4179586 - DNA, 25 bp, Homo sapien
tatacagctggagtttcagtcttga

SEQ ID NO: 4179587 - DNA, 25 bp, Homo sapien
gtaagtatctgatctgagacaatgc

SEQ ID NO: 4179588 - DNA, 25 bp, Homo sapien
catgacagaggtctccaaaagtacc

SEQ ID NO: 4179589 - DNA, 25 bp, Homo sapien
cactcagaatcagtagcctggcagc

SEQ ID NO: 4179590 - DNA, 25 bp, Homo sapien
cagtactgtcttgaaggtgacttcc

SEQ ID NO: 4179591 - DNA, 25 bp, Homo sapien
ggttgctgctgtatctctgtcattg

SEQ ID NO: 4179592 - DNA, 25 bp, Homo sapien
tgtcttcaccctagaagcctgcgtg

SEQ ID NO: 4179593 - DNA, 25 bp, Homo sapien
taataaaagctctaagcagcctggc

SEQ ID NO: 4179594 - DNA, 25 bp, Homo sapien
ggatcaacgctttcctcagcagagt

SEQ ID NO: 4179595 - DNA, 25 bp, Homo sapien
ttagcaaacgtgacagaaccatccc

SEQ ID NO: 4179596 - DNA, 25 bp, Homo sapien
tgaaggcgaccatatcccagtgttt

SEQ ID NO: 4179597 - DNA, 25 bp, Homo sapien
caagtgtgcaggtatagaagactct

SEQ ID NO: 4179598 - DNA, 25 bp, Homo sapien
ggatgcccgttcaccattactatga

SEQ ID NO: 4179599 - DNA, 25 bp, Homo sapien
gaatccagtctcctatttcagtagc

SEQ ID NO: 4179600 - DNA, 25 bp, Homo sapien
tctgaggcgacatcccaagtgcagg

SEQ ID NO: 4179601 - DNA, 25 bp, Homo sapien
ccagagtcaggcacaactttgtcag

SEQ ID NO: 4179602 - DNA, 25 bp, Homo sapien
tggctttctatgtggcagacggcag

SEQ ID NO: 4179603 - DNA, 25 bp, Homo sapien
tctgctagcagatcgcaccacaggt

SEQ ID NO: 4179604 - DNA, 25 bp, Homo sapien
cctgaagtcctaaatcatgggccag

SEQ ID NO: 4179605 - DNA, 25 bp, Homo sapien
gatagacttacttccttctgggcct

SEQ ID NO: 4179606 - DNA, 25 bp, Homo sapien
tcattgctgtttgcgggagtgaaag

SEQ ID NO: 4179607 - DNA, 25 bp, Homo sapien
gagtttgtcacagctttcctggtta

SEQ ID NO: 4179608 - DNA, 25 bp, Homo sapien
gcttgatccatgatattctcctgag

SEQ ID NO: 4179609 - DNA, 25 bp, Homo sapien
tctggatttgcctaggtctggtgtc

SEQ ID NO: 4179610 - DNA, 25 bp, Homo sapien
ggagagcctttccatgtcagcttga

SEQ ID NO: 4179611 - DNA, 25 bp, Homo sapien
tactttctaagcttccagcctaggc

SEQ ID NO: 4179612 - DNA, 25 bp, Homo sapien
caagtcctctttggtagccttcaga

SEQ ID NO: 4179613 - DNA, 25 bp, Homo sapien
atgcagtaactcagggatccagctc

SEQ ID NO: 4179614 - DNA, 25 bp, Homo sapien
tgctggtggcataggctcttctgaa

SEQ ID NO: 4179615 - DNA, 25 bp, Homo sapien
tatgctgcagtaacgtagagtctcc

SEQ ID NO: 4179616 - DNA, 25 bp, Homo sapien
aaaacatatctagatggctggcatg

SEQ ID NO: 4179617 - DNA, 25 bp, Homo sapien
tttggagaccagttaggattcatct

SEQ ID NO: 4179618 - DNA, 25 bp, Homo sapien
tgatctttggtataagaactccaaa

SEQ ID NO: 4179619 - DNA, 25 bp, Homo sapien
tgagcttgtgaattgagtttgttgc

SEQ ID NO: 4179620 - DNA, 25 bp, Homo sapien
cacggtgtctcatttacatgaaggc

SEQ ID NO: 4179621 - DNA, 25 bp, Homo sapien
gctctattaactttcaagccggaga

SEQ ID NO: 4179622 - DNA, 25 bp, Homo sapien
gggtctgagcaaacaataacttcgt

SEQ ID NO: 4179623 - DNA, 25 bp, Homo sapien
gctgcccgaagggaggactgttccc

SEQ ID NO: 4179624 - DNA, 25 bp, Homo sapien
tctaatcatgccctcccgaagactg

SEQ ID NO: 4179625 - DNA, 25 bp, Homo sapien
caaactgtctggcaaagggtgcgag

SEQ ID NO: 4179626 - DNA, 25 bp, Homo sapien
gaggatcaattagagaggaggcacc

SEQ ID NO: 4179627 - DNA, 25 bp, Homo sapien
ccaggagtaagagccttaggtcagt

SEQ ID NO: 4179628 - DNA, 25 bp, Homo sapien
tcctaaggtcaggataacggcctcc

SEQ ID NO: 4179629 - DNA, 25 bp, Homo sapien
taaaactgcggtcgacaggcttcac

SEQ ID NO: 4179630 - DNA, 25 bp, Homo sapien
tgccccgccctgactattaggtgag

SEQ ID NO: 4179631 - DNA, 25 bp, Homo sapien
gaatcttcaatccttggctgccccg

SEQ ID NO: 4179632 - DNA, 25 bp, Homo sapien
tgtctacttcacaggtacagtcggg

SEQ ID NO: 4179633 - DNA, 25 bp, Homo sapien
agagttttccacagcgagagccagc

SEQ ID NO: 4179634 - DNA, 25 bp, Homo sapien
acatgttggttctttggcatcggcc

SEQ ID NO: 4179635 - DNA, 25 bp, Homo sapien
tactccgatgatagagggcaccgtg

SEQ ID NO: 4179636 - DNA, 25 bp, Homo sapien
tcaggtctaaaaagcgacaggtccg

SEQ ID NO: 4179637 - DNA, 25 bp, Homo sapien
catcatatctggtgtaaactgctca

SEQ ID NO: 4179638 - DNA, 25 bp, Homo sapien
tagcccctggttgattgtgttaaac

SEQ ID NO: 4179639 - DNA, 25 bp, Homo sapien
gatggagtcagttctgcctgggaaa

SEQ ID NO: 4179640 - DNA, 25 bp, Homo sapien
catcagtggtttggtttaagctcca

SEQ ID NO: 4179641 - DNA, 25 bp, Homo sapien
cacctgatagcagaagaggcctgga

SEQ ID NO: 4179642 - DNA, 25 bp, Homo sapien
tgtgtgattcacgtgcacagatgcc

SEQ ID NO: 4179643 - DNA, 25 bp, Homo sapien
gagtaaagcatgtctgtgacccagt

SEQ ID NO: 4179644 - DNA, 25 bp, Homo sapien
atcgggggattgcttgaccctagga

SEQ ID NO: 4179645 - DNA, 25 bp, Homo sapien
atgccgataatccctgtaatcactt

SEQ ID NO: 4179646 - DNA, 25 bp, Homo sapien
catgccgataatccctgtaatcact

SEQ ID NO: 4179647 - DNA, 25 bp, Homo sapien
taggagacaaccttgaacccttgct

SEQ ID NO: 4179648 - DNA, 25 bp, Homo sapien
taatttgctatgtccagcctggact

SEQ ID NO: 4179649 - DNA, 25 bp, Homo sapien
gtcgtcctcaacaagcacttctcag

SEQ ID NO: 4179650 - DNA, 25 bp, Homo sapien
tagaatattgtatactcagtaggcc

SEQ ID NO: 4179651 - DNA, 25 bp, Homo sapien
caacccacggtctgatggcaggtgt

SEQ ID NO: 4179652 - DNA, 25 bp, Homo sapien
ccaacccttctgctagcgaggacta

SEQ ID NO: 4179653 - DNA, 25 bp, Homo sapien
tcattttactcggtcttgactggcc

SEQ ID NO: 4179654 - DNA, 25 bp, Homo sapien
tcccagtgtagccagcagggagtga

SEQ ID NO: 4179655 - DNA, 25 bp, Homo sapien
tgaatgagtgcctgtcgaacccctg

SEQ ID NO: 4179656 - DNA, 25 bp, Homo sapien
ggactttattccgtaccacaatata

SEQ ID NO: 4179657 - DNA, 25 bp, Homo sapien
tgcaaatgcccggttgggtaccagt

SEQ ID NO: 4179658 - DNA, 25 bp, Homo sapien
caaaatcagtatttgtccaaggtat

SEQ ID NO: 4179659 - DNA, 25 bp, Homo sapien
aagcccgtgagggatgttatttgcc

SEQ ID NO: 4179660 - DNA, 25 bp, Homo sapien
gatcacacggtaaatggaggcggca

SEQ ID NO: 4179661 - DNA, 25 bp, Homo sapien
gtcccacaatatcaggaggtctcag

SEQ ID NO: 4179662 - DNA, 25 bp, Homo sapien
tgaacacgtatgtgtggtcggcgcc

SEQ ID NO: 4179663 - DNA, 25 bp, Homo sapien
ctcgccgcgcgcctcgcggtggccg

SEQ ID NO: 4179664 - DNA, 25 bp, Homo sapien
cctcgccgcgcgcctcgcggtggcc

SEQ ID NO: 4179665 - DNA, 25 bp, Homo sapien
gcctcgccgcgcgcctcgcggtggc

SEQ ID NO: 4179666 - DNA, 25 bp, Homo sapien
tcaaatcaataacggcggtgacagc

SEQ ID NO: 4179667 - DNA, 25 bp, Homo sapien
tactcggattctcgcgttggccgga

SEQ ID NO: 4179668 - DNA, 25 bp, Homo sapien
ggtttggcaaacacgagctcatcac

SEQ ID NO: 4179669 - DNA, 25 bp, Homo sapien
gatgatgagtttgccctagcctgcc

SEQ ID NO: 4179670 - DNA, 25 bp, Homo sapien
cctggacactacgatctcattctcc

SEQ ID NO: 4179671 - DNA, 25 bp, Homo sapien
tggacactacgatctcattctcctg

SEQ ID NO: 4179672 - DNA, 25 bp, Homo sapien
tgccctggacactacgatctcattc

SEQ ID NO: 4179673 - DNA, 25 bp, Homo sapien
gctgccctggacactacgatctcat

SEQ ID NO: 4179674 - DNA, 25 bp, Homo sapien
tctcttgaaaagttatctccaccag

SEQ ID NO: 4179675 - DNA, 25 bp, Homo sapien
cagcctccacaacagtgacaggata

SEQ ID NO: 4179676 - DNA, 25 bp, Homo sapien
tcctaaatccagtaacagcgtcttt

SEQ ID NO: 4179677 - DNA, 25 bp, Homo sapien
caaccaccgccaaagctaggaagag

SEQ ID NO: 4179678 - DNA, 25 bp, Homo sapien
gcatggttccgctgacatcttgatt

SEQ ID NO: 4179679 - DNA, 25 bp, Homo sapien
accagtccccatgggcccgtgacag

SEQ ID NO: 4179680 - DNA, 25 bp, Homo sapien
tattggtttatcttcaccagtcccc

SEQ ID NO: 4179681 - DNA, 25 bp, Homo sapien
gacagcgctgggcatgctcggacat

SEQ ID NO: 4179682 - DNA, 25 bp, Homo sapien
catgggcccgtgacagcgctgggca

SEQ ID NO: 4179683 - DNA, 25 bp, Homo sapien
gcagctcctgtcttcaagagttctt

SEQ ID NO: 4179684 - DNA, 25 bp, Homo sapien
aatagtgcagatgtagcccatgtgc

SEQ ID NO: 4179685 - DNA, 25 bp, Homo sapien
acaaaatagtgcagatgtagcccat

SEQ ID NO: 4179686 - DNA, 25 bp, Homo sapien
caaaatagtgcagatgtagcccatg

SEQ ID NO: 4179687 - DNA, 25 bp, Homo sapien
tgaaagtctattccaccaacctaag

SEQ ID NO: 4179688 - DNA, 25 bp, Homo sapien
tatcaacagtcacttaaggagaaga

SEQ ID NO: 4179689 - DNA, 25 bp, Homo sapien
tgaagaatagagactgagagaccca

SEQ ID NO: 4179690 - DNA, 25 bp, Homo sapien
ttttagaactaaacaccagagaatg

SEQ ID NO: 4179691 - DNA, 25 bp, Homo sapien
tcacaaagaatctgtgggctggctg

SEQ ID NO: 4179692 - DNA, 25 bp, Homo sapien
gctgctcgaggtctccccttgtaga

SEQ ID NO: 4179693 - DNA, 25 bp, Homo sapien
cttgtagaaaccatccgggtgaggc

SEQ ID NO: 4179694 - DNA, 25 bp, Homo sapien
cccttgtagaaaccatccgggtgag

SEQ ID NO: 4179695 - DNA, 25 bp, Homo sapien
gcccgttctgcagcatcacggctgg

SEQ ID NO: 4179696 - DNA, 25 bp, Homo sapien
ctgtgcttccgggaatgcagcccgt

SEQ ID NO: 4179697 - DNA, 25 bp, Homo sapien
tctgcagcatcacggctggcaccag

SEQ ID NO: 4179698 - DNA, 25 bp, Homo sapien
tgcttccgggaatgcagcccgttct

SEQ ID NO: 4179699 - DNA, 25 bp, Homo sapien
tgctgagctccagtgcactgtatgc

SEQ ID NO: 4179700 - DNA, 25 bp, Homo sapien
actgtatgctgagctccagtgcact

SEQ ID NO: 4179701 - DNA, 25 bp, Homo sapien
cctccactgtatgctgagctccagt

SEQ ID NO: 4179702 - DNA, 25 bp, Homo sapien
tgagctccagtgcactgtatgcact

SEQ ID NO: 4179703 - DNA, 25 bp, Homo sapien
ggaggagaggccgaggagccagccc

SEQ ID NO: 4179704 - DNA, 25 bp, Homo sapien
agaggccgaggagccagcccagacc

SEQ ID NO: 4179705 - DNA, 25 bp, Homo sapien
tgatattaggccagtgggaggagag

SEQ ID NO: 4179706 - DNA, 25 bp, Homo sapien
ctgatattaggccagtgggaggaga

SEQ ID NO: 4179707 - DNA, 25 bp, Homo sapien
cactggagaattgggggagggccag

SEQ ID NO: 4179708 - DNA, 25 bp, Homo sapien
tttctgccctccttgatacactgga

SEQ ID NO: 4179709 - DNA, 25 bp, Homo sapien
ctgacacattcgttggttcctgttt

SEQ ID NO: 4179710 - DNA, 25 bp, Homo sapien
gacacattcgttggttcctgtttct

SEQ ID NO: 4179711 - DNA, 25 bp, Homo sapien
tcaggagcctatggcctgcagcagc

SEQ ID NO: 4179712 - DNA, 25 bp, Homo sapien
gatggaacaagtggacttgccccag

SEQ ID NO: 4179713 - DNA, 25 bp, Homo sapien
tggaacaagtggacttgccccagag

SEQ ID NO: 4179714 - DNA, 25 bp, Homo sapien
acaagtggacttgccccagagacag

SEQ ID NO: 4179715 - DNA, 25 bp, Homo sapien
gaacaagtggacttgccccagagac

SEQ ID NO: 4179716 - DNA, 25 bp, Homo sapien
gccattgtgacctgcacgacgtgag

SEQ ID NO: 4179717 - DNA, 25 bp, Homo sapien
acgacgtgagtgcttagcaggctgc

SEQ ID NO: 4179718 - DNA, 25 bp, Homo sapien
tcccataaccaaaagttagctctgg

SEQ ID NO: 4179719 - DNA, 25 bp, Homo sapien
aaccctgccattgtgacctgcacga

SEQ ID NO: 4179720 - DNA, 25 bp, Homo sapien
gcaaatgggaatgtagagtctcaca

SEQ ID NO: 4179721 - DNA, 25 bp, Homo sapien
cacaaaagttagcacgttatacaca

SEQ ID NO: 4179722 - DNA, 25 bp, Homo sapien
tttgcaatgacaatcagctctgcag

SEQ ID NO: 4179723 - DNA, 25 bp, Homo sapien
tgcaagcataaagtgtatctctagg

SEQ ID NO: 4179724 - DNA, 25 bp, Homo sapien
tcttgtctgcagtccgagttgcctg

SEQ ID NO: 4179725 - DNA, 25 bp, Homo sapien
tgtctgcagtccgagttgcctgcat

SEQ ID NO: 4179726 - DNA, 25 bp, Homo sapien
tgcagtccgagttgcctgcatctcc

SEQ ID NO: 4179727 - DNA, 25 bp, Homo sapien
gagacttcttgtctgcagtccgagt

SEQ ID NO: 4179728 - DNA, 25 bp, Homo sapien
cactctgctcccacggctggctttc

SEQ ID NO: 4179729 - DNA, 25 bp, Homo sapien
cccaccagtactgccagggagttgg

SEQ ID NO: 4179730 - DNA, 25 bp, Homo sapien
cggctccccaccagtactgccaggg

SEQ ID NO: 4179731 - DNA, 25 bp, Homo sapien
tccccaccagtactgccagggagtt

SEQ ID NO: 4179732 - DNA, 25 bp, Homo sapien
caccagtactgccagggagttggcg

SEQ ID NO: 4179733 - DNA, 25 bp, Homo sapien
gcacacagtcttggccattgcttgg

SEQ ID NO: 4179734 - DNA, 25 bp, Homo sapien
tggctatgtcactctcagggctgct

SEQ ID NO: 4179735 - DNA, 25 bp, Homo sapien
acacagtcttggccattgcttggca

SEQ ID NO: 4179736 - DNA, 25 bp, Homo sapien
tattggctatgtcactctcagggct

SEQ ID NO: 4179737 - DNA, 25 bp, Homo sapien
atccttggccaggaagccccctttg

SEQ ID NO: 4179738 - DNA, 25 bp, Homo sapien
ccaggaagccccctttgtcctctat

SEQ ID NO: 4179739 - DNA, 25 bp, Homo sapien
gccccctttgtcctctattcccaca

SEQ ID NO: 4179740 - DNA, 25 bp, Homo sapien
ttccaccatccttggccaggaagcc

SEQ ID NO: 4179741 - DNA, 25 bp, Homo sapien
cactctccataagcgcctgcagaaa

SEQ ID NO: 4179742 - DNA, 25 bp, Homo sapien
tctccataagcgcctgcagaaaagg

SEQ ID NO: 4179743 - DNA, 25 bp, Homo sapien
tccataagcgcctgcagaaaaggca

SEQ ID NO: 4179744 - DNA, 25 bp, Homo sapien
ctcactctccataagcgcctgcaga

SEQ ID NO: 4179745 - DNA, 25 bp, Homo sapien
tgtatggtcactggactcatccagc

SEQ ID NO: 4179746 - DNA, 25 bp, Homo sapien
cccctcgtgctctctgggttgatca

SEQ ID NO: 4179747 - DNA, 25 bp, Homo sapien
atcacgttcagtcaggagcagcagc

SEQ ID NO: 4179748 - DNA, 25 bp, Homo sapien
ggcaggatgtatggtcactggactc

SEQ ID NO: 4179749 - DNA, 25 bp, Homo sapien
tgtccctcttgcctggatcttcatg

SEQ ID NO: 4179750 - DNA, 25 bp, Homo sapien
tgcctggatcttcatgctccctggg

SEQ ID NO: 4179751 - DNA, 25 bp, Homo sapien
tcttcatgctccctggggactgagg

SEQ ID NO: 4179752 - DNA, 25 bp, Homo sapien
cctggggactgaggcatgcaccttc

SEQ ID NO: 4179753 - DNA, 25 bp, Homo sapien
taaccatccatgtacacaatggacc

SEQ ID NO: 4179754 - DNA, 25 bp, Homo sapien
gtaaccagccttgcttccaatatga

SEQ ID NO: 4179755 - DNA, 25 bp, Homo sapien
caggccccttactgcgaaataacca

SEQ ID NO: 4179756 - DNA, 25 bp, Homo sapien
gaccccttggagtaaccagccttgc

SEQ ID NO: 4179757 - DNA, 25 bp, Homo sapien
tcaattgcggccatcctttggtgtt

SEQ ID NO: 4179758 - DNA, 25 bp, Homo sapien
cctaccataggtagatttgagaacc

SEQ ID NO: 4179759 - DNA, 25 bp, Homo sapien
taggtagatttgagaaccaagtcgc

SEQ ID NO: 4179760 - DNA, 25 bp, Homo sapien
ggtgagtacctcacctaccataggt

SEQ ID NO: 4179761 - DNA, 25 bp, Homo sapien
tgagaaccaagtcgcactgggtgcg

SEQ ID NO: 4179762 - DNA, 25 bp, Homo sapien
cccagactcattgtgagaagacggt

SEQ ID NO: 4179763 - DNA, 25 bp, Homo sapien
catagctagctactgtttcctcttc

SEQ ID NO: 4179764 - DNA, 25 bp, Homo sapien
ttcagcagcgaataataacaaagtc

SEQ ID NO: 4179765 - DNA, 25 bp, Homo sapien
gtagtgacagtctaccctcagaagt

SEQ ID NO: 4179766 - DNA, 25 bp, Homo sapien
cacggtgctgtctggcattggcgtc

SEQ ID NO: 4179767 - DNA, 25 bp, Homo sapien
ggtgtccttcgtcatcctggtggcc

SEQ ID NO: 4179768 - DNA, 25 bp, Homo sapien
gctccttgctattctgctgcaggga

SEQ ID NO: 4179769 - DNA, 25 bp, Homo sapien
cagcggtggcgtctactccatgatc

SEQ ID NO: 4179770 - DNA, 25 bp, Homo sapien
tggggttgtgctcttcctgaggact

SEQ ID NO: 4179771 - DNA, 25 bp, Homo sapien
gccactcttgcattctacagtgcag

SEQ ID NO: 4179772 - DNA, 25 bp, Homo sapien
ttctacagtgcaggccacagattcc

SEQ ID NO: 4179773 - DNA, 25 bp, Homo sapien
tggagcctctcacgggcccaagaca

SEQ ID NO: 4179774 - DNA, 25 bp, Homo sapien
gtttgcagatatccggtaaatcaca

SEQ ID NO: 4179775 - DNA, 25 bp, Homo sapien
cccagtttgcagatatccggtaaat

SEQ ID NO: 4179776 - DNA, 25 bp, Homo sapien
ttctagcatgttcttttcccagttt

SEQ ID NO: 4179777 - DNA, 25 bp, Homo sapien
cagatatccggtaaatcacatccat

SEQ ID NO: 4179778 - DNA, 25 bp, Homo sapien
gcctcgcctggtagtttgaacaatt

SEQ ID NO: 4179779 - DNA, 25 bp, Homo sapien
gtaacccggccaagtttccagatga

SEQ ID NO: 4179780 - DNA, 25 bp, Homo sapien
gggcctcgcctggtagtttgaacaa

SEQ ID NO: 4179781 - DNA, 25 bp, Homo sapien
tccagatgaggtagacaaggtttct

SEQ ID NO: 4179782 - DNA, 25 bp, Homo sapien
taagcattgaatggccttaccactc

SEQ ID NO: 4179783 - DNA, 25 bp, Homo sapien
tttcactaagcattgaatggcctta

SEQ ID NO: 4179784 - DNA, 25 bp, Homo sapien
tcactaagcattgaatggccttacc

SEQ ID NO: 4179785 - DNA, 25 bp, Homo sapien
cactaagcattgaatggccttacca

SEQ ID NO: 4179786 - DNA, 25 bp, Homo sapien
gttttgaagtgagtaccaatgtgct

SEQ ID NO: 4179787 - DNA, 25 bp, Homo sapien
actgctttatgttagaaggcatatg

SEQ ID NO: 4179788 - DNA, 25 bp, Homo sapien
tgtaagcaataatacatagcagtgc

SEQ ID NO: 4179789 - DNA, 25 bp, Homo sapien
tatgatgttgtactgtatgtaagca

SEQ ID NO: 4179790 - DNA, 25 bp, Homo sapien
ggaactgtgctcaccctaaataggc

SEQ ID NO: 4179791 - DNA, 25 bp, Homo sapien
caaaaaggcttcattcaggtgatac

SEQ ID NO: 4179792 - DNA, 25 bp, Homo sapien
ttaatgttatcccaagactgttctc

SEQ ID NO: 4179793 - DNA, 25 bp, Homo sapien
gccattattgactcttaagattgtg

SEQ ID NO: 4179794 - DNA, 25 bp, Homo sapien
caatttagcactgccaatggacagg

SEQ ID NO: 4179795 - DNA, 25 bp, Homo sapien
tgatgagacaaaccatgcttctgcc

SEQ ID NO: 4179796 - DNA, 25 bp, Homo sapien
ccctatcatggatcaagagctggaa

SEQ ID NO: 4179797 - DNA, 25 bp, Homo sapien
tgagctcctttgaacagcccttccg

SEQ ID NO: 4179798 - DNA, 25 bp, Homo sapien
tgtgggtaccatagcttctcagcct

SEQ ID NO: 4179799 - DNA, 25 bp, Homo sapien
ggcatccatattagagtcacaggca

SEQ ID NO: 4179800 - DNA, 25 bp, Homo sapien
tcttcagaagtaccagaggtcaccc

SEQ ID NO: 4179801 - DNA, 25 bp, Homo sapien
gaggtcaccccgtcagagaatgttg

SEQ ID NO: 4179802 - DNA, 25 bp, Homo sapien
gatgcgtcaggagaaatacacccac

SEQ ID NO: 4179803 - DNA, 25 bp, Homo sapien
tgctttggacaaatctgacctgaaa

SEQ ID NO: 4179804 - DNA, 25 bp, Homo sapien
tgaaatgccacattcgtcagttggg

SEQ ID NO: 4179805 - DNA, 25 bp, Homo sapien
gggctcgcatttagaagatgcgtca

SEQ ID NO: 4179806 - DNA, 25 bp, Homo sapien
taatgccgctatgaatacttgtgca

SEQ ID NO: 4179807 - DNA, 25 bp, Homo sapien
tgagggacatttgggccgtttcctc

SEQ ID NO: 4179808 - DNA, 25 bp, Homo sapien
cattcacttattggttgagggacat

SEQ ID NO: 4179809 - DNA, 25 bp, Homo sapien
agttctaccagccttgtatgagggt

SEQ ID NO: 4179810 - DNA, 25 bp, Homo sapien
tagagagaataggttatataaagtc

SEQ ID NO: 4179811 - DNA, 25 bp, Homo sapien
tgcagttaccacagtatatatgaaa

SEQ ID NO: 4179812 - DNA, 25 bp, Homo sapien
aagggacctgatgctattagagaga

SEQ ID NO: 4179813 - DNA, 25 bp, Homo sapien
tgaaattaacagtatgatctcagta

SEQ ID NO: 4179814 - DNA, 25 bp, Homo sapien
tatctagtccactgctgatggttac

SEQ ID NO: 4179815 - DNA, 25 bp, Homo sapien
cttcttccttttggagtccctagtg

SEQ ID NO: 4179816 - DNA, 25 bp, Homo sapien
gtgtgtacccaagatttaacgccca

SEQ ID NO: 4179817 - DNA, 25 bp, Homo sapien
cctaggagtgaattgacgaggtcat

SEQ ID NO: 4179818 - DNA, 25 bp, Homo sapien
gggtaagaccggatttcacaatgga

SEQ ID NO: 4179819 - DNA, 25 bp, Homo sapien
cctgtatgtatgtagccttctacgc

SEQ ID NO: 4179820 - DNA, 25 bp, Homo sapien
taagggcaaagccagtactgaacct

SEQ ID NO: 4179821 - DNA, 25 bp, Homo sapien
tcgctgaaacgaagtctgtgggtgt

SEQ ID NO: 4179822 - DNA, 25 bp, Homo sapien
agtgatcctcccatcctcagcctcc

SEQ ID NO: 4179823 - DNA, 25 bp, Homo sapien
ttgagatgggttttactgtattgcc

SEQ ID NO: 4179824 - DNA, 25 bp, Homo sapien
gacctcctggcccaagtgatcctcc

SEQ ID NO: 4179825 - DNA, 25 bp, Homo sapien
catgatgatggctcattgcagcctt

SEQ ID NO: 4179826 - DNA, 25 bp, Homo sapien
cctgattgcttggtctatgtaatat

SEQ ID NO: 4179827 - DNA, 25 bp, Homo sapien
tgtctagcaggcatcttagaattca

SEQ ID NO: 4179828 - DNA, 25 bp, Homo sapien
aaaacctgattgcttggtctatgta

SEQ ID NO: 4179829 - DNA, 25 bp, Homo sapien
agcatctgaagatgtctagcaggca

SEQ ID NO: 4179830 - DNA, 25 bp, Homo sapien
ggtttcttcactattgtattgtcca

SEQ ID NO: 4179831 - DNA, 25 bp, Homo sapien
caatgatgaatagaagcgatgcaag

SEQ ID NO: 4179832 - DNA, 25 bp, Homo sapien
tcatggttttggttggatgctatca

SEQ ID NO: 4179833 - DNA, 25 bp, Homo sapien
caagtagacatgtttgctttgttcc

SEQ ID NO: 4179834 - DNA, 25 bp, Homo sapien
tgcaagactgtcttgtcattatatt

SEQ ID NO: 4179835 - DNA, 25 bp, Homo sapien
tagttgcctaggtccactatgggtt

SEQ ID NO: 4179836 - DNA, 25 bp, Homo sapien
tccccagtggttcctcattactaaa

SEQ ID NO: 4179837 - DNA, 25 bp, Homo sapien
aatgtacttttttgcatgggcggaa

SEQ ID NO: 4179838 - DNA, 25 bp, Homo sapien
gaaatagccgtcataatcccgtccc

SEQ ID NO: 4179839 - DNA, 25 bp, Homo sapien
cttctttggactgggtgtggtgcct

SEQ ID NO: 4179840 - DNA, 25 bp, Homo sapien
ggaggctaaagtggcggattacttg

SEQ ID NO: 4179841 - DNA, 25 bp, Homo sapien
ttctgttaagatttcttctttggac

SEQ ID NO: 4179842 - DNA, 25 bp, Homo sapien
gctaaagtggcggattacttgagct

SEQ ID NO: 4179843 - DNA, 25 bp, Homo sapien
aaccatggagctactcttctgtaac

SEQ ID NO: 4179844 - DNA, 25 bp, Homo sapien
tttgcagctaatccaaaccatggag

SEQ ID NO: 4179845 - DNA, 25 bp, Homo sapien
tattgtatcatcataggcaccgttg

SEQ ID NO: 4179846 - DNA, 25 bp, Homo sapien
tagcctgtggcctgtgtggatccct

SEQ ID NO: 4179847 - DNA, 25 bp, Homo sapien
tcttagctgaattagcccttggaca

SEQ ID NO: 4179848 - DNA, 25 bp, Homo sapien
tgtcttggttcttaacagcgctgcc

SEQ ID NO: 4179849 - DNA, 25 bp, Homo sapien
gataaagggtcttcacagggagctc

SEQ ID NO: 4179850 - DNA, 25 bp, Homo sapien
tgtggtgtcagctgcctaaggtctc

SEQ ID NO: 4179851 - DNA, 25 bp, Homo sapien
cactgcaccctgtaagtagtttctt

SEQ ID NO: 4179852 - DNA, 25 bp, Homo sapien
tggtgcactgcaccctgtaagtagt

SEQ ID NO: 4179853 - DNA, 25 bp, Homo sapien
gactccacatctaggcaattgttct

SEQ ID NO: 4179854 - DNA, 25 bp, Homo sapien
tgaggctgtagactccacatctagg

SEQ ID NO: 4179855 - DNA, 25 bp, Homo sapien
gctaattacttgtaatagtatttta

SEQ ID NO: 4179856 - DNA, 25 bp, Homo sapien
acttcattctctttcgtgtcgtttg

SEQ ID NO: 4179857 - DNA, 25 bp, Homo sapien
gatatcaggttctactaaaatggct

SEQ ID NO: 4179858 - DNA, 25 bp, Homo sapien
tctttcgtgtcgtttggtggtagtg

SEQ ID NO: 4179859 - DNA, 25 bp, Homo sapien
ttccaaattgatatcaggttctact

SEQ ID NO: 4179860 - DNA, 25 bp, Homo sapien
ctgcgccgagcccaagaggcacact

SEQ ID NO: 4179861 - DNA, 25 bp, Homo sapien
cgccgagcccaagaggcacactttt

SEQ ID NO: 4179862 - DNA, 25 bp, Homo sapien
ccactgcgccgagcccaagaggcac

SEQ ID NO: 4179863 - DNA, 25 bp, Homo sapien
gagcccaagaggcacacttttgttt

SEQ ID NO: 4179864 - DNA, 25 bp, Homo sapien
gctggtgacacgcaggcgccggaat

SEQ ID NO: 4179865 - DNA, 25 bp, Homo sapien
taagagagttcctcagttccgatct

SEQ ID NO: 4179866 - DNA, 25 bp, Homo sapien
caccctgggctggtgacacgcaggc

SEQ ID NO: 4179867 - DNA, 25 bp, Homo sapien
ggagtcccccgctctaagagagttc

SEQ ID NO: 4179868 - DNA, 25 bp, Homo sapien
gatctgtgtctatgcccacaccctg

SEQ ID NO: 4179869 - DNA, 25 bp, Homo sapien
cctgcatctcagcttgcagacacta

SEQ ID NO: 4179870 - DNA, 25 bp, Homo sapien
ttctgcccaagagggtccagggccg

SEQ ID NO: 4179871 - DNA, 25 bp, Homo sapien
cagggccggatctcttgatctgtgt

SEQ ID NO: 4179872 - DNA, 25 bp, Homo sapien
tgaacgcgttttatcccacggcaag

SEQ ID NO: 4179873 - DNA, 25 bp, Homo sapien
cgtttaagtattgcagagaggcgct

SEQ ID NO: 4179874 - DNA, 25 bp, Homo sapien
gaggtcacagtttggctaaagggcc

SEQ ID NO: 4179875 - DNA, 25 bp, Homo sapien
tgttagctgacgaaggcaccattaa

SEQ ID NO: 4179876 - DNA, 25 bp, Homo sapien
acatctcacacgtgggtgtgaatac

SEQ ID NO: 4179877 - DNA, 25 bp, Homo sapien
tcacacgtgggtgtgaatacccaat

SEQ ID NO: 4179878 - DNA, 25 bp, Homo sapien
tctcacacgtgggtgtgaataccca

SEQ ID NO: 4179879 - DNA, 25 bp, Homo sapien
acacgtgggtgtgaatacccaatca

SEQ ID NO: 4179880 - DNA, 25 bp, Homo sapien
tacagcagttacaggtttagtagag

SEQ ID NO: 4179881 - DNA, 25 bp, Homo sapien
tgaaacagcattatcagcaaagacc

SEQ ID NO: 4179882 - DNA, 25 bp, Homo sapien
tagggttcacacttggtgttgggca

SEQ ID NO: 4179883 - DNA, 25 bp, Homo sapien
catgcatggtatataagaggtgttc

SEQ ID NO: 4179884 - DNA, 25 bp, Homo sapien
tgttgtcttacaacattttctgcta

SEQ ID NO: 4179885 - DNA, 25 bp, Homo sapien
ttctgctagctagaaagtaattgct

SEQ ID NO: 4179886 - DNA, 25 bp, Homo sapien
agttgtgttgtcttacaacattttc

SEQ ID NO: 4179887 - DNA, 25 bp, Homo sapien
ttttctgctagctagaaagtaattg

SEQ ID NO: 4179888 - DNA, 25 bp, Homo sapien
tctataagatgattactttaaagtc

SEQ ID NO: 4179889 - DNA, 25 bp, Homo sapien
taagatgattactttaaagtctttg

SEQ ID NO: 4179890 - DNA, 25 bp, Homo sapien
gttctctgagcatctataagatgat

SEQ ID NO: 4179891 - DNA, 25 bp, Homo sapien
tctgagcatctataagatgattact

SEQ ID NO: 4179892 - DNA, 25 bp, Homo sapien
gatctgtaactgatttgtgaaattg

SEQ ID NO: 4179893 - DNA, 25 bp, Homo sapien
tttgtgaaattgagataacttacta

SEQ ID NO: 4179894 - DNA, 25 bp, Homo sapien
gtaactgatttgtgaaattgagata

SEQ ID NO: 4179895 - DNA, 25 bp, Homo sapien
actgatttgtgaaattgagataact

SEQ ID NO: 4179896 - DNA, 25 bp, Homo sapien
tcagtggtcgcgtagctgggagatc

SEQ ID NO: 4179897 - DNA, 25 bp, Homo sapien
aacgctgatgtttcagccagttgct

SEQ ID NO: 4179898 - DNA, 25 bp, Homo sapien
cgctgatgtttcagccagttgctaa

SEQ ID NO: 4179899 - DNA, 25 bp, Homo sapien
gatctggaccgtgagaagaacgctg

SEQ ID NO: 4179900 - DNA, 25 bp, Homo sapien
caatttcttttgagtttcgttggct

SEQ ID NO: 4179901 - DNA, 25 bp, Homo sapien
gcgccgaactgcagccatggagcag

SEQ ID NO: 4179902 - DNA, 25 bp, Homo sapien
tccgggagccctctaggttgacaag

SEQ ID NO: 4179903 - DNA, 25 bp, Homo sapien
gatcgccgtgcctacttcaagtgtt

SEQ ID NO: 4179904 - DNA, 25 bp, Homo sapien
aacttatatgtgtaactgaacgcgc

SEQ ID NO: 4179905 - DNA, 25 bp, Homo sapien
gcaagctaccttaatttcccaagag

SEQ ID NO: 4179906 - DNA, 25 bp, Homo sapien
tgttgaggttgaagaattgctggca

SEQ ID NO: 4179907 - DNA, 25 bp, Homo sapien
gatatggtcttccaatcagtgtgtg

SEQ ID NO: 4179908 - DNA, 25 bp, Homo sapien
gactgaaactagctaaacctgaatg

SEQ ID NO: 4179909 - DNA, 25 bp, Homo sapien
tgcttcctgattgcgcagactgaaa

SEQ ID NO: 4179910 - DNA, 25 bp, Homo sapien
tacctactagggcaccataatactg

SEQ ID NO: 4179911 - DNA, 25 bp, Homo sapien
ttgcactgagtgacctgcttcctga

SEQ ID NO: 4179912 - DNA, 25 bp, Homo sapien
tctgcccttatagcatgaaacatcc

SEQ ID NO: 4179913 - DNA, 25 bp, Homo sapien
tgctttatttctatctgatgacttt

SEQ ID NO: 4179914 - DNA, 25 bp, Homo sapien
tttagccttagtggaccaaatagcc

SEQ ID NO: 4179915 - DNA, 25 bp, Homo sapien
agtttgatccctggtttagctcatc

SEQ ID NO: 4179916 - DNA, 25 bp, Homo sapien
tgtcatctgacagctctcatgtata

SEQ ID NO: 4179917 - DNA, 25 bp, Homo sapien
aatatatacaagtatgttgtctgtc

SEQ ID NO: 4179918 - DNA, 25 bp, Homo sapien
catctgacagctctcatgtataaat

SEQ ID NO: 4179919 - DNA, 25 bp, Homo sapien
taaatatagccagaaccatgttttt

SEQ ID NO: 4179920 - DNA, 25 bp, Homo sapien
tgtgctgctacatattaatggaata

SEQ ID NO: 4179921 - DNA, 25 bp, Homo sapien
tattgtgctgctacatattaatgga

SEQ ID NO: 4179922 - DNA, 25 bp, Homo sapien
ggaaatttaatggttatcgatatcc

SEQ ID NO: 4179923 - DNA, 25 bp, Homo sapien
aatttaatggttatcgatatcctca

SEQ ID NO: 4179924 - DNA, 25 bp, Homo sapien
cagtgtaagcatggcatcattaagc

SEQ ID NO: 4179925 - DNA, 25 bp, Homo sapien
tctgaatgtcatcttacagtgtaag

SEQ ID NO: 4179926 - DNA, 25 bp, Homo sapien
tatagtcgttatgaagaaagtatcc

SEQ ID NO: 4179927 - DNA, 25 bp, Homo sapien
tggaggccagaggtgctattcatag

SEQ ID NO: 4179928 - DNA, 25 bp, Homo sapien
acaccaccacgcccgatgaattttt

SEQ ID NO: 4179929 - DNA, 25 bp, Homo sapien
caaagtgttgggattacatgtgtga

SEQ ID NO: 4179930 - DNA, 25 bp, Homo sapien
aagtgatccccctatcttgatctcc

SEQ ID NO: 4179931 - DNA, 25 bp, Homo sapien
ccactgcactcagcccttttttttt

SEQ ID NO: 4179932 - DNA, 25 bp, Homo sapien
tggttgccttcgatagtggctattt

SEQ ID NO: 4179933 - DNA, 25 bp, Homo sapien
cagctggttgccttcgatagtggct

SEQ ID NO: 4179934 - DNA, 25 bp, Homo sapien
cagatggcacagttgttccacacca

SEQ ID NO: 4179935 - DNA, 25 bp, Homo sapien
ggcacagttgttccacaccagctgg

SEQ ID NO: 4179936 - DNA, 25 bp, Homo sapien
gccgtcttggctacagaatctgcga

SEQ ID NO: 4179937 - DNA, 25 bp, Homo sapien
ctccttgcttttgccggaaaggaga

SEQ ID NO: 4179938 - DNA, 25 bp, Homo sapien
gccccagccgccgtgtgatttagca

SEQ ID NO: 4179939 - DNA, 25 bp, Homo sapien
cacttaagtcttctcgccggatgct

SEQ ID NO: 4179940 - DNA, 25 bp, Homo sapien
gggctgcggcgggaactgccgagcg

SEQ ID NO: 4179941 - DNA, 25 bp, Homo sapien
cgggaactgccgagcgggcttgact

SEQ ID NO: 4179942 - DNA, 25 bp, Homo sapien
ctggctgtatctcgggggctgcggc

SEQ ID NO: 4179943 - DNA, 25 bp, Homo sapien
gcgggcttgactggacgcactgcct

SEQ ID NO: 4179944 - DNA, 25 bp, Homo sapien
taagaggaagttgtcccgagtggct

SEQ ID NO: 4179945 - DNA, 25 bp, Homo sapien
gcgcgagagactcaccggctcctgg

SEQ ID NO: 4179946 - DNA, 25 bp, Homo sapien
ataagaggaagttgtcccgagtggc

SEQ ID NO: 4179947 - DNA, 25 bp, Homo sapien
gcttgggtctggagatagcgcgaga

SEQ ID NO: 4179948 - DNA, 25 bp, Homo sapien
tgtggacctttgcagtgaatgtcac

SEQ ID NO: 4179949 - DNA, 25 bp, Homo sapien
gctgtggacctttgcagtgaatgtc

SEQ ID NO: 4179950 - DNA, 25 bp, Homo sapien
caagcccccaggatgtgttcggagt

SEQ ID NO: 4179951 - DNA, 25 bp, Homo sapien
ccaacaagcccccaggatgtgttcg

SEQ ID NO: 4179952 - DNA, 25 bp, Homo sapien
ttgagagttctgctcacatctacag

SEQ ID NO: 4179953 - DNA, 25 bp, Homo sapien
atgtgactttgagagttctgctcac

SEQ ID NO: 4179954 - DNA, 25 bp, Homo sapien
agttctgctcacatctacagggtca

SEQ ID NO: 4179955 - DNA, 25 bp, Homo sapien
tgctcacatctacagggtcaaccaa

SEQ ID NO: 4179956 - DNA, 25 bp, Homo sapien
gattagttgcgctcactgaagcagt

SEQ ID NO: 4179957 - DNA, 25 bp, Homo sapien
tgtccctggaccatgctgatcagat

SEQ ID NO: 4179958 - DNA, 25 bp, Homo sapien
gatgcagcagcagattcccctcttg

SEQ ID NO: 4179959 - DNA, 25 bp, Homo sapien
aactctcaactgtccctggaccatg

SEQ ID NO: 4179960 - DNA, 25 bp, Homo sapien
caggtcagagggctatgacttgcaa

SEQ ID NO: 4179961 - DNA, 25 bp, Homo sapien
tatgacttgcaagacatgaacaact

SEQ ID NO: 4179962 - DNA, 25 bp, Homo sapien
cagccagaagagctaaaataggttt

SEQ ID NO: 4179963 - DNA, 25 bp, Homo sapien
gtgcccagccagaagagctaaaata

SEQ ID NO: 4179964 - DNA, 25 bp, Homo sapien
gaccctctagaatcatatgcaatcc

SEQ ID NO: 4179965 - DNA, 25 bp, Homo sapien
caccagtgatgtgtggcctaaaggc

SEQ ID NO: 4179966 - DNA, 25 bp, Homo sapien
caccaatggcaaagaggagtttaca

SEQ ID NO: 4179967 - DNA, 25 bp, Homo sapien
caatgttcagcttggatagccccag

SEQ ID NO: 4179968 - DNA, 25 bp, Homo sapien
taaccagccctgaaaactagaacca

SEQ ID NO: 4179969 - DNA, 25 bp, Homo sapien
ggagcatctgttttgattcaccagg

SEQ ID NO: 4179970 - DNA, 25 bp, Homo sapien
tttgtatcactgaagggagcatctg

SEQ ID NO: 4179971 - DNA, 25 bp, Homo sapien
catttctgagcacattgaggttcta

SEQ ID NO: 4179972 - DNA, 25 bp, Homo sapien
ttatcatcagattgatgtgtgttgt

SEQ ID NO: 4179973 - DNA, 25 bp, Homo sapien
tatcatcagattgatgtgtgttgtc

SEQ ID NO: 4179974 - DNA, 25 bp, Homo sapien
ctccaattatcatcagattgatgtg

SEQ ID NO: 4179975 - DNA, 25 bp, Homo sapien
caattatcatcagattgatgtgtgt

SEQ ID NO: 4179976 - DNA, 25 bp, Homo sapien
tttgggtggcttagaaactgccaca

SEQ ID NO: 4179977 - DNA, 25 bp, Homo sapien
tgggtggcttagaaactgccacagg

SEQ ID NO: 4179978 - DNA, 25 bp, Homo sapien
ggtggcttagaaactgccacaggat

SEQ ID NO: 4179979 - DNA, 25 bp, Homo sapien
ctctttgggtggcttagaaactgcc

SEQ ID NO: 4179980 - DNA, 25 bp, Homo sapien
ctgatacccgagtgtaaacctgtgg

SEQ ID NO: 4179981 - DNA, 25 bp, Homo sapien
tggcccatggaccaggggaatatgg

SEQ ID NO: 4179982 - DNA, 25 bp, Homo sapien
catggaccaggggaatatggaaatt

SEQ ID NO: 4179983 - DNA, 25 bp, Homo sapien
gcccatggaccaggggaatatggaa

SEQ ID NO: 4179984 - DNA, 25 bp, Homo sapien
tgtgtccagctacagcctgatgtcc

SEQ ID NO: 4179985 - DNA, 25 bp, Homo sapien
gggtctgatatccacccagagtctg

SEQ ID NO: 4179986 - DNA, 25 bp, Homo sapien
cttttgttcccctgaatcatgggtg

SEQ ID NO: 4179987 - DNA, 25 bp, Homo sapien
aagttcacctgggtccttgtgtcca

SEQ ID NO: 4179988 - DNA, 25 bp, Homo sapien
cgtaggtatccacttaggaattagt

SEQ ID NO: 4179989 - DNA, 25 bp, Homo sapien
cttgggcctgatgtcaaacttgggc

SEQ ID NO: 4179990 - DNA, 25 bp, Homo sapien
tcaaacttgggcgtaggtatccact

SEQ ID NO: 4179991 - DNA, 25 bp, Homo sapien
gcatctgccttgagcctgatggccc

SEQ ID NO: 4179992 - DNA, 25 bp, Homo sapien
ttttatcaccccgggccctgatgtc

SEQ ID NO: 4179993 - DNA, 25 bp, Homo sapien
gacctggggcctaggtgtccacttc

SEQ ID NO: 4179994 - DNA, 25 bp, Homo sapien
cgatgtccatctagtgcctggtgtc

SEQ ID NO: 4179995 - DNA, 25 bp, Homo sapien
cacttgggacctgggtattgacctg

SEQ ID NO: 4179996 - DNA, 25 bp, Homo sapien
atggtcctccggcagggcatcctgg

SEQ ID NO: 4179997 - DNA, 25 bp, Homo sapien
tgccatggtcctccggcagggcatc

SEQ ID NO: 4179998 - DNA, 25 bp, Homo sapien
ggtgccatggtcctccggcagggca

SEQ ID NO: 4179999 - DNA, 25 bp, Homo sapien
ggtcctccggcagggcatcctggat

SEQ ID NO: 4180000 - DNA, 25 bp, Homo sapien
ctactcgggtgaccagaggctccta

SEQ ID NO: 4180001 - DNA, 25 bp, Homo sapien
tactcgggtgaccagaggctcctac

SEQ ID NO: 4180002 - DNA, 25 bp, Homo sapien
tgatggtgggatcaggcttacctga

SEQ ID NO: 4180003 - DNA, 25 bp, Homo sapien
agaggacccagtcatgcacaggagc

SEQ ID NO: 4180004 - DNA, 25 bp, Homo sapien
ggagatgttcctgacaggcctgagc

SEQ ID NO: 4180005 - DNA, 25 bp, Homo sapien
ctcagtgctagcaccagaggaccca

SEQ ID NO: 4180006 - DNA, 25 bp, Homo sapien
cctggcagagagcttcacggagcca

SEQ ID NO: 4180007 - DNA, 25 bp, Homo sapien
tcctggcagagagcttcacggagcc

SEQ ID NO: 4180008 - DNA, 25 bp, Homo sapien
ttcatccctaagggactgacactgc

SEQ ID NO: 4180009 - DNA, 25 bp, Homo sapien
ggcaccatgccagggggtgtcactc

SEQ ID NO: 4180010 - DNA, 25 bp, Homo sapien
ccaaatgctgccgggcctgagagtg

SEQ ID NO: 4180011 - DNA, 25 bp, Homo sapien
tcctgtgccaagagagcccaaatgc

SEQ ID NO: 4180012 - DNA, 25 bp, Homo sapien
ctccaatcctgtgccaagagagccc

SEQ ID NO: 4180013 - DNA, 25 bp, Homo sapien
tgatcgcaaaatatcggcaaaaggc

SEQ ID NO: 4180014 - DNA, 25 bp, Homo sapien
aatatcggcaaaaggcgagaggtga

SEQ ID NO: 4180015 - DNA, 25 bp, Homo sapien
tctcagaataagcttgcttgcagca

SEQ ID NO: 4180016 - DNA, 25 bp, Homo sapien
cagcaatctcgatgatcgcaaaata

SEQ ID NO: 4180017 - DNA, 25 bp, Homo sapien
caactgcacagattgtatagtgtcc

SEQ ID NO: 4180018 - DNA, 25 bp, Homo sapien
tacctgtgcataacatgggaagaca

SEQ ID NO: 4180019 - DNA, 25 bp, Homo sapien
tgccccgcagagtgcctggtattaa

SEQ ID NO: 4180020 - DNA, 25 bp, Homo sapien
tctactcatcgccaagcaaacgctg

SEQ ID NO: 4180021 - DNA, 25 bp, Homo sapien
ggacagcccagcaaggatggtctgc

SEQ ID NO: 4180022 - DNA, 25 bp, Homo sapien
cagggacagcccagcaaggatggtc

SEQ ID NO: 4180023 - DNA, 25 bp, Homo sapien
gcaaggatggtctgcagttctggat

SEQ ID NO: 4180024 - DNA, 25 bp, Homo sapien
caaggatggtctgcagttctggatc

SEQ ID NO: 4180025 - DNA, 25 bp, Homo sapien
acagtcaggaacatgtctactatac

SEQ ID NO: 4180026 - DNA, 25 bp, Homo sapien
gacgctgtcataagaggcaagcttg

SEQ ID NO: 4180027 - DNA, 25 bp, Homo sapien
tcacagtcaggaacatgtctactat

SEQ ID NO: 4180028 - DNA, 25 bp, Homo sapien
gatgacgctgtcataagaggcaagc

SEQ ID NO: 4180029 - DNA, 25 bp, Homo sapien
catctgatgatgaaatccttagaat

SEQ ID NO: 4180030 - DNA, 25 bp, Homo sapien
ttgtacttcccatctgatgatgaaa

SEQ ID NO: 4180031 - DNA, 25 bp, Homo sapien
atgatgaaatccttagaatggaggg

SEQ ID NO: 4180032 - DNA, 25 bp, Homo sapien
tttgtacttcccatctgatgatgaa

SEQ ID NO: 4180033 - DNA, 25 bp, Homo sapien
ctgccaggtgacagccacaggctga

SEQ ID NO: 4180034 - DNA, 25 bp, Homo sapien
ccaggtgacagccacaggctgagaa

SEQ ID NO: 4180035 - DNA, 25 bp, Homo sapien
tgacgccaccataccattcctgagg

SEQ ID NO: 4180036 - DNA, 25 bp, Homo sapien
cataccattcctgaggggtggtgcc

SEQ ID NO: 4180037 - DNA, 25 bp, Homo sapien
gagattcgactgttctgctgcacac

SEQ ID NO: 4180038 - DNA, 25 bp, Homo sapien
aggatggaacagatcatgagattcg

SEQ ID NO: 4180039 - DNA, 25 bp, Homo sapien
ggatggaacagatcatgagattcga

SEQ ID NO: 4180040 - DNA, 25 bp, Homo sapien
catgagattcgactgttctgctgca

SEQ ID NO: 4180041 - DNA, 25 bp, Homo sapien
cagatgtagggattgaatgtggttg

SEQ ID NO: 4180042 - DNA, 25 bp, Homo sapien
aggatttgcagatgtagggattgaa

SEQ ID NO: 4180043 - DNA, 25 bp, Homo sapien
gtagggattgaatgtggttgccctt

SEQ ID NO: 4180044 - DNA, 25 bp, Homo sapien
tttgcagatgtagggattgaatgtg

SEQ ID NO: 4180045 - DNA, 25 bp, Homo sapien
tgcccacggcactctcctgtttgtc

SEQ ID NO: 4180046 - DNA, 25 bp, Homo sapien
atctgcccacggcactctcctgttt

SEQ ID NO: 4180047 - DNA, 25 bp, Homo sapien
tctgcccacggcactctcctgtttg

SEQ ID NO: 4180048 - DNA, 25 bp, Homo sapien
ccatctgcccacggcactctcctgt

SEQ ID NO: 4180049 - DNA, 25 bp, Homo sapien
atgactcctttgaggaagttgagag

SEQ ID NO: 4180050 - DNA, 25 bp, Homo sapien
attgatgactcctttgaggaagttg

SEQ ID NO: 4180051 - DNA, 25 bp, Homo sapien
tgatgactcctttgaggaagttgag

SEQ ID NO: 4180052 - DNA, 25 bp, Homo sapien
cccgaattgatgactcctttgagga

SEQ ID NO: 4180053 - DNA, 25 bp, Homo sapien
tgagataaggacaaaataaaatgtc

SEQ ID NO: 4180054 - DNA, 25 bp, Homo sapien
tagaaaagagggttgagaaatcgga

SEQ ID NO: 4180055 - DNA, 25 bp, Homo sapien
ctagaaaagagggttgagaaatcgg

SEQ ID NO: 4180056 - DNA, 25 bp, Homo sapien
aaacaaataaaccaacacccagcat

SEQ ID NO: 4180057 - DNA, 25 bp, Homo sapien
tgagaaatcggaaacaaataaacca

SEQ ID NO: 4180058 - DNA, 25 bp, Homo sapien
gtctgtagagattgggcaccttttg

SEQ ID NO: 4180059 - DNA, 25 bp, Homo sapien
tgggtctgtagagattgggcacctt

SEQ ID NO: 4180060 - DNA, 25 bp, Homo sapien
tctgtagagattgggcaccttttgc

SEQ ID NO: 4180061 - DNA, 25 bp, Homo sapien
tgtgggtctgtagagattgggcacc

SEQ ID NO: 4180062 - DNA, 25 bp, Homo sapien
cagcccagcaaggaccagctgccgt

SEQ ID NO: 4180063 - DNA, 25 bp, Homo sapien
agcccagcaaggaccagctgccgtt

SEQ ID NO: 4180064 - DNA, 25 bp, Homo sapien
gcaaggaccagctgccgttctggat

SEQ ID NO: 4180065 - DNA, 25 bp, Homo sapien
ccagcaaggaccagctgccgttctg

SEQ ID NO: 4180066 - DNA, 25 bp, Homo sapien
ttggagaggaagaagtacatggggg

SEQ ID NO: 4180067 - DNA, 25 bp, Homo sapien
tggggaggtgggagtcagggctgac

SEQ ID NO: 4180068 - DNA, 25 bp, Homo sapien
gaccgtggtggaggtgaaaccgatg

SEQ ID NO: 4180069 - DNA, 25 bp, Homo sapien
gaaaccgatgtcaggcaaggacagg

SEQ ID NO: 4180070 - DNA, 25 bp, Homo sapien
catagaagatgactctgccgtgaga

SEQ ID NO: 4180071 - DNA, 25 bp, Homo sapien
tagaagatgactctgccgtgagatt

SEQ ID NO: 4180072 - DNA, 25 bp, Homo sapien
gaagatgactctgccgtgagattgg

SEQ ID NO: 4180073 - DNA, 25 bp, Homo sapien
gcatagaagatgactctgccgtgag

SEQ ID NO: 4180074 - DNA, 25 bp, Homo sapien
tagagggtgacagatggctacaaac

SEQ ID NO: 4180075 - DNA, 25 bp, Homo sapien
gctggctgaatgacatagagggtga

SEQ ID NO: 4180076 - DNA, 25 bp, Homo sapien
tgctggctgaatgacatagagggtg

SEQ ID NO: 4180077 - DNA, 25 bp, Homo sapien
agggtgacagatggctacaaaccgg

SEQ ID NO: 4180078 - DNA, 25 bp, Homo sapien
gagaaaagggtccccgagatctgaa

SEQ ID NO: 4180079 - DNA, 25 bp, Homo sapien
aagagaaaagggtccccgagatctg

SEQ ID NO: 4180080 - DNA, 25 bp, Homo sapien
gaaaagggtccccgagatctgaaga

SEQ ID NO: 4180081 - DNA, 25 bp, Homo sapien
ggtccccgagatctgaagaaaacca

SEQ ID NO: 4180082 - DNA, 25 bp, Homo sapien
ttagaccttgctgccttgcggccgc

SEQ ID NO: 4180083 - DNA, 25 bp, Homo sapien
ttgctgccttgcggccgccgcagaa

SEQ ID NO: 4180084 - DNA, 25 bp, Homo sapien
gccgcagaacacttttaatatcccc

SEQ ID NO: 4180085 - DNA, 25 bp, Homo sapien
cgcagaacacttttaatatccccgt

SEQ ID NO: 4180086 - DNA, 25 bp, Homo sapien
gtacatggttgtgtggagcggggac

SEQ ID NO: 4180087 - DNA, 25 bp, Homo sapien
acatggttgtgtggagcggggactc

SEQ ID NO: 4180088 - DNA, 25 bp, Homo sapien
tggttgtgtggagcggggactcaga

SEQ ID NO: 4180089 - DNA, 25 bp, Homo sapien
tgtgtggagcggggactcagagcgg

SEQ ID NO: 4180090 - DNA, 25 bp, Homo sapien
tgaaatccttagaatggaggggacg

SEQ ID NO: 4180091 - DNA, 25 bp, Homo sapien
tagaatggaggggacgattttatag

SEQ ID NO: 4180092 - DNA, 25 bp, Homo sapien
atccttagaatggaggggacgattt

SEQ ID NO: 4180093 - DNA, 25 bp, Homo sapien
tggaggggacgattttatagtaaga

SEQ ID NO: 4180094 - DNA, 25 bp, Homo sapien
tcagcaaaaaactgctaggtgagag

SEQ ID NO: 4180095 - DNA, 25 bp, Homo sapien
caaaaaactgctaggtgagagccat

SEQ ID NO: 4180096 - DNA, 25 bp, Homo sapien
aaaaactgctaggtgagagccatag

SEQ ID NO: 4180097 - DNA, 25 bp, Homo sapien
aaactgctaggtgagagccataggt

SEQ ID NO: 4180098 - DNA, 25 bp, Homo sapien
ccacagcttacatcactgacaccac

SEQ ID NO: 4180099 - DNA, 25 bp, Homo sapien
cagcttacatcactgacaccaccac

SEQ ID NO: 4180100 - DNA, 25 bp, Homo sapien
cattcctgaggggtggtgccacagc

SEQ ID NO: 4180101 - DNA, 25 bp, Homo sapien
gtgaccacagcttacatcactgaca

SEQ ID NO: 4180102 - DNA, 25 bp, Homo sapien
tcgtttggatacaaccctcttttgc

SEQ ID NO: 4180103 - DNA, 25 bp, Homo sapien
ggtctgtatcgtttggatacaaccc

SEQ ID NO: 4180104 - DNA, 25 bp, Homo sapien
tgtgggtctgtatcgtttggataca

SEQ ID NO: 4180105 - DNA, 25 bp, Homo sapien
tgtatcgtttggatacaaccctctt

SEQ ID NO: 4180106 - DNA, 25 bp, Homo sapien
cagcgacgaccggttgcagttctgg

SEQ ID NO: 4180107 - DNA, 25 bp, Homo sapien
aggaacagcccagcgacgaccggtt

SEQ ID NO: 4180108 - DNA, 25 bp, Homo sapien
aacagcccagcgacgaccggttgca

SEQ ID NO: 4180109 - DNA, 25 bp, Homo sapien
caggaacagcccagcgacgaccggt

SEQ ID NO: 4180110 - DNA, 25 bp, Homo sapien
ggatgatgagcaggttccccagcac

SEQ ID NO: 4180111 - DNA, 25 bp, Homo sapien
tgatgagcaggttccccagcaccat

SEQ ID NO: 4180112 - DNA, 25 bp, Homo sapien
gtccaggatgatgagcaggttcccc

SEQ ID NO: 4180113 - DNA, 25 bp, Homo sapien
aggatgatgagcaggttccccagca

SEQ ID NO: 4180114 - DNA, 25 bp, Homo sapien
tggggaggtgggagtcagggctgac

SEQ ID NO: 4180115 - DNA, 25 bp, Homo sapien
caaggacaggttggagaggaagaag

SEQ ID NO: 4180116 - DNA, 25 bp, Homo sapien
gaccgtggtggaggtgaaaccgatg

SEQ ID NO: 4180117 - DNA, 25 bp, Homo sapien
gaaaccgatgtcaggcaaggacagg

SEQ ID NO: 4180118 - DNA, 25 bp, Homo sapien
catagatgactctgctgtgagactg

SEQ ID NO: 4180119 - DNA, 25 bp, Homo sapien
aagagagacatcacagtcaggcagc

SEQ ID NO: 4180120 - DNA, 25 bp, Homo sapien
cagtcaggcagcctgcatagatgac

SEQ ID NO: 4180121 - DNA, 25 bp, Homo sapien
atggcaaagagagacatcacagtca

SEQ ID NO: 4180122 - DNA, 25 bp, Homo sapien
cagcagggaaatacatgctgatgtt

SEQ ID NO: 4180123 - DNA, 25 bp, Homo sapien
aatacggcagcagggaaatacatgc

SEQ ID NO: 4180124 - DNA, 25 bp, Homo sapien
agggaaatacatgctgatgttcctg

SEQ ID NO: 4180125 - DNA, 25 bp, Homo sapien
gcagggaaatacatgctgatgttcc

SEQ ID NO: 4180126 - DNA, 25 bp, Homo sapien
gataagaaggtattgagatgagact

SEQ ID NO: 4180127 - DNA, 25 bp, Homo sapien
ggaacagataagaaggtattgagat

SEQ ID NO: 4180128 - DNA, 25 bp, Homo sapien
gatgagactgtgctgccttgcggcc

SEQ ID NO: 4180129 - DNA, 25 bp, Homo sapien
agatgagactgtgctgccttgcggc

SEQ ID NO: 4180130 - DNA, 25 bp, Homo sapien
catattacttccaatgtcgcagggt

SEQ ID NO: 4180131 - DNA, 25 bp, Homo sapien
tacttccaatgtcgcagggtgtgta

SEQ ID NO: 4180132 - DNA, 25 bp, Homo sapien
tattacttccaatgtcgcagggtgt

SEQ ID NO: 4180133 - DNA, 25 bp, Homo sapien
aggatcatattacttccaatgtcgc

SEQ ID NO: 4180134 - DNA, 25 bp, Homo sapien
aggaccggctgcagttctggatcct

SEQ ID NO: 4180135 - DNA, 25 bp, Homo sapien
ggacagggacagggacagcaaagcg

SEQ ID NO: 4180136 - DNA, 25 bp, Homo sapien
agggacagcaaagcgaggaccggct

SEQ ID NO: 4180137 - DNA, 25 bp, Homo sapien
acagggacagcaaagcgaggaccgg

SEQ ID NO: 4180138 - DNA, 25 bp, Homo sapien
cagccgggatgctgagcaggttcct

SEQ ID NO: 4180139 - DNA, 25 bp, Homo sapien
ctgacagccgggatgctgagcaggt

SEQ ID NO: 4180140 - DNA, 25 bp, Homo sapien
tcctcagcactgtgaccagatacat

SEQ ID NO: 4180141 - DNA, 25 bp, Homo sapien
ccgggatgctgagcaggttcctcag

SEQ ID NO: 4180142 - DNA, 25 bp, Homo sapien
ggtagtgcagagggcgatagatgcc

SEQ ID NO: 4180143 - DNA, 25 bp, Homo sapien
cagagggcgatagatgcctacaaag

SEQ ID NO: 4180144 - DNA, 25 bp, Homo sapien
gctataccactgcatgtccacaatc

SEQ ID NO: 4180145 - DNA, 25 bp, Homo sapien
ttacagtcaggagcatgccttctat

SEQ ID NO: 4180146 - DNA, 25 bp, Homo sapien
ttgatgacgctgtcataagaggcaa

SEQ ID NO: 4180147 - DNA, 25 bp, Homo sapien
atgacgctgtcataagaggcaagtt

SEQ ID NO: 4180148 - DNA, 25 bp, Homo sapien
atgctattgatgacgctgtcataag

SEQ ID NO: 4180149 - DNA, 25 bp, Homo sapien
ttatagtaagatgaaaggatccctg

SEQ ID NO: 4180150 - DNA, 25 bp, Homo sapien
caaatgctaggtgagagccataggt

SEQ ID NO: 4180151 - DNA, 25 bp, Homo sapien
tgagagccataggtggagaaagttt

SEQ ID NO: 4180152 - DNA, 25 bp, Homo sapien
caaacaaatgctaggtgagagccat

SEQ ID NO: 4180153 - DNA, 25 bp, Homo sapien
ggtgagagccataggtggagaaagt

SEQ ID NO: 4180154 - DNA, 25 bp, Homo sapien
caccattcctgggggttggtgacat

SEQ ID NO: 4180155 - DNA, 25 bp, Homo sapien
ccacagcttacatcactgacaccac

SEQ ID NO: 4180156 - DNA, 25 bp, Homo sapien
cagcttacatcactgacaccaccac

SEQ ID NO: 4180157 - DNA, 25 bp, Homo sapien
ccattcctgggggttggtgacatag

SEQ ID NO: 4180158 - DNA, 25 bp, Homo sapien
tttttacgttggatacatgaagata

SEQ ID NO: 4180159 - DNA, 25 bp, Homo sapien
gggtttgcatgtcgctgtctagagc

SEQ ID NO: 4180160 - DNA, 25 bp, Homo sapien
ttatcgtagttctcatagaccaggg

SEQ ID NO: 4180161 - DNA, 25 bp, Homo sapien
agcccggatctgctgcaccatgtcc

SEQ ID NO: 4180162 - DNA, 25 bp, Homo sapien
cggatctgctgcaccatgtccgtct

SEQ ID NO: 4180163 - DNA, 25 bp, Homo sapien
cctgcaggatgacatgaatgcacct

SEQ ID NO: 4180164 - DNA, 25 bp, Homo sapien
tgcaggatgacatgaatgcaccttc

SEQ ID NO: 4180165 - DNA, 25 bp, Homo sapien
ctgcaggatgacatgaatgcacctt

SEQ ID NO: 4180166 - DNA, 25 bp, Homo sapien
ctgcccaggcccaagcagtcgctgt

SEQ ID NO: 4180167 - DNA, 25 bp, Homo sapien
aggcccaagcagtcgctgtcccctg

SEQ ID NO: 4180168 - DNA, 25 bp, Homo sapien
cctggcctgcgctgcgctcacctgc

SEQ ID NO: 4180169 - DNA, 25 bp, Homo sapien
ctgcgctgcgctcacctgcccaggc

SEQ ID NO: 4180170 - DNA, 25 bp, Homo sapien
ggagctgggcatcagggcgggcgcg

SEQ ID NO: 4180171 - DNA, 25 bp, Homo sapien
cggagctgggcatcagggcgggcgc

SEQ ID NO: 4180172 - DNA, 25 bp, Homo sapien
ctgggcatcagggcgggcgcggact

SEQ ID NO: 4180173 - DNA, 25 bp, Homo sapien
agctgggcatcagggcgggcgcgga

SEQ ID NO: 4180174 - DNA, 25 bp, Homo sapien
ctgggtgccggtcttcttcctgcct

SEQ ID NO: 4180175 - DNA, 25 bp, Homo sapien
agtcctcgggctgcgcgcttcccct

SEQ ID NO: 4180176 - DNA, 25 bp, Homo sapien
tgcgcgcttcccctctccagcaaca

SEQ ID NO: 4180177 - DNA, 25 bp, Homo sapien
tgggtgccggtcttcttcctgcctg

SEQ ID NO: 4180178 - DNA, 25 bp, Homo sapien
gggctcattcaccacgaatccaatt

SEQ ID NO: 4180179 - DNA, 25 bp, Homo sapien
gaagtcaaccccattatccatcaaa

SEQ ID NO: 4180180 - DNA, 25 bp, Homo sapien
attattaagacaagttcagctgagc

SEQ ID NO: 4180181 - DNA, 25 bp, Homo sapien
ttcagctgagcaaatggtcaaacat

SEQ ID NO: 4180182 - DNA, 25 bp, Homo sapien
tgtctcttttgatgcaccccagaac

SEQ ID NO: 4180183 - DNA, 25 bp, Homo sapien
tgccatgtcagccagctaaggaggg

SEQ ID NO: 4180184 - DNA, 25 bp, Homo sapien
tggtcttaaattccttggcacaagt

SEQ ID NO: 4180185 - DNA, 25 bp, Homo sapien
caaggctaagtgcttctatggacga

SEQ ID NO: 4180186 - DNA, 25 bp, Homo sapien
aagaaatcactgctggtcctcacac

SEQ ID NO: 4180187 - DNA, 25 bp, Homo sapien
cctcaaagaaatcactgctggtcct

SEQ ID NO: 4180188 - DNA, 25 bp, Homo sapien
tcctcaaagaaatcactgctggtcc

SEQ ID NO: 4180189 - DNA, 25 bp, Homo sapien
tcctcctcaaagaaatcactgctgg

SEQ ID NO: 4180190 - DNA, 25 bp, Homo sapien
tctcggctgactgcaagctctgtct

SEQ ID NO: 4180191 - DNA, 25 bp, Homo sapien
gagacagttccgccatgttggccag

SEQ ID NO: 4180192 - DNA, 25 bp, Homo sapien
cgccagcctcgacctgccaaagtgc

SEQ ID NO: 4180193 - DNA, 25 bp, Homo sapien
gtcacccaggctggctgacgtgcag

SEQ ID NO: 4180194 - DNA, 25 bp, Homo sapien
taatctaagactgtcgcggtacaaa

SEQ ID NO: 4180195 - DNA, 25 bp, Homo sapien
actgtcgcggtacaaagataagcat

SEQ ID NO: 4180196 - DNA, 25 bp, Homo sapien
cccttttcttgagagccagatggta

SEQ ID NO: 4180197 - DNA, 25 bp, Homo sapien
aagactgtcgcggtacaaagataag

SEQ ID NO: 4180198 - DNA, 25 bp, Homo sapien
ccaggcctagcttccagtctcgggc

SEQ ID NO: 4180199 - DNA, 25 bp, Homo sapien
gccaggcctagcttccagtctcggg

SEQ ID NO: 4180200 - DNA, 25 bp, Homo sapien
atcaggcacacagatggatccaaga

SEQ ID NO: 4180201 - DNA, 25 bp, Homo sapien
atgaatcaggcacacagatggatcc

SEQ ID NO: 4180202 - DNA, 25 bp, Homo sapien
ggcacacagatggatccaagacaat

SEQ ID NO: 4180203 - DNA, 25 bp, Homo sapien
ctggaactgttgttgacaaaatcca

SEQ ID NO: 4180204 - DNA, 25 bp, Homo sapien
aacgctggaactgttgttgacaaaa

SEQ ID NO: 4180205 - DNA, 25 bp, Homo sapien
ctaaacgctggaactgttgttgaca

SEQ ID NO: 4180206 - DNA, 25 bp, Homo sapien
tggaactgttgttgacaaaatccag

SEQ ID NO: 4180207 - DNA, 25 bp, Homo sapien
tatgctctccacgttatctgcagca

SEQ ID NO: 4180208 - DNA, 25 bp, Homo sapien
cataaggcacttgttcttaacaact

SEQ ID NO: 4180209 - DNA, 25 bp, Homo sapien
agaaaatggatcaattattttcttc

SEQ ID NO: 4180210 - DNA, 25 bp, Homo sapien
tcttagaaaatggatcaattatttt

SEQ ID NO: 4180211 - DNA, 25 bp, Homo sapien
taaggcacttgttcttaacaactgc

SEQ ID NO: 4180212 - DNA, 25 bp, Homo sapien
tgaacatagcaggtgctttcacatc

SEQ ID NO: 4180213 - DNA, 25 bp, Homo sapien
catagcaggtgctttcacatcatac

SEQ ID NO: 4180214 - DNA, 25 bp, Homo sapien
aacatagcaggtgctttcacatcat

SEQ ID NO: 4180215 - DNA, 25 bp, Homo sapien
ctatattgaacatagcaggtgcttt

SEQ ID NO: 4180216 - DNA, 25 bp, Homo sapien
ttgggtcctggtgaccaagtctttc

SEQ ID NO: 4180217 - DNA, 25 bp, Homo sapien
cttgggtcctggtgaccaagtcttt

SEQ ID NO: 4180218 - DNA, 25 bp, Homo sapien
cctggtgaccaagtctttccaatat

SEQ ID NO: 4180219 - DNA, 25 bp, Homo sapien
ggtgaccaagtctttccaatatttc

SEQ ID NO: 4180220 - DNA, 25 bp, Homo sapien
caggaaagacccatgccatagaagt

SEQ ID NO: 4180221 - DNA, 25 bp, Homo sapien
atcattgttgaacagttttcaaaca

SEQ ID NO: 4180222 - DNA, 25 bp, Homo sapien
aaagacccatgccatagaagttagt

SEQ ID NO: 4180223 - DNA, 25 bp, Homo sapien
caatcattgttgaacagttttcaaa

SEQ ID NO: 4180224 - DNA, 25 bp, Homo sapien
gctgagcataagacgtcttcagtat

SEQ ID NO: 4180225 - DNA, 25 bp, Homo sapien
agacgtcttcagtatctgattgttg

SEQ ID NO: 4180226 - DNA, 25 bp, Homo sapien
acgtcttcagtatctgattgttgtg

SEQ ID NO: 4180227 - DNA, 25 bp, Homo sapien
gtgctgagcataagacgtcttcagt

SEQ ID NO: 4180228 - DNA, 25 bp, Homo sapien
tcccatttgtggagtctcttgcatc

SEQ ID NO: 4180229 - DNA, 25 bp, Homo sapien
tcttgcatctcaagcaccttgcagt

SEQ ID NO: 4180230 - DNA, 25 bp, Homo sapien
cagaggccgaatcccatttgtggag

SEQ ID NO: 4180231 - DNA, 25 bp, Homo sapien
ctacatacttttgggattcattgca

SEQ ID NO: 4180232 - DNA, 25 bp, Homo sapien
tagaagttaatgaggtttcctcctc

SEQ ID NO: 4180233 - DNA, 25 bp, Homo sapien
agcaaaggataaggagacctggctg

SEQ ID NO: 4180234 - DNA, 25 bp, Homo sapien
agggaagcaaaggataaggagacct

SEQ ID NO: 4180235 - DNA, 25 bp, Homo sapien
ggatcccctactagaccctgacata

SEQ ID NO: 4180236 - DNA, 25 bp, Homo sapien
aaattgccaaaacaaagcggctaca

SEQ ID NO: 4180237 - DNA, 25 bp, Homo sapien
ctgatgagggcagtttgtattaata

SEQ ID NO: 4180238 - DNA, 25 bp, Homo sapien
gctgatgagggcagtttgtattaat

SEQ ID NO: 4180239 - DNA, 25 bp, Homo sapien
agagctgatgagggcagtttgtatt

SEQ ID NO: 4180240 - DNA, 25 bp, Homo sapien
cccagggaataaatcgtgactgttc

SEQ ID NO: 4180241 - DNA, 25 bp, Homo sapien
tacaagtccctgtatgaaaccatac

SEQ ID NO: 4180242 - DNA, 25 bp, Homo sapien
cattcacaacgttaagcaatcatca

SEQ ID NO: 4180243 - DNA, 25 bp, Homo sapien
gccattgctcctagcagtatttttt

SEQ ID NO: 4180244 - DNA, 25 bp, Homo sapien
gaaaccatacacttcagtatcatta

SEQ ID NO: 4180245 - DNA, 25 bp, Homo sapien
tattctactttatcggagagcctga

SEQ ID NO: 4180246 - DNA, 25 bp, Homo sapien
catgactgaagttgcgctgcgacct

SEQ ID NO: 4180247 - DNA, 25 bp, Homo sapien
gaggctgatctaactgacactgcaa

SEQ ID NO: 4180248 - DNA, 25 bp, Homo sapien
tcttgacagtcatgagcaggaatag

SEQ ID NO: 4180249 - DNA, 25 bp, Homo sapien
aagccctggaaggagatcagcagca

SEQ ID NO: 4180250 - DNA, 25 bp, Homo sapien
gccctggaaggagatcagcagcagc

SEQ ID NO: 4180251 - DNA, 25 bp, Homo sapien
ctagtcccagcggaagccctggaag

SEQ ID NO: 4180252 - DNA, 25 bp, Homo sapien
agtcccagcggaagccctggaagga

SEQ ID NO: 4180253 - DNA, 25 bp, Homo sapien
caaagggtggcatgaggtacctggc

SEQ ID NO: 4180254 - DNA, 25 bp, Homo sapien
gtgacaaagggtggcatgaggtacc

SEQ ID NO: 4180255 - DNA, 25 bp, Homo sapien
gacaaagggtggcatgaggtacctg

SEQ ID NO: 4180256 - DNA, 25 bp, Homo sapien
tccccggctagacggtccagattgg

SEQ ID NO: 4180257 - DNA, 25 bp, Homo sapien
gatggcggtgaagcgggaccgggag

SEQ ID NO: 4180258 - DNA, 25 bp, Homo sapien
gcggtgaagcgggaccgggaggtca

SEQ ID NO: 4180259 - DNA, 25 bp, Homo sapien
cggtgaagcgggaccgggaggtcat

SEQ ID NO: 4180260 - DNA, 25 bp, Homo sapien
ccgggatggcggtgaagcgggaccg

SEQ ID NO: 4180261 - DNA, 25 bp, Homo sapien
tattccaggaatgacggacgctggg

SEQ ID NO: 4180262 - DNA, 25 bp, Homo sapien
gctttgatgggcaccgggtgaaatg

SEQ ID NO: 4180263 - DNA, 25 bp, Homo sapien
gatgggcaccgggtgaaatgggcag

SEQ ID NO: 4180264 - DNA, 25 bp, Homo sapien
ttcttattccaggaatgacggacgc

SEQ ID NO: 4180265 - DNA, 25 bp, Homo sapien
caaaatcttgtgctgttgcccaaac

SEQ ID NO: 4180266 - DNA, 25 bp, Homo sapien
tttgagacaaaatcttgtgctgttg

SEQ ID NO: 4180267 - DNA, 25 bp, Homo sapien
aaatcttgtgctgttgcccaaactg

SEQ ID NO: 4180268 - DNA, 25 bp, Homo sapien
gacaaaatcttgtgctgttgcccaa

SEQ ID NO: 4180269 - DNA, 25 bp, Homo sapien
gaagatgactggatacgggcacgga

SEQ ID NO: 4180270 - DNA, 25 bp, Homo sapien
aagatgactggatacgggcacggag

SEQ ID NO: 4180271 - DNA, 25 bp, Homo sapien
ggaagatgactggatacgggcacgg

SEQ ID NO: 4180272 - DNA, 25 bp, Homo sapien
agctagggtctaatacggatgtgat

SEQ ID NO: 4180273 - DNA, 25 bp, Homo sapien
ggtctaatacggatgtgatgattca

SEQ ID NO: 4180274 - DNA, 25 bp, Homo sapien
ttttgcctgagcaacagctagggtc

SEQ ID NO: 4180275 - DNA, 25 bp, Homo sapien
gcctgagcaacagctagggtctaat

SEQ ID NO: 4180276 - DNA, 25 bp, Homo sapien
agaaatacttattgcaggccgggca

SEQ ID NO: 4180277 - DNA, 25 bp, Homo sapien
atgtgaagcaccatgtgtggcccac

SEQ ID NO: 4180278 - DNA, 25 bp, Homo sapien
taggccctgagcaatgatcctcctg

SEQ ID NO: 4180279 - DNA, 25 bp, Homo sapien
tgtggtcttatgcacccggtgtccc

SEQ ID NO: 4180280 - DNA, 25 bp, Homo sapien
cctcagaattgcttttattcttggt

SEQ ID NO: 4180281 - DNA, 25 bp, Homo sapien
cagaattgcttttattcttggtgag

SEQ ID NO: 4180282 - DNA, 25 bp, Homo sapien
tcagaattgcttttattcttggtga

SEQ ID NO: 4180283 - DNA, 25 bp, Homo sapien
gaattgcttttattcttggtgagaa

SEQ ID NO: 4180284 - DNA, 25 bp, Homo sapien
cagtgatggagcagtaagtacagag

SEQ ID NO: 4180285 - DNA, 25 bp, Homo sapien
gtgatggagcagtaagtacagagtt

SEQ ID NO: 4180286 - DNA, 25 bp, Homo sapien
agtgatggagcagtaagtacagagt

SEQ ID NO: 4180287 - DNA, 25 bp, Homo sapien
aaaaagtgagattgtgaaaatgttc

SEQ ID NO: 4180288 - DNA, 25 bp, Homo sapien
aataaaaagtgagattgtgaaaatg

SEQ ID NO: 4180289 - DNA, 25 bp, Homo sapien
cctcaatcactttgcaataaaaagt

SEQ ID NO: 4180290 - DNA, 25 bp, Homo sapien
ctttgcaataaaaagtgagattgtg

SEQ ID NO: 4180291 - DNA, 25 bp, Homo sapien
cacagtctgtggcttatggctataa

SEQ ID NO: 4180292 - DNA, 25 bp, Homo sapien
tcaaccagggtgtgattttgctccc

SEQ ID NO: 4180293 - DNA, 25 bp, Homo sapien
gactttgggataccatcacttacca

SEQ ID NO: 4180294 - DNA, 25 bp, Homo sapien
gacagactcatgactgatggcaaca

SEQ ID NO: 4180295 - DNA, 25 bp, Homo sapien
ctgtgtctggcgctttgttgatctc

SEQ ID NO: 4180296 - DNA, 25 bp, Homo sapien
gatctccaggcctttttcagcagct

SEQ ID NO: 4180297 - DNA, 25 bp, Homo sapien
tcagtgcacctgtgtctggcgcttt

SEQ ID NO: 4180298 - DNA, 25 bp, Homo sapien
gcacctgtgtctggcgctttgttga

SEQ ID NO: 4180299 - DNA, 25 bp, Homo sapien
catctcattaccaagctgggttatt

SEQ ID NO: 4180300 - DNA, 25 bp, Homo sapien
tatcttcaatatttagccagtcttc

SEQ ID NO: 4180301 - DNA, 25 bp, Homo sapien
ctatttgataatgaagctctctgtg

SEQ ID NO: 4180302 - DNA, 25 bp, Homo sapien
cctaaatgagtgtttagaatagtta

SEQ ID NO: 4180303 - DNA, 25 bp, Homo sapien
catgcatttcaacaaggtcctcagt

SEQ ID NO: 4180304 - DNA, 25 bp, Homo sapien
ggtgagcttcctaaaccaatgcaga

SEQ ID NO: 4180305 - DNA, 25 bp, Homo sapien
ctggtcctcactgaagcttgctact

SEQ ID NO: 4180306 - DNA, 25 bp, Homo sapien
actgagcctcccagctgagaacatg

SEQ ID NO: 4180307 - DNA, 25 bp, Homo sapien
cacttgccagatgagccgggtgtca

SEQ ID NO: 4180308 - DNA, 25 bp, Homo sapien
ccgggaatggcagaacgagacacaa

SEQ ID NO: 4180309 - DNA, 25 bp, Homo sapien
ccgtgggttcactctgctggcagcg

SEQ ID NO: 4180310 - DNA, 25 bp, Homo sapien
ttgcagagttggcagatggcccagc

SEQ ID NO: 4180311 - DNA, 25 bp, Homo sapien
cattggtaagtattcaacaagcttg

SEQ ID NO: 4180312 - DNA, 25 bp, Homo sapien
ggcacattggtaagtattcaacaag

SEQ ID NO: 4180313 - DNA, 25 bp, Homo sapien
tggtaagtattcaacaagcttgatt

SEQ ID NO: 4180314 - DNA, 25 bp, Homo sapien
gtgggcacattggtaagtattcaac

SEQ ID NO: 4180315 - DNA, 25 bp, Homo sapien
gaggatgctgcatgccatggctaca

SEQ ID NO: 4180316 - DNA, 25 bp, Homo sapien
tacagagcttgactgacctacccag

SEQ ID NO: 4180317 - DNA, 25 bp, Homo sapien
taatcttgggatatctgctgggctg

SEQ ID NO: 4180318 - DNA, 25 bp, Homo sapien
tctacaggcatctgatcagctacag

SEQ ID NO: 4180319 - DNA, 25 bp, Homo sapien
ctgtagaatgccaaaaagtagatgg

SEQ ID NO: 4180320 - DNA, 25 bp, Homo sapien
tgtagaatgccaaaaagtagatggc

SEQ ID NO: 4180321 - DNA, 25 bp, Homo sapien
gtagaatgccaaaaagtagatggca

SEQ ID NO: 4180322 - DNA, 25 bp, Homo sapien
tagaatgccaaaaagtagatggcat

SEQ ID NO: 4180323 - DNA, 25 bp, Homo sapien
tcgagttgtctacatttgtacccca

SEQ ID NO: 4180324 - DNA, 25 bp, Homo sapien
gagttgtctacatttgtaccccagt

SEQ ID NO: 4180325 - DNA, 25 bp, Homo sapien
ttgtaccccagtccaaagacgtaga

SEQ ID NO: 4180326 - DNA, 25 bp, Homo sapien
ctacatttgtaccccagtccaaaga

SEQ ID NO: 4180327 - DNA, 25 bp, Homo sapien
aaattccatcagggccatttctcat

SEQ ID NO: 4180328 - DNA, 25 bp, Homo sapien
ctgcaagtacaagaagaaaattcca

SEQ ID NO: 4180329 - DNA, 25 bp, Homo sapien
aagaaaattccatcagggccatttc

SEQ ID NO: 4180330 - DNA, 25 bp, Homo sapien
gaaaattccatcagggccatttctc

SEQ ID NO: 4180331 - DNA, 25 bp, Homo sapien
ccgctctgtctccttgctgttcggg

SEQ ID NO: 4180332 - DNA, 25 bp, Homo sapien
gctctgtctccttgctgttcgggtg

SEQ ID NO: 4180333 - DNA, 25 bp, Homo sapien
tctccttgctgttcgggtgagtgta

SEQ ID NO: 4180334 - DNA, 25 bp, Homo sapien
agtgggatgatgctgctttgttccc

SEQ ID NO: 4180335 - DNA, 25 bp, Homo sapien
ccgatggtcctgttgatttgctgaa

SEQ ID NO: 4180336 - DNA, 25 bp, Homo sapien
tacagagtcacaaagtcaaattctt

SEQ ID NO: 4180337 - DNA, 25 bp, Homo sapien
ctctggcctgaatcgatgtcccatg

SEQ ID NO: 4180338 - DNA, 25 bp, Homo sapien
gtagtacagagtcacaaagtcaaat

SEQ ID NO: 4180339 - DNA, 25 bp, Homo sapien
tcatgtgatgatgacgctgaggtgc

SEQ ID NO: 4180340 - DNA, 25 bp, Homo sapien
tgatgatgacgctgaggtgctctgc

SEQ ID NO: 4180341 - DNA, 25 bp, Homo sapien
catgtgatgatgacgctgaggtgct

SEQ ID NO: 4180342 - DNA, 25 bp, Homo sapien
atgacgctgaggtgctctgcaggct

SEQ ID NO: 4180343 - DNA, 25 bp, Homo sapien
ttcttcacggtggtcatcccatggt

SEQ ID NO: 4180344 - DNA, 25 bp, Homo sapien
cttgatgtagttggacaagggatct

SEQ ID NO: 4180345 - DNA, 25 bp, Homo sapien
attgggtctcttcttcacggtggtc

SEQ ID NO: 4180346 - DNA, 25 bp, Homo sapien
caagggatcttgttgacattgggtc

SEQ ID NO: 4180347 - DNA, 25 bp, Homo sapien
tgtagacgtggaggtcagggtgcac

SEQ ID NO: 4180348 - DNA, 25 bp, Homo sapien
gaagtcttctggaaactccttcttg

SEQ ID NO: 4180349 - DNA, 25 bp, Homo sapien
acgtggaggtcagggtgcacattct

SEQ ID NO: 4180350 - DNA, 25 bp, Homo sapien
tacatcatgattggcagaacttggt

SEQ ID NO: 4180351 - DNA, 25 bp, Homo sapien
gcccgaaatctctgaagatggtctt

SEQ ID NO: 4180352 - DNA, 25 bp, Homo sapien
tctctgaagatggtctttatatcca

SEQ ID NO: 4180353 - DNA, 25 bp, Homo sapien
aatctctgaagatggtctttatatc

SEQ ID NO: 4180354 - DNA, 25 bp, Homo sapien
ctgaagatggtctttatatccatga

SEQ ID NO: 4180355 - DNA, 25 bp, Homo sapien
ctggctgctggtcataagagctcat

SEQ ID NO: 4180356 - DNA, 25 bp, Homo sapien
gtcataagagctcatgagcatttcc

SEQ ID NO: 4180357 - DNA, 25 bp, Homo sapien
tggctgctggtcataagagctcatg

SEQ ID NO: 4180358 - DNA, 25 bp, Homo sapien
gctggtcataagagctcatgagcat

SEQ ID NO: 4180359 - DNA, 25 bp, Homo sapien
ttttctatctcaggacagagcagac

SEQ ID NO: 4180360 - DNA, 25 bp, Homo sapien
tttctatctcaggacagagcagact

SEQ ID NO: 4180361 - DNA, 25 bp, Homo sapien
cttttctatctcaggacagagcaga

SEQ ID NO: 4180362 - DNA, 25 bp, Homo sapien
ctgtttggagctattggaatcttgt

SEQ ID NO: 4180363 - DNA, 25 bp, Homo sapien
taggaccggaaggattacagcccga

SEQ ID NO: 4180364 - DNA, 25 bp, Homo sapien
tacagcccgactttctctatagagc

SEQ ID NO: 4180365 - DNA, 25 bp, Homo sapien
tgttaccagcaggtcgagggattcc

SEQ ID NO: 4180366 - DNA, 25 bp, Homo sapien
gcctaaaaggcactatgtcaaatgt

SEQ ID NO: 4180367 - DNA, 25 bp, Homo sapien
tcagtatcgagtgaacagcagggtt

SEQ ID NO: 4180368 - DNA, 25 bp, Homo sapien
ctttctgtgctattgaaggagggca

SEQ ID NO: 4180369 - DNA, 25 bp, Homo sapien
ttttcagtatcgagtgaacagcagg

SEQ ID NO: 4180370 - DNA, 25 bp, Homo sapien
cagtatcgagtgaacagcagggttt

SEQ ID NO: 4180371 - DNA, 25 bp, Homo sapien
atgattttattcttcctttgtatta

SEQ ID NO: 4180372 - DNA, 25 bp, Homo sapien
tgattttattcttcctttgtattac

SEQ ID NO: 4180373 - DNA, 25 bp, Homo sapien
gatgattttattcttcctttgtatt

SEQ ID NO: 4180374 - DNA, 25 bp, Homo sapien
cagaaagcggcgctgcaaactctgc

SEQ ID NO: 4180375 - DNA, 25 bp, Homo sapien
gcgccgccagaaagcggcgctgcaa

SEQ ID NO: 4180376 - DNA, 25 bp, Homo sapien
ctgcagcaagagttaggtcccagcg

SEQ ID NO: 4180377 - DNA, 25 bp, Homo sapien
gaaagcggcgctgcaaactctgcag

SEQ ID NO: 4180378 - DNA, 25 bp, Homo sapien
gtggcgggcgtgtcgggggcttctg

SEQ ID NO: 4180379 - DNA, 25 bp, Homo sapien
ggcgtgtcgggggcttctgcacgga

SEQ ID NO: 4180380 - DNA, 25 bp, Homo sapien
tggcgggcgtgtcgggggcttctgc

SEQ ID NO: 4180381 - DNA, 25 bp, Homo sapien
gtgtcgggggcttctgcacggagac

SEQ ID NO: 4180382 - DNA, 25 bp, Homo sapien
ccagttggaagtggaagccacagca

SEQ ID NO: 4180383 - DNA, 25 bp, Homo sapien
gaccttcagatgtcacagggtgcac

SEQ ID NO: 4180384 - DNA, 25 bp, Homo sapien
gaaagcctgaccttcagatgtcaca

SEQ ID NO: 4180385 - DNA, 25 bp, Homo sapien
gcagctgaaagcctgaccttcagat

SEQ ID NO: 4180386 - DNA, 25 bp, Homo sapien
gtgttggcaaagcgctgtgtgatct

SEQ ID NO: 4180387 - DNA, 25 bp, Homo sapien
tggcaaagcgctgtgtgatctctcc

SEQ ID NO: 4180388 - DNA, 25 bp, Homo sapien
caggaacattaaacacgcaatagaa

SEQ ID NO: 4180389 - DNA, 25 bp, Homo sapien
taaacacgcaatagaatgtgttggc

SEQ ID NO: 4180390 - DNA, 25 bp, Homo sapien
cccgcagaagctcagaatctgatga

SEQ ID NO: 4180391 - DNA, 25 bp, Homo sapien
ctgatgagtctgttaattttgcttc

SEQ ID NO: 4180392 - DNA, 25 bp, Homo sapien
gaagctcagaatctgatgagtctgt

SEQ ID NO: 4180393 - DNA, 25 bp, Homo sapien
tctgcaaaatatcccgcagaagctc

SEQ ID NO: 4180394 - DNA, 25 bp, Homo sapien
gcaacagctggtgcaagctctgagg

SEQ ID NO: 4180395 - DNA, 25 bp, Homo sapien
ccaagagaagccaagtgcaggatga

SEQ ID NO: 4180396 - DNA, 25 bp, Homo sapien
gggtgacactccagctaaagccaag

SEQ ID NO: 4180397 - DNA, 25 bp, Homo sapien
tgcaggatgagcaagttccaggcag

SEQ ID NO: 4180398 - DNA, 25 bp, Homo sapien
caccgggcatacttgactgacggcg

SEQ ID NO: 4180399 - DNA, 25 bp, Homo sapien
gcatacttgactgacggcgggtgcg

SEQ ID NO: 4180400 - DNA, 25 bp, Homo sapien
atacttgactgacggcgggtgcgtc

SEQ ID NO: 4180401 - DNA, 25 bp, Homo sapien
ggtgcgtcacacacacaggatgctt

SEQ ID NO: 4180402 - DNA, 25 bp, Homo sapien
tccaccagcacctcatacagctcgt

SEQ ID NO: 4180403 - DNA, 25 bp, Homo sapien
ggtctccaccagcacctcatacagc

SEQ ID NO: 4180404 - DNA, 25 bp, Homo sapien
agggtctccaccagcacctcataca

SEQ ID NO: 4180405 - DNA, 25 bp, Homo sapien
gcaaatagctccagtggccctgagt

SEQ ID NO: 4180406 - DNA, 25 bp, Homo sapien
gcctcctgagggctgcaccaagaga

SEQ ID NO: 4180407 - DNA, 25 bp, Homo sapien
tgagcctcctgagggctgcaccaag

SEQ ID NO: 4180408 - DNA, 25 bp, Homo sapien
ctgcaccaagagagggcgagagagt

SEQ ID NO: 4180409 - DNA, 25 bp, Homo sapien
caccaagagagggcgagagagtcat

SEQ ID NO: 4180410 - DNA, 25 bp, Homo sapien
gcaaggtagagggtagcatcccatg

SEQ ID NO: 4180411 - DNA, 25 bp, Homo sapien
ctgcaaggtagagggtagcatccca

SEQ ID NO: 4180412 - DNA, 25 bp, Homo sapien
ttctgcaaggtagagggtagcatcc

SEQ ID NO: 4180413 - DNA, 25 bp, Homo sapien
ctatgagtgaaggctgccgggttct

SEQ ID NO: 4180414 - DNA, 25 bp, Homo sapien
attccctcggagctgtttgaggacc

SEQ ID NO: 4180415 - DNA, 25 bp, Homo sapien
ctcggagctgtttgaggacccggct

SEQ ID NO: 4180416 - DNA, 25 bp, Homo sapien
tggccagggctgtgaggccagcacc

SEQ ID NO: 4180417 - DNA, 25 bp, Homo sapien
ccagggctgtgaggccagcaccact

SEQ ID NO: 4180418 - DNA, 25 bp, Homo sapien
cctctaatgagaggccattgagaag

SEQ ID NO: 4180419 - DNA, 25 bp, Homo sapien
ctgtcactctggggctaagttggca

SEQ ID NO: 4180420 - DNA, 25 bp, Homo sapien
tggcagtgatgtctgcctctaatga

SEQ ID NO: 4180421 - DNA, 25 bp, Homo sapien
ctaatgagaggccattgagaaggac

SEQ ID NO: 4180422 - DNA, 25 bp, Homo sapien
ctgatggaccatcgcgatgtcccag

SEQ ID NO: 4180423 - DNA, 25 bp, Homo sapien
atggaccatcgcgatgtcccagtcc

SEQ ID NO: 4180424 - DNA, 25 bp, Homo sapien
tggaccatcgcgatgtcccagtcca

SEQ ID NO: 4180425 - DNA, 25 bp, Homo sapien
gagctgatggaccatcgcgatgtcc

SEQ ID NO: 4180426 - DNA, 25 bp, Homo sapien
taaaaaacgagctctggttctcagc

SEQ ID NO: 4180427 - DNA, 25 bp, Homo sapien
aacgagctctggttctcagcctatc

SEQ ID NO: 4180428 - DNA, 25 bp, Homo sapien
aaaacgagctctggttctcagccta

SEQ ID NO: 4180429 - DNA, 25 bp, Homo sapien
aaaaaacgagctctggttctcagcc

SEQ ID NO: 4180430 - DNA, 25 bp, Homo sapien
ggaccccgaccagcaacacgatggc

SEQ ID NO: 4180431 - DNA, 25 bp, Homo sapien
tcagcaggaccccgaccagcaacac

SEQ ID NO: 4180432 - DNA, 25 bp, Homo sapien
agcaggaccccgaccagcaacacga

SEQ ID NO: 4180433 - DNA, 25 bp, Homo sapien
accccgaccagcaacacgatggctt

SEQ ID NO: 4180434 - DNA, 25 bp, Homo sapien
tgggttgcggacagtaaaggccaca

SEQ ID NO: 4180435 - DNA, 25 bp, Homo sapien
ttgcggacagtaaaggccacataga

SEQ ID NO: 4180436 - DNA, 25 bp, Homo sapien
catgtctctgggttgcggacagtaa

SEQ ID NO: 4180437 - DNA, 25 bp, Homo sapien
gcggacagtaaaggccacatagacc

SEQ ID NO: 4180438 - DNA, 25 bp, Homo sapien
ggcaccatgccgctgtccactctct

SEQ ID NO: 4180439 - DNA, 25 bp, Homo sapien
aacatacagcacgttagaggccggg

SEQ ID NO: 4180440 - DNA, 25 bp, Homo sapien
gagtgtgtccacatacttgatacac

SEQ ID NO: 4180441 - DNA, 25 bp, Homo sapien
gaaacctcttcccttgagagtgact

SEQ ID NO: 4180442 - DNA, 25 bp, Homo sapien
gaacatacagcacgttagaggccgg

SEQ ID NO: 4180443 - DNA, 25 bp, Homo sapien
catagatggctgtttggaagggcgg

SEQ ID NO: 4180444 - DNA, 25 bp, Homo sapien
ttggccaagctcacctggtgggttt

SEQ ID NO: 4180445 - DNA, 25 bp, Homo sapien
aaatgtcgggatcaaacctggtgcc

SEQ ID NO: 4180446 - DNA, 25 bp, Homo sapien
gcaccaacctagtatgaaagaaaag

SEQ ID NO: 4180447 - DNA, 25 bp, Homo sapien
tcgccccatggcaagcgggctcgag

SEQ ID NO: 4180448 - DNA, 25 bp, Homo sapien
ggttcttgataaggcgacgttccca

SEQ ID NO: 4180449 - DNA, 25 bp, Homo sapien
tttcaggccccgaagtgaccgccag

SEQ ID NO: 4180450 - DNA, 25 bp, Homo sapien
cactcggctccgcaaggaggcaggt

SEQ ID NO: 4180451 - DNA, 25 bp, Homo sapien
tgggagtgcccaatgcggccggcag

SEQ ID NO: 4180452 - DNA, 25 bp, Homo sapien
gggagtgcccaatgcggccggcagg

SEQ ID NO: 4180453 - DNA, 25 bp, Homo sapien
ggagtgcccaatgcggccggcaggg

SEQ ID NO: 4180454 - DNA, 25 bp, Homo sapien
ctgggagtgcccaatgcggccggca

SEQ ID NO: 4180455 - DNA, 25 bp, Homo sapien
accgcaggcgcctgcagcggtgcct

SEQ ID NO: 4180456 - DNA, 25 bp, Homo sapien
gctggccacagtgacacgggctggc

SEQ ID NO: 4180457 - DNA, 25 bp, Homo sapien
ggccacagtgacacgggctggccca

SEQ ID NO: 4180458 - DNA, 25 bp, Homo sapien
gcaggcgccggcagtagaggcaggg

SEQ ID NO: 4180459 - DNA, 25 bp, Homo sapien
gcagtgaccacaggggccggctgcg

SEQ ID NO: 4180460 - DNA, 25 bp, Homo sapien
agcagtgaccacaggggccggctgc

SEQ ID NO: 4180461 - DNA, 25 bp, Homo sapien
ctagcagtgaccacaggggccggct

SEQ ID NO: 4180462 - DNA, 25 bp, Homo sapien
tagcagtgaccacaggggccggctg

SEQ ID NO: 4180463 - DNA, 25 bp, Homo sapien
ggccgtcgccgtggtcagagggtgt

SEQ ID NO: 4180464 - DNA, 25 bp, Homo sapien
tggtcagagggtgtagagtggccgt

SEQ ID NO: 4180465 - DNA, 25 bp, Homo sapien
tcagagggtgtagagtggccgtggg

SEQ ID NO: 4180466 - DNA, 25 bp, Homo sapien
aactggcgggccgtcgccgtggtca

SEQ ID NO: 4180467 - DNA, 25 bp, Homo sapien
gcagggaccttcggggctggccgta

SEQ ID NO: 4180468 - DNA, 25 bp, Homo sapien
ggaccttcggggctggccgtactga

SEQ ID NO: 4180469 - DNA, 25 bp, Homo sapien
gaccttcggggctggccgtactgac

SEQ ID NO: 4180470 - DNA, 25 bp, Homo sapien
cccaggagtgaaggcgtgagtgggc

SEQ ID NO: 4180471 - DNA, 25 bp, Homo sapien
gcacaggggcccctgaagaggccgg

SEQ ID NO: 4180472 - DNA, 25 bp, Homo sapien
agatggggcctgacagaccacccca

SEQ ID NO: 4180473 - DNA, 25 bp, Homo sapien
tgcgcctgggtaccccaggagcgaa

SEQ ID NO: 4180474 - DNA, 25 bp, Homo sapien
acaggatcgggttcgccgtgacctc

SEQ ID NO: 4180475 - DNA, 25 bp, Homo sapien
gggccctgccaagatgcagctctaa

SEQ ID NO: 4180476 - DNA, 25 bp, Homo sapien
gtggcctggaaaacgcatccgggaa

SEQ ID NO: 4180477 - DNA, 25 bp, Homo sapien
ggaagaggcccgcaggcatcacgct

SEQ ID NO: 4180478 - DNA, 25 bp, Homo sapien
caaagcatctctggcccgaagggtg

SEQ ID NO: 4180479 - DNA, 25 bp, Homo sapien
ctacaggcaccgtgcctttgtccat

SEQ ID NO: 4180480 - DNA, 25 bp, Homo sapien
ctgctgcttggatcatggtgaggct

SEQ ID NO: 4180481 - DNA, 25 bp, Homo sapien
tgcacacctggagaatcctggatgg

SEQ ID NO: 4180482 - DNA, 25 bp, Homo sapien
cacacctggagaatcctggatggtc

SEQ ID NO: 4180483 - DNA, 25 bp, Homo sapien
cacctggagaatcctggatggtctg

SEQ ID NO: 4180484 - DNA, 25 bp, Homo sapien
ttgcacacctggagaatcctggatg

SEQ ID NO: 4180485 - DNA, 25 bp, Homo sapien
aggagagcagtagaacctcggcggg

SEQ ID NO: 4180486 - DNA, 25 bp, Homo sapien
tcccacccttcttaagaaggagagc

SEQ ID NO: 4180487 - DNA, 25 bp, Homo sapien
gctgtctggcttcaggcgacacctg

SEQ ID NO: 4180488 - DNA, 25 bp, Homo sapien
tagcgttagacgttagcgctccgcc

SEQ ID NO: 4180489 - DNA, 25 bp, Homo sapien
cacagtcacattctcttgaagatcc

SEQ ID NO: 4180490 - DNA, 25 bp, Homo sapien
acagtcacattctcttgaagatccc

SEQ ID NO: 4180491 - DNA, 25 bp, Homo sapien
gcaggactggtcagtttttgctcac

SEQ ID NO: 4180492 - DNA, 25 bp, Homo sapien
tccttagtgtgattctttgagtaac

SEQ ID NO: 4180493 - DNA, 25 bp, Homo sapien
ccccagcaaactccacggcaggact

SEQ ID NO: 4180494 - DNA, 25 bp, Homo sapien
ttttgctcaccacaccatcccagtg

SEQ ID NO: 4180495 - DNA, 25 bp, Homo sapien
gtagatggcaggaacttgaagcttt

SEQ ID NO: 4180496 - DNA, 25 bp, Homo sapien
gaacttgaagctttgagataaattg

SEQ ID NO: 4180497 - DNA, 25 bp, Homo sapien
ctgggcacatgtagatggcaggaac

SEQ ID NO: 4180498 - DNA, 25 bp, Homo sapien
aggaacttgaagctttgagataaat

SEQ ID NO: 4180499 - DNA, 25 bp, Homo sapien
cagctccggcgggatgcatgttggc

SEQ ID NO: 4180500 - DNA, 25 bp, Homo sapien
ctccggcgggatgcatgttggctta

SEQ ID NO: 4180501 - DNA, 25 bp, Homo sapien
catgttggcttatctgtctgagcca

SEQ ID NO: 4180502 - DNA, 25 bp, Homo sapien
tgcatgttggcttatctgtctgagc

SEQ ID NO: 4180503 - DNA, 25 bp, Homo sapien
aatggcggctttggcaaactccttc

SEQ ID NO: 4180504 - DNA, 25 bp, Homo sapien
cccgcccgtcctccaagagatgaag

SEQ ID NO: 4180505 - DNA, 25 bp, Homo sapien
gagtgaactagcaggactggtccca

SEQ ID NO: 4180506 - DNA, 25 bp, Homo sapien
tgcatacgctggtgtgacgcggtca

SEQ ID NO: 4180507 - DNA, 25 bp, Homo sapien
ttgccccaggacacggcctattgac

SEQ ID NO: 4180508 - DNA, 25 bp, Homo sapien
catctaacttgctgcttgccccagg

SEQ ID NO: 4180509 - DNA, 25 bp, Homo sapien
tacacaaagcgactcgctcagaccg

SEQ ID NO: 4180510 - DNA, 25 bp, Homo sapien
taacagctcaggtgttagctctgcc

SEQ ID NO: 4180511 - DNA, 25 bp, Homo sapien
gctcagaccgctctctcaccggagg

SEQ ID NO: 4180512 - DNA, 25 bp, Homo sapien
aggcgtctctccacgggacagggcc

SEQ ID NO: 4180513 - DNA, 25 bp, Homo sapien
caacacagaggttgtgggagaagtt

SEQ ID NO: 4180514 - DNA, 25 bp, Homo sapien
gggagaagttgagacaaggccctga

SEQ ID NO: 4180515 - DNA, 25 bp, Homo sapien
gtccacatctcccagcacatggcaa

SEQ ID NO: 4180516 - DNA, 25 bp, Homo sapien
ctctgtgtggcagttacctttgcaa

SEQ ID NO: 4180517 - DNA, 25 bp, Homo sapien
tgcacggatgatcagtctgccagca

SEQ ID NO: 4180518 - DNA, 25 bp, Homo sapien
tcctctgcacggatgatcagtctgc

SEQ ID NO: 4180519 - DNA, 25 bp, Homo sapien
cagctcctctgcacggatgatcagt

SEQ ID NO: 4180520 - DNA, 25 bp, Homo sapien
cacggatgatcagtctgccagcaac

SEQ ID NO: 4180521 - DNA, 25 bp, Homo sapien
cctccgtgaagcgacccacattcat

SEQ ID NO: 4180522 - DNA, 25 bp, Homo sapien
ttcatcacactattaaacagatctg

SEQ ID NO: 4180523 - DNA, 25 bp, Homo sapien
tgcaagcaagggctaaaaacttcag

SEQ ID NO: 4180524 - DNA, 25 bp, Homo sapien
aacagatctgttgggagattcacca

SEQ ID NO: 4180525 - DNA, 25 bp, Homo sapien
cagagggagatttccccttcaggaa

SEQ ID NO: 4180526 - DNA, 25 bp, Homo sapien
tcaggaacaaaaaacagtcaagcta

SEQ ID NO: 4180527 - DNA, 25 bp, Homo sapien
caggaacaaaaaacagtcaagctaa

SEQ ID NO: 4180528 - DNA, 25 bp, Homo sapien
gcccagagggagatttccccttcag

SEQ ID NO: 4180529 - DNA, 25 bp, Homo sapien
cacactatcttgagagttttggtaa

SEQ ID NO: 4180530 - DNA, 25 bp, Homo sapien
tgataagacctcacacactatcttg

SEQ ID NO: 4180531 - DNA, 25 bp, Homo sapien
gacctcacacactatcttgagagtt

SEQ ID NO: 4180532 - DNA, 25 bp, Homo sapien
acatgataagacctcacacactatc

SEQ ID NO: 4180533 - DNA, 25 bp, Homo sapien
caccgtgattaaaccatcaggacca

SEQ ID NO: 4180534 - DNA, 25 bp, Homo sapien
cgtgattaaaccatcaggaccaatt

SEQ ID NO: 4180535 - DNA, 25 bp, Homo sapien
attcaccgtgattaaaccatcagga

SEQ ID NO: 4180536 - DNA, 25 bp, Homo sapien
tcaccgtgattaaaccatcaggacc

SEQ ID NO: 4180537 - DNA, 25 bp, Homo sapien
taccagttgtacaagaaaattgatt

SEQ ID NO: 4180538 - DNA, 25 bp, Homo sapien
gtgtgtaccagttgtacaagaaaat

SEQ ID NO: 4180539 - DNA, 25 bp, Homo sapien
gtgtaccagttgtacaagaaaattg

SEQ ID NO: 4180540 - DNA, 25 bp, Homo sapien
ttagtgtgtaccagttgtacaagaa

SEQ ID NO: 4180541 - DNA, 25 bp, Homo sapien
aaagtctctgttcaggtttgaccat

SEQ ID NO: 4180542 - DNA, 25 bp, Homo sapien
gaagtgtgaaagtctctgttcaggt

SEQ ID NO: 4180543 - DNA, 25 bp, Homo sapien
tgtgaaagtctctgttcaggtttga

SEQ ID NO: 4180544 - DNA, 25 bp, Homo sapien
ctctgaagtgtgaaagtctctgttc

SEQ ID NO: 4180545 - DNA, 25 bp, Homo sapien
atgggagaagccaatagccggcaaa

SEQ ID NO: 4180546 - DNA, 25 bp, Homo sapien
aagccaatagccggcaaacggggcg

SEQ ID NO: 4180547 - DNA, 25 bp, Homo sapien
tgggagaagccaatagccggcaaac

SEQ ID NO: 4180548 - DNA, 25 bp, Homo sapien
gagaagccaatagccggcaaacggg

SEQ ID NO: 4180549 - DNA, 25 bp, Homo sapien
aaggatcacgccgaaggccgcactt

SEQ ID NO: 4180550 - DNA, 25 bp, Homo sapien
catagtctccgacgcacctccaaac

SEQ ID NO: 4180551 - DNA, 25 bp, Homo sapien
ggcccagcgccttggacgtgcacag

SEQ ID NO: 4180552 - DNA, 25 bp, Homo sapien
gccttggacgtgcacagtagatccc

SEQ ID NO: 4180553 - DNA, 25 bp, Homo sapien
gctgaatagcaacgccatctctctc

SEQ ID NO: 4180554 - DNA, 25 bp, Homo sapien
catctctattattgcatatgacagc

SEQ ID NO: 4180555 - DNA, 25 bp, Homo sapien
taaatgtaactttatactcgctgaa

SEQ ID NO: 4180556 - DNA, 25 bp, Homo sapien
tttcttcatctcacataaatgtaac

SEQ ID NO: 4180557 - DNA, 25 bp, Homo sapien
gacatgatgcattaccttttgtgta

SEQ ID NO: 4180558 - DNA, 25 bp, Homo sapien
aacatgagttaaagtccctgattcc

SEQ ID NO: 4180559 - DNA, 25 bp, Homo sapien
tttgtttttacctgcatccaatatc

SEQ ID NO: 4180560 - DNA, 25 bp, Homo sapien
tttttacctgcatccaatatcttgg

SEQ ID NO: 4180561 - DNA, 25 bp, Homo sapien
gggccaggcactaccagacattcac

SEQ ID NO: 4180562 - DNA, 25 bp, Homo sapien
cacagctacatcagcttgtggcctg

SEQ ID NO: 4180563 - DNA, 25 bp, Homo sapien
taattgagcagactttaaggaaggc

SEQ ID NO: 4180564 - DNA, 25 bp, Homo sapien
ggaaagacatggtacattaactgga

SEQ ID NO: 4180565 - DNA, 25 bp, Homo sapien
tgagtctgctaaggtagctctcaca

SEQ ID NO: 4180566 - DNA, 25 bp, Homo sapien
tccttgggatggttgacccctgcct

SEQ ID NO: 4180567 - DNA, 25 bp, Homo sapien
gcttaatgagcgtgcaagtgtgcac

SEQ ID NO: 4180568 - DNA, 25 bp, Homo sapien
tacctgagcctgcaatagagccctg

SEQ ID NO: 4180569 - DNA, 25 bp, Homo sapien
ttagcaagccataatccccgatagg

SEQ ID NO: 4180570 - DNA, 25 bp, Homo sapien
gagaactgcccctactgagcatgtg

SEQ ID NO: 4180571 - DNA, 25 bp, Homo sapien
taataagtggccatgactggtgcct

SEQ ID NO: 4180572 - DNA, 25 bp, Homo sapien
cattaagtaacggacaggcaggcat

SEQ ID NO: 4180573 - DNA, 25 bp, Homo sapien
ccattctgctgtccggcttgtgcat

SEQ ID NO: 4180574 - DNA, 25 bp, Homo sapien
ccacatggggtcttgcctgaatctt

SEQ ID NO: 4180575 - DNA, 25 bp, Homo sapien
gccaggtcgtggtgcccattctgct

SEQ ID NO: 4180576 - DNA, 25 bp, Homo sapien
ccatcatgtgccaggtcgtggtgcc

SEQ ID NO: 4180577 - DNA, 25 bp, Homo sapien
tcagctctgtccagcccaagccagt

SEQ ID NO: 4180578 - DNA, 25 bp, Homo sapien
aggccaggcaccacgtgggcttcag

SEQ ID NO: 4180579 - DNA, 25 bp, Homo sapien
caaggccaggcaccacgtgggcttc

SEQ ID NO: 4180580 - DNA, 25 bp, Homo sapien
ccaggcaccacgtgggcttcagctc

SEQ ID NO: 4180581 - DNA, 25 bp, Homo sapien
taagatccatgcctagaaactgact

SEQ ID NO: 4180582 - DNA, 25 bp, Homo sapien
ttgatgcggaatctacaggttgggc

SEQ ID NO: 4180583 - DNA, 25 bp, Homo sapien
catgagcagcccaagagataggaca

SEQ ID NO: 4180584 - DNA, 25 bp, Homo sapien
tacggcctctatgtgtgaccacgtg

SEQ ID NO: 4180585 - DNA, 25 bp, Homo sapien
tgtgagcctggctcagttttaccag

SEQ ID NO: 4180586 - DNA, 25 bp, Homo sapien
tccaggcttccagtgtgagcctggc

SEQ ID NO: 4180587 - DNA, 25 bp, Homo sapien
gatctccaggcttccagtgtgagcc

SEQ ID NO: 4180588 - DNA, 25 bp, Homo sapien
gagcctggctcagttttaccagcat

SEQ ID NO: 4180589 - DNA, 25 bp, Homo sapien
tgtgtggtacgggttcctcccagtg

SEQ ID NO: 4180590 - DNA, 25 bp, Homo sapien
gtacgggttcctcccagtgtgggca

SEQ ID NO: 4180591 - DNA, 25 bp, Homo sapien
ctcagctctgtgtggtacgggttcc

SEQ ID NO: 4180592 - DNA, 25 bp, Homo sapien
ctggagagccggccgatagctcagc

SEQ ID NO: 4180593 - DNA, 25 bp, Homo sapien
ttctggctgtccacttccctggttg

SEQ ID NO: 4180594 - DNA, 25 bp, Homo sapien
tccctggttgctcaggacatccaag

SEQ ID NO: 4180595 - DNA, 25 bp, Homo sapien
tgtagcattgctcgggtgaccactg

SEQ ID NO: 4180596 - DNA, 25 bp, Homo sapien
tccataagccttgggcgtctgggtg

SEQ ID NO: 4180597 - DNA, 25 bp, Homo sapien
gcataggcgcctctcccgtagcgct

SEQ ID NO: 4180598 - DNA, 25 bp, Homo sapien
tccataataaaacctgcagccgcat

SEQ ID NO: 4180599 - DNA, 25 bp, Homo sapien
cttgacagctccataataaaacctg

SEQ ID NO: 4180600 - DNA, 25 bp, Homo sapien
tgcagccgcataggcgcctctcccg

SEQ ID NO: 4180601 - DNA, 25 bp, Homo sapien
aacagagtgcccgaaatgaggtcat

SEQ ID NO: 4180602 - DNA, 25 bp, Homo sapien
tagacgcaccataaaaccaacagag

SEQ ID NO: 4180603 - DNA, 25 bp, Homo sapien
cataagctctggcaagtagacgcac

SEQ ID NO: 4180604 - DNA, 25 bp, Homo sapien
gaaggactgtcaaccaaagggcgat

SEQ ID NO: 4180605 - DNA, 25 bp, Homo sapien
ttcccttagacttttaaattcatga

SEQ ID NO: 4180606 - DNA, 25 bp, Homo sapien
ttttttgatcaagtatttaagtgct

SEQ ID NO: 4180607 - DNA, 25 bp, Homo sapien
catagcgtattaggcatggcaatag

SEQ ID NO: 4180608 - DNA, 25 bp, Homo sapien
tcaaagtaccaagagacagtctggt

SEQ ID NO: 4180609 - DNA, 25 bp, Homo sapien
cacaatggacgccacttgccgtgac

SEQ ID NO: 4180610 - DNA, 25 bp, Homo sapien
cacttgccgtgaccagctcagtcgg

SEQ ID NO: 4180611 - DNA, 25 bp, Homo sapien
ggcaacccttcaacctggatttgag

SEQ ID NO: 4180612 - DNA, 25 bp, Homo sapien
tccaaccgtcactctggcaaccctt

SEQ ID NO: 4180613 - DNA, 25 bp, Homo sapien
gcctcaacacggctgcaacaggggg

SEQ ID NO: 4180614 - DNA, 25 bp, Homo sapien
gagcatcagcctcaacacggctgca

SEQ ID NO: 4180615 - DNA, 25 bp, Homo sapien
ggtgatcatcactatcgtagctact

SEQ ID NO: 4180616 - DNA, 25 bp, Homo sapien
ttgatctgtcctccggtgggtggtt

SEQ ID NO: 4180617 - DNA, 25 bp, Homo sapien
gatcatcactatcgtagctactatt

SEQ ID NO: 4180618 - DNA, 25 bp, Homo sapien
tcactatcgtagctactattaaatt

SEQ ID NO: 4180619 - DNA, 25 bp, Homo sapien
cctacaacaagccatatcatttgag

SEQ ID NO: 4180620 - DNA, 25 bp, Homo sapien
tatgttagctcctacaacaagccat

SEQ ID NO: 4180621 - DNA, 25 bp, Homo sapien
tttccacaaaatcttatgttagctc

SEQ ID NO: 4180622 - DNA, 25 bp, Homo sapien
cattttctggccaggttcaattttg

SEQ ID NO: 4180623 - DNA, 25 bp, Homo sapien
tgaacacatcacagtgccacagaga

SEQ ID NO: 4180624 - DNA, 25 bp, Homo sapien
acatcacagtgccacagagattttg

SEQ ID NO: 4180625 - DNA, 25 bp, Homo sapien
catgaacacatcacagtgccacaga

SEQ ID NO: 4180626 - DNA, 25 bp, Homo sapien
acacatcacagtgccacagagattt

SEQ ID NO: 4180627 - DNA, 25 bp, Homo sapien
gcttggctgcaatgcttggttgcct

SEQ ID NO: 4180628 - DNA, 25 bp, Homo sapien
gcctccttttctagaatgctcccat

SEQ ID NO: 4180629 - DNA, 25 bp, Homo sapien
ttggagcttggctgcaatgcttggt

SEQ ID NO: 4180630 - DNA, 25 bp, Homo sapien
gctgcaatgcttggttgcctccttt

SEQ ID NO: 4180631 - DNA, 25 bp, Homo sapien
ttgctccaggtaataaagggaagga

SEQ ID NO: 4180632 - DNA, 25 bp, Homo sapien
cagaatcaaaggctggccacagact

SEQ ID NO: 4180633 - DNA, 25 bp, Homo sapien
ggcggtgggacattcagaatcaaag

SEQ ID NO: 4180634 - DNA, 25 bp, Homo sapien
tgctccaggtaataaagggaaggag

SEQ ID NO: 4180635 - DNA, 25 bp, Homo sapien
tgcattttacctgggcacacggctg

SEQ ID NO: 4180636 - DNA, 25 bp, Homo sapien
ggtttccaacatgcaccctgaaggg

SEQ ID NO: 4180637 - DNA, 25 bp, Homo sapien
tggaaccaagttctagtcaacagga

SEQ ID NO: 4180638 - DNA, 25 bp, Homo sapien
tgcactaagtgttggtcatggaacc

SEQ ID NO: 4180639 - DNA, 25 bp, Homo sapien
tgtctgcatcttggacgccctctgt

SEQ ID NO: 4180640 - DNA, 25 bp, Homo sapien
gtgtgcccctcccagggagaataaa

SEQ ID NO: 4180641 - DNA, 25 bp, Homo sapien
tgggtgaggtgtgcccctcccaggg

SEQ ID NO: 4180642 - DNA, 25 bp, Homo sapien
catgtctgcatcttggacgccctct

SEQ ID NO: 4180643 - DNA, 25 bp, Homo sapien
tcgaatactgaagaaaggtctttgt

SEQ ID NO: 4180644 - DNA, 25 bp, Homo sapien
tttgtgagaagaaagtccctgcccc

SEQ ID NO: 4180645 - DNA, 25 bp, Homo sapien
tcaagacagtgaccttcgaatactg

SEQ ID NO: 4180646 - DNA, 25 bp, Homo sapien
cctcttgagcctgggtgcacagcac

SEQ ID NO: 4180647 - DNA, 25 bp, Homo sapien
gctgcccccacgtggttgctgagga

SEQ ID NO: 4180648 - DNA, 25 bp, Homo sapien
tcttacaggagaggcggctctgaac

SEQ ID NO: 4180649 - DNA, 25 bp, Homo sapien
gaggaataagacacttgcagccccg

SEQ ID NO: 4180650 - DNA, 25 bp, Homo sapien
tgctgtgacctttgtggtgtcttac

SEQ ID NO: 4180651 - DNA, 25 bp, Homo sapien
gtgtaggctggacactcctgcttcc

SEQ ID NO: 4180652 - DNA, 25 bp, Homo sapien
ctctgtccctgtcggcctcctcttc

SEQ ID NO: 4180653 - DNA, 25 bp, Homo sapien
tgtaggctggacactcctgcttcct

SEQ ID NO: 4180654 - DNA, 25 bp, Homo sapien
ggcaggattgacctcagtgcagcag

SEQ ID NO: 4180655 - DNA, 25 bp, Homo sapien
cctaagttaggcaggattgaatctc

SEQ ID NO: 4180656 - DNA, 25 bp, Homo sapien
tcagtgcagcaggtcttagggctct

SEQ ID NO: 4180657 - DNA, 25 bp, Homo sapien
tgaggtcaggcaggattgacctcag

SEQ ID NO: 4180658 - DNA, 25 bp, Homo sapien
cagcaagcaaggatgggacagtgca

SEQ ID NO: 4180659 - DNA, 25 bp, Homo sapien
acagtgcaggccgttatcatccagc

SEQ ID NO: 4180660 - DNA, 25 bp, Homo sapien
aatccctcggcctctttgtgtacag

SEQ ID NO: 4180661 - DNA, 25 bp, Homo sapien
gttccagaaaatcatgcgaggcagt

SEQ ID NO: 4180662 - DNA, 25 bp, Homo sapien
gcggctcacagaagtctaacctgcc

SEQ ID NO: 4180663 - DNA, 25 bp, Homo sapien
gggctgcggctcacagaagtctaac

SEQ ID NO: 4180664 - DNA, 25 bp, Homo sapien
gctgcggctcacagaagtctaacct

SEQ ID NO: 4180665 - DNA, 25 bp, Homo sapien
ctcagtttcggggctgcggctcaca

SEQ ID NO: 4180666 - DNA, 25 bp, Homo sapien
tctgcggcaccaggactgagtagaa

SEQ ID NO: 4180667 - DNA, 25 bp, Homo sapien
tgcaaattcccggagggcagcgtct

SEQ ID NO: 4180668 - DNA, 25 bp, Homo sapien
tgtgacctggaacagcctctctaag

SEQ ID NO: 4180669 - DNA, 25 bp, Homo sapien
tagcacatggcaggtacttggccca

SEQ ID NO: 4180670 - DNA, 25 bp, Homo sapien
caagccatgtggagatgccatatgt

SEQ ID NO: 4180671 - DNA, 25 bp, Homo sapien
tgtcaggctgtgagaatcccaagcc

SEQ ID NO: 4180672 - DNA, 25 bp, Homo sapien
gtcagaatccactgctcactgtgcg

SEQ ID NO: 4180673 - DNA, 25 bp, Homo sapien
gactcggccattttggacatccggc

SEQ ID NO: 4180674 - DNA, 25 bp, Homo sapien
tggacttgatgagcgtgtttctcag

SEQ ID NO: 4180675 - DNA, 25 bp, Homo sapien
atttcctggacttgatgagcgtgtt

SEQ ID NO: 4180676 - DNA, 25 bp, Homo sapien
ttcctggacttgatgagcgtgtttc

SEQ ID NO: 4180677 - DNA, 25 bp, Homo sapien
cttgatgagcgtgtttctcaggttc

SEQ ID NO: 4180678 - DNA, 25 bp, Homo sapien
ttttctgtttattctcttgagactt

SEQ ID NO: 4180679 - DNA, 25 bp, Homo sapien
gtttattctcttgagacttctgcag

SEQ ID NO: 4180680 - DNA, 25 bp, Homo sapien
tctcttgagacttctgcagatcaaa

SEQ ID NO: 4180681 - DNA, 25 bp, Homo sapien
cttctgcagatcaaaatcattgtat

SEQ ID NO: 4180682 - DNA, 25 bp, Homo sapien
tacggtgtagtttagtggcctggcc

SEQ ID NO: 4180683 - DNA, 25 bp, Homo sapien
cacgtactgatgagctgtcaaggca

SEQ ID NO: 4180684 - DNA, 25 bp, Homo sapien
gaaaaatgtccacaccgtggcctgg

SEQ ID NO: 4180685 - DNA, 25 bp, Homo sapien
ccctagagccaaatcagtgagtgcc

SEQ ID NO: 4180686 - DNA, 25 bp, Homo sapien
catggtccagggcatagatgcgacc

SEQ ID NO: 4180687 - DNA, 25 bp, Homo sapien
tgcaggccacaatagcatccatggg

SEQ ID NO: 4180688 - DNA, 25 bp, Homo sapien
cagaactcagggataagaagacaga

SEQ ID NO: 4180689 - DNA, 25 bp, Homo sapien
ccaaggaacccaaaggttgctgaca

SEQ ID NO: 4180690 - DNA, 25 bp, Homo sapien
agatcatgagactcgttgcccagga

SEQ ID NO: 4180691 - DNA, 25 bp, Homo sapien
gggacggggctcacaaggtgcaggg

SEQ ID NO: 4180692 - DNA, 25 bp, Homo sapien
atcatgagactcgttgcccaggaga

SEQ ID NO: 4180693 - DNA, 25 bp, Homo sapien
cagggacggggctcacaaggtgcag

SEQ ID NO: 4180694 - DNA, 25 bp, Homo sapien
taaaattactgggttcacagtggac

SEQ ID NO: 4180695 - DNA, 25 bp, Homo sapien
ggcctaatacttacccatcgataaa

SEQ ID NO: 4180696 - DNA, 25 bp, Homo sapien
tccattaaggaatagggcagagaaa

SEQ ID NO: 4180697 - DNA, 25 bp, Homo sapien
cagagaaagcatcctttatgcctgg

SEQ ID NO: 4180698 - DNA, 25 bp, Homo sapien
aacacagctccatcgccttggcgga

SEQ ID NO: 4180699 - DNA, 25 bp, Homo sapien
tccaaacacagctccatcgccttgg

SEQ ID NO: 4180700 - DNA, 25 bp, Homo sapien
aaacacagctccatcgccttggcgg

SEQ ID NO: 4180701 - DNA, 25 bp, Homo sapien
gactccaaacacagctccatcgcct

SEQ ID NO: 4180702 - DNA, 25 bp, Homo sapien
ctattggaggttggtcttccgccac

SEQ ID NO: 4180703 - DNA, 25 bp, Homo sapien
ttggaggttggtcttccgccaccat

SEQ ID NO: 4180704 - DNA, 25 bp, Homo sapien
attggaggttggtcttccgccacca

SEQ ID NO: 4180705 - DNA, 25 bp, Homo sapien
tattggaggttggtcttccgccacc

SEQ ID NO: 4180706 - DNA, 25 bp, Homo sapien
caggatcacaactccagcccgtgag

SEQ ID NO: 4180707 - DNA, 25 bp, Homo sapien
gatcacaactccagcccgtgagatg

SEQ ID NO: 4180708 - DNA, 25 bp, Homo sapien
cagcccgtgagatgtcaatggccat

SEQ ID NO: 4180709 - DNA, 25 bp, Homo sapien
caactccagcccgtgagatgtcaat

SEQ ID NO: 4180710 - DNA, 25 bp, Homo sapien
tcttggcaaaggagaacccgaggcc

SEQ ID NO: 4180711 - DNA, 25 bp, Homo sapien
cgcggagggatcttggcaaaggaga

SEQ ID NO: 4180712 - DNA, 25 bp, Homo sapien
gagggatcttggcaaaggagaaccc

SEQ ID NO: 4180713 - DNA, 25 bp, Homo sapien
ggatcttggcaaaggagaacccgag

SEQ ID NO: 4180714 - DNA, 25 bp, Homo sapien
gggcagaagaaagcgcccacatcaa

SEQ ID NO: 4180715 - DNA, 25 bp, Homo sapien
gaaagcgcccacatcaactggctgg

SEQ ID NO: 4180716 - DNA, 25 bp, Homo sapien
aggaagcggacagccgggagtaggg

SEQ ID NO: 4180717 - DNA, 25 bp, Homo sapien
agtaggggcagaagaaagcgcccac

SEQ ID NO: 4180718 - DNA, 25 bp, Homo sapien
ttagggcttcatccgcctatcgtgg

SEQ ID NO: 4180719 - DNA, 25 bp, Homo sapien
ggagcctctggagcagattcccatg

SEQ ID NO: 4180720 - DNA, 25 bp, Homo sapien
tcgactcagcgctccaattgctggg

SEQ ID NO: 4180721 - DNA, 25 bp, Homo sapien
cctatcgtggaatcaggacttcgac

SEQ ID NO: 4180722 - DNA, 25 bp, Homo sapien
gcagagaggacggagcctgagtccg

SEQ ID NO: 4180723 - DNA, 25 bp, Homo sapien
ggtgccgaaggcgttggtcttgccc

SEQ ID NO: 4180724 - DNA, 25 bp, Homo sapien
tggtcttgcccgggctttggcccca

SEQ ID NO: 4180725 - DNA, 25 bp, Homo sapien
tcattgtagccgcacgctggcagag

SEQ ID NO: 4180726 - DNA, 25 bp, Homo sapien
tgcagtttgcccgtctccagtagat

SEQ ID NO: 4180727 - DNA, 25 bp, Homo sapien
cattttaagcaattgcacctgtggg

SEQ ID NO: 4180728 - DNA, 25 bp, Homo sapien
gagcctgggctttctcgaacatcag

SEQ ID NO: 4180729 - DNA, 25 bp, Homo sapien
tgtaaattcaaacccacggcttgcc

SEQ ID NO: 4180730 - DNA, 25 bp, Homo sapien
gggggcgactcgcgtggggactgaa

SEQ ID NO: 4180731 - DNA, 25 bp, Homo sapien
ctcgggggcgactcgcgtggggact

SEQ ID NO: 4180732 - DNA, 25 bp, Homo sapien
gctcgggggcgactcgcgtggggac

SEQ ID NO: 4180733 - DNA, 25 bp, Homo sapien
tcgggggcgactcgcgtggggactg

SEQ ID NO: 4180734 - DNA, 25 bp, Homo sapien
ccgaagttgtcaggtttgcggacct

SEQ ID NO: 4180735 - DNA, 25 bp, Homo sapien
aggactaagggacaagctgcagcag

SEQ ID NO: 4180736 - DNA, 25 bp, Homo sapien
tgggcgtggctcctttccaagtgcc

SEQ ID NO: 4180737 - DNA, 25 bp, Homo sapien
tgtccaggacaatgagccccgaagt

SEQ ID NO: 4180738 - DNA, 25 bp, Homo sapien
tctaagttgatcgaggcttgtctca

SEQ ID NO: 4180739 - DNA, 25 bp, Homo sapien
tatggtcaaaggtggaatacagcta

SEQ ID NO: 4180740 - DNA, 25 bp, Homo sapien
tagtgaagttgaggatatgctccca

SEQ ID NO: 4180741 - DNA, 25 bp, Homo sapien
taagttgttacgcatccatagaaag

SEQ ID NO: 4180742 - DNA, 25 bp, Homo sapien
gggaagcttacagcagcagatcata

SEQ ID NO: 4180743 - DNA, 25 bp, Homo sapien
ggaagcttacagcagcagatcatag

SEQ ID NO: 4180744 - DNA, 25 bp, Homo sapien
tacagcagcagatcatagaaaagca

SEQ ID NO: 4180745 - DNA, 25 bp, Homo sapien
cagatcatagaaaagcaaaatagaa

SEQ ID NO: 4180746 - DNA, 25 bp, Homo sapien
ggagaatgtttcagacatggccctc

SEQ ID NO: 4180747 - DNA, 25 bp, Homo sapien
taaaaaatatcgtgggctgctctgg

SEQ ID NO: 4180748 - DNA, 25 bp, Homo sapien
ctgaaatttcaagtgggaagccacc

SEQ ID NO: 4180749 - DNA, 25 bp, Homo sapien
gcagcttccaggcattattttcagg

SEQ ID NO: 4180750 - DNA, 25 bp, Homo sapien
gatgcaaccggcccagggacatctg

SEQ ID NO: 4180751 - DNA, 25 bp, Homo sapien
tcacagatgcaaccggcccagggac

SEQ ID NO: 4180752 - DNA, 25 bp, Homo sapien
cagatgcaaccggcccagggacatc

SEQ ID NO: 4180753 - DNA, 25 bp, Homo sapien
agatgcaaccggcccagggacatct

SEQ ID NO: 4180754 - DNA, 25 bp, Homo sapien
ctcaggtaatcatgccacagggaat

SEQ ID NO: 4180755 - DNA, 25 bp, Homo sapien
gcccctggcctaaacatcatctttg

SEQ ID NO: 4180756 - DNA, 25 bp, Homo sapien
gccttttaaacctccatcagatttg

SEQ ID NO: 4180757 - DNA, 25 bp, Homo sapien
ctggcttggacccctgcaatgactt

SEQ ID NO: 4180758 - DNA, 25 bp, Homo sapien
tctgcctccaaaatctatccttagt

SEQ ID NO: 4180759 - DNA, 25 bp, Homo sapien
gataccaaaataaccagcttcccag

SEQ ID NO: 4180760 - DNA, 25 bp, Homo sapien
tccttcggaaaactgagcatctgag

SEQ ID NO: 4180761 - DNA, 25 bp, Homo sapien
caaagtgatttgcaggagcctcttc

SEQ ID NO: 4180762 - DNA, 25 bp, Homo sapien
taagatggctgtaatccctactgtg

SEQ ID NO: 4180763 - DNA, 25 bp, Homo sapien
ccgcggtggcgatggacaagtggga

SEQ ID NO: 4180764 - DNA, 25 bp, Homo sapien
agtacatggatgtgcctggcagaaa

SEQ ID NO: 4180765 - DNA, 25 bp, Homo sapien
agcctccagagtgggccgcggtggc

SEQ ID NO: 4180766 - DNA, 25 bp, Homo sapien
gtgaagtacatggatgtgcctggca

SEQ ID NO: 4180767 - DNA, 25 bp, Homo sapien
catgggtccaggttggtgtcgtgta

SEQ ID NO: 4180768 - DNA, 25 bp, Homo sapien
gtccaggttggtgtcgtgtagaaca

SEQ ID NO: 4180769 - DNA, 25 bp, Homo sapien
caggttggtgtcgtgtagaacacag

SEQ ID NO: 4180770 - DNA, 25 bp, Homo sapien
agagagccagcatggaatcaggagc

SEQ ID NO: 4180771 - DNA, 25 bp, Homo sapien
tctgccgtctccagggttgagagca

SEQ ID NO: 4180772 - DNA, 25 bp, Homo sapien
tggccccttgctgggaaagggtgta

SEQ ID NO: 4180773 - DNA, 25 bp, Homo sapien
ttcaggggcgattcttcctctgtgg

SEQ ID NO: 4180774 - DNA, 25 bp, Homo sapien
tgctgggaaagggtgtagagagact

SEQ ID NO: 4180775 - DNA, 25 bp, Homo sapien
ggtggatccagcgtaatcacaaggg

SEQ ID NO: 4180776 - DNA, 25 bp, Homo sapien
aacgaggaccgaagaagaggtcaga

SEQ ID NO: 4180777 - DNA, 25 bp, Homo sapien
tacaaggcagcagggacttccttcg

SEQ ID NO: 4180778 - DNA, 25 bp, Homo sapien
cctgggaagatgttactttacaagg

SEQ ID NO: 4180779 - DNA, 25 bp, Homo sapien
cactgataagtgtgggatcagcagc

SEQ ID NO: 4180780 - DNA, 25 bp, Homo sapien
tcgtccacattctcagaaagggcat

SEQ ID NO: 4180781 - DNA, 25 bp, Homo sapien
ctggggcagcagattattaagaagg

SEQ ID NO: 4180782 - DNA, 25 bp, Homo sapien
catggcctcgtccacattctcagaa

SEQ ID NO: 4180783 - DNA, 25 bp, Homo sapien
cacagctgataggaggatggacatc

SEQ ID NO: 4180784 - DNA, 25 bp, Homo sapien
acacagcacagctgataggaggatg

SEQ ID NO: 4180785 - DNA, 25 bp, Homo sapien
gaggatggacatcctatcctgactg

SEQ ID NO: 4180786 - DNA, 25 bp, Homo sapien
tggacatcctatcctgactggccat

SEQ ID NO: 4180787 - DNA, 25 bp, Homo sapien
ccccttaggaacgtggctgtgccat

SEQ ID NO: 4180788 - DNA, 25 bp, Homo sapien
tgagactcggagaggccagtatatg

SEQ ID NO: 4180789 - DNA, 25 bp, Homo sapien
tatatgcagttacgtcctgtcctcc

SEQ ID NO: 4180790 - DNA, 25 bp, Homo sapien
agttgaggttggacccatccacacg

SEQ ID NO: 4180791 - DNA, 25 bp, Homo sapien
ggagctccgtaaacccaaatccagc

SEQ ID NO: 4180792 - DNA, 25 bp, Homo sapien
ggtagggttcccatacagctcagct

SEQ ID NO: 4180793 - DNA, 25 bp, Homo sapien
cggtccagcagggtagggttcccat

SEQ ID NO: 4180794 - DNA, 25 bp, Homo sapien
ctccaccttcgcagagttcagggaa

SEQ ID NO: 4180795 - DNA, 25 bp, Homo sapien
cctagaattggatgcagtcctggag

SEQ ID NO: 4180796 - DNA, 25 bp, Homo sapien
ggtgtgtaatgccacaggagcctag

SEQ ID NO: 4180797 - DNA, 25 bp, Homo sapien
ggaccaaggaaaggtcaatgcaggt

SEQ ID NO: 4180798 - DNA, 25 bp, Homo sapien
cgagctgagctctaaggaatgggta

SEQ ID NO: 4180799 - DNA, 25 bp, Homo sapien
cccctgcatgggttgtggcctgcag

SEQ ID NO: 4180800 - DNA, 25 bp, Homo sapien
ccctgcatgggttgtggcctgcagg

SEQ ID NO: 4180801 - DNA, 25 bp, Homo sapien
gagcccctgcatgggttgtggcctg

SEQ ID NO: 4180802 - DNA, 25 bp, Homo sapien
gcccctgcatgggttgtggcctgca

SEQ ID NO: 4180803 - DNA, 25 bp, Homo sapien
tgagttctgaacatgttcctagatt

SEQ ID NO: 4180804 - DNA, 25 bp, Homo sapien
gggcaagttttgagcgcgcagatcc

SEQ ID NO: 4180805 - DNA, 25 bp, Homo sapien
ttgagcgcgcagatccaccagctgc

SEQ ID NO: 4180806 - DNA, 25 bp, Homo sapien
ctctttgagttctgaacatgttcct

SEQ ID NO: 4180807 - DNA, 25 bp, Homo sapien
gaagcctccgcgctgcagttctcag

SEQ ID NO: 4180808 - DNA, 25 bp, Homo sapien
ctgtgacgccacaaaggccgcggag

SEQ ID NO: 4180809 - DNA, 25 bp, Homo sapien
ttacgtctccaaggcaaccattctt

SEQ ID NO: 4180810 - DNA, 25 bp, Homo sapien
tcttcaggctggctgtgacgccaca

SEQ ID NO: 4180811 - DNA, 25 bp, Homo sapien
caaggcttctcctcttctaaaggag

SEQ ID NO: 4180812 - DNA, 25 bp, Homo sapien
gttgatgcaaggcttctcctcttct

SEQ ID NO: 4180813 - DNA, 25 bp, Homo sapien
gatgcaaggcttctcctcttctaaa

SEQ ID NO: 4180814 - DNA, 25 bp, Homo sapien
aagaggttgatgcaaggcttctcct

SEQ ID NO: 4180815 - DNA, 25 bp, Homo sapien
gtcattggtcatgttcttggagact

SEQ ID NO: 4180816 - DNA, 25 bp, Homo sapien
cttggagactatagtggacggtatc

SEQ ID NO: 4180817 - DNA, 25 bp, Homo sapien
catgttcttggagactatagtggac

SEQ ID NO: 4180818 - DNA, 25 bp, Homo sapien
ctatagtggacggtatctcagacat

SEQ ID NO: 4180819 - DNA, 25 bp, Homo sapien
acgtggtctccggtgggctgctcag

SEQ ID NO: 4180820 - DNA, 25 bp, Homo sapien
ctcggagatcctggtcggtgcctga

SEQ ID NO: 4180821 - DNA, 25 bp, Homo sapien
ccaggaatactttgcagctcggaga

SEQ ID NO: 4180822 - DNA, 25 bp, Homo sapien
gggctgccagaacgtggtctccggt

SEQ ID NO: 4180823 - DNA, 25 bp, Homo sapien
tgggttctcttcagtgcttgaagaa

SEQ ID NO: 4180824 - DNA, 25 bp, Homo sapien
tctcttcagtgcttgaagaagagct

SEQ ID NO: 4180825 - DNA, 25 bp, Homo sapien
ggttctcttcagtgcttgaagaaga

SEQ ID NO: 4180826 - DNA, 25 bp, Homo sapien
ttctcttcagtgcttgaagaagagc

SEQ ID NO: 4180827 - DNA, 25 bp, Homo sapien
gccttattccgctcctgatctctga

SEQ ID NO: 4180828 - DNA, 25 bp, Homo sapien
ggagagagccttattccgctcctga

SEQ ID NO: 4180829 - DNA, 25 bp, Homo sapien
cagataagtggaaagggttcgctga

SEQ ID NO: 4180830 - DNA, 25 bp, Homo sapien
cccagataagtggaaagggttcgct

SEQ ID NO: 4180831 - DNA, 25 bp, Homo sapien
tgctggcgtctgtcctggatactca

SEQ ID NO: 4180832 - DNA, 25 bp, Homo sapien
ctctgagaagggcaatgtggccact

SEQ ID NO: 4180833 - DNA, 25 bp, Homo sapien
gtggtgagctattgactattctgga

SEQ ID NO: 4180834 - DNA, 25 bp, Homo sapien
ggacctgaggaaagtgctcctctga

SEQ ID NO: 4180835 - DNA, 25 bp, Homo sapien
atagggacggcacaaggcctgagca

SEQ ID NO: 4180836 - DNA, 25 bp, Homo sapien
gggtccagccatagggacggcacaa

SEQ ID NO: 4180837 - DNA, 25 bp, Homo sapien
tccagccatagggacggcacaaggc

SEQ ID NO: 4180838 - DNA, 25 bp, Homo sapien
ccatagggacggcacaaggcctgag

SEQ ID NO: 4180839 - DNA, 25 bp, Homo sapien
tgccgtgggcggctgtgtgtgggtc

SEQ ID NO: 4180840 - DNA, 25 bp, Homo sapien
acgtgtgtgcgtgccgtgggcggct

SEQ ID NO: 4180841 - DNA, 25 bp, Homo sapien
gccgtgggcggctgtgtgtgggtct

SEQ ID NO: 4180842 - DNA, 25 bp, Homo sapien
tgtgcgtgccgtgggcggctgtgtg

SEQ ID NO: 4180843 - DNA, 25 bp, Homo sapien
gaaatccacatttaagtgagagccg

SEQ ID NO: 4180844 - DNA, 25 bp, Homo sapien
tgtctcattttctccgaaatccaca

SEQ ID NO: 4180845 - DNA, 25 bp, Homo sapien
ggttcccgaagactacgactgtgta

SEQ ID NO: 4180846 - DNA, 25 bp, Homo sapien
gtgagagccgtatattttgatgacc

SEQ ID NO: 4180847 - DNA, 25 bp, Homo sapien
cgacactttcgaggagtaggtcatc

SEQ ID NO: 4180848 - DNA, 25 bp, Homo sapien
aggtgagcttccaggtcgtgtagtc

SEQ ID NO: 4180849 - DNA, 25 bp, Homo sapien
ttctggtgcacccgcatcgtcttct

SEQ ID NO: 4180850 - DNA, 25 bp, Homo sapien
gcttccaggtcgtgtagtcgcggaa

SEQ ID NO: 4180851 - DNA, 25 bp, Homo sapien
tgtattgtactcacctactttcagc

SEQ ID NO: 4180852 - DNA, 25 bp, Homo sapien
gctgtattgtactcacctactttca

SEQ ID NO: 4180853 - DNA, 25 bp, Homo sapien
ctgtattgtactcacctactttcag

SEQ ID NO: 4180854 - DNA, 25 bp, Homo sapien
gaacatttgccgcttctgcttaatg

SEQ ID NO: 4180855 - DNA, 25 bp, Homo sapien
cactcatgttctcaggctccacatt

SEQ ID NO: 4180856 - DNA, 25 bp, Homo sapien
gccgcttctgcttaatgtagccact

SEQ ID NO: 4180857 - DNA, 25 bp, Homo sapien
gaggaggaacatttgccgcttctgc

SEQ ID NO: 4180858 - DNA, 25 bp, Homo sapien
tcatggcctgcacggagctgcagtc

SEQ ID NO: 4180859 - DNA, 25 bp, Homo sapien
actcgtcgaacaaggcggcgtcctt

SEQ ID NO: 4180860 - DNA, 25 bp, Homo sapien
tccagggatttctcggcccgctcca

SEQ ID NO: 4180861 - DNA, 25 bp, Homo sapien
gtcattctccctgacgaactcgtcg

SEQ ID NO: 4180862 - DNA, 25 bp, Homo sapien
tgatattaacaatctgggtggtgag

SEQ ID NO: 4180863 - DNA, 25 bp, Homo sapien
gatattaacaatctgggtggtgagg

SEQ ID NO: 4180864 - DNA, 25 bp, Homo sapien
aggtcccggatctcaaggatcttct

SEQ ID NO: 4180865 - DNA, 25 bp, Homo sapien
caaggatcttctctatcttggcttt

SEQ ID NO: 4180866 - DNA, 25 bp, Homo sapien
tccttatagaccttgtaatgcttca

SEQ ID NO: 4180867 - DNA, 25 bp, Homo sapien
actccttgggcgacagcttgtatag

SEQ ID NO: 4180868 - DNA, 25 bp, Homo sapien
ggcgacagcttgtataggaaatcct

SEQ ID NO: 4180869 - DNA, 25 bp, Homo sapien
ccttgtaatgcttcagagtgtcttc

SEQ ID NO: 4180870 - DNA, 25 bp, Homo sapien
tttgtcccctggtgtggagttaaca

SEQ ID NO: 4180871 - DNA, 25 bp, Homo sapien
tcccctggtgtggagttaacactgc

SEQ ID NO: 4180872 - DNA, 25 bp, Homo sapien
gtcccctggtgtggagttaacactg

SEQ ID NO: 4180873 - DNA, 25 bp, Homo sapien
tgtcccctggtgtggagttaacact

SEQ ID NO: 4180874 - DNA, 25 bp, Homo sapien
ctgggaacccacattctcttttctg

SEQ ID NO: 4180875 - DNA, 25 bp, Homo sapien
gggaacccacattctcttttctgct

SEQ ID NO: 4180876 - DNA, 25 bp, Homo sapien
tgggaacccacattctcttttctgc

SEQ ID NO: 4180877 - DNA, 25 bp, Homo sapien
gaacccacattctcttttctgctac

SEQ ID NO: 4180878 - DNA, 25 bp, Homo sapien
ggagctcgccttgcccttgatccct

SEQ ID NO: 4180879 - DNA, 25 bp, Homo sapien
ctcgccttgcccttgatccctggtc

SEQ ID NO: 4180880 - DNA, 25 bp, Homo sapien
atggagctcgccttgcccttgatcc

SEQ ID NO: 4180881 - DNA, 25 bp, Homo sapien
ctttggcccacatggagctcgcctt

SEQ ID NO: 4180882 - DNA, 25 bp, Homo sapien
gccccagccgcatcgtctgcagaaa

SEQ ID NO: 4180883 - DNA, 25 bp, Homo sapien
tctggagtcgccaccgctggactcg

SEQ ID NO: 4180884 - DNA, 25 bp, Homo sapien
gctgctcaggtaagacgggctccgc

SEQ ID NO: 4180885 - DNA, 25 bp, Homo sapien
gcatcgtctgcagaaacctccaggg

SEQ ID NO: 4180886 - DNA, 25 bp, Homo sapien
tcctggccggcctgggacgtccctg

SEQ ID NO: 4180887 - DNA, 25 bp, Homo sapien
aggtcctactccctctgcctcctgg

SEQ ID NO: 4180888 - DNA, 25 bp, Homo sapien
ggccggcctgggacgtccctgtctg

SEQ ID NO: 4180889 - DNA, 25 bp, Homo sapien
tggccggcctgggacgtccctgtct

SEQ ID NO: 4180890 - DNA, 25 bp, Homo sapien
tgaccgtgactgatgttctgtgctt

SEQ ID NO: 4180891 - DNA, 25 bp, Homo sapien
tttgatgcttttgacacctgtggcc

SEQ ID NO: 4180892 - DNA, 25 bp, Homo sapien
caggaaatgactcaccctgggctct

SEQ ID NO: 4180893 - DNA, 25 bp, Homo sapien
aatgtcctgataaccatatgagacc

SEQ ID NO: 4180894 - DNA, 25 bp, Homo sapien
gcgtgggggggatgggagagttcga

SEQ ID NO: 4180895 - DNA, 25 bp, Homo sapien
tgcgtgggggggatgggagagttcg

SEQ ID NO: 4180896 - DNA, 25 bp, Homo sapien
ctgcgtgggggggatgggagagttc

SEQ ID NO: 4180897 - DNA, 25 bp, Homo sapien
ccagctctcggaagacatccaggag

SEQ ID NO: 4180898 - DNA, 25 bp, Homo sapien
gggtcttctccgtctcctggctgtt

SEQ ID NO: 4180899 - DNA, 25 bp, Homo sapien
ggctccgtgaagtacagctgtggtt

SEQ ID NO: 4180900 - DNA, 25 bp, Homo sapien
tggatcagcgacaggttctgctcct

SEQ ID NO: 4180901 - DNA, 25 bp, Homo sapien
tgctgatcgcccttgtactcgccga

SEQ ID NO: 4180902 - DNA, 25 bp, Homo sapien
gtgatggacatcatcattgtggtga

SEQ ID NO: 4180903 - DNA, 25 bp, Homo sapien
gtggaagactcgggctttgagctcc

SEQ ID NO: 4180904 - DNA, 25 bp, Homo sapien
cattgtggtgacccactgcttcagc

SEQ ID NO: 4180905 - DNA, 25 bp, Homo sapien
tgcagtgccggtacacatccagcac

SEQ ID NO: 4180906 - DNA, 25 bp, Homo sapien
atggtcagcatctgcacggtgccca

SEQ ID NO: 4180907 - DNA, 25 bp, Homo sapien
tcggcctgctcgatcttgacctggg

SEQ ID NO: 4180908 - DNA, 25 bp, Homo sapien
gcagttcaggctctctagcagctta

SEQ ID NO: 4180909 - DNA, 25 bp, Homo sapien
cctgtaggatcttttgcatctggag

SEQ ID NO: 4180910 - DNA, 25 bp, Homo sapien
gctcctcctgtaggatcttttgcat

SEQ ID NO: 4180911 - DNA, 25 bp, Homo sapien
cctcctgtaggatcttttgcatctg

SEQ ID NO: 4180912 - DNA, 25 bp, Homo sapien
ggcccgctgcagatgctcctcctgt

SEQ ID NO: 4180913 - DNA, 25 bp, Homo sapien
tcagtgtgtgctcagactgttgttt

SEQ ID NO: 4180914 - DNA, 25 bp, Homo sapien
ggtcgtgagcggcataccagtgtcc

SEQ ID NO: 4180915 - DNA, 25 bp, Homo sapien
tgtccatcagtgtgtgctcagactg

SEQ ID NO: 4180916 - DNA, 25 bp, Homo sapien
tgagcggcataccagtgtcctgcct

SEQ ID NO: 4180917 - DNA, 25 bp, Homo sapien
agccttcagccagaacagctatggt

SEQ ID NO: 4180918 - DNA, 25 bp, Homo sapien
tgcttcctctgccaacatctttgct

SEQ ID NO: 4180919 - DNA, 25 bp, Homo sapien
catctttgctaagccttcagccaga

SEQ ID NO: 4180920 - DNA, 25 bp, Homo sapien
tcagttgggccactcgagacccagc

SEQ ID NO: 4180921 - DNA, 25 bp, Homo sapien
tgaatttattcaggtgaggaaggga

SEQ ID NO: 4180922 - DNA, 25 bp, Homo sapien
atttattcaggtgaggaagggagca

SEQ ID NO: 4180923 - DNA, 25 bp, Homo sapien
catgaatttattcaggtgaggaagg

SEQ ID NO: 4180924 - DNA, 25 bp, Homo sapien
gagacatgaatttattcaggtgagg

SEQ ID NO: 4180925 - DNA, 25 bp, Homo sapien
actaaattcatagccgagagctcgg

SEQ ID NO: 4180926 - DNA, 25 bp, Homo sapien
agtggcctattacggagccctcttc

SEQ ID NO: 4180927 - DNA, 25 bp, Homo sapien
agactaaattcatagccgagagctc

SEQ ID NO: 4180928 - DNA, 25 bp, Homo sapien
acctcagtggcctattacggagccc

SEQ ID NO: 4180929 - DNA, 25 bp, Homo sapien
gggcaagttgattttgccacactgt

SEQ ID NO: 4180930 - DNA, 25 bp, Homo sapien
ggtcccattgccaccgtgaagccaa

SEQ ID NO: 4180931 - DNA, 25 bp, Homo sapien
ccaagtctggtagagcagtcgggca

SEQ ID NO: 4180932 - DNA, 25 bp, Homo sapien
gaagccaaattctagcccaagtctg

SEQ ID NO: 4180933 - DNA, 25 bp, Homo sapien
tagagaacaggctgtctagtcagat

SEQ ID NO: 4180934 - DNA, 25 bp, Homo sapien
ctagtcagatgcagcttgatctgtg

SEQ ID NO: 4180935 - DNA, 25 bp, Homo sapien
gaacaggctgtctagtcagatgcag

SEQ ID NO: 4180936 - DNA, 25 bp, Homo sapien
caggaaatagggtagagaacaggct

SEQ ID NO: 4180937 - DNA, 25 bp, Homo sapien
taccaggaatgagttcgggctatac

SEQ ID NO: 4180938 - DNA, 25 bp, Homo sapien
ttccgttcagaagaccagcgtagcc

SEQ ID NO: 4180939 - DNA, 25 bp, Homo sapien
tcagcagggctaggtgcactacagc

SEQ ID NO: 4180940 - DNA, 25 bp, Homo sapien
cagcgtagcccttttgagacttttg

SEQ ID NO: 4180941 - DNA, 25 bp, Homo sapien
aggcccaaggccacggtctaggaca

SEQ ID NO: 4180942 - DNA, 25 bp, Homo sapien
aggatctgcagtgacggcagcctcg

SEQ ID NO: 4180943 - DNA, 25 bp, Homo sapien
agttcccaggaagcactatcaacct

SEQ ID NO: 4180944 - DNA, 25 bp, Homo sapien
gaagcactatcaacctgcaggatct

SEQ ID NO: 4180945 - DNA, 25 bp, Homo sapien
tattgagactcgcagagccttcgac

SEQ ID NO: 4180946 - DNA, 25 bp, Homo sapien
tggacctgcccgtctacgtcctcca

SEQ ID NO: 4180947 - DNA, 25 bp, Homo sapien
tccaggtctggatgccttactgccc

SEQ ID NO: 4180948 - DNA, 25 bp, Homo sapien
tgcccgtctacgtcctccaggtctg

SEQ ID NO: 4180949 - DNA, 25 bp, Homo sapien
gatttgctggagagcactctgggta

SEQ ID NO: 4180950 - DNA, 25 bp, Homo sapien
ggagagcactctgggtacacaaggt

SEQ ID NO: 4180951 - DNA, 25 bp, Homo sapien
ttccagctggcccgtaggcaagctg

SEQ ID NO: 4180952 - DNA, 25 bp, Homo sapien
gcactctgggtacacaaggttggtg

SEQ ID NO: 4180953 - DNA, 25 bp, Homo sapien
caggaggtctttgagcacacctgct

SEQ ID NO: 4180954 - DNA, 25 bp, Homo sapien
ccaggaggtctttgagcacacctgc

SEQ ID NO: 4180955 - DNA, 25 bp, Homo sapien
tctgattaccgtaccgtctggcaaa

SEQ ID NO: 4180956 - DNA, 25 bp, Homo sapien
gacctgactggtagattgtagattg

SEQ ID NO: 4180957 - DNA, 25 bp, Homo sapien
gattttacgtctcttagctgtgcag

SEQ ID NO: 4180958 - DNA, 25 bp, Homo sapien
taggagcctcacagtctactcagag

SEQ ID NO: 4180959 - DNA, 25 bp, Homo sapien
ggacagaggcagcagtccacccaca

SEQ ID NO: 4180960 - DNA, 25 bp, Homo sapien
gcttccttcctattccatgatgctg

SEQ ID NO: 4180961 - DNA, 25 bp, Homo sapien
tatttgtaaaacccatggagtagtg

SEQ ID NO: 4180962 - DNA, 25 bp, Homo sapien
ctcagttgcgcttgggattcctgcc

SEQ ID NO: 4180963 - DNA, 25 bp, Homo sapien
gcagggtcacccaattgaatacttt

SEQ ID NO: 4180964 - DNA, 25 bp, Homo sapien
aacagcctcgtaaaaacagcctgcc

SEQ ID NO: 4180965 - DNA, 25 bp, Homo sapien
gctcagaaccttcctgtcaaacagc

SEQ ID NO: 4180966 - DNA, 25 bp, Homo sapien
catatgcagggcaagtcagctctca

SEQ ID NO: 4180967 - DNA, 25 bp, Homo sapien
agtgtgaagctctccgggacccagg

SEQ ID NO: 4180968 - DNA, 25 bp, Homo sapien
tgagtgtgaagctctccgggaccca

SEQ ID NO: 4180969 - DNA, 25 bp, Homo sapien
agttggcttgcctgctgagtgtgaa

SEQ ID NO: 4180970 - DNA, 25 bp, Homo sapien
ggtttgtgcacccagttggcttgcc

SEQ ID NO: 4180971 - DNA, 25 bp, Homo sapien
ggttagcatttgcacttcaaagaaa

SEQ ID NO: 4180972 - DNA, 25 bp, Homo sapien
gaactgaatctgtgttacccagaaa

SEQ ID NO: 4180973 - DNA, 25 bp, Homo sapien
gaaacctcctggttagcatttgcac

SEQ ID NO: 4180974 - DNA, 25 bp, Homo sapien
ggaagtattttgtaatggaagtgca

SEQ ID NO: 4180975 - DNA, 25 bp, Homo sapien
tatatgctagggtgataaaagactt

SEQ ID NO: 4180976 - DNA, 25 bp, Homo sapien
ccaaaaatgttaatgcctagaagtt

SEQ ID NO: 4180977 - DNA, 25 bp, Homo sapien
cacggaggatataggcacgcttcat

SEQ ID NO: 4180978 - DNA, 25 bp, Homo sapien
ggtaagtgggatagtatacaagctc

SEQ ID NO: 4180979 - DNA, 25 bp, Homo sapien
tcatattgcatttgatgccatggcg

SEQ ID NO: 4180980 - DNA, 25 bp, Homo sapien
cttgttctataagggtttgtggttg

SEQ ID NO: 4180981 - DNA, 25 bp, Homo sapien
tggttgtccattgtgagagaggaat

SEQ ID NO: 4180982 - DNA, 25 bp, Homo sapien
gcgccctttactagtgaggacccag

SEQ ID NO: 4180983 - DNA, 25 bp, Homo sapien
ggaaggtagcttggtgagaataccc

SEQ ID NO: 4180984 - DNA, 25 bp, Homo sapien
gaaggtagcttggtgagaataccca

SEQ ID NO: 4180985 - DNA, 25 bp, Homo sapien
tgggaaggtagcttggtgagaatac

SEQ ID NO: 4180986 - DNA, 25 bp, Homo sapien
ctgggaaggtagcttggtgagaata

SEQ ID NO: 4180987 - DNA, 25 bp, Homo sapien
ttgttgctcatctattgtgggtttg

SEQ ID NO: 4180988 - DNA, 25 bp, Homo sapien
tgctgcaaaatgcacggctgtactg

SEQ ID NO: 4180989 - DNA, 25 bp, Homo sapien
tgctcatctattgtgggtttgtctg

SEQ ID NO: 4180990 - DNA, 25 bp, Homo sapien
caccatctggccgagcacctgccat

SEQ ID NO: 4180991 - DNA, 25 bp, Homo sapien
tcctggccgtcagtggcaggtctcc

SEQ ID NO: 4180992 - DNA, 25 bp, Homo sapien
cggctccctttcagtctgcatggca

SEQ ID NO: 4180993 - DNA, 25 bp, Homo sapien
agcccagtggaaagtcccttgactc

SEQ ID NO: 4180994 - DNA, 25 bp, Homo sapien
ggtcgtccctatgttgccgtcaggt

SEQ ID NO: 4180995 - DNA, 25 bp, Homo sapien
agcgcactgggcaccgacctgggac

SEQ ID NO: 4180996 - DNA, 25 bp, Homo sapien
gggacctggtcatctttgcgtgtgg

SEQ ID NO: 4180997 - DNA, 25 bp, Homo sapien
gatccagcgcactgggcaccgacct

SEQ ID NO: 4180998 - DNA, 25 bp, Homo sapien
gcaaggctgtggcagctgaaagcat

SEQ ID NO: 4180999 - DNA, 25 bp, Homo sapien
cacagtgaagtgtaatgagggcacc

SEQ ID NO: 4181000 - DNA, 25 bp, Homo sapien
ggcacctctcctttcaagagacgaa

SEQ ID NO: 4181001 - DNA, 25 bp, Homo sapien
aaaccaagggtatcctgtgtcacag

SEQ ID NO: 4181002 - DNA, 25 bp, Homo sapien
aaggcaaatcacaaagcaagggcta

SEQ ID NO: 4181003 - DNA, 25 bp, Homo sapien
ccaagaacagcagttgcagtgtaac

SEQ ID NO: 4181004 - DNA, 25 bp, Homo sapien
cagttgcagtgtaacaggactgtta

SEQ ID NO: 4181005 - DNA, 25 bp, Homo sapien
gacctgtaataagtccaagaacagc

SEQ ID NO: 4181006 - DNA, 25 bp, Homo sapien
caggactgttaatggaatcgggtca

SEQ ID NO: 4181007 - DNA, 25 bp, Homo sapien
cagttggattcttgtgccccatcaa

SEQ ID NO: 4181008 - DNA, 25 bp, Homo sapien
caacatgcagacactcggtggactt

SEQ ID NO: 4181009 - DNA, 25 bp, Homo sapien
tatgtatgttaacccacgctgtgct

SEQ ID NO: 4181010 - DNA, 25 bp, Homo sapien
agctgtggccaatccttcagttgga

SEQ ID NO: 4181011 - DNA, 25 bp, Homo sapien
tctttcgagtgtgccagtctggacc

SEQ ID NO: 4181012 - DNA, 25 bp, Homo sapien
taaacggtggtactctaaatctgtc

SEQ ID NO: 4181013 - DNA, 25 bp, Homo sapien
tgggacatgtctataaagcgcagct

SEQ ID NO: 4181014 - DNA, 25 bp, Homo sapien
ggttggtaaaactccgctgcaggtg

SEQ ID NO: 4181015 - DNA, 25 bp, Homo sapien
gctcggatatgtcccagaagcaggc

SEQ ID NO: 4181016 - DNA, 25 bp, Homo sapien
cacaagtggatgtagcgtttggccc

SEQ ID NO: 4181017 - DNA, 25 bp, Homo sapien
taccgagccattcaactagccaagg

SEQ ID NO: 4181018 - DNA, 25 bp, Homo sapien
aaagtgtcgcggtaaggtgaccctg

SEQ ID NO: 4181019 - DNA, 25 bp, Homo sapien
caccttcagaggttcaatggaaact

SEQ ID NO: 4181020 - DNA, 25 bp, Homo sapien
accttcagaggttcaatggaaactt

SEQ ID NO: 4181021 - DNA, 25 bp, Homo sapien
ccttcagaggttcaatggaaacttt

SEQ ID NO: 4181022 - DNA, 25 bp, Homo sapien
tggtttacaaaaggacgcagccctg

SEQ ID NO: 4181023 - DNA, 25 bp, Homo sapien
gacaaatcaccttaacccatctgag

SEQ ID NO: 4181024 - DNA, 25 bp, Homo sapien
gtgtcccggaactgctggctccaat

SEQ ID NO: 4181025 - DNA, 25 bp, Homo sapien
ggactacaagtctggaactgacaag

SEQ ID NO: 4181026 - DNA, 25 bp, Homo sapien
ttagatcataaaacggtgccccgtg

SEQ ID NO: 4181027 - DNA, 25 bp, Homo sapien
gagggagaccgatgaccagctagta

SEQ ID NO: 4181028 - DNA, 25 bp, Homo sapien
ctgggccaaagcaaacgaggtctgt

SEQ ID NO: 4181029 - DNA, 25 bp, Homo sapien
gcttaatcagctcggacaggtacag

SEQ ID NO: 4181030 - DNA, 25 bp, Homo sapien
tacgggactgggtaagcatgtgctt

SEQ ID NO: 4181031 - DNA, 25 bp, Homo sapien
gaggaatcagagatcagctgcgcca

SEQ ID NO: 4181032 - DNA, 25 bp, Homo sapien
acaaaacaacgggtgatgagagctc

SEQ ID NO: 4181033 - DNA, 25 bp, Homo sapien
tctctgaggctggaaccagcttggc

SEQ ID NO: 4181034 - DNA, 25 bp, Homo sapien
tagtagagcgttgccctgtccatgg

SEQ ID NO: 4181035 - DNA, 25 bp, Homo sapien
gatgaaccaaggagcctagtagagc

SEQ ID NO: 4181036 - DNA, 25 bp, Homo sapien
ctttttgctgccttagatgccaggg

SEQ ID NO: 4181037 - DNA, 25 bp, Homo sapien
ccaagggctgatctgggatgaacca

SEQ ID NO: 4181038 - DNA, 25 bp, Homo sapien
cgcggcgcataggagcaggagcgcg

SEQ ID NO: 4181039 - DNA, 25 bp, Homo sapien
gggcgcggcgcataggagcaggagc

SEQ ID NO: 4181040 - DNA, 25 bp, Homo sapien
agcggggcgcggcgcataggagcag

SEQ ID NO: 4181041 - DNA, 25 bp, Homo sapien
gcggcgcataggagcaggagcgcgg

SEQ ID NO: 4181042 - DNA, 25 bp, Homo sapien
ctgtgtctgccaggttccaagggtg

SEQ ID NO: 4181043 - DNA, 25 bp, Homo sapien
tccctgggactgtgtctgccaggtt

SEQ ID NO: 4181044 - DNA, 25 bp, Homo sapien
gggcccaggattctcagagcccaca

SEQ ID NO: 4181045 - DNA, 25 bp, Homo sapien
gtggggcccaggattctcagagccc

SEQ ID NO: 4181046 - DNA, 25 bp, Homo sapien
cttggtttgtttctcatccctcaaa

SEQ ID NO: 4181047 - DNA, 25 bp, Homo sapien
ttggtttgtttctcatccctcaaac

SEQ ID NO: 4181048 - DNA, 25 bp, Homo sapien
gaggggacagtgctgggcctcttgc

SEQ ID NO: 4181049 - DNA, 25 bp, Homo sapien
tggagaaggaggggacagtgctggg

SEQ ID NO: 4181050 - DNA, 25 bp, Homo sapien
ggcagcacctctggctctggagaag

SEQ ID NO: 4181051 - DNA, 25 bp, Homo sapien
cagcacctctggctctggagaagga

SEQ ID NO: 4181052 - DNA, 25 bp, Homo sapien
tttgtcctcgccgaggctaccactg

SEQ ID NO: 4181053 - DNA, 25 bp, Homo sapien
gttgggtttgtcctcgccgaggcta

SEQ ID NO: 4181054 - DNA, 25 bp, Homo sapien
gcccacagtcttagcttccttgcct

SEQ ID NO: 4181055 - DNA, 25 bp, Homo sapien
tcctcgccgaggctaccactgtgtg

SEQ ID NO: 4181056 - DNA, 25 bp, Homo sapien
gtcctctgaactcgggacactccag

SEQ ID NO: 4181057 - DNA, 25 bp, Homo sapien
tggaggtcctctgaactcgggacac

SEQ ID NO: 4181058 - DNA, 25 bp, Homo sapien
cacggtactttctggaggtcctctg

SEQ ID NO: 4181059 - DNA, 25 bp, Homo sapien
agcttgcctcttctcacggtacttt

SEQ ID NO: 4181060 - DNA, 25 bp, Homo sapien
gtcatagagcttctgcagggggctt

SEQ ID NO: 4181061 - DNA, 25 bp, Homo sapien
tcatagagcttctgcagggggcttc

SEQ ID NO: 4181062 - DNA, 25 bp, Homo sapien
aggtctgcactgttgctgtcaggct

SEQ ID NO: 4181063 - DNA, 25 bp, Homo sapien
catgcctgggtcgagggtctgtcca

SEQ ID NO: 4181064 - DNA, 25 bp, Homo sapien
cactgctctctgacaaagcctggtt

SEQ ID NO: 4181065 - DNA, 25 bp, Homo sapien
gtccagtctcatgccagcaggtctg

SEQ ID NO: 4181066 - DNA, 25 bp, Homo sapien
cagcttcgtgtgtcgttgctgaagc

SEQ ID NO: 4181067 - DNA, 25 bp, Homo sapien
ttcagggagccatatcttcagcttc

SEQ ID NO: 4181068 - DNA, 25 bp, Homo sapien
tcgttgctgaagcactgggtccggg

SEQ ID NO: 4181069 - DNA, 25 bp, Homo sapien
gccatatcttcagcttcgtgtgtcg

SEQ ID NO: 4181070 - DNA, 25 bp, Homo sapien
ccctcgcagcctcagccatgtagag

SEQ ID NO: 4181071 - DNA, 25 bp, Homo sapien
cgctctccgaattaggtccggagcc

SEQ ID NO: 4181072 - DNA, 25 bp, Homo sapien
cctcgcagcctcagccatgtagaga

SEQ ID NO: 4181073 - DNA, 25 bp, Homo sapien
aattaggtccggagcccctcgcagc

SEQ ID NO: 4181074 - DNA, 25 bp, Homo sapien
tgcaccttcgccagggtcgagcgcg

SEQ ID NO: 4181075 - DNA, 25 bp, Homo sapien
gctgccggtgcaccttcgccagggt

SEQ ID NO: 4181076 - DNA, 25 bp, Homo sapien
tgttcagcaggtcgcgccgctgccg

SEQ ID NO: 4181077 - DNA, 25 bp, Homo sapien
gctgttcagcaggtcgcgccgctgc

SEQ ID NO: 4181078 - DNA, 25 bp, Homo sapien
tccggctgtagcaggcgctgccggc

SEQ ID NO: 4181079 - DNA, 25 bp, Homo sapien
gctgtagcaggcgctgccggcgtga

SEQ ID NO: 4181080 - DNA, 25 bp, Homo sapien
gtagcaggcgctgccggcgtgagtg

SEQ ID NO: 4181081 - DNA, 25 bp, Homo sapien
ccggctgtagcaggcgctgccggcg

SEQ ID NO: 4181082 - DNA, 25 bp, Homo sapien
agtagagcaggccatgcgcgtcgtc

SEQ ID NO: 4181083 - DNA, 25 bp, Homo sapien
tagagcaggccatgcgcgtcgtcca

SEQ ID NO: 4181084 - DNA, 25 bp, Homo sapien
tagcagtagagcaggccatgcgcgt

SEQ ID NO: 4181085 - DNA, 25 bp, Homo sapien
gcacgtagcagtagagcaggccatg

SEQ ID NO: 4181086 - DNA, 25 bp, Homo sapien
atctcggcggggctgaagtcggcca

SEQ ID NO: 4181087 - DNA, 25 bp, Homo sapien
gcgcgcaggcgccggttgatctcgg

SEQ ID NO: 4181088 - DNA, 25 bp, Homo sapien
aggcgcgtgcgcctcttgcgcggag

SEQ ID NO: 4181089 - DNA, 25 bp, Homo sapien
gctcccgcacgaacaggaaggccaa

SEQ ID NO: 4181090 - DNA, 25 bp, Homo sapien
cgcgagcttgttgcggtaagccgat

SEQ ID NO: 4181091 - DNA, 25 bp, Homo sapien
tagcgcctctggaaggcggcgctgt

SEQ ID NO: 4181092 - DNA, 25 bp, Homo sapien
gggcgcgcgagcttgttgcggtaag

SEQ ID NO: 4181093 - DNA, 25 bp, Homo sapien
ttgttgcggtaagccgatgccaggc

SEQ ID NO: 4181094 - DNA, 25 bp, Homo sapien
ccgcaggcgctgaacgatgcgtgca

SEQ ID NO: 4181095 - DNA, 25 bp, Homo sapien
gaactccgcgaagcgcacgtcgtgg

SEQ ID NO: 4181096 - DNA, 25 bp, Homo sapien
ttgaagggctcctcacgccgcgtgc

SEQ ID NO: 4181097 - DNA, 25 bp, Homo sapien
ttgcccacgacgtcgtagcggaggc

SEQ ID NO: 4181098 - DNA, 25 bp, Homo sapien
aagctcaggtcggatgcgcccgcca

SEQ ID NO: 4181099 - DNA, 25 bp, Homo sapien
ggaagctcaggtcggatgcgcccgc

SEQ ID NO: 4181100 - DNA, 25 bp, Homo sapien
agctcaggtcggatgcgcccgccag

SEQ ID NO: 4181101 - DNA, 25 bp, Homo sapien
cagggaagctcaggtcggatgcgcc

SEQ ID NO: 4181102 - DNA, 25 bp, Homo sapien
ttgtagaggtcgaagaggcgccgct

SEQ ID NO: 4181103 - DNA, 25 bp, Homo sapien
aggaagtccatcttgtagaggtcga

SEQ ID NO: 4181104 - DNA, 25 bp, Homo sapien
gccgcaggtaggagggggcggagta

SEQ ID NO: 4181105 - DNA, 25 bp, Homo sapien
tagaggtcgaagaggcgccgctggt

SEQ ID NO: 4181106 - DNA, 25 bp, Homo sapien
gaagacccagcgtcttgccagactg

SEQ ID NO: 4181107 - DNA, 25 bp, Homo sapien
ccaggtgagtgcacgcagtggctct

SEQ ID NO: 4181108 - DNA, 25 bp, Homo sapien
tcttgtcggaaaggcacttgccccg

SEQ ID NO: 4181109 - DNA, 25 bp, Homo sapien
taaaacctgtgaccgcattgcacca

SEQ ID NO: 4181110 - DNA, 25 bp, Homo sapien
gcttttggaggactccggaatccca

SEQ ID NO: 4181111 - DNA, 25 bp, Homo sapien
tggaggactccggaatcccagattt

SEQ ID NO: 4181112 - DNA, 25 bp, Homo sapien
ttttggaggactccggaatcccaga

SEQ ID NO: 4181113 - DNA, 25 bp, Homo sapien
tttggaggactccggaatcccagat

SEQ ID NO: 4181114 - DNA, 25 bp, Homo sapien
cgggggccacagcggctctcacacc

SEQ ID NO: 4181115 - DNA, 25 bp, Homo sapien
agggctgtagccagggccctgccag

SEQ ID NO: 4181116 - DNA, 25 bp, Homo sapien
gggctgtagccagggccctgccagc

SEQ ID NO: 4181117 - DNA, 25 bp, Homo sapien
tcgggggccacagcggctctcacac

SEQ ID NO: 4181118 - DNA, 25 bp, Homo sapien
tcaccaattgtgacctcaagggctt

SEQ ID NO: 4181119 - DNA, 25 bp, Homo sapien
agtctgcctggcgtcacataagcca

SEQ ID NO: 4181120 - DNA, 25 bp, Homo sapien
agcttgttggcactgcctgtccggg

SEQ ID NO: 4181121 - DNA, 25 bp, Homo sapien
ctgttcctgtggtaatgtggcagct

SEQ ID NO: 4181122 - DNA, 25 bp, Homo sapien
cagtggcacaggtgaacggctgaac

SEQ ID NO: 4181123 - DNA, 25 bp, Homo sapien
gaagttacctccgttcacagatggc

SEQ ID NO: 4181124 - DNA, 25 bp, Homo sapien
tctgtatgcagaacctgaacaggga

SEQ ID NO: 4181125 - DNA, 25 bp, Homo sapien
taaaaagccgtagggtatagcagac

SEQ ID NO: 4181126 - DNA, 25 bp, Homo sapien
agaggctgagatacctgtgggacac

SEQ ID NO: 4181127 - DNA, 25 bp, Homo sapien
tgagacagaacctgttccatccttc

SEQ ID NO: 4181128 - DNA, 25 bp, Homo sapien
tcaagcataacatacacagcattag

SEQ ID NO: 4181129 - DNA, 25 bp, Homo sapien
gcattctccctaagtttgtgtctac

SEQ ID NO: 4181130 - DNA, 25 bp, Homo sapien
ggaactctcggaactcatattgctt

SEQ ID NO: 4181131 - DNA, 25 bp, Homo sapien
tctcggaactcatattgcttccctg

SEQ ID NO: 4181132 - DNA, 25 bp, Homo sapien
tctcttggaactctcggaactcata

SEQ ID NO: 4181133 - DNA, 25 bp, Homo sapien
gtctgcttctcttggaactctcgga

SEQ ID NO: 4181134 - DNA, 25 bp, Homo sapien
cgtttcacttctgttgtcaagctac

SEQ ID NO: 4181135 - DNA, 25 bp, Homo sapien
tcagttgctccgtttcacttctgtt

SEQ ID NO: 4181136 - DNA, 25 bp, Homo sapien
tccgtttcacttctgttgtcaagct

SEQ ID NO: 4181137 - DNA, 25 bp, Homo sapien
agttgctccgtttcacttctgttgt

SEQ ID NO: 4181138 - DNA, 25 bp, Homo sapien
gttgatggggcctgcagtgcacttg

SEQ ID NO: 4181139 - DNA, 25 bp, Homo sapien
tgttgatggggcctgcagtgcactt

SEQ ID NO: 4181140 - DNA, 25 bp, Homo sapien
ttgatggggcctgcagtgcacttgg

SEQ ID NO: 4181141 - DNA, 25 bp, Homo sapien
agtgttgatggggcctgcagtgcac

SEQ ID NO: 4181142 - DNA, 25 bp, Homo sapien
tgaggcacaagtcataggtcatgat

SEQ ID NO: 4181143 - DNA, 25 bp, Homo sapien
ggtcatgatgctggtcgagccaggg

SEQ ID NO: 4181144 - DNA, 25 bp, Homo sapien
aagatgaggcacaagtcataggtca

SEQ ID NO: 4181145 - DNA, 25 bp, Homo sapien
gtcatgatgctggtcgagccaggga

SEQ ID NO: 4181146 - DNA, 25 bp, Homo sapien
tctgctgagggggccccatcatgaa

SEQ ID NO: 4181147 - DNA, 25 bp, Homo sapien
gtctgctgagggggccccatcatga

SEQ ID NO: 4181148 - DNA, 25 bp, Homo sapien
catgaatgggaagtatttggccaga

SEQ ID NO: 4181149 - DNA, 25 bp, Homo sapien
catgcggatgtttgccttcactgtc

SEQ ID NO: 4181150 - DNA, 25 bp, Homo sapien
gctgctcggagcttcaggtccatga

SEQ ID NO: 4181151 - DNA, 25 bp, Homo sapien
gattcttgtgcaagtccagcatgcg

SEQ ID NO: 4181152 - DNA, 25 bp, Homo sapien
tagacttggaatgatccccgggcca

SEQ ID NO: 4181153 - DNA, 25 bp, Homo sapien
aaatagacttggaatgatccccggg

SEQ ID NO: 4181154 - DNA, 25 bp, Homo sapien
aatagacttggaatgatccccgggc

SEQ ID NO: 4181155 - DNA, 25 bp, Homo sapien
acttggaatgatccccgggccacga

SEQ ID NO: 4181156 - DNA, 25 bp, Homo sapien
ctgatggagaaaaggatgttggact

SEQ ID NO: 4181157 - DNA, 25 bp, Homo sapien
gctgatggagaaaaggatgttggac

SEQ ID NO: 4181158 - DNA, 25 bp, Homo sapien
tgctgatggagaaaaggatgttgga

SEQ ID NO: 4181159 - DNA, 25 bp, Homo sapien
ctggaagcgctcaccagtgcaacgt

SEQ ID NO: 4181160 - DNA, 25 bp, Homo sapien
tggaagcgctcaccagtgcaacgtt

SEQ ID NO: 4181161 - DNA, 25 bp, Homo sapien
gcccagacacagtgcccttccccat

SEQ ID NO: 4181162 - DNA, 25 bp, Homo sapien
caagcccagacacagtgcccttccc

SEQ ID NO: 4181163 - DNA, 25 bp, Homo sapien
tgcacaagcccagacacagtgccct

SEQ ID NO: 4181164 - DNA, 25 bp, Homo sapien
ctgcacaagcccagacacagtgccc

SEQ ID NO: 4181165 - DNA, 25 bp, Homo sapien
ccttgccagtctctgcatccaccac

SEQ ID NO: 4181166 - DNA, 25 bp, Homo sapien
gagagatgatgaccaccttgccagt

SEQ ID NO: 4181167 - DNA, 25 bp, Homo sapien
gaccaccttgccagtctctgcatcc

SEQ ID NO: 4181168 - DNA, 25 bp, Homo sapien
gatgaccaccttgccagtctctgca

SEQ ID NO: 4181169 - DNA, 25 bp, Homo sapien
tgggtgctcccaagtcagcagggct

SEQ ID NO: 4181170 - DNA, 25 bp, Homo sapien
gtgctcccaagtcagcagggctgtc

SEQ ID NO: 4181171 - DNA, 25 bp, Homo sapien
gggtctgggtgctcccaagtcagca

SEQ ID NO: 4181172 - DNA, 25 bp, Homo sapien
ggtctgggtgctcccaagtcagcag

SEQ ID NO: 4181173 - DNA, 25 bp, Homo sapien
tgctgaagaccctgtcccgtaagga

SEQ ID NO: 4181174 - DNA, 25 bp, Homo sapien
accctgtcccgtaaggagcagctgg

SEQ ID NO: 4181175 - DNA, 25 bp, Homo sapien
tgaagaccctgtcccgtaaggagca

SEQ ID NO: 4181176 - DNA, 25 bp, Homo sapien
gggttgctgaagaccctgtcccgta

SEQ ID NO: 4181177 - DNA, 25 bp, Homo sapien
gaagatgacttaacctctgctggtg

SEQ ID NO: 4181178 - DNA, 25 bp, Homo sapien
agagactgggaagatgacttaacct

SEQ ID NO: 4181179 - DNA, 25 bp, Homo sapien
gatgacttaacctctgctggtgtag

SEQ ID NO: 4181180 - DNA, 25 bp, Homo sapien
tgggaagatgacttaacctctgctg

SEQ ID NO: 4181181 - DNA, 25 bp, Homo sapien
gcagcaccttcacctgaacgaggtc

SEQ ID NO: 4181182 - DNA, 25 bp, Homo sapien
tgcatgatggggctgcggatcctca

SEQ ID NO: 4181183 - DNA, 25 bp, Homo sapien
tgcggatcctcacggctccaagcag

SEQ ID NO: 4181184 - DNA, 25 bp, Homo sapien
gggtgcccatccttatctgcatgat

SEQ ID NO: 4181185 - DNA, 25 bp, Homo sapien
ccagcactgggaatgcccccagaag

SEQ ID NO: 4181186 - DNA, 25 bp, Homo sapien
gcctccttcaagcagtgggagatgt

SEQ ID NO: 4181187 - DNA, 25 bp, Homo sapien
gtgaccagcggggtgccagcactgg

SEQ ID NO: 4181188 - DNA, 25 bp, Homo sapien
ccttcaagcagtgggagatgtatcc

SEQ ID NO: 4181189 - DNA, 25 bp, Homo sapien
ggttggtgatccaggtgatatagat

SEQ ID NO: 4181190 - DNA, 25 bp, Homo sapien
cccttggagatccaggatgtcccgc

SEQ ID NO: 4181191 - DNA, 25 bp, Homo sapien
tgatccaggtgatatagatggacat

SEQ ID NO: 4181192 - DNA, 25 bp, Homo sapien
atgctgcccttggagatccaggatg

SEQ ID NO: 4181193 - DNA, 25 bp, Homo sapien
actgcctgtgttccattagagcaat

SEQ ID NO: 4181194 - DNA, 25 bp, Homo sapien
tcactgcctgtgttccattagagca

SEQ ID NO: 4181195 - DNA, 25 bp, Homo sapien
cactgcctgtgttccattagagcaa

SEQ ID NO: 4181196 - DNA, 25 bp, Homo sapien
gtggttgtcttaaagatatgcacac

SEQ ID NO: 4181197 - DNA, 25 bp, Homo sapien
tggttgtcttaaagatatgcacaca

SEQ ID NO: 4181198 - DNA, 25 bp, Homo sapien
tgtggttgtcttaaagatatgcaca

SEQ ID NO: 4181199 - DNA, 25 bp, Homo sapien
ttctgttcctggacctgatcaaggt

SEQ ID NO: 4181200 - DNA, 25 bp, Homo sapien
cctggacctgatcaaggtcatccat

SEQ ID NO: 4181201 - DNA, 25 bp, Homo sapien
tgttcctggacctgatcaaggtcat

SEQ ID NO: 4181202 - DNA, 25 bp, Homo sapien
tcttctgttcctggacctgatcaag

SEQ ID NO: 4181203 - DNA, 25 bp, Homo sapien
ccgggcccacgcagctgaaagtgga

SEQ ID NO: 4181204 - DNA, 25 bp, Homo sapien
tctgtagaatgtttcggcgtgcacc

SEQ ID NO: 4181205 - DNA, 25 bp, Homo sapien
ggcgtgcaccgaattcgcgcaagaa

SEQ ID NO: 4181206 - DNA, 25 bp, Homo sapien
gcaagaatcctctactgatgccagg

SEQ ID NO: 4181207 - DNA, 25 bp, Homo sapien
tgcatgctgcgatctggcgctctga

SEQ ID NO: 4181208 - DNA, 25 bp, Homo sapien
ccgccttcagaagtgcatgctgcga

SEQ ID NO: 4181209 - DNA, 25 bp, Homo sapien
tcgcggccgccttcagaagtgcatg

SEQ ID NO: 4181210 - DNA, 25 bp, Homo sapien
tcagaagtgcatgctgcgatctggc

SEQ ID NO: 4181211 - DNA, 25 bp, Homo sapien
gctgcagcataagtggtccctggag

SEQ ID NO: 4181212 - DNA, 25 bp, Homo sapien
tgcagcataagtggtccctggagga

SEQ ID NO: 4181213 - DNA, 25 bp, Homo sapien
ctgagagagagggtgacctgcagag

SEQ ID NO: 4181214 - DNA, 25 bp, Homo sapien
cagcataagtggtccctggaggacc

SEQ ID NO: 4181215 - DNA, 25 bp, Homo sapien
cagccaccagacccgagacccggct

SEQ ID NO: 4181216 - DNA, 25 bp, Homo sapien
ccggcagccaccagacccgagaccc

SEQ ID NO: 4181217 - DNA, 25 bp, Homo sapien
ccaccagacccgagacccggctcca

SEQ ID NO: 4181218 - DNA, 25 bp, Homo sapien
ggcagccaccagacccgagacccgg

SEQ ID NO: 4181219 - DNA, 25 bp, Homo sapien
gtccactccgaaggacaccctgcgg

SEQ ID NO: 4181220 - DNA, 25 bp, Homo sapien
cgaaggacaccctgcggccctcgct

SEQ ID NO: 4181221 - DNA, 25 bp, Homo sapien
tgcagcacccggacccgctcctcct

SEQ ID NO: 4181222 - DNA, 25 bp, Homo sapien
tcctcgtccactccgaaggacaccc

SEQ ID NO: 4181223 - DNA, 25 bp, Homo sapien
gaatcaccaaaaagggcggctcatg

SEQ ID NO: 4181224 - DNA, 25 bp, Homo sapien
ggataatgacccctcacaaggtaag

SEQ ID NO: 4181225 - DNA, 25 bp, Homo sapien
tgaccagagaactgcagcgtggcct

SEQ ID NO: 4181226 - DNA, 25 bp, Homo sapien
tacactggactcgaaccactgggct

SEQ ID NO: 4181227 - DNA, 25 bp, Homo sapien
cagtcctcaggggaacctgatgtct

SEQ ID NO: 4181228 - DNA, 25 bp, Homo sapien
atgtctcacttttctcacctcttct

SEQ ID NO: 4181229 - DNA, 25 bp, Homo sapien
tttctcacctcttctgaattcaggc

SEQ ID NO: 4181230 - DNA, 25 bp, Homo sapien
agtcctcaggggaacctgatgtctc

SEQ ID NO: 4181231 - DNA, 25 bp, Homo sapien
tcatgcggttcaccacgttttcaga

SEQ ID NO: 4181232 - DNA, 25 bp, Homo sapien
tgtgaggggctctcaagttgccatc

SEQ ID NO: 4181233 - DNA, 25 bp, Homo sapien
tgcggttcaccacgttttcagacag

SEQ ID NO: 4181234 - DNA, 25 bp, Homo sapien
tccttcatgcggttcaccacgtttt

SEQ ID NO: 4181235 - DNA, 25 bp, Homo sapien
cactgctccccgacctgggcagtgt

SEQ ID NO: 4181236 - DNA, 25 bp, Homo sapien
cttgacaccctccttcatccctgag

SEQ ID NO: 4181237 - DNA, 25 bp, Homo sapien
ctgctccccgacctgggcagtgtgg

SEQ ID NO: 4181238 - DNA, 25 bp, Homo sapien
ctcttgacaccctccttcatccctg

SEQ ID NO: 4181239 - DNA, 25 bp, Homo sapien
gctaaaacttctccggcgacaggaa

SEQ ID NO: 4181240 - DNA, 25 bp, Homo sapien
gtcccatgacagaggtgtggccagc

SEQ ID NO: 4181241 - DNA, 25 bp, Homo sapien
taagttgcaggatcaagatgccacc

SEQ ID NO: 4181242 - DNA, 25 bp, Homo sapien
tctggacaaccacagttagcactgg

SEQ ID NO: 4181243 - DNA, 25 bp, Homo sapien
cctggaagagcttatcctggatagc

SEQ ID NO: 4181244 - DNA, 25 bp, Homo sapien
tgatgctgccttcgcccgtgggcag

SEQ ID NO: 4181245 - DNA, 25 bp, Homo sapien
ggcagggatgccttggagtgcttgg

SEQ ID NO: 4181246 - DNA, 25 bp, Homo sapien
cacctggaagagcttatcctggata

SEQ ID NO: 4181247 - DNA, 25 bp, Homo sapien
cagtgacagcaaacacacattgaca

SEQ ID NO: 4181248 - DNA, 25 bp, Homo sapien
acgcacagaacagttcatcactgct

SEQ ID NO: 4181249 - DNA, 25 bp, Homo sapien
ccaccagtgacagcaaacacacatt

SEQ ID NO: 4181250 - DNA, 25 bp, Homo sapien
cacagaacagttcatcactgctgca

SEQ ID NO: 4181251 - DNA, 25 bp, Homo sapien
atgacctgggctgtggctaccgctg

SEQ ID NO: 4181252 - DNA, 25 bp, Homo sapien
ccagtatgacctgggctgtggctac

SEQ ID NO: 4181253 - DNA, 25 bp, Homo sapien
gtatgacctgggctgtggctaccgc

SEQ ID NO: 4181254 - DNA, 25 bp, Homo sapien
gcctccagtatgacctgggctgtgg

SEQ ID NO: 4181255 - DNA, 25 bp, Homo sapien
agtaagtagtaaccagaccagcagc

SEQ ID NO: 4181256 - DNA, 25 bp, Homo sapien
tcctgagagtcccacaagcccttga

SEQ ID NO: 4181257 - DNA, 25 bp, Homo sapien
gaaggtttctttcgcttctgctgca

SEQ ID NO: 4181258 - DNA, 25 bp, Homo sapien
cccacaagcccttgagaaggtttct

SEQ ID NO: 4181259 - DNA, 25 bp, Homo sapien
ccagcagagcgctgcctgtgcagcc

SEQ ID NO: 4181260 - DNA, 25 bp, Homo sapien
cactcctccagagtgaagattaagg

SEQ ID NO: 4181261 - DNA, 25 bp, Homo sapien
tgtgcagccacggattaaataaaat

SEQ ID NO: 4181262 - DNA, 25 bp, Homo sapien
ctcctccagagtgaagattaaggaa

SEQ ID NO: 4181263 - DNA, 25 bp, Homo sapien
gggttcacccaaggctggaatccag

SEQ ID NO: 4181264 - DNA, 25 bp, Homo sapien
tagctgtcagtacagaccctgtggg

SEQ ID NO: 4181265 - DNA, 25 bp, Homo sapien
ggagacatgtcacaccacgagacct

SEQ ID NO: 4181266 - DNA, 25 bp, Homo sapien
ccgaacgtgtatggagatatcccag

SEQ ID NO: 4181267 - DNA, 25 bp, Homo sapien
acccagccaatcatggtaatttctg

SEQ ID NO: 4181268 - DNA, 25 bp, Homo sapien
cacccagccaatcatggtaatttct

SEQ ID NO: 4181269 - DNA, 25 bp, Homo sapien
ctgcacccagccaatcatggtaatt

SEQ ID NO: 4181270 - DNA, 25 bp, Homo sapien
gtgagagaaaagcgggcccttcctc

SEQ ID NO: 4181271 - DNA, 25 bp, Homo sapien
tgagagaaaagcgggcccttcctca

SEQ ID NO: 4181272 - DNA, 25 bp, Homo sapien
ttttctggatccaagccaagccatc

SEQ ID NO: 4181273 - DNA, 25 bp, Homo sapien
tacatttttctggatccaagccaag

SEQ ID NO: 4181274 - DNA, 25 bp, Homo sapien
ctggggttgaggagtcaatgcccca

SEQ ID NO: 4181275 - DNA, 25 bp, Homo sapien
tccttcctcatctaatcccaactgc

SEQ ID NO: 4181276 - DNA, 25 bp, Homo sapien
cggtaccttagaaagagctcagcca

SEQ ID NO: 4181277 - DNA, 25 bp, Homo sapien
cacaaagggtgccactgggtgttct

SEQ ID NO: 4181278 - DNA, 25 bp, Homo sapien
ctcagccacaaagggtgccactggg

SEQ ID NO: 4181279 - DNA, 25 bp, Homo sapien
ttgctcctctgccaatagccggtac

SEQ ID NO: 4181280 - DNA, 25 bp, Homo sapien
ttcggaagccgagctgttagaggca

SEQ ID NO: 4181281 - DNA, 25 bp, Homo sapien
aaaaccaattaggagcacacaggat

SEQ ID NO: 4181282 - DNA, 25 bp, Homo sapien
gaagccgagctgttagaggcagcct

SEQ ID NO: 4181283 - DNA, 25 bp, Homo sapien
ttcacttcggaagccgagctgttag

SEQ ID NO: 4181284 - DNA, 25 bp, Homo sapien
tccagctgcaatgtccatcaggctc

SEQ ID NO: 4181285 - DNA, 25 bp, Homo sapien
tgaagaatcacgaccacagtgggaa

SEQ ID NO: 4181286 - DNA, 25 bp, Homo sapien
gggttggtgaagaatcacgaccaca

SEQ ID NO: 4181287 - DNA, 25 bp, Homo sapien
ggaaactcggtcctgtgttccagct

SEQ ID NO: 4181288 - DNA, 25 bp, Homo sapien
agaaaaacaaatacgcgtgtggttg

SEQ ID NO: 4181289 - DNA, 25 bp, Homo sapien
acaaatacgcgtgtggttgttcagg

SEQ ID NO: 4181290 - DNA, 25 bp, Homo sapien
aaatacgcgtgtggttgttcaggct

SEQ ID NO: 4181291 - DNA, 25 bp, Homo sapien
aaacaaatacgcgtgtggttgttca

SEQ ID NO: 4181292 - DNA, 25 bp, Homo sapien
gatggccacagaaagattgtcaata

SEQ ID NO: 4181293 - DNA, 25 bp, Homo sapien
gattgtcaatacaccagaagcatct

SEQ ID NO: 4181294 - DNA, 25 bp, Homo sapien
tcttctctatttagctggggccttt

SEQ ID NO: 4181295 - DNA, 25 bp, Homo sapien
tttagctggggccttttaatcaaga

SEQ ID NO: 4181296 - DNA, 25 bp, Homo sapien
ttgcagattggcctaagccggtgtt

SEQ ID NO: 4181297 - DNA, 25 bp, Homo sapien
aaaaccacgctcacatgctttggaa

SEQ ID NO: 4181298 - DNA, 25 bp, Homo sapien
ttggctgcctataatctgcagtgtc

SEQ ID NO: 4181299 - DNA, 25 bp, Homo sapien
gccaggcaaagtcaccggcctgctt

SEQ ID NO: 4181300 - DNA, 25 bp, Homo sapien
ttattggatacctttggacttttga

SEQ ID NO: 4181301 - DNA, 25 bp, Homo sapien
tattggatacctttggacttttgaa

SEQ ID NO: 4181302 - DNA, 25 bp, Homo sapien
ggtaagaaggccagatgcggttcat

SEQ ID NO: 4181303 - DNA, 25 bp, Homo sapien
agaaggccagatgcggttcatccat

SEQ ID NO: 4181304 - DNA, 25 bp, Homo sapien
cctccaggggtaagaaggccagatg

SEQ ID NO: 4181305 - DNA, 25 bp, Homo sapien
tccaggggtaagaaggccagatgcg

SEQ ID NO: 4181306 - DNA, 25 bp, Homo sapien
cccctctgttataattctgtgcttc

SEQ ID NO: 4181307 - DNA, 25 bp, Homo sapien
agtggcccgtgtgccttgtcaccct

SEQ ID NO: 4181308 - DNA, 25 bp, Homo sapien
cagcacaccacttgcttttccctcc

SEQ ID NO: 4181309 - DNA, 25 bp, Homo sapien
cccaggaagcccgagtggcccgtgt

SEQ ID NO: 4181310 - DNA, 25 bp, Homo sapien
gaggatgctcgcatcatgactaggc

SEQ ID NO: 4181311 - DNA, 25 bp, Homo sapien
ggagccgagaggatgctcgcatcat

SEQ ID NO: 4181312 - DNA, 25 bp, Homo sapien
tagtaacagaacgagtaccatcggg

SEQ ID NO: 4181313 - DNA, 25 bp, Homo sapien
acagagcgggggcaccctgctagta

SEQ ID NO: 4181314 - DNA, 25 bp, Homo sapien
tgactcagcccagccgctgctttga

SEQ ID NO: 4181315 - DNA, 25 bp, Homo sapien
gagggcaagaaggtgactcagccca

SEQ ID NO: 4181316 - DNA, 25 bp, Homo sapien
cccagccgctgctttgaggagccca

SEQ ID NO: 4181317 - DNA, 25 bp, Homo sapien
agggcaagaaggtgactcagcccag

SEQ ID NO: 4181318 - DNA, 25 bp, Homo sapien
gcttccagagtcaggacaagctggc

SEQ ID NO: 4181319 - DNA, 25 bp, Homo sapien
tcagtggggtacacgagagacaccc

SEQ ID NO: 4181320 - DNA, 25 bp, Homo sapien
ggctcatccctagttctgaccctga

SEQ ID NO: 4181321 - DNA, 25 bp, Homo sapien
gcgatgcgagctctgagaatctctg

SEQ ID NO: 4181322 - DNA, 25 bp, Homo sapien
caagaagagggatgctcaaagccat

SEQ ID NO: 4181323 - DNA, 25 bp, Homo sapien
aaacatgccaagaagagggatgctc

SEQ ID NO: 4181324 - DNA, 25 bp, Homo sapien
agggagaggcaactcagaaacatgc

SEQ ID NO: 4181325 - DNA, 25 bp, Homo sapien
caggagggagaggcaactcagaaac

SEQ ID NO: 4181326 - DNA, 25 bp, Homo sapien
gcacaattcagagggagatgcagct

SEQ ID NO: 4181327 - DNA, 25 bp, Homo sapien
cattccatgaggttggcacaattca

SEQ ID NO: 4181328 - DNA, 25 bp, Homo sapien
ttgacatcaaatgggtcctgctgag

SEQ ID NO: 4181329 - DNA, 25 bp, Homo sapien
cagctgattaagggactgcagaaat

SEQ ID NO: 4181330 - DNA, 25 bp, Homo sapien
taattcatctgctacaaagccctgc

SEQ ID NO: 4181331 - DNA, 25 bp, Homo sapien
tgacaatggacaggaggtgacacga

SEQ ID NO: 4181332 - DNA, 25 bp, Homo sapien
ggtgacacgaaaaatggctgtagaa

SEQ ID NO: 4181333 - DNA, 25 bp, Homo sapien
tgcaatcccaatgactgacaatgga

SEQ ID NO: 4181334 - DNA, 25 bp, Homo sapien
acagcctcatgctctgagctggaag

SEQ ID NO: 4181335 - DNA, 25 bp, Homo sapien
agcctcatgctctgagctggaagga

SEQ ID NO: 4181336 - DNA, 25 bp, Homo sapien
atgccacagcctcatgctctgagct

SEQ ID NO: 4181337 - DNA, 25 bp, Homo sapien
ccacagcctcatgctctgagctgga

SEQ ID NO: 4181338 - DNA, 25 bp, Homo sapien
aaagcccacgttagccagcagcgat

SEQ ID NO: 4181339 - DNA, 25 bp, Homo sapien
tagccagcagcgatggtgctggaat

SEQ ID NO: 4181340 - DNA, 25 bp, Homo sapien
cacgttagccagcagcgatggtgct

SEQ ID NO: 4181341 - DNA, 25 bp, Homo sapien
gaagagaacaaagcccacgttagcc

SEQ ID NO: 4181342 - DNA, 25 bp, Homo sapien
ttcctctcaatacgctccagctgct

SEQ ID NO: 4181343 - DNA, 25 bp, Homo sapien
acggcgtcttagctctgcctctctg

SEQ ID NO: 4181344 - DNA, 25 bp, Homo sapien
ccttgtagaaggtgtcacggcgtct

SEQ ID NO: 4181345 - DNA, 25 bp, Homo sapien
aggtgtcacggcgtcttagctctgc

SEQ ID NO: 4181346 - DNA, 25 bp, Homo sapien
ggaaatccagaaacccatatttctg

SEQ ID NO: 4181347 - DNA, 25 bp, Homo sapien
catggcctggaaatccagaaaccca

SEQ ID NO: 4181348 - DNA, 25 bp, Homo sapien
tttccccatggcctggaaatccaga

SEQ ID NO: 4181349 - DNA, 25 bp, Homo sapien
gcctggaaatccagaaacccatatt

SEQ ID NO: 4181350 - DNA, 25 bp, Homo sapien
tgatgcagcagcttatccaactttc

SEQ ID NO: 4181351 - DNA, 25 bp, Homo sapien
atgatgcagcagcttatccaacttt

SEQ ID NO: 4181352 - DNA, 25 bp, Homo sapien
gatgcagcagcttatccaactttcc

SEQ ID NO: 4181353 - DNA, 25 bp, Homo sapien
ccaggagaagctgcgctcagcatgt

SEQ ID NO: 4181354 - DNA, 25 bp, Homo sapien
cgagtagccaggagaagctgcgctc

SEQ ID NO: 4181355 - DNA, 25 bp, Homo sapien
aggagaagctgcgctcagcatgtcc

SEQ ID NO: 4181356 - DNA, 25 bp, Homo sapien
agaagctgcgctcagcatgtccagc

SEQ ID NO: 4181357 - DNA, 25 bp, Homo sapien
atacaacaaaacacagcggtgcccc

SEQ ID NO: 4181358 - DNA, 25 bp, Homo sapien
gactccttcgagaagctcctttcca

SEQ ID NO: 4181359 - DNA, 25 bp, Homo sapien
tacagcaatcttgagatgcaacgac

SEQ ID NO: 4181360 - DNA, 25 bp, Homo sapien
tcatgatgggcaatgagggtcagct

SEQ ID NO: 4181361 - DNA, 25 bp, Homo sapien
attcagcaaaaaggatgctccagct

SEQ ID NO: 4181362 - DNA, 25 bp, Homo sapien
ggatattagtaggattctttgccac

SEQ ID NO: 4181363 - DNA, 25 bp, Homo sapien
ggtgggaaccattgactgcttggat

SEQ ID NO: 4181364 - DNA, 25 bp, Homo sapien
taagctggcaactagcatactctgg

SEQ ID NO: 4181365 - DNA, 25 bp, Homo sapien
aacatcccttattgaccctagtgat

SEQ ID NO: 4181366 - DNA, 25 bp, Homo sapien
ggaacatcccttattgaccctagtg

SEQ ID NO: 4181367 - DNA, 25 bp, Homo sapien
catcccttattgaccctagtgatat

SEQ ID NO: 4181368 - DNA, 25 bp, Homo sapien
cccttattgaccctagtgatattag

SEQ ID NO: 4181369 - DNA, 25 bp, Homo sapien
gctgtctcccgtccctggtgaaaac

SEQ ID NO: 4181370 - DNA, 25 bp, Homo sapien
agacgagggctgtctcccgtccctg

SEQ ID NO: 4181371 - DNA, 25 bp, Homo sapien
ttctgatcattttcagaacactctc

SEQ ID NO: 4181372 - DNA, 25 bp, Homo sapien
tctcatcacttgtccaggtggcctc

SEQ ID NO: 4181373 - DNA, 25 bp, Homo sapien
caccggtggcaaggccgccaattcc

SEQ ID NO: 4181374 - DNA, 25 bp, Homo sapien
atgtctgtcttgacctcattcaagg

SEQ ID NO: 4181375 - DNA, 25 bp, Homo sapien
tggcaaggccgccaattcccacagg

SEQ ID NO: 4181376 - DNA, 25 bp, Homo sapien
gctcaatgtctgtcttgacctcatt

SEQ ID NO: 4181377 - DNA, 25 bp, Homo sapien
tcaactctaggccagtggtcctcaa

SEQ ID NO: 4181378 - DNA, 25 bp, Homo sapien
tggccgtgcactggcaatacctaag

SEQ ID NO: 4181379 - DNA, 25 bp, Homo sapien
ctaagccactgttacacgttttgcc

SEQ ID NO: 4181380 - DNA, 25 bp, Homo sapien
atgctgtggccctcaactctaggcc

SEQ ID NO: 4181381 - DNA, 25 bp, Homo sapien
atggaattgctctgaagacagttta

SEQ ID NO: 4181382 - DNA, 25 bp, Homo sapien
tggaattgctctgaagacagtttat

SEQ ID NO: 4181383 - DNA, 25 bp, Homo sapien
ttgctctgaagacagtttatacatc

SEQ ID NO: 4181384 - DNA, 25 bp, Homo sapien
gaattgctctgaagacagtttatac

SEQ ID NO: 4181385 - DNA, 25 bp, Homo sapien
tggtattccttgagttcataagtat

SEQ ID NO: 4181386 - DNA, 25 bp, Homo sapien
tccttgagttcataagtattggacc

SEQ ID NO: 4181387 - DNA, 25 bp, Homo sapien
ctccatttggtattccttgagttca

SEQ ID NO: 4181388 - DNA, 25 bp, Homo sapien
ccatttggtattccttgagttcata

SEQ ID NO: 4181389 - DNA, 25 bp, Homo sapien
cacagaccgtgtaaacagggccata

SEQ ID NO: 4181390 - DNA, 25 bp, Homo sapien
aaacagggccataacagggagcagg

SEQ ID NO: 4181391 - DNA, 25 bp, Homo sapien
tgaggagcacagaccgtgtaaacag

SEQ ID NO: 4181392 - DNA, 25 bp, Homo sapien
aagaccagggactggcggatgaggc

SEQ ID NO: 4181393 - DNA, 25 bp, Homo sapien
gcaggtgattcgtgctcacaagtaa

SEQ ID NO: 4181394 - DNA, 25 bp, Homo sapien
agcatcccaggtggccggagacagc

SEQ ID NO: 4181395 - DNA, 25 bp, Homo sapien
ctgagcatcccaggtggccggagac

SEQ ID NO: 4181396 - DNA, 25 bp, Homo sapien
ccggagacagcaggtgattcgtgct

SEQ ID NO: 4181397 - DNA, 25 bp, Homo sapien
ttgagctgatgtagcaggaatctgc

SEQ ID NO: 4181398 - DNA, 25 bp, Homo sapien
taaataggcatttagactaagccgc

SEQ ID NO: 4181399 - DNA, 25 bp, Homo sapien
gactaagccgcacacggttttgagc

SEQ ID NO: 4181400 - DNA, 25 bp, Homo sapien
ggcctttgcttaaataggcatttag

SEQ ID NO: 4181401 - DNA, 25 bp, Homo sapien
ggcaggcgcctgtgtagctgtccat

SEQ ID NO: 4181402 - DNA, 25 bp, Homo sapien
aagcaagcctccgtgcagcctttcc

SEQ ID NO: 4181403 - DNA, 25 bp, Homo sapien
cagcctttccttcccattggtgata

SEQ ID NO: 4181404 - DNA, 25 bp, Homo sapien
ttcccttccgtccacggcagacctc

SEQ ID NO: 4181405 - DNA, 25 bp, Homo sapien
ttccgtccacggcagacctgttggt

SEQ ID NO: 4181406 - DNA, 25 bp, Homo sapien
caaaaaagcttctgtgcatccttcc

SEQ ID NO: 4181407 - DNA, 25 bp, Homo sapien
gataattctgtgtgtagccttccct

SEQ ID NO: 4181408 - DNA, 25 bp, Homo sapien
catgaaaaggttttgtgcagccttt

SEQ ID NO: 4181409 - DNA, 25 bp, Homo sapien
tctcatctatggcaaggctctgcat

SEQ ID NO: 4181410 - DNA, 25 bp, Homo sapien
ttctcctcaggcagaatacactgca

SEQ ID NO: 4181411 - DNA, 25 bp, Homo sapien
gcacttggtgaagaacccataacta

SEQ ID NO: 4181412 - DNA, 25 bp, Homo sapien
agttacatgacaacattctgtgcag

SEQ ID NO: 4181413 - DNA, 25 bp, Homo sapien
cataactagctagagacccaggcga

SEQ ID NO: 4181414 - DNA, 25 bp, Homo sapien
acatgctcagtaacgcagtgtggcc

SEQ ID NO: 4181415 - DNA, 25 bp, Homo sapien
aatggcaggtgatgcccaagacggc

SEQ ID NO: 4181416 - DNA, 25 bp, Homo sapien
caagacggcccggtcagaacatgct

SEQ ID NO: 4181417 - DNA, 25 bp, Homo sapien
tccactgtgtggtcggtgcatcagg

SEQ ID NO: 4181418 - DNA, 25 bp, Homo sapien
tgaagggagagcacgccttcccctt

SEQ ID NO: 4181419 - DNA, 25 bp, Homo sapien
gaagggagagcacgccttccccttc

SEQ ID NO: 4181420 - DNA, 25 bp, Homo sapien
aagtctgcgggtggacacttctgta

SEQ ID NO: 4181421 - DNA, 25 bp, Homo sapien
caccaggatgctcgacagcttggga

SEQ ID NO: 4181422 - DNA, 25 bp, Homo sapien
ggaacaggaccccatatttagctgt

SEQ ID NO: 4181423 - DNA, 25 bp, Homo sapien
cccaggccactgtatgcagcgcagt

SEQ ID NO: 4181424 - DNA, 25 bp, Homo sapien
taaactaaagtcagtcactggccca

SEQ ID NO: 4181425 - DNA, 25 bp, Homo sapien
catgctgttcacacaaatgaggaaa

SEQ ID NO: 4181426 - DNA, 25 bp, Homo sapien
tctggtagcagacactatcgttcat

SEQ ID NO: 4181427 - DNA, 25 bp, Homo sapien
ggaggagcgggacatatttatttac

SEQ ID NO: 4181428 - DNA, 25 bp, Homo sapien
cagcccgcctccaggacaacccgcc

SEQ ID NO: 4181429 - DNA, 25 bp, Homo sapien
cgcctccaggacaacccgccccgct

SEQ ID NO: 4181430 - DNA, 25 bp, Homo sapien
ccgccccgctgtgcccaggatagcc

SEQ ID NO: 4181431 - DNA, 25 bp, Homo sapien
agggcccccatgaggatggtgcagc

SEQ ID NO: 4181432 - DNA, 25 bp, Homo sapien
accctcaaggagaagcactgtgctt

SEQ ID NO: 4181433 - DNA, 25 bp, Homo sapien
ttctagaaatgagaggacggtcgca

SEQ ID NO: 4181434 - DNA, 25 bp, Homo sapien
ggctcacaatatagcagacactgaa

SEQ ID NO: 4181435 - DNA, 25 bp, Homo sapien
gacactgaaacatgctgtggtatgg

SEQ ID NO: 4181436 - DNA, 25 bp, Homo sapien
tctgggcctgcaaccctgagcagac

SEQ ID NO: 4181437 - DNA, 25 bp, Homo sapien
gcagcgctggtatgccttgaccagg

SEQ ID NO: 4181438 - DNA, 25 bp, Homo sapien
cacagcagcacctcatgcgggcgat

SEQ ID NO: 4181439 - DNA, 25 bp, Homo sapien
gcgatctcggtagcagtggagaatc

SEQ ID NO: 4181440 - DNA, 25 bp, Homo sapien
agtgaatgatgctccccaaggtggg

SEQ ID NO: 4181441 - DNA, 25 bp, Homo sapien
agacctcgtcctgttgtttctccca

SEQ ID NO: 4181442 - DNA, 25 bp, Homo sapien
gggagcccaaactaggtgttctgag

SEQ ID NO: 4181443 - DNA, 25 bp, Homo sapien
ttttcacaaacaggccgcactcctt

SEQ ID NO: 4181444 - DNA, 25 bp, Homo sapien
ggagccccagggcagatgttagatc

SEQ ID NO: 4181445 - DNA, 25 bp, Homo sapien
ccctaggagccccagggcagatgtt

SEQ ID NO: 4181446 - DNA, 25 bp, Homo sapien
ctaggagccccagggcagatgttag

SEQ ID NO: 4181447 - DNA, 25 bp, Homo sapien
ctgccctaggagccccagggcagat

SEQ ID NO: 4181448 - DNA, 25 bp, Homo sapien
ccagcaggaaacggcagggcacagt

SEQ ID NO: 4181449 - DNA, 25 bp, Homo sapien
cacagtggctgtggtcccatgattg

SEQ ID NO: 4181450 - DNA, 25 bp, Homo sapien
ggcccagcaggaaacggcagggcac

SEQ ID NO: 4181451 - DNA, 25 bp, Homo sapien
agtggctgtggtcccatgattggtc

SEQ ID NO: 4181452 - DNA, 25 bp, Homo sapien
cagacagtagcgcatactttgtttc

SEQ ID NO: 4181453 - DNA, 25 bp, Homo sapien
acagtagcgcatactttgtttccta

SEQ ID NO: 4181454 - DNA, 25 bp, Homo sapien
tttcagacagtagcgcatactttgt

SEQ ID NO: 4181455 - DNA, 25 bp, Homo sapien
ttgttttcagacagtagcgcatact

SEQ ID NO: 4181456 - DNA, 25 bp, Homo sapien
agcagagggctggacgcagagtagg

SEQ ID NO: 4181457 - DNA, 25 bp, Homo sapien
ggctggacgcagagtaggcagcagt

SEQ ID NO: 4181458 - DNA, 25 bp, Homo sapien
tggacgcagagtaggcagcagtgac

SEQ ID NO: 4181459 - DNA, 25 bp, Homo sapien
cagagggctggacgcagagtaggca

SEQ ID NO: 4181460 - DNA, 25 bp, Homo sapien
ggtgatgttccctggcatcgagtcc

SEQ ID NO: 4181461 - DNA, 25 bp, Homo sapien
tccacactggtgatgttccctggca

SEQ ID NO: 4181462 - DNA, 25 bp, Homo sapien
tgttccctggcatcgagtcctgtct

SEQ ID NO: 4181463 - DNA, 25 bp, Homo sapien
cactggtgatgttccctggcatcga

SEQ ID NO: 4181464 - DNA, 25 bp, Homo sapien
ttcccaccccaggatgcgtccccaa

SEQ ID NO: 4181465 - DNA, 25 bp, Homo sapien
agtctgtttcccaccccaggatgcg

SEQ ID NO: 4181466 - DNA, 25 bp, Homo sapien
tgggagtctgtttcccaccccagga

SEQ ID NO: 4181467 - DNA, 25 bp, Homo sapien
tgtttcccaccccaggatgcgtccc

SEQ ID NO: 4181468 - DNA, 25 bp, Homo sapien
aggaagtgcttgcccctggaagctg

SEQ ID NO: 4181469 - DNA, 25 bp, Homo sapien
caggaagtgcttgcccctggaagct

SEQ ID NO: 4181470 - DNA, 25 bp, Homo sapien
ggaagtgcttgcccctggaagctgg

SEQ ID NO: 4181471 - DNA, 25 bp, Homo sapien
gaagtgcttgcccctggaagctggc

SEQ ID NO: 4181472 - DNA, 25 bp, Homo sapien
atgcctggcttagatccccgcctgg

SEQ ID NO: 4181473 - DNA, 25 bp, Homo sapien
ggacttccccaggccagtaatgatg

SEQ ID NO: 4181474 - DNA, 25 bp, Homo sapien
tgctggtgatgcctggcttagatcc

SEQ ID NO: 4181475 - DNA, 25 bp, Homo sapien
gcctggggtcactggacttccccag

SEQ ID NO: 4181476 - DNA, 25 bp, Homo sapien
tgaggcaggttatcacatatgaggg

SEQ ID NO: 4181477 - DNA, 25 bp, Homo sapien
ataaacaacggagacccctcttgcg

SEQ ID NO: 4181478 - DNA, 25 bp, Homo sapien
gggcttttccctcgtgttgctcatg

SEQ ID NO: 4181479 - DNA, 25 bp, Homo sapien
tgtgtaccaccctatagaacctgtt

SEQ ID NO: 4181480 - DNA, 25 bp, Homo sapien
tgcgtcagaagcagaggtgtcccga

SEQ ID NO: 4181481 - DNA, 25 bp, Homo sapien
gccagcatggtctgcattccacaga

SEQ ID NO: 4181482 - DNA, 25 bp, Homo sapien
cacgtggtgtgccaggtaccagccc

SEQ ID NO: 4181483 - DNA, 25 bp, Homo sapien
tgtcccgaggccctggtgttgccag

SEQ ID NO: 4181484 - DNA, 25 bp, Homo sapien
tccccggttcaccacgagctttgca

SEQ ID NO: 4181485 - DNA, 25 bp, Homo sapien
ttcaccacgagctttgcacatgatg

SEQ ID NO: 4181486 - DNA, 25 bp, Homo sapien
tgcacatgatgcttgttctgctcct

SEQ ID NO: 4181487 - DNA, 25 bp, Homo sapien
ctttgcacatgatgcttgttctgct

SEQ ID NO: 4181488 - DNA, 25 bp, Homo sapien
cgaagccgcgtaggccgcccaggcc

SEQ ID NO: 4181489 - DNA, 25 bp, Homo sapien
cgccgaagccgcgtaggccgcccag

SEQ ID NO: 4181490 - DNA, 25 bp, Homo sapien
cccagcatgaatggggcgccgagcg

SEQ ID NO: 4181491 - DNA, 25 bp, Homo sapien
tgcgtggccgcgcagccgatgccca

SEQ ID NO: 4181492 - DNA, 25 bp, Homo sapien
cctgctggggtgagcatcatggtgc

SEQ ID NO: 4181493 - DNA, 25 bp, Homo sapien
ccttgggcctcggtgctctggtcct

SEQ ID NO: 4181494 - DNA, 25 bp, Homo sapien
tctggtcctgctggggtgagcatca

SEQ ID NO: 4181495 - DNA, 25 bp, Homo sapien
catcatggtgccaggagcttcagcc

SEQ ID NO: 4181496 - DNA, 25 bp, Homo sapien
gcacctgcaggctccgcggtggcag

SEQ ID NO: 4181497 - DNA, 25 bp, Homo sapien
caggctccgcggtggcagcggcatg

SEQ ID NO: 4181498 - DNA, 25 bp, Homo sapien
tccgcggtggcagcggcatggcagg

SEQ ID NO: 4181499 - DNA, 25 bp, Homo sapien
caggagcacctgcaggctccgcggt

SEQ ID NO: 4181500 - DNA, 25 bp, Homo sapien
gggctgtgaacccccgcctgccctg

SEQ ID NO: 4181501 - DNA, 25 bp, Homo sapien
ggctgtgaacccccgcctgccctgg

SEQ ID NO: 4181502 - DNA, 25 bp, Homo sapien
tgactcctttggtggcttcacgcgg

SEQ ID NO: 4181503 - DNA, 25 bp, Homo sapien
tccttgatggccctgagcgtgaaca

SEQ ID NO: 4181504 - DNA, 25 bp, Homo sapien
tagacaaactgctcgctgcggaagc

SEQ ID NO: 4181505 - DNA, 25 bp, Homo sapien
ggttccccgacagcttatagatgcg

SEQ ID NO: 4181506 - DNA, 25 bp, Homo sapien
caccgatgccgtcgtccctggaggg

SEQ ID NO: 4181507 - DNA, 25 bp, Homo sapien
gacaccgatgccgtcgtccctggag

SEQ ID NO: 4181508 - DNA, 25 bp, Homo sapien
gcaccactgggcgtgcatctgacac

SEQ ID NO: 4181509 - DNA, 25 bp, Homo sapien
cgtgcatctgacaccgatgccgtcg

SEQ ID NO: 4181510 - DNA, 25 bp, Homo sapien
cagggtgagagccactccccgggca

SEQ ID NO: 4181511 - DNA, 25 bp, Homo sapien
gggcgtcccctcaatggtgactgtg

SEQ ID NO: 4181512 - DNA, 25 bp, Homo sapien
gaataccacagtgcggccccgatag

SEQ ID NO: 4181513 - DNA, 25 bp, Homo sapien
tggttgaagtcctgcccgcagaagt

SEQ ID NO: 4181514 - DNA, 25 bp, Homo sapien
atgcggccacttcgcgtgccggcga

SEQ ID NO: 4181515 - DNA, 25 bp, Homo sapien
cacacaggttgggtcagcatgacaa

SEQ ID NO: 4181516 - DNA, 25 bp, Homo sapien
agacgaggagaagtgaagttctgct

SEQ ID NO: 4181517 - DNA, 25 bp, Homo sapien
gggagcaagcatccttcacagtgga

SEQ ID NO: 4181518 - DNA, 25 bp, Homo sapien
catccttcacagtggagcaaggcca

SEQ ID NO: 4181519 - DNA, 25 bp, Homo sapien
gcccattgaccccacatgctgccgg

SEQ ID NO: 4181520 - DNA, 25 bp, Homo sapien
ttgaccccacatgctgccgggcact

SEQ ID NO: 4181521 - DNA, 25 bp, Homo sapien
gcagaacaacaacagaggctccaca

SEQ ID NO: 4181522 - DNA, 25 bp, Homo sapien
gcactgccacaggccgccaccaagt

SEQ ID NO: 4181523 - DNA, 25 bp, Homo sapien
aaagggggcgggcacacgctcacca

SEQ ID NO: 4181524 - DNA, 25 bp, Homo sapien
ggcaaacagcaggtcgctccctgca

SEQ ID NO: 4181525 - DNA, 25 bp, Homo sapien
agatgtcggcaggttaccgtgcagg

SEQ ID NO: 4181526 - DNA, 25 bp, Homo sapien
actacatccaggagaggcggaaagg

SEQ ID NO: 4181527 - DNA, 25 bp, Homo sapien
tacgcttcccagcatccacgggggg

SEQ ID NO: 4181528 - DNA, 25 bp, Homo sapien
tgaaaccccaaaaggcacagtacgc

SEQ ID NO: 4181529 - DNA, 25 bp, Homo sapien
accacacaagcatagtgtgcccgag

SEQ ID NO: 4181530 - DNA, 25 bp, Homo sapien
ctcctacatcgtggtctctgctgtg

SEQ ID NO: 4181531 - DNA, 25 bp, Homo sapien
tggggcttggccagagtctccgcca

SEQ ID NO: 4181532 - DNA, 25 bp, Homo sapien
agccaggctgtcaccagcacgggtc

SEQ ID NO: 4181533 - DNA, 25 bp, Homo sapien
ggcttggccagagtctccgccacag

SEQ ID NO: 4181534 - DNA, 25 bp, Homo sapien
agtctccgccacagccaggctgtca

SEQ ID NO: 4181535 - DNA, 25 bp, Homo sapien
ccaccatagactgcaccacctcagt

SEQ ID NO: 4181536 - DNA, 25 bp, Homo sapien
acctcagtcacataccactgcctgg

SEQ ID NO: 4181537 - DNA, 25 bp, Homo sapien
tcagtcacataccactgcctgggct

SEQ ID NO: 4181538 - DNA, 25 bp, Homo sapien
ggtggggccaccgtgaaccaccata

SEQ ID NO: 4181539 - DNA, 25 bp, Homo sapien
tgaggcggggatgcacctgtggagc

SEQ ID NO: 4181540 - DNA, 25 bp, Homo sapien
ctggcaaggggagttgcccaactct

SEQ ID NO: 4181541 - DNA, 25 bp, Homo sapien
ctgtgaggcggggatgcacctgtgg

SEQ ID NO: 4181542 - DNA, 25 bp, Homo sapien
gcaaggggagttgcccaactctgcc

SEQ ID NO: 4181543 - DNA, 25 bp, Homo sapien
acatgcacacgggcgagtcgaccct

SEQ ID NO: 4181544 - DNA, 25 bp, Homo sapien
gagaccgaagtgcagtcccgaggcc

SEQ ID NO: 4181545 - DNA, 25 bp, Homo sapien
acacgggcgagtcgaccctgggctc

SEQ ID NO: 4181546 - DNA, 25 bp, Homo sapien
agccgagaccgaagtgcagtcccga

SEQ ID NO: 4181547 - DNA, 25 bp, Homo sapien
gtgccgacgcccacaccctggccac

SEQ ID NO: 4181548 - DNA, 25 bp, Homo sapien
gaggagtacagaggctgctcgtaaa

SEQ ID NO: 4181549 - DNA, 25 bp, Homo sapien
acagaggctgctcgtaaagtgggaa

SEQ ID NO: 4181550 - DNA, 25 bp, Homo sapien
acctgccagaggaaccttgggccct

SEQ ID NO: 4181551 - DNA, 25 bp, Homo sapien
cgcaactgcacctgggaggagtaca

SEQ ID NO: 4181552 - DNA, 25 bp, Homo sapien
aagtcaaaccagacccggaagagtg

SEQ ID NO: 4181553 - DNA, 25 bp, Homo sapien
acccggaagagtggagcccaaagct

SEQ ID NO: 4181554 - DNA, 25 bp, Homo sapien
agtcaaaccagacccggaagagtgg

SEQ ID NO: 4181555 - DNA, 25 bp, Homo sapien
accagacccggaagagtggagccca

SEQ ID NO: 4181556 - DNA, 25 bp, Homo sapien
cagggcccagcgaaagccctggttg

SEQ ID NO: 4181557 - DNA, 25 bp, Homo sapien
gggagggccgcattcctgagcgccg

SEQ ID NO: 4181558 - DNA, 25 bp, Homo sapien
gggcgctgtgtttctgagccaaaga

SEQ ID NO: 4181559 - DNA, 25 bp, Homo sapien
ttggagtccgatccatcaggcctgg

SEQ ID NO: 4181560 - DNA, 25 bp, Homo sapien
caccggggtttgagaggtccaccag

SEQ ID NO: 4181561 - DNA, 25 bp, Homo sapien
tgaggacgaggtctcgcaggatggg

SEQ ID NO: 4181562 - DNA, 25 bp, Homo sapien
acgacgctctcgtaggccagggcag

SEQ ID NO: 4181563 - DNA, 25 bp, Homo sapien
cttctcggtcatggcgtagaggtac

SEQ ID NO: 4181564 - DNA, 25 bp, Homo sapien
cacaggacgtgtactgcacacagct

SEQ ID NO: 4181565 - DNA, 25 bp, Homo sapien
gacacagctcacaggacgtgtactg

SEQ ID NO: 4181566 - DNA, 25 bp, Homo sapien
tgggggtcccgtgaccccagacaca

SEQ ID NO: 4181567 - DNA, 25 bp, Homo sapien
gctcacaggacgtgtactgcacaca

SEQ ID NO: 4181568 - DNA, 25 bp, Homo sapien
gacacattgcggggctgcacagtca

SEQ ID NO: 4181569 - DNA, 25 bp, Homo sapien
ggctcgtctgctcgctcacaggcgt

SEQ ID NO: 4181570 - DNA, 25 bp, Homo sapien
tgggacctgggacatggtgacagac

SEQ ID NO: 4181571 - DNA, 25 bp, Homo sapien
cagcaggtccgcagcaaagcgctgg

SEQ ID NO: 4181572 - DNA, 25 bp, Homo sapien
agtcctcgaaggagcagttgacgcc

SEQ ID NO: 4181573 - DNA, 25 bp, Homo sapien
tccaggacgctctcagattccgtga

SEQ ID NO: 4181574 - DNA, 25 bp, Homo sapien
tgagcggcagtggatccggccatcc

SEQ ID NO: 4181575 - DNA, 25 bp, Homo sapien
gctgagaggtcaggcacgttccagg

SEQ ID NO: 4181576 - DNA, 25 bp, Homo sapien
ttgtagaagacgaagtccacagacg

SEQ ID NO: 4181577 - DNA, 25 bp, Homo sapien
gaagacgaagtccacagacgcaaac

SEQ ID NO: 4181578 - DNA, 25 bp, Homo sapien
agacgaagtccacagacgcaaactt

SEQ ID NO: 4181579 - DNA, 25 bp, Homo sapien
tagaagacgaagtccacagacgcaa

SEQ ID NO: 4181580 - DNA, 25 bp, Homo sapien
taaaaagcctgcttggctcacggca

SEQ ID NO: 4181581 - DNA, 25 bp, Homo sapien
gagtccatctgtgagtcagtcaaca

SEQ ID NO: 4181582 - DNA, 25 bp, Homo sapien
ggatgctgcatcgtccaacagtagc

SEQ ID NO: 4181583 - DNA, 25 bp, Homo sapien
cactgtccatatcacggtggcaaca

SEQ ID NO: 4181584 - DNA, 25 bp, Homo sapien
ggaaaggagccgttgacacaggaca

SEQ ID NO: 4181585 - DNA, 25 bp, Homo sapien
gtatttgcaccagtggcagggaaag

SEQ ID NO: 4181586 - DNA, 25 bp, Homo sapien
cagtcagccacgttgtgtgtgcaca

SEQ ID NO: 4181587 - DNA, 25 bp, Homo sapien
tgtgtgcacacgtggcggtatttgc

SEQ ID NO: 4181588 - DNA, 25 bp, Homo sapien
cgggctgcccgggatgtggaagagg

SEQ ID NO: 4181589 - DNA, 25 bp, Homo sapien
ttttaccactcccactggcacgtag

SEQ ID NO: 4181590 - DNA, 25 bp, Homo sapien
ggcactcatatccacgctggcctga

SEQ ID NO: 4181591 - DNA, 25 bp, Homo sapien
ggcacgtagatctgcgtggagggca

SEQ ID NO: 4181592 - DNA, 25 bp, Homo sapien
gctgacatcgttcccctcgtaggag

SEQ ID NO: 4181593 - DNA, 25 bp, Homo sapien
cctggatgttctgtgggttgtcaat

SEQ ID NO: 4181594 - DNA, 25 bp, Homo sapien
aatgacaaagttgccgttccacacg

SEQ ID NO: 4181595 - DNA, 25 bp, Homo sapien
caggttcactggcaggtcgctgaca

SEQ ID NO: 4181596 - DNA, 25 bp, Homo sapien
atccgcactcgaagcgcgggtcggc

SEQ ID NO: 4181597 - DNA, 25 bp, Homo sapien
tgcatccacgatgcaggtgtgtcgg

SEQ ID NO: 4181598 - DNA, 25 bp, Homo sapien
ggtgtgtcggcagcgcagtggtgtc

SEQ ID NO: 4181599 - DNA, 25 bp, Homo sapien
tcggtgcagcgactgctgccgtgac

SEQ ID NO: 4181600 - DNA, 25 bp, Homo sapien
cagacgcacgtcttcgaatcgcagg

SEQ ID NO: 4181601 - DNA, 25 bp, Homo sapien
caggttctcgcctgtgatagtgagc

SEQ ID NO: 4181602 - DNA, 25 bp, Homo sapien
tgatagtgagccgcgtgccgccctg

SEQ ID NO: 4181603 - DNA, 25 bp, Homo sapien
tgctccgcactgatgtactcgctct

SEQ ID NO: 4181604 - DNA, 25 bp, Homo sapien
tgacagggcgcggtagtgtggtgag

SEQ ID NO: 4181605 - DNA, 25 bp, Homo sapien
gtcatgggcacgcacggagctggcg

SEQ ID NO: 4181606 - DNA, 25 bp, Homo sapien
gaaggtgaagcgcttgggtgacagg

SEQ ID NO: 4181607 - DNA, 25 bp, Homo sapien
tgtggtgagcagtcccgcacacaca

SEQ ID NO: 4181608 - DNA, 25 bp, Homo sapien
ggctcacacggtagaaggttggtgt

SEQ ID NO: 4181609 - DNA, 25 bp, Homo sapien
gcctgcgttcaggtggcttccctcg

SEQ ID NO: 4181610 - DNA, 25 bp, Homo sapien
gcttccctcgatgccaatccaggtg

SEQ ID NO: 4181611 - DNA, 25 bp, Homo sapien
ccacatcactgcctgcgttcaggtg

SEQ ID NO: 4181612 - DNA, 25 bp, Homo sapien
caggcaccggatctcacgggagttc

SEQ ID NO: 4181613 - DNA, 25 bp, Homo sapien
gggtgtcaggcaccggatctcacgg

SEQ ID NO: 4181614 - DNA, 25 bp, Homo sapien
tgtcaggcaccggatctcacgggag

SEQ ID NO: 4181615 - DNA, 25 bp, Homo sapien
gcaccggatctcacgggagttcctc

SEQ ID NO: 4181616 - DNA, 25 bp, Homo sapien
gggtcctcggtgtagttgtacttca

SEQ ID NO: 4181617 - DNA, 25 bp, Homo sapien
ctgttgatgctccactcggggtcga

SEQ ID NO: 4181618 - DNA, 25 bp, Homo sapien
agctgggcgcggttgatgttgatga

SEQ ID NO: 4181619 - DNA, 25 bp, Homo sapien
cactcggggtcgatcctcaggatgg

SEQ ID NO: 4181620 - DNA, 25 bp, Homo sapien
cggattcggggttcacggacagtgg

SEQ ID NO: 4181621 - DNA, 25 bp, Homo sapien
cctccatacttggcccggattcggg

SEQ ID NO: 4181622 - DNA, 25 bp, Homo sapien
gttctccctctcaatgcctccatac

SEQ ID NO: 4181623 - DNA, 25 bp, Homo sapien
attcggggttcacggacagtggcca

SEQ ID NO: 4181624 - DNA, 25 bp, Homo sapien
gcgcggcataccatggtggtgtcat

SEQ ID NO: 4181625 - DNA, 25 bp, Homo sapien
agttgagcacaagcagggagcgcac

SEQ ID NO: 4181626 - DNA, 25 bp, Homo sapien
gggagcgcacgttgtccatgacgaa

SEQ ID NO: 4181627 - DNA, 25 bp, Homo sapien
ctctggtgggctgcgcacagggttg

SEQ ID NO: 4181628 - DNA, 25 bp, Homo sapien
ttgggcgcctcgcacagcagttgcg

SEQ ID NO: 4181629 - DNA, 25 bp, Homo sapien
ggtacagggtgtggagccgatgagc

SEQ ID NO: 4181630 - DNA, 25 bp, Homo sapien
tgagcaccgtgtagttgagtcggga

SEQ ID NO: 4181631 - DNA, 25 bp, Homo sapien
agcagttgcgtctccgacacggtga

SEQ ID NO: 4181632 - DNA, 25 bp, Homo sapien
gagctaggggtgagtctcgggcaag

SEQ ID NO: 4181633 - DNA, 25 bp, Homo sapien
agtctcgggcaaggtcagagctggg

SEQ ID NO: 4181634 - DNA, 25 bp, Homo sapien
gccgggcgccctctgagctaggggt

SEQ ID NO: 4181635 - DNA, 25 bp, Homo sapien
taggggtgagtctcgggcaaggtca

SEQ ID NO: 4181636 - DNA, 25 bp, Homo sapien
cttccttgcattcgagggccacgcg

SEQ ID NO: 4181637 - DNA, 25 bp, Homo sapien
gcttgtaggcgatgagcacagccac

SEQ ID NO: 4181638 - DNA, 25 bp, Homo sapien
tgcagtgtccctggcgagaactcga

SEQ ID NO: 4181639 - DNA, 25 bp, Homo sapien
ggctgtccgagtacacctgcagtgt

SEQ ID NO: 4181640 - DNA, 25 bp, Homo sapien
ggctaaggtcctacactgcagcagg

SEQ ID NO: 4181641 - DNA, 25 bp, Homo sapien
tatctgcaaacgctcaaagtctcgc

SEQ ID NO: 4181642 - DNA, 25 bp, Homo sapien
ccctagagccctgaacatgtgtgag

SEQ ID NO: 4181643 - DNA, 25 bp, Homo sapien
ccctgatcaggagcatggtgtggca

SEQ ID NO: 4181644 - DNA, 25 bp, Homo sapien
tctccttgagcacagggtggtcctc

SEQ ID NO: 4181645 - DNA, 25 bp, Homo sapien
gcaccgtccaggtcattggtcagct

SEQ ID NO: 4181646 - DNA, 25 bp, Homo sapien
catggcatatgtccggtagtcaagg

SEQ ID NO: 4181647 - DNA, 25 bp, Homo sapien
ggtggtcctcgatcccaggaaagag

SEQ ID NO: 4181648 - DNA, 25 bp, Homo sapien
gagcacacagagctcagaccacaga

SEQ ID NO: 4181649 - DNA, 25 bp, Homo sapien
ggagcacacagagctcagaccacag

SEQ ID NO: 4181650 - DNA, 25 bp, Homo sapien
gcgtattccatctcgccctgcaggg

SEQ ID NO: 4181651 - DNA, 25 bp, Homo sapien
gcaggaagtgcttcttggtcagcag

SEQ ID NO: 4181652 - DNA, 25 bp, Homo sapien
gctgtgcctccagcgtgcggatgaa

SEQ ID NO: 4181653 - DNA, 25 bp, Homo sapien
gcagctgcccgaacagtgtcagcga

SEQ ID NO: 4181654 - DNA, 25 bp, Homo sapien
tctcgatgaggtcggaaagcagctg

SEQ ID NO: 4181655 - DNA, 25 bp, Homo sapien
ctcgatgaggtcggaaagcagctgc

SEQ ID NO: 4181656 - DNA, 25 bp, Homo sapien
ggtgaaccagttagttagcatcttc

SEQ ID NO: 4181657 - DNA, 25 bp, Homo sapien
aggaacttatacaagaggaaggtga

SEQ ID NO: 4181658 - DNA, 25 bp, Homo sapien
gaggaacttatacaagaggaaggtg

SEQ ID NO: 4181659 - DNA, 25 bp, Homo sapien
tgtatttcccgtccagtgtctctcc

SEQ ID NO: 4181660 - DNA, 25 bp, Homo sapien
tgccccattgcctgtctgctgtatt

SEQ ID NO: 4181661 - DNA, 25 bp, Homo sapien
gtctctcccggcagcgaggatgtct

SEQ ID NO: 4181662 - DNA, 25 bp, Homo sapien
ctggccaggactccgctctgtgcag

SEQ ID NO: 4181663 - DNA, 25 bp, Homo sapien
cattaagttagccacgaaggaggag

SEQ ID NO: 4181664 - DNA, 25 bp, Homo sapien
tgtatcgaggaacatggcgtggcac

SEQ ID NO: 4181665 - DNA, 25 bp, Homo sapien
ctcagagagtgaaaggacggcagct

SEQ ID NO: 4181666 - DNA, 25 bp, Homo sapien
gatactgacatacccacctgaggag

SEQ ID NO: 4181667 - DNA, 25 bp, Homo sapien
cttgatggcgcagtacagcatgaac

SEQ ID NO: 4181668 - DNA, 25 bp, Homo sapien
gcagtacagcatgaacagcggctcc

SEQ ID NO: 4181669 - DNA, 25 bp, Homo sapien
tggcgcagtacagcatgaacagcgg

SEQ ID NO: 4181670 - DNA, 25 bp, Homo sapien
tacagcatgaacagcggctccccag

SEQ ID NO: 4181671 - DNA, 25 bp, Homo sapien
accagggcacccaggacagagggca

SEQ ID NO: 4181672 - DNA, 25 bp, Homo sapien
caggacagagggcagccacgctcac

SEQ ID NO: 4181673 - DNA, 25 bp, Homo sapien
gtggggggcaccagggcacccagga

SEQ ID NO: 4181674 - DNA, 25 bp, Homo sapien
acccaggacagagggcagccacgct

SEQ ID NO: 4181675 - DNA, 25 bp, Homo sapien
ccaggtccatgtccgcggccttggg

SEQ ID NO: 4181676 - DNA, 25 bp, Homo sapien
ggtgcattctcattctcagggttca

SEQ ID NO: 4181677 - DNA, 25 bp, Homo sapien
ccttggcctgggtgaccgtgtcaca

SEQ ID NO: 4181678 - DNA, 25 bp, Homo sapien
tagggcacgcccttgtaggcagcgt

SEQ ID NO: 4181679 - DNA, 25 bp, Homo sapien
ggcagccgtggccccgcccgctcac

SEQ ID NO: 4181680 - DNA, 25 bp, Homo sapien
ccgggcagccgtggccccgcccgct

SEQ ID NO: 4181681 - DNA, 25 bp, Homo sapien
cgggcagccgtggccccgcccgctc

SEQ ID NO: 4181682 - DNA, 25 bp, Homo sapien
gggcagccgtggccccgcccgctca

SEQ ID NO: 4181683 - DNA, 25 bp, Homo sapien
tgctgcagcacacttaacctgccat

SEQ ID NO: 4181684 - DNA, 25 bp, Homo sapien
catagtcccctgcaatgtgccacag

SEQ ID NO: 4181685 - DNA, 25 bp, Homo sapien
catcacagcagtgtagtgggacggg

SEQ ID NO: 4181686 - DNA, 25 bp, Homo sapien
gcacagggcagggacatacctccgc

SEQ ID NO: 4181687 - DNA, 25 bp, Homo sapien
tcttccaatcgttgtcaatcttggt

SEQ ID NO: 4181688 - DNA, 25 bp, Homo sapien
tcagcctcttccaatcgttgtcaat

SEQ ID NO: 4181689 - DNA, 25 bp, Homo sapien
cctgcaggatgatgcgcgccatgcg

SEQ ID NO: 4181690 - DNA, 25 bp, Homo sapien
aatcttggtggtgacgtcctcgtcc

SEQ ID NO: 4181691 - DNA, 25 bp, Homo sapien
gaggcctgtgctagggtcggagggc

SEQ ID NO: 4181692 - DNA, 25 bp, Homo sapien
aaacattggtggctgcgctgtggaa

SEQ ID NO: 4181693 - DNA, 25 bp, Homo sapien
tgctgcaaacattggtggctgcgct

SEQ ID NO: 4181694 - DNA, 25 bp, Homo sapien
tgcaaacattggtggctgcgctgtg

SEQ ID NO: 4181695 - DNA, 25 bp, Homo sapien
agtgccaccgaggacccgtctgtca

SEQ ID NO: 4181696 - DNA, 25 bp, Homo sapien
ggacgtctgcttgggcaccagtgcc

SEQ ID NO: 4181697 - DNA, 25 bp, Homo sapien
tggaggagttggagatgttgtaggc

SEQ ID NO: 4181698 - DNA, 25 bp, Homo sapien
tgttgtaggcggacgtctgcttggg

SEQ ID NO: 4181699 - DNA, 25 bp, Homo sapien
tagccgtgtcaagtagatctccgag

SEQ ID NO: 4181700 - DNA, 25 bp, Homo sapien
ctctccaggtcgggcgtgatcatgg

SEQ ID NO: 4181701 - DNA, 25 bp, Homo sapien
aggtgccacagcttggtgccgctct

SEQ ID NO: 4181702 - DNA, 25 bp, Homo sapien
gtgatcatgggcgtgcgcgagcgca

SEQ ID NO: 4181703 - DNA, 25 bp, Homo sapien
ggcgctgcctggctgcctacacctc

SEQ ID NO: 4181704 - DNA, 25 bp, Homo sapien
tgcctggctgcctacacctcctggg

SEQ ID NO: 4181705 - DNA, 25 bp, Homo sapien
gggcaggcagggacactgagcccca

SEQ ID NO: 4181706 - DNA, 25 bp, Homo sapien
ccagggcgctgcctggctgcctaca

SEQ ID NO: 4181707 - DNA, 25 bp, Homo sapien
gaacatgtacttgatggccagcggc

SEQ ID NO: 4181708 - DNA, 25 bp, Homo sapien
gtctcaaacaggtcgtccacaaact

SEQ ID NO: 4181709 - DNA, 25 bp, Homo sapien
gctgagccccggtgtgccgtgctga

SEQ ID NO: 4181710 - DNA, 25 bp, Homo sapien
gccgtgctgaagatggtctcaaaca

SEQ ID NO: 4181711 - DNA, 25 bp, Homo sapien
cgcacgtcagcatcgtggatctggt

SEQ ID NO: 4181712 - DNA, 25 bp, Homo sapien
tggcgcacgtcagcatcgtggatct

SEQ ID NO: 4181713 - DNA, 25 bp, Homo sapien
tgtggcgcacgtcagcatcgtggat

SEQ ID NO: 4181714 - DNA, 25 bp, Homo sapien
ggtgtggcgcacgtcagcatcgtgg

SEQ ID NO: 4181715 - DNA, 25 bp, Homo sapien
tgttgccctcatcactgcaaccagc

SEQ ID NO: 4181716 - DNA, 25 bp, Homo sapien
aaccagccggcttggggctggtcca

SEQ ID NO: 4181717 - DNA, 25 bp, Homo sapien
ccctcatcactgcaaccagccggct

SEQ ID NO: 4181718 - DNA, 25 bp, Homo sapien
caaccagccggcttggggctggtcc

SEQ ID NO: 4181719 - DNA, 25 bp, Homo sapien
tttccatgcagacggggaaacgagg

SEQ ID NO: 4181720 - DNA, 25 bp, Homo sapien
catggctttccatgcagacggggaa

SEQ ID NO: 4181721 - DNA, 25 bp, Homo sapien
gccctcccagctccgaatccaaagt

SEQ ID NO: 4181722 - DNA, 25 bp, Homo sapien
gcgctgctcagataggcctctgctc

SEQ ID NO: 4181723 - DNA, 25 bp, Homo sapien
tgggccaccaccgacaagcaggcgt

SEQ ID NO: 4181724 - DNA, 25 bp, Homo sapien
gtgaatgtcgaacacaaactgtggg

SEQ ID NO: 4181725 - DNA, 25 bp, Homo sapien
cttgtgaatgtcgaacacaaactgt

SEQ ID NO: 4181726 - DNA, 25 bp, Homo sapien
ctgggccaccaccgacaagcaggcg

SEQ ID NO: 4181727 - DNA, 25 bp, Homo sapien
gcatcttggcgatgtctgcatagta

SEQ ID NO: 4181728 - DNA, 25 bp, Homo sapien
tgcaaggcgctcatgctgttgaact

SEQ ID NO: 4181729 - DNA, 25 bp, Homo sapien
agatacgcactcatgtcctggtcgc

SEQ ID NO: 4181730 - DNA, 25 bp, Homo sapien
taggagtagatctcgtgcaaggcgc

SEQ ID NO: 4181731 - DNA, 25 bp, Homo sapien
agcctgtgggctcccacggtgttca

SEQ ID NO: 4181732 - DNA, 25 bp, Homo sapien
ctagcccagcctgtgggctcccacg

SEQ ID NO: 4181733 - DNA, 25 bp, Homo sapien
gcccagcctgtgggctcccacggtg

SEQ ID NO: 4181734 - DNA, 25 bp, Homo sapien
ccagcctgtgggctcccacggtgtt

SEQ ID NO: 4181735 - DNA, 25 bp, Homo sapien
tgcagggccaggagaactgtcagca

SEQ ID NO: 4181736 - DNA, 25 bp, Homo sapien
gcagggccaggagaactgtcagcat

SEQ ID NO: 4181737 - DNA, 25 bp, Homo sapien
ctgcagggccaggagaactgtcagc

SEQ ID NO: 4181738 - DNA, 25 bp, Homo sapien
tgctcagggccatcgtgtccaccac

SEQ ID NO: 4181739 - DNA, 25 bp, Homo sapien
ctcagggccatcgtgtccaccacct

SEQ ID NO: 4181740 - DNA, 25 bp, Homo sapien
ctgctcagggccatcgtgtccacca

SEQ ID NO: 4181741 - DNA, 25 bp, Homo sapien
agctgctcagggccatcgtgtccac

SEQ ID NO: 4181742 - DNA, 25 bp, Homo sapien
cactgtaatatggactggcctcagc

SEQ ID NO: 4181743 - DNA, 25 bp, Homo sapien
tgctactcacatggacaagggcagc

SEQ ID NO: 4181744 - DNA, 25 bp, Homo sapien
tgtcatgtcaaaccaaaacagcggc

SEQ ID NO: 4181745 - DNA, 25 bp, Homo sapien
gagctcagcctacccttgaagacag

SEQ ID NO: 4181746 - DNA, 25 bp, Homo sapien
tagacagcacaggtagtcggcttga

SEQ ID NO: 4181747 - DNA, 25 bp, Homo sapien
taactccacgacctggcagagggag

SEQ ID NO: 4181748 - DNA, 25 bp, Homo sapien
tgggaaccagtgacaagtagggact

SEQ ID NO: 4181749 - DNA, 25 bp, Homo sapien
gctaaagtgcttgcgcctagacaca

SEQ ID NO: 4181750 - DNA, 25 bp, Homo sapien
ccaggtgggtgccagtttcacagca

SEQ ID NO: 4181751 - DNA, 25 bp, Homo sapien
tagctgtgtagcaccaacgtgagcc

SEQ ID NO: 4181752 - DNA, 25 bp, Homo sapien
ggccgaggcgtgagcttttccagca

SEQ ID NO: 4181753 - DNA, 25 bp, Homo sapien
ggtatatcaagaggccaggctccca

SEQ ID NO: 4181754 - DNA, 25 bp, Homo sapien
agccagcgcactcaagcagcaatca

SEQ ID NO: 4181755 - DNA, 25 bp, Homo sapien
atagctgatggtttaataccctcag

SEQ ID NO: 4181756 - DNA, 25 bp, Homo sapien
gccagcgcactcaagcagcaatcag

SEQ ID NO: 4181757 - DNA, 25 bp, Homo sapien
gatggtttaataccctcaggagcca

SEQ ID NO: 4181758 - DNA, 25 bp, Homo sapien
tgacggcatctacaaggcggctaca

SEQ ID NO: 4181759 - DNA, 25 bp, Homo sapien
ggttttagccggatgcagcaacgat

SEQ ID NO: 4181760 - DNA, 25 bp, Homo sapien
caggccctggtgttgtcctcaagga

SEQ ID NO: 4181761 - DNA, 25 bp, Homo sapien
cagcaacgatggctggaacgcccat

SEQ ID NO: 4181762 - DNA, 25 bp, Homo sapien
ttcaagttcacccatgtcgtcgcat

SEQ ID NO: 4181763 - DNA, 25 bp, Homo sapien
tcgtcgcatgcgtgagaatttcctt

SEQ ID NO: 4181764 - DNA, 25 bp, Homo sapien
tatgactgtgactacctagggacct

SEQ ID NO: 4181765 - DNA, 25 bp, Homo sapien
ctatttgtaagtgcgcagctcagcg

SEQ ID NO: 4181766 - DNA, 25 bp, Homo sapien
ttgtaaggtggaaactggaacctga

SEQ ID NO: 4181767 - DNA, 25 bp, Homo sapien
gcacagccgacaggacccgtgctgt

SEQ ID NO: 4181768 - DNA, 25 bp, Homo sapien
gattctgaacgtcctgagctccttc

SEQ ID NO: 4181769 - DNA, 25 bp, Homo sapien
cagaggcacagattcggagagagtt

SEQ ID NO: 4181770 - DNA, 25 bp, Homo sapien
ccaagtcttcagacacatgacctgg

SEQ ID NO: 4181771 - DNA, 25 bp, Homo sapien
cccaagcccgctgtgtccaagtctt

SEQ ID NO: 4181772 - DNA, 25 bp, Homo sapien
aaacaccacccaagcccgctgtgtc

SEQ ID NO: 4181773 - DNA, 25 bp, Homo sapien
gtcttcagacacatgacctggctct

SEQ ID NO: 4181774 - DNA, 25 bp, Homo sapien
gccttcaaggcctgctcccagccct

SEQ ID NO: 4181775 - DNA, 25 bp, Homo sapien
ccagccctgtccctggacaccatcc

SEQ ID NO: 4181776 - DNA, 25 bp, Homo sapien
tatggccttcaaggcctgctcccag

SEQ ID NO: 4181777 - DNA, 25 bp, Homo sapien
cctgtccctggacaccatcccccat

SEQ ID NO: 4181778 - DNA, 25 bp, Homo sapien
ccactcattcggtgagtgctgacca

SEQ ID NO: 4181779 - DNA, 25 bp, Homo sapien
tgtgcatgtgtcagtcacactcagg

SEQ ID NO: 4181780 - DNA, 25 bp, Homo sapien
gtgcatgtgtcagtcacactcaggg

SEQ ID NO: 4181781 - DNA, 25 bp, Homo sapien
ttcatccactcattcggtgagtgct

SEQ ID NO: 4181782 - DNA, 25 bp, Homo sapien
cacgctggcagacgggcagtgtggg

SEQ ID NO: 4181783 - DNA, 25 bp, Homo sapien
tcacgctggcagacgggcagtgtgg

SEQ ID NO: 4181784 - DNA, 25 bp, Homo sapien
tgctcacgctggcagacgggcagtg

SEQ ID NO: 4181785 - DNA, 25 bp, Homo sapien
ctcacgctggcagacgggcagtgtg

SEQ ID NO: 4181786 - DNA, 25 bp, Homo sapien
tcctgggatgatccctctcgtctgc

SEQ ID NO: 4181787 - DNA, 25 bp, Homo sapien
tgatccctctcgtctgcataccctt

SEQ ID NO: 4181788 - DNA, 25 bp, Homo sapien
ctctcgtctgcataccctttctcac

SEQ ID NO: 4181789 - DNA, 25 bp, Homo sapien
agcctcctgggatgatccctctcgt

SEQ ID NO: 4181790 - DNA, 25 bp, Homo sapien
tctgcttggcagctcgttggcttct

SEQ ID NO: 4181791 - DNA, 25 bp, Homo sapien
tgtttctagatcttgtgtcatgcac

SEQ ID NO: 4181792 - DNA, 25 bp, Homo sapien
cttaaaaaattacctcgtggcgatg

SEQ ID NO: 4181793 - DNA, 25 bp, Homo sapien
aatcttcgctcttttgtgtttccag

SEQ ID NO: 4181794 - DNA, 25 bp, Homo sapien
tgccagatgttccacacccagtacg

SEQ ID NO: 4181795 - DNA, 25 bp, Homo sapien
ctgccagatgttccacacccagtac

SEQ ID NO: 4181796 - DNA, 25 bp, Homo sapien
ccagatgttccacacccagtacgtg

SEQ ID NO: 4181797 - DNA, 25 bp, Homo sapien
gccagatgttccacacccagtacgt

SEQ ID NO: 4181798 - DNA, 25 bp, Homo sapien
tgatgaaattttcacactccatgca

SEQ ID NO: 4181799 - DNA, 25 bp, Homo sapien
gatgaaattttcacactccatgcat

SEQ ID NO: 4181800 - DNA, 25 bp, Homo sapien
tttgatgaaattttcacactccatg

SEQ ID NO: 4181801 - DNA, 25 bp, Homo sapien
tgctttgatgaaattttcacactcc

SEQ ID NO: 4181802 - DNA, 25 bp, Homo sapien
agcagcagggcggcctgaggcccca

SEQ ID NO: 4181803 - DNA, 25 bp, Homo sapien
gctcgtcccagttctacagcagccc

SEQ ID NO: 4181804 - DNA, 25 bp, Homo sapien
tcgtcccagttctacagcagcccag

SEQ ID NO: 4181805 - DNA, 25 bp, Homo sapien
ctcgtcccagttctacagcagccca

SEQ ID NO: 4181806 - DNA, 25 bp, Homo sapien
acaagatgcccccaatgtctgcagg

SEQ ID NO: 4181807 - DNA, 25 bp, Homo sapien
ctgacaagatgcccccaatgtctgc

SEQ ID NO: 4181808 - DNA, 25 bp, Homo sapien
ttcacactggcttctcctcatggct

SEQ ID NO: 4181809 - DNA, 25 bp, Homo sapien
cacactggcttctcctcatggctga

SEQ ID NO: 4181810 - DNA, 25 bp, Homo sapien
gcctcttctgcacaggattgctcag

SEQ ID NO: 4181811 - DNA, 25 bp, Homo sapien
gcttttcgtgaattcccagttggca

SEQ ID NO: 4181812 - DNA, 25 bp, Homo sapien
gattgctcaggttgtgcacagcctg

SEQ ID NO: 4181813 - DNA, 25 bp, Homo sapien
catccctgttgggttgccgtgcctc

SEQ ID NO: 4181814 - DNA, 25 bp, Homo sapien
gctctgaggggagaccgttccggga

SEQ ID NO: 4181815 - DNA, 25 bp, Homo sapien
gcccccatgggtttatgagctctga

SEQ ID NO: 4181816 - DNA, 25 bp, Homo sapien
cccatgggtttatgagctctgaggg

SEQ ID NO: 4181817 - DNA, 25 bp, Homo sapien
cacagcccccatgggtttatgagct

SEQ ID NO: 4181818 - DNA, 25 bp, Homo sapien
gtgttcccggtctccagactccctc

SEQ ID NO: 4181819 - DNA, 25 bp, Homo sapien
actcgagggatgtgcacgtatgtgc

SEQ ID NO: 4181820 - DNA, 25 bp, Homo sapien
cacactcgagggatgtgcacgtatg

SEQ ID NO: 4181821 - DNA, 25 bp, Homo sapien
ctgcccacactcgagggatgtgcac

SEQ ID NO: 4181822 - DNA, 25 bp, Homo sapien
gcctgcagagaacctcgagcccaga

SEQ ID NO: 4181823 - DNA, 25 bp, Homo sapien
agagaacctcgagcccagaccaggg

SEQ ID NO: 4181824 - DNA, 25 bp, Homo sapien
cctgcctgcagagaacctcgagccc

SEQ ID NO: 4181825 - DNA, 25 bp, Homo sapien
tgcagagaacctcgagcccagacca

SEQ ID NO: 4181826 - DNA, 25 bp, Homo sapien
tggcacagcgccctcatgtgtagcc

SEQ ID NO: 4181827 - DNA, 25 bp, Homo sapien
ctggcacagcgccctcatgtgtagc

SEQ ID NO: 4181828 - DNA, 25 bp, Homo sapien
ggcacagcgccctcatgtgtagcca

SEQ ID NO: 4181829 - DNA, 25 bp, Homo sapien
cacaaatggcaacccagcaccggtg

SEQ ID NO: 4181830 - DNA, 25 bp, Homo sapien
ccacaaatggcaacccagcaccggt

SEQ ID NO: 4181831 - DNA, 25 bp, Homo sapien
acaaatggcaacccagcaccggtga

SEQ ID NO: 4181832 - DNA, 25 bp, Homo sapien
agctgtttagccctggtttctgttt

SEQ ID NO: 4181833 - DNA, 25 bp, Homo sapien
tccctcagagtccagacaccacttt

SEQ ID NO: 4181834 - DNA, 25 bp, Homo sapien
tcagagtccagacaccactttggcc

SEQ ID NO: 4181835 - DNA, 25 bp, Homo sapien
cactttggccccaggcatctttggg

SEQ ID NO: 4181836 - DNA, 25 bp, Homo sapien
gagcagtagaaagttcggccttctg

SEQ ID NO: 4181837 - DNA, 25 bp, Homo sapien
tgagcttcgtggatgggacctgttc

SEQ ID NO: 4181838 - DNA, 25 bp, Homo sapien
ccctcaagggcatggcacggatgta

SEQ ID NO: 4181839 - DNA, 25 bp, Homo sapien
aaggacattgtgatcccctcaaggg

SEQ ID NO: 4181840 - DNA, 25 bp, Homo sapien
caagccaggtcatcgccctgcaggg

SEQ ID NO: 4181841 - DNA, 25 bp, Homo sapien
ggcacaagccaggtcatcgccctgc

SEQ ID NO: 4181842 - DNA, 25 bp, Homo sapien
cacaagccaggtcatcgccctgcag

SEQ ID NO: 4181843 - DNA, 25 bp, Homo sapien
ctcttgcggacacattcacctgcct

SEQ ID NO: 4181844 - DNA, 25 bp, Homo sapien
ccaacccaggtggaacatgagacac

SEQ ID NO: 4181845 - DNA, 25 bp, Homo sapien
gaccaacccaggtggaacatgagac

SEQ ID NO: 4181846 - DNA, 25 bp, Homo sapien
accaacccaggtggaacatgagaca

SEQ ID NO: 4181847 - DNA, 25 bp, Homo sapien
agaccaacccaggtggaacatgaga

SEQ ID NO: 4181848 - DNA, 25 bp, Homo sapien
cacagcaatgtccattaaaccgcct

SEQ ID NO: 4181849 - DNA, 25 bp, Homo sapien
ccctagcatgcccacagccccatgg

SEQ ID NO: 4181850 - DNA, 25 bp, Homo sapien
cattaaaccgccttccataagagat

SEQ ID NO: 4181851 - DNA, 25 bp, Homo sapien
agacacctctccctagcatgcccac

SEQ ID NO: 4181852 - DNA, 25 bp, Homo sapien
tgctgtgtgttcatccctcctacca

SEQ ID NO: 4181853 - DNA, 25 bp, Homo sapien
caatggcccatataaccaggagggc

SEQ ID NO: 4181854 - DNA, 25 bp, Homo sapien
tgtgcccttccaattccacggacag

SEQ ID NO: 4181855 - DNA, 25 bp, Homo sapien
actgccctggacacaagaatccagg

SEQ ID NO: 4181856 - DNA, 25 bp, Homo sapien
ctgctgaggcctttccccgagcaag

SEQ ID NO: 4181857 - DNA, 25 bp, Homo sapien
gactggtccactggtatcctgctga

SEQ ID NO: 4181858 - DNA, 25 bp, Homo sapien
tgcccatccaggcaggcccgggatg

SEQ ID NO: 4181859 - DNA, 25 bp, Homo sapien
cggcggctgttccaggactggtcca

SEQ ID NO: 4181860 - DNA, 25 bp, Homo sapien
ggacctaaggccaggaatatccttc

SEQ ID NO: 4181861 - DNA, 25 bp, Homo sapien
gggcaccttccagcaggacctaagg

SEQ ID NO: 4181862 - DNA, 25 bp, Homo sapien
tcatgagaactacaaacaggctgcc

SEQ ID NO: 4181863 - DNA, 25 bp, Homo sapien
ttccaagaagggcaccttccagcag

SEQ ID NO: 4181864 - DNA, 25 bp, Homo sapien
agggcttgtgctgggcaccagagac

SEQ ID NO: 4181865 - DNA, 25 bp, Homo sapien
tgagggcttgtgctgggcaccagag

SEQ ID NO: 4181866 - DNA, 25 bp, Homo sapien
ggcttgtgctgggcaccagagacat

SEQ ID NO: 4181867 - DNA, 25 bp, Homo sapien
gtgagggcttgtgctgggcaccaga

SEQ ID NO: 4181868 - DNA, 25 bp, Homo sapien
gtgctgacagcatggagcctcacct

SEQ ID NO: 4181869 - DNA, 25 bp, Homo sapien
aggttccgcagcatgtgctgacagc

SEQ ID NO: 4181870 - DNA, 25 bp, Homo sapien
ttagaggttccgcagcatgtgctga

SEQ ID NO: 4181871 - DNA, 25 bp, Homo sapien
tagaggttccgcagcatgtgctgac

SEQ ID NO: 4181872 - DNA, 25 bp, Homo sapien
ctggatatgcagatcaacacgttct

SEQ ID NO: 4181873 - DNA, 25 bp, Homo sapien
atttcactggatatgcagatcaaca

SEQ ID NO: 4181874 - DNA, 25 bp, Homo sapien
ttcactggatatgcagatcaacacg

SEQ ID NO: 4181875 - DNA, 25 bp, Homo sapien
tatgcagatcaacacgttctgatgc

SEQ ID NO: 4181876 - DNA, 25 bp, Homo sapien
aggagacccccatgacaagggaagt

SEQ ID NO: 4181877 - DNA, 25 bp, Homo sapien
cacaggagacccccatgacaaggga

SEQ ID NO: 4181878 - DNA, 25 bp, Homo sapien
tgacacaggagacccccatgacaag

SEQ ID NO: 4181879 - DNA, 25 bp, Homo sapien
gtgacacaggagacccccatgacaa

SEQ ID NO: 4181880 - DNA, 25 bp, Homo sapien
gagtcagggatgtgtgcactgtcaa

SEQ ID NO: 4181881 - DNA, 25 bp, Homo sapien
gtcagggatgtgtgcactgtcaaca

SEQ ID NO: 4181882 - DNA, 25 bp, Homo sapien
ctgttgttcagacaagggcagttgg

SEQ ID NO: 4181883 - DNA, 25 bp, Homo sapien
gtgggtctttggctgttgttcagac

SEQ ID NO: 4181884 - DNA, 25 bp, Homo sapien
aagacgttcccctctcggatgggag

SEQ ID NO: 4181885 - DNA, 25 bp, Homo sapien
ctttcggtggagtctgcacgctgga

SEQ ID NO: 4181886 - DNA, 25 bp, Homo sapien
ttcccctctcggatgggaggcattg

SEQ ID NO: 4181887 - DNA, 25 bp, Homo sapien
tcctgcaggcggtagctttcggtgg

SEQ ID NO: 4181888 - DNA, 25 bp, Homo sapien
ctagaacgtttctttccagcgaagt

SEQ ID NO: 4181889 - DNA, 25 bp, Homo sapien
ccagcgaagtccctcaagtggttga

SEQ ID NO: 4181890 - DNA, 25 bp, Homo sapien
ctaggcgttactgtccccggtccag

SEQ ID NO: 4181891 - DNA, 25 bp, Homo sapien
gctgaaatgctctctcaagaggtct

SEQ ID NO: 4181892 - DNA, 25 bp, Homo sapien
ccagtagccccagggaggatcttct

SEQ ID NO: 4181893 - DNA, 25 bp, Homo sapien
ggacaggccagtagccccagggagg

SEQ ID NO: 4181894 - DNA, 25 bp, Homo sapien
ggccagtagccccagggaggatctt

SEQ ID NO: 4181895 - DNA, 25 bp, Homo sapien
tggaggacaggccagtagccccagg

SEQ ID NO: 4181896 - DNA, 25 bp, Homo sapien
tcaaagccccgaagtgtctggcaag

SEQ ID NO: 4181897 - DNA, 25 bp, Homo sapien
ggtacaggaaccataggcagagccc

SEQ ID NO: 4181898 - DNA, 25 bp, Homo sapien
gaaggcacggcggaccttctgctct

SEQ ID NO: 4181899 - DNA, 25 bp, Homo sapien
tcccatgcaggagtagatgacaggc

SEQ ID NO: 4181900 - DNA, 25 bp, Homo sapien
ccctccaatacagccacactgaagg

SEQ ID NO: 4181901 - DNA, 25 bp, Homo sapien
ggcagccagatacggacttcctatg

SEQ ID NO: 4181902 - DNA, 25 bp, Homo sapien
ggataacccatccagagatacccac

SEQ ID NO: 4181903 - DNA, 25 bp, Homo sapien
gccacactgaaggcaccaaggcagc

SEQ ID NO: 4181904 - DNA, 25 bp, Homo sapien
catgtcttcaagtagggagctcctc

SEQ ID NO: 4181905 - DNA, 25 bp, Homo sapien
tgtcttcaagtagggagctcctctg

SEQ ID NO: 4181906 - DNA, 25 bp, Homo sapien
gcatgtcttcaagtagggagctcct

SEQ ID NO: 4181907 - DNA, 25 bp, Homo sapien
tgcatgtcttcaagtagggagctcc

SEQ ID NO: 4181908 - DNA, 25 bp, Homo sapien
agagggcggagctctgaactgcagc

SEQ ID NO: 4181909 - DNA, 25 bp, Homo sapien
gcagagggcggagctctgaactgca

SEQ ID NO: 4181910 - DNA, 25 bp, Homo sapien
ccagtatcagggttgaagggcaaac

SEQ ID NO: 4181911 - DNA, 25 bp, Homo sapien
attagcactcaaagaggcggcggcg

SEQ ID NO: 4181912 - DNA, 25 bp, Homo sapien
cctggaggcctattctaactgagcg

SEQ ID NO: 4181913 - DNA, 25 bp, Homo sapien
gcaaatctactagagggcgggccca

SEQ ID NO: 4181914 - DNA, 25 bp, Homo sapien
gggatgcggggatcctgctgagggt

SEQ ID NO: 4181915 - DNA, 25 bp, Homo sapien
gatgcggggatcctgctgagggtct

SEQ ID NO: 4181916 - DNA, 25 bp, Homo sapien
cagggatgcggggatcctgctgagg

SEQ ID NO: 4181917 - DNA, 25 bp, Homo sapien
ccagggatgcggggatcctgctgag

SEQ ID NO: 4181918 - DNA, 25 bp, Homo sapien
ccaaagtgcttgagtgtgtggttcc

SEQ ID NO: 4181919 - DNA, 25 bp, Homo sapien
gggttccaaagtgcttgagtgtgtg

SEQ ID NO: 4181920 - DNA, 25 bp, Homo sapien
gttccaaagtgcttgagtgtgtggt

SEQ ID NO: 4181921 - DNA, 25 bp, Homo sapien
tccaaagtgcttgagtgtgtggttc

SEQ ID NO: 4181922 - DNA, 25 bp, Homo sapien
caggttttggaagcttctaggcaga

SEQ ID NO: 4181923 - DNA, 25 bp, Homo sapien
aacaggttttggaagcttctaggca

SEQ ID NO: 4181924 - DNA, 25 bp, Homo sapien
ttttggaagcttctaggcagagccc

SEQ ID NO: 4181925 - DNA, 25 bp, Homo sapien
ttggaagcttctaggcagagcccac

SEQ ID NO: 4181926 - DNA, 25 bp, Homo sapien
tgagaagagcacacccgcaaggacc

SEQ ID NO: 4181927 - DNA, 25 bp, Homo sapien
tagcgctctgaacgagtcagcattt

SEQ ID NO: 4181928 - DNA, 25 bp, Homo sapien
aggacccaagggcactagcgctctg

SEQ ID NO: 4181929 - DNA, 25 bp, Homo sapien
tgcattaccccagaaggtgctgatg

SEQ ID NO: 4181930 - DNA, 25 bp, Homo sapien
gtaccctcgcctgctgtcatgtctg

SEQ ID NO: 4181931 - DNA, 25 bp, Homo sapien
gcacaagatcaactgggccattacc

SEQ ID NO: 4181932 - DNA, 25 bp, Homo sapien
cacagtcagagggaacgctgcagcc

SEQ ID NO: 4181933 - DNA, 25 bp, Homo sapien
gcagcgactgaaggtgttggcatct

SEQ ID NO: 4181934 - DNA, 25 bp, Homo sapien
agctggccgctcatgcaggcacagc

SEQ ID NO: 4181935 - DNA, 25 bp, Homo sapien
cccgaggagagtaatcctctttccg

SEQ ID NO: 4181936 - DNA, 25 bp, Homo sapien
gtaatcctctttccgtccatctcag

SEQ ID NO: 4181937 - DNA, 25 bp, Homo sapien
tgcagcccccgaggagagtaatcct

SEQ ID NO: 4181938 - DNA, 25 bp, Homo sapien
gcgtgggctcttctgggtacaggcc

SEQ ID NO: 4181939 - DNA, 25 bp, Homo sapien
gaagcgtgggctcttctgggtacag

SEQ ID NO: 4181940 - DNA, 25 bp, Homo sapien
gggctcttctgggtacaggccacag

SEQ ID NO: 4181941 - DNA, 25 bp, Homo sapien
tgctggggaagcgtgggctcttctg

SEQ ID NO: 4181942 - DNA, 25 bp, Homo sapien
cccctctggaaggattcagtgtctc

SEQ ID NO: 4181943 - DNA, 25 bp, Homo sapien
gctcccctctggaaggattcagtgt

SEQ ID NO: 4181944 - DNA, 25 bp, Homo sapien
tgctcccctctggaaggattcagtg

SEQ ID NO: 4181945 - DNA, 25 bp, Homo sapien
ctctggaaggattcagtgtctccat

SEQ ID NO: 4181946 - DNA, 25 bp, Homo sapien
cgaagaagaaggaaggaggtcgaca

SEQ ID NO: 4181947 - DNA, 25 bp, Homo sapien
atcgaagaagaaggaaggaggtcga

SEQ ID NO: 4181948 - DNA, 25 bp, Homo sapien
cgggaatcgaagaagaaggaaggag

SEQ ID NO: 4181949 - DNA, 25 bp, Homo sapien
aagaagaaggaaggaggtcgacaca

SEQ ID NO: 4181950 - DNA, 25 bp, Homo sapien
agaccaggacgaactgcatcaatgt

SEQ ID NO: 4181951 - DNA, 25 bp, Homo sapien
ggacgaactgcatcaatgttttgta

SEQ ID NO: 4181952 - DNA, 25 bp, Homo sapien
caatgttttgtaggtggcagcacag

SEQ ID NO: 4181953 - DNA, 25 bp, Homo sapien
atcaatgttttgtaggtggcagcac

SEQ ID NO: 4181954 - DNA, 25 bp, Homo sapien
ccactttaaagaccagtgcctccta

SEQ ID NO: 4181955 - DNA, 25 bp, Homo sapien
cctatatttgttccggagacgagag

SEQ ID NO: 4181956 - DNA, 25 bp, Homo sapien
cagtgcctcctatatttgttccgga

SEQ ID NO: 4181957 - DNA, 25 bp, Homo sapien
tttgttccggagacgagagacgatg

SEQ ID NO: 4181958 - DNA, 25 bp, Homo sapien
tggtggcatcctcagtaggcacagc

SEQ ID NO: 4181959 - DNA, 25 bp, Homo sapien
gtggtggcatcctcagtaggcacag

SEQ ID NO: 4181960 - DNA, 25 bp, Homo sapien
ggtggcatcctcagtaggcacagct

SEQ ID NO: 4181961 - DNA, 25 bp, Homo sapien
ggcatcctcagtaggcacagctgat

SEQ ID NO: 4181962 - DNA, 25 bp, Homo sapien
ggggacagcttcagctcctcggctg

SEQ ID NO: 4181963 - DNA, 25 bp, Homo sapien
ctctcagtggttggggacagcttca

SEQ ID NO: 4181964 - DNA, 25 bp, Homo sapien
gggacagcttcagctcctcggctgt

SEQ ID NO: 4181965 - DNA, 25 bp, Homo sapien
tcagtggttggggacagcttcagct

SEQ ID NO: 4181966 - DNA, 25 bp, Homo sapien
tgctttcctgtagctgtggcttgtc

SEQ ID NO: 4181967 - DNA, 25 bp, Homo sapien
cagaagaggtcggagtgggtgcagt

SEQ ID NO: 4181968 - DNA, 25 bp, Homo sapien
ctgggaagccctggcagtctgcttt

SEQ ID NO: 4181969 - DNA, 25 bp, Homo sapien
ccaatggagctgacctgtttgctgg

SEQ ID NO: 4181970 - DNA, 25 bp, Homo sapien
ccgccttcctcacagttgtgagtca

SEQ ID NO: 4181971 - DNA, 25 bp, Homo sapien
gccttcctcacagttgtgagtcact

SEQ ID NO: 4181972 - DNA, 25 bp, Homo sapien
ggtcccgccttcctcacagttgtga

SEQ ID NO: 4181973 - DNA, 25 bp, Homo sapien
tcccgccttcctcacagttgtgagt

SEQ ID NO: 4181974 - DNA, 25 bp, Homo sapien
cactgtgcctggcgccgcactgaag

SEQ ID NO: 4181975 - DNA, 25 bp, Homo sapien
actgtgcctggcgccgcactgaagc

SEQ ID NO: 4181976 - DNA, 25 bp, Homo sapien
tcactgtgcctggcgccgcactgaa

SEQ ID NO: 4181977 - DNA, 25 bp, Homo sapien
actgaagccagcactcggggagctg

SEQ ID NO: 4181978 - DNA, 25 bp, Homo sapien
ttctctacagtctgagggtcaacgg

SEQ ID NO: 4181979 - DNA, 25 bp, Homo sapien
tctacagtctgagggtcaacggagt

SEQ ID NO: 4181980 - DNA, 25 bp, Homo sapien
tctctacagtctgagggtcaacgga

SEQ ID NO: 4181981 - DNA, 25 bp, Homo sapien
tacagtctgagggtcaacggagtcc

SEQ ID NO: 4181982 - DNA, 25 bp, Homo sapien
cacatttagtggctcataaccgaaa

SEQ ID NO: 4181983 - DNA, 25 bp, Homo sapien
ttctagtcgcacaatcacctcatgg

SEQ ID NO: 4181984 - DNA, 25 bp, Homo sapien
tctctcacatggaagaagtttgctg

SEQ ID NO: 4181985 - DNA, 25 bp, Homo sapien
tgttgtagtcttgcaccactgatgg

SEQ ID NO: 4181986 - DNA, 25 bp, Homo sapien
tctgtcatccgtattgctgccagcc

SEQ ID NO: 4181987 - DNA, 25 bp, Homo sapien
ctctgtcatccgtattgctgccagc

SEQ ID NO: 4181988 - DNA, 25 bp, Homo sapien
tgtcatccgtattgctgccagcctt

SEQ ID NO: 4181989 - DNA, 25 bp, Homo sapien
tcatccgtattgctgccagccttct

SEQ ID NO: 4181990 - DNA, 25 bp, Homo sapien
tgctctggtgtggaccgtgaagacc

SEQ ID NO: 4181991 - DNA, 25 bp, Homo sapien
ctgctctggtgtggaccgtgaagac

SEQ ID NO: 4181992 - DNA, 25 bp, Homo sapien
ttctcttttagcttcaggtgggcct

SEQ ID NO: 4181993 - DNA, 25 bp, Homo sapien
tgggagtccttatcttctggagatg

SEQ ID NO: 4181994 - DNA, 25 bp, Homo sapien
tttgcttccaaggatcgggtgttga

SEQ ID NO: 4181995 - DNA, 25 bp, Homo sapien
tcgttatcgttcatatgggagtcct

SEQ ID NO: 4181996 - DNA, 25 bp, Homo sapien
gcatgatgcctagggtttgcttcca

SEQ ID NO: 4181997 - DNA, 25 bp, Homo sapien
ggatccatgcccaagacagacagag

SEQ ID NO: 4181998 - DNA, 25 bp, Homo sapien
taatttacacactcggcagcatagg

SEQ ID NO: 4181999 - DNA, 25 bp, Homo sapien
tagttacttgctgtatctagccagg

SEQ ID NO: 4182000 - DNA, 25 bp, Homo sapien
ctcatacctggttagaattagccgt

SEQ ID NO: 4182001 - DNA, 25 bp, Homo sapien
tctgtccctgcgtctccagttgctt

SEQ ID NO: 4182002 - DNA, 25 bp, Homo sapien
gcgtctccagttgctttgaccccat

SEQ ID NO: 4182003 - DNA, 25 bp, Homo sapien
cggcagccggaagcctatcctctgt

SEQ ID NO: 4182004 - DNA, 25 bp, Homo sapien
agccggaagcctatcctctgtccct

SEQ ID NO: 4182005 - DNA, 25 bp, Homo sapien
ggggctggggacaagaggtgggcag

SEQ ID NO: 4182006 - DNA, 25 bp, Homo sapien
cctgctggccttttagctggaggtg

SEQ ID NO: 4182007 - DNA, 25 bp, Homo sapien
ctcctgctggccttttagctggagg

SEQ ID NO: 4182008 - DNA, 25 bp, Homo sapien
tgctggccttttagctggaggtggg

SEQ ID NO: 4182009 - DNA, 25 bp, Homo sapien
caccatgcaatgagggggagtctgt

SEQ ID NO: 4182010 - DNA, 25 bp, Homo sapien
agtcaccatgcaatgagggggagtc

SEQ ID NO: 4182011 - DNA, 25 bp, Homo sapien
tcctcagattcaccggcataggggc

SEQ ID NO: 4182012 - DNA, 25 bp, Homo sapien
ttcaccggcataggggcagccatgg

SEQ ID NO: 4182013 - DNA, 25 bp, Homo sapien
cttttattctctctggagaagacct

SEQ ID NO: 4182014 - DNA, 25 bp, Homo sapien
agacctctggggctttccctccagg

SEQ ID NO: 4182015 - DNA, 25 bp, Homo sapien
ctggagaagacctctggggctttcc

SEQ ID NO: 4182016 - DNA, 25 bp, Homo sapien
tggggctttccctccaggggcttca

SEQ ID NO: 4182017 - DNA, 25 bp, Homo sapien
ttccttaatgcacccggggatggca

SEQ ID NO: 4182018 - DNA, 25 bp, Homo sapien
ggttgttgtgggcagcagagcactg

SEQ ID NO: 4182019 - DNA, 25 bp, Homo sapien
ccaggttgttgtgggcagcagagca

SEQ ID NO: 4182020 - DNA, 25 bp, Homo sapien
tcccaggttgttgtgggcagcagag

SEQ ID NO: 4182021 - DNA, 25 bp, Homo sapien
cagcaccagtgctcttaaaaatatt

SEQ ID NO: 4182022 - DNA, 25 bp, Homo sapien
tcagcaccagtgctcttaaaaatat

SEQ ID NO: 4182023 - DNA, 25 bp, Homo sapien
cttcagcaccagtgctcttaaaaat

SEQ ID NO: 4182024 - DNA, 25 bp, Homo sapien
gcaccagtgctcttaaaaatatttc

SEQ ID NO: 4182025 - DNA, 25 bp, Homo sapien
cttctgcgtcgtggggagcacagca

SEQ ID NO: 4182026 - DNA, 25 bp, Homo sapien
cagcttctgcgtcgtggggagcaca

SEQ ID NO: 4182027 - DNA, 25 bp, Homo sapien
agcagaggatgtctttctccacctg

SEQ ID NO: 4182028 - DNA, 25 bp, Homo sapien
agcacagcagaggatgtctttctcc

SEQ ID NO: 4182029 - DNA, 25 bp, Homo sapien
tgcagctccagtaagctctccgtac

SEQ ID NO: 4182030 - DNA, 25 bp, Homo sapien
aacgcctggtatgcggatgcagctc

SEQ ID NO: 4182031 - DNA, 25 bp, Homo sapien
gcttctgtggtgacaccaacgcctg

SEQ ID NO: 4182032 - DNA, 25 bp, Homo sapien
tgacaccaacgcctggtatgcggat

SEQ ID NO: 4182033 - DNA, 25 bp, Homo sapien
ttgcaatctcagatcctctggttct

SEQ ID NO: 4182034 - DNA, 25 bp, Homo sapien
cctctggttcttttgacagtctccc

SEQ ID NO: 4182035 - DNA, 25 bp, Homo sapien
gttccccagagcagtaaggttgtca

SEQ ID NO: 4182036 - DNA, 25 bp, Homo sapien
gggccccatgatgtccctttgcaat

SEQ ID NO: 4182037 - DNA, 25 bp, Homo sapien
ttatccgcttggctggatcctcctc

SEQ ID NO: 4182038 - DNA, 25 bp, Homo sapien
agcctcttgacaaccatcagctctg

SEQ ID NO: 4182039 - DNA, 25 bp, Homo sapien
gagggaatttatccgcttggctgga

SEQ ID NO: 4182040 - DNA, 25 bp, Homo sapien
cccacagagatcagcctcttgacaa

SEQ ID NO: 4182041 - DNA, 25 bp, Homo sapien
ccagagcttcacagtttcagtagag

SEQ ID NO: 4182042 - DNA, 25 bp, Homo sapien
gggcttgtgagccattcactgagga

SEQ ID NO: 4182043 - DNA, 25 bp, Homo sapien
cactgaggaatttccagagcttcac

SEQ ID NO: 4182044 - DNA, 25 bp, Homo sapien
gcttgtgagccattcactgaggaat

SEQ ID NO: 4182045 - DNA, 25 bp, Homo sapien
tggccttttctggggacccatggga

SEQ ID NO: 4182046 - DNA, 25 bp, Homo sapien
ggacccatgggaaagaggataaggc

SEQ ID NO: 4182047 - DNA, 25 bp, Homo sapien
gagccctgcagtgaggtggcctttt

SEQ ID NO: 4182048 - DNA, 25 bp, Homo sapien
cttggggctgcctcaggggagccct

SEQ ID NO: 4182049 - DNA, 25 bp, Homo sapien
ttggctggtatgttaccagaggagt

SEQ ID NO: 4182050 - DNA, 25 bp, Homo sapien
cagaggagttgacgacgatcatgga

SEQ ID NO: 4182051 - DNA, 25 bp, Homo sapien
ccagggaacatcttccaaatataag

SEQ ID NO: 4182052 - DNA, 25 bp, Homo sapien
cacccagccaatcagaagggctggt

SEQ ID NO: 4182053 - DNA, 25 bp, Homo sapien
ggactggcgcccttccacacctgga

SEQ ID NO: 4182054 - DNA, 25 bp, Homo sapien
gcatgatccccaggccaggactggc

SEQ ID NO: 4182055 - DNA, 25 bp, Homo sapien
ccataagaaacagcgcgcagtggag

SEQ ID NO: 4182056 - DNA, 25 bp, Homo sapien
caggactggcgcccttccacacctg

SEQ ID NO: 4182057 - DNA, 25 bp, Homo sapien
cagggctccccgcagatggagaggg

SEQ ID NO: 4182058 - DNA, 25 bp, Homo sapien
aggggtgactgtgtctcgtagcact

SEQ ID NO: 4182059 - DNA, 25 bp, Homo sapien
ggtgactgtgtctcgtagcactggc

SEQ ID NO: 4182060 - DNA, 25 bp, Homo sapien
gactgtgtctcgtagcactggcctg

SEQ ID NO: 4182061 - DNA, 25 bp, Homo sapien
tagaattctacgtccaggctgggaa

SEQ ID NO: 4182062 - DNA, 25 bp, Homo sapien
gaaagatgtagctcaaaacactgtg

SEQ ID NO: 4182063 - DNA, 25 bp, Homo sapien
ggtctcactgaagtcctcagaaaga

SEQ ID NO: 4182064 - DNA, 25 bp, Homo sapien
tggcttctgcgtttgggtgagtcct

SEQ ID NO: 4182065 - DNA, 25 bp, Homo sapien
tgcatcatcactcagccttaagctg

SEQ ID NO: 4182066 - DNA, 25 bp, Homo sapien
ctgcatcatcactcagccttaagct

SEQ ID NO: 4182067 - DNA, 25 bp, Homo sapien
cttaagctggcccacttgtctgagc

SEQ ID NO: 4182068 - DNA, 25 bp, Homo sapien
cagcgaatgagcttggtctctgaac

SEQ ID NO: 4182069 - DNA, 25 bp, Homo sapien
gcgaatgagcttggtctctgaacat

SEQ ID NO: 4182070 - DNA, 25 bp, Homo sapien
caagcagcgaatgagcttggtctct

SEQ ID NO: 4182071 - DNA, 25 bp, Homo sapien
agcagcgaatgagcttggtctctga

SEQ ID NO: 4182072 - DNA, 25 bp, Homo sapien
acctcaggagacagccctcgaccag

SEQ ID NO: 4182073 - DNA, 25 bp, Homo sapien
tcgaccaggtccagcctcgagtctg

SEQ ID NO: 4182074 - DNA, 25 bp, Homo sapien
tcgagtctgggtcctgtcagggtct

SEQ ID NO: 4182075 - DNA, 25 bp, Homo sapien
aggagacagccctcgaccaggtcca

SEQ ID NO: 4182076 - DNA, 25 bp, Homo sapien
cagctgtgattgaagacaataggac

SEQ ID NO: 4182077 - DNA, 25 bp, Homo sapien
cagtgcgtccatcttcagctgtgat

SEQ ID NO: 4182078 - DNA, 25 bp, Homo sapien
gagatggccgtcagtgcgtccatct

SEQ ID NO: 4182079 - DNA, 25 bp, Homo sapien
gacatggaggtgagatggccgtcag

SEQ ID NO: 4182080 - DNA, 25 bp, Homo sapien
gtatgacaacaatggtgggaatttc

SEQ ID NO: 4182081 - DNA, 25 bp, Homo sapien
ccttgagtactgaagtcgtcgatga

SEQ ID NO: 4182082 - DNA, 25 bp, Homo sapien
tcatgggtgacctcgagttttccac

SEQ ID NO: 4182083 - DNA, 25 bp, Homo sapien
gtcgtcgatgacaacttcagtatga

SEQ ID NO: 4182084 - DNA, 25 bp, Homo sapien
atcccaacccttgtatggtccactt

SEQ ID NO: 4182085 - DNA, 25 bp, Homo sapien
gacttggttttggttggcgagtcca

SEQ ID NO: 4182086 - DNA, 25 bp, Homo sapien
tccagctgactccatcaaaacagac

SEQ ID NO: 4182087 - DNA, 25 bp, Homo sapien
atggacccagacttggacttggttt

SEQ ID NO: 4182088 - DNA, 25 bp, Homo sapien
cgtggtgccaggggcggacagtgcc

SEQ ID NO: 4182089 - DNA, 25 bp, Homo sapien
tggtgccaggggcggacagtgccat

SEQ ID NO: 4182090 - DNA, 25 bp, Homo sapien
gtggtgccaggggcggacagtgcca

SEQ ID NO: 4182091 - DNA, 25 bp, Homo sapien
gccgtggtgccaggggcggacagtg

SEQ ID NO: 4182092 - DNA, 25 bp, Homo sapien
ctccgctgcctgactcacacggctg

SEQ ID NO: 4182093 - DNA, 25 bp, Homo sapien
ctcctctccgcgatgcagcccgttc

SEQ ID NO: 4182094 - DNA, 25 bp, Homo sapien
gactcacacggctgcctcctactca

SEQ ID NO: 4182095 - DNA, 25 bp, Homo sapien
tctccgcgatgcagcccgttccctc

SEQ ID NO: 4182096 - DNA, 25 bp, Homo sapien
cagagcccggaaacggcgcgctgct

SEQ ID NO: 4182097 - DNA, 25 bp, Homo sapien
agagcccggaaacggcgcgctgctt

SEQ ID NO: 4182098 - DNA, 25 bp, Homo sapien
tccagagcccggaaacggcgcgctg

SEQ ID NO: 4182099 - DNA, 25 bp, Homo sapien
agcccggaaacggcgcgctgcttcg

SEQ ID NO: 4182100 - DNA, 25 bp, Homo sapien
ctgcctgcatacgttgttctttctg

SEQ ID NO: 4182101 - DNA, 25 bp, Homo sapien
cacctttttctgtgggggcgctgat

SEQ ID NO: 4182102 - DNA, 25 bp, Homo sapien
ctcctgcctgcatacgttgttcttt

SEQ ID NO: 4182103 - DNA, 25 bp, Homo sapien
tgggggcgctgatggctctgacttc

SEQ ID NO: 4182104 - DNA, 25 bp, Homo sapien
ttttttgttcggcatgtggcatgtg

SEQ ID NO: 4182105 - DNA, 25 bp, Homo sapien
ccgttttttgttcggcatgtggcat

SEQ ID NO: 4182106 - DNA, 25 bp, Homo sapien
gccaggccgttttttgttcggcatg

SEQ ID NO: 4182107 - DNA, 25 bp, Homo sapien
tgttcggcatgtggcatgtgttgct

SEQ ID NO: 4182108 - DNA, 25 bp, Homo sapien
ccttgcattctgatgggcgcacatg

SEQ ID NO: 4182109 - DNA, 25 bp, Homo sapien
gccagcaaaacgctctccgtaggag

SEQ ID NO: 4182110 - DNA, 25 bp, Homo sapien
ccgtaggagctcattctccctcgaa

SEQ ID NO: 4182111 - DNA, 25 bp, Homo sapien
attctccctcgaatctcagggatgg

SEQ ID NO: 4182112 - DNA, 25 bp, Homo sapien
aataaagatgtcaccctggcactcg

SEQ ID NO: 4182113 - DNA, 25 bp, Homo sapien
ggcactcgccgtgcttcttaatgag

SEQ ID NO: 4182114 - DNA, 25 bp, Homo sapien
tgaaggctttgaagtctctgggcgc

SEQ ID NO: 4182115 - DNA, 25 bp, Homo sapien
ttttcatgtctaatccaccgaggag

SEQ ID NO: 4182116 - DNA, 25 bp, Homo sapien
gctgagataattcctgctggatcca

SEQ ID NO: 4182117 - DNA, 25 bp, Homo sapien
cctgctggatccaaggagccctctg

SEQ ID NO: 4182118 - DNA, 25 bp, Homo sapien
tctgatctctgctcgaggggctgtc

SEQ ID NO: 4182119 - DNA, 25 bp, Homo sapien
ctgtctccggggctgagataattcc

SEQ ID NO: 4182120 - DNA, 25 bp, Homo sapien
tggcttcgtctgatgttagcgctgc

SEQ ID NO: 4182121 - DNA, 25 bp, Homo sapien
tgttggcttcgtctgatgttagcgc

SEQ ID NO: 4182122 - DNA, 25 bp, Homo sapien
tgtgttggcttcgtctgatgttagc

SEQ ID NO: 4182123 - DNA, 25 bp, Homo sapien
cttcgtctgatgttagcgctgccat

SEQ ID NO: 4182124 - DNA, 25 bp, Homo sapien
tgcttctttgaagagcgcgttttga

SEQ ID NO: 4182125 - DNA, 25 bp, Homo sapien
tgatcacccggagaccttcatgaat

SEQ ID NO: 4182126 - DNA, 25 bp, Homo sapien
gtcctgggcgtctgttgttttgcca

SEQ ID NO: 4182127 - DNA, 25 bp, Homo sapien
gggcgtctgttgttttgccagcagc

SEQ ID NO: 4182128 - DNA, 25 bp, Homo sapien
gtgctcagaatagcgtcagagcttg

SEQ ID NO: 4182129 - DNA, 25 bp, Homo sapien
cagggctgtgctcagaatagcgtca

SEQ ID NO: 4182130 - DNA, 25 bp, Homo sapien
gttttctcaggtgtccggaagtcca

SEQ ID NO: 4182131 - DNA, 25 bp, Homo sapien
ctcaggtgtccggaagtccagggct

SEQ ID NO: 4182132 - DNA, 25 bp, Homo sapien
ccacagccgggatgaatgtggctgt

SEQ ID NO: 4182133 - DNA, 25 bp, Homo sapien
cttcaacatatgacatctgaagggg

SEQ ID NO: 4182134 - DNA, 25 bp, Homo sapien
acagccgggatgaatgtggctgtcc

SEQ ID NO: 4182135 - DNA, 25 bp, Homo sapien
ggcttcaacatatgacatctgaagg

SEQ ID NO: 4182136 - DNA, 25 bp, Homo sapien
gctggcaggcgcaggttctgctgag

SEQ ID NO: 4182137 - DNA, 25 bp, Homo sapien
tgctggcaggcgcaggttctgctga

SEQ ID NO: 4182138 - DNA, 25 bp, Homo sapien
cagtggtcccagttgtgagcaggca

SEQ ID NO: 4182139 - DNA, 25 bp, Homo sapien
gatggcctgggctccagtcttaact

SEQ ID NO: 4182140 - DNA, 25 bp, Homo sapien
tgttgctccttccacgagctagggc

SEQ ID NO: 4182141 - DNA, 25 bp, Homo sapien
tgttctggctgggaaacctccgacc

SEQ ID NO: 4182142 - DNA, 25 bp, Homo sapien
tcaggtgatggcgaagtggaggtca

SEQ ID NO: 4182143 - DNA, 25 bp, Homo sapien
ggctgtgctcaggtgatggcgaagt

SEQ ID NO: 4182144 - DNA, 25 bp, Homo sapien
tggcagtcttcttctcgtgtatttc

SEQ ID NO: 4182145 - DNA, 25 bp, Homo sapien
tcgtgtatttccttgtgcagacctg

SEQ ID NO: 4182146 - DNA, 25 bp, Homo sapien
ccatcatttgacttttcctaggaag

SEQ ID NO: 4182147 - DNA, 25 bp, Homo sapien
catccttgcttgtatttcgttttgc

SEQ ID NO: 4182148 - DNA, 25 bp, Homo sapien
gacacaatcggcaactttgtcttta

SEQ ID NO: 4182149 - DNA, 25 bp, Homo sapien
ttgcatctgacacaatcggcaactt

SEQ ID NO: 4182150 - DNA, 25 bp, Homo sapien
ttgagaagcctctgcctgggtgcgc

SEQ ID NO: 4182151 - DNA, 25 bp, Homo sapien
gaagcctctgcctgggtgcgcagcc

SEQ ID NO: 4182152 - DNA, 25 bp, Homo sapien
tgcagcttgagaagcctctgcctgg

SEQ ID NO: 4182153 - DNA, 25 bp, Homo sapien
aggccctgcttgggtagcattgcca

SEQ ID NO: 4182154 - DNA, 25 bp, Homo sapien
tcatgcgtctccacattcagggatg

SEQ ID NO: 4182155 - DNA, 25 bp, Homo sapien
tttaatcttatcatgcgtctccaca

SEQ ID NO: 4182156 - DNA, 25 bp, Homo sapien
agttttgcgatgagcggctttgtct

SEQ ID NO: 4182157 - DNA, 25 bp, Homo sapien
tcttatcatgcgtctccacattcag

SEQ ID NO: 4182158 - DNA, 25 bp, Homo sapien
gtggtatggtcagcatcatgtttga

SEQ ID NO: 4182159 - DNA, 25 bp, Homo sapien
agtcaggctcgagtgcatgctgtgc

SEQ ID NO: 4182160 - DNA, 25 bp, Homo sapien
ggcttcagggggtcgcttgtaccca

SEQ ID NO: 4182161 - DNA, 25 bp, Homo sapien
tgctgtgcatgttctctgcctctct

SEQ ID NO: 4182162 - DNA, 25 bp, Homo sapien
ctttagcaaacgcccactgggtgtg

SEQ ID NO: 4182163 - DNA, 25 bp, Homo sapien
cactgggtgtgtgggtacactgcgg

SEQ ID NO: 4182164 - DNA, 25 bp, Homo sapien
tagcaaacgcccactgggtgtgtgg

SEQ ID NO: 4182165 - DNA, 25 bp, Homo sapien
actgggtgtgtgggtacactgcggc

SEQ ID NO: 4182166 - DNA, 25 bp, Homo sapien
tcacctaggattgcagaggccgcct

SEQ ID NO: 4182167 - DNA, 25 bp, Homo sapien
ccttggtgtcacctaggattgcaga

SEQ ID NO: 4182168 - DNA, 25 bp, Homo sapien
ctggaccttggtgtcacctaggatt

SEQ ID NO: 4182169 - DNA, 25 bp, Homo sapien
taggattgcagaggccgccttcagc

SEQ ID NO: 4182170 - DNA, 25 bp, Homo sapien
tcttggtcacgtgccagcacttgga

SEQ ID NO: 4182171 - DNA, 25 bp, Homo sapien
caggcagacacaaagctcacggcga

SEQ ID NO: 4182172 - DNA, 25 bp, Homo sapien
caggcagatctgattcacacagaca

SEQ ID NO: 4182173 - DNA, 25 bp, Homo sapien
aatcacacgccggtacacaaacaca

SEQ ID NO: 4182174 - DNA, 25 bp, Homo sapien
tcctagagacaccttctttgtctgc

SEQ ID NO: 4182175 - DNA, 25 bp, Homo sapien
ctcctagagacaccttctttgtctg

SEQ ID NO: 4182176 - DNA, 25 bp, Homo sapien
cctcctagagacaccttctttgtct

SEQ ID NO: 4182177 - DNA, 25 bp, Homo sapien
cctagagacaccttctttgtctgca

SEQ ID NO: 4182178 - DNA, 25 bp, Homo sapien
gctgcacgtgaacgtcctttggcgc

SEQ ID NO: 4182179 - DNA, 25 bp, Homo sapien
gtgaacgtcctttggcgctggcctc

SEQ ID NO: 4182180 - DNA, 25 bp, Homo sapien
gcacgtgaacgtcctttggcgctgg

SEQ ID NO: 4182181 - DNA, 25 bp, Homo sapien
cagctgcacgtgaacgtcctttggc

SEQ ID NO: 4182182 - DNA, 25 bp, Homo sapien
tgttccattcccaaccctcaggatg

SEQ ID NO: 4182183 - DNA, 25 bp, Homo sapien
ctgggcctgttccattcccaaccct

SEQ ID NO: 4182184 - DNA, 25 bp, Homo sapien
attcccaaccctcaggatggcccac

SEQ ID NO: 4182185 - DNA, 25 bp, Homo sapien
ctgttccattcccaaccctcaggat

SEQ ID NO: 4182186 - DNA, 25 bp, Homo sapien
gggaggcatcaaaccccaggtgctc

SEQ ID NO: 4182187 - DNA, 25 bp, Homo sapien
tctagaaatgtaccaggaccccttc

SEQ ID NO: 4182188 - DNA, 25 bp, Homo sapien
gagtgtgagctagagcctcggccct

SEQ ID NO: 4182189 - DNA, 25 bp, Homo sapien
tgtcttcacgggcacaatattcagc

SEQ ID NO: 4182190 - DNA, 25 bp, Homo sapien
taaaccggcaggtgtctactctcag

SEQ ID NO: 4182191 - DNA, 25 bp, Homo sapien
tacatgaagggacagataaaccggc

SEQ ID NO: 4182192 - DNA, 25 bp, Homo sapien
ctctggtcgagatgcaggctgaact

SEQ ID NO: 4182193 - DNA, 25 bp, Homo sapien
tgctgtgtcagagtacccctgccat

SEQ ID NO: 4182194 - DNA, 25 bp, Homo sapien
ctattgaggcctttgactgatcgga

SEQ ID NO: 4182195 - DNA, 25 bp, Homo sapien
tacggaattggctcacacgactgtg

SEQ ID NO: 4182196 - DNA, 25 bp, Homo sapien
gtcatagctcaagtccgaaggccgt

SEQ ID NO: 4182197 - DNA, 25 bp, Homo sapien
aaggccgtctgctgaaagaattctc

SEQ ID NO: 4182198 - DNA, 25 bp, Homo sapien
ttgccccgctgcacaagggccagca

SEQ ID NO: 4182199 - DNA, 25 bp, Homo sapien
ctgcctccgaccttcgccctgtgcc

SEQ ID NO: 4182200 - DNA, 25 bp, Homo sapien
gccccgctgcacaagggccagcatg

SEQ ID NO: 4182201 - DNA, 25 bp, Homo sapien
gcctccgaccttcgccctgtgcctc

SEQ ID NO: 4182202 - DNA, 25 bp, Homo sapien
tcaagcagaggtggcccaggtggca

SEQ ID NO: 4182203 - DNA, 25 bp, Homo sapien
cagaggtggcccaggtggcaaactc

SEQ ID NO: 4182204 - DNA, 25 bp, Homo sapien
ggtggcccaggtggcaaactcaggt

SEQ ID NO: 4182205 - DNA, 25 bp, Homo sapien
gtggcccaggtggcaaactcaggtg

SEQ ID NO: 4182206 - DNA, 25 bp, Homo sapien
tcacatcttgaaagttgcagttggg

SEQ ID NO: 4182207 - DNA, 25 bp, Homo sapien
aaagttgcagttgggagtctcaggt

SEQ ID NO: 4182208 - DNA, 25 bp, Homo sapien
aagccccaggagtgactagctggcc

SEQ ID NO: 4182209 - DNA, 25 bp, Homo sapien
ccttggaggatagccccatccatgg

SEQ ID NO: 4182210 - DNA, 25 bp, Homo sapien
gctggtcggcctcatgggctgtccc

SEQ ID NO: 4182211 - DNA, 25 bp, Homo sapien
ttggagcagctggtcggcctcatgg

SEQ ID NO: 4182212 - DNA, 25 bp, Homo sapien
tcttggagcagctggtcggcctcat

SEQ ID NO: 4182213 - DNA, 25 bp, Homo sapien
tggtcggcctcatgggctgtcccag

SEQ ID NO: 4182214 - DNA, 25 bp, Homo sapien
cttagaggtgtcaccattgagaatt

SEQ ID NO: 4182215 - DNA, 25 bp, Homo sapien
accattgagaatttagggaagaaga

SEQ ID NO: 4182216 - DNA, 25 bp, Homo sapien
ccttggacacagggtcctcagttgc

SEQ ID NO: 4182217 - DNA, 25 bp, Homo sapien
cagttgctgccaagctcagtgccag

SEQ ID NO: 4182218 - DNA, 25 bp, Homo sapien
aaaaaggttcatgcagtacaggagg

SEQ ID NO: 4182219 - DNA, 25 bp, Homo sapien
tgtagctcactccaatggatcttgg

SEQ ID NO: 4182220 - DNA, 25 bp, Homo sapien
cctgtgttcacaccaacggatgtgt

SEQ ID NO: 4182221 - DNA, 25 bp, Homo sapien
gataaatctccctgtgtggcactga

SEQ ID NO: 4182222 - DNA, 25 bp, Homo sapien
ggcacagtgtcagccgaagtttgct

SEQ ID NO: 4182223 - DNA, 25 bp, Homo sapien
cagatccacatgcagtccaagatgg

SEQ ID NO: 4182224 - DNA, 25 bp, Homo sapien
gcagggatttgaccatcagatccac

SEQ ID NO: 4182225 - DNA, 25 bp, Homo sapien
gaaggcaagctcacggcattctgag

SEQ ID NO: 4182226 - DNA, 25 bp, Homo sapien
ccaccatggtggatggactgaagtg

SEQ ID NO: 4182227 - DNA, 25 bp, Homo sapien
accatggtggatggactgaagtgtg

SEQ ID NO: 4182228 - DNA, 25 bp, Homo sapien
gtggatggactgaagtgtgtatatt

SEQ ID NO: 4182229 - DNA, 25 bp, Homo sapien
ggactgaagtgtgtatattttcttg

SEQ ID NO: 4182230 - DNA, 25 bp, Homo sapien
ccaatgcctccatcccatccccatg

SEQ ID NO: 4182231 - DNA, 25 bp, Homo sapien
ctctcccaatgcctccatcccatcc

SEQ ID NO: 4182232 - DNA, 25 bp, Homo sapien
caatgcctccatcccatccccatgg

SEQ ID NO: 4182233 - DNA, 25 bp, Homo sapien
tcccaatgcctccatcccatcccca

SEQ ID NO: 4182234 - DNA, 25 bp, Homo sapien
ggttggctgagggcaccctccttct

SEQ ID NO: 4182235 - DNA, 25 bp, Homo sapien
ctttccttccagggccatgcttggc

SEQ ID NO: 4182236 - DNA, 25 bp, Homo sapien
tccagggccatgcttggcaaggttg

SEQ ID NO: 4182237 - DNA, 25 bp, Homo sapien
tggcaaggttggctgagggcaccct

SEQ ID NO: 4182238 - DNA, 25 bp, Homo sapien
tggcctacctggatgacatcgcttc

SEQ ID NO: 4182239 - DNA, 25 bp, Homo sapien
aggaccaggtcaagggacgttctgt

SEQ ID NO: 4182240 - DNA, 25 bp, Homo sapien
agcatcaacagcacagacagcgagc

SEQ ID NO: 4182241 - DNA, 25 bp, Homo sapien
ccaagtggacgagacagaggagcca

SEQ ID NO: 4182242 - DNA, 25 bp, Homo sapien
ttcttcgctccgctcatctacgtgg

SEQ ID NO: 4182243 - DNA, 25 bp, Homo sapien
tcagcttcttcgctccgctcatcta

SEQ ID NO: 4182244 - DNA, 25 bp, Homo sapien
tacttcagcttcttcgctccgctca

SEQ ID NO: 4182245 - DNA, 25 bp, Homo sapien
tcgctccgctcatctacgtggcttt

SEQ ID NO: 4182246 - DNA, 25 bp, Homo sapien
cgtgtatgcgggcatcctggcactg

SEQ ID NO: 4182247 - DNA, 25 bp, Homo sapien
tcggaggagcttctacgtgtatgcg

SEQ ID NO: 4182248 - DNA, 25 bp, Homo sapien
tggcactgctcaacctactgcaggg

SEQ ID NO: 4182249 - DNA, 25 bp, Homo sapien
tgctgtgcttcgacatcatcgaggg

SEQ ID NO: 4182250 - DNA, 25 bp, Homo sapien
ccaagaccccgctgaaggagcgcat

SEQ ID NO: 4182251 - DNA, 25 bp, Homo sapien
ttcccaagaccccgctgaaggagcg

SEQ ID NO: 4182252 - DNA, 25 bp, Homo sapien
tctctggtggtcatccttcccaaga

SEQ ID NO: 4182253 - DNA, 25 bp, Homo sapien
agaccccgctgaaggagcgcatctc

SEQ ID NO: 4182254 - DNA, 25 bp, Homo sapien
ctctcagctgaggactttaatatct

SEQ ID NO: 4182255 - DNA, 25 bp, Homo sapien
ggactttaatatctatggccatggg

SEQ ID NO: 4182256 - DNA, 25 bp, Homo sapien
ctggagatcctgtaccctgatgccc

SEQ ID NO: 4182257 - DNA, 25 bp, Homo sapien
ggagatcctgtaccctgatgcccat

SEQ ID NO: 4182258 - DNA, 25 bp, Homo sapien
gcgggtgctggccatcaccacagtg

SEQ ID NO: 4182259 - DNA, 25 bp, Homo sapien
gccacctggagagtaagtccagcat

SEQ ID NO: 4182260 - DNA, 25 bp, Homo sapien
gtgctggccatcaccacagtgctgt

SEQ ID NO: 4182261 - DNA, 25 bp, Homo sapien
agtccagcatcaagcgggtgctggc

SEQ ID NO: 4182262 - DNA, 25 bp, Homo sapien
cttcctgctggccatcgagctgagt

SEQ ID NO: 4182263 - DNA, 25 bp, Homo sapien
catcgagctgagtgtgatcatcctg

SEQ ID NO: 4182264 - DNA, 25 bp, Homo sapien
ctggccatcgagctgagtgtgatca

SEQ ID NO: 4182265 - DNA, 25 bp, Homo sapien
cctgctggccatcgagctgagtgtg

SEQ ID NO: 4182266 - DNA, 25 bp, Homo sapien
acctcgaacgctgcaactgttgctg

SEQ ID NO: 4182267 - DNA, 25 bp, Homo sapien
catgacggtgagcacctcgaacgct

SEQ ID NO: 4182268 - DNA, 25 bp, Homo sapien
attgcccgggccgtggtatccatga

SEQ ID NO: 4182269 - DNA, 25 bp, Homo sapien
tggtggcgctggtgggcattgcccg

SEQ ID NO: 4182270 - DNA, 25 bp, Homo sapien
tgctgctcatccccaatgtgctctt

SEQ ID NO: 4182271 - DNA, 25 bp, Homo sapien
atctgctcgggcgaagatccgcatc

SEQ ID NO: 4182272 - DNA, 25 bp, Homo sapien
gtccggtactgggacctcttgctgc

SEQ ID NO: 4182273 - DNA, 25 bp, Homo sapien
ggtactgggacctcttgctgctcat

SEQ ID NO: 4182274 - DNA, 25 bp, Homo sapien
acccctggcaccaaacatcagtgtg

SEQ ID NO: 4182275 - DNA, 25 bp, Homo sapien
ctgctgctgctctacgaagacattg

SEQ ID NO: 4182276 - DNA, 25 bp, Homo sapien
tctacgaagacattggcacctccag

SEQ ID NO: 4182277 - DNA, 25 bp, Homo sapien
tggcaccaaacatcagtgtgcctca

SEQ ID NO: 4182278 - DNA, 25 bp, Homo sapien
gctttggtgacaacacaagcagggc

SEQ ID NO: 4182279 - DNA, 25 bp, Homo sapien
tgttctggtgtttaagggcttggac

SEQ ID NO: 4182280 - DNA, 25 bp, Homo sapien
gggcttggaccagcaatggaaatat

SEQ ID NO: 4182281 - DNA, 25 bp, Homo sapien
tttctgcagaccttgctgacaggca

SEQ ID NO: 4182282 - DNA, 25 bp, Homo sapien
aagctaaactccattggttccatca

SEQ ID NO: 4182283 - DNA, 25 bp, Homo sapien
cagttgcagggaagctgggaaaggt

SEQ ID NO: 4182284 - DNA, 25 bp, Homo sapien
ccacacccagttgcagggaagctgg

SEQ ID NO: 4182285 - DNA, 25 bp, Homo sapien
acacccagttgcagggaagctggga

SEQ ID NO: 4182286 - DNA, 25 bp, Homo sapien
cccagttgcagggaagctgggaaag

SEQ ID NO: 4182287 - DNA, 25 bp, Homo sapien
tgatctgaaattagcagacctcact

SEQ ID NO: 4182288 - DNA, 25 bp, Homo sapien
atgatctgaaattagcagacctcac

SEQ ID NO: 4182289 - DNA, 25 bp, Homo sapien
agggggccatgtcgaagcctccgct

SEQ ID NO: 4182290 - DNA, 25 bp, Homo sapien
tgagccaagcctgccgccggttcgg

SEQ ID NO: 4182291 - DNA, 25 bp, Homo sapien
agtgcgggtggagatccggacctcg

SEQ ID NO: 4182292 - DNA, 25 bp, Homo sapien
gagggagccgcacgtagcggcgtcg

SEQ ID NO: 4182293 - DNA, 25 bp, Homo sapien
tgctttcccggtcgccgctgtcggg

SEQ ID NO: 4182294 - DNA, 25 bp, Homo sapien
gctggacgaaaaagacggtcttgct

SEQ ID NO: 4182295 - DNA, 25 bp, Homo sapien
tagagggcgggcctgagtgataaca

SEQ ID NO: 4182296 - DNA, 25 bp, Homo sapien
actgtggccgttttcgcaatttggg

SEQ ID NO: 4182297 - DNA, 25 bp, Homo sapien
ggctccatcctcatgacgctggaat

SEQ ID NO: 4182298 - DNA, 25 bp, Homo sapien
gatgctgcaggggacatcctgcagc

SEQ ID NO: 4182299 - DNA, 25 bp, Homo sapien
atcctgcagcttggctctcttggct

SEQ ID NO: 4182300 - DNA, 25 bp, Homo sapien
atctgcacgaggctctgagtcagcc

SEQ ID NO: 4182301 - DNA, 25 bp, Homo sapien
agcagtaccacgatcctctccgcca

SEQ ID NO: 4182302 - DNA, 25 bp, Homo sapien
caacaaccaggtttcgcgcgaaaag

SEQ ID NO: 4182303 - DNA, 25 bp, Homo sapien
tacagcaacaaccaggtttcgcgcg

SEQ ID NO: 4182304 - DNA, 25 bp, Homo sapien
atcctctccgccactacagcaacaa

SEQ ID NO: 4182305 - DNA, 25 bp, Homo sapien
cgcccgccacgcgccagcgcgctca

SEQ ID NO: 4182306 - DNA, 25 bp, Homo sapien
gcccgccacgcgccagcgcgctcac

SEQ ID NO: 4182307 - DNA, 25 bp, Homo sapien
ggcgcccgcccgccacgcgccagcg

SEQ ID NO: 4182308 - DNA, 25 bp, Homo sapien
cggcgcccgcccgccacgcgccagc

SEQ ID NO: 4182309 - DNA, 25 bp, Homo sapien
tggaatgctctcagctgagcaatct

SEQ ID NO: 4182310 - DNA, 25 bp, Homo sapien
ctggaatgctctcagctgagcaatc

SEQ ID NO: 4182311 - DNA, 25 bp, Homo sapien
ccaaacaaatagaagccagctcaaa

SEQ ID NO: 4182312 - DNA, 25 bp, Homo sapien
ggcttccaaacaaatagaagccagc

SEQ ID NO: 4182313 - DNA, 25 bp, Homo sapien
gatcattgcctcgccgacgctgggc

SEQ ID NO: 4182314 - DNA, 25 bp, Homo sapien
aggatcattgcctcgccgacgctgg

SEQ ID NO: 4182315 - DNA, 25 bp, Homo sapien
attgcctcgccgacgctgggccggg

SEQ ID NO: 4182316 - DNA, 25 bp, Homo sapien
tcattgcctcgccgacgctgggccg

SEQ ID NO: 4182317 - DNA, 25 bp, Homo sapien
tcaaatggtggaaggtcacggccag

SEQ ID NO: 4182318 - DNA, 25 bp, Homo sapien
cctctgtgcctaggagcccctcgga

SEQ ID NO: 4182319 - DNA, 25 bp, Homo sapien
tcagtacgccgggagcttcggccag

SEQ ID NO: 4182320 - DNA, 25 bp, Homo sapien
ggaggtgagggcatcagtacgccgg

SEQ ID NO: 4182321 - DNA, 25 bp, Homo sapien
tgactggccgtcagctcctctacgt

SEQ ID NO: 4182322 - DNA, 25 bp, Homo sapien
tgctgcctccctctgactggccgtc

SEQ ID NO: 4182323 - DNA, 25 bp, Homo sapien
cagctctgggatggcgcggtagtcc

SEQ ID NO: 4182324 - DNA, 25 bp, Homo sapien
agtccctcggcctcataggcgtcca

SEQ ID NO: 4182325 - DNA, 25 bp, Homo sapien
ggagcccacggcgcatgcggcccag

SEQ ID NO: 4182326 - DNA, 25 bp, Homo sapien
aggagcccacggcgcatgcggccca

SEQ ID NO: 4182327 - DNA, 25 bp, Homo sapien
gagcccacggcgcatgcggcccagg

SEQ ID NO: 4182328 - DNA, 25 bp, Homo sapien
caggagcccacggcgcatgcggccc

SEQ ID NO: 4182329 - DNA, 25 bp, Homo sapien
cgtgagtgcgcaggaagttcttgaa

SEQ ID NO: 4182330 - DNA, 25 bp, Homo sapien
cgctgatgcgctccttgaagacgtt

SEQ ID NO: 4182331 - DNA, 25 bp, Homo sapien
cacagagtggcctttgagatcctcc

SEQ ID NO: 4182332 - DNA, 25 bp, Homo sapien
tccaggttctcgatgctctcgatca

SEQ ID NO: 4182333 - DNA, 25 bp, Homo sapien
gcctcatcaaagatctgcagcagct

SEQ ID NO: 4182334 - DNA, 25 bp, Homo sapien
agcacgtgctccctggctgccaagt

SEQ ID NO: 4182335 - DNA, 25 bp, Homo sapien
ggaagtaggccagcacgtgctccct

SEQ ID NO: 4182336 - DNA, 25 bp, Homo sapien
caagtcctcatagttcaccaccagg

SEQ ID NO: 4182337 - DNA, 25 bp, Homo sapien
cacttgttgcagttgtacttgacca

SEQ ID NO: 4182338 - DNA, 25 bp, Homo sapien
actggtgcggatcagctggttcaga

SEQ ID NO: 4182339 - DNA, 25 bp, Homo sapien
cacctcctggttctgggactggcag

SEQ ID NO: 4182340 - DNA, 25 bp, Homo sapien
gaaaggacccaggacgaaattgcac

SEQ ID NO: 4182341 - DNA, 25 bp, Homo sapien
tggactctcctggattcggatacgc

SEQ ID NO: 4182342 - DNA, 25 bp, Homo sapien
gtccaccagatctgcgaggagaatg

SEQ ID NO: 4182343 - DNA, 25 bp, Homo sapien
gatacgctggtagttctgatagatg

SEQ ID NO: 4182344 - DNA, 25 bp, Homo sapien
gatctgcgaggagaatggcgtcctt

SEQ ID NO: 4182345 - DNA, 25 bp, Homo sapien
ggtcagttcccctacagcaaccttg

SEQ ID NO: 4182346 - DNA, 25 bp, Homo sapien
ccacgtggttggctaggatgacagt

SEQ ID NO: 4182347 - DNA, 25 bp, Homo sapien
tccttggagaggctagtgatcatct

SEQ ID NO: 4182348 - DNA, 25 bp, Homo sapien
caaagacagggaagccattggcagt

SEQ ID NO: 4182349 - DNA, 25 bp, Homo sapien
gggaaccccagatcttcgcagacta

SEQ ID NO: 4182350 - DNA, 25 bp, Homo sapien
tcttcgcagactaggttcgatggcc

SEQ ID NO: 4182351 - DNA, 25 bp, Homo sapien
ccagatcttcgcagactaggttcga

SEQ ID NO: 4182352 - DNA, 25 bp, Homo sapien
actaggttcgatggccaagagctgg

SEQ ID NO: 4182353 - DNA, 25 bp, Homo sapien
gtcactgggagcatggactcaagcc

SEQ ID NO: 4182354 - DNA, 25 bp, Homo sapien
aaagcactgctatccagggagtagg

SEQ ID NO: 4182355 - DNA, 25 bp, Homo sapien
catgaatggaggataaaagcactgc

SEQ ID NO: 4182356 - DNA, 25 bp, Homo sapien
tgggccaggccttatgtaacacaga

SEQ ID NO: 4182357 - DNA, 25 bp, Homo sapien
ggccagagccaggcctctcttgatg

SEQ ID NO: 4182358 - DNA, 25 bp, Homo sapien
tggaaggagcaatgctggcaaagat

SEQ ID NO: 4182359 - DNA, 25 bp, Homo sapien
ggcctctcttgatgtcttcatgacc

SEQ ID NO: 4182360 - DNA, 25 bp, Homo sapien
tctcttgatgtcttcatgaccatag

SEQ ID NO: 4182361 - DNA, 25 bp, Homo sapien
ggctcggctggacactttctcaata

SEQ ID NO: 4182362 - DNA, 25 bp, Homo sapien
tacttgagaaactgcgacttcgctg

SEQ ID NO: 4182363 - DNA, 25 bp, Homo sapien
caatgagacacactcctcggtcagc

SEQ ID NO: 4182364 - DNA, 25 bp, Homo sapien
gggtctccgcacaagagcacgttga

SEQ ID NO: 4182365 - DNA, 25 bp, Homo sapien
gggttggcggcagcaatgaccgtgc

SEQ ID NO: 4182366 - DNA, 25 bp, Homo sapien
gcaatgaccgtgcagcgagcctgca

SEQ ID NO: 4182367 - DNA, 25 bp, Homo sapien
ccagccttcgagatggagatgctct

SEQ ID NO: 4182368 - DNA, 25 bp, Homo sapien
gatgctctgttgctccatggcctca

SEQ ID NO: 4182369 - DNA, 25 bp, Homo sapien
catcagggtggattcccctatcctc

SEQ ID NO: 4182370 - DNA, 25 bp, Homo sapien
agcacctccatcagggtggattccc

SEQ ID NO: 4182371 - DNA, 25 bp, Homo sapien
gaagacataggtgggtacttagcac

SEQ ID NO: 4182372 - DNA, 25 bp, Homo sapien
gcaaagagcttaccctaaccagggc

SEQ ID NO: 4182373 - DNA, 25 bp, Homo sapien
tgaggtccacgttctcagagaaagt

SEQ ID NO: 4182374 - DNA, 25 bp, Homo sapien
cagagaaagtcagcgaggggtcgta

SEQ ID NO: 4182375 - DNA, 25 bp, Homo sapien
tgtcaaagcgtgagatgatgggctc

SEQ ID NO: 4182376 - DNA, 25 bp, Homo sapien
cacacacaggatgtcaaagcgtgag

SEQ ID NO: 4182377 - DNA, 25 bp, Homo sapien
ggactgggtccacggtgtccctcac

SEQ ID NO: 4182378 - DNA, 25 bp, Homo sapien
gggctccacgccatacgtgttgggc

SEQ ID NO: 4182379 - DNA, 25 bp, Homo sapien
catctggttgagcttcgggtggacc

SEQ ID NO: 4182380 - DNA, 25 bp, Homo sapien
gcgtagatgatgtacttcttcagga

SEQ ID NO: 4182381 - DNA, 25 bp, Homo sapien
ctctccttggcgtagatgatgtact

SEQ ID NO: 4182382 - DNA, 25 bp, Homo sapien
ccactgtgcctggcacctacatttt

SEQ ID NO: 4182383 - DNA, 25 bp, Homo sapien
ctgtgcctggcacctacattttttt

SEQ ID NO: 4182384 - DNA, 25 bp, Homo sapien
gagccactgtgcctggcacctacat

SEQ ID NO: 4182385 - DNA, 25 bp, Homo sapien
cggctaatttttgggtttcaccatg

SEQ ID NO: 4182386 - DNA, 25 bp, Homo sapien
catcacgcggatggccatgttgacg

SEQ ID NO: 4182387 - DNA, 25 bp, Homo sapien
tgctgcgcatgacgctgaacttctg

SEQ ID NO: 4182388 - DNA, 25 bp, Homo sapien
tgtgtgtctatgaagctctccagca

SEQ ID NO: 4182389 - DNA, 25 bp, Homo sapien
ggatcatggactcgatgtgccgcac

SEQ ID NO: 4182390 - DNA, 25 bp, Homo sapien
tgtcacgccggaatgaaaggtagcg

SEQ ID NO: 4182391 - DNA, 25 bp, Homo sapien
tgcgctgatatgtcacctgctctgc

SEQ ID NO: 4182392 - DNA, 25 bp, Homo sapien
gcttcagtatgaagagcaacagctc

SEQ ID NO: 4182393 - DNA, 25 bp, Homo sapien
ggacctcaatagtgtcctgctgggc

SEQ ID NO: 4182394 - DNA, 25 bp, Homo sapien
cttttcaggtcgtggctgaacttgt

SEQ ID NO: 4182395 - DNA, 25 bp, Homo sapien
tccttttcaggtcgtggctgaactt

SEQ ID NO: 4182396 - DNA, 25 bp, Homo sapien
ccttttcaggtcgtggctgaacttg

SEQ ID NO: 4182397 - DNA, 25 bp, Homo sapien
tttccttttcaggtcgtggctgaac

SEQ ID NO: 4182398 - DNA, 25 bp, Homo sapien
gcttggagaaacaaacagtcatgcc

SEQ ID NO: 4182399 - DNA, 25 bp, Homo sapien
tgaatacgcaactcacgccaagagg

SEQ ID NO: 4182400 - DNA, 25 bp, Homo sapien
tcagcaaccaagtaagacacactgg

SEQ ID NO: 4182401 - DNA, 25 bp, Homo sapien
taactgtggcgagtggataatccgc

SEQ ID NO: 4182402 - DNA, 25 bp, Homo sapien
ccgaatgcacaaataagagagtggg

SEQ ID NO: 4182403 - DNA, 25 bp, Homo sapien
aactacagaaaccaaaccgaatgca

SEQ ID NO: 4182404 - DNA, 25 bp, Homo sapien
aaccaaaccgaatgcacaaataaga

SEQ ID NO: 4182405 - DNA, 25 bp, Homo sapien
actacagaaaccaaaccgaatgcac

SEQ ID NO: 4182406 - DNA, 25 bp, Homo sapien
ggtgtagccgtcgccgcctgcagcc

SEQ ID NO: 4182407 - DNA, 25 bp, Homo sapien
gtcgccgcctgcagccgcagcggcg

SEQ ID NO: 4182408 - DNA, 25 bp, Homo sapien
gccgcctgcagccgcagcggcgcgg

SEQ ID NO: 4182409 - DNA, 25 bp, Homo sapien
gtgtagccgtcgccgcctgcagccg

SEQ ID NO: 4182410 - DNA, 25 bp, Homo sapien
agcagaagcagcagcggcgaaagca

SEQ ID NO: 4182411 - DNA, 25 bp, Homo sapien
agaagcagcagcggcgaaagcagcg

SEQ ID NO: 4182412 - DNA, 25 bp, Homo sapien
ccagcagaagcagcagcggcgaaag

SEQ ID NO: 4182413 - DNA, 25 bp, Homo sapien
gcagaagcagcagcggcgaaagcag

SEQ ID NO: 4182414 - DNA, 25 bp, Homo sapien
atagagtcgcccagaacaggagaga

SEQ ID NO: 4182415 - DNA, 25 bp, Homo sapien
cgtggctgtacgcccgtttttgtca

SEQ ID NO: 4182416 - DNA, 25 bp, Homo sapien
tttgtcagctcctaatagagtcgcc

SEQ ID NO: 4182417 - DNA, 25 bp, Homo sapien
tgggaccttcacaatgcggcctcct

SEQ ID NO: 4182418 - DNA, 25 bp, Homo sapien
ttgcagacagcccttctccccgcca

SEQ ID NO: 4182419 - DNA, 25 bp, Homo sapien
ctttgcagacagcccttctccccgc

SEQ ID NO: 4182420 - DNA, 25 bp, Homo sapien
tttgcagacagcccttctccccgcc

SEQ ID NO: 4182421 - DNA, 25 bp, Homo sapien
tgcagacagcccttctccccgccat

SEQ ID NO: 4182422 - DNA, 25 bp, Homo sapien
catacaccgtaacacactccctctg

SEQ ID NO: 4182423 - DNA, 25 bp, Homo sapien
taacatacaccgtaacacactccct

SEQ ID NO: 4182424 - DNA, 25 bp, Homo sapien
ttaacatacaccgtaacacactccc

SEQ ID NO: 4182425 - DNA, 25 bp, Homo sapien
cttaacatacaccgtaacacactcc

SEQ ID NO: 4182426 - DNA, 25 bp, Homo sapien
tgtccacggacaaagattctgcttc

SEQ ID NO: 4182427 - DNA, 25 bp, Homo sapien
catgtccacggacaaagattctgct

SEQ ID NO: 4182428 - DNA, 25 bp, Homo sapien
atgtccacggacaaagattctgctt

SEQ ID NO: 4182429 - DNA, 25 bp, Homo sapien
ggtggaggtgaggccctctgggcca

SEQ ID NO: 4182430 - DNA, 25 bp, Homo sapien
ctgggccaggctcatcagacccagc

SEQ ID NO: 4182431 - DNA, 25 bp, Homo sapien
ctctgggccaggctcatcagaccca

SEQ ID NO: 4182432 - DNA, 25 bp, Homo sapien
aggtggaggtgaggccctctgggcc

SEQ ID NO: 4182433 - DNA, 25 bp, Homo sapien
cccagaagtactgtggtggctgcag

SEQ ID NO: 4182434 - DNA, 25 bp, Homo sapien
ccagaagtactgtggtggctgcaga

SEQ ID NO: 4182435 - DNA, 25 bp, Homo sapien
ttcattctcttcgctggggaagcct

SEQ ID NO: 4182436 - DNA, 25 bp, Homo sapien
tgcagaatccgagactcttcattct

SEQ ID NO: 4182437 - DNA, 25 bp, Homo sapien
caggtagtacagagaagagattgac

SEQ ID NO: 4182438 - DNA, 25 bp, Homo sapien
tcaggtagtacagagaagagattga

SEQ ID NO: 4182439 - DNA, 25 bp, Homo sapien
aggtttggcagctcttgagcctggc

SEQ ID NO: 4182440 - DNA, 25 bp, Homo sapien
ctctctgggaggcatatgccaggga

SEQ ID NO: 4182441 - DNA, 25 bp, Homo sapien
ggaacctgccttctcagttaagtca

SEQ ID NO: 4182442 - DNA, 25 bp, Homo sapien
gaggctcaaccagattcatcttggg

SEQ ID NO: 4182443 - DNA, 25 bp, Homo sapien
agagaaaagtcacggacctgaggct

SEQ ID NO: 4182444 - DNA, 25 bp, Homo sapien
aaaagtcacggacctgaggcttggc

SEQ ID NO: 4182445 - DNA, 25 bp, Homo sapien
tcacggacctgaggcttggcttctt

SEQ ID NO: 4182446 - DNA, 25 bp, Homo sapien
ctggtgagagaaaagtcacggacct

SEQ ID NO: 4182447 - DNA, 25 bp, Homo sapien
cttcatgcctgcttttggtggcccc

SEQ ID NO: 4182448 - DNA, 25 bp, Homo sapien
acctccacacctgatgaggcctggt

SEQ ID NO: 4182449 - DNA, 25 bp, Homo sapien
ctggtccccggagtcttcatgcctg

SEQ ID NO: 4182450 - DNA, 25 bp, Homo sapien
gaggcctggtccccggagtcttcat

SEQ ID NO: 4182451 - DNA, 25 bp, Homo sapien
gaggagcctcgaactctaccccaag

SEQ ID NO: 4182452 - DNA, 25 bp, Homo sapien
agtcctggtcccccggagtcactgt

SEQ ID NO: 4182453 - DNA, 25 bp, Homo sapien
gtagttggggtgactgaaggcagca

SEQ ID NO: 4182454 - DNA, 25 bp, Homo sapien
ttcctgaggagcctcgaactctacc

SEQ ID NO: 4182455 - DNA, 25 bp, Homo sapien
ggttctagagccaaggggatcttca

SEQ ID NO: 4182456 - DNA, 25 bp, Homo sapien
atctgggtgctcggccccactggga

SEQ ID NO: 4182457 - DNA, 25 bp, Homo sapien
ttctagagccaaggggatcttcatc

SEQ ID NO: 4182458 - DNA, 25 bp, Homo sapien
ctgaggttctagagccaaggggatc

SEQ ID NO: 4182459 - DNA, 25 bp, Homo sapien
aatcccagggtatcctggattgagc

SEQ ID NO: 4182460 - DNA, 25 bp, Homo sapien
tatcctggattgagcttcagctgcc

SEQ ID NO: 4182461 - DNA, 25 bp, Homo sapien
ccagggtatcctggattgagcttca

SEQ ID NO: 4182462 - DNA, 25 bp, Homo sapien
ccaaggtagcagaggaaggtgtcag

SEQ ID NO: 4182463 - DNA, 25 bp, Homo sapien
cagaatgatgtagtttttcccagcc

SEQ ID NO: 4182464 - DNA, 25 bp, Homo sapien
tcagaatgatgtagtttttcccagc

SEQ ID NO: 4182465 - DNA, 25 bp, Homo sapien
gcctttccctgcggttcggagcctg

SEQ ID NO: 4182466 - DNA, 25 bp, Homo sapien
cagcctttccctgcggttcggagcc

SEQ ID NO: 4182467 - DNA, 25 bp, Homo sapien
ctttccctgcggttcggagcctggc

SEQ ID NO: 4182468 - DNA, 25 bp, Homo sapien
cctttccctgcggttcggagcctgg

SEQ ID NO: 4182469 - DNA, 25 bp, Homo sapien
gatgactaattgagtggaggtcaca

SEQ ID NO: 4182470 - DNA, 25 bp, Homo sapien
taggtatccagagtagtcccattca

SEQ ID NO: 4182471 - DNA, 25 bp, Homo sapien
gcaaaaagatacgaactttaggctg

SEQ ID NO: 4182472 - DNA, 25 bp, Homo sapien
gaacaggtagtcatttaatgggtac

SEQ ID NO: 4182473 - DNA, 25 bp, Homo sapien
ctgcagatacccctctcccaggtgc

SEQ ID NO: 4182474 - DNA, 25 bp, Homo sapien
acagtcacacattccctgctcgtag

SEQ ID NO: 4182475 - DNA, 25 bp, Homo sapien
agtcacacattccctgctcgtagcc

SEQ ID NO: 4182476 - DNA, 25 bp, Homo sapien
cacagtcacacattccctgctcgta

SEQ ID NO: 4182477 - DNA, 25 bp, Homo sapien
tgtcatgagaaggtgctgctccttc

SEQ ID NO: 4182478 - DNA, 25 bp, Homo sapien
tgccatggcggggcagcacctcttc

SEQ ID NO: 4182479 - DNA, 25 bp, Homo sapien
cagtgtcatgagaaggtgctgctcc

SEQ ID NO: 4182480 - DNA, 25 bp, Homo sapien
caccagtgtcatgagaaggtgctgc

SEQ ID NO: 4182481 - DNA, 25 bp, Homo sapien
tcctccaggctcctgcggatgtcac

SEQ ID NO: 4182482 - DNA, 25 bp, Homo sapien
ggctcctgcggatgtcacccagcat

SEQ ID NO: 4182483 - DNA, 25 bp, Homo sapien
ggaaaggacatcttgagtgggcacc

SEQ ID NO: 4182484 - DNA, 25 bp, Homo sapien
aaggacatcttgagtgggcaccacc

SEQ ID NO: 4182485 - DNA, 25 bp, Homo sapien
caaaggcagttttggtggagatggt

SEQ ID NO: 4182486 - DNA, 25 bp, Homo sapien
ctacagtgagcaaaggcagttttgg

SEQ ID NO: 4182487 - DNA, 25 bp, Homo sapien
acagtgagcaaaggcagttttggtg

SEQ ID NO: 4182488 - DNA, 25 bp, Homo sapien
agcaaaggcagttttggtggagatg

SEQ ID NO: 4182489 - DNA, 25 bp, Homo sapien
gcggccagcattataccactcatct

SEQ ID NO: 4182490 - DNA, 25 bp, Homo sapien
atgcaaggatgaagaggcggccagc

SEQ ID NO: 4182491 - DNA, 25 bp, Homo sapien
agcattataccactcatctctcctg

SEQ ID NO: 4182492 - DNA, 25 bp, Homo sapien
tgaagaggcggccagcattatacca

SEQ ID NO: 4182493 - DNA, 25 bp, Homo sapien
gggccagtttcctcagctgaggtcc

SEQ ID NO: 4182494 - DNA, 25 bp, Homo sapien
gccagtttcctcagctgaggtcctg

SEQ ID NO: 4182495 - DNA, 25 bp, Homo sapien
cagtttcctcagctgaggtcctggg

SEQ ID NO: 4182496 - DNA, 25 bp, Homo sapien
aggtcctggggtgccatggctcctc

SEQ ID NO: 4182497 - DNA, 25 bp, Homo sapien
tagagcaggccaagcgcaatgatga

SEQ ID NO: 4182498 - DNA, 25 bp, Homo sapien
tgccagcagttgtagagcaggccaa

SEQ ID NO: 4182499 - DNA, 25 bp, Homo sapien
cacgaagagcgtgccgtagtcgctg

SEQ ID NO: 4182500 - DNA, 25 bp, Homo sapien
gcagctgctggttgtggaatagttc

SEQ ID NO: 4182501 - DNA, 25 bp, Homo sapien
gagcagtcagcagtgctaggctgac

SEQ ID NO: 4182502 - DNA, 25 bp, Homo sapien
gatgggcactctcctctcaactggc

SEQ ID NO: 4182503 - DNA, 25 bp, Homo sapien
cagatgaggacacctatcgatgggc

SEQ ID NO: 4182504 - DNA, 25 bp, Homo sapien
tgtgcgcccaggagagtcactgcct

SEQ ID NO: 4182505 - DNA, 25 bp, Homo sapien
ctgcagctcaactcctttctcaaaa

SEQ ID NO: 4182506 - DNA, 25 bp, Homo sapien
ttggcactacaaagccccgtggcct

SEQ ID NO: 4182507 - DNA, 25 bp, Homo sapien
taagaagactccacttgcgaggtgg

SEQ ID NO: 4182508 - DNA, 25 bp, Homo sapien
ctcaaaataaacctactagtcgttg

SEQ ID NO: 4182509 - DNA, 25 bp, Homo sapien
tgcatctccgactggctgtcgctgg

SEQ ID NO: 4182510 - DNA, 25 bp, Homo sapien
cgtggcagccgttctccacgaagcg

SEQ ID NO: 4182511 - DNA, 25 bp, Homo sapien
actggctgtcgctggccacgtccag

SEQ ID NO: 4182512 - DNA, 25 bp, Homo sapien
tgtcctcctcgaacacgtccgagtc

SEQ ID NO: 4182513 - DNA, 25 bp, Homo sapien
agttggtccgaagccgccgtgtgaa

SEQ ID NO: 4182514 - DNA, 25 bp, Homo sapien
gggccaaggcgggctttgaggcctg

SEQ ID NO: 4182515 - DNA, 25 bp, Homo sapien
tcggggtccacctcgcttggtcctg

SEQ ID NO: 4182516 - DNA, 25 bp, Homo sapien
ccctcgggcgggagtgagggagttg

SEQ ID NO: 4182517 - DNA, 25 bp, Homo sapien
cccggcggatgtaaacacgctcagc

SEQ ID NO: 4182518 - DNA, 25 bp, Homo sapien
ggcgaagccgcgcacccggcggatg

SEQ ID NO: 4182519 - DNA, 25 bp, Homo sapien
gcggatgtaaacacgctcagccccg

SEQ ID NO: 4182520 - DNA, 25 bp, Homo sapien
gcacccggcggatgtaaacacgctc

SEQ ID NO: 4182521 - DNA, 25 bp, Homo sapien
gaggatggtacccgagccgaacgac

SEQ ID NO: 4182522 - DNA, 25 bp, Homo sapien
ggaggatggtacccgagccgaacga

SEQ ID NO: 4182523 - DNA, 25 bp, Homo sapien
cggaggatggtacccgagccgaacg

SEQ ID NO: 4182524 - DNA, 25 bp, Homo sapien
cttcctgcagctggcgaacaggtcg

SEQ ID NO: 4182525 - DNA, 25 bp, Homo sapien
ctggcgaacaggtcgctggtgtcca

SEQ ID NO: 4182526 - DNA, 25 bp, Homo sapien
agctggcgaacaggtcgctggtgtc

SEQ ID NO: 4182527 - DNA, 25 bp, Homo sapien
cctgcagctggcgaacaggtcgctg

SEQ ID NO: 4182528 - DNA, 25 bp, Homo sapien
cctccccgggactgcgaggtcctca

SEQ ID NO: 4182529 - DNA, 25 bp, Homo sapien
ctccccgggactgcgaggtcctcac

SEQ ID NO: 4182530 - DNA, 25 bp, Homo sapien
cagggcccgaggcgttccgagggcg

SEQ ID NO: 4182531 - DNA, 25 bp, Homo sapien
gaggcgttccgagggcggccacctc

SEQ ID NO: 4182532 - DNA, 25 bp, Homo sapien
tccgggggtcaatggccatcagtgt

SEQ ID NO: 4182533 - DNA, 25 bp, Homo sapien
tccgctgagcagtcccttcttacag

SEQ ID NO: 4182534 - DNA, 25 bp, Homo sapien
agggcgaacagtggcccgccttctc

SEQ ID NO: 4182535 - DNA, 25 bp, Homo sapien
tccgcccacttctgcgccttcgggc

SEQ ID NO: 4182536 - DNA, 25 bp, Homo sapien
gagtcgcgggatacagcaactgatg

SEQ ID NO: 4182537 - DNA, 25 bp, Homo sapien
cagattcactttagctgcgtcagga

SEQ ID NO: 4182538 - DNA, 25 bp, Homo sapien
taactcttgagtggcacgggatgtc

SEQ ID NO: 4182539 - DNA, 25 bp, Homo sapien
ggagtcgccaatgctaatgcagccc

SEQ ID NO: 4182540 - DNA, 25 bp, Homo sapien
gggtgctgtcccacttgtcccgcac

SEQ ID NO: 4182541 - DNA, 25 bp, Homo sapien
agggggtgctgtcccacttgtcccg

SEQ ID NO: 4182542 - DNA, 25 bp, Homo sapien
tgtcccacttgtcccgcacattcac

SEQ ID NO: 4182543 - DNA, 25 bp, Homo sapien
tgctgtcccacttgtcccgcacatt

SEQ ID NO: 4182544 - DNA, 25 bp, Homo sapien
agtacaggaggcagtcctcagtgct

SEQ ID NO: 4182545 - DNA, 25 bp, Homo sapien
tgctgaaggggtgcaccaaccccca

SEQ ID NO: 4182546 - DNA, 25 bp, Homo sapien
gaaggaagtacaggaggcagtcctc

SEQ ID NO: 4182547 - DNA, 25 bp, Homo sapien
agtgctgaaggggtgcaccaacccc

SEQ ID NO: 4182548 - DNA, 25 bp, Homo sapien
cgtgcccacacaagcaggcatagta

SEQ ID NO: 4182549 - DNA, 25 bp, Homo sapien
gtgcccacacaagcaggcatagtac

SEQ ID NO: 4182550 - DNA, 25 bp, Homo sapien
ctcgtgcccacacaagcaggcatag

SEQ ID NO: 4182551 - DNA, 25 bp, Homo sapien
tcgtgcccacacaagcaggcatagt

SEQ ID NO: 4182552 - DNA, 25 bp, Homo sapien
cattggccagaaggtagagtaccag

SEQ ID NO: 4182553 - DNA, 25 bp, Homo sapien
attggccagaaggtagagtaccagc

SEQ ID NO: 4182554 - DNA, 25 bp, Homo sapien
ttggccagaaggtagagtaccagct

SEQ ID NO: 4182555 - DNA, 25 bp, Homo sapien
tggccagaaggtagagtaccagctc

SEQ ID NO: 4182556 - DNA, 25 bp, Homo sapien
gacaacacagaacggagagctgact

SEQ ID NO: 4182557 - DNA, 25 bp, Homo sapien
cactacctaacgatggcagggacta

SEQ ID NO: 4182558 - DNA, 25 bp, Homo sapien
aaaaacaagcctgggcgtggcagct

SEQ ID NO: 4182559 - DNA, 25 bp, Homo sapien
cagcagtgaacgagacacaggtccc

SEQ ID NO: 4182560 - DNA, 25 bp, Homo sapien
gaaggtgttggcctcgcagcgggct

SEQ ID NO: 4182561 - DNA, 25 bp, Homo sapien
gtcgtcatagtaatcccgcctcctg

SEQ ID NO: 4182562 - DNA, 25 bp, Homo sapien
tgcaggaagccgtgacctgcttgta

SEQ ID NO: 4182563 - DNA, 25 bp, Homo sapien
ttgtaatcgcgtagagcccggcgga

SEQ ID NO: 4182564 - DNA, 25 bp, Homo sapien
cccaccccattcctcggagcactca

SEQ ID NO: 4182565 - DNA, 25 bp, Homo sapien
agactcgccacacccaccagggcca

SEQ ID NO: 4182566 - DNA, 25 bp, Homo sapien
atgctgcacccctcgtgtgccctgg

SEQ ID NO: 4182567 - DNA, 25 bp, Homo sapien
ggccacagtcagagcagactcgcca

SEQ ID NO: 4182568 - DNA, 25 bp, Homo sapien
gaatggcttcccgtgtactacaaag

SEQ ID NO: 4182569 - DNA, 25 bp, Homo sapien
tggcaaagtaggcactacgtgcacc

SEQ ID NO: 4182570 - DNA, 25 bp, Homo sapien
cgcagcgatgcacccggaatggctt

SEQ ID NO: 4182571 - DNA, 25 bp, Homo sapien
tacgtgcacccaggacgcagcgatg

SEQ ID NO: 4182572 - DNA, 25 bp, Homo sapien
gagaaccacgacactcttgcccttc

SEQ ID NO: 4182573 - DNA, 25 bp, Homo sapien
tgcccttccatttggtgtccagcat

SEQ ID NO: 4182574 - DNA, 25 bp, Homo sapien
gacactcttgcccttccatttggtg

SEQ ID NO: 4182575 - DNA, 25 bp, Homo sapien
tcttgcccttccatttggtgtccag

SEQ ID NO: 4182576 - DNA, 25 bp, Homo sapien
tacaggtactgcagcagggccccaa

SEQ ID NO: 4182577 - DNA, 25 bp, Homo sapien
ggtactgcagcagggccccaaaggc

SEQ ID NO: 4182578 - DNA, 25 bp, Homo sapien
aggtactgcagcagggccccaaagg

SEQ ID NO: 4182579 - DNA, 25 bp, Homo sapien
ctgtgtacaggtactgcagcagggc

SEQ ID NO: 4182580 - DNA, 25 bp, Homo sapien
gcatgtgggtgggacaagctcttcc

SEQ ID NO: 4182581 - DNA, 25 bp, Homo sapien
tcagctgtcatcaggcccacagaaa

SEQ ID NO: 4182582 - DNA, 25 bp, Homo sapien
gccaccatggtttccccatcaaaag

SEQ ID NO: 4182583 - DNA, 25 bp, Homo sapien
aaagctgttctacaggccccaggga

SEQ ID NO: 4182584 - DNA, 25 bp, Homo sapien
tccaggtcgctgagcaggtcccaca

SEQ ID NO: 4182585 - DNA, 25 bp, Homo sapien
caggtcgctgagcaggtcccacagc

SEQ ID NO: 4182586 - DNA, 25 bp, Homo sapien
ctccaggtcgctgagcaggtcccac

SEQ ID NO: 4182587 - DNA, 25 bp, Homo sapien
ggtcgctgagcaggtcccacagctg

SEQ ID NO: 4182588 - DNA, 25 bp, Homo sapien
gggaagaacaacttcagggagccag

SEQ ID NO: 4182589 - DNA, 25 bp, Homo sapien
cctgccaggccgcacccatggcccc

SEQ ID NO: 4182590 - DNA, 25 bp, Homo sapien
ctacaggggaagaacaacttcaggg

SEQ ID NO: 4182591 - DNA, 25 bp, Homo sapien
acaggggaagaacaacttcagggag

SEQ ID NO: 4182592 - DNA, 25 bp, Homo sapien
agcaccttcacacacgtgcctggct

SEQ ID NO: 4182593 - DNA, 25 bp, Homo sapien
acacacgtgcctggcttagacgcca

SEQ ID NO: 4182594 - DNA, 25 bp, Homo sapien
ccttcacacacgtgcctggcttaga

SEQ ID NO: 4182595 - DNA, 25 bp, Homo sapien
gcagggcacaatcggccagcagcgc

SEQ ID NO: 4182596 - DNA, 25 bp, Homo sapien
aagtatctgggctgcctgtcacggc

SEQ ID NO: 4182597 - DNA, 25 bp, Homo sapien
acagaagaggtgaccccatcagagc

SEQ ID NO: 4182598 - DNA, 25 bp, Homo sapien
aggaccacacaaggaattgagccca

SEQ ID NO: 4182599 - DNA, 25 bp, Homo sapien
ttcacagaagtgaacgactaggttc

SEQ ID NO: 4182600 - DNA, 25 bp, Homo sapien
tgttgaagccgtcaggacaagggaa

SEQ ID NO: 4182601 - DNA, 25 bp, Homo sapien
ctgttgaagccgtcaggacaaggga

SEQ ID NO: 4182602 - DNA, 25 bp, Homo sapien
agccactcggaagcagatgtcaggg

SEQ ID NO: 4182603 - DNA, 25 bp, Homo sapien
gccactcggaagcagatgtcagggc

SEQ ID NO: 4182604 - DNA, 25 bp, Homo sapien
ccactcggaagcagatgtcagggca

SEQ ID NO: 4182605 - DNA, 25 bp, Homo sapien
tgaggagctagacgggggctcaggg

SEQ ID NO: 4182606 - DNA, 25 bp, Homo sapien
gacgggggctcagggcaacgggctg

SEQ ID NO: 4182607 - DNA, 25 bp, Homo sapien
gctagacgggggctcagggcaacgg

SEQ ID NO: 4182608 - DNA, 25 bp, Homo sapien
tagacgggggctcagggcaacgggc

SEQ ID NO: 4182609 - DNA, 25 bp, Homo sapien
gaagtagtcactgcggccacagaaa

SEQ ID NO: 4182610 - DNA, 25 bp, Homo sapien
tacatgtagtagagcacgtgagtga

SEQ ID NO: 4182611 - DNA, 25 bp, Homo sapien
aagacgtcgggtgagatgccatgca

SEQ ID NO: 4182612 - DNA, 25 bp, Homo sapien
cgctctctcggaagtggtcatccag

SEQ ID NO: 4182613 - DNA, 25 bp, Homo sapien
gtgacacaggctcatcactcatcct

SEQ ID NO: 4182614 - DNA, 25 bp, Homo sapien
accctcctgctagagaagctgagga

SEQ ID NO: 4182615 - DNA, 25 bp, Homo sapien
gccttctcaaaacgtcaaccatggg

SEQ ID NO: 4182616 - DNA, 25 bp, Homo sapien
ccaagtggctgacaagtgtggagtg

SEQ ID NO: 4182617 - DNA, 25 bp, Homo sapien
cagccttggcttacggacaccttgg

SEQ ID NO: 4182618 - DNA, 25 bp, Homo sapien
ctgcagccttggcttacggacacct

SEQ ID NO: 4182619 - DNA, 25 bp, Homo sapien
agccttggcttacggacaccttggg

SEQ ID NO: 4182620 - DNA, 25 bp, Homo sapien
gcagccttggcttacggacaccttg

SEQ ID NO: 4182621 - DNA, 25 bp, Homo sapien
tatagataaccatgcctacctgcgg

SEQ ID NO: 4182622 - DNA, 25 bp, Homo sapien
gagcatgagtttgcctaggacccaa

SEQ ID NO: 4182623 - DNA, 25 bp, Homo sapien
gattgctttatagtgcgcgcgcacg

SEQ ID NO: 4182624 - DNA, 25 bp, Homo sapien
tgacgacgagagctatccccatgtt

SEQ ID NO: 4182625 - DNA, 25 bp, Homo sapien
tcccagggcacaacagccaaggcta

SEQ ID NO: 4182626 - DNA, 25 bp, Homo sapien
cacagggatctgcaggaccgctagg

SEQ ID NO: 4182627 - DNA, 25 bp, Homo sapien
taggagctccctgcgcatgtatggg

SEQ ID NO: 4182628 - DNA, 25 bp, Homo sapien
gccagggtctgagctccgagttata

SEQ ID NO: 4182629 - DNA, 25 bp, Homo sapien
agcaggtacatgtcggcgacgctca

SEQ ID NO: 4182630 - DNA, 25 bp, Homo sapien
tcaagccgcgccaggcggaagagct

SEQ ID NO: 4182631 - DNA, 25 bp, Homo sapien
tctagcatctgagccaggctgcggc

SEQ ID NO: 4182632 - DNA, 25 bp, Homo sapien
gaagagcttggccacgcgccacaca

SEQ ID NO: 4182633 - DNA, 25 bp, Homo sapien
cacgtggaagcggatgtcgtccacc

SEQ ID NO: 4182634 - DNA, 25 bp, Homo sapien
tctgcaccgtgctggccacgtggaa

SEQ ID NO: 4182635 - DNA, 25 bp, Homo sapien
caccagcgggatagagtccgtctcc

SEQ ID NO: 4182636 - DNA, 25 bp, Homo sapien
ctctatggcgctgtaggtctgcacc

SEQ ID NO: 4182637 - DNA, 25 bp, Homo sapien
tcaacagtccagaccgatggacacg

SEQ ID NO: 4182638 - DNA, 25 bp, Homo sapien
gatggacacgagcaggtcctcgagt

SEQ ID NO: 4182639 - DNA, 25 bp, Homo sapien
aacagtccagaccgatggacacgag

SEQ ID NO: 4182640 - DNA, 25 bp, Homo sapien
ccgatggacacgagcaggtcctcga

SEQ ID NO: 4182641 - DNA, 25 bp, Homo sapien
ggcccctggggctgcccagccaggg

SEQ ID NO: 4182642 - DNA, 25 bp, Homo sapien
ctggcccctggggctgcccagccag

SEQ ID NO: 4182643 - DNA, 25 bp, Homo sapien
tcctggcccctggggctgcccagcc

SEQ ID NO: 4182644 - DNA, 25 bp, Homo sapien
ctcctggcccctggggctgcccagc

SEQ ID NO: 4182645 - DNA, 25 bp, Homo sapien
caggtttccctgagtggtgtccacc

SEQ ID NO: 4182646 - DNA, 25 bp, Homo sapien
gaagaagagctgcacacaaacgcat

SEQ ID NO: 4182647 - DNA, 25 bp, Homo sapien
tcaagctttattgccacacacactc

SEQ ID NO: 4182648 - DNA, 25 bp, Homo sapien
tagagaagcaattcagggctaggca

SEQ ID NO: 4182649 - DNA, 25 bp, Homo sapien
ctgagcagaattgcttgaactcggg

SEQ ID NO: 4182650 - DNA, 25 bp, Homo sapien
ccaagcaagatcgcaccactgcact

SEQ ID NO: 4182651 - DNA, 25 bp, Homo sapien
ccagcctgggcgacagagcgagaat

SEQ ID NO: 4182652 - DNA, 25 bp, Homo sapien
ctcgggaggtggaggttgcagtgag

SEQ ID NO: 4182653 - DNA, 25 bp, Homo sapien
gagacctgctggtgttaggccacta

SEQ ID NO: 4182654 - DNA, 25 bp, Homo sapien
tttaaatctctcttggcacaccagg

SEQ ID NO: 4182655 - DNA, 25 bp, Homo sapien
tgtgacgaccaacatgccagtgcaa

SEQ ID NO: 4182656 - DNA, 25 bp, Homo sapien
cacaccaggctcaggataggtcaaa

SEQ ID NO: 4182657 - DNA, 25 bp, Homo sapien
tacaggaagctctgcgcatccatgc

SEQ ID NO: 4182658 - DNA, 25 bp, Homo sapien
ctgctggcaatgcttcctgttgatt

SEQ ID NO: 4182659 - DNA, 25 bp, Homo sapien
cattggacaccttcctacataagtg

SEQ ID NO: 4182660 - DNA, 25 bp, Homo sapien
tgttgatttgcaataccgcattgga

SEQ ID NO: 4182661 - DNA, 25 bp, Homo sapien
ggtgctctgaaaacccacaggatcc

SEQ ID NO: 4182662 - DNA, 25 bp, Homo sapien
catccctgcgtgtatactgtctgcg

SEQ ID NO: 4182663 - DNA, 25 bp, Homo sapien
tgggatcacgatggcttcacaagcc

SEQ ID NO: 4182664 - DNA, 25 bp, Homo sapien
gaaagatgccgcctgtagccagtga

SEQ ID NO: 4182665 - DNA, 25 bp, Homo sapien
agtaatttggcggaaagaatgctca

SEQ ID NO: 4182666 - DNA, 25 bp, Homo sapien
aatttgcatacccttgattaagtgg

SEQ ID NO: 4182667 - DNA, 25 bp, Homo sapien
taagtggcaactcagaattgtaggc

SEQ ID NO: 4182668 - DNA, 25 bp, Homo sapien
ggctgatccttgattatcctctttc

SEQ ID NO: 4182669 - DNA, 25 bp, Homo sapien
cacacgcatcgtggtgtcctagcat

SEQ ID NO: 4182670 - DNA, 25 bp, Homo sapien
ccccaagaaagcatgaggagtgggc

SEQ ID NO: 4182671 - DNA, 25 bp, Homo sapien
acaaaggagtaagcccacaccaggc

SEQ ID NO: 4182672 - DNA, 25 bp, Homo sapien
tgggcctcgtgctgacaaaggagta

SEQ ID NO: 4182673 - DNA, 25 bp, Homo sapien
cagggcttccaaatcagtgggctga

SEQ ID NO: 4182674 - DNA, 25 bp, Homo sapien
cactgtttgggtcacgtgtagtagt

SEQ ID NO: 4182675 - DNA, 25 bp, Homo sapien
gtagtgatacggctctctctctccc

SEQ ID NO: 4182676 - DNA, 25 bp, Homo sapien
tatgttctgatccactgtttgggtc

SEQ ID NO: 4182677 - DNA, 25 bp, Homo sapien
tctggcatttctggatgattctggc

SEQ ID NO: 4182678 - DNA, 25 bp, Homo sapien
ctcatgcatcctggaagtttctagt

SEQ ID NO: 4182679 - DNA, 25 bp, Homo sapien
gcacagagccctaacatttcatgag

SEQ ID NO: 4182680 - DNA, 25 bp, Homo sapien
tgattctggccaacccagagctgca

SEQ ID NO: 4182681 - DNA, 25 bp, Homo sapien
gccagaaatgtaggaaggacgctgt

SEQ ID NO: 4182682 - DNA, 25 bp, Homo sapien
gcagagctgccatgttagaaaactc

SEQ ID NO: 4182683 - DNA, 25 bp, Homo sapien
ccaggagccacgaacagcttgaagg

SEQ ID NO: 4182684 - DNA, 25 bp, Homo sapien
aactcaggagccatggccgcatgtt

SEQ ID NO: 4182685 - DNA, 25 bp, Homo sapien
gaacagggctgagtcacttgtttgc

SEQ ID NO: 4182686 - DNA, 25 bp, Homo sapien
cttgtttgcgcaggttcaggagtct

SEQ ID NO: 4182687 - DNA, 25 bp, Homo sapien
tccatcagcaatcgagaacagggct

SEQ ID NO: 4182688 - DNA, 25 bp, Homo sapien
ggctccatcagcaatcgagaacagg

SEQ ID NO: 4182689 - DNA, 25 bp, Homo sapien
tgaatgccaaaccatccccccagca

SEQ ID NO: 4182690 - DNA, 25 bp, Homo sapien
caagtgctcagtgagtaaggatgaa

SEQ ID NO: 4182691 - DNA, 25 bp, Homo sapien
gtgctcagtgagtaaggatgaataa

SEQ ID NO: 4182692 - DNA, 25 bp, Homo sapien
ctcagtgagtaaggatgaataaagg

SEQ ID NO: 4182693 - DNA, 25 bp, Homo sapien
cctaccgaatgaccgagagcagtgt

SEQ ID NO: 4182694 - DNA, 25 bp, Homo sapien
cacacatgtgtggtcagctgcaggt

SEQ ID NO: 4182695 - DNA, 25 bp, Homo sapien
cagggcaatgccagatcagtgatcc

SEQ ID NO: 4182696 - DNA, 25 bp, Homo sapien
gatgtgtctctgatcacccagtagg

SEQ ID NO: 4182697 - DNA, 25 bp, Homo sapien
cacctttgactattgtgtctctcat

SEQ ID NO: 4182698 - DNA, 25 bp, Homo sapien
gccttctgtccatacgaatcaggtg

SEQ ID NO: 4182699 - DNA, 25 bp, Homo sapien
ttctgtccatacgaatcaggtgttc

SEQ ID NO: 4182700 - DNA, 25 bp, Homo sapien
tatttacacctttgactattgtgtc

SEQ ID NO: 4182701 - DNA, 25 bp, Homo sapien
tgaggccaacacatcaggagaggct

SEQ ID NO: 4182702 - DNA, 25 bp, Homo sapien
aaagatgtgcttccctgtaagacct

SEQ ID NO: 4182703 - DNA, 25 bp, Homo sapien
cccaagatggctgtgagagttccag

SEQ ID NO: 4182704 - DNA, 25 bp, Homo sapien
tagtaattggctagccctagaacag

SEQ ID NO: 4182705 - DNA, 25 bp, Homo sapien
ctaggtctgcgtcatcaagggtagc

SEQ ID NO: 4182706 - DNA, 25 bp, Homo sapien
taggtctgcgtcatcaagggtagca

SEQ ID NO: 4182707 - DNA, 25 bp, Homo sapien
aggtctgcgtcatcaagggtagcag

SEQ ID NO: 4182708 - DNA, 25 bp, Homo sapien
gaggtggcgcctgagcctggatgag

SEQ ID NO: 4182709 - DNA, 25 bp, Homo sapien
actcccagaggtggcgcctgagcct

SEQ ID NO: 4182710 - DNA, 25 bp, Homo sapien
tgctagaagatgctctgactcccag

SEQ ID NO: 4182711 - DNA, 25 bp, Homo sapien
gcctcctgccaaggctctgctagaa

SEQ ID NO: 4182712 - DNA, 25 bp, Homo sapien
tttctttggatacgctcaagttcac

SEQ ID NO: 4182713 - DNA, 25 bp, Homo sapien
tgtgggtatgaatttggcctggagg

SEQ ID NO: 4182714 - DNA, 25 bp, Homo sapien
ttgtgaatcctgtatgtgtgggtat

SEQ ID NO: 4182715 - DNA, 25 bp, Homo sapien
gctcagtgaaggcttgcagaattac

SEQ ID NO: 4182716 - DNA, 25 bp, Homo sapien
cactgtggcatgcttgtgagggtcc

SEQ ID NO: 4182717 - DNA, 25 bp, Homo sapien
acactgtggcatgcttgtgagggtc

SEQ ID NO: 4182718 - DNA, 25 bp, Homo sapien
tattctgcaccacaagtatatggcc

SEQ ID NO: 4182719 - DNA, 25 bp, Homo sapien
tatggccttgatatctgtacgccca

SEQ ID NO: 4182720 - DNA, 25 bp, Homo sapien
acagcagagcacaactgtggcccgg

SEQ ID NO: 4182721 - DNA, 25 bp, Homo sapien
tctcttttattctgcaccacaagta

SEQ ID NO: 4182722 - DNA, 25 bp, Homo sapien
gctgatgtcgagatgacaggtggaa

SEQ ID NO: 4182723 - DNA, 25 bp, Homo sapien
gatgtcgagatgacaggtggaagaa

SEQ ID NO: 4182724 - DNA, 25 bp, Homo sapien
aagggcaggctgatgtcgagatgac

SEQ ID NO: 4182725 - DNA, 25 bp, Homo sapien
caggctgatgtcgagatgacaggtg

SEQ ID NO: 4182726 - DNA, 25 bp, Homo sapien
tatgcaccagaacaaagatgggcat

SEQ ID NO: 4182727 - DNA, 25 bp, Homo sapien
tagaattctatgcaccagaacaaag

SEQ ID NO: 4182728 - DNA, 25 bp, Homo sapien
gcatttagaattctatgcaccagaa

SEQ ID NO: 4182729 - DNA, 25 bp, Homo sapien
ggccattcagtgcatttagaattct

SEQ ID NO: 4182730 - DNA, 25 bp, Homo sapien
tcatagtaatataggcgcaaggcaa

SEQ ID NO: 4182731 - DNA, 25 bp, Homo sapien
aaagaaggccgcgtcatggcaaaga

SEQ ID NO: 4182732 - DNA, 25 bp, Homo sapien
ctagatggagaggttcatagtaata

SEQ ID NO: 4182733 - DNA, 25 bp, Homo sapien
tagcaccgcgtgttagcaggagatg

SEQ ID NO: 4182734 - DNA, 25 bp, Homo sapien
tatgttttgcttgggatgactacgt

SEQ ID NO: 4182735 - DNA, 25 bp, Homo sapien
acttcaggtgcagagggctgagcca

SEQ ID NO: 4182736 - DNA, 25 bp, Homo sapien
cacatgtttactcttggacttcagg

SEQ ID NO: 4182737 - DNA, 25 bp, Homo sapien
cacttcatgtggttggctcagggat

SEQ ID NO: 4182738 - DNA, 25 bp, Homo sapien
gagtgctgctctcaaagccacatga

SEQ ID NO: 4182739 - DNA, 25 bp, Homo sapien
ggtttcatgcccacgaatatgttac

SEQ ID NO: 4182740 - DNA, 25 bp, Homo sapien
gagtatgtgtcaccgagagtgctgc

SEQ ID NO: 4182741 - DNA, 25 bp, Homo sapien
gttccaaggcctttacgcacataca

SEQ ID NO: 4182742 - DNA, 25 bp, Homo sapien
tgtaataactcataggtatgcttga

SEQ ID NO: 4182743 - DNA, 25 bp, Homo sapien
ctcataggtatgcttgatgcagacc

SEQ ID NO: 4182744 - DNA, 25 bp, Homo sapien
taactcataggtatgcttgatgcag

SEQ ID NO: 4182745 - DNA, 25 bp, Homo sapien
ctagtgtaataactcataggtatgc

SEQ ID NO: 4182746 - DNA, 25 bp, Homo sapien
ccagcaaggcatccagtatacacga

SEQ ID NO: 4182747 - DNA, 25 bp, Homo sapien
cagtatcccatggatcggaagagga

SEQ ID NO: 4182748 - DNA, 25 bp, Homo sapien
gtcgaaaatccacgtaatgaagctg

SEQ ID NO: 4182749 - DNA, 25 bp, Homo sapien
ggccgagaccatggcagtcgaaaat

SEQ ID NO: 4182750 - DNA, 25 bp, Homo sapien
ccaactaaagctgatcaaggtcagg

SEQ ID NO: 4182751 - DNA, 25 bp, Homo sapien
tgaatttgggttttcataataacgc

SEQ ID NO: 4182752 - DNA, 25 bp, Homo sapien
gtgctaagccaaggtcccagtattg

SEQ ID NO: 4182753 - DNA, 25 bp, Homo sapien
caaggtcaggatgtgcaagagatgt

SEQ ID NO: 4182754 - DNA, 25 bp, Homo sapien
ggcaggactgtgtgatcagcgctgg

SEQ ID NO: 4182755 - DNA, 25 bp, Homo sapien
ggactgtgtgatcagcgctgggtgg

SEQ ID NO: 4182756 - DNA, 25 bp, Homo sapien
cccgccacactgtcggcaggactgt

SEQ ID NO: 4182757 - DNA, 25 bp, Homo sapien
tccccgccacactgtcggcaggact

SEQ ID NO: 4182758 - DNA, 25 bp, Homo sapien
tccaggatggcacagctcttggtaa

SEQ ID NO: 4182759 - DNA, 25 bp, Homo sapien
tctcaggatggaaaatggtgacctc

SEQ ID NO: 4182760 - DNA, 25 bp, Homo sapien
agctcttggtaagggagctggccat

SEQ ID NO: 4182761 - DNA, 25 bp, Homo sapien
atccccacgccacccaggaagatgt

SEQ ID NO: 4182762 - DNA, 25 bp, Homo sapien
agaggcaagtcacaggtctgcaccc

SEQ ID NO: 4182763 - DNA, 25 bp, Homo sapien
aggaaatctagcttaagcatttctt

SEQ ID NO: 4182764 - DNA, 25 bp, Homo sapien
caggaaatctagcttaagcatttct

SEQ ID NO: 4182765 - DNA, 25 bp, Homo sapien
ggaaatctagcttaagcatttcttt

SEQ ID NO: 4182766 - DNA, 25 bp, Homo sapien
agcctgccgcagcacgaagagcagc

SEQ ID NO: 4182767 - DNA, 25 bp, Homo sapien
cctcttactagcttgcaccagttct

SEQ ID NO: 4182768 - DNA, 25 bp, Homo sapien
atgtctgccctcttactagcttgca

SEQ ID NO: 4182769 - DNA, 25 bp, Homo sapien
tcattcaatccccaaaacagcctgc

SEQ ID NO: 4182770 - DNA, 25 bp, Homo sapien
ctggcttggacgctaccgtgtggca

SEQ ID NO: 4182771 - DNA, 25 bp, Homo sapien
ctattcccgcgctggttccagacgg

SEQ ID NO: 4182772 - DNA, 25 bp, Homo sapien
gatataaatagaggtcccgcgccct

SEQ ID NO: 4182773 - DNA, 25 bp, Homo sapien
tcgctgggccacgacctggcttgga

SEQ ID NO: 4182774 - DNA, 25 bp, Homo sapien
ttggtaaattagctgtcaacatgct

SEQ ID NO: 4182775 - DNA, 25 bp, Homo sapien
ttcccaagcggcaacaatgtgcagg

SEQ ID NO: 4182776 - DNA, 25 bp, Homo sapien
aaaaatgaaaggtatggcaacactg

SEQ ID NO: 4182777 - DNA, 25 bp, Homo sapien
aatgtgcaggacctgagtacccagc

SEQ ID NO: 4182778 - DNA, 25 bp, Homo sapien
tgattactcatgaagctacaaagat

SEQ ID NO: 4182779 - DNA, 25 bp, Homo sapien
gcactccatgatctactctccaaag

SEQ ID NO: 4182780 - DNA, 25 bp, Homo sapien
ggctatttgcatgtctgattactca

SEQ ID NO: 4182781 - DNA, 25 bp, Homo sapien
ttaagtgtagcttgattcctgaggg

SEQ ID NO: 4182782 - DNA, 25 bp, Homo sapien
taggcagccatagctacagtctgta

SEQ ID NO: 4182783 - DNA, 25 bp, Homo sapien
taataacaccgacacactttctgct

SEQ ID NO: 4182784 - DNA, 25 bp, Homo sapien
cattcaagtagtccacaggtgaaca

SEQ ID NO: 4182785 - DNA, 25 bp, Homo sapien
ggcattattgatctccaaagctgca

SEQ ID NO: 4182786 - DNA, 25 bp, Homo sapien
gcttcaaaagctcaacaagatgcac

SEQ ID NO: 4182787 - DNA, 25 bp, Homo sapien
tacaggatcataacaaaaactggca

SEQ ID NO: 4182788 - DNA, 25 bp, Homo sapien
cataccatagcgcagatttagagag

SEQ ID NO: 4182789 - DNA, 25 bp, Homo sapien
gaaataggttttccgtgatacagga

SEQ ID NO: 4182790 - DNA, 25 bp, Homo sapien
tgacaacaccagtacacacagttcc

SEQ ID NO: 4182791 - DNA, 25 bp, Homo sapien
cttttgtctagagagtttagaggca

SEQ ID NO: 4182792 - DNA, 25 bp, Homo sapien
ttattttccatgacaacaccagtac

SEQ ID NO: 4182793 - DNA, 25 bp, Homo sapien
gagtttagaggcacttgcttctcca

SEQ ID NO: 4182794 - DNA, 25 bp, Homo sapien
tcttctactgctgctagtatcaaaa

SEQ ID NO: 4182795 - DNA, 25 bp, Homo sapien
tctgtatactattccttatgggaga

SEQ ID NO: 4182796 - DNA, 25 bp, Homo sapien
gggagatgtatagggtaattttgac

SEQ ID NO: 4182797 - DNA, 25 bp, Homo sapien
ctgctgctagtatcaaaacaaaata

SEQ ID NO: 4182798 - DNA, 25 bp, Homo sapien
tatgctatatttatgagttatagat

SEQ ID NO: 4182799 - DNA, 25 bp, Homo sapien
gctatatttatgagttatagattat

SEQ ID NO: 4182800 - DNA, 25 bp, Homo sapien
tatatgctatatttatgagttatag

SEQ ID NO: 4182801 - DNA, 25 bp, Homo sapien
tatatatgctatatttatgagttat

SEQ ID NO: 4182802 - DNA, 25 bp, Homo sapien
tgtgcataacttttcccaaaactgg

SEQ ID NO: 4182803 - DNA, 25 bp, Homo sapien
cagagcatagagttctcgaaattca

SEQ ID NO: 4182804 - DNA, 25 bp, Homo sapien
aattcagctgtgcataacttttccc

SEQ ID NO: 4182805 - DNA, 25 bp, Homo sapien
ccagagcatagagttctcgaaattc

SEQ ID NO: 4182806 - DNA, 25 bp, Homo sapien
acataaaggtcattatgaatactgc

SEQ ID NO: 4182807 - DNA, 25 bp, Homo sapien
aacataaaggtcattatgaatactg

SEQ ID NO: 4182808 - DNA, 25 bp, Homo sapien
ataacataaaggtcattatgaatac

SEQ ID NO: 4182809 - DNA, 25 bp, Homo sapien
ctataacataaaggtcattatgaat

SEQ ID NO: 4182810 - DNA, 25 bp, Homo sapien
caattgtcccgttctacagagtact

SEQ ID NO: 4182811 - DNA, 25 bp, Homo sapien
cgttctacagagtacttatcaacac

SEQ ID NO: 4182812 - DNA, 25 bp, Homo sapien
tgtcccgttctacagagtacttatc

SEQ ID NO: 4182813 - DNA, 25 bp, Homo sapien
cttttccaattgtcccgttctacag

SEQ ID NO: 4182814 - DNA, 25 bp, Homo sapien
tacagcatgacatgccaattgcagt

SEQ ID NO: 4182815 - DNA, 25 bp, Homo sapien
atgacatgccaattgcagtggaagg

SEQ ID NO: 4182816 - DNA, 25 bp, Homo sapien
agcatgacatgccaattgcagtgga

SEQ ID NO: 4182817 - DNA, 25 bp, Homo sapien
cactacagcatgacatgccaattgc

SEQ ID NO: 4182818 - DNA, 25 bp, Homo sapien
ccaattatgtatacaggaaatttct

SEQ ID NO: 4182819 - DNA, 25 bp, Homo sapien
cacactcttttagcattcaacaact

SEQ ID NO: 4182820 - DNA, 25 bp, Homo sapien
ccagactcagtatagccatgccaat

SEQ ID NO: 4182821 - DNA, 25 bp, Homo sapien
tgtttaacatagcagccagactcag

SEQ ID NO: 4182822 - DNA, 25 bp, Homo sapien
ggaaaaggcctatgagttacttgcc

SEQ ID NO: 4182823 - DNA, 25 bp, Homo sapien
tggtttgccatcacttcactgggct

SEQ ID NO: 4182824 - DNA, 25 bp, Homo sapien
catagaaacgattgtgccatcacag

SEQ ID NO: 4182825 - DNA, 25 bp, Homo sapien
gatcggtattctggtgtctcactta

SEQ ID NO: 4182826 - DNA, 25 bp, Homo sapien
taagaagagtgctccaaggcaccag

SEQ ID NO: 4182827 - DNA, 25 bp, Homo sapien
tatacaaggtactcaatcgggtagc

SEQ ID NO: 4182828 - DNA, 25 bp, Homo sapien
taccaagagttatgctcaccatggc

SEQ ID NO: 4182829 - DNA, 25 bp, Homo sapien
tttattagaaagtctggctggccag

SEQ ID NO: 4182830 - DNA, 25 bp, Homo sapien
catgacgggggttataagtatactg

SEQ ID NO: 4182831 - DNA, 25 bp, Homo sapien
gacgggggttataagtatactgtca

SEQ ID NO: 4182832 - DNA, 25 bp, Homo sapien
cgggggttataagtatactgtcaat

SEQ ID NO: 4182833 - DNA, 25 bp, Homo sapien
tgacgggggttataagtatactgtc

SEQ ID NO: 4182834 - DNA, 25 bp, Homo sapien
atcatttagcaatctttgtgagtac

SEQ ID NO: 4182835 - DNA, 25 bp, Homo sapien
tacttagagtacttcatgggtgccc

SEQ ID NO: 4182836 - DNA, 25 bp, Homo sapien
acagtttgttgcttaatcgatcagg

SEQ ID NO: 4182837 - DNA, 25 bp, Homo sapien
gcacactccattgatcttggctggg

SEQ ID NO: 4182838 - DNA, 25 bp, Homo sapien
cactgttgactacagctgtactgaa

SEQ ID NO: 4182839 - DNA, 25 bp, Homo sapien
aatgactggtggttgtagtcaaaca

SEQ ID NO: 4182840 - DNA, 25 bp, Homo sapien
gcatagcttagtctctgtcaatgac

SEQ ID NO: 4182841 - DNA, 25 bp, Homo sapien
atttctgcatagcttagtctctgtc

SEQ ID NO: 4182842 - DNA, 25 bp, Homo sapien
tagtcaaacaccagtaagtcttcca

SEQ ID NO: 4182843 - DNA, 25 bp, Homo sapien
gaggttaacctatgcagcaactgtg

SEQ ID NO: 4182844 - DNA, 25 bp, Homo sapien
tgtataggcctctgtaagtagcaat

SEQ ID NO: 4182845 - DNA, 25 bp, Homo sapien
taccgtcaggtaacatgaaatgcaa

SEQ ID NO: 4182846 - DNA, 25 bp, Homo sapien
gaggtgtctggtcctttcaataagc

SEQ ID NO: 4182847 - DNA, 25 bp, Homo sapien
tagcacccagcgtaatatttgatgt

SEQ ID NO: 4182848 - DNA, 25 bp, Homo sapien
catagagcgcatctttcatcgctgg

SEQ ID NO: 4182849 - DNA, 25 bp, Homo sapien
gttccttctgggcatagagcgcatc

SEQ ID NO: 4182850 - DNA, 25 bp, Homo sapien
catctttcatcgctgggtccttagc

SEQ ID NO: 4182851 - DNA, 25 bp, Homo sapien
caaataaccattcctacactaagta

SEQ ID NO: 4182852 - DNA, 25 bp, Homo sapien
gatatatgttgttcctggtgtaaag

SEQ ID NO: 4182853 - DNA, 25 bp, Homo sapien
catatactgagtgtggtcttatctc

SEQ ID NO: 4182854 - DNA, 25 bp, Homo sapien
gagaatatctctgaccaaataacca

SEQ ID NO: 4182855 - DNA, 25 bp, Homo sapien
catgtaaccacatgagcaatggagt

SEQ ID NO: 4182856 - DNA, 25 bp, Homo sapien
tatccagtatatgactaatatgccc

SEQ ID NO: 4182857 - DNA, 25 bp, Homo sapien
tccacttagggtatcattgactcat

SEQ ID NO: 4182858 - DNA, 25 bp, Homo sapien
gagtcacttgagcaatctggccata

SEQ ID NO: 4182859 - DNA, 25 bp, Homo sapien
tgcctgtatttgcagacacgcctct

SEQ ID NO: 4182860 - DNA, 25 bp, Homo sapien
catcagtcaggtggtattttcacca

SEQ ID NO: 4182861 - DNA, 25 bp, Homo sapien
tctccttcacatagagaggtcctgg

SEQ ID NO: 4182862 - DNA, 25 bp, Homo sapien
tcaaaaagcctgtaaagcactggcc

SEQ ID NO: 4182863 - DNA, 25 bp, Homo sapien
gatctccaccacgtcaaggcatttt

SEQ ID NO: 4182864 - DNA, 25 bp, Homo sapien
gaacctggcccttgtcttgacctac

SEQ ID NO: 4182865 - DNA, 25 bp, Homo sapien
tctcgccaaaagtccccatctgggt

SEQ ID NO: 4182866 - DNA, 25 bp, Homo sapien
tgcccctgcattggtggaattggtg

SEQ ID NO: 4182867 - DNA, 25 bp, Homo sapien
tttccaagatcaggtgagaccaggt

SEQ ID NO: 4182868 - DNA, 25 bp, Homo sapien
aagatcaggtgagaccaggtgtgtt

SEQ ID NO: 4182869 - DNA, 25 bp, Homo sapien
agtttccaagatcaggtgagaccag

SEQ ID NO: 4182870 - DNA, 25 bp, Homo sapien
tccaagatcaggtgagaccaggtgt

SEQ ID NO: 4182871 - DNA, 25 bp, Homo sapien
tctagggagagcaatgccctcaggc

SEQ ID NO: 4182872 - DNA, 25 bp, Homo sapien
ggagccctctttccgtatcatggag

SEQ ID NO: 4182873 - DNA, 25 bp, Homo sapien
gacggtacaggatgaaactgatggc

SEQ ID NO: 4182874 - DNA, 25 bp, Homo sapien
gatggcccatacagaaacctgttca

SEQ ID NO: 4182875 - DNA, 25 bp, Homo sapien
ctggggagcagcaccggtcttgagc

SEQ ID NO: 4182876 - DNA, 25 bp, Homo sapien
ctgtctggggagcagcaccggtctt

SEQ ID NO: 4182877 - DNA, 25 bp, Homo sapien
cagcaccggtcttgagcagagaaag

SEQ ID NO: 4182878 - DNA, 25 bp, Homo sapien
gagcagcaccggtcttgagcagaga

SEQ ID NO: 4182879 - DNA, 25 bp, Homo sapien
ctttagaacgctgtgagcggggctt

SEQ ID NO: 4182880 - DNA, 25 bp, Homo sapien
gctgtgagcggggcttaggaaggcc

SEQ ID NO: 4182881 - DNA, 25 bp, Homo sapien
tttagaacgctgtgagcggggctta

SEQ ID NO: 4182882 - DNA, 25 bp, Homo sapien
gtgagcggggcttaggaaggcccat

SEQ ID NO: 4182883 - DNA, 25 bp, Homo sapien
aacacagcatactccacctgggcaa

SEQ ID NO: 4182884 - DNA, 25 bp, Homo sapien
gggcaacatgaagagttcagtcaag

SEQ ID NO: 4182885 - DNA, 25 bp, Homo sapien
ggaaacacagcatactccacctggg

SEQ ID NO: 4182886 - DNA, 25 bp, Homo sapien
gggtcctgtggaaacacagcatact

SEQ ID NO: 4182887 - DNA, 25 bp, Homo sapien
catgaggacgttgatggctacaaca

SEQ ID NO: 4182888 - DNA, 25 bp, Homo sapien
tggttttcccatgggtccagttcca

SEQ ID NO: 4182889 - DNA, 25 bp, Homo sapien
tgtcatgcatgaggacgttgatggc

SEQ ID NO: 4182890 - DNA, 25 bp, Homo sapien
gctacaacattccactggttttccc

SEQ ID NO: 4182891 - DNA, 25 bp, Homo sapien
aggtctcggggattcatcctggcta

SEQ ID NO: 4182892 - DNA, 25 bp, Homo sapien
tgaggtctcggggattcatcctggc

SEQ ID NO: 4182893 - DNA, 25 bp, Homo sapien
gggatgaggtctcggggattcatcc

SEQ ID NO: 4182894 - DNA, 25 bp, Homo sapien
gatgaggtctcggggattcatcctg

SEQ ID NO: 4182895 - DNA, 25 bp, Homo sapien
tgtgaagcaccggtttcgacctcgg

SEQ ID NO: 4182896 - DNA, 25 bp, Homo sapien
caggctagcggtcatcacaatcaca

SEQ ID NO: 4182897 - DNA, 25 bp, Homo sapien
gaatttctaacgatatctggctgca

SEQ ID NO: 4182898 - DNA, 25 bp, Homo sapien
catctttattgcaaaggccgggcca

SEQ ID NO: 4182899 - DNA, 25 bp, Homo sapien
tgaggtcatcgccatgactgtcctc

SEQ ID NO: 4182900 - DNA, 25 bp, Homo sapien
tgtgaccggtgccttgaggtcatcg

SEQ ID NO: 4182901 - DNA, 25 bp, Homo sapien
aaatgctgagtgtgtgaccggtgcc

SEQ ID NO: 4182902 - DNA, 25 bp, Homo sapien
cggtgccttgaggtcatcgccatga

SEQ ID NO: 4182903 - DNA, 25 bp, Homo sapien
gtgctggtagtgttagcttttgagc

SEQ ID NO: 4182904 - DNA, 25 bp, Homo sapien
gtagtgttagcttttgagcacctga

SEQ ID NO: 4182905 - DNA, 25 bp, Homo sapien
ctggtagtgttagcttttgagcacc

SEQ ID NO: 4182906 - DNA, 25 bp, Homo sapien
ggtagtgttagcttttgagcacctg

SEQ ID NO: 4182907 - DNA, 25 bp, Homo sapien
gatgtgcctttgctagttgtctcag

SEQ ID NO: 4182908 - DNA, 25 bp, Homo sapien
gtgcctttgctagttgtctcaggct

SEQ ID NO: 4182909 - DNA, 25 bp, Homo sapien
ttaggatgtgcctttgctagttgtc

SEQ ID NO: 4182910 - DNA, 25 bp, Homo sapien
tttcattaggatgtgcctttgctag

SEQ ID NO: 4182911 - DNA, 25 bp, Homo sapien
cactcacttaaataggcagtctctt

SEQ ID NO: 4182912 - DNA, 25 bp, Homo sapien
gaatgagttaaagagtccactcact

SEQ ID NO: 4182913 - DNA, 25 bp, Homo sapien
gaatatagcgcatcagggagactat

SEQ ID NO: 4182914 - DNA, 25 bp, Homo sapien
gactatcattatgactattgggaaa

SEQ ID NO: 4182915 - DNA, 25 bp, Homo sapien
gaaacaccggacagtgtggcctggt

SEQ ID NO: 4182916 - DNA, 25 bp, Homo sapien
agccaggcaagtcgaaacaccggac

SEQ ID NO: 4182917 - DNA, 25 bp, Homo sapien
tgccaggccgtccactcacttggac

SEQ ID NO: 4182918 - DNA, 25 bp, Homo sapien
ggaggtctgcaaactcaccagaagc

SEQ ID NO: 4182919 - DNA, 25 bp, Homo sapien
tgtgttgttaggttggacccttctg

SEQ ID NO: 4182920 - DNA, 25 bp, Homo sapien
tgttgttaggttggacccttctgtg

SEQ ID NO: 4182921 - DNA, 25 bp, Homo sapien
tgtgtgttgttaggttggacccttc

SEQ ID NO: 4182922 - DNA, 25 bp, Homo sapien
catgtgtgttgttaggttggaccct

SEQ ID NO: 4182923 - DNA, 25 bp, Homo sapien
tgggcaaagcatggcggtgtgattg

SEQ ID NO: 4182924 - DNA, 25 bp, Homo sapien
ggttgaggagactgttgtgggcaaa

SEQ ID NO: 4182925 - DNA, 25 bp, Homo sapien
gactgttgtgggcaaagcatggcgg

SEQ ID NO: 4182926 - DNA, 25 bp, Homo sapien
tgaggagactgttgtgggcaaagca

SEQ ID NO: 4182927 - DNA, 25 bp, Homo sapien
gggtccccttccatctgagaacgaa

SEQ ID NO: 4182928 - DNA, 25 bp, Homo sapien
agctcgggaagtagtctgcctcaca

SEQ ID NO: 4182929 - DNA, 25 bp, Homo sapien
tgtctgagtcattaagcaaacccgg

SEQ ID NO: 4182930 - DNA, 25 bp, Homo sapien
tgggagagtacctttgtgccgagcc

SEQ ID NO: 4182931 - DNA, 25 bp, Homo sapien
gctcagctctgctccgcgtgaggcg

SEQ ID NO: 4182932 - DNA, 25 bp, Homo sapien
tccgccgagagacacgtcagtgcta

SEQ ID NO: 4182933 - DNA, 25 bp, Homo sapien
acgtcagtgctagcccggcggcaag

SEQ ID NO: 4182934 - DNA, 25 bp, Homo sapien
tccactgcacagcagctccgccgag

SEQ ID NO: 4182935 - DNA, 25 bp, Homo sapien
cggacgcgtggggatactcgagaag

SEQ ID NO: 4182936 - DNA, 25 bp, Homo sapien
tgcccacgacgagtgagagcagggg

SEQ ID NO: 4182937 - DNA, 25 bp, Homo sapien
cccacgacgagtgagagcaggggcc

SEQ ID NO: 4182938 - DNA, 25 bp, Homo sapien
gccgcaccccggacgcgtggggata

SEQ ID NO: 4182939 - DNA, 25 bp, Homo sapien
cttccgcgctacccagggacgcctt

SEQ ID NO: 4182940 - DNA, 25 bp, Homo sapien
aacaggaagagttgggacacagaga

SEQ ID NO: 4182941 - DNA, 25 bp, Homo sapien
gaagagttgggacacagagaagtaa

SEQ ID NO: 4182942 - DNA, 25 bp, Homo sapien
aagagttgggacacagagaagtaac

SEQ ID NO: 4182943 - DNA, 25 bp, Homo sapien
acaaaacaggaagagttgggacaca

SEQ ID NO: 4182944 - DNA, 25 bp, Homo sapien
ggcttctgaatttccggcaggatga

SEQ ID NO: 4182945 - DNA, 25 bp, Homo sapien
tggcttctgaatttccggcaggatg

SEQ ID NO: 4182946 - DNA, 25 bp, Homo sapien
ctggcttctgaatttccggcaggat

SEQ ID NO: 4182947 - DNA, 25 bp, Homo sapien
gataaagagggtgatagcggtccac

SEQ ID NO: 4182948 - DNA, 25 bp, Homo sapien
aagagggtgatagcggtccacagca

SEQ ID NO: 4182949 - DNA, 25 bp, Homo sapien
aagataaagagggtgatagcggtcc

SEQ ID NO: 4182950 - DNA, 25 bp, Homo sapien
taaagagggtgatagcggtccacag

SEQ ID NO: 4182951 - DNA, 25 bp, Homo sapien
gctagaatcactctcatccaataga

SEQ ID NO: 4182952 - DNA, 25 bp, Homo sapien
ggctagaatcactctcatccaatag

SEQ ID NO: 4182953 - DNA, 25 bp, Homo sapien
aggctagaatcactctcatccaata

SEQ ID NO: 4182954 - DNA, 25 bp, Homo sapien
gaggctagaatcactctcatccaat

SEQ ID NO: 4182955 - DNA, 25 bp, Homo sapien
gctccgttgaagagagctcggtctt

SEQ ID NO: 4182956 - DNA, 25 bp, Homo sapien
gacgtgacaataggagagatcccta

SEQ ID NO: 4182957 - DNA, 25 bp, Homo sapien
gctcggtcttttggggtgtcaccaa

SEQ ID NO: 4182958 - DNA, 25 bp, Homo sapien
gagagatccctagctccatcaatgt

SEQ ID NO: 4182959 - DNA, 25 bp, Homo sapien
cacatacacgatagactggccgata

SEQ ID NO: 4182960 - DNA, 25 bp, Homo sapien
tggtgattagcaggcaaattccagc

SEQ ID NO: 4182961 - DNA, 25 bp, Homo sapien
gccgatagtaatgatcatgccaaat

SEQ ID NO: 4182962 - DNA, 25 bp, Homo sapien
atcccggtcatcacatacacgatag

SEQ ID NO: 4182963 - DNA, 25 bp, Homo sapien
tatcctttttgcaggagttcatcca

SEQ ID NO: 4182964 - DNA, 25 bp, Homo sapien
gctgaatgccttccatacgatggtt

SEQ ID NO: 4182965 - DNA, 25 bp, Homo sapien
ggtttcacagatgttagttgcaatg

SEQ ID NO: 4182966 - DNA, 25 bp, Homo sapien
aaagtaggacaattaagccagcaac

SEQ ID NO: 4182967 - DNA, 25 bp, Homo sapien
gccacagggatacagcatgtattat

SEQ ID NO: 4182968 - DNA, 25 bp, Homo sapien
aaggaacgaacaggcaactcaattt

SEQ ID NO: 4182969 - DNA, 25 bp, Homo sapien
gaattcaaactacagaaacgggcta

SEQ ID NO: 4182970 - DNA, 25 bp, Homo sapien
ttaagttattagactcatggtgccc

SEQ ID NO: 4182971 - DNA, 25 bp, Homo sapien
gaaaagtgcgatgatagcaccttca

SEQ ID NO: 4182972 - DNA, 25 bp, Homo sapien
cttgtctgtgcgtgtggccagcaga

SEQ ID NO: 4182973 - DNA, 25 bp, Homo sapien
gtgcgatgatagcaccttcaaattc

SEQ ID NO: 4182974 - DNA, 25 bp, Homo sapien
gccagcagatggaaaagtgcgatga

SEQ ID NO: 4182975 - DNA, 25 bp, Homo sapien
ctggcggtagaacgcctcccgaagg

SEQ ID NO: 4182976 - DNA, 25 bp, Homo sapien
gagattcatgaggttgggaagattc

SEQ ID NO: 4182977 - DNA, 25 bp, Homo sapien
gattctggcggtagaacgcctcccg

SEQ ID NO: 4182978 - DNA, 25 bp, Homo sapien
tgggaagattctggcggtagaacgc

SEQ ID NO: 4182979 - DNA, 25 bp, Homo sapien
aatatgatgacagtgcaccccacag

SEQ ID NO: 4182980 - DNA, 25 bp, Homo sapien
gggactgcacacaaggcattctgaa

SEQ ID NO: 4182981 - DNA, 25 bp, Homo sapien
tttgtttcgttaatggcaggtccca

SEQ ID NO: 4182982 - DNA, 25 bp, Homo sapien
atccagaccatggaaactccctggg

SEQ ID NO: 4182983 - DNA, 25 bp, Homo sapien
cagggctcggaatacagaggattta

SEQ ID NO: 4182984 - DNA, 25 bp, Homo sapien
tcccagcgctttgtaatgtggaggc

SEQ ID NO: 4182985 - DNA, 25 bp, Homo sapien
tcccaagggcgcttctctctagctg

SEQ ID NO: 4182986 - DNA, 25 bp, Homo sapien
tacagcagtggcctcacaccttata

SEQ ID NO: 4182987 - DNA, 25 bp, Homo sapien
cctgggcaacacagtcagactccgt

SEQ ID NO: 4182988 - DNA, 25 bp, Homo sapien
tgggcaacacagtcagactccgtct

SEQ ID NO: 4182989 - DNA, 25 bp, Homo sapien
ctgggcaacacagtcagactccgtc

SEQ ID NO: 4182990 - DNA, 25 bp, Homo sapien
gatgttggacgtatagaagagcttg

SEQ ID NO: 4182991 - DNA, 25 bp, Homo sapien
atgggataggtgttgtactggccac

SEQ ID NO: 4182992 - DNA, 25 bp, Homo sapien
gatgacataaaggttggacaccagg

SEQ ID NO: 4182993 - DNA, 25 bp, Homo sapien
caagttgccactgaagcgagctgag

SEQ ID NO: 4182994 - DNA, 25 bp, Homo sapien
tatgtatacaactgcatggaccggg

SEQ ID NO: 4182995 - DNA, 25 bp, Homo sapien
caccaactggataagcacgtgctgg

SEQ ID NO: 4182996 - DNA, 25 bp, Homo sapien
ggtaatagcaaaggccaccaactgg

SEQ ID NO: 4182997 - DNA, 25 bp, Homo sapien
tgagacctcaatccacgttttggag

SEQ ID NO: 4182998 - DNA, 25 bp, Homo sapien
agtcacactttcatcacccttccag

SEQ ID NO: 4182999 - DNA, 25 bp, Homo sapien
catcacccttccagaaagttttgct

SEQ ID NO: 4183000 - DNA, 25 bp, Homo sapien
cagtcacactttcatcacccttcca

SEQ ID NO: 4183001 - DNA, 25 bp, Homo sapien
cacccttccagaaagttttgcttct

SEQ ID NO: 4183002 - DNA, 25 bp, Homo sapien
tgcccacaggggagaagttggaatt

SEQ ID NO: 4183003 - DNA, 25 bp, Homo sapien
gggtgcccacaggggagaagttgga

SEQ ID NO: 4183004 - DNA, 25 bp, Homo sapien
gtgcccacaggggagaagttggaat

SEQ ID NO: 4183005 - DNA, 25 bp, Homo sapien
gcagggtgcccacaggggagaagtt

SEQ ID NO: 4183006 - DNA, 25 bp, Homo sapien
agttcatggaccatggaggtctctc

SEQ ID NO: 4183007 - DNA, 25 bp, Homo sapien
tctctcggtggcctctcatcaccat

SEQ ID NO: 4183008 - DNA, 25 bp, Homo sapien
gttgagttcatggaccatggaggtc

SEQ ID NO: 4183009 - DNA, 25 bp, Homo sapien
catggaccatggaggtctctcggtg

SEQ ID NO: 4183010 - DNA, 25 bp, Homo sapien
taaattgcctaccatccctgctagg

SEQ ID NO: 4183011 - DNA, 25 bp, Homo sapien
gctttgtaggaacacggccatgctc

SEQ ID NO: 4183012 - DNA, 25 bp, Homo sapien
ccctgctagggattagaaaatgatc

SEQ ID NO: 4183013 - DNA, 25 bp, Homo sapien
tgctgtggcagcatctaaggtcacc

SEQ ID NO: 4183014 - DNA, 25 bp, Homo sapien
acccaatggcgcctaggaagtcagc

SEQ ID NO: 4183015 - DNA, 25 bp, Homo sapien
gaagatctcaaagtactggtagatg

SEQ ID NO: 4183016 - DNA, 25 bp, Homo sapien
gattgtgactgcgagcaggatcccg

SEQ ID NO: 4183017 - DNA, 25 bp, Homo sapien
gctttgctccttaacgaagatctca

SEQ ID NO: 4183018 - DNA, 25 bp, Homo sapien
agaagagcagggcccccatgctgcc

SEQ ID NO: 4183019 - DNA, 25 bp, Homo sapien
aagagcagggcccccatgctgccaa

SEQ ID NO: 4183020 - DNA, 25 bp, Homo sapien
agagcagggcccccatgctgccaac

SEQ ID NO: 4183021 - DNA, 25 bp, Homo sapien
tcagaagagcagggcccccatgctg

SEQ ID NO: 4183022 - DNA, 25 bp, Homo sapien
taaacacggagctagcagaaacagg

SEQ ID NO: 4183023 - DNA, 25 bp, Homo sapien
gacaaacggacatcactgcaagggt

SEQ ID NO: 4183024 - DNA, 25 bp, Homo sapien
tgaaggagacatgccagcaaggtcc

SEQ ID NO: 4183025 - DNA, 25 bp, Homo sapien
ttaaaagtccatatgccgcagcagc

SEQ ID NO: 4183026 - DNA, 25 bp, Homo sapien
ccttcttaggatcagggcatcctgc

SEQ ID NO: 4183027 - DNA, 25 bp, Homo sapien
tgtctaaagccagctcgaaacctcg

SEQ ID NO: 4183028 - DNA, 25 bp, Homo sapien
tccttggtcccaccaatgtctaaag

SEQ ID NO: 4183029 - DNA, 25 bp, Homo sapien
ggtggccctgtgctttgcaggctgc

SEQ ID NO: 4183030 - DNA, 25 bp, Homo sapien
tgctgagttgctgggtggctttagg

SEQ ID NO: 4183031 - DNA, 25 bp, Homo sapien
ctctgtttcctggctagcactgcca

SEQ ID NO: 4183032 - DNA, 25 bp, Homo sapien
gagttgctgggtggctttaggcaag

SEQ ID NO: 4183033 - DNA, 25 bp, Homo sapien
tttcctggctagcactgccagcaag

SEQ ID NO: 4183034 - DNA, 25 bp, Homo sapien
tctagacaaggccacgtgtgatagg

SEQ ID NO: 4183035 - DNA, 25 bp, Homo sapien
ccacgtgtgatagggtggtaagccc

SEQ ID NO: 4183036 - DNA, 25 bp, Homo sapien
cccctgctcaggactgggtctagac

SEQ ID NO: 4183037 - DNA, 25 bp, Homo sapien
gaggccaagcattcctaagcgtggg

SEQ ID NO: 4183038 - DNA, 25 bp, Homo sapien
cagggcccagccgatggttacaggc

SEQ ID NO: 4183039 - DNA, 25 bp, Homo sapien
ttacaggctgcaggcgggactatgg

SEQ ID NO: 4183040 - DNA, 25 bp, Homo sapien
acagggcgtgagtgtgggccttgca

SEQ ID NO: 4183041 - DNA, 25 bp, Homo sapien
acccaccgtgaccatcacccacagg

SEQ ID NO: 4183042 - DNA, 25 bp, Homo sapien
ccattttggcgtccacagtgacagt

SEQ ID NO: 4183043 - DNA, 25 bp, Homo sapien
atgccattttggcgtccacagtgac

SEQ ID NO: 4183044 - DNA, 25 bp, Homo sapien
ttatgccattttggcgtccacagtg

SEQ ID NO: 4183045 - DNA, 25 bp, Homo sapien
ggcgtccacagtgacagtcccctgg

SEQ ID NO: 4183046 - DNA, 25 bp, Homo sapien
gcagtggtaaagcagcaccatggat

SEQ ID NO: 4183047 - DNA, 25 bp, Homo sapien
tcctgaggacttcatgctggcctgg

SEQ ID NO: 4183048 - DNA, 25 bp, Homo sapien
ttgaagcgggtgctgcccctgagcc

SEQ ID NO: 4183049 - DNA, 25 bp, Homo sapien
caccatggatggagcggagtgccag

SEQ ID NO: 4183050 - DNA, 25 bp, Homo sapien
tctccagaaccaggcattggtaggt

SEQ ID NO: 4183051 - DNA, 25 bp, Homo sapien
tggctctccagaaccaggcattggt

SEQ ID NO: 4183052 - DNA, 25 bp, Homo sapien
ttttgctgactctcggacagtgcca

SEQ ID NO: 4183053 - DNA, 25 bp, Homo sapien
gcttttgctgactctcggacagtgc

SEQ ID NO: 4183054 - DNA, 25 bp, Homo sapien
ttatgggaaattgctacaccttttc

SEQ ID NO: 4183055 - DNA, 25 bp, Homo sapien
tgatggccacctaggctgttcccta

SEQ ID NO: 4183056 - DNA, 25 bp, Homo sapien
ccttgacagcatatcttggagattc

SEQ ID NO: 4183057 - DNA, 25 bp, Homo sapien
gatgtagtctattagtcacttccta

SEQ ID NO: 4183058 - DNA, 25 bp, Homo sapien
gcttcccaatgccagtgacaggagc

SEQ ID NO: 4183059 - DNA, 25 bp, Homo sapien
aatgccagtgacaggagcgcagcag

SEQ ID NO: 4183060 - DNA, 25 bp, Homo sapien
acagccgggcgcgagtgtgggactg

SEQ ID NO: 4183061 - DNA, 25 bp, Homo sapien
cgcgagtgtgggactgacccgaagt

SEQ ID NO: 4183062 - DNA, 25 bp, Homo sapien
aggtctggggcacacggcgcaggtt

SEQ ID NO: 4183063 - DNA, 25 bp, Homo sapien
ggcacacggcgcaggttttcacggg

SEQ ID NO: 4183064 - DNA, 25 bp, Homo sapien
gggacacggcgggatgcgggctgca

SEQ ID NO: 4183065 - DNA, 25 bp, Homo sapien
actggagccgcatgcagggaacggg

SEQ ID NO: 4183066 - DNA, 25 bp, Homo sapien
tcacgccgccagcacgcagatcagc

SEQ ID NO: 4183067 - DNA, 25 bp, Homo sapien
tcagcgccgcgtgattaatggggac

SEQ ID NO: 4183068 - DNA, 25 bp, Homo sapien
tcagcgccgtcagcgccgcgtgatt

SEQ ID NO: 4183069 - DNA, 25 bp, Homo sapien
agcacgcagatcagcgccgtcagcg

SEQ ID NO: 4183070 - DNA, 25 bp, Homo sapien
cttggccagctagtgagagatggaa

SEQ ID NO: 4183071 - DNA, 25 bp, Homo sapien
gtgtgctagcccacttccaagacca

SEQ ID NO: 4183072 - DNA, 25 bp, Homo sapien
agactgggataggtgtgctagccca

SEQ ID NO: 4183073 - DNA, 25 bp, Homo sapien
gcctgtgagactgggataggtgtgc

SEQ ID NO: 4183074 - DNA, 25 bp, Homo sapien
tggtagctcattagccagggccctg

SEQ ID NO: 4183075 - DNA, 25 bp, Homo sapien
tgcccagacggaaggaatcaacatc

SEQ ID NO: 4183076 - DNA, 25 bp, Homo sapien
ggcagagcatgtcccttcacagtgg

SEQ ID NO: 4183077 - DNA, 25 bp, Homo sapien
caagctagagtaagggtgaagtccc

SEQ ID NO: 4183078 - DNA, 25 bp, Homo sapien
cgcccctggcccatcagtgatgttt

SEQ ID NO: 4183079 - DNA, 25 bp, Homo sapien
gcccctggcccatcagtgatgtttg

SEQ ID NO: 4183080 - DNA, 25 bp, Homo sapien
ccgcccctggcccatcagtgatgtt

SEQ ID NO: 4183081 - DNA, 25 bp, Homo sapien
cgccgccgcctcggacacccgcccg

SEQ ID NO: 4183082 - DNA, 25 bp, Homo sapien
gccgccgccgccgcctcggacaccc

SEQ ID NO: 4183083 - DNA, 25 bp, Homo sapien
cgccgccgccgcctcggacacccgc

SEQ ID NO: 4183084 - DNA, 25 bp, Homo sapien
gccgccgccgcctcggacacccgcc

SEQ ID NO: 4183085 - DNA, 25 bp, Homo sapien
gccgtcttgccgctgtcgatgtggc

SEQ ID NO: 4183086 - DNA, 25 bp, Homo sapien
gctgtggtgcttagcgcccgcgcca

SEQ ID NO: 4183087 - DNA, 25 bp, Homo sapien
acgttcacgttcacccgccgccctg

SEQ ID NO: 4183088 - DNA, 25 bp, Homo sapien
gccgctgtcgatgtggcccagcacg

SEQ ID NO: 4183089 - DNA, 25 bp, Homo sapien
gcgctgcctggaactcgggcaaaga

SEQ ID NO: 4183090 - DNA, 25 bp, Homo sapien
cacgagaagcccagatcgagcgtga

SEQ ID NO: 4183091 - DNA, 25 bp, Homo sapien
acctgaagcagtggctcgccgggct

SEQ ID NO: 4183092 - DNA, 25 bp, Homo sapien
gggcagtcgaccagcgtgacctgaa

SEQ ID NO: 4183093 - DNA, 25 bp, Homo sapien
taggcaagtcacgtccgcctcttgg

SEQ ID NO: 4183094 - DNA, 25 bp, Homo sapien
cgtcccggcaaaggctcgagcgaat

SEQ ID NO: 4183095 - DNA, 25 bp, Homo sapien
tcacttgctgcggagccctaggcaa

SEQ ID NO: 4183096 - DNA, 25 bp, Homo sapien
aaggctcgagcgaattcggacacgg

SEQ ID NO: 4183097 - DNA, 25 bp, Homo sapien
ggttcaaacgtcatacagctaagga

SEQ ID NO: 4183098 - DNA, 25 bp, Homo sapien
gaatgggtagagaattgtgtgcccc

SEQ ID NO: 4183099 - DNA, 25 bp, Homo sapien
tatcttccagttggagcaaggtcca

SEQ ID NO: 4183100 - DNA, 25 bp, Homo sapien
tcaccattatagctgggacccagaa

SEQ ID NO: 4183101 - DNA, 25 bp, Homo sapien
tggaaatgaccacaaacagggccat

SEQ ID NO: 4183102 - DNA, 25 bp, Homo sapien
ctggaaatgaccacaaacagggcca

SEQ ID NO: 4183103 - DNA, 25 bp, Homo sapien
atctttgccaggaaaagagattcta

SEQ ID NO: 4183104 - DNA, 25 bp, Homo sapien
aatctttgccaggaaaagagattct

SEQ ID NO: 4183105 - DNA, 25 bp, Homo sapien
ttgggtccccaccattcctctcact

SEQ ID NO: 4183106 - DNA, 25 bp, Homo sapien
tgtcatagtgcccaaccctaagaga

SEQ ID NO: 4183107 - DNA, 25 bp, Homo sapien
caaccctaagagatcgccttgcagt

SEQ ID NO: 4183108 - DNA, 25 bp, Homo sapien
tctcacttatctgtgcgagaatgcg

SEQ ID NO: 4183109 - DNA, 25 bp, Homo sapien
aaagggcattcgtaccaggccatgg

SEQ ID NO: 4183110 - DNA, 25 bp, Homo sapien
gggcattcgtaccaggccatggcag

SEQ ID NO: 4183111 - DNA, 25 bp, Homo sapien
gctgcagcgcaggccttaaaccagc

SEQ ID NO: 4183112 - DNA, 25 bp, Homo sapien
caccaaagggcattcgtaccaggcc

SEQ ID NO: 4183113 - DNA, 25 bp, Homo sapien
cccaaccgtgtcaggttcacatggc

SEQ ID NO: 4183114 - DNA, 25 bp, Homo sapien
acacccaaccgtgtcaggttcacat

SEQ ID NO: 4183115 - DNA, 25 bp, Homo sapien
gcttctcacacccaaccgtgtcagg

SEQ ID NO: 4183116 - DNA, 25 bp, Homo sapien
ttctcacacccaaccgtgtcaggtt

SEQ ID NO: 4183117 - DNA, 25 bp, Homo sapien
tctggtagacgacagtggctccaag

SEQ ID NO: 4183118 - DNA, 25 bp, Homo sapien
catctggtagacgacagtggctcca

SEQ ID NO: 4183119 - DNA, 25 bp, Homo sapien
aaaatgcatctggtagacgacagtg

SEQ ID NO: 4183120 - DNA, 25 bp, Homo sapien
tgcatctggtagacgacagtggctc

SEQ ID NO: 4183121 - DNA, 25 bp, Homo sapien
tttttgcccaattccatactgccag

SEQ ID NO: 4183122 - DNA, 25 bp, Homo sapien
aaacctgcatccaattcatttttgc

SEQ ID NO: 4183123 - DNA, 25 bp, Homo sapien
ccaattcatttttgcccaattccat

SEQ ID NO: 4183124 - DNA, 25 bp, Homo sapien
catactgccagacataattctcccc

SEQ ID NO: 4183125 - DNA, 25 bp, Homo sapien
tccaagcctccctggcaatttataa

SEQ ID NO: 4183126 - DNA, 25 bp, Homo sapien
cttagcgacccaagagtccaagcct

SEQ ID NO: 4183127 - DNA, 25 bp, Homo sapien
aaacaaacaatgtggctcctcttca

SEQ ID NO: 4183128 - DNA, 25 bp, Homo sapien
caatttataatcgagtgggtgttaa

SEQ ID NO: 4183129 - DNA, 25 bp, Homo sapien
aattgagattattcctggttccacc

SEQ ID NO: 4183130 - DNA, 25 bp, Homo sapien
cggagcactcaagagtgggagtaat

SEQ ID NO: 4183131 - DNA, 25 bp, Homo sapien
tgggagtaattgagattattcctgg

SEQ ID NO: 4183132 - DNA, 25 bp, Homo sapien
tgaacagccacataaacaccatgac

SEQ ID NO: 4183133 - DNA, 25 bp, Homo sapien
caccatgttaactggaagtctgaaa

SEQ ID NO: 4183134 - DNA, 25 bp, Homo sapien
aatgtgtttgggacacaaggcttcc

SEQ ID NO: 4183135 - DNA, 25 bp, Homo sapien
gtttgggacacaaggcttccagcag

SEQ ID NO: 4183136 - DNA, 25 bp, Homo sapien
gcatggcccaccatgttaactggaa

SEQ ID NO: 4183137 - DNA, 25 bp, Homo sapien
gagtgcatggcagagctaagatccc

SEQ ID NO: 4183138 - DNA, 25 bp, Homo sapien
tgtaccagaagcacctccttaagaa

SEQ ID NO: 4183139 - DNA, 25 bp, Homo sapien
cccaaaggctgtatagtcttctata

SEQ ID NO: 4183140 - DNA, 25 bp, Homo sapien
aaagagctctttacacctccttaag

SEQ ID NO: 4183141 - DNA, 25 bp, Homo sapien
ggaatgactcatgtgctccacgcat

SEQ ID NO: 4183142 - DNA, 25 bp, Homo sapien
cagtcgatttcctattggtatacac

SEQ ID NO: 4183143 - DNA, 25 bp, Homo sapien
ctatccagtcaactatccagtaggg

SEQ ID NO: 4183144 - DNA, 25 bp, Homo sapien
tcttgcttctcacgcctattgagat

SEQ ID NO: 4183145 - DNA, 25 bp, Homo sapien
aagcaccatgctgtgtgctccacaa

SEQ ID NO: 4183146 - DNA, 25 bp, Homo sapien
gtgccaagcaccatgctgtgtgctc

SEQ ID NO: 4183147 - DNA, 25 bp, Homo sapien
tgggcttttcgccctctctccatgg

SEQ ID NO: 4183148 - DNA, 25 bp, Homo sapien
ctttcctgggcttttcgccctctct

SEQ ID NO: 4183149 - DNA, 25 bp, Homo sapien
tggccgatcacaaggcattccgctg

SEQ ID NO: 4183150 - DNA, 25 bp, Homo sapien
ggtcattttatcaattgctgcctgt

SEQ ID NO: 4183151 - DNA, 25 bp, Homo sapien
ctttccttcaggtaagaggtctatt

SEQ ID NO: 4183152 - DNA, 25 bp, Homo sapien
cattccgctgactgggtctgcatcc

SEQ ID NO: 4183153 - DNA, 25 bp, Homo sapien
ggcttgctctaagtgcttctctgta

SEQ ID NO: 4183154 - DNA, 25 bp, Homo sapien
tggagcttcagtttcgggggcctct

SEQ ID NO: 4183155 - DNA, 25 bp, Homo sapien
gggtataatcggtgcacctcggaac

SEQ ID NO: 4183156 - DNA, 25 bp, Homo sapien
ggcttggccgccacgggtataatcg

SEQ ID NO: 4183157 - DNA, 25 bp, Homo sapien
cgccacgggtataatcggtgcacct

SEQ ID NO: 4183158 - DNA, 25 bp, Homo sapien
tccctgacgtatgccagaagccagc

SEQ ID NO: 4183159 - DNA, 25 bp, Homo sapien
caggcctagagttttaccagctggc

SEQ ID NO: 4183160 - DNA, 25 bp, Homo sapien
aggagagtagccactaaaggacacc

SEQ ID NO: 4183161 - DNA, 25 bp, Homo sapien
tctcccgtgggactgctacaatggt

SEQ ID NO: 4183162 - DNA, 25 bp, Homo sapien
gagcctgaaaggatggtccctgtca

SEQ ID NO: 4183163 - DNA, 25 bp, Homo sapien
gatggagaaacagtggtccacagac

SEQ ID NO: 4183164 - DNA, 25 bp, Homo sapien
agggatctctcgttgggatggaaat

SEQ ID NO: 4183165 - DNA, 25 bp, Homo sapien
tccacagacatgaggaacggtcccg

SEQ ID NO: 4183166 - DNA, 25 bp, Homo sapien
cctccaataaacaggcgctatgaga

SEQ ID NO: 4183167 - DNA, 25 bp, Homo sapien
aaacaggcgctatgagaattaggga

SEQ ID NO: 4183168 - DNA, 25 bp, Homo sapien
taaacaggcgctatgagaattaggg

SEQ ID NO: 4183169 - DNA, 25 bp, Homo sapien
tccaataaacaggcgctatgagaat

SEQ ID NO: 4183170 - DNA, 25 bp, Homo sapien
tgcggcatctgtcgatggccaccag

SEQ ID NO: 4183171 - DNA, 25 bp, Homo sapien
catccttctcacaggtcttcagaag

SEQ ID NO: 4183172 - DNA, 25 bp, Homo sapien
caggtcttcagaagaataatgcggc

SEQ ID NO: 4183173 - DNA, 25 bp, Homo sapien
gaaggcaccaaccactcatccttct

SEQ ID NO: 4183174 - DNA, 25 bp, Homo sapien
gggtccatgccattagccaagacgg

SEQ ID NO: 4183175 - DNA, 25 bp, Homo sapien
caaggtatgctttctcagcagtgaa

SEQ ID NO: 4183176 - DNA, 25 bp, Homo sapien
tcctttgcaatctagagggactgag

SEQ ID NO: 4183177 - DNA, 25 bp, Homo sapien
gaacctccgaaatcatcaagcgctg

SEQ ID NO: 4183178 - DNA, 25 bp, Homo sapien
tgctgcaatgggctctcgtacatgc

SEQ ID NO: 4183179 - DNA, 25 bp, Homo sapien
tcaggagttctgaacctcaggctct

SEQ ID NO: 4183180 - DNA, 25 bp, Homo sapien
ggcaaggcctcagcaaagcacagca

SEQ ID NO: 4183181 - DNA, 25 bp, Homo sapien
tcgtacatgccgcagcccaggcaag

SEQ ID NO: 4183182 - DNA, 25 bp, Homo sapien
ccttccaaacatcctccctactgcc

SEQ ID NO: 4183183 - DNA, 25 bp, Homo sapien
atgaccacaaccacctacgaaccac

SEQ ID NO: 4183184 - DNA, 25 bp, Homo sapien
aacatcctccctactgccctttcag

SEQ ID NO: 4183185 - DNA, 25 bp, Homo sapien
agatgaccacaaccacctacgaacc

SEQ ID NO: 4183186 - DNA, 25 bp, Homo sapien
ccccagctgagtgtgagaaataatg

SEQ ID NO: 4183187 - DNA, 25 bp, Homo sapien
taatgaattagaccctgctaggcag

SEQ ID NO: 4183188 - DNA, 25 bp, Homo sapien
ccctactggtagaaggtgaactgta

SEQ ID NO: 4183189 - DNA, 25 bp, Homo sapien
taacaagaatctcaagcaacccgcc

SEQ ID NO: 4183190 - DNA, 25 bp, Homo sapien
tacattggctttacgcacactcagg

SEQ ID NO: 4183191 - DNA, 25 bp, Homo sapien
ccgacacagactgcaggtgtggtct

SEQ ID NO: 4183192 - DNA, 25 bp, Homo sapien
agcagagccccagagtgatgccagg

SEQ ID NO: 4183193 - DNA, 25 bp, Homo sapien
ttaaataaggcatctcattggccct

SEQ ID NO: 4183194 - DNA, 25 bp, Homo sapien
acattcttgcttccatagatcaggg

SEQ ID NO: 4183195 - DNA, 25 bp, Homo sapien
cttgcttccatagatcaggggctca

SEQ ID NO: 4183196 - DNA, 25 bp, Homo sapien
caacattcttgcttccatagatcag

SEQ ID NO: 4183197 - DNA, 25 bp, Homo sapien
accaacattcttgcttccatagatc

SEQ ID NO: 4183198 - DNA, 25 bp, Homo sapien
tagttattgcatccccaactgatgg

SEQ ID NO: 4183199 - DNA, 25 bp, Homo sapien
tttcccaaagagcaagtctcccagt

SEQ ID NO: 4183200 - DNA, 25 bp, Homo sapien
cagtgcatgttgaggccttaaggaa

SEQ ID NO: 4183201 - DNA, 25 bp, Homo sapien
actttgatgtctctggcctatgggc

SEQ ID NO: 4183202 - DNA, 25 bp, Homo sapien
gaaatactcaatactgatatcaatt

SEQ ID NO: 4183203 - DNA, 25 bp, Homo sapien
aattgttcccagttgtgatctacag

SEQ ID NO: 4183204 - DNA, 25 bp, Homo sapien
caatactgatatcaattgttcccag

SEQ ID NO: 4183205 - DNA, 25 bp, Homo sapien
tgatatcaattgttcccagttgtga

SEQ ID NO: 4183206 - DNA, 25 bp, Homo sapien
agtaaacctatttctttcttctcag

SEQ ID NO: 4183207 - DNA, 25 bp, Homo sapien
ctatttctttcttctcagagccctc

SEQ ID NO: 4183208 - DNA, 25 bp, Homo sapien
tagtaaacctatttctttcttctca

SEQ ID NO: 4183209 - DNA, 25 bp, Homo sapien
tttctttcttctcagagccctccat

SEQ ID NO: 4183210 - DNA, 25 bp, Homo sapien
tgcacaagactcaaagctctgctgg

SEQ ID NO: 4183211 - DNA, 25 bp, Homo sapien
tatccgagacatgagaatgaggcag

SEQ ID NO: 4183212 - DNA, 25 bp, Homo sapien
atgcagaactcagcatgaccgtggg

SEQ ID NO: 4183213 - DNA, 25 bp, Homo sapien
ctgatggcatcttgacccacaggaa

SEQ ID NO: 4183214 - DNA, 25 bp, Homo sapien
ggatcacacctcaagagtgcacgag

SEQ ID NO: 4183215 - DNA, 25 bp, Homo sapien
caacaagtagttcctgagcacatgc

SEQ ID NO: 4183216 - DNA, 25 bp, Homo sapien
gggagctgactaccaccagtgaaca

SEQ ID NO: 4183217 - DNA, 25 bp, Homo sapien
aatacgtggtcatctctgaggagca

SEQ ID NO: 4183218 - DNA, 25 bp, Homo sapien
attccaaggagccttgtgttcccag

SEQ ID NO: 4183219 - DNA, 25 bp, Homo sapien
tgagctctcccatccatggttctag

SEQ ID NO: 4183220 - DNA, 25 bp, Homo sapien
caggggcggtgtcttgagctctccc

SEQ ID NO: 4183221 - DNA, 25 bp, Homo sapien
atggttctagggcacaggacccatt

SEQ ID NO: 4183222 - DNA, 25 bp, Homo sapien
tgataatggtgacacctgcttttct

SEQ ID NO: 4183223 - DNA, 25 bp, Homo sapien
caaaaggctcatcactaagccacag

SEQ ID NO: 4183224 - DNA, 25 bp, Homo sapien
gtgcctcagatggtctaaaaatgct

SEQ ID NO: 4183225 - DNA, 25 bp, Homo sapien
ccacaggaatattcttggcagtgcc

SEQ ID NO: 4183226 - DNA, 25 bp, Homo sapien
ggtagattcctaggcagaggctaaa

SEQ ID NO: 4183227 - DNA, 25 bp, Homo sapien
aaacagacatccacatgtacagatg

SEQ ID NO: 4183228 - DNA, 25 bp, Homo sapien
cctaggcagaggctaaacagacatc

SEQ ID NO: 4183229 - DNA, 25 bp, Homo sapien
tgtacagatgtagaaccatcttgca

SEQ ID NO: 4183230 - DNA, 25 bp, Homo sapien
agctggcagaccaggacatctgtcc

SEQ ID NO: 4183231 - DNA, 25 bp, Homo sapien
ggacagggagctaatggctgctgcc

SEQ ID NO: 4183232 - DNA, 25 bp, Homo sapien
gaacgggtgggacagggagctaatg

SEQ ID NO: 4183233 - DNA, 25 bp, Homo sapien
agaagagcatcatgtgctggagcag

SEQ ID NO: 4183234 - DNA, 25 bp, Homo sapien
taagggcatacgctttgtgcaaagt

SEQ ID NO: 4183235 - DNA, 25 bp, Homo sapien
gcagaaggcgatgggcaatccactt

SEQ ID NO: 4183236 - DNA, 25 bp, Homo sapien
gtgcaaagtctgttgagggtagaac

SEQ ID NO: 4183237 - DNA, 25 bp, Homo sapien
tcagaagcttaagggcatacgcttt

SEQ ID NO: 4183238 - DNA, 25 bp, Homo sapien
gcatcagcaaggctagacaagggta

SEQ ID NO: 4183239 - DNA, 25 bp, Homo sapien
cagagcatcagcaaggctagacaag

SEQ ID NO: 4183240 - DNA, 25 bp, Homo sapien
caagggtatgaccagcaagccaagg

SEQ ID NO: 4183241 - DNA, 25 bp, Homo sapien
caaggctagacaagggtatgaccag

SEQ ID NO: 4183242 - DNA, 25 bp, Homo sapien
cacgtgggtagcaaccttctctcag

SEQ ID NO: 4183243 - DNA, 25 bp, Homo sapien
ggtggcgcacgcacattctctcaac

SEQ ID NO: 4183244 - DNA, 25 bp, Homo sapien
tcttctagccaactttgagggcctc

SEQ ID NO: 4183245 - DNA, 25 bp, Homo sapien
tcaaacattcgctaatgtccacggg

SEQ ID NO: 4183246 - DNA, 25 bp, Homo sapien
tgagattccagacgtgccggggctt

SEQ ID NO: 4183247 - DNA, 25 bp, Homo sapien
gagcgagatccttgtgtttatgagc

SEQ ID NO: 4183248 - DNA, 25 bp, Homo sapien
gagatccttgtgtttatgagccttc

SEQ ID NO: 4183249 - DNA, 25 bp, Homo sapien
gggcttgagcgagatccttgtgttt

SEQ ID NO: 4183250 - DNA, 25 bp, Homo sapien
gcctccaccatgcagcccaactcca

SEQ ID NO: 4183251 - DNA, 25 bp, Homo sapien
tgaggaccagccaaggggggtctgg

SEQ ID NO: 4183252 - DNA, 25 bp, Homo sapien
aggcacactcttctggaccagagca

SEQ ID NO: 4183253 - DNA, 25 bp, Homo sapien
gcacactcttctggaccagagcagg

SEQ ID NO: 4183254 - DNA, 25 bp, Homo sapien
ccaggcacactcttctggaccagag

SEQ ID NO: 4183255 - DNA, 25 bp, Homo sapien
tagttcctgtcctctagcccgtgga

SEQ ID NO: 4183256 - DNA, 25 bp, Homo sapien
catggaaggctagccggcacgtgtt

SEQ ID NO: 4183257 - DNA, 25 bp, Homo sapien
tttccacagagatgagggccgcatg

SEQ ID NO: 4183258 - DNA, 25 bp, Homo sapien
tgaatgtccgcatctagcctggagc

SEQ ID NO: 4183259 - DNA, 25 bp, Homo sapien
ggcaccactgatgggcagtgtttcc

SEQ ID NO: 4183260 - DNA, 25 bp, Homo sapien
ctggcaccactgatgggcagtgttt

SEQ ID NO: 4183261 - DNA, 25 bp, Homo sapien
cataagcagcttgcaggggcacatg

SEQ ID NO: 4183262 - DNA, 25 bp, Homo sapien
ccactgatgggcagtgtttccctct

SEQ ID NO: 4183263 - DNA, 25 bp, Homo sapien
tgcctggcacaaacgtaggagcaca

SEQ ID NO: 4183264 - DNA, 25 bp, Homo sapien
tgcgctggataaccacacccatgag

SEQ ID NO: 4183265 - DNA, 25 bp, Homo sapien
aatttttagagtcagccaagcacgg

SEQ ID NO: 4183266 - DNA, 25 bp, Homo sapien
taagccacaactggtagggtacctg

SEQ ID NO: 4183267 - DNA, 25 bp, Homo sapien
agagagagggcattagtggtgcaca

SEQ ID NO: 4183268 - DNA, 25 bp, Homo sapien
cagagagagggcattagtggtgcac

SEQ ID NO: 4183269 - DNA, 25 bp, Homo sapien
acagagagagggcattagtggtgca

SEQ ID NO: 4183270 - DNA, 25 bp, Homo sapien
cctttttgaacagggagcggccgat

SEQ ID NO: 4183271 - DNA, 25 bp, Homo sapien
tgcccagttccccagtggacaagtg

SEQ ID NO: 4183272 - DNA, 25 bp, Homo sapien
tggccgaaggcactgtcgatgatgc

SEQ ID NO: 4183273 - DNA, 25 bp, Homo sapien
ttgaacttgccgctctggccgaagg

SEQ ID NO: 4183274 - DNA, 25 bp, Homo sapien
tcctatcctcccatgaagtacaatt

SEQ ID NO: 4183275 - DNA, 25 bp, Homo sapien
caccagcagaattccccagtaggtt

SEQ ID NO: 4183276 - DNA, 25 bp, Homo sapien
ctcctatcctcccatgaagtacaat

SEQ ID NO: 4183277 - DNA, 25 bp, Homo sapien
atgattcttctccagttgggagtca

SEQ ID NO: 4183278 - DNA, 25 bp, Homo sapien
tgggagtcatcaaggtgttcttttc

SEQ ID NO: 4183279 - DNA, 25 bp, Homo sapien
tcttctccagttgggagtcatcaag

SEQ ID NO: 4183280 - DNA, 25 bp, Homo sapien
ccagttgggagtcatcaaggtgttc

SEQ ID NO: 4183281 - DNA, 25 bp, Homo sapien
aaggctttaagctccgcgtgcccct

SEQ ID NO: 4183282 - DNA, 25 bp, Homo sapien
gcgtgcccctcaatgctaaagcaga

SEQ ID NO: 4183283 - DNA, 25 bp, Homo sapien
gacacatgggcacgcgagtggtaat

SEQ ID NO: 4183284 - DNA, 25 bp, Homo sapien
gctttccagtaacaaggctttaagc

SEQ ID NO: 4183285 - DNA, 25 bp, Homo sapien
caggagaaagtctgccagtgccagc

SEQ ID NO: 4183286 - DNA, 25 bp, Homo sapien
catgtggctgccaatacacaaatgc

SEQ ID NO: 4183287 - DNA, 25 bp, Homo sapien
atgcatgtggctgccaatacacaaa

SEQ ID NO: 4183288 - DNA, 25 bp, Homo sapien
tacacaaatgctcaggagaaagtct

SEQ ID NO: 4183289 - DNA, 25 bp, Homo sapien
caactgtggtgcttcactcatctct

SEQ ID NO: 4183290 - DNA, 25 bp, Homo sapien
ccaactgtggtgcttcactcatctc

SEQ ID NO: 4183291 - DNA, 25 bp, Homo sapien
accaactgtggtgcttcactcatct

SEQ ID NO: 4183292 - DNA, 25 bp, Homo sapien
tgtgtgttgtggactgtacttcttt

SEQ ID NO: 4183293 - DNA, 25 bp, Homo sapien
tgtgttgtggactgtacttcttttt

SEQ ID NO: 4183294 - DNA, 25 bp, Homo sapien
gtgtgttgtggactgtacttctttt

SEQ ID NO: 4183295 - DNA, 25 bp, Homo sapien
gagaaacagggcgatggcctcctct

SEQ ID NO: 4183296 - DNA, 25 bp, Homo sapien
gaaacagggcgatggcctcctcttg

SEQ ID NO: 4183297 - DNA, 25 bp, Homo sapien
gggagaaacagggcgatggcctcct

SEQ ID NO: 4183298 - DNA, 25 bp, Homo sapien
ttgggagaaacagggcgatggcctc

SEQ ID NO: 4183299 - DNA, 25 bp, Homo sapien
ccagtaggagatggtgaggtaagca

SEQ ID NO: 4183300 - DNA, 25 bp, Homo sapien
cttacacaagtctacaagcacagcc

SEQ ID NO: 4183301 - DNA, 25 bp, Homo sapien
atggtgaggtaagcacggtccgctt

SEQ ID NO: 4183302 - DNA, 25 bp, Homo sapien
gcacggtccgcttacacaagtctac

SEQ ID NO: 4183303 - DNA, 25 bp, Homo sapien
actcttttctcccaaccaagctgtt

SEQ ID NO: 4183304 - DNA, 25 bp, Homo sapien
agagtctccctggccgaccagtcag

SEQ ID NO: 4183305 - DNA, 25 bp, Homo sapien
gttttccagagtctccctggccgac

SEQ ID NO: 4183306 - DNA, 25 bp, Homo sapien
caactcttttctcccaaccaagctg

SEQ ID NO: 4183307 - DNA, 25 bp, Homo sapien
tgtctttgtttcaaacgctgggtat

SEQ ID NO: 4183308 - DNA, 25 bp, Homo sapien
actgttgtaacagttcttcgatggg

SEQ ID NO: 4183309 - DNA, 25 bp, Homo sapien
cgctgggtataaacactgttgtaac

SEQ ID NO: 4183310 - DNA, 25 bp, Homo sapien
ttcaaacgctgggtataaacactgt

SEQ ID NO: 4183311 - DNA, 25 bp, Homo sapien
ccagcacagactcctctgcccgctc

SEQ ID NO: 4183312 - DNA, 25 bp, Homo sapien
ccaaggcagcctgccatctcaggga

SEQ ID NO: 4183313 - DNA, 25 bp, Homo sapien
aaggcagcctgccatctcagggagg

SEQ ID NO: 4183314 - DNA, 25 bp, Homo sapien
cagcaggtgactgcccagcacagac

SEQ ID NO: 4183315 - DNA, 25 bp, Homo sapien
ctaggacctacgctgtcagggaggt

SEQ ID NO: 4183316 - DNA, 25 bp, Homo sapien
tctgccacccgctctgctaggacct

SEQ ID NO: 4183317 - DNA, 25 bp, Homo sapien
agggcctgctctgccacccgctctg

SEQ ID NO: 4183318 - DNA, 25 bp, Homo sapien
gcctggtgtctacctcctgcaggcc

SEQ ID NO: 4183319 - DNA, 25 bp, Homo sapien
aaggccacgtgctgagtgccgactg

SEQ ID NO: 4183320 - DNA, 25 bp, Homo sapien
cacgtgctgagtgccgactgcccat

SEQ ID NO: 4183321 - DNA, 25 bp, Homo sapien
cagagtacgcgggaaggcggtgaca

SEQ ID NO: 4183322 - DNA, 25 bp, Homo sapien
aggcggtgacaaggccacgtgctga

SEQ ID NO: 4183323 - DNA, 25 bp, Homo sapien
gtgccctgtgtgccaggctccccat

SEQ ID NO: 4183324 - DNA, 25 bp, Homo sapien
acggtgccctgtgtgccaggctccc

SEQ ID NO: 4183325 - DNA, 25 bp, Homo sapien
catgtccacacggtgccctgtgtgc

SEQ ID NO: 4183326 - DNA, 25 bp, Homo sapien
cacggtgccctgtgtgccaggctcc

SEQ ID NO: 4183327 - DNA, 25 bp, Homo sapien
ggctctcgttacacacaatgcatac

SEQ ID NO: 4183328 - DNA, 25 bp, Homo sapien
tcgttacacacaatgcatacctcgc

SEQ ID NO: 4183329 - DNA, 25 bp, Homo sapien
ccgcgatggctctcgttacacacaa

SEQ ID NO: 4183330 - DNA, 25 bp, Homo sapien
gatggctctcgttacacacaatgca

SEQ ID NO: 4183331 - DNA, 25 bp, Homo sapien
cactcatgccaagtccacgtctgga

SEQ ID NO: 4183332 - DNA, 25 bp, Homo sapien
ccaagtccacgtctggaaactcggc

SEQ ID NO: 4183333 - DNA, 25 bp, Homo sapien
ccattgctttccagtgcactcatgc

SEQ ID NO: 4183334 - DNA, 25 bp, Homo sapien
ttccagtgcactcatgccaagtcca

SEQ ID NO: 4183335 - DNA, 25 bp, Homo sapien
accccaagcacccgtgggctccctg

SEQ ID NO: 4183336 - DNA, 25 bp, Homo sapien
tccctgcccgcgcacctgctgccta

SEQ ID NO: 4183337 - DNA, 25 bp, Homo sapien
gcctgtcactctgccgtaccccaag

SEQ ID NO: 4183338 - DNA, 25 bp, Homo sapien
cctgcccgcgcacctgctgcctaga

SEQ ID NO: 4183339 - DNA, 25 bp, Homo sapien
cataacgcttgaaagtcaggctgag

SEQ ID NO: 4183340 - DNA, 25 bp, Homo sapien
tgagcaccacatgctgtgagggctc

SEQ ID NO: 4183341 - DNA, 25 bp, Homo sapien
tgtgggtgtcgaagacataacgctt

SEQ ID NO: 4183342 - DNA, 25 bp, Homo sapien
tcagggagactgaaccatgcgcttg

SEQ ID NO: 4183343 - DNA, 25 bp, Homo sapien
ggagggttgagactggcctgcaggt

SEQ ID NO: 4183344 - DNA, 25 bp, Homo sapien
gctggttgggatttggcacagcagc

SEQ ID NO: 4183345 - DNA, 25 bp, Homo sapien
caggtggccaacagatggggcagtg

SEQ ID NO: 4183346 - DNA, 25 bp, Homo sapien
gggcagtggaagatactggctacca

SEQ ID NO: 4183347 - DNA, 25 bp, Homo sapien
gatttctgagattccccttggaaca

SEQ ID NO: 4183348 - DNA, 25 bp, Homo sapien
cagactctgagtttgggtcccttcc

SEQ ID NO: 4183349 - DNA, 25 bp, Homo sapien
agcctacagactctgagtttgggtc

SEQ ID NO: 4183350 - DNA, 25 bp, Homo sapien
ggatttctgagattccccttggaac

SEQ ID NO: 4183351 - DNA, 25 bp, Homo sapien
ctgaaggcccagagcgccccaggag

SEQ ID NO: 4183352 - DNA, 25 bp, Homo sapien
gagcgccccaggagccacctagtgg

SEQ ID NO: 4183353 - DNA, 25 bp, Homo sapien
agagaatccccattctccctgaagg

SEQ ID NO: 4183354 - DNA, 25 bp, Homo sapien
agctgcccagagaatccccattctc

SEQ ID NO: 4183355 - DNA, 25 bp, Homo sapien
tgcagggtgccctcaccatgctagc

SEQ ID NO: 4183356 - DNA, 25 bp, Homo sapien
cataatgcaccgattactgggataa

SEQ ID NO: 4183357 - DNA, 25 bp, Homo sapien
taaaggaacgtttgaacatctgttc

SEQ ID NO: 4183358 - DNA, 25 bp, Homo sapien
tgcgtctgtctggagaccaaataaa

SEQ ID NO: 4183359 - DNA, 25 bp, Homo sapien
tactgatccgatcctggcaggagac

SEQ ID NO: 4183360 - DNA, 25 bp, Homo sapien
tatagtaagtgaattgctggcagcc

SEQ ID NO: 4183361 - DNA, 25 bp, Homo sapien
tgagctggccacttacagatgctgc

SEQ ID NO: 4183362 - DNA, 25 bp, Homo sapien
gagaaaccaagacggtgcctacctg

SEQ ID NO: 4183363 - DNA, 25 bp, Homo sapien
caggcggccgtcgccaggcggggca

SEQ ID NO: 4183364 - DNA, 25 bp, Homo sapien
aggcggccgtcgccaggcggggcat

SEQ ID NO: 4183365 - DNA, 25 bp, Homo sapien
cacggcatggctgtggcgtagcccc

SEQ ID NO: 4183366 - DNA, 25 bp, Homo sapien
ccccaacctgtgtggtcctggagct

SEQ ID NO: 4183367 - DNA, 25 bp, Homo sapien
aacagcccagcgtggccctgctgtg

SEQ ID NO: 4183368 - DNA, 25 bp, Homo sapien
tgtggccataggagagggagcaaac

SEQ ID NO: 4183369 - DNA, 25 bp, Homo sapien
cacaaagcggggctcatttgagcat

SEQ ID NO: 4183370 - DNA, 25 bp, Homo sapien
tcatctggcattcaagttgcctggg

SEQ ID NO: 4183371 - DNA, 25 bp, Homo sapien
ttcgtcgctaaaggagatcgggctg

SEQ ID NO: 4183372 - DNA, 25 bp, Homo sapien
gagggcagggacactttctgatctg

SEQ ID NO: 4183373 - DNA, 25 bp, Homo sapien
cactgattgctacttccttgggagg

SEQ ID NO: 4183374 - DNA, 25 bp, Homo sapien
ttgctacttccttgggaggtctcaa

SEQ ID NO: 4183375 - DNA, 25 bp, Homo sapien
gctacttccttgggaggtctcaaac

SEQ ID NO: 4183376 - DNA, 25 bp, Homo sapien
ccagcgaaccccactgattgctact

SEQ ID NO: 4183377 - DNA, 25 bp, Homo sapien
gctttcgaacatgctgaccccattg

SEQ ID NO: 4183378 - DNA, 25 bp, Homo sapien
ccagctttcgaacatgctgacccca

SEQ ID NO: 4183379 - DNA, 25 bp, Homo sapien
agctttcgaacatgctgaccccatt

SEQ ID NO: 4183380 - DNA, 25 bp, Homo sapien
ctccagctttcgaacatgctgaccc

SEQ ID NO: 4183381 - DNA, 25 bp, Homo sapien
cagctggaggtcccctaaccacgtt

SEQ ID NO: 4183382 - DNA, 25 bp, Homo sapien
gcagctggaggtcccctaaccacgt

SEQ ID NO: 4183383 - DNA, 25 bp, Homo sapien
ggcagctggaggtcccctaaccacg

SEQ ID NO: 4183384 - DNA, 25 bp, Homo sapien
cggcagctggaggtcccctaaccac

SEQ ID NO: 4183385 - DNA, 25 bp, Homo sapien
acacagtcggcaacttggcgctgcg

SEQ ID NO: 4183386 - DNA, 25 bp, Homo sapien
catcttgaggctcgggccaggttgt

SEQ ID NO: 4183387 - DNA, 25 bp, Homo sapien
gcaacttggcgctgcggctgcatct

SEQ ID NO: 4183388 - DNA, 25 bp, Homo sapien
ctagaggacacagtcggcaacttgg

SEQ ID NO: 4183389 - DNA, 25 bp, Homo sapien
gaaacgctccctgtatgaccgtgct

SEQ ID NO: 4183390 - DNA, 25 bp, Homo sapien
tcctttgagttctgggacagcccat

SEQ ID NO: 4183391 - DNA, 25 bp, Homo sapien
cgagatgatcaatggccacaaggtc

SEQ ID NO: 4183392 - DNA, 25 bp, Homo sapien
cattcaatagtgaccgtggtggccg

SEQ ID NO: 4183393 - DNA, 25 bp, Homo sapien
tgccctttggctcccgggactcagc

SEQ ID NO: 4183394 - DNA, 25 bp, Homo sapien
catcccattcccacacaccgttgtg

SEQ ID NO: 4183395 - DNA, 25 bp, Homo sapien
ctgccctttggctcccgggactcag

SEQ ID NO: 4183396 - DNA, 25 bp, Homo sapien
acacaccgttgtggccacctcacca

SEQ ID NO: 4183397 - DNA, 25 bp, Homo sapien
tctgagcctggttcatccaagagtt

SEQ ID NO: 4183398 - DNA, 25 bp, Homo sapien
acagggacagactttcccgcctttg

SEQ ID NO: 4183399 - DNA, 25 bp, Homo sapien
agagtttaccgacggccctcgtgtg

SEQ ID NO: 4183400 - DNA, 25 bp, Homo sapien
aacacttctttggatttgctgtccg

SEQ ID NO: 4183401 - DNA, 25 bp, Homo sapien
tccccaccagcaacacagtcaacag

SEQ ID NO: 4183402 - DNA, 25 bp, Homo sapien
cagcaacacagtcaacagcagtgcc

SEQ ID NO: 4183403 - DNA, 25 bp, Homo sapien
gcaacacagtcaacagcagtgcctc

SEQ ID NO: 4183404 - DNA, 25 bp, Homo sapien
caccagcaacacagtcaacagcagt

SEQ ID NO: 4183405 - DNA, 25 bp, Homo sapien
gctcccaggtgagcggctctctaga

SEQ ID NO: 4183406 - DNA, 25 bp, Homo sapien
gagcggctctctagagcttgcctgg

SEQ ID NO: 4183407 - DNA, 25 bp, Homo sapien
ccaggtgagcggctctctagagctt

SEQ ID NO: 4183408 - DNA, 25 bp, Homo sapien
cagctcccaggtgagcggctctcta

SEQ ID NO: 4183409 - DNA, 25 bp, Homo sapien
tgggcctcgcttggtcgctgaaggt

SEQ ID NO: 4183410 - DNA, 25 bp, Homo sapien
caattggctgcttaatcggctccat

SEQ ID NO: 4183411 - DNA, 25 bp, Homo sapien
ctgtgtgaccttcggtgtgccctgc

SEQ ID NO: 4183412 - DNA, 25 bp, Homo sapien
tgcttaatcggctccatcagctcgc

SEQ ID NO: 4183413 - DNA, 25 bp, Homo sapien
ttaaaaagccactccattaattaca

SEQ ID NO: 4183414 - DNA, 25 bp, Homo sapien
taaaaagccactccattaattacag

SEQ ID NO: 4183415 - DNA, 25 bp, Homo sapien
acctctccttccagcgagtgttgca

SEQ ID NO: 4183416 - DNA, 25 bp, Homo sapien
ttcgcacattggtgtgtgtctgctc

SEQ ID NO: 4183417 - DNA, 25 bp, Homo sapien
agacgccccagacagtgtcacctct

SEQ ID NO: 4183418 - DNA, 25 bp, Homo sapien
tgcagctgcattcgcacattggtgt

SEQ ID NO: 4183419 - DNA, 25 bp, Homo sapien
tgactgaatgaactacctccctggg

SEQ ID NO: 4183420 - DNA, 25 bp, Homo sapien
gactggtttgtgctgctcactgcca

SEQ ID NO: 4183421 - DNA, 25 bp, Homo sapien
tagaacagagttctcaacctcggtg

SEQ ID NO: 4183422 - DNA, 25 bp, Homo sapien
caagacccttcatgtgtgtgaggcc

SEQ ID NO: 4183423 - DNA, 25 bp, Homo sapien
ccttgatccctgatggtctgcattt

SEQ ID NO: 4183424 - DNA, 25 bp, Homo sapien
tgatccctgatggtctgcatttggt

SEQ ID NO: 4183425 - DNA, 25 bp, Homo sapien
tagtgcccttgatccctgatggtct

SEQ ID NO: 4183426 - DNA, 25 bp, Homo sapien
gcccttgatccctgatggtctgcat

SEQ ID NO: 4183427 - DNA, 25 bp, Homo sapien
gccaatgcgctttgtcactaatgtt

SEQ ID NO: 4183428 - DNA, 25 bp, Homo sapien
ccaatgtgttgatcgccaatgcgct

SEQ ID NO: 4183429 - DNA, 25 bp, Homo sapien
tcaccagtagtatgcctgatcatag

SEQ ID NO: 4183430 - DNA, 25 bp, Homo sapien
tcttctcaccaatgtgttgatcgcc

SEQ ID NO: 4183431 - DNA, 25 bp, Homo sapien
ccaagtgcaatatgggcgggcagtc

SEQ ID NO: 4183432 - DNA, 25 bp, Homo sapien
tgaaatagccgaactccaggctggg

SEQ ID NO: 4183433 - DNA, 25 bp, Homo sapien
tatataaacgtgtcccgagcttaga

SEQ ID NO: 4183434 - DNA, 25 bp, Homo sapien
tgattgtacgtagccacaggagccc

SEQ ID NO: 4183435 - DNA, 25 bp, Homo sapien
ctgcgctgaggcctcggacagacaa

SEQ ID NO: 4183436 - DNA, 25 bp, Homo sapien
acggacgccagacgcctaggcagga

SEQ ID NO: 4183437 - DNA, 25 bp, Homo sapien
tcggacagacaaacggacgccagac

SEQ ID NO: 4183438 - DNA, 25 bp, Homo sapien
ctgaggcctcggacagacaaacgga

SEQ ID NO: 4183439 - DNA, 25 bp, Homo sapien
gttcccagcccaatggagctctgcg

SEQ ID NO: 4183440 - DNA, 25 bp, Homo sapien
tggagttccgagcagaccgggctcc

SEQ ID NO: 4183441 - DNA, 25 bp, Homo sapien
aagggcacgagacgcgctggttccc

SEQ ID NO: 4183442 - DNA, 25 bp, Homo sapien
gagcgggaggcttagcaggcggctc

SEQ ID NO: 4183443 - DNA, 25 bp, Homo sapien
cgcacgcgttgaggggaacgccaac

SEQ ID NO: 4183444 - DNA, 25 bp, Homo sapien
aaccgggaggcacggagactgctca

SEQ ID NO: 4183445 - DNA, 25 bp, Homo sapien
aagttgagagacagacggacggaga

SEQ ID NO: 4183446 - DNA, 25 bp, Homo sapien
acggacggagagacagtgggccccg

SEQ ID NO: 4183447 - DNA, 25 bp, Homo sapien
acgccaaataggctcgagctccgcg

SEQ ID NO: 4183448 - DNA, 25 bp, Homo sapien
gaagcttccgctcggtcctggcgtt

SEQ ID NO: 4183449 - DNA, 25 bp, Homo sapien
cagagggtcttgctagtctccggag

SEQ ID NO: 4183450 - DNA, 25 bp, Homo sapien
gctccgcggcgatctcattttacga

SEQ ID NO: 4183451 - DNA, 25 bp, Homo sapien
cctctcaaggctgtgaacctggcca

SEQ ID NO: 4183452 - DNA, 25 bp, Homo sapien
gccaccaccgcccgcgccttggtgt

SEQ ID NO: 4183453 - DNA, 25 bp, Homo sapien
cgcccgcgccttggtgtcccgccct

SEQ ID NO: 4183454 - DNA, 25 bp, Homo sapien
caccgcccgcgccttggtgtcccgc

SEQ ID NO: 4183455 - DNA, 25 bp, Homo sapien
gacagcggcgcagccccgcgcggag

SEQ ID NO: 4183456 - DNA, 25 bp, Homo sapien
cagagataaggaacaccatttattc

SEQ ID NO: 4183457 - DNA, 25 bp, Homo sapien
cgggcagataacgactggctattca

SEQ ID NO: 4183458 - DNA, 25 bp, Homo sapien
cctgtacaaccccattctcgggcag

SEQ ID NO: 4183459 - DNA, 25 bp, Homo sapien
tttattccgcggcactttggaaaca

SEQ ID NO: 4183460 - DNA, 25 bp, Homo sapien
cggatctgcggtggtaaatgatgca

SEQ ID NO: 4183461 - DNA, 25 bp, Homo sapien
cagcagagggctatctgcctgccca

SEQ ID NO: 4183462 - DNA, 25 bp, Homo sapien
tgttgtgcgctctctgaaagggctc

SEQ ID NO: 4183463 - DNA, 25 bp, Homo sapien
aaatgatgcattcgatggcgggcgc

SEQ ID NO: 4183464 - DNA, 25 bp, Homo sapien
gcacagttgcatcggcgttagccca

SEQ ID NO: 4183465 - DNA, 25 bp, Homo sapien
gacacttgcatgctcatcccggtag

SEQ ID NO: 4183466 - DNA, 25 bp, Homo sapien
ttgtttgacacacccgcacagttgc

SEQ ID NO: 4183467 - DNA, 25 bp, Homo sapien
cgaaacacaacgtagggtgggcact

SEQ ID NO: 4183468 - DNA, 25 bp, Homo sapien
gaaaaatgacttgcgtacagccacc

SEQ ID NO: 4183469 - DNA, 25 bp, Homo sapien
ggacagtagactcaaaggccctggg

SEQ ID NO: 4183470 - DNA, 25 bp, Homo sapien
tgagtcccttccacggcagagatgg

SEQ ID NO: 4183471 - DNA, 25 bp, Homo sapien
gaatgcatcagtggacgcttgcccc

SEQ ID NO: 4183472 - DNA, 25 bp, Homo sapien
tatgtggtaccctcaggatgggccg

SEQ ID NO: 4183473 - DNA, 25 bp, Homo sapien
ttttcataaacgatagacagtgccc

SEQ ID NO: 4183474 - DNA, 25 bp, Homo sapien
aaggaaaggtcatgtggcgtccacc

SEQ ID NO: 4183475 - DNA, 25 bp, Homo sapien
tccagatggcacaggttgtctccaa

SEQ ID NO: 4183476 - DNA, 25 bp, Homo sapien
ttccatgtgattcagaacatacaca

SEQ ID NO: 4183477 - DNA, 25 bp, Homo sapien
agacctgggcagaaacccgtgaaga

SEQ ID NO: 4183478 - DNA, 25 bp, Homo sapien
tacacaactagctcactgacccttg

SEQ ID NO: 4183479 - DNA, 25 bp, Homo sapien
gacccttgatttcggcagtaatata

SEQ ID NO: 4183480 - DNA, 25 bp, Homo sapien
ccctcctgcccacaaggtggcaggg

SEQ ID NO: 4183481 - DNA, 25 bp, Homo sapien
tagctaacgctagacactctttcct

SEQ ID NO: 4183482 - DNA, 25 bp, Homo sapien
ttcatgctcactccgactccctact

SEQ ID NO: 4183483 - DNA, 25 bp, Homo sapien
tgagcccagcacaccaaggtagcta

SEQ ID NO: 4183484 - DNA, 25 bp, Homo sapien
tgtttgagaaacaagaaggaagcca

SEQ ID NO: 4183485 - DNA, 25 bp, Homo sapien
gatgggacaggtttgacttacatct

SEQ ID NO: 4183486 - DNA, 25 bp, Homo sapien
gggacagctagtgccaatgttctgg

SEQ ID NO: 4183487 - DNA, 25 bp, Homo sapien
gaggccaagagggacccgggtgctg

SEQ ID NO: 4183488 - DNA, 25 bp, Homo sapien
tttcaagaagcaaggagtgggcgct

SEQ ID NO: 4183489 - DNA, 25 bp, Homo sapien
agtgggcgctaatcatctcttcagg

SEQ ID NO: 4183490 - DNA, 25 bp, Homo sapien
taagaggcaaaaacccggcttcaga

SEQ ID NO: 4183491 - DNA, 25 bp, Homo sapien
tgtgttggtctcactctccggcagg

SEQ ID NO: 4183492 - DNA, 25 bp, Homo sapien
gatgttgtcagcaccccgattaagg

SEQ ID NO: 4183493 - DNA, 25 bp, Homo sapien
gagaagcctgcgtgctcgtctggat

SEQ ID NO: 4183494 - DNA, 25 bp, Homo sapien
cagagtccgttggagaatggcaccg

SEQ ID NO: 4183495 - DNA, 25 bp, Homo sapien
tattaatatgtacggagacacacgc

SEQ ID NO: 4183496 - DNA, 25 bp, Homo sapien
cctagactgtaacacggtcactggg

SEQ ID NO: 4183497 - DNA, 25 bp, Homo sapien
gccagcctgcagcaactactaatct

SEQ ID NO: 4183498 - DNA, 25 bp, Homo sapien
taaaccgtgttcctgttagcagcca

SEQ ID NO: 4183499 - DNA, 25 bp, Homo sapien
tcagtatttttctagcagggctttg

SEQ ID NO: 4183500 - DNA, 25 bp, Homo sapien
tactttcctgtaggcttgccgttgg

SEQ ID NO: 4183501 - DNA, 25 bp, Homo sapien
tatattcctgccaatagtgtagaag

SEQ ID NO: 4183502 - DNA, 25 bp, Homo sapien
tgccgttggatggatattattgctc

SEQ ID NO: 4183503 - DNA, 25 bp, Homo sapien
caggcaattgctctcccaaaaaggt

SEQ ID NO: 4183504 - DNA, 25 bp, Homo sapien
cagttccttaaagacaagtgatgtt

SEQ ID NO: 4183505 - DNA, 25 bp, Homo sapien
tcccacagtgtatgaaagttacagt

SEQ ID NO: 4183506 - DNA, 25 bp, Homo sapien
aagtggctgttcaaatcatctgtcc

SEQ ID NO: 4183507 - DNA, 25 bp, Homo sapien
gttacagttgctccacatggtcttc

SEQ ID NO: 4183508 - DNA, 25 bp, Homo sapien
tgatgattgagtgctttattttgca

SEQ ID NO: 4183509 - DNA, 25 bp, Homo sapien
cacttgcatagaagtctttgcatgg

SEQ ID NO: 4183510 - DNA, 25 bp, Homo sapien
caataaaattgtagtgttggatgaa

SEQ ID NO: 4183511 - DNA, 25 bp, Homo sapien
cttatgtatctatggctaggagtgg

SEQ ID NO: 4183512 - DNA, 25 bp, Homo sapien
ggctttgtggtgttcccaaccagaa

SEQ ID NO: 4183513 - DNA, 25 bp, Homo sapien
gctttgtggtgttcccaaccagaag

SEQ ID NO: 4183514 - DNA, 25 bp, Homo sapien
tttgtggtgttcccaaccagaagtg

SEQ ID NO: 4183515 - DNA, 25 bp, Homo sapien
ctttgtggtgttcccaaccagaagt

SEQ ID NO: 4183516 - DNA, 25 bp, Homo sapien
tgggccccatcgttccagggatgag

SEQ ID NO: 4183517 - DNA, 25 bp, Homo sapien
cacacatttgtccataggcatttgg

SEQ ID NO: 4183518 - DNA, 25 bp, Homo sapien
ttagggcttggctgtctccagagag

SEQ ID NO: 4183519 - DNA, 25 bp, Homo sapien
aatggccagtgcttagggcttggct

SEQ ID NO: 4183520 - DNA, 25 bp, Homo sapien
ctagtccggaggacaggtggaccca

SEQ ID NO: 4183521 - DNA, 25 bp, Homo sapien
tccggaggacaggtggacccatagc

SEQ ID NO: 4183522 - DNA, 25 bp, Homo sapien
ctccagagctagtccggaggacagg

SEQ ID NO: 4183523 - DNA, 25 bp, Homo sapien
agacacacgggggaagctcagcatt

SEQ ID NO: 4183524 - DNA, 25 bp, Homo sapien
tgctgataaccagatgaggctgtct

SEQ ID NO: 4183525 - DNA, 25 bp, Homo sapien
agatatattttgcaacccagcccgc

SEQ ID NO: 4183526 - DNA, 25 bp, Homo sapien
gaagacctgtcatggttctcgacac

SEQ ID NO: 4183527 - DNA, 25 bp, Homo sapien
tagcaaggcacatcgctcggtggtt

SEQ ID NO: 4183528 - DNA, 25 bp, Homo sapien
ccttgtggatctcctcatggaggaa

SEQ ID NO: 4183529 - DNA, 25 bp, Homo sapien
actagcaggtccttgtggatctcct

SEQ ID NO: 4183530 - DNA, 25 bp, Homo sapien
ggtccttgtggatctcctcatggag

SEQ ID NO: 4183531 - DNA, 25 bp, Homo sapien
cactagcaggtccttgtggatctcc

SEQ ID NO: 4183532 - DNA, 25 bp, Homo sapien
agacttgttggagatctcgtacgca

SEQ ID NO: 4183533 - DNA, 25 bp, Homo sapien
gccagcacccccagacttgttggag

SEQ ID NO: 4183534 - DNA, 25 bp, Homo sapien
atgtcataatcttccaggataaagg

SEQ ID NO: 4183535 - DNA, 25 bp, Homo sapien
tgttggagatctcgtacgcacccat

SEQ ID NO: 4183536 - DNA, 25 bp, Homo sapien
gacggtgaagcaggatcaggtacct

SEQ ID NO: 4183537 - DNA, 25 bp, Homo sapien
gtggcacacacctaaacaattagat

SEQ ID NO: 4183538 - DNA, 25 bp, Homo sapien
caggtacctcatatagcaaaagcag

SEQ ID NO: 4183539 - DNA, 25 bp, Homo sapien
tgggagctgattttctacacaggtt

SEQ ID NO: 4183540 - DNA, 25 bp, Homo sapien
ggacatgttggactggtgctcagca

SEQ ID NO: 4183541 - DNA, 25 bp, Homo sapien
cggacatgttggactggtgctcagc

SEQ ID NO: 4183542 - DNA, 25 bp, Homo sapien
agcgtgggcggacatgttggactgg

SEQ ID NO: 4183543 - DNA, 25 bp, Homo sapien
gctcctcagcgtgggcggacatgtt

SEQ ID NO: 4183544 - DNA, 25 bp, Homo sapien
ttgtagacaacagagcaccagcttc

SEQ ID NO: 4183545 - DNA, 25 bp, Homo sapien
tagggccctcgttctcccaggtgta

SEQ ID NO: 4183546 - DNA, 25 bp, Homo sapien
tgcttcaggtgcaggtgaatccagg

SEQ ID NO: 4183547 - DNA, 25 bp, Homo sapien
tcctgtaggttgacaagtggcctcc

SEQ ID NO: 4183548 - DNA, 25 bp, Homo sapien
cgtgatgatgtcagcgagttgggtc

SEQ ID NO: 4183549 - DNA, 25 bp, Homo sapien
acagatggatcttttggcctgaggt

SEQ ID NO: 4183550 - DNA, 25 bp, Homo sapien
tcttttggcctgaggtcgaggagtt

SEQ ID NO: 4183551 - DNA, 25 bp, Homo sapien
gcctgaggtcgaggagttcctgttt

SEQ ID NO: 4183552 - DNA, 25 bp, Homo sapien
tcttagggcgccagcataagtggcc

SEQ ID NO: 4183553 - DNA, 25 bp, Homo sapien
gcagctgctgttgtacacccgagaa

SEQ ID NO: 4183554 - DNA, 25 bp, Homo sapien
gagagctcggcttaaactccaggga

SEQ ID NO: 4183555 - DNA, 25 bp, Homo sapien
gatccagggattagaagccacttca

SEQ ID NO: 4183556 - DNA, 25 bp, Homo sapien
tacaccatggaaactggaaaactct

SEQ ID NO: 4183557 - DNA, 25 bp, Homo sapien
ttcagagggcaggtttatcagcaca

SEQ ID NO: 4183558 - DNA, 25 bp, Homo sapien
ggtagcctgaaatggaccacagtgg

SEQ ID NO: 4183559 - DNA, 25 bp, Homo sapien
gttgactatgtgcaaagctcctgac

SEQ ID NO: 4183560 - DNA, 25 bp, Homo sapien
cactccttatagtgactccagatta

SEQ ID NO: 4183561 - DNA, 25 bp, Homo sapien
aaagaagggcatttctcattcagcg

SEQ ID NO: 4183562 - DNA, 25 bp, Homo sapien
caaagagattcgctaacagagctga

SEQ ID NO: 4183563 - DNA, 25 bp, Homo sapien
tcttctaatgatctgggtgagtata

SEQ ID NO: 4183564 - DNA, 25 bp, Homo sapien
tcatcgtccttatcgctgacagcca

SEQ ID NO: 4183565 - DNA, 25 bp, Homo sapien
tcactttcgggaagcttccgggcag

SEQ ID NO: 4183566 - DNA, 25 bp, Homo sapien
tatctgcagccctttcgggaagtgc

SEQ ID NO: 4183567 - DNA, 25 bp, Homo sapien
cgtttgtcggtgtcatcatcgtcct

SEQ ID NO: 4183568 - DNA, 25 bp, Homo sapien
cagacaggaaatgcccccgagtgta

SEQ ID NO: 4183569 - DNA, 25 bp, Homo sapien
ggctcagacaggaaatgcccccgag

SEQ ID NO: 4183570 - DNA, 25 bp, Homo sapien
agggccctctgcaaaggcctgatgc

SEQ ID NO: 4183571 - DNA, 25 bp, Homo sapien
taccccagggccctctgcaaaggcc

SEQ ID NO: 4183572 - DNA, 25 bp, Homo sapien
gtgccgagctgatagtgcaggcccc

SEQ ID NO: 4183573 - DNA, 25 bp, Homo sapien
ccgagctgatagtgcaggccccggc

SEQ ID NO: 4183574 - DNA, 25 bp, Homo sapien
cgggcgtctggtgccgagctgatag

SEQ ID NO: 4183575 - DNA, 25 bp, Homo sapien
cgtctggtgccgagctgatagtgca

SEQ ID NO: 4183576 - DNA, 25 bp, Homo sapien
gtccctgtagtcataggtggcctca

SEQ ID NO: 4183577 - DNA, 25 bp, Homo sapien
ctgcagctttgggatgtccctgtag

SEQ ID NO: 4183578 - DNA, 25 bp, Homo sapien
tgggatgtccctgtagtcataggtg

SEQ ID NO: 4183579 - DNA, 25 bp, Homo sapien
ctgtagtcataggtggcctcatggc

SEQ ID NO: 4183580 - DNA, 25 bp, Homo sapien
tccagccttggccaagatgcctgac

SEQ ID NO: 4183581 - DNA, 25 bp, Homo sapien
tcatgtggccgtataggagtggccc

SEQ ID NO: 4183582 - DNA, 25 bp, Homo sapien
tgatcctcggtttccccagtagtaa

SEQ ID NO: 4183583 - DNA, 25 bp, Homo sapien
ttggcgcaaggtgacatgccccaga

SEQ ID NO: 4183584 - DNA, 25 bp, Homo sapien
ccccagcatcctgtggtgggtgcat

SEQ ID NO: 4183585 - DNA, 25 bp, Homo sapien
gtggggcatccggtgctgccctccc

SEQ ID NO: 4183586 - DNA, 25 bp, Homo sapien
agcatcctgtggtgggtgcatccct

SEQ ID NO: 4183587 - DNA, 25 bp, Homo sapien
ggtggctcccccagcatcctgtggt

SEQ ID NO: 4183588 - DNA, 25 bp, Homo sapien
ctctggccggactaggactgggtct

SEQ ID NO: 4183589 - DNA, 25 bp, Homo sapien
gtgggctcgtaaacggcctcctctg

SEQ ID NO: 4183590 - DNA, 25 bp, Homo sapien
ctcctctggccggactaggactggg

SEQ ID NO: 4183591 - DNA, 25 bp, Homo sapien
gtcggcgggctcaggaccactgggc

SEQ ID NO: 4183592 - DNA, 25 bp, Homo sapien
aaagccaattctccggctgtggcgc

SEQ ID NO: 4183593 - DNA, 25 bp, Homo sapien
aaaagtcgcgcatgcgtggggctaa

SEQ ID NO: 4183594 - DNA, 25 bp, Homo sapien
aacagaaccaaagccaattctccgg

SEQ ID NO: 4183595 - DNA, 25 bp, Homo sapien
catgcgtggggctaatttaaaggcg

SEQ ID NO: 4183596 - DNA, 25 bp, Homo sapien
ctgcggcacgtcacgaggcgggcac

SEQ ID NO: 4183597 - DNA, 25 bp, Homo sapien
ggcacgtcacgaggcgggcaccggg

SEQ ID NO: 4183598 - DNA, 25 bp, Homo sapien
ggcaccggggagtatgggcgaaatc

SEQ ID NO: 4183599 - DNA, 25 bp, Homo sapien
tatgggcgaaatcgcaggcgcagac

SEQ ID NO: 4183600 - DNA, 25 bp, Homo sapien
gcgtgcagattggtgggcgccctct

SEQ ID NO: 4183601 - DNA, 25 bp, Homo sapien
agataactcgctgggcccgcgtgca

SEQ ID NO: 4183602 - DNA, 25 bp, Homo sapien
aaagcttggccgaaatcaagataac

SEQ ID NO: 4183603 - DNA, 25 bp, Homo sapien
caggcctgaggagcgagctgcgcct

SEQ ID NO: 4183604 - DNA, 25 bp, Homo sapien
gctgcttcaccagctctcttcatcc

SEQ ID NO: 4183605 - DNA, 25 bp, Homo sapien
ctcgggccatttggtcagctgcttc

SEQ ID NO: 4183606 - DNA, 25 bp, Homo sapien
ttaccgcggctgcataccacctcgg

SEQ ID NO: 4183607 - DNA, 25 bp, Homo sapien
ggctgcataccacctcgggccattt

SEQ ID NO: 4183608 - DNA, 25 bp, Homo sapien
cgacaaagtaatagtggccacctgg

SEQ ID NO: 4183609 - DNA, 25 bp, Homo sapien
caaagcatttcgcaaacaggctggg

SEQ ID NO: 4183610 - DNA, 25 bp, Homo sapien
caaaatggaggtgctcgggacatcc

SEQ ID NO: 4183611 - DNA, 25 bp, Homo sapien
tgcttgttaaacagcgacggtctcg

SEQ ID NO: 4183612 - DNA, 25 bp, Homo sapien
ctcataatttaattcttaattttgg

SEQ ID NO: 4183613 - DNA, 25 bp, Homo sapien
gatctctcataatttaattcttaat

SEQ ID NO: 4183614 - DNA, 25 bp, Homo sapien
agatctctcataatttaattcttaa

SEQ ID NO: 4183615 - DNA, 25 bp, Homo sapien
tctgatgtttgggtattgtgtgagt

SEQ ID NO: 4183616 - DNA, 25 bp, Homo sapien
caagatcgaccacatcctggatgcc

SEQ ID NO: 4183617 - DNA, 25 bp, Homo sapien
tgtgagtttgccgtttgtccttaac

SEQ ID NO: 4183618 - DNA, 25 bp, Homo sapien
tattctgttctgaagtctaagatat

SEQ ID NO: 4183619 - DNA, 25 bp, Homo sapien
gctggtgctgaagtcggcggtggag

SEQ ID NO: 4183620 - DNA, 25 bp, Homo sapien
ggtgggaggacagctcacaagtcct

SEQ ID NO: 4183621 - DNA, 25 bp, Homo sapien
ctcggccaggtgagcgaaatgcaga

SEQ ID NO: 4183622 - DNA, 25 bp, Homo sapien
ccaggtgagcgaaatgcagaagctg

SEQ ID NO: 4183623 - DNA, 25 bp, Homo sapien
caggatgaaggtagcctgcatcaca

SEQ ID NO: 4183624 - DNA, 25 bp, Homo sapien
gacccaagcctggatgttgtcacac

SEQ ID NO: 4183625 - DNA, 25 bp, Homo sapien
tagttttgcccattgctgaacctgg

SEQ ID NO: 4183626 - DNA, 25 bp, Homo sapien
gataaggtcagagtggacccaagcc

SEQ ID NO: 4183627 - DNA, 25 bp, Homo sapien
tgtgatggcgccatctcagccggct

SEQ ID NO: 4183628 - DNA, 25 bp, Homo sapien
tgatggcgccatctcagccggctgc

SEQ ID NO: 4183629 - DNA, 25 bp, Homo sapien
tggcgccatctcagccggctgcaac

SEQ ID NO: 4183630 - DNA, 25 bp, Homo sapien
aattttgctcttgttatgcaggctg

SEQ ID NO: 4183631 - DNA, 25 bp, Homo sapien
ttgggaagtatatttggaagtgtaa

SEQ ID NO: 4183632 - DNA, 25 bp, Homo sapien
tttggaagtgtaatctttttgtgta

SEQ ID NO: 4183633 - DNA, 25 bp, Homo sapien
tagccgttcggctgacgtgacaagg

SEQ ID NO: 4183634 - DNA, 25 bp, Homo sapien
gaagcagtcatcctgtcgtcgcata

SEQ ID NO: 4183635 - DNA, 25 bp, Homo sapien
gaaagcctctccgtgtttggtgaag

SEQ ID NO: 4183636 - DNA, 25 bp, Homo sapien
accgcttggcggctgtgaatgcaga

SEQ ID NO: 4183637 - DNA, 25 bp, Homo sapien
tgctctttttaacggtggcaggcca

SEQ ID NO: 4183638 - DNA, 25 bp, Homo sapien
ccagtggagtgtcgcgaagttgcaa

SEQ ID NO: 4183639 - DNA, 25 bp, Homo sapien
tcatcgtctcatcgcactccagtgg

SEQ ID NO: 4183640 - DNA, 25 bp, Homo sapien
ttactaggaattgccatgctgccca

SEQ ID NO: 4183641 - DNA, 25 bp, Homo sapien
tgacaagaatgaggatgatacccac

SEQ ID NO: 4183642 - DNA, 25 bp, Homo sapien
gccatcttatgaccctgaggtgaca

SEQ ID NO: 4183643 - DNA, 25 bp, Homo sapien
ccttctaccctgtctgaaatgcgga

SEQ ID NO: 4183644 - DNA, 25 bp, Homo sapien
aaatcacctgcagttaggaaacgtg

SEQ ID NO: 4183645 - DNA, 25 bp, Homo sapien
ttggagaagtgaaaactcttccagg

SEQ ID NO: 4183646 - DNA, 25 bp, Homo sapien
tatatatagaccctggagctaccag

SEQ ID NO: 4183647 - DNA, 25 bp, Homo sapien
ggctgtggtcatttgccagatccca

SEQ ID NO: 4183648 - DNA, 25 bp, Homo sapien
gacaggccgagttctttctcaaaag

SEQ ID NO: 4183649 - DNA, 25 bp, Homo sapien
tctgtgtagtttacactctttcccc

SEQ ID NO: 4183650 - DNA, 25 bp, Homo sapien
tggacccaatttacatggcaagatc

SEQ ID NO: 4183651 - DNA, 25 bp, Homo sapien
ccagtgatgtattgggattgagact

SEQ ID NO: 4183652 - DNA, 25 bp, Homo sapien
gcaagatccattatgagccagtgat

SEQ ID NO: 4183653 - DNA, 25 bp, Homo sapien
gagactaaacggaggacagaagcga

SEQ ID NO: 4183654 - DNA, 25 bp, Homo sapien
ggacagaagcgagaaggtccaagtt

SEQ ID NO: 4183655 - DNA, 25 bp, Homo sapien
agggaactctcccgagctctccaag

SEQ ID NO: 4183656 - DNA, 25 bp, Homo sapien
aggctttatggccaagactccaggc

SEQ ID NO: 4183657 - DNA, 25 bp, Homo sapien
ttgaatagggaagaaccagccggct

SEQ ID NO: 4183658 - DNA, 25 bp, Homo sapien
gctggacagccatcaactaaggttg

SEQ ID NO: 4183659 - DNA, 25 bp, Homo sapien
aaaggttcactaggcaggtttgcca

SEQ ID NO: 4183660 - DNA, 25 bp, Homo sapien
taccctgccggtattcaagagctcc

SEQ ID NO: 4183661 - DNA, 25 bp, Homo sapien
gaaaagcctgcctacagctccaagt

SEQ ID NO: 4183662 - DNA, 25 bp, Homo sapien
gaatcatcaacagcaagccaatagc

SEQ ID NO: 4183663 - DNA, 25 bp, Homo sapien
acaatggtagccttccttacatgag

SEQ ID NO: 4183664 - DNA, 25 bp, Homo sapien
tcgagtttcagtcgccttcagaaga

SEQ ID NO: 4183665 - DNA, 25 bp, Homo sapien
gaagaactgttggtaggctgactga

SEQ ID NO: 4183666 - DNA, 25 bp, Homo sapien
taaatgacccgcagttatctcaggg

SEQ ID NO: 4183667 - DNA, 25 bp, Homo sapien
tgaactgagttagcagacctagact

SEQ ID NO: 4183668 - DNA, 25 bp, Homo sapien
gctgactgaataccacatataaggg

SEQ ID NO: 4183669 - DNA, 25 bp, Homo sapien
caagctgtaccatggtgccataaag

SEQ ID NO: 4183670 - DNA, 25 bp, Homo sapien
aatggctttctaccagagggaacta

SEQ ID NO: 4183671 - DNA, 25 bp, Homo sapien
tcccctacactggtgagtaaacaag

SEQ ID NO: 4183672 - DNA, 25 bp, Homo sapien
caagaggtagtctcaaactgacacg

SEQ ID NO: 4183673 - DNA, 25 bp, Homo sapien
tgaagatcacgcagccaaaaggctg

SEQ ID NO: 4183674 - DNA, 25 bp, Homo sapien
tatgggcaactatggaagactaact

SEQ ID NO: 4183675 - DNA, 25 bp, Homo sapien
tgaaaggcccactaatatctgaagg

SEQ ID NO: 4183676 - DNA, 25 bp, Homo sapien
tattctaagggctcaagtgtctgac

SEQ ID NO: 4183677 - DNA, 25 bp, Homo sapien
ggagaccatttgtggagagcctcaa

SEQ ID NO: 4183678 - DNA, 25 bp, Homo sapien
caggatgccaacagagtactggagc

SEQ ID NO: 4183679 - DNA, 25 bp, Homo sapien
ggttcttgacgagtagtggctcaca

SEQ ID NO: 4183680 - DNA, 25 bp, Homo sapien
gataatctgtggcaagccccaggga

SEQ ID NO: 4183681 - DNA, 25 bp, Homo sapien
tcctgaaggctatatggcaatgaaa

SEQ ID NO: 4183682 - DNA, 25 bp, Homo sapien
gccaaaacacaagccctcaacaatg

SEQ ID NO: 4183683 - DNA, 25 bp, Homo sapien
taaagtatacaaccttcctgaaggc

SEQ ID NO: 4183684 - DNA, 25 bp, Homo sapien
tactcactaaatcttaaggaaatga

SEQ ID NO: 4183685 - DNA, 25 bp, Homo sapien
gatacaagccaggaataatgtttgc

SEQ ID NO: 4183686 - DNA, 25 bp, Homo sapien
tatacctggctaagtgctagaatta

SEQ ID NO: 4183687 - DNA, 25 bp, Homo sapien
ggtgggaaaggcctaagcataatat

SEQ ID NO: 4183688 - DNA, 25 bp, Homo sapien
cacgaaaaggatcaaaattcttgcc

SEQ ID NO: 4183689 - DNA, 25 bp, Homo sapien
aggctgatattgaacgtataggctc

SEQ ID NO: 4183690 - DNA, 25 bp, Homo sapien
ggctgatattgaacgtataggctca

SEQ ID NO: 4183691 - DNA, 25 bp, Homo sapien
gctgatattgaacgtataggctcaa

SEQ ID NO: 4183692 - DNA, 25 bp, Homo sapien
tgatattgaacgtataggctcaagc

SEQ ID NO: 4183693 - DNA, 25 bp, Homo sapien
aaaaagtgacttcagccgggcgcgg

SEQ ID NO: 4183694 - DNA, 25 bp, Homo sapien
tagtttaggcaacaggtagacacgc

SEQ ID NO: 4183695 - DNA, 25 bp, Homo sapien
gcagtgcataccctagtttaggcaa

SEQ ID NO: 4183696 - DNA, 25 bp, Homo sapien
caggtagacacgcagtacttgaagt

SEQ ID NO: 4183697 - DNA, 25 bp, Homo sapien
tcttaagaacactttgctggccggg

SEQ ID NO: 4183698 - DNA, 25 bp, Homo sapien
tgctgagcgaccagatgatgtgacc

SEQ ID NO: 4183699 - DNA, 25 bp, Homo sapien
gggcctctaggatgtttgtcaaact

SEQ ID NO: 4183700 - DNA, 25 bp, Homo sapien
gaggaaacccagaaggagtcacctg

SEQ ID NO: 4183701 - DNA, 25 bp, Homo sapien
tacaccatggtgacaaggtcttgcc

SEQ ID NO: 4183702 - DNA, 25 bp, Homo sapien
caagtccacggaaagacacagctca

SEQ ID NO: 4183703 - DNA, 25 bp, Homo sapien
tggagcctgggagaccttctctaca

SEQ ID NO: 4183704 - DNA, 25 bp, Homo sapien
tgacctttgtggaactgcaagacga

SEQ ID NO: 4183705 - DNA, 25 bp, Homo sapien
tgcagggaagctcccctttttgtaa

SEQ ID NO: 4183706 - DNA, 25 bp, Homo sapien
tattccctaactcgagaacagcatg

SEQ ID NO: 4183707 - DNA, 25 bp, Homo sapien
gcatagtttgtagcaccagtattac

SEQ ID NO: 4183708 - DNA, 25 bp, Homo sapien
tagttagtgtagctaggaggtcaca

SEQ ID NO: 4183709 - DNA, 25 bp, Homo sapien
tatcctaaagaaggtcctaagtcca

SEQ ID NO: 4183710 - DNA, 25 bp, Homo sapien
gaatgccccgtgtatgtctgtaaga

SEQ ID NO: 4183711 - DNA, 25 bp, Homo sapien
taaagtccccaactactgctgtaga

SEQ ID NO: 4183712 - DNA, 25 bp, Homo sapien
taagtccacttaagaagaagatgca

SEQ ID NO: 4183713 - DNA, 25 bp, Homo sapien
gtacgtggaagagatctgcactcac

SEQ ID NO: 4183714 - DNA, 25 bp, Homo sapien
tcccatttgatccaatgatatagcc

SEQ ID NO: 4183715 - DNA, 25 bp, Homo sapien
tcaagaaaacgtagttggtcaggca

SEQ ID NO: 4183716 - DNA, 25 bp, Homo sapien
caacttaagtatccatccatggacg

SEQ ID NO: 4183717 - DNA, 25 bp, Homo sapien
tgcagagataatctacgaaatggga

SEQ ID NO: 4183718 - DNA, 25 bp, Homo sapien
cagagataatctacgaaatgggaga

SEQ ID NO: 4183719 - DNA, 25 bp, Homo sapien
tagcgagcagtgatcatataactgt

SEQ ID NO: 4183720 - DNA, 25 bp, Homo sapien
aggctgtagcgagcagtgatcatat

SEQ ID NO: 4183721 - DNA, 25 bp, Homo sapien
tgtgtgaacttaaatgcccctctgc

SEQ ID NO: 4183722 - DNA, 25 bp, Homo sapien
tacagggataagctaccccaagtgg

SEQ ID NO: 4183723 - DNA, 25 bp, Homo sapien
cttgctgagtgccatgaagtgtcca

SEQ ID NO: 4183724 - DNA, 25 bp, Homo sapien
catgggccctaagaacatgggttac

SEQ ID NO: 4183725 - DNA, 25 bp, Homo sapien
tgctctattcgcaacctgggccggt

SEQ ID NO: 4183726 - DNA, 25 bp, Homo sapien
tgccctaaaacccagaactcctgtg

SEQ ID NO: 4183727 - DNA, 25 bp, Homo sapien
tctactgatgccgaagttaatgcag

SEQ ID NO: 4183728 - DNA, 25 bp, Homo sapien
tgatcagcataggagagatgtttca

SEQ ID NO: 4183729 - DNA, 25 bp, Homo sapien
ttcaagtacaatgtttctcataaca

SEQ ID NO: 4183730 - DNA, 25 bp, Homo sapien
cagtgtgcatcggaagaagctcctc

SEQ ID NO: 4183731 - DNA, 25 bp, Homo sapien
ccagtattggtaccagtatttgaac

SEQ ID NO: 4183732 - DNA, 25 bp, Homo sapien
gaagctcctcagagcgaaactacca

SEQ ID NO: 4183733 - DNA, 25 bp, Homo sapien
gacccaagagcgaggcagaacagca

SEQ ID NO: 4183734 - DNA, 25 bp, Homo sapien
ggatgataaccttcagcaacacttt

SEQ ID NO: 4183735 - DNA, 25 bp, Homo sapien
aggatgataaccttcagcaacactt

SEQ ID NO: 4183736 - DNA, 25 bp, Homo sapien
caggatgataaccttcagcaacact

SEQ ID NO: 4183737 - DNA, 25 bp, Homo sapien
tgaaattggagaaaaaccataagta

SEQ ID NO: 4183738 - DNA, 25 bp, Homo sapien
ggagaaaaaccataagtataagtca

SEQ ID NO: 4183739 - DNA, 25 bp, Homo sapien
aaaccataagtataagtcaaatagg

SEQ ID NO: 4183740 - DNA, 25 bp, Homo sapien
accataagtataagtcaaataggag

SEQ ID NO: 4183741 - DNA, 25 bp, Homo sapien
actgattgctgaatttcttattcac

SEQ ID NO: 4183742 - DNA, 25 bp, Homo sapien
tactggttcatgagtgatgtcttcc

SEQ ID NO: 4183743 - DNA, 25 bp, Homo sapien
cctattgtggctttgtactgattgc

SEQ ID NO: 4183744 - DNA, 25 bp, Homo sapien
tccttggtcagaaagtcagctccta

SEQ ID NO: 4183745 - DNA, 25 bp, Homo sapien
tgcattgtgactagcctgtcatcca

SEQ ID NO: 4183746 - DNA, 25 bp, Homo sapien
gcattgtgactagcctgtcatccac

SEQ ID NO: 4183747 - DNA, 25 bp, Homo sapien
ctgcattgtgactagcctgtcatcc

SEQ ID NO: 4183748 - DNA, 25 bp, Homo sapien
tggagtataatggagcagtcacagc

SEQ ID NO: 4183749 - DNA, 25 bp, Homo sapien
tcaagagaggcacaagacagagacc

SEQ ID NO: 4183750 - DNA, 25 bp, Homo sapien
taaatgaactatcaaggcctggtca

SEQ ID NO: 4183751 - DNA, 25 bp, Homo sapien
tgtttacctaaagcactgggcaagg

SEQ ID NO: 4183752 - DNA, 25 bp, Homo sapien
tttctgaattcgctggcccacatgg

SEQ ID NO: 4183753 - DNA, 25 bp, Homo sapien
ttttccctcagcaaaaggcagtctg

SEQ ID NO: 4183754 - DNA, 25 bp, Homo sapien
tttacttcaagagtgcagcgcccca

SEQ ID NO: 4183755 - DNA, 25 bp, Homo sapien
caaggtcccagcttagtagtacaga

SEQ ID NO: 4183756 - DNA, 25 bp, Homo sapien
gagtcagtggattggtgccacacca

SEQ ID NO: 4183757 - DNA, 25 bp, Homo sapien
tgtggccaatctgctatgatttagc

SEQ ID NO: 4183758 - DNA, 25 bp, Homo sapien
tacaggcactatgctgtacacatct

SEQ ID NO: 4183759 - DNA, 25 bp, Homo sapien
tatggctgacatacaaaggctgcac

SEQ ID NO: 4183760 - DNA, 25 bp, Homo sapien
ttactttggaagttacatactcacg

SEQ ID NO: 4183761 - DNA, 25 bp, Homo sapien
cagcagtcactaatctttccctaca

SEQ ID NO: 4183762 - DNA, 25 bp, Homo sapien
catgcctatttgattccatctaaga

SEQ ID NO: 4183763 - DNA, 25 bp, Homo sapien
cacattagattacacagttctgatc

SEQ ID NO: 4183764 - DNA, 25 bp, Homo sapien
acaccgagagactggaaccgttcct

SEQ ID NO: 4183765 - DNA, 25 bp, Homo sapien
gagactggaaccgttcctgtcctgc

SEQ ID NO: 4183766 - DNA, 25 bp, Homo sapien
tctgcacctctgtagaaggccacac

SEQ ID NO: 4183767 - DNA, 25 bp, Homo sapien
agcagtctgcacctctgtagaaggc

SEQ ID NO: 4183768 - DNA, 25 bp, Homo sapien
ctccagctatctagggttttgaatg

SEQ ID NO: 4183769 - DNA, 25 bp, Homo sapien
tctccagctatctagggttttgaat

SEQ ID NO: 4183770 - DNA, 25 bp, Homo sapien
ctctccagctatctagggttttgaa

SEQ ID NO: 4183771 - DNA, 25 bp, Homo sapien
tccagctatctagggttttgaatgt

SEQ ID NO: 4183772 - DNA, 25 bp, Homo sapien
tgtttcccaacacaacaaatgggaa

SEQ ID NO: 4183773 - DNA, 25 bp, Homo sapien
gtctgttttcgaggtcaatcttgtt

SEQ ID NO: 4183774 - DNA, 25 bp, Homo sapien
ttttcaggatctcggggactggcct

SEQ ID NO: 4183775 - DNA, 25 bp, Homo sapien
gaagttttcaggatctcggggactg

SEQ ID NO: 4183776 - DNA, 25 bp, Homo sapien
caggcctgtgcccgctttgtggcca

SEQ ID NO: 4183777 - DNA, 25 bp, Homo sapien
aggcctgtgcccgctttgtggccac

SEQ ID NO: 4183778 - DNA, 25 bp, Homo sapien
tggtctcaaagtagggaatgttgtt

SEQ ID NO: 4183779 - DNA, 25 bp, Homo sapien
cattccgtgcaatcgtctggaacgc

SEQ ID NO: 4183780 - DNA, 25 bp, Homo sapien
cgtgcaatcgtctggaacgcctgct

SEQ ID NO: 4183781 - DNA, 25 bp, Homo sapien
cttaagtgcattccgtgcaatcgtc

SEQ ID NO: 4183782 - DNA, 25 bp, Homo sapien
cgtctggaacgcctgctccacgttg

SEQ ID NO: 4183783 - DNA, 25 bp, Homo sapien
tgcactcctaatagctttgctgggt

SEQ ID NO: 4183784 - DNA, 25 bp, Homo sapien
tcacatgccatgaagtgtacaattc

SEQ ID NO: 4183785 - DNA, 25 bp, Homo sapien
aaataacagctttggctgagcatgg

SEQ ID NO: 4183786 - DNA, 25 bp, Homo sapien
tgaagcaggtcgaccacctgaagtc

SEQ ID NO: 4183787 - DNA, 25 bp, Homo sapien
caggaaattcgttgtacagctccac

SEQ ID NO: 4183788 - DNA, 25 bp, Homo sapien
ataggttcaggaaattcgttgtaca

SEQ ID NO: 4183789 - DNA, 25 bp, Homo sapien
tcgttgtacagctccacctccgttt

SEQ ID NO: 4183790 - DNA, 25 bp, Homo sapien
gaaattcgttgtacagctccacctc

SEQ ID NO: 4183791 - DNA, 25 bp, Homo sapien
tgctgccatactcgcgggctcatgt

SEQ ID NO: 4183792 - DNA, 25 bp, Homo sapien
caagggctggagtttgattacgtca

SEQ ID NO: 4183793 - DNA, 25 bp, Homo sapien
gaattgtgttgaaggcctacgtgtg

SEQ ID NO: 4183794 - DNA, 25 bp, Homo sapien
gaatgacttccaccgctggcttgtc

SEQ ID NO: 4183795 - DNA, 25 bp, Homo sapien
gattcttttctaagaagcattacat

SEQ ID NO: 4183796 - DNA, 25 bp, Homo sapien
cctgatcagactgggtgtgagcctg

SEQ ID NO: 4183797 - DNA, 25 bp, Homo sapien
attggttgcatatattaacatgtac

SEQ ID NO: 4183798 - DNA, 25 bp, Homo sapien
taaatggatactgtaaaaagatctg

SEQ ID NO: 4183799 - DNA, 25 bp, Homo sapien
tgcattacaggacttaaacacataa

SEQ ID NO: 4183800 - DNA, 25 bp, Homo sapien
tacaggacttaaacacataatccaa

SEQ ID NO: 4183801 - DNA, 25 bp, Homo sapien
caggcctgcattacaggacttaaac

SEQ ID NO: 4183802 - DNA, 25 bp, Homo sapien
cagggttcaaccctccaccttacag

SEQ ID NO: 4183803 - DNA, 25 bp, Homo sapien
cacaccctagaatgtagacctttgg

SEQ ID NO: 4183804 - DNA, 25 bp, Homo sapien
aaaggagcgccttctagaacaaagg

SEQ ID NO: 4183805 - DNA, 25 bp, Homo sapien
cagatcctaggaagggagcagaact

SEQ ID NO: 4183806 - DNA, 25 bp, Homo sapien
tgtacagaatactgccgctagctgg

SEQ ID NO: 4183807 - DNA, 25 bp, Homo sapien
aaactagggacaggcactacaggac

SEQ ID NO: 4183808 - DNA, 25 bp, Homo sapien
ctacaggaccagatatgagagggcc

SEQ ID NO: 4183809 - DNA, 25 bp, Homo sapien
cacctacaggatatgcatggctcag

SEQ ID NO: 4183810 - DNA, 25 bp, Homo sapien
gagggctctcttgcttgataaggca

SEQ ID NO: 4183811 - DNA, 25 bp, Homo sapien
ttcaggatgattatgtcaaactgag

SEQ ID NO: 4183812 - DNA, 25 bp, Homo sapien
tgattatgtcaaactgaggatccat

SEQ ID NO: 4183813 - DNA, 25 bp, Homo sapien
gtagggcaagttcaggatgattatg

SEQ ID NO: 4183814 - DNA, 25 bp, Homo sapien
ggcaagttcaggatgattatgtcaa

SEQ ID NO: 4183815 - DNA, 25 bp, Homo sapien
tgtcattgtccagagccatgggtgg

SEQ ID NO: 4183816 - DNA, 25 bp, Homo sapien
tccgatcattgggtgaggcttcaac

SEQ ID NO: 4183817 - DNA, 25 bp, Homo sapien
gcttctacagaagctctgggccaaa

SEQ ID NO: 4183818 - DNA, 25 bp, Homo sapien
caagttcacatactagaagggccag

SEQ ID NO: 4183819 - DNA, 25 bp, Homo sapien
tggccagaaatcctttgccgaatgg

SEQ ID NO: 4183820 - DNA, 25 bp, Homo sapien
cggctggccagaaatcctttgccga

SEQ ID NO: 4183821 - DNA, 25 bp, Homo sapien
ccagaaatcctttgccgaatggatc

SEQ ID NO: 4183822 - DNA, 25 bp, Homo sapien
gctctctgagggtagcggctggcca

SEQ ID NO: 4183823 - DNA, 25 bp, Homo sapien
tgcagtttccagcttgtgctgcctg

SEQ ID NO: 4183824 - DNA, 25 bp, Homo sapien
tggcctgcaggcctgtaactggtgc

SEQ ID NO: 4183825 - DNA, 25 bp, Homo sapien
gctctgagtctgtgcgctcctgtgg

SEQ ID NO: 4183826 - DNA, 25 bp, Homo sapien
tgctgcctgtgactgcggcaagcct

SEQ ID NO: 4183827 - DNA, 25 bp, Homo sapien
ttgaacattggagccataaaacttc

SEQ ID NO: 4183828 - DNA, 25 bp, Homo sapien
ctgcaagacggtttgaagagatgtg

SEQ ID NO: 4183829 - DNA, 25 bp, Homo sapien
tgtgttttgaacattggagccataa

SEQ ID NO: 4183830 - DNA, 25 bp, Homo sapien
gcatcagcattttttatgcgtcatc

SEQ ID NO: 4183831 - DNA, 25 bp, Homo sapien
gcaccagcggctccagttgctgcag

SEQ ID NO: 4183832 - DNA, 25 bp, Homo sapien
gagatgatctaaatctgcctgagag

SEQ ID NO: 4183833 - DNA, 25 bp, Homo sapien
ggagccggtgctggaggtgcggtgg

SEQ ID NO: 4183834 - DNA, 25 bp, Homo sapien
gccagggagatgatctaaatctgcc

SEQ ID NO: 4183835 - DNA, 25 bp, Homo sapien
ggactgatctactattggcttcttt

SEQ ID NO: 4183836 - DNA, 25 bp, Homo sapien
gatagctggtaaacttgttcctggg

SEQ ID NO: 4183837 - DNA, 25 bp, Homo sapien
taaaatttgagtccgtggactgtga

SEQ ID NO: 4183838 - DNA, 25 bp, Homo sapien
acctgatcagattgaaggatgccta

SEQ ID NO: 4183839 - DNA, 25 bp, Homo sapien
caacatgccccgagacagataacaa

SEQ ID NO: 4183840 - DNA, 25 bp, Homo sapien
agttttccatctgctattctactac

SEQ ID NO: 4183841 - DNA, 25 bp, Homo sapien
cctacacatcaagcttgaagatttg

SEQ ID NO: 4183842 - DNA, 25 bp, Homo sapien
atgcgatagcacaagccactagccc

SEQ ID NO: 4183843 - DNA, 25 bp, Homo sapien
acaggtggcccgcagaggacatagc

SEQ ID NO: 4183844 - DNA, 25 bp, Homo sapien
gtggccctgacttgagacaccctga

SEQ ID NO: 4183845 - DNA, 25 bp, Homo sapien
tgcacttggtcagctgtaggtcttg

SEQ ID NO: 4183846 - DNA, 25 bp, Homo sapien
cagaggacatagctgcacttggtca

SEQ ID NO: 4183847 - DNA, 25 bp, Homo sapien
gggacattcttcttgggagggactg

SEQ ID NO: 4183848 - DNA, 25 bp, Homo sapien
gacattcttcttgggagggactgac

SEQ ID NO: 4183849 - DNA, 25 bp, Homo sapien
gcctctgttggggggacattcttct

SEQ ID NO: 4183850 - DNA, 25 bp, Homo sapien
tccagcagcctctgttggggggaca

SEQ ID NO: 4183851 - DNA, 25 bp, Homo sapien
taaaccagctgatgtggaattcctg

SEQ ID NO: 4183852 - DNA, 25 bp, Homo sapien
tgctgacaccatacagagaacctgg

SEQ ID NO: 4183853 - DNA, 25 bp, Homo sapien
cagttgcccaagcagggacagaagt

SEQ ID NO: 4183854 - DNA, 25 bp, Homo sapien
ggattccagcccgagaacatctcag

SEQ ID NO: 4183855 - DNA, 25 bp, Homo sapien
ctctggtccccgctatcctcttgga

SEQ ID NO: 4183856 - DNA, 25 bp, Homo sapien
ccccactaaggctgtgactctggtc

SEQ ID NO: 4183857 - DNA, 25 bp, Homo sapien
tccaaggtagacatagcttgctgct

SEQ ID NO: 4183858 - DNA, 25 bp, Homo sapien
gaggccccactaaggctgtgactct

SEQ ID NO: 4183859 - DNA, 25 bp, Homo sapien
caaacatgacaggtcagccacgtgt

SEQ ID NO: 4183860 - DNA, 25 bp, Homo sapien
tggagagttgttgctcaaaggacca

SEQ ID NO: 4183861 - DNA, 25 bp, Homo sapien
ggcaaattccacatgaagttacgga

SEQ ID NO: 4183862 - DNA, 25 bp, Homo sapien
tgttgaccccgtagaagtagcgagt

SEQ ID NO: 4183863 - DNA, 25 bp, Homo sapien
gcagcctgcgaaacgagtgaaactc

SEQ ID NO: 4183864 - DNA, 25 bp, Homo sapien
gcactgcagcctgcgaaacgagtga

SEQ ID NO: 4183865 - DNA, 25 bp, Homo sapien
cactgcagcctgcgaaacgagtgaa

SEQ ID NO: 4183866 - DNA, 25 bp, Homo sapien
ctgcagcctgcgaaacgagtgaaac

SEQ ID NO: 4183867 - DNA, 25 bp, Homo sapien
accaggagcactgtattgcctgcca

SEQ ID NO: 4183868 - DNA, 25 bp, Homo sapien
ctggaggaccaggagcactgtattg

SEQ ID NO: 4183869 - DNA, 25 bp, Homo sapien
gaagggaggactcttcttctgtctc

SEQ ID NO: 4183870 - DNA, 25 bp, Homo sapien
gaggaccaggagcactgtattgcct

SEQ ID NO: 4183871 - DNA, 25 bp, Homo sapien
tgggagacagacagtgggtgcctca

SEQ ID NO: 4183872 - DNA, 25 bp, Homo sapien
gggagacagacagtgggtgcctcat

SEQ ID NO: 4183873 - DNA, 25 bp, Homo sapien
tatgggagacagacagtgggtgcct

SEQ ID NO: 4183874 - DNA, 25 bp, Homo sapien
cttatgggagacagacagtgggtgc

SEQ ID NO: 4183875 - DNA, 25 bp, Homo sapien
gtcaaaggttatgcgggccacatcc

SEQ ID NO: 4183876 - DNA, 25 bp, Homo sapien
agcttgttcaggtcaaaggttatgc

SEQ ID NO: 4183877 - DNA, 25 bp, Homo sapien
aaggttatgcgggccacatccatct

SEQ ID NO: 4183878 - DNA, 25 bp, Homo sapien
caaaggttatgcgggccacatccat

SEQ ID NO: 4183879 - DNA, 25 bp, Homo sapien
tgcagtgtagatcataggaaatgga

SEQ ID NO: 4183880 - DNA, 25 bp, Homo sapien
gtacacatcatagaaagtcgccttc

SEQ ID NO: 4183881 - DNA, 25 bp, Homo sapien
acacatcatagaaagtcgccttcac

SEQ ID NO: 4183882 - DNA, 25 bp, Homo sapien
aggaaatggagtacacatcatagaa

SEQ ID NO: 4183883 - DNA, 25 bp, Homo sapien
ttaataatgtcacctggactctctc

SEQ ID NO: 4183884 - DNA, 25 bp, Homo sapien
tgacctctctaggtgaccttcacag

SEQ ID NO: 4183885 - DNA, 25 bp, Homo sapien
ggcccttattatatcgacttcacag

SEQ ID NO: 4183886 - DNA, 25 bp, Homo sapien
cttggctgcacgtgggtgcttaata

SEQ ID NO: 4183887 - DNA, 25 bp, Homo sapien
gggctctaggatgtagtgaagtagc

SEQ ID NO: 4183888 - DNA, 25 bp, Homo sapien
tgccccagctggcatgctacatgac

SEQ ID NO: 4183889 - DNA, 25 bp, Homo sapien
tgctacatgactcagtgtagagtgc

SEQ ID NO: 4183890 - DNA, 25 bp, Homo sapien
tcagtgtagagtgcccacgatggca

SEQ ID NO: 4183891 - DNA, 25 bp, Homo sapien
catcaggttcctgtggaaatgtttc

SEQ ID NO: 4183892 - DNA, 25 bp, Homo sapien
tcttttggtggtggtactgtagggc

SEQ ID NO: 4183893 - DNA, 25 bp, Homo sapien
cagatagtatttgccggaacttgcc

SEQ ID NO: 4183894 - DNA, 25 bp, Homo sapien
aagatattttatgttgtagttggca

SEQ ID NO: 4183895 - DNA, 25 bp, Homo sapien
aggtgtccagcttgtagcctatcat

SEQ ID NO: 4183896 - DNA, 25 bp, Homo sapien
ccatagggcagtataacagggagtt

SEQ ID NO: 4183897 - DNA, 25 bp, Homo sapien
caccatagggcagtataacagggag

SEQ ID NO: 4183898 - DNA, 25 bp, Homo sapien
gggcagtataacagggagttgcaca

SEQ ID NO: 4183899 - DNA, 25 bp, Homo sapien
tcagctccacaaaggtctgacaaat

SEQ ID NO: 4183900 - DNA, 25 bp, Homo sapien
atttgccacacagtatttgtttctt

SEQ ID NO: 4183901 - DNA, 25 bp, Homo sapien
cacaaaggtctgacaaatggtaagg

SEQ ID NO: 4183902 - DNA, 25 bp, Homo sapien
ggtctgacaaatggtaaggttctgt

SEQ ID NO: 4183903 - DNA, 25 bp, Homo sapien
caggcagcaatgtgttgatgagtcc

SEQ ID NO: 4183904 - DNA, 25 bp, Homo sapien
ttaaccttcccgaaaagatgcagcg

SEQ ID NO: 4183905 - DNA, 25 bp, Homo sapien
cctcgtgatcaaagagcagctcctg

SEQ ID NO: 4183906 - DNA, 25 bp, Homo sapien
gaattccatggacatcacgagctct

SEQ ID NO: 4183907 - DNA, 25 bp, Homo sapien
agattggaaggtactgtgcagcaga

SEQ ID NO: 4183908 - DNA, 25 bp, Homo sapien
caacccagccaatagtaacagctag

SEQ ID NO: 4183909 - DNA, 25 bp, Homo sapien
tagagcccagtgagatatgtagtgc

SEQ ID NO: 4183910 - DNA, 25 bp, Homo sapien
cctcttagaggtgaaaggcttagcc

SEQ ID NO: 4183911 - DNA, 25 bp, Homo sapien
cagtctccccttcttagcgccgcag

SEQ ID NO: 4183912 - DNA, 25 bp, Homo sapien
cacacacacgtctgatgacgttact

SEQ ID NO: 4183913 - DNA, 25 bp, Homo sapien
tctccccttcttagcgccgcaggga

SEQ ID NO: 4183914 - DNA, 25 bp, Homo sapien
gctgcccgatgttccccagcctcag

SEQ ID NO: 4183915 - DNA, 25 bp, Homo sapien
tagccgccggttcgcggtagagacc

SEQ ID NO: 4183916 - DNA, 25 bp, Homo sapien
tctttggcgaaagctcgtacaggcg

SEQ ID NO: 4183917 - DNA, 25 bp, Homo sapien
tcttgattttgcctaggaaaagctc

SEQ ID NO: 4183918 - DNA, 25 bp, Homo sapien
cgcagccgtggtgcgcaggaagagc

SEQ ID NO: 4183919 - DNA, 25 bp, Homo sapien
tcggccgcagggtgtatctctctgg

SEQ ID NO: 4183920 - DNA, 25 bp, Homo sapien
tccggagtgttaacacgcctcggcc

SEQ ID NO: 4183921 - DNA, 25 bp, Homo sapien
agacagcaagggttcgcccagggct

SEQ ID NO: 4183922 - DNA, 25 bp, Homo sapien
cctggaactcaggaatccggagtgt

SEQ ID NO: 4183923 - DNA, 25 bp, Homo sapien
ggaaggaagccccagggcgctggaa

SEQ ID NO: 4183924 - DNA, 25 bp, Homo sapien
gaagccccagggcgctggaaggtga

SEQ ID NO: 4183925 - DNA, 25 bp, Homo sapien
aaggaagccccagggcgctggaagg

SEQ ID NO: 4183926 - DNA, 25 bp, Homo sapien
ctggggaaggaagccccagggcgct

SEQ ID NO: 4183927 - DNA, 25 bp, Homo sapien
cgggacatgacgtactgaaggaact

SEQ ID NO: 4183928 - DNA, 25 bp, Homo sapien
cagaaactatgtgcaggctccacca

SEQ ID NO: 4183929 - DNA, 25 bp, Homo sapien
ctggccagcgggacatgacgtactg

SEQ ID NO: 4183930 - DNA, 25 bp, Homo sapien
cctcacaaggttcctgagatacaga

SEQ ID NO: 4183931 - DNA, 25 bp, Homo sapien
tttcattaagttcatcttggctaac

SEQ ID NO: 4183932 - DNA, 25 bp, Homo sapien
tcagtgaagaatttttccacgggtc

SEQ ID NO: 4183933 - DNA, 25 bp, Homo sapien
cacgggtcccaagaactgattgatt

SEQ ID NO: 4183934 - DNA, 25 bp, Homo sapien
ggtcccaagaactgattgatttcat

SEQ ID NO: 4183935 - DNA, 25 bp, Homo sapien
cggcaatggtaaagaaaaccataca

SEQ ID NO: 4183936 - DNA, 25 bp, Homo sapien
aatcggcaatggtaaagaaaaccat

SEQ ID NO: 4183937 - DNA, 25 bp, Homo sapien
tcggcaatggtaaagaaaaccatac

SEQ ID NO: 4183938 - DNA, 25 bp, Homo sapien
atcggcaatggtaaagaaaaccata

SEQ ID NO: 4183939 - DNA, 25 bp, Homo sapien
aaatgcacgtgtcaggacaggtgcg

SEQ ID NO: 4183940 - DNA, 25 bp, Homo sapien
ggcggtgcgtgctataattccagct

SEQ ID NO: 4183941 - DNA, 25 bp, Homo sapien
tttcttgctttaaatgcacgtgtca

SEQ ID NO: 4183942 - DNA, 25 bp, Homo sapien
cgtggcggtgcgtgctataattcca

SEQ ID NO: 4183943 - DNA, 25 bp, Homo sapien
taaaatgttcagctagatagccacc

SEQ ID NO: 4183944 - DNA, 25 bp, Homo sapien
tatctgggccaaggtttacttcact

SEQ ID NO: 4183945 - DNA, 25 bp, Homo sapien
tagccacctcatggcagtatctggg

SEQ ID NO: 4183946 - DNA, 25 bp, Homo sapien
gctgccagagctaggtggtgttcta

SEQ ID NO: 4183947 - DNA, 25 bp, Homo sapien
gattaaacaaatataagctatgttt

SEQ ID NO: 4183948 - DNA, 25 bp, Homo sapien
ttgattaaacaaatataagctatgt

SEQ ID NO: 4183949 - DNA, 25 bp, Homo sapien
cttgattaaacaaatataagctatg

SEQ ID NO: 4183950 - DNA, 25 bp, Homo sapien
tgattaaacaaatataagctatgtt

SEQ ID NO: 4183951 - DNA, 25 bp, Homo sapien
tcttctgggacttgcagcccaaaaa

SEQ ID NO: 4183952 - DNA, 25 bp, Homo sapien
tctgggacttgcagcccaaaaagcc

SEQ ID NO: 4183953 - DNA, 25 bp, Homo sapien
tcctggtcaatttttcgggagtcca

SEQ ID NO: 4183954 - DNA, 25 bp, Homo sapien
ctgggattttcccttcctggtcaat

SEQ ID NO: 4183955 - DNA, 25 bp, Homo sapien
ggtgtcatctattccagcaactaga

SEQ ID NO: 4183956 - DNA, 25 bp, Homo sapien
aagtagcccaccacggatggtgtca

SEQ ID NO: 4183957 - DNA, 25 bp, Homo sapien
ggatggtgtcatctattccagcaac

SEQ ID NO: 4183958 - DNA, 25 bp, Homo sapien
caagtagcccaccacggatggtgtc

SEQ ID NO: 4183959 - DNA, 25 bp, Homo sapien
cttgaggccaatagcctggtgcgct

SEQ ID NO: 4183960 - DNA, 25 bp, Homo sapien
aggccaatagcctggtgcgctgcca

SEQ ID NO: 4183961 - DNA, 25 bp, Homo sapien
tgctgatgatctcccctagtcttga

SEQ ID NO: 4183962 - DNA, 25 bp, Homo sapien
gatgatctcccctagtcttgagtac

SEQ ID NO: 4183963 - DNA, 25 bp, Homo sapien
attcagagggagcaagcctctggcc

SEQ ID NO: 4183964 - DNA, 25 bp, Homo sapien
aattcagagggagcaagcctctggc

SEQ ID NO: 4183965 - DNA, 25 bp, Homo sapien
cccaattcagagggagcaagcctct

SEQ ID NO: 4183966 - DNA, 25 bp, Homo sapien
cagagggagcaagcctctggcctct

SEQ ID NO: 4183967 - DNA, 25 bp, Homo sapien
gattcagaaggaagggacatgcgac

SEQ ID NO: 4183968 - DNA, 25 bp, Homo sapien
aggaagggacatgcgacccaaaggc

SEQ ID NO: 4183969 - DNA, 25 bp, Homo sapien
gcagtgtgtgaggattgagcaccat

SEQ ID NO: 4183970 - DNA, 25 bp, Homo sapien
ccaaaggccactgcgcatgtgggca

SEQ ID NO: 4183971 - DNA, 25 bp, Homo sapien
gagccgagcatggtgtgcattcagc

SEQ ID NO: 4183972 - DNA, 25 bp, Homo sapien
taatgagattgccagtaagggcggt

SEQ ID NO: 4183973 - DNA, 25 bp, Homo sapien
taaacatctgcatgaatgtgtgcgc

SEQ ID NO: 4183974 - DNA, 25 bp, Homo sapien
cactgacagggtctggatgatgcaa

SEQ ID NO: 4183975 - DNA, 25 bp, Homo sapien
cggacgccagtttaggcaagtattt

SEQ ID NO: 4183976 - DNA, 25 bp, Homo sapien
gacgccagtttaggcaagtatttgg

SEQ ID NO: 4183977 - DNA, 25 bp, Homo sapien
cctcagtgccagccaagatgatccc

SEQ ID NO: 4183978 - DNA, 25 bp, Homo sapien
cccggacgccagtttaggcaagtat

SEQ ID NO: 4183979 - DNA, 25 bp, Homo sapien
ttgaggatgtagtgcttcttgtctt

SEQ ID NO: 4183980 - DNA, 25 bp, Homo sapien
gaggatgtagtgcttcttgtcttca

SEQ ID NO: 4183981 - DNA, 25 bp, Homo sapien
tgaggatgtagtgcttcttgtcttc

SEQ ID NO: 4183982 - DNA, 25 bp, Homo sapien
tgtggagagtgctcactcagtggca

SEQ ID NO: 4183983 - DNA, 25 bp, Homo sapien
tgactgagaccctaatgtggccatg

SEQ ID NO: 4183984 - DNA, 25 bp, Homo sapien
cagctcaagaaggtagtcggtgcta

SEQ ID NO: 4183985 - DNA, 25 bp, Homo sapien
gcagcaggtacaatccctggtgtgt

SEQ ID NO: 4183986 - DNA, 25 bp, Homo sapien
tgttggagccccgaatgcctaattt

SEQ ID NO: 4183987 - DNA, 25 bp, Homo sapien
ccagtcctccattagtaatccagac

SEQ ID NO: 4183988 - DNA, 25 bp, Homo sapien
cagtaaaaatattggccagtcctcc

SEQ ID NO: 4183989 - DNA, 25 bp, Homo sapien
gggtttcccattagtgactccacca

SEQ ID NO: 4183990 - DNA, 25 bp, Homo sapien
tccacaggtatcttggtgttttcaa

SEQ ID NO: 4183991 - DNA, 25 bp, Homo sapien
tctccgacctctccaaggatgtttt

SEQ ID NO: 4183992 - DNA, 25 bp, Homo sapien
aaggatgttttccacaggtatcttg

SEQ ID NO: 4183993 - DNA, 25 bp, Homo sapien
ttaaacccatctccgacctctccaa

SEQ ID NO: 4183994 - DNA, 25 bp, Homo sapien
aaccggccgctgttgaggatgttca

SEQ ID NO: 4183995 - DNA, 25 bp, Homo sapien
caatcaatctcttgagcagcccagc

SEQ ID NO: 4183996 - DNA, 25 bp, Homo sapien
cagccacgacgctgcccatgctgaa

SEQ ID NO: 4183997 - DNA, 25 bp, Homo sapien
tgcccatgctgaaccggccgctgtt

SEQ ID NO: 4183998 - DNA, 25 bp, Homo sapien
tgtgcaggcgtactcagcagtcatt

SEQ ID NO: 4183999 - DNA, 25 bp, Homo sapien
gtttccttgtgcaggcgtactcagc

SEQ ID NO: 4184000 - DNA, 25 bp, Homo sapien
ctgagcctcttgttaaactgtttcc

SEQ ID NO: 4184001 - DNA, 25 bp, Homo sapien
tgaatcaatccaaattcactgagcc

SEQ ID NO: 4184002 - DNA, 25 bp, Homo sapien
tggagtgttcagaaaaaacacaaga

SEQ ID NO: 4184003 - DNA, 25 bp, Homo sapien
ctggagtgttcagaaaaaacacaag

SEQ ID NO: 4184004 - DNA, 25 bp, Homo sapien
gagtgttcagaaaaaacacaagaaa

SEQ ID NO: 4184005 - DNA, 25 bp, Homo sapien
ggagtgttcagaaaaaacacaagaa

SEQ ID NO: 4184006 - DNA, 25 bp, Homo sapien
cctcgatggagcagtcgggaaagcc

SEQ ID NO: 4184007 - DNA, 25 bp, Homo sapien
tccatgacgtaagccttctgagcca

SEQ ID NO: 4184008 - DNA, 25 bp, Homo sapien
cgggaaagccaggttggtccagcat

SEQ ID NO: 4184009 - DNA, 25 bp, Homo sapien
tcatactctccatgacgtaagcctt

SEQ ID NO: 4184010 - DNA, 25 bp, Homo sapien
tgtcacactgaatcctttccaaaag

SEQ ID NO: 4184011 - DNA, 25 bp, Homo sapien
acactgaatcctttccaaaaggagg

SEQ ID NO: 4184012 - DNA, 25 bp, Homo sapien
ctgtggggtgtcacactgaatcctt

SEQ ID NO: 4184013 - DNA, 25 bp, Homo sapien
tgtggggtgtcacactgaatccttt

SEQ ID NO: 4184014 - DNA, 25 bp, Homo sapien
tatgcgctcgtacggatagtccctt

SEQ ID NO: 4184015 - DNA, 25 bp, Homo sapien
ggatagtcccttgtgtagcccaagc

SEQ ID NO: 4184016 - DNA, 25 bp, Homo sapien
cgcagtatgcgctcgtacggatagt

SEQ ID NO: 4184017 - DNA, 25 bp, Homo sapien
atgcgggtgtcacgcagtatgcgct

SEQ ID NO: 4184018 - DNA, 25 bp, Homo sapien
ctggtagtcaggatgcggccggcat

SEQ ID NO: 4184019 - DNA, 25 bp, Homo sapien
tacatccggagaatctcattggttc

SEQ ID NO: 4184020 - DNA, 25 bp, Homo sapien
cccgtcagggcgatgtacatccgga

SEQ ID NO: 4184021 - DNA, 25 bp, Homo sapien
gctgcagacccgtcagggcgatgta

SEQ ID NO: 4184022 - DNA, 25 bp, Homo sapien
gattttggattactgtgcccctagg

SEQ ID NO: 4184023 - DNA, 25 bp, Homo sapien
tcctgtgaaggagacaaaatgctac

SEQ ID NO: 4184024 - DNA, 25 bp, Homo sapien
tgaggcctggcacctttaaagggac

SEQ ID NO: 4184025 - DNA, 25 bp, Homo sapien
ggttctgaaaaaccagctgcctcta

SEQ ID NO: 4184026 - DNA, 25 bp, Homo sapien
gctgctggcgctcactgtccagcaa

SEQ ID NO: 4184027 - DNA, 25 bp, Homo sapien
acatggcccattcggcacccagaag

SEQ ID NO: 4184028 - DNA, 25 bp, Homo sapien
gcagaaagtccatggtcctgtgact

SEQ ID NO: 4184029 - DNA, 25 bp, Homo sapien
cccctctggcctgggtatgctgggc

SEQ ID NO: 4184030 - DNA, 25 bp, Homo sapien
cgcaagactggggtgcacaactcca

SEQ ID NO: 4184031 - DNA, 25 bp, Homo sapien
aagcctccggccaacggtatccatg

SEQ ID NO: 4184032 - DNA, 25 bp, Homo sapien
tatccatgactgtgctcactttggc

SEQ ID NO: 4184033 - DNA, 25 bp, Homo sapien
ccaggtccacagttcggcccaggga

SEQ ID NO: 4184034 - DNA, 25 bp, Homo sapien
aaagcggagcagcagtgtctccacg

SEQ ID NO: 4184035 - DNA, 25 bp, Homo sapien
ggagcagcagtgtctccacggtccg

SEQ ID NO: 4184036 - DNA, 25 bp, Homo sapien
ccacggtccggccgaagcagtaggt

SEQ ID NO: 4184037 - DNA, 25 bp, Homo sapien
tccggccgaagcagtaggtgttctc

SEQ ID NO: 4184038 - DNA, 25 bp, Homo sapien
gcaagggtacccatccgagtagcta

SEQ ID NO: 4184039 - DNA, 25 bp, Homo sapien
tcttcaggttgtgggagaacggctc

SEQ ID NO: 4184040 - DNA, 25 bp, Homo sapien
tagggagcctctctacctgaaaggt

SEQ ID NO: 4184041 - DNA, 25 bp, Homo sapien
tggagctgccctcccgattctaggg

SEQ ID NO: 4184042 - DNA, 25 bp, Homo sapien
gcacggccgtcatgccatacaggtt

SEQ ID NO: 4184043 - DNA, 25 bp, Homo sapien
gttgatgaggatgttggccacccgc

SEQ ID NO: 4184044 - DNA, 25 bp, Homo sapien
aatgcggatggagcggctggcccgc

SEQ ID NO: 4184045 - DNA, 25 bp, Homo sapien
ggttgcggagcccaatgcggatgga

SEQ ID NO: 4184046 - DNA, 25 bp, Homo sapien
ctgcaagtaagcttccacgcagaag

SEQ ID NO: 4184047 - DNA, 25 bp, Homo sapien
tctgcaagtaagcttccacgcagaa

SEQ ID NO: 4184048 - DNA, 25 bp, Homo sapien
gcaagtaagcttccacgcagaaggt

SEQ ID NO: 4184049 - DNA, 25 bp, Homo sapien
tgcaagtaagcttccacgcagaagg

SEQ ID NO: 4184050 - DNA, 25 bp, Homo sapien
tcagcatgtcctgtccagagggtgg

SEQ ID NO: 4184051 - DNA, 25 bp, Homo sapien
ggtgggcacagatataggctcgctt

SEQ ID NO: 4184052 - DNA, 25 bp, Homo sapien
tataggctcgcttctcaaggatctg

SEQ ID NO: 4184053 - DNA, 25 bp, Homo sapien
taatctgctcatctaggttttctgg

SEQ ID NO: 4184054 - DNA, 25 bp, Homo sapien
gtcatccagcaacgggccatgggta

SEQ ID NO: 4184055 - DNA, 25 bp, Homo sapien
taacagtcatccagcaacgggccat

SEQ ID NO: 4184056 - DNA, 25 bp, Homo sapien
aaaagagtaacagtcatccagcaac

SEQ ID NO: 4184057 - DNA, 25 bp, Homo sapien
agagtaacagtcatccagcaacggg

SEQ ID NO: 4184058 - DNA, 25 bp, Homo sapien
caggccaggcgacaacccttcaggt

SEQ ID NO: 4184059 - DNA, 25 bp, Homo sapien
ttcaggtgcagacggggaacaaaag

SEQ ID NO: 4184060 - DNA, 25 bp, Homo sapien
gccaggcgacaacccttcaggtgca

SEQ ID NO: 4184061 - DNA, 25 bp, Homo sapien
aggcgacaacccttcaggtgcagac

SEQ ID NO: 4184062 - DNA, 25 bp, Homo sapien
ctgttagagagcactgcctgcaggt

SEQ ID NO: 4184063 - DNA, 25 bp, Homo sapien
tctctccggctcagttcagaagctg

SEQ ID NO: 4184064 - DNA, 25 bp, Homo sapien
tctccggctcagttcagaagctgtg

SEQ ID NO: 4184065 - DNA, 25 bp, Homo sapien
cggctcagttcagaagctgtgatgg

SEQ ID NO: 4184066 - DNA, 25 bp, Homo sapien
tctctctccggctcagttcagaagc

SEQ ID NO: 4184067 - DNA, 25 bp, Homo sapien
gcagcataagccccagtttccacta

SEQ ID NO: 4184068 - DNA, 25 bp, Homo sapien
agcagcataagccccagtttccact

SEQ ID NO: 4184069 - DNA, 25 bp, Homo sapien
cagcagcataagccccagtttccac

SEQ ID NO: 4184070 - DNA, 25 bp, Homo sapien
cagcataagccccagtttccactat

SEQ ID NO: 4184071 - DNA, 25 bp, Homo sapien
tcttagagaatgtgtggttgagcag

SEQ ID NO: 4184072 - DNA, 25 bp, Homo sapien
ttaaatgaatgacccagacagagct

SEQ ID NO: 4184073 - DNA, 25 bp, Homo sapien
cagaaatggctatccacacctgaca

SEQ ID NO: 4184074 - DNA, 25 bp, Homo sapien
tcctggtacatgttttaagtgcctc

SEQ ID NO: 4184075 - DNA, 25 bp, Homo sapien
cagtaggccctagatctcccaggtt

SEQ ID NO: 4184076 - DNA, 25 bp, Homo sapien
caggtgaacgtgatggcttcctctc

SEQ ID NO: 4184077 - DNA, 25 bp, Homo sapien
caaacttggttaacagagccagaac

SEQ ID NO: 4184078 - DNA, 25 bp, Homo sapien
tgatcacagctccatggaagtgcta

SEQ ID NO: 4184079 - DNA, 25 bp, Homo sapien
tgatctctaggtgtccagccaagag

SEQ ID NO: 4184080 - DNA, 25 bp, Homo sapien
ggtcttgctgtaccagtccctccaa

SEQ ID NO: 4184081 - DNA, 25 bp, Homo sapien
tgactgatctctaggtgtccagcca

SEQ ID NO: 4184082 - DNA, 25 bp, Homo sapien
cagagacaggaaacgtaggtcttgc

SEQ ID NO: 4184083 - DNA, 25 bp, Homo sapien
gaagacaggtctaaaggcttcctga

SEQ ID NO: 4184084 - DNA, 25 bp, Homo sapien
ggattctagccccaagtgtgacatt

SEQ ID NO: 4184085 - DNA, 25 bp, Homo sapien
gcttcctgagcttcaacactattac

SEQ ID NO: 4184086 - DNA, 25 bp, Homo sapien
gaggcaaatcccttcatgccctggg

SEQ ID NO: 4184087 - DNA, 25 bp, Homo sapien
tttcaggatctcaagctgccaccca

SEQ ID NO: 4184088 - DNA, 25 bp, Homo sapien
tggagcccctggacttgaaggaaga

SEQ ID NO: 4184089 - DNA, 25 bp, Homo sapien
tgacaggtcttcagagcgacaccga

SEQ ID NO: 4184090 - DNA, 25 bp, Homo sapien
aggattacctctcagccatggtgga

SEQ ID NO: 4184091 - DNA, 25 bp, Homo sapien
gcttatcaaggcagctaccaacaga

SEQ ID NO: 4184092 - DNA, 25 bp, Homo sapien
ccttacagggctactgcacagtcat

SEQ ID NO: 4184093 - DNA, 25 bp, Homo sapien
ccaagatcctcaatgtaagctcaga

SEQ ID NO: 4184094 - DNA, 25 bp, Homo sapien
caactgtagcatccttacctctggg

SEQ ID NO: 4184095 - DNA, 25 bp, Homo sapien
acagatgaaagccaatcagctaggg

SEQ ID NO: 4184096 - DNA, 25 bp, Homo sapien
tagacaaggctcagatgttgagagg

SEQ ID NO: 4184097 - DNA, 25 bp, Homo sapien
gaggtgttctgttccacactaaatg

SEQ ID NO: 4184098 - DNA, 25 bp, Homo sapien
ggtcagtgggggatctcaactatac

SEQ ID NO: 4184099 - DNA, 25 bp, Homo sapien
ggatcgcttgaagtctggcgttcga

SEQ ID NO: 4184100 - DNA, 25 bp, Homo sapien
caaacctgtatctttgtgttgaaag

SEQ ID NO: 4184101 - DNA, 25 bp, Homo sapien
tagatagcatattgttagcttgaaa

SEQ ID NO: 4184102 - DNA, 25 bp, Homo sapien
tctccctttagttgtcaaacctgta

SEQ ID NO: 4184103 - DNA, 25 bp, Homo sapien
gacacaatcgatctatgagccttgg

SEQ ID NO: 4184104 - DNA, 25 bp, Homo sapien
tcaaacagatgagacaagagtgcat

SEQ ID NO: 4184105 - DNA, 25 bp, Homo sapien
gccttaatacattcagctaactgaa

SEQ ID NO: 4184106 - DNA, 25 bp, Homo sapien
ttgcctcatattgggcgccaggaat

SEQ ID NO: 4184107 - DNA, 25 bp, Homo sapien
tagcagcactgcctactatggtggg

SEQ ID NO: 4184108 - DNA, 25 bp, Homo sapien
tgcctactatggtgggagacaattg

SEQ ID NO: 4184109 - DNA, 25 bp, Homo sapien
actatggtgggagacaattgttgta

SEQ ID NO: 4184110 - DNA, 25 bp, Homo sapien
gcagcactgcctactatggtgggag

SEQ ID NO: 4184111 - DNA, 25 bp, Homo sapien
ttgtgcccctgagttcctgcaaaag

SEQ ID NO: 4184112 - DNA, 25 bp, Homo sapien
agcattggtccattaagcatctgtt

SEQ ID NO: 4184113 - DNA, 25 bp, Homo sapien
cattaagcatctgttgtgcccctga

SEQ ID NO: 4184114 - DNA, 25 bp, Homo sapien
gcccctgagttcctgcaaaaggtaa

SEQ ID NO: 4184115 - DNA, 25 bp, Homo sapien
gctatggaacagtagcagttcgagg

SEQ ID NO: 4184116 - DNA, 25 bp, Homo sapien
ctgttagaaactgggtggcacaaca

SEQ ID NO: 4184117 - DNA, 25 bp, Homo sapien
gaatactattgtgaactgaacatgc

SEQ ID NO: 4184118 - DNA, 25 bp, Homo sapien
gtagcagttcgaggcctgttagaaa

SEQ ID NO: 4184119 - DNA, 25 bp, Homo sapien
ttcttgcaaagactagctattcccc

SEQ ID NO: 4184120 - DNA, 25 bp, Homo sapien
tgaggtccaatgtaagggtctaaat

SEQ ID NO: 4184121 - DNA, 25 bp, Homo sapien
ccagcaacacattgtcttgatgact

SEQ ID NO: 4184122 - DNA, 25 bp, Homo sapien
taaggactctgcttaaagttacgaa

SEQ ID NO: 4184123 - DNA, 25 bp, Homo sapien
tgggtaagttgtctgtcatgtaaat

SEQ ID NO: 4184124 - DNA, 25 bp, Homo sapien
agttgtctgtcatgtaaattatatc

SEQ ID NO: 4184125 - DNA, 25 bp, Homo sapien
tattgaattatactttacaaatggg

SEQ ID NO: 4184126 - DNA, 25 bp, Homo sapien
gctgaggtgggcaattacccaaggt

SEQ ID NO: 4184127 - DNA, 25 bp, Homo sapien
ccctataagtaaggtggcatttatc

SEQ ID NO: 4184128 - DNA, 25 bp, Homo sapien
ggcatttatctcttgcagctttcaa

SEQ ID NO: 4184129 - DNA, 25 bp, Homo sapien
tcttaccactacagtttctgatggg

SEQ ID NO: 4184130 - DNA, 25 bp, Homo sapien
ctctcagctctttgaatctataggc

SEQ ID NO: 4184131 - DNA, 25 bp, Homo sapien
cacatggaaagtggatgctgccaca

SEQ ID NO: 4184132 - DNA, 25 bp, Homo sapien
gggaagactatgcaaagtgacacac

SEQ ID NO: 4184133 - DNA, 25 bp, Homo sapien
caaaatcagcacattgacatgagtc

SEQ ID NO: 4184134 - DNA, 25 bp, Homo sapien
gacagacacacgtagagggaagact

SEQ ID NO: 4184135 - DNA, 25 bp, Homo sapien
gtttcactgaaacctactaagagcc

SEQ ID NO: 4184136 - DNA, 25 bp, Homo sapien
tgtaccttgtagaagcgaaagtggt

SEQ ID NO: 4184137 - DNA, 25 bp, Homo sapien
cactgaaacctactaagagcctgaa

SEQ ID NO: 4184138 - DNA, 25 bp, Homo sapien
ggctgtaccttgtagaagcgaaagt

SEQ ID NO: 4184139 - DNA, 25 bp, Homo sapien
tcactttctcgtagcatcagaacct

SEQ ID NO: 4184140 - DNA, 25 bp, Homo sapien
gagctgccgcatttggcagtttgca

SEQ ID NO: 4184141 - DNA, 25 bp, Homo sapien
cctcttgagaggcaacagtgacaga

SEQ ID NO: 4184142 - DNA, 25 bp, Homo sapien
tgatacttcacctacagcttgtcct

SEQ ID NO: 4184143 - DNA, 25 bp, Homo sapien
gcctggcctagtgttcactcttatg

SEQ ID NO: 4184144 - DNA, 25 bp, Homo sapien
gcagaagcatgtaatcttattcaca

SEQ ID NO: 4184145 - DNA, 25 bp, Homo sapien
agcttagatcccctcaccagtttct

SEQ ID NO: 4184146 - DNA, 25 bp, Homo sapien
tatgggatccgttcatgcagaagca

SEQ ID NO: 4184147 - DNA, 25 bp, Homo sapien
tagcaaccgccaaacgtagctgagt

SEQ ID NO: 4184148 - DNA, 25 bp, Homo sapien
ggcggacgctcctctcagtcttgga

SEQ ID NO: 4184149 - DNA, 25 bp, Homo sapien
gccatttgacaaactgcgcgcagtg

SEQ ID NO: 4184150 - DNA, 25 bp, Homo sapien
tagtaggtgctgacgttccgagtag

SEQ ID NO: 4184151 - DNA, 25 bp, Homo sapien
ccacagcttcctttgcttttattaa

SEQ ID NO: 4184152 - DNA, 25 bp, Homo sapien
cagcttcctttgcttttattaaaga

SEQ ID NO: 4184153 - DNA, 25 bp, Homo sapien
gcccacagcttcctttgcttttatt

SEQ ID NO: 4184154 - DNA, 25 bp, Homo sapien
acagcttcctttgcttttattaaag

SEQ ID NO: 4184155 - DNA, 25 bp, Homo sapien
gtcgcggtctggttggagcggcgcc

SEQ ID NO: 4184156 - DNA, 25 bp, Homo sapien
gggcttagcggtcgcggtctggttg

SEQ ID NO: 4184157 - DNA, 25 bp, Homo sapien
gcggccccagagtttctcgaaagga

SEQ ID NO: 4184158 - DNA, 25 bp, Homo sapien
gcgcccgtgctgaccggctccatcg

SEQ ID NO: 4184159 - DNA, 25 bp, Homo sapien
cggtccagcccgtagtggtgcgcca

SEQ ID NO: 4184160 - DNA, 25 bp, Homo sapien
cgcaggtcgccggtacgggtcacct

SEQ ID NO: 4184161 - DNA, 25 bp, Homo sapien
cgccgcggcagtccaggtggtggaa

SEQ ID NO: 4184162 - DNA, 25 bp, Homo sapien
gcagagcgctcggaagtcggcgcgg

SEQ ID NO: 4184163 - DNA, 25 bp, Homo sapien
gcacgggtgccgaagtagccacaga

SEQ ID NO: 4184164 - DNA, 25 bp, Homo sapien
tcgatgtgctcgctgagagcgccgc

SEQ ID NO: 4184165 - DNA, 25 bp, Homo sapien
ggtcacatctctggagttcccgtca

SEQ ID NO: 4184166 - DNA, 25 bp, Homo sapien
ggcgcgcctcttcatcggtatctga

SEQ ID NO: 4184167 - DNA, 25 bp, Homo sapien
tgtcggggccaggcgcgcagggcgg

SEQ ID NO: 4184168 - DNA, 25 bp, Homo sapien
gggccaggcgcgcagggcgggcggc

SEQ ID NO: 4184169 - DNA, 25 bp, Homo sapien
tcggggccaggcgcgcagggcgggc

SEQ ID NO: 4184170 - DNA, 25 bp, Homo sapien
ctgtcggggccaggcgcgcagggcg

SEQ ID NO: 4184171 - DNA, 25 bp, Homo sapien
aactcgcgcaagctgctattctcct

SEQ ID NO: 4184172 - DNA, 25 bp, Homo sapien
taggcagcgcgcatcactgctctgc

SEQ ID NO: 4184173 - DNA, 25 bp, Homo sapien
ccgcgcaacgcgctcacagtcagga

SEQ ID NO: 4184174 - DNA, 25 bp, Homo sapien
tgcagtgctaggcagcgcgcatcac

SEQ ID NO: 4184175 - DNA, 25 bp, Homo sapien
gcgatgatgtggcggtggagcagaa

SEQ ID NO: 4184176 - DNA, 25 bp, Homo sapien
aaagtggggtatggttgtttgagtg

SEQ ID NO: 4184177 - DNA, 25 bp, Homo sapien
gatgtggcggtggagcagaaaagtg

SEQ ID NO: 4184178 - DNA, 25 bp, Homo sapien
ttaaaggggcaagacgcgatgatgt

SEQ ID NO: 4184179 - DNA, 25 bp, Homo sapien
acttggtggcccgtgagtgcctgat

SEQ ID NO: 4184180 - DNA, 25 bp, Homo sapien
caatagcccagagcgggtctggttc

SEQ ID NO: 4184181 - DNA, 25 bp, Homo sapien
tggtttcttctcaatagcccagagc

SEQ ID NO: 4184182 - DNA, 25 bp, Homo sapien
cacagtgtgagccacattgtctgtt

SEQ ID NO: 4184183 - DNA, 25 bp, Homo sapien
cacatcagaggagtagtttcccgcc

SEQ ID NO: 4184184 - DNA, 25 bp, Homo sapien
catcagaggagtagtttcccgcctc

SEQ ID NO: 4184185 - DNA, 25 bp, Homo sapien
tcagaggagtagtttcccgcctcca

SEQ ID NO: 4184186 - DNA, 25 bp, Homo sapien
cagaggagtagtttcccgcctccac

SEQ ID NO: 4184187 - DNA, 25 bp, Homo sapien
agatgcaccagacgaacgcccgcca

SEQ ID NO: 4184188 - DNA, 25 bp, Homo sapien
agccagatgcaccagacgaacgccc

SEQ ID NO: 4184189 - DNA, 25 bp, Homo sapien
acgcccgccacgacggcggccccat

SEQ ID NO: 4184190 - DNA, 25 bp, Homo sapien
gggcagggggtaagtgccccagcca

SEQ ID NO: 4184191 - DNA, 25 bp, Homo sapien
tcgcctggctcttccagagtccgac

SEQ ID NO: 4184192 - DNA, 25 bp, Homo sapien
tgggtgctcgcctggctcttccaga

SEQ ID NO: 4184193 - DNA, 25 bp, Homo sapien
ctcgtgggtgctcgcctggctcttc

SEQ ID NO: 4184194 - DNA, 25 bp, Homo sapien
gtgggtgctcgcctggctcttccag

SEQ ID NO: 4184195 - DNA, 25 bp, Homo sapien
ccagcgctgcaagccgggcacctgt

SEQ ID NO: 4184196 - DNA, 25 bp, Homo sapien
tgcaagccgggcacctgttgcgcca

SEQ ID NO: 4184197 - DNA, 25 bp, Homo sapien
ctccagctctcgcacgcggtgcagg

SEQ ID NO: 4184198 - DNA, 25 bp, Homo sapien
aagccgggcacctgttgcgccagcg

SEQ ID NO: 4184199 - DNA, 25 bp, Homo sapien
ttgcagctccgcctccagccgccgc

SEQ ID NO: 4184200 - DNA, 25 bp, Homo sapien
cgttgcagctccgcctccagccgcc

SEQ ID NO: 4184201 - DNA, 25 bp, Homo sapien
gcagctccgcctccagccgccgcac

SEQ ID NO: 4184202 - DNA, 25 bp, Homo sapien
ctgtagcgttgcagctccgcctcca

SEQ ID NO: 4184203 - DNA, 25 bp, Homo sapien
gcaatggagcagacttataacttaa

SEQ ID NO: 4184204 - DNA, 25 bp, Homo sapien
tgcacacccgaagtttgggaaaatg

SEQ ID NO: 4184205 - DNA, 25 bp, Homo sapien
catggagaaactgcggaacacgaga

SEQ ID NO: 4184206 - DNA, 25 bp, Homo sapien
ggcagatggttgcagagcaagcaat

SEQ ID NO: 4184207 - DNA, 25 bp, Homo sapien
aatagagggtgtttgtggatgaaca

SEQ ID NO: 4184208 - DNA, 25 bp, Homo sapien
ataaacaaatagagggtgtttgtgg

SEQ ID NO: 4184209 - DNA, 25 bp, Homo sapien
caaatagagggtgtttgtggatgaa

SEQ ID NO: 4184210 - DNA, 25 bp, Homo sapien
ctatgataaacaaatagagggtgtt

SEQ ID NO: 4184211 - DNA, 25 bp, Homo sapien
tgatcgaatccaggaacaaataaga

SEQ ID NO: 4184212 - DNA, 25 bp, Homo sapien
gaacaaataagaatgagcacattca

SEQ ID NO: 4184213 - DNA, 25 bp, Homo sapien
ggaacaaataagaatgagcacattc

SEQ ID NO: 4184214 - DNA, 25 bp, Homo sapien
ttatgatcgaatccaggaacaaata

SEQ ID NO: 4184215 - DNA, 25 bp, Homo sapien
caaggcctggcaaacagcgagtgct

SEQ ID NO: 4184216 - DNA, 25 bp, Homo sapien
tggaaacatagcagtacccacctca

SEQ ID NO: 4184217 - DNA, 25 bp, Homo sapien
tgttccacccaagaggaagcagggt

SEQ ID NO: 4184218 - DNA, 25 bp, Homo sapien
aaagccctgccaagatttgaacctg

SEQ ID NO: 4184219 - DNA, 25 bp, Homo sapien
agggctttgcccgtactgttccaat

SEQ ID NO: 4184220 - DNA, 25 bp, Homo sapien
tcagcaaatgtgtagtcaggccggc

SEQ ID NO: 4184221 - DNA, 25 bp, Homo sapien
ttgaatggtcccttctgccctaggg

SEQ ID NO: 4184222 - DNA, 25 bp, Homo sapien
tcagtctgtcctagtcacgtggtca

SEQ ID NO: 4184223 - DNA, 25 bp, Homo sapien
tcaatagtcacggacatctgagctt

SEQ ID NO: 4184224 - DNA, 25 bp, Homo sapien
tagtcacggacatctgagcttctgg

SEQ ID NO: 4184225 - DNA, 25 bp, Homo sapien
aatagtcacggacatctgagcttct

SEQ ID NO: 4184226 - DNA, 25 bp, Homo sapien
gtcacggacatctgagcttctggca

SEQ ID NO: 4184227 - DNA, 25 bp, Homo sapien
tgtgagcctgagtattgttcctgga

SEQ ID NO: 4184228 - DNA, 25 bp, Homo sapien
cagaagtgaagggaacagctctagc

SEQ ID NO: 4184229 - DNA, 25 bp, Homo sapien
ggaggaaaggcctcttttctcacca

SEQ ID NO: 4184230 - DNA, 25 bp, Homo sapien
catagccactttatagccgaggaaa

SEQ ID NO: 4184231 - DNA, 25 bp, Homo sapien
ggacagctgtccaggagtggtgctg

SEQ ID NO: 4184232 - DNA, 25 bp, Homo sapien
gtcaggaggctaggacagctgtcca

SEQ ID NO: 4184233 - DNA, 25 bp, Homo sapien
tccgtggttctgatggagctgggac

SEQ ID NO: 4184234 - DNA, 25 bp, Homo sapien
ctgtgtggtccgtggttctgatgga

SEQ ID NO: 4184235 - DNA, 25 bp, Homo sapien
tcaaaagcccattacaccgcctggg

SEQ ID NO: 4184236 - DNA, 25 bp, Homo sapien
gagcggtcaaggcatcacatcaaag

SEQ ID NO: 4184237 - DNA, 25 bp, Homo sapien
gacagactttaatccatatgcagaa

SEQ ID NO: 4184238 - DNA, 25 bp, Homo sapien
cagaatacctgtacagcaactgtag

SEQ ID NO: 4184239 - DNA, 25 bp, Homo sapien
gattctgccaacactggaacgggct

SEQ ID NO: 4184240 - DNA, 25 bp, Homo sapien
tcccacggccaaaaggagctggatt

SEQ ID NO: 4184241 - DNA, 25 bp, Homo sapien
gacccgtggatatggcagtgatgcc

SEQ ID NO: 4184242 - DNA, 25 bp, Homo sapien
cagagagacttgactggcctgagcc

SEQ ID NO: 4184243 - DNA, 25 bp, Homo sapien
tacatgaggaatcccaaggttggaa

SEQ ID NO: 4184244 - DNA, 25 bp, Homo sapien
agagctactccactctgcacaggag

SEQ ID NO: 4184245 - DNA, 25 bp, Homo sapien
ttggaattgctggtcaccaatgacc

SEQ ID NO: 4184246 - DNA, 25 bp, Homo sapien
ggagcagtcccagaaaatatgtaaa

SEQ ID NO: 4184247 - DNA, 25 bp, Homo sapien
gccaatggggtgcaaacagacccga

SEQ ID NO: 4184248 - DNA, 25 bp, Homo sapien
gatgcactcgcagaacaacatttgg

SEQ ID NO: 4184249 - DNA, 25 bp, Homo sapien
cagttggaggcagcctagtgtccac

SEQ ID NO: 4184250 - DNA, 25 bp, Homo sapien
ggacacgcacttggtgtcatctgga

SEQ ID NO: 4184251 - DNA, 25 bp, Homo sapien
gcgtctgcaggcgtttccggcgttt

SEQ ID NO: 4184252 - DNA, 25 bp, Homo sapien
gggctgcacgggtagccaatgaaac

SEQ ID NO: 4184253 - DNA, 25 bp, Homo sapien
agggctgcacgggtagccaatgaaa

SEQ ID NO: 4184254 - DNA, 25 bp, Homo sapien
tttccggcgtttcgctgactgcctg

SEQ ID NO: 4184255 - DNA, 25 bp, Homo sapien
tatgaacacccattgtcaccctggc

SEQ ID NO: 4184256 - DNA, 25 bp, Homo sapien
catgggcaagctgtctatgaacacc

SEQ ID NO: 4184257 - DNA, 25 bp, Homo sapien
caggaggaagtgctagatactcaga

SEQ ID NO: 4184258 - DNA, 25 bp, Homo sapien
cattgaggaggagagtacaggactc

SEQ ID NO: 4184259 - DNA, 25 bp, Homo sapien
tgggttggctagctgcggggttggg

SEQ ID NO: 4184260 - DNA, 25 bp, Homo sapien
ctctgggttggctagctgcggggtt

SEQ ID NO: 4184261 - DNA, 25 bp, Homo sapien
gctctgggttggctagctgcggggt

SEQ ID NO: 4184262 - DNA, 25 bp, Homo sapien
tctgggttggctagctgcggggttg

SEQ ID NO: 4184263 - DNA, 25 bp, Homo sapien
cttcatccagggctctgcttccaga

SEQ ID NO: 4184264 - DNA, 25 bp, Homo sapien
ggagtggggtctgggtctctggtcc

SEQ ID NO: 4184265 - DNA, 25 bp, Homo sapien
ctggtcccagcatcttcaggttcat

SEQ ID NO: 4184266 - DNA, 25 bp, Homo sapien
gctgtctgactgccaggctccctct

SEQ ID NO: 4184267 - DNA, 25 bp, Homo sapien
tagcatggatgcagacaggcccttg

SEQ ID NO: 4184268 - DNA, 25 bp, Homo sapien
tggatgcagacaggcccttgagagc

SEQ ID NO: 4184269 - DNA, 25 bp, Homo sapien
gactgtgagcctggcaggaagactg

SEQ ID NO: 4184270 - DNA, 25 bp, Homo sapien
gagcacagccggagggactgtgagc

SEQ ID NO: 4184271 - DNA, 25 bp, Homo sapien
gactgtctgcggtccacagtattgc

SEQ ID NO: 4184272 - DNA, 25 bp, Homo sapien
ctacaggcgtctaatgtttggagta

SEQ ID NO: 4184273 - DNA, 25 bp, Homo sapien
gaactacaggcgtctaatgtttgga

SEQ ID NO: 4184274 - DNA, 25 bp, Homo sapien
gggtgtgacacatgtgactgtctgc

SEQ ID NO: 4184275 - DNA, 25 bp, Homo sapien
gtgccatgtcccctcttgagacagc

SEQ ID NO: 4184276 - DNA, 25 bp, Homo sapien
ctgggactttacacagggacatggg

SEQ ID NO: 4184277 - DNA, 25 bp, Homo sapien
ggagggctcttgtgccatgtcccct

SEQ ID NO: 4184278 - DNA, 25 bp, Homo sapien
tgtgaccagcccaggagtgaagctg

SEQ ID NO: 4184279 - DNA, 25 bp, Homo sapien
acggagcggaacagctgctcgtcca

SEQ ID NO: 4184280 - DNA, 25 bp, Homo sapien
cggcctggccctccacggagcggaa

SEQ ID NO: 4184281 - DNA, 25 bp, Homo sapien
tcctcctcgtcagaggcggcctggc

SEQ ID NO: 4184282 - DNA, 25 bp, Homo sapien
tggccctccacggagcggaacagct

SEQ ID NO: 4184283 - DNA, 25 bp, Homo sapien
cggctgccggcgtcttcttctcctc

SEQ ID NO: 4184284 - DNA, 25 bp, Homo sapien
tcggctgccggcgtcttcttctcct

SEQ ID NO: 4184285 - DNA, 25 bp, Homo sapien
ttcatcctctacatgctggtgggcc

SEQ ID NO: 4184286 - DNA, 25 bp, Homo sapien
cacgaatgggaattaaagccagcca

SEQ ID NO: 4184287 - DNA, 25 bp, Homo sapien
gccacgagatgtgccctggaaggtc

SEQ ID NO: 4184288 - DNA, 25 bp, Homo sapien
tgtctgggagtgctacaagagctcc

SEQ ID NO: 4184289 - DNA, 25 bp, Homo sapien
gcttctccgccgtctggtcatcaca

SEQ ID NO: 4184290 - DNA, 25 bp, Homo sapien
gagcttctccgccgtctggtcatca

SEQ ID NO: 4184291 - DNA, 25 bp, Homo sapien
cttctccgccgtctggtcatcacac

SEQ ID NO: 4184292 - DNA, 25 bp, Homo sapien
agcttctccgccgtctggtcatcac

SEQ ID NO: 4184293 - DNA, 25 bp, Homo sapien
cgccgaagtgaccaaagtaagtcat

SEQ ID NO: 4184294 - DNA, 25 bp, Homo sapien
ccagggtatgggcatggttggcacc

SEQ ID NO: 4184295 - DNA, 25 bp, Homo sapien
ggcaccgccgaagtgaccaaagtaa

SEQ ID NO: 4184296 - DNA, 25 bp, Homo sapien
gcatggttggcaccgccgaagtgac

SEQ ID NO: 4184297 - DNA, 25 bp, Homo sapien
cagccctgagtcctcagctgctcca

SEQ ID NO: 4184298 - DNA, 25 bp, Homo sapien
tcagaggtccccagggtcctcccac

SEQ ID NO: 4184299 - DNA, 25 bp, Homo sapien
caccgcagccctgagtcctcagctg

SEQ ID NO: 4184300 - DNA, 25 bp, Homo sapien
tcccaccgcagccctgagtcctcag

SEQ ID NO: 4184301 - DNA, 25 bp, Homo sapien
catgactgaggtggccaatcggagt

SEQ ID NO: 4184302 - DNA, 25 bp, Homo sapien
taaagccacacagcgggttggactg

SEQ ID NO: 4184303 - DNA, 25 bp, Homo sapien
ggatgccaggcagtcacaaagtgtt

SEQ ID NO: 4184304 - DNA, 25 bp, Homo sapien
tacccagtaacactaggatgccagg

SEQ ID NO: 4184305 - DNA, 25 bp, Homo sapien
gcagctccagcctcaggtgctcatt

SEQ ID NO: 4184306 - DNA, 25 bp, Homo sapien
agcctcaggtgctcattctcttcca

SEQ ID NO: 4184307 - DNA, 25 bp, Homo sapien
tccagcctcaggtgctcattctctt

SEQ ID NO: 4184308 - DNA, 25 bp, Homo sapien
agctccagcctcaggtgctcattct

SEQ ID NO: 4184309 - DNA, 25 bp, Homo sapien
gacagccgcaccctctcggtctcta

SEQ ID NO: 4184310 - DNA, 25 bp, Homo sapien
gcagggacagccgcaccctctcggt

SEQ ID NO: 4184311 - DNA, 25 bp, Homo sapien
acagccgcaccctctcggtctctac

SEQ ID NO: 4184312 - DNA, 25 bp, Homo sapien
agggacagccgcaccctctcggtct

SEQ ID NO: 4184313 - DNA, 25 bp, Homo sapien
ggattcctctgaacacgtcaccagt

SEQ ID NO: 4184314 - DNA, 25 bp, Homo sapien
tattagcttcttaaaatgacctggg

SEQ ID NO: 4184315 - DNA, 25 bp, Homo sapien
ttatctggtgaaggaagatccctac

SEQ ID NO: 4184316 - DNA, 25 bp, Homo sapien
aaaatgggataacagctgcctactg

SEQ ID NO: 4184317 - DNA, 25 bp, Homo sapien
gcgtccagcgtgctcagcaaaatct

SEQ ID NO: 4184318 - DNA, 25 bp, Homo sapien
gggtccctgaaagcgtccagcgtgc

SEQ ID NO: 4184319 - DNA, 25 bp, Homo sapien
tccagcgtgctcagcaaaatcttcc

SEQ ID NO: 4184320 - DNA, 25 bp, Homo sapien
tgaaagcgtccagcgtgctcagcaa

SEQ ID NO: 4184321 - DNA, 25 bp, Homo sapien
tggtgccgagggctgtctccgcaac

SEQ ID NO: 4184322 - DNA, 25 bp, Homo sapien
ggagggggttggtgagcgcagctgc

SEQ ID NO: 4184323 - DNA, 25 bp, Homo sapien
gggctgtctccgcaacagctggcag

SEQ ID NO: 4184324 - DNA, 25 bp, Homo sapien
aggctggtgccgagggctgtctccg

SEQ ID NO: 4184325 - DNA, 25 bp, Homo sapien
ggagtgctttcctacagaccaggta

SEQ ID NO: 4184326 - DNA, 25 bp, Homo sapien
gactcagtcagaaagtgggcatctc

SEQ ID NO: 4184327 - DNA, 25 bp, Homo sapien
tctgggctcgggcttaaccttggaa

SEQ ID NO: 4184328 - DNA, 25 bp, Homo sapien
gaaagatacagcatcaggtgcaggc

SEQ ID NO: 4184329 - DNA, 25 bp, Homo sapien
aggttttgtagatgtcccgcagttc

SEQ ID NO: 4184330 - DNA, 25 bp, Homo sapien
tctcaagcgcagagattccttcctc

SEQ ID NO: 4184331 - DNA, 25 bp, Homo sapien
gtcctagttgctaatgagcccatca

SEQ ID NO: 4184332 - DNA, 25 bp, Homo sapien
ctcactgtgcatgttataggttttg

SEQ ID NO: 4184333 - DNA, 25 bp, Homo sapien
cgggtccgccgcagttggttcaagt

SEQ ID NO: 4184334 - DNA, 25 bp, Homo sapien
cgagggcccctgaacggatgccagt

SEQ ID NO: 4184335 - DNA, 25 bp, Homo sapien
agtcccagaggtggcgaccccttgg

SEQ ID NO: 4184336 - DNA, 25 bp, Homo sapien
gcggacatgtcccttgccgagggcc

SEQ ID NO: 4184337 - DNA, 25 bp, Homo sapien
caggcgcgtcgggagtgcccgggag

SEQ ID NO: 4184338 - DNA, 25 bp, Homo sapien
ccggccgtcgggcaggcagccgcgg

SEQ ID NO: 4184339 - DNA, 25 bp, Homo sapien
gtccggccgtcgggcaggcagccgc

SEQ ID NO: 4184340 - DNA, 25 bp, Homo sapien
gggtgcaggcgcgtcgggagtgccc

SEQ ID NO: 4184341 - DNA, 25 bp, Homo sapien
gacctcatgatgagcggcagcggcg

SEQ ID NO: 4184342 - DNA, 25 bp, Homo sapien
acccagagcgagtatgccggagaag

SEQ ID NO: 4184343 - DNA, 25 bp, Homo sapien
gctcttccaagctgatgcccgagca

SEQ ID NO: 4184344 - DNA, 25 bp, Homo sapien
aaggagcgcgcgagggtgaaacaaa

SEQ ID NO: 4184345 - DNA, 25 bp, Homo sapien
ccagccgtttgcttatctgtttgca

SEQ ID NO: 4184346 - DNA, 25 bp, Homo sapien
gaagtgttcgcagatcttgtgacta

SEQ ID NO: 4184347 - DNA, 25 bp, Homo sapien
tctgtttgcaaatgggcccagcagc

SEQ ID NO: 4184348 - DNA, 25 bp, Homo sapien
aacctcagcacccactagggaagtg

SEQ ID NO: 4184349 - DNA, 25 bp, Homo sapien
tctatgggatacagctgaggtggcc

SEQ ID NO: 4184350 - DNA, 25 bp, Homo sapien
aactctatgggatacagctgaggtg

SEQ ID NO: 4184351 - DNA, 25 bp, Homo sapien
ctctatgggatacagctgaggtggc

SEQ ID NO: 4184352 - DNA, 25 bp, Homo sapien
gcaactctatgggatacagctgagg

SEQ ID NO: 4184353 - DNA, 25 bp, Homo sapien
ctgattcccagatgcagaagacagc

SEQ ID NO: 4184354 - DNA, 25 bp, Homo sapien
cccagatgcagaagacagcaggaca

SEQ ID NO: 4184355 - DNA, 25 bp, Homo sapien
agatgcagaagacagcaggacaggg

SEQ ID NO: 4184356 - DNA, 25 bp, Homo sapien
ttcccagatgcagaagacagcagga

SEQ ID NO: 4184357 - DNA, 25 bp, Homo sapien
ctggctaactgtctctggacaccgt

SEQ ID NO: 4184358 - DNA, 25 bp, Homo sapien
ctctggacaccgtagaaggccgggc

SEQ ID NO: 4184359 - DNA, 25 bp, Homo sapien
taactgtctctggacaccgtagaag

SEQ ID NO: 4184360 - DNA, 25 bp, Homo sapien
actgtctctggacaccgtagaaggc

SEQ ID NO: 4184361 - DNA, 25 bp, Homo sapien
ctggcagcctggaccgatcctcagg

SEQ ID NO: 4184362 - DNA, 25 bp, Homo sapien
agcctggaccgatcctcagggacgg

SEQ ID NO: 4184363 - DNA, 25 bp, Homo sapien
gcctggaccgatcctcagggacggc

SEQ ID NO: 4184364 - DNA, 25 bp, Homo sapien
cagcctggaccgatcctcagggacg

SEQ ID NO: 4184365 - DNA, 25 bp, Homo sapien
ctgtggcccagagcaggaacagggc

SEQ ID NO: 4184366 - DNA, 25 bp, Homo sapien
cagagcaggaacagggctccccagg

SEQ ID NO: 4184367 - DNA, 25 bp, Homo sapien
ggcccagagcaggaacagggctccc

SEQ ID NO: 4184368 - DNA, 25 bp, Homo sapien
ccagagcaggaacagggctccccag

SEQ ID NO: 4184369 - DNA, 25 bp, Homo sapien
tgcccagctggtagcctgtcagccg

SEQ ID NO: 4184370 - DNA, 25 bp, Homo sapien
gggttctgcgtcacatcgagggtct

SEQ ID NO: 4184371 - DNA, 25 bp, Homo sapien
ccatggtttccagggcgcggcaggt

SEQ ID NO: 4184372 - DNA, 25 bp, Homo sapien
gcagggccgtgagtccgtggcccct

SEQ ID NO: 4184373 - DNA, 25 bp, Homo sapien
gtttgggctgaccaggcttggtgga

SEQ ID NO: 4184374 - DNA, 25 bp, Homo sapien
tggtttgggctgaccaggcttggtg

SEQ ID NO: 4184375 - DNA, 25 bp, Homo sapien
tggtggtttgggctgaccaggcttg

SEQ ID NO: 4184376 - DNA, 25 bp, Homo sapien
ggtggtttgggctgaccaggcttgg

SEQ ID NO: 4184377 - DNA, 25 bp, Homo sapien
tcaactttggggattctgtcccaag

SEQ ID NO: 4184378 - DNA, 25 bp, Homo sapien
tttctgacggaatttcagtcttgtc

SEQ ID NO: 4184379 - DNA, 25 bp, Homo sapien
caactttggggattctgtcccaaga

SEQ ID NO: 4184380 - DNA, 25 bp, Homo sapien
tttttctgacggaatttcagtcttg

SEQ ID NO: 4184381 - DNA, 25 bp, Homo sapien
tcacagatgcctagctggacacagc

SEQ ID NO: 4184382 - DNA, 25 bp, Homo sapien
tcaggatgtttcaaaggctccacag

SEQ ID NO: 4184383 - DNA, 25 bp, Homo sapien
tctcaggcacaaaagccggtgtcca

SEQ ID NO: 4184384 - DNA, 25 bp, Homo sapien
tgaagccatttcctacagagaagcg

SEQ ID NO: 4184385 - DNA, 25 bp, Homo sapien
ggagcattcacagggtcttgggaac

SEQ ID NO: 4184386 - DNA, 25 bp, Homo sapien
gggaacagggagcattcacagggtc

SEQ ID NO: 4184387 - DNA, 25 bp, Homo sapien
agcattcacagggtcttgggaacaa

SEQ ID NO: 4184388 - DNA, 25 bp, Homo sapien
cagggagcattcacagggtcttggg

SEQ ID NO: 4184389 - DNA, 25 bp, Homo sapien
catgggtttgctttacctgtggcag

SEQ ID NO: 4184390 - DNA, 25 bp, Homo sapien
ccacagacttggtgcctgagcgcag

SEQ ID NO: 4184391 - DNA, 25 bp, Homo sapien
ggctctgaccgtttcctctcatggg

SEQ ID NO: 4184392 - DNA, 25 bp, Homo sapien
agagctagagccatgagacccacag

SEQ ID NO: 4184393 - DNA, 25 bp, Homo sapien
gaaacttgaactgcgagaagctgac

SEQ ID NO: 4184394 - DNA, 25 bp, Homo sapien
caggcctgcaaaacgtcgtgggtta

SEQ ID NO: 4184395 - DNA, 25 bp, Homo sapien
gggccatccctcatcacgtgctggt

SEQ ID NO: 4184396 - DNA, 25 bp, Homo sapien
gagtacaggaacaggaacgcacatc

SEQ ID NO: 4184397 - DNA, 25 bp, Homo sapien
tgatgaccaaagtagcagggaactg

SEQ ID NO: 4184398 - DNA, 25 bp, Homo sapien
gatgcccttagcttcctgcgaggaa

SEQ ID NO: 4184399 - DNA, 25 bp, Homo sapien
gtttgctgaaaacccttcctgatgg

SEQ ID NO: 4184400 - DNA, 25 bp, Homo sapien
tccaagaggctgtctaccagggaca

SEQ ID NO: 4184401 - DNA, 25 bp, Homo sapien
tgaattatcttaccttactatcctg

SEQ ID NO: 4184402 - DNA, 25 bp, Homo sapien
gtagcactctcccaagttccttaaa

SEQ ID NO: 4184403 - DNA, 25 bp, Homo sapien
gtggtacaagtgcatacatcaacag

SEQ ID NO: 4184404 - DNA, 25 bp, Homo sapien
tactatcctgtctaaagtagcactc

SEQ ID NO: 4184405 - DNA, 25 bp, Homo sapien
gagttctggactttgacctgagcta

SEQ ID NO: 4184406 - DNA, 25 bp, Homo sapien
gaaaggccagttagctatccaacca

SEQ ID NO: 4184407 - DNA, 25 bp, Homo sapien
gctcccatcaggtgtaccaaagtgg

SEQ ID NO: 4184408 - DNA, 25 bp, Homo sapien
caaccagttccaggctagagcagtg

SEQ ID NO: 4184409 - DNA, 25 bp, Homo sapien
tccttgtctcatgttgaccggaggg

SEQ ID NO: 4184410 - DNA, 25 bp, Homo sapien
caacaggttgcgaactggctgcctg

SEQ ID NO: 4184411 - DNA, 25 bp, Homo sapien
cactggtgcgaaggaagaaaatgga

SEQ ID NO: 4184412 - DNA, 25 bp, Homo sapien
tccagaagtatgcaagcgagaccct

SEQ ID NO: 4184413 - DNA, 25 bp, Homo sapien
taggactcttggagactattctgcg

SEQ ID NO: 4184414 - DNA, 25 bp, Homo sapien
tgggcgcctactgatggactttcgt

SEQ ID NO: 4184415 - DNA, 25 bp, Homo sapien
cagcatttatctagctgggcgccta

SEQ ID NO: 4184416 - DNA, 25 bp, Homo sapien
tgttccctcgcagcaagaggtagga

SEQ ID NO: 4184417 - DNA, 25 bp, Homo sapien
gtttccgacaaaacatcaggctctg

SEQ ID NO: 4184418 - DNA, 25 bp, Homo sapien
tgctcccgcagtaccaatagtgaac

SEQ ID NO: 4184419 - DNA, 25 bp, Homo sapien
tcagttcctgtgagcgtcggcgtct

SEQ ID NO: 4184420 - DNA, 25 bp, Homo sapien
cagagatgaggtcgagtaatttcca

SEQ ID NO: 4184421 - DNA, 25 bp, Homo sapien
tctgaattcaggttggctgatccca

SEQ ID NO: 4184422 - DNA, 25 bp, Homo sapien
tagggtgcccatcactagttaggtc

SEQ ID NO: 4184423 - DNA, 25 bp, Homo sapien
gatcctcaaccacatgtcagctgct

SEQ ID NO: 4184424 - DNA, 25 bp, Homo sapien
taatcataaaccagacaggtgggag

SEQ ID NO: 4184425 - DNA, 25 bp, Homo sapien
tgaggcacttacatggatgctaggg

SEQ ID NO: 4184426 - DNA, 25 bp, Homo sapien
tagtggaggacaacatttgaggcac

SEQ ID NO: 4184427 - DNA, 25 bp, Homo sapien
cagtgaatccatgtttagtggagga

SEQ ID NO: 4184428 - DNA, 25 bp, Homo sapien
ttaggcaaaagtgctgcctgaagcc

SEQ ID NO: 4184429 - DNA, 25 bp, Homo sapien
ttaatagtcctgagcaagcaagaaa

SEQ ID NO: 4184430 - DNA, 25 bp, Homo sapien
cacttcgaaattaaatgcggttagc

SEQ ID NO: 4184431 - DNA, 25 bp, Homo sapien
tacttaaggatgtacagttagagcc

SEQ ID NO: 4184432 - DNA, 25 bp, Homo sapien
tcctgggtttcataaggatctgaag

SEQ ID NO: 4184433 - DNA, 25 bp, Homo sapien
gttgagtcagaccagtaagcccgtc

SEQ ID NO: 4184434 - DNA, 25 bp, Homo sapien
taatggctgttcgagagaaatcgga

SEQ ID NO: 4184435 - DNA, 25 bp, Homo sapien
agatagaggcaactcccaggccagt

SEQ ID NO: 4184436 - DNA, 25 bp, Homo sapien
tttccgtgccactggtgaataggga

SEQ ID NO: 4184437 - DNA, 25 bp, Homo sapien
taaccaatatattagctagcttttt

SEQ ID NO: 4184438 - DNA, 25 bp, Homo sapien
atatttcaaagatctgactgcagcc

SEQ ID NO: 4184439 - DNA, 25 bp, Homo sapien
tttttaaccaatatattagctagct

SEQ ID NO: 4184440 - DNA, 25 bp, Homo sapien
ccaatatattagctagcttttttcc

SEQ ID NO: 4184441 - DNA, 25 bp, Homo sapien
gtgctggggtcgtgcgcctggcggg

SEQ ID NO: 4184442 - DNA, 25 bp, Homo sapien
gggtgggtatagtcgtgcaggccat

SEQ ID NO: 4184443 - DNA, 25 bp, Homo sapien
tggggtgggtatagtcgtgcaggcc

SEQ ID NO: 4184444 - DNA, 25 bp, Homo sapien
tggaaggagtccgtgtggtggggaa

SEQ ID NO: 4184445 - DNA, 25 bp, Homo sapien
gggatggggtgggtatagtcgtgca

SEQ ID NO: 4184446 - DNA, 25 bp, Homo sapien
gcttcgagggtcgcggaatgaggga

SEQ ID NO: 4184447 - DNA, 25 bp, Homo sapien
gagggtggatttggcgggaactcac

SEQ ID NO: 4184448 - DNA, 25 bp, Homo sapien
cgagggtggatttggcgggaactca

SEQ ID NO: 4184449 - DNA, 25 bp, Homo sapien
gcggaatgagggaccgagggtggat

SEQ ID NO: 4184450 - DNA, 25 bp, Homo sapien
gtctttcggcgccacggccgcaccc

SEQ ID NO: 4184451 - DNA, 25 bp, Homo sapien
ctttcggcgccacggccgcacccca

SEQ ID NO: 4184452 - DNA, 25 bp, Homo sapien
gcgggtctttcggcgccacggccgc

SEQ ID NO: 4184453 - DNA, 25 bp, Homo sapien
gggtctttcggcgccacggccgcac

SEQ ID NO: 4184454 - DNA, 25 bp, Homo sapien
tgtcctttcttcgtcctggaaagct

SEQ ID NO: 4184455 - DNA, 25 bp, Homo sapien
tgcgtcaggcgggaagctcggctgc

SEQ ID NO: 4184456 - DNA, 25 bp, Homo sapien
gctgtcggacgacacttctgtcctt

SEQ ID NO: 4184457 - DNA, 25 bp, Homo sapien
gacccgggtttctggcgcaccgctg

SEQ ID NO: 4184458 - DNA, 25 bp, Homo sapien
tgacggagccgcagtgcgggtcggg

SEQ ID NO: 4184459 - DNA, 25 bp, Homo sapien
ttgcgagccgtcttccccaggcctg

SEQ ID NO: 4184460 - DNA, 25 bp, Homo sapien
ggcccgctccgacgcggaaggtgag

SEQ ID NO: 4184461 - DNA, 25 bp, Homo sapien
gcctgcgtccgagtctccgccgctg

SEQ ID NO: 4184462 - DNA, 25 bp, Homo sapien
tgaacagtgtgtggaaatgcccggt

SEQ ID NO: 4184463 - DNA, 25 bp, Homo sapien
tcaaaacaatgttctgggctggcca

SEQ ID NO: 4184464 - DNA, 25 bp, Homo sapien
tggaggacccataaacgcgtatcac

SEQ ID NO: 4184465 - DNA, 25 bp, Homo sapien
gctaatctcgtgttccctaaaggca

SEQ ID NO: 4184466 - DNA, 25 bp, Homo sapien
ctctctcaatggcaccactcagttg

SEQ ID NO: 4184467 - DNA, 25 bp, Homo sapien
ctcaatggcaccactcagttgcata

SEQ ID NO: 4184468 - DNA, 25 bp, Homo sapien
tctctcaatggcaccactcagttgc

SEQ ID NO: 4184469 - DNA, 25 bp, Homo sapien
tctcaatggcaccactcagttgcat

SEQ ID NO: 4184470 - DNA, 25 bp, Homo sapien
cactttcaaagggaggagttgacac

SEQ ID NO: 4184471 - DNA, 25 bp, Homo sapien
tcaagagtacagtgagccgtcatca

SEQ ID NO: 4184472 - DNA, 25 bp, Homo sapien
gatcactggaaatctctcagccttt

SEQ ID NO: 4184473 - DNA, 25 bp, Homo sapien
ctttccacagtgtaaggacccagca

SEQ ID NO: 4184474 - DNA, 25 bp, Homo sapien
ggtctctcatgaggcagcacaaggg

SEQ ID NO: 4184475 - DNA, 25 bp, Homo sapien
tgagggcctcggttgctcactggtt

SEQ ID NO: 4184476 - DNA, 25 bp, Homo sapien
agcacaagggctagattctcatctg

SEQ ID NO: 4184477 - DNA, 25 bp, Homo sapien
actggttgcttaccggctgttggcc

SEQ ID NO: 4184478 - DNA, 25 bp, Homo sapien
gggcgcaatgcagcaacgcaatgct

SEQ ID NO: 4184479 - DNA, 25 bp, Homo sapien
aacgcaatgctcgacgggcgcggca

SEQ ID NO: 4184480 - DNA, 25 bp, Homo sapien
agtggttctacagggaccacttccg

SEQ ID NO: 4184481 - DNA, 25 bp, Homo sapien
gagtagcggtgccacagtggttcta

SEQ ID NO: 4184482 - DNA, 25 bp, Homo sapien
tcatccttcttgtcgaatttcttca

SEQ ID NO: 4184483 - DNA, 25 bp, Homo sapien
ccttcttgtcgaatttcttcaacat

SEQ ID NO: 4184484 - DNA, 25 bp, Homo sapien
cctcatccttcttgtcgaatttctt

SEQ ID NO: 4184485 - DNA, 25 bp, Homo sapien
atccttcttgtcgaatttcttcaac

SEQ ID NO: 4184486 - DNA, 25 bp, Homo sapien
tcccagcagccctggtacagtcctg

SEQ ID NO: 4184487 - DNA, 25 bp, Homo sapien
cagcagccctggtacagtcctgtgc

SEQ ID NO: 4184488 - DNA, 25 bp, Homo sapien
ccagcagccctggtacagtcctgtg

SEQ ID NO: 4184489 - DNA, 25 bp, Homo sapien
gcagccctggtacagtcctgtgctt

SEQ ID NO: 4184490 - DNA, 25 bp, Homo sapien
ttccgagggttgatgggagtttcat

SEQ ID NO: 4184491 - DNA, 25 bp, Homo sapien
aggatgtgggcacatttccgagggt

SEQ ID NO: 4184492 - DNA, 25 bp, Homo sapien
tttccgagggttgatgggagtttca

SEQ ID NO: 4184493 - DNA, 25 bp, Homo sapien
gatgtgggcacatttccgagggttg

SEQ ID NO: 4184494 - DNA, 25 bp, Homo sapien
tcatggcaaagaaggcctcggtcgc

SEQ ID NO: 4184495 - DNA, 25 bp, Homo sapien
gcttggtcatggcaaagaaggcctc

SEQ ID NO: 4184496 - DNA, 25 bp, Homo sapien
gaaggcctcggtcgcttccgtggtc

SEQ ID NO: 4184497 - DNA, 25 bp, Homo sapien
gactgaaagagcttggtcatggcaa

SEQ ID NO: 4184498 - DNA, 25 bp, Homo sapien
cagagttgggagaagatacctcctg

SEQ ID NO: 4184499 - DNA, 25 bp, Homo sapien
gagaagatacctcctgtctccacaa

SEQ ID NO: 4184500 - DNA, 25 bp, Homo sapien
tgccacctctcaaggaaagctgggt

SEQ ID NO: 4184501 - DNA, 25 bp, Homo sapien
gatacctcctgtctccacaaaggca

SEQ ID NO: 4184502 - DNA, 25 bp, Homo sapien
aaaagccctatcagcccgggctcac

SEQ ID NO: 4184503 - DNA, 25 bp, Homo sapien
tcaagtagcacatccgacggagtgt

SEQ ID NO: 4184504 - DNA, 25 bp, Homo sapien
gcaatgcaagacatctccttgatgg

SEQ ID NO: 4184505 - DNA, 25 bp, Homo sapien
tcctctgcaatgcaagacatctcct

SEQ ID NO: 4184506 - DNA, 25 bp, Homo sapien
tccttgatggtcaagtagcacatcc

SEQ ID NO: 4184507 - DNA, 25 bp, Homo sapien
gtcaatggaacccatcagaagagcc

SEQ ID NO: 4184508 - DNA, 25 bp, Homo sapien
gtctgtcaatggaacccatcagaag

SEQ ID NO: 4184509 - DNA, 25 bp, Homo sapien
tggtctgtcaatggaacccatcaga

SEQ ID NO: 4184510 - DNA, 25 bp, Homo sapien
tggaacccatcagaagagccaccca

SEQ ID NO: 4184511 - DNA, 25 bp, Homo sapien
tgctggagggagtttcataagactc

SEQ ID NO: 4184512 - DNA, 25 bp, Homo sapien
tagcttcctactgccagtgacctga

SEQ ID NO: 4184513 - DNA, 25 bp, Homo sapien
tactacacgagcctcctaaccagtg

SEQ ID NO: 4184514 - DNA, 25 bp, Homo sapien
ccttgaacttccctaactggctatg

SEQ ID NO: 4184515 - DNA, 25 bp, Homo sapien
tggcagagggctcgcacggccgggc

SEQ ID NO: 4184516 - DNA, 25 bp, Homo sapien
tttcccagtcatgtcttttgttagg

SEQ ID NO: 4184517 - DNA, 25 bp, Homo sapien
ttctttcccagtcatgtcttttgtt

SEQ ID NO: 4184518 - DNA, 25 bp, Homo sapien
atcagtgatctggcagagggctcgc

SEQ ID NO: 4184519 - DNA, 25 bp, Homo sapien
catgtagcgctcaatagcctgcagc

SEQ ID NO: 4184520 - DNA, 25 bp, Homo sapien
aatggcttgtttcatgtagcgctca

SEQ ID NO: 4184521 - DNA, 25 bp, Homo sapien
ttgtttcatgtagcgctcaatagcc

SEQ ID NO: 4184522 - DNA, 25 bp, Homo sapien
cgctcaatagcctgcagcatggtgc

SEQ ID NO: 4184523 - DNA, 25 bp, Homo sapien
tcacccagcgcttgaccacgtcaaa

SEQ ID NO: 4184524 - DNA, 25 bp, Homo sapien
cccagcgcttgaccacgtcaaagct

SEQ ID NO: 4184525 - DNA, 25 bp, Homo sapien
cacccagcgcttgaccacgtcaaag

SEQ ID NO: 4184526 - DNA, 25 bp, Homo sapien
attcacccagcgcttgaccacgtca

SEQ ID NO: 4184527 - DNA, 25 bp, Homo sapien
ttcttacgcacatggtacaggagcc

SEQ ID NO: 4184528 - DNA, 25 bp, Homo sapien
acggctaggcggtcattcttacgca

SEQ ID NO: 4184529 - DNA, 25 bp, Homo sapien
ctgatcatcttattgacggctaggc

SEQ ID NO: 4184530 - DNA, 25 bp, Homo sapien
ggtacaggagccctagtgcgtggta

SEQ ID NO: 4184531 - DNA, 25 bp, Homo sapien
tgcttgctggccacccggatcatca

SEQ ID NO: 4184532 - DNA, 25 bp, Homo sapien
aagggagacttaaggccatgccgtg

SEQ ID NO: 4184533 - DNA, 25 bp, Homo sapien
gctggccacccggatcatcatgcag

SEQ ID NO: 4184534 - DNA, 25 bp, Homo sapien
cggatcatcatgcagtaggcaaagg

SEQ ID NO: 4184535 - DNA, 25 bp, Homo sapien
gaggcggcttcatacaccaccatct

SEQ ID NO: 4184536 - DNA, 25 bp, Homo sapien
accatctcgtgcttgttgcgcaagc

SEQ ID NO: 4184537 - DNA, 25 bp, Homo sapien
caagcagctctcgatgaagtcaaac

SEQ ID NO: 4184538 - DNA, 25 bp, Homo sapien
agcctggcagattgacgatggccga

SEQ ID NO: 4184539 - DNA, 25 bp, Homo sapien
agcagccttgggtgagctgcagaaa

SEQ ID NO: 4184540 - DNA, 25 bp, Homo sapien
cagccttgggtgagctgcagaaaag

SEQ ID NO: 4184541 - DNA, 25 bp, Homo sapien
tacgaacagcagcatagcggagagc

SEQ ID NO: 4184542 - DNA, 25 bp, Homo sapien
cttattgagggtacgaacagcagca

SEQ ID NO: 4184543 - DNA, 25 bp, Homo sapien
tcatgaggcggtcgatgctgctctc

SEQ ID NO: 4184544 - DNA, 25 bp, Homo sapien
cacagctgacggatgcttcatggca

SEQ ID NO: 4184545 - DNA, 25 bp, Homo sapien
catccgagatttctgacatgaagga

SEQ ID NO: 4184546 - DNA, 25 bp, Homo sapien
aatgctgcggtttgaatctgtgacc

SEQ ID NO: 4184547 - DNA, 25 bp, Homo sapien
gcactgattcaggtttgagctcaaa

SEQ ID NO: 4184548 - DNA, 25 bp, Homo sapien
tacgcacatttctcggaaggccaag

SEQ ID NO: 4184549 - DNA, 25 bp, Homo sapien
ttgactgcagtacccatgcctgaga

SEQ ID NO: 4184550 - DNA, 25 bp, Homo sapien
gtcactctacatagcagacagcaag

SEQ ID NO: 4184551 - DNA, 25 bp, Homo sapien
gacggcgtgtttgcgaggatatttc

SEQ ID NO: 4184552 - DNA, 25 bp, Homo sapien
ttcccgcagcatggtgaacaggaag

SEQ ID NO: 4184553 - DNA, 25 bp, Homo sapien
tgcgaggatatttctgacacagggc

SEQ ID NO: 4184554 - DNA, 25 bp, Homo sapien
gaacaggaagttcataaggacggcg

SEQ ID NO: 4184555 - DNA, 25 bp, Homo sapien
tgtgaactcgcagtcctcgatgaac

SEQ ID NO: 4184556 - DNA, 25 bp, Homo sapien
tgatgatgcagtccacgatagcgcg

SEQ ID NO: 4184557 - DNA, 25 bp, Homo sapien
caagaccactcggttatagatgaag

SEQ ID NO: 4184558 - DNA, 25 bp, Homo sapien
tcgatgaactcgcacagatgtgaca

SEQ ID NO: 4184559 - DNA, 25 bp, Homo sapien
gcgccagatgggattagtagctccc

SEQ ID NO: 4184560 - DNA, 25 bp, Homo sapien
cactcagaatgggtcttcaggcaga

SEQ ID NO: 4184561 - DNA, 25 bp, Homo sapien
tctatttaatggagaagggcgccag

SEQ ID NO: 4184562 - DNA, 25 bp, Homo sapien
tttaggaagcgaatgtgatttaccc

SEQ ID NO: 4184563 - DNA, 25 bp, Homo sapien
caccaagatactgggtaacatctct

SEQ ID NO: 4184564 - DNA, 25 bp, Homo sapien
tgggctccaaacttcgccagagcac

SEQ ID NO: 4184565 - DNA, 25 bp, Homo sapien
ctcttcagcaacaccaagatactgg

SEQ ID NO: 4184566 - DNA, 25 bp, Homo sapien
catctcttcattctgggctccaaac

SEQ ID NO: 4184567 - DNA, 25 bp, Homo sapien
gtagctgtataacttttctctccct

SEQ ID NO: 4184568 - DNA, 25 bp, Homo sapien
ccaagggaacactgtccccattagg

SEQ ID NO: 4184569 - DNA, 25 bp, Homo sapien
tccaagggaacactgtccccattag

SEQ ID NO: 4184570 - DNA, 25 bp, Homo sapien
aatcagtagctgtataacttttctc

SEQ ID NO: 4184571 - DNA, 25 bp, Homo sapien
ctgcagccaggacacaaggtggtcc

SEQ ID NO: 4184572 - DNA, 25 bp, Homo sapien
cagccaggacacaaggtggtcctga

SEQ ID NO: 4184573 - DNA, 25 bp, Homo sapien
gcagccaggacacaaggtggtcctg

SEQ ID NO: 4184574 - DNA, 25 bp, Homo sapien
tgcagccaggacacaaggtggtcct

SEQ ID NO: 4184575 - DNA, 25 bp, Homo sapien
gtggctcggtcccttacttcattgt

SEQ ID NO: 4184576 - DNA, 25 bp, Homo sapien
catttaggatatagcctgcattaag

SEQ ID NO: 4184577 - DNA, 25 bp, Homo sapien
tatagcctgcattaagggccttctg

SEQ ID NO: 4184578 - DNA, 25 bp, Homo sapien
tgctccaggacatttaggtagaagg

SEQ ID NO: 4184579 - DNA, 25 bp, Homo sapien
tttttctgatggttctagagtgtac

SEQ ID NO: 4184580 - DNA, 25 bp, Homo sapien
gttctagagtgtactgctgcagagc

SEQ ID NO: 4184581 - DNA, 25 bp, Homo sapien
caaaaggtttttctgatggttctag

SEQ ID NO: 4184582 - DNA, 25 bp, Homo sapien
tgatggttctagagtgtactgctgc

SEQ ID NO: 4184583 - DNA, 25 bp, Homo sapien
tgcctggtagctgccactttctcag

SEQ ID NO: 4184584 - DNA, 25 bp, Homo sapien
tggtagctgccactttctcaggctg

SEQ ID NO: 4184585 - DNA, 25 bp, Homo sapien
cctggtagctgccactttctcaggc

SEQ ID NO: 4184586 - DNA, 25 bp, Homo sapien
ctggtagctgccactttctcaggct

SEQ ID NO: 4184587 - DNA, 25 bp, Homo sapien
gaacagggattgtgctttgaggcca

SEQ ID NO: 4184588 - DNA, 25 bp, Homo sapien
actggattcaagcacaggcccatgg

SEQ ID NO: 4184589 - DNA, 25 bp, Homo sapien
aggattcctcgcactatgaccatgg

SEQ ID NO: 4184590 - DNA, 25 bp, Homo sapien
tagaagcttagcaaggatttccgcc

SEQ ID NO: 4184591 - DNA, 25 bp, Homo sapien
ctcagcttctcgatccccagaccaa

SEQ ID NO: 4184592 - DNA, 25 bp, Homo sapien
cacattcactcagcttctcgatccc

SEQ ID NO: 4184593 - DNA, 25 bp, Homo sapien
aggccacattcactcagcttctcga

SEQ ID NO: 4184594 - DNA, 25 bp, Homo sapien
ttcactcagcttctcgatccccaga

SEQ ID NO: 4184595 - DNA, 25 bp, Homo sapien
tttggtgcagcggatgacatactcc

SEQ ID NO: 4184596 - DNA, 25 bp, Homo sapien
aagaccgcggaactctggcactgct

SEQ ID NO: 4184597 - DNA, 25 bp, Homo sapien
gacatactccgtctctgactcggtg

SEQ ID NO: 4184598 - DNA, 25 bp, Homo sapien
acgggctcaggcgaggacttgaaga

SEQ ID NO: 4184599 - DNA, 25 bp, Homo sapien
aacattgcactaggtccgagccatg

SEQ ID NO: 4184600 - DNA, 25 bp, Homo sapien
gcttaaacattgcactaggtccgag

SEQ ID NO: 4184601 - DNA, 25 bp, Homo sapien
aagagaggggagcttaaacattgca

SEQ ID NO: 4184602 - DNA, 25 bp, Homo sapien
taaacattgcactaggtccgagcca

SEQ ID NO: 4184603 - DNA, 25 bp, Homo sapien
tctgcactgtgacattctccaaggt

SEQ ID NO: 4184604 - DNA, 25 bp, Homo sapien
tccaaggtctggtcattgagtgtgt

SEQ ID NO: 4184605 - DNA, 25 bp, Homo sapien
ggcacgtaacagagcacctcatagg

SEQ ID NO: 4184606 - DNA, 25 bp, Homo sapien
tgggcagtgccaccagtgtgtagca

SEQ ID NO: 4184607 - DNA, 25 bp, Homo sapien
aggctgggtagttaggatgtcccca

SEQ ID NO: 4184608 - DNA, 25 bp, Homo sapien
ctgggtagttaggatgtccccagcc

SEQ ID NO: 4184609 - DNA, 25 bp, Homo sapien
gagaggctgggtagttaggatgtcc

SEQ ID NO: 4184610 - DNA, 25 bp, Homo sapien
aagagaggctgggtagttaggatgt

SEQ ID NO: 4184611 - DNA, 25 bp, Homo sapien
atcacagtccttgacagtgaacttc

SEQ ID NO: 4184612 - DNA, 25 bp, Homo sapien
ggatcacagtccttgacagtgaact

SEQ ID NO: 4184613 - DNA, 25 bp, Homo sapien
gatcacagtccttgacagtgaactt

SEQ ID NO: 4184614 - DNA, 25 bp, Homo sapien
atcctcatagccttcgtcatcagtc

SEQ ID NO: 4184615 - DNA, 25 bp, Homo sapien
agctcctgcctcggggtcatttcca

SEQ ID NO: 4184616 - DNA, 25 bp, Homo sapien
agcagctcctgcctcggggtcattt

SEQ ID NO: 4184617 - DNA, 25 bp, Homo sapien
ttccagctcaaggaaggtccatcca

SEQ ID NO: 4184618 - DNA, 25 bp, Homo sapien
tcctgcctcggggtcatttccagct

SEQ ID NO: 4184619 - DNA, 25 bp, Homo sapien
cgaagttcagtttcatgaccttttg

SEQ ID NO: 4184620 - DNA, 25 bp, Homo sapien
catcccaggctgcttcgaagttcag

SEQ ID NO: 4184621 - DNA, 25 bp, Homo sapien
tgaccttttgaatgtgatcagctac

SEQ ID NO: 4184622 - DNA, 25 bp, Homo sapien
tgatcagctacagtaacttccagat

SEQ ID NO: 4184623 - DNA, 25 bp, Homo sapien
aagggatgagcacttcaatagtagc

SEQ ID NO: 4184624 - DNA, 25 bp, Homo sapien
gagaaaagggatgagcacttcaata

SEQ ID NO: 4184625 - DNA, 25 bp, Homo sapien
tgttctgaagggcttttaatgaagt

SEQ ID NO: 4184626 - DNA, 25 bp, Homo sapien
gaagggcttttaatgaagtggcatt

SEQ ID NO: 4184627 - DNA, 25 bp, Homo sapien
tgttatccggcactttgtctgacct

SEQ ID NO: 4184628 - DNA, 25 bp, Homo sapien
tgggtgttcttgttatccggcactt

SEQ ID NO: 4184629 - DNA, 25 bp, Homo sapien
agaacttcacaatattacccacagc

SEQ ID NO: 4184630 - DNA, 25 bp, Homo sapien
ccaggagcaacgtgtgggtgttctt

SEQ ID NO: 4184631 - DNA, 25 bp, Homo sapien
agatgccaagatgatgtctactggc

SEQ ID NO: 4184632 - DNA, 25 bp, Homo sapien
gatgccaagatgatgtctactggca

SEQ ID NO: 4184633 - DNA, 25 bp, Homo sapien
cagccgggagcgcaccaggatgtca

SEQ ID NO: 4184634 - DNA, 25 bp, Homo sapien
gatgtcatgaccaccccggaacaca

SEQ ID NO: 4184635 - DNA, 25 bp, Homo sapien
cacaacttccaggtagtgttgggga

SEQ ID NO: 4184636 - DNA, 25 bp, Homo sapien
tcaatacagaagcttgggaaggggt

SEQ ID NO: 4184637 - DNA, 25 bp, Homo sapien
gtatgaggtcctatgcaggctggcc

SEQ ID NO: 4184638 - DNA, 25 bp, Homo sapien
gggaagggtatgaggtcctatgcag

SEQ ID NO: 4184639 - DNA, 25 bp, Homo sapien
aaatctgcaatgattcctaattgtt

SEQ ID NO: 4184640 - DNA, 25 bp, Homo sapien
gatttaggacaagctaaaatcatcc

SEQ ID NO: 4184641 - DNA, 25 bp, Homo sapien
gggtggacagcaagatttaggacaa

SEQ ID NO: 4184642 - DNA, 25 bp, Homo sapien
ccctttcctggaagggtggacagca

SEQ ID NO: 4184643 - DNA, 25 bp, Homo sapien
ttattacagggataagatggtttct

SEQ ID NO: 4184644 - DNA, 25 bp, Homo sapien
tagattcaagaggagttgagaatgt

SEQ ID NO: 4184645 - DNA, 25 bp, Homo sapien
aatacatgctgatttattacaggga

SEQ ID NO: 4184646 - DNA, 25 bp, Homo sapien
ttcttgggggatagattcaagagga

SEQ ID NO: 4184647 - DNA, 25 bp, Homo sapien
gatgcgttgtgaagaagcacgaacg

SEQ ID NO: 4184648 - DNA, 25 bp, Homo sapien
tgcctcacaggactacaacagccaa

SEQ ID NO: 4184649 - DNA, 25 bp, Homo sapien
gcctgttagctgattcactcaacca

SEQ ID NO: 4184650 - DNA, 25 bp, Homo sapien
gagccctgaagcatgagtctgcaga

SEQ ID NO: 4184651 - DNA, 25 bp, Homo sapien
ctcgccccggcagcgcgcgtcacct

SEQ ID NO: 4184652 - DNA, 25 bp, Homo sapien
ccggcagcgcgcgtcacctccctcg

SEQ ID NO: 4184653 - DNA, 25 bp, Homo sapien
gcgtcacctccctcgactctcctca

SEQ ID NO: 4184654 - DNA, 25 bp, Homo sapien
gcagcgcgcgtcacctccctcgact

SEQ ID NO: 4184655 - DNA, 25 bp, Homo sapien
ctcgcgtccgctcgggcctctgctc

SEQ ID NO: 4184656 - DNA, 25 bp, Homo sapien
cccgcgtcgcctcacttcggcccag

SEQ ID NO: 4184657 - DNA, 25 bp, Homo sapien
cgccctctccgcgtcgcctcgcgtc

SEQ ID NO: 4184658 - DNA, 25 bp, Homo sapien
cgtcgcctcgcgtccgctcgggcct

SEQ ID NO: 4184659 - DNA, 25 bp, Homo sapien
ccgcggatcccgctccggactctgc

SEQ ID NO: 4184660 - DNA, 25 bp, Homo sapien
tggcccccagccaccggccgcgatc

SEQ ID NO: 4184661 - DNA, 25 bp, Homo sapien
cgcggatcccgctccggactctgct

SEQ ID NO: 4184662 - DNA, 25 bp, Homo sapien
ccccagccaccggccgcgatccctc

SEQ ID NO: 4184663 - DNA, 25 bp, Homo sapien
tcacagtccagcgaagcagggcaag

SEQ ID NO: 4184664 - DNA, 25 bp, Homo sapien
agcgcaggaagagccgcagcggagg

SEQ ID NO: 4184665 - DNA, 25 bp, Homo sapien
agcaaccggtcacctcgagggcggc

SEQ ID NO: 4184666 - DNA, 25 bp, Homo sapien
tcgcctcctccgggtgacttggtgc

SEQ ID NO: 4184667 - DNA, 25 bp, Homo sapien
gaacatctctaggtaagtgacagga

SEQ ID NO: 4184668 - DNA, 25 bp, Homo sapien
aagtgacaggatgttcgcccacaca

SEQ ID NO: 4184669 - DNA, 25 bp, Homo sapien
ctggtaggcgcaagctctcgtgaga

SEQ ID NO: 4184670 - DNA, 25 bp, Homo sapien
ggcgcaagctctcgtgagaacatct

SEQ ID NO: 4184671 - DNA, 25 bp, Homo sapien
ggcagtacttatcagggtccctcca

SEQ ID NO: 4184672 - DNA, 25 bp, Homo sapien
cactgggctgttggattgaggactc

SEQ ID NO: 4184673 - DNA, 25 bp, Homo sapien
tctcaaagtgcagtcgagacagaag

SEQ ID NO: 4184674 - DNA, 25 bp, Homo sapien
tcttgttgtaagaggggcagtactt

SEQ ID NO: 4184675 - DNA, 25 bp, Homo sapien
gaggatgttgctaaacgctctacaa

SEQ ID NO: 4184676 - DNA, 25 bp, Homo sapien
tacaacgcccagaatagctccctat

SEQ ID NO: 4184677 - DNA, 25 bp, Homo sapien
gggctgtatttgctagtggctccac

SEQ ID NO: 4184678 - DNA, 25 bp, Homo sapien
gagagtgtacccttgacaactgtaa

SEQ ID NO: 4184679 - DNA, 25 bp, Homo sapien
cagtcatgagggctttgattcccaa

SEQ ID NO: 4184680 - DNA, 25 bp, Homo sapien
tctgcatggcacagtacactctggg

SEQ ID NO: 4184681 - DNA, 25 bp, Homo sapien
cctgctaggtatctggtagagtgcc

SEQ ID NO: 4184682 - DNA, 25 bp, Homo sapien
cttgaatctggacgggcttgtaacc

SEQ ID NO: 4184683 - DNA, 25 bp, Homo sapien
gaactgcagcttggaaggatcactt

SEQ ID NO: 4184684 - DNA, 25 bp, Homo sapien
aatgatacgctcagatgagtctgca

SEQ ID NO: 4184685 - DNA, 25 bp, Homo sapien
ccagcgcatgggagcaatgatacgc

SEQ ID NO: 4184686 - DNA, 25 bp, Homo sapien
tacggtatcactacgacagttggta

SEQ ID NO: 4184687 - DNA, 25 bp, Homo sapien
tgctaaaacgacacagcgtcttccc

SEQ ID NO: 4184688 - DNA, 25 bp, Homo sapien
ctctgtcttgatttgaggaaaatag

SEQ ID NO: 4184689 - DNA, 25 bp, Homo sapien
cctgacatcgctgccactcatagaa

SEQ ID NO: 4184690 - DNA, 25 bp, Homo sapien
gccactcatagaatccatctgctaa

SEQ ID NO: 4184691 - DNA, 25 bp, Homo sapien
agatcccggccattgtcagcagcct

SEQ ID NO: 4184692 - DNA, 25 bp, Homo sapien
ccagcagtcaaagatcccggccatt

SEQ ID NO: 4184693 - DNA, 25 bp, Homo sapien
cagttgtcccagactttctcccagt

SEQ ID NO: 4184694 - DNA, 25 bp, Homo sapien
gttgtcccagactttctcccagttc

SEQ ID NO: 4184695 - DNA, 25 bp, Homo sapien
tccttttggatccagggctaagaag

SEQ ID NO: 4184696 - DNA, 25 bp, Homo sapien
atccttttggatccagggctaagaa

SEQ ID NO: 4184697 - DNA, 25 bp, Homo sapien
gatccttttggatccagggctaaga

SEQ ID NO: 4184698 - DNA, 25 bp, Homo sapien
ggtacagttgattcagatacagaca

SEQ ID NO: 4184699 - DNA, 25 bp, Homo sapien
ttttgggtggtacagttgattcaga

SEQ ID NO: 4184700 - DNA, 25 bp, Homo sapien
tgattcagatacagacaaatgttca

SEQ ID NO: 4184701 - DNA, 25 bp, Homo sapien
tcagatacagacaaatgttcatttg

SEQ ID NO: 4184702 - DNA, 25 bp, Homo sapien
tcctctccatctaatatggcaggca

SEQ ID NO: 4184703 - DNA, 25 bp, Homo sapien
gagacttcaccaaagtcaagccatt

SEQ ID NO: 4184704 - DNA, 25 bp, Homo sapien
ctgagttgagacttcaccaaagtca

SEQ ID NO: 4184705 - DNA, 25 bp, Homo sapien
cctctccatctaatatggcaggcat

SEQ ID NO: 4184706 - DNA, 25 bp, Homo sapien
gacactcaggagtgttgtttcgcga

SEQ ID NO: 4184707 - DNA, 25 bp, Homo sapien
tgtttcgcgagttgttcaccacaga

SEQ ID NO: 4184708 - DNA, 25 bp, Homo sapien
tcaccacagaagagactgcatggaa

SEQ ID NO: 4184709 - DNA, 25 bp, Homo sapien
tttttgaccaccaagtcgacaggag

SEQ ID NO: 4184710 - DNA, 25 bp, Homo sapien
tgcaggaactgactggaccactggg

SEQ ID NO: 4184711 - DNA, 25 bp, Homo sapien
tggctgtaaggacgcttggccacag

SEQ ID NO: 4184712 - DNA, 25 bp, Homo sapien
gaccactggggaacatctgactctt

SEQ ID NO: 4184713 - DNA, 25 bp, Homo sapien
tcactggctgtaaggacgcttggcc

SEQ ID NO: 4184714 - DNA, 25 bp, Homo sapien
gaacctattatcagaacagcagtgc

SEQ ID NO: 4184715 - DNA, 25 bp, Homo sapien
gggctcctactcatggcaaaaaaga

SEQ ID NO: 4184716 - DNA, 25 bp, Homo sapien
tacaaggagtaccagatcagggcag

SEQ ID NO: 4184717 - DNA, 25 bp, Homo sapien
cttcccagctgggtaaggcatgctt

SEQ ID NO: 4184718 - DNA, 25 bp, Homo sapien
taccaaatacaatttattcaggaaa

SEQ ID NO: 4184719 - DNA, 25 bp, Homo sapien
gactgagtgtacaactacgggccaa

SEQ ID NO: 4184720 - DNA, 25 bp, Homo sapien
cattagcagttacagggccgaggct

SEQ ID NO: 4184721 - DNA, 25 bp, Homo sapien
cacgcaaatcagtccacaagggagg

SEQ ID NO: 4184722 - DNA, 25 bp, Homo sapien
tggcccgacactgctagaaactggt

SEQ ID NO: 4184723 - DNA, 25 bp, Homo sapien
catgaggccggagaagtcagcaggg

SEQ ID NO: 4184724 - DNA, 25 bp, Homo sapien
gtgaaaggtgtagtggtaaaagcag

SEQ ID NO: 4184725 - DNA, 25 bp, Homo sapien
gactgtgccaagctaggggtgaatg

SEQ ID NO: 4184726 - DNA, 25 bp, Homo sapien
ccagaaagttcctggtagggacatt

SEQ ID NO: 4184727 - DNA, 25 bp, Homo sapien
tagaggaggtgaccctggtacagca

SEQ ID NO: 4184728 - DNA, 25 bp, Homo sapien
tgaccctaagttgatgccatatgac

SEQ ID NO: 4184729 - DNA, 25 bp, Homo sapien
tgtgtgcaagacagcccaggcttga

SEQ ID NO: 4184730 - DNA, 25 bp, Homo sapien
gagtaggtcaccacatccctgagag

SEQ ID NO: 4184731 - DNA, 25 bp, Homo sapien
tcttcccttcattccatgggccttt

SEQ ID NO: 4184732 - DNA, 25 bp, Homo sapien
cattccatgggcctttttttgggca

SEQ ID NO: 4184733 - DNA, 25 bp, Homo sapien
ccttgcctttgggtgcgcgacaaac

SEQ ID NO: 4184734 - DNA, 25 bp, Homo sapien
acaaacaatcgctccgggctcaggg

SEQ ID NO: 4184735 - DNA, 25 bp, Homo sapien
cggcgacgcctctattggctctcgg

SEQ ID NO: 4184736 - DNA, 25 bp, Homo sapien
cccaacgatgtagcgtttttcgttg

SEQ ID NO: 4184737 - DNA, 25 bp, Homo sapien
tggcaacggccgtcgtcatggttac

SEQ ID NO: 4184738 - DNA, 25 bp, Homo sapien
gttactggcccctaggcgccgatgg

SEQ ID NO: 4184739 - DNA, 25 bp, Homo sapien
aagaaggacaaaggcggcaaggcca

SEQ ID NO: 4184740 - DNA, 25 bp, Homo sapien
taccccaagtgacgtagattttgta

SEQ ID NO: 4184741 - DNA, 25 bp, Homo sapien
caaagtgcccaagggccgcaagtga

SEQ ID NO: 4184742 - DNA, 25 bp, Homo sapien
gattttgtacggctcacgccggccg

SEQ ID NO: 4184743 - DNA, 25 bp, Homo sapien
cttcaagctcaaccgcaagaagctg

SEQ ID NO: 4184744 - DNA, 25 bp, Homo sapien
ctcaagtactcgatcaaggcgctgg

SEQ ID NO: 4184745 - DNA, 25 bp, Homo sapien
ggcgccaacggttccttcaagctca

SEQ ID NO: 4184746 - DNA, 25 bp, Homo sapien
gaacgacacgcttctgcaggtgaag

SEQ ID NO: 4184747 - DNA, 25 bp, Homo sapien
caagaaggttccgtggttcgaccag

SEQ ID NO: 4184748 - DNA, 25 bp, Homo sapien
aatcctcttgctaccatgtccgtgg

SEQ ID NO: 4184749 - DNA, 25 bp, Homo sapien
gttcgaccagcagaatgggcgcacc

SEQ ID NO: 4184750 - DNA, 25 bp, Homo sapien
gatctacaccgaggccaagaaggtt

SEQ ID NO: 4184751 - DNA, 25 bp, Homo sapien
aagtggaggctgcaacggcttcaac

SEQ ID NO: 4184752 - DNA, 25 bp, Homo sapien
ggtgcacccaggaactaagagcgaa

SEQ ID NO: 4184753 - DNA, 25 bp, Homo sapien
gaggatgtcctagcgcagttcacgt

SEQ ID NO: 4184754 - DNA, 25 bp, Homo sapien
tattggcctccaaacgaggtgcccc

SEQ ID NO: 4184755 - DNA, 25 bp, Homo sapien
cacctgtaaatgttcctgtctctca

SEQ ID NO: 4184756 - DNA, 25 bp, Homo sapien
ggctcaccgtttcctcctagacata

SEQ ID NO: 4184757 - DNA, 25 bp, Homo sapien
agagaagcctgcttgggcccaaggc

SEQ ID NO: 4184758 - DNA, 25 bp, Homo sapien
tctgggaaccccaattcgccagcgt

SEQ ID NO: 4184759 - DNA, 25 bp, Homo sapien
tggtgctttcagaaacccatccccg

SEQ ID NO: 4184760 - DNA, 25 bp, Homo sapien
ggaaattcacatggtccttcttcaa

SEQ ID NO: 4184761 - DNA, 25 bp, Homo sapien
cagctgtgcagtttcggcaggctca

SEQ ID NO: 4184762 - DNA, 25 bp, Homo sapien
tgtacactgcggtcactccagctgt

SEQ ID NO: 4184763 - DNA, 25 bp, Homo sapien
gggcgggaccaagagagggagtcag

SEQ ID NO: 4184764 - DNA, 25 bp, Homo sapien
tcaggggaggtgcaacacgctttca

SEQ ID NO: 4184765 - DNA, 25 bp, Homo sapien
catcaccgagggaatggtgctaaac

SEQ ID NO: 4184766 - DNA, 25 bp, Homo sapien
caacactgaggattaaaactgaacc

SEQ ID NO: 4184767 - DNA, 25 bp, Homo sapien
agcacagggcatcaacttcttggga

SEQ ID NO: 4184768 - DNA, 25 bp, Homo sapien
gcacagggcatcaacttcttgggag

SEQ ID NO: 4184769 - DNA, 25 bp, Homo sapien
gaagcacagggcatcaacttcttgg

SEQ ID NO: 4184770 - DNA, 25 bp, Homo sapien
aggaagcacagggcatcaacttctt

SEQ ID NO: 4184771 - DNA, 25 bp, Homo sapien
attttcctaccctgcgcagaaggcc

SEQ ID NO: 4184772 - DNA, 25 bp, Homo sapien
ttgctgatcggaaaatcggcctggg

SEQ ID NO: 4184773 - DNA, 25 bp, Homo sapien
gaagaaatgcccatgcaccgacagt

SEQ ID NO: 4184774 - DNA, 25 bp, Homo sapien
ctgtagcaaagccacggaaagccat

SEQ ID NO: 4184775 - DNA, 25 bp, Homo sapien
cggcctcccagaatgggtcatacca

SEQ ID NO: 4184776 - DNA, 25 bp, Homo sapien
ctgctgagttctttgaggtgctctc

SEQ ID NO: 4184777 - DNA, 25 bp, Homo sapien
acttctgaattgaaactgtgcttcc

SEQ ID NO: 4184778 - DNA, 25 bp, Homo sapien
tgggtcataccatcacgtcagggca

SEQ ID NO: 4184779 - DNA, 25 bp, Homo sapien
ttgttgagaccttggtaggctccaa

SEQ ID NO: 4184780 - DNA, 25 bp, Homo sapien
aagggctgggatggtcaccatttgc

SEQ ID NO: 4184781 - DNA, 25 bp, Homo sapien
aggtcatcgggccatgcagggaggg

SEQ ID NO: 4184782 - DNA, 25 bp, Homo sapien
tagaaagaggtgaggttcctctcgg

SEQ ID NO: 4184783 - DNA, 25 bp, Homo sapien
agaccggccgcctgtatgaaatcac

SEQ ID NO: 4184784 - DNA, 25 bp, Homo sapien
taggaagctgcagggacatgtctct

SEQ ID NO: 4184785 - DNA, 25 bp, Homo sapien
gattctgagtgtagacccactgagg

SEQ ID NO: 4184786 - DNA, 25 bp, Homo sapien
tccaggtttggtcctcgggaggtca

SEQ ID NO: 4184787 - DNA, 25 bp, Homo sapien
tccccatcgtaaacacaaggactgc

SEQ ID NO: 4184788 - DNA, 25 bp, Homo sapien
tctgggtggtggagcaacacacact

SEQ ID NO: 4184789 - DNA, 25 bp, Homo sapien
tccgagaaacgaggagactctagac

SEQ ID NO: 4184790 - DNA, 25 bp, Homo sapien
ggagagactctaagcttctactatg

SEQ ID NO: 4184791 - DNA, 25 bp, Homo sapien
ggttctcacccacagctgttggagt

SEQ ID NO: 4184792 - DNA, 25 bp, Homo sapien
tgccaggattcgacatggactctct

SEQ ID NO: 4184793 - DNA, 25 bp, Homo sapien
cattgactctggttaccctacggtg

SEQ ID NO: 4184794 - DNA, 25 bp, Homo sapien
cctacggtgcactagatgtcaaaac

SEQ ID NO: 4184795 - DNA, 25 bp, Homo sapien
tttgaaggctacagggctgccagat

SEQ ID NO: 4184796 - DNA, 25 bp, Homo sapien
ttgaaggctacagggctgccagatg

SEQ ID NO: 4184797 - DNA, 25 bp, Homo sapien
tggaagggtggagagaggactgcag

SEQ ID NO: 4184798 - DNA, 25 bp, Homo sapien
cttggaagggtggagagaggactgc

SEQ ID NO: 4184799 - DNA, 25 bp, Homo sapien
agggtggagagaggactgcagggag

SEQ ID NO: 4184800 - DNA, 25 bp, Homo sapien
gaagggtggagagaggactgcaggg

SEQ ID NO: 4184801 - DNA, 25 bp, Homo sapien
gaccatctcccgtgtgcagggacag

SEQ ID NO: 4184802 - DNA, 25 bp, Homo sapien
gaacattgaccatctcccgtgtgca

SEQ ID NO: 4184803 - DNA, 25 bp, Homo sapien
aaagaacattgaccatctcccgtgt

SEQ ID NO: 4184804 - DNA, 25 bp, Homo sapien
cattgaccatctcccgtgtgcaggg

SEQ ID NO: 4184805 - DNA, 25 bp, Homo sapien
ccaccgctgaccaaatgcggccacg

SEQ ID NO: 4184806 - DNA, 25 bp, Homo sapien
caccgctgaccaaatgcggccacgt

SEQ ID NO: 4184807 - DNA, 25 bp, Homo sapien
cttctcatgggtcctttggagcctg

SEQ ID NO: 4184808 - DNA, 25 bp, Homo sapien
tggagcctgggttttggagtttgtc

SEQ ID NO: 4184809 - DNA, 25 bp, Homo sapien
ttctcatgggtcctttggagcctgg

SEQ ID NO: 4184810 - DNA, 25 bp, Homo sapien
gcccacacgggcgggcgccctctgc

SEQ ID NO: 4184811 - DNA, 25 bp, Homo sapien
tccagatgcctcacccgggccctct

SEQ ID NO: 4184812 - DNA, 25 bp, Homo sapien
ctccagatgcctcacccgggccctc

SEQ ID NO: 4184813 - DNA, 25 bp, Homo sapien
cgctgctgcgcccacacgggcgggc

SEQ ID NO: 4184814 - DNA, 25 bp, Homo sapien
cctgacaggcggtctggcggcctcg

SEQ ID NO: 4184815 - DNA, 25 bp, Homo sapien
gaggcgtggacaggcatcccaatgt

SEQ ID NO: 4184816 - DNA, 25 bp, Homo sapien
agggtcagcgtggacagcatggccc

SEQ ID NO: 4184817 - DNA, 25 bp, Homo sapien
ggagacggggcttccaacggccatc

SEQ ID NO: 4184818 - DNA, 25 bp, Homo sapien
gccggctccctttgagctgtctttg

SEQ ID NO: 4184819 - DNA, 25 bp, Homo sapien
cggctccctttgagctgtctttggt

SEQ ID NO: 4184820 - DNA, 25 bp, Homo sapien
gctccctttgagctgtctttggttc

SEQ ID NO: 4184821 - DNA, 25 bp, Homo sapien
tctggggcaggaattgtggctttct

SEQ ID NO: 4184822 - DNA, 25 bp, Homo sapien
catggaatagagaatgacatggagg

SEQ ID NO: 4184823 - DNA, 25 bp, Homo sapien
aggtccaccaggttccctgagtaga

SEQ ID NO: 4184824 - DNA, 25 bp, Homo sapien
tacgtccatcacagggcactgatac

SEQ ID NO: 4184825 - DNA, 25 bp, Homo sapien
ccctgagtagaaggtcagggccccg

SEQ ID NO: 4184826 - DNA, 25 bp, Homo sapien
tgtgcacgggatgtcaaaacctcct

SEQ ID NO: 4184827 - DNA, 25 bp, Homo sapien
gcagtgtggacatcttgcctggccc

SEQ ID NO: 4184828 - DNA, 25 bp, Homo sapien
gcagctgttggagtacacgcatgac

SEQ ID NO: 4184829 - DNA, 25 bp, Homo sapien
agttcaccccttgggataggatgcc

SEQ ID NO: 4184830 - DNA, 25 bp, Homo sapien
gccactgctaaagatttgctgcggg

SEQ ID NO: 4184831 - DNA, 25 bp, Homo sapien
actgctaaagatttgctgcgggtgg

SEQ ID NO: 4184832 - DNA, 25 bp, Homo sapien
agagccactgctaaagatttgctgc

SEQ ID NO: 4184833 - DNA, 25 bp, Homo sapien
aaattagagtgtgcacagcccccgt

SEQ ID NO: 4184834 - DNA, 25 bp, Homo sapien
tcccactgttggatcaattggcaaa

SEQ ID NO: 4184835 - DNA, 25 bp, Homo sapien
caacccataaaggagttcaaggtca

SEQ ID NO: 4184836 - DNA, 25 bp, Homo sapien
aagtccacgtgagccagtgcagcag

SEQ ID NO: 4184837 - DNA, 25 bp, Homo sapien
catcaagccccaaatgcactgtcaa

SEQ ID NO: 4184838 - DNA, 25 bp, Homo sapien
gggctcttcaggcatccacccccga

SEQ ID NO: 4184839 - DNA, 25 bp, Homo sapien
catccacccccgagtcctgttttgg

SEQ ID NO: 4184840 - DNA, 25 bp, Homo sapien
acagagccggcaggcgagtcaccat

SEQ ID NO: 4184841 - DNA, 25 bp, Homo sapien
ccagtaggagcccacagagccggca

SEQ ID NO: 4184842 - DNA, 25 bp, Homo sapien
tctgttcaaactgtattcaataagg

SEQ ID NO: 4184843 - DNA, 25 bp, Homo sapien
gctgtgccggaatctcagagtctac

SEQ ID NO: 4184844 - DNA, 25 bp, Homo sapien
acaagtggaggtataaacggaccat

SEQ ID NO: 4184845 - DNA, 25 bp, Homo sapien
tataaacggaccatagcctacactt

SEQ ID NO: 4184846 - DNA, 25 bp, Homo sapien
agaatggcatgaaccctggaggcgg

SEQ ID NO: 4184847 - DNA, 25 bp, Homo sapien
cagctacttgggaggctgaggcagg

SEQ ID NO: 4184848 - DNA, 25 bp, Homo sapien
gagcttgcagtgagctaagatcgca

SEQ ID NO: 4184849 - DNA, 25 bp, Homo sapien
cagagcgagactccgcctgtagtcc

SEQ ID NO: 4184850 - DNA, 25 bp, Homo sapien
tgcaggatttcatcaagggaaaaaa

SEQ ID NO: 4184851 - DNA, 25 bp, Homo sapien
caggatttcatcaagggaaaaaaag

SEQ ID NO: 4184852 - DNA, 25 bp, Homo sapien
atttcatcaagggaaaaaaagactg

SEQ ID NO: 4184853 - DNA, 25 bp, Homo sapien
ctgcaggatttcatcaagggaaaaa

SEQ ID NO: 4184854 - DNA, 25 bp, Homo sapien
tgtgacacccaagcaagcaatctgg

SEQ ID NO: 4184855 - DNA, 25 bp, Homo sapien
ctggtaggcttccttgaacagtttc

SEQ ID NO: 4184856 - DNA, 25 bp, Homo sapien
agtgtctgtgacacccaagcaagca

SEQ ID NO: 4184857 - DNA, 25 bp, Homo sapien
gcaagcaatctggtaggcttccttg

SEQ ID NO: 4184858 - DNA, 25 bp, Homo sapien
acaaaatgagcagctccttaattga

SEQ ID NO: 4184859 - DNA, 25 bp, Homo sapien
cagcccaggaatatggacaaaatga

SEQ ID NO: 4184860 - DNA, 25 bp, Homo sapien
aatatggacaaaatgagcagctcct

SEQ ID NO: 4184861 - DNA, 25 bp, Homo sapien
tggacaaaatgagcagctccttaat

SEQ ID NO: 4184862 - DNA, 25 bp, Homo sapien
actgtagcctctgtctccctggttc

SEQ ID NO: 4184863 - DNA, 25 bp, Homo sapien
tcactgtagcctctgtctccctggt

SEQ ID NO: 4184864 - DNA, 25 bp, Homo sapien
ccctggttcaagcaattctgcccca

SEQ ID NO: 4184865 - DNA, 25 bp, Homo sapien
ctggttcaagcaattctgccccagc

SEQ ID NO: 4184866 - DNA, 25 bp, Homo sapien
ccatctagtggggatggcataccat

SEQ ID NO: 4184867 - DNA, 25 bp, Homo sapien
gatggcataccatcactggggacca

SEQ ID NO: 4184868 - DNA, 25 bp, Homo sapien
tgtgcaaactggtgagcctgagtgc

SEQ ID NO: 4184869 - DNA, 25 bp, Homo sapien
cctgtgcaaactggtgagcctgagt

SEQ ID NO: 4184870 - DNA, 25 bp, Homo sapien
ggtctttccagctctaggtcggctg

SEQ ID NO: 4184871 - DNA, 25 bp, Homo sapien
ggagcattcgaggtctcagtcctcg

SEQ ID NO: 4184872 - DNA, 25 bp, Homo sapien
gggctgctagtgacaccctctcaag

SEQ ID NO: 4184873 - DNA, 25 bp, Homo sapien
ctgtgctggagtctaggatttgccc

SEQ ID NO: 4184874 - DNA, 25 bp, Homo sapien
cagtagctgttgtgccaagctgcag

SEQ ID NO: 4184875 - DNA, 25 bp, Homo sapien
tatacactaccctctagatctgggt

SEQ ID NO: 4184876 - DNA, 25 bp, Homo sapien
caatgcgggcatcacatgggctaag

SEQ ID NO: 4184877 - DNA, 25 bp, Homo sapien
aattcatagaaaagggcaatgcggg

SEQ ID NO: 4184878 - DNA, 25 bp, Homo sapien
ctaagctagttttgctgctttcaga

SEQ ID NO: 4184879 - DNA, 25 bp, Homo sapien
gtaaagccagagactttaactcatg

SEQ ID NO: 4184880 - DNA, 25 bp, Homo sapien
agctaagctagttttgctgctttca

SEQ ID NO: 4184881 - DNA, 25 bp, Homo sapien
gagactttaactcatggacctctag

SEQ ID NO: 4184882 - DNA, 25 bp, Homo sapien
gctgatgaggtcttgtactctgatg

SEQ ID NO: 4184883 - DNA, 25 bp, Homo sapien
tgctgctgatgaggtcttgtactct

SEQ ID NO: 4184884 - DNA, 25 bp, Homo sapien
tgaggtcttgtactctgatgaaagc

SEQ ID NO: 4184885 - DNA, 25 bp, Homo sapien
ctcaatgctgctgatgaggtcttgt

SEQ ID NO: 4184886 - DNA, 25 bp, Homo sapien
taacgactgctggaggcaacatgct

SEQ ID NO: 4184887 - DNA, 25 bp, Homo sapien
tgatccctacactttaggagggcac

SEQ ID NO: 4184888 - DNA, 25 bp, Homo sapien
cggaggacgatgagacattgaatca

SEQ ID NO: 4184889 - DNA, 25 bp, Homo sapien
tagcaagagtagcatgtcggaggac

SEQ ID NO: 4184890 - DNA, 25 bp, Homo sapien
gaaacaggtcattgttggtctctcc

SEQ ID NO: 4184891 - DNA, 25 bp, Homo sapien
ccagaaacaggtcattgttggtctc

SEQ ID NO: 4184892 - DNA, 25 bp, Homo sapien
tctgccagaaacaggtcattgttgg

SEQ ID NO: 4184893 - DNA, 25 bp, Homo sapien
tgccagaaacaggtcattgttggtc

SEQ ID NO: 4184894 - DNA, 25 bp, Homo sapien
cagctccagggtcgaatagatggtg

SEQ ID NO: 4184895 - DNA, 25 bp, Homo sapien
gctccagggtcgaatagatggtgga

SEQ ID NO: 4184896 - DNA, 25 bp, Homo sapien
ctccagggtcgaatagatggtggaa

SEQ ID NO: 4184897 - DNA, 25 bp, Homo sapien
ttcagctccagggtcgaatagatgg

SEQ ID NO: 4184898 - DNA, 25 bp, Homo sapien
tctcaggtacggagtgaagaaatca

SEQ ID NO: 4184899 - DNA, 25 bp, Homo sapien
gcccaggagctcgtccaagtcctga

SEQ ID NO: 4184900 - DNA, 25 bp, Homo sapien
atcactaaggtgaaaagacaggctg

SEQ ID NO: 4184901 - DNA, 25 bp, Homo sapien
agactgcagtacagctgtctccttg

SEQ ID NO: 4184902 - DNA, 25 bp, Homo sapien
ggtgactttgggctctttcatattt

SEQ ID NO: 4184903 - DNA, 25 bp, Homo sapien
gtgactttgggctctttcatatttc

SEQ ID NO: 4184904 - DNA, 25 bp, Homo sapien
tggactctggcttcgggcccctggg

SEQ ID NO: 4184905 - DNA, 25 bp, Homo sapien
ccctggactctggcttcgggcccct

SEQ ID NO: 4184906 - DNA, 25 bp, Homo sapien
ctgccaagaggaaaggccacccggg

SEQ ID NO: 4184907 - DNA, 25 bp, Homo sapien
cctccccctggactctggcttcggg

SEQ ID NO: 4184908 - DNA, 25 bp, Homo sapien
agcagcgggttgttggtggagcagc

SEQ ID NO: 4184909 - DNA, 25 bp, Homo sapien
aagatgaagggctggcggcagttga

SEQ ID NO: 4184910 - DNA, 25 bp, Homo sapien
agcggtagcacaagggcaccaactc

SEQ ID NO: 4184911 - DNA, 25 bp, Homo sapien
tgatgcagacgttgcccaggttgtt

SEQ ID NO: 4184912 - DNA, 25 bp, Homo sapien
aggcctttggcccttgcccaatgtc

SEQ ID NO: 4184913 - DNA, 25 bp, Homo sapien
gaggcctttggcccttgcccaatgt

SEQ ID NO: 4184914 - DNA, 25 bp, Homo sapien
atttcttgggagtgagaatggcggg

SEQ ID NO: 4184915 - DNA, 25 bp, Homo sapien
cagtcccctcgcatcccattggtgt

SEQ ID NO: 4184916 - DNA, 25 bp, Homo sapien
ctgtgctcgccatctcaatatctac

SEQ ID NO: 4184917 - DNA, 25 bp, Homo sapien
aatatctacacagtcccctcgcatc

SEQ ID NO: 4184918 - DNA, 25 bp, Homo sapien
ggctacttcttccccaaaaggcatc

SEQ ID NO: 4184919 - DNA, 25 bp, Homo sapien
caagaaattcatccggcaccagtca

SEQ ID NO: 4184920 - DNA, 25 bp, Homo sapien
cccaaaaggcatcatggctgccctc

SEQ ID NO: 4184921 - DNA, 25 bp, Homo sapien
tcagaccgatatgtcaaaatcaagg

SEQ ID NO: 4184922 - DNA, 25 bp, Homo sapien
cctgggcgggaaagcctccttccag

SEQ ID NO: 4184923 - DNA, 25 bp, Homo sapien
tcagtccctgggcgggaaagcctcc

SEQ ID NO: 4184924 - DNA, 25 bp, Homo sapien
gcgggaaagcctccttccaggattc

SEQ ID NO: 4184925 - DNA, 25 bp, Homo sapien
ggaaagcctccttccaggattcttc

SEQ ID NO: 4184926 - DNA, 25 bp, Homo sapien
tcctgggatcgcatctggagactgc

SEQ ID NO: 4184927 - DNA, 25 bp, Homo sapien
tcagctgttggcattctttgggctc

SEQ ID NO: 4184928 - DNA, 25 bp, Homo sapien
ggtgggatttgctgccccttgcaaa

SEQ ID NO: 4184929 - DNA, 25 bp, Homo sapien
cccttgcaaattgagagtgtcttgg

SEQ ID NO: 4184930 - DNA, 25 bp, Homo sapien
ccaagttcatgggtcattagttaga

SEQ ID NO: 4184931 - DNA, 25 bp, Homo sapien
gcctggcatgctttgtaatagtgtt

SEQ ID NO: 4184932 - DNA, 25 bp, Homo sapien
tgcatccctcaatattgctttaagc

SEQ ID NO: 4184933 - DNA, 25 bp, Homo sapien
ttttagctgggacacttagtatctg

SEQ ID NO: 4184934 - DNA, 25 bp, Homo sapien
ggagaccttttgagcagccctgtat

SEQ ID NO: 4184935 - DNA, 25 bp, Homo sapien
gcctttaacacaagatggccatata

SEQ ID NO: 4184936 - DNA, 25 bp, Homo sapien
gattcttgttcccagttctacccat

SEQ ID NO: 4184937 - DNA, 25 bp, Homo sapien
tataatacctcagtgaataagagat

SEQ ID NO: 4184938 - DNA, 25 bp, Homo sapien
gatataaagactgcagcatggcagc

SEQ ID NO: 4184939 - DNA, 25 bp, Homo sapien
ctcaggacccgaagcaagtgcaaaa

SEQ ID NO: 4184940 - DNA, 25 bp, Homo sapien
tcagccaaagactcagaacacaacg

SEQ ID NO: 4184941 - DNA, 25 bp, Homo sapien
tatgccgccaagtagtagttcagag

SEQ ID NO: 4184942 - DNA, 25 bp, Homo sapien
gcatgtccgaaagggaaagccagaa

SEQ ID NO: 4184943 - DNA, 25 bp, Homo sapien
gcgccttgctccgagcgcgcatgtc

SEQ ID NO: 4184944 - DNA, 25 bp, Homo sapien
cgagcgcgcatgtccgaaagggaaa

SEQ ID NO: 4184945 - DNA, 25 bp, Homo sapien
atgcgcggtaagctgagtgcgaggg

SEQ ID NO: 4184946 - DNA, 25 bp, Homo sapien
tcagcaaccgcctcactaacggtcg

SEQ ID NO: 4184947 - DNA, 25 bp, Homo sapien
agcgtctgtctcagcaaccgcctca

SEQ ID NO: 4184948 - DNA, 25 bp, Homo sapien
tggctacctgcgttacccctggcaa

SEQ ID NO: 4184949 - DNA, 25 bp, Homo sapien
gtcgccactccacaagccactttgg

SEQ ID NO: 4184950 - DNA, 25 bp, Homo sapien
cacggcttcccttacggctcgggct

SEQ ID NO: 4184951 - DNA, 25 bp, Homo sapien
cagtgctcggctttatctctccacg

SEQ ID NO: 4184952 - DNA, 25 bp, Homo sapien
tcggctttatctctccacgtcaaca

SEQ ID NO: 4184953 - DNA, 25 bp, Homo sapien
gctcggctttatctctccacgtcaa

SEQ ID NO: 4184954 - DNA, 25 bp, Homo sapien
tgctcggctttatctctccacgtca

SEQ ID NO: 4184955 - DNA, 25 bp, Homo sapien
cgtctccaacgtgagccttgaagga

SEQ ID NO: 4184956 - DNA, 25 bp, Homo sapien
tagtgtcagctaccactagtgccga

SEQ ID NO: 4184957 - DNA, 25 bp, Homo sapien
tatgaagtgcttagccagcacctgg

SEQ ID NO: 4184958 - DNA, 25 bp, Homo sapien
tgccgaacacaaaagagaggacccg

SEQ ID NO: 4184959 - DNA, 25 bp, Homo sapien
atttggaaacgagtaagacatagcc

SEQ ID NO: 4184960 - DNA, 25 bp, Homo sapien
gacatagccattgcctttaacgggt

SEQ ID NO: 4184961 - DNA, 25 bp, Homo sapien
gactctggaagtaccacaagagaga

SEQ ID NO: 4184962 - DNA, 25 bp, Homo sapien
cagagcaaatcaggctgcattcggc

SEQ ID NO: 4184963 - DNA, 25 bp, Homo sapien
tatccatagtaacaacaaccactga

SEQ ID NO: 4184964 - DNA, 25 bp, Homo sapien
cacgtatgaatacatctacccacag

SEQ ID NO: 4184965 - DNA, 25 bp, Homo sapien
gattgatggtctatagaacccctac

SEQ ID NO: 4184966 - DNA, 25 bp, Homo sapien
gtctcaaatctgtaatgggccaaaa

SEQ ID NO: 4184967 - DNA, 25 bp, Homo sapien
gacgtggggccagaaaagctgatct

SEQ ID NO: 4184968 - DNA, 25 bp, Homo sapien
agctgatctcctatctgagctttca

SEQ ID NO: 4184969 - DNA, 25 bp, Homo sapien
tttgagaagcagcatggcggaataa

SEQ ID NO: 4184970 - DNA, 25 bp, Homo sapien
cagcatggcggaataaaaagtaggg

SEQ ID NO: 4184971 - DNA, 25 bp, Homo sapien
agacaattaggaaccaaaatgatga

SEQ ID NO: 4184972 - DNA, 25 bp, Homo sapien
gacaattaggaaccaaaatgatgaa

SEQ ID NO: 4184973 - DNA, 25 bp, Homo sapien
aagacaattaggaaccaaaatgatg

SEQ ID NO: 4184974 - DNA, 25 bp, Homo sapien
aaagacaattaggaaccaaaatgat

SEQ ID NO: 4184975 - DNA, 25 bp, Homo sapien
gcttccggcagccaaaatcagttga

SEQ ID NO: 4184976 - DNA, 25 bp, Homo sapien
ggcagccaaaatcagttgagttcca

SEQ ID NO: 4184977 - DNA, 25 bp, Homo sapien
ttccggcagccaaaatcagttgagt

SEQ ID NO: 4184978 - DNA, 25 bp, Homo sapien
tgagttccatcaggcttaaatgcga

SEQ ID NO: 4184979 - DNA, 25 bp, Homo sapien
acagtgtctttgtgtcccttgaggg

SEQ ID NO: 4184980 - DNA, 25 bp, Homo sapien
tgaggggctgaagtaaggtgccatc

SEQ ID NO: 4184981 - DNA, 25 bp, Homo sapien
catccttcgcatatgccacacagta

SEQ ID NO: 4184982 - DNA, 25 bp, Homo sapien
aggtgccatcagaggtgtcataaac

SEQ ID NO: 4184983 - DNA, 25 bp, Homo sapien
ggctcccagagctttaggatttcag

SEQ ID NO: 4184984 - DNA, 25 bp, Homo sapien
tcacccaggccagattttagggagt

SEQ ID NO: 4184985 - DNA, 25 bp, Homo sapien
tatgcaggactaaagtgaagagact

SEQ ID NO: 4184986 - DNA, 25 bp, Homo sapien
cactaatcctatgctgtgggacaac

SEQ ID NO: 4184987 - DNA, 25 bp, Homo sapien
gctgcatgacccaaacaagctactg

SEQ ID NO: 4184988 - DNA, 25 bp, Homo sapien
gtcagaattcctagagatctcactg

SEQ ID NO: 4184989 - DNA, 25 bp, Homo sapien
caaacaagctactgaagagctttca

SEQ ID NO: 4184990 - DNA, 25 bp, Homo sapien
tcctccctcatcctggtaggtagca

SEQ ID NO: 4184991 - DNA, 25 bp, Homo sapien
agttttgatgtccagataataacgc

SEQ ID NO: 4184992 - DNA, 25 bp, Homo sapien
tccagataataacgcttttgtcagc

SEQ ID NO: 4184993 - DNA, 25 bp, Homo sapien
taataacgcttttgtcagctgatcc

SEQ ID NO: 4184994 - DNA, 25 bp, Homo sapien
acgcttttgtcagctgatccagaag

SEQ ID NO: 4184995 - DNA, 25 bp, Homo sapien
ggtgcaatgaagacatcacagacca

SEQ ID NO: 4184996 - DNA, 25 bp, Homo sapien
caatgaagacatcacagaccaagat

SEQ ID NO: 4184997 - DNA, 25 bp, Homo sapien
ggcctttaggtgctttatctgtggc

SEQ ID NO: 4184998 - DNA, 25 bp, Homo sapien
cctttaggtgctttatctgtggctg

SEQ ID NO: 4184999 - DNA, 25 bp, Homo sapien
gatttcagtggctacaactgaagat

SEQ ID NO: 4185000 - DNA, 25 bp, Homo sapien
ctgtagattactatgcagcaaacca

SEQ ID NO: 4185001 - DNA, 25 bp, Homo sapien
gaagattttaataatgagcccacag

SEQ ID NO: 4185002 - DNA, 25 bp, Homo sapien
cagcctctgactttagaccacatgc

SEQ ID NO: 4185003 - DNA, 25 bp, Homo sapien
ttgatgagtaataggattgtaggag

SEQ ID NO: 4185004 - DNA, 25 bp, Homo sapien
gatgagtaataggattgtaggagac

SEQ ID NO: 4185005 - DNA, 25 bp, Homo sapien
gagtaataggattgtaggagacaca

SEQ ID NO: 4185006 - DNA, 25 bp, Homo sapien
tgagtaataggattgtaggagacac

SEQ ID NO: 4185007 - DNA, 25 bp, Homo sapien
taagtggtaactgcatggtgatggc

SEQ ID NO: 4185008 - DNA, 25 bp, Homo sapien
gctgatggcaatctacacatgcgat

SEQ ID NO: 4185009 - DNA, 25 bp, Homo sapien
gatggcttagttctgtgtcacgctg

SEQ ID NO: 4185010 - DNA, 25 bp, Homo sapien
caacaacttagatggatctccagga

SEQ ID NO: 4185011 - DNA, 25 bp, Homo sapien
gacagacttctgttcaggagaccac

SEQ ID NO: 4185012 - DNA, 25 bp, Homo sapien
gagacagacttctgttcaggagacc

SEQ ID NO: 4185013 - DNA, 25 bp, Homo sapien
gacttctgttcaggagaccacaacc

SEQ ID NO: 4185014 - DNA, 25 bp, Homo sapien
cagacttctgttcaggagaccacaa

SEQ ID NO: 4185015 - DNA, 25 bp, Homo sapien
ttttcaacaagcctccactcagtat

SEQ ID NO: 4185016 - DNA, 25 bp, Homo sapien
atagctggatgttgaggcttgttgc

SEQ ID NO: 4185017 - DNA, 25 bp, Homo sapien
tgaggcttgttgctaagtaactgca

SEQ ID NO: 4185018 - DNA, 25 bp, Homo sapien
gcctccactcagtatagctggatgt

SEQ ID NO: 4185019 - DNA, 25 bp, Homo sapien
tgacataaagtcagaggatcaaact

SEQ ID NO: 4185020 - DNA, 25 bp, Homo sapien
ggtttcattattgccggtcctgaca

SEQ ID NO: 4185021 - DNA, 25 bp, Homo sapien
tattgccggtcctgacataaagtca

SEQ ID NO: 4185022 - DNA, 25 bp, Homo sapien
acagctgggatatggtttcattatt

SEQ ID NO: 4185023 - DNA, 25 bp, Homo sapien
caccccacagaaggtaaaactagtg

SEQ ID NO: 4185024 - DNA, 25 bp, Homo sapien
ccccacagaaggtaaaactagtgag

SEQ ID NO: 4185025 - DNA, 25 bp, Homo sapien
tgtgtacacaaccaacaaaaggcat

SEQ ID NO: 4185026 - DNA, 25 bp, Homo sapien
ctgtgtacacaaccaacaaaaggca

SEQ ID NO: 4185027 - DNA, 25 bp, Homo sapien
gaagggttccagcagatggaccata

SEQ ID NO: 4185028 - DNA, 25 bp, Homo sapien
ttccagcagatggaccatattggcg

SEQ ID NO: 4185029 - DNA, 25 bp, Homo sapien
ctttactttctcctcgccatttttg

SEQ ID NO: 4185030 - DNA, 25 bp, Homo sapien
cgtatgctgatgatcccattgaaca

SEQ ID NO: 4185031 - DNA, 25 bp, Homo sapien
gacaatgacatcctcggcatcctca

SEQ ID NO: 4185032 - DNA, 25 bp, Homo sapien
gaagggatttcctgaatatatctgt

SEQ ID NO: 4185033 - DNA, 25 bp, Homo sapien
aagttgtcgtccctgggactgtcgt

SEQ ID NO: 4185034 - DNA, 25 bp, Homo sapien
tcactaccctgactactgtacactg

SEQ ID NO: 4185035 - DNA, 25 bp, Homo sapien
cacagccaggatgtcattacgttcc

SEQ ID NO: 4185036 - DNA, 25 bp, Homo sapien
agccaggatgtcattacgttcctct

SEQ ID NO: 4185037 - DNA, 25 bp, Homo sapien
acagccaggatgtcattacgttcct

SEQ ID NO: 4185038 - DNA, 25 bp, Homo sapien
ccacagccaggatgtcattacgttc

SEQ ID NO: 4185039 - DNA, 25 bp, Homo sapien
gctggtagaaggaaactttctgtcc

SEQ ID NO: 4185040 - DNA, 25 bp, Homo sapien
agctggtagaaggaaactttctgtc

SEQ ID NO: 4185041 - DNA, 25 bp, Homo sapien
tgtgctcgcctatcccattgcactt

SEQ ID NO: 4185042 - DNA, 25 bp, Homo sapien
tatcccattgcacttctctcgttgt

SEQ ID NO: 4185043 - DNA, 25 bp, Homo sapien
acagcacttgtgctcgcctatccca

SEQ ID NO: 4185044 - DNA, 25 bp, Homo sapien
ctatcccattgcacttctctcgttg

SEQ ID NO: 4185045 - DNA, 25 bp, Homo sapien
tgtttctccttgttgtcccggctag

SEQ ID NO: 4185046 - DNA, 25 bp, Homo sapien
cattttagtgagtgcgaattatctc

SEQ ID NO: 4185047 - DNA, 25 bp, Homo sapien
actgctacacttttcaagtgaatgc

SEQ ID NO: 4185048 - DNA, 25 bp, Homo sapien
cagatgtgtgagaacacgcctggct

SEQ ID NO: 4185049 - DNA, 25 bp, Homo sapien
cataaccattgcaatacaattaagg

SEQ ID NO: 4185050 - DNA, 25 bp, Homo sapien
aaaccatttccgaatccataaccat

SEQ ID NO: 4185051 - DNA, 25 bp, Homo sapien
accattgcaatacaattaagggctt

SEQ ID NO: 4185052 - DNA, 25 bp, Homo sapien
catttccgaatccataaccattgca

SEQ ID NO: 4185053 - DNA, 25 bp, Homo sapien
agagatacttgcttgtctgaacccc

SEQ ID NO: 4185054 - DNA, 25 bp, Homo sapien
ggtcaaagttcagtgcccgatcctt

SEQ ID NO: 4185055 - DNA, 25 bp, Homo sapien
aatccggtttcgcttgacacgtcca

SEQ ID NO: 4185056 - DNA, 25 bp, Homo sapien
gcaaaatgtactcgcctttagtaaa

SEQ ID NO: 4185057 - DNA, 25 bp, Homo sapien
agaaggaaatggtgccgtcctggca

SEQ ID NO: 4185058 - DNA, 25 bp, Homo sapien
aaatggtgccgtcctggcagccgac

SEQ ID NO: 4185059 - DNA, 25 bp, Homo sapien
gaaatggtgccgtcctggcagccga

SEQ ID NO: 4185060 - DNA, 25 bp, Homo sapien
ctggtagaaggaaatggtgccgtcc

SEQ ID NO: 4185061 - DNA, 25 bp, Homo sapien
gacgtcagtcatgctatccctgtag

SEQ ID NO: 4185062 - DNA, 25 bp, Homo sapien
tatccctgtaggcatagcggtcctt

SEQ ID NO: 4185063 - DNA, 25 bp, Homo sapien
tgctcagtgatcaggtgctgcacaa

SEQ ID NO: 4185064 - DNA, 25 bp, Homo sapien
ttgtaaagcccatggactgtgctga

SEQ ID NO: 4185065 - DNA, 25 bp, Homo sapien
tctctggcagttggatagccaatcg

SEQ ID NO: 4185066 - DNA, 25 bp, Homo sapien
ctttacccggtaatgcatgtctgat

SEQ ID NO: 4185067 - DNA, 25 bp, Homo sapien
gatggcaatcttcttgacaagctct

SEQ ID NO: 4185068 - DNA, 25 bp, Homo sapien
gatgatgtgattggcacacaccacc

SEQ ID NO: 4185069 - DNA, 25 bp, Homo sapien
gatgtaacgaatgagagactccatc

SEQ ID NO: 4185070 - DNA, 25 bp, Homo sapien
tccaggagggccaccgatcaccttg

SEQ ID NO: 4185071 - DNA, 25 bp, Homo sapien
gccaccgatcaccttgatgtaacga

SEQ ID NO: 4185072 - DNA, 25 bp, Homo sapien
tcactccgctgaaggacaggcactg

SEQ ID NO: 4185073 - DNA, 25 bp, Homo sapien
tgtcatacaccaggcaagtgtcatt

SEQ ID NO: 4185074 - DNA, 25 bp, Homo sapien
tagcaaagagattgtccacgaagat

SEQ ID NO: 4185075 - DNA, 25 bp, Homo sapien
gcttcagcaggacgatagcaaagag

SEQ ID NO: 4185076 - DNA, 25 bp, Homo sapien
gccagcttcttacgggaggcactca

SEQ ID NO: 4185077 - DNA, 25 bp, Homo sapien
gcatgtcctcacactgggtgttcca

SEQ ID NO: 4185078 - DNA, 25 bp, Homo sapien
tggaggcagaagatcttggagccat

SEQ ID NO: 4185079 - DNA, 25 bp, Homo sapien
gaagatcttggagccattgtagccg

SEQ ID NO: 4185080 - DNA, 25 bp, Homo sapien
attgtagccgaccacaaagccctgc

SEQ ID NO: 4185081 - DNA, 25 bp, Homo sapien
ccgctgcgtcagcaggatggccttg

SEQ ID NO: 4185082 - DNA, 25 bp, Homo sapien
ctgcgtcagcaggatggccttggtg

SEQ ID NO: 4185083 - DNA, 25 bp, Homo sapien
tgcgtcagcaggatggccttggtgc

SEQ ID NO: 4185084 - DNA, 25 bp, Homo sapien
gctgcgtcagcaggatggccttggt

SEQ ID NO: 4185085 - DNA, 25 bp, Homo sapien
tataaaaggcttttggctgtcccca

SEQ ID NO: 4185086 - DNA, 25 bp, Homo sapien
gatcgcaggttgtgccgcagttaca

SEQ ID NO: 4185087 - DNA, 25 bp, Homo sapien
gcatatgtgcgtgcaggcctgagaa

SEQ ID NO: 4185088 - DNA, 25 bp, Homo sapien
gacagatgccctcctacaagatggg

SEQ ID NO: 4185089 - DNA, 25 bp, Homo sapien
acaggcctgcctcgccataggatgt

SEQ ID NO: 4185090 - DNA, 25 bp, Homo sapien
gagcctgcctccagatgcgtgggat

SEQ ID NO: 4185091 - DNA, 25 bp, Homo sapien
tctctcatgactgggctactgtgct

SEQ ID NO: 4185092 - DNA, 25 bp, Homo sapien
aagaagactgttttcagagccatgg

SEQ ID NO: 4185093 - DNA, 25 bp, Homo sapien
ctggtaggcttccttgaacagtttc

SEQ ID NO: 4185094 - DNA, 25 bp, Homo sapien
agtgtctgtgacacccaagcaagca

SEQ ID NO: 4185095 - DNA, 25 bp, Homo sapien
tgtgacacccaagcaagcaatctgg

SEQ ID NO: 4185096 - DNA, 25 bp, Homo sapien
gcaagcaatctggtaggcttccttg

SEQ ID NO: 4185097 - DNA, 25 bp, Homo sapien
gtcttgatctaacccaaggcgggca

SEQ ID NO: 4185098 - DNA, 25 bp, Homo sapien
caggctactagtcaggtgcttccca

SEQ ID NO: 4185099 - DNA, 25 bp, Homo sapien
taaaagccgccatttacggagtgcc

SEQ ID NO: 4185100 - DNA, 25 bp, Homo sapien
tgaatcccgccatgaaggtacgtgg

SEQ ID NO: 4185101 - DNA, 25 bp, Homo sapien
cagattaatcatcgtgcgtgcagga

SEQ ID NO: 4185102 - DNA, 25 bp, Homo sapien
catggctttatccatgggattggac

SEQ ID NO: 4185103 - DNA, 25 bp, Homo sapien
ttataccacccagcgaggcatggct

SEQ ID NO: 4185104 - DNA, 25 bp, Homo sapien
gggaagtcaagctctatctagacag

SEQ ID NO: 4185105 - DNA, 25 bp, Homo sapien
tgatgagctctaaatatcggaggtc

SEQ ID NO: 4185106 - DNA, 25 bp, Homo sapien
ctaaatatcggaggtcttgtactct

SEQ ID NO: 4185107 - DNA, 25 bp, Homo sapien
aatgctgctgatgagctctaaatat

SEQ ID NO: 4185108 - DNA, 25 bp, Homo sapien
tgagctctaaatatcggaggtcttg

SEQ ID NO: 4185109 - DNA, 25 bp, Homo sapien
gaaacaggtcattgttggtctctcc

SEQ ID NO: 4185110 - DNA, 25 bp, Homo sapien
tctgccagaaacaggtcattgttgg

SEQ ID NO: 4185111 - DNA, 25 bp, Homo sapien
ccagaaacaggtcattgttggtctc

SEQ ID NO: 4185112 - DNA, 25 bp, Homo sapien
tgccagaaacaggtcattgttggtc

SEQ ID NO: 4185113 - DNA, 25 bp, Homo sapien
catactcaaacatgcagaggtcggt

SEQ ID NO: 4185114 - DNA, 25 bp, Homo sapien
tcaagcgcgaggttctcgtgcccac

SEQ ID NO: 4185115 - DNA, 25 bp, Homo sapien
cagaggtcggtgtacatttcaagcg

SEQ ID NO: 4185116 - DNA, 25 bp, Homo sapien
cctcttgtacagtttggcggcctca

SEQ ID NO: 4185117 - DNA, 25 bp, Homo sapien
ggtcaggcattttctactgcagcac

SEQ ID NO: 4185118 - DNA, 25 bp, Homo sapien
aaaatatgccacgttaatcaggact

SEQ ID NO: 4185119 - DNA, 25 bp, Homo sapien
tctgaaaaccagattgaatcttggg

SEQ ID NO: 4185120 - DNA, 25 bp, Homo sapien
ggaaccaacctccttggaatagtga

SEQ ID NO: 4185121 - DNA, 25 bp, Homo sapien
caatttatttgtacgtgggaatgta

SEQ ID NO: 4185122 - DNA, 25 bp, Homo sapien
cacagatctcgatggccttgacgtg

SEQ ID NO: 4185123 - DNA, 25 bp, Homo sapien
gccttgacgtgctctcctgctgaga

SEQ ID NO: 4185124 - DNA, 25 bp, Homo sapien
tgtacatctccacggcggctttggg

SEQ ID NO: 4185125 - DNA, 25 bp, Homo sapien
tgagatgtacatctccacggcggct

SEQ ID NO: 4185126 - DNA, 25 bp, Homo sapien
agcttcttgaggtaggtagcgcaca

SEQ ID NO: 4185127 - DNA, 25 bp, Homo sapien
ttcaggtaggtctcagcagcatagc

SEQ ID NO: 4185128 - DNA, 25 bp, Homo sapien
cagtttgcgggcgatgtcgatcaac

SEQ ID NO: 4185129 - DNA, 25 bp, Homo sapien
cagcagcatagccagggctgtccag

SEQ ID NO: 4185130 - DNA, 25 bp, Homo sapien
tacccagcaggttttaaatgtcacg

SEQ ID NO: 4185131 - DNA, 25 bp, Homo sapien
ttggcacagctcctaatcctctcgg

SEQ ID NO: 4185132 - DNA, 25 bp, Homo sapien
ggctaattctttacagcccctgaca

SEQ ID NO: 4185133 - DNA, 25 bp, Homo sapien
agccatgtgtctgagcctgtggtgc

SEQ ID NO: 4185134 - DNA, 25 bp, Homo sapien
gtcagacggctcctctcagtgaagg

SEQ ID NO: 4185135 - DNA, 25 bp, Homo sapien
acaacagtcagacggctcctctcag

SEQ ID NO: 4185136 - DNA, 25 bp, Homo sapien
acagtcagacggctcctctcagtga

SEQ ID NO: 4185137 - DNA, 25 bp, Homo sapien
gcagacaacagtcagacggctcctc

SEQ ID NO: 4185138 - DNA, 25 bp, Homo sapien
gggctcctgtagtgctgcaaacaga

SEQ ID NO: 4185139 - DNA, 25 bp, Homo sapien
acagaagcggcacagaatcggaaac

SEQ ID NO: 4185140 - DNA, 25 bp, Homo sapien
tattttgagggtttgcgtgggctcc

SEQ ID NO: 4185141 - DNA, 25 bp, Homo sapien
gatttcttttaattgcgggcgacac

SEQ ID NO: 4185142 - DNA, 25 bp, Homo sapien
tagccactgagcatacggcatgtag

SEQ ID NO: 4185143 - DNA, 25 bp, Homo sapien
tgtagatgtcatccttaaactcagg

SEQ ID NO: 4185144 - DNA, 25 bp, Homo sapien
ggatgcttctcacccaaagcaaagg

SEQ ID NO: 4185145 - DNA, 25 bp, Homo sapien
gcgatcgttctctgctagccactga

SEQ ID NO: 4185146 - DNA, 25 bp, Homo sapien
tacataggttaagtgctcagccagg

SEQ ID NO: 4185147 - DNA, 25 bp, Homo sapien
gaagtcacccgtttatctgagccag

SEQ ID NO: 4185148 - DNA, 25 bp, Homo sapien
ccccttgagatgttggtggctgcca

SEQ ID NO: 4185149 - DNA, 25 bp, Homo sapien
taaacgggaagatacactgcagtgc

SEQ ID NO: 4185150 - DNA, 25 bp, Homo sapien
acggcattgtttgtgagctgctcca

SEQ ID NO: 4185151 - DNA, 25 bp, Homo sapien
tatcgaggcactgcatggacagcat

SEQ ID NO: 4185152 - DNA, 25 bp, Homo sapien
ataataggcagcatcattaaacctg

SEQ ID NO: 4185153 - DNA, 25 bp, Homo sapien
ggacagcatccagtaataataggca

SEQ ID NO: 4185154 - DNA, 25 bp, Homo sapien
ctgccaaccataaccccaggacggt

SEQ ID NO: 4185155 - DNA, 25 bp, Homo sapien
gacggtcctcataccattctgatgg

SEQ ID NO: 4185156 - DNA, 25 bp, Homo sapien
ccaggacggtcctcataccattctg

SEQ ID NO: 4185157 - DNA, 25 bp, Homo sapien
ggtcctcataccattctgatgggca

SEQ ID NO: 4185158 - DNA, 25 bp, Homo sapien
gggagagatatgctctgaattagca

SEQ ID NO: 4185159 - DNA, 25 bp, Homo sapien
tagcaggggagagatatgctctgaa

SEQ ID NO: 4185160 - DNA, 25 bp, Homo sapien
gagatatgctctgaattagcaatgc

SEQ ID NO: 4185161 - DNA, 25 bp, Homo sapien
tatgctctgaattagcaatgcaggg

SEQ ID NO: 4185162 - DNA, 25 bp, Homo sapien
aaacgtgtcaaacagtgtctgtggc

SEQ ID NO: 4185163 - DNA, 25 bp, Homo sapien
gggaaacgtgtcaaacagtgtctgt

SEQ ID NO: 4185164 - DNA, 25 bp, Homo sapien
gaaacgtgtcaaacagtgtctgtgg

SEQ ID NO: 4185165 - DNA, 25 bp, Homo sapien
acgtgtcaaacagtgtctgtggctg

SEQ ID NO: 4185166 - DNA, 25 bp, Homo sapien
cgtgtggcgatggatggcatggtaa

SEQ ID NO: 4185167 - DNA, 25 bp, Homo sapien
ccaagcattgtgtccttctgggcag

SEQ ID NO: 4185168 - DNA, 25 bp, Homo sapien
gcgatggatggcatggtaaccatgg

SEQ ID NO: 4185169 - DNA, 25 bp, Homo sapien
tctgccaaacgctggaagtggtaga

SEQ ID NO: 4185170 - DNA, 25 bp, Homo sapien
atctgtaacatgggggtgacagtcc

SEQ ID NO: 4185171 - DNA, 25 bp, Homo sapien
tgtaacatgggggtgacagtccttc

SEQ ID NO: 4185172 - DNA, 25 bp, Homo sapien
gaaaggaggaaatgacttgatacaa

SEQ ID NO: 4185173 - DNA, 25 bp, Homo sapien
catgggggtgacagtccttccctca

SEQ ID NO: 4185174 - DNA, 25 bp, Homo sapien
aaaccaacatactagcctgctttct

SEQ ID NO: 4185175 - DNA, 25 bp, Homo sapien
cacctgataaagatgagggaccctg

SEQ ID NO: 4185176 - DNA, 25 bp, Homo sapien
tccaggtgagcacctgataaagatg

SEQ ID NO: 4185177 - DNA, 25 bp, Homo sapien
tgagcacctgataaagatgagggac

SEQ ID NO: 4185178 - DNA, 25 bp, Homo sapien
cctgataaagatgagggaccctgag

SEQ ID NO: 4185179 - DNA, 25 bp, Homo sapien
ggtcttcgtacctagaggctgccag

SEQ ID NO: 4185180 - DNA, 25 bp, Homo sapien
cagcagcttgactgatgtgccacca

SEQ ID NO: 4185181 - DNA, 25 bp, Homo sapien
caaacgagcacacatgcggagttcc

SEQ ID NO: 4185182 - DNA, 25 bp, Homo sapien
tggcataggcactaacaggaggcag

SEQ ID NO: 4185183 - DNA, 25 bp, Homo sapien
tttcaggacgatggacactgaacgg

SEQ ID NO: 4185184 - DNA, 25 bp, Homo sapien
gacgatggacactgaacggatcttc

SEQ ID NO: 4185185 - DNA, 25 bp, Homo sapien
gaaaagagtttcaggacgatggaca

SEQ ID NO: 4185186 - DNA, 25 bp, Homo sapien
agatgttgaaaagagtttcaggacg

SEQ ID NO: 4185187 - DNA, 25 bp, Homo sapien
tttagagatgcccgagggggtgtcc

SEQ ID NO: 4185188 - DNA, 25 bp, Homo sapien
agggggtgtccttgggcaggctgtg

SEQ ID NO: 4185189 - DNA, 25 bp, Homo sapien
gggtgtccttgggcaggctgtgcag

SEQ ID NO: 4185190 - DNA, 25 bp, Homo sapien
ccgagggggtgtccttgggcaggct

SEQ ID NO: 4185191 - DNA, 25 bp, Homo sapien
ggacagtgtgttggccagagaccca

SEQ ID NO: 4185192 - DNA, 25 bp, Homo sapien
tgagcctctatagccaaacagcagc

SEQ ID NO: 4185193 - DNA, 25 bp, Homo sapien
cattagacaagaacggtggtgggac

SEQ ID NO: 4185194 - DNA, 25 bp, Homo sapien
tgtgacctccctctttgatggcagc

SEQ ID NO: 4185195 - DNA, 25 bp, Homo sapien
cagcttgcatgatggacatctcctc

SEQ ID NO: 4185196 - DNA, 25 bp, Homo sapien
ctcagcttgcatgatggacatctcc

SEQ ID NO: 4185197 - DNA, 25 bp, Homo sapien
gcttgcatgatggacatctcctcct

SEQ ID NO: 4185198 - DNA, 25 bp, Homo sapien
tgcctcagcttgcatgatggacatc

SEQ ID NO: 4185199 - DNA, 25 bp, Homo sapien
caaaggtaggctctcaggccttggg

SEQ ID NO: 4185200 - DNA, 25 bp, Homo sapien
tagcgaggccaattcttacaacaag

SEQ ID NO: 4185201 - DNA, 25 bp, Homo sapien
tgtggccctcgatggctacagaaga

SEQ ID NO: 4185202 - DNA, 25 bp, Homo sapien
gaaggcaccccttgatttgagggta

SEQ ID NO: 4185203 - DNA, 25 bp, Homo sapien
gctcccgccgtctgcagtgcagccc

SEQ ID NO: 4185204 - DNA, 25 bp, Homo sapien
agccccgtccacttcagcagttctg

SEQ ID NO: 4185205 - DNA, 25 bp, Homo sapien
aggtcacctccgatgttggctgccc

SEQ ID NO: 4185206 - DNA, 25 bp, Homo sapien
gtggagagtttccttctgtgtctcc

SEQ ID NO: 4185207 - DNA, 25 bp, Homo sapien
gtttctgagcggcagcctgtgctct

SEQ ID NO: 4185208 - DNA, 25 bp, Homo sapien
gtacttctcggatggcaaggcccag

SEQ ID NO: 4185209 - DNA, 25 bp, Homo sapien
ggctcatcttataccctgactaggc

SEQ ID NO: 4185210 - DNA, 25 bp, Homo sapien
tgactaggccaaaatggctcttcct

SEQ ID NO: 4185211 - DNA, 25 bp, Homo sapien
agcctgtaggcaccgagggccttgc

SEQ ID NO: 4185212 - DNA, 25 bp, Homo sapien
ctcactgtcgtggaagggcttggcg

SEQ ID NO: 4185213 - DNA, 25 bp, Homo sapien
tacaggccacgcagcttgtcatagg

SEQ ID NO: 4185214 - DNA, 25 bp, Homo sapien
ggtcagggtacccagctcaatggac

SEQ ID NO: 4185215 - DNA, 25 bp, Homo sapien
ggcaagaaggcatgagatggcctca

SEQ ID NO: 4185216 - DNA, 25 bp, Homo sapien
gcagggggcacagagcctagaggga

SEQ ID NO: 4185217 - DNA, 25 bp, Homo sapien
tacagcctggttccagaaagggcag

SEQ ID NO: 4185218 - DNA, 25 bp, Homo sapien
tgcggagcacgtggactatactggc

SEQ ID NO: 4185219 - DNA, 25 bp, Homo sapien
acaggcagcgctcaacggcactttt

SEQ ID NO: 4185220 - DNA, 25 bp, Homo sapien
ggataaaggcctgccgaaataccca

SEQ ID NO: 4185221 - DNA, 25 bp, Homo sapien
agcggtagcacaagggcaccaactc

SEQ ID NO: 4185222 - DNA, 25 bp, Homo sapien
tgatgcagacgttgcccaggttgtt

SEQ ID NO: 4185223 - DNA, 25 bp, Homo sapien
aagatgaagggctggcggcagttga

SEQ ID NO: 4185224 - DNA, 25 bp, Homo sapien
agcagcgggttgttggtggagcagc

SEQ ID NO: 4185225 - DNA, 25 bp, Homo sapien
tcctccaggtagaactcaaccaggt

SEQ ID NO: 4185226 - DNA, 25 bp, Homo sapien
cttcctccaggtagaactcaaccag

SEQ ID NO: 4185227 - DNA, 25 bp, Homo sapien
ccaggtcgatgagggagatggcttc

SEQ ID NO: 4185228 - DNA, 25 bp, Homo sapien
gtcgatgagggagatggcttcttca

SEQ ID NO: 4185229 - DNA, 25 bp, Homo sapien
gctgtctgtcatcccgcttgggtct

SEQ ID NO: 4185230 - DNA, 25 bp, Homo sapien
tgtcatcccgcttgggtctcagcac

SEQ ID NO: 4185231 - DNA, 25 bp, Homo sapien
tctgtcatcccgcttgggtctcagc

SEQ ID NO: 4185232 - DNA, 25 bp, Homo sapien
tgtctgtcatcccgcttgggtctca

SEQ ID NO: 4185233 - DNA, 25 bp, Homo sapien
aggctctggccaagggcatggatac

SEQ ID NO: 4185234 - DNA, 25 bp, Homo sapien
gtccccagacccctcacacagccgc

SEQ ID NO: 4185235 - DNA, 25 bp, Homo sapien
ttcccgcctgtccccagacccctca

SEQ ID NO: 4185236 - DNA, 25 bp, Homo sapien
gcctgtccccagacccctcacacag

SEQ ID NO: 4185237 - DNA, 25 bp, Homo sapien
cagacccctcacacagccgcacaca

SEQ ID NO: 4185238 - DNA, 25 bp, Homo sapien
gccacttctgggtccttaggccctg

SEQ ID NO: 4185239 - DNA, 25 bp, Homo sapien
tcagcatggcccgcgatcccctggg

SEQ ID NO: 4185240 - DNA, 25 bp, Homo sapien
tctgggtccttaggccctggccagc

SEQ ID NO: 4185241 - DNA, 25 bp, Homo sapien
cacttctgggtccttaggccctggc

SEQ ID NO: 4185242 - DNA, 25 bp, Homo sapien
cacttgcatgcgaaagtgacttgag

SEQ ID NO: 4185243 - DNA, 25 bp, Homo sapien
tttggactctgtcacttgcatgcga

SEQ ID NO: 4185244 - DNA, 25 bp, Homo sapien
gttcagcttgtcagttttggactct

SEQ ID NO: 4185245 - DNA, 25 bp, Homo sapien
catgcgaaagtgacttgagtggaag

SEQ ID NO: 4185246 - DNA, 25 bp, Homo sapien
ggcagagatgggtccgtctttcctt

SEQ ID NO: 4185247 - DNA, 25 bp, Homo sapien
catatcatctgtggcacctgaggga

SEQ ID NO: 4185248 - DNA, 25 bp, Homo sapien
ggtccgtctttccttcagcaagcag

SEQ ID NO: 4185249 - DNA, 25 bp, Homo sapien
gccagcaccatagcacatatcatct

SEQ ID NO: 4185250 - DNA, 25 bp, Homo sapien
ggcccagggatcctggagaaacatt

SEQ ID NO: 4185251 - DNA, 25 bp, Homo sapien
agtgggaagcacatgcgggccctgt

SEQ ID NO: 4185252 - DNA, 25 bp, Homo sapien
gtctgcgggcacttgtgatggagca

SEQ ID NO: 4185253 - DNA, 25 bp, Homo sapien
gggtcagactcacctggaggtccct

SEQ ID NO: 4185254 - DNA, 25 bp, Homo sapien
tctccgatggagtccttggtctcca

SEQ ID NO: 4185255 - DNA, 25 bp, Homo sapien
tcagcttagctgtgaacgggtcctc

SEQ ID NO: 4185256 - DNA, 25 bp, Homo sapien
tccactagccgcagaatctgggagc

SEQ ID NO: 4185257 - DNA, 25 bp, Homo sapien
gctgtgaacgggtcctcatctccga

SEQ ID NO: 4185258 - DNA, 25 bp, Homo sapien
ctggcacgaactctgagccaccttg

SEQ ID NO: 4185259 - DNA, 25 bp, Homo sapien
gagcggaagtattgccacctcaggg

SEQ ID NO: 4185260 - DNA, 25 bp, Homo sapien
cggcggctcatggagcgcagcacca

SEQ ID NO: 4185261 - DNA, 25 bp, Homo sapien
gggccatcgcttgatgaggacatcc

SEQ ID NO: 4185262 - DNA, 25 bp, Homo sapien
ttctgagtgaaggtcaagggcacat

SEQ ID NO: 4185263 - DNA, 25 bp, Homo sapien
gaagtccactttagatgcacatgga

SEQ ID NO: 4185264 - DNA, 25 bp, Homo sapien
aagggcacatcacgcttgctgggcc

SEQ ID NO: 4185265 - DNA, 25 bp, Homo sapien
ccagtgaagtccactttagatgcac

SEQ ID NO: 4185266 - DNA, 25 bp, Homo sapien
gacctgcagcacctttgtttgaggg

SEQ ID NO: 4185267 - DNA, 25 bp, Homo sapien
acagacctgcagcacctttgtttga

SEQ ID NO: 4185268 - DNA, 25 bp, Homo sapien
gagggggcttggcagtggtcagggc

SEQ ID NO: 4185269 - DNA, 25 bp, Homo sapien
gccaggacgcactgcctctcaaggg

SEQ ID NO: 4185270 - DNA, 25 bp, Homo sapien
agggaagacagctgtaagaccaggc

SEQ ID NO: 4185271 - DNA, 25 bp, Homo sapien
ctaagggaagacagctgtaagacca

SEQ ID NO: 4185272 - DNA, 25 bp, Homo sapien
aagccctagtgctcatcagccctac

SEQ ID NO: 4185273 - DNA, 25 bp, Homo sapien
taagggaagacagctgtaagaccag

SEQ ID NO: 4185274 - DNA, 25 bp, Homo sapien
agcaactcatagtcctcagaatgga

SEQ ID NO: 4185275 - DNA, 25 bp, Homo sapien
caccagcaactcatagtcctcagaa

SEQ ID NO: 4185276 - DNA, 25 bp, Homo sapien
gaagcaccagcaactcatagtcctc

SEQ ID NO: 4185277 - DNA, 25 bp, Homo sapien
gcaactcatagtcctcagaatggaa

SEQ ID NO: 4185278 - DNA, 25 bp, Homo sapien
gggccagggtcatccttgcacctgc

SEQ ID NO: 4185279 - DNA, 25 bp, Homo sapien
atgggccagggtcatccttgcacct

SEQ ID NO: 4185280 - DNA, 25 bp, Homo sapien
tgggccagggtcatccttgcacctg

SEQ ID NO: 4185281 - DNA, 25 bp, Homo sapien
tcatgggccagggtcatccttgcac

SEQ ID NO: 4185282 - DNA, 25 bp, Homo sapien
aaggcgggcagagggtgcaggccgt

SEQ ID NO: 4185283 - DNA, 25 bp, Homo sapien
cagtttaactctttattctccttca

SEQ ID NO: 4185284 - DNA, 25 bp, Homo sapien
ggtgcaggccgtccccaggatgctg

SEQ ID NO: 4185285 - DNA, 25 bp, Homo sapien
agcagaccccaaggcgggcagaggg

SEQ ID NO: 4185286 - DNA, 25 bp, Homo sapien
taacggtctgacagatcggcggact

SEQ ID NO: 4185287 - DNA, 25 bp, Homo sapien
tcatctcctggtgctatttacaagg

SEQ ID NO: 4185288 - DNA, 25 bp, Homo sapien
ctcggagccgttctgaaagtaacag

SEQ ID NO: 4185289 - DNA, 25 bp, Homo sapien
taggaattccgtggttacacaaggc

SEQ ID NO: 4185290 - DNA, 25 bp, Homo sapien
gcagtccagagaaacccatggtgtg

SEQ ID NO: 4185291 - DNA, 25 bp, Homo sapien
tgtggggggctttctaagccaagat

SEQ ID NO: 4185292 - DNA, 25 bp, Homo sapien
cagagaaacccatggtgtgggtgtt

SEQ ID NO: 4185293 - DNA, 25 bp, Homo sapien
agtccagagaaacccatggtgtggg

SEQ ID NO: 4185294 - DNA, 25 bp, Homo sapien
tcttttccacccacccttacatctg

SEQ ID NO: 4185295 - DNA, 25 bp, Homo sapien
gctcttttccacccacccttacatc

SEQ ID NO: 4185296 - DNA, 25 bp, Homo sapien
tgggcaaggctcttttccacccacc

SEQ ID NO: 4185297 - DNA, 25 bp, Homo sapien
ttttccacccacccttacatctgga

SEQ ID NO: 4185298 - DNA, 25 bp, Homo sapien
tttctccatgagagcctggttcgtg

SEQ ID NO: 4185299 - DNA, 25 bp, Homo sapien
gagagcctggttcgtgaatctttag

SEQ ID NO: 4185300 - DNA, 25 bp, Homo sapien
gccttggtttcactgttctccctca

SEQ ID NO: 4185301 - DNA, 25 bp, Homo sapien
tgaatctttagaccctatggccttg

SEQ ID NO: 4185302 - DNA, 25 bp, Homo sapien
cagcttccgtttctggtgccagaca

SEQ ID NO: 4185303 - DNA, 25 bp, Homo sapien
tgcatggaattggaattcactctct

SEQ ID NO: 4185304 - DNA, 25 bp, Homo sapien
cagacacatagcctagggcccagga

SEQ ID NO: 4185305 - DNA, 25 bp, Homo sapien
cactctcttgttcgttcattaaaca

SEQ ID NO: 4185306 - DNA, 25 bp, Homo sapien
gaggagaaggtcccctaacttctgc

SEQ ID NO: 4185307 - DNA, 25 bp, Homo sapien
gccaaggtgacactaggaggaagcc

SEQ ID NO: 4185308 - DNA, 25 bp, Homo sapien
gaaactgagggcctaattggcttct

SEQ ID NO: 4185309 - DNA, 25 bp, Homo sapien
taatcatattaatccccgctgcaga

SEQ ID NO: 4185310 - DNA, 25 bp, Homo sapien
cccaagaatgctgcgaaggcctgag

SEQ ID NO: 4185311 - DNA, 25 bp, Homo sapien
tgtggcccttgtggctgacccgtgg

SEQ ID NO: 4185312 - DNA, 25 bp, Homo sapien
ctgtggcccttgtggctgacccgtg

SEQ ID NO: 4185313 - DNA, 25 bp, Homo sapien
agcagaaacatgtaggcggccagca

SEQ ID NO: 4185314 - DNA, 25 bp, Homo sapien
gcttcttgtgctggacggtgacgta

SEQ ID NO: 4185315 - DNA, 25 bp, Homo sapien
tcctgtgggcccgaagacgaagtat

SEQ ID NO: 4185316 - DNA, 25 bp, Homo sapien
tgaagccacctaggaccatgaagag

SEQ ID NO: 4185317 - DNA, 25 bp, Homo sapien
cgccaagcccgggactctcccagac

SEQ ID NO: 4185318 - DNA, 25 bp, Homo sapien
caccgccaagcccgggactctccca

SEQ ID NO: 4185319 - DNA, 25 bp, Homo sapien
ccgccaagcccgggactctcccaga

SEQ ID NO: 4185320 - DNA, 25 bp, Homo sapien
gccaagcccgggactctcccagacc

SEQ ID NO: 4185321 - DNA, 25 bp, Homo sapien
gaaatgaaataacccggacatgtgg

SEQ ID NO: 4185322 - DNA, 25 bp, Homo sapien
tcaggattgaactgggaacccggta

SEQ ID NO: 4185323 - DNA, 25 bp, Homo sapien
cccataagggacacgaatcagatca

SEQ ID NO: 4185324 - DNA, 25 bp, Homo sapien
gttatttgcttagcgctctgggccc

SEQ ID NO: 4185325 - DNA, 25 bp, Homo sapien
accacgtaccgctcgatggccagga

SEQ ID NO: 4185326 - DNA, 25 bp, Homo sapien
tcatgggcttacacaccaccacgta

SEQ ID NO: 4185327 - DNA, 25 bp, Homo sapien
caggtgaaggcaacgcccatgatgg

SEQ ID NO: 4185328 - DNA, 25 bp, Homo sapien
aggccagcgccatgacccaggtgaa

SEQ ID NO: 4185329 - DNA, 25 bp, Homo sapien
acaatcgcctagaggctgagtggga

SEQ ID NO: 4185330 - DNA, 25 bp, Homo sapien
agacagagggacatgaggcctctgg

SEQ ID NO: 4185331 - DNA, 25 bp, Homo sapien
agtcctattgtccaaaccactgtcc

SEQ ID NO: 4185332 - DNA, 25 bp, Homo sapien
catctcagccccattaggagacaat

SEQ ID NO: 4185333 - DNA, 25 bp, Homo sapien
cttgagcgtgtagtagtcgattcca

SEQ ID NO: 4185334 - DNA, 25 bp, Homo sapien
gaagtggaccacgaacatgtagatg

SEQ ID NO: 4185335 - DNA, 25 bp, Homo sapien
ggtgaagacgagctgcccatagcag

SEQ ID NO: 4185336 - DNA, 25 bp, Homo sapien
gtcgattccacacgagcactgcagg

SEQ ID NO: 4185337 - DNA, 25 bp, Homo sapien
gatgatgaccatgcgggtgacctcc

SEQ ID NO: 4185338 - DNA, 25 bp, Homo sapien
gaagatgtagaatgccacgctggcg

SEQ ID NO: 4185339 - DNA, 25 bp, Homo sapien
gaaagcgatgaccatgatgatgacc

SEQ ID NO: 4185340 - DNA, 25 bp, Homo sapien
tcttggcaaagaacgctgggatggt

SEQ ID NO: 4185341 - DNA, 25 bp, Homo sapien
tgccctgggaagtagcttgtccttg

SEQ ID NO: 4185342 - DNA, 25 bp, Homo sapien
gccctgggaagtagcttgtccttgg

SEQ ID NO: 4185343 - DNA, 25 bp, Homo sapien
ccctgggaagtagcttgtccttggc

SEQ ID NO: 4185344 - DNA, 25 bp, Homo sapien
cctgggaagtagcttgtccttggca

SEQ ID NO: 4185345 - DNA, 25 bp, Homo sapien
gtcttggacacggtagcagaggcct

SEQ ID NO: 4185346 - DNA, 25 bp, Homo sapien
tggctcgtctccgtcttggacacgg

SEQ ID NO: 4185347 - DNA, 25 bp, Homo sapien
acacggtagcagaggcctcatcgtc

SEQ ID NO: 4185348 - DNA, 25 bp, Homo sapien
tagcagaggcctcatcgtcacccag

SEQ ID NO: 4185349 - DNA, 25 bp, Homo sapien
cgtgggactccagatcagtaggtct

SEQ ID NO: 4185350 - DNA, 25 bp, Homo sapien
gctagacacttatccctaagctggg

SEQ ID NO: 4185351 - DNA, 25 bp, Homo sapien
gatgggagacgcctatagtcggcca

SEQ ID NO: 4185352 - DNA, 25 bp, Homo sapien
gcaagaatcctcgtgttcctgaaag

SEQ ID NO: 4185353 - DNA, 25 bp, Homo sapien
ggagctgagcttttaatggcccaat

SEQ ID NO: 4185354 - DNA, 25 bp, Homo sapien
tgaacatccccaaggaaggtaggcc

SEQ ID NO: 4185355 - DNA, 25 bp, Homo sapien
tactgaggcagcttaattctgacac

SEQ ID NO: 4185356 - DNA, 25 bp, Homo sapien
gatgtggccagctttttggagcaga

SEQ ID NO: 4185357 - DNA, 25 bp, Homo sapien
tggctctgctcattgctcaatccag

SEQ ID NO: 4185358 - DNA, 25 bp, Homo sapien
gttacctgtgcctctatgaccccaa

SEQ ID NO: 4185359 - DNA, 25 bp, Homo sapien
tatcctgtggatagagtgtgaaagc

SEQ ID NO: 4185360 - DNA, 25 bp, Homo sapien
gaagctggcagtttcaatctatcct

SEQ ID NO: 4185361 - DNA, 25 bp, Homo sapien
tgacctagacttggccaatcacaga

SEQ ID NO: 4185362 - DNA, 25 bp, Homo sapien
aatgtgtcccttttgcttcagccca

SEQ ID NO: 4185363 - DNA, 25 bp, Homo sapien
cagtaggctggccacttaaagtcca

SEQ ID NO: 4185364 - DNA, 25 bp, Homo sapien
gagctgaagcccagtattgccatag

SEQ ID NO: 4185365 - DNA, 25 bp, Homo sapien
cgggaccacccataggaatcttctc

SEQ ID NO: 4185366 - DNA, 25 bp, Homo sapien
tcgggaccacccataggaatcttct

SEQ ID NO: 4185367 - DNA, 25 bp, Homo sapien
cttcgggaccacccataggaatctt

SEQ ID NO: 4185368 - DNA, 25 bp, Homo sapien
ggaccacccataggaatcttctccc

SEQ ID NO: 4185369 - DNA, 25 bp, Homo sapien
agttgggaagggcacccactctctc

SEQ ID NO: 4185370 - DNA, 25 bp, Homo sapien
tgcatctctcccttggcgtgacaga

SEQ ID NO: 4185371 - DNA, 25 bp, Homo sapien
gccctgaagctacatagttgggaag

SEQ ID NO: 4185372 - DNA, 25 bp, Homo sapien
ggcagcccaggtcatagcctagaga

SEQ ID NO: 4185373 - DNA, 25 bp, Homo sapien
taattctctcctttatagctgaggg

SEQ ID NO: 4185374 - DNA, 25 bp, Homo sapien
cttggagtaattcaaggacttgccc

SEQ ID NO: 4185375 - DNA, 25 bp, Homo sapien
gacaattctaccaagtgggataatt

SEQ ID NO: 4185376 - DNA, 25 bp, Homo sapien
tgcacagcaccctttacaccattaa

SEQ ID NO: 4185377 - DNA, 25 bp, Homo sapien
ttcgcatttgaagggaagaagctct

SEQ ID NO: 4185378 - DNA, 25 bp, Homo sapien
gctgtgccaggatcaagtttcgcat

SEQ ID NO: 4185379 - DNA, 25 bp, Homo sapien
ttccgaaaccatgctcccggctgtg

SEQ ID NO: 4185380 - DNA, 25 bp, Homo sapien
tatgggacacttccaagaactgaga

SEQ ID NO: 4185381 - DNA, 25 bp, Homo sapien
actgcccgtgggtgaaagttcatgc

SEQ ID NO: 4185382 - DNA, 25 bp, Homo sapien
gagagtacaccccaactactgagaa

SEQ ID NO: 4185383 - DNA, 25 bp, Homo sapien
caagtaaactgtggcctattcgcac

SEQ ID NO: 4185384 - DNA, 25 bp, Homo sapien
ggctgtggtcatcaaagtgttctaa

SEQ ID NO: 4185385 - DNA, 25 bp, Homo sapien
gaccgacaggtgcagccagcagacc

SEQ ID NO: 4185386 - DNA, 25 bp, Homo sapien
gagaccgacaggtgcagccagcaga

SEQ ID NO: 4185387 - DNA, 25 bp, Homo sapien
gacaggtgcagccagcagacccctc

SEQ ID NO: 4185388 - DNA, 25 bp, Homo sapien
ccgacaggtgcagccagcagacccc

SEQ ID NO: 4185389 - DNA, 25 bp, Homo sapien
gagacctggatgatcctgctgtgga

SEQ ID NO: 4185390 - DNA, 25 bp, Homo sapien
aggagggtgagatgtcgctggtgac

SEQ ID NO: 4185391 - DNA, 25 bp, Homo sapien
tcgctggtgacgctcccaggagcca

SEQ ID NO: 4185392 - DNA, 25 bp, Homo sapien
ctgctgtggaagtcgaggagggtga

SEQ ID NO: 4185393 - DNA, 25 bp, Homo sapien
gtggcggcgtcccaccgggaggctg

SEQ ID NO: 4185394 - DNA, 25 bp, Homo sapien
gtggctcgggcctcctggtgggaca

SEQ ID NO: 4185395 - DNA, 25 bp, Homo sapien
gctcgggcctcctggtgggacaccg

SEQ ID NO: 4185396 - DNA, 25 bp, Homo sapien
tcgggcctcctggtgggacaccgcc

SEQ ID NO: 4185397 - DNA, 25 bp, Homo sapien
gagcttgatagctgccaccgacgtg

SEQ ID NO: 4185398 - DNA, 25 bp, Homo sapien
tgtagagcttgatagctgccaccga

SEQ ID NO: 4185399 - DNA, 25 bp, Homo sapien
ggatgtagagcttgatagctgccac

SEQ ID NO: 4185400 - DNA, 25 bp, Homo sapien
aggccacggcgcatgccagtggcca

SEQ ID NO: 4185401 - DNA, 25 bp, Homo sapien
cacctgacgcccctctggctcttct

SEQ ID NO: 4185402 - DNA, 25 bp, Homo sapien
ctgccagcacaccgcatcagacacc

SEQ ID NO: 4185403 - DNA, 25 bp, Homo sapien
cccctcaactgccagcacaccgcat

SEQ ID NO: 4185404 - DNA, 25 bp, Homo sapien
acacctgacgcccctctggctcttc

SEQ ID NO: 4185405 - DNA, 25 bp, Homo sapien
attttcttcttgtgcttgggaacta

SEQ ID NO: 4185406 - DNA, 25 bp, Homo sapien
cctgggctggattttcttcttgtgc

SEQ ID NO: 4185407 - DNA, 25 bp, Homo sapien
cttcctgggctggattttcttcttg

SEQ ID NO: 4185408 - DNA, 25 bp, Homo sapien
ttttcttcttgtgcttgggaactaa

SEQ ID NO: 4185409 - DNA, 25 bp, Homo sapien
aaggtgcccgcatggccttgtctgg

SEQ ID NO: 4185410 - DNA, 25 bp, Homo sapien
cgccttgcttgcgagccttctctgt

SEQ ID NO: 4185411 - DNA, 25 bp, Homo sapien
cagcactggaaggtgcccgcatggc

SEQ ID NO: 4185412 - DNA, 25 bp, Homo sapien
tgtgccctggtgtccttggccgcgc

SEQ ID NO: 4185413 - DNA, 25 bp, Homo sapien
cctttggcctttgccttcctgctga

SEQ ID NO: 4185414 - DNA, 25 bp, Homo sapien
gcctttgccttcctgctgagcccac

SEQ ID NO: 4185415 - DNA, 25 bp, Homo sapien
ttggcctttgccttcctgctgagcc

SEQ ID NO: 4185416 - DNA, 25 bp, Homo sapien
gctgctcctgctgcctttggccttt

SEQ ID NO: 4185417 - DNA, 25 bp, Homo sapien
gaactcttactctcagctttggttt

SEQ ID NO: 4185418 - DNA, 25 bp, Homo sapien
tggttttcctgtaggcctcagcatc

SEQ ID NO: 4185419 - DNA, 25 bp, Homo sapien
ggttttgaactcttactctcagctt

SEQ ID NO: 4185420 - DNA, 25 bp, Homo sapien
tttgaactcttactctcagctttgg

SEQ ID NO: 4185421 - DNA, 25 bp, Homo sapien
tgcccagctttaggggccttggcct

SEQ ID NO: 4185422 - DNA, 25 bp, Homo sapien
cttggacccactgcccttagcagga

SEQ ID NO: 4185423 - DNA, 25 bp, Homo sapien
tgcaggtaccaccttggacccactg

SEQ ID NO: 4185424 - DNA, 25 bp, Homo sapien
tcttcctggacaaatgtgcaggtac

SEQ ID NO: 4185425 - DNA, 25 bp, Homo sapien
taaaaactagggcagaggctcggtc

SEQ ID NO: 4185426 - DNA, 25 bp, Homo sapien
caatgaaataaatagagcagtggtt

SEQ ID NO: 4185427 - DNA, 25 bp, Homo sapien
gagcagtggttagttgaagaataaa

SEQ ID NO: 4185428 - DNA, 25 bp, Homo sapien
ctttattgataaatagcttacaatg

SEQ ID NO: 4185429 - DNA, 25 bp, Homo sapien
aaggtggccaccttccatgaaccaa

SEQ ID NO: 4185430 - DNA, 25 bp, Homo sapien
aggtggccaccttccatgaaccaat

SEQ ID NO: 4185431 - DNA, 25 bp, Homo sapien
ttccatgaaccaattataatcctta

SEQ ID NO: 4185432 - DNA, 25 bp, Homo sapien
ggagccctccttgaactgacctttg

SEQ ID NO: 4185433 - DNA, 25 bp, Homo sapien
gaatagctgccgcttgcgcagagga

SEQ ID NO: 4185434 - DNA, 25 bp, Homo sapien
ttaagatgcaccgaggctgtagctg

SEQ ID NO: 4185435 - DNA, 25 bp, Homo sapien
ttacggacaaacctactgtgggctc

SEQ ID NO: 4185436 - DNA, 25 bp, Homo sapien
caccgagggctgaatgttgttagtt

SEQ ID NO: 4185437 - DNA, 25 bp, Homo sapien
tctaagcagtgggtctgcacggctg

SEQ ID NO: 4185438 - DNA, 25 bp, Homo sapien
cagtgacctgccaagtggccacagt

SEQ ID NO: 4185439 - DNA, 25 bp, Homo sapien
tgggctcagtaatgcacacccacat

SEQ ID NO: 4185440 - DNA, 25 bp, Homo sapien
gaggagatgcgcagaatccagtttc

SEQ ID NO: 4185441 - DNA, 25 bp, Homo sapien
gggaggagatgcgcagaatccagtt

SEQ ID NO: 4185442 - DNA, 25 bp, Homo sapien
ggaggagatgcgcagaatccagttt

SEQ ID NO: 4185443 - DNA, 25 bp, Homo sapien
cacggtcaacgggaggcttctcaag

SEQ ID NO: 4185444 - DNA, 25 bp, Homo sapien
ttgtgtttgggcctcagctgagcac

SEQ ID NO: 4185445 - DNA, 25 bp, Homo sapien
caagacttgaaagctctgatgccag

SEQ ID NO: 4185446 - DNA, 25 bp, Homo sapien
gcgtcaacaactacacagcggtctt

SEQ ID NO: 4185447 - DNA, 25 bp, Homo sapien
tggtcctagggtcagagcagacacc

SEQ ID NO: 4185448 - DNA, 25 bp, Homo sapien
gcagacacccggcaggaggaaagcc

SEQ ID NO: 4185449 - DNA, 25 bp, Homo sapien
ttggggtggtggtcctagggtcaga

SEQ ID NO: 4185450 - DNA, 25 bp, Homo sapien
ggtcagagcagacacccggcaggag

SEQ ID NO: 4185451 - DNA, 25 bp, Homo sapien
gtgtggacacccgatcagcatagca

SEQ ID NO: 4185452 - DNA, 25 bp, Homo sapien
caggcacgtgccaccacgcccggcg

SEQ ID NO: 4185453 - DNA, 25 bp, Homo sapien
ctacagcctagaactcctggactca

SEQ ID NO: 4185454 - DNA, 25 bp, Homo sapien
actcaagtgatcctccagcctcagc

SEQ ID NO: 4185455 - DNA, 25 bp, Homo sapien
ggaccccgcctggttggggcagctg

SEQ ID NO: 4185456 - DNA, 25 bp, Homo sapien
ctggggagaccgctcagcacccacc

SEQ ID NO: 4185457 - DNA, 25 bp, Homo sapien
agctggggagaccgctcagcaccca

SEQ ID NO: 4185458 - DNA, 25 bp, Homo sapien
gcagctgcaggattgctgaggggtg

SEQ ID NO: 4185459 - DNA, 25 bp, Homo sapien
tgacggaaccgctggattttgcaac

SEQ ID NO: 4185460 - DNA, 25 bp, Homo sapien
tgagaagccgggctcttgaagcgct

SEQ ID NO: 4185461 - DNA, 25 bp, Homo sapien
gcagcgcccactgttaatgccgcat

SEQ ID NO: 4185462 - DNA, 25 bp, Homo sapien
ccttttcatagtgccacctgcggtg

SEQ ID NO: 4185463 - DNA, 25 bp, Homo sapien
cagccggtgtggtagccatgcagtc

SEQ ID NO: 4185464 - DNA, 25 bp, Homo sapien
cctccgcagccggtgtggtagccat

SEQ ID NO: 4185465 - DNA, 25 bp, Homo sapien
ggtgtggtagccatgcagtctgtac

SEQ ID NO: 4185466 - DNA, 25 bp, Homo sapien
caaagcctccgcagccggtgtggta

SEQ ID NO: 4185467 - DNA, 25 bp, Homo sapien
atatgggctggaccccgaggagacc

SEQ ID NO: 4185468 - DNA, 25 bp, Homo sapien
cacagcggtcgtgcgatgactctgg

SEQ ID NO: 4185469 - DNA, 25 bp, Homo sapien
gatgtttgcgcaaggctccaagcag

SEQ ID NO: 4185470 - DNA, 25 bp, Homo sapien
ctgggaccagcggtagagtcctgct

SEQ ID NO: 4185471 - DNA, 25 bp, Homo sapien
agaaacgccctctgcaaagtccgat

SEQ ID NO: 4185472 - DNA, 25 bp, Homo sapien
tctccatggagattaaggaaaccag

SEQ ID NO: 4185473 - DNA, 25 bp, Homo sapien
tggttgctgccgtgaacaaagacgc

SEQ ID NO: 4185474 - DNA, 25 bp, Homo sapien
cagctgggttccatgtcctggttgc

SEQ ID NO: 4185475 - DNA, 25 bp, Homo sapien
tgaggtcccgctactctcagagtga

SEQ ID NO: 4185476 - DNA, 25 bp, Homo sapien
caggattcactctcaccgtctggtg

SEQ ID NO: 4185477 - DNA, 25 bp, Homo sapien
gatgggttaccaatagcgctcgcct

SEQ ID NO: 4185478 - DNA, 25 bp, Homo sapien
cccgttctgagaggtcggagctgaa

SEQ ID NO: 4185479 - DNA, 25 bp, Homo sapien
agagggcgtcgttcacatgcaggaa

SEQ ID NO: 4185480 - DNA, 25 bp, Homo sapien
ggcttttataaggactggctggcaa

SEQ ID NO: 4185481 - DNA, 25 bp, Homo sapien
cacctactgtctgtgcagggagcgc

SEQ ID NO: 4185482 - DNA, 25 bp, Homo sapien
tgactggacgtctgagaatgccgcc

SEQ ID NO: 4185483 - DNA, 25 bp, Homo sapien
caggtgctgcgtgggaagccgaggg

SEQ ID NO: 4185484 - DNA, 25 bp, Homo sapien
gaagggggcggtgaacacaggtgct

SEQ ID NO: 4185485 - DNA, 25 bp, Homo sapien
cggtgaacacaggtgctgcgtggga

SEQ ID NO: 4185486 - DNA, 25 bp, Homo sapien
cacaggtgctgcgtgggaagccgag

SEQ ID NO: 4185487 - DNA, 25 bp, Homo sapien
ctctggccgcgggaggacgaggcgg

SEQ ID NO: 4185488 - DNA, 25 bp, Homo sapien
acgaggcggagccggaacggaagcg

SEQ ID NO: 4185489 - DNA, 25 bp, Homo sapien
gaggacgaggcggagccggaacgga

SEQ ID NO: 4185490 - DNA, 25 bp, Homo sapien
ggcggagccggaacggaagcgcgga

SEQ ID NO: 4185491 - DNA, 25 bp, Homo sapien
tccctccaagcgaggcgggacgagc

SEQ ID NO: 4185492 - DNA, 25 bp, Homo sapien
aagcgaggcgggacgagcacgggct

SEQ ID NO: 4185493 - DNA, 25 bp, Homo sapien
ccctccaagcgaggcgggacgagca

SEQ ID NO: 4185494 - DNA, 25 bp, Homo sapien
gaggcgggacgagcacgggctgcgg

SEQ ID NO: 4185495 - DNA, 25 bp, Homo sapien
ttgctcccaagtgaccatccgcgag

SEQ ID NO: 4185496 - DNA, 25 bp, Homo sapien
cttctaagacgctcaagggcccaag

SEQ ID NO: 4185497 - DNA, 25 bp, Homo sapien
aggtgtgggcgactaactgtagccc

SEQ ID NO: 4185498 - DNA, 25 bp, Homo sapien
gcagtcaccgcaacttctgggtgga

SEQ ID NO: 4185499 - DNA, 25 bp, Homo sapien
tggaagcccgaaccgcagtcccaga

SEQ ID NO: 4185500 - DNA, 25 bp, Homo sapien
gcatctttgccacccctggaagccc

SEQ ID NO: 4185501 - DNA, 25 bp, Homo sapien
gccctgccccgccacaagtgggtca

SEQ ID NO: 4185502 - DNA, 25 bp, Homo sapien
aggccacccactgtttcccacaggg

SEQ ID NO: 4185503 - DNA, 25 bp, Homo sapien
tctgtagtagcacctatccataggt

SEQ ID NO: 4185504 - DNA, 25 bp, Homo sapien
tagcacctatccataggtgtagccg

SEQ ID NO: 4185505 - DNA, 25 bp, Homo sapien
tccataggtgtagccgctgcacttc

SEQ ID NO: 4185506 - DNA, 25 bp, Homo sapien
gtcacactctctgtagtagcaccta

SEQ ID NO: 4185507 - DNA, 25 bp, Homo sapien
taagagccactctatacaagactgg

SEQ ID NO: 4185508 - DNA, 25 bp, Homo sapien
tcctatttagccagcagcacttaag

SEQ ID NO: 4185509 - DNA, 25 bp, Homo sapien
gctggtacctcctatttagccagca

SEQ ID NO: 4185510 - DNA, 25 bp, Homo sapien
gcagcacttaagagccactctatac

SEQ ID NO: 4185511 - DNA, 25 bp, Homo sapien
tagatgtcccgctgccagaagccct

SEQ ID NO: 4185512 - DNA, 25 bp, Homo sapien
gatttctaggcttgggggtcacata

SEQ ID NO: 4185513 - DNA, 25 bp, Homo sapien
gggtcacatagatgtcccgctgcca

SEQ ID NO: 4185514 - DNA, 25 bp, Homo sapien
caagtttgggccaccccttgagctt

SEQ ID NO: 4185515 - DNA, 25 bp, Homo sapien
tcagtatgtcctagtaaggaaggct

SEQ ID NO: 4185516 - DNA, 25 bp, Homo sapien
aaattttatacttcactgactaggg

SEQ ID NO: 4185517 - DNA, 25 bp, Homo sapien
ctgtgttggcctgggtgattgttca

SEQ ID NO: 4185518 - DNA, 25 bp, Homo sapien
tggctccttaagaagcaaaagtagg

SEQ ID NO: 4185519 - DNA, 25 bp, Homo sapien
tcttctataacctcgctctaatggc

SEQ ID NO: 4185520 - DNA, 25 bp, Homo sapien
gctctaatggcttaacagttgttct

SEQ ID NO: 4185521 - DNA, 25 bp, Homo sapien
tcttttgtcttgtcagagctcttct

SEQ ID NO: 4185522 - DNA, 25 bp, Homo sapien
ttcattgtggttgttcttgggttct

SEQ ID NO: 4185523 - DNA, 25 bp, Homo sapien
tttcattctttgctgtaccttttgc

SEQ ID NO: 4185524 - DNA, 25 bp, Homo sapien
tacgcatttaatgctgtttgtaacc

SEQ ID NO: 4185525 - DNA, 25 bp, Homo sapien
ccttaattattcaccagacccagaa

SEQ ID NO: 4185526 - DNA, 25 bp, Homo sapien
acccagaagttgtacgcatttaatg

SEQ ID NO: 4185527 - DNA, 25 bp, Homo sapien
cctgggacggtttctatctatcaaa

SEQ ID NO: 4185528 - DNA, 25 bp, Homo sapien
tttaggcaggagtgccaaaggacac

SEQ ID NO: 4185529 - DNA, 25 bp, Homo sapien
tctaagctagaacctttgagtcccc

SEQ ID NO: 4185530 - DNA, 25 bp, Homo sapien
gttatttaaaagatgccctagcagc

SEQ ID NO: 4185531 - DNA, 25 bp, Homo sapien
gacagtttacctaatggtgccagcc

SEQ ID NO: 4185532 - DNA, 25 bp, Homo sapien
tagcctcattctgtgcaaccaagtg

SEQ ID NO: 4185533 - DNA, 25 bp, Homo sapien
tgaaaaatgaactgagctgccttcc

SEQ ID NO: 4185534 - DNA, 25 bp, Homo sapien
gaactagattagcattgccctgcct

SEQ ID NO: 4185535 - DNA, 25 bp, Homo sapien
tgaaccaacaatctggagcacaccg

SEQ ID NO: 4185536 - DNA, 25 bp, Homo sapien
gagcacaccgaagggcaatctaaat

SEQ ID NO: 4185537 - DNA, 25 bp, Homo sapien
accctctggcgagtgcatgcagcag

SEQ ID NO: 4185538 - DNA, 25 bp, Homo sapien
gttagacagcaacttacctactctg

SEQ ID NO: 4185539 - DNA, 25 bp, Homo sapien
gaatagtgagttatacatctagcct

SEQ ID NO: 4185540 - DNA, 25 bp, Homo sapien
tacattcattcaaggctccagcata

SEQ ID NO: 4185541 - DNA, 25 bp, Homo sapien
caagatgcatctggcttgcccaggg

SEQ ID NO: 4185542 - DNA, 25 bp, Homo sapien
gaacacaaacagtactgcctcaggg

SEQ ID NO: 4185543 - DNA, 25 bp, Homo sapien
tgcagcgttattctcggaaaccaag

SEQ ID NO: 4185544 - DNA, 25 bp, Homo sapien
gcccagggatccactagaagcttca

SEQ ID NO: 4185545 - DNA, 25 bp, Homo sapien
gaaaccaagtatgtgcagcagtgac

SEQ ID NO: 4185546 - DNA, 25 bp, Homo sapien
tctgagactgtgaaggtgagaagcc

SEQ ID NO: 4185547 - DNA, 25 bp, Homo sapien
ctggcccatctttgagtctggaggt

SEQ ID NO: 4185548 - DNA, 25 bp, Homo sapien
tggcccatctttgagtctggaggtg

SEQ ID NO: 4185549 - DNA, 25 bp, Homo sapien
ttgagtctggaggtggtactaccat

SEQ ID NO: 4185550 - DNA, 25 bp, Homo sapien
catctttgagtctggaggtggtact

SEQ ID NO: 4185551 - DNA, 25 bp, Homo sapien
ctcccacttgagagtgtcagtcttc

SEQ ID NO: 4185552 - DNA, 25 bp, Homo sapien
tgtcctcccacttgagagtgtcagt

SEQ ID NO: 4185553 - DNA, 25 bp, Homo sapien
gctttgtcctcccacttgagagtgt

SEQ ID NO: 4185554 - DNA, 25 bp, Homo sapien
tcctcccacttgagagtgtcagtct

SEQ ID NO: 4185555 - DNA, 25 bp, Homo sapien
aaaatgaggttattcacaccttcag

SEQ ID NO: 4185556 - DNA, 25 bp, Homo sapien
ggtcgtagtgcccaggaacagatca

SEQ ID NO: 4185557 - DNA, 25 bp, Homo sapien
tttcctccagacacaaaatagggtc

SEQ ID NO: 4185558 - DNA, 25 bp, Homo sapien
tgccttttgggcacatatgaaaaat

SEQ ID NO: 4185559 - DNA, 25 bp, Homo sapien
acacctggctatataatgatattta

SEQ ID NO: 4185560 - DNA, 25 bp, Homo sapien
cagaatgtggacatcatgctcttta

SEQ ID NO: 4185561 - DNA, 25 bp, Homo sapien
tgtttcaggttgagcacttgaaccc

SEQ ID NO: 4185562 - DNA, 25 bp, Homo sapien
cttcggctccccaaagtacaggaat

SEQ ID NO: 4185563 - DNA, 25 bp, Homo sapien
aagccccttcaaaacttagcaccat

SEQ ID NO: 4185564 - DNA, 25 bp, Homo sapien
catacactttttagtggttctcttt

SEQ ID NO: 4185565 - DNA, 25 bp, Homo sapien
tgccatacactttttagtggttctc

SEQ ID NO: 4185566 - DNA, 25 bp, Homo sapien
gccatacactttttagtggttctct

SEQ ID NO: 4185567 - DNA, 25 bp, Homo sapien
cctgccatacactttttagtggttc

SEQ ID NO: 4185568 - DNA, 25 bp, Homo sapien
gcagtagcatcccttgagccttaaa

SEQ ID NO: 4185569 - DNA, 25 bp, Homo sapien
gacctgtgatgacactaccatactc

SEQ ID NO: 4185570 - DNA, 25 bp, Homo sapien
ggaatattcttgtataccatctagc

SEQ ID NO: 4185571 - DNA, 25 bp, Homo sapien
tgatgacactaccatactccaacct

SEQ ID NO: 4185572 - DNA, 25 bp, Homo sapien
gaatgttgtgctgtaattcatggaa

SEQ ID NO: 4185573 - DNA, 25 bp, Homo sapien
catgaccattcttagctgatttgct

SEQ ID NO: 4185574 - DNA, 25 bp, Homo sapien
catggaattctgaatgaattgccaa

SEQ ID NO: 4185575 - DNA, 25 bp, Homo sapien
gaattgccaaatcaagatacggttg

SEQ ID NO: 4185576 - DNA, 25 bp, Homo sapien
actgaacctggccatattgaggttt

SEQ ID NO: 4185577 - DNA, 25 bp, Homo sapien
acaggagatatgttccatgaccccc

SEQ ID NO: 4185578 - DNA, 25 bp, Homo sapien
tgaggttttagagcgagaaattact

SEQ ID NO: 4185579 - DNA, 25 bp, Homo sapien
tatttgaagagttgggatactacag

SEQ ID NO: 4185580 - DNA, 25 bp, Homo sapien
cttggagatacacttctggaagctc

SEQ ID NO: 4185581 - DNA, 25 bp, Homo sapien
ctgaattgactactctccaagagtg

SEQ ID NO: 4185582 - DNA, 25 bp, Homo sapien
tataactgtcattgggttctctcca

SEQ ID NO: 4185583 - DNA, 25 bp, Homo sapien
gctggagtgccatagcacagtcgca

SEQ ID NO: 4185584 - DNA, 25 bp, Homo sapien
cgcccagccatttctcattgttaac

SEQ ID NO: 4185585 - DNA, 25 bp, Homo sapien
ccacgcccagccatttctcattgtt

SEQ ID NO: 4185586 - DNA, 25 bp, Homo sapien
tttttgcatatttagcagagatgga

SEQ ID NO: 4185587 - DNA, 25 bp, Homo sapien
tgatcttgatttcctgatctcaggt

SEQ ID NO: 4185588 - DNA, 25 bp, Homo sapien
gctagtcaagtgaactgtttggcct

SEQ ID NO: 4185589 - DNA, 25 bp, Homo sapien
ctagtcaagtgaactgtttggcctg

SEQ ID NO: 4185590 - DNA, 25 bp, Homo sapien
tagtcaagtgaactgtttggcctgg

SEQ ID NO: 4185591 - DNA, 25 bp, Homo sapien
gagtgtttcacgagtttttgtgtca

SEQ ID NO: 4185592 - DNA, 25 bp, Homo sapien
atggagtgtttcacgagtttttgtg

SEQ ID NO: 4185593 - DNA, 25 bp, Homo sapien
ggagtgtttcacgagtttttgtgtc

SEQ ID NO: 4185594 - DNA, 25 bp, Homo sapien
tatggagtgtttcacgagtttttgt

SEQ ID NO: 4185595 - DNA, 25 bp, Homo sapien
taagtctactgatggagccttcggg

SEQ ID NO: 4185596 - DNA, 25 bp, Homo sapien
gaacattaacgtgattggccaaggc

SEQ ID NO: 4185597 - DNA, 25 bp, Homo sapien
gcaaatcccaagatgcagaggccag

SEQ ID NO: 4185598 - DNA, 25 bp, Homo sapien
ccagcgcaggaggtcatcagtgtct

SEQ ID NO: 4185599 - DNA, 25 bp, Homo sapien
tcgaattaaccattaaaaccatctg

SEQ ID NO: 4185600 - DNA, 25 bp, Homo sapien
atctattggatcagtattgatgtcc

SEQ ID NO: 4185601 - DNA, 25 bp, Homo sapien
ttgtttatttcttggatagcctggc

SEQ ID NO: 4185602 - DNA, 25 bp, Homo sapien
cactttcttcaatagagttatttag

SEQ ID NO: 4185603 - DNA, 25 bp, Homo sapien
gttataaaaccaggaggtcaagaga

SEQ ID NO: 4185604 - DNA, 25 bp, Homo sapien
taaatgtctactgaacttgattata

SEQ ID NO: 4185605 - DNA, 25 bp, Homo sapien
tcctattactgggttagtaatgtgt

SEQ ID NO: 4185606 - DNA, 25 bp, Homo sapien
tttgagtgtgaatgactggttggta

SEQ ID NO: 4185607 - DNA, 25 bp, Homo sapien
gaattgaaagacaaccccataagaa

SEQ ID NO: 4185608 - DNA, 25 bp, Homo sapien
gacaagaatggaggatcatctggaa

SEQ ID NO: 4185609 - DNA, 25 bp, Homo sapien
catacactgacgataggaatgtgaa

SEQ ID NO: 4185610 - DNA, 25 bp, Homo sapien
tgcatactccctagaatggctgtaa

SEQ ID NO: 4185611 - DNA, 25 bp, Homo sapien
gattacaactgttcatcctcaccta

SEQ ID NO: 4185612 - DNA, 25 bp, Homo sapien
attacaactgttcatcctcacctat

SEQ ID NO: 4185613 - DNA, 25 bp, Homo sapien
atcctcacctatgcaaagaaaggga

SEQ ID NO: 4185614 - DNA, 25 bp, Homo sapien
tcatcctcacctatgcaaagaaagg

SEQ ID NO: 4185615 - DNA, 25 bp, Homo sapien
cacatccacagttagcactttcttc

SEQ ID NO: 4185616 - DNA, 25 bp, Homo sapien
tctgtcccagcaggtattaatctct

SEQ ID NO: 4185617 - DNA, 25 bp, Homo sapien
catttgcattcagtagttctttctc

SEQ ID NO: 4185618 - DNA, 25 bp, Homo sapien
tcttcagatgctgacgctcggtgaa

SEQ ID NO: 4185619 - DNA, 25 bp, Homo sapien
gtgtaaacatgaattactgcagcct

SEQ ID NO: 4185620 - DNA, 25 bp, Homo sapien
tttttaagtgtggtgttcagtaatg

SEQ ID NO: 4185621 - DNA, 25 bp, Homo sapien
agtgtggtgttcagtaatgttaaat

SEQ ID NO: 4185622 - DNA, 25 bp, Homo sapien
tgtaaacatgaattactgcagcctt

SEQ ID NO: 4185623 - DNA, 25 bp, Homo sapien
ggctcattccgctgtcattttgacc

SEQ ID NO: 4185624 - DNA, 25 bp, Homo sapien
gaggcccgagggactgtttaggagc

SEQ ID NO: 4185625 - DNA, 25 bp, Homo sapien
ttttaggagccctcgatcgccatgg

SEQ ID NO: 4185626 - DNA, 25 bp, Homo sapien
gcgtcccagaagttagccaccagga

SEQ ID NO: 4185627 - DNA, 25 bp, Homo sapien
ctggagcaactcagcactacctgca

SEQ ID NO: 4185628 - DNA, 25 bp, Homo sapien
agcactacctgcagcggcgcagctc

SEQ ID NO: 4185629 - DNA, 25 bp, Homo sapien
tggagcaactcagcactacctgcag

SEQ ID NO: 4185630 - DNA, 25 bp, Homo sapien
gcactacctgcagcggcgcagctca

SEQ ID NO: 4185631 - DNA, 25 bp, Homo sapien
cccttggagcaactaactcctccca

SEQ ID NO: 4185632 - DNA, 25 bp, Homo sapien
actcgcagtctactccacattcaat

SEQ ID NO: 4185633 - DNA, 25 bp, Homo sapien
tattctttagcgctccccattctgg

SEQ ID NO: 4185634 - DNA, 25 bp, Homo sapien
ccattctggccatgccaagacctca

SEQ ID NO: 4185635 - DNA, 25 bp, Homo sapien
gagccccatgtatggacaccacttg

SEQ ID NO: 4185636 - DNA, 25 bp, Homo sapien
gttcgagccccatgtatggacacca

SEQ ID NO: 4185637 - DNA, 25 bp, Homo sapien
tggcgacccttcaacccaggttcga

SEQ ID NO: 4185638 - DNA, 25 bp, Homo sapien
ttcaacccaggttcgagccccatgt

SEQ ID NO: 4185639 - DNA, 25 bp, Homo sapien
gagcccgaatatgagtaatgtagaa

SEQ ID NO: 4185640 - DNA, 25 bp, Homo sapien
ccgaatatgagtaatgtagaaaggg

SEQ ID NO: 4185641 - DNA, 25 bp, Homo sapien
aagacgaggaatgcaccatttgaca

SEQ ID NO: 4185642 - DNA, 25 bp, Homo sapien
gtgtatgagcccgaatatgagtaat

SEQ ID NO: 4185643 - DNA, 25 bp, Homo sapien
tggggtatcccatagtccctgtttc

SEQ ID NO: 4185644 - DNA, 25 bp, Homo sapien
gtcaataatactagattcaattgca

SEQ ID NO: 4185645 - DNA, 25 bp, Homo sapien
cggaatgccagtaatgtgtttagta

SEQ ID NO: 4185646 - DNA, 25 bp, Homo sapien
gagaattatacggaatgccagtaat

SEQ ID NO: 4185647 - DNA, 25 bp, Homo sapien
ggtttcaggtgcctcgatgatatcc

SEQ ID NO: 4185648 - DNA, 25 bp, Homo sapien
taaggtttcaggtgcctcgatgata

SEQ ID NO: 4185649 - DNA, 25 bp, Homo sapien
ataaggtttcaggtgcctcgatgat

SEQ ID NO: 4185650 - DNA, 25 bp, Homo sapien
ttcaggtgcctcgatgatatccaaa

SEQ ID NO: 4185651 - DNA, 25 bp, Homo sapien
cacaactggatatgctgacctgcta

SEQ ID NO: 4185652 - DNA, 25 bp, Homo sapien
tgacacgggcatggcagtctcaact

SEQ ID NO: 4185653 - DNA, 25 bp, Homo sapien
tgtcacaggccagactaccaggtgg

SEQ ID NO: 4185654 - DNA, 25 bp, Homo sapien
taaccaaggttgcagagtgtcccac

SEQ ID NO: 4185655 - DNA, 25 bp, Homo sapien
agtgctgtgctaaacggacctggcc

SEQ ID NO: 4185656 - DNA, 25 bp, Homo sapien
gacctggcccctaggtgcagtgtcg

SEQ ID NO: 4185657 - DNA, 25 bp, Homo sapien
aggcgggaaccacctactgactgtc

SEQ ID NO: 4185658 - DNA, 25 bp, Homo sapien
gactgtcttcacataggccatcacc

SEQ ID NO: 4185659 - DNA, 25 bp, Homo sapien
tctcttcgttgcttggagacggacc

SEQ ID NO: 4185660 - DNA, 25 bp, Homo sapien
tatcccttacacactgggtccttac

SEQ ID NO: 4185661 - DNA, 25 bp, Homo sapien
gcttggagacggacctcacaatcta

SEQ ID NO: 4185662 - DNA, 25 bp, Homo sapien
gcaattttgccacaagagcacgatg

SEQ ID NO: 4185663 - DNA, 25 bp, Homo sapien
agggatccaagggaaagccacctct

SEQ ID NO: 4185664 - DNA, 25 bp, Homo sapien
agccctgcctttcagaccaccccat

SEQ ID NO: 4185665 - DNA, 25 bp, Homo sapien
atccaagggaaagccacctctgggc

SEQ ID NO: 4185666 - DNA, 25 bp, Homo sapien
gggatccaagggaaagccacctctg

SEQ ID NO: 4185667 - DNA, 25 bp, Homo sapien
aaaagctcagggatgaccgagggtg

SEQ ID NO: 4185668 - DNA, 25 bp, Homo sapien
caaaagctcagggatgaccgagggt

SEQ ID NO: 4185669 - DNA, 25 bp, Homo sapien
gctcagggatgaccgagggtgtctt

SEQ ID NO: 4185670 - DNA, 25 bp, Homo sapien
aagctcagggatgaccgagggtgtc

SEQ ID NO: 4185671 - DNA, 25 bp, Homo sapien
aagcaaggctttctggaggccagtg

SEQ ID NO: 4185672 - DNA, 25 bp, Homo sapien
tgaagcaaggctttctggaggccag

SEQ ID NO: 4185673 - DNA, 25 bp, Homo sapien
gggatgaagcaaggctttctggagg

SEQ ID NO: 4185674 - DNA, 25 bp, Homo sapien
cctgatggtctgcaggtcagtgctg

SEQ ID NO: 4185675 - DNA, 25 bp, Homo sapien
gtcaccctgctgtgcgctagatgtc

SEQ ID NO: 4185676 - DNA, 25 bp, Homo sapien
gaagcgtgagcatatcgcccggctt

SEQ ID NO: 4185677 - DNA, 25 bp, Homo sapien
tctctccacagctgtcgcccggctt

SEQ ID NO: 4185678 - DNA, 25 bp, Homo sapien
catttgatacggactctctcagttg

SEQ ID NO: 4185679 - DNA, 25 bp, Homo sapien
actgcctaaactagggtgtgcacag

SEQ ID NO: 4185680 - DNA, 25 bp, Homo sapien
tcacatgactgcatactgcctaaac

SEQ ID NO: 4185681 - DNA, 25 bp, Homo sapien
catcctgatacttctctgaggtctc

SEQ ID NO: 4185682 - DNA, 25 bp, Homo sapien
gagccactggtaatgattttctgtg

SEQ ID NO: 4185683 - DNA, 25 bp, Homo sapien
aagcaggaccattggaaagctgcat

SEQ ID NO: 4185684 - DNA, 25 bp, Homo sapien
caggaccattggaaagctgcatctg

SEQ ID NO: 4185685 - DNA, 25 bp, Homo sapien
ggaccattggaaagctgcatctggg

SEQ ID NO: 4185686 - DNA, 25 bp, Homo sapien
gaccattggaaagctgcatctgggc

SEQ ID NO: 4185687 - DNA, 25 bp, Homo sapien
ggaggacaggtccctcattaaatga

SEQ ID NO: 4185688 - DNA, 25 bp, Homo sapien
gaagttttcctcagggcaagctgtc

SEQ ID NO: 4185689 - DNA, 25 bp, Homo sapien
gctggaatccaaggctgggtcacca

SEQ ID NO: 4185690 - DNA, 25 bp, Homo sapien
tttttccataccagacaccagtgtc

SEQ ID NO: 4185691 - DNA, 25 bp, Homo sapien
gggtcaccagagctacccagagtct

SEQ ID NO: 4185692 - DNA, 25 bp, Homo sapien
agaggagggcgtactggtgggcaag

SEQ ID NO: 4185693 - DNA, 25 bp, Homo sapien
gcaagggttctggaacaacaggata

SEQ ID NO: 4185694 - DNA, 25 bp, Homo sapien
ggatatgagccatagtggagcagct

SEQ ID NO: 4185695 - DNA, 25 bp, Homo sapien
tgcaaccccaggagaagctttggaa

SEQ ID NO: 4185696 - DNA, 25 bp, Homo sapien
tgatgaaaacgaggccatggcagca

SEQ ID NO: 4185697 - DNA, 25 bp, Homo sapien
cacagctctgatgaaaacgaggcca

SEQ ID NO: 4185698 - DNA, 25 bp, Homo sapien
ctctcaaccaagcacggctgtggcc

SEQ ID NO: 4185699 - DNA, 25 bp, Homo sapien
gcccacacagctctgatgaaaacga

SEQ ID NO: 4185700 - DNA, 25 bp, Homo sapien
ctgggcttggtgtagaacgctgagt

SEQ ID NO: 4185701 - DNA, 25 bp, Homo sapien
cttggtgtagaacgctgagtgttga

SEQ ID NO: 4185702 - DNA, 25 bp, Homo sapien
tgggcttggtgtagaacgctgagtg

SEQ ID NO: 4185703 - DNA, 25 bp, Homo sapien
ggcttggtgtagaacgctgagtgtt

SEQ ID NO: 4185704 - DNA, 25 bp, Homo sapien
tgtggatgtagatctaggtcatgga

SEQ ID NO: 4185705 - DNA, 25 bp, Homo sapien
gtggatgtagatctaggtcatggat

SEQ ID NO: 4185706 - DNA, 25 bp, Homo sapien
taataccttcatcggcacttggcca

SEQ ID NO: 4185707 - DNA, 25 bp, Homo sapien
tctaataccttcatcggcacttggc

SEQ ID NO: 4185708 - DNA, 25 bp, Homo sapien
taccttcatcggcacttggccaaga

SEQ ID NO: 4185709 - DNA, 25 bp, Homo sapien
catttctaataccttcatcggcact

SEQ ID NO: 4185710 - DNA, 25 bp, Homo sapien
gcagggacatttgcagcacagcagc

SEQ ID NO: 4185711 - DNA, 25 bp, Homo sapien
cagggacatttgcagcacagcagca

SEQ ID NO: 4185712 - DNA, 25 bp, Homo sapien
ctgcagggacatttgcagcacagca

SEQ ID NO: 4185713 - DNA, 25 bp, Homo sapien
agggacatttgcagcacagcagcag

SEQ ID NO: 4185714 - DNA, 25 bp, Homo sapien
tctcagggccaagcagtggtcctgt

SEQ ID NO: 4185715 - DNA, 25 bp, Homo sapien
taggatacccgccatgctgtccaac

SEQ ID NO: 4185716 - DNA, 25 bp, Homo sapien
tacatgtagccttggtaggataccc

SEQ ID NO: 4185717 - DNA, 25 bp, Homo sapien
gccttttccttcctcgcattacatg

SEQ ID NO: 4185718 - DNA, 25 bp, Homo sapien
tgctgacggagaccttcgatatggc

SEQ ID NO: 4185719 - DNA, 25 bp, Homo sapien
ggcctgcatccctctatctaagggt

SEQ ID NO: 4185720 - DNA, 25 bp, Homo sapien
tcgatatggcccaacaagaggcctg

SEQ ID NO: 4185721 - DNA, 25 bp, Homo sapien
cagtaacactggtcttgagtcaggg

SEQ ID NO: 4185722 - DNA, 25 bp, Homo sapien
aaccaatgtagaacgcagacgggcg

SEQ ID NO: 4185723 - DNA, 25 bp, Homo sapien
tctgttgacgagaacacgcgtgtag

SEQ ID NO: 4185724 - DNA, 25 bp, Homo sapien
gcacgattaaacacaggcgcacgag

SEQ ID NO: 4185725 - DNA, 25 bp, Homo sapien
tagagggcgagacaaagaccgagat

SEQ ID NO: 4185726 - DNA, 25 bp, Homo sapien
agtgggctccacaggatgggtccgg

SEQ ID NO: 4185727 - DNA, 25 bp, Homo sapien
ggccgccgcttatatctgcgccagg

SEQ ID NO: 4185728 - DNA, 25 bp, Homo sapien
tccgcagtcggcaggtcaggagtct

SEQ ID NO: 4185729 - DNA, 25 bp, Homo sapien
tcaggagtctgcagcgctgaggacc

SEQ ID NO: 4185730 - DNA, 25 bp, Homo sapien
gcagcgagagcctccgatgtgcccg

SEQ ID NO: 4185731 - DNA, 25 bp, Homo sapien
cgggccgagagggctccctttccag

SEQ ID NO: 4185732 - DNA, 25 bp, Homo sapien
cctttccagtgctcccggacaccgt

SEQ ID NO: 4185733 - DNA, 25 bp, Homo sapien
tgcccgcgccgtgcctcccgtcggg

SEQ ID NO: 4185734 - DNA, 25 bp, Homo sapien
gaatacccagctctgtccggcggca

SEQ ID NO: 4185735 - DNA, 25 bp, Homo sapien
gccctgaatacccagctctgtccgg

SEQ ID NO: 4185736 - DNA, 25 bp, Homo sapien
aggccgacgccctgaatacccagct

SEQ ID NO: 4185737 - DNA, 25 bp, Homo sapien
caggcagggggtgccgcggagctcc

SEQ ID NO: 4185738 - DNA, 25 bp, Homo sapien
aggaggcgctccacctggcgcagga

SEQ ID NO: 4185739 - DNA, 25 bp, Homo sapien
ccggtcaggttcagggtcaaagcca

SEQ ID NO: 4185740 - DNA, 25 bp, Homo sapien
gccgctggatgttttcccggaggaa

SEQ ID NO: 4185741 - DNA, 25 bp, Homo sapien
aggaagtcatccaggcccggatgct

SEQ ID NO: 4185742 - DNA, 25 bp, Homo sapien
tctcccaatagcctagccccacagc

SEQ ID NO: 4185743 - DNA, 25 bp, Homo sapien
tttgccggcaggtttccacggctct

SEQ ID NO: 4185744 - DNA, 25 bp, Homo sapien
ccacggctctcccaatagcctagcc

SEQ ID NO: 4185745 - DNA, 25 bp, Homo sapien
cctttgccggcaggtttccacggct

SEQ ID NO: 4185746 - DNA, 25 bp, Homo sapien
cttgtgctgggttacatcgactgac

SEQ ID NO: 4185747 - DNA, 25 bp, Homo sapien
gtgctgccgcttcgggacagcatat

SEQ ID NO: 4185748 - DNA, 25 bp, Homo sapien
cctggatgctgacgtttggagagcc

SEQ ID NO: 4185749 - DNA, 25 bp, Homo sapien
tttgagccttgggatctgccagcct

SEQ ID NO: 4185750 - DNA, 25 bp, Homo sapien
cagaaggcccgcttgaccataggct

SEQ ID NO: 4185751 - DNA, 25 bp, Homo sapien
cgaccagggtgctgccgcttttcct

SEQ ID NO: 4185752 - DNA, 25 bp, Homo sapien
gcgtttttcaggcatcaggtcttcc

SEQ ID NO: 4185753 - DNA, 25 bp, Homo sapien
cagggccctcttgcccggatgctgg

SEQ ID NO: 4185754 - DNA, 25 bp, Homo sapien
ttagaccacaaactcgacttcaggg

SEQ ID NO: 4185755 - DNA, 25 bp, Homo sapien
gctcaggcttatggtcagggatcta

SEQ ID NO: 4185756 - DNA, 25 bp, Homo sapien
cacagaaggaccatcttagccaagg

SEQ ID NO: 4185757 - DNA, 25 bp, Homo sapien
gattttctcacatgcctaaaggaag

SEQ ID NO: 4185758 - DNA, 25 bp, Homo sapien
ccctggtttgtgtctcctgactgca

SEQ ID NO: 4185759 - DNA, 25 bp, Homo sapien
ttaacaggctgtttggtgacacaag

SEQ ID NO: 4185760 - DNA, 25 bp, Homo sapien
ggtcctctgccctccttgttcctgt

SEQ ID NO: 4185761 - DNA, 25 bp, Homo sapien
gtcctgcaccgagccccagaagacc

SEQ ID NO: 4185762 - DNA, 25 bp, Homo sapien
gagaaggcgagtcaggtcctctgcc

SEQ ID NO: 4185763 - DNA, 25 bp, Homo sapien
aggcgagtcaggtcctctgcctggg

SEQ ID NO: 4185764 - DNA, 25 bp, Homo sapien
gaaggcgagtcaggtcctctgcctg

SEQ ID NO: 4185765 - DNA, 25 bp, Homo sapien
gtgagaaggcgagtcaggtcctctg

SEQ ID NO: 4185766 - DNA, 25 bp, Homo sapien
tatgtgagcactcatggcagtgtac

SEQ ID NO: 4185767 - DNA, 25 bp, Homo sapien
aaaccagtggttcttgaccttcctg

SEQ ID NO: 4185768 - DNA, 25 bp, Homo sapien
tcatcacagccagcagacccactgg

SEQ ID NO: 4185769 - DNA, 25 bp, Homo sapien
agtggacgccacaaagccgctatgt

SEQ ID NO: 4185770 - DNA, 25 bp, Homo sapien
ctgcttcatcgggtacatagcatag

SEQ ID NO: 4185771 - DNA, 25 bp, Homo sapien
tgatctccttgcactcatgcttgtg

SEQ ID NO: 4185772 - DNA, 25 bp, Homo sapien
ggtacatagcatagcctgctgtctg

SEQ ID NO: 4185773 - DNA, 25 bp, Homo sapien
tgctgcccaggtgaatgtagtactt

SEQ ID NO: 4185774 - DNA, 25 bp, Homo sapien
gcaggttggatagactgctgaagcc

SEQ ID NO: 4185775 - DNA, 25 bp, Homo sapien
aggttggatagactgctgaagccca

SEQ ID NO: 4185776 - DNA, 25 bp, Homo sapien
caggttggatagactgctgaagccc

SEQ ID NO: 4185777 - DNA, 25 bp, Homo sapien
tgcaggttggatagactgctgaagc

SEQ ID NO: 4185778 - DNA, 25 bp, Homo sapien
cttccatcccagaaatcgctctcct

SEQ ID NO: 4185779 - DNA, 25 bp, Homo sapien
aggaggcagatggcttccatcccag

SEQ ID NO: 4185780 - DNA, 25 bp, Homo sapien
ccctttctggttgggcagcgggagt

SEQ ID NO: 4185781 - DNA, 25 bp, Homo sapien
tctggttgggcagcgggagttgaga

SEQ ID NO: 4185782 - DNA, 25 bp, Homo sapien
gctctcgcatacatgcaaacagccg

SEQ ID NO: 4185783 - DNA, 25 bp, Homo sapien
ctctcgcatacatgcaaacagccgg

SEQ ID NO: 4185784 - DNA, 25 bp, Homo sapien
gctttttctgcgagctctcgcatac

SEQ ID NO: 4185785 - DNA, 25 bp, Homo sapien
tctgcgagctctcgcatacatgcaa

SEQ ID NO: 4185786 - DNA, 25 bp, Homo sapien
aaagtgccctgtgggggctgcacag

SEQ ID NO: 4185787 - DNA, 25 bp, Homo sapien
ctgcacagcagaacagtcgaatctc

SEQ ID NO: 4185788 - DNA, 25 bp, Homo sapien
tacaaagtgccctgtgggggctgca

SEQ ID NO: 4185789 - DNA, 25 bp, Homo sapien
tgcacagcagaacagtcgaatctca

SEQ ID NO: 4185790 - DNA, 25 bp, Homo sapien
cctcctcctgggactctcagaggat

SEQ ID NO: 4185791 - DNA, 25 bp, Homo sapien
aactgcagccgtcctcgctttgctg

SEQ ID NO: 4185792 - DNA, 25 bp, Homo sapien
aggtgtctgagaattcctcctcctg

SEQ ID NO: 4185793 - DNA, 25 bp, Homo sapien
gccgtcctcgctttgctgtccctgt

SEQ ID NO: 4185794 - DNA, 25 bp, Homo sapien
tgtccaagacacagagagccacgga

SEQ ID NO: 4185795 - DNA, 25 bp, Homo sapien
ctctttccttctcaaggtgtccaag

SEQ ID NO: 4185796 - DNA, 25 bp, Homo sapien
gacacagagagccacggaatctcac

SEQ ID NO: 4185797 - DNA, 25 bp, Homo sapien
ccttctcaaggtgtccaagacacag

SEQ ID NO: 4185798 - DNA, 25 bp, Homo sapien
gagcgtggacatccagtctcacagc

SEQ ID NO: 4185799 - DNA, 25 bp, Homo sapien
tgcagccggtcgtcgctgggctgtt

SEQ ID NO: 4185800 - DNA, 25 bp, Homo sapien
gaactgcagccggtcgtcgctgggc

SEQ ID NO: 4185801 - DNA, 25 bp, Homo sapien
cacggtccccaagatgagcgtggac

SEQ ID NO: 4185802 - DNA, 25 bp, Homo sapien
tgccccaagtcaggatctaagactg

SEQ ID NO: 4185803 - DNA, 25 bp, Homo sapien
gccccaagtcaggatctaagactgg

SEQ ID NO: 4185804 - DNA, 25 bp, Homo sapien
ttcctgtcacaccaataagtgctgt

SEQ ID NO: 4185805 - DNA, 25 bp, Homo sapien
gtgctgtcagaccagcgctcggtat

SEQ ID NO: 4185806 - DNA, 25 bp, Homo sapien
tctggttccatgacagaaggttcct

SEQ ID NO: 4185807 - DNA, 25 bp, Homo sapien
tccaatctctggttccatgacagaa

SEQ ID NO: 4185808 - DNA, 25 bp, Homo sapien
cgctccagagtcagagctacgtgat

SEQ ID NO: 4185809 - DNA, 25 bp, Homo sapien
tccagagtcagagctacgtgattcc

SEQ ID NO: 4185810 - DNA, 25 bp, Homo sapien
cacgctccagagtcagagctacgtg

SEQ ID NO: 4185811 - DNA, 25 bp, Homo sapien
aacacgctccagagtcagagctacg

SEQ ID NO: 4185812 - DNA, 25 bp, Homo sapien
tagccttgcaggagaatatgacctc

SEQ ID NO: 4185813 - DNA, 25 bp, Homo sapien
ggatatcctgtgttgggaagcatca

SEQ ID NO: 4185814 - DNA, 25 bp, Homo sapien
taatagctggctcggcatgaaccat

SEQ ID NO: 4185815 - DNA, 25 bp, Homo sapien
gcagattgtgcccaaggagacctat

SEQ ID NO: 4185816 - DNA, 25 bp, Homo sapien
ttcagtatagcaaagtacaaccagg

SEQ ID NO: 4185817 - DNA, 25 bp, Homo sapien
gcaaagtacaaccaggatagattcc

SEQ ID NO: 4185818 - DNA, 25 bp, Homo sapien
aggatagattccaacctccaggccc

SEQ ID NO: 4185819 - DNA, 25 bp, Homo sapien
gtacaaccaggatagattccaacct

SEQ ID NO: 4185820 - DNA, 25 bp, Homo sapien
tccaaggggcaggattctgacccac

SEQ ID NO: 4185821 - DNA, 25 bp, Homo sapien
ccacactcctggtgccagtgtccat

SEQ ID NO: 4185822 - DNA, 25 bp, Homo sapien
gccactgaagggtctcggcctggtc

SEQ ID NO: 4185823 - DNA, 25 bp, Homo sapien
gggtacactgtacaagcgatgatgt

SEQ ID NO: 4185824 - DNA, 25 bp, Homo sapien
gatttgacgtgtggtcagctgctca

SEQ ID NO: 4185825 - DNA, 25 bp, Homo sapien
aaaattgatttgacgtgtggtcagc

SEQ ID NO: 4185826 - DNA, 25 bp, Homo sapien
ctctgaaaattgatttgacgtgtgg

SEQ ID NO: 4185827 - DNA, 25 bp, Homo sapien
gcaaactctgaaaattgatttgacg

SEQ ID NO: 4185828 - DNA, 25 bp, Homo sapien
agttttgactgatccaacatgatgg

SEQ ID NO: 4185829 - DNA, 25 bp, Homo sapien
tcttccaggatagcaaatacttgcc

SEQ ID NO: 4185830 - DNA, 25 bp, Homo sapien
actgccgtcttccaggatagcaaat

SEQ ID NO: 4185831 - DNA, 25 bp, Homo sapien
tagcaaatacttgcccacaaataga

SEQ ID NO: 4185832 - DNA, 25 bp, Homo sapien
caggatagcaaatacttgcccacaa

SEQ ID NO: 4185833 - DNA, 25 bp, Homo sapien
cagtccagagacagtgtctattcct

SEQ ID NO: 4185834 - DNA, 25 bp, Homo sapien
gagctttcccacaagggaatgtgcc

SEQ ID NO: 4185835 - DNA, 25 bp, Homo sapien
gacctagatgtagaaccccagggct

SEQ ID NO: 4185836 - DNA, 25 bp, Homo sapien
catcttctaccatgcaaacaaagcc

SEQ ID NO: 4185837 - DNA, 25 bp, Homo sapien
tttgttgtatgccggggcagaacca

SEQ ID NO: 4185838 - DNA, 25 bp, Homo sapien
gccttttgttgtatgccggggcaga

SEQ ID NO: 4185839 - DNA, 25 bp, Homo sapien
ttgtatgccggggcagaaccactaa

SEQ ID NO: 4185840 - DNA, 25 bp, Homo sapien
tcaaagtgggcagagttgaaaggct

SEQ ID NO: 4185841 - DNA, 25 bp, Homo sapien
gtttgtcgagctctgttggtccttc

SEQ ID NO: 4185842 - DNA, 25 bp, Homo sapien
tctgtttgtcgagctctgttggtcc

SEQ ID NO: 4185843 - DNA, 25 bp, Homo sapien
ttgaaaggctgtctaagcgggtggg

SEQ ID NO: 4185844 - DNA, 25 bp, Homo sapien
atcgagctctgctgatcctggagaa

SEQ ID NO: 4185845 - DNA, 25 bp, Homo sapien
catgtcccttcaggttaaaattcag

SEQ ID NO: 4185846 - DNA, 25 bp, Homo sapien
ttcagacttcttagcaaggaactgc

SEQ ID NO: 4185847 - DNA, 25 bp, Homo sapien
acctgtctctgctacttgagggtga

SEQ ID NO: 4185848 - DNA, 25 bp, Homo sapien
ctagatttcccagccaacagtacca

SEQ ID NO: 4185849 - DNA, 25 bp, Homo sapien
tccacaacagattcacaaagccggt

SEQ ID NO: 4185850 - DNA, 25 bp, Homo sapien
tgctgatgaattgctgctcgccctc

SEQ ID NO: 4185851 - DNA, 25 bp, Homo sapien
tcccctctttacagtcaggagcagc

SEQ ID NO: 4185852 - DNA, 25 bp, Homo sapien
acattatcaggatgtgtcactccct

SEQ ID NO: 4185853 - DNA, 25 bp, Homo sapien
cttgtatttaccttcacctgggctg

SEQ ID NO: 4185854 - DNA, 25 bp, Homo sapien
gtggttgtctttggcacattatcag

SEQ ID NO: 4185855 - DNA, 25 bp, Homo sapien
tcaggatgtgtcactccctcatctt

SEQ ID NO: 4185856 - DNA, 25 bp, Homo sapien
aatgagcagtgttcctcgtctgcct

SEQ ID NO: 4185857 - DNA, 25 bp, Homo sapien
gagcagtgttcctcgtctgcctcac

SEQ ID NO: 4185858 - DNA, 25 bp, Homo sapien
caggcctcctggtggcccgtgaaca

SEQ ID NO: 4185859 - DNA, 25 bp, Homo sapien
ctggtggcccgtgaacaaaagtgag

SEQ ID NO: 4185860 - DNA, 25 bp, Homo sapien
ttcaaagtgcgctagcgcctgtcag

SEQ ID NO: 4185861 - DNA, 25 bp, Homo sapien
ctacttcaaagtgcgctagcgcctg

SEQ ID NO: 4185862 - DNA, 25 bp, Homo sapien
gcttcctacttcaaagtgcgctagc

SEQ ID NO: 4185863 - DNA, 25 bp, Homo sapien
tgcgctagcgcctgtcagctggaag

SEQ ID NO: 4185864 - DNA, 25 bp, Homo sapien
ttggcacaggcaagggatctgacgc

SEQ ID NO: 4185865 - DNA, 25 bp, Homo sapien
tctgtgcattgcatcaggagggaca

SEQ ID NO: 4185866 - DNA, 25 bp, Homo sapien
caatgacactaaaggctaagctggc

SEQ ID NO: 4185867 - DNA, 25 bp, Homo sapien
tattggccactgaggcacttcctgg

SEQ ID NO: 4185868 - DNA, 25 bp, Homo sapien
ctcagtttacttgggagcttggcct

SEQ ID NO: 4185869 - DNA, 25 bp, Homo sapien
gcctcagtttacttgggagcttggc

SEQ ID NO: 4185870 - DNA, 25 bp, Homo sapien
ccctcctactgcctggaagaagatt

SEQ ID NO: 4185871 - DNA, 25 bp, Homo sapien
agaagattagtgtcctcttgccttc

SEQ ID NO: 4185872 - DNA, 25 bp, Homo sapien
ttggtgagggcattttctttccata

SEQ ID NO: 4185873 - DNA, 25 bp, Homo sapien
aacccaggtcaagcgtgcctcacaa

SEQ ID NO: 4185874 - DNA, 25 bp, Homo sapien
tctttccataaaacccaggtcaagc

SEQ ID NO: 4185875 - DNA, 25 bp, Homo sapien
ggtcaagcgtgcctcacaaagggac

SEQ ID NO: 4185876 - DNA, 25 bp, Homo sapien
tatgaaggcttggaaatctagtgta

SEQ ID NO: 4185877 - DNA, 25 bp, Homo sapien
tacagctttaggtgagtctagggca

SEQ ID NO: 4185878 - DNA, 25 bp, Homo sapien
catgactctgggcagtacagcttta

SEQ ID NO: 4185879 - DNA, 25 bp, Homo sapien
acatgtggcctgaggccatgactct

SEQ ID NO: 4185880 - DNA, 25 bp, Homo sapien
tttagagatggatttttcacttttg

SEQ ID NO: 4185881 - DNA, 25 bp, Homo sapien
ttatttagagatggatttttcactt

SEQ ID NO: 4185882 - DNA, 25 bp, Homo sapien
caccgtgccaggccctcagttttat

SEQ ID NO: 4185883 - DNA, 25 bp, Homo sapien
gctacttctgcctccaggaatcaag

SEQ ID NO: 4185884 - DNA, 25 bp, Homo sapien
aggtgcctctttaaagaaagatgcc

SEQ ID NO: 4185885 - DNA, 25 bp, Homo sapien
ctgaacggagagtgcgtgctgccca

SEQ ID NO: 4185886 - DNA, 25 bp, Homo sapien
gatgccggcttgtcgtagacggtca

SEQ ID NO: 4185887 - DNA, 25 bp, Homo sapien
gtgcctctttaaagaaagatgccgg

SEQ ID NO: 4185888 - DNA, 25 bp, Homo sapien
tgtgtctgggtcctcaggttctgag

SEQ ID NO: 4185889 - DNA, 25 bp, Homo sapien
ctctgtgtctgggtcctcaggttct

SEQ ID NO: 4185890 - DNA, 25 bp, Homo sapien
tctgtgtctgggtcctcaggttctg

SEQ ID NO: 4185891 - DNA, 25 bp, Homo sapien
ctgtgtctgggtcctcaggttctga

SEQ ID NO: 4185892 - DNA, 25 bp, Homo sapien
cgtggagacgcgtcaccagcccgct

SEQ ID NO: 4185893 - DNA, 25 bp, Homo sapien
cccgctcccagaatcccgctccgtg

SEQ ID NO: 4185894 - DNA, 25 bp, Homo sapien
ctggccgctcgtggagacgcgtcac

SEQ ID NO: 4185895 - DNA, 25 bp, Homo sapien
aatcccgctccgtgaaggccgaccg

SEQ ID NO: 4185896 - DNA, 25 bp, Homo sapien
cccaagtgccccagtggtcatgcag

SEQ ID NO: 4185897 - DNA, 25 bp, Homo sapien
caagtgccccagtggtcatgcagac

SEQ ID NO: 4185898 - DNA, 25 bp, Homo sapien
caaccccaagtgccccagtggtcat

SEQ ID NO: 4185899 - DNA, 25 bp, Homo sapien
accccaagtgccccagtggtcatgc

SEQ ID NO: 4185900 - DNA, 25 bp, Homo sapien
tgccagcaagatagagaagtcttcg

SEQ ID NO: 4185901 - DNA, 25 bp, Homo sapien
ttctaaagctgccagcaagatagag

SEQ ID NO: 4185902 - DNA, 25 bp, Homo sapien
cagcaagatagagaagtcttcgtcc

SEQ ID NO: 4185903 - DNA, 25 bp, Homo sapien
taaagctgccagcaagatagagaag

SEQ ID NO: 4185904 - DNA, 25 bp, Homo sapien
cgagagaaggaaggttctgtccgtc

SEQ ID NO: 4185905 - DNA, 25 bp, Homo sapien
aggaaggttctgtccgtcaagagtc

SEQ ID NO: 4185906 - DNA, 25 bp, Homo sapien
ttctgtccgtcaagagtcagttgtt

SEQ ID NO: 4185907 - DNA, 25 bp, Homo sapien
aaggttctgtccgtcaagagtcagt

SEQ ID NO: 4185908 - DNA, 25 bp, Homo sapien
tctccctcctcactgaatcatcttg

SEQ ID NO: 4185909 - DNA, 25 bp, Homo sapien
aagggctcagcagcagtaactggga

SEQ ID NO: 4185910 - DNA, 25 bp, Homo sapien
gaatcatcttgaaagggctcagcag

SEQ ID NO: 4185911 - DNA, 25 bp, Homo sapien
cagcagtaactgggacaggggctct

SEQ ID NO: 4185912 - DNA, 25 bp, Homo sapien
gcctccagagcacatggcgcgggtt

SEQ ID NO: 4185913 - DNA, 25 bp, Homo sapien
cacatggcgcgggttccaaaccagt

SEQ ID NO: 4185914 - DNA, 25 bp, Homo sapien
tggcgcgggttccaaaccagtcctg

SEQ ID NO: 4185915 - DNA, 25 bp, Homo sapien
acatggcgcgggttccaaaccagtc

SEQ ID NO: 4185916 - DNA, 25 bp, Homo sapien
ggccctccagccaggggatgcagac

SEQ ID NO: 4185917 - DNA, 25 bp, Homo sapien
agtcctcggccctccagccagggga

SEQ ID NO: 4185918 - DNA, 25 bp, Homo sapien
ctcggccctccagccaggggatgca

SEQ ID NO: 4185919 - DNA, 25 bp, Homo sapien
ggatgcagacctggatgtgctggaa

SEQ ID NO: 4185920 - DNA, 25 bp, Homo sapien
ctggaggacgtgtccagacagacat

SEQ ID NO: 4185921 - DNA, 25 bp, Homo sapien
ggacgtgtccagacagacatccagg

SEQ ID NO: 4185922 - DNA, 25 bp, Homo sapien
gaggacgtgtccagacagacatcca

SEQ ID NO: 4185923 - DNA, 25 bp, Homo sapien
gacgtgtccagacagacatccaggt

SEQ ID NO: 4185924 - DNA, 25 bp, Homo sapien
cacttgaagttcacggcacacgcag

SEQ ID NO: 4185925 - DNA, 25 bp, Homo sapien
tcacggcacacgcaggcaaacagca

SEQ ID NO: 4185926 - DNA, 25 bp, Homo sapien
tgaagttcacggcacacgcaggcaa

SEQ ID NO: 4185927 - DNA, 25 bp, Homo sapien
aagttcacggcacacgcaggcaaac

SEQ ID NO: 4185928 - DNA, 25 bp, Homo sapien
gggccaagggcgcaacttttgctgg

SEQ ID NO: 4185929 - DNA, 25 bp, Homo sapien
ggccaagggcgcaacttttgctggg

SEQ ID NO: 4185930 - DNA, 25 bp, Homo sapien
caagggcgcaacttttgctggggct

SEQ ID NO: 4185931 - DNA, 25 bp, Homo sapien
gggcgcaacttttgctggggctact

SEQ ID NO: 4185932 - DNA, 25 bp, Homo sapien
caaagaccaggcggttttcttcatg

SEQ ID NO: 4185933 - DNA, 25 bp, Homo sapien
ctcaaagaccaggcggttttcttca

SEQ ID NO: 4185934 - DNA, 25 bp, Homo sapien
aagaccaggcggttttcttcatgtt

SEQ ID NO: 4185935 - DNA, 25 bp, Homo sapien
tctgagtcctcaaagaccaggcggt

SEQ ID NO: 4185936 - DNA, 25 bp, Homo sapien
atggctcggtgccagtctccagaac

SEQ ID NO: 4185937 - DNA, 25 bp, Homo sapien
agcatggctcggtgccagtctccag

SEQ ID NO: 4185938 - DNA, 25 bp, Homo sapien
gtctccagaaccctgtccaccctgg

SEQ ID NO: 4185939 - DNA, 25 bp, Homo sapien
gaaccctgtccaccctggcgtggtg

SEQ ID NO: 4185940 - DNA, 25 bp, Homo sapien
tccgcctccatcttgacatgctttc

SEQ ID NO: 4185941 - DNA, 25 bp, Homo sapien
tgaagagcagagcttacctcattgc

SEQ ID NO: 4185942 - DNA, 25 bp, Homo sapien
gcagagcttacctcattgcctgtcc

SEQ ID NO: 4185943 - DNA, 25 bp, Homo sapien
ccacctggatgaccccagctccccg

SEQ ID NO: 4185944 - DNA, 25 bp, Homo sapien
cttccggaactggtttagcttgcct

SEQ ID NO: 4185945 - DNA, 25 bp, Homo sapien
ttcaggatcaggaaagtttgagaaa

SEQ ID NO: 4185946 - DNA, 25 bp, Homo sapien
tccggaactggtttagcttgccttc

SEQ ID NO: 4185947 - DNA, 25 bp, Homo sapien
tttagcttgccttcaggatcaggaa

SEQ ID NO: 4185948 - DNA, 25 bp, Homo sapien
tagcctctggcccaggagttatgtg

SEQ ID NO: 4185949 - DNA, 25 bp, Homo sapien
ctggcccaggagttatgtgtccata

SEQ ID NO: 4185950 - DNA, 25 bp, Homo sapien
gcctctggcccaggagttatgtgtc

SEQ ID NO: 4185951 - DNA, 25 bp, Homo sapien
ctctggcccaggagttatgtgtcca

SEQ ID NO: 4185952 - DNA, 25 bp, Homo sapien
ggaatcaaagtgttaggaacatggc

SEQ ID NO: 4185953 - DNA, 25 bp, Homo sapien
tgccacatccctggacacattcggt

SEQ ID NO: 4185954 - DNA, 25 bp, Homo sapien
gcagcaggtgcttttctcaagacag

SEQ ID NO: 4185955 - DNA, 25 bp, Homo sapien
ggtgcagcaggtgcttttctcaaga

SEQ ID NO: 4185956 - DNA, 25 bp, Homo sapien
taataatcacccacacgtggttatg

SEQ ID NO: 4185957 - DNA, 25 bp, Homo sapien
cacccacacgtggttatgagtacct

SEQ ID NO: 4185958 - DNA, 25 bp, Homo sapien
cgtggttatgagtacctatattcca

SEQ ID NO: 4185959 - DNA, 25 bp, Homo sapien
tatgagtacctatattccaactact

SEQ ID NO: 4185960 - DNA, 25 bp, Homo sapien
atggcctctcattagaggcagacat

SEQ ID NO: 4185961 - DNA, 25 bp, Homo sapien
tggcctctcattagaggcagacatc

SEQ ID NO: 4185962 - DNA, 25 bp, Homo sapien
catctccgttgtcaggcacttaata

SEQ ID NO: 4185963 - DNA, 25 bp, Homo sapien
tctccgttgtcaggcacttaataag

SEQ ID NO: 4185964 - DNA, 25 bp, Homo sapien
ttacatctccgttgtcaggcactta

SEQ ID NO: 4185965 - DNA, 25 bp, Homo sapien
tacatctccgttgtcaggcacttaa

SEQ ID NO: 4185966 - DNA, 25 bp, Homo sapien
ggttaggacttgctgtggattctca

SEQ ID NO: 4185967 - DNA, 25 bp, Homo sapien
catccctggttaggacttgctgtgg

SEQ ID NO: 4185968 - DNA, 25 bp, Homo sapien
gaagccaaccttccttaatcaccca

SEQ ID NO: 4185969 - DNA, 25 bp, Homo sapien
ccagacccatccctggttaggactt

SEQ ID NO: 4185970 - DNA, 25 bp, Homo sapien
agagagatgacatttgtccctcacc

SEQ ID NO: 4185971 - DNA, 25 bp, Homo sapien
aacagagggagactgcctgaaacaa

SEQ ID NO: 4185972 - DNA, 25 bp, Homo sapien
cagattcagatccaagagagatgac

SEQ ID NO: 4185973 - DNA, 25 bp, Homo sapien
tgacatttgtccctcaccagagact

SEQ ID NO: 4185974 - DNA, 25 bp, Homo sapien
ttacttgcaactgaacacaccgcac

SEQ ID NO: 4185975 - DNA, 25 bp, Homo sapien
ctgacttaggttgctattactgtta

SEQ ID NO: 4185976 - DNA, 25 bp, Homo sapien
ctgttaaactgacttaggttgctat

SEQ ID NO: 4185977 - DNA, 25 bp, Homo sapien
catcattcgtaatctttacttgcaa

SEQ ID NO: 4185978 - DNA, 25 bp, Homo sapien
tttttctacaggttaggtctcactc

SEQ ID NO: 4185979 - DNA, 25 bp, Homo sapien
tgggcatactagtgtgggcctgtag

SEQ ID NO: 4185980 - DNA, 25 bp, Homo sapien
acaccgccacctgccatctctacaa

SEQ ID NO: 4185981 - DNA, 25 bp, Homo sapien
acatagagagacacccccacaccgc

SEQ ID NO: 4185982 - DNA, 25 bp, Homo sapien
ttagctgggcatactagtgtgggcc

SEQ ID NO: 4185983 - DNA, 25 bp, Homo sapien
taaatagtgttgtagccagccacag

SEQ ID NO: 4185984 - DNA, 25 bp, Homo sapien
gctagaatatctgttggtccaaaat

SEQ ID NO: 4185985 - DNA, 25 bp, Homo sapien
tatatgctagaatatctgttggtcc

SEQ ID NO: 4185986 - DNA, 25 bp, Homo sapien
atcgaccaggacaaatattagacca

SEQ ID NO: 4185987 - DNA, 25 bp, Homo sapien
gatagcagagtttctgaggccttgc

SEQ ID NO: 4185988 - DNA, 25 bp, Homo sapien
ggatagcagagtttctgaggccttg

SEQ ID NO: 4185989 - DNA, 25 bp, Homo sapien
gatgagtttttcacccacaaaagga

SEQ ID NO: 4185990 - DNA, 25 bp, Homo sapien
gacagatcacggctccattttggaa

SEQ ID NO: 4185991 - DNA, 25 bp, Homo sapien
gctaggcccgttctaggtcccagga

SEQ ID NO: 4185992 - DNA, 25 bp, Homo sapien
aatgggtaaccaaccagacatggcc

SEQ ID NO: 4185993 - DNA, 25 bp, Homo sapien
taactcatcctaatattggtccaag

SEQ ID NO: 4185994 - DNA, 25 bp, Homo sapien
gcaagataactcatcctaatattgg

SEQ ID NO: 4185995 - DNA, 25 bp, Homo sapien
gatgggaccagcaacttctacctaa

SEQ ID NO: 4185996 - DNA, 25 bp, Homo sapien
ttgtgagcaagatgggaccagcaac

SEQ ID NO: 4185997 - DNA, 25 bp, Homo sapien
ccaagttcaggagtcccagttctca

SEQ ID NO: 4185998 - DNA, 25 bp, Homo sapien
tttaacatgatcgatggctgaggta

SEQ ID NO: 4185999 - DNA, 25 bp, Homo sapien
gatggctgaggtatttcaccaagtt

SEQ ID NO: 4186000 - DNA, 25 bp, Homo sapien
gaggagccagccatgactgtaagac

SEQ ID NO: 4186001 - DNA, 25 bp, Homo sapien
tttccttcaatgacagtaatgctgc

SEQ ID NO: 4186002 - DNA, 25 bp, Homo sapien
gcgaaccgctgcccgggtgagcccg

SEQ ID NO: 4186003 - DNA, 25 bp, Homo sapien
cagagcgaaccgctgcccgggtgag

SEQ ID NO: 4186004 - DNA, 25 bp, Homo sapien
caatcagagcgaaccgctgcccggg

SEQ ID NO: 4186005 - DNA, 25 bp, Homo sapien
caaattgttgtatctcgttctgcca

SEQ ID NO: 4186006 - DNA, 25 bp, Homo sapien
tgccattcccggctcctgctgtggg

SEQ ID NO: 4186007 - DNA, 25 bp, Homo sapien
tctccaaggagctggtgggaaacca

SEQ ID NO: 4186008 - DNA, 25 bp, Homo sapien
ttgtatctcgttctgccattcccgg

SEQ ID NO: 4186009 - DNA, 25 bp, Homo sapien
ggatttgaactcactttgggttcag

SEQ ID NO: 4186010 - DNA, 25 bp, Homo sapien
gatttgaactcactttgggttcagc

SEQ ID NO: 4186011 - DNA, 25 bp, Homo sapien
tctgcactatccaacatgggagctg

SEQ ID NO: 4186012 - DNA, 25 bp, Homo sapien
aatggcggacttgctctactctgca

SEQ ID NO: 4186013 - DNA, 25 bp, Homo sapien
gactattcagtcatggtccaatcaa

SEQ ID NO: 4186014 - DNA, 25 bp, Homo sapien
gggaccactgcaatagactattcag

SEQ ID NO: 4186015 - DNA, 25 bp, Homo sapien
tgatccaggctggtctcaaactcct

SEQ ID NO: 4186016 - DNA, 25 bp, Homo sapien
cactgtgcccggccgcacccagcta

SEQ ID NO: 4186017 - DNA, 25 bp, Homo sapien
actgtgcccggccgcacccagctaa

SEQ ID NO: 4186018 - DNA, 25 bp, Homo sapien
ttgatccaggctggtctcaaactcc

SEQ ID NO: 4186019 - DNA, 25 bp, Homo sapien
gaaaaagcaagtcatcaaccatgtc

SEQ ID NO: 4186020 - DNA, 25 bp, Homo sapien
agaaaaagcaagtcatcaaccatgt

SEQ ID NO: 4186021 - DNA, 25 bp, Homo sapien
aaacaaaagacagacctgtacccat

SEQ ID NO: 4186022 - DNA, 25 bp, Homo sapien
tcaaccatgtcagccatttcatcat

SEQ ID NO: 4186023 - DNA, 25 bp, Homo sapien
ctaagcaggatggaatgacaggaga

SEQ ID NO: 4186024 - DNA, 25 bp, Homo sapien
gcaggatggaatgacaggagagcac

SEQ ID NO: 4186025 - DNA, 25 bp, Homo sapien
gatggaatgacaggagagcacccac

SEQ ID NO: 4186026 - DNA, 25 bp, Homo sapien
caggatggaatgacaggagagcacc

SEQ ID NO: 4186027 - DNA, 25 bp, Homo sapien
actgggtgcaaagtcctgactgttc

SEQ ID NO: 4186028 - DNA, 25 bp, Homo sapien
ctgggtgcaaagtcctgactgttcc

SEQ ID NO: 4186029 - DNA, 25 bp, Homo sapien
taaaatgcagattctggcccaggag

SEQ ID NO: 4186030 - DNA, 25 bp, Homo sapien
aaatgcagattctggcccaggaggt

SEQ ID NO: 4186031 - DNA, 25 bp, Homo sapien
aaaatgcagattctggcccaggagg

SEQ ID NO: 4186032 - DNA, 25 bp, Homo sapien
tccgtcaaatggatatggcccaggg

SEQ ID NO: 4186033 - DNA, 25 bp, Homo sapien
ccatgttccgggcagaagctatcaa

SEQ ID NO: 4186034 - DNA, 25 bp, Homo sapien
tgagaagctgttaccgccatgttcc

SEQ ID NO: 4186035 - DNA, 25 bp, Homo sapien
gaaatcccgtcaaacaaatggtatg

SEQ ID NO: 4186036 - DNA, 25 bp, Homo sapien
catcaaagccccagcgtccgtcatt

SEQ ID NO: 4186037 - DNA, 25 bp, Homo sapien
atcaaagccccagcgtccgtcattc

SEQ ID NO: 4186038 - DNA, 25 bp, Homo sapien
tccgctgggactaggatcaggatgt

SEQ ID NO: 4186039 - DNA, 25 bp, Homo sapien
tgtcaatcaacatgaggattagagg

SEQ ID NO: 4186040 - DNA, 25 bp, Homo sapien
tacacgtatacagtgcctggtctca

SEQ ID NO: 4186041 - DNA, 25 bp, Homo sapien
aaatgagatgatgtacacgtataca

SEQ ID NO: 4186042 - DNA, 25 bp, Homo sapien
tagagttgcattctcgcaatattgc

SEQ ID NO: 4186043 - DNA, 25 bp, Homo sapien
accacacccaatgcgctcaatagat

SEQ ID NO: 4186044 - DNA, 25 bp, Homo sapien
ctgcaactcaccaaaagaagaccaa

SEQ ID NO: 4186045 - DNA, 25 bp, Homo sapien
gtttacagcatgctgagatggcacc

SEQ ID NO: 4186046 - DNA, 25 bp, Homo sapien
agaagaccaacacgcatcacaatgt

SEQ ID NO: 4186047 - DNA, 25 bp, Homo sapien
gtagctgtgatccactgcaaaggac

SEQ ID NO: 4186048 - DNA, 25 bp, Homo sapien
tcagcaggtagctgtgatccactgc

SEQ ID NO: 4186049 - DNA, 25 bp, Homo sapien
ctcagcaggtagctgtgatccactg

SEQ ID NO: 4186050 - DNA, 25 bp, Homo sapien
caggtagctgtgatccactgcaaag

SEQ ID NO: 4186051 - DNA, 25 bp, Homo sapien
tcataaggcttaaggcagcatcagg

SEQ ID NO: 4186052 - DNA, 25 bp, Homo sapien
cataaggcttaaggcagcatcaggc

SEQ ID NO: 4186053 - DNA, 25 bp, Homo sapien
acctcataaggcttaaggcagcatc

SEQ ID NO: 4186054 - DNA, 25 bp, Homo sapien
cctcataaggcttaaggcagcatca

SEQ ID NO: 4186055 - DNA, 25 bp, Homo sapien
ctccatcgaagtttcagaacaaaca

SEQ ID NO: 4186056 - DNA, 25 bp, Homo sapien
cgaagtttcagaacaaacactgtgc

SEQ ID NO: 4186057 - DNA, 25 bp, Homo sapien
gagctagacagactttatcttggct

SEQ ID NO: 4186058 - DNA, 25 bp, Homo sapien
cacctctaagagtgcaattaactga

SEQ ID NO: 4186059 - DNA, 25 bp, Homo sapien
cacccttctaataccagcgatttcc

SEQ ID NO: 4186060 - DNA, 25 bp, Homo sapien
tttcacccttctaataccagcgatt

SEQ ID NO: 4186061 - DNA, 25 bp, Homo sapien
cttttcacccttctaataccagcga

SEQ ID NO: 4186062 - DNA, 25 bp, Homo sapien
tcacccttctaataccagcgatttc

SEQ ID NO: 4186063 - DNA, 25 bp, Homo sapien
tgcttaattgcacatgtttgactaa

SEQ ID NO: 4186064 - DNA, 25 bp, Homo sapien
acatgcttaattgcacatgtttgac

SEQ ID NO: 4186065 - DNA, 25 bp, Homo sapien
atgcttaattgcacatgtttgacta

SEQ ID NO: 4186066 - DNA, 25 bp, Homo sapien
catgcttaattgcacatgtttgact

SEQ ID NO: 4186067 - DNA, 25 bp, Homo sapien
gagatatttcccttcagaataacat

SEQ ID NO: 4186068 - DNA, 25 bp, Homo sapien
ttgttagagatatttcccttcagaa

SEQ ID NO: 4186069 - DNA, 25 bp, Homo sapien
ccttcagaataacattagccaatat

SEQ ID NO: 4186070 - DNA, 25 bp, Homo sapien
tcccttcagaataacattagccaat

SEQ ID NO: 4186071 - DNA, 25 bp, Homo sapien
tgcaggtctgcatgtaattgtgtac

SEQ ID NO: 4186072 - DNA, 25 bp, Homo sapien
gcaatgggggcctgactgcggaggg

SEQ ID NO: 4186073 - DNA, 25 bp, Homo sapien
gtacggccgactccacattggtcat

SEQ ID NO: 4186074 - DNA, 25 bp, Homo sapien
gcctgactgcggagggaccatagca

SEQ ID NO: 4186075 - DNA, 25 bp, Homo sapien
actgcaaccctctaaccaccaatac

SEQ ID NO: 4186076 - DNA, 25 bp, Homo sapien
cctctaaccaccaatacaattaaat

SEQ ID NO: 4186077 - DNA, 25 bp, Homo sapien
ctaaccaccaatacaattaaataag

SEQ ID NO: 4186078 - DNA, 25 bp, Homo sapien
ttaatcaactgcaaccctctaacca

SEQ ID NO: 4186079 - DNA, 25 bp, Homo sapien
tggtgacgtttgaatcctttctcct

SEQ ID NO: 4186080 - DNA, 25 bp, Homo sapien
tcctttgtgtgtctgcactaccatg

SEQ ID NO: 4186081 - DNA, 25 bp, Homo sapien
tctgcactaccatgagttttatact

SEQ ID NO: 4186082 - DNA, 25 bp, Homo sapien
tctttaatggtgacgtttgaatcct

SEQ ID NO: 4186083 - DNA, 25 bp, Homo sapien
ctctggcttggatgtcccatactgt

SEQ ID NO: 4186084 - DNA, 25 bp, Homo sapien
tctggcttggatgtcccatactgtg

SEQ ID NO: 4186085 - DNA, 25 bp, Homo sapien
ctggcttggatgtcccatactgtgt

SEQ ID NO: 4186086 - DNA, 25 bp, Homo sapien
gaagacctcaggggcctcgttctcc

SEQ ID NO: 4186087 - DNA, 25 bp, Homo sapien
tctctcctgaaaatcctcttgctcc

SEQ ID NO: 4186088 - DNA, 25 bp, Homo sapien
ttctctcctgaaaatcctcttgctc

SEQ ID NO: 4186089 - DNA, 25 bp, Homo sapien
cttctctcctgaaaatcctcttgct

SEQ ID NO: 4186090 - DNA, 25 bp, Homo sapien
tccatgcaagccatcaactccctca

SEQ ID NO: 4186091 - DNA, 25 bp, Homo sapien
atgaccctgggattccgtgattacc

SEQ ID NO: 4186092 - DNA, 25 bp, Homo sapien
atcccgacgatcacaaaccttgacg

SEQ ID NO: 4186093 - DNA, 25 bp, Homo sapien
cgtcaaggtttgtgatcgtcgggat

SEQ ID NO: 4186094 - DNA, 25 bp, Homo sapien
tgccttcctcagacgacatcacatg

SEQ ID NO: 4186095 - DNA, 25 bp, Homo sapien
tgatctgtgccattcctgtgtcgta

SEQ ID NO: 4186096 - DNA, 25 bp, Homo sapien
ttcctgtgtcgtagcgcccacagag

SEQ ID NO: 4186097 - DNA, 25 bp, Homo sapien
ggagaggctccaccacaggtgcctt

SEQ ID NO: 4186098 - DNA, 25 bp, Homo sapien
gctctccaggttgtcctggcagtcc

SEQ ID NO: 4186099 - DNA, 25 bp, Homo sapien
ctccaggttgtcctggcagtcccgt

SEQ ID NO: 4186100 - DNA, 25 bp, Homo sapien
acgctctccaggttgtcctggcagt

SEQ ID NO: 4186101 - DNA, 25 bp, Homo sapien
tctccaggttgtcctggcagtcccg

SEQ ID NO: 4186102 - DNA, 25 bp, Homo sapien
tgacgcccacgccttcctttttctc

SEQ ID NO: 4186103 - DNA, 25 bp, Homo sapien
ggatatagctattagttccaggatc

SEQ ID NO: 4186104 - DNA, 25 bp, Homo sapien
cttagggccttggatatagctatta

SEQ ID NO: 4186105 - DNA, 25 bp, Homo sapien
gggccttggatatagctattagttc

SEQ ID NO: 4186106 - DNA, 25 bp, Homo sapien
gctcagttccatagccgattgagtg

SEQ ID NO: 4186107 - DNA, 25 bp, Homo sapien
gctgctcccttagctcagttccata

SEQ ID NO: 4186108 - DNA, 25 bp, Homo sapien
catagccgattgagtggctgttcac

SEQ ID NO: 4186109 - DNA, 25 bp, Homo sapien
tcccttagctcagttccatagccga

SEQ ID NO: 4186110 - DNA, 25 bp, Homo sapien
ccaagggccgacatttccagtttct

SEQ ID NO: 4186111 - DNA, 25 bp, Homo sapien
caagggccgacatttccagtttctc

SEQ ID NO: 4186112 - DNA, 25 bp, Homo sapien
ccagtttctccctgaggtccatcaa

SEQ ID NO: 4186113 - DNA, 25 bp, Homo sapien
gaggtccatcaacattagaacttcc

SEQ ID NO: 4186114 - DNA, 25 bp, Homo sapien
ctttaatcctggcagacctcgcctt

SEQ ID NO: 4186115 - DNA, 25 bp, Homo sapien
gcagacctcgccttcctattgtccc

SEQ ID NO: 4186116 - DNA, 25 bp, Homo sapien
ctggcagacctcgccttcctattgt

SEQ ID NO: 4186117 - DNA, 25 bp, Homo sapien
tttaatcctggcagacctcgccttc

SEQ ID NO: 4186118 - DNA, 25 bp, Homo sapien
gccaatggaagcacaaattaaggtg

SEQ ID NO: 4186119 - DNA, 25 bp, Homo sapien
catgtaaccacaaaatcaccttgga

SEQ ID NO: 4186120 - DNA, 25 bp, Homo sapien
cacaaattaaggtgccctgacccat

SEQ ID NO: 4186121 - DNA, 25 bp, Homo sapien
caccttggatgccaatggaagcaca

SEQ ID NO: 4186122 - DNA, 25 bp, Homo sapien
ccatttggccctggaggcccaggat

SEQ ID NO: 4186123 - DNA, 25 bp, Homo sapien
tttggccctggaggcccaggattcc

SEQ ID NO: 4186124 - DNA, 25 bp, Homo sapien
catttggccctggaggcccaggatt

SEQ ID NO: 4186125 - DNA, 25 bp, Homo sapien
ttggccctggaggcccaggattccc

SEQ ID NO: 4186126 - DNA, 25 bp, Homo sapien
actcctcttggtccagcttttcctt

SEQ ID NO: 4186127 - DNA, 25 bp, Homo sapien
ggttgccctcttggtccttgtcgac

SEQ ID NO: 4186128 - DNA, 25 bp, Homo sapien
tgccctcttggtccttgtcgactct

SEQ ID NO: 4186129 - DNA, 25 bp, Homo sapien
gccctcttggtccttgtcgactctg

SEQ ID NO: 4186130 - DNA, 25 bp, Homo sapien
gttgccctcttggtccttgtcgact

SEQ ID NO: 4186131 - DNA, 25 bp, Homo sapien
tccttatccatcagaaccaggaaga

SEQ ID NO: 4186132 - DNA, 25 bp, Homo sapien
gtccttatccatcagaaccaggaag

SEQ ID NO: 4186133 - DNA, 25 bp, Homo sapien
tgttcctggatgtccttatccatca

SEQ ID NO: 4186134 - DNA, 25 bp, Homo sapien
cttttgttcctggatgtccttatcc

SEQ ID NO: 4186135 - DNA, 25 bp, Homo sapien
ttgtgcaccaggatagccagggaat

SEQ ID NO: 4186136 - DNA, 25 bp, Homo sapien
ctttgcccccttttctccttgatgg

SEQ ID NO: 4186137 - DNA, 25 bp, Homo sapien
caaatccaggaaagccagcattacc

SEQ ID NO: 4186138 - DNA, 25 bp, Homo sapien
ccaacaaatccaggaaagccagcat

SEQ ID NO: 4186139 - DNA, 25 bp, Homo sapien
caacaaatccaggaaagccagcatt

SEQ ID NO: 4186140 - DNA, 25 bp, Homo sapien
cgaagttccaacaaatccaggaaag

SEQ ID NO: 4186141 - DNA, 25 bp, Homo sapien
catttgtcctggtgggccttggtca

SEQ ID NO: 4186142 - DNA, 25 bp, Homo sapien
atttgtcctggtgggccttggtcac

SEQ ID NO: 4186143 - DNA, 25 bp, Homo sapien
cacgtgtgaaatcaacaattttgca

SEQ ID NO: 4186144 - DNA, 25 bp, Homo sapien
cagttttcacgtgtgaaatcaacaa

SEQ ID NO: 4186145 - DNA, 25 bp, Homo sapien
ttcacgtgtgaaatcaacaattttg

SEQ ID NO: 4186146 - DNA, 25 bp, Homo sapien
ggcagttttcacgtgtgaaatcaac

SEQ ID NO: 4186147 - DNA, 25 bp, Homo sapien
gctccttttgagcctttccgaaaca

SEQ ID NO: 4186148 - DNA, 25 bp, Homo sapien
tggctccttttgagcctttccgaaa

SEQ ID NO: 4186149 - DNA, 25 bp, Homo sapien
cactggctccttttgagcctttccg

SEQ ID NO: 4186150 - DNA, 25 bp, Homo sapien
actggctccttttgagcctttccga

SEQ ID NO: 4186151 - DNA, 25 bp, Homo sapien
acagatacacagatttaagatattc

SEQ ID NO: 4186152 - DNA, 25 bp, Homo sapien
gatacacagatttaagatattctgt

SEQ ID NO: 4186153 - DNA, 25 bp, Homo sapien
cttgagacaacagatacacagattt

SEQ ID NO: 4186154 - DNA, 25 bp, Homo sapien
acagatttaagatattctgtaatgc

SEQ ID NO: 4186155 - DNA, 25 bp, Homo sapien
tgtagtctgagaaacgaaccaagta

SEQ ID NO: 4186156 - DNA, 25 bp, Homo sapien
catttgacatgtccaaggcaaaggc

SEQ ID NO: 4186157 - DNA, 25 bp, Homo sapien
cacttcagttgggaatgctgggcat

SEQ ID NO: 4186158 - DNA, 25 bp, Homo sapien
ccacatgggcacctgttgggcagtt

SEQ ID NO: 4186159 - DNA, 25 bp, Homo sapien
acgtttgaacacgtctcgccataaa

SEQ ID NO: 4186160 - DNA, 25 bp, Homo sapien
cgtttgaacacgtctcgccataaac

SEQ ID NO: 4186161 - DNA, 25 bp, Homo sapien
tattgatggaagctgcatcataggc

SEQ ID NO: 4186162 - DNA, 25 bp, Homo sapien
tgatggaagctgcatcataggccca

SEQ ID NO: 4186163 - DNA, 25 bp, Homo sapien
ctgtattgatggaagctgcatcata

SEQ ID NO: 4186164 - DNA, 25 bp, Homo sapien
ttgatggaagctgcatcataggccc

SEQ ID NO: 4186165 - DNA, 25 bp, Homo sapien
atgaccacggggatgatgcccactg

SEQ ID NO: 4186166 - DNA, 25 bp, Homo sapien
cccactgcagcaagctccagtgtgg

SEQ ID NO: 4186167 - DNA, 25 bp, Homo sapien
tgtccgggaggttgtgcccctctgt

SEQ ID NO: 4186168 - DNA, 25 bp, Homo sapien
aggttgtgcccctctgtgaaggtga

SEQ ID NO: 4186169 - DNA, 25 bp, Homo sapien
ccagaagcagcatgtgggtgttgtt

SEQ ID NO: 4186170 - DNA, 25 bp, Homo sapien
cagactcttcaaaggggcagtcgta

SEQ ID NO: 4186171 - DNA, 25 bp, Homo sapien
tcttcaaaggggcagtcgtaaatgt

SEQ ID NO: 4186172 - DNA, 25 bp, Homo sapien
caaaggggcagtcgtaaatgtcaaa

SEQ ID NO: 4186173 - DNA, 25 bp, Homo sapien
ttcaaaggggcagtcgtaaatgtca

SEQ ID NO: 4186174 - DNA, 25 bp, Homo sapien
catagcagagaatacagcgggccac

SEQ ID NO: 4186175 - DNA, 25 bp, Homo sapien
tctgtctcccagacgtacaagtaaa

SEQ ID NO: 4186176 - DNA, 25 bp, Homo sapien
tctcccagacgtacaagtaaaatct

SEQ ID NO: 4186177 - DNA, 25 bp, Homo sapien
atacagcgggccacgtgctccacat

SEQ ID NO: 4186178 - DNA, 25 bp, Homo sapien
gcgtgccagccgggcattctgggtc

SEQ ID NO: 4186179 - DNA, 25 bp, Homo sapien
ccagccgggcattctgggtctggtc

SEQ ID NO: 4186180 - DNA, 25 bp, Homo sapien
tgccagccgggcattctgggtctgg

SEQ ID NO: 4186181 - DNA, 25 bp, Homo sapien
cgtgccagccgggcattctgggtct

SEQ ID NO: 4186182 - DNA, 25 bp, Homo sapien
aaagacccgcggtacacgtcggcat

SEQ ID NO: 4186183 - DNA, 25 bp, Homo sapien
acgtcggcatccactccataggagc

SEQ ID NO: 4186184 - DNA, 25 bp, Homo sapien
gcgcggcgtccgctagactcaaaga

SEQ ID NO: 4186185 - DNA, 25 bp, Homo sapien
acctccaggtcttctagcgcggcgt

SEQ ID NO: 4186186 - DNA, 25 bp, Homo sapien
gccagaagttgggtgtcgtgtgcgt

SEQ ID NO: 4186187 - DNA, 25 bp, Homo sapien
gtgtcgtgtgcgtcaccagggccac

SEQ ID NO: 4186188 - DNA, 25 bp, Homo sapien
aagttgggtgtcgtgtgcgtcacca

SEQ ID NO: 4186189 - DNA, 25 bp, Homo sapien
tgtcgtgtgcgtcaccagggccaca

SEQ ID NO: 4186190 - DNA, 25 bp, Homo sapien
catctgcttccggttgccataggtg

SEQ ID NO: 4186191 - DNA, 25 bp, Homo sapien
gtggtcaagtggaagccctcgagca

SEQ ID NO: 4186192 - DNA, 25 bp, Homo sapien
aagtggaagccctcgagcacaggga

SEQ ID NO: 4186193 - DNA, 25 bp, Homo sapien
tgccataggtggtcaagtggaagcc

SEQ ID NO: 4186194 - DNA, 25 bp, Homo sapien
taaggggcgggctgaagcctcgcgc

SEQ ID NO: 4186195 - DNA, 25 bp, Homo sapien
aggggcgggctgaagcctcgcgcac

SEQ ID NO: 4186196 - DNA, 25 bp, Homo sapien
gtaaggggcgggctgaagcctcgcg

SEQ ID NO: 4186197 - DNA, 25 bp, Homo sapien
ctgtaaggggcgggctgaagcctcg

SEQ ID NO: 4186198 - DNA, 25 bp, Homo sapien
gccaggagcacattctccagcgtcc

SEQ ID NO: 4186199 - DNA, 25 bp, Homo sapien
tgccaggagcacattctccagcgtc

SEQ ID NO: 4186200 - DNA, 25 bp, Homo sapien
ccaggagcacattctccagcgtcca

SEQ ID NO: 4186201 - DNA, 25 bp, Homo sapien
ctgccaggagcacattctccagcgt

SEQ ID NO: 4186202 - DNA, 25 bp, Homo sapien
aggacttgtgccttccgcggccgag

SEQ ID NO: 4186203 - DNA, 25 bp, Homo sapien
gtctcgctggccacgatggcgaaga

SEQ ID NO: 4186204 - DNA, 25 bp, Homo sapien
agaggacttgtgccttccgcggccg

SEQ ID NO: 4186205 - DNA, 25 bp, Homo sapien
ttgtctcgctggccacgatggcgaa

SEQ ID NO: 4186206 - DNA, 25 bp, Homo sapien
ggagcactgaccagctcggctagct

SEQ ID NO: 4186207 - DNA, 25 bp, Homo sapien
taggcgcagtagatgctgctcagag

SEQ ID NO: 4186208 - DNA, 25 bp, Homo sapien
tagctcggctagctcatgggtcccc

SEQ ID NO: 4186209 - DNA, 25 bp, Homo sapien
tctggctctgagaccccttgtaggc

SEQ ID NO: 4186210 - DNA, 25 bp, Homo sapien
caggaaggcccgagtgaatccctga

SEQ ID NO: 4186211 - DNA, 25 bp, Homo sapien
gagtgaatccctgagcgtagttaac

SEQ ID NO: 4186212 - DNA, 25 bp, Homo sapien
aaggcccgagtgaatccctgagcgt

SEQ ID NO: 4186213 - DNA, 25 bp, Homo sapien
gcccgagtgaatccctgagcgtagt

SEQ ID NO: 4186214 - DNA, 25 bp, Homo sapien
tggaagaccctagacttttgtcctg

SEQ ID NO: 4186215 - DNA, 25 bp, Homo sapien
tacttcctagtgagtccctgaaaac

SEQ ID NO: 4186216 - DNA, 25 bp, Homo sapien
gcttcatcaatccaacctgaaatgg

SEQ ID NO: 4186217 - DNA, 25 bp, Homo sapien
gtcaaatactattggaaactgcagt

SEQ ID NO: 4186218 - DNA, 25 bp, Homo sapien
tgacaggtgtgactaattgcagcac

SEQ ID NO: 4186219 - DNA, 25 bp, Homo sapien
tgtgactaattgcagcacagtgtcc

SEQ ID NO: 4186220 - DNA, 25 bp, Homo sapien
tgtccccacggtgtaggcccccaca

SEQ ID NO: 4186221 - DNA, 25 bp, Homo sapien
gctgagttatagatgttgtgatgtc

SEQ ID NO: 4186222 - DNA, 25 bp, Homo sapien
tcttgctgagttatagatgttgtga

SEQ ID NO: 4186223 - DNA, 25 bp, Homo sapien
ccaagccagacataccaaactggtg

SEQ ID NO: 4186224 - DNA, 25 bp, Homo sapien
cataccaaactggtgcctgggcaac

SEQ ID NO: 4186225 - DNA, 25 bp, Homo sapien
catagagtgtgccttcataatacgc

SEQ ID NO: 4186226 - DNA, 25 bp, Homo sapien
atccagctccagttcgacagccagg

SEQ ID NO: 4186227 - DNA, 25 bp, Homo sapien
gccctgaaataactttcatccagct

SEQ ID NO: 4186228 - DNA, 25 bp, Homo sapien
cagccaggtgaaagttagcctttgt

SEQ ID NO: 4186229 - DNA, 25 bp, Homo sapien
cctccttgttgtaatgccacttcag

SEQ ID NO: 4186230 - DNA, 25 bp, Homo sapien
gccacttcagggtgtgatcctgaca

SEQ ID NO: 4186231 - DNA, 25 bp, Homo sapien
tttcaaaccggttggcattgccgcc

SEQ ID NO: 4186232 - DNA, 25 bp, Homo sapien
tgacactcgccttccattggatcca

SEQ ID NO: 4186233 - DNA, 25 bp, Homo sapien
caagtcacaaatcatctggcccaag

SEQ ID NO: 4186234 - DNA, 25 bp, Homo sapien
gaagttcgttcacattagatgtccc

SEQ ID NO: 4186235 - DNA, 25 bp, Homo sapien
cagacgtttaggaatctgatgtcca

SEQ ID NO: 4186236 - DNA, 25 bp, Homo sapien
ccaagtccttgttggcgtgaaaaca

SEQ ID NO: 4186237 - DNA, 25 bp, Homo sapien
cagaggacctccgtgaaagggttat

SEQ ID NO: 4186238 - DNA, 25 bp, Homo sapien
tcagaggacctccgtgaaagggtta

SEQ ID NO: 4186239 - DNA, 25 bp, Homo sapien
tggagtgtaaggtttatgttgagag

SEQ ID NO: 4186240 - DNA, 25 bp, Homo sapien
ttatggagtgtaaggtttatgttga

SEQ ID NO: 4186241 - DNA, 25 bp, Homo sapien
tatggagtgtaaggtttatgttgag

SEQ ID NO: 4186242 - DNA, 25 bp, Homo sapien
atggagtgtaaggtttatgttgaga

SEQ ID NO: 4186243 - DNA, 25 bp, Homo sapien
gcttctcaaggaggtagttcctaag

SEQ ID NO: 4186244 - DNA, 25 bp, Homo sapien
catcagtctcaaggaacaagagcca

SEQ ID NO: 4186245 - DNA, 25 bp, Homo sapien
tggtgatgcttgtgaattgatgacc

SEQ ID NO: 4186246 - DNA, 25 bp, Homo sapien
caagagccaaagtgattggtgatgc

SEQ ID NO: 4186247 - DNA, 25 bp, Homo sapien
tgccttccagtctggtttctgactg

SEQ ID NO: 4186248 - DNA, 25 bp, Homo sapien
cttcttgccttccagtctggtttct

SEQ ID NO: 4186249 - DNA, 25 bp, Homo sapien
ctgcatctaggatctctttgtctct

SEQ ID NO: 4186250 - DNA, 25 bp, Homo sapien
gcatctaggatctctttgtctcttc

SEQ ID NO: 4186251 - DNA, 25 bp, Homo sapien
tccaaaacccagtggttgtctatgg

SEQ ID NO: 4186252 - DNA, 25 bp, Homo sapien
acatcctcatgtccaaaacccagtg

SEQ ID NO: 4186253 - DNA, 25 bp, Homo sapien
gcccttgtggttgcccctcacatcc

SEQ ID NO: 4186254 - DNA, 25 bp, Homo sapien
cagtggttgtctatggtctggaaac

SEQ ID NO: 4186255 - DNA, 25 bp, Homo sapien
gcagaagccatgaggtttccatgac

SEQ ID NO: 4186256 - DNA, 25 bp, Homo sapien
tagtattagaaatgtcaatgaccat

SEQ ID NO: 4186257 - DNA, 25 bp, Homo sapien
cctgaaatttctgtactgtgctgcc

SEQ ID NO: 4186258 - DNA, 25 bp, Homo sapien
acacctgaaatttctgtactgtgct

SEQ ID NO: 4186259 - DNA, 25 bp, Homo sapien
tccagctgtatacacctgaaatttc

SEQ ID NO: 4186260 - DNA, 25 bp, Homo sapien
ccagctgtatacacctgaaatttct

SEQ ID NO: 4186261 - DNA, 25 bp, Homo sapien
tatctgacttgggtttcactttcca

SEQ ID NO: 4186262 - DNA, 25 bp, Homo sapien
tctgacttgggtttcactttccatt

SEQ ID NO: 4186263 - DNA, 25 bp, Homo sapien
ctgacttgggtttcactttccattt

SEQ ID NO: 4186264 - DNA, 25 bp, Homo sapien
tttatctgacttgggtttcactttc

SEQ ID NO: 4186265 - DNA, 25 bp, Homo sapien
ggcagcaggagttttatccagcaac

SEQ ID NO: 4186266 - DNA, 25 bp, Homo sapien
agaggcagcaggagttttatccagc

SEQ ID NO: 4186267 - DNA, 25 bp, Homo sapien
gcagcaggagttttatccagcaact

SEQ ID NO: 4186268 - DNA, 25 bp, Homo sapien
gaggcagcaggagttttatccagca

SEQ ID NO: 4186269 - DNA, 25 bp, Homo sapien
gagggtcttttaagccggcgctgac

SEQ ID NO: 4186270 - DNA, 25 bp, Homo sapien
ctgcaggtggattcccgcagcgaac

SEQ ID NO: 4186271 - DNA, 25 bp, Homo sapien
tgtccagagacgctccagctgtttg

SEQ ID NO: 4186272 - DNA, 25 bp, Homo sapien
agcgaacgcctcgtgccctgagagg

SEQ ID NO: 4186273 - DNA, 25 bp, Homo sapien
ctacaagattgacaggggcatcatc

SEQ ID NO: 4186274 - DNA, 25 bp, Homo sapien
tctgagtatatgctccggggttgaa

SEQ ID NO: 4186275 - DNA, 25 bp, Homo sapien
aagcaaactgcaataccaagaaaag

SEQ ID NO: 4186276 - DNA, 25 bp, Homo sapien
gaaaagtacacattccaagtgaatt

SEQ ID NO: 4186277 - DNA, 25 bp, Homo sapien
tagatcccaactttgcccagtgccc

SEQ ID NO: 4186278 - DNA, 25 bp, Homo sapien
ttagatcccaactttgcccagtgcc

SEQ ID NO: 4186279 - DNA, 25 bp, Homo sapien
aatagaatctttgcctgaccaaatc

SEQ ID NO: 4186280 - DNA, 25 bp, Homo sapien
aagaatagaatctttgcctgaccaa

SEQ ID NO: 4186281 - DNA, 25 bp, Homo sapien
tagaatctttgcctgaccaaatccg

SEQ ID NO: 4186282 - DNA, 25 bp, Homo sapien
gaatagaatctttgcctgaccaaat

SEQ ID NO: 4186283 - DNA, 25 bp, Homo sapien
ctgaggatctgaggtcacagaacca

SEQ ID NO: 4186284 - DNA, 25 bp, Homo sapien
gaggatctgaggtcacagaaccagt

SEQ ID NO: 4186285 - DNA, 25 bp, Homo sapien
ggatctgaggtcacagaaccagtcc

SEQ ID NO: 4186286 - DNA, 25 bp, Homo sapien
gatctgaggtcacagaaccagtcca

SEQ ID NO: 4186287 - DNA, 25 bp, Homo sapien
cagtccaaatgattaggacaaatat

SEQ ID NO: 4186288 - DNA, 25 bp, Homo sapien
ctctggtctgccaatgtttcagtcc

SEQ ID NO: 4186289 - DNA, 25 bp, Homo sapien
ggtctgccaatgtttcagtccaaat

SEQ ID NO: 4186290 - DNA, 25 bp, Homo sapien
caatgtttcagtccaaatgattagg

SEQ ID NO: 4186291 - DNA, 25 bp, Homo sapien
ctatcaaaataaaataacaagcaaa

SEQ ID NO: 4186292 - DNA, 25 bp, Homo sapien
acaagcaaaaacaaagttatcattc

SEQ ID NO: 4186293 - DNA, 25 bp, Homo sapien
ataacaagcaaaaacaaagttatca

SEQ ID NO: 4186294 - DNA, 25 bp, Homo sapien
agcaaaaacaaagttatcattcaac

SEQ ID NO: 4186295 - DNA, 25 bp, Homo sapien
gaagtaggtcctatgagcctcctga

SEQ ID NO: 4186296 - DNA, 25 bp, Homo sapien
cagggacccgccaatgaactgaaag

SEQ ID NO: 4186297 - DNA, 25 bp, Homo sapien
tcacgaatgggaatgacttaggtcc

SEQ ID NO: 4186298 - DNA, 25 bp, Homo sapien
tgtgaaactcgtcgctgtactgggc

SEQ ID NO: 4186299 - DNA, 25 bp, Homo sapien
atcgacggctccctccttatacttg

SEQ ID NO: 4186300 - DNA, 25 bp, Homo sapien
cgacggctccctccttatacttggt

SEQ ID NO: 4186301 - DNA, 25 bp, Homo sapien
cttgcatatcagcatcgacggctcc

SEQ ID NO: 4186302 - DNA, 25 bp, Homo sapien
tgcatatcagcatcgacggctccct

SEQ ID NO: 4186303 - DNA, 25 bp, Homo sapien
aaatgtgtgaggattagtataaacc

SEQ ID NO: 4186304 - DNA, 25 bp, Homo sapien
aatgtgtgaggattagtataaacca

SEQ ID NO: 4186305 - DNA, 25 bp, Homo sapien
aaaatgtgtgaggattagtataaac

SEQ ID NO: 4186306 - DNA, 25 bp, Homo sapien
gaaaatgtgtgaggattagtataaa

SEQ ID NO: 4186307 - DNA, 25 bp, Homo sapien
taactcatcagtccaagtcgcatgc

SEQ ID NO: 4186308 - DNA, 25 bp, Homo sapien
tctcaaggaaggtctgaagatgcct

SEQ ID NO: 4186309 - DNA, 25 bp, Homo sapien
cagtcgaaggttcagcgcagcatca

SEQ ID NO: 4186310 - DNA, 25 bp, Homo sapien
gaactgcaatctgaggcactccttg

SEQ ID NO: 4186311 - DNA, 25 bp, Homo sapien
ctgaaaaagaagtgcattctctgta

SEQ ID NO: 4186312 - DNA, 25 bp, Homo sapien
tgaaaaagaagtgcattctctgtaa

SEQ ID NO: 4186313 - DNA, 25 bp, Homo sapien
gaacagtgatttgctcagcccttag

SEQ ID NO: 4186314 - DNA, 25 bp, Homo sapien
ccaactcggactttgtctgggccaa

SEQ ID NO: 4186315 - DNA, 25 bp, Homo sapien
tcagcgcagatttcacgaacgactt

SEQ ID NO: 4186316 - DNA, 25 bp, Homo sapien
tcaatgaggaagtggatatcagcct

SEQ ID NO: 4186317 - DNA, 25 bp, Homo sapien
tggaaaggttctcatgaagtaacat

SEQ ID NO: 4186318 - DNA, 25 bp, Homo sapien
aaggttctcatgaagtaacattaag

SEQ ID NO: 4186319 - DNA, 25 bp, Homo sapien
gaaaggttctcatgaagtaacatta

SEQ ID NO: 4186320 - DNA, 25 bp, Homo sapien
ggttctcatgaagtaacattaaggc

SEQ ID NO: 4186321 - DNA, 25 bp, Homo sapien
gcatcagaaatttcttgctgtgtaa

SEQ ID NO: 4186322 - DNA, 25 bp, Homo sapien
catgatgtcggccttcatgtcttca

SEQ ID NO: 4186323 - DNA, 25 bp, Homo sapien
tatctattaagctggaactcttcct

SEQ ID NO: 4186324 - DNA, 25 bp, Homo sapien
actgaactgaacaacaccaatctgg

SEQ ID NO: 4186325 - DNA, 25 bp, Homo sapien
tttgccccgaagaattctagcagga

SEQ ID NO: 4186326 - DNA, 25 bp, Homo sapien
catggagagcacacacacgaaagat

SEQ ID NO: 4186327 - DNA, 25 bp, Homo sapien
tctcaacatgaaaaactaggctgct

SEQ ID NO: 4186328 - DNA, 25 bp, Homo sapien
ggcattgtatactcctacagagaag

SEQ ID NO: 4186329 - DNA, 25 bp, Homo sapien
tagtcctgacagataacagggacac

SEQ ID NO: 4186330 - DNA, 25 bp, Homo sapien
cctttagtcctgacagataacaggg

SEQ ID NO: 4186331 - DNA, 25 bp, Homo sapien
atcctttagtcctgacagataacag

SEQ ID NO: 4186332 - DNA, 25 bp, Homo sapien
tttagtcctgacagataacagggac

SEQ ID NO: 4186333 - DNA, 25 bp, Homo sapien
aaaacaggagtcacaaactttctgc

SEQ ID NO: 4186334 - DNA, 25 bp, Homo sapien
gctgatctgttcgagtatgtattaa

SEQ ID NO: 4186335 - DNA, 25 bp, Homo sapien
ggctccaaactgaactcggtccctg

SEQ ID NO: 4186336 - DNA, 25 bp, Homo sapien
gctacctgaatgatccagcacaaac

SEQ ID NO: 4186337 - DNA, 25 bp, Homo sapien
tgcgcttccgcagattctcaattat

SEQ ID NO: 4186338 - DNA, 25 bp, Homo sapien
gagccttggcagtgtaggtgttccc

SEQ ID NO: 4186339 - DNA, 25 bp, Homo sapien
catttgcgtgcttgagagccttggc

SEQ ID NO: 4186340 - DNA, 25 bp, Homo sapien
gcagtgtaggtgttccctccagtgt

SEQ ID NO: 4186341 - DNA, 25 bp, Homo sapien
gtaaacagggcatttgcgtgcttga

SEQ ID NO: 4186342 - DNA, 25 bp, Homo sapien
tcacattttgcttgatgcggctgcc

SEQ ID NO: 4186343 - DNA, 25 bp, Homo sapien
gctgatcatggtcatgggattcccc

SEQ ID NO: 4186344 - DNA, 25 bp, Homo sapien
tcttgaacaagtgtgaaaacatctt

SEQ ID NO: 4186345 - DNA, 25 bp, Homo sapien
tggtgcttcagtacacatacgttct

SEQ ID NO: 4186346 - DNA, 25 bp, Homo sapien
tgtcagagccatcgcaaaggaaaat

SEQ ID NO: 4186347 - DNA, 25 bp, Homo sapien
ggaaatccaccgctcttggagacat

SEQ ID NO: 4186348 - DNA, 25 bp, Homo sapien
tgccacatcatagcgaggatctcca

SEQ ID NO: 4186349 - DNA, 25 bp, Homo sapien
gctctggcagatttcacggatgatt

SEQ ID NO: 4186350 - DNA, 25 bp, Homo sapien
tgcgttcagatgagttggcccactg

SEQ ID NO: 4186351 - DNA, 25 bp, Homo sapien
aaggctgcccctgcacatgagtgga

SEQ ID NO: 4186352 - DNA, 25 bp, Homo sapien
tgtcttctaagatgcctgggaggta

SEQ ID NO: 4186353 - DNA, 25 bp, Homo sapien
ggagatgtcaaacccaaccactatg

SEQ ID NO: 4186354 - DNA, 25 bp, Homo sapien
ctttcactctggagaccgtctgaaa

SEQ ID NO: 4186355 - DNA, 25 bp, Homo sapien
tctgagcctgtctgattgattttca

SEQ ID NO: 4186356 - DNA, 25 bp, Homo sapien
cactctggagaccgtctgaaaaaat

SEQ ID NO: 4186357 - DNA, 25 bp, Homo sapien
ttcactctggagaccgtctgaaaaa

SEQ ID NO: 4186358 - DNA, 25 bp, Homo sapien
gatgagcagttgtgttaagggacac

SEQ ID NO: 4186359 - DNA, 25 bp, Homo sapien
tgtgatagttttttgcccagttctc

SEQ ID NO: 4186360 - DNA, 25 bp, Homo sapien
cattccaatagtcagatgagtcctg

SEQ ID NO: 4186361 - DNA, 25 bp, Homo sapien
taagggacactaccagcagagcatc

SEQ ID NO: 4186362 - DNA, 25 bp, Homo sapien
ttcatggcttgtagtcctcgggtcc

SEQ ID NO: 4186363 - DNA, 25 bp, Homo sapien
catggcttgtagtcctcgggtccca

SEQ ID NO: 4186364 - DNA, 25 bp, Homo sapien
tcatggcttgtagtcctcgggtccc

SEQ ID NO: 4186365 - DNA, 25 bp, Homo sapien
tgctgcctttcagaccttgagaacc

SEQ ID NO: 4186366 - DNA, 25 bp, Homo sapien
tcctctgctgcctttcagaccttga

SEQ ID NO: 4186367 - DNA, 25 bp, Homo sapien
agggtttccatcctctcccctgtgt

SEQ ID NO: 4186368 - DNA, 25 bp, Homo sapien
ctgtgtcctctgctgcctttcagac

SEQ ID NO: 4186369 - DNA, 25 bp, Homo sapien
ccctggacatcctgcaatccctttg

SEQ ID NO: 4186370 - DNA, 25 bp, Homo sapien
cccctggacatcctgcaatcccttt

SEQ ID NO: 4186371 - DNA, 25 bp, Homo sapien
ttaggtccagaaaatcctttgagtc

SEQ ID NO: 4186372 - DNA, 25 bp, Homo sapien
taggtccagaaaatcctttgagtcc

SEQ ID NO: 4186373 - DNA, 25 bp, Homo sapien
cttaggtccagaaaatcctttgagt

SEQ ID NO: 4186374 - DNA, 25 bp, Homo sapien
tcaatcccatcgtctccatgacctc

SEQ ID NO: 4186375 - DNA, 25 bp, Homo sapien
cttccccatcaagtccatcaatccc

SEQ ID NO: 4186376 - DNA, 25 bp, Homo sapien
ctcttccccatcaagtccatcaatc

SEQ ID NO: 4186377 - DNA, 25 bp, Homo sapien
caatcccatcgtctccatgacctcc

SEQ ID NO: 4186378 - DNA, 25 bp, Homo sapien
cttttattccaggaaatccatgaca

SEQ ID NO: 4186379 - DNA, 25 bp, Homo sapien
ctgagatcctggatcacctttttct

SEQ ID NO: 4186380 - DNA, 25 bp, Homo sapien
tgagatcctggatcacctttttctc

SEQ ID NO: 4186381 - DNA, 25 bp, Homo sapien
ttattccaggaaatccatgacagcc

SEQ ID NO: 4186382 - DNA, 25 bp, Homo sapien
ggatcccctgggaagcccttctctc

SEQ ID NO: 4186383 - DNA, 25 bp, Homo sapien
cccctgggaagcccttctctccata

SEQ ID NO: 4186384 - DNA, 25 bp, Homo sapien
ctgggaagcccttctctccatactg

SEQ ID NO: 4186385 - DNA, 25 bp, Homo sapien
cggatcccctgggaagcccttctct

SEQ ID NO: 4186386 - DNA, 25 bp, Homo sapien
tgttattgttttgtcctggattacc

SEQ ID NO: 4186387 - DNA, 25 bp, Homo sapien
cttttgtcctttgatgttattgttt

SEQ ID NO: 4186388 - DNA, 25 bp, Homo sapien
cttgttctcctttggagcccttttg

SEQ ID NO: 4186389 - DNA, 25 bp, Homo sapien
cctttgatgttattgttttgtcctg

SEQ ID NO: 4186390 - DNA, 25 bp, Homo sapien
tggaactaggactgccttgcacccc

SEQ ID NO: 4186391 - DNA, 25 bp, Homo sapien
ctcggagtcccctttgaccttctct

SEQ ID NO: 4186392 - DNA, 25 bp, Homo sapien
tgagacacctcggagtcccctttga

SEQ ID NO: 4186393 - DNA, 25 bp, Homo sapien
gagacacctcggagtcccctttgac

SEQ ID NO: 4186394 - DNA, 25 bp, Homo sapien
atgtgcctgtaggtccaggatttcc

SEQ ID NO: 4186395 - DNA, 25 bp, Homo sapien
agctcccaatgtgcctgtaggtcca

SEQ ID NO: 4186396 - DNA, 25 bp, Homo sapien
tgtaatccttcagctcccaatgtgc

SEQ ID NO: 4186397 - DNA, 25 bp, Homo sapien
gtgggccttgtaatccttcagctcc

SEQ ID NO: 4186398 - DNA, 25 bp, Homo sapien
tgaggtcctttctgcccctggcttc

SEQ ID NO: 4186399 - DNA, 25 bp, Homo sapien
tccttttctgccaggatttccctgt

SEQ ID NO: 4186400 - DNA, 25 bp, Homo sapien
ctgaggtcctttctgcccctggctt

SEQ ID NO: 4186401 - DNA, 25 bp, Homo sapien
tttctgccaggatttccctgtgacc

SEQ ID NO: 4186402 - DNA, 25 bp, Homo sapien
gtgctccctttagctcccattagcc

SEQ ID NO: 4186403 - DNA, 25 bp, Homo sapien
gctccctttagctcccattagccca

SEQ ID NO: 4186404 - DNA, 25 bp, Homo sapien
ccagtgctccctttagctcccatta

SEQ ID NO: 4186405 - DNA, 25 bp, Homo sapien
agtgctccctttagctcccattagc

SEQ ID NO: 4186406 - DNA, 25 bp, Homo sapien
gaaccacatgcaccaacggatttga

SEQ ID NO: 4186407 - DNA, 25 bp, Homo sapien
tcttggattcaggaaatcagggagt

SEQ ID NO: 4186408 - DNA, 25 bp, Homo sapien
catctcagagatagtcgtggttcga

SEQ ID NO: 4186409 - DNA, 25 bp, Homo sapien
cggatttgagttctgatgccaccca

SEQ ID NO: 4186410 - DNA, 25 bp, Homo sapien
agattccgatgaggttaatcatttg

SEQ ID NO: 4186411 - DNA, 25 bp, Homo sapien
cagattccgatgaggttaatcattt

SEQ ID NO: 4186412 - DNA, 25 bp, Homo sapien
tcagattccgatgaggttaatcatt

SEQ ID NO: 4186413 - DNA, 25 bp, Homo sapien
cctcgctgcccagtttgccccactg

SEQ ID NO: 4186414 - DNA, 25 bp, Homo sapien
cttcctcgctgcccagtttgcccca

SEQ ID NO: 4186415 - DNA, 25 bp, Homo sapien
ttcctcgctgcccagtttgccccac

SEQ ID NO: 4186416 - DNA, 25 bp, Homo sapien
cctgtacttctttgaccagctccat

SEQ ID NO: 4186417 - DNA, 25 bp, Homo sapien
tccctgatatgttccctgtacttct

SEQ ID NO: 4186418 - DNA, 25 bp, Homo sapien
cctgatatgttccctgtacttcttt

SEQ ID NO: 4186419 - DNA, 25 bp, Homo sapien
ccctgtacttctttgaccagctcca

SEQ ID NO: 4186420 - DNA, 25 bp, Homo sapien
cacaccagtttttttcaatttctca

SEQ ID NO: 4186421 - DNA, 25 bp, Homo sapien
ttcaatttctcaaaggtggaaatta

SEQ ID NO: 4186422 - DNA, 25 bp, Homo sapien
caatttctcaaaggtggaaattaat

SEQ ID NO: 4186423 - DNA, 25 bp, Homo sapien
tgtgtaaacacaccagtttttttca

SEQ ID NO: 4186424 - DNA, 25 bp, Homo sapien
tttcgtcccatctgaccgtagcctg

SEQ ID NO: 4186425 - DNA, 25 bp, Homo sapien
ctgaccgtagcctgggatgccagaa

SEQ ID NO: 4186426 - DNA, 25 bp, Homo sapien
tgaccgtagcctgggatgccagaat

SEQ ID NO: 4186427 - DNA, 25 bp, Homo sapien
ctccttttcgtcccatctgaccgta

SEQ ID NO: 4186428 - DNA, 25 bp, Homo sapien
ttctgccccgcatctccagggaatc

SEQ ID NO: 4186429 - DNA, 25 bp, Homo sapien
gccccgcatctccagggaatcctct

SEQ ID NO: 4186430 - DNA, 25 bp, Homo sapien
catctccagggaatcctcttgggcc

SEQ ID NO: 4186431 - DNA, 25 bp, Homo sapien
cgcatctccagggaatcctcttggg

SEQ ID NO: 4186432 - DNA, 25 bp, Homo sapien
gaattccaggattaccaatatcacc

SEQ ID NO: 4186433 - DNA, 25 bp, Homo sapien
tccaggtcccccaggaattccagga

SEQ ID NO: 4186434 - DNA, 25 bp, Homo sapien
ccccaggaattccaggattaccaat

SEQ ID NO: 4186435 - DNA, 25 bp, Homo sapien
caggtcccccaggaattccaggatt

SEQ ID NO: 4186436 - DNA, 25 bp, Homo sapien
gcctgggagtcctcgagatccctct

SEQ ID NO: 4186437 - DNA, 25 bp, Homo sapien
gggagtcctcgagatccctcttcac

SEQ ID NO: 4186438 - DNA, 25 bp, Homo sapien
tgggagtcctcgagatccctcttca

SEQ ID NO: 4186439 - DNA, 25 bp, Homo sapien
cctgggagtcctcgagatccctctt

SEQ ID NO: 4186440 - DNA, 25 bp, Homo sapien
cagaggttcaaccagggatgtcggc

SEQ ID NO: 4186441 - DNA, 25 bp, Homo sapien
gaatgtctatgtggcctattgtgga

SEQ ID NO: 4186442 - DNA, 25 bp, Homo sapien
caataaacagttaaaggtctgctga

SEQ ID NO: 4186443 - DNA, 25 bp, Homo sapien
ggatgtcggcataagaacctctgtt

SEQ ID NO: 4186444 - DNA, 25 bp, Homo sapien
tacatacagaatatacaggctgccc

SEQ ID NO: 4186445 - DNA, 25 bp, Homo sapien
gtgacttttgagtaactgtgtttat

SEQ ID NO: 4186446 - DNA, 25 bp, Homo sapien
tatttcccagtgaacttattgagtt

SEQ ID NO: 4186447 - DNA, 25 bp, Homo sapien
ctttcatgaataaggagatacatac

SEQ ID NO: 4186448 - DNA, 25 bp, Homo sapien
ttcccgcaaaaaccggatcagatca

SEQ ID NO: 4186449 - DNA, 25 bp, Homo sapien
ccgcaaaaaccggatcagatcacat

SEQ ID NO: 4186450 - DNA, 25 bp, Homo sapien
tgttcccgcaaaaaccggatcagat

SEQ ID NO: 4186451 - DNA, 25 bp, Homo sapien
atgttcccgcaaaaaccggatcaga

SEQ ID NO: 4186452 - DNA, 25 bp, Homo sapien
gctcttgttccgtaacagatactca

SEQ ID NO: 4186453 - DNA, 25 bp, Homo sapien
caaccattgatggatgctcttgttc

SEQ ID NO: 4186454 - DNA, 25 bp, Homo sapien
cattgatggatgctcttgttccgta

SEQ ID NO: 4186455 - DNA, 25 bp, Homo sapien
gatggatgctcttgttccgtaacag

SEQ ID NO: 4186456 - DNA, 25 bp, Homo sapien
catttcactggggtcgatcgtttca

SEQ ID NO: 4186457 - DNA, 25 bp, Homo sapien
atttcactggggtcgatcgtttcat

SEQ ID NO: 4186458 - DNA, 25 bp, Homo sapien
agaagactggcaacatgaggaaagt

SEQ ID NO: 4186459 - DNA, 25 bp, Homo sapien
gaagactggcaacatgaggaaagtt

SEQ ID NO: 4186460 - DNA, 25 bp, Homo sapien
agactggcaacatgaggaaagttga

SEQ ID NO: 4186461 - DNA, 25 bp, Homo sapien
atttgatttcactgagaagactggc

SEQ ID NO: 4186462 - DNA, 25 bp, Homo sapien
tttggttgaaactgaaacactgatc

SEQ ID NO: 4186463 - DNA, 25 bp, Homo sapien
cttttccatttgtgagccacagcca

SEQ ID NO: 4186464 - DNA, 25 bp, Homo sapien
tgaaactgaaacactgatcacttgt

SEQ ID NO: 4186465 - DNA, 25 bp, Homo sapien
cagccagcagactttagcagaattt

SEQ ID NO: 4186466 - DNA, 25 bp, Homo sapien
cagattggtcttgttggaatgcagc

SEQ ID NO: 4186467 - DNA, 25 bp, Homo sapien
agttgagggcatctttcagattggt

SEQ ID NO: 4186468 - DNA, 25 bp, Homo sapien
tgttggaatgcagcagtaatgatct

SEQ ID NO: 4186469 - DNA, 25 bp, Homo sapien
ggaacagcatggtaagaatactcac

SEQ ID NO: 4186470 - DNA, 25 bp, Homo sapien
gacagagcaacagaacgtggattag

SEQ ID NO: 4186471 - DNA, 25 bp, Homo sapien
gtcagagagccatgtttactgaatc

SEQ ID NO: 4186472 - DNA, 25 bp, Homo sapien
agtgtcaagggcgtcagcagcagac

SEQ ID NO: 4186473 - DNA, 25 bp, Homo sapien
gccagtgtcaagggcgtcagcagca

SEQ ID NO: 4186474 - DNA, 25 bp, Homo sapien
ttggctcctgcatacgtccgcttga

SEQ ID NO: 4186475 - DNA, 25 bp, Homo sapien
gcactaaactccatggtggccgtga

SEQ ID NO: 4186476 - DNA, 25 bp, Homo sapien
gcttgaacacgttgcgggtcacaaa

SEQ ID NO: 4186477 - DNA, 25 bp, Homo sapien
tattgtagtcagaccagcggatgag

SEQ ID NO: 4186478 - DNA, 25 bp, Homo sapien
caaggaaaactctctcatcaaaagc

SEQ ID NO: 4186479 - DNA, 25 bp, Homo sapien
gaaaactctctcatcaaaagcaaag

SEQ ID NO: 4186480 - DNA, 25 bp, Homo sapien
aaggaaaactctctcatcaaaagca

SEQ ID NO: 4186481 - DNA, 25 bp, Homo sapien
ggaaaactctctcatcaaaagcaaa

SEQ ID NO: 4186482 - DNA, 25 bp, Homo sapien
taaaattaaagaagttgccaagaga

SEQ ID NO: 4186483 - DNA, 25 bp, Homo sapien
ttaaggccagctgttctgtgagcaa

SEQ ID NO: 4186484 - DNA, 25 bp, Homo sapien
gcaacagcaagcagataacaaattt

SEQ ID NO: 4186485 - DNA, 25 bp, Homo sapien
cagcaagcagataacaaatttgaga

SEQ ID NO: 4186486 - DNA, 25 bp, Homo sapien
tcttccatcactggttaaggccagc

SEQ ID NO: 4186487 - DNA, 25 bp, Homo sapien
cagatttgaagcagtgaggacttga

SEQ ID NO: 4186488 - DNA, 25 bp, Homo sapien
agatttgaagcagtgaggacttgat

SEQ ID NO: 4186489 - DNA, 25 bp, Homo sapien
ttcagatttgaagcagtgaggactt

SEQ ID NO: 4186490 - DNA, 25 bp, Homo sapien
tcagatttgaagcagtgaggacttg

SEQ ID NO: 4186491 - DNA, 25 bp, Homo sapien
ggaaaagaagtgaacgcatgtttgc

SEQ ID NO: 4186492 - DNA, 25 bp, Homo sapien
catagcaaagtgcacagcgccgaag

SEQ ID NO: 4186493 - DNA, 25 bp, Homo sapien
gccgaagtctttctaatgtttgatt

SEQ ID NO: 4186494 - DNA, 25 bp, Homo sapien
atagcaaagtgcacagcgccgaagt

SEQ ID NO: 4186495 - DNA, 25 bp, Homo sapien
gcaaagtgcacagcgccgaagtctt

SEQ ID NO: 4186496 - DNA, 25 bp, Homo sapien
tctcgaatgcaagcatttggaaaac

SEQ ID NO: 4186497 - DNA, 25 bp, Homo sapien
gaagttgtcaatcactgagctcacc

SEQ ID NO: 4186498 - DNA, 25 bp, Homo sapien
caccagagtctgagattaaagggtc

SEQ ID NO: 4186499 - DNA, 25 bp, Homo sapien
tgtctatgaggaagactacatccat

SEQ ID NO: 4186500 - DNA, 25 bp, Homo sapien
cagtagggcacgaccaattgttgct

SEQ ID NO: 4186501 - DNA, 25 bp, Homo sapien
ccttacgtgtagagcccagagaaat

SEQ ID NO: 4186502 - DNA, 25 bp, Homo sapien
cgtagccttgacacttagccctcaa

SEQ ID NO: 4186503 - DNA, 25 bp, Homo sapien
aatcacaaatatgacgtagccttga

SEQ ID NO: 4186504 - DNA, 25 bp, Homo sapien
tccatgtcatccttacgtgtagagc

SEQ ID NO: 4186505 - DNA, 25 bp, Homo sapien
acttcgcaatataattcagatctgg

SEQ ID NO: 4186506 - DNA, 25 bp, Homo sapien
ggctttaagaacttcgcaatataat

SEQ ID NO: 4186507 - DNA, 25 bp, Homo sapien
cagatctggtttatgtattctccca

SEQ ID NO: 4186508 - DNA, 25 bp, Homo sapien
cccaagctgtatcaggtgttgatca

SEQ ID NO: 4186509 - DNA, 25 bp, Homo sapien
gcaaatgtgattcatacgacctcta

SEQ ID NO: 4186510 - DNA, 25 bp, Homo sapien
actctgtggctttctagtgctgaga

SEQ ID NO: 4186511 - DNA, 25 bp, Homo sapien
aactgctgctagaacttcttgagca

SEQ ID NO: 4186512 - DNA, 25 bp, Homo sapien
gctgctagaacttcttgagcaaatg

SEQ ID NO: 4186513 - DNA, 25 bp, Homo sapien
tcggtggtgggtactgattgaatcc

SEQ ID NO: 4186514 - DNA, 25 bp, Homo sapien
cctaaattgatgagtctacaggcat

SEQ ID NO: 4186515 - DNA, 25 bp, Homo sapien
caggcatcctcaagcatcggtggtg

SEQ ID NO: 4186516 - DNA, 25 bp, Homo sapien
ctcctaaattgatgagtctacaggc

SEQ ID NO: 4186517 - DNA, 25 bp, Homo sapien
caatgaagccattacctcccaaaaa

SEQ ID NO: 4186518 - DNA, 25 bp, Homo sapien
gaagtgagacttgcaatttctgcag

SEQ ID NO: 4186519 - DNA, 25 bp, Homo sapien
aaaatcctcttgtagctcagtaaca

SEQ ID NO: 4186520 - DNA, 25 bp, Homo sapien
gtaaaccaaatagtcacttccattg

SEQ ID NO: 4186521 - DNA, 25 bp, Homo sapien
ctggaaatgtcaacccagccaaatt

SEQ ID NO: 4186522 - DNA, 25 bp, Homo sapien
gaaatgtcaacccagccaaattctc

SEQ ID NO: 4186523 - DNA, 25 bp, Homo sapien
aatggcgctgtgtattttctggaaa

SEQ ID NO: 4186524 - DNA, 25 bp, Homo sapien
tggaaatgtcaacccagccaaattc

SEQ ID NO: 4186525 - DNA, 25 bp, Homo sapien
caatgattgggagaagatcctgaaa

SEQ ID NO: 4186526 - DNA, 25 bp, Homo sapien
tcagtgcattgttcctcttagacac

SEQ ID NO: 4186527 - DNA, 25 bp, Homo sapien
cagttaagttgcatggaaagagtct

SEQ ID NO: 4186528 - DNA, 25 bp, Homo sapien
gacacaatggttttcaaccctgcaa

SEQ ID NO: 4186529 - DNA, 25 bp, Homo sapien
tatagcctggaggagagtagctcag

SEQ ID NO: 4186530 - DNA, 25 bp, Homo sapien
tatgaggaaagccacatccatgtaa

SEQ ID NO: 4186531 - DNA, 25 bp, Homo sapien
tactctttgggaagcatctatgagg

SEQ ID NO: 4186532 - DNA, 25 bp, Homo sapien
gacatctccaggttcataagtatga

SEQ ID NO: 4186533 - DNA, 25 bp, Homo sapien
aatctggcttgtgggttcggccaag

SEQ ID NO: 4186534 - DNA, 25 bp, Homo sapien
ccaagtgatgatccagagggtggct

SEQ ID NO: 4186535 - DNA, 25 bp, Homo sapien
taaagagttggtttcgccagcagat

SEQ ID NO: 4186536 - DNA, 25 bp, Homo sapien
ttcggccaagttggaccaagtgatg

SEQ ID NO: 4186537 - DNA, 25 bp, Homo sapien
ggttgggagaggtcatgttaacaca

SEQ ID NO: 4186538 - DNA, 25 bp, Homo sapien
tgtgccaccgttctctgggttggga

SEQ ID NO: 4186539 - DNA, 25 bp, Homo sapien
atacagtgttttctgtgccaccgtt

SEQ ID NO: 4186540 - DNA, 25 bp, Homo sapien
ttgggagaggtcatgttaacacatg

SEQ ID NO: 4186541 - DNA, 25 bp, Homo sapien
gctgtttatcaaccactagagctga

SEQ ID NO: 4186542 - DNA, 25 bp, Homo sapien
tgttccctaatacaaggagatgttg

SEQ ID NO: 4186543 - DNA, 25 bp, Homo sapien
gttgtgcctgggaatcaaattcatc

SEQ ID NO: 4186544 - DNA, 25 bp, Homo sapien
gaaccactactatgattgttcccta

SEQ ID NO: 4186545 - DNA, 25 bp, Homo sapien
tcagctctatggtactcacgattac

SEQ ID NO: 4186546 - DNA, 25 bp, Homo sapien
ggtcttcagctctatggtactcacg

SEQ ID NO: 4186547 - DNA, 25 bp, Homo sapien
tgagggtcttcagctctatggtact

SEQ ID NO: 4186548 - DNA, 25 bp, Homo sapien
acttgagggtcttcagctctatggt

SEQ ID NO: 4186549 - DNA, 25 bp, Homo sapien
cactatgacgaaagtattggattaa

SEQ ID NO: 4186550 - DNA, 25 bp, Homo sapien
gagtatgaatcactatgacgaaagt

SEQ ID NO: 4186551 - DNA, 25 bp, Homo sapien
taaacatagagtatgaatcactatg

SEQ ID NO: 4186552 - DNA, 25 bp, Homo sapien
tggattaattactgaattcttaggt

SEQ ID NO: 4186553 - DNA, 25 bp, Homo sapien
tagatgaaatgttagggtcacccca

SEQ ID NO: 4186554 - DNA, 25 bp, Homo sapien
ggtcaccccagaaccgatgacatgg

SEQ ID NO: 4186555 - DNA, 25 bp, Homo sapien
tataggtcggtttccccagttctca

SEQ ID NO: 4186556 - DNA, 25 bp, Homo sapien
cctgacaggtgggttttagaagaca

SEQ ID NO: 4186557 - DNA, 25 bp, Homo sapien
catacaagccaatttctccacttac

SEQ ID NO: 4186558 - DNA, 25 bp, Homo sapien
tggcctccatacaagccaatttctc

SEQ ID NO: 4186559 - DNA, 25 bp, Homo sapien
ctccacttaccttagtgcacagaca

SEQ ID NO: 4186560 - DNA, 25 bp, Homo sapien
agacacacagctctttctagctttt

SEQ ID NO: 4186561 - DNA, 25 bp, Homo sapien
atccaaattcatcttgggaagtaga

SEQ ID NO: 4186562 - DNA, 25 bp, Homo sapien
tccaaattcatcttgggaagtagaa

SEQ ID NO: 4186563 - DNA, 25 bp, Homo sapien
ccaaattcatcttgggaagtagaac

SEQ ID NO: 4186564 - DNA, 25 bp, Homo sapien
aatccaaattcatcttgggaagtag

SEQ ID NO: 4186565 - DNA, 25 bp, Homo sapien
gcaacactgcacaagagacgtgatg

SEQ ID NO: 4186566 - DNA, 25 bp, Homo sapien
ggagctcctgcgagagtcaccaaaa

SEQ ID NO: 4186567 - DNA, 25 bp, Homo sapien
gcacaagagacgtgatggagctcct

SEQ ID NO: 4186568 - DNA, 25 bp, Homo sapien
ctcctgcgagagtcaccaaaacact

SEQ ID NO: 4186569 - DNA, 25 bp, Homo sapien
ttcacggaatggaattcctgctgac

SEQ ID NO: 4186570 - DNA, 25 bp, Homo sapien
tgtggtccatttatcactgcaaatg

SEQ ID NO: 4186571 - DNA, 25 bp, Homo sapien
tgtgttcacggaatggaattcctgc

SEQ ID NO: 4186572 - DNA, 25 bp, Homo sapien
gcagaatgtggtccatttatcactg

SEQ ID NO: 4186573 - DNA, 25 bp, Homo sapien
tagactagctgcatccataagggaa

SEQ ID NO: 4186574 - DNA, 25 bp, Homo sapien
ctgcatccataagggaagcacagca

SEQ ID NO: 4186575 - DNA, 25 bp, Homo sapien
cttcttcatagactagctgcatcca

SEQ ID NO: 4186576 - DNA, 25 bp, Homo sapien
tcatagactagctgcatccataagg

SEQ ID NO: 4186577 - DNA, 25 bp, Homo sapien
gggcccagcgcacgtcccccaggag

SEQ ID NO: 4186578 - DNA, 25 bp, Homo sapien
cgggcccagcgcacgtcccccagga

SEQ ID NO: 4186579 - DNA, 25 bp, Homo sapien
cccgggcccagcgcacgtcccccag

SEQ ID NO: 4186580 - DNA, 25 bp, Homo sapien
gcccagcgcacgtcccccaggaggg

SEQ ID NO: 4186581 - DNA, 25 bp, Homo sapien
tcccacgcccctcgccgacatataa

SEQ ID NO: 4186582 - DNA, 25 bp, Homo sapien
tgggcagcctcttgactccggtgtc

SEQ ID NO: 4186583 - DNA, 25 bp, Homo sapien
aggcaagcgggtggcagctcccacg

SEQ ID NO: 4186584 - DNA, 25 bp, Homo sapien
ctcggaaccgtggaacggacaggca

SEQ ID NO: 4186585 - DNA, 25 bp, Homo sapien
gcggggagcgcagagtttggtgccg

SEQ ID NO: 4186586 - DNA, 25 bp, Homo sapien
cgcggggagcgcagagtttggtgcc

SEQ ID NO: 4186587 - DNA, 25 bp, Homo sapien
cggggagcgcagagtttggtgccgc

SEQ ID NO: 4186588 - DNA, 25 bp, Homo sapien
gggcggatttcctctggacgcgcac

SEQ ID NO: 4186589 - DNA, 25 bp, Homo sapien
ttggggaaacttccatgcagccccc

SEQ ID NO: 4186590 - DNA, 25 bp, Homo sapien
tgcacttcgaaagcccggggcggat

SEQ ID NO: 4186591 - DNA, 25 bp, Homo sapien
atttcctctggacgcgcactgcgcg

SEQ ID NO: 4186592 - DNA, 25 bp, Homo sapien
cagtgttgggtgacgcacctctcag

SEQ ID NO: 4186593 - DNA, 25 bp, Homo sapien
aggacacagtgttgggtgacgcacc

SEQ ID NO: 4186594 - DNA, 25 bp, Homo sapien
tgttgggtgacgcacctctcaggag

SEQ ID NO: 4186595 - DNA, 25 bp, Homo sapien
ggtgacgcacctctcaggaggcgcc

SEQ ID NO: 4186596 - DNA, 25 bp, Homo sapien
gtccactgtacatgccactcgccag

SEQ ID NO: 4186597 - DNA, 25 bp, Homo sapien
gtttccgagagtggtccactgtaca

SEQ ID NO: 4186598 - DNA, 25 bp, Homo sapien
taactccattcatttgtttccgaga

SEQ ID NO: 4186599 - DNA, 25 bp, Homo sapien
catttgtttccgagagtggtccact

SEQ ID NO: 4186600 - DNA, 25 bp, Homo sapien
aatatgggaacaaattatcacgagg

SEQ ID NO: 4186601 - DNA, 25 bp, Homo sapien
tcatattatgacctgaaaaatcttc

SEQ ID NO: 4186602 - DNA, 25 bp, Homo sapien
tggttcacagaaatatgggaacaaa

SEQ ID NO: 4186603 - DNA, 25 bp, Homo sapien
tatcacgaggaacaaaattagcaac

SEQ ID NO: 4186604 - DNA, 25 bp, Homo sapien
caaagtgatacaaaacttgtaactt

SEQ ID NO: 4186605 - DNA, 25 bp, Homo sapien
taatctcactaccatcaaaatcaaa

SEQ ID NO: 4186606 - DNA, 25 bp, Homo sapien
ccttaatctcactaccatcaaaatc

SEQ ID NO: 4186607 - DNA, 25 bp, Homo sapien
cgcccttaatctcactaccatcaaa

SEQ ID NO: 4186608 - DNA, 25 bp, Homo sapien
aaaccacaaacatatgaacgaacca

SEQ ID NO: 4186609 - DNA, 25 bp, Homo sapien
caaacatatgaacgaaccaaaaact

SEQ ID NO: 4186610 - DNA, 25 bp, Homo sapien
accacaaacatatgaacgaaccaaa

SEQ ID NO: 4186611 - DNA, 25 bp, Homo sapien
cacaaacatatgaacgaaccaaaaa

SEQ ID NO: 4186612 - DNA, 25 bp, Homo sapien
aaaacacaacatctgcatactcagg

SEQ ID NO: 4186613 - DNA, 25 bp, Homo sapien
ctgatcattttggtgatgaacattt

SEQ ID NO: 4186614 - DNA, 25 bp, Homo sapien
ctgctgatcattttggtgatgaaca

SEQ ID NO: 4186615 - DNA, 25 bp, Homo sapien
tcattttggtgatgaacattttcac

SEQ ID NO: 4186616 - DNA, 25 bp, Homo sapien
gatcattttggtgatgaacattttc

SEQ ID NO: 4186617 - DNA, 25 bp, Homo sapien
cagggacccgccaatgaatccaaag

SEQ ID NO: 4186618 - DNA, 25 bp, Homo sapien
aatgaaactgagacgtggccatggc

SEQ ID NO: 4186619 - DNA, 25 bp, Homo sapien
tgaagccaggaccactagaattggg

SEQ ID NO: 4186620 - DNA, 25 bp, Homo sapien
gattttcactccgtctttccgcagg

SEQ ID NO: 4186621 - DNA, 25 bp, Homo sapien
gtgtggcaagaaataaacaagcaca

SEQ ID NO: 4186622 - DNA, 25 bp, Homo sapien
aaacaagcacaattttagctggtgg

SEQ ID NO: 4186623 - DNA, 25 bp, Homo sapien
ataaacaagcacaattttagctggt

SEQ ID NO: 4186624 - DNA, 25 bp, Homo sapien
ctgtgtggcaagaaataaacaagca

SEQ ID NO: 4186625 - DNA, 25 bp, Homo sapien
tcttctgaatctcggtgggtcacca

SEQ ID NO: 4186626 - DNA, 25 bp, Homo sapien
cagaaatgtctggttgtgagcagcc

SEQ ID NO: 4186627 - DNA, 25 bp, Homo sapien
tttccaactgggtgtcgctggcgcc

SEQ ID NO: 4186628 - DNA, 25 bp, Homo sapien
gagcagccaggtcagcgaaggtctt

SEQ ID NO: 4186629 - DNA, 25 bp, Homo sapien
cctgagccatcgataagcagataga

SEQ ID NO: 4186630 - DNA, 25 bp, Homo sapien
catcgataagcagatagatgtctgc

SEQ ID NO: 4186631 - DNA, 25 bp, Homo sapien
gggtgctccctgagccatcgataag

SEQ ID NO: 4186632 - DNA, 25 bp, Homo sapien
taagcagatagatgtctgcttcctc

SEQ ID NO: 4186633 - DNA, 25 bp, Homo sapien
caagatgctatccttggacatgcca

SEQ ID NO: 4186634 - DNA, 25 bp, Homo sapien
gctgtcagcatactgaacggcccca

SEQ ID NO: 4186635 - DNA, 25 bp, Homo sapien
tgtgaaattcagtgctgcgcctgtg

SEQ ID NO: 4186636 - DNA, 25 bp, Homo sapien
tctcagctgtgtttggttggcctcc

SEQ ID NO: 4186637 - DNA, 25 bp, Homo sapien
tgcacgtaatacactctcttttcct

SEQ ID NO: 4186638 - DNA, 25 bp, Homo sapien
tcagtacagatttcttgaacaactt

SEQ ID NO: 4186639 - DNA, 25 bp, Homo sapien
tttcaatgcatcaaagtcatgcacg

SEQ ID NO: 4186640 - DNA, 25 bp, Homo sapien
cttcttcagtacagatttcttgaac

SEQ ID NO: 4186641 - DNA, 25 bp, Homo sapien
tcagtaggtaaagccacgatttctc

SEQ ID NO: 4186642 - DNA, 25 bp, Homo sapien
cagtaggtaaagccacgatttctct

SEQ ID NO: 4186643 - DNA, 25 bp, Homo sapien
ggaaaaactgtgatgtttattcaag

SEQ ID NO: 4186644 - DNA, 25 bp, Homo sapien
gatgtcgctgaactggactacacca

SEQ ID NO: 4186645 - DNA, 25 bp, Homo sapien
aaactttctgatgttgggccgggcg

SEQ ID NO: 4186646 - DNA, 25 bp, Homo sapien
agatgattacaccttcttgccgaag

SEQ ID NO: 4186647 - DNA, 25 bp, Homo sapien
agctcagggcactaccagtcagggt

SEQ ID NO: 4186648 - DNA, 25 bp, Homo sapien
gctccacgggattggcaccatcaat

SEQ ID NO: 4186649 - DNA, 25 bp, Homo sapien
tgggtcatcagcatacttcagagcc

SEQ ID NO: 4186650 - DNA, 25 bp, Homo sapien
tcggtgatcacaatgaggacttggg

SEQ ID NO: 4186651 - DNA, 25 bp, Homo sapien
tacttgtcgcttgatcctgccatgg

SEQ ID NO: 4186652 - DNA, 25 bp, Homo sapien
ttgggactggccatctgtaaggacc

SEQ ID NO: 4186653 - DNA, 25 bp, Homo sapien
gaagtaatgttccacctccctgagt

SEQ ID NO: 4186654 - DNA, 25 bp, Homo sapien
taggtatcgctaaactgggccgctc

SEQ ID NO: 4186655 - DNA, 25 bp, Homo sapien
agtcccggtgatctgaatgagctgc

SEQ ID NO: 4186656 - DNA, 25 bp, Homo sapien
atcgaatgaagaacttgctaaatac

SEQ ID NO: 4186657 - DNA, 25 bp, Homo sapien
tgaaatccagaggcacaaatctaaa

SEQ ID NO: 4186658 - DNA, 25 bp, Homo sapien
attctcccactagccccaggggatg

SEQ ID NO: 4186659 - DNA, 25 bp, Homo sapien
aagatggtgtagggaatcgaatgaa

SEQ ID NO: 4186660 - DNA, 25 bp, Homo sapien
cagccagattgcaaacaatggcctt

SEQ ID NO: 4186661 - DNA, 25 bp, Homo sapien
tcttggcagccctataggccgtatt

SEQ ID NO: 4186662 - DNA, 25 bp, Homo sapien
tataggccgtattgccaagcaacca

SEQ ID NO: 4186663 - DNA, 25 bp, Homo sapien
tcttcaacctctgaaaccagccaga

SEQ ID NO: 4186664 - DNA, 25 bp, Homo sapien
gaaggtaggtttccatccaaggctg

SEQ ID NO: 4186665 - DNA, 25 bp, Homo sapien
ttcactgtagatctcaaacttggga

SEQ ID NO: 4186666 - DNA, 25 bp, Homo sapien
gctgatggcacgtaagatgtcttga

SEQ ID NO: 4186667 - DNA, 25 bp, Homo sapien
ccatagagaatccaagaggtttgca

SEQ ID NO: 4186668 - DNA, 25 bp, Homo sapien
cttttctaagttcatcagatttttg

SEQ ID NO: 4186669 - DNA, 25 bp, Homo sapien
catcatccaatccatctgaaaataa

SEQ ID NO: 4186670 - DNA, 25 bp, Homo sapien
ttgttcaagtttctcaacatcatca

SEQ ID NO: 4186671 - DNA, 25 bp, Homo sapien
acatcatcatccaatccatctgaaa

SEQ ID NO: 4186672 - DNA, 25 bp, Homo sapien
cagctgctttgacagccggcttcca

SEQ ID NO: 4186673 - DNA, 25 bp, Homo sapien
caggtccatccagagcaacagttat

SEQ ID NO: 4186674 - DNA, 25 bp, Homo sapien
gagagctgtgtcctgtactcaaatc

SEQ ID NO: 4186675 - DNA, 25 bp, Homo sapien
gggaagatcagccaagtcacttgaa

SEQ ID NO: 4186676 - DNA, 25 bp, Homo sapien
ggtggtccaggatctcccattgtgc

SEQ ID NO: 4186677 - DNA, 25 bp, Homo sapien
ggtccaggatctcccattgtgccat

SEQ ID NO: 4186678 - DNA, 25 bp, Homo sapien
tggtccaggatctcccattgtgcca

SEQ ID NO: 4186679 - DNA, 25 bp, Homo sapien
ctggtggtccaggatctcccattgt

SEQ ID NO: 4186680 - DNA, 25 bp, Homo sapien
aaaaaatctaccactctctttacat

SEQ ID NO: 4186681 - DNA, 25 bp, Homo sapien
aatctaccactctctttacatgaag

SEQ ID NO: 4186682 - DNA, 25 bp, Homo sapien
ccttcactgcctttaaaacctggag

SEQ ID NO: 4186683 - DNA, 25 bp, Homo sapien
caggtagccttcactgcctttaaaa

SEQ ID NO: 4186684 - DNA, 25 bp, Homo sapien
agccttcactgcctttaaaacctgg

SEQ ID NO: 4186685 - DNA, 25 bp, Homo sapien
cccaggtagccttcactgcctttaa

SEQ ID NO: 4186686 - DNA, 25 bp, Homo sapien
ccctgaattgactcaaggaaattca

SEQ ID NO: 4186687 - DNA, 25 bp, Homo sapien
tccccctgaattgactcaaggaaat

SEQ ID NO: 4186688 - DNA, 25 bp, Homo sapien
ggaaattcatattgtagatgttttt

SEQ ID NO: 4186689 - DNA, 25 bp, Homo sapien
atggaggtaaaaaagagccctgact

SEQ ID NO: 4186690 - DNA, 25 bp, Homo sapien
ttagtaccttgctctcccactggtc

SEQ ID NO: 4186691 - DNA, 25 bp, Homo sapien
cctttggtgccatagcatcccttag

SEQ ID NO: 4186692 - DNA, 25 bp, Homo sapien
gtgccatagcatcccttagtacctt

SEQ ID NO: 4186693 - DNA, 25 bp, Homo sapien
tagcatcccttagtaccttgctctc

SEQ ID NO: 4186694 - DNA, 25 bp, Homo sapien
cctgtccatttagtcctctgtttcc

SEQ ID NO: 4186695 - DNA, 25 bp, Homo sapien
tcctgtccatttagtcctctgtttc

SEQ ID NO: 4186696 - DNA, 25 bp, Homo sapien
ctcctgtccatttagtcctctgttt

SEQ ID NO: 4186697 - DNA, 25 bp, Homo sapien
ttctccgtttaatccgtcaattcca

SEQ ID NO: 4186698 - DNA, 25 bp, Homo sapien
tgttctccgtttaatccgtcaattc

SEQ ID NO: 4186699 - DNA, 25 bp, Homo sapien
ctccgtttaatccgtcaattccatt

SEQ ID NO: 4186700 - DNA, 25 bp, Homo sapien
ctgttctccgtttaatccgtcaatt

SEQ ID NO: 4186701 - DNA, 25 bp, Homo sapien
ttcttccaggaagaccattatcacc

SEQ ID NO: 4186702 - DNA, 25 bp, Homo sapien
ttttcttccaggaagaccattatca

SEQ ID NO: 4186703 - DNA, 25 bp, Homo sapien
ctgagatccctcatctcccttttct

SEQ ID NO: 4186704 - DNA, 25 bp, Homo sapien
tccttttcttccaggaagaccatta

SEQ ID NO: 4186705 - DNA, 25 bp, Homo sapien
ggatcccctcgcaggccctttgctc

SEQ ID NO: 4186706 - DNA, 25 bp, Homo sapien
gggatcccctcgcaggccctttgct

SEQ ID NO: 4186707 - DNA, 25 bp, Homo sapien
ccctcgcaggccctttgctccacgg

SEQ ID NO: 4186708 - DNA, 25 bp, Homo sapien
tcgcaggccctttgctccacggtca

SEQ ID NO: 4186709 - DNA, 25 bp, Homo sapien
ctaactccagtttgcagcccgtgca

SEQ ID NO: 4186710 - DNA, 25 bp, Homo sapien
tccagtttgcagcccgtgcacttac

SEQ ID NO: 4186711 - DNA, 25 bp, Homo sapien
aactccagtttgcagcccgtgcact

SEQ ID NO: 4186712 - DNA, 25 bp, Homo sapien
ctccagtttgcagcccgtgcactta

SEQ ID NO: 4186713 - DNA, 25 bp, Homo sapien
cttgaaatcgagactccctatcaga

SEQ ID NO: 4186714 - DNA, 25 bp, Homo sapien
tcgagactccctatcagaagtacgg

SEQ ID NO: 4186715 - DNA, 25 bp, Homo sapien
cctatcagaagtacggatgggaatc

SEQ ID NO: 4186716 - DNA, 25 bp, Homo sapien
cagaagtacggatgggaatcaagcc

SEQ ID NO: 4186717 - DNA, 25 bp, Homo sapien
tcttgcttgagtcgtatgaaccaca

SEQ ID NO: 4186718 - DNA, 25 bp, Homo sapien
caagcatacgttgtgggatattctc

SEQ ID NO: 4186719 - DNA, 25 bp, Homo sapien
tattctctttagcaggccaaaccaa

SEQ ID NO: 4186720 - DNA, 25 bp, Homo sapien
gctagtcaattcagtcaatgctcca

SEQ ID NO: 4186721 - DNA, 25 bp, Homo sapien
ccttctatgctactgtcaactccag

SEQ ID NO: 4186722 - DNA, 25 bp, Homo sapien
tgggtccttctatgctactgtcaac

SEQ ID NO: 4186723 - DNA, 25 bp, Homo sapien
tatgctactgtcaactccaggagct

SEQ ID NO: 4186724 - DNA, 25 bp, Homo sapien
tctatgctactgtcaactccaggag

SEQ ID NO: 4186725 - DNA, 25 bp, Homo sapien
cacgattttacaagcccacgtaatt

SEQ ID NO: 4186726 - DNA, 25 bp, Homo sapien
taccaacaagaacttaagccccaca

SEQ ID NO: 4186727 - DNA, 25 bp, Homo sapien
cacagttgttgcatcacgattttac

SEQ ID NO: 4186728 - DNA, 25 bp, Homo sapien
aacaagaacttaagccccacagttg

SEQ ID NO: 4186729 - DNA, 25 bp, Homo sapien
ttcttctggagcctggtgtcccggg

SEQ ID NO: 4186730 - DNA, 25 bp, Homo sapien
tgtctttcttctggagcctggtgtc

SEQ ID NO: 4186731 - DNA, 25 bp, Homo sapien
cttctggagcctggtgtcccggggg

SEQ ID NO: 4186732 - DNA, 25 bp, Homo sapien
tctttcttctggagcctggtgtccc

SEQ ID NO: 4186733 - DNA, 25 bp, Homo sapien
cataagttagtttcctcaaggtagt

SEQ ID NO: 4186734 - DNA, 25 bp, Homo sapien
cctcaaggtagtgagctccagcaga

SEQ ID NO: 4186735 - DNA, 25 bp, Homo sapien
gccctggtctgcgagatgtcataag

SEQ ID NO: 4186736 - DNA, 25 bp, Homo sapien
tccagggctttcccaagtcctttgc

SEQ ID NO: 4186737 - DNA, 25 bp, Homo sapien
taagagcaataatgttatcttcact

SEQ ID NO: 4186738 - DNA, 25 bp, Homo sapien
ttctcttgcagctttacgtcctgat

SEQ ID NO: 4186739 - DNA, 25 bp, Homo sapien
aagccctgccaacttgctttcttca

SEQ ID NO: 4186740 - DNA, 25 bp, Homo sapien
ctaatgaggctttatctgccctttg

SEQ ID NO: 4186741 - DNA, 25 bp, Homo sapien
tgggcctgtatgtccccttctgcca

SEQ ID NO: 4186742 - DNA, 25 bp, Homo sapien
tgtgggcctgtatgtccccttctgc

SEQ ID NO: 4186743 - DNA, 25 bp, Homo sapien
ctgtgggcctgtatgtccccttctg

SEQ ID NO: 4186744 - DNA, 25 bp, Homo sapien
gtgggcctgtatgtccccttctgcc

SEQ ID NO: 4186745 - DNA, 25 bp, Homo sapien
agccttcaagtccatctggtcctgg

SEQ ID NO: 4186746 - DNA, 25 bp, Homo sapien
ctgagggcccttaagtcccagggag

SEQ ID NO: 4186747 - DNA, 25 bp, Homo sapien
tgagggcccttaagtcccagggagc

SEQ ID NO: 4186748 - DNA, 25 bp, Homo sapien
cagggagccttcaagtccatctggt

SEQ ID NO: 4186749 - DNA, 25 bp, Homo sapien
ttatgttctcacaccctgattggtc

SEQ ID NO: 4186750 - DNA, 25 bp, Homo sapien
caccctgattggtcttgatatgtac

SEQ ID NO: 4186751 - DNA, 25 bp, Homo sapien
tcacaccctgattggtcttgatatg

SEQ ID NO: 4186752 - DNA, 25 bp, Homo sapien
tgttctcacaccctgattggtcttg

SEQ ID NO: 4186753 - DNA, 25 bp, Homo sapien
tttctcctttcacaccagcctctcc

SEQ ID NO: 4186754 - DNA, 25 bp, Homo sapien
tttttctcctttcacaccagcctct

SEQ ID NO: 4186755 - DNA, 25 bp, Homo sapien
ttctcctttcacaccagcctctcct

SEQ ID NO: 4186756 - DNA, 25 bp, Homo sapien
tcctttttctcctttcacaccagcc

SEQ ID NO: 4186757 - DNA, 25 bp, Homo sapien
tgcaatcatttttctcattacatac

SEQ ID NO: 4186758 - DNA, 25 bp, Homo sapien
tcagatgcaatcatttttctcatta

SEQ ID NO: 4186759 - DNA, 25 bp, Homo sapien
gatgcaatcatttttctcattacat

SEQ ID NO: 4186760 - DNA, 25 bp, Homo sapien
cagatgcaatcatttttctcattac

SEQ ID NO: 4186761 - DNA, 25 bp, Homo sapien
cttgatatctctgtgtaacttggtt

SEQ ID NO: 4186762 - DNA, 25 bp, Homo sapien
ctctgtgtaacttggttccatcctc

SEQ ID NO: 4186763 - DNA, 25 bp, Homo sapien
tgatatctctgtgtaacttggttcc

SEQ ID NO: 4186764 - DNA, 25 bp, Homo sapien
atatctctgtgtaacttggttccat

SEQ ID NO: 4186765 - DNA, 25 bp, Homo sapien
ttcccaaacggccttgattccctgc

SEQ ID NO: 4186766 - DNA, 25 bp, Homo sapien
cttcccaaacggccttgattccctg

SEQ ID NO: 4186767 - DNA, 25 bp, Homo sapien
tgcaagccacgaggaccaggaaagc

SEQ ID NO: 4186768 - DNA, 25 bp, Homo sapien
tcccttgcgtccgacactaccataa

SEQ ID NO: 4186769 - DNA, 25 bp, Homo sapien
gacactaccataacctggactgcca

SEQ ID NO: 4186770 - DNA, 25 bp, Homo sapien
ctttgctcccttgcgtccgacacta

SEQ ID NO: 4186771 - DNA, 25 bp, Homo sapien
ttgcgtccgacactaccataacctg

SEQ ID NO: 4186772 - DNA, 25 bp, Homo sapien
tccactttctccagggaatccttct

SEQ ID NO: 4186773 - DNA, 25 bp, Homo sapien
tttctccagggaatccttcttgtcc

SEQ ID NO: 4186774 - DNA, 25 bp, Homo sapien
taggtccactttctccagggaatcc

SEQ ID NO: 4186775 - DNA, 25 bp, Homo sapien
cttaggtccactttctccagggaat

SEQ ID NO: 4186776 - DNA, 25 bp, Homo sapien
cattttgcctctagctcccttcagc

SEQ ID NO: 4186777 - DNA, 25 bp, Homo sapien
tagctcccttcagcccagtctctcc

SEQ ID NO: 4186778 - DNA, 25 bp, Homo sapien
cagtctctcctggaccaccagggtc

SEQ ID NO: 4186779 - DNA, 25 bp, Homo sapien
gaccaccagggtccccaatctcacc

SEQ ID NO: 4186780 - DNA, 25 bp, Homo sapien
gggagggatccaaccatgaacttgt

SEQ ID NO: 4186781 - DNA, 25 bp, Homo sapien
tgttagcgtgcttctgatgttcaag

SEQ ID NO: 4186782 - DNA, 25 bp, Homo sapien
tgatccagagatagttcaatgcaga

SEQ ID NO: 4186783 - DNA, 25 bp, Homo sapien
ttcaaagagaactgacgaagcattc

SEQ ID NO: 4186784 - DNA, 25 bp, Homo sapien
caattgcagtatggcagctgggcac

SEQ ID NO: 4186785 - DNA, 25 bp, Homo sapien
cacagacgaacctccatcaggtggg

SEQ ID NO: 4186786 - DNA, 25 bp, Homo sapien
cccttcttagcaggctactggatga

SEQ ID NO: 4186787 - DNA, 25 bp, Homo sapien
gaagcagagatccaacgcagaagag

SEQ ID NO: 4186788 - DNA, 25 bp, Homo sapien
tcaatgcagccaagactttctgggc

SEQ ID NO: 4186789 - DNA, 25 bp, Homo sapien
ctgagtaatagagttcaaaacagaa

SEQ ID NO: 4186790 - DNA, 25 bp, Homo sapien
acagactatgttgggcaaaaaagac

SEQ ID NO: 4186791 - DNA, 25 bp, Homo sapien
gaagaaatagctcattcctgaaaaa

SEQ ID NO: 4186792 - DNA, 25 bp, Homo sapien
aacaaagaatttagctagatcactc

SEQ ID NO: 4186793 - DNA, 25 bp, Homo sapien
ttagctagatcactctctttgggaa

SEQ ID NO: 4186794 - DNA, 25 bp, Homo sapien
gaccaaaagatattgatttcagagg

SEQ ID NO: 4186795 - DNA, 25 bp, Homo sapien
aaagaccaaaagatattgatttcag

SEQ ID NO: 4186796 - DNA, 25 bp, Homo sapien
tggacattttcagttagtaaacatt

SEQ ID NO: 4186797 - DNA, 25 bp, Homo sapien
aaactcatttgaatcatacttttct

SEQ ID NO: 4186798 - DNA, 25 bp, Homo sapien
aatattcccagcaatcccttcttcc

SEQ ID NO: 4186799 - DNA, 25 bp, Homo sapien
ctctggacattttcagttagtaaac

SEQ ID NO: 4186800 - DNA, 25 bp, Homo sapien
cgtccaggaggtcctggttccccag

SEQ ID NO: 4186801 - DNA, 25 bp, Homo sapien
gaaaatgaagccaagcctttggctc

SEQ ID NO: 4186802 - DNA, 25 bp, Homo sapien
gactgcggtctcgcacatactgaat

SEQ ID NO: 4186803 - DNA, 25 bp, Homo sapien
actgcggtctcgcacatactgaatg

SEQ ID NO: 4186804 - DNA, 25 bp, Homo sapien
gcacatactgaatgagctcacatgt

SEQ ID NO: 4186805 - DNA, 25 bp, Homo sapien
gaccatatcccttaacacatagcat

SEQ ID NO: 4186806 - DNA, 25 bp, Homo sapien
gggcagctgttctcccggaccttaa

SEQ ID NO: 4186807 - DNA, 25 bp, Homo sapien
tcttgtaggcgtctgagaagcgcac

SEQ ID NO: 4186808 - DNA, 25 bp, Homo sapien
ggactgaccgctgctgaaaaatgtg

SEQ ID NO: 4186809 - DNA, 25 bp, Homo sapien
gggaatgatttcaagcgcgccgaac

SEQ ID NO: 4186810 - DNA, 25 bp, Homo sapien
tacacacacctttgagtgggtgagt

SEQ ID NO: 4186811 - DNA, 25 bp, Homo sapien
tatatcacaatttgcatcaggagag

SEQ ID NO: 4186812 - DNA, 25 bp, Homo sapien
cagttactgttcctatcgccacaca

SEQ ID NO: 4186813 - DNA, 25 bp, Homo sapien
ggccaatgctgcttacattaatggg

SEQ ID NO: 4186814 - DNA, 25 bp, Homo sapien
cttgaaatgtgccagtgtcgtcaat

SEQ ID NO: 4186815 - DNA, 25 bp, Homo sapien
gaaccactattacttgaaatgtgcc

SEQ ID NO: 4186816 - DNA, 25 bp, Homo sapien
taatgctggtatgtagtcggccccg

SEQ ID NO: 4186817 - DNA, 25 bp, Homo sapien
catagcagaaagtgcaccgctggag

SEQ ID NO: 4186818 - DNA, 25 bp, Homo sapien
gtcaaatattttgacatttggaaac

SEQ ID NO: 4186819 - DNA, 25 bp, Homo sapien
aatattttgacatttggaaactgca

SEQ ID NO: 4186820 - DNA, 25 bp, Homo sapien
atattttgacatttggaaactgcat

SEQ ID NO: 4186821 - DNA, 25 bp, Homo sapien
caaatattttgacatttggaaactg

SEQ ID NO: 4186822 - DNA, 25 bp, Homo sapien
tagaaatagaaaagggaagatagca

SEQ ID NO: 4186823 - DNA, 25 bp, Homo sapien
gtagaaatagaaaagggaagatagc

SEQ ID NO: 4186824 - DNA, 25 bp, Homo sapien
agaaatagaaaagggaagatagcat

SEQ ID NO: 4186825 - DNA, 25 bp, Homo sapien
agtagaaatagaaaagggaagatag

SEQ ID NO: 4186826 - DNA, 25 bp, Homo sapien
ctgtgaaccaaaagttactctgggt

SEQ ID NO: 4186827 - DNA, 25 bp, Homo sapien
catgaggcgcttacttctgtaggtg

SEQ ID NO: 4186828 - DNA, 25 bp, Homo sapien
tccaaagggtggctggcgagatcct

SEQ ID NO: 4186829 - DNA, 25 bp, Homo sapien
catttggctcgcaaggattccttct

SEQ ID NO: 4186830 - DNA, 25 bp, Homo sapien
tcaggtttatgaattcggccaagct

SEQ ID NO: 4186831 - DNA, 25 bp, Homo sapien
ctttggatctatagagttaagtctg

SEQ ID NO: 4186832 - DNA, 25 bp, Homo sapien
taagtttattggtggatatttgttg

SEQ ID NO: 4186833 - DNA, 25 bp, Homo sapien
ctgctttggatctatagagttaagt

SEQ ID NO: 4186834 - DNA, 25 bp, Homo sapien
tctatagagttaagtctgttgcact

SEQ ID NO: 4186835 - DNA, 25 bp, Homo sapien
ggacttaattcacaggcctgtttta

SEQ ID NO: 4186836 - DNA, 25 bp, Homo sapien
cttggacttaattcacaggcctgtt

SEQ ID NO: 4186837 - DNA, 25 bp, Homo sapien
acttaattcacaggcctgttttagg

SEQ ID NO: 4186838 - DNA, 25 bp, Homo sapien
ttggacttaattcacaggcctgttt

SEQ ID NO: 4186839 - DNA, 25 bp, Homo sapien
gcacggcatcttgtctatgtccctt

SEQ ID NO: 4186840 - DNA, 25 bp, Homo sapien
gagtcacatgcacggcatcttgtct

SEQ ID NO: 4186841 - DNA, 25 bp, Homo sapien
tgtcctcggcaagagtcacatgcac

SEQ ID NO: 4186842 - DNA, 25 bp, Homo sapien
ggcaagagtcacatgcacggcatct

SEQ ID NO: 4186843 - DNA, 25 bp, Homo sapien
cattctaaagacctgatgagtcatc

SEQ ID NO: 4186844 - DNA, 25 bp, Homo sapien
gctggcgaatgcacagacagtggta

SEQ ID NO: 4186845 - DNA, 25 bp, Homo sapien
gatcacttatagaatggctggcgaa

SEQ ID NO: 4186846 - DNA, 25 bp, Homo sapien
tctcttgaatggctcaggtaaggag

SEQ ID NO: 4186847 - DNA, 25 bp, Homo sapien
tgtgctcagctccagtaaagtttgt

SEQ ID NO: 4186848 - DNA, 25 bp, Homo sapien
tggtgtgcccagaaaacgtactttg

SEQ ID NO: 4186849 - DNA, 25 bp, Homo sapien
gagtcagccatgctacatctattag

SEQ ID NO: 4186850 - DNA, 25 bp, Homo sapien
ggtaactccaatagcttgtcaagac

SEQ ID NO: 4186851 - DNA, 25 bp, Homo sapien
gaagacatgaggtgctatcactgga

SEQ ID NO: 4186852 - DNA, 25 bp, Homo sapien
gggccattgctaccaactgtggagc

SEQ ID NO: 4186853 - DNA, 25 bp, Homo sapien
gtccaagcaaacaactcccacagtg

SEQ ID NO: 4186854 - DNA, 25 bp, Homo sapien
gacatatcagtcgtagagtgctgga

SEQ ID NO: 4186855 - DNA, 25 bp, Homo sapien
aaaggagttcgtgcttaactcagag

SEQ ID NO: 4186856 - DNA, 25 bp, Homo sapien
cttgccaatgcagaaaaacagacaa

SEQ ID NO: 4186857 - DNA, 25 bp, Homo sapien
gaaaggagttcgtgcttaactcaga

SEQ ID NO: 4186858 - DNA, 25 bp, Homo sapien
aagaaaggagttcgtgcttaactca

SEQ ID NO: 4186859 - DNA, 25 bp, Homo sapien
gggaggcagttcctttacagtcgat

SEQ ID NO: 4186860 - DNA, 25 bp, Homo sapien
taggaatgatggactaactaggcct

SEQ ID NO: 4186861 - DNA, 25 bp, Homo sapien
aaaatgccagtcgttcagaaatgtc

SEQ ID NO: 4186862 - DNA, 25 bp, Homo sapien
cagggtttctagctactaagtcaga

SEQ ID NO: 4186863 - DNA, 25 bp, Homo sapien
aatcagccagccaacaatgtctggg

SEQ ID NO: 4186864 - DNA, 25 bp, Homo sapien
gaggaataatctctccagcagcatt

SEQ ID NO: 4186865 - DNA, 25 bp, Homo sapien
gactgactgactaaatgacacccaa

SEQ ID NO: 4186866 - DNA, 25 bp, Homo sapien
gaatcagtgacagaaccaggtgtta

SEQ ID NO: 4186867 - DNA, 25 bp, Homo sapien
tataagtggctactcatgaaatcca

SEQ ID NO: 4186868 - DNA, 25 bp, Homo sapien
gcacagaatattgacctaagataag

SEQ ID NO: 4186869 - DNA, 25 bp, Homo sapien
gaaatccaatgactaggaccctaga

SEQ ID NO: 4186870 - DNA, 25 bp, Homo sapien
gatgttggcaaaagttaatatgcac

SEQ ID NO: 4186871 - DNA, 25 bp, Homo sapien
ccagcctgatatgaatgacttgact

SEQ ID NO: 4186872 - DNA, 25 bp, Homo sapien
gaaggccaccttgaaaggagcagtg

SEQ ID NO: 4186873 - DNA, 25 bp, Homo sapien
gcggtttcccataggcaagtattag

SEQ ID NO: 4186874 - DNA, 25 bp, Homo sapien
tgagatgagggatacaaccagcctg

SEQ ID NO: 4186875 - DNA, 25 bp, Homo sapien
tgctgctatcaaagtcaccgtgttg

SEQ ID NO: 4186876 - DNA, 25 bp, Homo sapien
taaatggcagctaggtgctcagaag

SEQ ID NO: 4186877 - DNA, 25 bp, Homo sapien
gctcagaagcctggaattatcctcg

SEQ ID NO: 4186878 - DNA, 25 bp, Homo sapien
catagtccatcgcatacactgctgc

SEQ ID NO: 4186879 - DNA, 25 bp, Homo sapien
ccttgtagagttatagggaactgag

SEQ ID NO: 4186880 - DNA, 25 bp, Homo sapien
taccttgtagagttatagggaactg

SEQ ID NO: 4186881 - DNA, 25 bp, Homo sapien
tgtagagttatagggaactgagata

SEQ ID NO: 4186882 - DNA, 25 bp, Homo sapien
tagagttatagggaactgagataaa

SEQ ID NO: 4186883 - DNA, 25 bp, Homo sapien
ttttcttgggactggcggtctgcac

SEQ ID NO: 4186884 - DNA, 25 bp, Homo sapien
cttccgctcggcgacaggaagtgag

SEQ ID NO: 4186885 - DNA, 25 bp, Homo sapien
agcgatccgcgctagaggaagacga

SEQ ID NO: 4186886 - DNA, 25 bp, Homo sapien
tcaaggctcactctttttcgtcact

SEQ ID NO: 4186887 - DNA, 25 bp, Homo sapien
agccagactgtctccaaaagaaaaa

SEQ ID NO: 4186888 - DNA, 25 bp, Homo sapien
aagccgagatcgctccactgcactc

SEQ ID NO: 4186889 - DNA, 25 bp, Homo sapien
taagccgagatcgctccactgcact

SEQ ID NO: 4186890 - DNA, 25 bp, Homo sapien
acagagccagactgtctccaaaaga

SEQ ID NO: 4186891 - DNA, 25 bp, Homo sapien
gaaagatgcttaacggaattggtta

SEQ ID NO: 4186892 - DNA, 25 bp, Homo sapien
agatatatgaatagaaaacaagcac

SEQ ID NO: 4186893 - DNA, 25 bp, Homo sapien
aataagaaagatgcttaacggaatt

SEQ ID NO: 4186894 - DNA, 25 bp, Homo sapien
atgcttaacggaattggttattagg

SEQ ID NO: 4186895 - DNA, 25 bp, Homo sapien
ttttcacagaattgatgggcagttc

SEQ ID NO: 4186896 - DNA, 25 bp, Homo sapien
cacttttgacttattagtaatgtga

SEQ ID NO: 4186897 - DNA, 25 bp, Homo sapien
tggcatattttatgccctataccag

SEQ ID NO: 4186898 - DNA, 25 bp, Homo sapien
gatgttaggaaagtcatatacttct

SEQ ID NO: 4186899 - DNA, 25 bp, Homo sapien
gaaatgagttaatgcctaaactaac

SEQ ID NO: 4186900 - DNA, 25 bp, Homo sapien
aaaacataagtgatcccataccata

SEQ ID NO: 4186901 - DNA, 25 bp, Homo sapien
cataactttttgaactgtcccaagc

SEQ ID NO: 4186902 - DNA, 25 bp, Homo sapien
tgtcccaagcatcagtttgctgagg

SEQ ID NO: 4186903 - DNA, 25 bp, Homo sapien
tacctctcttaaggctggcagacag

SEQ ID NO: 4186904 - DNA, 25 bp, Homo sapien
tgatgttggagctcctgatcctagc

SEQ ID NO: 4186905 - DNA, 25 bp, Homo sapien
gaaagaattcccacaacctgatgtt

SEQ ID NO: 4186906 - DNA, 25 bp, Homo sapien
cctggcttgcccaatgagtgcatat

SEQ ID NO: 4186907 - DNA, 25 bp, Homo sapien
gacttctaatcttcagcaagtaagg

SEQ ID NO: 4186908 - DNA, 25 bp, Homo sapien
gggacttctaatcttcagcaagtaa

SEQ ID NO: 4186909 - DNA, 25 bp, Homo sapien
taatcttcagcaagtaaggcaaaga

SEQ ID NO: 4186910 - DNA, 25 bp, Homo sapien
ctgggacttctaatcttcagcaagt

SEQ ID NO: 4186911 - DNA, 25 bp, Homo sapien
gggctctcgacatcaacattttgaa

SEQ ID NO: 4186912 - DNA, 25 bp, Homo sapien
ctctaacatcgcagcgcagcgcagg

SEQ ID NO: 4186913 - DNA, 25 bp, Homo sapien
ctgcaaatgcagatcaggccctctg

SEQ ID NO: 4186914 - DNA, 25 bp, Homo sapien
aagctgccagtgccgcgggctctcg

SEQ ID NO: 4186915 - DNA, 25 bp, Homo sapien
ttccctcggccttcagaaccagatg

SEQ ID NO: 4186916 - DNA, 25 bp, Homo sapien
tatctttcaggttgatatagattac

SEQ ID NO: 4186917 - DNA, 25 bp, Homo sapien
gccttcagaaccagatgcgtcctct

SEQ ID NO: 4186918 - DNA, 25 bp, Homo sapien
agaaccagatgcgtcctctcagcaa

SEQ ID NO: 4186919 - DNA, 25 bp, Homo sapien
tcagaacctcctctagcttgctaaa

SEQ ID NO: 4186920 - DNA, 25 bp, Homo sapien
gaactgccaccaaagaaggttgtct

SEQ ID NO: 4186921 - DNA, 25 bp, Homo sapien
taaggaagcttcctaccaaagatgg

SEQ ID NO: 4186922 - DNA, 25 bp, Homo sapien
caatgcttctttcaggccagcacca

SEQ ID NO: 4186923 - DNA, 25 bp, Homo sapien
gttctggagtgtgttctacacactc

SEQ ID NO: 4186924 - DNA, 25 bp, Homo sapien
gagggccagatgacgtagtcaatca

SEQ ID NO: 4186925 - DNA, 25 bp, Homo sapien
tctggagtgtgttctacacactcat

SEQ ID NO: 4186926 - DNA, 25 bp, Homo sapien
tcaaacgagggccagatgacgtagt

SEQ ID NO: 4186927 - DNA, 25 bp, Homo sapien
gcagggctgagactgtgggatcttc

SEQ ID NO: 4186928 - DNA, 25 bp, Homo sapien
agcagggctgagactgtgggatctt

SEQ ID NO: 4186929 - DNA, 25 bp, Homo sapien
ctctgtgaaaccttgccagtccttc

SEQ ID NO: 4186930 - DNA, 25 bp, Homo sapien
gctctgtgaaaccttgccagtcctt

SEQ ID NO: 4186931 - DNA, 25 bp, Homo sapien
ggcctccaggctgtaagtagagctc

SEQ ID NO: 4186932 - DNA, 25 bp, Homo sapien
gaagcacatccacgtaatgatgaca

SEQ ID NO: 4186933 - DNA, 25 bp, Homo sapien
aatctcgggcagtttcagtccgtca

SEQ ID NO: 4186934 - DNA, 25 bp, Homo sapien
tttcattagtagtcgcaggtattgc

SEQ ID NO: 4186935 - DNA, 25 bp, Homo sapien
gactgttggtttatttggcacttca

SEQ ID NO: 4186936 - DNA, 25 bp, Homo sapien
ttgtaagttggcctcattctctctg

SEQ ID NO: 4186937 - DNA, 25 bp, Homo sapien
gctggtgctgttgtaagttggcctc

SEQ ID NO: 4186938 - DNA, 25 bp, Homo sapien
ctctgggcctgacagttgtttagag

SEQ ID NO: 4186939 - DNA, 25 bp, Homo sapien
cctgacagttgtttagagtgttctc

SEQ ID NO: 4186940 - DNA, 25 bp, Homo sapien
ccaacatgcccatggtttgggatga

SEQ ID NO: 4186941 - DNA, 25 bp, Homo sapien
tgggatgaatcctctaactctatct

SEQ ID NO: 4186942 - DNA, 25 bp, Homo sapien
cagtcttgagaattcccactcagga

SEQ ID NO: 4186943 - DNA, 25 bp, Homo sapien
tttctcaaacccatcgccaagtaca

SEQ ID NO: 4186944 - DNA, 25 bp, Homo sapien
acgctcatgagacacttgtcctcca

SEQ ID NO: 4186945 - DNA, 25 bp, Homo sapien
ttatgccttttgctcttcggtttca

SEQ ID NO: 4186946 - DNA, 25 bp, Homo sapien
taacaatatttccacgctcatgaga

SEQ ID NO: 4186947 - DNA, 25 bp, Homo sapien
tgctcttcggtttcaagtattaatt

SEQ ID NO: 4186948 - DNA, 25 bp, Homo sapien
tggtggctacaatctatatctgcaa

SEQ ID NO: 4186949 - DNA, 25 bp, Homo sapien
caagtatatgaggtatattttgccc

SEQ ID NO: 4186950 - DNA, 25 bp, Homo sapien
gagtcctggtggctacaatctatat

SEQ ID NO: 4186951 - DNA, 25 bp, Homo sapien
cagtgtttcttccacaagtatatga

SEQ ID NO: 4186952 - DNA, 25 bp, Homo sapien
gaaacttagcaattcctcagatgcc

SEQ ID NO: 4186953 - DNA, 25 bp, Homo sapien
tctagatggaggcaacagactatcc

SEQ ID NO: 4186954 - DNA, 25 bp, Homo sapien
tgtttgtagctcgacaacttccctc

SEQ ID NO: 4186955 - DNA, 25 bp, Homo sapien
aaccagacagccaagtatgaacact

SEQ ID NO: 4186956 - DNA, 25 bp, Homo sapien
aatcttctacatatgtggggatttg

SEQ ID NO: 4186957 - DNA, 25 bp, Homo sapien
atgctgttaatcttctacatatgtg

SEQ ID NO: 4186958 - DNA, 25 bp, Homo sapien
tcttctacatatgtggggatttggc

SEQ ID NO: 4186959 - DNA, 25 bp, Homo sapien
gctgttaatcttctacatatgtggg

SEQ ID NO: 4186960 - DNA, 25 bp, Homo sapien
ggcaagacttgtcagatcagccctt

SEQ ID NO: 4186961 - DNA, 25 bp, Homo sapien
tcaagagagcgagacattggtacag

SEQ ID NO: 4186962 - DNA, 25 bp, Homo sapien
tacaggtcatcccaaattcttgtag

SEQ ID NO: 4186963 - DNA, 25 bp, Homo sapien
cagtgatcccgttccaactagaaac

SEQ ID NO: 4186964 - DNA, 25 bp, Homo sapien
gacaagaaggatggaacaccttcag

SEQ ID NO: 4186965 - DNA, 25 bp, Homo sapien
tgctgtgatgctgtggacaagaagg

SEQ ID NO: 4186966 - DNA, 25 bp, Homo sapien
ccttcagaagggaccataataaacg

SEQ ID NO: 4186967 - DNA, 25 bp, Homo sapien
taataaacggcaagttgccagcact

SEQ ID NO: 4186968 - DNA, 25 bp, Homo sapien
gtaacaggggttataggcacgcgcc

SEQ ID NO: 4186969 - DNA, 25 bp, Homo sapien
attaagtaacactaggcatcagcca

SEQ ID NO: 4186970 - DNA, 25 bp, Homo sapien
agagtaacaggggttataggcacgc

SEQ ID NO: 4186971 - DNA, 25 bp, Homo sapien
taaagatttcttactaagcattaag

SEQ ID NO: 4186972 - DNA, 25 bp, Homo sapien
tgctaatggtagagccctagggact

SEQ ID NO: 4186973 - DNA, 25 bp, Homo sapien
acaaccttactaggcttgaggtgcc

SEQ ID NO: 4186974 - DNA, 25 bp, Homo sapien
aataagacaccagggatcaatccag

SEQ ID NO: 4186975 - DNA, 25 bp, Homo sapien
tcacgcagctatggcttagaccaca

SEQ ID NO: 4186976 - DNA, 25 bp, Homo sapien
cgtgtcggccacgcattcccgtggg

SEQ ID NO: 4186977 - DNA, 25 bp, Homo sapien
cggtgtccgcccgtttatatgcacc

SEQ ID NO: 4186978 - DNA, 25 bp, Homo sapien
acgcgagggtcggagattcgcccac

SEQ ID NO: 4186979 - DNA, 25 bp, Homo sapien
tatatgcaccccctgaacgcgaggg

SEQ ID NO: 4186980 - DNA, 25 bp, Homo sapien
gaagtgaagtgaaggccgagacttc

SEQ ID NO: 4186981 - DNA, 25 bp, Homo sapien
cgcaggcgcattcgtgttcacgggc

SEQ ID NO: 4186982 - DNA, 25 bp, Homo sapien
tcggcccggaatggacaatgtttgg

SEQ ID NO: 4186983 - DNA, 25 bp, Homo sapien
tggtggcccgccttgttcttgctgg

SEQ ID NO: 4186984 - DNA, 25 bp, Homo sapien
ctgctcccggcgtgagaagaagcga

SEQ ID NO: 4186985 - DNA, 25 bp, Homo sapien
tccgcgaggccgtgctggtctgctc

SEQ ID NO: 4186986 - DNA, 25 bp, Homo sapien
cgcgcgcctcgggagaagaggagct

SEQ ID NO: 4186987 - DNA, 25 bp, Homo sapien
gggcagcggtgcgaggcgggagcct

SEQ ID NO: 4186988 - DNA, 25 bp, Homo sapien
gtcgtgtgcccgcaacgtccccagc

SEQ ID NO: 4186989 - DNA, 25 bp, Homo sapien
ccgccccgtcgtgtgcccgcaacgt

SEQ ID NO: 4186990 - DNA, 25 bp, Homo sapien
ccgcaacgtccccagctcacgccag

SEQ ID NO: 4186991 - DNA, 25 bp, Homo sapien
gggcggcgccctagagatgcccccc

SEQ ID NO: 4186992 - DNA, 25 bp, Homo sapien
agaagcggcgctgacgagaggctga

SEQ ID NO: 4186993 - DNA, 25 bp, Homo sapien
aagcggcgctgacgagaggctgagg

SEQ ID NO: 4186994 - DNA, 25 bp, Homo sapien
gagaagcggcgctgacgagaggctg

SEQ ID NO: 4186995 - DNA, 25 bp, Homo sapien
gaagcggcgctgacgagaggctgag

SEQ ID NO: 4186996 - DNA, 25 bp, Homo sapien
gctcccggccacgcgtcccacggct

SEQ ID NO: 4186997 - DNA, 25 bp, Homo sapien
tcccggccacgcgtcccacggctgc

SEQ ID NO: 4186998 - DNA, 25 bp, Homo sapien
ggccacgcgtcccacggctgctccc

SEQ ID NO: 4186999 - DNA, 25 bp, Homo sapien
cccggccacgcgtcccacggctgct

SEQ ID NO: 4187000 - DNA, 25 bp, Homo sapien
aagcccccggaatcccaggctgtca

SEQ ID NO: 4187001 - DNA, 25 bp, Homo sapien
aagtctttagtgtcagccacggcca

SEQ ID NO: 4187002 - DNA, 25 bp, Homo sapien
acaaagtctttagtgtcagccacgg

SEQ ID NO: 4187003 - DNA, 25 bp, Homo sapien
caaagtctttagtgtcagccacggc

SEQ ID NO: 4187004 - DNA, 25 bp, Homo sapien
gtctttagtgtcagccacggccaca

SEQ ID NO: 4187005 - DNA, 25 bp, Homo sapien
tttccatcgaaactgcactcgggtt

SEQ ID NO: 4187006 - DNA, 25 bp, Homo sapien
tccatcgaaactgcactcgggttga

SEQ ID NO: 4187007 - DNA, 25 bp, Homo sapien
ttccatcgaaactgcactcgggttg

SEQ ID NO: 4187008 - DNA, 25 bp, Homo sapien
ttcaatatacgcaaatcaataaatg

SEQ ID NO: 4187009 - DNA, 25 bp, Homo sapien
cagcatataaacagagccaaagaca

SEQ ID NO: 4187010 - DNA, 25 bp, Homo sapien
tgacaaaattcaacaacgcttcatg

SEQ ID NO: 4187011 - DNA, 25 bp, Homo sapien
aatgtaatccagcatataaacagag

SEQ ID NO: 4187012 - DNA, 25 bp, Homo sapien
ttcaggaatacaaggagatgaagag

SEQ ID NO: 4187013 - DNA, 25 bp, Homo sapien
caggaatacaaggagatgaagagtg

SEQ ID NO: 4187014 - DNA, 25 bp, Homo sapien
tcaggaatacaaggagatgaagagt

SEQ ID NO: 4187015 - DNA, 25 bp, Homo sapien
gcgtggagtagaaggtagcagaaac

SEQ ID NO: 4187016 - DNA, 25 bp, Homo sapien
agcaagatggtaaagtccatcccag

SEQ ID NO: 4187017 - DNA, 25 bp, Homo sapien
cacaagtggaggagtactaagcaac

SEQ ID NO: 4187018 - DNA, 25 bp, Homo sapien
tcacaagtggaggagtactaagcaa

SEQ ID NO: 4187019 - DNA, 25 bp, Homo sapien
gcaagatggtaaagtccatcccaga

SEQ ID NO: 4187020 - DNA, 25 bp, Homo sapien
cattttcaccattaggtattttttg

SEQ ID NO: 4187021 - DNA, 25 bp, Homo sapien
ctcattttcaccattaggtattttt

SEQ ID NO: 4187022 - DNA, 25 bp, Homo sapien
gtctcattttcaccattaggtattt

SEQ ID NO: 4187023 - DNA, 25 bp, Homo sapien
tgtctcattttcaccattaggtatt

SEQ ID NO: 4187024 - DNA, 25 bp, Homo sapien
ttttttgatgtcaatacaggaatca

SEQ ID NO: 4187025 - DNA, 25 bp, Homo sapien
ttcactgactggtaattcacttgct

SEQ ID NO: 4187026 - DNA, 25 bp, Homo sapien
tttttgatgtcaatacaggaatcat

SEQ ID NO: 4187027 - DNA, 25 bp, Homo sapien
ttggagaatgcttgcaacttcactg

SEQ ID NO: 4187028 - DNA, 25 bp, Homo sapien
tggctactatgctgaatggcacaga

SEQ ID NO: 4187029 - DNA, 25 bp, Homo sapien
tagacagcactgttttatagagtct

SEQ ID NO: 4187030 - DNA, 25 bp, Homo sapien
tgactttacaccatctagtcccttc

SEQ ID NO: 4187031 - DNA, 25 bp, Homo sapien
ctactatgctgaatggcacagaaca

SEQ ID NO: 4187032 - DNA, 25 bp, Homo sapien
catttcaagtcatatagtcatgttt

SEQ ID NO: 4187033 - DNA, 25 bp, Homo sapien
cacatttcaagtcatatagtcatgt

SEQ ID NO: 4187034 - DNA, 25 bp, Homo sapien
gccacatttcaagtcatatagtcat

SEQ ID NO: 4187035 - DNA, 25 bp, Homo sapien
agccacatttcaagtcatatagtca

SEQ ID NO: 4187036 - DNA, 25 bp, Homo sapien
tgtccaatcaggtagccactaagcc

SEQ ID NO: 4187037 - DNA, 25 bp, Homo sapien
tctctgggcctatcaaaaccctggg

SEQ ID NO: 4187038 - DNA, 25 bp, Homo sapien
caaagaacgttcaatgggccataaa

SEQ ID NO: 4187039 - DNA, 25 bp, Homo sapien
caggaagagcctacataagcaatta

SEQ ID NO: 4187040 - DNA, 25 bp, Homo sapien
ctgggaccagaagtgacacatagag

SEQ ID NO: 4187041 - DNA, 25 bp, Homo sapien
tatgagagcaacctatcagtggttg

SEQ ID NO: 4187042 - DNA, 25 bp, Homo sapien
tacaacagtcaaaactagtctatta

SEQ ID NO: 4187043 - DNA, 25 bp, Homo sapien
ccagaagtgacacatagagagggag

SEQ ID NO: 4187044 - DNA, 25 bp, Homo sapien
ggctcgcctatgactaacttcacat

SEQ ID NO: 4187045 - DNA, 25 bp, Homo sapien
ccatgaaaggctcgcctatgactaa

SEQ ID NO: 4187046 - DNA, 25 bp, Homo sapien
aaaggctcgcctatgactaacttca

SEQ ID NO: 4187047 - DNA, 25 bp, Homo sapien
attccagccatgaaaggctcgccta

SEQ ID NO: 4187048 - DNA, 25 bp, Homo sapien
tcctttctccataaacagtatcaca

SEQ ID NO: 4187049 - DNA, 25 bp, Homo sapien
gcaactacataacagaagtccatgt

SEQ ID NO: 4187050 - DNA, 25 bp, Homo sapien
agtaagcaactacataacagaagtc

SEQ ID NO: 4187051 - DNA, 25 bp, Homo sapien
aattacacagtagaagaggaagtaa

SEQ ID NO: 4187052 - DNA, 25 bp, Homo sapien
aacactgatgactgcagaagccaga

SEQ ID NO: 4187053 - DNA, 25 bp, Homo sapien
acactgatgactgcagaagccagaa

SEQ ID NO: 4187054 - DNA, 25 bp, Homo sapien
aagcagcataataaggggattttta

SEQ ID NO: 4187055 - DNA, 25 bp, Homo sapien
ggcatcatcaaactgatgcattaaa

SEQ ID NO: 4187056 - DNA, 25 bp, Homo sapien
caactgtaacaacgataagtattgc

SEQ ID NO: 4187057 - DNA, 25 bp, Homo sapien
aaaggcaactgtaacaacgataagt

SEQ ID NO: 4187058 - DNA, 25 bp, Homo sapien
tctggtggcacaagtttactcaatt

SEQ ID NO: 4187059 - DNA, 25 bp, Homo sapien
tggtggcacaagtttactcaattct

SEQ ID NO: 4187060 - DNA, 25 bp, Homo sapien
ctggtggcacaagtttactcaattc

SEQ ID NO: 4187061 - DNA, 25 bp, Homo sapien
ggtggcacaagtttactcaattctt

SEQ ID NO: 4187062 - DNA, 25 bp, Homo sapien
caagtgtatgctccaattttccttc

SEQ ID NO: 4187063 - DNA, 25 bp, Homo sapien
caggaactctatccccaacagaaag

SEQ ID NO: 4187064 - DNA, 25 bp, Homo sapien
tcagcaggaactctatccccaacag

SEQ ID NO: 4187065 - DNA, 25 bp, Homo sapien
cctggaaccaagtctcgggcaagtg

SEQ ID NO: 4187066 - DNA, 25 bp, Homo sapien
caaatggttcacttctgagcataaa

SEQ ID NO: 4187067 - DNA, 25 bp, Homo sapien
tatataacataatgccaggtagagg

SEQ ID NO: 4187068 - DNA, 25 bp, Homo sapien
tcatacacagtaggataatcagcag

SEQ ID NO: 4187069 - DNA, 25 bp, Homo sapien
tatttattactgcttacaatgtgcc

SEQ ID NO: 4187070 - DNA, 25 bp, Homo sapien
gaggagctgtcaccttagaacaagg

SEQ ID NO: 4187071 - DNA, 25 bp, Homo sapien
caagctggactcatcaatggaaaga

SEQ ID NO: 4187072 - DNA, 25 bp, Homo sapien
gcgttgtctcacctgtcaagctgga

SEQ ID NO: 4187073 - DNA, 25 bp, Homo sapien
catctgaccagtgttcccataaagg

SEQ ID NO: 4187074 - DNA, 25 bp, Homo sapien
ggaactgcttttttcaaatcaggaa

SEQ ID NO: 4187075 - DNA, 25 bp, Homo sapien
taattgagaaaatagtttcaaacaa

SEQ ID NO: 4187076 - DNA, 25 bp, Homo sapien
tgagaaaatagtttcaaacaaagga

SEQ ID NO: 4187077 - DNA, 25 bp, Homo sapien
atagtttcaaacaaaggaactgctt

SEQ ID NO: 4187078 - DNA, 25 bp, Homo sapien
tttctcctgttccaatgacaacacc

SEQ ID NO: 4187079 - DNA, 25 bp, Homo sapien
gaattttctcctgttccaatgacaa

SEQ ID NO: 4187080 - DNA, 25 bp, Homo sapien
ctcttctgcttgcatcattttaaaa

SEQ ID NO: 4187081 - DNA, 25 bp, Homo sapien
cagaattttctcctgttccaatgac

SEQ ID NO: 4187082 - DNA, 25 bp, Homo sapien
ttctctattcatcccttcactgcca

SEQ ID NO: 4187083 - DNA, 25 bp, Homo sapien
tgagttcccactttgcatcgcatac

SEQ ID NO: 4187084 - DNA, 25 bp, Homo sapien
ttggaatgagttcccactttgcatc

SEQ ID NO: 4187085 - DNA, 25 bp, Homo sapien
ctttgcatcgcatactggagttttg

SEQ ID NO: 4187086 - DNA, 25 bp, Homo sapien
ttgttttcctaagaggtccatgctc

SEQ ID NO: 4187087 - DNA, 25 bp, Homo sapien
agttgttttcctaagaggtccatgc

SEQ ID NO: 4187088 - DNA, 25 bp, Homo sapien
gttgttttcctaagaggtccatgct

SEQ ID NO: 4187089 - DNA, 25 bp, Homo sapien
tatgagggcatacacaccagtaaaa

SEQ ID NO: 4187090 - DNA, 25 bp, Homo sapien
tcaaacggaagaagttatgagggca

SEQ ID NO: 4187091 - DNA, 25 bp, Homo sapien
tgctgacccctgatctagctcttga

SEQ ID NO: 4187092 - DNA, 25 bp, Homo sapien
ttatgtccaaaggattataccaggg

SEQ ID NO: 4187093 - DNA, 25 bp, Homo sapien
cttacactaatagtaaacatttcca

SEQ ID NO: 4187094 - DNA, 25 bp, Homo sapien
tccaggatatcttttcccagtaacc

SEQ ID NO: 4187095 - DNA, 25 bp, Homo sapien
gatatcttttcccagtaaccagcca

SEQ ID NO: 4187096 - DNA, 25 bp, Homo sapien
taatagtaaacatttccaggatatc

SEQ ID NO: 4187097 - DNA, 25 bp, Homo sapien
tgccttagcttgagaaaatacttgt

SEQ ID NO: 4187098 - DNA, 25 bp, Homo sapien
ccaaaaagatcctgtggtagaaact

SEQ ID NO: 4187099 - DNA, 25 bp, Homo sapien
gaagtctgatgccagcgtagttacc

SEQ ID NO: 4187100 - DNA, 25 bp, Homo sapien
cgtagttacccttcctttgtagatg

SEQ ID NO: 4187101 - DNA, 25 bp, Homo sapien
cactgctatgattaagggatcccct

SEQ ID NO: 4187102 - DNA, 25 bp, Homo sapien
tatgcctacaacagaggtctaccag

SEQ ID NO: 4187103 - DNA, 25 bp, Homo sapien
aattggaccaatcctttggctaggc

SEQ ID NO: 4187104 - DNA, 25 bp, Homo sapien
taaaatctctctggactaggaaagt

SEQ ID NO: 4187105 - DNA, 25 bp, Homo sapien
aaatagggtcatgcattcgtttagc

SEQ ID NO: 4187106 - DNA, 25 bp, Homo sapien
taacaggcgctagcttattaatcta

SEQ ID NO: 4187107 - DNA, 25 bp, Homo sapien
gatggctcccaattgtgttgaaaag

SEQ ID NO: 4187108 - DNA, 25 bp, Homo sapien
tacatgatagagtccttgctgcaga

SEQ ID NO: 4187109 - DNA, 25 bp, Homo sapien
ttcaccattctcataacaccaagag

SEQ ID NO: 4187110 - DNA, 25 bp, Homo sapien
cagagtttcaacaataggcagcttt

SEQ ID NO: 4187111 - DNA, 25 bp, Homo sapien
caatggggagaccttcaggaattgc

SEQ ID NO: 4187112 - DNA, 25 bp, Homo sapien
gctagcgtcactgtgaccacaatgg

SEQ ID NO: 4187113 - DNA, 25 bp, Homo sapien
gaagtaaatatgtgagtaacagtca

SEQ ID NO: 4187114 - DNA, 25 bp, Homo sapien
ttcattcttcgtcagtgttccagtt

SEQ ID NO: 4187115 - DNA, 25 bp, Homo sapien
tcatttcattcttcgtcagtgttcc

SEQ ID NO: 4187116 - DNA, 25 bp, Homo sapien
ctgaagtaaatatgtgagtaacagt

SEQ ID NO: 4187117 - DNA, 25 bp, Homo sapien
ccccaaattgattatagccaactcc

SEQ ID NO: 4187118 - DNA, 25 bp, Homo sapien
tcaccatcaacaatcacttccccaa

SEQ ID NO: 4187119 - DNA, 25 bp, Homo sapien
ctgctaacagctgggttatagaatc

SEQ ID NO: 4187120 - DNA, 25 bp, Homo sapien
acttccccaaattgattatagccaa

SEQ ID NO: 4187121 - DNA, 25 bp, Homo sapien
tgcaagagcaattaaggccccttct

SEQ ID NO: 4187122 - DNA, 25 bp, Homo sapien
agcaattaaggccccttctgttggc

SEQ ID NO: 4187123 - DNA, 25 bp, Homo sapien
aagagcaattaaggccccttctgtt

SEQ ID NO: 4187124 - DNA, 25 bp, Homo sapien
gcaagagcaattaaggccccttctg

SEQ ID NO: 4187125 - DNA, 25 bp, Homo sapien
taatagcgtttgcatcaatatcaaa

SEQ ID NO: 4187126 - DNA, 25 bp, Homo sapien
gaatactaccagtcatgttgttgtt

SEQ ID NO: 4187127 - DNA, 25 bp, Homo sapien
tttccctcctaatagcgtttgcatc

SEQ ID NO: 4187128 - DNA, 25 bp, Homo sapien
cctgaatactaccagtcatgttgtt

SEQ ID NO: 4187129 - DNA, 25 bp, Homo sapien
cacttaacagccatccacttttgct

SEQ ID NO: 4187130 - DNA, 25 bp, Homo sapien
ggtattcagcttttctgatgtagtc

SEQ ID NO: 4187131 - DNA, 25 bp, Homo sapien
tgctcagagctaaaagggtattcag

SEQ ID NO: 4187132 - DNA, 25 bp, Homo sapien
gctgtgttcggtgtacacacttaac

SEQ ID NO: 4187133 - DNA, 25 bp, Homo sapien
ttggtgggccactttattctagatg

SEQ ID NO: 4187134 - DNA, 25 bp, Homo sapien
tcttcctattacctattcctattac

SEQ ID NO: 4187135 - DNA, 25 bp, Homo sapien
tccagcattagttgataaaatcttc

SEQ ID NO: 4187136 - DNA, 25 bp, Homo sapien
gggtaattactggatcttctgtatt

SEQ ID NO: 4187137 - DNA, 25 bp, Homo sapien
tagccatctatgttaccggatcgaa

SEQ ID NO: 4187138 - DNA, 25 bp, Homo sapien
gtttctgttacttagcagcagtcca

SEQ ID NO: 4187139 - DNA, 25 bp, Homo sapien
tgtaccactggtatctaggaacaac

SEQ ID NO: 4187140 - DNA, 25 bp, Homo sapien
tctgagtatggtgatgaaatcccac

SEQ ID NO: 4187141 - DNA, 25 bp, Homo sapien
gaatgtatttccctattgccgtcct

SEQ ID NO: 4187142 - DNA, 25 bp, Homo sapien
tctttgctgctaagccaagtgtggt

SEQ ID NO: 4187143 - DNA, 25 bp, Homo sapien
tgttcaacgcttctcaccactagtc

SEQ ID NO: 4187144 - DNA, 25 bp, Homo sapien
cactccacaacggtcaggtatgact

SEQ ID NO: 4187145 - DNA, 25 bp, Homo sapien
catgcgtgccttctcttgttggtac

SEQ ID NO: 4187146 - DNA, 25 bp, Homo sapien
tacttgttcgtaagcacctttcata

SEQ ID NO: 4187147 - DNA, 25 bp, Homo sapien
tgagtaagtgtcaaggtctgccctt

SEQ ID NO: 4187148 - DNA, 25 bp, Homo sapien
tctgagtcccgctgagcccatgcgt

SEQ ID NO: 4187149 - DNA, 25 bp, Homo sapien
ccagaaattgtagtgcttagactcc

SEQ ID NO: 4187150 - DNA, 25 bp, Homo sapien
gaatcaggttaggacaccaaccacc

SEQ ID NO: 4187151 - DNA, 25 bp, Homo sapien
gccagatgactatccagaaggtaag

SEQ ID NO: 4187152 - DNA, 25 bp, Homo sapien
gacatccctaggagaggtggcctaa

SEQ ID NO: 4187153 - DNA, 25 bp, Homo sapien
cactcttttaatgctttattaatag

SEQ ID NO: 4187154 - DNA, 25 bp, Homo sapien
tttctccactcttttaatgctttat

SEQ ID NO: 4187155 - DNA, 25 bp, Homo sapien
ctccactcttttaatgctttattaa

SEQ ID NO: 4187156 - DNA, 25 bp, Homo sapien
ttttctccactcttttaatgcttta

SEQ ID NO: 4187157 - DNA, 25 bp, Homo sapien
ggatcaatgattcccaccaagccaa

SEQ ID NO: 4187158 - DNA, 25 bp, Homo sapien
tcaggaccagaagccaaagcaagaa

SEQ ID NO: 4187159 - DNA, 25 bp, Homo sapien
tattgatactcctgaggcaatgagt

SEQ ID NO: 4187160 - DNA, 25 bp, Homo sapien
acaccagttctaggtggatcaatga

SEQ ID NO: 4187161 - DNA, 25 bp, Homo sapien
taggccaatcaggttctgctcagca

SEQ ID NO: 4187162 - DNA, 25 bp, Homo sapien
tagtttgaaactcctggactagccc

SEQ ID NO: 4187163 - DNA, 25 bp, Homo sapien
ttaagtacagtgtccgaagccagac

SEQ ID NO: 4187164 - DNA, 25 bp, Homo sapien
gctcagcagctgaaatgtaacgaag

SEQ ID NO: 4187165 - DNA, 25 bp, Homo sapien
gaagttttggaatacaatcccagac

SEQ ID NO: 4187166 - DNA, 25 bp, Homo sapien
tttggaatacaatcccagacgactg

SEQ ID NO: 4187167 - DNA, 25 bp, Homo sapien
ttggaatacaatcccagacgactgg

SEQ ID NO: 4187168 - DNA, 25 bp, Homo sapien
gttttggaatacaatcccagacgac

SEQ ID NO: 4187169 - DNA, 25 bp, Homo sapien
cacaattagcaaccacagtgatagg

SEQ ID NO: 4187170 - DNA, 25 bp, Homo sapien
tacagttcatatgctcataacagtc

SEQ ID NO: 4187171 - DNA, 25 bp, Homo sapien
cactggaagcgtaagttatagagac

SEQ ID NO: 4187172 - DNA, 25 bp, Homo sapien
gtatttcacctttgcatcatttcca

SEQ ID NO: 4187173 - DNA, 25 bp, Homo sapien
tgatgcctagatgttggagcacccc

SEQ ID NO: 4187174 - DNA, 25 bp, Homo sapien
taacgtagctgattagtccctcctg

SEQ ID NO: 4187175 - DNA, 25 bp, Homo sapien
cagtcaatttgcaacacagtagcca

SEQ ID NO: 4187176 - DNA, 25 bp, Homo sapien
tcaggtgagcatacccaggcacatg

SEQ ID NO: 4187177 - DNA, 25 bp, Homo sapien
ataattttcatcttgtgccttgggc

SEQ ID NO: 4187178 - DNA, 25 bp, Homo sapien
aataattttcatcttgtgccttggg

SEQ ID NO: 4187179 - DNA, 25 bp, Homo sapien
taataattttcatcttgtgccttgg

SEQ ID NO: 4187180 - DNA, 25 bp, Homo sapien
tgccttgggctagctctgtaaaata

SEQ ID NO: 4187181 - DNA, 25 bp, Homo sapien
ttgcaaacatctgtaccagtctggc

SEQ ID NO: 4187182 - DNA, 25 bp, Homo sapien
tcctgtcatggctacaactgaaccg

SEQ ID NO: 4187183 - DNA, 25 bp, Homo sapien
caactgaaccgttcttctgtagcga

SEQ ID NO: 4187184 - DNA, 25 bp, Homo sapien
ttatggtttgaaaatcatcatccac

SEQ ID NO: 4187185 - DNA, 25 bp, Homo sapien
ataggataattaccctagaaaagtg

SEQ ID NO: 4187186 - DNA, 25 bp, Homo sapien
tgccatttactatgcctgttccagc

SEQ ID NO: 4187187 - DNA, 25 bp, Homo sapien
cagttgaattctctaggggtggggg

SEQ ID NO: 4187188 - DNA, 25 bp, Homo sapien
gcctgttccagccacacaaatcatc

SEQ ID NO: 4187189 - DNA, 25 bp, Homo sapien
cagctggaatctaacgaaattttta

SEQ ID NO: 4187190 - DNA, 25 bp, Homo sapien
ctggaatctaacgaaatttttaatg

SEQ ID NO: 4187191 - DNA, 25 bp, Homo sapien
ccctttaccctcttcgattgcagac

SEQ ID NO: 4187192 - DNA, 25 bp, Homo sapien
gctcagctggaatctaacgaaattt

SEQ ID NO: 4187193 - DNA, 25 bp, Homo sapien
ttacatctgcatgatagtttcaaca

SEQ ID NO: 4187194 - DNA, 25 bp, Homo sapien
aaagataccaagaggaaacaatgag

SEQ ID NO: 4187195 - DNA, 25 bp, Homo sapien
tggtaactgttctttgactacacaa

SEQ ID NO: 4187196 - DNA, 25 bp, Homo sapien
tatgcttttaaaggaagactgtttc

SEQ ID NO: 4187197 - DNA, 25 bp, Homo sapien
ccaatgagattaaagttaatgctgc

SEQ ID NO: 4187198 - DNA, 25 bp, Homo sapien
cattgagaggattaggaaagttcat

SEQ ID NO: 4187199 - DNA, 25 bp, Homo sapien
taatgtagccaatgagattaaagtt

SEQ ID NO: 4187200 - DNA, 25 bp, Homo sapien
catggcattgagaggattaggaaag

SEQ ID NO: 4187201 - DNA, 25 bp, Homo sapien
ctgggggtccatccataataatatt

SEQ ID NO: 4187202 - DNA, 25 bp, Homo sapien
ccataataatattgatccacaaaat

SEQ ID NO: 4187203 - DNA, 25 bp, Homo sapien
gggtccatccataataatattgatc

SEQ ID NO: 4187204 - DNA, 25 bp, Homo sapien
tctgagctgggggtccatccataat

SEQ ID NO: 4187205 - DNA, 25 bp, Homo sapien
tttatccactggttctactccaagg

SEQ ID NO: 4187206 - DNA, 25 bp, Homo sapien
ctgtctttccagttgcgaggaggtt

SEQ ID NO: 4187207 - DNA, 25 bp, Homo sapien
ggtttacgaatgacatctttatcca

SEQ ID NO: 4187208 - DNA, 25 bp, Homo sapien
tgcgaggaggtttacgaatgacatc

SEQ ID NO: 4187209 - DNA, 25 bp, Homo sapien
cattgttgtgtctcgaggtgtaatc

SEQ ID NO: 4187210 - DNA, 25 bp, Homo sapien
aacacaaagcatgtgaaggtcattg

SEQ ID NO: 4187211 - DNA, 25 bp, Homo sapien
gaacttagtgcattgaacatgtcaa

SEQ ID NO: 4187212 - DNA, 25 bp, Homo sapien
tgggatctggaacttagtgcattga

SEQ ID NO: 4187213 - DNA, 25 bp, Homo sapien
gatggatccaagaactgcatagcaa

SEQ ID NO: 4187214 - DNA, 25 bp, Homo sapien
gcttaggctctcagtctgaaaaacc

SEQ ID NO: 4187215 - DNA, 25 bp, Homo sapien
taactagtaattgtcccatgatgga

SEQ ID NO: 4187216 - DNA, 25 bp, Homo sapien
tctgaagcggaggaaagtaaataac

SEQ ID NO: 4187217 - DNA, 25 bp, Homo sapien
cttcatacaagatggcatagtacat

SEQ ID NO: 4187218 - DNA, 25 bp, Homo sapien
taggagagtaattcccctgagcttc

SEQ ID NO: 4187219 - DNA, 25 bp, Homo sapien
aacattctgctatttggtcagactg

SEQ ID NO: 4187220 - DNA, 25 bp, Homo sapien
taactttaaagaagagagcaacttg

SEQ ID NO: 4187221 - DNA, 25 bp, Homo sapien
tgatgaggtgagacccaaaagaaac

SEQ ID NO: 4187222 - DNA, 25 bp, Homo sapien
ctgatgaggtgagacccaaaagaaa

SEQ ID NO: 4187223 - DNA, 25 bp, Homo sapien
ctttataatttctgccactatgcac

SEQ ID NO: 4187224 - DNA, 25 bp, Homo sapien
tttataatttctgccactatgcaca

SEQ ID NO: 4187225 - DNA, 25 bp, Homo sapien
gaaaagatgatgatgtcgaactaac

SEQ ID NO: 4187226 - DNA, 25 bp, Homo sapien
gtttgcaaataaaataatgcaatat

SEQ ID NO: 4187227 - DNA, 25 bp, Homo sapien
ttgcaaataaaataatgcaatatgc

SEQ ID NO: 4187228 - DNA, 25 bp, Homo sapien
ctagtttgcaaataaaataatgcaa

SEQ ID NO: 4187229 - DNA, 25 bp, Homo sapien
tgcaaataaaataatgcaatatgca

SEQ ID NO: 4187230 - DNA, 25 bp, Homo sapien
tgtattagtaagaaagccccaccac

SEQ ID NO: 4187231 - DNA, 25 bp, Homo sapien
acttgcccttctaaatgatcctcag

SEQ ID NO: 4187232 - DNA, 25 bp, Homo sapien
gactgccagcaggttaaagtcttaa

SEQ ID NO: 4187233 - DNA, 25 bp, Homo sapien
taagtgcagaaggtggttcaggttt

SEQ ID NO: 4187234 - DNA, 25 bp, Homo sapien
cagtgatctgacagtggtcacatcc

SEQ ID NO: 4187235 - DNA, 25 bp, Homo sapien
tgtagtataggcttttcaatcacaa

SEQ ID NO: 4187236 - DNA, 25 bp, Homo sapien
gaaatatggcactcctgggaatcaa

SEQ ID NO: 4187237 - DNA, 25 bp, Homo sapien
cacatcctgtgcaaaaaacttgata

SEQ ID NO: 4187238 - DNA, 25 bp, Homo sapien
tatggacactgttaccctagaacac

SEQ ID NO: 4187239 - DNA, 25 bp, Homo sapien
tgcatgaattctgccaaaccaaaga

SEQ ID NO: 4187240 - DNA, 25 bp, Homo sapien
gaacaccacttgatagccctgcatg

SEQ ID NO: 4187241 - DNA, 25 bp, Homo sapien
tgtttttgactctatgactaagcgt

SEQ ID NO: 4187242 - DNA, 25 bp, Homo sapien
taaaagctaaggagtggttcatcct

SEQ ID NO: 4187243 - DNA, 25 bp, Homo sapien
ctatttccctagcatgcccaatgaa

SEQ ID NO: 4187244 - DNA, 25 bp, Homo sapien
caggtttgtgctaaaatctaggcca

SEQ ID NO: 4187245 - DNA, 25 bp, Homo sapien
tctaggccaaagaagcttcagatgc

SEQ ID NO: 4187246 - DNA, 25 bp, Homo sapien
aatgctaatagtccccactgggatg

SEQ ID NO: 4187247 - DNA, 25 bp, Homo sapien
tcagcatccatatggataattttaa

SEQ ID NO: 4187248 - DNA, 25 bp, Homo sapien
ttcagcatccatatggataatttta

SEQ ID NO: 4187249 - DNA, 25 bp, Homo sapien
aaataatagctccatgtgggtgagt

SEQ ID NO: 4187250 - DNA, 25 bp, Homo sapien
gatgcatcaccacgctctacagatt

SEQ ID NO: 4187251 - DNA, 25 bp, Homo sapien
gcctggccatagtttctacaccaaa

SEQ ID NO: 4187252 - DNA, 25 bp, Homo sapien
gctgatgcatggaccatccaaccat

SEQ ID NO: 4187253 - DNA, 25 bp, Homo sapien
taggaacacctgtgtagaagcagaa

SEQ ID NO: 4187254 - DNA, 25 bp, Homo sapien
aaagcactttttgagacacctggac

SEQ ID NO: 4187255 - DNA, 25 bp, Homo sapien
gataaagaccatagctaaaaagccc

SEQ ID NO: 4187256 - DNA, 25 bp, Homo sapien
gacctggcttttgacctggctttaa

SEQ ID NO: 4187257 - DNA, 25 bp, Homo sapien
gaaaatactgccaaatagaggctgc

SEQ ID NO: 4187258 - DNA, 25 bp, Homo sapien
tacccagagttctgaaagtgccggc

SEQ ID NO: 4187259 - DNA, 25 bp, Homo sapien
tcaggaatagccctaaaggtagctt

SEQ ID NO: 4187260 - DNA, 25 bp, Homo sapien
aagtgccggccagttccaaatgaga

SEQ ID NO: 4187261 - DNA, 25 bp, Homo sapien
taactcggtaagcaccatgggaaac

SEQ ID NO: 4187262 - DNA, 25 bp, Homo sapien
gaccatgacaggattgaagagcact

SEQ ID NO: 4187263 - DNA, 25 bp, Homo sapien
tacagtggaagcctggtgcacggac

SEQ ID NO: 4187264 - DNA, 25 bp, Homo sapien
gactaattggcctttgacccctgga

SEQ ID NO: 4187265 - DNA, 25 bp, Homo sapien
ccagctgctgtccactcctctccca

SEQ ID NO: 4187266 - DNA, 25 bp, Homo sapien
gctgctgtccactcctctcccagag

SEQ ID NO: 4187267 - DNA, 25 bp, Homo sapien
tcaaccagctgctgtccactcctct

SEQ ID NO: 4187268 - DNA, 25 bp, Homo sapien
aaccagctgctgtccactcctctcc

SEQ ID NO: 4187269 - DNA, 25 bp, Homo sapien
acatcttctgtcagtggcagtcctg

SEQ ID NO: 4187270 - DNA, 25 bp, Homo sapien
tctgtcagtggcagtcctgtctcca

SEQ ID NO: 4187271 - DNA, 25 bp, Homo sapien
tcctgtctccagatggggatgtatc

SEQ ID NO: 4187272 - DNA, 25 bp, Homo sapien
ttagacacagctcacatcttctgtc

SEQ ID NO: 4187273 - DNA, 25 bp, Homo sapien
catgtttatggtcaggtagtagacc

SEQ ID NO: 4187274 - DNA, 25 bp, Homo sapien
aagatggtgctaagatgttgtatgc

SEQ ID NO: 4187275 - DNA, 25 bp, Homo sapien
cagagttccaaagagtgaaggcgca

SEQ ID NO: 4187276 - DNA, 25 bp, Homo sapien
gggtttagagaattcaaatgcagac

SEQ ID NO: 4187277 - DNA, 25 bp, Homo sapien
acttcactgaagttgcccattgctg

SEQ ID NO: 4187278 - DNA, 25 bp, Homo sapien
gaaaccctgaaggtgaaacagacca

SEQ ID NO: 4187279 - DNA, 25 bp, Homo sapien
gcacagcagcaacgtcatcacaaga

SEQ ID NO: 4187280 - DNA, 25 bp, Homo sapien
gattgccataatcaacagccctggt

SEQ ID NO: 4187281 - DNA, 25 bp, Homo sapien
tgtgtgcagacactaggaatacaac

SEQ ID NO: 4187282 - DNA, 25 bp, Homo sapien
atattcctgagtgcatgacctgtaa

SEQ ID NO: 4187283 - DNA, 25 bp, Homo sapien
ggttaatatctttagtctcagctgt

SEQ ID NO: 4187284 - DNA, 25 bp, Homo sapien
tacaaggtcttggtaattcattaag

SEQ ID NO: 4187285 - DNA, 25 bp, Homo sapien
gcaaggtctatacatccatgcaaag

SEQ ID NO: 4187286 - DNA, 25 bp, Homo sapien
gtaaagtgcccaaataatcgtacag

SEQ ID NO: 4187287 - DNA, 25 bp, Homo sapien
tcaatgtatccataacccctaaagt

SEQ ID NO: 4187288 - DNA, 25 bp, Homo sapien
tctactcaagcataaatggtgctgt

SEQ ID NO: 4187289 - DNA, 25 bp, Homo sapien
gacatcctggaatgcattgcctcct

SEQ ID NO: 4187290 - DNA, 25 bp, Homo sapien
tcattgatgcagtagaactggccaa

SEQ ID NO: 4187291 - DNA, 25 bp, Homo sapien
tggccaaggatcattctgacttaag

SEQ ID NO: 4187292 - DNA, 25 bp, Homo sapien
acagaatatctcagcccatcaggca

SEQ ID NO: 4187293 - DNA, 25 bp, Homo sapien
aaaattgtcattgatggttatgctc

SEQ ID NO: 4187294 - DNA, 25 bp, Homo sapien
tgtcatcatgggtatccgaggacta

SEQ ID NO: 4187295 - DNA, 25 bp, Homo sapien
tgaagttgcgggacacaaaaattgt

SEQ ID NO: 4187296 - DNA, 25 bp, Homo sapien
gttatgctcttttccaccgtctttg

SEQ ID NO: 4187297 - DNA, 25 bp, Homo sapien
gagacttccgattcccgctcttgag

SEQ ID NO: 4187298 - DNA, 25 bp, Homo sapien
gattggactctcacgtgcaggagcc

SEQ ID NO: 4187299 - DNA, 25 bp, Homo sapien
cagccatttcggaacgtacgtccca

SEQ ID NO: 4187300 - DNA, 25 bp, Homo sapien
tttagctacttagcgcctctgggcc

SEQ ID NO: 4187301 - DNA, 25 bp, Homo sapien
tgttcgccgacccaagtaggcggag

SEQ ID NO: 4187302 - DNA, 25 bp, Homo sapien
gcaccaaggcggaagtgttcgccga

SEQ ID NO: 4187303 - DNA, 25 bp, Homo sapien
ctttccctgtcgtggtcggagcggc

SEQ ID NO: 4187304 - DNA, 25 bp, Homo sapien
tgcccaagtcttgcgggtaatcggg

SEQ ID NO: 4187305 - DNA, 25 bp, Homo sapien
taaacctacccaagaatgtgtcgca

SEQ ID NO: 4187306 - DNA, 25 bp, Homo sapien
taaaggacagtctaaacccagcagt

SEQ ID NO: 4187307 - DNA, 25 bp, Homo sapien
catggcgtcctagagattcggaacc

SEQ ID NO: 4187308 - DNA, 25 bp, Homo sapien
cagcccgggcagcttgaaaccatta

SEQ ID NO: 4187309 - DNA, 25 bp, Homo sapien
ccagctgaaaagggtccttcaggtc

SEQ ID NO: 4187310 - DNA, 25 bp, Homo sapien
cagctgaaaagggtccttcaggtca

SEQ ID NO: 4187311 - DNA, 25 bp, Homo sapien
gctgaaaagggtccttcaggtcact

SEQ ID NO: 4187312 - DNA, 25 bp, Homo sapien
tgaaaagggtccttcaggtcactca

SEQ ID NO: 4187313 - DNA, 25 bp, Homo sapien
tgaaaagttaaaagatcaggtctaa

SEQ ID NO: 4187314 - DNA, 25 bp, Homo sapien
ttaaagatgaaaagttaaaagatca

SEQ ID NO: 4187315 - DNA, 25 bp, Homo sapien
gatgaaaagttaaaagatcaggtct

SEQ ID NO: 4187316 - DNA, 25 bp, Homo sapien
aagatgaaaagttaaaagatcaggt

SEQ ID NO: 4187317 - DNA, 25 bp, Homo sapien
taacattccagtctcctaagaaatg

SEQ ID NO: 4187318 - DNA, 25 bp, Homo sapien
cagtctcctaagaaatggtcaaatt

SEQ ID NO: 4187319 - DNA, 25 bp, Homo sapien
tccagtctcctaagaaatggtcaaa

SEQ ID NO: 4187320 - DNA, 25 bp, Homo sapien
cattccagtctcctaagaaatggtc

SEQ ID NO: 4187321 - DNA, 25 bp, Homo sapien
caatcaaggtctttggataagtgga

SEQ ID NO: 4187322 - DNA, 25 bp, Homo sapien
cttgcaatcaaggtctttggataag

SEQ ID NO: 4187323 - DNA, 25 bp, Homo sapien
acttagctgcctcttggaatttcag

SEQ ID NO: 4187324 - DNA, 25 bp, Homo sapien
actcacacacttagctgcctcttgg

SEQ ID NO: 4187325 - DNA, 25 bp, Homo sapien
cctctcctcgtttggctttcttgtc

SEQ ID NO: 4187326 - DNA, 25 bp, Homo sapien
aattcctctcctcgtttggctttct

SEQ ID NO: 4187327 - DNA, 25 bp, Homo sapien
tagacagttccaaaacttccactgc

SEQ ID NO: 4187328 - DNA, 25 bp, Homo sapien
gtctgaaaccagatagacagttcca

SEQ ID NO: 4187329 - DNA, 25 bp, Homo sapien
ggaatttgtctaagggagtagctgc

SEQ ID NO: 4187330 - DNA, 25 bp, Homo sapien
tacacaggaactgatgttagcaaac

SEQ ID NO: 4187331 - DNA, 25 bp, Homo sapien
gaatgtggctaactggagaatatgg

SEQ ID NO: 4187332 - DNA, 25 bp, Homo sapien
cctagctttagcagtccattgtggc

SEQ ID NO: 4187333 - DNA, 25 bp, Homo sapien
atgagctcaaaaagttaagggtgta

SEQ ID NO: 4187334 - DNA, 25 bp, Homo sapien
tgagctcaaaaagttaagggtgtat

SEQ ID NO: 4187335 - DNA, 25 bp, Homo sapien
cagcggctttgtggcactgcagtag

SEQ ID NO: 4187336 - DNA, 25 bp, Homo sapien
gaatgggatccgctgagcaagacct

SEQ ID NO: 4187337 - DNA, 25 bp, Homo sapien
aatgggatccgctgagcaagacctc

SEQ ID NO: 4187338 - DNA, 25 bp, Homo sapien
gctacagcggctttgtggcactgca

SEQ ID NO: 4187339 - DNA, 25 bp, Homo sapien
atcctttgttttgagcctatgtttg

SEQ ID NO: 4187340 - DNA, 25 bp, Homo sapien
tggtaaatagtcctccatcctttgt

SEQ ID NO: 4187341 - DNA, 25 bp, Homo sapien
gcagtttctccatagtgttgatggt

SEQ ID NO: 4187342 - DNA, 25 bp, Homo sapien
tgtccatttgttgatgcagtttctc

SEQ ID NO: 4187343 - DNA, 25 bp, Homo sapien
cctgatgatctgttggatattcata

SEQ ID NO: 4187344 - DNA, 25 bp, Homo sapien
tctgttggatattcataagtggcaa

SEQ ID NO: 4187345 - DNA, 25 bp, Homo sapien
tcataagtggcaaaatgattccacc

SEQ ID NO: 4187346 - DNA, 25 bp, Homo sapien
tttcgttgtaataaagaattatgaa

SEQ ID NO: 4187347 - DNA, 25 bp, Homo sapien
agtcaggctacagtaatgagagggc

SEQ ID NO: 4187348 - DNA, 25 bp, Homo sapien
tgaaaattactccacaacactgtag

SEQ ID NO: 4187349 - DNA, 25 bp, Homo sapien
ggttctccggttcagatcacaaggt

SEQ ID NO: 4187350 - DNA, 25 bp, Homo sapien
tgtcaccctaaatcgtgttccttgg

SEQ ID NO: 4187351 - DNA, 25 bp, Homo sapien
ggctaccacagtgtgcaaatttgtc

SEQ ID NO: 4187352 - DNA, 25 bp, Homo sapien
cacagtgtgcaaatttgtcaaaact

SEQ ID NO: 4187353 - DNA, 25 bp, Homo sapien
ctggtggtggctaccacagtgtgca

SEQ ID NO: 4187354 - DNA, 25 bp, Homo sapien
ggtggctaccacagtgtgcaaattt

SEQ ID NO: 4187355 - DNA, 25 bp, Homo sapien
agctgggccaacactgccctgagat

SEQ ID NO: 4187356 - DNA, 25 bp, Homo sapien
gccaacactgccctgagatcccttt

SEQ ID NO: 4187357 - DNA, 25 bp, Homo sapien
tgccctgagatccctttacttccat

SEQ ID NO: 4187358 - DNA, 25 bp, Homo sapien
caacactgccctgagatccctttac

SEQ ID NO: 4187359 - DNA, 25 bp, Homo sapien
gagttactctatgatttcctcaagc

SEQ ID NO: 4187360 - DNA, 25 bp, Homo sapien
aactggaccctatctatcgggactg

SEQ ID NO: 4187361 - DNA, 25 bp, Homo sapien
tgctaggtcatacgggtaattttac

SEQ ID NO: 4187362 - DNA, 25 bp, Homo sapien
taagcctccagttcaaggtattcta

SEQ ID NO: 4187363 - DNA, 25 bp, Homo sapien
gtttattcccaagcctgctaatgcc

SEQ ID NO: 4187364 - DNA, 25 bp, Homo sapien
tcatttggatttagttctccaacag

SEQ ID NO: 4187365 - DNA, 25 bp, Homo sapien
gcatggaacttgacaatggctgggt

SEQ ID NO: 4187366 - DNA, 25 bp, Homo sapien
cacagtactccgtgataatgcagaa

SEQ ID NO: 4187367 - DNA, 25 bp, Homo sapien
gaggagttgggcttccaaattggcc

SEQ ID NO: 4187368 - DNA, 25 bp, Homo sapien
cattcagcaagtttttataaagact

SEQ ID NO: 4187369 - DNA, 25 bp, Homo sapien
tataaagacttccaagagaaaagga

SEQ ID NO: 4187370 - DNA, 25 bp, Homo sapien
ttcagcaagtttttataaagacttc

SEQ ID NO: 4187371 - DNA, 25 bp, Homo sapien
cagcaagtttttataaagacttcca

SEQ ID NO: 4187372 - DNA, 25 bp, Homo sapien
tgcccaggaaaatcagagggccccg

SEQ ID NO: 4187373 - DNA, 25 bp, Homo sapien
tgaggtgtggacagccccaatgtgt

SEQ ID NO: 4187374 - DNA, 25 bp, Homo sapien
gcttagttccttcaatcagcagcaa

SEQ ID NO: 4187375 - DNA, 25 bp, Homo sapien
cccaatgtgtggatgcctgatttga

SEQ ID NO: 4187376 - DNA, 25 bp, Homo sapien
tccagtggtagaggcgctcatttca

SEQ ID NO: 4187377 - DNA, 25 bp, Homo sapien
taacagtagctaaaaggttatcatg

SEQ ID NO: 4187378 - DNA, 25 bp, Homo sapien
aaaggttatcatgaaatgtgtttgc

SEQ ID NO: 4187379 - DNA, 25 bp, Homo sapien
gctttatggaatactcctggagaaa

SEQ ID NO: 4187380 - DNA, 25 bp, Homo sapien
gaattttatcgtccagatctcggcc

SEQ ID NO: 4187381 - DNA, 25 bp, Homo sapien
ttttccagcttgtttatattcctga

SEQ ID NO: 4187382 - DNA, 25 bp, Homo sapien
gcagcagctggataaaccattctat

SEQ ID NO: 4187383 - DNA, 25 bp, Homo sapien
gcatgtagtcaactcccagcagcag

SEQ ID NO: 4187384 - DNA, 25 bp, Homo sapien
gaaccttcccaatagaactactcat

SEQ ID NO: 4187385 - DNA, 25 bp, Homo sapien
agaaccttcccaatagaactactca

SEQ ID NO: 4187386 - DNA, 25 bp, Homo sapien
caagaaccttcccaatagaactact

SEQ ID NO: 4187387 - DNA, 25 bp, Homo sapien
acaatacctcgccaagctggctggg

SEQ ID NO: 4187388 - DNA, 25 bp, Homo sapien
gccgtcttggagtaagtgcccagcc

SEQ ID NO: 4187389 - DNA, 25 bp, Homo sapien
atgaggaagccgtcttggagtaagt

SEQ ID NO: 4187390 - DNA, 25 bp, Homo sapien
ttttagccactctaccacaatacct

SEQ ID NO: 4187391 - DNA, 25 bp, Homo sapien
ctttaagtctcgatgaagtatcctc

SEQ ID NO: 4187392 - DNA, 25 bp, Homo sapien
tctttgactttaagtctcgatgaag

SEQ ID NO: 4187393 - DNA, 25 bp, Homo sapien
gactttaagtctcgatgaagtatcc

SEQ ID NO: 4187394 - DNA, 25 bp, Homo sapien
tttgactttaagtctcgatgaagta

SEQ ID NO: 4187395 - DNA, 25 bp, Homo sapien
cttccccaagtacaccctatatgat

SEQ ID NO: 4187396 - DNA, 25 bp, Homo sapien
ctaactagttgcacacttttattcc

SEQ ID NO: 4187397 - DNA, 25 bp, Homo sapien
cctatatgatgattagatgatccag

SEQ ID NO: 4187398 - DNA, 25 bp, Homo sapien
actagttgcacacttttattccttc

SEQ ID NO: 4187399 - DNA, 25 bp, Homo sapien
cagttaaagttgtggccaggtcaca

SEQ ID NO: 4187400 - DNA, 25 bp, Homo sapien
caggtcacaggatcccattagaagt

SEQ ID NO: 4187401 - DNA, 25 bp, Homo sapien
cagagcctcaggactcatataatgg

SEQ ID NO: 4187402 - DNA, 25 bp, Homo sapien
catagccttggtgtttcagagcctc

SEQ ID NO: 4187403 - DNA, 25 bp, Homo sapien
cagaaatattcatgtcaaagggata

SEQ ID NO: 4187404 - DNA, 25 bp, Homo sapien
aagaactttcccttgtgattcagga

SEQ ID NO: 4187405 - DNA, 25 bp, Homo sapien
tgaatgtatgcagtaagtaaatgag

SEQ ID NO: 4187406 - DNA, 25 bp, Homo sapien
tatttaataggttaacagaaatgta

SEQ ID NO: 4187407 - DNA, 25 bp, Homo sapien
cattcctttgaggacagaaaccttc

SEQ ID NO: 4187408 - DNA, 25 bp, Homo sapien
ctttgaggacagaaaccttcatgtc

SEQ ID NO: 4187409 - DNA, 25 bp, Homo sapien
tcctttgaggacagaaaccttcatg

SEQ ID NO: 4187410 - DNA, 25 bp, Homo sapien
attcctttgaggacagaaaccttca

SEQ ID NO: 4187411 - DNA, 25 bp, Homo sapien
ggtgtgtcaccttcaacaattttta

SEQ ID NO: 4187412 - DNA, 25 bp, Homo sapien
tcttttggatatctctcagggagag

SEQ ID NO: 4187413 - DNA, 25 bp, Homo sapien
gagccagcgaatgcatgattcatgc

SEQ ID NO: 4187414 - DNA, 25 bp, Homo sapien
tgattcatgcagcacatctcataca

SEQ ID NO: 4187415 - DNA, 25 bp, Homo sapien
ttttaaaatttcgatagcagatggt

SEQ ID NO: 4187416 - DNA, 25 bp, Homo sapien
taaaatttcgatagcagatggtctt

SEQ ID NO: 4187417 - DNA, 25 bp, Homo sapien
aaatttcgatagcagatggtcttaa

SEQ ID NO: 4187418 - DNA, 25 bp, Homo sapien
tttaaaatttcgatagcagatggtc

SEQ ID NO: 4187419 - DNA, 25 bp, Homo sapien
gagacacagcctctatgtcaaattt

SEQ ID NO: 4187420 - DNA, 25 bp, Homo sapien
tgagacacagcctctatgtcaaatt

SEQ ID NO: 4187421 - DNA, 25 bp, Homo sapien
agacacagcctctatgtcaaatttc

SEQ ID NO: 4187422 - DNA, 25 bp, Homo sapien
ctgagacacagcctctatgtcaaat

SEQ ID NO: 4187423 - DNA, 25 bp, Homo sapien
caaccagcatatgaggctctttcca

SEQ ID NO: 4187424 - DNA, 25 bp, Homo sapien
gatccccacaaccagcatatgaggc

SEQ ID NO: 4187425 - DNA, 25 bp, Homo sapien
ttttttttgaatgctcaaagcctct

SEQ ID NO: 4187426 - DNA, 25 bp, Homo sapien
gcatatgaggctctttccagaggac

SEQ ID NO: 4187427 - DNA, 25 bp, Homo sapien
tttggggtgcttttgaccatggcag

SEQ ID NO: 4187428 - DNA, 25 bp, Homo sapien
aaaaaagatcaaccctgacatatct

SEQ ID NO: 4187429 - DNA, 25 bp, Homo sapien
cagatttggggtgcttttgaccatg

SEQ ID NO: 4187430 - DNA, 25 bp, Homo sapien
tatcttaaaggctcctctttaggga

SEQ ID NO: 4187431 - DNA, 25 bp, Homo sapien
gagtcatttctgaatatctacacat

SEQ ID NO: 4187432 - DNA, 25 bp, Homo sapien
tcatttctgaatatctacacattag

SEQ ID NO: 4187433 - DNA, 25 bp, Homo sapien
gtcatttctgaatatctacacatta

SEQ ID NO: 4187434 - DNA, 25 bp, Homo sapien
agagtcatttctgaatatctacaca

SEQ ID NO: 4187435 - DNA, 25 bp, Homo sapien
taactcacttaaatgcagagcaact

SEQ ID NO: 4187436 - DNA, 25 bp, Homo sapien
ggtaataaccccatgcttgtaagca

SEQ ID NO: 4187437 - DNA, 25 bp, Homo sapien
gctaacattttagcaggtaataacc

SEQ ID NO: 4187438 - DNA, 25 bp, Homo sapien
tcgatcccaacaaccagcacataaa

SEQ ID NO: 4187439 - DNA, 25 bp, Homo sapien
cagcatggtgtagtggttaatcgca

SEQ ID NO: 4187440 - DNA, 25 bp, Homo sapien
tttcccaccgcccagactgtaatgg

SEQ ID NO: 4187441 - DNA, 25 bp, Homo sapien
tgtaatggacaatgatcacactccc

SEQ ID NO: 4187442 - DNA, 25 bp, Homo sapien
tctattccaggcttaatacagtaga

SEQ ID NO: 4187443 - DNA, 25 bp, Homo sapien
caactgtgcatgtggtcctgctggt

SEQ ID NO: 4187444 - DNA, 25 bp, Homo sapien
tctaactctgggagacttgtactgg

SEQ ID NO: 4187445 - DNA, 25 bp, Homo sapien
caaggtcgtcaactcattgcgctgg

SEQ ID NO: 4187446 - DNA, 25 bp, Homo sapien
ctgatggatggtgccagccatacca

SEQ ID NO: 4187447 - DNA, 25 bp, Homo sapien
attacaggcacataccactacacct

SEQ ID NO: 4187448 - DNA, 25 bp, Homo sapien
tgccgcagcctccttggtaactggg

SEQ ID NO: 4187449 - DNA, 25 bp, Homo sapien
taccactacacctggctaacttttg

SEQ ID NO: 4187450 - DNA, 25 bp, Homo sapien
cctgccgcagcctccttggtaactg

SEQ ID NO: 4187451 - DNA, 25 bp, Homo sapien
ctataaataacaaagattcccctca

SEQ ID NO: 4187452 - DNA, 25 bp, Homo sapien
tataaataacaaagattcccctcat

SEQ ID NO: 4187453 - DNA, 25 bp, Homo sapien
ttctcttggcgtcattttctgtact

SEQ ID NO: 4187454 - DNA, 25 bp, Homo sapien
tctgtacttctgacagtgccctcag

SEQ ID NO: 4187455 - DNA, 25 bp, Homo sapien
ctcttggcgtcattttctgtacttc

SEQ ID NO: 4187456 - DNA, 25 bp, Homo sapien
tcctttctcttggcgtcattttctg

SEQ ID NO: 4187457 - DNA, 25 bp, Homo sapien
atggagtacatcaacactcagctgc

SEQ ID NO: 4187458 - DNA, 25 bp, Homo sapien
tcagctgctgaaagttccgagatct

SEQ ID NO: 4187459 - DNA, 25 bp, Homo sapien
gttccgagatctcaattcttgcatt

SEQ ID NO: 4187460 - DNA, 25 bp, Homo sapien
ggagtacatcaacactcagctgctg

SEQ ID NO: 4187461 - DNA, 25 bp, Homo sapien
tcctgaaattagaggaagctaggcc

SEQ ID NO: 4187462 - DNA, 25 bp, Homo sapien
ccacattgtctgctaactggtccat

SEQ ID NO: 4187463 - DNA, 25 bp, Homo sapien
catccccacattgtctgctaactgg

SEQ ID NO: 4187464 - DNA, 25 bp, Homo sapien
gcctcttattggtccccacttggga

SEQ ID NO: 4187465 - DNA, 25 bp, Homo sapien
ttcactcgccaagttccctgagcag

SEQ ID NO: 4187466 - DNA, 25 bp, Homo sapien
actcgccaagttccctgagcaggaa

SEQ ID NO: 4187467 - DNA, 25 bp, Homo sapien
ctgagcaggaaagaacccatctccc

SEQ ID NO: 4187468 - DNA, 25 bp, Homo sapien
aggttcttcactcgccaagttccct

SEQ ID NO: 4187469 - DNA, 25 bp, Homo sapien
tgaacaagaaagtcttccctcaggt

SEQ ID NO: 4187470 - DNA, 25 bp, Homo sapien
gaaagtcttccctcaggttgctcct

SEQ ID NO: 4187471 - DNA, 25 bp, Homo sapien
cttcatcctcgtcctggggtgaaca

SEQ ID NO: 4187472 - DNA, 25 bp, Homo sapien
tcctggggtgaacaagaaagtcttc

SEQ ID NO: 4187473 - DNA, 25 bp, Homo sapien
ttttgtgcttgtgaatatgattaaa

SEQ ID NO: 4187474 - DNA, 25 bp, Homo sapien
tttgtgcttgtgaatatgattaaac

SEQ ID NO: 4187475 - DNA, 25 bp, Homo sapien
aaggtaattaacaattcatgagatg

SEQ ID NO: 4187476 - DNA, 25 bp, Homo sapien
gtggaaggtaattaacaattcatga

SEQ ID NO: 4187477 - DNA, 25 bp, Homo sapien
ggaaggtaattaacaattcatgaga

SEQ ID NO: 4187478 - DNA, 25 bp, Homo sapien
cttgtggaaggtaattaacaattca

SEQ ID NO: 4187479 - DNA, 25 bp, Homo sapien
cagatgtggcatcctctacaattga

SEQ ID NO: 4187480 - DNA, 25 bp, Homo sapien
catggtatccaaggtcagatgtggc

SEQ ID NO: 4187481 - DNA, 25 bp, Homo sapien
caattgattcaagttcgtggaggtc

SEQ ID NO: 4187482 - DNA, 25 bp, Homo sapien
actcaggcaggttctctaaagttgg

SEQ ID NO: 4187483 - DNA, 25 bp, Homo sapien
aaagagcttcaggtgcttgtctcca

SEQ ID NO: 4187484 - DNA, 25 bp, Homo sapien
gagcttcaggtgcttgtctccatac

SEQ ID NO: 4187485 - DNA, 25 bp, Homo sapien
ctaaagagcttcaggtgcttgtctc

SEQ ID NO: 4187486 - DNA, 25 bp, Homo sapien
gcttcaggtgcttgtctccatacag

SEQ ID NO: 4187487 - DNA, 25 bp, Homo sapien
tgtgggtaagcagccaaggcctact

SEQ ID NO: 4187488 - DNA, 25 bp, Homo sapien
tccttgtagacccaggccctagagt

SEQ ID NO: 4187489 - DNA, 25 bp, Homo sapien
tatcgtaagtcatagacagcccaga

SEQ ID NO: 4187490 - DNA, 25 bp, Homo sapien
tctgagctatctctgagcattgggc

SEQ ID NO: 4187491 - DNA, 25 bp, Homo sapien
actgtaaggcagcataggatatgtt

SEQ ID NO: 4187492 - DNA, 25 bp, Homo sapien
agtactgtaaggcagcataggatat

SEQ ID NO: 4187493 - DNA, 25 bp, Homo sapien
tcagtactgtaaggcagcataggat

SEQ ID NO: 4187494 - DNA, 25 bp, Homo sapien
tactgtaaggcagcataggatatgt

SEQ ID NO: 4187495 - DNA, 25 bp, Homo sapien
tctggcctaaacaccaaagcaagct

SEQ ID NO: 4187496 - DNA, 25 bp, Homo sapien
gaggtggcccttaatgtcacaaaac

SEQ ID NO: 4187497 - DNA, 25 bp, Homo sapien
gtggttatttgactggaagcagaca

SEQ ID NO: 4187498 - DNA, 25 bp, Homo sapien
ttagtatctggtactgaggtggccc

SEQ ID NO: 4187499 - DNA, 25 bp, Homo sapien
tctagtgaaattagattacagtctc

SEQ ID NO: 4187500 - DNA, 25 bp, Homo sapien
tccagtattcgtctagtgaaattag

SEQ ID NO: 4187501 - DNA, 25 bp, Homo sapien
tattcgtctagtgaaattagattac

SEQ ID NO: 4187502 - DNA, 25 bp, Homo sapien
cgtctagtgaaattagattacagtc

SEQ ID NO: 4187503 - DNA, 25 bp, Homo sapien
tctggactgggccttttatatatca

SEQ ID NO: 4187504 - DNA, 25 bp, Homo sapien
ggactgggccttttatatatcatct

SEQ ID NO: 4187505 - DNA, 25 bp, Homo sapien
atatcatcttaaattgctcagccat

SEQ ID NO: 4187506 - DNA, 25 bp, Homo sapien
cttcatccctatcgccagtccactt

SEQ ID NO: 4187507 - DNA, 25 bp, Homo sapien
ttatacgcagtgattccatggttat

SEQ ID NO: 4187508 - DNA, 25 bp, Homo sapien
tatacgcagtgattccatggttatc

SEQ ID NO: 4187509 - DNA, 25 bp, Homo sapien
cctcatatggtggaggagcatggaa

SEQ ID NO: 4187510 - DNA, 25 bp, Homo sapien
catctcgaaatatcatcccactggg

SEQ ID NO: 4187511 - DNA, 25 bp, Homo sapien
tctcatgtctctacttacaacggaa

SEQ ID NO: 4187512 - DNA, 25 bp, Homo sapien
gaactaatcccatcctgtgggctct

SEQ ID NO: 4187513 - DNA, 25 bp, Homo sapien
gaaaagtgccattctgccacctaag

SEQ ID NO: 4187514 - DNA, 25 bp, Homo sapien
cgtagctcattgtgtacagacagcc

SEQ ID NO: 4187515 - DNA, 25 bp, Homo sapien
tgaaatgggcaatatggaatctcgc

SEQ ID NO: 4187516 - DNA, 25 bp, Homo sapien
taggctttgcagattacgtggtctc

SEQ ID NO: 4187517 - DNA, 25 bp, Homo sapien
tctctggtctttctaacgctatttc

SEQ ID NO: 4187518 - DNA, 25 bp, Homo sapien
aatcaaatgcatcagcgtagtactc

SEQ ID NO: 4187519 - DNA, 25 bp, Homo sapien
ttgttctgtaagcaggctgggatcc

SEQ ID NO: 4187520 - DNA, 25 bp, Homo sapien
gtagtactcttcagccacaagtggg

SEQ ID NO: 4187521 - DNA, 25 bp, Homo sapien
tccatggcttccgacagggagcatt

SEQ ID NO: 4187522 - DNA, 25 bp, Homo sapien
agttccatggcttccgacagggagc

SEQ ID NO: 4187523 - DNA, 25 bp, Homo sapien
catggcttccgacagggagcattac

SEQ ID NO: 4187524 - DNA, 25 bp, Homo sapien
gcttccgacagggagcattacatac

SEQ ID NO: 4187525 - DNA, 25 bp, Homo sapien
ggaatatggtgtgtgccatctccca

SEQ ID NO: 4187526 - DNA, 25 bp, Homo sapien
ggcatagggcatatactcagagact

SEQ ID NO: 4187527 - DNA, 25 bp, Homo sapien
tcaatagctgtatacgaagccctcc

SEQ ID NO: 4187528 - DNA, 25 bp, Homo sapien
gagatctactacaagggcatagggc

SEQ ID NO: 4187529 - DNA, 25 bp, Homo sapien
acagacttggcagaggagccatcaa

SEQ ID NO: 4187530 - DNA, 25 bp, Homo sapien
tatgataatggcttgtgataaaggt

SEQ ID NO: 4187531 - DNA, 25 bp, Homo sapien
ttattgatgctgtgcttatcacagc

SEQ ID NO: 4187532 - DNA, 25 bp, Homo sapien
ggcagaggagccatcaacaatatga

SEQ ID NO: 4187533 - DNA, 25 bp, Homo sapien
attcctgctcagatttgctttgccc

SEQ ID NO: 4187534 - DNA, 25 bp, Homo sapien
ttcctgctcagatttgctttgccct

SEQ ID NO: 4187535 - DNA, 25 bp, Homo sapien
cttcacactgaagggaacactcaga

SEQ ID NO: 4187536 - DNA, 25 bp, Homo sapien
acactgaagggaacactcagacact

SEQ ID NO: 4187537 - DNA, 25 bp, Homo sapien
actgtggggctggtgacctctccat

SEQ ID NO: 4187538 - DNA, 25 bp, Homo sapien
tcagccaccaacaagggagactgtg

SEQ ID NO: 4187539 - DNA, 25 bp, Homo sapien
agactgtggggctggtgacctctcc

SEQ ID NO: 4187540 - DNA, 25 bp, Homo sapien
agccaccaacaagggagactgtggg

SEQ ID NO: 4187541 - DNA, 25 bp, Homo sapien
cggagcacagggcatctcacagtga

SEQ ID NO: 4187542 - DNA, 25 bp, Homo sapien
caccgtccctttatttgcccattga

SEQ ID NO: 4187543 - DNA, 25 bp, Homo sapien
tttgcccattgacctgtggacctct

SEQ ID NO: 4187544 - DNA, 25 bp, Homo sapien
cacagtgaaggtcaccgtcccttta

SEQ ID NO: 4187545 - DNA, 25 bp, Homo sapien
aggcttgacaccatgtcctccatct

SEQ ID NO: 4187546 - DNA, 25 bp, Homo sapien
tccatctgccaaacaatcctgagca

SEQ ID NO: 4187547 - DNA, 25 bp, Homo sapien
gctgtgctgccaggcttgacaccat

SEQ ID NO: 4187548 - DNA, 25 bp, Homo sapien
tctgccaaacaatcctgagcaggca

SEQ ID NO: 4187549 - DNA, 25 bp, Homo sapien
agaagtgcaacccaggacattttcc

SEQ ID NO: 4187550 - DNA, 25 bp, Homo sapien
tttccaaacacctggccaacgcttc

SEQ ID NO: 4187551 - DNA, 25 bp, Homo sapien
tggccaacgcttcgatatcactgtc

SEQ ID NO: 4187552 - DNA, 25 bp, Homo sapien
ctagagaagtgcaacccaggacatt

SEQ ID NO: 4187553 - DNA, 25 bp, Homo sapien
catgccaacaactgactgagaactg

SEQ ID NO: 4187554 - DNA, 25 bp, Homo sapien
gaaagaacagaggaattcactggaa

SEQ ID NO: 4187555 - DNA, 25 bp, Homo sapien
actgtgagtaaagccctaatatggg

SEQ ID NO: 4187556 - DNA, 25 bp, Homo sapien
ggtctgcatctaatttctcctaaaa

SEQ ID NO: 4187557 - DNA, 25 bp, Homo sapien
acagccccatgacttattatgaggg

SEQ ID NO: 4187558 - DNA, 25 bp, Homo sapien
tactctgctgagaggcttagctgac

SEQ ID NO: 4187559 - DNA, 25 bp, Homo sapien
gctgacacaaacttggtgaagattt

SEQ ID NO: 4187560 - DNA, 25 bp, Homo sapien
ggcactgtgaaagctgctctactct

SEQ ID NO: 4187561 - DNA, 25 bp, Homo sapien
ttggtcctggccatcacactgttga

SEQ ID NO: 4187562 - DNA, 25 bp, Homo sapien
ccctcatgcgtttcatcttggtcct

SEQ ID NO: 4187563 - DNA, 25 bp, Homo sapien
tcatcttggtcctggccatcacact

SEQ ID NO: 4187564 - DNA, 25 bp, Homo sapien
cctcatgcgtttcatcttggtcctg

SEQ ID NO: 4187565 - DNA, 25 bp, Homo sapien
aatccttggctgcaccaaagagcat

SEQ ID NO: 4187566 - DNA, 25 bp, Homo sapien
caatccttggctgcaccaaagagca

SEQ ID NO: 4187567 - DNA, 25 bp, Homo sapien
tcacggttgtcgtttttaatggctc

SEQ ID NO: 4187568 - DNA, 25 bp, Homo sapien
tgttttgcggttcttcacggttgtc

SEQ ID NO: 4187569 - DNA, 25 bp, Homo sapien
aactcaagggcattcaagttggtgg

SEQ ID NO: 4187570 - DNA, 25 bp, Homo sapien
ccacttaactcaagggcattcaagt

SEQ ID NO: 4187571 - DNA, 25 bp, Homo sapien
gcttcgctagcattctgatgccttg

SEQ ID NO: 4187572 - DNA, 25 bp, Homo sapien
ttttccaaacactcgcggatctctg

SEQ ID NO: 4187573 - DNA, 25 bp, Homo sapien
tgatgccttgctctcttgaggtaat

SEQ ID NO: 4187574 - DNA, 25 bp, Homo sapien
caaaacagtcgctggcttgaggcac

SEQ ID NO: 4187575 - DNA, 25 bp, Homo sapien
gagatggttctggagagtaggttct

SEQ ID NO: 4187576 - DNA, 25 bp, Homo sapien
ctagagatggttctggagagtaggt

SEQ ID NO: 4187577 - DNA, 25 bp, Homo sapien
agcaactgctcttcaaagtacagga

SEQ ID NO: 4187578 - DNA, 25 bp, Homo sapien
aactgctcttcaaagtacaggagct

SEQ ID NO: 4187579 - DNA, 25 bp, Homo sapien
ccctgagggcgcacatgagagaaat

SEQ ID NO: 4187580 - DNA, 25 bp, Homo sapien
tacagtccatgagaccctaggcagt

SEQ ID NO: 4187581 - DNA, 25 bp, Homo sapien
tcagcatgttgtaggctagagtcca

SEQ ID NO: 4187582 - DNA, 25 bp, Homo sapien
tgaaaataatgaagagcacacggct

SEQ ID NO: 4187583 - DNA, 25 bp, Homo sapien
atcttgaattatctatggatgagtt

SEQ ID NO: 4187584 - DNA, 25 bp, Homo sapien
aatcttgaattatctatggatgagt

SEQ ID NO: 4187585 - DNA, 25 bp, Homo sapien
ggaacacaacagcttttgccagaag

SEQ ID NO: 4187586 - DNA, 25 bp, Homo sapien
taagtcagtttagcaggaatctccc

SEQ ID NO: 4187587 - DNA, 25 bp, Homo sapien
gggagcaccctgaaaaatagcttgc

SEQ ID NO: 4187588 - DNA, 25 bp, Homo sapien
ccaaagggtgggtgttataatgcca

SEQ ID NO: 4187589 - DNA, 25 bp, Homo sapien
tgccttccagagctgtcttcctcat

SEQ ID NO: 4187590 - DNA, 25 bp, Homo sapien
ttgccttccagagctgtcttcctca

SEQ ID NO: 4187591 - DNA, 25 bp, Homo sapien
aaccataagcaacctctgggttggg

SEQ ID NO: 4187592 - DNA, 25 bp, Homo sapien
acctgggcgccttaggtcagggcgc

SEQ ID NO: 4187593 - DNA, 25 bp, Homo sapien
gtgccggaggcagccaatcagggcg

SEQ ID NO: 4187594 - DNA, 25 bp, Homo sapien
gcttgcagaccggactgatgtccag

SEQ ID NO: 4187595 - DNA, 25 bp, Homo sapien
cgccttaggtcagggcgcagcgacc

SEQ ID NO: 4187596 - DNA, 25 bp, Homo sapien
ctcggaccaatccgagcgtgggcgg

SEQ ID NO: 4187597 - DNA, 25 bp, Homo sapien
ggcccgacactgctcttccgctgtt

SEQ ID NO: 4187598 - DNA, 25 bp, Homo sapien
gctcttccgctgttccgaaggccta

SEQ ID NO: 4187599 - DNA, 25 bp, Homo sapien
gacactgctcttccgctgttccgaa

SEQ ID NO: 4187600 - DNA, 25 bp, Homo sapien
catggcccgacactgctcttccgct

SEQ ID NO: 4187601 - DNA, 25 bp, Homo sapien
agaattccagggtccggcgcgtgca

SEQ ID NO: 4187602 - DNA, 25 bp, Homo sapien
gcgcgtgcaggagcgcatagcaggc

SEQ ID NO: 4187603 - DNA, 25 bp, Homo sapien
gtccggcgcgtgcaggagcgcatag

SEQ ID NO: 4187604 - DNA, 25 bp, Homo sapien
agagagaattccagggtccggcgcg

SEQ ID NO: 4187605 - DNA, 25 bp, Homo sapien
ccgcaaggaaggtgcaaggccagag

SEQ ID NO: 4187606 - DNA, 25 bp, Homo sapien
cagggacacccgagagtagcgccgc

SEQ ID NO: 4187607 - DNA, 25 bp, Homo sapien
ctgggattggcagggacacccgaga

SEQ ID NO: 4187608 - DNA, 25 bp, Homo sapien
cacccgagagtagcgccgcaaggaa

SEQ ID NO: 4187609 - DNA, 25 bp, Homo sapien
gtcttgcgagtccacgaatccgcca

SEQ ID NO: 4187610 - DNA, 25 bp, Homo sapien
cacgtggccttgatccggcgtgaga

SEQ ID NO: 4187611 - DNA, 25 bp, Homo sapien
caacagctgctcgagcgtcagagat

SEQ ID NO: 4187612 - DNA, 25 bp, Homo sapien
agttccagcagaccacggttcagcc

SEQ ID NO: 4187613 - DNA, 25 bp, Homo sapien
gggacctcaatccaaaaagagttgc

SEQ ID NO: 4187614 - DNA, 25 bp, Homo sapien
aaaagagttgctgaggcaaaggaag

SEQ ID NO: 4187615 - DNA, 25 bp, Homo sapien
gggaagagggcaagttctgacagac

SEQ ID NO: 4187616 - DNA, 25 bp, Homo sapien
agaagaccaagatcccaactccacc

SEQ ID NO: 4187617 - DNA, 25 bp, Homo sapien
ctccatcctctctttagcagatctt

SEQ ID NO: 4187618 - DNA, 25 bp, Homo sapien
tagagcagatgccacaactcttaat

SEQ ID NO: 4187619 - DNA, 25 bp, Homo sapien
tcttaatactccagcagaaacaagc

SEQ ID NO: 4187620 - DNA, 25 bp, Homo sapien
cctatctaaaggaggcccagtgggc

SEQ ID NO: 4187621 - DNA, 25 bp, Homo sapien
gcccctgggatgagctgtggatttt

SEQ ID NO: 4187622 - DNA, 25 bp, Homo sapien
ggttgcctcagacgaactgggatct

SEQ ID NO: 4187623 - DNA, 25 bp, Homo sapien
cctgatcccatgaattggagggtcc

SEQ ID NO: 4187624 - DNA, 25 bp, Homo sapien
tcccaggcagcaccaataaagcaat

SEQ ID NO: 4187625 - DNA, 25 bp, Homo sapien
ccaccaattgctgtggtgaaccctc

SEQ ID NO: 4187626 - DNA, 25 bp, Homo sapien
accaattgctgtggtgaaccctcca

SEQ ID NO: 4187627 - DNA, 25 bp, Homo sapien
caattgctgtggtgaaccctccagc

SEQ ID NO: 4187628 - DNA, 25 bp, Homo sapien
tcccaccaattgctgtggtgaaccc

SEQ ID NO: 4187629 - DNA, 25 bp, Homo sapien
tcttctgatagtcccagagtctaca

SEQ ID NO: 4187630 - DNA, 25 bp, Homo sapien
gagcaaggatggctctctatacctt

SEQ ID NO: 4187631 - DNA, 25 bp, Homo sapien
ctagacaggtatgggtcagttctct

SEQ ID NO: 4187632 - DNA, 25 bp, Homo sapien
tctacagcgaaccaaagatgaaagc

SEQ ID NO: 4187633 - DNA, 25 bp, Homo sapien
gatctggagagatagctgcactccc

SEQ ID NO: 4187634 - DNA, 25 bp, Homo sapien
aagccaggtgaaaataccacatgat

SEQ ID NO: 4187635 - DNA, 25 bp, Homo sapien
taagttcaaaagatctgttgcacaa

SEQ ID NO: 4187636 - DNA, 25 bp, Homo sapien
catggattaacctagatgacatgtt

SEQ ID NO: 4187637 - DNA, 25 bp, Homo sapien
aaaattagaaccttatctcatacca

SEQ ID NO: 4187638 - DNA, 25 bp, Homo sapien
cacagagggtaagaatacacaatga

SEQ ID NO: 4187639 - DNA, 25 bp, Homo sapien
cacaactgatgagaggttaatagcc

SEQ ID NO: 4187640 - DNA, 25 bp, Homo sapien
gctagaggtatcacattgcttgact

SEQ ID NO: 4187641 - DNA, 25 bp, Homo sapien
taatcagaccaataacacgtagatg

SEQ ID NO: 4187642 - DNA, 25 bp, Homo sapien
gaccaccagaggctactgtaaacaa

SEQ ID NO: 4187643 - DNA, 25 bp, Homo sapien
tgctaaagccaaagacactacagga

SEQ ID NO: 4187644 - DNA, 25 bp, Homo sapien
caaaacctatgtgatgcagcaaaat

SEQ ID NO: 4187645 - DNA, 25 bp, Homo sapien
ttgatatgtcccttaaagtagtaaa

SEQ ID NO: 4187646 - DNA, 25 bp, Homo sapien
gaatctattgctttgatatgtccct

SEQ ID NO: 4187647 - DNA, 25 bp, Homo sapien
gtaattccctgacattctttcccat

SEQ ID NO: 4187648 - DNA, 25 bp, Homo sapien
ctttgactgtaattccctgacattc

SEQ ID NO: 4187649 - DNA, 25 bp, Homo sapien
tcacctcggaccaatccgagcctgg

SEQ ID NO: 4187650 - DNA, 25 bp, Homo sapien
cacctcggaccaatccgagcctggg

SEQ ID NO: 4187651 - DNA, 25 bp, Homo sapien
tctcacctcggaccaatccgagcct

SEQ ID NO: 4187652 - DNA, 25 bp, Homo sapien
ctcggaccaatccgagcctgggcgg

SEQ ID NO: 4187653 - DNA, 25 bp, Homo sapien
gagcgtggcacgcatgacgccagcc

SEQ ID NO: 4187654 - DNA, 25 bp, Homo sapien
tagaggagagcgtggcacgcatgac

SEQ ID NO: 4187655 - DNA, 25 bp, Homo sapien
cgcgtagaggagagcgtggcacgca

SEQ ID NO: 4187656 - DNA, 25 bp, Homo sapien
gtccggcgcgtagaggagagcgtgg

SEQ ID NO: 4187657 - DNA, 25 bp, Homo sapien
ggcgtagcgcagcgggatgcggccg

SEQ ID NO: 4187658 - DNA, 25 bp, Homo sapien
gtagcgcagcgggatgcggccgaag

SEQ ID NO: 4187659 - DNA, 25 bp, Homo sapien
gcgtagcgcagcgggatgcggccga

SEQ ID NO: 4187660 - DNA, 25 bp, Homo sapien
cgtagcgcagcgggatgcggccgaa

SEQ ID NO: 4187661 - DNA, 25 bp, Homo sapien
ggcagaaagtggccgggcgcgcccc

SEQ ID NO: 4187662 - DNA, 25 bp, Homo sapien
agtggccgggcgcgcccccttctca

SEQ ID NO: 4187663 - DNA, 25 bp, Homo sapien
gtggccgggcgcgcccccttctcac

SEQ ID NO: 4187664 - DNA, 25 bp, Homo sapien
ctcaggcagaaagtggccgggcgcg

SEQ ID NO: 4187665 - DNA, 25 bp, Homo sapien
gaagcggggattggcaggggcgccc

SEQ ID NO: 4187666 - DNA, 25 bp, Homo sapien
agcggggattggcaggggcgcccca

SEQ ID NO: 4187667 - DNA, 25 bp, Homo sapien
gcggggattggcaggggcgccccag

SEQ ID NO: 4187668 - DNA, 25 bp, Homo sapien
tagaagtgggccacaacgcgtggcc

SEQ ID NO: 4187669 - DNA, 25 bp, Homo sapien
tctgtcctgcgtgtccacgaatccg

SEQ ID NO: 4187670 - DNA, 25 bp, Homo sapien
gcggttcagcccgtcctctaggctt

SEQ ID NO: 4187671 - DNA, 25 bp, Homo sapien
aacagctcctcgagcgtcagacgct

SEQ ID NO: 4187672 - DNA, 25 bp, Homo sapien
taaacctctagtggctactgcctca

SEQ ID NO: 4187673 - DNA, 25 bp, Homo sapien
gcaggaatgctgagagaaatcgcta

SEQ ID NO: 4187674 - DNA, 25 bp, Homo sapien
ctattttaataagacgccccgatga

SEQ ID NO: 4187675 - DNA, 25 bp, Homo sapien
cccaggttggcagtactaattcaga

SEQ ID NO: 4187676 - DNA, 25 bp, Homo sapien
cccgcgcagagccaataaaggaatt

SEQ ID NO: 4187677 - DNA, 25 bp, Homo sapien
tacaccatcccgcagggtatacagg

SEQ ID NO: 4187678 - DNA, 25 bp, Homo sapien
gaatcttaaggcctgaaatagagcc

SEQ ID NO: 4187679 - DNA, 25 bp, Homo sapien
caagtcctggagagcttcaagtaac

SEQ ID NO: 4187680 - DNA, 25 bp, Homo sapien
tgatcagtgggatactcaagcagag

SEQ ID NO: 4187681 - DNA, 25 bp, Homo sapien
tgcagtaagtgtacccatcccagct

SEQ ID NO: 4187682 - DNA, 25 bp, Homo sapien
tcagaagctccttgcaatcagggac

SEQ ID NO: 4187683 - DNA, 25 bp, Homo sapien
tagtctcggagtctcaggcatccca

SEQ ID NO: 4187684 - DNA, 25 bp, Homo sapien
gggtcaaagtcaccacagcagttag

SEQ ID NO: 4187685 - DNA, 25 bp, Homo sapien
ggctttccttaaacatcagcagggt

SEQ ID NO: 4187686 - DNA, 25 bp, Homo sapien
gctgcctgagaggtaatctactgac

SEQ ID NO: 4187687 - DNA, 25 bp, Homo sapien
tctgcaagcttatcccaagtgctgc

SEQ ID NO: 4187688 - DNA, 25 bp, Homo sapien
tatcctgagtggaaagagggaatcc

SEQ ID NO: 4187689 - DNA, 25 bp, Homo sapien
gatgctcttgctgttcctagggtaa

SEQ ID NO: 4187690 - DNA, 25 bp, Homo sapien
tgccatatgccaagtgaccacagag

SEQ ID NO: 4187691 - DNA, 25 bp, Homo sapien
ggtacatacccatggtgagggcaca

SEQ ID NO: 4187692 - DNA, 25 bp, Homo sapien
aattggggcactggacactttccta

SEQ ID NO: 4187693 - DNA, 25 bp, Homo sapien
ggcaaagcctaaaattggggcactg

SEQ ID NO: 4187694 - DNA, 25 bp, Homo sapien
aaattggggcactggacactttcct

SEQ ID NO: 4187695 - DNA, 25 bp, Homo sapien
gcaaagcctaaaattggggcactgg

SEQ ID NO: 4187696 - DNA, 25 bp, Homo sapien
tgggtaatcactgttgcactctcta

SEQ ID NO: 4187697 - DNA, 25 bp, Homo sapien
taatcactgttgcactctctacttc

SEQ ID NO: 4187698 - DNA, 25 bp, Homo sapien
tctgggtaatcactgttgcactctc

SEQ ID NO: 4187699 - DNA, 25 bp, Homo sapien
ggtaatcactgttgcactctctact

SEQ ID NO: 4187700 - DNA, 25 bp, Homo sapien
tacctcaggaatgaaattgtctgca

SEQ ID NO: 4187701 - DNA, 25 bp, Homo sapien
ttttataggaacaaacactgtctgc

SEQ ID NO: 4187702 - DNA, 25 bp, Homo sapien
tggccagtaaccaacagtaacagct

SEQ ID NO: 4187703 - DNA, 25 bp, Homo sapien
actagtctgtttagtaattggcttc

SEQ ID NO: 4187704 - DNA, 25 bp, Homo sapien
ctccgcccactaaggtctttcttgg

SEQ ID NO: 4187705 - DNA, 25 bp, Homo sapien
aatggcctggtgcagttgggcctcc

SEQ ID NO: 4187706 - DNA, 25 bp, Homo sapien
aagcagtggaatggcctggtgcagt

SEQ ID NO: 4187707 - DNA, 25 bp, Homo sapien
cagtggaatggcctggtgcagttgg

SEQ ID NO: 4187708 - DNA, 25 bp, Homo sapien
ctgaagcagtggaatggcctggtgc

SEQ ID NO: 4187709 - DNA, 25 bp, Homo sapien
tctttccgtcgcagagagcatcggc

SEQ ID NO: 4187710 - DNA, 25 bp, Homo sapien
ttccggcggccattgcgaaaacttc

SEQ ID NO: 4187711 - DNA, 25 bp, Homo sapien
gagggtgtcctacctgcacagttgc

SEQ ID NO: 4187712 - DNA, 25 bp, Homo sapien
ggacaacggtggaagcagaactata

SEQ ID NO: 4187713 - DNA, 25 bp, Homo sapien
cactgtgagttcctcgaagactgag

SEQ ID NO: 4187714 - DNA, 25 bp, Homo sapien
tcagctcagcggcacagatgggtaa

SEQ ID NO: 4187715 - DNA, 25 bp, Homo sapien
ggaatcctgtctcgtctcagctcag

SEQ ID NO: 4187716 - DNA, 25 bp, Homo sapien
accgcatgacccctgaaagctagca

SEQ ID NO: 4187717 - DNA, 25 bp, Homo sapien
tgccatgacgatcctgaaaggcctg

SEQ ID NO: 4187718 - DNA, 25 bp, Homo sapien
gactgggtattgtgaacttcaagga

SEQ ID NO: 4187719 - DNA, 25 bp, Homo sapien
gagtcatggcttcctggtgcagtta

SEQ ID NO: 4187720 - DNA, 25 bp, Homo sapien
tggaaggatgacaggcaagtgcacc

SEQ ID NO: 4187721 - DNA, 25 bp, Homo sapien
tgtcatggtataacaggagttcctt

SEQ ID NO: 4187722 - DNA, 25 bp, Homo sapien
acctcctccgctcaacttgccatct

SEQ ID NO: 4187723 - DNA, 25 bp, Homo sapien
tccactcaactcctactgtcatcat

SEQ ID NO: 4187724 - DNA, 25 bp, Homo sapien
cacctcctccgctcaacttgccatc

SEQ ID NO: 4187725 - DNA, 25 bp, Homo sapien
ctaaggaaggcagctaggaccctca

SEQ ID NO: 4187726 - DNA, 25 bp, Homo sapien
ggaccctcagcgtgtcttcccggag

SEQ ID NO: 4187727 - DNA, 25 bp, Homo sapien
cacgcctaaggaaggcagctaggac

SEQ ID NO: 4187728 - DNA, 25 bp, Homo sapien
aaggcagctaggaccctcagcgtgt

SEQ ID NO: 4187729 - DNA, 25 bp, Homo sapien
catggcttctaggtggatttggaac

SEQ ID NO: 4187730 - DNA, 25 bp, Homo sapien
gcttctaggtggatttggaacagga

SEQ ID NO: 4187731 - DNA, 25 bp, Homo sapien
ggatttggaacaggagacccagcag

SEQ ID NO: 4187732 - DNA, 25 bp, Homo sapien
cttgggcatggcttctaggtggatt

SEQ ID NO: 4187733 - DNA, 25 bp, Homo sapien
ggaagacatcttcgaaggcggctca

SEQ ID NO: 4187734 - DNA, 25 bp, Homo sapien
agcagggaagacatcttcgaaggcg

SEQ ID NO: 4187735 - DNA, 25 bp, Homo sapien
cttcgaaggcggctcaggaagtctg

SEQ ID NO: 4187736 - DNA, 25 bp, Homo sapien
gacatcttcgaaggcggctcaggaa

SEQ ID NO: 4187737 - DNA, 25 bp, Homo sapien
aaggcatagaagtctggagtagctg

SEQ ID NO: 4187738 - DNA, 25 bp, Homo sapien
ggagtagctgggccaggctctgaac

SEQ ID NO: 4187739 - DNA, 25 bp, Homo sapien
tctggagtagctgggccaggctctg

SEQ ID NO: 4187740 - DNA, 25 bp, Homo sapien
caaggcatagaagtctggagtagct

SEQ ID NO: 4187741 - DNA, 25 bp, Homo sapien
tacgctgagtccggcccgggtgtcc

SEQ ID NO: 4187742 - DNA, 25 bp, Homo sapien
aggctgtgcgcgtgctctacgctga

SEQ ID NO: 4187743 - DNA, 25 bp, Homo sapien
gcgtgctctacgctgagtccggccc

SEQ ID NO: 4187744 - DNA, 25 bp, Homo sapien
ggctgtgcgcgtgctctacgctgag

SEQ ID NO: 4187745 - DNA, 25 bp, Homo sapien
ccaggcatagcgtccacactcatgg

SEQ ID NO: 4187746 - DNA, 25 bp, Homo sapien
tcattgacgccaggcatagcgtcca

SEQ ID NO: 4187747 - DNA, 25 bp, Homo sapien
ctgcagtccgggcatacagcaaggg

SEQ ID NO: 4187748 - DNA, 25 bp, Homo sapien
tcaccacagaacgaacgcagtggag

SEQ ID NO: 4187749 - DNA, 25 bp, Homo sapien
caagactgaagtcaagtgtgagaca

SEQ ID NO: 4187750 - DNA, 25 bp, Homo sapien
caataataatagttgtgccaccttc

SEQ ID NO: 4187751 - DNA, 25 bp, Homo sapien
gtcagtaaattaccttctcagccaa

SEQ ID NO: 4187752 - DNA, 25 bp, Homo sapien
caggactgggacttagacacaggga

SEQ ID NO: 4187753 - DNA, 25 bp, Homo sapien
cagtactgcacactcaaggagaaca

SEQ ID NO: 4187754 - DNA, 25 bp, Homo sapien
ggatttctccaagcacttccagtac

SEQ ID NO: 4187755 - DNA, 25 bp, Homo sapien
ggaactctggtgtgcctcaaaatga

SEQ ID NO: 4187756 - DNA, 25 bp, Homo sapien
gagaacaatctagcagtctcaggac

SEQ ID NO: 4187757 - DNA, 25 bp, Homo sapien
tccactccccgtacacttggatgat

SEQ ID NO: 4187758 - DNA, 25 bp, Homo sapien
tgccaatcttaggtcaggtcctcca

SEQ ID NO: 4187759 - DNA, 25 bp, Homo sapien
ccttctggactgagtaagatgccaa

SEQ ID NO: 4187760 - DNA, 25 bp, Homo sapien
tccccgtacacttggatgattccat

SEQ ID NO: 4187761 - DNA, 25 bp, Homo sapien
ccttcagaaatagagtagtagcgga

SEQ ID NO: 4187762 - DNA, 25 bp, Homo sapien
ggtgggaatcagctagaagtgcatc

SEQ ID NO: 4187763 - DNA, 25 bp, Homo sapien
cccaagggcacgtaggaacaagcta

SEQ ID NO: 4187764 - DNA, 25 bp, Homo sapien
tgtagcccacatccatagggaaagg

SEQ ID NO: 4187765 - DNA, 25 bp, Homo sapien
gaatggtgagagttgacatgcttgt

SEQ ID NO: 4187766 - DNA, 25 bp, Homo sapien
tcacgtatgttccttcactgcctag

SEQ ID NO: 4187767 - DNA, 25 bp, Homo sapien
ggatgttggatcttatcaaaacctt

SEQ ID NO: 4187768 - DNA, 25 bp, Homo sapien
tgctcttaagcagaatgcttccagc

SEQ ID NO: 4187769 - DNA, 25 bp, Homo sapien
tgggacccactctatctatggatgc

SEQ ID NO: 4187770 - DNA, 25 bp, Homo sapien
gaggtcagacccaaaagatgtggag

SEQ ID NO: 4187771 - DNA, 25 bp, Homo sapien
tatgaggaactaaaaagaaggacag

SEQ ID NO: 4187772 - DNA, 25 bp, Homo sapien
gatggagatagcacatatgaggaac

SEQ ID NO: 4187773 - DNA, 25 bp, Homo sapien
gcagcgcctgcggtttgaagtccat

SEQ ID NO: 4187774 - DNA, 25 bp, Homo sapien
ttttactttgaggaggtgcagcgcc

SEQ ID NO: 4187775 - DNA, 25 bp, Homo sapien
tgaagtccatgacatcagcagcaac

SEQ ID NO: 4187776 - DNA, 25 bp, Homo sapien
ttggccaggtgggtcaacagacatc

SEQ ID NO: 4187777 - DNA, 25 bp, Homo sapien
ggaagtcccagagaatagatggcca

SEQ ID NO: 4187778 - DNA, 25 bp, Homo sapien
gaagtcccagagaatagatggccat

SEQ ID NO: 4187779 - DNA, 25 bp, Homo sapien
tagcatcacacgatttagctctcac

SEQ ID NO: 4187780 - DNA, 25 bp, Homo sapien
ccactgatagcatcacacgatttag

SEQ ID NO: 4187781 - DNA, 25 bp, Homo sapien
gatagcatcacacgatttagctctc

SEQ ID NO: 4187782 - DNA, 25 bp, Homo sapien
ctgatagcatcacacgatttagctc

SEQ ID NO: 4187783 - DNA, 25 bp, Homo sapien
catcccaggggatccataagcagaa

SEQ ID NO: 4187784 - DNA, 25 bp, Homo sapien
caggctatgtctactggtgaaacga

SEQ ID NO: 4187785 - DNA, 25 bp, Homo sapien
gaggccctgttacttgagaaccagg

SEQ ID NO: 4187786 - DNA, 25 bp, Homo sapien
aacgaatgtctagctctaggttctc

SEQ ID NO: 4187787 - DNA, 25 bp, Homo sapien
gatgtagctgagatctacgcttctg

SEQ ID NO: 4187788 - DNA, 25 bp, Homo sapien
ctatagaggacacgcagcatttggc

SEQ ID NO: 4187789 - DNA, 25 bp, Homo sapien
aggcaggatttgctcatgctctgtg

SEQ ID NO: 4187790 - DNA, 25 bp, Homo sapien
cttctgtggcaaatcaggcaggatt

SEQ ID NO: 4187791 - DNA, 25 bp, Homo sapien
acatccaagaataggtgctggctgc

SEQ ID NO: 4187792 - DNA, 25 bp, Homo sapien
cctacattcataaggtccactcttg

SEQ ID NO: 4187793 - DNA, 25 bp, Homo sapien
ccaggcctgctcaagagatctccat

SEQ ID NO: 4187794 - DNA, 25 bp, Homo sapien
tgtacatccttaccactcctacatt

SEQ ID NO: 4187795 - DNA, 25 bp, Homo sapien
tggttttcaccatggccaaggttca

SEQ ID NO: 4187796 - DNA, 25 bp, Homo sapien
ctcaagctgtgctctaggtgctgtt

SEQ ID NO: 4187797 - DNA, 25 bp, Homo sapien
gaggagatgcctgagcaaactggtt

SEQ ID NO: 4187798 - DNA, 25 bp, Homo sapien
atctgctgacaggtttagcttttcc

SEQ ID NO: 4187799 - DNA, 25 bp, Homo sapien
taagccacgacagatggcagtgttg

SEQ ID NO: 4187800 - DNA, 25 bp, Homo sapien
gccacgacagatggcagtgttgcag

SEQ ID NO: 4187801 - DNA, 25 bp, Homo sapien
cacgacagatggcagtgttgcagaa

SEQ ID NO: 4187802 - DNA, 25 bp, Homo sapien
ggctaagccacgacagatggcagtg

SEQ ID NO: 4187803 - DNA, 25 bp, Homo sapien
gagtgggaggtttctgttcatttgc

SEQ ID NO: 4187804 - DNA, 25 bp, Homo sapien
tcagctttttgtaccaggaacggaa

SEQ ID NO: 4187805 - DNA, 25 bp, Homo sapien
tgcaaatgcgatgacattttcagct

SEQ ID NO: 4187806 - DNA, 25 bp, Homo sapien
ttgggaagcttgtggttgaatgcat

SEQ ID NO: 4187807 - DNA, 25 bp, Homo sapien
cacctttcttggcatcatactgtgc

SEQ ID NO: 4187808 - DNA, 25 bp, Homo sapien
acctttcttggcatcatactgtgct

SEQ ID NO: 4187809 - DNA, 25 bp, Homo sapien
cctttcttggcatcatactgtgcta

SEQ ID NO: 4187810 - DNA, 25 bp, Homo sapien
tgggtctgcccagctaaactatacg

SEQ ID NO: 4187811 - DNA, 25 bp, Homo sapien
accaaccagtctcttaaaatggtgt

SEQ ID NO: 4187812 - DNA, 25 bp, Homo sapien
aactcttccagtcttccgttatcca

SEQ ID NO: 4187813 - DNA, 25 bp, Homo sapien
tgtggccctgcagatcatctctctg

SEQ ID NO: 4187814 - DNA, 25 bp, Homo sapien
ctgagaagaaaactgctcgtatttc

SEQ ID NO: 4187815 - DNA, 25 bp, Homo sapien
ctctggagatcctgtaagccaacct

SEQ ID NO: 4187816 - DNA, 25 bp, Homo sapien
tggagatcctgtaagccaacctcct

SEQ ID NO: 4187817 - DNA, 25 bp, Homo sapien
tctggagatcctgtaagccaacctc

SEQ ID NO: 4187818 - DNA, 25 bp, Homo sapien
aaaatgaaacgggctctggagatcc

SEQ ID NO: 4187819 - DNA, 25 bp, Homo sapien
actctactctatctgcagcagccat

SEQ ID NO: 4187820 - DNA, 25 bp, Homo sapien
gggtagttctacagagctccactct

SEQ ID NO: 4187821 - DNA, 25 bp, Homo sapien
gactggggtagttctacagagctcc

SEQ ID NO: 4187822 - DNA, 25 bp, Homo sapien
agagctccactctactctatctgca

SEQ ID NO: 4187823 - DNA, 25 bp, Homo sapien
ggcatttagccaacatatttgttaa

SEQ ID NO: 4187824 - DNA, 25 bp, Homo sapien
tactgaggctggcatttagccaaca

SEQ ID NO: 4187825 - DNA, 25 bp, Homo sapien
gaggctggcatttagccaacatatt

SEQ ID NO: 4187826 - DNA, 25 bp, Homo sapien
tgtgtcactctttggctgctgacag

SEQ ID NO: 4187827 - DNA, 25 bp, Homo sapien
tgctgatgattcatggtccctgcca

SEQ ID NO: 4187828 - DNA, 25 bp, Homo sapien
gattcatggtccctgccaacttcct

SEQ ID NO: 4187829 - DNA, 25 bp, Homo sapien
tctatgccctcctcattcaaagtga

SEQ ID NO: 4187830 - DNA, 25 bp, Homo sapien
ctttcagcttattggccctttggcc

SEQ ID NO: 4187831 - DNA, 25 bp, Homo sapien
catataagaacatacagagatgggc

SEQ ID NO: 4187832 - DNA, 25 bp, Homo sapien
ataagaacatacagagatgggctgg

SEQ ID NO: 4187833 - DNA, 25 bp, Homo sapien
tataagaacatacagagatgggctg

SEQ ID NO: 4187834 - DNA, 25 bp, Homo sapien
tgcatataagaacatacagagatgg

SEQ ID NO: 4187835 - DNA, 25 bp, Homo sapien
ggcacaaggaatgaagctgccactg

SEQ ID NO: 4187836 - DNA, 25 bp, Homo sapien
ggcccagaggatcccggaggcctca

SEQ ID NO: 4187837 - DNA, 25 bp, Homo sapien
gctgccactgtcatttttcaaccat

SEQ ID NO: 4187838 - DNA, 25 bp, Homo sapien
aaagtttggcttcccatagatgtca

SEQ ID NO: 4187839 - DNA, 25 bp, Homo sapien
gctcaatgcatctcttatcacactg

SEQ ID NO: 4187840 - DNA, 25 bp, Homo sapien
tcagcacatatcctggaagtcaggg

SEQ ID NO: 4187841 - DNA, 25 bp, Homo sapien
tcatccttctagagagtggacttct

SEQ ID NO: 4187842 - DNA, 25 bp, Homo sapien
cacactgtgagagtgataaggtcca

SEQ ID NO: 4187843 - DNA, 25 bp, Homo sapien
gttttccactcctcttcccacagct

SEQ ID NO: 4187844 - DNA, 25 bp, Homo sapien
ctagttttccactcctcttcccaca

SEQ ID NO: 4187845 - DNA, 25 bp, Homo sapien
tcttcccacagctgttctctcagga

SEQ ID NO: 4187846 - DNA, 25 bp, Homo sapien
ttatctagttttccactcctcttcc

SEQ ID NO: 4187847 - DNA, 25 bp, Homo sapien
tgagatgaaatgttcaaatggcaca

SEQ ID NO: 4187848 - DNA, 25 bp, Homo sapien
tggaggttgaatcatagatagacaa

SEQ ID NO: 4187849 - DNA, 25 bp, Homo sapien
taagtaaatctcagaccccaaggca

SEQ ID NO: 4187850 - DNA, 25 bp, Homo sapien
caaatggcacattccacattgaaca

SEQ ID NO: 4187851 - DNA, 25 bp, Homo sapien
aatctacggactcgaaatctcagag

SEQ ID NO: 4187852 - DNA, 25 bp, Homo sapien
tggagcaacttcattccacttgtct

SEQ ID NO: 4187853 - DNA, 25 bp, Homo sapien
agcaacttcattccacttgtctgtg

SEQ ID NO: 4187854 - DNA, 25 bp, Homo sapien
tgtgttctctaatctacggactcga

SEQ ID NO: 4187855 - DNA, 25 bp, Homo sapien
ggtgtccctctaagagacagtcttc

SEQ ID NO: 4187856 - DNA, 25 bp, Homo sapien
gaaggttcaaaagacccgagagtca

SEQ ID NO: 4187857 - DNA, 25 bp, Homo sapien
tccactctataggagaaagaaggtt

SEQ ID NO: 4187858 - DNA, 25 bp, Homo sapien
aggttcaaaagacccgagagtcagc

SEQ ID NO: 4187859 - DNA, 25 bp, Homo sapien
aaggccagcatgcagttttaaccag

SEQ ID NO: 4187860 - DNA, 25 bp, Homo sapien
tacaagctcataaggccagcatgca

SEQ ID NO: 4187861 - DNA, 25 bp, Homo sapien
gctcataaggccagcatgcagtttt

SEQ ID NO: 4187862 - DNA, 25 bp, Homo sapien
gctgggggcctacaagctcataagg

SEQ ID NO: 4187863 - DNA, 25 bp, Homo sapien
ctgagttggttgaggactggagaaa

SEQ ID NO: 4187864 - DNA, 25 bp, Homo sapien
gataattaaacccagtcttcaggac

SEQ ID NO: 4187865 - DNA, 25 bp, Homo sapien
gaagtgactcgttctaagccgcatg

SEQ ID NO: 4187866 - DNA, 25 bp, Homo sapien
gctgacccaggacaaatcgtagatc

SEQ ID NO: 4187867 - DNA, 25 bp, Homo sapien
ggtgactgttggacagagctgaccc

SEQ ID NO: 4187868 - DNA, 25 bp, Homo sapien
gctggcagtcaatggaggtaagcct

SEQ ID NO: 4187869 - DNA, 25 bp, Homo sapien
tccccagaactgcatccctttagtg

SEQ ID NO: 4187870 - DNA, 25 bp, Homo sapien
gaaatatgctgttctctttctcccc

SEQ ID NO: 4187871 - DNA, 25 bp, Homo sapien
ggtaggagttcggaagaaatatgct

SEQ ID NO: 4187872 - DNA, 25 bp, Homo sapien
tacttagggcctggggcttagctga

SEQ ID NO: 4187873 - DNA, 25 bp, Homo sapien
ttagggcctggggcttagctgacat

SEQ ID NO: 4187874 - DNA, 25 bp, Homo sapien
ttacttagggcctggggcttagctg

SEQ ID NO: 4187875 - DNA, 25 bp, Homo sapien
cttagggcctggggcttagctgaca

SEQ ID NO: 4187876 - DNA, 25 bp, Homo sapien
gtggagagaggaggattagaaagaa

SEQ ID NO: 4187877 - DNA, 25 bp, Homo sapien
tgttgaattaagctgggccacgtaa

SEQ ID NO: 4187878 - DNA, 25 bp, Homo sapien
cacgtaagagtcaggagggtccctt

SEQ ID NO: 4187879 - DNA, 25 bp, Homo sapien
taagctgggccacgtaagagtcagg

SEQ ID NO: 4187880 - DNA, 25 bp, Homo sapien
ttctgttgaattaagctgggccacg

SEQ ID NO: 4187881 - DNA, 25 bp, Homo sapien
tgagtggtatgactcagtttctgct

SEQ ID NO: 4187882 - DNA, 25 bp, Homo sapien
tatgatatttggtgaagtgcttgag

SEQ ID NO: 4187883 - DNA, 25 bp, Homo sapien
gatgatgtctatgatatttggtgaa

SEQ ID NO: 4187884 - DNA, 25 bp, Homo sapien
tgcttgagctaagttcacggctgaa

SEQ ID NO: 4187885 - DNA, 25 bp, Homo sapien
tgggctttccctgcatgtattcttt

SEQ ID NO: 4187886 - DNA, 25 bp, Homo sapien
tgacaccaaactgctctgggctttc

SEQ ID NO: 4187887 - DNA, 25 bp, Homo sapien
gggctttccctgcatgtattctttt

SEQ ID NO: 4187888 - DNA, 25 bp, Homo sapien
taaaatttgaatgcaagtttcatca

SEQ ID NO: 4187889 - DNA, 25 bp, Homo sapien
catcaagcctcaatgaactggtaat

SEQ ID NO: 4187890 - DNA, 25 bp, Homo sapien
gaactggtaattatatgtatttcag

SEQ ID NO: 4187891 - DNA, 25 bp, Homo sapien
caaatatgcccttatgaatcccaca

SEQ ID NO: 4187892 - DNA, 25 bp, Homo sapien
tggtgctgaatggaacacaaaccat

SEQ ID NO: 4187893 - DNA, 25 bp, Homo sapien
ctggtgctgaatggaacacaaacca

SEQ ID NO: 4187894 - DNA, 25 bp, Homo sapien
ggaaagaccagaattccatgttccc

SEQ ID NO: 4187895 - DNA, 25 bp, Homo sapien
gaatgattcttctcggatgtgaggg

SEQ ID NO: 4187896 - DNA, 25 bp, Homo sapien
acaggaaagaccagaattccatgtt

SEQ ID NO: 4187897 - DNA, 25 bp, Homo sapien
gaggggcaccgtttgttccatgaga

SEQ ID NO: 4187898 - DNA, 25 bp, Homo sapien
gagaatgtgggctttggctacaaat

SEQ ID NO: 4187899 - DNA, 25 bp, Homo sapien
agagaatgtgggctttggctacaaa

SEQ ID NO: 4187900 - DNA, 25 bp, Homo sapien
ctacaaattcacaataatccattat

SEQ ID NO: 4187901 - DNA, 25 bp, Homo sapien
aatgtgggctttggctacaaattca

SEQ ID NO: 4187902 - DNA, 25 bp, Homo sapien
ttactgatacttttggttggaactg

SEQ ID NO: 4187903 - DNA, 25 bp, Homo sapien
cttactgatacttttggttggaact

SEQ ID NO: 4187904 - DNA, 25 bp, Homo sapien
tcatcaggggatctttgaggttcaa

SEQ ID NO: 4187905 - DNA, 25 bp, Homo sapien
tggattgttatccaggatgcctgca

SEQ ID NO: 4187906 - DNA, 25 bp, Homo sapien
tcatggattgttatccaggatgcct

SEQ ID NO: 4187907 - DNA, 25 bp, Homo sapien
catcaggggatctttgaggttcaag

SEQ ID NO: 4187908 - DNA, 25 bp, Homo sapien
tcaggttagttaatttgggggcatc

SEQ ID NO: 4187909 - DNA, 25 bp, Homo sapien
cttgcaattaaaatgctgatgccgg

SEQ ID NO: 4187910 - DNA, 25 bp, Homo sapien
taaaatgctgatgccggcaagtttc

SEQ ID NO: 4187911 - DNA, 25 bp, Homo sapien
gctgatgccggcaagtttcagcatc

SEQ ID NO: 4187912 - DNA, 25 bp, Homo sapien
tctattaggtaagaggatgtgggca

SEQ ID NO: 4187913 - DNA, 25 bp, Homo sapien
atgtgggcagctccgcagtgaccca

SEQ ID NO: 4187914 - DNA, 25 bp, Homo sapien
ctgaagtccaccttctattaggtaa

SEQ ID NO: 4187915 - DNA, 25 bp, Homo sapien
gatgtgggcagctccgcagtgaccc

SEQ ID NO: 4187916 - DNA, 25 bp, Homo sapien
cggtcactaggaaagtcagggtgct

SEQ ID NO: 4187917 - DNA, 25 bp, Homo sapien
ctcggtcactaggaaagtcagggtg

SEQ ID NO: 4187918 - DNA, 25 bp, Homo sapien
actaggaaagtcagggtgcttgttc

SEQ ID NO: 4187919 - DNA, 25 bp, Homo sapien
aagtcagggtgcttgttccctgccc

SEQ ID NO: 4187920 - DNA, 25 bp, Homo sapien
gtcacagtgctatcaagaatcttac

SEQ ID NO: 4187921 - DNA, 25 bp, Homo sapien
gaccatctgctgtcacagtgctatc

SEQ ID NO: 4187922 - DNA, 25 bp, Homo sapien
ttatcaggcaggtacaaaaagcatg

SEQ ID NO: 4187923 - DNA, 25 bp, Homo sapien
ttagcatcagctggaattatcaggc

SEQ ID NO: 4187924 - DNA, 25 bp, Homo sapien
tttcccaaccttgctctccatccat

SEQ ID NO: 4187925 - DNA, 25 bp, Homo sapien
tgtatgtatgcactcaatgtttttt

SEQ ID NO: 4187926 - DNA, 25 bp, Homo sapien
ttcctactttcccaaccttgctctc

SEQ ID NO: 4187927 - DNA, 25 bp, Homo sapien
ctactttcccaaccttgctctccat

SEQ ID NO: 4187928 - DNA, 25 bp, Homo sapien
tccgggacccataagcagggcttct

SEQ ID NO: 4187929 - DNA, 25 bp, Homo sapien
gagtttgacccaaccccaagatatg

SEQ ID NO: 4187930 - DNA, 25 bp, Homo sapien
gccggagcactagcagagtcaacct

SEQ ID NO: 4187931 - DNA, 25 bp, Homo sapien
tgactctccggcctggattgcctcg

SEQ ID NO: 4187932 - DNA, 25 bp, Homo sapien
catccacccaactcgcccaggtggg

SEQ ID NO: 4187933 - DNA, 25 bp, Homo sapien
gtggggcgaatggagttggggagaa

SEQ ID NO: 4187934 - DNA, 25 bp, Homo sapien
gacatccacccaactcgcccaggtg

SEQ ID NO: 4187935 - DNA, 25 bp, Homo sapien
ctgacatccacccaactcgcccagg

SEQ ID NO: 4187936 - DNA, 25 bp, Homo sapien
cttcaaagccggattttgcatcctg

SEQ ID NO: 4187937 - DNA, 25 bp, Homo sapien
gacagacctcgtcccgggctgaatt

SEQ ID NO: 4187938 - DNA, 25 bp, Homo sapien
tctccactcttcgagattggcacac

SEQ ID NO: 4187939 - DNA, 25 bp, Homo sapien
cttcgagattggcacacccaggtaa

SEQ ID NO: 4187940 - DNA, 25 bp, Homo sapien
gttgagcgacaaagctgagcagaaa

SEQ ID NO: 4187941 - DNA, 25 bp, Homo sapien
cccaggagctcagttgagcgacaaa

SEQ ID NO: 4187942 - DNA, 25 bp, Homo sapien
tagagtggagatggagaccaagcac

SEQ ID NO: 4187943 - DNA, 25 bp, Homo sapien
ttggagatctaaatcaagtgtcccc

SEQ ID NO: 4187944 - DNA, 25 bp, Homo sapien
cgcgccgcgatacgaccgctccacc

SEQ ID NO: 4187945 - DNA, 25 bp, Homo sapien
ccgcgccgcgatacgaccgctccac

SEQ ID NO: 4187946 - DNA, 25 bp, Homo sapien
acagttaagcacccatctaagaagt

SEQ ID NO: 4187947 - DNA, 25 bp, Homo sapien
tggtgagtgccaaaaagtgtaactc

SEQ ID NO: 4187948 - DNA, 25 bp, Homo sapien
taaagctgcacgttttctgcgcact

SEQ ID NO: 4187949 - DNA, 25 bp, Homo sapien
cttcagtgtcatgccttcagaaaaa

SEQ ID NO: 4187950 - DNA, 25 bp, Homo sapien
cactggcatgcaggcaactgtttgt

SEQ ID NO: 4187951 - DNA, 25 bp, Homo sapien
ttgtttctaattacggagctgaagc

SEQ ID NO: 4187952 - DNA, 25 bp, Homo sapien
gcgagtgaatctacccagagctgaa

SEQ ID NO: 4187953 - DNA, 25 bp, Homo sapien
tttgcaacttgggaacaccagggcc

SEQ ID NO: 4187954 - DNA, 25 bp, Homo sapien
ttatcaaacagaaacccggcgagtg

SEQ ID NO: 4187955 - DNA, 25 bp, Homo sapien
cataagacactgagcggatgcctcc

SEQ ID NO: 4187956 - DNA, 25 bp, Homo sapien
aggatccaaggtttttgatgcaggg

SEQ ID NO: 4187957 - DNA, 25 bp, Homo sapien
tccaaggtttttgatgcagggcact

SEQ ID NO: 4187958 - DNA, 25 bp, Homo sapien
ccaaggtttttgatgcagggcactg

SEQ ID NO: 4187959 - DNA, 25 bp, Homo sapien
gatccaaggtttttgatgcagggca

SEQ ID NO: 4187960 - DNA, 25 bp, Homo sapien
tgtgcccaaggccacttgtgctacc

SEQ ID NO: 4187961 - DNA, 25 bp, Homo sapien
tgcccaaggccacttgtgctaccca

SEQ ID NO: 4187962 - DNA, 25 bp, Homo sapien
gctgtgcccaaggccacttgtgcta

SEQ ID NO: 4187963 - DNA, 25 bp, Homo sapien
gcccaaggccacttgtgctacccat

SEQ ID NO: 4187964 - DNA, 25 bp, Homo sapien
tatggttgcttgtttgacatgcccc

SEQ ID NO: 4187965 - DNA, 25 bp, Homo sapien
tcgttgccctggttagttccactca

SEQ ID NO: 4187966 - DNA, 25 bp, Homo sapien
ccactcgttgccctggttagttcca

SEQ ID NO: 4187967 - DNA, 25 bp, Homo sapien
tgagttctgatatggttgcttgttt

SEQ ID NO: 4187968 - DNA, 25 bp, Homo sapien
acagcaaaggtctttacccaggact

SEQ ID NO: 4187969 - DNA, 25 bp, Homo sapien
ggacagcaaaggtctttacccagga

SEQ ID NO: 4187970 - DNA, 25 bp, Homo sapien
ttggacagcaaaggtctttacccag

SEQ ID NO: 4187971 - DNA, 25 bp, Homo sapien
gacagcaaaggtctttacccaggac

SEQ ID NO: 4187972 - DNA, 25 bp, Homo sapien
attaagggagatccacctacatttt

SEQ ID NO: 4187973 - DNA, 25 bp, Homo sapien
ttaagggagatccacctacattttg

SEQ ID NO: 4187974 - DNA, 25 bp, Homo sapien
gctgctggtgtcaatggtgggttga

SEQ ID NO: 4187975 - DNA, 25 bp, Homo sapien
tgggggctcacattgtggctgctgg

SEQ ID NO: 4187976 - DNA, 25 bp, Homo sapien
tgactgaacctttctttccatctac

SEQ ID NO: 4187977 - DNA, 25 bp, Homo sapien
cctctgctccttactgattacatag

SEQ ID NO: 4187978 - DNA, 25 bp, Homo sapien
tctgctccttactgattacatagca

SEQ ID NO: 4187979 - DNA, 25 bp, Homo sapien
gcctctgctccttactgattacata

SEQ ID NO: 4187980 - DNA, 25 bp, Homo sapien
tgctccttactgattacatagcacc

SEQ ID NO: 4187981 - DNA, 25 bp, Homo sapien
ttggatgggcttgtcatccttctca

SEQ ID NO: 4187982 - DNA, 25 bp, Homo sapien
tttggtcttccgctgatgggcacca

SEQ ID NO: 4187983 - DNA, 25 bp, Homo sapien
tcatctttggtcttccgctgatggg

SEQ ID NO: 4187984 - DNA, 25 bp, Homo sapien
gatgggcaccaaggtaatctggcat

SEQ ID NO: 4187985 - DNA, 25 bp, Homo sapien
ctgcctaaagtaagtgctgtgacca

SEQ ID NO: 4187986 - DNA, 25 bp, Homo sapien
taaagtaagtgctgtgaccataagt

SEQ ID NO: 4187987 - DNA, 25 bp, Homo sapien
cgccatcttcgacttgcttgatctg

SEQ ID NO: 4187988 - DNA, 25 bp, Homo sapien
gagaagttgctgaacgccatcttcg

SEQ ID NO: 4187989 - DNA, 25 bp, Homo sapien
ttaggaggcaatggaatgtgaattt

SEQ ID NO: 4187990 - DNA, 25 bp, Homo sapien
cttaggaggcaatggaatgtgaatt

SEQ ID NO: 4187991 - DNA, 25 bp, Homo sapien
tcactgtatgtgacaggtttttcct

SEQ ID NO: 4187992 - DNA, 25 bp, Homo sapien
cactgtatgtgacaggtttttcctc

SEQ ID NO: 4187993 - DNA, 25 bp, Homo sapien
tcagtctgattagcaactgcccaca

SEQ ID NO: 4187994 - DNA, 25 bp, Homo sapien
tgattagcaactgcccacacacaga

SEQ ID NO: 4187995 - DNA, 25 bp, Homo sapien
gattaaagagcagcatgcccttggg

SEQ ID NO: 4187996 - DNA, 25 bp, Homo sapien
tggattaaagagcagcatgcccttg

SEQ ID NO: 4187997 - DNA, 25 bp, Homo sapien
tcatttcaaagagctcatgaaccat

SEQ ID NO: 4187998 - DNA, 25 bp, Homo sapien
caaagagctcatgaaccatttgagc

SEQ ID NO: 4187999 - DNA, 25 bp, Homo sapien
gagctcatgaaccatttgagccctc

SEQ ID NO: 4188000 - DNA, 25 bp, Homo sapien
aagagctcatgaaccatttgagccc

SEQ ID NO: 4188001 - DNA, 25 bp, Homo sapien
tcatcaaaccaagcccctccaatag

SEQ ID NO: 4188002 - DNA, 25 bp, Homo sapien
ctcgaggatcaaaaccatcaagctg

SEQ ID NO: 4188003 - DNA, 25 bp, Homo sapien
taatattgcctcgaggatcaaaacc

SEQ ID NO: 4188004 - DNA, 25 bp, Homo sapien
gattgatcagttccaacatcgttct

SEQ ID NO: 4188005 - DNA, 25 bp, Homo sapien
ttctgtctaatctgcctggcctcat

SEQ ID NO: 4188006 - DNA, 25 bp, Homo sapien
gaatcttaaagatgtgggtccgacc

SEQ ID NO: 4188007 - DNA, 25 bp, Homo sapien
agtcgtgctaacaattcaaatctga

SEQ ID NO: 4188008 - DNA, 25 bp, Homo sapien
ctgatatatctttcaacactcattg

SEQ ID NO: 4188009 - DNA, 25 bp, Homo sapien
tgaatgagcgtgaatcttaaagatg

SEQ ID NO: 4188010 - DNA, 25 bp, Homo sapien
gacacttctaatctcagcagcagtg

SEQ ID NO: 4188011 - DNA, 25 bp, Homo sapien
acacttctaatctcagcagcagtgc

SEQ ID NO: 4188012 - DNA, 25 bp, Homo sapien
gaggagtagcactgaatttggcata

SEQ ID NO: 4188013 - DNA, 25 bp, Homo sapien
ggagtagcactgaatttggcataag

SEQ ID NO: 4188014 - DNA, 25 bp, Homo sapien
agtagcactgaatttggcataagac

SEQ ID NO: 4188015 - DNA, 25 bp, Homo sapien
tttggcataagacttaatgacctta

SEQ ID NO: 4188016 - DNA, 25 bp, Homo sapien
aacaagtctatataaggttaggatt

SEQ ID NO: 4188017 - DNA, 25 bp, Homo sapien
ttaacaagtctatataaggttagga

SEQ ID NO: 4188018 - DNA, 25 bp, Homo sapien
tggttattaacaagtctatataagg

SEQ ID NO: 4188019 - DNA, 25 bp, Homo sapien
tattaacaagtctatataaggttag

SEQ ID NO: 4188020 - DNA, 25 bp, Homo sapien
aagctgtaatcagtacatttgacca

SEQ ID NO: 4188021 - DNA, 25 bp, Homo sapien
tttgtaaatggttgccgtggtaaca

SEQ ID NO: 4188022 - DNA, 25 bp, Homo sapien
gtggtaacaaggttccacaggcacc

SEQ ID NO: 4188023 - DNA, 25 bp, Homo sapien
ggtggtgaagctgtaatcagtacat

SEQ ID NO: 4188024 - DNA, 25 bp, Homo sapien
ctgcacagtggcccgtacagagtga

SEQ ID NO: 4188025 - DNA, 25 bp, Homo sapien
tggcccgtacagagtgatggggtca

SEQ ID NO: 4188026 - DNA, 25 bp, Homo sapien
gtggcccgtacagagtgatggggtc

SEQ ID NO: 4188027 - DNA, 25 bp, Homo sapien
cacagtggcccgtacagagtgatgg

SEQ ID NO: 4188028 - DNA, 25 bp, Homo sapien
agtggccgtggcctgagcaaaatga

SEQ ID NO: 4188029 - DNA, 25 bp, Homo sapien
gtggccgtggcctgagcaaaatgat

SEQ ID NO: 4188030 - DNA, 25 bp, Homo sapien
agtgggcaatagtagcagcacccat

SEQ ID NO: 4188031 - DNA, 25 bp, Homo sapien
gcttcttcagaggtagttatcctga

SEQ ID NO: 4188032 - DNA, 25 bp, Homo sapien
tatcctgattcgcagtattctgagg

SEQ ID NO: 4188033 - DNA, 25 bp, Homo sapien
gaatgggatagctaatgggctgcca

SEQ ID NO: 4188034 - DNA, 25 bp, Homo sapien
tcaggaatgcaagctggcaagttag

SEQ ID NO: 4188035 - DNA, 25 bp, Homo sapien
tcccacatgcggaatctggaaaggt

SEQ ID NO: 4188036 - DNA, 25 bp, Homo sapien
tccctcttgcatttgaggtgtgtga

SEQ ID NO: 4188037 - DNA, 25 bp, Homo sapien
gaaaggttgaggagttaatgcacca

SEQ ID NO: 4188038 - DNA, 25 bp, Homo sapien
ggtgtgtgaatccatgagacccact

SEQ ID NO: 4188039 - DNA, 25 bp, Homo sapien
tcctgcccgcactggatgccactca

SEQ ID NO: 4188040 - DNA, 25 bp, Homo sapien
ctcctgcccgcactggatgccactc

SEQ ID NO: 4188041 - DNA, 25 bp, Homo sapien
cctgcccgcactggatgccactcac

SEQ ID NO: 4188042 - DNA, 25 bp, Homo sapien
tacaaaatttcacttagactggagg

SEQ ID NO: 4188043 - DNA, 25 bp, Homo sapien
caacatcgtggttatagttaataaa

SEQ ID NO: 4188044 - DNA, 25 bp, Homo sapien
tgaaaattgctgaggatagaaaatg

SEQ ID NO: 4188045 - DNA, 25 bp, Homo sapien
aattcaacaggtctattctacaaca

SEQ ID NO: 4188046 - DNA, 25 bp, Homo sapien
ccaaaactctgacacaaaatgatca

SEQ ID NO: 4188047 - DNA, 25 bp, Homo sapien
gaggagcctcttctatgctcccaac

SEQ ID NO: 4188048 - DNA, 25 bp, Homo sapien
gcctgaggtagaggagcctcttcta

SEQ ID NO: 4188049 - DNA, 25 bp, Homo sapien
gaaatgcctgaataatgtatgcggc

SEQ ID NO: 4188050 - DNA, 25 bp, Homo sapien
cacatggcctttcagtaagaaaagc

SEQ ID NO: 4188051 - DNA, 25 bp, Homo sapien
tgtagtactgtgtaacacatggcct

SEQ ID NO: 4188052 - DNA, 25 bp, Homo sapien
gtaagaaaagcgttgatggcattgc

SEQ ID NO: 4188053 - DNA, 25 bp, Homo sapien
tactttcagtatcttgaggattatt

SEQ ID NO: 4188054 - DNA, 25 bp, Homo sapien
gcccaagattcattgagctggccat

SEQ ID NO: 4188055 - DNA, 25 bp, Homo sapien
gtgtgtgggtgatgcccaagattca

SEQ ID NO: 4188056 - DNA, 25 bp, Homo sapien
gagtagcagaattttcagtggtgtg

SEQ ID NO: 4188057 - DNA, 25 bp, Homo sapien
caggccctctccagagtagcagaat

SEQ ID NO: 4188058 - DNA, 25 bp, Homo sapien
ctgttcaattgtcctcccttcccaa

SEQ ID NO: 4188059 - DNA, 25 bp, Homo sapien
tgttcaattgtcctcccttcccaaa

SEQ ID NO: 4188060 - DNA, 25 bp, Homo sapien
gcaatagccattttccttaagcaac

SEQ ID NO: 4188061 - DNA, 25 bp, Homo sapien
gacgtgactgcatgaagttacccat

SEQ ID NO: 4188062 - DNA, 25 bp, Homo sapien
tttccttaagcaacatctggacgtg

SEQ ID NO: 4188063 - DNA, 25 bp, Homo sapien
agttacccatgggataacaagaagg

SEQ ID NO: 4188064 - DNA, 25 bp, Homo sapien
ttttcattggattgtgactgtttta

SEQ ID NO: 4188065 - DNA, 25 bp, Homo sapien
tttcattggattgtgactgttttaa

SEQ ID NO: 4188066 - DNA, 25 bp, Homo sapien
ggtcttcgtgtattaagtgaagttg

SEQ ID NO: 4188067 - DNA, 25 bp, Homo sapien
cagagcgtggaagctcggaatttga

SEQ ID NO: 4188068 - DNA, 25 bp, Homo sapien
cctgcagagcgtggaagctcggaat

SEQ ID NO: 4188069 - DNA, 25 bp, Homo sapien
agtgaagttgtcattccagcaggcc

SEQ ID NO: 4188070 - DNA, 25 bp, Homo sapien
gggcctgcttttacatgggttacac

SEQ ID NO: 4188071 - DNA, 25 bp, Homo sapien
gactggacttcatgggggcctgctt

SEQ ID NO: 4188072 - DNA, 25 bp, Homo sapien
tacacgtgatgagctgactgggttg

SEQ ID NO: 4188073 - DNA, 25 bp, Homo sapien
gtacaactgtggtttgagactggac

SEQ ID NO: 4188074 - DNA, 25 bp, Homo sapien
tgaattcagagccataaacatctga

SEQ ID NO: 4188075 - DNA, 25 bp, Homo sapien
cagcatcacagggatcaatgccata

SEQ ID NO: 4188076 - DNA, 25 bp, Homo sapien
gggatcaatgccatagttaaaggaa

SEQ ID NO: 4188077 - DNA, 25 bp, Homo sapien
gaatatgttataagtaaagcgcttg

SEQ ID NO: 4188078 - DNA, 25 bp, Homo sapien
agcaaaaaaggatggactcatcaca

SEQ ID NO: 4188079 - DNA, 25 bp, Homo sapien
tacttcacaaaagtacttctttcca

SEQ ID NO: 4188080 - DNA, 25 bp, Homo sapien
tcatcacacccgagtcaagaaagca

SEQ ID NO: 4188081 - DNA, 25 bp, Homo sapien
cgactctcctcagactcgacattag

SEQ ID NO: 4188082 - DNA, 25 bp, Homo sapien
aggaggaactgctaccacttcaaaa

SEQ ID NO: 4188083 - DNA, 25 bp, Homo sapien
gttaggaggaactgctaccacttca

SEQ ID NO: 4188084 - DNA, 25 bp, Homo sapien
gagttaggaggaactgctaccactt

SEQ ID NO: 4188085 - DNA, 25 bp, Homo sapien
taggaggaactgctaccacttcaaa

SEQ ID NO: 4188086 - DNA, 25 bp, Homo sapien
cagaaacaagaagccaaggctaagg

SEQ ID NO: 4188087 - DNA, 25 bp, Homo sapien
agccaaggctaaggcttgctgccct

SEQ ID NO: 4188088 - DNA, 25 bp, Homo sapien
aagaagccaaggctaaggcttgctg

SEQ ID NO: 4188089 - DNA, 25 bp, Homo sapien
gcagaaacaagaagccaaggctaag

SEQ ID NO: 4188090 - DNA, 25 bp, Homo sapien
caactccttggctagtacacttcgg

SEQ ID NO: 4188091 - DNA, 25 bp, Homo sapien
caaagtcacaaacttcaactccttg

SEQ ID NO: 4188092 - DNA, 25 bp, Homo sapien
aactccttggctagtacacttcggt

SEQ ID NO: 4188093 - DNA, 25 bp, Homo sapien
tcaactccttggctagtacacttcg

SEQ ID NO: 4188094 - DNA, 25 bp, Homo sapien
ccagtatatagattatgtgctgaga

SEQ ID NO: 4188095 - DNA, 25 bp, Homo sapien
tttataagccaacccaagcgacagg

SEQ ID NO: 4188096 - DNA, 25 bp, Homo sapien
gcctctggtacctctttttataagc

SEQ ID NO: 4188097 - DNA, 25 bp, Homo sapien
taatgtggaagttacccattccagt

SEQ ID NO: 4188098 - DNA, 25 bp, Homo sapien
tacagtcgaggctatatccagtgga

SEQ ID NO: 4188099 - DNA, 25 bp, Homo sapien
caaatctggcatgtggcttagggtg

SEQ ID NO: 4188100 - DNA, 25 bp, Homo sapien
tattacatccccgtctgaggacagg

SEQ ID NO: 4188101 - DNA, 25 bp, Homo sapien
aattctcatgatagttggcccactg

SEQ ID NO: 4188102 - DNA, 25 bp, Homo sapien
ggtcagtgggaaaggtgtcaatggg

SEQ ID NO: 4188103 - DNA, 25 bp, Homo sapien
gccatgaggattcctttatggggtc

SEQ ID NO: 4188104 - DNA, 25 bp, Homo sapien
ggacttcggtctccatgccgaaaca

SEQ ID NO: 4188105 - DNA, 25 bp, Homo sapien
tggccaaatccttgtggccatgagg

SEQ ID NO: 4188106 - DNA, 25 bp, Homo sapien
cattcaaagagacccacttggtggg

SEQ ID NO: 4188107 - DNA, 25 bp, Homo sapien
tgtggaagaagctcaaccatctgat

SEQ ID NO: 4188108 - DNA, 25 bp, Homo sapien
ggatccttgttggtagagcattcaa

SEQ ID NO: 4188109 - DNA, 25 bp, Homo sapien
tgcattagctcagtggtccacaacc

SEQ ID NO: 4188110 - DNA, 25 bp, Homo sapien
tatatctctttcttatatactctcc

SEQ ID NO: 4188111 - DNA, 25 bp, Homo sapien
tgttcatgtttataggactcattca

SEQ ID NO: 4188112 - DNA, 25 bp, Homo sapien
ctctttcttatatactctccaagtt

SEQ ID NO: 4188113 - DNA, 25 bp, Homo sapien
ctgttcatgtttataggactcattc

SEQ ID NO: 4188114 - DNA, 25 bp, Homo sapien
tcagaaagaggaactgtgtgcaccg

SEQ ID NO: 4188115 - DNA, 25 bp, Homo sapien
gctgccagagtaggataggattcca

SEQ ID NO: 4188116 - DNA, 25 bp, Homo sapien
tgtcatagcactcatcaaagtccgg

SEQ ID NO: 4188117 - DNA, 25 bp, Homo sapien
caccgggatgggctgccagagtagg

SEQ ID NO: 4188118 - DNA, 25 bp, Homo sapien
tagctagggttttccatgtcctaaa

SEQ ID NO: 4188119 - DNA, 25 bp, Homo sapien
tccacaactgttgagtagcctgcct

SEQ ID NO: 4188120 - DNA, 25 bp, Homo sapien
aaaactgcacagctcaaggagtgtc

SEQ ID NO: 4188121 - DNA, 25 bp, Homo sapien
cattctaggtccatctgaaatctcc

SEQ ID NO: 4188122 - DNA, 25 bp, Homo sapien
caaatgcttaacactggtaatcaca

SEQ ID NO: 4188123 - DNA, 25 bp, Homo sapien
aaatccctaagtccctagatgcagc

SEQ ID NO: 4188124 - DNA, 25 bp, Homo sapien
ggtaatcacaatacttccctcatga

SEQ ID NO: 4188125 - DNA, 25 bp, Homo sapien
ggatagtaacctaccccagaggtca

SEQ ID NO: 4188126 - DNA, 25 bp, Homo sapien
aagactgttcattaaaaggcctgga

SEQ ID NO: 4188127 - DNA, 25 bp, Homo sapien
caagctactgtcaggcaagtgccca

SEQ ID NO: 4188128 - DNA, 25 bp, Homo sapien
aaatataaacttgacgagagccagg

SEQ ID NO: 4188129 - DNA, 25 bp, Homo sapien
tcactgctgcaatgtcaatgcccag

SEQ ID NO: 4188130 - DNA, 25 bp, Homo sapien
acgccattctccttcctcactctcc

SEQ ID NO: 4188131 - DNA, 25 bp, Homo sapien
ccaccgcgcccggcctattattatt

SEQ ID NO: 4188132 - DNA, 25 bp, Homo sapien
cggcctattattattttttaagcat

SEQ ID NO: 4188133 - DNA, 25 bp, Homo sapien
tcactctcctgagtagctgggacta

SEQ ID NO: 4188134 - DNA, 25 bp, Homo sapien
tattttgttgcccttactttccatc

SEQ ID NO: 4188135 - DNA, 25 bp, Homo sapien
caggtttgtggctctcaagtttatt

SEQ ID NO: 4188136 - DNA, 25 bp, Homo sapien
caacgcatgtatgtatggagaaagg

SEQ ID NO: 4188137 - DNA, 25 bp, Homo sapien
tgcagactgttaagagtacgtatta

SEQ ID NO: 4188138 - DNA, 25 bp, Homo sapien
gcagttcctgaaaggcaggtatagc

SEQ ID NO: 4188139 - DNA, 25 bp, Homo sapien
ttcttgaaaacgagggcagttcctg

SEQ ID NO: 4188140 - DNA, 25 bp, Homo sapien
agttcctgaaaggcaggtatagcaa

SEQ ID NO: 4188141 - DNA, 25 bp, Homo sapien
gggcagttcctgaaaggcaggtata

SEQ ID NO: 4188142 - DNA, 25 bp, Homo sapien
tggaattcctctgatttcaaagtct

SEQ ID NO: 4188143 - DNA, 25 bp, Homo sapien
tctggaattcctctgatttcaaagt

SEQ ID NO: 4188144 - DNA, 25 bp, Homo sapien
cttataagggtgcagcctcttctgg

SEQ ID NO: 4188145 - DNA, 25 bp, Homo sapien
tataagggtgcagcctcttctggaa

SEQ ID NO: 4188146 - DNA, 25 bp, Homo sapien
gccactgacagatgcattcgtccca

SEQ ID NO: 4188147 - DNA, 25 bp, Homo sapien
cattgctgtaaccagccactgacag

SEQ ID NO: 4188148 - DNA, 25 bp, Homo sapien
aagggaagcaggagtgatgacctcc

SEQ ID NO: 4188149 - DNA, 25 bp, Homo sapien
gcttcatcttgtgtcttggccctca

SEQ ID NO: 4188150 - DNA, 25 bp, Homo sapien
tggttcctctcaaggccatgagtaa

SEQ ID NO: 4188151 - DNA, 25 bp, Homo sapien
agtaaaggattcaaaaggactggct

SEQ ID NO: 4188152 - DNA, 25 bp, Homo sapien
ctggcttgtctattggcttgtgacc

SEQ ID NO: 4188153 - DNA, 25 bp, Homo sapien
tggcttgtctattggcttgtgaccc

SEQ ID NO: 4188154 - DNA, 25 bp, Homo sapien
aaataatgctagtggttacctgtgg

SEQ ID NO: 4188155 - DNA, 25 bp, Homo sapien
tatatgaagacaataatcccagccc

SEQ ID NO: 4188156 - DNA, 25 bp, Homo sapien
caaggtgcccaaccctatgaatagt

SEQ ID NO: 4188157 - DNA, 25 bp, Homo sapien
tattatcccacaggtattcttgtga

SEQ ID NO: 4188158 - DNA, 25 bp, Homo sapien
tgcccggccttctatttggtgttca

SEQ ID NO: 4188159 - DNA, 25 bp, Homo sapien
atgattgattgatggctggcagtcc

SEQ ID NO: 4188160 - DNA, 25 bp, Homo sapien
cagaacctacatggcaagaacacgg

SEQ ID NO: 4188161 - DNA, 25 bp, Homo sapien
ccagaaagccaaggccgggattaga

SEQ ID NO: 4188162 - DNA, 25 bp, Homo sapien
ccttgtgaggcaaatgcgcccctgt

SEQ ID NO: 4188163 - DNA, 25 bp, Homo sapien
taatctcccacttgtataacccaga

SEQ ID NO: 4188164 - DNA, 25 bp, Homo sapien
aattgtttgttgtagggagctctcc

SEQ ID NO: 4188165 - DNA, 25 bp, Homo sapien
taacccagaatatctcccgacattg

SEQ ID NO: 4188166 - DNA, 25 bp, Homo sapien
tcacaatataaagggtcgtagactt

SEQ ID NO: 4188167 - DNA, 25 bp, Homo sapien
ctcacaatataaagggtcgtagact

SEQ ID NO: 4188168 - DNA, 25 bp, Homo sapien
tccaaaaaggtcctggccatgtaat

SEQ ID NO: 4188169 - DNA, 25 bp, Homo sapien
caaattccaaaaaggtcctggccat

SEQ ID NO: 4188170 - DNA, 25 bp, Homo sapien
ttatctggccacaaacggtatttca

SEQ ID NO: 4188171 - DNA, 25 bp, Homo sapien
gaaaagcaatcgtaatttatctggc

SEQ ID NO: 4188172 - DNA, 25 bp, Homo sapien
gaaacaccatgtaaccttgaaaagc

SEQ ID NO: 4188173 - DNA, 25 bp, Homo sapien
ggtatttcaaatgcatcgcaaagca

SEQ ID NO: 4188174 - DNA, 25 bp, Homo sapien
agaggtagggcctcattatgctgcc

SEQ ID NO: 4188175 - DNA, 25 bp, Homo sapien
gaggtagggcctcattatgctgccc

SEQ ID NO: 4188176 - DNA, 25 bp, Homo sapien
agggtaaagtgaaattgtgaacact

SEQ ID NO: 4188177 - DNA, 25 bp, Homo sapien
ggagggtaaagtgaaattgtgaaca

SEQ ID NO: 4188178 - DNA, 25 bp, Homo sapien
ctcaacttagtcatggtgtcctcag

SEQ ID NO: 4188179 - DNA, 25 bp, Homo sapien
gagggtaaagtgaaattgtgaacac

SEQ ID NO: 4188180 - DNA, 25 bp, Homo sapien
cataccgggttttgttaaagctcag

SEQ ID NO: 4188181 - DNA, 25 bp, Homo sapien
tactctctggcagtcagacctgtgg

SEQ ID NO: 4188182 - DNA, 25 bp, Homo sapien
gaaagctggattggcacactaggac

SEQ ID NO: 4188183 - DNA, 25 bp, Homo sapien
gatcatggactattctctgtggacc

SEQ ID NO: 4188184 - DNA, 25 bp, Homo sapien
gaatacatgatgagttttttgtagc

SEQ ID NO: 4188185 - DNA, 25 bp, Homo sapien
ttgaggatttcattgaccaggacac

SEQ ID NO: 4188186 - DNA, 25 bp, Homo sapien
gcttggtatctgagttgctctcttc

SEQ ID NO: 4188187 - DNA, 25 bp, Homo sapien
tatctgagttgctctcttcatgtga

SEQ ID NO: 4188188 - DNA, 25 bp, Homo sapien
catctagcgccatctgtaggccact

SEQ ID NO: 4188189 - DNA, 25 bp, Homo sapien
aggaaggagtccgttgtaaacatct

SEQ ID NO: 4188190 - DNA, 25 bp, Homo sapien
tctcaaagtacaattccgtcaagtg

SEQ ID NO: 4188191 - DNA, 25 bp, Homo sapien
gtacaattccgtcaagtggcaagaa

SEQ ID NO: 4188192 - DNA, 25 bp, Homo sapien
tatggctcagaagtgaccacattgc

SEQ ID NO: 4188193 - DNA, 25 bp, Homo sapien
tacaagctgcctgcaagtgagcaca

SEQ ID NO: 4188194 - DNA, 25 bp, Homo sapien
cagcactcttgaaaccgtaggtcca

SEQ ID NO: 4188195 - DNA, 25 bp, Homo sapien
ttgataagcgggttgctgcctccac

SEQ ID NO: 4188196 - DNA, 25 bp, Homo sapien
cgtgctgcgtctcattccgatagta

SEQ ID NO: 4188197 - DNA, 25 bp, Homo sapien
tggctgtttgtggtcatacactccg

SEQ ID NO: 4188198 - DNA, 25 bp, Homo sapien
tacactccgtggaccagtcttgagg

SEQ ID NO: 4188199 - DNA, 25 bp, Homo sapien
atcacagggccaaccagctcagcaa

SEQ ID NO: 4188200 - DNA, 25 bp, Homo sapien
gggcagctactccttctacagagat

SEQ ID NO: 4188201 - DNA, 25 bp, Homo sapien
gggtaatggccaaagtatgttctca

SEQ ID NO: 4188202 - DNA, 25 bp, Homo sapien
tcaggtgaagaggtaggaattgcct

SEQ ID NO: 4188203 - DNA, 25 bp, Homo sapien
taatcatccaaagcccattttcctc

SEQ ID NO: 4188204 - DNA, 25 bp, Homo sapien
gcactgctgcccctttacattaacg

SEQ ID NO: 4188205 - DNA, 25 bp, Homo sapien
ggccagtcatatagttcatgggaac

SEQ ID NO: 4188206 - DNA, 25 bp, Homo sapien
ggttttttgcccatcagcctattca

SEQ ID NO: 4188207 - DNA, 25 bp, Homo sapien
catgggaactctatgaactttgacc

SEQ ID NO: 4188208 - DNA, 25 bp, Homo sapien
tacaagcatagaaaatggacccaag

SEQ ID NO: 4188209 - DNA, 25 bp, Homo sapien
tccataatggtaatagagcacagtg

SEQ ID NO: 4188210 - DNA, 25 bp, Homo sapien
ggctcactgctagaagacagttaca

SEQ ID NO: 4188211 - DNA, 25 bp, Homo sapien
gctttgctctagattctggcagcca

SEQ ID NO: 4188212 - DNA, 25 bp, Homo sapien
tctgcctagaggaattttattctaa

SEQ ID NO: 4188213 - DNA, 25 bp, Homo sapien
ctgcctagaggaattttattctaat

SEQ ID NO: 4188214 - DNA, 25 bp, Homo sapien
tatattgtgcacttcctgagggtgt

SEQ ID NO: 4188215 - DNA, 25 bp, Homo sapien
gagggtgtttccttagcaaattcca

SEQ ID NO: 4188216 - DNA, 25 bp, Homo sapien
tctgaagtggtaaagtccaaactat

SEQ ID NO: 4188217 - DNA, 25 bp, Homo sapien
tgtgtagtcataagacatagccctg

SEQ ID NO: 4188218 - DNA, 25 bp, Homo sapien
tgaactcactgtattagaggccacc

SEQ ID NO: 4188219 - DNA, 25 bp, Homo sapien
tctttggtgaaaatactcctgccac

SEQ ID NO: 4188220 - DNA, 25 bp, Homo sapien
gatttggtggccaaactaatgagcc

SEQ ID NO: 4188221 - DNA, 25 bp, Homo sapien
tctcttctaaggtgagtggccaccc

SEQ ID NO: 4188222 - DNA, 25 bp, Homo sapien
tcagaattgcctaggtttagggcag

SEQ ID NO: 4188223 - DNA, 25 bp, Homo sapien
caggtcagcgttatagctgtcagaa

SEQ ID NO: 4188224 - DNA, 25 bp, Homo sapien
gagtgaatcggagcataccaaagca

SEQ ID NO: 4188225 - DNA, 25 bp, Homo sapien
gagcggtgctggatatcattgaaca

SEQ ID NO: 4188226 - DNA, 25 bp, Homo sapien
cacggcgaatgtggataaacagtag

SEQ ID NO: 4188227 - DNA, 25 bp, Homo sapien
gatgttcccataggattctctctgc

SEQ ID NO: 4188228 - DNA, 25 bp, Homo sapien
gccagcagagtccacggcgaatgtg

SEQ ID NO: 4188229 - DNA, 25 bp, Homo sapien
cagcagatatcaggcaaaaggcaac

SEQ ID NO: 4188230 - DNA, 25 bp, Homo sapien
ctgtcctttagatgcggcaccactg

SEQ ID NO: 4188231 - DNA, 25 bp, Homo sapien
tcctttagatgcggcaccactgaga

SEQ ID NO: 4188232 - DNA, 25 bp, Homo sapien
tgtcctttagatgcggcaccactga

SEQ ID NO: 4188233 - DNA, 25 bp, Homo sapien
tttagatgcggcaccactgagagat

SEQ ID NO: 4188234 - DNA, 25 bp, Homo sapien
tgcactaccactccattatgagaag

SEQ ID NO: 4188235 - DNA, 25 bp, Homo sapien
tagcctgagtgttcatccagcagca

SEQ ID NO: 4188236 - DNA, 25 bp, Homo sapien
tatgagaagacctaggtagcctgag

SEQ ID NO: 4188237 - DNA, 25 bp, Homo sapien
tatttctctccggacaactgtggca

SEQ ID NO: 4188238 - DNA, 25 bp, Homo sapien
ttcccaagctaagaaggtagccacg

SEQ ID NO: 4188239 - DNA, 25 bp, Homo sapien
ggagcaatggcacagatatcccctg

SEQ ID NO: 4188240 - DNA, 25 bp, Homo sapien
taccgtcagaagaccatgtgggcag

SEQ ID NO: 4188241 - DNA, 25 bp, Homo sapien
tgctgagcaaaagtatcaccccagg

SEQ ID NO: 4188242 - DNA, 25 bp, Homo sapien
tgttgacaggattgccactagtgat

SEQ ID NO: 4188243 - DNA, 25 bp, Homo sapien
tgaatatacccagccaactaatagg

SEQ ID NO: 4188244 - DNA, 25 bp, Homo sapien
ggttaggaagacctttcactttgca

SEQ ID NO: 4188245 - DNA, 25 bp, Homo sapien
ctaataggtaagtgtgagggcacac

SEQ ID NO: 4188246 - DNA, 25 bp, Homo sapien
gggacagggatgaaattagaaagca

SEQ ID NO: 4188247 - DNA, 25 bp, Homo sapien
atgcccaacaatggtagattggatt

SEQ ID NO: 4188248 - DNA, 25 bp, Homo sapien
cccaacaatggtagattggattaag

SEQ ID NO: 4188249 - DNA, 25 bp, Homo sapien
ttagaaagcatcattctcagtaagc

SEQ ID NO: 4188250 - DNA, 25 bp, Homo sapien
cattcattttacaaagcgcgctggg

SEQ ID NO: 4188251 - DNA, 25 bp, Homo sapien
agtgtcgcttttcccggcccactct

SEQ ID NO: 4188252 - DNA, 25 bp, Homo sapien
cagaagttccagagcgtcagtgtcg

SEQ ID NO: 4188253 - DNA, 25 bp, Homo sapien
gcccactctgcaccgcagcatgctg

SEQ ID NO: 4188254 - DNA, 25 bp, Homo sapien
cactcatccttttttcgacagaaaa

SEQ ID NO: 4188255 - DNA, 25 bp, Homo sapien
acactcatccttttttcgacagaaa

SEQ ID NO: 4188256 - DNA, 25 bp, Homo sapien
ggacactcatccttttttcgacaga

SEQ ID NO: 4188257 - DNA, 25 bp, Homo sapien
gacactcatccttttttcgacagaa

SEQ ID NO: 4188258 - DNA, 25 bp, Homo sapien
tgctgcagaagctcttgataagcat

SEQ ID NO: 4188259 - DNA, 25 bp, Homo sapien
agtgctgcagaagctcttgataagc

SEQ ID NO: 4188260 - DNA, 25 bp, Homo sapien
gtgctgcagaagctcttgataagca

SEQ ID NO: 4188261 - DNA, 25 bp, Homo sapien
tgacatctttgaacatcacaatgct

SEQ ID NO: 4188262 - DNA, 25 bp, Homo sapien
atgacatctttgaacatcacaatgc

SEQ ID NO: 4188263 - DNA, 25 bp, Homo sapien
aatgacatctttgaacatcacaatg

SEQ ID NO: 4188264 - DNA, 25 bp, Homo sapien
ccgtagtgaagagcaggctaagtgt

SEQ ID NO: 4188265 - DNA, 25 bp, Homo sapien
ttcccatgaccgtagtgaagagcag

SEQ ID NO: 4188266 - DNA, 25 bp, Homo sapien
tttgttcccatgaccgtagtgaaga

SEQ ID NO: 4188267 - DNA, 25 bp, Homo sapien
tgaccgtagtgaagagcaggctaag

SEQ ID NO: 4188268 - DNA, 25 bp, Homo sapien
gcattttgccagcttcatagtaaag

SEQ ID NO: 4188269 - DNA, 25 bp, Homo sapien
ccacatgcaaacactcaattgaagg

SEQ ID NO: 4188270 - DNA, 25 bp, Homo sapien
tatatgtattggtgattggaattgc

SEQ ID NO: 4188271 - DNA, 25 bp, Homo sapien
tggaattgctaaacagttatcacac

SEQ ID NO: 4188272 - DNA, 25 bp, Homo sapien
tagtcttagagtgtttcttatggta

SEQ ID NO: 4188273 - DNA, 25 bp, Homo sapien
ccttgaccatacagattaatctgaa

SEQ ID NO: 4188274 - DNA, 25 bp, Homo sapien
cagtaagaattatgcactggtgata

SEQ ID NO: 4188275 - DNA, 25 bp, Homo sapien
taccaaccattgacaaaatgacact

SEQ ID NO: 4188276 - DNA, 25 bp, Homo sapien
gtctggcaacacagcgacgctccat

SEQ ID NO: 4188277 - DNA, 25 bp, Homo sapien
taggtgcggtcaggccggtccagca

SEQ ID NO: 4188278 - DNA, 25 bp, Homo sapien
ccagaaacagtaggtgcggtcaggc

SEQ ID NO: 4188279 - DNA, 25 bp, Homo sapien
acagtaggtgcggtcaggccggtcc

SEQ ID NO: 4188280 - DNA, 25 bp, Homo sapien
cagaaacagtaggtgcggtcaggcc

SEQ ID NO: 4188281 - DNA, 25 bp, Homo sapien
acttttccgaagcaggtccccagtg

SEQ ID NO: 4188282 - DNA, 25 bp, Homo sapien
cttttccgaagcaggtccccagtga

SEQ ID NO: 4188283 - DNA, 25 bp, Homo sapien
cagtaaactaagatgtccctgaaga

SEQ ID NO: 4188284 - DNA, 25 bp, Homo sapien
taaactaagatgtccctgaagaggc

SEQ ID NO: 4188285 - DNA, 25 bp, Homo sapien
aacgtctcttcatgctgtgcatatt

SEQ ID NO: 4188286 - DNA, 25 bp, Homo sapien
tcatgctgtgcatattccccaatgt

SEQ ID NO: 4188287 - DNA, 25 bp, Homo sapien
ttggattccacgcagcgcgtcaggg

SEQ ID NO: 4188288 - DNA, 25 bp, Homo sapien
cggccgtgggatttggattccacgc

SEQ ID NO: 4188289 - DNA, 25 bp, Homo sapien
ctggcgcctcggtgggtgctgaaaa

SEQ ID NO: 4188290 - DNA, 25 bp, Homo sapien
gtgctgaaaaggacacgcccctggg

SEQ ID NO: 4188291 - DNA, 25 bp, Homo sapien
ggagaggctccagccctagctcctc

SEQ ID NO: 4188292 - DNA, 25 bp, Homo sapien
cttcgcgggaggctggagaggctcc

SEQ ID NO: 4188293 - DNA, 25 bp, Homo sapien
gctggagaggctccagccctagctc

SEQ ID NO: 4188294 - DNA, 25 bp, Homo sapien
ttcgcgggaggctggagaggctcca

SEQ ID NO: 4188295 - DNA, 25 bp, Homo sapien
gcaggaagggtgctcagactaggag

SEQ ID NO: 4188296 - DNA, 25 bp, Homo sapien
ccaaggaaacaagagttgccggcat

SEQ ID NO: 4188297 - DNA, 25 bp, Homo sapien
tgctcagactaggagactggaaggg

SEQ ID NO: 4188298 - DNA, 25 bp, Homo sapien
gaaacaagagttgccggcatccagc

SEQ ID NO: 4188299 - DNA, 25 bp, Homo sapien
aagcaaagaaagtcagtctgcagga

SEQ ID NO: 4188300 - DNA, 25 bp, Homo sapien
aacaaagcaaagaaagtcagtctgc

SEQ ID NO: 4188301 - DNA, 25 bp, Homo sapien
aacgaaacaaagcaaagaaagtcag

SEQ ID NO: 4188302 - DNA, 25 bp, Homo sapien
agcaaagaaagtcagtctgcaggac

SEQ ID NO: 4188303 - DNA, 25 bp, Homo sapien
aaaatcacagcagcggaggaaaggc

SEQ ID NO: 4188304 - DNA, 25 bp, Homo sapien
ggaaaggccacgtgaataagctgcc

SEQ ID NO: 4188305 - DNA, 25 bp, Homo sapien
agccacttcactgagcgtctaagtc

SEQ ID NO: 4188306 - DNA, 25 bp, Homo sapien
gagcgtctaagtcctactttaccca

SEQ ID NO: 4188307 - DNA, 25 bp, Homo sapien
gattaagtctaagtcaaacactgtg

SEQ ID NO: 4188308 - DNA, 25 bp, Homo sapien
tctctggtgggcgatggtttactag

SEQ ID NO: 4188309 - DNA, 25 bp, Homo sapien
cagcactctcggttctgttgaccac

SEQ ID NO: 4188310 - DNA, 25 bp, Homo sapien
gaccactcccgactgcagttttggg

SEQ ID NO: 4188311 - DNA, 25 bp, Homo sapien
ttcacttaagcaatgctttgaaatc

SEQ ID NO: 4188312 - DNA, 25 bp, Homo sapien
cacttaagcaatgctttgaaatcat

SEQ ID NO: 4188313 - DNA, 25 bp, Homo sapien
tcacttaagcaatgctttgaaatca

SEQ ID NO: 4188314 - DNA, 25 bp, Homo sapien
gttcacttaagcaatgctttgaaat

SEQ ID NO: 4188315 - DNA, 25 bp, Homo sapien
ctgaaagctttctttccagaaacat

SEQ ID NO: 4188316 - DNA, 25 bp, Homo sapien
tgcgagtcagcttcacttgttttca

SEQ ID NO: 4188317 - DNA, 25 bp, Homo sapien
aaagcatctccaatttttgcgagtc

SEQ ID NO: 4188318 - DNA, 25 bp, Homo sapien
cctgcaattgtgttccatatttcaa

SEQ ID NO: 4188319 - DNA, 25 bp, Homo sapien
aaattctcaaagacccatgattctt

SEQ ID NO: 4188320 - DNA, 25 bp, Homo sapien
gctgcagtgagcgagccctcatctt

SEQ ID NO: 4188321 - DNA, 25 bp, Homo sapien
cagtgagcgagccctcatcttgcca

SEQ ID NO: 4188322 - DNA, 25 bp, Homo sapien
ctgcagtgagcgagccctcatcttg

SEQ ID NO: 4188323 - DNA, 25 bp, Homo sapien
tgcagtgagcgagccctcatcttgc

SEQ ID NO: 4188324 - DNA, 25 bp, Homo sapien
ttgtgacttagctatttctcccttg

SEQ ID NO: 4188325 - DNA, 25 bp, Homo sapien
gaactggctgctaatgaaagactga

SEQ ID NO: 4188326 - DNA, 25 bp, Homo sapien
gaatcagcctcctaacagtcacatg

SEQ ID NO: 4188327 - DNA, 25 bp, Homo sapien
gatgactcactcgtggaatcagcct

SEQ ID NO: 4188328 - DNA, 25 bp, Homo sapien
ttgttgtgtagaaacatgccagatc

SEQ ID NO: 4188329 - DNA, 25 bp, Homo sapien
tgttgtgtagaaacatgccagatcc

SEQ ID NO: 4188330 - DNA, 25 bp, Homo sapien
ccttattttccctaattatgttcat

SEQ ID NO: 4188331 - DNA, 25 bp, Homo sapien
gttttgttgtgtagaaacatgccag

SEQ ID NO: 4188332 - DNA, 25 bp, Homo sapien
ctctctgaaatggcttacttaggcc

SEQ ID NO: 4188333 - DNA, 25 bp, Homo sapien
aaactgagtaaaaacagcttctcaa

SEQ ID NO: 4188334 - DNA, 25 bp, Homo sapien
cctggggcaactggtcagtcacagc

SEQ ID NO: 4188335 - DNA, 25 bp, Homo sapien
aagctatggcctggggcaactggtc

SEQ ID NO: 4188336 - DNA, 25 bp, Homo sapien
tatggcctggggcaactggtcagtc

SEQ ID NO: 4188337 - DNA, 25 bp, Homo sapien
ggggcaactggtcagtcacagccat

SEQ ID NO: 4188338 - DNA, 25 bp, Homo sapien
agttccaactgaaaagacacgctta

SEQ ID NO: 4188339 - DNA, 25 bp, Homo sapien
agtaatcgcatgagttccaactgaa

SEQ ID NO: 4188340 - DNA, 25 bp, Homo sapien
gggattatatgtagtaatcgcatga

SEQ ID NO: 4188341 - DNA, 25 bp, Homo sapien
tccaactgaaaagacacgcttatac

SEQ ID NO: 4188342 - DNA, 25 bp, Homo sapien
ttccactgcctttacgaaatgtgag

SEQ ID NO: 4188343 - DNA, 25 bp, Homo sapien
tgaggttgaactccgttccttgtcc

SEQ ID NO: 4188344 - DNA, 25 bp, Homo sapien
tgctgcaaatgtctccataaggcca

SEQ ID NO: 4188345 - DNA, 25 bp, Homo sapien
gcctttacgaaatgtgaggttgaac

SEQ ID NO: 4188346 - DNA, 25 bp, Homo sapien
ccttcctgtgatttttccctctgaa

SEQ ID NO: 4188347 - DNA, 25 bp, Homo sapien
tcctgtgatttttccctctgaaaaa

SEQ ID NO: 4188348 - DNA, 25 bp, Homo sapien
ttccctctgaaaaatcagttctaaa

SEQ ID NO: 4188349 - DNA, 25 bp, Homo sapien
ttttccctctgaaaaatcagttcta

SEQ ID NO: 4188350 - DNA, 25 bp, Homo sapien
ataaaatttaatgtatcacagtcac

SEQ ID NO: 4188351 - DNA, 25 bp, Homo sapien
tgaaacgaccaaaaatctaactgtc

SEQ ID NO: 4188352 - DNA, 25 bp, Homo sapien
cacagtcactattgaaacgaccaaa

SEQ ID NO: 4188353 - DNA, 25 bp, Homo sapien
taactgtcatcgtaaatatttagag

SEQ ID NO: 4188354 - DNA, 25 bp, Homo sapien
gcaggattaatttggtcaaagcctc

SEQ ID NO: 4188355 - DNA, 25 bp, Homo sapien
cagagtactctgttggttgcaggat

SEQ ID NO: 4188356 - DNA, 25 bp, Homo sapien
gtcactccagtgatgcttatagcag

SEQ ID NO: 4188357 - DNA, 25 bp, Homo sapien
tctatagtcataggaacagagtact

SEQ ID NO: 4188358 - DNA, 25 bp, Homo sapien
tattgctcgaattctaaaggctctt

SEQ ID NO: 4188359 - DNA, 25 bp, Homo sapien
tagttaccagcatggtctattgcac

SEQ ID NO: 4188360 - DNA, 25 bp, Homo sapien
gatccgcaatgaaatacctatgtag

SEQ ID NO: 4188361 - DNA, 25 bp, Homo sapien
ctctgctaaagatgtgatggattca

SEQ ID NO: 4188362 - DNA, 25 bp, Homo sapien
taaacatgtttctgtaagtgctaga

SEQ ID NO: 4188363 - DNA, 25 bp, Homo sapien
gtgctagaactcttttaacaggctc

SEQ ID NO: 4188364 - DNA, 25 bp, Homo sapien
caatgttgcaatattataggttgcc

SEQ ID NO: 4188365 - DNA, 25 bp, Homo sapien
gccggatcacgttctactaaacatg

SEQ ID NO: 4188366 - DNA, 25 bp, Homo sapien
ctgagtcacagaccaacgcaaatac

SEQ ID NO: 4188367 - DNA, 25 bp, Homo sapien
tgaagaatatttccgtacttgccct

SEQ ID NO: 4188368 - DNA, 25 bp, Homo sapien
ctgttgaagaatatttccgtacttg

SEQ ID NO: 4188369 - DNA, 25 bp, Homo sapien
tctctgttgaagaatatttccgtac

SEQ ID NO: 4188370 - DNA, 25 bp, Homo sapien
cgctgacctttatgggttggtgtca

SEQ ID NO: 4188371 - DNA, 25 bp, Homo sapien
taccagaggctcttactccatccag

SEQ ID NO: 4188372 - DNA, 25 bp, Homo sapien
catcaacaggcatgctgagtaaccc

SEQ ID NO: 4188373 - DNA, 25 bp, Homo sapien
ttggaggcgtagctaagaacctgag

SEQ ID NO: 4188374 - DNA, 25 bp, Homo sapien
tattagcattgaacctgaatacagc

SEQ ID NO: 4188375 - DNA, 25 bp, Homo sapien
tgtaggactccactgtatgaaatat

SEQ ID NO: 4188376 - DNA, 25 bp, Homo sapien
gcatgtaggactccactgtatgaaa

SEQ ID NO: 4188377 - DNA, 25 bp, Homo sapien
attgaacctgaatacagcatctgca

SEQ ID NO: 4188378 - DNA, 25 bp, Homo sapien
tgaagcaacgacatccccttcttgg

SEQ ID NO: 4188379 - DNA, 25 bp, Homo sapien
tggaactgactctcaagttccgcat

SEQ ID NO: 4188380 - DNA, 25 bp, Homo sapien
cttgggacagtaatgctgttatggc

SEQ ID NO: 4188381 - DNA, 25 bp, Homo sapien
ttggatgccacaagcctcctcacag

SEQ ID NO: 4188382 - DNA, 25 bp, Homo sapien
gcatggattattccgttgttgcttc

SEQ ID NO: 4188383 - DNA, 25 bp, Homo sapien
ttactaccttcacccctagacgctc

SEQ ID NO: 4188384 - DNA, 25 bp, Homo sapien
tcaactgctgcatggattattccgt

SEQ ID NO: 4188385 - DNA, 25 bp, Homo sapien
cataagggcacaaagcatatcaact

SEQ ID NO: 4188386 - DNA, 25 bp, Homo sapien
ggaaaagtcccaggtactacacaca

SEQ ID NO: 4188387 - DNA, 25 bp, Homo sapien
gttagatctttactgcgcaaacagc

SEQ ID NO: 4188388 - DNA, 25 bp, Homo sapien
gcttttcaagatcctatggccccta

SEQ ID NO: 4188389 - DNA, 25 bp, Homo sapien
gatatgcctaccttaccagactgtc

SEQ ID NO: 4188390 - DNA, 25 bp, Homo sapien
gttcttgtcttaagtcatagtcatc

SEQ ID NO: 4188391 - DNA, 25 bp, Homo sapien
gaaacttctttgacgagagaagaga

SEQ ID NO: 4188392 - DNA, 25 bp, Homo sapien
aagagaagctttgttcaactgttct

SEQ ID NO: 4188393 - DNA, 25 bp, Homo sapien
gttcaactgttcttgtcttaagtca

SEQ ID NO: 4188394 - DNA, 25 bp, Homo sapien
tctcactatatggagcacagagggc

SEQ ID NO: 4188395 - DNA, 25 bp, Homo sapien
catctccaagagcatatcaaactgc

SEQ ID NO: 4188396 - DNA, 25 bp, Homo sapien
taaaaagggttcttccattggatgc

SEQ ID NO: 4188397 - DNA, 25 bp, Homo sapien
taataactagggcaccagtcccatg

SEQ ID NO: 4188398 - DNA, 25 bp, Homo sapien
tattgccttcataaccaacccagct

SEQ ID NO: 4188399 - DNA, 25 bp, Homo sapien
ctctattattgccttcataaccaac

SEQ ID NO: 4188400 - DNA, 25 bp, Homo sapien
cataaccaacccagctccttttatt

SEQ ID NO: 4188401 - DNA, 25 bp, Homo sapien
cagctccttttattattgccatgga

SEQ ID NO: 4188402 - DNA, 25 bp, Homo sapien
taaggcaccttcacttagggcaagc

SEQ ID NO: 4188403 - DNA, 25 bp, Homo sapien
caagtgtcgaggtaaggcaccttca

SEQ ID NO: 4188404 - DNA, 25 bp, Homo sapien
cttagggcaagctcctgcatttttg

SEQ ID NO: 4188405 - DNA, 25 bp, Homo sapien
cgcagtatgcaagtgtcgaggtaag

SEQ ID NO: 4188406 - DNA, 25 bp, Homo sapien
tgtaagcatcctttgatctgagctt

SEQ ID NO: 4188407 - DNA, 25 bp, Homo sapien
ctttgatctgagcttattgtaaaca

SEQ ID NO: 4188408 - DNA, 25 bp, Homo sapien
catcctttgatctgagcttattgta

SEQ ID NO: 4188409 - DNA, 25 bp, Homo sapien
ctatttgtaagcatcctttgatctg

SEQ ID NO: 4188410 - DNA, 25 bp, Homo sapien
caacaagtttgttgcagttgcatta

SEQ ID NO: 4188411 - DNA, 25 bp, Homo sapien
ttcaacaagtttgttgcagttgcat

SEQ ID NO: 4188412 - DNA, 25 bp, Homo sapien
aacaagtttgttgcagttgcattat

SEQ ID NO: 4188413 - DNA, 25 bp, Homo sapien
tcaacaagtttgttgcagttgcatt

SEQ ID NO: 4188414 - DNA, 25 bp, Homo sapien
tgtctctaacatgcatccgatcagc

SEQ ID NO: 4188415 - DNA, 25 bp, Homo sapien
tcacattgtctctaacatgcatccg

SEQ ID NO: 4188416 - DNA, 25 bp, Homo sapien
ctttccaagtatgccagcaagcctg

SEQ ID NO: 4188417 - DNA, 25 bp, Homo sapien
cagcatccttctcaggtacgagatc

SEQ ID NO: 4188418 - DNA, 25 bp, Homo sapien
gcacacttgggacagtcatatttac

SEQ ID NO: 4188419 - DNA, 25 bp, Homo sapien
aggcacacttgggacagtcatattt

SEQ ID NO: 4188420 - DNA, 25 bp, Homo sapien
ggcacacttgggacagtcatattta

SEQ ID NO: 4188421 - DNA, 25 bp, Homo sapien
tatccctccagtgcatcaatacaag

SEQ ID NO: 4188422 - DNA, 25 bp, Homo sapien
agcaatgcccatcctatccctccag

SEQ ID NO: 4188423 - DNA, 25 bp, Homo sapien
tccagtgcatcaatacaagatccac

SEQ ID NO: 4188424 - DNA, 25 bp, Homo sapien
atcctatccctccagtgcatcaata

SEQ ID NO: 4188425 - DNA, 25 bp, Homo sapien
tgccaggaatttggaagcaaatttt

SEQ ID NO: 4188426 - DNA, 25 bp, Homo sapien
ccaggaatttggaagcaaattttat

SEQ ID NO: 4188427 - DNA, 25 bp, Homo sapien
caggaatttggaagcaaattttatt

SEQ ID NO: 4188428 - DNA, 25 bp, Homo sapien
gccaggaatttggaagcaaatttta

SEQ ID NO: 4188429 - DNA, 25 bp, Homo sapien
gggctaccaaataggcttagtcaga

SEQ ID NO: 4188430 - DNA, 25 bp, Homo sapien
ttctatagttactcaagtattttcc

SEQ ID NO: 4188431 - DNA, 25 bp, Homo sapien
ttatacgtgatgagaaacatttctt

SEQ ID NO: 4188432 - DNA, 25 bp, Homo sapien
gaagatcatcaatttatacgtgatg

SEQ ID NO: 4188433 - DNA, 25 bp, Homo sapien
tcttctctttcgaagaaccactggc

SEQ ID NO: 4188434 - DNA, 25 bp, Homo sapien
tgtcttctctttcgaagaaccactg

SEQ ID NO: 4188435 - DNA, 25 bp, Homo sapien
tttgtcttctctttcgaagaaccac

SEQ ID NO: 4188436 - DNA, 25 bp, Homo sapien
cttctctttcgaagaaccactggct

SEQ ID NO: 4188437 - DNA, 25 bp, Homo sapien
tcgggaggcagaggttgcagtgagc

SEQ ID NO: 4188438 - DNA, 25 bp, Homo sapien
gaggctggagagtcgcttgaactcg

SEQ ID NO: 4188439 - DNA, 25 bp, Homo sapien
caagctacttgtgaggctgaggctg

SEQ ID NO: 4188440 - DNA, 25 bp, Homo sapien
caaaatcacgccattgcactccagc

SEQ ID NO: 4188441 - DNA, 25 bp, Homo sapien
aatctataaatatcccttactgacc

SEQ ID NO: 4188442 - DNA, 25 bp, Homo sapien
cccttactgaccttataataagcaa

SEQ ID NO: 4188443 - DNA, 25 bp, Homo sapien
tagcaggatgcactaagcattttaa

SEQ ID NO: 4188444 - DNA, 25 bp, Homo sapien
ctagacatacatataatgaggaaat

SEQ ID NO: 4188445 - DNA, 25 bp, Homo sapien
atcacatttgcacttccaagttctc

SEQ ID NO: 4188446 - DNA, 25 bp, Homo sapien
tggtggttccaggagatcacatttg

SEQ ID NO: 4188447 - DNA, 25 bp, Homo sapien
tccaaataaggtttgacctggcatg

SEQ ID NO: 4188448 - DNA, 25 bp, Homo sapien
tctctgtcaatattaaatgctctca

SEQ ID NO: 4188449 - DNA, 25 bp, Homo sapien
aaggtaaagaccagatatgtaatta

SEQ ID NO: 4188450 - DNA, 25 bp, Homo sapien
ggtaaagaccagatatgtaattaca

SEQ ID NO: 4188451 - DNA, 25 bp, Homo sapien
gaaaggtaaagaccagatatgtaat

SEQ ID NO: 4188452 - DNA, 25 bp, Homo sapien
gggaaaggtaaagaccagatatgta

SEQ ID NO: 4188453 - DNA, 25 bp, Homo sapien
gtaatctcaggtaatagtctcctat

SEQ ID NO: 4188454 - DNA, 25 bp, Homo sapien
tcatcttcctccaatagtaatctca

SEQ ID NO: 4188455 - DNA, 25 bp, Homo sapien
ccaatagtaatctcaggtaatagtc

SEQ ID NO: 4188456 - DNA, 25 bp, Homo sapien
gatctcttaattgatccactttctt

SEQ ID NO: 4188457 - DNA, 25 bp, Homo sapien
gcaagggcttgtaaacataaacact

SEQ ID NO: 4188458 - DNA, 25 bp, Homo sapien
ggtgagcaagaagcgatgataaagc

SEQ ID NO: 4188459 - DNA, 25 bp, Homo sapien
taaaaggtcctatttcttcgtgaca

SEQ ID NO: 4188460 - DNA, 25 bp, Homo sapien
tctgccataaacaatagcaagggct

SEQ ID NO: 4188461 - DNA, 25 bp, Homo sapien
gagaatcaacctatctcgttcaagt

SEQ ID NO: 4188462 - DNA, 25 bp, Homo sapien
tatctcgttcaagtttatctgtgca

SEQ ID NO: 4188463 - DNA, 25 bp, Homo sapien
ttattaaggatcaacttgttaagga

SEQ ID NO: 4188464 - DNA, 25 bp, Homo sapien
gttaaggaagagaatcaacctatct

SEQ ID NO: 4188465 - DNA, 25 bp, Homo sapien
caagggtaagcaagtccacaaggat

SEQ ID NO: 4188466 - DNA, 25 bp, Homo sapien
agatgtgcaagggtaagcaagtcca

SEQ ID NO: 4188467 - DNA, 25 bp, Homo sapien
agcaagtccacaaggattcttattc

SEQ ID NO: 4188468 - DNA, 25 bp, Homo sapien
aatccatgagatccttaacattttt

SEQ ID NO: 4188469 - DNA, 25 bp, Homo sapien
gcagtggtactgtagctcggcttac

SEQ ID NO: 4188470 - DNA, 25 bp, Homo sapien
tgcagtggtactgtagctcggctta

SEQ ID NO: 4188471 - DNA, 25 bp, Homo sapien
ttgcagtggtactgtagctcggctt

SEQ ID NO: 4188472 - DNA, 25 bp, Homo sapien
tttgtctgcgttgccaaaataccat

SEQ ID NO: 4188473 - DNA, 25 bp, Homo sapien
tacgggccactcctttctttgtctg

SEQ ID NO: 4188474 - DNA, 25 bp, Homo sapien
actcctttctttgtctgcgttgcca

SEQ ID NO: 4188475 - DNA, 25 bp, Homo sapien
tcatgaaatccatacgggccactcc

SEQ ID NO: 4188476 - DNA, 25 bp, Homo sapien
gacagcctgtccactggctaagaga

SEQ ID NO: 4188477 - DNA, 25 bp, Homo sapien
gctaagagacaccacttaagctggg

SEQ ID NO: 4188478 - DNA, 25 bp, Homo sapien
tcaatataagggtagcaaggtcagt

SEQ ID NO: 4188479 - DNA, 25 bp, Homo sapien
gactgaagtggtcgccatccatcca

SEQ ID NO: 4188480 - DNA, 25 bp, Homo sapien
taatatggggaaggcaagtgctatc

SEQ ID NO: 4188481 - DNA, 25 bp, Homo sapien
tagaggccgaatgatggcattgtct

SEQ ID NO: 4188482 - DNA, 25 bp, Homo sapien
tgggtagaggccgaatgatggcatt

SEQ ID NO: 4188483 - DNA, 25 bp, Homo sapien
ggcaagtgctatctgacagcagtct

SEQ ID NO: 4188484 - DNA, 25 bp, Homo sapien
ggtaactgtgggttatcttgcatga

SEQ ID NO: 4188485 - DNA, 25 bp, Homo sapien
aatactccactcagataaaggcggg

SEQ ID NO: 4188486 - DNA, 25 bp, Homo sapien
caaccttctcaacaaggatagggtc

SEQ ID NO: 4188487 - DNA, 25 bp, Homo sapien
cattggaacctgtgtacatcatgat

SEQ ID NO: 4188488 - DNA, 25 bp, Homo sapien
aaagcctgtttggtatgtgtgtatt

SEQ ID NO: 4188489 - DNA, 25 bp, Homo sapien
tgctccagattgcttctggagtatc

SEQ ID NO: 4188490 - DNA, 25 bp, Homo sapien
ttgcttcaggtagaatgtgcccaag

SEQ ID NO: 4188491 - DNA, 25 bp, Homo sapien
tgtgcccaagtatacttctctgaaa

SEQ ID NO: 4188492 - DNA, 25 bp, Homo sapien
tctggagtatcaaattctcctagaa

SEQ ID NO: 4188493 - DNA, 25 bp, Homo sapien
agcaatcttctctatcatcaggcgc

SEQ ID NO: 4188494 - DNA, 25 bp, Homo sapien
tgaaatccgcgagatgggcagcaat

SEQ ID NO: 4188495 - DNA, 25 bp, Homo sapien
ctgaagacgaggtgtgaaatccgcg

SEQ ID NO: 4188496 - DNA, 25 bp, Homo sapien
gggcagcaatcttctctatcatcag

SEQ ID NO: 4188497 - DNA, 25 bp, Homo sapien
caaaatagttcattttcgagttgtg

SEQ ID NO: 4188498 - DNA, 25 bp, Homo sapien
aattggccaatctggaaaccggagt

SEQ ID NO: 4188499 - DNA, 25 bp, Homo sapien
cgagttgtggatagttgattatagg

SEQ ID NO: 4188500 - DNA, 25 bp, Homo sapien
tcacacagttgtttgaggtaataaa

SEQ ID NO: 4188501 - DNA, 25 bp, Homo sapien
tcataagcatcatctattgacatca

SEQ ID NO: 4188502 - DNA, 25 bp, Homo sapien
cttccaggcatcaagggtatctttt

SEQ ID NO: 4188503 - DNA, 25 bp, Homo sapien
tctattgacatcataggtggcttct

SEQ ID NO: 4188504 - DNA, 25 bp, Homo sapien
tcataggtggcttcttttctacttc

SEQ ID NO: 4188505 - DNA, 25 bp, Homo sapien
gtaagctttcctaatcttgctctca

SEQ ID NO: 4188506 - DNA, 25 bp, Homo sapien
tatcagggtggtacttttgtgcaag

SEQ ID NO: 4188507 - DNA, 25 bp, Homo sapien
tcagggtggtacttttgtgcaagtc

SEQ ID NO: 4188508 - DNA, 25 bp, Homo sapien
gtctgaagtaagctttcctaatctt

SEQ ID NO: 4188509 - DNA, 25 bp, Homo sapien
cggttgaagaggatgctctgtgttt

SEQ ID NO: 4188510 - DNA, 25 bp, Homo sapien
ggcccatccactatttttgctgatt

SEQ ID NO: 4188511 - DNA, 25 bp, Homo sapien
aattatattctctggatctggccca

SEQ ID NO: 4188512 - DNA, 25 bp, Homo sapien
ctgatttggtacataaaaattcata

SEQ ID NO: 4188513 - DNA, 25 bp, Homo sapien
tagccgcaggcaacaatggtgattc

SEQ ID NO: 4188514 - DNA, 25 bp, Homo sapien
gcattgagggctgaacagttgacag

SEQ ID NO: 4188515 - DNA, 25 bp, Homo sapien
ggaaagctagctctgtagccgcagg

SEQ ID NO: 4188516 - DNA, 25 bp, Homo sapien
aaaggaggtcatctgaagtttccat

SEQ ID NO: 4188517 - DNA, 25 bp, Homo sapien
gtcaagacagccacacagcgactaa

SEQ ID NO: 4188518 - DNA, 25 bp, Homo sapien
cagcgactaaatgcctcttgtaaca

SEQ ID NO: 4188519 - DNA, 25 bp, Homo sapien
tttactagcacgagtcaagacagcc

SEQ ID NO: 4188520 - DNA, 25 bp, Homo sapien
gacatgtcacttggtttactagcac

SEQ ID NO: 4188521 - DNA, 25 bp, Homo sapien
gatgatgctaggcatttccgtgatc

SEQ ID NO: 4188522 - DNA, 25 bp, Homo sapien
ccgacagagatccttgatgatgcta

SEQ ID NO: 4188523 - DNA, 25 bp, Homo sapien
tgccaaaatatagtacccgacagag

SEQ ID NO: 4188524 - DNA, 25 bp, Homo sapien
ttctctcggcattcctcaaactgag

SEQ ID NO: 4188525 - DNA, 25 bp, Homo sapien
acaggctacctctgaagcatatatc

SEQ ID NO: 4188526 - DNA, 25 bp, Homo sapien
ctgaagcatatatctcagtcacact

SEQ ID NO: 4188527 - DNA, 25 bp, Homo sapien
tagccacagaaacatagggtgtcag

SEQ ID NO: 4188528 - DNA, 25 bp, Homo sapien
gggtgtcagcatgccagctaaactt

SEQ ID NO: 4188529 - DNA, 25 bp, Homo sapien
tctagtgtgtagtcataattaaaca

SEQ ID NO: 4188530 - DNA, 25 bp, Homo sapien
ccaagagcagctacgcggggaatac

SEQ ID NO: 4188531 - DNA, 25 bp, Homo sapien
aatgccactctcttctagtgtgtag

SEQ ID NO: 4188532 - DNA, 25 bp, Homo sapien
ccagcctgaaataggtgtgtctgta

SEQ ID NO: 4188533 - DNA, 25 bp, Homo sapien
agttttctagcaacatagggtgtca

SEQ ID NO: 4188534 - DNA, 25 bp, Homo sapien
tcagagcatggacactcagtttggc

SEQ ID NO: 4188535 - DNA, 25 bp, Homo sapien
aaataccctccaaggcgactcagag

SEQ ID NO: 4188536 - DNA, 25 bp, Homo sapien
gtcacactagccacagcaagttttc

SEQ ID NO: 4188537 - DNA, 25 bp, Homo sapien
tcattagcatcaatccattataaag

SEQ ID NO: 4188538 - DNA, 25 bp, Homo sapien
catgtgaacgttcttaatttttagg

SEQ ID NO: 4188539 - DNA, 25 bp, Homo sapien
gcttaaaggatcttgcactattgat

SEQ ID NO: 4188540 - DNA, 25 bp, Homo sapien
taggttccctagatcaatattattg

SEQ ID NO: 4188541 - DNA, 25 bp, Homo sapien
tgttgctgttaagcatcttcaaaat

SEQ ID NO: 4188542 - DNA, 25 bp, Homo sapien
ctgtgttgctgttaagcatcttcaa

SEQ ID NO: 4188543 - DNA, 25 bp, Homo sapien
tgtgttgctgttaagcatcttcaaa

SEQ ID NO: 4188544 - DNA, 25 bp, Homo sapien
tctgtgttgctgttaagcatcttca

SEQ ID NO: 4188545 - DNA, 25 bp, Homo sapien
tcttgttgggattcaagaaattcaa

SEQ ID NO: 4188546 - DNA, 25 bp, Homo sapien
cttgttgggattcaagaaattcaag

SEQ ID NO: 4188547 - DNA, 25 bp, Homo sapien
gttgggattcaagaaattcaagtaa

SEQ ID NO: 4188548 - DNA, 25 bp, Homo sapien
tgttgggattcaagaaattcaagta

SEQ ID NO: 4188549 - DNA, 25 bp, Homo sapien
taacatggaatgagctcaaaaacgc

SEQ ID NO: 4188550 - DNA, 25 bp, Homo sapien
tacagacatgtaagacccgttctcc

SEQ ID NO: 4188551 - DNA, 25 bp, Homo sapien
taaagagttctagatgactaacatg

SEQ ID NO: 4188552 - DNA, 25 bp, Homo sapien
tcatcaagactcaaccatctagtgt

SEQ ID NO: 4188553 - DNA, 25 bp, Homo sapien
gatccataagttttgtcacaatcac

SEQ ID NO: 4188554 - DNA, 25 bp, Homo sapien
ggaacttcattatacaccctaacaa

SEQ ID NO: 4188555 - DNA, 25 bp, Homo sapien
tctttggcatgatcactgtagacaa

SEQ ID NO: 4188556 - DNA, 25 bp, Homo sapien
catgatcactgtagacaaattctga

SEQ ID NO: 4188557 - DNA, 25 bp, Homo sapien
tctcggtaagcgatctccatgttgc

SEQ ID NO: 4188558 - DNA, 25 bp, Homo sapien
acttttgccgcgtgtgtgatggcca

SEQ ID NO: 4188559 - DNA, 25 bp, Homo sapien
catgaatgtgtgcaagtattgggcc

SEQ ID NO: 4188560 - DNA, 25 bp, Homo sapien
caaagccatttctactctcggtaag

SEQ ID NO: 4188561 - DNA, 25 bp, Homo sapien
agagaaaatatcaacttaaagtgcc

SEQ ID NO: 4188562 - DNA, 25 bp, Homo sapien
gagaaaatatcaacttaaagtgccc

SEQ ID NO: 4188563 - DNA, 25 bp, Homo sapien
cttaaagtgcccaatgcattcactc

SEQ ID NO: 4188564 - DNA, 25 bp, Homo sapien
ggtgtctgtctgtaaccctcacaga

SEQ ID NO: 4188565 - DNA, 25 bp, Homo sapien
gtctgtctgtaaccctcacagaaaa

SEQ ID NO: 4188566 - DNA, 25 bp, Homo sapien
cacagaaaaggtagctcttgtacta

SEQ ID NO: 4188567 - DNA, 25 bp, Homo sapien
ctagatttgtaagaagggagtttca

SEQ ID NO: 4188568 - DNA, 25 bp, Homo sapien
cagtcttggttagatgtcactatat

SEQ ID NO: 4188569 - DNA, 25 bp, Homo sapien
ataaactggacaaaaccattgattc

SEQ ID NO: 4188570 - DNA, 25 bp, Homo sapien
tgattcagcaatattgttgacacag

SEQ ID NO: 4188571 - DNA, 25 bp, Homo sapien
tattgttgacacagtcttggttaga

SEQ ID NO: 4188572 - DNA, 25 bp, Homo sapien
ctcgatgtcaaagcataaagagttt

SEQ ID NO: 4188573 - DNA, 25 bp, Homo sapien
tgtactcgatgtcaaagcataaaga

SEQ ID NO: 4188574 - DNA, 25 bp, Homo sapien
ttatttttgtactcgatgtcaaagc

SEQ ID NO: 4188575 - DNA, 25 bp, Homo sapien
ttttgtactcgatgtcaaagcataa

SEQ ID NO: 4188576 - DNA, 25 bp, Homo sapien
tggatgtgttgaattgcagaacata

SEQ ID NO: 4188577 - DNA, 25 bp, Homo sapien
attgcagaacatatccagtaaatag

SEQ ID NO: 4188578 - DNA, 25 bp, Homo sapien
tcagtttatctgctgtcattttggc

SEQ ID NO: 4188579 - DNA, 25 bp, Homo sapien
tgtttgggctcgaacctgtggatgt

SEQ ID NO: 4188580 - DNA, 25 bp, Homo sapien
tcatcagcagcgtgaagcccttcat

SEQ ID NO: 4188581 - DNA, 25 bp, Homo sapien
tccagttatgttcaggttactcagc

SEQ ID NO: 4188582 - DNA, 25 bp, Homo sapien
ctgtcacaacagaagagctcaatat

SEQ ID NO: 4188583 - DNA, 25 bp, Homo sapien
gttactcagctatcctagaacaggg

SEQ ID NO: 4188584 - DNA, 25 bp, Homo sapien
tacagcagcttcaggattgtctctc

SEQ ID NO: 4188585 - DNA, 25 bp, Homo sapien
gcttggtagaaatttcattaacgta

SEQ ID NO: 4188586 - DNA, 25 bp, Homo sapien
agcatcatttccctaactgttgtgg

SEQ ID NO: 4188587 - DNA, 25 bp, Homo sapien
caggattttcatgagttccttcaaa

SEQ ID NO: 4188588 - DNA, 25 bp, Homo sapien
cttccagtttgcctcagggttgtcc

SEQ ID NO: 4188589 - DNA, 25 bp, Homo sapien
ttccagtttgcctcagggttgtcct

SEQ ID NO: 4188590 - DNA, 25 bp, Homo sapien
tctaacagggcaataagaaattctc

SEQ ID NO: 4188591 - DNA, 25 bp, Homo sapien
acccaggctggttgtgcaataaaga

SEQ ID NO: 4188592 - DNA, 25 bp, Homo sapien
tctctaggagctcagttaatttttc

SEQ ID NO: 4188593 - DNA, 25 bp, Homo sapien
tctaggctttcttagaacccaggct

SEQ ID NO: 4188594 - DNA, 25 bp, Homo sapien
tgaaaacagattcactaatcctaag

SEQ ID NO: 4188595 - DNA, 25 bp, Homo sapien
tcatacagccctaaatatccaaggt

SEQ ID NO: 4188596 - DNA, 25 bp, Homo sapien
tggtgttcaaaactagggattcaaa

SEQ ID NO: 4188597 - DNA, 25 bp, Homo sapien
taatcctaagagaacaacgaacttc

SEQ ID NO: 4188598 - DNA, 25 bp, Homo sapien
tttcagacaaggcatggataacccg

SEQ ID NO: 4188599 - DNA, 25 bp, Homo sapien
aagatggcccaatggcgggacctga

SEQ ID NO: 4188600 - DNA, 25 bp, Homo sapien
cactgttgccattgtcaaggtttcc

SEQ ID NO: 4188601 - DNA, 25 bp, Homo sapien
gataacccgaatggcactcttagga

SEQ ID NO: 4188602 - DNA, 25 bp, Homo sapien
tgctccttctgaaacattcgattaa

SEQ ID NO: 4188603 - DNA, 25 bp, Homo sapien
ggctagaccaacagtatctgctcgc

SEQ ID NO: 4188604 - DNA, 25 bp, Homo sapien
catcagtgggccaatggtctctaaa

SEQ ID NO: 4188605 - DNA, 25 bp, Homo sapien
cattcgattaattgcttcacaggct

SEQ ID NO: 4188606 - DNA, 25 bp, Homo sapien
ggccaatgccttcgagtaattttaa

SEQ ID NO: 4188607 - DNA, 25 bp, Homo sapien
gctgtccaggttttcaaggccaatg

SEQ ID NO: 4188608 - DNA, 25 bp, Homo sapien
caaacttcgagtcattgccttgaga

SEQ ID NO: 4188609 - DNA, 25 bp, Homo sapien
ccttgagagctttaacaatctgagc

SEQ ID NO: 4188610 - DNA, 25 bp, Homo sapien
gaaacatacaaatccagtaaattca

SEQ ID NO: 4188611 - DNA, 25 bp, Homo sapien
taaatgatcatattgatagaatgac

SEQ ID NO: 4188612 - DNA, 25 bp, Homo sapien
gtaaattcattaccgggaagctgta

SEQ ID NO: 4188613 - DNA, 25 bp, Homo sapien
cctatggaacattagtaggggaaat

SEQ ID NO: 4188614 - DNA, 25 bp, Homo sapien
tcatgtttctgatctttgaaggcac

SEQ ID NO: 4188615 - DNA, 25 bp, Homo sapien
ggcactccagactgaagaacggcac

SEQ ID NO: 4188616 - DNA, 25 bp, Homo sapien
actgaagaacggcacaggatttcat

SEQ ID NO: 4188617 - DNA, 25 bp, Homo sapien
tgtgactcagaaatgaacaaatcat

SEQ ID NO: 4188618 - DNA, 25 bp, Homo sapien
taaagcccgctcctgaggtgaaggg

SEQ ID NO: 4188619 - DNA, 25 bp, Homo sapien
ctaaagcccgctcctgaggtgaagg

SEQ ID NO: 4188620 - DNA, 25 bp, Homo sapien
agcccgctcctgaggtgaagggggc

SEQ ID NO: 4188621 - DNA, 25 bp, Homo sapien
aaagcccgctcctgaggtgaagggg

SEQ ID NO: 4188622 - DNA, 25 bp, Homo sapien
tgtatgctggacagtaacactggtg

SEQ ID NO: 4188623 - DNA, 25 bp, Homo sapien
catgtttgcctacactatagactag

SEQ ID NO: 4188624 - DNA, 25 bp, Homo sapien
tccgagcactgaaaagaactatgtc

SEQ ID NO: 4188625 - DNA, 25 bp, Homo sapien
gaactatgtcgaatggaaaaaatgg

SEQ ID NO: 4188626 - DNA, 25 bp, Homo sapien
gaggtggcaggttagacatgactga

SEQ ID NO: 4188627 - DNA, 25 bp, Homo sapien
tgcggtaaggtagccagcaactcca

SEQ ID NO: 4188628 - DNA, 25 bp, Homo sapien
catgactgatgtagatgtacctgcg

SEQ ID NO: 4188629 - DNA, 25 bp, Homo sapien
cctcatggtctacaggaggtggcag

SEQ ID NO: 4188630 - DNA, 25 bp, Homo sapien
tgcagggacaaaacctaatagtctt

SEQ ID NO: 4188631 - DNA, 25 bp, Homo sapien
tacccacttatgttgatccacagag

SEQ ID NO: 4188632 - DNA, 25 bp, Homo sapien
tgcttcaacgtatcagctggaggaa

SEQ ID NO: 4188633 - DNA, 25 bp, Homo sapien
ggatggccacgcagacttgatgcag

SEQ ID NO: 4188634 - DNA, 25 bp, Homo sapien
cattcacactaagggctgccttcaa

SEQ ID NO: 4188635 - DNA, 25 bp, Homo sapien
ccctgccactggaagggtgtgctat

SEQ ID NO: 4188636 - DNA, 25 bp, Homo sapien
gtcagcattcacactaagggctgcc

SEQ ID NO: 4188637 - DNA, 25 bp, Homo sapien
caatgctcagttgctttaggcaagt

SEQ ID NO: 4188638 - DNA, 25 bp, Homo sapien
catgatgagtctgaagcaacttcaa

SEQ ID NO: 4188639 - DNA, 25 bp, Homo sapien
tatttaagagccattgccactgagg

SEQ ID NO: 4188640 - DNA, 25 bp, Homo sapien
ttatttaagagccattgccactgag

SEQ ID NO: 4188641 - DNA, 25 bp, Homo sapien
actgaggacagtgtgcatgatgagt

SEQ ID NO: 4188642 - DNA, 25 bp, Homo sapien
aaggaagcaggtctttgcagctggg

SEQ ID NO: 4188643 - DNA, 25 bp, Homo sapien
gaagggaagactacggaattctgga

SEQ ID NO: 4188644 - DNA, 25 bp, Homo sapien
gcagcctgacctggccgatgagaga

SEQ ID NO: 4188645 - DNA, 25 bp, Homo sapien
atatcccgccaagacacaggcagag

SEQ ID NO: 4188646 - DNA, 25 bp, Homo sapien
taacccgagttttgcgtttagcaga

SEQ ID NO: 4188647 - DNA, 25 bp, Homo sapien
caatcgcaacaatggagctgcggga

SEQ ID NO: 4188648 - DNA, 25 bp, Homo sapien
tagcagatggacctgacgaagttca

SEQ ID NO: 4188649 - DNA, 25 bp, Homo sapien
gaagttcatctttcagcaatcgcaa

SEQ ID NO: 4188650 - DNA, 25 bp, Homo sapien
gcagaagccctttagcttattttcc

SEQ ID NO: 4188651 - DNA, 25 bp, Homo sapien
taagatggcattgcagaagcccttt

SEQ ID NO: 4188652 - DNA, 25 bp, Homo sapien
ccaagttggaaactttaagatggca

SEQ ID NO: 4188653 - DNA, 25 bp, Homo sapien
ggaaactttaagatggcattgcaga

SEQ ID NO: 4188654 - DNA, 25 bp, Homo sapien
tgctgtggaacccatttactgagct

SEQ ID NO: 4188655 - DNA, 25 bp, Homo sapien
gctgtacaagcctaatgccaatgtc

SEQ ID NO: 4188656 - DNA, 25 bp, Homo sapien
tggcaacagagggaacgagagataa

SEQ ID NO: 4188657 - DNA, 25 bp, Homo sapien
tctctctttggtttagggtgggctg

SEQ ID NO: 4188658 - DNA, 25 bp, Homo sapien
agattgcacctttacttctattgac

SEQ ID NO: 4188659 - DNA, 25 bp, Homo sapien
tatacacacatctctagattgcacc

SEQ ID NO: 4188660 - DNA, 25 bp, Homo sapien
ctgaggactgtttctagaatcaagg

SEQ ID NO: 4188661 - DNA, 25 bp, Homo sapien
cacagttcacttgtgcatttcaaca

SEQ ID NO: 4188662 - DNA, 25 bp, Homo sapien
tacatagcacttatcttagaggacc

SEQ ID NO: 4188663 - DNA, 25 bp, Homo sapien
tcagctacagcttatactttcacat

SEQ ID NO: 4188664 - DNA, 25 bp, Homo sapien
tgtcttgcagccacaactgtagttg

SEQ ID NO: 4188665 - DNA, 25 bp, Homo sapien
gatgctggcctaagtagtgtgttag

SEQ ID NO: 4188666 - DNA, 25 bp, Homo sapien
gcagcacttgtaggtagcatctaga

SEQ ID NO: 4188667 - DNA, 25 bp, Homo sapien
tttaaactactagagtcttcctggc

SEQ ID NO: 4188668 - DNA, 25 bp, Homo sapien
tcaaaatccttcagtctgggaggct

SEQ ID NO: 4188669 - DNA, 25 bp, Homo sapien
cctgagggcatctaggcagcacttg

SEQ ID NO: 4188670 - DNA, 25 bp, Homo sapien
ccaagctccttagcataacacccaa

SEQ ID NO: 4188671 - DNA, 25 bp, Homo sapien
gctccttagcataacacccaaggct

SEQ ID NO: 4188672 - DNA, 25 bp, Homo sapien
aagctccttagcataacacccaagg

SEQ ID NO: 4188673 - DNA, 25 bp, Homo sapien
tccttagcataacacccaaggctcc

SEQ ID NO: 4188674 - DNA, 25 bp, Homo sapien
tgttctttccctagagtatagcctg

SEQ ID NO: 4188675 - DNA, 25 bp, Homo sapien
taacatatgtgagcctgaatctagc

SEQ ID NO: 4188676 - DNA, 25 bp, Homo sapien
caaactttgcttgtacaattctgtg

SEQ ID NO: 4188677 - DNA, 25 bp, Homo sapien
gccacattggaatatgaccccaaga

SEQ ID NO: 4188678 - DNA, 25 bp, Homo sapien
gatgatgtctatggctcggcagaac

SEQ ID NO: 4188679 - DNA, 25 bp, Homo sapien
ttcattgatgttcctaggtagcggg

SEQ ID NO: 4188680 - DNA, 25 bp, Homo sapien
tactggttggctctgtaggaccctc

SEQ ID NO: 4188681 - DNA, 25 bp, Homo sapien
gaattgcctgcaagtccaatgacga

SEQ ID NO: 4188682 - DNA, 25 bp, Homo sapien
ttatttgaggggaaagcatcattca

SEQ ID NO: 4188683 - DNA, 25 bp, Homo sapien
atttgaggggaaagcatcattcata

SEQ ID NO: 4188684 - DNA, 25 bp, Homo sapien
tatttgaggggaaagcatcattcat

SEQ ID NO: 4188685 - DNA, 25 bp, Homo sapien
gcatcattcatatgtatccaagcaa

SEQ ID NO: 4188686 - DNA, 25 bp, Homo sapien
caaagctcttcttcgttacagcaga

SEQ ID NO: 4188687 - DNA, 25 bp, Homo sapien
gtagatttgtataagcaccactgca

SEQ ID NO: 4188688 - DNA, 25 bp, Homo sapien
tattataagttgcaaccacggcgtc

SEQ ID NO: 4188689 - DNA, 25 bp, Homo sapien
ttacaaagatggtacagagtggtcc

SEQ ID NO: 4188690 - DNA, 25 bp, Homo sapien
aaaatgatagtctgaggattacacc

SEQ ID NO: 4188691 - DNA, 25 bp, Homo sapien
cggcagtggtagacttgtataaaca

SEQ ID NO: 4188692 - DNA, 25 bp, Homo sapien
aagttaagaaattggaacccagatg

SEQ ID NO: 4188693 - DNA, 25 bp, Homo sapien
tattttttagtcaatcggcagtggt

SEQ ID NO: 4188694 - DNA, 25 bp, Homo sapien
attttagtaggagcatattacatgg

SEQ ID NO: 4188695 - DNA, 25 bp, Homo sapien
taattttagtaggagcatattacat

SEQ ID NO: 4188696 - DNA, 25 bp, Homo sapien
aattttagtaggagcatattacatg

SEQ ID NO: 4188697 - DNA, 25 bp, Homo sapien
ttttagtaggagcatattacatgga

SEQ ID NO: 4188698 - DNA, 25 bp, Homo sapien
attctctccttgtgtagtcagtcgt

SEQ ID NO: 4188699 - DNA, 25 bp, Homo sapien
cagtcgtcccggagttattatggat

SEQ ID NO: 4188700 - DNA, 25 bp, Homo sapien
tctccttgtgtagtcagtcgtcccg

SEQ ID NO: 4188701 - DNA, 25 bp, Homo sapien
tgtgtagtcagtcgtcccggagtta

SEQ ID NO: 4188702 - DNA, 25 bp, Homo sapien
ttctccgggagcattgcaatcactt

SEQ ID NO: 4188703 - DNA, 25 bp, Homo sapien
tcacttctagcagggcatatttgca

SEQ ID NO: 4188704 - DNA, 25 bp, Homo sapien
gagttagatgtcattagtgccattc

SEQ ID NO: 4188705 - DNA, 25 bp, Homo sapien
ggctggagtctcagtaggacatgca

SEQ ID NO: 4188706 - DNA, 25 bp, Homo sapien
ggagaatttcacttgagaaaaagcc

SEQ ID NO: 4188707 - DNA, 25 bp, Homo sapien
cagggagaatttcacttgagaaaaa

SEQ ID NO: 4188708 - DNA, 25 bp, Homo sapien
gagaatttcacttgagaaaaagcct

SEQ ID NO: 4188709 - DNA, 25 bp, Homo sapien
gggagaatttcacttgagaaaaagc

SEQ ID NO: 4188710 - DNA, 25 bp, Homo sapien
agccacgtggactatgccttgattg

SEQ ID NO: 4188711 - DNA, 25 bp, Homo sapien
aattatggtcactctggcatgttca

SEQ ID NO: 4188712 - DNA, 25 bp, Homo sapien
ctgtgagtcctggtaaattatggtc

SEQ ID NO: 4188713 - DNA, 25 bp, Homo sapien
gaaatggccaaagtcgagggtctct

SEQ ID NO: 4188714 - DNA, 25 bp, Homo sapien
taggatttgttttcgcatctgccag

SEQ ID NO: 4188715 - DNA, 25 bp, Homo sapien
taatgccccataagtctgtgaattc

SEQ ID NO: 4188716 - DNA, 25 bp, Homo sapien
gagctaagacctatataaaggcctg

SEQ ID NO: 4188717 - DNA, 25 bp, Homo sapien
tgccaggtattagcaggcactgtca

SEQ ID NO: 4188718 - DNA, 25 bp, Homo sapien
agaggatgttatttggagattatat

SEQ ID NO: 4188719 - DNA, 25 bp, Homo sapien
tactgtaccaacatctataaaaacg

SEQ ID NO: 4188720 - DNA, 25 bp, Homo sapien
tgaacaatacaaatctctgtgtaac

SEQ ID NO: 4188721 - DNA, 25 bp, Homo sapien
cctgtagaatgatagtgaacaatac

SEQ ID NO: 4188722 - DNA, 25 bp, Homo sapien
tctgtcctccctgattactgcctga

SEQ ID NO: 4188723 - DNA, 25 bp, Homo sapien
tgcagcacagaagaggtgtcacagg

SEQ ID NO: 4188724 - DNA, 25 bp, Homo sapien
cacaggttgggttgtgatactctgc

SEQ ID NO: 4188725 - DNA, 25 bp, Homo sapien
ggcaggcttgttctttcattggtaa

SEQ ID NO: 4188726 - DNA, 25 bp, Homo sapien
cctagaggagggtcctccatgtttt

SEQ ID NO: 4188727 - DNA, 25 bp, Homo sapien
ttagtgccctagaggagggtcctcc

SEQ ID NO: 4188728 - DNA, 25 bp, Homo sapien
caacatgagatttagtgccctagag

SEQ ID NO: 4188729 - DNA, 25 bp, Homo sapien
gaagccagggcttcaacatgagatt

SEQ ID NO: 4188730 - DNA, 25 bp, Homo sapien
gattctgagaggtctacagctagcc

SEQ ID NO: 4188731 - DNA, 25 bp, Homo sapien
gaagtctgtagcacaagtggtaacc

SEQ ID NO: 4188732 - DNA, 25 bp, Homo sapien
tattctagtctatccctgtcacaag

SEQ ID NO: 4188733 - DNA, 25 bp, Homo sapien
gaaagcagaatggattagcccctag

SEQ ID NO: 4188734 - DNA, 25 bp, Homo sapien
tagactatacaagatggacacacct

SEQ ID NO: 4188735 - DNA, 25 bp, Homo sapien
cttaggcacctggaaagctacagaa

SEQ ID NO: 4188736 - DNA, 25 bp, Homo sapien
tgggtacttgatgatgcttaggcac

SEQ ID NO: 4188737 - DNA, 25 bp, Homo sapien
gtttgtacagactcggaaaggtcag

SEQ ID NO: 4188738 - DNA, 25 bp, Homo sapien
cccagagggcttaccacagccaaag

SEQ ID NO: 4188739 - DNA, 25 bp, Homo sapien
ttttacggctctccacagacatctc

SEQ ID NO: 4188740 - DNA, 25 bp, Homo sapien
gcaggcatctcagccatgattggct

SEQ ID NO: 4188741 - DNA, 25 bp, Homo sapien
tcagccatgattggcttttacggct

SEQ ID NO: 4188742 - DNA, 25 bp, Homo sapien
taaaacctcgggattcagcgggcaa

SEQ ID NO: 4188743 - DNA, 25 bp, Homo sapien
cgctgactggagaattgaaacccga

SEQ ID NO: 4188744 - DNA, 25 bp, Homo sapien
gacttcggcactcgagacctgtgga

SEQ ID NO: 4188745 - DNA, 25 bp, Homo sapien
ggaggcctacctaaaccagcacttg

SEQ ID NO: 4188746 - DNA, 25 bp, Homo sapien
cgggtatctaagagaaacagggtct

SEQ ID NO: 4188747 - DNA, 25 bp, Homo sapien
gcgatgttgccttgctaaccgggta

SEQ ID NO: 4188748 - DNA, 25 bp, Homo sapien
tattcttaggctcgacagtctgacg

SEQ ID NO: 4188749 - DNA, 25 bp, Homo sapien
ttttctgaacgggaccctgcaggtc

SEQ ID NO: 4188750 - DNA, 25 bp, Homo sapien
gtggggaggcacctcgccgctgcct

SEQ ID NO: 4188751 - DNA, 25 bp, Homo sapien
ggtacgtggggaggcacctcgccgc

SEQ ID NO: 4188752 - DNA, 25 bp, Homo sapien
tacgtggggaggcacctcgccgctg

SEQ ID NO: 4188753 - DNA, 25 bp, Homo sapien
tggggaggcacctcgccgctgcctt

SEQ ID NO: 4188754 - DNA, 25 bp, Homo sapien
gactccggccgccaacgctcccagc

SEQ ID NO: 4188755 - DNA, 25 bp, Homo sapien
actccggccgccaacgctcccagcc

SEQ ID NO: 4188756 - DNA, 25 bp, Homo sapien
tggacccgctgctgcaggcgctcca

SEQ ID NO: 4188757 - DNA, 25 bp, Homo sapien
tgctgcaggcgctccacagactccg

SEQ ID NO: 4188758 - DNA, 25 bp, Homo sapien
cctgggcaagttcccgctccagctc

SEQ ID NO: 4188759 - DNA, 25 bp, Homo sapien
ctcctgggcaagttcccgctccagc

SEQ ID NO: 4188760 - DNA, 25 bp, Homo sapien
gggattcgaatccaccacctctgag

SEQ ID NO: 4188761 - DNA, 25 bp, Homo sapien
ttctcgatgcggacccggccgcccc

SEQ ID NO: 4188762 - DNA, 25 bp, Homo sapien
cttctcgatgcggacccggccgccc

SEQ ID NO: 4188763 - DNA, 25 bp, Homo sapien
tcgaatccaccacctctgagctcat

SEQ ID NO: 4188764 - DNA, 25 bp, Homo sapien
caggattcgcagaccaagaaaaggg

SEQ ID NO: 4188765 - DNA, 25 bp, Homo sapien
cagtactaagatgtggccttgccca

SEQ ID NO: 4188766 - DNA, 25 bp, Homo sapien
cagcgaggcggactaattaagaggc

SEQ ID NO: 4188767 - DNA, 25 bp, Homo sapien
tatcagtcttatacacagcgaggcg

SEQ ID NO: 4188768 - DNA, 25 bp, Homo sapien
catgtagtctctcaaactgaagcaa

SEQ ID NO: 4188769 - DNA, 25 bp, Homo sapien
cactcatctggtaagctctagaggg

SEQ ID NO: 4188770 - DNA, 25 bp, Homo sapien
tcagctaactggcaagtggtattct

SEQ ID NO: 4188771 - DNA, 25 bp, Homo sapien
tcttatcacctgtactgcaatggca

SEQ ID NO: 4188772 - DNA, 25 bp, Homo sapien
tctgagaagcatggatggcaacccc

SEQ ID NO: 4188773 - DNA, 25 bp, Homo sapien
tcttgcaataaactgggttgcgagc

SEQ ID NO: 4188774 - DNA, 25 bp, Homo sapien
agccctacctgaagttctgcaagta

SEQ ID NO: 4188775 - DNA, 25 bp, Homo sapien
ctataatcaagtacagggacccacc

SEQ ID NO: 4188776 - DNA, 25 bp, Homo sapien
gagtgtttgcccagttacccacagt

SEQ ID NO: 4188777 - DNA, 25 bp, Homo sapien
tgctgtggttagaagaacatcttcc

SEQ ID NO: 4188778 - DNA, 25 bp, Homo sapien
tgtctatggatcaacaacaggacca

SEQ ID NO: 4188779 - DNA, 25 bp, Homo sapien
gaaatcttgaatgtggagtccaaca

SEQ ID NO: 4188780 - DNA, 25 bp, Homo sapien
ggcatataattgtgggaagctacac

SEQ ID NO: 4188781 - DNA, 25 bp, Homo sapien
gatgaaactaaattacccaggcacc

SEQ ID NO: 4188782 - DNA, 25 bp, Homo sapien
ttgcctctgcccacaatagatgatg

SEQ ID NO: 4188783 - DNA, 25 bp, Homo sapien
gcagccaagattgcgactactactt

SEQ ID NO: 4188784 - DNA, 25 bp, Homo sapien
catcatcagagtaaattcatggctg

SEQ ID NO: 4188785 - DNA, 25 bp, Homo sapien
ttacaattcccattcgtttcaatgc

SEQ ID NO: 4188786 - DNA, 25 bp, Homo sapien
caattcccattcgtttcaatgccat

SEQ ID NO: 4188787 - DNA, 25 bp, Homo sapien
ctcatagtcgcttacaattcccatt

SEQ ID NO: 4188788 - DNA, 25 bp, Homo sapien
tacaattcccattcgtttcaatgcc

SEQ ID NO: 4188789 - DNA, 25 bp, Homo sapien
catcaaatatgtcaccagaagttat

SEQ ID NO: 4188790 - DNA, 25 bp, Homo sapien
tcatcaaatatgtcaccagaagtta

SEQ ID NO: 4188791 - DNA, 25 bp, Homo sapien
aaaatagtatatgttggttaatagc

SEQ ID NO: 4188792 - DNA, 25 bp, Homo sapien
gtatatgttggttaatagctcttca

SEQ ID NO: 4188793 - DNA, 25 bp, Homo sapien
tattgctacggcaaaggtacggatt

SEQ ID NO: 4188794 - DNA, 25 bp, Homo sapien
tcagcatttcagcagtcacactacc

SEQ ID NO: 4188795 - DNA, 25 bp, Homo sapien
accaacacctactattgctacggca

SEQ ID NO: 4188796 - DNA, 25 bp, Homo sapien
gcatttcagcagtcacactacctac

SEQ ID NO: 4188797 - DNA, 25 bp, Homo sapien
tcaagagtaggaaaggtacatgttt

SEQ ID NO: 4188798 - DNA, 25 bp, Homo sapien
taacttgtacctgatttactccagg

SEQ ID NO: 4188799 - DNA, 25 bp, Homo sapien
gggatatgtctcaacccgagtagaa

SEQ ID NO: 4188800 - DNA, 25 bp, Homo sapien
tagttccctatatgacaggcaaaga

SEQ ID NO: 4188801 - DNA, 25 bp, Homo sapien
gtttacaaacttgagggcacactgg

SEQ ID NO: 4188802 - DNA, 25 bp, Homo sapien
gaaggtctgagctgtaactctgcca

SEQ ID NO: 4188803 - DNA, 25 bp, Homo sapien
ctcaaaatggcgtggtctagctgca

SEQ ID NO: 4188804 - DNA, 25 bp, Homo sapien
tgatccaaggcaccccagatacttt

SEQ ID NO: 4188805 - DNA, 25 bp, Homo sapien
catattggctagttccaccttgtca

SEQ ID NO: 4188806 - DNA, 25 bp, Homo sapien
tcagagtatgttctgctgcttgaac

SEQ ID NO: 4188807 - DNA, 25 bp, Homo sapien
gaactttacttaatcctgcttgatg

SEQ ID NO: 4188808 - DNA, 25 bp, Homo sapien
caccttgtcataatcaaagagtagc

SEQ ID NO: 4188809 - DNA, 25 bp, Homo sapien
ttattctatccatgaaatgttgaaa

SEQ ID NO: 4188810 - DNA, 25 bp, Homo sapien
cttattctatccatgaaatgttgaa

SEQ ID NO: 4188811 - DNA, 25 bp, Homo sapien
tatattatagttgtgtacttcaaaa

SEQ ID NO: 4188812 - DNA, 25 bp, Homo sapien
ggttatattatagttgtgtacttca

SEQ ID NO: 4188813 - DNA, 25 bp, Homo sapien
cattcgagcttcaaaattgtccaca

SEQ ID NO: 4188814 - DNA, 25 bp, Homo sapien
gtatttattgtcattcgagcttcaa

SEQ ID NO: 4188815 - DNA, 25 bp, Homo sapien
taagaactagatcaacaggttttcc

SEQ ID NO: 4188816 - DNA, 25 bp, Homo sapien
tattgtcattcgagcttcaaaattg

SEQ ID NO: 4188817 - DNA, 25 bp, Homo sapien
taagctgtatatgccctgaaactgc

SEQ ID NO: 4188818 - DNA, 25 bp, Homo sapien
gattctccaggaattataagctgta

SEQ ID NO: 4188819 - DNA, 25 bp, Homo sapien
gcattttcactgaccccagattcca

SEQ ID NO: 4188820 - DNA, 25 bp, Homo sapien
tccatgtttgtccaagttcattaca

SEQ ID NO: 4188821 - DNA, 25 bp, Homo sapien
gaactcaagtatctaacagtgaaga

SEQ ID NO: 4188822 - DNA, 25 bp, Homo sapien
aatagtattccatccaagtttgctt

SEQ ID NO: 4188823 - DNA, 25 bp, Homo sapien
gtaatacattttcaatgcccctaag

SEQ ID NO: 4188824 - DNA, 25 bp, Homo sapien
tatgagatgttccaaatagtattcc

SEQ ID NO: 4188825 - DNA, 25 bp, Homo sapien
cacccatagtggtaggaagactggc

SEQ ID NO: 4188826 - DNA, 25 bp, Homo sapien
cagcaactacaagtggtggagcaca

SEQ ID NO: 4188827 - DNA, 25 bp, Homo sapien
ctggctgcacaaacaccttctcgtt

SEQ ID NO: 4188828 - DNA, 25 bp, Homo sapien
cacgttttgtactaagatcccagca

SEQ ID NO: 4188829 - DNA, 25 bp, Homo sapien
gaaatagccctagaccattactttg

SEQ ID NO: 4188830 - DNA, 25 bp, Homo sapien
ggtacctccttgtgtcttgttgcag

SEQ ID NO: 4188831 - DNA, 25 bp, Homo sapien
tccactggacagacttgcaaagatt

SEQ ID NO: 4188832 - DNA, 25 bp, Homo sapien
cagggcctactactgtctaaacagg

SEQ ID NO: 4188833 - DNA, 25 bp, Homo sapien
tacactcgtacttccaactacttgg

SEQ ID NO: 4188834 - DNA, 25 bp, Homo sapien
tggcatacactcgtacttccaacta

SEQ ID NO: 4188835 - DNA, 25 bp, Homo sapien
gcatacactcgtacttccaactact

SEQ ID NO: 4188836 - DNA, 25 bp, Homo sapien
cactcgtacttccaactacttggaa

SEQ ID NO: 4188837 - DNA, 25 bp, Homo sapien
ctttgcactaacataataaaagctt

SEQ ID NO: 4188838 - DNA, 25 bp, Homo sapien
tgcactaacataataaaagcttcta

SEQ ID NO: 4188839 - DNA, 25 bp, Homo sapien
aaagcttctatacagagaaaatcac

SEQ ID NO: 4188840 - DNA, 25 bp, Homo sapien
gcaaatacacattcttaatatacaa

SEQ ID NO: 4188841 - DNA, 25 bp, Homo sapien
cctgcattgcattgtatccaaggta

SEQ ID NO: 4188842 - DNA, 25 bp, Homo sapien
tgcattgtatccaaggtaaaaacta

SEQ ID NO: 4188843 - DNA, 25 bp, Homo sapien
aggatttggcttcatggacatagta

SEQ ID NO: 4188844 - DNA, 25 bp, Homo sapien
gcattgcattgtatccaaggtaaaa

SEQ ID NO: 4188845 - DNA, 25 bp, Homo sapien
catcaaagtgttcttactcattctc

SEQ ID NO: 4188846 - DNA, 25 bp, Homo sapien
aacagcatcaaagtgttcttactca

SEQ ID NO: 4188847 - DNA, 25 bp, Homo sapien
agcatcaaagtgttcttactcattc

SEQ ID NO: 4188848 - DNA, 25 bp, Homo sapien
tattcaatatgatccctcatgcatt

SEQ ID NO: 4188849 - DNA, 25 bp, Homo sapien
ttgtataacctcttgtttaggcagt

SEQ ID NO: 4188850 - DNA, 25 bp, Homo sapien
tataacctcttgtttaggcagtgct

SEQ ID NO: 4188851 - DNA, 25 bp, Homo sapien
acctcttgtttaggcagtgctgcta

SEQ ID NO: 4188852 - DNA, 25 bp, Homo sapien
tgtttaggcagtgctgctacctttt

SEQ ID NO: 4188853 - DNA, 25 bp, Homo sapien
gaaacctcagataccagctcaatac

SEQ ID NO: 4188854 - DNA, 25 bp, Homo sapien
tgaaacctcagataccagctcaata

SEQ ID NO: 4188855 - DNA, 25 bp, Homo sapien
ctgaaacctcagataccagctcaat

SEQ ID NO: 4188856 - DNA, 25 bp, Homo sapien
tcttccaagctttcaccagaatctt

SEQ ID NO: 4188857 - DNA, 25 bp, Homo sapien
tcttcattttggccatgaggtcttc

SEQ ID NO: 4188858 - DNA, 25 bp, Homo sapien
ggtcttccaagctttcaccagaatc

SEQ ID NO: 4188859 - DNA, 25 bp, Homo sapien
cttcattttggccatgaggtcttcc

SEQ ID NO: 4188860 - DNA, 25 bp, Homo sapien
aatacaatatatcccagtccattat

SEQ ID NO: 4188861 - DNA, 25 bp, Homo sapien
ttcaagggaagaggctttaacatga

SEQ ID NO: 4188862 - DNA, 25 bp, Homo sapien
gaagaggctttaacatgagaaatac

SEQ ID NO: 4188863 - DNA, 25 bp, Homo sapien
aaatacaatatatcccagtccatta

SEQ ID NO: 4188864 - DNA, 25 bp, Homo sapien
tattgtccatgtcctcatgcaacag

SEQ ID NO: 4188865 - DNA, 25 bp, Homo sapien
gatccacaggttacagacttttcca

SEQ ID NO: 4188866 - DNA, 25 bp, Homo sapien
aatcaataagctgtatgccttgtcc

SEQ ID NO: 4188867 - DNA, 25 bp, Homo sapien
tccaaacataatgagcagatgcttg

SEQ ID NO: 4188868 - DNA, 25 bp, Homo sapien
tacagtttagtggtcatgatcaggg

SEQ ID NO: 4188869 - DNA, 25 bp, Homo sapien
cattacttgggtgtaactcgagaga

SEQ ID NO: 4188870 - DNA, 25 bp, Homo sapien
taatttctgttccttgttcggtgca

SEQ ID NO: 4188871 - DNA, 25 bp, Homo sapien
gactacaagtcattgcagaggcagt

SEQ ID NO: 4188872 - DNA, 25 bp, Homo sapien
gatagaagactcaccaaggcaacat

SEQ ID NO: 4188873 - DNA, 25 bp, Homo sapien
gaatcacagtataatcctagcatct

SEQ ID NO: 4188874 - DNA, 25 bp, Homo sapien
catctctcatactagaaaagctatt

SEQ ID NO: 4188875 - DNA, 25 bp, Homo sapien
aaaaactatccttctgctttccaga

SEQ ID NO: 4188876 - DNA, 25 bp, Homo sapien
caagagagtattctaggatagcaac

SEQ ID NO: 4188877 - DNA, 25 bp, Homo sapien
tctgtgctaagccaattctgggact

SEQ ID NO: 4188878 - DNA, 25 bp, Homo sapien
tgttcagtgtacgtatccagggagt

SEQ ID NO: 4188879 - DNA, 25 bp, Homo sapien
gatgcaatgccaacttgagagcaga

SEQ ID NO: 4188880 - DNA, 25 bp, Homo sapien
taagtgacatttctattatacagct

SEQ ID NO: 4188881 - DNA, 25 bp, Homo sapien
tcttgttagatgtacagtgacttac

SEQ ID NO: 4188882 - DNA, 25 bp, Homo sapien
gagcttataaatattagtacagaaa

SEQ ID NO: 4188883 - DNA, 25 bp, Homo sapien
ttctattatacagctataaaatagg

SEQ ID NO: 4188884 - DNA, 25 bp, Homo sapien
caagcggctttgaaagttcggcgga

SEQ ID NO: 4188885 - DNA, 25 bp, Homo sapien
tacgagatctttcgcgtcagcaaga

SEQ ID NO: 4188886 - DNA, 25 bp, Homo sapien
cggctcaggaaggagtacgagatct

SEQ ID NO: 4188887 - DNA, 25 bp, Homo sapien
ttcaagtccactggctcgtcggtgc

SEQ ID NO: 4188888 - DNA, 25 bp, Homo sapien
cagtgttctgagatcctaaagtaca

SEQ ID NO: 4188889 - DNA, 25 bp, Homo sapien
gatgttcagacctcaactcctggaa

SEQ ID NO: 4188890 - DNA, 25 bp, Homo sapien
cgaggaattagatcatccctagcca

SEQ ID NO: 4188891 - DNA, 25 bp, Homo sapien
ggaccatgctttgagtagcgaggaa

SEQ ID NO: 4188892 - DNA, 25 bp, Homo sapien
cagagttcacttggtagaactgagc

SEQ ID NO: 4188893 - DNA, 25 bp, Homo sapien
gtagaactgagcaggactaaacagc

SEQ ID NO: 4188894 - DNA, 25 bp, Homo sapien
aagtcagagttcacttggtagaact

SEQ ID NO: 4188895 - DNA, 25 bp, Homo sapien
ttcacttggtagaactgagcaggac

SEQ ID NO: 4188896 - DNA, 25 bp, Homo sapien
acccaccttggcactaaactcctct

SEQ ID NO: 4188897 - DNA, 25 bp, Homo sapien
catgtggatgtgttgcctttgtttc

SEQ ID NO: 4188898 - DNA, 25 bp, Homo sapien
cccaccttggcactaaactcctctt

SEQ ID NO: 4188899 - DNA, 25 bp, Homo sapien
tgcatgtggatgtgttgcctttgtt

SEQ ID NO: 4188900 - DNA, 25 bp, Homo sapien
cttcatatccataaccttcttcata

SEQ ID NO: 4188901 - DNA, 25 bp, Homo sapien
tccttcctaagtccatattttgaaa

SEQ ID NO: 4188902 - DNA, 25 bp, Homo sapien
catatttttctctcctagttacttg

SEQ ID NO: 4188903 - DNA, 25 bp, Homo sapien
ttctccttcctaagtccatattttg

SEQ ID NO: 4188904 - DNA, 25 bp, Homo sapien
tcttcttaggaataggcaagccaca

SEQ ID NO: 4188905 - DNA, 25 bp, Homo sapien
cattatgcgtcttgtgcaggtcacc

SEQ ID NO: 4188906 - DNA, 25 bp, Homo sapien
ttaccttggcgtgtaggcactgccg

SEQ ID NO: 4188907 - DNA, 25 bp, Homo sapien
cattatgcgtcttgggctggtcaca

SEQ ID NO: 4188908 - DNA, 25 bp, Homo sapien
cctttggctacaggagaggctagga

SEQ ID NO: 4188909 - DNA, 25 bp, Homo sapien
tccaaaattgtgtcagatgacctcc

SEQ ID NO: 4188910 - DNA, 25 bp, Homo sapien
gatgacctcctttggctacaggaga

SEQ ID NO: 4188911 - DNA, 25 bp, Homo sapien
gagaggctaggaaagtgagtacttt

SEQ ID NO: 4188912 - DNA, 25 bp, Homo sapien
tagttatcaagcctccttagtctca

SEQ ID NO: 4188913 - DNA, 25 bp, Homo sapien
tccaggatgacacattgcctttagt

SEQ ID NO: 4188914 - DNA, 25 bp, Homo sapien
gtggtccaggactcaatccaggatg

SEQ ID NO: 4188915 - DNA, 25 bp, Homo sapien
tctgcaacagcctagagcagtgctg

SEQ ID NO: 4188916 - DNA, 25 bp, Homo sapien
caaaagttgaatcattattggcctc

SEQ ID NO: 4188917 - DNA, 25 bp, Homo sapien
tctcaaaagttgaatcattattggc

SEQ ID NO: 4188918 - DNA, 25 bp, Homo sapien
cttatctcaaaagttgaatcattat

SEQ ID NO: 4188919 - DNA, 25 bp, Homo sapien
aaagttgaatcattattggcctcta

SEQ ID NO: 4188920 - DNA, 25 bp, Homo sapien
aaaagtgcaagctttggtgccagtc

SEQ ID NO: 4188921 - DNA, 25 bp, Homo sapien
tggtcacccttgtctctacctcagg

SEQ ID NO: 4188922 - DNA, 25 bp, Homo sapien
gattctggacaagctagccacgttg

SEQ ID NO: 4188923 - DNA, 25 bp, Homo sapien
cctcaggggattgattcatcattgc

SEQ ID NO: 4188924 - DNA, 25 bp, Homo sapien
gactaactcgcagcatggtgacaaa

SEQ ID NO: 4188925 - DNA, 25 bp, Homo sapien
tagtccaaactagtccatgcagaga

SEQ ID NO: 4188926 - DNA, 25 bp, Homo sapien
tgcagagagaccacatgagaagccc

SEQ ID NO: 4188927 - DNA, 25 bp, Homo sapien
aatgaaggcagttctcaaggtcaca

SEQ ID NO: 4188928 - DNA, 25 bp, Homo sapien
aatcctactacgtgctctgaaggaa

SEQ ID NO: 4188929 - DNA, 25 bp, Homo sapien
cctactacgtgctctgaaggaaaga

SEQ ID NO: 4188930 - DNA, 25 bp, Homo sapien
tacgtgctctgaaggaaagagtgct

SEQ ID NO: 4188931 - DNA, 25 bp, Homo sapien
aataaaatcctactacgtgctctga

SEQ ID NO: 4188932 - DNA, 25 bp, Homo sapien
ttgagttaaagctgccataacagga

SEQ ID NO: 4188933 - DNA, 25 bp, Homo sapien
gtgagttgagttaaagctgccataa

SEQ ID NO: 4188934 - DNA, 25 bp, Homo sapien
gaacttttggataagcaccaataaa

SEQ ID NO: 4188935 - DNA, 25 bp, Homo sapien
ggaacttttggataagcaccaataa

SEQ ID NO: 4188936 - DNA, 25 bp, Homo sapien
atgttggggtccttgactctttctt

SEQ ID NO: 4188937 - DNA, 25 bp, Homo sapien
tgtatttattttcatgtcctctctc

SEQ ID NO: 4188938 - DNA, 25 bp, Homo sapien
tcctcctcgtcgtcattctctgctg

SEQ ID NO: 4188939 - DNA, 25 bp, Homo sapien
cctcctcgtcgtcattctctgctgc

SEQ ID NO: 4188940 - DNA, 25 bp, Homo sapien
atgtcctctctcctgtggttcccat

SEQ ID NO: 4188941 - DNA, 25 bp, Homo sapien
ttggtgtgtctggactctcctgtct

SEQ ID NO: 4188942 - DNA, 25 bp, Homo sapien
attagggcagaaggaagcaaccctc

SEQ ID NO: 4188943 - DNA, 25 bp, Homo sapien
tcttgttaattcattagggcagaag

SEQ ID NO: 4188944 - DNA, 25 bp, Homo sapien
aacctaactggtggcttgtgtttgt

SEQ ID NO: 4188945 - DNA, 25 bp, Homo sapien
agttcagagaaaaacctaactggtg

SEQ ID NO: 4188946 - DNA, 25 bp, Homo sapien
gtgaattacttatgtgaagtcacat

SEQ ID NO: 4188947 - DNA, 25 bp, Homo sapien
tagccacggattctttgcccctttg

SEQ ID NO: 4188948 - DNA, 25 bp, Homo sapien
aataaaacacgtatcaaatagacaa

SEQ ID NO: 4188949 - DNA, 25 bp, Homo sapien
tctttctatctaatggaaatgtatc

SEQ ID NO: 4188950 - DNA, 25 bp, Homo sapien
gaacagacaaacctggcaatcgagg

SEQ ID NO: 4188951 - DNA, 25 bp, Homo sapien
caatcgaggcaggagatctatggcg

SEQ ID NO: 4188952 - DNA, 25 bp, Homo sapien
gcagctcaacagaaggtaaccgtag

SEQ ID NO: 4188953 - DNA, 25 bp, Homo sapien
tacagtttccagaggtatgcgaaca

SEQ ID NO: 4188954 - DNA, 25 bp, Homo sapien
aatctccgtagtcgccatgatgcca

SEQ ID NO: 4188955 - DNA, 25 bp, Homo sapien
ttcaaagtggagcaataagacagac

SEQ ID NO: 4188956 - DNA, 25 bp, Homo sapien
tgatgccaaatactattgcccatgg

SEQ ID NO: 4188957 - DNA, 25 bp, Homo sapien
gacagactaattccctcttgccaat

SEQ ID NO: 4188958 - DNA, 25 bp, Homo sapien
gtccacaactggttgagtgaatttc

SEQ ID NO: 4188959 - DNA, 25 bp, Homo sapien
aagtccacaactggttgagtgaatt

SEQ ID NO: 4188960 - DNA, 25 bp, Homo sapien
tccacaactggttgagtgaatttcc

SEQ ID NO: 4188961 - DNA, 25 bp, Homo sapien
ccacaactggttgagtgaatttcca

SEQ ID NO: 4188962 - DNA, 25 bp, Homo sapien
gcccatgaggcagaatgtaaattct

SEQ ID NO: 4188963 - DNA, 25 bp, Homo sapien
aggtctccggttggcccatgaggca

SEQ ID NO: 4188964 - DNA, 25 bp, Homo sapien
ttgcctccctcaagtgtggtttcag

SEQ ID NO: 4188965 - DNA, 25 bp, Homo sapien
catacacccagaaggcaagattctg

SEQ ID NO: 4188966 - DNA, 25 bp, Homo sapien
aattggagtctggtactgatgcccc

SEQ ID NO: 4188967 - DNA, 25 bp, Homo sapien
tcctgatgggtacaattggagtctg

SEQ ID NO: 4188968 - DNA, 25 bp, Homo sapien
gaaaagacgtttcctgatgggtaca

SEQ ID NO: 4188969 - DNA, 25 bp, Homo sapien
aaggagcagaaaagacgtttcctga

SEQ ID NO: 4188970 - DNA, 25 bp, Homo sapien
tgctccaggggtccccagggagtaa

SEQ ID NO: 4188971 - DNA, 25 bp, Homo sapien
ctccacccacagtgctgctccaggg

SEQ ID NO: 4188972 - DNA, 25 bp, Homo sapien
gctgctccaggggtccccagggagt

SEQ ID NO: 4188973 - DNA, 25 bp, Homo sapien
caggggtccccagggagtaagatga

SEQ ID NO: 4188974 - DNA, 25 bp, Homo sapien
agcattggcttcaccattatttctc

SEQ ID NO: 4188975 - DNA, 25 bp, Homo sapien
gggatagcattggcttcaccattat

SEQ ID NO: 4188976 - DNA, 25 bp, Homo sapien
tctctatatcttatagtcttcctac

SEQ ID NO: 4188977 - DNA, 25 bp, Homo sapien
ggcttcaccattatttctctatatc

SEQ ID NO: 4188978 - DNA, 25 bp, Homo sapien
ctgaggggatctggattctgaaatc

SEQ ID NO: 4188979 - DNA, 25 bp, Homo sapien
atctggggaccagcatcatccatca

SEQ ID NO: 4188980 - DNA, 25 bp, Homo sapien
aggggatctggattctgaaatctgg

SEQ ID NO: 4188981 - DNA, 25 bp, Homo sapien
tgaaatctggggaccagcatcatcc

SEQ ID NO: 4188982 - DNA, 25 bp, Homo sapien
ggaagaaacttgacagtctttggag

SEQ ID NO: 4188983 - DNA, 25 bp, Homo sapien
ccagcgaagctcgaaggaagaaact

SEQ ID NO: 4188984 - DNA, 25 bp, Homo sapien
gacagtctttggagtgggaaagaaa

SEQ ID NO: 4188985 - DNA, 25 bp, Homo sapien
ccgggatccagcgaagctcgaagga

SEQ ID NO: 4188986 - DNA, 25 bp, Homo sapien
attaaggtcaagattggggcacagg

SEQ ID NO: 4188987 - DNA, 25 bp, Homo sapien
tcaaattcccagaagaattaaggtc

SEQ ID NO: 4188988 - DNA, 25 bp, Homo sapien
ttcatcactgccattatatgactca

SEQ ID NO: 4188989 - DNA, 25 bp, Homo sapien
taaggtcaagattggggcacaggcc

SEQ ID NO: 4188990 - DNA, 25 bp, Homo sapien
catctggatgtgaactgctgtctgc

SEQ ID NO: 4188991 - DNA, 25 bp, Homo sapien
tgtctgctcttcacatatatctctg

SEQ ID NO: 4188992 - DNA, 25 bp, Homo sapien
ttcctccctgcaagtgcaagggaag

SEQ ID NO: 4188993 - DNA, 25 bp, Homo sapien
ggtggcaatatccttctctcaattc

SEQ ID NO: 4188994 - DNA, 25 bp, Homo sapien
agcagcttggataagggcagacagc

SEQ ID NO: 4188995 - DNA, 25 bp, Homo sapien
taagcaatcagcagcttggataagg

SEQ ID NO: 4188996 - DNA, 25 bp, Homo sapien
caatcagcagcttggataagggcag

SEQ ID NO: 4188997 - DNA, 25 bp, Homo sapien
ttaataagcaatcagcagcttggat

SEQ ID NO: 4188998 - DNA, 25 bp, Homo sapien
tgagtgatgcagcataccacatgat

SEQ ID NO: 4188999 - DNA, 25 bp, Homo sapien
gagtgatgcagcataccacatgatt

SEQ ID NO: 4189000 - DNA, 25 bp, Homo sapien
agtgagtgtattgagtgatgcagca

SEQ ID NO: 4189001 - DNA, 25 bp, Homo sapien
gctgttgatagtgagtgtattgagt

SEQ ID NO: 4189002 - DNA, 25 bp, Homo sapien
aaagagatggctgagcataatctgg

SEQ ID NO: 4189003 - DNA, 25 bp, Homo sapien
cataatctggtagcgtggtaacaca

SEQ ID NO: 4189004 - DNA, 25 bp, Homo sapien
ggtagcgtggtaacacagatgatac

SEQ ID NO: 4189005 - DNA, 25 bp, Homo sapien
gatggctgagcataatctggtagcg

SEQ ID NO: 4189006 - DNA, 25 bp, Homo sapien
tggtcattgccatcactgacacaat

SEQ ID NO: 4189007 - DNA, 25 bp, Homo sapien
ctggtcattgccatcactgacacaa

SEQ ID NO: 4189008 - DNA, 25 bp, Homo sapien
ccggactatttgtaatcatgcacag

SEQ ID NO: 4189009 - DNA, 25 bp, Homo sapien
gcacagatgccgctccacagaagac

SEQ ID NO: 4189010 - DNA, 25 bp, Homo sapien
tcattcctagaagttccggactatt

SEQ ID NO: 4189011 - DNA, 25 bp, Homo sapien
tcctgagtataacacattccacttc

SEQ ID NO: 4189012 - DNA, 25 bp, Homo sapien
gcatcgcataaacccttcagctcag

SEQ ID NO: 4189013 - DNA, 25 bp, Homo sapien
atgtatttcttagacttccatgtgt

SEQ ID NO: 4189014 - DNA, 25 bp, Homo sapien
gcataagggtggaggcatcgcataa

SEQ ID NO: 4189015 - DNA, 25 bp, Homo sapien
cctttttcaaatgattggacaggaa

SEQ ID NO: 4189016 - DNA, 25 bp, Homo sapien
aagacccttagttgctaaatgtaag

SEQ ID NO: 4189017 - DNA, 25 bp, Homo sapien
cctttggcaggtcgaagatttcacc

SEQ ID NO: 4189018 - DNA, 25 bp, Homo sapien
gaagatttcaccgaccagaacccaa

SEQ ID NO: 4189019 - DNA, 25 bp, Homo sapien
gtcatttctccttagcatcgtcctt

SEQ ID NO: 4189020 - DNA, 25 bp, Homo sapien
gaattctaggagcatcccaggtaca

SEQ ID NO: 4189021 - DNA, 25 bp, Homo sapien
tgaaagcacctccagggttggattg

SEQ ID NO: 4189022 - DNA, 25 bp, Homo sapien
caaatggccttttagcgtcgtaaag

SEQ ID NO: 4189023 - DNA, 25 bp, Homo sapien
gacttcttctgaaaggcctgcagcc

SEQ ID NO: 4189024 - DNA, 25 bp, Homo sapien
tctggatgagtaactttgggttctg

SEQ ID NO: 4189025 - DNA, 25 bp, Homo sapien
gatgagtaactttgggttctgtgga

SEQ ID NO: 4189026 - DNA, 25 bp, Homo sapien
caatatctggatgagtaactttggg

SEQ ID NO: 4189027 - DNA, 25 bp, Homo sapien
ctccaccaatatctggatgagtaac

SEQ ID NO: 4189028 - DNA, 25 bp, Homo sapien
aagtgaagcccacctagcaatctca

SEQ ID NO: 4189029 - DNA, 25 bp, Homo sapien
gaagtgaagcccacctagcaatctc

SEQ ID NO: 4189030 - DNA, 25 bp, Homo sapien
tctctcactatcaaggtgatcaaac

SEQ ID NO: 4189031 - DNA, 25 bp, Homo sapien
actgtcgcttagagaaaacttcacc

SEQ ID NO: 4189032 - DNA, 25 bp, Homo sapien
tgaaaccaggtggtataaccctgct

SEQ ID NO: 4189033 - DNA, 25 bp, Homo sapien
tgtcagtgtgtcctgaacttctctg

SEQ ID NO: 4189034 - DNA, 25 bp, Homo sapien
gcgcacgcgctctcgcgcactcgcg

SEQ ID NO: 4189035 - DNA, 25 bp, Homo sapien
ctcgcgcacgcgctctcgcgcactc

SEQ ID NO: 4189036 - DNA, 25 bp, Homo sapien
gcgcgcgcccctccgaccaggctct

SEQ ID NO: 4189037 - DNA, 25 bp, Homo sapien
gcgcgcccctccgaccaggctctgg

SEQ ID NO: 4189038 - DNA, 25 bp, Homo sapien
tccctccgacggctcaggagaaagc

SEQ ID NO: 4189039 - DNA, 25 bp, Homo sapien
tcgggagaagcgctccggctccctc

SEQ ID NO: 4189040 - DNA, 25 bp, Homo sapien
ctccggctccctccgacggctcagg

SEQ ID NO: 4189041 - DNA, 25 bp, Homo sapien
tccgacggctcaggagaaagcccca

SEQ ID NO: 4189042 - DNA, 25 bp, Homo sapien
tcaggtttaaaagtcacatgtatat

SEQ ID NO: 4189043 - DNA, 25 bp, Homo sapien
cagctactgttcaggtttaaaagtc

SEQ ID NO: 4189044 - DNA, 25 bp, Homo sapien
tcacatgtatatttccatagtccca

SEQ ID NO: 4189045 - DNA, 25 bp, Homo sapien
tccatagtcccatccatgtgtgtag

SEQ ID NO: 4189046 - DNA, 25 bp, Homo sapien
tcaaacgcacttacatcctcatgac

SEQ ID NO: 4189047 - DNA, 25 bp, Homo sapien
gggtgtggaagccttcaaacgcact

SEQ ID NO: 4189048 - DNA, 25 bp, Homo sapien
ctcatgacccatcggctctgctgct

SEQ ID NO: 4189049 - DNA, 25 bp, Homo sapien
gttggatgaccaccaatctatcacc

SEQ ID NO: 4189050 - DNA, 25 bp, Homo sapien
gacagggcatcatattgcactgact

SEQ ID NO: 4189051 - DNA, 25 bp, Homo sapien
gagacaggtgagacaatagcctcta

SEQ ID NO: 4189052 - DNA, 25 bp, Homo sapien
tatttccatgcatagattccatccc

SEQ ID NO: 4189053 - DNA, 25 bp, Homo sapien
gcatggtatctatgagttgaatcaa

SEQ ID NO: 4189054 - DNA, 25 bp, Homo sapien
tttggttataacattgccagtgccc

SEQ ID NO: 4189055 - DNA, 25 bp, Homo sapien
ggcatgtgacttccagtgatgctgg

SEQ ID NO: 4189056 - DNA, 25 bp, Homo sapien
gggaaacaggagctaccagagctaa

SEQ ID NO: 4189057 - DNA, 25 bp, Homo sapien
agtgcccacatgcattgtactaggg

SEQ ID NO: 4189058 - DNA, 25 bp, Homo sapien
tctgctgacgtactttgcagctgcc

SEQ ID NO: 4189059 - DNA, 25 bp, Homo sapien
gactcttctgctgacgtactttgca

SEQ ID NO: 4189060 - DNA, 25 bp, Homo sapien
tggactcttctgctgacgtactttg

SEQ ID NO: 4189061 - DNA, 25 bp, Homo sapien
tcttctgctgacgtactttgcagct

SEQ ID NO: 4189062 - DNA, 25 bp, Homo sapien
ggtttcagtcctaggccctcaggga

SEQ ID NO: 4189063 - DNA, 25 bp, Homo sapien
gggatctgcatccaaagtcctgcct

SEQ ID NO: 4189064 - DNA, 25 bp, Homo sapien
gcaaagattcaacagtgggcatgga

SEQ ID NO: 4189065 - DNA, 25 bp, Homo sapien
gatagtcagggaagcatattcctcc

SEQ ID NO: 4189066 - DNA, 25 bp, Homo sapien
tccatcatcagtgctcatgcagaag

SEQ ID NO: 4189067 - DNA, 25 bp, Homo sapien
cacagtttgttgttaccaggctccc

SEQ ID NO: 4189068 - DNA, 25 bp, Homo sapien
aaaaatccaacgtgctcaagggctg

SEQ ID NO: 4189069 - DNA, 25 bp, Homo sapien
agaaaagtcagaagctcccgttgcc

SEQ ID NO: 4189070 - DNA, 25 bp, Homo sapien
gctttcttctgtccagacaaaagaa

SEQ ID NO: 4189071 - DNA, 25 bp, Homo sapien
tagagtcttacagggcaccatcaca

SEQ ID NO: 4189072 - DNA, 25 bp, Homo sapien
cacacacgctctgtcctcagactgg

SEQ ID NO: 4189073 - DNA, 25 bp, Homo sapien
tcagactggcagacattaccgcttt

SEQ ID NO: 4189074 - DNA, 25 bp, Homo sapien
ggatgtcacaccaccataagttgaa

SEQ ID NO: 4189075 - DNA, 25 bp, Homo sapien
gtcacaccaccataagttgaaaagc

SEQ ID NO: 4189076 - DNA, 25 bp, Homo sapien
gatgtcacaccaccataagttgaaa

SEQ ID NO: 4189077 - DNA, 25 bp, Homo sapien
tgtcacaccaccataagttgaaaag

SEQ ID NO: 4189078 - DNA, 25 bp, Homo sapien
taacagctattgagaaagtgaacac

SEQ ID NO: 4189079 - DNA, 25 bp, Homo sapien
cactgaatgtgtcttagaatgagga

SEQ ID NO: 4189080 - DNA, 25 bp, Homo sapien
ggcctaccatcaattgaataacagc

SEQ ID NO: 4189081 - DNA, 25 bp, Homo sapien
cagaagctagggagtcagaggtaaa

SEQ ID NO: 4189082 - DNA, 25 bp, Homo sapien
gattctgaactctattactcgctga

SEQ ID NO: 4189083 - DNA, 25 bp, Homo sapien
gaaaagccactagatcactcagatg

SEQ ID NO: 4189084 - DNA, 25 bp, Homo sapien
gctatcatgaggaagaacctgccag

SEQ ID NO: 4189085 - DNA, 25 bp, Homo sapien
tggcaacaacagtcaatggcactct

SEQ ID NO: 4189086 - DNA, 25 bp, Homo sapien
caggtgctgattactccaaaaagca

SEQ ID NO: 4189087 - DNA, 25 bp, Homo sapien
ggtgctgattactccaaaaagcaac

SEQ ID NO: 4189088 - DNA, 25 bp, Homo sapien
gctgattactccaaaaagcaacggg

SEQ ID NO: 4189089 - DNA, 25 bp, Homo sapien
tccaaaaagcaacgggaactgttca

SEQ ID NO: 4189090 - DNA, 25 bp, Homo sapien
tgatacaaccacctgtggcatagga

SEQ ID NO: 4189091 - DNA, 25 bp, Homo sapien
caaaggacttagtagcttctgggac

SEQ ID NO: 4189092 - DNA, 25 bp, Homo sapien
gtaaactgaaacaccctggcatctg

SEQ ID NO: 4189093 - DNA, 25 bp, Homo sapien
cacttatgtctgtgggaagccgagc

SEQ ID NO: 4189094 - DNA, 25 bp, Homo sapien
tggtgctagtacgtttccaaagtac

SEQ ID NO: 4189095 - DNA, 25 bp, Homo sapien
cggagaatggtgctagtacgtttcc

SEQ ID NO: 4189096 - DNA, 25 bp, Homo sapien
gaatggtgctagtacgtttccaaag

SEQ ID NO: 4189097 - DNA, 25 bp, Homo sapien
cctcggagaatggtgctagtacgtt

SEQ ID NO: 4189098 - DNA, 25 bp, Homo sapien
aaactgaggagcctaagaaggatcc

SEQ ID NO: 4189099 - DNA, 25 bp, Homo sapien
cacctgacaacctagactcaggaaa

SEQ ID NO: 4189100 - DNA, 25 bp, Homo sapien
tgcgaaaatgccgtttccagccact

SEQ ID NO: 4189101 - DNA, 25 bp, Homo sapien
ctcaggaaaagcacatgcgaaaatg

SEQ ID NO: 4189102 - DNA, 25 bp, Homo sapien
actgcagccaactacatctggattt

SEQ ID NO: 4189103 - DNA, 25 bp, Homo sapien
tttaaatgagtgtttatactccacc

SEQ ID NO: 4189104 - DNA, 25 bp, Homo sapien
tactccaccatccaagttctcatga

SEQ ID NO: 4189105 - DNA, 25 bp, Homo sapien
cagggttctgtcagatgactgcagc

SEQ ID NO: 4189106 - DNA, 25 bp, Homo sapien
caaatatatccttgtgtgactcagt

SEQ ID NO: 4189107 - DNA, 25 bp, Homo sapien
cgttaacaagagcaagagtttgcct

SEQ ID NO: 4189108 - DNA, 25 bp, Homo sapien
caagagcaagagtttgcctttttga

SEQ ID NO: 4189109 - DNA, 25 bp, Homo sapien
attgtgttacacaaatatatccttg

SEQ ID NO: 4189110 - DNA, 25 bp, Homo sapien
atgaaagaacgaatcaaaatgacag

SEQ ID NO: 4189111 - DNA, 25 bp, Homo sapien
cccttttagctatagcaaactctga

SEQ ID NO: 4189112 - DNA, 25 bp, Homo sapien
tccagagctgtcaagagcatattct

SEQ ID NO: 4189113 - DNA, 25 bp, Homo sapien
cagataaatgtgtgggagtttttcc

SEQ ID NO: 4189114 - DNA, 25 bp, Homo sapien
agccagacataatgactgttgtgac

SEQ ID NO: 4189115 - DNA, 25 bp, Homo sapien
gatgcttccatgagcaccttcatag

SEQ ID NO: 4189116 - DNA, 25 bp, Homo sapien
gttgtgacggttttcagtaacaaga

SEQ ID NO: 4189117 - DNA, 25 bp, Homo sapien
tcatagacagatgagcttctttgag

SEQ ID NO: 4189118 - DNA, 25 bp, Homo sapien
gagaagtaactcctgctgctaaatt

SEQ ID NO: 4189119 - DNA, 25 bp, Homo sapien
tataaaaccccagaatgctcttgac

SEQ ID NO: 4189120 - DNA, 25 bp, Homo sapien
gctgatttaacctacagagagggac

SEQ ID NO: 4189121 - DNA, 25 bp, Homo sapien
aattagaaatcataagccccagaag

SEQ ID NO: 4189122 - DNA, 25 bp, Homo sapien
tttaggccgacaacagaactgaaag

SEQ ID NO: 4189123 - DNA, 25 bp, Homo sapien
tgcagaagcagagagttgccaattt

SEQ ID NO: 4189124 - DNA, 25 bp, Homo sapien
gagttgccaatttaggccgacaaca

SEQ ID NO: 4189125 - DNA, 25 bp, Homo sapien
aaatgaaagcaaggccactattgca

SEQ ID NO: 4189126 - DNA, 25 bp, Homo sapien
gaaagggcagctgccaagtcagcct

SEQ ID NO: 4189127 - DNA, 25 bp, Homo sapien
tcttttaaaacacactcaggggctg

SEQ ID NO: 4189128 - DNA, 25 bp, Homo sapien
ttggctttttgtcgcttatctttta

SEQ ID NO: 4189129 - DNA, 25 bp, Homo sapien
cagctgccaagtcagcctcactgga

SEQ ID NO: 4189130 - DNA, 25 bp, Homo sapien
tcctgagcagaaagaaccgtagatg

SEQ ID NO: 4189131 - DNA, 25 bp, Homo sapien
taagagctccccatataattttcct

SEQ ID NO: 4189132 - DNA, 25 bp, Homo sapien
gcatctagggtctcatctgctcctg

SEQ ID NO: 4189133 - DNA, 25 bp, Homo sapien
tgtaaattctccaacgagtctcaga

SEQ ID NO: 4189134 - DNA, 25 bp, Homo sapien
tgctttagttactcagcttcctctc

SEQ ID NO: 4189135 - DNA, 25 bp, Homo sapien
gctttgccttgctttagttactcag

SEQ ID NO: 4189136 - DNA, 25 bp, Homo sapien
ctctcaggtgactattgcagctcat

SEQ ID NO: 4189137 - DNA, 25 bp, Homo sapien
tcctctcaggtgactattgcagctc

SEQ ID NO: 4189138 - DNA, 25 bp, Homo sapien
ccttcctgtccgtagctagtctcat

SEQ ID NO: 4189139 - DNA, 25 bp, Homo sapien
tcagcacccttcctgtccgtagcta

SEQ ID NO: 4189140 - DNA, 25 bp, Homo sapien
cccctaaatatgctgaatgctgtcc

SEQ ID NO: 4189141 - DNA, 25 bp, Homo sapien
catcctcaaatgctgtttctatccc

SEQ ID NO: 4189142 - DNA, 25 bp, Homo sapien
tatcgactggtgtgataagggacac

SEQ ID NO: 4189143 - DNA, 25 bp, Homo sapien
gagcagctcgcctacttccttacaa

SEQ ID NO: 4189144 - DNA, 25 bp, Homo sapien
tctatcagaaaccaaggatgtcatg

SEQ ID NO: 4189145 - DNA, 25 bp, Homo sapien
caacagatatagcatgcttgtgaca

SEQ ID NO: 4189146 - DNA, 25 bp, Homo sapien
caacaaagaaggtgactgtgaacct

SEQ ID NO: 4189147 - DNA, 25 bp, Homo sapien
gactgtgaacctagcatgtgctgtt

SEQ ID NO: 4189148 - DNA, 25 bp, Homo sapien
tgtgctgtttgattctggcctctcc

SEQ ID NO: 4189149 - DNA, 25 bp, Homo sapien
ctgtcaacaaagaaggtgactgtga

SEQ ID NO: 4189150 - DNA, 25 bp, Homo sapien
ctcagatgggccagaaagccagccc

SEQ ID NO: 4189151 - DNA, 25 bp, Homo sapien
tctgcctcagatgggccagaaagcc

SEQ ID NO: 4189152 - DNA, 25 bp, Homo sapien
cttctgcctcagatgggccagaaag

SEQ ID NO: 4189153 - DNA, 25 bp, Homo sapien
aaagccagccccctcttaagcacac

SEQ ID NO: 4189154 - DNA, 25 bp, Homo sapien
accagctctggggactttaactgag

SEQ ID NO: 4189155 - DNA, 25 bp, Homo sapien
ccagctctggggactttaactgagg

SEQ ID NO: 4189156 - DNA, 25 bp, Homo sapien
gattccactgagcagcgtcagttcc

SEQ ID NO: 4189157 - DNA, 25 bp, Homo sapien
ccactgagcagcgtcagttcctctt

SEQ ID NO: 4189158 - DNA, 25 bp, Homo sapien
tgattccactgagcagcgtcagttc

SEQ ID NO: 4189159 - DNA, 25 bp, Homo sapien
ttccactgagcagcgtcagttcctc

SEQ ID NO: 4189160 - DNA, 25 bp, Homo sapien
ttaaatctttctaacaactcatggg

SEQ ID NO: 4189161 - DNA, 25 bp, Homo sapien
ttgtggattctctcatattgcaaaa

SEQ ID NO: 4189162 - DNA, 25 bp, Homo sapien
cactatcaaaagaagatcaagctgc

SEQ ID NO: 4189163 - DNA, 25 bp, Homo sapien
ctgaaagaagtagaagattcttctc

SEQ ID NO: 4189164 - DNA, 25 bp, Homo sapien
ccttttcattctctttcctctccat

SEQ ID NO: 4189165 - DNA, 25 bp, Homo sapien
cccttttcattctctttcctctcca

SEQ ID NO: 4189166 - DNA, 25 bp, Homo sapien
tgtcttctacccccttttcattctc

SEQ ID NO: 4189167 - DNA, 25 bp, Homo sapien
tctgtcttctacccccttttcattc

SEQ ID NO: 4189168 - DNA, 25 bp, Homo sapien
catactcacaaagaagcctggagcc

SEQ ID NO: 4189169 - DNA, 25 bp, Homo sapien
cgcttcctcctgtgcatactcacaa

SEQ ID NO: 4189170 - DNA, 25 bp, Homo sapien
tcctcctgtgcatactcacaaagaa

SEQ ID NO: 4189171 - DNA, 25 bp, Homo sapien
actcacaaagaagcctggagccgct

SEQ ID NO: 4189172 - DNA, 25 bp, Homo sapien
tgcttcccaatgcattctccttcct

SEQ ID NO: 4189173 - DNA, 25 bp, Homo sapien
acagctaaaggatttgctatatctg

SEQ ID NO: 4189174 - DNA, 25 bp, Homo sapien
tgaaaagtctcttcagcattccaaa

SEQ ID NO: 4189175 - DNA, 25 bp, Homo sapien
ggtggacaaagattgaaaagtctct

SEQ ID NO: 4189176 - DNA, 25 bp, Homo sapien
gctatatctgtaaaaggtggacaaa

SEQ ID NO: 4189177 - DNA, 25 bp, Homo sapien
cgagaagtctacccgggatttccag

SEQ ID NO: 4189178 - DNA, 25 bp, Homo sapien
acacaattctggctaacgagaaacg

SEQ ID NO: 4189179 - DNA, 25 bp, Homo sapien
gctaacgagaaacgagaagtctacc

SEQ ID NO: 4189180 - DNA, 25 bp, Homo sapien
tctggctaacgagaaacgagaagtc

SEQ ID NO: 4189181 - DNA, 25 bp, Homo sapien
gccttccccaatacagttttggatg

SEQ ID NO: 4189182 - DNA, 25 bp, Homo sapien
cagttttggatgtaatgtgactggc

SEQ ID NO: 4189183 - DNA, 25 bp, Homo sapien
ccccaatacagttttggatgtaatg

SEQ ID NO: 4189184 - DNA, 25 bp, Homo sapien
aagagttgggccaatgttcttgtct

SEQ ID NO: 4189185 - DNA, 25 bp, Homo sapien
tgcagtatacacagcagtaagccag

SEQ ID NO: 4189186 - DNA, 25 bp, Homo sapien
gaggagagactacaccaaaggaacc

SEQ ID NO: 4189187 - DNA, 25 bp, Homo sapien
tggcatgaagctgaaaccaccctca

SEQ ID NO: 4189188 - DNA, 25 bp, Homo sapien
cccagactatgagcttggcatgaag

SEQ ID NO: 4189189 - DNA, 25 bp, Homo sapien
tactgcttgattcatagggatgtct

SEQ ID NO: 4189190 - DNA, 25 bp, Homo sapien
gcttgattcatagggatgtcttgaa

SEQ ID NO: 4189191 - DNA, 25 bp, Homo sapien
tcacttgtccctactgcttgattca

SEQ ID NO: 4189192 - DNA, 25 bp, Homo sapien
gggatgtcttgaagaataaggagat

SEQ ID NO: 4189193 - DNA, 25 bp, Homo sapien
tcacccaatctctaactctgataag

SEQ ID NO: 4189194 - DNA, 25 bp, Homo sapien
tctttcacccaatctctaactctga

SEQ ID NO: 4189195 - DNA, 25 bp, Homo sapien
ggtgatctttcacccaatctctaac

SEQ ID NO: 4189196 - DNA, 25 bp, Homo sapien
agcttttggtgatctttcacccaat

SEQ ID NO: 4189197 - DNA, 25 bp, Homo sapien
aaacagtgatcttagaactcacaga

SEQ ID NO: 4189198 - DNA, 25 bp, Homo sapien
ttacatactgcagagaattcccttg

SEQ ID NO: 4189199 - DNA, 25 bp, Homo sapien
ggaaatttacatactgcagagaatt

SEQ ID NO: 4189200 - DNA, 25 bp, Homo sapien
tttggatttgaagcaaaacggacca

SEQ ID NO: 4189201 - DNA, 25 bp, Homo sapien
taaatacttgcgcatattttcttcc

SEQ ID NO: 4189202 - DNA, 25 bp, Homo sapien
atacttgcgcatattttcttcctga

SEQ ID NO: 4189203 - DNA, 25 bp, Homo sapien
aaatacttgcgcatattttcttcct

SEQ ID NO: 4189204 - DNA, 25 bp, Homo sapien
aatacttgcgcatattttcttcctg

SEQ ID NO: 4189205 - DNA, 25 bp, Homo sapien
agaatcatatgtgtctggctcttcc

SEQ ID NO: 4189206 - DNA, 25 bp, Homo sapien
gaaatcaccatgtttactataagtc

SEQ ID NO: 4189207 - DNA, 25 bp, Homo sapien
tacaattcagtgattgggaatatat

SEQ ID NO: 4189208 - DNA, 25 bp, Homo sapien
tactataagtcactccccaatttcc

SEQ ID NO: 4189209 - DNA, 25 bp, Homo sapien
tctggtcctgcttatcctccagttt

SEQ ID NO: 4189210 - DNA, 25 bp, Homo sapien
tggtcctgcttatcctccagtttat

SEQ ID NO: 4189211 - DNA, 25 bp, Homo sapien
tcctgcttatcctccagtttattca

SEQ ID NO: 4189212 - DNA, 25 bp, Homo sapien
ggtatcatctggtcctgcttatcct

SEQ ID NO: 4189213 - DNA, 25 bp, Homo sapien
ttaacagttggcaatagagggcctg

SEQ ID NO: 4189214 - DNA, 25 bp, Homo sapien
caatagagggcctgtaaacttctct

SEQ ID NO: 4189215 - DNA, 25 bp, Homo sapien
gttggcaatagagggcctgtaaact

SEQ ID NO: 4189216 - DNA, 25 bp, Homo sapien
cagttggcaatagagggcctgtaaa

SEQ ID NO: 4189217 - DNA, 25 bp, Homo sapien
gaggagacttaggtaaactgtcagc

SEQ ID NO: 4189218 - DNA, 25 bp, Homo sapien
ctctggaataattgaggagacttag

SEQ ID NO: 4189219 - DNA, 25 bp, Homo sapien
gacttaggtaaactgtcagcaaatc

SEQ ID NO: 4189220 - DNA, 25 bp, Homo sapien
taattgaggagacttaggtaaactg

SEQ ID NO: 4189221 - DNA, 25 bp, Homo sapien
acctccgggccagcaactggaatct

SEQ ID NO: 4189222 - DNA, 25 bp, Homo sapien
ccgggccagcaactggaatctgaac

SEQ ID NO: 4189223 - DNA, 25 bp, Homo sapien
ctcatagtgacctccgggccagcaa

SEQ ID NO: 4189224 - DNA, 25 bp, Homo sapien
ccagcaactggaatctgaacaatta

SEQ ID NO: 4189225 - DNA, 25 bp, Homo sapien
tctagacacgagcaaagcttaagcc

SEQ ID NO: 4189226 - DNA, 25 bp, Homo sapien
tcactgaatttagagggagaaacac

SEQ ID NO: 4189227 - DNA, 25 bp, Homo sapien
cagggatagctcagtgttatacact

SEQ ID NO: 4189228 - DNA, 25 bp, Homo sapien
gatacactacttaactaccagagag

SEQ ID NO: 4189229 - DNA, 25 bp, Homo sapien
agtcagagtggatacagtctgaaga

SEQ ID NO: 4189230 - DNA, 25 bp, Homo sapien
ctgactggttctagggaatgcacct

SEQ ID NO: 4189231 - DNA, 25 bp, Homo sapien
ttctagggaatgcacctctctgccc

SEQ ID NO: 4189232 - DNA, 25 bp, Homo sapien
cttcatgcaaagttttggggatgac

SEQ ID NO: 4189233 - DNA, 25 bp, Homo sapien
gcaaagacgcttaacacctggctca

SEQ ID NO: 4189234 - DNA, 25 bp, Homo sapien
gaagagccttctgtgggcatccgcc

SEQ ID NO: 4189235 - DNA, 25 bp, Homo sapien
taactagtctatatgctccaggagg

SEQ ID NO: 4189236 - DNA, 25 bp, Homo sapien
gatatcatcactagtggccactggg

SEQ ID NO: 4189237 - DNA, 25 bp, Homo sapien
actaacttgatgtccacagaggtct

SEQ ID NO: 4189238 - DNA, 25 bp, Homo sapien
tccagaaattaaagggctgctttgt

SEQ ID NO: 4189239 - DNA, 25 bp, Homo sapien
tcccataaggaataagagtgtgagc

SEQ ID NO: 4189240 - DNA, 25 bp, Homo sapien
cagaggtctcaatccaaaggtgtga

SEQ ID NO: 4189241 - DNA, 25 bp, Homo sapien
taaaagctcactgctatgtctctcc

SEQ ID NO: 4189242 - DNA, 25 bp, Homo sapien
ggtgcacagcaacccaaagcagtga

SEQ ID NO: 4189243 - DNA, 25 bp, Homo sapien
tctacatcactatggtaacgtctgg

SEQ ID NO: 4189244 - DNA, 25 bp, Homo sapien
gctgtatcttagttggtgggtgcac

SEQ ID NO: 4189245 - DNA, 25 bp, Homo sapien
tatgatgattcctagcagatctatg

SEQ ID NO: 4189246 - DNA, 25 bp, Homo sapien
tgacctccggactgctgctacagtg

SEQ ID NO: 4189247 - DNA, 25 bp, Homo sapien
agcagtgaggcagctgtattcagca

SEQ ID NO: 4189248 - DNA, 25 bp, Homo sapien
tatgctaatcggatccatctgggta

SEQ ID NO: 4189249 - DNA, 25 bp, Homo sapien
gaaataagtatctccaataatggga

SEQ ID NO: 4189250 - DNA, 25 bp, Homo sapien
cagggacttgtgcacatttagtgaa

SEQ ID NO: 4189251 - DNA, 25 bp, Homo sapien
tgcattactctcatttgtcagggac

SEQ ID NO: 4189252 - DNA, 25 bp, Homo sapien
aaactaccaatgtcaaggccaaaca

SEQ ID NO: 4189253 - DNA, 25 bp, Homo sapien
ctgactgacatgattggtatatgac

SEQ ID NO: 4189254 - DNA, 25 bp, Homo sapien
taacatgtacatactcaaaaaatgg

SEQ ID NO: 4189255 - DNA, 25 bp, Homo sapien
catcacaagtgcttcatagataacc

SEQ ID NO: 4189256 - DNA, 25 bp, Homo sapien
ctccctgtggggatcctgactgaca

SEQ ID NO: 4189257 - DNA, 25 bp, Homo sapien
tacaggcgggcacccctctgggatg

SEQ ID NO: 4189258 - DNA, 25 bp, Homo sapien
acacctcatacaggcgggcacccct

SEQ ID NO: 4189259 - DNA, 25 bp, Homo sapien
tcatacaggcgggcacccctctggg

SEQ ID NO: 4189260 - DNA, 25 bp, Homo sapien
gacacctcatacaggcgggcacccc

SEQ ID NO: 4189261 - DNA, 25 bp, Homo sapien
gccttataatgggaagctcttcagt

SEQ ID NO: 4189262 - DNA, 25 bp, Homo sapien
tcagacctttttcgacaagcactag

SEQ ID NO: 4189263 - DNA, 25 bp, Homo sapien
gatgttcaagtgatagtacagcaca

SEQ ID NO: 4189264 - DNA, 25 bp, Homo sapien
ggataaacctaatgaccacacagct

SEQ ID NO: 4189265 - DNA, 25 bp, Homo sapien
ggaccttgccagctaggctgtttgg

SEQ ID NO: 4189266 - DNA, 25 bp, Homo sapien
tggggaccttgccagctaggctgtt

SEQ ID NO: 4189267 - DNA, 25 bp, Homo sapien
ccctggggaccttgccagctaggct

SEQ ID NO: 4189268 - DNA, 25 bp, Homo sapien
gctgtttggatagggggaagaatct

SEQ ID NO: 4189269 - DNA, 25 bp, Homo sapien
aggtcttgcccactacaaactgagg

SEQ ID NO: 4189270 - DNA, 25 bp, Homo sapien
acaaaattccatggtgtgagtctcc

SEQ ID NO: 4189271 - DNA, 25 bp, Homo sapien
catcttcccagaactccccctctta

SEQ ID NO: 4189272 - DNA, 25 bp, Homo sapien
ggagctgcatgtcagtcctgtctcc

SEQ ID NO: 4189273 - DNA, 25 bp, Homo sapien
ctcattgggtaacttgaaaaacttg

SEQ ID NO: 4189274 - DNA, 25 bp, Homo sapien
acttgtttgattctactgttgaaac

SEQ ID NO: 4189275 - DNA, 25 bp, Homo sapien
tgtttgattctactgttgaaacttt

SEQ ID NO: 4189276 - DNA, 25 bp, Homo sapien
tttgattctactgttgaaactttct

SEQ ID NO: 4189277 - DNA, 25 bp, Homo sapien
tggcaggtggtcagtaaattccaca

SEQ ID NO: 4189278 - DNA, 25 bp, Homo sapien
ggtggtcagtaaattccacattcac

SEQ ID NO: 4189279 - DNA, 25 bp, Homo sapien
aagtggcaggtggtcagtaaattcc

SEQ ID NO: 4189280 - DNA, 25 bp, Homo sapien
caggtggtcagtaaattccacattc

SEQ ID NO: 4189281 - DNA, 25 bp, Homo sapien
acgacctgatgctgctctggctgag

SEQ ID NO: 4189282 - DNA, 25 bp, Homo sapien
tttgcctggcattagtacgacctga

SEQ ID NO: 4189283 - DNA, 25 bp, Homo sapien
ggccctcctgccaatggacattttc

SEQ ID NO: 4189284 - DNA, 25 bp, Homo sapien
tatcactattcaggatttgcctggc

SEQ ID NO: 4189285 - DNA, 25 bp, Homo sapien
acttttgcaatgaagtagcaagact

SEQ ID NO: 4189286 - DNA, 25 bp, Homo sapien
gatgttaactgcacatccattctga

SEQ ID NO: 4189287 - DNA, 25 bp, Homo sapien
aagatgttaactgcacatccattct

SEQ ID NO: 4189288 - DNA, 25 bp, Homo sapien
aatgaagtagcaagactgacaaggg

SEQ ID NO: 4189289 - DNA, 25 bp, Homo sapien
taaccatcttcctccttgattcctt

SEQ ID NO: 4189290 - DNA, 25 bp, Homo sapien
ccttccaaccactcccaattatttg

SEQ ID NO: 4189291 - DNA, 25 bp, Homo sapien
cttccaaccactcccaattatttgg

SEQ ID NO: 4189292 - DNA, 25 bp, Homo sapien
tcctccttgattccttccaaccact

SEQ ID NO: 4189293 - DNA, 25 bp, Homo sapien
ttagcaaagctgctcaaagatgaac

SEQ ID NO: 4189294 - DNA, 25 bp, Homo sapien
ctcctcctgccagatggacacagtc

SEQ ID NO: 4189295 - DNA, 25 bp, Homo sapien
tcctcctgccagatggacacagtca

SEQ ID NO: 4189296 - DNA, 25 bp, Homo sapien
cctcctgccagatggacacagtcat

SEQ ID NO: 4189297 - DNA, 25 bp, Homo sapien
ggtctgtcttactccaaacctctgt

SEQ ID NO: 4189298 - DNA, 25 bp, Homo sapien
tcacagaccttgtgtccttctcctg

SEQ ID NO: 4189299 - DNA, 25 bp, Homo sapien
tcctgctcaaggataaggtctgtct

SEQ ID NO: 4189300 - DNA, 25 bp, Homo sapien
gaaaagtaccctgctatatggccaa

SEQ ID NO: 4189301 - DNA, 25 bp, Homo sapien
cagctgaatatctgtgcactggaag

SEQ ID NO: 4189302 - DNA, 25 bp, Homo sapien
ccatgagttcaaaaaggatcttacg

SEQ ID NO: 4189303 - DNA, 25 bp, Homo sapien
cactggaagtcacgtgggtggaaat

SEQ ID NO: 4189304 - DNA, 25 bp, Homo sapien
ggtgcgaacttggtatgacccacaa

SEQ ID NO: 4189305 - DNA, 25 bp, Homo sapien
tattcccctttatgcccagagagtc

SEQ ID NO: 4189306 - DNA, 25 bp, Homo sapien
ggcatccgtgcagcacattctcatg

SEQ ID NO: 4189307 - DNA, 25 bp, Homo sapien
tctcatgctctatgtgaataaatac

SEQ ID NO: 4189308 - DNA, 25 bp, Homo sapien
acctggagcactggacgaaggcatc

SEQ ID NO: 4189309 - DNA, 25 bp, Homo sapien
cttggaattggcaaggttccagaaa

SEQ ID NO: 4189310 - DNA, 25 bp, Homo sapien
ttggaattggcaaggttccagaaaa

SEQ ID NO: 4189311 - DNA, 25 bp, Homo sapien
gcccactggggataatctttcaagg

SEQ ID NO: 4189312 - DNA, 25 bp, Homo sapien
gtgaggtctgatgtgctgcttacat

SEQ ID NO: 4189313 - DNA, 25 bp, Homo sapien
aggtggtacacccaaaatgactttg

SEQ ID NO: 4189314 - DNA, 25 bp, Homo sapien
tgtaaactggagatagcccactggg

SEQ ID NO: 4189315 - DNA, 25 bp, Homo sapien
ttgccaaaggttcactgccggctcc

SEQ ID NO: 4189316 - DNA, 25 bp, Homo sapien
cctggagcactgtgcaaagctgctt

SEQ ID NO: 4189317 - DNA, 25 bp, Homo sapien
gccaaaggttcactgccggctccag

SEQ ID NO: 4189318 - DNA, 25 bp, Homo sapien
tcctggagcactgtgcaaagctgct

SEQ ID NO: 4189319 - DNA, 25 bp, Homo sapien
catactcccttcctgctcggtgatg

SEQ ID NO: 4189320 - DNA, 25 bp, Homo sapien
gtctcgttcacaatttctgcccata

SEQ ID NO: 4189321 - DNA, 25 bp, Homo sapien
cacatacgatgctggacacggatac

SEQ ID NO: 4189322 - DNA, 25 bp, Homo sapien
acacggatacgtccagtctcgttca

SEQ ID NO: 4189323 - DNA, 25 bp, Homo sapien
ccacccatgtaatataaacagccac

SEQ ID NO: 4189324 - DNA, 25 bp, Homo sapien
ttcaaattccaactgcggagtcagg

SEQ ID NO: 4189325 - DNA, 25 bp, Homo sapien
tataaacagccactactttcttgac

SEQ ID NO: 4189326 - DNA, 25 bp, Homo sapien
tcagggtaaacaccacccatgtaat

SEQ ID NO: 4189327 - DNA, 25 bp, Homo sapien
ctagggggctgacagaccatggtct

SEQ ID NO: 4189328 - DNA, 25 bp, Homo sapien
cttgtgctgaagctctagggggctg

SEQ ID NO: 4189329 - DNA, 25 bp, Homo sapien
tagggggctgacagaccatggtctc

SEQ ID NO: 4189330 - DNA, 25 bp, Homo sapien
gtgctgaagctctagggggctgaca

SEQ ID NO: 4189331 - DNA, 25 bp, Homo sapien
tcctctgactatggagagagatctc

SEQ ID NO: 4189332 - DNA, 25 bp, Homo sapien
gattccagcaggacaaacggccaaa

SEQ ID NO: 4189333 - DNA, 25 bp, Homo sapien
tctttgtcatcctcaggcagttcct

SEQ ID NO: 4189334 - DNA, 25 bp, Homo sapien
tgcgtctaattactctctcagagcg

SEQ ID NO: 4189335 - DNA, 25 bp, Homo sapien
tcagtgccatagaagagtgacaggc

SEQ ID NO: 4189336 - DNA, 25 bp, Homo sapien
tggaggacacaaaaacgaacagggc

SEQ ID NO: 4189337 - DNA, 25 bp, Homo sapien
gtctctggccctggataagctcgca

SEQ ID NO: 4189338 - DNA, 25 bp, Homo sapien
caaacaattatggaggttcaaccct

SEQ ID NO: 4189339 - DNA, 25 bp, Homo sapien
gcttcggtcagtgccaagatcagca

SEQ ID NO: 4189340 - DNA, 25 bp, Homo sapien
caaatgccagcgcttcggtcagtgc

SEQ ID NO: 4189341 - DNA, 25 bp, Homo sapien
ctgggagatggttcctggatggcaa

SEQ ID NO: 4189342 - DNA, 25 bp, Homo sapien
gacctgaagagattccctgggagat

SEQ ID NO: 4189343 - DNA, 25 bp, Homo sapien
cagcatcaccacagaagtatgtctg

SEQ ID NO: 4189344 - DNA, 25 bp, Homo sapien
tactgtcgcagcgatggtggagatg

SEQ ID NO: 4189345 - DNA, 25 bp, Homo sapien
tccatcgggattgggggtcagcatc

SEQ ID NO: 4189346 - DNA, 25 bp, Homo sapien
gagatggtgtgcgtaggagggtgcc

SEQ ID NO: 4189347 - DNA, 25 bp, Homo sapien
tgtggagcttggatttcgtcctcgc

SEQ ID NO: 4189348 - DNA, 25 bp, Homo sapien
gaagttgcccttgtagatctgaaag

SEQ ID NO: 4189349 - DNA, 25 bp, Homo sapien
tctttactcctggagtggccaccag

SEQ ID NO: 4189350 - DNA, 25 bp, Homo sapien
cgggacagggcgtgatgaattacca

SEQ ID NO: 4189351 - DNA, 25 bp, Homo sapien
tctgcgaaggcctggcttgtccttt

SEQ ID NO: 4189352 - DNA, 25 bp, Homo sapien
tgtggcatctggtgtccctccttgg

SEQ ID NO: 4189353 - DNA, 25 bp, Homo sapien
tgagacactggtatcgaaggcagct

SEQ ID NO: 4189354 - DNA, 25 bp, Homo sapien
gggtaacagtaagccaagagtcact

SEQ ID NO: 4189355 - DNA, 25 bp, Homo sapien
tccagaaatagtgctttctgagacc

SEQ ID NO: 4189356 - DNA, 25 bp, Homo sapien
ctccagaaatagtgctttctgagac

SEQ ID NO: 4189357 - DNA, 25 bp, Homo sapien
gatcacccaggcgatatccatcttg

SEQ ID NO: 4189358 - DNA, 25 bp, Homo sapien
gtggctctgtgctgcggtttgtccc

SEQ ID NO: 4189359 - DNA, 25 bp, Homo sapien
gatgggcacgctgatggccaggatc

SEQ ID NO: 4189360 - DNA, 25 bp, Homo sapien
tcttgctcaggcagatggtggctct

SEQ ID NO: 4189361 - DNA, 25 bp, Homo sapien
agagctgtcagggtatgggtctaac

SEQ ID NO: 4189362 - DNA, 25 bp, Homo sapien
ctgggatgcacagggaagagctgtc

SEQ ID NO: 4189363 - DNA, 25 bp, Homo sapien
tatgggtctaacactggaacagctg

SEQ ID NO: 4189364 - DNA, 25 bp, Homo sapien
gggacattccctggatatccctgca

SEQ ID NO: 4189365 - DNA, 25 bp, Homo sapien
gagaagccatgaagtgaggactgag

SEQ ID NO: 4189366 - DNA, 25 bp, Homo sapien
ggagaagccatgaagtgaggactga

SEQ ID NO: 4189367 - DNA, 25 bp, Homo sapien
agaagccatgaagtgaggactgagt

SEQ ID NO: 4189368 - DNA, 25 bp, Homo sapien
gagtccagtgctctaacagcccatg

SEQ ID NO: 4189369 - DNA, 25 bp, Homo sapien
gaggcagtagccatcaagactctgg

SEQ ID NO: 4189370 - DNA, 25 bp, Homo sapien
tatgactattgggtggctcaaggac

SEQ ID NO: 4189371 - DNA, 25 bp, Homo sapien
tgtattgtcctgaacaccggagggt

SEQ ID NO: 4189372 - DNA, 25 bp, Homo sapien
agggccagctctgttcgcagcagcc

SEQ ID NO: 4189373 - DNA, 25 bp, Homo sapien
tctgacatcctggtggtgccaacca

SEQ ID NO: 4189374 - DNA, 25 bp, Homo sapien
tggtgccaaccatctctgtgctggg

SEQ ID NO: 4189375 - DNA, 25 bp, Homo sapien
tctgttcgcagcagcctgagggtct

SEQ ID NO: 4189376 - DNA, 25 bp, Homo sapien
tcacactgcagaagggtaacacaag

SEQ ID NO: 4189377 - DNA, 25 bp, Homo sapien
cagcttgactgagcacagtgtgaca

SEQ ID NO: 4189378 - DNA, 25 bp, Homo sapien
gggtggcctgtccagattcacactg

SEQ ID NO: 4189379 - DNA, 25 bp, Homo sapien
gaggactgagtatatcctgccccag

SEQ ID NO: 4189380 - DNA, 25 bp, Homo sapien
ctcagaggtttcaagggactggatc

SEQ ID NO: 4189381 - DNA, 25 bp, Homo sapien
ccacagcatgcctgttgaagtagtc

SEQ ID NO: 4189382 - DNA, 25 bp, Homo sapien
ggtgttgttccagtagctcaggttg

SEQ ID NO: 4189383 - DNA, 25 bp, Homo sapien
cctgttgaagtagtccatggtgatg

SEQ ID NO: 4189384 - DNA, 25 bp, Homo sapien
ggttaacaaggaccatcccagtgtc

SEQ ID NO: 4189385 - DNA, 25 bp, Homo sapien
gtgtctctatagtcgccattggctg

SEQ ID NO: 4189386 - DNA, 25 bp, Homo sapien
agatctcagatacttgatcgtttcc

SEQ ID NO: 4189387 - DNA, 25 bp, Homo sapien
acttgatcgtttcccacaaacagtg

SEQ ID NO: 4189388 - DNA, 25 bp, Homo sapien
ctcattaagtcagggttacacaaag

SEQ ID NO: 4189389 - DNA, 25 bp, Homo sapien
aaaaaagatgttgacaattcatagg

SEQ ID NO: 4189390 - DNA, 25 bp, Homo sapien
ttagagacgaaaaatacggaatggc

SEQ ID NO: 4189391 - DNA, 25 bp, Homo sapien
cgaaaaatacggaatggcaaagtga

SEQ ID NO: 4189392 - DNA, 25 bp, Homo sapien
agcattttaaagctccagggccggg

SEQ ID NO: 4189393 - DNA, 25 bp, Homo sapien
ggatccccaggtgctcaagaatagt

SEQ ID NO: 4189394 - DNA, 25 bp, Homo sapien
ttaaacatgacatccaatggtgccg

SEQ ID NO: 4189395 - DNA, 25 bp, Homo sapien
aatggtgccgtcataaggctccagg

SEQ ID NO: 4189396 - DNA, 25 bp, Homo sapien
ggaatctcccctatccctggggctg

SEQ ID NO: 4189397 - DNA, 25 bp, Homo sapien
atctcccctatccctggggctgctt

SEQ ID NO: 4189398 - DNA, 25 bp, Homo sapien
ctggaatctcccctatccctggggc

SEQ ID NO: 4189399 - DNA, 25 bp, Homo sapien
tggaatctcccctatccctggggct

SEQ ID NO: 4189400 - DNA, 25 bp, Homo sapien
agtggcttttggtttacagccccag

SEQ ID NO: 4189401 - DNA, 25 bp, Homo sapien
ggcttttggtttacagccccagcat

SEQ ID NO: 4189402 - DNA, 25 bp, Homo sapien
tggcttttggtttacagccccagca

SEQ ID NO: 4189403 - DNA, 25 bp, Homo sapien
gtggcttttggtttacagccccagc

SEQ ID NO: 4189404 - DNA, 25 bp, Homo sapien
taggtcctcaacagcaccatggtcc

SEQ ID NO: 4189405 - DNA, 25 bp, Homo sapien
tgcatccgcagttgtgtttccagct

SEQ ID NO: 4189406 - DNA, 25 bp, Homo sapien
tgttcctacatagaccccgggtgct

SEQ ID NO: 4189407 - DNA, 25 bp, Homo sapien
ctcaagggcgtgcactttggccata

SEQ ID NO: 4189408 - DNA, 25 bp, Homo sapien
ccagatggatgcaagcagaacagca

SEQ ID NO: 4189409 - DNA, 25 bp, Homo sapien
ttagatttgacaggcgttaaggccc

SEQ ID NO: 4189410 - DNA, 25 bp, Homo sapien
tctaagatggctctcccttgcagcc

SEQ ID NO: 4189411 - DNA, 25 bp, Homo sapien
gttaaggccctggactgttctaaga

SEQ ID NO: 4189412 - DNA, 25 bp, Homo sapien
gcccaggctaaggaggtcgaatttc

SEQ ID NO: 4189413 - DNA, 25 bp, Homo sapien
gctccacgaggccagattcactgaa

SEQ ID NO: 4189414 - DNA, 25 bp, Homo sapien
tggacatccccaccgtgctattgag

SEQ ID NO: 4189415 - DNA, 25 bp, Homo sapien
tgctgagagcttgctctgaggcctc

SEQ ID NO: 4189416 - DNA, 25 bp, Homo sapien
ttttgacacctggtctctgagggct

SEQ ID NO: 4189417 - DNA, 25 bp, Homo sapien
tggagacctagacaaatgtcctggc

SEQ ID NO: 4189418 - DNA, 25 bp, Homo sapien
tggaggtataagctgcagttttctc

SEQ ID NO: 4189419 - DNA, 25 bp, Homo sapien
ttccctgagtatgggctgtctctgt

SEQ ID NO: 4189420 - DNA, 25 bp, Homo sapien
taagccttggtatagatttgtctcc

SEQ ID NO: 4189421 - DNA, 25 bp, Homo sapien
taccgtaggcttggaaactgcaata

SEQ ID NO: 4189422 - DNA, 25 bp, Homo sapien
gctaggtgggaaggcaacttcgtcc

SEQ ID NO: 4189423 - DNA, 25 bp, Homo sapien
ccacggtccgggctttatggttcat

SEQ ID NO: 4189424 - DNA, 25 bp, Homo sapien
caccggtctactggctactatgtcc

SEQ ID NO: 4189425 - DNA, 25 bp, Homo sapien
acctgcaccggtctactggctacta

SEQ ID NO: 4189426 - DNA, 25 bp, Homo sapien
tggccacgactgttagtgccactgc

SEQ ID NO: 4189427 - DNA, 25 bp, Homo sapien
tgagtcacagtcatgtctctggcca

SEQ ID NO: 4189428 - DNA, 25 bp, Homo sapien
agagacagcctggggtttcccaggg

SEQ ID NO: 4189429 - DNA, 25 bp, Homo sapien
cttaacgaagagacagcctggggtt

SEQ ID NO: 4189430 - DNA, 25 bp, Homo sapien
cgaagagacagcctggggtttccca

SEQ ID NO: 4189431 - DNA, 25 bp, Homo sapien
taacgaagagacagcctggggtttc

SEQ ID NO: 4189432 - DNA, 25 bp, Homo sapien
catcaacgaaggtgggaaagactga

SEQ ID NO: 4189433 - DNA, 25 bp, Homo sapien
cccaggtgatttggagcgctgatat

SEQ ID NO: 4189434 - DNA, 25 bp, Homo sapien
agatacgtgagagggagaatccccg

SEQ ID NO: 4189435 - DNA, 25 bp, Homo sapien
gctgcccacttggaaaagatacgtg

SEQ ID NO: 4189436 - DNA, 25 bp, Homo sapien
gaaaggtattttcagcctggcgaga

SEQ ID NO: 4189437 - DNA, 25 bp, Homo sapien
tagaaaggtattttcagcctggcga

SEQ ID NO: 4189438 - DNA, 25 bp, Homo sapien
aaaggtattttcagcctggcgagat

SEQ ID NO: 4189439 - DNA, 25 bp, Homo sapien
ttagaaaggtattttcagcctggcg

SEQ ID NO: 4189440 - DNA, 25 bp, Homo sapien
tgtttgtgttactgctcacttaatg

SEQ ID NO: 4189441 - DNA, 25 bp, Homo sapien
gccaggcgatttacacacatcattt

SEQ ID NO: 4189442 - DNA, 25 bp, Homo sapien
aacttaaagcattgattatgtgcca

SEQ ID NO: 4189443 - DNA, 25 bp, Homo sapien
ttcctgcaccaacccgatgaggtag

SEQ ID NO: 4189444 - DNA, 25 bp, Homo sapien
gctctttctggaaactcccacagcg

SEQ ID NO: 4189445 - DNA, 25 bp, Homo sapien
tggaaactcccacagcgtatgtcgg

SEQ ID NO: 4189446 - DNA, 25 bp, Homo sapien
tatgtcggttgatcaacgcgctcat

SEQ ID NO: 4189447 - DNA, 25 bp, Homo sapien
ccacagcgtatgtcggttgatcaac

SEQ ID NO: 4189448 - DNA, 25 bp, Homo sapien
acccttgctgagaactaatcaatac

SEQ ID NO: 4189449 - DNA, 25 bp, Homo sapien
tggggcacccttgctgagaactaat

SEQ ID NO: 4189450 - DNA, 25 bp, Homo sapien
gggcacccttgctgagaactaatca

SEQ ID NO: 4189451 - DNA, 25 bp, Homo sapien
gcacccttgctgagaactaatcaat

SEQ ID NO: 4189452 - DNA, 25 bp, Homo sapien
cgcggggccccgctctgaagggcca

SEQ ID NO: 4189453 - DNA, 25 bp, Homo sapien
gcggggccccgctctgaagggccat

SEQ ID NO: 4189454 - DNA, 25 bp, Homo sapien
gagctggcgcttggtaggaggcctg

SEQ ID NO: 4189455 - DNA, 25 bp, Homo sapien
gactgccctgaggacgccatgcccg

SEQ ID NO: 4189456 - DNA, 25 bp, Homo sapien
actgccctgaggacgccatgcccgg

SEQ ID NO: 4189457 - DNA, 25 bp, Homo sapien
tggcgcttggtaggaggcctgcccg

SEQ ID NO: 4189458 - DNA, 25 bp, Homo sapien
ggccgtttcttgaacacccgctgtg

SEQ ID NO: 4189459 - DNA, 25 bp, Homo sapien
gaatttcagagaacccctgagctgg

SEQ ID NO: 4189460 - DNA, 25 bp, Homo sapien
cctgtctcactgctggtctggaatt

SEQ ID NO: 4189461 - DNA, 25 bp, Homo sapien
tcagacattgcagccgcttcctgtc

SEQ ID NO: 4189462 - DNA, 25 bp, Homo sapien
ttctcacagcggcagaggattctgc

SEQ ID NO: 4189463 - DNA, 25 bp, Homo sapien
gagcacagacgtggttactcagata

SEQ ID NO: 4189464 - DNA, 25 bp, Homo sapien
cagctccacgtcagtatctaaccag

SEQ ID NO: 4189465 - DNA, 25 bp, Homo sapien
gcagcccctatgtgtgcttccagag

SEQ ID NO: 4189466 - DNA, 25 bp, Homo sapien
ggaggtgcccaaaatgtactgaaca

SEQ ID NO: 4189467 - DNA, 25 bp, Homo sapien
taactgctgcttcattaatgttggg

SEQ ID NO: 4189468 - DNA, 25 bp, Homo sapien
ttggcaacacctgggctatattctg

SEQ ID NO: 4189469 - DNA, 25 bp, Homo sapien
cctgagcctcaggaatgaaggaggt

SEQ ID NO: 4189470 - DNA, 25 bp, Homo sapien
aatgagagacatctgagggctaagg

SEQ ID NO: 4189471 - DNA, 25 bp, Homo sapien
gaagtctagccatctcttgagacag

SEQ ID NO: 4189472 - DNA, 25 bp, Homo sapien
cacagccactgggtgtccaaggaga

SEQ ID NO: 4189473 - DNA, 25 bp, Homo sapien
agttcactcacaagcacagtcacag

SEQ ID NO: 4189474 - DNA, 25 bp, Homo sapien
gtcactgggagcgtcaagatcactt

SEQ ID NO: 4189475 - DNA, 25 bp, Homo sapien
cactgggagcgtcaagatcacttac

SEQ ID NO: 4189476 - DNA, 25 bp, Homo sapien
tcactgggagcgtcaagatcactta

SEQ ID NO: 4189477 - DNA, 25 bp, Homo sapien
ggtcactgggagcgtcaagatcact

SEQ ID NO: 4189478 - DNA, 25 bp, Homo sapien
gagccgggcattttccaagactgcc

SEQ ID NO: 4189479 - DNA, 25 bp, Homo sapien
cattttccaagactgcctcacccac

SEQ ID NO: 4189480 - DNA, 25 bp, Homo sapien
gcattttccaagactgcctcaccca

SEQ ID NO: 4189481 - DNA, 25 bp, Homo sapien
ccgggcattttccaagactgcctca

SEQ ID NO: 4189482 - DNA, 25 bp, Homo sapien
ttaaagtcatctgctccggcctgga

SEQ ID NO: 4189483 - DNA, 25 bp, Homo sapien
ggcctggatagtttctgtctgcagc

SEQ ID NO: 4189484 - DNA, 25 bp, Homo sapien
aaagtcatctgctccggcctggata

SEQ ID NO: 4189485 - DNA, 25 bp, Homo sapien
tctgctccggcctggatagtttctg

SEQ ID NO: 4189486 - DNA, 25 bp, Homo sapien
actctccaggtccattttagtcaaa

SEQ ID NO: 4189487 - DNA, 25 bp, Homo sapien
atgactttatacagagagttaattt

SEQ ID NO: 4189488 - DNA, 25 bp, Homo sapien
ccgcctttcgaaatggctgctcatt

SEQ ID NO: 4189489 - DNA, 25 bp, Homo sapien
catagtttcttgatagagagccaag

SEQ ID NO: 4189490 - DNA, 25 bp, Homo sapien
aaagaacttcccaatgtgagcatcg

SEQ ID NO: 4189491 - DNA, 25 bp, Homo sapien
gctggttagcttaagttggtctcaa

SEQ ID NO: 4189492 - DNA, 25 bp, Homo sapien
gaattgctgaagtctcgcagggaac

SEQ ID NO: 4189493 - DNA, 25 bp, Homo sapien
gaagcagcctaaatcttggatcaga

SEQ ID NO: 4189494 - DNA, 25 bp, Homo sapien
aacaaagtaagcaacaacagcacag

SEQ ID NO: 4189495 - DNA, 25 bp, Homo sapien
caaagtaagcaacaacagcacaggg

SEQ ID NO: 4189496 - DNA, 25 bp, Homo sapien
aaaaacaaagtaagcaacaacagca

SEQ ID NO: 4189497 - DNA, 25 bp, Homo sapien
aaaacaaagtaagcaacaacagcac

SEQ ID NO: 4189498 - DNA, 25 bp, Homo sapien
cagaccagtgccaatgggagcatcc

SEQ ID NO: 4189499 - DNA, 25 bp, Homo sapien
tctcccactgaattctgatcgtctc

SEQ ID NO: 4189500 - DNA, 25 bp, Homo sapien
tcaaggatgtcgtccagaccagtgc

SEQ ID NO: 4189501 - DNA, 25 bp, Homo sapien
agctcacaccctgccaactgtttgt

SEQ ID NO: 4189502 - DNA, 25 bp, Homo sapien
cagaggaattcactcattctgcaaa

SEQ ID NO: 4189503 - DNA, 25 bp, Homo sapien
gttttctctgagatgtagctttcag

SEQ ID NO: 4189504 - DNA, 25 bp, Homo sapien
gaggcccaggcagcattggccaagc

SEQ ID NO: 4189505 - DNA, 25 bp, Homo sapien
agcattggccaagctaaaacaaata

SEQ ID NO: 4189506 - DNA, 25 bp, Homo sapien
tgttgtgtaactccaccctgagggc

SEQ ID NO: 4189507 - DNA, 25 bp, Homo sapien
aggctctggacttggcacgaagtgt

SEQ ID NO: 4189508 - DNA, 25 bp, Homo sapien
gaagtgttgtgtaactccaccctga

SEQ ID NO: 4189509 - DNA, 25 bp, Homo sapien
ttggcacgaagtgttgtgtaactcc

SEQ ID NO: 4189510 - DNA, 25 bp, Homo sapien
gaacgataatctactagaaccagca

SEQ ID NO: 4189511 - DNA, 25 bp, Homo sapien
ttggctgcaaggccccgtgaccaga

SEQ ID NO: 4189512 - DNA, 25 bp, Homo sapien
atctactagaaccagcagggaacag

SEQ ID NO: 4189513 - DNA, 25 bp, Homo sapien
gccccgtgaccagaacgataatcta

SEQ ID NO: 4189514 - DNA, 25 bp, Homo sapien
tatggacctgccactgaacttctta

SEQ ID NO: 4189515 - DNA, 25 bp, Homo sapien
ttttttccaaggagcgcatcctggg

SEQ ID NO: 4189516 - DNA, 25 bp, Homo sapien
aggccacgtcctgcgttgataattc

SEQ ID NO: 4189517 - DNA, 25 bp, Homo sapien
ggtctccatcatactcatgatttga

SEQ ID NO: 4189518 - DNA, 25 bp, Homo sapien
aggacgccacgtccttctgcagctg

SEQ ID NO: 4189519 - DNA, 25 bp, Homo sapien
ggttctggagctccatgtcatgcca

SEQ ID NO: 4189520 - DNA, 25 bp, Homo sapien
cacttgcgggccagcagatgcgcgc

SEQ ID NO: 4189521 - DNA, 25 bp, Homo sapien
ggcatcgtgcaaggtgttctccagg

SEQ ID NO: 4189522 - DNA, 25 bp, Homo sapien
taaccagggaatccagcagggactg

SEQ ID NO: 4189523 - DNA, 25 bp, Homo sapien
ggacaagggagattgctcaagctac

SEQ ID NO: 4189524 - DNA, 25 bp, Homo sapien
cagctcaagctgaattaaccaggga

SEQ ID NO: 4189525 - DNA, 25 bp, Homo sapien
tggacgctgcgcacaaagcatttat

SEQ ID NO: 4189526 - DNA, 25 bp, Homo sapien
caccgtggcatccacctgggccaca

SEQ ID NO: 4189527 - DNA, 25 bp, Homo sapien
cctggctgggtcatcggcaccggtg

SEQ ID NO: 4189528 - DNA, 25 bp, Homo sapien
ctgggtcatcggcaccggtgcatag

SEQ ID NO: 4189529 - DNA, 25 bp, Homo sapien
tcatcggcaccggtgcataggcagg

SEQ ID NO: 4189530 - DNA, 25 bp, Homo sapien
catgacaatcaagtggaagagggtc

SEQ ID NO: 4189531 - DNA, 25 bp, Homo sapien
tgtcagaacagtgtttgtcgtctcc

SEQ ID NO: 4189532 - DNA, 25 bp, Homo sapien
caggcctgaaaggactcgctgagca

SEQ ID NO: 4189533 - DNA, 25 bp, Homo sapien
taatgtgggtatctttgctctctac

SEQ ID NO: 4189534 - DNA, 25 bp, Homo sapien
gctgtgttctaggaccttgatgtcc

SEQ ID NO: 4189535 - DNA, 25 bp, Homo sapien
tgatgtccccccacgcagctgagaa

SEQ ID NO: 4189536 - DNA, 25 bp, Homo sapien
tgtgttctaggaccttgatgtcccc

SEQ ID NO: 4189537 - DNA, 25 bp, Homo sapien
tgggtgtctcattaagccaggtgga

SEQ ID NO: 4189538 - DNA, 25 bp, Homo sapien
aaggaccagagggtatcttcttctc

SEQ ID NO: 4189539 - DNA, 25 bp, Homo sapien
ggaccagagggtatcttcttctctg

SEQ ID NO: 4189540 - DNA, 25 bp, Homo sapien
aggaccagagggtatcttcttctct

SEQ ID NO: 4189541 - DNA, 25 bp, Homo sapien
gagctgctaatggagcggtggctga

SEQ ID NO: 4189542 - DNA, 25 bp, Homo sapien
caggtggagctgctaatggagcggt

SEQ ID NO: 4189543 - DNA, 25 bp, Homo sapien
gtggagctgctaatggagcggtggc

SEQ ID NO: 4189544 - DNA, 25 bp, Homo sapien
gcaggtggagctgctaatggagcgg

SEQ ID NO: 4189545 - DNA, 25 bp, Homo sapien
cacatacaaatcactgggaacctgt

SEQ ID NO: 4189546 - DNA, 25 bp, Homo sapien
tacacattgctttctggactccgac

SEQ ID NO: 4189547 - DNA, 25 bp, Homo sapien
gtgtggcctccaagcccactgtagt

SEQ ID NO: 4189548 - DNA, 25 bp, Homo sapien
tagtgcaggtgtagtgaagattcac

SEQ ID NO: 4189549 - DNA, 25 bp, Homo sapien
gactccgacaatcgcagacattctg

SEQ ID NO: 4189550 - DNA, 25 bp, Homo sapien
tggcagtttgcaatttacaaggtgc

SEQ ID NO: 4189551 - DNA, 25 bp, Homo sapien
catttaatccttggaagatacgcac

SEQ ID NO: 4189552 - DNA, 25 bp, Homo sapien
caaggtgcctttacacacatgttct

SEQ ID NO: 4189553 - DNA, 25 bp, Homo sapien
gccatcaaaaatgtgctgcaaggaa

SEQ ID NO: 4189554 - DNA, 25 bp, Homo sapien
tttcccaaactgcaactgacccgat

SEQ ID NO: 4189555 - DNA, 25 bp, Homo sapien
ggatcggattctttacattgcagac

SEQ ID NO: 4189556 - DNA, 25 bp, Homo sapien
ctgacccgatagaccggaggagctg

SEQ ID NO: 4189557 - DNA, 25 bp, Homo sapien
cgatggtcccaggaatggctaggat

SEQ ID NO: 4189558 - DNA, 25 bp, Homo sapien
acttccagggaccagatggatgaac

SEQ ID NO: 4189559 - DNA, 25 bp, Homo sapien
agctattcctacttccagggaccag

SEQ ID NO: 4189560 - DNA, 25 bp, Homo sapien
tacttccagggaccagatggatgaa

SEQ ID NO: 4189561 - DNA, 25 bp, Homo sapien
tcaagctattcctacttccagggac

SEQ ID NO: 4189562 - DNA, 25 bp, Homo sapien
acatggctttactatcaccagctta

SEQ ID NO: 4189563 - DNA, 25 bp, Homo sapien
gacttcaatgtccttaaagctcata

SEQ ID NO: 4189564 - DNA, 25 bp, Homo sapien
tccaggaatcttaatgacttcaatg

SEQ ID NO: 4189565 - DNA, 25 bp, Homo sapien
tgtccttaaagctcataacatggct

SEQ ID NO: 4189566 - DNA, 25 bp, Homo sapien
cttccttgctgcacattgggacaca

SEQ ID NO: 4189567 - DNA, 25 bp, Homo sapien
ccttcttaggtgactgggtaaccag

SEQ ID NO: 4189568 - DNA, 25 bp, Homo sapien
aggacacccttcttaggtgactggg

SEQ ID NO: 4189569 - DNA, 25 bp, Homo sapien
gctgcacattgggacacagcaaggc

SEQ ID NO: 4189570 - DNA, 25 bp, Homo sapien
gttctgggcaagatcctgtgggcat

SEQ ID NO: 4189571 - DNA, 25 bp, Homo sapien
agctgttctgggcaagatcctgtgg

SEQ ID NO: 4189572 - DNA, 25 bp, Homo sapien
ctgttctgggcaagatcctgtgggc

SEQ ID NO: 4189573 - DNA, 25 bp, Homo sapien
ccagctgttctgggcaagatcctgt

SEQ ID NO: 4189574 - DNA, 25 bp, Homo sapien
gctggcaaatcttgtcctcgtgggc

SEQ ID NO: 4189575 - DNA, 25 bp, Homo sapien
tcccttgttgctggcaaatcttgtc

SEQ ID NO: 4189576 - DNA, 25 bp, Homo sapien
tgaggatggccagaagatagaaatt

SEQ ID NO: 4189577 - DNA, 25 bp, Homo sapien
ctgaggatggccagaagatagaaat

SEQ ID NO: 4189578 - DNA, 25 bp, Homo sapien
gttgatgactaacttgactctctga

SEQ ID NO: 4189579 - DNA, 25 bp, Homo sapien
gcctgttgatgactaacttgactct

SEQ ID NO: 4189580 - DNA, 25 bp, Homo sapien
aaccagcctgttgatgactaacttg

SEQ ID NO: 4189581 - DNA, 25 bp, Homo sapien
ccagcctgttgatgactaacttgac

SEQ ID NO: 4189582 - DNA, 25 bp, Homo sapien
cagcaaccgaatcaactttattgta

SEQ ID NO: 4189583 - DNA, 25 bp, Homo sapien
ctccttgagtgtctcggtgagggaa

SEQ ID NO: 4189584 - DNA, 25 bp, Homo sapien
tatggagaatgtgtgaactgaagga

SEQ ID NO: 4189585 - DNA, 25 bp, Homo sapien
tgacaattgaatgatcagcaaccga

SEQ ID NO: 4189586 - DNA, 25 bp, Homo sapien
actatgccactgcctgaactgtccc

SEQ ID NO: 4189587 - DNA, 25 bp, Homo sapien
aactatgccactgcctgaactgtcc

SEQ ID NO: 4189588 - DNA, 25 bp, Homo sapien
gctacctaggctggaaattccactc

SEQ ID NO: 4189589 - DNA, 25 bp, Homo sapien
tcatatatctccctcaacaaggcct

SEQ ID NO: 4189590 - DNA, 25 bp, Homo sapien
tccaatattccatgagctcaagagc

SEQ ID NO: 4189591 - DNA, 25 bp, Homo sapien
tgaagtggtgcaatccgaaggacat

SEQ ID NO: 4189592 - DNA, 25 bp, Homo sapien
agggtttagtcttgagggcgggcat

SEQ ID NO: 4189593 - DNA, 25 bp, Homo sapien
gagggtttagtcttgagggcgggca

SEQ ID NO: 4189594 - DNA, 25 bp, Homo sapien
attggccgagggtttagtcttgagg

SEQ ID NO: 4189595 - DNA, 25 bp, Homo sapien
tggccgagggtttagtcttgagggc

SEQ ID NO: 4189596 - DNA, 25 bp, Homo sapien
tcggcctcctcgacccggatgggtg

SEQ ID NO: 4189597 - DNA, 25 bp, Homo sapien
aaggcacgcgcgagccagaggttct

SEQ ID NO: 4189598 - DNA, 25 bp, Homo sapien
ttctggcgagagtgctcggctagca

SEQ ID NO: 4189599 - DNA, 25 bp, Homo sapien
tgcgacggcggagcaggattccgct

SEQ ID NO: 4189600 - DNA, 25 bp, Homo sapien
ccgcgctggcggtcccgccgtcacc

SEQ ID NO: 4189601 - DNA, 25 bp, Homo sapien
gctccactgcttccgccggcgctgc

SEQ ID NO: 4189602 - DNA, 25 bp, Homo sapien
ccgccgcacccgcggctccactgct

SEQ ID NO: 4189603 - DNA, 25 bp, Homo sapien
cgcgctggcggtcccgccgtcaccc

SEQ ID NO: 4189604 - DNA, 25 bp, Homo sapien
ggccttggctaacgccgagcgacgc

SEQ ID NO: 4189605 - DNA, 25 bp, Homo sapien
tgggaagggcggctccaccgcggat

SEQ ID NO: 4189606 - DNA, 25 bp, Homo sapien
ccgggccttggctaacgccgagcga

SEQ ID NO: 4189607 - DNA, 25 bp, Homo sapien
ggctccaccgcggatatcggaaggg

SEQ ID NO: 4189608 - DNA, 25 bp, Homo sapien
ctctgtgctgggcactgcggcccca

SEQ ID NO: 4189609 - DNA, 25 bp, Homo sapien
tgtgctgggcactgcggccccagac

SEQ ID NO: 4189610 - DNA, 25 bp, Homo sapien
tgctctgtgctgggcactgcggccc

SEQ ID NO: 4189611 - DNA, 25 bp, Homo sapien
tctgtgctgggcactgcggccccag

SEQ ID NO: 4189612 - DNA, 25 bp, Homo sapien
ttttgctccaattctttccattcat

SEQ ID NO: 4189613 - DNA, 25 bp, Homo sapien
aatcaacctctttttgctccaattc

SEQ ID NO: 4189614 - DNA, 25 bp, Homo sapien
gcctgaaccctgaggccgctgtaat

SEQ ID NO: 4189615 - DNA, 25 bp, Homo sapien
gcattgcctgaaccctgaggccgct

SEQ ID NO: 4189616 - DNA, 25 bp, Homo sapien
tatctcgtctacatttacagcaaga

SEQ ID NO: 4189617 - DNA, 25 bp, Homo sapien
aaaatatagccaagccatctctcag

SEQ ID NO: 4189618 - DNA, 25 bp, Homo sapien
gaattacctaccaaccagaagtgac

SEQ ID NO: 4189619 - DNA, 25 bp, Homo sapien
gagaatatggcaattcatccctaag

SEQ ID NO: 4189620 - DNA, 25 bp, Homo sapien
agttatcacctggatcttgtctctt

SEQ ID NO: 4189621 - DNA, 25 bp, Homo sapien
cctaccacaatcatgcacttagttg

SEQ ID NO: 4189622 - DNA, 25 bp, Homo sapien
tcccactctaccaggaatggaaagg

SEQ ID NO: 4189623 - DNA, 25 bp, Homo sapien
gaaagtggaccatatataaaatcat

SEQ ID NO: 4189624 - DNA, 25 bp, Homo sapien
ttaacaagatatatacacatcccac

SEQ ID NO: 4189625 - DNA, 25 bp, Homo sapien
tcagaaaatgtctgaaagtgaaaac

SEQ ID NO: 4189626 - DNA, 25 bp, Homo sapien
atgtctgaaagtgaaaacaggctgg

SEQ ID NO: 4189627 - DNA, 25 bp, Homo sapien
tttcagaaaatgtctgaaagtgaaa

SEQ ID NO: 4189628 - DNA, 25 bp, Homo sapien
aaatgtctgaaagtgaaaacaggct

SEQ ID NO: 4189629 - DNA, 25 bp, Homo sapien
tccggctttctacatgcttggcagt

SEQ ID NO: 4189630 - DNA, 25 bp, Homo sapien
ttccggctttctacatgcttggcag

SEQ ID NO: 4189631 - DNA, 25 bp, Homo sapien
tgggaatacaattaaacagcgcttt

SEQ ID NO: 4189632 - DNA, 25 bp, Homo sapien
caacataaaccagggctaagataaa

SEQ ID NO: 4189633 - DNA, 25 bp, Homo sapien
gacatatgaagtcccaccctgattc

SEQ ID NO: 4189634 - DNA, 25 bp, Homo sapien
catcttctgtctatagtcacattaa

SEQ ID NO: 4189635 - DNA, 25 bp, Homo sapien
tatgtagtcatttaattccaggtag

SEQ ID NO: 4189636 - DNA, 25 bp, Homo sapien
tgtagtcatttaattccaggtagca

SEQ ID NO: 4189637 - DNA, 25 bp, Homo sapien
ttcatgtccctaaagtaagatgtag

SEQ ID NO: 4189638 - DNA, 25 bp, Homo sapien
agatgtagatgtgccatatgtagtc

SEQ ID NO: 4189639 - DNA, 25 bp, Homo sapien
gctgtattgaagctctagggtccta

SEQ ID NO: 4189640 - DNA, 25 bp, Homo sapien
tccacgtggaggtttaaattcaagc

SEQ ID NO: 4189641 - DNA, 25 bp, Homo sapien
agacagagcagaggagcaagtccac

SEQ ID NO: 4189642 - DNA, 25 bp, Homo sapien
tagggtcctatcttctactgaacag

SEQ ID NO: 4189643 - DNA, 25 bp, Homo sapien
gtctagctgaagtttaagggcctgg

SEQ ID NO: 4189644 - DNA, 25 bp, Homo sapien
tggttgtctagctgaagtttaaggg

SEQ ID NO: 4189645 - DNA, 25 bp, Homo sapien
tgtctagctgaagtttaagggcctg

SEQ ID NO: 4189646 - DNA, 25 bp, Homo sapien
gttgtctagctgaagtttaagggcc

SEQ ID NO: 4189647 - DNA, 25 bp, Homo sapien
gctgcagtctagttacctcagaagg

SEQ ID NO: 4189648 - DNA, 25 bp, Homo sapien
agattttgaaatgaccactggctgc

SEQ ID NO: 4189649 - DNA, 25 bp, Homo sapien
tgaaatcgagtggtctgcatcggtg

SEQ ID NO: 4189650 - DNA, 25 bp, Homo sapien
taacttccatagtgcaatagggccg

SEQ ID NO: 4189651 - DNA, 25 bp, Homo sapien
caaatatattagaaggcaggcatcc

SEQ ID NO: 4189652 - DNA, 25 bp, Homo sapien
tatagcagcacctgaagtagagcct

SEQ ID NO: 4189653 - DNA, 25 bp, Homo sapien
gctggttgcaaggttcacatcgaca

SEQ ID NO: 4189654 - DNA, 25 bp, Homo sapien
gaaacccggactctgcatcaaatga

SEQ ID NO: 4189655 - DNA, 25 bp, Homo sapien
taatgttacctaatcattaatggtt

SEQ ID NO: 4189656 - DNA, 25 bp, Homo sapien
aagactaaacatcaatcacactgct

SEQ ID NO: 4189657 - DNA, 25 bp, Homo sapien
aagctcttcccttgattaatcaaaa

SEQ ID NO: 4189658 - DNA, 25 bp, Homo sapien
tagaaaagactaaacatcaatcaca

SEQ ID NO: 4189659 - DNA, 25 bp, Homo sapien
tttgcactctgaaacataatagcac

SEQ ID NO: 4189660 - DNA, 25 bp, Homo sapien
gcactgaaagccatattagttattg

SEQ ID NO: 4189661 - DNA, 25 bp, Homo sapien
caagagaaactattaggccacatgt

SEQ ID NO: 4189662 - DNA, 25 bp, Homo sapien
agtcaaagacaaacttctgtgtatt

SEQ ID NO: 4189663 - DNA, 25 bp, Homo sapien
ataacgatagaggagactcatgaag

SEQ ID NO: 4189664 - DNA, 25 bp, Homo sapien
tatttcagttatcatctctgaatcc

SEQ ID NO: 4189665 - DNA, 25 bp, Homo sapien
attataacgatagaggagactcatg

SEQ ID NO: 4189666 - DNA, 25 bp, Homo sapien
tctctgaatcctcaagaacgtattg

SEQ ID NO: 4189667 - DNA, 25 bp, Homo sapien
tcagctgtctgtgatcctggaaaca

SEQ ID NO: 4189668 - DNA, 25 bp, Homo sapien
aaacatacgtgtgactgaagctccc

SEQ ID NO: 4189669 - DNA, 25 bp, Homo sapien
aaaagacagccacctgatccctacg

SEQ ID NO: 4189670 - DNA, 25 bp, Homo sapien
tatttggatcctgtcacactgcagc

SEQ ID NO: 4189671 - DNA, 25 bp, Homo sapien
gtcacgtggaatcattacaatcgca

SEQ ID NO: 4189672 - DNA, 25 bp, Homo sapien
tattgctgttccaccgtagactctg

SEQ ID NO: 4189673 - DNA, 25 bp, Homo sapien
gcaagcctcccatgtaatcatagtg

SEQ ID NO: 4189674 - DNA, 25 bp, Homo sapien
ggacttctatttactgtcacgtgga

SEQ ID NO: 4189675 - DNA, 25 bp, Homo sapien
taagtacaaggatggctggacatag

SEQ ID NO: 4189676 - DNA, 25 bp, Homo sapien
gcctgtatagaagatcttattctct

SEQ ID NO: 4189677 - DNA, 25 bp, Homo sapien
tgggcatgatgatgcatacctcttc

SEQ ID NO: 4189678 - DNA, 25 bp, Homo sapien
tttgactcccactaattgcctgtat

SEQ ID NO: 4189679 - DNA, 25 bp, Homo sapien
taaacccttccttgtggctccatcg

SEQ ID NO: 4189680 - DNA, 25 bp, Homo sapien
cacgttcagatagagaccatggtca

SEQ ID NO: 4189681 - DNA, 25 bp, Homo sapien
tcattgagaagccactatacacgtt

SEQ ID NO: 4189682 - DNA, 25 bp, Homo sapien
catttccagtgtactgttgatgggc

SEQ ID NO: 4189683 - DNA, 25 bp, Homo sapien
taatatcctatgatcttgaggcact

SEQ ID NO: 4189684 - DNA, 25 bp, Homo sapien
atggacagcaaatgtagcaggagac

SEQ ID NO: 4189685 - DNA, 25 bp, Homo sapien
aacagtgtggttacgtgtagcagaa

SEQ ID NO: 4189686 - DNA, 25 bp, Homo sapien
tcattaaagttggagcagtatctca

SEQ ID NO: 4189687 - DNA, 25 bp, Homo sapien
aataacctgttatagccgggcgcgg

SEQ ID NO: 4189688 - DNA, 25 bp, Homo sapien
aactgtgtagcatactgtttaagag

SEQ ID NO: 4189689 - DNA, 25 bp, Homo sapien
actactttgtaataaactgtgtagc

SEQ ID NO: 4189690 - DNA, 25 bp, Homo sapien
tgtatttatactacacatagaaaat

SEQ ID NO: 4189691 - DNA, 25 bp, Homo sapien
ggctgcagaattgttggtcctcaag

SEQ ID NO: 4189692 - DNA, 25 bp, Homo sapien
agcgatgtgtcccaagagccgaaca

SEQ ID NO: 4189693 - DNA, 25 bp, Homo sapien
cagtggtcatcaactttggtaaaga

SEQ ID NO: 4189694 - DNA, 25 bp, Homo sapien
catattttgtatgcaccaccagcga

SEQ ID NO: 4189695 - DNA, 25 bp, Homo sapien
atttcttagaaatgccgttgacgaa

SEQ ID NO: 4189696 - DNA, 25 bp, Homo sapien
tagaaatgccgttgacgaattcacg

SEQ ID NO: 4189697 - DNA, 25 bp, Homo sapien
tgccgttgacgaattcacgggcaga

SEQ ID NO: 4189698 - DNA, 25 bp, Homo sapien
ttgacgaattcacgggcagagccag

SEQ ID NO: 4189699 - DNA, 25 bp, Homo sapien
aaagggcttagagccttcatagcag

SEQ ID NO: 4189700 - DNA, 25 bp, Homo sapien
cctcagtgtattcaattcgggttaa

SEQ ID NO: 4189701 - DNA, 25 bp, Homo sapien
gtgggtatccgcagggacagataca

SEQ ID NO: 4189702 - DNA, 25 bp, Homo sapien
tgaatgtccattggcctaaagggct

SEQ ID NO: 4189703 - DNA, 25 bp, Homo sapien
aggacgtggcttccgtgatcccaga

SEQ ID NO: 4189704 - DNA, 25 bp, Homo sapien
cctttgacgccgagaggacgtggct

SEQ ID NO: 4189705 - DNA, 25 bp, Homo sapien
ttttcctggagatgggaaccggagc

SEQ ID NO: 4189706 - DNA, 25 bp, Homo sapien
tagccttatgcagggccaagaccat

SEQ ID NO: 4189707 - DNA, 25 bp, Homo sapien
ggttcgcgatgccttctgtggcctt

SEQ ID NO: 4189708 - DNA, 25 bp, Homo sapien
tccgggttctccagcgtttgctttg

SEQ ID NO: 4189709 - DNA, 25 bp, Homo sapien
gctgcagctgccgatggcgtcactt

SEQ ID NO: 4189710 - DNA, 25 bp, Homo sapien
cccgaggctccaacgaggtaagtga

SEQ ID NO: 4189711 - DNA, 25 bp, Homo sapien
gaaccgacggcgctgggcctactcg

SEQ ID NO: 4189712 - DNA, 25 bp, Homo sapien
tgggcctactcgcagcggagactag

SEQ ID NO: 4189713 - DNA, 25 bp, Homo sapien
ctcttgaaccgacggcgctgggcct

SEQ ID NO: 4189714 - DNA, 25 bp, Homo sapien
ggagactaggcccgcccagcaaagc

SEQ ID NO: 4189715 - DNA, 25 bp, Homo sapien
agagaacggcgatgtccactgaagg

SEQ ID NO: 4189716 - DNA, 25 bp, Homo sapien
gttatcactaaggtttgcaggccca

SEQ ID NO: 4189717 - DNA, 25 bp, Homo sapien
tgctgtgttggagggaaaccaccca

SEQ ID NO: 4189718 - DNA, 25 bp, Homo sapien
aaaccacccagtccgtagtcagaag

SEQ ID NO: 4189719 - DNA, 25 bp, Homo sapien
tcaagctgctcattactatctttag

SEQ ID NO: 4189720 - DNA, 25 bp, Homo sapien
actcaagctgctcattactatcttt

SEQ ID NO: 4189721 - DNA, 25 bp, Homo sapien
agctgctcattactatctttaggct

SEQ ID NO: 4189722 - DNA, 25 bp, Homo sapien
aagctgctcattactatctttaggc

SEQ ID NO: 4189723 - DNA, 25 bp, Homo sapien
gaatctttgtcaccttccatcggtg

SEQ ID NO: 4189724 - DNA, 25 bp, Homo sapien
gacagattttattccggaccatcag

SEQ ID NO: 4189725 - DNA, 25 bp, Homo sapien
gatcagacatcaccttggatggtag

SEQ ID NO: 4189726 - DNA, 25 bp, Homo sapien
taggtatagcaaccatggcaatggg

SEQ ID NO: 4189727 - DNA, 25 bp, Homo sapien
ttcagtaaacatgctgccaaagtaa

SEQ ID NO: 4189728 - DNA, 25 bp, Homo sapien
ttttttttcagtaaacatgctgcca

SEQ ID NO: 4189729 - DNA, 25 bp, Homo sapien
catgatcatgactcaccacagcctt

SEQ ID NO: 4189730 - DNA, 25 bp, Homo sapien
caggttggtctcaaagtctggggct

SEQ ID NO: 4189731 - DNA, 25 bp, Homo sapien
atgcccgccaccacgttcagctcat

SEQ ID NO: 4189732 - DNA, 25 bp, Homo sapien
gacctcctaggctcaggtgatcctc

SEQ ID NO: 4189733 - DNA, 25 bp, Homo sapien
catatctcatcaaaacctgggaggt

SEQ ID NO: 4189734 - DNA, 25 bp, Homo sapien
tatgtcatgacagcctcttaggaga

SEQ ID NO: 4189735 - DNA, 25 bp, Homo sapien
ccacatggtcgggttgtaatggaca

SEQ ID NO: 4189736 - DNA, 25 bp, Homo sapien
tgatggtgcctacctagcttgggtg

SEQ ID NO: 4189737 - DNA, 25 bp, Homo sapien
cacagcagggcgcagatagcgagcc

SEQ ID NO: 4189738 - DNA, 25 bp, Homo sapien
agggccccggcgcacagcagggcgc

SEQ ID NO: 4189739 - DNA, 25 bp, Homo sapien
gcagggcgcagatagcgagcctcat

SEQ ID NO: 4189740 - DNA, 25 bp, Homo sapien
acagcagggcgcagatagcgagcct

SEQ ID NO: 4189741 - DNA, 25 bp, Homo sapien
cattggaagctgcaataattagtgt

SEQ ID NO: 4189742 - DNA, 25 bp, Homo sapien
attaaaatcagtgactttagttcac

SEQ ID NO: 4189743 - DNA, 25 bp, Homo sapien
tgactttagttcactggcattggaa

SEQ ID NO: 4189744 - DNA, 25 bp, Homo sapien
ttagttcactggcattggaagctgc

SEQ ID NO: 4189745 - DNA, 25 bp, Homo sapien
aaacggtcagctgagaagggtacac

SEQ ID NO: 4189746 - DNA, 25 bp, Homo sapien
gaagggtacacacaaattccatagg

SEQ ID NO: 4189747 - DNA, 25 bp, Homo sapien
gctgagaagggtacacacaaattcc

SEQ ID NO: 4189748 - DNA, 25 bp, Homo sapien
gcctggctcacatgaattctctggc

SEQ ID NO: 4189749 - DNA, 25 bp, Homo sapien
catcttccagttttctcaggagcag

SEQ ID NO: 4189750 - DNA, 25 bp, Homo sapien
cttccagttttctcaggagcagcca

SEQ ID NO: 4189751 - DNA, 25 bp, Homo sapien
ccagttttctcaggagcagccaggc

SEQ ID NO: 4189752 - DNA, 25 bp, Homo sapien
agttttctcaggagcagccaggcac

SEQ ID NO: 4189753 - DNA, 25 bp, Homo sapien
gaaactggtgcacttcgtggcctcg

SEQ ID NO: 4189754 - DNA, 25 bp, Homo sapien
cacttcgtggcctcgtgatctgaca

SEQ ID NO: 4189755 - DNA, 25 bp, Homo sapien
ttcatattgtctcggaaactggtgc

SEQ ID NO: 4189756 - DNA, 25 bp, Homo sapien
ggcctcgtgatctgacatggcacac

SEQ ID NO: 4189757 - DNA, 25 bp, Homo sapien
gctttaatgtactcaagggaagacg

SEQ ID NO: 4189758 - DNA, 25 bp, Homo sapien
tactcaagggaagacgctctctcca

SEQ ID NO: 4189759 - DNA, 25 bp, Homo sapien
tgtgatggctttaatgtactcaagg

SEQ ID NO: 4189760 - DNA, 25 bp, Homo sapien
ttaatgtactcaagggaagacgctc

SEQ ID NO: 4189761 - DNA, 25 bp, Homo sapien
cactgtgttttaggcagcagtgact

SEQ ID NO: 4189762 - DNA, 25 bp, Homo sapien
gtttctttctcctctaaagcatggt

SEQ ID NO: 4189763 - DNA, 25 bp, Homo sapien
cattttcagatctttggcttgtttc

SEQ ID NO: 4189764 - DNA, 25 bp, Homo sapien
ctttctcctctaaagcatggtctgg

SEQ ID NO: 4189765 - DNA, 25 bp, Homo sapien
tctcctctaaagcatggtctggttc

SEQ ID NO: 4189766 - DNA, 25 bp, Homo sapien
gcctgcctcaaacactaaacctcca

SEQ ID NO: 4189767 - DNA, 25 bp, Homo sapien
ttctaccacgatgggcttaaggctg

SEQ ID NO: 4189768 - DNA, 25 bp, Homo sapien
ccatcaatggtcacagcatctgctt

SEQ ID NO: 4189769 - DNA, 25 bp, Homo sapien
catcttttgacccatagatttctac

SEQ ID NO: 4189770 - DNA, 25 bp, Homo sapien
gacaccagtccccagggagaacaca

SEQ ID NO: 4189771 - DNA, 25 bp, Homo sapien
acaccagtccccagggagaacacac

SEQ ID NO: 4189772 - DNA, 25 bp, Homo sapien
gagacaccagtccccagggagaaca

SEQ ID NO: 4189773 - DNA, 25 bp, Homo sapien
cagagacaccagtccccagggagaa

SEQ ID NO: 4189774 - DNA, 25 bp, Homo sapien
tggaaaagttgggacagcttgtcga

SEQ ID NO: 4189775 - DNA, 25 bp, Homo sapien
gtaggaggtgggctaccagccactg

SEQ ID NO: 4189776 - DNA, 25 bp, Homo sapien
aaaagttgggacagcttgtcgagga

SEQ ID NO: 4189777 - DNA, 25 bp, Homo sapien
gaggtgggctaccagccactgcaca

SEQ ID NO: 4189778 - DNA, 25 bp, Homo sapien
tccctgcgggtttaggcatcacact

SEQ ID NO: 4189779 - DNA, 25 bp, Homo sapien
taattcacccacacggaggctggaa

SEQ ID NO: 4189780 - DNA, 25 bp, Homo sapien
agacttcagtcccagtggcacgcag

SEQ ID NO: 4189781 - DNA, 25 bp, Homo sapien
tgtgagagccactgacctacactga

SEQ ID NO: 4189782 - DNA, 25 bp, Homo sapien
gcacacagttgacacaggcgaggga

SEQ ID NO: 4189783 - DNA, 25 bp, Homo sapien
caggcgagggaaattcttcatgtcc

SEQ ID NO: 4189784 - DNA, 25 bp, Homo sapien
taaggctcccgcgtagccaaagtac

SEQ ID NO: 4189785 - DNA, 25 bp, Homo sapien
caaagtacgattcttgggaggagca

SEQ ID NO: 4189786 - DNA, 25 bp, Homo sapien
tcagcccggactgctggctaacagg

SEQ ID NO: 4189787 - DNA, 25 bp, Homo sapien
ctcacagaggtgacggctttgtctg

SEQ ID NO: 4189788 - DNA, 25 bp, Homo sapien
gctttgtctgaagggcctttgaacc

SEQ ID NO: 4189789 - DNA, 25 bp, Homo sapien
cagagttcctgagtatcagtctttc

SEQ ID NO: 4189790 - DNA, 25 bp, Homo sapien
tgttgttcaggcaaagcagctcata

SEQ ID NO: 4189791 - DNA, 25 bp, Homo sapien
tccttgtcagccttgtttgccaggt

SEQ ID NO: 4189792 - DNA, 25 bp, Homo sapien
agcagctcatactggtccttgtcag

SEQ ID NO: 4189793 - DNA, 25 bp, Homo sapien
cagcttctgggtgttgttcaggcaa

SEQ ID NO: 4189794 - DNA, 25 bp, Homo sapien
aatggcagtccttgtatccaactac

SEQ ID NO: 4189795 - DNA, 25 bp, Homo sapien
aaatggcagtccttgtatccaacta

SEQ ID NO: 4189796 - DNA, 25 bp, Homo sapien
tcaggccatgacagtatgagaaagg

SEQ ID NO: 4189797 - DNA, 25 bp, Homo sapien
caggccatgacagtatgagaaagga

SEQ ID NO: 4189798 - DNA, 25 bp, Homo sapien
aggccatgacagtatgagaaaggac

SEQ ID NO: 4189799 - DNA, 25 bp, Homo sapien
gcatctatcttaggtgggaccatta

SEQ ID NO: 4189800 - DNA, 25 bp, Homo sapien
aacccatgggcagcatcagtaaaca

SEQ ID NO: 4189801 - DNA, 25 bp, Homo sapien
tggatcctgagtcgcggaaaaatac

SEQ ID NO: 4189802 - DNA, 25 bp, Homo sapien
tgtctcatgaggagagccaaagagc

SEQ ID NO: 4189803 - DNA, 25 bp, Homo sapien
gcaccaccagtcacagcactccact

SEQ ID NO: 4189804 - DNA, 25 bp, Homo sapien
cacttggccctctcatggtggccca

SEQ ID NO: 4189805 - DNA, 25 bp, Homo sapien
accaccagtcacagcactccactca

SEQ ID NO: 4189806 - DNA, 25 bp, Homo sapien
accagtcacagcactccactcatca

SEQ ID NO: 4189807 - DNA, 25 bp, Homo sapien
tgaccctcagaggttctcatttcac

SEQ ID NO: 4189808 - DNA, 25 bp, Homo sapien
ccttgtgattaaccaattgtggatc

SEQ ID NO: 4189809 - DNA, 25 bp, Homo sapien
caatagcacaatagctgtctcctgg

SEQ ID NO: 4189810 - DNA, 25 bp, Homo sapien
tcactggcttcatgtaaacatcctt

SEQ ID NO: 4189811 - DNA, 25 bp, Homo sapien
agatgaatcctgcatccaagctcat

SEQ ID NO: 4189812 - DNA, 25 bp, Homo sapien
tgtagatgaatcctgcatccaagct

SEQ ID NO: 4189813 - DNA, 25 bp, Homo sapien
tatgtagatgaatcctgcatccaag

SEQ ID NO: 4189814 - DNA, 25 bp, Homo sapien
tgctatgtagatgaatcctgcatcc

SEQ ID NO: 4189815 - DNA, 25 bp, Homo sapien
aatagttattatctcaacactaaac

SEQ ID NO: 4189816 - DNA, 25 bp, Homo sapien
tattatctcaacactaaactaagtt

SEQ ID NO: 4189817 - DNA, 25 bp, Homo sapien
aaatggagacggacactcccctcca

SEQ ID NO: 4189818 - DNA, 25 bp, Homo sapien
aacaatagttattatctcaacacta

SEQ ID NO: 4189819 - DNA, 25 bp, Homo sapien
tacctcacagagtcgttttgttttg

SEQ ID NO: 4189820 - DNA, 25 bp, Homo sapien
catgtggatggatccccactaaaga

SEQ ID NO: 4189821 - DNA, 25 bp, Homo sapien
aatcaatgatattagggaaaccctc

SEQ ID NO: 4189822 - DNA, 25 bp, Homo sapien
ggagataccactatttacctcacag

SEQ ID NO: 4189823 - DNA, 25 bp, Homo sapien
aattcacacacttagacctaaactg

SEQ ID NO: 4189824 - DNA, 25 bp, Homo sapien
taaattcacacacttagacctaaac

SEQ ID NO: 4189825 - DNA, 25 bp, Homo sapien
attcacacacttagacctaaactgc

SEQ ID NO: 4189826 - DNA, 25 bp, Homo sapien
aaattcacacacttagacctaaact

SEQ ID NO: 4189827 - DNA, 25 bp, Homo sapien
agccagtattactgattctaactca

SEQ ID NO: 4189828 - DNA, 25 bp, Homo sapien
gccagtattactgattctaactcac

SEQ ID NO: 4189829 - DNA, 25 bp, Homo sapien
ttgagccagtattactgattctaac

SEQ ID NO: 4189830 - DNA, 25 bp, Homo sapien
ctttgagccagtattactgattcta

SEQ ID NO: 4189831 - DNA, 25 bp, Homo sapien
gtacagcatatccccgggctggggt

SEQ ID NO: 4189832 - DNA, 25 bp, Homo sapien
aggtacagcatatccccgggctggg

SEQ ID NO: 4189833 - DNA, 25 bp, Homo sapien
atgaggtacagcatatccccgggct

SEQ ID NO: 4189834 - DNA, 25 bp, Homo sapien
tgaggtacagcatatccccgggctg

SEQ ID NO: 4189835 - DNA, 25 bp, Homo sapien
gttccaggtgacatcagcatctgat

SEQ ID NO: 4189836 - DNA, 25 bp, Homo sapien
tgatttcttaaccacagccatgaca

SEQ ID NO: 4189837 - DNA, 25 bp, Homo sapien
gagttccaggtgacatcagcatctg

SEQ ID NO: 4189838 - DNA, 25 bp, Homo sapien
agcatctgatttcttaaccacagcc

SEQ ID NO: 4189839 - DNA, 25 bp, Homo sapien
taagcccatatgtgggcaggattgc

SEQ ID NO: 4189840 - DNA, 25 bp, Homo sapien
ggaatccggattagacccaggggca

SEQ ID NO: 4189841 - DNA, 25 bp, Homo sapien
tgttgtaagcccatatgtgggcagg

SEQ ID NO: 4189842 - DNA, 25 bp, Homo sapien
gcacaactgcgactgaagaaatcat

SEQ ID NO: 4189843 - DNA, 25 bp, Homo sapien
agatctgaatttggaaataatcttc

SEQ ID NO: 4189844 - DNA, 25 bp, Homo sapien
tctgaatttggaaataatcttcaca

SEQ ID NO: 4189845 - DNA, 25 bp, Homo sapien
ctagatctgaatttggaaataatct

SEQ ID NO: 4189846 - DNA, 25 bp, Homo sapien
gatctgaatttggaaataatcttca

SEQ ID NO: 4189847 - DNA, 25 bp, Homo sapien
taaggcatgtgtgcatctcgtgaag

SEQ ID NO: 4189848 - DNA, 25 bp, Homo sapien
aaatgtcgttttgcttatgcggcct

SEQ ID NO: 4189849 - DNA, 25 bp, Homo sapien
tctgtacatccgtttaactgggcac

SEQ ID NO: 4189850 - DNA, 25 bp, Homo sapien
tatcaagcctagtggacacgtcagg

SEQ ID NO: 4189851 - DNA, 25 bp, Homo sapien
gggacatgaagcacaatgcagccat

SEQ ID NO: 4189852 - DNA, 25 bp, Homo sapien
agccattgtcatcgcggctcgctcg

SEQ ID NO: 4189853 - DNA, 25 bp, Homo sapien
tgcagagctggtccgtgccaccagt

SEQ ID NO: 4189854 - DNA, 25 bp, Homo sapien
acccgcgagtggaaggagtccagca

SEQ ID NO: 4189855 - DNA, 25 bp, Homo sapien
gggctgggcgcaatctttgacctcc

SEQ ID NO: 4189856 - DNA, 25 bp, Homo sapien
ttgacctcccgtgtttgtgcagccg

SEQ ID NO: 4189857 - DNA, 25 bp, Homo sapien
ctttattccattcccggcctgggcg

SEQ ID NO: 4189858 - DNA, 25 bp, Homo sapien
cagtcggactcgcttctgtgcagcc

SEQ ID NO: 4189859 - DNA, 25 bp, Homo sapien
caggacggcgcagaccagcagggct

SEQ ID NO: 4189860 - DNA, 25 bp, Homo sapien
ccaggacggcgcagaccagcagggc

SEQ ID NO: 4189861 - DNA, 25 bp, Homo sapien
aggacggcgcagaccagcagggctc

SEQ ID NO: 4189862 - DNA, 25 bp, Homo sapien
ggacggcgcagaccagcagggctcc

SEQ ID NO: 4189863 - DNA, 25 bp, Homo sapien
gaggcaatggaaaggcacccagaca

SEQ ID NO: 4189864 - DNA, 25 bp, Homo sapien
gataacctggttagacgtgctctga

SEQ ID NO: 4189865 - DNA, 25 bp, Homo sapien
tgcagtgaaaggtgtctagaagccc

SEQ ID NO: 4189866 - DNA, 25 bp, Homo sapien
ttccagcctgagcgcggagtgcatg

SEQ ID NO: 4189867 - DNA, 25 bp, Homo sapien
gttgctctctgtttaggaagaacta

SEQ ID NO: 4189868 - DNA, 25 bp, Homo sapien
gccagccatgggtaactattaaaat

SEQ ID NO: 4189869 - DNA, 25 bp, Homo sapien
ccttcttggccagtagttgagggta

SEQ ID NO: 4189870 - DNA, 25 bp, Homo sapien
gactctgggtctgctactcagggca

SEQ ID NO: 4189871 - DNA, 25 bp, Homo sapien
gtggcctcatgctccgacactgcac

SEQ ID NO: 4189872 - DNA, 25 bp, Homo sapien
tctggcacttagtggcctcatgctc

SEQ ID NO: 4189873 - DNA, 25 bp, Homo sapien
ctctggcacttagtggcctcatgct

SEQ ID NO: 4189874 - DNA, 25 bp, Homo sapien
ctcatgctccgacactgcacaccat

SEQ ID NO: 4189875 - DNA, 25 bp, Homo sapien
gcaacactgggaccatcggatggaa

SEQ ID NO: 4189876 - DNA, 25 bp, Homo sapien
atcaaggtaggaggctttcttcaca

SEQ ID NO: 4189877 - DNA, 25 bp, Homo sapien
ccatcggatggaatgacgcttttca

SEQ ID NO: 4189878 - DNA, 25 bp, Homo sapien
cgcaatggccctgatgcaatcaagg

SEQ ID NO: 4189879 - DNA, 25 bp, Homo sapien
cagttctctatgaagatttcttatt

SEQ ID NO: 4189880 - DNA, 25 bp, Homo sapien
aagcccttgccagttctctatgaag

SEQ ID NO: 4189881 - DNA, 25 bp, Homo sapien
tgggagccaggtaagcatcatacac

SEQ ID NO: 4189882 - DNA, 25 bp, Homo sapien
aggtaagcatcatacaccaaacctg

SEQ ID NO: 4189883 - DNA, 25 bp, Homo sapien
aaacctgcatccagtgtcacagcat

SEQ ID NO: 4189884 - DNA, 25 bp, Homo sapien
agtgtcacagcatccgcttcgtttg

SEQ ID NO: 4189885 - DNA, 25 bp, Homo sapien
tttgacccatagaactctgccacca

SEQ ID NO: 4189886 - DNA, 25 bp, Homo sapien
ttttgacccatagaactctgccacc

SEQ ID NO: 4189887 - DNA, 25 bp, Homo sapien
cctcttttgacccatagaactctgc

SEQ ID NO: 4189888 - DNA, 25 bp, Homo sapien
tcttttgacccatagaactctgcca

SEQ ID NO: 4189889 - DNA, 25 bp, Homo sapien
cccagagacagtcaggttgatctca

SEQ ID NO: 4189890 - DNA, 25 bp, Homo sapien
agtgtgtgctccagagtgacccctc

SEQ ID NO: 4189891 - DNA, 25 bp, Homo sapien
gagtggtacctatggctccagaggc

SEQ ID NO: 4189892 - DNA, 25 bp, Homo sapien
actggagctgtggtaacagaggccc

SEQ ID NO: 4189893 - DNA, 25 bp, Homo sapien
caggaaaaccttcctagggttgcag

SEQ ID NO: 4189894 - DNA, 25 bp, Homo sapien
ataatattacccctccaggcaaaca

SEQ ID NO: 4189895 - DNA, 25 bp, Homo sapien
gcaagaaggccacacgcacatgtgt

SEQ ID NO: 4189896 - DNA, 25 bp, Homo sapien
gagaagaccatagaaggaatattta

SEQ ID NO: 4189897 - DNA, 25 bp, Homo sapien
gcacagtgtgaatggaaggccctca

SEQ ID NO: 4189898 - DNA, 25 bp, Homo sapien
gtgtgaatggaaggccctcagcctg

SEQ ID NO: 4189899 - DNA, 25 bp, Homo sapien
aaggcacagtgtgaatggaaggccc

SEQ ID NO: 4189900 - DNA, 25 bp, Homo sapien
ctgcaaaggcacagtgtgaatggaa

SEQ ID NO: 4189901 - DNA, 25 bp, Homo sapien
agcggacctgcctagacccgtgtgg

SEQ ID NO: 4189902 - DNA, 25 bp, Homo sapien
caggtaagtcacagtaaagtaagcc

SEQ ID NO: 4189903 - DNA, 25 bp, Homo sapien
tctcaagaggtttacgtggctcagg

SEQ ID NO: 4189904 - DNA, 25 bp, Homo sapien
ttgcctcgaagctggttcatctgga

SEQ ID NO: 4189905 - DNA, 25 bp, Homo sapien
ggctcccgagtagccgaagtattgg

SEQ ID NO: 4189906 - DNA, 25 bp, Homo sapien
ccgagtagccgaagtattggttaag

SEQ ID NO: 4189907 - DNA, 25 bp, Homo sapien
gaagtccgtcccatccgcacaaggg

SEQ ID NO: 4189908 - DNA, 25 bp, Homo sapien
cacagctgggggaagtccgtcccat

SEQ ID NO: 4189909 - DNA, 25 bp, Homo sapien
cactcacactaggatagagcctggt

SEQ ID NO: 4189910 - DNA, 25 bp, Homo sapien
agagcctggtgcagccccgtagctg

SEQ ID NO: 4189911 - DNA, 25 bp, Homo sapien
tgtccagcactcacactaggataga

SEQ ID NO: 4189912 - DNA, 25 bp, Homo sapien
agccccgtagctgaagcaacaccat

SEQ ID NO: 4189913 - DNA, 25 bp, Homo sapien
tatagtcgagtgcttgacaaaggcc

SEQ ID NO: 4189914 - DNA, 25 bp, Homo sapien
gtcgagtgcttgacaaaggccacat

SEQ ID NO: 4189915 - DNA, 25 bp, Homo sapien
caaatatagtcgagtgcttgacaaa

SEQ ID NO: 4189916 - DNA, 25 bp, Homo sapien
tagtcgagtgcttgacaaaggccac

SEQ ID NO: 4189917 - DNA, 25 bp, Homo sapien
ttgtattcatctaccggcttccggg

SEQ ID NO: 4189918 - DNA, 25 bp, Homo sapien
ggcttccgggtgttgtccaggcaaa

SEQ ID NO: 4189919 - DNA, 25 bp, Homo sapien
gaagctcccagatcaagtcctcctt

SEQ ID NO: 4189920 - DNA, 25 bp, Homo sapien
tacttcgggccacgacggtatgaga

SEQ ID NO: 4189921 - DNA, 25 bp, Homo sapien
caagaaacgtggctaatccagaggc

SEQ ID NO: 4189922 - DNA, 25 bp, Homo sapien
tgtagccctcgtgggtccgcgattt

SEQ ID NO: 4189923 - DNA, 25 bp, Homo sapien
ctcccggaacgggttgagacatcgg

SEQ ID NO: 4189924 - DNA, 25 bp, Homo sapien
gagacatcggtgagaacaagaaacg

SEQ ID NO: 4189925 - DNA, 25 bp, Homo sapien
gcagtgacatactcatagcccaggt

SEQ ID NO: 4189926 - DNA, 25 bp, Homo sapien
tagcccaggtacatcttggcatcca

SEQ ID NO: 4189927 - DNA, 25 bp, Homo sapien
gcagagtccttaaacagcaggtcct

SEQ ID NO: 4189928 - DNA, 25 bp, Homo sapien
tgtgccttcccgtagattccggatg

SEQ ID NO: 4189929 - DNA, 25 bp, Homo sapien
tcaccaggtttcccaagtgcttgtg

SEQ ID NO: 4189930 - DNA, 25 bp, Homo sapien
ccaggtttcccaagtgcttgtggtc

SEQ ID NO: 4189931 - DNA, 25 bp, Homo sapien
caccaggtttcccaagtgcttgtgg

SEQ ID NO: 4189932 - DNA, 25 bp, Homo sapien
caggtttcccaagtgcttgtggtca

SEQ ID NO: 4189933 - DNA, 25 bp, Homo sapien
taaatgtggatttcctgtaaagccc

SEQ ID NO: 4189934 - DNA, 25 bp, Homo sapien
ggactgggatcaacctctcttagag

SEQ ID NO: 4189935 - DNA, 25 bp, Homo sapien
taaggcagtcctgattgatgcaaag

SEQ ID NO: 4189936 - DNA, 25 bp, Homo sapien
catgttgactggctggagatgtgca

SEQ ID NO: 4189937 - DNA, 25 bp, Homo sapien
ggtctctgctgatacacactctatt

SEQ ID NO: 4189938 - DNA, 25 bp, Homo sapien
taacactccactcatcacacttgag

SEQ ID NO: 4189939 - DNA, 25 bp, Homo sapien
tgatcttggcgatgcagtcttcggt

SEQ ID NO: 4189940 - DNA, 25 bp, Homo sapien
tcgtggtggctcagcgcacaccact

SEQ ID NO: 4189941 - DNA, 25 bp, Homo sapien
tatctcagtgatcgtggcacaccac

SEQ ID NO: 4189942 - DNA, 25 bp, Homo sapien
catgccaggctaggatactcttttg

SEQ ID NO: 4189943 - DNA, 25 bp, Homo sapien
gacaaggtcctgctaagttgctagc

SEQ ID NO: 4189944 - DNA, 25 bp, Homo sapien
gattggatcctaccatgtactcagg

SEQ ID NO: 4189945 - DNA, 25 bp, Homo sapien
cttcactttctactgcagccatgat

SEQ ID NO: 4189946 - DNA, 25 bp, Homo sapien
actttctactgcagccatgatgtcc

SEQ ID NO: 4189947 - DNA, 25 bp, Homo sapien
cagccatgatgtccatgataacaac

SEQ ID NO: 4189948 - DNA, 25 bp, Homo sapien
tcactttctactgcagccatgatgt

SEQ ID NO: 4189949 - DNA, 25 bp, Homo sapien
tgcaataaccgagggcactggtcac

SEQ ID NO: 4189950 - DNA, 25 bp, Homo sapien
ctgcaataaccgagggcactggtca

SEQ ID NO: 4189951 - DNA, 25 bp, Homo sapien
taaccgagggcactggtcactttgg

SEQ ID NO: 4189952 - DNA, 25 bp, Homo sapien
caataaccgagggcactggtcactt

SEQ ID NO: 4189953 - DNA, 25 bp, Homo sapien
tctatgcgagatgatgactcccttt

SEQ ID NO: 4189954 - DNA, 25 bp, Homo sapien
ttttaaagactgatccactgaagtc

SEQ ID NO: 4189955 - DNA, 25 bp, Homo sapien
tcccagtaataccagtaatgatgtt

SEQ ID NO: 4189956 - DNA, 25 bp, Homo sapien
gaagctcaaagcttaattctagaac

SEQ ID NO: 4189957 - DNA, 25 bp, Homo sapien
ccacagtgggcagcccattttttac

SEQ ID NO: 4189958 - DNA, 25 bp, Homo sapien
gcatgccacagtgggcagcccattt

SEQ ID NO: 4189959 - DNA, 25 bp, Homo sapien
acagctgcatgccacagtgggcagc

SEQ ID NO: 4189960 - DNA, 25 bp, Homo sapien
ctgcatgccacagtgggcagcccat

SEQ ID NO: 4189961 - DNA, 25 bp, Homo sapien
acaaggtcctttttatgatcgatca

SEQ ID NO: 4189962 - DNA, 25 bp, Homo sapien
tactgggagattcttcagagttggc

SEQ ID NO: 4189963 - DNA, 25 bp, Homo sapien
tcatctattactgggagattcttca

SEQ ID NO: 4189964 - DNA, 25 bp, Homo sapien
gagttggctctactttcccaaggga

SEQ ID NO: 4189965 - DNA, 25 bp, Homo sapien
caggattcatgggtcagggctcaaa

SEQ ID NO: 4189966 - DNA, 25 bp, Homo sapien
gggactactgcacctcatcttctgt

SEQ ID NO: 4189967 - DNA, 25 bp, Homo sapien
ttcacaactgttagagagctactct

SEQ ID NO: 4189968 - DNA, 25 bp, Homo sapien
taacccaagaaagcgaaacctcaca

SEQ ID NO: 4189969 - DNA, 25 bp, Homo sapien
tgccaaaagagaaaaatcatttctt

SEQ ID NO: 4189970 - DNA, 25 bp, Homo sapien
ctgatgccaaaagagaaaaatcatt

SEQ ID NO: 4189971 - DNA, 25 bp, Homo sapien
tagcaaactgatgccaaaagagaaa

SEQ ID NO: 4189972 - DNA, 25 bp, Homo sapien
gatgccaaaagagaaaaatcatttc

SEQ ID NO: 4189973 - DNA, 25 bp, Homo sapien
cacacttgcccgctatgtagacaaa

SEQ ID NO: 4189974 - DNA, 25 bp, Homo sapien
gaccacacttgcccgctatgtagac

SEQ ID NO: 4189975 - DNA, 25 bp, Homo sapien
cacttgcccgctatgtagacaaacc

SEQ ID NO: 4189976 - DNA, 25 bp, Homo sapien
ttgcccgctatgtagacaaaccctc

SEQ ID NO: 4189977 - DNA, 25 bp, Homo sapien
tctggtgtatcctcacaattatcgc

SEQ ID NO: 4189978 - DNA, 25 bp, Homo sapien
gcctctggtgtatcctcacaattat

SEQ ID NO: 4189979 - DNA, 25 bp, Homo sapien
ggtgtatcctcacaattatcgctct

SEQ ID NO: 4189980 - DNA, 25 bp, Homo sapien
ctgcctctggtgtatcctcacaatt

SEQ ID NO: 4189981 - DNA, 25 bp, Homo sapien
aaggatgtattaacacctctggggc

SEQ ID NO: 4189982 - DNA, 25 bp, Homo sapien
aaaaggatgtattaacacctctggg

SEQ ID NO: 4189983 - DNA, 25 bp, Homo sapien
tggggcttccagagtgtctgcttcc

SEQ ID NO: 4189984 - DNA, 25 bp, Homo sapien
agaaaaggatgtattaacacctctg

SEQ ID NO: 4189985 - DNA, 25 bp, Homo sapien
caactgccgtatggcaggacttctt

SEQ ID NO: 4189986 - DNA, 25 bp, Homo sapien
gaggtcagaagctgatttcttcacc

SEQ ID NO: 4189987 - DNA, 25 bp, Homo sapien
caaatctgcagtggttgatcttatt

SEQ ID NO: 4189988 - DNA, 25 bp, Homo sapien
tggggatgttccagccagcggttct

SEQ ID NO: 4189989 - DNA, 25 bp, Homo sapien
gccgtagtatccctctttgttgttg

SEQ ID NO: 4189990 - DNA, 25 bp, Homo sapien
gggttcacacaggtttaggcctgag

SEQ ID NO: 4189991 - DNA, 25 bp, Homo sapien
catacacagcttacagagactggag

SEQ ID NO: 4189992 - DNA, 25 bp, Homo sapien
tgaaagcgcctgtgtagccgtagta

SEQ ID NO: 4189993 - DNA, 25 bp, Homo sapien
taacagaaggcctaaagcagaatgg

SEQ ID NO: 4189994 - DNA, 25 bp, Homo sapien
catcattgtgcagttcatggattca

SEQ ID NO: 4189995 - DNA, 25 bp, Homo sapien
taaggtagggccagacgtggcccac

SEQ ID NO: 4189996 - DNA, 25 bp, Homo sapien
ggattcatgaaccaccaaataacag

SEQ ID NO: 4189997 - DNA, 25 bp, Homo sapien
tctgagctacaagtccccaagaagt

SEQ ID NO: 4189998 - DNA, 25 bp, Homo sapien
ttcaaaatctacacaaggccctcct

SEQ ID NO: 4189999 - DNA, 25 bp, Homo sapien
gatgaactagtgtgtacttcaaaat

SEQ ID NO: 4190000 - DNA, 25 bp, Homo sapien
tttgaaagggcataccacacagatg

SEQ ID NO: 4190001 - DNA, 25 bp, Homo sapien
cacatctcccttctcaaccagacac

SEQ ID NO: 4190002 - DNA, 25 bp, Homo sapien
ccccagtgttctgtgggacagtctg

SEQ ID NO: 4190003 - DNA, 25 bp, Homo sapien
tgggacagtctggtgtttcacaaag

SEQ ID NO: 4190004 - DNA, 25 bp, Homo sapien
gtgtttcacaaaggccacatctccc

SEQ ID NO: 4190005 - DNA, 25 bp, Homo sapien
caaagagccaagcttagggtaacac

SEQ ID NO: 4190006 - DNA, 25 bp, Homo sapien
tgaggacatccatatacacacgtaa

SEQ ID NO: 4190007 - DNA, 25 bp, Homo sapien
gacaccttgggaaatagactggaat

SEQ ID NO: 4190008 - DNA, 25 bp, Homo sapien
ctatcttaattctatgcaggaggga

SEQ ID NO: 4190009 - DNA, 25 bp, Homo sapien
tgtgtgagctcaaaccagggctttg

SEQ ID NO: 4190010 - DNA, 25 bp, Homo sapien
ccatctcaggcagtagggtatgtga

SEQ ID NO: 4190011 - DNA, 25 bp, Homo sapien
caaatgggaggtgattcagtctggc

SEQ ID NO: 4190012 - DNA, 25 bp, Homo sapien
tataaaatgccacgtaagtattggg

SEQ ID NO: 4190013 - DNA, 25 bp, Homo sapien
taattgtgcttacatagaagtggaa

SEQ ID NO: 4190014 - DNA, 25 bp, Homo sapien
catttgcgagtttccatccacggct

SEQ ID NO: 4190015 - DNA, 25 bp, Homo sapien
gccactaaagtagcgttaaaatgag

SEQ ID NO: 4190016 - DNA, 25 bp, Homo sapien
tgtcagtacatacaaatcaagctcg

SEQ ID NO: 4190017 - DNA, 25 bp, Homo sapien
tctcccataattcagaattgcaacc

SEQ ID NO: 4190018 - DNA, 25 bp, Homo sapien
taactaatacatgagatcacactca

SEQ ID NO: 4190019 - DNA, 25 bp, Homo sapien
tctctcccataattcagaattgcaa

SEQ ID NO: 4190020 - DNA, 25 bp, Homo sapien
tctttaaccgaataactaatacatg

SEQ ID NO: 4190021 - DNA, 25 bp, Homo sapien
tgtgtgatacaggtctgtatcccat

SEQ ID NO: 4190022 - DNA, 25 bp, Homo sapien
tgatacaggtctgtatcccatctcg

SEQ ID NO: 4190023 - DNA, 25 bp, Homo sapien
tgtgatacaggtctgtatcccatct

SEQ ID NO: 4190024 - DNA, 25 bp, Homo sapien
tacaggtctgtatcccatctcggcc

SEQ ID NO: 4190025 - DNA, 25 bp, Homo sapien
caaggtgatgccagactcacagtga

SEQ ID NO: 4190026 - DNA, 25 bp, Homo sapien
tggctttggtcaaggtgccccgctg

SEQ ID NO: 4190027 - DNA, 25 bp, Homo sapien
ggaagaatgtgacgctctaagccag

SEQ ID NO: 4190028 - DNA, 25 bp, Homo sapien
caggaagagacacccatgtggtcta

SEQ ID NO: 4190029 - DNA, 25 bp, Homo sapien
gcacagcaactcatagtctttttca

SEQ ID NO: 4190030 - DNA, 25 bp, Homo sapien
gccaggtggcagttcgcatactcct

SEQ ID NO: 4190031 - DNA, 25 bp, Homo sapien
catcaaggcacagcaactcatagtc

SEQ ID NO: 4190032 - DNA, 25 bp, Homo sapien
tactcctccacaggtttcctggtac

SEQ ID NO: 4190033 - DNA, 25 bp, Homo sapien
tctttccgtgtgaccacagcgtgat

SEQ ID NO: 4190034 - DNA, 25 bp, Homo sapien
ccgtgtgaccacagcgtgattcggg

SEQ ID NO: 4190035 - DNA, 25 bp, Homo sapien
gcaagcttccttatctttccgtgtg

SEQ ID NO: 4190036 - DNA, 25 bp, Homo sapien
ccttatctttccgtgtgaccacagc

SEQ ID NO: 4190037 - DNA, 25 bp, Homo sapien
ctgctgttgacgtaatatcttgtgg

SEQ ID NO: 4190038 - DNA, 25 bp, Homo sapien
gctgttgacgtaatatcttgtggac

SEQ ID NO: 4190039 - DNA, 25 bp, Homo sapien
tgctgttgacgtaatatcttgtgga

SEQ ID NO: 4190040 - DNA, 25 bp, Homo sapien
atttatccacttagggccccagctg

SEQ ID NO: 4190041 - DNA, 25 bp, Homo sapien
gaagctacggagtatgtcttgggaa

SEQ ID NO: 4190042 - DNA, 25 bp, Homo sapien
ctgtcaagtgaacagaaagtccgtg

SEQ ID NO: 4190043 - DNA, 25 bp, Homo sapien
aaagtccgtgaggaccttgtggtct

SEQ ID NO: 4190044 - DNA, 25 bp, Homo sapien
taccaacagccttgacatattcttc

SEQ ID NO: 4190045 - DNA, 25 bp, Homo sapien
tgtttctgtcatgaagtttggccaa

SEQ ID NO: 4190046 - DNA, 25 bp, Homo sapien
gagcagtcagttacgttgcttccaa

SEQ ID NO: 4190047 - DNA, 25 bp, Homo sapien
gaacaaacaaaagttgcccgagcag

SEQ ID NO: 4190048 - DNA, 25 bp, Homo sapien
tgtccatgttgtcctatcccaaggg

SEQ ID NO: 4190049 - DNA, 25 bp, Homo sapien
tcctgtggaaagactaactgcccta

SEQ ID NO: 4190050 - DNA, 25 bp, Homo sapien
gaactgacatagcaaaaagcacctg

SEQ ID NO: 4190051 - DNA, 25 bp, Homo sapien
catgccgggcttagattgttcactc

SEQ ID NO: 4190052 - DNA, 25 bp, Homo sapien
ttaaggtctacggaaagtgcaggct

SEQ ID NO: 4190053 - DNA, 25 bp, Homo sapien
taaggtctacggaaagtgcaggctt

SEQ ID NO: 4190054 - DNA, 25 bp, Homo sapien
aaggtctacggaaagtgcaggcttc

SEQ ID NO: 4190055 - DNA, 25 bp, Homo sapien
ggtctacggaaagtgcaggcttcca

SEQ ID NO: 4190056 - DNA, 25 bp, Homo sapien
gaagacagacgtggttagcacaaac

SEQ ID NO: 4190057 - DNA, 25 bp, Homo sapien
ccagggcaaactcatggatcatctg

SEQ ID NO: 4190058 - DNA, 25 bp, Homo sapien
catggatcatctgcgttcccatctt

SEQ ID NO: 4190059 - DNA, 25 bp, Homo sapien
cacttgggccagtgaaaccagggca

SEQ ID NO: 4190060 - DNA, 25 bp, Homo sapien
tatttaggcagaatgcataaagaaa

SEQ ID NO: 4190061 - DNA, 25 bp, Homo sapien
ctgtagggaaagaccagacgaatct

SEQ ID NO: 4190062 - DNA, 25 bp, Homo sapien
ggctcagttgcataggtatttaggc

SEQ ID NO: 4190063 - DNA, 25 bp, Homo sapien
cagacgaatcttgagctgagaagga

SEQ ID NO: 4190064 - DNA, 25 bp, Homo sapien
atcacgcagacccttttagaaaaga

SEQ ID NO: 4190065 - DNA, 25 bp, Homo sapien
attatattttaatgatcacgcagac

SEQ ID NO: 4190066 - DNA, 25 bp, Homo sapien
taatgatcacgcagacccttttaga

SEQ ID NO: 4190067 - DNA, 25 bp, Homo sapien
tattttaatgatcacgcagaccctt

SEQ ID NO: 4190068 - DNA, 25 bp, Homo sapien
tatttttattattttccagacagag

SEQ ID NO: 4190069 - DNA, 25 bp, Homo sapien
ccaccacgccctgcctattattatt

SEQ ID NO: 4190070 - DNA, 25 bp, Homo sapien
ttttattattttccagacagagtct

SEQ ID NO: 4190071 - DNA, 25 bp, Homo sapien
caccacgccctgcctattattatta

SEQ ID NO: 4190072 - DNA, 25 bp, Homo sapien
gatctctaggcttgttcatcatgca

SEQ ID NO: 4190073 - DNA, 25 bp, Homo sapien
tgtggtccttatgttgtacattaga

SEQ ID NO: 4190074 - DNA, 25 bp, Homo sapien
ttactacagtgaaggaggaatccca

SEQ ID NO: 4190075 - DNA, 25 bp, Homo sapien
gaatttattacctatactgtggtcc

SEQ ID NO: 4190076 - DNA, 25 bp, Homo sapien
gaggaaaagtggttcgccgctgctt

SEQ ID NO: 4190077 - DNA, 25 bp, Homo sapien
ctgcttcaagaaatgggcccggtgg

SEQ ID NO: 4190078 - DNA, 25 bp, Homo sapien
ggcggctcagcagaagcttcgtctg

SEQ ID NO: 4190079 - DNA, 25 bp, Homo sapien
agcagaagcttcgtctgagcctggc

SEQ ID NO: 4190080 - DNA, 25 bp, Homo sapien
ctttgtcggttgtcctcgggactag

SEQ ID NO: 4190081 - DNA, 25 bp, Homo sapien
cttctgggcccattaaggactttgt

SEQ ID NO: 4190082 - DNA, 25 bp, Homo sapien
tcctcgggactaggtgggtgtcgtc

SEQ ID NO: 4190083 - DNA, 25 bp, Homo sapien
acttgggacattgcggccacccgaa

SEQ ID NO: 4190084 - DNA, 25 bp, Homo sapien
tcataggatatacacgggccttcta

SEQ ID NO: 4190085 - DNA, 25 bp, Homo sapien
tttccgatgggcctaatggcgcaag

SEQ ID NO: 4190086 - DNA, 25 bp, Homo sapien
gtgggcctttccgatgggcctaatg

SEQ ID NO: 4190087 - DNA, 25 bp, Homo sapien
taatggcgcaagttattcttacact

SEQ ID NO: 4190088 - DNA, 25 bp, Homo sapien
catagagctcttacacttcctttcc

SEQ ID NO: 4190089 - DNA, 25 bp, Homo sapien
gcatagagctcttacacttcctttc

SEQ ID NO: 4190090 - DNA, 25 bp, Homo sapien
atagagctcttacacttcctttcct

SEQ ID NO: 4190091 - DNA, 25 bp, Homo sapien
ctttggcaatttcttccctcccatt

SEQ ID NO: 4190092 - DNA, 25 bp, Homo sapien
caacctggtggatatgggcccatgt

SEQ ID NO: 4190093 - DNA, 25 bp, Homo sapien
ggcccatgtgtcacttagggttgat

SEQ ID NO: 4190094 - DNA, 25 bp, Homo sapien
ccaaaagtcgttttcagaagatagt

SEQ ID NO: 4190095 - DNA, 25 bp, Homo sapien
taggaatattctgatctagaatcct

SEQ ID NO: 4190096 - DNA, 25 bp, Homo sapien
tattagttgtggagtctaggaccca

SEQ ID NO: 4190097 - DNA, 25 bp, Homo sapien
aaaaaggacctaaagctggctgcaa

SEQ ID NO: 4190098 - DNA, 25 bp, Homo sapien
gaagtacacttaaggtctgactcca

SEQ ID NO: 4190099 - DNA, 25 bp, Homo sapien
tttaaatggcctatcaggtgactgg

SEQ ID NO: 4190100 - DNA, 25 bp, Homo sapien
tgatgaacagtcagcatcaagttta

SEQ ID NO: 4190101 - DNA, 25 bp, Homo sapien
atgaacagtcagcatcaagtttaaa

SEQ ID NO: 4190102 - DNA, 25 bp, Homo sapien
gatgaacagtcagcatcaagtttaa

SEQ ID NO: 4190103 - DNA, 25 bp, Homo sapien
gggcccagaacccttctccctgcat

SEQ ID NO: 4190104 - DNA, 25 bp, Homo sapien
gcccagaacccttctccctgcatac

SEQ ID NO: 4190105 - DNA, 25 bp, Homo sapien
ggcccagaacccttctccctgcata

SEQ ID NO: 4190106 - DNA, 25 bp, Homo sapien
gatcagtcccctatatccatcagtc

SEQ ID NO: 4190107 - DNA, 25 bp, Homo sapien
tacaagtaggatcagtcccctatat

SEQ ID NO: 4190108 - DNA, 25 bp, Homo sapien
tatatccatcagtcacacttagtcc

SEQ ID NO: 4190109 - DNA, 25 bp, Homo sapien
tatccatcagtcacacttagtccac

SEQ ID NO: 4190110 - DNA, 25 bp, Homo sapien
ctccgtgggcacgaatgcagaggaa

SEQ ID NO: 4190111 - DNA, 25 bp, Homo sapien
aggacatgcgatactgactgctgcc

SEQ ID NO: 4190112 - DNA, 25 bp, Homo sapien
cagaggaaggacatgcgatactgac

SEQ ID NO: 4190113 - DNA, 25 bp, Homo sapien
gagctccgtgggcacgaatgcagag

SEQ ID NO: 4190114 - DNA, 25 bp, Homo sapien
gacagagagaccagctgagagcatt

SEQ ID NO: 4190115 - DNA, 25 bp, Homo sapien
gtttggcctagtgatcaacagatgc

SEQ ID NO: 4190116 - DNA, 25 bp, Homo sapien
gcaatatgatttaggcacaccctca

SEQ ID NO: 4190117 - DNA, 25 bp, Homo sapien
tagaaaggttggcaggaatcagacc

SEQ ID NO: 4190118 - DNA, 25 bp, Homo sapien
cacgcgaatggtggttcctaagcca

SEQ ID NO: 4190119 - DNA, 25 bp, Homo sapien
gcgaatggtggttcctaagccatag

SEQ ID NO: 4190120 - DNA, 25 bp, Homo sapien
gcctcacgcgaatggtggttcctaa

SEQ ID NO: 4190121 - DNA, 25 bp, Homo sapien
agcagagcctcacgcgaatggtggt

SEQ ID NO: 4190122 - DNA, 25 bp, Homo sapien
agcaaaagcgacgtggccctgcact

SEQ ID NO: 4190123 - DNA, 25 bp, Homo sapien
cccggtacagcaaaagcgacgtggc

SEQ ID NO: 4190124 - DNA, 25 bp, Homo sapien
gatgagacgcgtggtccccggtaca

SEQ ID NO: 4190125 - DNA, 25 bp, Homo sapien
gcgtggtccccggtacagcaaaagc

SEQ ID NO: 4190126 - DNA, 25 bp, Homo sapien
tcctgccgcaaggtgtctaggtagg

SEQ ID NO: 4190127 - DNA, 25 bp, Homo sapien
ctagcgtcagcagcaccgcaagaac

SEQ ID NO: 4190128 - DNA, 25 bp, Homo sapien
gccaccactactgacaacagcgttg

SEQ ID NO: 4190129 - DNA, 25 bp, Homo sapien
agcgttgggtccgtctgctgcagct

SEQ ID NO: 4190130 - DNA, 25 bp, Homo sapien
ccgccatgaccaccggccgcctttt

SEQ ID NO: 4190131 - DNA, 25 bp, Homo sapien
ggtgcagccaaagcccggacctctg

SEQ ID NO: 4190132 - DNA, 25 bp, Homo sapien
ggcctgcagcggtgcagccaaagcc

SEQ ID NO: 4190133 - DNA, 25 bp, Homo sapien
tcctgatgccctcaaggcgccctct

SEQ ID NO: 4190134 - DNA, 25 bp, Homo sapien
agagcaacgttttcccggaatcaca

SEQ ID NO: 4190135 - DNA, 25 bp, Homo sapien
ctgctccggattaacttccagaaga

SEQ ID NO: 4190136 - DNA, 25 bp, Homo sapien
ccttctgctccggattaacttccag

SEQ ID NO: 4190137 - DNA, 25 bp, Homo sapien
gagcaacgttttcccggaatcacaa

SEQ ID NO: 4190138 - DNA, 25 bp, Homo sapien
agtgtctctataaaggcctgttaac

SEQ ID NO: 4190139 - DNA, 25 bp, Homo sapien
aatggacgtctgagtgtctctataa

SEQ ID NO: 4190140 - DNA, 25 bp, Homo sapien
gctgtcagtaatggacgtctgagtg

SEQ ID NO: 4190141 - DNA, 25 bp, Homo sapien
acagcacagctgtcagtaatggacg

SEQ ID NO: 4190142 - DNA, 25 bp, Homo sapien
gacacggttcctgatctggcaaaat

SEQ ID NO: 4190143 - DNA, 25 bp, Homo sapien
aagactcttagatgtggcctggtac

SEQ ID NO: 4190144 - DNA, 25 bp, Homo sapien
gagcccctactgagcaaatctacga

SEQ ID NO: 4190145 - DNA, 25 bp, Homo sapien
tcctgaatataaggtcaaggcctgg

SEQ ID NO: 4190146 - DNA, 25 bp, Homo sapien
tggctgaagacttaaaccgctctaa

SEQ ID NO: 4190147 - DNA, 25 bp, Homo sapien
ccgctctaagaactgaagcctcaaa

SEQ ID NO: 4190148 - DNA, 25 bp, Homo sapien
gcctcaaactctcatggccgggaag

SEQ ID NO: 4190149 - DNA, 25 bp, Homo sapien
ggtcaatcaaggtcagactattgcc

SEQ ID NO: 4190150 - DNA, 25 bp, Homo sapien
ggaatgctgcactatccacaacaaa

SEQ ID NO: 4190151 - DNA, 25 bp, Homo sapien
catctttcacctctcgctggaatgc

SEQ ID NO: 4190152 - DNA, 25 bp, Homo sapien
gacttgatacagaaactcagccaca

SEQ ID NO: 4190153 - DNA, 25 bp, Homo sapien
gacccatactgtcaatgaggacttg

SEQ ID NO: 4190154 - DNA, 25 bp, Homo sapien
agctgctgttgaattaactttgctg

SEQ ID NO: 4190155 - DNA, 25 bp, Homo sapien
tccagctgctgttgaattaactttg

SEQ ID NO: 4190156 - DNA, 25 bp, Homo sapien
gctgttgaattaactttgctgattt

SEQ ID NO: 4190157 - DNA, 25 bp, Homo sapien
tttgctgattttgccattgcaatat

SEQ ID NO: 4190158 - DNA, 25 bp, Homo sapien
caatgcccgaagctgactagattct

SEQ ID NO: 4190159 - DNA, 25 bp, Homo sapien
tctaagctcctgagtacaggaacac

SEQ ID NO: 4190160 - DNA, 25 bp, Homo sapien
tccactagatgcactacaggtgctt

SEQ ID NO: 4190161 - DNA, 25 bp, Homo sapien
caggcaggagtttgccaatgcccga

SEQ ID NO: 4190162 - DNA, 25 bp, Homo sapien
taagcaacactcatttgtcggcctc

SEQ ID NO: 4190163 - DNA, 25 bp, Homo sapien
tcagacctcacagggctagaaggca

SEQ ID NO: 4190164 - DNA, 25 bp, Homo sapien
taagaggatctactgaatgaagccg

SEQ ID NO: 4190165 - DNA, 25 bp, Homo sapien
cacctgctggccctaataaagggtg

SEQ ID NO: 4190166 - DNA, 25 bp, Homo sapien
gtcagcagagcccacgtcccctctt

SEQ ID NO: 4190167 - DNA, 25 bp, Homo sapien
gggcaactgtgagaattcaaactct

SEQ ID NO: 4190168 - DNA, 25 bp, Homo sapien
gaactccactttgaggggcaactgt

SEQ ID NO: 4190169 - DNA, 25 bp, Homo sapien
cagcagaacgggtaactcgtaaggt

SEQ ID NO: 4190170 - DNA, 25 bp, Homo sapien
ccaggtcttgtgctttagagctgcc

SEQ ID NO: 4190171 - DNA, 25 bp, Homo sapien
ctttttccaaaactgtgtgtcacac

SEQ ID NO: 4190172 - DNA, 25 bp, Homo sapien
tccaaaactgtgtgtcacacatcca

SEQ ID NO: 4190173 - DNA, 25 bp, Homo sapien
aggtcttgtgctttagagctgcctc

SEQ ID NO: 4190174 - DNA, 25 bp, Homo sapien
tgaggtgacgtatactcctagagcc

SEQ ID NO: 4190175 - DNA, 25 bp, Homo sapien
cataggcggatttgtttccagggac

SEQ ID NO: 4190176 - DNA, 25 bp, Homo sapien
tacattgtcttcgtgctccagcagc

SEQ ID NO: 4190177 - DNA, 25 bp, Homo sapien
cacagcattctagccaggagtacaa

SEQ ID NO: 4190178 - DNA, 25 bp, Homo sapien
caaaaccttgggatctcaatgtgca

SEQ ID NO: 4190179 - DNA, 25 bp, Homo sapien
tatgggctcagaagacatagccgcc

SEQ ID NO: 4190180 - DNA, 25 bp, Homo sapien
cagcctgcatctcgcggtgtgtgtc

SEQ ID NO: 4190181 - DNA, 25 bp, Homo sapien
tccatagcattgaaggccagcctgc

SEQ ID NO: 4190182 - DNA, 25 bp, Homo sapien
ggcagccagacctctttttcagaag

SEQ ID NO: 4190183 - DNA, 25 bp, Homo sapien
caaagactagacgtgacctggcaga

SEQ ID NO: 4190184 - DNA, 25 bp, Homo sapien
ttttgtcttgagcaggcaccatccc

SEQ ID NO: 4190185 - DNA, 25 bp, Homo sapien
tccagatgggttagcagagggcaaa

SEQ ID NO: 4190186 - DNA, 25 bp, Homo sapien
catggccagagtgggtcgtcaacct

SEQ ID NO: 4190187 - DNA, 25 bp, Homo sapien
agctctgactcttgtctttccatgg

SEQ ID NO: 4190188 - DNA, 25 bp, Homo sapien
caaacattggttgaacacatcagcc

SEQ ID NO: 4190189 - DNA, 25 bp, Homo sapien
tgagaccaaggtctgtgggctctag

SEQ ID NO: 4190190 - DNA, 25 bp, Homo sapien
tgaccataggaattgacagaggctc

SEQ ID NO: 4190191 - DNA, 25 bp, Homo sapien
gccagtggacttggtgaaactgacc

SEQ ID NO: 4190192 - DNA, 25 bp, Homo sapien
tctactggatcggtttgaattcaag

SEQ ID NO: 4190193 - DNA, 25 bp, Homo sapien
tgggccagggctttgtagcaccaag

SEQ ID NO: 4190194 - DNA, 25 bp, Homo sapien
ttttgcagtcgggaagacgtctctg

SEQ ID NO: 4190195 - DNA, 25 bp, Homo sapien
gacagcttcgacaacacataccagg

SEQ ID NO: 4190196 - DNA, 25 bp, Homo sapien
gattacgaggttcatgtacgacagc

SEQ ID NO: 4190197 - DNA, 25 bp, Homo sapien
caaatgcagtgtgtttagaagagcc

SEQ ID NO: 4190198 - DNA, 25 bp, Homo sapien
ctggcaggaacagccctcagcccac

SEQ ID NO: 4190199 - DNA, 25 bp, Homo sapien
ttatagatggttcttgcatcagctg

SEQ ID NO: 4190200 - DNA, 25 bp, Homo sapien
cagctgggttctcctgggtcaagga

SEQ ID NO: 4190201 - DNA, 25 bp, Homo sapien
tagtggaaatccatggggcagtggg

SEQ ID NO: 4190202 - DNA, 25 bp, Homo sapien
cagtgggatacctcctccttggcag

SEQ ID NO: 4190203 - DNA, 25 bp, Homo sapien
tggctttttgggaccctgctttctc

SEQ ID NO: 4190204 - DNA, 25 bp, Homo sapien
tgtgagcaagtgctaatccactgcc

SEQ ID NO: 4190205 - DNA, 25 bp, Homo sapien
ttagaaggtgttgcagggatttcca

SEQ ID NO: 4190206 - DNA, 25 bp, Homo sapien
ggagaggcaccttggcattagaagg

SEQ ID NO: 4190207 - DNA, 25 bp, Homo sapien
ggtagaagcacagcggtgtgacctt

SEQ ID NO: 4190208 - DNA, 25 bp, Homo sapien
tctttgctgcagtggtgtccgagag

SEQ ID NO: 4190209 - DNA, 25 bp, Homo sapien
tgtccgagagctgcggtagaagcac

SEQ ID NO: 4190210 - DNA, 25 bp, Homo sapien
aggacagctcccgcagaaactccgg

SEQ ID NO: 4190211 - DNA, 25 bp, Homo sapien
ccttgggcgagaatccatgctcctc

SEQ ID NO: 4190212 - DNA, 25 bp, Homo sapien
ctgcccttgggcgagaatccatgct

SEQ ID NO: 4190213 - DNA, 25 bp, Homo sapien
gcccttgggcgagaatccatgctcc

SEQ ID NO: 4190214 - DNA, 25 bp, Homo sapien
cccactgcccttgggcgagaatcca

SEQ ID NO: 4190215 - DNA, 25 bp, Homo sapien
atccagtgcaccctgcattggtggg

SEQ ID NO: 4190216 - DNA, 25 bp, Homo sapien
cagtggtagctgattgtgaagggcc

SEQ ID NO: 4190217 - DNA, 25 bp, Homo sapien
gaatggcccctgttggtgaggtcca

SEQ ID NO: 4190218 - DNA, 25 bp, Homo sapien
tccagggtacatgggaccaagctcc

SEQ ID NO: 4190219 - DNA, 25 bp, Homo sapien
gtacctcacagtcaggccaggaatg

SEQ ID NO: 4190220 - DNA, 25 bp, Homo sapien
ctttgaggaagaatagggctggact

SEQ ID NO: 4190221 - DNA, 25 bp, Homo sapien
gatatagctggtgtctctaactgtt

SEQ ID NO: 4190222 - DNA, 25 bp, Homo sapien
gaaacaaggttcagatggatatagc

SEQ ID NO: 4190223 - DNA, 25 bp, Homo sapien
ctttttctgctcttgtccatgtact

SEQ ID NO: 4190224 - DNA, 25 bp, Homo sapien
ctgtagtgggcaggcttactgggcc

SEQ ID NO: 4190225 - DNA, 25 bp, Homo sapien
gatgcactcgccctgttccttcttg

SEQ ID NO: 4190226 - DNA, 25 bp, Homo sapien
cgtggatgggatcctttaggatgca

SEQ ID NO: 4190227 - DNA, 25 bp, Homo sapien
ttgcctctttgtgttaaaggtggag

SEQ ID NO: 4190228 - DNA, 25 bp, Homo sapien
tgcctctttgtgttaaaggtggagc

SEQ ID NO: 4190229 - DNA, 25 bp, Homo sapien
atttgcctctttgtgttaaaggtgg

SEQ ID NO: 4190230 - DNA, 25 bp, Homo sapien
gcctctttgtgttaaaggtggagcc

SEQ ID NO: 4190231 - DNA, 25 bp, Homo sapien
tggcaccagcgtttcttagggtaag

SEQ ID NO: 4190232 - DNA, 25 bp, Homo sapien
tacaagtactccttgtgcacagtag

SEQ ID NO: 4190233 - DNA, 25 bp, Homo sapien
cacacgagtgcgttcggttctcctc

SEQ ID NO: 4190234 - DNA, 25 bp, Homo sapien
gcatgccggatagtactgcctctcc

SEQ ID NO: 4190235 - DNA, 25 bp, Homo sapien
tgttgatggagaccgcagggcttcc

SEQ ID NO: 4190236 - DNA, 25 bp, Homo sapien
ggacagcttcctgtgttgatggaga

SEQ ID NO: 4190237 - DNA, 25 bp, Homo sapien
ctgtgtgagggtgtatggaaggaca

SEQ ID NO: 4190238 - DNA, 25 bp, Homo sapien
tagcaggtcagcactatggctgcca

SEQ ID NO: 4190239 - DNA, 25 bp, Homo sapien
gatcccagtttcatagagctgacca

SEQ ID NO: 4190240 - DNA, 25 bp, Homo sapien
tggcccctggtaggttctcagcaaa

SEQ ID NO: 4190241 - DNA, 25 bp, Homo sapien
ctctggtgagtttgagggaacatct

SEQ ID NO: 4190242 - DNA, 25 bp, Homo sapien
cagaatccctgatgaacggaggccc

SEQ ID NO: 4190243 - DNA, 25 bp, Homo sapien
gggctgcacaatccagggtagagca

SEQ ID NO: 4190244 - DNA, 25 bp, Homo sapien
tctgccttggtctgcggcagtcatg

SEQ ID NO: 4190245 - DNA, 25 bp, Homo sapien
cagggtagagcaaatgcacacatcc

SEQ ID NO: 4190246 - DNA, 25 bp, Homo sapien
gccagggtgcctggatagctccggg

SEQ ID NO: 4190247 - DNA, 25 bp, Homo sapien
cagactcaggtacccgggcaagccg

SEQ ID NO: 4190248 - DNA, 25 bp, Homo sapien
gagataggcttgcatgtcggaaaga

SEQ ID NO: 4190249 - DNA, 25 bp, Homo sapien
ggcctggccccgagataggcttgca

SEQ ID NO: 4190250 - DNA, 25 bp, Homo sapien
ggggcaggtacccatcccgtcacag

SEQ ID NO: 4190251 - DNA, 25 bp, Homo sapien
catctgggaaccattattcagccac

SEQ ID NO: 4190252 - DNA, 25 bp, Homo sapien
ggaaccattattcagccactgcagg

SEQ ID NO: 4190253 - DNA, 25 bp, Homo sapien
tgcagggggctaggtagcctctgct

SEQ ID NO: 4190254 - DNA, 25 bp, Homo sapien
tgggaaccattattcagccactgca

SEQ ID NO: 4190255 - DNA, 25 bp, Homo sapien
ggtggtggccgctgctctatcccct

SEQ ID NO: 4190256 - DNA, 25 bp, Homo sapien
aggtggtggccgctgctctatcccc

SEQ ID NO: 4190257 - DNA, 25 bp, Homo sapien
gggaaccacccactctgcgccctct

SEQ ID NO: 4190258 - DNA, 25 bp, Homo sapien
ctctgcgccctctcagggagaggtg

SEQ ID NO: 4190259 - DNA, 25 bp, Homo sapien
gcaaggccgaggcagtctgcagagg

SEQ ID NO: 4190260 - DNA, 25 bp, Homo sapien
gggatgatgcccaggcaaggccgag

SEQ ID NO: 4190261 - DNA, 25 bp, Homo sapien
gatgatgcccaggcaaggccgaggc

SEQ ID NO: 4190262 - DNA, 25 bp, Homo sapien
ggatgatgcccaggcaaggccgagg

SEQ ID NO: 4190263 - DNA, 25 bp, Homo sapien
aagcaccaattgtgggtccctgaag

SEQ ID NO: 4190264 - DNA, 25 bp, Homo sapien
caatggaggaagcaccaattgtggg

SEQ ID NO: 4190265 - DNA, 25 bp, Homo sapien
ttcccaatggaggaagcaccaattg

SEQ ID NO: 4190266 - DNA, 25 bp, Homo sapien
tggaggaagcaccaattgtgggtcc

SEQ ID NO: 4190267 - DNA, 25 bp, Homo sapien
tagtgaacctaggtggacacagttg

SEQ ID NO: 4190268 - DNA, 25 bp, Homo sapien
ccgcaagagcggaacagaatattct

SEQ ID NO: 4190269 - DNA, 25 bp, Homo sapien
taaaaccctctactgtgggtagtga

SEQ ID NO: 4190270 - DNA, 25 bp, Homo sapien
tggttgagcactaaaaccctctact

SEQ ID NO: 4190271 - DNA, 25 bp, Homo sapien
gctttgtcccaaagtaacgctcttc

SEQ ID NO: 4190272 - DNA, 25 bp, Homo sapien
ctgtttggaacctgaggtacctcca

SEQ ID NO: 4190273 - DNA, 25 bp, Homo sapien
gaaagtcctggaagatcccgcactg

SEQ ID NO: 4190274 - DNA, 25 bp, Homo sapien
tcattataagctgccatgatggatg

SEQ ID NO: 4190275 - DNA, 25 bp, Homo sapien
caagaagccacagattggcatgaag

SEQ ID NO: 4190276 - DNA, 25 bp, Homo sapien
tgctcggtgggcagtgtgggactgg

SEQ ID NO: 4190277 - DNA, 25 bp, Homo sapien
ccctccatttacattagggccttct

SEQ ID NO: 4190278 - DNA, 25 bp, Homo sapien
tgacctgactatccatgccatccat

SEQ ID NO: 4190279 - DNA, 25 bp, Homo sapien
tattccgaggagtagagaggcagaa

SEQ ID NO: 4190280 - DNA, 25 bp, Homo sapien
ggcttcacatgcacttccctgtctg

SEQ ID NO: 4190281 - DNA, 25 bp, Homo sapien
ttccctgtctggacttcagcccgta

SEQ ID NO: 4190282 - DNA, 25 bp, Homo sapien
gagtggatgtccactgtcaccaagc

SEQ ID NO: 4190283 - DNA, 25 bp, Homo sapien
cccaaggatgggtcatctaagtgct

SEQ ID NO: 4190284 - DNA, 25 bp, Homo sapien
cacacctgggtttggcatcagcaca

SEQ ID NO: 4190285 - DNA, 25 bp, Homo sapien
ctaagggccactgtgtacccgggct

SEQ ID NO: 4190286 - DNA, 25 bp, Homo sapien
aagtgctgtccatatgaaccctgga

SEQ ID NO: 4190287 - DNA, 25 bp, Homo sapien
cacaaaccaggacctaagggggctg

SEQ ID NO: 4190288 - DNA, 25 bp, Homo sapien
gtgtgagcaggggactccatactcc

SEQ ID NO: 4190289 - DNA, 25 bp, Homo sapien
ccctctcatcgtcttgtgctggtga

SEQ ID NO: 4190290 - DNA, 25 bp, Homo sapien
ctgcagtgcggagaggtgtgagcag

SEQ ID NO: 4190291 - DNA, 25 bp, Homo sapien
aaaggaaagcgggcttctgttccag

SEQ ID NO: 4190292 - DNA, 25 bp, Homo sapien
aggatggcctccttgggagttagta

SEQ ID NO: 4190293 - DNA, 25 bp, Homo sapien
tggcctccttgggagttagtatcca

SEQ ID NO: 4190294 - DNA, 25 bp, Homo sapien
tccttgggagttagtatccagggta

SEQ ID NO: 4190295 - DNA, 25 bp, Homo sapien
ctgagtgacaggtctgcttgggggg

SEQ ID NO: 4190296 - DNA, 25 bp, Homo sapien
ctggcagactgtgtcttgggcccac

SEQ ID NO: 4190297 - DNA, 25 bp, Homo sapien
caggtctgcttggggggagggtcca

SEQ ID NO: 4190298 - DNA, 25 bp, Homo sapien
tctccaggaaggctggcagactgtg

SEQ ID NO: 4190299 - DNA, 25 bp, Homo sapien
tccagttcttcatcgggtctcattt

SEQ ID NO: 4190300 - DNA, 25 bp, Homo sapien
tgagaagcgctttgggctctccagt

SEQ ID NO: 4190301 - DNA, 25 bp, Homo sapien
caccattgagaagcgctttgggctc

SEQ ID NO: 4190302 - DNA, 25 bp, Homo sapien
tgtgcaccacgctgaccacaagatc

SEQ ID NO: 4190303 - DNA, 25 bp, Homo sapien
ggagatgcttgagaataggactcct

SEQ ID NO: 4190304 - DNA, 25 bp, Homo sapien
agagcctgttcggtgtcagcgcaac

SEQ ID NO: 4190305 - DNA, 25 bp, Homo sapien
cttccaggagatgcttgagaatagg

SEQ ID NO: 4190306 - DNA, 25 bp, Homo sapien
cggtgtcagcgcaacagctgagaac

SEQ ID NO: 4190307 - DNA, 25 bp, Homo sapien
gggcattgggccatggtttagattc

SEQ ID NO: 4190308 - DNA, 25 bp, Homo sapien
cttgaaagagtcattcccctttggg

SEQ ID NO: 4190309 - DNA, 25 bp, Homo sapien
tgggccatggtttagattcacagcc

SEQ ID NO: 4190310 - DNA, 25 bp, Homo sapien
tcttgaaagagtcattcccctttgg

SEQ ID NO: 4190311 - DNA, 25 bp, Homo sapien
caactttgtgggcagtaaaggctgg

SEQ ID NO: 4190312 - DNA, 25 bp, Homo sapien
tgtctagaaggactgacccctgcag

SEQ ID NO: 4190313 - DNA, 25 bp, Homo sapien
atggggttgtctagaaggactgacc

SEQ ID NO: 4190314 - DNA, 25 bp, Homo sapien
tagaaggactgacccctgcagtgcc

SEQ ID NO: 4190315 - DNA, 25 bp, Homo sapien
ggttgtctagaaggactgacccctg

SEQ ID NO: 4190316 - DNA, 25 bp, Homo sapien
gcaggggaagtgccgaggagagtca

SEQ ID NO: 4190317 - DNA, 25 bp, Homo sapien
aagtgccgaggagagtcagggatgg

SEQ ID NO: 4190318 - DNA, 25 bp, Homo sapien
ggtgcaggggaagtgccgaggagag

SEQ ID NO: 4190319 - DNA, 25 bp, Homo sapien
tgcaggggaagtgccgaggagagtc

SEQ ID NO: 4190320 - DNA, 25 bp, Homo sapien
cagccagggatactcccagggcaaa

SEQ ID NO: 4190321 - DNA, 25 bp, Homo sapien
cctggaggatcaacgtggatggtta

SEQ ID NO: 4190322 - DNA, 25 bp, Homo sapien
gccaccatagagaaagtcagctgag

SEQ ID NO: 4190323 - DNA, 25 bp, Homo sapien
taagttcactaacatgtgcttggcc

SEQ ID NO: 4190324 - DNA, 25 bp, Homo sapien
ccaatgagagtgcttgtaatagccc

SEQ ID NO: 4190325 - DNA, 25 bp, Homo sapien
tatcagcctgaaaccaggtacgagg

SEQ ID NO: 4190326 - DNA, 25 bp, Homo sapien
tccatactaattgcaagaccagagt

SEQ ID NO: 4190327 - DNA, 25 bp, Homo sapien
gatgggttgcacatatcttgggaca

SEQ ID NO: 4190328 - DNA, 25 bp, Homo sapien
taaggtctaagcaggtccactcacc

SEQ ID NO: 4190329 - DNA, 25 bp, Homo sapien
taggatgagagcacctttcccatgg

SEQ ID NO: 4190330 - DNA, 25 bp, Homo sapien
tcacagctctcacggttcagtaagg

SEQ ID NO: 4190331 - DNA, 25 bp, Homo sapien
tcagattggcttccctggtctggaa

SEQ ID NO: 4190332 - DNA, 25 bp, Homo sapien
ggccctaggagagagcacactgtcc

SEQ ID NO: 4190333 - DNA, 25 bp, Homo sapien
cctagaccttgacactgagggagga

SEQ ID NO: 4190334 - DNA, 25 bp, Homo sapien
caatgcccattgagacttagagcct

SEQ ID NO: 4190335 - DNA, 25 bp, Homo sapien
cacagaactgcaaagaccagatgca

SEQ ID NO: 4190336 - DNA, 25 bp, Homo sapien
gagagtctttcttgagcattgctga

SEQ ID NO: 4190337 - DNA, 25 bp, Homo sapien
tttcttgagcattgctgacccttga

SEQ ID NO: 4190338 - DNA, 25 bp, Homo sapien
gacccttgaactcttactatattct

SEQ ID NO: 4190339 - DNA, 25 bp, Homo sapien
tgacccttgaactcttactatattc

SEQ ID NO: 4190340 - DNA, 25 bp, Homo sapien
gagaatgagttatcccagatttgga

SEQ ID NO: 4190341 - DNA, 25 bp, Homo sapien
ttgatattctagctcagttccagag

SEQ ID NO: 4190342 - DNA, 25 bp, Homo sapien
tcagttccagagaatgagttatccc

SEQ ID NO: 4190343 - DNA, 25 bp, Homo sapien
acttgatattctagctcagttccag

SEQ ID NO: 4190344 - DNA, 25 bp, Homo sapien
ttccatagaaccatgatgctttctc

SEQ ID NO: 4190345 - DNA, 25 bp, Homo sapien
cggagacaatcggaacccaagatgt

SEQ ID NO: 4190346 - DNA, 25 bp, Homo sapien
tctctcttcaccaacgtttactgaa

SEQ ID NO: 4190347 - DNA, 25 bp, Homo sapien
gatgtgcccctctagagaccagatg

SEQ ID NO: 4190348 - DNA, 25 bp, Homo sapien
tcggcctttgcagaagtgtggcttt

SEQ ID NO: 4190349 - DNA, 25 bp, Homo sapien
agtccttctgactctcagtccggaa

SEQ ID NO: 4190350 - DNA, 25 bp, Homo sapien
ccctatgtggaaagtccttctgact

SEQ ID NO: 4190351 - DNA, 25 bp, Homo sapien
cataacatttttcggcctttgcaga

SEQ ID NO: 4190352 - DNA, 25 bp, Homo sapien
cagggctctaatgatagcctttggg

SEQ ID NO: 4190353 - DNA, 25 bp, Homo sapien
ctggctgacagggctctaatgatag

SEQ ID NO: 4190354 - DNA, 25 bp, Homo sapien
gctgacagggctctaatgatagcct

SEQ ID NO: 4190355 - DNA, 25 bp, Homo sapien
tgacagggctctaatgatagccttt

SEQ ID NO: 4190356 - DNA, 25 bp, Homo sapien
cctgaatatggctgggtaggcaccc

SEQ ID NO: 4190357 - DNA, 25 bp, Homo sapien
gaagggccttggtcgcattgattga

SEQ ID NO: 4190358 - DNA, 25 bp, Homo sapien
tgtcctgtatggacacgctggcttc

SEQ ID NO: 4190359 - DNA, 25 bp, Homo sapien
cacgttgcacaagcaggagctttct

SEQ ID NO: 4190360 - DNA, 25 bp, Homo sapien
tggctcagaccaagttgagaggtta

SEQ ID NO: 4190361 - DNA, 25 bp, Homo sapien
ggatgccaggaaatcgggctaaatc

SEQ ID NO: 4190362 - DNA, 25 bp, Homo sapien
cagatttcttccagcactcttctga

SEQ ID NO: 4190363 - DNA, 25 bp, Homo sapien
cagcactcttctgagctcagctcaa

SEQ ID NO: 4190364 - DNA, 25 bp, Homo sapien
atgttttagcaggattggggtcttc

SEQ ID NO: 4190365 - DNA, 25 bp, Homo sapien
gttttagcaggattggggtcttcag

SEQ ID NO: 4190366 - DNA, 25 bp, Homo sapien
tgttttagcaggattggggtcttca

SEQ ID NO: 4190367 - DNA, 25 bp, Homo sapien
gaatgttttagcaggattggggtct

SEQ ID NO: 4190368 - DNA, 25 bp, Homo sapien
caacggcaaagtttcctgaaaggct

SEQ ID NO: 4190369 - DNA, 25 bp, Homo sapien
tcaagggtgaggtctctctgaggct

SEQ ID NO: 4190370 - DNA, 25 bp, Homo sapien
caatgagctggcactttcctggctg

SEQ ID NO: 4190371 - DNA, 25 bp, Homo sapien
tgtgtgcttatagctgaccctggcc

SEQ ID NO: 4190372 - DNA, 25 bp, Homo sapien
gaaaagcagcgagcatgtgcatgtg

SEQ ID NO: 4190373 - DNA, 25 bp, Homo sapien
tgtgcactgataatatgtacccctg

SEQ ID NO: 4190374 - DNA, 25 bp, Homo sapien
cacctacgcgtctttgcaaactgct

SEQ ID NO: 4190375 - DNA, 25 bp, Homo sapien
gaggtgacgtgtcgagcacctctca

SEQ ID NO: 4190376 - DNA, 25 bp, Homo sapien
aattagaagccgactccagggcttg

SEQ ID NO: 4190377 - DNA, 25 bp, Homo sapien
tagaagccgactccagggcttgctc

SEQ ID NO: 4190378 - DNA, 25 bp, Homo sapien
cttctctgaaattagaagccgactc

SEQ ID NO: 4190379 - DNA, 25 bp, Homo sapien
ctgaaattagaagccgactccaggg

SEQ ID NO: 4190380 - DNA, 25 bp, Homo sapien
catgttcttgaaagagcagcccttc

SEQ ID NO: 4190381 - DNA, 25 bp, Homo sapien
tcccgggagcaagtccaagatggag

SEQ ID NO: 4190382 - DNA, 25 bp, Homo sapien
tggagaatcccagccggaagtgctg

SEQ ID NO: 4190383 - DNA, 25 bp, Homo sapien
gatgcttccagaaattcccgggagc

SEQ ID NO: 4190384 - DNA, 25 bp, Homo sapien
cataatgaaaacaatctgtttgcac

SEQ ID NO: 4190385 - DNA, 25 bp, Homo sapien
tcataatgaaaacaatctgtttgca

SEQ ID NO: 4190386 - DNA, 25 bp, Homo sapien
tgtgtctcccctgcagccgagggag

SEQ ID NO: 4190387 - DNA, 25 bp, Homo sapien
cctaaggggctgtgtctcccctgca

SEQ ID NO: 4190388 - DNA, 25 bp, Homo sapien
ctaaggggctgtgtctcccctgcag

SEQ ID NO: 4190389 - DNA, 25 bp, Homo sapien
gtctcccctgcagccgagggagtgg

SEQ ID NO: 4190390 - DNA, 25 bp, Homo sapien
tgtgatgtcaagaagttcctgcgag

SEQ ID NO: 4190391 - DNA, 25 bp, Homo sapien
aagttcctgcgagcagcaagtctcc

SEQ ID NO: 4190392 - DNA, 25 bp, Homo sapien
tgtcaagaagttcctgcgagcagca

SEQ ID NO: 4190393 - DNA, 25 bp, Homo sapien
gcctgtgatgtcaagaagttcctgc

SEQ ID NO: 4190394 - DNA, 25 bp, Homo sapien
gaggcctcaaggtgcactcctggag

SEQ ID NO: 4190395 - DNA, 25 bp, Homo sapien
cttcaaagatgaatgggaggcctca

SEQ ID NO: 4190396 - DNA, 25 bp, Homo sapien
gaatgggaggcctcaaggtgcactc

SEQ ID NO: 4190397 - DNA, 25 bp, Homo sapien
ggtgcactcctggaggtgtccatgc

SEQ ID NO: 4190398 - DNA, 25 bp, Homo sapien
tttcacagtgcatgggattctggga

SEQ ID NO: 4190399 - DNA, 25 bp, Homo sapien
cttgaggtgtggagtggattttcac

SEQ ID NO: 4190400 - DNA, 25 bp, Homo sapien
gtggactaatgtgcccctgagcgcc

SEQ ID NO: 4190401 - DNA, 25 bp, Homo sapien
agactgaggctcttgaggtgtggag

SEQ ID NO: 4190402 - DNA, 25 bp, Homo sapien
ctctggatattgtggcttgagactt

SEQ ID NO: 4190403 - DNA, 25 bp, Homo sapien
tcccaggcatgacccgtgaggaagt

SEQ ID NO: 4190404 - DNA, 25 bp, Homo sapien
gagcggctcttctcctaagtcagag

SEQ ID NO: 4190405 - DNA, 25 bp, Homo sapien
gcaagttgaatagcagcggtgacaa

SEQ ID NO: 4190406 - DNA, 25 bp, Homo sapien
gctgcagcacttggcagatgcccaa

SEQ ID NO: 4190407 - DNA, 25 bp, Homo sapien
catgaaacaaacagtctggctcctc

SEQ ID NO: 4190408 - DNA, 25 bp, Homo sapien
cacttgaggacttgctcatgaaaca

SEQ ID NO: 4190409 - DNA, 25 bp, Homo sapien
agcccacatgctctgtgcatggttg

SEQ ID NO: 4190410 - DNA, 25 bp, Homo sapien
acttcacgttcaaaatagctgaaca

SEQ ID NO: 4190411 - DNA, 25 bp, Homo sapien
ttgcctctgaaattataacttcacg

SEQ ID NO: 4190412 - DNA, 25 bp, Homo sapien
tggactccttccctcgtagggcagt

SEQ ID NO: 4190413 - DNA, 25 bp, Homo sapien
tataacttcacgttcaaaatagctg

SEQ ID NO: 4190414 - DNA, 25 bp, Homo sapien
ccgccctttccaatgttggagggct

SEQ ID NO: 4190415 - DNA, 25 bp, Homo sapien
gggcttgtgcttggatccacccgcc

SEQ ID NO: 4190416 - DNA, 25 bp, Homo sapien
tgctgaactggcgaggatctttctc

SEQ ID NO: 4190417 - DNA, 25 bp, Homo sapien
tggcgaggatctttctcggcctctg

SEQ ID NO: 4190418 - DNA, 25 bp, Homo sapien
gccctcactctccttgttcatgctg

SEQ ID NO: 4190419 - DNA, 25 bp, Homo sapien
ggccctcactctccttgttcatgct

SEQ ID NO: 4190420 - DNA, 25 bp, Homo sapien
tctcaggaaggccataacccaattt

SEQ ID NO: 4190421 - DNA, 25 bp, Homo sapien
tctatatggtccttggctagcagag

SEQ ID NO: 4190422 - DNA, 25 bp, Homo sapien
gggtcaactctatatggtccttggc

SEQ ID NO: 4190423 - DNA, 25 bp, Homo sapien
gctggggcgaccctaacaaggcctg

SEQ ID NO: 4190424 - DNA, 25 bp, Homo sapien
tttcttgatggagggtcaactctat

SEQ ID NO: 4190425 - DNA, 25 bp, Homo sapien
ctgggtgttatgcactcccatctga

SEQ ID NO: 4190426 - DNA, 25 bp, Homo sapien
agaggcctcggatgttgggacagac

SEQ ID NO: 4190427 - DNA, 25 bp, Homo sapien
acagtatatccaaaggggaagtcct

SEQ ID NO: 4190428 - DNA, 25 bp, Homo sapien
ggagaggcctcggatgttgggacag

SEQ ID NO: 4190429 - DNA, 25 bp, Homo sapien
tttggaaggtggagcaactgatact

SEQ ID NO: 4190430 - DNA, 25 bp, Homo sapien
caggacggtatatgctctcagtggg

SEQ ID NO: 4190431 - DNA, 25 bp, Homo sapien
tgtgtgtgcaggacggtatatgctc

SEQ ID NO: 4190432 - DNA, 25 bp, Homo sapien
tacttgcaccagaatgaaactgagg

SEQ ID NO: 4190433 - DNA, 25 bp, Homo sapien
cctgcagggcagatgatactggagg

SEQ ID NO: 4190434 - DNA, 25 bp, Homo sapien
tgttgatgatccacagtgtgataca

SEQ ID NO: 4190435 - DNA, 25 bp, Homo sapien
cacagtgtgatacagcctcgacctg

SEQ ID NO: 4190436 - DNA, 25 bp, Homo sapien
gaggtgtgaatggttgtgggcagct

SEQ ID NO: 4190437 - DNA, 25 bp, Homo sapien
cagaacgagacagtcttaaaaaata

SEQ ID NO: 4190438 - DNA, 25 bp, Homo sapien
aattattttcaagtaggcgtgtgtg

SEQ ID NO: 4190439 - DNA, 25 bp, Homo sapien
gcatctgtattcacgtgggataaca

SEQ ID NO: 4190440 - DNA, 25 bp, Homo sapien
catgggaagggatttcagggctctc

SEQ ID NO: 4190441 - DNA, 25 bp, Homo sapien
gctctccacttcagtcttcagatgt

SEQ ID NO: 4190442 - DNA, 25 bp, Homo sapien
tcttggaggctgaatcaagggctct

SEQ ID NO: 4190443 - DNA, 25 bp, Homo sapien
cacagaaggtctgggtggcatctga

SEQ ID NO: 4190444 - DNA, 25 bp, Homo sapien
tcatgaaactgggttcacgtagcag

SEQ ID NO: 4190445 - DNA, 25 bp, Homo sapien
caaacatagccaggatttctaaagg

SEQ ID NO: 4190446 - DNA, 25 bp, Homo sapien
tttctaaaggtatctcatgctgccc

SEQ ID NO: 4190447 - DNA, 25 bp, Homo sapien
tagagtgtcattatgaaggtctgac

SEQ ID NO: 4190448 - DNA, 25 bp, Homo sapien
tctatttcgccagcacgaacatcac

SEQ ID NO: 4190449 - DNA, 25 bp, Homo sapien
gcacgaacatcacctagagtgtcat

SEQ ID NO: 4190450 - DNA, 25 bp, Homo sapien
tatgaaggtctgacactgttggctg

SEQ ID NO: 4190451 - DNA, 25 bp, Homo sapien
atggccttgacctctggacccagag

SEQ ID NO: 4190452 - DNA, 25 bp, Homo sapien
gtacatgatccagccagagtcccag

SEQ ID NO: 4190453 - DNA, 25 bp, Homo sapien
gcatgtacatgatccagccagagtc

SEQ ID NO: 4190454 - DNA, 25 bp, Homo sapien
tggtaacaacttcagcccaatggcc

SEQ ID NO: 4190455 - DNA, 25 bp, Homo sapien
cattgtcagtaacatcctgtttggg

SEQ ID NO: 4190456 - DNA, 25 bp, Homo sapien
gacattgtcagtaacatcctgtttg

SEQ ID NO: 4190457 - DNA, 25 bp, Homo sapien
cattttcctcgatgctacactgcct

SEQ ID NO: 4190458 - DNA, 25 bp, Homo sapien
gctacactgcctgccagagttacct

SEQ ID NO: 4190459 - DNA, 25 bp, Homo sapien
ccagactacagctaccagattcagt

SEQ ID NO: 4190460 - DNA, 25 bp, Homo sapien
ggggccagtgccctcactttctgga

SEQ ID NO: 4190461 - DNA, 25 bp, Homo sapien
tccagactacagctaccagattcag

SEQ ID NO: 4190462 - DNA, 25 bp, Homo sapien
ggctccagactacagctaccagatt

SEQ ID NO: 4190463 - DNA, 25 bp, Homo sapien
ctgagtggttgcctctgtagacctc

SEQ ID NO: 4190464 - DNA, 25 bp, Homo sapien
tgtagacctcaaggtctccacggct

SEQ ID NO: 4190465 - DNA, 25 bp, Homo sapien
ggttgcctctgtagacctcaaggtc

SEQ ID NO: 4190466 - DNA, 25 bp, Homo sapien
gttcccagaaaagccgccactagct

SEQ ID NO: 4190467 - DNA, 25 bp, Homo sapien
gaagtccctgcagagactgaacctg

SEQ ID NO: 4190468 - DNA, 25 bp, Homo sapien
tccatcctgtcgttcagaggccctg

SEQ ID NO: 4190469 - DNA, 25 bp, Homo sapien
tcagaggccctgttcacattccatc

SEQ ID NO: 4190470 - DNA, 25 bp, Homo sapien
gggaagtccctgcagagactgaacc

SEQ ID NO: 4190471 - DNA, 25 bp, Homo sapien
tgctatgcacagagcgggtgcttga

SEQ ID NO: 4190472 - DNA, 25 bp, Homo sapien
gcaaactgcccttgcatggaaaact

SEQ ID NO: 4190473 - DNA, 25 bp, Homo sapien
ggaaatggtttgtcttcaagatgca

SEQ ID NO: 4190474 - DNA, 25 bp, Homo sapien
gatacctggtctgccttgtacaaga

SEQ ID NO: 4190475 - DNA, 25 bp, Homo sapien
tggttttgtggagtagcttttagcc

SEQ ID NO: 4190476 - DNA, 25 bp, Homo sapien
tgcaaaaattgacagggatctttgg

SEQ ID NO: 4190477 - DNA, 25 bp, Homo sapien
caaaaattgacagggatctttgggt

SEQ ID NO: 4190478 - DNA, 25 bp, Homo sapien
gcttaggttctctgtatgcctgcac

SEQ ID NO: 4190479 - DNA, 25 bp, Homo sapien
agccaccacgcccattgacagaagc

SEQ ID NO: 4190480 - DNA, 25 bp, Homo sapien
gtgtgccaccatgggcacatgccca

SEQ ID NO: 4190481 - DNA, 25 bp, Homo sapien
gcgtgtgccaccatgggcacatgcc

SEQ ID NO: 4190482 - DNA, 25 bp, Homo sapien
ccaccacgcccattgacagaagcac

SEQ ID NO: 4190483 - DNA, 25 bp, Homo sapien
gaaattcctctatactgttaaggtc

SEQ ID NO: 4190484 - DNA, 25 bp, Homo sapien
ctataagatgaggaatccttgtgga

SEQ ID NO: 4190485 - DNA, 25 bp, Homo sapien
tttggttatcatatgaaagttaact

SEQ ID NO: 4190486 - DNA, 25 bp, Homo sapien
ggtcgtggtccctataagatgagga

SEQ ID NO: 4190487 - DNA, 25 bp, Homo sapien
gatattgggccatcattgaaagagg

SEQ ID NO: 4190488 - DNA, 25 bp, Homo sapien
ggtgtctgagcactagtacctacat

SEQ ID NO: 4190489 - DNA, 25 bp, Homo sapien
ctaagctccgagcatgttggcacat

SEQ ID NO: 4190490 - DNA, 25 bp, Homo sapien
gagagatgatccgtagttccctaac

SEQ ID NO: 4190491 - DNA, 25 bp, Homo sapien
ggttcttcatatctggctctccatg

SEQ ID NO: 4190492 - DNA, 25 bp, Homo sapien
tcagttacatatctcaccgctttgg

SEQ ID NO: 4190493 - DNA, 25 bp, Homo sapien
ggaggccctccgagcttggctttca

SEQ ID NO: 4190494 - DNA, 25 bp, Homo sapien
tcatttatcaaccagagaaggcatt

SEQ ID NO: 4190495 - DNA, 25 bp, Homo sapien
ctgcttttctttaggcagaaagaag

SEQ ID NO: 4190496 - DNA, 25 bp, Homo sapien
tgcttttctttaggcagaaagaagg

SEQ ID NO: 4190497 - DNA, 25 bp, Homo sapien
tttctttaggcagaaagaaggcagt

SEQ ID NO: 4190498 - DNA, 25 bp, Homo sapien
cttttctttaggcagaaagaaggca

SEQ ID NO: 4190499 - DNA, 25 bp, Homo sapien
ttccgcggggcccagcgtgagtctc

SEQ ID NO: 4190500 - DNA, 25 bp, Homo sapien
gggcccagcgtgagtctctacctga

SEQ ID NO: 4190501 - DNA, 25 bp, Homo sapien
ccagcgtgagtctctacctgagcga

SEQ ID NO: 4190502 - DNA, 25 bp, Homo sapien
gtgagtctctacctgagcgaggacg

SEQ ID NO: 4190503 - DNA, 25 bp, Homo sapien
cagcctggcccgtccgtcgggaaag

SEQ ID NO: 4190504 - DNA, 25 bp, Homo sapien
caagcaaacattagacgcagtgacc

SEQ ID NO: 4190505 - DNA, 25 bp, Homo sapien
tgctttttcgcaaccagaacggccg

SEQ ID NO: 4190506 - DNA, 25 bp, Homo sapien
gaaaggagggttacagacaatagac

SEQ ID NO: 4190507 - DNA, 25 bp, Homo sapien
aatggaatccgtgtatcttgctagg

SEQ ID NO: 4190508 - DNA, 25 bp, Homo sapien
gaggccagcctatctctaaatggaa

SEQ ID NO: 4190509 - DNA, 25 bp, Homo sapien
gaagcttgacaaattgaggccagcc

SEQ ID NO: 4190510 - DNA, 25 bp, Homo sapien
aaccctggtagcagtggctgtccca

SEQ ID NO: 4190511 - DNA, 25 bp, Homo sapien
catcttctccaaaacgatcctctaa

SEQ ID NO: 4190512 - DNA, 25 bp, Homo sapien
acatcttctccaaaacgatcctcta

SEQ ID NO: 4190513 - DNA, 25 bp, Homo sapien
tcttcctccatccagcagatgtctg

SEQ ID NO: 4190514 - DNA, 25 bp, Homo sapien
ctactcttcctccatccagcagatg

SEQ ID NO: 4190515 - DNA, 25 bp, Homo sapien
tactcttcctccatccagcagatgt

SEQ ID NO: 4190516 - DNA, 25 bp, Homo sapien
ccagcagatgtctgctggcatccag

SEQ ID NO: 4190517 - DNA, 25 bp, Homo sapien
tcatttacccagatacacagaaggc

SEQ ID NO: 4190518 - DNA, 25 bp, Homo sapien
catttacccagatacacagaaggca

SEQ ID NO: 4190519 - DNA, 25 bp, Homo sapien
atttacccagatacacagaaggcat

SEQ ID NO: 4190520 - DNA, 25 bp, Homo sapien
agagcttcatctctgactcactgtg

SEQ ID NO: 4190521 - DNA, 25 bp, Homo sapien
gctgggctatcctgaagcctgatcc

SEQ ID NO: 4190522 - DNA, 25 bp, Homo sapien
ttccaacttttggacactatgaaca

SEQ ID NO: 4190523 - DNA, 25 bp, Homo sapien
tgatccactctctcgctggcactgg

SEQ ID NO: 4190524 - DNA, 25 bp, Homo sapien
cttggtacaccaagcagaagggccc

SEQ ID NO: 4190525 - DNA, 25 bp, Homo sapien
caggaccagaggtggcctccttcta

SEQ ID NO: 4190526 - DNA, 25 bp, Homo sapien
gaggtcagcccatgtggagcctatg

SEQ ID NO: 4190527 - DNA, 25 bp, Homo sapien
gggcagccaagaggtcagcccatgt

SEQ ID NO: 4190528 - DNA, 25 bp, Homo sapien
caaggccacaaagatctgagccagg

SEQ ID NO: 4190529 - DNA, 25 bp, Homo sapien
aggggttgttgatcaaggccacaaa

SEQ ID NO: 4190530 - DNA, 25 bp, Homo sapien
agatctgagccaggcaaggtccagg

SEQ ID NO: 4190531 - DNA, 25 bp, Homo sapien
caggcaaggtccagggaaaggcttc

SEQ ID NO: 4190532 - DNA, 25 bp, Homo sapien
tttgttatgccaccctgtaccagga

SEQ ID NO: 4190533 - DNA, 25 bp, Homo sapien
taatcagctttgttcggccacacgc

SEQ ID NO: 4190534 - DNA, 25 bp, Homo sapien
gattgctgccgcattccactgggta

SEQ ID NO: 4190535 - DNA, 25 bp, Homo sapien
ccgaggtagggctgtgttctaatca

SEQ ID NO: 4190536 - DNA, 25 bp, Homo sapien
cagccccaggagctattggtgggtt

SEQ ID NO: 4190537 - DNA, 25 bp, Homo sapien
agccccaggagctattggtgggttt

SEQ ID NO: 4190538 - DNA, 25 bp, Homo sapien
cccaggagctattggtgggttttag

SEQ ID NO: 4190539 - DNA, 25 bp, Homo sapien
ccaggagctattggtgggttttagc

SEQ ID NO: 4190540 - DNA, 25 bp, Homo sapien
taaagctgctcgattcccaggatct

SEQ ID NO: 4190541 - DNA, 25 bp, Homo sapien
ttccgatgtgtctccatgggctgtg

SEQ ID NO: 4190542 - DNA, 25 bp, Homo sapien
ggccatttaagtggactgggagaca

SEQ ID NO: 4190543 - DNA, 25 bp, Homo sapien
ctggcccgtggatgttaaagctgct

SEQ ID NO: 4190544 - DNA, 25 bp, Homo sapien
gacaccaggtggactggttcactaa

SEQ ID NO: 4190545 - DNA, 25 bp, Homo sapien
gaactaatttccacggacggctgcc

SEQ ID NO: 4190546 - DNA, 25 bp, Homo sapien
taagtttggttccagccaacgtcat

SEQ ID NO: 4190547 - DNA, 25 bp, Homo sapien
ggttcactaatcaagtcagccatat

SEQ ID NO: 4190548 - DNA, 25 bp, Homo sapien
gcacactatggagcgcctggaatct

SEQ ID NO: 4190549 - DNA, 25 bp, Homo sapien
aaaggcccaggcgtttgatgtctga

SEQ ID NO: 4190550 - DNA, 25 bp, Homo sapien
cgctggcttagaaaggcggccttca

SEQ ID NO: 4190551 - DNA, 25 bp, Homo sapien
gacaaattcgcgatgagaggccttg

SEQ ID NO: 4190552 - DNA, 25 bp, Homo sapien
ctagaaacgcgcgggtctcttgggg

SEQ ID NO: 4190553 - DNA, 25 bp, Homo sapien
agtgcgccctttcgaggcagccgca

SEQ ID NO: 4190554 - DNA, 25 bp, Homo sapien
aaagctggagtctcggcgcaacccg

SEQ ID NO: 4190555 - DNA, 25 bp, Homo sapien
atcttcgccgccgagctgagctggg

SEQ ID NO: 4190556 - DNA, 25 bp, Homo sapien
cttttccgggagtcggagcctcgag

SEQ ID NO: 4190557 - DNA, 25 bp, Homo sapien
ttgtggttcgctttgatcccgaggg

SEQ ID NO: 4190558 - DNA, 25 bp, Homo sapien
cgctgagaggttatttgtggttcgc

SEQ ID NO: 4190559 - DNA, 25 bp, Homo sapien
ctgggcgcggaggaacggagctcgg

SEQ ID NO: 4190560 - DNA, 25 bp, Homo sapien
gggcggtgcgctgagaggttatttg

SEQ ID NO: 4190561 - DNA, 25 bp, Homo sapien
accgcaggccatgcctgacagatct

SEQ ID NO: 4190562 - DNA, 25 bp, Homo sapien
gtggccgccagcttaggtaggctcc

SEQ ID NO: 4190563 - DNA, 25 bp, Homo sapien
catgcctgacagatcttgccttctg

SEQ ID NO: 4190564 - DNA, 25 bp, Homo sapien
ggccgccagcttaggtaggctccac

SEQ ID NO: 4190565 - DNA, 25 bp, Homo sapien
ttcatgctccagattccggtaggtt

SEQ ID NO: 4190566 - DNA, 25 bp, Homo sapien
tgcttcatgctccagattccggtag

SEQ ID NO: 4190567 - DNA, 25 bp, Homo sapien
ctccagattccggtaggtttcctgt

SEQ ID NO: 4190568 - DNA, 25 bp, Homo sapien
catgctccagattccggtaggtttc

SEQ ID NO: 4190569 - DNA, 25 bp, Homo sapien
cgtcttccatgcaggactggaaatt

SEQ ID NO: 4190570 - DNA, 25 bp, Homo sapien
accaatatccagacacgtcttccat

SEQ ID NO: 4190571 - DNA, 25 bp, Homo sapien
actggaaattgtgaaggcgctgggc

SEQ ID NO: 4190572 - DNA, 25 bp, Homo sapien
tgtgaaggcgctgggcagttacaca

SEQ ID NO: 4190573 - DNA, 25 bp, Homo sapien
cccgccatctgtcgtctgagagcca

SEQ ID NO: 4190574 - DNA, 25 bp, Homo sapien
tgcccgccatctgtcgtctgagagc

SEQ ID NO: 4190575 - DNA, 25 bp, Homo sapien
gcccgccatctgtcgtctgagagcc

SEQ ID NO: 4190576 - DNA, 25 bp, Homo sapien
taaaacatcaagcacaaagagggga

SEQ ID NO: 4190577 - DNA, 25 bp, Homo sapien
tctgactcatttcgtttaaaataaa

SEQ ID NO: 4190578 - DNA, 25 bp, Homo sapien
gcacaaagaggggatacagcccatc

SEQ ID NO: 4190579 - DNA, 25 bp, Homo sapien
gttctgactcatttcgtttaaaata

SEQ ID NO: 4190580 - DNA, 25 bp, Homo sapien
tctggcactttgtgccgggaggtct

SEQ ID NO: 4190581 - DNA, 25 bp, Homo sapien
gttgctcaatgtctccagaagatgc

SEQ ID NO: 4190582 - DNA, 25 bp, Homo sapien
catctgcagtggactcgcccagttg

SEQ ID NO: 4190583 - DNA, 25 bp, Homo sapien
tgccgggaggtcttgcctccatctg

SEQ ID NO: 4190584 - DNA, 25 bp, Homo sapien
tgacgttggcctcagtcaaggtgct

SEQ ID NO: 4190585 - DNA, 25 bp, Homo sapien
ttcccagacacgtctgtgacgttgg

SEQ ID NO: 4190586 - DNA, 25 bp, Homo sapien
gacgttggcctcagtcaaggtgctc

SEQ ID NO: 4190587 - DNA, 25 bp, Homo sapien
tgcctgcattcctgacatgattgta

SEQ ID NO: 4190588 - DNA, 25 bp, Homo sapien
taggaccaacatcccatgtcttctg

SEQ ID NO: 4190589 - DNA, 25 bp, Homo sapien
tctaaagtgataggtcttggtgtgc

SEQ ID NO: 4190590 - DNA, 25 bp, Homo sapien
cagcttgcctgctttttcagtagga

SEQ ID NO: 4190591 - DNA, 25 bp, Homo sapien
tgtcctggtgacaccaacacttctg

SEQ ID NO: 4190592 - DNA, 25 bp, Homo sapien
tgtgtcctggtgacaccaacacttc

SEQ ID NO: 4190593 - DNA, 25 bp, Homo sapien
gtcctggtgacaccaacacttctgt

SEQ ID NO: 4190594 - DNA, 25 bp, Homo sapien
ctgtgtcctggtgacaccaacactt

SEQ ID NO: 4190595 - DNA, 25 bp, Homo sapien
cattgttgaaagtgcaagtcgctca

SEQ ID NO: 4190596 - DNA, 25 bp, Homo sapien
tacatctatgacaaaaccattgttg

SEQ ID NO: 4190597 - DNA, 25 bp, Homo sapien
cttctctgcataagatccatgtgag

SEQ ID NO: 4190598 - DNA, 25 bp, Homo sapien
gtgcaagtcgctcaggcttctctgc

SEQ ID NO: 4190599 - DNA, 25 bp, Homo sapien
taagcagacatcttgccctttggtt

SEQ ID NO: 4190600 - DNA, 25 bp, Homo sapien
cacaaagaaggcataagcagacatc

SEQ ID NO: 4190601 - DNA, 25 bp, Homo sapien
acatcttgccctttggtttcttggg

SEQ ID NO: 4190602 - DNA, 25 bp, Homo sapien
gaaggcataagcagacatcttgccc

SEQ ID NO: 4190603 - DNA, 25 bp, Homo sapien
attctgcaaaattgacagggacctc

SEQ ID NO: 4190604 - DNA, 25 bp, Homo sapien
gcaaaattgacagggacctctgggg

SEQ ID NO: 4190605 - DNA, 25 bp, Homo sapien
ctctggggttttcttcttatgttct

SEQ ID NO: 4190606 - DNA, 25 bp, Homo sapien
ttcctggaaaattctgcaaaattga

SEQ ID NO: 4190607 - DNA, 25 bp, Homo sapien
tcaaatttagacttctctttcccag

SEQ ID NO: 4190608 - DNA, 25 bp, Homo sapien
tcatcaaatttagacttctctttcc

SEQ ID NO: 4190609 - DNA, 25 bp, Homo sapien
tgccatttcatcaaatttagacttc

SEQ ID NO: 4190610 - DNA, 25 bp, Homo sapien
caaatttagacttctctttcccaga

SEQ ID NO: 4190611 - DNA, 25 bp, Homo sapien
aagaataaggatcctaatgcctccc

SEQ ID NO: 4190612 - DNA, 25 bp, Homo sapien
gaataaggatcctaatgcctccctt

SEQ ID NO: 4190613 - DNA, 25 bp, Homo sapien
gaggcaagaataaggatcctaatgc

SEQ ID NO: 4190614 - DNA, 25 bp, Homo sapien
ctaagggaggcaagaataaggatcc

SEQ ID NO: 4190615 - DNA, 25 bp, Homo sapien
aatccagacagtgggatccaaacga

SEQ ID NO: 4190616 - DNA, 25 bp, Homo sapien
tagggcagaatttggaacagagcag

SEQ ID NO: 4190617 - DNA, 25 bp, Homo sapien
tcacccagcctttttgcgacatttc

SEQ ID NO: 4190618 - DNA, 25 bp, Homo sapien
gcgacatttccaatagagataccag

SEQ ID NO: 4190619 - DNA, 25 bp, Homo sapien
tttccaggcaaccttagcaggaccc

SEQ ID NO: 4190620 - DNA, 25 bp, Homo sapien
accctttgcaccatcaaactttctt

SEQ ID NO: 4190621 - DNA, 25 bp, Homo sapien
ttttttccaggcaaccttagcagga

SEQ ID NO: 4190622 - DNA, 25 bp, Homo sapien
aggcaaccttagcaggaccctttgc

SEQ ID NO: 4190623 - DNA, 25 bp, Homo sapien
tgtgggcagaagatattggacagtc

SEQ ID NO: 4190624 - DNA, 25 bp, Homo sapien
caccaactgagctggctagctccag

SEQ ID NO: 4190625 - DNA, 25 bp, Homo sapien
tggctagctccagacttgtttgggc

SEQ ID NO: 4190626 - DNA, 25 bp, Homo sapien
gatattggacagtcaccaactgagc

SEQ ID NO: 4190627 - DNA, 25 bp, Homo sapien
ccattggatgagcagaagcctgagt

SEQ ID NO: 4190628 - DNA, 25 bp, Homo sapien
ccagacgtgttctgggtgaggagca

SEQ ID NO: 4190629 - DNA, 25 bp, Homo sapien
gagtccagacgtgttctgggtgagg

SEQ ID NO: 4190630 - DNA, 25 bp, Homo sapien
agcctgagtccagacgtgttctggg

SEQ ID NO: 4190631 - DNA, 25 bp, Homo sapien
gaagccatgggctgatcattatact

SEQ ID NO: 4190632 - DNA, 25 bp, Homo sapien
acacctgtacatccagcaataccag

SEQ ID NO: 4190633 - DNA, 25 bp, Homo sapien
gagaaaggtccccattgctgttgtt

SEQ ID NO: 4190634 - DNA, 25 bp, Homo sapien
gttgctccttcaggagaagccatgg

SEQ ID NO: 4190635 - DNA, 25 bp, Homo sapien
ccaaagagactttgagggatgcgtt

SEQ ID NO: 4190636 - DNA, 25 bp, Homo sapien
gcatgaatcacacgcgaatgagggt

SEQ ID NO: 4190637 - DNA, 25 bp, Homo sapien
ggagaacccgagattctggctctga

SEQ ID NO: 4190638 - DNA, 25 bp, Homo sapien
gagcagaaccacctaaacgcatgaa

SEQ ID NO: 4190639 - DNA, 25 bp, Homo sapien
tacaaccaccccactatggaatcag

SEQ ID NO: 4190640 - DNA, 25 bp, Homo sapien
tgtatcccttgttgaaactctgaaa

SEQ ID NO: 4190641 - DNA, 25 bp, Homo sapien
tcaaagccctttcagttacaaccac

SEQ ID NO: 4190642 - DNA, 25 bp, Homo sapien
ccagattgtaaactctgtaagaagc

SEQ ID NO: 4190643 - DNA, 25 bp, Homo sapien
tgggtattcttttgcgtttaggcca

SEQ ID NO: 4190644 - DNA, 25 bp, Homo sapien
tattcttttgcgtttaggccagtgg

SEQ ID NO: 4190645 - DNA, 25 bp, Homo sapien
gtattcttttgcgtttaggccagtg

SEQ ID NO: 4190646 - DNA, 25 bp, Homo sapien
attcttttgcgtttaggccagtggc

SEQ ID NO: 4190647 - DNA, 25 bp, Homo sapien
ttgatgatgcttggcgagaagacaa

SEQ ID NO: 4190648 - DNA, 25 bp, Homo sapien
gaggatgtcgcaataccactggtag

SEQ ID NO: 4190649 - DNA, 25 bp, Homo sapien
ctgccttatgaggatgtcgcaatac

SEQ ID NO: 4190650 - DNA, 25 bp, Homo sapien
cgcaataccactggtaggttatgat

SEQ ID NO: 4190651 - DNA, 25 bp, Homo sapien
gaggaaagggacttgcgtggcaccc

SEQ ID NO: 4190652 - DNA, 25 bp, Homo sapien
accgtttttctttactgcactcgtg

SEQ ID NO: 4190653 - DNA, 25 bp, Homo sapien
tactgcactcgtgtcgggaggaaag

SEQ ID NO: 4190654 - DNA, 25 bp, Homo sapien
ggccgaggctgtcactttacgctca

SEQ ID NO: 4190655 - DNA, 25 bp, Homo sapien
ctaggttttggaggcgcgggaatgc

SEQ ID NO: 4190656 - DNA, 25 bp, Homo sapien
tcgttgctcagtgtcggacttcccc

SEQ ID NO: 4190657 - DNA, 25 bp, Homo sapien
ccgaggaaagcgagtgcagacacgt

SEQ ID NO: 4190658 - DNA, 25 bp, Homo sapien
cacatccgggaatccgaggaaagcg

SEQ ID NO: 4190659 - DNA, 25 bp, Homo sapien
cgctaagcttacgtccagcctctgt

SEQ ID NO: 4190660 - DNA, 25 bp, Homo sapien
gcgccaccgctaagcttacgtccag

SEQ ID NO: 4190661 - DNA, 25 bp, Homo sapien
tagtcggcgcgtttgttccgcccac

SEQ ID NO: 4190662 - DNA, 25 bp, Homo sapien
tccagcctctgtagtcggcgcgttt

SEQ ID NO: 4190663 - DNA, 25 bp, Homo sapien
atgaggccgcgaagccagaatcacc

SEQ ID NO: 4190664 - DNA, 25 bp, Homo sapien
gttcgcaggccgttgcgcaaaccgg

SEQ ID NO: 4190665 - DNA, 25 bp, Homo sapien
ccaacttgcgcaccggcggttacag

SEQ ID NO: 4190666 - DNA, 25 bp, Homo sapien
gcggttacagggttgccgcaagcac

SEQ ID NO: 4190667 - DNA, 25 bp, Homo sapien
agccacctggactccgaggaagggc

SEQ ID NO: 4190668 - DNA, 25 bp, Homo sapien
cctggactccgaggaagggctgacc

SEQ ID NO: 4190669 - DNA, 25 bp, Homo sapien
tggccactctccgaagcgcccccag

SEQ ID NO: 4190670 - DNA, 25 bp, Homo sapien
cacctggactccgaggaagggctga

SEQ ID NO: 4190671 - DNA, 25 bp, Homo sapien
tactgctctgcggccccgggtttgg

SEQ ID NO: 4190672 - DNA, 25 bp, Homo sapien
acggactggtactgctctgcggccc

SEQ ID NO: 4190673 - DNA, 25 bp, Homo sapien
aacaggccacggactggtactgctc

SEQ ID NO: 4190674 - DNA, 25 bp, Homo sapien
ctggtactgctctgcggccccgggt

SEQ ID NO: 4190675 - DNA, 25 bp, Homo sapien
tttggaggctgctaggccaccaact

SEQ ID NO: 4190676 - DNA, 25 bp, Homo sapien
aggctgctaggccaccaactcatta

SEQ ID NO: 4190677 - DNA, 25 bp, Homo sapien
ctaggccaccaactcattactgtgg

SEQ ID NO: 4190678 - DNA, 25 bp, Homo sapien
ctttggaggctgctaggccaccaac

SEQ ID NO: 4190679 - DNA, 25 bp, Homo sapien
ttcaccatctgcctggtgccaaaca

SEQ ID NO: 4190680 - DNA, 25 bp, Homo sapien
agtgtttctgtaataccttcaccat

SEQ ID NO: 4190681 - DNA, 25 bp, Homo sapien
caaagtgtttctgtaataccttcac

SEQ ID NO: 4190682 - DNA, 25 bp, Homo sapien
ttctgtaataccttcaccatctgcc

SEQ ID NO: 4190683 - DNA, 25 bp, Homo sapien
gctttatattctcggacttgtttta

SEQ ID NO: 4190684 - DNA, 25 bp, Homo sapien
agctttatattctcggacttgtttt

SEQ ID NO: 4190685 - DNA, 25 bp, Homo sapien
tagctttatattctcggacttgttt

SEQ ID NO: 4190686 - DNA, 25 bp, Homo sapien
cctgaagacaggctcatagagcttc

SEQ ID NO: 4190687 - DNA, 25 bp, Homo sapien
tgaagacaggctcatagagcttcct

SEQ ID NO: 4190688 - DNA, 25 bp, Homo sapien
gacaggctcatagagcttcctgcat

SEQ ID NO: 4190689 - DNA, 25 bp, Homo sapien
aagacaggctcatagagcttcctgc

SEQ ID NO: 4190690 - DNA, 25 bp, Homo sapien
gattttgtattccttctaacaaagc

SEQ ID NO: 4190691 - DNA, 25 bp, Homo sapien
catgccctcgattttgtattccttc

SEQ ID NO: 4190692 - DNA, 25 bp, Homo sapien
gtattccttctaacaaagcctccat

SEQ ID NO: 4190693 - DNA, 25 bp, Homo sapien
gccctcgattttgtattccttctaa

SEQ ID NO: 4190694 - DNA, 25 bp, Homo sapien
tgtactatgttcattctttggatga

SEQ ID NO: 4190695 - DNA, 25 bp, Homo sapien
ttggatgataggatacatacaagcc

SEQ ID NO: 4190696 - DNA, 25 bp, Homo sapien
attctttggatgataggatacatac

SEQ ID NO: 4190697 - DNA, 25 bp, Homo sapien
ggatgataggatacatacaagccca

SEQ ID NO: 4190698 - DNA, 25 bp, Homo sapien
atgtaaatctacctgaagtaaataa

SEQ ID NO: 4190699 - DNA, 25 bp, Homo sapien
gcagatgtaaatctacctgaagtaa

SEQ ID NO: 4190700 - DNA, 25 bp, Homo sapien
tatagcagatgtaaatctacctgaa

SEQ ID NO: 4190701 - DNA, 25 bp, Homo sapien
cagatgtaaatctacctgaagtaaa

SEQ ID NO: 4190702 - DNA, 25 bp, Homo sapien
cctgttcacggattttcaagcaagt

SEQ ID NO: 4190703 - DNA, 25 bp, Homo sapien
tgtcaatctgtttcatgagctcctg

SEQ ID NO: 4190704 - DNA, 25 bp, Homo sapien
tagagcatgtgtacgtccttcccat

SEQ ID NO: 4190705 - DNA, 25 bp, Homo sapien
gtagttctgcttcacaagatgtcaa

SEQ ID NO: 4190706 - DNA, 25 bp, Homo sapien
aactcctgcttatattccatggtca

SEQ ID NO: 4190707 - DNA, 25 bp, Homo sapien
tcaactcctgcttatattccatggt

SEQ ID NO: 4190708 - DNA, 25 bp, Homo sapien
cctgcttatattccatggtcatctc

SEQ ID NO: 4190709 - DNA, 25 bp, Homo sapien
ctcctgcttatattccatggtcatc

SEQ ID NO: 4190710 - DNA, 25 bp, Homo sapien
tttcagaccgatcttccctgtgatt

SEQ ID NO: 4190711 - DNA, 25 bp, Homo sapien
tcaatttcagaccgatcttccctgt

SEQ ID NO: 4190712 - DNA, 25 bp, Homo sapien
aatttcagaccgatcttccctgtga

SEQ ID NO: 4190713 - DNA, 25 bp, Homo sapien
ttcagaccgatcttccctgtgattt

SEQ ID NO: 4190714 - DNA, 25 bp, Homo sapien
tgagaccacgtaggccattaggata

SEQ ID NO: 4190715 - DNA, 25 bp, Homo sapien
ttttaaaagggatggccagactgag

SEQ ID NO: 4190716 - DNA, 25 bp, Homo sapien
tagccttgaaataagagcatcctgg

SEQ ID NO: 4190717 - DNA, 25 bp, Homo sapien
tccaatgacatgaccctaggtggtt

SEQ ID NO: 4190718 - DNA, 25 bp, Homo sapien
tcccagtccagcgatttctgacgga

SEQ ID NO: 4190719 - DNA, 25 bp, Homo sapien
agtccagcgatttctgacggaattc

SEQ ID NO: 4190720 - DNA, 25 bp, Homo sapien
tgctgataaatcaagcgttgcttct

SEQ ID NO: 4190721 - DNA, 25 bp, Homo sapien
cttctcccagtccagcgatttctga

SEQ ID NO: 4190722 - DNA, 25 bp, Homo sapien
cagagccttcctttgtgcctccagt

SEQ ID NO: 4190723 - DNA, 25 bp, Homo sapien
ctctgattgttcagccagagccttc

SEQ ID NO: 4190724 - DNA, 25 bp, Homo sapien
tcctttgtgcctccagtgaagatac

SEQ ID NO: 4190725 - DNA, 25 bp, Homo sapien
tgaattatctctgattgttcagcca

SEQ ID NO: 4190726 - DNA, 25 bp, Homo sapien
gccctagctgaattacagtaagtaa

SEQ ID NO: 4190727 - DNA, 25 bp, Homo sapien
ggcttcttaccctagccctagctga

SEQ ID NO: 4190728 - DNA, 25 bp, Homo sapien
aacaaatgttggctgttgaaaggct

SEQ ID NO: 4190729 - DNA, 25 bp, Homo sapien
gctaagggagaaggataaatacatt

SEQ ID NO: 4190730 - DNA, 25 bp, Homo sapien
caagatgatgacaactattaatgct

SEQ ID NO: 4190731 - DNA, 25 bp, Homo sapien
tgtaatattccacccaaaaataaga

SEQ ID NO: 4190732 - DNA, 25 bp, Homo sapien
gatgatatctatgatttgctctgta

SEQ ID NO: 4190733 - DNA, 25 bp, Homo sapien
tgcacaacagtgtacatatagttaa

SEQ ID NO: 4190734 - DNA, 25 bp, Homo sapien
agcctcccaggttttctactgtcat

SEQ ID NO: 4190735 - DNA, 25 bp, Homo sapien
ggtgacccacctttcaaccaaatgc

SEQ ID NO: 4190736 - DNA, 25 bp, Homo sapien
cctcccaggttttctactgtcattg

SEQ ID NO: 4190737 - DNA, 25 bp, Homo sapien
tcagcctcccaggttttctactgtc

SEQ ID NO: 4190738 - DNA, 25 bp, Homo sapien
gaatcccagtatgaaggtacggcca

SEQ ID NO: 4190739 - DNA, 25 bp, Homo sapien
tcaactccaaatgcgccagtgcagg

SEQ ID NO: 4190740 - DNA, 25 bp, Homo sapien
gccagtgtggccagctaaagtgtga

SEQ ID NO: 4190741 - DNA, 25 bp, Homo sapien
ggtgcttcaagaaaatgactctccc

SEQ ID NO: 4190742 - DNA, 25 bp, Homo sapien
tgggtctcagcaaaacacaactaga

SEQ ID NO: 4190743 - DNA, 25 bp, Homo sapien
tgcagtcacccacacgcggatattg

SEQ ID NO: 4190744 - DNA, 25 bp, Homo sapien
caactgaactgtggctaatctgaat

SEQ ID NO: 4190745 - DNA, 25 bp, Homo sapien
cttaatctgtacagcagccctgggt

SEQ ID NO: 4190746 - DNA, 25 bp, Homo sapien
tccggcctgcgtgacaaagtaagaa

SEQ ID NO: 4190747 - DNA, 25 bp, Homo sapien
gcacagtggcatgggaggatcacat

SEQ ID NO: 4190748 - DNA, 25 bp, Homo sapien
aaaattacccgagcacagtggcatg

SEQ ID NO: 4190749 - DNA, 25 bp, Homo sapien
tggataaagtaaagggattcctcag

SEQ ID NO: 4190750 - DNA, 25 bp, Homo sapien
cagactatcaatcaataggtaaaag

SEQ ID NO: 4190751 - DNA, 25 bp, Homo sapien
ataatcaatgaataagactaaaatg

SEQ ID NO: 4190752 - DNA, 25 bp, Homo sapien
ctagaaacacagactatcaatcaat

SEQ ID NO: 4190753 - DNA, 25 bp, Homo sapien
gaaacacagactatcaatcaatagg

SEQ ID NO: 4190754 - DNA, 25 bp, Homo sapien
agatagtgtcattagcccgctccag

SEQ ID NO: 4190755 - DNA, 25 bp, Homo sapien
ccaagtcattgaccctcatggtgag

SEQ ID NO: 4190756 - DNA, 25 bp, Homo sapien
catggtgaggcgctctatttccaac

SEQ ID NO: 4190757 - DNA, 25 bp, Homo sapien
gacagtcatactggttccaaccaag

SEQ ID NO: 4190758 - DNA, 25 bp, Homo sapien
agcatgttgagtgttagttgccttt

SEQ ID NO: 4190759 - DNA, 25 bp, Homo sapien
gtattctggcctcatgtatgagatt

SEQ ID NO: 4190760 - DNA, 25 bp, Homo sapien
acagcatgttgagtgttagttgcct

SEQ ID NO: 4190761 - DNA, 25 bp, Homo sapien
tgtattctggcctcatgtatgagat

SEQ ID NO: 4190762 - DNA, 25 bp, Homo sapien
ttctgccagagattcttcccgtggc

SEQ ID NO: 4190763 - DNA, 25 bp, Homo sapien
tgagaggtgtacttcttttctgcca

SEQ ID NO: 4190764 - DNA, 25 bp, Homo sapien
cttgagaggtgtacttcttttctgc

SEQ ID NO: 4190765 - DNA, 25 bp, Homo sapien
ttttctgccagagattcttcccgtg

SEQ ID NO: 4190766 - DNA, 25 bp, Homo sapien
aattcaactgggagagcacactgtc

SEQ ID NO: 4190767 - DNA, 25 bp, Homo sapien
gggagagcacactgtctaagtcccc

SEQ ID NO: 4190768 - DNA, 25 bp, Homo sapien
cctcactagtatgggtaaaattcaa

SEQ ID NO: 4190769 - DNA, 25 bp, Homo sapien
gaaggtcctcactagtatgggtaaa

SEQ ID NO: 4190770 - DNA, 25 bp, Homo sapien
cagctgtttacacgttgcactcaca

SEQ ID NO: 4190771 - DNA, 25 bp, Homo sapien
gtttacacgttgcactcacagattc

SEQ ID NO: 4190772 - DNA, 25 bp, Homo sapien
tctgctttgtattcattgttatgtg

SEQ ID NO: 4190773 - DNA, 25 bp, Homo sapien
tcttggctcagctgtttacacgttg

SEQ ID NO: 4190774 - DNA, 25 bp, Homo sapien
gaacctttggtggaagcaatagtga

SEQ ID NO: 4190775 - DNA, 25 bp, Homo sapien
cttctagtgcagaactgtaactttg

SEQ ID NO: 4190776 - DNA, 25 bp, Homo sapien
gctctgagtcgcttttccatgtctg

SEQ ID NO: 4190777 - DNA, 25 bp, Homo sapien
gatatctcgctgatgtaactcctga

SEQ ID NO: 4190778 - DNA, 25 bp, Homo sapien
gaaagatgacgattttctaatttga

SEQ ID NO: 4190779 - DNA, 25 bp, Homo sapien
aaagatgacgattttctaatttgag

SEQ ID NO: 4190780 - DNA, 25 bp, Homo sapien
ctgcaaaaggatctaagttgatctt

SEQ ID NO: 4190781 - DNA, 25 bp, Homo sapien
tgctcacttccagtattgttttacc

SEQ ID NO: 4190782 - DNA, 25 bp, Homo sapien
tgaaggcttggatagtagaaaaact

SEQ ID NO: 4190783 - DNA, 25 bp, Homo sapien
ctgctggagtggagagtcatatttt

SEQ ID NO: 4190784 - DNA, 25 bp, Homo sapien
aaaaataccttcctggccgagcacg

SEQ ID NO: 4190785 - DNA, 25 bp, Homo sapien
caaacagggagcatgttggaaccat

SEQ ID NO: 4190786 - DNA, 25 bp, Homo sapien
taatagggccttttaccatccagaa

SEQ ID NO: 4190787 - DNA, 25 bp, Homo sapien
cctctatggcgtcatgatgtttgga

SEQ ID NO: 4190788 - DNA, 25 bp, Homo sapien
caagtagtgactatgagctacaaaa

SEQ ID NO: 4190789 - DNA, 25 bp, Homo sapien
tgtgaactatctgtgtacaagtagt

SEQ ID NO: 4190790 - DNA, 25 bp, Homo sapien
aatctttcaacaagttgtcaatgcc

SEQ ID NO: 4190791 - DNA, 25 bp, Homo sapien
caacaagttgtcaatgccagataaa

SEQ ID NO: 4190792 - DNA, 25 bp, Homo sapien
actagagtcacttaatctgtacaag

SEQ ID NO: 4190793 - DNA, 25 bp, Homo sapien
tgatctgtgatactgctggttggaa

SEQ ID NO: 4190794 - DNA, 25 bp, Homo sapien
tctgtacaagaatacctgtgatctg

SEQ ID NO: 4190795 - DNA, 25 bp, Homo sapien
taaaaaagaatactagagtcactta

SEQ ID NO: 4190796 - DNA, 25 bp, Homo sapien
ggtctgctagtgaaatctcttttgc

SEQ ID NO: 4190797 - DNA, 25 bp, Homo sapien
ccagctgagatttggtattcatcaa

SEQ ID NO: 4190798 - DNA, 25 bp, Homo sapien
tcctggaggtctgctagtgaaatct

SEQ ID NO: 4190799 - DNA, 25 bp, Homo sapien
atctgagtagaaatctccagctgag

SEQ ID NO: 4190800 - DNA, 25 bp, Homo sapien
gtgtgttggtttaaagatcctgtca

SEQ ID NO: 4190801 - DNA, 25 bp, Homo sapien
gtgttggtttaaagatcctgtcatt

SEQ ID NO: 4190802 - DNA, 25 bp, Homo sapien
gctgtgtgttggtttaaagatcctg

SEQ ID NO: 4190803 - DNA, 25 bp, Homo sapien
tgtgtgttggtttaaagatcctgtc

SEQ ID NO: 4190804 - DNA, 25 bp, Homo sapien
gcctaactaataaggctacaattta

SEQ ID NO: 4190805 - DNA, 25 bp, Homo sapien
ggaaatttgcttaatagcctaacta

SEQ ID NO: 4190806 - DNA, 25 bp, Homo sapien
gaaatgtaggaaatttgcttaatag

SEQ ID NO: 4190807 - DNA, 25 bp, Homo sapien
tgcttaatagcctaactaataaggc

SEQ ID NO: 4190808 - DNA, 25 bp, Homo sapien
gaagatctgttttgtagtgctcagt

SEQ ID NO: 4190809 - DNA, 25 bp, Homo sapien
gggtttatactatccgacgcttgtc

SEQ ID NO: 4190810 - DNA, 25 bp, Homo sapien
tcagggggcttagcaccctagacat

SEQ ID NO: 4190811 - DNA, 25 bp, Homo sapien
tattccatcatgtctgtgctggcca

SEQ ID NO: 4190812 - DNA, 25 bp, Homo sapien
agttttacatagagagtaggaagtc

SEQ ID NO: 4190813 - DNA, 25 bp, Homo sapien
agaatgagttttacatagagagtag

SEQ ID NO: 4190814 - DNA, 25 bp, Homo sapien
acatagagagtaggaagtcaaagac

SEQ ID NO: 4190815 - DNA, 25 bp, Homo sapien
ggcaaagaatgagttttacatagag

SEQ ID NO: 4190816 - DNA, 25 bp, Homo sapien
catactctcagacatagtgtcagaa

SEQ ID NO: 4190817 - DNA, 25 bp, Homo sapien
cattcatactctcagacatagtgtc

SEQ ID NO: 4190818 - DNA, 25 bp, Homo sapien
tggtcattcatactctcagacatag

SEQ ID NO: 4190819 - DNA, 25 bp, Homo sapien
ttcatactctcagacatagtgtcag

SEQ ID NO: 4190820 - DNA, 25 bp, Homo sapien
tctaactagcaatattaaaaggtga

SEQ ID NO: 4190821 - DNA, 25 bp, Homo sapien
ttggttttcatcctaatgacaagag

SEQ ID NO: 4190822 - DNA, 25 bp, Homo sapien
cagatctctccgtttctgacccaaa

SEQ ID NO: 4190823 - DNA, 25 bp, Homo sapien
tctcctccaaattttcagtccacag

SEQ ID NO: 4190824 - DNA, 25 bp, Homo sapien
ccaaaaatctggtagctattgaacc

SEQ ID NO: 4190825 - DNA, 25 bp, Homo sapien
tagttcttcaatatgggcatccaag

SEQ ID NO: 4190826 - DNA, 25 bp, Homo sapien
caagcgctctagaatgtgatgagac

SEQ ID NO: 4190827 - DNA, 25 bp, Homo sapien
taaggctgtgaattgtctcactgtc

SEQ ID NO: 4190828 - DNA, 25 bp, Homo sapien
ccaagatagtgatttttttaagagg

SEQ ID NO: 4190829 - DNA, 25 bp, Homo sapien
tttatttttatttccaagatagtga

SEQ ID NO: 4190830 - DNA, 25 bp, Homo sapien
tatttttatttccaagatagtgatt

SEQ ID NO: 4190831 - DNA, 25 bp, Homo sapien
ttccaagatagtgatttttttaaga

SEQ ID NO: 4190832 - DNA, 25 bp, Homo sapien
ttttaaagagctgctacttcagatg

SEQ ID NO: 4190833 - DNA, 25 bp, Homo sapien
cttattgctggaagaagtcctttaa

SEQ ID NO: 4190834 - DNA, 25 bp, Homo sapien
tgctggaagaagtcctttaaacaaa

SEQ ID NO: 4190835 - DNA, 25 bp, Homo sapien
tcaacttattgctggaagaagtcct

SEQ ID NO: 4190836 - DNA, 25 bp, Homo sapien
atccttatttcaattagtacatagc

SEQ ID NO: 4190837 - DNA, 25 bp, Homo sapien
tgataataaatattcgtatgagaaa

SEQ ID NO: 4190838 - DNA, 25 bp, Homo sapien
tatttcaattagtacatagctattc

SEQ ID NO: 4190839 - DNA, 25 bp, Homo sapien
ttcaattagtacatagctattcaca

SEQ ID NO: 4190840 - DNA, 25 bp, Homo sapien
gtaataaatgtaagggtcactggcc

SEQ ID NO: 4190841 - DNA, 25 bp, Homo sapien
caagtgaagacatcgcataagcagc

SEQ ID NO: 4190842 - DNA, 25 bp, Homo sapien
gatgtggtgcacctcaggaatggca

SEQ ID NO: 4190843 - DNA, 25 bp, Homo sapien
gaagctccctgaattactggtgtga

SEQ ID NO: 4190844 - DNA, 25 bp, Homo sapien
gacagcaatgaggagaaacgttccc

SEQ ID NO: 4190845 - DNA, 25 bp, Homo sapien
cagaaacgggctgcagtctacagat

SEQ ID NO: 4190846 - DNA, 25 bp, Homo sapien
tcaaagcggatagcaaagtctggtc

SEQ ID NO: 4190847 - DNA, 25 bp, Homo sapien
ggacttagcccctgaaagacagaaa

SEQ ID NO: 4190848 - DNA, 25 bp, Homo sapien
tgtgtgttaagacactaactcagat

SEQ ID NO: 4190849 - DNA, 25 bp, Homo sapien
tgtgttaagacactaactcagattt

SEQ ID NO: 4190850 - DNA, 25 bp, Homo sapien
gtgtgttaagacactaactcagatt

SEQ ID NO: 4190851 - DNA, 25 bp, Homo sapien
tccatgctgtggcatcagtagtata

SEQ ID NO: 4190852 - DNA, 25 bp, Homo sapien
tcttcaacacttgtgattgtccatt

SEQ ID NO: 4190853 - DNA, 25 bp, Homo sapien
caatccctagcaactaccaatctat

SEQ ID NO: 4190854 - DNA, 25 bp, Homo sapien
tatttaggattggtattgctgggta

SEQ ID NO: 4190855 - DNA, 25 bp, Homo sapien
aactgccagtggtggtagctcacac

SEQ ID NO: 4190856 - DNA, 25 bp, Homo sapien
agactctaattgagattcttgtttc

SEQ ID NO: 4190857 - DNA, 25 bp, Homo sapien
tggcggattgcttgaatcccgaagt

SEQ ID NO: 4190858 - DNA, 25 bp, Homo sapien
cagtacagattgtatataaagactc

SEQ ID NO: 4190859 - DNA, 25 bp, Homo sapien
aatttcaacaccagttcatgctaaa

SEQ ID NO: 4190860 - DNA, 25 bp, Homo sapien
aaggctgatcctctgaagaggagcc

SEQ ID NO: 4190861 - DNA, 25 bp, Homo sapien
gggctgtcttgaagaccgttgatat

SEQ ID NO: 4190862 - DNA, 25 bp, Homo sapien
gaagaccgttgatatattggaaagt

SEQ ID NO: 4190863 - DNA, 25 bp, Homo sapien
tggtttctttgagcacagttgtcct

SEQ ID NO: 4190864 - DNA, 25 bp, Homo sapien
tcctttcccacgacctgctacaaac

SEQ ID NO: 4190865 - DNA, 25 bp, Homo sapien
cacgacctgctacaaaccaggtcct

SEQ ID NO: 4190866 - DNA, 25 bp, Homo sapien
gacctgctacaaaccaggtcctcat

SEQ ID NO: 4190867 - DNA, 25 bp, Homo sapien
tttcccacgacctgctacaaaccag

SEQ ID NO: 4190868 - DNA, 25 bp, Homo sapien
ggcttcgtcatgtctctcgctgcta

SEQ ID NO: 4190869 - DNA, 25 bp, Homo sapien
tagatccacaaaaacgaggcccagc

SEQ ID NO: 4190870 - DNA, 25 bp, Homo sapien
gaccattctcgtagctgtagtgtga

SEQ ID NO: 4190871 - DNA, 25 bp, Homo sapien
tgagaagctgctgtaaccatggaga

SEQ ID NO: 4190872 - DNA, 25 bp, Homo sapien
gaatatgaggtcaaatgatttttcc

SEQ ID NO: 4190873 - DNA, 25 bp, Homo sapien
tgtcagctatgaggaatatgaggtc

SEQ ID NO: 4190874 - DNA, 25 bp, Homo sapien
gctatgaggaatatgaggtcaaatg

SEQ ID NO: 4190875 - DNA, 25 bp, Homo sapien
tcagctatgaggaatatgaggtcaa

SEQ ID NO: 4190876 - DNA, 25 bp, Homo sapien
cctttgtagggacacaactgactgt

SEQ ID NO: 4190877 - DNA, 25 bp, Homo sapien
tgcagaatcctctagtagttgcccc

SEQ ID NO: 4190878 - DNA, 25 bp, Homo sapien
tgaatctggaaactatctgcttggt

SEQ ID NO: 4190879 - DNA, 25 bp, Homo sapien
taagtccagtctagatgataccaga

SEQ ID NO: 4190880 - DNA, 25 bp, Homo sapien
cagaaggccagtttcgggtgacagt

SEQ ID NO: 4190881 - DNA, 25 bp, Homo sapien
tgatcatgtctaaggcaaccgtggg

SEQ ID NO: 4190882 - DNA, 25 bp, Homo sapien
cagatgggtcgcctgagtctgacaa

SEQ ID NO: 4190883 - DNA, 25 bp, Homo sapien
gatcagcatcgccactcagatgggc

SEQ ID NO: 4190884 - DNA, 25 bp, Homo sapien
tctcactgagaggaagtggtcacag

SEQ ID NO: 4190885 - DNA, 25 bp, Homo sapien
aggaagtggtcacagcagtgtagat

SEQ ID NO: 4190886 - DNA, 25 bp, Homo sapien
ggtcacagcagtgtagatgccctgg

SEQ ID NO: 4190887 - DNA, 25 bp, Homo sapien
ctcactgagaggaagtggtcacagc

SEQ ID NO: 4190888 - DNA, 25 bp, Homo sapien
cttgcttgtgcaacagccactccag

SEQ ID NO: 4190889 - DNA, 25 bp, Homo sapien
gcttgtgcaacagccactccagggg

SEQ ID NO: 4190890 - DNA, 25 bp, Homo sapien
ttgcttgtgcaacagccactccagg

SEQ ID NO: 4190891 - DNA, 25 bp, Homo sapien
tagcctcggacaccgattggatggg

SEQ ID NO: 4190892 - DNA, 25 bp, Homo sapien
tgatgaatgagagctgttgtggatc

SEQ ID NO: 4190893 - DNA, 25 bp, Homo sapien
ggtagcctcggacaccgattggatg

SEQ ID NO: 4190894 - DNA, 25 bp, Homo sapien
ctggtagcctcggacaccgattgga

SEQ ID NO: 4190895 - DNA, 25 bp, Homo sapien
agctggaagatgactgccgaggtct

SEQ ID NO: 4190896 - DNA, 25 bp, Homo sapien
ggccagcggtatgaaggttgaatct

SEQ ID NO: 4190897 - DNA, 25 bp, Homo sapien
cgaggtctgggccagcggtatgaag

SEQ ID NO: 4190898 - DNA, 25 bp, Homo sapien
gctttatgtaacaacattagtcggg

SEQ ID NO: 4190899 - DNA, 25 bp, Homo sapien
gaagcaagttctaaacagacttgaa

SEQ ID NO: 4190900 - DNA, 25 bp, Homo sapien
ttcgagccactagctcgataaggaa

SEQ ID NO: 4190901 - DNA, 25 bp, Homo sapien
gtaaaactgctacccgctccatcag

SEQ ID NO: 4190902 - DNA, 25 bp, Homo sapien
tcaaaggccctcgttgaagtccttg

SEQ ID NO: 4190903 - DNA, 25 bp, Homo sapien
tgacaactgtcagggtccagagagg

SEQ ID NO: 4190904 - DNA, 25 bp, Homo sapien
gacaaagttgcaacagatgggcaca

SEQ ID NO: 4190905 - DNA, 25 bp, Homo sapien
tccagagagggatatgaggcctaaa

SEQ ID NO: 4190906 - DNA, 25 bp, Homo sapien
gaagaccaccttgcaagcacagctg

SEQ ID NO: 4190907 - DNA, 25 bp, Homo sapien
tcttttcatgggagacattgatgga

SEQ ID NO: 4190908 - DNA, 25 bp, Homo sapien
gtcttttcatgggagacattgatgg

SEQ ID NO: 4190909 - DNA, 25 bp, Homo sapien
ttttcatgggagacattgatggagg

SEQ ID NO: 4190910 - DNA, 25 bp, Homo sapien
ttcatgggagacattgatggaggta

SEQ ID NO: 4190911 - DNA, 25 bp, Homo sapien
ccatacagtggaagtggtctgaagg

SEQ ID NO: 4190912 - DNA, 25 bp, Homo sapien
agccatacagtggaagtggtctgaa

SEQ ID NO: 4190913 - DNA, 25 bp, Homo sapien
caacagccatacagtggaagtggtc

SEQ ID NO: 4190914 - DNA, 25 bp, Homo sapien
tacagtggaagtggtctgaaggcat

SEQ ID NO: 4190915 - DNA, 25 bp, Homo sapien
aagctgccaattccagtcctgatca

SEQ ID NO: 4190916 - DNA, 25 bp, Homo sapien
actttaccctacagatgttcagcag

SEQ ID NO: 4190917 - DNA, 25 bp, Homo sapien
gctagtagtcttgaacagcattggt

SEQ ID NO: 4190918 - DNA, 25 bp, Homo sapien
tactatgttccagatctgtgttcag

SEQ ID NO: 4190919 - DNA, 25 bp, Homo sapien
tactgttgggtttactgttactgca

SEQ ID NO: 4190920 - DNA, 25 bp, Homo sapien
tttactgttactgcagtggaatgac

SEQ ID NO: 4190921 - DNA, 25 bp, Homo sapien
cagcatacaggcatgggggcttctt

SEQ ID NO: 4190922 - DNA, 25 bp, Homo sapien
cctggaggtctcatagcaagctcac

SEQ ID NO: 4190923 - DNA, 25 bp, Homo sapien
tgctgtctatgtatgtaatcatctg

SEQ ID NO: 4190924 - DNA, 25 bp, Homo sapien
tatgtatgtaatcatctgacatccc

SEQ ID NO: 4190925 - DNA, 25 bp, Homo sapien
cccattggtaatttcctgcaggagg

SEQ ID NO: 4190926 - DNA, 25 bp, Homo sapien
ctgacatcccattggtaatttcctg

SEQ ID NO: 4190927 - DNA, 25 bp, Homo sapien
caagttgtggttcctctcaggatct

SEQ ID NO: 4190928 - DNA, 25 bp, Homo sapien
gatcttctccacagaaaggagccag

SEQ ID NO: 4190929 - DNA, 25 bp, Homo sapien
agttgtggttcctctcaggatcttc

SEQ ID NO: 4190930 - DNA, 25 bp, Homo sapien
aggatcttctccacagaaaggagcc

SEQ ID NO: 4190931 - DNA, 25 bp, Homo sapien
caaaatgtggtgactctgttaaatc

SEQ ID NO: 4190932 - DNA, 25 bp, Homo sapien
gctacaaaatgtggtgactctgtta

SEQ ID NO: 4190933 - DNA, 25 bp, Homo sapien
gtggtgactctgttaaatctcagga

SEQ ID NO: 4190934 - DNA, 25 bp, Homo sapien
acaagctacaaaatgtggtgactct

SEQ ID NO: 4190935 - DNA, 25 bp, Homo sapien
tgggaacccgccttcagctcctgtg

SEQ ID NO: 4190936 - DNA, 25 bp, Homo sapien
ttgccccaaaggtctgcaagtggca

SEQ ID NO: 4190937 - DNA, 25 bp, Homo sapien
tgcaagtggcataaactgaatcaca

SEQ ID NO: 4190938 - DNA, 25 bp, Homo sapien
tgggagcagtcaaactccataagga

SEQ ID NO: 4190939 - DNA, 25 bp, Homo sapien
atgaatgcagatatcagcatcaccc

SEQ ID NO: 4190940 - DNA, 25 bp, Homo sapien
tgtgactgagcatagtagaggagca

SEQ ID NO: 4190941 - DNA, 25 bp, Homo sapien
tgagcatagtagaggagcatgaatg

SEQ ID NO: 4190942 - DNA, 25 bp, Homo sapien
gatatcagcatcacccagagagacc

SEQ ID NO: 4190943 - DNA, 25 bp, Homo sapien
ggtcagtgggacaactttgatcctc

SEQ ID NO: 4190944 - DNA, 25 bp, Homo sapien
gcaaaattgaagttggctcaccacc

SEQ ID NO: 4190945 - DNA, 25 bp, Homo sapien
tgatcctcacggtccttcaggtaat

SEQ ID NO: 4190946 - DNA, 25 bp, Homo sapien
ctctcacttatcagttccaaagttt

SEQ ID NO: 4190947 - DNA, 25 bp, Homo sapien
aacgagcctgggagagcgcgcgaga

SEQ ID NO: 4190948 - DNA, 25 bp, Homo sapien
ctagctacagcggagcctacgggag

SEQ ID NO: 4190949 - DNA, 25 bp, Homo sapien
tgtcacattgctagctacagcggag

SEQ ID NO: 4190950 - DNA, 25 bp, Homo sapien
agagcgagtgcgtcctggtgtcaca

SEQ ID NO: 4190951 - DNA, 25 bp, Homo sapien
cgagaccaagccgaggcagcagcgc

SEQ ID NO: 4190952 - DNA, 25 bp, Homo sapien
ttctcggtatcctttcgcgctctcg

SEQ ID NO: 4190953 - DNA, 25 bp, Homo sapien
gaccggacttcccggagcgctgcgt

SEQ ID NO: 4190954 - DNA, 25 bp, Homo sapien
cgggtggcttctcggtatcctttcg

SEQ ID NO: 4190955 - DNA, 25 bp, Homo sapien
aggaggagcagtagtagataatcca

SEQ ID NO: 4190956 - DNA, 25 bp, Homo sapien
aggagcagtagtagataatccaggg

SEQ ID NO: 4190957 - DNA, 25 bp, Homo sapien
gcagtagtagataatccagggccat

SEQ ID NO: 4190958 - DNA, 25 bp, Homo sapien
ccatcgcagccactgcggatgccag

SEQ ID NO: 4190959 - DNA, 25 bp, Homo sapien
gctcaagaggcgaaaagggtttcca

SEQ ID NO: 4190960 - DNA, 25 bp, Homo sapien
tggtccccaagggtacggccaatga

SEQ ID NO: 4190961 - DNA, 25 bp, Homo sapien
cacggtgtctttggagcgcgctttc

SEQ ID NO: 4190962 - DNA, 25 bp, Homo sapien
gactttaggtaggaccgaccactca

SEQ ID NO: 4190963 - DNA, 25 bp, Homo sapien
gatagaacccatgcttcagaggctc

SEQ ID NO: 4190964 - DNA, 25 bp, Homo sapien
gaacagtaagacatgcaacacaaac

SEQ ID NO: 4190965 - DNA, 25 bp, Homo sapien
tgtggaatgtgatcccatagaggga

SEQ ID NO: 4190966 - DNA, 25 bp, Homo sapien
cagagggcaacccaatcgagtgtgg

SEQ ID NO: 4190967 - DNA, 25 bp, Homo sapien
tgtaggtaacccaggcaaacacaga

SEQ ID NO: 4190968 - DNA, 25 bp, Homo sapien
tctgagccctctggtagagaggcct

SEQ ID NO: 4190969 - DNA, 25 bp, Homo sapien
tgcctgtgattagagggcccagcct

SEQ ID NO: 4190970 - DNA, 25 bp, Homo sapien
tgtagatcctgagacttgcctgcct

SEQ ID NO: 4190971 - DNA, 25 bp, Homo sapien
caaagatgtcagactgtccagggca

SEQ ID NO: 4190972 - DNA, 25 bp, Homo sapien
ttatggcccaccagacactagctgg

SEQ ID NO: 4190973 - DNA, 25 bp, Homo sapien
catattcctgggagcttgcatgaca

SEQ ID NO: 4190974 - DNA, 25 bp, Homo sapien
tagcacccttgtatcgaggacaaag

SEQ ID NO: 4190975 - DNA, 25 bp, Homo sapien
gagagtcagcctaaccaaagtggag

SEQ ID NO: 4190976 - DNA, 25 bp, Homo sapien
gacaaaaagctactgggccaagcca

SEQ ID NO: 4190977 - DNA, 25 bp, Homo sapien
tggcggcagcttgtgggaacttcta

SEQ ID NO: 4190978 - DNA, 25 bp, Homo sapien
aaaggtctttgaggacatggcggca

SEQ ID NO: 4190979 - DNA, 25 bp, Homo sapien
gggcgctgagagtcccatgggaccc

SEQ ID NO: 4190980 - DNA, 25 bp, Homo sapien
catgggaccccaggatggcttttgc

SEQ ID NO: 4190981 - DNA, 25 bp, Homo sapien
tggcttttgcctgatgttgactcat

SEQ ID NO: 4190982 - DNA, 25 bp, Homo sapien
ttatgggggcgctgagagtcccatg

SEQ ID NO: 4190983 - DNA, 25 bp, Homo sapien
gacagaaggatgcatagaaatagct

SEQ ID NO: 4190984 - DNA, 25 bp, Homo sapien
aagagatttcttaccaggaggcagt

SEQ ID NO: 4190985 - DNA, 25 bp, Homo sapien
caagttgatcactaacggaggtgcc

SEQ ID NO: 4190986 - DNA, 25 bp, Homo sapien
gaggcagtggaataatgtgtcccca

SEQ ID NO: 4190987 - DNA, 25 bp, Homo sapien
caaaggccccagctattactaccat

SEQ ID NO: 4190988 - DNA, 25 bp, Homo sapien
cattaagtggcaaacaacgcttatg

SEQ ID NO: 4190989 - DNA, 25 bp, Homo sapien
cacctttgaggttaagtcataagca

SEQ ID NO: 4190990 - DNA, 25 bp, Homo sapien
gggatcacaatcagactacagcacc

SEQ ID NO: 4190991 - DNA, 25 bp, Homo sapien
caaaatgcggtgcaataaaagcaaa

SEQ ID NO: 4190992 - DNA, 25 bp, Homo sapien
agagtggaaaccttgcagccaggtt

SEQ ID NO: 4190993 - DNA, 25 bp, Homo sapien
gtggaaaccttgcagccaggttcat

SEQ ID NO: 4190994 - DNA, 25 bp, Homo sapien
gcggtgcaataaaagcaaatccttg

SEQ ID NO: 4190995 - DNA, 25 bp, Homo sapien
tgtgggctgctgatggaaacagatt

SEQ ID NO: 4190996 - DNA, 25 bp, Homo sapien
gaaacagattttaaatcatcccttg

SEQ ID NO: 4190997 - DNA, 25 bp, Homo sapien
tctgtgggctgctgatggaaacaga

SEQ ID NO: 4190998 - DNA, 25 bp, Homo sapien
cagattttaaatcatcccttgccat

SEQ ID NO: 4190999 - DNA, 25 bp, Homo sapien
caaggttgtctcctggccattgctc

SEQ ID NO: 4191000 - DNA, 25 bp, Homo sapien
ggaaacaggcctgccaaggttgtct

SEQ ID NO: 4191001 - DNA, 25 bp, Homo sapien
ccttgacaactcttgaatggcatta

SEQ ID NO: 4191002 - DNA, 25 bp, Homo sapien
ctaatgtcactctgtacatatgtgc

SEQ ID NO: 4191003 - DNA, 25 bp, Homo sapien
ttcacacagtttttcctcagctttt

SEQ ID NO: 4191004 - DNA, 25 bp, Homo sapien
cgctcccatcccttccgtaactctt

SEQ ID NO: 4191005 - DNA, 25 bp, Homo sapien
ccttccgtaactctttcacacagtt

SEQ ID NO: 4191006 - DNA, 25 bp, Homo sapien
tcacacagtttttcctcagcttttc

SEQ ID NO: 4191007 - DNA, 25 bp, Homo sapien
aaagtctgttttagggctccatgaa

SEQ ID NO: 4191008 - DNA, 25 bp, Homo sapien
taaagacacccatgcacccatggag

SEQ ID NO: 4191009 - DNA, 25 bp, Homo sapien
aagcagcgttgtaccctcagagaaa

SEQ ID NO: 4191010 - DNA, 25 bp, Homo sapien
gctaacctctttggacccaactcaa

SEQ ID NO: 4191011 - DNA, 25 bp, Homo sapien
cccaaaaggacagcccctgttggct

SEQ ID NO: 4191012 - DNA, 25 bp, Homo sapien
ttttcaccatatcttccacatacat

SEQ ID NO: 4191013 - DNA, 25 bp, Homo sapien
cagtcagtactcctcgagtgactct

SEQ ID NO: 4191014 - DNA, 25 bp, Homo sapien
gagagcagtcagtactcctcgagtg

SEQ ID NO: 4191015 - DNA, 25 bp, Homo sapien
cagttccagccgagagcagtcagta

SEQ ID NO: 4191016 - DNA, 25 bp, Homo sapien
ccagccgagagcagtcagtactcct

SEQ ID NO: 4191017 - DNA, 25 bp, Homo sapien
ctgcccagagttcctccttggcatt

SEQ ID NO: 4191018 - DNA, 25 bp, Homo sapien
gcagcaacacttagggggtagttca

SEQ ID NO: 4191019 - DNA, 25 bp, Homo sapien
ccttcttggaagaacataagatcct

SEQ ID NO: 4191020 - DNA, 25 bp, Homo sapien
tcttggaagaacataagatcctctg

SEQ ID NO: 4191021 - DNA, 25 bp, Homo sapien
gaagaacataagatcctctgtattc

SEQ ID NO: 4191022 - DNA, 25 bp, Homo sapien
tgcttatctgctctttctttgtgct

SEQ ID NO: 4191023 - DNA, 25 bp, Homo sapien
tctgcttatctgctctttctttgtg

SEQ ID NO: 4191024 - DNA, 25 bp, Homo sapien
ctgatttttctgcttatctgctctt

SEQ ID NO: 4191025 - DNA, 25 bp, Homo sapien
tttctgcttatctgctctttctttg

SEQ ID NO: 4191026 - DNA, 25 bp, Homo sapien
tggactcctttacagtctgattaat

SEQ ID NO: 4191027 - DNA, 25 bp, Homo sapien
aatggcaaattctgcttaatgttcc

SEQ ID NO: 4191028 - DNA, 25 bp, Homo sapien
cactacatgtgaaatagccatgtct

SEQ ID NO: 4191029 - DNA, 25 bp, Homo sapien
tcagctttgcatgaaaatggcaaat

SEQ ID NO: 4191030 - DNA, 25 bp, Homo sapien
tgcaggagtcttgccggtcatccag

SEQ ID NO: 4191031 - DNA, 25 bp, Homo sapien
aaggacccaccatcccaatgctgct

SEQ ID NO: 4191032 - DNA, 25 bp, Homo sapien
tgtcaatgcaggagtcttgccggtc

SEQ ID NO: 4191033 - DNA, 25 bp, Homo sapien
aggttgtcaatgcaggagtcttgcc

SEQ ID NO: 4191034 - DNA, 25 bp, Homo sapien
cacccagcagcaactggttgaatat

SEQ ID NO: 4191035 - DNA, 25 bp, Homo sapien
tgtttctggaattagtgtctttggg

SEQ ID NO: 4191036 - DNA, 25 bp, Homo sapien
gtatgttcagcaaaccacccagcag

SEQ ID NO: 4191037 - DNA, 25 bp, Homo sapien
tcctgaccgatggtgaccctgtttc

SEQ ID NO: 4191038 - DNA, 25 bp, Homo sapien
cactttccagtcagctgttcaacag

SEQ ID NO: 4191039 - DNA, 25 bp, Homo sapien
tccatgggtaatgtttgaccagctg

SEQ ID NO: 4191040 - DNA, 25 bp, Homo sapien
cagcctctgagcaaaaggtgcagtt

SEQ ID NO: 4191041 - DNA, 25 bp, Homo sapien
gaatagcaccattgttgtctccctt

SEQ ID NO: 4191042 - DNA, 25 bp, Homo sapien
tccctccatttaccaaggccccatc

SEQ ID NO: 4191043 - DNA, 25 bp, Homo sapien
tccatttaccaaggccccatcattc

SEQ ID NO: 4191044 - DNA, 25 bp, Homo sapien
aaacctggtccaggcgtacacagtc

SEQ ID NO: 4191045 - DNA, 25 bp, Homo sapien
ctggtccaggcgtacacagtccagg

SEQ ID NO: 4191046 - DNA, 25 bp, Homo sapien
ccacacagcgcagagtgacaggcat

SEQ ID NO: 4191047 - DNA, 25 bp, Homo sapien
aaaagccctattgccctccacacag

SEQ ID NO: 4191048 - DNA, 25 bp, Homo sapien
ggccagtgggttcacttgggaactc

SEQ ID NO: 4191049 - DNA, 25 bp, Homo sapien
ttgggccagacaatgggccagtggg

SEQ ID NO: 4191050 - DNA, 25 bp, Homo sapien
tttccacagtggggggcaaacaggc

SEQ ID NO: 4191051 - DNA, 25 bp, Homo sapien
tccacagtggggggcaaacaggcat

SEQ ID NO: 4191052 - DNA, 25 bp, Homo sapien
ttccacagtggggggcaaacaggca

SEQ ID NO: 4191053 - DNA, 25 bp, Homo sapien
ctcttgcagtgaatgcctctgtgca

SEQ ID NO: 4191054 - DNA, 25 bp, Homo sapien
tttggaggaatttgacgatccaggt

SEQ ID NO: 4191055 - DNA, 25 bp, Homo sapien
tcttgcagtgaatgcctctgtgcat

SEQ ID NO: 4191056 - DNA, 25 bp, Homo sapien
aatttgacgatccaggtagagctcc

SEQ ID NO: 4191057 - DNA, 25 bp, Homo sapien
tcctcatctgcaggatgggcctaga

SEQ ID NO: 4191058 - DNA, 25 bp, Homo sapien
tgtgctcctcatctgcaggatgggc

SEQ ID NO: 4191059 - DNA, 25 bp, Homo sapien
ctgtgctcctcatctgcaggatggg

SEQ ID NO: 4191060 - DNA, 25 bp, Homo sapien
catctgcaggatgggcctagagcta

SEQ ID NO: 4191061 - DNA, 25 bp, Homo sapien
catgcaggtgatgaagtggcaaggg

SEQ ID NO: 4191062 - DNA, 25 bp, Homo sapien
caggtgatgaagtggcaagggtggc

SEQ ID NO: 4191063 - DNA, 25 bp, Homo sapien
tgcaggtgatgaagtggcaagggtg

SEQ ID NO: 4191064 - DNA, 25 bp, Homo sapien
gtgatgaagtggcaagggtggccac

SEQ ID NO: 4191065 - DNA, 25 bp, Homo sapien
gcccagctctgcagtagccgttctg

SEQ ID NO: 4191066 - DNA, 25 bp, Homo sapien
gcagtagccgttctggtgtccatta

SEQ ID NO: 4191067 - DNA, 25 bp, Homo sapien
aggattggccgtccagcccagctct

SEQ ID NO: 4191068 - DNA, 25 bp, Homo sapien
cccggacgcaggattggccgtccag

SEQ ID NO: 4191069 - DNA, 25 bp, Homo sapien
gcaggactgaaagacgaatggtttg

SEQ ID NO: 4191070 - DNA, 25 bp, Homo sapien
gactgaaagacgaatggtttgatac

SEQ ID NO: 4191071 - DNA, 25 bp, Homo sapien
caggactgaaagacgaatggtttga

SEQ ID NO: 4191072 - DNA, 25 bp, Homo sapien
gaaagacgaatggtttgatactcac

SEQ ID NO: 4191073 - DNA, 25 bp, Homo sapien
tagcccctgatttagattaaaccta

SEQ ID NO: 4191074 - DNA, 25 bp, Homo sapien
taaaggccttcaatgaaaggcaggg

SEQ ID NO: 4191075 - DNA, 25 bp, Homo sapien
aaaggccttcaatgaaaggcagggt

SEQ ID NO: 4191076 - DNA, 25 bp, Homo sapien
accaggtagcccctgatttagatta

SEQ ID NO: 4191077 - DNA, 25 bp, Homo sapien
ctcagtgtcaatttcctccccaggg

SEQ ID NO: 4191078 - DNA, 25 bp, Homo sapien
cactcagagctaattccagggcttt

SEQ ID NO: 4191079 - DNA, 25 bp, Homo sapien
cagacagacgtcttaggaccaagaa

SEQ ID NO: 4191080 - DNA, 25 bp, Homo sapien
catgagagggattcaagccaagcca

SEQ ID NO: 4191081 - DNA, 25 bp, Homo sapien
caggcagcagcattgcgtaccaggc

SEQ ID NO: 4191082 - DNA, 25 bp, Homo sapien
aggcagcagcattgcgtaccaggcc

SEQ ID NO: 4191083 - DNA, 25 bp, Homo sapien
ccaggcagcagcattgcgtaccagg

SEQ ID NO: 4191084 - DNA, 25 bp, Homo sapien
tgatatatgcgtgcttgggcgtgtg

SEQ ID NO: 4191085 - DNA, 25 bp, Homo sapien
atatgcgtgcttgggcgtgtgtgtg

SEQ ID NO: 4191086 - DNA, 25 bp, Homo sapien
ctgtgcatctatcattgatatatgc

SEQ ID NO: 4191087 - DNA, 25 bp, Homo sapien
gcatctatcattgatatatgcgtgc

SEQ ID NO: 4191088 - DNA, 25 bp, Homo sapien
tatgcttgatttacgtcccagatgt

SEQ ID NO: 4191089 - DNA, 25 bp, Homo sapien
caatatgcttgatttacgtcccaga

SEQ ID NO: 4191090 - DNA, 25 bp, Homo sapien
cttgatttacgtcccagatgtgctg

SEQ ID NO: 4191091 - DNA, 25 bp, Homo sapien
cttccaatatgcttgatttacgtcc

SEQ ID NO: 4191092 - DNA, 25 bp, Homo sapien
ctgtgaacaagaagcccactggagc

SEQ ID NO: 4191093 - DNA, 25 bp, Homo sapien
tggcattgcccaatccggggagatg

SEQ ID NO: 4191094 - DNA, 25 bp, Homo sapien
ggaccataatggagctttcttggca

SEQ ID NO: 4191095 - DNA, 25 bp, Homo sapien
gctattttgcaaacagttgctgcca

SEQ ID NO: 4191096 - DNA, 25 bp, Homo sapien
aactgctgttgagggaggctgctat

SEQ ID NO: 4191097 - DNA, 25 bp, Homo sapien
tttctgcccctcgatgttgttgctg

SEQ ID NO: 4191098 - DNA, 25 bp, Homo sapien
catttctgcccctcgatgttgttgc

SEQ ID NO: 4191099 - DNA, 25 bp, Homo sapien
ccatttctgcccctcgatgttgttg

SEQ ID NO: 4191100 - DNA, 25 bp, Homo sapien
tctgcccctcgatgttgttgctgat

SEQ ID NO: 4191101 - DNA, 25 bp, Homo sapien
tggcctttggacaatacagtagcct

SEQ ID NO: 4191102 - DNA, 25 bp, Homo sapien
tttggacaatacagtagccttctca

SEQ ID NO: 4191103 - DNA, 25 bp, Homo sapien
gacaatacagtagccttctcagaat

SEQ ID NO: 4191104 - DNA, 25 bp, Homo sapien
aatacagtagccttctcagaatttg

SEQ ID NO: 4191105 - DNA, 25 bp, Homo sapien
cagccagagttcttgacacacccaa

SEQ ID NO: 4191106 - DNA, 25 bp, Homo sapien
ttccagttgggtctcagtacacaca

SEQ ID NO: 4191107 - DNA, 25 bp, Homo sapien
aaggagctctgatgtgggcttcacc

SEQ ID NO: 4191108 - DNA, 25 bp, Homo sapien
ggcttcaccttagcactgagacagt

SEQ ID NO: 4191109 - DNA, 25 bp, Homo sapien
aaatagagagtgagaatacaaaaat

SEQ ID NO: 4191110 - DNA, 25 bp, Homo sapien
aaaatagagagtgagaatacaaaaa

SEQ ID NO: 4191111 - DNA, 25 bp, Homo sapien
caaaatagagagtgagaatacaaaa

SEQ ID NO: 4191112 - DNA, 25 bp, Homo sapien
atagagagtgagaatacaaaaatag

SEQ ID NO: 4191113 - DNA, 25 bp, Homo sapien
ctgtacatagcaggccacaggcaca

SEQ ID NO: 4191114 - DNA, 25 bp, Homo sapien
tctctgtgtagatgcgatgggcccc

SEQ ID NO: 4191115 - DNA, 25 bp, Homo sapien
caggttttcatcgtagccactgact

SEQ ID NO: 4191116 - DNA, 25 bp, Homo sapien
ggctgacttcttggtggcaatgaca

SEQ ID NO: 4191117 - DNA, 25 bp, Homo sapien
ttgcaggatcctgggacattaggga

SEQ ID NO: 4191118 - DNA, 25 bp, Homo sapien
attccgagtaagaggcccaaagctc

SEQ ID NO: 4191119 - DNA, 25 bp, Homo sapien
cattccgagtaagaggcccaaagct

SEQ ID NO: 4191120 - DNA, 25 bp, Homo sapien
ccattccgagtaagaggcccaaagc

SEQ ID NO: 4191121 - DNA, 25 bp, Homo sapien
accattccgagtaagaggcccaaag

SEQ ID NO: 4191122 - DNA, 25 bp, Homo sapien
cagtagagtttgatgggcacgtcca

SEQ ID NO: 4191123 - DNA, 25 bp, Homo sapien
ttctcaggctcatagccaggcttgc

SEQ ID NO: 4191124 - DNA, 25 bp, Homo sapien
ttgcaggtgcatcgcccaataggca

SEQ ID NO: 4191125 - DNA, 25 bp, Homo sapien
tgccccgagcaatcaccagagatgt

SEQ ID NO: 4191126 - DNA, 25 bp, Homo sapien
caagctacacggacagcagaaccct

SEQ ID NO: 4191127 - DNA, 25 bp, Homo sapien
tgacaagctacacggacagcagaac

SEQ ID NO: 4191128 - DNA, 25 bp, Homo sapien
acaggaggtaactgacaagctacac

SEQ ID NO: 4191129 - DNA, 25 bp, Homo sapien
ggtaactgacaagctacacggacag

SEQ ID NO: 4191130 - DNA, 25 bp, Homo sapien
cacttttgctcgaaggtccccttgc

SEQ ID NO: 4191131 - DNA, 25 bp, Homo sapien
ccaaaaccattgtgaatggccacca

SEQ ID NO: 4191132 - DNA, 25 bp, Homo sapien
gcagcactccgtgagcaccaaaaat

SEQ ID NO: 4191133 - DNA, 25 bp, Homo sapien
tctgccctcatgatgattgtgctaa

SEQ ID NO: 4191134 - DNA, 25 bp, Homo sapien
taagtgggctacaccaaaaccattg

SEQ ID NO: 4191135 - DNA, 25 bp, Homo sapien
caccacccacgctcttcacaacaga

SEQ ID NO: 4191136 - DNA, 25 bp, Homo sapien
gctgtgctgtctaattggtctccag

SEQ ID NO: 4191137 - DNA, 25 bp, Homo sapien
tggctgtgctgtctaattggtctcc

SEQ ID NO: 4191138 - DNA, 25 bp, Homo sapien
tgctgtctaattggtctccaggtgc

SEQ ID NO: 4191139 - DNA, 25 bp, Homo sapien
ggactaaaccacatctccccagact

SEQ ID NO: 4191140 - DNA, 25 bp, Homo sapien
taaaccacatctccccagactttgc

SEQ ID NO: 4191141 - DNA, 25 bp, Homo sapien
actcttctggactaaaccacatctc

SEQ ID NO: 4191142 - DNA, 25 bp, Homo sapien
ttctggactaaaccacatctcccca

SEQ ID NO: 4191143 - DNA, 25 bp, Homo sapien
tcttatggatagcttctgggaccca

SEQ ID NO: 4191144 - DNA, 25 bp, Homo sapien
gatgagatactctctgtcttatgga

SEQ ID NO: 4191145 - DNA, 25 bp, Homo sapien
cctgcagcaggctaggtgggtacaa

SEQ ID NO: 4191146 - DNA, 25 bp, Homo sapien
ggtacaaaggaagatgagatactct

SEQ ID NO: 4191147 - DNA, 25 bp, Homo sapien
ctgagtcttggatttaggaagatgt

SEQ ID NO: 4191148 - DNA, 25 bp, Homo sapien
ctgtgactgagtcttggatttagga

SEQ ID NO: 4191149 - DNA, 25 bp, Homo sapien
gagtcttggatttaggaagatgtat

SEQ ID NO: 4191150 - DNA, 25 bp, Homo sapien
tgactgagtcttggatttaggaaga

SEQ ID NO: 4191151 - DNA, 25 bp, Homo sapien
ggccaaaggtttcctgtcatctcag

SEQ ID NO: 4191152 - DNA, 25 bp, Homo sapien
tcatctcagtgtggtttgatcacct

SEQ ID NO: 4191153 - DNA, 25 bp, Homo sapien
tattagaaagttagcaagcaggcca

SEQ ID NO: 4191154 - DNA, 25 bp, Homo sapien
gcccagtgctgcctttattgagtca

SEQ ID NO: 4191155 - DNA, 25 bp, Homo sapien
ggctcctccaatgtcaatcctgctg

SEQ ID NO: 4191156 - DNA, 25 bp, Homo sapien
gtcaatcctgctgtctaaggatcct

SEQ ID NO: 4191157 - DNA, 25 bp, Homo sapien
tcctgctgtctaaggatcctccaaa

SEQ ID NO: 4191158 - DNA, 25 bp, Homo sapien
taaggatcctccaaaaaggcctgga

SEQ ID NO: 4191159 - DNA, 25 bp, Homo sapien
ccaggatgaaagttgccaacacagt

SEQ ID NO: 4191160 - DNA, 25 bp, Homo sapien
aacacagtagtcactagcatatgca

SEQ ID NO: 4191161 - DNA, 25 bp, Homo sapien
gatgaaagttgccaacacagtagtc

SEQ ID NO: 4191162 - DNA, 25 bp, Homo sapien
tgaaagttgccaacacagtagtcac

SEQ ID NO: 4191163 - DNA, 25 bp, Homo sapien
aaaaacttgtccagacttccatcaa

SEQ ID NO: 4191164 - DNA, 25 bp, Homo sapien
gcaatactgctgagagagtaaacac

SEQ ID NO: 4191165 - DNA, 25 bp, Homo sapien
cacctgtctatgaggttttgggtca

SEQ ID NO: 4191166 - DNA, 25 bp, Homo sapien
gaccaaagatgcagccatcacacag

SEQ ID NO: 4191167 - DNA, 25 bp, Homo sapien
tgtgcatgcaaataacagggactct

SEQ ID NO: 4191168 - DNA, 25 bp, Homo sapien
agctgtgcatgcaaataacagggac

SEQ ID NO: 4191169 - DNA, 25 bp, Homo sapien
ctgtgcatgcaaataacagggactc

SEQ ID NO: 4191170 - DNA, 25 bp, Homo sapien
gctgtgcatgcaaataacagggact

SEQ ID NO: 4191171 - DNA, 25 bp, Homo sapien
aggcttggcaatgtcgtcctgggac

SEQ ID NO: 4191172 - DNA, 25 bp, Homo sapien
tgcgtggttggctctctcagaggca

SEQ ID NO: 4191173 - DNA, 25 bp, Homo sapien
catgtgtcctttgcgcacagagagc

SEQ ID NO: 4191174 - DNA, 25 bp, Homo sapien
ggccccacagcctatggcttgaaat

SEQ ID NO: 4191175 - DNA, 25 bp, Homo sapien
caggaagtcagccttgaggactggc

SEQ ID NO: 4191176 - DNA, 25 bp, Homo sapien
caagtggtccctcattacgtatata

SEQ ID NO: 4191177 - DNA, 25 bp, Homo sapien
tgattccttcaggacaaggcacctt

SEQ ID NO: 4191178 - DNA, 25 bp, Homo sapien
cagtgacagtcctgattgcccagta

SEQ ID NO: 4191179 - DNA, 25 bp, Homo sapien
gcagcccagggtccttttgttccta

SEQ ID NO: 4191180 - DNA, 25 bp, Homo sapien
ccagaaattctttccctcttgaggt

SEQ ID NO: 4191181 - DNA, 25 bp, Homo sapien
gttaatctgtgattggctgtgacca

SEQ ID NO: 4191182 - DNA, 25 bp, Homo sapien
cctaaagacagggggttaatctgtg

SEQ ID NO: 4191183 - DNA, 25 bp, Homo sapien
ctgcttgagcattcataggcctcca

SEQ ID NO: 4191184 - DNA, 25 bp, Homo sapien
cggctgtgacttgagaccgaatctt

SEQ ID NO: 4191185 - DNA, 25 bp, Homo sapien
gcttgagcattcataggcctccagc

SEQ ID NO: 4191186 - DNA, 25 bp, Homo sapien
tgcggctgtgacttgagaccgaatc

SEQ ID NO: 4191187 - DNA, 25 bp, Homo sapien
ttcataggggtgaacctgctcaggg

SEQ ID NO: 4191188 - DNA, 25 bp, Homo sapien
gcccatagtactcagcagtctggac

SEQ ID NO: 4191189 - DNA, 25 bp, Homo sapien
cttcttgcccatagtactcagcagt

SEQ ID NO: 4191190 - DNA, 25 bp, Homo sapien
ttgcccatagtactcagcagtctgg

SEQ ID NO: 4191191 - DNA, 25 bp, Homo sapien
caactatgataccacagtatgcagc

SEQ ID NO: 4191192 - DNA, 25 bp, Homo sapien
cacacgagtgcttgtccttgcaaca

SEQ ID NO: 4191193 - DNA, 25 bp, Homo sapien
tccaagtctgaatacccacagcttg

SEQ ID NO: 4191194 - DNA, 25 bp, Homo sapien
gcttgcaactcaatcacacgagtgc

SEQ ID NO: 4191195 - DNA, 25 bp, Homo sapien
acctctctgtaagctgtcacttctt

SEQ ID NO: 4191196 - DNA, 25 bp, Homo sapien
tgacctctctgtaagctgtcacttc

SEQ ID NO: 4191197 - DNA, 25 bp, Homo sapien
cctctcttgacctctctgtaagctg

SEQ ID NO: 4191198 - DNA, 25 bp, Homo sapien
tcttgacctctctgtaagctgtcac

SEQ ID NO: 4191199 - DNA, 25 bp, Homo sapien
caaaggttacttgctctaatttgcc

SEQ ID NO: 4191200 - DNA, 25 bp, Homo sapien
ggttacttgctctaatttgcccagc

SEQ ID NO: 4191201 - DNA, 25 bp, Homo sapien
cagctgccatctgcaaaggttactt

SEQ ID NO: 4191202 - DNA, 25 bp, Homo sapien
catctgcaaaggttacttgctctaa

SEQ ID NO: 4191203 - DNA, 25 bp, Homo sapien
tgaaagttgcaatttggaatgacag

SEQ ID NO: 4191204 - DNA, 25 bp, Homo sapien
cattctccttgtgaaagttgcaatt

SEQ ID NO: 4191205 - DNA, 25 bp, Homo sapien
tctgccaaggtactgattcattctc

SEQ ID NO: 4191206 - DNA, 25 bp, Homo sapien
actgggaaactcaggcacctgtctg

SEQ ID NO: 4191207 - DNA, 25 bp, Homo sapien
gctgtgcagttcgatgcttttccaa

SEQ ID NO: 4191208 - DNA, 25 bp, Homo sapien
taacaagaagacctgcagatgccaa

SEQ ID NO: 4191209 - DNA, 25 bp, Homo sapien
acagggtcacgggaatgggtcctct

SEQ ID NO: 4191210 - DNA, 25 bp, Homo sapien
gatgccaatggacctttaacagggt

SEQ ID NO: 4191211 - DNA, 25 bp, Homo sapien
caccaggaagacaatgcccacaaca

SEQ ID NO: 4191212 - DNA, 25 bp, Homo sapien
agatggaggaagtcagggaagagtt

SEQ ID NO: 4191213 - DNA, 25 bp, Homo sapien
ctaagatggaggaagtcagggaaga

SEQ ID NO: 4191214 - DNA, 25 bp, Homo sapien
taagatggaggaagtcagggaagag

SEQ ID NO: 4191215 - DNA, 25 bp, Homo sapien
aagatggaggaagtcagggaagagt

SEQ ID NO: 4191216 - DNA, 25 bp, Homo sapien
ggatctgctgaaagaagcccgatgt

SEQ ID NO: 4191217 - DNA, 25 bp, Homo sapien
tcatgcacagtggtagccaccagcc

SEQ ID NO: 4191218 - DNA, 25 bp, Homo sapien
acactggtgtgcaggctaactgaca

SEQ ID NO: 4191219 - DNA, 25 bp, Homo sapien
agtacaataacttggtaactgacag

SEQ ID NO: 4191220 - DNA, 25 bp, Homo sapien
aggaagaatgtggctgtgatgtgct

SEQ ID NO: 4191221 - DNA, 25 bp, Homo sapien
cctctgccacattcatcaactgtga

SEQ ID NO: 4191222 - DNA, 25 bp, Homo sapien
caccctctgccacattcatcaactg

SEQ ID NO: 4191223 - DNA, 25 bp, Homo sapien
tcaccctctgccacattcatcaact

SEQ ID NO: 4191224 - DNA, 25 bp, Homo sapien
ccctctgccacattcatcaactgtg

SEQ ID NO: 4191225 - DNA, 25 bp, Homo sapien
aaactgactccgtgctgttagaggg

SEQ ID NO: 4191226 - DNA, 25 bp, Homo sapien
ggagcccactgggttccccaagcag

SEQ ID NO: 4191227 - DNA, 25 bp, Homo sapien
tatgaacttgttcagaagcctcctg

SEQ ID NO: 4191228 - DNA, 25 bp, Homo sapien
gggcaagttcttagccctccttgcc

SEQ ID NO: 4191229 - DNA, 25 bp, Homo sapien
ctactgaactgtcatcatcacctgc

SEQ ID NO: 4191230 - DNA, 25 bp, Homo sapien
actgaactgtcatcatcacctgctc

SEQ ID NO: 4191231 - DNA, 25 bp, Homo sapien
tactgaactgtcatcatcacctgct

SEQ ID NO: 4191232 - DNA, 25 bp, Homo sapien
tcatttttcttggcatatccctgag

SEQ ID NO: 4191233 - DNA, 25 bp, Homo sapien
tttcatttttcttggcatatccctg

SEQ ID NO: 4191234 - DNA, 25 bp, Homo sapien
ttatttcatttttcttggcatatcc

SEQ ID NO: 4191235 - DNA, 25 bp, Homo sapien
tatttcatttttcttggcatatccc

SEQ ID NO: 4191236 - DNA, 25 bp, Homo sapien
cccaccgtcagaggtcattaaggat

SEQ ID NO: 4191237 - DNA, 25 bp, Homo sapien
tccatcccaccgtcagaggtcatta

SEQ ID NO: 4191238 - DNA, 25 bp, Homo sapien
gattcttaaggcagctcggtcctgg

SEQ ID NO: 4191239 - DNA, 25 bp, Homo sapien
ttgggcctggctgattctggattct

SEQ ID NO: 4191240 - DNA, 25 bp, Homo sapien
tgcatgagtattggcttgaatcact

SEQ ID NO: 4191241 - DNA, 25 bp, Homo sapien
ccatcaagctttgataatgcatgag

SEQ ID NO: 4191242 - DNA, 25 bp, Homo sapien
gagtattggcttgaatcactaagat

SEQ ID NO: 4191243 - DNA, 25 bp, Homo sapien
gataatgcatgagtattggcttgaa

SEQ ID NO: 4191244 - DNA, 25 bp, Homo sapien
tagcaggccaactggacagccagta

SEQ ID NO: 4191245 - DNA, 25 bp, Homo sapien
aggccaactggacagccagtagctg

SEQ ID NO: 4191246 - DNA, 25 bp, Homo sapien
atctcctctatagcaggccaactgg

SEQ ID NO: 4191247 - DNA, 25 bp, Homo sapien
tctatagcaggccaactggacagcc

SEQ ID NO: 4191248 - DNA, 25 bp, Homo sapien
ttaagttgttcagacagcagtagca

SEQ ID NO: 4191249 - DNA, 25 bp, Homo sapien
gctattaagttgttcagacagcagt

SEQ ID NO: 4191250 - DNA, 25 bp, Homo sapien
tattaagttgttcagacagcagtag

SEQ ID NO: 4191251 - DNA, 25 bp, Homo sapien
tgtgctattaagttgttcagacagc

SEQ ID NO: 4191252 - DNA, 25 bp, Homo sapien
agggctggagcgcatttacttctac

SEQ ID NO: 4191253 - DNA, 25 bp, Homo sapien
ggtgccaagaatacgaagcatctat

SEQ ID NO: 4191254 - DNA, 25 bp, Homo sapien
tgagagtagttgtagaaggtgccaa

SEQ ID NO: 4191255 - DNA, 25 bp, Homo sapien
tacgaagcatctatgtgggccatgg

SEQ ID NO: 4191256 - DNA, 25 bp, Homo sapien
cacttctggagggtcaaagtccgct

SEQ ID NO: 4191257 - DNA, 25 bp, Homo sapien
taaccggtccgacaggtgcagatgg

SEQ ID NO: 4191258 - DNA, 25 bp, Homo sapien
cgctcggtaataaccggtccgacag

SEQ ID NO: 4191259 - DNA, 25 bp, Homo sapien
gagggtcaaagtccgctcggtaata

SEQ ID NO: 4191260 - DNA, 25 bp, Homo sapien
gcccagagccattactagacactta

SEQ ID NO: 4191261 - DNA, 25 bp, Homo sapien
agcccagagccattactagacactt

SEQ ID NO: 4191262 - DNA, 25 bp, Homo sapien
cccagagccattactagacacttac

SEQ ID NO: 4191263 - DNA, 25 bp, Homo sapien
cagcccagagccattactagacact

SEQ ID NO: 4191264 - DNA, 25 bp, Homo sapien
acaccagcccctttgacaccttgag

SEQ ID NO: 4191265 - DNA, 25 bp, Homo sapien
accagcccctttgacaccttgaggt

SEQ ID NO: 4191266 - DNA, 25 bp, Homo sapien
cagggtgcgcaaagcaaggcctcct

SEQ ID NO: 4191267 - DNA, 25 bp, Homo sapien
gctgagaatgctcagggtgcgcaaa

SEQ ID NO: 4191268 - DNA, 25 bp, Homo sapien
gaacaggcatgattctggtaccaga

SEQ ID NO: 4191269 - DNA, 25 bp, Homo sapien
agtccagtgaacaggcatgattctg

SEQ ID NO: 4191270 - DNA, 25 bp, Homo sapien
ctttccattattgctcatggagtac

SEQ ID NO: 4191271 - DNA, 25 bp, Homo sapien
tagatgacaatctctttgtgagaac

SEQ ID NO: 4191272 - DNA, 25 bp, Homo sapien
agtggctttccattattgctcatgg

SEQ ID NO: 4191273 - DNA, 25 bp, Homo sapien
cagtagatgacaatctctttgtgag

SEQ ID NO: 4191274 - DNA, 25 bp, Homo sapien
tgcattctgtttaaagggctaagga

SEQ ID NO: 4191275 - DNA, 25 bp, Homo sapien
agatgggtctccgatgtcctccagg

SEQ ID NO: 4191276 - DNA, 25 bp, Homo sapien
gaagcctctctgatctgttgccacg

SEQ ID NO: 4191277 - DNA, 25 bp, Homo sapien
gttacttctgatgaatgcattctgt

SEQ ID NO: 4191278 - DNA, 25 bp, Homo sapien
gcaaatattaaatcgggttctatta

SEQ ID NO: 4191279 - DNA, 25 bp, Homo sapien
cagaaagcaaatattaaatcgggtt

SEQ ID NO: 4191280 - DNA, 25 bp, Homo sapien
gcagaaagcaaatattaaatcgggt

SEQ ID NO: 4191281 - DNA, 25 bp, Homo sapien
aagcaaatattaaatcgggttctat

SEQ ID NO: 4191282 - DNA, 25 bp, Homo sapien
cagctgaacgaagacatgtgtaaag

SEQ ID NO: 4191283 - DNA, 25 bp, Homo sapien
tgttgaatcagtcaacagcaagcag

SEQ ID NO: 4191284 - DNA, 25 bp, Homo sapien
aggattctgtgttgaatcagtcaac

SEQ ID NO: 4191285 - DNA, 25 bp, Homo sapien
tctgtgttgaatcagtcaacagcaa

SEQ ID NO: 4191286 - DNA, 25 bp, Homo sapien
gcccggcactttttgcagatgatgt

SEQ ID NO: 4191287 - DNA, 25 bp, Homo sapien
tgctgatggagacgcggcactccgt

SEQ ID NO: 4191288 - DNA, 25 bp, Homo sapien
cattgtcgtcacagcgggagcagct

SEQ ID NO: 4191289 - DNA, 25 bp, Homo sapien
tgccactccagaatgatggacgtct

SEQ ID NO: 4191290 - DNA, 25 bp, Homo sapien
gagccagccacacatccaaacagga

SEQ ID NO: 4191291 - DNA, 25 bp, Homo sapien
gccagccacacatccaaacaggagc

SEQ ID NO: 4191292 - DNA, 25 bp, Homo sapien
gccacacatccaaacaggagcacag

SEQ ID NO: 4191293 - DNA, 25 bp, Homo sapien
agccagccacacatccaaacaggag

SEQ ID NO: 4191294 - DNA, 25 bp, Homo sapien
gtacacgggcaggatgggtgtggct

SEQ ID NO: 4191295 - DNA, 25 bp, Homo sapien
gcactaggtcctattctggcttgga

SEQ ID NO: 4191296 - DNA, 25 bp, Homo sapien
ttctcagaagcgcaacactacacct

SEQ ID NO: 4191297 - DNA, 25 bp, Homo sapien
caggatttgttgagctcaggctgga

SEQ ID NO: 4191298 - DNA, 25 bp, Homo sapien
gaaaatcccctagtctgcagctcat

SEQ ID NO: 4191299 - DNA, 25 bp, Homo sapien
taaataagtgcatgaacggactcgt

SEQ ID NO: 4191300 - DNA, 25 bp, Homo sapien
gtaaccccgggagagagattgctca

SEQ ID NO: 4191301 - DNA, 25 bp, Homo sapien
tgttctgagctatgcatcccacaag

SEQ ID NO: 4191302 - DNA, 25 bp, Homo sapien
ggaaatactgctaacaaaggctgcc

SEQ ID NO: 4191303 - DNA, 25 bp, Homo sapien
agtcttctggcctgaaggtccagag

SEQ ID NO: 4191304 - DNA, 25 bp, Homo sapien
gtcttctggcctgaaggtccagagc

SEQ ID NO: 4191305 - DNA, 25 bp, Homo sapien
gagtcttctggcctgaaggtccaga

SEQ ID NO: 4191306 - DNA, 25 bp, Homo sapien
gcactgacttggtgcatgatgggaa

SEQ ID NO: 4191307 - DNA, 25 bp, Homo sapien
tgctccggctgtggccatgacaagg

SEQ ID NO: 4191308 - DNA, 25 bp, Homo sapien
atagtaccggatctcatagtccagg

SEQ ID NO: 4191309 - DNA, 25 bp, Homo sapien
cttctcatagtaccggatctcatag

SEQ ID NO: 4191310 - DNA, 25 bp, Homo sapien
gccagtgaactatccagattgcagg

SEQ ID NO: 4191311 - DNA, 25 bp, Homo sapien
ctctccttagttggcacagaaagtg

SEQ ID NO: 4191312 - DNA, 25 bp, Homo sapien
caaccatccatggaacagtggctgg

SEQ ID NO: 4191313 - DNA, 25 bp, Homo sapien
caagcttgcaggtagagctggctca

SEQ ID NO: 4191314 - DNA, 25 bp, Homo sapien
ttgccgtagccagcaacagtgcggg

SEQ ID NO: 4191315 - DNA, 25 bp, Homo sapien
tggaagcacatcttgccactgaact

SEQ ID NO: 4191316 - DNA, 25 bp, Homo sapien
cgtcagtcagagtctggaagcacat

SEQ ID NO: 4191317 - DNA, 25 bp, Homo sapien
gtaccacatataccatgccaggccg

SEQ ID NO: 4191318 - DNA, 25 bp, Homo sapien
gatagagatggccaccaaggacaca

SEQ ID NO: 4191319 - DNA, 25 bp, Homo sapien
atggccaccaaggacacaacgaaca

SEQ ID NO: 4191320 - DNA, 25 bp, Homo sapien
agccagcaatcaggggcagctgctc

SEQ ID NO: 4191321 - DNA, 25 bp, Homo sapien
ctgctacagacgatagagatggcca

SEQ ID NO: 4191322 - DNA, 25 bp, Homo sapien
tgctggagcttatcgctgtacacag

SEQ ID NO: 4191323 - DNA, 25 bp, Homo sapien
tgtaatgctggagcttatcgctgta

SEQ ID NO: 4191324 - DNA, 25 bp, Homo sapien
gagcttatcgctgtacacagcctct

SEQ ID NO: 4191325 - DNA, 25 bp, Homo sapien
cagcctctttgctataagcccgttt

SEQ ID NO: 4191326 - DNA, 25 bp, Homo sapien
tgagtacccatgacaggtagacggc

SEQ ID NO: 4191327 - DNA, 25 bp, Homo sapien
catccaatgagtacccatgacaggt

SEQ ID NO: 4191328 - DNA, 25 bp, Homo sapien
tgggagggtagcctgttgcccctgg

SEQ ID NO: 4191329 - DNA, 25 bp, Homo sapien
cccatgacaggtagacggcagatgg

SEQ ID NO: 4191330 - DNA, 25 bp, Homo sapien
gaatattctagtccccaggatggat

SEQ ID NO: 4191331 - DNA, 25 bp, Homo sapien
cagattggaagcatatagagaaccc

SEQ ID NO: 4191332 - DNA, 25 bp, Homo sapien
tgagagatcctcacctttatgtaga

SEQ ID NO: 4191333 - DNA, 25 bp, Homo sapien
tgaaagctttgggaggacactgact

SEQ ID NO: 4191334 - DNA, 25 bp, Homo sapien
ggcaaactcccggacagcttcgttg

SEQ ID NO: 4191335 - DNA, 25 bp, Homo sapien
tcgttgggatcctcgtaagtgaagg

SEQ ID NO: 4191336 - DNA, 25 bp, Homo sapien
gacagcttcgttgggatcctcgtaa

SEQ ID NO: 4191337 - DNA, 25 bp, Homo sapien
ccggacagcttcgttgggatcctcg

SEQ ID NO: 4191338 - DNA, 25 bp, Homo sapien
ctgctccgatgacctcttcaatttt

SEQ ID NO: 4191339 - DNA, 25 bp, Homo sapien
ctaatggggcttttcatactgaaag

SEQ ID NO: 4191340 - DNA, 25 bp, Homo sapien
aagagttatccaatttatctggtac

SEQ ID NO: 4191341 - DNA, 25 bp, Homo sapien
ggcatgatccttaaatatgtcagca

SEQ ID NO: 4191342 - DNA, 25 bp, Homo sapien
tatctggtacccagccttccaaggc

SEQ ID NO: 4191343 - DNA, 25 bp, Homo sapien
cttccaaggcatgatccttaaatat

SEQ ID NO: 4191344 - DNA, 25 bp, Homo sapien
aatgccattaatatcctcttccttc

SEQ ID NO: 4191345 - DNA, 25 bp, Homo sapien
gcaaaaatgccattaatatcctctt

SEQ ID NO: 4191346 - DNA, 25 bp, Homo sapien
cagcaaaaatgccattaatatcctc

SEQ ID NO: 4191347 - DNA, 25 bp, Homo sapien
aaaaatgccattaatatcctcttcc

SEQ ID NO: 4191348 - DNA, 25 bp, Homo sapien
caaacgccccttgtacacttctcca

SEQ ID NO: 4191349 - DNA, 25 bp, Homo sapien
cagtttcaaacgccccttgtacact

SEQ ID NO: 4191350 - DNA, 25 bp, Homo sapien
ttcaaacgccccttgtacacttctc

SEQ ID NO: 4191351 - DNA, 25 bp, Homo sapien
ggcagtttcaaacgccccttgtaca

SEQ ID NO: 4191352 - DNA, 25 bp, Homo sapien
tcttgatggccacgtagatttccct

SEQ ID NO: 4191353 - DNA, 25 bp, Homo sapien
gcccatgatgctcgcctcactcaga

SEQ ID NO: 4191354 - DNA, 25 bp, Homo sapien
tcactcagaaagtcccgacgctgct

SEQ ID NO: 4191355 - DNA, 25 bp, Homo sapien
ttctccgagtaccctgccttcaggg

SEQ ID NO: 4191356 - DNA, 25 bp, Homo sapien
aaagaatccaatgcaccattctcca

SEQ ID NO: 4191357 - DNA, 25 bp, Homo sapien
tgacaggccgactcttggtgaccac

SEQ ID NO: 4191358 - DNA, 25 bp, Homo sapien
tgatcatgacaggccgactcttggt

SEQ ID NO: 4191359 - DNA, 25 bp, Homo sapien
gaatccaatgcaccattctccatga

SEQ ID NO: 4191360 - DNA, 25 bp, Homo sapien
tgcatccaagtgcatcatcaaaccc

SEQ ID NO: 4191361 - DNA, 25 bp, Homo sapien
catcaaacccctgagttgctcttac

SEQ ID NO: 4191362 - DNA, 25 bp, Homo sapien
tatgctccagggttcggtagtaagg

SEQ ID NO: 4191363 - DNA, 25 bp, Homo sapien
gcagcagatatgtcaattaatgttg

SEQ ID NO: 4191364 - DNA, 25 bp, Homo sapien
taatgttgctatgctccagggttcg

SEQ ID NO: 4191365 - DNA, 25 bp, Homo sapien
tgtcaattaatgttgctatgctcca

SEQ ID NO: 4191366 - DNA, 25 bp, Homo sapien
tctcctagtgaatgggagctgttgc

SEQ ID NO: 4191367 - DNA, 25 bp, Homo sapien
gggaacctcatgcacagcgtctggc

SEQ ID NO: 4191368 - DNA, 25 bp, Homo sapien
atgcacagcgtctggcacagggaac

SEQ ID NO: 4191369 - DNA, 25 bp, Homo sapien
gcacagggaactctcctagtgaatg

SEQ ID NO: 4191370 - DNA, 25 bp, Homo sapien
tctgaggtgtcatcctggaggtagc

SEQ ID NO: 4191371 - DNA, 25 bp, Homo sapien
tacccacaagctggatcacggtgaa

SEQ ID NO: 4191372 - DNA, 25 bp, Homo sapien
caccaggttactgttgaccagaatg

SEQ ID NO: 4191373 - DNA, 25 bp, Homo sapien
tcacggtgaactgcccgtcattttg

SEQ ID NO: 4191374 - DNA, 25 bp, Homo sapien
gaagatggtgatgttaaaaagatct

SEQ ID NO: 4191375 - DNA, 25 bp, Homo sapien
gatggtgatgttaaaaagatcttga

SEQ ID NO: 4191376 - DNA, 25 bp, Homo sapien
tggtgatgttaaaaagatcttgaaa

SEQ ID NO: 4191377 - DNA, 25 bp, Homo sapien
tagaagatggtgatgttaaaaagat

SEQ ID NO: 4191378 - DNA, 25 bp, Homo sapien
tgaggtcaaacatcaagaactagtc

SEQ ID NO: 4191379 - DNA, 25 bp, Homo sapien
agtgtgtacgtgagctccaaatgca

SEQ ID NO: 4191380 - DNA, 25 bp, Homo sapien
cattatttcaggagcttcttgggaa

SEQ ID NO: 4191381 - DNA, 25 bp, Homo sapien
taaaccatgcaagtgttcagagtcc

SEQ ID NO: 4191382 - DNA, 25 bp, Homo sapien
cataaagcatagtgtgatccaaacc

SEQ ID NO: 4191383 - DNA, 25 bp, Homo sapien
ttatggatgaagagaactaggccca

SEQ ID NO: 4191384 - DNA, 25 bp, Homo sapien
tataagctgtgaccaggacggaact

SEQ ID NO: 4191385 - DNA, 25 bp, Homo sapien
tcctcgtaccatgccaaagaactat

SEQ ID NO: 4191386 - DNA, 25 bp, Homo sapien
ggtctcgggctgtttgtggcaccca

SEQ ID NO: 4191387 - DNA, 25 bp, Homo sapien
ggcaggtctgctactcatcttggct

SEQ ID NO: 4191388 - DNA, 25 bp, Homo sapien
acacggtgatgcctatcctcagcac

SEQ ID NO: 4191389 - DNA, 25 bp, Homo sapien
tgtgtcaaagccaagaaggtctcgg

SEQ ID NO: 4191390 - DNA, 25 bp, Homo sapien
gtgcatggaggctacatgggcttcc

SEQ ID NO: 4191391 - DNA, 25 bp, Homo sapien
agtccttctgacatcgagtggctac

SEQ ID NO: 4191392 - DNA, 25 bp, Homo sapien
tacggcaggcaatacagctggcaag

SEQ ID NO: 4191393 - DNA, 25 bp, Homo sapien
tgaagctgcacttgctacggcaggc

SEQ ID NO: 4191394 - DNA, 25 bp, Homo sapien
catccatcagtaggccatgatgcca

SEQ ID NO: 4191395 - DNA, 25 bp, Homo sapien
ccatccatcagtaggccatgatgcc

SEQ ID NO: 4191396 - DNA, 25 bp, Homo sapien
ctaagagaccacagcttcctctctg

SEQ ID NO: 4191397 - DNA, 25 bp, Homo sapien
tcctctctgtcagccagtctgtttg

SEQ ID NO: 4191398 - DNA, 25 bp, Homo sapien
taagagaccacagcttcctctctgt

SEQ ID NO: 4191399 - DNA, 25 bp, Homo sapien
gcttcctctctgtcagccagtctgt

SEQ ID NO: 4191400 - DNA, 25 bp, Homo sapien
ccagactcagatggccactccaggc

SEQ ID NO: 4191401 - DNA, 25 bp, Homo sapien
catcctgcctgagggagaattctat

SEQ ID NO: 4191402 - DNA, 25 bp, Homo sapien
gagaattctatcctcactctaccat

SEQ ID NO: 4191403 - DNA, 25 bp, Homo sapien
gtccccagactcagatggccactcc

SEQ ID NO: 4191404 - DNA, 25 bp, Homo sapien
tgttgggcctcactgaacactgagc

SEQ ID NO: 4191405 - DNA, 25 bp, Homo sapien
gggcctcactgaacactgagcttgg

SEQ ID NO: 4191406 - DNA, 25 bp, Homo sapien
actgttgggcctcactgaacactga

SEQ ID NO: 4191407 - DNA, 25 bp, Homo sapien
gttgggcctcactgaacactgagct

SEQ ID NO: 4191408 - DNA, 25 bp, Homo sapien
aaaccgtggtcagcccaacaatcag

SEQ ID NO: 4191409 - DNA, 25 bp, Homo sapien
gagaaaccgtggtcagcccaacaat

SEQ ID NO: 4191410 - DNA, 25 bp, Homo sapien
cgtggtcagcccaacaatcaggttt

SEQ ID NO: 4191411 - DNA, 25 bp, Homo sapien
aggagaaaccgtggtcagcccaaca

SEQ ID NO: 4191412 - DNA, 25 bp, Homo sapien
aatgacatgacttcccacatgacga

SEQ ID NO: 4191413 - DNA, 25 bp, Homo sapien
catgacgatcccatagctccaaacg

SEQ ID NO: 4191414 - DNA, 25 bp, Homo sapien
tgtccatctcacagggatcttccct

SEQ ID NO: 4191415 - DNA, 25 bp, Homo sapien
aacgtcgctggctgaagtgaacttg

SEQ ID NO: 4191416 - DNA, 25 bp, Homo sapien
tgtcctggaacaagaaggagcactg

SEQ ID NO: 4191417 - DNA, 25 bp, Homo sapien
aacaagaaggagcactggagtcagg

SEQ ID NO: 4191418 - DNA, 25 bp, Homo sapien
cacctgtcctggaacaagaaggagc

SEQ ID NO: 4191419 - DNA, 25 bp, Homo sapien
cagggcctttctgagagagcgcagc

SEQ ID NO: 4191420 - DNA, 25 bp, Homo sapien
gtagtcctgctcgatggcattgatg

SEQ ID NO: 4191421 - DNA, 25 bp, Homo sapien
agtcttgagacttgccgggttccgg

SEQ ID NO: 4191422 - DNA, 25 bp, Homo sapien
acggcggtgatggttgccacagtct

SEQ ID NO: 4191423 - DNA, 25 bp, Homo sapien
gttccggatcatcttatctagggtg

SEQ ID NO: 4191424 - DNA, 25 bp, Homo sapien
tttgatggcgctgagccagtcatcc

SEQ ID NO: 4191425 - DNA, 25 bp, Homo sapien
cacggtggtaaaggccgtgaagtct

SEQ ID NO: 4191426 - DNA, 25 bp, Homo sapien
cctgtactggaccattttgatggcg

SEQ ID NO: 4191427 - DNA, 25 bp, Homo sapien
aagtctgggatggagcggtcgagca

SEQ ID NO: 4191428 - DNA, 25 bp, Homo sapien
attgccgttggtgactgacttatct

SEQ ID NO: 4191429 - DNA, 25 bp, Homo sapien
tggcctgccaaggtgatgcctattc

SEQ ID NO: 4191430 - DNA, 25 bp, Homo sapien
tggtgactgacttatctggaccctc

SEQ ID NO: 4191431 - DNA, 25 bp, Homo sapien
ccaaggtgatgcctattctcaggag

SEQ ID NO: 4191432 - DNA, 25 bp, Homo sapien
tatcattccaggatggcccacactg

SEQ ID NO: 4191433 - DNA, 25 bp, Homo sapien
tggttggatccccatgcagtggtca

SEQ ID NO: 4191434 - DNA, 25 bp, Homo sapien
gaaacttccctacaggagtcatgag

SEQ ID NO: 4191435 - DNA, 25 bp, Homo sapien
gattgcctgctagcaacaggtccgg

SEQ ID NO: 4191436 - DNA, 25 bp, Homo sapien
catggttggattggggtcctttgca

SEQ ID NO: 4191437 - DNA, 25 bp, Homo sapien
tgctgagaggagttctgtccatcca

SEQ ID NO: 4191438 - DNA, 25 bp, Homo sapien
tcctttgcagcctcaggcaaacttg

SEQ ID NO: 4191439 - DNA, 25 bp, Homo sapien
catccacttccattctccaggggtt

SEQ ID NO: 4191440 - DNA, 25 bp, Homo sapien
cctgtagttcatcccgggtgtaggg

SEQ ID NO: 4191441 - DNA, 25 bp, Homo sapien
ctgtagttcatcccgggtgtagggg

SEQ ID NO: 4191442 - DNA, 25 bp, Homo sapien
tcctgtagttcatcccgggtgtagg

SEQ ID NO: 4191443 - DNA, 25 bp, Homo sapien
taaaagcaaggagtcagattgcctg

SEQ ID NO: 4191444 - DNA, 25 bp, Homo sapien
ttgttttaacaatacctctaggtga

SEQ ID NO: 4191445 - DNA, 25 bp, Homo sapien
taggtgataccaatgcacactcaag

SEQ ID NO: 4191446 - DNA, 25 bp, Homo sapien
acactcaagtgtgagacccactggg

SEQ ID NO: 4191447 - DNA, 25 bp, Homo sapien
gatttatctacctctctaccagtca

SEQ ID NO: 4191448 - DNA, 25 bp, Homo sapien
cccaggtgatacaataaacatacag

SEQ ID NO: 4191449 - DNA, 25 bp, Homo sapien
tgaatgtatttggacacccaggtga

SEQ ID NO: 4191450 - DNA, 25 bp, Homo sapien
cattcatgtctttgagtgctggaag

SEQ ID NO: 4191451 - DNA, 25 bp, Homo sapien
aaatggctctatgacttctacacgg

SEQ ID NO: 4191452 - DNA, 25 bp, Homo sapien
tacataggtgagtaggatgtgccct

SEQ ID NO: 4191453 - DNA, 25 bp, Homo sapien
tgagcatcttccgtgtgtcagacag

SEQ ID NO: 4191454 - DNA, 25 bp, Homo sapien
tcaagagactccctagtggtgaaca

SEQ ID NO: 4191455 - DNA, 25 bp, Homo sapien
tcttcaatgtccgtcgaatttgctg

SEQ ID NO: 4191456 - DNA, 25 bp, Homo sapien
tgctcttcaatgtccgtcgaatttg

SEQ ID NO: 4191457 - DNA, 25 bp, Homo sapien
ctctgctcttcaatgtccgtcgaat

SEQ ID NO: 4191458 - DNA, 25 bp, Homo sapien
caatgtccgtcgaatttgctgccat

SEQ ID NO: 4191459 - DNA, 25 bp, Homo sapien
aaggcacttccttcaaagccagcaa

SEQ ID NO: 4191460 - DNA, 25 bp, Homo sapien
caaggcacttccttcaaagccagca

SEQ ID NO: 4191461 - DNA, 25 bp, Homo sapien
tgggggccagagtggggaccaggca

SEQ ID NO: 4191462 - DNA, 25 bp, Homo sapien
tggggaccaggcagggtctggtcat

SEQ ID NO: 4191463 - DNA, 25 bp, Homo sapien
cagagtggggaccaggcagggtctg

SEQ ID NO: 4191464 - DNA, 25 bp, Homo sapien
gccagagtggggaccaggcagggtc

SEQ ID NO: 4191465 - DNA, 25 bp, Homo sapien
tggagtgcggtaaatctctccccag

SEQ ID NO: 4191466 - DNA, 25 bp, Homo sapien
gcttgcttcgcatcatgggctggaa

SEQ ID NO: 4191467 - DNA, 25 bp, Homo sapien
ctaattacatgtgtgcggcagctga

SEQ ID NO: 4191468 - DNA, 25 bp, Homo sapien
aaagggatgacttccccatcgtgta

SEQ ID NO: 4191469 - DNA, 25 bp, Homo sapien
tgtatgaattctgagccatgactgc

SEQ ID NO: 4191470 - DNA, 25 bp, Homo sapien
gtatgaattctgagccatgactgcc

SEQ ID NO: 4191471 - DNA, 25 bp, Homo sapien
gagccatgactgccagattgaatgc

SEQ ID NO: 4191472 - DNA, 25 bp, Homo sapien
agccatgactgccagattgaatgca

SEQ ID NO: 4191473 - DNA, 25 bp, Homo sapien
ctacacagcaatccatggagtggga

SEQ ID NO: 4191474 - DNA, 25 bp, Homo sapien
tgcacaaatcagaaccttatgccca

SEQ ID NO: 4191475 - DNA, 25 bp, Homo sapien
gcccaaatcagaacgttatgcttaa

SEQ ID NO: 4191476 - DNA, 25 bp, Homo sapien
tcaggcttactctcctacacagcaa

SEQ ID NO: 4191477 - DNA, 25 bp, Homo sapien
tgtggtgtggagtctggacttgatt

SEQ ID NO: 4191478 - DNA, 25 bp, Homo sapien
tgacacagtctgataaacacccatg

SEQ ID NO: 4191479 - DNA, 25 bp, Homo sapien
tgccatgtggagagtggttgggccc

SEQ ID NO: 4191480 - DNA, 25 bp, Homo sapien
tctggacttgattgtaagtgacaca

SEQ ID NO: 4191481 - DNA, 25 bp, Homo sapien
aggcaagatcaaggtggtactttct

SEQ ID NO: 4191482 - DNA, 25 bp, Homo sapien
caagatcaaggtggtactttctcat

SEQ ID NO: 4191483 - DNA, 25 bp, Homo sapien
cttaatcatcctctgatgactccca

SEQ ID NO: 4191484 - DNA, 25 bp, Homo sapien
aatcatcctctgatgactcccaggt

SEQ ID NO: 4191485 - DNA, 25 bp, Homo sapien
tggcgcacggtgtgagagggacctg

SEQ ID NO: 4191486 - DNA, 25 bp, Homo sapien
tagttcttggcgcacggtgtgagag

SEQ ID NO: 4191487 - DNA, 25 bp, Homo sapien
ctgtgtagttcttggcgcacggtgt

SEQ ID NO: 4191488 - DNA, 25 bp, Homo sapien
tcttggcgcacggtgtgagagggac

SEQ ID NO: 4191489 - DNA, 25 bp, Homo sapien
tgtgatggtgtgatctcttcagcag

SEQ ID NO: 4191490 - DNA, 25 bp, Homo sapien
tgatggtgtgatctcttcagcagac

SEQ ID NO: 4191491 - DNA, 25 bp, Homo sapien
atggtgtgatctcttcagcagactt

SEQ ID NO: 4191492 - DNA, 25 bp, Homo sapien
ctttgtgtgatggtgtgatctcttc

SEQ ID NO: 4191493 - DNA, 25 bp, Homo sapien
aacgtactcatgcttctctttggca

SEQ ID NO: 4191494 - DNA, 25 bp, Homo sapien
agttcttggcacacctatcattcag

SEQ ID NO: 4191495 - DNA, 25 bp, Homo sapien
aatgtaaacaaggagaggtagccat

SEQ ID NO: 4191496 - DNA, 25 bp, Homo sapien
cagtttggcatggacaaacgtactc

SEQ ID NO: 4191497 - DNA, 25 bp, Homo sapien
cttctgctccagcaacgcacatgtc

SEQ ID NO: 4191498 - DNA, 25 bp, Homo sapien
tcttgcagacccttcttctcttcgg

SEQ ID NO: 4191499 - DNA, 25 bp, Homo sapien
gggcatagtgcccatccctccttct

SEQ ID NO: 4191500 - DNA, 25 bp, Homo sapien
tccagtcttccaaatgattcccctg

SEQ ID NO: 4191501 - DNA, 25 bp, Homo sapien
ttcacccccaactggcggtaagctg

SEQ ID NO: 4191502 - DNA, 25 bp, Homo sapien
ccaactggcggtaagctgtgctgga

SEQ ID NO: 4191503 - DNA, 25 bp, Homo sapien
tggcaattgtcaaggactacacagg

SEQ ID NO: 4191504 - DNA, 25 bp, Homo sapien
actacacaggaaaggttcagtctgg

SEQ ID NO: 4191505 - DNA, 25 bp, Homo sapien
ttaaatagctggatatctccgtgat

SEQ ID NO: 4191506 - DNA, 25 bp, Homo sapien
tctccgtgatagtgctcataatgca

SEQ ID NO: 4191507 - DNA, 25 bp, Homo sapien
catataacggtgtgctgtgcaaact

SEQ ID NO: 4191508 - DNA, 25 bp, Homo sapien
caatgtctattgaaaccattaacac

SEQ ID NO: 4191509 - DNA, 25 bp, Homo sapien
gccttgtggattttatggggccata

SEQ ID NO: 4191510 - DNA, 25 bp, Homo sapien
tgggcagggagctcgtaactccata

SEQ ID NO: 4191511 - DNA, 25 bp, Homo sapien
atttatcttcaaaaccacaagcaag

SEQ ID NO: 4191512 - DNA, 25 bp, Homo sapien
tggagataattctttgagacatcag

SEQ ID NO: 4191513 - DNA, 25 bp, Homo sapien
ttacaaacagctttgctattaatat

SEQ ID NO: 4191514 - DNA, 25 bp, Homo sapien
ttgtttcagatatttacaaacagct

SEQ ID NO: 4191515 - DNA, 25 bp, Homo sapien
gagacactgttgctaggttactgtt

SEQ ID NO: 4191516 - DNA, 25 bp, Homo sapien
gctaggttactgttgctcgaggttc

SEQ ID NO: 4191517 - DNA, 25 bp, Homo sapien
gttactgttgctcgaggttcctcca

SEQ ID NO: 4191518 - DNA, 25 bp, Homo sapien
tgttgctcgaggttcctccaacctc

SEQ ID NO: 4191519 - DNA, 25 bp, Homo sapien
gaattctatgttgagctcagagctc

SEQ ID NO: 4191520 - DNA, 25 bp, Homo sapien
tctctctgagctccggcttacatct

SEQ ID NO: 4191521 - DNA, 25 bp, Homo sapien
tccggcttacatctcatcgacatct

SEQ ID NO: 4191522 - DNA, 25 bp, Homo sapien
tcatggcttccattcctacccgtgt

SEQ ID NO: 4191523 - DNA, 25 bp, Homo sapien
tctgctctggaggttaactgcatct

SEQ ID NO: 4191524 - DNA, 25 bp, Homo sapien
tgagctaccgtgtgtacctccacta

SEQ ID NO: 4191525 - DNA, 25 bp, Homo sapien
tttatctgcatggtgtaaacactgt

SEQ ID NO: 4191526 - DNA, 25 bp, Homo sapien
tacctccactattctgagctcagtg

SEQ ID NO: 4191527 - DNA, 25 bp, Homo sapien
ggtgggatcacacaatcaacaaata

SEQ ID NO: 4191528 - DNA, 25 bp, Homo sapien
tttctagtgaagagtggtgggatca

SEQ ID NO: 4191529 - DNA, 25 bp, Homo sapien
gagacagcctgactgcttggactgt

SEQ ID NO: 4191530 - DNA, 25 bp, Homo sapien
cacttggcatgcggaagggctgtaa

SEQ ID NO: 4191531 - DNA, 25 bp, Homo sapien
cgggatctggttagagccatagttt

SEQ ID NO: 4191532 - DNA, 25 bp, Homo sapien
gcagaagttgctctcttggtgggca

SEQ ID NO: 4191533 - DNA, 25 bp, Homo sapien
gcaatggcagaagttgctctcttgg

SEQ ID NO: 4191534 - DNA, 25 bp, Homo sapien
cagaagttgctctcttggtgggcat

SEQ ID NO: 4191535 - DNA, 25 bp, Homo sapien
atggcagaagttgctctcttggtgg

SEQ ID NO: 4191536 - DNA, 25 bp, Homo sapien
gagattaggttgttcacgttcgtgt

SEQ ID NO: 4191537 - DNA, 25 bp, Homo sapien
tctcccacacgcagagattaggttg

SEQ ID NO: 4191538 - DNA, 25 bp, Homo sapien
tcactggttgacactgcgctgctgt

SEQ ID NO: 4191539 - DNA, 25 bp, Homo sapien
gatgagcgtgagcaccactgtcact

SEQ ID NO: 4191540 - DNA, 25 bp, Homo sapien
cctccaacagtcagggactgctgaa

SEQ ID NO: 4191541 - DNA, 25 bp, Homo sapien
tcctccaacagtcagggactgctga

SEQ ID NO: 4191542 - DNA, 25 bp, Homo sapien
ctccaacagtcagggactgctgaaa

SEQ ID NO: 4191543 - DNA, 25 bp, Homo sapien
ttcctccaacagtcagggactgctg

SEQ ID NO: 4191544 - DNA, 25 bp, Homo sapien
gggcaaggccaacatgacaggcgaa

SEQ ID NO: 4191545 - DNA, 25 bp, Homo sapien
ttctgtctttgagccagcaggacat

SEQ ID NO: 4191546 - DNA, 25 bp, Homo sapien
catgacaggcgaaggaaatcctcct

SEQ ID NO: 4191547 - DNA, 25 bp, Homo sapien
tcgcatctgtatcagcttgcagcat

SEQ ID NO: 4191548 - DNA, 25 bp, Homo sapien
ctgagtttgtgtgcccagtcctcac

SEQ ID NO: 4191549 - DNA, 25 bp, Homo sapien
agtcctcacattccctgcttttaca

SEQ ID NO: 4191550 - DNA, 25 bp, Homo sapien
tttgtgtgcccagtcctcacattcc

SEQ ID NO: 4191551 - DNA, 25 bp, Homo sapien
tgcctgagtttgtgtgcccagtcct

SEQ ID NO: 4191552 - DNA, 25 bp, Homo sapien
cgccagattgatgacaggactgtct

SEQ ID NO: 4191553 - DNA, 25 bp, Homo sapien
gtgggtaacagcaggaaccgccacg

SEQ ID NO: 4191554 - DNA, 25 bp, Homo sapien
tggtgttgctgaccattgaaggtct

SEQ ID NO: 4191555 - DNA, 25 bp, Homo sapien
ggtctgtgatctcattacccactgc

SEQ ID NO: 4191556 - DNA, 25 bp, Homo sapien
cacaaatgacctgtttgttgtcaga

SEQ ID NO: 4191557 - DNA, 25 bp, Homo sapien
acaaatgacctgtttgttgtcagat

SEQ ID NO: 4191558 - DNA, 25 bp, Homo sapien
actgtgagtgccattgagtgacaac

SEQ ID NO: 4191559 - DNA, 25 bp, Homo sapien
ttctatatctactgtgagtgccatt

SEQ ID NO: 4191560 - DNA, 25 bp, Homo sapien
tatatctactgtgagtgccattgag

SEQ ID NO: 4191561 - DNA, 25 bp, Homo sapien
tctactgtgagtgccattgagtgac

SEQ ID NO: 4191562 - DNA, 25 bp, Homo sapien
ggtaaacactgccttctgacactct

SEQ ID NO: 4191563 - DNA, 25 bp, Homo sapien
taaacactgccttctgacactctgc

SEQ ID NO: 4191564 - DNA, 25 bp, Homo sapien
tctgataaaggtaaacactgccttc

SEQ ID NO: 4191565 - DNA, 25 bp, Homo sapien
taaaggtaaacactgccttctgaca

SEQ ID NO: 4191566 - DNA, 25 bp, Homo sapien
ttgtgtctccaagtgggatccttgg

SEQ ID NO: 4191567 - DNA, 25 bp, Homo sapien
gtctccaagtgggatccttggctgt

SEQ ID NO: 4191568 - DNA, 25 bp, Homo sapien
tccaagtgggatccttggctgtcag

SEQ ID NO: 4191569 - DNA, 25 bp, Homo sapien
ccaagtgggatccttggctgtcaga

SEQ ID NO: 4191570 - DNA, 25 bp, Homo sapien
cctccacttcagaataacatttcat

SEQ ID NO: 4191571 - DNA, 25 bp, Homo sapien
tcctccacttcagaataacatttca

SEQ ID NO: 4191572 - DNA, 25 bp, Homo sapien
ctcctccacttcagaataacatttc

SEQ ID NO: 4191573 - DNA, 25 bp, Homo sapien
tggtgccttttgcatccgagtccac

SEQ ID NO: 4191574 - DNA, 25 bp, Homo sapien
gaatcagggcgtgcattgttctggc

SEQ ID NO: 4191575 - DNA, 25 bp, Homo sapien
ggccatatacagacccgaatcaggg

SEQ ID NO: 4191576 - DNA, 25 bp, Homo sapien
ggagagggataatggtagcacacgc

SEQ ID NO: 4191577 - DNA, 25 bp, Homo sapien
aaatgtcaagagcagggtgatttat

SEQ ID NO: 4191578 - DNA, 25 bp, Homo sapien
gagcagggtgatttatttcctcatt

SEQ ID NO: 4191579 - DNA, 25 bp, Homo sapien
gttattaaaaatgtcaagagcaggg

SEQ ID NO: 4191580 - DNA, 25 bp, Homo sapien
gtcaagagcagggtgatttatttcc

SEQ ID NO: 4191581 - DNA, 25 bp, Homo sapien
aaagtttctgtggtttgtgatgcca

SEQ ID NO: 4191582 - DNA, 25 bp, Homo sapien
caagggacctaagcagtaaatattc

SEQ ID NO: 4191583 - DNA, 25 bp, Homo sapien
gaaagaagatattactcaagggacc

SEQ ID NO: 4191584 - DNA, 25 bp, Homo sapien
cattgaagtccaaacaaagcgggta

SEQ ID NO: 4191585 - DNA, 25 bp, Homo sapien
agagatctggggagccactaatggc

SEQ ID NO: 4191586 - DNA, 25 bp, Homo sapien
tctggggagccactaatggctataa

SEQ ID NO: 4191587 - DNA, 25 bp, Homo sapien
ctatccatatgcttgcatgaagaga

SEQ ID NO: 4191588 - DNA, 25 bp, Homo sapien
ccatatgcttgcatgaagagatctg

SEQ ID NO: 4191589 - DNA, 25 bp, Homo sapien
ccaaagtctccactaatggaatctg

SEQ ID NO: 4191590 - DNA, 25 bp, Homo sapien
caaagtctccactaatggaatctgc

SEQ ID NO: 4191591 - DNA, 25 bp, Homo sapien
tgcctgcatgcatgtcacgtctggc

SEQ ID NO: 4191592 - DNA, 25 bp, Homo sapien
catgcatgtcacgtctggccaggta

SEQ ID NO: 4191593 - DNA, 25 bp, Homo sapien
gcatgtcacgtctggccaggtacag

SEQ ID NO: 4191594 - DNA, 25 bp, Homo sapien
tgcatgcatgtcacgtctggccagg

SEQ ID NO: 4191595 - DNA, 25 bp, Homo sapien
aggatgaactgagccctcgagccat

SEQ ID NO: 4191596 - DNA, 25 bp, Homo sapien
aaacaggatgaactgagccctcgag

SEQ ID NO: 4191597 - DNA, 25 bp, Homo sapien
acaggatgaactgagccctcgagcc

SEQ ID NO: 4191598 - DNA, 25 bp, Homo sapien
aacaggatgaactgagccctcgagc

SEQ ID NO: 4191599 - DNA, 25 bp, Homo sapien
ttcttagctgtttccaaagccacag

SEQ ID NO: 4191600 - DNA, 25 bp, Homo sapien
gcatattttactgctgggaggacag

SEQ ID NO: 4191601 - DNA, 25 bp, Homo sapien
tttgacattcattagggaaccatct

SEQ ID NO: 4191602 - DNA, 25 bp, Homo sapien
ccatcttccgtaggcaaaacacaag

SEQ ID NO: 4191603 - DNA, 25 bp, Homo sapien
tgcctattagtgtgttgtttgtcag

SEQ ID NO: 4191604 - DNA, 25 bp, Homo sapien
tagttctttgcctattagtgtgttg

SEQ ID NO: 4191605 - DNA, 25 bp, Homo sapien
ttagtgtgttgtttgtcagcaaggg

SEQ ID NO: 4191606 - DNA, 25 bp, Homo sapien
tccagcgacagctttcacctcctga

SEQ ID NO: 4191607 - DNA, 25 bp, Homo sapien
gtggcatacaggctgctcatggagg

SEQ ID NO: 4191608 - DNA, 25 bp, Homo sapien
agctcacacgtggcatacaggctgc

SEQ ID NO: 4191609 - DNA, 25 bp, Homo sapien
catacaggctgctcatggaggggat

SEQ ID NO: 4191610 - DNA, 25 bp, Homo sapien
ctcacacgtggcatacaggctgctc

SEQ ID NO: 4191611 - DNA, 25 bp, Homo sapien
gaacattctttaagtgcctgtactg

SEQ ID NO: 4191612 - DNA, 25 bp, Homo sapien
cattctttaagtgcctgtactggga

SEQ ID NO: 4191613 - DNA, 25 bp, Homo sapien
aagtgcctgtactgggaatattcca

SEQ ID NO: 4191614 - DNA, 25 bp, Homo sapien
tctttaagtgcctgtactgggaata

SEQ ID NO: 4191615 - DNA, 25 bp, Homo sapien
ccctgcttgccttagccacagcctg

SEQ ID NO: 4191616 - DNA, 25 bp, Homo sapien
gaaatcctcactgctcgctactacc

SEQ ID NO: 4191617 - DNA, 25 bp, Homo sapien
ttagccacagcctgctcaccatgtg

SEQ ID NO: 4191618 - DNA, 25 bp, Homo sapien
ttaaagcacacgctgagcgcagaaa

SEQ ID NO: 4191619 - DNA, 25 bp, Homo sapien
ttcttggttacaacctggatgtgct

SEQ ID NO: 4191620 - DNA, 25 bp, Homo sapien
tgtgaagaaacaagggcccatttct

SEQ ID NO: 4191621 - DNA, 25 bp, Homo sapien
tctgtcaggtgtcctggtgccagga

SEQ ID NO: 4191622 - DNA, 25 bp, Homo sapien
gttacaacctggatgtgcttttgct

SEQ ID NO: 4191623 - DNA, 25 bp, Homo sapien
tcatgacccctgtgagatctagcca

SEQ ID NO: 4191624 - DNA, 25 bp, Homo sapien
acccctgtgagatctagccaggatg

SEQ ID NO: 4191625 - DNA, 25 bp, Homo sapien
tgacccctgtgagatctagccagga

SEQ ID NO: 4191626 - DNA, 25 bp, Homo sapien
ctttcatgacccctgtgagatctag

SEQ ID NO: 4191627 - DNA, 25 bp, Homo sapien
gaccttccccagcagtatagcatca

SEQ ID NO: 4191628 - DNA, 25 bp, Homo sapien
tcatttgtatctccacatggccaat

SEQ ID NO: 4191629 - DNA, 25 bp, Homo sapien
cagactgaaataagaccccggcttt

SEQ ID NO: 4191630 - DNA, 25 bp, Homo sapien
catggccaatctggtccagactgaa

SEQ ID NO: 4191631 - DNA, 25 bp, Homo sapien
cttggttgcagggtctgactgcttc

SEQ ID NO: 4191632 - DNA, 25 bp, Homo sapien
gacttgtagcacatggctgctacac

SEQ ID NO: 4191633 - DNA, 25 bp, Homo sapien
tagacttgtagcacatggctgctac

SEQ ID NO: 4191634 - DNA, 25 bp, Homo sapien
gactgcttcacaccacatgtccacc

SEQ ID NO: 4191635 - DNA, 25 bp, Homo sapien
taatttgaggcacatggtggattca

SEQ ID NO: 4191636 - DNA, 25 bp, Homo sapien
taaataatttgaggcacatggtgga

SEQ ID NO: 4191637 - DNA, 25 bp, Homo sapien
aggcacatggtggattcatcaggga

SEQ ID NO: 4191638 - DNA, 25 bp, Homo sapien
tttgaggcacatggtggattcatca

SEQ ID NO: 4191639 - DNA, 25 bp, Homo sapien
tactttgatccatccgttgttgaaa

SEQ ID NO: 4191640 - DNA, 25 bp, Homo sapien
gaaatgtggtactttgatccatccg

SEQ ID NO: 4191641 - DNA, 25 bp, Homo sapien
tgtggtactttgatccatccgttgt

SEQ ID NO: 4191642 - DNA, 25 bp, Homo sapien
gaagaaatgtggtactttgatccat

SEQ ID NO: 4191643 - DNA, 25 bp, Homo sapien
cttttgtcccagcacgtaatgattt

SEQ ID NO: 4191644 - DNA, 25 bp, Homo sapien
tgtcttttgtcccagcacgtaatga

SEQ ID NO: 4191645 - DNA, 25 bp, Homo sapien
tgtcccagcacgtaatgattttgac

SEQ ID NO: 4191646 - DNA, 25 bp, Homo sapien
tttgtcccagcacgtaatgattttg

SEQ ID NO: 4191647 - DNA, 25 bp, Homo sapien
tcctataaggatcatggctgctgag

SEQ ID NO: 4191648 - DNA, 25 bp, Homo sapien
gccatagcttgtgaaccctgctcta

SEQ ID NO: 4191649 - DNA, 25 bp, Homo sapien
agtgatgtctctactgggctctcaa

SEQ ID NO: 4191650 - DNA, 25 bp, Homo sapien
gaaacagttggccagctagatttgg

SEQ ID NO: 4191651 - DNA, 25 bp, Homo sapien
gaaaaatcctcataaggctgcaccc

SEQ ID NO: 4191652 - DNA, 25 bp, Homo sapien
tagaatggagcctctgattcccaac

SEQ ID NO: 4191653 - DNA, 25 bp, Homo sapien
gattcccaacttgccaggttgttat

SEQ ID NO: 4191654 - DNA, 25 bp, Homo sapien
tatcagctgggctagaaaaatcctc

SEQ ID NO: 4191655 - DNA, 25 bp, Homo sapien
agtgatgtgaggactgattccttgg

SEQ ID NO: 4191656 - DNA, 25 bp, Homo sapien
ttggctgtgtgagctccaatcagct

SEQ ID NO: 4191657 - DNA, 25 bp, Homo sapien
gaagtgatgtgaggactgattcctt

SEQ ID NO: 4191658 - DNA, 25 bp, Homo sapien
tgagctccaatcagctgagagagat

SEQ ID NO: 4191659 - DNA, 25 bp, Homo sapien
gctagcttagcttcgtgttcaggct

SEQ ID NO: 4191660 - DNA, 25 bp, Homo sapien
ttaaagcaccaagttcttgccacgt

SEQ ID NO: 4191661 - DNA, 25 bp, Homo sapien
ttctcaatagcctgctccttgcatg

SEQ ID NO: 4191662 - DNA, 25 bp, Homo sapien
gctgtcactgcttttctcaatagcc

SEQ ID NO: 4191663 - DNA, 25 bp, Homo sapien
ctgtggcatccatgaggaagctgcc

SEQ ID NO: 4191664 - DNA, 25 bp, Homo sapien
gggaagtatatcagtctccacttct

SEQ ID NO: 4191665 - DNA, 25 bp, Homo sapien
ctgccctggtgggaagtatatcagt

SEQ ID NO: 4191666 - DNA, 25 bp, Homo sapien
gtggcatccatgaggaagctgccct

SEQ ID NO: 4191667 - DNA, 25 bp, Homo sapien
aagatctatcaaagaggcagacttc

SEQ ID NO: 4191668 - DNA, 25 bp, Homo sapien
gacagagaagatctatcaaagaggc

SEQ ID NO: 4191669 - DNA, 25 bp, Homo sapien
gccagacagagaagatctatcaaag

SEQ ID NO: 4191670 - DNA, 25 bp, Homo sapien
aaagccagacagagaagatctatca

SEQ ID NO: 4191671 - DNA, 25 bp, Homo sapien
accaagcgtgtgcatctgccctgac

SEQ ID NO: 4191672 - DNA, 25 bp, Homo sapien
tagaagactcacactcatgacttac

SEQ ID NO: 4191673 - DNA, 25 bp, Homo sapien
acacaggccctaggaccaagcgtgt

SEQ ID NO: 4191674 - DNA, 25 bp, Homo sapien
tccttctagaagactcacactcatg

SEQ ID NO: 4191675 - DNA, 25 bp, Homo sapien
ctacagcagaagtaatagaaattcc

SEQ ID NO: 4191676 - DNA, 25 bp, Homo sapien
ctcaacaagtcgagaaagcagaagg

SEQ ID NO: 4191677 - DNA, 25 bp, Homo sapien
tttggaacagctgaacccactaggc

SEQ ID NO: 4191678 - DNA, 25 bp, Homo sapien
gggcttttggacaatcatcaggtta

SEQ ID NO: 4191679 - DNA, 25 bp, Homo sapien
cctccttctcgctggtcctgttggt

SEQ ID NO: 4191680 - DNA, 25 bp, Homo sapien
tcgctggtcctgttggtgctggcca

SEQ ID NO: 4191681 - DNA, 25 bp, Homo sapien
tccttctcgctggtcctgttggtgc

SEQ ID NO: 4191682 - DNA, 25 bp, Homo sapien
tctcgctggtcctgttggtgctggc

SEQ ID NO: 4191683 - DNA, 25 bp, Homo sapien
gtggtggtgatgggccctgatagtt

SEQ ID NO: 4191684 - DNA, 25 bp, Homo sapien
gtggtgatgggccctgatagtttct

SEQ ID NO: 4191685 - DNA, 25 bp, Homo sapien
cctgatagtttctctggggatactt

SEQ ID NO: 4191686 - DNA, 25 bp, Homo sapien
gtgatgggccctgatagtttctctg

SEQ ID NO: 4191687 - DNA, 25 bp, Homo sapien
ttctgcttgactctcagcatcactt

SEQ ID NO: 4191688 - DNA, 25 bp, Homo sapien
ctgaagatctgttaagtttgtcaag

SEQ ID NO: 4191689 - DNA, 25 bp, Homo sapien
gaagatctgttaagtttgtcaagta

SEQ ID NO: 4191690 - DNA, 25 bp, Homo sapien
ttgactctcagcatcacttgtaagt

SEQ ID NO: 4191691 - DNA, 25 bp, Homo sapien
ccaactcagggcagatttatcatct

SEQ ID NO: 4191692 - DNA, 25 bp, Homo sapien
actggacttgggcaacccaactcag

SEQ ID NO: 4191693 - DNA, 25 bp, Homo sapien
ctgcctgttgtccactggtagcact

SEQ ID NO: 4191694 - DNA, 25 bp, Homo sapien
gttgtccactggtagcactgtagca

SEQ ID NO: 4191695 - DNA, 25 bp, Homo sapien
ctttgacagctccacagtttgtggc

SEQ ID NO: 4191696 - DNA, 25 bp, Homo sapien
taataagaagatcccgctttgacag

SEQ ID NO: 4191697 - DNA, 25 bp, Homo sapien
ggctctccgataaaactgtaattgt

SEQ ID NO: 4191698 - DNA, 25 bp, Homo sapien
cttaataagaagatcccgctttgac

SEQ ID NO: 4191699 - DNA, 25 bp, Homo sapien
tttccctgaaactcactgattgcac

SEQ ID NO: 4191700 - DNA, 25 bp, Homo sapien
tgaaactcactgattgcacctatgc

SEQ ID NO: 4191701 - DNA, 25 bp, Homo sapien
cacttggtttccacggggctgctga

SEQ ID NO: 4191702 - DNA, 25 bp, Homo sapien
cactgattgcacctatgcccagtgc

SEQ ID NO: 4191703 - DNA, 25 bp, Homo sapien
aggcaaatgacagcagaaacattgg

SEQ ID NO: 4191704 - DNA, 25 bp, Homo sapien
cattggccaggctttgggtgtaaaa

SEQ ID NO: 4191705 - DNA, 25 bp, Homo sapien
ccttgccctatctgggcagctggac

SEQ ID NO: 4191706 - DNA, 25 bp, Homo sapien
tgggtgtaaaacactgagactgtga

SEQ ID NO: 4191707 - DNA, 25 bp, Homo sapien
cctttgcatctcctcacgagagttc

SEQ ID NO: 4191708 - DNA, 25 bp, Homo sapien
gaagatatgaaggacaataggcaaa

SEQ ID NO: 4191709 - DNA, 25 bp, Homo sapien
atcacaagccccagaatgttctgtg

SEQ ID NO: 4191710 - DNA, 25 bp, Homo sapien
gagagccccagtagagtagggtaat

SEQ ID NO: 4191711 - DNA, 25 bp, Homo sapien
ccatgcaggaagtcaccgggaagta

SEQ ID NO: 4191712 - DNA, 25 bp, Homo sapien
ccgggaagtatgcaagtctgggaca

SEQ ID NO: 4191713 - DNA, 25 bp, Homo sapien
gggcacagtatcagctatgtctcct

SEQ ID NO: 4191714 - DNA, 25 bp, Homo sapien
gcctctgtcccatggtgaattctga

SEQ ID NO: 4191715 - DNA, 25 bp, Homo sapien
ctcctggctcgggtgctgtgcatca

SEQ ID NO: 4191716 - DNA, 25 bp, Homo sapien
tgggctgctgggtaagggcacctcc

SEQ ID NO: 4191717 - DNA, 25 bp, Homo sapien
gcacctccgggcctcttggtgacag

SEQ ID NO: 4191718 - DNA, 25 bp, Homo sapien
ggtgacagagttttgattagaaaga

SEQ ID NO: 4191719 - DNA, 25 bp, Homo sapien
agcaggagaaatgcacttgggctca

SEQ ID NO: 4191720 - DNA, 25 bp, Homo sapien
aagcaggagaaatgcacttgggctc

SEQ ID NO: 4191721 - DNA, 25 bp, Homo sapien
gcaggagaaatgcacttgggctcag

SEQ ID NO: 4191722 - DNA, 25 bp, Homo sapien
gatttccatggtagaattggaagat

SEQ ID NO: 4191723 - DNA, 25 bp, Homo sapien
tccatggtagaattggaagattcat

SEQ ID NO: 4191724 - DNA, 25 bp, Homo sapien
tttccatggtagaattggaagattc

SEQ ID NO: 4191725 - DNA, 25 bp, Homo sapien
ggatttccatggtagaattggaaga

SEQ ID NO: 4191726 - DNA, 25 bp, Homo sapien
tggaaaatcgatagcagctttctga

SEQ ID NO: 4191727 - DNA, 25 bp, Homo sapien
gacagtaaggcccacataaaggcct

SEQ ID NO: 4191728 - DNA, 25 bp, Homo sapien
tctgaattggtgttgcagacagtaa

SEQ ID NO: 4191729 - DNA, 25 bp, Homo sapien
ggcctatatttggatgggatgtgtt

SEQ ID NO: 4191730 - DNA, 25 bp, Homo sapien
gagatgagatattagcttccctctg

SEQ ID NO: 4191731 - DNA, 25 bp, Homo sapien
tacagagagatgagatattagcttc

SEQ ID NO: 4191732 - DNA, 25 bp, Homo sapien
ctggaaagcaaatctgatggtgctt

SEQ ID NO: 4191733 - DNA, 25 bp, Homo sapien
taacattgtctaagtagtttccaga

SEQ ID NO: 4191734 - DNA, 25 bp, Homo sapien
cccagattgcatgatccttgaggac

SEQ ID NO: 4191735 - DNA, 25 bp, Homo sapien
tacccagattgcatgatccttgagg

SEQ ID NO: 4191736 - DNA, 25 bp, Homo sapien
tctacccagattgcatgatccttga

SEQ ID NO: 4191737 - DNA, 25 bp, Homo sapien
ccagattgcatgatccttgaggaca

SEQ ID NO: 4191738 - DNA, 25 bp, Homo sapien
gatccctggatatgaagctcactag

SEQ ID NO: 4191739 - DNA, 25 bp, Homo sapien
accattttgggcaagacacagttag

SEQ ID NO: 4191740 - DNA, 25 bp, Homo sapien
tctccccgcaaaatgtgagcctgta

SEQ ID NO: 4191741 - DNA, 25 bp, Homo sapien
gaacaacccatgcttgatccctgga

SEQ ID NO: 4191742 - DNA, 25 bp, Homo sapien
cagagggatggcctgcggcaaggta

SEQ ID NO: 4191743 - DNA, 25 bp, Homo sapien
gaacaagcctttgagatcatcgtgt

SEQ ID NO: 4191744 - DNA, 25 bp, Homo sapien
gcctgcggcaaggtagctggtgcat

SEQ ID NO: 4191745 - DNA, 25 bp, Homo sapien
catgaacaagcctttgagatcatcg

SEQ ID NO: 4191746 - DNA, 25 bp, Homo sapien
catgtcttaatagttactctttccc

SEQ ID NO: 4191747 - DNA, 25 bp, Homo sapien
taacatgtcttaatagttactcttt

SEQ ID NO: 4191748 - DNA, 25 bp, Homo sapien
aataacatgtcttaatagttactct

SEQ ID NO: 4191749 - DNA, 25 bp, Homo sapien
ttgagcaggattttggttggagttt

SEQ ID NO: 4191750 - DNA, 25 bp, Homo sapien
ttatgaagatcagcaaagcattgat

SEQ ID NO: 4191751 - DNA, 25 bp, Homo sapien
tccacttggtatgaaggtgcatgca

SEQ ID NO: 4191752 - DNA, 25 bp, Homo sapien
ctgtaccaggtacagattaccaaag

SEQ ID NO: 4191753 - DNA, 25 bp, Homo sapien
agttcacccagtggactgtaccagg

SEQ ID NO: 4191754 - DNA, 25 bp, Homo sapien
ggctagaggactgcacttccagaag

SEQ ID NO: 4191755 - DNA, 25 bp, Homo sapien
gaagctggacttctaatatgggcac

SEQ ID NO: 4191756 - DNA, 25 bp, Homo sapien
tggctcctcaggacaatcattaggg

SEQ ID NO: 4191757 - DNA, 25 bp, Homo sapien
cccagagagggctgttgtatgctac

SEQ ID NO: 4191758 - DNA, 25 bp, Homo sapien
tgtggtgtgactgtccctgatgact

SEQ ID NO: 4191759 - DNA, 25 bp, Homo sapien
catggaattcttgtggtgtgactgt

SEQ ID NO: 4191760 - DNA, 25 bp, Homo sapien
tgatgactgatacctctgacctcag

SEQ ID NO: 4191761 - DNA, 25 bp, Homo sapien
tgactgtccctgatgactgatacct

SEQ ID NO: 4191762 - DNA, 25 bp, Homo sapien
tttaaggaacaggctcgtataccaa

SEQ ID NO: 4191763 - DNA, 25 bp, Homo sapien
ttttaaggaacaggctcgtatacca

SEQ ID NO: 4191764 - DNA, 25 bp, Homo sapien
ttaaggaacaggctcgtataccaag

SEQ ID NO: 4191765 - DNA, 25 bp, Homo sapien
taaggaacaggctcgtataccaaga

SEQ ID NO: 4191766 - DNA, 25 bp, Homo sapien
gtgaggtcactctcagtgaagccag

SEQ ID NO: 4191767 - DNA, 25 bp, Homo sapien
tggctatgccactgggaggcagtga

SEQ ID NO: 4191768 - DNA, 25 bp, Homo sapien
gagctgagcccaacttcctggctat

SEQ ID NO: 4191769 - DNA, 25 bp, Homo sapien
tgcgtggtacagatgggatcaccca

SEQ ID NO: 4191770 - DNA, 25 bp, Homo sapien
ggagaacgctcttctgatttatccc

SEQ ID NO: 4191771 - DNA, 25 bp, Homo sapien
tgtcctgtcttgaatccctgcacct

SEQ ID NO: 4191772 - DNA, 25 bp, Homo sapien
acctcttctggacctgattgtctgg

SEQ ID NO: 4191773 - DNA, 25 bp, Homo sapien
tcagctgcgctgaagctttgctctg

SEQ ID NO: 4191774 - DNA, 25 bp, Homo sapien
attctctttagacaccaccaaagtg

SEQ ID NO: 4191775 - DNA, 25 bp, Homo sapien
cagtctggggccattaactctttca

SEQ ID NO: 4191776 - DNA, 25 bp, Homo sapien
ttctctttagacaccaccaaagtgt

SEQ ID NO: 4191777 - DNA, 25 bp, Homo sapien
gattctctttagacaccaccaaagt

SEQ ID NO: 4191778 - DNA, 25 bp, Homo sapien
gctctctgttttgggtcctgagcat

SEQ ID NO: 4191779 - DNA, 25 bp, Homo sapien
gaagaggctctctgttttgggtcct

SEQ ID NO: 4191780 - DNA, 25 bp, Homo sapien
caaggcagtggttggaagaggctct

SEQ ID NO: 4191781 - DNA, 25 bp, Homo sapien
ctcaaggcagtggttggaagaggct

SEQ ID NO: 4191782 - DNA, 25 bp, Homo sapien
gaatgtgggacagagctgctttctt

SEQ ID NO: 4191783 - DNA, 25 bp, Homo sapien
tatgtcagggaatgtgggacagagc

SEQ ID NO: 4191784 - DNA, 25 bp, Homo sapien
cagggaatgtgggacagagctgctt

SEQ ID NO: 4191785 - DNA, 25 bp, Homo sapien
gggaatgtgggacagagctgctttc

SEQ ID NO: 4191786 - DNA, 25 bp, Homo sapien
aggcccagctgctaagagggccaga

SEQ ID NO: 4191787 - DNA, 25 bp, Homo sapien
tggtgccaggtagaagaggactgcc

SEQ ID NO: 4191788 - DNA, 25 bp, Homo sapien
gagagctgttgcacctgttgccgga

SEQ ID NO: 4191789 - DNA, 25 bp, Homo sapien
ccagagggaccctcagagagctgtt

SEQ ID NO: 4191790 - DNA, 25 bp, Homo sapien
gggccaggatcctgtccctgagctt

SEQ ID NO: 4191791 - DNA, 25 bp, Homo sapien
cctgtccctgagctttaaaactctt

SEQ ID NO: 4191792 - DNA, 25 bp, Homo sapien
gatcctgtccctgagctttaaaact

SEQ ID NO: 4191793 - DNA, 25 bp, Homo sapien
ccaggatcctgtccctgagctttaa

SEQ ID NO: 4191794 - DNA, 25 bp, Homo sapien
ttgacttttagtgaatagacttttg

SEQ ID NO: 4191795 - DNA, 25 bp, Homo sapien
tgacttttagtgaatagacttttgt

SEQ ID NO: 4191796 - DNA, 25 bp, Homo sapien
attgacttttagtgaatagactttt

SEQ ID NO: 4191797 - DNA, 25 bp, Homo sapien
catgtctgcactacaggagtcccat

SEQ ID NO: 4191798 - DNA, 25 bp, Homo sapien
tctgcactacaggagtcccatcccc

SEQ ID NO: 4191799 - DNA, 25 bp, Homo sapien
tgtctgcactacaggagtcccatcc

SEQ ID NO: 4191800 - DNA, 25 bp, Homo sapien
tgcactacaggagtcccatccccag

SEQ ID NO: 4191801 - DNA, 25 bp, Homo sapien
tctttccccattaagtgatgtccag

SEQ ID NO: 4191802 - DNA, 25 bp, Homo sapien
tgtgtcctctgtataacccctgttg

SEQ ID NO: 4191803 - DNA, 25 bp, Homo sapien
caccttcccaagatgaggcttccat

SEQ ID NO: 4191804 - DNA, 25 bp, Homo sapien
catctggatgaatagcaggagttct

SEQ ID NO: 4191805 - DNA, 25 bp, Homo sapien
tcactgtggacaggtctcggatctg

SEQ ID NO: 4191806 - DNA, 25 bp, Homo sapien
tgccagctgtttataactgccatca

SEQ ID NO: 4191807 - DNA, 25 bp, Homo sapien
gacaggtctcggatctgtggctgcc

SEQ ID NO: 4191808 - DNA, 25 bp, Homo sapien
gaacagcattaatgaggagcctgcc

SEQ ID NO: 4191809 - DNA, 25 bp, Homo sapien
gttggatccaatgtagcccatgtgc

SEQ ID NO: 4191810 - DNA, 25 bp, Homo sapien
ctcagagctcttagcagttggatcc

SEQ ID NO: 4191811 - DNA, 25 bp, Homo sapien
gagctcttagcagttggatccaatg

SEQ ID NO: 4191812 - DNA, 25 bp, Homo sapien
tagcagttggatccaatgtagccca

SEQ ID NO: 4191813 - DNA, 25 bp, Homo sapien
gatggggcttaaagaggttttcaga

SEQ ID NO: 4191814 - DNA, 25 bp, Homo sapien
ttctgctgatggggcttaaagaggt

SEQ ID NO: 4191815 - DNA, 25 bp, Homo sapien
ctgctgatggggcttaaagaggttt

SEQ ID NO: 4191816 - DNA, 25 bp, Homo sapien
gctgatggggcttaaagaggttttc

SEQ ID NO: 4191817 - DNA, 25 bp, Homo sapien
ccaggtcgacttaagacatcactgt

SEQ ID NO: 4191818 - DNA, 25 bp, Homo sapien
caggtcgacttaagacatcactgtt

SEQ ID NO: 4191819 - DNA, 25 bp, Homo sapien
aggtcgacttaagacatcactgttg

SEQ ID NO: 4191820 - DNA, 25 bp, Homo sapien
tcaggaaatggtgtaaggcttctct

SEQ ID NO: 4191821 - DNA, 25 bp, Homo sapien
aggcttctctcagtaggggcttcag

SEQ ID NO: 4191822 - DNA, 25 bp, Homo sapien
ttggtccaatcagttgtggcaaagg

SEQ ID NO: 4191823 - DNA, 25 bp, Homo sapien
cttctctcagtaggggcttcagtgg

SEQ ID NO: 4191824 - DNA, 25 bp, Homo sapien
gcttgtaagggctctacgccagctc

SEQ ID NO: 4191825 - DNA, 25 bp, Homo sapien
gtgcccatacctgttcacagactgc

SEQ ID NO: 4191826 - DNA, 25 bp, Homo sapien
gtgaaggaccacatagctctggctg

SEQ ID NO: 4191827 - DNA, 25 bp, Homo sapien
tccaagataagctgtgcccatacct

SEQ ID NO: 4191828 - DNA, 25 bp, Homo sapien
caggctgtgcgggaatgtgcatcac

SEQ ID NO: 4191829 - DNA, 25 bp, Homo sapien
ttctccaggctgtgcgggaatgtgc

SEQ ID NO: 4191830 - DNA, 25 bp, Homo sapien
gcgggaatgtgcatcaccatggaaa

SEQ ID NO: 4191831 - DNA, 25 bp, Homo sapien
gctgtgcgggaatgtgcatcaccat

SEQ ID NO: 4191832 - DNA, 25 bp, Homo sapien
gggcatcatccagattagtcacgtg

SEQ ID NO: 4191833 - DNA, 25 bp, Homo sapien
gaaaggccttaatttgtccatcttc

SEQ ID NO: 4191834 - DNA, 25 bp, Homo sapien
gctttggaaattgtccacaactccc

SEQ ID NO: 4191835 - DNA, 25 bp, Homo sapien
tgtgattcatcttctgcgaggaggc

SEQ ID NO: 4191836 - DNA, 25 bp, Homo sapien
gcaactcttgatggtgtttttccac

SEQ ID NO: 4191837 - DNA, 25 bp, Homo sapien
gcaaatctaatggacattcatgtga

SEQ ID NO: 4191838 - DNA, 25 bp, Homo sapien
caaatttactcatctctgatgcttc

SEQ ID NO: 4191839 - DNA, 25 bp, Homo sapien
cccaaatttactcatctctgatgct

SEQ ID NO: 4191840 - DNA, 25 bp, Homo sapien
atttactcatctctgatgcttctac

SEQ ID NO: 4191841 - DNA, 25 bp, Homo sapien
tttcccaaatttactcatctctgat

SEQ ID NO: 4191842 - DNA, 25 bp, Homo sapien
gtatcaagtgattttagatctgcaa

SEQ ID NO: 4191843 - DNA, 25 bp, Homo sapien
tgagcaaccaagttatacataatac

SEQ ID NO: 4191844 - DNA, 25 bp, Homo sapien
tgttcttaaatgtatcaagtgattt

SEQ ID NO: 4191845 - DNA, 25 bp, Homo sapien
tttatgagcaaccaagttatacata

SEQ ID NO: 4191846 - DNA, 25 bp, Homo sapien
catagaagacattcacggcattttc

SEQ ID NO: 4191847 - DNA, 25 bp, Homo sapien
ggatttcctggtgcccttacattgt

SEQ ID NO: 4191848 - DNA, 25 bp, Homo sapien
tttcaagcaggaagggatatttgga

SEQ ID NO: 4191849 - DNA, 25 bp, Homo sapien
tacattgtactgtgtaggcagcaac

SEQ ID NO: 4191850 - DNA, 25 bp, Homo sapien
taattggattggacacagattcttg

SEQ ID NO: 4191851 - DNA, 25 bp, Homo sapien
attggattggacacagattcttgcc

SEQ ID NO: 4191852 - DNA, 25 bp, Homo sapien
aattggattggacacagattcttgc

SEQ ID NO: 4191853 - DNA, 25 bp, Homo sapien
aagagaatctgcaatttggccatct

SEQ ID NO: 4191854 - DNA, 25 bp, Homo sapien
accagcatgggttcttttagtgatg

SEQ ID NO: 4191855 - DNA, 25 bp, Homo sapien
ccagaagagaatctgcaatttggcc

SEQ ID NO: 4191856 - DNA, 25 bp, Homo sapien
cagcatgggttcttttagtgatgat

SEQ ID NO: 4191857 - DNA, 25 bp, Homo sapien
gtcataagtcattgtgattgggata

SEQ ID NO: 4191858 - DNA, 25 bp, Homo sapien
tagagcagtaagtcataagtcattg

SEQ ID NO: 4191859 - DNA, 25 bp, Homo sapien
gaagcagccctcacaaatgtagcca

SEQ ID NO: 4191860 - DNA, 25 bp, Homo sapien
aatgtagccaatgtaggacaagcag

SEQ ID NO: 4191861 - DNA, 25 bp, Homo sapien
cttggaaagagagaactgttccagg

SEQ ID NO: 4191862 - DNA, 25 bp, Homo sapien
tgctgtgtagcctttcaggatgctg

SEQ ID NO: 4191863 - DNA, 25 bp, Homo sapien
gaaatcctatttctatgagctctgt

SEQ ID NO: 4191864 - DNA, 25 bp, Homo sapien
ctatttctatgagctctgtcccttc

SEQ ID NO: 4191865 - DNA, 25 bp, Homo sapien
ccagggcatttagttctggaccaca

SEQ ID NO: 4191866 - DNA, 25 bp, Homo sapien
tttgcaggcagcatttaggtggtaa

SEQ ID NO: 4191867 - DNA, 25 bp, Homo sapien
caggagggcaatgactgtggaagat

SEQ ID NO: 4191868 - DNA, 25 bp, Homo sapien
tttaggtggtaattccaggcagctg

SEQ ID NO: 4191869 - DNA, 25 bp, Homo sapien
gaaggtttcaaacatttgcaggcag

SEQ ID NO: 4191870 - DNA, 25 bp, Homo sapien
gaatcttaggaccataatgctcggg

SEQ ID NO: 4191871 - DNA, 25 bp, Homo sapien
aatcttaggaccataatgctcgggc

SEQ ID NO: 4191872 - DNA, 25 bp, Homo sapien
tcttaggaccataatgctcgggcat

SEQ ID NO: 4191873 - DNA, 25 bp, Homo sapien
atcttaggaccataatgctcgggca

SEQ ID NO: 4191874 - DNA, 25 bp, Homo sapien
ccctgggccaccagtggtaagaaca

SEQ ID NO: 4191875 - DNA, 25 bp, Homo sapien
tttggatatctatttgacgctggtt

SEQ ID NO: 4191876 - DNA, 25 bp, Homo sapien
tccaggagagaattcaatggtatta

SEQ ID NO: 4191877 - DNA, 25 bp, Homo sapien
acgctggttatgtgcttggccctgg

SEQ ID NO: 4191878 - DNA, 25 bp, Homo sapien
tctttgccattggtggatttttcag

SEQ ID NO: 4191879 - DNA, 25 bp, Homo sapien
cagacaggaccattctgtatgatct

SEQ ID NO: 4191880 - DNA, 25 bp, Homo sapien
tatgatctaactcaacagcaacttc

SEQ ID NO: 4191881 - DNA, 25 bp, Homo sapien
cagcaacttcatctaatactggcat

SEQ ID NO: 4191882 - DNA, 25 bp, Homo sapien
ggctgtaggcccaaatgacacccat

SEQ ID NO: 4191883 - DNA, 25 bp, Homo sapien
gtgagagaatggctgtaggcccaaa

SEQ ID NO: 4191884 - DNA, 25 bp, Homo sapien
agaatggctgtaggcccaaatgaca

SEQ ID NO: 4191885 - DNA, 25 bp, Homo sapien
tggctgtaggcccaaatgacaccca

SEQ ID NO: 4191886 - DNA, 25 bp, Homo sapien
tcttgttcattagcttctattgaca

SEQ ID NO: 4191887 - DNA, 25 bp, Homo sapien
tatggaagggtcatgttcatatgaa

SEQ ID NO: 4191888 - DNA, 25 bp, Homo sapien
cctttgggtatggaagggtcatgtt

SEQ ID NO: 4191889 - DNA, 25 bp, Homo sapien
ttttcttgttcattagcttctattg

SEQ ID NO: 4191890 - DNA, 25 bp, Homo sapien
cttgacctaatctgatgtactgttg

SEQ ID NO: 4191891 - DNA, 25 bp, Homo sapien
ctaatctgatgtactgttgtttagc

SEQ ID NO: 4191892 - DNA, 25 bp, Homo sapien
caaattcttgacctaatctgatgta

SEQ ID NO: 4191893 - DNA, 25 bp, Homo sapien
tttcacaaattcttgacctaatctg

SEQ ID NO: 4191894 - DNA, 25 bp, Homo sapien
taaacaagagggtattgccactgga

SEQ ID NO: 4191895 - DNA, 25 bp, Homo sapien
ttcgggcctggatggaataccctgc

SEQ ID NO: 4191896 - DNA, 25 bp, Homo sapien
tccaggtgccctaactctgaggagg

SEQ ID NO: 4191897 - DNA, 25 bp, Homo sapien
cgacctgacggagtttgctgaatac

SEQ ID NO: 4191898 - DNA, 25 bp, Homo sapien
cattgtggatcaaatcaagggctcc

SEQ ID NO: 4191899 - DNA, 25 bp, Homo sapien
tcctcctaaagcatcactcacggca

SEQ ID NO: 4191900 - DNA, 25 bp, Homo sapien
ataggttaccaacattttcttgatt

SEQ ID NO: 4191901 - DNA, 25 bp, Homo sapien
tggtacagagagagtgggtcctgca

SEQ ID NO: 4191902 - DNA, 25 bp, Homo sapien
atcatccagtgataggcctgtataa

SEQ ID NO: 4191903 - DNA, 25 bp, Homo sapien
gataggcctgtataagaactgcagg

SEQ ID NO: 4191904 - DNA, 25 bp, Homo sapien
aactggttacaagtcatgtttagca

SEQ ID NO: 4191905 - DNA, 25 bp, Homo sapien
ggttacaagtcatgtttagcatggg

SEQ ID NO: 4191906 - DNA, 25 bp, Homo sapien
gaactggttacaagtcatgtttagc

SEQ ID NO: 4191907 - DNA, 25 bp, Homo sapien
acaagtcatgtttagcatgggaaca

SEQ ID NO: 4191908 - DNA, 25 bp, Homo sapien
atcatcctgaatctgggcagggcct

SEQ ID NO: 4191909 - DNA, 25 bp, Homo sapien
cctgaatctgggcagggcctttgaa

SEQ ID NO: 4191910 - DNA, 25 bp, Homo sapien
tctgggcagggcctttgaatgtgta

SEQ ID NO: 4191911 - DNA, 25 bp, Homo sapien
ggcctttgaatgtgtaggaattgaa

SEQ ID NO: 4191912 - DNA, 25 bp, Homo sapien
gcgggcagcgcttgcctccaagcct

SEQ ID NO: 4191913 - DNA, 25 bp, Homo sapien
agctcgcgggcagcgcttgcctcca

SEQ ID NO: 4191914 - DNA, 25 bp, Homo sapien
cggcgcggactctcgggctacgaat

SEQ ID NO: 4191915 - DNA, 25 bp, Homo sapien
ctctcgggctacgaatgcggcgcgt

SEQ ID NO: 4191916 - DNA, 25 bp, Homo sapien
ggactgggaataacgggagcacaac

SEQ ID NO: 4191917 - DNA, 25 bp, Homo sapien
ccgcggcccggagctggtgacacat

SEQ ID NO: 4191918 - DNA, 25 bp, Homo sapien
tggtttccatcgagaggtcccccag

SEQ ID NO: 4191919 - DNA, 25 bp, Homo sapien
agttcggatgcaacatcaactccaa

SEQ ID NO: 4191920 - DNA, 25 bp, Homo sapien
tgctgaccaccaagactggataaaa

SEQ ID NO: 4191921 - DNA, 25 bp, Homo sapien
ttgctgaccaccaagactggataaa

SEQ ID NO: 4191922 - DNA, 25 bp, Homo sapien
gctgaccaccaagactggataaaat

SEQ ID NO: 4191923 - DNA, 25 bp, Homo sapien
tttgctgaccaccaagactggataa

SEQ ID NO: 4191924 - DNA, 25 bp, Homo sapien
aattctggatagctgcaatctctcc

SEQ ID NO: 4191925 - DNA, 25 bp, Homo sapien
caattctggatagctgcaatctctc

SEQ ID NO: 4191926 - DNA, 25 bp, Homo sapien
attctggatagctgcaatctctcca

SEQ ID NO: 4191927 - DNA, 25 bp, Homo sapien
tcaattctggatagctgcaatctct

SEQ ID NO: 4191928 - DNA, 25 bp, Homo sapien
ccagagaacacattcctgcataggc

SEQ ID NO: 4191929 - DNA, 25 bp, Homo sapien
cagagaacacattcctgcataggca

SEQ ID NO: 4191930 - DNA, 25 bp, Homo sapien
catgatcaccaaacttaaagagctt

SEQ ID NO: 4191931 - DNA, 25 bp, Homo sapien
acatcaccatgatcaccaaacttaa

SEQ ID NO: 4191932 - DNA, 25 bp, Homo sapien
ggggatctgccaaacccagtcctgg

SEQ ID NO: 4191933 - DNA, 25 bp, Homo sapien
gcgggcaggacagtggatacataac

SEQ ID NO: 4191934 - DNA, 25 bp, Homo sapien
tttacgcaaaagacgacacaccaga

SEQ ID NO: 4191935 - DNA, 25 bp, Homo sapien
cctggaatagagtagtgtagttggc

SEQ ID NO: 4191936 - DNA, 25 bp, Homo sapien
tttaagtccctcaacacctgttcca

SEQ ID NO: 4191937 - DNA, 25 bp, Homo sapien
agtccctcaacacctgttccaatcc

SEQ ID NO: 4191938 - DNA, 25 bp, Homo sapien
taagtccctcaacacctgttccaat

SEQ ID NO: 4191939 - DNA, 25 bp, Homo sapien
ttaagtccctcaacacctgttccaa

SEQ ID NO: 4191940 - DNA, 25 bp, Homo sapien
tctataacatggaaatttgctctca

SEQ ID NO: 4191941 - DNA, 25 bp, Homo sapien
tatcaggatacagtagctgctgcac

SEQ ID NO: 4191942 - DNA, 25 bp, Homo sapien
ttgtgataactgagtcctccaaagg

SEQ ID NO: 4191943 - DNA, 25 bp, Homo sapien
cccatgaagggaaaccatttatatt

SEQ ID NO: 4191944 - DNA, 25 bp, Homo sapien
atccacttactggtgggacttggaa

SEQ ID NO: 4191945 - DNA, 25 bp, Homo sapien
tcaaatccacttactggtgggactt

SEQ ID NO: 4191946 - DNA, 25 bp, Homo sapien
aaatccacttactggtgggacttgg

SEQ ID NO: 4191947 - DNA, 25 bp, Homo sapien
atatcaaatccacttactggtggga

SEQ ID NO: 4191948 - DNA, 25 bp, Homo sapien
aatgtagatcctctcttgaccctgg

SEQ ID NO: 4191949 - DNA, 25 bp, Homo sapien
tgtatagcttgttcaaaacgccggt

SEQ ID NO: 4191950 - DNA, 25 bp, Homo sapien
cacagggatgtgcaagaggtctgca

SEQ ID NO: 4191951 - DNA, 25 bp, Homo sapien
gaggtctgcacaaacactatggtgt

SEQ ID NO: 4191952 - DNA, 25 bp, Homo sapien
tgaggaactccgcagtaaaccaaag

SEQ ID NO: 4191953 - DNA, 25 bp, Homo sapien
tcagataggatgctaacctggtcat

SEQ ID NO: 4191954 - DNA, 25 bp, Homo sapien
gaagtcaggttcgtatccagtgagt

SEQ ID NO: 4191955 - DNA, 25 bp, Homo sapien
ttgaaatcgtccagagtcagaagct

SEQ ID NO: 4191956 - DNA, 25 bp, Homo sapien
gacctggacagcttttagagttcta

SEQ ID NO: 4191957 - DNA, 25 bp, Homo sapien
taatgactgtgattggacctggaca

SEQ ID NO: 4191958 - DNA, 25 bp, Homo sapien
ctttaataactcatgactaggtcca

SEQ ID NO: 4191959 - DNA, 25 bp, Homo sapien
aaagagtttccattaagtcgtcaga

SEQ ID NO: 4191960 - DNA, 25 bp, Homo sapien
cacctctggagtctgctgaatcaaa

SEQ ID NO: 4191961 - DNA, 25 bp, Homo sapien
tccaggattcgcagtaagagggctc

SEQ ID NO: 4191962 - DNA, 25 bp, Homo sapien
gactgataaattggcctgggaggaa

SEQ ID NO: 4191963 - DNA, 25 bp, Homo sapien
caagatctacaagggtctgaccggt

SEQ ID NO: 4191964 - DNA, 25 bp, Homo sapien
taggactcaaaattgttgggtctta

SEQ ID NO: 4191965 - DNA, 25 bp, Homo sapien
ctaggactcaaaattgttgggtctt

SEQ ID NO: 4191966 - DNA, 25 bp, Homo sapien
gccaggaaaggtgaccagacccttc

SEQ ID NO: 4191967 - DNA, 25 bp, Homo sapien
cagacccttcctagggtactgtcgt

SEQ ID NO: 4191968 - DNA, 25 bp, Homo sapien
ccctcttgccaggaaaggtgaccag

SEQ ID NO: 4191969 - DNA, 25 bp, Homo sapien
tgatgtctttccctcttgccaggaa

SEQ ID NO: 4191970 - DNA, 25 bp, Homo sapien
cccaaatccatgaggaggaagatgg

SEQ ID NO: 4191971 - DNA, 25 bp, Homo sapien
tctctcgggcatccaaaaacaaata

SEQ ID NO: 4191972 - DNA, 25 bp, Homo sapien
atttctctcgggcatccaaaaacaa

SEQ ID NO: 4191973 - DNA, 25 bp, Homo sapien
aacccaaatccatgaggaggaagat

SEQ ID NO: 4191974 - DNA, 25 bp, Homo sapien
atgactggctaatgttaatgaaggc

SEQ ID NO: 4191975 - DNA, 25 bp, Homo sapien
tgactggctaatgttaatgaaggca

SEQ ID NO: 4191976 - DNA, 25 bp, Homo sapien
ggtccagaaagatagcatagtcact

SEQ ID NO: 4191977 - DNA, 25 bp, Homo sapien
ggttagtgttagaagcaggtccaga

SEQ ID NO: 4191978 - DNA, 25 bp, Homo sapien
cctgtattgaggttagtgttagaag

SEQ ID NO: 4191979 - DNA, 25 bp, Homo sapien
tctgaagtgacaccaaaggattttg

SEQ ID NO: 4191980 - DNA, 25 bp, Homo sapien
tatgtaacgtctctcaaaggaactc

SEQ ID NO: 4191981 - DNA, 25 bp, Homo sapien
ggtttgtaggaatgcaactaggcct

SEQ ID NO: 4191982 - DNA, 25 bp, Homo sapien
tcccaacaccaacctgtggctgtag

SEQ ID NO: 4191983 - DNA, 25 bp, Homo sapien
taattctttgaggtgggtagctttc

SEQ ID NO: 4191984 - DNA, 25 bp, Homo sapien
tgaaattcaagcattgtgctctccc

SEQ ID NO: 4191985 - DNA, 25 bp, Homo sapien
caaattgacctgcacatgttgagaa

SEQ ID NO: 4191986 - DNA, 25 bp, Homo sapien
tgtggctcccaatacctgctcataa

SEQ ID NO: 4191987 - DNA, 25 bp, Homo sapien
caatctatgcttgtcctgacatgca

SEQ ID NO: 4191988 - DNA, 25 bp, Homo sapien
tacttcgcaactgtccagcacactt

SEQ ID NO: 4191989 - DNA, 25 bp, Homo sapien
gtttacttcgcaactgtccagcaca

SEQ ID NO: 4191990 - DNA, 25 bp, Homo sapien
taaatgtttacttcgcaactgtcca

SEQ ID NO: 4191991 - DNA, 25 bp, Homo sapien
agtaaatgtttacttcgcaactgtc

SEQ ID NO: 4191992 - DNA, 25 bp, Homo sapien
aaatccgggtcccttcgtagagatg

SEQ ID NO: 4191993 - DNA, 25 bp, Homo sapien
cagccccttgccaggaaagctagct

SEQ ID NO: 4191994 - DNA, 25 bp, Homo sapien
gacttcagccgcttcttaaaccgtg

SEQ ID NO: 4191995 - DNA, 25 bp, Homo sapien
aaagctagctctccccttaaatccg

SEQ ID NO: 4191996 - DNA, 25 bp, Homo sapien
tataatctattgattcaaagtgcaa

SEQ ID NO: 4191997 - DNA, 25 bp, Homo sapien
gtgagtactgtactccaggtccaga

SEQ ID NO: 4191998 - DNA, 25 bp, Homo sapien
catttgttacagatgtgtatgcacg

SEQ ID NO: 4191999 - DNA, 25 bp, Homo sapien
ctggattccctctctacaagagaaa

SEQ ID NO: 4192000 - DNA, 25 bp, Homo sapien
tatctacatacattacgacacacac

SEQ ID NO: 4192001 - DNA, 25 bp, Homo sapien
ctatatagacaaatacgtcttgctt

SEQ ID NO: 4192002 - DNA, 25 bp, Homo sapien
tatagacaaatacgtcttgctttaa

SEQ ID NO: 4192003 - DNA, 25 bp, Homo sapien
taaccaccagtctttgttatctaca

SEQ ID NO: 4192004 - DNA, 25 bp, Homo sapien
tagagtttgttcatgattactacag

SEQ ID NO: 4192005 - DNA, 25 bp, Homo sapien
ggcgcattcacaacattattcacat

SEQ ID NO: 4192006 - DNA, 25 bp, Homo sapien
tactacaggtatctgggagtccttc

SEQ ID NO: 4192007 - DNA, 25 bp, Homo sapien
ccgtggaatgtttatggacaatggc

SEQ ID NO: 4192008 - DNA, 25 bp, Homo sapien
caaaaaacatacttagcaatatacc

SEQ ID NO: 4192009 - DNA, 25 bp, Homo sapien
ggatgcccactcttactactcttct

SEQ ID NO: 4192010 - DNA, 25 bp, Homo sapien
ccaaatcaataaagaggaagtcggc

SEQ ID NO: 4192011 - DNA, 25 bp, Homo sapien
caccaacaacgagcaagctgagtat

SEQ ID NO: 4192012 - DNA, 25 bp, Homo sapien
ttgagtgccactaagagtaagcggc

SEQ ID NO: 4192013 - DNA, 25 bp, Homo sapien
catttggccttcacgtgatcctcac

SEQ ID NO: 4192014 - DNA, 25 bp, Homo sapien
gctaaacttcaccaacagatgcaga

SEQ ID NO: 4192015 - DNA, 25 bp, Homo sapien
taaagatggtgctatgtcagccaga

SEQ ID NO: 4192016 - DNA, 25 bp, Homo sapien
cttgaccttccgatctcaaatgatt

SEQ ID NO: 4192017 - DNA, 25 bp, Homo sapien
tatgttattaagtcccaggttcaag

SEQ ID NO: 4192018 - DNA, 25 bp, Homo sapien
aatcctagactgctcaagaaaacag

SEQ ID NO: 4192019 - DNA, 25 bp, Homo sapien
gcgtgagccattatacttggcttac

SEQ ID NO: 4192020 - DNA, 25 bp, Homo sapien
gactgtgctgtcacaaatcctgtct

SEQ ID NO: 4192021 - DNA, 25 bp, Homo sapien
ggcaatgaatgactgtgctgtcaca

SEQ ID NO: 4192022 - DNA, 25 bp, Homo sapien
tgaatgactgtgctgtcacaaatcc

SEQ ID NO: 4192023 - DNA, 25 bp, Homo sapien
tgcagccctgaacatgggggctttc

SEQ ID NO: 4192024 - DNA, 25 bp, Homo sapien
tacctggcatatagttagcattcaa

SEQ ID NO: 4192025 - DNA, 25 bp, Homo sapien
tcaagaccagacacaatacctggca

SEQ ID NO: 4192026 - DNA, 25 bp, Homo sapien
ctcaacatgcttaaggctcctaaag

SEQ ID NO: 4192027 - DNA, 25 bp, Homo sapien
ggtgtaactctttcactagactgta

SEQ ID NO: 4192028 - DNA, 25 bp, Homo sapien
ttcattgagctttcttaccatccag

SEQ ID NO: 4192029 - DNA, 25 bp, Homo sapien
agactctttcctcagattgatctgt

SEQ ID NO: 4192030 - DNA, 25 bp, Homo sapien
ttagaattgtcagagttcttgtgct

SEQ ID NO: 4192031 - DNA, 25 bp, Homo sapien
taatgcttctagttgtattatggaa

SEQ ID NO: 4192032 - DNA, 25 bp, Homo sapien
acgcccggcctgttctcatctttat

SEQ ID NO: 4192033 - DNA, 25 bp, Homo sapien
tctgtttctgcgaatttgcttagga

SEQ ID NO: 4192034 - DNA, 25 bp, Homo sapien
catgttgctacaaagaacaagactt

SEQ ID NO: 4192035 - DNA, 25 bp, Homo sapien
tatgtccatgtgtacttgatgttta

SEQ ID NO: 4192036 - DNA, 25 bp, Homo sapien
ggaactcttgctggcctcctgtgtc

SEQ ID NO: 4192037 - DNA, 25 bp, Homo sapien
tgccttctcacaccaggcatttgta

SEQ ID NO: 4192038 - DNA, 25 bp, Homo sapien
aatgctaccgtccttaccacaatac

SEQ ID NO: 4192039 - DNA, 25 bp, Homo sapien
ctgtgtccttccatgtgcttattat

SEQ ID NO: 4192040 - DNA, 25 bp, Homo sapien
gaaacaactgcttaggaagattagt

SEQ ID NO: 4192041 - DNA, 25 bp, Homo sapien
caataacatcaatagttagtaattt

SEQ ID NO: 4192042 - DNA, 25 bp, Homo sapien
aagattagttcctctgaacaaacaa

SEQ ID NO: 4192043 - DNA, 25 bp, Homo sapien
tagttcctctgaacaaacaatgaca

SEQ ID NO: 4192044 - DNA, 25 bp, Homo sapien
gaggcatcatcatgatggttattca

SEQ ID NO: 4192045 - DNA, 25 bp, Homo sapien
tgaatttagaggcatcatcatgatg

SEQ ID NO: 4192046 - DNA, 25 bp, Homo sapien
gaatttagaggcatcatcatgatgg

SEQ ID NO: 4192047 - DNA, 25 bp, Homo sapien
atcatcatgatggttattcagcaac

SEQ ID NO: 4192048 - DNA, 25 bp, Homo sapien
tgaagtagagggatgaaatcctcct

SEQ ID NO: 4192049 - DNA, 25 bp, Homo sapien
aaatcctcctgttctagagagctgc

SEQ ID NO: 4192050 - DNA, 25 bp, Homo sapien
tctagagagctgcagttgggctttg

SEQ ID NO: 4192051 - DNA, 25 bp, Homo sapien
aagtagagggatgaaatcctcctgt

SEQ ID NO: 4192052 - DNA, 25 bp, Homo sapien
gatctgtgtagctcaattgacatgt

SEQ ID NO: 4192053 - DNA, 25 bp, Homo sapien
cttcagtgggagtagccctgaagga

SEQ ID NO: 4192054 - DNA, 25 bp, Homo sapien
tcatttaacgagaggatcttactgc

SEQ ID NO: 4192055 - DNA, 25 bp, Homo sapien
tagaatctgatatctagatctgtgt

SEQ ID NO: 4192056 - DNA, 25 bp, Homo sapien
catttcagaaggtgcttcagtgatt

SEQ ID NO: 4192057 - DNA, 25 bp, Homo sapien
atttcagaaggtgcttcagtgattg

SEQ ID NO: 4192058 - DNA, 25 bp, Homo sapien
tcatttcagaaggtgcttcagtgat

SEQ ID NO: 4192059 - DNA, 25 bp, Homo sapien
taacagagaagttatcttcttgcat

SEQ ID NO: 4192060 - DNA, 25 bp, Homo sapien
aacagagaagttatcttcttgcatt

SEQ ID NO: 4192061 - DNA, 25 bp, Homo sapien
ccccagagttcgtgagagtgatcct

SEQ ID NO: 4192062 - DNA, 25 bp, Homo sapien
ggtaatgggattgggactactgcca

SEQ ID NO: 4192063 - DNA, 25 bp, Homo sapien
gatctgacgtttattcaggtctgag

SEQ ID NO: 4192064 - DNA, 25 bp, Homo sapien
cctttgtagtctggtggtgtagtct

SEQ ID NO: 4192065 - DNA, 25 bp, Homo sapien
cacacagcagctatctcatggcatt

SEQ ID NO: 4192066 - DNA, 25 bp, Homo sapien
tactgagctgactgatgatgccttt

SEQ ID NO: 4192067 - DNA, 25 bp, Homo sapien
gcactgagcagtagcattttaaggt

SEQ ID NO: 4192068 - DNA, 25 bp, Homo sapien
gaaattgagactaaacacacagcag

SEQ ID NO: 4192069 - DNA, 25 bp, Homo sapien
ctgaacaccaaagtaagcctaaaag

SEQ ID NO: 4192070 - DNA, 25 bp, Homo sapien
tcttctatatttataactggagatc

SEQ ID NO: 4192071 - DNA, 25 bp, Homo sapien
ctcttctatatttataactggagat

SEQ ID NO: 4192072 - DNA, 25 bp, Homo sapien
cttgatagaaagtatgtctggcttt

SEQ ID NO: 4192073 - DNA, 25 bp, Homo sapien
tgtacttcatgtttctttttacgca

SEQ ID NO: 4192074 - DNA, 25 bp, Homo sapien
ttgtacttcatgtttctttttacgc

SEQ ID NO: 4192075 - DNA, 25 bp, Homo sapien
gtacttcatgtttctttttacgcag

SEQ ID NO: 4192076 - DNA, 25 bp, Homo sapien
cctgaggtagcaactaaactcttag

SEQ ID NO: 4192077 - DNA, 25 bp, Homo sapien
ctgtggacctgaggtagcaactaaa

SEQ ID NO: 4192078 - DNA, 25 bp, Homo sapien
tggacctgaggtagcaactaaactc

SEQ ID NO: 4192079 - DNA, 25 bp, Homo sapien
gaggtagcaactaaactcttagagt

SEQ ID NO: 4192080 - DNA, 25 bp, Homo sapien
actttgtgccttaagcatttgcatt

SEQ ID NO: 4192081 - DNA, 25 bp, Homo sapien
ataagagggtcagaggaagtcctac

SEQ ID NO: 4192082 - DNA, 25 bp, Homo sapien
tatggcacctcggagagcaacaggg

SEQ ID NO: 4192083 - DNA, 25 bp, Homo sapien
gcaacaggggataagagggtcagag

SEQ ID NO: 4192084 - DNA, 25 bp, Homo sapien
gcatggtcagtgaatgcagagaatg

SEQ ID NO: 4192085 - DNA, 25 bp, Homo sapien
cagcagttggctcgtgtggatacag

SEQ ID NO: 4192086 - DNA, 25 bp, Homo sapien
tgttaaatacagcagttggctcgtg

SEQ ID NO: 4192087 - DNA, 25 bp, Homo sapien
gtggatacagtactgcagagaaaga

SEQ ID NO: 4192088 - DNA, 25 bp, Homo sapien
ccacagttagtaagctccttatgaa

SEQ ID NO: 4192089 - DNA, 25 bp, Homo sapien
tttgactttttaccaacagacattc

SEQ ID NO: 4192090 - DNA, 25 bp, Homo sapien
atcatcagtgatgtcgagttttttt

SEQ ID NO: 4192091 - DNA, 25 bp, Homo sapien
atcgttggccacatgcacgtcttct

SEQ ID NO: 4192092 - DNA, 25 bp, Homo sapien
ttgactttttaccaacagacattct

SEQ ID NO: 4192093 - DNA, 25 bp, Homo sapien
tattaggcccattaactattagtta

SEQ ID NO: 4192094 - DNA, 25 bp, Homo sapien
taggtttgctaagggtaacagcctc

SEQ ID NO: 4192095 - DNA, 25 bp, Homo sapien
tgttaggtttgctaagggtaacagc

SEQ ID NO: 4192096 - DNA, 25 bp, Homo sapien
attaggcccattaactattagttat

SEQ ID NO: 4192097 - DNA, 25 bp, Homo sapien
tgcctggcctcagtggctcttttta

SEQ ID NO: 4192098 - DNA, 25 bp, Homo sapien
tgtgcctggcctcagtggctctttt

SEQ ID NO: 4192099 - DNA, 25 bp, Homo sapien
gtgcctggcctcagtggctcttttt

SEQ ID NO: 4192100 - DNA, 25 bp, Homo sapien
agacctgcttggaggaattttacca

SEQ ID NO: 4192101 - DNA, 25 bp, Homo sapien
tggaggaattttaccaccttctctc

SEQ ID NO: 4192102 - DNA, 25 bp, Homo sapien
tctcaaatgtaactgtattgcatgg

SEQ ID NO: 4192103 - DNA, 25 bp, Homo sapien
taactgtattgcatggagttgctcc

SEQ ID NO: 4192104 - DNA, 25 bp, Homo sapien
aatcaaatggagtcaatttgggtcc

SEQ ID NO: 4192105 - DNA, 25 bp, Homo sapien
tcaatttgggtcctatgtattttcc

SEQ ID NO: 4192106 - DNA, 25 bp, Homo sapien
gtctgcaaagtagccttttctgatt

SEQ ID NO: 4192107 - DNA, 25 bp, Homo sapien
ttattttcctaggtgtctgcaaagt

SEQ ID NO: 4192108 - DNA, 25 bp, Homo sapien
cgggagtggaattctggagcatctt

SEQ ID NO: 4192109 - DNA, 25 bp, Homo sapien
agcatctttcaggaacgtgagacca

SEQ ID NO: 4192110 - DNA, 25 bp, Homo sapien
gaccagggtgggtatccaccacatc

SEQ ID NO: 4192111 - DNA, 25 bp, Homo sapien
tctttcaggaacgtgagaccagggt

SEQ ID NO: 4192112 - DNA, 25 bp, Homo sapien
taaatctccttattcagtggccaca

SEQ ID NO: 4192113 - DNA, 25 bp, Homo sapien
tagcctgtgctaacctacttatcta

SEQ ID NO: 4192114 - DNA, 25 bp, Homo sapien
cactgattcagcactttagatggct

SEQ ID NO: 4192115 - DNA, 25 bp, Homo sapien
catttttccatagcctaaatctcct

SEQ ID NO: 4192116 - DNA, 25 bp, Homo sapien
tgttgactgtgtagaatattctctg

SEQ ID NO: 4192117 - DNA, 25 bp, Homo sapien
tttcttatctctgtcgaagtaattt

SEQ ID NO: 4192118 - DNA, 25 bp, Homo sapien
ccactccaagatctgttgactgtgt

SEQ ID NO: 4192119 - DNA, 25 bp, Homo sapien
atctctgtcgaagtaatttttccac

SEQ ID NO: 4192120 - DNA, 25 bp, Homo sapien
tatcgagacagatcggcctggctga

SEQ ID NO: 4192121 - DNA, 25 bp, Homo sapien
cgtgatcagtatctagttcccagaa

SEQ ID NO: 4192122 - DNA, 25 bp, Homo sapien
cctggctgatgtagaggtcgtgatc

SEQ ID NO: 4192123 - DNA, 25 bp, Homo sapien
tgttcataggagaagtaatctgtaa

SEQ ID NO: 4192124 - DNA, 25 bp, Homo sapien
cttgttactgcaccagagaatatcc

SEQ ID NO: 4192125 - DNA, 25 bp, Homo sapien
caacagccagaatgtcaactactaa

SEQ ID NO: 4192126 - DNA, 25 bp, Homo sapien
gagagcagttgatttctcagagaac

SEQ ID NO: 4192127 - DNA, 25 bp, Homo sapien
tcttaaactatgtatccaacagagg

SEQ ID NO: 4192128 - DNA, 25 bp, Homo sapien
tatccagactctatatcgaacttaa

SEQ ID NO: 4192129 - DNA, 25 bp, Homo sapien
ttcttcagagatcaaaaaccaaaca

SEQ ID NO: 4192130 - DNA, 25 bp, Homo sapien
ctggtaggattccttttgtcttctt

SEQ ID NO: 4192131 - DNA, 25 bp, Homo sapien
aaccaaacaaaatctgcatagctca

SEQ ID NO: 4192132 - DNA, 25 bp, Homo sapien
tgtcttcttcagagatcaaaaacca

SEQ ID NO: 4192133 - DNA, 25 bp, Homo sapien
ggtcagttccccagaaaagcatttc

SEQ ID NO: 4192134 - DNA, 25 bp, Homo sapien
acccagtgtcgaatcttcaggtctt

SEQ ID NO: 4192135 - DNA, 25 bp, Homo sapien
gggatgacccagtgtcgaatcttca

SEQ ID NO: 4192136 - DNA, 25 bp, Homo sapien
tttattcttgggcaggtcagttccc

SEQ ID NO: 4192137 - DNA, 25 bp, Homo sapien
cagtaatggtatagctactagccgc

SEQ ID NO: 4192138 - DNA, 25 bp, Homo sapien
ttttctcagtgcaaatacaaaacag

SEQ ID NO: 4192139 - DNA, 25 bp, Homo sapien
tctgggagggttacacagctttatc

SEQ ID NO: 4192140 - DNA, 25 bp, Homo sapien
tgagatctacatagcccagtaatgg

SEQ ID NO: 4192141 - DNA, 25 bp, Homo sapien
gaattttagttgtgagctcctgcgc

SEQ ID NO: 4192142 - DNA, 25 bp, Homo sapien
ccagtattgatgagaagtctaaagc

SEQ ID NO: 4192143 - DNA, 25 bp, Homo sapien
tgttttttgcctcttagaagcccgc

SEQ ID NO: 4192144 - DNA, 25 bp, Homo sapien
tatctattcctttgactgtaaccca

SEQ ID NO: 4192145 - DNA, 25 bp, Homo sapien
tagaagtactccagctcatacatgg

SEQ ID NO: 4192146 - DNA, 25 bp, Homo sapien
gcatctggcacagtaaatcatggaa

SEQ ID NO: 4192147 - DNA, 25 bp, Homo sapien
ggcaagggctcaattcccatggctt

SEQ ID NO: 4192148 - DNA, 25 bp, Homo sapien
catggagagtacaccgtctccatcc

SEQ ID NO: 4192149 - DNA, 25 bp, Homo sapien
tcatagaagatgtgagccattctgc

SEQ ID NO: 4192150 - DNA, 25 bp, Homo sapien
aagtgtcatagaagatgtgagccat

SEQ ID NO: 4192151 - DNA, 25 bp, Homo sapien
atttctccagattaaagaaagtgtc

SEQ ID NO: 4192152 - DNA, 25 bp, Homo sapien
ggatctctctgttcatggtctaagt

SEQ ID NO: 4192153 - DNA, 25 bp, Homo sapien
aaattataactgtttagcagccagg

SEQ ID NO: 4192154 - DNA, 25 bp, Homo sapien
caaatgtatactgctgaaaaaatcc

SEQ ID NO: 4192155 - DNA, 25 bp, Homo sapien
ttctacacctcaaatggcaaaatta

SEQ ID NO: 4192156 - DNA, 25 bp, Homo sapien
caaagaattggagatagatcatcac

SEQ ID NO: 4192157 - DNA, 25 bp, Homo sapien
tgggcagattcctctgcaacaagcg

SEQ ID NO: 4192158 - DNA, 25 bp, Homo sapien
ccttcctggaattgtgcttgggcag

SEQ ID NO: 4192159 - DNA, 25 bp, Homo sapien
tgcaacaagcgtctcatactcctca

SEQ ID NO: 4192160 - DNA, 25 bp, Homo sapien
agcggcaaaccggtcccagtctgag

SEQ ID NO: 4192161 - DNA, 25 bp, Homo sapien
taatactctggacatgcgcattcct

SEQ ID NO: 4192162 - DNA, 25 bp, Homo sapien
agggggttttaatactctggacatg

SEQ ID NO: 4192163 - DNA, 25 bp, Homo sapien
ttctataagacatagggaaacttac

SEQ ID NO: 4192164 - DNA, 25 bp, Homo sapien
gcgcattcctgttaaaaattctata

SEQ ID NO: 4192165 - DNA, 25 bp, Homo sapien
ccagtgaaagatgagactcattaaa

SEQ ID NO: 4192166 - DNA, 25 bp, Homo sapien
tatgtacagggtttatcaatatcac

SEQ ID NO: 4192167 - DNA, 25 bp, Homo sapien
gagctttagttcttttagcctcctc

SEQ ID NO: 4192168 - DNA, 25 bp, Homo sapien
cagtgatctcggtttccagtgaaag

SEQ ID NO: 4192169 - DNA, 25 bp, Homo sapien
tggaattatgccctgactagtagaa

SEQ ID NO: 4192170 - DNA, 25 bp, Homo sapien
tacagaagctatgactaaggaagaa

SEQ ID NO: 4192171 - DNA, 25 bp, Homo sapien
tcttaacatggtccctttatggaat

SEQ ID NO: 4192172 - DNA, 25 bp, Homo sapien
tacatgtagaagttacttcctgcac

SEQ ID NO: 4192173 - DNA, 25 bp, Homo sapien
tctgttccaagctccatagtcaggg

SEQ ID NO: 4192174 - DNA, 25 bp, Homo sapien
tgttgctgaggtgtagctatttcag

SEQ ID NO: 4192175 - DNA, 25 bp, Homo sapien
tttctctgttccaagctccatagtc

SEQ ID NO: 4192176 - DNA, 25 bp, Homo sapien
tatttcagtgactgggctttctctg

SEQ ID NO: 4192177 - DNA, 25 bp, Homo sapien
gatagttgtatatgcttcacgaggt

SEQ ID NO: 4192178 - DNA, 25 bp, Homo sapien
tagttgtatatgcttcacgaggttc

SEQ ID NO: 4192179 - DNA, 25 bp, Homo sapien
ctgatagttgtatatgcttcacgag

SEQ ID NO: 4192180 - DNA, 25 bp, Homo sapien
tactgatagttgtatatgcttcacg

SEQ ID NO: 4192181 - DNA, 25 bp, Homo sapien
gcttacaagtctcggggttgctctt

SEQ ID NO: 4192182 - DNA, 25 bp, Homo sapien
gtgaatttgacgcttacaagtctcg

SEQ ID NO: 4192183 - DNA, 25 bp, Homo sapien
gaatttgacgcttacaagtctcggg

SEQ ID NO: 4192184 - DNA, 25 bp, Homo sapien
ttggtgaatttgacgcttacaagtc

SEQ ID NO: 4192185 - DNA, 25 bp, Homo sapien
agttgtgaggtttgagtgagtttct

SEQ ID NO: 4192186 - DNA, 25 bp, Homo sapien
gatagtttgttgtgatttctgttct

SEQ ID NO: 4192187 - DNA, 25 bp, Homo sapien
agatagtttgttgtgatttctgttc

SEQ ID NO: 4192188 - DNA, 25 bp, Homo sapien
tttccatgtagttgtgaggtttgag

SEQ ID NO: 4192189 - DNA, 25 bp, Homo sapien
catgttgctgggttgtggtgtacac

SEQ ID NO: 4192190 - DNA, 25 bp, Homo sapien
gtagctttttgactatcaccctcct

SEQ ID NO: 4192191 - DNA, 25 bp, Homo sapien
acccaggtagtagcacagtacttga

SEQ ID NO: 4192192 - DNA, 25 bp, Homo sapien
tgaatatgatggacgtataagtgca

SEQ ID NO: 4192193 - DNA, 25 bp, Homo sapien
cgcagtatttaggtgtgagtgtccc

SEQ ID NO: 4192194 - DNA, 25 bp, Homo sapien
accataactgtgatgttaactacag

SEQ ID NO: 4192195 - DNA, 25 bp, Homo sapien
cattgatttttgaataagccaacct

SEQ ID NO: 4192196 - DNA, 25 bp, Homo sapien
ccttacttgggtgagaattattgtc

SEQ ID NO: 4192197 - DNA, 25 bp, Homo sapien
cagtgggtcgttccggttgcttctt

SEQ ID NO: 4192198 - DNA, 25 bp, Homo sapien
ttttgcagtgggtcgttccggttgc

SEQ ID NO: 4192199 - DNA, 25 bp, Homo sapien
gtcgttccggttgcttctttccatg

SEQ ID NO: 4192200 - DNA, 25 bp, Homo sapien
tgcagtgggtcgttccggttgcttc

SEQ ID NO: 4192201 - DNA, 25 bp, Homo sapien
tagttttacatccttaccagcccaa

SEQ ID NO: 4192202 - DNA, 25 bp, Homo sapien
tttgagctactaggaataatgctgt

SEQ ID NO: 4192203 - DNA, 25 bp, Homo sapien
tcaagtggctgtgtagtatatctca

SEQ ID NO: 4192204 - DNA, 25 bp, Homo sapien
ccacattactgccaactggtgattt

SEQ ID NO: 4192205 - DNA, 25 bp, Homo sapien
gcccagctgagaacaaactcttttt

SEQ ID NO: 4192206 - DNA, 25 bp, Homo sapien
aattctctaacatagttttgttagc

SEQ ID NO: 4192207 - DNA, 25 bp, Homo sapien
aatttggccagcaacaccactgcct

SEQ ID NO: 4192208 - DNA, 25 bp, Homo sapien
ggttcatgtaatttggccagcaaca

SEQ ID NO: 4192209 - DNA, 25 bp, Homo sapien
tgtttccaaattcagagggagaggc

SEQ ID NO: 4192210 - DNA, 25 bp, Homo sapien
ttgtttccaaattcagagggagagg

SEQ ID NO: 4192211 - DNA, 25 bp, Homo sapien
gtttccaaattcagagggagaggca

SEQ ID NO: 4192212 - DNA, 25 bp, Homo sapien
tactagggctaagtcaattctggag

SEQ ID NO: 4192213 - DNA, 25 bp, Homo sapien
cagtcacctgtgtagagaaccgtgc

SEQ ID NO: 4192214 - DNA, 25 bp, Homo sapien
gaaggtttcttctaggctccatagg

SEQ ID NO: 4192215 - DNA, 25 bp, Homo sapien
gaaccgtgcttggtactgtcgccaa

SEQ ID NO: 4192216 - DNA, 25 bp, Homo sapien
cttgccagcaaagttggaaggccca

SEQ ID NO: 4192217 - DNA, 25 bp, Homo sapien
tatgccagcaaggagggaacctagg

SEQ ID NO: 4192218 - DNA, 25 bp, Homo sapien
ccacagtcagggaggttaccagagc

SEQ ID NO: 4192219 - DNA, 25 bp, Homo sapien
gctagtctaatactcctgggaggaa

SEQ ID NO: 4192220 - DNA, 25 bp, Homo sapien
ccagatgccctgctatataaagttg

SEQ ID NO: 4192221 - DNA, 25 bp, Homo sapien
agttttgtgttgaacccagatgccc

SEQ ID NO: 4192222 - DNA, 25 bp, Homo sapien
gaaatgagattgtacacatggatga

SEQ ID NO: 4192223 - DNA, 25 bp, Homo sapien
catagagtactttattgcttcccaa

SEQ ID NO: 4192224 - DNA, 25 bp, Homo sapien
tttgcatacgtacatggtgctcaca

SEQ ID NO: 4192225 - DNA, 25 bp, Homo sapien
tacgtacatggtgctcacaattccg

SEQ ID NO: 4192226 - DNA, 25 bp, Homo sapien
tgcagacagtagtagttctggagta

SEQ ID NO: 4192227 - DNA, 25 bp, Homo sapien
agtattggaaaccatgaggtgctca

SEQ ID NO: 4192228 - DNA, 25 bp, Homo sapien
catggtatgttgaaaatactctcct

SEQ ID NO: 4192229 - DNA, 25 bp, Homo sapien
gtttcacatggtatgttgaaaatac

SEQ ID NO: 4192230 - DNA, 25 bp, Homo sapien
caaattgtttcacatggtatgttga

SEQ ID NO: 4192231 - DNA, 25 bp, Homo sapien
tcaaattgtttcacatggtatgttg

SEQ ID NO: 4192232 - DNA, 25 bp, Homo sapien
gaactccaggtctacaggattttta

SEQ ID NO: 4192233 - DNA, 25 bp, Homo sapien
aacagttctcctgccgtagccttcc

SEQ ID NO: 4192234 - DNA, 25 bp, Homo sapien
taatgtaaccttttctctcttaaca

SEQ ID NO: 4192235 - DNA, 25 bp, Homo sapien
gtcttgaactccaggtctacaggat

SEQ ID NO: 4192236 - DNA, 25 bp, Homo sapien
ggctaggaagcctcacaaaggtaaa

SEQ ID NO: 4192237 - DNA, 25 bp, Homo sapien
taaatgggctaatgctgatttgggc

SEQ ID NO: 4192238 - DNA, 25 bp, Homo sapien
ctatcacatggcgaaagaaggagca

SEQ ID NO: 4192239 - DNA, 25 bp, Homo sapien
ggagagttctctggtctcaagttca

SEQ ID NO: 4192240 - DNA, 25 bp, Homo sapien
cagagtcgcagcagcttttagagac

SEQ ID NO: 4192241 - DNA, 25 bp, Homo sapien
gggcttctctggtagtttatacgca

SEQ ID NO: 4192242 - DNA, 25 bp, Homo sapien
taagcttttgttcagcagagtcgca

SEQ ID NO: 4192243 - DNA, 25 bp, Homo sapien
ggaaccttctgactactcatctgat

SEQ ID NO: 4192244 - DNA, 25 bp, Homo sapien
ttaatgttgtttactaattctatca

SEQ ID NO: 4192245 - DNA, 25 bp, Homo sapien
ttttctgggtttgttgctcgcactg

SEQ ID NO: 4192246 - DNA, 25 bp, Homo sapien
tctgggtttgttgctcgcactggtt

SEQ ID NO: 4192247 - DNA, 25 bp, Homo sapien
gtttgttgctcgcactggtttttct

SEQ ID NO: 4192248 - DNA, 25 bp, Homo sapien
tcttccgaattgttgcaaattcgcc

SEQ ID NO: 4192249 - DNA, 25 bp, Homo sapien
gctctgatttcttccgaattgttgc

SEQ ID NO: 4192250 - DNA, 25 bp, Homo sapien
gtttggccaatggttcggctctgat

SEQ ID NO: 4192251 - DNA, 25 bp, Homo sapien
ccaatggttcggctctgatttcttc

SEQ ID NO: 4192252 - DNA, 25 bp, Homo sapien
cttgcactagatccgggaagccgct

SEQ ID NO: 4192253 - DNA, 25 bp, Homo sapien
agccgcaacatcaaccttcgtcgcc

SEQ ID NO: 4192254 - DNA, 25 bp, Homo sapien
gccccgcgtccgatatggagagcgc

SEQ ID NO: 4192255 - DNA, 25 bp, Homo sapien
gccgccgcggcgtcttgcactagat

SEQ ID NO: 4192256 - DNA, 25 bp, Homo sapien
cgaaccaccgcagagaggtgcggaa

SEQ ID NO: 4192257 - DNA, 25 bp, Homo sapien
gttgactactgcagccttcccggct

SEQ ID NO: 4192258 - DNA, 25 bp, Homo sapien
tgggcgcgcagccacgttgactact

SEQ ID NO: 4192259 - DNA, 25 bp, Homo sapien
aaaagccgtccgcacgcctgctggg

SEQ ID NO: 4192260 - DNA, 25 bp, Homo sapien
aacaggactctgttccggtgagagc

SEQ ID NO: 4192261 - DNA, 25 bp, Homo sapien
tgatcggcacccatgaaggtgaggc

SEQ ID NO: 4192262 - DNA, 25 bp, Homo sapien
cagtgggttcgagcctccacgctta

SEQ ID NO: 4192263 - DNA, 25 bp, Homo sapien
tgagagctcggtgaagtcctgatcg

SEQ ID NO: 4192264 - DNA, 25 bp, Homo sapien
tcacgcattcttcaagacatctgtt

SEQ ID NO: 4192265 - DNA, 25 bp, Homo sapien
ttatatcccagtgcccttgatctcc

SEQ ID NO: 4192266 - DNA, 25 bp, Homo sapien
tgttctagagcaagatcacgcattc

SEQ ID NO: 4192267 - DNA, 25 bp, Homo sapien
gacatctgttcacacagaagagcta

SEQ ID NO: 4192268 - DNA, 25 bp, Homo sapien
ctcctgggttcaagtggtcctccac

SEQ ID NO: 4192269 - DNA, 25 bp, Homo sapien
aatcacagctcgccacagcctcaac

SEQ ID NO: 4192270 - DNA, 25 bp, Homo sapien
ctgggttcaagtggtcctccacctc

SEQ ID NO: 4192271 - DNA, 25 bp, Homo sapien
gtgcaatcacagctcgccacagcct

SEQ ID NO: 4192272 - DNA, 25 bp, Homo sapien
actgggctttgtaattactgagaat

SEQ ID NO: 4192273 - DNA, 25 bp, Homo sapien
tcccacgcccttcacactgaatctg

SEQ ID NO: 4192274 - DNA, 25 bp, Homo sapien
gtctaggagtggaacctggcagttc

SEQ ID NO: 4192275 - DNA, 25 bp, Homo sapien
ttactgagaattgcttcacgtctag

SEQ ID NO: 4192276 - DNA, 25 bp, Homo sapien
taccggcgcacctgagtacgcatgt

SEQ ID NO: 4192277 - DNA, 25 bp, Homo sapien
tacgcatgtgctaaagcgtgggtac

SEQ ID NO: 4192278 - DNA, 25 bp, Homo sapien
ttttgctgtgccggcgcgtccccta

SEQ ID NO: 4192279 - DNA, 25 bp, Homo sapien
cacctgagtacgcatgtgctaaagc

SEQ ID NO: 4192280 - DNA, 25 bp, Homo sapien
cgccgccacccgtaatgccgccgcc

SEQ ID NO: 4192281 - DNA, 25 bp, Homo sapien
gccgccacccgtaatgccgccgcca

SEQ ID NO: 4192282 - DNA, 25 bp, Homo sapien
ggcgcggagaccgctcgccagaacg

SEQ ID NO: 4192283 - DNA, 25 bp, Homo sapien
cggcgcggagaccgctcgccagaac

SEQ ID NO: 4192284 - DNA, 25 bp, Homo sapien
ccagcagcgcggtccggcgcttgtt

SEQ ID NO: 4192285 - DNA, 25 bp, Homo sapien
cgatgcgttcgttaacagaggtggc

SEQ ID NO: 4192286 - DNA, 25 bp, Homo sapien
cttgtgctgcgcgtcaatacggcgt

SEQ ID NO: 4192287 - DNA, 25 bp, Homo sapien
gcggtccggcgcttgttttcgatgc

SEQ ID NO: 4192288 - DNA, 25 bp, Homo sapien
caaggcgaggcatgctaaggcccta

SEQ ID NO: 4192289 - DNA, 25 bp, Homo sapien
tcgaccaggcattctgcgggcagaa

SEQ ID NO: 4192290 - DNA, 25 bp, Homo sapien
taaggccctaaagagctcgaccagg

SEQ ID NO: 4192291 - DNA, 25 bp, Homo sapien
tgcttccgacacgtgcctttgctac

SEQ ID NO: 4192292 - DNA, 25 bp, Homo sapien
catggttgtgagttgtgcctgaata

SEQ ID NO: 4192293 - DNA, 25 bp, Homo sapien
tggttaattcgttcagcacaacggt

SEQ ID NO: 4192294 - DNA, 25 bp, Homo sapien
tctgtaagagtttcacttctgcacc

SEQ ID NO: 4192295 - DNA, 25 bp, Homo sapien
cttctgcaccttcccgttggttaat

SEQ ID NO: 4192296 - DNA, 25 bp, Homo sapien
cattccaaaatctgcacatctgtgt

SEQ ID NO: 4192297 - DNA, 25 bp, Homo sapien
tgtgttccacaaacatgtcgctctc

SEQ ID NO: 4192298 - DNA, 25 bp, Homo sapien
agcaagagactgatcctctccctgg

SEQ ID NO: 4192299 - DNA, 25 bp, Homo sapien
tcgctctcaacaaagctgccagggt

SEQ ID NO: 4192300 - DNA, 25 bp, Homo sapien
caatcttccattgattcggcctcgt

SEQ ID NO: 4192301 - DNA, 25 bp, Homo sapien
cggcctcgtccagtgaccacgctgt

SEQ ID NO: 4192302 - DNA, 25 bp, Homo sapien
tcttccattgattcggcctcgtcca

SEQ ID NO: 4192303 - DNA, 25 bp, Homo sapien
gcctcgtccagtgaccacgctgtct

SEQ ID NO: 4192304 - DNA, 25 bp, Homo sapien
gagccactgtgcccagcctattatt

SEQ ID NO: 4192305 - DNA, 25 bp, Homo sapien
gctgagatgacaagcgggagccact

SEQ ID NO: 4192306 - DNA, 25 bp, Homo sapien
tgagatgacaagcgggagccactgt

SEQ ID NO: 4192307 - DNA, 25 bp, Homo sapien
gccactgtgcccagcctattatttg

SEQ ID NO: 4192308 - DNA, 25 bp, Homo sapien
aaaatatagaaaaaagttagctgcg

SEQ ID NO: 4192309 - DNA, 25 bp, Homo sapien
tatagaaaaaagttagctgcgcatg

SEQ ID NO: 4192310 - DNA, 25 bp, Homo sapien
aatatagaaaaaagttagctgcgca

SEQ ID NO: 4192311 - DNA, 25 bp, Homo sapien
tagaaaaaagttagctgcgcatggt

SEQ ID NO: 4192312 - DNA, 25 bp, Homo sapien
tgggcgacatggcagaagcccgtat

SEQ ID NO: 4192313 - DNA, 25 bp, Homo sapien
cctgggcgacatggcagaagcccgt

SEQ ID NO: 4192314 - DNA, 25 bp, Homo sapien
cagcctgggcgacatggcagaagcc

SEQ ID NO: 4192315 - DNA, 25 bp, Homo sapien
agcctgggcgacatggcagaagccc

SEQ ID NO: 4192316 - DNA, 25 bp, Homo sapien
gctagagatgaaaacccagtgggag

SEQ ID NO: 4192317 - DNA, 25 bp, Homo sapien
ggctagagatgaaaacccagtggga

SEQ ID NO: 4192318 - DNA, 25 bp, Homo sapien
tttgcagatcttttgggcatgtgct

SEQ ID NO: 4192319 - DNA, 25 bp, Homo sapien
cagagtcattcagcccaatcactgg

SEQ ID NO: 4192320 - DNA, 25 bp, Homo sapien
tgcatagccagccaaagactccact

SEQ ID NO: 4192321 - DNA, 25 bp, Homo sapien
ccactccttcttggatccgtgctcc

SEQ ID NO: 4192322 - DNA, 25 bp, Homo sapien
tcttggatccgtgctcccccagagt

SEQ ID NO: 4192323 - DNA, 25 bp, Homo sapien
cagcactagtgttggtatatccctt

SEQ ID NO: 4192324 - DNA, 25 bp, Homo sapien
gcaatcaacttatcctggctctcag

SEQ ID NO: 4192325 - DNA, 25 bp, Homo sapien
aggccttgagttccagatctttcca

SEQ ID NO: 4192326 - DNA, 25 bp, Homo sapien
taccccaacaatcaggcagctttgc

SEQ ID NO: 4192327 - DNA, 25 bp, Homo sapien
agcacatgggcccatgatcagagaa

SEQ ID NO: 4192328 - DNA, 25 bp, Homo sapien
ctggggagtagacggccccaccagc

SEQ ID NO: 4192329 - DNA, 25 bp, Homo sapien
tctgagggatgactccggatgccgt

SEQ ID NO: 4192330 - DNA, 25 bp, Homo sapien
tgaacgtgaagtctgttagggctgg

SEQ ID NO: 4192331 - DNA, 25 bp, Homo sapien
ctagacctgccatttaaaatggcga

SEQ ID NO: 4192332 - DNA, 25 bp, Homo sapien
tgcaggagaagcttggtagaaatca

SEQ ID NO: 4192333 - DNA, 25 bp, Homo sapien
gcaatgcaggagaagcttggtagaa

SEQ ID NO: 4192334 - DNA, 25 bp, Homo sapien
ttaaaatggcgaaggctgcaggaga

SEQ ID NO: 4192335 - DNA, 25 bp, Homo sapien
acttcacaacatcagggccagtgat

SEQ ID NO: 4192336 - DNA, 25 bp, Homo sapien
ttcacaacatcagggccagtgatga

SEQ ID NO: 4192337 - DNA, 25 bp, Homo sapien
tgggtcttggcaccaccgagctcct

SEQ ID NO: 4192338 - DNA, 25 bp, Homo sapien
gggtaacatcctcattggtgacaga

SEQ ID NO: 4192339 - DNA, 25 bp, Homo sapien
gaaatgacccagtgtctattaactg

SEQ ID NO: 4192340 - DNA, 25 bp, Homo sapien
catggatgagcctttaacaacatta

SEQ ID NO: 4192341 - DNA, 25 bp, Homo sapien
aagtagcctggtaattgcctagagc

SEQ ID NO: 4192342 - DNA, 25 bp, Homo sapien
catatgtctacccaaaaacttgcat

SEQ ID NO: 4192343 - DNA, 25 bp, Homo sapien
gtttactgccggacatctctcctgg

SEQ ID NO: 4192344 - DNA, 25 bp, Homo sapien
agttctcctcccgtacttttctctg

SEQ ID NO: 4192345 - DNA, 25 bp, Homo sapien
gcatcacctatttccctgtttactg

SEQ ID NO: 4192346 - DNA, 25 bp, Homo sapien
catgcgggagttctcctcccgtact

SEQ ID NO: 4192347 - DNA, 25 bp, Homo sapien
gagattacacaaggcatcaacatca

SEQ ID NO: 4192348 - DNA, 25 bp, Homo sapien
atcgtggcactcacggacgggagcc

SEQ ID NO: 4192349 - DNA, 25 bp, Homo sapien
ggcaggtagttgaagaaatcccgga

SEQ ID NO: 4192350 - DNA, 25 bp, Homo sapien
acgggagccgggtcctgactgctca

SEQ ID NO: 4192351 - DNA, 25 bp, Homo sapien
tggttgattccaaagggacaattgt

SEQ ID NO: 4192352 - DNA, 25 bp, Homo sapien
gatgtccaccatgttgtaggctttg

SEQ ID NO: 4192353 - DNA, 25 bp, Homo sapien
gtcaagctcaggaaccagacggtca

SEQ ID NO: 4192354 - DNA, 25 bp, Homo sapien
gagtgtatgatgtccaccatgttgt

SEQ ID NO: 4192355 - DNA, 25 bp, Homo sapien
cagagggccccaatgatacttaaca

SEQ ID NO: 4192356 - DNA, 25 bp, Homo sapien
tcagagggccttctaaagactcctg

SEQ ID NO: 4192357 - DNA, 25 bp, Homo sapien
caagtccatctgtgccactagggta

SEQ ID NO: 4192358 - DNA, 25 bp, Homo sapien
tattcccgacctgtgctgtctgaca

SEQ ID NO: 4192359 - DNA, 25 bp, Homo sapien
tcccaagcaactaggaccacagctg

SEQ ID NO: 4192360 - DNA, 25 bp, Homo sapien
aagcaactaggaccacagctgtgca

SEQ ID NO: 4192361 - DNA, 25 bp, Homo sapien
tctgcctcccaagcaactaggacca

SEQ ID NO: 4192362 - DNA, 25 bp, Homo sapien
ccaagcaactaggaccacagctgtg

SEQ ID NO: 4192363 - DNA, 25 bp, Homo sapien
gacaagtataagatgtaatgacact

SEQ ID NO: 4192364 - DNA, 25 bp, Homo sapien
aatttacttctgagctcaaaatggt

SEQ ID NO: 4192365 - DNA, 25 bp, Homo sapien
agatgtaatgacactacagaatgac

SEQ ID NO: 4192366 - DNA, 25 bp, Homo sapien
gctcaaaatggtaaagacaagtata

SEQ ID NO: 4192367 - DNA, 25 bp, Homo sapien
tcttggcataattgggcatgatctc

SEQ ID NO: 4192368 - DNA, 25 bp, Homo sapien
ggttgccaacaattccaacagtcct

SEQ ID NO: 4192369 - DNA, 25 bp, Homo sapien
attcattcttgcaaaaccaacaatg

SEQ ID NO: 4192370 - DNA, 25 bp, Homo sapien
ctgaggccaccttaggttggttgcc

SEQ ID NO: 4192371 - DNA, 25 bp, Homo sapien
tctgtgggctgcctgaaggactgac

SEQ ID NO: 4192372 - DNA, 25 bp, Homo sapien
ggactgacacaaggaacacatctct

SEQ ID NO: 4192373 - DNA, 25 bp, Homo sapien
tatgtctgctctaacctgtctgtgg

SEQ ID NO: 4192374 - DNA, 25 bp, Homo sapien
taactcagaacttatccaggctgga

SEQ ID NO: 4192375 - DNA, 25 bp, Homo sapien
aagtagggacgatactgcctcctag

SEQ ID NO: 4192376 - DNA, 25 bp, Homo sapien
tactgcctcctagcatagttccaag

SEQ ID NO: 4192377 - DNA, 25 bp, Homo sapien
ctgcaaagtagggacgatactgcct

SEQ ID NO: 4192378 - DNA, 25 bp, Homo sapien
gcatagttccaaggagtaaaggaaa

SEQ ID NO: 4192379 - DNA, 25 bp, Homo sapien
gaaagccagggacatcaacaaaagt

SEQ ID NO: 4192380 - DNA, 25 bp, Homo sapien
ctgacaaaacgagcccctttcacag

SEQ ID NO: 4192381 - DNA, 25 bp, Homo sapien
aagtgatgagtggaatattgaatgc

SEQ ID NO: 4192382 - DNA, 25 bp, Homo sapien
tgcatcacagaatctgacaaaacga

SEQ ID NO: 4192383 - DNA, 25 bp, Homo sapien
gaagatctccaaataaagtgggcac

SEQ ID NO: 4192384 - DNA, 25 bp, Homo sapien
tggagagggccattccttacacagc

SEQ ID NO: 4192385 - DNA, 25 bp, Homo sapien
tagatacccacaagtcctcacatgg

SEQ ID NO: 4192386 - DNA, 25 bp, Homo sapien
tactgggaaaggcaactctcctagc

SEQ ID NO: 4192387 - DNA, 25 bp, Homo sapien
gatgatgcccccgtattcctgtgct

SEQ ID NO: 4192388 - DNA, 25 bp, Homo sapien
tgactttgggtacagttgcctcagc

SEQ ID NO: 4192389 - DNA, 25 bp, Homo sapien
tgcctcagcaaatgcgtagagaagc

SEQ ID NO: 4192390 - DNA, 25 bp, Homo sapien
gaagcttggcaccatgccggatgat

SEQ ID NO: 4192391 - DNA, 25 bp, Homo sapien
tagagctcatgacatcataggcacc

SEQ ID NO: 4192392 - DNA, 25 bp, Homo sapien
ccacaaaggtgcttagagctcatga

SEQ ID NO: 4192393 - DNA, 25 bp, Homo sapien
gactgcaatctctgcggtgggccag

SEQ ID NO: 4192394 - DNA, 25 bp, Homo sapien
gcatagttggtatcaccacaaaggt

SEQ ID NO: 4192395 - DNA, 25 bp, Homo sapien
agggttggcaaacttctcgatgtac

SEQ ID NO: 4192396 - DNA, 25 bp, Homo sapien
tcgatgtactctgcctgagcagctt

SEQ ID NO: 4192397 - DNA, 25 bp, Homo sapien
ctttgaagatgatctccacagcgcc

SEQ ID NO: 4192398 - DNA, 25 bp, Homo sapien
ccctttgaagatgatctccacagcg

SEQ ID NO: 4192399 - DNA, 25 bp, Homo sapien
gattcgggcacgtgtggaagaaggt

SEQ ID NO: 4192400 - DNA, 25 bp, Homo sapien
tcacagcagattcgggcacgtgtgg

SEQ ID NO: 4192401 - DNA, 25 bp, Homo sapien
cacgtgtggaagaaggttggatgat

SEQ ID NO: 4192402 - DNA, 25 bp, Homo sapien
ggtcacagcagattcgggcacgtgt

SEQ ID NO: 4192403 - DNA, 25 bp, Homo sapien
tgcatgttttctccaaggacgttgt

SEQ ID NO: 4192404 - DNA, 25 bp, Homo sapien
catgttttctccaaggacgttgtac

SEQ ID NO: 4192405 - DNA, 25 bp, Homo sapien
gcatgttttctccaaggacgttgta

SEQ ID NO: 4192406 - DNA, 25 bp, Homo sapien
ttgcatgttttctccaaggacgttg

SEQ ID NO: 4192407 - DNA, 25 bp, Homo sapien
gtttcatgattgcaaaaggcaggaa

SEQ ID NO: 4192408 - DNA, 25 bp, Homo sapien
tattctaagttatccaactatttgg

SEQ ID NO: 4192409 - DNA, 25 bp, Homo sapien
tgtgaatgggcagacagtaattcag

SEQ ID NO: 4192410 - DNA, 25 bp, Homo sapien
taagttatccaactatttggattcc

SEQ ID NO: 4192411 - DNA, 25 bp, Homo sapien
aataacctgagtcaacatagggtgc

SEQ ID NO: 4192412 - DNA, 25 bp, Homo sapien
catagggtgctatgccttattgagc

SEQ ID NO: 4192413 - DNA, 25 bp, Homo sapien
acaagtttctaggaacacagggtca

SEQ ID NO: 4192414 - DNA, 25 bp, Homo sapien
tgttaccaactggagaatctaggtg

SEQ ID NO: 4192415 - DNA, 25 bp, Homo sapien
gatcagaatcagttaccaacaggag

SEQ ID NO: 4192416 - DNA, 25 bp, Homo sapien
tttgcagccacgaccttaaccatgt

SEQ ID NO: 4192417 - DNA, 25 bp, Homo sapien
ctggcccaggtgaaagtttattgac

SEQ ID NO: 4192418 - DNA, 25 bp, Homo sapien
tgtgacgcactgaaaggaatatgtg

SEQ ID NO: 4192419 - DNA, 25 bp, Homo sapien
gaaggcaaagaagcacccatggtgt

SEQ ID NO: 4192420 - DNA, 25 bp, Homo sapien
tatattgagaataatgggagccagg

SEQ ID NO: 4192421 - DNA, 25 bp, Homo sapien
cttgtatttatggtagcactgagca

SEQ ID NO: 4192422 - DNA, 25 bp, Homo sapien
tatcagtgtgaatacctagtgccaa

SEQ ID NO: 4192423 - DNA, 25 bp, Homo sapien
ggtgtccagactgcacaacctggtg

SEQ ID NO: 4192424 - DNA, 25 bp, Homo sapien
ccatctcggtgtccagactgcacaa

SEQ ID NO: 4192425 - DNA, 25 bp, Homo sapien
tctaccatctcggtgtccagactgc

SEQ ID NO: 4192426 - DNA, 25 bp, Homo sapien
tctcggtgtccagactgcacaacct

SEQ ID NO: 4192427 - DNA, 25 bp, Homo sapien
ggtccacttgacaaagcttccaagg

SEQ ID NO: 4192428 - DNA, 25 bp, Homo sapien
tctcaaggtattccgtggtccatgg

SEQ ID NO: 4192429 - DNA, 25 bp, Homo sapien
tccaaggcttccgtaaagctgctag

SEQ ID NO: 4192430 - DNA, 25 bp, Homo sapien
gctgagtttctgtacgggagtttcc

SEQ ID NO: 4192431 - DNA, 25 bp, Homo sapien
aaggcattcccacacaagagaacac

SEQ ID NO: 4192432 - DNA, 25 bp, Homo sapien
caccaggacaaagtatcagtgcaac

SEQ ID NO: 4192433 - DNA, 25 bp, Homo sapien
ccagcaccaggacaaagtatcagtg

SEQ ID NO: 4192434 - DNA, 25 bp, Homo sapien
ggacaaagtatcagtgcaaccagag

SEQ ID NO: 4192435 - DNA, 25 bp, Homo sapien
caaagtatcagtgcaaccagaggca

SEQ ID NO: 4192436 - DNA, 25 bp, Homo sapien
caggtaacagtccatcaagcaggga

SEQ ID NO: 4192437 - DNA, 25 bp, Homo sapien
aaacaaaggtttgatgccactcagg

SEQ ID NO: 4192438 - DNA, 25 bp, Homo sapien
taaaagggtaaagtcatagctctcc

SEQ ID NO: 4192439 - DNA, 25 bp, Homo sapien
tccagacagccaaggaaggaaggtc

SEQ ID NO: 4192440 - DNA, 25 bp, Homo sapien
tcttgtatggaaaacagatgctgac

SEQ ID NO: 4192441 - DNA, 25 bp, Homo sapien
caagccatgaggtgccctggcacat

SEQ ID NO: 4192442 - DNA, 25 bp, Homo sapien
gttttggccagggagcaagccatga

SEQ ID NO: 4192443 - DNA, 25 bp, Homo sapien
caaattgatcctttgcgtgacagtc

SEQ ID NO: 4192444 - DNA, 25 bp, Homo sapien
tgaaggagcagaacattgacaagct

SEQ ID NO: 4192445 - DNA, 25 bp, Homo sapien
taagcagctcatcctaattgcgaag

SEQ ID NO: 4192446 - DNA, 25 bp, Homo sapien
tattaaacctatgagtaagcagctc

SEQ ID NO: 4192447 - DNA, 25 bp, Homo sapien
taaaattctgcacacccagtgatca

SEQ ID NO: 4192448 - DNA, 25 bp, Homo sapien
tgtgaacagtggaagtagcagcagc

SEQ ID NO: 4192449 - DNA, 25 bp, Homo sapien
ttggaacagtaagacagtgatggcc

SEQ ID NO: 4192450 - DNA, 25 bp, Homo sapien
gaaagagggcatgccagcctcctta

SEQ ID NO: 4192451 - DNA, 25 bp, Homo sapien
gagaaattccttaccgagcagatga

SEQ ID NO: 4192452 - DNA, 25 bp, Homo sapien
tcagaaaggacaagagtatccacct

SEQ ID NO: 4192453 - DNA, 25 bp, Homo sapien
tctaaacttcttcgacaggacaaaa

SEQ ID NO: 4192454 - DNA, 25 bp, Homo sapien
gttgcacattacaagagaagtggtt

SEQ ID NO: 4192455 - DNA, 25 bp, Homo sapien
aaaaagacagtgtaagttgcacatt

SEQ ID NO: 4192456 - DNA, 25 bp, Homo sapien
tgttccattagttagttctaagcct

SEQ ID NO: 4192457 - DNA, 25 bp, Homo sapien
ggtcgttccatgactccagagttgt

SEQ ID NO: 4192458 - DNA, 25 bp, Homo sapien
tgttctttaatacatgtgttcctgt

SEQ ID NO: 4192459 - DNA, 25 bp, Homo sapien
tattatgtccaatcacaagtgcctg

SEQ ID NO: 4192460 - DNA, 25 bp, Homo sapien
tcactgtcttgactaaaggttctcc

SEQ ID NO: 4192461 - DNA, 25 bp, Homo sapien
gctacaagtccaattattattgagg

SEQ ID NO: 4192462 - DNA, 25 bp, Homo sapien
ttgaggtatttagctgtaaaatttg

SEQ ID NO: 4192463 - DNA, 25 bp, Homo sapien
gaaaattccaacttgttgacctgca

SEQ ID NO: 4192464 - DNA, 25 bp, Homo sapien
gtatgatacctagagacacaaagtg

SEQ ID NO: 4192465 - DNA, 25 bp, Homo sapien
tgaactagaaataaacgcactccag

SEQ ID NO: 4192466 - DNA, 25 bp, Homo sapien
caaagtgaacaaccctcttgaagtt

SEQ ID NO: 4192467 - DNA, 25 bp, Homo sapien
taattttgggatcctaatgacctgc

SEQ ID NO: 4192468 - DNA, 25 bp, Homo sapien
tgcctgtttaatcgggatagtcgaa

SEQ ID NO: 4192469 - DNA, 25 bp, Homo sapien
taaggccaatgcttgtacttgtact

SEQ ID NO: 4192470 - DNA, 25 bp, Homo sapien
tccttcagggattaagcctacctac

SEQ ID NO: 4192471 - DNA, 25 bp, Homo sapien
gatagtcgaaagagaatccttcagg

SEQ ID NO: 4192472 - DNA, 25 bp, Homo sapien
ccaccaccacacgcccagtgcttgt

SEQ ID NO: 4192473 - DNA, 25 bp, Homo sapien
ccaccacacgcccagtgcttgtttt

SEQ ID NO: 4192474 - DNA, 25 bp, Homo sapien
caccacacgcccagtgcttgttttt

SEQ ID NO: 4192475 - DNA, 25 bp, Homo sapien
caccaccacacgcccagtgcttgtt

SEQ ID NO: 4192476 - DNA, 25 bp, Homo sapien
gcagtggcgggtggcgggttgtata

SEQ ID NO: 4192477 - DNA, 25 bp, Homo sapien
cagtggcgggtggcgggttgtatac

SEQ ID NO: 4192478 - DNA, 25 bp, Homo sapien
ctttctttcaggtatttcaggtttg

SEQ ID NO: 4192479 - DNA, 25 bp, Homo sapien
catatagccattacccagatttagc

SEQ ID NO: 4192480 - DNA, 25 bp, Homo sapien
taagcatgcataaaccctatagaag

SEQ ID NO: 4192481 - DNA, 25 bp, Homo sapien
ggagacatcatataatgaacccacc

SEQ ID NO: 4192482 - DNA, 25 bp, Homo sapien
gaagatactgttatctgcttgtcaa

SEQ ID NO: 4192483 - DNA, 25 bp, Homo sapien
tataagcgtgggctactgtgcctgg

SEQ ID NO: 4192484 - DNA, 25 bp, Homo sapien
ttataagcgtgggctactgtgcctg

SEQ ID NO: 4192485 - DNA, 25 bp, Homo sapien
ttgtagacttagcaaaagagctagt

SEQ ID NO: 4192486 - DNA, 25 bp, Homo sapien
tagtgcctaacatgtatacgaaatt

SEQ ID NO: 4192487 - DNA, 25 bp, Homo sapien
gctatatgttttaagtgataaggga

SEQ ID NO: 4192488 - DNA, 25 bp, Homo sapien
gttcttcttggagaccgagtttcgc

SEQ ID NO: 4192489 - DNA, 25 bp, Homo sapien
taaggtctggctcatcattattggg

SEQ ID NO: 4192490 - DNA, 25 bp, Homo sapien
gcttccaagttttgtcagtcagttg

SEQ ID NO: 4192491 - DNA, 25 bp, Homo sapien
tacagttgctggatcttatgaaaag

SEQ ID NO: 4192492 - DNA, 25 bp, Homo sapien
tgtctattcacctaccgaaggacgt

SEQ ID NO: 4192493 - DNA, 25 bp, Homo sapien
taactaacttgtggcttggatccct

SEQ ID NO: 4192494 - DNA, 25 bp, Homo sapien
gcctgtggctctaataagatggaat

SEQ ID NO: 4192495 - DNA, 25 bp, Homo sapien
gcaaacctgccatgagggtttttcc

SEQ ID NO: 4192496 - DNA, 25 bp, Homo sapien
ctaacggttcgaggcgattgctaat

SEQ ID NO: 4192497 - DNA, 25 bp, Homo sapien
gctgcctctacttactacacatgga

SEQ ID NO: 4192498 - DNA, 25 bp, Homo sapien
gggattcagtagtcaaccatatgca

SEQ ID NO: 4192499 - DNA, 25 bp, Homo sapien
agtattgctgtcacctccctacaag

SEQ ID NO: 4192500 - DNA, 25 bp, Homo sapien
tcagttagccccttataaacagtgg

SEQ ID NO: 4192501 - DNA, 25 bp, Homo sapien
tctgtcgtcccactgaaagagattt

SEQ ID NO: 4192502 - DNA, 25 bp, Homo sapien
tgcctggccatggttagactcttga

SEQ ID NO: 4192503 - DNA, 25 bp, Homo sapien
taatttaagagcgatcagccagagg

SEQ ID NO: 4192504 - DNA, 25 bp, Homo sapien
aagcttgtcagtcagatctctgtcg

SEQ ID NO: 4192505 - DNA, 25 bp, Homo sapien
gtgagtaactatttgcttcactggg

SEQ ID NO: 4192506 - DNA, 25 bp, Homo sapien
gggaaggacaatagttcatttagac

SEQ ID NO: 4192507 - DNA, 25 bp, Homo sapien
atgcctcaggactgtactgaaagtc

SEQ ID NO: 4192508 - DNA, 25 bp, Homo sapien
tgcccctggctgtaattgacttctg

SEQ ID NO: 4192509 - DNA, 25 bp, Homo sapien
acacccgacctccatattatttaga

SEQ ID NO: 4192510 - DNA, 25 bp, Homo sapien
gcttttttgagcctcagtccatata

SEQ ID NO: 4192511 - DNA, 25 bp, Homo sapien
aatgagaaggttaagtgtgtgtaga

SEQ ID NO: 4192512 - DNA, 25 bp, Homo sapien
tctgatctatataggcagctctgct

SEQ ID NO: 4192513 - DNA, 25 bp, Homo sapien
gtttctacttcgtcagcctcctaag

SEQ ID NO: 4192514 - DNA, 25 bp, Homo sapien
ttctctgtgcttctatgaattgagc

SEQ ID NO: 4192515 - DNA, 25 bp, Homo sapien
ggttcaagcgtttctacttcgtcag

SEQ ID NO: 4192516 - DNA, 25 bp, Homo sapien
ccactgggcctggtgaaaatttgta

SEQ ID NO: 4192517 - DNA, 25 bp, Homo sapien
taggattgcagctccgttgaaggcg

SEQ ID NO: 4192518 - DNA, 25 bp, Homo sapien
agggcggtccggacccaagtctgca

SEQ ID NO: 4192519 - DNA, 25 bp, Homo sapien
catcgggaataacacaccggagact

SEQ ID NO: 4192520 - DNA, 25 bp, Homo sapien
aaggcagtgagcaccgcggccagca

SEQ ID NO: 4192521 - DNA, 25 bp, Homo sapien
tccaagtaggagcagggatctgcgc

SEQ ID NO: 4192522 - DNA, 25 bp, Homo sapien
tacaatgctaagctctgaggccctt

SEQ ID NO: 4192523 - DNA, 25 bp, Homo sapien
gcttgtcagccgtaaatcgcgaata

SEQ ID NO: 4192524 - DNA, 25 bp, Homo sapien
atccccactggaaagcgtttgcgcg

SEQ ID NO: 4192525 - DNA, 25 bp, Homo sapien
tagattaatggcgagggaagtcccc

SEQ ID NO: 4192526 - DNA, 25 bp, Homo sapien
tgaaaggtagggatccatggccacg

SEQ ID NO: 4192527 - DNA, 25 bp, Homo sapien
aatgctgccgccttatgcaaagccg

SEQ ID NO: 4192528 - DNA, 25 bp, Homo sapien
ccgacaccacggaaagatgtgcttt

SEQ ID NO: 4192529 - DNA, 25 bp, Homo sapien
gaaagttgattacccatgccctcag

SEQ ID NO: 4192530 - DNA, 25 bp, Homo sapien
caaactaggtaggtgtagatccggg

SEQ ID NO: 4192531 - DNA, 25 bp, Homo sapien
aattggagtcccatagctctgagcc

SEQ ID NO: 4192532 - DNA, 25 bp, Homo sapien
tataatggaggcaaggtcaaaccgg

SEQ ID NO: 4192533 - DNA, 25 bp, Homo sapien
aaggcagacattaatgggaaggtga

SEQ ID NO: 4192534 - DNA, 25 bp, Homo sapien
gactgtcaatctattctctagtggt

SEQ ID NO: 4192535 - DNA, 25 bp, Homo sapien
gaaaagtctgtcaggtcatagtgac

SEQ ID NO: 4192536 - DNA, 25 bp, Homo sapien
gacagcaagtcattagggagaacaa

SEQ ID NO: 4192537 - DNA, 25 bp, Homo sapien
gagtggctctaactttggagtgcag

SEQ ID NO: 4192538 - DNA, 25 bp, Homo sapien
cctcagtggtacagcagaactaaag

SEQ ID NO: 4192539 - DNA, 25 bp, Homo sapien
catagatactagaaaagagtggctc

SEQ ID NO: 4192540 - DNA, 25 bp, Homo sapien
gtggcaggagacctcacgatcatgg

SEQ ID NO: 4192541 - DNA, 25 bp, Homo sapien
cccgaaatcagctctctcaagtcaa

SEQ ID NO: 4192542 - DNA, 25 bp, Homo sapien
tcagctctctcaagtcaaagttcca

SEQ ID NO: 4192543 - DNA, 25 bp, Homo sapien
gaaatcagctctctcaagtcaaagt

SEQ ID NO: 4192544 - DNA, 25 bp, Homo sapien
tacccgaaatcagctctctcaagtc

SEQ ID NO: 4192545 - DNA, 25 bp, Homo sapien
gcgccgggccaaccatcagatatct

SEQ ID NO: 4192546 - DNA, 25 bp, Homo sapien
ctgcgccgggccaaccatcagatat

SEQ ID NO: 4192547 - DNA, 25 bp, Homo sapien
cgccgggccaaccatcagatatctc

SEQ ID NO: 4192548 - DNA, 25 bp, Homo sapien
tgcgccgggccaaccatcagatatc

SEQ ID NO: 4192549 - DNA, 25 bp, Homo sapien
tcctcatggactttgatctgatggt

SEQ ID NO: 4192550 - DNA, 25 bp, Homo sapien
gtctctgggagccacgtacagattc

SEQ ID NO: 4192551 - DNA, 25 bp, Homo sapien
gactgatgctggtgggagtcctcat

SEQ ID NO: 4192552 - DNA, 25 bp, Homo sapien
ttggtctcagtctctgggagccacg

SEQ ID NO: 4192553 - DNA, 25 bp, Homo sapien
tagctgggttcttgactgctgagtt

SEQ ID NO: 4192554 - DNA, 25 bp, Homo sapien
tgccattgctcgtgacccatagctg

SEQ ID NO: 4192555 - DNA, 25 bp, Homo sapien
tccactgtagctgggttcttgactg

SEQ ID NO: 4192556 - DNA, 25 bp, Homo sapien
gctcgtgacccatagctgcagtcat

SEQ ID NO: 4192557 - DNA, 25 bp, Homo sapien
tgtctcctctctaagcatccttaac

SEQ ID NO: 4192558 - DNA, 25 bp, Homo sapien
gctgtctcctctctaagcatcctta

SEQ ID NO: 4192559 - DNA, 25 bp, Homo sapien
tggtttggcatctggtgtagactgg

SEQ ID NO: 4192560 - DNA, 25 bp, Homo sapien
gtagactggaaatccaatgaagatg

SEQ ID NO: 4192561 - DNA, 25 bp, Homo sapien
attacattggctgctggccttgcag

SEQ ID NO: 4192562 - DNA, 25 bp, Homo sapien
ctgtttcaccaattacattggctgc

SEQ ID NO: 4192563 - DNA, 25 bp, Homo sapien
gctgtttcaccaattacattggctg

SEQ ID NO: 4192564 - DNA, 25 bp, Homo sapien
acattggctgctggccttgcagcca

SEQ ID NO: 4192565 - DNA, 25 bp, Homo sapien
gctgcattcactcagggcccttgtt

SEQ ID NO: 4192566 - DNA, 25 bp, Homo sapien
gagtgcaggttaggctgcattcact

SEQ ID NO: 4192567 - DNA, 25 bp, Homo sapien
ctgctgcacgtgatgagtgcaggtt

SEQ ID NO: 4192568 - DNA, 25 bp, Homo sapien
caacttgagatcagcccttttcaga

SEQ ID NO: 4192569 - DNA, 25 bp, Homo sapien
ttgggctcctcgcatgggcctgtct

SEQ ID NO: 4192570 - DNA, 25 bp, Homo sapien
cccttgggctcctcgcatgggcctg

SEQ ID NO: 4192571 - DNA, 25 bp, Homo sapien
tgagctccacattgtgctgagtatg

SEQ ID NO: 4192572 - DNA, 25 bp, Homo sapien
gagctccacattgtgctgagtatga

SEQ ID NO: 4192573 - DNA, 25 bp, Homo sapien
ttccacatctccagatgtagtacat

SEQ ID NO: 4192574 - DNA, 25 bp, Homo sapien
aattccacatctccagatgtagtac

SEQ ID NO: 4192575 - DNA, 25 bp, Homo sapien
ctagtcaatgtcccaaaagggcaga

SEQ ID NO: 4192576 - DNA, 25 bp, Homo sapien
attccacatctccagatgtagtaca

SEQ ID NO: 4192577 - DNA, 25 bp, Homo sapien
aaagataatgactatcttggaatct

SEQ ID NO: 4192578 - DNA, 25 bp, Homo sapien
ggtccaaaacaagaatctgtccctc

SEQ ID NO: 4192579 - DNA, 25 bp, Homo sapien
tctcatatccttttctgtaggtcca

SEQ ID NO: 4192580 - DNA, 25 bp, Homo sapien
taatgactatcttggaatcttttcc

SEQ ID NO: 4192581 - DNA, 25 bp, Homo sapien
tgtgtccagcatcggaaaatcgtgg

SEQ ID NO: 4192582 - DNA, 25 bp, Homo sapien
tttgaagcaattgcctgtctgccag

SEQ ID NO: 4192583 - DNA, 25 bp, Homo sapien
aaggacttcctctacccgcgaggtg

SEQ ID NO: 4192584 - DNA, 25 bp, Homo sapien
tacgtagtccgctgcaagtgggcac

SEQ ID NO: 4192585 - DNA, 25 bp, Homo sapien
tcattcccttgtcgggcggccgggc

SEQ ID NO: 4192586 - DNA, 25 bp, Homo sapien
ctaaacgcgggtgtgtggagttcgg

SEQ ID NO: 4192587 - DNA, 25 bp, Homo sapien
cccttaggtgtggcggctaaacgcg

SEQ ID NO: 4192588 - DNA, 25 bp, Homo sapien
tggagttcggggtccgctctcattc

SEQ ID NO: 4192589 - DNA, 25 bp, Homo sapien
gctactgggcgagaggaaagcaaca

SEQ ID NO: 4192590 - DNA, 25 bp, Homo sapien
ggccttcatcatggacgctgcagga

SEQ ID NO: 4192591 - DNA, 25 bp, Homo sapien
ggcctttcaggcgtcgtgcagagca

SEQ ID NO: 4192592 - DNA, 25 bp, Homo sapien
cccttgcttgggttggctactgggc

SEQ ID NO: 4192593 - DNA, 25 bp, Homo sapien
tcatggacatgagacaagagagtaa

SEQ ID NO: 4192594 - DNA, 25 bp, Homo sapien
gatgtaccacgaaaatctcagcgcc

SEQ ID NO: 4192595 - DNA, 25 bp, Homo sapien
gatcccatatgacgccacagtgact

SEQ ID NO: 4192596 - DNA, 25 bp, Homo sapien
cagactggcgttcaagagtcatgga

SEQ ID NO: 4192597 - DNA, 25 bp, Homo sapien
ggaaaccagcctcaacttgtctgaa

SEQ ID NO: 4192598 - DNA, 25 bp, Homo sapien
tcaaatgaggccaaatgggtgcacg

SEQ ID NO: 4192599 - DNA, 25 bp, Homo sapien
tcctttcccgcggaggaagatcgct

SEQ ID NO: 4192600 - DNA, 25 bp, Homo sapien
caaaggtgcagagtagaagggcaac

SEQ ID NO: 4192601 - DNA, 25 bp, Homo sapien
aacttacattctatccacacagatc

SEQ ID NO: 4192602 - DNA, 25 bp, Homo sapien
cacacagatcaatattatgcaaccc

SEQ ID NO: 4192603 - DNA, 25 bp, Homo sapien
cgcaaccaatagaggattggtccat

SEQ ID NO: 4192604 - DNA, 25 bp, Homo sapien
gcaacccttaataatgatgacctag

SEQ ID NO: 4192605 - DNA, 25 bp, Homo sapien
agacagaaacttacggctataaatg

SEQ ID NO: 4192606 - DNA, 25 bp, Homo sapien
tcctgaatgaccaataggtcaatga

SEQ ID NO: 4192607 - DNA, 25 bp, Homo sapien
acaacacaccaaaagctatgagata

SEQ ID NO: 4192608 - DNA, 25 bp, Homo sapien
caaaaaccctgaaatgataccaagt

SEQ ID NO: 4192609 - DNA, 25 bp, Homo sapien
agtgcagtcaggcttcaaacccagg

SEQ ID NO: 4192610 - DNA, 25 bp, Homo sapien
taatgcccaacaaagcaatttctgg

SEQ ID NO: 4192611 - DNA, 25 bp, Homo sapien
ggctgtcacattccaaaccatttgt

SEQ ID NO: 4192612 - DNA, 25 bp, Homo sapien
gagattatcagctacttaatgccca

SEQ ID NO: 4192613 - DNA, 25 bp, Homo sapien
tgctgggtgaagctgttaagggtag

SEQ ID NO: 4192614 - DNA, 25 bp, Homo sapien
cagctttaaattcagctgtgctggg

SEQ ID NO: 4192615 - DNA, 25 bp, Homo sapien
tgggtgaagctgttaagggtaggaa

SEQ ID NO: 4192616 - DNA, 25 bp, Homo sapien
tgaagctgttaagggtaggaaggag

SEQ ID NO: 4192617 - DNA, 25 bp, Homo sapien
tgaaagaactttcattttgagctac

SEQ ID NO: 4192618 - DNA, 25 bp, Homo sapien
gttgttggattgaaagaactttcat

SEQ ID NO: 4192619 - DNA, 25 bp, Homo sapien
tgcaaagttgttggattgaaagaac

SEQ ID NO: 4192620 - DNA, 25 bp, Homo sapien
gattgaaagaactttcattttgagc

SEQ ID NO: 4192621 - DNA, 25 bp, Homo sapien
cccaggattgtcagaaaggcctggc

SEQ ID NO: 4192622 - DNA, 25 bp, Homo sapien
gcctggccaggattcacctgggaga

SEQ ID NO: 4192623 - DNA, 25 bp, Homo sapien
tgatgctggttccaggtccctcagg

SEQ ID NO: 4192624 - DNA, 25 bp, Homo sapien
cttgaactctatactggccccaggg

SEQ ID NO: 4192625 - DNA, 25 bp, Homo sapien
tccataatggcaagagagctctcat

SEQ ID NO: 4192626 - DNA, 25 bp, Homo sapien
gaaatttctgggttgtgcacagccc

SEQ ID NO: 4192627 - DNA, 25 bp, Homo sapien
caatgatactagacagacacactgg

SEQ ID NO: 4192628 - DNA, 25 bp, Homo sapien
catatttgcgttcctggcacccaga

SEQ ID NO: 4192629 - DNA, 25 bp, Homo sapien
attagctagacgtgatggcgcgcac

SEQ ID NO: 4192630 - DNA, 25 bp, Homo sapien
aaattagctagacgtgatggcgcgc

SEQ ID NO: 4192631 - DNA, 25 bp, Homo sapien
gcacctatagtcccacctaattgga

SEQ ID NO: 4192632 - DNA, 25 bp, Homo sapien
ctatagtcccacctaattggaaggc

SEQ ID NO: 4192633 - DNA, 25 bp, Homo sapien
cgagtgctctaaaccagtatcatgg

SEQ ID NO: 4192634 - DNA, 25 bp, Homo sapien
cagaggtgtctacttcagcagtgca

SEQ ID NO: 4192635 - DNA, 25 bp, Homo sapien
tgcttgaacaatgggcacatccagt

SEQ ID NO: 4192636 - DNA, 25 bp, Homo sapien
taagtgcccactaaggcagaggtgt

SEQ ID NO: 4192637 - DNA, 25 bp, Homo sapien
accgtgcccggttcgttacatgtat

SEQ ID NO: 4192638 - DNA, 25 bp, Homo sapien
tgcccggttcgttacatgtatatat

SEQ ID NO: 4192639 - DNA, 25 bp, Homo sapien
ccaccgtgcccggttcgttacatgt

SEQ ID NO: 4192640 - DNA, 25 bp, Homo sapien
cgtgcccggttcgttacatgtatat

SEQ ID NO: 4192641 - DNA, 25 bp, Homo sapien
ggtacatgatttcgttttcataaac

SEQ ID NO: 4192642 - DNA, 25 bp, Homo sapien
catgactttgggtacatgatttcgt

SEQ ID NO: 4192643 - DNA, 25 bp, Homo sapien
ttacttattaatcatgactttgggt

SEQ ID NO: 4192644 - DNA, 25 bp, Homo sapien
tattaatcatgactttgggtacatg

SEQ ID NO: 4192645 - DNA, 25 bp, Homo sapien
ccatgagtgcattatcaggagtgac

SEQ ID NO: 4192646 - DNA, 25 bp, Homo sapien
taagtcgaccgatgtgaaatttacc

SEQ ID NO: 4192647 - DNA, 25 bp, Homo sapien
gaaaggatagaaaccagcttggctt

SEQ ID NO: 4192648 - DNA, 25 bp, Homo sapien
gacattctgcggtgtatggcaactg

SEQ ID NO: 4192649 - DNA, 25 bp, Homo sapien
gattttaactatcctctactcagca

SEQ ID NO: 4192650 - DNA, 25 bp, Homo sapien
tctcgtgaacagttggaccatatgt

SEQ ID NO: 4192651 - DNA, 25 bp, Homo sapien
taaattgtacaacctctctcgtgaa

SEQ ID NO: 4192652 - DNA, 25 bp, Homo sapien
ttctggactccccataagttttgag

SEQ ID NO: 4192653 - DNA, 25 bp, Homo sapien
tctatctttataccacaaacggatt

SEQ ID NO: 4192654 - DNA, 25 bp, Homo sapien
cttctatctttataccacaaacgga

SEQ ID NO: 4192655 - DNA, 25 bp, Homo sapien
ctatctttataccacaaacggattt

SEQ ID NO: 4192656 - DNA, 25 bp, Homo sapien
ttctatctttataccacaaacggat

SEQ ID NO: 4192657 - DNA, 25 bp, Homo sapien
gatgatctggcaatatgccttatca

SEQ ID NO: 4192658 - DNA, 25 bp, Homo sapien
gaggctgtaacagtagtccagaaaa

SEQ ID NO: 4192659 - DNA, 25 bp, Homo sapien
tcatatgcatcaattcaatgataga

SEQ ID NO: 4192660 - DNA, 25 bp, Homo sapien
tatcagatgtatggtacctactgga

SEQ ID NO: 4192661 - DNA, 25 bp, Homo sapien
ctgtgttgggatgtattttcacccg

SEQ ID NO: 4192662 - DNA, 25 bp, Homo sapien
actgtgttgggatgtattttcaccc

SEQ ID NO: 4192663 - DNA, 25 bp, Homo sapien
tgtgttgggatgtattttcacccgt

SEQ ID NO: 4192664 - DNA, 25 bp, Homo sapien
cactgtgttgggatgtattttcacc

SEQ ID NO: 4192665 - DNA, 25 bp, Homo sapien
tactgtgctaaccaaagctggatgg

SEQ ID NO: 4192666 - DNA, 25 bp, Homo sapien
tgagccaaagcagatccaaacagca

SEQ ID NO: 4192667 - DNA, 25 bp, Homo sapien
gaagactgtagttgtggctctccac

SEQ ID NO: 4192668 - DNA, 25 bp, Homo sapien
cccattgctgggaggaactattgaa

SEQ ID NO: 4192669 - DNA, 25 bp, Homo sapien
tttatagcactctgtcagttatata

SEQ ID NO: 4192670 - DNA, 25 bp, Homo sapien
taactgaacattaatgagacaataa

SEQ ID NO: 4192671 - DNA, 25 bp, Homo sapien
gtatttgaatatattagactagaat

SEQ ID NO: 4192672 - DNA, 25 bp, Homo sapien
cattaaaatggcagtatacataata

SEQ ID NO: 4192673 - DNA, 25 bp, Homo sapien
tgggactacaattacactcatgcta

SEQ ID NO: 4192674 - DNA, 25 bp, Homo sapien
gagccactgtctagtaatccctgaa

SEQ ID NO: 4192675 - DNA, 25 bp, Homo sapien
gctagacttctcagtacttagtaca

SEQ ID NO: 4192676 - DNA, 25 bp, Homo sapien
cattcaggctctgttcattcttttt

SEQ ID NO: 4192677 - DNA, 25 bp, Homo sapien
ctgcggccgccgtgatggccgtaac

SEQ ID NO: 4192678 - DNA, 25 bp, Homo sapien
tgatggccgtaacggcacgaggcct

SEQ ID NO: 4192679 - DNA, 25 bp, Homo sapien
cgccgtgatggccgtaacggcacga

SEQ ID NO: 4192680 - DNA, 25 bp, Homo sapien
cactgcggccgccgtgatggccgta

SEQ ID NO: 4192681 - DNA, 25 bp, Homo sapien
gctgccgagccgggcagctccagct

SEQ ID NO: 4192682 - DNA, 25 bp, Homo sapien
cgagtaacaggctgtatggacggac

SEQ ID NO: 4192683 - DNA, 25 bp, Homo sapien
aagaggaagcgacgcagcgagtaac

SEQ ID NO: 4192684 - DNA, 25 bp, Homo sapien
taactcagcgcgagaagaggaagcg

SEQ ID NO: 4192685 - DNA, 25 bp, Homo sapien
ctgtatggacggacagcggactgaa

SEQ ID NO: 4192686 - DNA, 25 bp, Homo sapien
ggtgcagaagtctggaccctccgag

SEQ ID NO: 4192687 - DNA, 25 bp, Homo sapien
gaagtctggaccctccgagcagcct

SEQ ID NO: 4192688 - DNA, 25 bp, Homo sapien
cgcggaatcccggtgcagaagtctg

SEQ ID NO: 4192689 - DNA, 25 bp, Homo sapien
gagggtctcgcggaatcccggtgca

SEQ ID NO: 4192690 - DNA, 25 bp, Homo sapien
ctcggattacgccacagctggcaaa

SEQ ID NO: 4192691 - DNA, 25 bp, Homo sapien
gctggaggtgagagcgcccttcctc

SEQ ID NO: 4192692 - DNA, 25 bp, Homo sapien
cagactagaaaacggccggtgggtg

SEQ ID NO: 4192693 - DNA, 25 bp, Homo sapien
agggcgcgtcccgaagatgtccacc

SEQ ID NO: 4192694 - DNA, 25 bp, Homo sapien
gtttactgtgtgacctcgccgaagg

SEQ ID NO: 4192695 - DNA, 25 bp, Homo sapien
tattttcaggtgactccgggtccat

SEQ ID NO: 4192696 - DNA, 25 bp, Homo sapien
gagagtctaggcacactggtttcca

SEQ ID NO: 4192697 - DNA, 25 bp, Homo sapien
catcagtttgacaccgagagcgttc

SEQ ID NO: 4192698 - DNA, 25 bp, Homo sapien
gatgtgaacactctgcaaactatgt

SEQ ID NO: 4192699 - DNA, 25 bp, Homo sapien
gagccaacagctgagtagatgtgaa

SEQ ID NO: 4192700 - DNA, 25 bp, Homo sapien
tttcccaaagaagtctcagagtttg

SEQ ID NO: 4192701 - DNA, 25 bp, Homo sapien
tacagccaatttccacagatcacaa

SEQ ID NO: 4192702 - DNA, 25 bp, Homo sapien
gacaagtgatttataataatcacat

SEQ ID NO: 4192703 - DNA, 25 bp, Homo sapien
ctgacaagtgatttataataatcac

SEQ ID NO: 4192704 - DNA, 25 bp, Homo sapien
tcctgacaagtgatttataataatc

SEQ ID NO: 4192705 - DNA, 25 bp, Homo sapien
ttcctgacaagtgatttataataat

SEQ ID NO: 4192706 - DNA, 25 bp, Homo sapien
cctaacatcacagtatttatagaga

SEQ ID NO: 4192707 - DNA, 25 bp, Homo sapien
tctatattataaaggtaaattctaa

SEQ ID NO: 4192708 - DNA, 25 bp, Homo sapien
ccttgttgtcttcctaacatcacag

SEQ ID NO: 4192709 - DNA, 25 bp, Homo sapien
tgctcagtgatttcaaaagttccct

SEQ ID NO: 4192710 - DNA, 25 bp, Homo sapien
ttgtgtctgggtaattgaaagcatg

SEQ ID NO: 4192711 - DNA, 25 bp, Homo sapien
aagtcagcatatggaatcagttttg

SEQ ID NO: 4192712 - DNA, 25 bp, Homo sapien
catggtaatgtcaccaaaacaaagt

SEQ ID NO: 4192713 - DNA, 25 bp, Homo sapien
gaagggaagactataaattctatct

SEQ ID NO: 4192714 - DNA, 25 bp, Homo sapien
ccagcacgttgagaagccaaggtgg

SEQ ID NO: 4192715 - DNA, 25 bp, Homo sapien
aggtgggaggatcgtttgaggccag

SEQ ID NO: 4192716 - DNA, 25 bp, Homo sapien
caaggtgggaggatcgtttgaggcc

SEQ ID NO: 4192717 - DNA, 25 bp, Homo sapien
agcacgttgagaagccaaggtggga

SEQ ID NO: 4192718 - DNA, 25 bp, Homo sapien
gacgtaacaccaagctacaacctta

SEQ ID NO: 4192719 - DNA, 25 bp, Homo sapien
gattcagaaggtacacaaatatcca

SEQ ID NO: 4192720 - DNA, 25 bp, Homo sapien
gagcagactgtggtattgttatgac

SEQ ID NO: 4192721 - DNA, 25 bp, Homo sapien
aggatgacaagctagaaaacaatgc

SEQ ID NO: 4192722 - DNA, 25 bp, Homo sapien
aaatagcagtttggcaacagtcagc

SEQ ID NO: 4192723 - DNA, 25 bp, Homo sapien
ccattttttgcctaccatgctggca

SEQ ID NO: 4192724 - DNA, 25 bp, Homo sapien
gattagaaagaatgataacacagag

SEQ ID NO: 4192725 - DNA, 25 bp, Homo sapien
caatctgcattctgtaggtattagg

SEQ ID NO: 4192726 - DNA, 25 bp, Homo sapien
gagctgaagagttatcaggccactg

SEQ ID NO: 4192727 - DNA, 25 bp, Homo sapien
ttccagctacgtaaggagctgaaga

SEQ ID NO: 4192728 - DNA, 25 bp, Homo sapien
taatgtgccctagattacagctgga

SEQ ID NO: 4192729 - DNA, 25 bp, Homo sapien
tgtccacggccacaatatccatatt

SEQ ID NO: 4192730 - DNA, 25 bp, Homo sapien
taaaaaccgacaagactaatgactg

SEQ ID NO: 4192731 - DNA, 25 bp, Homo sapien
caagaaccgaaacattacagtttga

SEQ ID NO: 4192732 - DNA, 25 bp, Homo sapien
aaagaagttatgtctgttccaggtg

SEQ ID NO: 4192733 - DNA, 25 bp, Homo sapien
tgtaacactgagcaagttatctaac

SEQ ID NO: 4192734 - DNA, 25 bp, Homo sapien
aatcaaagccaaagtgccatattca

SEQ ID NO: 4192735 - DNA, 25 bp, Homo sapien
aagccaaagtgccatattcaaccaa

SEQ ID NO: 4192736 - DNA, 25 bp, Homo sapien
tcaaagccaaagtgccatattcaac

SEQ ID NO: 4192737 - DNA, 25 bp, Homo sapien
caaagccaaagtgccatattcaacc

SEQ ID NO: 4192738 - DNA, 25 bp, Homo sapien
cgaactcgccaccaggacttagaat

SEQ ID NO: 4192739 - DNA, 25 bp, Homo sapien
ttttcacaatagatgctttccgagc

SEQ ID NO: 4192740 - DNA, 25 bp, Homo sapien
tgttgggccacataatcaaatttgg

SEQ ID NO: 4192741 - DNA, 25 bp, Homo sapien
cacatagttagaaggcacaaaacct

SEQ ID NO: 4192742 - DNA, 25 bp, Homo sapien
tcaagtcaattatgcacactgctgc

SEQ ID NO: 4192743 - DNA, 25 bp, Homo sapien
tcactggtcttctgggttgaccacc

SEQ ID NO: 4192744 - DNA, 25 bp, Homo sapien
gttaacacttatgaccttcactggt

SEQ ID NO: 4192745 - DNA, 25 bp, Homo sapien
tgactcaaacttacctagcccttgc

SEQ ID NO: 4192746 - DNA, 25 bp, Homo sapien
taagttgccttggtgccaaagaggc

SEQ ID NO: 4192747 - DNA, 25 bp, Homo sapien
ggcaattctgcctataagtctaaac

SEQ ID NO: 4192748 - DNA, 25 bp, Homo sapien
ggctccactgtctcaggccctaatg

SEQ ID NO: 4192749 - DNA, 25 bp, Homo sapien
cagcttagccaagtccagtgtgaag

SEQ ID NO: 4192750 - DNA, 25 bp, Homo sapien
agtgagcttcctcgtctgttctgca

SEQ ID NO: 4192751 - DNA, 25 bp, Homo sapien
acacagctcaggataattctcagtg

SEQ ID NO: 4192752 - DNA, 25 bp, Homo sapien
tcaggataattctcagtgagcttcc

SEQ ID NO: 4192753 - DNA, 25 bp, Homo sapien
attctcagtgagcttcctcgtctgt

SEQ ID NO: 4192754 - DNA, 25 bp, Homo sapien
caatgtcaccatggactgtgttgag

SEQ ID NO: 4192755 - DNA, 25 bp, Homo sapien
taagggagcatacctccacctaagc

SEQ ID NO: 4192756 - DNA, 25 bp, Homo sapien
gcacctctcagactcgaatcaatgt

SEQ ID NO: 4192757 - DNA, 25 bp, Homo sapien
gctgccaggctaggttctcaccaat

SEQ ID NO: 4192758 - DNA, 25 bp, Homo sapien
gatgcagaatctggcacactaggtt

SEQ ID NO: 4192759 - DNA, 25 bp, Homo sapien
ctttgtcccctttatcaatgataat

SEQ ID NO: 4192760 - DNA, 25 bp, Homo sapien
tgttgaggtcatagagacgttcccc

SEQ ID NO: 4192761 - DNA, 25 bp, Homo sapien
taaatttcacataagcgggcatgtt

SEQ ID NO: 4192762 - DNA, 25 bp, Homo sapien
caacttgtccattgtagctaccacg

SEQ ID NO: 4192763 - DNA, 25 bp, Homo sapien
ttgaagggaaccatccaacttgtcc

SEQ ID NO: 4192764 - DNA, 25 bp, Homo sapien
taaagagcctgtaccacatgcaaca

SEQ ID NO: 4192765 - DNA, 25 bp, Homo sapien
tatttaggttattgacgactgctgc

SEQ ID NO: 4192766 - DNA, 25 bp, Homo sapien
ctatcacgaatgaggaaatcccctt

SEQ ID NO: 4192767 - DNA, 25 bp, Homo sapien
tttctgcttgatgcctggtgacttt

SEQ ID NO: 4192768 - DNA, 25 bp, Homo sapien
gattgccagcaaactttccagtgag

SEQ ID NO: 4192769 - DNA, 25 bp, Homo sapien
tgccataataccaaggattgccagc

SEQ ID NO: 4192770 - DNA, 25 bp, Homo sapien
tagtattattctactctcaatgaag

SEQ ID NO: 4192771 - DNA, 25 bp, Homo sapien
tatgttacgtcccagcttgttacct

SEQ ID NO: 4192772 - DNA, 25 bp, Homo sapien
agacgaaataattcagtgtgtagca

SEQ ID NO: 4192773 - DNA, 25 bp, Homo sapien
gaatgcggactttagctttggaaca

SEQ ID NO: 4192774 - DNA, 25 bp, Homo sapien
caaattctaatatcctaagcagtat

SEQ ID NO: 4192775 - DNA, 25 bp, Homo sapien
gtcatcaaattctaatatcctaagc

SEQ ID NO: 4192776 - DNA, 25 bp, Homo sapien
catcaaattctaatatcctaagcag

SEQ ID NO: 4192777 - DNA, 25 bp, Homo sapien
ggaaaatgagtgtcatcaaattcta

SEQ ID NO: 4192778 - DNA, 25 bp, Homo sapien
ttcttccatggtgctgaatttacgc

SEQ ID NO: 4192779 - DNA, 25 bp, Homo sapien
gctgaatttacgctgcccaatgcag

SEQ ID NO: 4192780 - DNA, 25 bp, Homo sapien
cccttgtgcttttagtgatactgag

SEQ ID NO: 4192781 - DNA, 25 bp, Homo sapien
ccaatgcagtagacagtctctttta

SEQ ID NO: 4192782 - DNA, 25 bp, Homo sapien
agatataatttttctccttgttcac

SEQ ID NO: 4192783 - DNA, 25 bp, Homo sapien
gataaatgcttgacaagatataatt

SEQ ID NO: 4192784 - DNA, 25 bp, Homo sapien
catgataaatgcttgacaagatata

SEQ ID NO: 4192785 - DNA, 25 bp, Homo sapien
tcatgataaatgcttgacaagatat

SEQ ID NO: 4192786 - DNA, 25 bp, Homo sapien
gaactgttctatgcagatgcactgc

SEQ ID NO: 4192787 - DNA, 25 bp, Homo sapien
caatttccaatcaagcacgactgga

SEQ ID NO: 4192788 - DNA, 25 bp, Homo sapien
taacagaacagggtgcctttacaag

SEQ ID NO: 4192789 - DNA, 25 bp, Homo sapien
ggtatttacaatggcctgtgacaaa

SEQ ID NO: 4192790 - DNA, 25 bp, Homo sapien
atctatttacagtttgaaaagctaa

SEQ ID NO: 4192791 - DNA, 25 bp, Homo sapien
gagcatctatttacagtttgaaaag

SEQ ID NO: 4192792 - DNA, 25 bp, Homo sapien
gcatctatttacagtttgaaaagct

SEQ ID NO: 4192793 - DNA, 25 bp, Homo sapien
ctatttacagtttgaaaagctaaat

SEQ ID NO: 4192794 - DNA, 25 bp, Homo sapien
cacccagtggcaacataagtcttta

SEQ ID NO: 4192795 - DNA, 25 bp, Homo sapien
catgtcctaatacaagatgctctag

SEQ ID NO: 4192796 - DNA, 25 bp, Homo sapien
taaaacatccatatgcttaggcagc

SEQ ID NO: 4192797 - DNA, 25 bp, Homo sapien
cagaagcagattggcctcttatcca

SEQ ID NO: 4192798 - DNA, 25 bp, Homo sapien
cacacatgggttatctgggagcgct

SEQ ID NO: 4192799 - DNA, 25 bp, Homo sapien
gccactgtgtttagatgtaccctga

SEQ ID NO: 4192800 - DNA, 25 bp, Homo sapien
aagaaggtaccccagcaacaaggtg

SEQ ID NO: 4192801 - DNA, 25 bp, Homo sapien
caaaataagtagcttccagcgaggt

SEQ ID NO: 4192802 - DNA, 25 bp, Homo sapien
tgctaaacactaacagaaccagcct

SEQ ID NO: 4192803 - DNA, 25 bp, Homo sapien
aaggtgcacctcattagtaaactag

SEQ ID NO: 4192804 - DNA, 25 bp, Homo sapien
aacttagggagtactgtaatgccac

SEQ ID NO: 4192805 - DNA, 25 bp, Homo sapien
tcagaatcgagtagcaagccaatgc

SEQ ID NO: 4192806 - DNA, 25 bp, Homo sapien
tcatcaggaatttaacctccagggt

SEQ ID NO: 4192807 - DNA, 25 bp, Homo sapien
agggtttccttagagtgtgctcaat

SEQ ID NO: 4192808 - DNA, 25 bp, Homo sapien
tgctcaattagaacccttaagtcgg

SEQ ID NO: 4192809 - DNA, 25 bp, Homo sapien
caaatgtttgtctggtcatcaggaa

SEQ ID NO: 4192810 - DNA, 25 bp, Homo sapien
taagccattgcacagagtctgccct

SEQ ID NO: 4192811 - DNA, 25 bp, Homo sapien
ggtcatgacccaacaagtaactcag

SEQ ID NO: 4192812 - DNA, 25 bp, Homo sapien
caataatccgtttcaagcctgggtc

SEQ ID NO: 4192813 - DNA, 25 bp, Homo sapien
gcactacaatgctctggcaagacag

SEQ ID NO: 4192814 - DNA, 25 bp, Homo sapien
ggtagactcagtttgacctagaaca

SEQ ID NO: 4192815 - DNA, 25 bp, Homo sapien
aagctcagaaagggcgggctccgaa

SEQ ID NO: 4192816 - DNA, 25 bp, Homo sapien
cctgaattgttctagagccggccca

SEQ ID NO: 4192817 - DNA, 25 bp, Homo sapien
tgagtcgcagcgaagcctgaattgt

SEQ ID NO: 4192818 - DNA, 25 bp, Homo sapien
aaaccacatgaaaagacttgtccag

SEQ ID NO: 4192819 - DNA, 25 bp, Homo sapien
aaaaccacatgaaaagacttgtcca

SEQ ID NO: 4192820 - DNA, 25 bp, Homo sapien
aatcaatgcgtagaaaaaccacatg

SEQ ID NO: 4192821 - DNA, 25 bp, Homo sapien
aaacatggaatcaatgcgtagaaaa

SEQ ID NO: 4192822 - DNA, 25 bp, Homo sapien
ttaaatataaatggactaaattctg

SEQ ID NO: 4192823 - DNA, 25 bp, Homo sapien
tataaatggactaaattctgcaatt

SEQ ID NO: 4192824 - DNA, 25 bp, Homo sapien
aatataaatggactaaattctgcaa

SEQ ID NO: 4192825 - DNA, 25 bp, Homo sapien
taaatataaatggactaaattctgc

SEQ ID NO: 4192826 - DNA, 25 bp, Homo sapien
aaggcggcaacgaggctggggaagg

SEQ ID NO: 4192827 - DNA, 25 bp, Homo sapien
tgcaaggcggcaacgaggctgggga

SEQ ID NO: 4192828 - DNA, 25 bp, Homo sapien
gaaggggcgcccgccattgcccagg

SEQ ID NO: 4192829 - DNA, 25 bp, Homo sapien
gggaaggggcgcccgccattgccca

SEQ ID NO: 4192830 - DNA, 25 bp, Homo sapien
tagtgggggaatgccatagcttcaa

SEQ ID NO: 4192831 - DNA, 25 bp, Homo sapien
ctaatgaagggcctcactggcggag

SEQ ID NO: 4192832 - DNA, 25 bp, Homo sapien
ccatagcttcaaattagtgtctaat

SEQ ID NO: 4192833 - DNA, 25 bp, Homo sapien
tcaaattagtgtctaatgaagggcc

SEQ ID NO: 4192834 - DNA, 25 bp, Homo sapien
tggttgagagtacagagaggttctg

SEQ ID NO: 4192835 - DNA, 25 bp, Homo sapien
gttggttgagagtacagagaggttc

SEQ ID NO: 4192836 - DNA, 25 bp, Homo sapien
ttggttgagagtacagagaggttct

SEQ ID NO: 4192837 - DNA, 25 bp, Homo sapien
ggttgagagtacagagaggttctga

SEQ ID NO: 4192838 - DNA, 25 bp, Homo sapien
gacagaatagtacactgtttctcca

SEQ ID NO: 4192839 - DNA, 25 bp, Homo sapien
tgtttctccaggcgcgatcactggg

SEQ ID NO: 4192840 - DNA, 25 bp, Homo sapien
ttctccaggcgcgatcactgggctc

SEQ ID NO: 4192841 - DNA, 25 bp, Homo sapien
ccctggtattcgacagaatagtaca

SEQ ID NO: 4192842 - DNA, 25 bp, Homo sapien
tccagatgtggctcgtgtacaggct

SEQ ID NO: 4192843 - DNA, 25 bp, Homo sapien
tgtatggcacagtggccgtgatgtc

SEQ ID NO: 4192844 - DNA, 25 bp, Homo sapien
ctgacacgaaggttgtatggcacag

SEQ ID NO: 4192845 - DNA, 25 bp, Homo sapien
atccagatgtggctcgtgtacaggc

SEQ ID NO: 4192846 - DNA, 25 bp, Homo sapien
ttcccaatgtcagcatccccaacac

SEQ ID NO: 4192847 - DNA, 25 bp, Homo sapien
tcccaatgtcagcatccccaacacc

SEQ ID NO: 4192848 - DNA, 25 bp, Homo sapien
cccaatgtcagcatccccaacacct

SEQ ID NO: 4192849 - DNA, 25 bp, Homo sapien
ttctgtccccacaaacttgattcct

SEQ ID NO: 4192850 - DNA, 25 bp, Homo sapien
aattccatttgacagctgaatacta

SEQ ID NO: 4192851 - DNA, 25 bp, Homo sapien
gtccccacaaacttgattcctaagc

SEQ ID NO: 4192852 - DNA, 25 bp, Homo sapien
caattccatttgacagctgaatact

SEQ ID NO: 4192853 - DNA, 25 bp, Homo sapien
acacaagtggacactcagaagaaag

SEQ ID NO: 4192854 - DNA, 25 bp, Homo sapien
gacacaagtggacactcagaagaaa

SEQ ID NO: 4192855 - DNA, 25 bp, Homo sapien
caaagccagccccagacagggttga

SEQ ID NO: 4192856 - DNA, 25 bp, Homo sapien
agagtcaaagccagccccagacagg

SEQ ID NO: 4192857 - DNA, 25 bp, Homo sapien
ctgttggcaagacaacaggagagtc

SEQ ID NO: 4192858 - DNA, 25 bp, Homo sapien
agccagccccagacagggttgattt

SEQ ID NO: 4192859 - DNA, 25 bp, Homo sapien
taggccacaaggaactcaaactggg

SEQ ID NO: 4192860 - DNA, 25 bp, Homo sapien
aggtggaagccatctttggtgatct

SEQ ID NO: 4192861 - DNA, 25 bp, Homo sapien
ctccagtaggccacaaggaactcaa

SEQ ID NO: 4192862 - DNA, 25 bp, Homo sapien
ggtcctccagctcaataaccaggtg

SEQ ID NO: 4192863 - DNA, 25 bp, Homo sapien
ttcccgaagcctgacccaaaggcca

SEQ ID NO: 4192864 - DNA, 25 bp, Homo sapien
gcctgacccaaaggccaaggctgga

SEQ ID NO: 4192865 - DNA, 25 bp, Homo sapien
gaaatctgtgccttctttcccgaag

SEQ ID NO: 4192866 - DNA, 25 bp, Homo sapien
tgtgccttctttcccgaagcctgac

SEQ ID NO: 4192867 - DNA, 25 bp, Homo sapien
catcctgttgatctacaaatcctga

SEQ ID NO: 4192868 - DNA, 25 bp, Homo sapien
ttttgaaatcatcctgttgatctac

SEQ ID NO: 4192869 - DNA, 25 bp, Homo sapien
tgtaccagcgttgtgtgcttttgaa

SEQ ID NO: 4192870 - DNA, 25 bp, Homo sapien
gatctacaaatcctgattgctgccc

SEQ ID NO: 4192871 - DNA, 25 bp, Homo sapien
cgagcaagaccaattggattcttct

SEQ ID NO: 4192872 - DNA, 25 bp, Homo sapien
tggtcttgggaaactgaataccgag

SEQ ID NO: 4192873 - DNA, 25 bp, Homo sapien
aagcttggcctgataagacgagcaa

SEQ ID NO: 4192874 - DNA, 25 bp, Homo sapien
tggctaccagcaacccctgaagctt

SEQ ID NO: 4192875 - DNA, 25 bp, Homo sapien
tctgggccttcacacagtatgcagc

SEQ ID NO: 4192876 - DNA, 25 bp, Homo sapien
cctggctccatggtttctaggtgca

SEQ ID NO: 4192877 - DNA, 25 bp, Homo sapien
aggcgctgtacctcccaatggcctt

SEQ ID NO: 4192878 - DNA, 25 bp, Homo sapien
caatggccttcacgaatgtctgggc

SEQ ID NO: 4192879 - DNA, 25 bp, Homo sapien
atgaagccaacaaaggcaaacaggg

SEQ ID NO: 4192880 - DNA, 25 bp, Homo sapien
tcagcatgaagccaacaaaggcaaa

SEQ ID NO: 4192881 - DNA, 25 bp, Homo sapien
acagggccagtaccaggggaatggc

SEQ ID NO: 4192882 - DNA, 25 bp, Homo sapien
gcaaacagggccagtaccaggggaa

SEQ ID NO: 4192883 - DNA, 25 bp, Homo sapien
cattttccagacgaacagtggcacg

SEQ ID NO: 4192884 - DNA, 25 bp, Homo sapien
agtactggagcagccggcccatttt

SEQ ID NO: 4192885 - DNA, 25 bp, Homo sapien
accacggggcaacaggagtactgga

SEQ ID NO: 4192886 - DNA, 25 bp, Homo sapien
tctgggaggaccaccacggggcaac

SEQ ID NO: 4192887 - DNA, 25 bp, Homo sapien
gggaagatcttcattcccctgatct

SEQ ID NO: 4192888 - DNA, 25 bp, Homo sapien
tcctcactaacaaggcactgggtct

SEQ ID NO: 4192889 - DNA, 25 bp, Homo sapien
ctaggagatcttagctgttgaggac

SEQ ID NO: 4192890 - DNA, 25 bp, Homo sapien
cttcttgtgtacctgaaatcctgta

SEQ ID NO: 4192891 - DNA, 25 bp, Homo sapien
tattcattagaggatagcagtagta

SEQ ID NO: 4192892 - DNA, 25 bp, Homo sapien
attcattagaggatagcagtagtag

SEQ ID NO: 4192893 - DNA, 25 bp, Homo sapien
atattcattagaggatagcagtagt

SEQ ID NO: 4192894 - DNA, 25 bp, Homo sapien
gttcctcaggagacatcacagccgt

SEQ ID NO: 4192895 - DNA, 25 bp, Homo sapien
tgaggagttcctcaggagacatcac

SEQ ID NO: 4192896 - DNA, 25 bp, Homo sapien
aggagacatcacagccgtggcacag

SEQ ID NO: 4192897 - DNA, 25 bp, Homo sapien
gcagctgattaacttctggggtgaa

SEQ ID NO: 4192898 - DNA, 25 bp, Homo sapien
tcagtcagactgtagagtgtcacca

SEQ ID NO: 4192899 - DNA, 25 bp, Homo sapien
tgtccgtggcggaaaacagaaacac

SEQ ID NO: 4192900 - DNA, 25 bp, Homo sapien
tacagtagttcatggatcctccgtg

SEQ ID NO: 4192901 - DNA, 25 bp, Homo sapien
ttagcaggtgtgtaggtaattcccc

SEQ ID NO: 4192902 - DNA, 25 bp, Homo sapien
gcagcccatctagtgtagcccacaa

SEQ ID NO: 4192903 - DNA, 25 bp, Homo sapien
tattagtctggcatggaagcagccc

SEQ ID NO: 4192904 - DNA, 25 bp, Homo sapien
gatcaccctgtctgaaagcagagca

SEQ ID NO: 4192905 - DNA, 25 bp, Homo sapien
gattacagtcagttccagtcggctg

SEQ ID NO: 4192906 - DNA, 25 bp, Homo sapien
caagcataggcatgttcatccccat

SEQ ID NO: 4192907 - DNA, 25 bp, Homo sapien
cctgatttgcacacccaggagcagg

SEQ ID NO: 4192908 - DNA, 25 bp, Homo sapien
tatagctcattctgcgtgggaattc

SEQ ID NO: 4192909 - DNA, 25 bp, Homo sapien
gacagactcttccacgttaggtgct

SEQ ID NO: 4192910 - DNA, 25 bp, Homo sapien
cgtacatcttttttatcggtgtgca

SEQ ID NO: 4192911 - DNA, 25 bp, Homo sapien
tcggtgtgcattgtacttgtggtaa

SEQ ID NO: 4192912 - DNA, 25 bp, Homo sapien
tcacggatacatgcgacgtacatct

SEQ ID NO: 4192913 - DNA, 25 bp, Homo sapien
tgttgttaatatgccttagactgcc

SEQ ID NO: 4192914 - DNA, 25 bp, Homo sapien
ctgctgccacatcattttccttggt

SEQ ID NO: 4192915 - DNA, 25 bp, Homo sapien
gctgccacatcattttccttggtca

SEQ ID NO: 4192916 - DNA, 25 bp, Homo sapien
ctgccacatcattttccttggtcat

SEQ ID NO: 4192917 - DNA, 25 bp, Homo sapien
tgctgccacatcattttccttggtc

SEQ ID NO: 4192918 - DNA, 25 bp, Homo sapien
gacaaggtgttccagaacgtctcct

SEQ ID NO: 4192919 - DNA, 25 bp, Homo sapien
tcaacaatcttccagtatcaccttc

SEQ ID NO: 4192920 - DNA, 25 bp, Homo sapien
tccagaacgtctcctcaacaatctt

SEQ ID NO: 4192921 - DNA, 25 bp, Homo sapien
ttgcaaagacaaggtgttccagaac

SEQ ID NO: 4192922 - DNA, 25 bp, Homo sapien
aacgtcccgcttttcctggtctgca

SEQ ID NO: 4192923 - DNA, 25 bp, Homo sapien
ggtctgcactccttcgactggtctt

SEQ ID NO: 4192924 - DNA, 25 bp, Homo sapien
tctgcactccttcgactggtcttca

SEQ ID NO: 4192925 - DNA, 25 bp, Homo sapien
tcccatccaaatcaacgtcccgctt

SEQ ID NO: 4192926 - DNA, 25 bp, Homo sapien
agaggcttcacaatggctccagact

SEQ ID NO: 4192927 - DNA, 25 bp, Homo sapien
gaggcttcacaatggctccagactc

SEQ ID NO: 4192928 - DNA, 25 bp, Homo sapien
cagaggcttcacaatggctccagac

SEQ ID NO: 4192929 - DNA, 25 bp, Homo sapien
tagccccaagcaaagggtcttgttc

SEQ ID NO: 4192930 - DNA, 25 bp, Homo sapien
gcctgtttctagtccggtttctcaa

SEQ ID NO: 4192931 - DNA, 25 bp, Homo sapien
gacaagtcgcaaggtgtcggcctct

SEQ ID NO: 4192932 - DNA, 25 bp, Homo sapien
tccctggtgggcgaaatacttccag

SEQ ID NO: 4192933 - DNA, 25 bp, Homo sapien
ttctgcagcttgtgacaatctactt

SEQ ID NO: 4192934 - DNA, 25 bp, Homo sapien
cagcttgtgacaatctacttctccc

SEQ ID NO: 4192935 - DNA, 25 bp, Homo sapien
tatcagccatttgtgcatgtctcct

SEQ ID NO: 4192936 - DNA, 25 bp, Homo sapien
cagccatttgtgcatgtctcctggg

SEQ ID NO: 4192937 - DNA, 25 bp, Homo sapien
tagtatctgctgacctaagctcctc

SEQ ID NO: 4192938 - DNA, 25 bp, Homo sapien
gtatctgctgacctaagctcctcac

SEQ ID NO: 4192939 - DNA, 25 bp, Homo sapien
cctcagctctctggtagtatctgct

SEQ ID NO: 4192940 - DNA, 25 bp, Homo sapien
ggtagtatctgctgacctaagctcc

SEQ ID NO: 4192941 - DNA, 25 bp, Homo sapien
taagggagcctctgagccatagcca

SEQ ID NO: 4192942 - DNA, 25 bp, Homo sapien
ctaagggagcctctgagccatagcc

SEQ ID NO: 4192943 - DNA, 25 bp, Homo sapien
aagggagcctctgagccatagccac

SEQ ID NO: 4192944 - DNA, 25 bp, Homo sapien
catcactagtacctgcagtcacttc

SEQ ID NO: 4192945 - DNA, 25 bp, Homo sapien
tctttttccatcactagtacctgca

SEQ ID NO: 4192946 - DNA, 25 bp, Homo sapien
cagaacttgtccacggccttctttt

SEQ ID NO: 4192947 - DNA, 25 bp, Homo sapien
tttccatcactagtacctgcagtca

SEQ ID NO: 4192948 - DNA, 25 bp, Homo sapien
gaaatgctgagatgatactgttgga

SEQ ID NO: 4192949 - DNA, 25 bp, Homo sapien
ggtgggacatttgttcgaaatgctg

SEQ ID NO: 4192950 - DNA, 25 bp, Homo sapien
gctgccacatttataatggaattct

SEQ ID NO: 4192951 - DNA, 25 bp, Homo sapien
cacatttataatggaattctccagg

SEQ ID NO: 4192952 - DNA, 25 bp, Homo sapien
ttatccaactagtttaagcaggcca

SEQ ID NO: 4192953 - DNA, 25 bp, Homo sapien
tatccaactagtttaagcaggccaa

SEQ ID NO: 4192954 - DNA, 25 bp, Homo sapien
gaattctgcttttcctatgtgagtc

SEQ ID NO: 4192955 - DNA, 25 bp, Homo sapien
gatcatcttgcccatggaccctgtt

SEQ ID NO: 4192956 - DNA, 25 bp, Homo sapien
tgtgctgatctggatccagacttga

SEQ ID NO: 4192957 - DNA, 25 bp, Homo sapien
tcctatgtgagtctctggatgatca

SEQ ID NO: 4192958 - DNA, 25 bp, Homo sapien
gaagtgaagatgtgctatcatgcaa

SEQ ID NO: 4192959 - DNA, 25 bp, Homo sapien
taccaatggaataggccagcccttt

SEQ ID NO: 4192960 - DNA, 25 bp, Homo sapien
tatcttaagaagtgttgtggcccag

SEQ ID NO: 4192961 - DNA, 25 bp, Homo sapien
tggtttgttcagcatggctcctaag

SEQ ID NO: 4192962 - DNA, 25 bp, Homo sapien
gcccacaaagccctactggaaaggc

SEQ ID NO: 4192963 - DNA, 25 bp, Homo sapien
ctgctggtgccaaaggtttaaaatt

SEQ ID NO: 4192964 - DNA, 25 bp, Homo sapien
tggcccacaaagccctactggaaag

SEQ ID NO: 4192965 - DNA, 25 bp, Homo sapien
agccctactggaaaggcccctgctg

SEQ ID NO: 4192966 - DNA, 25 bp, Homo sapien
aaggattcacacgatgtctgctaag

SEQ ID NO: 4192967 - DNA, 25 bp, Homo sapien
cagggacgaaaggattcacacgatg

SEQ ID NO: 4192968 - DNA, 25 bp, Homo sapien
gaaaggattcacacgatgtctgcta

SEQ ID NO: 4192969 - DNA, 25 bp, Homo sapien
gacgaaaggattcacacgatgtctg

SEQ ID NO: 4192970 - DNA, 25 bp, Homo sapien
tctctcgctccctttttttctttgc

SEQ ID NO: 4192971 - DNA, 25 bp, Homo sapien
caaaatgaagaagctttctcttttc

SEQ ID NO: 4192972 - DNA, 25 bp, Homo sapien
aaatgaagaagctttctcttttctc

SEQ ID NO: 4192973 - DNA, 25 bp, Homo sapien
ctaaatccaaaatgaagaagctttc

SEQ ID NO: 4192974 - DNA, 25 bp, Homo sapien
caatagactcatctccgtacacggt

SEQ ID NO: 4192975 - DNA, 25 bp, Homo sapien
ctacaatagactcatctccgtacac

SEQ ID NO: 4192976 - DNA, 25 bp, Homo sapien
acaatagactcatctccgtacacgg

SEQ ID NO: 4192977 - DNA, 25 bp, Homo sapien
atagactcatctccgtacacggtca

SEQ ID NO: 4192978 - DNA, 25 bp, Homo sapien
cggtgctcacatacttcctactggg

SEQ ID NO: 4192979 - DNA, 25 bp, Homo sapien
caaacccatggtatacgtagcatgg

SEQ ID NO: 4192980 - DNA, 25 bp, Homo sapien
ctactgggggtggaccaaacccatg

SEQ ID NO: 4192981 - DNA, 25 bp, Homo sapien
ctgacggtgctcacatacttcctac

SEQ ID NO: 4192982 - DNA, 25 bp, Homo sapien
gtccaatgtaatacagttggccacc

SEQ ID NO: 4192983 - DNA, 25 bp, Homo sapien
aatacagttggccaccaagatggtg

SEQ ID NO: 4192984 - DNA, 25 bp, Homo sapien
tgcagagcaggtctacaagatctga

SEQ ID NO: 4192985 - DNA, 25 bp, Homo sapien
caatgtaatacagttggccaccaag

SEQ ID NO: 4192986 - DNA, 25 bp, Homo sapien
ttcacatgaattcagtttgaagtgg

SEQ ID NO: 4192987 - DNA, 25 bp, Homo sapien
ggttacaccatgataaacaatcatt

SEQ ID NO: 4192988 - DNA, 25 bp, Homo sapien
tggtaatggttacaccatgataaac

SEQ ID NO: 4192989 - DNA, 25 bp, Homo sapien
acaatcattctgagtcgttttcttc

SEQ ID NO: 4192990 - DNA, 25 bp, Homo sapien
taagattgtggattgaggcacccac

SEQ ID NO: 4192991 - DNA, 25 bp, Homo sapien
gccgcatgtgaccatagagccatgt

SEQ ID NO: 4192992 - DNA, 25 bp, Homo sapien
tcataatctaggaatgccgcatgtg

SEQ ID NO: 4192993 - DNA, 25 bp, Homo sapien
gagccatgtaccagaagaggtaacc

SEQ ID NO: 4192994 - DNA, 25 bp, Homo sapien
tctcgggcaccaaaacacattccag

SEQ ID NO: 4192995 - DNA, 25 bp, Homo sapien
aagttagaagtcagttctcgggcac

SEQ ID NO: 4192996 - DNA, 25 bp, Homo sapien
tccaagggccagaaccgcagttcat

SEQ ID NO: 4192997 - DNA, 25 bp, Homo sapien
cattccagcccctgaaatccaaggg

SEQ ID NO: 4192998 - DNA, 25 bp, Homo sapien
ctgggcactgattcacccctgctaa

SEQ ID NO: 4192999 - DNA, 25 bp, Homo sapien
actgggacggacacaaatggaggaa

SEQ ID NO: 4193000 - DNA, 25 bp, Homo sapien
tgctaggctgggcactgattcaccc

SEQ ID NO: 4193001 - DNA, 25 bp, Homo sapien
tccagctgtagcagcacagaactgg

SEQ ID NO: 4193002 - DNA, 25 bp, Homo sapien
tttaaattcacccaatgtgacacgt

SEQ ID NO: 4193003 - DNA, 25 bp, Homo sapien
tgctcagaggttttacccactttcc

SEQ ID NO: 4193004 - DNA, 25 bp, Homo sapien
taaaggagaggccctgtctgctcag

SEQ ID NO: 4193005 - DNA, 25 bp, Homo sapien
tgtgacacgtttgggagccaacact

SEQ ID NO: 4193006 - DNA, 25 bp, Homo sapien
aactccatacagacagtggctgcgt

SEQ ID NO: 4193007 - DNA, 25 bp, Homo sapien
taagtcagggtctcaagaggctgga

SEQ ID NO: 4193008 - DNA, 25 bp, Homo sapien
cacaacattattcaaagggcatgcg

SEQ ID NO: 4193009 - DNA, 25 bp, Homo sapien
gattttcgcttaggctcagggagac

SEQ ID NO: 4193010 - DNA, 25 bp, Homo sapien
tgcacactcgttgagcccggagcct

SEQ ID NO: 4193011 - DNA, 25 bp, Homo sapien
caggccctgatttgaaacggctgct

SEQ ID NO: 4193012 - DNA, 25 bp, Homo sapien
ggagtttttggcatcatctgggctg

SEQ ID NO: 4193013 - DNA, 25 bp, Homo sapien
gatttgaaacggctgctgtgcccag

SEQ ID NO: 4193014 - DNA, 25 bp, Homo sapien
caggacaacaatgcgcttgctagcc

SEQ ID NO: 4193015 - DNA, 25 bp, Homo sapien
tgtgtcatgttctggcaaggcgttg

SEQ ID NO: 4193016 - DNA, 25 bp, Homo sapien
acaggacaacaatgcgcttgctagc

SEQ ID NO: 4193017 - DNA, 25 bp, Homo sapien
caaggcgttgtgataagaggtgctt

SEQ ID NO: 4193018 - DNA, 25 bp, Homo sapien
tttcagtcaatagctgccagcatcg

SEQ ID NO: 4193019 - DNA, 25 bp, Homo sapien
aatgacacggatgcttcagtgagac

SEQ ID NO: 4193020 - DNA, 25 bp, Homo sapien
ttggctgacattacaaatgacacgg

SEQ ID NO: 4193021 - DNA, 25 bp, Homo sapien
aaatgagcccatccatcaagagcgc

SEQ ID NO: 4193022 - DNA, 25 bp, Homo sapien
agatctgtcaacaaatctatgctgg

SEQ ID NO: 4193023 - DNA, 25 bp, Homo sapien
ctgggtgtctgttttgcccgtgtct

SEQ ID NO: 4193024 - DNA, 25 bp, Homo sapien
gccagccagccatagatctgtcaac

SEQ ID NO: 4193025 - DNA, 25 bp, Homo sapien
ttaggccatttaacccccatcaagc

SEQ ID NO: 4193026 - DNA, 25 bp, Homo sapien
aggagagtttggcacgcagcaggcc

SEQ ID NO: 4193027 - DNA, 25 bp, Homo sapien
gctaggtgtggtgctaccatgatca

SEQ ID NO: 4193028 - DNA, 25 bp, Homo sapien
gtggtgctaccatgatcagggagat

SEQ ID NO: 4193029 - DNA, 25 bp, Homo sapien
ctagaccttactccagcaacctcag

SEQ ID NO: 4193030 - DNA, 25 bp, Homo sapien
cttgggcaacaaataccttttcatt

SEQ ID NO: 4193031 - DNA, 25 bp, Homo sapien
gtgcttgggcaacaaataccttttc

SEQ ID NO: 4193032 - DNA, 25 bp, Homo sapien
tgtgcttgggcaacaaatacctttt

SEQ ID NO: 4193033 - DNA, 25 bp, Homo sapien
tgcttgggcaacaaataccttttca

SEQ ID NO: 4193034 - DNA, 25 bp, Homo sapien
ggaatcagctaactctttcacacca

SEQ ID NO: 4193035 - DNA, 25 bp, Homo sapien
tggaatcagctaactctttcacacc

SEQ ID NO: 4193036 - DNA, 25 bp, Homo sapien
gctggaatcagctaactctttcaca

SEQ ID NO: 4193037 - DNA, 25 bp, Homo sapien
ccagctggaatcagctaactctttc

SEQ ID NO: 4193038 - DNA, 25 bp, Homo sapien
tgtatttggattgtccatcactctg

SEQ ID NO: 4193039 - DNA, 25 bp, Homo sapien
aaccaactacaagagcccatggcag

SEQ ID NO: 4193040 - DNA, 25 bp, Homo sapien
tggaatgagctttatgtcaccaacc

SEQ ID NO: 4193041 - DNA, 25 bp, Homo sapien
catccctctcattggtaaggaaggg

SEQ ID NO: 4193042 - DNA, 25 bp, Homo sapien
gcagttgaacaagcccctggataaa

SEQ ID NO: 4193043 - DNA, 25 bp, Homo sapien
ggcagaattagatgtgaccggcgtt

SEQ ID NO: 4193044 - DNA, 25 bp, Homo sapien
cttttacactgcagttgaacaagcc

SEQ ID NO: 4193045 - DNA, 25 bp, Homo sapien
gatgtgaccggcgttttattgtgac

SEQ ID NO: 4193046 - DNA, 25 bp, Homo sapien
catcattatcagtcaaggtactggg

SEQ ID NO: 4193047 - DNA, 25 bp, Homo sapien
ttcccagcagggcacaatgtaagac

SEQ ID NO: 4193048 - DNA, 25 bp, Homo sapien
gtaagactcggccatcattatcagt

SEQ ID NO: 4193049 - DNA, 25 bp, Homo sapien
cagggcacaatgtaagactcggcca

SEQ ID NO: 4193050 - DNA, 25 bp, Homo sapien
ctgtagtcccaatcagttgctgctg

SEQ ID NO: 4193051 - DNA, 25 bp, Homo sapien
gtcccaatcagttgctgctgtgaaa

SEQ ID NO: 4193052 - DNA, 25 bp, Homo sapien
tagtcccaatcagttgctgctgtga

SEQ ID NO: 4193053 - DNA, 25 bp, Homo sapien
tgtagtcccaatcagttgctgctgt

SEQ ID NO: 4193054 - DNA, 25 bp, Homo sapien
gaccagtccacagtttccttctgct

SEQ ID NO: 4193055 - DNA, 25 bp, Homo sapien
gggaccagtccacagtttccttctg

SEQ ID NO: 4193056 - DNA, 25 bp, Homo sapien
tctgctccatggtctgtggctgtac

SEQ ID NO: 4193057 - DNA, 25 bp, Homo sapien
tccttctgctccatggtctgtggct

SEQ ID NO: 4193058 - DNA, 25 bp, Homo sapien
tgccttggcacaaatagcaccccag

SEQ ID NO: 4193059 - DNA, 25 bp, Homo sapien
actgccttggcacaaatagcacccc

SEQ ID NO: 4193060 - DNA, 25 bp, Homo sapien
cttggcacaaatagcaccccagctt

SEQ ID NO: 4193061 - DNA, 25 bp, Homo sapien
cactgccttggcacaaatagcaccc

SEQ ID NO: 4193062 - DNA, 25 bp, Homo sapien
gcatacgcacgatttcccagttttg

SEQ ID NO: 4193063 - DNA, 25 bp, Homo sapien
agagatgtggggccttcccaaagtc

SEQ ID NO: 4193064 - DNA, 25 bp, Homo sapien
ctgtgcatacgcacgatttcccagt

SEQ ID NO: 4193065 - DNA, 25 bp, Homo sapien
ctctctctgatatggcccagagatg

SEQ ID NO: 4193066 - DNA, 25 bp, Homo sapien
cccctcattccatggtaagtaagct

SEQ ID NO: 4193067 - DNA, 25 bp, Homo sapien
cattccatggtaagtaagctcttaa

SEQ ID NO: 4193068 - DNA, 25 bp, Homo sapien
catggtaagtaagctcttaactgct

SEQ ID NO: 4193069 - DNA, 25 bp, Homo sapien
ggtaagtaagctcttaactgctgcc

SEQ ID NO: 4193070 - DNA, 25 bp, Homo sapien
ctccttggtagccttggaactgctc

SEQ ID NO: 4193071 - DNA, 25 bp, Homo sapien
tggtagccttggaactgctccaacc

SEQ ID NO: 4193072 - DNA, 25 bp, Homo sapien
tccttggtagccttggaactgctcc

SEQ ID NO: 4193073 - DNA, 25 bp, Homo sapien
cttggtagccttggaactgctccaa

SEQ ID NO: 4193074 - DNA, 25 bp, Homo sapien
agagcataaaccactatttccaaag

SEQ ID NO: 4193075 - DNA, 25 bp, Homo sapien
tctctataagtctcagagcataaac

SEQ ID NO: 4193076 - DNA, 25 bp, Homo sapien
cagtagtagtgagagaatgaagttc

SEQ ID NO: 4193077 - DNA, 25 bp, Homo sapien
aagttcacgtaagtgtttctctata

SEQ ID NO: 4193078 - DNA, 25 bp, Homo sapien
tccatatgaggaacccaagggattt

SEQ ID NO: 4193079 - DNA, 25 bp, Homo sapien
ggatgacagtgattctggccaacgt

SEQ ID NO: 4193080 - DNA, 25 bp, Homo sapien
taaggttcacagttaaggtatactg

SEQ ID NO: 4193081 - DNA, 25 bp, Homo sapien
ttcttcctccacatagtttggcaaa

SEQ ID NO: 4193082 - DNA, 25 bp, Homo sapien
gggaatgaacaatggcatcttcttt

SEQ ID NO: 4193083 - DNA, 25 bp, Homo sapien
tgctggggaatgaacaatggcatct

SEQ ID NO: 4193084 - DNA, 25 bp, Homo sapien
ttcttatgttctactgaggccaggg

SEQ ID NO: 4193085 - DNA, 25 bp, Homo sapien
cagatagttcttatgttctactgag

SEQ ID NO: 4193086 - DNA, 25 bp, Homo sapien
cccagagtaccgcaggactgaatga

SEQ ID NO: 4193087 - DNA, 25 bp, Homo sapien
gatgtgagccggaaaatgccgccta

SEQ ID NO: 4193088 - DNA, 25 bp, Homo sapien
acctgggacgggcaatgtggctcct

SEQ ID NO: 4193089 - DNA, 25 bp, Homo sapien
gataaccattcccaggtctgtgtgc

SEQ ID NO: 4193090 - DNA, 25 bp, Homo sapien
cttgtcctcaatgatggccctgact

SEQ ID NO: 4193091 - DNA, 25 bp, Homo sapien
tcaatgatggccctgactgccaaaa

SEQ ID NO: 4193092 - DNA, 25 bp, Homo sapien
gtcctcaatgatggccctgactgcc

SEQ ID NO: 4193093 - DNA, 25 bp, Homo sapien
tgatggccctgactgccaaaaccct

SEQ ID NO: 4193094 - DNA, 25 bp, Homo sapien
tgtacaaagtgagcaaaacgaccct

SEQ ID NO: 4193095 - DNA, 25 bp, Homo sapien
cttgtgttgggatcgcagttggttg

SEQ ID NO: 4193096 - DNA, 25 bp, Homo sapien
gaatctatgctaagctcattgtaca

SEQ ID NO: 4193097 - DNA, 25 bp, Homo sapien
gacccttctggaccctccctcgaca

SEQ ID NO: 4193098 - DNA, 25 bp, Homo sapien
ggagccatggcttttttgatggatg

SEQ ID NO: 4193099 - DNA, 25 bp, Homo sapien
gagggcttttagcacgtacacactt

SEQ ID NO: 4193100 - DNA, 25 bp, Homo sapien
ctaaactcttgaattggtgagggct

SEQ ID NO: 4193101 - DNA, 25 bp, Homo sapien
agcacgtacacacttttgaaaggag

SEQ ID NO: 4193102 - DNA, 25 bp, Homo sapien
tttgtacttgtctccagtcttatgg

SEQ ID NO: 4193103 - DNA, 25 bp, Homo sapien
tactctccaagatattcttcttcga

SEQ ID NO: 4193104 - DNA, 25 bp, Homo sapien
ggtgttgctggtgaatgccctcctt

SEQ ID NO: 4193105 - DNA, 25 bp, Homo sapien
tcttcttcgatagattattggtgca

SEQ ID NO: 4193106 - DNA, 25 bp, Homo sapien
tcagatctcaaactcgttctgggag

SEQ ID NO: 4193107 - DNA, 25 bp, Homo sapien
ggctagtccctagagaataaatagt

SEQ ID NO: 4193108 - DNA, 25 bp, Homo sapien
agtgacattgttagacttgatagga

SEQ ID NO: 4193109 - DNA, 25 bp, Homo sapien
tttggagagtatgaccattttagca

SEQ ID NO: 4193110 - DNA, 25 bp, Homo sapien
caggtacaccagtcagacatatatt

SEQ ID NO: 4193111 - DNA, 25 bp, Homo sapien
tcaggtacaccagtcagacatatat

SEQ ID NO: 4193112 - DNA, 25 bp, Homo sapien
tttcaggtacaccagtcagacatat

SEQ ID NO: 4193113 - DNA, 25 bp, Homo sapien
ggtacaccagtcagacatatatttg

SEQ ID NO: 4193114 - DNA, 25 bp, Homo sapien
tattttgtgggtttacatgtcttct

SEQ ID NO: 4193115 - DNA, 25 bp, Homo sapien
tatattttgtgggtttacatgtctt

SEQ ID NO: 4193116 - DNA, 25 bp, Homo sapien
tgtatattttgtgggtttacatgtc

SEQ ID NO: 4193117 - DNA, 25 bp, Homo sapien
ctgtatattttgtgggtttacatgt

SEQ ID NO: 4193118 - DNA, 25 bp, Homo sapien
tagcattacggccaaacatggaacc

SEQ ID NO: 4193119 - DNA, 25 bp, Homo sapien
aaccattttctgtggcgaatcgctg

SEQ ID NO: 4193120 - DNA, 25 bp, Homo sapien
cacttccaaatgacatgctctcagt

SEQ ID NO: 4193121 - DNA, 25 bp, Homo sapien
cgaatcgctgagttctacctggtta

SEQ ID NO: 4193122 - DNA, 25 bp, Homo sapien
taaaaaatggtacccagtgtgcatg

SEQ ID NO: 4193123 - DNA, 25 bp, Homo sapien
tgaaccctgtgctgtatgaggactc

SEQ ID NO: 4193124 - DNA, 25 bp, Homo sapien
taatgagcatgtggctggagatctc

SEQ ID NO: 4193125 - DNA, 25 bp, Homo sapien
tgttgtgcagaagctagaggacacg

SEQ ID NO: 4193126 - DNA, 25 bp, Homo sapien
catgaaaattttggcagtctcagcc

SEQ ID NO: 4193127 - DNA, 25 bp, Homo sapien
tatagaagtgagtgctcctgtggtg

SEQ ID NO: 4193128 - DNA, 25 bp, Homo sapien
tagcccctagttttatagaagtgag

SEQ ID NO: 4193129 - DNA, 25 bp, Homo sapien
gcaaggcccccgatattgacaagtt

SEQ ID NO: 4193130 - DNA, 25 bp, Homo sapien
gcagtgttcgtacctgcgtggttat

SEQ ID NO: 4193131 - DNA, 25 bp, Homo sapien
acagataaccatgcaggtatgaacg

SEQ ID NO: 4193132 - DNA, 25 bp, Homo sapien
taaccatgcaggtatgaacgctggg

SEQ ID NO: 4193133 - DNA, 25 bp, Homo sapien
cacacacagataaccatgcaggtat

SEQ ID NO: 4193134 - DNA, 25 bp, Homo sapien
ccacacacagataaccatgcaggta

SEQ ID NO: 4193135 - DNA, 25 bp, Homo sapien
attgaggtcaatgctgaaatagcat

SEQ ID NO: 4193136 - DNA, 25 bp, Homo sapien
gaggtcaatgctgaaatagcatgat

SEQ ID NO: 4193137 - DNA, 25 bp, Homo sapien
tgaaatagcatgatttagatcttgt

SEQ ID NO: 4193138 - DNA, 25 bp, Homo sapien
gctgaaatagcatgatttagatctt

SEQ ID NO: 4193139 - DNA, 25 bp, Homo sapien
aatatcgtgaaaatggccatactgc

SEQ ID NO: 4193140 - DNA, 25 bp, Homo sapien
tggaagaacatttcatgctcatggg

SEQ ID NO: 4193141 - DNA, 25 bp, Homo sapien
aggaagaatcaatatcgtgaaaatg

SEQ ID NO: 4193142 - DNA, 25 bp, Homo sapien
ggaagaacatttcatgctcatgggt

SEQ ID NO: 4193143 - DNA, 25 bp, Homo sapien
cattctgcggtataataaggcttca

SEQ ID NO: 4193144 - DNA, 25 bp, Homo sapien
gcatttccattaaagccgcgcggac

SEQ ID NO: 4193145 - DNA, 25 bp, Homo sapien
gggaaaataacaccacgctcacaag

SEQ ID NO: 4193146 - DNA, 25 bp, Homo sapien
cgaggtcggacacccagatggattt

SEQ ID NO: 4193147 - DNA, 25 bp, Homo sapien
gttctgcaatcacaaacaagtcttc

SEQ ID NO: 4193148 - DNA, 25 bp, Homo sapien
tcaaggttgctgatgtttgcatttt

SEQ ID NO: 4193149 - DNA, 25 bp, Homo sapien
tcacaaacaagtcttctgtgctttg

SEQ ID NO: 4193150 - DNA, 25 bp, Homo sapien
tgtcaaggttgctgatgtttgcatt

SEQ ID NO: 4193151 - DNA, 25 bp, Homo sapien
cctaagcccagagaaaaagttggag

SEQ ID NO: 4193152 - DNA, 25 bp, Homo sapien
agagaaaaagttggagccaggcaga

SEQ ID NO: 4193153 - DNA, 25 bp, Homo sapien
aagcccagagaaaaagttggagcca

SEQ ID NO: 4193154 - DNA, 25 bp, Homo sapien
gcccagagaaaaagttggagccagg

SEQ ID NO: 4193155 - DNA, 25 bp, Homo sapien
gctccttttgcagtgtctctgaatg

SEQ ID NO: 4193156 - DNA, 25 bp, Homo sapien
tgctccttttgcagtgtctctgaat

SEQ ID NO: 4193157 - DNA, 25 bp, Homo sapien
ctgctccttttgcagtgtctctgaa

SEQ ID NO: 4193158 - DNA, 25 bp, Homo sapien
ttagatgcatttatctgaattgatg

SEQ ID NO: 4193159 - DNA, 25 bp, Homo sapien
atctgaattgatgttcttagaattg

SEQ ID NO: 4193160 - DNA, 25 bp, Homo sapien
gttcttagaattgaacataagaata

SEQ ID NO: 4193161 - DNA, 25 bp, Homo sapien
atttttcaaagagtatttgatcttc

SEQ ID NO: 4193162 - DNA, 25 bp, Homo sapien
ctccccagcaactaagtgctgccca

SEQ ID NO: 4193163 - DNA, 25 bp, Homo sapien
ctaagtgctgcccactaatatcatg

SEQ ID NO: 4193164 - DNA, 25 bp, Homo sapien
caactaagtgctgcccactaatatc

SEQ ID NO: 4193165 - DNA, 25 bp, Homo sapien
agtgctgcccactaatatcatgttc

SEQ ID NO: 4193166 - DNA, 25 bp, Homo sapien
ggaattacactgaatgaccgcagta

SEQ ID NO: 4193167 - DNA, 25 bp, Homo sapien
caaaatagatcctggtgtagaagag

SEQ ID NO: 4193168 - DNA, 25 bp, Homo sapien
aacaaaatagatcctggtgtagaag

SEQ ID NO: 4193169 - DNA, 25 bp, Homo sapien
tgaatgaccgcagtataataaacaa

SEQ ID NO: 4193170 - DNA, 25 bp, Homo sapien
catggatcaaccaatagaaataagg

SEQ ID NO: 4193171 - DNA, 25 bp, Homo sapien
tggatcaaccaatagaaataaggac

SEQ ID NO: 4193172 - DNA, 25 bp, Homo sapien
gatcaaccaatagaaataaggacat

SEQ ID NO: 4193173 - DNA, 25 bp, Homo sapien
tgcatggatcaaccaatagaaataa

SEQ ID NO: 4193174 - DNA, 25 bp, Homo sapien
cggaggctataaatggcacatgcac

SEQ ID NO: 4193175 - DNA, 25 bp, Homo sapien
ttattccggaggctataaatggcac

SEQ ID NO: 4193176 - DNA, 25 bp, Homo sapien
cttttattccggaggctataaatgg

SEQ ID NO: 4193177 - DNA, 25 bp, Homo sapien
tattcatagcctcctttgcatttag

SEQ ID NO: 4193178 - DNA, 25 bp, Homo sapien
tgactctgacaactatgagagtcgc

SEQ ID NO: 4193179 - DNA, 25 bp, Homo sapien
tgaatgactctgacaactatgagag

SEQ ID NO: 4193180 - DNA, 25 bp, Homo sapien
tctgacaactatgagagtcgctggg

SEQ ID NO: 4193181 - DNA, 25 bp, Homo sapien
caactgaatgactctgacaactatg

SEQ ID NO: 4193182 - DNA, 25 bp, Homo sapien
actgtgtagatccttgagagctgga

SEQ ID NO: 4193183 - DNA, 25 bp, Homo sapien
tctttcacgaaaatatgaatgggtt

SEQ ID NO: 4193184 - DNA, 25 bp, Homo sapien
tggaacctaagtgtagtaggaggca

SEQ ID NO: 4193185 - DNA, 25 bp, Homo sapien
cacgtgtgaacttggatggaaccta

SEQ ID NO: 4193186 - DNA, 25 bp, Homo sapien
ctgccaagtggagttctacttccct

SEQ ID NO: 4193187 - DNA, 25 bp, Homo sapien
ccacttcctgccaagtggagttcta

SEQ ID NO: 4193188 - DNA, 25 bp, Homo sapien
atttaggcatcttgaatatctcagc

SEQ ID NO: 4193189 - DNA, 25 bp, Homo sapien
gagaaactgcgtccacatttaggca

SEQ ID NO: 4193190 - DNA, 25 bp, Homo sapien
ctgagagcagcgtgggcttcagctc

SEQ ID NO: 4193191 - DNA, 25 bp, Homo sapien
agagcagcgtgggcttcagctcgca

SEQ ID NO: 4193192 - DNA, 25 bp, Homo sapien
gagcagcgtgggcttcagctcgcag

SEQ ID NO: 4193193 - DNA, 25 bp, Homo sapien
tgagagcagcgtgggcttcagctcg

SEQ ID NO: 4193194 - DNA, 25 bp, Homo sapien
tgggcagaggtcactactccaaggc

SEQ ID NO: 4193195 - DNA, 25 bp, Homo sapien
agaagagtcacctgcgtccagaggg

SEQ ID NO: 4193196 - DNA, 25 bp, Homo sapien
ggctatgcctctcgagctccaatgg

SEQ ID NO: 4193197 - DNA, 25 bp, Homo sapien
gaagattttggtgagcgaagtcgca

SEQ ID NO: 4193198 - DNA, 25 bp, Homo sapien
aggtgcctctactgcgctgcgctgt

SEQ ID NO: 4193199 - DNA, 25 bp, Homo sapien
gctgtgcctccctgacgggtctaaa

SEQ ID NO: 4193200 - DNA, 25 bp, Homo sapien
ctaaaccaccgggtagcacgtcctg

SEQ ID NO: 4193201 - DNA, 25 bp, Homo sapien
acactctttagagctgtggcgggag

SEQ ID NO: 4193202 - DNA, 25 bp, Homo sapien
gccgggactgcacgcactctgacat

SEQ ID NO: 4193203 - DNA, 25 bp, Homo sapien
caaaagcggcgaagttcaaaggcga

SEQ ID NO: 4193204 - DNA, 25 bp, Homo sapien
aggctggtgaacgagagccaaaagc

SEQ ID NO: 4193205 - DNA, 25 bp, Homo sapien
tcttgcgtttccagtcgtggctccc

SEQ ID NO: 4193206 - DNA, 25 bp, Homo sapien
ggctgggacccaagtatcggagtct

SEQ ID NO: 4193207 - DNA, 25 bp, Homo sapien
tctccgggattaagtggccaggtaa

SEQ ID NO: 4193208 - DNA, 25 bp, Homo sapien
gttcagctgatcatgccagtcccag

SEQ ID NO: 4193209 - DNA, 25 bp, Homo sapien
agagaagcgctgaccccacaaagtt

SEQ ID NO: 4193210 - DNA, 25 bp, Homo sapien
taggtgggtgggggtagggagtgca

SEQ ID NO: 4193211 - DNA, 25 bp, Homo sapien
tctggatggcgctcgagctaaactg

SEQ ID NO: 4193212 - DNA, 25 bp, Homo sapien
caggcggtacagttacagggcacca

SEQ ID NO: 4193213 - DNA, 25 bp, Homo sapien
cacctaggcgtttgctgatctccga

SEQ ID NO: 4193214 - DNA, 25 bp, Homo sapien
agaagcttccattcggcacctaggc

SEQ ID NO: 4193215 - DNA, 25 bp, Homo sapien
cctgggaagaggatgtaggcgacgg

SEQ ID NO: 4193216 - DNA, 25 bp, Homo sapien
tggccgtagcgtgggctgacgaata

SEQ ID NO: 4193217 - DNA, 25 bp, Homo sapien
ccagtcttggtcatgcctgggaaga

SEQ ID NO: 4193218 - DNA, 25 bp, Homo sapien
gaataagggtctatgccagtcttgg

SEQ ID NO: 4193219 - DNA, 25 bp, Homo sapien
ggtggtgtaagggacagcggcaggg

SEQ ID NO: 4193220 - DNA, 25 bp, Homo sapien
gtgcagacccggctttcagaccacg

SEQ ID NO: 4193221 - DNA, 25 bp, Homo sapien
aaagtctgggtggtgtaagggacag

SEQ ID NO: 4193222 - DNA, 25 bp, Homo sapien
accccggaggcgtctgcaggccggg

SEQ ID NO: 4193223 - DNA, 25 bp, Homo sapien
gcagctgtgtagctgacataacgtt

SEQ ID NO: 4193224 - DNA, 25 bp, Homo sapien
cggtacctgtctgcgccttgggtcc

SEQ ID NO: 4193225 - DNA, 25 bp, Homo sapien
tgacataacgtttgcaagtttccgg

SEQ ID NO: 4193226 - DNA, 25 bp, Homo sapien
tgcaagtttccggtacctgtctgcg

SEQ ID NO: 4193227 - DNA, 25 bp, Homo sapien
taaacttagatctctagaagcactg

SEQ ID NO: 4193228 - DNA, 25 bp, Homo sapien
tgaacagagcaacgaggtaaaatcc

SEQ ID NO: 4193229 - DNA, 25 bp, Homo sapien
gagtccaaagcctatccgaggagag

SEQ ID NO: 4193230 - DNA, 25 bp, Homo sapien
tacttcctgacttcataacccgaca

SEQ ID NO: 4193231 - DNA, 25 bp, Homo sapien
gcaccgaaagcgctgatcgtgtatg

SEQ ID NO: 4193232 - DNA, 25 bp, Homo sapien
ggttgtctggcgagagtttttctga

SEQ ID NO: 4193233 - DNA, 25 bp, Homo sapien
ctcaaacttagtgcggcgggtggcc

SEQ ID NO: 4193234 - DNA, 25 bp, Homo sapien
aagtttctttccatcctcgcaccga

SEQ ID NO: 4193235 - DNA, 25 bp, Homo sapien
gaatccggaatgtgaacttctcccg

SEQ ID NO: 4193236 - DNA, 25 bp, Homo sapien
gggcgtccagaaatcccgcagggat

SEQ ID NO: 4193237 - DNA, 25 bp, Homo sapien
ccgacatatgtttcccgcagataag

SEQ ID NO: 4193238 - DNA, 25 bp, Homo sapien
tgtgcaaatcccattgactcgccgc

SEQ ID NO: 4193239 - DNA, 25 bp, Homo sapien
ataatttacagcggcagataaggct

SEQ ID NO: 4193240 - DNA, 25 bp, Homo sapien
tcataatttacagcggcagataagg

SEQ ID NO: 4193241 - DNA, 25 bp, Homo sapien
cagataaggctagagggtgtaataa

SEQ ID NO: 4193242 - DNA, 25 bp, Homo sapien
atttacagcggcagataaggctaga

SEQ ID NO: 4193243 - DNA, 25 bp, Homo sapien
ggctcacaataagcggtctcaagcg

SEQ ID NO: 4193244 - DNA, 25 bp, Homo sapien
ggcggttgccttccgtgcaggattt

SEQ ID NO: 4193245 - DNA, 25 bp, Homo sapien
gcaggatttccgttgagggctcaca

SEQ ID NO: 4193246 - DNA, 25 bp, Homo sapien
ctgtcccaagaccaatgtaagcgct

SEQ ID NO: 4193247 - DNA, 25 bp, Homo sapien
gaaagatgggattcggtccccgcta

SEQ ID NO: 4193248 - DNA, 25 bp, Homo sapien
tcagcctgaaaggagtcttcgagag

SEQ ID NO: 4193249 - DNA, 25 bp, Homo sapien
gaaccctgtgattccgcttattgac

SEQ ID NO: 4193250 - DNA, 25 bp, Homo sapien
taaatgacctgagctggtggcttgg

SEQ ID NO: 4193251 - DNA, 25 bp, Homo sapien
tagattcaattacagatagacccag

SEQ ID NO: 4193252 - DNA, 25 bp, Homo sapien
taaatgaaattgcaagacccttgtc

SEQ ID NO: 4193253 - DNA, 25 bp, Homo sapien
tgccttagaatagtgacctagattc

SEQ ID NO: 4193254 - DNA, 25 bp, Homo sapien
tcagcctgatgtaggaaagtggaaa

SEQ ID NO: 4193255 - DNA, 25 bp, Homo sapien
caatgataactcagagcaaatgaag

SEQ ID NO: 4193256 - DNA, 25 bp, Homo sapien
aatgataactcagagcaaatgaagc

SEQ ID NO: 4193257 - DNA, 25 bp, Homo sapien
ttctcaatgataactcagagcaaat

SEQ ID NO: 4193258 - DNA, 25 bp, Homo sapien
ctcaatgataactcagagcaaatga

SEQ ID NO: 4193259 - DNA, 25 bp, Homo sapien
ctgttgcagagagacactaatcatg

SEQ ID NO: 4193260 - DNA, 25 bp, Homo sapien
tcatgagacaaggattcatattttc

SEQ ID NO: 4193261 - DNA, 25 bp, Homo sapien
ttgcagagagacactaatcatgaga

SEQ ID NO: 4193262 - DNA, 25 bp, Homo sapien
actaatcatgagacaaggattcata

SEQ ID NO: 4193263 - DNA, 25 bp, Homo sapien
ggtgggaggtcaagaggatgtcctc

SEQ ID NO: 4193264 - DNA, 25 bp, Homo sapien
gcttgagaagaggccacctgcagaa

SEQ ID NO: 4193265 - DNA, 25 bp, Homo sapien
ctagagcataaggaagataacctaa

SEQ ID NO: 4193266 - DNA, 25 bp, Homo sapien
ctgtggaatgtcctctaagagctga

SEQ ID NO: 4193267 - DNA, 25 bp, Homo sapien
ccaggttgtctcataaaagaatgag

SEQ ID NO: 4193268 - DNA, 25 bp, Homo sapien
ctctcaagggtttgatgatttcaga

SEQ ID NO: 4193269 - DNA, 25 bp, Homo sapien
tctctcaagggtttgatgatttcag

SEQ ID NO: 4193270 - DNA, 25 bp, Homo sapien
ttccaggttgtctcataaaagaatg

SEQ ID NO: 4193271 - DNA, 25 bp, Homo sapien
catctaataaaccatgtggctccct

SEQ ID NO: 4193272 - DNA, 25 bp, Homo sapien
cagaatgctcaattaataaccatct

SEQ ID NO: 4193273 - DNA, 25 bp, Homo sapien
taaccatctaataaaccatgtggct

SEQ ID NO: 4193274 - DNA, 25 bp, Homo sapien
aaacttctttgcacagaatgctcaa

SEQ ID NO: 4193275 - DNA, 25 bp, Homo sapien
aattatcaaatcttgctcacaggtc

SEQ ID NO: 4193276 - DNA, 25 bp, Homo sapien
gacttgttagggatcatctgtattc

SEQ ID NO: 4193277 - DNA, 25 bp, Homo sapien
ttagttctccaagaactcactcttc

SEQ ID NO: 4193278 - DNA, 25 bp, Homo sapien
tttcatgtgacttgttagggatcat

SEQ ID NO: 4193279 - DNA, 25 bp, Homo sapien
gaaaacaggagtccgagctgctgaa

SEQ ID NO: 4193280 - DNA, 25 bp, Homo sapien
gcttgaatgcaactagcacatcctg

SEQ ID NO: 4193281 - DNA, 25 bp, Homo sapien
tacgtagcctatggttatacaggga

SEQ ID NO: 4193282 - DNA, 25 bp, Homo sapien
agcgggcaactaacagaggctgaga

SEQ ID NO: 4193283 - DNA, 25 bp, Homo sapien
agttctcaaccctcagctaccagtg

SEQ ID NO: 4193284 - DNA, 25 bp, Homo sapien
gcaccaggtgacatactgaagaggg

SEQ ID NO: 4193285 - DNA, 25 bp, Homo sapien
tgcagaacagttctaaggcctcaaa

SEQ ID NO: 4193286 - DNA, 25 bp, Homo sapien
tcaaaaatttcctggtgtgacccat

SEQ ID NO: 4193287 - DNA, 25 bp, Homo sapien
tttgtaaatgggatgtttgtgactc

SEQ ID NO: 4193288 - DNA, 25 bp, Homo sapien
tgtaaatgggatgtttgtgactcag

SEQ ID NO: 4193289 - DNA, 25 bp, Homo sapien
gtaaatgggatgtttgtgactcaga

SEQ ID NO: 4193290 - DNA, 25 bp, Homo sapien
agtttgtaaatgggatgtttgtgac

SEQ ID NO: 4193291 - DNA, 25 bp, Homo sapien
tccagggactattaccagcactgtg

SEQ ID NO: 4193292 - DNA, 25 bp, Homo sapien
tagcagccaaattcccagtaacgag

SEQ ID NO: 4193293 - DNA, 25 bp, Homo sapien
gtgttgctcttaagagggccaggcc

SEQ ID NO: 4193294 - DNA, 25 bp, Homo sapien
gggccaggcctcaaatagcagccaa

SEQ ID NO: 4193295 - DNA, 25 bp, Homo sapien
tactattactactttggatgattag

SEQ ID NO: 4193296 - DNA, 25 bp, Homo sapien
ctattactactttggatgattagag

SEQ ID NO: 4193297 - DNA, 25 bp, Homo sapien
tattactactttggatgattagagt

SEQ ID NO: 4193298 - DNA, 25 bp, Homo sapien
tactactttggatgattagagtatt

SEQ ID NO: 4193299 - DNA, 25 bp, Homo sapien
caggattgaagagggttgcacaggg

SEQ ID NO: 4193300 - DNA, 25 bp, Homo sapien
agcattttacatgcccacacgacgg

SEQ ID NO: 4193301 - DNA, 25 bp, Homo sapien
cgttttgaatactggtgaaaagcca

SEQ ID NO: 4193302 - DNA, 25 bp, Homo sapien
agtattgccccaggatgttaatgca

SEQ ID NO: 4193303 - DNA, 25 bp, Homo sapien
catttgtgcctgtagttgggaaaat

SEQ ID NO: 4193304 - DNA, 25 bp, Homo sapien
gttgggaaaatgcaacttcactttg

SEQ ID NO: 4193305 - DNA, 25 bp, Homo sapien
tcatttgtgcctgtagttgggaaaa

SEQ ID NO: 4193306 - DNA, 25 bp, Homo sapien
agttgggaaaatgcaacttcacttt

SEQ ID NO: 4193307 - DNA, 25 bp, Homo sapien
ctggaaatacgtaaagtcccgtcag

SEQ ID NO: 4193308 - DNA, 25 bp, Homo sapien
ttccagtaattcatcccctaatgtg

SEQ ID NO: 4193309 - DNA, 25 bp, Homo sapien
cagtgcatccatcccattccagtaa

SEQ ID NO: 4193310 - DNA, 25 bp, Homo sapien
caggctgcacccactcagaaatttg

SEQ ID NO: 4193311 - DNA, 25 bp, Homo sapien
ccctaatgtgatctgaagtctagaa

SEQ ID NO: 4193312 - DNA, 25 bp, Homo sapien
taaaaccagcattagaattgcacat

SEQ ID NO: 4193313 - DNA, 25 bp, Homo sapien
aaagcacttatgctgctaaaaccag

SEQ ID NO: 4193314 - DNA, 25 bp, Homo sapien
tggagtccaagtgggactctacgaa

SEQ ID NO: 4193315 - DNA, 25 bp, Homo sapien
tcatactctcaatgggactctggag

SEQ ID NO: 4193316 - DNA, 25 bp, Homo sapien
cgaacgtgtcaaggcatgggagact

SEQ ID NO: 4193317 - DNA, 25 bp, Homo sapien
agtgatttggatgagcgaacgtgtc

SEQ ID NO: 4193318 - DNA, 25 bp, Homo sapien
gatcctgcatgatggtgtcacagtg

SEQ ID NO: 4193319 - DNA, 25 bp, Homo sapien
gcgtttttgctttccacagacggaa

SEQ ID NO: 4193320 - DNA, 25 bp, Homo sapien
gatgtttaggtttagggagcgacat

SEQ ID NO: 4193321 - DNA, 25 bp, Homo sapien
ttgatgtttaggtttagggagcgac

SEQ ID NO: 4193322 - DNA, 25 bp, Homo sapien
ggtgaagcaaggaggttgatgttta

SEQ ID NO: 4193323 - DNA, 25 bp, Homo sapien
gcaaggaggttgatgtttaggttta

SEQ ID NO: 4193324 - DNA, 25 bp, Homo sapien
tataggtgaccaggagttccttaga

SEQ ID NO: 4193325 - DNA, 25 bp, Homo sapien
ggtgaccaggagttccttagatttg

SEQ ID NO: 4193326 - DNA, 25 bp, Homo sapien
ggtataggtgaccaggagttcctta

SEQ ID NO: 4193327 - DNA, 25 bp, Homo sapien
accaggagttccttagatttgaata

SEQ ID NO: 4193328 - DNA, 25 bp, Homo sapien
ggaacttgtagtcgcctactttgca

SEQ ID NO: 4193329 - DNA, 25 bp, Homo sapien
tatggaaaccgctgtcactattgca

SEQ ID NO: 4193330 - DNA, 25 bp, Homo sapien
aggaacttgtagtcgcctactttgc

SEQ ID NO: 4193331 - DNA, 25 bp, Homo sapien
actgcctcagctatggaaaccgctg

SEQ ID NO: 4193332 - DNA, 25 bp, Homo sapien
ttctcaggaggatgcacctctgctt

SEQ ID NO: 4193333 - DNA, 25 bp, Homo sapien
taatttgatctgaccactggtggtg

SEQ ID NO: 4193334 - DNA, 25 bp, Homo sapien
tgcaaatcagagcacctggtttctc

SEQ ID NO: 4193335 - DNA, 25 bp, Homo sapien
aagttctccctgtctagagttgcaa

SEQ ID NO: 4193336 - DNA, 25 bp, Homo sapien
aattccttttgaagggacgttgatg

SEQ ID NO: 4193337 - DNA, 25 bp, Homo sapien
tgatgaattcttcaaacatattaag

SEQ ID NO: 4193338 - DNA, 25 bp, Homo sapien
aattaaatatcacactagcttttgg

SEQ ID NO: 4193339 - DNA, 25 bp, Homo sapien
ttgaagggacgttgatgaattcttc

SEQ ID NO: 4193340 - DNA, 25 bp, Homo sapien
tcagagccataacgcgatttgaggt

SEQ ID NO: 4193341 - DNA, 25 bp, Homo sapien
gcatgtgccttctgcctatctgaaa

SEQ ID NO: 4193342 - DNA, 25 bp, Homo sapien
gatttgaggtgaaataccggctgcc

SEQ ID NO: 4193343 - DNA, 25 bp, Homo sapien
cctggtgaaagcagtcttgggaagc

SEQ ID NO: 4193344 - DNA, 25 bp, Homo sapien
gcacagagggacacgttcccaggta

SEQ ID NO: 4193345 - DNA, 25 bp, Homo sapien
aaagcctcgcctaagcggaggcaca

SEQ ID NO: 4193346 - DNA, 25 bp, Homo sapien
gactcaaattgaggtgtcccagggc

SEQ ID NO: 4193347 - DNA, 25 bp, Homo sapien
ttccccactggtcggagaaagcctc

SEQ ID NO: 4193348 - DNA, 25 bp, Homo sapien
agactccagcctgtgctgcagtctt

SEQ ID NO: 4193349 - DNA, 25 bp, Homo sapien
gactccagcctgtgctgcagtcttc

SEQ ID NO: 4193350 - DNA, 25 bp, Homo sapien
tctgccacctggttcctccagactc

SEQ ID NO: 4193351 - DNA, 25 bp, Homo sapien
ctagctctgccacctggttcctcca

SEQ ID NO: 4193352 - DNA, 25 bp, Homo sapien
gatccaagtcgaaaatctttcttct

SEQ ID NO: 4193353 - DNA, 25 bp, Homo sapien
cactctctctgcagcgacctggtcc

SEQ ID NO: 4193354 - DNA, 25 bp, Homo sapien
tgcatttagatccaagtcgaaaatc

SEQ ID NO: 4193355 - DNA, 25 bp, Homo sapien
cgacctggtcccctgctgcatttag

SEQ ID NO: 4193356 - DNA, 25 bp, Homo sapien
aataactgtcagtcttaggttccaa

SEQ ID NO: 4193357 - DNA, 25 bp, Homo sapien
aactccggggtaggattgaagcttg

SEQ ID NO: 4193358 - DNA, 25 bp, Homo sapien
tcagtaagggcttagctgcagagag

SEQ ID NO: 4193359 - DNA, 25 bp, Homo sapien
caagaggctgagatccatagaaagg

SEQ ID NO: 4193360 - DNA, 25 bp, Homo sapien
acccacacaagagtaggtggtgcca

SEQ ID NO: 4193361 - DNA, 25 bp, Homo sapien
actgcaggtcccttcgacatggttg

SEQ ID NO: 4193362 - DNA, 25 bp, Homo sapien
aataccaactgcaggtcccttcgac

SEQ ID NO: 4193363 - DNA, 25 bp, Homo sapien
accaactgcaggtcccttcgacatg

SEQ ID NO: 4193364 - DNA, 25 bp, Homo sapien
gagtggttccgtttccctgatcatt

SEQ ID NO: 4193365 - DNA, 25 bp, Homo sapien
ccctgatcattggcaattatctcta

SEQ ID NO: 4193366 - DNA, 25 bp, Homo sapien
cctgatcattggcaattatctctac

SEQ ID NO: 4193367 - DNA, 25 bp, Homo sapien
ttggagtggttccgtttccctgatc

SEQ ID NO: 4193368 - DNA, 25 bp, Homo sapien
gggtcaatcattcagtgtccgtaaa

SEQ ID NO: 4193369 - DNA, 25 bp, Homo sapien
ctttgtggcatgacgggtcaatcat

SEQ ID NO: 4193370 - DNA, 25 bp, Homo sapien
gtggcatgacgggtcaatcattcag

SEQ ID NO: 4193371 - DNA, 25 bp, Homo sapien
tgacgggtcaatcattcagtgtccg

SEQ ID NO: 4193372 - DNA, 25 bp, Homo sapien
ggattgacacattgaaagtgtcatc

SEQ ID NO: 4193373 - DNA, 25 bp, Homo sapien
tgaggattgacacattgaaagtgtc

SEQ ID NO: 4193374 - DNA, 25 bp, Homo sapien
tttggcatcaaaaacgtttggcgtg

SEQ ID NO: 4193375 - DNA, 25 bp, Homo sapien
catcaaaaacgtttggcgtgttggt

SEQ ID NO: 4193376 - DNA, 25 bp, Homo sapien
tgggtgtctccggctctagatttga

SEQ ID NO: 4193377 - DNA, 25 bp, Homo sapien
gtgggtgtctccggctctagatttg

SEQ ID NO: 4193378 - DNA, 25 bp, Homo sapien
aagtgggtgtctccggctctagatt

SEQ ID NO: 4193379 - DNA, 25 bp, Homo sapien
gggtgtctccggctctagatttgac

SEQ ID NO: 4193380 - DNA, 25 bp, Homo sapien
cattcggtagtcaaaatcttctcca

SEQ ID NO: 4193381 - DNA, 25 bp, Homo sapien
tcggtagtcaaaatcttctccacac

SEQ ID NO: 4193382 - DNA, 25 bp, Homo sapien
ttcggtagtcaaaatcttctccaca

SEQ ID NO: 4193383 - DNA, 25 bp, Homo sapien
attcggtagtcaaaatcttctccac

SEQ ID NO: 4193384 - DNA, 25 bp, Homo sapien
gtagaagttgattccttcataaaga

SEQ ID NO: 4193385 - DNA, 25 bp, Homo sapien
caatcaggacaatgtcatgaatctg

SEQ ID NO: 4193386 - DNA, 25 bp, Homo sapien
gaatcgatctcaatactggccaggg

SEQ ID NO: 4193387 - DNA, 25 bp, Homo sapien
cttttcttcaaatcgggcatgggta

SEQ ID NO: 4193388 - DNA, 25 bp, Homo sapien
cttcaatacgaagggaaagaagagt

SEQ ID NO: 4193389 - DNA, 25 bp, Homo sapien
tagtattgcgcttgatgaggacggt

SEQ ID NO: 4193390 - DNA, 25 bp, Homo sapien
gctgcaccataagcgatggcttcat

SEQ ID NO: 4193391 - DNA, 25 bp, Homo sapien
tcagcagcttcaatacgaagggaaa

SEQ ID NO: 4193392 - DNA, 25 bp, Homo sapien
aaacttgccaaacagttgttatcct

SEQ ID NO: 4193393 - DNA, 25 bp, Homo sapien
gagacattgaggatgacattggcat

SEQ ID NO: 4193394 - DNA, 25 bp, Homo sapien
cagagacattgaggatgacattggc

SEQ ID NO: 4193395 - DNA, 25 bp, Homo sapien
agcagagacattgaggatgacattg

SEQ ID NO: 4193396 - DNA, 25 bp, Homo sapien
cattgaggatgacattggcatcaat

SEQ ID NO: 4193397 - DNA, 25 bp, Homo sapien
agcttcctgggccatacgttcaatg

SEQ ID NO: 4193398 - DNA, 25 bp, Homo sapien
tcaaacggcgcttgtcattagtgat

SEQ ID NO: 4193399 - DNA, 25 bp, Homo sapien
gctcaaacggcgcttgtcattagtg

SEQ ID NO: 4193400 - DNA, 25 bp, Homo sapien
tgggccatacgttcaatgtcttcct

SEQ ID NO: 4193401 - DNA, 25 bp, Homo sapien
tttgtcatcatcgttaatcttgccc

SEQ ID NO: 4193402 - DNA, 25 bp, Homo sapien
catcatcgttaatcttgccctgaag

SEQ ID NO: 4193403 - DNA, 25 bp, Homo sapien
tgtcatcatcgttaatcttgccctg

SEQ ID NO: 4193404 - DNA, 25 bp, Homo sapien
tcatcatcgttaatcttgccctgaa

SEQ ID NO: 4193405 - DNA, 25 bp, Homo sapien
tctcagcagcttgattcttatcgag

SEQ ID NO: 4193406 - DNA, 25 bp, Homo sapien
cagcctcttcaatagtaggccctga

SEQ ID NO: 4193407 - DNA, 25 bp, Homo sapien
gctacaaattttggtccttcaatgt

SEQ ID NO: 4193408 - DNA, 25 bp, Homo sapien
tactatagcagctgaacttaactgc

SEQ ID NO: 4193409 - DNA, 25 bp, Homo sapien
taaatgtgtggaacaatgttacgtc

SEQ ID NO: 4193410 - DNA, 25 bp, Homo sapien
tttatttccttcacctgtgcgtatg

SEQ ID NO: 4193411 - DNA, 25 bp, Homo sapien
tgaaatatgtcccttgtaggaactg

SEQ ID NO: 4193412 - DNA, 25 bp, Homo sapien
acactgaaatatgtcccttgtagga

SEQ ID NO: 4193413 - DNA, 25 bp, Homo sapien
actgaaatatgtcccttgtaggaac

SEQ ID NO: 4193414 - DNA, 25 bp, Homo sapien
gaaatatgtcccttgtaggaactgc

SEQ ID NO: 4193415 - DNA, 25 bp, Homo sapien
ggctcattaatatcaagtggatgac

SEQ ID NO: 4193416 - DNA, 25 bp, Homo sapien
cgaaatttagcatctatacacccat

SEQ ID NO: 4193417 - DNA, 25 bp, Homo sapien
gattgattttgtcaaagggcaatag

SEQ ID NO: 4193418 - DNA, 25 bp, Homo sapien
taatggtttgtctagtgtaagagac

SEQ ID NO: 4193419 - DNA, 25 bp, Homo sapien
gaccccgaatgctggaggtctgcat

SEQ ID NO: 4193420 - DNA, 25 bp, Homo sapien
ctcttaggctagtcttctgggctgc

SEQ ID NO: 4193421 - DNA, 25 bp, Homo sapien
catgctttcatggtgcagtataata

SEQ ID NO: 4193422 - DNA, 25 bp, Homo sapien
ttctaggaacatgggcacaatgggc

SEQ ID NO: 4193423 - DNA, 25 bp, Homo sapien
gtggatgcatgaaacacattgtatt

SEQ ID NO: 4193424 - DNA, 25 bp, Homo sapien
tggatgcatgaaacacattgtattt

SEQ ID NO: 4193425 - DNA, 25 bp, Homo sapien
gatgcatgaaacacattgtatttct

SEQ ID NO: 4193426 - DNA, 25 bp, Homo sapien
ggatgcatgaaacacattgtatttc

SEQ ID NO: 4193427 - DNA, 25 bp, Homo sapien
cttggccgcgggtagtgacttcagc

SEQ ID NO: 4193428 - DNA, 25 bp, Homo sapien
tcactgtaaaacctgaagattatgc

SEQ ID NO: 4193429 - DNA, 25 bp, Homo sapien
tgctgcttctctcctaaaagggtgg

SEQ ID NO: 4193430 - DNA, 25 bp, Homo sapien
ttagatgacaaatccaacacatcag

SEQ ID NO: 4193431 - DNA, 25 bp, Homo sapien
tgcttgcagcaggatgggtgacctc

SEQ ID NO: 4193432 - DNA, 25 bp, Homo sapien
gactggcactcaagttctgaactct

SEQ ID NO: 4193433 - DNA, 25 bp, Homo sapien
gacctgggtgtcctcatagaccttc

SEQ ID NO: 4193434 - DNA, 25 bp, Homo sapien
tggcctcagtttacagtgctcactc

SEQ ID NO: 4193435 - DNA, 25 bp, Homo sapien
aggcagattcgaggggactgaatta

SEQ ID NO: 4193436 - DNA, 25 bp, Homo sapien
gctcttatatactgtagtccaagtg

SEQ ID NO: 4193437 - DNA, 25 bp, Homo sapien
tagcatgtttgtagctcttatatac

SEQ ID NO: 4193438 - DNA, 25 bp, Homo sapien
actgaattagcatgtttgtagctct

SEQ ID NO: 4193439 - DNA, 25 bp, Homo sapien
tagattgaattatttatgggttcat

SEQ ID NO: 4193440 - DNA, 25 bp, Homo sapien
tgtacacatgtgaggaggcttcagg

SEQ ID NO: 4193441 - DNA, 25 bp, Homo sapien
tatttatgggttcatttggtgcttt

SEQ ID NO: 4193442 - DNA, 25 bp, Homo sapien
gtcattagatgtacacatgtgagga

SEQ ID NO: 4193443 - DNA, 25 bp, Homo sapien
cattcattcacaggcgcaaggtcta

SEQ ID NO: 4193444 - DNA, 25 bp, Homo sapien
aacagcactaatagcccttgcctga

SEQ ID NO: 4193445 - DNA, 25 bp, Homo sapien
ttcacaggcgcaaggtctaaattgc

SEQ ID NO: 4193446 - DNA, 25 bp, Homo sapien
cactaatagcccttgcctgaattaa

SEQ ID NO: 4193447 - DNA, 25 bp, Homo sapien
ggcagaggcatgaatatgtagcccc

SEQ ID NO: 4193448 - DNA, 25 bp, Homo sapien
tacacagtctgcacagaattcaggg

SEQ ID NO: 4193449 - DNA, 25 bp, Homo sapien
gggatgtccacgttcattgtcaagt

SEQ ID NO: 4193450 - DNA, 25 bp, Homo sapien
tcactctgtgaatgggatccaaact

SEQ ID NO: 4193451 - DNA, 25 bp, Homo sapien
ttttcatggtcttgtcctgagccag

SEQ ID NO: 4193452 - DNA, 25 bp, Homo sapien
gatcttgggccagaaggagtgcatt

SEQ ID NO: 4193453 - DNA, 25 bp, Homo sapien
ccttgagtaggccagagttcccaga

SEQ ID NO: 4193454 - DNA, 25 bp, Homo sapien
gccagaaggagtgcatttcttttca

SEQ ID NO: 4193455 - DNA, 25 bp, Homo sapien
aacaagttggtagtaggccactcca

SEQ ID NO: 4193456 - DNA, 25 bp, Homo sapien
gagaacaagttggtagtaggccact

SEQ ID NO: 4193457 - DNA, 25 bp, Homo sapien
gaacaagttggtagtaggccactcc

SEQ ID NO: 4193458 - DNA, 25 bp, Homo sapien
agagagaacaagttggtagtaggcc

SEQ ID NO: 4193459 - DNA, 25 bp, Homo sapien
acagtgtcgacacagagccacacga

SEQ ID NO: 4193460 - DNA, 25 bp, Homo sapien
gacacagagccacacgacaagtgga

SEQ ID NO: 4193461 - DNA, 25 bp, Homo sapien
cacacgacaagtggacagcgcaatt

SEQ ID NO: 4193462 - DNA, 25 bp, Homo sapien
tggcgcacagtgtcgacacagagcc

SEQ ID NO: 4193463 - DNA, 25 bp, Homo sapien
tgtacaagtcttgggtgctccactg

SEQ ID NO: 4193464 - DNA, 25 bp, Homo sapien
acagcccctggtagttgaaaacagc

SEQ ID NO: 4193465 - DNA, 25 bp, Homo sapien
ggtggcagcaatgatgcccgcaatc

SEQ ID NO: 4193466 - DNA, 25 bp, Homo sapien
gctccactggtccatgcaggtggca

SEQ ID NO: 4193467 - DNA, 25 bp, Homo sapien
agcagggtgaagtagccccggcact

SEQ ID NO: 4193468 - DNA, 25 bp, Homo sapien
agccccggcactcggtgaagccaga

SEQ ID NO: 4193469 - DNA, 25 bp, Homo sapien
cagggtgaagtagccccggcactcg

SEQ ID NO: 4193470 - DNA, 25 bp, Homo sapien
aagtagccccggcactcggtgaagc

SEQ ID NO: 4193471 - DNA, 25 bp, Homo sapien
tggctgttgcccctgtcaaacacga

SEQ ID NO: 4193472 - DNA, 25 bp, Homo sapien
tccctgtcgtggtgcccagacagag

SEQ ID NO: 4193473 - DNA, 25 bp, Homo sapien
tgtcaaacacgaatcgcagttcctc

SEQ ID NO: 4193474 - DNA, 25 bp, Homo sapien
cagcagtccctgtcgtggtgcccag

SEQ ID NO: 4193475 - DNA, 25 bp, Homo sapien
cctgagtaagacttgggcggtggca

SEQ ID NO: 4193476 - DNA, 25 bp, Homo sapien
agacacttgtggtttttctaccttg

SEQ ID NO: 4193477 - DNA, 25 bp, Homo sapien
ggcggtggcaccctcatggctttgc

SEQ ID NO: 4193478 - DNA, 25 bp, Homo sapien
gtcttgcagtttcaccctcttctcc

SEQ ID NO: 4193479 - DNA, 25 bp, Homo sapien
tgccgaaggtgtgaagctaacgcgc

SEQ ID NO: 4193480 - DNA, 25 bp, Homo sapien
aaggtgtgaagctaacgcgctcctg

SEQ ID NO: 4193481 - DNA, 25 bp, Homo sapien
cgccctgccgcctgcgagaagctgc

SEQ ID NO: 4193482 - DNA, 25 bp, Homo sapien
cgccctcctgctgccgaaggtgtga

SEQ ID NO: 4193483 - DNA, 25 bp, Homo sapien
ccacttggcatgtggtggtggacat

SEQ ID NO: 4193484 - DNA, 25 bp, Homo sapien
cagagcccttcgtactggaacacgg

SEQ ID NO: 4193485 - DNA, 25 bp, Homo sapien
caggaggaacgccaccacttggcat

SEQ ID NO: 4193486 - DNA, 25 bp, Homo sapien
aaatagggcctgcattcggtgaagc

SEQ ID NO: 4193487 - DNA, 25 bp, Homo sapien
aagaaacaggatgggggagtaagag

SEQ ID NO: 4193488 - DNA, 25 bp, Homo sapien
agaagaaacaggatgggggagtaag

SEQ ID NO: 4193489 - DNA, 25 bp, Homo sapien
agaaacaggatgggggagtaagaga

SEQ ID NO: 4193490 - DNA, 25 bp, Homo sapien
gaagaaacaggatgggggagtaaga

SEQ ID NO: 4193491 - DNA, 25 bp, Homo sapien
agcaggagcaatggatgtccaggac

SEQ ID NO: 4193492 - DNA, 25 bp, Homo sapien
gagcaatggatgtccaggaccaagt

SEQ ID NO: 4193493 - DNA, 25 bp, Homo sapien
ggagcaatggatgtccaggaccaag

SEQ ID NO: 4193494 - DNA, 25 bp, Homo sapien
caggagcaatggatgtccaggacca

SEQ ID NO: 4193495 - DNA, 25 bp, Homo sapien
ctttattcaatttgggggcttgagg

SEQ ID NO: 4193496 - DNA, 25 bp, Homo sapien
tatgagaatgctctgggtttggtac

SEQ ID NO: 4193497 - DNA, 25 bp, Homo sapien
cagagacttgtggaatctttattca

SEQ ID NO: 4193498 - DNA, 25 bp, Homo sapien
tttggaggaagatttgtgagaggac

SEQ ID NO: 4193499 - DNA, 25 bp, Homo sapien
gctcctttaggagccccacaggtgt

SEQ ID NO: 4193500 - DNA, 25 bp, Homo sapien
ttaggcattaggtcctggctcgttg

SEQ ID NO: 4193501 - DNA, 25 bp, Homo sapien
ccacaggtgtcatctcgggctgttt

SEQ ID NO: 4193502 - DNA, 25 bp, Homo sapien
tggctcgttgttactccttccagct

SEQ ID NO: 4193503 - DNA, 25 bp, Homo sapien
tctgggagaatcattgcaaacttac

SEQ ID NO: 4193504 - DNA, 25 bp, Homo sapien
taaggcttacttctctgctaaagag

SEQ ID NO: 4193505 - DNA, 25 bp, Homo sapien
catgatcaccgtggctttgaatttc

SEQ ID NO: 4193506 - DNA, 25 bp, Homo sapien
tgctaaagagtgatacttttctggg

SEQ ID NO: 4193507 - DNA, 25 bp, Homo sapien
aacaacgtatcccttggcaactcca

SEQ ID NO: 4193508 - DNA, 25 bp, Homo sapien
gtgaatcctctcacataatgataaa

SEQ ID NO: 4193509 - DNA, 25 bp, Homo sapien
taactgtatacaaatgtgaatcctc

SEQ ID NO: 4193510 - DNA, 25 bp, Homo sapien
caaagctttgacttgtactaactgt

SEQ ID NO: 4193511 - DNA, 25 bp, Homo sapien
gcatagcttggtcctagactggaga

SEQ ID NO: 4193512 - DNA, 25 bp, Homo sapien
gatggtagtctgaggccagacccca

SEQ ID NO: 4193513 - DNA, 25 bp, Homo sapien
ggaggagccataccttcaggcatag

SEQ ID NO: 4193514 - DNA, 25 bp, Homo sapien
caggagctggcatcactaagtggaa

SEQ ID NO: 4193515 - DNA, 25 bp, Homo sapien
atcagggctcgcactgcctgcagca

SEQ ID NO: 4193516 - DNA, 25 bp, Homo sapien
ctgagacaatgaacatgatcccgga

SEQ ID NO: 4193517 - DNA, 25 bp, Homo sapien
cacccaggacgatgcctacgatcat

SEQ ID NO: 4193518 - DNA, 25 bp, Homo sapien
aaagatggataccaggaggccaatg

SEQ ID NO: 4193519 - DNA, 25 bp, Homo sapien
ccacccatgccggtgtacatgttag

SEQ ID NO: 4193520 - DNA, 25 bp, Homo sapien
agaagttagtcaccagcatgttggc

SEQ ID NO: 4193521 - DNA, 25 bp, Homo sapien
tagctgtggacatccagaagttagt

SEQ ID NO: 4193522 - DNA, 25 bp, Homo sapien
ccggtgtacatgttagctgtggaca

SEQ ID NO: 4193523 - DNA, 25 bp, Homo sapien
tccatccctgaccatgcccctgaac

SEQ ID NO: 4193524 - DNA, 25 bp, Homo sapien
tccccacttttggattccacatcca

SEQ ID NO: 4193525 - DNA, 25 bp, Homo sapien
cacttttggattccacatccatccc

SEQ ID NO: 4193526 - DNA, 25 bp, Homo sapien
ttcctgtgggtcacagccaactgat

SEQ ID NO: 4193527 - DNA, 25 bp, Homo sapien
tcatcacacccccaattagtgtgag

SEQ ID NO: 4193528 - DNA, 25 bp, Homo sapien
ccggcaggcgatgcacatcatcaca

SEQ ID NO: 4193529 - DNA, 25 bp, Homo sapien
cacgaacagagccgcaccaaatgtg

SEQ ID NO: 4193530 - DNA, 25 bp, Homo sapien
gtgaggcctccagcgacccagccca

SEQ ID NO: 4193531 - DNA, 25 bp, Homo sapien
gcctccaggcttgtaggcaacactg

SEQ ID NO: 4193532 - DNA, 25 bp, Homo sapien
acactgtggcctgaggcatgataag

SEQ ID NO: 4193533 - DNA, 25 bp, Homo sapien
agcctccaggcttgtaggcaacact

SEQ ID NO: 4193534 - DNA, 25 bp, Homo sapien
cctgaggcatgataagaaacggctt

SEQ ID NO: 4193535 - DNA, 25 bp, Homo sapien
gtgcgggcacctccatcgtatatct

SEQ ID NO: 4193536 - DNA, 25 bp, Homo sapien
gcgggcacctccatcgtatatcttc

SEQ ID NO: 4193537 - DNA, 25 bp, Homo sapien
gggcacctccatcgtatatcttctt

SEQ ID NO: 4193538 - DNA, 25 bp, Homo sapien
gcacctccatcgtatatcttcttgt

SEQ ID NO: 4193539 - DNA, 25 bp, Homo sapien
ttacacatagtcgtgcttggaagga

SEQ ID NO: 4193540 - DNA, 25 bp, Homo sapien
cgtgcttggaaggataagattgtac

SEQ ID NO: 4193541 - DNA, 25 bp, Homo sapien
tagtcgtgcttggaaggataagatt

SEQ ID NO: 4193542 - DNA, 25 bp, Homo sapien
cacatagtcgtgcttggaaggataa

SEQ ID NO: 4193543 - DNA, 25 bp, Homo sapien
caccagctagttgtgatggcgcaca

SEQ ID NO: 4193544 - DNA, 25 bp, Homo sapien
gagtattcaccaatccccttggagg

SEQ ID NO: 4193545 - DNA, 25 bp, Homo sapien
tctgacccgcgacagaaagaggact

SEQ ID NO: 4193546 - DNA, 25 bp, Homo sapien
taagaaaaccgagatcatgggctgg

SEQ ID NO: 4193547 - DNA, 25 bp, Homo sapien
ctggtatggactctcgtctttgttc

SEQ ID NO: 4193548 - DNA, 25 bp, Homo sapien
tcacaacagaggtatgggcctcggc

SEQ ID NO: 4193549 - DNA, 25 bp, Homo sapien
caaaggccttgagcatgtcatttct

SEQ ID NO: 4193550 - DNA, 25 bp, Homo sapien
tggctcccctgatatgcctgtgcaa

SEQ ID NO: 4193551 - DNA, 25 bp, Homo sapien
taagggcggcagctttgataacagg

SEQ ID NO: 4193552 - DNA, 25 bp, Homo sapien
cattgtcaacaagggctaagggcgg

SEQ ID NO: 4193553 - DNA, 25 bp, Homo sapien
gcttggactggtcaaaaactcgaaa

SEQ ID NO: 4193554 - DNA, 25 bp, Homo sapien
tgggatgaagtgagccctggtccac

SEQ ID NO: 4193555 - DNA, 25 bp, Homo sapien
actcccagttatgtgaggcagtagg

SEQ ID NO: 4193556 - DNA, 25 bp, Homo sapien
caggtggattcatactcccagttat

SEQ ID NO: 4193557 - DNA, 25 bp, Homo sapien
aatatgtgtttctacaggtggattc

SEQ ID NO: 4193558 - DNA, 25 bp, Homo sapien
ccagttatgtgaggcagtaggaacg

SEQ ID NO: 4193559 - DNA, 25 bp, Homo sapien
tccatctaaggcacgtccacctggg

SEQ ID NO: 4193560 - DNA, 25 bp, Homo sapien
tgctgccacagggttctccatctaa

SEQ ID NO: 4193561 - DNA, 25 bp, Homo sapien
caagtgagtggtgctgccacagggt

SEQ ID NO: 4193562 - DNA, 25 bp, Homo sapien
cacagggttctccatctaaggcacg

SEQ ID NO: 4193563 - DNA, 25 bp, Homo sapien
ggatcatatagtaatcatatagtct

SEQ ID NO: 4193564 - DNA, 25 bp, Homo sapien
tttcccactgacaatgcacaaatgt

SEQ ID NO: 4193565 - DNA, 25 bp, Homo sapien
tatattgtggggttagatatgattt

SEQ ID NO: 4193566 - DNA, 25 bp, Homo sapien
ttatatattgtggggttagatatga

SEQ ID NO: 4193567 - DNA, 25 bp, Homo sapien
tgtgagtagtcgtctctgaggctct

SEQ ID NO: 4193568 - DNA, 25 bp, Homo sapien
ccacagcatgcctggtaacctgctg

SEQ ID NO: 4193569 - DNA, 25 bp, Homo sapien
gttgctccgaggcacagcttgttgt

SEQ ID NO: 4193570 - DNA, 25 bp, Homo sapien
tctggtggcacagttgcagctttgg

SEQ ID NO: 4193571 - DNA, 25 bp, Homo sapien
gtataagatcacaagagaccgaggg

SEQ ID NO: 4193572 - DNA, 25 bp, Homo sapien
tcagtatggaatggttgggtataag

SEQ ID NO: 4193573 - DNA, 25 bp, Homo sapien
tggaatggttgggtataagatcaca

SEQ ID NO: 4193574 - DNA, 25 bp, Homo sapien
ggttgggtataagatcacaagagac

SEQ ID NO: 4193575 - DNA, 25 bp, Homo sapien
tagaggtctcgtgaaatctagtgtc

SEQ ID NO: 4193576 - DNA, 25 bp, Homo sapien
tatggttatcgtgtattttagaagc

SEQ ID NO: 4193577 - DNA, 25 bp, Homo sapien
ggaaaagaactatggttatcgtgta

SEQ ID NO: 4193578 - DNA, 25 bp, Homo sapien
actgaatcagtcatgttagaggtct

SEQ ID NO: 4193579 - DNA, 25 bp, Homo sapien
acaattaaagttcattgtttatctg

SEQ ID NO: 4193580 - DNA, 25 bp, Homo sapien
gaaataaaacagtatagatacaatt

SEQ ID NO: 4193581 - DNA, 25 bp, Homo sapien
cttggtgtccatgatggagtgcagt

SEQ ID NO: 4193582 - DNA, 25 bp, Homo sapien
agagtttcgttcttggtgtccatga

SEQ ID NO: 4193583 - DNA, 25 bp, Homo sapien
ttaaataggacccagacaaggccag

SEQ ID NO: 4193584 - DNA, 25 bp, Homo sapien
tagagtatttaaagcaagtccaacc

SEQ ID NO: 4193585 - DNA, 25 bp, Homo sapien
tgccatgttcgtggtcagatttccc

SEQ ID NO: 4193586 - DNA, 25 bp, Homo sapien
cagatttccctgcttaatgtaaaga

SEQ ID NO: 4193587 - DNA, 25 bp, Homo sapien
caacgaggcggatctacgctgcatg

SEQ ID NO: 4193588 - DNA, 25 bp, Homo sapien
ccacggcgagctggataagatctat

SEQ ID NO: 4193589 - DNA, 25 bp, Homo sapien
taagatctatgagacgctggcgctg

SEQ ID NO: 4193590 - DNA, 25 bp, Homo sapien
tgtcgacctcttgctgtgctgcggc

SEQ ID NO: 4193591 - DNA, 25 bp, Homo sapien
tggacaccgctcaagtaccggaaag

SEQ ID NO: 4193592 - DNA, 25 bp, Homo sapien
actattggccaacgctaggcaccgc

SEQ ID NO: 4193593 - DNA, 25 bp, Homo sapien
taaaggcagccagatagacgagaac

SEQ ID NO: 4193594 - DNA, 25 bp, Homo sapien
ggccggcactttcgacagccaacta

SEQ ID NO: 4193595 - DNA, 25 bp, Homo sapien
ttggggtctccaacaagcacgccat

SEQ ID NO: 4193596 - DNA, 25 bp, Homo sapien
cgctcatgcggattggggtctccaa

SEQ ID NO: 4193597 - DNA, 25 bp, Homo sapien
cgaaaggacgctcatgcggattggg

SEQ ID NO: 4193598 - DNA, 25 bp, Homo sapien
gcacgccatcttgagccttcccacc

SEQ ID NO: 4193599 - DNA, 25 bp, Homo sapien
cttcttgccaaagcccgggagagct

SEQ ID NO: 4193600 - DNA, 25 bp, Homo sapien
ggctcagtgaaacgcttggcaaagt

SEQ ID NO: 4193601 - DNA, 25 bp, Homo sapien
gagttgcagctgatacgaatcacca

SEQ ID NO: 4193602 - DNA, 25 bp, Homo sapien
cagccagttgtctataagcccagcc

SEQ ID NO: 4193603 - DNA, 25 bp, Homo sapien
agcaacatagtgaaaggtgaaagtc

SEQ ID NO: 4193604 - DNA, 25 bp, Homo sapien
catagtgaaaggtgaaagtcgtctt

SEQ ID NO: 4193605 - DNA, 25 bp, Homo sapien
aacatagtgaaaggtgaaagtcgtc

SEQ ID NO: 4193606 - DNA, 25 bp, Homo sapien
caacatagtgaaaggtgaaagtcgt

SEQ ID NO: 4193607 - DNA, 25 bp, Homo sapien
tctcagagtcggacagctcgaattt

SEQ ID NO: 4193608 - DNA, 25 bp, Homo sapien
tgttgcaaaatccttcgaagttatc

SEQ ID NO: 4193609 - DNA, 25 bp, Homo sapien
gtcggacagctcgaatttgttgcaa

SEQ ID NO: 4193610 - DNA, 25 bp, Homo sapien
gaagttatctcccagtaactttcat

SEQ ID NO: 4193611 - DNA, 25 bp, Homo sapien
ctgcagtaagttgagaccaggccat

SEQ ID NO: 4193612 - DNA, 25 bp, Homo sapien
agtaaaatctgaagaccctacataa

SEQ ID NO: 4193613 - DNA, 25 bp, Homo sapien
gaatcactgacattcctgtctgctg

SEQ ID NO: 4193614 - DNA, 25 bp, Homo sapien
taagaaggctaggtctcaaaagtaa

SEQ ID NO: 4193615 - DNA, 25 bp, Homo sapien
gaaaaacatacaagtcagaatcact

SEQ ID NO: 4193616 - DNA, 25 bp, Homo sapien
cagtcccagggatcatagcactact

SEQ ID NO: 4193617 - DNA, 25 bp, Homo sapien
cgtctctttacccagaagccaacag

SEQ ID NO: 4193618 - DNA, 25 bp, Homo sapien
ccaatttctagaggataataggagc

SEQ ID NO: 4193619 - DNA, 25 bp, Homo sapien
tagcactactgttcagtgaaggcag

SEQ ID NO: 4193620 - DNA, 25 bp, Homo sapien
agggggctatttctgtaaaactgct

SEQ ID NO: 4193621 - DNA, 25 bp, Homo sapien
tggggcagggggctatttctgtaaa

SEQ ID NO: 4193622 - DNA, 25 bp, Homo sapien
tgtaaaactgctcttatttgcaata

SEQ ID NO: 4193623 - DNA, 25 bp, Homo sapien
aaaatgacaagtggtggggcagggg

SEQ ID NO: 4193624 - DNA, 25 bp, Homo sapien
ctcttctctcttctttcagaaggca

SEQ ID NO: 4193625 - DNA, 25 bp, Homo sapien
ctctcccctcccagtcctcttctct

SEQ ID NO: 4193626 - DNA, 25 bp, Homo sapien
tcctcttctctcttctttcagaagg

SEQ ID NO: 4193627 - DNA, 25 bp, Homo sapien
cttctctcttctttcagaaggcagc

SEQ ID NO: 4193628 - DNA, 25 bp, Homo sapien
atttcttgtaatacttattttggag

SEQ ID NO: 4193629 - DNA, 25 bp, Homo sapien
tctattgtgttatttcttgtaatac

SEQ ID NO: 4193630 - DNA, 25 bp, Homo sapien
tccttttcatttgtattgtgaagtt

SEQ ID NO: 4193631 - DNA, 25 bp, Homo sapien
tttgtattgtgaagtttttctattg

SEQ ID NO: 4193632 - DNA, 25 bp, Homo sapien
tgtcaacatagtggcgactgctagc

SEQ ID NO: 4193633 - DNA, 25 bp, Homo sapien
cagggtcaaatagcctgtcaacata

SEQ ID NO: 4193634 - DNA, 25 bp, Homo sapien
caaatagcctgtcaacatagtggcg

SEQ ID NO: 4193635 - DNA, 25 bp, Homo sapien
agtggcgactgctagctgttacttc

SEQ ID NO: 4193636 - DNA, 25 bp, Homo sapien
caagcaactgttaactacacatgcc

SEQ ID NO: 4193637 - DNA, 25 bp, Homo sapien
gcttttcctgctagtatgctacaca

SEQ ID NO: 4193638 - DNA, 25 bp, Homo sapien
gatctatagctctaactcagctagt

SEQ ID NO: 4193639 - DNA, 25 bp, Homo sapien
ctcagctagtagattagttgtagac

SEQ ID NO: 4193640 - DNA, 25 bp, Homo sapien
caaaggcttcattttatgggaactc

SEQ ID NO: 4193641 - DNA, 25 bp, Homo sapien
tacaaaatttcctggagctaagaga

SEQ ID NO: 4193642 - DNA, 25 bp, Homo sapien
tatctttagctcatgcaagaaaatg

SEQ ID NO: 4193643 - DNA, 25 bp, Homo sapien
ggaacctgtctacattctactgaaa

SEQ ID NO: 4193644 - DNA, 25 bp, Homo sapien
gatgcagatcactctatcacatttg

SEQ ID NO: 4193645 - DNA, 25 bp, Homo sapien
gataatcctatcgaattctctgacc

SEQ ID NO: 4193646 - DNA, 25 bp, Homo sapien
tatctgtctgcaagtaaagaccatg

SEQ ID NO: 4193647 - DNA, 25 bp, Homo sapien
tgtgtatgtttacccataaccctca

SEQ ID NO: 4193648 - DNA, 25 bp, Homo sapien
catactttcccctgactagctttac

SEQ ID NO: 4193649 - DNA, 25 bp, Homo sapien
cagttcccagagtgtagttattctt

SEQ ID NO: 4193650 - DNA, 25 bp, Homo sapien
caacattcagccatctagatgaagc

SEQ ID NO: 4193651 - DNA, 25 bp, Homo sapien
caggtcatcactttgttagagtaaa

SEQ ID NO: 4193652 - DNA, 25 bp, Homo sapien
ctaaaacaatgagattggctttctg

SEQ ID NO: 4193653 - DNA, 25 bp, Homo sapien
cctaaaacaatgagattggctttct

SEQ ID NO: 4193654 - DNA, 25 bp, Homo sapien
atagcaagacttcccaacaccactg

SEQ ID NO: 4193655 - DNA, 25 bp, Homo sapien
tgcaataaggcagggataatatggc

SEQ ID NO: 4193656 - DNA, 25 bp, Homo sapien
gtacccatagcaagacttcccaaca

SEQ ID NO: 4193657 - DNA, 25 bp, Homo sapien
tttcagtacccatagcaagacttcc

SEQ ID NO: 4193658 - DNA, 25 bp, Homo sapien
acaggactggtgaagatggtacgca

SEQ ID NO: 4193659 - DNA, 25 bp, Homo sapien
aggcaagcttcaataaacttcaggt

SEQ ID NO: 4193660 - DNA, 25 bp, Homo sapien
gtacgcaggcatcggaggcaagctt

SEQ ID NO: 4193661 - DNA, 25 bp, Homo sapien
tctggagtgacaggactggtgaaga

SEQ ID NO: 4193662 - DNA, 25 bp, Homo sapien
ttatgtcactctggttgatcttgaa

SEQ ID NO: 4193663 - DNA, 25 bp, Homo sapien
tccagacgctgaggcagagaaatgc

SEQ ID NO: 4193664 - DNA, 25 bp, Homo sapien
aatgcttaaacctggcagggtgaag

SEQ ID NO: 4193665 - DNA, 25 bp, Homo sapien
ggagtcttgttatgtcactctggtt

SEQ ID NO: 4193666 - DNA, 25 bp, Homo sapien
ttaatgacagtcaatcaagtctcct

SEQ ID NO: 4193667 - DNA, 25 bp, Homo sapien
gcaacgaggccatgaaaactgtcta

SEQ ID NO: 4193668 - DNA, 25 bp, Homo sapien
tccacaagaaggtagtcaaatctct

SEQ ID NO: 4193669 - DNA, 25 bp, Homo sapien
caaatctcttatcttaatgacagtc

SEQ ID NO: 4193670 - DNA, 25 bp, Homo sapien
gggacctgctaagcagtgccatgag

SEQ ID NO: 4193671 - DNA, 25 bp, Homo sapien
catgaggtgtggtatcactgtggca

SEQ ID NO: 4193672 - DNA, 25 bp, Homo sapien
gacagatgtactcctgggtatagcg

SEQ ID NO: 4193673 - DNA, 25 bp, Homo sapien
tgaggtgtggtatcactgtggcatc

SEQ ID NO: 4193674 - DNA, 25 bp, Homo sapien
tatggaatagccttagagatatgtc

SEQ ID NO: 4193675 - DNA, 25 bp, Homo sapien
ggagaggtccttatgtactgatatg

SEQ ID NO: 4193676 - DNA, 25 bp, Homo sapien
taaatgctccacaatagaggactgg

SEQ ID NO: 4193677 - DNA, 25 bp, Homo sapien
tatatatgtatgactacccctggga

SEQ ID NO: 4193678 - DNA, 25 bp, Homo sapien
gagcgagactccgtctcaaaaaaaa

SEQ ID NO: 4193679 - DNA, 25 bp, Homo sapien
ctgggcaacagagcgagactccgtc

SEQ ID NO: 4193680 - DNA, 25 bp, Homo sapien
cccgggaggcggaggcggaggctgc

SEQ ID NO: 4193681 - DNA, 25 bp, Homo sapien
caagatcgtaccactgcactgtagc

SEQ ID NO: 4193682 - DNA, 25 bp, Homo sapien
acagtgaggttagtaggtgagcaat

SEQ ID NO: 4193683 - DNA, 25 bp, Homo sapien
ataaaattgtttgatgatctggccc

SEQ ID NO: 4193684 - DNA, 25 bp, Homo sapien
ctgaactgcaccgtggttaaataaa

SEQ ID NO: 4193685 - DNA, 25 bp, Homo sapien
taggtgagcaatattctgaactgca

SEQ ID NO: 4193686 - DNA, 25 bp, Homo sapien
tcttgatatagaaagccactgcttc

SEQ ID NO: 4193687 - DNA, 25 bp, Homo sapien
caatgaatggcgaaggttttaactc

SEQ ID NO: 4193688 - DNA, 25 bp, Homo sapien
cctaaaaaagagatgcaagggcagc

SEQ ID NO: 4193689 - DNA, 25 bp, Homo sapien
catggcactggtagctatccaaaaa

SEQ ID NO: 4193690 - DNA, 25 bp, Homo sapien
ttaatggcactttggtaatacagca

SEQ ID NO: 4193691 - DNA, 25 bp, Homo sapien
gcagcactagcatgtgcccacagga

SEQ ID NO: 4193692 - DNA, 25 bp, Homo sapien
agagtaatgttaccagactagtccc

SEQ ID NO: 4193693 - DNA, 25 bp, Homo sapien
tggaacctgaggttgacaagcactc

SEQ ID NO: 4193694 - DNA, 25 bp, Homo sapien
tcaaaagctaaaactgagaaacatt

SEQ ID NO: 4193695 - DNA, 25 bp, Homo sapien
tgagaaacatttcagtgcttgcatt

SEQ ID NO: 4193696 - DNA, 25 bp, Homo sapien
aactgagaaacatttcagtgcttgc

SEQ ID NO: 4193697 - DNA, 25 bp, Homo sapien
tttcaaaagctaaaactgagaaaca

SEQ ID NO: 4193698 - DNA, 25 bp, Homo sapien
taaatctaaaaagttcatcaattaa

SEQ ID NO: 4193699 - DNA, 25 bp, Homo sapien
atcatgtaggtgccactgaaagctc

SEQ ID NO: 4193700 - DNA, 25 bp, Homo sapien
tcaataggcttatccctctgtaaca

SEQ ID NO: 4193701 - DNA, 25 bp, Homo sapien
aaatctgtggtaacaattctccatc

SEQ ID NO: 4193702 - DNA, 25 bp, Homo sapien
gtaacatcttcacaaaaatctgtgg

SEQ ID NO: 4193703 - DNA, 25 bp, Homo sapien
tgtgagctgcatctcaataggctta

SEQ ID NO: 4193704 - DNA, 25 bp, Homo sapien
aactattcagaggttaacagcaggg

SEQ ID NO: 4193705 - DNA, 25 bp, Homo sapien
gacaattcgcttttcggaggttcag

SEQ ID NO: 4193706 - DNA, 25 bp, Homo sapien
cagtagaagtatcacagaagaggca

SEQ ID NO: 4193707 - DNA, 25 bp, Homo sapien
cccaggcaggcgctgaacattaagc

SEQ ID NO: 4193708 - DNA, 25 bp, Homo sapien
gaataagacagcagaaaataagttt

SEQ ID NO: 4193709 - DNA, 25 bp, Homo sapien
cagttatcatctgtccgaattgctc

SEQ ID NO: 4193710 - DNA, 25 bp, Homo sapien
aatacaatacagttatcatctgtcc

SEQ ID NO: 4193711 - DNA, 25 bp, Homo sapien
tttaatacaatacagttatcatctg

SEQ ID NO: 4193712 - DNA, 25 bp, Homo sapien
caatacagttatcatctgtccgaat

SEQ ID NO: 4193713 - DNA, 25 bp, Homo sapien
tactatttctaagcctgacggatcc

SEQ ID NO: 4193714 - DNA, 25 bp, Homo sapien
caataaccctgtgcatagatgagca

SEQ ID NO: 4193715 - DNA, 25 bp, Homo sapien
taaatgctatggaagtccgtggcac

SEQ ID NO: 4193716 - DNA, 25 bp, Homo sapien
gaaagtcttcctcaaatactgcagg

SEQ ID NO: 4193717 - DNA, 25 bp, Homo sapien
tactgcacattcgaaccaaacaagg

SEQ ID NO: 4193718 - DNA, 25 bp, Homo sapien
tccttactgcacattcgaaccaaac

SEQ ID NO: 4193719 - DNA, 25 bp, Homo sapien
cacattcgaaccaaacaaggtaatg

SEQ ID NO: 4193720 - DNA, 25 bp, Homo sapien
tctccttactgcacattcgaaccaa

SEQ ID NO: 4193721 - DNA, 25 bp, Homo sapien
cttttaatatcagtgatggcactca

SEQ ID NO: 4193722 - DNA, 25 bp, Homo sapien
ttttaatatcagtgatggcactcac

SEQ ID NO: 4193723 - DNA, 25 bp, Homo sapien
ccttttaatatcagtgatggcactc

SEQ ID NO: 4193724 - DNA, 25 bp, Homo sapien
tactttggaaaggttcactcatcca

SEQ ID NO: 4193725 - DNA, 25 bp, Homo sapien
tgtgaaaatgcttaacaaaccgtat

SEQ ID NO: 4193726 - DNA, 25 bp, Homo sapien
caatgactgactatgaccaagtaac

SEQ ID NO: 4193727 - DNA, 25 bp, Homo sapien
gacagtggtatagcttgatcaatga

SEQ ID NO: 4193728 - DNA, 25 bp, Homo sapien
catcatttgctccaagagaggcata

SEQ ID NO: 4193729 - DNA, 25 bp, Homo sapien
gagaggcatagagcttgaatgcagc

SEQ ID NO: 4193730 - DNA, 25 bp, Homo sapien
cttcttccggatgtcttcatcattt

SEQ ID NO: 4193731 - DNA, 25 bp, Homo sapien
ttgctccaagagaggcatagagctt

SEQ ID NO: 4193732 - DNA, 25 bp, Homo sapien
tgggggacgcccctctcccagactc

SEQ ID NO: 4193733 - DNA, 25 bp, Homo sapien
ggccatgccactctatgttctaaaa

SEQ ID NO: 4193734 - DNA, 25 bp, Homo sapien
gtcactgttagtgctcttcaccacg

SEQ ID NO: 4193735 - DNA, 25 bp, Homo sapien
caaggtgtctgaagcttcacagtgc

SEQ ID NO: 4193736 - DNA, 25 bp, Homo sapien
tcaattatgcctttagtcactctgc

SEQ ID NO: 4193737 - DNA, 25 bp, Homo sapien
ggagccaagtcagagcttacttacc

SEQ ID NO: 4193738 - DNA, 25 bp, Homo sapien
cagtgttagactaggctttagtaac

SEQ ID NO: 4193739 - DNA, 25 bp, Homo sapien
gactaatttgctctttctgctatgg

SEQ ID NO: 4193740 - DNA, 25 bp, Homo sapien
taagggtgctataccagtgcataca

SEQ ID NO: 4193741 - DNA, 25 bp, Homo sapien
tctgaatcatggtaaactctaatac

SEQ ID NO: 4193742 - DNA, 25 bp, Homo sapien
gaacttctctgaatcatggtaaact

SEQ ID NO: 4193743 - DNA, 25 bp, Homo sapien
catggtaaactctaatactttgtga

SEQ ID NO: 4193744 - DNA, 25 bp, Homo sapien
aaactctaatactttgtgatttctc

SEQ ID NO: 4193745 - DNA, 25 bp, Homo sapien
caaactgaacattggcgtcaacatc

SEQ ID NO: 4193746 - DNA, 25 bp, Homo sapien
cgatcaggagttagccttaccagga

SEQ ID NO: 4193747 - DNA, 25 bp, Homo sapien
tacttctcctgtttctaatgggccc

SEQ ID NO: 4193748 - DNA, 25 bp, Homo sapien
tctattgttataaaagcctctcccc

SEQ ID NO: 4193749 - DNA, 25 bp, Homo sapien
taaaatttttccacgcctatggcca

SEQ ID NO: 4193750 - DNA, 25 bp, Homo sapien
taagccccattacataatatcacag

SEQ ID NO: 4193751 - DNA, 25 bp, Homo sapien
ttaaggatctacacaaaaaatacag

SEQ ID NO: 4193752 - DNA, 25 bp, Homo sapien
catcttggcaagcataaacattgca

SEQ ID NO: 4193753 - DNA, 25 bp, Homo sapien
tctttcagagactctccactcatta

SEQ ID NO: 4193754 - DNA, 25 bp, Homo sapien
taaatttctttcagagactctccac

SEQ ID NO: 4193755 - DNA, 25 bp, Homo sapien
aatttctttcagagactctccactc

SEQ ID NO: 4193756 - DNA, 25 bp, Homo sapien
tttctttcagagactctccactcat

SEQ ID NO: 4193757 - DNA, 25 bp, Homo sapien
tcttcatgtcacagtcaatggtagt

SEQ ID NO: 4193758 - DNA, 25 bp, Homo sapien
taaccaaaatccattcagagtcagg

SEQ ID NO: 4193759 - DNA, 25 bp, Homo sapien
tacaggtagcttgaattcttctaag

SEQ ID NO: 4193760 - DNA, 25 bp, Homo sapien
tcttctaagtttaacacggccaggc

SEQ ID NO: 4193761 - DNA, 25 bp, Homo sapien
cacacaggcatatgcgaagtttggt

SEQ ID NO: 4193762 - DNA, 25 bp, Homo sapien
ttcgccaaactggtttatgagagtt

SEQ ID NO: 4193763 - DNA, 25 bp, Homo sapien
ctttctatatgccagtacacacagg

SEQ ID NO: 4193764 - DNA, 25 bp, Homo sapien
caacaattgataatgcctttcttca

SEQ ID NO: 4193765 - DNA, 25 bp, Homo sapien
gcaccttgatacataatctggatac

SEQ ID NO: 4193766 - DNA, 25 bp, Homo sapien
tgatacataatctggatacttcctc

SEQ ID NO: 4193767 - DNA, 25 bp, Homo sapien
gtaacctattaacagattcaaggat

SEQ ID NO: 4193768 - DNA, 25 bp, Homo sapien
agaagtaacctattaacagattcaa

SEQ ID NO: 4193769 - DNA, 25 bp, Homo sapien
tatgatgcaaacaactgagacttcc

SEQ ID NO: 4193770 - DNA, 25 bp, Homo sapien
ggagctgtatcacttcactttaggg

SEQ ID NO: 4193771 - DNA, 25 bp, Homo sapien
gaatacagccttaacagccactgaa

SEQ ID NO: 4193772 - DNA, 25 bp, Homo sapien
tctaagagatggtctgtagggcctc

SEQ ID NO: 4193773 - DNA, 25 bp, Homo sapien
gggctaaagtccagacggtagcctc

SEQ ID NO: 4193774 - DNA, 25 bp, Homo sapien
ccaaagtctggaaggctgatatgaa

SEQ ID NO: 4193775 - DNA, 25 bp, Homo sapien
gtctggaaggctgatatgaaagaac

SEQ ID NO: 4193776 - DNA, 25 bp, Homo sapien
gtccagacggtagcctcttcccaaa

SEQ ID NO: 4193777 - DNA, 25 bp, Homo sapien
ctcatcttcgtagggaccttgattt

SEQ ID NO: 4193778 - DNA, 25 bp, Homo sapien
catcttcgtagggaccttgattttg

SEQ ID NO: 4193779 - DNA, 25 bp, Homo sapien
acacattgcaacttcccacttctga

SEQ ID NO: 4193780 - DNA, 25 bp, Homo sapien
tttggggacacacattgcaacttcc

SEQ ID NO: 4193781 - DNA, 25 bp, Homo sapien
aaacctcaggatgtttcagccaaac

SEQ ID NO: 4193782 - DNA, 25 bp, Homo sapien
gaagtctgaccttagaacatgagag

SEQ ID NO: 4193783 - DNA, 25 bp, Homo sapien
tgctcagacactccacttagaagac

SEQ ID NO: 4193784 - DNA, 25 bp, Homo sapien
cagccaaggttgaagatcactgacc

SEQ ID NO: 4193785 - DNA, 25 bp, Homo sapien
gtctagcccactaaggacctgccag

SEQ ID NO: 4193786 - DNA, 25 bp, Homo sapien
tcatcagaaaggtaggtctagccca

SEQ ID NO: 4193787 - DNA, 25 bp, Homo sapien
taacaacatgaaggtgacaaacttc

SEQ ID NO: 4193788 - DNA, 25 bp, Homo sapien
tctcaaacaatcatcttgcgctggg

SEQ ID NO: 4193789 - DNA, 25 bp, Homo sapien
ctgacggcagctaaccgcaccttga

SEQ ID NO: 4193790 - DNA, 25 bp, Homo sapien
acaagccagtcacaattcggtccat

SEQ ID NO: 4193791 - DNA, 25 bp, Homo sapien
actcagacaagccagtcacaattcg

SEQ ID NO: 4193792 - DNA, 25 bp, Homo sapien
gacggcagctaaccgcaccttgaca

SEQ ID NO: 4193793 - DNA, 25 bp, Homo sapien
tgtgtttactcagtgaaggaccaga

SEQ ID NO: 4193794 - DNA, 25 bp, Homo sapien
ccaggctctctgttagacaatgtta

SEQ ID NO: 4193795 - DNA, 25 bp, Homo sapien
tttcaaacaaactggctggcatttt

SEQ ID NO: 4193796 - DNA, 25 bp, Homo sapien
cattgttaagtgaactacatcagac

SEQ ID NO: 4193797 - DNA, 25 bp, Homo sapien
gcatgatcctggaaactggttcgaa

SEQ ID NO: 4193798 - DNA, 25 bp, Homo sapien
tgatcctggaaactggttcgaagct

SEQ ID NO: 4193799 - DNA, 25 bp, Homo sapien
gatcctggaaactggttcgaagctg

SEQ ID NO: 4193800 - DNA, 25 bp, Homo sapien
catgatcctggaaactggttcgaag

SEQ ID NO: 4193801 - DNA, 25 bp, Homo sapien
tgttactggctgaccctttcttctt

SEQ ID NO: 4193802 - DNA, 25 bp, Homo sapien
ttactggctgaccctttcttcttac

SEQ ID NO: 4193803 - DNA, 25 bp, Homo sapien
gctgttactggctgaccctttcttc

SEQ ID NO: 4193804 - DNA, 25 bp, Homo sapien
agctgttactggctgaccctttctt

SEQ ID NO: 4193805 - DNA, 25 bp, Homo sapien
cactggtatgtctcattatatccca

SEQ ID NO: 4193806 - DNA, 25 bp, Homo sapien
aaagctttaagccaagagtaagagt

SEQ ID NO: 4193807 - DNA, 25 bp, Homo sapien
tagagtcataaaggtatacttgccg

SEQ ID NO: 4193808 - DNA, 25 bp, Homo sapien
tatcccactgctccactagagtcat

SEQ ID NO: 4193809 - DNA, 25 bp, Homo sapien
gaagatgctaccactaggatttcat

SEQ ID NO: 4193810 - DNA, 25 bp, Homo sapien
agatgctaccactaggatttcatct

SEQ ID NO: 4193811 - DNA, 25 bp, Homo sapien
aagatgctaccactaggatttcatc

SEQ ID NO: 4193812 - DNA, 25 bp, Homo sapien
gatgctaccactaggatttcatctg

SEQ ID NO: 4193813 - DNA, 25 bp, Homo sapien
tccattcactcgtaaagcaggattt

SEQ ID NO: 4193814 - DNA, 25 bp, Homo sapien
caaattccattcactcgtaaagcag

SEQ ID NO: 4193815 - DNA, 25 bp, Homo sapien
cactcgtaaagcaggattttcactc

SEQ ID NO: 4193816 - DNA, 25 bp, Homo sapien
tccacaaagtagctctacggctcct

SEQ ID NO: 4193817 - DNA, 25 bp, Homo sapien
ttttgttcagcctgaaatgccatat

SEQ ID NO: 4193818 - DNA, 25 bp, Homo sapien
tagctgttcagtactcaagcttcgt

SEQ ID NO: 4193819 - DNA, 25 bp, Homo sapien
gagatttctaagaagtcccaatgtc

SEQ ID NO: 4193820 - DNA, 25 bp, Homo sapien
tgaatctgataataaccggaatagc

SEQ ID NO: 4193821 - DNA, 25 bp, Homo sapien
tccccttctagaataagagtgacgg

SEQ ID NO: 4193822 - DNA, 25 bp, Homo sapien
gacctcaatgttatgttccccttct

SEQ ID NO: 4193823 - DNA, 25 bp, Homo sapien
tcaatgttatgttccccttctagaa

SEQ ID NO: 4193824 - DNA, 25 bp, Homo sapien
agagtgacggcttgcataatttgct

SEQ ID NO: 4193825 - DNA, 25 bp, Homo sapien
cattccaggatgatgaaaggtgact

SEQ ID NO: 4193826 - DNA, 25 bp, Homo sapien
ttccaggatgatgaaaggtgactgc

SEQ ID NO: 4193827 - DNA, 25 bp, Homo sapien
tcattccaggatgatgaaaggtgac

SEQ ID NO: 4193828 - DNA, 25 bp, Homo sapien
ccaggatgatgaaaggtgactgctc

SEQ ID NO: 4193829 - DNA, 25 bp, Homo sapien
aacaggagtggtacaaatggacata

SEQ ID NO: 4193830 - DNA, 25 bp, Homo sapien
tggatgcacgtgtcaaaactgaaac

SEQ ID NO: 4193831 - DNA, 25 bp, Homo sapien
aaacttctagctagtgagccgactg

SEQ ID NO: 4193832 - DNA, 25 bp, Homo sapien
tgacagtttcataggtggatgcacg

SEQ ID NO: 4193833 - DNA, 25 bp, Homo sapien
gcctggcctaccaaatgtatatata

SEQ ID NO: 4193834 - DNA, 25 bp, Homo sapien
tacagtcagcatttacagagcagtt

SEQ ID NO: 4193835 - DNA, 25 bp, Homo sapien
tatccctttatagtcaaatcctgcc

SEQ ID NO: 4193836 - DNA, 25 bp, Homo sapien
atcttaaaaccaccagtacagtcag

SEQ ID NO: 4193837 - DNA, 25 bp, Homo sapien
aagcaatgctccctgccttagtctc

SEQ ID NO: 4193838 - DNA, 25 bp, Homo sapien
tcaagcaatgctccctgccttagtc

SEQ ID NO: 4193839 - DNA, 25 bp, Homo sapien
caggctagagtgcatctgggctcac

SEQ ID NO: 4193840 - DNA, 25 bp, Homo sapien
gctagagtgcatctgggctcaccgc

SEQ ID NO: 4193841 - DNA, 25 bp, Homo sapien
ctgctgcttgctcctaagctcatga

SEQ ID NO: 4193842 - DNA, 25 bp, Homo sapien
ccctgtccaccagctacaccagcca

SEQ ID NO: 4193843 - DNA, 25 bp, Homo sapien
gctgcttgctcctaagctcatgacc

SEQ ID NO: 4193844 - DNA, 25 bp, Homo sapien
cctgtccaccagctacaccagccat

SEQ ID NO: 4193845 - DNA, 25 bp, Homo sapien
gtcccatccgctatgttggctaaga

SEQ ID NO: 4193846 - DNA, 25 bp, Homo sapien
gctgttgtcccatccgctatgttgg

SEQ ID NO: 4193847 - DNA, 25 bp, Homo sapien
atccgctatgttggctaagatgcac

SEQ ID NO: 4193848 - DNA, 25 bp, Homo sapien
ttttgctgttgtcccatccgctatg

SEQ ID NO: 4193849 - DNA, 25 bp, Homo sapien
ggctgcaagctgcagtttaacatgt

SEQ ID NO: 4193850 - DNA, 25 bp, Homo sapien
ccagggcaactctagagggtgcttg

SEQ ID NO: 4193851 - DNA, 25 bp, Homo sapien
tacaggcctccttacagactagctg

SEQ ID NO: 4193852 - DNA, 25 bp, Homo sapien
cagtgttgactgaccagctgacttg

SEQ ID NO: 4193853 - DNA, 25 bp, Homo sapien
gaatctggtatagagttggctccaa

SEQ ID NO: 4193854 - DNA, 25 bp, Homo sapien
ttgaatctggtgactgactcagttt

SEQ ID NO: 4193855 - DNA, 25 bp, Homo sapien
gaatctggtgactgactcagtttgt

SEQ ID NO: 4193856 - DNA, 25 bp, Homo sapien
tgaatctggtgactgactcagtttg

SEQ ID NO: 4193857 - DNA, 25 bp, Homo sapien
atctggtgactgactcagtttgtgt

SEQ ID NO: 4193858 - DNA, 25 bp, Homo sapien
taagcggacaggtatggctgcagta

SEQ ID NO: 4193859 - DNA, 25 bp, Homo sapien
tagatggaacagaatgtgtaaatgc

SEQ ID NO: 4193860 - DNA, 25 bp, Homo sapien
tgcacgaaggtgtgctactgtaagc

SEQ ID NO: 4193861 - DNA, 25 bp, Homo sapien
tactgtaagcggacaggtatggctg

SEQ ID NO: 4193862 - DNA, 25 bp, Homo sapien
caatgatttcctattaaactctgaa

SEQ ID NO: 4193863 - DNA, 25 bp, Homo sapien
gtctcctctccttaacagtctccaa

SEQ ID NO: 4193864 - DNA, 25 bp, Homo sapien
aaaggaattcaaatcagataatgtc

SEQ ID NO: 4193865 - DNA, 25 bp, Homo sapien
acagtctccaatgatttcctattaa

SEQ ID NO: 4193866 - DNA, 25 bp, Homo sapien
ccagagtggtctaagcaagcaggct

SEQ ID NO: 4193867 - DNA, 25 bp, Homo sapien
tggactcaggttgggtagctcagac

SEQ ID NO: 4193868 - DNA, 25 bp, Homo sapien
tcagaaccgtggaagaaggctacaa

SEQ ID NO: 4193869 - DNA, 25 bp, Homo sapien
cacttgatgctggtaaggcctatcc

SEQ ID NO: 4193870 - DNA, 25 bp, Homo sapien
ccatcatctcagaattgtaattggg

SEQ ID NO: 4193871 - DNA, 25 bp, Homo sapien
aagtaaatctccagagggaattggg

SEQ ID NO: 4193872 - DNA, 25 bp, Homo sapien
aaccctatggttcaatgatgatagc

SEQ ID NO: 4193873 - DNA, 25 bp, Homo sapien
aattcctgttagccatcatctcaga

SEQ ID NO: 4193874 - DNA, 25 bp, Homo sapien
catgccaggtactgctgcagtgcca

SEQ ID NO: 4193875 - DNA, 25 bp, Homo sapien
ccaggtactgctgcagtgccatctt

SEQ ID NO: 4193876 - DNA, 25 bp, Homo sapien
tcatgccaggtactgctgcagtgcc

SEQ ID NO: 4193877 - DNA, 25 bp, Homo sapien
tgccaggtactgctgcagtgccatc

SEQ ID NO: 4193878 - DNA, 25 bp, Homo sapien
aaaagcctatggtgaatctgttgcc

SEQ ID NO: 4193879 - DNA, 25 bp, Homo sapien
gcaattgggaggctcttggtcccca

SEQ ID NO: 4193880 - DNA, 25 bp, Homo sapien
ccagttcctgtcaagggtaagccca

SEQ ID NO: 4193881 - DNA, 25 bp, Homo sapien
taccaatgacaggagttagggcaat

SEQ ID NO: 4193882 - DNA, 25 bp, Homo sapien
tctaccttcaaacagtcaagagcaa

SEQ ID NO: 4193883 - DNA, 25 bp, Homo sapien
gcaagcttctggaccgcagaccttg

SEQ ID NO: 4193884 - DNA, 25 bp, Homo sapien
ctttgaccttcttttagcaaagaga

SEQ ID NO: 4193885 - DNA, 25 bp, Homo sapien
catcctggttgcgaagcctttgacc

SEQ ID NO: 4193886 - DNA, 25 bp, Homo sapien
cagtgtgagcaaccccatcaggagt

SEQ ID NO: 4193887 - DNA, 25 bp, Homo sapien
ttctagaaacgagtgggcctgaggc

SEQ ID NO: 4193888 - DNA, 25 bp, Homo sapien
caaaaccaagtcctgttgtgacaga

SEQ ID NO: 4193889 - DNA, 25 bp, Homo sapien
tggagctccatcagtggcacacact

SEQ ID NO: 4193890 - DNA, 25 bp, Homo sapien
gtgtgtccttgcagagggatagcaa

SEQ ID NO: 4193891 - DNA, 25 bp, Homo sapien
tagcaagctcttgcatactgtggta

SEQ ID NO: 4193892 - DNA, 25 bp, Homo sapien
gatgcaagctggtggtagtggagat

SEQ ID NO: 4193893 - DNA, 25 bp, Homo sapien
tggcagtgcgtagtagacgaagagc

SEQ ID NO: 4193894 - DNA, 25 bp, Homo sapien
catgtgcggcaggtttctcagacaa

SEQ ID NO: 4193895 - DNA, 25 bp, Homo sapien
ggaccttcacctcggttgtcagtca

SEQ ID NO: 4193896 - DNA, 25 bp, Homo sapien
tggacttcaaggactctgcagttcc

SEQ ID NO: 4193897 - DNA, 25 bp, Homo sapien
gggatctcttatgcccatgtgcggc

SEQ ID NO: 4193898 - DNA, 25 bp, Homo sapien
catctcgggcaggtctggtccagca

SEQ ID NO: 4193899 - DNA, 25 bp, Homo sapien
atctcgggcaggtctggtccagcag

SEQ ID NO: 4193900 - DNA, 25 bp, Homo sapien
tccacgcagcggtttgtcgcgaggc

SEQ ID NO: 4193901 - DNA, 25 bp, Homo sapien
gccgcggtaacagggcttcgtcttc

SEQ ID NO: 4193902 - DNA, 25 bp, Homo sapien
tttgcagagccatgggcagcaggaa

SEQ ID NO: 4193903 - DNA, 25 bp, Homo sapien
aggctctgggcttgctgatccacgc

SEQ ID NO: 4193904 - DNA, 25 bp, Homo sapien
tcctatggtccgatatggagggcaa

SEQ ID NO: 4193905 - DNA, 25 bp, Homo sapien
tccgggcgcgtcgaagatcttgtac

SEQ ID NO: 4193906 - DNA, 25 bp, Homo sapien
ccagtaatccataagaacagcaggg

SEQ ID NO: 4193907 - DNA, 25 bp, Homo sapien
taaagagaacgcttgcagatccctc

SEQ ID NO: 4193908 - DNA, 25 bp, Homo sapien
gcatagggctcattcgttcaggtca

SEQ ID NO: 4193909 - DNA, 25 bp, Homo sapien
tcagtaagcatgaatggtgggcagc

SEQ ID NO: 4193910 - DNA, 25 bp, Homo sapien
cacagtccaaggcaggttgttaggc

SEQ ID NO: 4193911 - DNA, 25 bp, Homo sapien
gagaaacatcggtcaacaggaggga

SEQ ID NO: 4193912 - DNA, 25 bp, Homo sapien
agctgcagtggagcaaagagccccc

SEQ ID NO: 4193913 - DNA, 25 bp, Homo sapien
gagctgcagtggagcaaagagcccc

SEQ ID NO: 4193914 - DNA, 25 bp, Homo sapien
gctgcagtggagcaaagagccccca

SEQ ID NO: 4193915 - DNA, 25 bp, Homo sapien
ttgctgaagatggtaatggatgacg

SEQ ID NO: 4193916 - DNA, 25 bp, Homo sapien
tggatgacggagaagttcattgcag

SEQ ID NO: 4193917 - DNA, 25 bp, Homo sapien
ctcaaatataacactctgaaggaag

SEQ ID NO: 4193918 - DNA, 25 bp, Homo sapien
caggctaagatccataccttgctga

SEQ ID NO: 4193919 - DNA, 25 bp, Homo sapien
ggcacttgctgatgatcaagtttgc

SEQ ID NO: 4193920 - DNA, 25 bp, Homo sapien
gagtttggggcacttgctgatgatc

SEQ ID NO: 4193921 - DNA, 25 bp, Homo sapien
gatcaagtttgcctagcaggaggac

SEQ ID NO: 4193922 - DNA, 25 bp, Homo sapien
tccccaggacatttgtgagtttggg

SEQ ID NO: 4193923 - DNA, 25 bp, Homo sapien
ttgagctgcctcctctgctctttga

SEQ ID NO: 4193924 - DNA, 25 bp, Homo sapien
tgagctgcctcctctgctctttgaa

SEQ ID NO: 4193925 - DNA, 25 bp, Homo sapien
gagctgcctcctctgctctttgaac

SEQ ID NO: 4193926 - DNA, 25 bp, Homo sapien
aatcttgcagattgcgattgcggat

SEQ ID NO: 4193927 - DNA, 25 bp, Homo sapien
tgcgattgcggatgggctgttccat

SEQ ID NO: 4193928 - DNA, 25 bp, Homo sapien
attgcctaatggtgagagtaaatct

SEQ ID NO: 4193929 - DNA, 25 bp, Homo sapien
ctaagattgcctaatggtgagagta

SEQ ID NO: 4193930 - DNA, 25 bp, Homo sapien
tgaggctcttaatcccatgcaggct

SEQ ID NO: 4193931 - DNA, 25 bp, Homo sapien
gtgggagctgctgtgcaccccctgt

SEQ ID NO: 4193932 - DNA, 25 bp, Homo sapien
caaagaccctgtagaccccaagtgt

SEQ ID NO: 4193933 - DNA, 25 bp, Homo sapien
tgggtgccatcaagagtatctctcc

SEQ ID NO: 4193934 - DNA, 25 bp, Homo sapien
ccaaacttcgttgggatggatgcga

SEQ ID NO: 4193935 - DNA, 25 bp, Homo sapien
cttctgggtgcaccgttccagggcc

SEQ ID NO: 4193936 - DNA, 25 bp, Homo sapien
tgcattcccttcgaatcctgagacg

SEQ ID NO: 4193937 - DNA, 25 bp, Homo sapien
tacaaaagtcaacccggcatggcgg

SEQ ID NO: 4193938 - DNA, 25 bp, Homo sapien
attcgactcggcctctttaagagcc

SEQ ID NO: 4193939 - DNA, 25 bp, Homo sapien
agcctctgcgctccaacctttaaat

SEQ ID NO: 4193940 - DNA, 25 bp, Homo sapien
tggacgccgagtgggaattcgactc

SEQ ID NO: 4193941 - DNA, 25 bp, Homo sapien
gctggctttaaggtggacgccgagt

SEQ ID NO: 4193942 - DNA, 25 bp, Homo sapien
agcgcgccgcgcattccttatattg

SEQ ID NO: 4193943 - DNA, 25 bp, Homo sapien
tgctaaaaatagagcgccgctgcgg

SEQ ID NO: 4193944 - DNA, 25 bp, Homo sapien
tccttatattgccacagcgcctgct

SEQ ID NO: 4193945 - DNA, 25 bp, Homo sapien
cctcctagcctgcgccggtgaggag

SEQ ID NO: 4193946 - DNA, 25 bp, Homo sapien
gggtcttggtcgtggccgatttcac

SEQ ID NO: 4193947 - DNA, 25 bp, Homo sapien
gggcaaaacgccacgcacagccggt

SEQ ID NO: 4193948 - DNA, 25 bp, Homo sapien
gaacgcacaccgttacgcgggagcc

SEQ ID NO: 4193949 - DNA, 25 bp, Homo sapien
aaagggtctctctgagcggcgcgca

SEQ ID NO: 4193950 - DNA, 25 bp, Homo sapien
caggcagccaaggaactgtaattac

SEQ ID NO: 4193951 - DNA, 25 bp, Homo sapien
ccaggcagccaaggaactgtaatta

SEQ ID NO: 4193952 - DNA, 25 bp, Homo sapien
aagggttgtttatgaagcaggctgc

SEQ ID NO: 4193953 - DNA, 25 bp, Homo sapien
tttgtgctcttgtcttccccgcagg

SEQ ID NO: 4193954 - DNA, 25 bp, Homo sapien
tgaatttgtcaactccctggcggat

SEQ ID NO: 4193955 - DNA, 25 bp, Homo sapien
tgcatgagcccaggccctagttgtg

SEQ ID NO: 4193956 - DNA, 25 bp, Homo sapien
gatgagcaaatccacttcaagtgcc

SEQ ID NO: 4193957 - DNA, 25 bp, Homo sapien
gaaccgtatccgagaaagtgctttg

SEQ ID NO: 4193958 - DNA, 25 bp, Homo sapien
caggagaagctctaagaaccgtatc

SEQ ID NO: 4193959 - DNA, 25 bp, Homo sapien
tagcagctcaagtttcttccccggg

SEQ ID NO: 4193960 - DNA, 25 bp, Homo sapien
ccctggctggacttgtcactttata

SEQ ID NO: 4193961 - DNA, 25 bp, Homo sapien
aataccagtggctagagctaataat

SEQ ID NO: 4193962 - DNA, 25 bp, Homo sapien
cactttataagtagctcagacgaac

SEQ ID NO: 4193963 - DNA, 25 bp, Homo sapien
tcagacgaactgagtatgaaatacc

SEQ ID NO: 4193964 - DNA, 25 bp, Homo sapien
cattgattcagtactacagggctca

SEQ ID NO: 4193965 - DNA, 25 bp, Homo sapien
tttgtacatcaacgttccctgggct

SEQ ID NO: 4193966 - DNA, 25 bp, Homo sapien
tatggctacctgtcccatgcaggaa

SEQ ID NO: 4193967 - DNA, 25 bp, Homo sapien
gaagtcacgtgcctttagatcagag

SEQ ID NO: 4193968 - DNA, 25 bp, Homo sapien
tgcacaatgggcttacagaataggt

SEQ ID NO: 4193969 - DNA, 25 bp, Homo sapien
tatttgtactcttggcccccatctc

SEQ ID NO: 4193970 - DNA, 25 bp, Homo sapien
tgtcccactctatttgtactcttgg

SEQ ID NO: 4193971 - DNA, 25 bp, Homo sapien
gctgcacaatgggcttacagaatag

SEQ ID NO: 4193972 - DNA, 25 bp, Homo sapien
cattgaatgcatggcgagtgcagcg

SEQ ID NO: 4193973 - DNA, 25 bp, Homo sapien
cctctttgtcagacccactggctga

SEQ ID NO: 4193974 - DNA, 25 bp, Homo sapien
acctcatcacctctgcggaagcatg

SEQ ID NO: 4193975 - DNA, 25 bp, Homo sapien
acccactggctgactgcacagactt

SEQ ID NO: 4193976 - DNA, 25 bp, Homo sapien
ggaaccaactgcatcacacaggtag

SEQ ID NO: 4193977 - DNA, 25 bp, Homo sapien
tcatgctggccagctaaatggccct

SEQ ID NO: 4193978 - DNA, 25 bp, Homo sapien
gagtctctgggaataggtggaacca

SEQ ID NO: 4193979 - DNA, 25 bp, Homo sapien
atcacacaggtagcgggaatgcttc

SEQ ID NO: 4193980 - DNA, 25 bp, Homo sapien
gcaaaatacacattgctgcttcatg

SEQ ID NO: 4193981 - DNA, 25 bp, Homo sapien
gcttcatgactcctacaagaggaat

SEQ ID NO: 4193982 - DNA, 25 bp, Homo sapien
cattgctgcttcatgactcctacaa

SEQ ID NO: 4193983 - DNA, 25 bp, Homo sapien
aataataaggattggactagaatat

SEQ ID NO: 4193984 - DNA, 25 bp, Homo sapien
ttccttctcttaaagtaatcctata

SEQ ID NO: 4193985 - DNA, 25 bp, Homo sapien
ccttctcttaaagtaatcctatact

SEQ ID NO: 4193986 - DNA, 25 bp, Homo sapien
aaactgtgaagttatggattacaaa

SEQ ID NO: 4193987 - DNA, 25 bp, Homo sapien
gtgaagttatggattacaaagtaag

SEQ ID NO: 4193988 - DNA, 25 bp, Homo sapien
gagagcttctaactgcagatgcagg

SEQ ID NO: 4193989 - DNA, 25 bp, Homo sapien
gtgagaagctgcgtcctgtcgtcat

SEQ ID NO: 4193990 - DNA, 25 bp, Homo sapien
aaggctgcaaacagttgggtgagaa

SEQ ID NO: 4193991 - DNA, 25 bp, Homo sapien
agggttggctctgccgccttactcc

SEQ ID NO: 4193992 - DNA, 25 bp, Homo sapien
gcagagctttactcactgttctaac

SEQ ID NO: 4193993 - DNA, 25 bp, Homo sapien
agcagagctttactcactgttctaa

SEQ ID NO: 4193994 - DNA, 25 bp, Homo sapien
tggcaaactacatgcaaacaggata

SEQ ID NO: 4193995 - DNA, 25 bp, Homo sapien
aagcagagctttactcactgttcta

SEQ ID NO: 4193996 - DNA, 25 bp, Homo sapien
aaggcagacaactcttcgcactgcc

SEQ ID NO: 4193997 - DNA, 25 bp, Homo sapien
ctaaggcagacaactcttcgcactg

SEQ ID NO: 4193998 - DNA, 25 bp, Homo sapien
cagacaactcttcgcactgccttgg

SEQ ID NO: 4193999 - DNA, 25 bp, Homo sapien
ggcagacaactcttcgcactgcctt

SEQ ID NO: 4194000 - DNA, 25 bp, Homo sapien
gaatcacggtgttccgccagttcaa

SEQ ID NO: 4194001 - DNA, 25 bp, Homo sapien
ccagaactgctcatctcatggaatc

SEQ ID NO: 4194002 - DNA, 25 bp, Homo sapien
tacagctaaggttgtcccttaactc

SEQ ID NO: 4194003 - DNA, 25 bp, Homo sapien
cgccagttcaatctggtaagcccag

SEQ ID NO: 4194004 - DNA, 25 bp, Homo sapien
tccttgctgtccaaattcccaaagc

SEQ ID NO: 4194005 - DNA, 25 bp, Homo sapien
gaggagtggcgatgaggggtccttc

SEQ ID NO: 4194006 - DNA, 25 bp, Homo sapien
ttgctgtccaaattcccaaagcact

SEQ ID NO: 4194007 - DNA, 25 bp, Homo sapien
agcaggaggagtggcgatgaggggt

SEQ ID NO: 4194008 - DNA, 25 bp, Homo sapien
cttgggtagacagtaggacagaggt

SEQ ID NO: 4194009 - DNA, 25 bp, Homo sapien
agtggcaggcctcacgaaggacata

SEQ ID NO: 4194010 - DNA, 25 bp, Homo sapien
cacacaggacctagaggactgcagt

SEQ ID NO: 4194011 - DNA, 25 bp, Homo sapien
cagaggtgatgtgggcactatgcca

SEQ ID NO: 4194012 - DNA, 25 bp, Homo sapien
gacaaagggccaggccttgtcttct

SEQ ID NO: 4194013 - DNA, 25 bp, Homo sapien
gacgctccaacgtgtctgctgtctg

SEQ ID NO: 4194014 - DNA, 25 bp, Homo sapien
tgctcagagacgctccaacgtgtct

SEQ ID NO: 4194015 - DNA, 25 bp, Homo sapien
ccaaatgcaggagtgatactggcag

SEQ ID NO: 4194016 - DNA, 25 bp, Homo sapien
gactggcccctcaactggaaatcct

SEQ ID NO: 4194017 - DNA, 25 bp, Homo sapien
gacagcttgctgaccagggcataga

SEQ ID NO: 4194018 - DNA, 25 bp, Homo sapien
acaacacagtgtggttccagagcca

SEQ ID NO: 4194019 - DNA, 25 bp, Homo sapien
gagtatgtgtgtacagtcaggccag

SEQ ID NO: 4194020 - DNA, 25 bp, Homo sapien
cagtataggaccaggttccagctgt

SEQ ID NO: 4194021 - DNA, 25 bp, Homo sapien
tcctttggggcagtataggaccagg

SEQ ID NO: 4194022 - DNA, 25 bp, Homo sapien
tcgagtggggatttcagctcctttg

SEQ ID NO: 4194023 - DNA, 25 bp, Homo sapien
ccccggaatctggttccagcatctc

SEQ ID NO: 4194024 - DNA, 25 bp, Homo sapien
ttcaggtaggagtcttcaatggtgg

SEQ ID NO: 4194025 - DNA, 25 bp, Homo sapien
tggtggggtcatagtcaggcacaaa

SEQ ID NO: 4194026 - DNA, 25 bp, Homo sapien
ggatggtgagggcacttttgcccac

SEQ ID NO: 4194027 - DNA, 25 bp, Homo sapien
ggcccattgattgtcaatctccgta

SEQ ID NO: 4194028 - DNA, 25 bp, Homo sapien
aagaagagaaactgcagagttgaga

SEQ ID NO: 4194029 - DNA, 25 bp, Homo sapien
agagaaactgcagagttgagatccc

SEQ ID NO: 4194030 - DNA, 25 bp, Homo sapien
tgagtttggaagaagagaaactgca

SEQ ID NO: 4194031 - DNA, 25 bp, Homo sapien
ctgagtttggaagaagagaaactgc

SEQ ID NO: 4194032 - DNA, 25 bp, Homo sapien
catcatcgtgctgccacgtttttat

SEQ ID NO: 4194033 - DNA, 25 bp, Homo sapien
ctcatcatcgtgctgccacgttttt

SEQ ID NO: 4194034 - DNA, 25 bp, Homo sapien
tcgtgctgccacgtttttattcttt

SEQ ID NO: 4194035 - DNA, 25 bp, Homo sapien
catcgtgctgccacgtttttattct

SEQ ID NO: 4194036 - DNA, 25 bp, Homo sapien
aagaaacaggtttgcaagaaagcag

SEQ ID NO: 4194037 - DNA, 25 bp, Homo sapien
gaaacaggtttgcaagaaagcaggc

SEQ ID NO: 4194038 - DNA, 25 bp, Homo sapien
aaacaggtttgcaagaaagcaggca

SEQ ID NO: 4194039 - DNA, 25 bp, Homo sapien
acaggtttgcaagaaagcaggcagc

SEQ ID NO: 4194040 - DNA, 25 bp, Homo sapien
tcttgtctcttaggttctgggagga

SEQ ID NO: 4194041 - DNA, 25 bp, Homo sapien
gctcttgtctcttaggttctgggag

SEQ ID NO: 4194042 - DNA, 25 bp, Homo sapien
cagctcttgtctcttaggttctggg

SEQ ID NO: 4194043 - DNA, 25 bp, Homo sapien
cttgtctcttaggttctgggaggac

SEQ ID NO: 4194044 - DNA, 25 bp, Homo sapien
gaggaagagaggctccgagggttgg

SEQ ID NO: 4194045 - DNA, 25 bp, Homo sapien
atgaggatcccgaacccttgcagga

SEQ ID NO: 4194046 - DNA, 25 bp, Homo sapien
ggatcccgaacccttgcaggaaaga

SEQ ID NO: 4194047 - DNA, 25 bp, Homo sapien
agtgagatgaggatcccgaaccctt

SEQ ID NO: 4194048 - DNA, 25 bp, Homo sapien
ggagatgggacagccgaagcaaacc

SEQ ID NO: 4194049 - DNA, 25 bp, Homo sapien
tgggacagccgaagcaaaccccaca

SEQ ID NO: 4194050 - DNA, 25 bp, Homo sapien
gatgggacagccgaagcaaacccca

SEQ ID NO: 4194051 - DNA, 25 bp, Homo sapien
atggagatgggacagccgaagcaaa

SEQ ID NO: 4194052 - DNA, 25 bp, Homo sapien
aaggcccgtgatccccagaactggt

SEQ ID NO: 4194053 - DNA, 25 bp, Homo sapien
ggataagttttcacaaggcccgtga

SEQ ID NO: 4194054 - DNA, 25 bp, Homo sapien
tgatccccagaactggtatacaaac

SEQ ID NO: 4194055 - DNA, 25 bp, Homo sapien
tacaaactgcatatgtcggtgcaca

SEQ ID NO: 4194056 - DNA, 25 bp, Homo sapien
ggctaaagtcctgtagtgggcacca

SEQ ID NO: 4194057 - DNA, 25 bp, Homo sapien
acaccctggcttaaggaaaacatca

SEQ ID NO: 4194058 - DNA, 25 bp, Homo sapien
ctcatgctggaggctacaccctgca

SEQ ID NO: 4194059 - DNA, 25 bp, Homo sapien
atcaggggagaagtgccggccatca

SEQ ID NO: 4194060 - DNA, 25 bp, Homo sapien
tgcactgttcctagaaaaagggctg

SEQ ID NO: 4194061 - DNA, 25 bp, Homo sapien
cgtgcactgttcctagaaaaagggc

SEQ ID NO: 4194062 - DNA, 25 bp, Homo sapien
ccgtgcactgttcctagaaaaaggg

SEQ ID NO: 4194063 - DNA, 25 bp, Homo sapien
tcaccgtgcactgttcctagaaaaa

SEQ ID NO: 4194064 - DNA, 25 bp, Homo sapien
gcctagaatgttttatgtatctcta

SEQ ID NO: 4194065 - DNA, 25 bp, Homo sapien
attcacaaacccgtcatgggaggca

SEQ ID NO: 4194066 - DNA, 25 bp, Homo sapien
tctctaattcacaaacccgtcatgg

SEQ ID NO: 4194067 - DNA, 25 bp, Homo sapien
ccagccccatgcctagaatgtttta

SEQ ID NO: 4194068 - DNA, 25 bp, Homo sapien
ctggccaaaaagtagccccgaacag

SEQ ID NO: 4194069 - DNA, 25 bp, Homo sapien
ggtaacggcaggtctgtgccagtca

SEQ ID NO: 4194070 - DNA, 25 bp, Homo sapien
tctggccagccatgtagttgtcccc

SEQ ID NO: 4194071 - DNA, 25 bp, Homo sapien
taccctcgcagtccaggacactttc

SEQ ID NO: 4194072 - DNA, 25 bp, Homo sapien
ccagcaggactgttagctcccaggg

SEQ ID NO: 4194073 - DNA, 25 bp, Homo sapien
tgtcccgtgagaggctgcataagct

SEQ ID NO: 4194074 - DNA, 25 bp, Homo sapien
ctctagggctgctcgaagggtccca

SEQ ID NO: 4194075 - DNA, 25 bp, Homo sapien
gtggcccagtccgagctgtcccgtg

SEQ ID NO: 4194076 - DNA, 25 bp, Homo sapien
tagggctgctcgaagggtcccagct

SEQ ID NO: 4194077 - DNA, 25 bp, Homo sapien
tctttgacgcgcaggataagctggt

SEQ ID NO: 4194078 - DNA, 25 bp, Homo sapien
ccgtgcgcatgtattgctcccgcat

SEQ ID NO: 4194079 - DNA, 25 bp, Homo sapien
agctggccttgtcagtgacggagta

SEQ ID NO: 4194080 - DNA, 25 bp, Homo sapien
agcggtccacgtgctcaaagctggc

SEQ ID NO: 4194081 - DNA, 25 bp, Homo sapien
caaatcgaccttgttggccacgagg

SEQ ID NO: 4194082 - DNA, 25 bp, Homo sapien
cacgaggatcatcgggaatgactcc

SEQ ID NO: 4194083 - DNA, 25 bp, Homo sapien
tccctggtgatcttcctcaagtgca

SEQ ID NO: 4194084 - DNA, 25 bp, Homo sapien
tcttcctcaagtgcatcaaatcgac

SEQ ID NO: 4194085 - DNA, 25 bp, Homo sapien
ttggacaccaaatccggccatggca

SEQ ID NO: 4194086 - DNA, 25 bp, Homo sapien
accaaatccggccatggcagatgcc

SEQ ID NO: 4194087 - DNA, 25 bp, Homo sapien
acaccaaatccggccatggcagatg

SEQ ID NO: 4194088 - DNA, 25 bp, Homo sapien
tggccctggtaaggggtgctgaggt

SEQ ID NO: 4194089 - DNA, 25 bp, Homo sapien
gatacgactgtggtggccccacaga

SEQ ID NO: 4194090 - DNA, 25 bp, Homo sapien
tgcagacagcgggagatacgactgt

SEQ ID NO: 4194091 - DNA, 25 bp, Homo sapien
ggccagatctgcaccaagcctcggg

SEQ ID NO: 4194092 - DNA, 25 bp, Homo sapien
tttccagggccagatctgcaccaag

SEQ ID NO: 4194093 - DNA, 25 bp, Homo sapien
cacgttcaatggtgagaaatcatca

SEQ ID NO: 4194094 - DNA, 25 bp, Homo sapien
gccatgtttacacaaggtttttgtc

SEQ ID NO: 4194095 - DNA, 25 bp, Homo sapien
tttgtctgcacgttcaatggtgaga

SEQ ID NO: 4194096 - DNA, 25 bp, Homo sapien
cacaaggtttttgtctgcacgttca

SEQ ID NO: 4194097 - DNA, 25 bp, Homo sapien
ggcacagagatatttaatagctccc

SEQ ID NO: 4194098 - DNA, 25 bp, Homo sapien
aggttggaaagtgttactaatggct

SEQ ID NO: 4194099 - DNA, 25 bp, Homo sapien
cctcaagcatcatttagggcttttc

SEQ ID NO: 4194100 - DNA, 25 bp, Homo sapien
ctgttacacccttaaaaatgcccag

SEQ ID NO: 4194101 - DNA, 25 bp, Homo sapien
aaagtggcacagagatcctcaaagc

SEQ ID NO: 4194102 - DNA, 25 bp, Homo sapien
caaagtggcacagagatcctcaaag

SEQ ID NO: 4194103 - DNA, 25 bp, Homo sapien
aagtggcacagagatcctcaaagcc

SEQ ID NO: 4194104 - DNA, 25 bp, Homo sapien
ctaattactctaacgaggtcatgga

SEQ ID NO: 4194105 - DNA, 25 bp, Homo sapien
catggaaggctttgtcgacattgag

SEQ ID NO: 4194106 - DNA, 25 bp, Homo sapien
tgtcgacattgagaggtgggtcctt

SEQ ID NO: 4194107 - DNA, 25 bp, Homo sapien
ttactctaacgaggtcatggaaggc

SEQ ID NO: 4194108 - DNA, 25 bp, Homo sapien
cctgtggcccggtctccccgccatt

SEQ ID NO: 4194109 - DNA, 25 bp, Homo sapien
ttgtgggtgcctgtggcccggtctc

SEQ ID NO: 4194110 - DNA, 25 bp, Homo sapien
tgtggcccggtctccccgccatttg

SEQ ID NO: 4194111 - DNA, 25 bp, Homo sapien
gtgggtgcctgtggcccggtctccc

SEQ ID NO: 4194112 - DNA, 25 bp, Homo sapien
aaatggtttcagtgcagttaggtgg

SEQ ID NO: 4194113 - DNA, 25 bp, Homo sapien
aaagcccgtgccctctgggcaaagc

SEQ ID NO: 4194114 - DNA, 25 bp, Homo sapien
ggaggaaccgggttgaatcaacaca

SEQ ID NO: 4194115 - DNA, 25 bp, Homo sapien
aaacaacacacccaccgagagaggg

SEQ ID NO: 4194116 - DNA, 25 bp, Homo sapien
tcagttgactccaagggaagatggc

SEQ ID NO: 4194117 - DNA, 25 bp, Homo sapien
catttctaggccatgtgtagggtct

SEQ ID NO: 4194118 - DNA, 25 bp, Homo sapien
tgcagaaggtatatgagagccacac

SEQ ID NO: 4194119 - DNA, 25 bp, Homo sapien
tattcgtatcagagaggcaccaagc

SEQ ID NO: 4194120 - DNA, 25 bp, Homo sapien
cttttctttggtgcagcgttgttcc

SEQ ID NO: 4194121 - DNA, 25 bp, Homo sapien
ttggtgcagcgttgttcctgttgtc

SEQ ID NO: 4194122 - DNA, 25 bp, Homo sapien
ttctttggtgcagcgttgttcctgt

SEQ ID NO: 4194123 - DNA, 25 bp, Homo sapien
ctttggtgcagcgttgttcctgttg

SEQ ID NO: 4194124 - DNA, 25 bp, Homo sapien
agaacccgggtgtcttggcatccag

SEQ ID NO: 4194125 - DNA, 25 bp, Homo sapien
caccatggagttcaacgtgggccaa

SEQ ID NO: 4194126 - DNA, 25 bp, Homo sapien
cagtgctggtgatcttgccgaggta

SEQ ID NO: 4194127 - DNA, 25 bp, Homo sapien
gaaactttgaagtgcctcacctgga

SEQ ID NO: 4194128 - DNA, 25 bp, Homo sapien
ttggctcctcggtcatggtgtggcg

SEQ ID NO: 4194129 - DNA, 25 bp, Homo sapien
gaacatgaggatgtcaaacagccag

SEQ ID NO: 4194130 - DNA, 25 bp, Homo sapien
tgtggcgtggccaaccaggtttccc

SEQ ID NO: 4194131 - DNA, 25 bp, Homo sapien
aaacagccagaagtcccagttggct

SEQ ID NO: 4194132 - DNA, 25 bp, Homo sapien
taagagaaaccatccaggtgtcccg

SEQ ID NO: 4194133 - DNA, 25 bp, Homo sapien
gctgccaatggagggaacctgtctg

SEQ ID NO: 4194134 - DNA, 25 bp, Homo sapien
tgtcccgagtggcaaagtgcacagg

SEQ ID NO: 4194135 - DNA, 25 bp, Homo sapien
cctctaaggagggtgtcaaacagtg

SEQ ID NO: 4194136 - DNA, 25 bp, Homo sapien
ctagttttgtaccagggtgttgagg

SEQ ID NO: 4194137 - DNA, 25 bp, Homo sapien
gcgttacacgcttagtcacgctggg

SEQ ID NO: 4194138 - DNA, 25 bp, Homo sapien
agatgagggagtcatgtgcgttaca

SEQ ID NO: 4194139 - DNA, 25 bp, Homo sapien
accagggtgttgagggcccgagagg

SEQ ID NO: 4194140 - DNA, 25 bp, Homo sapien
gcttcacccgagcttaggtccgcat

SEQ ID NO: 4194141 - DNA, 25 bp, Homo sapien
tgtctcccaagctcgaggaccagga

SEQ ID NO: 4194142 - DNA, 25 bp, Homo sapien
agtcttgcccttcccgagagcttca

SEQ ID NO: 4194143 - DNA, 25 bp, Homo sapien
tcagggttctctgcgacggagagca

SEQ ID NO: 4194144 - DNA, 25 bp, Homo sapien
acgaaggtacagagctcgggcagca

SEQ ID NO: 4194145 - DNA, 25 bp, Homo sapien
gagccccaggtagccagctaggtag

SEQ ID NO: 4194146 - DNA, 25 bp, Homo sapien
cattgtcaaggaattcgaaggcggc

SEQ ID NO: 4194147 - DNA, 25 bp, Homo sapien
gcgccgagcagcaaccaggttatgc

SEQ ID NO: 4194148 - DNA, 25 bp, Homo sapien
gcacccagttagatggggacaggca

SEQ ID NO: 4194149 - DNA, 25 bp, Homo sapien
cagttagatggggacaggcatgaaa

SEQ ID NO: 4194150 - DNA, 25 bp, Homo sapien
agccccagtgcgcacccagttagat

SEQ ID NO: 4194151 - DNA, 25 bp, Homo sapien
gggacaggcatgaaaggcagcgagt

SEQ ID NO: 4194152 - DNA, 25 bp, Homo sapien
gagtcacagaatctagatgcacaga

SEQ ID NO: 4194153 - DNA, 25 bp, Homo sapien
gatgcacagatcagagggagaaact

SEQ ID NO: 4194154 - DNA, 25 bp, Homo sapien
gagaaactgcggacagaggaaccac

SEQ ID NO: 4194155 - DNA, 25 bp, Homo sapien
ggaagcacacccaaacatactgtat

SEQ ID NO: 4194156 - DNA, 25 bp, Homo sapien
atgccccaagtcccctgaacatgag

SEQ ID NO: 4194157 - DNA, 25 bp, Homo sapien
ccaagtcccctgaacatgaggctgg

SEQ ID NO: 4194158 - DNA, 25 bp, Homo sapien
ccccaagtcccctgaacatgaggct

SEQ ID NO: 4194159 - DNA, 25 bp, Homo sapien
aaaacactgttcaccaaaacagcag

SEQ ID NO: 4194160 - DNA, 25 bp, Homo sapien
cttgttggcccactcgacccgctcc

SEQ ID NO: 4194161 - DNA, 25 bp, Homo sapien
ccactcgacccgctccacgtccggg

SEQ ID NO: 4194162 - DNA, 25 bp, Homo sapien
ctcgacccgctccacgtccgggaag

SEQ ID NO: 4194163 - DNA, 25 bp, Homo sapien
ttggcccactcgacccgctccacgt

SEQ ID NO: 4194164 - DNA, 25 bp, Homo sapien
catcctccatgaagtcgggattcct

SEQ ID NO: 4194165 - DNA, 25 bp, Homo sapien
tcggccaagggtcatcatccagcag

SEQ ID NO: 4194166 - DNA, 25 bp, Homo sapien
gagggctcggccaagggtcatcatc

SEQ ID NO: 4194167 - DNA, 25 bp, Homo sapien
ccatgaagtcgggattcctgctggg

SEQ ID NO: 4194168 - DNA, 25 bp, Homo sapien
tgtgctgatttgggaatgaagtgca

SEQ ID NO: 4194169 - DNA, 25 bp, Homo sapien
tgctgatttgggaatgaagtgcagg

SEQ ID NO: 4194170 - DNA, 25 bp, Homo sapien
ctgatttgggaatgaagtgcaggac

SEQ ID NO: 4194171 - DNA, 25 bp, Homo sapien
gctgatttgggaatgaagtgcagga

SEQ ID NO: 4194172 - DNA, 25 bp, Homo sapien
ggcagcaggaccccaagatttggtg

SEQ ID NO: 4194173 - DNA, 25 bp, Homo sapien
gtcaaacatctgataactacagccg

SEQ ID NO: 4194174 - DNA, 25 bp, Homo sapien
catctgataactacagccgtggttc

SEQ ID NO: 4194175 - DNA, 25 bp, Homo sapien
aaacatctgataactacagccgtgg

SEQ ID NO: 4194176 - DNA, 25 bp, Homo sapien
ctgataactacagccgtggttccca

SEQ ID NO: 4194177 - DNA, 25 bp, Homo sapien
ctcccggaacttgctttccatgatc

SEQ ID NO: 4194178 - DNA, 25 bp, Homo sapien
ggctcaagtttctcccggaacttgc

SEQ ID NO: 4194179 - DNA, 25 bp, Homo sapien
tttctcccggaacttgctttccatg

SEQ ID NO: 4194180 - DNA, 25 bp, Homo sapien
gctcaagtttctcccggaacttgct

SEQ ID NO: 4194181 - DNA, 25 bp, Homo sapien
ggagatgatggtacagggatgtggg

SEQ ID NO: 4194182 - DNA, 25 bp, Homo sapien
caggcttccttggaacctggggaga

SEQ ID NO: 4194183 - DNA, 25 bp, Homo sapien
ctgtaaggtccagtgggatctctgc

SEQ ID NO: 4194184 - DNA, 25 bp, Homo sapien
tgggggaagggtgtctactgaggct

SEQ ID NO: 4194185 - DNA, 25 bp, Homo sapien
agtcacacgtcttcggttgcacgta

SEQ ID NO: 4194186 - DNA, 25 bp, Homo sapien
gtgtgccttgacaccgttgaccctg

SEQ ID NO: 4194187 - DNA, 25 bp, Homo sapien
cacgtattagtgtgtgccttgacac

SEQ ID NO: 4194188 - DNA, 25 bp, Homo sapien
tcggttgcacgtattagtgtgtgcc

SEQ ID NO: 4194189 - DNA, 25 bp, Homo sapien
ggcaaaggtaacaaggcgtcaggct

SEQ ID NO: 4194190 - DNA, 25 bp, Homo sapien
ccttgagggtaaagatcagcagatc

SEQ ID NO: 4194191 - DNA, 25 bp, Homo sapien
cccagaatgggtgcccttgagggta

SEQ ID NO: 4194192 - DNA, 25 bp, Homo sapien
caaggcgtcaggcttcagcacagaa

SEQ ID NO: 4194193 - DNA, 25 bp, Homo sapien
ggtaaacacgctgcccacttttcca

SEQ ID NO: 4194194 - DNA, 25 bp, Homo sapien
caccccacgataccctgaagatgaa

SEQ ID NO: 4194195 - DNA, 25 bp, Homo sapien
caggtgtctttcatggggacacaga

SEQ ID NO: 4194196 - DNA, 25 bp, Homo sapien
gggctcttggtaaacacgctgccca

SEQ ID NO: 4194197 - DNA, 25 bp, Homo sapien
tctgcagctccacactgatctcaca

SEQ ID NO: 4194198 - DNA, 25 bp, Homo sapien
tcccgttcacaccagcctgaatctt

SEQ ID NO: 4194199 - DNA, 25 bp, Homo sapien
tggatcccgttcacaccagcctgaa

SEQ ID NO: 4194200 - DNA, 25 bp, Homo sapien
ctgcagctccacactgatctcacag

SEQ ID NO: 4194201 - DNA, 25 bp, Homo sapien
cttgtccactaggaggggctccagg

SEQ ID NO: 4194202 - DNA, 25 bp, Homo sapien
aagaacacagtcacggctcccacaa

SEQ ID NO: 4194203 - DNA, 25 bp, Homo sapien
aagggcttgtccactaggaggggct

SEQ ID NO: 4194204 - DNA, 25 bp, Homo sapien
agaacacagtcacggctcccacaaa

SEQ ID NO: 4194205 - DNA, 25 bp, Homo sapien
ttcggaggaaagcaggcagagcacc

SEQ ID NO: 4194206 - DNA, 25 bp, Homo sapien
ggttcggaggaaagcaggcagagca

SEQ ID NO: 4194207 - DNA, 25 bp, Homo sapien
gtgggggttcggaggaaagcaggca

SEQ ID NO: 4194208 - DNA, 25 bp, Homo sapien
cggaggaaagcaggcagagcaccct

SEQ ID NO: 4194209 - DNA, 25 bp, Homo sapien
gagcctcacacccatgtgaatggag

SEQ ID NO: 4194210 - DNA, 25 bp, Homo sapien
tcacacccatgtgaatggagaaccc

SEQ ID NO: 4194211 - DNA, 25 bp, Homo sapien
cacccatgtgaatggagaacccagc

SEQ ID NO: 4194212 - DNA, 25 bp, Homo sapien
gggctgagaaccccctgccaagagc

SEQ ID NO: 4194213 - DNA, 25 bp, Homo sapien
tcaggggcagagggaagctattagg

SEQ ID NO: 4194214 - DNA, 25 bp, Homo sapien
aggccagtccagttgatctgtaggt

SEQ ID NO: 4194215 - DNA, 25 bp, Homo sapien
caggccagtccagttgatctgtagg

SEQ ID NO: 4194216 - DNA, 25 bp, Homo sapien
ggccagtccagttgatctgtaggtg

SEQ ID NO: 4194217 - DNA, 25 bp, Homo sapien
aggggtggcactgcctcccccatgc

SEQ ID NO: 4194218 - DNA, 25 bp, Homo sapien
gaggggtggcactgcctcccccatg

SEQ ID NO: 4194219 - DNA, 25 bp, Homo sapien
tgggtggcaatgaggtcctccagta

SEQ ID NO: 4194220 - DNA, 25 bp, Homo sapien
aatgaggtcctccagtaagctgtct

SEQ ID NO: 4194221 - DNA, 25 bp, Homo sapien
acagtcacacggttgggcagcacca

SEQ ID NO: 4194222 - DNA, 25 bp, Homo sapien
cagagggaagcgcaggttggtcaga

SEQ ID NO: 4194223 - DNA, 25 bp, Homo sapien
tttgacactacctcccaagtgggat

SEQ ID NO: 4194224 - DNA, 25 bp, Homo sapien
caagtaagtttagaatgcagtaaat

SEQ ID NO: 4194225 - DNA, 25 bp, Homo sapien
taaatattcatggtcagttgtcaca

SEQ ID NO: 4194226 - DNA, 25 bp, Homo sapien
caagtgggatacaccccaaggacaa

SEQ ID NO: 4194227 - DNA, 25 bp, Homo sapien
gatgctcaccttggcgtagggatct

SEQ ID NO: 4194228 - DNA, 25 bp, Homo sapien
ggaaatgctgtaggccgatgctcac

SEQ ID NO: 4194229 - DNA, 25 bp, Homo sapien
tagatggtcctactccggaaatgct

SEQ ID NO: 4194230 - DNA, 25 bp, Homo sapien
tagggatctgacttgcctcggagcc

SEQ ID NO: 4194231 - DNA, 25 bp, Homo sapien
tggaaggaaaaagaggtgtcttgac

SEQ ID NO: 4194232 - DNA, 25 bp, Homo sapien
ctggaaggaaaaagaggtgtcttga

SEQ ID NO: 4194233 - DNA, 25 bp, Homo sapien
gtccagggacttcgtacaccatgaa

SEQ ID NO: 4194234 - DNA, 25 bp, Homo sapien
ggaagtcatccctgtcggtatcctc

SEQ ID NO: 4194235 - DNA, 25 bp, Homo sapien
ctgtccagggacttcgtacaccatg

SEQ ID NO: 4194236 - DNA, 25 bp, Homo sapien
atcctcatcatacaggtctacctcc

SEQ ID NO: 4194237 - DNA, 25 bp, Homo sapien
ctgttggtcatgacatctccaaggc

SEQ ID NO: 4194238 - DNA, 25 bp, Homo sapien
ccactctgttggtcatgacatctcc

SEQ ID NO: 4194239 - DNA, 25 bp, Homo sapien
gttggtcatgacatctccaaggcag

SEQ ID NO: 4194240 - DNA, 25 bp, Homo sapien
cactctgttggtcatgacatctcca

SEQ ID NO: 4194241 - DNA, 25 bp, Homo sapien
cgagggttgcaagcaccaactgtac

SEQ ID NO: 4194242 - DNA, 25 bp, Homo sapien
tgaaactcccccgagggttgcaagc

SEQ ID NO: 4194243 - DNA, 25 bp, Homo sapien
ccccgagggttgcaagcaccaactg

SEQ ID NO: 4194244 - DNA, 25 bp, Homo sapien
gaaactcccccgagggttgcaagca

SEQ ID NO: 4194245 - DNA, 25 bp, Homo sapien
agcaatgaaagccactccagccgca

SEQ ID NO: 4194246 - DNA, 25 bp, Homo sapien
gccgcccgctggttgtgtcattcag

SEQ ID NO: 4194247 - DNA, 25 bp, Homo sapien
tgcagccgcccgctggttgtgtcat

SEQ ID NO: 4194248 - DNA, 25 bp, Homo sapien
gtcagtaagcaatgaaagccactcc

SEQ ID NO: 4194249 - DNA, 25 bp, Homo sapien
ctccacctttctgcaagggagccct

SEQ ID NO: 4194250 - DNA, 25 bp, Homo sapien
tccacctttctgcaagggagccctt

SEQ ID NO: 4194251 - DNA, 25 bp, Homo sapien
ccacctttctgcaagggagcccttg

SEQ ID NO: 4194252 - DNA, 25 bp, Homo sapien
gaagaccacgagaatggcagtggaa

SEQ ID NO: 4194253 - DNA, 25 bp, Homo sapien
caagaagaccacgagaatggcagtg

SEQ ID NO: 4194254 - DNA, 25 bp, Homo sapien
cggcaagttgcaggcactctccaag

SEQ ID NO: 4194255 - DNA, 25 bp, Homo sapien
caagttgcaggcactctccaagaag

SEQ ID NO: 4194256 - DNA, 25 bp, Homo sapien
ttcaccattcaggtagtcaaaaggg

SEQ ID NO: 4194257 - DNA, 25 bp, Homo sapien
ttttggctcgatattcaccattcag

SEQ ID NO: 4194258 - DNA, 25 bp, Homo sapien
cattcaggtagtcaaaagggtttct

SEQ ID NO: 4194259 - DNA, 25 bp, Homo sapien
cctggagagttttttggctcgatat

SEQ ID NO: 4194260 - DNA, 25 bp, Homo sapien
gggccacccagttacttctctttga

SEQ ID NO: 4194261 - DNA, 25 bp, Homo sapien
gtgaaggtggcatagtcaatatcag

SEQ ID NO: 4194262 - DNA, 25 bp, Homo sapien
caaatccataacagtgaaggtggca

SEQ ID NO: 4194263 - DNA, 25 bp, Homo sapien
cacccagttacttctctttgagaga

SEQ ID NO: 4194264 - DNA, 25 bp, Homo sapien
cttgcctacagatagtttgacatag

SEQ ID NO: 4194265 - DNA, 25 bp, Homo sapien
atagtttgacataggaagaagggtc

SEQ ID NO: 4194266 - DNA, 25 bp, Homo sapien
cagatagtttgacataggaagaagg

SEQ ID NO: 4194267 - DNA, 25 bp, Homo sapien
cctacagatagtttgacataggaag

SEQ ID NO: 4194268 - DNA, 25 bp, Homo sapien
acacagggtccttgttgtggggaca

SEQ ID NO: 4194269 - DNA, 25 bp, Homo sapien
ccacacagggtccttgttgtgggga

SEQ ID NO: 4194270 - DNA, 25 bp, Homo sapien
gctccacacagggtccttgttgtgg

SEQ ID NO: 4194271 - DNA, 25 bp, Homo sapien
ctggctccacacagggtccttgttg

SEQ ID NO: 4194272 - DNA, 25 bp, Homo sapien
cagatggagccgctcagtggccaca

SEQ ID NO: 4194273 - DNA, 25 bp, Homo sapien
cttcagatggagccgctcagtggcc

SEQ ID NO: 4194274 - DNA, 25 bp, Homo sapien
ttcagatggagccgctcagtggcca

SEQ ID NO: 4194275 - DNA, 25 bp, Homo sapien
tcagatggagccgctcagtggccac

SEQ ID NO: 4194276 - DNA, 25 bp, Homo sapien
tatgagctagtctgtcaaatgccca

SEQ ID NO: 4194277 - DNA, 25 bp, Homo sapien
gaacctgctcaaggtgcacttcaag

SEQ ID NO: 4194278 - DNA, 25 bp, Homo sapien
ggctgactttaaacgctgccaggag

SEQ ID NO: 4194279 - DNA, 25 bp, Homo sapien
tgtcctgtgtagataggctgctctg

SEQ ID NO: 4194280 - DNA, 25 bp, Homo sapien
ccaagtttgggtttacttcagtctg

SEQ ID NO: 4194281 - DNA, 25 bp, Homo sapien
catctggtcctattctgaaaactag

SEQ ID NO: 4194282 - DNA, 25 bp, Homo sapien
gaaaactagaatgggatcaggccag

SEQ ID NO: 4194283 - DNA, 25 bp, Homo sapien
gggcatctggtcctattctgaaaac

SEQ ID NO: 4194284 - DNA, 25 bp, Homo sapien
cagtggtccagtcacaaaacaagag

SEQ ID NO: 4194285 - DNA, 25 bp, Homo sapien
ctgggcagtggtccagtcacaaaac

SEQ ID NO: 4194286 - DNA, 25 bp, Homo sapien
cacaaaacaagaggataaccaagcc

SEQ ID NO: 4194287 - DNA, 25 bp, Homo sapien
acaagaggataaccaagccccacca

SEQ ID NO: 4194288 - DNA, 25 bp, Homo sapien
tgctcaagagtgaggtcagcatagg

SEQ ID NO: 4194289 - DNA, 25 bp, Homo sapien
tcagcataggggaggatctggcaca

SEQ ID NO: 4194290 - DNA, 25 bp, Homo sapien
agcattcccagagcacactcctggt

SEQ ID NO: 4194291 - DNA, 25 bp, Homo sapien
gagtggtccagctgaaagcgctgct

SEQ ID NO: 4194292 - DNA, 25 bp, Homo sapien
tctctttgaatattgacttgctccc

SEQ ID NO: 4194293 - DNA, 25 bp, Homo sapien
ttagaatgtaccaccatgaatacag

SEQ ID NO: 4194294 - DNA, 25 bp, Homo sapien
tatttagttgaggtcaagagacatg

SEQ ID NO: 4194295 - DNA, 25 bp, Homo sapien
catggaggatagatgagaaggtaca

SEQ ID NO: 4194296 - DNA, 25 bp, Homo sapien
ggaagagaacaacctcgatccaggt

SEQ ID NO: 4194297 - DNA, 25 bp, Homo sapien
cttggaagagaacaacctcgatcca

SEQ ID NO: 4194298 - DNA, 25 bp, Homo sapien
gagaacaacctcgatccaggtcata

SEQ ID NO: 4194299 - DNA, 25 bp, Homo sapien
gaacaacctcgatccaggtcataaa

SEQ ID NO: 4194300 - DNA, 25 bp, Homo sapien
ggtcctgtgtatgggctccccagct

SEQ ID NO: 4194301 - DNA, 25 bp, Homo sapien
tggtagccactttcttgatgagcag

SEQ ID NO: 4194302 - DNA, 25 bp, Homo sapien
tggttggtagccactttcttgatga

SEQ ID NO: 4194303 - DNA, 25 bp, Homo sapien
caggtcctgtgtatgggctccccag

SEQ ID NO: 4194304 - DNA, 25 bp, Homo sapien
gctcagtggcaacggtggtagcact

SEQ ID NO: 4194305 - DNA, 25 bp, Homo sapien
catggcaaatctgtagggccttctt

SEQ ID NO: 4194306 - DNA, 25 bp, Homo sapien
ggtactcctggatacgtccttagta

SEQ ID NO: 4194307 - DNA, 25 bp, Homo sapien
ccttagtatcagaagcagggtctgg

SEQ ID NO: 4194308 - DNA, 25 bp, Homo sapien
ccccgatgggctcacagaacctttt

SEQ ID NO: 4194309 - DNA, 25 bp, Homo sapien
acagaaccttttggcactgtccttg

SEQ ID NO: 4194310 - DNA, 25 bp, Homo sapien
tggactcttcttctccccgatgggc

SEQ ID NO: 4194311 - DNA, 25 bp, Homo sapien
ggcactgtccttgcctttaggctct

SEQ ID NO: 4194312 - DNA, 25 bp, Homo sapien
agcctcttgggcggccatgcgaatg

SEQ ID NO: 4194313 - DNA, 25 bp, Homo sapien
ggcagggcatttcatgggtctgggt

SEQ ID NO: 4194314 - DNA, 25 bp, Homo sapien
gggaggcagggcatttcatgggtct

SEQ ID NO: 4194315 - DNA, 25 bp, Homo sapien
ctgggagccagcctcttgggcggcc

SEQ ID NO: 4194316 - DNA, 25 bp, Homo sapien
ttagaaaagattaagcagagaggtg

SEQ ID NO: 4194317 - DNA, 25 bp, Homo sapien
caaccagagtccagcatctatttta

SEQ ID NO: 4194318 - DNA, 25 bp, Homo sapien
agttcatatctacttttccatccag

SEQ ID NO: 4194319 - DNA, 25 bp, Homo sapien
tagagccataaacagcctgtttggc

SEQ ID NO: 4194320 - DNA, 25 bp, Homo sapien
tttatagtcagtacgcagctagagc

SEQ ID NO: 4194321 - DNA, 25 bp, Homo sapien
cccagtataactcaatggttctgct

SEQ ID NO: 4194322 - DNA, 25 bp, Homo sapien
catgtcatcccagtataactcaatg

SEQ ID NO: 4194323 - DNA, 25 bp, Homo sapien
acatattaagctttccatgtcatcc

SEQ ID NO: 4194324 - DNA, 25 bp, Homo sapien
ataactcaatggttctgctggaagg

SEQ ID NO: 4194325 - DNA, 25 bp, Homo sapien
gagccatgtaggataataattcaca

SEQ ID NO: 4194326 - DNA, 25 bp, Homo sapien
tactttcagatggaattcagttcca

SEQ ID NO: 4194327 - DNA, 25 bp, Homo sapien
gagtttactttcagatggaattcag

SEQ ID NO: 4194328 - DNA, 25 bp, Homo sapien
ggagtatagagccatgtaggataat

SEQ ID NO: 4194329 - DNA, 25 bp, Homo sapien
tctctcgccataacaagcattggcc

SEQ ID NO: 4194330 - DNA, 25 bp, Homo sapien
gaaagagcccatcacttctctcgcc

SEQ ID NO: 4194331 - DNA, 25 bp, Homo sapien
cacttctctcgccataacaagcatt

SEQ ID NO: 4194332 - DNA, 25 bp, Homo sapien
cataacaagcattggccctcttccg

SEQ ID NO: 4194333 - DNA, 25 bp, Homo sapien
gccgcagacacacatagcgcactgt

SEQ ID NO: 4194334 - DNA, 25 bp, Homo sapien
gcagccattgattagcacgctgagg

SEQ ID NO: 4194335 - DNA, 25 bp, Homo sapien
attagcacgctgaggcagcgccgca

SEQ ID NO: 4194336 - DNA, 25 bp, Homo sapien
cacacatagcgcactgtgagctgaa

SEQ ID NO: 4194337 - DNA, 25 bp, Homo sapien
gcaacaagtagacacggacgtaggg

SEQ ID NO: 4194338 - DNA, 25 bp, Homo sapien
acggacgtagggatcagctccactg

SEQ ID NO: 4194339 - DNA, 25 bp, Homo sapien
tagacacggacgtagggatcagctc

SEQ ID NO: 4194340 - DNA, 25 bp, Homo sapien
acgtagggatcagctccactgctgg

SEQ ID NO: 4194341 - DNA, 25 bp, Homo sapien
caaggtcttccgcttcactgaagtc

SEQ ID NO: 4194342 - DNA, 25 bp, Homo sapien
gaagtcttcttacgacatgcccact

SEQ ID NO: 4194343 - DNA, 25 bp, Homo sapien
ttcactgaagtcttcttacgacatg

SEQ ID NO: 4194344 - DNA, 25 bp, Homo sapien
tctcatcaaacaggggttccaaggt

SEQ ID NO: 4194345 - DNA, 25 bp, Homo sapien
tccccactaacgtacagaagcttca

SEQ ID NO: 4194346 - DNA, 25 bp, Homo sapien
caggaacactttagcctctatgagc

SEQ ID NO: 4194347 - DNA, 25 bp, Homo sapien
aaatacttgaatgggtgaggcactc

SEQ ID NO: 4194348 - DNA, 25 bp, Homo sapien
ccaggcaacataacaggtacttgga

SEQ ID NO: 4194349 - DNA, 25 bp, Homo sapien
tcttccatgggaacaaaaaattcaa

SEQ ID NO: 4194350 - DNA, 25 bp, Homo sapien
ctgcaacatctagtgacctcttctt

SEQ ID NO: 4194351 - DNA, 25 bp, Homo sapien
tctagtgacctcttctttacttctt

SEQ ID NO: 4194352 - DNA, 25 bp, Homo sapien
ttcttccatgggaacaaaaaattca

SEQ ID NO: 4194353 - DNA, 25 bp, Homo sapien
tgtgaaaagcccttaatcagatctt

SEQ ID NO: 4194354 - DNA, 25 bp, Homo sapien
cttcttttgataagtcaatcagtac

SEQ ID NO: 4194355 - DNA, 25 bp, Homo sapien
gatcttcttttgataagtcaatcag

SEQ ID NO: 4194356 - DNA, 25 bp, Homo sapien
cattgtgaaaagcccttaatcagat

SEQ ID NO: 4194357 - DNA, 25 bp, Homo sapien
gataacagtgataaaatgaaagggc

SEQ ID NO: 4194358 - DNA, 25 bp, Homo sapien
tgataaaatgaaagggcacacttac

SEQ ID NO: 4194359 - DNA, 25 bp, Homo sapien
tagcaggataacagtgataaaatga

SEQ ID NO: 4194360 - DNA, 25 bp, Homo sapien
tgaatagcaggataacagtgataaa

SEQ ID NO: 4194361 - DNA, 25 bp, Homo sapien
cccaggaatgctggtagtggctcca

SEQ ID NO: 4194362 - DNA, 25 bp, Homo sapien
tccagtgctttgctatgagagtcag

SEQ ID NO: 4194363 - DNA, 25 bp, Homo sapien
tacacgctggagtttggcccttaga

SEQ ID NO: 4194364 - DNA, 25 bp, Homo sapien
tgagagtcagacatagacctgggct

SEQ ID NO: 4194365 - DNA, 25 bp, Homo sapien
aaaactgacggcaggtagtgttggt

SEQ ID NO: 4194366 - DNA, 25 bp, Homo sapien
tctcgaatgttgccctgcttcagaa

SEQ ID NO: 4194367 - DNA, 25 bp, Homo sapien
catgacaaaactttgttctcgaatg

SEQ ID NO: 4194368 - DNA, 25 bp, Homo sapien
tggaataagagtaacatgacaaaac

SEQ ID NO: 4194369 - DNA, 25 bp, Homo sapien
caggcggtaggaagagtccatttca

SEQ ID NO: 4194370 - DNA, 25 bp, Homo sapien
gaattgttccctactgttcaactgg

SEQ ID NO: 4194371 - DNA, 25 bp, Homo sapien
tgagtcagcagagcatagtatttgg

SEQ ID NO: 4194372 - DNA, 25 bp, Homo sapien
tacttaacacggtcttggatggtga

SEQ ID NO: 4194373 - DNA, 25 bp, Homo sapien
tatggttgcctccatcaaggcttca

SEQ ID NO: 4194374 - DNA, 25 bp, Homo sapien
ttagctgattgtttccacccactgc

SEQ ID NO: 4194375 - DNA, 25 bp, Homo sapien
tattcacattccgtcttaggtttgg

SEQ ID NO: 4194376 - DNA, 25 bp, Homo sapien
gatgttaacttcagaccctatgctc

SEQ ID NO: 4194377 - DNA, 25 bp, Homo sapien
tccctttagtgacagccatctgctg

SEQ ID NO: 4194378 - DNA, 25 bp, Homo sapien
gccatctgctgcagttgtcgcatat

SEQ ID NO: 4194379 - DNA, 25 bp, Homo sapien
ctgctgcagttgtcgcatatgtgcc

SEQ ID NO: 4194380 - DNA, 25 bp, Homo sapien
ttgcccgtgagtttccctttagtga

SEQ ID NO: 4194381 - DNA, 25 bp, Homo sapien
gagatttagatttccgctggcagcc

SEQ ID NO: 4194382 - DNA, 25 bp, Homo sapien
cataggaccatgcaacccacttgtg

SEQ ID NO: 4194383 - DNA, 25 bp, Homo sapien
tagaaactaagtgcctccctaccag

SEQ ID NO: 4194384 - DNA, 25 bp, Homo sapien
tatgccaattagctagcagccatgg

SEQ ID NO: 4194385 - DNA, 25 bp, Homo sapien
cctttttgccaatgtatagagctat

SEQ ID NO: 4194386 - DNA, 25 bp, Homo sapien
cactttgacagctatatgtgttaca

SEQ ID NO: 4194387 - DNA, 25 bp, Homo sapien
ggtgactttggtagggaatgttatc

SEQ ID NO: 4194388 - DNA, 25 bp, Homo sapien
cctgatgatcactaatgaagcaact

SEQ ID NO: 4194389 - DNA, 25 bp, Homo sapien
gtgtgtctgtatatgcctaaaccaa

SEQ ID NO: 4194390 - DNA, 25 bp, Homo sapien
ttctgatatatactatacacctgtg

SEQ ID NO: 4194391 - DNA, 25 bp, Homo sapien
cagtattacgtttgtactgtgcatc

SEQ ID NO: 4194392 - DNA, 25 bp, Homo sapien
tcaccacaatctaacaagacatact

SEQ ID NO: 4194393 - DNA, 25 bp, Homo sapien
cataaaggaagttttgtgaccagtc

SEQ ID NO: 4194394 - DNA, 25 bp, Homo sapien
tatatagcctactgaacataaagga

SEQ ID NO: 4194395 - DNA, 25 bp, Homo sapien
gacaatgagtgagcttgctttaggc

SEQ ID NO: 4194396 - DNA, 25 bp, Homo sapien
gctttaggcttgtcctcatgtttaa

SEQ ID NO: 4194397 - DNA, 25 bp, Homo sapien
ctgtaaagcctgtgtttacctggag

SEQ ID NO: 4194398 - DNA, 25 bp, Homo sapien
ctgacttgttctaaattggtagtag

SEQ ID NO: 4194399 - DNA, 25 bp, Homo sapien
aaattacttagagcactcagattca

SEQ ID NO: 4194400 - DNA, 25 bp, Homo sapien
cagattcagaataatcaatatataa

SEQ ID NO: 4194401 - DNA, 25 bp, Homo sapien
aaagggctgactcttcagtgttgca

SEQ ID NO: 4194402 - DNA, 25 bp, Homo sapien
tttttccctatggaatagcaccagg

SEQ ID NO: 4194403 - DNA, 25 bp, Homo sapien
caaactgttaacttactgctatagg

SEQ ID NO: 4194404 - DNA, 25 bp, Homo sapien
cctatggaatagcaccaggtgagga

SEQ ID NO: 4194405 - DNA, 25 bp, Homo sapien
gattcagttttcagcgacagctctg

SEQ ID NO: 4194406 - DNA, 25 bp, Homo sapien
tactctttgattcaagggaatggga

SEQ ID NO: 4194407 - DNA, 25 bp, Homo sapien
gagcgttatcacactttaaaagtac

SEQ ID NO: 4194408 - DNA, 25 bp, Homo sapien
tgcttgtacccttcctgactttgaa

SEQ ID NO: 4194409 - DNA, 25 bp, Homo sapien
gataattggtctgaattacctagtc

SEQ ID NO: 4194410 - DNA, 25 bp, Homo sapien
tgtgggcttgatctgttatgtctta

SEQ ID NO: 4194411 - DNA, 25 bp, Homo sapien
atttggtgcaccaagcagtatacac

SEQ ID NO: 4194412 - DNA, 25 bp, Homo sapien
tttctccagaatcatggtcctgtaa

SEQ ID NO: 4194413 - DNA, 25 bp, Homo sapien
ccaaagcccttcagaagttgcaggg

SEQ ID NO: 4194414 - DNA, 25 bp, Homo sapien
agacccaaagcccttcagaagttgc

SEQ ID NO: 4194415 - DNA, 25 bp, Homo sapien
agcccttcagaagttgcagggccaa

SEQ ID NO: 4194416 - DNA, 25 bp, Homo sapien
aagacccaaagcccttcagaagttg

SEQ ID NO: 4194417 - DNA, 25 bp, Homo sapien
ctatggggaaggaatatctgttcat

SEQ ID NO: 4194418 - DNA, 25 bp, Homo sapien
ctggcgggcaaaaacagccctgtgc

SEQ ID NO: 4194419 - DNA, 25 bp, Homo sapien
actggcgggcaaaaacagccctgtg

SEQ ID NO: 4194420 - DNA, 25 bp, Homo sapien
cagcaagtgtgggtaggagccggcc

SEQ ID NO: 4194421 - DNA, 25 bp, Homo sapien
caagtgtgggtaggagccggccgct

SEQ ID NO: 4194422 - DNA, 25 bp, Homo sapien
gtgtgggtaggagccggccgctggc

SEQ ID NO: 4194423 - DNA, 25 bp, Homo sapien
cgctctgggctagacggtggggaca

SEQ ID NO: 4194424 - DNA, 25 bp, Homo sapien
ggtcctctgccttagccgaaggccg

SEQ ID NO: 4194425 - DNA, 25 bp, Homo sapien
cctccgcgcataggccttcctcagc

SEQ ID NO: 4194426 - DNA, 25 bp, Homo sapien
cctggtcctctgccttagccgaagg

SEQ ID NO: 4194427 - DNA, 25 bp, Homo sapien
aaccctggtcctctgccttagccga

SEQ ID NO: 4194428 - DNA, 25 bp, Homo sapien
tggccgagaaacaggcgcagccggc

SEQ ID NO: 4194429 - DNA, 25 bp, Homo sapien
gccgactgtttgtcgcgcctctcag

SEQ ID NO: 4194430 - DNA, 25 bp, Homo sapien
ctgcaggcgcgagtaccaaacgcgc

SEQ ID NO: 4194431 - DNA, 25 bp, Homo sapien
agccggcgcggaggttgaaagctct

SEQ ID NO: 4194432 - DNA, 25 bp, Homo sapien
caaccggttggttccgactcggctg

SEQ ID NO: 4194433 - DNA, 25 bp, Homo sapien
tgcgtaggccgcgtggccttgctcc

SEQ ID NO: 4194434 - DNA, 25 bp, Homo sapien
ttccgactcggctgcgtaggccgcg

SEQ ID NO: 4194435 - DNA, 25 bp, Homo sapien
gctctggggtaggtttcaccaaaca

SEQ ID NO: 4194436 - DNA, 25 bp, Homo sapien
tcacccgcgcgggtctcaccgaccg

SEQ ID NO: 4194437 - DNA, 25 bp, Homo sapien
cagcgtctcacccgcgcgggtctca

SEQ ID NO: 4194438 - DNA, 25 bp, Homo sapien
cgcgcgggtctcaccgaccgcgcaa

SEQ ID NO: 4194439 - DNA, 25 bp, Homo sapien
gggtctcaccgaccgcgcaaacacc

SEQ ID NO: 4194440 - DNA, 25 bp, Homo sapien
ggcagagtccggagataccaagaga

SEQ ID NO: 4194441 - DNA, 25 bp, Homo sapien
tatagcacaacagtgggagtgtcct

SEQ ID NO: 4194442 - DNA, 25 bp, Homo sapien
gcagcataggatagaatgggccata

SEQ ID NO: 4194443 - DNA, 25 bp, Homo sapien
aagggtcgtagctctgccgaagaag

SEQ ID NO: 4194444 - DNA, 25 bp, Homo sapien
catcttcaaagataggactgtcatc

SEQ ID NO: 4194445 - DNA, 25 bp, Homo sapien
atcttcaaagataggactgtcatct

SEQ ID NO: 4194446 - DNA, 25 bp, Homo sapien
aataaagcaattatagtaggccaaa

SEQ ID NO: 4194447 - DNA, 25 bp, Homo sapien
tgaaaatattagattaaaacctcta

SEQ ID NO: 4194448 - DNA, 25 bp, Homo sapien
taaagcaattatagtaggccaaaat

SEQ ID NO: 4194449 - DNA, 25 bp, Homo sapien
gcaattatagtaggccaaaatacta

SEQ ID NO: 4194450 - DNA, 25 bp, Homo sapien
tcacttaaagcaacatcccaaacag

SEQ ID NO: 4194451 - DNA, 25 bp, Homo sapien
tatactactcgtttgcctgatgtag

SEQ ID NO: 4194452 - DNA, 25 bp, Homo sapien
gatgtagtcccatgttcaaattcga

SEQ ID NO: 4194453 - DNA, 25 bp, Homo sapien
cgatcttgtggactccgtcacttaa

SEQ ID NO: 4194454 - DNA, 25 bp, Homo sapien
gtctttgcagctccaacatagaatg

SEQ ID NO: 4194455 - DNA, 25 bp, Homo sapien
tgatagcgtctatatttatggtcgc

SEQ ID NO: 4194456 - DNA, 25 bp, Homo sapien
cataagcaaaaccactgatagcgtc

SEQ ID NO: 4194457 - DNA, 25 bp, Homo sapien
gatctgtcctccatatacttcttga

SEQ ID NO: 4194458 - DNA, 25 bp, Homo sapien
ctcttcttttcaaacctccatagaa

SEQ ID NO: 4194459 - DNA, 25 bp, Homo sapien
ccctcttcttttcaaacctccatag

SEQ ID NO: 4194460 - DNA, 25 bp, Homo sapien
ctccctcttcttttcaaacctccat

SEQ ID NO: 4194461 - DNA, 25 bp, Homo sapien
cttcttttcaaacctccatagaagg

SEQ ID NO: 4194462 - DNA, 25 bp, Homo sapien
taccattgcaccatacgtccatagc

SEQ ID NO: 4194463 - DNA, 25 bp, Homo sapien
cattgcaccatacgtccatagcatc

SEQ ID NO: 4194464 - DNA, 25 bp, Homo sapien
attttttaccattgcaccatacgtc

SEQ ID NO: 4194465 - DNA, 25 bp, Homo sapien
gcaccatacgtccatagcatctttt

SEQ ID NO: 4194466 - DNA, 25 bp, Homo sapien
taactgagacacatggcacttagag

SEQ ID NO: 4194467 - DNA, 25 bp, Homo sapien
tgtttccaaactcacggtaccaggc

SEQ ID NO: 4194468 - DNA, 25 bp, Homo sapien
tacagacctgtgctaccacgtgtgg

SEQ ID NO: 4194469 - DNA, 25 bp, Homo sapien
cagtagcattagcagcacctaggga

SEQ ID NO: 4194470 - DNA, 25 bp, Homo sapien
acatgaaggtcctatctgtgcctca

SEQ ID NO: 4194471 - DNA, 25 bp, Homo sapien
ccttatgggaggtatgctgaatacc

SEQ ID NO: 4194472 - DNA, 25 bp, Homo sapien
gtaaaaagattagcgccaggtagcg

SEQ ID NO: 4194473 - DNA, 25 bp, Homo sapien
gagaagccttttcctagctctggga

SEQ ID NO: 4194474 - DNA, 25 bp, Homo sapien
gaattagtggtgcagaaacttttat

SEQ ID NO: 4194475 - DNA, 25 bp, Homo sapien
gaaggaattagtggtgcagaaactt

SEQ ID NO: 4194476 - DNA, 25 bp, Homo sapien
taaaagtactagtagtgcaataaaa

SEQ ID NO: 4194477 - DNA, 25 bp, Homo sapien
ctagagcattcacaccatctaaaag

SEQ ID NO: 4194478 - DNA, 25 bp, Homo sapien
ggttcccgatactgaagtgagtttc

SEQ ID NO: 4194479 - DNA, 25 bp, Homo sapien
aatgagagtatgaataatcccttct

SEQ ID NO: 4194480 - DNA, 25 bp, Homo sapien
ctgacagcctttatgtaacagtcat

SEQ ID NO: 4194481 - DNA, 25 bp, Homo sapien
tcagtcccatcatctacaaactcac

SEQ ID NO: 4194482 - DNA, 25 bp, Homo sapien
caatctctgggatttctctattatc

SEQ ID NO: 4194483 - DNA, 25 bp, Homo sapien
tctctgggatttctctattatccac

SEQ ID NO: 4194484 - DNA, 25 bp, Homo sapien
ttgcaatctctgggatttctctatt

SEQ ID NO: 4194485 - DNA, 25 bp, Homo sapien
tgcaatctctgggatttctctatta

SEQ ID NO: 4194486 - DNA, 25 bp, Homo sapien
tattatagtaaaggttactgttgta

SEQ ID NO: 4194487 - DNA, 25 bp, Homo sapien
gactttggtccatatcttatttgcc

SEQ ID NO: 4194488 - DNA, 25 bp, Homo sapien
tgtactgataagtacatactgaaca

SEQ ID NO: 4194489 - DNA, 25 bp, Homo sapien
aaaacattgcagactaaatgtactg

SEQ ID NO: 4194490 - DNA, 25 bp, Homo sapien
gaaagaaggagtcaaggcttttcaa

SEQ ID NO: 4194491 - DNA, 25 bp, Homo sapien
aaggcttttcaatacacccacgctg

SEQ ID NO: 4194492 - DNA, 25 bp, Homo sapien
gagtcaaggcttttcaatacaccca

SEQ ID NO: 4194493 - DNA, 25 bp, Homo sapien
tgccgccctgcaaccctgcatgttg

SEQ ID NO: 4194494 - DNA, 25 bp, Homo sapien
gacatagttaactattcctgtttta

SEQ ID NO: 4194495 - DNA, 25 bp, Homo sapien
ttcagttctcatgcttttctcctct

SEQ ID NO: 4194496 - DNA, 25 bp, Homo sapien
tgttttatgctttcttgccttgcct

SEQ ID NO: 4194497 - DNA, 25 bp, Homo sapien
tccatgatgccaaatctaatagata

SEQ ID NO: 4194498 - DNA, 25 bp, Homo sapien
ggctggatccaacacaaacagttcc

SEQ ID NO: 4194499 - DNA, 25 bp, Homo sapien
aaaggctggatccaacacaaacagt

SEQ ID NO: 4194500 - DNA, 25 bp, Homo sapien
tgagcccttgaggtgtgtctccttt

SEQ ID NO: 4194501 - DNA, 25 bp, Homo sapien
ttcgacatcgccgtcgatggtgagc

SEQ ID NO: 4194502 - DNA, 25 bp, Homo sapien
tgtgtctcctttgagccttttgcag

SEQ ID NO: 4194503 - DNA, 25 bp, Homo sapien
tcacccatgatcaaccccaccatgt

SEQ ID NO: 4194504 - DNA, 25 bp, Homo sapien
gagaactgagtatttgccctatgac

SEQ ID NO: 4194505 - DNA, 25 bp, Homo sapien
aatattgggagctctcaatcctcgg

SEQ ID NO: 4194506 - DNA, 25 bp, Homo sapien
tgaaatggtttcacgccacacggaa

SEQ ID NO: 4194507 - DNA, 25 bp, Homo sapien
aaatgggtgatctctctgagtcctg

SEQ ID NO: 4194508 - DNA, 25 bp, Homo sapien
ttgtaaattactccttctgttggcc

SEQ ID NO: 4194509 - DNA, 25 bp, Homo sapien
gtaattggcacattggaatccttgt

SEQ ID NO: 4194510 - DNA, 25 bp, Homo sapien
taaggaaaatatgactctatgccca

SEQ ID NO: 4194511 - DNA, 25 bp, Homo sapien
gatccaatgtacttctgtccaccta

SEQ ID NO: 4194512 - DNA, 25 bp, Homo sapien
tttcctgtgagcaaggtctcagcct

SEQ ID NO: 4194513 - DNA, 25 bp, Homo sapien
gggtattcaggacactgttccagga

SEQ ID NO: 4194514 - DNA, 25 bp, Homo sapien
tagtggtttccttgcatagaagcag

SEQ ID NO: 4194515 - DNA, 25 bp, Homo sapien
aaaagttcctgtttgcttagcccag

SEQ ID NO: 4194516 - DNA, 25 bp, Homo sapien
cctctgaattttatagaaccctgaa

SEQ ID NO: 4194517 - DNA, 25 bp, Homo sapien
aaaaattagaaggtggcttgcaact

SEQ ID NO: 4194518 - DNA, 25 bp, Homo sapien
catttgcattgccagaagaactctc

SEQ ID NO: 4194519 - DNA, 25 bp, Homo sapien
aaaaatgtagactgtggccagatgc

SEQ ID NO: 4194520 - DNA, 25 bp, Homo sapien
cctggctgccccaccctatttttat

SEQ ID NO: 4194521 - DNA, 25 bp, Homo sapien
caccgtacctggctgccccacccta

SEQ ID NO: 4194522 - DNA, 25 bp, Homo sapien
cgtacctggctgccccaccctattt

SEQ ID NO: 4194523 - DNA, 25 bp, Homo sapien
gccaccgtacctggctgccccaccc

SEQ ID NO: 4194524 - DNA, 25 bp, Homo sapien
caatttttgctctccatgtgtagta

SEQ ID NO: 4194525 - DNA, 25 bp, Homo sapien
tgaacaaggctaaaggattacctct

SEQ ID NO: 4194526 - DNA, 25 bp, Homo sapien
cagttaggttgcatttgataggaca

SEQ ID NO: 4194527 - DNA, 25 bp, Homo sapien
aattattagaattgagccaggtgca

SEQ ID NO: 4194528 - DNA, 25 bp, Homo sapien
cttcacacagtttacaaggtgaaca

SEQ ID NO: 4194529 - DNA, 25 bp, Homo sapien
caaatgaaaaagtgcaaacaggctg

SEQ ID NO: 4194530 - DNA, 25 bp, Homo sapien
agattgtgtcactgccttccacccc

SEQ ID NO: 4194531 - DNA, 25 bp, Homo sapien
gaaaaagtgcaaacaggctgggcgt

SEQ ID NO: 4194532 - DNA, 25 bp, Homo sapien
actaattgttgcaacaaatgaaaaa

SEQ ID NO: 4194533 - DNA, 25 bp, Homo sapien
gtccatgagggacacattggtggtg

SEQ ID NO: 4194534 - DNA, 25 bp, Homo sapien
tggtggtgggggcatagaaggctat

SEQ ID NO: 4194535 - DNA, 25 bp, Homo sapien
catagaaggctatgccagtgacctt

SEQ ID NO: 4194536 - DNA, 25 bp, Homo sapien
ttggcaggcagcaccagtaggtgca

SEQ ID NO: 4194537 - DNA, 25 bp, Homo sapien
aatgagggggtccttgatgagacaa

SEQ ID NO: 4194538 - DNA, 25 bp, Homo sapien
ggggtccttgatgagacaatatcca

SEQ ID NO: 4194539 - DNA, 25 bp, Homo sapien
tcatcatggaacatatagaccgtgt

SEQ ID NO: 4194540 - DNA, 25 bp, Homo sapien
tatagaccgtgtagttgagggcaat

SEQ ID NO: 4194541 - DNA, 25 bp, Homo sapien
ttttggtgggaatttgctcctagaa

SEQ ID NO: 4194542 - DNA, 25 bp, Homo sapien
gatgatgaccctttcggtttctcct

SEQ ID NO: 4194543 - DNA, 25 bp, Homo sapien
tccacaatgtaattgtggtggcatc

SEQ ID NO: 4194544 - DNA, 25 bp, Homo sapien
gctcctagaaaatggttatggtatt

SEQ ID NO: 4194545 - DNA, 25 bp, Homo sapien
cagtgatagtagcatggatgaggtc

SEQ ID NO: 4194546 - DNA, 25 bp, Homo sapien
tacaggagtgatgttctggaaagcc

SEQ ID NO: 4194547 - DNA, 25 bp, Homo sapien
ttatcactgttagttggcagagaca

SEQ ID NO: 4194548 - DNA, 25 bp, Homo sapien
gatgaggtcatgattcctcccatga

SEQ ID NO: 4194549 - DNA, 25 bp, Homo sapien
atatattccctattcagatgaatga

SEQ ID NO: 4194550 - DNA, 25 bp, Homo sapien
ggaaaaatatattccctattcagat

SEQ ID NO: 4194551 - DNA, 25 bp, Homo sapien
aaatatattccctattcagatgaat

SEQ ID NO: 4194552 - DNA, 25 bp, Homo sapien
tcagatgaatgataaaccagtaaaa

SEQ ID NO: 4194553 - DNA, 25 bp, Homo sapien
gatgagagaagagggtgtacaataa

SEQ ID NO: 4194554 - DNA, 25 bp, Homo sapien
cagagggcctgtaagttcataatgg

SEQ ID NO: 4194555 - DNA, 25 bp, Homo sapien
aaaaaacaaccatgaggtcagatgt

SEQ ID NO: 4194556 - DNA, 25 bp, Homo sapien
ttgaaaaaggtgagttggaggcaca

SEQ ID NO: 4194557 - DNA, 25 bp, Homo sapien
attcaaagcatcatagtcaggaatc

SEQ ID NO: 4194558 - DNA, 25 bp, Homo sapien
ctctggcagactcaatccgggtgtt

SEQ ID NO: 4194559 - DNA, 25 bp, Homo sapien
gactcaatccgggtgttgaccttgg

SEQ ID NO: 4194560 - DNA, 25 bp, Homo sapien
agcatcatagtcaggaatctgttga

SEQ ID NO: 4194561 - DNA, 25 bp, Homo sapien
catggtaaaactcagcatagaattt

SEQ ID NO: 4194562 - DNA, 25 bp, Homo sapien
ttttcccttggcccacgtgctgctg

SEQ ID NO: 4194563 - DNA, 25 bp, Homo sapien
catcagctccagtgacttccctagt

SEQ ID NO: 4194564 - DNA, 25 bp, Homo sapien
tcatgttgtgtttgagaatggaggc

SEQ ID NO: 4194565 - DNA, 25 bp, Homo sapien
tagccaaactgaagatcaactagat

SEQ ID NO: 4194566 - DNA, 25 bp, Homo sapien
tgcttgttgtacatgctagagtgca

SEQ ID NO: 4194567 - DNA, 25 bp, Homo sapien
tagagacacactactttgtagagac

SEQ ID NO: 4194568 - DNA, 25 bp, Homo sapien
ctagattttccctttaaacagcaga

SEQ ID NO: 4194569 - DNA, 25 bp, Homo sapien
taactgtcaacaagagctcaaactc

SEQ ID NO: 4194570 - DNA, 25 bp, Homo sapien
ggtaactgtcaacaagagctcaaac

SEQ ID NO: 4194571 - DNA, 25 bp, Homo sapien
ctgtcaacaagagctcaaactccat

SEQ ID NO: 4194572 - DNA, 25 bp, Homo sapien
tggtaactgtcaacaagagctcaaa

SEQ ID NO: 4194573 - DNA, 25 bp, Homo sapien
gttaacaccaattagttgcttcaca

SEQ ID NO: 4194574 - DNA, 25 bp, Homo sapien
tgttaacaccaattagttgcttcac

SEQ ID NO: 4194575 - DNA, 25 bp, Homo sapien
tcctcatatctgtattggctgtagg

SEQ ID NO: 4194576 - DNA, 25 bp, Homo sapien
atatctgtattggctgtagggtggc

SEQ ID NO: 4194577 - DNA, 25 bp, Homo sapien
cctcatatctgtattggctgtaggg

SEQ ID NO: 4194578 - DNA, 25 bp, Homo sapien
catatctgtattggctgtagggtgg

SEQ ID NO: 4194579 - DNA, 25 bp, Homo sapien
ttggcttcagcatgttgtcactgtt

SEQ ID NO: 4194580 - DNA, 25 bp, Homo sapien
cagtccagagcttcgagtagcatgg

SEQ ID NO: 4194581 - DNA, 25 bp, Homo sapien
gagacagatgcaagggtttgtcagt

SEQ ID NO: 4194582 - DNA, 25 bp, Homo sapien
cagagcttcgagtagcatggttccc

SEQ ID NO: 4194583 - DNA, 25 bp, Homo sapien
agagacagatgcaagggtttgtcag

SEQ ID NO: 4194584 - DNA, 25 bp, Homo sapien
gggtttgagaacaccagtctccact

SEQ ID NO: 4194585 - DNA, 25 bp, Homo sapien
ttgagaacaccagtctccacttggc

SEQ ID NO: 4194586 - DNA, 25 bp, Homo sapien
cattccgggtttgagaacaccagtc

SEQ ID NO: 4194587 - DNA, 25 bp, Homo sapien
tttgagaacaccagtctccacttgg

SEQ ID NO: 4194588 - DNA, 25 bp, Homo sapien
tgcaggaagagcttcacccaaagct

SEQ ID NO: 4194589 - DNA, 25 bp, Homo sapien
ctgcaggaagagcttcacccaaagc

SEQ ID NO: 4194590 - DNA, 25 bp, Homo sapien
ttcaacagactgcttcagttgtaac

SEQ ID NO: 4194591 - DNA, 25 bp, Homo sapien
gtgcatttcaacagactgcttcagt

SEQ ID NO: 4194592 - DNA, 25 bp, Homo sapien
agcaaacttgcaagctgtgtaagct

SEQ ID NO: 4194593 - DNA, 25 bp, Homo sapien
gcaaacttgcaagctgtgtaagctg

SEQ ID NO: 4194594 - DNA, 25 bp, Homo sapien
gctggcgactcttgtggttgcaccg

SEQ ID NO: 4194595 - DNA, 25 bp, Homo sapien
tgccagcttggaggataaccgccta

SEQ ID NO: 4194596 - DNA, 25 bp, Homo sapien
tgtcgctttgggtcccgttcctgag

SEQ ID NO: 4194597 - DNA, 25 bp, Homo sapien
ggcgtcccgggtcactgtcgctttg

SEQ ID NO: 4194598 - DNA, 25 bp, Homo sapien
tgctctgtcggcctgtgcggcgctg

SEQ ID NO: 4194599 - DNA, 25 bp, Homo sapien
gctctgtcggcctgtgcggcgctgc

SEQ ID NO: 4194600 - DNA, 25 bp, Homo sapien
gagtcagtccatgtcgcagaacagg

SEQ ID NO: 4194601 - DNA, 25 bp, Homo sapien
gctagcgccctatcctcacaaaggg

SEQ ID NO: 4194602 - DNA, 25 bp, Homo sapien
tgatgggtctctcctgaaggcgact

SEQ ID NO: 4194603 - DNA, 25 bp, Homo sapien
caaggaacctaggaagagcggaatc

SEQ ID NO: 4194604 - DNA, 25 bp, Homo sapien
aaagaggactgtgatttttcgcggt

SEQ ID NO: 4194605 - DNA, 25 bp, Homo sapien
aatcttgggcttgaaagcctggact

SEQ ID NO: 4194606 - DNA, 25 bp, Homo sapien
caaatgttaggtgttgttactgcaa

SEQ ID NO: 4194607 - DNA, 25 bp, Homo sapien
tatttgtccagggtaatataggagc

SEQ ID NO: 4194608 - DNA, 25 bp, Homo sapien
gccctaattacagcccttttatgtg

SEQ ID NO: 4194609 - DNA, 25 bp, Homo sapien
actgttctgcatcttaccgatttca

SEQ ID NO: 4194610 - DNA, 25 bp, Homo sapien
gtatatataataagtggacatgata

SEQ ID NO: 4194611 - DNA, 25 bp, Homo sapien
gatgataatctatggcagctttctt

SEQ ID NO: 4194612 - DNA, 25 bp, Homo sapien
gcagaacagccccacgggctactgg

SEQ ID NO: 4194613 - DNA, 25 bp, Homo sapien
agaacagccccacgggctactggtt

SEQ ID NO: 4194614 - DNA, 25 bp, Homo sapien
aacagccccacgggctactggttgc

SEQ ID NO: 4194615 - DNA, 25 bp, Homo sapien
ataggcagaacagccccacgggcta

SEQ ID NO: 4194616 - DNA, 25 bp, Homo sapien
cccctattattattgctgtcacaac

SEQ ID NO: 4194617 - DNA, 25 bp, Homo sapien
gttttgttcacccctatatctccac

SEQ ID NO: 4194618 - DNA, 25 bp, Homo sapien
catgtgatgacttcattaatgacta

SEQ ID NO: 4194619 - DNA, 25 bp, Homo sapien
ttgctgtcacaacatcaggcactcc

SEQ ID NO: 4194620 - DNA, 25 bp, Homo sapien
tcaggtacactccttcccagctgta

SEQ ID NO: 4194621 - DNA, 25 bp, Homo sapien
caagttgttaaccactctgaggctc

SEQ ID NO: 4194622 - DNA, 25 bp, Homo sapien
ttgttaaccactctgaggctcagtt

SEQ ID NO: 4194623 - DNA, 25 bp, Homo sapien
agttgttaaccactctgaggctcag

SEQ ID NO: 4194624 - DNA, 25 bp, Homo sapien
ttccctctgctccagggtcttggtc

SEQ ID NO: 4194625 - DNA, 25 bp, Homo sapien
ccctctgctccagggtcttggtcat

SEQ ID NO: 4194626 - DNA, 25 bp, Homo sapien
tgtaacccgctttccctctgctcca

SEQ ID NO: 4194627 - DNA, 25 bp, Homo sapien
tttgtaacccgctttccctctgctc

SEQ ID NO: 4194628 - DNA, 25 bp, Homo sapien
gagacatgtttcaacaagtttcacc

SEQ ID NO: 4194629 - DNA, 25 bp, Homo sapien
gacatgtttcaacaagtttcaccat

SEQ ID NO: 4194630 - DNA, 25 bp, Homo sapien
agacatgtttcaacaagtttcacca

SEQ ID NO: 4194631 - DNA, 25 bp, Homo sapien
agagacatgtttcaacaagtttcac

SEQ ID NO: 4194632 - DNA, 25 bp, Homo sapien
tgagagggggctctcgctttttatt

SEQ ID NO: 4194633 - DNA, 25 bp, Homo sapien
gacttttatattacacacatgttat

SEQ ID NO: 4194634 - DNA, 25 bp, Homo sapien
ttgtgagaggcagtctcggccatat

SEQ ID NO: 4194635 - DNA, 25 bp, Homo sapien
ggcagtctcggccatattctcttat

SEQ ID NO: 4194636 - DNA, 25 bp, Homo sapien
atgatcaaggaaacacggtagacct

SEQ ID NO: 4194637 - DNA, 25 bp, Homo sapien
agatgatcaaggaaacacggtagac

SEQ ID NO: 4194638 - DNA, 25 bp, Homo sapien
gatgatcaaggaaacacggtagacc

SEQ ID NO: 4194639 - DNA, 25 bp, Homo sapien
tgatcaaggaaacacggtagacctg

SEQ ID NO: 4194640 - DNA, 25 bp, Homo sapien
agccagccttggcagtccgaagagc

SEQ ID NO: 4194641 - DNA, 25 bp, Homo sapien
acgtccccccgcactgttacagatg

SEQ ID NO: 4194642 - DNA, 25 bp, Homo sapien
ccttggcagtccgaagagctcgtgt

SEQ ID NO: 4194643 - DNA, 25 bp, Homo sapien
ggcagtccgaagagctcgtgtccac

SEQ ID NO: 4194644 - DNA, 25 bp, Homo sapien
ttgtctccactaatggcacgcatct

SEQ ID NO: 4194645 - DNA, 25 bp, Homo sapien
tctccactaatggcacgcatctgac

SEQ ID NO: 4194646 - DNA, 25 bp, Homo sapien
gagcttgtctccactaatggcacgc

SEQ ID NO: 4194647 - DNA, 25 bp, Homo sapien
ccatgcagagcttgtctccactaat

SEQ ID NO: 4194648 - DNA, 25 bp, Homo sapien
gcggtgcggcggctgcttcgcatta

SEQ ID NO: 4194649 - DNA, 25 bp, Homo sapien
tcgcattagggcgagcgtggtcccc

SEQ ID NO: 4194650 - DNA, 25 bp, Homo sapien
tcatgcccagtaggaagaggctcgg

SEQ ID NO: 4194651 - DNA, 25 bp, Homo sapien
ggcgagcgtggtccccattaggcca

SEQ ID NO: 4194652 - DNA, 25 bp, Homo sapien
tgtttcgtattggaatcaaagggcc

SEQ ID NO: 4194653 - DNA, 25 bp, Homo sapien
tcaaagggcctttcgtggctcttcc

SEQ ID NO: 4194654 - DNA, 25 bp, Homo sapien
ccaaagatcgcaggataggcaggcc

SEQ ID NO: 4194655 - DNA, 25 bp, Homo sapien
gtgtctccgtgtccccgccaaagat

SEQ ID NO: 4194656 - DNA, 25 bp, Homo sapien
ctcgacgaccggaaggggctgctcc

SEQ ID NO: 4194657 - DNA, 25 bp, Homo sapien
agagccggagctctgcgctggcaat

SEQ ID NO: 4194658 - DNA, 25 bp, Homo sapien
caaccttacttgatggtggcccagg

SEQ ID NO: 4194659 - DNA, 25 bp, Homo sapien
atagcattgattggcgcccacgggt

SEQ ID NO: 4194660 - DNA, 25 bp, Homo sapien
tgtagtgcacttgtctctccaacca

SEQ ID NO: 4194661 - DNA, 25 bp, Homo sapien
cagctcctccggtgccatacggtgt

SEQ ID NO: 4194662 - DNA, 25 bp, Homo sapien
tggcaccgacggctgagcagctcct

SEQ ID NO: 4194663 - DNA, 25 bp, Homo sapien
gaagcgctgaccagcagacccggat

SEQ ID NO: 4194664 - DNA, 25 bp, Homo sapien
acagacagtcgtgctcgcgtgtgta

SEQ ID NO: 4194665 - DNA, 25 bp, Homo sapien
cattttctcccaggccgtggcaaac

SEQ ID NO: 4194666 - DNA, 25 bp, Homo sapien
tcccttcaccatggcttgtgagggc

SEQ ID NO: 4194667 - DNA, 25 bp, Homo sapien
cccaaagagaccctgcagccgcatt

SEQ ID NO: 4194668 - DNA, 25 bp, Homo sapien
gcagcccaaagagaccctgcagccg

SEQ ID NO: 4194669 - DNA, 25 bp, Homo sapien
gcggcctgccggtgcggtgatggag

SEQ ID NO: 4194670 - DNA, 25 bp, Homo sapien
gagcccggcggcctgccggtgcggt

SEQ ID NO: 4194671 - DNA, 25 bp, Homo sapien
tgatggagggctcttcggtagccac

SEQ ID NO: 4194672 - DNA, 25 bp, Homo sapien
ggctcttcggtagccacactgcgcg

SEQ ID NO: 4194673 - DNA, 25 bp, Homo sapien
cttctgggtgatgcgagtgctgcgc

SEQ ID NO: 4194674 - DNA, 25 bp, Homo sapien
tctgggtgatgcgagtgctgcgcag

SEQ ID NO: 4194675 - DNA, 25 bp, Homo sapien
ttctgggtgatgcgagtgctgcgca

SEQ ID NO: 4194676 - DNA, 25 bp, Homo sapien
acttctgggtgatgcgagtgctgcg

SEQ ID NO: 4194677 - DNA, 25 bp, Homo sapien
gctcaacctctgtggcgactctggt

SEQ ID NO: 4194678 - DNA, 25 bp, Homo sapien
ggcctcgaattttctgcgcaacgct

SEQ ID NO: 4194679 - DNA, 25 bp, Homo sapien
gactctggttttcgcgaccgctggg

SEQ ID NO: 4194680 - DNA, 25 bp, Homo sapien
cagaaatggaatcgtgctcaacctc

SEQ ID NO: 4194681 - DNA, 25 bp, Homo sapien
tctctggaggcgttagggacagtgg

SEQ ID NO: 4194682 - DNA, 25 bp, Homo sapien
taaagtctctggaggcgttagggac

SEQ ID NO: 4194683 - DNA, 25 bp, Homo sapien
gtctctggaggcgttagggacagtg

SEQ ID NO: 4194684 - DNA, 25 bp, Homo sapien
aagtctctggaggcgttagggacag

SEQ ID NO: 4194685 - DNA, 25 bp, Homo sapien
tcatccgaggttaggtgcatccagc

SEQ ID NO: 4194686 - DNA, 25 bp, Homo sapien
tgaggcttagatgagcaagaggccc

SEQ ID NO: 4194687 - DNA, 25 bp, Homo sapien
tactccagagggtattgacgtcctg

SEQ ID NO: 4194688 - DNA, 25 bp, Homo sapien
tcactgctccagatctgaggcttag

SEQ ID NO: 4194689 - DNA, 25 bp, Homo sapien
ctggtgtctgggtgcctttggtgcc

SEQ ID NO: 4194690 - DNA, 25 bp, Homo sapien
agcaggaagccctagaggctggtca

SEQ ID NO: 4194691 - DNA, 25 bp, Homo sapien
tctgggtgcctttggtgcccggctg

SEQ ID NO: 4194692 - DNA, 25 bp, Homo sapien
gccctagaggctggtcaggcctggt

SEQ ID NO: 4194693 - DNA, 25 bp, Homo sapien
ggttttgcgccacgggaatgagcct

SEQ ID NO: 4194694 - DNA, 25 bp, Homo sapien
gggccaggagcggttttgcgccacg

SEQ ID NO: 4194695 - DNA, 25 bp, Homo sapien
gcctggccagcaatgtggcggcagg

SEQ ID NO: 4194696 - DNA, 25 bp, Homo sapien
ggccagcaatgtggcggcaggtcca

SEQ ID NO: 4194697 - DNA, 25 bp, Homo sapien
gataggatagatccgccggttcttg

SEQ ID NO: 4194698 - DNA, 25 bp, Homo sapien
ctgataggatagatccgccggttct

SEQ ID NO: 4194699 - DNA, 25 bp, Homo sapien
atagatccgccggttcttgcgggct

SEQ ID NO: 4194700 - DNA, 25 bp, Homo sapien
ccgccggttcttgcgggctgctgct

SEQ ID NO: 4194701 - DNA, 25 bp, Homo sapien
tggtcggctttcactcttctgatgg

SEQ ID NO: 4194702 - DNA, 25 bp, Homo sapien
tctgatgggatagatgacttccgac

SEQ ID NO: 4194703 - DNA, 25 bp, Homo sapien
tgagatccccaaataacgaattaag

SEQ ID NO: 4194704 - DNA, 25 bp, Homo sapien
cacacaggcgtttgacctggttgca

SEQ ID NO: 4194705 - DNA, 25 bp, Homo sapien
gccgtggttcgttcacaaggcgcga

SEQ ID NO: 4194706 - DNA, 25 bp, Homo sapien
cggctgtttaacgtcagcagaaaga

SEQ ID NO: 4194707 - DNA, 25 bp, Homo sapien
ctttttctgccgtggttcgttcaca

SEQ ID NO: 4194708 - DNA, 25 bp, Homo sapien
tctgtgtcatcactggcccgttgcg

SEQ ID NO: 4194709 - DNA, 25 bp, Homo sapien
ggctccacggcctgtactcggttta

SEQ ID NO: 4194710 - DNA, 25 bp, Homo sapien
gagaaatgtgaaacccggcagcggc

SEQ ID NO: 4194711 - DNA, 25 bp, Homo sapien
aatgtccccggatctttcgatgcaa

SEQ ID NO: 4194712 - DNA, 25 bp, Homo sapien
tgtggccttggagtttgctaaatcc

SEQ ID NO: 4194713 - DNA, 25 bp, Homo sapien
tgcattcgcgcctcgatctctgaga

SEQ ID NO: 4194714 - DNA, 25 bp, Homo sapien
tgcattgctcttactgggaccacga

SEQ ID NO: 4194715 - DNA, 25 bp, Homo sapien
tctactgggctcgtctctttccgga

SEQ ID NO: 4194716 - DNA, 25 bp, Homo sapien
tcctgcccaaattcaccgcggaaag

SEQ ID NO: 4194717 - DNA, 25 bp, Homo sapien
gtacacacgcgtgcagagcatggcg

SEQ ID NO: 4194718 - DNA, 25 bp, Homo sapien
tcgtacaatggcctgggaggcccgc

SEQ ID NO: 4194719 - DNA, 25 bp, Homo sapien
ccccggcgtagtgaactcgtacaat

SEQ ID NO: 4194720 - DNA, 25 bp, Homo sapien
ctcgtacgggccgtacacacgcgtg

SEQ ID NO: 4194721 - DNA, 25 bp, Homo sapien
ttcaagggcgcgtgagcctggctgt

SEQ ID NO: 4194722 - DNA, 25 bp, Homo sapien
agcccgcagagcgagtaccggcaga

SEQ ID NO: 4194723 - DNA, 25 bp, Homo sapien
gcttggagcgcctttcctcgctggg

SEQ ID NO: 4194724 - DNA, 25 bp, Homo sapien
cgagtaccggcagatttcaagggcg

SEQ ID NO: 4194725 - DNA, 25 bp, Homo sapien
agcacacatgcacctggtatctcac

SEQ ID NO: 4194726 - DNA, 25 bp, Homo sapien
tgagcagcacacatgcacctggtat

SEQ ID NO: 4194727 - DNA, 25 bp, Homo sapien
tctgagcagcacacatgcacctggt

SEQ ID NO: 4194728 - DNA, 25 bp, Homo sapien
tgtttctgagcagcacacatgcacc

SEQ ID NO: 4194729 - DNA, 25 bp, Homo sapien
caacacttgtagatggcctgtggat

SEQ ID NO: 4194730 - DNA, 25 bp, Homo sapien
aaccacaggccgctgaaggctcctt

SEQ ID NO: 4194731 - DNA, 25 bp, Homo sapien
agtgagcagcagacaacacttgtag

SEQ ID NO: 4194732 - DNA, 25 bp, Homo sapien
ttgggcttcaggagaaccctcagag

SEQ ID NO: 4194733 - DNA, 25 bp, Homo sapien
cttcccagggtgcacgcatcaggca

SEQ ID NO: 4194734 - DNA, 25 bp, Homo sapien
cttggggagaccgattccagccctt

SEQ ID NO: 4194735 - DNA, 25 bp, Homo sapien
agggtgcacgcatcaggcatcctct

SEQ ID NO: 4194736 - DNA, 25 bp, Homo sapien
cctcttcttcaccagggctggggat

SEQ ID NO: 4194737 - DNA, 25 bp, Homo sapien
gttttctgagccttcgaatgccgga

SEQ ID NO: 4194738 - DNA, 25 bp, Homo sapien
cttcgaatgccggacagccatgtga

SEQ ID NO: 4194739 - DNA, 25 bp, Homo sapien
gaatgccggacagccatgtgaaggc

SEQ ID NO: 4194740 - DNA, 25 bp, Homo sapien
tctgagccttcgaatgccggacagc

SEQ ID NO: 4194741 - DNA, 25 bp, Homo sapien
ctgaaagtaatcattctgccagctt

SEQ ID NO: 4194742 - DNA, 25 bp, Homo sapien
tggcttttccgcagaagcctggagg

SEQ ID NO: 4194743 - DNA, 25 bp, Homo sapien
agtaatcattctgccagctttcccg

SEQ ID NO: 4194744 - DNA, 25 bp, Homo sapien
tagattcctctatctccagcccgaa

SEQ ID NO: 4194745 - DNA, 25 bp, Homo sapien
cgcgggagctgagactgcgctcaat

SEQ ID NO: 4194746 - DNA, 25 bp, Homo sapien
gtgtagattgctcgcgccggctgtc

SEQ ID NO: 4194747 - DNA, 25 bp, Homo sapien
ttcactggaaccgtatccgcaggcg

SEQ ID NO: 4194748 - DNA, 25 bp, Homo sapien
gaaaagcgtctgtatcagagccgtg

SEQ ID NO: 4194749 - DNA, 25 bp, Homo sapien
acagcggaacctggttcaggcagcc

SEQ ID NO: 4194750 - DNA, 25 bp, Homo sapien
gccgcgacgcttccctagtagagct

SEQ ID NO: 4194751 - DNA, 25 bp, Homo sapien
tctcccgctcaggagcgggaagccg

SEQ ID NO: 4194752 - DNA, 25 bp, Homo sapien
tgagtggttctagcgaagcgctgcc

SEQ ID NO: 4194753 - DNA, 25 bp, Homo sapien
taacgtgacctgagtggagggacac

SEQ ID NO: 4194754 - DNA, 25 bp, Homo sapien
tatctggaacgtgctcagtacctga

SEQ ID NO: 4194755 - DNA, 25 bp, Homo sapien
gcaccttgttggtctgagcagcaaa

SEQ ID NO: 4194756 - DNA, 25 bp, Homo sapien
aaaagccttagggtctgcacattgg

SEQ ID NO: 4194757 - DNA, 25 bp, Homo sapien
cccaacatcagcaaggtaaagagga

SEQ ID NO: 4194758 - DNA, 25 bp, Homo sapien
agcccagagctctggtctactgcct

SEQ ID NO: 4194759 - DNA, 25 bp, Homo sapien
tcagcaaggtaaagaggagcccaga

SEQ ID NO: 4194760 - DNA, 25 bp, Homo sapien
cagagctctggtctactgcctctca

SEQ ID NO: 4194761 - DNA, 25 bp, Homo sapien
ttaaaaggcattaagcccatcctgg

SEQ ID NO: 4194762 - DNA, 25 bp, Homo sapien
tttatacgaggctcaaggcaggcaa

SEQ ID NO: 4194763 - DNA, 25 bp, Homo sapien
tacaatgctcgggtgacaagtgcac

SEQ ID NO: 4194764 - DNA, 25 bp, Homo sapien
gaaagtgcccgctttgtgggagaaa

SEQ ID NO: 4194765 - DNA, 25 bp, Homo sapien
cctgctggtgatttggaatgtccct

SEQ ID NO: 4194766 - DNA, 25 bp, Homo sapien
ccttcctggatacattggtgactcg

SEQ ID NO: 4194767 - DNA, 25 bp, Homo sapien
tggacattcacctcgaggaggcctg

SEQ ID NO: 4194768 - DNA, 25 bp, Homo sapien
ggtgactcggtgtttgaaaagctcc

SEQ ID NO: 4194769 - DNA, 25 bp, Homo sapien
cagcctgaccaacagcctgaccaac

SEQ ID NO: 4194770 - DNA, 25 bp, Homo sapien
caaaataagccgggtgtggcagtgc

SEQ ID NO: 4194771 - DNA, 25 bp, Homo sapien
aagtacccaaaggaggccaggcacg

SEQ ID NO: 4194772 - DNA, 25 bp, Homo sapien
gaaaagaaagacacattaaatagaa

SEQ ID NO: 4194773 - DNA, 25 bp, Homo sapien
cgctctcagggaggacgtcgtcgtt

SEQ ID NO: 4194774 - DNA, 25 bp, Homo sapien
gccaacgtcgatcctgcgagtgtct

SEQ ID NO: 4194775 - DNA, 25 bp, Homo sapien
agctctgtcgacgaacgctcaggag

SEQ ID NO: 4194776 - DNA, 25 bp, Homo sapien
gaagtggacgttttcctgggcgctc

SEQ ID NO: 4194777 - DNA, 25 bp, Homo sapien
gggctgtgccctgcgtgtgcccctg

SEQ ID NO: 4194778 - DNA, 25 bp, Homo sapien
gggctgtgccctgcgtgtgcccctg

SEQ ID NO: 4194779 - DNA, 25 bp, Homo sapien
tcatcctccaactgaaatagacaca

SEQ ID NO: 4194780 - DNA, 25 bp, Homo sapien
cagctcatcctccaactgaaataga

SEQ ID NO: 4194781 - DNA, 25 bp, Homo sapien
tgaaaacacagtgcattggaagcac

SEQ ID NO: 4194782 - DNA, 25 bp, Homo sapien
tctgaaaacacagtgcattggaagc

SEQ ID NO: 4194783 - DNA, 25 bp, Homo sapien
gcgctctgcccttaagtcaccttgg

SEQ ID NO: 4194784 - DNA, 25 bp, Homo sapien
cttcaaaggactgcgaaaggaccca

SEQ ID NO: 4194785 - DNA, 25 bp, Homo sapien
gaacccaggtgcttgcagtatgcag

SEQ ID NO: 4194786 - DNA, 25 bp, Homo sapien
tgccacgagcacacagcaacgtgtt

SEQ ID NO: 4194787 - DNA, 25 bp, Homo sapien
gcaaatcgtgtttctcgttgtctga

SEQ ID NO: 4194788 - DNA, 25 bp, Homo sapien
tgctagggaagccaaggccacacaa

SEQ ID NO: 4194789 - DNA, 25 bp, Homo sapien
cgttgtctgatggtatcccaagccc

SEQ ID NO: 4194790 - DNA, 25 bp, Homo sapien
catgttttgggatccctgctaggga

SEQ ID NO: 4194791 - DNA, 25 bp, Homo sapien
gcagcaggacaaggtagctctccat

SEQ ID NO: 4194792 - DNA, 25 bp, Homo sapien
agtgctggtcactagccatatcaaa

SEQ ID NO: 4194793 - DNA, 25 bp, Homo sapien
ctgggaggaactgtgcatagcaaaa

SEQ ID NO: 4194794 - DNA, 25 bp, Homo sapien
cctgtctccagacaagagtgtttgt

SEQ ID NO: 4194795 - DNA, 25 bp, Homo sapien
cagtcaaggcctcgggccttgcttc

SEQ ID NO: 4194796 - DNA, 25 bp, Homo sapien
caaggcctcgggccttgcttcacaa

SEQ ID NO: 4194797 - DNA, 25 bp, Homo sapien
gtcaaggcctcgggccttgcttcac

SEQ ID NO: 4194798 - DNA, 25 bp, Homo sapien
aggcctcgggccttgcttcacaatc

SEQ ID NO: 4194799 - DNA, 25 bp, Homo sapien
cacaggtgacttggattcaaacaca

SEQ ID NO: 4194800 - DNA, 25 bp, Homo sapien
tcagtaattacaggctacagcacag

SEQ ID NO: 4194801 - DNA, 25 bp, Homo sapien
gttccaaagggcaaggactgtggct

SEQ ID NO: 4194802 - DNA, 25 bp, Homo sapien
agaggaagacaagcccgaatgtggc

SEQ ID NO: 4194803 - DNA, 25 bp, Homo sapien
aaatcaaggcaatgaataagcggca

SEQ ID NO: 4194804 - DNA, 25 bp, Homo sapien
tcaaggcaatgaataagcggcagct

SEQ ID NO: 4194805 - DNA, 25 bp, Homo sapien
ggcaatgaataagcggcagctgata

SEQ ID NO: 4194806 - DNA, 25 bp, Homo sapien
atgaataagcggcagctgataaatg

SEQ ID NO: 4194807 - DNA, 25 bp, Homo sapien
ggagctccgggagctcatttgcatc

SEQ ID NO: 4194808 - DNA, 25 bp, Homo sapien
ggtgctcctaaatggcctgtgttgc

SEQ ID NO: 4194809 - DNA, 25 bp, Homo sapien
cctgtgttgctagggaaggaccgct

SEQ ID NO: 4194810 - DNA, 25 bp, Homo sapien
gaccgctggatactgaagcaaccac

SEQ ID NO: 4194811 - DNA, 25 bp, Homo sapien
gaagaagccttaggtggtgctccta

SEQ ID NO: 4194812 - DNA, 25 bp, Homo sapien
tccctttgcatagagctggcccaga

SEQ ID NO: 4194813 - DNA, 25 bp, Homo sapien
catcaggttaccagagaggagctgc

SEQ ID NO: 4194814 - DNA, 25 bp, Homo sapien
cagcatgtaaggcacgagctcctgg

SEQ ID NO: 4194815 - DNA, 25 bp, Homo sapien
tggcatagctggcactgaactcaag

SEQ ID NO: 4194816 - DNA, 25 bp, Homo sapien
taggcaccaggtcccatccatattc

SEQ ID NO: 4194817 - DNA, 25 bp, Homo sapien
cattggccctctgtaggcaccaggt

SEQ ID NO: 4194818 - DNA, 25 bp, Homo sapien
acatctcattggccctctgtaggca

SEQ ID NO: 4194819 - DNA, 25 bp, Homo sapien
tctgtaggcaccaggtcccatccat

SEQ ID NO: 4194820 - DNA, 25 bp, Homo sapien
tcctcctctcatcaactcagcaatc

SEQ ID NO: 4194821 - DNA, 25 bp, Homo sapien
ttcctcctctcatcaactcagcaat

SEQ ID NO: 4194822 - DNA, 25 bp, Homo sapien
tctgctttcccagaggcacaggtcc

SEQ ID NO: 4194823 - DNA, 25 bp, Homo sapien
ggaatctccctgcctttgctcatac

SEQ ID NO: 4194824 - DNA, 25 bp, Homo sapien
aatctccctgcctttgctcatactc

SEQ ID NO: 4194825 - DNA, 25 bp, Homo sapien
ccacctctgagcactcagcatcagc

SEQ ID NO: 4194826 - DNA, 25 bp, Homo sapien
gaatctccctgcctttgctcatact

SEQ ID NO: 4194827 - DNA, 25 bp, Homo sapien
ttaaggctgaatcttgccctccagg

SEQ ID NO: 4194828 - DNA, 25 bp, Homo sapien
ccttaaggctgaatcttgccctcca

SEQ ID NO: 4194829 - DNA, 25 bp, Homo sapien
cttaaggctgaatcttgccctccag

SEQ ID NO: 4194830 - DNA, 25 bp, Homo sapien
cccttaaggctgaatcttgccctcc

SEQ ID NO: 4194831 - DNA, 25 bp, Homo sapien
gagggcaccactggataaacctggt

SEQ ID NO: 4194832 - DNA, 25 bp, Homo sapien
gcaccactggataaacctggttcat

SEQ ID NO: 4194833 - DNA, 25 bp, Homo sapien
ttgtgcccctgaaagtgtactcaga

SEQ ID NO: 4194834 - DNA, 25 bp, Homo sapien
cccctgaaagtgtactcagagggca

SEQ ID NO: 4194835 - DNA, 25 bp, Homo sapien
gccacatggttacttgcaccacacc

SEQ ID NO: 4194836 - DNA, 25 bp, Homo sapien
tggccacatggttacttgcaccaca

SEQ ID NO: 4194837 - DNA, 25 bp, Homo sapien
aacaccacgaagctctcctctgcca

SEQ ID NO: 4194838 - DNA, 25 bp, Homo sapien
caacaccacgaagctctcctctgcc

SEQ ID NO: 4194839 - DNA, 25 bp, Homo sapien
aatcgggctgtcgaaggccagaacc

SEQ ID NO: 4194840 - DNA, 25 bp, Homo sapien
tcagcaatcgggctgtcgaaggcca

SEQ ID NO: 4194841 - DNA, 25 bp, Homo sapien
caagtaactcagcaatcgggctgtc

SEQ ID NO: 4194842 - DNA, 25 bp, Homo sapien
gctgtcgaaggccagaaccagcacc

SEQ ID NO: 4194843 - DNA, 25 bp, Homo sapien
tagatttctaaagcccatgtttcga

SEQ ID NO: 4194844 - DNA, 25 bp, Homo sapien
tactcctcagagtaaacctattagg

SEQ ID NO: 4194845 - DNA, 25 bp, Homo sapien
tattcggatgagaggaatgaggctc

SEQ ID NO: 4194846 - DNA, 25 bp, Homo sapien
aaagttatctcataccctgccccag

SEQ ID NO: 4194847 - DNA, 25 bp, Homo sapien
attgatccaggcaaagctttaccag

SEQ ID NO: 4194848 - DNA, 25 bp, Homo sapien
gcaggtctgaactttagagaggagt

SEQ ID NO: 4194849 - DNA, 25 bp, Homo sapien
tattgagtctggcaggtctgaactt

SEQ ID NO: 4194850 - DNA, 25 bp, Homo sapien
cagattccatgtctcgagacaggga

SEQ ID NO: 4194851 - DNA, 25 bp, Homo sapien
gaagccgtgactctcccaaagtgag

SEQ ID NO: 4194852 - DNA, 25 bp, Homo sapien
cccaaggtaaggcagccaggattta

SEQ ID NO: 4194853 - DNA, 25 bp, Homo sapien
gcacaaggcctctatttgacagaga

SEQ ID NO: 4194854 - DNA, 25 bp, Homo sapien
tcacagcacggtgaagtggcccaag

SEQ ID NO: 4194855 - DNA, 25 bp, Homo sapien
acaggcccctcaccttaaggcacat

SEQ ID NO: 4194856 - DNA, 25 bp, Homo sapien
ttccacaggcccctcaccttaaggc

SEQ ID NO: 4194857 - DNA, 25 bp, Homo sapien
tcaccttaaggcacatttgccccat

SEQ ID NO: 4194858 - DNA, 25 bp, Homo sapien
ggcccctcaccttaaggcacatttg

SEQ ID NO: 4194859 - DNA, 25 bp, Homo sapien
ggacagagctgatacagttggcaga

SEQ ID NO: 4194860 - DNA, 25 bp, Homo sapien
tgggacagagctgatacagttggca

SEQ ID NO: 4194861 - DNA, 25 bp, Homo sapien
agctgatacagttggcagagctgct

SEQ ID NO: 4194862 - DNA, 25 bp, Homo sapien
cagagctgatacagttggcagagct

SEQ ID NO: 4194863 - DNA, 25 bp, Homo sapien
gccgcagagaaggtccccgaggcca

SEQ ID NO: 4194864 - DNA, 25 bp, Homo sapien
cgcagagaaggtccccgaggccaag

SEQ ID NO: 4194865 - DNA, 25 bp, Homo sapien
gcagagaaggtccccgaggccaagc

SEQ ID NO: 4194866 - DNA, 25 bp, Homo sapien
cagccgcagagaaggtccccgaggc

SEQ ID NO: 4194867 - DNA, 25 bp, Homo sapien
tttggacattcatggagcttccctg

SEQ ID NO: 4194868 - DNA, 25 bp, Homo sapien
ttccaaggactcaagattcatgtct

SEQ ID NO: 4194869 - DNA, 25 bp, Homo sapien
ccaaggactcaagattcatgtctaa

SEQ ID NO: 4194870 - DNA, 25 bp, Homo sapien
catgtctaatttttggacattcatg

SEQ ID NO: 4194871 - DNA, 25 bp, Homo sapien
tccagggaagtatactacgctggtc

SEQ ID NO: 4194872 - DNA, 25 bp, Homo sapien
ggagcgttctcctagggccttgaaa

SEQ ID NO: 4194873 - DNA, 25 bp, Homo sapien
gccctgcgagccatgtgggtcctaa

SEQ ID NO: 4194874 - DNA, 25 bp, Homo sapien
tcctgatatagtcctggaggccctt

SEQ ID NO: 4194875 - DNA, 25 bp, Homo sapien
tatatgcaaaagaatcgaaggcagg

SEQ ID NO: 4194876 - DNA, 25 bp, Homo sapien
ggcagtttccaataattaagcagtg

SEQ ID NO: 4194877 - DNA, 25 bp, Homo sapien
catagtaacattatccacagtcacc

SEQ ID NO: 4194878 - DNA, 25 bp, Homo sapien
cacagtcaccaaagggcggaaagaa

SEQ ID NO: 4194879 - DNA, 25 bp, Homo sapien
tgtacgtccctctgtgatttagaag

SEQ ID NO: 4194880 - DNA, 25 bp, Homo sapien
ctgggaggcagttataggcatagat

SEQ ID NO: 4194881 - DNA, 25 bp, Homo sapien
ctggctgtacgtccctctgtgattt

SEQ ID NO: 4194882 - DNA, 25 bp, Homo sapien
ggaggcagttataggcatagatgtc

SEQ ID NO: 4194883 - DNA, 25 bp, Homo sapien
aaagaagccaaagcagtgctcccag

SEQ ID NO: 4194884 - DNA, 25 bp, Homo sapien
gaagccaaagcagtgctcccagcat

SEQ ID NO: 4194885 - DNA, 25 bp, Homo sapien
ccaaaagaagccaaagcagtgctcc

SEQ ID NO: 4194886 - DNA, 25 bp, Homo sapien
tgcacctcacccaccaaaagaagcc

SEQ ID NO: 4194887 - DNA, 25 bp, Homo sapien
caagaacctggaagtgcggtaggaa

SEQ ID NO: 4194888 - DNA, 25 bp, Homo sapien
aagtgcggtaggaagcatggtcact

SEQ ID NO: 4194889 - DNA, 25 bp, Homo sapien
cggtaggaagcatggtcactttcat

SEQ ID NO: 4194890 - DNA, 25 bp, Homo sapien
cacctcactcaagaacctggaagtg

SEQ ID NO: 4194891 - DNA, 25 bp, Homo sapien
tcaatctctctcccaattcaatact

SEQ ID NO: 4194892 - DNA, 25 bp, Homo sapien
tctctcccaattcaatactcctttc

SEQ ID NO: 4194893 - DNA, 25 bp, Homo sapien
aatctctctcccaattcaatactcc

SEQ ID NO: 4194894 - DNA, 25 bp, Homo sapien
tctctctcccaattcaatactcctt

SEQ ID NO: 4194895 - DNA, 25 bp, Homo sapien
tcagcagtagaccacctcacattca

SEQ ID NO: 4194896 - DNA, 25 bp, Homo sapien
ttcagtggcagtcatccatgggcca

SEQ ID NO: 4194897 - DNA, 25 bp, Homo sapien
cagcagtagaccacctcacattcag

SEQ ID NO: 4194898 - DNA, 25 bp, Homo sapien
ctcacattcagtggcagtcatccat

SEQ ID NO: 4194899 - DNA, 25 bp, Homo sapien
tactcaagggttgcactgtccaggc

SEQ ID NO: 4194900 - DNA, 25 bp, Homo sapien
gaatgacggcgtggacaatcacagt

SEQ ID NO: 4194901 - DNA, 25 bp, Homo sapien
taatgctggatcatggacttgtgcc

SEQ ID NO: 4194902 - DNA, 25 bp, Homo sapien
gacttgaccagaagagtgcccaggc

SEQ ID NO: 4194903 - DNA, 25 bp, Homo sapien
taagaatatgcacaagaccacagtg

SEQ ID NO: 4194904 - DNA, 25 bp, Homo sapien
gacactggaagctataagggttaca

SEQ ID NO: 4194905 - DNA, 25 bp, Homo sapien
aggactaaagcccagatgtctctga

SEQ ID NO: 4194906 - DNA, 25 bp, Homo sapien
tctgatctggagacgaatctcctac

SEQ ID NO: 4194907 - DNA, 25 bp, Homo sapien
agcccaccatcagctcatgtgctcc

SEQ ID NO: 4194908 - DNA, 25 bp, Homo sapien
cagcccaccatcagctcatgtgctc

SEQ ID NO: 4194909 - DNA, 25 bp, Homo sapien
tggctctcttcacgtgctccagcat

SEQ ID NO: 4194910 - DNA, 25 bp, Homo sapien
cagttagtttgggaccatctctgtg

SEQ ID NO: 4194911 - DNA, 25 bp, Homo sapien
tgccttctccgctttgatcagggca

SEQ ID NO: 4194912 - DNA, 25 bp, Homo sapien
ttgtgggcctgttggactgtagtcc

SEQ ID NO: 4194913 - DNA, 25 bp, Homo sapien
tttccgtgcattacgatccttcttc

SEQ ID NO: 4194914 - DNA, 25 bp, Homo sapien
ttatttccgtgcattacgatccttc

SEQ ID NO: 4194915 - DNA, 25 bp, Homo sapien
atttccgtgcattacgatccttctt

SEQ ID NO: 4194916 - DNA, 25 bp, Homo sapien
tatttccgtgcattacgatccttct

SEQ ID NO: 4194917 - DNA, 25 bp, Homo sapien
ttgtagggatgaaagtaatcaaaca

SEQ ID NO: 4194918 - DNA, 25 bp, Homo sapien
aaacatccttgctcagtgagtttcc

SEQ ID NO: 4194919 - DNA, 25 bp, Homo sapien
gctgaattgtaccagtaaacatcct

SEQ ID NO: 4194920 - DNA, 25 bp, Homo sapien
aaacatttgttgaccaccttctgca

SEQ ID NO: 4194921 - DNA, 25 bp, Homo sapien
gttgggagggattccgagtcacacc

SEQ ID NO: 4194922 - DNA, 25 bp, Homo sapien
attatcagaagccacttgcgccgga

SEQ ID NO: 4194923 - DNA, 25 bp, Homo sapien
cgagtcacacccagttcttgcagca

SEQ ID NO: 4194924 - DNA, 25 bp, Homo sapien
tcagaagccacttgcgccggaagtg

SEQ ID NO: 4194925 - DNA, 25 bp, Homo sapien
cacagcaatacagttgttccgaggg

SEQ ID NO: 4194926 - DNA, 25 bp, Homo sapien
ccgtgccagggctggattcgagccc

SEQ ID NO: 4194927 - DNA, 25 bp, Homo sapien
ctcgaaagagcaaggtagcggttgg

SEQ ID NO: 4194928 - DNA, 25 bp, Homo sapien
agcggttggagcaggccaccgtgcc

SEQ ID NO: 4194929 - DNA, 25 bp, Homo sapien
tgaaccggcggcgtggcagccccat

SEQ ID NO: 4194930 - DNA, 25 bp, Homo sapien
gagctgaaccggcggcgtggcagcc

SEQ ID NO: 4194931 - DNA, 25 bp, Homo sapien
gcctcggagctgaaccggcggcgtg

SEQ ID NO: 4194932 - DNA, 25 bp, Homo sapien
ctcggagctgaaccggcggcgtggc

SEQ ID NO: 4194933 - DNA, 25 bp, Homo sapien
tactgtcccctatgcttgagaagct

SEQ ID NO: 4194934 - DNA, 25 bp, Homo sapien
gctaaccagatctcagctttggtca

SEQ ID NO: 4194935 - DNA, 25 bp, Homo sapien
tttggtcatatttgccaggaaccct

SEQ ID NO: 4194936 - DNA, 25 bp, Homo sapien
ttctccttagcatggctaaccagat

SEQ ID NO: 4194937 - DNA, 25 bp, Homo sapien
cattagcttataggttggtggcttc

SEQ ID NO: 4194938 - DNA, 25 bp, Homo sapien
cttccaactgtgcctgagtcattag

SEQ ID NO: 4194939 - DNA, 25 bp, Homo sapien
tgtcattttcgtgagtatgctttga

SEQ ID NO: 4194940 - DNA, 25 bp, Homo sapien
tctgcaagttcaagcctgtcatttt

SEQ ID NO: 4194941 - DNA, 25 bp, Homo sapien
ccggtgtggtatgctatatgatata

SEQ ID NO: 4194942 - DNA, 25 bp, Homo sapien
tcgtactttagctgcctcaactgcc

SEQ ID NO: 4194943 - DNA, 25 bp, Homo sapien
aactggtggcatttttaatcgtact

SEQ ID NO: 4194944 - DNA, 25 bp, Homo sapien
ggtactcgctcttccagaactggtg

SEQ ID NO: 4194945 - DNA, 25 bp, Homo sapien
gaagataacatagatgaaacttcca

SEQ ID NO: 4194946 - DNA, 25 bp, Homo sapien
aagttttcagaggtgtaggagtctc

SEQ ID NO: 4194947 - DNA, 25 bp, Homo sapien
taaattaaccaaacagtactgactc

SEQ ID NO: 4194948 - DNA, 25 bp, Homo sapien
tgtgttctgaagataacatagatga

SEQ ID NO: 4194949 - DNA, 25 bp, Homo sapien
cattcggtcccgttcttcccaagag

SEQ ID NO: 4194950 - DNA, 25 bp, Homo sapien
ggttctctgacgacaataaaacgct

SEQ ID NO: 4194951 - DNA, 25 bp, Homo sapien
tgggaaataaacttgtatcattcgg

SEQ ID NO: 4194952 - DNA, 25 bp, Homo sapien
ggctttgcgtagtgtgccacttggt

SEQ ID NO: 4194953 - DNA, 25 bp, Homo sapien
taagccaattatgagagaaccctag

SEQ ID NO: 4194954 - DNA, 25 bp, Homo sapien
tttatctggatcaaggcacaaagcc

SEQ ID NO: 4194955 - DNA, 25 bp, Homo sapien
agaaccctagtacaacccatcttgg

SEQ ID NO: 4194956 - DNA, 25 bp, Homo sapien
cacagcagagttagcatcacatgag

SEQ ID NO: 4194957 - DNA, 25 bp, Homo sapien
attgaggacatcaacatgcctgtcc

SEQ ID NO: 4194958 - DNA, 25 bp, Homo sapien
gattgaggacatcaacatgcctgtc

SEQ ID NO: 4194959 - DNA, 25 bp, Homo sapien
ttgaggacatcaacatgcctgtcct

SEQ ID NO: 4194960 - DNA, 25 bp, Homo sapien
agattgaggacatcaacatgcctgt

SEQ ID NO: 4194961 - DNA, 25 bp, Homo sapien
cttgatatactctgtggaatctggc

SEQ ID NO: 4194962 - DNA, 25 bp, Homo sapien
tgtggcagcctgaagcaaaatacca

SEQ ID NO: 4194963 - DNA, 25 bp, Homo sapien
taaaaccaggtctacttacagttgc

SEQ ID NO: 4194964 - DNA, 25 bp, Homo sapien
gattatgcatatagagaccactgga

SEQ ID NO: 4194965 - DNA, 25 bp, Homo sapien
gcctagcatctgaggtcacctatga

SEQ ID NO: 4194966 - DNA, 25 bp, Homo sapien
tcttgttgaacgtaaaaggtcatat

SEQ ID NO: 4194967 - DNA, 25 bp, Homo sapien
caccattccaccaaagtatcttgtt

SEQ ID NO: 4194968 - DNA, 25 bp, Homo sapien
tccacgtttatctatatcttcatag

SEQ ID NO: 4194969 - DNA, 25 bp, Homo sapien
atcagcaaaccatcaatctttttat

SEQ ID NO: 4194970 - DNA, 25 bp, Homo sapien
aaaacgacactcaaaatgcttgtgc

SEQ ID NO: 4194971 - DNA, 25 bp, Homo sapien
ccatctcatcgctggagggcacaga

SEQ ID NO: 4194972 - DNA, 25 bp, Homo sapien
gaggctctgctatatacactaagtg

SEQ ID NO: 4194973 - DNA, 25 bp, Homo sapien
gaaaatcgggttctacatcagcaat

SEQ ID NO: 4194974 - DNA, 25 bp, Homo sapien
tcctataaaagtgtgtgccaacttc

SEQ ID NO: 4194975 - DNA, 25 bp, Homo sapien
gaatgaaagggtttaatgttatcta

SEQ ID NO: 4194976 - DNA, 25 bp, Homo sapien
agtgtgtgccaacttcaaactaaat

SEQ ID NO: 4194977 - DNA, 25 bp, Homo sapien
tttgattcacagtcctataaaagtg

SEQ ID NO: 4194978 - DNA, 25 bp, Homo sapien
gattaaatttattccctcagcagcc

SEQ ID NO: 4194979 - DNA, 25 bp, Homo sapien
ctggccatctggatggagcacgtga

SEQ ID NO: 4194980 - DNA, 25 bp, Homo sapien
taaatttattccctcagcagcctga

SEQ ID NO: 4194981 - DNA, 25 bp, Homo sapien
cagctggaccaagttggttgcatca

SEQ ID NO: 4194982 - DNA, 25 bp, Homo sapien
atttctgtagtagcaaagagtccta

SEQ ID NO: 4194983 - DNA, 25 bp, Homo sapien
aaacaataggacatatgctatttat

SEQ ID NO: 4194984 - DNA, 25 bp, Homo sapien
tctgtagtagcaaagagtcctactt

SEQ ID NO: 4194985 - DNA, 25 bp, Homo sapien
tagtagcaaagagtcctacttaaaa

SEQ ID NO: 4194986 - DNA, 25 bp, Homo sapien
gcttcttgataagtctgcagtgtta

SEQ ID NO: 4194987 - DNA, 25 bp, Homo sapien
cagtgttagttctatataggctccc

SEQ ID NO: 4194988 - DNA, 25 bp, Homo sapien
ttaggaagctgcagaatggcgactg

SEQ ID NO: 4194989 - DNA, 25 bp, Homo sapien
tctatataggctcccttctgtgctt

SEQ ID NO: 4194990 - DNA, 25 bp, Homo sapien
gatatcttttaatctggccattttt

SEQ ID NO: 4194991 - DNA, 25 bp, Homo sapien
tatcttttaatctggccatttttta

SEQ ID NO: 4194992 - DNA, 25 bp, Homo sapien
acatttagctcaatattaacagaga

SEQ ID NO: 4194993 - DNA, 25 bp, Homo sapien
atttagctcaatattaacagagaaa

SEQ ID NO: 4194994 - DNA, 25 bp, Homo sapien
agtgagtagggtaataatttttgct

SEQ ID NO: 4194995 - DNA, 25 bp, Homo sapien
ttgagaaattcataaccaggcactc

SEQ ID NO: 4194996 - DNA, 25 bp, Homo sapien
ccttgtagcctacgaaaagtgagta

SEQ ID NO: 4194997 - DNA, 25 bp, Homo sapien
tcataaccaggcactcaaatatcct

SEQ ID NO: 4194998 - DNA, 25 bp, Homo sapien
tctagttttagaaggctgagccgaa

SEQ ID NO: 4194999 - DNA, 25 bp, Homo sapien
gagccgaaactacaccttgcctagg

SEQ ID NO: 4195000 - DNA, 25 bp, Homo sapien
taccctgaccacagtgctttggact

SEQ ID NO: 4195001 - DNA, 25 bp, Homo sapien
caatgcccacatcatcttaagaaga

SEQ ID NO: 4195002 - DNA, 25 bp, Homo sapien
ctgcttctcctactccggttattgt

SEQ ID NO: 4195003 - DNA, 25 bp, Homo sapien
tcctactccggttattgtggcctcc

SEQ ID NO: 4195004 - DNA, 25 bp, Homo sapien
gcttctcctactccggttattgtgg

SEQ ID NO: 4195005 - DNA, 25 bp, Homo sapien
tactccggttattgtggcctcccac

SEQ ID NO: 4195006 - DNA, 25 bp, Homo sapien
gctgatatctgggatttaggccaag

SEQ ID NO: 4195007 - DNA, 25 bp, Homo sapien
tacagggtggaagtacattcaggac

SEQ ID NO: 4195008 - DNA, 25 bp, Homo sapien
caatacccacttgtcacggtgagtg

SEQ ID NO: 4195009 - DNA, 25 bp, Homo sapien
caagatctacagctcaacaggtcag

SEQ ID NO: 4195010 - DNA, 25 bp, Homo sapien
gctttttcatgctgaggatgtaagg

SEQ ID NO: 4195011 - DNA, 25 bp, Homo sapien
aaataagacaccatggtattctgct

SEQ ID NO: 4195012 - DNA, 25 bp, Homo sapien
tatacctgtaagaatagaccctatt

SEQ ID NO: 4195013 - DNA, 25 bp, Homo sapien
tactgtatcacctttcgaaaatcca

SEQ ID NO: 4195014 - DNA, 25 bp, Homo sapien
cctattgttaaccagaattgtgtca

SEQ ID NO: 4195015 - DNA, 25 bp, Homo sapien
atagtcaccattgcccacttggaca

SEQ ID NO: 4195016 - DNA, 25 bp, Homo sapien
gacaggtacctgagtatcattttgc

SEQ ID NO: 4195017 - DNA, 25 bp, Homo sapien
cttgtagcaatgataggctgatttt

SEQ ID NO: 4195018 - DNA, 25 bp, Homo sapien
aagaagtgtcttttgtaccctgctc

SEQ ID NO: 4195019 - DNA, 25 bp, Homo sapien
tggcttagccttctatgactgggac

SEQ ID NO: 4195020 - DNA, 25 bp, Homo sapien
tctgggtccctaaggccaagaagtg

SEQ ID NO: 4195021 - DNA, 25 bp, Homo sapien
tgggacaatacagaactcatacgaa

SEQ ID NO: 4195022 - DNA, 25 bp, Homo sapien
taaatatccagtgatagccacagct

SEQ ID NO: 4195023 - DNA, 25 bp, Homo sapien
tatccagccaagaccttgctcagca

SEQ ID NO: 4195024 - DNA, 25 bp, Homo sapien
caaaggtaatgtgttatcttaagca

SEQ ID NO: 4195025 - DNA, 25 bp, Homo sapien
gctgatgatggctgattaatgaacc

SEQ ID NO: 4195026 - DNA, 25 bp, Homo sapien
tctacaggttagagttgaagtgcct

SEQ ID NO: 4195027 - DNA, 25 bp, Homo sapien
gaagtgcctactcattcagcctttg

SEQ ID NO: 4195028 - DNA, 25 bp, Homo sapien
gacagttcttatgaaccggtcccta

SEQ ID NO: 4195029 - DNA, 25 bp, Homo sapien
gatcgcatgttgtgtctactctcag

SEQ ID NO: 4195030 - DNA, 25 bp, Homo sapien
tcattttcttttgccgtctttacat

SEQ ID NO: 4195031 - DNA, 25 bp, Homo sapien
ggctcttggatctgcctaatttcat

SEQ ID NO: 4195032 - DNA, 25 bp, Homo sapien
ctttacatttaccagtgtatttcta

SEQ ID NO: 4195033 - DNA, 25 bp, Homo sapien
tctgctgtggttgcagtaatggacg

SEQ ID NO: 4195034 - DNA, 25 bp, Homo sapien
gggccacgctaatctcctctctatg

SEQ ID NO: 4195035 - DNA, 25 bp, Homo sapien
aggggccacgctaatctcctctcta

SEQ ID NO: 4195036 - DNA, 25 bp, Homo sapien
gcaggggccacgctaatctcctctc

SEQ ID NO: 4195037 - DNA, 25 bp, Homo sapien
ggggccacgctaatctcctctctat

SEQ ID NO: 4195038 - DNA, 25 bp, Homo sapien
cagaagccgaatgtgttgaactccg

SEQ ID NO: 4195039 - DNA, 25 bp, Homo sapien
gcttgtggcgcttgccagagctcct

SEQ ID NO: 4195040 - DNA, 25 bp, Homo sapien
gttttgtctcccctggcgcttgtgg

SEQ ID NO: 4195041 - DNA, 25 bp, Homo sapien
tagttaatctacactcctgttgggc

SEQ ID NO: 4195042 - DNA, 25 bp, Homo sapien
tctgactatcgcgagaatcggctcc

SEQ ID NO: 4195043 - DNA, 25 bp, Homo sapien
cagcggtctggaaggccacgttgcc

SEQ ID NO: 4195044 - DNA, 25 bp, Homo sapien
tcccggaagttccacgtcagtcagt

SEQ ID NO: 4195045 - DNA, 25 bp, Homo sapien
aaacgacggccctgcgcgcagtttg

SEQ ID NO: 4195046 - DNA, 25 bp, Homo sapien
tccagcggggattaggcacttcgtt

SEQ ID NO: 4195047 - DNA, 25 bp, Homo sapien
cacgtcacggcccttagtggtctag

SEQ ID NO: 4195048 - DNA, 25 bp, Homo sapien
gttttcctcatcgtttcaatctcta

SEQ ID NO: 4195049 - DNA, 25 bp, Homo sapien
ttcccgacagcctcaagtccactac

SEQ ID NO: 4195050 - DNA, 25 bp, Homo sapien
tcttcgcagccttaatcagtgcccg

SEQ ID NO: 4195051 - DNA, 25 bp, Homo sapien
tgcagagaattctctgggcctcgca

SEQ ID NO: 4195052 - DNA, 25 bp, Homo sapien
gaacacactggagactcgtttcgcc

SEQ ID NO: 4195053 - DNA, 25 bp, Homo sapien
ggaagcccgatagcggttctcggcc

SEQ ID NO: 4195054 - DNA, 25 bp, Homo sapien
ccacacggttgggtagttgccgtct

SEQ ID NO: 4195055 - DNA, 25 bp, Homo sapien
ccagaagtgtaagctctcagccctc

SEQ ID NO: 4195056 - DNA, 25 bp, Homo sapien
cacacggttgggtagttgccgtctc

SEQ ID NO: 4195057 - DNA, 25 bp, Homo sapien
gggagctccagaagtgtaagctctc

SEQ ID NO: 4195058 - DNA, 25 bp, Homo sapien
gtctgacacactgccgaagatcgat

SEQ ID NO: 4195059 - DNA, 25 bp, Homo sapien
gaatgaataacacagccagccgaag

SEQ ID NO: 4195060 - DNA, 25 bp, Homo sapien
ggcacaggcccttagaattcagcca

SEQ ID NO: 4195061 - DNA, 25 bp, Homo sapien
tattgtgtagtgtaacccctatggc

SEQ ID NO: 4195062 - DNA, 25 bp, Homo sapien
aatacacgtttgtacgtgtaaccag

SEQ ID NO: 4195063 - DNA, 25 bp, Homo sapien
tgtacgtgtaaccagagggcaagtt

SEQ ID NO: 4195064 - DNA, 25 bp, Homo sapien
tttctatggtccacatgttttctta

SEQ ID NO: 4195065 - DNA, 25 bp, Homo sapien
gggcaagttttctatggtccacatg

SEQ ID NO: 4195066 - DNA, 25 bp, Homo sapien
taatttcgtgcaaaatcatctccct

SEQ ID NO: 4195067 - DNA, 25 bp, Homo sapien
gccaaataatttcgtgcaaaatcat

SEQ ID NO: 4195068 - DNA, 25 bp, Homo sapien
tactaaagccaaataatttcgtgca

SEQ ID NO: 4195069 - DNA, 25 bp, Homo sapien
cctactaaagccaaataatttcgtg

SEQ ID NO: 4195070 - DNA, 25 bp, Homo sapien
cagtcactccatagagtaagcaaag

SEQ ID NO: 4195071 - DNA, 25 bp, Homo sapien
gctggcactaaactccagttccaga

SEQ ID NO: 4195072 - DNA, 25 bp, Homo sapien
cacttagtactgtgccaaatccaaa

SEQ ID NO: 4195073 - DNA, 25 bp, Homo sapien
tcaagtgcaagagtattcaggagtt

SEQ ID NO: 4195074 - DNA, 25 bp, Homo sapien
tagagaacgaatccgcagatggaga

SEQ ID NO: 4195075 - DNA, 25 bp, Homo sapien
cagagcccactggtcatgacttacc

SEQ ID NO: 4195076 - DNA, 25 bp, Homo sapien
tggagaactgtggagatcactaaca

SEQ ID NO: 4195077 - DNA, 25 bp, Homo sapien
tctgtaccccatgagtgaagagtgg

SEQ ID NO: 4195078 - DNA, 25 bp, Homo sapien
catcacttggtacatcaaggaccag

SEQ ID NO: 4195079 - DNA, 25 bp, Homo sapien
ccctataaagttctggacactctgg

SEQ ID NO: 4195080 - DNA, 25 bp, Homo sapien
aaagttgtagaacaaggccctgcta

SEQ ID NO: 4195081 - DNA, 25 bp, Homo sapien
gcttgaaaaatccacgttgcttgca

SEQ ID NO: 4195082 - DNA, 25 bp, Homo sapien
tgcatatgtacacttctccccttgg

SEQ ID NO: 4195083 - DNA, 25 bp, Homo sapien
tctcctaaggcagcaagtatcccca

SEQ ID NO: 4195084 - DNA, 25 bp, Homo sapien
atgtcttctctcaagggatgtctaa

SEQ ID NO: 4195085 - DNA, 25 bp, Homo sapien
taaggcagcaagtatccccagaaat

SEQ ID NO: 4195086 - DNA, 25 bp, Homo sapien
cttgaagccccgacaccatccttcc

SEQ ID NO: 4195087 - DNA, 25 bp, Homo sapien
tcttgaagccccgacaccatccttc

SEQ ID NO: 4195088 - DNA, 25 bp, Homo sapien
agtcttgaagccccgacaccatcct

SEQ ID NO: 4195089 - DNA, 25 bp, Homo sapien
ttgaagccccgacaccatccttccc

SEQ ID NO: 4195090 - DNA, 25 bp, Homo sapien
ccctagatggtcttttatggtcttt

SEQ ID NO: 4195091 - DNA, 25 bp, Homo sapien
tgaagtccctagatggtcttttatg

SEQ ID NO: 4195092 - DNA, 25 bp, Homo sapien
tatggtcttttatacttatggagag

SEQ ID NO: 4195093 - DNA, 25 bp, Homo sapien
gatggtcttttatggtcttttatac

SEQ ID NO: 4195094 - DNA, 25 bp, Homo sapien
accagtctagagcttgccttctcat

SEQ ID NO: 4195095 - DNA, 25 bp, Homo sapien
tattctagatataagttctttgttg

SEQ ID NO: 4195096 - DNA, 25 bp, Homo sapien
tcttttgatgaactccaatttaata

SEQ ID NO: 4195097 - DNA, 25 bp, Homo sapien
gcacccagccttcactgtggttcta

SEQ ID NO: 4195098 - DNA, 25 bp, Homo sapien
tccttctaagcgctgtgagggaaaa

SEQ ID NO: 4195099 - DNA, 25 bp, Homo sapien
ggattggttccttctaagcgctgtg

SEQ ID NO: 4195100 - DNA, 25 bp, Homo sapien
agcgctgtgagggaaaacctgttcc

SEQ ID NO: 4195101 - DNA, 25 bp, Homo sapien
tctaagcgctgtgagggaaaacctg

SEQ ID NO: 4195102 - DNA, 25 bp, Homo sapien
ttctagctcatggaaaccccggaag

SEQ ID NO: 4195103 - DNA, 25 bp, Homo sapien
cagtgtcgtgtgacatgagcccagc

SEQ ID NO: 4195104 - DNA, 25 bp, Homo sapien
cctagaagagctggacaaaacctgc

SEQ ID NO: 4195105 - DNA, 25 bp, Homo sapien
tacaagatttcctcctagtagggct

SEQ ID NO: 4195106 - DNA, 25 bp, Homo sapien
tgaagttcatacatggtgagcaggt

SEQ ID NO: 4195107 - DNA, 25 bp, Homo sapien
gatcgtctagtatgaaccagcccca

SEQ ID NO: 4195108 - DNA, 25 bp, Homo sapien
taaacctcacagtcttgcaggtgtc

SEQ ID NO: 4195109 - DNA, 25 bp, Homo sapien
tgttcaaaagcacacccctaagaag

SEQ ID NO: 4195110 - DNA, 25 bp, Homo sapien
gcacttatcagtgccagcacctgtg

SEQ ID NO: 4195111 - DNA, 25 bp, Homo sapien
caagggctgagacagttatctttcg

SEQ ID NO: 4195112 - DNA, 25 bp, Homo sapien
gtcagccagcctatttatcaagcac

SEQ ID NO: 4195113 - DNA, 25 bp, Homo sapien
tgagcctcctctttatagtgcgcct

SEQ ID NO: 4195114 - DNA, 25 bp, Homo sapien
tggactttggcatcagcccttggtt

SEQ ID NO: 4195115 - DNA, 25 bp, Homo sapien
tcaagcttggactttggcatcagcc

SEQ ID NO: 4195116 - DNA, 25 bp, Homo sapien
gaacatggaccttgtcactctccag

SEQ ID NO: 4195117 - DNA, 25 bp, Homo sapien
catcagcccttggtttgaacatgga

SEQ ID NO: 4195118 - DNA, 25 bp, Homo sapien
gaactcattcccaacatgtgcatgc

SEQ ID NO: 4195119 - DNA, 25 bp, Homo sapien
aagctctgacaagtcctccagcaaa

SEQ ID NO: 4195120 - DNA, 25 bp, Homo sapien
gatcctgggttaagattccatgaaa

SEQ ID NO: 4195121 - DNA, 25 bp, Homo sapien
gaagagttccacatccacagtgtgc

SEQ ID NO: 4195122 - DNA, 25 bp, Homo sapien
gattcagtccctgttagccctggtc

SEQ ID NO: 4195123 - DNA, 25 bp, Homo sapien
tggatacgcagatggaatagtgcac

SEQ ID NO: 4195124 - DNA, 25 bp, Homo sapien
ctggtgccttcagaacattaggttc

SEQ ID NO: 4195125 - DNA, 25 bp, Homo sapien
taactagagataggtcaatacttcc

SEQ ID NO: 4195126 - DNA, 25 bp, Homo sapien
ggtcactaactacaggtctactcag

SEQ ID NO: 4195127 - DNA, 25 bp, Homo sapien
ctagaaacattctgtggcccgcaca

SEQ ID NO: 4195128 - DNA, 25 bp, Homo sapien
tctgagactcattcctttggatgca

SEQ ID NO: 4195129 - DNA, 25 bp, Homo sapien
gcctgggcagagctattccaacaga

SEQ ID NO: 4195130 - DNA, 25 bp, Homo sapien
tgtagtgcccagttctatgccagcc

SEQ ID NO: 4195131 - DNA, 25 bp, Homo sapien
cacacttggtggcatgcctgagtga

SEQ ID NO: 4195132 - DNA, 25 bp, Homo sapien
gcctgagtgaacacctatacacgtg

SEQ ID NO: 4195133 - DNA, 25 bp, Homo sapien
gaaatctccccactcggcagtgtgg

SEQ ID NO: 4195134 - DNA, 25 bp, Homo sapien
gctaaaatggtgaaaaccgatctct

SEQ ID NO: 4195135 - DNA, 25 bp, Homo sapien
tcaaaacaatcctggctaaaatggt

SEQ ID NO: 4195136 - DNA, 25 bp, Homo sapien
gggaggcagagcttatagtgggcca

SEQ ID NO: 4195137 - DNA, 25 bp, Homo sapien
gagatcaaaacaatcctggctaaaa

SEQ ID NO: 4195138 - DNA, 25 bp, Homo sapien
aacaaggaagatgctcttcagtggc

SEQ ID NO: 4195139 - DNA, 25 bp, Homo sapien
acaaggaagatgctcttcagtggct

SEQ ID NO: 4195140 - DNA, 25 bp, Homo sapien
gaacaaggaagatgctcttcagtgg

SEQ ID NO: 4195141 - DNA, 25 bp, Homo sapien
tagaacaaggaagatgctcttcagt

SEQ ID NO: 4195142 - DNA, 25 bp, Homo sapien
gatattatgatgatggcagcctcca

SEQ ID NO: 4195143 - DNA, 25 bp, Homo sapien
gaaccaaatgtccagcgacgagact

SEQ ID NO: 4195144 - DNA, 25 bp, Homo sapien
gagccatgatcacaggctgccagcc

SEQ ID NO: 4195145 - DNA, 25 bp, Homo sapien
gatcctcacaacaaggtgatgcagt

SEQ ID NO: 4195146 - DNA, 25 bp, Homo sapien
catggctcgggaagcatcaccccag

SEQ ID NO: 4195147 - DNA, 25 bp, Homo sapien
atggctcgggaagcatcaccccagc

SEQ ID NO: 4195148 - DNA, 25 bp, Homo sapien
gctcgggaagcatcaccccagcaaa

SEQ ID NO: 4195149 - DNA, 25 bp, Homo sapien
tggctcgggaagcatcaccccagca

SEQ ID NO: 4195150 - DNA, 25 bp, Homo sapien
gatgctgtgcttggtctgggcctca

SEQ ID NO: 4195151 - DNA, 25 bp, Homo sapien
tgctgtgcttggtctgggcctcatc

SEQ ID NO: 4195152 - DNA, 25 bp, Homo sapien
gctgtgcttggtctgggcctcatcg

SEQ ID NO: 4195153 - DNA, 25 bp, Homo sapien
tgtgcttggtctgggcctcatcgcc

SEQ ID NO: 4195154 - DNA, 25 bp, Homo sapien
ctcattggtgatgatgtcatgcttg

SEQ ID NO: 4195155 - DNA, 25 bp, Homo sapien
ttggtgatgatgtcatgcttgatgg

SEQ ID NO: 4195156 - DNA, 25 bp, Homo sapien
cattggtgatgatgtcatgcttgat

SEQ ID NO: 4195157 - DNA, 25 bp, Homo sapien
tgatgatgtcatgcttgatggggta

SEQ ID NO: 4195158 - DNA, 25 bp, Homo sapien
aggtgtggtgccagatcttctccat

SEQ ID NO: 4195159 - DNA, 25 bp, Homo sapien
cttgttgtagaaggtgtggtgccag

SEQ ID NO: 4195160 - DNA, 25 bp, Homo sapien
ttgttgtagaaggtgtggtgccaga

SEQ ID NO: 4195161 - DNA, 25 bp, Homo sapien
agaaggtgtggtgccagatcttctc

SEQ ID NO: 4195162 - DNA, 25 bp, Homo sapien
cttggtcatcagcacaagggggggc

SEQ ID NO: 4195163 - DNA, 25 bp, Homo sapien
cctcatagatgggtaccgtgtgggc

SEQ ID NO: 4195164 - DNA, 25 bp, Homo sapien
cagccatggtggtgaaacggtagct

SEQ ID NO: 4195165 - DNA, 25 bp, Homo sapien
tgggtaccgtgtgggcgaccccatc

SEQ ID NO: 4195166 - DNA, 25 bp, Homo sapien
aaacggtagctgcactccatgagga

SEQ ID NO: 4195167 - DNA, 25 bp, Homo sapien
cagaaccactcgttgccgatggtga

SEQ ID NO: 4195168 - DNA, 25 bp, Homo sapien
accactcgttgccgatggtgatgac

SEQ ID NO: 4195169 - DNA, 25 bp, Homo sapien
agaaccactcgttgccgatggtgat

SEQ ID NO: 4195170 - DNA, 25 bp, Homo sapien
gaaccactcgttgccgatggtgatg

SEQ ID NO: 4195171 - DNA, 25 bp, Homo sapien
aaggctgaaacagtgcctccggtac

SEQ ID NO: 4195172 - DNA, 25 bp, Homo sapien
ttttggcatacagttctttgcagat

SEQ ID NO: 4195173 - DNA, 25 bp, Homo sapien
gacggaggggcccaactcatcatac

SEQ ID NO: 4195174 - DNA, 25 bp, Homo sapien
catcctgtcggcaattcccagatac

SEQ ID NO: 4195175 - DNA, 25 bp, Homo sapien
gcaattcccagatacatggtggtgc

SEQ ID NO: 4195176 - DNA, 25 bp, Homo sapien
gcccatgcgagcctctagagaaatt

SEQ ID NO: 4195177 - DNA, 25 bp, Homo sapien
atgcgagcctctagagaaattccag

SEQ ID NO: 4195178 - DNA, 25 bp, Homo sapien
aattggttcaggagcccatgcgagc

SEQ ID NO: 4195179 - DNA, 25 bp, Homo sapien
aacaattggttcaggagcccatgcg

SEQ ID NO: 4195180 - DNA, 25 bp, Homo sapien
tggttcaaggcaaatcaggaaggtt

SEQ ID NO: 4195181 - DNA, 25 bp, Homo sapien
gaaccaagcccatcaagactgagtg

SEQ ID NO: 4195182 - DNA, 25 bp, Homo sapien
gacaatcagtaaatcaaggaaccaa

SEQ ID NO: 4195183 - DNA, 25 bp, Homo sapien
tatgctctttcatactctggtgaca

SEQ ID NO: 4195184 - DNA, 25 bp, Homo sapien
tatctgtgcattgagaaccactggc

SEQ ID NO: 4195185 - DNA, 25 bp, Homo sapien
tctggagtagggcttagacttctct

SEQ ID NO: 4195186 - DNA, 25 bp, Homo sapien
tgattggtggcatgcaaaacaaaga

SEQ ID NO: 4195187 - DNA, 25 bp, Homo sapien
tgtaaacaaatatctcctagggtaa

SEQ ID NO: 4195188 - DNA, 25 bp, Homo sapien
cagttctaatggattgggtgttgac

SEQ ID NO: 4195189 - DNA, 25 bp, Homo sapien
taggttgctcttatatctggcaaac

SEQ ID NO: 4195190 - DNA, 25 bp, Homo sapien
caatggtgttaattcctagaaggta

SEQ ID NO: 4195191 - DNA, 25 bp, Homo sapien
aaaatagatatggatggctgacttc

SEQ ID NO: 4195192 - DNA, 25 bp, Homo sapien
tactagtcaggacattggagcttct

SEQ ID NO: 4195193 - DNA, 25 bp, Homo sapien
gctcacagggcatggatagaaactg

SEQ ID NO: 4195194 - DNA, 25 bp, Homo sapien
tccacatgactttttgctcacaggg

SEQ ID NO: 4195195 - DNA, 25 bp, Homo sapien
cactgtctcagtagcaaggagaggg

SEQ ID NO: 4195196 - DNA, 25 bp, Homo sapien
gcacggataagtgaatgggtgtcct

SEQ ID NO: 4195197 - DNA, 25 bp, Homo sapien
gcacagtagccttctggataaacac

SEQ ID NO: 4195198 - DNA, 25 bp, Homo sapien
aagatcagttgatgaggaaaccaag

SEQ ID NO: 4195199 - DNA, 25 bp, Homo sapien
tgcctctgagtgaatccggaaccct

SEQ ID NO: 4195200 - DNA, 25 bp, Homo sapien
tgtactggccccaggtagcagatcc

SEQ ID NO: 4195201 - DNA, 25 bp, Homo sapien
cctgccaggtaagcaagcatctgga

SEQ ID NO: 4195202 - DNA, 25 bp, Homo sapien
aggtagcagatccagcacggcctgc

SEQ ID NO: 4195203 - DNA, 25 bp, Homo sapien
ccaggtttggccagctggagcacga

SEQ ID NO: 4195204 - DNA, 25 bp, Homo sapien
caaatcactccaatggttaacccct

SEQ ID NO: 4195205 - DNA, 25 bp, Homo sapien
tacagcatcagcgtcaatcgagcat

SEQ ID NO: 4195206 - DNA, 25 bp, Homo sapien
gcatcaagcagtagtcgagcagacc

SEQ ID NO: 4195207 - DNA, 25 bp, Homo sapien
actggacgaatccagtgaaactggt

SEQ ID NO: 4195208 - DNA, 25 bp, Homo sapien
tcgagcagaccgtgcagattcagcc

SEQ ID NO: 4195209 - DNA, 25 bp, Homo sapien
ttcctggaaatcaatgcgtgtttga

SEQ ID NO: 4195210 - DNA, 25 bp, Homo sapien
ttagaggacttgatcccaggcttcc

SEQ ID NO: 4195211 - DNA, 25 bp, Homo sapien
gaaatcaatgcgtgtttgaccagct

SEQ ID NO: 4195212 - DNA, 25 bp, Homo sapien
cttagaggacttgatcccaggcttc

SEQ ID NO: 4195213 - DNA, 25 bp, Homo sapien
cacaagctgcctaaacatcgtgttt

SEQ ID NO: 4195214 - DNA, 25 bp, Homo sapien
aaacatcgtgtttatcctctgctgc

SEQ ID NO: 4195215 - DNA, 25 bp, Homo sapien
tctccacaagctgcctaaacatcgt

SEQ ID NO: 4195216 - DNA, 25 bp, Homo sapien
ttttggaagtacagactctccacaa

SEQ ID NO: 4195217 - DNA, 25 bp, Homo sapien
aggaaactcctgcccaagaggcgca

SEQ ID NO: 4195218 - DNA, 25 bp, Homo sapien
tcctgcccaagaggcgcactgagct

SEQ ID NO: 4195219 - DNA, 25 bp, Homo sapien
actcctgcccaagaggcgcactgag

SEQ ID NO: 4195220 - DNA, 25 bp, Homo sapien
cccaagaggcgcactgagctcagaa

SEQ ID NO: 4195221 - DNA, 25 bp, Homo sapien
ttcactgttctccttccactgtggg

SEQ ID NO: 4195222 - DNA, 25 bp, Homo sapien
tcactgttctccttccactgtgggc

SEQ ID NO: 4195223 - DNA, 25 bp, Homo sapien
cactgttctccttccactgtgggca

SEQ ID NO: 4195224 - DNA, 25 bp, Homo sapien
cagagacatgcgctgtccctgaatg

SEQ ID NO: 4195225 - DNA, 25 bp, Homo sapien
gcaggtcggggccatatgtttcttc

SEQ ID NO: 4195226 - DNA, 25 bp, Homo sapien
aacatctatggccagatgaccctcc

SEQ ID NO: 4195227 - DNA, 25 bp, Homo sapien
gcccatgtggccatgactggcaggt

SEQ ID NO: 4195228 - DNA, 25 bp, Homo sapien
gattcccaggagtgtttattgctat

SEQ ID NO: 4195229 - DNA, 25 bp, Homo sapien
tgcataaacccttagaagccagtgc

SEQ ID NO: 4195230 - DNA, 25 bp, Homo sapien
gatcttaccagattgtagacagtag

SEQ ID NO: 4195231 - DNA, 25 bp, Homo sapien
agtgcttttgttggatagattccca

SEQ ID NO: 4195232 - DNA, 25 bp, Homo sapien
gatgcctgaccgttttaaaggatct

SEQ ID NO: 4195233 - DNA, 25 bp, Homo sapien
gaactgaggtaaaacagatgcctga

SEQ ID NO: 4195234 - DNA, 25 bp, Homo sapien
aacttgctatagcataaaagccggg

SEQ ID NO: 4195235 - DNA, 25 bp, Homo sapien
gcctgtctgtttgaatactggcaaa

SEQ ID NO: 4195236 - DNA, 25 bp, Homo sapien
gattaggcagaatctctcagagctg

SEQ ID NO: 4195237 - DNA, 25 bp, Homo sapien
gcagcatgctagtcttgattggaaa

SEQ ID NO: 4195238 - DNA, 25 bp, Homo sapien
ggtcagatcagaattgcccacaatg

SEQ ID NO: 4195239 - DNA, 25 bp, Homo sapien
taattatggcatgcacgctgaatgc

SEQ ID NO: 4195240 - DNA, 25 bp, Homo sapien
aaatatgactatacttcccatctgt

SEQ ID NO: 4195241 - DNA, 25 bp, Homo sapien
gagaaacacttatgaaggaagtgga

SEQ ID NO: 4195242 - DNA, 25 bp, Homo sapien
catctgttagcatgtctaaatagaa

SEQ ID NO: 4195243 - DNA, 25 bp, Homo sapien
tactgtatacatagcataaagaaac

SEQ ID NO: 4195244 - DNA, 25 bp, Homo sapien
ggtaaaagtactgctatacatgcaa

SEQ ID NO: 4195245 - DNA, 25 bp, Homo sapien
gaaaaggaccatgaagttgcacttg

SEQ ID NO: 4195246 - DNA, 25 bp, Homo sapien
tacttccatagcttcagaagatccc

SEQ ID NO: 4195247 - DNA, 25 bp, Homo sapien
tacatgcaaaactcttagcacctga

SEQ ID NO: 4195248 - DNA, 25 bp, Homo sapien
caaaacagtcacaaactacttccat

SEQ ID NO: 4195249 - DNA, 25 bp, Homo sapien
tttgaatgaagaatgtctctcaatc

SEQ ID NO: 4195250 - DNA, 25 bp, Homo sapien
gaagaatgtctctcaatccacctat

SEQ ID NO: 4195251 - DNA, 25 bp, Homo sapien
cagtcacaaactacttccatagctt

SEQ ID NO: 4195252 - DNA, 25 bp, Homo sapien
cagagctggagacgcgtggagctgt

SEQ ID NO: 4195253 - DNA, 25 bp, Homo sapien
atcacagcccgtcgcgtggctcggg

SEQ ID NO: 4195254 - DNA, 25 bp, Homo sapien
cgtctggtccgtgcgcgatcacagc

SEQ ID NO: 4195255 - DNA, 25 bp, Homo sapien
gaggactcgcagtgcacatatgata

SEQ ID NO: 4195256 - DNA, 25 bp, Homo sapien
gggtatccaacatgcccagcagagc

SEQ ID NO: 4195257 - DNA, 25 bp, Homo sapien
ctgggtatccaacatgcccagcaga

SEQ ID NO: 4195258 - DNA, 25 bp, Homo sapien
agagctgcctggagagagccctgtc

SEQ ID NO: 4195259 - DNA, 25 bp, Homo sapien
tggagagagccctgtccttccacca

SEQ ID NO: 4195260 - DNA, 25 bp, Homo sapien
gtaatggagatgtgtctgagcagca

SEQ ID NO: 4195261 - DNA, 25 bp, Homo sapien
aggcacaggcagatgaatcattttc

SEQ ID NO: 4195262 - DNA, 25 bp, Homo sapien
taaggagcgctcagtgtcatgggaa

SEQ ID NO: 4195263 - DNA, 25 bp, Homo sapien
gggtcacaggagaagtatctgcatc

SEQ ID NO: 4195264 - DNA, 25 bp, Homo sapien
gaaaacgtgttccaacctgttcaga

SEQ ID NO: 4195265 - DNA, 25 bp, Homo sapien
gaatcaaggcatcatcgagcttcag

SEQ ID NO: 4195266 - DNA, 25 bp, Homo sapien
cagcagtgactacccatctggagac

SEQ ID NO: 4195267 - DNA, 25 bp, Homo sapien
tggagactgtccaactcccttggga

SEQ ID NO: 4195268 - DNA, 25 bp, Homo sapien
gaagaaccatttcacgaagaggata

SEQ ID NO: 4195269 - DNA, 25 bp, Homo sapien
gatacacagatagcggataagcaca

SEQ ID NO: 4195270 - DNA, 25 bp, Homo sapien
atgacccagcagttgcactcacagg

SEQ ID NO: 4195271 - DNA, 25 bp, Homo sapien
tttggaaggaatgccgagaaactgc

SEQ ID NO: 4195272 - DNA, 25 bp, Homo sapien
agatgtttgtagaatccatttccat

SEQ ID NO: 4195273 - DNA, 25 bp, Homo sapien
atacaaaccacgacttgtgttttct

SEQ ID NO: 4195274 - DNA, 25 bp, Homo sapien
gaaaagacccatctaggaacgcaag

SEQ ID NO: 4195275 - DNA, 25 bp, Homo sapien
gaagcagagtgcaacaacgagccat

SEQ ID NO: 4195276 - DNA, 25 bp, Homo sapien
taactcaatttcgaggcacagctgt

SEQ ID NO: 4195277 - DNA, 25 bp, Homo sapien
gaaaatcattaaactgccaagccat

SEQ ID NO: 4195278 - DNA, 25 bp, Homo sapien
tggatctcaataccctctcccaggg

SEQ ID NO: 4195279 - DNA, 25 bp, Homo sapien
gccaaaactgtttgctctcacagag

SEQ ID NO: 4195280 - DNA, 25 bp, Homo sapien
ccagggagtcaatgtagtaaagtcc

SEQ ID NO: 4195281 - DNA, 25 bp, Homo sapien
taggctgctcttgctcatacccagg

SEQ ID NO: 4195282 - DNA, 25 bp, Homo sapien
tgaccttgtcaacatagagcataag

SEQ ID NO: 4195283 - DNA, 25 bp, Homo sapien
caggatcaagtttgaccttgtcaac

SEQ ID NO: 4195284 - DNA, 25 bp, Homo sapien
cagccaccaccgtcaggatcaagtt

SEQ ID NO: 4195285 - DNA, 25 bp, Homo sapien
catagagcataaggcccttggcagg

SEQ ID NO: 4195286 - DNA, 25 bp, Homo sapien
tgtttttccttcctttgcttgggca

SEQ ID NO: 4195287 - DNA, 25 bp, Homo sapien
tttccttcctttgcttgggcaaaga

SEQ ID NO: 4195288 - DNA, 25 bp, Homo sapien
ttccttcctttgcttgggcaaagat

SEQ ID NO: 4195289 - DNA, 25 bp, Homo sapien
gccttcgctagagaagaaagagtaa

SEQ ID NO: 4195290 - DNA, 25 bp, Homo sapien
tgaaccttgagtggaggccccattg

SEQ ID NO: 4195291 - DNA, 25 bp, Homo sapien
ggccccattgccttcgctagagaag

SEQ ID NO: 4195292 - DNA, 25 bp, Homo sapien
gaaagagtaatttctgacacctgcg

SEQ ID NO: 4195293 - DNA, 25 bp, Homo sapien
cctctgtgtccacactttgccgaag

SEQ ID NO: 4195294 - DNA, 25 bp, Homo sapien
gccctctgtgtccacactttgccga

SEQ ID NO: 4195295 - DNA, 25 bp, Homo sapien
tctgtgtccacactttgccgaagac

SEQ ID NO: 4195296 - DNA, 25 bp, Homo sapien
tgtgtccacactttgccgaagacgt

SEQ ID NO: 4195297 - DNA, 25 bp, Homo sapien
ctcccatctcagcctcaggagtagc

SEQ ID NO: 4195298 - DNA, 25 bp, Homo sapien
catctcagcctcaggagtagctggg

SEQ ID NO: 4195299 - DNA, 25 bp, Homo sapien
tggcatgatcttggcactcacttca

SEQ ID NO: 4195300 - DNA, 25 bp, Homo sapien
ctccgcctcccaggttcaagcagtc

SEQ ID NO: 4195301 - DNA, 25 bp, Homo sapien
gcatctgggctttaatcctgatggg

SEQ ID NO: 4195302 - DNA, 25 bp, Homo sapien
accatcaagcagatgtccagcaggg

SEQ ID NO: 4195303 - DNA, 25 bp, Homo sapien
gccagcgcagaaccatctcagagtt

SEQ ID NO: 4195304 - DNA, 25 bp, Homo sapien
ccccaggaagcactagcaaaaggta

SEQ ID NO: 4195305 - DNA, 25 bp, Homo sapien
taggagctgcctgtttcaggtgtca

SEQ ID NO: 4195306 - DNA, 25 bp, Homo sapien
aaggaccgtcgatgataaaagtata

SEQ ID NO: 4195307 - DNA, 25 bp, Homo sapien
ttgtaagtaatcaaaggaccgtcga

SEQ ID NO: 4195308 - DNA, 25 bp, Homo sapien
agctgcctgtttcaggtgtcactga

SEQ ID NO: 4195309 - DNA, 25 bp, Homo sapien
tgtctggttgggtgctccagttctc

SEQ ID NO: 4195310 - DNA, 25 bp, Homo sapien
tcctcctcggatgttgtctggttgg

SEQ ID NO: 4195311 - DNA, 25 bp, Homo sapien
agagctcctcctcggatgttgtctg

SEQ ID NO: 4195312 - DNA, 25 bp, Homo sapien
tgctccagttctcagcgtcatacat

SEQ ID NO: 4195313 - DNA, 25 bp, Homo sapien
tacttattgggtgcaagttgcatgc

SEQ ID NO: 4195314 - DNA, 25 bp, Homo sapien
ttattgggtgcaagttgcatgcccc

SEQ ID NO: 4195315 - DNA, 25 bp, Homo sapien
ggtacttattgggtgcaagttgcat

SEQ ID NO: 4195316 - DNA, 25 bp, Homo sapien
ctgggtacttattgggtgcaagttg

SEQ ID NO: 4195317 - DNA, 25 bp, Homo sapien
agagaaaagggatccgagagggcac

SEQ ID NO: 4195318 - DNA, 25 bp, Homo sapien
agactgagtggggaagtaccattta

SEQ ID NO: 4195319 - DNA, 25 bp, Homo sapien
aaagggatccgagagggcacggaca

SEQ ID NO: 4195320 - DNA, 25 bp, Homo sapien
tccgagagggcacggacactgtgtc

SEQ ID NO: 4195321 - DNA, 25 bp, Homo sapien
tacgggatctaactttgcctaagaa

SEQ ID NO: 4195322 - DNA, 25 bp, Homo sapien
gctccttctccgaaggcagatcaaa

SEQ ID NO: 4195323 - DNA, 25 bp, Homo sapien
cagatcaaagttacgggatctaact

SEQ ID NO: 4195324 - DNA, 25 bp, Homo sapien
taactttgcctaagaagtcctgtcc

SEQ ID NO: 4195325 - DNA, 25 bp, Homo sapien
taagcccattaaggtgtcttcccaa

SEQ ID NO: 4195326 - DNA, 25 bp, Homo sapien
gtttcaaagtttcccatccagacta

SEQ ID NO: 4195327 - DNA, 25 bp, Homo sapien
atccagactagccaaggagagcaag

SEQ ID NO: 4195328 - DNA, 25 bp, Homo sapien
ttagcactggttgtctttggttggc

SEQ ID NO: 4195329 - DNA, 25 bp, Homo sapien
ccttggcagggaatcccgggtactg

SEQ ID NO: 4195330 - DNA, 25 bp, Homo sapien
ccaaagccgttcttatccattgcaa

SEQ ID NO: 4195331 - DNA, 25 bp, Homo sapien
gaaacagaagacttggcgtggacct

SEQ ID NO: 4195332 - DNA, 25 bp, Homo sapien
tggtgtgacatgagcaccacagacc

SEQ ID NO: 4195333 - DNA, 25 bp, Homo sapien
gggtactggcccaatagctgtgatg

SEQ ID NO: 4195334 - DNA, 25 bp, Homo sapien
ctgctagggctaaggtgagttttct

SEQ ID NO: 4195335 - DNA, 25 bp, Homo sapien
ctaaggtactaactgaaacaaggag

SEQ ID NO: 4195336 - DNA, 25 bp, Homo sapien
tttctttgtgtcagggagacttgca

SEQ ID NO: 4195337 - DNA, 25 bp, Homo sapien
tattgttggccctgagttctggtct

SEQ ID NO: 4195338 - DNA, 25 bp, Homo sapien
tgagctctgccatctgaaactgggc

SEQ ID NO: 4195339 - DNA, 25 bp, Homo sapien
gcctctcccagagcactattgttgg

SEQ ID NO: 4195340 - DNA, 25 bp, Homo sapien
cgaattttgatggaacagagcctct

SEQ ID NO: 4195341 - DNA, 25 bp, Homo sapien
gagtattaggctcccaagcgctgcc

SEQ ID NO: 4195342 - DNA, 25 bp, Homo sapien
gcctctgccgagtcacaccagagaa

SEQ ID NO: 4195343 - DNA, 25 bp, Homo sapien
gggatttagtctcagtgacttggga

SEQ ID NO: 4195344 - DNA, 25 bp, Homo sapien
gatttcgagcatttgctgctgagac

SEQ ID NO: 4195345 - DNA, 25 bp, Homo sapien
acttgactaagtaacctcggctggg

SEQ ID NO: 4195346 - DNA, 25 bp, Homo sapien
tcgcaccaagcaacccactattttt

SEQ ID NO: 4195347 - DNA, 25 bp, Homo sapien
caaagctcctattcttcgcaccaag

SEQ ID NO: 4195348 - DNA, 25 bp, Homo sapien
tggtgtcatcatacccatatgagag

SEQ ID NO: 4195349 - DNA, 25 bp, Homo sapien
ttaggaacgccatcctcccaaaagc

SEQ ID NO: 4195350 - DNA, 25 bp, Homo sapien
tccttcttgtagtctctcagacaaa

SEQ ID NO: 4195351 - DNA, 25 bp, Homo sapien
tgtagtctctcagacaaacagctct

SEQ ID NO: 4195352 - DNA, 25 bp, Homo sapien
gccactataatgtgctcatccttct

SEQ ID NO: 4195353 - DNA, 25 bp, Homo sapien
gagggcaaacagcatgaaatcaggg

SEQ ID NO: 4195354 - DNA, 25 bp, Homo sapien
aaatcagggttagttgccttggcgc

SEQ ID NO: 4195355 - DNA, 25 bp, Homo sapien
catgattccacttctctagctgagg

SEQ ID NO: 4195356 - DNA, 25 bp, Homo sapien
ggtaggagtctttgacatccactgg

SEQ ID NO: 4195357 - DNA, 25 bp, Homo sapien
ccaacatctactccccagttattcc

SEQ ID NO: 4195358 - DNA, 25 bp, Homo sapien
gcccaacatctactccccagttatt

SEQ ID NO: 4195359 - DNA, 25 bp, Homo sapien
ctcagcccaacatctactccccagt

SEQ ID NO: 4195360 - DNA, 25 bp, Homo sapien
cagcccaacatctactccccagtta

SEQ ID NO: 4195361 - DNA, 25 bp, Homo sapien
aaaaaggctgtctggaaatgctgtc

SEQ ID NO: 4195362 - DNA, 25 bp, Homo sapien
gcctgagaagagataaaatgtttcc

SEQ ID NO: 4195363 - DNA, 25 bp, Homo sapien
ctccttccagtaaaaaggctgtctg

SEQ ID NO: 4195364 - DNA, 25 bp, Homo sapien
ctggcctgagaagagataaaatgtt

SEQ ID NO: 4195365 - DNA, 25 bp, Homo sapien
tcctgctcgcattccagggcagcct

SEQ ID NO: 4195366 - DNA, 25 bp, Homo sapien
aggcactcctgctcgcattccaggg

SEQ ID NO: 4195367 - DNA, 25 bp, Homo sapien
caggcactcctgctcgcattccagg

SEQ ID NO: 4195368 - DNA, 25 bp, Homo sapien
attgaagaccaaaaacactcaattt

SEQ ID NO: 4195369 - DNA, 25 bp, Homo sapien
gtttactgtcatgtctacagcaaca

SEQ ID NO: 4195370 - DNA, 25 bp, Homo sapien
ttttctggatgtttactgtcatgtc

SEQ ID NO: 4195371 - DNA, 25 bp, Homo sapien
ctgccactgagcatgtgattcccaa

SEQ ID NO: 4195372 - DNA, 25 bp, Homo sapien
gctatcaagtctttagggatataag

SEQ ID NO: 4195373 - DNA, 25 bp, Homo sapien
ggctatcaagtctttagggatataa

SEQ ID NO: 4195374 - DNA, 25 bp, Homo sapien
tttagggatataagcggcataagaa

SEQ ID NO: 4195375 - DNA, 25 bp, Homo sapien
gatataagcggcataagaaagaatt

SEQ ID NO: 4195376 - DNA, 25 bp, Homo sapien
caaaaagacatgatgacatgtccca

SEQ ID NO: 4195377 - DNA, 25 bp, Homo sapien
tcagataccatctgcttttgtcctc

SEQ ID NO: 4195378 - DNA, 25 bp, Homo sapien
gctgtttctggccatcctcagatac

SEQ ID NO: 4195379 - DNA, 25 bp, Homo sapien
ctggccctatctgactcttatgtat

SEQ ID NO: 4195380 - DNA, 25 bp, Homo sapien
aatgtttgtgggctgattgctgttc

SEQ ID NO: 4195381 - DNA, 25 bp, Homo sapien
tgtgggctgattgctgttcaccagc

SEQ ID NO: 4195382 - DNA, 25 bp, Homo sapien
gcctcctgatttgactcaacagtga

SEQ ID NO: 4195383 - DNA, 25 bp, Homo sapien
ggtgaagttcctatattcactcaac

SEQ ID NO: 4195384 - DNA, 25 bp, Homo sapien
agggcaggggtgaggaggtggaaga

SEQ ID NO: 4195385 - DNA, 25 bp, Homo sapien
gggtgaggaggtggaagaacggctc

SEQ ID NO: 4195386 - DNA, 25 bp, Homo sapien
tgaggaggtggaagaacggctccat

SEQ ID NO: 4195387 - DNA, 25 bp, Homo sapien
tccagagcacacagctgtcagggca

SEQ ID NO: 4195388 - DNA, 25 bp, Homo sapien
aatccctcaggaaatgtgggaggtg

SEQ ID NO: 4195389 - DNA, 25 bp, Homo sapien
ctgttaaacttgaaatccctcagga

SEQ ID NO: 4195390 - DNA, 25 bp, Homo sapien
acttggtggacctcttagctgcttt

SEQ ID NO: 4195391 - DNA, 25 bp, Homo sapien
aggaggaagtgtcccatgcaagatg

SEQ ID NO: 4195392 - DNA, 25 bp, Homo sapien
cttcgcgtatggcagctgtggagcc

SEQ ID NO: 4195393 - DNA, 25 bp, Homo sapien
cctggggcaaggatgtcaggcctcc

SEQ ID NO: 4195394 - DNA, 25 bp, Homo sapien
tgaagggccggagaaggcaagccat

SEQ ID NO: 4195395 - DNA, 25 bp, Homo sapien
ctgcagcaccagagacggcctgggg

SEQ ID NO: 4195396 - DNA, 25 bp, Homo sapien
atgttctgccggcaaaggaatctgg

SEQ ID NO: 4195397 - DNA, 25 bp, Homo sapien
aggaatctggacaatgtgctttcca

SEQ ID NO: 4195398 - DNA, 25 bp, Homo sapien
gttttctatcactccatgttctgcc

SEQ ID NO: 4195399 - DNA, 25 bp, Homo sapien
tgtcttgcctcaacccagcccctgt

SEQ ID NO: 4195400 - DNA, 25 bp, Homo sapien
ctgggcagctgtgccagataggacc

SEQ ID NO: 4195401 - DNA, 25 bp, Homo sapien
cagcttgctgtgtgtaagtgtactc

SEQ ID NO: 4195402 - DNA, 25 bp, Homo sapien
gtgtactcttaataatctcgcttca

SEQ ID NO: 4195403 - DNA, 25 bp, Homo sapien
cattctgaggcacttgtgatgcagc

SEQ ID NO: 4195404 - DNA, 25 bp, Homo sapien
agaaacaaagacgaaggcatttggc

SEQ ID NO: 4195405 - DNA, 25 bp, Homo sapien
agacgaaggcatttggcactgagtg

SEQ ID NO: 4195406 - DNA, 25 bp, Homo sapien
aaagacgaaggcatttggcactgag

SEQ ID NO: 4195407 - DNA, 25 bp, Homo sapien
aacaaagacgaaggcatttggcact

SEQ ID NO: 4195408 - DNA, 25 bp, Homo sapien
gaggattccaccacttgcaaccaat

SEQ ID NO: 4195409 - DNA, 25 bp, Homo sapien
tgaggattccaccacttgcaaccaa

SEQ ID NO: 4195410 - DNA, 25 bp, Homo sapien
gattccaccacttgcaaccaatgtg

SEQ ID NO: 4195411 - DNA, 25 bp, Homo sapien
ggtgaggattccaccacttgcaacc

SEQ ID NO: 4195412 - DNA, 25 bp, Homo sapien
gtcagctgcattggatccttctgga

SEQ ID NO: 4195413 - DNA, 25 bp, Homo sapien
gagaatctgttatctcctggcttct

SEQ ID NO: 4195414 - DNA, 25 bp, Homo sapien
aaagacttgtcattgggttagagcc

SEQ ID NO: 4195415 - DNA, 25 bp, Homo sapien
tcaaggtgtcagctgcattggatcc

SEQ ID NO: 4195416 - DNA, 25 bp, Homo sapien
aaccataaatatagcatcctgatta

SEQ ID NO: 4195417 - DNA, 25 bp, Homo sapien
cttcgtgaagacaccaatcccataa

SEQ ID NO: 4195418 - DNA, 25 bp, Homo sapien
aaaccataaatatagcatcctgatt

SEQ ID NO: 4195419 - DNA, 25 bp, Homo sapien
ctgagagattcagaagtcaaagtgt

SEQ ID NO: 4195420 - DNA, 25 bp, Homo sapien
agtcaaagtgtggaggaattttgcc

SEQ ID NO: 4195421 - DNA, 25 bp, Homo sapien
tgtggaggaattttgccttgactgt

SEQ ID NO: 4195422 - DNA, 25 bp, Homo sapien
ttgactgtttctggcatctcagctg

SEQ ID NO: 4195423 - DNA, 25 bp, Homo sapien
ctgcaatctaatcttgttggagtat

SEQ ID NO: 4195424 - DNA, 25 bp, Homo sapien
gtcttactgagtgttaaggacaaca

SEQ ID NO: 4195425 - DNA, 25 bp, Homo sapien
tcttgttggagtatgtcttactgag

SEQ ID NO: 4195426 - DNA, 25 bp, Homo sapien
tcttactgagtgttaaggacaacat

SEQ ID NO: 4195427 - DNA, 25 bp, Homo sapien
gcctaattttgtccaaggtgctgta

SEQ ID NO: 4195428 - DNA, 25 bp, Homo sapien
tgtgcaacaatatctctctggaagg

SEQ ID NO: 4195429 - DNA, 25 bp, Homo sapien
tagagttttctatgacccaaagaga

SEQ ID NO: 4195430 - DNA, 25 bp, Homo sapien
cgcaggccgtgcagtatggattttt

SEQ ID NO: 4195431 - DNA, 25 bp, Homo sapien
cacacaggttgtggatagccttttg

SEQ ID NO: 4195432 - DNA, 25 bp, Homo sapien
gccttttgcctgacttgatccagta

SEQ ID NO: 4195433 - DNA, 25 bp, Homo sapien
ctatgcaggtaaaacgtggacagat

SEQ ID NO: 4195434 - DNA, 25 bp, Homo sapien
gtaaaacgtggacagatatggacac

SEQ ID NO: 4195435 - DNA, 25 bp, Homo sapien
gaggtggctcgtgcatattcatgaa

SEQ ID NO: 4195436 - DNA, 25 bp, Homo sapien
ggagggaggtggctcgtgcatattc

SEQ ID NO: 4195437 - DNA, 25 bp, Homo sapien
agggaggtggctcgtgcatattcat

SEQ ID NO: 4195438 - DNA, 25 bp, Homo sapien
cgggacggcccgtgacgtcacggag

SEQ ID NO: 4195439 - DNA, 25 bp, Homo sapien
tgcccgatgggtgcgcttctagcgc

SEQ ID NO: 4195440 - DNA, 25 bp, Homo sapien
ctcgccgtgcccgatgggtgcgctt

SEQ ID NO: 4195441 - DNA, 25 bp, Homo sapien
tgggtgcgcttctagcgctgccgcc

SEQ ID NO: 4195442 - DNA, 25 bp, Homo sapien
gccgtgcccgatgggtgcgcttcta

SEQ ID NO: 4195443 - DNA, 25 bp, Homo sapien
cagccgccaacgagctgcagccgcc

SEQ ID NO: 4195444 - DNA, 25 bp, Homo sapien
ctcgcagcagccgccaacgagctgc

SEQ ID NO: 4195445 - DNA, 25 bp, Homo sapien
gcagccgccaacgagctgcagccgc

SEQ ID NO: 4195446 - DNA, 25 bp, Homo sapien
cggcgctgccggctgtccccgccac

SEQ ID NO: 4195447 - DNA, 25 bp, Homo sapien
ctttagccgcgaggaggcggcgctg

SEQ ID NO: 4195448 - DNA, 25 bp, Homo sapien
agcaggagcggcacccagcacagcc

SEQ ID NO: 4195449 - DNA, 25 bp, Homo sapien
tttagccgcgaggaggcggcgctgc

SEQ ID NO: 4195450 - DNA, 25 bp, Homo sapien
tgacgtccgcgggtggacctctctg

SEQ ID NO: 4195451 - DNA, 25 bp, Homo sapien
tggacctctctggtccgctgcgcag

SEQ ID NO: 4195452 - DNA, 25 bp, Homo sapien
cagggaactgacttcgggaatccag

SEQ ID NO: 4195453 - DNA, 25 bp, Homo sapien
agttgtccgtactccccagacctcg

SEQ ID NO: 4195454 - DNA, 25 bp, Homo sapien
catcccgcgcttcttccggaccccg

SEQ ID NO: 4195455 - DNA, 25 bp, Homo sapien
tcacatcccgcgcttcttccggacc

SEQ ID NO: 4195456 - DNA, 25 bp, Homo sapien
cacatcccgcgcttcttccggaccc

SEQ ID NO: 4195457 - DNA, 25 bp, Homo sapien
aagtcggatgttggttaaaatgcac

SEQ ID NO: 4195458 - DNA, 25 bp, Homo sapien
tgcccgacctgacaaatgcctagtt

SEQ ID NO: 4195459 - DNA, 25 bp, Homo sapien
gaactcagccgtgcattattactac

SEQ ID NO: 4195460 - DNA, 25 bp, Homo sapien
tacctctatgaagcttcccattctg

SEQ ID NO: 4195461 - DNA, 25 bp, Homo sapien
aacacaaattgtaaagctagggtga

SEQ ID NO: 4195462 - DNA, 25 bp, Homo sapien
tgtaaagctagggtgatgatgattc

SEQ ID NO: 4195463 - DNA, 25 bp, Homo sapien
caaattgtaaagctagggtgatgat

SEQ ID NO: 4195464 - DNA, 25 bp, Homo sapien
attgtaaagctagggtgatgatgat

SEQ ID NO: 4195465 - DNA, 25 bp, Homo sapien
tccatagcgttagaccgagtctgag

SEQ ID NO: 4195466 - DNA, 25 bp, Homo sapien
ttcatccatagcgttagaccgagtc

SEQ ID NO: 4195467 - DNA, 25 bp, Homo sapien
catccatagcgttagaccgagtctg

SEQ ID NO: 4195468 - DNA, 25 bp, Homo sapien
catagcgttagaccgagtctgagaa

SEQ ID NO: 4195469 - DNA, 25 bp, Homo sapien
gtagtaatttagacctatgcacaag

SEQ ID NO: 4195470 - DNA, 25 bp, Homo sapien
tgccgtagtaatttagacctatgca

SEQ ID NO: 4195471 - DNA, 25 bp, Homo sapien
cctgaaatgccgtagtaatttagac

SEQ ID NO: 4195472 - DNA, 25 bp, Homo sapien
aaatacctgaaatgccgtagtaatt

SEQ ID NO: 4195473 - DNA, 25 bp, Homo sapien
tctgttttcttcatggttattgctt

SEQ ID NO: 4195474 - DNA, 25 bp, Homo sapien
gttttcttcatggttattgcttttc

SEQ ID NO: 4195475 - DNA, 25 bp, Homo sapien
tttcttcatggttattgcttttcac

SEQ ID NO: 4195476 - DNA, 25 bp, Homo sapien
ctgttttcttcatggttattgcttt

SEQ ID NO: 4195477 - DNA, 25 bp, Homo sapien
ggatacttgatctctctgcaccagt

SEQ ID NO: 4195478 - DNA, 25 bp, Homo sapien
aggatacttgatctctctgcaccag

SEQ ID NO: 4195479 - DNA, 25 bp, Homo sapien
gaaggttagtgttgagaggatactt

SEQ ID NO: 4195480 - DNA, 25 bp, Homo sapien
ttttaagatgacatagagaaggtta

SEQ ID NO: 4195481 - DNA, 25 bp, Homo sapien
tagaagacgaagcagtctgccaagc

SEQ ID NO: 4195482 - DNA, 25 bp, Homo sapien
tattcactgagctaacagcggtttt

SEQ ID NO: 4195483 - DNA, 25 bp, Homo sapien
tttttacggcacagcagagatcggc

SEQ ID NO: 4195484 - DNA, 25 bp, Homo sapien
gagatcggcatccattttccatcgg

SEQ ID NO: 4195485 - DNA, 25 bp, Homo sapien
cagtgtttgatgaaccaagtgatac

SEQ ID NO: 4195486 - DNA, 25 bp, Homo sapien
tctgaagtaaaactctggggcctct

SEQ ID NO: 4195487 - DNA, 25 bp, Homo sapien
caactttgaaattcggttgcctcca

SEQ ID NO: 4195488 - DNA, 25 bp, Homo sapien
gtgatacagaggtatcagcagttgg

SEQ ID NO: 4195489 - DNA, 25 bp, Homo sapien
tatagccgcagtgataattgggccc

SEQ ID NO: 4195490 - DNA, 25 bp, Homo sapien
gaaattcagtttagtggcatcccct

SEQ ID NO: 4195491 - DNA, 25 bp, Homo sapien
taataaggccttgcagagcgtgaac

SEQ ID NO: 4195492 - DNA, 25 bp, Homo sapien
gaagaacgttgctactgtcagggaa

SEQ ID NO: 4195493 - DNA, 25 bp, Homo sapien
cagtatgatgttagaacctaggctc

SEQ ID NO: 4195494 - DNA, 25 bp, Homo sapien
tacagagagggagggttatgtcctc

SEQ ID NO: 4195495 - DNA, 25 bp, Homo sapien
tattatcaaagagcacagagtggtt

SEQ ID NO: 4195496 - DNA, 25 bp, Homo sapien
ccagaccaaacccaccaaaggtgag

SEQ ID NO: 4195497 - DNA, 25 bp, Homo sapien
tattctttcaaactatgcatgggaa

SEQ ID NO: 4195498 - DNA, 25 bp, Homo sapien
ttctaaatacggcaatgctgggtca

SEQ ID NO: 4195499 - DNA, 25 bp, Homo sapien
tgtgtttgagcatacctataggata

SEQ ID NO: 4195500 - DNA, 25 bp, Homo sapien
taaattaccctccaacaagattgca

SEQ ID NO: 4195501 - DNA, 25 bp, Homo sapien
ttgagggaacacaggtgatatgaaa

SEQ ID NO: 4195502 - DNA, 25 bp, Homo sapien
ggctccggagtcaaatggaactgaa

SEQ ID NO: 4195503 - DNA, 25 bp, Homo sapien
tctcataatctccccaagctcaggc

SEQ ID NO: 4195504 - DNA, 25 bp, Homo sapien
aagctcaggctccggagtcaaatgg

SEQ ID NO: 4195505 - DNA, 25 bp, Homo sapien
gccaagatagccaatagcaggttct

SEQ ID NO: 4195506 - DNA, 25 bp, Homo sapien
tatcagggatgactagtgagggcat

SEQ ID NO: 4195507 - DNA, 25 bp, Homo sapien
cagagacttaagtgaaggaaggaca

SEQ ID NO: 4195508 - DNA, 25 bp, Homo sapien
tattggtgcttccagaggtaaagcc

SEQ ID NO: 4195509 - DNA, 25 bp, Homo sapien
gagaagacctctttcaccgcaggca

SEQ ID NO: 4195510 - DNA, 25 bp, Homo sapien
gaaataactgagcaaccgaaccacc

SEQ ID NO: 4195511 - DNA, 25 bp, Homo sapien
taggcaagcctcagcagtgtacagg

SEQ ID NO: 4195512 - DNA, 25 bp, Homo sapien
ccactggcggagaatgactaggaca

SEQ ID NO: 4195513 - DNA, 25 bp, Homo sapien
catccttgtggcaaaccttgggtgc

SEQ ID NO: 4195514 - DNA, 25 bp, Homo sapien
ccttgtggcaaaccttgggtgctgc

SEQ ID NO: 4195515 - DNA, 25 bp, Homo sapien
tccttgtggcaaaccttgggtgctg

SEQ ID NO: 4195516 - DNA, 25 bp, Homo sapien
cccatccttgtggcaaaccttgggt

SEQ ID NO: 4195517 - DNA, 25 bp, Homo sapien
cacatcactggcacagctaagtacg

SEQ ID NO: 4195518 - DNA, 25 bp, Homo sapien
tgcagagaaccatcacttgctcaca

SEQ ID NO: 4195519 - DNA, 25 bp, Homo sapien
tttccacaaagacatagcatcggtg

SEQ ID NO: 4195520 - DNA, 25 bp, Homo sapien
tctgtcatcaacataagcatctttc

SEQ ID NO: 4195521 - DNA, 25 bp, Homo sapien
cagatattccactgcaagctgtgaa

SEQ ID NO: 4195522 - DNA, 25 bp, Homo sapien
catccgttgtgcagatccagtcagg

SEQ ID NO: 4195523 - DNA, 25 bp, Homo sapien
ggcatgacatcaccacatccgttgt

SEQ ID NO: 4195524 - DNA, 25 bp, Homo sapien
tattgacagtctccgaggaacctca

SEQ ID NO: 4195525 - DNA, 25 bp, Homo sapien
gctcccagaataaggggtcatgctt

SEQ ID NO: 4195526 - DNA, 25 bp, Homo sapien
ctcccagaataaggggtcatgcttc

SEQ ID NO: 4195527 - DNA, 25 bp, Homo sapien
ggccagcatgcttagcgaggagaac

SEQ ID NO: 4195528 - DNA, 25 bp, Homo sapien
ccagcatgcttagcgaggagaaccc

SEQ ID NO: 4195529 - DNA, 25 bp, Homo sapien
gccagcatgcttagcgaggagaacc

SEQ ID NO: 4195530 - DNA, 25 bp, Homo sapien
aaggccttgatgttcaaccaagagt

SEQ ID NO: 4195531 - DNA, 25 bp, Homo sapien
gccttgatgttcaaccaagagtctg

SEQ ID NO: 4195532 - DNA, 25 bp, Homo sapien
ggccttgatgttcaaccaagagtct

SEQ ID NO: 4195533 - DNA, 25 bp, Homo sapien
cttgatgttcaaccaagagtctgtc

SEQ ID NO: 4195534 - DNA, 25 bp, Homo sapien
ttgactgcttgaagagacgggccat

SEQ ID NO: 4195535 - DNA, 25 bp, Homo sapien
cttgactgcttgaagagacgggcca

SEQ ID NO: 4195536 - DNA, 25 bp, Homo sapien
taatgtccaggtgcacggctgtctg

SEQ ID NO: 4195537 - DNA, 25 bp, Homo sapien
tatgaaggagatcatggcatcgtgt

SEQ ID NO: 4195538 - DNA, 25 bp, Homo sapien
cactcctgtgaattataagctgcct

SEQ ID NO: 4195539 - DNA, 25 bp, Homo sapien
tgtctgcatctgcaccacgtgctga

SEQ ID NO: 4195540 - DNA, 25 bp, Homo sapien
caggatgccaggtgataagggtgat

SEQ ID NO: 4195541 - DNA, 25 bp, Homo sapien
gacaggatgccaggtgataagggtg

SEQ ID NO: 4195542 - DNA, 25 bp, Homo sapien
gccaggtgataagggtgatgccaga

SEQ ID NO: 4195543 - DNA, 25 bp, Homo sapien
tgataagggtgatgccagatgcagg

SEQ ID NO: 4195544 - DNA, 25 bp, Homo sapien
cattcttcatcgtggagaaggcaga

SEQ ID NO: 4195545 - DNA, 25 bp, Homo sapien
agaaggcagaggaatgctaactgcc

SEQ ID NO: 4195546 - DNA, 25 bp, Homo sapien
cagaggaatgctaactgccctgagg

SEQ ID NO: 4195547 - DNA, 25 bp, Homo sapien
tcattcttcatcgtggagaaggcag

SEQ ID NO: 4195548 - DNA, 25 bp, Homo sapien
acacattcttggctctgagaaggtc

SEQ ID NO: 4195549 - DNA, 25 bp, Homo sapien
aggacactgagctgtgtaggacaca

SEQ ID NO: 4195550 - DNA, 25 bp, Homo sapien
ggacacattcttggctctgagaagg

SEQ ID NO: 4195551 - DNA, 25 bp, Homo sapien
cactgagctgtgtaggacacattct

SEQ ID NO: 4195552 - DNA, 25 bp, Homo sapien
cagcgtagtcctcctcatgcatgtc

SEQ ID NO: 4195553 - DNA, 25 bp, Homo sapien
ctgttcctgtgttggcagcgtagtc

SEQ ID NO: 4195554 - DNA, 25 bp, Homo sapien
gtagtcctcctcatgcatgtccagc

SEQ ID NO: 4195555 - DNA, 25 bp, Homo sapien
tcctgtgttggcagcgtagtcctcc

SEQ ID NO: 4195556 - DNA, 25 bp, Homo sapien
tatttagcaaatcctcgagtaggct

SEQ ID NO: 4195557 - DNA, 25 bp, Homo sapien
gcttttcagcaaccaaccaacaatg

SEQ ID NO: 4195558 - DNA, 25 bp, Homo sapien
tgctttgtctgagctacctagcctg

SEQ ID NO: 4195559 - DNA, 25 bp, Homo sapien
tacagtacagactcctccacaaaac

SEQ ID NO: 4195560 - DNA, 25 bp, Homo sapien
tgtattaatgctccatccaagcagc

SEQ ID NO: 4195561 - DNA, 25 bp, Homo sapien
ttaatgctccatccaagcagcaggg

SEQ ID NO: 4195562 - DNA, 25 bp, Homo sapien
tattaatgctccatccaagcagcag

SEQ ID NO: 4195563 - DNA, 25 bp, Homo sapien
aaagtgtattaatgctccatccaag

SEQ ID NO: 4195564 - DNA, 25 bp, Homo sapien
agattcaaaataacaggttagaggg

SEQ ID NO: 4195565 - DNA, 25 bp, Homo sapien
aaattgttccgatgccaaacttcac

SEQ ID NO: 4195566 - DNA, 25 bp, Homo sapien
gggctagaataatcaaaattgttcc

SEQ ID NO: 4195567 - DNA, 25 bp, Homo sapien
tagagtaggtacatcagattcaaaa

SEQ ID NO: 4195568 - DNA, 25 bp, Homo sapien
tgaagtctcgatccatggcttgtgc

SEQ ID NO: 4195569 - DNA, 25 bp, Homo sapien
aaaggaaccggtgcatctttatcca

SEQ ID NO: 4195570 - DNA, 25 bp, Homo sapien
gtggtgggtccaaaatgactgtgtc

SEQ ID NO: 4195571 - DNA, 25 bp, Homo sapien
tttatccagggctaccagtggtggg

SEQ ID NO: 4195572 - DNA, 25 bp, Homo sapien
ttcttggtggaagggcctctgcata

SEQ ID NO: 4195573 - DNA, 25 bp, Homo sapien
gatcttcttggtggaagggcctctg

SEQ ID NO: 4195574 - DNA, 25 bp, Homo sapien
gaaaggtgaatgagaggatcttctt

SEQ ID NO: 4195575 - DNA, 25 bp, Homo sapien
tcagatggaaaggtgaatgagagga

SEQ ID NO: 4195576 - DNA, 25 bp, Homo sapien
caatagactcttgtaggtgagaggc

SEQ ID NO: 4195577 - DNA, 25 bp, Homo sapien
atggagaagtacacaatagactctt

SEQ ID NO: 4195578 - DNA, 25 bp, Homo sapien
ggcagtagcccagatggtggattcc

SEQ ID NO: 4195579 - DNA, 25 bp, Homo sapien
tccagataggtctggagctgatttt

SEQ ID NO: 4195580 - DNA, 25 bp, Homo sapien
tgtgttaaattcaattcgatcattg

SEQ ID NO: 4195581 - DNA, 25 bp, Homo sapien
cagcaagggactcaataatatgtgt

SEQ ID NO: 4195582 - DNA, 25 bp, Homo sapien
agaccagcaagggactcaataatat

SEQ ID NO: 4195583 - DNA, 25 bp, Homo sapien
cacctgagccaagacccaaagaaag

SEQ ID NO: 4195584 - DNA, 25 bp, Homo sapien
tgtcttgtcagctaagtccattaaa

SEQ ID NO: 4195585 - DNA, 25 bp, Homo sapien
cattgtcttgtcagctaagtccatt

SEQ ID NO: 4195586 - DNA, 25 bp, Homo sapien
agccattgtcttgtcagctaagtcc

SEQ ID NO: 4195587 - DNA, 25 bp, Homo sapien
gccattgtcttgtcagctaagtcca

SEQ ID NO: 4195588 - DNA, 25 bp, Homo sapien
catgctccaggttctaccttaagca

SEQ ID NO: 4195589 - DNA, 25 bp, Homo sapien
atgctccaggttctaccttaagcaa

SEQ ID NO: 4195590 - DNA, 25 bp, Homo sapien
tgctccaggttctaccttaagcaaa

SEQ ID NO: 4195591 - DNA, 25 bp, Homo sapien
tgctttctagtgtagagagctcctg

SEQ ID NO: 4195592 - DNA, 25 bp, Homo sapien
ggtctggagcttcatgagtcatggc

SEQ ID NO: 4195593 - DNA, 25 bp, Homo sapien
tctgccttgatcagggagtaaaagc

SEQ ID NO: 4195594 - DNA, 25 bp, Homo sapien
ttatcgccctttggtgacatggtgc

SEQ ID NO: 4195595 - DNA, 25 bp, Homo sapien
tgcttctatattcttgtccccctgg

SEQ ID NO: 4195596 - DNA, 25 bp, Homo sapien
gcttctatattcttgtccccctggg

SEQ ID NO: 4195597 - DNA, 25 bp, Homo sapien
agctgcttctatattcttgtccccc

SEQ ID NO: 4195598 - DNA, 25 bp, Homo sapien
tctatattcttgtccccctggggga

SEQ ID NO: 4195599 - DNA, 25 bp, Homo sapien
ttgctaagtggttatgcaggaggcc

SEQ ID NO: 4195600 - DNA, 25 bp, Homo sapien
cttgctaagtggttatgcaggaggc

SEQ ID NO: 4195601 - DNA, 25 bp, Homo sapien
tgctaagtggttatgcaggaggccc

SEQ ID NO: 4195602 - DNA, 25 bp, Homo sapien
ctccaattccacagctgaatctgca

SEQ ID NO: 4195603 - DNA, 25 bp, Homo sapien
cacagtcccgggcacatagaggcat

SEQ ID NO: 4195604 - DNA, 25 bp, Homo sapien
gaacacagtcccgggcacatagagg

SEQ ID NO: 4195605 - DNA, 25 bp, Homo sapien
tgggaacacagtcccgggcacatag

SEQ ID NO: 4195606 - DNA, 25 bp, Homo sapien
ggaacacagtcccgggcacatagag

SEQ ID NO: 4195607 - DNA, 25 bp, Homo sapien
ccaggacacagtgtaggcaaaagca

SEQ ID NO: 4195608 - DNA, 25 bp, Homo sapien
gcccaggacacagtgtaggcaaaag

SEQ ID NO: 4195609 - DNA, 25 bp, Homo sapien
aagcccaggacacagtgtaggcaaa

SEQ ID NO: 4195610 - DNA, 25 bp, Homo sapien
cacctaactgagaagcccaggacac

SEQ ID NO: 4195611 - DNA, 25 bp, Homo sapien
atatttgaactttatgctgcactaa

SEQ ID NO: 4195612 - DNA, 25 bp, Homo sapien
tatttgaactttatgctgcactaaa

SEQ ID NO: 4195613 - DNA, 25 bp, Homo sapien
aatatttgaactttatgctgcacta

SEQ ID NO: 4195614 - DNA, 25 bp, Homo sapien
atttgaactttatgctgcactaaaa

SEQ ID NO: 4195615 - DNA, 25 bp, Homo sapien
tcagttcagttcgtgctttgtcaag

SEQ ID NO: 4195616 - DNA, 25 bp, Homo sapien
gttcagttcgtgctttgtcaagtgg

SEQ ID NO: 4195617 - DNA, 25 bp, Homo sapien
ttgtcaagtggaagacaacatagag

SEQ ID NO: 4195618 - DNA, 25 bp, Homo sapien
aacatagagatctgaggcccagagc

SEQ ID NO: 4195619 - DNA, 25 bp, Homo sapien
tgtgttgagcattagatttctgtta

SEQ ID NO: 4195620 - DNA, 25 bp, Homo sapien
ttctgttaattaataccaagtctaa

SEQ ID NO: 4195621 - DNA, 25 bp, Homo sapien
cattgattgtcgctgaactctcagc

SEQ ID NO: 4195622 - DNA, 25 bp, Homo sapien
tccagttctaccaatgtgccacagg

SEQ ID NO: 4195623 - DNA, 25 bp, Homo sapien
tttgttctattactgtctgaagatg

SEQ ID NO: 4195624 - DNA, 25 bp, Homo sapien
tgttctattactgtctgaagatgct

SEQ ID NO: 4195625 - DNA, 25 bp, Homo sapien
tctattactgtctgaagatgctggc

SEQ ID NO: 4195626 - DNA, 25 bp, Homo sapien
ttctattactgtctgaagatgctgg

SEQ ID NO: 4195627 - DNA, 25 bp, Homo sapien
tgtacccttttgtacttactctcca

SEQ ID NO: 4195628 - DNA, 25 bp, Homo sapien
cagtccacattgacctcagtctttc

SEQ ID NO: 4195629 - DNA, 25 bp, Homo sapien
tccattaattgtctgtacccttttg

SEQ ID NO: 4195630 - DNA, 25 bp, Homo sapien
cacattgacctcagtctttccatta

SEQ ID NO: 4195631 - DNA, 25 bp, Homo sapien
tgttcccatgcccatggagctacac

SEQ ID NO: 4195632 - DNA, 25 bp, Homo sapien
ttccactgttcccatgcccatggag

SEQ ID NO: 4195633 - DNA, 25 bp, Homo sapien
cactgttcccatgcccatggagcta

SEQ ID NO: 4195634 - DNA, 25 bp, Homo sapien
catcttccactgttcccatgcccat

SEQ ID NO: 4195635 - DNA, 25 bp, Homo sapien
tgtctctcctacagcatctatctgc

SEQ ID NO: 4195636 - DNA, 25 bp, Homo sapien
atcaatagtaatgatggaaccaccc

SEQ ID NO: 4195637 - DNA, 25 bp, Homo sapien
gtaatgatggaaccacccagcgcaa

SEQ ID NO: 4195638 - DNA, 25 bp, Homo sapien
tggaaccacccagcgcaaacaatat

SEQ ID NO: 4195639 - DNA, 25 bp, Homo sapien
gaaggctaaattctgaagggtgagc

SEQ ID NO: 4195640 - DNA, 25 bp, Homo sapien
tactggaaggctaaattctgaaggg

SEQ ID NO: 4195641 - DNA, 25 bp, Homo sapien
gctaaattctgaagggtgagcagcc

SEQ ID NO: 4195642 - DNA, 25 bp, Homo sapien
ttactggaaggctaaattctgaagg

SEQ ID NO: 4195643 - DNA, 25 bp, Homo sapien
tcatgatggaagttggaagcccacg

SEQ ID NO: 4195644 - DNA, 25 bp, Homo sapien
gaaaaggactctagcctttcaggag

SEQ ID NO: 4195645 - DNA, 25 bp, Homo sapien
gtgtagagtcacatagcttccctga

SEQ ID NO: 4195646 - DNA, 25 bp, Homo sapien
gaaccacctgtattaggttgagcca

SEQ ID NO: 4195647 - DNA, 25 bp, Homo sapien
ctggccttgcaataataaagtcaca

SEQ ID NO: 4195648 - DNA, 25 bp, Homo sapien
ggccttgcaataataaagtcacagt

SEQ ID NO: 4195649 - DNA, 25 bp, Homo sapien
ctggttctggaattctttatgtttt

SEQ ID NO: 4195650 - DNA, 25 bp, Homo sapien
gcaataataaagtcacagttctggt

SEQ ID NO: 4195651 - DNA, 25 bp, Homo sapien
tggcaaacaagcaccttacaggaag

SEQ ID NO: 4195652 - DNA, 25 bp, Homo sapien
tttggagggaacagacatagtgagc

SEQ ID NO: 4195653 - DNA, 25 bp, Homo sapien
gatgtggaagagagactaactgcct

SEQ ID NO: 4195654 - DNA, 25 bp, Homo sapien
gtaaaggagtcagcattagccaaag

SEQ ID NO: 4195655 - DNA, 25 bp, Homo sapien
caaagcccttgctgaacagctggca

SEQ ID NO: 4195656 - DNA, 25 bp, Homo sapien
aacaagcatacactgtgtgacagga

SEQ ID NO: 4195657 - DNA, 25 bp, Homo sapien
gacaagtgtacatccaagcccaata

SEQ ID NO: 4195658 - DNA, 25 bp, Homo sapien
aatgataagcaagaacaaagccctt

SEQ ID NO: 4195659 - DNA, 25 bp, Homo sapien
gaaaatgcggctgaaagtccccttc

SEQ ID NO: 4195660 - DNA, 25 bp, Homo sapien
gggcccactaccagcaatacttgaa

SEQ ID NO: 4195661 - DNA, 25 bp, Homo sapien
gaagaaggtgtaagccgactgtcct

SEQ ID NO: 4195662 - DNA, 25 bp, Homo sapien
tggaagttgctctgccggatacacc

SEQ ID NO: 4195663 - DNA, 25 bp, Homo sapien
gggaaaatctttcagtccttggata

SEQ ID NO: 4195664 - DNA, 25 bp, Homo sapien
tctttcagtccttggatagatttta

SEQ ID NO: 4195665 - DNA, 25 bp, Homo sapien
gaaaatctttcagtccttggataga

SEQ ID NO: 4195666 - DNA, 25 bp, Homo sapien
aaatctttcagtccttggatagatt

SEQ ID NO: 4195667 - DNA, 25 bp, Homo sapien
agagggtttggatgccagtcctgcc

SEQ ID NO: 4195668 - DNA, 25 bp, Homo sapien
gaggtgacactttgaacgacaggat

SEQ ID NO: 4195669 - DNA, 25 bp, Homo sapien
cctgcttctggcaatagttcacggg

SEQ ID NO: 4195670 - DNA, 25 bp, Homo sapien
gacagccttggtgtgtacccatgca

SEQ ID NO: 4195671 - DNA, 25 bp, Homo sapien
agcaccccttcagtgtacctgtgga

SEQ ID NO: 4195672 - DNA, 25 bp, Homo sapien
ctaccctgggttggctgataagagc

SEQ ID NO: 4195673 - DNA, 25 bp, Homo sapien
tcatccagcatagcgtgggagggct

SEQ ID NO: 4195674 - DNA, 25 bp, Homo sapien
taaacaatcactctcagttgaaggg

SEQ ID NO: 4195675 - DNA, 25 bp, Homo sapien
gatgtcaacaccagtgggaaggagt

SEQ ID NO: 4195676 - DNA, 25 bp, Homo sapien
tttgtggaatatgctgaagtcaggg

SEQ ID NO: 4195677 - DNA, 25 bp, Homo sapien
ggatgccatgctgtaggaggtcctt

SEQ ID NO: 4195678 - DNA, 25 bp, Homo sapien
tgaaagtgtaggaaggatgccatgc

SEQ ID NO: 4195679 - DNA, 25 bp, Homo sapien
tatatttggatgcatttcacttttc

SEQ ID NO: 4195680 - DNA, 25 bp, Homo sapien
aatatatttggatgcatttcacttt

SEQ ID NO: 4195681 - DNA, 25 bp, Homo sapien
tgcaaaatatatttggatgcatttc

SEQ ID NO: 4195682 - DNA, 25 bp, Homo sapien
caaaatatatttggatgcatttcac

SEQ ID NO: 4195683 - DNA, 25 bp, Homo sapien
aaccacctccgtgtttacagacagg

SEQ ID NO: 4195684 - DNA, 25 bp, Homo sapien
gcttgctgtcatgtaaccaccagag

SEQ ID NO: 4195685 - DNA, 25 bp, Homo sapien
cctgaaactgattctgctgagacaa

SEQ ID NO: 4195686 - DNA, 25 bp, Homo sapien
tgtttactatgggtcaggcacttat

SEQ ID NO: 4195687 - DNA, 25 bp, Homo sapien
cccatctcccactcccccgccgcca

SEQ ID NO: 4195688 - DNA, 25 bp, Homo sapien
aagaatttcattgatcctcaatttc

SEQ ID NO: 4195689 - DNA, 25 bp, Homo sapien
agaatttcattgatcctcaatttca

SEQ ID NO: 4195690 - DNA, 25 bp, Homo sapien
aaaagaatttcattgatcctcaatt

SEQ ID NO: 4195691 - DNA, 25 bp, Homo sapien
caaaaagaatttcattgatcctcaa

SEQ ID NO: 4195692 - DNA, 25 bp, Homo sapien
aatcctgagaattgccagactgaag

SEQ ID NO: 4195693 - DNA, 25 bp, Homo sapien
tgagtgggaatcctgagaattgcca

SEQ ID NO: 4195694 - DNA, 25 bp, Homo sapien
tgagaattgccagactgaagacagt

SEQ ID NO: 4195695 - DNA, 25 bp, Homo sapien
gggaatcctgagaattgccagactg

SEQ ID NO: 4195696 - DNA, 25 bp, Homo sapien
gagccggccctctcctgatgtcttg

SEQ ID NO: 4195697 - DNA, 25 bp, Homo sapien
gatgtcttgttgagcaccacagcct

SEQ ID NO: 4195698 - DNA, 25 bp, Homo sapien
ggccatggatcttgaacgcacagat

SEQ ID NO: 4195699 - DNA, 25 bp, Homo sapien
gaatgtgtactccttctgcaactca

SEQ ID NO: 4195700 - DNA, 25 bp, Homo sapien
cttcacctgtatatggaccacggcc

SEQ ID NO: 4195701 - DNA, 25 bp, Homo sapien
gggagcagtcctcgtcaatggcctc

SEQ ID NO: 4195702 - DNA, 25 bp, Homo sapien
aaggtgggagcaaactcgttgacat

SEQ ID NO: 4195703 - DNA, 25 bp, Homo sapien
tgctgtcatagatcttgccctccgt

SEQ ID NO: 4195704 - DNA, 25 bp, Homo sapien
caggggcccacactccctgagaggg

SEQ ID NO: 4195705 - DNA, 25 bp, Homo sapien
tgagagggcccattctcctcttcat

SEQ ID NO: 4195706 - DNA, 25 bp, Homo sapien
ctggaggactgcttctgtacacctc

SEQ ID NO: 4195707 - DNA, 25 bp, Homo sapien
tacacctcgctgtcaggggcccaca

SEQ ID NO: 4195708 - DNA, 25 bp, Homo sapien
ttgcacgtgtacagcgataggagcc

SEQ ID NO: 4195709 - DNA, 25 bp, Homo sapien
cagatacagacacattttcaactgt

SEQ ID NO: 4195710 - DNA, 25 bp, Homo sapien
ccagggctgggtaagcacgcatgta

SEQ ID NO: 4195711 - DNA, 25 bp, Homo sapien
tcaagctggaagtgtacatgcatgc

SEQ ID NO: 4195712 - DNA, 25 bp, Homo sapien
attctattattttctggcctgcaag

SEQ ID NO: 4195713 - DNA, 25 bp, Homo sapien
tattataatgtgtcatggcaaagtc

SEQ ID NO: 4195714 - DNA, 25 bp, Homo sapien
tactgatagcttcagtgaggttccc

SEQ ID NO: 4195715 - DNA, 25 bp, Homo sapien
agtttcatgtacctagatgtccata

SEQ ID NO: 4195716 - DNA, 25 bp, Homo sapien
gatttttctatcacggtcttctcag

SEQ ID NO: 4195717 - DNA, 25 bp, Homo sapien
gagacctaatcccacagttaaccat

SEQ ID NO: 4195718 - DNA, 25 bp, Homo sapien
tgcttctgttacaactgtatctttt

SEQ ID NO: 4195719 - DNA, 25 bp, Homo sapien
ttctcaggagacctaatcccacagt

SEQ ID NO: 4195720 - DNA, 25 bp, Homo sapien
tggtgttgtttgtcatagctcagct

SEQ ID NO: 4195721 - DNA, 25 bp, Homo sapien
cagtcgtaggcggtcaccaggatct

SEQ ID NO: 4195722 - DNA, 25 bp, Homo sapien
tgagcagcgggcttctgtccacagt

SEQ ID NO: 4195723 - DNA, 25 bp, Homo sapien
ggcttgcaaactggcttcacatcca

SEQ ID NO: 4195724 - DNA, 25 bp, Homo sapien
atgctgccttcacacaagactgata

SEQ ID NO: 4195725 - DNA, 25 bp, Homo sapien
catgctgccttcacacaagactgat

SEQ ID NO: 4195726 - DNA, 25 bp, Homo sapien
ccatgctgccttcacacaagactga

SEQ ID NO: 4195727 - DNA, 25 bp, Homo sapien
accatgctgccttcacacaagactg

SEQ ID NO: 4195728 - DNA, 25 bp, Homo sapien
tagggagatcaagttgtgcaaggga

SEQ ID NO: 4195729 - DNA, 25 bp, Homo sapien
tctactttgttcaaaggcatacaac

SEQ ID NO: 4195730 - DNA, 25 bp, Homo sapien
aaaggcatacaactctggctctctc

SEQ ID NO: 4195731 - DNA, 25 bp, Homo sapien
tgcaagggaggagtgctttgagaac

SEQ ID NO: 4195732 - DNA, 25 bp, Homo sapien
tgaacttccagttaagaggctgcag

SEQ ID NO: 4195733 - DNA, 25 bp, Homo sapien
aggtgaacttccagttaagaggctg

SEQ ID NO: 4195734 - DNA, 25 bp, Homo sapien
aacttccagttaagaggctgcagcc

SEQ ID NO: 4195735 - DNA, 25 bp, Homo sapien
ctggagaaaggtgaacttccagtta

SEQ ID NO: 4195736 - DNA, 25 bp, Homo sapien
tccaagggtactacatcctctgcag

SEQ ID NO: 4195737 - DNA, 25 bp, Homo sapien
gggtactacatcctctgcagtgctg

SEQ ID NO: 4195738 - DNA, 25 bp, Homo sapien
agcctccaagggtactacatcctct

SEQ ID NO: 4195739 - DNA, 25 bp, Homo sapien
aagggtactacatcctctgcagtgc

SEQ ID NO: 4195740 - DNA, 25 bp, Homo sapien
ctctgatcttgctggtgttgggcac

SEQ ID NO: 4195741 - DNA, 25 bp, Homo sapien
gatcttgctggtgttgggcaccacc

SEQ ID NO: 4195742 - DNA, 25 bp, Homo sapien
tctctgatcttgctggtgttgggca

SEQ ID NO: 4195743 - DNA, 25 bp, Homo sapien
tcttgctggtgttgggcaccacctc

SEQ ID NO: 4195744 - DNA, 25 bp, Homo sapien
gggaataaagctaatctaagagact

SEQ ID NO: 4195745 - DNA, 25 bp, Homo sapien
aagacgttccgtccattgttccaat

SEQ ID NO: 4195746 - DNA, 25 bp, Homo sapien
ctaatctaagagacttctggaaagc

SEQ ID NO: 4195747 - DNA, 25 bp, Homo sapien
aagcataggctttggcgctgttgta

SEQ ID NO: 4195748 - DNA, 25 bp, Homo sapien
taaaagagtgataatcccaatgttg

SEQ ID NO: 4195749 - DNA, 25 bp, Homo sapien
catgtttaacgttcaatttatgctg

SEQ ID NO: 4195750 - DNA, 25 bp, Homo sapien
caaaagatcaagaagtattgtcagt

SEQ ID NO: 4195751 - DNA, 25 bp, Homo sapien
ttgtcagttttatcagtgtctgacc

SEQ ID NO: 4195752 - DNA, 25 bp, Homo sapien
ttgcacaaatgataaaaccatgcct

SEQ ID NO: 4195753 - DNA, 25 bp, Homo sapien
aatcaatgactaagcactgacaagg

SEQ ID NO: 4195754 - DNA, 25 bp, Homo sapien
cctaagaattggtgtgacttgccca

SEQ ID NO: 4195755 - DNA, 25 bp, Homo sapien
ggtgccaagcacttttatacctatc

SEQ ID NO: 4195756 - DNA, 25 bp, Homo sapien
agccaggctggtactcaatcctctt

SEQ ID NO: 4195757 - DNA, 25 bp, Homo sapien
catcgcacgtctccaggtggatgct

SEQ ID NO: 4195758 - DNA, 25 bp, Homo sapien
ctctgtgacgatctggagggaagac

SEQ ID NO: 4195759 - DNA, 25 bp, Homo sapien
ccaatgtaattagtctgcagctctg

SEQ ID NO: 4195760 - DNA, 25 bp, Homo sapien
gatttctcagagtaggtctcccggt

SEQ ID NO: 4195761 - DNA, 25 bp, Homo sapien
tctggaaagcctggtgcctagatgg

SEQ ID NO: 4195762 - DNA, 25 bp, Homo sapien
catgtggagctatgaattcagagga

SEQ ID NO: 4195763 - DNA, 25 bp, Homo sapien
acttgagttacatctggccccacaa

SEQ ID NO: 4195764 - DNA, 25 bp, Homo sapien
aagcctggcttcatgtagagcaaag

SEQ ID NO: 4195765 - DNA, 25 bp, Homo sapien
ccctgcctgccgtcaaacttgaaga

SEQ ID NO: 4195766 - DNA, 25 bp, Homo sapien
caagaggtcaatgatgccagaggag

SEQ ID NO: 4195767 - DNA, 25 bp, Homo sapien
tgctgtccaccagcagtcctgcagt

SEQ ID NO: 4195768 - DNA, 25 bp, Homo sapien
ggttcttgggcacaatcccatcggg

SEQ ID NO: 4195769 - DNA, 25 bp, Homo sapien
cgaaaggtgtcagcctggtcgaagt

SEQ ID NO: 4195770 - DNA, 25 bp, Homo sapien
tacagggcatagtgatgccggttca

SEQ ID NO: 4195771 - DNA, 25 bp, Homo sapien
gtccttccgcaagagaaagacgagg

SEQ ID NO: 4195772 - DNA, 25 bp, Homo sapien
gacgaggcggcagttgtgcacatac

SEQ ID NO: 4195773 - DNA, 25 bp, Homo sapien
gctgtagcagagacgagaataattt

SEQ ID NO: 4195774 - DNA, 25 bp, Homo sapien
gcagagacgagaataatttcccacg

SEQ ID NO: 4195775 - DNA, 25 bp, Homo sapien
agagacgagaataatttcccacgtg

SEQ ID NO: 4195776 - DNA, 25 bp, Homo sapien
ggctgtagcagagacgagaataatt

SEQ ID NO: 4195777 - DNA, 25 bp, Homo sapien
ggctgtccatccaccttggccagag

SEQ ID NO: 4195778 - DNA, 25 bp, Homo sapien
gtccatccaccttggccagagcctg

SEQ ID NO: 4195779 - DNA, 25 bp, Homo sapien
ctggctgtccatccaccttggccag

SEQ ID NO: 4195780 - DNA, 25 bp, Homo sapien
ctgtccatccaccttggccagagcc

SEQ ID NO: 4195781 - DNA, 25 bp, Homo sapien
ctttagtgagatgccctggattgtc

SEQ ID NO: 4195782 - DNA, 25 bp, Homo sapien
atgatggctttagtgagatgccctg

SEQ ID NO: 4195783 - DNA, 25 bp, Homo sapien
gagatgccctggattgtcacaggca

SEQ ID NO: 4195784 - DNA, 25 bp, Homo sapien
tggctttagtgagatgccctggatt

SEQ ID NO: 4195785 - DNA, 25 bp, Homo sapien
tagaaaaagtcattcggaattctgc

SEQ ID NO: 4195786 - DNA, 25 bp, Homo sapien
aaccctgcaatttgatgtcatagaa

SEQ ID NO: 4195787 - DNA, 25 bp, Homo sapien
caaccctgcaatttgatgtcataga

SEQ ID NO: 4195788 - DNA, 25 bp, Homo sapien
gatgtcatagaaaaagtcattcgga

SEQ ID NO: 4195789 - DNA, 25 bp, Homo sapien
cagaggactcagacaaaaggtttct

SEQ ID NO: 4195790 - DNA, 25 bp, Homo sapien
cttgtagcaggtaaggcgatttggc

SEQ ID NO: 4195791 - DNA, 25 bp, Homo sapien
cacagaggactcagacaaaaggttt

SEQ ID NO: 4195792 - DNA, 25 bp, Homo sapien
ttccacttcttgtagcaggtaaggc

SEQ ID NO: 4195793 - DNA, 25 bp, Homo sapien
gaaccacagtgtagaacatcagcat

SEQ ID NO: 4195794 - DNA, 25 bp, Homo sapien
cctgaaggatgtgacccctgagtat

SEQ ID NO: 4195795 - DNA, 25 bp, Homo sapien
tgcttgtagacatagggaccactgt

SEQ ID NO: 4195796 - DNA, 25 bp, Homo sapien
caagacgtgatagtccaatgcagtg

SEQ ID NO: 4195797 - DNA, 25 bp, Homo sapien
gggttgacaccgtgctaaaatcttc

SEQ ID NO: 4195798 - DNA, 25 bp, Homo sapien
aatcttcttaatgaacaggtttcca

SEQ ID NO: 4195799 - DNA, 25 bp, Homo sapien
gacaccgtgctaaaatcttcttaat

SEQ ID NO: 4195800 - DNA, 25 bp, Homo sapien
cttaatgaacaggtttccaatgttc

SEQ ID NO: 4195801 - DNA, 25 bp, Homo sapien
atggcaaatcacattttcatcccga

SEQ ID NO: 4195802 - DNA, 25 bp, Homo sapien
aaatcacattttcatcccgaagtgt

SEQ ID NO: 4195803 - DNA, 25 bp, Homo sapien
gcaaatcacattttcatcccgaagt

SEQ ID NO: 4195804 - DNA, 25 bp, Homo sapien
ggcaaatcacattttcatcccgaag

SEQ ID NO: 4195805 - DNA, 25 bp, Homo sapien
cacggattccggcatttgtgggcag

SEQ ID NO: 4195806 - DNA, 25 bp, Homo sapien
gaaccagaggttagggcaggaaatc

SEQ ID NO: 4195807 - DNA, 25 bp, Homo sapien
acgaagtgggggttgtgcattccct

SEQ ID NO: 4195808 - DNA, 25 bp, Homo sapien
tggggctgatttgcaaattccacaa

SEQ ID NO: 4195809 - DNA, 25 bp, Homo sapien
ggaaatccagtctcaacgaagtggg

SEQ ID NO: 4195810 - DNA, 25 bp, Homo sapien
tgtggaggacccctctgaaatgtct

SEQ ID NO: 4195811 - DNA, 25 bp, Homo sapien
tctgaaatgtctctcatctgcatcc

SEQ ID NO: 4195812 - DNA, 25 bp, Homo sapien
tcctcttgtctccatcgactctgcc

SEQ ID NO: 4195813 - DNA, 25 bp, Homo sapien
tctcatctgcatcctcttgtctcca

SEQ ID NO: 4195814 - DNA, 25 bp, Homo sapien
caagcgccgactgtgagttgcatgg

SEQ ID NO: 4195815 - DNA, 25 bp, Homo sapien
cattgatgacatagtagtgccactc

SEQ ID NO: 4195816 - DNA, 25 bp, Homo sapien
tgaatgggccagtcgttggtcacca

SEQ ID NO: 4195817 - DNA, 25 bp, Homo sapien
ggttaccacaggaaactccacattg

SEQ ID NO: 4195818 - DNA, 25 bp, Homo sapien
cttgagagtggctttctgtggcctt

SEQ ID NO: 4195819 - DNA, 25 bp, Homo sapien
tggccttgtggcttgtggacaagct

SEQ ID NO: 4195820 - DNA, 25 bp, Homo sapien
ctgtggccttgtggcttgtggacaa

SEQ ID NO: 4195821 - DNA, 25 bp, Homo sapien
ccttgtggcttgtggacaagctgcc

SEQ ID NO: 4195822 - DNA, 25 bp, Homo sapien
acatctcaaagtactaatctgctta

SEQ ID NO: 4195823 - DNA, 25 bp, Homo sapien
ggtgaagagtcaaagtcacaaatct

SEQ ID NO: 4195824 - DNA, 25 bp, Homo sapien
tcttatactatagcccacctctatc

SEQ ID NO: 4195825 - DNA, 25 bp, Homo sapien
gcacggccggcatattcttatacta

SEQ ID NO: 4195826 - DNA, 25 bp, Homo sapien
tcactcggaaagcttggacattgag

SEQ ID NO: 4195827 - DNA, 25 bp, Homo sapien
aatcactcggaaagcttggacattg

SEQ ID NO: 4195828 - DNA, 25 bp, Homo sapien
cctgatgaggcgatcactagaaatc

SEQ ID NO: 4195829 - DNA, 25 bp, Homo sapien
ggcgatcactagaaatcactcggaa

SEQ ID NO: 4195830 - DNA, 25 bp, Homo sapien
tcagggtctatatgtgagggttagt

SEQ ID NO: 4195831 - DNA, 25 bp, Homo sapien
cagggtctatatgtgagggttagtc

SEQ ID NO: 4195832 - DNA, 25 bp, Homo sapien
cttccatgaaagaactgagcaaact

SEQ ID NO: 4195833 - DNA, 25 bp, Homo sapien
ccagggcggatggtgagactggcca

SEQ ID NO: 4195834 - DNA, 25 bp, Homo sapien
tttgccagggcggatggtgagactg

SEQ ID NO: 4195835 - DNA, 25 bp, Homo sapien
aactgagcaaactgtggtttggtga

SEQ ID NO: 4195836 - DNA, 25 bp, Homo sapien
aaggaattaatgtccagcccttcct

SEQ ID NO: 4195837 - DNA, 25 bp, Homo sapien
aggaattaatgtccagcccttcctt

SEQ ID NO: 4195838 - DNA, 25 bp, Homo sapien
tggaggatactttgaggcgccgcac

SEQ ID NO: 4195839 - DNA, 25 bp, Homo sapien
atgttcccaatgtcgtcaccttcca

SEQ ID NO: 4195840 - DNA, 25 bp, Homo sapien
ccgccgttgggaactgcctggagtt

SEQ ID NO: 4195841 - DNA, 25 bp, Homo sapien
ttctggagagcacggttaatgttcc

SEQ ID NO: 4195842 - DNA, 25 bp, Homo sapien
ggacttcctgtgtaccacgcactgc

SEQ ID NO: 4195843 - DNA, 25 bp, Homo sapien
gacagctgacgaaaggcaactcctg

SEQ ID NO: 4195844 - DNA, 25 bp, Homo sapien
cacagatcctttgaggcatcctcag

SEQ ID NO: 4195845 - DNA, 25 bp, Homo sapien
cctgttttgtgagggaacattccca

SEQ ID NO: 4195846 - DNA, 25 bp, Homo sapien
gggtggattccatgctgagctactc

SEQ ID NO: 4195847 - DNA, 25 bp, Homo sapien
ccttacatgccttgggaaagttctc

SEQ ID NO: 4195848 - DNA, 25 bp, Homo sapien
tgaacttctcgtcagacctcatggg

SEQ ID NO: 4195849 - DNA, 25 bp, Homo sapien
catcatggtttgagctcagtaagca

SEQ ID NO: 4195850 - DNA, 25 bp, Homo sapien
ctggaggaccatcacataggcatct

SEQ ID NO: 4195851 - DNA, 25 bp, Homo sapien
gatactgatgcatacgtcttcccca

SEQ ID NO: 4195852 - DNA, 25 bp, Homo sapien
tcggttttggcgaaggtgctcacaa

SEQ ID NO: 4195853 - DNA, 25 bp, Homo sapien
tctccagaagtggtctgtgccccgg

SEQ ID NO: 4195854 - DNA, 25 bp, Homo sapien
aaatgcgttccctccaacctcatat

SEQ ID NO: 4195855 - DNA, 25 bp, Homo sapien
tacgctgccatgtatacatttaagc

SEQ ID NO: 4195856 - DNA, 25 bp, Homo sapien
aacctcatatccctcattgctaagc

SEQ ID NO: 4195857 - DNA, 25 bp, Homo sapien
gttttgctataatacattacgctgc

SEQ ID NO: 4195858 - DNA, 25 bp, Homo sapien
taagttatgaagcatttcctctaag

SEQ ID NO: 4195859 - DNA, 25 bp, Homo sapien
aagtcccctccgatcaccaaaatgt

SEQ ID NO: 4195860 - DNA, 25 bp, Homo sapien
aagcatttcctctaagacttctgat

SEQ ID NO: 4195861 - DNA, 25 bp, Homo sapien
tgtggttgagctccaagcactcctg

SEQ ID NO: 4195862 - DNA, 25 bp, Homo sapien
gagtagcctgcagtagaattagtgg

SEQ ID NO: 4195863 - DNA, 25 bp, Homo sapien
cgtagatggagtagcctgcagtaga

SEQ ID NO: 4195864 - DNA, 25 bp, Homo sapien
gaattagtggcatccaggtgtcgtt

SEQ ID NO: 4195865 - DNA, 25 bp, Homo sapien
catccaggtgtcgttggtggagctc

SEQ ID NO: 4195866 - DNA, 25 bp, Homo sapien
ccagttgcggtagcggatgtgatgt

SEQ ID NO: 4195867 - DNA, 25 bp, Homo sapien
cattgctagtgtagcgcccattgag

SEQ ID NO: 4195868 - DNA, 25 bp, Homo sapien
agcacctgctcatagcggctcatgg

SEQ ID NO: 4195869 - DNA, 25 bp, Homo sapien
tgagcacttaatccggaaacgccgg

SEQ ID NO: 4195870 - DNA, 25 bp, Homo sapien
aggaagggaggctgcacaatcagat

SEQ ID NO: 4195871 - DNA, 25 bp, Homo sapien
ctgtgctggatgctactccgggact

SEQ ID NO: 4195872 - DNA, 25 bp, Homo sapien
atgctactccgggactcaggatgat

SEQ ID NO: 4195873 - DNA, 25 bp, Homo sapien
ggctgcacaatcagatgattgacat

SEQ ID NO: 4195874 - DNA, 25 bp, Homo sapien
gctggtgggcgatccggacccggta

SEQ ID NO: 4195875 - DNA, 25 bp, Homo sapien
tgatagtcagcgcagaatcgtccca

SEQ ID NO: 4195876 - DNA, 25 bp, Homo sapien
acccatggccacgacaaacacaagc

SEQ ID NO: 4195877 - DNA, 25 bp, Homo sapien
gatgaagtgctggtgggcgatccgg

SEQ ID NO: 4195878 - DNA, 25 bp, Homo sapien
agaactcccagccgtgcatgaggat

SEQ ID NO: 4195879 - DNA, 25 bp, Homo sapien
aactcccagccgtgcatgaggatca

SEQ ID NO: 4195880 - DNA, 25 bp, Homo sapien
actcccagccgtgcatgaggatcac

SEQ ID NO: 4195881 - DNA, 25 bp, Homo sapien
ccagaactcccagccgtgcatgagg

SEQ ID NO: 4195882 - DNA, 25 bp, Homo sapien
atcttccccatgccctggtccttca

SEQ ID NO: 4195883 - DNA, 25 bp, Homo sapien
cttccccatgccctggtccttcatg

SEQ ID NO: 4195884 - DNA, 25 bp, Homo sapien
ccccatgccctggtccttcatgttt

SEQ ID NO: 4195885 - DNA, 25 bp, Homo sapien
cctcttcgctgtcgtcagagccact

SEQ ID NO: 4195886 - DNA, 25 bp, Homo sapien
taaatgccacttaactagggaccag

SEQ ID NO: 4195887 - DNA, 25 bp, Homo sapien
agacgcacagtgagttggaacccca

SEQ ID NO: 4195888 - DNA, 25 bp, Homo sapien
catggatgaaacacagggagtgccc

SEQ ID NO: 4195889 - DNA, 25 bp, Homo sapien
gaaagttgaaaagacctgccatggg

SEQ ID NO: 4195890 - DNA, 25 bp, Homo sapien
caatgaatataaaaccccagcttct

SEQ ID NO: 4195891 - DNA, 25 bp, Homo sapien
agtcctatagactttcctcttgtgg

SEQ ID NO: 4195892 - DNA, 25 bp, Homo sapien
tcttgtggatgtacagacacagcct

SEQ ID NO: 4195893 - DNA, 25 bp, Homo sapien
actggttaagtttgtgaccgcatcc

SEQ ID NO: 4195894 - DNA, 25 bp, Homo sapien
gaaaagtgttctcacaaacaccaga

SEQ ID NO: 4195895 - DNA, 25 bp, Homo sapien
tacccaaccagatcgaaaagactga

SEQ ID NO: 4195896 - DNA, 25 bp, Homo sapien
caactatgaataaggcagccaccca

SEQ ID NO: 4195897 - DNA, 25 bp, Homo sapien
tttttgctgccacaattttgggaga

SEQ ID NO: 4195898 - DNA, 25 bp, Homo sapien
ggaatgaagcctggctcttaatcca

SEQ ID NO: 4195899 - DNA, 25 bp, Homo sapien
cccatcacaagtgcccagtgaaggt

SEQ ID NO: 4195900 - DNA, 25 bp, Homo sapien
tgggatggaatgaagcctggctctt

SEQ ID NO: 4195901 - DNA, 25 bp, Homo sapien
gctgctggaggtaacttcttctgtc

SEQ ID NO: 4195902 - DNA, 25 bp, Homo sapien
tcactctcacgacaagggagccaga

SEQ ID NO: 4195903 - DNA, 25 bp, Homo sapien
tagactttttagactggctgaaccc

SEQ ID NO: 4195904 - DNA, 25 bp, Homo sapien
tggaaaccaccgaggtcagactgga

SEQ ID NO: 4195905 - DNA, 25 bp, Homo sapien
tctaggtgcatgcaaacccactgtg

SEQ ID NO: 4195906 - DNA, 25 bp, Homo sapien
agaaagtgtcataacgaccaccaac

SEQ ID NO: 4195907 - DNA, 25 bp, Homo sapien
tcataacgaccaccaacatgaatca

SEQ ID NO: 4195908 - DNA, 25 bp, Homo sapien
catttacaagccacagctgaaaata

SEQ ID NO: 4195909 - DNA, 25 bp, Homo sapien
gtgtcataacgaccaccaacatgaa

SEQ ID NO: 4195910 - DNA, 25 bp, Homo sapien
tgtgaaattctaaaatcatatttat

SEQ ID NO: 4195911 - DNA, 25 bp, Homo sapien
tgaaattctaaaatcatatttattc

SEQ ID NO: 4195912 - DNA, 25 bp, Homo sapien
aaattctaaaatcatatttattcac

SEQ ID NO: 4195913 - DNA, 25 bp, Homo sapien
actgtgaaattctaaaatcatattt

SEQ ID NO: 4195914 - DNA, 25 bp, Homo sapien
catcctctagtcagctgcagtgtct

SEQ ID NO: 4195915 - DNA, 25 bp, Homo sapien
accagcatcctctagtcagctgcag

SEQ ID NO: 4195916 - DNA, 25 bp, Homo sapien
cagcatcctctagtcagctgcagtg

SEQ ID NO: 4195917 - DNA, 25 bp, Homo sapien
gcaccagcatcctctagtcagctgc

SEQ ID NO: 4195918 - DNA, 25 bp, Homo sapien
tgccactcggggtactgggccttga

SEQ ID NO: 4195919 - DNA, 25 bp, Homo sapien
ctgtggtgtcgacactcaggtggtc

SEQ ID NO: 4195920 - DNA, 25 bp, Homo sapien
gctgccatgtgccactcggggtact

SEQ ID NO: 4195921 - DNA, 25 bp, Homo sapien
gccatcttccagcctgtggtgtcga

SEQ ID NO: 4195922 - DNA, 25 bp, Homo sapien
tgaccatgagaagacattgttgacg

SEQ ID NO: 4195923 - DNA, 25 bp, Homo sapien
ggacattgttgtggcccctctaaga

SEQ ID NO: 4195924 - DNA, 25 bp, Homo sapien
tgaggaacctgaagctcgggcatcc

SEQ ID NO: 4195925 - DNA, 25 bp, Homo sapien
gacactgcccatagaaagctcatag

SEQ ID NO: 4195926 - DNA, 25 bp, Homo sapien
tccaagaaggaccaaaagacgattc

SEQ ID NO: 4195927 - DNA, 25 bp, Homo sapien
gctttatattatcgagagctgggaa

SEQ ID NO: 4195928 - DNA, 25 bp, Homo sapien
tatcctcatgcatcgttacggtaat

SEQ ID NO: 4195929 - DNA, 25 bp, Homo sapien
cggtaatgtcatgtaagagtgagga

SEQ ID NO: 4195930 - DNA, 25 bp, Homo sapien
taataggaatttagagcggagggcc

SEQ ID NO: 4195931 - DNA, 25 bp, Homo sapien
gccctgtattgaactggagcctcca

SEQ ID NO: 4195932 - DNA, 25 bp, Homo sapien
gcagctattaaatctagagtgctta

SEQ ID NO: 4195933 - DNA, 25 bp, Homo sapien
gagcctccaagttgcattctcctta

SEQ ID NO: 4195934 - DNA, 25 bp, Homo sapien
agatggatagataaggcaaattcca

SEQ ID NO: 4195935 - DNA, 25 bp, Homo sapien
atagctagctagctggtggataggt

SEQ ID NO: 4195936 - DNA, 25 bp, Homo sapien
aacgtcattgatagtttgaaaggaa

SEQ ID NO: 4195937 - DNA, 25 bp, Homo sapien
aatgattacagggtcatcttctcta

SEQ ID NO: 4195938 - DNA, 25 bp, Homo sapien
tctagcagtagagagtgcagtcttt

SEQ ID NO: 4195939 - DNA, 25 bp, Homo sapien
gagtgcagtctttaggcacattctg

SEQ ID NO: 4195940 - DNA, 25 bp, Homo sapien
cagtagagagtgcagtctttaggca

SEQ ID NO: 4195941 - DNA, 25 bp, Homo sapien
aaatgtctagcagtagagagtgcag

SEQ ID NO: 4195942 - DNA, 25 bp, Homo sapien
tggtaatgatgcatttagttcccaa

SEQ ID NO: 4195943 - DNA, 25 bp, Homo sapien
gtaatgatgcatttagttcccaaga

SEQ ID NO: 4195944 - DNA, 25 bp, Homo sapien
ctagcatggtaatgatgcatttagt

SEQ ID NO: 4195945 - DNA, 25 bp, Homo sapien
gcatggtaatgatgcatttagttcc

SEQ ID NO: 4195946 - DNA, 25 bp, Homo sapien
ttctaatccaattcctcgatctgtt

SEQ ID NO: 4195947 - DNA, 25 bp, Homo sapien
aatccaattcctcgatctgttggca

SEQ ID NO: 4195948 - DNA, 25 bp, Homo sapien
taatccaattcctcgatctgttggc

SEQ ID NO: 4195949 - DNA, 25 bp, Homo sapien
caatccatcggctccaattccattt

SEQ ID NO: 4195950 - DNA, 25 bp, Homo sapien
tgttccatctgaatctgagcagctg

SEQ ID NO: 4195951 - DNA, 25 bp, Homo sapien
ttccatctgaatctgagcagctgac

SEQ ID NO: 4195952 - DNA, 25 bp, Homo sapien
tatgttccatctgaatctgagcagc

SEQ ID NO: 4195953 - DNA, 25 bp, Homo sapien
ttatgttccatctgaatctgagcag

SEQ ID NO: 4195954 - DNA, 25 bp, Homo sapien
cctggtcagtgagagctatcttgct

SEQ ID NO: 4195955 - DNA, 25 bp, Homo sapien
cctcctggagtacatttgcagttgg

SEQ ID NO: 4195956 - DNA, 25 bp, Homo sapien
cccagggtgtgttagctactttaag

SEQ ID NO: 4195957 - DNA, 25 bp, Homo sapien
aagataggtggtcttgccaagagcc

SEQ ID NO: 4195958 - DNA, 25 bp, Homo sapien
ttttcaaatgcacatgagagaaggg

SEQ ID NO: 4195959 - DNA, 25 bp, Homo sapien
agtttcctgtgtccagtggtgctgg

SEQ ID NO: 4195960 - DNA, 25 bp, Homo sapien
aaggggttgaggagagctagagtca

SEQ ID NO: 4195961 - DNA, 25 bp, Homo sapien
gagtcagagacccaggagtttcctg

SEQ ID NO: 4195962 - DNA, 25 bp, Homo sapien
gtttgccaaaactcagttttatcaa

SEQ ID NO: 4195963 - DNA, 25 bp, Homo sapien
aactcagttttatcaatctctctct

SEQ ID NO: 4195964 - DNA, 25 bp, Homo sapien
caaaactcagttttatcaatctctc

SEQ ID NO: 4195965 - DNA, 25 bp, Homo sapien
cagttttatcaatctctctctccat

SEQ ID NO: 4195966 - DNA, 25 bp, Homo sapien
gctggtatgttggtggaaactccat

SEQ ID NO: 4195967 - DNA, 25 bp, Homo sapien
gatgcggccttgtgggtggtagctg

SEQ ID NO: 4195968 - DNA, 25 bp, Homo sapien
gtagctggtatgttggtggaaactc

SEQ ID NO: 4195969 - DNA, 25 bp, Homo sapien
catgctaggtagatagcaggatgcg

SEQ ID NO: 4195970 - DNA, 25 bp, Homo sapien
ggtgcctacatgattaccaccggcc

SEQ ID NO: 4195971 - DNA, 25 bp, Homo sapien
tgttatgaggacttcacagctggtg

SEQ ID NO: 4195972 - DNA, 25 bp, Homo sapien
ggtgtccctaccaggaagctcatag

SEQ ID NO: 4195973 - DNA, 25 bp, Homo sapien
gaggccgtcagcttgaaagttgcaa

SEQ ID NO: 4195974 - DNA, 25 bp, Homo sapien
atgtacaacatggacagcaaacgca

SEQ ID NO: 4195975 - DNA, 25 bp, Homo sapien
tgtacaacatggacagcaaacgcac

SEQ ID NO: 4195976 - DNA, 25 bp, Homo sapien
gccatgtacaacatggacagcaaac

SEQ ID NO: 4195977 - DNA, 25 bp, Homo sapien
tgcagcacagacaggagcataactg

SEQ ID NO: 4195978 - DNA, 25 bp, Homo sapien
aggagcataactgaggacaacatct

SEQ ID NO: 4195979 - DNA, 25 bp, Homo sapien
cacagacaggagcataactgaggac

SEQ ID NO: 4195980 - DNA, 25 bp, Homo sapien
gacaggagcataactgaggacaaca

SEQ ID NO: 4195981 - DNA, 25 bp, Homo sapien
tgtaagggcaggggaagcaggtgca

SEQ ID NO: 4195982 - DNA, 25 bp, Homo sapien
tttgtaagggcaggggaagcaggtg

SEQ ID NO: 4195983 - DNA, 25 bp, Homo sapien
ttgtaagggcaggggaagcaggtgc

SEQ ID NO: 4195984 - DNA, 25 bp, Homo sapien
ctttgtaagggcaggggaagcaggt

SEQ ID NO: 4195985 - DNA, 25 bp, Homo sapien
gatcattggcccaagagcagcaaca

SEQ ID NO: 4195986 - DNA, 25 bp, Homo sapien
gttgggatcattggcccaagagcag

SEQ ID NO: 4195987 - DNA, 25 bp, Homo sapien
aacaccaatggcagttggggctctc

SEQ ID NO: 4195988 - DNA, 25 bp, Homo sapien
acaccaatggcagttggggctctca

SEQ ID NO: 4195989 - DNA, 25 bp, Homo sapien
cggctctcatagtagtagcagttga

SEQ ID NO: 4195990 - DNA, 25 bp, Homo sapien
cagttgagattgctgctggctgtgc

SEQ ID NO: 4195991 - DNA, 25 bp, Homo sapien
tcctgaggcggcccttgtggaaagt

SEQ ID NO: 4195992 - DNA, 25 bp, Homo sapien
aagtgatgatggtattgcggcagca

SEQ ID NO: 4195993 - DNA, 25 bp, Homo sapien
ggtggtacaggttaattgtccatgt

SEQ ID NO: 4195994 - DNA, 25 bp, Homo sapien
ctggatggactttagtttgcttaaa

SEQ ID NO: 4195995 - DNA, 25 bp, Homo sapien
ctggtggtacaggttaattgtccat

SEQ ID NO: 4195996 - DNA, 25 bp, Homo sapien
tccatgtagtgcctggatggacttt

SEQ ID NO: 4195997 - DNA, 25 bp, Homo sapien
taagcgatgcgcttgttgcggcaga

SEQ ID NO: 4195998 - DNA, 25 bp, Homo sapien
catccgagtggaaggccttgaggca

SEQ ID NO: 4195999 - DNA, 25 bp, Homo sapien
cagcatgaatgagtgcaggcgcagc

SEQ ID NO: 4196000 - DNA, 25 bp, Homo sapien
aaagacgtggtcttgcatggccaca

SEQ ID NO: 4196001 - DNA, 25 bp, Homo sapien
gttcctgaactagaagttaggctga

SEQ ID NO: 4196002 - DNA, 25 bp, Homo sapien
ttcctgaactagaagttaggctgaa

SEQ ID NO: 4196003 - DNA, 25 bp, Homo sapien
tcctgaactagaagttaggctgaag

SEQ ID NO: 4196004 - DNA, 25 bp, Homo sapien
ctattggctagttaagagttgtccc

SEQ ID NO: 4196005 - DNA, 25 bp, Homo sapien
caggagcggacaccaggatagtgac

SEQ ID NO: 4196006 - DNA, 25 bp, Homo sapien
acttgcagggtagcacagtgtttcc

SEQ ID NO: 4196007 - DNA, 25 bp, Homo sapien
gaacatcttagaacgtcacagaacg

SEQ ID NO: 4196008 - DNA, 25 bp, Homo sapien
cttttggaaccaacagttctaccat

SEQ ID NO: 4196009 - DNA, 25 bp, Homo sapien
tggaaccaacagttctaccattttc

SEQ ID NO: 4196010 - DNA, 25 bp, Homo sapien
tgccttccccaatgcactgtgactg

SEQ ID NO: 4196011 - DNA, 25 bp, Homo sapien
ccttccccaatgcactgtgactgtg

SEQ ID NO: 4196012 - DNA, 25 bp, Homo sapien
gccttccccaatgcactgtgactgt

SEQ ID NO: 4196013 - DNA, 25 bp, Homo sapien
cttccccaatgcactgtgactgtgg

SEQ ID NO: 4196014 - DNA, 25 bp, Homo sapien
gtgatgcaggtgagactgaaaggga

SEQ ID NO: 4196015 - DNA, 25 bp, Homo sapien
ggctcagaaaagatgaggtgatgca

SEQ ID NO: 4196016 - DNA, 25 bp, Homo sapien
tcagaaaagatgaggtgatgcaggt

SEQ ID NO: 4196017 - DNA, 25 bp, Homo sapien
tgatgcaggtgagactgaaagggaa

SEQ ID NO: 4196018 - DNA, 25 bp, Homo sapien
agatttcagttgtctgcaagttgga

SEQ ID NO: 4196019 - DNA, 25 bp, Homo sapien
cagatttcagttgtctgcaagttgg

SEQ ID NO: 4196020 - DNA, 25 bp, Homo sapien
taggtcattatcaatttcatatcgg

SEQ ID NO: 4196021 - DNA, 25 bp, Homo sapien
aggtcattatcaatttcatatcgga

SEQ ID NO: 4196022 - DNA, 25 bp, Homo sapien
cactccagtaggtgtagaggccgtc

SEQ ID NO: 4196023 - DNA, 25 bp, Homo sapien
gaaagctcaacaaagtccaagggca

SEQ ID NO: 4196024 - DNA, 25 bp, Homo sapien
caatcattgtttctgagtgcacggg

SEQ ID NO: 4196025 - DNA, 25 bp, Homo sapien
tctggtagataacaattgggcctgg

SEQ ID NO: 4196026 - DNA, 25 bp, Homo sapien
tccatctcaaaagagtccacgtctt

SEQ ID NO: 4196027 - DNA, 25 bp, Homo sapien
ccatttgtacgttgttaggaggaga

SEQ ID NO: 4196028 - DNA, 25 bp, Homo sapien
cacgtcttctgctggacatgtccag

SEQ ID NO: 4196029 - DNA, 25 bp, Homo sapien
cattgcccaggaccattatcattga

SEQ ID NO: 4196030 - DNA, 25 bp, Homo sapien
gggcattggagctttaaggtcacac

SEQ ID NO: 4196031 - DNA, 25 bp, Homo sapien
aaacagagtatggttggtcagatgc

SEQ ID NO: 4196032 - DNA, 25 bp, Homo sapien
agaggtagcaaccactcggattctt

SEQ ID NO: 4196033 - DNA, 25 bp, Homo sapien
ccactcggattcttttcctcgaaca

SEQ ID NO: 4196034 - DNA, 25 bp, Homo sapien
catagtcaagagacatgcggatgtg

SEQ ID NO: 4196035 - DNA, 25 bp, Homo sapien
aggaaaaatccatagtcaagagaca

SEQ ID NO: 4196036 - DNA, 25 bp, Homo sapien
gcagatgagattagatggaaggaaa

SEQ ID NO: 4196037 - DNA, 25 bp, Homo sapien
aaatccatagtcaagagacatgcgg

SEQ ID NO: 4196038 - DNA, 25 bp, Homo sapien
aaatatttatggagtgaggtcgaga

SEQ ID NO: 4196039 - DNA, 25 bp, Homo sapien
gtttcttcactactgtggtctggca

SEQ ID NO: 4196040 - DNA, 25 bp, Homo sapien
tttatggagtgaggtcgagacccag

SEQ ID NO: 4196041 - DNA, 25 bp, Homo sapien
gggtttcttcactactgtggtctgg

SEQ ID NO: 4196042 - DNA, 25 bp, Homo sapien
gaaatgatagtctttcatctctgtg

SEQ ID NO: 4196043 - DNA, 25 bp, Homo sapien
tgggggaaatgatagtctttcatct

SEQ ID NO: 4196044 - DNA, 25 bp, Homo sapien
gggaaatgatagtctttcatctctg

SEQ ID NO: 4196045 - DNA, 25 bp, Homo sapien
gggggaaatgatagtctttcatctc

SEQ ID NO: 4196046 - DNA, 25 bp, Homo sapien
cggttcttcccatgtccatctggtg

SEQ ID NO: 4196047 - DNA, 25 bp, Homo sapien
ccacttagctcggttcttcccatgt

SEQ ID NO: 4196048 - DNA, 25 bp, Homo sapien
gcaggccccacttagctcggttctt

SEQ ID NO: 4196049 - DNA, 25 bp, Homo sapien
ttcagcaggccccacttagctcggt

SEQ ID NO: 4196050 - DNA, 25 bp, Homo sapien
catttgtctacaacctccttgaaga

SEQ ID NO: 4196051 - DNA, 25 bp, Homo sapien
gaagaatgtggtgagaaaaatatac

SEQ ID NO: 4196052 - DNA, 25 bp, Homo sapien
tatatgtctactttgtgatgagtct

SEQ ID NO: 4196053 - DNA, 25 bp, Homo sapien
tcttacaagattcctgttggaaagc

SEQ ID NO: 4196054 - DNA, 25 bp, Homo sapien
aattcccttacattttcgtgatgtc

SEQ ID NO: 4196055 - DNA, 25 bp, Homo sapien
ctggcatgcctacgtttctttctct

SEQ ID NO: 4196056 - DNA, 25 bp, Homo sapien
tggcatgcctacgtttctttctctg

SEQ ID NO: 4196057 - DNA, 25 bp, Homo sapien
attttcgtgatgtctgggatgttcc

SEQ ID NO: 4196058 - DNA, 25 bp, Homo sapien
tccaccccagtaggaagattctcat

SEQ ID NO: 4196059 - DNA, 25 bp, Homo sapien
tagttgggaaccaatcctttgagaa

SEQ ID NO: 4196060 - DNA, 25 bp, Homo sapien
gctgagaaggaagactttgtttctg

SEQ ID NO: 4196061 - DNA, 25 bp, Homo sapien
ttccccatccactgttcctgagagc

SEQ ID NO: 4196062 - DNA, 25 bp, Homo sapien
tggagatgatgacagccttcccaag

SEQ ID NO: 4196063 - DNA, 25 bp, Homo sapien
tgatgacagccttcccaaggctgcc

SEQ ID NO: 4196064 - DNA, 25 bp, Homo sapien
gagatgatgacagccttcccaaggc

SEQ ID NO: 4196065 - DNA, 25 bp, Homo sapien
gatgatgacagccttcccaaggctg

SEQ ID NO: 4196066 - DNA, 25 bp, Homo sapien
acatagcctgttgctgtctccagga

SEQ ID NO: 4196067 - DNA, 25 bp, Homo sapien
aggatcccatgcacgttccaggcct

SEQ ID NO: 4196068 - DNA, 25 bp, Homo sapien
atagcctgttgctgtctccaggatc

SEQ ID NO: 4196069 - DNA, 25 bp, Homo sapien
ccaggatcccatgcacgttccaggc

SEQ ID NO: 4196070 - DNA, 25 bp, Homo sapien
cagagcaaggtcaacggtcttccct

SEQ ID NO: 4196071 - DNA, 25 bp, Homo sapien
tttttgggagataggtcagaagccc

SEQ ID NO: 4196072 - DNA, 25 bp, Homo sapien
cacgctttgtaccagaggcctgcta

SEQ ID NO: 4196073 - DNA, 25 bp, Homo sapien
cataagcagggtgtgctgtccatcc

SEQ ID NO: 4196074 - DNA, 25 bp, Homo sapien
tggattcggtgaggcgtaaagaccc

SEQ ID NO: 4196075 - DNA, 25 bp, Homo sapien
tctctactgctgcaggactggttgt

SEQ ID NO: 4196076 - DNA, 25 bp, Homo sapien
tgctcagctcctttcccgacatctg

SEQ ID NO: 4196077 - DNA, 25 bp, Homo sapien
ctttcccgacatctgcaacttgcat

SEQ ID NO: 4196078 - DNA, 25 bp, Homo sapien
gtgagtctacttctggatgtgaaac

SEQ ID NO: 4196079 - DNA, 25 bp, Homo sapien
gtgagcattgacagtcagcctctgt

SEQ ID NO: 4196080 - DNA, 25 bp, Homo sapien
cccagctgtgagtctacttctggat

SEQ ID NO: 4196081 - DNA, 25 bp, Homo sapien
aggatgcagtgagcattgacagtca

SEQ ID NO: 4196082 - DNA, 25 bp, Homo sapien
agatcttgtaacgtggtcctgtcag

SEQ ID NO: 4196083 - DNA, 25 bp, Homo sapien
caatcacaggcttcaaacatgctct

SEQ ID NO: 4196084 - DNA, 25 bp, Homo sapien
gttcaggcagatcttgtaacgtggt

SEQ ID NO: 4196085 - DNA, 25 bp, Homo sapien
taacgtggtcctgtcagctacaatg

SEQ ID NO: 4196086 - DNA, 25 bp, Homo sapien
catagtgagaggctaaagtttggtc

SEQ ID NO: 4196087 - DNA, 25 bp, Homo sapien
taaaaaagcaagacccatccctatg

SEQ ID NO: 4196088 - DNA, 25 bp, Homo sapien
taaaagcagttatagctaacaagcc

SEQ ID NO: 4196089 - DNA, 25 bp, Homo sapien
tgaacatttgcctaaaacacctgct

SEQ ID NO: 4196090 - DNA, 25 bp, Homo sapien
agtctggagtttaggcatgaggtca

SEQ ID NO: 4196091 - DNA, 25 bp, Homo sapien
gattcctagtaggtttccaagtaga

SEQ ID NO: 4196092 - DNA, 25 bp, Homo sapien
caagattaggagctgattttgaacc

SEQ ID NO: 4196093 - DNA, 25 bp, Homo sapien
gagcaggcagttagacatgtgagtc

SEQ ID NO: 4196094 - DNA, 25 bp, Homo sapien
gaaagaaccagagacctgtgtctga

SEQ ID NO: 4196095 - DNA, 25 bp, Homo sapien
ctctggtctggcgtagaaagaacca

SEQ ID NO: 4196096 - DNA, 25 bp, Homo sapien
tcaaaatcaacacgaagaccatggc

SEQ ID NO: 4196097 - DNA, 25 bp, Homo sapien
gcaaagtcaaaatcaacacgaagac

SEQ ID NO: 4196098 - DNA, 25 bp, Homo sapien
gaataaagtatgtgctcctcagata

SEQ ID NO: 4196099 - DNA, 25 bp, Homo sapien
tcaatctggtgcctcgatgcaggga

SEQ ID NO: 4196100 - DNA, 25 bp, Homo sapien
ctcagatagggccagggcaacggac

SEQ ID NO: 4196101 - DNA, 25 bp, Homo sapien
tataaatcatagaggcatatcccat

SEQ ID NO: 4196102 - DNA, 25 bp, Homo sapien
ctgcccaacccggcttttcagctct

SEQ ID NO: 4196103 - DNA, 25 bp, Homo sapien
cccaacccggcttttcagctctgcc

SEQ ID NO: 4196104 - DNA, 25 bp, Homo sapien
taggatatgtcatttatgcacttca

SEQ ID NO: 4196105 - DNA, 25 bp, Homo sapien
actttgttgcaaataggatatgtca

SEQ ID NO: 4196106 - DNA, 25 bp, Homo sapien
cagcttccttctttgctttcagcgc

SEQ ID NO: 4196107 - DNA, 25 bp, Homo sapien
gcagcagcagcttccttctttgctt

SEQ ID NO: 4196108 - DNA, 25 bp, Homo sapien
caaagcctttgttttggcttctcct

SEQ ID NO: 4196109 - DNA, 25 bp, Homo sapien
gttttggcttctcctttaggagcag

SEQ ID NO: 4196110 - DNA, 25 bp, Homo sapien
gtgcagatcttttttttgtggctgt

SEQ ID NO: 4196111 - DNA, 25 bp, Homo sapien
tgtggctgtggacacctttcaacac

SEQ ID NO: 4196112 - DNA, 25 bp, Homo sapien
tttttgtggctgtggacacctttca

SEQ ID NO: 4196113 - DNA, 25 bp, Homo sapien
tttgtggctgtggacacctttcaac

SEQ ID NO: 4196114 - DNA, 25 bp, Homo sapien
ggagtcacagtgtctagggccgctg

SEQ ID NO: 4196115 - DNA, 25 bp, Homo sapien
ctagggccgctggaaggtgggtgac

SEQ ID NO: 4196116 - DNA, 25 bp, Homo sapien
ctccggagtcacagtgtctagggcc

SEQ ID NO: 4196117 - DNA, 25 bp, Homo sapien
tccggagtcacagtgtctagggccg

SEQ ID NO: 4196118 - DNA, 25 bp, Homo sapien
gaatcttgacggcatagtggtcaag

SEQ ID NO: 4196119 - DNA, 25 bp, Homo sapien
ttttgttggcaacatggcaacatcc

SEQ ID NO: 4196120 - DNA, 25 bp, Homo sapien
tttgttggcaacatggcaacatcca

SEQ ID NO: 4196121 - DNA, 25 bp, Homo sapien
gttggcaacatggcaacatccaaag

SEQ ID NO: 4196122 - DNA, 25 bp, Homo sapien
tgttggcaacatggcaacatccaaa

SEQ ID NO: 4196123 - DNA, 25 bp, Homo sapien
cagtcatcctttgctttgcagttgc

SEQ ID NO: 4196124 - DNA, 25 bp, Homo sapien
agccagtcatcctttgctttgcagt

SEQ ID NO: 4196125 - DNA, 25 bp, Homo sapien
tcttcaagccagtcatcctttgctt

SEQ ID NO: 4196126 - DNA, 25 bp, Homo sapien
ttcttctccaggttctttccttggc

SEQ ID NO: 4196127 - DNA, 25 bp, Homo sapien
tttttagggtatttgtgcagttcca

SEQ ID NO: 4196128 - DNA, 25 bp, Homo sapien
tgcagttccaggttaaatacggagg

SEQ ID NO: 4196129 - DNA, 25 bp, Homo sapien
tcggactactagtgttctgctgctg

SEQ ID NO: 4196130 - DNA, 25 bp, Homo sapien
gataatgacctgacatacctggatt

SEQ ID NO: 4196131 - DNA, 25 bp, Homo sapien
cacttttacttggtccacaacacac

SEQ ID NO: 4196132 - DNA, 25 bp, Homo sapien
ccaaacagaggtggtcatcactttt

SEQ ID NO: 4196133 - DNA, 25 bp, Homo sapien
aggcaaccctctatccccaagtgtt

SEQ ID NO: 4196134 - DNA, 25 bp, Homo sapien
aaacagaggtggtcatcacttttac

SEQ ID NO: 4196135 - DNA, 25 bp, Homo sapien
cagaccactgagctggccaagaagt

SEQ ID NO: 4196136 - DNA, 25 bp, Homo sapien
tggccaagaagtaaggaacctgact

SEQ ID NO: 4196137 - DNA, 25 bp, Homo sapien
aacctgacttcctgagaggcctgac

SEQ ID NO: 4196138 - DNA, 25 bp, Homo sapien
ctgagctggccaagaagtaaggaac

SEQ ID NO: 4196139 - DNA, 25 bp, Homo sapien
tgcaggccttaatgatatagagttg

SEQ ID NO: 4196140 - DNA, 25 bp, Homo sapien
gagcctgcaggccttaatgatatag

SEQ ID NO: 4196141 - DNA, 25 bp, Homo sapien
ctcatcagtggagacctgagcctgc

SEQ ID NO: 4196142 - DNA, 25 bp, Homo sapien
gctcatcagtggagacctgagcctg

SEQ ID NO: 4196143 - DNA, 25 bp, Homo sapien
ttcaccagaggctgaaagcgacgca

SEQ ID NO: 4196144 - DNA, 25 bp, Homo sapien
gcttcggtcccggactggagacgca

SEQ ID NO: 4196145 - DNA, 25 bp, Homo sapien
cgcagcgcgacggagagtgggcggg

SEQ ID NO: 4196146 - DNA, 25 bp, Homo sapien
gctgcagaaagcaaccggcacagcc

SEQ ID NO: 4196147 - DNA, 25 bp, Homo sapien
ccggcaaacagatgcaccagcgtgt

SEQ ID NO: 4196148 - DNA, 25 bp, Homo sapien
gcaccagcgtgtccctctggctcat

SEQ ID NO: 4196149 - DNA, 25 bp, Homo sapien
cggcaaacagatgcaccagcgtgtc

SEQ ID NO: 4196150 - DNA, 25 bp, Homo sapien
cctccggcaaacagatgcaccagcg

SEQ ID NO: 4196151 - DNA, 25 bp, Homo sapien
ttgcaaagccgagcccggaaatgag

SEQ ID NO: 4196152 - DNA, 25 bp, Homo sapien
ttgggccatgcaacctacgcgaaat

SEQ ID NO: 4196153 - DNA, 25 bp, Homo sapien
atccccgacgcctgctagattgcgg

SEQ ID NO: 4196154 - DNA, 25 bp, Homo sapien
gctaaaggagtctccggcgcccatt

SEQ ID NO: 4196155 - DNA, 25 bp, Homo sapien
gcagcagaaaagcaagcggtgttca

SEQ ID NO: 4196156 - DNA, 25 bp, Homo sapien
caaggcaccgtgaatagaactgcgt

SEQ ID NO: 4196157 - DNA, 25 bp, Homo sapien
gagtctcagcataattcaccgaagg

SEQ ID NO: 4196158 - DNA, 25 bp, Homo sapien
gaaggagcaaatctaaacaggaggc

SEQ ID NO: 4196159 - DNA, 25 bp, Homo sapien
tgatacatgaatcctgaacgcagaa

SEQ ID NO: 4196160 - DNA, 25 bp, Homo sapien
aatgatgatcctaatccaaagtggg

SEQ ID NO: 4196161 - DNA, 25 bp, Homo sapien
ccaaagtgggaaattagtgcaatca

SEQ ID NO: 4196162 - DNA, 25 bp, Homo sapien
tagatctaattacaagagggagctc

SEQ ID NO: 4196163 - DNA, 25 bp, Homo sapien
caaactctgaatattaactctggca

SEQ ID NO: 4196164 - DNA, 25 bp, Homo sapien
tgtttaacaatacagctactaggct

SEQ ID NO: 4196165 - DNA, 25 bp, Homo sapien
ttacaggctgtcatgatatcgttcc

SEQ ID NO: 4196166 - DNA, 25 bp, Homo sapien
cataatgggatcaaagggtgtctta

SEQ ID NO: 4196167 - DNA, 25 bp, Homo sapien
gattagtacctttataagacaccag

SEQ ID NO: 4196168 - DNA, 25 bp, Homo sapien
tctattagtaagaagaacggaatgc

SEQ ID NO: 4196169 - DNA, 25 bp, Homo sapien
tgagaatattctccaacaggataag

SEQ ID NO: 4196170 - DNA, 25 bp, Homo sapien
tattaggaggtagacgctttcaagg

SEQ ID NO: 4196171 - DNA, 25 bp, Homo sapien
tcaagaaggagaatccctgacccac

SEQ ID NO: 4196172 - DNA, 25 bp, Homo sapien
gtctcaagaaggagaatccctgacc

SEQ ID NO: 4196173 - DNA, 25 bp, Homo sapien
ctcaagaaggagaatccctgaccca

SEQ ID NO: 4196174 - DNA, 25 bp, Homo sapien
tctcaagaaggagaatccctgaccc

SEQ ID NO: 4196175 - DNA, 25 bp, Homo sapien
ttagtgtttagacaagaagcaatac

SEQ ID NO: 4196176 - DNA, 25 bp, Homo sapien
aagctttagtgtttagacaagaagc

SEQ ID NO: 4196177 - DNA, 25 bp, Homo sapien
ctttagtgtttagacaagaagcaat

SEQ ID NO: 4196178 - DNA, 25 bp, Homo sapien
gctttagtgtttagacaagaagcaa

SEQ ID NO: 4196179 - DNA, 25 bp, Homo sapien
tatctcacttgtaggtactgaccca

SEQ ID NO: 4196180 - DNA, 25 bp, Homo sapien
tactctgaaagaaactgctaacaca

SEQ ID NO: 4196181 - DNA, 25 bp, Homo sapien
cagccaaccgctgaactggaaatct

SEQ ID NO: 4196182 - DNA, 25 bp, Homo sapien
tacctgcaaaagtgcttacagtcag

SEQ ID NO: 4196183 - DNA, 25 bp, Homo sapien
catgtcagaatagctcccactgtac

SEQ ID NO: 4196184 - DNA, 25 bp, Homo sapien
acaacttccagtggacatgtcagaa

SEQ ID NO: 4196185 - DNA, 25 bp, Homo sapien
aaagcgtcacagaagatgactgcag

SEQ ID NO: 4196186 - DNA, 25 bp, Homo sapien
gacactactcggttgacactggctc

SEQ ID NO: 4196187 - DNA, 25 bp, Homo sapien
ggcagacacgaaggcattccattat

SEQ ID NO: 4196188 - DNA, 25 bp, Homo sapien
taaaaaacactcctgaatactatgc

SEQ ID NO: 4196189 - DNA, 25 bp, Homo sapien
tacacgaaaggagttagcattaaac

SEQ ID NO: 4196190 - DNA, 25 bp, Homo sapien
catctggaactcactaacgcaaaca

SEQ ID NO: 4196191 - DNA, 25 bp, Homo sapien
taatttaaggcctgaactgagtagc

SEQ ID NO: 4196192 - DNA, 25 bp, Homo sapien
tctcagatatgaagcccaacgttgg

SEQ ID NO: 4196193 - DNA, 25 bp, Homo sapien
taattcagagttaacagactaggcc

SEQ ID NO: 4196194 - DNA, 25 bp, Homo sapien
tagatacatatatgcccagcagaga

SEQ ID NO: 4196195 - DNA, 25 bp, Homo sapien
cactaaattggggcctagtcctcta

SEQ ID NO: 4196196 - DNA, 25 bp, Homo sapien
ccactaaattggggcctagtcctct

SEQ ID NO: 4196197 - DNA, 25 bp, Homo sapien
tggggcctagtcctctaaacaagga

SEQ ID NO: 4196198 - DNA, 25 bp, Homo sapien
attggggcctagtcctctaaacaag

SEQ ID NO: 4196199 - DNA, 25 bp, Homo sapien
tacatggtttggatacagaaagcat

SEQ ID NO: 4196200 - DNA, 25 bp, Homo sapien
ttttggcttaatagggactgcaacc

SEQ ID NO: 4196201 - DNA, 25 bp, Homo sapien
tggtcctttgcacctacacatggtg

SEQ ID NO: 4196202 - DNA, 25 bp, Homo sapien
taacaagacatggatctggtacatg

SEQ ID NO: 4196203 - DNA, 25 bp, Homo sapien
ccggagtgcagtggccctatattgg

SEQ ID NO: 4196204 - DNA, 25 bp, Homo sapien
gccggagtgcagtggccctatattg

SEQ ID NO: 4196205 - DNA, 25 bp, Homo sapien
ggccggagtgcagtggccctatatt

SEQ ID NO: 4196206 - DNA, 25 bp, Homo sapien
taaaaaccataaagtcctagccaca

SEQ ID NO: 4196207 - DNA, 25 bp, Homo sapien
tatcaataagcatgttcttaatgcg

SEQ ID NO: 4196208 - DNA, 25 bp, Homo sapien
tccaatactctgacagccacttaac

SEQ ID NO: 4196209 - DNA, 25 bp, Homo sapien
agccacttaactcactaaaacttgg

SEQ ID NO: 4196210 - DNA, 25 bp, Homo sapien
tcatatgtacttgggtagaatcagg

SEQ ID NO: 4196211 - DNA, 25 bp, Homo sapien
tgtacttgggtagaatcaggatcaa

SEQ ID NO: 4196212 - DNA, 25 bp, Homo sapien
aaatcatatgtacttgggtagaatc

SEQ ID NO: 4196213 - DNA, 25 bp, Homo sapien
cagctgaaatcatatgtacttgggt

SEQ ID NO: 4196214 - DNA, 25 bp, Homo sapien
tgtaccctagcatgtaaactcctga

SEQ ID NO: 4196215 - DNA, 25 bp, Homo sapien
tccatgggtaagctaagagaggttc

SEQ ID NO: 4196216 - DNA, 25 bp, Homo sapien
tagaccacttgactcattccatggg

SEQ ID NO: 4196217 - DNA, 25 bp, Homo sapien
tagcagcaaatgattccagaaccag

SEQ ID NO: 4196218 - DNA, 25 bp, Homo sapien
tagtctgtcaaaggtcatgtgtagg

SEQ ID NO: 4196219 - DNA, 25 bp, Homo sapien
aaacagataccctcaatagctgaga

SEQ ID NO: 4196220 - DNA, 25 bp, Homo sapien
tctgtgcctaggtgtatacaaagga

SEQ ID NO: 4196221 - DNA, 25 bp, Homo sapien
tatgctgtgagcaaataaaacccac

SEQ ID NO: 4196222 - DNA, 25 bp, Homo sapien
gcactatggccagtaatattgcaca

SEQ ID NO: 4196223 - DNA, 25 bp, Homo sapien
aatattgcacatccatacttatgaa

SEQ ID NO: 4196224 - DNA, 25 bp, Homo sapien
ctttcaccttttgcactatggccag

SEQ ID NO: 4196225 - DNA, 25 bp, Homo sapien
tgcacatccatacttatgaaatatt

SEQ ID NO: 4196226 - DNA, 25 bp, Homo sapien
tacctaaaagaagatcaattctgcc

SEQ ID NO: 4196227 - DNA, 25 bp, Homo sapien
tgctaaccttgtcaaaagggaatat

SEQ ID NO: 4196228 - DNA, 25 bp, Homo sapien
tgtaccgagtactgaaaatcctgcc

SEQ ID NO: 4196229 - DNA, 25 bp, Homo sapien
gaaacatgtgtacaaattgaatcct

SEQ ID NO: 4196230 - DNA, 25 bp, Homo sapien
ggagcatgagatgacacgatctcac

SEQ ID NO: 4196231 - DNA, 25 bp, Homo sapien
agcatgagatgacacgatctcactc

SEQ ID NO: 4196232 - DNA, 25 bp, Homo sapien
gggagcatgagatgacacgatctca

SEQ ID NO: 4196233 - DNA, 25 bp, Homo sapien
atggggagcatgagatgacacgatc

SEQ ID NO: 4196234 - DNA, 25 bp, Homo sapien
tagtccatatttctacaggaagtga

SEQ ID NO: 4196235 - DNA, 25 bp, Homo sapien
agtccatatttctacaggaagtgac

SEQ ID NO: 4196236 - DNA, 25 bp, Homo sapien
ttagtccatatttctacaggaagtg

SEQ ID NO: 4196237 - DNA, 25 bp, Homo sapien
tttgaaaagaagatgagcacctaag

SEQ ID NO: 4196238 - DNA, 25 bp, Homo sapien
cataaattttaagcagtacccaagc

SEQ ID NO: 4196239 - DNA, 25 bp, Homo sapien
aagacactaacctaaatgccagcaa

SEQ ID NO: 4196240 - DNA, 25 bp, Homo sapien
ctatgtttactatggttgctctggc

SEQ ID NO: 4196241 - DNA, 25 bp, Homo sapien
tggtggtcacctaagatggctcatt

SEQ ID NO: 4196242 - DNA, 25 bp, Homo sapien
tcaaatactagtgggtcaggcacat

SEQ ID NO: 4196243 - DNA, 25 bp, Homo sapien
caacagttttagacgcatcagcagg

SEQ ID NO: 4196244 - DNA, 25 bp, Homo sapien
tttaaagtgttgagcaggctgccag

SEQ ID NO: 4196245 - DNA, 25 bp, Homo sapien
gcatcaagctgtaaccgagtcttta

SEQ ID NO: 4196246 - DNA, 25 bp, Homo sapien
accgagtctttataagccaaatggg

SEQ ID NO: 4196247 - DNA, 25 bp, Homo sapien
cttgcatcaagctgtaaccgagtct

SEQ ID NO: 4196248 - DNA, 25 bp, Homo sapien
gctgtaaccgagtctttataagcca

SEQ ID NO: 4196249 - DNA, 25 bp, Homo sapien
cagcactgcttttggcctactctca

SEQ ID NO: 4196250 - DNA, 25 bp, Homo sapien
tctgaggtttgcaccgattggttcc

SEQ ID NO: 4196251 - DNA, 25 bp, Homo sapien
gattggttcctcagcttaaaatggg

SEQ ID NO: 4196252 - DNA, 25 bp, Homo sapien
gagtctctattctaaagccagtagg

SEQ ID NO: 4196253 - DNA, 25 bp, Homo sapien
ttatagagattaagtcttgcaatgt

SEQ ID NO: 4196254 - DNA, 25 bp, Homo sapien
ccaaccccacaagcctaagaattgt

SEQ ID NO: 4196255 - DNA, 25 bp, Homo sapien
gaatcctcaagtcaacctttcatta

SEQ ID NO: 4196256 - DNA, 25 bp, Homo sapien
tcagccttataaaccagaatcctca

SEQ ID NO: 4196257 - DNA, 25 bp, Homo sapien
ataaaatcacaactacaacacccac

SEQ ID NO: 4196258 - DNA, 25 bp, Homo sapien
ttaattacctacagattccaccagt

SEQ ID NO: 4196259 - DNA, 25 bp, Homo sapien
ttatgaatggattgtctttagatat

SEQ ID NO: 4196260 - DNA, 25 bp, Homo sapien
caacacccacttaattacctacaga

SEQ ID NO: 4196261 - DNA, 25 bp, Homo sapien
ccctggtgactagtaaatgagaaac

SEQ ID NO: 4196262 - DNA, 25 bp, Homo sapien
tctcccaagaagtgatagggtgaat

SEQ ID NO: 4196263 - DNA, 25 bp, Homo sapien
ccctatgatcatttaaaggcaatgg

SEQ ID NO: 4196264 - DNA, 25 bp, Homo sapien
aaggcaatggtcatatcagtctccc

SEQ ID NO: 4196265 - DNA, 25 bp, Homo sapien
agcagctagcatcattcccacaaaa

SEQ ID NO: 4196266 - DNA, 25 bp, Homo sapien
cacaagtttttgaggtggcagcagc

SEQ ID NO: 4196267 - DNA, 25 bp, Homo sapien
catgtggatatgctatagttgtggc

SEQ ID NO: 4196268 - DNA, 25 bp, Homo sapien
taccagcatatgaagcagacatgcc

SEQ ID NO: 4196269 - DNA, 25 bp, Homo sapien
gagttgtcagaccacgataaagaga

SEQ ID NO: 4196270 - DNA, 25 bp, Homo sapien
taggtggccatcataatggctgtgt

SEQ ID NO: 4196271 - DNA, 25 bp, Homo sapien
cttgaacaagcaaagatagagtctg

SEQ ID NO: 4196272 - DNA, 25 bp, Homo sapien
tatccattgagtaggtaaaccacca

SEQ ID NO: 4196273 - DNA, 25 bp, Homo sapien
gatttaccacgcaggaaactaggac

SEQ ID NO: 4196274 - DNA, 25 bp, Homo sapien
tatgggtcttcacaaggcaaatggc

SEQ ID NO: 4196275 - DNA, 25 bp, Homo sapien
tacaaattcactgtggtggacccat

SEQ ID NO: 4196276 - DNA, 25 bp, Homo sapien
tattaggcagtagaaatggcacctg

SEQ ID NO: 4196277 - DNA, 25 bp, Homo sapien
ttttaatatcaactttcacaaaggc

SEQ ID NO: 4196278 - DNA, 25 bp, Homo sapien
taaaagtcaataaacctgtggaaga

SEQ ID NO: 4196279 - DNA, 25 bp, Homo sapien
tatgagggagttggattacttgacc

SEQ ID NO: 4196280 - DNA, 25 bp, Homo sapien
catttggttattctaacaagttctc

SEQ ID NO: 4196281 - DNA, 25 bp, Homo sapien
taaccattattttgccagtgccttc

SEQ ID NO: 4196282 - DNA, 25 bp, Homo sapien
tacatattaaggcagtcagctggtc

SEQ ID NO: 4196283 - DNA, 25 bp, Homo sapien
cacggctcccaatgttcagtaataa

SEQ ID NO: 4196284 - DNA, 25 bp, Homo sapien
tcagctggtctacacagtgcgaaaa

SEQ ID NO: 4196285 - DNA, 25 bp, Homo sapien
cctcaagtgcaggaatcatattccc

SEQ ID NO: 4196286 - DNA, 25 bp, Homo sapien
gtgcaggaatcatattcccagtcat

SEQ ID NO: 4196287 - DNA, 25 bp, Homo sapien
ttaacctcaagtgcaggaatcatat

SEQ ID NO: 4196288 - DNA, 25 bp, Homo sapien
caagtgcaggaatcatattcccagt

SEQ ID NO: 4196289 - DNA, 25 bp, Homo sapien
ttccttgtggccagctgtactttga

SEQ ID NO: 4196290 - DNA, 25 bp, Homo sapien
tgtactttgaatcttcatcccctcc

SEQ ID NO: 4196291 - DNA, 25 bp, Homo sapien
cttcttctctatggcagggagatcc

SEQ ID NO: 4196292 - DNA, 25 bp, Homo sapien
ccttccttgtggccagctgtacttt

SEQ ID NO: 4196293 - DNA, 25 bp, Homo sapien
gagggatggacggtgtctagggtct

SEQ ID NO: 4196294 - DNA, 25 bp, Homo sapien
tgggtggagactgtatcaagagctt

SEQ ID NO: 4196295 - DNA, 25 bp, Homo sapien
cctgtgctatgagcagagggggtat

SEQ ID NO: 4196296 - DNA, 25 bp, Homo sapien
acggtgtctagggtcttgggtggag

SEQ ID NO: 4196297 - DNA, 25 bp, Homo sapien
tgtgctcccagaattgactttaggt

SEQ ID NO: 4196298 - DNA, 25 bp, Homo sapien
ctgtgctcccagaattgactttagg

SEQ ID NO: 4196299 - DNA, 25 bp, Homo sapien
tgctcccagaattgactttaggtcc

SEQ ID NO: 4196300 - DNA, 25 bp, Homo sapien
ctcccagaattgactttaggtccat

SEQ ID NO: 4196301 - DNA, 25 bp, Homo sapien
ccgcctcattgggagcctgaactga

SEQ ID NO: 4196302 - DNA, 25 bp, Homo sapien
cagcgctgatggtgggccgcctcat

SEQ ID NO: 4196303 - DNA, 25 bp, Homo sapien
aaaacagaagcctcgagggtgcttc

SEQ ID NO: 4196304 - DNA, 25 bp, Homo sapien
agcctgaactgagcgatggggtaaa

SEQ ID NO: 4196305 - DNA, 25 bp, Homo sapien
tgctcaaggagcgttccccgcccac

SEQ ID NO: 4196306 - DNA, 25 bp, Homo sapien
cgaggcgcaggaagtcggtctcttt

SEQ ID NO: 4196307 - DNA, 25 bp, Homo sapien
ccacccgaggcgcaggaagtcggtc

SEQ ID NO: 4196308 - DNA, 25 bp, Homo sapien
caggaagtcggtctctttgctctac

SEQ ID NO: 4196309 - DNA, 25 bp, Homo sapien
cccgcgccccggccgtcccagctcg

SEQ ID NO: 4196310 - DNA, 25 bp, Homo sapien
cccggccgtcccagctcgggccgct

SEQ ID NO: 4196311 - DNA, 25 bp, Homo sapien
cgcgccccggccgtcccagctcggg

SEQ ID NO: 4196312 - DNA, 25 bp, Homo sapien
catcccgcgccccggccgtcccagc

SEQ ID NO: 4196313 - DNA, 25 bp, Homo sapien
ccgggatgtggtgtgttcatcgccc

SEQ ID NO: 4196314 - DNA, 25 bp, Homo sapien
ctgagcgcacgcagcggtagcagca

SEQ ID NO: 4196315 - DNA, 25 bp, Homo sapien
actaatccaatagccgcggaaggcg

SEQ ID NO: 4196316 - DNA, 25 bp, Homo sapien
gctgcagctgaaagccgatctggct

SEQ ID NO: 4196317 - DNA, 25 bp, Homo sapien
agcgccttactgaagcgatcctggg

SEQ ID NO: 4196318 - DNA, 25 bp, Homo sapien
gggaagcgccttactgaagcgatcc

SEQ ID NO: 4196319 - DNA, 25 bp, Homo sapien
ctctagccgcttggaagcttggcgc

SEQ ID NO: 4196320 - DNA, 25 bp, Homo sapien
aaggcccgcgctctagccgcttgga

SEQ ID NO: 4196321 - DNA, 25 bp, Homo sapien
taaaagagagggcaagcgcctgttc

SEQ ID NO: 4196322 - DNA, 25 bp, Homo sapien
atggcctggagttaggagcgttctt

SEQ ID NO: 4196323 - DNA, 25 bp, Homo sapien
agtgacccgcaaatgccggctctct

SEQ ID NO: 4196324 - DNA, 25 bp, Homo sapien
ttcgggaagaatccccagcgctggc

SEQ ID NO: 4196325 - DNA, 25 bp, Homo sapien
ccatctcgaactgccacaacctgca

SEQ ID NO: 4196326 - DNA, 25 bp, Homo sapien
attctcagggactgggacgtcagga

SEQ ID NO: 4196327 - DNA, 25 bp, Homo sapien
tcaaccatctcgaactgccacaacc

SEQ ID NO: 4196328 - DNA, 25 bp, Homo sapien
acaacctgcagagaggaattctcag

SEQ ID NO: 4196329 - DNA, 25 bp, Homo sapien
cccaagatgaaccttctccacttgg

SEQ ID NO: 4196330 - DNA, 25 bp, Homo sapien
ctcccaagatgaaccttctccactt

SEQ ID NO: 4196331 - DNA, 25 bp, Homo sapien
tcccaagatgaaccttctccacttg

SEQ ID NO: 4196332 - DNA, 25 bp, Homo sapien
cacttggtataactggttgtctgga

SEQ ID NO: 4196333 - DNA, 25 bp, Homo sapien
acagcaaggccacgtgcagtccggg

SEQ ID NO: 4196334 - DNA, 25 bp, Homo sapien
gcaaggccacgtgcagtccgggcca

SEQ ID NO: 4196335 - DNA, 25 bp, Homo sapien
gaggttgtttgcagggcagctggat

SEQ ID NO: 4196336 - DNA, 25 bp, Homo sapien
gtggaggttgtttgcagggcagctg

SEQ ID NO: 4196337 - DNA, 25 bp, Homo sapien
gatgcttaatgacattatccagaag

SEQ ID NO: 4196338 - DNA, 25 bp, Homo sapien
gggatgcttaatgacattatccaga

SEQ ID NO: 4196339 - DNA, 25 bp, Homo sapien
gcttaatgacattatccagaaggat

SEQ ID NO: 4196340 - DNA, 25 bp, Homo sapien
gatggggatgcttaatgacattatc

SEQ ID NO: 4196341 - DNA, 25 bp, Homo sapien
gctctcctttgcaatcatagtctca

SEQ ID NO: 4196342 - DNA, 25 bp, Homo sapien
ctgggtcattgagggcccagtgctc

SEQ ID NO: 4196343 - DNA, 25 bp, Homo sapien
tgcaatcatagtctcaaagtctctg

SEQ ID NO: 4196344 - DNA, 25 bp, Homo sapien
tctctgtccctactagaggcaggca

SEQ ID NO: 4196345 - DNA, 25 bp, Homo sapien
cacaaccatgccaactgtggagttg

SEQ ID NO: 4196346 - DNA, 25 bp, Homo sapien
gcacacaaccatgccaactgtggag

SEQ ID NO: 4196347 - DNA, 25 bp, Homo sapien
ccatgccaactgtggagttgctgtt

SEQ ID NO: 4196348 - DNA, 25 bp, Homo sapien
ttgcacacaaccatgccaactgtgg

SEQ ID NO: 4196349 - DNA, 25 bp, Homo sapien
cctccacatgtgtctcctgcaaaat

SEQ ID NO: 4196350 - DNA, 25 bp, Homo sapien
cacatgtgtctcctgcaaaatgctg

SEQ ID NO: 4196351 - DNA, 25 bp, Homo sapien
gtgtctcctgcaaaatgctgatcca

SEQ ID NO: 4196352 - DNA, 25 bp, Homo sapien
gctgatccaagaaggtttacctctt

SEQ ID NO: 4196353 - DNA, 25 bp, Homo sapien
gctggcattccctgaaggaaaaaac

SEQ ID NO: 4196354 - DNA, 25 bp, Homo sapien
tgggaacagggcatgtggtctggta

SEQ ID NO: 4196355 - DNA, 25 bp, Homo sapien
atgatcccttatcagaaaaaatggg

SEQ ID NO: 4196356 - DNA, 25 bp, Homo sapien
ggtagtgggagctgcctcctacacc

SEQ ID NO: 4196357 - DNA, 25 bp, Homo sapien
gcttccggacggtagacctccacag

SEQ ID NO: 4196358 - DNA, 25 bp, Homo sapien
ccccgtagccaggaatgggccacgg

SEQ ID NO: 4196359 - DNA, 25 bp, Homo sapien
tccactccccgtagccaggaatggg

SEQ ID NO: 4196360 - DNA, 25 bp, Homo sapien
caggcttccggacggtagacctcca

SEQ ID NO: 4196361 - DNA, 25 bp, Homo sapien
gggaggaggccgctgcaggccaccg

SEQ ID NO: 4196362 - DNA, 25 bp, Homo sapien
ttcactgcggggaggaggccgctgc

SEQ ID NO: 4196363 - DNA, 25 bp, Homo sapien
aggaggccgctgcaggccaccgcta

SEQ ID NO: 4196364 - DNA, 25 bp, Homo sapien
cttcactgcggggaggaggccgctg

SEQ ID NO: 4196365 - DNA, 25 bp, Homo sapien
gcttcttgcccttgagacctcggaa

SEQ ID NO: 4196366 - DNA, 25 bp, Homo sapien
cacgatgaagctgagtgtgccctca

SEQ ID NO: 4196367 - DNA, 25 bp, Homo sapien
tccttgacgaagacgttgagcgagc

SEQ ID NO: 4196368 - DNA, 25 bp, Homo sapien
tcaaggccgttgatgtagcgcatgg

SEQ ID NO: 4196369 - DNA, 25 bp, Homo sapien
attttgcttgagtaaaatcttgtcc

SEQ ID NO: 4196370 - DNA, 25 bp, Homo sapien
cttttctggagtgttactctcagtc

SEQ ID NO: 4196371 - DNA, 25 bp, Homo sapien
tggagtgttactctcagtccctcat

SEQ ID NO: 4196372 - DNA, 25 bp, Homo sapien
tgagtaaaatcttgtccttgacttc

SEQ ID NO: 4196373 - DNA, 25 bp, Homo sapien
gaggaaaagcctctattaaggccat

SEQ ID NO: 4196374 - DNA, 25 bp, Homo sapien
tttgctttaagccacaggtgaaccc

SEQ ID NO: 4196375 - DNA, 25 bp, Homo sapien
cttactttcatcatgttagaggaaa

SEQ ID NO: 4196376 - DNA, 25 bp, Homo sapien
ctttaagccacaggtgaaccccaga

SEQ ID NO: 4196377 - DNA, 25 bp, Homo sapien
tcagcaccgcaatcagaaattcagg

SEQ ID NO: 4196378 - DNA, 25 bp, Homo sapien
aagtcattcacgagccttcatcagg

SEQ ID NO: 4196379 - DNA, 25 bp, Homo sapien
tcatggacccatgcgactgctaaga

SEQ ID NO: 4196380 - DNA, 25 bp, Homo sapien
tcaggtgcgcaagatgagctcagca

SEQ ID NO: 4196381 - DNA, 25 bp, Homo sapien
ggaaaccgctcacagggaaggctaa

SEQ ID NO: 4196382 - DNA, 25 bp, Homo sapien
tcactattttcgcagaggtggacgc

SEQ ID NO: 4196383 - DNA, 25 bp, Homo sapien
tgtgaatgcatgtccaccaggcaag

SEQ ID NO: 4196384 - DNA, 25 bp, Homo sapien
gaataagacatgcagccggaaaccg

SEQ ID NO: 4196385 - DNA, 25 bp, Homo sapien
tcagcattttaagaaggtcaccagg

SEQ ID NO: 4196386 - DNA, 25 bp, Homo sapien
gcattttagcttggctgcgggatca

SEQ ID NO: 4196387 - DNA, 25 bp, Homo sapien
tacaggtgaggataccgaggaactg

SEQ ID NO: 4196388 - DNA, 25 bp, Homo sapien
gatcattcagcatggcgggtagatg

SEQ ID NO: 4196389 - DNA, 25 bp, Homo sapien
cctgtaaataaaggctgccgccagc

SEQ ID NO: 4196390 - DNA, 25 bp, Homo sapien
ggaatgcctcagacaagcagcctta

SEQ ID NO: 4196391 - DNA, 25 bp, Homo sapien
cattaagcggcacagcctttgcttg

SEQ ID NO: 4196392 - DNA, 25 bp, Homo sapien
cagccttattagtgtctgggcgagg

SEQ ID NO: 4196393 - DNA, 25 bp, Homo sapien
ttatagaaagcagccgctgagaagg

SEQ ID NO: 4196394 - DNA, 25 bp, Homo sapien
tattttccaagctcacgctgtctcg

SEQ ID NO: 4196395 - DNA, 25 bp, Homo sapien
gagcctgcacggcagtattttccaa

SEQ ID NO: 4196396 - DNA, 25 bp, Homo sapien
gggtcacgaagcagaactcacggct

SEQ ID NO: 4196397 - DNA, 25 bp, Homo sapien
tatgctttcttaaaaagcctggaat

SEQ ID NO: 4196398 - DNA, 25 bp, Homo sapien
ctctatgctttcttaaaaagcctgg

SEQ ID NO: 4196399 - DNA, 25 bp, Homo sapien
aactctatgctttcttaaaaagcct

SEQ ID NO: 4196400 - DNA, 25 bp, Homo sapien
tctatgctttcttaaaaagcctgga

SEQ ID NO: 4196401 - DNA, 25 bp, Homo sapien
tgaacatgctctccgcagtctcggc

SEQ ID NO: 4196402 - DNA, 25 bp, Homo sapien
gaataagtctgttctgcgccccagg

SEQ ID NO: 4196403 - DNA, 25 bp, Homo sapien
tattcattccgtagccatggtgctc

SEQ ID NO: 4196404 - DNA, 25 bp, Homo sapien
ggcagcgacccaaacaatacagagg

SEQ ID NO: 4196405 - DNA, 25 bp, Homo sapien
gacaggacacaaggggtccaggtcc

SEQ ID NO: 4196406 - DNA, 25 bp, Homo sapien
tttccagaatgttccgaggggacag

SEQ ID NO: 4196407 - DNA, 25 bp, Homo sapien
ttccagaatgttccgaggggacagg

SEQ ID NO: 4196408 - DNA, 25 bp, Homo sapien
aggctgcccctttgccactgggatt

SEQ ID NO: 4196409 - DNA, 25 bp, Homo sapien
cagaggctgcccctttgccactggg

SEQ ID NO: 4196410 - DNA, 25 bp, Homo sapien
tgtcttcagaggctgcccctttgcc

SEQ ID NO: 4196411 - DNA, 25 bp, Homo sapien
gctccaggccagtgtaggctgctgt

SEQ ID NO: 4196412 - DNA, 25 bp, Homo sapien
tgtgccttgaaagggcatgctaggt

SEQ ID NO: 4196413 - DNA, 25 bp, Homo sapien
catgctaggtctgcaaatggagcca

SEQ ID NO: 4196414 - DNA, 25 bp, Homo sapien
cccagggttcactgttatcagctcc

SEQ ID NO: 4196415 - DNA, 25 bp, Homo sapien
tcagctcctgctttagaattaattg

SEQ ID NO: 4196416 - DNA, 25 bp, Homo sapien
ctgagttgaaggcattgttgaaaca

SEQ ID NO: 4196417 - DNA, 25 bp, Homo sapien
tgaaacatgtcttcaccaatactgt

SEQ ID NO: 4196418 - DNA, 25 bp, Homo sapien
gagttgaaggcattgttgaaacatg

SEQ ID NO: 4196419 - DNA, 25 bp, Homo sapien
tgtcttcaccaatactgtccttgcc

SEQ ID NO: 4196420 - DNA, 25 bp, Homo sapien
gctttttgatggaaggcccttgttg

SEQ ID NO: 4196421 - DNA, 25 bp, Homo sapien
gaaggccgctttttgatggaaggcc

SEQ ID NO: 4196422 - DNA, 25 bp, Homo sapien
gccgctttttgatggaaggcccttg

SEQ ID NO: 4196423 - DNA, 25 bp, Homo sapien
aggccgctttttgatggaaggccct

SEQ ID NO: 4196424 - DNA, 25 bp, Homo sapien
aagaagcatccgctgtggaccaaat

SEQ ID NO: 4196425 - DNA, 25 bp, Homo sapien
atccgctgtggaccaaatatcccca

SEQ ID NO: 4196426 - DNA, 25 bp, Homo sapien
aagcatccgctgtggaccaaatatc

SEQ ID NO: 4196427 - DNA, 25 bp, Homo sapien
tgaaagaagcatccgctgtggacca

SEQ ID NO: 4196428 - DNA, 25 bp, Homo sapien
ttgaggccagaagtggtccgtccat

SEQ ID NO: 4196429 - DNA, 25 bp, Homo sapien
ctggccactccgaggactgagagga

SEQ ID NO: 4196430 - DNA, 25 bp, Homo sapien
caaggtctggcacccaataacccat

SEQ ID NO: 4196431 - DNA, 25 bp, Homo sapien
gccagaagtggtccgtccatgggct

SEQ ID NO: 4196432 - DNA, 25 bp, Homo sapien
gaatctgatcattgttcttccatac

SEQ ID NO: 4196433 - DNA, 25 bp, Homo sapien
gggacagctggtccctcagtaagct

SEQ ID NO: 4196434 - DNA, 25 bp, Homo sapien
cacagaggcccaaacgcagttggat

SEQ ID NO: 4196435 - DNA, 25 bp, Homo sapien
tcagtaagctgccagagatcggatc

SEQ ID NO: 4196436 - DNA, 25 bp, Homo sapien
tgcgtgtgcatgagggacaggataa

SEQ ID NO: 4196437 - DNA, 25 bp, Homo sapien
tgaaatgacagaagattcgctcatg

SEQ ID NO: 4196438 - DNA, 25 bp, Homo sapien
cagaagattcgctcatgtgtgcatg

SEQ ID NO: 4196439 - DNA, 25 bp, Homo sapien
tgacagaagattcgctcatgtgtgc

SEQ ID NO: 4196440 - DNA, 25 bp, Homo sapien
aaagggttgtgactacagctgggac

SEQ ID NO: 4196441 - DNA, 25 bp, Homo sapien
gcgttttctgttgacaagcttcact

SEQ ID NO: 4196442 - DNA, 25 bp, Homo sapien
cctgtaccgactggccctgtcatgg

SEQ ID NO: 4196443 - DNA, 25 bp, Homo sapien
cagctcccatctaggaagcatttgg

SEQ ID NO: 4196444 - DNA, 25 bp, Homo sapien
gcactttggccagggcaaccgagtg

SEQ ID NO: 4196445 - DNA, 25 bp, Homo sapien
actttggccagggcaaccgagtgag

SEQ ID NO: 4196446 - DNA, 25 bp, Homo sapien
tgcactttggccagggcaaccgagt

SEQ ID NO: 4196447 - DNA, 25 bp, Homo sapien
actgcactttggccagggcaaccga

SEQ ID NO: 4196448 - DNA, 25 bp, Homo sapien
ggtgattcaaagattgtctatgcag

SEQ ID NO: 4196449 - DNA, 25 bp, Homo sapien
gtccctgacactgttaggagctatt

SEQ ID NO: 4196450 - DNA, 25 bp, Homo sapien
acactgttaggagctattaatttgg

SEQ ID NO: 4196451 - DNA, 25 bp, Homo sapien
agattgtctatgcagactcaactga

SEQ ID NO: 4196452 - DNA, 25 bp, Homo sapien
cttagaactaccaaatgtcaaagct

SEQ ID NO: 4196453 - DNA, 25 bp, Homo sapien
ttttcttagaactaccaaatgtcaa

SEQ ID NO: 4196454 - DNA, 25 bp, Homo sapien
aggcttttcttagaactaccaaatg

SEQ ID NO: 4196455 - DNA, 25 bp, Homo sapien
tgaggcttttcttagaactaccaaa

SEQ ID NO: 4196456 - DNA, 25 bp, Homo sapien
gagaaagtccttgagttcctgcccc

SEQ ID NO: 4196457 - DNA, 25 bp, Homo sapien
ccactgtggaactttaagagctcgg

SEQ ID NO: 4196458 - DNA, 25 bp, Homo sapien
gtgcccaacgttggctgcgcccatt

SEQ ID NO: 4196459 - DNA, 25 bp, Homo sapien
gaactttaagagctcggagagtgcc

SEQ ID NO: 4196460 - DNA, 25 bp, Homo sapien
tgcctaggccaacatttgacaaccc

SEQ ID NO: 4196461 - DNA, 25 bp, Homo sapien
ttatcactttaatgccctaggcaca

SEQ ID NO: 4196462 - DNA, 25 bp, Homo sapien
tatggagacagtatatcgatcctca

SEQ ID NO: 4196463 - DNA, 25 bp, Homo sapien
taataggtattcaacgcccaaaatg

SEQ ID NO: 4196464 - DNA, 25 bp, Homo sapien
ggcccagggccgagcggatggatct

SEQ ID NO: 4196465 - DNA, 25 bp, Homo sapien
tccggcacaggtccatcagtggcag

SEQ ID NO: 4196466 - DNA, 25 bp, Homo sapien
gccgagcggatggatctccggcaca

SEQ ID NO: 4196467 - DNA, 25 bp, Homo sapien
tggatctccggcacaggtccatcag

SEQ ID NO: 4196468 - DNA, 25 bp, Homo sapien
gggtagatcctttcccctatgtgcc

SEQ ID NO: 4196469 - DNA, 25 bp, Homo sapien
gccaggagaagggtagatcctttcc

SEQ ID NO: 4196470 - DNA, 25 bp, Homo sapien
aagggtagatcctttcccctatgtg

SEQ ID NO: 4196471 - DNA, 25 bp, Homo sapien
agaagggtagatcctttcccctatg

SEQ ID NO: 4196472 - DNA, 25 bp, Homo sapien
cctgaagagaggtgtctgggcatcc

SEQ ID NO: 4196473 - DNA, 25 bp, Homo sapien
caggctctctgatcaatacggtggc

SEQ ID NO: 4196474 - DNA, 25 bp, Homo sapien
taaaacggtgtgacaatcctgccgc

SEQ ID NO: 4196475 - DNA, 25 bp, Homo sapien
tcaaagaggtaagccggaaggtgtc

SEQ ID NO: 4196476 - DNA, 25 bp, Homo sapien
gagggaatgaaagggcaagagatcc

SEQ ID NO: 4196477 - DNA, 25 bp, Homo sapien
ggcaagagatccgtgagcctcaagg

SEQ ID NO: 4196478 - DNA, 25 bp, Homo sapien
tgaaagggcaagagatccgtgagcc

SEQ ID NO: 4196479 - DNA, 25 bp, Homo sapien
aagagatccgtgagcctcaaggcca

SEQ ID NO: 4196480 - DNA, 25 bp, Homo sapien
tatccaattgacacggtagagccct

SEQ ID NO: 4196481 - DNA, 25 bp, Homo sapien
acagattactttgggtagaactgac

SEQ ID NO: 4196482 - DNA, 25 bp, Homo sapien
tgttgctcccgggtgggtcactgtc

SEQ ID NO: 4196483 - DNA, 25 bp, Homo sapien
aactgcctagggtttccaatacaat

SEQ ID NO: 4196484 - DNA, 25 bp, Homo sapien
ctcagatgtagttactgccaaggga

SEQ ID NO: 4196485 - DNA, 25 bp, Homo sapien
tcttttttccgcgatggaaccatct

SEQ ID NO: 4196486 - DNA, 25 bp, Homo sapien
aaacactgcattgagtccaaagaat

SEQ ID NO: 4196487 - DNA, 25 bp, Homo sapien
ttttcactagacagtaggattcttt

SEQ ID NO: 4196488 - DNA, 25 bp, Homo sapien
aagcaggtatgaaacaagaatgtcc

SEQ ID NO: 4196489 - DNA, 25 bp, Homo sapien
gaatacttacgtcactaaaagcagg

SEQ ID NO: 4196490 - DNA, 25 bp, Homo sapien
ggtctggccaatgcaataaggcaag

SEQ ID NO: 4196491 - DNA, 25 bp, Homo sapien
tactgtggcaatgttggcaggatac

SEQ ID NO: 4196492 - DNA, 25 bp, Homo sapien
gacgttagctacagactagtatccc

SEQ ID NO: 4196493 - DNA, 25 bp, Homo sapien
gaatccttgccaactcattttgagg

SEQ ID NO: 4196494 - DNA, 25 bp, Homo sapien
tcatagatccccataacaggtatta

SEQ ID NO: 4196495 - DNA, 25 bp, Homo sapien
aataaactaacaacggccaggcgtg

SEQ ID NO: 4196496 - DNA, 25 bp, Homo sapien
tgaccctgttcaacactgtgtttgc

SEQ ID NO: 4196497 - DNA, 25 bp, Homo sapien
cctggtgtggtcttgggtgtcacca

SEQ ID NO: 4196498 - DNA, 25 bp, Homo sapien
tctgtgaccctgttcaacactgtgt

SEQ ID NO: 4196499 - DNA, 25 bp, Homo sapien
gtgaccctgttcaacactgtgtttg

SEQ ID NO: 4196500 - DNA, 25 bp, Homo sapien
ggaggtggaagctggtgcctggtgt

SEQ ID NO: 4196501 - DNA, 25 bp, Homo sapien
agaagacagcccttctacactaggg

SEQ ID NO: 4196502 - DNA, 25 bp, Homo sapien
ccaagcttggttctgcctgaggagg

SEQ ID NO: 4196503 - DNA, 25 bp, Homo sapien
ccttctacactaggggcccaagctt

SEQ ID NO: 4196504 - DNA, 25 bp, Homo sapien
agtgctccactgttgttcattccca

SEQ ID NO: 4196505 - DNA, 25 bp, Homo sapien
caccaagaacgttgattttcttctc

SEQ ID NO: 4196506 - DNA, 25 bp, Homo sapien
gaggatgtgaatataggacatgtgt

SEQ ID NO: 4196507 - DNA, 25 bp, Homo sapien
tcagagtcagtgctccactgttgtt

SEQ ID NO: 4196508 - DNA, 25 bp, Homo sapien
tacttgtagcatagttcagctcggg

SEQ ID NO: 4196509 - DNA, 25 bp, Homo sapien
tcagctcggggccaacaccatattg

SEQ ID NO: 4196510 - DNA, 25 bp, Homo sapien
ttaatgcatagttcacattgcagtg

SEQ ID NO: 4196511 - DNA, 25 bp, Homo sapien
tcggggccaacaccatattgaatta

SEQ ID NO: 4196512 - DNA, 25 bp, Homo sapien
ctctctggcttgtctgctgcagaat

SEQ ID NO: 4196513 - DNA, 25 bp, Homo sapien
cgccccctgtacagcagcgaggagg

SEQ ID NO: 4196514 - DNA, 25 bp, Homo sapien
agctagctcggttggctctgatggg

SEQ ID NO: 4196515 - DNA, 25 bp, Homo sapien
acgccccctgtacagcagcgaggag

SEQ ID NO: 4196516 - DNA, 25 bp, Homo sapien
cgaggaggagctagctcggttggct

SEQ ID NO: 4196517 - DNA, 25 bp, Homo sapien
catgactttatctcagggcagtgat

SEQ ID NO: 4196518 - DNA, 25 bp, Homo sapien
gctctcctgggtgctagatctggct

SEQ ID NO: 4196519 - DNA, 25 bp, Homo sapien
tcagggcagtgattcaggtcatcaa

SEQ ID NO: 4196520 - DNA, 25 bp, Homo sapien
tagccaatagacctctgggccatgg

SEQ ID NO: 4196521 - DNA, 25 bp, Homo sapien
gcaacaatccattcgttaggtctag

SEQ ID NO: 4196522 - DNA, 25 bp, Homo sapien
cagggaagagtgcaacaatccattc

SEQ ID NO: 4196523 - DNA, 25 bp, Homo sapien
atccattcgttaggtctagtttggg

SEQ ID NO: 4196524 - DNA, 25 bp, Homo sapien
ggagggatagagcactggcatcaag

SEQ ID NO: 4196525 - DNA, 25 bp, Homo sapien
cagcttggtatgaccacttcttgct

SEQ ID NO: 4196526 - DNA, 25 bp, Homo sapien
tggtactaatgacatccagttgatt

SEQ ID NO: 4196527 - DNA, 25 bp, Homo sapien
tactaatgacatccagttgattcac

SEQ ID NO: 4196528 - DNA, 25 bp, Homo sapien
atgacatccagttgattcacattca

SEQ ID NO: 4196529 - DNA, 25 bp, Homo sapien
ctaatgacatccagttgattcacat

SEQ ID NO: 4196530 - DNA, 25 bp, Homo sapien
tgtccgcctctggtattcccccgat

SEQ ID NO: 4196531 - DNA, 25 bp, Homo sapien
tggtattcccccgatgcagcgctat

SEQ ID NO: 4196532 - DNA, 25 bp, Homo sapien
atgcagcgctatcccgggccttttt

SEQ ID NO: 4196533 - DNA, 25 bp, Homo sapien
cgatgcagcgctatcccgggccttt

SEQ ID NO: 4196534 - DNA, 25 bp, Homo sapien
gatcctcagagcacttgagggctgc

SEQ ID NO: 4196535 - DNA, 25 bp, Homo sapien
tgagggctgcctgtaacgccccgtt

SEQ ID NO: 4196536 - DNA, 25 bp, Homo sapien
tctccaacggtctgcagagacccgg

SEQ ID NO: 4196537 - DNA, 25 bp, Homo sapien
tgtgttgctctagtcctcgctgctg

SEQ ID NO: 4196538 - DNA, 25 bp, Homo sapien
gcgcgcacccgccaccggggagctc

SEQ ID NO: 4196539 - DNA, 25 bp, Homo sapien
cgcccatggtcccaggccggcccca

SEQ ID NO: 4196540 - DNA, 25 bp, Homo sapien
ccagctccgtcgctgcgcgcccggc

SEQ ID NO: 4196541 - DNA, 25 bp, Homo sapien
cggccccagctccgtcgctgcgcgc

SEQ ID NO: 4196542 - DNA, 25 bp, Homo sapien
taaaggaggaggcttagtcgcggga

SEQ ID NO: 4196543 - DNA, 25 bp, Homo sapien
attcggacccgacgcttcgaagcgc

SEQ ID NO: 4196544 - DNA, 25 bp, Homo sapien
ttcgcagcgggcgtgagacggcgcc

SEQ ID NO: 4196545 - DNA, 25 bp, Homo sapien
aagagggcgcaagtcctaggctcag

SEQ ID NO: 4196546 - DNA, 25 bp, Homo sapien
ggatcccgggagcttgaatctcggc

SEQ ID NO: 4196547 - DNA, 25 bp, Homo sapien
gaatctcggctggaatccagcggcg

SEQ ID NO: 4196548 - DNA, 25 bp, Homo sapien
ctggagactagccggctcaggaccg

SEQ ID NO: 4196549 - DNA, 25 bp, Homo sapien
gagcttgaatctcggctggaatcca

SEQ ID NO: 4196550 - DNA, 25 bp, Homo sapien
aggaatgttaacctgcgctcgggcg

SEQ ID NO: 4196551 - DNA, 25 bp, Homo sapien
agatcaggacataggcaagttcacc

SEQ ID NO: 4196552 - DNA, 25 bp, Homo sapien
tcaccagcaaaagcaacgtcgtggg

SEQ ID NO: 4196553 - DNA, 25 bp, Homo sapien
gtgggtctacaccacacggtcctaa

SEQ ID NO: 4196554 - DNA, 25 bp, Homo sapien
gaatcctttaccatccacaggtaca

SEQ ID NO: 4196555 - DNA, 25 bp, Homo sapien
aaaatatggctccacgtcctgcacc

SEQ ID NO: 4196556 - DNA, 25 bp, Homo sapien
gtcctgcaccgtgaatcctttacca

SEQ ID NO: 4196557 - DNA, 25 bp, Homo sapien
caatcgctgaactcacagccgaagc

SEQ ID NO: 4196558 - DNA, 25 bp, Homo sapien
tgttgaatgcttacaaaggatcctt

SEQ ID NO: 4196559 - DNA, 25 bp, Homo sapien
gcttacaaaggatccttgcctttcc

SEQ ID NO: 4196560 - DNA, 25 bp, Homo sapien
tcaacaaacggctccatttgtggag

SEQ ID NO: 4196561 - DNA, 25 bp, Homo sapien
ctgcaaatatcaacaaacggctcca

SEQ ID NO: 4196562 - DNA, 25 bp, Homo sapien
agttactgccaagcccgaccgcagt

SEQ ID NO: 4196563 - DNA, 25 bp, Homo sapien
tctgaggagggtaagttactgccaa

SEQ ID NO: 4196564 - DNA, 25 bp, Homo sapien
accgcagtcgcatcccgtttgaaag

SEQ ID NO: 4196565 - DNA, 25 bp, Homo sapien
tttgaaagggtgggctccgcactgc

SEQ ID NO: 4196566 - DNA, 25 bp, Homo sapien
agatgtcccgattgggcaccaacac

SEQ ID NO: 4196567 - DNA, 25 bp, Homo sapien
tttgatccatctgctataaatcccc

SEQ ID NO: 4196568 - DNA, 25 bp, Homo sapien
ccttttgatccatctgctataaatc

SEQ ID NO: 4196569 - DNA, 25 bp, Homo sapien
tgatccatctgctataaatcccctt

SEQ ID NO: 4196570 - DNA, 25 bp, Homo sapien
gatccatctgctataaatccccttc

SEQ ID NO: 4196571 - DNA, 25 bp, Homo sapien
tggctttcaggctgtcccgtgcatc

SEQ ID NO: 4196572 - DNA, 25 bp, Homo sapien
aacactcggagtgctgtgctccaaa

SEQ ID NO: 4196573 - DNA, 25 bp, Homo sapien
ggagccaatccctaacagagaagtt

SEQ ID NO: 4196574 - DNA, 25 bp, Homo sapien
tgagctaactattcaagctgatcaa

SEQ ID NO: 4196575 - DNA, 25 bp, Homo sapien
cacgggaatttctggacagagagac

SEQ ID NO: 4196576 - DNA, 25 bp, Homo sapien
caaggagaagcccacgggaatttct

SEQ ID NO: 4196577 - DNA, 25 bp, Homo sapien
catcacagagcggtgtagggagggc

SEQ ID NO: 4196578 - DNA, 25 bp, Homo sapien
cagtggggcatctgacagcgactca

SEQ ID NO: 4196579 - DNA, 25 bp, Homo sapien
cctatgtggtagacaggggggacca

SEQ ID NO: 4196580 - DNA, 25 bp, Homo sapien
tgtggtagacaggggggaccaggca

SEQ ID NO: 4196581 - DNA, 25 bp, Homo sapien
gagtacccctatgtggtagacaggg

SEQ ID NO: 4196582 - DNA, 25 bp, Homo sapien
agtacccctatgtggtagacagggg

SEQ ID NO: 4196583 - DNA, 25 bp, Homo sapien
cttgaatgaagacaactgattttct

SEQ ID NO: 4196584 - DNA, 25 bp, Homo sapien
tcttggagtccccactgaggttaac

SEQ ID NO: 4196585 - DNA, 25 bp, Homo sapien
gagactgatccgtagattgcactca

SEQ ID NO: 4196586 - DNA, 25 bp, Homo sapien
ttaacgacccaccatcagagactga

SEQ ID NO: 4196587 - DNA, 25 bp, Homo sapien
caggcattaattaaacctcttctag

SEQ ID NO: 4196588 - DNA, 25 bp, Homo sapien
actgcaggcattaattaaacctctt

SEQ ID NO: 4196589 - DNA, 25 bp, Homo sapien
gcaggcattaattaaacctcttcta

SEQ ID NO: 4196590 - DNA, 25 bp, Homo sapien
tgcaggcattaattaaacctcttct

SEQ ID NO: 4196591 - DNA, 25 bp, Homo sapien
acactggaatgtgggcacacttcct

SEQ ID NO: 4196592 - DNA, 25 bp, Homo sapien
tttccaaaagggcacacacctcatt

SEQ ID NO: 4196593 - DNA, 25 bp, Homo sapien
cgtgctaagcccaagtctcagctgg

SEQ ID NO: 4196594 - DNA, 25 bp, Homo sapien
tcaaaaccagaatgatgggcccagc

SEQ ID NO: 4196595 - DNA, 25 bp, Homo sapien
aagtggtaccctgtctccctggaag

SEQ ID NO: 4196596 - DNA, 25 bp, Homo sapien
cacctcaggtgagatgaagtggcaa

SEQ ID NO: 4196597 - DNA, 25 bp, Homo sapien
ggctgcaatctgaagtggccatggg

SEQ ID NO: 4196598 - DNA, 25 bp, Homo sapien
aaaatgggtgatgtcaaaggggact

SEQ ID NO: 4196599 - DNA, 25 bp, Homo sapien
tcattctgggttcacgggtgcctcc

SEQ ID NO: 4196600 - DNA, 25 bp, Homo sapien
attctgggttcacgggtgcctcctc

SEQ ID NO: 4196601 - DNA, 25 bp, Homo sapien
gttcacgggtgcctcctcgtggctg

SEQ ID NO: 4196602 - DNA, 25 bp, Homo sapien
ctgggttcacgggtgcctcctcgtg

SEQ ID NO: 4196603 - DNA, 25 bp, Homo sapien
taggtgttagttggccagggccctc

SEQ ID NO: 4196604 - DNA, 25 bp, Homo sapien
tcagttaggtgttagttggccaggg

SEQ ID NO: 4196605 - DNA, 25 bp, Homo sapien
cagttaggtgttagttggccagggc

SEQ ID NO: 4196606 - DNA, 25 bp, Homo sapien
ctgaaacatgagtgtgtaaattggg

SEQ ID NO: 4196607 - DNA, 25 bp, Homo sapien
aagccgccatccagttcttcttcca

SEQ ID NO: 4196608 - DNA, 25 bp, Homo sapien
cacagatgactgtgggccaagggaa

SEQ ID NO: 4196609 - DNA, 25 bp, Homo sapien
tacagtctctactaccacatgtttg

SEQ ID NO: 4196610 - DNA, 25 bp, Homo sapien
taatcaatatgctattgattacagc

SEQ ID NO: 4196611 - DNA, 25 bp, Homo sapien
caggtgacaaaaggatgccctgtaa

SEQ ID NO: 4196612 - DNA, 25 bp, Homo sapien
gattacagctctttctgaggaagct

SEQ ID NO: 4196613 - DNA, 25 bp, Homo sapien
cataagggtggcgagcaggtgacaa

SEQ ID NO: 4196614 - DNA, 25 bp, Homo sapien
tgagcaggtcgacttacacgtaggt

SEQ ID NO: 4196615 - DNA, 25 bp, Homo sapien
cacactggcgacaaaagaggttcca

SEQ ID NO: 4196616 - DNA, 25 bp, Homo sapien
tccattagggactgcaacggagaca

SEQ ID NO: 4196617 - DNA, 25 bp, Homo sapien
tatgtgaaccgaggatgagacaggc

SEQ ID NO: 4196618 - DNA, 25 bp, Homo sapien
aaagaagactgcatccaggctagga

SEQ ID NO: 4196619 - DNA, 25 bp, Homo sapien
taggctctatcaaaccagtgctgtc

SEQ ID NO: 4196620 - DNA, 25 bp, Homo sapien
caaggtgtcctaccatcagtgggac

SEQ ID NO: 4196621 - DNA, 25 bp, Homo sapien
gatacatgcagggaagtgttgtgcc

SEQ ID NO: 4196622 - DNA, 25 bp, Homo sapien
tgccttgccctaggttttccagcct

SEQ ID NO: 4196623 - DNA, 25 bp, Homo sapien
gggctgactcagctgttgtgtccct

SEQ ID NO: 4196624 - DNA, 25 bp, Homo sapien
gccttgccctaggttttccagcctg

SEQ ID NO: 4196625 - DNA, 25 bp, Homo sapien
ggctgactcagctgttgtgtccctg

SEQ ID NO: 4196626 - DNA, 25 bp, Homo sapien
ccatcccatccatcagggtaggcag

SEQ ID NO: 4196627 - DNA, 25 bp, Homo sapien
tcccatccatcagggtaggcagcca

SEQ ID NO: 4196628 - DNA, 25 bp, Homo sapien
tccatcagggtaggcagccacgtct

SEQ ID NO: 4196629 - DNA, 25 bp, Homo sapien
catccatcagggtaggcagccacgt

SEQ ID NO: 4196630 - DNA, 25 bp, Homo sapien
agtcgcccttttccttgaactattg

SEQ ID NO: 4196631 - DNA, 25 bp, Homo sapien
ttttccttgaactattgcttctgct

SEQ ID NO: 4196632 - DNA, 25 bp, Homo sapien
cttttccttgaactattgcttctgc

SEQ ID NO: 4196633 - DNA, 25 bp, Homo sapien
cacaaggagtcgcccttttccttga

SEQ ID NO: 4196634 - DNA, 25 bp, Homo sapien
ctagggagtagtctggtgtgatcac

SEQ ID NO: 4196635 - DNA, 25 bp, Homo sapien
ggaacaccgaatcccaggatgcctt

SEQ ID NO: 4196636 - DNA, 25 bp, Homo sapien
ggtgtatgtacacagcctggccaga

SEQ ID NO: 4196637 - DNA, 25 bp, Homo sapien
gatcacagccctaggggtgtatgta

SEQ ID NO: 4196638 - DNA, 25 bp, Homo sapien
catctctaccaatctgtgacttttc

SEQ ID NO: 4196639 - DNA, 25 bp, Homo sapien
gatagcctctagcatggtcagcatt

SEQ ID NO: 4196640 - DNA, 25 bp, Homo sapien
ccgtttccccttgatactctctggg

SEQ ID NO: 4196641 - DNA, 25 bp, Homo sapien
tgaacagtgggaacatccaccgttt

SEQ ID NO: 4196642 - DNA, 25 bp, Homo sapien
tcttcagagatcagacagacaaaat

SEQ ID NO: 4196643 - DNA, 25 bp, Homo sapien
tcatctgctaatgtgtgagggctgt

SEQ ID NO: 4196644 - DNA, 25 bp, Homo sapien
tatagccattgagctgtacacctgg

SEQ ID NO: 4196645 - DNA, 25 bp, Homo sapien
caataagctgtactacgaaaagcac

SEQ ID NO: 4196646 - DNA, 25 bp, Homo sapien
ggtttcacctcaaatcgggaacatg

SEQ ID NO: 4196647 - DNA, 25 bp, Homo sapien
catggtttcacctcaaatcgggaac

SEQ ID NO: 4196648 - DNA, 25 bp, Homo sapien
ttcatggtttcacctcaaatcggga

SEQ ID NO: 4196649 - DNA, 25 bp, Homo sapien
tttcacctcaaatcgggaacatgtc

SEQ ID NO: 4196650 - DNA, 25 bp, Homo sapien
cagcaagaagcggttgcggaaaagc

SEQ ID NO: 4196651 - DNA, 25 bp, Homo sapien
gcagcagcaagaagcggttgcggaa

SEQ ID NO: 4196652 - DNA, 25 bp, Homo sapien
gcaagaagcggttgcggaaaagcat

SEQ ID NO: 4196653 - DNA, 25 bp, Homo sapien
cagcagcaagaagcggttgcggaaa

SEQ ID NO: 4196654 - DNA, 25 bp, Homo sapien
gccccgcggctgactgaaggctaaa

SEQ ID NO: 4196655 - DNA, 25 bp, Homo sapien
agaagtcaagcagggccactcagtg

SEQ ID NO: 4196656 - DNA, 25 bp, Homo sapien
gaaggctaaacagacacccaacttg

SEQ ID NO: 4196657 - DNA, 25 bp, Homo sapien
ttgcaaggacccaatcaaagggcta

SEQ ID NO: 4196658 - DNA, 25 bp, Homo sapien
tgatgcccaccttcttttgacctct

SEQ ID NO: 4196659 - DNA, 25 bp, Homo sapien
gaaaggattcagattttacaattca

SEQ ID NO: 4196660 - DNA, 25 bp, Homo sapien
atttttaaacttctgatgcccacct

SEQ ID NO: 4196661 - DNA, 25 bp, Homo sapien
cacactttttggaaaggattcagat

SEQ ID NO: 4196662 - DNA, 25 bp, Homo sapien
ttccttcgactctgctctggccaat

SEQ ID NO: 4196663 - DNA, 25 bp, Homo sapien
gcatttccttcgactctgctctggc

SEQ ID NO: 4196664 - DNA, 25 bp, Homo sapien
ttcgactctgctctggccaatcggg

SEQ ID NO: 4196665 - DNA, 25 bp, Homo sapien
cttcagcatttccttcgactctgct

SEQ ID NO: 4196666 - DNA, 25 bp, Homo sapien
ccatgagggattaaactctcagccc

SEQ ID NO: 4196667 - DNA, 25 bp, Homo sapien
catgagggattaaactctcagcccg

SEQ ID NO: 4196668 - DNA, 25 bp, Homo sapien
atgagggattaaactctcagcccgg

SEQ ID NO: 4196669 - DNA, 25 bp, Homo sapien
tgagggattaaactctcagcccggg

SEQ ID NO: 4196670 - DNA, 25 bp, Homo sapien
ccagggtgtcggcttgtgattcttc

SEQ ID NO: 4196671 - DNA, 25 bp, Homo sapien
gtattccagggtgtcggcttgtgat

SEQ ID NO: 4196672 - DNA, 25 bp, Homo sapien
ctggtattccagggtgtcggcttgt

SEQ ID NO: 4196673 - DNA, 25 bp, Homo sapien
gtcggcttgtgattcttctccactg

SEQ ID NO: 4196674 - DNA, 25 bp, Homo sapien
ccaagctggattgggttcctgtact

SEQ ID NO: 4196675 - DNA, 25 bp, Homo sapien
tagtttgctgaatcctttgccaacc

SEQ ID NO: 4196676 - DNA, 25 bp, Homo sapien
gatggtgtcttcctcgcttcagtgg

SEQ ID NO: 4196677 - DNA, 25 bp, Homo sapien
tctttaaaggatgaactcagatgcc

SEQ ID NO: 4196678 - DNA, 25 bp, Homo sapien
tggccccttgtcctctatctgccca

SEQ ID NO: 4196679 - DNA, 25 bp, Homo sapien
tgctgttctgtctccttcgtggccc

SEQ ID NO: 4196680 - DNA, 25 bp, Homo sapien
ttctgtctccttcgtggccccttgt

SEQ ID NO: 4196681 - DNA, 25 bp, Homo sapien
ctgtccacagtccaccccctggctg

SEQ ID NO: 4196682 - DNA, 25 bp, Homo sapien
aacttctaagcaggttgcccccttg

SEQ ID NO: 4196683 - DNA, 25 bp, Homo sapien
acttctaagcaggttgcccccttgg

SEQ ID NO: 4196684 - DNA, 25 bp, Homo sapien
ttctaagcaggttgcccccttggct

SEQ ID NO: 4196685 - DNA, 25 bp, Homo sapien
tctaagcaggttgcccccttggctt

SEQ ID NO: 4196686 - DNA, 25 bp, Homo sapien
tcaccatatactacagatctcaggg

SEQ ID NO: 4196687 - DNA, 25 bp, Homo sapien
cctgctactttcatcaagacgtgtg

SEQ ID NO: 4196688 - DNA, 25 bp, Homo sapien
ccctgcaaagagtcgaaaccacaaa

SEQ ID NO: 4196689 - DNA, 25 bp, Homo sapien
tgcctcggcagaatcactatcacca

SEQ ID NO: 4196690 - DNA, 25 bp, Homo sapien
aacgaagagtccacagttgttatct

SEQ ID NO: 4196691 - DNA, 25 bp, Homo sapien
ttgttatctgcctctcatcgtctgc

SEQ ID NO: 4196692 - DNA, 25 bp, Homo sapien
gcctctcatcgtctgcttttaaagg

SEQ ID NO: 4196693 - DNA, 25 bp, Homo sapien
aaccagaaccacaacgaagagtcca

SEQ ID NO: 4196694 - DNA, 25 bp, Homo sapien
aaaaatatgaatagacaggctggcc

SEQ ID NO: 4196695 - DNA, 25 bp, Homo sapien
gaagagtaaccatcagccagacagt

SEQ ID NO: 4196696 - DNA, 25 bp, Homo sapien
aactctgtaccaacgggcatgcaat

SEQ ID NO: 4196697 - DNA, 25 bp, Homo sapien
cagacagtagaccttaggcagaggc

SEQ ID NO: 4196698 - DNA, 25 bp, Homo sapien
atcagctcttgaggcttgccccgat

SEQ ID NO: 4196699 - DNA, 25 bp, Homo sapien
gccccgatcacctagataaagggag

SEQ ID NO: 4196700 - DNA, 25 bp, Homo sapien
aggcttgccccgatcacctagataa

SEQ ID NO: 4196701 - DNA, 25 bp, Homo sapien
acatcagctcttgaggcttgccccg

SEQ ID NO: 4196702 - DNA, 25 bp, Homo sapien
aggttggcctcaccagggtcgatgt

SEQ ID NO: 4196703 - DNA, 25 bp, Homo sapien
cttgggtcccgtaaggcctggtcag

SEQ ID NO: 4196704 - DNA, 25 bp, Homo sapien
gagcactgagggttgccgaaccagt

SEQ ID NO: 4196705 - DNA, 25 bp, Homo sapien
aagctggctcaggatacgccttggg

SEQ ID NO: 4196706 - DNA, 25 bp, Homo sapien
tgcccacagtttgctagttcatcta

SEQ ID NO: 4196707 - DNA, 25 bp, Homo sapien
ttttgtgaaatctaccaagtcctgg

SEQ ID NO: 4196708 - DNA, 25 bp, Homo sapien
gacaggataatatgagtgacacaga

SEQ ID NO: 4196709 - DNA, 25 bp, Homo sapien
gttgtggctgccatttgggaaccat

SEQ ID NO: 4196710 - DNA, 25 bp, Homo sapien
taaggcaggttgtgacgcacagttc

SEQ ID NO: 4196711 - DNA, 25 bp, Homo sapien
ctgaaacgaagtaaggcaggttgtg

SEQ ID NO: 4196712 - DNA, 25 bp, Homo sapien
caggttgtgacgcacagttcctggg

SEQ ID NO: 4196713 - DNA, 25 bp, Homo sapien
ggcaggttgtgacgcacagttcctg

SEQ ID NO: 4196714 - DNA, 25 bp, Homo sapien
gattctctttcgactcttgctactc

SEQ ID NO: 4196715 - DNA, 25 bp, Homo sapien
ttaggagtcgacaccgggatcaggt

SEQ ID NO: 4196716 - DNA, 25 bp, Homo sapien
tccgtcacagggtcgggcatgattc

SEQ ID NO: 4196717 - DNA, 25 bp, Homo sapien
tcattccattcttaggagtcgacac

SEQ ID NO: 4196718 - DNA, 25 bp, Homo sapien
agtgggtacctgtctccgtggcgaa

SEQ ID NO: 4196719 - DNA, 25 bp, Homo sapien
gaatgaacacatgcactgagaccag

SEQ ID NO: 4196720 - DNA, 25 bp, Homo sapien
cagagtgcagtcaatttctggtcgc

SEQ ID NO: 4196721 - DNA, 25 bp, Homo sapien
tttgggaatgacatacagtgggtac

SEQ ID NO: 4196722 - DNA, 25 bp, Homo sapien
taggtgtaccctgactaatgcagac

SEQ ID NO: 4196723 - DNA, 25 bp, Homo sapien
tatgaaaagataagcccagtgtact

SEQ ID NO: 4196724 - DNA, 25 bp, Homo sapien
gcattcatgagtccctgtgctacaa

SEQ ID NO: 4196725 - DNA, 25 bp, Homo sapien
aagaggcagacgaccagtgacactg

SEQ ID NO: 4196726 - DNA, 25 bp, Homo sapien
gagttagaggtcagagtgctccaca

SEQ ID NO: 4196727 - DNA, 25 bp, Homo sapien
tatttctcgaccactgacactgaca

SEQ ID NO: 4196728 - DNA, 25 bp, Homo sapien
aggtaccggctcaatcacttttcag

SEQ ID NO: 4196729 - DNA, 25 bp, Homo sapien
gagccaaatcccacgtgtatcgcag

SEQ ID NO: 4196730 - DNA, 25 bp, Homo sapien
gacatgtgactaatgaaagcttcca

SEQ ID NO: 4196731 - DNA, 25 bp, Homo sapien
catctcacacaatgggtgatttggg

SEQ ID NO: 4196732 - DNA, 25 bp, Homo sapien
gcaaggagttcaaggggctttcgaa

SEQ ID NO: 4196733 - DNA, 25 bp, Homo sapien
gctttcgaaagaggctccggatcct

SEQ ID NO: 4196734 - DNA, 25 bp, Homo sapien
cacatggtctgactagggctgcgga

SEQ ID NO: 4196735 - DNA, 25 bp, Homo sapien
cctggtgaccgagctccttgcagag

SEQ ID NO: 4196736 - DNA, 25 bp, Homo sapien
gaactgctcggaaggtatgcaagca

SEQ ID NO: 4196737 - DNA, 25 bp, Homo sapien
taaatgatcaattgcccatccagag

SEQ ID NO: 4196738 - DNA, 25 bp, Homo sapien
tatctgtaattgcatgggcctaagg

SEQ ID NO: 4196739 - DNA, 25 bp, Homo sapien
tgctcagtgaaaccgctcaggcgaa

SEQ ID NO: 4196740 - DNA, 25 bp, Homo sapien
tcctcagtgtgcagcgagtgctcag

SEQ ID NO: 4196741 - DNA, 25 bp, Homo sapien
gagaaccacggcctttggaccatct

SEQ ID NO: 4196742 - DNA, 25 bp, Homo sapien
tctaaatagagctggtctgcagacc

SEQ ID NO: 4196743 - DNA, 25 bp, Homo sapien
cagatactggtttcttaccgggcaa

SEQ ID NO: 4196744 - DNA, 25 bp, Homo sapien
tcaaacgtaggaggtactgacgacg

SEQ ID NO: 4196745 - DNA, 25 bp, Homo sapien
gcaaggccagcccactttgtagggt

SEQ ID NO: 4196746 - DNA, 25 bp, Homo sapien
ctgtcttgccaaagctcaaagatca

SEQ ID NO: 4196747 - DNA, 25 bp, Homo sapien
tctctgtcttgccaaagctcaaaga

SEQ ID NO: 4196748 - DNA, 25 bp, Homo sapien
cttttctctgtcttgccaaagctca

SEQ ID NO: 4196749 - DNA, 25 bp, Homo sapien
ttttctctgtcttgccaaagctcaa

SEQ ID NO: 4196750 - DNA, 25 bp, Homo sapien
caaagcggaccaagttttcaagcgg

SEQ ID NO: 4196751 - DNA, 25 bp, Homo sapien
ataatttgtaccactgccacccagg

SEQ ID NO: 4196752 - DNA, 25 bp, Homo sapien
gccattgtaaagaatccggacggaa

SEQ ID NO: 4196753 - DNA, 25 bp, Homo sapien
ggaatgtgacatcgacgccattgta

SEQ ID NO: 4196754 - DNA, 25 bp, Homo sapien
catctgttttgtccggcctgggaac

SEQ ID NO: 4196755 - DNA, 25 bp, Homo sapien
tctggcattctaagcgaagtctggc

SEQ ID NO: 4196756 - DNA, 25 bp, Homo sapien
taaccaccaagcaggtacagcaaat

SEQ ID NO: 4196757 - DNA, 25 bp, Homo sapien
gcaaacttggattggcaacttcagg

SEQ ID NO: 4196758 - DNA, 25 bp, Homo sapien
gatgacaacagagaatctcactttc

SEQ ID NO: 4196759 - DNA, 25 bp, Homo sapien
catattcaaatgcaacactggacaa

SEQ ID NO: 4196760 - DNA, 25 bp, Homo sapien
tagcaccattagttcagaaatcaca

SEQ ID NO: 4196761 - DNA, 25 bp, Homo sapien
aaaagttggaatgccgatgacaaca

SEQ ID NO: 4196762 - DNA, 25 bp, Homo sapien
taactcgagtgacttataggtacaa

SEQ ID NO: 4196763 - DNA, 25 bp, Homo sapien
ctttgaatacttgagagataacaca

SEQ ID NO: 4196764 - DNA, 25 bp, Homo sapien
ggctctcacttgaaaataactcgag

SEQ ID NO: 4196765 - DNA, 25 bp, Homo sapien
caactttcagcagttagtaaagcag

SEQ ID NO: 4196766 - DNA, 25 bp, Homo sapien
cacacactgaggcctgttgtggagt

SEQ ID NO: 4196767 - DNA, 25 bp, Homo sapien
gggctgggggagggatagcattggg

SEQ ID NO: 4196768 - DNA, 25 bp, Homo sapien
aacaaagctgcacgttgtgaacatg

SEQ ID NO: 4196769 - DNA, 25 bp, Homo sapien
acactgaggcctgttgtggagtggg

SEQ ID NO: 4196770 - DNA, 25 bp, Homo sapien
ccgtcatcactattgctgcagttca

SEQ ID NO: 4196771 - DNA, 25 bp, Homo sapien
tttaccgtcatcactattgctgcag

SEQ ID NO: 4196772 - DNA, 25 bp, Homo sapien
cgtcatcactattgctgcagttcat

SEQ ID NO: 4196773 - DNA, 25 bp, Homo sapien
taccgtcatcactattgctgcagtt

SEQ ID NO: 4196774 - DNA, 25 bp, Homo sapien
cccagagtcgaccttgaaagagccc

SEQ ID NO: 4196775 - DNA, 25 bp, Homo sapien
cagactgaggagatgggcagtatcc

SEQ ID NO: 4196776 - DNA, 25 bp, Homo sapien
gaaagagccctcgagtcagactgag

SEQ ID NO: 4196777 - DNA, 25 bp, Homo sapien
tccgacaatggaaagccgttgttcg

SEQ ID NO: 4196778 - DNA, 25 bp, Homo sapien
ttctatcgctctgcggcgtgggaaa

SEQ ID NO: 4196779 - DNA, 25 bp, Homo sapien
tgcttcgacctgtggtctctctggc

SEQ ID NO: 4196780 - DNA, 25 bp, Homo sapien
aacgtgagagacaggcttgggcact

SEQ ID NO: 4196781 - DNA, 25 bp, Homo sapien
tgggaaagaggcgtgcgcgtccttg

SEQ ID NO: 4196782 - DNA, 25 bp, Homo sapien
taagtccgggtttctctggctcacg

SEQ ID NO: 4196783 - DNA, 25 bp, Homo sapien
tcacctggcggaaagacacaaacgt

SEQ ID NO: 4196784 - DNA, 25 bp, Homo sapien
taaatgttaccctgcttgatgtgga

SEQ ID NO: 4196785 - DNA, 25 bp, Homo sapien
gagtgtatccaaccaaatacgggca

SEQ ID NO: 4196786 - DNA, 25 bp, Homo sapien
acaccaagaggtgggcagagagcaa

SEQ ID NO: 4196787 - DNA, 25 bp, Homo sapien
tagagacaccaagaggtgggcagag

SEQ ID NO: 4196788 - DNA, 25 bp, Homo sapien
ctagagacaccaagaggtgggcaga

SEQ ID NO: 4196789 - DNA, 25 bp, Homo sapien
ccaagaggtgggcagagagcaagta

SEQ ID NO: 4196790 - DNA, 25 bp, Homo sapien
tccaagcggcagataagcaatgcag

SEQ ID NO: 4196791 - DNA, 25 bp, Homo sapien
cttagagtcaagatggtcaccgcct

SEQ ID NO: 4196792 - DNA, 25 bp, Homo sapien
ggcgagggacagaccatctagccac

SEQ ID NO: 4196793 - DNA, 25 bp, Homo sapien
caggactggagataagggcgaggga

SEQ ID NO: 4196794 - DNA, 25 bp, Homo sapien
tgctcagggcagttctatggtcata

SEQ ID NO: 4196795 - DNA, 25 bp, Homo sapien
gaactcccgggtgtagccatggtta

SEQ ID NO: 4196796 - DNA, 25 bp, Homo sapien
tctcagggatctccaaaggtctacc

SEQ ID NO: 4196797 - DNA, 25 bp, Homo sapien
tgccatggaaagaggcgggaactcc

SEQ ID NO: 4196798 - DNA, 25 bp, Homo sapien
tcctgagatactggaggctagggct

SEQ ID NO: 4196799 - DNA, 25 bp, Homo sapien
tcttggattgcacatggccactctt

SEQ ID NO: 4196800 - DNA, 25 bp, Homo sapien
tatgattcaccactaaggaagccag

SEQ ID NO: 4196801 - DNA, 25 bp, Homo sapien
gacagcgcccctttgcagattcctg

SEQ ID NO: 4196802 - DNA, 25 bp, Homo sapien
tgaccacactcaaatctctaacctg

SEQ ID NO: 4196803 - DNA, 25 bp, Homo sapien
gagcaaacccaaaactgagatgggt

SEQ ID NO: 4196804 - DNA, 25 bp, Homo sapien
caggctcaatatttacgcaatgtcc

SEQ ID NO: 4196805 - DNA, 25 bp, Homo sapien
ccattcagaatgtgtaggaagcaca

SEQ ID NO: 4196806 - DNA, 25 bp, Homo sapien
gatggataccagttggatgagaccc

SEQ ID NO: 4196807 - DNA, 25 bp, Homo sapien
agcaggaaagccctcctagaaaact

SEQ ID NO: 4196808 - DNA, 25 bp, Homo sapien
cccatattcatttggtagggctgcc

SEQ ID NO: 4196809 - DNA, 25 bp, Homo sapien
gaaaactcaagtgcccatattcatt

SEQ ID NO: 4196810 - DNA, 25 bp, Homo sapien
ttcgggctctggctatatcaacagt

SEQ ID NO: 4196811 - DNA, 25 bp, Homo sapien
gagtaatcttcttttcgggctctgg

SEQ ID NO: 4196812 - DNA, 25 bp, Homo sapien
tgttgcagagtaatcttcttttcgg

SEQ ID NO: 4196813 - DNA, 25 bp, Homo sapien
ggctatatcaacagttcctcttttc

SEQ ID NO: 4196814 - DNA, 25 bp, Homo sapien
tagagagctttcactaagttggaga

SEQ ID NO: 4196815 - DNA, 25 bp, Homo sapien
tatctgttccaagggtcatttagag

SEQ ID NO: 4196816 - DNA, 25 bp, Homo sapien
tgttaggcactacgctagatgctgg

SEQ ID NO: 4196817 - DNA, 25 bp, Homo sapien
tattgagcatcaacatgttaggcac

SEQ ID NO: 4196818 - DNA, 25 bp, Homo sapien
ggcatagacacagaacaaacggctg

SEQ ID NO: 4196819 - DNA, 25 bp, Homo sapien
ccagttgcagtcaattctatcacca

SEQ ID NO: 4196820 - DNA, 25 bp, Homo sapien
gctttattgactccagatagcaggg

SEQ ID NO: 4196821 - DNA, 25 bp, Homo sapien
taaatatcaaatggaccagttgcag

SEQ ID NO: 4196822 - DNA, 25 bp, Homo sapien
agtgtgtcaatgtatgatctcaaat

SEQ ID NO: 4196823 - DNA, 25 bp, Homo sapien
ttcttaatttattccccctgcactg

SEQ ID NO: 4196824 - DNA, 25 bp, Homo sapien
gtgtcaatgtatgatctcaaataaa

SEQ ID NO: 4196825 - DNA, 25 bp, Homo sapien
taatttattccccctgcactgaaat

SEQ ID NO: 4196826 - DNA, 25 bp, Homo sapien
taaggagtatggagttatgccccac

SEQ ID NO: 4196827 - DNA, 25 bp, Homo sapien
cacatcatatcaaggtacagaccat

SEQ ID NO: 4196828 - DNA, 25 bp, Homo sapien
gaaggaagtctatgtgtggcccaca

SEQ ID NO: 4196829 - DNA, 25 bp, Homo sapien
gatattgaccttgatcgcctggcta

SEQ ID NO: 4196830 - DNA, 25 bp, Homo sapien
gaaaaatgtcgggtattatgcacat

SEQ ID NO: 4196831 - DNA, 25 bp, Homo sapien
aagcatggatagacagagaagtcca

SEQ ID NO: 4196832 - DNA, 25 bp, Homo sapien
ctagatctgagagtcattggcaaat

SEQ ID NO: 4196833 - DNA, 25 bp, Homo sapien
tgaaaaacaccacctttaagcatgg

SEQ ID NO: 4196834 - DNA, 25 bp, Homo sapien
tatgcacgagggacactaaggctgt

SEQ ID NO: 4196835 - DNA, 25 bp, Homo sapien
tgttttccagccatctaagcccagg

SEQ ID NO: 4196836 - DNA, 25 bp, Homo sapien
tgaccggtagcaccagcattgagtg

SEQ ID NO: 4196837 - DNA, 25 bp, Homo sapien
cagaggcggtagtgtcagacatgca

SEQ ID NO: 4196838 - DNA, 25 bp, Homo sapien
gctctatccatgttactgcagaggg

SEQ ID NO: 4196839 - DNA, 25 bp, Homo sapien
gctgcgataaacatgcatccatgtg

SEQ ID NO: 4196840 - DNA, 25 bp, Homo sapien
ctctatccatgttactgcagagggc

SEQ ID NO: 4196841 - DNA, 25 bp, Homo sapien
gtcaagtagaccctgttgtctattg

SEQ ID NO: 4196842 - DNA, 25 bp, Homo sapien
cattcagaatcaacccgtggagttg

SEQ ID NO: 4196843 - DNA, 25 bp, Homo sapien
tgcctgcaacactggttcacttgag

SEQ ID NO: 4196844 - DNA, 25 bp, Homo sapien
gagcctttgcacctactgatctctg

SEQ ID NO: 4196845 - DNA, 25 bp, Homo sapien
cagtgagacgcccaggtaaaaaggt

SEQ ID NO: 4196846 - DNA, 25 bp, Homo sapien
tcccagcatgtagtccaacatcagc

SEQ ID NO: 4196847 - DNA, 25 bp, Homo sapien
tagtccaacatcagctgtccaggcc

SEQ ID NO: 4196848 - DNA, 25 bp, Homo sapien
ccaagggtagccctgtggttgctcc

SEQ ID NO: 4196849 - DNA, 25 bp, Homo sapien
agcatgtagtccaacatcagctgtc

SEQ ID NO: 4196850 - DNA, 25 bp, Homo sapien
gtgatcagagatatggcttttatgg

SEQ ID NO: 4196851 - DNA, 25 bp, Homo sapien
tgtctgtgcatgcttgatatctggg

SEQ ID NO: 4196852 - DNA, 25 bp, Homo sapien
tgtgcatgcttgatatctgggctca

SEQ ID NO: 4196853 - DNA, 25 bp, Homo sapien
tttgcagtcgagtgtcttcaggttt

SEQ ID NO: 4196854 - DNA, 25 bp, Homo sapien
caggtttcctttgtctgtgcatgct

SEQ ID NO: 4196855 - DNA, 25 bp, Homo sapien
ctgtggaagatacaggcttcagcaa

SEQ ID NO: 4196856 - DNA, 25 bp, Homo sapien
gtggaagatacaggcttcagcaatg

SEQ ID NO: 4196857 - DNA, 25 bp, Homo sapien
aggcgctgtggaagatacaggcttc

SEQ ID NO: 4196858 - DNA, 25 bp, Homo sapien
ctgctaaggcgctgtggaagataca

SEQ ID NO: 4196859 - DNA, 25 bp, Homo sapien
cttgccggaggaacaactagagtgt

SEQ ID NO: 4196860 - DNA, 25 bp, Homo sapien
tggagtccaggatagcttccaagaa

SEQ ID NO: 4196861 - DNA, 25 bp, Homo sapien
gatcatgttgttctgcaagaccaca

SEQ ID NO: 4196862 - DNA, 25 bp, Homo sapien
ggtggcttatgaattcctgcagcag

SEQ ID NO: 4196863 - DNA, 25 bp, Homo sapien
aagaaattttgggataagaccagat

SEQ ID NO: 4196864 - DNA, 25 bp, Homo sapien
ttgaagaaattttgggataagacca

SEQ ID NO: 4196865 - DNA, 25 bp, Homo sapien
tgaagaaattttgggataagaccag

SEQ ID NO: 4196866 - DNA, 25 bp, Homo sapien
gaaattttgggataagaccagatac

SEQ ID NO: 4196867 - DNA, 25 bp, Homo sapien
aatcaacaagtccaaccaagagggc

SEQ ID NO: 4196868 - DNA, 25 bp, Homo sapien
gaaatcaacaagtccaaccaagagg

SEQ ID NO: 4196869 - DNA, 25 bp, Homo sapien
aaatcaacaagtccaaccaagaggg

SEQ ID NO: 4196870 - DNA, 25 bp, Homo sapien
tggaagagagcttctaggaggaaac

SEQ ID NO: 4196871 - DNA, 25 bp, Homo sapien
taggaggaaacttttgcccatccaa

SEQ ID NO: 4196872 - DNA, 25 bp, Homo sapien
agaaagctacaaggactggaccagt

SEQ ID NO: 4196873 - DNA, 25 bp, Homo sapien
caaggactggaccagtcaggaaggc

SEQ ID NO: 4196874 - DNA, 25 bp, Homo sapien
gagatatgccgatgaatcccgaggt

SEQ ID NO: 4196875 - DNA, 25 bp, Homo sapien
gtaaaagatatgggtacttccagga

SEQ ID NO: 4196876 - DNA, 25 bp, Homo sapien
atatgccgatgaatcccgaggtggg

SEQ ID NO: 4196877 - DNA, 25 bp, Homo sapien
ctggagagatatgccgatgaatccc

SEQ ID NO: 4196878 - DNA, 25 bp, Homo sapien
tgtgctccactacccatcctaaaaa

SEQ ID NO: 4196879 - DNA, 25 bp, Homo sapien
ggttacgcctatcattctcccagtg

SEQ ID NO: 4196880 - DNA, 25 bp, Homo sapien
aagaatcgtgagaaagaggcctgga

SEQ ID NO: 4196881 - DNA, 25 bp, Homo sapien
ctggaattaggcctagaccctccat

SEQ ID NO: 4196882 - DNA, 25 bp, Homo sapien
tacaggagttagagtcaacagcaca

SEQ ID NO: 4196883 - DNA, 25 bp, Homo sapien
taatgcctctttgacacttgggatc

SEQ ID NO: 4196884 - DNA, 25 bp, Homo sapien
gaaacaagcatcaaggcacacaggg

SEQ ID NO: 4196885 - DNA, 25 bp, Homo sapien
tatgggcactttataggaagcactg

SEQ ID NO: 4196886 - DNA, 25 bp, Homo sapien
tgcgagtgccactccccaactagtt

SEQ ID NO: 4196887 - DNA, 25 bp, Homo sapien
aagagaaaggccgttgcctctttat

SEQ ID NO: 4196888 - DNA, 25 bp, Homo sapien
cagtggccgggcgtgggtgacgtca

SEQ ID NO: 4196889 - DNA, 25 bp, Homo sapien
caaaaggaacctttgatgtccagag

SEQ ID NO: 4196890 - DNA, 25 bp, Homo sapien
tcacaaccgctttcgtgctctgggt

SEQ ID NO: 4196891 - DNA, 25 bp, Homo sapien
acttcttgtgatcagctccacatat

SEQ ID NO: 4196892 - DNA, 25 bp, Homo sapien
tggctcctctgaaacccagacgctg

SEQ ID NO: 4196893 - DNA, 25 bp, Homo sapien
gatgtcacccattctgacttcctac

SEQ ID NO: 4196894 - DNA, 25 bp, Homo sapien
gggtctcccaaatgcagtccctact

SEQ ID NO: 4196895 - DNA, 25 bp, Homo sapien
acaagatggcgccctacggtgaagg

SEQ ID NO: 4196896 - DNA, 25 bp, Homo sapien
gatatcagatccctttggggccgta

SEQ ID NO: 4196897 - DNA, 25 bp, Homo sapien
caagctgtaggcgtcagggaacaag

SEQ ID NO: 4196898 - DNA, 25 bp, Homo sapien
ccatttgatggcacaggacacgtat

SEQ ID NO: 4196899 - DNA, 25 bp, Homo sapien
tacgaagactagatgctgactcagg

SEQ ID NO: 4196900 - DNA, 25 bp, Homo sapien
tcagaaacgtgctcagtaaaggcag

SEQ ID NO: 4196901 - DNA, 25 bp, Homo sapien
tctgacagcctgaaacggaatactc

SEQ ID NO: 4196902 - DNA, 25 bp, Homo sapien
gccagaagaacaggactacagcaga

SEQ ID NO: 4196903 - DNA, 25 bp, Homo sapien
cagcagagcctcacttcaagacaac

SEQ ID NO: 4196904 - DNA, 25 bp, Homo sapien
aacaggactacagcagagcctcact

SEQ ID NO: 4196905 - DNA, 25 bp, Homo sapien
caaattagtggtcacaacattcaga

SEQ ID NO: 4196906 - DNA, 25 bp, Homo sapien
tagtgctttgaggagtcataacaga

SEQ ID NO: 4196907 - DNA, 25 bp, Homo sapien
catacttagtgctttgaggagtcat

SEQ ID NO: 4196908 - DNA, 25 bp, Homo sapien
gctttgaggagtcataacagatggt

SEQ ID NO: 4196909 - DNA, 25 bp, Homo sapien
tttgaggagtcataacagatggtag

SEQ ID NO: 4196910 - DNA, 25 bp, Homo sapien
agtagtgaaattctggtacctgatg

SEQ ID NO: 4196911 - DNA, 25 bp, Homo sapien
tcttactccccttcctgtagtaata

SEQ ID NO: 4196912 - DNA, 25 bp, Homo sapien
tgaaattctggtacctgatgtggtg

SEQ ID NO: 4196913 - DNA, 25 bp, Homo sapien
taatatgcagctagaaattagaaat

SEQ ID NO: 4196914 - DNA, 25 bp, Homo sapien
tgggagccccatagaatgccaggaa

SEQ ID NO: 4196915 - DNA, 25 bp, Homo sapien
taaatgtccctgtgaataagatcag

SEQ ID NO: 4196916 - DNA, 25 bp, Homo sapien
ggagtctggcctacaatcaaacatg

SEQ ID NO: 4196917 - DNA, 25 bp, Homo sapien
tcagtgaaccccaggttaaatgtcc

SEQ ID NO: 4196918 - DNA, 25 bp, Homo sapien
tgtggaccaaactggggttactctc

SEQ ID NO: 4196919 - DNA, 25 bp, Homo sapien
ttggcaaagattgggcagcaagcct

SEQ ID NO: 4196920 - DNA, 25 bp, Homo sapien
ctgttggcaaagattgggcagcaag

SEQ ID NO: 4196921 - DNA, 25 bp, Homo sapien
ggcagcaagccttgtggaccaaact

SEQ ID NO: 4196922 - DNA, 25 bp, Homo sapien
gaggaacccgaaataatctggcagg

SEQ ID NO: 4196923 - DNA, 25 bp, Homo sapien
catgcccatgcctgaattacttaag

SEQ ID NO: 4196924 - DNA, 25 bp, Homo sapien
gattaacgtgcttacttgctcgtgg

SEQ ID NO: 4196925 - DNA, 25 bp, Homo sapien
tgacgagtcaaacacgaggaacccg

SEQ ID NO: 4196926 - DNA, 25 bp, Homo sapien
cagtatctgattaatgttgtaagtg

SEQ ID NO: 4196927 - DNA, 25 bp, Homo sapien
acattgcatatcagcctcagagtct

SEQ ID NO: 4196928 - DNA, 25 bp, Homo sapien
aagtgacattgcatatcagcctcag

SEQ ID NO: 4196929 - DNA, 25 bp, Homo sapien
ttgtaagtgacattgcatatcagcc

SEQ ID NO: 4196930 - DNA, 25 bp, Homo sapien
agctgaccactgcaaaggccactgt

SEQ ID NO: 4196931 - DNA, 25 bp, Homo sapien
ggagagacaccatctggtagcagag

SEQ ID NO: 4196932 - DNA, 25 bp, Homo sapien
tgagagttcaaagctcggagctgac

SEQ ID NO: 4196933 - DNA, 25 bp, Homo sapien
gcaaatgcacgaagaaaggagagac

SEQ ID NO: 4196934 - DNA, 25 bp, Homo sapien
ctaagtcatagtctgattcccagtc

SEQ ID NO: 4196935 - DNA, 25 bp, Homo sapien
tcatagtctgattcccagtccatct

SEQ ID NO: 4196936 - DNA, 25 bp, Homo sapien
cagtgaagaggctctaagtcatagt

SEQ ID NO: 4196937 - DNA, 25 bp, Homo sapien
gtctgattcccagtccatctccggg

SEQ ID NO: 4196938 - DNA, 25 bp, Homo sapien
tccctttgttccctgacctttgtca

SEQ ID NO: 4196939 - DNA, 25 bp, Homo sapien
ccctgacctttgtcaacagaataac

SEQ ID NO: 4196940 - DNA, 25 bp, Homo sapien
gcaaacttctccctttgttccctga

SEQ ID NO: 4196941 - DNA, 25 bp, Homo sapien
agcaaacttctccctttgttccctg

SEQ ID NO: 4196942 - DNA, 25 bp, Homo sapien
gtggtgaggtcaagacacaaagtcc

SEQ ID NO: 4196943 - DNA, 25 bp, Homo sapien
gggcagccagacatacggtggctta

SEQ ID NO: 4196944 - DNA, 25 bp, Homo sapien
caaagtccaagtgaagaactgtcct

SEQ ID NO: 4196945 - DNA, 25 bp, Homo sapien
tattaggagccaagacatctcggga

SEQ ID NO: 4196946 - DNA, 25 bp, Homo sapien
tgcccggaaagccttctgcagaaca

SEQ ID NO: 4196947 - DNA, 25 bp, Homo sapien
ctgctgcccggaaagccttctgcag

SEQ ID NO: 4196948 - DNA, 25 bp, Homo sapien
ctgcagaacagccagcatggagacc

SEQ ID NO: 4196949 - DNA, 25 bp, Homo sapien
gaacagccagcatggagacccccca

SEQ ID NO: 4196950 - DNA, 25 bp, Homo sapien
caacgtggggccattaagtagcaag

SEQ ID NO: 4196951 - DNA, 25 bp, Homo sapien
tgagcgaagccagagagtacatcat

SEQ ID NO: 4196952 - DNA, 25 bp, Homo sapien
agtagcaaggccaacattatgagcg

SEQ ID NO: 4196953 - DNA, 25 bp, Homo sapien
ggcgcttcacaatcgccaacgtggg

SEQ ID NO: 4196954 - DNA, 25 bp, Homo sapien
aattcagatctagtacagtgatggg

SEQ ID NO: 4196955 - DNA, 25 bp, Homo sapien
catgtagaataggagacttgggaga

SEQ ID NO: 4196956 - DNA, 25 bp, Homo sapien
ttaatgtttaattcagatctagtac

SEQ ID NO: 4196957 - DNA, 25 bp, Homo sapien
ctggcatcctcagcatgtagaatag

SEQ ID NO: 4196958 - DNA, 25 bp, Homo sapien
ttgaggtggaatctattccaggtga

SEQ ID NO: 4196959 - DNA, 25 bp, Homo sapien
tgaggtggaatctattccaggtgaa

SEQ ID NO: 4196960 - DNA, 25 bp, Homo sapien
ctagaagtggagcctaaagatgaga

SEQ ID NO: 4196961 - DNA, 25 bp, Homo sapien
gaggtggaatctattccaggtgaag

SEQ ID NO: 4196962 - DNA, 25 bp, Homo sapien
ggcgactcattcaactaaaaacatt

SEQ ID NO: 4196963 - DNA, 25 bp, Homo sapien
gcctagcagctgataattgtcaaag

SEQ ID NO: 4196964 - DNA, 25 bp, Homo sapien
tgcaccatgcgtagataaaaggcca

SEQ ID NO: 4196965 - DNA, 25 bp, Homo sapien
gacataaaatgcttctgctaggatg

SEQ ID NO: 4196966 - DNA, 25 bp, Homo sapien
ttccggacccgtgagtccggccgca

SEQ ID NO: 4196967 - DNA, 25 bp, Homo sapien
tccggacccgtgagtccggccgcag

SEQ ID NO: 4196968 - DNA, 25 bp, Homo sapien
tcggctccttcgccgccggcgcgtt

SEQ ID NO: 4196969 - DNA, 25 bp, Homo sapien
gctccttcgccgccggcgcgtttcc

SEQ ID NO: 4196970 - DNA, 25 bp, Homo sapien
gggctcggctccttcgccgccggcg

SEQ ID NO: 4196971 - DNA, 25 bp, Homo sapien
gctcggctccttcgccgccggcgcg

SEQ ID NO: 4196972 - DNA, 25 bp, Homo sapien
gagcagaccttactactgcagaagt

SEQ ID NO: 4196973 - DNA, 25 bp, Homo sapien
gaccttactactgcagaagtaggcg

SEQ ID NO: 4196974 - DNA, 25 bp, Homo sapien
taacggcgggcggttgtgttgtatg

SEQ ID NO: 4196975 - DNA, 25 bp, Homo sapien
tatgttgtaccaacagagcagacct

SEQ ID NO: 4196976 - DNA, 25 bp, Homo sapien
aaatccttggttctgagtcctccat

SEQ ID NO: 4196977 - DNA, 25 bp, Homo sapien
cagagtgagattcctgtgctttgga

SEQ ID NO: 4196978 - DNA, 25 bp, Homo sapien
aacagaccagctttaacagagtgag

SEQ ID NO: 4196979 - DNA, 25 bp, Homo sapien
attcctgtgctttggaagaaatcac

SEQ ID NO: 4196980 - DNA, 25 bp, Homo sapien
ctcagttagaacagaccagctttaa

SEQ ID NO: 4196981 - DNA, 25 bp, Homo sapien
tcttgccagacttctatctgcttcc

SEQ ID NO: 4196982 - DNA, 25 bp, Homo sapien
ctgcttccctagatcttcctttctt

SEQ ID NO: 4196983 - DNA, 25 bp, Homo sapien
ccttactatcttgccagacttctat

SEQ ID NO: 4196984 - DNA, 25 bp, Homo sapien
tgcttccctagatcttcctttcttt

SEQ ID NO: 4196985 - DNA, 25 bp, Homo sapien
cattaggaacccccttccgctggct

SEQ ID NO: 4196986 - DNA, 25 bp, Homo sapien
acggtctgacatgcctggctccctc

SEQ ID NO: 4196987 - DNA, 25 bp, Homo sapien
cttccacggtctgacatgcctggct

SEQ ID NO: 4196988 - DNA, 25 bp, Homo sapien
aacccccttccgctggcttctggag

SEQ ID NO: 4196989 - DNA, 25 bp, Homo sapien
caagttacaatggttttgcaaactc

SEQ ID NO: 4196990 - DNA, 25 bp, Homo sapien
gtcacatattgctaacaaacaagtt

SEQ ID NO: 4196991 - DNA, 25 bp, Homo sapien
gtcatcacttattccccagaaaaag

SEQ ID NO: 4196992 - DNA, 25 bp, Homo sapien
ggcatgactgtagtgttgtcacata

SEQ ID NO: 4196993 - DNA, 25 bp, Homo sapien
tactacaccttagagccggaaggaa

SEQ ID NO: 4196994 - DNA, 25 bp, Homo sapien
aaccaaacaagcaaagtcatgctgg

SEQ ID NO: 4196995 - DNA, 25 bp, Homo sapien
caccattgagcaaaaccttctttgg

SEQ ID NO: 4196996 - DNA, 25 bp, Homo sapien
tgctgggaacaattcctaggcctcc

SEQ ID NO: 4196997 - DNA, 25 bp, Homo sapien
tccacgaaagagcatcaaagacctg

SEQ ID NO: 4196998 - DNA, 25 bp, Homo sapien
cacaggcaccggttatggctgtaac

SEQ ID NO: 4196999 - DNA, 25 bp, Homo sapien
tacagaaggcatggttcagccacag

SEQ ID NO: 4197000 - DNA, 25 bp, Homo sapien
ggcagccagttctctaacgtctgag

SEQ ID NO: 4197001 - DNA, 25 bp, Homo sapien
tcggttccggtatcctgagctgaca

SEQ ID NO: 4197002 - DNA, 25 bp, Homo sapien
gttccggtatcctgagctgacatca

SEQ ID NO: 4197003 - DNA, 25 bp, Homo sapien
ttatcggttccggtatcctgagctg

SEQ ID NO: 4197004 - DNA, 25 bp, Homo sapien
tccggtatcctgagctgacatcatg

SEQ ID NO: 4197005 - DNA, 25 bp, Homo sapien
cctctgatgttcttcctgtctcacc

SEQ ID NO: 4197006 - DNA, 25 bp, Homo sapien
ggacacagaggggcttcctctgatg

SEQ ID NO: 4197007 - DNA, 25 bp, Homo sapien
gcctggacacagaggggcttcctct

SEQ ID NO: 4197008 - DNA, 25 bp, Homo sapien
acacagaggggcttcctctgatgtt

SEQ ID NO: 4197009 - DNA, 25 bp, Homo sapien
ggttccatctggctgccttaagacg

SEQ ID NO: 4197010 - DNA, 25 bp, Homo sapien
tgatgccatccaggttagcctctgc

SEQ ID NO: 4197011 - DNA, 25 bp, Homo sapien
tgccatccaggttagcctctgcagg

SEQ ID NO: 4197012 - DNA, 25 bp, Homo sapien
catctggctgccttaagacggacat

SEQ ID NO: 4197013 - DNA, 25 bp, Homo sapien
gagatggctgaggtacccctgaaga

SEQ ID NO: 4197014 - DNA, 25 bp, Homo sapien
tgggtgacgtaaacaggacagattc

SEQ ID NO: 4197015 - DNA, 25 bp, Homo sapien
tccctgacctctggtgaaataatag

SEQ ID NO: 4197016 - DNA, 25 bp, Homo sapien
ggacagattccagaaaaggttcttg

SEQ ID NO: 4197017 - DNA, 25 bp, Homo sapien
tgtccccctgagtgaacggtagccc

SEQ ID NO: 4197018 - DNA, 25 bp, Homo sapien
gtagcccagtactgcagcatactcc

SEQ ID NO: 4197019 - DNA, 25 bp, Homo sapien
gagtgaacggtagcccagtactgca

SEQ ID NO: 4197020 - DNA, 25 bp, Homo sapien
cccctgagtgaacggtagcccagta

SEQ ID NO: 4197021 - DNA, 25 bp, Homo sapien
ctaagaaggccaaagaatttcagca

SEQ ID NO: 4197022 - DNA, 25 bp, Homo sapien
tcagcataggagcactctgttccct

SEQ ID NO: 4197023 - DNA, 25 bp, Homo sapien
tttaaacgcagtaaggtgacttatg

SEQ ID NO: 4197024 - DNA, 25 bp, Homo sapien
taaacgcagtaaggtgacttatgct

SEQ ID NO: 4197025 - DNA, 25 bp, Homo sapien
tgagagactcgcaaagcattgttac

SEQ ID NO: 4197026 - DNA, 25 bp, Homo sapien
gatactttaggataaggcacaccat

SEQ ID NO: 4197027 - DNA, 25 bp, Homo sapien
cttaaaacagggctctacgatagat

SEQ ID NO: 4197028 - DNA, 25 bp, Homo sapien
gctaataatagaagatacttgggtt

SEQ ID NO: 4197029 - DNA, 25 bp, Homo sapien
cctccatgatggaggcaagagtctc

SEQ ID NO: 4197030 - DNA, 25 bp, Homo sapien
gagcactgggggaagagagtctcca

SEQ ID NO: 4197031 - DNA, 25 bp, Homo sapien
tgagactggtgagtgtgaagcttca

SEQ ID NO: 4197032 - DNA, 25 bp, Homo sapien
gctggcttctggtgtgaacctcctc

SEQ ID NO: 4197033 - DNA, 25 bp, Homo sapien
tatggggctcatgctagggacctgc

SEQ ID NO: 4197034 - DNA, 25 bp, Homo sapien
cagtccccagggattatggggctca

SEQ ID NO: 4197035 - DNA, 25 bp, Homo sapien
tactggtctgtgataatgcagtccc

SEQ ID NO: 4197036 - DNA, 25 bp, Homo sapien
actggtctgtgataatgcagtcccc

SEQ ID NO: 4197037 - DNA, 25 bp, Homo sapien
catcagatctcgaaaacagattaca

SEQ ID NO: 4197038 - DNA, 25 bp, Homo sapien
tgttgatgttgccttctaaatgtgg

SEQ ID NO: 4197039 - DNA, 25 bp, Homo sapien
tggagttgagctgtgtctaggaaaa

SEQ ID NO: 4197040 - DNA, 25 bp, Homo sapien
aacagaagtcctttatggagttgag

SEQ ID NO: 4197041 - DNA, 25 bp, Homo sapien
ctttacagtatattttctcaaagtc

SEQ ID NO: 4197042 - DNA, 25 bp, Homo sapien
tttacagtatattttctcaaagtca

SEQ ID NO: 4197043 - DNA, 25 bp, Homo sapien
ttacagtatattttctcaaagtcat

SEQ ID NO: 4197044 - DNA, 25 bp, Homo sapien
cagcacaggggccatatcaaagtga

SEQ ID NO: 4197045 - DNA, 25 bp, Homo sapien
agtgagctggctgtaccatcccaca

SEQ ID NO: 4197046 - DNA, 25 bp, Homo sapien
caggtctgttattccctgcggaaag

SEQ ID NO: 4197047 - DNA, 25 bp, Homo sapien
aagtgaaatctactgcgcaggtctg

SEQ ID NO: 4197048 - DNA, 25 bp, Homo sapien
gaatcctgcaaaagtcaaacctgca

SEQ ID NO: 4197049 - DNA, 25 bp, Homo sapien
ctgcaaaagtcaaacctgcagtcca

SEQ ID NO: 4197050 - DNA, 25 bp, Homo sapien
tcctgcaaaagtcaaacctgcagtc

SEQ ID NO: 4197051 - DNA, 25 bp, Homo sapien
tggaatcctgcaaaagtcaaacctg

SEQ ID NO: 4197052 - DNA, 25 bp, Homo sapien
cagatctttatagggcttgttagta

SEQ ID NO: 4197053 - DNA, 25 bp, Homo sapien
tatagggcttgttagtaaaatctgg

SEQ ID NO: 4197054 - DNA, 25 bp, Homo sapien
gggcttgttagtaaaatctggtata

SEQ ID NO: 4197055 - DNA, 25 bp, Homo sapien
ttatgcagatctttatagggcttgt

SEQ ID NO: 4197056 - DNA, 25 bp, Homo sapien
ggtttcccatcattacaatgtacgg

SEQ ID NO: 4197057 - DNA, 25 bp, Homo sapien
gagtacagggacaatctgattcatc

SEQ ID NO: 4197058 - DNA, 25 bp, Homo sapien
ctgattcatctttgtactccctgca

SEQ ID NO: 4197059 - DNA, 25 bp, Homo sapien
gtacggtatcatgcatttgttcaca

SEQ ID NO: 4197060 - DNA, 25 bp, Homo sapien
ctcgggaggctgagagagaagaact

SEQ ID NO: 4197061 - DNA, 25 bp, Homo sapien
caagattgcgccattgtactccagc

SEQ ID NO: 4197062 - DNA, 25 bp, Homo sapien
tgtggtgagccaagattgcgccatt

SEQ ID NO: 4197063 - DNA, 25 bp, Homo sapien
ctgcttgaacccgggaggcggaggt

SEQ ID NO: 4197064 - DNA, 25 bp, Homo sapien
ttctttcaagtctctcggctctggg

SEQ ID NO: 4197065 - DNA, 25 bp, Homo sapien
tggcctgggtttctggtgtgcctat

SEQ ID NO: 4197066 - DNA, 25 bp, Homo sapien
tgaccccggagtgaaggagtctgtc

SEQ ID NO: 4197067 - DNA, 25 bp, Homo sapien
actgggtcacagatcaatagcatac

SEQ ID NO: 4197068 - DNA, 25 bp, Homo sapien
tattaagagacgtctccagaaagcc

SEQ ID NO: 4197069 - DNA, 25 bp, Homo sapien
tatttagttggatggaccagatggc

SEQ ID NO: 4197070 - DNA, 25 bp, Homo sapien
tacccagtaatagatcaccacatgc

SEQ ID NO: 4197071 - DNA, 25 bp, Homo sapien
tggcaatgttttcctagcagtaaag

SEQ ID NO: 4197072 - DNA, 25 bp, Homo sapien
gaaacttgccctcaagtccagcggg

SEQ ID NO: 4197073 - DNA, 25 bp, Homo sapien
aaggctagctgttctcatggagtcg

SEQ ID NO: 4197074 - DNA, 25 bp, Homo sapien
gaaacagcgtatgagtgctcggcaa

SEQ ID NO: 4197075 - DNA, 25 bp, Homo sapien
catttaagatggagagtaccgtgtc

SEQ ID NO: 4197076 - DNA, 25 bp, Homo sapien
ctgtgttaccaggtgaactgccatc

SEQ ID NO: 4197077 - DNA, 25 bp, Homo sapien
gagaatgtctttggcttccggcatg

SEQ ID NO: 4197078 - DNA, 25 bp, Homo sapien
ttcggtttcgctgcaagggcttcac

SEQ ID NO: 4197079 - DNA, 25 bp, Homo sapien
ttccggcatgttttcggtttcgctg

SEQ ID NO: 4197080 - DNA, 25 bp, Homo sapien
gatcaccgatgaaaactggctgctg

SEQ ID NO: 4197081 - DNA, 25 bp, Homo sapien
tatttgtggaggttcccggcagagc

SEQ ID NO: 4197082 - DNA, 25 bp, Homo sapien
gcggcccgggaacatcagaagattg

SEQ ID NO: 4197083 - DNA, 25 bp, Homo sapien
gaatcctggtcacttgcgtcatcga

SEQ ID NO: 4197084 - DNA, 25 bp, Homo sapien
aacagctcagccataacttcaaggg

SEQ ID NO: 4197085 - DNA, 25 bp, Homo sapien
taaagacagttcagcagccagttct

SEQ ID NO: 4197086 - DNA, 25 bp, Homo sapien
gagcccttaagtctgtctggaatag

SEQ ID NO: 4197087 - DNA, 25 bp, Homo sapien
gcagcacaggtaatcacaggtaaat

SEQ ID NO: 4197088 - DNA, 25 bp, Homo sapien
tcacactggtgatcaaagggtagaa

SEQ ID NO: 4197089 - DNA, 25 bp, Homo sapien
aggtcacgctgaaactgcattccgg

SEQ ID NO: 4197090 - DNA, 25 bp, Homo sapien
gaatcatgagttccggctttccagg

SEQ ID NO: 4197091 - DNA, 25 bp, Homo sapien
gggctgcataatctccaacaaggct

SEQ ID NO: 4197092 - DNA, 25 bp, Homo sapien
catcacacttgtagacagaaaccgg

SEQ ID NO: 4197093 - DNA, 25 bp, Homo sapien
atgtcctttcctgggcgtttaaatg

SEQ ID NO: 4197094 - DNA, 25 bp, Homo sapien
ccttccaatcttcgataaccttggg

SEQ ID NO: 4197095 - DNA, 25 bp, Homo sapien
gagtcctttgagctacttcttcaca

SEQ ID NO: 4197096 - DNA, 25 bp, Homo sapien
tctagaattatcagcatacaagtcc

SEQ ID NO: 4197097 - DNA, 25 bp, Homo sapien
gacaaggctgtcttaaaacggctct

SEQ ID NO: 4197098 - DNA, 25 bp, Homo sapien
atccacatataagggctgggagaga

SEQ ID NO: 4197099 - DNA, 25 bp, Homo sapien
aaatgattttcgtaagccctttgtg

SEQ ID NO: 4197100 - DNA, 25 bp, Homo sapien
gaataagctattttaatcaagcaaa

SEQ ID NO: 4197101 - DNA, 25 bp, Homo sapien
ggaataagctattttaatcaagcaa

SEQ ID NO: 4197102 - DNA, 25 bp, Homo sapien
tgtaagtaggtaccacggaatgtaa

SEQ ID NO: 4197103 - DNA, 25 bp, Homo sapien
tccatttgactcctaagcatgtaag

SEQ ID NO: 4197104 - DNA, 25 bp, Homo sapien
tcctaatgtcataatccatttgact

SEQ ID NO: 4197105 - DNA, 25 bp, Homo sapien
taaactgaataatacgtggaaacaa

SEQ ID NO: 4197106 - DNA, 25 bp, Homo sapien
gcccactgggacaaactgcaggcat

SEQ ID NO: 4197107 - DNA, 25 bp, Homo sapien
cacggatgagtggagcagaatgctt

SEQ ID NO: 4197108 - DNA, 25 bp, Homo sapien
tagcctatgtaaagacattgcccag

SEQ ID NO: 4197109 - DNA, 25 bp, Homo sapien
gcagacctaggttagcatcctggct

SEQ ID NO: 4197110 - DNA, 25 bp, Homo sapien
gcgattgctaggtcccactctgggt

SEQ ID NO: 4197111 - DNA, 25 bp, Homo sapien
ttcaatggtctgtaggtgcccaact

SEQ ID NO: 4197112 - DNA, 25 bp, Homo sapien
tttgagagggctggcaagtcagtcc

SEQ ID NO: 4197113 - DNA, 25 bp, Homo sapien
ggccctggccagtatgtgaagtaga

SEQ ID NO: 4197114 - DNA, 25 bp, Homo sapien
gcctctcagaccctacatcctccat

SEQ ID NO: 4197115 - DNA, 25 bp, Homo sapien
gcctgcttgttttccctgatgactc

SEQ ID NO: 4197116 - DNA, 25 bp, Homo sapien
cctggcttggcagcgcctgcttgtt

SEQ ID NO: 4197117 - DNA, 25 bp, Homo sapien
cctgatgactcagactccactctgg

SEQ ID NO: 4197118 - DNA, 25 bp, Homo sapien
cacagatgtgcaaagaagatgtagc

SEQ ID NO: 4197119 - DNA, 25 bp, Homo sapien
gatgtgcaaagaagatgtagcatct

SEQ ID NO: 4197120 - DNA, 25 bp, Homo sapien
ccacagatgtgcaaagaagatgtag

SEQ ID NO: 4197121 - DNA, 25 bp, Homo sapien
cagatgtgcaaagaagatgtagcat

SEQ ID NO: 4197122 - DNA, 25 bp, Homo sapien
aagctcgtggcctatcaaataatta

SEQ ID NO: 4197123 - DNA, 25 bp, Homo sapien
tggatatacagccacaaatgaaagc

SEQ ID NO: 4197124 - DNA, 25 bp, Homo sapien
caaatgaaagctcgtggcctatcaa

SEQ ID NO: 4197125 - DNA, 25 bp, Homo sapien
tacagccacaaatgaaagctcgtgg

SEQ ID NO: 4197126 - DNA, 25 bp, Homo sapien
tcgcgactgtcctggtccccggcct

SEQ ID NO: 4197127 - DNA, 25 bp, Homo sapien
gggctctgcagtcgcactcgccgct

SEQ ID NO: 4197128 - DNA, 25 bp, Homo sapien
tgcaacactcgaacctcgcgactgt

SEQ ID NO: 4197129 - DNA, 25 bp, Homo sapien
tcgccgctggcgcctcggaagaagc

SEQ ID NO: 4197130 - DNA, 25 bp, Homo sapien
gaaaattttacatcctgcccaggaa

SEQ ID NO: 4197131 - DNA, 25 bp, Homo sapien
gcagttacgtaccagtgagtctcca

SEQ ID NO: 4197132 - DNA, 25 bp, Homo sapien
tcttcaaagtgaaaagtacgccctc

SEQ ID NO: 4197133 - DNA, 25 bp, Homo sapien
tggcaacctgacaccaaagggtcgt

SEQ ID NO: 4197134 - DNA, 25 bp, Homo sapien
gaatatgttaagagccacactttac

SEQ ID NO: 4197135 - DNA, 25 bp, Homo sapien
tattgtgcctattatatctctaagc

SEQ ID NO: 4197136 - DNA, 25 bp, Homo sapien
gaagactgtacttgcttgtgtgtga

SEQ ID NO: 4197137 - DNA, 25 bp, Homo sapien
tgtgtgatatttgttcagggcctca

SEQ ID NO: 4197138 - DNA, 25 bp, Homo sapien
tgtggggtccaagatatggcaataa

SEQ ID NO: 4197139 - DNA, 25 bp, Homo sapien
ctggtccaaatttatggtacagaaa

SEQ ID NO: 4197140 - DNA, 25 bp, Homo sapien
tttatggtacagaaacaatctctca

SEQ ID NO: 4197141 - DNA, 25 bp, Homo sapien
cacaacttgggtacgataaacttct

SEQ ID NO: 4197142 - DNA, 25 bp, Homo sapien
gagtgagctaatgttcctggccaaa

SEQ ID NO: 4197143 - DNA, 25 bp, Homo sapien
cagcagtcctgtggatagaagatac

SEQ ID NO: 4197144 - DNA, 25 bp, Homo sapien
tctaagttgccagtatgagttctga

SEQ ID NO: 4197145 - DNA, 25 bp, Homo sapien
ccatttgagaggtgaggatagtgtc

SEQ ID NO: 4197146 - DNA, 25 bp, Homo sapien
ctatacggagatctctttgtaaaac

SEQ ID NO: 4197147 - DNA, 25 bp, Homo sapien
tgtaaaacattcttatcataaacat

SEQ ID NO: 4197148 - DNA, 25 bp, Homo sapien
ttggaatctcaaagtaaaattcttc

SEQ ID NO: 4197149 - DNA, 25 bp, Homo sapien
acggagatctctttgtaaaacattc

SEQ ID NO: 4197150 - DNA, 25 bp, Homo sapien
tcatttccagaaaatgctgtgtcag

SEQ ID NO: 4197151 - DNA, 25 bp, Homo sapien
caaaggcaacttctggaaatcataa

SEQ ID NO: 4197152 - DNA, 25 bp, Homo sapien
taatctacaattgagtggctccaaa

SEQ ID NO: 4197153 - DNA, 25 bp, Homo sapien
aagttatcacaccaacagttacagc

SEQ ID NO: 4197154 - DNA, 25 bp, Homo sapien
acagaaagagcttaaaaccaaacat

SEQ ID NO: 4197155 - DNA, 25 bp, Homo sapien
cagaaagagcttaaaaccaaacata

SEQ ID NO: 4197156 - DNA, 25 bp, Homo sapien
gacagaaagagcttaaaaccaaaca

SEQ ID NO: 4197157 - DNA, 25 bp, Homo sapien
agaaacaaacgtcccaacaaatcat

SEQ ID NO: 4197158 - DNA, 25 bp, Homo sapien
gtgcctctaatagtcccaaagattg

SEQ ID NO: 4197159 - DNA, 25 bp, Homo sapien
gcagccagattttgaaaccaaggca

SEQ ID NO: 4197160 - DNA, 25 bp, Homo sapien
tgtgcctcctctgcattagaatgac

SEQ ID NO: 4197161 - DNA, 25 bp, Homo sapien
aaacttgccgctaacaggtgctgca

SEQ ID NO: 4197162 - DNA, 25 bp, Homo sapien
ctgaattggagtcaacaggctgtaa

SEQ ID NO: 4197163 - DNA, 25 bp, Homo sapien
gccactgtgattacacaagtcttct

SEQ ID NO: 4197164 - DNA, 25 bp, Homo sapien
gaattggagtcaacaggctgtaatg

SEQ ID NO: 4197165 - DNA, 25 bp, Homo sapien
ttggagtcaacaggctgtaatgaaa

SEQ ID NO: 4197166 - DNA, 25 bp, Homo sapien
tacagttccattctccgttatcagt

SEQ ID NO: 4197167 - DNA, 25 bp, Homo sapien
cagttccattctccgttatcagttc

SEQ ID NO: 4197168 - DNA, 25 bp, Homo sapien
gttccattctccgttatcagttcat

SEQ ID NO: 4197169 - DNA, 25 bp, Homo sapien
tccattctccgttatcagttcattc

SEQ ID NO: 4197170 - DNA, 25 bp, Homo sapien
tctgcgattgatggccatttaagtt

SEQ ID NO: 4197171 - DNA, 25 bp, Homo sapien
cttgaagacataacaatagaaatca

SEQ ID NO: 4197172 - DNA, 25 bp, Homo sapien
aaaactcaacagataagctaaacag

SEQ ID NO: 4197173 - DNA, 25 bp, Homo sapien
aaaacaagaaagtctctgcaaaaga

SEQ ID NO: 4197174 - DNA, 25 bp, Homo sapien
taacgttttgtagaaccacagcaga

SEQ ID NO: 4197175 - DNA, 25 bp, Homo sapien
caattaaggtggcatctatcagaca

SEQ ID NO: 4197176 - DNA, 25 bp, Homo sapien
caatgcatcctattgggaagtactg

SEQ ID NO: 4197177 - DNA, 25 bp, Homo sapien
tacaggatcccatagtgcatttagt

SEQ ID NO: 4197178 - DNA, 25 bp, Homo sapien
caacaaggtacattttgcggtttga

SEQ ID NO: 4197179 - DNA, 25 bp, Homo sapien
tgagaagctacaaaccaagccagct

SEQ ID NO: 4197180 - DNA, 25 bp, Homo sapien
tgagactaaacaggaatgccacaat

SEQ ID NO: 4197181 - DNA, 25 bp, Homo sapien
agtctcaagcactgtagataaggga

SEQ ID NO: 4197182 - DNA, 25 bp, Homo sapien
gagatttaacatattagattccagt

SEQ ID NO: 4197183 - DNA, 25 bp, Homo sapien
aaagagatttaacatattagattcc

SEQ ID NO: 4197184 - DNA, 25 bp, Homo sapien
agagatttaacatattagattccag

SEQ ID NO: 4197185 - DNA, 25 bp, Homo sapien
taaaagagatttaacatattagatt

SEQ ID NO: 4197186 - DNA, 25 bp, Homo sapien
gagaaactgttgcataagggtcaca

SEQ ID NO: 4197187 - DNA, 25 bp, Homo sapien
ctagaagggcccactagagaaactg

SEQ ID NO: 4197188 - DNA, 25 bp, Homo sapien
tgagaggcaacccatggcatgcctt

SEQ ID NO: 4197189 - DNA, 25 bp, Homo sapien
gaggcaacccatggcatgccttgat

SEQ ID NO: 4197190 - DNA, 25 bp, Homo sapien
actagattgccaacctttttcaggg

SEQ ID NO: 4197191 - DNA, 25 bp, Homo sapien
tctctctacggacacactagattgc

SEQ ID NO: 4197192 - DNA, 25 bp, Homo sapien
taagctttaggcatcccctatgtgc

SEQ ID NO: 4197193 - DNA, 25 bp, Homo sapien
cttgggcttcaggtataatagagac

SEQ ID NO: 4197194 - DNA, 25 bp, Homo sapien
agatttcattaaactgcggattgct

SEQ ID NO: 4197195 - DNA, 25 bp, Homo sapien
tttcattaaactgcggattgcttgt

SEQ ID NO: 4197196 - DNA, 25 bp, Homo sapien
cattaaactgcggattgcttgtttt

SEQ ID NO: 4197197 - DNA, 25 bp, Homo sapien
attaaactgcggattgcttgttttc

SEQ ID NO: 4197198 - DNA, 25 bp, Homo sapien
gaaatcaactagcattaaatattac

SEQ ID NO: 4197199 - DNA, 25 bp, Homo sapien
tactatgactgtggtttgaaaaaag

SEQ ID NO: 4197200 - DNA, 25 bp, Homo sapien
aaaagaaatcaactagcattaaata

SEQ ID NO: 4197201 - DNA, 25 bp, Homo sapien
gataaaatgattactatgactgtgg

SEQ ID NO: 4197202 - DNA, 25 bp, Homo sapien
tccctacacgttgatatgaactgca

SEQ ID NO: 4197203 - DNA, 25 bp, Homo sapien
tgtctatgaagataagcaggcgtcc

SEQ ID NO: 4197204 - DNA, 25 bp, Homo sapien
caatcaggcatgactagaggtaccg

SEQ ID NO: 4197205 - DNA, 25 bp, Homo sapien
gaggtaccgttattctctccactgt

SEQ ID NO: 4197206 - DNA, 25 bp, Homo sapien
tttgcattctctcttttatctgcct

SEQ ID NO: 4197207 - DNA, 25 bp, Homo sapien
ctctctatttccatagcactctctt

SEQ ID NO: 4197208 - DNA, 25 bp, Homo sapien
tatttccatagcactctcttgaaag

SEQ ID NO: 4197209 - DNA, 25 bp, Homo sapien
tagcactctcttgaaagatacccca

SEQ ID NO: 4197210 - DNA, 25 bp, Homo sapien
ctggaactgggactttctggtgtaa

SEQ ID NO: 4197211 - DNA, 25 bp, Homo sapien
tacctggaactgggactttctggtg

SEQ ID NO: 4197212 - DNA, 25 bp, Homo sapien
tggaactgggactttctggtgtaac

SEQ ID NO: 4197213 - DNA, 25 bp, Homo sapien
cctggaactgggactttctggtgta

SEQ ID NO: 4197214 - DNA, 25 bp, Homo sapien
aatcagttcttaatacgttcacagg

SEQ ID NO: 4197215 - DNA, 25 bp, Homo sapien
caggaaccttaatctcacctaggaa

SEQ ID NO: 4197216 - DNA, 25 bp, Homo sapien
caggcttgatgagaggaatcagttc

SEQ ID NO: 4197217 - DNA, 25 bp, Homo sapien
gaaaacatcttggactaggtttcca

SEQ ID NO: 4197218 - DNA, 25 bp, Homo sapien
tactctgaaggaagcacgtagtctt

SEQ ID NO: 4197219 - DNA, 25 bp, Homo sapien
catatatttaatcgaagagacccca

SEQ ID NO: 4197220 - DNA, 25 bp, Homo sapien
agcacgtagtcttctgtataacata

SEQ ID NO: 4197221 - DNA, 25 bp, Homo sapien
gttttcaaaggaccatagtactctg

SEQ ID NO: 4197222 - DNA, 25 bp, Homo sapien
ttttatctcgacatatttcactcaa

SEQ ID NO: 4197223 - DNA, 25 bp, Homo sapien
atggtgcagcagcagtcgtacaagg

SEQ ID NO: 4197224 - DNA, 25 bp, Homo sapien
tcgtacaaggggcaaaacagcatca

SEQ ID NO: 4197225 - DNA, 25 bp, Homo sapien
aagtctaattcagccacagcagtgg

SEQ ID NO: 4197226 - DNA, 25 bp, Homo sapien
tcaggtagtgccctcccactatttt

SEQ ID NO: 4197227 - DNA, 25 bp, Homo sapien
ctttcaggtagtgccctcccactat

SEQ ID NO: 4197228 - DNA, 25 bp, Homo sapien
catcgggtagccagggaatttcctc

SEQ ID NO: 4197229 - DNA, 25 bp, Homo sapien
ttcatcatctcatccagacatcggg

SEQ ID NO: 4197230 - DNA, 25 bp, Homo sapien
tttctacattatctccctctttcaa

SEQ ID NO: 4197231 - DNA, 25 bp, Homo sapien
cacaggattttgaggagtcacatat

SEQ ID NO: 4197232 - DNA, 25 bp, Homo sapien
ctttcaatttaataggatcgatttc

SEQ ID NO: 4197233 - DNA, 25 bp, Homo sapien
gatcgatttcacaggattttgagga

SEQ ID NO: 4197234 - DNA, 25 bp, Homo sapien
gggcagctcatacttgattttacaa

SEQ ID NO: 4197235 - DNA, 25 bp, Homo sapien
ccttagagaataaaagatatcacac

SEQ ID NO: 4197236 - DNA, 25 bp, Homo sapien
tgtctacatagtagcgcagattctc

SEQ ID NO: 4197237 - DNA, 25 bp, Homo sapien
caattgtattgaataacttgtctac

SEQ ID NO: 4197238 - DNA, 25 bp, Homo sapien
tgtagtttggagtagactaggccca

SEQ ID NO: 4197239 - DNA, 25 bp, Homo sapien
acaatggaggctaacacactaacac

SEQ ID NO: 4197240 - DNA, 25 bp, Homo sapien
tatagagtatagtgaatggcagcat

SEQ ID NO: 4197241 - DNA, 25 bp, Homo sapien
tcacctaatgggagtagtacctacc

SEQ ID NO: 4197242 - DNA, 25 bp, Homo sapien
gatgaactgaagactactggtggct

SEQ ID NO: 4197243 - DNA, 25 bp, Homo sapien
gtggtaacactgaatcccttaagag

SEQ ID NO: 4197244 - DNA, 25 bp, Homo sapien
cagtaggtaaccattaacaagtcgt

SEQ ID NO: 4197245 - DNA, 25 bp, Homo sapien
tacaactttcgtttcagactggagt

SEQ ID NO: 4197246 - DNA, 25 bp, Homo sapien
ctgagttgatgaaatgatagtgata

SEQ ID NO: 4197247 - DNA, 25 bp, Homo sapien
tgaaatgatagtgatatttatgact

SEQ ID NO: 4197248 - DNA, 25 bp, Homo sapien
tgatatttatgactcaattaaaaga

SEQ ID NO: 4197249 - DNA, 25 bp, Homo sapien
aactgagttgatgaaatgatagtga

SEQ ID NO: 4197250 - DNA, 25 bp, Homo sapien
tgcagaatactgaacatgagggtca

SEQ ID NO: 4197251 - DNA, 25 bp, Homo sapien
ctgcagaatactgaacatgagggtc

SEQ ID NO: 4197252 - DNA, 25 bp, Homo sapien
gcagaatactgaacatgagggtcat

SEQ ID NO: 4197253 - DNA, 25 bp, Homo sapien
tacagcaaagaaacgaagaaataca

SEQ ID NO: 4197254 - DNA, 25 bp, Homo sapien
aaaagtatgaggtgatactacggct

SEQ ID NO: 4197255 - DNA, 25 bp, Homo sapien
gaggtgatactacggctacagcaaa

SEQ ID NO: 4197256 - DNA, 25 bp, Homo sapien
gctacagcaaagaaacgaagaaata

SEQ ID NO: 4197257 - DNA, 25 bp, Homo sapien
taccacgctttcactgcctcagagt

SEQ ID NO: 4197258 - DNA, 25 bp, Homo sapien
acagaatggacagccctgtgaacaa

SEQ ID NO: 4197259 - DNA, 25 bp, Homo sapien
tatcctttggcaagaaagggcgtgg

SEQ ID NO: 4197260 - DNA, 25 bp, Homo sapien
tgtccagaatgttgctaccacgctt

SEQ ID NO: 4197261 - DNA, 25 bp, Homo sapien
gtatccaccaacatctgttacagga

SEQ ID NO: 4197262 - DNA, 25 bp, Homo sapien
aacattttagctgtaacatctggga

SEQ ID NO: 4197263 - DNA, 25 bp, Homo sapien
ttaaagatgtcctggcacctgcact

SEQ ID NO: 4197264 - DNA, 25 bp, Homo sapien
tgactaaacggtgttccctcaggaa

SEQ ID NO: 4197265 - DNA, 25 bp, Homo sapien
tatttgggtctattatccaagaggt

SEQ ID NO: 4197266 - DNA, 25 bp, Homo sapien
caagaggtttttcaggcctgtctat

SEQ ID NO: 4197267 - DNA, 25 bp, Homo sapien
tatccaagaggtttttcaggcctgt

SEQ ID NO: 4197268 - DNA, 25 bp, Homo sapien
cagagggtgattatttgggtctatt

SEQ ID NO: 4197269 - DNA, 25 bp, Homo sapien
tcacctagttatttttggatcttac

SEQ ID NO: 4197270 - DNA, 25 bp, Homo sapien
ggagtgtagtggcataaccgcagct

SEQ ID NO: 4197271 - DNA, 25 bp, Homo sapien
gtggcataaccgcagctcactgtaa

SEQ ID NO: 4197272 - DNA, 25 bp, Homo sapien
tgtagtggcataaccgcagctcact

SEQ ID NO: 4197273 - DNA, 25 bp, Homo sapien
ggcataaccgcagctcactgtaacc

SEQ ID NO: 4197274 - DNA, 25 bp, Homo sapien
ttaatgttctaattgtctgtgcatc

SEQ ID NO: 4197275 - DNA, 25 bp, Homo sapien
gcttttggacagactcccccagctt

SEQ ID NO: 4197276 - DNA, 25 bp, Homo sapien
cttgcttttggacagactcccccag

SEQ ID NO: 4197277 - DNA, 25 bp, Homo sapien
gatgagagttaatgttctaattgtc

SEQ ID NO: 4197278 - DNA, 25 bp, Homo sapien
ctttttaactgctataatatatcct

SEQ ID NO: 4197279 - DNA, 25 bp, Homo sapien
cacatgaatgtctctttgaaacttg

SEQ ID NO: 4197280 - DNA, 25 bp, Homo sapien
ttcacacatgaatgtctctttgaaa

SEQ ID NO: 4197281 - DNA, 25 bp, Homo sapien
ttttaactgctataatatatccttc

SEQ ID NO: 4197282 - DNA, 25 bp, Homo sapien
taaatatcctgaaacgcacaagcca

SEQ ID NO: 4197283 - DNA, 25 bp, Homo sapien
tggaggcatgtttggctgtcaaaac

SEQ ID NO: 4197284 - DNA, 25 bp, Homo sapien
gatgattcaggactaaagactcaag

SEQ ID NO: 4197285 - DNA, 25 bp, Homo sapien
gagaaatcctaaccctagacatctg

SEQ ID NO: 4197286 - DNA, 25 bp, Homo sapien
cactgtgtgataaggtacattataa

SEQ ID NO: 4197287 - DNA, 25 bp, Homo sapien
ttaattataatgggaagttcttcat

SEQ ID NO: 4197288 - DNA, 25 bp, Homo sapien
cattattaatgaatacacataatag

SEQ ID NO: 4197289 - DNA, 25 bp, Homo sapien
caaatgacaagtattataaaagtat

SEQ ID NO: 4197290 - DNA, 25 bp, Homo sapien
tgcacaggctcactcgtaccactgg

SEQ ID NO: 4197291 - DNA, 25 bp, Homo sapien
tagtttcagtagatgaaatttcatc

SEQ ID NO: 4197292 - DNA, 25 bp, Homo sapien
acaggctcactcgtaccactggact

SEQ ID NO: 4197293 - DNA, 25 bp, Homo sapien
aggtgcacaggctcactcgtaccac

SEQ ID NO: 4197294 - DNA, 25 bp, Homo sapien
tgtttttgctatccatgactgttgc

SEQ ID NO: 4197295 - DNA, 25 bp, Homo sapien
taaaggcgacttacctgactgctaa

SEQ ID NO: 4197296 - DNA, 25 bp, Homo sapien
ttggcagttctaacacagcacacaa

SEQ ID NO: 4197297 - DNA, 25 bp, Homo sapien
aacaactctaggactgtatgcacag

SEQ ID NO: 4197298 - DNA, 25 bp, Homo sapien
ctgccaacataacagatgtaaacat

SEQ ID NO: 4197299 - DNA, 25 bp, Homo sapien
gccaacataacagatgtaaacattt

SEQ ID NO: 4197300 - DNA, 25 bp, Homo sapien
tgccaacataacagatgtaaacatt

SEQ ID NO: 4197301 - DNA, 25 bp, Homo sapien
caacataacagatgtaaacatttag

SEQ ID NO: 4197302 - DNA, 25 bp, Homo sapien
gcttgttaagcagaaccatcgtttc

SEQ ID NO: 4197303 - DNA, 25 bp, Homo sapien
aggtgagctctctgcttgttaagca

SEQ ID NO: 4197304 - DNA, 25 bp, Homo sapien
caatccgagttcttccttgagctct

SEQ ID NO: 4197305 - DNA, 25 bp, Homo sapien
ttttccaatccgagttcttccttga

SEQ ID NO: 4197306 - DNA, 25 bp, Homo sapien
tctactgaaggataagctttgcctc

SEQ ID NO: 4197307 - DNA, 25 bp, Homo sapien
ttcactagagtcacaataagcggca

SEQ ID NO: 4197308 - DNA, 25 bp, Homo sapien
caacagagtcttctcacaaggcaaa

SEQ ID NO: 4197309 - DNA, 25 bp, Homo sapien
tggccttctgtggaaaattaaccca

SEQ ID NO: 4197310 - DNA, 25 bp, Homo sapien
ggtactctgttaagcctgcgccctt

SEQ ID NO: 4197311 - DNA, 25 bp, Homo sapien
ctggttaagccattcctaaggaaga

SEQ ID NO: 4197312 - DNA, 25 bp, Homo sapien
gcctctaaaaaggagacgcatacct

SEQ ID NO: 4197313 - DNA, 25 bp, Homo sapien
aaagtaagtgcccactaccaagagg

SEQ ID NO: 4197314 - DNA, 25 bp, Homo sapien
tatctctttaacactccaggcatgc

SEQ ID NO: 4197315 - DNA, 25 bp, Homo sapien
ttctactgctaccaacagatccaag

SEQ ID NO: 4197316 - DNA, 25 bp, Homo sapien
cacaaggtcctataaaatctagcac

SEQ ID NO: 4197317 - DNA, 25 bp, Homo sapien
ggttcactccccgaccatctttaga

SEQ ID NO: 4197318 - DNA, 25 bp, Homo sapien
tgcttttcactagcccctttggagg

SEQ ID NO: 4197319 - DNA, 25 bp, Homo sapien
cctttgaggcggacagaaactgaag

SEQ ID NO: 4197320 - DNA, 25 bp, Homo sapien
tcaaactggctagactgggagtgct

SEQ ID NO: 4197321 - DNA, 25 bp, Homo sapien
gaggtccctcttgcattagcggttt

SEQ ID NO: 4197322 - DNA, 25 bp, Homo sapien
tattttatgtctaagtgcggtttcc

SEQ ID NO: 4197323 - DNA, 25 bp, Homo sapien
tccttctaggacaccaaccatgcat

SEQ ID NO: 4197324 - DNA, 25 bp, Homo sapien
aactgtactgttgttcccctgtgta

SEQ ID NO: 4197325 - DNA, 25 bp, Homo sapien
gatattgtactaaagggtcactgag

SEQ ID NO: 4197326 - DNA, 25 bp, Homo sapien
tcatgcctgtttataccccaatcgg

SEQ ID NO: 4197327 - DNA, 25 bp, Homo sapien
ctactgagtggtataaccatgacca

SEQ ID NO: 4197328 - DNA, 25 bp, Homo sapien
taaggtgagcctatttgacatatca

SEQ ID NO: 4197329 - DNA, 25 bp, Homo sapien
taccaataaaatccctcatgcctgt

SEQ ID NO: 4197330 - DNA, 25 bp, Homo sapien
cgtgcccagccttctttggttaaat

SEQ ID NO: 4197331 - DNA, 25 bp, Homo sapien
acattgagcagaagactgacacctc

SEQ ID NO: 4197332 - DNA, 25 bp, Homo sapien
cgagctgtctaataaggagcgcaac

SEQ ID NO: 4197333 - DNA, 25 bp, Homo sapien
gaaggctgtgaccaagtaggtcgcc

SEQ ID NO: 4197334 - DNA, 25 bp, Homo sapien
gagcgcaacctgctccttattagaa

SEQ ID NO: 4197335 - DNA, 25 bp, Homo sapien
aagttttactggctggaggttacag

SEQ ID NO: 4197336 - DNA, 25 bp, Homo sapien
ttccattatccccaagttaggcaat

SEQ ID NO: 4197337 - DNA, 25 bp, Homo sapien
cccaagttaggcaatgaaaatacaa

SEQ ID NO: 4197338 - DNA, 25 bp, Homo sapien
ggctggaggttacagattccattta

SEQ ID NO: 4197339 - DNA, 25 bp, Homo sapien
cagaaaacttatcagccataaagcc

SEQ ID NO: 4197340 - DNA, 25 bp, Homo sapien
gataggcaaggatgcaaaatcatta

SEQ ID NO: 4197341 - DNA, 25 bp, Homo sapien
gccaaagaaatcagtaaaattgata

SEQ ID NO: 4197342 - DNA, 25 bp, Homo sapien
atcagccataaagcctatctgaaag

SEQ ID NO: 4197343 - DNA, 25 bp, Homo sapien
aaggaagccatagtctaagccagat

SEQ ID NO: 4197344 - DNA, 25 bp, Homo sapien
cagcaatctcctagaatcagacgag

SEQ ID NO: 4197345 - DNA, 25 bp, Homo sapien
gaagagtttcaagccagagccagtg

SEQ ID NO: 4197346 - DNA, 25 bp, Homo sapien
gcactcagacatacatcaggatgat

SEQ ID NO: 4197347 - DNA, 25 bp, Homo sapien
gaggagttactatgtaagcagtgac

SEQ ID NO: 4197348 - DNA, 25 bp, Homo sapien
cagtgactatgactacctatgtgca

SEQ ID NO: 4197349 - DNA, 25 bp, Homo sapien
aaaaatagactcagcaaaagaggcc

SEQ ID NO: 4197350 - DNA, 25 bp, Homo sapien
gatctctgtgtagaacgtaagaaag

SEQ ID NO: 4197351 - DNA, 25 bp, Homo sapien
ctgggattgtgtagattgcatcttt

SEQ ID NO: 4197352 - DNA, 25 bp, Homo sapien
tgggattgtgtagattgcatctttg

SEQ ID NO: 4197353 - DNA, 25 bp, Homo sapien
gggattgtgtagattgcatctttgc

SEQ ID NO: 4197354 - DNA, 25 bp, Homo sapien
tgattgcatcggctcaccctgcaga

SEQ ID NO: 4197355 - DNA, 25 bp, Homo sapien
gacagcagagccaatttccgttcag

SEQ ID NO: 4197356 - DNA, 25 bp, Homo sapien
cagtacatggcttgcagccgagagt

SEQ ID NO: 4197357 - DNA, 25 bp, Homo sapien
tttcaccagtctcctgacagcagag

SEQ ID NO: 4197358 - DNA, 25 bp, Homo sapien
ttctgcagcttaagtaaactgaggg

SEQ ID NO: 4197359 - DNA, 25 bp, Homo sapien
aatatctatttggatgtctgcaggg

SEQ ID NO: 4197360 - DNA, 25 bp, Homo sapien
catcaatatctatttggatgtctgc

SEQ ID NO: 4197361 - DNA, 25 bp, Homo sapien
gcagcttaagtaaactgagggtaaa

SEQ ID NO: 4197362 - DNA, 25 bp, Homo sapien
tgatagactgcaatagttccacaag

SEQ ID NO: 4197363 - DNA, 25 bp, Homo sapien
gaatcctcgattacaaagttagaat

SEQ ID NO: 4197364 - DNA, 25 bp, Homo sapien
tctgtggtccttgatagactgcaat

SEQ ID NO: 4197365 - DNA, 25 bp, Homo sapien
ttgctcccatattttgcactactgg

SEQ ID NO: 4197366 - DNA, 25 bp, Homo sapien
gcagtatccatctacacctgaagtg

SEQ ID NO: 4197367 - DNA, 25 bp, Homo sapien
gggacttcattaacttgcttctaaa

SEQ ID NO: 4197368 - DNA, 25 bp, Homo sapien
gcaatctacataagctgtaaagtac

SEQ ID NO: 4197369 - DNA, 25 bp, Homo sapien
cccaataaatgcgagttgttgctgt

SEQ ID NO: 4197370 - DNA, 25 bp, Homo sapien
tgctttcccaacaattggattttcc

SEQ ID NO: 4197371 - DNA, 25 bp, Homo sapien
aagatgctttcccaacaattggatt

SEQ ID NO: 4197372 - DNA, 25 bp, Homo sapien
ctaagatgctttcccaacaattgga

SEQ ID NO: 4197373 - DNA, 25 bp, Homo sapien
gatgctttcccaacaattggatttt

SEQ ID NO: 4197374 - DNA, 25 bp, Homo sapien
gaacctgtaatgactgatggaccaa

SEQ ID NO: 4197375 - DNA, 25 bp, Homo sapien
cagaaccgaacactatgaggagggc

SEQ ID NO: 4197376 - DNA, 25 bp, Homo sapien
caatgttggcagtatagagcaggca

SEQ ID NO: 4197377 - DNA, 25 bp, Homo sapien
tgtttacatgttcttcgcaggcaga

SEQ ID NO: 4197378 - DNA, 25 bp, Homo sapien
ctgtcactttatattctccaggcat

SEQ ID NO: 4197379 - DNA, 25 bp, Homo sapien
gctgtcactttatattctccaggca

SEQ ID NO: 4197380 - DNA, 25 bp, Homo sapien
gtgctgtcactttatattctccagg

SEQ ID NO: 4197381 - DNA, 25 bp, Homo sapien
tggtgctgtcactttatattctcca

SEQ ID NO: 4197382 - DNA, 25 bp, Homo sapien
gcagacagctttggattacccaaaa

SEQ ID NO: 4197383 - DNA, 25 bp, Homo sapien
aaacaaggtctctgtagctcagaca

SEQ ID NO: 4197384 - DNA, 25 bp, Homo sapien
gcaaagtggagttccccttgcagac

SEQ ID NO: 4197385 - DNA, 25 bp, Homo sapien
acctgcttgtgtgctcaaggacctg

SEQ ID NO: 4197386 - DNA, 25 bp, Homo sapien
gcaaaggtaatagagaggagaagtc

SEQ ID NO: 4197387 - DNA, 25 bp, Homo sapien
ctgagcaaaggtaatagagaggaga

SEQ ID NO: 4197388 - DNA, 25 bp, Homo sapien
tgagcaaaggtaatagagaggagaa

SEQ ID NO: 4197389 - DNA, 25 bp, Homo sapien
agcaaaggtaatagagaggagaagt

SEQ ID NO: 4197390 - DNA, 25 bp, Homo sapien
gccagcagttctgagaaaagaggtt

SEQ ID NO: 4197391 - DNA, 25 bp, Homo sapien
tgcacgcttgcatgagtatccctag

SEQ ID NO: 4197392 - DNA, 25 bp, Homo sapien
tctgtgtacttctcgcccctggtag

SEQ ID NO: 4197393 - DNA, 25 bp, Homo sapien
ctctggagctcttgcgtggtaatgc

SEQ ID NO: 4197394 - DNA, 25 bp, Homo sapien
ctcctgtgtgtatcagtgacaccct

SEQ ID NO: 4197395 - DNA, 25 bp, Homo sapien
gaactcttctccgtgttcacacact

SEQ ID NO: 4197396 - DNA, 25 bp, Homo sapien
ccccagccgaactcttctccgtgtt

SEQ ID NO: 4197397 - DNA, 25 bp, Homo sapien
tctcctgtgtgtatcagtgacaccc

SEQ ID NO: 4197398 - DNA, 25 bp, Homo sapien
tagaggtgaacccttgcatggactt

SEQ ID NO: 4197399 - DNA, 25 bp, Homo sapien
caggtgtcctcctttaccaccaact

SEQ ID NO: 4197400 - DNA, 25 bp, Homo sapien
catggacttagatttagggccccaa

SEQ ID NO: 4197401 - DNA, 25 bp, Homo sapien
aatgactgccccgaacacaggtgtc

SEQ ID NO: 4197402 - DNA, 25 bp, Homo sapien
gaaatgcatatgaatgccctctgcg

SEQ ID NO: 4197403 - DNA, 25 bp, Homo sapien
gcttctagaactctggtccactttg

SEQ ID NO: 4197404 - DNA, 25 bp, Homo sapien
tctccctcggtgtcaggaccgttgt

SEQ ID NO: 4197405 - DNA, 25 bp, Homo sapien
gttagctcgcatccctgcttctaga

SEQ ID NO: 4197406 - DNA, 25 bp, Homo sapien
gcctgccatgatgcttcctgtttcc

SEQ ID NO: 4197407 - DNA, 25 bp, Homo sapien
tgcctgccatgatgcttcctgtttc

SEQ ID NO: 4197408 - DNA, 25 bp, Homo sapien
tgcctgtcccgggtgggcagatccg

SEQ ID NO: 4197409 - DNA, 25 bp, Homo sapien
gcagatccgcaggactgggcagaaa

SEQ ID NO: 4197410 - DNA, 25 bp, Homo sapien
ctctgtcagtgaacgagagttagaa

SEQ ID NO: 4197411 - DNA, 25 bp, Homo sapien
tagaaacaagtgtccagtaagcctg

SEQ ID NO: 4197412 - DNA, 25 bp, Homo sapien
tgaagtattgcatggtcctctaaag

SEQ ID NO: 4197413 - DNA, 25 bp, Homo sapien
agcatgaagtattgcatggtcctct

SEQ ID NO: 4197414 - DNA, 25 bp, Homo sapien
gaagtattgcatggtcctctaaaga

SEQ ID NO: 4197415 - DNA, 25 bp, Homo sapien
catgaagtattgcatggtcctctaa

SEQ ID NO: 4197416 - DNA, 25 bp, Homo sapien
catcaccttgaccatagatgactct

SEQ ID NO: 4197417 - DNA, 25 bp, Homo sapien
ggtcactccatcaccttgaccatag

SEQ ID NO: 4197418 - DNA, 25 bp, Homo sapien
tggctgggtcactccatcaccttga

SEQ ID NO: 4197419 - DNA, 25 bp, Homo sapien
tcaccttgaccatagatgactctgc

SEQ ID NO: 4197420 - DNA, 25 bp, Homo sapien
tgcctttctgagaagcttgtaaaca

SEQ ID NO: 4197421 - DNA, 25 bp, Homo sapien
taacaaagaggagtgagatctccat

SEQ ID NO: 4197422 - DNA, 25 bp, Homo sapien
gcctttctgagaagcttgtaaacac

SEQ ID NO: 4197423 - DNA, 25 bp, Homo sapien
tgtgtatcattaacaaagaggagtg

SEQ ID NO: 4197424 - DNA, 25 bp, Homo sapien
cctcgcagttgctgttgaggcagca

SEQ ID NO: 4197425 - DNA, 25 bp, Homo sapien
cattccctggcagttgttggcaggt

SEQ ID NO: 4197426 - DNA, 25 bp, Homo sapien
gcagttgttggcaggtcctcgcagt

SEQ ID NO: 4197427 - DNA, 25 bp, Homo sapien
ggcaggtcctcgcagttgctgttga

SEQ ID NO: 4197428 - DNA, 25 bp, Homo sapien
ttgattatccaaggtgccacaggtc

SEQ ID NO: 4197429 - DNA, 25 bp, Homo sapien
agcccctgttgggaccattgctaaa

SEQ ID NO: 4197430 - DNA, 25 bp, Homo sapien
tagctctattgctcttatagcaggg

SEQ ID NO: 4197431 - DNA, 25 bp, Homo sapien
caaaccaatggtttgacccaatgtt

SEQ ID NO: 4197432 - DNA, 25 bp, Homo sapien
tgcaaagcgctgcagattcagaaat

SEQ ID NO: 4197433 - DNA, 25 bp, Homo sapien
gtccttgtggcagccgtgcaaagcg

SEQ ID NO: 4197434 - DNA, 25 bp, Homo sapien
cagccgtgcaaagcgctgcagattc

SEQ ID NO: 4197435 - DNA, 25 bp, Homo sapien
tcatgttgcgagtgtccttgtggca

SEQ ID NO: 4197436 - DNA, 25 bp, Homo sapien
gaccggcgtccctgttcatcagtgg

SEQ ID NO: 4197437 - DNA, 25 bp, Homo sapien
aagcagtgtcaggactggtcggaac

SEQ ID NO: 4197438 - DNA, 25 bp, Homo sapien
tggtgtcctcgctgcaggtcaaact

SEQ ID NO: 4197439 - DNA, 25 bp, Homo sapien
gagccgctaacacgatttcccaggg

SEQ ID NO: 4197440 - DNA, 25 bp, Homo sapien
cggctgcccgcgtggcgtccggcgc

SEQ ID NO: 4197441 - DNA, 25 bp, Homo sapien
gcgtccggcgccctggagactgcgg

SEQ ID NO: 4197442 - DNA, 25 bp, Homo sapien
cccgcgtggcgtccggcgccctgga

SEQ ID NO: 4197443 - DNA, 25 bp, Homo sapien
gtggcgtccggcgccctggagactg

SEQ ID NO: 4197444 - DNA, 25 bp, Homo sapien
tgaagaatcaaaacgatgggcaggg

SEQ ID NO: 4197445 - DNA, 25 bp, Homo sapien
ttttgaagaatcaaaacgatgggca

SEQ ID NO: 4197446 - DNA, 25 bp, Homo sapien
atgggcaggggtgcccctttagatt

SEQ ID NO: 4197447 - DNA, 25 bp, Homo sapien
gatgggcaggggtgcccctttagat

SEQ ID NO: 4197448 - DNA, 25 bp, Homo sapien
gcacctggtcactgtcaatgctgct

SEQ ID NO: 4197449 - DNA, 25 bp, Homo sapien
tcaggtcacttttgatggctggaca

SEQ ID NO: 4197450 - DNA, 25 bp, Homo sapien
tctgagactgcgcacagtgtttctc

SEQ ID NO: 4197451 - DNA, 25 bp, Homo sapien
ttttgatggctggacacacggacgt

SEQ ID NO: 4197452 - DNA, 25 bp, Homo sapien
catcttgaatggtcatgagcaaagg

SEQ ID NO: 4197453 - DNA, 25 bp, Homo sapien
gccagtgtgtaatgctcatcttgaa

SEQ ID NO: 4197454 - DNA, 25 bp, Homo sapien
ctgggttgctcagttgaaggcccca

SEQ ID NO: 4197455 - DNA, 25 bp, Homo sapien
gcagatctctttcgccagtgtgtaa

SEQ ID NO: 4197456 - DNA, 25 bp, Homo sapien
tgatttctagggtggtaaacgggca

SEQ ID NO: 4197457 - DNA, 25 bp, Homo sapien
tgcaaactactgaaccgcagagcct

SEQ ID NO: 4197458 - DNA, 25 bp, Homo sapien
tggtgtgccccttcaattccagaag

SEQ ID NO: 4197459 - DNA, 25 bp, Homo sapien
caagtcgctctagagaccacagatc

SEQ ID NO: 4197460 - DNA, 25 bp, Homo sapien
ctgagaaaatgctctcaagttcttc

SEQ ID NO: 4197461 - DNA, 25 bp, Homo sapien
tgaggccttgaagcctttggttgtt

SEQ ID NO: 4197462 - DNA, 25 bp, Homo sapien
caaatggcactctggctgatgaccg

SEQ ID NO: 4197463 - DNA, 25 bp, Homo sapien
accacagtaacgcagactgaggcct

SEQ ID NO: 4197464 - DNA, 25 bp, Homo sapien
gtaattgccatcaaggaacagctcg

SEQ ID NO: 4197465 - DNA, 25 bp, Homo sapien
gccagtgctccggaacattccaagt

SEQ ID NO: 4197466 - DNA, 25 bp, Homo sapien
cctgtgtctccgcaaagcctgctat

SEQ ID NO: 4197467 - DNA, 25 bp, Homo sapien
gggctggctggtcttccccctgtgt

SEQ ID NO: 4197468 - DNA, 25 bp, Homo sapien
actgttacagcttcagacgattttg

SEQ ID NO: 4197469 - DNA, 25 bp, Homo sapien
ggttcatagttgaacttcctctctg

SEQ ID NO: 4197470 - DNA, 25 bp, Homo sapien
ccctgaagtagttttcactgttaca

SEQ ID NO: 4197471 - DNA, 25 bp, Homo sapien
aatctggttcatagttgaacttcct

SEQ ID NO: 4197472 - DNA, 25 bp, Homo sapien
aaggaacagttgaaacgacaacaga

SEQ ID NO: 4197473 - DNA, 25 bp, Homo sapien
ggaacagttgaaacgacaacagaaa

SEQ ID NO: 4197474 - DNA, 25 bp, Homo sapien
aggaacagttgaaacgacaacagaa

SEQ ID NO: 4197475 - DNA, 25 bp, Homo sapien
gattcctagttcctgtatccccatg

SEQ ID NO: 4197476 - DNA, 25 bp, Homo sapien
aacttccaggcccacgattcctagt

SEQ ID NO: 4197477 - DNA, 25 bp, Homo sapien
ttgagcaccgatcaacttccaggcc

SEQ ID NO: 4197478 - DNA, 25 bp, Homo sapien
cacttgagcaccgatcaacttccag

SEQ ID NO: 4197479 - DNA, 25 bp, Homo sapien
ttgccccatgtacatgcctaagtca

SEQ ID NO: 4197480 - DNA, 25 bp, Homo sapien
gatttttgccccatgtacatgccta

SEQ ID NO: 4197481 - DNA, 25 bp, Homo sapien
ctccctgtcctaaatcctccaaaat

SEQ ID NO: 4197482 - DNA, 25 bp, Homo sapien
tacatgcctaagtcacttactggct

SEQ ID NO: 4197483 - DNA, 25 bp, Homo sapien
agaactgggagattgtggatagact

SEQ ID NO: 4197484 - DNA, 25 bp, Homo sapien
tcagcggacctcgtcagacacgatg

SEQ ID NO: 4197485 - DNA, 25 bp, Homo sapien
gagaagccctctgacattgatgaga

SEQ ID NO: 4197486 - DNA, 25 bp, Homo sapien
tcgtcagacacgatgagaagccctc

SEQ ID NO: 4197487 - DNA, 25 bp, Homo sapien
actttccatcagaccttcaattttc

SEQ ID NO: 4197488 - DNA, 25 bp, Homo sapien
accactttccatcagaccttcaatt

SEQ ID NO: 4197489 - DNA, 25 bp, Homo sapien
cactttccatcagaccttcaatttt

SEQ ID NO: 4197490 - DNA, 25 bp, Homo sapien
ccactttccatcagaccttcaattt

SEQ ID NO: 4197491 - DNA, 25 bp, Homo sapien
taaagtttgaatgaattccaataaa

SEQ ID NO: 4197492 - DNA, 25 bp, Homo sapien
catgttaaagtttgaatgaattcca

SEQ ID NO: 4197493 - DNA, 25 bp, Homo sapien
agtttgaatgaattccaataaacca

SEQ ID NO: 4197494 - DNA, 25 bp, Homo sapien
ttgaatgaattccaataaaccattt

SEQ ID NO: 4197495 - DNA, 25 bp, Homo sapien
gtcaatttcccttaagtaggcagag

SEQ ID NO: 4197496 - DNA, 25 bp, Homo sapien
cccagaacattgtttccaaggtcaa

SEQ ID NO: 4197497 - DNA, 25 bp, Homo sapien
cgcttcaagtatgttagcagcagcc

SEQ ID NO: 4197498 - DNA, 25 bp, Homo sapien
ccttaagtaggcagagtatttgatc

SEQ ID NO: 4197499 - DNA, 25 bp, Homo sapien
tctggagacctctttgcagattggg

SEQ ID NO: 4197500 - DNA, 25 bp, Homo sapien
tgatatctggagacctctttgcaga

SEQ ID NO: 4197501 - DNA, 25 bp, Homo sapien
gatatctggagacctctttgcagat

SEQ ID NO: 4197502 - DNA, 25 bp, Homo sapien
cctggtgaccaaggcccactgtgga

SEQ ID NO: 4197503 - DNA, 25 bp, Homo sapien
accaaggcccactgtggatacatct

SEQ ID NO: 4197504 - DNA, 25 bp, Homo sapien
gccctggtgaccaaggcccactgtg

SEQ ID NO: 4197505 - DNA, 25 bp, Homo sapien
gtgaccaaggcccactgtggataca

SEQ ID NO: 4197506 - DNA, 25 bp, Homo sapien
gggcactgtagctggttctgttacc

SEQ ID NO: 4197507 - DNA, 25 bp, Homo sapien
gttacctgtagccaaacactatctc

SEQ ID NO: 4197508 - DNA, 25 bp, Homo sapien
tgcagtatttaatcggaaacaggta

SEQ ID NO: 4197509 - DNA, 25 bp, Homo sapien
caaacactatctctatatgatgcag

SEQ ID NO: 4197510 - DNA, 25 bp, Homo sapien
tttatgcatagtgttagacttcttg

SEQ ID NO: 4197511 - DNA, 25 bp, Homo sapien
cttctttttatgcatagtgttagac

SEQ ID NO: 4197512 - DNA, 25 bp, Homo sapien
tgcatagtgttagacttcttgctat

SEQ ID NO: 4197513 - DNA, 25 bp, Homo sapien
ctttttatgcatagtgttagacttc

SEQ ID NO: 4197514 - DNA, 25 bp, Homo sapien
tctgccatcatgagcacccaaaggg

SEQ ID NO: 4197515 - DNA, 25 bp, Homo sapien
gtccttctcatggcctgctcagttc

SEQ ID NO: 4197516 - DNA, 25 bp, Homo sapien
gctcagttcccactccaccactgtg

SEQ ID NO: 4197517 - DNA, 25 bp, Homo sapien
tcctttggttcaccttcatgagggc

SEQ ID NO: 4197518 - DNA, 25 bp, Homo sapien
ctgtggagccgcccgacgggccaca

SEQ ID NO: 4197519 - DNA, 25 bp, Homo sapien
ggccgccagccaccgtggtgcctag

SEQ ID NO: 4197520 - DNA, 25 bp, Homo sapien
tgtggagccgcccgacgggccacag

SEQ ID NO: 4197521 - DNA, 25 bp, Homo sapien
cgcaggccgccagccaccgtggtgc

SEQ ID NO: 4197522 - DNA, 25 bp, Homo sapien
cggagacgttggcttggggaaggcg

SEQ ID NO: 4197523 - DNA, 25 bp, Homo sapien
cgcggagccgacggcggagacgttg

SEQ ID NO: 4197524 - DNA, 25 bp, Homo sapien
tggcttggggaaggcggaaggctag

SEQ ID NO: 4197525 - DNA, 25 bp, Homo sapien
cggagccgacggcggagacgttggc

SEQ ID NO: 4197526 - DNA, 25 bp, Homo sapien
caccgcgttccacttcttgagggag

SEQ ID NO: 4197527 - DNA, 25 bp, Homo sapien
cgacttggagcctgagctcccggag

SEQ ID NO: 4197528 - DNA, 25 bp, Homo sapien
tggaccctgcagatggcgcacgtat

SEQ ID NO: 4197529 - DNA, 25 bp, Homo sapien
catcttgtcgcctcccgacttggag

SEQ ID NO: 4197530 - DNA, 25 bp, Homo sapien
tttccgaggcttctgacggacgccc

SEQ ID NO: 4197531 - DNA, 25 bp, Homo sapien
cagcaggagcgtggctccgcgttcc

SEQ ID NO: 4197532 - DNA, 25 bp, Homo sapien
gccctggactcgcgtgcagcgctta

SEQ ID NO: 4197533 - DNA, 25 bp, Homo sapien
ccaggcagggcactttccgaggctt

SEQ ID NO: 4197534 - DNA, 25 bp, Homo sapien
aaaaagggacaatactgtgaggtat

SEQ ID NO: 4197535 - DNA, 25 bp, Homo sapien
tactgtgaggtatttatatattaag

SEQ ID NO: 4197536 - DNA, 25 bp, Homo sapien
gacaatactgtgaggtatttatata

SEQ ID NO: 4197537 - DNA, 25 bp, Homo sapien
tgtaaaaaagggacaatactgtgag

SEQ ID NO: 4197538 - DNA, 25 bp, Homo sapien
cactggcatttattaggttcagggc

SEQ ID NO: 4197539 - DNA, 25 bp, Homo sapien
tcagggcctcggaccaattacgaac

SEQ ID NO: 4197540 - DNA, 25 bp, Homo sapien
taccgatggtcatccagacaaggct

SEQ ID NO: 4197541 - DNA, 25 bp, Homo sapien
tgtggagccagatctacagtcaaat

SEQ ID NO: 4197542 - DNA, 25 bp, Homo sapien
tgctttgtatgcttccaataggttg

SEQ ID NO: 4197543 - DNA, 25 bp, Homo sapien
aagccttcctttagcaactcataag

SEQ ID NO: 4197544 - DNA, 25 bp, Homo sapien
tactttctaccctaagacacttgag

SEQ ID NO: 4197545 - DNA, 25 bp, Homo sapien
ccctaagacacttgagagttcctct

SEQ ID NO: 4197546 - DNA, 25 bp, Homo sapien
caagttttttaaagtcatccatact

SEQ ID NO: 4197547 - DNA, 25 bp, Homo sapien
gtttgttttcagcttgacatctaag

SEQ ID NO: 4197548 - DNA, 25 bp, Homo sapien
ttgttttcagcttgacatctaagac

SEQ ID NO: 4197549 - DNA, 25 bp, Homo sapien
cacagtcctcttgtttgttttcagc

SEQ ID NO: 4197550 - DNA, 25 bp, Homo sapien
ttttcagcttgacatctaagacagg

SEQ ID NO: 4197551 - DNA, 25 bp, Homo sapien
tgtggaaggaatgattacattctcc

SEQ ID NO: 4197552 - DNA, 25 bp, Homo sapien
agggacatgcagcagttgtggaagg

SEQ ID NO: 4197553 - DNA, 25 bp, Homo sapien
tcacccacagggacatgcagcagtt

SEQ ID NO: 4197554 - DNA, 25 bp, Homo sapien
gaaggaatgattacattctccccag

SEQ ID NO: 4197555 - DNA, 25 bp, Homo sapien
tgccgattctttggaccacccagtc

SEQ ID NO: 4197556 - DNA, 25 bp, Homo sapien
cagagagggcagcgattgttctgtt

SEQ ID NO: 4197557 - DNA, 25 bp, Homo sapien
tcatttgccgattctttggaccacc

SEQ ID NO: 4197558 - DNA, 25 bp, Homo sapien
gattctttggaccacccagtcctgc

SEQ ID NO: 4197559 - DNA, 25 bp, Homo sapien
ggattacaagatccaccagggctct

SEQ ID NO: 4197560 - DNA, 25 bp, Homo sapien
aattcatcccctgtagtgttctagc

SEQ ID NO: 4197561 - DNA, 25 bp, Homo sapien
cacagaggtaggaaggaccaccttt

SEQ ID NO: 4197562 - DNA, 25 bp, Homo sapien
cttctaagctgtgtgcgcgacacac

SEQ ID NO: 4197563 - DNA, 25 bp, Homo sapien
agatttcatggaccgttccctctcc

SEQ ID NO: 4197564 - DNA, 25 bp, Homo sapien
ctgccaaaaatacgtattaggaaca

SEQ ID NO: 4197565 - DNA, 25 bp, Homo sapien
tccttatatcacataaagatttcat

SEQ ID NO: 4197566 - DNA, 25 bp, Homo sapien
atacgtattaggaacaaattaagag

SEQ ID NO: 4197567 - DNA, 25 bp, Homo sapien
cattaacatgttacctaaaacacag

SEQ ID NO: 4197568 - DNA, 25 bp, Homo sapien
gaatcaatgatacagaatagtaact

SEQ ID NO: 4197569 - DNA, 25 bp, Homo sapien
gatccaatgctacactggtaaacat

SEQ ID NO: 4197570 - DNA, 25 bp, Homo sapien
ctgtcctttaccactcaatgattga

SEQ ID NO: 4197571 - DNA, 25 bp, Homo sapien
tatgtatccacatcccttagattga

SEQ ID NO: 4197572 - DNA, 25 bp, Homo sapien
tcttaaattcatatcagtagcctct

SEQ ID NO: 4197573 - DNA, 25 bp, Homo sapien
cccctcagtgtgaatcagtttgata

SEQ ID NO: 4197574 - DNA, 25 bp, Homo sapien
gtattttcttgcactctttccaggt

SEQ ID NO: 4197575 - DNA, 25 bp, Homo sapien
ttccctcagatgctggtgtgtggca

SEQ ID NO: 4197576 - DNA, 25 bp, Homo sapien
tgagctgtaatcatcgcaggctgag

SEQ ID NO: 4197577 - DNA, 25 bp, Homo sapien
aattgtcccggcatgttccctctga

SEQ ID NO: 4197578 - DNA, 25 bp, Homo sapien
taagatttactgatagcggtcagct

SEQ ID NO: 4197579 - DNA, 25 bp, Homo sapien
tttgttgtactattcaaatgttcaa

SEQ ID NO: 4197580 - DNA, 25 bp, Homo sapien
aaaaacaagggctggcccagtgtga

SEQ ID NO: 4197581 - DNA, 25 bp, Homo sapien
aaaaaacaagggctggcccagtgtg

SEQ ID NO: 4197582 - DNA, 25 bp, Homo sapien
agtattttgttgtactattcaaatg

SEQ ID NO: 4197583 - DNA, 25 bp, Homo sapien
cagttgcacttaaccatgtgctaga

SEQ ID NO: 4197584 - DNA, 25 bp, Homo sapien
tggctgtactgccactaagtgagag

SEQ ID NO: 4197585 - DNA, 25 bp, Homo sapien
tttatatagttagtcctcaatcccc

SEQ ID NO: 4197586 - DNA, 25 bp, Homo sapien
tattatctaccttgcacatgaagaa

SEQ ID NO: 4197587 - DNA, 25 bp, Homo sapien
tttatcaagtgtacagataagatga

SEQ ID NO: 4197588 - DNA, 25 bp, Homo sapien
gtgcttgcttgtaaccaatacagga

SEQ ID NO: 4197589 - DNA, 25 bp, Homo sapien
ccaaccactgaatcagatttatcaa

SEQ ID NO: 4197590 - DNA, 25 bp, Homo sapien
gaaaagcagattccgttccaaccac

SEQ ID NO: 4197591 - DNA, 25 bp, Homo sapien
ttccaccagtgtcatcttaggcagg

SEQ ID NO: 4197592 - DNA, 25 bp, Homo sapien
gactgcctgcattcggaccattttc

SEQ ID NO: 4197593 - DNA, 25 bp, Homo sapien
gaatgtggattccagagccagactg

SEQ ID NO: 4197594 - DNA, 25 bp, Homo sapien
caatttggtccatggcagcaggtta

SEQ ID NO: 4197595 - DNA, 25 bp, Homo sapien
tggactagtaccagtccctggcctg

SEQ ID NO: 4197596 - DNA, 25 bp, Homo sapien
gcagaagggcttaacactttcacca

SEQ ID NO: 4197597 - DNA, 25 bp, Homo sapien
catgggagcgccaaccctattgtga

SEQ ID NO: 4197598 - DNA, 25 bp, Homo sapien
caaggaaccccagtattgagacatc

SEQ ID NO: 4197599 - DNA, 25 bp, Homo sapien
cattcctgctagcaatgaatgaaag

SEQ ID NO: 4197600 - DNA, 25 bp, Homo sapien
tgagcaaataccttagatgataggg

SEQ ID NO: 4197601 - DNA, 25 bp, Homo sapien
gaatgaaagagttccaattcctcta

SEQ ID NO: 4197602 - DNA, 25 bp, Homo sapien
gattttctgatgaggcataatgggc

SEQ ID NO: 4197603 - DNA, 25 bp, Homo sapien
gaaacacagcactatggcttcaggg

SEQ ID NO: 4197604 - DNA, 25 bp, Homo sapien
ttctgggctgttgtttgaccgaaac

SEQ ID NO: 4197605 - DNA, 25 bp, Homo sapien
gcttcagggtcatcaacggctattt

SEQ ID NO: 4197606 - DNA, 25 bp, Homo sapien
ggaagaatccaagcccatatttttc

SEQ ID NO: 4197607 - DNA, 25 bp, Homo sapien
ctgccaaggcgaaagctgctgggac

SEQ ID NO: 4197608 - DNA, 25 bp, Homo sapien
ctgctgggacacctgccggggccac

SEQ ID NO: 4197609 - DNA, 25 bp, Homo sapien
gctgggacacctgccggggccacct

SEQ ID NO: 4197610 - DNA, 25 bp, Homo sapien
tgctgggacacctgccggggccacc

SEQ ID NO: 4197611 - DNA, 25 bp, Homo sapien
ccgggtgagacaacgtccaagggat

SEQ ID NO: 4197612 - DNA, 25 bp, Homo sapien
cagggaaagcacaagagggctggag

SEQ ID NO: 4197613 - DNA, 25 bp, Homo sapien
gagacaacgtccaagggatttacag

SEQ ID NO: 4197614 - DNA, 25 bp, Homo sapien
cgtccaagggatttacagtgagtcc

SEQ ID NO: 4197615 - DNA, 25 bp, Homo sapien
gcggtgttggcgatcaggttgtcca

SEQ ID NO: 4197616 - DNA, 25 bp, Homo sapien
cagggacagcttctggcggagctcc

SEQ ID NO: 4197617 - DNA, 25 bp, Homo sapien
tctttgctgtcgcagtccgagggct

SEQ ID NO: 4197618 - DNA, 25 bp, Homo sapien
ctgcagctctttgctgtcgcagtcc

SEQ ID NO: 4197619 - DNA, 25 bp, Homo sapien
gaagaggcggcgaccgatgggctgc

SEQ ID NO: 4197620 - DNA, 25 bp, Homo sapien
ggaagaggcggcgaccgatgggctg

SEQ ID NO: 4197621 - DNA, 25 bp, Homo sapien
gaggcggcgaccgatgggctgctgc

SEQ ID NO: 4197622 - DNA, 25 bp, Homo sapien
aggcggcgaccgatgggctgctgct

SEQ ID NO: 4197623 - DNA, 25 bp, Homo sapien
tcctctaggaaggttgccgccttgc

SEQ ID NO: 4197624 - DNA, 25 bp, Homo sapien
cagcgcgctgtctttggtgggtccc

SEQ ID NO: 4197625 - DNA, 25 bp, Homo sapien
tgcagaaacttgtcgtagaaggcgc

SEQ ID NO: 4197626 - DNA, 25 bp, Homo sapien
ctgacactggttgcatctcgaagag

SEQ ID NO: 4197627 - DNA, 25 bp, Homo sapien
gatttccttttccaagagagccatc

SEQ ID NO: 4197628 - DNA, 25 bp, Homo sapien
cttgtccagtttcttacaggcatac

SEQ ID NO: 4197629 - DNA, 25 bp, Homo sapien
cttgctctcaaaggcataggccaga

SEQ ID NO: 4197630 - DNA, 25 bp, Homo sapien
tgggtcttgctctcaaaggcatagg

SEQ ID NO: 4197631 - DNA, 25 bp, Homo sapien
gccgagtaaaagatcacccggctca

SEQ ID NO: 4197632 - DNA, 25 bp, Homo sapien
ctgggccgagtaaaagatcacccgg

SEQ ID NO: 4197633 - DNA, 25 bp, Homo sapien
agtaaaagatcacccggctcatgtc

SEQ ID NO: 4197634 - DNA, 25 bp, Homo sapien
ggctcatgtccaggccacgcgtgcc

SEQ ID NO: 4197635 - DNA, 25 bp, Homo sapien
ggaggtgcagcatcccacaggctat

SEQ ID NO: 4197636 - DNA, 25 bp, Homo sapien
tgcagttgccgaggtcatccagaag

SEQ ID NO: 4197637 - DNA, 25 bp, Homo sapien
tagacgatgccgagttcatggaggt

SEQ ID NO: 4197638 - DNA, 25 bp, Homo sapien
caggcttcatgtcccgatagacgat

SEQ ID NO: 4197639 - DNA, 25 bp, Homo sapien
ctcctttccaactctgtgccccgca

SEQ ID NO: 4197640 - DNA, 25 bp, Homo sapien
ccgcacttggggcaggtggagagtc

SEQ ID NO: 4197641 - DNA, 25 bp, Homo sapien
tgccctgggaatagaaaagccctct

SEQ ID NO: 4197642 - DNA, 25 bp, Homo sapien
tatttgccctgggaatagaaaagcc

SEQ ID NO: 4197643 - DNA, 25 bp, Homo sapien
ccaaaggtctgtaggcagtgagcct

SEQ ID NO: 4197644 - DNA, 25 bp, Homo sapien
tacgttcctggtagcggacagcact

SEQ ID NO: 4197645 - DNA, 25 bp, Homo sapien
gaaaccttcctgcacgttccagatg

SEQ ID NO: 4197646 - DNA, 25 bp, Homo sapien
gcagtgagcctctctactaagtacg

SEQ ID NO: 4197647 - DNA, 25 bp, Homo sapien
aatgaccttacaatctacttgtgag

SEQ ID NO: 4197648 - DNA, 25 bp, Homo sapien
gctgcaatgaataggaaactaaggg

SEQ ID NO: 4197649 - DNA, 25 bp, Homo sapien
caatctacttgtgagcccaattata

SEQ ID NO: 4197650 - DNA, 25 bp, Homo sapien
cccaattatatgtgtgggagctgca

SEQ ID NO: 4197651 - DNA, 25 bp, Homo sapien
cattctgatctggagcccaaggtcc

SEQ ID NO: 4197652 - DNA, 25 bp, Homo sapien
ccaagtgtatgtggtgatggcagaa

SEQ ID NO: 4197653 - DNA, 25 bp, Homo sapien
taggtgtgatgaggtcaggcccacc

SEQ ID NO: 4197654 - DNA, 25 bp, Homo sapien
ggtcatggactcacaaggctaataa

SEQ ID NO: 4197655 - DNA, 25 bp, Homo sapien
agtggcctttgcagacctcggagga

SEQ ID NO: 4197656 - DNA, 25 bp, Homo sapien
gggcctggccgctttgttctcgttc

SEQ ID NO: 4197657 - DNA, 25 bp, Homo sapien
agctgctcctctgcgcctttaagca

SEQ ID NO: 4197658 - DNA, 25 bp, Homo sapien
gggcgcatcccatcagaggcggctt

SEQ ID NO: 4197659 - DNA, 25 bp, Homo sapien
tagctgtcactctgaaccgaactgg

SEQ ID NO: 4197660 - DNA, 25 bp, Homo sapien
aaaaagtatgagtgtgcgcaggtcc

SEQ ID NO: 4197661 - DNA, 25 bp, Homo sapien
tggacaaccaggaaccagactgtga

SEQ ID NO: 4197662 - DNA, 25 bp, Homo sapien
tgtgattaagatcccaagcccgtcc

SEQ ID NO: 4197663 - DNA, 25 bp, Homo sapien
ttatcccagtgaattctccattttt

SEQ ID NO: 4197664 - DNA, 25 bp, Homo sapien
tctccccatttgcccagtactaagt

SEQ ID NO: 4197665 - DNA, 25 bp, Homo sapien
tatcccagtgaattctccatttttt

SEQ ID NO: 4197666 - DNA, 25 bp, Homo sapien
actaagtccttgatctttagcattc

SEQ ID NO: 4197667 - DNA, 25 bp, Homo sapien
gaaccatagagaggttaaatcttgc

SEQ ID NO: 4197668 - DNA, 25 bp, Homo sapien
ccctatgagatagcgtccattttgc

SEQ ID NO: 4197669 - DNA, 25 bp, Homo sapien
ggattgtgaaacacatgctgagaga

SEQ ID NO: 4197670 - DNA, 25 bp, Homo sapien
tgatctccatagtaaccctatgaga

SEQ ID NO: 4197671 - DNA, 25 bp, Homo sapien
gcgagcttgctctgtgtggcacccg

SEQ ID NO: 4197672 - DNA, 25 bp, Homo sapien
ccaaacgaagttaagtcagtggcag

SEQ ID NO: 4197673 - DNA, 25 bp, Homo sapien
gtggcacccgtccaatgagcacatt

SEQ ID NO: 4197674 - DNA, 25 bp, Homo sapien
ggcagtcagtaagttctattcagca

SEQ ID NO: 4197675 - DNA, 25 bp, Homo sapien
tctgtctggttctttatgactctgc

SEQ ID NO: 4197676 - DNA, 25 bp, Homo sapien
ctgtctggttctttatgactctgct

SEQ ID NO: 4197677 - DNA, 25 bp, Homo sapien
tccagcttatcaactgacaagaggg

SEQ ID NO: 4197678 - DNA, 25 bp, Homo sapien
taccccacctgagaagtatcagcct

SEQ ID NO: 4197679 - DNA, 25 bp, Homo sapien
taagctatgtggagtccagcttatc

SEQ ID NO: 4197680 - DNA, 25 bp, Homo sapien
gatcaggtgggatatctccataccc

SEQ ID NO: 4197681 - DNA, 25 bp, Homo sapien
ttttccattaggatctcaggagcca

SEQ ID NO: 4197682 - DNA, 25 bp, Homo sapien
ggaatttgacctcgtcttgcagagt

SEQ ID NO: 4197683 - DNA, 25 bp, Homo sapien
ccagtccacaggataggaataactt

SEQ ID NO: 4197684 - DNA, 25 bp, Homo sapien
tttgaatggtgttcgtccagcaacc

SEQ ID NO: 4197685 - DNA, 25 bp, Homo sapien
tcttttgtaacagccaaagaggcag

SEQ ID NO: 4197686 - DNA, 25 bp, Homo sapien
aataggagaggctgttgctggaggc

SEQ ID NO: 4197687 - DNA, 25 bp, Homo sapien
ctttgaacaaataggagaggctgtt

SEQ ID NO: 4197688 - DNA, 25 bp, Homo sapien
ctggaggcagtatcttttgtaacag

SEQ ID NO: 4197689 - DNA, 25 bp, Homo sapien
tttcggcccatcattgtgcggtaca

SEQ ID NO: 4197690 - DNA, 25 bp, Homo sapien
tctttcggcccatcattgtgcggta

SEQ ID NO: 4197691 - DNA, 25 bp, Homo sapien
ctctttcggcccatcattgtgcggt

SEQ ID NO: 4197692 - DNA, 25 bp, Homo sapien
ctttcggcccatcattgtgcggtac

SEQ ID NO: 4197693 - DNA, 25 bp, Homo sapien
gcttgccatctaccagaaccgactg

SEQ ID NO: 4197694 - DNA, 25 bp, Homo sapien
gcaggcttgccatctaccagaaccg

SEQ ID NO: 4197695 - DNA, 25 bp, Homo sapien
aggcttgccatctaccagaaccgac

SEQ ID NO: 4197696 - DNA, 25 bp, Homo sapien
ctaccagaaccgactgccccagtgt

SEQ ID NO: 4197697 - DNA, 25 bp, Homo sapien
ttttctaaaagccaccaagtctcca

SEQ ID NO: 4197698 - DNA, 25 bp, Homo sapien
ccacttccagaaaggtctatccgga

SEQ ID NO: 4197699 - DNA, 25 bp, Homo sapien
cctggatcaaaaggtgctacaaggg

SEQ ID NO: 4197700 - DNA, 25 bp, Homo sapien
tcccactgtgtatggagacctggat

SEQ ID NO: 4197701 - DNA, 25 bp, Homo sapien
cagcacctgtcgcaaagtttttgaa

SEQ ID NO: 4197702 - DNA, 25 bp, Homo sapien
tcctgccatgctataggaacagcac

SEQ ID NO: 4197703 - DNA, 25 bp, Homo sapien
tcctcacaacccgtaggtctgttgg

SEQ ID NO: 4197704 - DNA, 25 bp, Homo sapien
gcttccaggcgaggaaagttgatcg

SEQ ID NO: 4197705 - DNA, 25 bp, Homo sapien
cgaggattatgtcagccgagactcc

SEQ ID NO: 4197706 - DNA, 25 bp, Homo sapien
ggactttgcgtaatacacagggaca

SEQ ID NO: 4197707 - DNA, 25 bp, Homo sapien
gaccgagctcccaagatacgtgtga

SEQ ID NO: 4197708 - DNA, 25 bp, Homo sapien
ttgaaatagccaagagaccgagctc

SEQ ID NO: 4197709 - DNA, 25 bp, Homo sapien
gaccggcacttttgcagctcttgaa

SEQ ID NO: 4197710 - DNA, 25 bp, Homo sapien
taaatgtctaacgtctataaagccc

SEQ ID NO: 4197711 - DNA, 25 bp, Homo sapien
tgggcagccacttgaaatgatggtt

SEQ ID NO: 4197712 - DNA, 25 bp, Homo sapien
gaaatctaagcatcctaggttagga

SEQ ID NO: 4197713 - DNA, 25 bp, Homo sapien
ctttgtggtaactaagtgtccctga

SEQ ID NO: 4197714 - DNA, 25 bp, Homo sapien
ccagcagcaaacactggaacgtctt

SEQ ID NO: 4197715 - DNA, 25 bp, Homo sapien
taagtgtccctgagtgccagctgaa

SEQ ID NO: 4197716 - DNA, 25 bp, Homo sapien
ccagctgaatgtgcgggcggcagtg

SEQ ID NO: 4197717 - DNA, 25 bp, Homo sapien
atccaatctggttgtgtcttgtagc

SEQ ID NO: 4197718 - DNA, 25 bp, Homo sapien
gacatgcgccagattagccttctcc

SEQ ID NO: 4197719 - DNA, 25 bp, Homo sapien
atttgttaaaacagcgttcaccgag

SEQ ID NO: 4197720 - DNA, 25 bp, Homo sapien
gctgcctcactggttatgacatgcg

SEQ ID NO: 4197721 - DNA, 25 bp, Homo sapien
ggtgcagacaagagcatctgaatgt

SEQ ID NO: 4197722 - DNA, 25 bp, Homo sapien
cagacaagagcatctgaatgtttgt

SEQ ID NO: 4197723 - DNA, 25 bp, Homo sapien
gacaagagcatctgaatgtttgttt

SEQ ID NO: 4197724 - DNA, 25 bp, Homo sapien
tgcagacaagagcatctgaatgttt

SEQ ID NO: 4197725 - DNA, 25 bp, Homo sapien
catgtagggaatgtgaaagggctga

SEQ ID NO: 4197726 - DNA, 25 bp, Homo sapien
atgtagggaatgtgaaagggctgat

SEQ ID NO: 4197727 - DNA, 25 bp, Homo sapien
catgacagagaagaactcgtgaaac

SEQ ID NO: 4197728 - DNA, 25 bp, Homo sapien
cagagaagaactcgtgaaacacact

SEQ ID NO: 4197729 - DNA, 25 bp, Homo sapien
agaactcgtgaaacacactgtctcc

SEQ ID NO: 4197730 - DNA, 25 bp, Homo sapien
tcttccatgacagagaagaactcgt

SEQ ID NO: 4197731 - DNA, 25 bp, Homo sapien
gggatggctttcgactcctctattg

SEQ ID NO: 4197732 - DNA, 25 bp, Homo sapien
attggtttctcccatacagcctcac

SEQ ID NO: 4197733 - DNA, 25 bp, Homo sapien
gactcctctattggtttctcccata

SEQ ID NO: 4197734 - DNA, 25 bp, Homo sapien
ggctttcgactcctctattggtttc

SEQ ID NO: 4197735 - DNA, 25 bp, Homo sapien
gggcatttaaactcagggcggccag

SEQ ID NO: 4197736 - DNA, 25 bp, Homo sapien
agggcatttaaactcagggcggcca

SEQ ID NO: 4197737 - DNA, 25 bp, Homo sapien
cagggcatttaaactcagggcggcc

SEQ ID NO: 4197738 - DNA, 25 bp, Homo sapien
ttttgttatcgctattgttatcaga

SEQ ID NO: 4197739 - DNA, 25 bp, Homo sapien
tgtttttgttatcgctattgttatc

SEQ ID NO: 4197740 - DNA, 25 bp, Homo sapien
gttatcgctattgttatcagaagtc

SEQ ID NO: 4197741 - DNA, 25 bp, Homo sapien
tcgctattgttatcagaagtcaaat

SEQ ID NO: 4197742 - DNA, 25 bp, Homo sapien
gcaatatcagtaagctcagcacctt

SEQ ID NO: 4197743 - DNA, 25 bp, Homo sapien
ctcccccatttcccacgcaccagac

SEQ ID NO: 4197744 - DNA, 25 bp, Homo sapien
cggcaatatcagtaagctcagcacc

SEQ ID NO: 4197745 - DNA, 25 bp, Homo sapien
tcagcaccttctcccccatttccca

SEQ ID NO: 4197746 - DNA, 25 bp, Homo sapien
cagtgaggcggttgttctctgtccc

SEQ ID NO: 4197747 - DNA, 25 bp, Homo sapien
tgtcccctccggtaactagattcgc

SEQ ID NO: 4197748 - DNA, 25 bp, Homo sapien
gctctgttcctaagtccctggtaat

SEQ ID NO: 4197749 - DNA, 25 bp, Homo sapien
tgtccttggcatagaatcacttgtc

SEQ ID NO: 4197750 - DNA, 25 bp, Homo sapien
cgtgtaggctttggtgctagctcca

SEQ ID NO: 4197751 - DNA, 25 bp, Homo sapien
gtcctgatcctctccgtgtaggctt

SEQ ID NO: 4197752 - DNA, 25 bp, Homo sapien
tttggtgctagctccagtgtcccgg

SEQ ID NO: 4197753 - DNA, 25 bp, Homo sapien
ctagctccagtgtcccgggttgagg

SEQ ID NO: 4197754 - DNA, 25 bp, Homo sapien
aactgtgtacttctggtgactgtac

SEQ ID NO: 4197755 - DNA, 25 bp, Homo sapien
ttgataactgtgtacttctggtgac

SEQ ID NO: 4197756 - DNA, 25 bp, Homo sapien
tcctggagatgccaagtgaagtgtc

SEQ ID NO: 4197757 - DNA, 25 bp, Homo sapien
gactgtacagtttgaaatactattt

SEQ ID NO: 4197758 - DNA, 25 bp, Homo sapien
aaactctccatacgttaaataccag

SEQ ID NO: 4197759 - DNA, 25 bp, Homo sapien
aatatgcccatgtactgtgccattt

SEQ ID NO: 4197760 - DNA, 25 bp, Homo sapien
taccggggctcggtggcttatgcct

SEQ ID NO: 4197761 - DNA, 25 bp, Homo sapien
cagaaactcactatcaaatttgatc

SEQ ID NO: 4197762 - DNA, 25 bp, Homo sapien
taataatagcaaaaggcgggcgtcc

SEQ ID NO: 4197763 - DNA, 25 bp, Homo sapien
gagagcacgaaaacgactccagtcg

SEQ ID NO: 4197764 - DNA, 25 bp, Homo sapien
gcgctgagaagatgctacccgcggc

SEQ ID NO: 4197765 - DNA, 25 bp, Homo sapien
tccccgcgccgcaggttgcttagga

SEQ ID NO: 4197766 - DNA, 25 bp, Homo sapien
aatccgaaggtttagtcgcacgcac

SEQ ID NO: 4197767 - DNA, 25 bp, Homo sapien
ccgccccgcagtagcctcgggggct

SEQ ID NO: 4197768 - DNA, 25 bp, Homo sapien
gccccgcagtagcctcgggggctcc

SEQ ID NO: 4197769 - DNA, 25 bp, Homo sapien
aaatccgaaggtttagtcgcacgca

SEQ ID NO: 4197770 - DNA, 25 bp, Homo sapien
gcggccgcttgggccgcgggagcct

SEQ ID NO: 4197771 - DNA, 25 bp, Homo sapien
gacggcagtgaagggtgggacggcc

SEQ ID NO: 4197772 - DNA, 25 bp, Homo sapien
ggtgtgcgcgcggacggcgagagga

SEQ ID NO: 4197773 - DNA, 25 bp, Homo sapien
gcccggagacggcagtgaagggtgg

SEQ ID NO: 4197774 - DNA, 25 bp, Homo sapien
gcgcagcccggagacggcagtgaag

SEQ ID NO: 4197775 - DNA, 25 bp, Homo sapien
attctccggtggtcgggttgtagat

SEQ ID NO: 4197776 - DNA, 25 bp, Homo sapien
cagctcttggcggtgcgccccagga

SEQ ID NO: 4197777 - DNA, 25 bp, Homo sapien
ctggttgagggacttcttctcgttc

SEQ ID NO: 4197778 - DNA, 25 bp, Homo sapien
tgcgccccaggaattctccggtggt

SEQ ID NO: 4197779 - DNA, 25 bp, Homo sapien
ggcatcctaaagctactctacacgg

SEQ ID NO: 4197780 - DNA, 25 bp, Homo sapien
gagctcacgcatagaaaaaatctgc

SEQ ID NO: 4197781 - DNA, 25 bp, Homo sapien
cactctcctgttttgaagacacggg

SEQ ID NO: 4197782 - DNA, 25 bp, Homo sapien
gcccaaatagttctaagctctcgag

SEQ ID NO: 4197783 - DNA, 25 bp, Homo sapien
tcaagagtttttggactatgagcca

SEQ ID NO: 4197784 - DNA, 25 bp, Homo sapien
aatctctggccttggagtctgaagc

SEQ ID NO: 4197785 - DNA, 25 bp, Homo sapien
attttgccacctatgaaatgaaggc

SEQ ID NO: 4197786 - DNA, 25 bp, Homo sapien
cactgggctagattagtggctttca

SEQ ID NO: 4197787 - DNA, 25 bp, Homo sapien
tagacaggagggcttttaagacttc

SEQ ID NO: 4197788 - DNA, 25 bp, Homo sapien
gcagaggaataaagaccattctcct

SEQ ID NO: 4197789 - DNA, 25 bp, Homo sapien
gaaaagttgttactatagacaggag

SEQ ID NO: 4197790 - DNA, 25 bp, Homo sapien
tcaaagaaatcgaattacatcaggg

SEQ ID NO: 4197791 - DNA, 25 bp, Homo sapien
agctgctgccttagaaataacccga

SEQ ID NO: 4197792 - DNA, 25 bp, Homo sapien
ggtcagcaaagccaacaataacgtg

SEQ ID NO: 4197793 - DNA, 25 bp, Homo sapien
ccgtgtagctacaacatagggtgca

SEQ ID NO: 4197794 - DNA, 25 bp, Homo sapien
taacccgacagcagtgggctacatt

SEQ ID NO: 4197795 - DNA, 25 bp, Homo sapien
tagtcatctgtaggaaacactctga

SEQ ID NO: 4197796 - DNA, 25 bp, Homo sapien
tgacaggaaacctgatagtcatctg

SEQ ID NO: 4197797 - DNA, 25 bp, Homo sapien
caattaggaatgtttacccatgcac

SEQ ID NO: 4197798 - DNA, 25 bp, Homo sapien
tactcaggtaaaggtagacaagaac

SEQ ID NO: 4197799 - DNA, 25 bp, Homo sapien
aaagacttatcagagactggataat

SEQ ID NO: 4197800 - DNA, 25 bp, Homo sapien
taaagacttatcagagactggataa

SEQ ID NO: 4197801 - DNA, 25 bp, Homo sapien
gaatcaagatacagatcaacaaaac

SEQ ID NO: 4197802 - DNA, 25 bp, Homo sapien
tatttacaagtataacaaaggctta

SEQ ID NO: 4197803 - DNA, 25 bp, Homo sapien
gtaagagttaagagacaagagaaca

SEQ ID NO: 4197804 - DNA, 25 bp, Homo sapien
gatggattatacaacatatagggat

SEQ ID NO: 4197805 - DNA, 25 bp, Homo sapien
aaacccatagccctagatgcattca

SEQ ID NO: 4197806 - DNA, 25 bp, Homo sapien
aataatgtaatcagagcagaactca

SEQ ID NO: 4197807 - DNA, 25 bp, Homo sapien
ttagaaagttgtatctcaatccctg

SEQ ID NO: 4197808 - DNA, 25 bp, Homo sapien
aaagccagatttttagctcaagact

SEQ ID NO: 4197809 - DNA, 25 bp, Homo sapien
taggtcttggctaacaaaagaaatg

SEQ ID NO: 4197810 - DNA, 25 bp, Homo sapien
gaagatacagcataatagccatgaa

SEQ ID NO: 4197811 - DNA, 25 bp, Homo sapien
ttcaccacaatcatgaccagagatg

SEQ ID NO: 4197812 - DNA, 25 bp, Homo sapien
cagagatgttaacatacctctccag

SEQ ID NO: 4197813 - DNA, 25 bp, Homo sapien
gatgtaaggattgcaaaaataagcc

SEQ ID NO: 4197814 - DNA, 25 bp, Homo sapien
gtgttccaaatcattagtcaccagg

SEQ ID NO: 4197815 - DNA, 25 bp, Homo sapien
gaccgtaccatgtaatgacccagaa

SEQ ID NO: 4197816 - DNA, 25 bp, Homo sapien
tctgaaccgaaacttcaccaagatg

SEQ ID NO: 4197817 - DNA, 25 bp, Homo sapien
ccagtaaaagaaatagaccagtatc

SEQ ID NO: 4197818 - DNA, 25 bp, Homo sapien
caaaaacccgatgaacatgtactgt

SEQ ID NO: 4197819 - DNA, 25 bp, Homo sapien
ccagggagtctcaagctctattgtc

SEQ ID NO: 4197820 - DNA, 25 bp, Homo sapien
tcaagtattctgtgttactcagggt

SEQ ID NO: 4197821 - DNA, 25 bp, Homo sapien
gacagcatcacttccctaccacata

SEQ ID NO: 4197822 - DNA, 25 bp, Homo sapien
agcatcacttccctaccacatactg

SEQ ID NO: 4197823 - DNA, 25 bp, Homo sapien
tcacttccctaccacatactgcgat

SEQ ID NO: 4197824 - DNA, 25 bp, Homo sapien
caggtggccaaaataaggatggaga

SEQ ID NO: 4197825 - DNA, 25 bp, Homo sapien
tcttgcaagggtacgatcccaagct

SEQ ID NO: 4197826 - DNA, 25 bp, Homo sapien
caactgttcttgcaagggtacgatc

SEQ ID NO: 4197827 - DNA, 25 bp, Homo sapien
caagctttgccatgcacatagccaa

SEQ ID NO: 4197828 - DNA, 25 bp, Homo sapien
gggtacgatcccaagctttgccatg

SEQ ID NO: 4197829 - DNA, 25 bp, Homo sapien
agagtgcagccaggaacccataaaa

SEQ ID NO: 4197830 - DNA, 25 bp, Homo sapien
gagtgcagccaggaacccataaaaa

SEQ ID NO: 4197831 - DNA, 25 bp, Homo sapien
ctggtcacggtattttggaacctca

SEQ ID NO: 4197832 - DNA, 25 bp, Homo sapien
gaatctggtcacggtattttggaac

SEQ ID NO: 4197833 - DNA, 25 bp, Homo sapien
atctggtcacggtattttggaacct

SEQ ID NO: 4197834 - DNA, 25 bp, Homo sapien
tggtcacggtattttggaacctcat

SEQ ID NO: 4197835 - DNA, 25 bp, Homo sapien
tgtatattccaatgcggtcactggt

SEQ ID NO: 4197836 - DNA, 25 bp, Homo sapien
gtatattccaatgcggtcactggtt

SEQ ID NO: 4197837 - DNA, 25 bp, Homo sapien
atgtatattccaatgcggtcactgg

SEQ ID NO: 4197838 - DNA, 25 bp, Homo sapien
aacataaactggacccttctgttca

SEQ ID NO: 4197839 - DNA, 25 bp, Homo sapien
gcaacataaactggacccttctgtt

SEQ ID NO: 4197840 - DNA, 25 bp, Homo sapien
acataaactggacccttctgttcaa

SEQ ID NO: 4197841 - DNA, 25 bp, Homo sapien
acccttctgttcaaaaagtgctcca

SEQ ID NO: 4197842 - DNA, 25 bp, Homo sapien
actgcatgcttgaagtaatgaaata

SEQ ID NO: 4197843 - DNA, 25 bp, Homo sapien
ctgcatgcttgaagtaatgaaatag

SEQ ID NO: 4197844 - DNA, 25 bp, Homo sapien
tgcatgcttgaagtaatgaaatagg

SEQ ID NO: 4197845 - DNA, 25 bp, Homo sapien
ctgctagtctttaaagcaagctacc

SEQ ID NO: 4197846 - DNA, 25 bp, Homo sapien
gatcaataaacattactgctagtct

SEQ ID NO: 4197847 - DNA, 25 bp, Homo sapien
gtgatcaataaacattactgctagt

SEQ ID NO: 4197848 - DNA, 25 bp, Homo sapien
caagctaccccccaaatgataactt

SEQ ID NO: 4197849 - DNA, 25 bp, Homo sapien
taagaactgcagaagcataataatt

SEQ ID NO: 4197850 - DNA, 25 bp, Homo sapien
tgaagactttgagattaacaccaag

SEQ ID NO: 4197851 - DNA, 25 bp, Homo sapien
tcagatatcttattactgtactggg

SEQ ID NO: 4197852 - DNA, 25 bp, Homo sapien
taagtatgcaatggaacttcctccc

SEQ ID NO: 4197853 - DNA, 25 bp, Homo sapien
aacacaatctatccttggcactcct

SEQ ID NO: 4197854 - DNA, 25 bp, Homo sapien
aaacacaatctatccttggcactcc

SEQ ID NO: 4197855 - DNA, 25 bp, Homo sapien
gaaacacaatctatccttggcactc

SEQ ID NO: 4197856 - DNA, 25 bp, Homo sapien
ggcaatgtgtgcaaaatcaaataca

SEQ ID NO: 4197857 - DNA, 25 bp, Homo sapien
tttattctaaggcactacaaaggac

SEQ ID NO: 4197858 - DNA, 25 bp, Homo sapien
acatcaaagatttaacaggagttac

SEQ ID NO: 4197859 - DNA, 25 bp, Homo sapien
agagaaagactacggttggtggaat

SEQ ID NO: 4197860 - DNA, 25 bp, Homo sapien
cactgatgactagcacgccaactaa

SEQ ID NO: 4197861 - DNA, 25 bp, Homo sapien
tcattaaatctcagatagcactgat

SEQ ID NO: 4197862 - DNA, 25 bp, Homo sapien
cagatagcactgatgactagcacgc

SEQ ID NO: 4197863 - DNA, 25 bp, Homo sapien
cttaaggaaaatgcaccatatttca

SEQ ID NO: 4197864 - DNA, 25 bp, Homo sapien
agttatgagatgaaaactgcacagt

SEQ ID NO: 4197865 - DNA, 25 bp, Homo sapien
aaagaaagttatgagatgaaaactg

SEQ ID NO: 4197866 - DNA, 25 bp, Homo sapien
aagttatgagatgaaaactgcacag

SEQ ID NO: 4197867 - DNA, 25 bp, Homo sapien
gaaagttatgagatgaaaactgcac

SEQ ID NO: 4197868 - DNA, 25 bp, Homo sapien
gaacggaacccaacaaggcaacatg

SEQ ID NO: 4197869 - DNA, 25 bp, Homo sapien
gagtcagaaactatgggaacggaac

SEQ ID NO: 4197870 - DNA, 25 bp, Homo sapien
tttggaccctatctcagacctactg

SEQ ID NO: 4197871 - DNA, 25 bp, Homo sapien
gtttctgcccaaataagaagtccat

SEQ ID NO: 4197872 - DNA, 25 bp, Homo sapien
taacagcaggaatgcaccagcaggt

SEQ ID NO: 4197873 - DNA, 25 bp, Homo sapien
aaaggacagagtgatgatgcgcccc

SEQ ID NO: 4197874 - DNA, 25 bp, Homo sapien
gctcagagttaaggccatcacggct

SEQ ID NO: 4197875 - DNA, 25 bp, Homo sapien
catcaattacggagcagggcactgg

SEQ ID NO: 4197876 - DNA, 25 bp, Homo sapien
gatacactctatactctctttcatg

SEQ ID NO: 4197877 - DNA, 25 bp, Homo sapien
ttatctaactaaccccttccacatg

SEQ ID NO: 4197878 - DNA, 25 bp, Homo sapien
gaaactacaatgctgctccaactat

SEQ ID NO: 4197879 - DNA, 25 bp, Homo sapien
tcatgagagtcccttctttaactca

SEQ ID NO: 4197880 - DNA, 25 bp, Homo sapien
tccattatgaggataaactgctaca

SEQ ID NO: 4197881 - DNA, 25 bp, Homo sapien
ggataaactgctacatttggtatat

SEQ ID NO: 4197882 - DNA, 25 bp, Homo sapien
ttccattatgaggataaactgctac

SEQ ID NO: 4197883 - DNA, 25 bp, Homo sapien
aactgctacatttggtatatcttca

SEQ ID NO: 4197884 - DNA, 25 bp, Homo sapien
ttaaacagggctggcgtctacctac

SEQ ID NO: 4197885 - DNA, 25 bp, Homo sapien
agtggtacgtcaacacatgctccag

SEQ ID NO: 4197886 - DNA, 25 bp, Homo sapien
cacccggccgcaatgagcttttgat

SEQ ID NO: 4197887 - DNA, 25 bp, Homo sapien
cctgaggtggtgcaaggcatcacgt

SEQ ID NO: 4197888 - DNA, 25 bp, Homo sapien
gccaggcagtaacgagctttttaat

SEQ ID NO: 4197889 - DNA, 25 bp, Homo sapien
gaaatgataccatgtccctcctgac

SEQ ID NO: 4197890 - DNA, 25 bp, Homo sapien
tcaaggcagtatcaccattaacgga

SEQ ID NO: 4197891 - DNA, 25 bp, Homo sapien
tagaaacctcgctcataccacctta

SEQ ID NO: 4197892 - DNA, 25 bp, Homo sapien
gaaacttaatacttctctctaccag

SEQ ID NO: 4197893 - DNA, 25 bp, Homo sapien
tattaattcaaactctatggaaact

SEQ ID NO: 4197894 - DNA, 25 bp, Homo sapien
ttctctctaccaggaattggcttat

SEQ ID NO: 4197895 - DNA, 25 bp, Homo sapien
aaactcctcgcttcaaatggccctt

SEQ ID NO: 4197896 - DNA, 25 bp, Homo sapien
acagcaaccaatggctgtagatacc

SEQ ID NO: 4197897 - DNA, 25 bp, Homo sapien
aacagcaaccaatggctgtagatac

SEQ ID NO: 4197898 - DNA, 25 bp, Homo sapien
gaacagcaaccaatggctgtagata

SEQ ID NO: 4197899 - DNA, 25 bp, Homo sapien
tgaacagcaaccaatggctgtagat

SEQ ID NO: 4197900 - DNA, 25 bp, Homo sapien
aggttggctgatccatcaatcttgc

SEQ ID NO: 4197901 - DNA, 25 bp, Homo sapien
ggttggctgatccatcaatcttgca

SEQ ID NO: 4197902 - DNA, 25 bp, Homo sapien
tattaagctttagacacttggcaat

SEQ ID NO: 4197903 - DNA, 25 bp, Homo sapien
gatgttggccgggtaccattttatc

SEQ ID NO: 4197904 - DNA, 25 bp, Homo sapien
ggaatcaggtgttcaccggtcccta

SEQ ID NO: 4197905 - DNA, 25 bp, Homo sapien
tgaacactatgatctggaagcacgt

SEQ ID NO: 4197906 - DNA, 25 bp, Homo sapien
taagaggcagttccaacactaaaaa

SEQ ID NO: 4197907 - DNA, 25 bp, Homo sapien
tcaaaaagatcgaggctaattcagc

SEQ ID NO: 4197908 - DNA, 25 bp, Homo sapien
tactttattacagtccacagtctgc

SEQ ID NO: 4197909 - DNA, 25 bp, Homo sapien
aaattaggtgcatagtcacactggc

SEQ ID NO: 4197910 - DNA, 25 bp, Homo sapien
aagcacaactttctcagccaagtag

SEQ ID NO: 4197911 - DNA, 25 bp, Homo sapien
cacagatcatatgggaagcacaact

SEQ ID NO: 4197912 - DNA, 25 bp, Homo sapien
ccaagaatacacctaatactggagg

SEQ ID NO: 4197913 - DNA, 25 bp, Homo sapien
gccaagtagcccaaattatcacaaa

SEQ ID NO: 4197914 - DNA, 25 bp, Homo sapien
gcccatacaggcccaactcccagcc

SEQ ID NO: 4197915 - DNA, 25 bp, Homo sapien
ggcccatacaggcccaactcccagc

SEQ ID NO: 4197916 - DNA, 25 bp, Homo sapien
ctgtggctggacacagcgcaaaaca

SEQ ID NO: 4197917 - DNA, 25 bp, Homo sapien
tgtggctggacacagcgcaaaacat

SEQ ID NO: 4197918 - DNA, 25 bp, Homo sapien
gactgttagcctgtgagtgaattaa

SEQ ID NO: 4197919 - DNA, 25 bp, Homo sapien
gctgttaaggttctatactcctccc

SEQ ID NO: 4197920 - DNA, 25 bp, Homo sapien
gctcagcggatgtgtctgggctaat

SEQ ID NO: 4197921 - DNA, 25 bp, Homo sapien
ggaagtgtcacaagccctgaggaag

SEQ ID NO: 4197922 - DNA, 25 bp, Homo sapien
aactgcttggttaaggatgactccc

SEQ ID NO: 4197923 - DNA, 25 bp, Homo sapien
ttctgaaactgcttggttaaggatg

SEQ ID NO: 4197924 - DNA, 25 bp, Homo sapien
cgcaccgggagacttgtctacacat

SEQ ID NO: 4197925 - DNA, 25 bp, Homo sapien
tggttaaggatgactcccgcaaggg

SEQ ID NO: 4197926 - DNA, 25 bp, Homo sapien
tctggatgtagacccccggagtctg

SEQ ID NO: 4197927 - DNA, 25 bp, Homo sapien
ggcttcagtcctcagccgggtctct

SEQ ID NO: 4197928 - DNA, 25 bp, Homo sapien
ctgtcttctgagaccgacaaggctt

SEQ ID NO: 4197929 - DNA, 25 bp, Homo sapien
cgacaaggcttgtcaatgggcaaca

SEQ ID NO: 4197930 - DNA, 25 bp, Homo sapien
tcaccctctttgaacagacgggcat

SEQ ID NO: 4197931 - DNA, 25 bp, Homo sapien
ttccttgctcccttagccagggcgg

SEQ ID NO: 4197932 - DNA, 25 bp, Homo sapien
ctcccttagccagggcggttgactc

SEQ ID NO: 4197933 - DNA, 25 bp, Homo sapien
ctctttgaacagacgggcattcggg

SEQ ID NO: 4197934 - DNA, 25 bp, Homo sapien
actgtggacggctgccaaatgcccg

SEQ ID NO: 4197935 - DNA, 25 bp, Homo sapien
catctgccggtcttactgtggacgg

SEQ ID NO: 4197936 - DNA, 25 bp, Homo sapien
ctgtggacggctgccaaatgcccgg

SEQ ID NO: 4197937 - DNA, 25 bp, Homo sapien
aaggctccatctgccggtcttactg

SEQ ID NO: 4197938 - DNA, 25 bp, Homo sapien
gtgtccaaggactcatgggagtaac

SEQ ID NO: 4197939 - DNA, 25 bp, Homo sapien
gatggcacagcgactgaatacaccg

SEQ ID NO: 4197940 - DNA, 25 bp, Homo sapien
tagtgccgtttggtgaaggtgtcca

SEQ ID NO: 4197941 - DNA, 25 bp, Homo sapien
ttcttgtagccacatgggggatggc

SEQ ID NO: 4197942 - DNA, 25 bp, Homo sapien
caagttgagcacgtggacaatcaga

SEQ ID NO: 4197943 - DNA, 25 bp, Homo sapien
ctcgatgacatattggaaggaatgc

SEQ ID NO: 4197944 - DNA, 25 bp, Homo sapien
ggaatgcatcttcccataaagactc

SEQ ID NO: 4197945 - DNA, 25 bp, Homo sapien
aaaggagatggctaagtaagcactc

SEQ ID NO: 4197946 - DNA, 25 bp, Homo sapien
tgcgatcctaggatgcgtcccagac

SEQ ID NO: 4197947 - DNA, 25 bp, Homo sapien
cagacgctcagtcagaagtgctgga

SEQ ID NO: 4197948 - DNA, 25 bp, Homo sapien
cagtgttccactaagggtggttcca

SEQ ID NO: 4197949 - DNA, 25 bp, Homo sapien
ggtagataacagacaagtcctaagc

SEQ ID NO: 4197950 - DNA, 25 bp, Homo sapien
gcttaggtaatctctgggatccgat

SEQ ID NO: 4197951 - DNA, 25 bp, Homo sapien
cacatgtctcactccacagtatgct

SEQ ID NO: 4197952 - DNA, 25 bp, Homo sapien
cgtctctgagaagtgatgcttaggt

SEQ ID NO: 4197953 - DNA, 25 bp, Homo sapien
ttctcaggaagtagtcccttaacca

SEQ ID NO: 4197954 - DNA, 25 bp, Homo sapien
aaatagaccttaaaactgtgctgcc

SEQ ID NO: 4197955 - DNA, 25 bp, Homo sapien
cacagaggagtggttcagtttagcc

SEQ ID NO: 4197956 - DNA, 25 bp, Homo sapien
tataaatgtgacttaggctccctcc

SEQ ID NO: 4197957 - DNA, 25 bp, Homo sapien
gagtacctactgtgagcaggcattg

SEQ ID NO: 4197958 - DNA, 25 bp, Homo sapien
tggtcaccagtacatgtcgctggag

SEQ ID NO: 4197959 - DNA, 25 bp, Homo sapien
cattggccaccccagccataggtgt

SEQ ID NO: 4197960 - DNA, 25 bp, Homo sapien
gactcttatccttattggtgcccca

SEQ ID NO: 4197961 - DNA, 25 bp, Homo sapien
tgcctttagaaactaggttgagctg

SEQ ID NO: 4197962 - DNA, 25 bp, Homo sapien
acactgagacgtggctgggcagggt

SEQ ID NO: 4197963 - DNA, 25 bp, Homo sapien
ggctcacacttataacccaacactt

SEQ ID NO: 4197964 - DNA, 25 bp, Homo sapien
atgcacctgtaattctaactacttg

SEQ ID NO: 4197965 - DNA, 25 bp, Homo sapien
gaacactgagacgtggctgggcagg

SEQ ID NO: 4197966 - DNA, 25 bp, Homo sapien
gaagatgaaactgtgaaaggaggca

SEQ ID NO: 4197967 - DNA, 25 bp, Homo sapien
tataacaaagccaggtggttgaatt

SEQ ID NO: 4197968 - DNA, 25 bp, Homo sapien
caggggtgggatctccactgcgagc

SEQ ID NO: 4197969 - DNA, 25 bp, Homo sapien
cagaaggaaaggtgtataacaaagc

SEQ ID NO: 4197970 - DNA, 25 bp, Homo sapien
ggctaccatatgtcccgtgagtgat

SEQ ID NO: 4197971 - DNA, 25 bp, Homo sapien
tactgagatggattactatggccac

SEQ ID NO: 4197972 - DNA, 25 bp, Homo sapien
gttgaatcccattcccagtgatagg

SEQ ID NO: 4197973 - DNA, 25 bp, Homo sapien
acttttggcccttcacgtctctgga

SEQ ID NO: 4197974 - DNA, 25 bp, Homo sapien
ttcctgccttggtctgagtcagtgc

SEQ ID NO: 4197975 - DNA, 25 bp, Homo sapien
ccttggtctgagtcagtgctgagat

SEQ ID NO: 4197976 - DNA, 25 bp, Homo sapien
tggtctgagtcagtgctgagattac

SEQ ID NO: 4197977 - DNA, 25 bp, Homo sapien
gctatcttcctgccttggtctgagt

SEQ ID NO: 4197978 - DNA, 25 bp, Homo sapien
ccatttgtgagagattagttgacca

SEQ ID NO: 4197979 - DNA, 25 bp, Homo sapien
aaaccaaggtcacatagattttctt

SEQ ID NO: 4197980 - DNA, 25 bp, Homo sapien
ctattttgccgttcttttgccagtg

SEQ ID NO: 4197981 - DNA, 25 bp, Homo sapien
tagatatccagttcatttggcctca

SEQ ID NO: 4197982 - DNA, 25 bp, Homo sapien
aaatcatctttctcagttccccagc

SEQ ID NO: 4197983 - DNA, 25 bp, Homo sapien
ctctgtctgtctgtccaaatcatct

SEQ ID NO: 4197984 - DNA, 25 bp, Homo sapien
tgtctgtctgtccaaatcatctttc

SEQ ID NO: 4197985 - DNA, 25 bp, Homo sapien
tcatctttctcagttccccagccag

SEQ ID NO: 4197986 - DNA, 25 bp, Homo sapien
tcagatgtgtgatgtgttaaatgtc

SEQ ID NO: 4197987 - DNA, 25 bp, Homo sapien
gttaaatgtctgcatggcctttcat

SEQ ID NO: 4197988 - DNA, 25 bp, Homo sapien
catactgaatgggattctcgtacat

SEQ ID NO: 4197989 - DNA, 25 bp, Homo sapien
caagtcatactgaatgggattctcg

SEQ ID NO: 4197990 - DNA, 25 bp, Homo sapien
taatagctatatggagagtttgaca

SEQ ID NO: 4197991 - DNA, 25 bp, Homo sapien
ctgatgacttggctggtaaatggca

SEQ ID NO: 4197992 - DNA, 25 bp, Homo sapien
taatgattgcatcccttgatgtgaa

SEQ ID NO: 4197993 - DNA, 25 bp, Homo sapien
caaacatgctggatagttgcttaca

SEQ ID NO: 4197994 - DNA, 25 bp, Homo sapien
ttaaagctggcacacacacgtctag

SEQ ID NO: 4197995 - DNA, 25 bp, Homo sapien
gagtctttcacaaatctccctggtg

SEQ ID NO: 4197996 - DNA, 25 bp, Homo sapien
gaagggtgggactccgttatgtctc

SEQ ID NO: 4197997 - DNA, 25 bp, Homo sapien
caatatctgcagatggctctgtctg

SEQ ID NO: 4197998 - DNA, 25 bp, Homo sapien
ctctgatttgttcccgtttagtata

SEQ ID NO: 4197999 - DNA, 25 bp, Homo sapien
ctgatttgttcccgtttagtatatg

SEQ ID NO: 4198000 - DNA, 25 bp, Homo sapien
atctctgatttgttcccgtttagta

SEQ ID NO: 4198001 - DNA, 25 bp, Homo sapien
tctctgatttgttcccgtttagtat

SEQ ID NO: 4198002 - DNA, 25 bp, Homo sapien
ctttccgttttaatctgggatacat

SEQ ID NO: 4198003 - DNA, 25 bp, Homo sapien
acagcctcgcttggccgccagttct

SEQ ID NO: 4198004 - DNA, 25 bp, Homo sapien
aaactcctgggccttgaccgggcag

SEQ ID NO: 4198005 - DNA, 25 bp, Homo sapien
agcgcgggcgccacagaagcggcgg

SEQ ID NO: 4198006 - DNA, 25 bp, Homo sapien
ggcgcccgaagacgcgctcctggct

SEQ ID NO: 4198007 - DNA, 25 bp, Homo sapien
tctgggcaagcaacatgctgtctct

SEQ ID NO: 4198008 - DNA, 25 bp, Homo sapien
tcctaagtcctgtgaggagcatttc

SEQ ID NO: 4198009 - DNA, 25 bp, Homo sapien
taaagctgaagaacctcaggctcag

SEQ ID NO: 4198010 - DNA, 25 bp, Homo sapien
tgacaaaagatatgagactcctgcc

SEQ ID NO: 4198011 - DNA, 25 bp, Homo sapien
gctgtgtttagatagatacccgtga

SEQ ID NO: 4198012 - DNA, 25 bp, Homo sapien
catctattggcacctaagtcattgg

SEQ ID NO: 4198013 - DNA, 25 bp, Homo sapien
ttgtgactctaggtaaacttgggcc

SEQ ID NO: 4198014 - DNA, 25 bp, Homo sapien
ggctgtatcatattcccatgggacc

SEQ ID NO: 4198015 - DNA, 25 bp, Homo sapien
tagagcatagaagaagcggcacctg

SEQ ID NO: 4198016 - DNA, 25 bp, Homo sapien
cagtagacatagtgcactaaaccca

SEQ ID NO: 4198017 - DNA, 25 bp, Homo sapien
ggatacttgaccaatatttgagcac

SEQ ID NO: 4198018 - DNA, 25 bp, Homo sapien
taaatagcatgcagctcacatctgt

SEQ ID NO: 4198019 - DNA, 25 bp, Homo sapien
ggcacagtcatcagtttgtgacata

SEQ ID NO: 4198020 - DNA, 25 bp, Homo sapien
tagttggtcggtatgtagtgcttct

SEQ ID NO: 4198021 - DNA, 25 bp, Homo sapien
ttaagttccaaggtgtgctacaata

SEQ ID NO: 4198022 - DNA, 25 bp, Homo sapien
tatgacgatttctcagcagggccta

SEQ ID NO: 4198023 - DNA, 25 bp, Homo sapien
aggacctggtgttttcgctactgaa

SEQ ID NO: 4198024 - DNA, 25 bp, Homo sapien
cttatcaaagtagaccaggacctgg

SEQ ID NO: 4198025 - DNA, 25 bp, Homo sapien
gatggaagcggtagtaaaaagcctc

SEQ ID NO: 4198026 - DNA, 25 bp, Homo sapien
gccggactgtaaaagagagaatatc

SEQ ID NO: 4198027 - DNA, 25 bp, Homo sapien
taatgatctactaaaggcagccagg

SEQ ID NO: 4198028 - DNA, 25 bp, Homo sapien
atccgccatatttgttcctaccctg

SEQ ID NO: 4198029 - DNA, 25 bp, Homo sapien
cctgaatgtcctctatactttagca

SEQ ID NO: 4198030 - DNA, 25 bp, Homo sapien
cataacatctggcacataactggat

SEQ ID NO: 4198031 - DNA, 25 bp, Homo sapien
tagataatcattctgtagacatcca

SEQ ID NO: 4198032 - DNA, 25 bp, Homo sapien
actatgtccaacacattgtaggtgc

SEQ ID NO: 4198033 - DNA, 25 bp, Homo sapien
ctagcttttgtcctcagtaatttaa

SEQ ID NO: 4198034 - DNA, 25 bp, Homo sapien
ccaatagatctacagtcactaaatg

SEQ ID NO: 4198035 - DNA, 25 bp, Homo sapien
tcagaggttcggtagttatggataa

SEQ ID NO: 4198036 - DNA, 25 bp, Homo sapien
caaagtagttgaacatgcaagttgg

SEQ ID NO: 4198037 - DNA, 25 bp, Homo sapien
gaaattgctggcttacgcatatcta

SEQ ID NO: 4198038 - DNA, 25 bp, Homo sapien
ggaagttatcagacagtgagatgtt

SEQ ID NO: 4198039 - DNA, 25 bp, Homo sapien
taggagttatccttatgcagagcat

SEQ ID NO: 4198040 - DNA, 25 bp, Homo sapien
caaggctatgtggattcatgagcac

SEQ ID NO: 4198041 - DNA, 25 bp, Homo sapien
cgaccaagttgggtagacaaggcta

SEQ ID NO: 4198042 - DNA, 25 bp, Homo sapien
ttagtagcatgaggtgaggattcca

SEQ ID NO: 4198043 - DNA, 25 bp, Homo sapien
catacacatgcatgagactggtatc

SEQ ID NO: 4198044 - DNA, 25 bp, Homo sapien
aaaaagagtagataagccacagtgt

SEQ ID NO: 4198045 - DNA, 25 bp, Homo sapien
aaggcaccaaagcattcagtgagta

SEQ ID NO: 4198046 - DNA, 25 bp, Homo sapien
cagtgagtaaagaaagtgcttttca

SEQ ID NO: 4198047 - DNA, 25 bp, Homo sapien
tgacgatcgaaatgggagtccccaa

SEQ ID NO: 4198048 - DNA, 25 bp, Homo sapien
tactttccctgatctagagcgcggc

SEQ ID NO: 4198049 - DNA, 25 bp, Homo sapien
ttacagacgataacagccgcttccg

SEQ ID NO: 4198050 - DNA, 25 bp, Homo sapien
tcagcgaagtggtgaaagagcatca

SEQ ID NO: 4198051 - DNA, 25 bp, Homo sapien
caggactgccgttatctattgaagg

SEQ ID NO: 4198052 - DNA, 25 bp, Homo sapien
ttgacattgagcagcgactacaagg

SEQ ID NO: 4198053 - DNA, 25 bp, Homo sapien
gactacaaggtgtaatcaagactcg

SEQ ID NO: 4198054 - DNA, 25 bp, Homo sapien
ctcgaaatagagtgacaggactgcc

SEQ ID NO: 4198055 - DNA, 25 bp, Homo sapien
tcaatgagctaaacttgtcacaagt

SEQ ID NO: 4198056 - DNA, 25 bp, Homo sapien
ggatcctgatgaactctctctttag

SEQ ID NO: 4198057 - DNA, 25 bp, Homo sapien
caatgagctaaacttgtcacaagtg

SEQ ID NO: 4198058 - DNA, 25 bp, Homo sapien
aaggatcctgatgaactctctcttt

SEQ ID NO: 4198059 - DNA, 25 bp, Homo sapien
tcaaattcatttaagtaacgtgaag

SEQ ID NO: 4198060 - DNA, 25 bp, Homo sapien
catttaagtaacgtgaagtttgtgc

SEQ ID NO: 4198061 - DNA, 25 bp, Homo sapien
ttaagtaacgtgaagtttgtgcttc

SEQ ID NO: 4198062 - DNA, 25 bp, Homo sapien
attcatttaagtaacgtgaagtttg

SEQ ID NO: 4198063 - DNA, 25 bp, Homo sapien
tgcttggtcggagaacacttccaga

SEQ ID NO: 4198064 - DNA, 25 bp, Homo sapien
tcttttctgaggtgagctccgcgaa

SEQ ID NO: 4198065 - DNA, 25 bp, Homo sapien
ggttggaccacttgaacatgttctg

SEQ ID NO: 4198066 - DNA, 25 bp, Homo sapien
ggcaactgaacggaagctctgtctg

SEQ ID NO: 4198067 - DNA, 25 bp, Homo sapien
tcttggccctgtttgtttctctcag

SEQ ID NO: 4198068 - DNA, 25 bp, Homo sapien
cagctagccagtcccacagctggag

SEQ ID NO: 4198069 - DNA, 25 bp, Homo sapien
cagctggagcttgcacacctgcatc

SEQ ID NO: 4198070 - DNA, 25 bp, Homo sapien
tggagcttgcacacctgcatctgga

SEQ ID NO: 4198071 - DNA, 25 bp, Homo sapien
cagatctctgtttacaatacccatg

SEQ ID NO: 4198072 - DNA, 25 bp, Homo sapien
tcttttgtaagatgtctgggcaagc

SEQ ID NO: 4198073 - DNA, 25 bp, Homo sapien
gtttacaatacccatgttatgtatg

SEQ ID NO: 4198074 - DNA, 25 bp, Homo sapien
aaaacacaccttccactaaatcttg

SEQ ID NO: 4198075 - DNA, 25 bp, Homo sapien
gctgggatgaagcatacagacaagt

SEQ ID NO: 4198076 - DNA, 25 bp, Homo sapien
gaggcaattggacccatctttaagg

SEQ ID NO: 4198077 - DNA, 25 bp, Homo sapien
tcagattctgtaggtccagagtggg

SEQ ID NO: 4198078 - DNA, 25 bp, Homo sapien
ggcagactggtaggttagcgcacta

SEQ ID NO: 4198079 - DNA, 25 bp, Homo sapien
tgtgctgtcacaagaaaccaagaaa

SEQ ID NO: 4198080 - DNA, 25 bp, Homo sapien
agaaagggggcatatgttctcagga

SEQ ID NO: 4198081 - DNA, 25 bp, Homo sapien
ccttctagcccattccaataagaag

SEQ ID NO: 4198082 - DNA, 25 bp, Homo sapien
tgacattagacttgtagaaagtact

SEQ ID NO: 4198083 - DNA, 25 bp, Homo sapien
attttattgcaatggagtacttcct

SEQ ID NO: 4198084 - DNA, 25 bp, Homo sapien
actccactcagcctttgtggttata

SEQ ID NO: 4198085 - DNA, 25 bp, Homo sapien
gaacctagcatgtgccacacgtcta

SEQ ID NO: 4198086 - DNA, 25 bp, Homo sapien
gcaggtttgtgtctgtagagtctca

SEQ ID NO: 4198087 - DNA, 25 bp, Homo sapien
gcccttaccctgtgtggctgattag

SEQ ID NO: 4198088 - DNA, 25 bp, Homo sapien
tcaagatctcacttaaggtttctgg

SEQ ID NO: 4198089 - DNA, 25 bp, Homo sapien
atcttaactaaaaagggagcgagag

SEQ ID NO: 4198090 - DNA, 25 bp, Homo sapien
gtaataattgatcaagttgtataca

SEQ ID NO: 4198091 - DNA, 25 bp, Homo sapien
aaaactcctggagttcttgtatgag

SEQ ID NO: 4198092 - DNA, 25 bp, Homo sapien
ggagttcttgtatgaggatgataaa

SEQ ID NO: 4198093 - DNA, 25 bp, Homo sapien
tatgtgtgtactctgttctttgtca

SEQ ID NO: 4198094 - DNA, 25 bp, Homo sapien
tcctccctgttaacatattatatgt

SEQ ID NO: 4198095 - DNA, 25 bp, Homo sapien
tatttcatggcctaaagagaagcta

SEQ ID NO: 4198096 - DNA, 25 bp, Homo sapien
ggttaatattatctcccttaggaga

SEQ ID NO: 4198097 - DNA, 25 bp, Homo sapien
agtgtggccttttcactgagaaaaa

SEQ ID NO: 4198098 - DNA, 25 bp, Homo sapien
ctcacttcgacaaggcacatattta

SEQ ID NO: 4198099 - DNA, 25 bp, Homo sapien
tctcacttcgacaaggcacatattt

SEQ ID NO: 4198100 - DNA, 25 bp, Homo sapien
tatactgaaaatataatgtgtgaaa

SEQ ID NO: 4198101 - DNA, 25 bp, Homo sapien
ctgaaaatataatgtgtgaaatgtg

SEQ ID NO: 4198102 - DNA, 25 bp, Homo sapien
tactgaaaatataatgtgtgaaatg

SEQ ID NO: 4198103 - DNA, 25 bp, Homo sapien
atatactgaaaatataatgtgtgaa

SEQ ID NO: 4198104 - DNA, 25 bp, Homo sapien
tatgaaattaggcaattatcagcat

SEQ ID NO: 4198105 - DNA, 25 bp, Homo sapien
ttaaactacaggtcataacccacta

SEQ ID NO: 4198106 - DNA, 25 bp, Homo sapien
gaggcacactaattgctttagcctg

SEQ ID NO: 4198107 - DNA, 25 bp, Homo sapien
cagtagtttttaaactacaggtcat

SEQ ID NO: 4198108 - DNA, 25 bp, Homo sapien
tactacaaaggcaacttgggcactc

SEQ ID NO: 4198109 - DNA, 25 bp, Homo sapien
gggcactcaagccaaaaatattact

SEQ ID NO: 4198110 - DNA, 25 bp, Homo sapien
tatatattgaagcttttctctaggc

SEQ ID NO: 4198111 - DNA, 25 bp, Homo sapien
aaagtttgctgaccgctattctata

SEQ ID NO: 4198112 - DNA, 25 bp, Homo sapien
tctctcagaaagagggacaagagcg

SEQ ID NO: 4198113 - DNA, 25 bp, Homo sapien
ttaaatcacaggttgcggatgcccg

SEQ ID NO: 4198114 - DNA, 25 bp, Homo sapien
tcacatttgtgaagcgagtctgggc

SEQ ID NO: 4198115 - DNA, 25 bp, Homo sapien
gagtctggccgctcaaaacgaaagc

SEQ ID NO: 4198116 - DNA, 25 bp, Homo sapien
cttggcttcacgtttcttctccttg

SEQ ID NO: 4198117 - DNA, 25 bp, Homo sapien
gcttcacgtttcttctccttggtgt

SEQ ID NO: 4198118 - DNA, 25 bp, Homo sapien
ctccttggtgtctggcttctcaact

SEQ ID NO: 4198119 - DNA, 25 bp, Homo sapien
tctccttggtgtctggcttctcaac

SEQ ID NO: 4198120 - DNA, 25 bp, Homo sapien
cacatctttggaaggatctaggcat

SEQ ID NO: 4198121 - DNA, 25 bp, Homo sapien
cacagaatgtgaatgaggaccagag

SEQ ID NO: 4198122 - DNA, 25 bp, Homo sapien
tttgtggtgcccagtgaggataagc

SEQ ID NO: 4198123 - DNA, 25 bp, Homo sapien
caattttgtgatgacctctggtgtg

SEQ ID NO: 4198124 - DNA, 25 bp, Homo sapien
gatccaagtacctgcaggtccactc

SEQ ID NO: 4198125 - DNA, 25 bp, Homo sapien
caccgctgtcctgccttcgagaggg

SEQ ID NO: 4198126 - DNA, 25 bp, Homo sapien
cactggagatccaagtacctgcagg

SEQ ID NO: 4198127 - DNA, 25 bp, Homo sapien
ctcccactggagatccaagtacctg

SEQ ID NO: 4198128 - DNA, 25 bp, Homo sapien
aagcgtgcccagaggacggcgggcg

SEQ ID NO: 4198129 - DNA, 25 bp, Homo sapien
tgcacagccaggagacgagacgcga

SEQ ID NO: 4198130 - DNA, 25 bp, Homo sapien
aaaggagtaacgcttcgctttccat

SEQ ID NO: 4198131 - DNA, 25 bp, Homo sapien
aggacggcgggcgccacactgcaca

SEQ ID NO: 4198132 - DNA, 25 bp, Homo sapien
ccatagttgagggttagccataaaa

SEQ ID NO: 4198133 - DNA, 25 bp, Homo sapien
tatttcatatggtcagtaacagaag

SEQ ID NO: 4198134 - DNA, 25 bp, Homo sapien
tatgaattgactgcaagagcactag

SEQ ID NO: 4198135 - DNA, 25 bp, Homo sapien
gatttggagctagactgaagtccca

SEQ ID NO: 4198136 - DNA, 25 bp, Homo sapien
ccttaagtgtgcctgagatgtgaaa

SEQ ID NO: 4198137 - DNA, 25 bp, Homo sapien
tgagcaacatgcacatcacaaggtc

SEQ ID NO: 4198138 - DNA, 25 bp, Homo sapien
caatgtcatgtgtgccaagaatact

SEQ ID NO: 4198139 - DNA, 25 bp, Homo sapien
tagtaatacccttaatgcctcagga

SEQ ID NO: 4198140 - DNA, 25 bp, Homo sapien
tgtctatcctctgccaaagttagtg

SEQ ID NO: 4198141 - DNA, 25 bp, Homo sapien
aattcagtcttcctaagctgtgtct

SEQ ID NO: 4198142 - DNA, 25 bp, Homo sapien
gccaaagttagtgtttgaccaaaga

SEQ ID NO: 4198143 - DNA, 25 bp, Homo sapien
cagaagacttaaaattcagtcttcc

SEQ ID NO: 4198144 - DNA, 25 bp, Homo sapien
tgacaatccgaacccattccctctt

SEQ ID NO: 4198145 - DNA, 25 bp, Homo sapien
gattcagggtcttaatgaagggacc

SEQ ID NO: 4198146 - DNA, 25 bp, Homo sapien
ctttgacaatccgaacccattccct

SEQ ID NO: 4198147 - DNA, 25 bp, Homo sapien
cactactaaaaccaagtggatttga

SEQ ID NO: 4198148 - DNA, 25 bp, Homo sapien
atgttagtataagtgtaatcaataa

SEQ ID NO: 4198149 - DNA, 25 bp, Homo sapien
ttcaggaggtacatttctgctcgac

SEQ ID NO: 4198150 - DNA, 25 bp, Homo sapien
ggccataaccacagcttcaatgcat

SEQ ID NO: 4198151 - DNA, 25 bp, Homo sapien
gctcttatctgatgcccatcatagg

SEQ ID NO: 4198152 - DNA, 25 bp, Homo sapien
ctccatccagtatttggctcttatc

SEQ ID NO: 4198153 - DNA, 25 bp, Homo sapien
ccaacttgagtctgagtgagcagag

SEQ ID NO: 4198154 - DNA, 25 bp, Homo sapien
gtctgaggtactgcattttgcaacc

SEQ ID NO: 4198155 - DNA, 25 bp, Homo sapien
gagagattctgatgatccaacttga

SEQ ID NO: 4198156 - DNA, 25 bp, Homo sapien
tgcaacctacacaatccaacgctgg

SEQ ID NO: 4198157 - DNA, 25 bp, Homo sapien
gcaacaagtgtctaaacgaatatat

SEQ ID NO: 4198158 - DNA, 25 bp, Homo sapien
tgctttgagcaacaagtgtctaaac

SEQ ID NO: 4198159 - DNA, 25 bp, Homo sapien
caagtgtctaaacgaatatatagag

SEQ ID NO: 4198160 - DNA, 25 bp, Homo sapien
tctaaacgaatatatagagacaaaa

SEQ ID NO: 4198161 - DNA, 25 bp, Homo sapien
cacacgggccgccaccatggtcatc

SEQ ID NO: 4198162 - DNA, 25 bp, Homo sapien
cacgggccgccaccatggtcatctc

SEQ ID NO: 4198163 - DNA, 25 bp, Homo sapien
acacgggccgccaccatggtcatct

SEQ ID NO: 4198164 - DNA, 25 bp, Homo sapien
acgggccgccaccatggtcatctcc

SEQ ID NO: 4198165 - DNA, 25 bp, Homo sapien
aaattaatgcggtctctgttctcca

SEQ ID NO: 4198166 - DNA, 25 bp, Homo sapien
taacgccttcccattggcataagac

SEQ ID NO: 4198167 - DNA, 25 bp, Homo sapien
caacttgacagcttggaaggccgat

SEQ ID NO: 4198168 - DNA, 25 bp, Homo sapien
ggcataagacttcatcacctctgtc

SEQ ID NO: 4198169 - DNA, 25 bp, Homo sapien
aggagcagattccaggtgcctgaga

SEQ ID NO: 4198170 - DNA, 25 bp, Homo sapien
tattcgggcaggatgaagcatgaca

SEQ ID NO: 4198171 - DNA, 25 bp, Homo sapien
aagacttggcagtattcgggcagga

SEQ ID NO: 4198172 - DNA, 25 bp, Homo sapien
tggaaaaagacttgatagtgttcct

SEQ ID NO: 4198173 - DNA, 25 bp, Homo sapien
tacattagacccaggacaacagagg

SEQ ID NO: 4198174 - DNA, 25 bp, Homo sapien
ctacattagacccaggacaacagag

SEQ ID NO: 4198175 - DNA, 25 bp, Homo sapien
agagaatctgccgactaagccaagg

SEQ ID NO: 4198176 - DNA, 25 bp, Homo sapien
aggtagccactgaagaccgatgatg

SEQ ID NO: 4198177 - DNA, 25 bp, Homo sapien
cggagagaatctgccgactaagcca

SEQ ID NO: 4198178 - DNA, 25 bp, Homo sapien
tgaagaccgatgatggagaatagaa

SEQ ID NO: 4198179 - DNA, 25 bp, Homo sapien
taggtgccagcaagtaagactgctg

SEQ ID NO: 4198180 - DNA, 25 bp, Homo sapien
ggtgccagcaagtaagactgctgct

SEQ ID NO: 4198181 - DNA, 25 bp, Homo sapien
ctaggtgccagcaagtaagactgct

SEQ ID NO: 4198182 - DNA, 25 bp, Homo sapien
aggtgccagcaagtaagactgctgc

SEQ ID NO: 4198183 - DNA, 25 bp, Homo sapien
agagggaaagattgcccccacaggg

SEQ ID NO: 4198184 - DNA, 25 bp, Homo sapien
agtgagagggaaagattgcccccac

SEQ ID NO: 4198185 - DNA, 25 bp, Homo sapien
gtgagagggaaagattgcccccaca

SEQ ID NO: 4198186 - DNA, 25 bp, Homo sapien
tgagagggaaagattgcccccacag

SEQ ID NO: 4198187 - DNA, 25 bp, Homo sapien
ggttggatgtcctggcaatcggatc

SEQ ID NO: 4198188 - DNA, 25 bp, Homo sapien
cctggcaatcggatcagggggaaga

SEQ ID NO: 4198189 - DNA, 25 bp, Homo sapien
tggatgtcctggcaatcggatcagg

SEQ ID NO: 4198190 - DNA, 25 bp, Homo sapien
ctggcaatcggatcagggggaagag

SEQ ID NO: 4198191 - DNA, 25 bp, Homo sapien
cagcacagaaggcaaaaccaggcta

SEQ ID NO: 4198192 - DNA, 25 bp, Homo sapien
tcttatctgagggactctggcagca

SEQ ID NO: 4198193 - DNA, 25 bp, Homo sapien
ggcaaaaccaggctagaatctgtgg

SEQ ID NO: 4198194 - DNA, 25 bp, Homo sapien
gaatctgtggttccctcagtctttg

SEQ ID NO: 4198195 - DNA, 25 bp, Homo sapien
ctgctcggactaactttggtaaact

SEQ ID NO: 4198196 - DNA, 25 bp, Homo sapien
gattctgccaatcataaacaactgc

SEQ ID NO: 4198197 - DNA, 25 bp, Homo sapien
tcataaacaactgctcggactaact

SEQ ID NO: 4198198 - DNA, 25 bp, Homo sapien
tgccaatcataaacaactgctcgga

SEQ ID NO: 4198199 - DNA, 25 bp, Homo sapien
tttggacagaaaagactatcttcag

SEQ ID NO: 4198200 - DNA, 25 bp, Homo sapien
ctttggacagaaaagactatcttca

SEQ ID NO: 4198201 - DNA, 25 bp, Homo sapien
tgtagttcttcaagctcctcccgag

SEQ ID NO: 4198202 - DNA, 25 bp, Homo sapien
cccgagaaatggtagtagtactgtt

SEQ ID NO: 4198203 - DNA, 25 bp, Homo sapien
gctcctcccgagaaatggtagtagt

SEQ ID NO: 4198204 - DNA, 25 bp, Homo sapien
ttttattaaatgcctcttgtagttc

SEQ ID NO: 4198205 - DNA, 25 bp, Homo sapien
taccgtgtaaagtgtattcagttac

SEQ ID NO: 4198206 - DNA, 25 bp, Homo sapien
tctctgtaataaggataccgtgtaa

SEQ ID NO: 4198207 - DNA, 25 bp, Homo sapien
gaaggccagagttcagtttatacac

SEQ ID NO: 4198208 - DNA, 25 bp, Homo sapien
cattgtcattcattaacctggatta

SEQ ID NO: 4198209 - DNA, 25 bp, Homo sapien
ccttaaacaggtcttgaagttcata

SEQ ID NO: 4198210 - DNA, 25 bp, Homo sapien
tctttgttgctgtcagcaactgata

SEQ ID NO: 4198211 - DNA, 25 bp, Homo sapien
caatctcgcgcaccttgtagccagg

SEQ ID NO: 4198212 - DNA, 25 bp, Homo sapien
tagtcactgacatacccactattgt

SEQ ID NO: 4198213 - DNA, 25 bp, Homo sapien
tcactggaaatagttgaagttcctc

SEQ ID NO: 4198214 - DNA, 25 bp, Homo sapien
ttcctccaatagcagtaatcccttc

SEQ ID NO: 4198215 - DNA, 25 bp, Homo sapien
aatagcagtaatcccttccctcttg

SEQ ID NO: 4198216 - DNA, 25 bp, Homo sapien
cggaatgttttgctgatatctttgc

SEQ ID NO: 4198217 - DNA, 25 bp, Homo sapien
ccagtcctcttctattgggatggtt

SEQ ID NO: 4198218 - DNA, 25 bp, Homo sapien
agtcctcttctattgggatggttgt

SEQ ID NO: 4198219 - DNA, 25 bp, Homo sapien
gggaaggactcacatggagcactga

SEQ ID NO: 4198220 - DNA, 25 bp, Homo sapien
cttcgggaaggactcacatggagca

SEQ ID NO: 4198221 - DNA, 25 bp, Homo sapien
catcattgggattcatgggtataag

SEQ ID NO: 4198222 - DNA, 25 bp, Homo sapien
aaagactatcatcattgggattcat

SEQ ID NO: 4198223 - DNA, 25 bp, Homo sapien
catgggtataagatgcttacagtca

SEQ ID NO: 4198224 - DNA, 25 bp, Homo sapien
tgcttacagtcagggtcattctcca

SEQ ID NO: 4198225 - DNA, 25 bp, Homo sapien
atagtgaatggcgtgagctttttct

SEQ ID NO: 4198226 - DNA, 25 bp, Homo sapien
agaaatagtgaatggcgtgagcttt

SEQ ID NO: 4198227 - DNA, 25 bp, Homo sapien
agtgaatggcgtgagctttttctta

SEQ ID NO: 4198228 - DNA, 25 bp, Homo sapien
tcaattgtatctggttcagataagt

SEQ ID NO: 4198229 - DNA, 25 bp, Homo sapien
tgttgaccactgtacaaccaatggc

SEQ ID NO: 4198230 - DNA, 25 bp, Homo sapien
gcaccaatgttgaccactgtacaac

SEQ ID NO: 4198231 - DNA, 25 bp, Homo sapien
tgaggcagaattcagagctaggttt

SEQ ID NO: 4198232 - DNA, 25 bp, Homo sapien
gcagaattcagagctaggtttaaat

SEQ ID NO: 4198233 - DNA, 25 bp, Homo sapien
cagcagtaattcctcgggagaaagc

SEQ ID NO: 4198234 - DNA, 25 bp, Homo sapien
ggtagttcacccatcgcagcagtaa

SEQ ID NO: 4198235 - DNA, 25 bp, Homo sapien
gttcctcaccttcatttaacaatgc

SEQ ID NO: 4198236 - DNA, 25 bp, Homo sapien
gatggtatgccatcctgcattggtc

SEQ ID NO: 4198237 - DNA, 25 bp, Homo sapien
atggcaatggcaggtccatcttccc

SEQ ID NO: 4198238 - DNA, 25 bp, Homo sapien
ttccccacctttaggggcaatctga

SEQ ID NO: 4198239 - DNA, 25 bp, Homo sapien
ggcaatggcaggtccatcttcccca

SEQ ID NO: 4198240 - DNA, 25 bp, Homo sapien
cctttaggggcaatctgattaagca

SEQ ID NO: 4198241 - DNA, 25 bp, Homo sapien
gaagtatgcttggtaggtcagaatc

SEQ ID NO: 4198242 - DNA, 25 bp, Homo sapien
aaagactggacatcctgatttagat

SEQ ID NO: 4198243 - DNA, 25 bp, Homo sapien
ctggtaaaactgataattgattgct

SEQ ID NO: 4198244 - DNA, 25 bp, Homo sapien
ctgatttagatagaaccatccctgg

SEQ ID NO: 4198245 - DNA, 25 bp, Homo sapien
aagcatgagtccagcacgcttcagg

SEQ ID NO: 4198246 - DNA, 25 bp, Homo sapien
tccagtaaattcatatcgatgtcat

SEQ ID NO: 4198247 - DNA, 25 bp, Homo sapien
tattattcggcttgtgcaggcacgg

SEQ ID NO: 4198248 - DNA, 25 bp, Homo sapien
caggcacgggtatgtgttaaacaaa

SEQ ID NO: 4198249 - DNA, 25 bp, Homo sapien
ctgaaacgtcgttcattaatcacaa

SEQ ID NO: 4198250 - DNA, 25 bp, Homo sapien
tttacgggaccttcaagaagaatga

SEQ ID NO: 4198251 - DNA, 25 bp, Homo sapien
caccctaaatttctcttcgctgaaa

SEQ ID NO: 4198252 - DNA, 25 bp, Homo sapien
ccctctcagttacgtatctacatag

SEQ ID NO: 4198253 - DNA, 25 bp, Homo sapien
tgcacacccatgataggaacgcaag

SEQ ID NO: 4198254 - DNA, 25 bp, Homo sapien
aatctataatcatctgcgttccagg

SEQ ID NO: 4198255 - DNA, 25 bp, Homo sapien
ttcacattgagtgccaaagacagta

SEQ ID NO: 4198256 - DNA, 25 bp, Homo sapien
gagcgattgcaacagtcatcttcac

SEQ ID NO: 4198257 - DNA, 25 bp, Homo sapien
ggaacacagacccaatacaggttga

SEQ ID NO: 4198258 - DNA, 25 bp, Homo sapien
gttatttaaccatacctccctgagc

SEQ ID NO: 4198259 - DNA, 25 bp, Homo sapien
catctataaggaaaatgcgggtcat

SEQ ID NO: 4198260 - DNA, 25 bp, Homo sapien
ggacctcaaagatcccctcaaggag

SEQ ID NO: 4198261 - DNA, 25 bp, Homo sapien
tcatccagttccgaaatgttctctc

SEQ ID NO: 4198262 - DNA, 25 bp, Homo sapien
acaaatgattaatgtatgggttgac

SEQ ID NO: 4198263 - DNA, 25 bp, Homo sapien
tatgggttgactcccaaggaattca

SEQ ID NO: 4198264 - DNA, 25 bp, Homo sapien
aattcatccagttccgaaatgttct

SEQ ID NO: 4198265 - DNA, 25 bp, Homo sapien
gataaggaggtttgttgacatggct

SEQ ID NO: 4198266 - DNA, 25 bp, Homo sapien
tgttgacatggctccagttgactgg

SEQ ID NO: 4198267 - DNA, 25 bp, Homo sapien
gagctgaaagatcactaaagcatct

SEQ ID NO: 4198268 - DNA, 25 bp, Homo sapien
agttgactggcactcggatcatctc

SEQ ID NO: 4198269 - DNA, 25 bp, Homo sapien
taaatgagtggataaccaataaaca

SEQ ID NO: 4198270 - DNA, 25 bp, Homo sapien
cattcagaacgttataccaattgta

SEQ ID NO: 4198271 - DNA, 25 bp, Homo sapien
ggctattaagcttaacacattttgg

SEQ ID NO: 4198272 - DNA, 25 bp, Homo sapien
gggacagagcacgtataacttcatg

SEQ ID NO: 4198273 - DNA, 25 bp, Homo sapien
cataccaatgccagggtaagtgttg

SEQ ID NO: 4198274 - DNA, 25 bp, Homo sapien
agctgccataccaatgccagggtaa

SEQ ID NO: 4198275 - DNA, 25 bp, Homo sapien
cagggtaagtgttgaattcccttca

SEQ ID NO: 4198276 - DNA, 25 bp, Homo sapien
aatgccagggtaagtgttgaattcc

SEQ ID NO: 4198277 - DNA, 25 bp, Homo sapien
ttttcaccctctccaagatccgata

SEQ ID NO: 4198278 - DNA, 25 bp, Homo sapien
gatccgataacacattcaatgtgta

SEQ ID NO: 4198279 - DNA, 25 bp, Homo sapien
ttgtttgcacttttaagagtctgat

SEQ ID NO: 4198280 - DNA, 25 bp, Homo sapien
cctctccaagatccgataacacatt

SEQ ID NO: 4198281 - DNA, 25 bp, Homo sapien
tcatttcttgacgaactgcatttgg

SEQ ID NO: 4198282 - DNA, 25 bp, Homo sapien
aggtaaacttgtgcttatagattta

SEQ ID NO: 4198283 - DNA, 25 bp, Homo sapien
tgcatttggtgcaatggcatctatt

SEQ ID NO: 4198284 - DNA, 25 bp, Homo sapien
tttcttgacgaactgcatttggtgc

SEQ ID NO: 4198285 - DNA, 25 bp, Homo sapien
gggcaccgatctttcgagcaactga

SEQ ID NO: 4198286 - DNA, 25 bp, Homo sapien
tcccattaagcatgcaaacaccgtc

SEQ ID NO: 4198287 - DNA, 25 bp, Homo sapien
ggtaatgcatatatccgggcaccga

SEQ ID NO: 4198288 - DNA, 25 bp, Homo sapien
ggtttcacttctacgaggtcatcag

SEQ ID NO: 4198289 - DNA, 25 bp, Homo sapien
taatatgaagctaacaggacagtgt

SEQ ID NO: 4198290 - DNA, 25 bp, Homo sapien
aggacagtgtcagcatatcttggga

SEQ ID NO: 4198291 - DNA, 25 bp, Homo sapien
tagtccaagctgtagcgatttccaa

SEQ ID NO: 4198292 - DNA, 25 bp, Homo sapien
tgtaacgggctgtgaaaaacatatg

SEQ ID NO: 4198293 - DNA, 25 bp, Homo sapien
tgttcgcgactctgtcctcacgtca

SEQ ID NO: 4198294 - DNA, 25 bp, Homo sapien
gcccagctgcgctccgaggagatgt

SEQ ID NO: 4198295 - DNA, 25 bp, Homo sapien
tctgcgcacgttgggctccagggct

SEQ ID NO: 4198296 - DNA, 25 bp, Homo sapien
ctccactgacagccccaagttggtg

SEQ ID NO: 4198297 - DNA, 25 bp, Homo sapien
gaaaaaggatgagtcgttcccactg

SEQ ID NO: 4198298 - DNA, 25 bp, Homo sapien
aggatgagtcgttcccactgctgcc

SEQ ID NO: 4198299 - DNA, 25 bp, Homo sapien
tgctgcctcggctcgaggcccgttg

SEQ ID NO: 4198300 - DNA, 25 bp, Homo sapien
tggaaaaaggatgagtcgttcccac

SEQ ID NO: 4198301 - DNA, 25 bp, Homo sapien
aagcttctcattcagcgtattctcc

SEQ ID NO: 4198302 - DNA, 25 bp, Homo sapien
tgtcgcacgccagcaagaaaagctt

SEQ ID NO: 4198303 - DNA, 25 bp, Homo sapien
catcacctcgttcggcgaggaagag

SEQ ID NO: 4198304 - DNA, 25 bp, Homo sapien
tgctcgggtacagggccgccatcat

SEQ ID NO: 4198305 - DNA, 25 bp, Homo sapien
gggaatgccccgatataagttgagg

SEQ ID NO: 4198306 - DNA, 25 bp, Homo sapien
caaaggcgttccgtaaatccagaga

SEQ ID NO: 4198307 - DNA, 25 bp, Homo sapien
ggagtgtcggaaactagcctctcga

SEQ ID NO: 4198308 - DNA, 25 bp, Homo sapien
tcccggaaggaatgaactgcgagcc

SEQ ID NO: 4198309 - DNA, 25 bp, Homo sapien
gcaaaactcgtattacagaccccaa

SEQ ID NO: 4198310 - DNA, 25 bp, Homo sapien
tgcttatgaatcttaatgaggacca

SEQ ID NO: 4198311 - DNA, 25 bp, Homo sapien
gacatgatcaagttcagttgctgga

SEQ ID NO: 4198312 - DNA, 25 bp, Homo sapien
cactatagcacagaaggtaatgctg

SEQ ID NO: 4198313 - DNA, 25 bp, Homo sapien
tatctcccataatcatctacttgtc

SEQ ID NO: 4198314 - DNA, 25 bp, Homo sapien
tgtatactgctacccacagtccaaa

SEQ ID NO: 4198315 - DNA, 25 bp, Homo sapien
tccttaaccaaactctagtcaggct

SEQ ID NO: 4198316 - DNA, 25 bp, Homo sapien
cagggagtataccaattcaacagca

SEQ ID NO: 4198317 - DNA, 25 bp, Homo sapien
aaagctcagctgttcatttaactgg

SEQ ID NO: 4198318 - DNA, 25 bp, Homo sapien
gagcagccatagtgtcagctcacaa

SEQ ID NO: 4198319 - DNA, 25 bp, Homo sapien
taagactcaaatccctgcaatgccc

SEQ ID NO: 4198320 - DNA, 25 bp, Homo sapien
tagagacagaaacgtaggaagagct

SEQ ID NO: 4198321 - DNA, 25 bp, Homo sapien
tttttagccttattcagagcccaca

SEQ ID NO: 4198322 - DNA, 25 bp, Homo sapien
cacatctggcctaggctttctaaat

SEQ ID NO: 4198323 - DNA, 25 bp, Homo sapien
tctttgctgaaggtacagtccttta

SEQ ID NO: 4198324 - DNA, 25 bp, Homo sapien
tttgaagtctccatgtgctggtaga

SEQ ID NO: 4198325 - DNA, 25 bp, Homo sapien
taacatagagttaaaaatgagatct

SEQ ID NO: 4198326 - DNA, 25 bp, Homo sapien
gagatctagtaataagcagaggata

SEQ ID NO: 4198327 - DNA, 25 bp, Homo sapien
tacataacatagagttaaaaatgag

SEQ ID NO: 4198328 - DNA, 25 bp, Homo sapien
aaaatgagatctagtaataagcaga

SEQ ID NO: 4198329 - DNA, 25 bp, Homo sapien
caaccgtagtccaaaagaagctgca

SEQ ID NO: 4198330 - DNA, 25 bp, Homo sapien
gctgcagtatatccaagttttcgtt

SEQ ID NO: 4198331 - DNA, 25 bp, Homo sapien
acgcaatttatgttcaagtcacctg

SEQ ID NO: 4198332 - DNA, 25 bp, Homo sapien
tctcccaagcacatctacgcaattt

SEQ ID NO: 4198333 - DNA, 25 bp, Homo sapien
gtctgatgaggactgcctgatagct

SEQ ID NO: 4198334 - DNA, 25 bp, Homo sapien
catggccctgacagcttactgtatc

SEQ ID NO: 4198335 - DNA, 25 bp, Homo sapien
tagcctgatctctccctagaaatat

SEQ ID NO: 4198336 - DNA, 25 bp, Homo sapien
ctcacaatggtgatgggcattccca

SEQ ID NO: 4198337 - DNA, 25 bp, Homo sapien
caattctactgatgccagtttccaa

SEQ ID NO: 4198338 - DNA, 25 bp, Homo sapien
gcctctgatatcttcaacaattcat

SEQ ID NO: 4198339 - DNA, 25 bp, Homo sapien
tgcattatcctaactgcctctgata

SEQ ID NO: 4198340 - DNA, 25 bp, Homo sapien
tgaaactctttccatgtaatgctct

SEQ ID NO: 4198341 - DNA, 25 bp, Homo sapien
ttcagagtcgattgccaccaaaagt

SEQ ID NO: 4198342 - DNA, 25 bp, Homo sapien
taagtagtatatcaacagctcccac

SEQ ID NO: 4198343 - DNA, 25 bp, Homo sapien
tggtcttgatgatcgttttggtcga

SEQ ID NO: 4198344 - DNA, 25 bp, Homo sapien
cgttttggtcgatgattaagtagta

SEQ ID NO: 4198345 - DNA, 25 bp, Homo sapien
tatgacagatcctgccaaaacactt

SEQ ID NO: 4198346 - DNA, 25 bp, Homo sapien
ccttgataagttcccagaggagaaa

SEQ ID NO: 4198347 - DNA, 25 bp, Homo sapien
tgtaatactcccttgctatcaatga

SEQ ID NO: 4198348 - DNA, 25 bp, Homo sapien
gcctcactagtagcatgagactgta

SEQ ID NO: 4198349 - DNA, 25 bp, Homo sapien
gttgttgaatactcaggattctgaa

SEQ ID NO: 4198350 - DNA, 25 bp, Homo sapien
actcaggattctgaattcgttccat

SEQ ID NO: 4198351 - DNA, 25 bp, Homo sapien
aatactcaggattctgaattcgttc

SEQ ID NO: 4198352 - DNA, 25 bp, Homo sapien
agttgttgaatactcaggattctga

SEQ ID NO: 4198353 - DNA, 25 bp, Homo sapien
catagttgttacgatgagcagctaa

SEQ ID NO: 4198354 - DNA, 25 bp, Homo sapien
gaatgccggaggctatcctttttgt

SEQ ID NO: 4198355 - DNA, 25 bp, Homo sapien
caatgtgcattcacagccaactgca

SEQ ID NO: 4198356 - DNA, 25 bp, Homo sapien
gctaaaatgacaggtgcaacatcca

SEQ ID NO: 4198357 - DNA, 25 bp, Homo sapien
caggaccgatgtcatatatgtgaac

SEQ ID NO: 4198358 - DNA, 25 bp, Homo sapien
taatgcgttgcactatgatgtgacc

SEQ ID NO: 4198359 - DNA, 25 bp, Homo sapien
cacagcaatgacatcagtaggcgat

SEQ ID NO: 4198360 - DNA, 25 bp, Homo sapien
gaaggaatacacactaacataatga

SEQ ID NO: 4198361 - DNA, 25 bp, Homo sapien
tgttttggtaacattaccatgccat

SEQ ID NO: 4198362 - DNA, 25 bp, Homo sapien
ctgttttggtaacattaccatgcca

SEQ ID NO: 4198363 - DNA, 25 bp, Homo sapien
ttttggtaacattaccatgccattt

SEQ ID NO: 4198364 - DNA, 25 bp, Homo sapien
ttggtaacattaccatgccattttg

SEQ ID NO: 4198365 - DNA, 25 bp, Homo sapien
gccctttgtcagatggatagatagc

SEQ ID NO: 4198366 - DNA, 25 bp, Homo sapien
ttctcataaatttaagttccttgta

SEQ ID NO: 4198367 - DNA, 25 bp, Homo sapien
ccctttgtcagatggatagatagca

SEQ ID NO: 4198368 - DNA, 25 bp, Homo sapien
ttgggttggttcctactctgtgcta

SEQ ID NO: 4198369 - DNA, 25 bp, Homo sapien
ccatggtggtttgttctcattgttc

SEQ ID NO: 4198370 - DNA, 25 bp, Homo sapien
gggttggttcctactctgtgctatt

SEQ ID NO: 4198371 - DNA, 25 bp, Homo sapien
atttgggttggttcctactctgtgc

SEQ ID NO: 4198372 - DNA, 25 bp, Homo sapien
agacaaggtctagccatatggccca

SEQ ID NO: 4198373 - DNA, 25 bp, Homo sapien
gtctagccatatggcccaggatggt

SEQ ID NO: 4198374 - DNA, 25 bp, Homo sapien
tcacttaggctagggtagagtgtgg

SEQ ID NO: 4198375 - DNA, 25 bp, Homo sapien
gtaaagacaaggtctagccatatgg

SEQ ID NO: 4198376 - DNA, 25 bp, Homo sapien
ggtagatactgagccaagttttaca

SEQ ID NO: 4198377 - DNA, 25 bp, Homo sapien
gaataaagctgagtgtacatagggc

SEQ ID NO: 4198378 - DNA, 25 bp, Homo sapien
tgctatctttcccaattccggtgtt

SEQ ID NO: 4198379 - DNA, 25 bp, Homo sapien
tacatagggcttactggcattcaaa

SEQ ID NO: 4198380 - DNA, 25 bp, Homo sapien
ttaaccattaaggaacacgtgtaga

SEQ ID NO: 4198381 - DNA, 25 bp, Homo sapien
ggaagcataatgtcacaatacctga

SEQ ID NO: 4198382 - DNA, 25 bp, Homo sapien
cacgtgtagaataccaaactagtaa

SEQ ID NO: 4198383 - DNA, 25 bp, Homo sapien
tacttccctttaaagattctggcaa

SEQ ID NO: 4198384 - DNA, 25 bp, Homo sapien
caaacatcgatatatatcaagacga

SEQ ID NO: 4198385 - DNA, 25 bp, Homo sapien
tggactggccaaacatcgatatata

SEQ ID NO: 4198386 - DNA, 25 bp, Homo sapien
tggccaaacatcgatatatatcaag

SEQ ID NO: 4198387 - DNA, 25 bp, Homo sapien
acatcgatatatatcaagacgaaac

SEQ ID NO: 4198388 - DNA, 25 bp, Homo sapien
gaattccacctccacaagacttagt

SEQ ID NO: 4198389 - DNA, 25 bp, Homo sapien
gaattggatcctcctctgttaacat

SEQ ID NO: 4198390 - DNA, 25 bp, Homo sapien
caaatgctctcagaattggatcctc

SEQ ID NO: 4198391 - DNA, 25 bp, Homo sapien
cttttaaatcagcactaagttcaaa

SEQ ID NO: 4198392 - DNA, 25 bp, Homo sapien
agaatccctattccttgaatcttgg

SEQ ID NO: 4198393 - DNA, 25 bp, Homo sapien
aaaggcaggcctaaactaatttgtg

SEQ ID NO: 4198394 - DNA, 25 bp, Homo sapien
aaatgcgcctaacaaaaacctctct

SEQ ID NO: 4198395 - DNA, 25 bp, Homo sapien
aaaatatcaattacggctgggtgcg

SEQ ID NO: 4198396 - DNA, 25 bp, Homo sapien
attaagctatattcactaaaaacgt

SEQ ID NO: 4198397 - DNA, 25 bp, Homo sapien
tatcagaaacgtcgtttccatcttc

SEQ ID NO: 4198398 - DNA, 25 bp, Homo sapien
cgtttttactcagcaacattttaat

SEQ ID NO: 4198399 - DNA, 25 bp, Homo sapien
cagcattctattatcagaaacgtcg

SEQ ID NO: 4198400 - DNA, 25 bp, Homo sapien
tcaagaggctcgtcactagacgtat

SEQ ID NO: 4198401 - DNA, 25 bp, Homo sapien
gagaattccgggcttgtgcaagtaa

SEQ ID NO: 4198402 - DNA, 25 bp, Homo sapien
taataatccccgtttgtcaagaggc

SEQ ID NO: 4198403 - DNA, 25 bp, Homo sapien
acattgccgggctagttcctcataa

SEQ ID NO: 4198404 - DNA, 25 bp, Homo sapien
aacccagatgagttactccaaagcc

SEQ ID NO: 4198405 - DNA, 25 bp, Homo sapien
gatgagttactccaaagcctttgcc

SEQ ID NO: 4198406 - DNA, 25 bp, Homo sapien
ttgccctgagccactagactactgt

SEQ ID NO: 4198407 - DNA, 25 bp, Homo sapien
gagccactagactactgtagagaaa

SEQ ID NO: 4198408 - DNA, 25 bp, Homo sapien
cgtcggtaacccgacatctgtccaa

SEQ ID NO: 4198409 - DNA, 25 bp, Homo sapien
accaaacagtgttcaggaactgctg

SEQ ID NO: 4198410 - DNA, 25 bp, Homo sapien
aaccaaacagtgttcaggaactgct

SEQ ID NO: 4198411 - DNA, 25 bp, Homo sapien
gtgggcttgcgtcggtaacccgaca

SEQ ID NO: 4198412 - DNA, 25 bp, Homo sapien
aagtgacaaaactggccaaaagatg

SEQ ID NO: 4198413 - DNA, 25 bp, Homo sapien
gacaaaactggccaaaagatgccta

SEQ ID NO: 4198414 - DNA, 25 bp, Homo sapien
tggccaaaagatgcctactgtcaaa

SEQ ID NO: 4198415 - DNA, 25 bp, Homo sapien
aaaactggccaaaagatgcctactg

SEQ ID NO: 4198416 - DNA, 25 bp, Homo sapien
ctcattgtagacaagagagtataga

SEQ ID NO: 4198417 - DNA, 25 bp, Homo sapien
gagtatagattaagcaacagcagaa

SEQ ID NO: 4198418 - DNA, 25 bp, Homo sapien
tctattctttcaagggctggcccca

SEQ ID NO: 4198419 - DNA, 25 bp, Homo sapien
gaagatagtctattctttcaagggc

SEQ ID NO: 4198420 - DNA, 25 bp, Homo sapien
tatctttacagacatgttagttaag

SEQ ID NO: 4198421 - DNA, 25 bp, Homo sapien
aatcagtgggctaaataaagacaaa

SEQ ID NO: 4198422 - DNA, 25 bp, Homo sapien
catcaatcaagaaagaatcagtggg

SEQ ID NO: 4198423 - DNA, 25 bp, Homo sapien
tcagtgatcatggaagtgttcaaat

SEQ ID NO: 4198424 - DNA, 25 bp, Homo sapien
gagggcaaaggttgccaaataaaga

SEQ ID NO: 4198425 - DNA, 25 bp, Homo sapien
gagttgattacgagattcttctaaa

SEQ ID NO: 4198426 - DNA, 25 bp, Homo sapien
tgttgtgagcaaccactttgagggc

SEQ ID NO: 4198427 - DNA, 25 bp, Homo sapien
tcatgacaaaactgagttgattacg

SEQ ID NO: 4198428 - DNA, 25 bp, Homo sapien
tgtaatggacccaagatagagctgg

SEQ ID NO: 4198429 - DNA, 25 bp, Homo sapien
cagtgtaggatggaatgcatcccaa

SEQ ID NO: 4198430 - DNA, 25 bp, Homo sapien
gaatgcatcccaatccttccgatca

SEQ ID NO: 4198431 - DNA, 25 bp, Homo sapien
gataacttagaacatttgcaaatgc

SEQ ID NO: 4198432 - DNA, 25 bp, Homo sapien
tcccgtcggatgagatggttctttc

SEQ ID NO: 4198433 - DNA, 25 bp, Homo sapien
gaatactcaagggagacaactgcag

SEQ ID NO: 4198434 - DNA, 25 bp, Homo sapien
tgagataactattgaggcaagaccc

SEQ ID NO: 4198435 - DNA, 25 bp, Homo sapien
tgagtattcttctaatcccgtcgga

SEQ ID NO: 4198436 - DNA, 25 bp, Homo sapien
gagtttaaattcttaggcacgccac

SEQ ID NO: 4198437 - DNA, 25 bp, Homo sapien
gactctgccatagtggagaggtcca

SEQ ID NO: 4198438 - DNA, 25 bp, Homo sapien
caggcaactggccagatgcttccag

SEQ ID NO: 4198439 - DNA, 25 bp, Homo sapien
taaagtggaccagctacttaagcag

SEQ ID NO: 4198440 - DNA, 25 bp, Homo sapien
gaaggtatcattgctttgctgttca

SEQ ID NO: 4198441 - DNA, 25 bp, Homo sapien
gtatatcctttatcatacagttgtg

SEQ ID NO: 4198442 - DNA, 25 bp, Homo sapien
cagttgtgtcagtccaattgtgaaa

SEQ ID NO: 4198443 - DNA, 25 bp, Homo sapien
ttcacagaagatgcctacacagtcc

SEQ ID NO: 4198444 - DNA, 25 bp, Homo sapien
tgtgacaaagattgccacatgcgct

SEQ ID NO: 4198445 - DNA, 25 bp, Homo sapien
cacaaaggactgcagttcttctcca

SEQ ID NO: 4198446 - DNA, 25 bp, Homo sapien
ttcttctccatagctaaatcttgtg

SEQ ID NO: 4198447 - DNA, 25 bp, Homo sapien
ccagcagtttggtaagcacaatcac

SEQ ID NO: 4198448 - DNA, 25 bp, Homo sapien
tgagagcaaatccacttactgaggc

SEQ ID NO: 4198449 - DNA, 25 bp, Homo sapien
tgccgtttgaccttgccttttgatg

SEQ ID NO: 4198450 - DNA, 25 bp, Homo sapien
catatagcagatagtctttggtgag

SEQ ID NO: 4198451 - DNA, 25 bp, Homo sapien
tttgtcatcaaagtagctaagccat

SEQ ID NO: 4198452 - DNA, 25 bp, Homo sapien
tcagtactatctcccattcttaata

SEQ ID NO: 4198453 - DNA, 25 bp, Homo sapien
gaaccagaaaaatatgagctgattc

SEQ ID NO: 4198454 - DNA, 25 bp, Homo sapien
gattctagtagtcattctttagcta

SEQ ID NO: 4198455 - DNA, 25 bp, Homo sapien
gatgtattgaataactttcaagaag

SEQ ID NO: 4198456 - DNA, 25 bp, Homo sapien
cgcagttcgtttagattttccacag

SEQ ID NO: 4198457 - DNA, 25 bp, Homo sapien
tcaagtaacgatgcactaggcagca

SEQ ID NO: 4198458 - DNA, 25 bp, Homo sapien
tagaagtccgaaagccaagtaaatc

SEQ ID NO: 4198459 - DNA, 25 bp, Homo sapien
gaattttgacagatcttggcgcagt

SEQ ID NO: 4198460 - DNA, 25 bp, Homo sapien
ccaaatgtcgagaagtagctatgca

SEQ ID NO: 4198461 - DNA, 25 bp, Homo sapien
gcttacagaccaagggttacctgca

SEQ ID NO: 4198462 - DNA, 25 bp, Homo sapien
gaagtgcataatcccatcgtagaca

SEQ ID NO: 4198463 - DNA, 25 bp, Homo sapien
tacctgcaccctgtggcgtaagacc

SEQ ID NO: 4198464 - DNA, 25 bp, Homo sapien
caaacctgctgttttgcctctttta

SEQ ID NO: 4198465 - DNA, 25 bp, Homo sapien
aaacctgctgttttgcctcttttat

SEQ ID NO: 4198466 - DNA, 25 bp, Homo sapien
tcagaaatcatgtctcttaaagatg

SEQ ID NO: 4198467 - DNA, 25 bp, Homo sapien
taatttatatcagaaatcatgtctc

SEQ ID NO: 4198468 - DNA, 25 bp, Homo sapien
cgacttagtgcggtgataggaagct

SEQ ID NO: 4198469 - DNA, 25 bp, Homo sapien
tctgattggaaacctgccgacttag

SEQ ID NO: 4198470 - DNA, 25 bp, Homo sapien
ggtatgaggcctccgagatagctga

SEQ ID NO: 4198471 - DNA, 25 bp, Homo sapien
ccgaaagatgggactggttgactct

SEQ ID NO: 4198472 - DNA, 25 bp, Homo sapien
tgaaggcttgccaagcctaccacaa

SEQ ID NO: 4198473 - DNA, 25 bp, Homo sapien
ccatcttgaaggcttgccaagccta

SEQ ID NO: 4198474 - DNA, 25 bp, Homo sapien
agcctggaggccgtagcaagctgtc

SEQ ID NO: 4198475 - DNA, 25 bp, Homo sapien
ctggaggccgtagcaagctgtcctg

SEQ ID NO: 4198476 - DNA, 25 bp, Homo sapien
cacgggccagtttgtgtattgcggc

SEQ ID NO: 4198477 - DNA, 25 bp, Homo sapien
cgggccagtttgtgtattgcggcaa

SEQ ID NO: 4198478 - DNA, 25 bp, Homo sapien
tcacacgggccagtttgtgtattgc

SEQ ID NO: 4198479 - DNA, 25 bp, Homo sapien
cacacgggccagtttgtgtattgcg

SEQ ID NO: 4198480 - DNA, 25 bp, Homo sapien
tgtttaggcatgtctccaggaggga

SEQ ID NO: 4198481 - DNA, 25 bp, Homo sapien
tagaaggaatagcttgtgaaggtcc

SEQ ID NO: 4198482 - DNA, 25 bp, Homo sapien
gagggagtgaccttgaaactgagac

SEQ ID NO: 4198483 - DNA, 25 bp, Homo sapien
gcactgctaattggacagagcccac

SEQ ID NO: 4198484 - DNA, 25 bp, Homo sapien
ctggctttaggaacctcacaactct

SEQ ID NO: 4198485 - DNA, 25 bp, Homo sapien
gctttaggaacctcacaactctcca

SEQ ID NO: 4198486 - DNA, 25 bp, Homo sapien
ggctttaggaacctcacaactctcc

SEQ ID NO: 4198487 - DNA, 25 bp, Homo sapien
tggctttaggaacctcacaactctc

SEQ ID NO: 4198488 - DNA, 25 bp, Homo sapien
taggcaagattttcaagaagtatag

SEQ ID NO: 4198489 - DNA, 25 bp, Homo sapien
ttaggcaagattttcaagaagtata

SEQ ID NO: 4198490 - DNA, 25 bp, Homo sapien
gagatgacatggacttttcacctat

SEQ ID NO: 4198491 - DNA, 25 bp, Homo sapien
ccatctgctggtactgcagtttcag

SEQ ID NO: 4198492 - DNA, 25 bp, Homo sapien
tcttgtggacttgggcctttttggc

SEQ ID NO: 4198493 - DNA, 25 bp, Homo sapien
ggactttacgggtgctgtgccatga

SEQ ID NO: 4198494 - DNA, 25 bp, Homo sapien
catgaggtagtgtgatcctgagctg

SEQ ID NO: 4198495 - DNA, 25 bp, Homo sapien
aagaagccagcggtgtaaggcatga

SEQ ID NO: 4198496 - DNA, 25 bp, Homo sapien
agcagaaggaacacgacaacagcat

SEQ ID NO: 4198497 - DNA, 25 bp, Homo sapien
taagcagaaggaacacgacaacagc

SEQ ID NO: 4198498 - DNA, 25 bp, Homo sapien
ccagtggtcctgttgtgtcttgcac

SEQ ID NO: 4198499 - DNA, 25 bp, Homo sapien
tcaagccagcgtgcccccagtggtc

SEQ ID NO: 4198500 - DNA, 25 bp, Homo sapien
ccagcgtgcccccagtggtcctgtt

SEQ ID NO: 4198501 - DNA, 25 bp, Homo sapien
tgcccccagtggtcctgttgtgtct

SEQ ID NO: 4198502 - DNA, 25 bp, Homo sapien
tggggtgttgacctcttatctgcat

SEQ ID NO: 4198503 - DNA, 25 bp, Homo sapien
tgacctcttatctgcatgacaagtg

SEQ ID NO: 4198504 - DNA, 25 bp, Homo sapien
ttttcactccgtcctggggtgttga

SEQ ID NO: 4198505 - DNA, 25 bp, Homo sapien
tcctggggtgttgacctcttatctg

SEQ ID NO: 4198506 - DNA, 25 bp, Homo sapien
tgtctttggaggcaggataccaact

SEQ ID NO: 4198507 - DNA, 25 bp, Homo sapien
tgaattctccactgccttggtgact

SEQ ID NO: 4198508 - DNA, 25 bp, Homo sapien
gataccaactgctactcctgaaact

SEQ ID NO: 4198509 - DNA, 25 bp, Homo sapien
gaaactgttgccacaggcactactg

SEQ ID NO: 4198510 - DNA, 25 bp, Homo sapien
tttccatggacaggataagggtggg

SEQ ID NO: 4198511 - DNA, 25 bp, Homo sapien
tgggagcacaccttcctgagcatct

SEQ ID NO: 4198512 - DNA, 25 bp, Homo sapien
caagtaaactagtctggacaagggc

SEQ ID NO: 4198513 - DNA, 25 bp, Homo sapien
gatatggtccttgccagtctagaac

SEQ ID NO: 4198514 - DNA, 25 bp, Homo sapien
cagacggctggattcgcacaagggt

SEQ ID NO: 4198515 - DNA, 25 bp, Homo sapien
gtggtgattctgcctcatatcctcc

SEQ ID NO: 4198516 - DNA, 25 bp, Homo sapien
gacttaaatcagcagttagccttgg

SEQ ID NO: 4198517 - DNA, 25 bp, Homo sapien
cgtgccctgccagaaaaagatatta

SEQ ID NO: 4198518 - DNA, 25 bp, Homo sapien
gcttcaagaatagctggatctaggg

SEQ ID NO: 4198519 - DNA, 25 bp, Homo sapien
tatttacacacgcatttatccaagc

SEQ ID NO: 4198520 - DNA, 25 bp, Homo sapien
catttatattcaagggtaagatatt

SEQ ID NO: 4198521 - DNA, 25 bp, Homo sapien
attgcccccgggtcacttacatcat

SEQ ID NO: 4198522 - DNA, 25 bp, Homo sapien
tattaagagcaatataaattatagt

SEQ ID NO: 4198523 - DNA, 25 bp, Homo sapien
tattcaagggtaagatattaagagc

SEQ ID NO: 4198524 - DNA, 25 bp, Homo sapien
tactcgaatcattcaggaaaacccc

SEQ ID NO: 4198525 - DNA, 25 bp, Homo sapien
cctaagtctattggattaatgtcat

SEQ ID NO: 4198526 - DNA, 25 bp, Homo sapien
tatcttattcctaagtctattggat

SEQ ID NO: 4198527 - DNA, 25 bp, Homo sapien
taatgtcatatgtacatcaggttag

SEQ ID NO: 4198528 - DNA, 25 bp, Homo sapien
tattttcacatctcctcaatgtaat

SEQ ID NO: 4198529 - DNA, 25 bp, Homo sapien
acagggagcataagtttcacgctca

SEQ ID NO: 4198530 - DNA, 25 bp, Homo sapien
tgaactaggcactctgcatatgtta

SEQ ID NO: 4198531 - DNA, 25 bp, Homo sapien
ttcaagcatctactatgaactaggc

SEQ ID NO: 4198532 - DNA, 25 bp, Homo sapien
ccattttcacaagagaagggacttg

SEQ ID NO: 4198533 - DNA, 25 bp, Homo sapien
ttttggagaaatcccctgtgttcca

SEQ ID NO: 4198534 - DNA, 25 bp, Homo sapien
gggaataatatctcaactgtagttc

SEQ ID NO: 4198535 - DNA, 25 bp, Homo sapien
gacggtaagagagtcgttgagtcca

SEQ ID NO: 4198536 - DNA, 25 bp, Homo sapien
taaccggtcatgttctgtagcagat

SEQ ID NO: 4198537 - DNA, 25 bp, Homo sapien
ggtcaatgatcaaggcagaagctct

SEQ ID NO: 4198538 - DNA, 25 bp, Homo sapien
gcaaagtccatcgaaagacagtcag

SEQ ID NO: 4198539 - DNA, 25 bp, Homo sapien
tcaaagtgtagctcccagagatgaa

SEQ ID NO: 4198540 - DNA, 25 bp, Homo sapien
acttggctgccactaaaatcactgg

SEQ ID NO: 4198541 - DNA, 25 bp, Homo sapien
gggtcttgtcatacgaataccagag

SEQ ID NO: 4198542 - DNA, 25 bp, Homo sapien
gctggttttgacagacatctgccaa

SEQ ID NO: 4198543 - DNA, 25 bp, Homo sapien
tatggcgaagatgaggttctcccct

SEQ ID NO: 4198544 - DNA, 25 bp, Homo sapien
ccaacagataacgtacaaagagatg

SEQ ID NO: 4198545 - DNA, 25 bp, Homo sapien
aaacagagcaagcatgagaacaggc

SEQ ID NO: 4198546 - DNA, 25 bp, Homo sapien
tcaagaacattgtgacatgaagaat

SEQ ID NO: 4198547 - DNA, 25 bp, Homo sapien
gagaacaggctcagatatgacaggg

SEQ ID NO: 4198548 - DNA, 25 bp, Homo sapien
gggagtgcacatagctgaccaccca

SEQ ID NO: 4198549 - DNA, 25 bp, Homo sapien
caacttcaactcttaaactttgtgg

SEQ ID NO: 4198550 - DNA, 25 bp, Homo sapien
tgtcctaaataaccccagcaaggga

SEQ ID NO: 4198551 - DNA, 25 bp, Homo sapien
tgtgtgtgaacttacagtatctctg

SEQ ID NO: 4198552 - DNA, 25 bp, Homo sapien
gttaacagtgatcaaatagagacct

SEQ ID NO: 4198553 - DNA, 25 bp, Homo sapien
gagtaaaaatgatgcgcgcacaaag

SEQ ID NO: 4198554 - DNA, 25 bp, Homo sapien
catctgccttatgaggttcacccat

SEQ ID NO: 4198555 - DNA, 25 bp, Homo sapien
aaaggattccatgtgtatttaggcc

SEQ ID NO: 4198556 - DNA, 25 bp, Homo sapien
caaagcctgtggtacgcactgaatt

SEQ ID NO: 4198557 - DNA, 25 bp, Homo sapien
tggagctttgtaggaaacaggcaca

SEQ ID NO: 4198558 - DNA, 25 bp, Homo sapien
agggcttaacctgctagaaaatgca

SEQ ID NO: 4198559 - DNA, 25 bp, Homo sapien
ttcacagccttctgcattgcataca

SEQ ID NO: 4198560 - DNA, 25 bp, Homo sapien
agtgtcctccagaacgcccgcgtgg

SEQ ID NO: 4198561 - DNA, 25 bp, Homo sapien
gaagaccaactaagccttcgtgtag

SEQ ID NO: 4198562 - DNA, 25 bp, Homo sapien
gtagtgcgtagacaggccgacacac

SEQ ID NO: 4198563 - DNA, 25 bp, Homo sapien
aagacagtgagggagcgagaggcgc

SEQ ID NO: 4198564 - DNA, 25 bp, Homo sapien
ggcgcatccccaggtagctgacaat

SEQ ID NO: 4198565 - DNA, 25 bp, Homo sapien
tcattagaggttttctgagtcatca

SEQ ID NO: 4198566 - DNA, 25 bp, Homo sapien
cctttgactctggaatcccttaata

SEQ ID NO: 4198567 - DNA, 25 bp, Homo sapien
gctgtcggactcagttccaaataga

SEQ ID NO: 4198568 - DNA, 25 bp, Homo sapien
gtcatcatctgagatttttcattaa

SEQ ID NO: 4198569 - DNA, 25 bp, Homo sapien
ggtacttctgattaattacatataa

SEQ ID NO: 4198570 - DNA, 25 bp, Homo sapien
ctgccaggtacttctgattaattac

SEQ ID NO: 4198571 - DNA, 25 bp, Homo sapien
tccgtttctaccaactggacttcat

SEQ ID NO: 4198572 - DNA, 25 bp, Homo sapien
gttcctgctagaatgcacctcctac

SEQ ID NO: 4198573 - DNA, 25 bp, Homo sapien
ctttaaggctcaagggcatattttc

SEQ ID NO: 4198574 - DNA, 25 bp, Homo sapien
tcacactgcagtgcatcacaaccgt

SEQ ID NO: 4198575 - DNA, 25 bp, Homo sapien
tgtgcagtagcgatgaaagtagcct

SEQ ID NO: 4198576 - DNA, 25 bp, Homo sapien
taacctacttagaggatgtgcagta

SEQ ID NO: 4198577 - DNA, 25 bp, Homo sapien
cgggcctgccctggattcaagttta

SEQ ID NO: 4198578 - DNA, 25 bp, Homo sapien
tttacaaatagccatgggtcctcag

SEQ ID NO: 4198579 - DNA, 25 bp, Homo sapien
tgtaagcgagctgattatgcaacta

SEQ ID NO: 4198580 - DNA, 25 bp, Homo sapien
catttttacacgtgacagctctggt

SEQ ID NO: 4198581 - DNA, 25 bp, Homo sapien
tgtgtgtgccggtgagacgggccat

SEQ ID NO: 4198582 - DNA, 25 bp, Homo sapien
gggccagccatgggactatgtgtgt

SEQ ID NO: 4198583 - DNA, 25 bp, Homo sapien
gactatgtgtgtgccggtgagacgg

SEQ ID NO: 4198584 - DNA, 25 bp, Homo sapien
gggactatgtgtgtgccggtgagac

SEQ ID NO: 4198585 - DNA, 25 bp, Homo sapien
gaatgttactggctctcaccatggg

SEQ ID NO: 4198586 - DNA, 25 bp, Homo sapien
attagcagtaaggaggtcctcctgg

SEQ ID NO: 4198587 - DNA, 25 bp, Homo sapien
caccatgggcacaggattagcagta

SEQ ID NO: 4198588 - DNA, 25 bp, Homo sapien
catccagacgtagtttttgcaccaa

SEQ ID NO: 4198589 - DNA, 25 bp, Homo sapien
agcaatttcaagctctgtaatatac

SEQ ID NO: 4198590 - DNA, 25 bp, Homo sapien
tcaggtagcaatttcaagctctgta

SEQ ID NO: 4198591 - DNA, 25 bp, Homo sapien
ggtagcaatttcaagctctgtaata

SEQ ID NO: 4198592 - DNA, 25 bp, Homo sapien
caggtagcaatttcaagctctgtaa

SEQ ID NO: 4198593 - DNA, 25 bp, Homo sapien
aagctgagataaggccaaataccac

SEQ ID NO: 4198594 - DNA, 25 bp, Homo sapien
caagctgagataaggccaaatacca

SEQ ID NO: 4198595 - DNA, 25 bp, Homo sapien
tgaccgctttctgggctggaacccc

SEQ ID NO: 4198596 - DNA, 25 bp, Homo sapien
ctgaccgctttctgggctggaaccc

SEQ ID NO: 4198597 - DNA, 25 bp, Homo sapien
gggctggaaccccagtgccttggca

SEQ ID NO: 4198598 - DNA, 25 bp, Homo sapien
tggaaccccagtgccttggcagagc

SEQ ID NO: 4198599 - DNA, 25 bp, Homo sapien
caagctctccttgagcaatgatgct

SEQ ID NO: 4198600 - DNA, 25 bp, Homo sapien
ttctaacttcctgttgtcaaccaag

SEQ ID NO: 4198601 - DNA, 25 bp, Homo sapien
tcctgttgtcaaccaagctctcctt

SEQ ID NO: 4198602 - DNA, 25 bp, Homo sapien
agcaatgatgcttgtcctggtgctg

SEQ ID NO: 4198603 - DNA, 25 bp, Homo sapien
tgaatgttgagatagggttgctccc

SEQ ID NO: 4198604 - DNA, 25 bp, Homo sapien
cgagaagaggagccgtttgacccaa

SEQ ID NO: 4198605 - DNA, 25 bp, Homo sapien
ggttgctcccgaaaagccgagaaga

SEQ ID NO: 4198606 - DNA, 25 bp, Homo sapien
gatagggttgctcccgaaaagccga

SEQ ID NO: 4198607 - DNA, 25 bp, Homo sapien
gtgggagaggcaaacttgcagtctg

SEQ ID NO: 4198608 - DNA, 25 bp, Homo sapien
ggagaggcaaacttgcagtctgctc

SEQ ID NO: 4198609 - DNA, 25 bp, Homo sapien
tgggagaggcaaacttgcagtctgc

SEQ ID NO: 4198610 - DNA, 25 bp, Homo sapien
agaggcaaacttgcagtctgctcat

SEQ ID NO: 4198611 - DNA, 25 bp, Homo sapien
gctcgatggacggaaacgctgttct

SEQ ID NO: 4198612 - DNA, 25 bp, Homo sapien
ctggcgctcgatggacggaaacgct

SEQ ID NO: 4198613 - DNA, 25 bp, Homo sapien
aaacgctgttcttgccgcttcggca

SEQ ID NO: 4198614 - DNA, 25 bp, Homo sapien
gacggaaacgctgttcttgccgctt

SEQ ID NO: 4198615 - DNA, 25 bp, Homo sapien
gagcggatctcagtgaagcccgcca

SEQ ID NO: 4198616 - DNA, 25 bp, Homo sapien
tttgcccctccttcggcggcggcag

SEQ ID NO: 4198617 - DNA, 25 bp, Homo sapien
gagtcgagcaccgaaagagcggatc

SEQ ID NO: 4198618 - DNA, 25 bp, Homo sapien
agcacgggcgagtcgagcaccgaaa

SEQ ID NO: 4198619 - DNA, 25 bp, Homo sapien
tctgagatccgcctggcgttttgtc

SEQ ID NO: 4198620 - DNA, 25 bp, Homo sapien
aactggccttctgagatccgcctgg

SEQ ID NO: 4198621 - DNA, 25 bp, Homo sapien
gccttctgagatccgcctggcgttt

SEQ ID NO: 4198622 - DNA, 25 bp, Homo sapien
gatccgcctggcgttttgtccgcca

SEQ ID NO: 4198623 - DNA, 25 bp, Homo sapien
aggatctcacttgcgtaaccattca

SEQ ID NO: 4198624 - DNA, 25 bp, Homo sapien
tgataaatttgcaaacagagcagta

SEQ ID NO: 4198625 - DNA, 25 bp, Homo sapien
catagtgtagcacaatgcaccggtg

SEQ ID NO: 4198626 - DNA, 25 bp, Homo sapien
tgcaccggtgtaggacaatgcacca

SEQ ID NO: 4198627 - DNA, 25 bp, Homo sapien
cagatgaatgaacatctgatgatct

SEQ ID NO: 4198628 - DNA, 25 bp, Homo sapien
gtgcatctgaagatccagatgaatg

SEQ ID NO: 4198629 - DNA, 25 bp, Homo sapien
atgtgcatctgaagatccagatgaa

SEQ ID NO: 4198630 - DNA, 25 bp, Homo sapien
gatgaatgaacatctgatgatctcg

SEQ ID NO: 4198631 - DNA, 25 bp, Homo sapien
gagagattctgatgaggagaatcac

SEQ ID NO: 4198632 - DNA, 25 bp, Homo sapien
ttgggctcttaggtcgtgtccgact

SEQ ID NO: 4198633 - DNA, 25 bp, Homo sapien
tcacgggcactttcattcctataat

SEQ ID NO: 4198634 - DNA, 25 bp, Homo sapien
gaatcacaaaggctttcacgggcac

SEQ ID NO: 4198635 - DNA, 25 bp, Homo sapien
ttacttaaagttcgcttagctgtac

SEQ ID NO: 4198636 - DNA, 25 bp, Homo sapien
tagctgtactcatttttccaatact

SEQ ID NO: 4198637 - DNA, 25 bp, Homo sapien
acttaaagttcgcttagctgtactc

SEQ ID NO: 4198638 - DNA, 25 bp, Homo sapien
tttacttaaagttcgcttagctgta

SEQ ID NO: 4198639 - DNA, 25 bp, Homo sapien
acacattcatttccaaggataattc

SEQ ID NO: 4198640 - DNA, 25 bp, Homo sapien
cacattcatttccaaggataattca

SEQ ID NO: 4198641 - DNA, 25 bp, Homo sapien
acattcatttccaaggataattcaa

SEQ ID NO: 4198642 - DNA, 25 bp, Homo sapien
taacaacaccccctcgcacaaatgt

SEQ ID NO: 4198643 - DNA, 25 bp, Homo sapien
ttattaccatcacttccttcaaaag

SEQ ID NO: 4198644 - DNA, 25 bp, Homo sapien
attaccatcacttccttcaaaagca

SEQ ID NO: 4198645 - DNA, 25 bp, Homo sapien
caccccctcgcacaaatgttttcac

SEQ ID NO: 4198646 - DNA, 25 bp, Homo sapien
tttttggtttctatcacaagaagag

SEQ ID NO: 4198647 - DNA, 25 bp, Homo sapien
tgcaaatcttgaagatggcttatag

SEQ ID NO: 4198648 - DNA, 25 bp, Homo sapien
ctttcattggaagactgatttggag

SEQ ID NO: 4198649 - DNA, 25 bp, Homo sapien
ttgaagatggcttatagattttacc

SEQ ID NO: 4198650 - DNA, 25 bp, Homo sapien
ccaatgattcaataataagagcctt

SEQ ID NO: 4198651 - DNA, 25 bp, Homo sapien
taagagcctttttacatcatttcag

SEQ ID NO: 4198652 - DNA, 25 bp, Homo sapien
gacaaccagtagtcagggaaattaa

SEQ ID NO: 4198653 - DNA, 25 bp, Homo sapien
aactgccaaaaatacgcactcttca

SEQ ID NO: 4198654 - DNA, 25 bp, Homo sapien
cttctttgaagagttccaaattgct

SEQ ID NO: 4198655 - DNA, 25 bp, Homo sapien
taattcttctttgaagagttccaaa

SEQ ID NO: 4198656 - DNA, 25 bp, Homo sapien
ttcttctttgaagagttccaaattg

SEQ ID NO: 4198657 - DNA, 25 bp, Homo sapien
aattcttctttgaagagttccaaat

SEQ ID NO: 4198658 - DNA, 25 bp, Homo sapien
cgacgctgaccatcagaatctgact

SEQ ID NO: 4198659 - DNA, 25 bp, Homo sapien
tagaacgacgctgaccatcagaatc

SEQ ID NO: 4198660 - DNA, 25 bp, Homo sapien
tgttttatgtctctcatcacgttcc

SEQ ID NO: 4198661 - DNA, 25 bp, Homo sapien
tttatgtctctcatcacgttcctct

SEQ ID NO: 4198662 - DNA, 25 bp, Homo sapien
gatctatttcttcttgaaggcgcgt

SEQ ID NO: 4198663 - DNA, 25 bp, Homo sapien
cagatgatctatttcttcttgaagg

SEQ ID NO: 4198664 - DNA, 25 bp, Homo sapien
gatgatctatttcttcttgaaggcg

SEQ ID NO: 4198665 - DNA, 25 bp, Homo sapien
ctatttcttcttgaaggcgcgtcca

SEQ ID NO: 4198666 - DNA, 25 bp, Homo sapien
attagtagtgcttggatctcctaca

SEQ ID NO: 4198667 - DNA, 25 bp, Homo sapien
tttccaaggtataaattagtagtgc

SEQ ID NO: 4198668 - DNA, 25 bp, Homo sapien
gatctcctacatcatgtgagccagg

SEQ ID NO: 4198669 - DNA, 25 bp, Homo sapien
gagccaggtgcgtaatcatcaagaa

SEQ ID NO: 4198670 - DNA, 25 bp, Homo sapien
ctggctaacggtccaaatcttccaa

SEQ ID NO: 4198671 - DNA, 25 bp, Homo sapien
tgattttcacactggctaacggtcc

SEQ ID NO: 4198672 - DNA, 25 bp, Homo sapien
gcatctcttctattcataaaggcca

SEQ ID NO: 4198673 - DNA, 25 bp, Homo sapien
taaaggccacaaagccgcaatttct

SEQ ID NO: 4198674 - DNA, 25 bp, Homo sapien
cgtatgttccatcatagaaggcgga

SEQ ID NO: 4198675 - DNA, 25 bp, Homo sapien
cgcattaaaaggcagtccggatgga

SEQ ID NO: 4198676 - DNA, 25 bp, Homo sapien
gttttttaaccgctctctaggctgc

SEQ ID NO: 4198677 - DNA, 25 bp, Homo sapien
taggtggcggtaacataggagcatt

SEQ ID NO: 4198678 - DNA, 25 bp, Homo sapien
caaatatagggtttccatgggctaa

SEQ ID NO: 4198679 - DNA, 25 bp, Homo sapien
tacagttcgctactttgttcccaag

SEQ ID NO: 4198680 - DNA, 25 bp, Homo sapien
gcaaatctggatacaacactggaca

SEQ ID NO: 4198681 - DNA, 25 bp, Homo sapien
catgggctaaggcagggaacacatc

SEQ ID NO: 4198682 - DNA, 25 bp, Homo sapien
cactttgactatggcttgcgacaga

SEQ ID NO: 4198683 - DNA, 25 bp, Homo sapien
ctttgactatggcttgcgacagagt

SEQ ID NO: 4198684 - DNA, 25 bp, Homo sapien
gggataaccactttgactatggctt

SEQ ID NO: 4198685 - DNA, 25 bp, Homo sapien
taaccactttgactatggcttgcga

SEQ ID NO: 4198686 - DNA, 25 bp, Homo sapien
ggggatattgtctatatttagatca

SEQ ID NO: 4198687 - DNA, 25 bp, Homo sapien
tcagaaggggatattgtctatattt

SEQ ID NO: 4198688 - DNA, 25 bp, Homo sapien
cagaaggggatattgtctatattta

SEQ ID NO: 4198689 - DNA, 25 bp, Homo sapien
gatattgtctatatttagatcagta

SEQ ID NO: 4198690 - DNA, 25 bp, Homo sapien
tccagtgttcatgacaataatagga

SEQ ID NO: 4198691 - DNA, 25 bp, Homo sapien
tgttcatgacaataataggaatttc

SEQ ID NO: 4198692 - DNA, 25 bp, Homo sapien
aagaaagtttctagtatgtccagtg

SEQ ID NO: 4198693 - DNA, 25 bp, Homo sapien
tttctagtatgtccagtgttcatga

SEQ ID NO: 4198694 - DNA, 25 bp, Homo sapien
ccgctgccgcagacagttcagctgg

SEQ ID NO: 4198695 - DNA, 25 bp, Homo sapien
cgctgccgcagacagttcagctggt

SEQ ID NO: 4198696 - DNA, 25 bp, Homo sapien
cccgctgccgcagacagttcagctg

SEQ ID NO: 4198697 - DNA, 25 bp, Homo sapien
tttgtttagaaataagctgagccac

SEQ ID NO: 4198698 - DNA, 25 bp, Homo sapien
tgcagttcttcagcattcatatggt

SEQ ID NO: 4198699 - DNA, 25 bp, Homo sapien
tgtaaagctaccactagatatgtgc

SEQ ID NO: 4198700 - DNA, 25 bp, Homo sapien
gtgagtgaagactttcggcaaaacg

SEQ ID NO: 4198701 - DNA, 25 bp, Homo sapien
gaagctgggtcctaaaatcatgtga

SEQ ID NO: 4198702 - DNA, 25 bp, Homo sapien
tatggtgtcgggcaaaaatgactca

SEQ ID NO: 4198703 - DNA, 25 bp, Homo sapien
taatgaggcaacatccctttggacc

SEQ ID NO: 4198704 - DNA, 25 bp, Homo sapien
cacagctggcaaataacaattggga

SEQ ID NO: 4198705 - DNA, 25 bp, Homo sapien
tatcattcgatgtatcagggcgagc

SEQ ID NO: 4198706 - DNA, 25 bp, Homo sapien
taatcatagcttcaaacattggccc

SEQ ID NO: 4198707 - DNA, 25 bp, Homo sapien
gaacataggattgttgatttctctg

SEQ ID NO: 4198708 - DNA, 25 bp, Homo sapien
tggcccttcacgtacaacaaactct

SEQ ID NO: 4198709 - DNA, 25 bp, Homo sapien
cctatagtaaacatgggctggtgtc

SEQ ID NO: 4198710 - DNA, 25 bp, Homo sapien
agcttccacctatagtaaacatggg

SEQ ID NO: 4198711 - DNA, 25 bp, Homo sapien
tccacctatagtaaacatgggctgg

SEQ ID NO: 4198712 - DNA, 25 bp, Homo sapien
tatagtaaacatgggctggtgtctg

SEQ ID NO: 4198713 - DNA, 25 bp, Homo sapien
tcttccgtccgccatttagttggag

SEQ ID NO: 4198714 - DNA, 25 bp, Homo sapien
tccatttttgaacatacgaaaatct

SEQ ID NO: 4198715 - DNA, 25 bp, Homo sapien
caagtacggatttaatggtggtggc

SEQ ID NO: 4198716 - DNA, 25 bp, Homo sapien
taggttcctctacaaaagcttctgt

SEQ ID NO: 4198717 - DNA, 25 bp, Homo sapien
gagggactaacttcttccaagctcc

SEQ ID NO: 4198718 - DNA, 25 bp, Homo sapien
taccatatctggagttacttcctct

SEQ ID NO: 4198719 - DNA, 25 bp, Homo sapien
gctcctgttaatgtcgatttttata

SEQ ID NO: 4198720 - DNA, 25 bp, Homo sapien
tccctcaaagtcatctatgagggac

SEQ ID NO: 4198721 - DNA, 25 bp, Homo sapien
agcttcagcattattaagacagaaa

SEQ ID NO: 4198722 - DNA, 25 bp, Homo sapien
gacagaaaaccattgcatctccaat

SEQ ID NO: 4198723 - DNA, 25 bp, Homo sapien
gactcagtaatgcaatccactattt

SEQ ID NO: 4198724 - DNA, 25 bp, Homo sapien
taagatggacaacgactcagtaatg

SEQ ID NO: 4198725 - DNA, 25 bp, Homo sapien
agagttgtacaaaacatcagaaacc

SEQ ID NO: 4198726 - DNA, 25 bp, Homo sapien
aagagttgtacaaaacatcagaaac

SEQ ID NO: 4198727 - DNA, 25 bp, Homo sapien
atggccttgaattgtacgataggtg

SEQ ID NO: 4198728 - DNA, 25 bp, Homo sapien
gccttgaattgtacgataggtggca

SEQ ID NO: 4198729 - DNA, 25 bp, Homo sapien
cttgaattgtacgataggtggcatt

SEQ ID NO: 4198730 - DNA, 25 bp, Homo sapien
tgaattgtacgataggtggcattga

SEQ ID NO: 4198731 - DNA, 25 bp, Homo sapien
ctctgaagcaagtcattacccgttg

SEQ ID NO: 4198732 - DNA, 25 bp, Homo sapien
caataatatttacaagtcctaagaa

SEQ ID NO: 4198733 - DNA, 25 bp, Homo sapien
ttgtagtttgatcaaaaatggttct

SEQ ID NO: 4198734 - DNA, 25 bp, Homo sapien
caaaaatggttctggataaattgcc

SEQ ID NO: 4198735 - DNA, 25 bp, Homo sapien
taccttgtgaggcaatgatgagcaa

SEQ ID NO: 4198736 - DNA, 25 bp, Homo sapien
aatttgtaatccagtacaagccaac

SEQ ID NO: 4198737 - DNA, 25 bp, Homo sapien
taactggatacccacaatctgaggt

SEQ ID NO: 4198738 - DNA, 25 bp, Homo sapien
cagtttgctaaagaagcagtcagtt

SEQ ID NO: 4198739 - DNA, 25 bp, Homo sapien
aagctcttcctcgatgggggcacca

SEQ ID NO: 4198740 - DNA, 25 bp, Homo sapien
gggggcaccatcaaggtcatctgga

SEQ ID NO: 4198741 - DNA, 25 bp, Homo sapien
tcaagatcatcgatgggagtagcat

SEQ ID NO: 4198742 - DNA, 25 bp, Homo sapien
catcaagatcatcgatgggagtagc

SEQ ID NO: 4198743 - DNA, 25 bp, Homo sapien
cttttttgagtcttcagttgcatcc

SEQ ID NO: 4198744 - DNA, 25 bp, Homo sapien
ttttttgagtcttcagttgcatcca

SEQ ID NO: 4198745 - DNA, 25 bp, Homo sapien
cttcatgctggtcaaataattccca

SEQ ID NO: 4198746 - DNA, 25 bp, Homo sapien
tgctggtcaaataattcccatttag

SEQ ID NO: 4198747 - DNA, 25 bp, Homo sapien
aattcccatttagaagttgtaacag

SEQ ID NO: 4198748 - DNA, 25 bp, Homo sapien
catgctggtcaaataattcccattt

SEQ ID NO: 4198749 - DNA, 25 bp, Homo sapien
catttcagagtacttagagaactta

SEQ ID NO: 4198750 - DNA, 25 bp, Homo sapien
tttcagagtacttagagaacttaga

SEQ ID NO: 4198751 - DNA, 25 bp, Homo sapien
agagtacttagagaacttagactca

SEQ ID NO: 4198752 - DNA, 25 bp, Homo sapien
tcagagtacttagagaacttagact

SEQ ID NO: 4198753 - DNA, 25 bp, Homo sapien
ccttttcccttcatggaaagtgcag

SEQ ID NO: 4198754 - DNA, 25 bp, Homo sapien
gaacagacggttgaactaagaggcc

SEQ ID NO: 4198755 - DNA, 25 bp, Homo sapien
tcatctggtatgaagagttctaagc

SEQ ID NO: 4198756 - DNA, 25 bp, Homo sapien
ccatttcttcagaggatctcctatg

SEQ ID NO: 4198757 - DNA, 25 bp, Homo sapien
agcccttctctgagatgtctgaata

SEQ ID NO: 4198758 - DNA, 25 bp, Homo sapien
cccttctctgagatgtctgaatagc

SEQ ID NO: 4198759 - DNA, 25 bp, Homo sapien
aaagcccttctctgagatgtctgaa

SEQ ID NO: 4198760 - DNA, 25 bp, Homo sapien
ttacaaagcccttctctgagatgtc

SEQ ID NO: 4198761 - DNA, 25 bp, Homo sapien
gctcacgcctgtaatcccagcactt

SEQ ID NO: 4198762 - DNA, 25 bp, Homo sapien
aggtgggcggatcacctgaggtcag

SEQ ID NO: 4198763 - DNA, 25 bp, Homo sapien
aaaacagaccaggccgggcgcagtg

SEQ ID NO: 4198764 - DNA, 25 bp, Homo sapien
tgggaggccgaggtgggcggatcac

SEQ ID NO: 4198765 - DNA, 25 bp, Homo sapien
tttcccagattccaattcatcctga

SEQ ID NO: 4198766 - DNA, 25 bp, Homo sapien
cccagattccaattcatcctgaaac

SEQ ID NO: 4198767 - DNA, 25 bp, Homo sapien
ttttcccagattccaattcatcctg

SEQ ID NO: 4198768 - DNA, 25 bp, Homo sapien
tcccagattccaattcatcctgaaa

SEQ ID NO: 4198769 - DNA, 25 bp, Homo sapien
cctctcagggttgttggcgtctcac

SEQ ID NO: 4198770 - DNA, 25 bp, Homo sapien
agaataaaatagtgtgctgctgcct

SEQ ID NO: 4198771 - DNA, 25 bp, Homo sapien
aatgtttctgattgccctactagta

SEQ ID NO: 4198772 - DNA, 25 bp, Homo sapien
ttcttgtccacaggtaatactcaga

SEQ ID NO: 4198773 - DNA, 25 bp, Homo sapien
gaggtattctaccacttgctgtccc

SEQ ID NO: 4198774 - DNA, 25 bp, Homo sapien
tgaggtattctaccacttgctgtcc

SEQ ID NO: 4198775 - DNA, 25 bp, Homo sapien
tgatgcacgagaatataaagtccct

SEQ ID NO: 4198776 - DNA, 25 bp, Homo sapien
tctgcacatgcctataaattttgtg

SEQ ID NO: 4198777 - DNA, 25 bp, Homo sapien
gagaatataaagtccctcaaacact

SEQ ID NO: 4198778 - DNA, 25 bp, Homo sapien
tataaattttgtgatgcacgagaat

SEQ ID NO: 4198779 - DNA, 25 bp, Homo sapien
gtggtgctaagcagactgactccct

SEQ ID NO: 4198780 - DNA, 25 bp, Homo sapien
ggagtatcaacccagtttcagagaa

SEQ ID NO: 4198781 - DNA, 25 bp, Homo sapien
cagagagcagtactagcattccaca

SEQ ID NO: 4198782 - DNA, 25 bp, Homo sapien
gcctaggagtacacagcagagagca

SEQ ID NO: 4198783 - DNA, 25 bp, Homo sapien
ttcttgtctttggagcgagattcca

SEQ ID NO: 4198784 - DNA, 25 bp, Homo sapien
ctttccttccttgtcggagtacact

SEQ ID NO: 4198785 - DNA, 25 bp, Homo sapien
tccttgtcggagtacactcatcttt

SEQ ID NO: 4198786 - DNA, 25 bp, Homo sapien
ggagcgagattccaatttttcttta

SEQ ID NO: 4198787 - DNA, 25 bp, Homo sapien
taactatctgtagcgtgactaagct

SEQ ID NO: 4198788 - DNA, 25 bp, Homo sapien
cagagatttaggaaccgtgagagta

SEQ ID NO: 4198789 - DNA, 25 bp, Homo sapien
gataccatataaaccatgtgaaggg

SEQ ID NO: 4198790 - DNA, 25 bp, Homo sapien
gctttggcctatgtatacaacctcc

SEQ ID NO: 4198791 - DNA, 25 bp, Homo sapien
aatgagcaaaggatcgggtattcat

SEQ ID NO: 4198792 - DNA, 25 bp, Homo sapien
tctttctgaacgctctgatcgctcc

SEQ ID NO: 4198793 - DNA, 25 bp, Homo sapien
tgatcgctccgattttggtgatggg

SEQ ID NO: 4198794 - DNA, 25 bp, Homo sapien
cgtgagctctctttatgagatcttt

SEQ ID NO: 4198795 - DNA, 25 bp, Homo sapien
gggatttcactcgtctaccactgct

SEQ ID NO: 4198796 - DNA, 25 bp, Homo sapien
tttttgctaacatctctaggagaat

SEQ ID NO: 4198797 - DNA, 25 bp, Homo sapien
cttttttgctaacatctctaggaga

SEQ ID NO: 4198798 - DNA, 25 bp, Homo sapien
gctaacatctctaggagaatctttg

SEQ ID NO: 4198799 - DNA, 25 bp, Homo sapien
tttgctaacatctctaggagaatct

SEQ ID NO: 4198800 - DNA, 25 bp, Homo sapien
taaccaaaaatgaaagtgtatctct

SEQ ID NO: 4198801 - DNA, 25 bp, Homo sapien
catgaaagagattgggatgaggagg

SEQ ID NO: 4198802 - DNA, 25 bp, Homo sapien
tgaaagtgtatctctttggttttct

SEQ ID NO: 4198803 - DNA, 25 bp, Homo sapien
gttggaagccttcacttcagtcatg

SEQ ID NO: 4198804 - DNA, 25 bp, Homo sapien
ttgataaagtactcatgtgatcaaa

SEQ ID NO: 4198805 - DNA, 25 bp, Homo sapien
attgataaagtactcatgtgatcaa

SEQ ID NO: 4198806 - DNA, 25 bp, Homo sapien
gatcgcctagaccttttaggtgtcc

SEQ ID NO: 4198807 - DNA, 25 bp, Homo sapien
tttaggtgtccttgaaccagatggt

SEQ ID NO: 4198808 - DNA, 25 bp, Homo sapien
gatctagaccgtgatcgcctagacc

SEQ ID NO: 4198809 - DNA, 25 bp, Homo sapien
gattttttaggagatctagaccgtg

SEQ ID NO: 4198810 - DNA, 25 bp, Homo sapien
aaaacaatgacagatctacagatgc

SEQ ID NO: 4198811 - DNA, 25 bp, Homo sapien
aatcgcatttccaataagtgacagc

SEQ ID NO: 4198812 - DNA, 25 bp, Homo sapien
tgcagttgctcatgagtttacacat

SEQ ID NO: 4198813 - DNA, 25 bp, Homo sapien
ttaaaaaacagaccgttcaggcaca

SEQ ID NO: 4198814 - DNA, 25 bp, Homo sapien
gaattctatggccaaaccttgttag

SEQ ID NO: 4198815 - DNA, 25 bp, Homo sapien
aaacttaagctacttgaacactggg

SEQ ID NO: 4198816 - DNA, 25 bp, Homo sapien
taaaaggtcaacgatcatacaagag

SEQ ID NO: 4198817 - DNA, 25 bp, Homo sapien
caaataggagtctcaggtcccttaa

SEQ ID NO: 4198818 - DNA, 25 bp, Homo sapien
caactctgcaaatggtttaaatcaa

SEQ ID NO: 4198819 - DNA, 25 bp, Homo sapien
cctcataccgtagcaaatttatttt

SEQ ID NO: 4198820 - DNA, 25 bp, Homo sapien
gcaccttgaatttacaaaccattag

SEQ ID NO: 4198821 - DNA, 25 bp, Homo sapien
gcagtattatgaccaacattacaca

SEQ ID NO: 4198822 - DNA, 25 bp, Homo sapien
gataaaagtctcagggtaagcccac

SEQ ID NO: 4198823 - DNA, 25 bp, Homo sapien
tttcaacaatggaacaaggctcacg

SEQ ID NO: 4198824 - DNA, 25 bp, Homo sapien
taagcatcccttgcaacttgactgg

SEQ ID NO: 4198825 - DNA, 25 bp, Homo sapien
caactctggcacgtagctgtggtag

SEQ ID NO: 4198826 - DNA, 25 bp, Homo sapien
tatagaatcagttcacccaaaagaa

SEQ ID NO: 4198827 - DNA, 25 bp, Homo sapien
ttcctgatatttcaaatcaccagag

SEQ ID NO: 4198828 - DNA, 25 bp, Homo sapien
gatgtaacagacaagaacccgttga

SEQ ID NO: 4198829 - DNA, 25 bp, Homo sapien
tttagcccaactgatttcaactata

SEQ ID NO: 4198830 - DNA, 25 bp, Homo sapien
taattattaactgggcttgcatcgg

SEQ ID NO: 4198831 - DNA, 25 bp, Homo sapien
cttgcatcggaaaaacaatatggag

SEQ ID NO: 4198832 - DNA, 25 bp, Homo sapien
tatgagtatacctaacaccactttg

SEQ ID NO: 4198833 - DNA, 25 bp, Homo sapien
tgaactttcctaaccaagagaacca

SEQ ID NO: 4198834 - DNA, 25 bp, Homo sapien
tctagaaggatatgacagatccttt

SEQ ID NO: 4198835 - DNA, 25 bp, Homo sapien
ttaaaatgttagcacggccaaaagc

SEQ ID NO: 4198836 - DNA, 25 bp, Homo sapien
aaaatgttagcacggccaaaagcca

SEQ ID NO: 4198837 - DNA, 25 bp, Homo sapien
gtttctagaaggatatgacagatcc

SEQ ID NO: 4198838 - DNA, 25 bp, Homo sapien
gcaatcagaagaggcaagtaggcca

SEQ ID NO: 4198839 - DNA, 25 bp, Homo sapien
gcattgggcagtgtttcagtcaaac

SEQ ID NO: 4198840 - DNA, 25 bp, Homo sapien
ccttacccaagaccaggcagctgat

SEQ ID NO: 4198841 - DNA, 25 bp, Homo sapien
tcaaaacggtctgtttcaccagagg

SEQ ID NO: 4198842 - DNA, 25 bp, Homo sapien
cccagaaggtaggaggtgtctcatc

SEQ ID NO: 4198843 - DNA, 25 bp, Homo sapien
aggtaggaggtgtctcatcacccat

SEQ ID NO: 4198844 - DNA, 25 bp, Homo sapien
atcaaaagccccggctcctccttgg

SEQ ID NO: 4198845 - DNA, 25 bp, Homo sapien
agaaggtaggaggtgtctcatcacc

SEQ ID NO: 4198846 - DNA, 25 bp, Homo sapien
ccaaactttggactgtgacttatac

SEQ ID NO: 4198847 - DNA, 25 bp, Homo sapien
tgtgacttatactctgtgcctcctc

SEQ ID NO: 4198848 - DNA, 25 bp, Homo sapien
ctccagtcccaatactccccaggta

SEQ ID NO: 4198849 - DNA, 25 bp, Homo sapien
cagtcccaatactccccaggtattg

SEQ ID NO: 4198850 - DNA, 25 bp, Homo sapien
ttcttgaaagcagaattcacatcat

SEQ ID NO: 4198851 - DNA, 25 bp, Homo sapien
ctaacacggcggcttttagcttctt

SEQ ID NO: 4198852 - DNA, 25 bp, Homo sapien
tagaatattcgtctttccatggctt

SEQ ID NO: 4198853 - DNA, 25 bp, Homo sapien
tatgatcatagagctattagctaac

SEQ ID NO: 4198854 - DNA, 25 bp, Homo sapien
gtgagggacatggtgatcatgtcac

SEQ ID NO: 4198855 - DNA, 25 bp, Homo sapien
tgtcacaaagaatgatctcagaagg

SEQ ID NO: 4198856 - DNA, 25 bp, Homo sapien
aggaaacccaacatcagaggcccgt

SEQ ID NO: 4198857 - DNA, 25 bp, Homo sapien
catggtgatcatgtcacaaagaatg

SEQ ID NO: 4198858 - DNA, 25 bp, Homo sapien
cagcctacacaacagcctgcttgaa

SEQ ID NO: 4198859 - DNA, 25 bp, Homo sapien
agcctacacaacagcctgcttgaat

SEQ ID NO: 4198860 - DNA, 25 bp, Homo sapien
atgcagaaatgctattccatgtcca

SEQ ID NO: 4198861 - DNA, 25 bp, Homo sapien
gcagaaatgctattccatgtccatg

SEQ ID NO: 4198862 - DNA, 25 bp, Homo sapien
cacaagggccgctcagccagcgaag

SEQ ID NO: 4198863 - DNA, 25 bp, Homo sapien
gatggcctctaaagcctcacacctg

SEQ ID NO: 4198864 - DNA, 25 bp, Homo sapien
gggccgctcagccagcgaagccaga

SEQ ID NO: 4198865 - DNA, 25 bp, Homo sapien
gaattgggatgatgctccacagcca

SEQ ID NO: 4198866 - DNA, 25 bp, Homo sapien
tccactctttgtgtccgagcagcct

SEQ ID NO: 4198867 - DNA, 25 bp, Homo sapien
ctccactctttgtgtccgagcagcc

SEQ ID NO: 4198868 - DNA, 25 bp, Homo sapien
cactctttgtgtccgagcagccttg

SEQ ID NO: 4198869 - DNA, 25 bp, Homo sapien
actctttgtgtccgagcagccttgt

SEQ ID NO: 4198870 - DNA, 25 bp, Homo sapien
ctggacacagatgggacaagagcaa

SEQ ID NO: 4198871 - DNA, 25 bp, Homo sapien
cagatgggacaagagcaacgaaggc

SEQ ID NO: 4198872 - DNA, 25 bp, Homo sapien
agtggctgtcttcgtaggaatgaac

SEQ ID NO: 4198873 - DNA, 25 bp, Homo sapien
ctgtcttcgtaggaatgaactggac

SEQ ID NO: 4198874 - DNA, 25 bp, Homo sapien
ccagtgtgccttgcgctgaccactg

SEQ ID NO: 4198875 - DNA, 25 bp, Homo sapien
gtccagtgtgccttgcgctgaccac

SEQ ID NO: 4198876 - DNA, 25 bp, Homo sapien
ctgaaacaagcctgttctctccatg

SEQ ID NO: 4198877 - DNA, 25 bp, Homo sapien
ctgtccagtgtgccttgcgctgacc

SEQ ID NO: 4198878 - DNA, 25 bp, Homo sapien
tggactacatccaccgctctggagg

SEQ ID NO: 4198879 - DNA, 25 bp, Homo sapien
taaaggcaatttcgtgtggactaca

SEQ ID NO: 4198880 - DNA, 25 bp, Homo sapien
tttcaccccaaagtgagtagggatg

SEQ ID NO: 4198881 - DNA, 25 bp, Homo sapien
catcaatgctcagttcactaaaggc

SEQ ID NO: 4198882 - DNA, 25 bp, Homo sapien
tagctggaccaggagatgctccgcc

SEQ ID NO: 4198883 - DNA, 25 bp, Homo sapien
agctagctagctggaccaggagatg

SEQ ID NO: 4198884 - DNA, 25 bp, Homo sapien
gatattagaggacaggagctagcta

SEQ ID NO: 4198885 - DNA, 25 bp, Homo sapien
cagcctggaagattggtaacaaagc

SEQ ID NO: 4198886 - DNA, 25 bp, Homo sapien
cgcatttccgctcgcggtgctgcgt

SEQ ID NO: 4198887 - DNA, 25 bp, Homo sapien
ccgctttactggacctctggccggg

SEQ ID NO: 4198888 - DNA, 25 bp, Homo sapien
tgctgcgtccactgtgattgacgtc

SEQ ID NO: 4198889 - DNA, 25 bp, Homo sapien
tgtgcgggcgggaccgtctttccgc

SEQ ID NO: 4198890 - DNA, 25 bp, Homo sapien
cagagagttggattctgcgtgcagc

SEQ ID NO: 4198891 - DNA, 25 bp, Homo sapien
gtttgggcagaaatcccctgtcggc

SEQ ID NO: 4198892 - DNA, 25 bp, Homo sapien
gaaggcttagctctgcgcgcaaagc

SEQ ID NO: 4198893 - DNA, 25 bp, Homo sapien
tgcagtccacgggtccgaaggctta

SEQ ID NO: 4198894 - DNA, 25 bp, Homo sapien
ggccaacgaggtatttaagcaaaga

SEQ ID NO: 4198895 - DNA, 25 bp, Homo sapien
aacccaggtgtgcagcactgcccga

SEQ ID NO: 4198896 - DNA, 25 bp, Homo sapien
ggtaccagcgcttctggccaacgag

SEQ ID NO: 4198897 - DNA, 25 bp, Homo sapien
taagcaaagaaagaccccgccgcag

SEQ ID NO: 4198898 - DNA, 25 bp, Homo sapien
ctgcttccatcaccgggaggatgcc

SEQ ID NO: 4198899 - DNA, 25 bp, Homo sapien
cgcagcctccgactggaccaaagga

SEQ ID NO: 4198900 - DNA, 25 bp, Homo sapien
gcagcctccgactggaccaaaggac

SEQ ID NO: 4198901 - DNA, 25 bp, Homo sapien
gcggcggctgcttccatcaccggga

SEQ ID NO: 4198902 - DNA, 25 bp, Homo sapien
ctttcggcctccgtgcggcgaattt

SEQ ID NO: 4198903 - DNA, 25 bp, Homo sapien
ggcggcttatatgggactcagctcc

SEQ ID NO: 4198904 - DNA, 25 bp, Homo sapien
tgcggctcgggaagaaaaactttca

SEQ ID NO: 4198905 - DNA, 25 bp, Homo sapien
ccctgggcagtttccgggcagcggg

SEQ ID NO: 4198906 - DNA, 25 bp, Homo sapien
tgtcactcgttcctcgatttcgctc

SEQ ID NO: 4198907 - DNA, 25 bp, Homo sapien
accgcccggcggactgtccggctgt

SEQ ID NO: 4198908 - DNA, 25 bp, Homo sapien
tgtccggctgtcactcgttcctcga

SEQ ID NO: 4198909 - DNA, 25 bp, Homo sapien
tcctcgatttcgctccctctcgctt

SEQ ID NO: 4198910 - DNA, 25 bp, Homo sapien
ggccgcgactccgaggcgggcgcgg

SEQ ID NO: 4198911 - DNA, 25 bp, Homo sapien
tggctgctggcgccgggactcgggc

SEQ ID NO: 4198912 - DNA, 25 bp, Homo sapien
tcgggccgcgactccgaggcgggcg

SEQ ID NO: 4198913 - DNA, 25 bp, Homo sapien
gagctcgctgcgggctgcggctcat

SEQ ID NO: 4198914 - DNA, 25 bp, Homo sapien
tccgagaggggacgcgggccagcgg

SEQ ID NO: 4198915 - DNA, 25 bp, Homo sapien
ggacgcgggccagcggcgtcctggg

SEQ ID NO: 4198916 - DNA, 25 bp, Homo sapien
aggggacgcgggccagcggcgtcct

SEQ ID NO: 4198917 - DNA, 25 bp, Homo sapien
gagcaccagcagcagtgcatagccc

SEQ ID NO: 4198918 - DNA, 25 bp, Homo sapien
tgccacttgtagtccaggaggttga

SEQ ID NO: 4198919 - DNA, 25 bp, Homo sapien
aggaggttgagcatagtgagcacca

SEQ ID NO: 4198920 - DNA, 25 bp, Homo sapien
tgcagcggctccttgtgccacttgt

SEQ ID NO: 4198921 - DNA, 25 bp, Homo sapien
gcggtaaggagtgcggaggtccaaa

SEQ ID NO: 4198922 - DNA, 25 bp, Homo sapien
agcgggagggcggtaaggagtgcgg

SEQ ID NO: 4198923 - DNA, 25 bp, Homo sapien
aggagtgcggaggtccaaacgggca

SEQ ID NO: 4198924 - DNA, 25 bp, Homo sapien
cggaggtccaaacgggcatgagcac

SEQ ID NO: 4198925 - DNA, 25 bp, Homo sapien
ctggaggggccgcaacccccgccat

SEQ ID NO: 4198926 - DNA, 25 bp, Homo sapien
tggaggggccgcaacccccgccatc

SEQ ID NO: 4198927 - DNA, 25 bp, Homo sapien
gggccgcaacccccgccatccctgc

SEQ ID NO: 4198928 - DNA, 25 bp, Homo sapien
gcaacccccgccatccctgccgcgg

SEQ ID NO: 4198929 - DNA, 25 bp, Homo sapien
ctgccgcttgtccccgacgcccccg

SEQ ID NO: 4198930 - DNA, 25 bp, Homo sapien
tgccacactggctcgtagagaaaga

SEQ ID NO: 4198931 - DNA, 25 bp, Homo sapien
gagccagagcgccacgtggtgaaca

SEQ ID NO: 4198932 - DNA, 25 bp, Homo sapien
tagagaaagaacacctcgggattct

SEQ ID NO: 4198933 - DNA, 25 bp, Homo sapien
tctggttgaatagctcgccgaagaa

SEQ ID NO: 4198934 - DNA, 25 bp, Homo sapien
aagacagagaggtcgcagcggtaaa

SEQ ID NO: 4198935 - DNA, 25 bp, Homo sapien
gtcgcagcggtaaagagcgctcagc

SEQ ID NO: 4198936 - DNA, 25 bp, Homo sapien
gtaaagagcgctcagcatgtcccgc

SEQ ID NO: 4198937 - DNA, 25 bp, Homo sapien
agagcgctcagcatgtcccgcgctg

SEQ ID NO: 4198938 - DNA, 25 bp, Homo sapien
cgccgaagatgcccagcgtggtgag

SEQ ID NO: 4198939 - DNA, 25 bp, Homo sapien
cgtggtgaggttgcgccccccgctg

SEQ ID NO: 4198940 - DNA, 25 bp, Homo sapien
cccagcgtggtgaggttgcgccccc

SEQ ID NO: 4198941 - DNA, 25 bp, Homo sapien
ttgttggtggctgcgccgaagatgc

SEQ ID NO: 4198942 - DNA, 25 bp, Homo sapien
cggtaggcggggcagagtggtgacg

SEQ ID NO: 4198943 - DNA, 25 bp, Homo sapien
acctccttgcggtaggcggggcaga

SEQ ID NO: 4198944 - DNA, 25 bp, Homo sapien
taggcggggcagagtggtgacgagc

SEQ ID NO: 4198945 - DNA, 25 bp, Homo sapien
ggcagagtggtgacgagcacaccac

SEQ ID NO: 4198946 - DNA, 25 bp, Homo sapien
gggcacttcttgcacacgcggtcgt

SEQ ID NO: 4198947 - DNA, 25 bp, Homo sapien
tggcgggcacttcttgcacacgcgg

SEQ ID NO: 4198948 - DNA, 25 bp, Homo sapien
cgctgtggcgggcacttcttgcaca

SEQ ID NO: 4198949 - DNA, 25 bp, Homo sapien
actcctcctcgaaacgcgccaggcg

SEQ ID NO: 4198950 - DNA, 25 bp, Homo sapien
caccctttatgactagtgtgcggta

SEQ ID NO: 4198951 - DNA, 25 bp, Homo sapien
gatcacgcaccaagtggatgacctt

SEQ ID NO: 4198952 - DNA, 25 bp, Homo sapien
ggtctcgcagcagtggcgccaagac

SEQ ID NO: 4198953 - DNA, 25 bp, Homo sapien
cacctgtaggctctcacggatgagg

SEQ ID NO: 4198954 - DNA, 25 bp, Homo sapien
gcggtgagctcgcgggtctcggctg

SEQ ID NO: 4198955 - DNA, 25 bp, Homo sapien
gagctcgcgggtctcggctgcgcac

SEQ ID NO: 4198956 - DNA, 25 bp, Homo sapien
ggtgagctcgcgggtctcggctgcg

SEQ ID NO: 4198957 - DNA, 25 bp, Homo sapien
gtgagctcgcgggtctcggctgcgc

SEQ ID NO: 4198958 - DNA, 25 bp, Homo sapien
tcagggctgttgacccgctcatagc

SEQ ID NO: 4198959 - DNA, 25 bp, Homo sapien
gagcccgagccactggtcatgttca

SEQ ID NO: 4198960 - DNA, 25 bp, Homo sapien
catagcgcccagagcgtggtagtct

SEQ ID NO: 4198961 - DNA, 25 bp, Homo sapien
tgcgtgcagataccacgaaaggctt

SEQ ID NO: 4198962 - DNA, 25 bp, Homo sapien
gatcctctttataggtatcaccaca

SEQ ID NO: 4198963 - DNA, 25 bp, Homo sapien
tatcaccacagggaatcaggtctcc

SEQ ID NO: 4198964 - DNA, 25 bp, Homo sapien
ttgagtctggactgtgtttatttaa

SEQ ID NO: 4198965 - DNA, 25 bp, Homo sapien
tttatttaaacacactacgatcctc

SEQ ID NO: 4198966 - DNA, 25 bp, Homo sapien
ggcacctggtcagaacgttcaagtc

SEQ ID NO: 4198967 - DNA, 25 bp, Homo sapien
tcaaaacattgacagcaagtgtgtg

SEQ ID NO: 4198968 - DNA, 25 bp, Homo sapien
tcctcggcttatcatgcccaatggg

SEQ ID NO: 4198969 - DNA, 25 bp, Homo sapien
taacatgttcacagataccacgaat

SEQ ID NO: 4198970 - DNA, 25 bp, Homo sapien
tccacataccgtgtcagggtcagaa

SEQ ID NO: 4198971 - DNA, 25 bp, Homo sapien
gtatgttcacgctactttcctgagg

SEQ ID NO: 4198972 - DNA, 25 bp, Homo sapien
taaaccaacgaagctgctaccatcg

SEQ ID NO: 4198973 - DNA, 25 bp, Homo sapien
caaaacattggtctctgcttcaagg

SEQ ID NO: 4198974 - DNA, 25 bp, Homo sapien
tggaattcttaccagcgtagctaga

SEQ ID NO: 4198975 - DNA, 25 bp, Homo sapien
gacacaacatcataaccactacagg

SEQ ID NO: 4198976 - DNA, 25 bp, Homo sapien
gcagaatgtttcagtaccaaatggg

SEQ ID NO: 4198977 - DNA, 25 bp, Homo sapien
gaagccttatactgtctgcagcatg

SEQ ID NO: 4198978 - DNA, 25 bp, Homo sapien
tttcaaattacagagcacaggagtg

SEQ ID NO: 4198979 - DNA, 25 bp, Homo sapien
tatgactagctcagcccttagtggg

SEQ ID NO: 4198980 - DNA, 25 bp, Homo sapien
gacggacatattgccagcttgggaa

SEQ ID NO: 4198981 - DNA, 25 bp, Homo sapien
gaaggcagctaggtacaaatctcca

SEQ ID NO: 4198982 - DNA, 25 bp, Homo sapien
tagccctcccttagacccctggaca

SEQ ID NO: 4198983 - DNA, 25 bp, Homo sapien
tcaaaacaataagtgccacatgact

SEQ ID NO: 4198984 - DNA, 25 bp, Homo sapien
caataagtgccacatgacttctgca

SEQ ID NO: 4198985 - DNA, 25 bp, Homo sapien
agcactcaaaacaataagtgccaca

SEQ ID NO: 4198986 - DNA, 25 bp, Homo sapien
taatccagctgcaactgtactgtgt

SEQ ID NO: 4198987 - DNA, 25 bp, Homo sapien
caggcagccattgtctcgctcagca

SEQ ID NO: 4198988 - DNA, 25 bp, Homo sapien
gaaagtaaccatccctacacctgca

SEQ ID NO: 4198989 - DNA, 25 bp, Homo sapien
ctggacaaaactggctgtggccaag

SEQ ID NO: 4198990 - DNA, 25 bp, Homo sapien
gaaacagggtagtctctgatgtacc

SEQ ID NO: 4198991 - DNA, 25 bp, Homo sapien
cacagaatcgtgatgagaatccaat

SEQ ID NO: 4198992 - DNA, 25 bp, Homo sapien
agataccgaaaacacttgctccttg

SEQ ID NO: 4198993 - DNA, 25 bp, Homo sapien
gagactttgccatgcactagctgtg

SEQ ID NO: 4198994 - DNA, 25 bp, Homo sapien
tacatgaattccatctggtgtccca

SEQ ID NO: 4198995 - DNA, 25 bp, Homo sapien
cagtgggtgggaaatcagcaatatc

SEQ ID NO: 4198996 - DNA, 25 bp, Homo sapien
taaggcggcatgatcattaaaccct

SEQ ID NO: 4198997 - DNA, 25 bp, Homo sapien
catggtggcccaattaactactgag

SEQ ID NO: 4198998 - DNA, 25 bp, Homo sapien
taggtattctggagaccagtggtcc

SEQ ID NO: 4198999 - DNA, 25 bp, Homo sapien
tggtccacgctgatgaagtggcttc

SEQ ID NO: 4199000 - DNA, 25 bp, Homo sapien
gatgtcatcaatatccctggctcct

SEQ ID NO: 4199001 - DNA, 25 bp, Homo sapien
tgcaagcagcttttactccctggct

SEQ ID NO: 4199002 - DNA, 25 bp, Homo sapien
gaaccactggctgagtagaaagagc

SEQ ID NO: 4199003 - DNA, 25 bp, Homo sapien
caattcattatgtgggactgtcctc

SEQ ID NO: 4199004 - DNA, 25 bp, Homo sapien
tatccattaggactgtacttggctg

SEQ ID NO: 4199005 - DNA, 25 bp, Homo sapien
agacagccttattctcagttctgag

SEQ ID NO: 4199006 - DNA, 25 bp, Homo sapien
atggatccatcccatgggattcaat

SEQ ID NO: 4199007 - DNA, 25 bp, Homo sapien
gggattcaatactcagccttctcac

SEQ ID NO: 4199008 - DNA, 25 bp, Homo sapien
catcccatgggattcaatactcagc

SEQ ID NO: 4199009 - DNA, 25 bp, Homo sapien
catgggattcaatactcagccttct

SEQ ID NO: 4199010 - DNA, 25 bp, Homo sapien
gatagcagcccatgagaccaactag

SEQ ID NO: 4199011 - DNA, 25 bp, Homo sapien
tttcagtaggaaagggacatcacca

SEQ ID NO: 4199012 - DNA, 25 bp, Homo sapien
gagagtacggcctgaactagggcaa

SEQ ID NO: 4199013 - DNA, 25 bp, Homo sapien
cagtaggcagttgggacttaccaca

SEQ ID NO: 4199014 - DNA, 25 bp, Homo sapien
accccggcactgaagggagacctgg

SEQ ID NO: 4199015 - DNA, 25 bp, Homo sapien
cccggcggcggagaaaatggagccg

SEQ ID NO: 4199016 - DNA, 25 bp, Homo sapien
agggagacctgggataccggctggg

SEQ ID NO: 4199017 - DNA, 25 bp, Homo sapien
ggttcaccccggcactgaagggaga

SEQ ID NO: 4199018 - DNA, 25 bp, Homo sapien
gctgcagaatgtccccgatgtcttg

SEQ ID NO: 4199019 - DNA, 25 bp, Homo sapien
aaagagagcaggcttcattcggtgg

SEQ ID NO: 4199020 - DNA, 25 bp, Homo sapien
aatgtccccgatgtcttgcttccct

SEQ ID NO: 4199021 - DNA, 25 bp, Homo sapien
ttcattcggtggcagtttagggcgt

SEQ ID NO: 4199022 - DNA, 25 bp, Homo sapien
ctgaggccggttttctccttgattt

SEQ ID NO: 4199023 - DNA, 25 bp, Homo sapien
gaggccggttttctccttgatttca

SEQ ID NO: 4199024 - DNA, 25 bp, Homo sapien
ggccggttttctccttgatttcaca

SEQ ID NO: 4199025 - DNA, 25 bp, Homo sapien
gccggttttctccttgatttcacac

SEQ ID NO: 4199026 - DNA, 25 bp, Homo sapien
tgtgacggatctgggcaagtttgct

SEQ ID NO: 4199027 - DNA, 25 bp, Homo sapien
catgttgtccaagcgcatcagctgt

SEQ ID NO: 4199028 - DNA, 25 bp, Homo sapien
caagtttgctgcgatagtccgagtg

SEQ ID NO: 4199029 - DNA, 25 bp, Homo sapien
tccgagtgttcgatggagttgtcag

SEQ ID NO: 4199030 - DNA, 25 bp, Homo sapien
gcaggttcatgacatgggtcgtgaa

SEQ ID NO: 4199031 - DNA, 25 bp, Homo sapien
catgggtcgtgaactcattacatgc

SEQ ID NO: 4199032 - DNA, 25 bp, Homo sapien
ctccctcagcaggttcatgacatgg

SEQ ID NO: 4199033 - DNA, 25 bp, Homo sapien
gccacgggcctggtgcggctctgct

SEQ ID NO: 4199034 - DNA, 25 bp, Homo sapien
atggcgctgaactttcgatggatga

SEQ ID NO: 4199035 - DNA, 25 bp, Homo sapien
ggcgctgaactttcgatggatgatg

SEQ ID NO: 4199036 - DNA, 25 bp, Homo sapien
gatggcgctgaactttcgatggatg

SEQ ID NO: 4199037 - DNA, 25 bp, Homo sapien
tggcgctgaactttcgatggatgat

SEQ ID NO: 4199038 - DNA, 25 bp, Homo sapien
actaggatatgggttactcaggtgg

SEQ ID NO: 4199039 - DNA, 25 bp, Homo sapien
ctgagacacggtgatgccacacttc

SEQ ID NO: 4199040 - DNA, 25 bp, Homo sapien
ggcctcctcactaggatatgggtta

SEQ ID NO: 4199041 - DNA, 25 bp, Homo sapien
caggtgggagtagaaatactcattt

SEQ ID NO: 4199042 - DNA, 25 bp, Homo sapien
ctcctcttggaactttccgatgttt

SEQ ID NO: 4199043 - DNA, 25 bp, Homo sapien
cagcatagatgtttgcctcctcttg

SEQ ID NO: 4199044 - DNA, 25 bp, Homo sapien
ttgacagcatagatgtttgcctcct

SEQ ID NO: 4199045 - DNA, 25 bp, Homo sapien
gacagcatagatgtttgcctcctct

SEQ ID NO: 4199046 - DNA, 25 bp, Homo sapien
ggatgaccccattggcccttctctg

SEQ ID NO: 4199047 - DNA, 25 bp, Homo sapien
cagaaacatgtctccagatcctgag

SEQ ID NO: 4199048 - DNA, 25 bp, Homo sapien
tctgtccagaagtcatgtccccatt

SEQ ID NO: 4199049 - DNA, 25 bp, Homo sapien
aggaatctccgttgagcccaggcat

SEQ ID NO: 4199050 - DNA, 25 bp, Homo sapien
cagtcctgcccggatctttaatggg

SEQ ID NO: 4199051 - DNA, 25 bp, Homo sapien
tttctgtgaaactacacaagtttac

SEQ ID NO: 4199052 - DNA, 25 bp, Homo sapien
ggaggggttccccactctgacagtc

SEQ ID NO: 4199053 - DNA, 25 bp, Homo sapien
tctgacagtcttgtaaaatcctgag

SEQ ID NO: 4199054 - DNA, 25 bp, Homo sapien
ccagggtagtattctgtgcaatgaa

SEQ ID NO: 4199055 - DNA, 25 bp, Homo sapien
ctctggtgtcgtggaagagtgaatt

SEQ ID NO: 4199056 - DNA, 25 bp, Homo sapien
gtagtattctgtgcaatgaaagtaa

SEQ ID NO: 4199057 - DNA, 25 bp, Homo sapien
caggacaccagggtagtattctgtg

SEQ ID NO: 4199058 - DNA, 25 bp, Homo sapien
agcaaagacaacatagctggctatg

SEQ ID NO: 4199059 - DNA, 25 bp, Homo sapien
gctggctatgggctcaaccaggtgc

SEQ ID NO: 4199060 - DNA, 25 bp, Homo sapien
tggctatgggctcaaccaggtgccc

SEQ ID NO: 4199061 - DNA, 25 bp, Homo sapien
catagcaaagacaacatagctggct

SEQ ID NO: 4199062 - DNA, 25 bp, Homo sapien
ctctagctgtaaaggtgaagaattg

SEQ ID NO: 4199063 - DNA, 25 bp, Homo sapien
agtgatccatttatggaagcccaaa

SEQ ID NO: 4199064 - DNA, 25 bp, Homo sapien
tggaagcccaaagggtgagtattct

SEQ ID NO: 4199065 - DNA, 25 bp, Homo sapien
tcctatctatctctagctgtaaagg

SEQ ID NO: 4199066 - DNA, 25 bp, Homo sapien
ggccacatcctccagatgccggtag

SEQ ID NO: 4199067 - DNA, 25 bp, Homo sapien
ttaatgcagcatggccacatcctcc

SEQ ID NO: 4199068 - DNA, 25 bp, Homo sapien
cagcatggccacatcctccagatgc

SEQ ID NO: 4199069 - DNA, 25 bp, Homo sapien
atggccacatcctccagatgccggt

SEQ ID NO: 4199070 - DNA, 25 bp, Homo sapien
tctgtataatggaatcagccagccc

SEQ ID NO: 4199071 - DNA, 25 bp, Homo sapien
ctgtctgtataatggaatcagccag

SEQ ID NO: 4199072 - DNA, 25 bp, Homo sapien
cctggaggagcaggttcttgtgatt

SEQ ID NO: 4199073 - DNA, 25 bp, Homo sapien
tataatggaatcagccagccctgga

SEQ ID NO: 4199074 - DNA, 25 bp, Homo sapien
cagggctgtgtgacacaccctgagc

SEQ ID NO: 4199075 - DNA, 25 bp, Homo sapien
gatgttgttgtattcatcatgggca

SEQ ID NO: 4199076 - DNA, 25 bp, Homo sapien
tgtattcatcatgggcagtaaatgc

SEQ ID NO: 4199077 - DNA, 25 bp, Homo sapien
tccaactgaggccatatcaacaaat

SEQ ID NO: 4199078 - DNA, 25 bp, Homo sapien
tgactggccacacttgttgccctgc

SEQ ID NO: 4199079 - DNA, 25 bp, Homo sapien
ctttgtctccttcatgttgaagccc

SEQ ID NO: 4199080 - DNA, 25 bp, Homo sapien
caagctcctcacagcaaagcagttc

SEQ ID NO: 4199081 - DNA, 25 bp, Homo sapien
gaagcccttcacttccaagctcctc

SEQ ID NO: 4199082 - DNA, 25 bp, Homo sapien
aggccacgtgggacagccaggttac

SEQ ID NO: 4199083 - DNA, 25 bp, Homo sapien
gaggccacgtgggacagccaggtta

SEQ ID NO: 4199084 - DNA, 25 bp, Homo sapien
gactcgaaaaaataggctccaggcc

SEQ ID NO: 4199085 - DNA, 25 bp, Homo sapien
acattcactgtggtggtatcaggca

SEQ ID NO: 4199086 - DNA, 25 bp, Homo sapien
acagctgatgagcagtgcaggagca

SEQ ID NO: 4199087 - DNA, 25 bp, Homo sapien
ttccagagaccaacatgatagcttt

SEQ ID NO: 4199088 - DNA, 25 bp, Homo sapien
tgccacactgtatccaggtgaaggg

SEQ ID NO: 4199089 - DNA, 25 bp, Homo sapien
gaattcaggcctagctctgctgtaa

SEQ ID NO: 4199090 - DNA, 25 bp, Homo sapien
tcgtaacagaagaaggatagctcag

SEQ ID NO: 4199091 - DNA, 25 bp, Homo sapien
tggttatccaattaggcaagtcccg

SEQ ID NO: 4199092 - DNA, 25 bp, Homo sapien
gaaacttcatatagagctgtctgta

SEQ ID NO: 4199093 - DNA, 25 bp, Homo sapien
caaaggtatttgaaacttcatatag

SEQ ID NO: 4199094 - DNA, 25 bp, Homo sapien
tatcaataggaatatcaaaggtatt

SEQ ID NO: 4199095 - DNA, 25 bp, Homo sapien
gccccatttgtgatatatcaatagg

SEQ ID NO: 4199096 - DNA, 25 bp, Homo sapien
gggaaagcaccagaagatgccattc

SEQ ID NO: 4199097 - DNA, 25 bp, Homo sapien
ctgagggttatctgcaggcattgaa

SEQ ID NO: 4199098 - DNA, 25 bp, Homo sapien
gaaatctggtgtgattgctttccag

SEQ ID NO: 4199099 - DNA, 25 bp, Homo sapien
gctccacctagatctagagccacat

SEQ ID NO: 4199100 - DNA, 25 bp, Homo sapien
ctgactgtccccttcgggtggagag

SEQ ID NO: 4199101 - DNA, 25 bp, Homo sapien
tgtccccttcgggtggagagacaga

SEQ ID NO: 4199102 - DNA, 25 bp, Homo sapien
tccatgggagctggatttaagttct

SEQ ID NO: 4199103 - DNA, 25 bp, Homo sapien
atgtctccagcccaatagccttttc

SEQ ID NO: 4199104 - DNA, 25 bp, Homo sapien
gctggaattgcttggaggtcaaacc

SEQ ID NO: 4199105 - DNA, 25 bp, Homo sapien
tatttgtcccatggtagccaagcac

SEQ ID NO: 4199106 - DNA, 25 bp, Homo sapien
catttcatgccaaatctgactggag

SEQ ID NO: 4199107 - DNA, 25 bp, Homo sapien
gcttctatgccaaatgtaaggcctc

SEQ ID NO: 4199108 - DNA, 25 bp, Homo sapien
tgccagctctccctctcgccatctt

SEQ ID NO: 4199109 - DNA, 25 bp, Homo sapien
gaggatctgtcctttctgccagctc

SEQ ID NO: 4199110 - DNA, 25 bp, Homo sapien
tgttcccagtaaggaataagaccaa

SEQ ID NO: 4199111 - DNA, 25 bp, Homo sapien
tggttggaggatctgtcctttctgc

SEQ ID NO: 4199112 - DNA, 25 bp, Homo sapien
atttgatggtatgagtgggagtccc

SEQ ID NO: 4199113 - DNA, 25 bp, Homo sapien
gagggttaatttgatggtatgagtg

SEQ ID NO: 4199114 - DNA, 25 bp, Homo sapien
ttaatttgatggtatgagtgggagt

SEQ ID NO: 4199115 - DNA, 25 bp, Homo sapien
ggttaatttgatggtatgagtggga

SEQ ID NO: 4199116 - DNA, 25 bp, Homo sapien
tggccacagccaaacctaccttgaa

SEQ ID NO: 4199117 - DNA, 25 bp, Homo sapien
ggctctacaacaaccacggaagtgg

SEQ ID NO: 4199118 - DNA, 25 bp, Homo sapien
tctgtgagtgcctatgtgtctgagc

SEQ ID NO: 4199119 - DNA, 25 bp, Homo sapien
gctttagaatctgcaagacactgaa

SEQ ID NO: 4199120 - DNA, 25 bp, Homo sapien
gttcctatggctatagaagaataaa

SEQ ID NO: 4199121 - DNA, 25 bp, Homo sapien
taaggcagggacatgatttaatctg

SEQ ID NO: 4199122 - DNA, 25 bp, Homo sapien
ctgtagagctatgttcctatggcta

SEQ ID NO: 4199123 - DNA, 25 bp, Homo sapien
gctatgttcctatggctatagaaga

SEQ ID NO: 4199124 - DNA, 25 bp, Homo sapien
ctgtctgccagcttccttaccccac

SEQ ID NO: 4199125 - DNA, 25 bp, Homo sapien
ggtttgaagactccatacagcccaa

SEQ ID NO: 4199126 - DNA, 25 bp, Homo sapien
tgaagactccatacagcccaagtgg

SEQ ID NO: 4199127 - DNA, 25 bp, Homo sapien
aaaggtttgaagactccatacagcc

SEQ ID NO: 4199128 - DNA, 25 bp, Homo sapien
ttgaagactccatacagcccaagtg

SEQ ID NO: 4199129 - DNA, 25 bp, Homo sapien
tgaatggaacagaagtgaagctccc

SEQ ID NO: 4199130 - DNA, 25 bp, Homo sapien
agatgaatggaacagaagtgaagct

SEQ ID NO: 4199131 - DNA, 25 bp, Homo sapien
aatggaacagaagtgaagctccctc

SEQ ID NO: 4199132 - DNA, 25 bp, Homo sapien
ctagggagatgaatggaacagaagt

SEQ ID NO: 4199133 - DNA, 25 bp, Homo sapien
agctgggatgcccaagcctcggaag

SEQ ID NO: 4199134 - DNA, 25 bp, Homo sapien
caagcctcggaagaggagaggaaca

SEQ ID NO: 4199135 - DNA, 25 bp, Homo sapien
ctgcagctgggatgcccaagcctcg

SEQ ID NO: 4199136 - DNA, 25 bp, Homo sapien
gatgcccaagcctcggaagaggaga

SEQ ID NO: 4199137 - DNA, 25 bp, Homo sapien
gaaaggtgcggaacaaaagctggga

SEQ ID NO: 4199138 - DNA, 25 bp, Homo sapien
ggaaagtgagcgctgacggctgggc

SEQ ID NO: 4199139 - DNA, 25 bp, Homo sapien
cagtgccagaacctgtagggaggaa

SEQ ID NO: 4199140 - DNA, 25 bp, Homo sapien
agcagcaaggcgcagtgccagaacc

SEQ ID NO: 4199141 - DNA, 25 bp, Homo sapien
ctttcttgaaatctaatgaccagga

SEQ ID NO: 4199142 - DNA, 25 bp, Homo sapien
tttcagcatgtccgcttccaacagc

SEQ ID NO: 4199143 - DNA, 25 bp, Homo sapien
gaccaggatcgtaaaatcagagacc

SEQ ID NO: 4199144 - DNA, 25 bp, Homo sapien
acagccatctgctaatatatgctct

SEQ ID NO: 4199145 - DNA, 25 bp, Homo sapien
caaggacagaatagctaaaagcatg

SEQ ID NO: 4199146 - DNA, 25 bp, Homo sapien
tctccactgtgggaccatgactggt

SEQ ID NO: 4199147 - DNA, 25 bp, Homo sapien
ttcctcaaggacagaatagctaaaa

SEQ ID NO: 4199148 - DNA, 25 bp, Homo sapien
tgtgggaccatgactggtgccactc

SEQ ID NO: 4199149 - DNA, 25 bp, Homo sapien
tagacacagaattatgcctggaatg

SEQ ID NO: 4199150 - DNA, 25 bp, Homo sapien
tatggactagcccttgggttacagg

SEQ ID NO: 4199151 - DNA, 25 bp, Homo sapien
cctggaatgcccaagagcagcgagt

SEQ ID NO: 4199152 - DNA, 25 bp, Homo sapien
caaacaggaaagactgtagcagctt

SEQ ID NO: 4199153 - DNA, 25 bp, Homo sapien
atgggaggtaacaagctgcagtgtc

SEQ ID NO: 4199154 - DNA, 25 bp, Homo sapien
tctgatgggaggtaacaagctgcag

SEQ ID NO: 4199155 - DNA, 25 bp, Homo sapien
tgatgggaggtaacaagctgcagtg

SEQ ID NO: 4199156 - DNA, 25 bp, Homo sapien
ctctgatgggaggtaacaagctgca

SEQ ID NO: 4199157 - DNA, 25 bp, Homo sapien
tcaagtgacacgaaacatcactatg

SEQ ID NO: 4199158 - DNA, 25 bp, Homo sapien
tgtttaacagagttggcgtggacct

SEQ ID NO: 4199159 - DNA, 25 bp, Homo sapien
tagaactagcatgtacttgcaagcc

SEQ ID NO: 4199160 - DNA, 25 bp, Homo sapien
tgctagctagccaactcagtgaaat

SEQ ID NO: 4199161 - DNA, 25 bp, Homo sapien
caagcctctctatggcagcaggaag

SEQ ID NO: 4199162 - DNA, 25 bp, Homo sapien
cactatttaaggaggcaggtagcca

SEQ ID NO: 4199163 - DNA, 25 bp, Homo sapien
caagtgtcagactttatgggaccag

SEQ ID NO: 4199164 - DNA, 25 bp, Homo sapien
ccttcatggcccttaagctgtggta

SEQ ID NO: 4199165 - DNA, 25 bp, Homo sapien
tgaacctcccgaatcgtatgccctg

SEQ ID NO: 4199166 - DNA, 25 bp, Homo sapien
cagttggttctaataaagttttctg

SEQ ID NO: 4199167 - DNA, 25 bp, Homo sapien
acatagtgaaagtctaacgtgtcag

SEQ ID NO: 4199168 - DNA, 25 bp, Homo sapien
gtgaaagtctaacgtgtcaggcaat

SEQ ID NO: 4199169 - DNA, 25 bp, Homo sapien
catagtgaaagtctaacgtgtcagg

SEQ ID NO: 4199170 - DNA, 25 bp, Homo sapien
tagtgaaagtctaacgtgtcaggca

SEQ ID NO: 4199171 - DNA, 25 bp, Homo sapien
cctgatgtccggacaggtactgtga

SEQ ID NO: 4199172 - DNA, 25 bp, Homo sapien
tgctcgcaagacgaggtcgcatgtg

SEQ ID NO: 4199173 - DNA, 25 bp, Homo sapien
catgtggaagtctcgtggaggttca

SEQ ID NO: 4199174 - DNA, 25 bp, Homo sapien
ctgatttgatggaactcggagcaag

SEQ ID NO: 4199175 - DNA, 25 bp, Homo sapien
accatgtggcttgagcaatccccaa

SEQ ID NO: 4199176 - DNA, 25 bp, Homo sapien
tccccactcaagaaccatgtggctt

SEQ ID NO: 4199177 - DNA, 25 bp, Homo sapien
ctgggccagtcactggtaactcggg

SEQ ID NO: 4199178 - DNA, 25 bp, Homo sapien
gtcactggtaactcgggtccactcc

SEQ ID NO: 4199179 - DNA, 25 bp, Homo sapien
tgagtcctcttgggcactgacattc

SEQ ID NO: 4199180 - DNA, 25 bp, Homo sapien
cttgagtcctcttgggcactgacat

SEQ ID NO: 4199181 - DNA, 25 bp, Homo sapien
ttgagtcctcttgggcactgacatt

SEQ ID NO: 4199182 - DNA, 25 bp, Homo sapien
aggaagcagcatattattgcagcaa

SEQ ID NO: 4199183 - DNA, 25 bp, Homo sapien
caggaagcagcatattattgcagca

SEQ ID NO: 4199184 - DNA, 25 bp, Homo sapien
acaggaagcagcatattattgcagc

SEQ ID NO: 4199185 - DNA, 25 bp, Homo sapien
cacaggaagcagcatattattgcag

SEQ ID NO: 4199186 - DNA, 25 bp, Homo sapien
cgtctgagaactgagcccttgctcc

SEQ ID NO: 4199187 - DNA, 25 bp, Homo sapien
ggtcctttcctcatccgtctgagaa

SEQ ID NO: 4199188 - DNA, 25 bp, Homo sapien
acggtcctttcctcatccgtctgag

SEQ ID NO: 4199189 - DNA, 25 bp, Homo sapien
tcatccgtctgagaactgagccctt

SEQ ID NO: 4199190 - DNA, 25 bp, Homo sapien
tgtgttttcagcacttgtaaaatcc

SEQ ID NO: 4199191 - DNA, 25 bp, Homo sapien
agcacttgtaaaatccctaggtggg

SEQ ID NO: 4199192 - DNA, 25 bp, Homo sapien
ttgctgtgttttcagcacttgtaaa

SEQ ID NO: 4199193 - DNA, 25 bp, Homo sapien
tttcagcacttgtaaaatccctagg

SEQ ID NO: 4199194 - DNA, 25 bp, Homo sapien
gtaagcaaaggcttgctgtggccct

SEQ ID NO: 4199195 - DNA, 25 bp, Homo sapien
tcaaagagagtatcactacattcag

SEQ ID NO: 4199196 - DNA, 25 bp, Homo sapien
tacagcttcatttacccggtgggat

SEQ ID NO: 4199197 - DNA, 25 bp, Homo sapien
tcagtaaagacctgcatcggtaagc

SEQ ID NO: 4199198 - DNA, 25 bp, Homo sapien
ctgggctggttgcatctgcctgggc

SEQ ID NO: 4199199 - DNA, 25 bp, Homo sapien
ctggttgcatctgcctgggcttcat

SEQ ID NO: 4199200 - DNA, 25 bp, Homo sapien
gctggttgcatctgcctgggcttca

SEQ ID NO: 4199201 - DNA, 25 bp, Homo sapien
aggaagttagcaggaacaccattag

SEQ ID NO: 4199202 - DNA, 25 bp, Homo sapien
gtaggaagttagcaggaacaccatt

SEQ ID NO: 4199203 - DNA, 25 bp, Homo sapien
taggaagttagcaggaacaccatta

SEQ ID NO: 4199204 - DNA, 25 bp, Homo sapien
gcatagggttttccgtagtattgga

SEQ ID NO: 4199205 - DNA, 25 bp, Homo sapien
tcctgtgatattccacacaagcttg

SEQ ID NO: 4199206 - DNA, 25 bp, Homo sapien
cacaagcttgtccattgcatagggt

SEQ ID NO: 4199207 - DNA, 25 bp, Homo sapien
gacagacaacgatgctctattctcc

SEQ ID NO: 4199208 - DNA, 25 bp, Homo sapien
taatggtctaagaataactcttggg

SEQ ID NO: 4199209 - DNA, 25 bp, Homo sapien
gctgcataaaccgatccctgggatt

SEQ ID NO: 4199210 - DNA, 25 bp, Homo sapien
ttttagcagctagaaattgtagaca

SEQ ID NO: 4199211 - DNA, 25 bp, Homo sapien
tgggaacatccctcatcatagcatg

SEQ ID NO: 4199212 - DNA, 25 bp, Homo sapien
aaataagaatagagctctccagtaa

SEQ ID NO: 4199213 - DNA, 25 bp, Homo sapien
taagaatagagctctccagtaaacc

SEQ ID NO: 4199214 - DNA, 25 bp, Homo sapien
ataagaatagagctctccagtaaac

SEQ ID NO: 4199215 - DNA, 25 bp, Homo sapien
agaatagagctctccagtaaaccta

SEQ ID NO: 4199216 - DNA, 25 bp, Homo sapien
tcctcatagccctttggttgtgccc

SEQ ID NO: 4199217 - DNA, 25 bp, Homo sapien
gccctttggttgtgccccactgctg

SEQ ID NO: 4199218 - DNA, 25 bp, Homo sapien
caaagcagtcttctctgtggtcctc

SEQ ID NO: 4199219 - DNA, 25 bp, Homo sapien
tcttctctgtggtcctcatagccct

SEQ ID NO: 4199220 - DNA, 25 bp, Homo sapien
gtaagatacacacattctcctttag

SEQ ID NO: 4199221 - DNA, 25 bp, Homo sapien
tgtaagatacacacattctccttta

SEQ ID NO: 4199222 - DNA, 25 bp, Homo sapien
aagatacacacattctcctttagac

SEQ ID NO: 4199223 - DNA, 25 bp, Homo sapien
gatacacacattctcctttagactt

SEQ ID NO: 4199224 - DNA, 25 bp, Homo sapien
tcctcccacatggcaccggcactgt

SEQ ID NO: 4199225 - DNA, 25 bp, Homo sapien
tcattctcattcttccgtcctagag

SEQ ID NO: 4199226 - DNA, 25 bp, Homo sapien
tgcacgggttagactccaggcaagc

SEQ ID NO: 4199227 - DNA, 25 bp, Homo sapien
gttctaataacaggtggtgcacggg

SEQ ID NO: 4199228 - DNA, 25 bp, Homo sapien
ataggagtggcttctgttctgctca

SEQ ID NO: 4199229 - DNA, 25 bp, Homo sapien
agcagcttgctcattaacacgtggc

SEQ ID NO: 4199230 - DNA, 25 bp, Homo sapien
tggcctgcattcactttcagttgtt

SEQ ID NO: 4199231 - DNA, 25 bp, Homo sapien
tcatcttttgcttcaagggccacat

SEQ ID NO: 4199232 - DNA, 25 bp, Homo sapien
tcattaacacgtggcctgcattcac

SEQ ID NO: 4199233 - DNA, 25 bp, Homo sapien
taatctgtatagctagagatataaa

SEQ ID NO: 4199234 - DNA, 25 bp, Homo sapien
atgataatctgtatagctagagata

SEQ ID NO: 4199235 - DNA, 25 bp, Homo sapien
aatattcttattattactgcaatga

SEQ ID NO: 4199236 - DNA, 25 bp, Homo sapien
tgtaacaaccttttgattatttaca

SEQ ID NO: 4199237 - DNA, 25 bp, Homo sapien
gccgaatatgccactctacacagag

SEQ ID NO: 4199238 - DNA, 25 bp, Homo sapien
tctgcaggccccgaattgagctgtt

SEQ ID NO: 4199239 - DNA, 25 bp, Homo sapien
tatgtttaaccccacagtgccgaat

SEQ ID NO: 4199240 - DNA, 25 bp, Homo sapien
tcgatactgcgattctagggaaggc

SEQ ID NO: 4199241 - DNA, 25 bp, Homo sapien
tgcttgcttgcagcattttaataac

SEQ ID NO: 4199242 - DNA, 25 bp, Homo sapien
gcaggcagcacgcttcctctaactg

SEQ ID NO: 4199243 - DNA, 25 bp, Homo sapien
catgtgcggatttggaggaagacgg

SEQ ID NO: 4199244 - DNA, 25 bp, Homo sapien
ccatattaaaggacaagggcagcag

SEQ ID NO: 4199245 - DNA, 25 bp, Homo sapien
tccagactgggctacgtgctgctgg

SEQ ID NO: 4199246 - DNA, 25 bp, Homo sapien
atgtcaggagcatgcacaggaagga

SEQ ID NO: 4199247 - DNA, 25 bp, Homo sapien
ttagctgatgtcaggagcatgcaca

SEQ ID NO: 4199248 - DNA, 25 bp, Homo sapien
ctgctggtcccatagtgaacaagcc

SEQ ID NO: 4199249 - DNA, 25 bp, Homo sapien
cctgggttccacagacaggttgttc

SEQ ID NO: 4199250 - DNA, 25 bp, Homo sapien
gggttcccatcattctcctgggttc

SEQ ID NO: 4199251 - DNA, 25 bp, Homo sapien
aatagctgctggcttggtgtgttgg

SEQ ID NO: 4199252 - DNA, 25 bp, Homo sapien
tgtgccagtgtgtgggaatagctgc

SEQ ID NO: 4199253 - DNA, 25 bp, Homo sapien
cgaatacccagacgcctcttggaaa

SEQ ID NO: 4199254 - DNA, 25 bp, Homo sapien
cctcttggaaacatgttggagcaca

SEQ ID NO: 4199255 - DNA, 25 bp, Homo sapien
tgctttcgatcaggcatccatgttg

SEQ ID NO: 4199256 - DNA, 25 bp, Homo sapien
tggtggtctggcatccgaataccca

SEQ ID NO: 4199257 - DNA, 25 bp, Homo sapien
cttcttatttgcaagaggaccagtg

SEQ ID NO: 4199258 - DNA, 25 bp, Homo sapien
gaccagtgcattctgaaggactctg

SEQ ID NO: 4199259 - DNA, 25 bp, Homo sapien
ccccagtgtccatgagggcctatac

SEQ ID NO: 4199260 - DNA, 25 bp, Homo sapien
tccatgagggcctataccaagaacc

SEQ ID NO: 4199261 - DNA, 25 bp, Homo sapien
agctattgtcctggtaaaatgagga

SEQ ID NO: 4199262 - DNA, 25 bp, Homo sapien
ccaaagctattgtcctggtaaaatg

SEQ ID NO: 4199263 - DNA, 25 bp, Homo sapien
ctattgtcctggtaaaatgaggatt

SEQ ID NO: 4199264 - DNA, 25 bp, Homo sapien
aaagctattgtcctggtaaaatgag

SEQ ID NO: 4199265 - DNA, 25 bp, Homo sapien
gcttagaagtgcttcgacttggtcc

SEQ ID NO: 4199266 - DNA, 25 bp, Homo sapien
gacttggtcctttcttaaactgctg

SEQ ID NO: 4199267 - DNA, 25 bp, Homo sapien
ctgctgtccatgtgggtggtcctct

SEQ ID NO: 4199268 - DNA, 25 bp, Homo sapien
ggcctcttctgttggcgggaccaga

SEQ ID NO: 4199269 - DNA, 25 bp, Homo sapien
cggagctgacattcataactagaat

SEQ ID NO: 4199270 - DNA, 25 bp, Homo sapien
tggctgaggaacattcagagtctct

SEQ ID NO: 4199271 - DNA, 25 bp, Homo sapien
gacacaaacggagctgacattcata

SEQ ID NO: 4199272 - DNA, 25 bp, Homo sapien
tgctgctgccaagcaatagattgga

SEQ ID NO: 4199273 - DNA, 25 bp, Homo sapien
cacaccaaaagtttgagggctttgc

SEQ ID NO: 4199274 - DNA, 25 bp, Homo sapien
tgcatgtggcatactgtgtctgtgc

SEQ ID NO: 4199275 - DNA, 25 bp, Homo sapien
cgcctctgcatgtggcatactgtgt

SEQ ID NO: 4199276 - DNA, 25 bp, Homo sapien
tgtgtctgtgctgcacaccaaaagt

SEQ ID NO: 4199277 - DNA, 25 bp, Homo sapien
gctgactacatagttccactccttc

SEQ ID NO: 4199278 - DNA, 25 bp, Homo sapien
ctgactacatagttccactccttct

SEQ ID NO: 4199279 - DNA, 25 bp, Homo sapien
ccgctgactacatagttccactcct

SEQ ID NO: 4199280 - DNA, 25 bp, Homo sapien
cgctgactacatagttccactcctt

SEQ ID NO: 4199281 - DNA, 25 bp, Homo sapien
gttttgaaaaggttgcctcactcta

SEQ ID NO: 4199282 - DNA, 25 bp, Homo sapien
ggttgcctcactctaacctgtacag

SEQ ID NO: 4199283 - DNA, 25 bp, Homo sapien
ctttgggatctttggctcttccaat

SEQ ID NO: 4199284 - DNA, 25 bp, Homo sapien
tgggatctttggctcttccaatttc

SEQ ID NO: 4199285 - DNA, 25 bp, Homo sapien
tagagagcacagacgtatcagccat

SEQ ID NO: 4199286 - DNA, 25 bp, Homo sapien
agccagcaggcttctagagagcaca

SEQ ID NO: 4199287 - DNA, 25 bp, Homo sapien
gcttctagagagcacagacgtatca

SEQ ID NO: 4199288 - DNA, 25 bp, Homo sapien
caggcttctagagagcacagacgta

SEQ ID NO: 4199289 - DNA, 25 bp, Homo sapien
ttattgcaggtaattcgtgtcgaca

SEQ ID NO: 4199290 - DNA, 25 bp, Homo sapien
gatgattactgtcccctcgccataa

SEQ ID NO: 4199291 - DNA, 25 bp, Homo sapien
tctcactgagtgcatggacacagaa

SEQ ID NO: 4199292 - DNA, 25 bp, Homo sapien
gaatatgccttctcgtccagcttct

SEQ ID NO: 4199293 - DNA, 25 bp, Homo sapien
tgaatcagtgacacatgctccaata

SEQ ID NO: 4199294 - DNA, 25 bp, Homo sapien
ctctgaatcagtgacacatgctcca

SEQ ID NO: 4199295 - DNA, 25 bp, Homo sapien
cagtgacacatgctccaataaacat

SEQ ID NO: 4199296 - DNA, 25 bp, Homo sapien
aatcagtgacacatgctccaataaa

SEQ ID NO: 4199297 - DNA, 25 bp, Homo sapien
agctgggccttctgttgtcatcaag

SEQ ID NO: 4199298 - DNA, 25 bp, Homo sapien
tgggccttctgttgtcatcaagttc

SEQ ID NO: 4199299 - DNA, 25 bp, Homo sapien
gctgggccttctgttgtcatcaagt

SEQ ID NO: 4199300 - DNA, 25 bp, Homo sapien
ggccttctgttgtcatcaagttcat

SEQ ID NO: 4199301 - DNA, 25 bp, Homo sapien
taaaagatagctccacagtgccttg

SEQ ID NO: 4199302 - DNA, 25 bp, Homo sapien
tataaaagatagctccacagtgcct

SEQ ID NO: 4199303 - DNA, 25 bp, Homo sapien
aagatagctccacagtgccttggat

SEQ ID NO: 4199304 - DNA, 25 bp, Homo sapien
ttataaaagatagctccacagtgcc

SEQ ID NO: 4199305 - DNA, 25 bp, Homo sapien
gagttcacaaactggtcaccattat

SEQ ID NO: 4199306 - DNA, 25 bp, Homo sapien
ctctggagttcacaaactggtcacc

SEQ ID NO: 4199307 - DNA, 25 bp, Homo sapien
tggagttcacaaactggtcaccatt

SEQ ID NO: 4199308 - DNA, 25 bp, Homo sapien
tctggagttcacaaactggtcacca

SEQ ID NO: 4199309 - DNA, 25 bp, Homo sapien
aaactatggtcccagttagcctggc

SEQ ID NO: 4199310 - DNA, 25 bp, Homo sapien
acagaactgcccatgaacaatgact

SEQ ID NO: 4199311 - DNA, 25 bp, Homo sapien
tgacttcctatctccttgaagcagc

SEQ ID NO: 4199312 - DNA, 25 bp, Homo sapien
tatctccttgaagcagcatctgatg

SEQ ID NO: 4199313 - DNA, 25 bp, Homo sapien
caggcacacgtttgagatgttggaa

SEQ ID NO: 4199314 - DNA, 25 bp, Homo sapien
aggcacacgtttgagatgttggaag

SEQ ID NO: 4199315 - DNA, 25 bp, Homo sapien
ggggcaggcacacgtttgagatgtt

SEQ ID NO: 4199316 - DNA, 25 bp, Homo sapien
gcaggcacacgtttgagatgttgga

SEQ ID NO: 4199317 - DNA, 25 bp, Homo sapien
tctgagaccttcctaccttccttaa

SEQ ID NO: 4199318 - DNA, 25 bp, Homo sapien
tatctctaaacagcttcaagtcttc

SEQ ID NO: 4199319 - DNA, 25 bp, Homo sapien
gttaacaactttatctctaaacagc

SEQ ID NO: 4199320 - DNA, 25 bp, Homo sapien
cttaaaaatgtgagggccactgccc

SEQ ID NO: 4199321 - DNA, 25 bp, Homo sapien
ccaatgcctggcattccgctgattg

SEQ ID NO: 4199322 - DNA, 25 bp, Homo sapien
gttcccctcccaatgcctggcattc

SEQ ID NO: 4199323 - DNA, 25 bp, Homo sapien
cattccgctgattgcttcccactgt

SEQ ID NO: 4199324 - DNA, 25 bp, Homo sapien
tgagttcttccatgaaaagcttaac

SEQ ID NO: 4199325 - DNA, 25 bp, Homo sapien
tatggccaatagttccatcgcctcc

SEQ ID NO: 4199326 - DNA, 25 bp, Homo sapien
tcatgaagaccttatggccaatagt

SEQ ID NO: 4199327 - DNA, 25 bp, Homo sapien
ttcacaaatggagtccaaaggcccc

SEQ ID NO: 4199328 - DNA, 25 bp, Homo sapien
tttcacaaatggagtccaaaggccc

SEQ ID NO: 4199329 - DNA, 25 bp, Homo sapien
tccactagatggagatcctgagcca

SEQ ID NO: 4199330 - DNA, 25 bp, Homo sapien
cttaaagattccactagatggagat

SEQ ID NO: 4199331 - DNA, 25 bp, Homo sapien
ctagatggagatcctgagccatatt

SEQ ID NO: 4199332 - DNA, 25 bp, Homo sapien
gatggagatcctgagccatattcca

SEQ ID NO: 4199333 - DNA, 25 bp, Homo sapien
gaaaggcagcgccatctcatctgtg

SEQ ID NO: 4199334 - DNA, 25 bp, Homo sapien
tgttactctagtccaacctcagttg

SEQ ID NO: 4199335 - DNA, 25 bp, Homo sapien
tctcatgaattctagctcaagcgca

SEQ ID NO: 4199336 - DNA, 25 bp, Homo sapien
tctagaggtccaggcaagaagcata

SEQ ID NO: 4199337 - DNA, 25 bp, Homo sapien
gctttgcttttgtttcagaggaata

SEQ ID NO: 4199338 - DNA, 25 bp, Homo sapien
ctggctttgcttttgtttcagagga

SEQ ID NO: 4199339 - DNA, 25 bp, Homo sapien
ctctggctttgcttttgtttcagag

SEQ ID NO: 4199340 - DNA, 25 bp, Homo sapien
tggctttgcttttgtttcagaggaa

SEQ ID NO: 4199341 - DNA, 25 bp, Homo sapien
atcccctcaagaatgagatgtggtc

SEQ ID NO: 4199342 - DNA, 25 bp, Homo sapien
tcctgctcaacctggaggagacctg

SEQ ID NO: 4199343 - DNA, 25 bp, Homo sapien
catcccctcaagaatgagatgtggt

SEQ ID NO: 4199344 - DNA, 25 bp, Homo sapien
tcatctgcccagccgcagctcagca

SEQ ID NO: 4199345 - DNA, 25 bp, Homo sapien
gccgcagctcagcagaccctctgac

SEQ ID NO: 4199346 - DNA, 25 bp, Homo sapien
tctgcccagccgcagctcagcagac

SEQ ID NO: 4199347 - DNA, 25 bp, Homo sapien
gcccagccgcagctcagcagaccct

SEQ ID NO: 4199348 - DNA, 25 bp, Homo sapien
ttctcctgtgtccaaccatgaccac

SEQ ID NO: 4199349 - DNA, 25 bp, Homo sapien
catccttaacatagttaaaatcaac

SEQ ID NO: 4199350 - DNA, 25 bp, Homo sapien
tcctgtgtccaaccatgaccactta

SEQ ID NO: 4199351 - DNA, 25 bp, Homo sapien
tgtccaaccatgaccacttaaagtt

SEQ ID NO: 4199352 - DNA, 25 bp, Homo sapien
gctctctgtgattccgttttcagcc

SEQ ID NO: 4199353 - DNA, 25 bp, Homo sapien
actgcccctggagcctacgtctggg

SEQ ID NO: 4199354 - DNA, 25 bp, Homo sapien
ctctctgtgattccgttttcagcca

SEQ ID NO: 4199355 - DNA, 25 bp, Homo sapien
cctggagcctacgtctgggctgctg

SEQ ID NO: 4199356 - DNA, 25 bp, Homo sapien
attctcttttcccagctgtcttcac

SEQ ID NO: 4199357 - DNA, 25 bp, Homo sapien
ctatattttcattctcttttcccag

SEQ ID NO: 4199358 - DNA, 25 bp, Homo sapien
tatattttcattctcttttcccagc

SEQ ID NO: 4199359 - DNA, 25 bp, Homo sapien
ttcattctcttttcccagctgtctt

SEQ ID NO: 4199360 - DNA, 25 bp, Homo sapien
tcatagatggaggccaatctgtacc

SEQ ID NO: 4199361 - DNA, 25 bp, Homo sapien
atagatggaggccaatctgtacctc

SEQ ID NO: 4199362 - DNA, 25 bp, Homo sapien
catagatggaggccaatctgtacct

SEQ ID NO: 4199363 - DNA, 25 bp, Homo sapien
caataaggccaggaacgaggctcca

SEQ ID NO: 4199364 - DNA, 25 bp, Homo sapien
gacattcggagctcaagttgcaggt

SEQ ID NO: 4199365 - DNA, 25 bp, Homo sapien
tgccatctcctgcatcgtcataggg

SEQ ID NO: 4199366 - DNA, 25 bp, Homo sapien
taacgtatgccttcttgggaactgc

SEQ ID NO: 4199367 - DNA, 25 bp, Homo sapien
gctacagttatactgtatttatgaa

SEQ ID NO: 4199368 - DNA, 25 bp, Homo sapien
agctacagttatactgtatttatga

SEQ ID NO: 4199369 - DNA, 25 bp, Homo sapien
tagaagctacagttatactgtattt

SEQ ID NO: 4199370 - DNA, 25 bp, Homo sapien
gaagctacagttatactgtatttat

SEQ ID NO: 4199371 - DNA, 25 bp, Homo sapien
cacaccttttgtagtatgacagaac

SEQ ID NO: 4199372 - DNA, 25 bp, Homo sapien
tccatctcagagttggaggtctgtt

SEQ ID NO: 4199373 - DNA, 25 bp, Homo sapien
agacatacgtaatgtttccatctca

SEQ ID NO: 4199374 - DNA, 25 bp, Homo sapien
gaggtctgttgctccaaattagtca

SEQ ID NO: 4199375 - DNA, 25 bp, Homo sapien
aaaatccaactcatatgctgcttca

SEQ ID NO: 4199376 - DNA, 25 bp, Homo sapien
caaaatccaactcatatgctgcttc

SEQ ID NO: 4199377 - DNA, 25 bp, Homo sapien
aaatccaactcatatgctgcttcaa

SEQ ID NO: 4199378 - DNA, 25 bp, Homo sapien
atccaactcatatgctgcttcaaca

SEQ ID NO: 4199379 - DNA, 25 bp, Homo sapien
atgtcaatgccccacaaatagactc

SEQ ID NO: 4199380 - DNA, 25 bp, Homo sapien
tggttctgcatgtcaatgccccaca

SEQ ID NO: 4199381 - DNA, 25 bp, Homo sapien
gtcaatgccccacaaatagactctt

SEQ ID NO: 4199382 - DNA, 25 bp, Homo sapien
caatgccccacaaatagactcttac

SEQ ID NO: 4199383 - DNA, 25 bp, Homo sapien
tctgtttcctgatgtcctctcctgc

SEQ ID NO: 4199384 - DNA, 25 bp, Homo sapien
tttgttcctcctgttcatccaagag

SEQ ID NO: 4199385 - DNA, 25 bp, Homo sapien
tcagcctgccctgtgaaaggcccag

SEQ ID NO: 4199386 - DNA, 25 bp, Homo sapien
ccaagagccatttatcagattcctg

SEQ ID NO: 4199387 - DNA, 25 bp, Homo sapien
gttatttaccatgccaactgcttgt

SEQ ID NO: 4199388 - DNA, 25 bp, Homo sapien
ctttgcctgttatttaccatgccaa

SEQ ID NO: 4199389 - DNA, 25 bp, Homo sapien
tatctgcatatgctcttctaacagg

SEQ ID NO: 4199390 - DNA, 25 bp, Homo sapien
tctgcatatgctcttctaacaggaa

SEQ ID NO: 4199391 - DNA, 25 bp, Homo sapien
gggatccatcccataagcttgggtg

SEQ ID NO: 4199392 - DNA, 25 bp, Homo sapien
catcccataagcttgggtgccaaca

SEQ ID NO: 4199393 - DNA, 25 bp, Homo sapien
agcttgggtgccaacaatgactgcc

SEQ ID NO: 4199394 - DNA, 25 bp, Homo sapien
cataagcttgggtgccaacaatgac

SEQ ID NO: 4199395 - DNA, 25 bp, Homo sapien
aatggaagcagtcatggccttcgta

SEQ ID NO: 4199396 - DNA, 25 bp, Homo sapien
tcgtaatcaagtatcactatggcaa

SEQ ID NO: 4199397 - DNA, 25 bp, Homo sapien
caagtatcactatggcaacaggagc

SEQ ID NO: 4199398 - DNA, 25 bp, Homo sapien
catggccttcgtaatcaagtatcac

SEQ ID NO: 4199399 - DNA, 25 bp, Homo sapien
taatcttgaagatttgagcacctac

SEQ ID NO: 4199400 - DNA, 25 bp, Homo sapien
tccttaatcttgaagatttgagcac

SEQ ID NO: 4199401 - DNA, 25 bp, Homo sapien
ccttaatcttgaagatttgagcacc

SEQ ID NO: 4199402 - DNA, 25 bp, Homo sapien
tcatccttaatcttgaagatttgag

SEQ ID NO: 4199403 - DNA, 25 bp, Homo sapien
agacccggagagctaccggcaggaa

SEQ ID NO: 4199404 - DNA, 25 bp, Homo sapien
cggagggcggagtaggtgtgtgaga

SEQ ID NO: 4199405 - DNA, 25 bp, Homo sapien
ggctgcgacttctcccagtcactag

SEQ ID NO: 4199406 - DNA, 25 bp, Homo sapien
gtcactagtctccacaactctcgag

SEQ ID NO: 4199407 - DNA, 25 bp, Homo sapien
ggtcagttcgttgcgctgccaagag

SEQ ID NO: 4199408 - DNA, 25 bp, Homo sapien
cgaataccacctgcccgttgaggaa

SEQ ID NO: 4199409 - DNA, 25 bp, Homo sapien
ccttgaggttgcgaagcaggaagct

SEQ ID NO: 4199410 - DNA, 25 bp, Homo sapien
cacgccgggcacttattgagctgca

SEQ ID NO: 4199411 - DNA, 25 bp, Homo sapien
cagtcaaatccgaaatgcgcccgaa

SEQ ID NO: 4199412 - DNA, 25 bp, Homo sapien
tccctctggcgttgaaagatccaca

SEQ ID NO: 4199413 - DNA, 25 bp, Homo sapien
gttgaaagatccacagtcaaatccg

SEQ ID NO: 4199414 - DNA, 25 bp, Homo sapien
gaatctaggtaacaagagcagactc

SEQ ID NO: 4199415 - DNA, 25 bp, Homo sapien
ccaggtaaatgagcgaaaacaaaga

SEQ ID NO: 4199416 - DNA, 25 bp, Homo sapien
aggtaaatgagcgaaaacaaagact

SEQ ID NO: 4199417 - DNA, 25 bp, Homo sapien
ctgccaggtaaatgagcgaaaacaa

SEQ ID NO: 4199418 - DNA, 25 bp, Homo sapien
gccaggtaaatgagcgaaaacaaag

SEQ ID NO: 4199419 - DNA, 25 bp, Homo sapien
actgtcccgttctccgacttcatcc

SEQ ID NO: 4199420 - DNA, 25 bp, Homo sapien
gtcctcgaattaggtgtccaaatga

SEQ ID NO: 4199421 - DNA, 25 bp, Homo sapien
tccgacttcatcctccccaacttgt

SEQ ID NO: 4199422 - DNA, 25 bp, Homo sapien
ctccccaacttgtcctcgaattagg

SEQ ID NO: 4199423 - DNA, 25 bp, Homo sapien
agccccaagtccaacgctgccttac

SEQ ID NO: 4199424 - DNA, 25 bp, Homo sapien
tgaaaacgtctgtctggccttaagc

SEQ ID NO: 4199425 - DNA, 25 bp, Homo sapien
gccccaagtccaacgctgccttact

SEQ ID NO: 4199426 - DNA, 25 bp, Homo sapien
gtctgtctggccttaagccctccca

SEQ ID NO: 4199427 - DNA, 25 bp, Homo sapien
ctttccatcctttcaatccaaatgc

SEQ ID NO: 4199428 - DNA, 25 bp, Homo sapien
aatggccaaccttcatcagacggaa

SEQ ID NO: 4199429 - DNA, 25 bp, Homo sapien
ccattaattgccaagcgaggtcaac

SEQ ID NO: 4199430 - DNA, 25 bp, Homo sapien
tcccatggcgcattaaagtaactcc

SEQ ID NO: 4199431 - DNA, 25 bp, Homo sapien
tgtcaaagctgacgtccaggaggta

SEQ ID NO: 4199432 - DNA, 25 bp, Homo sapien
gacactactcatctatcccatgaag

SEQ ID NO: 4199433 - DNA, 25 bp, Homo sapien
gacaccgggtttatcaagatgtaac

SEQ ID NO: 4199434 - DNA, 25 bp, Homo sapien
tctgagtatgtctaaggtaggcaag

SEQ ID NO: 4199435 - DNA, 25 bp, Homo sapien
caaagaaagacgcttaaagttgcca

SEQ ID NO: 4199436 - DNA, 25 bp, Homo sapien
tagaggacccatgagacatttgaaa

SEQ ID NO: 4199437 - DNA, 25 bp, Homo sapien
tgcaaagtgactatttagaggaccc

SEQ ID NO: 4199438 - DNA, 25 bp, Homo sapien
tatggctggattcatctaaggtcag

SEQ ID NO: 4199439 - DNA, 25 bp, Homo sapien
ttaaagcagcactagagcaatgctc

SEQ ID NO: 4199440 - DNA, 25 bp, Homo sapien
gaaggagtcctccagaagtgccacg

SEQ ID NO: 4199441 - DNA, 25 bp, Homo sapien
cagcatagtaattgtggtccacagt

SEQ ID NO: 4199442 - DNA, 25 bp, Homo sapien
gaatctgccatagcgcttctttggg

SEQ ID NO: 4199443 - DNA, 25 bp, Homo sapien
tttgggttggcacactcatccagca

SEQ ID NO: 4199444 - DNA, 25 bp, Homo sapien
tcaagtagcaatcaccgctggcagt

SEQ ID NO: 4199445 - DNA, 25 bp, Homo sapien
cattgagggccagttgatatacgca

SEQ ID NO: 4199446 - DNA, 25 bp, Homo sapien
cattaatccactcaagcattccggg

SEQ ID NO: 4199447 - DNA, 25 bp, Homo sapien
cagtaaacctgggaatcctgcccta

SEQ ID NO: 4199448 - DNA, 25 bp, Homo sapien
tgagtgtgcactcagtccgggctcc

SEQ ID NO: 4199449 - DNA, 25 bp, Homo sapien
tgtggactattacccagcacctcag

SEQ ID NO: 4199450 - DNA, 25 bp, Homo sapien
tttgggaaggcacccctgtatgcca

SEQ ID NO: 4199451 - DNA, 25 bp, Homo sapien
cagcctggttgttgagttagcatcc

SEQ ID NO: 4199452 - DNA, 25 bp, Homo sapien
tagtgccaggatcatttatatactg

SEQ ID NO: 4199453 - DNA, 25 bp, Homo sapien
ccttaaagacagagatagaagcata

SEQ ID NO: 4199454 - DNA, 25 bp, Homo sapien
cagtgggttagcaatttaggctgcc

SEQ ID NO: 4199455 - DNA, 25 bp, Homo sapien
cattttatatgctcacggttcagtg

SEQ ID NO: 4199456 - DNA, 25 bp, Homo sapien
cagaaagtttccaattttaaagctg

SEQ ID NO: 4199457 - DNA, 25 bp, Homo sapien
tgcaaaaaagccgaacaggggtcat

SEQ ID NO: 4199458 - DNA, 25 bp, Homo sapien
accacacgcagccagaaagtttcca

SEQ ID NO: 4199459 - DNA, 25 bp, Homo sapien
gcaaaaaagccgaacaggggtcatg

SEQ ID NO: 4199460 - DNA, 25 bp, Homo sapien
ttaggtctgtgatatcaatgcctag

SEQ ID NO: 4199461 - DNA, 25 bp, Homo sapien
cttaggtctgtgatatcaatgccta

SEQ ID NO: 4199462 - DNA, 25 bp, Homo sapien
taggtctgtgatatcaatgcctaga

SEQ ID NO: 4199463 - DNA, 25 bp, Homo sapien
aggtctgtgatatcaatgcctagaa

SEQ ID NO: 4199464 - DNA, 25 bp, Homo sapien
catctcctgttgctgagcctctgtg

SEQ ID NO: 4199465 - DNA, 25 bp, Homo sapien
ggaagcagcagtactaaaaactgtc

SEQ ID NO: 4199466 - DNA, 25 bp, Homo sapien
tctgtggtgttaatgaatggagtac

SEQ ID NO: 4199467 - DNA, 25 bp, Homo sapien
gagtactgggtttagccactaacat

SEQ ID NO: 4199468 - DNA, 25 bp, Homo sapien
caagtcacacaggccattcaaccag

SEQ ID NO: 4199469 - DNA, 25 bp, Homo sapien
aggccattcaaccagctctcagacc

SEQ ID NO: 4199470 - DNA, 25 bp, Homo sapien
agtcacacaggccattcaaccagct

SEQ ID NO: 4199471 - DNA, 25 bp, Homo sapien
cacacaggccattcaaccagctctc

SEQ ID NO: 4199472 - DNA, 25 bp, Homo sapien
gcagcataggtttcagtaagacact

SEQ ID NO: 4199473 - DNA, 25 bp, Homo sapien
aatgatggacacagtttgatgtagc

SEQ ID NO: 4199474 - DNA, 25 bp, Homo sapien
gctccagccactcctatagttgcca

SEQ ID NO: 4199475 - DNA, 25 bp, Homo sapien
gacacagaggtatggagggtgtgtt

SEQ ID NO: 4199476 - DNA, 25 bp, Homo sapien
cttccaggactgtacagagagccct

SEQ ID NO: 4199477 - DNA, 25 bp, Homo sapien
tggatactgggtcagcaggagtact

SEQ ID NO: 4199478 - DNA, 25 bp, Homo sapien
taattgcaggacaaccgctgttccc

SEQ ID NO: 4199479 - DNA, 25 bp, Homo sapien
tggctccaaagggtacagcttctag

SEQ ID NO: 4199480 - DNA, 25 bp, Homo sapien
tatctgtctccaccacttgtcataa

SEQ ID NO: 4199481 - DNA, 25 bp, Homo sapien
ctgtctccaccacttgtcataattt

SEQ ID NO: 4199482 - DNA, 25 bp, Homo sapien
tgttatctgtctccaccacttgtca

SEQ ID NO: 4199483 - DNA, 25 bp, Homo sapien
ctgttatctgtctccaccacttgtc

SEQ ID NO: 4199484 - DNA, 25 bp, Homo sapien
cttccagaaagtctcccctgaacag

SEQ ID NO: 4199485 - DNA, 25 bp, Homo sapien
aaagtctcccctgaacagttttcag

SEQ ID NO: 4199486 - DNA, 25 bp, Homo sapien
cagttttcagttcacatgctttcat

SEQ ID NO: 4199487 - DNA, 25 bp, Homo sapien
tccagaaagtctcccctgaacagtt

SEQ ID NO: 4199488 - DNA, 25 bp, Homo sapien
aatatggatgcatttgttccaggga

SEQ ID NO: 4199489 - DNA, 25 bp, Homo sapien
gccagcccccaaatatggatgcatt

SEQ ID NO: 4199490 - DNA, 25 bp, Homo sapien
ggatgaaccgccagcccccaaatat

SEQ ID NO: 4199491 - DNA, 25 bp, Homo sapien
gatgcatttgttccagggaaatgtg

SEQ ID NO: 4199492 - DNA, 25 bp, Homo sapien
gggcatcctgagcatctatcagtga

SEQ ID NO: 4199493 - DNA, 25 bp, Homo sapien
gtgaatccgattttccatttgggcc

SEQ ID NO: 4199494 - DNA, 25 bp, Homo sapien
tctgcgtgttcaagagggcatcctg

SEQ ID NO: 4199495 - DNA, 25 bp, Homo sapien
tgggccatgaatctgcgtgttcaag

SEQ ID NO: 4199496 - DNA, 25 bp, Homo sapien
tagtcaagtacttcccctcacagac

SEQ ID NO: 4199497 - DNA, 25 bp, Homo sapien
ccagtcccattccaatgataatgca

SEQ ID NO: 4199498 - DNA, 25 bp, Homo sapien
tgaacaaatgctgtcagtatgtcac

SEQ ID NO: 4199499 - DNA, 25 bp, Homo sapien
cctcacagacatgggacctagagca

SEQ ID NO: 4199500 - DNA, 25 bp, Homo sapien
taatctttgtaaggtacgccatcct

SEQ ID NO: 4199501 - DNA, 25 bp, Homo sapien
catcctttagttcctcccacataaa

SEQ ID NO: 4199502 - DNA, 25 bp, Homo sapien
tatgaggcctacacttttggtggaa

SEQ ID NO: 4199503 - DNA, 25 bp, Homo sapien
aaattccaaactctgtgcccctatg

SEQ ID NO: 4199504 - DNA, 25 bp, Homo sapien
tgagtctaggtaacttttataagta

SEQ ID NO: 4199505 - DNA, 25 bp, Homo sapien
tcatttgcaaaatctgctagtattc

SEQ ID NO: 4199506 - DNA, 25 bp, Homo sapien
ttaataagtaatgggagaactggct

SEQ ID NO: 4199507 - DNA, 25 bp, Homo sapien
tttgcaaaatctgctagtattcctt

SEQ ID NO: 4199508 - DNA, 25 bp, Homo sapien
tcagtacatataggagcagctcagt

SEQ ID NO: 4199509 - DNA, 25 bp, Homo sapien
tcttaaactgatcactggcaaaggg

SEQ ID NO: 4199510 - DNA, 25 bp, Homo sapien
tatgtgcgttcgtttagactgtgca

SEQ ID NO: 4199511 - DNA, 25 bp, Homo sapien
aagccagtctagattagctctgagt

SEQ ID NO: 4199512 - DNA, 25 bp, Homo sapien
cctggagtcagggttccttacagac

SEQ ID NO: 4199513 - DNA, 25 bp, Homo sapien
agcaccttaacgagaaacagcctgg

SEQ ID NO: 4199514 - DNA, 25 bp, Homo sapien
tatttcagctcaaggcagtgatttc

SEQ ID NO: 4199515 - DNA, 25 bp, Homo sapien
ttgctgattctaggttattataaac

SEQ ID NO: 4199516 - DNA, 25 bp, Homo sapien
cttgtcaagggcaaacagatataat

SEQ ID NO: 4199517 - DNA, 25 bp, Homo sapien
ttgtcaagggcaaacagatataatt

SEQ ID NO: 4199518 - DNA, 25 bp, Homo sapien
tctgcttgagaatcccggtgtgtga

SEQ ID NO: 4199519 - DNA, 25 bp, Homo sapien
aggcattcacactatcccgctgaga

SEQ ID NO: 4199520 - DNA, 25 bp, Homo sapien
caaactgccctcaagtagttcaggt

SEQ ID NO: 4199521 - DNA, 25 bp, Homo sapien
gcttgggaacgtctgaactgcactg

SEQ ID NO: 4199522 - DNA, 25 bp, Homo sapien
ctctggctgcaggtgaaatctgctg

SEQ ID NO: 4199523 - DNA, 25 bp, Homo sapien
gcttctctggcttggtgctttctca

SEQ ID NO: 4199524 - DNA, 25 bp, Homo sapien
ctggctgcaggtgaaatctgctgct

SEQ ID NO: 4199525 - DNA, 25 bp, Homo sapien
ggctgcaggtgaaatctgctgcttc

SEQ ID NO: 4199526 - DNA, 25 bp, Homo sapien
tgccccatcatgacttaagaacagc

SEQ ID NO: 4199527 - DNA, 25 bp, Homo sapien
ctggatcccagagtgccacagagga

SEQ ID NO: 4199528 - DNA, 25 bp, Homo sapien
gagaatgtctgacaacagtctccat

SEQ ID NO: 4199529 - DNA, 25 bp, Homo sapien
gagccaatggagcaaacggagattt

SEQ ID NO: 4199530 - DNA, 25 bp, Homo sapien
tgccctggtaggacaacattgccca

SEQ ID NO: 4199531 - DNA, 25 bp, Homo sapien
caatggcactcctacatgctggcca

SEQ ID NO: 4199532 - DNA, 25 bp, Homo sapien
gagactacccaagcttcacatagaa

SEQ ID NO: 4199533 - DNA, 25 bp, Homo sapien
ttgagtgaccacataggacaatggc

SEQ ID NO: 4199534 - DNA, 25 bp, Homo sapien
tccacagtcccgcagagatatactc

SEQ ID NO: 4199535 - DNA, 25 bp, Homo sapien
aggctccacagtcccgcagagatat

SEQ ID NO: 4199536 - DNA, 25 bp, Homo sapien
gtcccgcagagatatactcttgggt

SEQ ID NO: 4199537 - DNA, 25 bp, Homo sapien
acagtcccgcagagatatactcttg

SEQ ID NO: 4199538 - DNA, 25 bp, Homo sapien
catctagttgtatccccaattttag

SEQ ID NO: 4199539 - DNA, 25 bp, Homo sapien
tacaccagctagttagaattccaag

SEQ ID NO: 4199540 - DNA, 25 bp, Homo sapien
tttacatagcaagaagaaccgaagc

SEQ ID NO: 4199541 - DNA, 25 bp, Homo sapien
gcttcttctgataggcaaggctata

SEQ ID NO: 4199542 - DNA, 25 bp, Homo sapien
tgttccagggccagtcaagggcctg

SEQ ID NO: 4199543 - DNA, 25 bp, Homo sapien
tatcagtgtcactaggctatatgga

SEQ ID NO: 4199544 - DNA, 25 bp, Homo sapien
tattgccaaacctgttatcagtgtc

SEQ ID NO: 4199545 - DNA, 25 bp, Homo sapien
gaagaaaatgctttgcctattgcca

SEQ ID NO: 4199546 - DNA, 25 bp, Homo sapien
tttatttagcaaactacatttcttc

SEQ ID NO: 4199547 - DNA, 25 bp, Homo sapien
tcatttatagttgtccaaagagcta

SEQ ID NO: 4199548 - DNA, 25 bp, Homo sapien
cttcttgccagtgtatgtgtgacaa

SEQ ID NO: 4199549 - DNA, 25 bp, Homo sapien
caaagagctattagacttctctcct

SEQ ID NO: 4199550 - DNA, 25 bp, Homo sapien
tatgcaaggataacatggttcagcc

SEQ ID NO: 4199551 - DNA, 25 bp, Homo sapien
tagtcccctttaggctgcaagaggt

SEQ ID NO: 4199552 - DNA, 25 bp, Homo sapien
ctttgaggaccttgatgctttgcca

SEQ ID NO: 4199553 - DNA, 25 bp, Homo sapien
gtggaaacacctccaagaaggtctg

SEQ ID NO: 4199554 - DNA, 25 bp, Homo sapien
ggtgagtggcttctcttagcttagc

SEQ ID NO: 4199555 - DNA, 25 bp, Homo sapien
ttacagacatctggtggtccacagt

SEQ ID NO: 4199556 - DNA, 25 bp, Homo sapien
tatgtattatagatcagggcttcct

SEQ ID NO: 4199557 - DNA, 25 bp, Homo sapien
ttcaacgggcctgcaaagaacatgg

SEQ ID NO: 4199558 - DNA, 25 bp, Homo sapien
aaaacctctattaacggggcatgct

SEQ ID NO: 4199559 - DNA, 25 bp, Homo sapien
cattttaattagaagtgcttgagtt

SEQ ID NO: 4199560 - DNA, 25 bp, Homo sapien
acggggcatgctaatgatctttaca

SEQ ID NO: 4199561 - DNA, 25 bp, Homo sapien
acattttaattagaagtgcttgagt

SEQ ID NO: 4199562 - DNA, 25 bp, Homo sapien
ctgttctgaaaccttgccaagagca

SEQ ID NO: 4199563 - DNA, 25 bp, Homo sapien
caattgttcagcaccggtgggtgta

SEQ ID NO: 4199564 - DNA, 25 bp, Homo sapien
cccagctgttctgaaaccttgccaa

SEQ ID NO: 4199565 - DNA, 25 bp, Homo sapien
caggtaacagacagaaacccccagc

SEQ ID NO: 4199566 - DNA, 25 bp, Homo sapien
gactgatagcagtaagaagggaaaa

SEQ ID NO: 4199567 - DNA, 25 bp, Homo sapien
ttgcccctgagcctgacataagttg

SEQ ID NO: 4199568 - DNA, 25 bp, Homo sapien
cataagttgcagttgtcaccagcag

SEQ ID NO: 4199569 - DNA, 25 bp, Homo sapien
gcattagcatatatctccctctttc

SEQ ID NO: 4199570 - DNA, 25 bp, Homo sapien
ataaccaatttttcctgcaccattt

SEQ ID NO: 4199571 - DNA, 25 bp, Homo sapien
ttcacttaacttttgcatatggtga

SEQ ID NO: 4199572 - DNA, 25 bp, Homo sapien
gatacggatgtacttttgttcttct

SEQ ID NO: 4199573 - DNA, 25 bp, Homo sapien
tgcatatggtgaaagatacggatgt

SEQ ID NO: 4199574 - DNA, 25 bp, Homo sapien
ctccttcccaaccatagtgttcctt

SEQ ID NO: 4199575 - DNA, 25 bp, Homo sapien
ctttctcattgctatgtccttttcc

SEQ ID NO: 4199576 - DNA, 25 bp, Homo sapien
cactgcctttctcattgctatgtcc

SEQ ID NO: 4199577 - DNA, 25 bp, Homo sapien
gttcctttgacaattgttctggatc

SEQ ID NO: 4199578 - DNA, 25 bp, Homo sapien
cttgccaaggtggagggtttctctc

SEQ ID NO: 4199579 - DNA, 25 bp, Homo sapien
cttcagttctcccaagccaaaacgt

SEQ ID NO: 4199580 - DNA, 25 bp, Homo sapien
tgagttatctggagcttcagttctc

SEQ ID NO: 4199581 - DNA, 25 bp, Homo sapien
ccttgccaaggtggagggtttctct

SEQ ID NO: 4199582 - DNA, 25 bp, Homo sapien
tctgccaccactgttgtgctggagt

SEQ ID NO: 4199583 - DNA, 25 bp, Homo sapien
ctgatctgatgtggctaagagcctc

SEQ ID NO: 4199584 - DNA, 25 bp, Homo sapien
gctgagttcctctcatcccttcaag

SEQ ID NO: 4199585 - DNA, 25 bp, Homo sapien
tctcctgatactgatctgatgtggc

SEQ ID NO: 4199586 - DNA, 25 bp, Homo sapien
tgtgcacgtggtttactatagtcca

SEQ ID NO: 4199587 - DNA, 25 bp, Homo sapien
aataagagcttgacttgggtggtag

SEQ ID NO: 4199588 - DNA, 25 bp, Homo sapien
tcctctggatagagaggctttgtga

SEQ ID NO: 4199589 - DNA, 25 bp, Homo sapien
aaattactgtttgcttgtgcacgtg

SEQ ID NO: 4199590 - DNA, 25 bp, Homo sapien
gatccactgatggttaacatggtcc

SEQ ID NO: 4199591 - DNA, 25 bp, Homo sapien
attagcattaaagatccactgatgg

SEQ ID NO: 4199592 - DNA, 25 bp, Homo sapien
taaagatccactgatggttaacatg

SEQ ID NO: 4199593 - DNA, 25 bp, Homo sapien
cactgatggttaacatggtcctcat

SEQ ID NO: 4199594 - DNA, 25 bp, Homo sapien
tctaaggcgcctttgattgtaagac

SEQ ID NO: 4199595 - DNA, 25 bp, Homo sapien
gaaaacttacatgcctccactttgg

SEQ ID NO: 4199596 - DNA, 25 bp, Homo sapien
gccagtagccatgtagttctgcagg

SEQ ID NO: 4199597 - DNA, 25 bp, Homo sapien
tacatataccaaaggacgatgtcct

SEQ ID NO: 4199598 - DNA, 25 bp, Homo sapien
caatctcaataggttgtatgtgtat

SEQ ID NO: 4199599 - DNA, 25 bp, Homo sapien
gcagtactagttgcgtcttgtttta

SEQ ID NO: 4199600 - DNA, 25 bp, Homo sapien
tattggtctatgcaagttttggact

SEQ ID NO: 4199601 - DNA, 25 bp, Homo sapien
cttaaaggttttgtagaattcagca

SEQ ID NO: 4199602 - DNA, 25 bp, Homo sapien
acctcgactccaagcccagtagtaa

SEQ ID NO: 4199603 - DNA, 25 bp, Homo sapien
gtagtaagtcccacatgctgcaggg

SEQ ID NO: 4199604 - DNA, 25 bp, Homo sapien
cgactccaagcccagtagtaagtcc

SEQ ID NO: 4199605 - DNA, 25 bp, Homo sapien
gcccagtagtaagtcccacatgctg

SEQ ID NO: 4199606 - DNA, 25 bp, Homo sapien
tctggacctcaaaacgccttgtgca

SEQ ID NO: 4199607 - DNA, 25 bp, Homo sapien
caaaaagtctatgtagtggagtgct

SEQ ID NO: 4199608 - DNA, 25 bp, Homo sapien
cacttactgaatctgggccgaactt

SEQ ID NO: 4199609 - DNA, 25 bp, Homo sapien
gatcagccatccctcagttgaccta

SEQ ID NO: 4199610 - DNA, 25 bp, Homo sapien
tcctctgctgagaccatcagtgaac

SEQ ID NO: 4199611 - DNA, 25 bp, Homo sapien
tcagtgaactgaagcatccgttttt

SEQ ID NO: 4199612 - DNA, 25 bp, Homo sapien
tgctgagaccatcagtgaactgaag

SEQ ID NO: 4199613 - DNA, 25 bp, Homo sapien
gaccatcagtgaactgaagcatccg

SEQ ID NO: 4199614 - DNA, 25 bp, Homo sapien
gaaatacagcatatgaggaagcaga

SEQ ID NO: 4199615 - DNA, 25 bp, Homo sapien
gccatcaatcagaaggagaaataca

SEQ ID NO: 4199616 - DNA, 25 bp, Homo sapien
cctggaattattccactgccatcaa

SEQ ID NO: 4199617 - DNA, 25 bp, Homo sapien
aaatagaagcaatctctgcatatgg

SEQ ID NO: 4199618 - DNA, 25 bp, Homo sapien
gtgactcaaggactgtggtgttttc

SEQ ID NO: 4199619 - DNA, 25 bp, Homo sapien
gactcaaggactgtggtgttttcat

SEQ ID NO: 4199620 - DNA, 25 bp, Homo sapien
tgtgactcaaggactgtggtgtttt

SEQ ID NO: 4199621 - DNA, 25 bp, Homo sapien
tgactcaaggactgtggtgttttca

SEQ ID NO: 4199622 - DNA, 25 bp, Homo sapien
ttcctgttatcaactttaggcccag

SEQ ID NO: 4199623 - DNA, 25 bp, Homo sapien
tcctgttatcaactttaggcccagc

SEQ ID NO: 4199624 - DNA, 25 bp, Homo sapien
cctgttatcaactttaggcccagct

SEQ ID NO: 4199625 - DNA, 25 bp, Homo sapien
tttcctgttatcaactttaggccca

SEQ ID NO: 4199626 - DNA, 25 bp, Homo sapien
ccgtagctgggaggcactctggtag

SEQ ID NO: 4199627 - DNA, 25 bp, Homo sapien
gacagcatcacaggcaaacactttc

SEQ ID NO: 4199628 - DNA, 25 bp, Homo sapien
caggcaggaagtactccataggata

SEQ ID NO: 4199629 - DNA, 25 bp, Homo sapien
aaggcacttcaaagggacaatgaca

SEQ ID NO: 4199630 - DNA, 25 bp, Homo sapien
tgttgggtggtctgtagtacaaaat

SEQ ID NO: 4199631 - DNA, 25 bp, Homo sapien
taagaagaggagtccgagaacccca

SEQ ID NO: 4199632 - DNA, 25 bp, Homo sapien
tcaggagggaaattgatctgcaggc

SEQ ID NO: 4199633 - DNA, 25 bp, Homo sapien
cccatgaggtataggttgaatccac

SEQ ID NO: 4199634 - DNA, 25 bp, Homo sapien
ctgagtatggttcaggccccagggc

SEQ ID NO: 4199635 - DNA, 25 bp, Homo sapien
tgagtatggttcaggccccagggct

SEQ ID NO: 4199636 - DNA, 25 bp, Homo sapien
cgggagctggatcttaaactctgag

SEQ ID NO: 4199637 - DNA, 25 bp, Homo sapien
ataaccccaaatcaggaacacatgc

SEQ ID NO: 4199638 - DNA, 25 bp, Homo sapien
tcacacgggagctggatcttaaact

SEQ ID NO: 4199639 - DNA, 25 bp, Homo sapien
ggatcacacgggagctggatcttaa

SEQ ID NO: 4199640 - DNA, 25 bp, Homo sapien
gattcaggggacagtaaaacctcca

SEQ ID NO: 4199641 - DNA, 25 bp, Homo sapien
ggctgagtcagaccttagagcaggt

SEQ ID NO: 4199642 - DNA, 25 bp, Homo sapien
ttatcgaagtgaaagggctgagtca

SEQ ID NO: 4199643 - DNA, 25 bp, Homo sapien
caggaagtactgaaggagcatctgc

SEQ ID NO: 4199644 - DNA, 25 bp, Homo sapien
cttttgctgtatagctccaggagcc

SEQ ID NO: 4199645 - DNA, 25 bp, Homo sapien
cttatttagagatgcgaaaactgaa

SEQ ID NO: 4199646 - DNA, 25 bp, Homo sapien
tacgctctgctatagccacaggtct

SEQ ID NO: 4199647 - DNA, 25 bp, Homo sapien
gccaggaagtgtaacaagcaagtac

SEQ ID NO: 4199648 - DNA, 25 bp, Homo sapien
cagggtcatctatatttaaaatgct

SEQ ID NO: 4199649 - DNA, 25 bp, Homo sapien
ggtcatctatatttaaaatgctagt

SEQ ID NO: 4199650 - DNA, 25 bp, Homo sapien
ctagtttcaacagtggtattaactg

SEQ ID NO: 4199651 - DNA, 25 bp, Homo sapien
gctagtttcaacagtggtattaact

SEQ ID NO: 4199652 - DNA, 25 bp, Homo sapien
catccacaagaaataggggccggca

SEQ ID NO: 4199653 - DNA, 25 bp, Homo sapien
gcactaagtgcaatcgcacacccag

SEQ ID NO: 4199654 - DNA, 25 bp, Homo sapien
gctcggatgcagtgccattggcatt

SEQ ID NO: 4199655 - DNA, 25 bp, Homo sapien
cataaactgcacatgctagtgctct

SEQ ID NO: 4199656 - DNA, 25 bp, Homo sapien
gccattcagtgcatcatatctcctt

SEQ ID NO: 4199657 - DNA, 25 bp, Homo sapien
tgtgatttgccattcagtgcatcat

SEQ ID NO: 4199658 - DNA, 25 bp, Homo sapien
tatctgaagtgagctttttcttcac

SEQ ID NO: 4199659 - DNA, 25 bp, Homo sapien
ctttgtatctgaagtgagctttttc

SEQ ID NO: 4199660 - DNA, 25 bp, Homo sapien
tgaacccattatcccactgtgatcc

SEQ ID NO: 4199661 - DNA, 25 bp, Homo sapien
gcactggagtgatcagaccctgaac

SEQ ID NO: 4199662 - DNA, 25 bp, Homo sapien
ctacaaggatttactaaggtaatgc

SEQ ID NO: 4199663 - DNA, 25 bp, Homo sapien
cccagttactgattgtgaacccatt

SEQ ID NO: 4199664 - DNA, 25 bp, Homo sapien
tgtaatcattccatcaacgctaaac

SEQ ID NO: 4199665 - DNA, 25 bp, Homo sapien
tcaagtgtaatcattccatcaacgc

SEQ ID NO: 4199666 - DNA, 25 bp, Homo sapien
tcattccatcaacgctaaactcgct

SEQ ID NO: 4199667 - DNA, 25 bp, Homo sapien
aatttcaagtgtaatcattccatca

SEQ ID NO: 4199668 - DNA, 25 bp, Homo sapien
tatggagccctcctatctaactgct

SEQ ID NO: 4199669 - DNA, 25 bp, Homo sapien
tctaaatacttactttggaacctca

SEQ ID NO: 4199670 - DNA, 25 bp, Homo sapien
tatctaactgctgagagcgcaggga

SEQ ID NO: 4199671 - DNA, 25 bp, Homo sapien
caacattggaagcaactctgataaa

SEQ ID NO: 4199672 - DNA, 25 bp, Homo sapien
catgcactagctagtaccgaagagc

SEQ ID NO: 4199673 - DNA, 25 bp, Homo sapien
aatgtaaattggctcagctacctgc

SEQ ID NO: 4199674 - DNA, 25 bp, Homo sapien
tacctgcacatgtgtgaccagtttg

SEQ ID NO: 4199675 - DNA, 25 bp, Homo sapien
agatcatccttggaattcccgtccc

SEQ ID NO: 4199676 - DNA, 25 bp, Homo sapien
tgcccagaacaaacttgtttcaaca

SEQ ID NO: 4199677 - DNA, 25 bp, Homo sapien
cattagatcaaatggaataacttac

SEQ ID NO: 4199678 - DNA, 25 bp, Homo sapien
tcccacattagtctgtgaaacatct

SEQ ID NO: 4199679 - DNA, 25 bp, Homo sapien
taacttacaattcttagcacaatgc

SEQ ID NO: 4199680 - DNA, 25 bp, Homo sapien
acatcagaaggtagaagaaagacca

SEQ ID NO: 4199681 - DNA, 25 bp, Homo sapien
tacatcagaaggtagaagaaagacc

SEQ ID NO: 4199682 - DNA, 25 bp, Homo sapien
ttagtgtcgtttccttccttacagc

SEQ ID NO: 4199683 - DNA, 25 bp, Homo sapien
tgtcgttcccactgagtctcaggtg

SEQ ID NO: 4199684 - DNA, 25 bp, Homo sapien
cactgagtctcaggtgtagctctca

SEQ ID NO: 4199685 - DNA, 25 bp, Homo sapien
tccttacagcttctttgtcgttccc

SEQ ID NO: 4199686 - DNA, 25 bp, Homo sapien
caaatgcattaatcgattggaacat

SEQ ID NO: 4199687 - DNA, 25 bp, Homo sapien
tcttctgaatcagcacgatatacac

SEQ ID NO: 4199688 - DNA, 25 bp, Homo sapien
cattatctcttgacaaatgccttca

SEQ ID NO: 4199689 - DNA, 25 bp, Homo sapien
ttggaacatgtctgattagtctgac

SEQ ID NO: 4199690 - DNA, 25 bp, Homo sapien
ggcttgcaataaatggatgctcagc

SEQ ID NO: 4199691 - DNA, 25 bp, Homo sapien
gcttgcaataaatggatgctcagct

SEQ ID NO: 4199692 - DNA, 25 bp, Homo sapien
tggatgctcagctggtgttctttct

SEQ ID NO: 4199693 - DNA, 25 bp, Homo sapien
tcctgctggaagttgtaaacatcac

SEQ ID NO: 4199694 - DNA, 25 bp, Homo sapien
tgcagccctccctgagtgttgtcct

SEQ ID NO: 4199695 - DNA, 25 bp, Homo sapien
aattcagtccccgacgaagatgata

SEQ ID NO: 4199696 - DNA, 25 bp, Homo sapien
tcacatttgttgtttgcgggtaaca

SEQ ID NO: 4199697 - DNA, 25 bp, Homo sapien
cgaagatgataaatctaaattcaca

SEQ ID NO: 4199698 - DNA, 25 bp, Homo sapien
ttacattggttatttggaaatggtg

SEQ ID NO: 4199699 - DNA, 25 bp, Homo sapien
ttgttgaatatacagctctaaagct

SEQ ID NO: 4199700 - DNA, 25 bp, Homo sapien
ttctgtctgcggaaaactgtgttgt

SEQ ID NO: 4199701 - DNA, 25 bp, Homo sapien
tacagctctaaagctaaaagtaaga

SEQ ID NO: 4199702 - DNA, 25 bp, Homo sapien
acagcattctgtctgcggaaaactg

SEQ ID NO: 4199703 - DNA, 25 bp, Homo sapien
agataagggaatatgatgtactacc

SEQ ID NO: 4199704 - DNA, 25 bp, Homo sapien
atcagagaggttatatcctcaaaga

SEQ ID NO: 4199705 - DNA, 25 bp, Homo sapien
gggaatatgatgtactaccctatgc

SEQ ID NO: 4199706 - DNA, 25 bp, Homo sapien
gatgtactaccctatgccagtaagt

SEQ ID NO: 4199707 - DNA, 25 bp, Homo sapien
gttgtgcgctaattactgaagcttc

SEQ ID NO: 4199708 - DNA, 25 bp, Homo sapien
tgtgcgctaattactgaagcttcct

SEQ ID NO: 4199709 - DNA, 25 bp, Homo sapien
ctgttgtgcgctaattactgaagct

SEQ ID NO: 4199710 - DNA, 25 bp, Homo sapien
gcgctaattactgaagcttccttca

SEQ ID NO: 4199711 - DNA, 25 bp, Homo sapien
tctttctcgacctttgctagttgct

SEQ ID NO: 4199712 - DNA, 25 bp, Homo sapien
ctaactacgttctaatacaaggtgg

SEQ ID NO: 4199713 - DNA, 25 bp, Homo sapien
gttgctgtattgacactactagagt

SEQ ID NO: 4199714 - DNA, 25 bp, Homo sapien
tctaatacaaggtggtagccagtga

SEQ ID NO: 4199715 - DNA, 25 bp, Homo sapien
ctagattcgtggacaggtaagcaaa

SEQ ID NO: 4199716 - DNA, 25 bp, Homo sapien
gtaggtgcatgtcttagacttagca

SEQ ID NO: 4199717 - DNA, 25 bp, Homo sapien
gacagtctggaagctagattcgtgg

SEQ ID NO: 4199718 - DNA, 25 bp, Homo sapien
ataaacaagttgtaggtgcatgtct

SEQ ID NO: 4199719 - DNA, 25 bp, Homo sapien
caaactcgagtgcttcatgggtctt

SEQ ID NO: 4199720 - DNA, 25 bp, Homo sapien
cgagtgcttcatgggtctttccatc

SEQ ID NO: 4199721 - DNA, 25 bp, Homo sapien
aatccaaactcgagtgcttcatggg

SEQ ID NO: 4199722 - DNA, 25 bp, Homo sapien
ctcgagtgcttcatgggtctttcca

SEQ ID NO: 4199723 - DNA, 25 bp, Homo sapien
ggagcccaccctcaagattcctgga

SEQ ID NO: 4199724 - DNA, 25 bp, Homo sapien
cctggatggtctccatagatattag

SEQ ID NO: 4199725 - DNA, 25 bp, Homo sapien
ccaggacgaccctctctgtttaaga

SEQ ID NO: 4199726 - DNA, 25 bp, Homo sapien
aggccttgtcttcaactctcagggc

SEQ ID NO: 4199727 - DNA, 25 bp, Homo sapien
ctggatagttccttcaccccttcaa

SEQ ID NO: 4199728 - DNA, 25 bp, Homo sapien
taggggctgccgttttccactctga

SEQ ID NO: 4199729 - DNA, 25 bp, Homo sapien
agtcagtctggatagttccttcacc

SEQ ID NO: 4199730 - DNA, 25 bp, Homo sapien
caatagttttgtgcctagttagggg

SEQ ID NO: 4199731 - DNA, 25 bp, Homo sapien
acactgggagtttagctgtttgtcc

SEQ ID NO: 4199732 - DNA, 25 bp, Homo sapien
tacactgggagtttagctgtttgtc

SEQ ID NO: 4199733 - DNA, 25 bp, Homo sapien
ttacactgggagtttagctgtttgt

SEQ ID NO: 4199734 - DNA, 25 bp, Homo sapien
cactgggagtttagctgtttgtcca

SEQ ID NO: 4199735 - DNA, 25 bp, Homo sapien
tctggtcctccattacacattttca

SEQ ID NO: 4199736 - DNA, 25 bp, Homo sapien
atctccccgtaaagtttctatctgg

SEQ ID NO: 4199737 - DNA, 25 bp, Homo sapien
caggatctccccgtaaagtttctat

SEQ ID NO: 4199738 - DNA, 25 bp, Homo sapien
gttcttccagagactctggtcctcc

SEQ ID NO: 4199739 - DNA, 25 bp, Homo sapien
cacaataaggcgtttattcttggtg

SEQ ID NO: 4199740 - DNA, 25 bp, Homo sapien
tgtctcccaagagtggctccttcac

SEQ ID NO: 4199741 - DNA, 25 bp, Homo sapien
tactctcttcacaataaggcgttta

SEQ ID NO: 4199742 - DNA, 25 bp, Homo sapien
actaagctttgtactgctactctct

SEQ ID NO: 4199743 - DNA, 25 bp, Homo sapien
agggtttccatcaccactactgcta

SEQ ID NO: 4199744 - DNA, 25 bp, Homo sapien
gacttgggtgactaagaaagaatcc

SEQ ID NO: 4199745 - DNA, 25 bp, Homo sapien
gctgttaataacgtcaccgccatat

SEQ ID NO: 4199746 - DNA, 25 bp, Homo sapien
gctttcttgattgccaccattcctg

SEQ ID NO: 4199747 - DNA, 25 bp, Homo sapien
tgacactccacgctggaatgcacat

SEQ ID NO: 4199748 - DNA, 25 bp, Homo sapien
catgggttggctgcatttcagtgtg

SEQ ID NO: 4199749 - DNA, 25 bp, Homo sapien
tgtggctgtttccttcatcacgcaa

SEQ ID NO: 4199750 - DNA, 25 bp, Homo sapien
ttcatcacgcaaggctctgacactc

SEQ ID NO: 4199751 - DNA, 25 bp, Homo sapien
tcactgctgcagctgatactacaca

SEQ ID NO: 4199752 - DNA, 25 bp, Homo sapien
tcagacttcaatgccttgttccagg

SEQ ID NO: 4199753 - DNA, 25 bp, Homo sapien
gacactgcttcagtcttcttggact

SEQ ID NO: 4199754 - DNA, 25 bp, Homo sapien
gcagctctcccatgcatgaggcagc

SEQ ID NO: 4199755 - DNA, 25 bp, Homo sapien
agttcaataaacatagtctggcttc

SEQ ID NO: 4199756 - DNA, 25 bp, Homo sapien
ttctctttctcggttaactctcaga

SEQ ID NO: 4199757 - DNA, 25 bp, Homo sapien
aatactgggcttctaaggccagtgt

SEQ ID NO: 4199758 - DNA, 25 bp, Homo sapien
ggaggtgacatagttaggcataact

SEQ ID NO: 4199759 - DNA, 25 bp, Homo sapien
ctaaggccagtgtcccacaaaagaa

SEQ ID NO: 4199760 - DNA, 25 bp, Homo sapien
gaaatacagactcttgaggtttgtc

SEQ ID NO: 4199761 - DNA, 25 bp, Homo sapien
tcttgaggtttgtctagcagcaggt

SEQ ID NO: 4199762 - DNA, 25 bp, Homo sapien
tatttgcagatcagttgtatccctg

SEQ ID NO: 4199763 - DNA, 25 bp, Homo sapien
gatcagttgtatccctggaaataca

SEQ ID NO: 4199764 - DNA, 25 bp, Homo sapien
ctcaatttgggcttaaagttttcag

SEQ ID NO: 4199765 - DNA, 25 bp, Homo sapien
taaagttttcagatttcatttgaat

SEQ ID NO: 4199766 - DNA, 25 bp, Homo sapien
cttaaagttttcagatttcatttga

SEQ ID NO: 4199767 - DNA, 25 bp, Homo sapien
aagttttcagatttcatttgaatac

SEQ ID NO: 4199768 - DNA, 25 bp, Homo sapien
ggtggtcttcctaatacctctgcaa

SEQ ID NO: 4199769 - DNA, 25 bp, Homo sapien
tgaaactctgaagtcgtcttgagat

SEQ ID NO: 4199770 - DNA, 25 bp, Homo sapien
ccactgacacttaaatccattcatt

SEQ ID NO: 4199771 - DNA, 25 bp, Homo sapien
gtcgtcttgagattctaccacccca

SEQ ID NO: 4199772 - DNA, 25 bp, Homo sapien
catgttgggcatatccattatactg

SEQ ID NO: 4199773 - DNA, 25 bp, Homo sapien
ttcactgaactggtcatgttgggca

SEQ ID NO: 4199774 - DNA, 25 bp, Homo sapien
gctcttcccaaatagttcactgaac

SEQ ID NO: 4199775 - DNA, 25 bp, Homo sapien
gggcatatccattatactgcgccat

SEQ ID NO: 4199776 - DNA, 25 bp, Homo sapien
gcaaaatgtcaccaatgttgataag

SEQ ID NO: 4199777 - DNA, 25 bp, Homo sapien
tttcagtttgctgcaaaatgtcacc

SEQ ID NO: 4199778 - DNA, 25 bp, Homo sapien
tgtcaccaatgttgataaggccagc

SEQ ID NO: 4199779 - DNA, 25 bp, Homo sapien
ccaatgttgataaggccagctgctg

SEQ ID NO: 4199780 - DNA, 25 bp, Homo sapien
tctccaacatgtgccgctccgatac

SEQ ID NO: 4199781 - DNA, 25 bp, Homo sapien
ctccaacatgtgccgctccgataca

SEQ ID NO: 4199782 - DNA, 25 bp, Homo sapien
gcagtaatcattgattgcattgcta

SEQ ID NO: 4199783 - DNA, 25 bp, Homo sapien
ttaactatgaaacatcaaaagcatt

SEQ ID NO: 4199784 - DNA, 25 bp, Homo sapien
aaatgtgcatcttcaaaattgcaag

SEQ ID NO: 4199785 - DNA, 25 bp, Homo sapien
aattaacttacatgaactcggtcca

SEQ ID NO: 4199786 - DNA, 25 bp, Homo sapien
tctcctttatctgaaccctgtaaac

SEQ ID NO: 4199787 - DNA, 25 bp, Homo sapien
agtttcggctcatttgctggtctcc

SEQ ID NO: 4199788 - DNA, 25 bp, Homo sapien
tacttctaaaggcaggtgtgttttg

SEQ ID NO: 4199789 - DNA, 25 bp, Homo sapien
ggagacacctatcttccctgagggc

SEQ ID NO: 4199790 - DNA, 25 bp, Homo sapien
tgaatctgcgggaagccattgtcct

SEQ ID NO: 4199791 - DNA, 25 bp, Homo sapien
tgagactgtgaatctgcgggaagcc

SEQ ID NO: 4199792 - DNA, 25 bp, Homo sapien
tctgcgggaagccattgtcctgagg

SEQ ID NO: 4199793 - DNA, 25 bp, Homo sapien
gcatacgtgagactgtgaatctgcg

SEQ ID NO: 4199794 - DNA, 25 bp, Homo sapien
cgtataccacccataaatcttaaat

SEQ ID NO: 4199795 - DNA, 25 bp, Homo sapien
tgggaatcatactgctaaggctttt

SEQ ID NO: 4199796 - DNA, 25 bp, Homo sapien
ctgatatgggaatcatactgctaag

SEQ ID NO: 4199797 - DNA, 25 bp, Homo sapien
atatgggaatcatactgctaaggct

SEQ ID NO: 4199798 - DNA, 25 bp, Homo sapien
ttcaactgttttgtgaagccttgtg

SEQ ID NO: 4199799 - DNA, 25 bp, Homo sapien
tttgttgtcgctgtcggttcaactg

SEQ ID NO: 4199800 - DNA, 25 bp, Homo sapien
atttcattatatgcagggaggcttt

SEQ ID NO: 4199801 - DNA, 25 bp, Homo sapien
tcattatatgcagggaggctttttg

SEQ ID NO: 4199802 - DNA, 25 bp, Homo sapien
catctcttactgctctgtccccatc

SEQ ID NO: 4199803 - DNA, 25 bp, Homo sapien
ccccatccctgtgactctgtggccc

SEQ ID NO: 4199804 - DNA, 25 bp, Homo sapien
tgtccccatccctgtgactctgtgg

SEQ ID NO: 4199805 - DNA, 25 bp, Homo sapien
cttccatctcttactgctctgtccc

SEQ ID NO: 4199806 - DNA, 25 bp, Homo sapien
aggaagtgcatctgaaattttcttg

SEQ ID NO: 4199807 - DNA, 25 bp, Homo sapien
cctgggttagactacttgaggaagt

SEQ ID NO: 4199808 - DNA, 25 bp, Homo sapien
ttagactacttgaggaagtgcatct

SEQ ID NO: 4199809 - DNA, 25 bp, Homo sapien
tgaggaagtgcatctgaaattttct

SEQ ID NO: 4199810 - DNA, 25 bp, Homo sapien
tcactggtgctttagacagtgaata

SEQ ID NO: 4199811 - DNA, 25 bp, Homo sapien
gtgctcatggcatagtgggctgtaa

SEQ ID NO: 4199812 - DNA, 25 bp, Homo sapien
tgtggtcattggtttcagtgctcat

SEQ ID NO: 4199813 - DNA, 25 bp, Homo sapien
tggcatagtgggctgtaattgttga

SEQ ID NO: 4199814 - DNA, 25 bp, Homo sapien
cataaatcgagagttgttcttgagt

SEQ ID NO: 4199815 - DNA, 25 bp, Homo sapien
gttccaatccataaatcgagagttg

SEQ ID NO: 4199816 - DNA, 25 bp, Homo sapien
caatccataaatcgagagttgttct

SEQ ID NO: 4199817 - DNA, 25 bp, Homo sapien
tccataaatcgagagttgttcttga

SEQ ID NO: 4199818 - DNA, 25 bp, Homo sapien
agcgcttttggatgtcgttgttgaa

SEQ ID NO: 4199819 - DNA, 25 bp, Homo sapien
tttggatgtcgttgttgaagttcac

SEQ ID NO: 4199820 - DNA, 25 bp, Homo sapien
ttagcgcttttggatgtcgttgttg

SEQ ID NO: 4199821 - DNA, 25 bp, Homo sapien
cttttggatgtcgttgttgaagttc

SEQ ID NO: 4199822 - DNA, 25 bp, Homo sapien
taatcaatgtgtccatgggtcacca

SEQ ID NO: 4199823 - DNA, 25 bp, Homo sapien
tataatcagggtgagcgtagcctga

SEQ ID NO: 4199824 - DNA, 25 bp, Homo sapien
tccaatgcaagtataatcagggtga

SEQ ID NO: 4199825 - DNA, 25 bp, Homo sapien
gcctgaggttgcataatcaatgtgt

SEQ ID NO: 4199826 - DNA, 25 bp, Homo sapien
tgaacaatctctaatggccacatat

SEQ ID NO: 4199827 - DNA, 25 bp, Homo sapien
ttaatgtgcccaactttagtatggc

SEQ ID NO: 4199828 - DNA, 25 bp, Homo sapien
gcagtttcaccaatggcttctctct

SEQ ID NO: 4199829 - DNA, 25 bp, Homo sapien
gcatagtgcttatgcacattctgtg

SEQ ID NO: 4199830 - DNA, 25 bp, Homo sapien
ctggagccagccaagtgtctagaat

SEQ ID NO: 4199831 - DNA, 25 bp, Homo sapien
tccagagctcctcaagacgtctctt

SEQ ID NO: 4199832 - DNA, 25 bp, Homo sapien
agcccattttcctggaactggagcc

SEQ ID NO: 4199833 - DNA, 25 bp, Homo sapien
caagtgtctagaataatccatagga

SEQ ID NO: 4199834 - DNA, 25 bp, Homo sapien
ggttttatattcattgctgttgact

SEQ ID NO: 4199835 - DNA, 25 bp, Homo sapien
tcataaatggttttatattcattgc

SEQ ID NO: 4199836 - DNA, 25 bp, Homo sapien
ttattgcttattattcataaatggt

SEQ ID NO: 4199837 - DNA, 25 bp, Homo sapien
gcttattattcataaatggttttat

SEQ ID NO: 4199838 - DNA, 25 bp, Homo sapien
cacaggcaataggttctggaacagt

SEQ ID NO: 4199839 - DNA, 25 bp, Homo sapien
tgctttgtcacagtatggcagccca

SEQ ID NO: 4199840 - DNA, 25 bp, Homo sapien
tatggcctaccctccaaagtcttgc

SEQ ID NO: 4199841 - DNA, 25 bp, Homo sapien
gggagtaacgattgtcacaggcaat

SEQ ID NO: 4199842 - DNA, 25 bp, Homo sapien
tattccagggtatcaggtttgttcc

SEQ ID NO: 4199843 - DNA, 25 bp, Homo sapien
ccatgatatatagctctatgatgat

SEQ ID NO: 4199844 - DNA, 25 bp, Homo sapien
tcagataccacattcgcttttacct

SEQ ID NO: 4199845 - DNA, 25 bp, Homo sapien
tatgatgatgcttcctactcctgcc

SEQ ID NO: 4199846 - DNA, 25 bp, Homo sapien
catttttgcgaaattatctcagttc

SEQ ID NO: 4199847 - DNA, 25 bp, Homo sapien
gcagtgtatgaataagcatcactga

SEQ ID NO: 4199848 - DNA, 25 bp, Homo sapien
gacagatacagcaaactgttcaatt

SEQ ID NO: 4199849 - DNA, 25 bp, Homo sapien
tcactgatgttgcatttttgcgaaa

SEQ ID NO: 4199850 - DNA, 25 bp, Homo sapien
cacagcaccgaaaagttgcacactg

SEQ ID NO: 4199851 - DNA, 25 bp, Homo sapien
aggtatctacactctgaacctcagc

SEQ ID NO: 4199852 - DNA, 25 bp, Homo sapien
ttgtagctctgcaggtatctacact

SEQ ID NO: 4199853 - DNA, 25 bp, Homo sapien
gaacctcagctgcttcgatgctcca

SEQ ID NO: 4199854 - DNA, 25 bp, Homo sapien
gctccacagtcgcatgaatgtccat

SEQ ID NO: 4199855 - DNA, 25 bp, Homo sapien
ggctccacagtcgcatgaatgtcca

SEQ ID NO: 4199856 - DNA, 25 bp, Homo sapien
acagtggagtattactggagagatt

SEQ ID NO: 4199857 - DNA, 25 bp, Homo sapien
tcacaggactccagagtccaaataa

SEQ ID NO: 4199858 - DNA, 25 bp, Homo sapien
cagtggagtattactggagagattc

SEQ ID NO: 4199859 - DNA, 25 bp, Homo sapien
ggactccagagtccaaataagaacc

SEQ ID NO: 4199860 - DNA, 25 bp, Homo sapien
tcaaattgttgatctgaggatgtta

SEQ ID NO: 4199861 - DNA, 25 bp, Homo sapien
gaggatgttatttagcctttcataa

SEQ ID NO: 4199862 - DNA, 25 bp, Homo sapien
catcatcattactacatggttcaga

SEQ ID NO: 4199863 - DNA, 25 bp, Homo sapien
agttatattagctttgcatgcatca

SEQ ID NO: 4199864 - DNA, 25 bp, Homo sapien
tccagtgaaaaaggctacatccaat

SEQ ID NO: 4199865 - DNA, 25 bp, Homo sapien
aaaaggctacatccaatttcagctg

SEQ ID NO: 4199866 - DNA, 25 bp, Homo sapien
tacatccaatttcagctgcctataa

SEQ ID NO: 4199867 - DNA, 25 bp, Homo sapien
agctcttccagtgaaaaaggctaca

SEQ ID NO: 4199868 - DNA, 25 bp, Homo sapien
gttgtcaacaccacacttgattttc

SEQ ID NO: 4199869 - DNA, 25 bp, Homo sapien
ttcaagggcttgcaatatctgatca

SEQ ID NO: 4199870 - DNA, 25 bp, Homo sapien
caagggcttgcaatatctgatcacc

SEQ ID NO: 4199871 - DNA, 25 bp, Homo sapien
ttctgtgttgtcaacaccacacttg

SEQ ID NO: 4199872 - DNA, 25 bp, Homo sapien
gaaatccacttttagctataggctg

SEQ ID NO: 4199873 - DNA, 25 bp, Homo sapien
gctataggctgaggattatcatctg

SEQ ID NO: 4199874 - DNA, 25 bp, Homo sapien
cactgaagtaattattgcagctgtc

SEQ ID NO: 4199875 - DNA, 25 bp, Homo sapien
ttgcagctgtccttttgaaatccac

SEQ ID NO: 4199876 - DNA, 25 bp, Homo sapien
ttcactgaggcgttcactaggagac

SEQ ID NO: 4199877 - DNA, 25 bp, Homo sapien
ctttcactgaggcgttcactaggag

SEQ ID NO: 4199878 - DNA, 25 bp, Homo sapien
tcactgaggcgttcactaggagaca

SEQ ID NO: 4199879 - DNA, 25 bp, Homo sapien
cactgaggcgttcactaggagacat

SEQ ID NO: 4199880 - DNA, 25 bp, Homo sapien
gatagtcttatccaaatggtaaagc

SEQ ID NO: 4199881 - DNA, 25 bp, Homo sapien
tccaaatggtaaagcttacttccca

SEQ ID NO: 4199882 - DNA, 25 bp, Homo sapien
atatttttaggctctgtcaagatag

SEQ ID NO: 4199883 - DNA, 25 bp, Homo sapien
tgtcaagatagtcttatccaaatgg

SEQ ID NO: 4199884 - DNA, 25 bp, Homo sapien
tactttgcaccgtagcatgacctag

SEQ ID NO: 4199885 - DNA, 25 bp, Homo sapien
tctgactctaaatcttctgtgcgaa

SEQ ID NO: 4199886 - DNA, 25 bp, Homo sapien
ttacaaatcagcatactttgcaccg

SEQ ID NO: 4199887 - DNA, 25 bp, Homo sapien
catgacctagtagttcaatttcaaa

SEQ ID NO: 4199888 - DNA, 25 bp, Homo sapien
gagcccagttatcttgtcatctgcc

SEQ ID NO: 4199889 - DNA, 25 bp, Homo sapien
tttggggagcccagttatcttgtca

SEQ ID NO: 4199890 - DNA, 25 bp, Homo sapien
gtcatctgcccaaactttcaatgtc

SEQ ID NO: 4199891 - DNA, 25 bp, Homo sapien
gggagcccagttatcttgtcatctg

SEQ ID NO: 4199892 - DNA, 25 bp, Homo sapien
tccttcaaacgcagattctgagttg

SEQ ID NO: 4199893 - DNA, 25 bp, Homo sapien
tggtcttgactgtgcatggagtaat

SEQ ID NO: 4199894 - DNA, 25 bp, Homo sapien
gcatggagtaatgatgcttggctcc

SEQ ID NO: 4199895 - DNA, 25 bp, Homo sapien
tctgagttggaatgcaactgtggtc

SEQ ID NO: 4199896 - DNA, 25 bp, Homo sapien
tcagccctttcctcttttggggata

SEQ ID NO: 4199897 - DNA, 25 bp, Homo sapien
tattccgggagaatgactagaggag

SEQ ID NO: 4199898 - DNA, 25 bp, Homo sapien
aaacaaacagcatggattgcgtgtg

SEQ ID NO: 4199899 - DNA, 25 bp, Homo sapien
tgaacgaaaactctgcatgaacatt

SEQ ID NO: 4199900 - DNA, 25 bp, Homo sapien
gcaatatttaaggtgcacaatctga

SEQ ID NO: 4199901 - DNA, 25 bp, Homo sapien
ctttggcaactgtgatgatctgcat

SEQ ID NO: 4199902 - DNA, 25 bp, Homo sapien
tatccagtcctttggcaactgtgat

SEQ ID NO: 4199903 - DNA, 25 bp, Homo sapien
tcctttggcaactgtgatgatctgc

SEQ ID NO: 4199904 - DNA, 25 bp, Homo sapien
cagtcctttggcaactgtgatgatc

SEQ ID NO: 4199905 - DNA, 25 bp, Homo sapien
tcagagcagacagaatcatcataat

SEQ ID NO: 4199906 - DNA, 25 bp, Homo sapien
ctgggaatatttgccaactggataa

SEQ ID NO: 4199907 - DNA, 25 bp, Homo sapien
caaaatgggctggatacttgaccaa

SEQ ID NO: 4199908 - DNA, 25 bp, Homo sapien
taataaatgtaggtagaagcatgca

SEQ ID NO: 4199909 - DNA, 25 bp, Homo sapien
cagtccagtcgttataaaagttcca

SEQ ID NO: 4199910 - DNA, 25 bp, Homo sapien
aggttgatacccttggttccatcca

SEQ ID NO: 4199911 - DNA, 25 bp, Homo sapien
agggttttggtgatggctatagttt

SEQ ID NO: 4199912 - DNA, 25 bp, Homo sapien
gccatattactgtgactctgatcag

SEQ ID NO: 4199913 - DNA, 25 bp, Homo sapien
cactagtgctgaagacccagaactc

SEQ ID NO: 4199914 - DNA, 25 bp, Homo sapien
tcttacatgtaattctactctctga

SEQ ID NO: 4199915 - DNA, 25 bp, Homo sapien
tatgattggctgacaaaagtttcca

SEQ ID NO: 4199916 - DNA, 25 bp, Homo sapien
tgaaatatcccattgttcttatgat

SEQ ID NO: 4199917 - DNA, 25 bp, Homo sapien
taggttaaaccaacaagccagccga

SEQ ID NO: 4199918 - DNA, 25 bp, Homo sapien
gagttcctgctgtgacattagcatt

SEQ ID NO: 4199919 - DNA, 25 bp, Homo sapien
tatgtcaaacctatgacctcggcct

SEQ ID NO: 4199920 - DNA, 25 bp, Homo sapien
atgagttcctgctgtgacattagca

SEQ ID NO: 4199921 - DNA, 25 bp, Homo sapien
tgtgagtttggagttgcccaaactg

SEQ ID NO: 4199922 - DNA, 25 bp, Homo sapien
ttggagttgcccaaactgacacttc

SEQ ID NO: 4199923 - DNA, 25 bp, Homo sapien
gaaagtgtgagtttggagttgccca

SEQ ID NO: 4199924 - DNA, 25 bp, Homo sapien
gagtttggagttgcccaaactgaca

SEQ ID NO: 4199925 - DNA, 25 bp, Homo sapien
tatgaggggcccattaatggcaatt

SEQ ID NO: 4199926 - DNA, 25 bp, Homo sapien
ggcccattcttctatgttatgaggg

SEQ ID NO: 4199927 - DNA, 25 bp, Homo sapien
gggcagagaccctattatgaattta

SEQ ID NO: 4199928 - DNA, 25 bp, Homo sapien
caacatgcatctccattggaaagca

SEQ ID NO: 4199929 - DNA, 25 bp, Homo sapien
tattaaagtctgatcatcattaagg

SEQ ID NO: 4199930 - DNA, 25 bp, Homo sapien
gtctgatcatcattaaggatcttgt

SEQ ID NO: 4199931 - DNA, 25 bp, Homo sapien
ggcaatggatattaaagtctgatca

SEQ ID NO: 4199932 - DNA, 25 bp, Homo sapien
ttattttcactggtggcaatggata

SEQ ID NO: 4199933 - DNA, 25 bp, Homo sapien
tcaaataatgtagattctatttctg

SEQ ID NO: 4199934 - DNA, 25 bp, Homo sapien
gctgtcaaataatgtagattctatt

SEQ ID NO: 4199935 - DNA, 25 bp, Homo sapien
ataatgtagattctatttctgcaat

SEQ ID NO: 4199936 - DNA, 25 bp, Homo sapien
agctgtcaaataatgtagattctat

SEQ ID NO: 4199937 - DNA, 25 bp, Homo sapien
taatttagttccagtgcagcattga

SEQ ID NO: 4199938 - DNA, 25 bp, Homo sapien
tttagttccagtgcagcattgactc

SEQ ID NO: 4199939 - DNA, 25 bp, Homo sapien
aatttagttccagtgcagcattgac

SEQ ID NO: 4199940 - DNA, 25 bp, Homo sapien
agtaatttagttccagtgcagcatt

SEQ ID NO: 4199941 - DNA, 25 bp, Homo sapien
ggcaattaagatcttgtgcttgctg

SEQ ID NO: 4199942 - DNA, 25 bp, Homo sapien
aaggttggcaattaagatcttgtgc

SEQ ID NO: 4199943 - DNA, 25 bp, Homo sapien
ctgaaaggttggcaattaagatctt

SEQ ID NO: 4199944 - DNA, 25 bp, Homo sapien
atcttgtgcttgctgaaatctttcc

SEQ ID NO: 4199945 - DNA, 25 bp, Homo sapien
cacatttcatgctcgtggattgaaa

SEQ ID NO: 4199946 - DNA, 25 bp, Homo sapien
acacatttcatgctcgtggattgaa

SEQ ID NO: 4199947 - DNA, 25 bp, Homo sapien
aacacatttcatgctcgtggattga

SEQ ID NO: 4199948 - DNA, 25 bp, Homo sapien
tccgggtggagttaactgcaagatc

SEQ ID NO: 4199949 - DNA, 25 bp, Homo sapien
tctgcgtcagggattgcgttgcgaa

SEQ ID NO: 4199950 - DNA, 25 bp, Homo sapien
gtggcagcggcacctttaaatggct

SEQ ID NO: 4199951 - DNA, 25 bp, Homo sapien
gcgatctggagcgaagtctgcgtca

SEQ ID NO: 4199952 - DNA, 25 bp, Homo sapien
tcaggctccagagttacgcctctga

SEQ ID NO: 4199953 - DNA, 25 bp, Homo sapien
gttctccggaagaatgatggggtca

SEQ ID NO: 4199954 - DNA, 25 bp, Homo sapien
gctccagagttacgcctctgatcac

SEQ ID NO: 4199955 - DNA, 25 bp, Homo sapien
cagagttacgcctctgatcaccgca

SEQ ID NO: 4199956 - DNA, 25 bp, Homo sapien
aggttccttcttcgaagggatagtg

SEQ ID NO: 4199957 - DNA, 25 bp, Homo sapien
tccttcttcgaagggatagtggcaa

SEQ ID NO: 4199958 - DNA, 25 bp, Homo sapien
gttccttcttcgaagggatagtggc

SEQ ID NO: 4199959 - DNA, 25 bp, Homo sapien
ttccttcttcgaagggatagtggca

SEQ ID NO: 4199960 - DNA, 25 bp, Homo sapien
cgtagttccctgtggtgagccagct

SEQ ID NO: 4199961 - DNA, 25 bp, Homo sapien
gccgctgctcaggacgctctctatg

SEQ ID NO: 4199962 - DNA, 25 bp, Homo sapien
caggacgctctctatgccgtagttc

SEQ ID NO: 4199963 - DNA, 25 bp, Homo sapien
tttacagaggcagcgatcttgatgc

SEQ ID NO: 4199964 - DNA, 25 bp, Homo sapien
tatactgcacactagtattaattgg

SEQ ID NO: 4199965 - DNA, 25 bp, Homo sapien
tccaggatatactgcacactagtat

SEQ ID NO: 4199966 - DNA, 25 bp, Homo sapien
actgcacactagtattaattgggca

SEQ ID NO: 4199967 - DNA, 25 bp, Homo sapien
ggatatactgcacactagtattaat

SEQ ID NO: 4199968 - DNA, 25 bp, Homo sapien
tctccttgggatcagactctatggc

SEQ ID NO: 4199969 - DNA, 25 bp, Homo sapien
ttctccttgggatcagactctatgg

SEQ ID NO: 4199970 - DNA, 25 bp, Homo sapien
ctccttgggatcagactctatggct

SEQ ID NO: 4199971 - DNA, 25 bp, Homo sapien
tgtgatctgtcaaaagttggtccag

SEQ ID NO: 4199972 - DNA, 25 bp, Homo sapien
ccaggcactgttgaattaaggtatc

SEQ ID NO: 4199973 - DNA, 25 bp, Homo sapien
cataattctgttgtcgtccccaaat

SEQ ID NO: 4199974 - DNA, 25 bp, Homo sapien
cattctctctaacttgccttagaca

SEQ ID NO: 4199975 - DNA, 25 bp, Homo sapien
ttgtggctgagtgaatagtggtggt

SEQ ID NO: 4199976 - DNA, 25 bp, Homo sapien
tggctgagtgaatagtggtggtagt

SEQ ID NO: 4199977 - DNA, 25 bp, Homo sapien
tagtggtggtagttggtaagaggat

SEQ ID NO: 4199978 - DNA, 25 bp, Homo sapien
ttggtaagaggatgttccttttatg

SEQ ID NO: 4199979 - DNA, 25 bp, Homo sapien
caagatgcactccacgggagcagat

SEQ ID NO: 4199980 - DNA, 25 bp, Homo sapien
agcagaagcaagatgcactccacgg

SEQ ID NO: 4199981 - DNA, 25 bp, Homo sapien
tgcactccacgggagcagattcatt

SEQ ID NO: 4199982 - DNA, 25 bp, Homo sapien
agcaagatgcactccacgggagcag

SEQ ID NO: 4199983 - DNA, 25 bp, Homo sapien
tacttctgcgcaagtagggaggagt

SEQ ID NO: 4199984 - DNA, 25 bp, Homo sapien
tctacttctgcgcaagtagggagga

SEQ ID NO: 4199985 - DNA, 25 bp, Homo sapien
tgcttctacttctgcgcaagtaggg

SEQ ID NO: 4199986 - DNA, 25 bp, Homo sapien
gcttctacttctgcgcaagtaggga

SEQ ID NO: 4199987 - DNA, 25 bp, Homo sapien
tctgactcaagaatagctagcacct

SEQ ID NO: 4199988 - DNA, 25 bp, Homo sapien
gaatgtggcccagtgtaaaatcgcc

SEQ ID NO: 4199989 - DNA, 25 bp, Homo sapien
gaaacacaggccttatgaagaccag

SEQ ID NO: 4199990 - DNA, 25 bp, Homo sapien
actttgcaatactacagccccttct

SEQ ID NO: 4199991 - DNA, 25 bp, Homo sapien
aataaacctgcacttttccgataga

SEQ ID NO: 4199992 - DNA, 25 bp, Homo sapien
caataaacctgcacttttccgatag

SEQ ID NO: 4199993 - DNA, 25 bp, Homo sapien
tagtagcagtcagacggtggcacaa

SEQ ID NO: 4199994 - DNA, 25 bp, Homo sapien
ggcagttcctactccataggaaggt

SEQ ID NO: 4199995 - DNA, 25 bp, Homo sapien
catgcggtttccatcctcgtgaggg

SEQ ID NO: 4199996 - DNA, 25 bp, Homo sapien
ggcacaaattcccactctcatgcgg

SEQ ID NO: 4199997 - DNA, 25 bp, Homo sapien
tacattccaggcaaatgtatcctgc

SEQ ID NO: 4199998 - DNA, 25 bp, Homo sapien
tcacaattccaggtgccgcctgaag

SEQ ID NO: 4199999 - DNA, 25 bp, Homo sapien
ggtcctctgcggtgcttgtttcttt

SEQ ID NO: 4200000 - DNA, 25 bp, Homo sapien
tttacaagggaaatacattccaggc

SEQ ID NO: 4200001 - DNA, 25 bp, Homo sapien
ctttgtgaatccaagcttcagtgta

SEQ ID NO: 4200002 - DNA, 25 bp, Homo sapien
ccaagcttcagtgtagtggtagctc

SEQ ID NO: 4200003 - DNA, 25 bp, Homo sapien
cagtgtagtggtagctcgtatgaac

SEQ ID NO: 4200004 - DNA, 25 bp, Homo sapien
gaatccaagcttcagtgtagtggta

SEQ ID NO: 4200005 - DNA, 25 bp, Homo sapien
gaaattgctgtattggggagaaaac

SEQ ID NO: 4200006 - DNA, 25 bp, Homo sapien
taggcagttagtaacagttgggaaa

SEQ ID NO: 4200007 - DNA, 25 bp, Homo sapien
cagttagtaacagttgggaaattgc

SEQ ID NO: 4200008 - DNA, 25 bp, Homo sapien
ttaaataggcagttagtaacagttg

SEQ ID NO: 4200009 - DNA, 25 bp, Homo sapien
atttagctctctgggtcacagtcag

SEQ ID NO: 4200010 - DNA, 25 bp, Homo sapien
tcccgaccttcctttgtgaactgaa

SEQ ID NO: 4200011 - DNA, 25 bp, Homo sapien
cttcccgaccttcctttgtgaactg

SEQ ID NO: 4200012 - DNA, 25 bp, Homo sapien
ccgaccttcctttgtgaactgaagt

SEQ ID NO: 4200013 - DNA, 25 bp, Homo sapien
cccgaccttcctttgtgaactgaag

SEQ ID NO: 4200014 - DNA, 25 bp, Homo sapien
ggtgtgactattttgggagacaacc

SEQ ID NO: 4200015 - DNA, 25 bp, Homo sapien
ggtccggtgtgactattttgggaga

SEQ ID NO: 4200016 - DNA, 25 bp, Homo sapien
tccggtgtgactattttgggagaca

SEQ ID NO: 4200017 - DNA, 25 bp, Homo sapien
ccggtgtgactattttgggagacaa

SEQ ID NO: 4200018 - DNA, 25 bp, Homo sapien
gtgataaccattgcggactgtttga

SEQ ID NO: 4200019 - DNA, 25 bp, Homo sapien
taaccattgcggactgtttgaactg

SEQ ID NO: 4200020 - DNA, 25 bp, Homo sapien
ataaccattgcggactgtttgaact

SEQ ID NO: 4200021 - DNA, 25 bp, Homo sapien
attgtgataaccattgcggactgtt

SEQ ID NO: 4200022 - DNA, 25 bp, Homo sapien
gtgacatatgtgattctctaccagc

SEQ ID NO: 4200023 - DNA, 25 bp, Homo sapien
agcaacatagatgcacttattaacg

SEQ ID NO: 4200024 - DNA, 25 bp, Homo sapien
cttattaacgagctcaattatgtga

SEQ ID NO: 4200025 - DNA, 25 bp, Homo sapien
gaatggccgtctgatatgtgacata

SEQ ID NO: 4200026 - DNA, 25 bp, Homo sapien
taagtaattgattcgcagttatgaa

SEQ ID NO: 4200027 - DNA, 25 bp, Homo sapien
gctgtaaattgctcaaaacggtgat

SEQ ID NO: 4200028 - DNA, 25 bp, Homo sapien
gattcgcagttatgaattcagtgcc

SEQ ID NO: 4200029 - DNA, 25 bp, Homo sapien
cagtgcctagatcccagtcgtgttc

SEQ ID NO: 4200030 - DNA, 25 bp, Homo sapien
ctaactgggagcgtctgttgggcca

SEQ ID NO: 4200031 - DNA, 25 bp, Homo sapien
cctctaactgggagcgtctgttggg

SEQ ID NO: 4200032 - DNA, 25 bp, Homo sapien
ctctaactgggagcgtctgttgggc

SEQ ID NO: 4200033 - DNA, 25 bp, Homo sapien
tctaactgggagcgtctgttgggcc

SEQ ID NO: 4200034 - DNA, 25 bp, Homo sapien
ttggtccaaggcaagcccctgtcac

SEQ ID NO: 4200035 - DNA, 25 bp, Homo sapien
aaggcaagcccctgtcacgggattc

SEQ ID NO: 4200036 - DNA, 25 bp, Homo sapien
cacgggattctgaccatcaggagat

SEQ ID NO: 4200037 - DNA, 25 bp, Homo sapien
ccctgtcacgggattctgaccatca

SEQ ID NO: 4200038 - DNA, 25 bp, Homo sapien
gctgactgtgtcatgcttatgaaac

SEQ ID NO: 4200039 - DNA, 25 bp, Homo sapien
gactgtgtcatgcttatgaaacatt

SEQ ID NO: 4200040 - DNA, 25 bp, Homo sapien
tgtgctgactgtgtcatgcttatga

SEQ ID NO: 4200041 - DNA, 25 bp, Homo sapien
ctcctggcaattattgttacttcct

SEQ ID NO: 4200042 - DNA, 25 bp, Homo sapien
ttttgtgcctttgtgcttagggatc

SEQ ID NO: 4200043 - DNA, 25 bp, Homo sapien
gcctttgtgcttagggatctattac

SEQ ID NO: 4200044 - DNA, 25 bp, Homo sapien
ctttttgtgcctttgtgcttaggga

SEQ ID NO: 4200045 - DNA, 25 bp, Homo sapien
ttgtgcctttgtgcttagggatcta

SEQ ID NO: 4200046 - DNA, 25 bp, Homo sapien
cggtgtgacatttgggaatcaaaaa

SEQ ID NO: 4200047 - DNA, 25 bp, Homo sapien
tccacattcgctggttaaacggtgt

SEQ ID NO: 4200048 - DNA, 25 bp, Homo sapien
tggttaaacggtgtgacatttggga

SEQ ID NO: 4200049 - DNA, 25 bp, Homo sapien
cattcgctggttaaacggtgtgaca

SEQ ID NO: 4200050 - DNA, 25 bp, Homo sapien
tgatgccgctagatgtgaacaccag

SEQ ID NO: 4200051 - DNA, 25 bp, Homo sapien
gcatcaatgtgcatacccagggaac

SEQ ID NO: 4200052 - DNA, 25 bp, Homo sapien
caaagctgcccgtctttgaagggct

SEQ ID NO: 4200053 - DNA, 25 bp, Homo sapien
tctgcaataccagatggcatccatc

SEQ ID NO: 4200054 - DNA, 25 bp, Homo sapien
aggtgtttctgtgggctgacagcag

SEQ ID NO: 4200055 - DNA, 25 bp, Homo sapien
aaattccacatagctttctcaggtg

SEQ ID NO: 4200056 - DNA, 25 bp, Homo sapien
tttctgtgggctgacagcagtgcat

SEQ ID NO: 4200057 - DNA, 25 bp, Homo sapien
ttccaacggcatatgcaaattccac

SEQ ID NO: 4200058 - DNA, 25 bp, Homo sapien
gcacacattcctaggcataatagag

SEQ ID NO: 4200059 - DNA, 25 bp, Homo sapien
cccaagtaatggcagatgagcaagt

SEQ ID NO: 4200060 - DNA, 25 bp, Homo sapien
gcttatgagcaaataccttggctac

SEQ ID NO: 4200061 - DNA, 25 bp, Homo sapien
cctttataatccctgatggcccagt

SEQ ID NO: 4200062 - DNA, 25 bp, Homo sapien
aattcagggcttaacttgagggtag

SEQ ID NO: 4200063 - DNA, 25 bp, Homo sapien
tttaaacttacgagtgcctggattc

SEQ ID NO: 4200064 - DNA, 25 bp, Homo sapien
ggtgaagcctacacacccaggatga

SEQ ID NO: 4200065 - DNA, 25 bp, Homo sapien
tgcacatagggttggcaacactgga

SEQ ID NO: 4200066 - DNA, 25 bp, Homo sapien
tgttagggaccaaagcgtgtcacgg

SEQ ID NO: 4200067 - DNA, 25 bp, Homo sapien
ttatccatgggagggcaatgagaca

SEQ ID NO: 4200068 - DNA, 25 bp, Homo sapien
agaagataacttgcctcatgccgct

SEQ ID NO: 4200069 - DNA, 25 bp, Homo sapien
cagtgacctggttttcatgtggtga

SEQ ID NO: 4200070 - DNA, 25 bp, Homo sapien
gatcgagtgcctacaccattgtgat

SEQ ID NO: 4200071 - DNA, 25 bp, Homo sapien
gatctgcgttgaaatatccatctat

SEQ ID NO: 4200072 - DNA, 25 bp, Homo sapien
gtgatctgcgttgaaatatccatct

SEQ ID NO: 4200073 - DNA, 25 bp, Homo sapien
atctggaagatcgagtgcctacacc

SEQ ID NO: 4200074 - DNA, 25 bp, Homo sapien
tggtaggaagatgaatggattccac

SEQ ID NO: 4200075 - DNA, 25 bp, Homo sapien
tgctactgaggtcccgaaaaggaaa

SEQ ID NO: 4200076 - DNA, 25 bp, Homo sapien
caaactactgttggcatgatgatgc

SEQ ID NO: 4200077 - DNA, 25 bp, Homo sapien
tgatatcacccctagagtctggtag

SEQ ID NO: 4200078 - DNA, 25 bp, Homo sapien
aaggaagttgcttccttcaccacca

SEQ ID NO: 4200079 - DNA, 25 bp, Homo sapien
aggaagttgcttccttcaccaccat

SEQ ID NO: 4200080 - DNA, 25 bp, Homo sapien
caaggaagttgcttccttcaccacc

SEQ ID NO: 4200081 - DNA, 25 bp, Homo sapien
gttgtgttgctgactcaggaatctg

SEQ ID NO: 4200082 - DNA, 25 bp, Homo sapien
tcccatgtctcagttatgctctgtt

SEQ ID NO: 4200083 - DNA, 25 bp, Homo sapien
caggttgtgttgctgactcaggaat

SEQ ID NO: 4200084 - DNA, 25 bp, Homo sapien
tgtctcagttatgctctgttctgtg

SEQ ID NO: 4200085 - DNA, 25 bp, Homo sapien
tagggtgttctctttccatagttac

SEQ ID NO: 4200086 - DNA, 25 bp, Homo sapien
ccgtggcaaaattgtattcaggctc

SEQ ID NO: 4200087 - DNA, 25 bp, Homo sapien
cagtggtaaatcactggagtaatac

SEQ ID NO: 4200088 - DNA, 25 bp, Homo sapien
gatataactcaacatctccgtggca

SEQ ID NO: 4200089 - DNA, 25 bp, Homo sapien
gccaaattgggttgttcttgcctac

SEQ ID NO: 4200090 - DNA, 25 bp, Homo sapien
taaaggctgagcttagagtgaattc

SEQ ID NO: 4200091 - DNA, 25 bp, Homo sapien
ggctcagtcttaatattggaccaaa

SEQ ID NO: 4200092 - DNA, 25 bp, Homo sapien
gaccaaattatctagagcttcagtg

SEQ ID NO: 4200093 - DNA, 25 bp, Homo sapien
tgggtactatacacatttctggaat

SEQ ID NO: 4200094 - DNA, 25 bp, Homo sapien
gcctggcttcctatggtcatttttg

SEQ ID NO: 4200095 - DNA, 25 bp, Homo sapien
tgtttctcctaccttaaaccatgta

SEQ ID NO: 4200096 - DNA, 25 bp, Homo sapien
tcttgcaagggatatatgggtacta

SEQ ID NO: 4200097 - DNA, 25 bp, Homo sapien
tgtgtctcaacccaaagactatgcg

SEQ ID NO: 4200098 - DNA, 25 bp, Homo sapien
gatcattttgggtgctgcgttgctc

SEQ ID NO: 4200099 - DNA, 25 bp, Homo sapien
gcatcccagatgtagagtcatgtag

SEQ ID NO: 4200100 - DNA, 25 bp, Homo sapien
tcccagaagtagagaatgaagctca

SEQ ID NO: 4200101 - DNA, 25 bp, Homo sapien
aatgattcggccacactgcttggtt

SEQ ID NO: 4200102 - DNA, 25 bp, Homo sapien
ggtctaatgattcggccacactgct

SEQ ID NO: 4200103 - DNA, 25 bp, Homo sapien
cgccggtctaatgattcggccacac

SEQ ID NO: 4200104 - DNA, 25 bp, Homo sapien
taatgattcggccacactgcttggt

SEQ ID NO: 4200105 - DNA, 25 bp, Homo sapien
cgtttcccgagaaaccaagcgtctg

SEQ ID NO: 4200106 - DNA, 25 bp, Homo sapien
gacaagggatgacttttgattctca

SEQ ID NO: 4200107 - DNA, 25 bp, Homo sapien
tttagaaaggaaagattcacttaga

SEQ ID NO: 4200108 - DNA, 25 bp, Homo sapien
ctttgttgacaaagcttcatcctca

SEQ ID NO: 4200109 - DNA, 25 bp, Homo sapien
gcatttgtgcaagaaaaaacagtgc

SEQ ID NO: 4200110 - DNA, 25 bp, Homo sapien
cgctgaaataggctttgggtataca

SEQ ID NO: 4200111 - DNA, 25 bp, Homo sapien
ccagtatagttacgccattcttagg

SEQ ID NO: 4200112 - DNA, 25 bp, Homo sapien
aaacagtgcctacttcccagtatag

SEQ ID NO: 4200113 - DNA, 25 bp, Homo sapien
ggctattgatagtctcccaggaaga

SEQ ID NO: 4200114 - DNA, 25 bp, Homo sapien
tgggcacctggcagaatcaaatacc

SEQ ID NO: 4200115 - DNA, 25 bp, Homo sapien
caatcatttcctacagcgcagcaga

SEQ ID NO: 4200116 - DNA, 25 bp, Homo sapien
gatcatgagtccttggtggaacagg

SEQ ID NO: 4200117 - DNA, 25 bp, Homo sapien
ggtaaaagtcatatctccaacatct

SEQ ID NO: 4200118 - DNA, 25 bp, Homo sapien
taaaagtcatatctccaacatctcc

SEQ ID NO: 4200119 - DNA, 25 bp, Homo sapien
actggtaaaagtcatatctccaaca

SEQ ID NO: 4200120 - DNA, 25 bp, Homo sapien
agtcatatctccaacatctccaaac

SEQ ID NO: 4200121 - DNA, 25 bp, Homo sapien
ttctttgagcttgggaaggtgaaga

SEQ ID NO: 4200122 - DNA, 25 bp, Homo sapien
gataactggaattggccggaatcag

SEQ ID NO: 4200123 - DNA, 25 bp, Homo sapien
tattattcgtatctagatcaattat

SEQ ID NO: 4200124 - DNA, 25 bp, Homo sapien
gtgaagattataccccttcttccca

SEQ ID NO: 4200125 - DNA, 25 bp, Homo sapien
gaatagtgttagtcaaatacagtgc

SEQ ID NO: 4200126 - DNA, 25 bp, Homo sapien
tatcaatcaagctccttcctggcca

SEQ ID NO: 4200127 - DNA, 25 bp, Homo sapien
ttagtgtaagtgttagttttgccca

SEQ ID NO: 4200128 - DNA, 25 bp, Homo sapien
gttttgcccattctaaacctgcata

SEQ ID NO: 4200129 - DNA, 25 bp, Homo sapien
gtctcatttgagaaggctgcattct

SEQ ID NO: 4200130 - DNA, 25 bp, Homo sapien
gataagaattcctacagttcagatt

SEQ ID NO: 4200131 - DNA, 25 bp, Homo sapien
gccatcatgaagctcttaaagccaa

SEQ ID NO: 4200132 - DNA, 25 bp, Homo sapien
tgccatcatgaagctcttaaagagt

SEQ ID NO: 4200133 - DNA, 25 bp, Homo sapien
cgttgtgaactgtcttcagggcaga

SEQ ID NO: 4200134 - DNA, 25 bp, Homo sapien
tgcctcacaagaccaaagggtagtc

SEQ ID NO: 4200135 - DNA, 25 bp, Homo sapien
gccagactcgatgaaataactacag

SEQ ID NO: 4200136 - DNA, 25 bp, Homo sapien
taactacagacacatcatgatgttg

SEQ ID NO: 4200137 - DNA, 25 bp, Homo sapien
tgtagagccaccactctctttcaag

SEQ ID NO: 4200138 - DNA, 25 bp, Homo sapien
gactttgcctgtgttagttctcatc

SEQ ID NO: 4200139 - DNA, 25 bp, Homo sapien
gatatgctaagtgagggactttgcc

SEQ ID NO: 4200140 - DNA, 25 bp, Homo sapien
cagggatgccatatgaagaagaacc

SEQ ID NO: 4200141 - DNA, 25 bp, Homo sapien
ctccatgactgtggcctgtctgcct

SEQ ID NO: 4200142 - DNA, 25 bp, Homo sapien
gcctgtctgcctctactcggtccat

SEQ ID NO: 4200143 - DNA, 25 bp, Homo sapien
gactgtggcctgtctgcctctactc

SEQ ID NO: 4200144 - DNA, 25 bp, Homo sapien
tgtggcctgtctgcctctactcggt

SEQ ID NO: 4200145 - DNA, 25 bp, Homo sapien
ggcaagacatcgtatcagccctgaa

SEQ ID NO: 4200146 - DNA, 25 bp, Homo sapien
gcatttttgagagtacagactaccg

SEQ ID NO: 4200147 - DNA, 25 bp, Homo sapien
ttatgccacccagacagtcctaggg

SEQ ID NO: 4200148 - DNA, 25 bp, Homo sapien
tatcagcccctaaatgcttgtggtc

SEQ ID NO: 4200149 - DNA, 25 bp, Homo sapien
gaatcaaaatgatccctgaggggga

SEQ ID NO: 4200150 - DNA, 25 bp, Homo sapien
tagcatatagtctggcatatagtag

SEQ ID NO: 4200151 - DNA, 25 bp, Homo sapien
cattctcctcaataaggccgtgggc

SEQ ID NO: 4200152 - DNA, 25 bp, Homo sapien
caataaggccgtgggctccttgagg

SEQ ID NO: 4200153 - DNA, 25 bp, Homo sapien
gatagcaagtcgacaaagatggtcc

SEQ ID NO: 4200154 - DNA, 25 bp, Homo sapien
tcaatgaaccatgcctcccagtact

SEQ ID NO: 4200155 - DNA, 25 bp, Homo sapien
catttactgttagggcattctctgt

SEQ ID NO: 4200156 - DNA, 25 bp, Homo sapien
gggtcctttgtaaccaatagaatgc

SEQ ID NO: 4200157 - DNA, 25 bp, Homo sapien
tattcctgctgaagttatgcactaa

SEQ ID NO: 4200158 - DNA, 25 bp, Homo sapien
tgattttcatattgtctcagacagc

SEQ ID NO: 4200159 - DNA, 25 bp, Homo sapien
gatcttcagctaatgctagagtggc

SEQ ID NO: 4200160 - DNA, 25 bp, Homo sapien
gggtcacttagtgtcttggctgctg

SEQ ID NO: 4200161 - DNA, 25 bp, Homo sapien
caagagacgatgagtttagcatgct

SEQ ID NO: 4200162 - DNA, 25 bp, Homo sapien
caataactgctaagtgagaactgga

SEQ ID NO: 4200163 - DNA, 25 bp, Homo sapien
aactggtaagtgcaacaatgaggac

SEQ ID NO: 4200164 - DNA, 25 bp, Homo sapien
tctgggatcgtgatgtgaaatgaca

SEQ ID NO: 4200165 - DNA, 25 bp, Homo sapien
atccttgttgtcttcgcgctgagta

SEQ ID NO: 4200166 - DNA, 25 bp, Homo sapien
tggtacaaaacacaaccgaggagcg

SEQ ID NO: 4200167 - DNA, 25 bp, Homo sapien
ccgaggagcgtatacagttgaaaac

SEQ ID NO: 4200168 - DNA, 25 bp, Homo sapien
gatcagcaagtgtccttaagtcaaa

SEQ ID NO: 4200169 - DNA, 25 bp, Homo sapien
aaagaaattcttaatcacggtgcca

SEQ ID NO: 4200170 - DNA, 25 bp, Homo sapien
cacggtagtaaaaacaggccatctc

SEQ ID NO: 4200171 - DNA, 25 bp, Homo sapien
tattctgggcagctaagagaggcac

SEQ ID NO: 4200172 - DNA, 25 bp, Homo sapien
aaaagccctggtcattgttcaagtg

SEQ ID NO: 4200173 - DNA, 25 bp, Homo sapien
ttagagcctgaggatccacgggact

SEQ ID NO: 4200174 - DNA, 25 bp, Homo sapien
ggagcaaagtatttatgtgcatacg

SEQ ID NO: 4200175 - DNA, 25 bp, Homo sapien
gattgcatttagtgaactgaaaaca

SEQ ID NO: 4200176 - DNA, 25 bp, Homo sapien
cataaatagtcatcagaatacctag

SEQ ID NO: 4200177 - DNA, 25 bp, Homo sapien
aacgaagttttatggtatgtgctac

SEQ ID NO: 4200178 - DNA, 25 bp, Homo sapien
tgtccttgtccagcgtttctttctc

SEQ ID NO: 4200179 - DNA, 25 bp, Homo sapien
cacattttgagggttcatgaattct

SEQ ID NO: 4200180 - DNA, 25 bp, Homo sapien
ttgagggttcatgaattctgtgtcc

SEQ ID NO: 4200181 - DNA, 25 bp, Homo sapien
cacccagcacattttgagggttcat

SEQ ID NO: 4200182 - DNA, 25 bp, Homo sapien
ctttgatgggattttccggtcttgt

SEQ ID NO: 4200183 - DNA, 25 bp, Homo sapien
gctctggctatgctggttctttcct

SEQ ID NO: 4200184 - DNA, 25 bp, Homo sapien
gattttccggtcttgtccaagccag

SEQ ID NO: 4200185 - DNA, 25 bp, Homo sapien
gaagagggcggatgggttctttgat

SEQ ID NO: 4200186 - DNA, 25 bp, Homo sapien
ctacccttttcttgagcccggtgct

SEQ ID NO: 4200187 - DNA, 25 bp, Homo sapien
cccttttcttgagcccggtgctgtc

SEQ ID NO: 4200188 - DNA, 25 bp, Homo sapien
ttcttgagcccggtgctgtctctcg

SEQ ID NO: 4200189 - DNA, 25 bp, Homo sapien
tgagcccggtgctgtctctcgtttt

SEQ ID NO: 4200190 - DNA, 25 bp, Homo sapien
agtgtactttctaattgatggtgac

SEQ ID NO: 4200191 - DNA, 25 bp, Homo sapien
cacggggcttagtgtactttctaat

SEQ ID NO: 4200192 - DNA, 25 bp, Homo sapien
ggcttagtgtactttctaattgatg

SEQ ID NO: 4200193 - DNA, 25 bp, Homo sapien
aagcagccggtaacacctccctctt

SEQ ID NO: 4200194 - DNA, 25 bp, Homo sapien
tttccttttggacttgcaggtcatg

SEQ ID NO: 4200195 - DNA, 25 bp, Homo sapien
ttccttttggacttgcaggtcatgg

SEQ ID NO: 4200196 - DNA, 25 bp, Homo sapien
tccttttggacttgcaggtcatggg

SEQ ID NO: 4200197 - DNA, 25 bp, Homo sapien
ttgcaggtcatgggcaccaacacct

SEQ ID NO: 4200198 - DNA, 25 bp, Homo sapien
ggactcggagaagccctcgagcatc

SEQ ID NO: 4200199 - DNA, 25 bp, Homo sapien
gaatccctgtctgggtgcggactcg

SEQ ID NO: 4200200 - DNA, 25 bp, Homo sapien
gatgcacggtgaagcctcagctgct

SEQ ID NO: 4200201 - DNA, 25 bp, Homo sapien
tctctgcgttctcgcgagaagcgcg

SEQ ID NO: 4200202 - DNA, 25 bp, Homo sapien
tagcgtccgcgctgagcaaacagtc

SEQ ID NO: 4200203 - DNA, 25 bp, Homo sapien
gtgagcctccacacgtagccgcagg

SEQ ID NO: 4200204 - DNA, 25 bp, Homo sapien
caaacagtccagacgtggggcccag

SEQ ID NO: 4200205 - DNA, 25 bp, Homo sapien
ggcagctccttaaatagcgtccgcg

SEQ ID NO: 4200206 - DNA, 25 bp, Homo sapien
gactggagcacgatcttgtaagcac

SEQ ID NO: 4200207 - DNA, 25 bp, Homo sapien
ggcattacacacgttgggctccgat

SEQ ID NO: 4200208 - DNA, 25 bp, Homo sapien
taaggctctcttggcacaagcggcg

SEQ ID NO: 4200209 - DNA, 25 bp, Homo sapien
tgaacctgcccctgaattaatgagg

SEQ ID NO: 4200210 - DNA, 25 bp, Homo sapien
gaacatccaagtagaaatgttcagc

SEQ ID NO: 4200211 - DNA, 25 bp, Homo sapien
ccaacacttgctttatacgagtctc

SEQ ID NO: 4200212 - DNA, 25 bp, Homo sapien
ttatacgagtctcacagcacagatg

SEQ ID NO: 4200213 - DNA, 25 bp, Homo sapien
gactgttagaaatgtctaggtattt

SEQ ID NO: 4200214 - DNA, 25 bp, Homo sapien
aatgacaagatttggagtccggctc

SEQ ID NO: 4200215 - DNA, 25 bp, Homo sapien
ggaaatggcataggatacactcaag

SEQ ID NO: 4200216 - DNA, 25 bp, Homo sapien
tacactggtggtagggaaagtctac

SEQ ID NO: 4200217 - DNA, 25 bp, Homo sapien
tctgaggccatatgagttagagagc

SEQ ID NO: 4200218 - DNA, 25 bp, Homo sapien
agtccctgagagctgcatctattga

SEQ ID NO: 4200219 - DNA, 25 bp, Homo sapien
gatttaaagtacctaacttagcaca

SEQ ID NO: 4200220 - DNA, 25 bp, Homo sapien
gatcacctcattcccacaggtcaag

SEQ ID NO: 4200221 - DNA, 25 bp, Homo sapien
ggaatcacaagtatgtccttatcag

SEQ ID NO: 4200222 - DNA, 25 bp, Homo sapien
tccctatgctagattgcaggttccc

SEQ ID NO: 4200223 - DNA, 25 bp, Homo sapien
aatgtttctgttcccaacacactct

SEQ ID NO: 4200224 - DNA, 25 bp, Homo sapien
catcatcattccctatgctagattg

SEQ ID NO: 4200225 - DNA, 25 bp, Homo sapien
gtttctgttcccaacacactctatt

SEQ ID NO: 4200226 - DNA, 25 bp, Homo sapien
caagtccatctatggttggagcaac

SEQ ID NO: 4200227 - DNA, 25 bp, Homo sapien
agcaaaattggagagactttcccgg

SEQ ID NO: 4200228 - DNA, 25 bp, Homo sapien
gaagttgcaagtgagtggatccaga

SEQ ID NO: 4200229 - DNA, 25 bp, Homo sapien
ctttcccgggagagtcagcaatgac

SEQ ID NO: 4200230 - DNA, 25 bp, Homo sapien
ccccatgaggaattaaatgcagaag

SEQ ID NO: 4200231 - DNA, 25 bp, Homo sapien
tatagctgtgtcctcctaacccaag

SEQ ID NO: 4200232 - DNA, 25 bp, Homo sapien
catatttgtatgaggctagatttct

SEQ ID NO: 4200233 - DNA, 25 bp, Homo sapien
gaagactatccacacttatctgaaa

SEQ ID NO: 4200234 - DNA, 25 bp, Homo sapien
tcgtaagtagactatgtatttccta

SEQ ID NO: 4200235 - DNA, 25 bp, Homo sapien
taacttgcctaaatccctgtattcc

SEQ ID NO: 4200236 - DNA, 25 bp, Homo sapien
tatatatttagcataagacgtgata

SEQ ID NO: 4200237 - DNA, 25 bp, Homo sapien
tgaaagtgccattgcaatcgtaagt

SEQ ID NO: 4200238 - DNA, 25 bp, Homo sapien
cattcactggcatggatgatcagga

SEQ ID NO: 4200239 - DNA, 25 bp, Homo sapien
tcttgcactaagaaggtactacttg

SEQ ID NO: 4200240 - DNA, 25 bp, Homo sapien
tgagagtgggcttgcaagaacacaa

SEQ ID NO: 4200241 - DNA, 25 bp, Homo sapien
gaatcagactatcaggaaaggagct

SEQ ID NO: 4200242 - DNA, 25 bp, Homo sapien
cccagttgctgcgaaagagcagtga

SEQ ID NO: 4200243 - DNA, 25 bp, Homo sapien
catgctgggtaccttaacttggtca

SEQ ID NO: 4200244 - DNA, 25 bp, Homo sapien
tgttggcatgactttgaaacccagt

SEQ ID NO: 4200245 - DNA, 25 bp, Homo sapien
ttatctgagcgaaaaacgattcatg

SEQ ID NO: 4200246 - DNA, 25 bp, Homo sapien
tcaagagttttggagcatagtcagg

SEQ ID NO: 4200247 - DNA, 25 bp, Homo sapien
cttaaagttagagattggttcatcc

SEQ ID NO: 4200248 - DNA, 25 bp, Homo sapien
tgtttttcaagagttttggagcata

SEQ ID NO: 4200249 - DNA, 25 bp, Homo sapien
tagtcaggatcatgatgataagaaa

SEQ ID NO: 4200250 - DNA, 25 bp, Homo sapien
gaaaacatgggcaacctgctccctt

SEQ ID NO: 4200251 - DNA, 25 bp, Homo sapien
taggtttcagcggacttcagggtgc

SEQ ID NO: 4200252 - DNA, 25 bp, Homo sapien
aacagaatttctgggccctatgccc

SEQ ID NO: 4200253 - DNA, 25 bp, Homo sapien
tgcccctctgattggaagtgaccgt

SEQ ID NO: 4200254 - DNA, 25 bp, Homo sapien
tgattcccagcaaccctagtggcca

SEQ ID NO: 4200255 - DNA, 25 bp, Homo sapien
gattcccagcaaccctagtggccat

SEQ ID NO: 4200256 - DNA, 25 bp, Homo sapien
aactgacttcatcattaacctgata

SEQ ID NO: 4200257 - DNA, 25 bp, Homo sapien
aggagtaaaactgacttcatcatta

SEQ ID NO: 4200258 - DNA, 25 bp, Homo sapien
taaaactgacttcatcattaacctg

SEQ ID NO: 4200259 - DNA, 25 bp, Homo sapien
gagtaaaactgacttcatcattaac

SEQ ID NO: 4200260 - DNA, 25 bp, Homo sapien
cgactgatctcacggcaatcttcta

SEQ ID NO: 4200261 - DNA, 25 bp, Homo sapien
taccgactgatctcacggcaatctt

SEQ ID NO: 4200262 - DNA, 25 bp, Homo sapien
tcaacaataccgactgatctcacgg

SEQ ID NO: 4200263 - DNA, 25 bp, Homo sapien
caataccgactgatctcacggcaat

SEQ ID NO: 4200264 - DNA, 25 bp, Homo sapien
gcattctgtataggtggtccatgta

SEQ ID NO: 4200265 - DNA, 25 bp, Homo sapien
aaaaaattgcattctgtataggtgg

SEQ ID NO: 4200266 - DNA, 25 bp, Homo sapien
aaattgcattctgtataggtggtcc

SEQ ID NO: 4200267 - DNA, 25 bp, Homo sapien
gtataggtggtccatgtaaaaccat

SEQ ID NO: 4200268 - DNA, 25 bp, Homo sapien
ttccaataacatggaagccaaagcc

SEQ ID NO: 4200269 - DNA, 25 bp, Homo sapien
tctggaatacttaggccatacaaat

SEQ ID NO: 4200270 - DNA, 25 bp, Homo sapien
atgctttggcaaactgtcctcctgg

SEQ ID NO: 4200271 - DNA, 25 bp, Homo sapien
gaatatttagctcaggttctccatg

SEQ ID NO: 4200272 - DNA, 25 bp, Homo sapien
catcatcatcatcagtatttgtaga

SEQ ID NO: 4200273 - DNA, 25 bp, Homo sapien
tcatcatcatcatcagtatttgtag

SEQ ID NO: 4200274 - DNA, 25 bp, Homo sapien
aggatttctaagcactggtctgggt

SEQ ID NO: 4200275 - DNA, 25 bp, Homo sapien
agagaggcatttactgatgctgaca

SEQ ID NO: 4200276 - DNA, 25 bp, Homo sapien
taatcttggtgacagatggcttctc

SEQ ID NO: 4200277 - DNA, 25 bp, Homo sapien
gaatccaattccctagagaccttga

SEQ ID NO: 4200278 - DNA, 25 bp, Homo sapien
ttcaaaatcagccaggtagacctga

SEQ ID NO: 4200279 - DNA, 25 bp, Homo sapien
aaaatcagccaggtagacctgaagg

SEQ ID NO: 4200280 - DNA, 25 bp, Homo sapien
tgttcaaaatcagccaggtagacct

SEQ ID NO: 4200281 - DNA, 25 bp, Homo sapien
tcctgttcaaaatcagccaggtaga

SEQ ID NO: 4200282 - DNA, 25 bp, Homo sapien
ggcccaatgggccgcgggaagcgac

SEQ ID NO: 4200283 - DNA, 25 bp, Homo sapien
cccaatgggccgcgggaagcgacac

SEQ ID NO: 4200284 - DNA, 25 bp, Homo sapien
ggcaagggcccaatgggccgcggga

SEQ ID NO: 4200285 - DNA, 25 bp, Homo sapien
caagggcccaatgggccgcgggaag

SEQ ID NO: 4200286 - DNA, 25 bp, Homo sapien
tttctcagtcgcctccctatgggac

SEQ ID NO: 4200287 - DNA, 25 bp, Homo sapien
gggcggctttctcagtcgcctccct

SEQ ID NO: 4200288 - DNA, 25 bp, Homo sapien
tcagtcgcctccctatgggactggg

SEQ ID NO: 4200289 - DNA, 25 bp, Homo sapien
tgcagccacgggtaagggggcggct

SEQ ID NO: 4200290 - DNA, 25 bp, Homo sapien
tcatctgtgcccttaaccaccggag

SEQ ID NO: 4200291 - DNA, 25 bp, Homo sapien
agttccagctggtgtcgacgtccca

SEQ ID NO: 4200292 - DNA, 25 bp, Homo sapien
gggtaggccactccccgcctgatga

SEQ ID NO: 4200293 - DNA, 25 bp, Homo sapien
cggatcctctgagcccgcgcaggga

SEQ ID NO: 4200294 - DNA, 25 bp, Homo sapien
tattccagcaaggaaacatcggtgg

SEQ ID NO: 4200295 - DNA, 25 bp, Homo sapien
tgagctgcctgccatgatatgaaaa

SEQ ID NO: 4200296 - DNA, 25 bp, Homo sapien
gagaaaatacataccatgctcctca

SEQ ID NO: 4200297 - DNA, 25 bp, Homo sapien
catctgaaccttcacctgaagtgca

SEQ ID NO: 4200298 - DNA, 25 bp, Homo sapien
cagacgctgataactttggaatcca

SEQ ID NO: 4200299 - DNA, 25 bp, Homo sapien
ctggactggaattttgagagaggca

SEQ ID NO: 4200300 - DNA, 25 bp, Homo sapien
aaatctcttgatgaacagtgtgtgg

SEQ ID NO: 4200301 - DNA, 25 bp, Homo sapien
cagtgtgtggttggcaaaatttcca

SEQ ID NO: 4200302 - DNA, 25 bp, Homo sapien
tgcattgtgagatgaatctatggtt

SEQ ID NO: 4200303 - DNA, 25 bp, Homo sapien
ttaccaattagtattgcactcatgg

SEQ ID NO: 4200304 - DNA, 25 bp, Homo sapien
catacctagatcctatatgctgtca

SEQ ID NO: 4200305 - DNA, 25 bp, Homo sapien
gctaaaaattatctagtcctgctaa

SEQ ID NO: 4200306 - DNA, 25 bp, Homo sapien
ttatttaactttgggcagagtggta

SEQ ID NO: 4200307 - DNA, 25 bp, Homo sapien
gtgccaatgtctcaatagcaagatg

SEQ ID NO: 4200308 - DNA, 25 bp, Homo sapien
taaataagtgttgtgtgccaatgtc

SEQ ID NO: 4200309 - DNA, 25 bp, Homo sapien
gaatgtaattttgcaggacattata

SEQ ID NO: 4200310 - DNA, 25 bp, Homo sapien
cctggtgtaccaataggttatgtta

SEQ ID NO: 4200311 - DNA, 25 bp, Homo sapien
ggcacccatgtctaccaaagtttac

SEQ ID NO: 4200312 - DNA, 25 bp, Homo sapien
ttatgttattcagacttggcaccca

SEQ ID NO: 4200313 - DNA, 25 bp, Homo sapien
ggatgtactaaaaataagtggtcca

SEQ ID NO: 4200314 - DNA, 25 bp, Homo sapien
tcccacttctgaacaactactgttg

SEQ ID NO: 4200315 - DNA, 25 bp, Homo sapien
tctgaacaactactgttgagttgaa

SEQ ID NO: 4200316 - DNA, 25 bp, Homo sapien
ccctgggtccaatgtgacattctaa

SEQ ID NO: 4200317 - DNA, 25 bp, Homo sapien
aataaggatgccctgggtccaatgt

SEQ ID NO: 4200318 - DNA, 25 bp, Homo sapien
taatcagccagttggagctgcaggg

SEQ ID NO: 4200319 - DNA, 25 bp, Homo sapien
tatataatcagccagttggagctgc

SEQ ID NO: 4200320 - DNA, 25 bp, Homo sapien
cagccagtgtataatcagccagtat

SEQ ID NO: 4200321 - DNA, 25 bp, Homo sapien
agccagtatataatcagccagttgg

SEQ ID NO: 4200322 - DNA, 25 bp, Homo sapien
attgtatcctcatattctacaacac

SEQ ID NO: 4200323 - DNA, 25 bp, Homo sapien
tgccctcgctcgcatacattctctc

SEQ ID NO: 4200324 - DNA, 25 bp, Homo sapien
tatatttacccaaagtaactgcctc

SEQ ID NO: 4200325 - DNA, 25 bp, Homo sapien
tcccagaagttgactgtaagctctc

SEQ ID NO: 4200326 - DNA, 25 bp, Homo sapien
ctccttgaattgcagactcacagat

SEQ ID NO: 4200327 - DNA, 25 bp, Homo sapien
tcacagatgaatgcttctcacccgg

SEQ ID NO: 4200328 - DNA, 25 bp, Homo sapien
tctcacccggaaacaaacttgccag

SEQ ID NO: 4200329 - DNA, 25 bp, Homo sapien
tgccagttgggtatcctcctcagta

SEQ ID NO: 4200330 - DNA, 25 bp, Homo sapien
gctggagagtgagcaaagtttcatc

SEQ ID NO: 4200331 - DNA, 25 bp, Homo sapien
tatgaattccctatctttgcagcac

SEQ ID NO: 4200332 - DNA, 25 bp, Homo sapien
tctggcttgcatgggacttgaaagc

SEQ ID NO: 4200333 - DNA, 25 bp, Homo sapien
tgtttaccaggatgcatagcatggg

SEQ ID NO: 4200334 - DNA, 25 bp, Homo sapien
tccagtagtctcgtgggtccccgag

SEQ ID NO: 4200335 - DNA, 25 bp, Homo sapien
taagattcaggaaacgaaaccagga

SEQ ID NO: 4200336 - DNA, 25 bp, Homo sapien
tctgagaaggttgcgcagcagctgt

SEQ ID NO: 4200337 - DNA, 25 bp, Homo sapien
ggtgttggcgcaaaggttactccca

SEQ ID NO: 4200338 - DNA, 25 bp, Homo sapien
ccagggggtgggcgcagtccctcct

SEQ ID NO: 4200339 - DNA, 25 bp, Homo sapien
gcgcagtccctcctccagctccttc

SEQ ID NO: 4200340 - DNA, 25 bp, Homo sapien
gcagtccctcctccagctccttcac

SEQ ID NO: 4200341 - DNA, 25 bp, Homo sapien
gggggtgggcgcagtccctcctcca

SEQ ID NO: 4200342 - DNA, 25 bp, Homo sapien
ccagttccagttagtgtcggagtcc

SEQ ID NO: 4200343 - DNA, 25 bp, Homo sapien
ttccgagggatggaggtcaaagcca

SEQ ID NO: 4200344 - DNA, 25 bp, Homo sapien
taaccaccggacaaacgtctctgga

SEQ ID NO: 4200345 - DNA, 25 bp, Homo sapien
cctcgccttgaaaagccacgggctt

SEQ ID NO: 4200346 - DNA, 25 bp, Homo sapien
gacagcaaccaaaacaagattacgg

SEQ ID NO: 4200347 - DNA, 25 bp, Homo sapien
gattgccacaaaagcactgaagagt

SEQ ID NO: 4200348 - DNA, 25 bp, Homo sapien
caaggtgggatatcctgagattgcc

SEQ ID NO: 4200349 - DNA, 25 bp, Homo sapien
caaaagagttcgagcattactaccc

SEQ ID NO: 4200350 - DNA, 25 bp, Homo sapien
tgtatcgttccaattttggtatatg

SEQ ID NO: 4200351 - DNA, 25 bp, Homo sapien
gtgcagggaccatgctaatcttctc

SEQ ID NO: 4200352 - DNA, 25 bp, Homo sapien
cctcacaaattttcgtgtcatcctt

SEQ ID NO: 4200353 - DNA, 25 bp, Homo sapien
ggtatatgtgctgccaaagcaagca

SEQ ID NO: 4200354 - DNA, 25 bp, Homo sapien
gctgtgtggcctgtcttatctatgc

SEQ ID NO: 4200355 - DNA, 25 bp, Homo sapien
agctgtgtggcctgtcttatctatg

SEQ ID NO: 4200356 - DNA, 25 bp, Homo sapien
caaagcagcaatgatcggtgcctgt

SEQ ID NO: 4200357 - DNA, 25 bp, Homo sapien
acaatttcggaattcatgttcctgc

SEQ ID NO: 4200358 - DNA, 25 bp, Homo sapien
gttcctgcagatctagatgtaacag

SEQ ID NO: 4200359 - DNA, 25 bp, Homo sapien
atgtcttcacaaatgctgacaattt

SEQ ID NO: 4200360 - DNA, 25 bp, Homo sapien
ggtggctgagccttaattatttatc

SEQ ID NO: 4200361 - DNA, 25 bp, Homo sapien
caattgaactatgtacctgctgcca

SEQ ID NO: 4200362 - DNA, 25 bp, Homo sapien
tctggacctcaagtaaagaaatcgc

SEQ ID NO: 4200363 - DNA, 25 bp, Homo sapien
catgcttagatgatacaattgaact

SEQ ID NO: 4200364 - DNA, 25 bp, Homo sapien
tgaaggcagttgtatgcagagcact

SEQ ID NO: 4200365 - DNA, 25 bp, Homo sapien
aattgcagctgcactggccgtgcat

SEQ ID NO: 4200366 - DNA, 25 bp, Homo sapien
cactggccgtgcatgatatggctgc

SEQ ID NO: 4200367 - DNA, 25 bp, Homo sapien
gtcggctgcagccaccaaagggcat

SEQ ID NO: 4200368 - DNA, 25 bp, Homo sapien
aagaaaatgtgctgcagaaacaatt

SEQ ID NO: 4200369 - DNA, 25 bp, Homo sapien
ctcagagaagcttattttcattgct

SEQ ID NO: 4200370 - DNA, 25 bp, Homo sapien
gaaatgcaaagaaaatgtgctgcag

SEQ ID NO: 4200371 - DNA, 25 bp, Homo sapien
aatgcaaagaaaatgtgctgcagaa

SEQ ID NO: 4200372 - DNA, 25 bp, Homo sapien
gatcttcttccgttttgaaggtgtc

SEQ ID NO: 4200373 - DNA, 25 bp, Homo sapien
catcgagtttctattggtaccctga

SEQ ID NO: 4200374 - DNA, 25 bp, Homo sapien
tgcctttgcaaatgagcattctgga

SEQ ID NO: 4200375 - DNA, 25 bp, Homo sapien
taccctgactgtaggaggtcccttc

SEQ ID NO: 4200376 - DNA, 25 bp, Homo sapien
ctgagatttaggatgtaggacattt

SEQ ID NO: 4200377 - DNA, 25 bp, Homo sapien
tctcgttcgaatttcactttcaatg

SEQ ID NO: 4200378 - DNA, 25 bp, Homo sapien
gtaggacattttcaatctcgttcga

SEQ ID NO: 4200379 - DNA, 25 bp, Homo sapien
caatctcgttcgaatttcactttca

SEQ ID NO: 4200380 - DNA, 25 bp, Homo sapien
tgagtgcttccctgttaccccagca

SEQ ID NO: 4200381 - DNA, 25 bp, Homo sapien
ttaatgaggtagtaaccagcacagg

SEQ ID NO: 4200382 - DNA, 25 bp, Homo sapien
cacgtatttccatattgctggcaaa

SEQ ID NO: 4200383 - DNA, 25 bp, Homo sapien
aagcctttgctcctacacttgacca

SEQ ID NO: 4200384 - DNA, 25 bp, Homo sapien
gtacatttccacatagagttcacac

SEQ ID NO: 4200385 - DNA, 25 bp, Homo sapien
cagtacatttccacatagagttcac

SEQ ID NO: 4200386 - DNA, 25 bp, Homo sapien
tcagtacatttccacatagagttca

SEQ ID NO: 4200387 - DNA, 25 bp, Homo sapien
tacatttccacatagagttcacacc

SEQ ID NO: 4200388 - DNA, 25 bp, Homo sapien
cactagttgctattactcttcaaga

SEQ ID NO: 4200389 - DNA, 25 bp, Homo sapien
tagaaaagttgtgggaggaatggta

SEQ ID NO: 4200390 - DNA, 25 bp, Homo sapien
tatctctgtgatgtaatctcactag

SEQ ID NO: 4200391 - DNA, 25 bp, Homo sapien
taatctcactagttgctattactct

SEQ ID NO: 4200392 - DNA, 25 bp, Homo sapien
tctcaagcttcaggatcagccaact

SEQ ID NO: 4200393 - DNA, 25 bp, Homo sapien
tgttcctctaaacacggttgactgc

SEQ ID NO: 4200394 - DNA, 25 bp, Homo sapien
tactagcactcgtctaagtgtgggt

SEQ ID NO: 4200395 - DNA, 25 bp, Homo sapien
gaagcagactagctatattcatgag

SEQ ID NO: 4200396 - DNA, 25 bp, Homo sapien
ttcaccagtgtatgaaattccatag

SEQ ID NO: 4200397 - DNA, 25 bp, Homo sapien
tgtatgaaattccatagaagtgtga

SEQ ID NO: 4200398 - DNA, 25 bp, Homo sapien
ccagtgtatgaaattccatagaagt

SEQ ID NO: 4200399 - DNA, 25 bp, Homo sapien
gtatgaaattccatagaagtgtgac

SEQ ID NO: 4200400 - DNA, 25 bp, Homo sapien
tggcccaagagccagtttagcagaa

SEQ ID NO: 4200401 - DNA, 25 bp, Homo sapien
agagcccattgcacaatcggctggc

SEQ ID NO: 4200402 - DNA, 25 bp, Homo sapien
ggcttgctgtatgtgtttgcacgca

SEQ ID NO: 4200403 - DNA, 25 bp, Homo sapien
cacatgttcttgcacctggcccaag

SEQ ID NO: 4200404 - DNA, 25 bp, Homo sapien
gggggtagccaaacttattgcaatc

SEQ ID NO: 4200405 - DNA, 25 bp, Homo sapien
gttgggggtagccaaacttattgca

SEQ ID NO: 4200406 - DNA, 25 bp, Homo sapien
ttgggggtagccaaacttattgcaa

SEQ ID NO: 4200407 - DNA, 25 bp, Homo sapien
tgggggtagccaaacttattgcaat

SEQ ID NO: 4200408 - DNA, 25 bp, Homo sapien
gaatttcttgtgaatccagggtgta

SEQ ID NO: 4200409 - DNA, 25 bp, Homo sapien
gctttctttgacatacaacataaga

SEQ ID NO: 4200410 - DNA, 25 bp, Homo sapien
ttcttgtgaatccagggtgtagcaa

SEQ ID NO: 4200411 - DNA, 25 bp, Homo sapien
atttcttgtgaatccagggtgtagc

SEQ ID NO: 4200412 - DNA, 25 bp, Homo sapien
tttagccacagcaggcttcctcctt

SEQ ID NO: 4200413 - DNA, 25 bp, Homo sapien
acagcaggcttcctccttggagcat

SEQ ID NO: 4200414 - DNA, 25 bp, Homo sapien
agccacagcaggcttcctccttgga

SEQ ID NO: 4200415 - DNA, 25 bp, Homo sapien
cacagcaggcttcctccttggagca

SEQ ID NO: 4200416 - DNA, 25 bp, Homo sapien
ctccccgaaggaggcaaagtctaga

SEQ ID NO: 4200417 - DNA, 25 bp, Homo sapien
gaagctgagttttcagatggcctca

SEQ ID NO: 4200418 - DNA, 25 bp, Homo sapien
gcagtaacccatgttcaggaggcca

SEQ ID NO: 4200419 - DNA, 25 bp, Homo sapien
ctgaactgaatctgcagagccaccc

SEQ ID NO: 4200420 - DNA, 25 bp, Homo sapien
ccattacatggaattaggtaaggat

SEQ ID NO: 4200421 - DNA, 25 bp, Homo sapien
catggaattaggtaaggatcataat

SEQ ID NO: 4200422 - DNA, 25 bp, Homo sapien
ggaattaggtaaggatcataattca

SEQ ID NO: 4200423 - DNA, 25 bp, Homo sapien
tacatggaattaggtaaggatcata

SEQ ID NO: 4200424 - DNA, 25 bp, Homo sapien
caagagcctctagactagaaaacag

SEQ ID NO: 4200425 - DNA, 25 bp, Homo sapien
tcagcagaatgtctgaagggaattc

SEQ ID NO: 4200426 - DNA, 25 bp, Homo sapien
gaagtactctgcagaatccccaaga

SEQ ID NO: 4200427 - DNA, 25 bp, Homo sapien
gcagagcagctaaagccacagtcag

SEQ ID NO: 4200428 - DNA, 25 bp, Homo sapien
ttgacttaatttgtggacttgaact

SEQ ID NO: 4200429 - DNA, 25 bp, Homo sapien
taatttgtggacttgaactagacag

SEQ ID NO: 4200430 - DNA, 25 bp, Homo sapien
gtggacttgaactagacagaatgag

SEQ ID NO: 4200431 - DNA, 25 bp, Homo sapien
cttaatttgtggacttgaactagac

SEQ ID NO: 4200432 - DNA, 25 bp, Homo sapien
tcaagacccttccacaactggttgg

SEQ ID NO: 4200433 - DNA, 25 bp, Homo sapien
caagacccttccacaactggttgga

SEQ ID NO: 4200434 - DNA, 25 bp, Homo sapien
tcagctcatgttccacttcctctgt

SEQ ID NO: 4200435 - DNA, 25 bp, Homo sapien
gggctcagctcatgttccacttcct

SEQ ID NO: 4200436 - DNA, 25 bp, Homo sapien
tgtttctgacatagtatttcatgga

SEQ ID NO: 4200437 - DNA, 25 bp, Homo sapien
atcttgctatttctggaattctgac

SEQ ID NO: 4200438 - DNA, 25 bp, Homo sapien
catagtatttcatggaatgtccttc

SEQ ID NO: 4200439 - DNA, 25 bp, Homo sapien
cttgctatttctggaattctgactg

SEQ ID NO: 4200440 - DNA, 25 bp, Homo sapien
accatgggtaacacaattcctatgc

SEQ ID NO: 4200441 - DNA, 25 bp, Homo sapien
catgggtaacacaattcctatgcca

SEQ ID NO: 4200442 - DNA, 25 bp, Homo sapien
ccatgggtaacacaattcctatgcc

SEQ ID NO: 4200443 - DNA, 25 bp, Homo sapien
ttcctatttcatcagaaatggagaa

SEQ ID NO: 4200444 - DNA, 25 bp, Homo sapien
agaaatccaaatgaattcaaaccca

SEQ ID NO: 4200445 - DNA, 25 bp, Homo sapien
taaatgtaatggtgtggtaaatctc

SEQ ID NO: 4200446 - DNA, 25 bp, Homo sapien
agcgtaccatctgctgtagaacact

SEQ ID NO: 4200447 - DNA, 25 bp, Homo sapien
tataatcaggaacattggcaacatt

SEQ ID NO: 4200448 - DNA, 25 bp, Homo sapien
ctttcatctagaccctgacaaggtg

SEQ ID NO: 4200449 - DNA, 25 bp, Homo sapien
cagcatgcataggtgaaaaagccct

SEQ ID NO: 4200450 - DNA, 25 bp, Homo sapien
cttctgtgtagcatgtgatctgagc

SEQ ID NO: 4200451 - DNA, 25 bp, Homo sapien
ggttccgaacttctctcagcatgca

SEQ ID NO: 4200452 - DNA, 25 bp, Homo sapien
tgctaagatatcacaacgctcccca

SEQ ID NO: 4200453 - DNA, 25 bp, Homo sapien
tccaggggtgacagaacaagctctg

SEQ ID NO: 4200454 - DNA, 25 bp, Homo sapien
agcatgaggcccatttctggttttc

SEQ ID NO: 4200455 - DNA, 25 bp, Homo sapien
tccccaccctggtagaagcatgagg

SEQ ID NO: 4200456 - DNA, 25 bp, Homo sapien
gatataacaacttcctcactcagtc

SEQ ID NO: 4200457 - DNA, 25 bp, Homo sapien
atataacaacttcctcactcagtct

SEQ ID NO: 4200458 - DNA, 25 bp, Homo sapien
ttatcccgaattggcgttcagcctg

SEQ ID NO: 4200459 - DNA, 25 bp, Homo sapien
caaaatagctgctccgtagacagag

SEQ ID NO: 4200460 - DNA, 25 bp, Homo sapien
tatcaagttatccagcggatgcagg

SEQ ID NO: 4200461 - DNA, 25 bp, Homo sapien
gtttattagaacaacagcatacagc

SEQ ID NO: 4200462 - DNA, 25 bp, Homo sapien
gaattagttttctgtgtgctccgca

SEQ ID NO: 4200463 - DNA, 25 bp, Homo sapien
gctttgaaacccataaggcctgggc

SEQ ID NO: 4200464 - DNA, 25 bp, Homo sapien
gaaccccacagctatttaggcagag

SEQ ID NO: 4200465 - DNA, 25 bp, Homo sapien
tgaacatgggtaggagtctcagcac

SEQ ID NO: 4200466 - DNA, 25 bp, Homo sapien
agcagttgcctactgatggatctgg

SEQ ID NO: 4200467 - DNA, 25 bp, Homo sapien
tagcgaccttttcaagtattgacag

SEQ ID NO: 4200468 - DNA, 25 bp, Homo sapien
taccttggaaggctaagaacatcta

SEQ ID NO: 4200469 - DNA, 25 bp, Homo sapien
catccagcggttcacttttagtcaa

SEQ ID NO: 4200470 - DNA, 25 bp, Homo sapien
gcagtactttatggagacttcctga

SEQ ID NO: 4200471 - DNA, 25 bp, Homo sapien
tccaccggtgcctaggagtcccaag

SEQ ID NO: 4200472 - DNA, 25 bp, Homo sapien
tgacggccaatgctgctactgtgtg

SEQ ID NO: 4200473 - DNA, 25 bp, Homo sapien
tactgtgtgaggaggactccaccgg

SEQ ID NO: 4200474 - DNA, 25 bp, Homo sapien
tgggctgtagccacaacagcgagac

SEQ ID NO: 4200475 - DNA, 25 bp, Homo sapien
ggttgtaagaatctggccagtaatg

SEQ ID NO: 4200476 - DNA, 25 bp, Homo sapien
ggtaagctcctgtcgaagcagcagg

SEQ ID NO: 4200477 - DNA, 25 bp, Homo sapien
gcagcaggagttgtcagtgctcctt

SEQ ID NO: 4200478 - DNA, 25 bp, Homo sapien
gctttgcttggatgactctctcact

SEQ ID NO: 4200479 - DNA, 25 bp, Homo sapien
ccaatatcagcaatgctttgcttgg

SEQ ID NO: 4200480 - DNA, 25 bp, Homo sapien
tatcagcaatgctttgcttggatga

SEQ ID NO: 4200481 - DNA, 25 bp, Homo sapien
atgctttgcttggatgactctctca

SEQ ID NO: 4200482 - DNA, 25 bp, Homo sapien
ttttgtagtccccgtagcaatgatg

SEQ ID NO: 4200483 - DNA, 25 bp, Homo sapien
gtagtccccgtagcaatgatggaac

SEQ ID NO: 4200484 - DNA, 25 bp, Homo sapien
ttgtagtccccgtagcaatgatgga

SEQ ID NO: 4200485 - DNA, 25 bp, Homo sapien
tgtagtccccgtagcaatgatggaa

SEQ ID NO: 4200486 - DNA, 25 bp, Homo sapien
aacagggctatctggctgcgcagat

SEQ ID NO: 4200487 - DNA, 25 bp, Homo sapien
ctggctgcgcagataatgatatcag

SEQ ID NO: 4200488 - DNA, 25 bp, Homo sapien
ggctatctggctgcgcagataatga

SEQ ID NO: 4200489 - DNA, 25 bp, Homo sapien
aaacagggctatctggctgcgcaga

SEQ ID NO: 4200490 - DNA, 25 bp, Homo sapien
ttctttgctggagaagtcattttct

SEQ ID NO: 4200491 - DNA, 25 bp, Homo sapien
caaagaccattctagtatcctttgg

SEQ ID NO: 4200492 - DNA, 25 bp, Homo sapien
acaaagaccattctagtatcctttg

SEQ ID NO: 4200493 - DNA, 25 bp, Homo sapien
ctcggttactcagatgctttggatc

SEQ ID NO: 4200494 - DNA, 25 bp, Homo sapien
tcagatgctttggatccgtattcat

SEQ ID NO: 4200495 - DNA, 25 bp, Homo sapien
tactcagatgctttggatccgtatt

SEQ ID NO: 4200496 - DNA, 25 bp, Homo sapien
gttactcagatgctttggatccgta

SEQ ID NO: 4200497 - DNA, 25 bp, Homo sapien
gtctgccaccttacaataactgaaa

SEQ ID NO: 4200498 - DNA, 25 bp, Homo sapien
agacatttcaatgtcactgtctgcc

SEQ ID NO: 4200499 - DNA, 25 bp, Homo sapien
tgccaccttacaataactgaaaaca

SEQ ID NO: 4200500 - DNA, 25 bp, Homo sapien
catacaatctctttaaagcaagcag

SEQ ID NO: 4200501 - DNA, 25 bp, Homo sapien
agatgtttctctctcggctgcatgc

SEQ ID NO: 4200502 - DNA, 25 bp, Homo sapien
tatttttcaagtcgcttcggagagc

SEQ ID NO: 4200503 - DNA, 25 bp, Homo sapien
catatgtttccatgtgagcctgttc

SEQ ID NO: 4200504 - DNA, 25 bp, Homo sapien
ctactggtggtctgcccgtgtgcaa

SEQ ID NO: 4200505 - DNA, 25 bp, Homo sapien
ggaccaataatggacctgtttatct

SEQ ID NO: 4200506 - DNA, 25 bp, Homo sapien
ctttggggacaggaccaataatgga

SEQ ID NO: 4200507 - DNA, 25 bp, Homo sapien
tggggacaggaccaataatggacct

SEQ ID NO: 4200508 - DNA, 25 bp, Homo sapien
gacaggaccaataatggacctgttt

SEQ ID NO: 4200509 - DNA, 25 bp, Homo sapien
tacttgccaccagtactctcaatgg

SEQ ID NO: 4200510 - DNA, 25 bp, Homo sapien
gcttctaaccatgtggacatttctg

SEQ ID NO: 4200511 - DNA, 25 bp, Homo sapien
tatacgggtcattatagccactgcc

SEQ ID NO: 4200512 - DNA, 25 bp, Homo sapien
cactgccatcatgaaaacatcttga

SEQ ID NO: 4200513 - DNA, 25 bp, Homo sapien
gccacgttccagcaatgcaccttat

SEQ ID NO: 4200514 - DNA, 25 bp, Homo sapien
gagcctgtccctcctgaagattcat

SEQ ID NO: 4200515 - DNA, 25 bp, Homo sapien
gaagattcatctgccacgttccagc

SEQ ID NO: 4200516 - DNA, 25 bp, Homo sapien
tgatgacttggcattcactgagcac

SEQ ID NO: 4200517 - DNA, 25 bp, Homo sapien
gctacaatagtctccttgatggcgg

SEQ ID NO: 4200518 - DNA, 25 bp, Homo sapien
gaaaggcaataattcctacttgagg

SEQ ID NO: 4200519 - DNA, 25 bp, Homo sapien
gatgtagccctttagtcgtcttcct

SEQ ID NO: 4200520 - DNA, 25 bp, Homo sapien
ggtgacataatacagctgggaactg

SEQ ID NO: 4200521 - DNA, 25 bp, Homo sapien
tttggtagcccgtgtcagtccacat

SEQ ID NO: 4200522 - DNA, 25 bp, Homo sapien
ttgtttttggtagcccgtgtcagtc

SEQ ID NO: 4200523 - DNA, 25 bp, Homo sapien
actgagcttgtttttggtagcccgt

SEQ ID NO: 4200524 - DNA, 25 bp, Homo sapien
gagcttgtttttggtagcccgtgtc

SEQ ID NO: 4200525 - DNA, 25 bp, Homo sapien
ctccaactgatgtgcaccaggctga

SEQ ID NO: 4200526 - DNA, 25 bp, Homo sapien
cattgactgtctggctcgtatcttc

SEQ ID NO: 4200527 - DNA, 25 bp, Homo sapien
aagactcccctctttagggccattg

SEQ ID NO: 4200528 - DNA, 25 bp, Homo sapien
gagtggctgcatgcttaaaagctcc

SEQ ID NO: 4200529 - DNA, 25 bp, Homo sapien
gctggtctattgcaagtgcaaccat

SEQ ID NO: 4200530 - DNA, 25 bp, Homo sapien
aattgctggtctattgcaagtgcaa

SEQ ID NO: 4200531 - DNA, 25 bp, Homo sapien
gtcctggagccaattgctggtctat

SEQ ID NO: 4200532 - DNA, 25 bp, Homo sapien
ttgctggtctattgcaagtgcaacc

SEQ ID NO: 4200533 - DNA, 25 bp, Homo sapien
catagaccaactgtttaccggagta

SEQ ID NO: 4200534 - DNA, 25 bp, Homo sapien
atcacactgttccacacagtgatgt

SEQ ID NO: 4200535 - DNA, 25 bp, Homo sapien
taaaattgatatatcagtctcagca

SEQ ID NO: 4200536 - DNA, 25 bp, Homo sapien
taccggagtataactcctcctgtgt

SEQ ID NO: 4200537 - DNA, 25 bp, Homo sapien
ctcttttatttttgggtgctgctat

SEQ ID NO: 4200538 - DNA, 25 bp, Homo sapien
tggcagttgctacaaccaactatca

SEQ ID NO: 4200539 - DNA, 25 bp, Homo sapien
tccagtagaaggaagtggcagcccc

SEQ ID NO: 4200540 - DNA, 25 bp, Homo sapien
tctggatgagaattacagtgactct

SEQ ID NO: 4200541 - DNA, 25 bp, Homo sapien
tgctaatggtcctgagttagacacc

SEQ ID NO: 4200542 - DNA, 25 bp, Homo sapien
cgctggtgcaagtctctttctgagg

SEQ ID NO: 4200543 - DNA, 25 bp, Homo sapien
gctatcgctggtgcaagtctctttc

SEQ ID NO: 4200544 - DNA, 25 bp, Homo sapien
ttcttgctaatggtcctgagttaga

SEQ ID NO: 4200545 - DNA, 25 bp, Homo sapien
tatatgagctatattctggctgaac

SEQ ID NO: 4200546 - DNA, 25 bp, Homo sapien
ctgaataactgaggatagggtggct

SEQ ID NO: 4200547 - DNA, 25 bp, Homo sapien
ggactggcaagcagcaaccaagatg

SEQ ID NO: 4200548 - DNA, 25 bp, Homo sapien
taccaggtcagtgccctctaggtgc

SEQ ID NO: 4200549 - DNA, 25 bp, Homo sapien
aacagcctggttgacgaagggtgca

SEQ ID NO: 4200550 - DNA, 25 bp, Homo sapien
ggaatactgtttggcagtatgagcc

SEQ ID NO: 4200551 - DNA, 25 bp, Homo sapien
tcaatgagcaccctgtgatgtgact

SEQ ID NO: 4200552 - DNA, 25 bp, Homo sapien
tgcagatgggcactgggtatttccc

SEQ ID NO: 4200553 - DNA, 25 bp, Homo sapien
aagggaacaactccatgctttctaa

SEQ ID NO: 4200554 - DNA, 25 bp, Homo sapien
gctttctaaaaggcctacagaacat

SEQ ID NO: 4200555 - DNA, 25 bp, Homo sapien
tgctttctaaaaggcctacagaaca

SEQ ID NO: 4200556 - DNA, 25 bp, Homo sapien
ggccaagggaacaactccatgcttt

SEQ ID NO: 4200557 - DNA, 25 bp, Homo sapien
ttttgaacagtaaccattcttattg

SEQ ID NO: 4200558 - DNA, 25 bp, Homo sapien
tttgaacagtaaccattcttattga

SEQ ID NO: 4200559 - DNA, 25 bp, Homo sapien
tgaacagtaaccattcttattgatc

SEQ ID NO: 4200560 - DNA, 25 bp, Homo sapien
gaacagtaaccattcttattgatcc

SEQ ID NO: 4200561 - DNA, 25 bp, Homo sapien
tgcgtttcagcaagctatccgggct

SEQ ID NO: 4200562 - DNA, 25 bp, Homo sapien
atgcgtttcagcaagctatccgggc

SEQ ID NO: 4200563 - DNA, 25 bp, Homo sapien
gcgtttcagcaagctatccgggctc

SEQ ID NO: 4200564 - DNA, 25 bp, Homo sapien
tcaggctccttcccattggtttcac

SEQ ID NO: 4200565 - DNA, 25 bp, Homo sapien
ctattagataatacacaagataaat

SEQ ID NO: 4200566 - DNA, 25 bp, Homo sapien
tattagataatacacaagataaatt

SEQ ID NO: 4200567 - DNA, 25 bp, Homo sapien
attagataatacacaagataaattt

SEQ ID NO: 4200568 - DNA, 25 bp, Homo sapien
ctcctgtggtctttagttctggaag

SEQ ID NO: 4200569 - DNA, 25 bp, Homo sapien
tcctgtggtctttagttctggaagg

SEQ ID NO: 4200570 - DNA, 25 bp, Homo sapien
cctgtggtctttagttctggaaggc

SEQ ID NO: 4200571 - DNA, 25 bp, Homo sapien
gacagaagcaggacacatcaggaat

SEQ ID NO: 4200572 - DNA, 25 bp, Homo sapien
cccctgtattagcagagaagactga

SEQ ID NO: 4200573 - DNA, 25 bp, Homo sapien
gaatgagatgaccttgggaccaccc

SEQ ID NO: 4200574 - DNA, 25 bp, Homo sapien
taagctttccagatcgttcccattg

SEQ ID NO: 4200575 - DNA, 25 bp, Homo sapien
aggtgtggaatgtgcaacttatgca

SEQ ID NO: 4200576 - DNA, 25 bp, Homo sapien
gaatgtgcaacttatgcagcggagt

SEQ ID NO: 4200577 - DNA, 25 bp, Homo sapien
acacattcttcacggtctagggcgg

SEQ ID NO: 4200578 - DNA, 25 bp, Homo sapien
tagggcggggagaatgtgggcctcc

SEQ ID NO: 4200579 - DNA, 25 bp, Homo sapien
ctgtattcagggctcagtagggaac

SEQ ID NO: 4200580 - DNA, 25 bp, Homo sapien
aacactctatggctataaagagggc

SEQ ID NO: 4200581 - DNA, 25 bp, Homo sapien
tcaccagagcactgtattcagggct

SEQ ID NO: 4200582 - DNA, 25 bp, Homo sapien
gggataaatcccctcagagctcacc

SEQ ID NO: 4200583 - DNA, 25 bp, Homo sapien
tcttcagatgtgtttgtgacaaaac

SEQ ID NO: 4200584 - DNA, 25 bp, Homo sapien
ctgtggaagggttcttgtcaaattt

SEQ ID NO: 4200585 - DNA, 25 bp, Homo sapien
gggcctatcgataaagcttcatgtt

SEQ ID NO: 4200586 - DNA, 25 bp, Homo sapien
tgttcaagaacatcagtatgactct

SEQ ID NO: 4200587 - DNA, 25 bp, Homo sapien
ctgtttaggagccagccattgaatg

SEQ ID NO: 4200588 - DNA, 25 bp, Homo sapien
gagccagccattgaatgtgaaattg

SEQ ID NO: 4200589 - DNA, 25 bp, Homo sapien
gtttaggagccagccattgaatgtg

SEQ ID NO: 4200590 - DNA, 25 bp, Homo sapien
taggagccagccattgaatgtgaaa

SEQ ID NO: 4200591 - DNA, 25 bp, Homo sapien
gtgaactgttgggatatctgtgtct

SEQ ID NO: 4200592 - DNA, 25 bp, Homo sapien
tgtctttgcaaggttggtcttgaca

SEQ ID NO: 4200593 - DNA, 25 bp, Homo sapien
aagtctaggtgatgcttggtggtta

SEQ ID NO: 4200594 - DNA, 25 bp, Homo sapien
tgcttggtggttagagtgaactgtt

SEQ ID NO: 4200595 - DNA, 25 bp, Homo sapien
cttagttatttcagcctggatttga

SEQ ID NO: 4200596 - DNA, 25 bp, Homo sapien
tcattgtataaatgagagggctcat

SEQ ID NO: 4200597 - DNA, 25 bp, Homo sapien
cgcagccgttgccagaacaggaagt

SEQ ID NO: 4200598 - DNA, 25 bp, Homo sapien
gcaaacagggaaaaggattgtgagt

SEQ ID NO: 4200599 - DNA, 25 bp, Homo sapien
agaagtgcagcacgggatgtacagc

SEQ ID NO: 4200600 - DNA, 25 bp, Homo sapien
tacagcaaagatgtcgcagccgttg

SEQ ID NO: 4200601 - DNA, 25 bp, Homo sapien
tacctcaggattgctgggcaaatgg

SEQ ID NO: 4200602 - DNA, 25 bp, Homo sapien
cagttacctcaggattgctgggcaa

SEQ ID NO: 4200603 - DNA, 25 bp, Homo sapien
aatgcagttacctcaggattgctgg

SEQ ID NO: 4200604 - DNA, 25 bp, Homo sapien
tcaaaatgcagttacctcaggattg

SEQ ID NO: 4200605 - DNA, 25 bp, Homo sapien
ttcctctgatcatgagatatattca

SEQ ID NO: 4200606 - DNA, 25 bp, Homo sapien
gggtgtatcctatgacatcatcctc

SEQ ID NO: 4200607 - DNA, 25 bp, Homo sapien
gtttgttgcccttcttgttctaatg

SEQ ID NO: 4200608 - DNA, 25 bp, Homo sapien
tcctcctgaatcattggttcctctg

SEQ ID NO: 4200609 - DNA, 25 bp, Homo sapien
tcttccctgacattgtcccacttcc

SEQ ID NO: 4200610 - DNA, 25 bp, Homo sapien
gatttgcatcatgactagatttttc

SEQ ID NO: 4200611 - DNA, 25 bp, Homo sapien
ctctcctggagtccaattaaggatt

SEQ ID NO: 4200612 - DNA, 25 bp, Homo sapien
gcatcatgactagatttttcacttt

SEQ ID NO: 4200613 - DNA, 25 bp, Homo sapien
ggagtccaattaaggatttgcatca

SEQ ID NO: 4200614 - DNA, 25 bp, Homo sapien
tcaaattccgttctcttttcttgca

SEQ ID NO: 4200615 - DNA, 25 bp, Homo sapien
caaattccgttctcttttcttgcat

SEQ ID NO: 4200616 - DNA, 25 bp, Homo sapien
ttcaaattccgttctcttttcttgc

SEQ ID NO: 4200617 - DNA, 25 bp, Homo sapien
cttttgtaagatctctggctttctt

SEQ ID NO: 4200618 - DNA, 25 bp, Homo sapien
tttcttttgtaagatctctggcttt

SEQ ID NO: 4200619 - DNA, 25 bp, Homo sapien
tttttgcctctatctttcttttgta

SEQ ID NO: 4200620 - DNA, 25 bp, Homo sapien
ctttttgcctctatctttcttttgt

SEQ ID NO: 4200621 - DNA, 25 bp, Homo sapien
tgtttttctgtaaccactcaagttc

SEQ ID NO: 4200622 - DNA, 25 bp, Homo sapien
ttttctgtaaccactcaagttccat

SEQ ID NO: 4200623 - DNA, 25 bp, Homo sapien
ctgaataattagaatgtttttctgt

SEQ ID NO: 4200624 - DNA, 25 bp, Homo sapien
gaatgtttttctgtaaccactcaag

SEQ ID NO: 4200625 - DNA, 25 bp, Homo sapien
cccggagagcgcagaagttgaactt

SEQ ID NO: 4200626 - DNA, 25 bp, Homo sapien
tctgggtcattttccggtggcctaa

SEQ ID NO: 4200627 - DNA, 25 bp, Homo sapien
acgagtttcatctattggcttaggg

SEQ ID NO: 4200628 - DNA, 25 bp, Homo sapien
taagctgtcgcagtcttcctccaaa

SEQ ID NO: 4200629 - DNA, 25 bp, Homo sapien
aggtcaaatggcctcagtgcgagat

SEQ ID NO: 4200630 - DNA, 25 bp, Homo sapien
cctcagtgcgagatgatcttcccga

SEQ ID NO: 4200631 - DNA, 25 bp, Homo sapien
tgatcttcccgaacggatttaagac

SEQ ID NO: 4200632 - DNA, 25 bp, Homo sapien
gatgatcttcccgaacggatttaag

SEQ ID NO: 4200633 - DNA, 25 bp, Homo sapien
tggaagcgggactgcccagcttgct

SEQ ID NO: 4200634 - DNA, 25 bp, Homo sapien
tctgggttggaagcgggactgccca

SEQ ID NO: 4200635 - DNA, 25 bp, Homo sapien
ctgagctccccttttagttggaagg

SEQ ID NO: 4200636 - DNA, 25 bp, Homo sapien
ggttggaagcgggactgcccagctt

SEQ ID NO: 4200637 - DNA, 25 bp, Homo sapien
cggtcatttattgtccagccaggac

SEQ ID NO: 4200638 - DNA, 25 bp, Homo sapien
gaaaagataatcagcgaggcggacg

SEQ ID NO: 4200639 - DNA, 25 bp, Homo sapien
gacactaagtaaacagcgacgcggt

SEQ ID NO: 4200640 - DNA, 25 bp, Homo sapien
tgtttgcaaacacgtgctggctagc

SEQ ID NO: 4200641 - DNA, 25 bp, Homo sapien
cacctccaatctcttcatctccaca

SEQ ID NO: 4200642 - DNA, 25 bp, Homo sapien
tgccacctccaatctcttcatctcc

SEQ ID NO: 4200643 - DNA, 25 bp, Homo sapien
tcttcatctccacagcctacactct

SEQ ID NO: 4200644 - DNA, 25 bp, Homo sapien
ttgccacctccaatctcttcatctc

SEQ ID NO: 4200645 - DNA, 25 bp, Homo sapien
tcatcctccacttccacagaatccc

SEQ ID NO: 4200646 - DNA, 25 bp, Homo sapien
acttccacagaatcccacaaatccc

SEQ ID NO: 4200647 - DNA, 25 bp, Homo sapien
ccacagaatcccacaaatccctcac

SEQ ID NO: 4200648 - DNA, 25 bp, Homo sapien
tccacttccacagaatcccacaaat

SEQ ID NO: 4200649 - DNA, 25 bp, Homo sapien
ccagaaattgggcggagctgatcca

SEQ ID NO: 4200650 - DNA, 25 bp, Homo sapien
gatgttggcaaacacgtctttacca

SEQ ID NO: 4200651 - DNA, 25 bp, Homo sapien
caaacacgtctttaccagttgtatt

SEQ ID NO: 4200652 - DNA, 25 bp, Homo sapien
attgggcggagctgatccagatgtt

SEQ ID NO: 4200653 - DNA, 25 bp, Homo sapien
tttggagagccgctttcgggtcgca

SEQ ID NO: 4200654 - DNA, 25 bp, Homo sapien
tctcctagagccctgtcatcataga

SEQ ID NO: 4200655 - DNA, 25 bp, Homo sapien
tagagccctgtcatcatagacccag

SEQ ID NO: 4200656 - DNA, 25 bp, Homo sapien
tcgcagaggcaacaagtcgtggact

SEQ ID NO: 4200657 - DNA, 25 bp, Homo sapien
aagggctctcggtgtccaaacctgg

SEQ ID NO: 4200658 - DNA, 25 bp, Homo sapien
gggctctcggtgtccaaacctggac

SEQ ID NO: 4200659 - DNA, 25 bp, Homo sapien
cttttcaatcttcagagctaataag

SEQ ID NO: 4200660 - DNA, 25 bp, Homo sapien
acttttcaatcttcagagctaataa

SEQ ID NO: 4200661 - DNA, 25 bp, Homo sapien
gaattccgtcatctacaaggtcagg

SEQ ID NO: 4200662 - DNA, 25 bp, Homo sapien
aatattccgataacactttcctggg

SEQ ID NO: 4200663 - DNA, 25 bp, Homo sapien
aaggtcaggagccttagcagcaagg

SEQ ID NO: 4200664 - DNA, 25 bp, Homo sapien
tgcagcctaagcaagcagctcttgc

SEQ ID NO: 4200665 - DNA, 25 bp, Homo sapien
tgttgaatgtttgaacggcagagga

SEQ ID NO: 4200666 - DNA, 25 bp, Homo sapien
gatggcccacctttcgcagctgaat

SEQ ID NO: 4200667 - DNA, 25 bp, Homo sapien
tggtccaactttagcgatggcccac

SEQ ID NO: 4200668 - DNA, 25 bp, Homo sapien
gctctatgggcacggacatgcttca

SEQ ID NO: 4200669 - DNA, 25 bp, Homo sapien
acttgcctgatccttgacgggagag

SEQ ID NO: 4200670 - DNA, 25 bp, Homo sapien
cagcaataccgacttgcctgatcct

SEQ ID NO: 4200671 - DNA, 25 bp, Homo sapien
tgtctgtccgccagcaataccgact

SEQ ID NO: 4200672 - DNA, 25 bp, Homo sapien
cttgcctgatccttgacgggagagg

SEQ ID NO: 4200673 - DNA, 25 bp, Homo sapien
cacagttggccgcagagatcttcct

SEQ ID NO: 4200674 - DNA, 25 bp, Homo sapien
gaagtgattgctcagacctcaaggc

SEQ ID NO: 4200675 - DNA, 25 bp, Homo sapien
aaggctccattcagatacctgcgcg

SEQ ID NO: 4200676 - DNA, 25 bp, Homo sapien
cctgggccccgattgagatatctgg

SEQ ID NO: 4200677 - DNA, 25 bp, Homo sapien
tggtccccctactctgtgtgtgctg

SEQ ID NO: 4200678 - DNA, 25 bp, Homo sapien
gtttttccaagctgtaacccatgct

SEQ ID NO: 4200679 - DNA, 25 bp, Homo sapien
gctggtccccctactctgtgtgtgc

SEQ ID NO: 4200680 - DNA, 25 bp, Homo sapien
caagctgtaacccatgctgttatta

SEQ ID NO: 4200681 - DNA, 25 bp, Homo sapien
gagacattcctgcttgtcgtcctaa

SEQ ID NO: 4200682 - DNA, 25 bp, Homo sapien
tgaagtgggagttattatctgagac

SEQ ID NO: 4200683 - DNA, 25 bp, Homo sapien
gcttgtcgtcctaacaacgctgatg

SEQ ID NO: 4200684 - DNA, 25 bp, Homo sapien
cgctgatgaaacgtaaaaggttctt

SEQ ID NO: 4200685 - DNA, 25 bp, Homo sapien
gattttaaagcagcctccgaagctt

SEQ ID NO: 4200686 - DNA, 25 bp, Homo sapien
taagatacatttgcgctgacctttg

SEQ ID NO: 4200687 - DNA, 25 bp, Homo sapien
gggttcactctgcaccctgatgtgg

SEQ ID NO: 4200688 - DNA, 25 bp, Homo sapien
aaatcgcctttctgactcttgagta

SEQ ID NO: 4200689 - DNA, 25 bp, Homo sapien
ctaatcaagctcgggttgttcaaag

SEQ ID NO: 4200690 - DNA, 25 bp, Homo sapien
atcaagctcgggttgttcaaagagt

SEQ ID NO: 4200691 - DNA, 25 bp, Homo sapien
aaagtgtgagtttgacggtgcatca

SEQ ID NO: 4200692 - DNA, 25 bp, Homo sapien
gtgtgagtttgacggtgcatcagca

SEQ ID NO: 4200693 - DNA, 25 bp, Homo sapien
tcaggagccgctgattgcgcagaag

SEQ ID NO: 4200694 - DNA, 25 bp, Homo sapien
gccatttgtttaaagcgcccagaaa

SEQ ID NO: 4200695 - DNA, 25 bp, Homo sapien
taaaatggtgccagtgtcccgcgaa

SEQ ID NO: 4200696 - DNA, 25 bp, Homo sapien
tcagctagacgctaggtagccggtc

SEQ ID NO: 4200697 - DNA, 25 bp, Homo sapien
cgactgtccgcaccgaaaggattca

SEQ ID NO: 4200698 - DNA, 25 bp, Homo sapien
ccacaagtgcgagaaaatggcgctg

SEQ ID NO: 4200699 - DNA, 25 bp, Homo sapien
actttgtggcggtcacagcgatccc

SEQ ID NO: 4200700 - DNA, 25 bp, Homo sapien
agcgatcccggaacaatggtgcctc

SEQ ID NO: 4200701 - DNA, 25 bp, Homo sapien
agaagcaagttcagtgcgccacggc

SEQ ID NO: 4200702 - DNA, 25 bp, Homo sapien
gacacccggaaggtagactcgcagt

SEQ ID NO: 4200703 - DNA, 25 bp, Homo sapien
catttcctcgagtagcagaagcggc

SEQ ID NO: 4200704 - DNA, 25 bp, Homo sapien
ttagcacagtcgacctacagcagag

SEQ ID NO: 4200705 - DNA, 25 bp, Homo sapien
gcattcgtctgggtaggtgagcaaa

SEQ ID NO: 4200706 - DNA, 25 bp, Homo sapien
gctctggcagatggtagggccacca

SEQ ID NO: 4200707 - DNA, 25 bp, Homo sapien
caatgttatatctccaggcatgggt

SEQ ID NO: 4200708 - DNA, 25 bp, Homo sapien
tcaaaccagtgatttaaggagctct

SEQ ID NO: 4200709 - DNA, 25 bp, Homo sapien
ggtagtgacgaggttcccacaatgt

SEQ ID NO: 4200710 - DNA, 25 bp, Homo sapien
gaggtttgacatgtattggcttcca

SEQ ID NO: 4200711 - DNA, 25 bp, Homo sapien
cagccttctgcaatgtggtagtgac

SEQ ID NO: 4200712 - DNA, 25 bp, Homo sapien
atcatctttaccagggataccagcc

SEQ ID NO: 4200713 - DNA, 25 bp, Homo sapien
gcaatatgggctgttcccggcaaaa

SEQ ID NO: 4200714 - DNA, 25 bp, Homo sapien
gaaagaccgaaagatcttcagatca

SEQ ID NO: 4200715 - DNA, 25 bp, Homo sapien
ggatgttgccacacagacgtgtaaa

SEQ ID NO: 4200716 - DNA, 25 bp, Homo sapien
tggtgatgaggaaacgattacggct

SEQ ID NO: 4200717 - DNA, 25 bp, Homo sapien
gaccaggcttttgatcgccagagaa

SEQ ID NO: 4200718 - DNA, 25 bp, Homo sapien
ttcaaaaaatgcacgcggatgcggg

SEQ ID NO: 4200719 - DNA, 25 bp, Homo sapien
gatgcggccctcgattaacctgtct

SEQ ID NO: 4200720 - DNA, 25 bp, Homo sapien
tcatcctttcataggcggcccggtt

SEQ ID NO: 4200721 - DNA, 25 bp, Homo sapien
tacttgggcccctttcattcaggta

SEQ ID NO: 4200722 - DNA, 25 bp, Homo sapien
tgtaaatttcccaacgcgctattgt

SEQ ID NO: 4200723 - DNA, 25 bp, Homo sapien
gggctgcccaaagctccctagagat

SEQ ID NO: 4200724 - DNA, 25 bp, Homo sapien
ccccaatagataggaccaatgtaaa

SEQ ID NO: 4200725 - DNA, 25 bp, Homo sapien
cacgggcactatgctctctttacaa

SEQ ID NO: 4200726 - DNA, 25 bp, Homo sapien
acttccagaatgtcccgattcagca

SEQ ID NO: 4200727 - DNA, 25 bp, Homo sapien
agacttcagacgtctccgggtgcag

SEQ ID NO: 4200728 - DNA, 25 bp, Homo sapien
gaaaccaacttttcgctgagcgatt

SEQ ID NO: 4200729 - DNA, 25 bp, Homo sapien
catagaggaatgtgagcgccagtgc

SEQ ID NO: 4200730 - DNA, 25 bp, Homo sapien
aaacgcaaagtagccggacggctgc

SEQ ID NO: 4200731 - DNA, 25 bp, Homo sapien
cgcgaagtcctagcctgcaggcaat

SEQ ID NO: 4200732 - DNA, 25 bp, Homo sapien
tgagcgcgagactgatagcagcaat

SEQ ID NO: 4200733 - DNA, 25 bp, Homo sapien
catgttcacgttcatgggcccgtag

SEQ ID NO: 4200734 - DNA, 25 bp, Homo sapien
gttgagcttgaaggcgcccatgccg

SEQ ID NO: 4200735 - DNA, 25 bp, Homo sapien
gatctttaaattctcggagcgcgcg

SEQ ID NO: 4200736 - DNA, 25 bp, Homo sapien
gatgtgattactctgctccgggcca

SEQ ID NO: 4200737 - DNA, 25 bp, Homo sapien
cgctgactttcggtttgggtcccag

SEQ ID NO: 4200738 - DNA, 25 bp, Homo sapien
ctgcgtttgtgcgacctggccgctg

SEQ ID NO: 4200739 - DNA, 25 bp, Homo sapien
taggggtcctacagctgtttccgta

SEQ ID NO: 4200740 - DNA, 25 bp, Homo sapien
tcccaggcccaagtgggaatgggta

SEQ ID NO: 4200741 - DNA, 25 bp, Homo sapien
ggtgccaaagtagaatgagaggggt

SEQ ID NO: 4200742 - DNA, 25 bp, Homo sapien
ctggtgccaaagtagaatgagaggg

SEQ ID NO: 4200743 - DNA, 25 bp, Homo sapien
tggtgccaaagtagaatgagagggg

SEQ ID NO: 4200744 - DNA, 25 bp, Homo sapien
agatagggcttgtcgctcgtgtgca

SEQ ID NO: 4200745 - DNA, 25 bp, Homo sapien
agccctcaaactcgcacttgaaggg

SEQ ID NO: 4200746 - DNA, 25 bp, Homo sapien
atgtgtttgcgcagcgaactgggat

SEQ ID NO: 4200747 - DNA, 25 bp, Homo sapien
atcttgcaaagatagggcttgtcgc

SEQ ID NO: 4200748 - DNA, 25 bp, Homo sapien
ggggcgacgagagtgcggcgattac

SEQ ID NO: 4200749 - DNA, 25 bp, Homo sapien
agctcctgcctcaaagggggcgacg

SEQ ID NO: 4200750 - DNA, 25 bp, Homo sapien
agagctcctgcctcaaagggggcga

SEQ ID NO: 4200751 - DNA, 25 bp, Homo sapien
tcctgcctcaaagggggcgacgaga

SEQ ID NO: 4200752 - DNA, 25 bp, Homo sapien
ctgaacacaggtgaggcccgatcag

SEQ ID NO: 4200753 - DNA, 25 bp, Homo sapien
ggaaagtcagggtccccaagactca

SEQ ID NO: 4200754 - DNA, 25 bp, Homo sapien
gaaaccgtgctcctgggaaagtcag

SEQ ID NO: 4200755 - DNA, 25 bp, Homo sapien
ggcgaaggccgcgagtgcccttcct

SEQ ID NO: 4200756 - DNA, 25 bp, Homo sapien
tacggacataaagagccagtgcggc

SEQ ID NO: 4200757 - DNA, 25 bp, Homo sapien
gcgtttttacggacataaagagcca

SEQ ID NO: 4200758 - DNA, 25 bp, Homo sapien
tgcaggaataaagtcgcgtttttac

SEQ ID NO: 4200759 - DNA, 25 bp, Homo sapien
acataaagagccagtgcggcggccg

SEQ ID NO: 4200760 - DNA, 25 bp, Homo sapien
aaattggaagagagcgcactgtggc

SEQ ID NO: 4200761 - DNA, 25 bp, Homo sapien
cgtggaggattcgtagccagagctg

SEQ ID NO: 4200762 - DNA, 25 bp, Homo sapien
tgtggagggagacacgatggtggga

SEQ ID NO: 4200763 - DNA, 25 bp, Homo sapien
taaggagcttgtggtcgggttgtct

SEQ ID NO: 4200764 - DNA, 25 bp, Homo sapien
tatacgtgtgtgatcagtctcttaa

SEQ ID NO: 4200765 - DNA, 25 bp, Homo sapien
gttttgattcgcagggttctttcag

SEQ ID NO: 4200766 - DNA, 25 bp, Homo sapien
gagagcccgtaccaattcgacaaga

SEQ ID NO: 4200767 - DNA, 25 bp, Homo sapien
tctcttactcgtcctgggtctattg

SEQ ID NO: 4200768 - DNA, 25 bp, Homo sapien
gtggagactgtaatcgtacaaagta

SEQ ID NO: 4200769 - DNA, 25 bp, Homo sapien
tactagaacattcttgccattcagt

SEQ ID NO: 4200770 - DNA, 25 bp, Homo sapien
gtaatcgtacaaagtaattcacatt

SEQ ID NO: 4200771 - DNA, 25 bp, Homo sapien
cattttggtacacatttactagaac

SEQ ID NO: 4200772 - DNA, 25 bp, Homo sapien
gctgtaacatggataaaccggccct

SEQ ID NO: 4200773 - DNA, 25 bp, Homo sapien
gactttgggacgaaatgtttgcact

SEQ ID NO: 4200774 - DNA, 25 bp, Homo sapien
ggaacagtttgacacgcagatccag

SEQ ID NO: 4200775 - DNA, 25 bp, Homo sapien
tatacgaattcttgacaggacatga

SEQ ID NO: 4200776 - DNA, 25 bp, Homo sapien
ctctctcggagagccagcagggtag

SEQ ID NO: 4200777 - DNA, 25 bp, Homo sapien
ctaattacactctctcggagagcca

SEQ ID NO: 4200778 - DNA, 25 bp, Homo sapien
taattacactctctcggagagccag

SEQ ID NO: 4200779 - DNA, 25 bp, Homo sapien
acactctctcggagagccagcaggg

SEQ ID NO: 4200780 - DNA, 25 bp, Homo sapien
ggcttcctgaacacatagagtgcat

SEQ ID NO: 4200781 - DNA, 25 bp, Homo sapien
tgtgatctccggctacgttgtctgc

SEQ ID NO: 4200782 - DNA, 25 bp, Homo sapien
taaagaatcaggtccatggccaccc

SEQ ID NO: 4200783 - DNA, 25 bp, Homo sapien
gaaaagcatgcatcgacatcctgaa

SEQ ID NO: 4200784 - DNA, 25 bp, Homo sapien
tcatatcaggttatcagacaagctg

SEQ ID NO: 4200785 - DNA, 25 bp, Homo sapien
taaatctcactaaaccttgcaaggt

SEQ ID NO: 4200786 - DNA, 25 bp, Homo sapien
tctggacctaatgtctggagtcact

SEQ ID NO: 4200787 - DNA, 25 bp, Homo sapien
aaggtggcgctcttttcatgaaaaa

SEQ ID NO: 4200788 - DNA, 25 bp, Homo sapien
cggccagagcctgccgcgacgattt

SEQ ID NO: 4200789 - DNA, 25 bp, Homo sapien
tattcatcagcacgtggaacctcgg

SEQ ID NO: 4200790 - DNA, 25 bp, Homo sapien
tgcatattcatcagcacgtggaacc

SEQ ID NO: 4200791 - DNA, 25 bp, Homo sapien
acgatttggaaagcgccccgccagg

SEQ ID NO: 4200792 - DNA, 25 bp, Homo sapien
caggtctgggatctagatttcgggc

SEQ ID NO: 4200793 - DNA, 25 bp, Homo sapien
gattcagtcataccggagacgggca

SEQ ID NO: 4200794 - DNA, 25 bp, Homo sapien
cccaggagagggtaacagcgttgcc

SEQ ID NO: 4200795 - DNA, 25 bp, Homo sapien
ttttctgttcagagcaaggcccaca

SEQ ID NO: 4200796 - DNA, 25 bp, Homo sapien
tggaaagtgcggagctcatacctac

SEQ ID NO: 4200797 - DNA, 25 bp, Homo sapien
tgtagcaatgccgttcccacaagaa

SEQ ID NO: 4200798 - DNA, 25 bp, Homo sapien
tgcattggaactcgaaccaagagcg

SEQ ID NO: 4200799 - DNA, 25 bp, Homo sapien
aaaggctgtgttcctgatgccgaat

SEQ ID NO: 4200800 - DNA, 25 bp, Homo sapien
ctgtggaattccgttatgaatgaca

SEQ ID NO: 4200801 - DNA, 25 bp, Homo sapien
tatcacctgtggaattccgttatga

SEQ ID NO: 4200802 - DNA, 25 bp, Homo sapien
tttagtatcacctgtggaattccgt

SEQ ID NO: 4200803 - DNA, 25 bp, Homo sapien
ggaattccgttatgaatgacatttt

SEQ ID NO: 4200804 - DNA, 25 bp, Homo sapien
gatgatagatggttgtaactcggca

SEQ ID NO: 4200805 - DNA, 25 bp, Homo sapien
tagatgatagatggttgtaactcgg

SEQ ID NO: 4200806 - DNA, 25 bp, Homo sapien
gatggttgtaactcggcagtgccag

SEQ ID NO: 4200807 - DNA, 25 bp, Homo sapien
gatagatggttgtaactcggcagtg

SEQ ID NO: 4200808 - DNA, 25 bp, Homo sapien
atttcggtgactttcattcaaactc

SEQ ID NO: 4200809 - DNA, 25 bp, Homo sapien
cattcaaactcactactgctgaatt

SEQ ID NO: 4200810 - DNA, 25 bp, Homo sapien
gaattgcaaaatgttgtctttgtcc

SEQ ID NO: 4200811 - DNA, 25 bp, Homo sapien
aaactcactactgctgaattgcaaa

SEQ ID NO: 4200812 - DNA, 25 bp, Homo sapien
tcattgagggcccatttgatcagca

SEQ ID NO: 4200813 - DNA, 25 bp, Homo sapien
gatcagcagtaatggtcaattggac

SEQ ID NO: 4200814 - DNA, 25 bp, Homo sapien
gagggcccatttgatcagcagtaat

SEQ ID NO: 4200815 - DNA, 25 bp, Homo sapien
gtcaattggaccaactgcacccctg

SEQ ID NO: 4200816 - DNA, 25 bp, Homo sapien
gaacatccaagtcatgtgtacacat

SEQ ID NO: 4200817 - DNA, 25 bp, Homo sapien
gctcaaactcgagacagcacagctg

SEQ ID NO: 4200818 - DNA, 25 bp, Homo sapien
tggaaaccttaagctgaacatccaa

SEQ ID NO: 4200819 - DNA, 25 bp, Homo sapien
gagcgttgacttccctgtcagcaca

SEQ ID NO: 4200820 - DNA, 25 bp, Homo sapien
gaatgtatgctccacatctaagaat

SEQ ID NO: 4200821 - DNA, 25 bp, Homo sapien
tcagagttaggtagctccaggacca

SEQ ID NO: 4200822 - DNA, 25 bp, Homo sapien
tccacatctaagaatctcatagtga

SEQ ID NO: 4200823 - DNA, 25 bp, Homo sapien
ccttggtgttgacttctgtgtgctc

SEQ ID NO: 4200824 - DNA, 25 bp, Homo sapien
tccaacatctccacacttgactgga

SEQ ID NO: 4200825 - DNA, 25 bp, Homo sapien
aacatctccacacttgactggatca

SEQ ID NO: 4200826 - DNA, 25 bp, Homo sapien
ccaacatctccacacttgactggat

SEQ ID NO: 4200827 - DNA, 25 bp, Homo sapien
caacatctccacacttgactggatc

SEQ ID NO: 4200828 - DNA, 25 bp, Homo sapien
gatgccttgagattgtgccatatca

SEQ ID NO: 4200829 - DNA, 25 bp, Homo sapien
aagtcacatcctagagcttcccagg

SEQ ID NO: 4200830 - DNA, 25 bp, Homo sapien
tgccatatcaaacctagctcctgag

SEQ ID NO: 4200831 - DNA, 25 bp, Homo sapien
gctcctgagagtctttccagcttaa

SEQ ID NO: 4200832 - DNA, 25 bp, Homo sapien
ggacagctgagacgcattcgctaat

SEQ ID NO: 4200833 - DNA, 25 bp, Homo sapien
gatgctattgcgtcctttcagggct

SEQ ID NO: 4200834 - DNA, 25 bp, Homo sapien
ggaaactcttcagacttgctgacag

SEQ ID NO: 4200835 - DNA, 25 bp, Homo sapien
aatgtatcaagaattgccccacctg

SEQ ID NO: 4200836 - DNA, 25 bp, Homo sapien
gaattaacatctgctactctatttt

SEQ ID NO: 4200837 - DNA, 25 bp, Homo sapien
taacatctgctactctatttttgcc

SEQ ID NO: 4200838 - DNA, 25 bp, Homo sapien
ttttagattctgaattaacatctgc

SEQ ID NO: 4200839 - DNA, 25 bp, Homo sapien
gattctgaattaacatctgctactc

SEQ ID NO: 4200840 - DNA, 25 bp, Homo sapien
tcaataatccaccactaattgtcca

SEQ ID NO: 4200841 - DNA, 25 bp, Homo sapien
caccactaattgtccaccaaatgaa

SEQ ID NO: 4200842 - DNA, 25 bp, Homo sapien
taatccaccactaattgtccaccaa

SEQ ID NO: 4200843 - DNA, 25 bp, Homo sapien
ctaattgtccaccaaatgaattgta

SEQ ID NO: 4200844 - DNA, 25 bp, Homo sapien
tctccaggcttccaaaaatattgct

SEQ ID NO: 4200845 - DNA, 25 bp, Homo sapien
acaatttctgttattaggctccttc

SEQ ID NO: 4200846 - DNA, 25 bp, Homo sapien
gaaacaacaaggcttcttctccagg

SEQ ID NO: 4200847 - DNA, 25 bp, Homo sapien
caaaactagagcctcctcatggggc

SEQ ID NO: 4200848 - DNA, 25 bp, Homo sapien
aatcctagaagtccagtttgaagag

SEQ ID NO: 4200849 - DNA, 25 bp, Homo sapien
ttcacatctaatgttgattgtgaaa

SEQ ID NO: 4200850 - DNA, 25 bp, Homo sapien
ccacagtctctaaattttggaatcc

SEQ ID NO: 4200851 - DNA, 25 bp, Homo sapien
tttggaatcctagaagtccagtttg

SEQ ID NO: 4200852 - DNA, 25 bp, Homo sapien
ccaaaccactagccctgatcagtaa

SEQ ID NO: 4200853 - DNA, 25 bp, Homo sapien
cactagccctgatcagtaacaagat

SEQ ID NO: 4200854 - DNA, 25 bp, Homo sapien
accactagccctgatcagtaacaag

SEQ ID NO: 4200855 - DNA, 25 bp, Homo sapien
ctagccctgatcagtaacaagatca

SEQ ID NO: 4200856 - DNA, 25 bp, Homo sapien
agtgaggttcctcgaaatcccacct

SEQ ID NO: 4200857 - DNA, 25 bp, Homo sapien
ccagtgaggttcctcgaaatcccac

SEQ ID NO: 4200858 - DNA, 25 bp, Homo sapien
tcttccgggaccataattctataaa

SEQ ID NO: 4200859 - DNA, 25 bp, Homo sapien
gccagtctcttccgggaccataatt

SEQ ID NO: 4200860 - DNA, 25 bp, Homo sapien
agtacagattcggagataaacacgc

SEQ ID NO: 4200861 - DNA, 25 bp, Homo sapien
cggagataaacacgctgtaagtgaa

SEQ ID NO: 4200862 - DNA, 25 bp, Homo sapien
gattcggagataaacacgctgtaag

SEQ ID NO: 4200863 - DNA, 25 bp, Homo sapien
tacagattcggagataaacacgctg

SEQ ID NO: 4200864 - DNA, 25 bp, Homo sapien
gggccaatccataactgagtaacag

SEQ ID NO: 4200865 - DNA, 25 bp, Homo sapien
taaatacgtattctatgcatagcca

SEQ ID NO: 4200866 - DNA, 25 bp, Homo sapien
tcaaaataagtatggcagaaagcac

SEQ ID NO: 4200867 - DNA, 25 bp, Homo sapien
catgcacgttcaagaagttttccac

SEQ ID NO: 4200868 - DNA, 25 bp, Homo sapien
atatatactgaatagacttaataag

SEQ ID NO: 4200869 - DNA, 25 bp, Homo sapien
tactgaatagacttaataagaaaat

SEQ ID NO: 4200870 - DNA, 25 bp, Homo sapien
cttaataagaaaattgtctctttag

SEQ ID NO: 4200871 - DNA, 25 bp, Homo sapien
atagacttaataagaaaattgtctc

SEQ ID NO: 4200872 - DNA, 25 bp, Homo sapien
taggagtgtcactactttcaagcga

SEQ ID NO: 4200873 - DNA, 25 bp, Homo sapien
gctatccaaatgtagagggcgctat

SEQ ID NO: 4200874 - DNA, 25 bp, Homo sapien
taaactcatgtgagagattgccatg

SEQ ID NO: 4200875 - DNA, 25 bp, Homo sapien
ccttgtgcataggagatgcgtgctg

SEQ ID NO: 4200876 - DNA, 25 bp, Homo sapien
tagcaagcacaatgcctgatttctc

SEQ ID NO: 4200877 - DNA, 25 bp, Homo sapien
tgaactcttggaactgcctttgatg

SEQ ID NO: 4200878 - DNA, 25 bp, Homo sapien
tagtaaagtcgggtagcaagcacaa

SEQ ID NO: 4200879 - DNA, 25 bp, Homo sapien
gcctttgatgtacctgaaccagaac

SEQ ID NO: 4200880 - DNA, 25 bp, Homo sapien
tccaactttctgcttgcaaaaactt

SEQ ID NO: 4200881 - DNA, 25 bp, Homo sapien
ttttctccaagatattgtaacatct

SEQ ID NO: 4200882 - DNA, 25 bp, Homo sapien
cctccaactttctgcttgcaaaaac

SEQ ID NO: 4200883 - DNA, 25 bp, Homo sapien
ttctccaagatattgtaacatctga

SEQ ID NO: 4200884 - DNA, 25 bp, Homo sapien
taatccataatcttgatttggggac

SEQ ID NO: 4200885 - DNA, 25 bp, Homo sapien
atgagtaatccataatcttgatttg

SEQ ID NO: 4200886 - DNA, 25 bp, Homo sapien
atccataatcttgatttggggacat

SEQ ID NO: 4200887 - DNA, 25 bp, Homo sapien
gagtaatccataatcttgatttggg

SEQ ID NO: 4200888 - DNA, 25 bp, Homo sapien
tccaggaccgctcaggcaatgtgca

SEQ ID NO: 4200889 - DNA, 25 bp, Homo sapien
ctccaggaccgctcaggcaatgtgc

SEQ ID NO: 4200890 - DNA, 25 bp, Homo sapien
tgtcaactgaagaccctggactcag

SEQ ID NO: 4200891 - DNA, 25 bp, Homo sapien
tgacagctctttcctaagctgccca

SEQ ID NO: 4200892 - DNA, 25 bp, Homo sapien
gctgcccaagatcagctctgtcaac

SEQ ID NO: 4200893 - DNA, 25 bp, Homo sapien
acagctctttcctaagctgcccaag

SEQ ID NO: 4200894 - DNA, 25 bp, Homo sapien
attgaattcttggttttgctgcatt

SEQ ID NO: 4200895 - DNA, 25 bp, Homo sapien
gggaatctcatgttcacttttggtt

SEQ ID NO: 4200896 - DNA, 25 bp, Homo sapien
tctaagttgccatttccattgaatt

SEQ ID NO: 4200897 - DNA, 25 bp, Homo sapien
agaaatccaatggcttccccagtgt

SEQ ID NO: 4200898 - DNA, 25 bp, Homo sapien
ttctgattgtaatagggctgcttac

SEQ ID NO: 4200899 - DNA, 25 bp, Homo sapien
tctgcctctgcacacaagacagaga

SEQ ID NO: 4200900 - DNA, 25 bp, Homo sapien
gacagagatccgtttccttcacttt

SEQ ID NO: 4200901 - DNA, 25 bp, Homo sapien
cagtcctgattgcagcctgtcattc

SEQ ID NO: 4200902 - DNA, 25 bp, Homo sapien
gacatacttggccaatgatgcaaaa

SEQ ID NO: 4200903 - DNA, 25 bp, Homo sapien
ggccaatgatgcaaaatatgacctc

SEQ ID NO: 4200904 - DNA, 25 bp, Homo sapien
cttggccaatgatgcaaaatatgac

SEQ ID NO: 4200905 - DNA, 25 bp, Homo sapien
tacttggccaatgatgcaaaatatg

SEQ ID NO: 4200906 - DNA, 25 bp, Homo sapien
agtaatatagcagatcaggtcttcc

SEQ ID NO: 4200907 - DNA, 25 bp, Homo sapien
tggtgtattagagacagccatctgc

SEQ ID NO: 4200908 - DNA, 25 bp, Homo sapien
aagcttaattcttgcacggacccca

SEQ ID NO: 4200909 - DNA, 25 bp, Homo sapien
tcctggcaatggtctgaaaaagcat

SEQ ID NO: 4200910 - DNA, 25 bp, Homo sapien
gtcttcccaggatcctcattatacg

SEQ ID NO: 4200911 - DNA, 25 bp, Homo sapien
tcccaggatcctcattatacgcttt

SEQ ID NO: 4200912 - DNA, 25 bp, Homo sapien
gatcctcattatacgcttttctcct

SEQ ID NO: 4200913 - DNA, 25 bp, Homo sapien
ccaggatcctcattatacgcttttc

SEQ ID NO: 4200914 - DNA, 25 bp, Homo sapien
agcacaaggcagtttgctacctctg

SEQ ID NO: 4200915 - DNA, 25 bp, Homo sapien
ctgtcaagtgtacaatgatgtcgca

SEQ ID NO: 4200916 - DNA, 25 bp, Homo sapien
gctacctctggtgtagttatccagg

SEQ ID NO: 4200917 - DNA, 25 bp, Homo sapien
tgtcgcagatacacttttcatcccc

SEQ ID NO: 4200918 - DNA, 25 bp, Homo sapien
cagctgcagtgagcagtcgttgagc

SEQ ID NO: 4200919 - DNA, 25 bp, Homo sapien
ctgcagtgagcagtcgttgagccat

SEQ ID NO: 4200920 - DNA, 25 bp, Homo sapien
aggagagccaatcccagagcagcag

SEQ ID NO: 4200921 - DNA, 25 bp, Homo sapien
agcagctgcagtgagcagtcgttga

SEQ ID NO: 4200922 - DNA, 25 bp, Homo sapien
tcatcatgatgtttgccagtttggc

SEQ ID NO: 4200923 - DNA, 25 bp, Homo sapien
agtttggcctccatttgcccctaga

SEQ ID NO: 4200924 - DNA, 25 bp, Homo sapien
tagaaatgattctataacccactcc

SEQ ID NO: 4200925 - DNA, 25 bp, Homo sapien
tctgggttattcaatcccagccaag

SEQ ID NO: 4200926 - DNA, 25 bp, Homo sapien
tgaagaagacagaatagtaactctc

SEQ ID NO: 4200927 - DNA, 25 bp, Homo sapien
aaccatcttttccatgaagaagaca

SEQ ID NO: 4200928 - DNA, 25 bp, Homo sapien
tagtaactctcagagcttgccacca

SEQ ID NO: 4200929 - DNA, 25 bp, Homo sapien
ccatgaagaagacagaatagtaact

SEQ ID NO: 4200930 - DNA, 25 bp, Homo sapien
tggatccaacccttttgatgatcca

SEQ ID NO: 4200931 - DNA, 25 bp, Homo sapien
gatccaacccttttgatgatccatt

SEQ ID NO: 4200932 - DNA, 25 bp, Homo sapien
tccaacccttttgatgatccatttc

SEQ ID NO: 4200933 - DNA, 25 bp, Homo sapien
ggatccaacccttttgatgatccat

SEQ ID NO: 4200934 - DNA, 25 bp, Homo sapien
ctagaactcaactttggctttaaca

SEQ ID NO: 4200935 - DNA, 25 bp, Homo sapien
tcttgattagaaattctatagagga

SEQ ID NO: 4200936 - DNA, 25 bp, Homo sapien
tagaactcaactttggctttaacac

SEQ ID NO: 4200937 - DNA, 25 bp, Homo sapien
cttgattagaaattctatagaggaa

SEQ ID NO: 4200938 - DNA, 25 bp, Homo sapien
ccaagcttaggggatgagtaatcat

SEQ ID NO: 4200939 - DNA, 25 bp, Homo sapien
ggaatagaagttggtgctcagcgac

SEQ ID NO: 4200940 - DNA, 25 bp, Homo sapien
ttatgaaatggttttcgctgtctgc

SEQ ID NO: 4200941 - DNA, 25 bp, Homo sapien
catgccttgccatggttatgaaatg

SEQ ID NO: 4200942 - DNA, 25 bp, Homo sapien
tcagcgacgctgtcgcctgtctgtg

SEQ ID NO: 4200943 - DNA, 25 bp, Homo sapien
cacttgggtacactgtgcttccagt

SEQ ID NO: 4200944 - DNA, 25 bp, Homo sapien
tgtgcttccagttgttgcagaggtc

SEQ ID NO: 4200945 - DNA, 25 bp, Homo sapien
ccagttgttgcagaggtcttttcca

SEQ ID NO: 4200946 - DNA, 25 bp, Homo sapien
cactgtgcttccagttgttgcagag

SEQ ID NO: 4200947 - DNA, 25 bp, Homo sapien
gagtcattgactagatccagcattg

SEQ ID NO: 4200948 - DNA, 25 bp, Homo sapien
tgtgcatcagtgcttgcccaaagga

SEQ ID NO: 4200949 - DNA, 25 bp, Homo sapien
tgaggttaggctccttcgaaagcaa

SEQ ID NO: 4200950 - DNA, 25 bp, Homo sapien
tttcgtttaggtagagcagggcttc

SEQ ID NO: 4200951 - DNA, 25 bp, Homo sapien
tgtaaagtcgcaaggtcaaataagg

SEQ ID NO: 4200952 - DNA, 25 bp, Homo sapien
cacataggtgtatctgtatgtacac

SEQ ID NO: 4200953 - DNA, 25 bp, Homo sapien
tcaagtccagcaatgatttgtaaag

SEQ ID NO: 4200954 - DNA, 25 bp, Homo sapien
cacacacatatctaaagttacctat

SEQ ID NO: 4200955 - DNA, 25 bp, Homo sapien
aagaagaagatgctagaaagcttct

SEQ ID NO: 4200956 - DNA, 25 bp, Homo sapien
agaagatgctagaaagcttctagtt

SEQ ID NO: 4200957 - DNA, 25 bp, Homo sapien
gaagaagatgctagaaagcttctag

SEQ ID NO: 4200958 - DNA, 25 bp, Homo sapien
agaagaagatgctagaaagcttcta

SEQ ID NO: 4200959 - DNA, 25 bp, Homo sapien
ggagaaataattttaatagatagta

SEQ ID NO: 4200960 - DNA, 25 bp, Homo sapien
ctggagaaataattttaatagatag

SEQ ID NO: 4200961 - DNA, 25 bp, Homo sapien
tggagaaataattttaatagatagt

SEQ ID NO: 4200962 - DNA, 25 bp, Homo sapien
gagaaataattttaatagatagtaa

SEQ ID NO: 4200963 - DNA, 25 bp, Homo sapien
tgagaaatgataattcccatgcaaa

SEQ ID NO: 4200964 - DNA, 25 bp, Homo sapien
tagacaatacgttctggaaacataa

SEQ ID NO: 4200965 - DNA, 25 bp, Homo sapien
gactcacacggtctctcagattttt

SEQ ID NO: 4200966 - DNA, 25 bp, Homo sapien
tccagaatgggatacagcccagctc

SEQ ID NO: 4200967 - DNA, 25 bp, Homo sapien
cattttaattgtgcaagtgctttat

SEQ ID NO: 4200968 - DNA, 25 bp, Homo sapien
ggggctcccaacatcatcaagagta

SEQ ID NO: 4200969 - DNA, 25 bp, Homo sapien
gtgcaagtgctttatgtatacaggg

SEQ ID NO: 4200970 - DNA, 25 bp, Homo sapien
tatacaggggctcccaacatcatca

SEQ ID NO: 4200971 - DNA, 25 bp, Homo sapien
gtgacaagtctctgagtaaaaacca

SEQ ID NO: 4200972 - DNA, 25 bp, Homo sapien
tctcagaaccttctactttgaacat

SEQ ID NO: 4200973 - DNA, 25 bp, Homo sapien
cagatctggattctcagaaccttct

SEQ ID NO: 4200974 - DNA, 25 bp, Homo sapien
tctggattctcagaaccttctactt

SEQ ID NO: 4200975 - DNA, 25 bp, Homo sapien
tggattctcagaaccttctactttg

SEQ ID NO: 4200976 - DNA, 25 bp, Homo sapien
cttaaagtgcacaaagagcacaggg

SEQ ID NO: 4200977 - DNA, 25 bp, Homo sapien
gcttaatgcttaacagatgagccaa

SEQ ID NO: 4200978 - DNA, 25 bp, Homo sapien
tccccctgtggctcaaaagggagct

SEQ ID NO: 4200979 - DNA, 25 bp, Homo sapien
gactcatctactgcaaccagcagcg

SEQ ID NO: 4200980 - DNA, 25 bp, Homo sapien
tatgaaagatttatgccactctccc

SEQ ID NO: 4200981 - DNA, 25 bp, Homo sapien
tctagatgcaaggttcatgtacaaa

SEQ ID NO: 4200982 - DNA, 25 bp, Homo sapien
cctaccaagataactctagagagca

SEQ ID NO: 4200983 - DNA, 25 bp, Homo sapien
tatttgtctaatgggtctgtgtgag

SEQ ID NO: 4200984 - DNA, 25 bp, Homo sapien
tctgaaattcttgatatccccactt

SEQ ID NO: 4200985 - DNA, 25 bp, Homo sapien
ctggctgctgcttcgcatggaagaa

SEQ ID NO: 4200986 - DNA, 25 bp, Homo sapien
gcttcgcatggaagaactgttgcaa

SEQ ID NO: 4200987 - DNA, 25 bp, Homo sapien
aatattgtaacattccaaagtgaag

SEQ ID NO: 4200988 - DNA, 25 bp, Homo sapien
tttcaaatattgtaacattccaaag

SEQ ID NO: 4200989 - DNA, 25 bp, Homo sapien
ccttcccatttcaagttccagcaga

SEQ ID NO: 4200990 - DNA, 25 bp, Homo sapien
cattcaattgctctgtattccccaa

SEQ ID NO: 4200991 - DNA, 25 bp, Homo sapien
ttacattcaattgctctgtattccc

SEQ ID NO: 4200992 - DNA, 25 bp, Homo sapien
tcaattgctctgtattccccaatac

SEQ ID NO: 4200993 - DNA, 25 bp, Homo sapien
caattgctctgtattccccaataca

SEQ ID NO: 4200994 - DNA, 25 bp, Homo sapien
gtaattagtacaatatttgttcaca

SEQ ID NO: 4200995 - DNA, 25 bp, Homo sapien
agtacaatatttgttcacatataag

SEQ ID NO: 4200996 - DNA, 25 bp, Homo sapien
caaaagaagtaattagtacaatatt

SEQ ID NO: 4200997 - DNA, 25 bp, Homo sapien
aatatttgttcacatataagacatc

SEQ ID NO: 4200998 - DNA, 25 bp, Homo sapien
caccactagattacaatcttcttga

SEQ ID NO: 4200999 - DNA, 25 bp, Homo sapien
ccaccactagattacaatcttcttg

SEQ ID NO: 4201000 - DNA, 25 bp, Homo sapien
gcatctgcgtttatgactacattac

SEQ ID NO: 4201001 - DNA, 25 bp, Homo sapien
gactacattactgccatacctatgg

SEQ ID NO: 4201002 - DNA, 25 bp, Homo sapien
cctatggggcttcttactgtatttg

SEQ ID NO: 4201003 - DNA, 25 bp, Homo sapien
tttcaatgcatctgcgtttatgact

SEQ ID NO: 4201004 - DNA, 25 bp, Homo sapien
ctgccctagcacattctttaacaag

SEQ ID NO: 4201005 - DNA, 25 bp, Homo sapien
cacattctttaacaagtgaacatag

SEQ ID NO: 4201006 - DNA, 25 bp, Homo sapien
tcttgcatctccaaccatacagctt

SEQ ID NO: 4201007 - DNA, 25 bp, Homo sapien
ttcacatgctttagtctgccctagc

SEQ ID NO: 4201008 - DNA, 25 bp, Homo sapien
gaggctccactcaagcaagatgttg

SEQ ID NO: 4201009 - DNA, 25 bp, Homo sapien
tgactgagtcactcatgaggctcca

SEQ ID NO: 4201010 - DNA, 25 bp, Homo sapien
tcatctgaagtatgaccaggcctgg

SEQ ID NO: 4201011 - DNA, 25 bp, Homo sapien
gggttactggaatgtcctcatgaca

SEQ ID NO: 4201012 - DNA, 25 bp, Homo sapien
gcattccaacaagaagaagcaaaaa

SEQ ID NO: 4201013 - DNA, 25 bp, Homo sapien
acatattctattgaggcccctgtat

SEQ ID NO: 4201014 - DNA, 25 bp, Homo sapien
gactgcactgcagattcttagctta

SEQ ID NO: 4201015 - DNA, 25 bp, Homo sapien
aagcctgcatgttctcaaatttgta

SEQ ID NO: 4201016 - DNA, 25 bp, Homo sapien
tttatgtgatcatgtccagaaaggg

SEQ ID NO: 4201017 - DNA, 25 bp, Homo sapien
gaatgacaatgataaactccctcat

SEQ ID NO: 4201018 - DNA, 25 bp, Homo sapien
agttgacattaggaatgacaatgat

SEQ ID NO: 4201019 - DNA, 25 bp, Homo sapien
gagttgacattaggaatgacaatga

SEQ ID NO: 4201020 - DNA, 25 bp, Homo sapien
agagttgacattaggaatgacaatg

SEQ ID NO: 4201021 - DNA, 25 bp, Homo sapien
tacatgaatgcccaagctgaatagc

SEQ ID NO: 4201022 - DNA, 25 bp, Homo sapien
ggcctttctcttgtagttacctgtg

SEQ ID NO: 4201023 - DNA, 25 bp, Homo sapien
tttagtttgattcgccatacaaggg

SEQ ID NO: 4201024 - DNA, 25 bp, Homo sapien
gctgaatagccatttgaatgaaggc

SEQ ID NO: 4201025 - DNA, 25 bp, Homo sapien
taatgttgaaccctctctgatgcag

SEQ ID NO: 4201026 - DNA, 25 bp, Homo sapien
cgttgttaatgttgaaccctctctg

SEQ ID NO: 4201027 - DNA, 25 bp, Homo sapien
tacagacgttgttaatgttgaaccc

SEQ ID NO: 4201028 - DNA, 25 bp, Homo sapien
tctgtttttacagacgttgttaatg

SEQ ID NO: 4201029 - DNA, 25 bp, Homo sapien
gacccagatgctaagggtaagtgat

SEQ ID NO: 4201030 - DNA, 25 bp, Homo sapien
aataggcagttgtgttggcagtcgc

SEQ ID NO: 4201031 - DNA, 25 bp, Homo sapien
ggctccttggcagacgtaataggca

SEQ ID NO: 4201032 - DNA, 25 bp, Homo sapien
ggataacaatcacaggacccagatg

SEQ ID NO: 4201033 - DNA, 25 bp, Homo sapien
tgttagggcaagtgctaccatctga

SEQ ID NO: 4201034 - DNA, 25 bp, Homo sapien
aattctcttgtgtaagagaaagcct

SEQ ID NO: 4201035 - DNA, 25 bp, Homo sapien
gacgttagtgatccttgaatttcct

SEQ ID NO: 4201036 - DNA, 25 bp, Homo sapien
gctggaaagctgtctggagtcaacc

SEQ ID NO: 4201037 - DNA, 25 bp, Homo sapien
tcagcctgctccaaagaattcctga

SEQ ID NO: 4201038 - DNA, 25 bp, Homo sapien
agcctgctccaaagaattcctgaac

SEQ ID NO: 4201039 - DNA, 25 bp, Homo sapien
cagcctgctccaaagaattcctgaa

SEQ ID NO: 4201040 - DNA, 25 bp, Homo sapien
agaccaaggggtgtaggatgaaagc

SEQ ID NO: 4201041 - DNA, 25 bp, Homo sapien
accaaggggtgtaggatgaaagcat

SEQ ID NO: 4201042 - DNA, 25 bp, Homo sapien
ctgagaccaaggggtgtaggatgaa

SEQ ID NO: 4201043 - DNA, 25 bp, Homo sapien
tgagaccaaggggtgtaggatgaaa

SEQ ID NO: 4201044 - DNA, 25 bp, Homo sapien
taattggtggtgctcgcttgtgcag

SEQ ID NO: 4201045 - DNA, 25 bp, Homo sapien
cggccgtgagagaggactgtcacta

SEQ ID NO: 4201046 - DNA, 25 bp, Homo sapien
tctgtgtggaaactttcaggcggcc

SEQ ID NO: 4201047 - DNA, 25 bp, Homo sapien
caggttttggcggttcactttcaga

SEQ ID NO: 4201048 - DNA, 25 bp, Homo sapien
taaaagtctggatgactctggaggc

SEQ ID NO: 4201049 - DNA, 25 bp, Homo sapien
tcagagagagtatacctaagatcct

SEQ ID NO: 4201050 - DNA, 25 bp, Homo sapien
tacaaagtgcaatgggcccagggtc

SEQ ID NO: 4201051 - DNA, 25 bp, Homo sapien
catgtagcttaaataggtggatcca

SEQ ID NO: 4201052 - DNA, 25 bp, Homo sapien
ttgtcacactcagaacacgaactat

SEQ ID NO: 4201053 - DNA, 25 bp, Homo sapien
gggtccccttcccattcaattgcag

SEQ ID NO: 4201054 - DNA, 25 bp, Homo sapien
tcattgacctggtaatggacactca

SEQ ID NO: 4201055 - DNA, 25 bp, Homo sapien
cgaactatagatgacaagtttcctt

SEQ ID NO: 4201056 - DNA, 25 bp, Homo sapien
atttcccatcactgagcctgtacca

SEQ ID NO: 4201057 - DNA, 25 bp, Homo sapien
tcccatcactgagcctgtaccacca

SEQ ID NO: 4201058 - DNA, 25 bp, Homo sapien
ttgaatttcccatcactgagcctgt

SEQ ID NO: 4201059 - DNA, 25 bp, Homo sapien
gaatttcccatcactgagcctgtac

SEQ ID NO: 4201060 - DNA, 25 bp, Homo sapien
tcagtgctaagggactaaatatcca

SEQ ID NO: 4201061 - DNA, 25 bp, Homo sapien
gtgctaagggactaaatatccagag

SEQ ID NO: 4201062 - DNA, 25 bp, Homo sapien
ttccactcagtgctaagggactaaa

SEQ ID NO: 4201063 - DNA, 25 bp, Homo sapien
cactcagtgctaagggactaaatat

SEQ ID NO: 4201064 - DNA, 25 bp, Homo sapien
ttcttgaaaaaccaaggattctgtg

SEQ ID NO: 4201065 - DNA, 25 bp, Homo sapien
ttgaaaaaccaaggattctgtgaag

SEQ ID NO: 4201066 - DNA, 25 bp, Homo sapien
tttttcaatctatagaagagttttc

SEQ ID NO: 4201067 - DNA, 25 bp, Homo sapien
atctatagaagagttttctcctctt

SEQ ID NO: 4201068 - DNA, 25 bp, Homo sapien
gagtaagaatagcttttccattagg

SEQ ID NO: 4201069 - DNA, 25 bp, Homo sapien
cagtgagtcatgctggtggtgtttc

SEQ ID NO: 4201070 - DNA, 25 bp, Homo sapien
tctgagatatctaacccttgaaaat

SEQ ID NO: 4201071 - DNA, 25 bp, Homo sapien
taattagcacattgcacattttgac

SEQ ID NO: 4201072 - DNA, 25 bp, Homo sapien
cacttagtccattctgatcttttct

SEQ ID NO: 4201073 - DNA, 25 bp, Homo sapien
gcttctgcaaacctatctgctatgg

SEQ ID NO: 4201074 - DNA, 25 bp, Homo sapien
tgcatggcttccacttacccaattc

SEQ ID NO: 4201075 - DNA, 25 bp, Homo sapien
agaagggctgccccaacagcttctg

SEQ ID NO: 4201076 - DNA, 25 bp, Homo sapien
tctgctagctgattaggttgttggt

SEQ ID NO: 4201077 - DNA, 25 bp, Homo sapien
tgttgatgtctgctagctgattagg

SEQ ID NO: 4201078 - DNA, 25 bp, Homo sapien
cttgatgttgatgtctgctagctga

SEQ ID NO: 4201079 - DNA, 25 bp, Homo sapien
agctgattaggttgttggttgctga

SEQ ID NO: 4201080 - DNA, 25 bp, Homo sapien
tcatggagccttgattgcaaagacc

SEQ ID NO: 4201081 - DNA, 25 bp, Homo sapien
gcagccctgtagagtaaaacaacga

SEQ ID NO: 4201082 - DNA, 25 bp, Homo sapien
caaagacctattttcaccagatggg

SEQ ID NO: 4201083 - DNA, 25 bp, Homo sapien
aacgattctcctacaaccagggagg

SEQ ID NO: 4201084 - DNA, 25 bp, Homo sapien
gtagtctaccagaggaaaagtgaaa

SEQ ID NO: 4201085 - DNA, 25 bp, Homo sapien
ttctatattgtaggtgacaggtccc

SEQ ID NO: 4201086 - DNA, 25 bp, Homo sapien
gacaggtccctgaagtgagtttaaa

SEQ ID NO: 4201087 - DNA, 25 bp, Homo sapien
tgagtttaaaatgaagtagtctacc

SEQ ID NO: 4201088 - DNA, 25 bp, Homo sapien
caggaacagcactattgaaatagta

SEQ ID NO: 4201089 - DNA, 25 bp, Homo sapien
gaaatagtattcacaccgttccact

SEQ ID NO: 4201090 - DNA, 25 bp, Homo sapien
cactagacggttcacacactttcat

SEQ ID NO: 4201091 - DNA, 25 bp, Homo sapien
catcatttctcagatcagttagaga

SEQ ID NO: 4201092 - DNA, 25 bp, Homo sapien
ggttcattgtgaatgtcctgccaac

SEQ ID NO: 4201093 - DNA, 25 bp, Homo sapien
gggacaggttcattgtgaatgtcct

SEQ ID NO: 4201094 - DNA, 25 bp, Homo sapien
tcattgtgaatgtcctgccaaccat

SEQ ID NO: 4201095 - DNA, 25 bp, Homo sapien
caggttcattgtgaatgtcctgcca

SEQ ID NO: 4201096 - DNA, 25 bp, Homo sapien
gcttgtcacagtgcgagtgaacagg

SEQ ID NO: 4201097 - DNA, 25 bp, Homo sapien
agggtctgcctttgatccacatatc

SEQ ID NO: 4201098 - DNA, 25 bp, Homo sapien
aacaggggaagccaagtgccaaagg

SEQ ID NO: 4201099 - DNA, 25 bp, Homo sapien
agtgaacaggggaagccaagtgcca

SEQ ID NO: 4201100 - DNA, 25 bp, Homo sapien
tctcgctgaccagcttgcttctgcc

SEQ ID NO: 4201101 - DNA, 25 bp, Homo sapien
ctcgctgaccagcttgcttctgcca

SEQ ID NO: 4201102 - DNA, 25 bp, Homo sapien
tcgctgaccagcttgcttctgccag

SEQ ID NO: 4201103 - DNA, 25 bp, Homo sapien
tcgattcgacctgtgcactttctcc

SEQ ID NO: 4201104 - DNA, 25 bp, Homo sapien
tctagccctattgctgccccttgta

SEQ ID NO: 4201105 - DNA, 25 bp, Homo sapien
tattgctgccccttgtagctactgc

SEQ ID NO: 4201106 - DNA, 25 bp, Homo sapien
ccactgtcggctcccagcactgtgt

SEQ ID NO: 4201107 - DNA, 25 bp, Homo sapien
tgccacggtttggaaaatgactagg

SEQ ID NO: 4201108 - DNA, 25 bp, Homo sapien
tattatatgatttcagagaaagtcg

SEQ ID NO: 4201109 - DNA, 25 bp, Homo sapien
tcgtaactgtgccacggtttggaaa

SEQ ID NO: 4201110 - DNA, 25 bp, Homo sapien
gatttcagagaaagtcgtaactgtg

SEQ ID NO: 4201111 - DNA, 25 bp, Homo sapien
aagttccagaaggtggagttctaga

SEQ ID NO: 4201112 - DNA, 25 bp, Homo sapien
ctcatggtacaaactagccctggat

SEQ ID NO: 4201113 - DNA, 25 bp, Homo sapien
catggtacaaactagccctggataa

SEQ ID NO: 4201114 - DNA, 25 bp, Homo sapien
tggtacaaactagccctggataaag

SEQ ID NO: 4201115 - DNA, 25 bp, Homo sapien
tgcatgcgtctgctgataactggca

SEQ ID NO: 4201116 - DNA, 25 bp, Homo sapien
caagcatgtgcttggcttactctcc

SEQ ID NO: 4201117 - DNA, 25 bp, Homo sapien
tactctccagcttgcatgcgtctgc

SEQ ID NO: 4201118 - DNA, 25 bp, Homo sapien
cgtctgctgataactggcagcttga

SEQ ID NO: 4201119 - DNA, 25 bp, Homo sapien
aaccttgcatcctcctagcttctgg

SEQ ID NO: 4201120 - DNA, 25 bp, Homo sapien
tattgtctaacatttccggaagtta

SEQ ID NO: 4201121 - DNA, 25 bp, Homo sapien
caaggtgtgggcaggtccacgctcc

SEQ ID NO: 4201122 - DNA, 25 bp, Homo sapien
tccggaagttacatgtccaaaatca

SEQ ID NO: 4201123 - DNA, 25 bp, Homo sapien
gccacagttgtggaaatatccccag

SEQ ID NO: 4201124 - DNA, 25 bp, Homo sapien
tcttcaaagagtctaagccctccac

SEQ ID NO: 4201125 - DNA, 25 bp, Homo sapien
aggtgaaggcatagctgccacagtt

SEQ ID NO: 4201126 - DNA, 25 bp, Homo sapien
caaagagtctaagccctccacagga

SEQ ID NO: 4201127 - DNA, 25 bp, Homo sapien
tgtttgctcaagcattcagggctca

SEQ ID NO: 4201128 - DNA, 25 bp, Homo sapien
ccctagtctaggctccacgtgaatg

SEQ ID NO: 4201129 - DNA, 25 bp, Homo sapien
cacgtgaatgtggttatagctcaga

SEQ ID NO: 4201130 - DNA, 25 bp, Homo sapien
cagggacttggctctcatctcacag

SEQ ID NO: 4201131 - DNA, 25 bp, Homo sapien
cccatgttgtggctgagtatgttcc

SEQ ID NO: 4201132 - DNA, 25 bp, Homo sapien
tctcacaggtctggatagctgttgt

SEQ ID NO: 4201133 - DNA, 25 bp, Homo sapien
ggtctactgtggtccatcccttgta

SEQ ID NO: 4201134 - DNA, 25 bp, Homo sapien
ccccagcagagggactagaaagctg

SEQ ID NO: 4201135 - DNA, 25 bp, Homo sapien
tacgacttataatgctaggagatgc

SEQ ID NO: 4201136 - DNA, 25 bp, Homo sapien
gaatgggctttacagtgtgtacagg

SEQ ID NO: 4201137 - DNA, 25 bp, Homo sapien
ttcacggtagagtggagttaactcc

SEQ ID NO: 4201138 - DNA, 25 bp, Homo sapien
aacggtgctagagctttcacggtag

SEQ ID NO: 4201139 - DNA, 25 bp, Homo sapien
ctcaaaggctttgagctcagtctct

SEQ ID NO: 4201140 - DNA, 25 bp, Homo sapien
cctcaaaggctttgagctcagtctc

SEQ ID NO: 4201141 - DNA, 25 bp, Homo sapien
agaagacaagagtgtatgtaattgt

SEQ ID NO: 4201142 - DNA, 25 bp, Homo sapien
aaacccaattcagcttttccagaag

SEQ ID NO: 4201143 - DNA, 25 bp, Homo sapien
tgtatgtaattgtttctctggttca

SEQ ID NO: 4201144 - DNA, 25 bp, Homo sapien
ctattgattcagaccaaaacccaat

SEQ ID NO: 4201145 - DNA, 25 bp, Homo sapien
ccattatctttactctctgtctctc

SEQ ID NO: 4201146 - DNA, 25 bp, Homo sapien
cattatctttactctctgtctctct

SEQ ID NO: 4201147 - DNA, 25 bp, Homo sapien
attatctttactctctgtctctctc

SEQ ID NO: 4201148 - DNA, 25 bp, Homo sapien
tgtctctctctcttttttttttctg

SEQ ID NO: 4201149 - DNA, 25 bp, Homo sapien
tatgattggagagctggaaaggcag

SEQ ID NO: 4201150 - DNA, 25 bp, Homo sapien
agttttcttggaagtatgattggag

SEQ ID NO: 4201151 - DNA, 25 bp, Homo sapien
ggaaaggcagcctgtataatgggtc

SEQ ID NO: 4201152 - DNA, 25 bp, Homo sapien
caatgtacaacttgaaccttggttc

SEQ ID NO: 4201153 - DNA, 25 bp, Homo sapien
catctggaatgatccaaatctattt

SEQ ID NO: 4201154 - DNA, 25 bp, Homo sapien
aggacatctggaatgatccaaatct

SEQ ID NO: 4201155 - DNA, 25 bp, Homo sapien
aatgatccaaatctatttgagggtg

SEQ ID NO: 4201156 - DNA, 25 bp, Homo sapien
gacatctggaatgatccaaatctat

SEQ ID NO: 4201157 - DNA, 25 bp, Homo sapien
catcttagatttttagatctcaggg

SEQ ID NO: 4201158 - DNA, 25 bp, Homo sapien
gggtagatgggcatcactgtatata

SEQ ID NO: 4201159 - DNA, 25 bp, Homo sapien
atgctgccaagactgtgtgctcgtt

SEQ ID NO: 4201160 - DNA, 25 bp, Homo sapien
tcatagtctgttaccccaatgctgc

SEQ ID NO: 4201161 - DNA, 25 bp, Homo sapien
gtacaacagtgttgcacaactccag

SEQ ID NO: 4201162 - DNA, 25 bp, Homo sapien
tggcaggccctgcagttgcacaaag

SEQ ID NO: 4201163 - DNA, 25 bp, Homo sapien
tagccattcagatctagtcagagac

SEQ ID NO: 4201164 - DNA, 25 bp, Homo sapien
cactgggttagatggtgggaaaaca

SEQ ID NO: 4201165 - DNA, 25 bp, Homo sapien
ctcactgatccttcttgacactggc

SEQ ID NO: 4201166 - DNA, 25 bp, Homo sapien
gaggaaatcaccttcatcgcagctt

SEQ ID NO: 4201167 - DNA, 25 bp, Homo sapien
tgatccttcttgacactggctcctc

SEQ ID NO: 4201168 - DNA, 25 bp, Homo sapien
gcttctatcaatggccggaaggctg

SEQ ID NO: 4201169 - DNA, 25 bp, Homo sapien
tgtgtgtacacccacatgaatactt

SEQ ID NO: 4201170 - DNA, 25 bp, Homo sapien
tcctcagaacctagtattataccag

SEQ ID NO: 4201171 - DNA, 25 bp, Homo sapien
ctaggtaattgatatgactgtcaca

SEQ ID NO: 4201172 - DNA, 25 bp, Homo sapien
tgtcacaattttgctaagacttgta

SEQ ID NO: 4201173 - DNA, 25 bp, Homo sapien
gagaggcttaagaccacacagactg

SEQ ID NO: 4201174 - DNA, 25 bp, Homo sapien
actggcttgcatagatgctcacttc

SEQ ID NO: 4201175 - DNA, 25 bp, Homo sapien
gctcctttctcgtagtgtcacactg

SEQ ID NO: 4201176 - DNA, 25 bp, Homo sapien
tgacatcagagaggcttaagaccac

SEQ ID NO: 4201177 - DNA, 25 bp, Homo sapien
ttcaatttcacctgattccctgtct

SEQ ID NO: 4201178 - DNA, 25 bp, Homo sapien
tttcaatttcacctgattccctgtc

SEQ ID NO: 4201179 - DNA, 25 bp, Homo sapien
tcaatttcacctgattccctgtctc

SEQ ID NO: 4201180 - DNA, 25 bp, Homo sapien
ttttcaatttcacctgattccctgt

SEQ ID NO: 4201181 - DNA, 25 bp, Homo sapien
tgtccatactgctatcatctaccaa

SEQ ID NO: 4201182 - DNA, 25 bp, Homo sapien
tcccttacgtatggcaatatcttga

SEQ ID NO: 4201183 - DNA, 25 bp, Homo sapien
tattccttagacactttattgtcca

SEQ ID NO: 4201184 - DNA, 25 bp, Homo sapien
taccaaactagcttcaacttcaaca

SEQ ID NO: 4201185 - DNA, 25 bp, Homo sapien
tggagattgcacctaccagtaaact

SEQ ID NO: 4201186 - DNA, 25 bp, Homo sapien
ccctttggaaatagtcacgtagtgc

SEQ ID NO: 4201187 - DNA, 25 bp, Homo sapien
tgcaacccaaggcttccaaaatgtt

SEQ ID NO: 4201188 - DNA, 25 bp, Homo sapien
gccatccttggttagctaaaataaa

SEQ ID NO: 4201189 - DNA, 25 bp, Homo sapien
ccaaattctcctgcattgaccactt

SEQ ID NO: 4201190 - DNA, 25 bp, Homo sapien
cttctattaccaaattctcctgcat

SEQ ID NO: 4201191 - DNA, 25 bp, Homo sapien
ttctcctgcattgaccacttgaaat

SEQ ID NO: 4201192 - DNA, 25 bp, Homo sapien
ctcctgcattgaccacttgaaattt

SEQ ID NO: 4201193 - DNA, 25 bp, Homo sapien
tccaatgaattaaaaggtgcctacc

SEQ ID NO: 4201194 - DNA, 25 bp, Homo sapien
tggtttaagttctagccaagggcaa

SEQ ID NO: 4201195 - DNA, 25 bp, Homo sapien
gaaggctctagtaccaagatcactg

SEQ ID NO: 4201196 - DNA, 25 bp, Homo sapien
gagaagtcctacagcctgccatctg

SEQ ID NO: 4201197 - DNA, 25 bp, Homo sapien
ggatcaatcaatcttctgcccaaag

SEQ ID NO: 4201198 - DNA, 25 bp, Homo sapien
taaagggtctgatccatagtcctcc

SEQ ID NO: 4201199 - DNA, 25 bp, Homo sapien
tctcagggtgagtgaatccatattg

SEQ ID NO: 4201200 - DNA, 25 bp, Homo sapien
tgcccagagcagttacattctcctg

SEQ ID NO: 4201201 - DNA, 25 bp, Homo sapien
tgagaacttgcatttgtggagaact

SEQ ID NO: 4201202 - DNA, 25 bp, Homo sapien
catgtccagttaattgtctagattg

SEQ ID NO: 4201203 - DNA, 25 bp, Homo sapien
ggagaactcaacaaacatgtcacaa

SEQ ID NO: 4201204 - DNA, 25 bp, Homo sapien
gagaattccggagaaaacaaacaca

SEQ ID NO: 4201205 - DNA, 25 bp, Homo sapien
tcactctcagtaatgtcacagaaaa

SEQ ID NO: 4201206 - DNA, 25 bp, Homo sapien
tattcactctcagtaatgtcacaga

SEQ ID NO: 4201207 - DNA, 25 bp, Homo sapien
attaatattcactctcagtaatgtc

SEQ ID NO: 4201208 - DNA, 25 bp, Homo sapien
taatattcactctcagtaatgtcac

SEQ ID NO: 4201209 - DNA, 25 bp, Homo sapien
catctcctccaactcagagctcatt

SEQ ID NO: 4201210 - DNA, 25 bp, Homo sapien
atctcctccaactcagagctcattc

SEQ ID NO: 4201211 - DNA, 25 bp, Homo sapien
gtctgcttgagccattgagtcaatt

SEQ ID NO: 4201212 - DNA, 25 bp, Homo sapien
ccttgtggtactcagttgctaatgc

SEQ ID NO: 4201213 - DNA, 25 bp, Homo sapien
ttctaaaggccccttgtggtactca

SEQ ID NO: 4201214 - DNA, 25 bp, Homo sapien
ggccccttgtggtactcagttgcta

SEQ ID NO: 4201215 - DNA, 25 bp, Homo sapien
aaaggccccttgtggtactcagttg

SEQ ID NO: 4201216 - DNA, 25 bp, Homo sapien
gattactagagtcccaacaagccta

SEQ ID NO: 4201217 - DNA, 25 bp, Homo sapien
aagcggactaaaatatgaactggcc

SEQ ID NO: 4201218 - DNA, 25 bp, Homo sapien
tgaactggccactaaccagatgtgt

SEQ ID NO: 4201219 - DNA, 25 bp, Homo sapien
gacacatgttccattgataaccctg

SEQ ID NO: 4201220 - DNA, 25 bp, Homo sapien
gcatcagacttcagagcccaaacat

SEQ ID NO: 4201221 - DNA, 25 bp, Homo sapien
tatatgatccaagtttctgggcacg

SEQ ID NO: 4201222 - DNA, 25 bp, Homo sapien
gagagcatttgctgaaaccgcatca

SEQ ID NO: 4201223 - DNA, 25 bp, Homo sapien
ttgcagtagtaagtcagcctcagct

SEQ ID NO: 4201224 - DNA, 25 bp, Homo sapien
ctccagtgaggatcctctatatttg

SEQ ID NO: 4201225 - DNA, 25 bp, Homo sapien
ccttgccacggggatcaatgccaaa

SEQ ID NO: 4201226 - DNA, 25 bp, Homo sapien
caacctgcaagatgtgctgttcgct

SEQ ID NO: 4201227 - DNA, 25 bp, Homo sapien
ggatcaatgccaaacctccagtgag

SEQ ID NO: 4201228 - DNA, 25 bp, Homo sapien
gctgatcatactttcccatacaagt

SEQ ID NO: 4201229 - DNA, 25 bp, Homo sapien
gtaagatataaaggctttcgctgat

SEQ ID NO: 4201230 - DNA, 25 bp, Homo sapien
tagatgaggaggtgtaagtccagag

SEQ ID NO: 4201231 - DNA, 25 bp, Homo sapien
tccagagaagcgtggggattagcat

SEQ ID NO: 4201232 - DNA, 25 bp, Homo sapien
gagggcacagcggagagatctgaga

SEQ ID NO: 4201233 - DNA, 25 bp, Homo sapien
ggcacagcggagagatctgagagga

SEQ ID NO: 4201234 - DNA, 25 bp, Homo sapien
gatgctgaggacacgggaaaattta

SEQ ID NO: 4201235 - DNA, 25 bp, Homo sapien
atgcaagatgctgaggacacgggaa

SEQ ID NO: 4201236 - DNA, 25 bp, Homo sapien
gagaatgcccgtgttggccaaggca

SEQ ID NO: 4201237 - DNA, 25 bp, Homo sapien
ggagatgcttataggtgacctgagc

SEQ ID NO: 4201238 - DNA, 25 bp, Homo sapien
tagaggtcacgatagcagactgtcc

SEQ ID NO: 4201239 - DNA, 25 bp, Homo sapien
gcctctgctgattgagctgcatgat

SEQ ID NO: 4201240 - DNA, 25 bp, Homo sapien
caacactttcttggatgtgacatcc

SEQ ID NO: 4201241 - DNA, 25 bp, Homo sapien
tggatgtgacatcccccttcgtaac

SEQ ID NO: 4201242 - DNA, 25 bp, Homo sapien
agcattgatgtccaagccttggagt

SEQ ID NO: 4201243 - DNA, 25 bp, Homo sapien
attttaaatagacaacactttcttg

SEQ ID NO: 4201244 - DNA, 25 bp, Homo sapien
tttacttactatagatcaaaagagt

SEQ ID NO: 4201245 - DNA, 25 bp, Homo sapien
cagcagataccttcatacattagtc

SEQ ID NO: 4201246 - DNA, 25 bp, Homo sapien
aatactaagaaatgacctggtgtag

SEQ ID NO: 4201247 - DNA, 25 bp, Homo sapien
actgaagcagttctggcaccctggt

SEQ ID NO: 4201248 - DNA, 25 bp, Homo sapien
tattgcatgtacctaaaaagtcctg

SEQ ID NO: 4201249 - DNA, 25 bp, Homo sapien
tgtcaggcgctggaatcatcggcga

SEQ ID NO: 4201250 - DNA, 25 bp, Homo sapien
tactaaaggttctagtgagggcaat

SEQ ID NO: 4201251 - DNA, 25 bp, Homo sapien
tcacacataataacggaagacaacg

SEQ ID NO: 4201252 - DNA, 25 bp, Homo sapien
gaggggtcgtgagggagagcgagct

SEQ ID NO: 4201253 - DNA, 25 bp, Homo sapien
ggggtcgtgagggagagcgagctgg

SEQ ID NO: 4201254 - DNA, 25 bp, Homo sapien
gcgaggggtcgtgagggagagcgag

SEQ ID NO: 4201255 - DNA, 25 bp, Homo sapien
cgaggggtcgtgagggagagcgagc

SEQ ID NO: 4201256 - DNA, 25 bp, Homo sapien
tattgacggcagcaaggatgatgcc

SEQ ID NO: 4201257 - DNA, 25 bp, Homo sapien
agatcagcgttcacctggtcccgaa

SEQ ID NO: 4201258 - DNA, 25 bp, Homo sapien
tccctctcgggatattgacggcagc

SEQ ID NO: 4201259 - DNA, 25 bp, Homo sapien
ggatgatgccacagtcgtcccgtgt

SEQ ID NO: 4201260 - DNA, 25 bp, Homo sapien
ggcgaggaggcagctccgaatttat

SEQ ID NO: 4201261 - DNA, 25 bp, Homo sapien
ggaggcagctccgaatttatagtga

SEQ ID NO: 4201262 - DNA, 25 bp, Homo sapien
ggcagctccgaatttatagtgaggg

SEQ ID NO: 4201263 - DNA, 25 bp, Homo sapien
gaggaggcagctccgaatttatagt

SEQ ID NO: 4201264 - DNA, 25 bp, Homo sapien
tccccatcgatcaccgccgcggccc

SEQ ID NO: 4201265 - DNA, 25 bp, Homo sapien
ggccggctgcgctggtgcgggtctc

SEQ ID NO: 4201266 - DNA, 25 bp, Homo sapien
ccgcctcggcgtcccggctgtgcgc

SEQ ID NO: 4201267 - DNA, 25 bp, Homo sapien
ggcgtcccggctgtgcgccctcact

SEQ ID NO: 4201268 - DNA, 25 bp, Homo sapien
cagaactacggtcgctctttccttg

SEQ ID NO: 4201269 - DNA, 25 bp, Homo sapien
gcaggcgctgaccagaactacggtc

SEQ ID NO: 4201270 - DNA, 25 bp, Homo sapien
tatagagccagcagttaggacaccg

SEQ ID NO: 4201271 - DNA, 25 bp, Homo sapien
ttggtccccgagagcttcccagtat

SEQ ID NO: 4201272 - DNA, 25 bp, Homo sapien
ggcttcccgctcagatgatggctaa

SEQ ID NO: 4201273 - DNA, 25 bp, Homo sapien
caccgctatggtttgcagggagaga

SEQ ID NO: 4201274 - DNA, 25 bp, Homo sapien
cgaacgccttgcagagtcataccgg

SEQ ID NO: 4201275 - DNA, 25 bp, Homo sapien
tcaaaggacatctgggaaccctgag

SEQ ID NO: 4201276 - DNA, 25 bp, Homo sapien
ctggtgccgactttctgggatggca

SEQ ID NO: 4201277 - DNA, 25 bp, Homo sapien
tgggatggcatcagtgagttattca

SEQ ID NO: 4201278 - DNA, 25 bp, Homo sapien
gtgccgactttctgggatggcatca

SEQ ID NO: 4201279 - DNA, 25 bp, Homo sapien
cagtgagttattcagataaaaaccc

SEQ ID NO: 4201280 - DNA, 25 bp, Homo sapien
caccactgtggagtaccttccagaa

SEQ ID NO: 4201281 - DNA, 25 bp, Homo sapien
taatatttatctacccacccagcac

SEQ ID NO: 4201282 - DNA, 25 bp, Homo sapien
ctgttacagcaaagaagaagcatcc

SEQ ID NO: 4201283 - DNA, 25 bp, Homo sapien
tcagaataggacaagctactcttca

SEQ ID NO: 4201284 - DNA, 25 bp, Homo sapien
gctgccagttgtggccaataggacc

SEQ ID NO: 4201285 - DNA, 25 bp, Homo sapien
cagttgtggccaataggaccacaag

SEQ ID NO: 4201286 - DNA, 25 bp, Homo sapien
gccagttgtggccaataggaccaca

SEQ ID NO: 4201287 - DNA, 25 bp, Homo sapien
ggctgccagttgtggccaataggac

SEQ ID NO: 4201288 - DNA, 25 bp, Homo sapien
tcaaagccctttaggccacagcatt

SEQ ID NO: 4201289 - DNA, 25 bp, Homo sapien
ggctcccatctattggaaatagtaa

SEQ ID NO: 4201290 - DNA, 25 bp, Homo sapien
aggctggtgaggcagctacccgttt

SEQ ID NO: 4201291 - DNA, 25 bp, Homo sapien
aatcttatttgactaaaacagtgac

SEQ ID NO: 4201292 - DNA, 25 bp, Homo sapien
actgcttggctacataatcaaaatg

SEQ ID NO: 4201293 - DNA, 25 bp, Homo sapien
tggctacataatcaaaatgatcaat

SEQ ID NO: 4201294 - DNA, 25 bp, Homo sapien
gcttggctacataatcaaaatgatc

SEQ ID NO: 4201295 - DNA, 25 bp, Homo sapien
ggctacataatcaaaatgatcaatt

SEQ ID NO: 4201296 - DNA, 25 bp, Homo sapien
ttgaggtggctgcagattgttttca

SEQ ID NO: 4201297 - DNA, 25 bp, Homo sapien
tgaggtggctgcagattgttttcat

SEQ ID NO: 4201298 - DNA, 25 bp, Homo sapien
agaacctgagaacagcacaggcaag

SEQ ID NO: 4201299 - DNA, 25 bp, Homo sapien
ttgattttggaagaactactcggct

SEQ ID NO: 4201300 - DNA, 25 bp, Homo sapien
tacatgattaggcaaaggaacactc

SEQ ID NO: 4201301 - DNA, 25 bp, Homo sapien
cttttaccaaaaggactggagctga

SEQ ID NO: 4201302 - DNA, 25 bp, Homo sapien
tctctcccgagcaagataacctgag

SEQ ID NO: 4201303 - DNA, 25 bp, Homo sapien
ttcctgaggcaagaacctactgagt

SEQ ID NO: 4201304 - DNA, 25 bp, Homo sapien
cctactgagtatgctacctgatgct

SEQ ID NO: 4201305 - DNA, 25 bp, Homo sapien
ccagcttcttcgcatgcctggtgat

SEQ ID NO: 4201306 - DNA, 25 bp, Homo sapien
taccagagcagcaattagtctaggg

SEQ ID NO: 4201307 - DNA, 25 bp, Homo sapien
caagaccatcatctcctcttgtttt

SEQ ID NO: 4201308 - DNA, 25 bp, Homo sapien
accatcatctcctcttgtttttaac

SEQ ID NO: 4201309 - DNA, 25 bp, Homo sapien
gaccatcatctcctcttgtttttaa

SEQ ID NO: 4201310 - DNA, 25 bp, Homo sapien
catcatctcctcttgtttttaactt

SEQ ID NO: 4201311 - DNA, 25 bp, Homo sapien
ataataataatgttcacgatgagga

SEQ ID NO: 4201312 - DNA, 25 bp, Homo sapien
taataataatgttcacgatgaggat

SEQ ID NO: 4201313 - DNA, 25 bp, Homo sapien
aataataatgttcacgatgaggatg

SEQ ID NO: 4201314 - DNA, 25 bp, Homo sapien
gtcagttgacttgtgattcattttc

SEQ ID NO: 4201315 - DNA, 25 bp, Homo sapien
tcagttgacttgtgattcattttct

SEQ ID NO: 4201316 - DNA, 25 bp, Homo sapien
tgtcagttgacttgtgattcatttt

SEQ ID NO: 4201317 - DNA, 25 bp, Homo sapien
tttggactgtcagttgacttgtgat

SEQ ID NO: 4201318 - DNA, 25 bp, Homo sapien
tgggaagagcatagtgatgggagcc

SEQ ID NO: 4201319 - DNA, 25 bp, Homo sapien
gaagagcatagtgatgggagccaaa

SEQ ID NO: 4201320 - DNA, 25 bp, Homo sapien
gcatagtgatgggagccaaaagttc

SEQ ID NO: 4201321 - DNA, 25 bp, Homo sapien
gagcatagtgatgggagccaaaagt

SEQ ID NO: 4201322 - DNA, 25 bp, Homo sapien
ttcaggactggcgtaaagtgtgccc

SEQ ID NO: 4201323 - DNA, 25 bp, Homo sapien
gatttctattacacattcaggactg

SEQ ID NO: 4201324 - DNA, 25 bp, Homo sapien
tgtcatctagtaaaatcccctttgc

SEQ ID NO: 4201325 - DNA, 25 bp, Homo sapien
ccttctcaggaagaactaagatcta

SEQ ID NO: 4201326 - DNA, 25 bp, Homo sapien
gaattttctgtagttcactaataca

SEQ ID NO: 4201327 - DNA, 25 bp, Homo sapien
ctttggtcctcagagtatttacagc

SEQ ID NO: 4201328 - DNA, 25 bp, Homo sapien
gtagttcactaatacacccctctat

SEQ ID NO: 4201329 - DNA, 25 bp, Homo sapien
aatctgaacaacgtatatattttct

SEQ ID NO: 4201330 - DNA, 25 bp, Homo sapien
aaaatagtagatattggattgcttc

SEQ ID NO: 4201331 - DNA, 25 bp, Homo sapien
gcttctacatttactacttgtggca

SEQ ID NO: 4201332 - DNA, 25 bp, Homo sapien
taacaaggcacttgattaaccctga

SEQ ID NO: 4201333 - DNA, 25 bp, Homo sapien
tactacttgtggcagcaaatgtttg

SEQ ID NO: 4201334 - DNA, 25 bp, Homo sapien
aagtcagatacatgggagaatgcca

SEQ ID NO: 4201335 - DNA, 25 bp, Homo sapien
ttggagatgattttgttcacccctg

SEQ ID NO: 4201336 - DNA, 25 bp, Homo sapien
tcttggttggtaatcctagactaac

SEQ ID NO: 4201337 - DNA, 25 bp, Homo sapien
taaatggctctctgatatatgtaca

SEQ ID NO: 4201338 - DNA, 25 bp, Homo sapien
tataccgggaatcctggcagccacg

SEQ ID NO: 4201339 - DNA, 25 bp, Homo sapien
tctataccgggaatcctggcagcca

SEQ ID NO: 4201340 - DNA, 25 bp, Homo sapien
accgggaatcctggcagccacgaag

SEQ ID NO: 4201341 - DNA, 25 bp, Homo sapien
ataccgggaatcctggcagccacga

SEQ ID NO: 4201342 - DNA, 25 bp, Homo sapien
tagcacattcagtgggtattcacca

SEQ ID NO: 4201343 - DNA, 25 bp, Homo sapien
gtttatcactgacccagattggtgg

SEQ ID NO: 4201344 - DNA, 25 bp, Homo sapien
acagatattgcacaacgctcttggg

SEQ ID NO: 4201345 - DNA, 25 bp, Homo sapien
tcactgaacacctaccatgtgtggg

SEQ ID NO: 4201346 - DNA, 25 bp, Homo sapien
caggtccccagatgaacatggctga

SEQ ID NO: 4201347 - DNA, 25 bp, Homo sapien
ggtgagcagcatagaacttacagcc

SEQ ID NO: 4201348 - DNA, 25 bp, Homo sapien
gaatactcagtgtcaacttgggcct

SEQ ID NO: 4201349 - DNA, 25 bp, Homo sapien
ggacattagtatccacaaacaggtg

SEQ ID NO: 4201350 - DNA, 25 bp, Homo sapien
gaggtaagcaggaccaattcattta

SEQ ID NO: 4201351 - DNA, 25 bp, Homo sapien
ggtaagcaggaccaattcatttatc

SEQ ID NO: 4201352 - DNA, 25 bp, Homo sapien
aggtaagcaggaccaattcatttat

SEQ ID NO: 4201353 - DNA, 25 bp, Homo sapien
aatttgttgcaaacactatatcaaa

SEQ ID NO: 4201354 - DNA, 25 bp, Homo sapien
gttgcaaacactatatcaaatacac

SEQ ID NO: 4201355 - DNA, 25 bp, Homo sapien
tgatcacctgggtcgaatttgttgc

SEQ ID NO: 4201356 - DNA, 25 bp, Homo sapien
atcacctgggtcgaatttgttgcaa

SEQ ID NO: 4201357 - DNA, 25 bp, Homo sapien
cttcagtagaagagttgagaatcat

SEQ ID NO: 4201358 - DNA, 25 bp, Homo sapien
gccaaagggccagcggtattccata

SEQ ID NO: 4201359 - DNA, 25 bp, Homo sapien
tatatttttggtcaggcccagccct

SEQ ID NO: 4201360 - DNA, 25 bp, Homo sapien
tacaagcattgtgcgtcgaaggcgg

SEQ ID NO: 4201361 - DNA, 25 bp, Homo sapien
tacaggttgaaactgacgctggctg

SEQ ID NO: 4201362 - DNA, 25 bp, Homo sapien
tcaacctcaaaacatggtgcaggct

SEQ ID NO: 4201363 - DNA, 25 bp, Homo sapien
cctcaaaacatggtgcaggcttctt

SEQ ID NO: 4201364 - DNA, 25 bp, Homo sapien
acctcaaaacatggtgcaggcttct

SEQ ID NO: 4201365 - DNA, 25 bp, Homo sapien
caacctcaaaacatggtgcaggctt

SEQ ID NO: 4201366 - DNA, 25 bp, Homo sapien
gaagacactactacttgggaccagt

SEQ ID NO: 4201367 - DNA, 25 bp, Homo sapien
gacattgttcttcgagcagccgtca

SEQ ID NO: 4201368 - DNA, 25 bp, Homo sapien
tttactgccctttggaaactggaca

SEQ ID NO: 4201369 - DNA, 25 bp, Homo sapien
caaaagcaggctagggagattgcat

SEQ ID NO: 4201370 - DNA, 25 bp, Homo sapien
tcatcagcgcctgtttgaaaaatcc

SEQ ID NO: 4201371 - DNA, 25 bp, Homo sapien
tgaaaaactgtgattggtccacttc

SEQ ID NO: 4201372 - DNA, 25 bp, Homo sapien
cacttcaagcctggaccaattaact

SEQ ID NO: 4201373 - DNA, 25 bp, Homo sapien
gaaatgccaacactggggccagctc

SEQ ID NO: 4201374 - DNA, 25 bp, Homo sapien
cagggatttagctggacataagacg

SEQ ID NO: 4201375 - DNA, 25 bp, Homo sapien
gcaggtagaatcaaggactcaagca

SEQ ID NO: 4201376 - DNA, 25 bp, Homo sapien
tattctggtcccttgattagagagg

SEQ ID NO: 4201377 - DNA, 25 bp, Homo sapien
actctgttgcagactagcttcttcc

SEQ ID NO: 4201378 - DNA, 25 bp, Homo sapien
ctctgttgagtaacaccagctgctt

SEQ ID NO: 4201379 - DNA, 25 bp, Homo sapien
tcctctctgtggtgagctctaggag

SEQ ID NO: 4201380 - DNA, 25 bp, Homo sapien
tcttgtgtcacatggcgctggctga

SEQ ID NO: 4201381 - DNA, 25 bp, Homo sapien
gctctaggaggcttatctctgttga

SEQ ID NO: 4201382 - DNA, 25 bp, Homo sapien
ttcccctcccatttagtaagtgcta

SEQ ID NO: 4201383 - DNA, 25 bp, Homo sapien
tatgacagttaacagttgtagcctg

SEQ ID NO: 4201384 - DNA, 25 bp, Homo sapien
gcagaaaggaccagagcatttaact

SEQ ID NO: 4201385 - DNA, 25 bp, Homo sapien
gccaaacctgtactgcacaccttaa

SEQ ID NO: 4201386 - DNA, 25 bp, Homo sapien
ggctacatagctactttctgattca

SEQ ID NO: 4201387 - DNA, 25 bp, Homo sapien
tcctggcccacacttggttggaaaa

SEQ ID NO: 4201388 - DNA, 25 bp, Homo sapien
gatctatgtctatgcccagctttcc

SEQ ID NO: 4201389 - DNA, 25 bp, Homo sapien
tcatgttatgatcatttcctcagcc

SEQ ID NO: 4201390 - DNA, 25 bp, Homo sapien
ttcctctggtgacatctggatcttt

SEQ ID NO: 4201391 - DNA, 25 bp, Homo sapien
tctggtgacatctggatctttccaa

SEQ ID NO: 4201392 - DNA, 25 bp, Homo sapien
tctttccaagtatcttgctgtagct

SEQ ID NO: 4201393 - DNA, 25 bp, Homo sapien
ggatctttccaagtatcttgctgta

SEQ ID NO: 4201394 - DNA, 25 bp, Homo sapien
taaggtccaaatcaggctcctgctc

SEQ ID NO: 4201395 - DNA, 25 bp, Homo sapien
tagcctgttgggatgtggattttcc

SEQ ID NO: 4201396 - DNA, 25 bp, Homo sapien
tgcttatttgttgttgccactaagc

SEQ ID NO: 4201397 - DNA, 25 bp, Homo sapien
tgtttagcctgttgggatgtggatt

SEQ ID NO: 4201398 - DNA, 25 bp, Homo sapien
tatttatgctctcggtcctcagtgg

SEQ ID NO: 4201399 - DNA, 25 bp, Homo sapien
gacctctagccgacttgtctgtgca

SEQ ID NO: 4201400 - DNA, 25 bp, Homo sapien
tgtgtctgaggtatttatgctctcg

SEQ ID NO: 4201401 - DNA, 25 bp, Homo sapien
tgaggccctgacctctagccgactt

SEQ ID NO: 4201402 - DNA, 25 bp, Homo sapien
gcatagcatcaacaaattagtggca

SEQ ID NO: 4201403 - DNA, 25 bp, Homo sapien
tcttagcggtatataaaataatggg

SEQ ID NO: 4201404 - DNA, 25 bp, Homo sapien
gaatctgcacagtcaatgtgttatc

SEQ ID NO: 4201405 - DNA, 25 bp, Homo sapien
tgtacaataagcagttggaaatgat

SEQ ID NO: 4201406 - DNA, 25 bp, Homo sapien
tgagttgtctgttcagaaggcctgc

SEQ ID NO: 4201407 - DNA, 25 bp, Homo sapien
cagccagtttttctatgaggacttc

SEQ ID NO: 4201408 - DNA, 25 bp, Homo sapien
tctttcatgggggaggtttgcatct

SEQ ID NO: 4201409 - DNA, 25 bp, Homo sapien
attgaagagtctgacccctttaaag

SEQ ID NO: 4201410 - DNA, 25 bp, Homo sapien
tcttgattaatagttttcctggcat

SEQ ID NO: 4201411 - DNA, 25 bp, Homo sapien
tgtgtctgaccaggtctagtgggta

SEQ ID NO: 4201412 - DNA, 25 bp, Homo sapien
tcttctcctgattgcaaacaggaac

SEQ ID NO: 4201413 - DNA, 25 bp, Homo sapien
ttttataatcctgagtgttctttgc

SEQ ID NO: 4201414 - DNA, 25 bp, Homo sapien
tcaccagaaccaagagtgccaacat

SEQ ID NO: 4201415 - DNA, 25 bp, Homo sapien
gtcaccagaaccaagagtgccaaca

SEQ ID NO: 4201416 - DNA, 25 bp, Homo sapien
tggaaatgagtaatgtgtccaaatt

SEQ ID NO: 4201417 - DNA, 25 bp, Homo sapien
aatgagtaatgtgtccaaatttggg

SEQ ID NO: 4201418 - DNA, 25 bp, Homo sapien
acttgctccttaaagatggcttact

SEQ ID NO: 4201419 - DNA, 25 bp, Homo sapien
cttgctccttaaagatggcttactt

SEQ ID NO: 4201420 - DNA, 25 bp, Homo sapien
catcttcaacgttaacacggaacac

SEQ ID NO: 4201421 - DNA, 25 bp, Homo sapien
gattttcatcttcaacgttaacacg

SEQ ID NO: 4201422 - DNA, 25 bp, Homo sapien
ggtcgtgctggccaactcgcggatt

SEQ ID NO: 4201423 - DNA, 25 bp, Homo sapien
caactcgcggattatgttaatgtga

SEQ ID NO: 4201424 - DNA, 25 bp, Homo sapien
tgtgaccttcgtgacagttgcaact

SEQ ID NO: 4201425 - DNA, 25 bp, Homo sapien
tactacagggcttatggcaatctaa

SEQ ID NO: 4201426 - DNA, 25 bp, Homo sapien
tcttgctaccaaaatgctatagtta

SEQ ID NO: 4201427 - DNA, 25 bp, Homo sapien
cggaatcacagtgcgatctaagatt

SEQ ID NO: 4201428 - DNA, 25 bp, Homo sapien
caagcacaaccctgattgtgaggag

SEQ ID NO: 4201429 - DNA, 25 bp, Homo sapien
gcccagaatatgctgttcccgtaac

SEQ ID NO: 4201430 - DNA, 25 bp, Homo sapien
aagctgagaggaaggacacatggcc

SEQ ID NO: 4201431 - DNA, 25 bp, Homo sapien
taaccatgttactccaggcatagag

SEQ ID NO: 4201432 - DNA, 25 bp, Homo sapien
gaggtttgatttgtgtgacagaatc

SEQ ID NO: 4201433 - DNA, 25 bp, Homo sapien
ttaacacggaagtcaactgtactgt

SEQ ID NO: 4201434 - DNA, 25 bp, Homo sapien
gctttaacacggaagtcaactgtac

SEQ ID NO: 4201435 - DNA, 25 bp, Homo sapien
ttgatttgtgtgacagaatctggct

SEQ ID NO: 4201436 - DNA, 25 bp, Homo sapien
tcctgtacgcctctgaaatatgcag

SEQ ID NO: 4201437 - DNA, 25 bp, Homo sapien
tgtcctgggacaccttcctgtacgc

SEQ ID NO: 4201438 - DNA, 25 bp, Homo sapien
tgctatgtgcctattgctgtcctgg

SEQ ID NO: 4201439 - DNA, 25 bp, Homo sapien
ggactttgcgcccactgttattgaa

SEQ ID NO: 4201440 - DNA, 25 bp, Homo sapien
gaacttgggtacgaacttgtgtctg

SEQ ID NO: 4201441 - DNA, 25 bp, Homo sapien
aattaatactaactggaatctgttt

SEQ ID NO: 4201442 - DNA, 25 bp, Homo sapien
cattctgatgaagtatgtcagggac

SEQ ID NO: 4201443 - DNA, 25 bp, Homo sapien
cactccttcaattggtgaacttggg

SEQ ID NO: 4201444 - DNA, 25 bp, Homo sapien
accaaagtgggtgttcctatgaaca

SEQ ID NO: 4201445 - DNA, 25 bp, Homo sapien
gcactctccataaattctcatgttg

SEQ ID NO: 4201446 - DNA, 25 bp, Homo sapien
aaattctcatgttgtcctctggttc

SEQ ID NO: 4201447 - DNA, 25 bp, Homo sapien
ccagagccactgctttagtagatgg

SEQ ID NO: 4201448 - DNA, 25 bp, Homo sapien
gaacccggctatcaaactgagcctc

SEQ ID NO: 4201449 - DNA, 25 bp, Homo sapien
catttctcaggttgcttatcagtac

SEQ ID NO: 4201450 - DNA, 25 bp, Homo sapien
cacatttctcaggttgcttatcagt

SEQ ID NO: 4201451 - DNA, 25 bp, Homo sapien
ctgtgtcctgttgcacgaacccggc

SEQ ID NO: 4201452 - DNA, 25 bp, Homo sapien
tcaaatgtggttccgataacactgc

SEQ ID NO: 4201453 - DNA, 25 bp, Homo sapien
tcagtggcgacttgttgagtccaag

SEQ ID NO: 4201454 - DNA, 25 bp, Homo sapien
taaatagcgcgtccctcaaatgtgg

SEQ ID NO: 4201455 - DNA, 25 bp, Homo sapien
gataacactgcgagagatgagggct

SEQ ID NO: 4201456 - DNA, 25 bp, Homo sapien
gaaatccactctctggcatggaaac

SEQ ID NO: 4201457 - DNA, 25 bp, Homo sapien
cactctctggcatggaaaccacagt

SEQ ID NO: 4201458 - DNA, 25 bp, Homo sapien
gcagaatgcaggagaaatccactct

SEQ ID NO: 4201459 - DNA, 25 bp, Homo sapien
aaaccactggcagaatgcaggagaa

SEQ ID NO: 4201460 - DNA, 25 bp, Homo sapien
tttagagtaaggactactatgcact

SEQ ID NO: 4201461 - DNA, 25 bp, Homo sapien
caagaaggagttgttctttgcctct

SEQ ID NO: 4201462 - DNA, 25 bp, Homo sapien
taatgatcaaattggtttaaccaca

SEQ ID NO: 4201463 - DNA, 25 bp, Homo sapien
tgaagtgtacaatgattattagcca

SEQ ID NO: 4201464 - DNA, 25 bp, Homo sapien
gatgatctcactagagggaatgtcc

SEQ ID NO: 4201465 - DNA, 25 bp, Homo sapien
taatatgttctcgtagtcacagtcc

SEQ ID NO: 4201466 - DNA, 25 bp, Homo sapien
tataacaaggtaatgagaatgcctc

SEQ ID NO: 4201467 - DNA, 25 bp, Homo sapien
ctttctcaagaagggacaatcctgt

SEQ ID NO: 4201468 - DNA, 25 bp, Homo sapien
tgtgaattatgaagaggaatttcat

SEQ ID NO: 4201469 - DNA, 25 bp, Homo sapien
tgtatgtgaattatgaagaggaatt

SEQ ID NO: 4201470 - DNA, 25 bp, Homo sapien
ctgtatgtgaattatgaagaggaat

SEQ ID NO: 4201471 - DNA, 25 bp, Homo sapien
tatgtgaattatgaagaggaatttc

SEQ ID NO: 4201472 - DNA, 25 bp, Homo sapien
gaagctctgtcacttggatctcacg

SEQ ID NO: 4201473 - DNA, 25 bp, Homo sapien
tcaatattgagcacaggcaggacat

SEQ ID NO: 4201474 - DNA, 25 bp, Homo sapien
ggtccaggtgtagatgtagccatca

SEQ ID NO: 4201475 - DNA, 25 bp, Homo sapien
tctcacgtccataggtacgaacagc

SEQ ID NO: 4201476 - DNA, 25 bp, Homo sapien
tatgggtggagcgagtctttctcca

SEQ ID NO: 4201477 - DNA, 25 bp, Homo sapien
gggtctgtgccaatgcagctagatc

SEQ ID NO: 4201478 - DNA, 25 bp, Homo sapien
caatgcagctagatccagtatgggt

SEQ ID NO: 4201479 - DNA, 25 bp, Homo sapien
cagctagatccagtatgggtggagc

SEQ ID NO: 4201480 - DNA, 25 bp, Homo sapien
tacgagtggattgtcagatatgcct

SEQ ID NO: 4201481 - DNA, 25 bp, Homo sapien
ctgcggcaggtccacagtaagtttc

SEQ ID NO: 4201482 - DNA, 25 bp, Homo sapien
cagcattgttctcaccgagtttgta

SEQ ID NO: 4201483 - DNA, 25 bp, Homo sapien
agtttgttgcggatgaaatcagcca

SEQ ID NO: 4201484 - DNA, 25 bp, Homo sapien
cattatttagctgctcaagtgatta

SEQ ID NO: 4201485 - DNA, 25 bp, Homo sapien
cattgacatgtgatatttctatgag

SEQ ID NO: 4201486 - DNA, 25 bp, Homo sapien
caagtgattatgtcttgattgttca

SEQ ID NO: 4201487 - DNA, 25 bp, Homo sapien
tatcacccaaatgtgacaaattcct

SEQ ID NO: 4201488 - DNA, 25 bp, Homo sapien
gatttggagacttttagagtagccc

SEQ ID NO: 4201489 - DNA, 25 bp, Homo sapien
actgaaatgcttggcggtgctaaca

SEQ ID NO: 4201490 - DNA, 25 bp, Homo sapien
taaacttgctaactctgaggcttgg

SEQ ID NO: 4201491 - DNA, 25 bp, Homo sapien
aatactgtgagcacccattgggaac

SEQ ID NO: 4201492 - DNA, 25 bp, Homo sapien
tacctgtcttgtactctggtaaaga

SEQ ID NO: 4201493 - DNA, 25 bp, Homo sapien
tctacttactctacttctttggcaa

SEQ ID NO: 4201494 - DNA, 25 bp, Homo sapien
taacagtcaccttaagtagcatgcc

SEQ ID NO: 4201495 - DNA, 25 bp, Homo sapien
ttggcgtgctaaactaaattcagac

SEQ ID NO: 4201496 - DNA, 25 bp, Homo sapien
gcattcaagtgcctacacaacctgg

SEQ ID NO: 4201497 - DNA, 25 bp, Homo sapien
gaacactcgatacaggatgaccctc

SEQ ID NO: 4201498 - DNA, 25 bp, Homo sapien
ggttacctcattgattggcccttgc

SEQ ID NO: 4201499 - DNA, 25 bp, Homo sapien
gactcttccctaaggagaacactcg

SEQ ID NO: 4201500 - DNA, 25 bp, Homo sapien
gaatgcctttttctcgttgatgaca

SEQ ID NO: 4201501 - DNA, 25 bp, Homo sapien
tttaaacacctctgctaggtcactg

SEQ ID NO: 4201502 - DNA, 25 bp, Homo sapien
tattcccagaacgttcaggcttagc

SEQ ID NO: 4201503 - DNA, 25 bp, Homo sapien
tagatgccagtagagctcgacagtt

SEQ ID NO: 4201504 - DNA, 25 bp, Homo sapien
gaggccttggtcctagagcaaaaga

SEQ ID NO: 4201505 - DNA, 25 bp, Homo sapien
gaaagttctgagtttagccatccct

SEQ ID NO: 4201506 - DNA, 25 bp, Homo sapien
tgtcacatctagctcgtagcccaag

SEQ ID NO: 4201507 - DNA, 25 bp, Homo sapien
gaaactcccctttcgtgactgtgca

SEQ ID NO: 4201508 - DNA, 25 bp, Homo sapien
cagttgttgcaaaccaggtccggcc

SEQ ID NO: 4201509 - DNA, 25 bp, Homo sapien
cgtcatcggcatcttttggcaacag

SEQ ID NO: 4201510 - DNA, 25 bp, Homo sapien
tgactgacccctgctaagaatggta

SEQ ID NO: 4201511 - DNA, 25 bp, Homo sapien
tctcttaggaagcattgagcccctc

SEQ ID NO: 4201512 - DNA, 25 bp, Homo sapien
tatgtcaaactgatgagggcgtggc

SEQ ID NO: 4201513 - DNA, 25 bp, Homo sapien
ggcgtggccgtaagacttcaaggat

SEQ ID NO: 4201514 - DNA, 25 bp, Homo sapien
tcattccggttatgaaaccggctat

SEQ ID NO: 4201515 - DNA, 25 bp, Homo sapien
tatttactgcaggagaattagccat

SEQ ID NO: 4201516 - DNA, 25 bp, Homo sapien
cctagggaaaggctctctgcgctca

SEQ ID NO: 4201517 - DNA, 25 bp, Homo sapien
cttctcataagaaccattgccctcc

SEQ ID NO: 4201518 - DNA, 25 bp, Homo sapien
tcctagggaaaggctctctgcgctc

SEQ ID NO: 4201519 - DNA, 25 bp, Homo sapien
caccttctcataagaaccattgccc

SEQ ID NO: 4201520 - DNA, 25 bp, Homo sapien
cgtattatatgcttattcaggaccc

SEQ ID NO: 4201521 - DNA, 25 bp, Homo sapien
gcacactgccaaacaaatgccctgt

SEQ ID NO: 4201522 - DNA, 25 bp, Homo sapien
gcaagaatgtcttccctaataccct

SEQ ID NO: 4201523 - DNA, 25 bp, Homo sapien
gaagttgtttacctgtttgcaggca

SEQ ID NO: 4201524 - DNA, 25 bp, Homo sapien
agattgttgtagctcccgggccata

SEQ ID NO: 4201525 - DNA, 25 bp, Homo sapien
tacttggtgccgtgcagtgaggcaa

SEQ ID NO: 4201526 - DNA, 25 bp, Homo sapien
tcacagtagctttagccagggcatt

SEQ ID NO: 4201527 - DNA, 25 bp, Homo sapien
ccatatgtgtacttggtgccgtgca

SEQ ID NO: 4201528 - DNA, 25 bp, Homo sapien
ctttcgttggctttttaggcacatg

SEQ ID NO: 4201529 - DNA, 25 bp, Homo sapien
ggctttttaggcacatggttctttg

SEQ ID NO: 4201530 - DNA, 25 bp, Homo sapien
aggcacatggttctttgcacagttc

SEQ ID NO: 4201531 - DNA, 25 bp, Homo sapien
tttaggcacatggttctttgcacag

SEQ ID NO: 4201532 - DNA, 25 bp, Homo sapien
aggcaaaagccacatgctttaaact

SEQ ID NO: 4201533 - DNA, 25 bp, Homo sapien
agccacatgctttaaactatcagaa

SEQ ID NO: 4201534 - DNA, 25 bp, Homo sapien
caaaagccacatgctttaaactatc

SEQ ID NO: 4201535 - DNA, 25 bp, Homo sapien
aaagccacatgctttaaactatcag

SEQ ID NO: 4201536 - DNA, 25 bp, Homo sapien
gccatatctgcctgtatctcgaagt

SEQ ID NO: 4201537 - DNA, 25 bp, Homo sapien
tatctcgaagttcaaaggtgaagga

SEQ ID NO: 4201538 - DNA, 25 bp, Homo sapien
caggtagcccggatctgggattctg

SEQ ID NO: 4201539 - DNA, 25 bp, Homo sapien
tggtcataagcccagtcgtcagagc

SEQ ID NO: 4201540 - DNA, 25 bp, Homo sapien
tagtacaggtgttccaggacgtagc

SEQ ID NO: 4201541 - DNA, 25 bp, Homo sapien
ctagtacaggtgttccaggacgtag

SEQ ID NO: 4201542 - DNA, 25 bp, Homo sapien
tacaggtgttccaggacgtagctgg

SEQ ID NO: 4201543 - DNA, 25 bp, Homo sapien
gtacaggtgttccaggacgtagctg

SEQ ID NO: 4201544 - DNA, 25 bp, Homo sapien
tatgatcaatacgaaaagatctacc

SEQ ID NO: 4201545 - DNA, 25 bp, Homo sapien
gatctacctagtttaatagacccag

SEQ ID NO: 4201546 - DNA, 25 bp, Homo sapien
atagacccagaagcttaaaagaaag

SEQ ID NO: 4201547 - DNA, 25 bp, Homo sapien
taaaagaaagattgggatctgcaaa

SEQ ID NO: 4201548 - DNA, 25 bp, Homo sapien
ttctttgcctgccttgagaccctct

SEQ ID NO: 4201549 - DNA, 25 bp, Homo sapien
tcttctttgcctgccttgagaccct

SEQ ID NO: 4201550 - DNA, 25 bp, Homo sapien
ctttgcctgccttgagaccctctgg

SEQ ID NO: 4201551 - DNA, 25 bp, Homo sapien
ttcttctttgcctgccttgagaccc

SEQ ID NO: 4201552 - DNA, 25 bp, Homo sapien
ggagcaattgcaagagtggtagcaa

SEQ ID NO: 4201553 - DNA, 25 bp, Homo sapien
agtggtagcaatcaaacccacaggc

SEQ ID NO: 4201554 - DNA, 25 bp, Homo sapien
caaagcggacaggagcaattgcaag

SEQ ID NO: 4201555 - DNA, 25 bp, Homo sapien
ctgtcaaagcggacaggagcaattg

SEQ ID NO: 4201556 - DNA, 25 bp, Homo sapien
gcttgtttttcatcctggggcttca

SEQ ID NO: 4201557 - DNA, 25 bp, Homo sapien
ctcattggttttggccaagtccttt

SEQ ID NO: 4201558 - DNA, 25 bp, Homo sapien
gggcttcacgcggaacaccttctcc

SEQ ID NO: 4201559 - DNA, 25 bp, Homo sapien
ggttttggccaagtcctttatgatg

SEQ ID NO: 4201560 - DNA, 25 bp, Homo sapien
aatagtcttttgtagtcccatgggc

SEQ ID NO: 4201561 - DNA, 25 bp, Homo sapien
tcccatgggcattgacagtaaaata

SEQ ID NO: 4201562 - DNA, 25 bp, Homo sapien
cagaacaggtgaagtattggccatt

SEQ ID NO: 4201563 - DNA, 25 bp, Homo sapien
gatagctcctgctttccccttatgt

SEQ ID NO: 4201564 - DNA, 25 bp, Homo sapien
taactcggaaatccaccatcatatt

SEQ ID NO: 4201565 - DNA, 25 bp, Homo sapien
gattccttctcactaactcggaaat

SEQ ID NO: 4201566 - DNA, 25 bp, Homo sapien
ttattttgatccaaggcagactgga

SEQ ID NO: 4201567 - DNA, 25 bp, Homo sapien
catattagcagctacgtggtgggtg

SEQ ID NO: 4201568 - DNA, 25 bp, Homo sapien
atcatcatatatgcaagtattttat

SEQ ID NO: 4201569 - DNA, 25 bp, Homo sapien
catcatcatatatgcaagtatttta

SEQ ID NO: 4201570 - DNA, 25 bp, Homo sapien
gtcatcatcatatatgcaagtattt

SEQ ID NO: 4201571 - DNA, 25 bp, Homo sapien
tcatcatcatatatgcaagtatttt

SEQ ID NO: 4201572 - DNA, 25 bp, Homo sapien
tttgacaggggaatgataaaataca

SEQ ID NO: 4201573 - DNA, 25 bp, Homo sapien
ttgacaggggaatgataaaatacat

SEQ ID NO: 4201574 - DNA, 25 bp, Homo sapien
ctgtttgacaggggaatgataaaat

SEQ ID NO: 4201575 - DNA, 25 bp, Homo sapien
gtttgacaggggaatgataaaatac

SEQ ID NO: 4201576 - DNA, 25 bp, Homo sapien
tctcttcttgtagatcatgaatcaa

SEQ ID NO: 4201577 - DNA, 25 bp, Homo sapien
gtgcctgcctgggatatcttcttta

SEQ ID NO: 4201578 - DNA, 25 bp, Homo sapien
attattgtattttgcgtagctgtgc

SEQ ID NO: 4201579 - DNA, 25 bp, Homo sapien
tgtattttgcgtagctgtgcctgcc

SEQ ID NO: 4201580 - DNA, 25 bp, Homo sapien
cttcagaacatatagtggattatct

SEQ ID NO: 4201581 - DNA, 25 bp, Homo sapien
tagatccaattttaatacgagagac

SEQ ID NO: 4201582 - DNA, 25 bp, Homo sapien
agaccatttcaggatacttatccat

SEQ ID NO: 4201583 - DNA, 25 bp, Homo sapien
tagtggattatcttcaacagtagat

SEQ ID NO: 4201584 - DNA, 25 bp, Homo sapien
attctcgtgcgtgaatgccacaatc

SEQ ID NO: 4201585 - DNA, 25 bp, Homo sapien
gaatgccacaatccgtaaaaatagc

SEQ ID NO: 4201586 - DNA, 25 bp, Homo sapien
agacccattctcgtgcgtgaatgcc

SEQ ID NO: 4201587 - DNA, 25 bp, Homo sapien
tagacaaaccactggcagaatgctg

SEQ ID NO: 4201588 - DNA, 25 bp, Homo sapien
tcttgggaagtccttctaggtacat

SEQ ID NO: 4201589 - DNA, 25 bp, Homo sapien
ctcttgggaagtccttctaggtaca

SEQ ID NO: 4201590 - DNA, 25 bp, Homo sapien
cactcttgggaagtccttctaggta

SEQ ID NO: 4201591 - DNA, 25 bp, Homo sapien
cattgaacacaggaagaatgtaaaa

SEQ ID NO: 4201592 - DNA, 25 bp, Homo sapien
tatatccatcaacattgaacacagg

SEQ ID NO: 4201593 - DNA, 25 bp, Homo sapien
ctttgtccatgaccaaatatatcca

SEQ ID NO: 4201594 - DNA, 25 bp, Homo sapien
tgtaaaaattcattcggtccaagag

SEQ ID NO: 4201595 - DNA, 25 bp, Homo sapien
tcagtgccgatgcatttggagtttt

SEQ ID NO: 4201596 - DNA, 25 bp, Homo sapien
gaggtcagtgccgatgcatttggag

SEQ ID NO: 4201597 - DNA, 25 bp, Homo sapien
ggtcagtgccgatgcatttggagtt

SEQ ID NO: 4201598 - DNA, 25 bp, Homo sapien
gttgaggtcagtgccgatgcatttg

SEQ ID NO: 4201599 - DNA, 25 bp, Homo sapien
gtctctttctcggactctggtgcag

SEQ ID NO: 4201600 - DNA, 25 bp, Homo sapien
cccgatagttatctgcacatgggtc

SEQ ID NO: 4201601 - DNA, 25 bp, Homo sapien
tatccatagggaaacaatagcatct

SEQ ID NO: 4201602 - DNA, 25 bp, Homo sapien
caagtcctcatggttaggtggcagt

SEQ ID NO: 4201603 - DNA, 25 bp, Homo sapien
tatcgagttgatagaacatcagtgc

SEQ ID NO: 4201604 - DNA, 25 bp, Homo sapien
tgtagcgggtttcatatcgagttga

SEQ ID NO: 4201605 - DNA, 25 bp, Homo sapien
gaacatcagtgccaatctttgcaac

SEQ ID NO: 4201606 - DNA, 25 bp, Homo sapien
tgttgattctattgggccatagatg

SEQ ID NO: 4201607 - DNA, 25 bp, Homo sapien
tgtgatttccaagggttaaagggca

SEQ ID NO: 4201608 - DNA, 25 bp, Homo sapien
gcaagcttggtagcaaaggaggtaa

SEQ ID NO: 4201609 - DNA, 25 bp, Homo sapien
ggttaaagggcatggctattctatt

SEQ ID NO: 4201610 - DNA, 25 bp, Homo sapien
gcagtagctctctatttgcagtcga

SEQ ID NO: 4201611 - DNA, 25 bp, Homo sapien
gcacgttggctttatccgggattct

SEQ ID NO: 4201612 - DNA, 25 bp, Homo sapien
cccaggtcataagcccagtctaaag

SEQ ID NO: 4201613 - DNA, 25 bp, Homo sapien
tagcatggtctctctgcacgttggc

SEQ ID NO: 4201614 - DNA, 25 bp, Homo sapien
tatctcggagctcaaaggcaaatgt

SEQ ID NO: 4201615 - DNA, 25 bp, Homo sapien
cagtaacatgggacttaaatgagca

SEQ ID NO: 4201616 - DNA, 25 bp, Homo sapien
taaagctacttcgttatggtgctac

SEQ ID NO: 4201617 - DNA, 25 bp, Homo sapien
cataaattgatgaagccacatggtg

SEQ ID NO: 4201618 - DNA, 25 bp, Homo sapien
tctgctgggtccaaacttcacttgg

SEQ ID NO: 4201619 - DNA, 25 bp, Homo sapien
taatattgattattaatgctataga

SEQ ID NO: 4201620 - DNA, 25 bp, Homo sapien
atacagagaatatagtttatcataa

SEQ ID NO: 4201621 - DNA, 25 bp, Homo sapien
tattgattattaatgctatagagaa

SEQ ID NO: 4201622 - DNA, 25 bp, Homo sapien
tacagagaatatagtttatcataaa

SEQ ID NO: 4201623 - DNA, 25 bp, Homo sapien
taatgttcacttagccaatgagcac

SEQ ID NO: 4201624 - DNA, 25 bp, Homo sapien
cccacgttctgaagctagtttggaa

SEQ ID NO: 4201625 - DNA, 25 bp, Homo sapien
gaagggacctctgatatgacattta

SEQ ID NO: 4201626 - DNA, 25 bp, Homo sapien
tagcacaacttgtaacttgggtaca

SEQ ID NO: 4201627 - DNA, 25 bp, Homo sapien
cacaacatccgtccctttggaaagg

SEQ ID NO: 4201628 - DNA, 25 bp, Homo sapien
gattttagagaacactatgcagtct

SEQ ID NO: 4201629 - DNA, 25 bp, Homo sapien
tagaacctttatttgtatggccatg

SEQ ID NO: 4201630 - DNA, 25 bp, Homo sapien
gaatagtttgtgaatggcatcccag

SEQ ID NO: 4201631 - DNA, 25 bp, Homo sapien
gagagcagcaattgcacctgttgtt

SEQ ID NO: 4201632 - DNA, 25 bp, Homo sapien
tactttataccccatcgtagtggaa

SEQ ID NO: 4201633 - DNA, 25 bp, Homo sapien
gagggtccataactcccatattgta

SEQ ID NO: 4201634 - DNA, 25 bp, Homo sapien
tgaagaaccacacttgagagcagca

SEQ ID NO: 4201635 - DNA, 25 bp, Homo sapien
gtggacctgcactcagtggagccat

SEQ ID NO: 4201636 - DNA, 25 bp, Homo sapien
cttgggtggacctgcactcagtgga

SEQ ID NO: 4201637 - DNA, 25 bp, Homo sapien
cagctttcttgggtggacctgcact

SEQ ID NO: 4201638 - DNA, 25 bp, Homo sapien
gctttcttgggtggacctgcactca

SEQ ID NO: 4201639 - DNA, 25 bp, Homo sapien
tgggaacttgtttcggaaattgctg

SEQ ID NO: 4201640 - DNA, 25 bp, Homo sapien
ccttgccctgttggataaggctgac

SEQ ID NO: 4201641 - DNA, 25 bp, Homo sapien
cattgtgtcgcgtgtttgggaactt

SEQ ID NO: 4201642 - DNA, 25 bp, Homo sapien
tggtccaagccattgtgtcgcgtgt

SEQ ID NO: 4201643 - DNA, 25 bp, Homo sapien
gaatgcttcggataaagtctccaga

SEQ ID NO: 4201644 - DNA, 25 bp, Homo sapien
gcttcggataaagtctccagataca

SEQ ID NO: 4201645 - DNA, 25 bp, Homo sapien
tgcttggctgaatgcttcggataaa

SEQ ID NO: 4201646 - DNA, 25 bp, Homo sapien
ggacatggggagctcaatttctgaa

SEQ ID NO: 4201647 - DNA, 25 bp, Homo sapien
aatgctagagcacccgctatgggaa

SEQ ID NO: 4201648 - DNA, 25 bp, Homo sapien
agcacccgctatgggaagctggaga

SEQ ID NO: 4201649 - DNA, 25 bp, Homo sapien
tcatccccaaaaatgctagagcacc

SEQ ID NO: 4201650 - DNA, 25 bp, Homo sapien
cccaaaaatgctagagcacccgcta

SEQ ID NO: 4201651 - DNA, 25 bp, Homo sapien
tgattgggcctcctgtaagaagtgg

SEQ ID NO: 4201652 - DNA, 25 bp, Homo sapien
ttgtggtgattgggcctcctgtaag

SEQ ID NO: 4201653 - DNA, 25 bp, Homo sapien
tggtgattgggcctcctgtaagaag

SEQ ID NO: 4201654 - DNA, 25 bp, Homo sapien
gtaagaagtggggtgagtctggcat

SEQ ID NO: 4201655 - DNA, 25 bp, Homo sapien
gctgaagccagaggttctttctttc

SEQ ID NO: 4201656 - DNA, 25 bp, Homo sapien
gaagccagaggttctttctttcctc

SEQ ID NO: 4201657 - DNA, 25 bp, Homo sapien
ggcatgctgctgaagccagaggttc

SEQ ID NO: 4201658 - DNA, 25 bp, Homo sapien
ctgctgaagccagaggttctttctt

SEQ ID NO: 4201659 - DNA, 25 bp, Homo sapien
ctactctccttgtgacagatgagga

SEQ ID NO: 4201660 - DNA, 25 bp, Homo sapien
agaggtcccgcatgccttctggtgg

SEQ ID NO: 4201661 - DNA, 25 bp, Homo sapien
tgccgttgcgggttgtgtgactcca

SEQ ID NO: 4201662 - DNA, 25 bp, Homo sapien
actctccttgtgacagatgaggaca

SEQ ID NO: 4201663 - DNA, 25 bp, Homo sapien
ctgagggataagacatgtctcccta

SEQ ID NO: 4201664 - DNA, 25 bp, Homo sapien
gagaggcctggtatagagcagttgc

SEQ ID NO: 4201665 - DNA, 25 bp, Homo sapien
ctaagagaggcctggtatagagcag

SEQ ID NO: 4201666 - DNA, 25 bp, Homo sapien
tgagggataagacatgtctccctaa

SEQ ID NO: 4201667 - DNA, 25 bp, Homo sapien
catctccagcagaagccgtgttttt

SEQ ID NO: 4201668 - DNA, 25 bp, Homo sapien
ccagcagaagccgtgtttttccgca

SEQ ID NO: 4201669 - DNA, 25 bp, Homo sapien
tctccagcagaagccgtgtttttcc

SEQ ID NO: 4201670 - DNA, 25 bp, Homo sapien
gcagaagccgtgtttttccgcacac

SEQ ID NO: 4201671 - DNA, 25 bp, Homo sapien
ttttgattgccacagcattttgctg

SEQ ID NO: 4201672 - DNA, 25 bp, Homo sapien
gctgacagctcactgtgatgatttg

SEQ ID NO: 4201673 - DNA, 25 bp, Homo sapien
tgtgtttaggatccagaggctgctt

SEQ ID NO: 4201674 - DNA, 25 bp, Homo sapien
tgctgttgcaccgtcatcaaaagaa

SEQ ID NO: 4201675 - DNA, 25 bp, Homo sapien
tttcctgaatgacagcaaatggtta

SEQ ID NO: 4201676 - DNA, 25 bp, Homo sapien
cctgaatgacagcaaatggttattc

SEQ ID NO: 4201677 - DNA, 25 bp, Homo sapien
tgataaaatccttttcctgaatgac

SEQ ID NO: 4201678 - DNA, 25 bp, Homo sapien
ttttcctgaatgacagcaaatggtt

SEQ ID NO: 4201679 - DNA, 25 bp, Homo sapien
tgagctgccagttccctaacaatgc

SEQ ID NO: 4201680 - DNA, 25 bp, Homo sapien
gtgccctcttctggttcggcttctt

SEQ ID NO: 4201681 - DNA, 25 bp, Homo sapien
caatgctgtttttaggcttccgatc

SEQ ID NO: 4201682 - DNA, 25 bp, Homo sapien
taggcttccgatctttttgatgaaa

SEQ ID NO: 4201683 - DNA, 25 bp, Homo sapien
cttggcgcagttgggagcttttcat

SEQ ID NO: 4201684 - DNA, 25 bp, Homo sapien
tactgaggccacatgagggcttggc

SEQ ID NO: 4201685 - DNA, 25 bp, Homo sapien
gaggccacatgagggcttggcgcag

SEQ ID NO: 4201686 - DNA, 25 bp, Homo sapien
atttactgaggccacatgagggctt

SEQ ID NO: 4201687 - DNA, 25 bp, Homo sapien
ttattgacatactgactgcttacac

SEQ ID NO: 4201688 - DNA, 25 bp, Homo sapien
cagagggtgggagcttattgacata

SEQ ID NO: 4201689 - DNA, 25 bp, Homo sapien
ggcaatgagtatctctgaggttcca

SEQ ID NO: 4201690 - DNA, 25 bp, Homo sapien
tggcaatgagtatctctgaggttcc

SEQ ID NO: 4201691 - DNA, 25 bp, Homo sapien
tatatggggcaatatccaatgtccc

SEQ ID NO: 4201692 - DNA, 25 bp, Homo sapien
tctcaggcttcctctatgcacgcgt

SEQ ID NO: 4201693 - DNA, 25 bp, Homo sapien
tgcacgcgtctatcttctatatggg

SEQ ID NO: 4201694 - DNA, 25 bp, Homo sapien
caatgtcccattcgttttgccattt

SEQ ID NO: 4201695 - DNA, 25 bp, Homo sapien
caagaggaacagagtttgctccaag

SEQ ID NO: 4201696 - DNA, 25 bp, Homo sapien
ggaccgaccccatggctgagaatat

SEQ ID NO: 4201697 - DNA, 25 bp, Homo sapien
aaagggtcccaagcagtccagagaa

SEQ ID NO: 4201698 - DNA, 25 bp, Homo sapien
ctgagaatatgacggcaagaggaac

SEQ ID NO: 4201699 - DNA, 25 bp, Homo sapien
gaacatagtcttccatctataccac

SEQ ID NO: 4201700 - DNA, 25 bp, Homo sapien
tcacagtttcattgattgactctac

SEQ ID NO: 4201701 - DNA, 25 bp, Homo sapien
ctttcagtggctgtgcagagtcgag

SEQ ID NO: 4201702 - DNA, 25 bp, Homo sapien
agctctctggtttactggaacatag

SEQ ID NO: 4201703 - DNA, 25 bp, Homo sapien
acgtggccgcgcacgctctcgctgc

SEQ ID NO: 4201704 - DNA, 25 bp, Homo sapien
agaagccggcaccgggagggagcgc

SEQ ID NO: 4201705 - DNA, 25 bp, Homo sapien
tgcgctcttatagcggccgtcacgt

SEQ ID NO: 4201706 - DNA, 25 bp, Homo sapien
gggaaccgagcgtctgccccgtgcg

SEQ ID NO: 4201707 - DNA, 25 bp, Homo sapien
agacggaagcaggaacgagagctcc

SEQ ID NO: 4201708 - DNA, 25 bp, Homo sapien
gcagctgacgcaggcagaaacacgc

SEQ ID NO: 4201709 - DNA, 25 bp, Homo sapien
ccttcgccgtgagagcaagaggaag

SEQ ID NO: 4201710 - DNA, 25 bp, Homo sapien
actttgcggcggtttcgtcctgccg

SEQ ID NO: 4201711 - DNA, 25 bp, Homo sapien
tggcgtaggcatcgtttgtggttag

SEQ ID NO: 4201712 - DNA, 25 bp, Homo sapien
ggcgtaggcatcgtttgtggttagt

SEQ ID NO: 4201713 - DNA, 25 bp, Homo sapien
ggcgagcacgaccagcctcctggtg

SEQ ID NO: 4201714 - DNA, 25 bp, Homo sapien
cgtaggcatcgtttgtggttagtgt

SEQ ID NO: 4201715 - DNA, 25 bp, Homo sapien
ggagctttgtcagcgtgacacccaa

SEQ ID NO: 4201716 - DNA, 25 bp, Homo sapien
gccactgtccaagacatctaccatg

SEQ ID NO: 4201717 - DNA, 25 bp, Homo sapien
tgaatactgtgtaagcgaccagcag

SEQ ID NO: 4201718 - DNA, 25 bp, Homo sapien
ttagatgagcagaatcgccactgtc

SEQ ID NO: 4201719 - DNA, 25 bp, Homo sapien
tgataaacgaagactccggaattga

SEQ ID NO: 4201720 - DNA, 25 bp, Homo sapien
gaaggctgataaacgaagactccgg

SEQ ID NO: 4201721 - DNA, 25 bp, Homo sapien
gaagactccggaattgaagcagtca

SEQ ID NO: 4201722 - DNA, 25 bp, Homo sapien
gcaacagctgattgtatgtttcaac

SEQ ID NO: 4201723 - DNA, 25 bp, Homo sapien
gacctgcgagatattcacactgaga

SEQ ID NO: 4201724 - DNA, 25 bp, Homo sapien
aacatgacctgcgagatattcacac

SEQ ID NO: 4201725 - DNA, 25 bp, Homo sapien
ttaaaaacatgacctgcgagatatt

SEQ ID NO: 4201726 - DNA, 25 bp, Homo sapien
ctgagctgaaaattccgggacttaa

SEQ ID NO: 4201727 - DNA, 25 bp, Homo sapien
tgtactttgcgtgctcttccacagt

SEQ ID NO: 4201728 - DNA, 25 bp, Homo sapien
aatgcttgtgtactttgcgtgctct

SEQ ID NO: 4201729 - DNA, 25 bp, Homo sapien
tggcagctggcttgtctactgtgga

SEQ ID NO: 4201730 - DNA, 25 bp, Homo sapien
tactgtggataacagggcagtgagt

SEQ ID NO: 4201731 - DNA, 25 bp, Homo sapien
ttatcagaaactgggcctatttgtt

SEQ ID NO: 4201732 - DNA, 25 bp, Homo sapien
tttatcagaaactgggcctatttgt

SEQ ID NO: 4201733 - DNA, 25 bp, Homo sapien
ctaggtcttctgagcagggtcacat

SEQ ID NO: 4201734 - DNA, 25 bp, Homo sapien
taggtcttctgagcagggtcacata

SEQ ID NO: 4201735 - DNA, 25 bp, Homo sapien
aggtcttctgagcagggtcacatac

SEQ ID NO: 4201736 - DNA, 25 bp, Homo sapien
cttgcaactacagacttggtacttt

SEQ ID NO: 4201737 - DNA, 25 bp, Homo sapien
tcgtagttgtaaagtagaacttcca

SEQ ID NO: 4201738 - DNA, 25 bp, Homo sapien
aagtagaacttccaaatccgacctg

SEQ ID NO: 4201739 - DNA, 25 bp, Homo sapien
acttccaaatccgacctgcatgagc

SEQ ID NO: 4201740 - DNA, 25 bp, Homo sapien
tgtaaagtagaacttccaaatccga

SEQ ID NO: 4201741 - DNA, 25 bp, Homo sapien
tttataggagcacataactggacct

SEQ ID NO: 4201742 - DNA, 25 bp, Homo sapien
cagatctctagacagtttaataatt

SEQ ID NO: 4201743 - DNA, 25 bp, Homo sapien
taaattagttaacagatctctagac

SEQ ID NO: 4201744 - DNA, 25 bp, Homo sapien
aattttataggagcacataactgga

SEQ ID NO: 4201745 - DNA, 25 bp, Homo sapien
gagtatatagagatgctgcttaggt

SEQ ID NO: 4201746 - DNA, 25 bp, Homo sapien
tgtgttcagtatgccttggtcccca

SEQ ID NO: 4201747 - DNA, 25 bp, Homo sapien
tgcttaggttataaataaacggcag

SEQ ID NO: 4201748 - DNA, 25 bp, Homo sapien
tgcccagctgctaaaaaatgtgttc

SEQ ID NO: 4201749 - DNA, 25 bp, Homo sapien
tattgtcagagcagcatctaaaggc

SEQ ID NO: 4201750 - DNA, 25 bp, Homo sapien
tcttcgaccgagatggcattcctcc

SEQ ID NO: 4201751 - DNA, 25 bp, Homo sapien
tctaaaggctgggttgggtccgata

SEQ ID NO: 4201752 - DNA, 25 bp, Homo sapien
tgcccatgcgatctcactccttgtg

SEQ ID NO: 4201753 - DNA, 25 bp, Homo sapien
gaaggtttagaccagcccaagagcc

SEQ ID NO: 4201754 - DNA, 25 bp, Homo sapien
gtcagaggttttagaggaccagctt

SEQ ID NO: 4201755 - DNA, 25 bp, Homo sapien
aaatggatagtggtagtgaatggtc

SEQ ID NO: 4201756 - DNA, 25 bp, Homo sapien
gaagagcaggcctggataagtcact

SEQ ID NO: 4201757 - DNA, 25 bp, Homo sapien
gttgggatcatgggcctcacttttg

SEQ ID NO: 4201758 - DNA, 25 bp, Homo sapien
taattccatggtttgactcgtccca

SEQ ID NO: 4201759 - DNA, 25 bp, Homo sapien
tcatgggcctcacttttgacacttt

SEQ ID NO: 4201760 - DNA, 25 bp, Homo sapien
tggtttgactcgtcccaggaaatgc

SEQ ID NO: 4201761 - DNA, 25 bp, Homo sapien
tgagcaggtgtctttgacaaggcca

SEQ ID NO: 4201762 - DNA, 25 bp, Homo sapien
ggatgagaaactctggatgagtcat

SEQ ID NO: 4201763 - DNA, 25 bp, Homo sapien
gacaaggccaaattgttgaagcaga

SEQ ID NO: 4201764 - DNA, 25 bp, Homo sapien
gtggtaaagatgttccaccacagga

SEQ ID NO: 4201765 - DNA, 25 bp, Homo sapien
gagtggcaggcgagtaagaattacc

SEQ ID NO: 4201766 - DNA, 25 bp, Homo sapien
cacggaccagcagtagtccatggcc

SEQ ID NO: 4201767 - DNA, 25 bp, Homo sapien
ctaatagtacttaatatagtggttt

SEQ ID NO: 4201768 - DNA, 25 bp, Homo sapien
caagtactgtatgacaggggtcccc

SEQ ID NO: 4201769 - DNA, 25 bp, Homo sapien
ccagtgtatagaccaagtctgaaag

SEQ ID NO: 4201770 - DNA, 25 bp, Homo sapien
gagaaagccagtgtatagaccaagt

SEQ ID NO: 4201771 - DNA, 25 bp, Homo sapien
caagagaaagccagtgtatagacca

SEQ ID NO: 4201772 - DNA, 25 bp, Homo sapien
aagccagtgtatagaccaagtctga

SEQ ID NO: 4201773 - DNA, 25 bp, Homo sapien
aaaagccaggatgaatcatcatgca

SEQ ID NO: 4201774 - DNA, 25 bp, Homo sapien
gaagacttcttgactcagtgaaaac

SEQ ID NO: 4201775 - DNA, 25 bp, Homo sapien
cataattgactctatgagagctgaa

SEQ ID NO: 4201776 - DNA, 25 bp, Homo sapien
cagtgaaaacattgggagaacaaag

SEQ ID NO: 4201777 - DNA, 25 bp, Homo sapien
ctgttcccatcgttccttccgttct

SEQ ID NO: 4201778 - DNA, 25 bp, Homo sapien
agtgtcaagtttcctcttgatgttg

SEQ ID NO: 4201779 - DNA, 25 bp, Homo sapien
tgaaaacctctagcaactgtaacag

SEQ ID NO: 4201780 - DNA, 25 bp, Homo sapien
aattcaggtctcgtgaaaggtacac

SEQ ID NO: 4201781 - DNA, 25 bp, Homo sapien
tgactgattttgaaccaggctctgc

SEQ ID NO: 4201782 - DNA, 25 bp, Homo sapien
gcatcttcagacactaaggacagga

SEQ ID NO: 4201783 - DNA, 25 bp, Homo sapien
catggatttgacctctgttgtgggc

SEQ ID NO: 4201784 - DNA, 25 bp, Homo sapien
tctggactccctagaaaagattttc

SEQ ID NO: 4201785 - DNA, 25 bp, Homo sapien
caaccaaaggtcataccagccactg

SEQ ID NO: 4201786 - DNA, 25 bp, Homo sapien
taagtatatatggatcacctctgca

SEQ ID NO: 4201787 - DNA, 25 bp, Homo sapien
cctttttgaggcagtagcaggtaag

SEQ ID NO: 4201788 - DNA, 25 bp, Homo sapien
caagttgatcagagtatgggttctc

SEQ ID NO: 4201789 - DNA, 25 bp, Homo sapien
gattagcccgctagcattaggagca

SEQ ID NO: 4201790 - DNA, 25 bp, Homo sapien
cagaatttgggttgactcctgagca

SEQ ID NO: 4201791 - DNA, 25 bp, Homo sapien
aaaaaaccaaatgctgacgaaatga

SEQ ID NO: 4201792 - DNA, 25 bp, Homo sapien
aatgagatctagagaacacgtcttc

SEQ ID NO: 4201793 - DNA, 25 bp, Homo sapien
gcagcaggagcctttggaactaaaa

SEQ ID NO: 4201794 - DNA, 25 bp, Homo sapien
gaggtattactgacacaatttcttc

SEQ ID NO: 4201795 - DNA, 25 bp, Homo sapien
gaattatactaaagattcattcttg

SEQ ID NO: 4201796 - DNA, 25 bp, Homo sapien
gttagtgttgtgaattatactaaag

SEQ ID NO: 4201797 - DNA, 25 bp, Homo sapien
aaatcaagtttttatcaggaatgag

SEQ ID NO: 4201798 - DNA, 25 bp, Homo sapien
caggaatgagatgatcacgttttat

SEQ ID NO: 4201799 - DNA, 25 bp, Homo sapien
tctgtggccaaaaaagtgctgttct

SEQ ID NO: 4201800 - DNA, 25 bp, Homo sapien
ggactccctgatacagtctgacttg

SEQ ID NO: 4201801 - DNA, 25 bp, Homo sapien
ttgttgtgcaacagccatcacaatc

SEQ ID NO: 4201802 - DNA, 25 bp, Homo sapien
catagatgcaagtaattctttggga

SEQ ID NO: 4201803 - DNA, 25 bp, Homo sapien
gagtgctgtgcccatagtctttttt

SEQ ID NO: 4201804 - DNA, 25 bp, Homo sapien
ttgctagtccagatatacaaaaggg

SEQ ID NO: 4201805 - DNA, 25 bp, Homo sapien
tacacataaacagagatcagaaact

SEQ ID NO: 4201806 - DNA, 25 bp, Homo sapien
tttacttaagactcagggttacatg

SEQ ID NO: 4201807 - DNA, 25 bp, Homo sapien
ttaccaaaagtctgacacatgtgct

SEQ ID NO: 4201808 - DNA, 25 bp, Homo sapien
ttttatattctttggatcccaggcc

SEQ ID NO: 4201809 - DNA, 25 bp, Homo sapien
tgttctggttcctattaaatctgtc

SEQ ID NO: 4201810 - DNA, 25 bp, Homo sapien
gagatctccatctactcatcaagat

SEQ ID NO: 4201811 - DNA, 25 bp, Homo sapien
atttgcatgtaagtgcatcacatag

SEQ ID NO: 4201812 - DNA, 25 bp, Homo sapien
aaatttgcatgtaagtgcatcacat

SEQ ID NO: 4201813 - DNA, 25 bp, Homo sapien
tttgcatgtaagtgcatcacatagt

SEQ ID NO: 4201814 - DNA, 25 bp, Homo sapien
tgcatgtaagtgcatcacatagttc

SEQ ID NO: 4201815 - DNA, 25 bp, Homo sapien
taagcgctcaataagggttggctat

SEQ ID NO: 4201816 - DNA, 25 bp, Homo sapien
gatagtacctcccaatagagctgtg

SEQ ID NO: 4201817 - DNA, 25 bp, Homo sapien
tgtacttagaccaatgcttggcaca

SEQ ID NO: 4201818 - DNA, 25 bp, Homo sapien
ttgaatttgctagtttacatttgac

SEQ ID NO: 4201819 - DNA, 25 bp, Homo sapien
tctgttggacttgcgatttgagcac

SEQ ID NO: 4201820 - DNA, 25 bp, Homo sapien
tttctgttggacttgcgatttgagc

SEQ ID NO: 4201821 - DNA, 25 bp, Homo sapien
ttggacttgcgatttgagcacttaa

SEQ ID NO: 4201822 - DNA, 25 bp, Homo sapien
catttctgttggacttgcgatttga

SEQ ID NO: 4201823 - DNA, 25 bp, Homo sapien
cctaggcagccacgagtctcatttc

SEQ ID NO: 4201824 - DNA, 25 bp, Homo sapien
tgacaaagatgtatacctgataact

SEQ ID NO: 4201825 - DNA, 25 bp, Homo sapien
tgataactactaccccaatcaagat

SEQ ID NO: 4201826 - DNA, 25 bp, Homo sapien
gattgtatccgtctccctcaaagta

SEQ ID NO: 4201827 - DNA, 25 bp, Homo sapien
ccccacaccccagcgccttgttcat

SEQ ID NO: 4201828 - DNA, 25 bp, Homo sapien
catggaaattttccacgcctctcat

SEQ ID NO: 4201829 - DNA, 25 bp, Homo sapien
cagtatggagttcatggaaattttc

SEQ ID NO: 4201830 - DNA, 25 bp, Homo sapien
ttgcagactgtccagtatggagttc

SEQ ID NO: 4201831 - DNA, 25 bp, Homo sapien
gactgtccagtatggagttcatgga

SEQ ID NO: 4201832 - DNA, 25 bp, Homo sapien
tcttcgctggcgagtaggggctcct

SEQ ID NO: 4201833 - DNA, 25 bp, Homo sapien
tctgttggtcgcatatgtggccgcc

SEQ ID NO: 4201834 - DNA, 25 bp, Homo sapien
gaaataaatgcattgtcttcgctgg

SEQ ID NO: 4201835 - DNA, 25 bp, Homo sapien
ccctgggcgatttgtgcagctgtat

SEQ ID NO: 4201836 - DNA, 25 bp, Homo sapien
ctggaaggaggcgtatcgaggcggc

SEQ ID NO: 4201837 - DNA, 25 bp, Homo sapien
tcgaggcggctcgaaaacgatccag

SEQ ID NO: 4201838 - DNA, 25 bp, Homo sapien
ctcggaatttgtccccggcttcagg

SEQ ID NO: 4201839 - DNA, 25 bp, Homo sapien
tgcgctcctgatccggcgctcggaa

SEQ ID NO: 4201840 - DNA, 25 bp, Homo sapien
ggcaaacgcccccatagctgtaata

SEQ ID NO: 4201841 - DNA, 25 bp, Homo sapien
atttcaggcaaacgcccccatagct

SEQ ID NO: 4201842 - DNA, 25 bp, Homo sapien
gaaaatggtcccgtccaccatttca

SEQ ID NO: 4201843 - DNA, 25 bp, Homo sapien
gagcagccaagtgcccacggggaaa

SEQ ID NO: 4201844 - DNA, 25 bp, Homo sapien
cgcattctccttccggtcacctcag

SEQ ID NO: 4201845 - DNA, 25 bp, Homo sapien
aacgcaaagcgaccagccctgccag

SEQ ID NO: 4201846 - DNA, 25 bp, Homo sapien
ttgacggtcccagggccgcattctc

SEQ ID NO: 4201847 - DNA, 25 bp, Homo sapien
ctgcagctggtccaaggttgacggt

SEQ ID NO: 4201848 - DNA, 25 bp, Homo sapien
attgtggagggtagattggaatgac

SEQ ID NO: 4201849 - DNA, 25 bp, Homo sapien
tggagggtagattggaatgactgac

SEQ ID NO: 4201850 - DNA, 25 bp, Homo sapien
gagggtagattggaatgactgacat

SEQ ID NO: 4201851 - DNA, 25 bp, Homo sapien
ttccattgtggagggtagattggaa

SEQ ID NO: 4201852 - DNA, 25 bp, Homo sapien
gtgcgactgttacccttccgtttgc

SEQ ID NO: 4201853 - DNA, 25 bp, Homo sapien
gtggccatcccccaaggctggcctg

SEQ ID NO: 4201854 - DNA, 25 bp, Homo sapien
tgcgactgttacccttccgtttgcc

SEQ ID NO: 4201855 - DNA, 25 bp, Homo sapien
tggccatcccccaaggctggcctgg

SEQ ID NO: 4201856 - DNA, 25 bp, Homo sapien
catgaggtgccaaactgtcaagtct

SEQ ID NO: 4201857 - DNA, 25 bp, Homo sapien
tctaagagaggcttcgcagacacct

SEQ ID NO: 4201858 - DNA, 25 bp, Homo sapien
gaaaagctttgaaacccagagcaaa

SEQ ID NO: 4201859 - DNA, 25 bp, Homo sapien
agtagtgtttgtgctccggatgcgc

SEQ ID NO: 4201860 - DNA, 25 bp, Homo sapien
tgtggctcccagggcactgggaccc

SEQ ID NO: 4201861 - DNA, 25 bp, Homo sapien
taaggtgtggctcccagggcactgg

SEQ ID NO: 4201862 - DNA, 25 bp, Homo sapien
ctaaggtgtggctcccagggcactg

SEQ ID NO: 4201863 - DNA, 25 bp, Homo sapien
aggtgtggctcccagggcactggga

SEQ ID NO: 4201864 - DNA, 25 bp, Homo sapien
atgacgccgggtcacgtgaacgcca

SEQ ID NO: 4201865 - DNA, 25 bp, Homo sapien
gaccccgcgctgaccgcgaatgtag

SEQ ID NO: 4201866 - DNA, 25 bp, Homo sapien
gaatgtaggactacttccgcgagcg

SEQ ID NO: 4201867 - DNA, 25 bp, Homo sapien
actacttccgcgagcgagccaatga

SEQ ID NO: 4201868 - DNA, 25 bp, Homo sapien
ttgcagggcaccacctgctgcgacc

SEQ ID NO: 4201869 - DNA, 25 bp, Homo sapien
gtggagaaggcgcaccgcggctggc

SEQ ID NO: 4201870 - DNA, 25 bp, Homo sapien
ccgaacgggtgcaggttgtacagct

SEQ ID NO: 4201871 - DNA, 25 bp, Homo sapien
gaaccggtccggctccagcttgcag

SEQ ID NO: 4201872 - DNA, 25 bp, Homo sapien
ttcggtccgctagctaggaggcctc

SEQ ID NO: 4201873 - DNA, 25 bp, Homo sapien
tatccgagatgagtggaatccagcc

SEQ ID NO: 4201874 - DNA, 25 bp, Homo sapien
tgtgagctttcaaaaaccgaccgga

SEQ ID NO: 4201875 - DNA, 25 bp, Homo sapien
aagaagtcccatccctagctagagc

SEQ ID NO: 4201876 - DNA, 25 bp, Homo sapien
tctggtgtgaaagagtaacggctgc

SEQ ID NO: 4201877 - DNA, 25 bp, Homo sapien
ccagcttttgcaacgtaaatactga

SEQ ID NO: 4201878 - DNA, 25 bp, Homo sapien
ctataaactcacaccgaaccagctg

SEQ ID NO: 4201879 - DNA, 25 bp, Homo sapien
taacggctgctcttacaactgtttg

SEQ ID NO: 4201880 - DNA, 25 bp, Homo sapien
tacccttgagctacatgacccgtga

SEQ ID NO: 4201881 - DNA, 25 bp, Homo sapien
catgactcttgaacctgctgtaagg

SEQ ID NO: 4201882 - DNA, 25 bp, Homo sapien
gtgcattaataggagctgtacccag

SEQ ID NO: 4201883 - DNA, 25 bp, Homo sapien
cactgggcattgagccggaatcctc

SEQ ID NO: 4201884 - DNA, 25 bp, Homo sapien
taagctttatgtgtgcagtgcctca

SEQ ID NO: 4201885 - DNA, 25 bp, Homo sapien
gatcagagctttagagttccttcaa

SEQ ID NO: 4201886 - DNA, 25 bp, Homo sapien
acaggagtctgtggaggctataacc

SEQ ID NO: 4201887 - DNA, 25 bp, Homo sapien
taacttgtccaaggcaacacaacga

SEQ ID NO: 4201888 - DNA, 25 bp, Homo sapien
tgatgagtcttttgatatacaacag

SEQ ID NO: 4201889 - DNA, 25 bp, Homo sapien
tatgagatatatgattcggaaatat

SEQ ID NO: 4201890 - DNA, 25 bp, Homo sapien
cccttatgagatatatgattcggaa

SEQ ID NO: 4201891 - DNA, 25 bp, Homo sapien
taaatacatgcccatttcatctata

SEQ ID NO: 4201892 - DNA, 25 bp, Homo sapien
tgtatcaggcttgtatcacttagca

SEQ ID NO: 4201893 - DNA, 25 bp, Homo sapien
ggtgtgcatgtatccattcaagtcc

SEQ ID NO: 4201894 - DNA, 25 bp, Homo sapien
actggtatcttctcattgctatgca

SEQ ID NO: 4201895 - DNA, 25 bp, Homo sapien
caatggatccttggactgtttccac

SEQ ID NO: 4201896 - DNA, 25 bp, Homo sapien
aggaatgaagattatactgagaatt

SEQ ID NO: 4201897 - DNA, 25 bp, Homo sapien
aaggaatgaagattatactgagaat

SEQ ID NO: 4201898 - DNA, 25 bp, Homo sapien
taatgtacatctggtctctgaaggc

SEQ ID NO: 4201899 - DNA, 25 bp, Homo sapien
gaatggtccctccacattatgccca

SEQ ID NO: 4201900 - DNA, 25 bp, Homo sapien
gggcctccgaaagcggcatttcaat

SEQ ID NO: 4201901 - DNA, 25 bp, Homo sapien
gaacgttcaaagtccaatagtgaga

SEQ ID NO: 4201902 - DNA, 25 bp, Homo sapien
tcttctgtccgtcttattcgattgt

SEQ ID NO: 4201903 - DNA, 25 bp, Homo sapien
tattcgattgttggtcttatgtgga

SEQ ID NO: 4201904 - DNA, 25 bp, Homo sapien
ccgtcttattcgattgttggtctta

SEQ ID NO: 4201905 - DNA, 25 bp, Homo sapien
cgattgttggtcttatgtggatggt

SEQ ID NO: 4201906 - DNA, 25 bp, Homo sapien
cttttttcatcagctaatcccgtag

SEQ ID NO: 4201907 - DNA, 25 bp, Homo sapien
gtgtaacagataatccagactgttc

SEQ ID NO: 4201908 - DNA, 25 bp, Homo sapien
ccgtagactccagtgtaacagataa

SEQ ID NO: 4201909 - DNA, 25 bp, Homo sapien
gcaggtgctgaaagtgggaatattt

SEQ ID NO: 4201910 - DNA, 25 bp, Homo sapien
atgtcatcagacaagacataggacg

SEQ ID NO: 4201911 - DNA, 25 bp, Homo sapien
ctggagggaatgtagcttgatgtca

SEQ ID NO: 4201912 - DNA, 25 bp, Homo sapien
gacataggacgaaatatcaggagca

SEQ ID NO: 4201913 - DNA, 25 bp, Homo sapien
cagacaagacataggacgaaatatc

SEQ ID NO: 4201914 - DNA, 25 bp, Homo sapien
ttttttccatcagatgtaagagaac

SEQ ID NO: 4201915 - DNA, 25 bp, Homo sapien
ttcctgagacaaattttttccatca

SEQ ID NO: 4201916 - DNA, 25 bp, Homo sapien
aaattttttccatcagatgtaagag

SEQ ID NO: 4201917 - DNA, 25 bp, Homo sapien
tttcctgagacaaattttttccatc

SEQ ID NO: 4201918 - DNA, 25 bp, Homo sapien
tgacaaccatgtagagatagcccac

SEQ ID NO: 4201919 - DNA, 25 bp, Homo sapien
tgcaaaaattgtggcgtgagtactg

SEQ ID NO: 4201920 - DNA, 25 bp, Homo sapien
gctgagacttttcaggatactggta

SEQ ID NO: 4201921 - DNA, 25 bp, Homo sapien
gatagcccacatgaggtaaggagaa

SEQ ID NO: 4201922 - DNA, 25 bp, Homo sapien
tgaataccgccccttaatatccttg

SEQ ID NO: 4201923 - DNA, 25 bp, Homo sapien
tctatgtgtccaaaagcctacttag

SEQ ID NO: 4201924 - DNA, 25 bp, Homo sapien
agcaggcaaaaccttggtgggattt

SEQ ID NO: 4201925 - DNA, 25 bp, Homo sapien
ggtgggatttttcatgcctcctaca

SEQ ID NO: 4201926 - DNA, 25 bp, Homo sapien
caccgcacagtgaaacactgcaggt

SEQ ID NO: 4201927 - DNA, 25 bp, Homo sapien
ctgcaccgcacagtgaaacactgca

SEQ ID NO: 4201928 - DNA, 25 bp, Homo sapien
cacagtgaaacactgcaggttgtta

SEQ ID NO: 4201929 - DNA, 25 bp, Homo sapien
cgcacagtgaaacactgcaggttgt

SEQ ID NO: 4201930 - DNA, 25 bp, Homo sapien
ggtggtgtccatgtacgggtcctcc

SEQ ID NO: 4201931 - DNA, 25 bp, Homo sapien
atgtacgggtcctcctcacgagctg

SEQ ID NO: 4201932 - DNA, 25 bp, Homo sapien
gtccatgtacgggtcctcctcacga

SEQ ID NO: 4201933 - DNA, 25 bp, Homo sapien
cttcagggtggtgtccatgtacggg

SEQ ID NO: 4201934 - DNA, 25 bp, Homo sapien
taatgcatcgtattcaattttgtgc

SEQ ID NO: 4201935 - DNA, 25 bp, Homo sapien
taagtatagaaggttatcaaaggct

SEQ ID NO: 4201936 - DNA, 25 bp, Homo sapien
tgtaaaactgccaccagtatttcca

SEQ ID NO: 4201937 - DNA, 25 bp, Homo sapien
gaattacaggcatagctgataatag

SEQ ID NO: 4201938 - DNA, 25 bp, Homo sapien
gcacagacatccatactgacaggtg

SEQ ID NO: 4201939 - DNA, 25 bp, Homo sapien
gtcaaaagtatgatgtggtttttaa

SEQ ID NO: 4201940 - DNA, 25 bp, Homo sapien
catccatactgacaggtgggcaagc

SEQ ID NO: 4201941 - DNA, 25 bp, Homo sapien
ggcttcaggttctgctttagtcaaa

SEQ ID NO: 4201942 - DNA, 25 bp, Homo sapien
gcattataggctcagtctttctcat

SEQ ID NO: 4201943 - DNA, 25 bp, Homo sapien
caggtcagttataaagtgtattaca

SEQ ID NO: 4201944 - DNA, 25 bp, Homo sapien
ccagaaactggcaggaatgcctggg

SEQ ID NO: 4201945 - DNA, 25 bp, Homo sapien
gacagtaaaaagtcctgtagtttca

SEQ ID NO: 4201946 - DNA, 25 bp, Homo sapien
ggtgagatcgtattcacaatataca

SEQ ID NO: 4201947 - DNA, 25 bp, Homo sapien
atctctttgtacagctgcactggtg

SEQ ID NO: 4201948 - DNA, 25 bp, Homo sapien
tattttgattttaacactggtatct

SEQ ID NO: 4201949 - DNA, 25 bp, Homo sapien
tcagctacaggaggtattttgattt

SEQ ID NO: 4201950 - DNA, 25 bp, Homo sapien
tcttataggtattgctatagtctac

SEQ ID NO: 4201951 - DNA, 25 bp, Homo sapien
cagctctgggttttgacagtcttat

SEQ ID NO: 4201952 - DNA, 25 bp, Homo sapien
ctgagaaggtgaatgcagctctggg

SEQ ID NO: 4201953 - DNA, 25 bp, Homo sapien
ctgggttttgacagtcttataggta

SEQ ID NO: 4201954 - DNA, 25 bp, Homo sapien
ctgctgtaacagtccccaaggtgcc

SEQ ID NO: 4201955 - DNA, 25 bp, Homo sapien
tgctgtaacagtccccaaggtgccc

SEQ ID NO: 4201956 - DNA, 25 bp, Homo sapien
gcagctcgcactaacagatgagcct

SEQ ID NO: 4201957 - DNA, 25 bp, Homo sapien
ccatcagggcagctcgcactaacag

SEQ ID NO: 4201958 - DNA, 25 bp, Homo sapien
ttgtatgtttaagcctagcacagtg

SEQ ID NO: 4201959 - DNA, 25 bp, Homo sapien
taacaaggttccaagaggtgtcacc

SEQ ID NO: 4201960 - DNA, 25 bp, Homo sapien
agtgtacccaaagttcaagatgact

SEQ ID NO: 4201961 - DNA, 25 bp, Homo sapien
tatcaggtaactaccagagatggaa

SEQ ID NO: 4201962 - DNA, 25 bp, Homo sapien
aatgtaaaagattaatcctctctcg

SEQ ID NO: 4201963 - DNA, 25 bp, Homo sapien
tgtccagtccgtgcgggccagaact

SEQ ID NO: 4201964 - DNA, 25 bp, Homo sapien
tgtaatccatcctctactgtccagt

SEQ ID NO: 4201965 - DNA, 25 bp, Homo sapien
gaacttcagccatagacaaaccaga

SEQ ID NO: 4201966 - DNA, 25 bp, Homo sapien
aatgtcactaagatcgatgaaaacc

SEQ ID NO: 4201967 - DNA, 25 bp, Homo sapien
tcaagatctcccattttcagagcca

SEQ ID NO: 4201968 - DNA, 25 bp, Homo sapien
gaagtatccagcttccttagatagc

SEQ ID NO: 4201969 - DNA, 25 bp, Homo sapien
aaaacccagaagtatccagcttcct

SEQ ID NO: 4201970 - DNA, 25 bp, Homo sapien
gaatcaacagccgaggttccagaat

SEQ ID NO: 4201971 - DNA, 25 bp, Homo sapien
cagccgaggttccagaatgaagcca

SEQ ID NO: 4201972 - DNA, 25 bp, Homo sapien
caacagccgaggttccagaatgaag

SEQ ID NO: 4201973 - DNA, 25 bp, Homo sapien
ctgttgaatcaacagccgaggttcc

SEQ ID NO: 4201974 - DNA, 25 bp, Homo sapien
cccagaactgaagccacaagcaatc

SEQ ID NO: 4201975 - DNA, 25 bp, Homo sapien
gtttccttcaagtgaagtgcaagct

SEQ ID NO: 4201976 - DNA, 25 bp, Homo sapien
ccacaagcaatccaggctgagtttc

SEQ ID NO: 4201977 - DNA, 25 bp, Homo sapien
gctcggttggaacaatctgtccctt

SEQ ID NO: 4201978 - DNA, 25 bp, Homo sapien
caccaatttaatgaggccatccaga

SEQ ID NO: 4201979 - DNA, 25 bp, Homo sapien
tgaggccatccagaaaaatcacatt

SEQ ID NO: 4201980 - DNA, 25 bp, Homo sapien
aaacagtaaaaggagcctctatatt

SEQ ID NO: 4201981 - DNA, 25 bp, Homo sapien
agtaaaaggagcctctatattccag

SEQ ID NO: 4201982 - DNA, 25 bp, Homo sapien
tagcactgataaagcgacagctggg

SEQ ID NO: 4201983 - DNA, 25 bp, Homo sapien
tccagataaatatagcactgataaa

SEQ ID NO: 4201984 - DNA, 25 bp, Homo sapien
gagcttcccaaaagtctaccaagag

SEQ ID NO: 4201985 - DNA, 25 bp, Homo sapien
gagttcctgaagtaccacatctggg

SEQ ID NO: 4201986 - DNA, 25 bp, Homo sapien
cgatgttcgcaatggtgtggtgtca

SEQ ID NO: 4201987 - DNA, 25 bp, Homo sapien
tgggagacatgccactagctgagct

SEQ ID NO: 4201988 - DNA, 25 bp, Homo sapien
gatgatattacgacgtgaacccatg

SEQ ID NO: 4201989 - DNA, 25 bp, Homo sapien
taagccataatgactacaggcattt

SEQ ID NO: 4201990 - DNA, 25 bp, Homo sapien
aatttttatcagctaaagaatcaga

SEQ ID NO: 4201991 - DNA, 25 bp, Homo sapien
taaattaagccataatgactacagg

SEQ ID NO: 4201992 - DNA, 25 bp, Homo sapien
tgtcaaatgaaggaccacatataag

SEQ ID NO: 4201993 - DNA, 25 bp, Homo sapien
caaatgaaggaccacatataagaga

SEQ ID NO: 4201994 - DNA, 25 bp, Homo sapien
tcaaatgaaggaccacatataagag

SEQ ID NO: 4201995 - DNA, 25 bp, Homo sapien
ctatgtcaaatgaaggaccacatat

SEQ ID NO: 4201996 - DNA, 25 bp, Homo sapien
catactctttcaagcgtgtacgaca

SEQ ID NO: 4201997 - DNA, 25 bp, Homo sapien
tgtacgacacagaacatggacactg

SEQ ID NO: 4201998 - DNA, 25 bp, Homo sapien
gaggccggcaatagtgtcttctgaa

SEQ ID NO: 4201999 - DNA, 25 bp, Homo sapien
gcctccgggcatctctctaacagta

SEQ ID NO: 4202000 - DNA, 25 bp, Homo sapien
taaaaacataatctgaaaaagcata

SEQ ID NO: 4202001 - DNA, 25 bp, Homo sapien
ctaaaaacataatctgaaaaagcat

SEQ ID NO: 4202002 - DNA, 25 bp, Homo sapien
aaaaacataatctgaaaaagcatac

SEQ ID NO: 4202003 - DNA, 25 bp, Homo sapien
ttctctgacaaagttcaggcaacag

SEQ ID NO: 4202004 - DNA, 25 bp, Homo sapien
gatgacaggtagagttgatacttct

SEQ ID NO: 4202005 - DNA, 25 bp, Homo sapien
tttattctctgacaaagttcaggca

SEQ ID NO: 4202006 - DNA, 25 bp, Homo sapien
cttttaatgatgacaggtagagttg

SEQ ID NO: 4202007 - DNA, 25 bp, Homo sapien
tactggaaagtgctccactaacaca

SEQ ID NO: 4202008 - DNA, 25 bp, Homo sapien
tgatgctgaggtgtaaagatgtggg

SEQ ID NO: 4202009 - DNA, 25 bp, Homo sapien
tgcaagtggggcaaagtaatcagac

SEQ ID NO: 4202010 - DNA, 25 bp, Homo sapien
atgtgggatgtctgtactggaaagt

SEQ ID NO: 4202011 - DNA, 25 bp, Homo sapien
tagtggtactgtctgctagcttcca

SEQ ID NO: 4202012 - DNA, 25 bp, Homo sapien
tcttccaagtcctaggttcctcatt

SEQ ID NO: 4202013 - DNA, 25 bp, Homo sapien
tagcttccacagttcccgtgaaaat

SEQ ID NO: 4202014 - DNA, 25 bp, Homo sapien
agtcacttaatcttccaagtcctag

SEQ ID NO: 4202015 - DNA, 25 bp, Homo sapien
accaaccaattagaagccagttcag

SEQ ID NO: 4202016 - DNA, 25 bp, Homo sapien
tcaatctcttcttacttaaccaacc

SEQ ID NO: 4202017 - DNA, 25 bp, Homo sapien
agaaaaatgttgcagtaccatcttc

SEQ ID NO: 4202018 - DNA, 25 bp, Homo sapien
ggcaagaaaaatgttgcagtaccat

SEQ ID NO: 4202019 - DNA, 25 bp, Homo sapien
caagaaaaatgttgcagtaccatct

SEQ ID NO: 4202020 - DNA, 25 bp, Homo sapien
aaaaatgttgcagtaccatcttctg

SEQ ID NO: 4202021 - DNA, 25 bp, Homo sapien
aattctggaccagttagtgacattc

SEQ ID NO: 4202022 - DNA, 25 bp, Homo sapien
caaatcatgttaatagctagacaag

SEQ ID NO: 4202023 - DNA, 25 bp, Homo sapien
cacatacactctagctaaaagagca

SEQ ID NO: 4202024 - DNA, 25 bp, Homo sapien
gaagtgaatagttaccactacacgg

SEQ ID NO: 4202025 - DNA, 25 bp, Homo sapien
gagtagaatttctgcccagccttaa

SEQ ID NO: 4202026 - DNA, 25 bp, Homo sapien
gaacagatggtcttaaggacgttat

SEQ ID NO: 4202027 - DNA, 25 bp, Homo sapien
gcttcaaaatagacctgtggcagat

SEQ ID NO: 4202028 - DNA, 25 bp, Homo sapien
catacagtctaatgatatcaccgct

SEQ ID NO: 4202029 - DNA, 25 bp, Homo sapien
tcctgtgtaacaaccgtgaaagaag

SEQ ID NO: 4202030 - DNA, 25 bp, Homo sapien
taacttgaacaaagtgaagagagcc

SEQ ID NO: 4202031 - DNA, 25 bp, Homo sapien
tacagggtaaccctacacacacagc

SEQ ID NO: 4202032 - DNA, 25 bp, Homo sapien
catgcagagtatggcactacagggt

SEQ ID NO: 4202033 - DNA, 25 bp, Homo sapien
cgagttgaggattgttgtaattaga

SEQ ID NO: 4202034 - DNA, 25 bp, Homo sapien
ttcctgggtctttcgagttgaggat

SEQ ID NO: 4202035 - DNA, 25 bp, Homo sapien
cctgggtctttcgagttgaggattg

SEQ ID NO: 4202036 - DNA, 25 bp, Homo sapien
tctttcgagttgaggattgttgtaa

SEQ ID NO: 4202037 - DNA, 25 bp, Homo sapien
ccagaatcaaggtacaggaggtttg

SEQ ID NO: 4202038 - DNA, 25 bp, Homo sapien
aagtgctatgacaaacaggcaaacc

SEQ ID NO: 4202039 - DNA, 25 bp, Homo sapien
caaaccagaatcaaggtacaggagg

SEQ ID NO: 4202040 - DNA, 25 bp, Homo sapien
caaacaggcaaaccagaatcaaggt

SEQ ID NO: 4202041 - DNA, 25 bp, Homo sapien
tgtttccagccgagactccctgaag

SEQ ID NO: 4202042 - DNA, 25 bp, Homo sapien
taagttctgtatcttaaatggccca

SEQ ID NO: 4202043 - DNA, 25 bp, Homo sapien
cccatggtgagcaagatcagttagg

SEQ ID NO: 4202044 - DNA, 25 bp, Homo sapien
gaaaaggcagaagttatcaaaaagc

SEQ ID NO: 4202045 - DNA, 25 bp, Homo sapien
tatctgatgggaatgggcaatgaaa

SEQ ID NO: 4202046 - DNA, 25 bp, Homo sapien
ggtatctgatgggaatgggcaatga

SEQ ID NO: 4202047 - DNA, 25 bp, Homo sapien
gtatctgatgggaatgggcaatgaa

SEQ ID NO: 4202048 - DNA, 25 bp, Homo sapien
cagttcctgggtcctagttatcaag

SEQ ID NO: 4202049 - DNA, 25 bp, Homo sapien
tcaagaggtctaacggctcctcgcc

SEQ ID NO: 4202050 - DNA, 25 bp, Homo sapien
tcgccaggaatcatgagctcactaa

SEQ ID NO: 4202051 - DNA, 25 bp, Homo sapien
taaacataactgtgtcaagtcggtg

SEQ ID NO: 4202052 - DNA, 25 bp, Homo sapien
tacacaggcggcatgaagcaaaaat

SEQ ID NO: 4202053 - DNA, 25 bp, Homo sapien
catactatatcgcagcagtggaggt

SEQ ID NO: 4202054 - DNA, 25 bp, Homo sapien
tgttgaatgccttacaactgatcat

SEQ ID NO: 4202055 - DNA, 25 bp, Homo sapien
cagactctgattcccaatttcagca

SEQ ID NO: 4202056 - DNA, 25 bp, Homo sapien
ggagattcggtcgtgtggtacttat

SEQ ID NO: 4202057 - DNA, 25 bp, Homo sapien
acaagtcttacgctccacatgtggc

SEQ ID NO: 4202058 - DNA, 25 bp, Homo sapien
gaggagaacggagagacacagcaaa

SEQ ID NO: 4202059 - DNA, 25 bp, Homo sapien
tggtacttattcagcgccggaaatg

SEQ ID NO: 4202060 - DNA, 25 bp, Homo sapien
tggaatccttatacatctgaaaatg

SEQ ID NO: 4202061 - DNA, 25 bp, Homo sapien
tatacaggtgattgtaccagtccct

SEQ ID NO: 4202062 - DNA, 25 bp, Homo sapien
tacctggtgttacatttttgtatca

SEQ ID NO: 4202063 - DNA, 25 bp, Homo sapien
cattgacgttttctctgtcgatcag

SEQ ID NO: 4202064 - DNA, 25 bp, Homo sapien
gagtccagagacctgttctcgccaa

SEQ ID NO: 4202065 - DNA, 25 bp, Homo sapien
tctcgccaaggcacgcaggcagaat

SEQ ID NO: 4202066 - DNA, 25 bp, Homo sapien
aacaagcaggatctgtcctagagcc

SEQ ID NO: 4202067 - DNA, 25 bp, Homo sapien
tcctagcggtgactcagaggtataa

SEQ ID NO: 4202068 - DNA, 25 bp, Homo sapien
cttgtgcctcgatgctgaggcatga

SEQ ID NO: 4202069 - DNA, 25 bp, Homo sapien
gagcctctgcacttagttaaagatg

SEQ ID NO: 4202070 - DNA, 25 bp, Homo sapien
gtgacttggtttaaatagataacta

SEQ ID NO: 4202071 - DNA, 25 bp, Homo sapien
ctgacctgacttcaaatggttattt

SEQ ID NO: 4202072 - DNA, 25 bp, Homo sapien
gacacaggagtgtcttccaagcacc

SEQ ID NO: 4202073 - DNA, 25 bp, Homo sapien
taccaaatgtgactaccaaaagggc

SEQ ID NO: 4202074 - DNA, 25 bp, Homo sapien
ggcactccacggtgatagatctgta

SEQ ID NO: 4202075 - DNA, 25 bp, Homo sapien
catcatgaaaaagacaacggagctc

SEQ ID NO: 4202076 - DNA, 25 bp, Homo sapien
tttgatgggtacacagaggttcagc

SEQ ID NO: 4202077 - DNA, 25 bp, Homo sapien
aaggttggccttgagtcgatcattg

SEQ ID NO: 4202078 - DNA, 25 bp, Homo sapien
taattttatggttacttcgtgggca

SEQ ID NO: 4202079 - DNA, 25 bp, Homo sapien
ttcatggcttactagggaattacca

SEQ ID NO: 4202080 - DNA, 25 bp, Homo sapien
aataagatgaaagaaggcaacacac

SEQ ID NO: 4202081 - DNA, 25 bp, Homo sapien
ataagatgaaagaaggcaacacaca

SEQ ID NO: 4202082 - DNA, 25 bp, Homo sapien
caaagatcaataagatgaaagaagg

SEQ ID NO: 4202083 - DNA, 25 bp, Homo sapien
agtatcaaagatcaataagatgaaa

SEQ ID NO: 4202084 - DNA, 25 bp, Homo sapien
catcaggccttagacttttgaaaaa

SEQ ID NO: 4202085 - DNA, 25 bp, Homo sapien
taccagtgagcttacaactgaggaa

SEQ ID NO: 4202086 - DNA, 25 bp, Homo sapien
taagttcatcagtagattcctgtgc

SEQ ID NO: 4202087 - DNA, 25 bp, Homo sapien
tctgtagcagtgaaagtccagagct

SEQ ID NO: 4202088 - DNA, 25 bp, Homo sapien
gttgttgtcatttggagtagaagag

SEQ ID NO: 4202089 - DNA, 25 bp, Homo sapien
gtgttgttgtcatttggagtagaag

SEQ ID NO: 4202090 - DNA, 25 bp, Homo sapien
tgttgttgtcatttggagtagaaga

SEQ ID NO: 4202091 - DNA, 25 bp, Homo sapien
ttgttgtcatttggagtagaagagg

SEQ ID NO: 4202092 - DNA, 25 bp, Homo sapien
ggaccttgcccatatgccacagact

SEQ ID NO: 4202093 - DNA, 25 bp, Homo sapien
tcatttcaggaggaacttactacca

SEQ ID NO: 4202094 - DNA, 25 bp, Homo sapien
taagccatactctactctgccactg

SEQ ID NO: 4202095 - DNA, 25 bp, Homo sapien
tagtaaagaagttaggcttgcaggc

SEQ ID NO: 4202096 - DNA, 25 bp, Homo sapien
tgtttgctcattctaaacgacacgg

SEQ ID NO: 4202097 - DNA, 25 bp, Homo sapien
gggatggcacgggaagataatcttc

SEQ ID NO: 4202098 - DNA, 25 bp, Homo sapien
tgggatggtgaagacaactgtttgc

SEQ ID NO: 4202099 - DNA, 25 bp, Homo sapien
aacgacacggaatagaggcgtctcc

SEQ ID NO: 4202100 - DNA, 25 bp, Homo sapien
tccactcattagattgtagtgtgtg

SEQ ID NO: 4202101 - DNA, 25 bp, Homo sapien
tagtgcaatggtatccactcattag

SEQ ID NO: 4202102 - DNA, 25 bp, Homo sapien
ctcattagattgtagtgtgtgcgtg

SEQ ID NO: 4202103 - DNA, 25 bp, Homo sapien
cttgatagtgcaatggtatccactc

SEQ ID NO: 4202104 - DNA, 25 bp, Homo sapien
tgatccgagtcatcattatctctta

SEQ ID NO: 4202105 - DNA, 25 bp, Homo sapien
tgctactaccatcatgatccgagtc

SEQ ID NO: 4202106 - DNA, 25 bp, Homo sapien
tgcggtgtttggtatccagcttcct

SEQ ID NO: 4202107 - DNA, 25 bp, Homo sapien
tttaccacctctgctgctactacca

SEQ ID NO: 4202108 - DNA, 25 bp, Homo sapien
atcttccaaataacaattgatcatg

SEQ ID NO: 4202109 - DNA, 25 bp, Homo sapien
cttccaaataacaattgatcatgta

SEQ ID NO: 4202110 - DNA, 25 bp, Homo sapien
cagccaggaatatcctcttcattca

SEQ ID NO: 4202111 - DNA, 25 bp, Homo sapien
ccagccaggaatatcctcttcattc

SEQ ID NO: 4202112 - DNA, 25 bp, Homo sapien
gaaggagaaaatccgacaacctgga

SEQ ID NO: 4202113 - DNA, 25 bp, Homo sapien
caggaggaccacgaggaaataccct

SEQ ID NO: 4202114 - DNA, 25 bp, Homo sapien
tgtcctccaaagatgagtactaggg

SEQ ID NO: 4202115 - DNA, 25 bp, Homo sapien
aaagaaaggctacgatgactgggca

SEQ ID NO: 4202116 - DNA, 25 bp, Homo sapien
tctcggacacttggcagttactgga

SEQ ID NO: 4202117 - DNA, 25 bp, Homo sapien
accagggctgttgcatctcggacac

SEQ ID NO: 4202118 - DNA, 25 bp, Homo sapien
tgagctcaggagatttgccccaggt

SEQ ID NO: 4202119 - DNA, 25 bp, Homo sapien
tcaaatccatgggagacgtctcaga

SEQ ID NO: 4202120 - DNA, 25 bp, Homo sapien
tgcagggatggctcccagcagccat

SEQ ID NO: 4202121 - DNA, 25 bp, Homo sapien
ggttgcagggatggctcccagcagc

SEQ ID NO: 4202122 - DNA, 25 bp, Homo sapien
ctggttgcagggatggctcccagca

SEQ ID NO: 4202123 - DNA, 25 bp, Homo sapien
ttgcagggatggctcccagcagcca

SEQ ID NO: 4202124 - DNA, 25 bp, Homo sapien
ttttcctgagaatgacttctcctgc

SEQ ID NO: 4202125 - DNA, 25 bp, Homo sapien
cctgagaatgacttctcctgcatgt

SEQ ID NO: 4202126 - DNA, 25 bp, Homo sapien
tgagaatgacttctcctgcatgtac

SEQ ID NO: 4202127 - DNA, 25 bp, Homo sapien
tcctgagaatgacttctcctgcatg

SEQ ID NO: 4202128 - DNA, 25 bp, Homo sapien
ttaaatgacggcatcagagtgactt

SEQ ID NO: 4202129 - DNA, 25 bp, Homo sapien
gaaactggatacgtattacccagga

SEQ ID NO: 4202130 - DNA, 25 bp, Homo sapien
gaatgcacagaaactggatacgtat

SEQ ID NO: 4202131 - DNA, 25 bp, Homo sapien
cggcatcagagtgacttgcatgtgc

SEQ ID NO: 4202132 - DNA, 25 bp, Homo sapien
aacagctttgcacaacggagctgta

SEQ ID NO: 4202133 - DNA, 25 bp, Homo sapien
cagctttgcacaacggagctgtaaa

SEQ ID NO: 4202134 - DNA, 25 bp, Homo sapien
acagctttgcacaacggagctgtaa

SEQ ID NO: 4202135 - DNA, 25 bp, Homo sapien
agctttgcacaacggagctgtaaag

SEQ ID NO: 4202136 - DNA, 25 bp, Homo sapien
actcccaactgatggaaatctcact

SEQ ID NO: 4202137 - DNA, 25 bp, Homo sapien
caaatggtatgaaagcaggagtgga

SEQ ID NO: 4202138 - DNA, 25 bp, Homo sapien
caggagtggagagtttcaccccaac

SEQ ID NO: 4202139 - DNA, 25 bp, Homo sapien
cagctctgagcaaaccatcctcagt

SEQ ID NO: 4202140 - DNA, 25 bp, Homo sapien
tatagtacgacactttttaattcag

SEQ ID NO: 4202141 - DNA, 25 bp, Homo sapien
taattcagaactcaaccacaaaaaa

SEQ ID NO: 4202142 - DNA, 25 bp, Homo sapien
tttaattcagaactcaaccacaaaa

SEQ ID NO: 4202143 - DNA, 25 bp, Homo sapien
ttaattcagaactcaaccacaaaaa

SEQ ID NO: 4202144 - DNA, 25 bp, Homo sapien
cagtgggaaatttgccatgttggac

SEQ ID NO: 4202145 - DNA, 25 bp, Homo sapien
aaccagtttgactgagagtggcgag

SEQ ID NO: 4202146 - DNA, 25 bp, Homo sapien
catgttggactttgacaaccacaaa

SEQ ID NO: 4202147 - DNA, 25 bp, Homo sapien
aaccacaaaaaccagtttgactgag

SEQ ID NO: 4202148 - DNA, 25 bp, Homo sapien
tctgattcctaaaaacatcgagtca

SEQ ID NO: 4202149 - DNA, 25 bp, Homo sapien
agaactcacacaagcctggtgccaa

SEQ ID NO: 4202150 - DNA, 25 bp, Homo sapien
aagcctggtgccaaacctggatgtg

SEQ ID NO: 4202151 - DNA, 25 bp, Homo sapien
gagtcattatagaagacatcaggac

SEQ ID NO: 4202152 - DNA, 25 bp, Homo sapien
gaaatgttcctgtctgcattccata

SEQ ID NO: 4202153 - DNA, 25 bp, Homo sapien
gttccttatggatcagaaatgttcc

SEQ ID NO: 4202154 - DNA, 25 bp, Homo sapien
aagcagcagcaatgtcgtcgggcag

SEQ ID NO: 4202155 - DNA, 25 bp, Homo sapien
tcatgttccttatggatcagaaatg

SEQ ID NO: 4202156 - DNA, 25 bp, Homo sapien
gtttgaaagcattggacaggccata

SEQ ID NO: 4202157 - DNA, 25 bp, Homo sapien
gccatatgttccagccagaccagag

SEQ ID NO: 4202158 - DNA, 25 bp, Homo sapien
cacacgtgtatgaagaagccaaggc

SEQ ID NO: 4202159 - DNA, 25 bp, Homo sapien
cagaaacctgcctgattcctgtgca

SEQ ID NO: 4202160 - DNA, 25 bp, Homo sapien
ttgaagaagaccttctgcattgagt

SEQ ID NO: 4202161 - DNA, 25 bp, Homo sapien
cttgaagaagaccttctgcattgag

SEQ ID NO: 4202162 - DNA, 25 bp, Homo sapien
tgctcccttcctgttagtcatgact

SEQ ID NO: 4202163 - DNA, 25 bp, Homo sapien
agtcatgactccaagggtcttgaca

SEQ ID NO: 4202164 - DNA, 25 bp, Homo sapien
tgacagagggtagtgacaggcaact

SEQ ID NO: 4202165 - DNA, 25 bp, Homo sapien
tttaccaacaggaagtgacccagtc

SEQ ID NO: 4202166 - DNA, 25 bp, Homo sapien
tctgccttgtgaatacttcaccaat

SEQ ID NO: 4202167 - DNA, 25 bp, Homo sapien
gccttgtgaatacttcaccaatttt

SEQ ID NO: 4202168 - DNA, 25 bp, Homo sapien
ctgccttgtgaatacttcaccaatt

SEQ ID NO: 4202169 - DNA, 25 bp, Homo sapien
ttctgccttgtgaatacttcaccaa

SEQ ID NO: 4202170 - DNA, 25 bp, Homo sapien
atatgtccggaccctccacatgtag

SEQ ID NO: 4202171 - DNA, 25 bp, Homo sapien
ccacatgtaggcctctgcatgtgca

SEQ ID NO: 4202172 - DNA, 25 bp, Homo sapien
catgtaggcctctgcatgtgcagtg

SEQ ID NO: 4202173 - DNA, 25 bp, Homo sapien
tatgtccggaccctccacatgtagg

SEQ ID NO: 4202174 - DNA, 25 bp, Homo sapien
taaacttgtataaaggtggacatct

SEQ ID NO: 4202175 - DNA, 25 bp, Homo sapien
tgctaaacttgtataaaggtggaca

SEQ ID NO: 4202176 - DNA, 25 bp, Homo sapien
cagaaactaggtctgtattttggca

SEQ ID NO: 4202177 - DNA, 25 bp, Homo sapien
ttctcccagaaactaggtctgtatt

SEQ ID NO: 4202178 - DNA, 25 bp, Homo sapien
tagattcagaacagcttgctcagag

SEQ ID NO: 4202179 - DNA, 25 bp, Homo sapien
tcagaacagcttgctcagagctgcc

SEQ ID NO: 4202180 - DNA, 25 bp, Homo sapien
gattcagaacagcttgctcagagct

SEQ ID NO: 4202181 - DNA, 25 bp, Homo sapien
ctagattcagaacagcttgctcaga

SEQ ID NO: 4202182 - DNA, 25 bp, Homo sapien
tcgccgacttccaagtgtgtaacgg

SEQ ID NO: 4202183 - DNA, 25 bp, Homo sapien
ggtatcaggccaaatcctcgccgac

SEQ ID NO: 4202184 - DNA, 25 bp, Homo sapien
atggatgtgccggtatcaggccaaa

SEQ ID NO: 4202185 - DNA, 25 bp, Homo sapien
aaatcctcgccgacttccaagtgtg

SEQ ID NO: 4202186 - DNA, 25 bp, Homo sapien
tggcccaatactctcctctctctgc

SEQ ID NO: 4202187 - DNA, 25 bp, Homo sapien
tctgcccgttccgtttccaacagga

SEQ ID NO: 4202188 - DNA, 25 bp, Homo sapien
tcattggcccaatactctcctctct

SEQ ID NO: 4202189 - DNA, 25 bp, Homo sapien
tcaaggcctttcatcctctgcccgt

SEQ ID NO: 4202190 - DNA, 25 bp, Homo sapien
cgtgctgagatcactcggtgtttcc

SEQ ID NO: 4202191 - DNA, 25 bp, Homo sapien
ctgagatcactcggtgtttcctcca

SEQ ID NO: 4202192 - DNA, 25 bp, Homo sapien
tgctgagatcactcggtgtttcctc

SEQ ID NO: 4202193 - DNA, 25 bp, Homo sapien
gagatcactcggtgtttcctccaag

SEQ ID NO: 4202194 - DNA, 25 bp, Homo sapien
atccacagtgtcaaggaactggaag

SEQ ID NO: 4202195 - DNA, 25 bp, Homo sapien
cctcacgaagcccatgatcatcaaa

SEQ ID NO: 4202196 - DNA, 25 bp, Homo sapien
cgtggtattgacaacagtgttcgta

SEQ ID NO: 4202197 - DNA, 25 bp, Homo sapien
gcagaaaccccgtggtattgacaac

SEQ ID NO: 4202198 - DNA, 25 bp, Homo sapien
gaccaagacgttcatctggcatcag

SEQ ID NO: 4202199 - DNA, 25 bp, Homo sapien
cttggcgctgcctatgcagttggca

SEQ ID NO: 4202200 - DNA, 25 bp, Homo sapien
cgctgcctatgcagttggcagccat

SEQ ID NO: 4202201 - DNA, 25 bp, Homo sapien
tgcctatgcagttggcagccatctc

SEQ ID NO: 4202202 - DNA, 25 bp, Homo sapien
cttccttggcgctgcctatgcagtt

SEQ ID NO: 4202203 - DNA, 25 bp, Homo sapien
ccccctgccatatcagccaggtcag

SEQ ID NO: 4202204 - DNA, 25 bp, Homo sapien
tgttccctgggataagatcttggtt

SEQ ID NO: 4202205 - DNA, 25 bp, Homo sapien
cattcgtgttccctgggataagatc

SEQ ID NO: 4202206 - DNA, 25 bp, Homo sapien
cgtgttccctgggataagatcttgg

SEQ ID NO: 4202207 - DNA, 25 bp, Homo sapien
tgaataactcattggaatctataat

SEQ ID NO: 4202208 - DNA, 25 bp, Homo sapien
ctgaataactcattggaatctataa

SEQ ID NO: 4202209 - DNA, 25 bp, Homo sapien
gtctacttttgatggtgagtttaaa

SEQ ID NO: 4202210 - DNA, 25 bp, Homo sapien
acttggtcctgctactgtgttcttc

SEQ ID NO: 4202211 - DNA, 25 bp, Homo sapien
tgatctctaacctgttattgataaa

SEQ ID NO: 4202212 - DNA, 25 bp, Homo sapien
ccaagtttaagtctacttttgatgg

SEQ ID NO: 4202213 - DNA, 25 bp, Homo sapien
gttttagaatgatccaagatccaga

SEQ ID NO: 4202214 - DNA, 25 bp, Homo sapien
ccagttttagaatgatccaagatcc

SEQ ID NO: 4202215 - DNA, 25 bp, Homo sapien
ttccagttttagaatgatccaagat

SEQ ID NO: 4202216 - DNA, 25 bp, Homo sapien
tttagaatgatccaagatccagatc

SEQ ID NO: 4202217 - DNA, 25 bp, Homo sapien
tgcactacaccgggatgcttgaaga

SEQ ID NO: 4202218 - DNA, 25 bp, Homo sapien
cactacaccgggatgcttgaagatg

SEQ ID NO: 4202219 - DNA, 25 bp, Homo sapien
gcactacaccgggatgcttgaagat

SEQ ID NO: 4202220 - DNA, 25 bp, Homo sapien
ccatgggagtgcaggtggaaaccat

SEQ ID NO: 4202221 - DNA, 25 bp, Homo sapien
gccatgggagtgcaggtggaaacca

SEQ ID NO: 4202222 - DNA, 25 bp, Homo sapien
cgccatgggagtgcaggtggaaacc

SEQ ID NO: 4202223 - DNA, 25 bp, Homo sapien
gccgccatgggagtgcaggtggaaa

SEQ ID NO: 4202224 - DNA, 25 bp, Homo sapien
tagtcactggtacgtctgttcaaag

SEQ ID NO: 4202225 - DNA, 25 bp, Homo sapien
gccttgagcgtaggactttccaaag

SEQ ID NO: 4202226 - DNA, 25 bp, Homo sapien
cagtccagatgataagctcatagtc

SEQ ID NO: 4202227 - DNA, 25 bp, Homo sapien
ccaaagggtgtatgaaacagacatc

SEQ ID NO: 4202228 - DNA, 25 bp, Homo sapien
tcagagcccgcgacttcgaaagtga

SEQ ID NO: 4202229 - DNA, 25 bp, Homo sapien
caggccaggatctggtgagtttgaa

SEQ ID NO: 4202230 - DNA, 25 bp, Homo sapien
gagcccgcgacttcgaaagtgagga

SEQ ID NO: 4202231 - DNA, 25 bp, Homo sapien
gaggcccggacaaccaacatgaaaa

SEQ ID NO: 4202232 - DNA, 25 bp, Homo sapien
aaatacgcgctgataatagtgatga

SEQ ID NO: 4202233 - DNA, 25 bp, Homo sapien
ataaaatacgcgctgataatagtga

SEQ ID NO: 4202234 - DNA, 25 bp, Homo sapien
caccgacatacaactgttaaaccag

SEQ ID NO: 4202235 - DNA, 25 bp, Homo sapien
agtgatgatgacgataatgactgcc

SEQ ID NO: 4202236 - DNA, 25 bp, Homo sapien
ttactgaaccccgtggccatgtctc

SEQ ID NO: 4202237 - DNA, 25 bp, Homo sapien
gacctccttgcagcgttccactatt

SEQ ID NO: 4202238 - DNA, 25 bp, Homo sapien
gttcatcagtgccattacccgttac

SEQ ID NO: 4202239 - DNA, 25 bp, Homo sapien
tgtcccagtctcactatggcaagtt

SEQ ID NO: 4202240 - DNA, 25 bp, Homo sapien
gcagaacctcgatggcaatggacat

SEQ ID NO: 4202241 - DNA, 25 bp, Homo sapien
cattgttgcaatcgaagacagggct

SEQ ID NO: 4202242 - DNA, 25 bp, Homo sapien
gacagtgcccatgcccaaataaaga

SEQ ID NO: 4202243 - DNA, 25 bp, Homo sapien
cattcaatcgttttgccatggagac

SEQ ID NO: 4202244 - DNA, 25 bp, Homo sapien
tcttgggaaaggtggtcgttgtcat

SEQ ID NO: 4202245 - DNA, 25 bp, Homo sapien
taatattcctccgaaaaaccagatc

SEQ ID NO: 4202246 - DNA, 25 bp, Homo sapien
cgttgtcatctatcacttttcctcc

SEQ ID NO: 4202247 - DNA, 25 bp, Homo sapien
caagacaccgcttcctaatattcct

SEQ ID NO: 4202248 - DNA, 25 bp, Homo sapien
cacccacagcagtcattgttcttca

SEQ ID NO: 4202249 - DNA, 25 bp, Homo sapien
agaacaccagcgcagggaagatcat

SEQ ID NO: 4202250 - DNA, 25 bp, Homo sapien
cacagccctcgttgccgcagcaccc

SEQ ID NO: 4202251 - DNA, 25 bp, Homo sapien
cagcacccacagcagtcattgttct

SEQ ID NO: 4202252 - DNA, 25 bp, Homo sapien
caattgccagcttgaagatctccct

SEQ ID NO: 4202253 - DNA, 25 bp, Homo sapien
aattgccagcttgaagatctccctt

SEQ ID NO: 4202254 - DNA, 25 bp, Homo sapien
tgaagatctccctttctgttgggct

SEQ ID NO: 4202255 - DNA, 25 bp, Homo sapien
ccagcttgaagatctccctttctgt

SEQ ID NO: 4202256 - DNA, 25 bp, Homo sapien
ggaaacatttgttgacatatggcag

SEQ ID NO: 4202257 - DNA, 25 bp, Homo sapien
taggttctgagtggtctggaaacat

SEQ ID NO: 4202258 - DNA, 25 bp, Homo sapien
tttcagaaataggttctgagtggtc

SEQ ID NO: 4202259 - DNA, 25 bp, Homo sapien
gttgtcttcatgaaagtccaggttg

SEQ ID NO: 4202260 - DNA, 25 bp, Homo sapien
tattggccatgaggcatttaggacc

SEQ ID NO: 4202261 - DNA, 25 bp, Homo sapien
gagtatccagctcccaagaatccaa

SEQ ID NO: 4202262 - DNA, 25 bp, Homo sapien
taggacccttgttgattgaaatggc

SEQ ID NO: 4202263 - DNA, 25 bp, Homo sapien
acagcaaatatcgtggaggtgaaca

SEQ ID NO: 4202264 - DNA, 25 bp, Homo sapien
cactcctgatcttgggcattgatcc

SEQ ID NO: 4202265 - DNA, 25 bp, Homo sapien
catcccatcccaagtagggcgtgcg

SEQ ID NO: 4202266 - DNA, 25 bp, Homo sapien
cagtttggcatttcgtgtggtgacc

SEQ ID NO: 4202267 - DNA, 25 bp, Homo sapien
atcttgggcattgatcccatcccat

SEQ ID NO: 4202268 - DNA, 25 bp, Homo sapien
tctgccactaagaaactgtattcct

SEQ ID NO: 4202269 - DNA, 25 bp, Homo sapien
tctcataaactttttgtgaggatca

SEQ ID NO: 4202270 - DNA, 25 bp, Homo sapien
tgccactaagaaactgtattcctct

SEQ ID NO: 4202271 - DNA, 25 bp, Homo sapien
gcttctgccactaagaaactgtatt

SEQ ID NO: 4202272 - DNA, 25 bp, Homo sapien
aacacttagcacttactcactggga

SEQ ID NO: 4202273 - DNA, 25 bp, Homo sapien
gaatcccatgagttttgccaacagg

SEQ ID NO: 4202274 - DNA, 25 bp, Homo sapien
gaagcagttgctaccatggctgccc

SEQ ID NO: 4202275 - DNA, 25 bp, Homo sapien
ggataagaagagtccacacaccctt

SEQ ID NO: 4202276 - DNA, 25 bp, Homo sapien
gcctgggtgatgttcatcatcttat

SEQ ID NO: 4202277 - DNA, 25 bp, Homo sapien
ctggattatgatgccagcttttatc

SEQ ID NO: 4202278 - DNA, 25 bp, Homo sapien
gttcctgaatcctcctattcacttt

SEQ ID NO: 4202279 - DNA, 25 bp, Homo sapien
catcttatctggattatgatgccag

SEQ ID NO: 4202280 - DNA, 25 bp, Homo sapien
agatgtgagggtgctctccttgccc

SEQ ID NO: 4202281 - DNA, 25 bp, Homo sapien
gtgtctgaaccacagatgtgagggt

SEQ ID NO: 4202282 - DNA, 25 bp, Homo sapien
tctgaaccacagatgtgagggtgct

SEQ ID NO: 4202283 - DNA, 25 bp, Homo sapien
aaccacagatgtgagggtgctctcc

SEQ ID NO: 4202284 - DNA, 25 bp, Homo sapien
caggcagtgcttcataaatagcagc

SEQ ID NO: 4202285 - DNA, 25 bp, Homo sapien
gggcaaagaccatgtgccactgtct

SEQ ID NO: 4202286 - DNA, 25 bp, Homo sapien
tttgtttgtcctctcttcaggacga

SEQ ID NO: 4202287 - DNA, 25 bp, Homo sapien
ttcaggacgataaacttccaagggc

SEQ ID NO: 4202288 - DNA, 25 bp, Homo sapien
ctacgtgtccaataacgacgatatt

SEQ ID NO: 4202289 - DNA, 25 bp, Homo sapien
gacgatattgatatgaatccttttc

SEQ ID NO: 4202290 - DNA, 25 bp, Homo sapien
ccaataacgacgatattgatatgaa

SEQ ID NO: 4202291 - DNA, 25 bp, Homo sapien
cgtgtccaataacgacgatattgat

SEQ ID NO: 4202292 - DNA, 25 bp, Homo sapien
gatttatatcatgtttgtcgatcag

SEQ ID NO: 4202293 - DNA, 25 bp, Homo sapien
tcgatcagttggcaagtagcagtgg

SEQ ID NO: 4202294 - DNA, 25 bp, Homo sapien
caagtagcagtggacttacctgaat

SEQ ID NO: 4202295 - DNA, 25 bp, Homo sapien
tatcatgtttgtcgatcagttggca

SEQ ID NO: 4202296 - DNA, 25 bp, Homo sapien
gacacagtccagaccttcaagcagc

SEQ ID NO: 4202297 - DNA, 25 bp, Homo sapien
ggcatgttactacttggctctagca

SEQ ID NO: 4202298 - DNA, 25 bp, Homo sapien
tgtttcatccccagtgtgtaagcac

SEQ ID NO: 4202299 - DNA, 25 bp, Homo sapien
aagcacgaagggcatgttcatgggt

SEQ ID NO: 4202300 - DNA, 25 bp, Homo sapien
gcacatagggaccaatgccaccaac

SEQ ID NO: 4202301 - DNA, 25 bp, Homo sapien
agcacatagggaccaatgccaccaa

SEQ ID NO: 4202302 - DNA, 25 bp, Homo sapien
ttagcacatagggaccaatgccacc

SEQ ID NO: 4202303 - DNA, 25 bp, Homo sapien
tagcacatagggaccaatgccacca

SEQ ID NO: 4202304 - DNA, 25 bp, Homo sapien
taaggcctgcttcttactagaacga

SEQ ID NO: 4202305 - DNA, 25 bp, Homo sapien
ttcttactagaacgatgatcgatct

SEQ ID NO: 4202306 - DNA, 25 bp, Homo sapien
gcatcaccggatttcgagaatttaa

SEQ ID NO: 4202307 - DNA, 25 bp, Homo sapien
ctagaacgatgatcgatcttttcct

SEQ ID NO: 4202308 - DNA, 25 bp, Homo sapien
gaggctctcggcacttgttccataa

SEQ ID NO: 4202309 - DNA, 25 bp, Homo sapien
tcctcctacgaccagcaggatggag

SEQ ID NO: 4202310 - DNA, 25 bp, Homo sapien
tccagggaaccacattgagaggctc

SEQ ID NO: 4202311 - DNA, 25 bp, Homo sapien
tggcgcagagaaccatctggattcc

SEQ ID NO: 4202312 - DNA, 25 bp, Homo sapien
aaaagaaattgtagtcgtcatgctg

SEQ ID NO: 4202313 - DNA, 25 bp, Homo sapien
gctaggaagcagataggaattaata

SEQ ID NO: 4202314 - DNA, 25 bp, Homo sapien
gctgtagagtctgagcagctcatct

SEQ ID NO: 4202315 - DNA, 25 bp, Homo sapien
ttctaactcgagcaaagctggttgg

SEQ ID NO: 4202316 - DNA, 25 bp, Homo sapien
tacaaagaagtagtatggcagtaca

SEQ ID NO: 4202317 - DNA, 25 bp, Homo sapien
aaagtatgctttgaacctgttggta

SEQ ID NO: 4202318 - DNA, 25 bp, Homo sapien
aaaagaaccctagccatgatgacag

SEQ ID NO: 4202319 - DNA, 25 bp, Homo sapien
aagcaactcaagcaaggcagcaaaa

SEQ ID NO: 4202320 - DNA, 25 bp, Homo sapien
tgttattcattcaacgttttgtccc

SEQ ID NO: 4202321 - DNA, 25 bp, Homo sapien
gctcctagtattgcaatttcttggt

SEQ ID NO: 4202322 - DNA, 25 bp, Homo sapien
tagtattgcaatttcttggtaggaa

SEQ ID NO: 4202323 - DNA, 25 bp, Homo sapien
ttcttggtaggaaactgagtgtgga

SEQ ID NO: 4202324 - DNA, 25 bp, Homo sapien
ttaccaagctgatgctcctagtatt

SEQ ID NO: 4202325 - DNA, 25 bp, Homo sapien
gcttcaatagcatcacgggaattct

SEQ ID NO: 4202326 - DNA, 25 bp, Homo sapien
atagcatcacgggaattctctttct

SEQ ID NO: 4202327 - DNA, 25 bp, Homo sapien
acaatattcacatttgatgctggga

SEQ ID NO: 4202328 - DNA, 25 bp, Homo sapien
cccaacatcaataggcagcaggatt

SEQ ID NO: 4202329 - DNA, 25 bp, Homo sapien
acttggttgaaaagctctctgcaga

SEQ ID NO: 4202330 - DNA, 25 bp, Homo sapien
tatgcagccaaatcgatcagatcaa

SEQ ID NO: 4202331 - DNA, 25 bp, Homo sapien
tatacgtaccgaaagtatgcagcca

SEQ ID NO: 4202332 - DNA, 25 bp, Homo sapien
cagaagaagtgatctagactgacag

SEQ ID NO: 4202333 - DNA, 25 bp, Homo sapien
ccctaagccctctgagagagatgaa

SEQ ID NO: 4202334 - DNA, 25 bp, Homo sapien
tgagcgtacaggcagacaagagcgt

SEQ ID NO: 4202335 - DNA, 25 bp, Homo sapien
tgacttattttacctgaaggaccca

SEQ ID NO: 4202336 - DNA, 25 bp, Homo sapien
aagagcgtagcctgctgttgcctcc

SEQ ID NO: 4202337 - DNA, 25 bp, Homo sapien
cattggatcatgttggaaagaaggc

SEQ ID NO: 4202338 - DNA, 25 bp, Homo sapien
tagatttcaacctgatagcacacca

SEQ ID NO: 4202339 - DNA, 25 bp, Homo sapien
agccttgtcaggtttgcttcctaga

SEQ ID NO: 4202340 - DNA, 25 bp, Homo sapien
gatctaccggaatatacatgtacag

SEQ ID NO: 4202341 - DNA, 25 bp, Homo sapien
tggaatagccttaggaagtggctcc

SEQ ID NO: 4202342 - DNA, 25 bp, Homo sapien
caaagactatcttgtgaggagtgac

SEQ ID NO: 4202343 - DNA, 25 bp, Homo sapien
ggagtgacacaggaatagtttgcac

SEQ ID NO: 4202344 - DNA, 25 bp, Homo sapien
tgctcccctggcgtctttcgtgtag

SEQ ID NO: 4202345 - DNA, 25 bp, Homo sapien
tgcagagacgtctggcaaacaaaca

SEQ ID NO: 4202346 - DNA, 25 bp, Homo sapien
tactcttgttgcgtcttctatgtga

SEQ ID NO: 4202347 - DNA, 25 bp, Homo sapien
catgggaacgctctgtactcttgtt

SEQ ID NO: 4202348 - DNA, 25 bp, Homo sapien
ccagaaatatcttcatgagcagaag

SEQ ID NO: 4202349 - DNA, 25 bp, Homo sapien
aaggtaaataattcggcattctctc

SEQ ID NO: 4202350 - DNA, 25 bp, Homo sapien
ttcagctgccgtttactttctcacc

SEQ ID NO: 4202351 - DNA, 25 bp, Homo sapien
ccatgtttgtagagtccctggccac

SEQ ID NO: 4202352 - DNA, 25 bp, Homo sapien
gagtgttccctcagccaaggcggga

SEQ ID NO: 4202353 - DNA, 25 bp, Homo sapien
gggtgcacaccattatcatgacttg

SEQ ID NO: 4202354 - DNA, 25 bp, Homo sapien
cctggccaaggtagtatcttccaag

SEQ ID NO: 4202355 - DNA, 25 bp, Homo sapien
cctcaatagttttaaggagtgttgc

SEQ ID NO: 4202356 - DNA, 25 bp, Homo sapien
tctttggaatgaactcactatttgc

SEQ ID NO: 4202357 - DNA, 25 bp, Homo sapien
tcttccattccgtgtggaacacagc

SEQ ID NO: 4202358 - DNA, 25 bp, Homo sapien
tgtggaacacagctgtagattcgtt

SEQ ID NO: 4202359 - DNA, 25 bp, Homo sapien
ttttcttccattccgtgtggaacac

SEQ ID NO: 4202360 - DNA, 25 bp, Homo sapien
gctgtagattcgttttctcttagct

SEQ ID NO: 4202361 - DNA, 25 bp, Homo sapien
tcctattctgggtgtctggtcctca

SEQ ID NO: 4202362 - DNA, 25 bp, Homo sapien
tatccagtggcgtttcttctgaaag

SEQ ID NO: 4202363 - DNA, 25 bp, Homo sapien
tgtaaggacctttcacaacagatct

SEQ ID NO: 4202364 - DNA, 25 bp, Homo sapien
tctgaaagacctccaaccggtctgt

SEQ ID NO: 4202365 - DNA, 25 bp, Homo sapien
tccactgggtaaatgtacaagtctg

SEQ ID NO: 4202366 - DNA, 25 bp, Homo sapien
tgagaatccatcaggccttcgtaag

SEQ ID NO: 4202367 - DNA, 25 bp, Homo sapien
taatccactgggtaaatgtacaagt

SEQ ID NO: 4202368 - DNA, 25 bp, Homo sapien
aaaccgtgacgaattccagagaagc

SEQ ID NO: 4202369 - DNA, 25 bp, Homo sapien
tatttccacatctcaccggggcctg

SEQ ID NO: 4202370 - DNA, 25 bp, Homo sapien
cacggaagtgtccttgaacatcttc

SEQ ID NO: 4202371 - DNA, 25 bp, Homo sapien
ctgatgttggttctagcacagcatc

SEQ ID NO: 4202372 - DNA, 25 bp, Homo sapien
tcttccagcaaatgatgtatatttc

SEQ ID NO: 4202373 - DNA, 25 bp, Homo sapien
aaaatggctttctacatttgcgtct

SEQ ID NO: 4202374 - DNA, 25 bp, Homo sapien
aatggctttctacatttgcgtcttt

SEQ ID NO: 4202375 - DNA, 25 bp, Homo sapien
aaatggctttctacatttgcgtctt

SEQ ID NO: 4202376 - DNA, 25 bp, Homo sapien
gaaccacgggtattacagtcctgat

SEQ ID NO: 4202377 - DNA, 25 bp, Homo sapien
cctgactgagtaggttcagacagaa

SEQ ID NO: 4202378 - DNA, 25 bp, Homo sapien
ctctggtaaatgaatccctgcagga

SEQ ID NO: 4202379 - DNA, 25 bp, Homo sapien
tgcctgactgagtaggttcagacag

SEQ ID NO: 4202380 - DNA, 25 bp, Homo sapien
tgtcttgatgagtcaccagccttcc

SEQ ID NO: 4202381 - DNA, 25 bp, Homo sapien
ctgtcttgatgagtcaccagccttc

SEQ ID NO: 4202382 - DNA, 25 bp, Homo sapien
ggctgtcttgatgagtcaccagcct

SEQ ID NO: 4202383 - DNA, 25 bp, Homo sapien
gtggcacttcacagtgccacttttt

SEQ ID NO: 4202384 - DNA, 25 bp, Homo sapien
gagtgtcaggctctggaccatttat

SEQ ID NO: 4202385 - DNA, 25 bp, Homo sapien
tgctgtttaccaccatactgctcgt

SEQ ID NO: 4202386 - DNA, 25 bp, Homo sapien
aacaaaaacaatagagtctgtgctg

SEQ ID NO: 4202387 - DNA, 25 bp, Homo sapien
tgctcgttgtttcactgccaccttc

SEQ ID NO: 4202388 - DNA, 25 bp, Homo sapien
gggtcagtgtcccatttaagaacaa

SEQ ID NO: 4202389 - DNA, 25 bp, Homo sapien
gcagctttagcttcgacatatttca

SEQ ID NO: 4202390 - DNA, 25 bp, Homo sapien
tatttcacatttggagtggcttcgg

SEQ ID NO: 4202391 - DNA, 25 bp, Homo sapien
tggcttcggagcagccaagcactgg

SEQ ID NO: 4202392 - DNA, 25 bp, Homo sapien
taaagtcattgttgtcagcatacga

SEQ ID NO: 4202393 - DNA, 25 bp, Homo sapien
agcatacgacagagggaaagtcact

SEQ ID NO: 4202394 - DNA, 25 bp, Homo sapien
aaacaattatgtgttctaggcacca

SEQ ID NO: 4202395 - DNA, 25 bp, Homo sapien
tagtggatccttaaggcatagagaa

SEQ ID NO: 4202396 - DNA, 25 bp, Homo sapien
gagtgccagtcagacttgggtccaa

SEQ ID NO: 4202397 - DNA, 25 bp, Homo sapien
tgataatctataggcaaccaacagc

SEQ ID NO: 4202398 - DNA, 25 bp, Homo sapien
ggtcacagccatggaaaaaacatgc

SEQ ID NO: 4202399 - DNA, 25 bp, Homo sapien
tttgggagacactaggagacactag

SEQ ID NO: 4202400 - DNA, 25 bp, Homo sapien
tctggcgggatttcctggacacagc

SEQ ID NO: 4202401 - DNA, 25 bp, Homo sapien
tgcaaacagtgcctgtctggcggga

SEQ ID NO: 4202402 - DNA, 25 bp, Homo sapien
tggacacagcccttgacaaccatta

SEQ ID NO: 4202403 - DNA, 25 bp, Homo sapien
cttttgagactagcagaaggtccaa

SEQ ID NO: 4202404 - DNA, 25 bp, Homo sapien
agaagggccagtaccgcttcagcag

SEQ ID NO: 4202405 - DNA, 25 bp, Homo sapien
agtgtgtctgatctgagcagactgg

SEQ ID NO: 4202406 - DNA, 25 bp, Homo sapien
tgccttctggcctgccagtgtgtct

SEQ ID NO: 4202407 - DNA, 25 bp, Homo sapien
agcacacggaaggccagcagccttg

SEQ ID NO: 4202408 - DNA, 25 bp, Homo sapien
agagctgttggatatttcagaatgg

SEQ ID NO: 4202409 - DNA, 25 bp, Homo sapien
aagagctgttggatatttcagaatg

SEQ ID NO: 4202410 - DNA, 25 bp, Homo sapien
ttcagactggcattggaaccgtgtt

SEQ ID NO: 4202411 - DNA, 25 bp, Homo sapien
cccggatgtatctgttggctgcaag

SEQ ID NO: 4202412 - DNA, 25 bp, Homo sapien
acattgtagacccaggcttgtagcc

SEQ ID NO: 4202413 - DNA, 25 bp, Homo sapien
cagcttgttggctcaaggagtcctt

SEQ ID NO: 4202414 - DNA, 25 bp, Homo sapien
cagacgctcttctgagaggacatgc

SEQ ID NO: 4202415 - DNA, 25 bp, Homo sapien
cacggtgggcaggatattacacttg

SEQ ID NO: 4202416 - DNA, 25 bp, Homo sapien
agatttctttgctttggagaggtgc

SEQ ID NO: 4202417 - DNA, 25 bp, Homo sapien
taggtccctaagaaacttctcatgt

SEQ ID NO: 4202418 - DNA, 25 bp, Homo sapien
ttttgttagcttacctggcctaaga

SEQ ID NO: 4202419 - DNA, 25 bp, Homo sapien
caaaatttcgtgttcctctgctcat

SEQ ID NO: 4202420 - DNA, 25 bp, Homo sapien
gactgtataccatagtttcttccca

SEQ ID NO: 4202421 - DNA, 25 bp, Homo sapien
tcttcccatcaaaatttcgtgttcc

SEQ ID NO: 4202422 - DNA, 25 bp, Homo sapien
tctcaggcttcctcactcctaggac

SEQ ID NO: 4202423 - DNA, 25 bp, Homo sapien
tacgggagctgagcgggactgagct

SEQ ID NO: 4202424 - DNA, 25 bp, Homo sapien
tagaaggtacgggagctgagcggga

SEQ ID NO: 4202425 - DNA, 25 bp, Homo sapien
aggtacgggagctgagcgggactga

SEQ ID NO: 4202426 - DNA, 25 bp, Homo sapien
gaaggtacgggagctgagcgggact

SEQ ID NO: 4202427 - DNA, 25 bp, Homo sapien
gcattgtgactctgcttcctattga

SEQ ID NO: 4202428 - DNA, 25 bp, Homo sapien
aaggtgccccgatttatatgcaaac

SEQ ID NO: 4202429 - DNA, 25 bp, Homo sapien
tatgcaaactcttgtttacctgccc

SEQ ID NO: 4202430 - DNA, 25 bp, Homo sapien
tcctattgatcctagagctaaggtg

SEQ ID NO: 4202431 - DNA, 25 bp, Homo sapien
tggcgtgactgcaggtactcttggt

SEQ ID NO: 4202432 - DNA, 25 bp, Homo sapien
tgactgcaggtactcttggtctaca

SEQ ID NO: 4202433 - DNA, 25 bp, Homo sapien
tcattcctggcgtgactgcaggtac

SEQ ID NO: 4202434 - DNA, 25 bp, Homo sapien
ggtactcttggtctacaccatgatc

SEQ ID NO: 4202435 - DNA, 25 bp, Homo sapien
catccgtgtgaaagggcgaatgcca

SEQ ID NO: 4202436 - DNA, 25 bp, Homo sapien
tctggaaagcacatccgtgtgaaag

SEQ ID NO: 4202437 - DNA, 25 bp, Homo sapien
ggagaggtggacttgcacaacagca

SEQ ID NO: 4202438 - DNA, 25 bp, Homo sapien
gaagaggctcagtggttgctggtgc

SEQ ID NO: 4202439 - DNA, 25 bp, Homo sapien
gagcgagactctgtctcaaaaaaaa

SEQ ID NO: 4202440 - DNA, 25 bp, Homo sapien
tgcagtgagtcgagatcatgccact

SEQ ID NO: 4202441 - DNA, 25 bp, Homo sapien
gcactccagcctggccaacagagcg

SEQ ID NO: 4202442 - DNA, 25 bp, Homo sapien
ttgcttcagcctgggaggtagaggt

SEQ ID NO: 4202443 - DNA, 25 bp, Homo sapien
tatactagtattatgccattgccct

SEQ ID NO: 4202444 - DNA, 25 bp, Homo sapien
agaagcacacgcagagacaagagaa

SEQ ID NO: 4202445 - DNA, 25 bp, Homo sapien
gaaacaggccaagcgagtcagagaa

SEQ ID NO: 4202446 - DNA, 25 bp, Homo sapien
aaagcccagagctagcattatgtga

SEQ ID NO: 4202447 - DNA, 25 bp, Homo sapien
agtatctggcatcagatttgctgga

SEQ ID NO: 4202448 - DNA, 25 bp, Homo sapien
tgcagagatgccagtatctctcgtt

SEQ ID NO: 4202449 - DNA, 25 bp, Homo sapien
tttgctctcaaacctggtggtagag

SEQ ID NO: 4202450 - DNA, 25 bp, Homo sapien
tcgtttgagctagcctctgcggtgt

SEQ ID NO: 4202451 - DNA, 25 bp, Homo sapien
ggtatatgatcagtataactgtgat

SEQ ID NO: 4202452 - DNA, 25 bp, Homo sapien
cccagccctacatgatttctaaact

SEQ ID NO: 4202453 - DNA, 25 bp, Homo sapien
cacacatacgtatggtatatgatca

SEQ ID NO: 4202454 - DNA, 25 bp, Homo sapien
ggagctaggcttgcctaatatctga

SEQ ID NO: 4202455 - DNA, 25 bp, Homo sapien
aaggctgttgatatcttgtccaagg

SEQ ID NO: 4202456 - DNA, 25 bp, Homo sapien
tgagattggtgtaatgctgagattc

SEQ ID NO: 4202457 - DNA, 25 bp, Homo sapien
cagtgaccaattcttattacttccc

SEQ ID NO: 4202458 - DNA, 25 bp, Homo sapien
cagacttgatggtcatttatgccac

SEQ ID NO: 4202459 - DNA, 25 bp, Homo sapien
cagcagtcctacgacgtgaccgacg

SEQ ID NO: 4202460 - DNA, 25 bp, Homo sapien
cagaggtacttcctcaagtaagtca

SEQ ID NO: 4202461 - DNA, 25 bp, Homo sapien
gacgtgaccgacgagctgccactgc

SEQ ID NO: 4202462 - DNA, 25 bp, Homo sapien
tgggagatgaccttcacggccactg

SEQ ID NO: 4202463 - DNA, 25 bp, Homo sapien
aagcctagctcgtggcggaagaaga

SEQ ID NO: 4202464 - DNA, 25 bp, Homo sapien
gatcctgccggagtctttctttaag

SEQ ID NO: 4202465 - DNA, 25 bp, Homo sapien
tctgtcatgaatccgaagcctagct

SEQ ID NO: 4202466 - DNA, 25 bp, Homo sapien
tttctttaaggagcctgattcgggc

SEQ ID NO: 4202467 - DNA, 25 bp, Homo sapien
acgtcacgcaggacctagacacaga

SEQ ID NO: 4202468 - DNA, 25 bp, Homo sapien
cagaagatgaatccggcctcggcgc

SEQ ID NO: 4202469 - DNA, 25 bp, Homo sapien
cagcaagtgatccacgtcacgcagg

SEQ ID NO: 4202470 - DNA, 25 bp, Homo sapien
tttgcagaagatgaatccggcctcg

SEQ ID NO: 4202471 - DNA, 25 bp, Homo sapien
gtcttaccgctgagtgtctgggatc

SEQ ID NO: 4202472 - DNA, 25 bp, Homo sapien
aagccccgagtgcagttattccctc

SEQ ID NO: 4202473 - DNA, 25 bp, Homo sapien
tctccaggcgggcaattatctgtct

SEQ ID NO: 4202474 - DNA, 25 bp, Homo sapien
tcaagaaagttgcataattctcgag

SEQ ID NO: 4202475 - DNA, 25 bp, Homo sapien
gaatcgtgcgacctttcctttgcca

SEQ ID NO: 4202476 - DNA, 25 bp, Homo sapien
ctggaatcgtgcgacctttcctttg

SEQ ID NO: 4202477 - DNA, 25 bp, Homo sapien
atcgtgcgacctttcctttgccatc

SEQ ID NO: 4202478 - DNA, 25 bp, Homo sapien
ggaatcgtgcgacctttcctttgcc

SEQ ID NO: 4202479 - DNA, 25 bp, Homo sapien
tgaacttctttcggggggctgcctg

SEQ ID NO: 4202480 - DNA, 25 bp, Homo sapien
agcttcgctgcccgcccaggtagtg

SEQ ID NO: 4202481 - DNA, 25 bp, Homo sapien
agcgacccaggcccgacggcaagtt

SEQ ID NO: 4202482 - DNA, 25 bp, Homo sapien
tagtgcccgctggagctcgcgcgct

SEQ ID NO: 4202483 - DNA, 25 bp, Homo sapien
tcgggcttccggagtcgagacgtgg

SEQ ID NO: 4202484 - DNA, 25 bp, Homo sapien
aatatggtcacaagagctaagcagc

SEQ ID NO: 4202485 - DNA, 25 bp, Homo sapien
tctagcagacaattgagagccaggc

SEQ ID NO: 4202486 - DNA, 25 bp, Homo sapien
ccttcgggcagaatcgcgggtcagt

SEQ ID NO: 4202487 - DNA, 25 bp, Homo sapien
caaccccttgatgaaacaggctcag

SEQ ID NO: 4202488 - DNA, 25 bp, Homo sapien
ccttcttcccttagctagaggcagg

SEQ ID NO: 4202489 - DNA, 25 bp, Homo sapien
gggcggcagggacattccaatcctc

SEQ ID NO: 4202490 - DNA, 25 bp, Homo sapien
tacttcccgcagctgtttcgccaga

SEQ ID NO: 4202491 - DNA, 25 bp, Homo sapien
ggcttttttcgggtcactggcgcac

SEQ ID NO: 4202492 - DNA, 25 bp, Homo sapien
acacttacgtaaccagcccggtgct

SEQ ID NO: 4202493 - DNA, 25 bp, Homo sapien
gcccggtgctgtgcgaagtgcttta

SEQ ID NO: 4202494 - DNA, 25 bp, Homo sapien
caatacgtgaacttgaagaacatac

SEQ ID NO: 4202495 - DNA, 25 bp, Homo sapien
gggacaagagggagacgtcactcaa

SEQ ID NO: 4202496 - DNA, 25 bp, Homo sapien
ggagccacctccaagtacagataac

SEQ ID NO: 4202497 - DNA, 25 bp, Homo sapien
ctttcctagagtagggctggcctca

SEQ ID NO: 4202498 - DNA, 25 bp, Homo sapien
agccattcagggagtggccccaaaa

SEQ ID NO: 4202499 - DNA, 25 bp, Homo sapien
tactttccaaggagtgacctgtgct

SEQ ID NO: 4202500 - DNA, 25 bp, Homo sapien
tctctccaagtatctcagggccttt

SEQ ID NO: 4202501 - DNA, 25 bp, Homo sapien
ttatccaacagggtaactggacttc

SEQ ID NO: 4202502 - DNA, 25 bp, Homo sapien
ggtcactgatgtgtttgcagtcagc

SEQ ID NO: 4202503 - DNA, 25 bp, Homo sapien
caacagggtaactggacttcttact

SEQ ID NO: 4202504 - DNA, 25 bp, Homo sapien
tattcttagaatgcacattctacat

SEQ ID NO: 4202505 - DNA, 25 bp, Homo sapien
tcttagaatgcacattctacattta

SEQ ID NO: 4202506 - DNA, 25 bp, Homo sapien
ttttattcttagaatgcacattcta

SEQ ID NO: 4202507 - DNA, 25 bp, Homo sapien
tagaatgcacattctacatttaaaa

SEQ ID NO: 4202508 - DNA, 25 bp, Homo sapien
agaccaagtcagcaacccggaggta

SEQ ID NO: 4202509 - DNA, 25 bp, Homo sapien
gaccaagtcagcaacccggaggtag

SEQ ID NO: 4202510 - DNA, 25 bp, Homo sapien
cccggaggtagggctgagaagcagc

SEQ ID NO: 4202511 - DNA, 25 bp, Homo sapien
caacccggaggtagggctgagaagc

SEQ ID NO: 4202512 - DNA, 25 bp, Homo sapien
gagtatcaggacagattgagacttg

SEQ ID NO: 4202513 - DNA, 25 bp, Homo sapien
cttggggcttccacgaatttggagc

SEQ ID NO: 4202514 - DNA, 25 bp, Homo sapien
gaaggactcaaccagagtatcagga

SEQ ID NO: 4202515 - DNA, 25 bp, Homo sapien
tccaagtctagaaggactcaaccag

SEQ ID NO: 4202516 - DNA, 25 bp, Homo sapien
gcccacagcaaccttggatgaactg

SEQ ID NO: 4202517 - DNA, 25 bp, Homo sapien
acagcaaccttggatgaactgcgcc

SEQ ID NO: 4202518 - DNA, 25 bp, Homo sapien
ccacagcaaccttggatgaactgcg

SEQ ID NO: 4202519 - DNA, 25 bp, Homo sapien
cacagcaaccttggatgaactgcgc

SEQ ID NO: 4202520 - DNA, 25 bp, Homo sapien
caaggcctgtgtcaattattgcctg

SEQ ID NO: 4202521 - DNA, 25 bp, Homo sapien
ccatatatgcattaggaggcacccc

SEQ ID NO: 4202522 - DNA, 25 bp, Homo sapien
gcctaagggctcattagtcaagagg

SEQ ID NO: 4202523 - DNA, 25 bp, Homo sapien
tcccagtaatgccatgactcttgca

SEQ ID NO: 4202524 - DNA, 25 bp, Homo sapien
gcttgcaatggcaccttgggctgtc

SEQ ID NO: 4202525 - DNA, 25 bp, Homo sapien
gctgcagcttgcaatggcaccttgg

SEQ ID NO: 4202526 - DNA, 25 bp, Homo sapien
gcagcttgcaatggcaccttgggct

SEQ ID NO: 4202527 - DNA, 25 bp, Homo sapien
cgcaccgattgcagctgcagcttgc

SEQ ID NO: 4202528 - DNA, 25 bp, Homo sapien
gtctgcgtataacatatgcacaaat

SEQ ID NO: 4202529 - DNA, 25 bp, Homo sapien
gggtgggtgcagtctgcgtataaca

SEQ ID NO: 4202530 - DNA, 25 bp, Homo sapien
tgcagtctgcgtataacatatgcac

SEQ ID NO: 4202531 - DNA, 25 bp, Homo sapien
cagtctgcgtataacatatgcacaa

SEQ ID NO: 4202532 - DNA, 25 bp, Homo sapien
ctggaagagggctaaagttactgaa

SEQ ID NO: 4202533 - DNA, 25 bp, Homo sapien
tctggaagagggctaaagttactga

SEQ ID NO: 4202534 - DNA, 25 bp, Homo sapien
ggaaacatctggaagagggctaaag

SEQ ID NO: 4202535 - DNA, 25 bp, Homo sapien
acatctggaagagggctaaagttac

SEQ ID NO: 4202536 - DNA, 25 bp, Homo sapien
gttctatagtgcaccaagtagaaat

SEQ ID NO: 4202537 - DNA, 25 bp, Homo sapien
ggtacggtgttctatagtgcaccaa

SEQ ID NO: 4202538 - DNA, 25 bp, Homo sapien
cggtgttctatagtgcaccaagtag

SEQ ID NO: 4202539 - DNA, 25 bp, Homo sapien
tgtccaggtacggtgttctatagtg

SEQ ID NO: 4202540 - DNA, 25 bp, Homo sapien
ctacaactgagaggtccagtacagt

SEQ ID NO: 4202541 - DNA, 25 bp, Homo sapien
ctgccacatgatggtgtgaactaca

SEQ ID NO: 4202542 - DNA, 25 bp, Homo sapien
aactgagaggtccagtacagttggg

SEQ ID NO: 4202543 - DNA, 25 bp, Homo sapien
aacatgggaataaactgccacatga

SEQ ID NO: 4202544 - DNA, 25 bp, Homo sapien
ccagtatgacccaggtttcttgact

SEQ ID NO: 4202545 - DNA, 25 bp, Homo sapien
gacttttcacgattggctggtgcat

SEQ ID NO: 4202546 - DNA, 25 bp, Homo sapien
gactctgagtaatgcaccttctata

SEQ ID NO: 4202547 - DNA, 25 bp, Homo sapien
tagtacaagccattgaataagcctc

SEQ ID NO: 4202548 - DNA, 25 bp, Homo sapien
tgtggtcttcttgacacattaagat

SEQ ID NO: 4202549 - DNA, 25 bp, Homo sapien
tggtggcacgcatctatcagagtcc

SEQ ID NO: 4202550 - DNA, 25 bp, Homo sapien
tcctttcctggtgctaactgtggtc

SEQ ID NO: 4202551 - DNA, 25 bp, Homo sapien
cacgcatctatcagagtcccagcta

SEQ ID NO: 4202552 - DNA, 25 bp, Homo sapien
tactgaaactactcctaccatagcc

SEQ ID NO: 4202553 - DNA, 25 bp, Homo sapien
tttgaatcacacaggccaagtattt

SEQ ID NO: 4202554 - DNA, 25 bp, Homo sapien
gcccttcatctagtccatctgcaag

SEQ ID NO: 4202555 - DNA, 25 bp, Homo sapien
ccatctcagatagtacgtacattct

SEQ ID NO: 4202556 - DNA, 25 bp, Homo sapien
aaaatctacgaaggcgccgccagta

SEQ ID NO: 4202557 - DNA, 25 bp, Homo sapien
tgtccgaggagcataaggaacacct

SEQ ID NO: 4202558 - DNA, 25 bp, Homo sapien
gactttcattgcagtggtcgccgag

SEQ ID NO: 4202559 - DNA, 25 bp, Homo sapien
cgctgccgggtgaaatcgtaggaca

SEQ ID NO: 4202560 - DNA, 25 bp, Homo sapien
ctgaggcctggctcggatccacgct

SEQ ID NO: 4202561 - DNA, 25 bp, Homo sapien
aaattgttagagatgcgagcggccc

SEQ ID NO: 4202562 - DNA, 25 bp, Homo sapien
agcggcccgaggtctgaacgccagt

SEQ ID NO: 4202563 - DNA, 25 bp, Homo sapien
gatccacgctggcatcagcactctg

SEQ ID NO: 4202564 - DNA, 25 bp, Homo sapien
ctactaaagaggcgagggcgaggcc

SEQ ID NO: 4202565 - DNA, 25 bp, Homo sapien
acctactaaagaggcgagggcgagg

SEQ ID NO: 4202566 - DNA, 25 bp, Homo sapien
cgacctactaaagaggcgagggcga

SEQ ID NO: 4202567 - DNA, 25 bp, Homo sapien
ccgacctactaaagaggcgagggcg

SEQ ID NO: 4202568 - DNA, 25 bp, Homo sapien
ggtcggtctgatctgctccggctgt

SEQ ID NO: 4202569 - DNA, 25 bp, Homo sapien
aaccatgtgcccctagaaacggaga

SEQ ID NO: 4202570 - DNA, 25 bp, Homo sapien
ctgctccggctgttgggacagagta

SEQ ID NO: 4202571 - DNA, 25 bp, Homo sapien
tagcccaagattcggctgccgggct

SEQ ID NO: 4202572 - DNA, 25 bp, Homo sapien
gaaatgcccagtttgcgagtctcgt

SEQ ID NO: 4202573 - DNA, 25 bp, Homo sapien
gcccggctcggagaaatgcccagtt

SEQ ID NO: 4202574 - DNA, 25 bp, Homo sapien
cgagtctcgttcttggccgcgtgat

SEQ ID NO: 4202575 - DNA, 25 bp, Homo sapien
gcggagtctcgctacttgctctagc

SEQ ID NO: 4202576 - DNA, 25 bp, Homo sapien
acacctaggcgaagcggaagtcccg

SEQ ID NO: 4202577 - DNA, 25 bp, Homo sapien
tcattggtccgcacccaaaggcaca

SEQ ID NO: 4202578 - DNA, 25 bp, Homo sapien
gtactagcagggacgacaacaccta

SEQ ID NO: 4202579 - DNA, 25 bp, Homo sapien
aacatggttgcctgttaaggctctt

SEQ ID NO: 4202580 - DNA, 25 bp, Homo sapien
cccgcaacacaaacagtcttgccag

SEQ ID NO: 4202581 - DNA, 25 bp, Homo sapien
ggcccccgcaacacaaacagtcttg

SEQ ID NO: 4202582 - DNA, 25 bp, Homo sapien
acaaacagtcttgccagccgcgtcg

SEQ ID NO: 4202583 - DNA, 25 bp, Homo sapien
gcaacacaaacagtcttgccagccg

SEQ ID NO: 4202584 - DNA, 25 bp, Homo sapien
ggacgttgcggcaggtacttgacca

SEQ ID NO: 4202585 - DNA, 25 bp, Homo sapien
taaagtcaagcgatgtgcccgagga

SEQ ID NO: 4202586 - DNA, 25 bp, Homo sapien
cacaaactcgcggaatgagagtgca

SEQ ID NO: 4202587 - DNA, 25 bp, Homo sapien
taagtcccaaacctgcaatctgagc

SEQ ID NO: 4202588 - DNA, 25 bp, Homo sapien
gcatgagtgcttccgggatactgct

SEQ ID NO: 4202589 - DNA, 25 bp, Homo sapien
gagaaaactgagtggccgccaccaa

SEQ ID NO: 4202590 - DNA, 25 bp, Homo sapien
caaagttgcatgagtgcttccggga

SEQ ID NO: 4202591 - DNA, 25 bp, Homo sapien
tggccgccaccaaagttgcatgagt

SEQ ID NO: 4202592 - DNA, 25 bp, Homo sapien
ttacttcgagatggagctaatgtcc

SEQ ID NO: 4202593 - DNA, 25 bp, Homo sapien
gacgaacagtaatagccgggcaggt

SEQ ID NO: 4202594 - DNA, 25 bp, Homo sapien
taatgaatccttatgggccctgcac

SEQ ID NO: 4202595 - DNA, 25 bp, Homo sapien
gaactctttggaggcacagccacct

SEQ ID NO: 4202596 - DNA, 25 bp, Homo sapien
ctgatctcccaggacacgaatcaaa

SEQ ID NO: 4202597 - DNA, 25 bp, Homo sapien
tctcccaggacacgaatcaaaatac

SEQ ID NO: 4202598 - DNA, 25 bp, Homo sapien
gatctcccaggacacgaatcaaaat

SEQ ID NO: 4202599 - DNA, 25 bp, Homo sapien
tgatctcccaggacacgaatcaaaa

SEQ ID NO: 4202600 - DNA, 25 bp, Homo sapien
caatcctggctataagtaaaataca

SEQ ID NO: 4202601 - DNA, 25 bp, Homo sapien
tactatctatcatgtaccagaccct

SEQ ID NO: 4202602 - DNA, 25 bp, Homo sapien
tgggaaaaatggtaagcctcttatc

SEQ ID NO: 4202603 - DNA, 25 bp, Homo sapien
aaatacaatctcattagctgcaccc

SEQ ID NO: 4202604 - DNA, 25 bp, Homo sapien
gtaaatgactgttaaaggcaataaa

SEQ ID NO: 4202605 - DNA, 25 bp, Homo sapien
acaaaaacaatgctgaaggatatca

SEQ ID NO: 4202606 - DNA, 25 bp, Homo sapien
gaaaaacttccatgtataatagtat

SEQ ID NO: 4202607 - DNA, 25 bp, Homo sapien
tataatagtatccaaatgaatacaa

SEQ ID NO: 4202608 - DNA, 25 bp, Homo sapien
cactttcttatttacccacgtgatt

SEQ ID NO: 4202609 - DNA, 25 bp, Homo sapien
ccactttcttatttacccacgtgat

SEQ ID NO: 4202610 - DNA, 25 bp, Homo sapien
tttcttatttacccacgtgattcag

SEQ ID NO: 4202611 - DNA, 25 bp, Homo sapien
ctttcttatttacccacgtgattca

SEQ ID NO: 4202612 - DNA, 25 bp, Homo sapien
ctgaggctttctgtgtaacatcaaa

SEQ ID NO: 4202613 - DNA, 25 bp, Homo sapien
tatgtaacgtgataccagaaatgga

SEQ ID NO: 4202614 - DNA, 25 bp, Homo sapien
tattcatggatctctgtaccagact

SEQ ID NO: 4202615 - DNA, 25 bp, Homo sapien
gtaccagactctgcgataaatatgg

SEQ ID NO: 4202616 - DNA, 25 bp, Homo sapien
tcttggaatgtttttgattattgct

SEQ ID NO: 4202617 - DNA, 25 bp, Homo sapien
aatctcccataggtctgtgcaagct

SEQ ID NO: 4202618 - DNA, 25 bp, Homo sapien
gattattgcttcaatctcccatagg

SEQ ID NO: 4202619 - DNA, 25 bp, Homo sapien
tgagaaaaattgatgttgattcttc

SEQ ID NO: 4202620 - DNA, 25 bp, Homo sapien
ggcctgagattgctatccctagaaa

SEQ ID NO: 4202621 - DNA, 25 bp, Homo sapien
gaattttggtgcatgctagacagag

SEQ ID NO: 4202622 - DNA, 25 bp, Homo sapien
tccctagaaaggtctgcttgcaagg

SEQ ID NO: 4202623 - DNA, 25 bp, Homo sapien
tatttcctagtaagaacagctcagt

SEQ ID NO: 4202624 - DNA, 25 bp, Homo sapien
acagatttggacatttaggtaaaca

SEQ ID NO: 4202625 - DNA, 25 bp, Homo sapien
gtttagtcaatacctatgtaactca

SEQ ID NO: 4202626 - DNA, 25 bp, Homo sapien
ccacagtgctcagtttatagtacag

SEQ ID NO: 4202627 - DNA, 25 bp, Homo sapien
taggtaaacacccatgtttagtcaa

SEQ ID NO: 4202628 - DNA, 25 bp, Homo sapien
cttttatttcaaaagcataagaact

SEQ ID NO: 4202629 - DNA, 25 bp, Homo sapien
ttatttcaaaagcataagaacttac

SEQ ID NO: 4202630 - DNA, 25 bp, Homo sapien
catgtattaacattaaaagtaaagc

SEQ ID NO: 4202631 - DNA, 25 bp, Homo sapien
aatatcccttttaattataaacatg

SEQ ID NO: 4202632 - DNA, 25 bp, Homo sapien
tgtctgcttctacaggcagtaggtt

SEQ ID NO: 4202633 - DNA, 25 bp, Homo sapien
ctaaaatgtctgcttctacaggcag

SEQ ID NO: 4202634 - DNA, 25 bp, Homo sapien
caagatggtgtagacttgtgtggct

SEQ ID NO: 4202635 - DNA, 25 bp, Homo sapien
taaaatgtctgcttctacaggcagt

SEQ ID NO: 4202636 - DNA, 25 bp, Homo sapien
aaaccaaatccttagcacagaccta

SEQ ID NO: 4202637 - DNA, 25 bp, Homo sapien
gcaaatcagttgcacccagaaagta

SEQ ID NO: 4202638 - DNA, 25 bp, Homo sapien
cagacctagagtataggcatgtatg

SEQ ID NO: 4202639 - DNA, 25 bp, Homo sapien
attaagcaaatcagttgcacccaga

SEQ ID NO: 4202640 - DNA, 25 bp, Homo sapien
gccatctttgcattcgtgtcagcct

SEQ ID NO: 4202641 - DNA, 25 bp, Homo sapien
tatccttatggacagcatagagacc

SEQ ID NO: 4202642 - DNA, 25 bp, Homo sapien
tcactacaggacatcaacatacatt

SEQ ID NO: 4202643 - DNA, 25 bp, Homo sapien
tgcattcgtgtcagccttctatcct

SEQ ID NO: 4202644 - DNA, 25 bp, Homo sapien
caagtgacccaggattcaggtagtg

SEQ ID NO: 4202645 - DNA, 25 bp, Homo sapien
acccaggattcaggtagtgtggttc

SEQ ID NO: 4202646 - DNA, 25 bp, Homo sapien
agtgacccaggattcaggtagtgtg

SEQ ID NO: 4202647 - DNA, 25 bp, Homo sapien
aacaagtgacccaggattcaggtag

SEQ ID NO: 4202648 - DNA, 25 bp, Homo sapien
cctggtaaccataccacactgtcag

SEQ ID NO: 4202649 - DNA, 25 bp, Homo sapien
tcaggtcctggtaaccataccacac

SEQ ID NO: 4202650 - DNA, 25 bp, Homo sapien
aggtcctggtaaccataccacactg

SEQ ID NO: 4202651 - DNA, 25 bp, Homo sapien
actcaggtcctggtaaccataccac

SEQ ID NO: 4202652 - DNA, 25 bp, Homo sapien
tacagcaagcaaatgttggatctag

SEQ ID NO: 4202653 - DNA, 25 bp, Homo sapien
agttgccttgcatctctccagtaca

SEQ ID NO: 4202654 - DNA, 25 bp, Homo sapien
tgttggatctagacacctttcatct

SEQ ID NO: 4202655 - DNA, 25 bp, Homo sapien
cctttcatctgtcaagtctccttgg

SEQ ID NO: 4202656 - DNA, 25 bp, Homo sapien
ctttaaaccttcagctggaagtcta

SEQ ID NO: 4202657 - DNA, 25 bp, Homo sapien
taaaccttcagctggaagtctataa

SEQ ID NO: 4202658 - DNA, 25 bp, Homo sapien
accttcagctggaagtctataacca

SEQ ID NO: 4202659 - DNA, 25 bp, Homo sapien
tcagctggaagtctataaccaaatc

SEQ ID NO: 4202660 - DNA, 25 bp, Homo sapien
tatgcttatcgagaattaatggagc

SEQ ID NO: 4202661 - DNA, 25 bp, Homo sapien
taaattagcacagcctttgcaaagg

SEQ ID NO: 4202662 - DNA, 25 bp, Homo sapien
ttgaggagcaccaataagattatgc

SEQ ID NO: 4202663 - DNA, 25 bp, Homo sapien
tatagtagcacagtaattgaggagc

SEQ ID NO: 4202664 - DNA, 25 bp, Homo sapien
gcacattgagccttaaccagggctt

SEQ ID NO: 4202665 - DNA, 25 bp, Homo sapien
taaactgagggtgatactgtaacat

SEQ ID NO: 4202666 - DNA, 25 bp, Homo sapien
ttcgtttataaactgagggtgatac

SEQ ID NO: 4202667 - DNA, 25 bp, Homo sapien
ggaagtccagcacattgagccttaa

SEQ ID NO: 4202668 - DNA, 25 bp, Homo sapien
cacacctggttgccttgtaatatat

SEQ ID NO: 4202669 - DNA, 25 bp, Homo sapien
ccacacctggttgccttgtaatata

SEQ ID NO: 4202670 - DNA, 25 bp, Homo sapien
accacacctggttgccttgtaatat

SEQ ID NO: 4202671 - DNA, 25 bp, Homo sapien
acacctggttgccttgtaatatatt

SEQ ID NO: 4202672 - DNA, 25 bp, Homo sapien
gcttatcaatctgattaaagggatc

SEQ ID NO: 4202673 - DNA, 25 bp, Homo sapien
actcagtttatagttgaacacaacc

SEQ ID NO: 4202674 - DNA, 25 bp, Homo sapien
tgcaatttgtcattataactcagtt

SEQ ID NO: 4202675 - DNA, 25 bp, Homo sapien
taaagggatcataatgatggaaatg

SEQ ID NO: 4202676 - DNA, 25 bp, Homo sapien
cattatgctagatgtatcattgggc

SEQ ID NO: 4202677 - DNA, 25 bp, Homo sapien
aaatatcttttcgatttgtcatgtg

SEQ ID NO: 4202678 - DNA, 25 bp, Homo sapien
gaattggtaaaaattatctctctgt

SEQ ID NO: 4202679 - DNA, 25 bp, Homo sapien
aaattgctcacaatcacggaacttc

SEQ ID NO: 4202680 - DNA, 25 bp, Homo sapien
tgaaagtgccagatgaattgtcttt

SEQ ID NO: 4202681 - DNA, 25 bp, Homo sapien
gcactatgggttcacaggcattctc

SEQ ID NO: 4202682 - DNA, 25 bp, Homo sapien
caatcaagtcttctaattaacacga

SEQ ID NO: 4202683 - DNA, 25 bp, Homo sapien
tcttttactggtggaggcactatgg

SEQ ID NO: 4202684 - DNA, 25 bp, Homo sapien
aattcttagaaccagtaaacattat

SEQ ID NO: 4202685 - DNA, 25 bp, Homo sapien
tagctaactgaacaaataggaaaca

SEQ ID NO: 4202686 - DNA, 25 bp, Homo sapien
tgttaaaccacagttcaagatgtcc

SEQ ID NO: 4202687 - DNA, 25 bp, Homo sapien
cagtttattttcaatcttactggat

SEQ ID NO: 4202688 - DNA, 25 bp, Homo sapien
tcaggtaggcagtatggctgcaaca

SEQ ID NO: 4202689 - DNA, 25 bp, Homo sapien
cacagccagttgagagagttcaggt

SEQ ID NO: 4202690 - DNA, 25 bp, Homo sapien
ggaggtaacatcctcagctagcatg

SEQ ID NO: 4202691 - DNA, 25 bp, Homo sapien
cacattgagctggaatggtctgcac

SEQ ID NO: 4202692 - DNA, 25 bp, Homo sapien
cagacaatttaatttctgaaaagtc

SEQ ID NO: 4202693 - DNA, 25 bp, Homo sapien
tctgaaaagtcaggaattttgccat

SEQ ID NO: 4202694 - DNA, 25 bp, Homo sapien
tttctgaaaagtcaggaattttgcc

SEQ ID NO: 4202695 - DNA, 25 bp, Homo sapien
aatttctgaaaagtcaggaattttg

SEQ ID NO: 4202696 - DNA, 25 bp, Homo sapien
ccagcgacagatctctgagtatact

SEQ ID NO: 4202697 - DNA, 25 bp, Homo sapien
taggaatttcacaagtaacacagga

SEQ ID NO: 4202698 - DNA, 25 bp, Homo sapien
cacaggaacttccattgcacttgaa

SEQ ID NO: 4202699 - DNA, 25 bp, Homo sapien
agaattttgatgttcagcgccaccc

SEQ ID NO: 4202700 - DNA, 25 bp, Homo sapien
ctttctgtacttaaaatcagcttac

SEQ ID NO: 4202701 - DNA, 25 bp, Homo sapien
tttagaataactttctgtgcaacaa

SEQ ID NO: 4202702 - DNA, 25 bp, Homo sapien
gctttagaataactttctgtgcaac

SEQ ID NO: 4202703 - DNA, 25 bp, Homo sapien
ataactttctgtacttaaaatcagc

SEQ ID NO: 4202704 - DNA, 25 bp, Homo sapien
gtcatcagaatcaacattgtgaact

SEQ ID NO: 4202705 - DNA, 25 bp, Homo sapien
aatcaacattgtgaactatggctgc

SEQ ID NO: 4202706 - DNA, 25 bp, Homo sapien
gaatcaacattgtgaactatggctg

SEQ ID NO: 4202707 - DNA, 25 bp, Homo sapien
tcagaatcaacattgtgaactatgg

SEQ ID NO: 4202708 - DNA, 25 bp, Homo sapien
aattacccattactcaggaatagaa

SEQ ID NO: 4202709 - DNA, 25 bp, Homo sapien
cattacctgaattctctcaatagtc

SEQ ID NO: 4202710 - DNA, 25 bp, Homo sapien
gacataacttattagagaagaaaga

SEQ ID NO: 4202711 - DNA, 25 bp, Homo sapien
gcttcttttacatacccatttccag

SEQ ID NO: 4202712 - DNA, 25 bp, Homo sapien
tttccaggagacgtataagccagag

SEQ ID NO: 4202713 - DNA, 25 bp, Homo sapien
gcaactggaaacaattacaatcaac

SEQ ID NO: 4202714 - DNA, 25 bp, Homo sapien
tattcttaaaagcccatatttagtg

SEQ ID NO: 4202715 - DNA, 25 bp, Homo sapien
cccatatttagtgtataatcaactt

SEQ ID NO: 4202716 - DNA, 25 bp, Homo sapien
ttttcttcataatagcagcaaatgc

SEQ ID NO: 4202717 - DNA, 25 bp, Homo sapien
gagaattagctgatgattcaccaat

SEQ ID NO: 4202718 - DNA, 25 bp, Homo sapien
agagaattagctgatgattcaccaa

SEQ ID NO: 4202719 - DNA, 25 bp, Homo sapien
agaattagctgatgattcaccaata

SEQ ID NO: 4202720 - DNA, 25 bp, Homo sapien
gctaatttcaaaccagctgcctagg

SEQ ID NO: 4202721 - DNA, 25 bp, Homo sapien
gagtcctaagcaacccagaaaatag

SEQ ID NO: 4202722 - DNA, 25 bp, Homo sapien
tgatacagggaactacaacagaact

SEQ ID NO: 4202723 - DNA, 25 bp, Homo sapien
gctctgcagctaagatttgatcact

SEQ ID NO: 4202724 - DNA, 25 bp, Homo sapien
ttatgctaagattcatacgcccggg

SEQ ID NO: 4202725 - DNA, 25 bp, Homo sapien
tatgacttcctaaggcacactcagc

SEQ ID NO: 4202726 - DNA, 25 bp, Homo sapien
tcccagtgaactaggaacttcgtgt

SEQ ID NO: 4202727 - DNA, 25 bp, Homo sapien
tcctatgagacaagccccagggttg

SEQ ID NO: 4202728 - DNA, 25 bp, Homo sapien
aaattctggaactaagataaggtgg

SEQ ID NO: 4202729 - DNA, 25 bp, Homo sapien
aaatgactatcaagatgagacagat

SEQ ID NO: 4202730 - DNA, 25 bp, Homo sapien
gttttcttacctcaacacaactgaa

SEQ ID NO: 4202731 - DNA, 25 bp, Homo sapien
gaactaatggacatagaactgcact

SEQ ID NO: 4202732 - DNA, 25 bp, Homo sapien
tcagaaaaccatgccacaaaggagg

SEQ ID NO: 4202733 - DNA, 25 bp, Homo sapien
caaattcacaagttcgaactaatgg

SEQ ID NO: 4202734 - DNA, 25 bp, Homo sapien
tgtttcttctagctctatgtctatc

SEQ ID NO: 4202735 - DNA, 25 bp, Homo sapien
gtttcttctagctctatgtctatcc

SEQ ID NO: 4202736 - DNA, 25 bp, Homo sapien
cttctagctctatgtctatcctgga

SEQ ID NO: 4202737 - DNA, 25 bp, Homo sapien
ttcttctagctctatgtctatcctg

SEQ ID NO: 4202738 - DNA, 25 bp, Homo sapien
tttaatgttaatggtaaatggcagg

SEQ ID NO: 4202739 - DNA, 25 bp, Homo sapien
atgaaaatgaagtctgggaagtgcc

SEQ ID NO: 4202740 - DNA, 25 bp, Homo sapien
tcaagtaggtatctgcactaaaagg

SEQ ID NO: 4202741 - DNA, 25 bp, Homo sapien
cagccaaaaggatttatcaagtagg

SEQ ID NO: 4202742 - DNA, 25 bp, Homo sapien
actagttctggtctatgtggaaatc

SEQ ID NO: 4202743 - DNA, 25 bp, Homo sapien
ttcaaactagttctggtctatgtgg

SEQ ID NO: 4202744 - DNA, 25 bp, Homo sapien
tcaaactagttctggtctatgtgga

SEQ ID NO: 4202745 - DNA, 25 bp, Homo sapien
atcttcaaactagttctggtctatg

SEQ ID NO: 4202746 - DNA, 25 bp, Homo sapien
catgaaaggcaagaattctggtcca

SEQ ID NO: 4202747 - DNA, 25 bp, Homo sapien
aaaggcaagaattctggtccataaa

SEQ ID NO: 4202748 - DNA, 25 bp, Homo sapien
gaaaggcaagaattctggtccataa

SEQ ID NO: 4202749 - DNA, 25 bp, Homo sapien
tgaaaggcaagaattctggtccata

SEQ ID NO: 4202750 - DNA, 25 bp, Homo sapien
ggctgcagtacagcgaatatggctg

SEQ ID NO: 4202751 - DNA, 25 bp, Homo sapien
tgccagattgttcctccagaagctt

SEQ ID NO: 4202752 - DNA, 25 bp, Homo sapien
acagcaaatggtgctgccagattgt

SEQ ID NO: 4202753 - DNA, 25 bp, Homo sapien
tagattctttgggatgggttcgcac

SEQ ID NO: 4202754 - DNA, 25 bp, Homo sapien
catggcttccatggtactatcactg

SEQ ID NO: 4202755 - DNA, 25 bp, Homo sapien
tcactggtatgaaaagtacccacag

SEQ ID NO: 4202756 - DNA, 25 bp, Homo sapien
tacaaatgttatagagtcccctaac

SEQ ID NO: 4202757 - DNA, 25 bp, Homo sapien
tgtcaaaaccactagagtacaccag

SEQ ID NO: 4202758 - DNA, 25 bp, Homo sapien
cagatgatcagctgcatgcttacaa

SEQ ID NO: 4202759 - DNA, 25 bp, Homo sapien
gatcatggaccaaactggagcttag

SEQ ID NO: 4202760 - DNA, 25 bp, Homo sapien
aacctttatggccttggacttgtga

SEQ ID NO: 4202761 - DNA, 25 bp, Homo sapien
tcacatggtagaagactggctagga

SEQ ID NO: 4202762 - DNA, 25 bp, Homo sapien
tcaattaatagtggcttagacacca

SEQ ID NO: 4202763 - DNA, 25 bp, Homo sapien
gagaagcccgaaatagaaagcttta

SEQ ID NO: 4202764 - DNA, 25 bp, Homo sapien
tcttggttcacaggaactagcagtt

SEQ ID NO: 4202765 - DNA, 25 bp, Homo sapien
caattatctggatggatagtctgga

SEQ ID NO: 4202766 - DNA, 25 bp, Homo sapien
cttgattatctttgcaaaatatttt

SEQ ID NO: 4202767 - DNA, 25 bp, Homo sapien
tgcaaaatattttagtaagactcat

SEQ ID NO: 4202768 - DNA, 25 bp, Homo sapien
tctttgcaaaatattttagtaagac

SEQ ID NO: 4202769 - DNA, 25 bp, Homo sapien
tttgcaaaatattttagtaagactc

SEQ ID NO: 4202770 - DNA, 25 bp, Homo sapien
tcaagttagtcctcagttactgcct

SEQ ID NO: 4202771 - DNA, 25 bp, Homo sapien
caaacttttcaagttagtcctcagt

SEQ ID NO: 4202772 - DNA, 25 bp, Homo sapien
aagttagtcctcagttactgccttt

SEQ ID NO: 4202773 - DNA, 25 bp, Homo sapien
ttcaagttagtcctcagttactgcc

SEQ ID NO: 4202774 - DNA, 25 bp, Homo sapien
ttcatactcatccaaacaaatggca

SEQ ID NO: 4202775 - DNA, 25 bp, Homo sapien
ctttagttagtatgctgcggttgat

SEQ ID NO: 4202776 - DNA, 25 bp, Homo sapien
agtatgctgcggttgatacttttat

SEQ ID NO: 4202777 - DNA, 25 bp, Homo sapien
tagttagtatgctgcggttgatact

SEQ ID NO: 4202778 - DNA, 25 bp, Homo sapien
tagtatgctgcggttgatactttta

SEQ ID NO: 4202779 - DNA, 25 bp, Homo sapien
gccttgagaaggaacaactttttgc

SEQ ID NO: 4202780 - DNA, 25 bp, Homo sapien
agtctgaatcgccttgagaaggaac

SEQ ID NO: 4202781 - DNA, 25 bp, Homo sapien
ggtctcagtaaaggggtatgttctg

SEQ ID NO: 4202782 - DNA, 25 bp, Homo sapien
caactttttgcttgcacactggaca

SEQ ID NO: 4202783 - DNA, 25 bp, Homo sapien
tcaaacagtatttgctatgttgtaa

SEQ ID NO: 4202784 - DNA, 25 bp, Homo sapien
tatttgctatgttgtaatcccgttc

SEQ ID NO: 4202785 - DNA, 25 bp, Homo sapien
cagtatttgctatgttgtaatcccg

SEQ ID NO: 4202786 - DNA, 25 bp, Homo sapien
tttgctatgttgtaatcccgttcac

SEQ ID NO: 4202787 - DNA, 25 bp, Homo sapien
gcagataaataccagatcaaaagtc

SEQ ID NO: 4202788 - DNA, 25 bp, Homo sapien
cttaattgcaagctatactgaggat

SEQ ID NO: 4202789 - DNA, 25 bp, Homo sapien
gggaaataaaccaatcatcttctga

SEQ ID NO: 4202790 - DNA, 25 bp, Homo sapien
tactgtgatctaggtcttaattgca

SEQ ID NO: 4202791 - DNA, 25 bp, Homo sapien
tacaacagggtaccaaaatgtacac

SEQ ID NO: 4202792 - DNA, 25 bp, Homo sapien
tgcatgtgaatggtcagttaccttg

SEQ ID NO: 4202793 - DNA, 25 bp, Homo sapien
taattttggcagcagtctaaacttt

SEQ ID NO: 4202794 - DNA, 25 bp, Homo sapien
gggatattacctaactgcatgtgaa

SEQ ID NO: 4202795 - DNA, 25 bp, Homo sapien
tctttcgaatggcactactttaggg

SEQ ID NO: 4202796 - DNA, 25 bp, Homo sapien
ggtatcccaacataaccatctggag

SEQ ID NO: 4202797 - DNA, 25 bp, Homo sapien
gcacttgagcagagacaaaccttta

SEQ ID NO: 4202798 - DNA, 25 bp, Homo sapien
tgtctacaggacatatgaagagtgc

SEQ ID NO: 4202799 - DNA, 25 bp, Homo sapien
tgtccacggaggcacacttaacaag

SEQ ID NO: 4202800 - DNA, 25 bp, Homo sapien
agactctgggttctagctgctaggc

SEQ ID NO: 4202801 - DNA, 25 bp, Homo sapien
tgaactcgctttatacctgaggagg

SEQ ID NO: 4202802 - DNA, 25 bp, Homo sapien
tattaagcaaggtgccggttgtaca

SEQ ID NO: 4202803 - DNA, 25 bp, Homo sapien
cttggcgcgaagaaatgctcagtga

SEQ ID NO: 4202804 - DNA, 25 bp, Homo sapien
tctatacgtcgatggtgactgcaca

SEQ ID NO: 4202805 - DNA, 25 bp, Homo sapien
catacaatgtggctgtcggcagagc

SEQ ID NO: 4202806 - DNA, 25 bp, Homo sapien
tgactgcacaatggacatccggaca

SEQ ID NO: 4202807 - DNA, 25 bp, Homo sapien
tctagttactctaagcagagaagtg

SEQ ID NO: 4202808 - DNA, 25 bp, Homo sapien
gggttgaagtccatctcatcacgta

SEQ ID NO: 4202809 - DNA, 25 bp, Homo sapien
gtaatgggactgaatatgatagacc

SEQ ID NO: 4202810 - DNA, 25 bp, Homo sapien
caggcaccagctgacttaatacagt

SEQ ID NO: 4202811 - DNA, 25 bp, Homo sapien
gttatccccagttatgcaacatagc

SEQ ID NO: 4202812 - DNA, 25 bp, Homo sapien
tcaattatctgcgaagaccaggagc

SEQ ID NO: 4202813 - DNA, 25 bp, Homo sapien
gattcatcgatatacggttatcccc

SEQ ID NO: 4202814 - DNA, 25 bp, Homo sapien
agtccctccctctttagtggtggca

SEQ ID NO: 4202815 - DNA, 25 bp, Homo sapien
caacaatgaaagatcggcgaagctc

SEQ ID NO: 4202816 - DNA, 25 bp, Homo sapien
aagacggtgcccttagagactcgga

SEQ ID NO: 4202817 - DNA, 25 bp, Homo sapien
tgtctagtcctagtgcccagaggct

SEQ ID NO: 4202818 - DNA, 25 bp, Homo sapien
gactcggagattagcgtgggcaacc

SEQ ID NO: 4202819 - DNA, 25 bp, Homo sapien
tccaactctgtgctataacaataag

SEQ ID NO: 4202820 - DNA, 25 bp, Homo sapien
tactgaaaaccaagacagcacatgg

SEQ ID NO: 4202821 - DNA, 25 bp, Homo sapien
catcatgttggaaaagtaagcagta

SEQ ID NO: 4202822 - DNA, 25 bp, Homo sapien
taacaataagatagtaacgtctaga

SEQ ID NO: 4202823 - DNA, 25 bp, Homo sapien
tataagcaacacttagatgaaatag

SEQ ID NO: 4202824 - DNA, 25 bp, Homo sapien
tattactaaagctcagtattccacc

SEQ ID NO: 4202825 - DNA, 25 bp, Homo sapien
tactcctttggacttaagtgaacca

SEQ ID NO: 4202826 - DNA, 25 bp, Homo sapien
gaagggatcactgtacacaaatgga

SEQ ID NO: 4202827 - DNA, 25 bp, Homo sapien
ctcaggttggtaaaattagcctact

SEQ ID NO: 4202828 - DNA, 25 bp, Homo sapien
tctttggtcaatgtccatctattca

SEQ ID NO: 4202829 - DNA, 25 bp, Homo sapien
tagcctactctcatgtttgtttatg

SEQ ID NO: 4202830 - DNA, 25 bp, Homo sapien
ttgacctcaggttggtaaaattagc

SEQ ID NO: 4202831 - DNA, 25 bp, Homo sapien
gaccacattgctcacgtgctttgca

SEQ ID NO: 4202832 - DNA, 25 bp, Homo sapien
taatacataccaacaagtacagcgg

SEQ ID NO: 4202833 - DNA, 25 bp, Homo sapien
gagctgcaacacttgttacctgtaa

SEQ ID NO: 4202834 - DNA, 25 bp, Homo sapien
tcaagaggtcttgaaaacaagccat

SEQ ID NO: 4202835 - DNA, 25 bp, Homo sapien
ctcctgtggttattggcctgtaatc

SEQ ID NO: 4202836 - DNA, 25 bp, Homo sapien
cagttccacagtctctgtacaggag

SEQ ID NO: 4202837 - DNA, 25 bp, Homo sapien
gtggtacatgctttcaaacgaccag

SEQ ID NO: 4202838 - DNA, 25 bp, Homo sapien
ttttccattcaagcctttgcccact

SEQ ID NO: 4202839 - DNA, 25 bp, Homo sapien
ccatgcccaagagaggaaagcgact

SEQ ID NO: 4202840 - DNA, 25 bp, Homo sapien
cgagtcaagaaagccgtagccaacg

SEQ ID NO: 4202841 - DNA, 25 bp, Homo sapien
ttgtaccgaaggcactacacgctgg

SEQ ID NO: 4202842 - DNA, 25 bp, Homo sapien
tagccaacgctgttcggcaggaagt

SEQ ID NO: 4202843 - DNA, 25 bp, Homo sapien
cactgacagtgatgtcaaagagcat

SEQ ID NO: 4202844 - DNA, 25 bp, Homo sapien
tgtctttgtattaatagctttgtct

SEQ ID NO: 4202845 - DNA, 25 bp, Homo sapien
tctgcaaatggatctaaggaaatgt

SEQ ID NO: 4202846 - DNA, 25 bp, Homo sapien
agctttgtctgcaaatggatctaag

SEQ ID NO: 4202847 - DNA, 25 bp, Homo sapien
ctttgtattaatagctttgtctgca

SEQ ID NO: 4202848 - DNA, 25 bp, Homo sapien
actgtgaaagcaagaactcttaata

SEQ ID NO: 4202849 - DNA, 25 bp, Homo sapien
ataatactgtgaaagcaagaactct

SEQ ID NO: 4202850 - DNA, 25 bp, Homo sapien
atactgtgaaagcaagaactcttaa

SEQ ID NO: 4202851 - DNA, 25 bp, Homo sapien
tgtgaaagcaagaactcttaataac

SEQ ID NO: 4202852 - DNA, 25 bp, Homo sapien
tgtatacttcaggatgacgctctca

SEQ ID NO: 4202853 - DNA, 25 bp, Homo sapien
tacttcaggatgacgctctcatcat

SEQ ID NO: 4202854 - DNA, 25 bp, Homo sapien
tatacttcaggatgacgctctcatc

SEQ ID NO: 4202855 - DNA, 25 bp, Homo sapien
cctgtatacttcaggatgacgctct

SEQ ID NO: 4202856 - DNA, 25 bp, Homo sapien
gcttccaccttattagtgcctgctt

SEQ ID NO: 4202857 - DNA, 25 bp, Homo sapien
ggcttccaccttattagtgcctgct

SEQ ID NO: 4202858 - DNA, 25 bp, Homo sapien
atggcttccaccttattagtgcctg

SEQ ID NO: 4202859 - DNA, 25 bp, Homo sapien
tgcattcccctcctctaaattggca

SEQ ID NO: 4202860 - DNA, 25 bp, Homo sapien
tcgcttgagacaactccctttgttt

SEQ ID NO: 4202861 - DNA, 25 bp, Homo sapien
gggaatcttcgcttgagacaactcc

SEQ ID NO: 4202862 - DNA, 25 bp, Homo sapien
aattggcataggtgacaagcccaaa

SEQ ID NO: 4202863 - DNA, 25 bp, Homo sapien
aaaaccaccttcacagctactacca

SEQ ID NO: 4202864 - DNA, 25 bp, Homo sapien
accaccttcacagctactaccaaag

SEQ ID NO: 4202865 - DNA, 25 bp, Homo sapien
accttcacagctactaccaaagttt

SEQ ID NO: 4202866 - DNA, 25 bp, Homo sapien
ccaaaaccaccttcacagctactac

SEQ ID NO: 4202867 - DNA, 25 bp, Homo sapien
ctaagcaccaacattacagaattca

SEQ ID NO: 4202868 - DNA, 25 bp, Homo sapien
taagcaccaacattacagaattcat

SEQ ID NO: 4202869 - DNA, 25 bp, Homo sapien
actgctagcattaatgctgcctctg

SEQ ID NO: 4202870 - DNA, 25 bp, Homo sapien
ctgttcaccacttctgtagcctctg

SEQ ID NO: 4202871 - DNA, 25 bp, Homo sapien
attgcttccactgctagcattaatg

SEQ ID NO: 4202872 - DNA, 25 bp, Homo sapien
tagcagtcataggtgccaatcctgc

SEQ ID NO: 4202873 - DNA, 25 bp, Homo sapien
accagaacttctgcctccaaagttt

SEQ ID NO: 4202874 - DNA, 25 bp, Homo sapien
cagaacttctgcctccaaagttttc

SEQ ID NO: 4202875 - DNA, 25 bp, Homo sapien
gaaccagaacttctgcctccaaagt

SEQ ID NO: 4202876 - DNA, 25 bp, Homo sapien
gaacttctgcctccaaagttttctc

SEQ ID NO: 4202877 - DNA, 25 bp, Homo sapien
ttctctagctttcctctactgctaa

SEQ ID NO: 4202878 - DNA, 25 bp, Homo sapien
cagctgccttggttttatggtttgg

SEQ ID NO: 4202879 - DNA, 25 bp, Homo sapien
cacagctgccttggttttatggttt

SEQ ID NO: 4202880 - DNA, 25 bp, Homo sapien
gctgccttggttttatggtttggca

SEQ ID NO: 4202881 - DNA, 25 bp, Homo sapien
caggactctcagcaggactaacacc

SEQ ID NO: 4202882 - DNA, 25 bp, Homo sapien
ctctcagcaggactaacaccagcag

SEQ ID NO: 4202883 - DNA, 25 bp, Homo sapien
ctgttgatgcccccattgcaggact

SEQ ID NO: 4202884 - DNA, 25 bp, Homo sapien
agtggttatggtcccccctgttgat

SEQ ID NO: 4202885 - DNA, 25 bp, Homo sapien
ccctgtaccttcttcccgcagttct

SEQ ID NO: 4202886 - DNA, 25 bp, Homo sapien
ctgtaccttcttcccgcagttctct

SEQ ID NO: 4202887 - DNA, 25 bp, Homo sapien
tgtaccttcttcccgcagttctcta

SEQ ID NO: 4202888 - DNA, 25 bp, Homo sapien
gtaccttcttcccgcagttctctac

SEQ ID NO: 4202889 - DNA, 25 bp, Homo sapien
ctgtggaccaataaaaggagcccat

SEQ ID NO: 4202890 - DNA, 25 bp, Homo sapien
taaaattcaggcgtgtccaggtacc

SEQ ID NO: 4202891 - DNA, 25 bp, Homo sapien
gtaaaattcaggcgtgtccaggtac

SEQ ID NO: 4202892 - DNA, 25 bp, Homo sapien
cagtaaaattcaggcgtgtccaggt

SEQ ID NO: 4202893 - DNA, 25 bp, Homo sapien
aaaattcaggcgtgtccaggtacct

SEQ ID NO: 4202894 - DNA, 25 bp, Homo sapien
tttaaatagattctgcccacaggtg

SEQ ID NO: 4202895 - DNA, 25 bp, Homo sapien
cctggggacggccacaaagcattgc

SEQ ID NO: 4202896 - DNA, 25 bp, Homo sapien
aatgagcttacccctatcccctggg

SEQ ID NO: 4202897 - DNA, 25 bp, Homo sapien
agagcagcagccatgagatctccac

SEQ ID NO: 4202898 - DNA, 25 bp, Homo sapien
agttccacatggctgtgtcaccggt

SEQ ID NO: 4202899 - DNA, 25 bp, Homo sapien
ttttggctagcctgaatcttgagag

SEQ ID NO: 4202900 - DNA, 25 bp, Homo sapien
cttgagaggacaatccctctcttcc

SEQ ID NO: 4202901 - DNA, 25 bp, Homo sapien
agatacttccattcttttggctagc

SEQ ID NO: 4202902 - DNA, 25 bp, Homo sapien
cctgaatcttgagaggacaatccct

SEQ ID NO: 4202903 - DNA, 25 bp, Homo sapien
tcttattgtccacttcccaagcaaa

SEQ ID NO: 4202904 - DNA, 25 bp, Homo sapien
ttattgtccacttcccaagcaaatt

SEQ ID NO: 4202905 - DNA, 25 bp, Homo sapien
tattgtccacttcccaagcaaattc

SEQ ID NO: 4202906 - DNA, 25 bp, Homo sapien
cttcttattgtccacttcccaagca

SEQ ID NO: 4202907 - DNA, 25 bp, Homo sapien
tccacggagaatgcatccgcgtctc

SEQ ID NO: 4202908 - DNA, 25 bp, Homo sapien
aggagggtgtgagcgtgtattgagg

SEQ ID NO: 4202909 - DNA, 25 bp, Homo sapien
gaatgcatccgcgtctcaagagtcg

SEQ ID NO: 4202910 - DNA, 25 bp, Homo sapien
tccgcgtctcaagagtcggagtccc

SEQ ID NO: 4202911 - DNA, 25 bp, Homo sapien
ccagttatcgttgacgccctcgtct

SEQ ID NO: 4202912 - DNA, 25 bp, Homo sapien
gttgacgccctcgtcttagtcctcg

SEQ ID NO: 4202913 - DNA, 25 bp, Homo sapien
ttttttaagtcttgatcgtcatccc

SEQ ID NO: 4202914 - DNA, 25 bp, Homo sapien
ttaagtcttgatcgtcatcccagtt

SEQ ID NO: 4202915 - DNA, 25 bp, Homo sapien
ctgtttttacggcaaagtacagtca

SEQ ID NO: 4202916 - DNA, 25 bp, Homo sapien
tgtttttacggcaaagtacagtcag

SEQ ID NO: 4202917 - DNA, 25 bp, Homo sapien
actggtgcaatgtgctgagcacgtt

SEQ ID NO: 4202918 - DNA, 25 bp, Homo sapien
aactggtgcaatgtgctgagcacgt

SEQ ID NO: 4202919 - DNA, 25 bp, Homo sapien
taactggtgcaatgtgctgagcacg

SEQ ID NO: 4202920 - DNA, 25 bp, Homo sapien
tatcctctcaggataactgggagcc

SEQ ID NO: 4202921 - DNA, 25 bp, Homo sapien
gatgagaacggacctgataaactgg

SEQ ID NO: 4202922 - DNA, 25 bp, Homo sapien
acctgataaactgggctgaggatta

SEQ ID NO: 4202923 - DNA, 25 bp, Homo sapien
gaggattacgggtgttatcctctca

SEQ ID NO: 4202924 - DNA, 25 bp, Homo sapien
agctccatggcagattttgtctgga

SEQ ID NO: 4202925 - DNA, 25 bp, Homo sapien
ttttgcctgtgttatccattaaagc

SEQ ID NO: 4202926 - DNA, 25 bp, Homo sapien
gcctgtgttatccattaaagctcca

SEQ ID NO: 4202927 - DNA, 25 bp, Homo sapien
tatccattaaagctccatggcagat

SEQ ID NO: 4202928 - DNA, 25 bp, Homo sapien
cattggccgtagactacggtccaaa

SEQ ID NO: 4202929 - DNA, 25 bp, Homo sapien
cctcattggccgtagactacggtcc

SEQ ID NO: 4202930 - DNA, 25 bp, Homo sapien
tcattggccgtagactacggtccaa

SEQ ID NO: 4202931 - DNA, 25 bp, Homo sapien
ctcattggccgtagactacggtcca

SEQ ID NO: 4202932 - DNA, 25 bp, Homo sapien
tccattgtctggttacgccagctgc

SEQ ID NO: 4202933 - DNA, 25 bp, Homo sapien
gtctggttacgccagctgctgtctg

SEQ ID NO: 4202934 - DNA, 25 bp, Homo sapien
gttttgaggcaatttacagctggaa

SEQ ID NO: 4202935 - DNA, 25 bp, Homo sapien
tttgaggcaatttacagctggaaga

SEQ ID NO: 4202936 - DNA, 25 bp, Homo sapien
tcactcccatgctctgctccccaga

SEQ ID NO: 4202937 - DNA, 25 bp, Homo sapien
cactcccatgctctgctccccagac

SEQ ID NO: 4202938 - DNA, 25 bp, Homo sapien
cagggcatatccgaagggcagaaag

SEQ ID NO: 4202939 - DNA, 25 bp, Homo sapien
gaatcagaaggagtaagcagggcat

SEQ ID NO: 4202940 - DNA, 25 bp, Homo sapien
gactgcatgatcaaaggtgtggaat

SEQ ID NO: 4202941 - DNA, 25 bp, Homo sapien
tatatgttggagttgagtacttcgc

SEQ ID NO: 4202942 - DNA, 25 bp, Homo sapien
cttgggaccaggtcagcttgatgac

SEQ ID NO: 4202943 - DNA, 25 bp, Homo sapien
ttgggaccaggtcagcttgatgacc

SEQ ID NO: 4202944 - DNA, 25 bp, Homo sapien
gtcagcttgatgaccctcacctgga

SEQ ID NO: 4202945 - DNA, 25 bp, Homo sapien
cagcttgatgaccctcacctggatt

SEQ ID NO: 4202946 - DNA, 25 bp, Homo sapien
gttctctcgcattagaggccagttt

SEQ ID NO: 4202947 - DNA, 25 bp, Homo sapien
ctgggatcctgacgagggcttcagg

SEQ ID NO: 4202948 - DNA, 25 bp, Homo sapien
agggcttcaggttctctcgcattag

SEQ ID NO: 4202949 - DNA, 25 bp, Homo sapien
caggttctctcgcattagaggccag

SEQ ID NO: 4202950 - DNA, 25 bp, Homo sapien
ctgcagagaagatttgccatttgct

SEQ ID NO: 4202951 - DNA, 25 bp, Homo sapien
gacaattcgttgtgccaggtactgt

SEQ ID NO: 4202952 - DNA, 25 bp, Homo sapien
gaagatttgccatttgcttgacaat

SEQ ID NO: 4202953 - DNA, 25 bp, Homo sapien
tttgcttgacaattcgttgtgccag

SEQ ID NO: 4202954 - DNA, 25 bp, Homo sapien
attatgaggagactccagaatggat

SEQ ID NO: 4202955 - DNA, 25 bp, Homo sapien
aggattatgaggagactccagaatg

SEQ ID NO: 4202956 - DNA, 25 bp, Homo sapien
agaatggattgtgagtactgggtct

SEQ ID NO: 4202957 - DNA, 25 bp, Homo sapien
gaatggattgtgagtactgggtctc

SEQ ID NO: 4202958 - DNA, 25 bp, Homo sapien
ctttacttcgaagatggtgccttaa

SEQ ID NO: 4202959 - DNA, 25 bp, Homo sapien
tccagagaagacgaacactgtgtcc

SEQ ID NO: 4202960 - DNA, 25 bp, Homo sapien
ttataaggtgctaatgccattggtg

SEQ ID NO: 4202961 - DNA, 25 bp, Homo sapien
tttggagcggacgtaaacattcaag

SEQ ID NO: 4202962 - DNA, 25 bp, Homo sapien
tcagcatagttttgcttcagcatct

SEQ ID NO: 4202963 - DNA, 25 bp, Homo sapien
tgcttcagcatctttgagtttattg

SEQ ID NO: 4202964 - DNA, 25 bp, Homo sapien
gcatctttgagtttattgattggaa

SEQ ID NO: 4202965 - DNA, 25 bp, Homo sapien
gagtttattgattggaatgtggcaa

SEQ ID NO: 4202966 - DNA, 25 bp, Homo sapien
ttctcagtattgatgattttatggt

SEQ ID NO: 4202967 - DNA, 25 bp, Homo sapien
acaatactcttgaaatccaatacag

SEQ ID NO: 4202968 - DNA, 25 bp, Homo sapien
caaggacaatactcttgaaatccaa

SEQ ID NO: 4202969 - DNA, 25 bp, Homo sapien
acagaaagagtgaggcctgacatgt

SEQ ID NO: 4202970 - DNA, 25 bp, Homo sapien
tattcagagcctttggaaccaccat

SEQ ID NO: 4202971 - DNA, 25 bp, Homo sapien
atctcaaaattttccgagctgggcc

SEQ ID NO: 4202972 - DNA, 25 bp, Homo sapien
tttcagaggatcagccatgttattt

SEQ ID NO: 4202973 - DNA, 25 bp, Homo sapien
gcatctcaaaattttccgagctggg

SEQ ID NO: 4202974 - DNA, 25 bp, Homo sapien
attttcatgtctgcttgaaggatgg

SEQ ID NO: 4202975 - DNA, 25 bp, Homo sapien
tctgtgaggcactgtctttcatgct

SEQ ID NO: 4202976 - DNA, 25 bp, Homo sapien
gcttgtttctcctaagagagacctg

SEQ ID NO: 4202977 - DNA, 25 bp, Homo sapien
gcttccactacggaccagctggctt

SEQ ID NO: 4202978 - DNA, 25 bp, Homo sapien
catgctgttcacaagttggtccaag

SEQ ID NO: 4202979 - DNA, 25 bp, Homo sapien
gataaacgccacaatttccctctgg

SEQ ID NO: 4202980 - DNA, 25 bp, Homo sapien
aatgggtcgtttcagataaacgcca

SEQ ID NO: 4202981 - DNA, 25 bp, Homo sapien
attgcaaatccatctaaatgggtcg

SEQ ID NO: 4202982 - DNA, 25 bp, Homo sapien
gccacaatttccctctggattggaa

SEQ ID NO: 4202983 - DNA, 25 bp, Homo sapien
caaagctccaagctaaagctaaagg

SEQ ID NO: 4202984 - DNA, 25 bp, Homo sapien
tgcctctgggttgctgctatatgcg

SEQ ID NO: 4202985 - DNA, 25 bp, Homo sapien
ggtctaagggtagccatggtgtcaa

SEQ ID NO: 4202986 - DNA, 25 bp, Homo sapien
tggtccatcttagatgatcttgggc

SEQ ID NO: 4202987 - DNA, 25 bp, Homo sapien
gctatatgcgtacatctaattttga

SEQ ID NO: 4202988 - DNA, 25 bp, Homo sapien
ttggggatcaaggtctcgcctttga

SEQ ID NO: 4202989 - DNA, 25 bp, Homo sapien
atgttggggatcaaggtctcgcctt

SEQ ID NO: 4202990 - DNA, 25 bp, Homo sapien
ggatcaaggtctcgcctttgatttt

SEQ ID NO: 4202991 - DNA, 25 bp, Homo sapien
caaggtctcgcctttgatttttctc

SEQ ID NO: 4202992 - DNA, 25 bp, Homo sapien
cttggagaagcatgttgagcaatct

SEQ ID NO: 4202993 - DNA, 25 bp, Homo sapien
cagtggctttaaccgttcttggaga

SEQ ID NO: 4202994 - DNA, 25 bp, Homo sapien
agctctttgacatcgtggaacagga

SEQ ID NO: 4202995 - DNA, 25 bp, Homo sapien
ctgggctgtcgggttactctctcca

SEQ ID NO: 4202996 - DNA, 25 bp, Homo sapien
acaaataaaatgtgtacatgagctg

SEQ ID NO: 4202997 - DNA, 25 bp, Homo sapien
tgacagagtatttatggttttattt

SEQ ID NO: 4202998 - DNA, 25 bp, Homo sapien
aataaaatgtgtacatgagctgtct

SEQ ID NO: 4202999 - DNA, 25 bp, Homo sapien
ataaaatgtgtacatgagctgtcta

SEQ ID NO: 4203000 - DNA, 25 bp, Homo sapien
tggcatagagcaaacgccagggcag

SEQ ID NO: 4203001 - DNA, 25 bp, Homo sapien
ggaagaactgcctgccactagtagc

SEQ ID NO: 4203002 - DNA, 25 bp, Homo sapien
caaggcactctttgtggtgaactcc

SEQ ID NO: 4203003 - DNA, 25 bp, Homo sapien
gctatagccctggtgcaaggcactc

SEQ ID NO: 4203004 - DNA, 25 bp, Homo sapien
gaacaagcagattcaagaaaactgc

SEQ ID NO: 4203005 - DNA, 25 bp, Homo sapien
gaagcttttaaagtagaacaagcag

SEQ ID NO: 4203006 - DNA, 25 bp, Homo sapien
cttgaaaaatctagctggggaggag

SEQ ID NO: 4203007 - DNA, 25 bp, Homo sapien
gccatctggtttccacgctgcagat

SEQ ID NO: 4203008 - DNA, 25 bp, Homo sapien
tactagccaaactacagagcagtct

SEQ ID NO: 4203009 - DNA, 25 bp, Homo sapien
tagttagaataaatacccagtgtcc

SEQ ID NO: 4203010 - DNA, 25 bp, Homo sapien
tgagcccaggtttgcccatctaaaa

SEQ ID NO: 4203011 - DNA, 25 bp, Homo sapien
cactaaaagtatggagcctaaggct

SEQ ID NO: 4203012 - DNA, 25 bp, Homo sapien
caatgattgttacgctttgacctag

SEQ ID NO: 4203013 - DNA, 25 bp, Homo sapien
gaaaattcgacttcaagataagccc

SEQ ID NO: 4203014 - DNA, 25 bp, Homo sapien
taagccatccccagtgaacatacaa

SEQ ID NO: 4203015 - DNA, 25 bp, Homo sapien
actatgactgttggtgcttccccgc

SEQ ID NO: 4203016 - DNA, 25 bp, Homo sapien
catgagctctggactatctgggtcc

SEQ ID NO: 4203017 - DNA, 25 bp, Homo sapien
tgactcgggcgagttactgagccca

SEQ ID NO: 4203018 - DNA, 25 bp, Homo sapien
tagcgaagtgaagtgtgtacgagca

SEQ ID NO: 4203019 - DNA, 25 bp, Homo sapien
tcacgacaccttggacgaagctgca

SEQ ID NO: 4203020 - DNA, 25 bp, Homo sapien
cagagcttctgtggataagagtaat

SEQ ID NO: 4203021 - DNA, 25 bp, Homo sapien
tctgtggataagagtaatgagcatc

SEQ ID NO: 4203022 - DNA, 25 bp, Homo sapien
gtgggtaggttaacagagcttctgt

SEQ ID NO: 4203023 - DNA, 25 bp, Homo sapien
atcctctcctagtgcaggtcctctt

SEQ ID NO: 4203024 - DNA, 25 bp, Homo sapien
tgcctggctgtagcccattttcatt

SEQ ID NO: 4203025 - DNA, 25 bp, Homo sapien
agaaaaggctgttaggtgtgaccag

SEQ ID NO: 4203026 - DNA, 25 bp, Homo sapien
ttaggtgtgaccaggatggtcggga

SEQ ID NO: 4203027 - DNA, 25 bp, Homo sapien
ggtgtgaccaggatggtcgggagcc

SEQ ID NO: 4203028 - DNA, 25 bp, Homo sapien
actagtaatctattggaacacccca

SEQ ID NO: 4203029 - DNA, 25 bp, Homo sapien
gtattgggggtacactagtaatcta

SEQ ID NO: 4203030 - DNA, 25 bp, Homo sapien
gtatgcaacaaccaactccagcatg

SEQ ID NO: 4203031 - DNA, 25 bp, Homo sapien
cccaggctttcgaatttggaaatca

SEQ ID NO: 4203032 - DNA, 25 bp, Homo sapien
tgagagcccgagtgcacaaccagga

SEQ ID NO: 4203033 - DNA, 25 bp, Homo sapien
agagcccgagtgcacaaccaggagg

SEQ ID NO: 4203034 - DNA, 25 bp, Homo sapien
tctgggctgagagcccgagtgcaca

SEQ ID NO: 4203035 - DNA, 25 bp, Homo sapien
ggctgagagcccgagtgcacaacca

SEQ ID NO: 4203036 - DNA, 25 bp, Homo sapien
ccggcttctgagttagagggagaat

SEQ ID NO: 4203037 - DNA, 25 bp, Homo sapien
ggagaatctttactgactgctggca

SEQ ID NO: 4203038 - DNA, 25 bp, Homo sapien
tgctggcagcgttgggattgtccct

SEQ ID NO: 4203039 - DNA, 25 bp, Homo sapien
tgtatgaggagacccgaaatgctcc

SEQ ID NO: 4203040 - DNA, 25 bp, Homo sapien
tgcttcgctgcctgaaccttactga

SEQ ID NO: 4203041 - DNA, 25 bp, Homo sapien
cagtccctgccagtatttattaccc

SEQ ID NO: 4203042 - DNA, 25 bp, Homo sapien
cagtatttattacccaggtcctgtg

SEQ ID NO: 4203043 - DNA, 25 bp, Homo sapien
caaccctgactcaacactgtcaaga

SEQ ID NO: 4203044 - DNA, 25 bp, Homo sapien
ttctgagtctctgcgcttcggagtg

SEQ ID NO: 4203045 - DNA, 25 bp, Homo sapien
attgattctgagtctctgcgcttcg

SEQ ID NO: 4203046 - DNA, 25 bp, Homo sapien
gattctgagtctctgcgcttcggag

SEQ ID NO: 4203047 - DNA, 25 bp, Homo sapien
gagtctctgcgcttcggagtgtttg

SEQ ID NO: 4203048 - DNA, 25 bp, Homo sapien
ccctgcttgatctctctcaggcagg

SEQ ID NO: 4203049 - DNA, 25 bp, Homo sapien
cagtttcgttatgtcctttccctgg

SEQ ID NO: 4203050 - DNA, 25 bp, Homo sapien
tgcttgatctctctcaggcaggctg

SEQ ID NO: 4203051 - DNA, 25 bp, Homo sapien
tctgataaaaccagtttcgttatgt

SEQ ID NO: 4203052 - DNA, 25 bp, Homo sapien
tcaatgccagcattcgccggtcctt

SEQ ID NO: 4203053 - DNA, 25 bp, Homo sapien
cattcgccggtcctttctatggcct

SEQ ID NO: 4203054 - DNA, 25 bp, Homo sapien
acacatcaatgccagcattcgccgg

SEQ ID NO: 4203055 - DNA, 25 bp, Homo sapien
cagcattcgccggtcctttctatgg

SEQ ID NO: 4203056 - DNA, 25 bp, Homo sapien
taacatcggagcctcggacaaggtg

SEQ ID NO: 4203057 - DNA, 25 bp, Homo sapien
tggataacatcggagcctcggacaa

SEQ ID NO: 4203058 - DNA, 25 bp, Homo sapien
gataacatcggagcctcggacaagg

SEQ ID NO: 4203059 - DNA, 25 bp, Homo sapien
atcggagcctcggacaaggtgtgca

SEQ ID NO: 4203060 - DNA, 25 bp, Homo sapien
tgaagccaacagcattaaatgatga

SEQ ID NO: 4203061 - DNA, 25 bp, Homo sapien
ttgaagccaacagcattaaatgatg

SEQ ID NO: 4203062 - DNA, 25 bp, Homo sapien
gttgaagccaacagcattaaatgat

SEQ ID NO: 4203063 - DNA, 25 bp, Homo sapien
aatgaaggacctccaagtgaataga

SEQ ID NO: 4203064 - DNA, 25 bp, Homo sapien
agatcttcacatagtgtgcacttgg

SEQ ID NO: 4203065 - DNA, 25 bp, Homo sapien
tgcacttggtttagttaccattaaa

SEQ ID NO: 4203066 - DNA, 25 bp, Homo sapien
tccaagtgaatagatcttcacatag

SEQ ID NO: 4203067 - DNA, 25 bp, Homo sapien
gctgcggcaggagcccaggggcata

SEQ ID NO: 4203068 - DNA, 25 bp, Homo sapien
gcacccgatcagctgcggcaggagc

SEQ ID NO: 4203069 - DNA, 25 bp, Homo sapien
ctgcggcaggagcccaggggcatac

SEQ ID NO: 4203070 - DNA, 25 bp, Homo sapien
ctagcacccgatcagctgcggcagg

SEQ ID NO: 4203071 - DNA, 25 bp, Homo sapien
tccccaatttaggagaatgcccaga

SEQ ID NO: 4203072 - DNA, 25 bp, Homo sapien
gatgactttataggtctcctttgaa

SEQ ID NO: 4203073 - DNA, 25 bp, Homo sapien
tcacagaagggttccctagaattac

SEQ ID NO: 4203074 - DNA, 25 bp, Homo sapien
catactttggttctctcatttgaca

SEQ ID NO: 4203075 - DNA, 25 bp, Homo sapien
atcttagctaaaaggccgagaagcg

SEQ ID NO: 4203076 - DNA, 25 bp, Homo sapien
ttagctaaaaggccgagaagcgatg

SEQ ID NO: 4203077 - DNA, 25 bp, Homo sapien
tccacttgatcttagctaaaaggcc

SEQ ID NO: 4203078 - DNA, 25 bp, Homo sapien
taccatatttaaactgataagaaca

SEQ ID NO: 4203079 - DNA, 25 bp, Homo sapien
taatgcctttaactgttggcttcaa

SEQ ID NO: 4203080 - DNA, 25 bp, Homo sapien
ccagccacacaggatatttgatcct

SEQ ID NO: 4203081 - DNA, 25 bp, Homo sapien
cagccacacaggatatttgatcctt

SEQ ID NO: 4203082 - DNA, 25 bp, Homo sapien
atccttttaatgcctttaactgttg

SEQ ID NO: 4203083 - DNA, 25 bp, Homo sapien
tgccagaggttgctagtggatcacc

SEQ ID NO: 4203084 - DNA, 25 bp, Homo sapien
tcccagaaaagttgccagaggttgc

SEQ ID NO: 4203085 - DNA, 25 bp, Homo sapien
ggttgctagtggatcaccactttct

SEQ ID NO: 4203086 - DNA, 25 bp, Homo sapien
cttcgggacaagccatgaagcccaa

SEQ ID NO: 4203087 - DNA, 25 bp, Homo sapien
gctaccttgacaatgtgatgtgtga

SEQ ID NO: 4203088 - DNA, 25 bp, Homo sapien
agtccatctttgcagggactgaagc

SEQ ID NO: 4203089 - DNA, 25 bp, Homo sapien
gatgtgatcgtgatggccctggaca

SEQ ID NO: 4203090 - DNA, 25 bp, Homo sapien
tcttcagttactaagcacttcatgt

SEQ ID NO: 4203091 - DNA, 25 bp, Homo sapien
tggcctcaggttggtttggagtggc

SEQ ID NO: 4203092 - DNA, 25 bp, Homo sapien
tcatgatccaagatggatctgcctt

SEQ ID NO: 4203093 - DNA, 25 bp, Homo sapien
ggcctcaggttggtttggagtggct

SEQ ID NO: 4203094 - DNA, 25 bp, Homo sapien
gggtcacatctattttgcggagaag

SEQ ID NO: 4203095 - DNA, 25 bp, Homo sapien
caaggagtctttgccctactctggg

SEQ ID NO: 4203096 - DNA, 25 bp, Homo sapien
catcaaattagaggccctccaagga

SEQ ID NO: 4203097 - DNA, 25 bp, Homo sapien
tagatggctgctaactgcctggctt

SEQ ID NO: 4203098 - DNA, 25 bp, Homo sapien
caggcataaaaacggaagtgaaaat

SEQ ID NO: 4203099 - DNA, 25 bp, Homo sapien
gctagtgcacgaatatcatcagaga

SEQ ID NO: 4203100 - DNA, 25 bp, Homo sapien
aagtgaaaatagacacacaggtcac

SEQ ID NO: 4203101 - DNA, 25 bp, Homo sapien
aacagctagttctgtatagaaatcc

SEQ ID NO: 4203102 - DNA, 25 bp, Homo sapien
gatgcaaggtcctggtaactgagga

SEQ ID NO: 4203103 - DNA, 25 bp, Homo sapien
cgctcgaatttggatgcaaggtcct

SEQ ID NO: 4203104 - DNA, 25 bp, Homo sapien
tcacgaagcagtaatgcgtgccgct

SEQ ID NO: 4203105 - DNA, 25 bp, Homo sapien
aatgcgtgccgctcgaatttggatg

SEQ ID NO: 4203106 - DNA, 25 bp, Homo sapien
ggagatccacatggtcaaagtagca

SEQ ID NO: 4203107 - DNA, 25 bp, Homo sapien
gagccaggagatccacatggtcaaa

SEQ ID NO: 4203108 - DNA, 25 bp, Homo sapien
gccaggagatccacatggtcaaagt

SEQ ID NO: 4203109 - DNA, 25 bp, Homo sapien
gatccacatggtcaaagtagcagct

SEQ ID NO: 4203110 - DNA, 25 bp, Homo sapien
ggcactggacgcatgtgcattttcc

SEQ ID NO: 4203111 - DNA, 25 bp, Homo sapien
cagaaactgccttaagcctgccagc

SEQ ID NO: 4203112 - DNA, 25 bp, Homo sapien
aagttcagggcactggacgcatgtg

SEQ ID NO: 4203113 - DNA, 25 bp, Homo sapien
cattttcccctctaacttgaacagg

SEQ ID NO: 4203114 - DNA, 25 bp, Homo sapien
gaagagtgttgctgctttgcatttt

SEQ ID NO: 4203115 - DNA, 25 bp, Homo sapien
gcctgatttccggtgaagagtgttg

SEQ ID NO: 4203116 - DNA, 25 bp, Homo sapien
gggagcctgatttccggtgaagagt

SEQ ID NO: 4203117 - DNA, 25 bp, Homo sapien
ctgatttccggtgaagagtgttgct

SEQ ID NO: 4203118 - DNA, 25 bp, Homo sapien
tgagtgtgatgtgcatgtccacatt

SEQ ID NO: 4203119 - DNA, 25 bp, Homo sapien
gatctgagtgtgatgtgcatgtcca

SEQ ID NO: 4203120 - DNA, 25 bp, Homo sapien
cacttcctttgccatggggctgtgc

SEQ ID NO: 4203121 - DNA, 25 bp, Homo sapien
aagatctgagtgtgatgtgcatgtc

SEQ ID NO: 4203122 - DNA, 25 bp, Homo sapien
caccgcaattgctcctcttgtggaa

SEQ ID NO: 4203123 - DNA, 25 bp, Homo sapien
tggaatgtgatatattgctggccac

SEQ ID NO: 4203124 - DNA, 25 bp, Homo sapien
tattgaaccatgtgatggaacgacg

SEQ ID NO: 4203125 - DNA, 25 bp, Homo sapien
tgtaaatacagcttagagcccctgg

SEQ ID NO: 4203126 - DNA, 25 bp, Homo sapien
catcttgagtcacaattgcacatgc

SEQ ID NO: 4203127 - DNA, 25 bp, Homo sapien
tcacaattgcacatgcgcaaacagt

SEQ ID NO: 4203128 - DNA, 25 bp, Homo sapien
gcacatgcgcaaacagttgagctga

SEQ ID NO: 4203129 - DNA, 25 bp, Homo sapien
cttgagtcacaattgcacatgcgca

SEQ ID NO: 4203130 - DNA, 25 bp, Homo sapien
aatgatagtctctgagaggtaagaa

SEQ ID NO: 4203131 - DNA, 25 bp, Homo sapien
ttaatgatagtctctgagaggtaag

SEQ ID NO: 4203132 - DNA, 25 bp, Homo sapien
taatgatagtctctgagaggtaaga

SEQ ID NO: 4203133 - DNA, 25 bp, Homo sapien
tagggttctcagggagacaatgtaa

SEQ ID NO: 4203134 - DNA, 25 bp, Homo sapien
acctccagctttagggttctcaggg

SEQ ID NO: 4203135 - DNA, 25 bp, Homo sapien
aacctccagctttagggttctcagg

SEQ ID NO: 4203136 - DNA, 25 bp, Homo sapien
cagggagacaatgtaatgtaatgtt

SEQ ID NO: 4203137 - DNA, 25 bp, Homo sapien
ggtggttttccattgagaacgagat

SEQ ID NO: 4203138 - DNA, 25 bp, Homo sapien
gcagcattccttgcctgagaaagga

SEQ ID NO: 4203139 - DNA, 25 bp, Homo sapien
ccattgagaacgagataatggcagc

SEQ ID NO: 4203140 - DNA, 25 bp, Homo sapien
aaggagctgtaaggtgctgttgcct

SEQ ID NO: 4203141 - DNA, 25 bp, Homo sapien
aatgattttagctgaagttttcatt

SEQ ID NO: 4203142 - DNA, 25 bp, Homo sapien
aaaaagagttatcttagatcttcta

SEQ ID NO: 4203143 - DNA, 25 bp, Homo sapien
acccacacagatgaaaaggtctcct

SEQ ID NO: 4203144 - DNA, 25 bp, Homo sapien
ctatggaattggcagagagccctaa

SEQ ID NO: 4203145 - DNA, 25 bp, Homo sapien
gcagagagccctaaactttgtacag

SEQ ID NO: 4203146 - DNA, 25 bp, Homo sapien
tgtacagacaactgcgcctcataac

SEQ ID NO: 4203147 - DNA, 25 bp, Homo sapien
agtttactgtatgaagtcttagtgc

SEQ ID NO: 4203148 - DNA, 25 bp, Homo sapien
ctcaaagtctcaggggaacattctg

SEQ ID NO: 4203149 - DNA, 25 bp, Homo sapien
gaagtcttagtgcttcactggagtt

SEQ ID NO: 4203150 - DNA, 25 bp, Homo sapien
tactgtatgaagtcttagtgcttca

SEQ ID NO: 4203151 - DNA, 25 bp, Homo sapien
actgcccagccaaacaaagcgtaga

SEQ ID NO: 4203152 - DNA, 25 bp, Homo sapien
tatgccggcctgaatgcaatccacg

SEQ ID NO: 4203153 - DNA, 25 bp, Homo sapien
taaagacattcccaaacacagggca

SEQ ID NO: 4203154 - DNA, 25 bp, Homo sapien
catctgccttggtgagtatgccggc

SEQ ID NO: 4203155 - DNA, 25 bp, Homo sapien
agcagcaagacaccaccgggcaaga

SEQ ID NO: 4203156 - DNA, 25 bp, Homo sapien
cagcaagacaccaccgggcaagacc

SEQ ID NO: 4203157 - DNA, 25 bp, Homo sapien
cagcagcaagacaccaccgggcaag

SEQ ID NO: 4203158 - DNA, 25 bp, Homo sapien
gcagcaagacaccaccgggcaagac

SEQ ID NO: 4203159 - DNA, 25 bp, Homo sapien
ccttttataagctcgggcattagag

SEQ ID NO: 4203160 - DNA, 25 bp, Homo sapien
gaaactctggtgctcttagtaacat

SEQ ID NO: 4203161 - DNA, 25 bp, Homo sapien
gaaggacgaagctttgaaactctgg

SEQ ID NO: 4203162 - DNA, 25 bp, Homo sapien
caagcaaaagcatgttgctccagat

SEQ ID NO: 4203163 - DNA, 25 bp, Homo sapien
tggaggtcccaagaaatcaggtaac

SEQ ID NO: 4203164 - DNA, 25 bp, Homo sapien
cctgagtgtgggcagattcctctct

SEQ ID NO: 4203165 - DNA, 25 bp, Homo sapien
tcttacacgtcagcagtcactgagg

SEQ ID NO: 4203166 - DNA, 25 bp, Homo sapien
aaagggctggtatctcaggagtcac

SEQ ID NO: 4203167 - DNA, 25 bp, Homo sapien
tccggtatctgaacgaacgacttgt

SEQ ID NO: 4203168 - DNA, 25 bp, Homo sapien
tcacagtctgtagcacacgaggaga

SEQ ID NO: 4203169 - DNA, 25 bp, Homo sapien
tacaagattattggctggagacaag

SEQ ID NO: 4203170 - DNA, 25 bp, Homo sapien
ctgttactgcagtacagccagagag

SEQ ID NO: 4203171 - DNA, 25 bp, Homo sapien
catcacagtgttgggcagctgcatt

SEQ ID NO: 4203172 - DNA, 25 bp, Homo sapien
gaacgagctcgcatcacagtgttgg

SEQ ID NO: 4203173 - DNA, 25 bp, Homo sapien
catgagaaaagtgtccgtcagtgtg

SEQ ID NO: 4203174 - DNA, 25 bp, Homo sapien
cgtcagtgtgaacgagctcgcatca

SEQ ID NO: 4203175 - DNA, 25 bp, Homo sapien
gcctataaattttcgaggttttgca

SEQ ID NO: 4203176 - DNA, 25 bp, Homo sapien
tcgatgcaggtttcagagtttctgt

SEQ ID NO: 4203177 - DNA, 25 bp, Homo sapien
ttctgttgggggactttctaggatg

SEQ ID NO: 4203178 - DNA, 25 bp, Homo sapien
taaaatgggaagtctcgatgcaggt

SEQ ID NO: 4203179 - DNA, 25 bp, Homo sapien
ttttgatgtctactgattgctgcag

SEQ ID NO: 4203180 - DNA, 25 bp, Homo sapien
gacttctctagagctaagtatggag

SEQ ID NO: 4203181 - DNA, 25 bp, Homo sapien
gagttttataagacgcatgtcctcc

SEQ ID NO: 4203182 - DNA, 25 bp, Homo sapien
tttttgctgctatagagatccccta

SEQ ID NO: 4203183 - DNA, 25 bp, Homo sapien
aggtacagatagaatcttgactacc

SEQ ID NO: 4203184 - DNA, 25 bp, Homo sapien
aattgcaaaataacaagctctttag

SEQ ID NO: 4203185 - DNA, 25 bp, Homo sapien
cattcgcagttacgttttaattgca

SEQ ID NO: 4203186 - DNA, 25 bp, Homo sapien
aatcttgactaccttgcattcgcag

SEQ ID NO: 4203187 - DNA, 25 bp, Homo sapien
taaatattatatgtggccagtcagg

SEQ ID NO: 4203188 - DNA, 25 bp, Homo sapien
ggtgttaaactaccaaatccactga

SEQ ID NO: 4203189 - DNA, 25 bp, Homo sapien
gttggacagatcaagagtaagctcc

SEQ ID NO: 4203190 - DNA, 25 bp, Homo sapien
gaaagcagttactagacatccatga

SEQ ID NO: 4203191 - DNA, 25 bp, Homo sapien
ttcctgcagtttcgcgtggaacctg

SEQ ID NO: 4203192 - DNA, 25 bp, Homo sapien
gcgtcgtgacgtcaccgctccgccc

SEQ ID NO: 4203193 - DNA, 25 bp, Homo sapien
cggcgtcgtgacgtcaccgctccgc

SEQ ID NO: 4203194 - DNA, 25 bp, Homo sapien
gtttcctgcagtttcgcgtggaacc

SEQ ID NO: 4203195 - DNA, 25 bp, Homo sapien
ctttttagctctcgcagccgcggcg

SEQ ID NO: 4203196 - DNA, 25 bp, Homo sapien
agggacatgtcgactgcctcaggcg

SEQ ID NO: 4203197 - DNA, 25 bp, Homo sapien
aaattcaaactgctgaagcggcggc

SEQ ID NO: 4203198 - DNA, 25 bp, Homo sapien
tccggagtcggagatgcctaattca

SEQ ID NO: 4203199 - DNA, 25 bp, Homo sapien
ggcgctggccgcccggtgagacatc

SEQ ID NO: 4203200 - DNA, 25 bp, Homo sapien
gaggcccgccgctgttaagagtcac

SEQ ID NO: 4203201 - DNA, 25 bp, Homo sapien
tgaggcccgccgctgttaagagtca

SEQ ID NO: 4203202 - DNA, 25 bp, Homo sapien
ctgaggcccgccgctgttaagagtc

SEQ ID NO: 4203203 - DNA, 25 bp, Homo sapien
agacaaagtccgagtctgcgctggg

SEQ ID NO: 4203204 - DNA, 25 bp, Homo sapien
caaagacaaagtccgagtctgcgct

SEQ ID NO: 4203205 - DNA, 25 bp, Homo sapien
cccaaagacaaagtccgagtctgcg

SEQ ID NO: 4203206 - DNA, 25 bp, Homo sapien
aagacaaagtccgagtctgcgctgg

SEQ ID NO: 4203207 - DNA, 25 bp, Homo sapien
cagagaggcacgccggctcctctgg

SEQ ID NO: 4203208 - DNA, 25 bp, Homo sapien
gcagagaggcacgccggctcctctg

SEQ ID NO: 4203209 - DNA, 25 bp, Homo sapien
tcgaaaatctcggaggagacgtcct

SEQ ID NO: 4203210 - DNA, 25 bp, Homo sapien
gtggctgcccaacgctaaaactctg

SEQ ID NO: 4203211 - DNA, 25 bp, Homo sapien
tgtgtctaatgcaatccccggatct

SEQ ID NO: 4203212 - DNA, 25 bp, Homo sapien
tccagcttgatcacgcgaaaacggg

SEQ ID NO: 4203213 - DNA, 25 bp, Homo sapien
tggctgcggcccggtcgcggctccc

SEQ ID NO: 4203214 - DNA, 25 bp, Homo sapien
agccggctgcgccagggttacattc

SEQ ID NO: 4203215 - DNA, 25 bp, Homo sapien
gacatagccggctgcgccagggtta

SEQ ID NO: 4203216 - DNA, 25 bp, Homo sapien
attcgtcggcggcagagtctgtccc

SEQ ID NO: 4203217 - DNA, 25 bp, Homo sapien
cgccagggttacattcgtcggcggc

SEQ ID NO: 4203218 - DNA, 25 bp, Homo sapien
tgaggctgaggatacgcgaactgct

SEQ ID NO: 4203219 - DNA, 25 bp, Homo sapien
ggcagcaaatgtccgggcggtatct

SEQ ID NO: 4203220 - DNA, 25 bp, Homo sapien
aggtactcactctggccggagggct

SEQ ID NO: 4203221 - DNA, 25 bp, Homo sapien
gggcactccagtcggctgacaaggc

SEQ ID NO: 4203222 - DNA, 25 bp, Homo sapien
gctgacagcggaccactgccaccca

SEQ ID NO: 4203223 - DNA, 25 bp, Homo sapien
ctgacagcggaccactgccacccat

SEQ ID NO: 4203224 - DNA, 25 bp, Homo sapien
caggtacggctgacagcggaccact

SEQ ID NO: 4203225 - DNA, 25 bp, Homo sapien
gtacggctgacagcggaccactgcc

SEQ ID NO: 4203226 - DNA, 25 bp, Homo sapien
taagggcagcccaacatgctggatt

SEQ ID NO: 4203227 - DNA, 25 bp, Homo sapien
agacacactaggcacgcttggagcg

SEQ ID NO: 4203228 - DNA, 25 bp, Homo sapien
tgcaggcacgtttggaactccgggc

SEQ ID NO: 4203229 - DNA, 25 bp, Homo sapien
cagaggcgcgggtacatttggcata

SEQ ID NO: 4203230 - DNA, 25 bp, Homo sapien
ggccagactgttcataggtgttaac

SEQ ID NO: 4203231 - DNA, 25 bp, Homo sapien
tcgacttgcccgactaaaggctggg

SEQ ID NO: 4203232 - DNA, 25 bp, Homo sapien
caacaggaatagctatgctgaatac

SEQ ID NO: 4203233 - DNA, 25 bp, Homo sapien
caggcggcttcacaacaggcttatt

SEQ ID NO: 4203234 - DNA, 25 bp, Homo sapien
taaaaatgctaagggcctccgttga

SEQ ID NO: 4203235 - DNA, 25 bp, Homo sapien
cgttgacaacaatctcccaaagttg

SEQ ID NO: 4203236 - DNA, 25 bp, Homo sapien
ctaagggcctccgttgacaacaatc

SEQ ID NO: 4203237 - DNA, 25 bp, Homo sapien
tcccaaagttgcatcctaagctaca

SEQ ID NO: 4203238 - DNA, 25 bp, Homo sapien
gttaaaggatcgatctcaacctccc

SEQ ID NO: 4203239 - DNA, 25 bp, Homo sapien
tacatgtgacatctcctcaaaacca

SEQ ID NO: 4203240 - DNA, 25 bp, Homo sapien
ggcactggtgtagcaatacactaat

SEQ ID NO: 4203241 - DNA, 25 bp, Homo sapien
aacatcagctgttgtggcactggtg

SEQ ID NO: 4203242 - DNA, 25 bp, Homo sapien
gcaattggtaagaacactgatacag

SEQ ID NO: 4203243 - DNA, 25 bp, Homo sapien
tcaccaggtatgttggaccagtgac

SEQ ID NO: 4203244 - DNA, 25 bp, Homo sapien
tccatctatcaacagaagtctctgc

SEQ ID NO: 4203245 - DNA, 25 bp, Homo sapien
tgctgtaaactgagagaggtgtgca

SEQ ID NO: 4203246 - DNA, 25 bp, Homo sapien
aattagcttgggtacaaaggaatca

SEQ ID NO: 4203247 - DNA, 25 bp, Homo sapien
tgttcctacctttttatgagggaca

SEQ ID NO: 4203248 - DNA, 25 bp, Homo sapien
gccctaagcaatgccagattaagaa

SEQ ID NO: 4203249 - DNA, 25 bp, Homo sapien
ggacacccagtttttgccctaagca

SEQ ID NO: 4203250 - DNA, 25 bp, Homo sapien
ttcatagcctaatcaacactcttct

SEQ ID NO: 4203251 - DNA, 25 bp, Homo sapien
tgtgtgcgtgcatataaatgtgaca

SEQ ID NO: 4203252 - DNA, 25 bp, Homo sapien
acaaggctgttcttaggtattcata

SEQ ID NO: 4203253 - DNA, 25 bp, Homo sapien
tggacaaaatccagcagacttcaac

SEQ ID NO: 4203254 - DNA, 25 bp, Homo sapien
tgtgagatccgagaatcaaatggaa

SEQ ID NO: 4203255 - DNA, 25 bp, Homo sapien
aatggaaatgaggttgagaacgtac

SEQ ID NO: 4203256 - DNA, 25 bp, Homo sapien
ctgtgagatccgagaatcaaatgga

SEQ ID NO: 4203257 - DNA, 25 bp, Homo sapien
gttgagaacgtacagtataatcact

SEQ ID NO: 4203258 - DNA, 25 bp, Homo sapien
ttggtagaaagcagttgaaggattc

SEQ ID NO: 4203259 - DNA, 25 bp, Homo sapien
tcccagaggctctttgattccttta

SEQ ID NO: 4203260 - DNA, 25 bp, Homo sapien
gattcctttaacgtgttcaaatgga

SEQ ID NO: 4203261 - DNA, 25 bp, Homo sapien
caaatggaacgcttggtagaaagca

SEQ ID NO: 4203262 - DNA, 25 bp, Homo sapien
ccagtacagtgcaaagcaattcatg

SEQ ID NO: 4203263 - DNA, 25 bp, Homo sapien
tttaatgagaaaccagtacagtgca

SEQ ID NO: 4203264 - DNA, 25 bp, Homo sapien
catgcatacagttttgcatgtatgc

SEQ ID NO: 4203265 - DNA, 25 bp, Homo sapien
cagtgcaaagcaattcatgcataca

SEQ ID NO: 4203266 - DNA, 25 bp, Homo sapien
tgctttgtcccatgctagataccat

SEQ ID NO: 4203267 - DNA, 25 bp, Homo sapien
catgctagataccatgtgatttccc

SEQ ID NO: 4203268 - DNA, 25 bp, Homo sapien
caacacagtatgaacccttcaaaaa

SEQ ID NO: 4203269 - DNA, 25 bp, Homo sapien
tataaaatagagattgtccttttgg

SEQ ID NO: 4203270 - DNA, 25 bp, Homo sapien
cacacaagcaaatcaagccgaagaa

SEQ ID NO: 4203271 - DNA, 25 bp, Homo sapien
tatgccagaagacacaaatgcgttg

SEQ ID NO: 4203272 - DNA, 25 bp, Homo sapien
gaaaatttccctagagtgacacaca

SEQ ID NO: 4203273 - DNA, 25 bp, Homo sapien
ttgccaggcagagttaaaagaatct

SEQ ID NO: 4203274 - DNA, 25 bp, Homo sapien
taatagcgagacaaatttatgcctc

SEQ ID NO: 4203275 - DNA, 25 bp, Homo sapien
caaaatcaaactagggatattcagc

SEQ ID NO: 4203276 - DNA, 25 bp, Homo sapien
ggtaggtctactgaaaatgggcact

SEQ ID NO: 4203277 - DNA, 25 bp, Homo sapien
gctgcccctactgaaaatgatttcc

SEQ ID NO: 4203278 - DNA, 25 bp, Homo sapien
tttgaagatggttcagctgattgat

SEQ ID NO: 4203279 - DNA, 25 bp, Homo sapien
aagatggttcagctgattgattccc

SEQ ID NO: 4203280 - DNA, 25 bp, Homo sapien
gatggttcagctgattgattccctg

SEQ ID NO: 4203281 - DNA, 25 bp, Homo sapien
agctgattgattccctgagggctct

SEQ ID NO: 4203282 - DNA, 25 bp, Homo sapien
ggttggattatttttgcgttatcag

SEQ ID NO: 4203283 - DNA, 25 bp, Homo sapien
gcagaaagggttggattatttttgc

SEQ ID NO: 4203284 - DNA, 25 bp, Homo sapien
tatttttgcgttatcagtatctact

SEQ ID NO: 4203285 - DNA, 25 bp, Homo sapien
gcgttatcagtatctactgtcccta

SEQ ID NO: 4203286 - DNA, 25 bp, Homo sapien
tttaataaagagtcaactcaaaaca

SEQ ID NO: 4203287 - DNA, 25 bp, Homo sapien
tcaacctaggtttcaacctccctga

SEQ ID NO: 4203288 - DNA, 25 bp, Homo sapien
ctatacccagtcaacctaggtttca

SEQ ID NO: 4203289 - DNA, 25 bp, Homo sapien
tatacccagtcaacctaggtttcaa

SEQ ID NO: 4203290 - DNA, 25 bp, Homo sapien
gagggaagctccattggtttctcta

SEQ ID NO: 4203291 - DNA, 25 bp, Homo sapien
tccattccttaagcaaatacacagc

SEQ ID NO: 4203292 - DNA, 25 bp, Homo sapien
gataatcacagccaataatgacgaa

SEQ ID NO: 4203293 - DNA, 25 bp, Homo sapien
taactggtgcctagttatttgtggg

SEQ ID NO: 4203294 - DNA, 25 bp, Homo sapien
ggtgcacaatatttcctctaactgg

SEQ ID NO: 4203295 - DNA, 25 bp, Homo sapien
taaggccagtacttccatagtggtg

SEQ ID NO: 4203296 - DNA, 25 bp, Homo sapien
tgcaggtggtattgcctaaggtcct

SEQ ID NO: 4203297 - DNA, 25 bp, Homo sapien
taacagtaccagcattccctcagtc

SEQ ID NO: 4203298 - DNA, 25 bp, Homo sapien
tcaggctagaatagagtcagtcatc

SEQ ID NO: 4203299 - DNA, 25 bp, Homo sapien
taaagagaccttaccagctattccc

SEQ ID NO: 4203300 - DNA, 25 bp, Homo sapien
tcttcccaaaaggttgcccaactgc

SEQ ID NO: 4203301 - DNA, 25 bp, Homo sapien
gcccaactgcggatttaaatacaac

SEQ ID NO: 4203302 - DNA, 25 bp, Homo sapien
tctgtcttctacgacaaaggttaca

SEQ ID NO: 4203303 - DNA, 25 bp, Homo sapien
gatgtttctgtcttctacgacaaag

SEQ ID NO: 4203304 - DNA, 25 bp, Homo sapien
cttctacgacaaaggttacatatat

SEQ ID NO: 4203305 - DNA, 25 bp, Homo sapien
cgacaaaggttacatatattctgaa

SEQ ID NO: 4203306 - DNA, 25 bp, Homo sapien
tagaagctagaataaccctccaacc

SEQ ID NO: 4203307 - DNA, 25 bp, Homo sapien
ccatgtgagggcatcacaactttta

SEQ ID NO: 4203308 - DNA, 25 bp, Homo sapien
taaactttcggctttcgatcattat

SEQ ID NO: 4203309 - DNA, 25 bp, Homo sapien
attatgtcacattcctcctccgatg

SEQ ID NO: 4203310 - DNA, 25 bp, Homo sapien
caatttatgacctgatgacactctt

SEQ ID NO: 4203311 - DNA, 25 bp, Homo sapien
cactcttgtggacaacattcagtcc

SEQ ID NO: 4203312 - DNA, 25 bp, Homo sapien
tatgacctgatgacactcttgtgga

SEQ ID NO: 4203313 - DNA, 25 bp, Homo sapien
gatgacactcttgtggacaacattc

SEQ ID NO: 4203314 - DNA, 25 bp, Homo sapien
ggtttgagcaccttagagcatacag

SEQ ID NO: 4203315 - DNA, 25 bp, Homo sapien
taggctggcaaaacactgaggaggc

SEQ ID NO: 4203316 - DNA, 25 bp, Homo sapien
taaagatgatatgtgcatggaagcc

SEQ ID NO: 4203317 - DNA, 25 bp, Homo sapien
ggtgcagttggccacattagaaaac

SEQ ID NO: 4203318 - DNA, 25 bp, Homo sapien
tatctggcatatggtaaacacttac

SEQ ID NO: 4203319 - DNA, 25 bp, Homo sapien
ggacaataataggaccgggtactga

SEQ ID NO: 4203320 - DNA, 25 bp, Homo sapien
agctaatatttagcctccccaaagg

SEQ ID NO: 4203321 - DNA, 25 bp, Homo sapien
cactgcaccaaaaccgagatatgac

SEQ ID NO: 4203322 - DNA, 25 bp, Homo sapien
tcaagcaaaactgcactcaagtagg

SEQ ID NO: 4203323 - DNA, 25 bp, Homo sapien
gaatcactgctttagaattacctta

SEQ ID NO: 4203324 - DNA, 25 bp, Homo sapien
tcaaagggattctgacataaagtaa

SEQ ID NO: 4203325 - DNA, 25 bp, Homo sapien
atatcccaggtcttcctttagtagt

SEQ ID NO: 4203326 - DNA, 25 bp, Homo sapien
catatcttaaaggacggctataagg

SEQ ID NO: 4203327 - DNA, 25 bp, Homo sapien
gggtgatcctagcaagttaacatac

SEQ ID NO: 4203328 - DNA, 25 bp, Homo sapien
ggcgtgaggctagctgacttttaat

SEQ ID NO: 4203329 - DNA, 25 bp, Homo sapien
caaactccaaccacttactagtggg

SEQ ID NO: 4203330 - DNA, 25 bp, Homo sapien
agaaggaagctatacctttctttgg

SEQ ID NO: 4203331 - DNA, 25 bp, Homo sapien
aagtagaaggaagctatacctttct

SEQ ID NO: 4203332 - DNA, 25 bp, Homo sapien
gcagtcctaaggaatcatacactgt

SEQ ID NO: 4203333 - DNA, 25 bp, Homo sapien
tctttgggggcagtcctaaggaatc

SEQ ID NO: 4203334 - DNA, 25 bp, Homo sapien
gagccaattactccatcctttctgg

SEQ ID NO: 4203335 - DNA, 25 bp, Homo sapien
catatgttctctcgggtttccttgg

SEQ ID NO: 4203336 - DNA, 25 bp, Homo sapien
tgacctctgccttatacagtctgtt

SEQ ID NO: 4203337 - DNA, 25 bp, Homo sapien
tagacctgtcccttaagatgctcca

SEQ ID NO: 4203338 - DNA, 25 bp, Homo sapien
tcccatagctaaggaagaatagtta

SEQ ID NO: 4203339 - DNA, 25 bp, Homo sapien
gatcatgatgaagatgtatccctta

SEQ ID NO: 4203340 - DNA, 25 bp, Homo sapien
caggtttgcaaggtataaatagatc

SEQ ID NO: 4203341 - DNA, 25 bp, Homo sapien
cagtcagcgagttttagaatgattc

SEQ ID NO: 4203342 - DNA, 25 bp, Homo sapien
ggtcctttgtagtgccaacatttct

SEQ ID NO: 4203343 - DNA, 25 bp, Homo sapien
ttttaaatgggcagtgtcttctccg

SEQ ID NO: 4203344 - DNA, 25 bp, Homo sapien
agtaaaattcagatgatggcttgac

SEQ ID NO: 4203345 - DNA, 25 bp, Homo sapien
tagatgatttctacaggtcctttgt

SEQ ID NO: 4203346 - DNA, 25 bp, Homo sapien
tgttgtcaatggctacaacacctcc

SEQ ID NO: 4203347 - DNA, 25 bp, Homo sapien
ttgttgtcaatggctacaacacctc

SEQ ID NO: 4203348 - DNA, 25 bp, Homo sapien
gtcaatggctacaacacctccccca

SEQ ID NO: 4203349 - DNA, 25 bp, Homo sapien
tcaatggctacaacacctcccccag

SEQ ID NO: 4203350 - DNA, 25 bp, Homo sapien
taaaagttctcaacgttctagcatc

SEQ ID NO: 4203351 - DNA, 25 bp, Homo sapien
caaaagctaagtgttccatacaacc

SEQ ID NO: 4203352 - DNA, 25 bp, Homo sapien
tcaccaatggcccttatcaatgata

SEQ ID NO: 4203353 - DNA, 25 bp, Homo sapien
tggcctacttatagcttacttacag

SEQ ID NO: 4203354 - DNA, 25 bp, Homo sapien
aaggtggtgctatctggttctggcc

SEQ ID NO: 4203355 - DNA, 25 bp, Homo sapien
gactaacagtcctgtaaggtctcac

SEQ ID NO: 4203356 - DNA, 25 bp, Homo sapien
ccagagcagtaagcccagaattttc

SEQ ID NO: 4203357 - DNA, 25 bp, Homo sapien
gctttatcttgaccgagcctatgga

SEQ ID NO: 4203358 - DNA, 25 bp, Homo sapien
tgaggagacattcggctgctgtgga

SEQ ID NO: 4203359 - DNA, 25 bp, Homo sapien
gcattttctcgttcaagtaaagagt

SEQ ID NO: 4203360 - DNA, 25 bp, Homo sapien
ggataattgatcattgcttgaaaga

SEQ ID NO: 4203361 - DNA, 25 bp, Homo sapien
gagaagtgctaccaggattggcctg

SEQ ID NO: 4203362 - DNA, 25 bp, Homo sapien
gaaagaacaccagtggcacacaagg

SEQ ID NO: 4203363 - DNA, 25 bp, Homo sapien
tggacatcaacagcgctgcatgaca

SEQ ID NO: 4203364 - DNA, 25 bp, Homo sapien
ggtgactacctgtacagttgcacta

SEQ ID NO: 4203365 - DNA, 25 bp, Homo sapien
catgcgcaccaggtaaaatgcagac

SEQ ID NO: 4203366 - DNA, 25 bp, Homo sapien
tacacttaatgtgttagtatacaca

SEQ ID NO: 4203367 - DNA, 25 bp, Homo sapien
atacacttaatgtgttagtatacac

SEQ ID NO: 4203368 - DNA, 25 bp, Homo sapien
gttagtatacacaaaatgatgcttt

SEQ ID NO: 4203369 - DNA, 25 bp, Homo sapien
gtgttagtatacacaaaatgatgct

SEQ ID NO: 4203370 - DNA, 25 bp, Homo sapien
aatattgagtacaaatattgctcac

SEQ ID NO: 4203371 - DNA, 25 bp, Homo sapien
aagtcattattaacaggtctttaag

SEQ ID NO: 4203372 - DNA, 25 bp, Homo sapien
caaggatttcctacttaagtatcac

SEQ ID NO: 4203373 - DNA, 25 bp, Homo sapien
ttttgaacacatatagagccaaata

SEQ ID NO: 4203374 - DNA, 25 bp, Homo sapien
cacatgtcacagttagcactggagg

SEQ ID NO: 4203375 - DNA, 25 bp, Homo sapien
ggcacagccagcaaaccttttcggt

SEQ ID NO: 4203376 - DNA, 25 bp, Homo sapien
gaatcttactacacatccttagggt

SEQ ID NO: 4203377 - DNA, 25 bp, Homo sapien
tcggttaacagtccaacagtgaagt

SEQ ID NO: 4203378 - DNA, 25 bp, Homo sapien
cagaaaagcttatgtgggaccttgc

SEQ ID NO: 4203379 - DNA, 25 bp, Homo sapien
tgtgagatcacatcggaacaaacta

SEQ ID NO: 4203380 - DNA, 25 bp, Homo sapien
tactggagtttgcaacttggagaaa

SEQ ID NO: 4203381 - DNA, 25 bp, Homo sapien
gggaccttgctctatgggcattaca

SEQ ID NO: 4203382 - DNA, 25 bp, Homo sapien
cagcgtcttactttgccatcaccaa

SEQ ID NO: 4203383 - DNA, 25 bp, Homo sapien
cttactttgccatcaccaatctgaa

SEQ ID NO: 4203384 - DNA, 25 bp, Homo sapien
aaaataccagcgtcttactttgcca

SEQ ID NO: 4203385 - DNA, 25 bp, Homo sapien
gccagtgcaaaataccagcgtctta

SEQ ID NO: 4203386 - DNA, 25 bp, Homo sapien
aacatccagtacaggttgcagcacc

SEQ ID NO: 4203387 - DNA, 25 bp, Homo sapien
gaatacttcataggctcgatgtcga

SEQ ID NO: 4203388 - DNA, 25 bp, Homo sapien
cagcaagaactgtgatccggataac

SEQ ID NO: 4203389 - DNA, 25 bp, Homo sapien
catgccggacatgtaggactctctc

SEQ ID NO: 4203390 - DNA, 25 bp, Homo sapien
cctcctcgtagaactcccttctggg

SEQ ID NO: 4203391 - DNA, 25 bp, Homo sapien
gcagaggaagcctccaggaaagctg

SEQ ID NO: 4203392 - DNA, 25 bp, Homo sapien
ggatgacattcttgagtatcctggg

SEQ ID NO: 4203393 - DNA, 25 bp, Homo sapien
tcccagagtgtgattatctgagcag

SEQ ID NO: 4203394 - DNA, 25 bp, Homo sapien
tagtaggactttcaaggctgtgagt

SEQ ID NO: 4203395 - DNA, 25 bp, Homo sapien
gggactggagggcggcagctttttg

SEQ ID NO: 4203396 - DNA, 25 bp, Homo sapien
ctacaatagtaggactttcaaggct

SEQ ID NO: 4203397 - DNA, 25 bp, Homo sapien
caatagtaggactttcaaggctgtg

SEQ ID NO: 4203398 - DNA, 25 bp, Homo sapien
ccagccagcactatggctacgggca

SEQ ID NO: 4203399 - DNA, 25 bp, Homo sapien
tatggctacgggcagtggttcccat

SEQ ID NO: 4203400 - DNA, 25 bp, Homo sapien
gccataaaaattaggggacaactgc

SEQ ID NO: 4203401 - DNA, 25 bp, Homo sapien
cataaaaattaggggacaactgcat

SEQ ID NO: 4203402 - DNA, 25 bp, Homo sapien
ccataaaaattaggggacaactgca

SEQ ID NO: 4203403 - DNA, 25 bp, Homo sapien
gaagcgaggaaacccggcattgttg

SEQ ID NO: 4203404 - DNA, 25 bp, Homo sapien
cctcttgtaaaagccggagaagcga

SEQ ID NO: 4203405 - DNA, 25 bp, Homo sapien
ccgtagggctttcaggaatgttgca

SEQ ID NO: 4203406 - DNA, 25 bp, Homo sapien
agaagaagcaaccacaattcaaacg

SEQ ID NO: 4203407 - DNA, 25 bp, Homo sapien
ttccagcatggcatattcttttttc

SEQ ID NO: 4203408 - DNA, 25 bp, Homo sapien
ttcttgtgcctcagcctctcaagta

SEQ ID NO: 4203409 - DNA, 25 bp, Homo sapien
tcttgtgcctcagcctctcaagtag

SEQ ID NO: 4203410 - DNA, 25 bp, Homo sapien
gatttccagcatggcatattctttt

SEQ ID NO: 4203411 - DNA, 25 bp, Homo sapien
acttgccatgcctagtactgtgttg

SEQ ID NO: 4203412 - DNA, 25 bp, Homo sapien
gtgaattcaaccctccaaagattga

SEQ ID NO: 4203413 - DNA, 25 bp, Homo sapien
tccatccgaatctctaatagtgctt

SEQ ID NO: 4203414 - DNA, 25 bp, Homo sapien
ctcaaatacatagttggccctccat

SEQ ID NO: 4203415 - DNA, 25 bp, Homo sapien
catcaaaattgccatcagtgggaag

SEQ ID NO: 4203416 - DNA, 25 bp, Homo sapien
cttacatcaaaattgccatcagtgg

SEQ ID NO: 4203417 - DNA, 25 bp, Homo sapien
aattgccatcagtgggaagtgcggt

SEQ ID NO: 4203418 - DNA, 25 bp, Homo sapien
aaaattgccatcagtgggaagtgcg

SEQ ID NO: 4203419 - DNA, 25 bp, Homo sapien
gagtagaggtagcttgttctcacag

SEQ ID NO: 4203420 - DNA, 25 bp, Homo sapien
cttgttctcacagaggaattcccca

SEQ ID NO: 4203421 - DNA, 25 bp, Homo sapien
aggaattccccactgcaagtccaca

SEQ ID NO: 4203422 - DNA, 25 bp, Homo sapien
ctgagtagaggtagcttgttctcac

SEQ ID NO: 4203423 - DNA, 25 bp, Homo sapien
gacccatgcaaaccaggcgagtata

SEQ ID NO: 4203424 - DNA, 25 bp, Homo sapien
acggtacaaggacaccacaccagtg

SEQ ID NO: 4203425 - DNA, 25 bp, Homo sapien
gagtatactccaaaccaaatccagt

SEQ ID NO: 4203426 - DNA, 25 bp, Homo sapien
catcctagggtataggacggtacaa

SEQ ID NO: 4203427 - DNA, 25 bp, Homo sapien
ccctttgccagttgaattttataga

SEQ ID NO: 4203428 - DNA, 25 bp, Homo sapien
tacttaaatggtatgcagaggcaca

SEQ ID NO: 4203429 - DNA, 25 bp, Homo sapien
caattcaagctcaagatgaagcaca

SEQ ID NO: 4203430 - DNA, 25 bp, Homo sapien
taaagttccctgaatatttgatgct

SEQ ID NO: 4203431 - DNA, 25 bp, Homo sapien
gataccctcaaacatggagaacagt

SEQ ID NO: 4203432 - DNA, 25 bp, Homo sapien
gaacttaactattctggaataagga

SEQ ID NO: 4203433 - DNA, 25 bp, Homo sapien
cagcgtgaacctcacagggggcttc

SEQ ID NO: 4203434 - DNA, 25 bp, Homo sapien
actattctggaataaggaatgaatc

SEQ ID NO: 4203435 - DNA, 25 bp, Homo sapien
tgagtatagtaacccaagatgccat

SEQ ID NO: 4203436 - DNA, 25 bp, Homo sapien
taaatggaacaactacacagcctag

SEQ ID NO: 4203437 - DNA, 25 bp, Homo sapien
gggtactagacacatcagcctaaag

SEQ ID NO: 4203438 - DNA, 25 bp, Homo sapien
taaagggagatgcttatagccacaa

SEQ ID NO: 4203439 - DNA, 25 bp, Homo sapien
cctgatgtttgataccctggttgaa

SEQ ID NO: 4203440 - DNA, 25 bp, Homo sapien
taccacagtgccttgcaaaaaacac

SEQ ID NO: 4203441 - DNA, 25 bp, Homo sapien
aattcagtaaagcatcctgcctcag

SEQ ID NO: 4203442 - DNA, 25 bp, Homo sapien
aagttttctagtccataccacagtg

SEQ ID NO: 4203443 - DNA, 25 bp, Homo sapien
gatcaaaaaggaggtcaggtcttgg

SEQ ID NO: 4203444 - DNA, 25 bp, Homo sapien
gggctcccatcaggtagagtcttgg

SEQ ID NO: 4203445 - DNA, 25 bp, Homo sapien
cagcttaatttgtactcacaggaga

SEQ ID NO: 4203446 - DNA, 25 bp, Homo sapien
tgaccggtcagtagtgagtcctacc

SEQ ID NO: 4203447 - DNA, 25 bp, Homo sapien
tctgcatctgaaatggtggattttc

SEQ ID NO: 4203448 - DNA, 25 bp, Homo sapien
ggtggattttcgcttttgcagagaa

SEQ ID NO: 4203449 - DNA, 25 bp, Homo sapien
gaccggcgtgcaggcgtgggagcct

SEQ ID NO: 4203450 - DNA, 25 bp, Homo sapien
gcgtctgtaggaccctggttattgg

SEQ ID NO: 4203451 - DNA, 25 bp, Homo sapien
caagacctcggtaaggaaagagcgg

SEQ ID NO: 4203452 - DNA, 25 bp, Homo sapien
cgagtctgcgaaccgccagactgtg

SEQ ID NO: 4203453 - DNA, 25 bp, Homo sapien
tggtcgccaagcaaaggatccgtat

SEQ ID NO: 4203454 - DNA, 25 bp, Homo sapien
agaagcacagcaagaacatcaccca

SEQ ID NO: 4203455 - DNA, 25 bp, Homo sapien
ccgtagctagcgtctggcctgagaa

SEQ ID NO: 4203456 - DNA, 25 bp, Homo sapien
gcctgagaacctcggcgctccggcg

SEQ ID NO: 4203457 - DNA, 25 bp, Homo sapien
cagcggccgtagctagcgtctggcc

SEQ ID NO: 4203458 - DNA, 25 bp, Homo sapien
ggcccagcggccgtagctagcgtct

SEQ ID NO: 4203459 - DNA, 25 bp, Homo sapien
cgcgagaacgacccggcggccagtt

SEQ ID NO: 4203460 - DNA, 25 bp, Homo sapien
tcggtcagtcagtcggcggccggcg

SEQ ID NO: 4203461 - DNA, 25 bp, Homo sapien
ctctttcactccgcgctcacggcgg

SEQ ID NO: 4203462 - DNA, 25 bp, Homo sapien
cagttctcttcctcctgcgcacctg

SEQ ID NO: 4203463 - DNA, 25 bp, Homo sapien
aacccaaagtagatcgaggcggcgg

SEQ ID NO: 4203464 - DNA, 25 bp, Homo sapien
tagtgctgacgttggcagccgaacc

SEQ ID NO: 4203465 - DNA, 25 bp, Homo sapien
gcggagtccgtctagtgctgacgtt

SEQ ID NO: 4203466 - DNA, 25 bp, Homo sapien
tgcacattcccgttgttgcgttgcg

SEQ ID NO: 4203467 - DNA, 25 bp, Homo sapien
cgtggagacagcgaattggtgtttc

SEQ ID NO: 4203468 - DNA, 25 bp, Homo sapien
gagacagcgaattggtgtttccgga

SEQ ID NO: 4203469 - DNA, 25 bp, Homo sapien
gaattggtgtttccggagccatcag

SEQ ID NO: 4203470 - DNA, 25 bp, Homo sapien
cagcgaattggtgtttccggagcca

SEQ ID NO: 4203471 - DNA, 25 bp, Homo sapien
acccggcccctacacgtctcctcat

SEQ ID NO: 4203472 - DNA, 25 bp, Homo sapien
gaaagagaaaccgctcgggtgagag

SEQ ID NO: 4203473 - DNA, 25 bp, Homo sapien
aaagagaaaccgctcgggtgagagt

SEQ ID NO: 4203474 - DNA, 25 bp, Homo sapien
aagagaaaccgctcgggtgagagtt

SEQ ID NO: 4203475 - DNA, 25 bp, Homo sapien
cggaaagagaaaccgctcgggtgag

SEQ ID NO: 4203476 - DNA, 25 bp, Homo sapien
ctgtcaagagcggcgtggacggcgc

SEQ ID NO: 4203477 - DNA, 25 bp, Homo sapien
tcaagagcggcgtggacggcgccat

SEQ ID NO: 4203478 - DNA, 25 bp, Homo sapien
gtcaagagcggcgtggacggcgcca

SEQ ID NO: 4203479 - DNA, 25 bp, Homo sapien
tgtcaagagcggcgtggacggcgcc

SEQ ID NO: 4203480 - DNA, 25 bp, Homo sapien
tctgtaaaatgtggtggtccattca

SEQ ID NO: 4203481 - DNA, 25 bp, Homo sapien
tccattcaccatgtacagtccttct

SEQ ID NO: 4203482 - DNA, 25 bp, Homo sapien
atgtacagtccttctgatcctcgga

SEQ ID NO: 4203483 - DNA, 25 bp, Homo sapien
ctttctgtaaaatgtggtggtccat

SEQ ID NO: 4203484 - DNA, 25 bp, Homo sapien
tactggccatgatttggctatcaaa

SEQ ID NO: 4203485 - DNA, 25 bp, Homo sapien
gatacaactcttgtaaaataaaggc

SEQ ID NO: 4203486 - DNA, 25 bp, Homo sapien
gattgtactgtatgttccctataac

SEQ ID NO: 4203487 - DNA, 25 bp, Homo sapien
tattcaattacactagtgtctacac

SEQ ID NO: 4203488 - DNA, 25 bp, Homo sapien
catgaccaagcaagttggctatatt

SEQ ID NO: 4203489 - DNA, 25 bp, Homo sapien
caaatgttccatacagcctttctgg

SEQ ID NO: 4203490 - DNA, 25 bp, Homo sapien
ttttgtggatttgtggtcacctcag

SEQ ID NO: 4203491 - DNA, 25 bp, Homo sapien
aattttgcacacatgaccaagcaag

SEQ ID NO: 4203492 - DNA, 25 bp, Homo sapien
ttagtgatactgagattgtactgga

SEQ ID NO: 4203493 - DNA, 25 bp, Homo sapien
cataaatatctctctgttctactct

SEQ ID NO: 4203494 - DNA, 25 bp, Homo sapien
tcttagtgatactgagattgtactg

SEQ ID NO: 4203495 - DNA, 25 bp, Homo sapien
actcttagtgatactgagattgtac

SEQ ID NO: 4203496 - DNA, 25 bp, Homo sapien
tacagactttgcaattcttcccaga

SEQ ID NO: 4203497 - DNA, 25 bp, Homo sapien
aagatacagactttgcaattcttcc

SEQ ID NO: 4203498 - DNA, 25 bp, Homo sapien
taaagatacagactttgcaattctt

SEQ ID NO: 4203499 - DNA, 25 bp, Homo sapien
gatacagactttgcaattcttccca

SEQ ID NO: 4203500 - DNA, 25 bp, Homo sapien
tctccattgccccaggcaaacaagg

SEQ ID NO: 4203501 - DNA, 25 bp, Homo sapien
caggcaaacaaggtcccatccttac

SEQ ID NO: 4203502 - DNA, 25 bp, Homo sapien
ttttctccattgccccaggcaaaca

SEQ ID NO: 4203503 - DNA, 25 bp, Homo sapien
ccaggcaaacaaggtcccatcctta

SEQ ID NO: 4203504 - DNA, 25 bp, Homo sapien
tgtctactacaatctcaagagcaat

SEQ ID NO: 4203505 - DNA, 25 bp, Homo sapien
caagagcaatctctaaaagatatga

SEQ ID NO: 4203506 - DNA, 25 bp, Homo sapien
tagggaaatcagtaaggagacattt

SEQ ID NO: 4203507 - DNA, 25 bp, Homo sapien
aaaatgatttgacgatttgctcaag

SEQ ID NO: 4203508 - DNA, 25 bp, Homo sapien
ctggtttcaaaagaaattatttcag

SEQ ID NO: 4203509 - DNA, 25 bp, Homo sapien
caaaagaaattatttcagcaatgaa

SEQ ID NO: 4203510 - DNA, 25 bp, Homo sapien
ggtttcaaaagaaattatttcagca

SEQ ID NO: 4203511 - DNA, 25 bp, Homo sapien
aaagaaattatttcagcaatgaaat

SEQ ID NO: 4203512 - DNA, 25 bp, Homo sapien
gagtgcagtagtcccttgttagtga

SEQ ID NO: 4203513 - DNA, 25 bp, Homo sapien
cgttgccaggacagtatttttgggt

SEQ ID NO: 4203514 - DNA, 25 bp, Homo sapien
tgtaaggctgccacgttgccaggac

SEQ ID NO: 4203515 - DNA, 25 bp, Homo sapien
atttttgggtgagaattcaaggcaa

SEQ ID NO: 4203516 - DNA, 25 bp, Homo sapien
gaaagatttcaaacatgtcccagtt

SEQ ID NO: 4203517 - DNA, 25 bp, Homo sapien
tgaaagatttcaaacatgtcccagt

SEQ ID NO: 4203518 - DNA, 25 bp, Homo sapien
ttcatcttctgaccaggatggacac

SEQ ID NO: 4203519 - DNA, 25 bp, Homo sapien
ttcattgttaacattgcgggcacaa

SEQ ID NO: 4203520 - DNA, 25 bp, Homo sapien
ttgttttcaaagaagtgaacttcat

SEQ ID NO: 4203521 - DNA, 25 bp, Homo sapien
taacattgcgggcacaaagagtttc

SEQ ID NO: 4203522 - DNA, 25 bp, Homo sapien
caagctgatggttactagaactagg

SEQ ID NO: 4203523 - DNA, 25 bp, Homo sapien
gtatggatgagataagattggccac

SEQ ID NO: 4203524 - DNA, 25 bp, Homo sapien
cacttagtaagagatggtagctgga

SEQ ID NO: 4203525 - DNA, 25 bp, Homo sapien
tatttaggaaaaccctatgatgtca

SEQ ID NO: 4203526 - DNA, 25 bp, Homo sapien
gcagtaccttatttggatcccgagt

SEQ ID NO: 4203527 - DNA, 25 bp, Homo sapien
tcaatcaaccacaatgtgcagtacc

SEQ ID NO: 4203528 - DNA, 25 bp, Homo sapien
tagagtgggaacttataggaccaaa

SEQ ID NO: 4203529 - DNA, 25 bp, Homo sapien
atgaacatgttaaattataccatgg

SEQ ID NO: 4203530 - DNA, 25 bp, Homo sapien
cctgaagctgaaactctagagccaa

SEQ ID NO: 4203531 - DNA, 25 bp, Homo sapien
gaacctgaagctgaaactctagagc

SEQ ID NO: 4203532 - DNA, 25 bp, Homo sapien
aacctgaagctgaaactctagagcc

SEQ ID NO: 4203533 - DNA, 25 bp, Homo sapien
agaacctgaagctgaaactctagag

SEQ ID NO: 4203534 - DNA, 25 bp, Homo sapien
gccatgattgcactcagcttggaca

SEQ ID NO: 4203535 - DNA, 25 bp, Homo sapien
gcttggacaaaagaatgaggcccac

SEQ ID NO: 4203536 - DNA, 25 bp, Homo sapien
taaatgcagcactaggtaaccaaat

SEQ ID NO: 4203537 - DNA, 25 bp, Homo sapien
tgaggcccactctcgaaaaacaaga

SEQ ID NO: 4203538 - DNA, 25 bp, Homo sapien
tacaatggactgaaacacatacctt

SEQ ID NO: 4203539 - DNA, 25 bp, Homo sapien
tatagcaaagaagtcactaaggatt

SEQ ID NO: 4203540 - DNA, 25 bp, Homo sapien
gaatgacttgtcttaccatatagca

SEQ ID NO: 4203541 - DNA, 25 bp, Homo sapien
ccacagctcattaagaatgggacta

SEQ ID NO: 4203542 - DNA, 25 bp, Homo sapien
ctctattccaggcagtctgagccat

SEQ ID NO: 4203543 - DNA, 25 bp, Homo sapien
aatggctgatattaagagcttactc

SEQ ID NO: 4203544 - DNA, 25 bp, Homo sapien
aaaactgccactctagttaattaga

SEQ ID NO: 4203545 - DNA, 25 bp, Homo sapien
ttattaataaaactgccactctagt

SEQ ID NO: 4203546 - DNA, 25 bp, Homo sapien
caatcgctgaaataaagtggtctta

SEQ ID NO: 4203547 - DNA, 25 bp, Homo sapien
ggcctgctactgcagaatgtggata

SEQ ID NO: 4203548 - DNA, 25 bp, Homo sapien
ggcaagtaatgggattataccaccc

SEQ ID NO: 4203549 - DNA, 25 bp, Homo sapien
tcagtcatttacttgcagtgtgagc

SEQ ID NO: 4203550 - DNA, 25 bp, Homo sapien
tggggtccaggtgataatacaaaat

SEQ ID NO: 4203551 - DNA, 25 bp, Homo sapien
ggttggggtccaggtgataatacaa

SEQ ID NO: 4203552 - DNA, 25 bp, Homo sapien
ggtccaggtgataatacaaaatcat

SEQ ID NO: 4203553 - DNA, 25 bp, Homo sapien
gggtccaggtgataatacaaaatca

SEQ ID NO: 4203554 - DNA, 25 bp, Homo sapien
acacataaacaaaaacagcaattac

SEQ ID NO: 4203555 - DNA, 25 bp, Homo sapien
atattacacataaacaaaaacagca

SEQ ID NO: 4203556 - DNA, 25 bp, Homo sapien
aggtttaaacacataatattacaca

SEQ ID NO: 4203557 - DNA, 25 bp, Homo sapien
ttacacataaacaaaaacagcaatt

SEQ ID NO: 4203558 - DNA, 25 bp, Homo sapien
ctttacttcctggaacatagacagc

SEQ ID NO: 4203559 - DNA, 25 bp, Homo sapien
ttacttcctggaacatagacagcca

SEQ ID NO: 4203560 - DNA, 25 bp, Homo sapien
tacttcctggaacatagacagccac

SEQ ID NO: 4203561 - DNA, 25 bp, Homo sapien
tttacttcctggaacatagacagcc

SEQ ID NO: 4203562 - DNA, 25 bp, Homo sapien
ttattagctaaagctgcatgaggtc

SEQ ID NO: 4203563 - DNA, 25 bp, Homo sapien
gaaacttttattagctaaagctgca

SEQ ID NO: 4203564 - DNA, 25 bp, Homo sapien
gttggggtactgatataatctaaca

SEQ ID NO: 4203565 - DNA, 25 bp, Homo sapien
tataatctaacaaatgaaggtgcac

SEQ ID NO: 4203566 - DNA, 25 bp, Homo sapien
ttattccacagcattgtaactttat

SEQ ID NO: 4203567 - DNA, 25 bp, Homo sapien
tttattccacagcattgtaacttta

SEQ ID NO: 4203568 - DNA, 25 bp, Homo sapien
cttttttattccacagcattgtaac

SEQ ID NO: 4203569 - DNA, 25 bp, Homo sapien
tttttattccacagcattgtaactt

SEQ ID NO: 4203570 - DNA, 25 bp, Homo sapien
aacacaaatgggcattgattcttct

SEQ ID NO: 4203571 - DNA, 25 bp, Homo sapien
ttgattcttctgttatacacatagg

SEQ ID NO: 4203572 - DNA, 25 bp, Homo sapien
tatacacataggaatatagcctaaa

SEQ ID NO: 4203573 - DNA, 25 bp, Homo sapien
cataggaatatagcctaaattaaca

SEQ ID NO: 4203574 - DNA, 25 bp, Homo sapien
gagtttgttctccatagtaggaagc

SEQ ID NO: 4203575 - DNA, 25 bp, Homo sapien
ccatttgttgcaatgtagtgtagag

SEQ ID NO: 4203576 - DNA, 25 bp, Homo sapien
taattgcactacagcactttctcca

SEQ ID NO: 4203577 - DNA, 25 bp, Homo sapien
ctgtcttgtcaacatctgtgctagc

SEQ ID NO: 4203578 - DNA, 25 bp, Homo sapien
ggtagtgtcagaactccagataact

SEQ ID NO: 4203579 - DNA, 25 bp, Homo sapien
tacaaaagtatggatctacttctgg

SEQ ID NO: 4203580 - DNA, 25 bp, Homo sapien
accttttgtttcgaatggctagcca

SEQ ID NO: 4203581 - DNA, 25 bp, Homo sapien
tgtataagtttttgacccaaccaga

SEQ ID NO: 4203582 - DNA, 25 bp, Homo sapien
gcctcaaatttctcggctcatacaa

SEQ ID NO: 4203583 - DNA, 25 bp, Homo sapien
tcaccaagactgcagtacagccgta

SEQ ID NO: 4203584 - DNA, 25 bp, Homo sapien
tacagccgtaggatcttagcttgct

SEQ ID NO: 4203585 - DNA, 25 bp, Homo sapien
cactgcaccggctctgaggactaat

SEQ ID NO: 4203586 - DNA, 25 bp, Homo sapien
tgttaaaatatgctcaccatccggg

SEQ ID NO: 4203587 - DNA, 25 bp, Homo sapien
tccgggcaccaagcaaaatatgtag

SEQ ID NO: 4203588 - DNA, 25 bp, Homo sapien
tccatgagggctatagtaggctgca

SEQ ID NO: 4203589 - DNA, 25 bp, Homo sapien
taacccgtaacctgggagcacatgt

SEQ ID NO: 4203590 - DNA, 25 bp, Homo sapien
tggcacactccaactgtcaggatgg

SEQ ID NO: 4203591 - DNA, 25 bp, Homo sapien
gaaactcattggtagtggcacactc

SEQ ID NO: 4203592 - DNA, 25 bp, Homo sapien
tgtcaacagaaacccagttgcctcg

SEQ ID NO: 4203593 - DNA, 25 bp, Homo sapien
tctgggattgacatatgaagagacc

SEQ ID NO: 4203594 - DNA, 25 bp, Homo sapien
gataatggcttatcgtttcctgatt

SEQ ID NO: 4203595 - DNA, 25 bp, Homo sapien
ttttgataatggcttatcgtttcct

SEQ ID NO: 4203596 - DNA, 25 bp, Homo sapien
tggcttatcgtttcctgattgtggt

SEQ ID NO: 4203597 - DNA, 25 bp, Homo sapien
aatggcttatcgtttcctgattgtg

SEQ ID NO: 4203598 - DNA, 25 bp, Homo sapien
ggagtaggtgccaaatctggactct

SEQ ID NO: 4203599 - DNA, 25 bp, Homo sapien
ggtgccaaatctggactcttgtcac

SEQ ID NO: 4203600 - DNA, 25 bp, Homo sapien
taggtgccaaatctggactcttgtc

SEQ ID NO: 4203601 - DNA, 25 bp, Homo sapien
gcaggagtaggtgccaaatctggac

SEQ ID NO: 4203602 - DNA, 25 bp, Homo sapien
cagggtccccagaaattgactgaga

SEQ ID NO: 4203603 - DNA, 25 bp, Homo sapien
aaattgactgagagacagtgtttcg

SEQ ID NO: 4203604 - DNA, 25 bp, Homo sapien
ccagaaattgactgagagacagtgt

SEQ ID NO: 4203605 - DNA, 25 bp, Homo sapien
ggtccccagaaattgactgagagac

SEQ ID NO: 4203606 - DNA, 25 bp, Homo sapien
gatgtttctggctttgagagaaatc

SEQ ID NO: 4203607 - DNA, 25 bp, Homo sapien
tctgaaagattgttggtccaaagtc

SEQ ID NO: 4203608 - DNA, 25 bp, Homo sapien
aatctcaatgagagcattctgaaag

SEQ ID NO: 4203609 - DNA, 25 bp, Homo sapien
gagagaaatctcaatgagagcattc

SEQ ID NO: 4203610 - DNA, 25 bp, Homo sapien
tttcagttgttcgattgctttcagt

SEQ ID NO: 4203611 - DNA, 25 bp, Homo sapien
gttctttcagttgttcgattgcttt

SEQ ID NO: 4203612 - DNA, 25 bp, Homo sapien
tctttcagttgttcgattgctttca

SEQ ID NO: 4203613 - DNA, 25 bp, Homo sapien
ctttcagttgttcgattgctttcag

SEQ ID NO: 4203614 - DNA, 25 bp, Homo sapien
gctcctggagaagggctgtttcttt

SEQ ID NO: 4203615 - DNA, 25 bp, Homo sapien
aaatacccaattccaaatcttccag

SEQ ID NO: 4203616 - DNA, 25 bp, Homo sapien
cagctcctggagaagggctgtttct

SEQ ID NO: 4203617 - DNA, 25 bp, Homo sapien
ctgtttctttctgaattttctccaa

SEQ ID NO: 4203618 - DNA, 25 bp, Homo sapien
ggtcatcaacttgctttccgtgaat

SEQ ID NO: 4203619 - DNA, 25 bp, Homo sapien
tatagattgacattaagtgtgggca

SEQ ID NO: 4203620 - DNA, 25 bp, Homo sapien
tacacttagtagaatcttggataaa

SEQ ID NO: 4203621 - DNA, 25 bp, Homo sapien
tgtgtataccaatgggtttaacaga

SEQ ID NO: 4203622 - DNA, 25 bp, Homo sapien
acgtatctcttttctatatcacata

SEQ ID NO: 4203623 - DNA, 25 bp, Homo sapien
ctgtcaagcttagctaaaaaattca

SEQ ID NO: 4203624 - DNA, 25 bp, Homo sapien
tacatggtatatatcaccctctaca

SEQ ID NO: 4203625 - DNA, 25 bp, Homo sapien
tggtatatatcaccctctacaaaaa

SEQ ID NO: 4203626 - DNA, 25 bp, Homo sapien
caataccaccacgttggaggttagg

SEQ ID NO: 4203627 - DNA, 25 bp, Homo sapien
aacatacgagttttaaggtggcaca

SEQ ID NO: 4203628 - DNA, 25 bp, Homo sapien
tatccatgaaaactaagcagggtgc

SEQ ID NO: 4203629 - DNA, 25 bp, Homo sapien
tcaaagtggcgaacatttcaaagcc

SEQ ID NO: 4203630 - DNA, 25 bp, Homo sapien
tcctctacttagctgccaaccatga

SEQ ID NO: 4203631 - DNA, 25 bp, Homo sapien
gcaacgtggcaaaacgccactgttt

SEQ ID NO: 4203632 - DNA, 25 bp, Homo sapien
caaccatgataaacacgttaaacct

SEQ ID NO: 4203633 - DNA, 25 bp, Homo sapien
caaatgttagattctggacttggct

SEQ ID NO: 4203634 - DNA, 25 bp, Homo sapien
cagacagtcagcaggtctatgacta

SEQ ID NO: 4203635 - DNA, 25 bp, Homo sapien
acgcaggggttacagacagtcagca

SEQ ID NO: 4203636 - DNA, 25 bp, Homo sapien
ggtctatgactattaatggattgta

SEQ ID NO: 4203637 - DNA, 25 bp, Homo sapien
actgatctgacgcaggggttacaga

SEQ ID NO: 4203638 - DNA, 25 bp, Homo sapien
tgttatggctgggcctatgacttac

SEQ ID NO: 4203639 - DNA, 25 bp, Homo sapien
tgtaatgttatggctgggcctatga

SEQ ID NO: 4203640 - DNA, 25 bp, Homo sapien
aatgttatggctgggcctatgactt

SEQ ID NO: 4203641 - DNA, 25 bp, Homo sapien
taatgttatggctgggcctatgact

SEQ ID NO: 4203642 - DNA, 25 bp, Homo sapien
gcattccgggcaaggctttggtgta

SEQ ID NO: 4203643 - DNA, 25 bp, Homo sapien
caactgtgagcaggcaatcagccct

SEQ ID NO: 4203644 - DNA, 25 bp, Homo sapien
tcatcgactctacagggctaagctg

SEQ ID NO: 4203645 - DNA, 25 bp, Homo sapien
tacaacgacactaacaggacacttg

SEQ ID NO: 4203646 - DNA, 25 bp, Homo sapien
cctagatgacaaactaagaccctgt

SEQ ID NO: 4203647 - DNA, 25 bp, Homo sapien
gatgacaaactaagaccctgtttca

SEQ ID NO: 4203648 - DNA, 25 bp, Homo sapien
gtactctagcctagatgacaaacta

SEQ ID NO: 4203649 - DNA, 25 bp, Homo sapien
tctagcctagatgacaaactaagac

SEQ ID NO: 4203650 - DNA, 25 bp, Homo sapien
tgctgaaattttttgggtgcgctgt

SEQ ID NO: 4203651 - DNA, 25 bp, Homo sapien
cctgattcaagtgttggcggatgga

SEQ ID NO: 4203652 - DNA, 25 bp, Homo sapien
tttgggtgcgctgttatggcctttt

SEQ ID NO: 4203653 - DNA, 25 bp, Homo sapien
tcctgaccctcagaatggtaatgct

SEQ ID NO: 4203654 - DNA, 25 bp, Homo sapien
caccatcttggtagtgtgcaagact

SEQ ID NO: 4203655 - DNA, 25 bp, Homo sapien
cagccacttcggccgccctcagaca

SEQ ID NO: 4203656 - DNA, 25 bp, Homo sapien
cacttcggccgccctcagacagact

SEQ ID NO: 4203657 - DNA, 25 bp, Homo sapien
cttcggccgccctcagacagactgc

SEQ ID NO: 4203658 - DNA, 25 bp, Homo sapien
gccacttcggccgccctcagacaga

SEQ ID NO: 4203659 - DNA, 25 bp, Homo sapien
cagacgccgccactaggagaagcag

SEQ ID NO: 4203660 - DNA, 25 bp, Homo sapien
gcctcgctccggaccatcgcagacg

SEQ ID NO: 4203661 - DNA, 25 bp, Homo sapien
ctcttgctgggcacgccgcccagat

SEQ ID NO: 4203662 - DNA, 25 bp, Homo sapien
atcgcagacgccgccactaggagaa

SEQ ID NO: 4203663 - DNA, 25 bp, Homo sapien
cttgagcagcggccccgtggcgtac

SEQ ID NO: 4203664 - DNA, 25 bp, Homo sapien
gcagcggccccgtggcgtactgcat

SEQ ID NO: 4203665 - DNA, 25 bp, Homo sapien
tctggaacttgagcagcggccccgt

SEQ ID NO: 4203666 - DNA, 25 bp, Homo sapien
caaatctggaacttgagcagcggcc

SEQ ID NO: 4203667 - DNA, 25 bp, Homo sapien
gttctacgaggccagcgaagatgcg

SEQ ID NO: 4203668 - DNA, 25 bp, Homo sapien
tgcggccatttaggccgcgaagccg

SEQ ID NO: 4203669 - DNA, 25 bp, Homo sapien
aagggcgccggcacagttctacgag

SEQ ID NO: 4203670 - DNA, 25 bp, Homo sapien
tcgcgtagccaatggcgccgagcag

SEQ ID NO: 4203671 - DNA, 25 bp, Homo sapien
cagtcttcgcctttcagcgtttaac

SEQ ID NO: 4203672 - DNA, 25 bp, Homo sapien
tcgcctttcagcgtttaaccttctc

SEQ ID NO: 4203673 - DNA, 25 bp, Homo sapien
tttcagcgtttaaccttctcgcgcc

SEQ ID NO: 4203674 - DNA, 25 bp, Homo sapien
acaggtgtcccccagtcttcgcctt

SEQ ID NO: 4203675 - DNA, 25 bp, Homo sapien
gtaccccggagctcggagacatgaa

SEQ ID NO: 4203676 - DNA, 25 bp, Homo sapien
tgaacggcttcacgcctgggcagtg

SEQ ID NO: 4203677 - DNA, 25 bp, Homo sapien
tgcagagtgaactgccgccgacgga

SEQ ID NO: 4203678 - DNA, 25 bp, Homo sapien
gggatttctgtcagcgccggtaccc

SEQ ID NO: 4203679 - DNA, 25 bp, Homo sapien
gaccttccaccatgagctgactcag

SEQ ID NO: 4203680 - DNA, 25 bp, Homo sapien
aataatcctaatgcaacactgttgg

SEQ ID NO: 4203681 - DNA, 25 bp, Homo sapien
aagttattactaggcaatgctttcc

SEQ ID NO: 4203682 - DNA, 25 bp, Homo sapien
tgcaagttcaatcacctgctttcgc

SEQ ID NO: 4203683 - DNA, 25 bp, Homo sapien
gtctcctcaataactggtactatag

SEQ ID NO: 4203684 - DNA, 25 bp, Homo sapien
cctgaaatcaatctacaaccaacag

SEQ ID NO: 4203685 - DNA, 25 bp, Homo sapien
cagtctcctcaataactggtactat

SEQ ID NO: 4203686 - DNA, 25 bp, Homo sapien
tctacaaccaacaggtaaaagtaca

SEQ ID NO: 4203687 - DNA, 25 bp, Homo sapien
agcctaggcaatacagtgagactcc

SEQ ID NO: 4203688 - DNA, 25 bp, Homo sapien
ccagcctaggcaatacagtgagact

SEQ ID NO: 4203689 - DNA, 25 bp, Homo sapien
cctaggcaatacagtgagactccat

SEQ ID NO: 4203690 - DNA, 25 bp, Homo sapien
accagcctaggcaatacagtgagac

SEQ ID NO: 4203691 - DNA, 25 bp, Homo sapien
cttgtccatgctatttcaaattggt

SEQ ID NO: 4203692 - DNA, 25 bp, Homo sapien
tagatgatctatgcagaacagaaag

SEQ ID NO: 4203693 - DNA, 25 bp, Homo sapien
tattagatgatctatgcagaacaga

SEQ ID NO: 4203694 - DNA, 25 bp, Homo sapien
atattagatgatctatgcagaacag

SEQ ID NO: 4203695 - DNA, 25 bp, Homo sapien
tcaactagagatgtgcatatgcgca

SEQ ID NO: 4203696 - DNA, 25 bp, Homo sapien
tatgcgcaggctgaactaacagtca

SEQ ID NO: 4203697 - DNA, 25 bp, Homo sapien
cttagacctttgtgtgaaactccaa

SEQ ID NO: 4203698 - DNA, 25 bp, Homo sapien
aatctacttggttcatcaggcccta

SEQ ID NO: 4203699 - DNA, 25 bp, Homo sapien
gtactcctcaaacacccgcctataa

SEQ ID NO: 4203700 - DNA, 25 bp, Homo sapien
tactcctcaaacacccgcctataac

SEQ ID NO: 4203701 - DNA, 25 bp, Homo sapien
ctgggtaccgctggctaataacccg

SEQ ID NO: 4203702 - DNA, 25 bp, Homo sapien
gggtaccgctggctaataacccgca

SEQ ID NO: 4203703 - DNA, 25 bp, Homo sapien
ggtaccgctggctaataacccgcat

SEQ ID NO: 4203704 - DNA, 25 bp, Homo sapien
tgggtaccgctggctaataacccgc

SEQ ID NO: 4203705 - DNA, 25 bp, Homo sapien
ccccactgccagatgctaggagctt

SEQ ID NO: 4203706 - DNA, 25 bp, Homo sapien
tgccaacaattattaagcctattaa

SEQ ID NO: 4203707 - DNA, 25 bp, Homo sapien
taatactagtttgaagactgacagg

SEQ ID NO: 4203708 - DNA, 25 bp, Homo sapien
aagcaaaaggatccttgccaacaat

SEQ ID NO: 4203709 - DNA, 25 bp, Homo sapien
gagaatgccaattcacagcaagctg

SEQ ID NO: 4203710 - DNA, 25 bp, Homo sapien
tatattaagaagtcctgcctgttac

SEQ ID NO: 4203711 - DNA, 25 bp, Homo sapien
aatcacaggactaaaagtaggatgc

SEQ ID NO: 4203712 - DNA, 25 bp, Homo sapien
tctctcccaaaagcggctaagtgtt

SEQ ID NO: 4203713 - DNA, 25 bp, Homo sapien
ctgttgacatacactggttctcaat

SEQ ID NO: 4203714 - DNA, 25 bp, Homo sapien
taaagttatctcaaatgcacctgtt

SEQ ID NO: 4203715 - DNA, 25 bp, Homo sapien
aaagttatctcaaatgcacctgttg

SEQ ID NO: 4203716 - DNA, 25 bp, Homo sapien
tctcaatcatgttgctcaagaagaa

SEQ ID NO: 4203717 - DNA, 25 bp, Homo sapien
caacccttggtttagagaatgcaga

SEQ ID NO: 4203718 - DNA, 25 bp, Homo sapien
tattagctcataggccgtatttgcc

SEQ ID NO: 4203719 - DNA, 25 bp, Homo sapien
aacaagcagcagaggatatggtcca

SEQ ID NO: 4203720 - DNA, 25 bp, Homo sapien
tctggcatgggcaactgagtagaca

SEQ ID NO: 4203721 - DNA, 25 bp, Homo sapien
ctatgatcgatggtgtgggattgaa

SEQ ID NO: 4203722 - DNA, 25 bp, Homo sapien
gattccagcttagaccacacaggta

SEQ ID NO: 4203723 - DNA, 25 bp, Homo sapien
tccagcttagaccacacaggtacat

SEQ ID NO: 4203724 - DNA, 25 bp, Homo sapien
gattgaatccatatgcacattgagc

SEQ ID NO: 4203725 - DNA, 25 bp, Homo sapien
aaagagttttcagtgctgataggtg

SEQ ID NO: 4203726 - DNA, 25 bp, Homo sapien
gagttttcagtgctgataggtggtg

SEQ ID NO: 4203727 - DNA, 25 bp, Homo sapien
aagagttttcagtgctgataggtgg

SEQ ID NO: 4203728 - DNA, 25 bp, Homo sapien
aaaagagttttcagtgctgataggt

SEQ ID NO: 4203729 - DNA, 25 bp, Homo sapien
atatgccagcactgaaacactatct

SEQ ID NO: 4203730 - DNA, 25 bp, Homo sapien
aatatgccagcactgaaacactatc

SEQ ID NO: 4203731 - DNA, 25 bp, Homo sapien
tactgaagatgaacccctagacaca

SEQ ID NO: 4203732 - DNA, 25 bp, Homo sapien
gatgagcgtcaacaacacagctgaa

SEQ ID NO: 4203733 - DNA, 25 bp, Homo sapien
tacagtatgttccaccttgaagcta

SEQ ID NO: 4203734 - DNA, 25 bp, Homo sapien
gcagggaatttggagtggtacacaa

SEQ ID NO: 4203735 - DNA, 25 bp, Homo sapien
gtcttgcacatcttatacactgagg

SEQ ID NO: 4203736 - DNA, 25 bp, Homo sapien
caatgctacagaggtaagtccccaa

SEQ ID NO: 4203737 - DNA, 25 bp, Homo sapien
tgtttgccagccaatcaaagtccca

SEQ ID NO: 4203738 - DNA, 25 bp, Homo sapien
aaaggctttagaataccacaccatg

SEQ ID NO: 4203739 - DNA, 25 bp, Homo sapien
catataaagtgctctaatgtagatt

SEQ ID NO: 4203740 - DNA, 25 bp, Homo sapien
agttaccatataaagtgctctaatg

SEQ ID NO: 4203741 - DNA, 25 bp, Homo sapien
gtatagttaccatataaagtgctct

SEQ ID NO: 4203742 - DNA, 25 bp, Homo sapien
ttgtgagtatagttaccatataaag

SEQ ID NO: 4203743 - DNA, 25 bp, Homo sapien
tcctctggggtagtccactagccac

SEQ ID NO: 4203744 - DNA, 25 bp, Homo sapien
cactagccacttaaagccccaaaag

SEQ ID NO: 4203745 - DNA, 25 bp, Homo sapien
gtttgttatccttgacaatctttcc

SEQ ID NO: 4203746 - DNA, 25 bp, Homo sapien
gaagactgcttgaaatgacactaag

SEQ ID NO: 4203747 - DNA, 25 bp, Homo sapien
taagtggtaatccttcgttgcccat

SEQ ID NO: 4203748 - DNA, 25 bp, Homo sapien
ctgacagagcttgcataggagagtc

SEQ ID NO: 4203749 - DNA, 25 bp, Homo sapien
taaatagctagaaaggaatccttcc

SEQ ID NO: 4203750 - DNA, 25 bp, Homo sapien
ctattactagagttagggcaaggac

SEQ ID NO: 4203751 - DNA, 25 bp, Homo sapien
gcttagccagcatcgtcagccctag

SEQ ID NO: 4203752 - DNA, 25 bp, Homo sapien
aaggtcacggacatcggtgactacg

SEQ ID NO: 4203753 - DNA, 25 bp, Homo sapien
cggacatcggtgactacgacgacga

SEQ ID NO: 4203754 - DNA, 25 bp, Homo sapien
acgacgacgacttcccagacgtgcg

SEQ ID NO: 4203755 - DNA, 25 bp, Homo sapien
ccccacatgttgagggcaggacctg

SEQ ID NO: 4203756 - DNA, 25 bp, Homo sapien
tatgtggaatccaaagaagttcacc

SEQ ID NO: 4203757 - DNA, 25 bp, Homo sapien
ccaaagaagttcacctcatagaagt

SEQ ID NO: 4203758 - DNA, 25 bp, Homo sapien
gaagttcacctcatagaagtattga

SEQ ID NO: 4203759 - DNA, 25 bp, Homo sapien
tagaagtattgagtagaacagtggt

SEQ ID NO: 4203760 - DNA, 25 bp, Homo sapien
cctttcttccgtttgatcaatctgg

SEQ ID NO: 4203761 - DNA, 25 bp, Homo sapien
tcttccgtttgatcaatctggctat

SEQ ID NO: 4203762 - DNA, 25 bp, Homo sapien
atctggctattaatacttacgtatg

SEQ ID NO: 4203763 - DNA, 25 bp, Homo sapien
taatacttacgtatgtttcacgaag

SEQ ID NO: 4203764 - DNA, 25 bp, Homo sapien
tgtgctgctggattctgtttaccaa

SEQ ID NO: 4203765 - DNA, 25 bp, Homo sapien
tgctggattctgtttaccaataatt

SEQ ID NO: 4203766 - DNA, 25 bp, Homo sapien
gctgctggattctgtttaccaataa

SEQ ID NO: 4203767 - DNA, 25 bp, Homo sapien
gatgaagccaacttggtcatggtga

SEQ ID NO: 4203768 - DNA, 25 bp, Homo sapien
cgattctagaaaatcatgactctac

SEQ ID NO: 4203769 - DNA, 25 bp, Homo sapien
tattccattgtaaggacacactaca

SEQ ID NO: 4203770 - DNA, 25 bp, Homo sapien
gactctactttctttacagatttgc

SEQ ID NO: 4203771 - DNA, 25 bp, Homo sapien
cacacaatacatacatggtcctttg

SEQ ID NO: 4203772 - DNA, 25 bp, Homo sapien
acaatcaattctagatcatgttcat

SEQ ID NO: 4203773 - DNA, 25 bp, Homo sapien
gagatgtgtaagaacaccacaatca

SEQ ID NO: 4203774 - DNA, 25 bp, Homo sapien
caattctagatcatgttcatcaccc

SEQ ID NO: 4203775 - DNA, 25 bp, Homo sapien
gatgtgtaagaacaccacaatcaat

SEQ ID NO: 4203776 - DNA, 25 bp, Homo sapien
gaagtgggaccagaaaaagtgcagt

SEQ ID NO: 4203777 - DNA, 25 bp, Homo sapien
gtattagacgggagaagtgggacca

SEQ ID NO: 4203778 - DNA, 25 bp, Homo sapien
tcaaagagagaatagtattagacgg

SEQ ID NO: 4203779 - DNA, 25 bp, Homo sapien
gagaatagtattagacgggagaagt

SEQ ID NO: 4203780 - DNA, 25 bp, Homo sapien
tagcatgacaaagaagacttgctcc

SEQ ID NO: 4203781 - DNA, 25 bp, Homo sapien
acaatggtgcccacttggacccaaa

SEQ ID NO: 4203782 - DNA, 25 bp, Homo sapien
ggacccaaatgactcgaccagacag

SEQ ID NO: 4203783 - DNA, 25 bp, Homo sapien
caaggagatcatggtgctgtgactc

SEQ ID NO: 4203784 - DNA, 25 bp, Homo sapien
taagagcattgcaggtattaaatca

SEQ ID NO: 4203785 - DNA, 25 bp, Homo sapien
catagatcactagggtgattatagt

SEQ ID NO: 4203786 - DNA, 25 bp, Homo sapien
ggcacaatgctaagagcattgcagg

SEQ ID NO: 4203787 - DNA, 25 bp, Homo sapien
taagacgtagtgtttcatagatcac

SEQ ID NO: 4203788 - DNA, 25 bp, Homo sapien
caaaacaaaagtaactgggcatagt

SEQ ID NO: 4203789 - DNA, 25 bp, Homo sapien
aacaaaagtaactgggcatagtggt

SEQ ID NO: 4203790 - DNA, 25 bp, Homo sapien
tcactggtctcagcagggtgcagtg

SEQ ID NO: 4203791 - DNA, 25 bp, Homo sapien
tctacaaaacaaaagtaactgggca

SEQ ID NO: 4203792 - DNA, 25 bp, Homo sapien
aattttatgattattgctgtcaaga

SEQ ID NO: 4203793 - DNA, 25 bp, Homo sapien
tttatgattattgctgtcaagatgt

SEQ ID NO: 4203794 - DNA, 25 bp, Homo sapien
ttttatgattattgctgtcaagatg

SEQ ID NO: 4203795 - DNA, 25 bp, Homo sapien
ttatgattattgctgtcaagatgta

SEQ ID NO: 4203796 - DNA, 25 bp, Homo sapien
tataaccggtgtgtcatatgcttgc

SEQ ID NO: 4203797 - DNA, 25 bp, Homo sapien
tacagatgacccgtttacacgtggc

SEQ ID NO: 4203798 - DNA, 25 bp, Homo sapien
tatagatccacatgaacgcacgcct

SEQ ID NO: 4203799 - DNA, 25 bp, Homo sapien
aaattgcagatttagggagcctgcc

SEQ ID NO: 4203800 - DNA, 25 bp, Homo sapien
ctatggacagatgagaaacatacat

SEQ ID NO: 4203801 - DNA, 25 bp, Homo sapien
ctggctatggacagatgagaaacat

SEQ ID NO: 4203802 - DNA, 25 bp, Homo sapien
tgctaactctggctatggacagatg

SEQ ID NO: 4203803 - DNA, 25 bp, Homo sapien
ctaactctggctatggacagatgag

SEQ ID NO: 4203804 - DNA, 25 bp, Homo sapien
cagagcccgtctgaagtactaggag

SEQ ID NO: 4203805 - DNA, 25 bp, Homo sapien
ctactggtggagacagatgtgccaa

SEQ ID NO: 4203806 - DNA, 25 bp, Homo sapien
gatgtgccaatagggcagagcccgt

SEQ ID NO: 4203807 - DNA, 25 bp, Homo sapien
tactaggagccgaaaggagtccgaa

SEQ ID NO: 4203808 - DNA, 25 bp, Homo sapien
tcaggacatgatcatacacagggta

SEQ ID NO: 4203809 - DNA, 25 bp, Homo sapien
tttggagccactgtgtattgctggc

SEQ ID NO: 4203810 - DNA, 25 bp, Homo sapien
tattgctggcgagtttttcaggaca

SEQ ID NO: 4203811 - DNA, 25 bp, Homo sapien
tgaatgtggttccacgctggacatc

SEQ ID NO: 4203812 - DNA, 25 bp, Homo sapien
ccggatgcattattagctcagatct

SEQ ID NO: 4203813 - DNA, 25 bp, Homo sapien
gatgcattattagctcagatctttg

SEQ ID NO: 4203814 - DNA, 25 bp, Homo sapien
cggatgcattattagctcagatctt

SEQ ID NO: 4203815 - DNA, 25 bp, Homo sapien
atgcattattagctcagatctttgg

SEQ ID NO: 4203816 - DNA, 25 bp, Homo sapien
cgtgtattcgggtactctcggtagg

SEQ ID NO: 4203817 - DNA, 25 bp, Homo sapien
cagtaaaacttggaccgagaaactg

SEQ ID NO: 4203818 - DNA, 25 bp, Homo sapien
ggctgggccgcaccagtaaaacttg

SEQ ID NO: 4203819 - DNA, 25 bp, Homo sapien
gcccgcgtcctctgcagacgtgtat

SEQ ID NO: 4203820 - DNA, 25 bp, Homo sapien
ccggtgacctcagggactccggtat

SEQ ID NO: 4203821 - DNA, 25 bp, Homo sapien
tccggtatccgccagcccactcgca

SEQ ID NO: 4203822 - DNA, 25 bp, Homo sapien
cgccggtgacctcagggactccggt

SEQ ID NO: 4203823 - DNA, 25 bp, Homo sapien
gtgacctcagggactccggtatccg

SEQ ID NO: 4203824 - DNA, 25 bp, Homo sapien
ctggtgtgtaaccaatgccgccaga

SEQ ID NO: 4203825 - DNA, 25 bp, Homo sapien
tgtgtaaccaatgccgccagaagtt

SEQ ID NO: 4203826 - DNA, 25 bp, Homo sapien
caatgccgccagaagttgagctgct

SEQ ID NO: 4203827 - DNA, 25 bp, Homo sapien
gagaaggtggcctcggcagtcctgt

SEQ ID NO: 4203828 - DNA, 25 bp, Homo sapien
gctcttcgagtgtccggtctgcttt

SEQ ID NO: 4203829 - DNA, 25 bp, Homo sapien
ctgctttgactatgtcctgcctcct

SEQ ID NO: 4203830 - DNA, 25 bp, Homo sapien
ctcgctcttcgagtgtccggtctgc

SEQ ID NO: 4203831 - DNA, 25 bp, Homo sapien
atgtcctgcctcctattctgcagtg

SEQ ID NO: 4203832 - DNA, 25 bp, Homo sapien
tctagcgcttctgctgggcgcgcag

SEQ ID NO: 4203833 - DNA, 25 bp, Homo sapien
cacttttacagttggagggaaccat

SEQ ID NO: 4203834 - DNA, 25 bp, Homo sapien
tccggaatcgttggctcaagcaaag

SEQ ID NO: 4203835 - DNA, 25 bp, Homo sapien
gggctcttacgccatatttcttgga

SEQ ID NO: 4203836 - DNA, 25 bp, Homo sapien
caggttcagccatgttactaaagag

SEQ ID NO: 4203837 - DNA, 25 bp, Homo sapien
taagaagggctcctagcgtgttccc

SEQ ID NO: 4203838 - DNA, 25 bp, Homo sapien
caagactgtaagtaggaatcaggca

SEQ ID NO: 4203839 - DNA, 25 bp, Homo sapien
tatccatgcccaacatacagtgggc

SEQ ID NO: 4203840 - DNA, 25 bp, Homo sapien
cagtctcctaatgagagctagtaag

SEQ ID NO: 4203841 - DNA, 25 bp, Homo sapien
ggcaagggtgaggactccagtctcc

SEQ ID NO: 4203842 - DNA, 25 bp, Homo sapien
gaggactccagtctcctaatgagag

SEQ ID NO: 4203843 - DNA, 25 bp, Homo sapien
taatgagagctagtaagaagccgtg

SEQ ID NO: 4203844 - DNA, 25 bp, Homo sapien
gaccagggcctatctagctggaaca

SEQ ID NO: 4203845 - DNA, 25 bp, Homo sapien
ggatgggttcgctgtatttttagaa

SEQ ID NO: 4203846 - DNA, 25 bp, Homo sapien
gttgacttaatcaggtgtgcaatga

SEQ ID NO: 4203847 - DNA, 25 bp, Homo sapien
aaatttctctataccaggggaggca

SEQ ID NO: 4203848 - DNA, 25 bp, Homo sapien
gcatacctgagtcatctctaaaaag

SEQ ID NO: 4203849 - DNA, 25 bp, Homo sapien
aagctccaatgcatacctgagtcat

SEQ ID NO: 4203850 - DNA, 25 bp, Homo sapien
caagctccaatgcatacctgagtca

SEQ ID NO: 4203851 - DNA, 25 bp, Homo sapien
tacctgagtcatctctaaaaagcca

SEQ ID NO: 4203852 - DNA, 25 bp, Homo sapien
ttcgggtatacgctgccctctctct

SEQ ID NO: 4203853 - DNA, 25 bp, Homo sapien
ccctctctctggactgcagtcttta

SEQ ID NO: 4203854 - DNA, 25 bp, Homo sapien
ggaagtgctgaacttcaccctcctc

SEQ ID NO: 4203855 - DNA, 25 bp, Homo sapien
tctggactgcagtctttaccctctt

SEQ ID NO: 4203856 - DNA, 25 bp, Homo sapien
tgcaggctggctacctttgaccttg

SEQ ID NO: 4203857 - DNA, 25 bp, Homo sapien
tctgcaggctggctacctttgacct

SEQ ID NO: 4203858 - DNA, 25 bp, Homo sapien
ggctggctacctttgaccttgggct

SEQ ID NO: 4203859 - DNA, 25 bp, Homo sapien
caggctggctacctttgaccttggg

SEQ ID NO: 4203860 - DNA, 25 bp, Homo sapien
tccctgttgttaaggccaagtctaa

SEQ ID NO: 4203861 - DNA, 25 bp, Homo sapien
gaaaattgcccactcccataaacta

SEQ ID NO: 4203862 - DNA, 25 bp, Homo sapien
tatatcaagccaacagtgagccctg

SEQ ID NO: 4203863 - DNA, 25 bp, Homo sapien
cccaagtctgtaaattagccaggtg

SEQ ID NO: 4203864 - DNA, 25 bp, Homo sapien
gctcatgcgctgactccttccaaaa

SEQ ID NO: 4203865 - DNA, 25 bp, Homo sapien
tccaaaagccatacagccttacaag

SEQ ID NO: 4203866 - DNA, 25 bp, Homo sapien
tacagccttacaagtgactgtcttc

SEQ ID NO: 4203867 - DNA, 25 bp, Homo sapien
tccctctccgaggtatactgctcat

SEQ ID NO: 4203868 - DNA, 25 bp, Homo sapien
aagtgtccttccctgtggtggctaa

SEQ ID NO: 4203869 - DNA, 25 bp, Homo sapien
gcccctgaactaatccttgtctgag

SEQ ID NO: 4203870 - DNA, 25 bp, Homo sapien
ctccaggaacattgtcatatggggc

SEQ ID NO: 4203871 - DNA, 25 bp, Homo sapien
tcccctctcttagtggggatcaggg

SEQ ID NO: 4203872 - DNA, 25 bp, Homo sapien
ctcctcggcatctttcactgtagaa

SEQ ID NO: 4203873 - DNA, 25 bp, Homo sapien
ggaaggtgactggtctcaattttta

SEQ ID NO: 4203874 - DNA, 25 bp, Homo sapien
tagaacgtgaggaatataagactcc

SEQ ID NO: 4203875 - DNA, 25 bp, Homo sapien
actggtctcaatttttagaggctcc

SEQ ID NO: 4203876 - DNA, 25 bp, Homo sapien
gaagcttcaagattattgttcagtg

SEQ ID NO: 4203877 - DNA, 25 bp, Homo sapien
gcttcaagattattgttcagtgtca

SEQ ID NO: 4203878 - DNA, 25 bp, Homo sapien
caagattattgttcagtgtcaacaa

SEQ ID NO: 4203879 - DNA, 25 bp, Homo sapien
gaggaagcttcaagattattgttca

SEQ ID NO: 4203880 - DNA, 25 bp, Homo sapien
tccacgcgagtgtatcaggaaaatc

SEQ ID NO: 4203881 - DNA, 25 bp, Homo sapien
caagtaaggcttggatactcccctg

SEQ ID NO: 4203882 - DNA, 25 bp, Homo sapien
tccacctggagttggactgaccagc

SEQ ID NO: 4203883 - DNA, 25 bp, Homo sapien
aatcctcaggactttgcccatttgt

SEQ ID NO: 4203884 - DNA, 25 bp, Homo sapien
ctggccttggattttgtctgatctc

SEQ ID NO: 4203885 - DNA, 25 bp, Homo sapien
atagtgaattgggttcccgagttat

SEQ ID NO: 4203886 - DNA, 25 bp, Homo sapien
agaagaataggtcccacgttgttag

SEQ ID NO: 4203887 - DNA, 25 bp, Homo sapien
tctcatggctaagagagtttacgcg

SEQ ID NO: 4203888 - DNA, 25 bp, Homo sapien
ttggattcattgagagccagtctcc

SEQ ID NO: 4203889 - DNA, 25 bp, Homo sapien
gccttgactgcattcccagcttgca

SEQ ID NO: 4203890 - DNA, 25 bp, Homo sapien
aaagcagcttggattcattgagagc

SEQ ID NO: 4203891 - DNA, 25 bp, Homo sapien
ggtggatgaagccttgactgcattc

SEQ ID NO: 4203892 - DNA, 25 bp, Homo sapien
cagcagtagcagacggtgagcaaaa

SEQ ID NO: 4203893 - DNA, 25 bp, Homo sapien
tcagcttgaaccataacaaacatgg

SEQ ID NO: 4203894 - DNA, 25 bp, Homo sapien
gaaccataacaaacatggaccagaa

SEQ ID NO: 4203895 - DNA, 25 bp, Homo sapien
gcagcaaacagcagtagcagacggt

SEQ ID NO: 4203896 - DNA, 25 bp, Homo sapien
tacagcccatgttgagagctgtata

SEQ ID NO: 4203897 - DNA, 25 bp, Homo sapien
aaacttggggcaggtatacagccca

SEQ ID NO: 4203898 - DNA, 25 bp, Homo sapien
tagcctagatgcctaaggacacagt

SEQ ID NO: 4203899 - DNA, 25 bp, Homo sapien
ctaatgccgggagtttgggatgact

SEQ ID NO: 4203900 - DNA, 25 bp, Homo sapien
aatcagaaccaagtggagcgaggcc

SEQ ID NO: 4203901 - DNA, 25 bp, Homo sapien
tctaggtgtcacatcatggtacggg

SEQ ID NO: 4203902 - DNA, 25 bp, Homo sapien
gagcgaggccaccatcaactggaat

SEQ ID NO: 4203903 - DNA, 25 bp, Homo sapien
caagacgacggttttcaccagtgga

SEQ ID NO: 4203904 - DNA, 25 bp, Homo sapien
tcttgctctatgtacagtgccctgc

SEQ ID NO: 4203905 - DNA, 25 bp, Homo sapien
cagagctgctttttggtcgcgatca

SEQ ID NO: 4203906 - DNA, 25 bp, Homo sapien
tggccaaccctcacagaaaaagctt

SEQ ID NO: 4203907 - DNA, 25 bp, Homo sapien
ggtgagcatttcagactccaggtgt

SEQ ID NO: 4203908 - DNA, 25 bp, Homo sapien
gaatgtatcaagaagagcgactggg

SEQ ID NO: 4203909 - DNA, 25 bp, Homo sapien
gcagtcctgcgtcagactacatgtt

SEQ ID NO: 4203910 - DNA, 25 bp, Homo sapien
tcagatgaggaattttccgcagtcc

SEQ ID NO: 4203911 - DNA, 25 bp, Homo sapien
gggaggcttccatcaccatccagat

SEQ ID NO: 4203912 - DNA, 25 bp, Homo sapien
gatgactcctcaactgttctcacaa

SEQ ID NO: 4203913 - DNA, 25 bp, Homo sapien
ggatgactcctcaactgttctcaca

SEQ ID NO: 4203914 - DNA, 25 bp, Homo sapien
aaggatgactcctcaactgttctca

SEQ ID NO: 4203915 - DNA, 25 bp, Homo sapien
tgactcctcaactgttctcacaatt

SEQ ID NO: 4203916 - DNA, 25 bp, Homo sapien
gataaactttactcatgccatagga

SEQ ID NO: 4203917 - DNA, 25 bp, Homo sapien
tcttagcagtcattggacaccaacc

SEQ ID NO: 4203918 - DNA, 25 bp, Homo sapien
gatgatttaaccgtgagtcaccggc

SEQ ID NO: 4203919 - DNA, 25 bp, Homo sapien
caccggcagccaaagcgtgagtaaa

SEQ ID NO: 4203920 - DNA, 25 bp, Homo sapien
tgcagtcaaagaggcagtcccttcc

SEQ ID NO: 4203921 - DNA, 25 bp, Homo sapien
tgtttttgaacctcgccctcacaga

SEQ ID NO: 4203922 - DNA, 25 bp, Homo sapien
tttaacctggcgagaaccgtcgatg

SEQ ID NO: 4203923 - DNA, 25 bp, Homo sapien
gacctttgttaccaagtgacacaga

SEQ ID NO: 4203924 - DNA, 25 bp, Homo sapien
tcaacctcagaagtagaagacctgg

SEQ ID NO: 4203925 - DNA, 25 bp, Homo sapien
gagagaagtttaccagtactccgag

SEQ ID NO: 4203926 - DNA, 25 bp, Homo sapien
caaagttcccttcgaagtgtgcata

SEQ ID NO: 4203927 - DNA, 25 bp, Homo sapien
taacgagactggctgttgcgactcc

SEQ ID NO: 4203928 - DNA, 25 bp, Homo sapien
tcacatagggtctgagtagctacca

SEQ ID NO: 4203929 - DNA, 25 bp, Homo sapien
gagaactgcacttgactgccgggaa

SEQ ID NO: 4203930 - DNA, 25 bp, Homo sapien
tccctgatgaaggaaggaccagaca

SEQ ID NO: 4203931 - DNA, 25 bp, Homo sapien
cagcagcccggtactcttatggttc

SEQ ID NO: 4203932 - DNA, 25 bp, Homo sapien
catagtgtggaaatagctgacttca

SEQ ID NO: 4203933 - DNA, 25 bp, Homo sapien
ccagggactggaacagacctcagtg

SEQ ID NO: 4203934 - DNA, 25 bp, Homo sapien
ttttctcaagatgaagtcccaggga

SEQ ID NO: 4203935 - DNA, 25 bp, Homo sapien
tgccaaggatgaccaaggataaaac

SEQ ID NO: 4203936 - DNA, 25 bp, Homo sapien
ggaagagaatctacaggacctactg

SEQ ID NO: 4203937 - DNA, 25 bp, Homo sapien
gcagtgggacttgaaataggtgaaa

SEQ ID NO: 4203938 - DNA, 25 bp, Homo sapien
ccctgagagtagttaggaagctatg

SEQ ID NO: 4203939 - DNA, 25 bp, Homo sapien
caacctggactagaatagtggcagt

SEQ ID NO: 4203940 - DNA, 25 bp, Homo sapien
gattagatccttcaccagcaataca

SEQ ID NO: 4203941 - DNA, 25 bp, Homo sapien
gactacgctacaaaagtcatggcca

SEQ ID NO: 4203942 - DNA, 25 bp, Homo sapien
caatacatttgggttacctgcgcat

SEQ ID NO: 4203943 - DNA, 25 bp, Homo sapien
gacgtctgaggaagctatatcataa

SEQ ID NO: 4203944 - DNA, 25 bp, Homo sapien
caaagttggtgctgataagaagcca

SEQ ID NO: 4203945 - DNA, 25 bp, Homo sapien
tcagatgattacttgggcctaccca

SEQ ID NO: 4203946 - DNA, 25 bp, Homo sapien
taagaagccagattgcctcatagaa

SEQ ID NO: 4203947 - DNA, 25 bp, Homo sapien
tgtctctaaaatccagccctaggtg

SEQ ID NO: 4203948 - DNA, 25 bp, Homo sapien
cctactgcaccatgaattctaccag

SEQ ID NO: 4203949 - DNA, 25 bp, Homo sapien
tactgcaccatgaattctaccagca

SEQ ID NO: 4203950 - DNA, 25 bp, Homo sapien
caccatgaattctaccagcaccagt

SEQ ID NO: 4203951 - DNA, 25 bp, Homo sapien
tgcaccatgaattctaccagcacca

SEQ ID NO: 4203952 - DNA, 25 bp, Homo sapien
aagattcctcatctaggttcttcat

SEQ ID NO: 4203953 - DNA, 25 bp, Homo sapien
ggctgcaacagctgtatactttcca

SEQ ID NO: 4203954 - DNA, 25 bp, Homo sapien
ggtcctgcttcacgtggctgcaaca

SEQ ID NO: 4203955 - DNA, 25 bp, Homo sapien
aaacatttgatggatgacagaggga

SEQ ID NO: 4203956 - DNA, 25 bp, Homo sapien
gatggtcctgcttcacgtggctgca

SEQ ID NO: 4203957 - DNA, 25 bp, Homo sapien
caatctccataacgagcaggactct

SEQ ID NO: 4203958 - DNA, 25 bp, Homo sapien
cacaatctccataacgagcaggact

SEQ ID NO: 4203959 - DNA, 25 bp, Homo sapien
atttcacaatctccataacgagcag

SEQ ID NO: 4203960 - DNA, 25 bp, Homo sapien
tctccataacgagcaggactctgca

SEQ ID NO: 4203961 - DNA, 25 bp, Homo sapien
agtgtctggattactgcctggatcc

SEQ ID NO: 4203962 - DNA, 25 bp, Homo sapien
gctgccttgatcactgatatgatgg

SEQ ID NO: 4203963 - DNA, 25 bp, Homo sapien
ttcttgaaccactgtaacaaagcca

SEQ ID NO: 4203964 - DNA, 25 bp, Homo sapien
tatattattggagccagcaacgtgc

SEQ ID NO: 4203965 - DNA, 25 bp, Homo sapien
tccatatgatggtgtggctgagact

SEQ ID NO: 4203966 - DNA, 25 bp, Homo sapien
ctccatatgatggtgtggctgagac

SEQ ID NO: 4203967 - DNA, 25 bp, Homo sapien
aggaaacttaaaatcgggcagaatg

SEQ ID NO: 4203968 - DNA, 25 bp, Homo sapien
cgggcagaatgggaaacaggcactt

SEQ ID NO: 4203969 - DNA, 25 bp, Homo sapien
aatcgggcagaatgggaaacaggca

SEQ ID NO: 4203970 - DNA, 25 bp, Homo sapien
ttaaaatcgggcagaatgggaaaca

SEQ ID NO: 4203971 - DNA, 25 bp, Homo sapien
gacaccaaagtttaatctaagttca

SEQ ID NO: 4203972 - DNA, 25 bp, Homo sapien
aatagttttgtagaactcttgttgt

SEQ ID NO: 4203973 - DNA, 25 bp, Homo sapien
caccaaagtttaatctaagttcagt

SEQ ID NO: 4203974 - DNA, 25 bp, Homo sapien
aagaaatagttttgtagaactcttg

SEQ ID NO: 4203975 - DNA, 25 bp, Homo sapien
tgcattgtggaaggcccattttcct

SEQ ID NO: 4203976 - DNA, 25 bp, Homo sapien
agagaacccagttctctgactgcat

SEQ ID NO: 4203977 - DNA, 25 bp, Homo sapien
gcattgtggaaggcccattttcctc

SEQ ID NO: 4203978 - DNA, 25 bp, Homo sapien
tgatattgtagacgcccttgagggt

SEQ ID NO: 4203979 - DNA, 25 bp, Homo sapien
gctctatgagagttgtggtgatatt

SEQ ID NO: 4203980 - DNA, 25 bp, Homo sapien
gcccttgagggtctccctgctacaa

SEQ ID NO: 4203981 - DNA, 25 bp, Homo sapien
caggcagctctatgagagttgtggt

SEQ ID NO: 4203982 - DNA, 25 bp, Homo sapien
attagtcccctgacccagaacttgg

SEQ ID NO: 4203983 - DNA, 25 bp, Homo sapien
aacagcattagtcccctgacccaga

SEQ ID NO: 4203984 - DNA, 25 bp, Homo sapien
tgacaacagcattagtcccctgacc

SEQ ID NO: 4203985 - DNA, 25 bp, Homo sapien
ttggtgacaacagcattagtcccct

SEQ ID NO: 4203986 - DNA, 25 bp, Homo sapien
ccaagttgtcatcaagacggatcaa

SEQ ID NO: 4203987 - DNA, 25 bp, Homo sapien
cagaatggttggctttttgcccatt

SEQ ID NO: 4203988 - DNA, 25 bp, Homo sapien
catcttgagtacgaagagacaaagg

SEQ ID NO: 4203989 - DNA, 25 bp, Homo sapien
aaatggaggctatagaggctgtgac

SEQ ID NO: 4203990 - DNA, 25 bp, Homo sapien
tggcagaatctgtatagtaaacaaa

SEQ ID NO: 4203991 - DNA, 25 bp, Homo sapien
gatgaactaaatgtaacagggtcaa

SEQ ID NO: 4203992 - DNA, 25 bp, Homo sapien
tacctactgtttgctaaatctaaag

SEQ ID NO: 4203993 - DNA, 25 bp, Homo sapien
cccctctctactggatatatctaag

SEQ ID NO: 4203994 - DNA, 25 bp, Homo sapien
tacaataattgattatgttactact

SEQ ID NO: 4203995 - DNA, 25 bp, Homo sapien
atacaataattgattatgttactac

SEQ ID NO: 4203996 - DNA, 25 bp, Homo sapien
taatctcctacgagcagtcacacag

SEQ ID NO: 4203997 - DNA, 25 bp, Homo sapien
tatacggagacctctgctaagcagg

SEQ ID NO: 4203998 - DNA, 25 bp, Homo sapien
cagtagatacccaaacagtgcttag

SEQ ID NO: 4203999 - DNA, 25 bp, Homo sapien
gagtgagatccctactatacggaga

SEQ ID NO: 4204000 - DNA, 25 bp, Homo sapien
gagcgcgagcttccgagttggcgga

SEQ ID NO: 4204001 - DNA, 25 bp, Homo sapien
gcggcgcggcgtccgcactgagcat

SEQ ID NO: 4204002 - DNA, 25 bp, Homo sapien
agcttccgagttggcggacggcggc

SEQ ID NO: 4204003 - DNA, 25 bp, Homo sapien
gcccgggagcgcgagcttccgagtt

SEQ ID NO: 4204004 - DNA, 25 bp, Homo sapien
ggaacgccgcgaagtttgccactgt

SEQ ID NO: 4204005 - DNA, 25 bp, Homo sapien
gttggtccgcggctagcgggctggg

SEQ ID NO: 4204006 - DNA, 25 bp, Homo sapien
cagcctccatcattcgggttgggat

SEQ ID NO: 4204007 - DNA, 25 bp, Homo sapien
tatttgtgcggtatctgcctcgccc

SEQ ID NO: 4204008 - DNA, 25 bp, Homo sapien
taaagcaggttggatgctgccgctg

SEQ ID NO: 4204009 - DNA, 25 bp, Homo sapien
gctggtggctgaagtgctcgcccaa

SEQ ID NO: 4204010 - DNA, 25 bp, Homo sapien
cagctgatgggaacgtgtgactttt

SEQ ID NO: 4204011 - DNA, 25 bp, Homo sapien
aaaacttttcttggcgcctaggctg

SEQ ID NO: 4204012 - DNA, 25 bp, Homo sapien
tgttaaccggcgaaatgaatgagag

SEQ ID NO: 4204013 - DNA, 25 bp, Homo sapien
ggagctggagcagccgcctctgagc

SEQ ID NO: 4204014 - DNA, 25 bp, Homo sapien
gatctctcatgttaaccggcgaaat

SEQ ID NO: 4204015 - DNA, 25 bp, Homo sapien
accggcgaaatgaatgagagttgga

SEQ ID NO: 4204016 - DNA, 25 bp, Homo sapien
ggcgcttcagcggtctctgctcata

SEQ ID NO: 4204017 - DNA, 25 bp, Homo sapien
ctcatagctgagaagcccgaaggcg

SEQ ID NO: 4204018 - DNA, 25 bp, Homo sapien
gtcctgtgggtagacgtcgggcggc

SEQ ID NO: 4204019 - DNA, 25 bp, Homo sapien
tgtgggtagacgtcgggcggcccga

SEQ ID NO: 4204020 - DNA, 25 bp, Homo sapien
cagtgtaggatgcactgcattccaa

SEQ ID NO: 4204021 - DNA, 25 bp, Homo sapien
gcaaaacgcaagacctcagtgtagg

SEQ ID NO: 4204022 - DNA, 25 bp, Homo sapien
acatggaaagcgagcgccccagtgg

SEQ ID NO: 4204023 - DNA, 25 bp, Homo sapien
tttacgacgatttaccgaagcggca

SEQ ID NO: 4204024 - DNA, 25 bp, Homo sapien
catattgtacccaaatttggctaca

SEQ ID NO: 4204025 - DNA, 25 bp, Homo sapien
caagcacctgttccatattgtaccc

SEQ ID NO: 4204026 - DNA, 25 bp, Homo sapien
cagccacacataactctgtctgctt

SEQ ID NO: 4204027 - DNA, 25 bp, Homo sapien
cacataactctgtctgcttgggaga

SEQ ID NO: 4204028 - DNA, 25 bp, Homo sapien
ctaatggacaagatgccactgctct

SEQ ID NO: 4204029 - DNA, 25 bp, Homo sapien
tgctctttgtctcttgccatatatt

SEQ ID NO: 4204030 - DNA, 25 bp, Homo sapien
tcttgccatatattcctcatgaagc

SEQ ID NO: 4204031 - DNA, 25 bp, Homo sapien
tcctcatgaagccaaagagcaggag

SEQ ID NO: 4204032 - DNA, 25 bp, Homo sapien
accagagccacatttgcatcaaagc

SEQ ID NO: 4204033 - DNA, 25 bp, Homo sapien
tgccccaacccttctaacaccagag

SEQ ID NO: 4204034 - DNA, 25 bp, Homo sapien
catatgaaagtcagctctttacatc

SEQ ID NO: 4204035 - DNA, 25 bp, Homo sapien
tttacatccaccgtcacctatactg

SEQ ID NO: 4204036 - DNA, 25 bp, Homo sapien
tacttcgggtaacctccaactgcat

SEQ ID NO: 4204037 - DNA, 25 bp, Homo sapien
agcggcccagagtagcagtgcacca

SEQ ID NO: 4204038 - DNA, 25 bp, Homo sapien
caagcggcccagagtagcagtgcac

SEQ ID NO: 4204039 - DNA, 25 bp, Homo sapien
ggcccagagtagcagtgcaccaaac

SEQ ID NO: 4204040 - DNA, 25 bp, Homo sapien
cccagagtagcagtgcaccaaacca

SEQ ID NO: 4204041 - DNA, 25 bp, Homo sapien
ttctggctgagccatgttcatctcc

SEQ ID NO: 4204042 - DNA, 25 bp, Homo sapien
tgaaggctggctgattattgaagcc

SEQ ID NO: 4204043 - DNA, 25 bp, Homo sapien
cttgctttacattcacagcagtaag

SEQ ID NO: 4204044 - DNA, 25 bp, Homo sapien
ctttgatgggttaattacaatattt

SEQ ID NO: 4204045 - DNA, 25 bp, Homo sapien
ttaatgatagcaatggaacacagtg

SEQ ID NO: 4204046 - DNA, 25 bp, Homo sapien
taattcctgctaacaagcccttgta

SEQ ID NO: 4204047 - DNA, 25 bp, Homo sapien
gaacacagtgactgcatgtttatgt

SEQ ID NO: 4204048 - DNA, 25 bp, Homo sapien
aatgaaaaaagtagtctgagcaatc

SEQ ID NO: 4204049 - DNA, 25 bp, Homo sapien
cgagcagtaaccagccaataattat

SEQ ID NO: 4204050 - DNA, 25 bp, Homo sapien
ctggaaagtgttaagcttcagtttc

SEQ ID NO: 4204051 - DNA, 25 bp, Homo sapien
tatgaattgcactctgggatcgagc

SEQ ID NO: 4204052 - DNA, 25 bp, Homo sapien
tctttagcattaacttgtggtttct

SEQ ID NO: 4204053 - DNA, 25 bp, Homo sapien
ctgaggaacacctgacttggccaga

SEQ ID NO: 4204054 - DNA, 25 bp, Homo sapien
gaacacctgacttggccagaggcag

SEQ ID NO: 4204055 - DNA, 25 bp, Homo sapien
ggaacacctgacttggccagaggca

SEQ ID NO: 4204056 - DNA, 25 bp, Homo sapien
gaggaacacctgacttggccagagg

SEQ ID NO: 4204057 - DNA, 25 bp, Homo sapien
tctctgtggataaacgccttggcgc

SEQ ID NO: 4204058 - DNA, 25 bp, Homo sapien
aaggtcctttacaagcctctctgtg

SEQ ID NO: 4204059 - DNA, 25 bp, Homo sapien
ccttggcgcgctgtgaagcttcaca

SEQ ID NO: 4204060 - DNA, 25 bp, Homo sapien
gaagaatatccctagatgccagaag

SEQ ID NO: 4204061 - DNA, 25 bp, Homo sapien
ccaaattcggatcaggagcctgacg

SEQ ID NO: 4204062 - DNA, 25 bp, Homo sapien
gaataataggcacaagtcatcttga

SEQ ID NO: 4204063 - DNA, 25 bp, Homo sapien
tcttgatcagccacgttgctcgaac

SEQ ID NO: 4204064 - DNA, 25 bp, Homo sapien
gctcgaaccattggcacagaatatt

SEQ ID NO: 4204065 - DNA, 25 bp, Homo sapien
caagaagattggctaaaaccctgcc

SEQ ID NO: 4204066 - DNA, 25 bp, Homo sapien
cataagggtggcgtaatttctgccc

SEQ ID NO: 4204067 - DNA, 25 bp, Homo sapien
cgctggcgtcgctgagttacacaat

SEQ ID NO: 4204068 - DNA, 25 bp, Homo sapien
ttttcttaggaagcgcgtctgggca

SEQ ID NO: 4204069 - DNA, 25 bp, Homo sapien
tcagcacctccccactggtaactga

SEQ ID NO: 4204070 - DNA, 25 bp, Homo sapien
agcacctccccactggtaactgatg

SEQ ID NO: 4204071 - DNA, 25 bp, Homo sapien
ctgatgctcaagctgaagttaaatc

SEQ ID NO: 4204072 - DNA, 25 bp, Homo sapien
tggtaactgatgctcaagctgaagt

SEQ ID NO: 4204073 - DNA, 25 bp, Homo sapien
aggcagtgggaggaagcgcccaatc

SEQ ID NO: 4204074 - DNA, 25 bp, Homo sapien
gaggcagtgggaggaagcgcccaat

SEQ ID NO: 4204075 - DNA, 25 bp, Homo sapien
gcagtgggaggaagcgcccaatcat

SEQ ID NO: 4204076 - DNA, 25 bp, Homo sapien
cagaggcagtgggaggaagcgccca

SEQ ID NO: 4204077 - DNA, 25 bp, Homo sapien
gcaaaagaaaaacggaggacaagca

SEQ ID NO: 4204078 - DNA, 25 bp, Homo sapien
aacggaggacaagcactggtgaaag

SEQ ID NO: 4204079 - DNA, 25 bp, Homo sapien
ggtgaaagatacttgctgctagccc

SEQ ID NO: 4204080 - DNA, 25 bp, Homo sapien
cactggtgaaagatacttgctgcta

SEQ ID NO: 4204081 - DNA, 25 bp, Homo sapien
ctctggccaggtcttgggggacaat

SEQ ID NO: 4204082 - DNA, 25 bp, Homo sapien
actcctctggccaggtcttggggga

SEQ ID NO: 4204083 - DNA, 25 bp, Homo sapien
tcctctggccaggtcttgggggaca

SEQ ID NO: 4204084 - DNA, 25 bp, Homo sapien
ctctgtgcactcctctggccaggtc

SEQ ID NO: 4204085 - DNA, 25 bp, Homo sapien
gtttacatgatgcaggtatgtcggg

SEQ ID NO: 4204086 - DNA, 25 bp, Homo sapien
tgaaagtagcatctctccaaccaag

SEQ ID NO: 4204087 - DNA, 25 bp, Homo sapien
gtaaggacaaccgctgcaggtaggt

SEQ ID NO: 4204088 - DNA, 25 bp, Homo sapien
aataggtcactgagggaaactgaca

SEQ ID NO: 4204089 - DNA, 25 bp, Homo sapien
caactgctctcgaagatatctggta

SEQ ID NO: 4204090 - DNA, 25 bp, Homo sapien
tgctctcgaagatatctggtagata

SEQ ID NO: 4204091 - DNA, 25 bp, Homo sapien
tatctggtagatatctgtgtccact

SEQ ID NO: 4204092 - DNA, 25 bp, Homo sapien
ttggccaactgctctcgaagatatc

SEQ ID NO: 4204093 - DNA, 25 bp, Homo sapien
ggccatcgcccgtgctggaggccat

SEQ ID NO: 4204094 - DNA, 25 bp, Homo sapien
aaatgctagcttttcgttgtattcc

SEQ ID NO: 4204095 - DNA, 25 bp, Homo sapien
ttttcgttgtattcccattgcttca

SEQ ID NO: 4204096 - DNA, 25 bp, Homo sapien
tgctccacctctggtggcacaggga

SEQ ID NO: 4204097 - DNA, 25 bp, Homo sapien
tccatgtcaaatattcgtgtttttc

SEQ ID NO: 4204098 - DNA, 25 bp, Homo sapien
gtcaaatattcgtgtttttctaaca

SEQ ID NO: 4204099 - DNA, 25 bp, Homo sapien
tgtcaaatattcgtgtttttctaac

SEQ ID NO: 4204100 - DNA, 25 bp, Homo sapien
aggatccatgtcaaatattcgtgtt

SEQ ID NO: 4204101 - DNA, 25 bp, Homo sapien
gcagcattagtggtagcaagagttt

SEQ ID NO: 4204102 - DNA, 25 bp, Homo sapien
gcaagagtttaagaagatcatcatc

SEQ ID NO: 4204103 - DNA, 25 bp, Homo sapien
gtttaagaagatcatcatccattgg

SEQ ID NO: 4204104 - DNA, 25 bp, Homo sapien
gaagatcatcatccattggtctgat

SEQ ID NO: 4204105 - DNA, 25 bp, Homo sapien
tagaaggacaccagacttcagtcat

SEQ ID NO: 4204106 - DNA, 25 bp, Homo sapien
ctgagaagtagaaggacaccagact

SEQ ID NO: 4204107 - DNA, 25 bp, Homo sapien
gagaagtagaaggacaccagacttc

SEQ ID NO: 4204108 - DNA, 25 bp, Homo sapien
gaagtagaaggacaccagacttcag

SEQ ID NO: 4204109 - DNA, 25 bp, Homo sapien
ccgatactcgagttgtttggtccta

SEQ ID NO: 4204110 - DNA, 25 bp, Homo sapien
caaaagtaggcaagacgacgagaca

SEQ ID NO: 4204111 - DNA, 25 bp, Homo sapien
taggccgactgaacaaactcatctg

SEQ ID NO: 4204112 - DNA, 25 bp, Homo sapien
atacaactaagtccataaaccaggg

SEQ ID NO: 4204113 - DNA, 25 bp, Homo sapien
ctgggtttgcgctcttattttcatt

SEQ ID NO: 4204114 - DNA, 25 bp, Homo sapien
aagccgtgttcccacccggcatggg

SEQ ID NO: 4204115 - DNA, 25 bp, Homo sapien
caccaaggcacttgggcaacagaga

SEQ ID NO: 4204116 - DNA, 25 bp, Homo sapien
tgctgattgaaagccgtgttcccac

SEQ ID NO: 4204117 - DNA, 25 bp, Homo sapien
gcacttgtcaaatgaccaccgaact

SEQ ID NO: 4204118 - DNA, 25 bp, Homo sapien
aaatgaccaccgaacttccactgca

SEQ ID NO: 4204119 - DNA, 25 bp, Homo sapien
cttggcacttgtcaaatgaccaccg

SEQ ID NO: 4204120 - DNA, 25 bp, Homo sapien
ttgtcaaatgaccaccgaacttcca

SEQ ID NO: 4204121 - DNA, 25 bp, Homo sapien
tgtgcaaaacccgactaatagtcac

SEQ ID NO: 4204122 - DNA, 25 bp, Homo sapien
aatcagttcggtcaaaacagtgacg

SEQ ID NO: 4204123 - DNA, 25 bp, Homo sapien
ccatggaattgctggaatcagttcg

SEQ ID NO: 4204124 - DNA, 25 bp, Homo sapien
gatccaaaacttccaacgtgtgcaa

SEQ ID NO: 4204125 - DNA, 25 bp, Homo sapien
ctccagtgcgttccttacccccgag

SEQ ID NO: 4204126 - DNA, 25 bp, Homo sapien
gagcagccccttatctgccctaaaa

SEQ ID NO: 4204127 - DNA, 25 bp, Homo sapien
cttacccccgagtttcacagagcag

SEQ ID NO: 4204128 - DNA, 25 bp, Homo sapien
acctcgggcctcagtgttggcagcc

SEQ ID NO: 4204129 - DNA, 25 bp, Homo sapien
ctgtgcttgccagaccgtttgcagc

SEQ ID NO: 4204130 - DNA, 25 bp, Homo sapien
tcacataacagcgtcaccacagctt

SEQ ID NO: 4204131 - DNA, 25 bp, Homo sapien
agctcacggcccattcacataacag

SEQ ID NO: 4204132 - DNA, 25 bp, Homo sapien
accacagcttcatcgttgggcgcaa

SEQ ID NO: 4204133 - DNA, 25 bp, Homo sapien
caaactggatccagcaagagaggat

SEQ ID NO: 4204134 - DNA, 25 bp, Homo sapien
gcaaactggatccagcaagagagga

SEQ ID NO: 4204135 - DNA, 25 bp, Homo sapien
ctccttctcatctaagacttctgat

SEQ ID NO: 4204136 - DNA, 25 bp, Homo sapien
aaactggatccagcaagagaggatg

SEQ ID NO: 4204137 - DNA, 25 bp, Homo sapien
cggatgaactcgcagaagagcagca

SEQ ID NO: 4204138 - DNA, 25 bp, Homo sapien
tgtatgcgtcatgggagaagacatc

SEQ ID NO: 4204139 - DNA, 25 bp, Homo sapien
gcattttcccctactggtgaccgcg

SEQ ID NO: 4204140 - DNA, 25 bp, Homo sapien
tctcctcgagatatgagggtacaca

SEQ ID NO: 4204141 - DNA, 25 bp, Homo sapien
caatgcccatatgcgccataatact

SEQ ID NO: 4204142 - DNA, 25 bp, Homo sapien
gagtcaatgcccatatgcgccataa

SEQ ID NO: 4204143 - DNA, 25 bp, Homo sapien
tcctgagtcaatgcccatatgcgcc

SEQ ID NO: 4204144 - DNA, 25 bp, Homo sapien
ccatatgcgccataatactctgttc

SEQ ID NO: 4204145 - DNA, 25 bp, Homo sapien
tcaataagaatcaaagattgaacct

SEQ ID NO: 4204146 - DNA, 25 bp, Homo sapien
aataagaatcaaagattgaacctac

SEQ ID NO: 4204147 - DNA, 25 bp, Homo sapien
caataagaatcaaagattgaaccta

SEQ ID NO: 4204148 - DNA, 25 bp, Homo sapien
tctcacaggattctccaggcatagg

SEQ ID NO: 4204149 - DNA, 25 bp, Homo sapien
ttcaccaacttctcacaattaactg

SEQ ID NO: 4204150 - DNA, 25 bp, Homo sapien
tcttctgcccaacgaagtgttggca

SEQ ID NO: 4204151 - DNA, 25 bp, Homo sapien
catactgtaagtggcgaaggaggtc

SEQ ID NO: 4204152 - DNA, 25 bp, Homo sapien
cacctgctatcattattagtcaaga

SEQ ID NO: 4204153 - DNA, 25 bp, Homo sapien
tcactacaaattcggacaacctcag

SEQ ID NO: 4204154 - DNA, 25 bp, Homo sapien
gacatcacctgcagtgactcaaatg

SEQ ID NO: 4204155 - DNA, 25 bp, Homo sapien
taatctgacgttcaacagttattga

SEQ ID NO: 4204156 - DNA, 25 bp, Homo sapien
agtgcacataaaagctactcagcaa

SEQ ID NO: 4204157 - DNA, 25 bp, Homo sapien
tacagtgcacataaaagctactcag

SEQ ID NO: 4204158 - DNA, 25 bp, Homo sapien
ccataatacagtgcacataaaagct

SEQ ID NO: 4204159 - DNA, 25 bp, Homo sapien
agtacctaccataatacagtgcaca

SEQ ID NO: 4204160 - DNA, 25 bp, Homo sapien
caagcctctatgaagtcttacccaa

SEQ ID NO: 4204161 - DNA, 25 bp, Homo sapien
aatctgagcctatcttgtacaagcc

SEQ ID NO: 4204162 - DNA, 25 bp, Homo sapien
tattgcatgtatttgagggcttgcc

SEQ ID NO: 4204163 - DNA, 25 bp, Homo sapien
taaattcaaccagtccaaatctgag

SEQ ID NO: 4204164 - DNA, 25 bp, Homo sapien
gaaagtcatttcaggagatattcca

SEQ ID NO: 4204165 - DNA, 25 bp, Homo sapien
ttttgctgataaaaactcctagaag

SEQ ID NO: 4204166 - DNA, 25 bp, Homo sapien
tcctagaagatacccagaaagtaac

SEQ ID NO: 4204167 - DNA, 25 bp, Homo sapien
ataaataacttaacagaatactttg

SEQ ID NO: 4204168 - DNA, 25 bp, Homo sapien
aagttttgaaatggccctggacata

SEQ ID NO: 4204169 - DNA, 25 bp, Homo sapien
gaaatggccctggacatagaaaaat

SEQ ID NO: 4204170 - DNA, 25 bp, Homo sapien
gttttgaaatggccctggacataga

SEQ ID NO: 4204171 - DNA, 25 bp, Homo sapien
tttgaaatggccctggacatagaaa

SEQ ID NO: 4204172 - DNA, 25 bp, Homo sapien
aatataaggctactctttctgctcc

SEQ ID NO: 4204173 - DNA, 25 bp, Homo sapien
ggcaagttttgacatatccctggac

SEQ ID NO: 4204174 - DNA, 25 bp, Homo sapien
caggcagtgatagataagaacaaac

SEQ ID NO: 4204175 - DNA, 25 bp, Homo sapien
gctcccctaaataaactgtgagatt

SEQ ID NO: 4204176 - DNA, 25 bp, Homo sapien
cactggtaagtaactgtctggtaaa

SEQ ID NO: 4204177 - DNA, 25 bp, Homo sapien
gttgttgctgcactacttctgagta

SEQ ID NO: 4204178 - DNA, 25 bp, Homo sapien
tattttctaagcaatgggcactcta

SEQ ID NO: 4204179 - DNA, 25 bp, Homo sapien
gatttgtttctcactgcaatttaga

SEQ ID NO: 4204180 - DNA, 25 bp, Homo sapien
tccctggcagctgaacgtgtttgtg

SEQ ID NO: 4204181 - DNA, 25 bp, Homo sapien
tactcagcaaatgtcttggaggcca

SEQ ID NO: 4204182 - DNA, 25 bp, Homo sapien
catccagtcagtgagttacagcaaa

SEQ ID NO: 4204183 - DNA, 25 bp, Homo sapien
taagtgccctatgagtgaccagttc

SEQ ID NO: 4204184 - DNA, 25 bp, Homo sapien
tgaaaaggtacccataatcccatac

SEQ ID NO: 4204185 - DNA, 25 bp, Homo sapien
tctcagaatgcttaaagtacttttt

SEQ ID NO: 4204186 - DNA, 25 bp, Homo sapien
cttaacagaacatctcaatctggac

SEQ ID NO: 4204187 - DNA, 25 bp, Homo sapien
aagctcaatattgaaaaggtaccca

SEQ ID NO: 4204188 - DNA, 25 bp, Homo sapien
gagtacaaacccatcatgcccagag

SEQ ID NO: 4204189 - DNA, 25 bp, Homo sapien
tctataggaagtccatagactggca

SEQ ID NO: 4204190 - DNA, 25 bp, Homo sapien
tattcttgtgtaggaagcagcacac

SEQ ID NO: 4204191 - DNA, 25 bp, Homo sapien
cataaggagaaaggcgatagaagac

SEQ ID NO: 4204192 - DNA, 25 bp, Homo sapien
gaagtaactatcaatgagcagggct

SEQ ID NO: 4204193 - DNA, 25 bp, Homo sapien
cagtgaatcaactgagaagtgggca

SEQ ID NO: 4204194 - DNA, 25 bp, Homo sapien
tctttaatggactggcatgagctgg

SEQ ID NO: 4204195 - DNA, 25 bp, Homo sapien
gttaatcatcatccagaagtcctgt

SEQ ID NO: 4204196 - DNA, 25 bp, Homo sapien
gcttcctccttcaatgatgacccca

SEQ ID NO: 4204197 - DNA, 25 bp, Homo sapien
tgtgttcctgtgcttcctccttcaa

SEQ ID NO: 4204198 - DNA, 25 bp, Homo sapien
tcctgtgcttcctccttcaatgatg

SEQ ID NO: 4204199 - DNA, 25 bp, Homo sapien
gtgcttcctccttcaatgatgaccc

SEQ ID NO: 4204200 - DNA, 25 bp, Homo sapien
acatgcagcagatctgggtttctcc

SEQ ID NO: 4204201 - DNA, 25 bp, Homo sapien
ccacatgcagcagatctgggtttct

SEQ ID NO: 4204202 - DNA, 25 bp, Homo sapien
ccaaaccacatgcagcagatctggg

SEQ ID NO: 4204203 - DNA, 25 bp, Homo sapien
aaaccacatgcagcagatctgggtt

SEQ ID NO: 4204204 - DNA, 25 bp, Homo sapien
ggtaaagtcgatgggtcacagcagc

SEQ ID NO: 4204205 - DNA, 25 bp, Homo sapien
cagcaggagttaggatcaagtgacc

SEQ ID NO: 4204206 - DNA, 25 bp, Homo sapien
tgagctcacatctcctgccagagaa

SEQ ID NO: 4204207 - DNA, 25 bp, Homo sapien
gatcaagtgacctgatcttgagctc

SEQ ID NO: 4204208 - DNA, 25 bp, Homo sapien
ggccccagggaataggaccacatat

SEQ ID NO: 4204209 - DNA, 25 bp, Homo sapien
ccatctcagtgaggcgaaaagaggt

SEQ ID NO: 4204210 - DNA, 25 bp, Homo sapien
taatggtctaacagccccatgatct

SEQ ID NO: 4204211 - DNA, 25 bp, Homo sapien
cagcaaaggataaccactaatggtc

SEQ ID NO: 4204212 - DNA, 25 bp, Homo sapien
aactaatacagttgctccattgttg

SEQ ID NO: 4204213 - DNA, 25 bp, Homo sapien
caagctgcataaaagtgcatctttc

SEQ ID NO: 4204214 - DNA, 25 bp, Homo sapien
gtgcatctttcacccttaagtccta

SEQ ID NO: 4204215 - DNA, 25 bp, Homo sapien
cctactaagtttgcaactaatacag

SEQ ID NO: 4204216 - DNA, 25 bp, Homo sapien
tcctgacagttatggagcctggaat

SEQ ID NO: 4204217 - DNA, 25 bp, Homo sapien
gagaaagacatcaggattacttcct

SEQ ID NO: 4204218 - DNA, 25 bp, Homo sapien
cctgtttgattcacacatctggtgg

SEQ ID NO: 4204219 - DNA, 25 bp, Homo sapien
catctggtgggtagataaacaacct

SEQ ID NO: 4204220 - DNA, 25 bp, Homo sapien
ttggttattgccacaatttcagatg

SEQ ID NO: 4204221 - DNA, 25 bp, Homo sapien
ccacaatttcagatgctgttattgg

SEQ ID NO: 4204222 - DNA, 25 bp, Homo sapien
ctttttggttgctaagctattggtt

SEQ ID NO: 4204223 - DNA, 25 bp, Homo sapien
ctctttttggttgctaagctattgg

SEQ ID NO: 4204224 - DNA, 25 bp, Homo sapien
ccacagagtaaagcacagatgagaa

SEQ ID NO: 4204225 - DNA, 25 bp, Homo sapien
cacagatgagaatatctcctattac

SEQ ID NO: 4204226 - DNA, 25 bp, Homo sapien
gaccacagagtaaagcacagatgag

SEQ ID NO: 4204227 - DNA, 25 bp, Homo sapien
tgagaccacagagtaaagcacagat

SEQ ID NO: 4204228 - DNA, 25 bp, Homo sapien
tcttaccctccacaattccaggtag

SEQ ID NO: 4204229 - DNA, 25 bp, Homo sapien
caattccaggtaggctacacttgac

SEQ ID NO: 4204230 - DNA, 25 bp, Homo sapien
caggaattacctagcaagccatggc

SEQ ID NO: 4204231 - DNA, 25 bp, Homo sapien
cagttcaatcctgcaaatattatca

SEQ ID NO: 4204232 - DNA, 25 bp, Homo sapien
gcagtttcacgtgctgatgacaaag

SEQ ID NO: 4204233 - DNA, 25 bp, Homo sapien
aatcactaaagggtgctgggccatc

SEQ ID NO: 4204234 - DNA, 25 bp, Homo sapien
caaaggactggaagatagctgaagg

SEQ ID NO: 4204235 - DNA, 25 bp, Homo sapien
aaggtgaggctgattagccaaatca

SEQ ID NO: 4204236 - DNA, 25 bp, Homo sapien
taacagaaatcagatgagccttcct

SEQ ID NO: 4204237 - DNA, 25 bp, Homo sapien
cattagcataaagttgccgtaacaa

SEQ ID NO: 4204238 - DNA, 25 bp, Homo sapien
cgttgtgctgcaaacaaaagcacta

SEQ ID NO: 4204239 - DNA, 25 bp, Homo sapien
taaagttgccgtaacaacgttgtgc

SEQ ID NO: 4204240 - DNA, 25 bp, Homo sapien
caagatgaggcccatgactctggca

SEQ ID NO: 4204241 - DNA, 25 bp, Homo sapien
tggtaataaccaggctctagcggct

SEQ ID NO: 4204242 - DNA, 25 bp, Homo sapien
taggcacagagtacgcttcaatcga

SEQ ID NO: 4204243 - DNA, 25 bp, Homo sapien
tgagagtcgcaccttagagatacgg

SEQ ID NO: 4204244 - DNA, 25 bp, Homo sapien
tcaacaaccagtggaatcctttcgg

SEQ ID NO: 4204245 - DNA, 25 bp, Homo sapien
tctttctcaacaaccagtggaatcc

SEQ ID NO: 4204246 - DNA, 25 bp, Homo sapien
gtcaacatctttctcaacaaccagt

SEQ ID NO: 4204247 - DNA, 25 bp, Homo sapien
aaccagtggaatcctttcggcagcc

SEQ ID NO: 4204248 - DNA, 25 bp, Homo sapien
tctacataatgtcaggtgcggctta

SEQ ID NO: 4204249 - DNA, 25 bp, Homo sapien
ccttaaacttgctgaggccatgctc

SEQ ID NO: 4204250 - DNA, 25 bp, Homo sapien
actattctagtcaggccaccaagga

SEQ ID NO: 4204251 - DNA, 25 bp, Homo sapien
cacatcgtggcaggatgacaagcag

SEQ ID NO: 4204252 - DNA, 25 bp, Homo sapien
attcaggcaacaggagcgacgggcc

SEQ ID NO: 4204253 - DNA, 25 bp, Homo sapien
gatgtacagcataaccttcacgaag

SEQ ID NO: 4204254 - DNA, 25 bp, Homo sapien
tacagataacgagctgcacggccaa

SEQ ID NO: 4204255 - DNA, 25 bp, Homo sapien
tggttgcagacctcataatgacgct

SEQ ID NO: 4204256 - DNA, 25 bp, Homo sapien
taaccttaggctgacaactgtacat

SEQ ID NO: 4204257 - DNA, 25 bp, Homo sapien
gatgagacttccgtagataatgtgg

SEQ ID NO: 4204258 - DNA, 25 bp, Homo sapien
caataagactgactgtagactgcaa

SEQ ID NO: 4204259 - DNA, 25 bp, Homo sapien
ggaagcaacaccatcgtctgtgaaa

SEQ ID NO: 4204260 - DNA, 25 bp, Homo sapien
cacaaggcatattcgctattttaac

SEQ ID NO: 4204261 - DNA, 25 bp, Homo sapien
cagaggtgactctcaaacagaagga

SEQ ID NO: 4204262 - DNA, 25 bp, Homo sapien
catgcagtctaattctacacaaggc

SEQ ID NO: 4204263 - DNA, 25 bp, Homo sapien
aacaggtcagacttataacatgcag

SEQ ID NO: 4204264 - DNA, 25 bp, Homo sapien
actatcgatcgctaccagaagacca

SEQ ID NO: 4204265 - DNA, 25 bp, Homo sapien
tgattctgaccaacaggcagccgag

SEQ ID NO: 4204266 - DNA, 25 bp, Homo sapien
cattcctgggactgataactatcga

SEQ ID NO: 4204267 - DNA, 25 bp, Homo sapien
tgtgtgtcaagttacctccgtcata

SEQ ID NO: 4204268 - DNA, 25 bp, Homo sapien
agtcttaatagaagcacttgatgtg

SEQ ID NO: 4204269 - DNA, 25 bp, Homo sapien
ctgaagtcttaatagaagcacttga

SEQ ID NO: 4204270 - DNA, 25 bp, Homo sapien
gaagtcttaatagaagcacttgatg

SEQ ID NO: 4204271 - DNA, 25 bp, Homo sapien
tgaagtcttaatagaagcacttgat

SEQ ID NO: 4204272 - DNA, 25 bp, Homo sapien
tgaaaaacagaaaatgcattctgaa

SEQ ID NO: 4204273 - DNA, 25 bp, Homo sapien
aaaacagaaaatgcattctgaaact

SEQ ID NO: 4204274 - DNA, 25 bp, Homo sapien
aacagaaaatgcattctgaaactct

SEQ ID NO: 4204275 - DNA, 25 bp, Homo sapien
cagaaaatgcattctgaaactcttg

SEQ ID NO: 4204276 - DNA, 25 bp, Homo sapien
gcgctggttacattcatgacttgaa

SEQ ID NO: 4204277 - DNA, 25 bp, Homo sapien
tctgtggtgctcttcttatttagaa

SEQ ID NO: 4204278 - DNA, 25 bp, Homo sapien
ctttgccgactccatagagaaggat

SEQ ID NO: 4204279 - DNA, 25 bp, Homo sapien
tatctttggtaatcttcttcagctg

SEQ ID NO: 4204280 - DNA, 25 bp, Homo sapien
tttccatttaatagaagctctcgac

SEQ ID NO: 4204281 - DNA, 25 bp, Homo sapien
ttttccatttaatagaagctctcga

SEQ ID NO: 4204282 - DNA, 25 bp, Homo sapien
tattttccatttaatagaagctctc

SEQ ID NO: 4204283 - DNA, 25 bp, Homo sapien
tccatttaatagaagctctcgacat

SEQ ID NO: 4204284 - DNA, 25 bp, Homo sapien
ctacataaacataaagcagatccat

SEQ ID NO: 4204285 - DNA, 25 bp, Homo sapien
agtgttggaaatgtctcctgtttgt

SEQ ID NO: 4204286 - DNA, 25 bp, Homo sapien
tagtgaacacagtctccagtgttgg

SEQ ID NO: 4204287 - DNA, 25 bp, Homo sapien
gttggaaatgtctcctgtttgttct

SEQ ID NO: 4204288 - DNA, 25 bp, Homo sapien
ctgagatgtcacttgatgttgatca

SEQ ID NO: 4204289 - DNA, 25 bp, Homo sapien
tccgttgatgttcagtgctggctcc

SEQ ID NO: 4204290 - DNA, 25 bp, Homo sapien
gatgataggatgttcctgacgcaaa

SEQ ID NO: 4204291 - DNA, 25 bp, Homo sapien
caaagcttgtgatttgttctagcac

SEQ ID NO: 4204292 - DNA, 25 bp, Homo sapien
tgtattgcgaagtcaattagtccgt

SEQ ID NO: 4204293 - DNA, 25 bp, Homo sapien
tgttgtataacttcctgccaggctg

SEQ ID NO: 4204294 - DNA, 25 bp, Homo sapien
cctgagaacagccacgatgcagaca

SEQ ID NO: 4204295 - DNA, 25 bp, Homo sapien
tgggctgtctgatcaggattcaaga

SEQ ID NO: 4204296 - DNA, 25 bp, Homo sapien
tagacaactgtgatagcgcctgaga

SEQ ID NO: 4204297 - DNA, 25 bp, Homo sapien
gaagaggtctccaaatttacttctg

SEQ ID NO: 4204298 - DNA, 25 bp, Homo sapien
tttacttctgaggtggctacatgac

SEQ ID NO: 4204299 - DNA, 25 bp, Homo sapien
gggtttacgacatgcttgaccacac

SEQ ID NO: 4204300 - DNA, 25 bp, Homo sapien
catagaggtaggctaaaatgcatct

SEQ ID NO: 4204301 - DNA, 25 bp, Homo sapien
tcttgcccagcattgagtagttgat

SEQ ID NO: 4204302 - DNA, 25 bp, Homo sapien
gacaaagctgtagcgattggccgca

SEQ ID NO: 4204303 - DNA, 25 bp, Homo sapien
caagttcgaatttgcaggcatcacg

SEQ ID NO: 4204304 - DNA, 25 bp, Homo sapien
catgaagtctggatcccatcgcaag

SEQ ID NO: 4204305 - DNA, 25 bp, Homo sapien
ccccacacgtgatttgaagaacaac

SEQ ID NO: 4204306 - DNA, 25 bp, Homo sapien
aagaacaacaaagagccttcagaac

SEQ ID NO: 4204307 - DNA, 25 bp, Homo sapien
taagaacagtgcagcaagccgtaag

SEQ ID NO: 4204308 - DNA, 25 bp, Homo sapien
gtgcaaagtacatcattaaaccccc

SEQ ID NO: 4204309 - DNA, 25 bp, Homo sapien
aatgaatcatggaatgaaaggtcac

SEQ ID NO: 4204310 - DNA, 25 bp, Homo sapien
agggaagtgcgacatgctgcacgac

SEQ ID NO: 4204311 - DNA, 25 bp, Homo sapien
tatcagaatagcaatgaaagtagct

SEQ ID NO: 4204312 - DNA, 25 bp, Homo sapien
cagggaaaaacactgtcgtgctatc

SEQ ID NO: 4204313 - DNA, 25 bp, Homo sapien
gtcggcatgtcattctcgccccagg

SEQ ID NO: 4204314 - DNA, 25 bp, Homo sapien
gagatgaagcaagagtcggcatgtc

SEQ ID NO: 4204315 - DNA, 25 bp, Homo sapien
gcaagagtcggcatgtcattctcgc

SEQ ID NO: 4204316 - DNA, 25 bp, Homo sapien
gggagctcggaagagatgaagcaag

SEQ ID NO: 4204317 - DNA, 25 bp, Homo sapien
agcaaacacggctcccacttcaatg

SEQ ID NO: 4204318 - DNA, 25 bp, Homo sapien
cggctaagaggtgtctatcacaaga

SEQ ID NO: 4204319 - DNA, 25 bp, Homo sapien
tgagcagcggctaagaggtgtctat

SEQ ID NO: 4204320 - DNA, 25 bp, Homo sapien
ccacttcaatgctgttgtgagcagc

SEQ ID NO: 4204321 - DNA, 25 bp, Homo sapien
tgttgacagatagtcctcagtacat

SEQ ID NO: 4204322 - DNA, 25 bp, Homo sapien
tgtgaggcagtccagatatcatcag

SEQ ID NO: 4204323 - DNA, 25 bp, Homo sapien
cagtacatatctagcgtattctctt

SEQ ID NO: 4204324 - DNA, 25 bp, Homo sapien
cacatcgcaaacctctcatggtgaa

SEQ ID NO: 4204325 - DNA, 25 bp, Homo sapien
ggtacattctttaatgccatgagga

SEQ ID NO: 4204326 - DNA, 25 bp, Homo sapien
gccatgaggataacagataagctgc

SEQ ID NO: 4204327 - DNA, 25 bp, Homo sapien
aagcacagggtccaatataagttct

SEQ ID NO: 4204328 - DNA, 25 bp, Homo sapien
gaagaatacgcttaatgtgctgtct

SEQ ID NO: 4204329 - DNA, 25 bp, Homo sapien
aagcactgtttgatcattagctgga

SEQ ID NO: 4204330 - DNA, 25 bp, Homo sapien
agcactgtttgatcattagctggag

SEQ ID NO: 4204331 - DNA, 25 bp, Homo sapien
tctaaccaggattgcctcagtgtcc

SEQ ID NO: 4204332 - DNA, 25 bp, Homo sapien
ctctattgttgcctttgcaatattg

SEQ ID NO: 4204333 - DNA, 25 bp, Homo sapien
agttgttcatttcggccacagaacc

SEQ ID NO: 4204334 - DNA, 25 bp, Homo sapien
agtaagttgttcatttcggccacag

SEQ ID NO: 4204335 - DNA, 25 bp, Homo sapien
tgcaatattgtccagtaagttgttc

SEQ ID NO: 4204336 - DNA, 25 bp, Homo sapien
gaagaggctcatgccagaattagaa

SEQ ID NO: 4204337 - DNA, 25 bp, Homo sapien
tctgtctcgtgctacttgtatcagc

SEQ ID NO: 4204338 - DNA, 25 bp, Homo sapien
gaagaattatttaggtctgcagact

SEQ ID NO: 4204339 - DNA, 25 bp, Homo sapien
cttccaatactgtttgggttgaaga

SEQ ID NO: 4204340 - DNA, 25 bp, Homo sapien
ttccttgcacagaagttggcaacct

SEQ ID NO: 4204341 - DNA, 25 bp, Homo sapien
gcaacctggcgatgaggggggccac

SEQ ID NO: 4204342 - DNA, 25 bp, Homo sapien
tccccagcggctttcagcactcttc

SEQ ID NO: 4204343 - DNA, 25 bp, Homo sapien
gctcttccccagcggctttcagcac

SEQ ID NO: 4204344 - DNA, 25 bp, Homo sapien
aagggttgttgactcaaaagagaca

SEQ ID NO: 4204345 - DNA, 25 bp, Homo sapien
agggttgttgactcaaaagagacat

SEQ ID NO: 4204346 - DNA, 25 bp, Homo sapien
cttaaggcaggtaagtaccagtgag

SEQ ID NO: 4204347 - DNA, 25 bp, Homo sapien
tgttaggaggccttccctttgttca

SEQ ID NO: 4204348 - DNA, 25 bp, Homo sapien
ggagagatgttaggaggccttccct

SEQ ID NO: 4204349 - DNA, 25 bp, Homo sapien
agagatgttaggaggccttcccttt

SEQ ID NO: 4204350 - DNA, 25 bp, Homo sapien
tggagagatgttaggaggccttccc

SEQ ID NO: 4204351 - DNA, 25 bp, Homo sapien
tgccatgcctactgcagcatagatt

SEQ ID NO: 4204352 - DNA, 25 bp, Homo sapien
catctgccgcgcttttatgtcatct

SEQ ID NO: 4204353 - DNA, 25 bp, Homo sapien
tcgtgcatcatctgccgcgctttta

SEQ ID NO: 4204354 - DNA, 25 bp, Homo sapien
ggcggagttgcaatgcttcgtgcat

SEQ ID NO: 4204355 - DNA, 25 bp, Homo sapien
gcaatgcttcgtgcatcatctgccg

SEQ ID NO: 4204356 - DNA, 25 bp, Homo sapien
gggacaaggttagaaacaactgcaa

SEQ ID NO: 4204357 - DNA, 25 bp, Homo sapien
actgcaaaagtatcaggcaggccat

SEQ ID NO: 4204358 - DNA, 25 bp, Homo sapien
acaactgcaaaagtatcaggcaggc

SEQ ID NO: 4204359 - DNA, 25 bp, Homo sapien
catcctccagaggggcctgcacttg

SEQ ID NO: 4204360 - DNA, 25 bp, Homo sapien
gcagggcccagtctgtagtccactg

SEQ ID NO: 4204361 - DNA, 25 bp, Homo sapien
tgttagtgtgcatgtcaacagttcc

SEQ ID NO: 4204362 - DNA, 25 bp, Homo sapien
aatgatctgaaggagtagcagggcc

SEQ ID NO: 4204363 - DNA, 25 bp, Homo sapien
tcaacagttcctgaagtaatgatct

SEQ ID NO: 4204364 - DNA, 25 bp, Homo sapien
tgcatttgataggtcagaggctaac

SEQ ID NO: 4204365 - DNA, 25 bp, Homo sapien
ctttactaaattcatgtatgcacgc

SEQ ID NO: 4204366 - DNA, 25 bp, Homo sapien
cccagcatgtcaagaactgttgtga

SEQ ID NO: 4204367 - DNA, 25 bp, Homo sapien
tatgcacgcttgttctcttcagatc

SEQ ID NO: 4204368 - DNA, 25 bp, Homo sapien
taaccctgaacatgttctacaaggc

SEQ ID NO: 4204369 - DNA, 25 bp, Homo sapien
cagaaggaagttcccctatgaaaca

SEQ ID NO: 4204370 - DNA, 25 bp, Homo sapien
gcttagcgcatgttctttaaccctg

SEQ ID NO: 4204371 - DNA, 25 bp, Homo sapien
caaggcagttccaaatagagcaatg

SEQ ID NO: 4204372 - DNA, 25 bp, Homo sapien
caatactttctgatcgcttgtctcc

SEQ ID NO: 4204373 - DNA, 25 bp, Homo sapien
catcacatgtctgtttcggcaaagg

SEQ ID NO: 4204374 - DNA, 25 bp, Homo sapien
tgtgtcaatcaaggaacccataggt

SEQ ID NO: 4204375 - DNA, 25 bp, Homo sapien
cggcaaaggtagtaactgtcgaact

SEQ ID NO: 4204376 - DNA, 25 bp, Homo sapien
taatcagaacttatttatgcaattt

SEQ ID NO: 4204377 - DNA, 25 bp, Homo sapien
tataatcagaacttatttatgcaat

SEQ ID NO: 4204378 - DNA, 25 bp, Homo sapien
accatgctcagcttacaagaaattt

SEQ ID NO: 4204379 - DNA, 25 bp, Homo sapien
ggcatgagcctagcacattgcagcc

SEQ ID NO: 4204380 - DNA, 25 bp, Homo sapien
tagaattcagacctttgtaagcccg

SEQ ID NO: 4204381 - DNA, 25 bp, Homo sapien
tatgtgggccctgtacttaataagc

SEQ ID NO: 4204382 - DNA, 25 bp, Homo sapien
accggagagcagtggctagaattca

SEQ ID NO: 4204383 - DNA, 25 bp, Homo sapien
taagagtcaagttatagtcaacctg

SEQ ID NO: 4204384 - DNA, 25 bp, Homo sapien
gaaactggagatgtgggctcttcct

SEQ ID NO: 4204385 - DNA, 25 bp, Homo sapien
gacagctcagcggacttcctttctg

SEQ ID NO: 4204386 - DNA, 25 bp, Homo sapien
ggtgatgctgctcctcgtacttgat

SEQ ID NO: 4204387 - DNA, 25 bp, Homo sapien
gatcactcttcggtccactcggact

SEQ ID NO: 4204388 - DNA, 25 bp, Homo sapien
taaatgctaatgagccaaggttctc

SEQ ID NO: 4204389 - DNA, 25 bp, Homo sapien
gccattcagttaatgcagaaacctg

SEQ ID NO: 4204390 - DNA, 25 bp, Homo sapien
tttcgagggatatgatttgggcacg

SEQ ID NO: 4204391 - DNA, 25 bp, Homo sapien
tttgggcacgagtaaatctcatact

SEQ ID NO: 4204392 - DNA, 25 bp, Homo sapien
agataggcgagtaattaggaggcac

SEQ ID NO: 4204393 - DNA, 25 bp, Homo sapien
gcgagtaattaggaggcactcggta

SEQ ID NO: 4204394 - DNA, 25 bp, Homo sapien
tttgggaggagataggcgagtaatt

SEQ ID NO: 4204395 - DNA, 25 bp, Homo sapien
taggcgagtaattaggaggcactcg

SEQ ID NO: 4204396 - DNA, 25 bp, Homo sapien
ctgaaggaaaaagccgggctgctgg

SEQ ID NO: 4204397 - DNA, 25 bp, Homo sapien
tggcccacgaggttgtaaccccaca

SEQ ID NO: 4204398 - DNA, 25 bp, Homo sapien
cacgaggttgtaaccccacaaggtg

SEQ ID NO: 4204399 - DNA, 25 bp, Homo sapien
gcatcatggcgcctgagcgccgctg

SEQ ID NO: 4204400 - DNA, 25 bp, Homo sapien
gagcgccgctgtagcatgtttgaca

SEQ ID NO: 4204401 - DNA, 25 bp, Homo sapien
gcctgcagggtccaatctggagcca

SEQ ID NO: 4204402 - DNA, 25 bp, Homo sapien
gcatgaagagaaggcggctgcatca

SEQ ID NO: 4204403 - DNA, 25 bp, Homo sapien
cgagtctgggcttgcctgagaagtc

SEQ ID NO: 4204404 - DNA, 25 bp, Homo sapien
ctgttggaaaggccgagtctgggct

SEQ ID NO: 4204405 - DNA, 25 bp, Homo sapien
ttggaaaggccgagtctgggcttgc

SEQ ID NO: 4204406 - DNA, 25 bp, Homo sapien
aaaggccgagtctgggcttgcctga

SEQ ID NO: 4204407 - DNA, 25 bp, Homo sapien
gaagtgccgtaaattacacaacgga

SEQ ID NO: 4204408 - DNA, 25 bp, Homo sapien
cactaagtggcccaaatgcaggaag

SEQ ID NO: 4204409 - DNA, 25 bp, Homo sapien
ccaaatgcaggaagtgccgtaaatt

SEQ ID NO: 4204410 - DNA, 25 bp, Homo sapien
cgtaaattacacaacggagatatgc

SEQ ID NO: 4204411 - DNA, 25 bp, Homo sapien
tcagatatgcaatattctccctgag

SEQ ID NO: 4204412 - DNA, 25 bp, Homo sapien
caggacatctggtcaccttagttat

SEQ ID NO: 4204413 - DNA, 25 bp, Homo sapien
caaacatccctatttgactagcact

SEQ ID NO: 4204414 - DNA, 25 bp, Homo sapien
gcacttcccaattttgccaggcata

SEQ ID NO: 4204415 - DNA, 25 bp, Homo sapien
gggagggccgtgcttgcgcagcaaa

SEQ ID NO: 4204416 - DNA, 25 bp, Homo sapien
aaagagagcagcctggtcccccggc

SEQ ID NO: 4204417 - DNA, 25 bp, Homo sapien
tgcagccctggatactgagggagct

SEQ ID NO: 4204418 - DNA, 25 bp, Homo sapien
ccgtgcttgcgcagcaaagagagca

SEQ ID NO: 4204419 - DNA, 25 bp, Homo sapien
ccggataggctctggagttatagct

SEQ ID NO: 4204420 - DNA, 25 bp, Homo sapien
catacattgtatagccctgtggcat

SEQ ID NO: 4204421 - DNA, 25 bp, Homo sapien
aatgtgcggccggataggctctgga

SEQ ID NO: 4204422 - DNA, 25 bp, Homo sapien
tgcaggtacggcgaggcctgctgct

SEQ ID NO: 4204423 - DNA, 25 bp, Homo sapien
tgcagaagtcagcacagcatcaatt

SEQ ID NO: 4204424 - DNA, 25 bp, Homo sapien
tctgggtctcatgggatcctgaggc

SEQ ID NO: 4204425 - DNA, 25 bp, Homo sapien
cagagggctctgctgtagagcctga

SEQ ID NO: 4204426 - DNA, 25 bp, Homo sapien
ctctgctgctgtcgaacttgcggct

SEQ ID NO: 4204427 - DNA, 25 bp, Homo sapien
ggactgctggggctggggaggctgc

SEQ ID NO: 4204428 - DNA, 25 bp, Homo sapien
gctggggctgctggggctgctgcat

SEQ ID NO: 4204429 - DNA, 25 bp, Homo sapien
ggctggggctgctggggctgctgca

SEQ ID NO: 4204430 - DNA, 25 bp, Homo sapien
cgaggactgctggggctggggaggc

SEQ ID NO: 4204431 - DNA, 25 bp, Homo sapien
tgcattgcttggagaccaagggtct

SEQ ID NO: 4204432 - DNA, 25 bp, Homo sapien
gctgcattgcttggagaccaagggt

SEQ ID NO: 4204433 - DNA, 25 bp, Homo sapien
ctgcattgcttggagaccaagggtc

SEQ ID NO: 4204434 - DNA, 25 bp, Homo sapien
ggctgcattgcttggagaccaaggg

SEQ ID NO: 4204435 - DNA, 25 bp, Homo sapien
gctgccattgagccacttcctatga

SEQ ID NO: 4204436 - DNA, 25 bp, Homo sapien
cacgctctataacatctggcagggt

SEQ ID NO: 4204437 - DNA, 25 bp, Homo sapien
tcaaaaattcagcaaccgtaaacta

SEQ ID NO: 4204438 - DNA, 25 bp, Homo sapien
gaagtgatgtttcactggcacgctc

SEQ ID NO: 4204439 - DNA, 25 bp, Homo sapien
tgcttctggagctgccgcaccaagg

SEQ ID NO: 4204440 - DNA, 25 bp, Homo sapien
ctgccgcaccaaggcggccgtctgc

SEQ ID NO: 4204441 - DNA, 25 bp, Homo sapien
tgctgggtctgctgcaagccttgcc

SEQ ID NO: 4204442 - DNA, 25 bp, Homo sapien
tgggtctgctgcaagccttgcctgg

SEQ ID NO: 4204443 - DNA, 25 bp, Homo sapien
tcagaagtgtgaaggatgcccatac

SEQ ID NO: 4204444 - DNA, 25 bp, Homo sapien
agtgtgaaggatgcccatacggagt

SEQ ID NO: 4204445 - DNA, 25 bp, Homo sapien
gatgcccatacggagtcactccttg

SEQ ID NO: 4204446 - DNA, 25 bp, Homo sapien
tgaaggatgcccatacggagtcact

SEQ ID NO: 4204447 - DNA, 25 bp, Homo sapien
caatttcaaaaggtctgctagcaca

SEQ ID NO: 4204448 - DNA, 25 bp, Homo sapien
taaatgtccgtttcaccatcacagg

SEQ ID NO: 4204449 - DNA, 25 bp, Homo sapien
aacaggtttccgcacatcttagggc

SEQ ID NO: 4204450 - DNA, 25 bp, Homo sapien
gatggaacatgactcactcactagg

SEQ ID NO: 4204451 - DNA, 25 bp, Homo sapien
tgtgaccatcttaatgcaaaagaat

SEQ ID NO: 4204452 - DNA, 25 bp, Homo sapien
tagagtcgtagcataacttcctcac

SEQ ID NO: 4204453 - DNA, 25 bp, Homo sapien
ttataatgcgcaggggtaaaacagc

SEQ ID NO: 4204454 - DNA, 25 bp, Homo sapien
ctcaactttcaatagaatcgtggaa

SEQ ID NO: 4204455 - DNA, 25 bp, Homo sapien
tagatatctcagtgcacaaaaccga

SEQ ID NO: 4204456 - DNA, 25 bp, Homo sapien
tgagacatgtggaatagcgcccttg

SEQ ID NO: 4204457 - DNA, 25 bp, Homo sapien
ttaaaatctagctcaggcacccctg

SEQ ID NO: 4204458 - DNA, 25 bp, Homo sapien
caatgttacaagcatggcactcaga

SEQ ID NO: 4204459 - DNA, 25 bp, Homo sapien
ggtccctttggtcgcagcccctgta

SEQ ID NO: 4204460 - DNA, 25 bp, Homo sapien
gagaatgagaaaggtccctttggtc

SEQ ID NO: 4204461 - DNA, 25 bp, Homo sapien
ccaatgccctggttgtttgcaataa

SEQ ID NO: 4204462 - DNA, 25 bp, Homo sapien
ttgttctaggatctctcggttgtga

SEQ ID NO: 4204463 - DNA, 25 bp, Homo sapien
tgtgttcagcacaagcttgagctaa

SEQ ID NO: 4204464 - DNA, 25 bp, Homo sapien
cacaagcttgagctaaagccatcaa

SEQ ID NO: 4204465 - DNA, 25 bp, Homo sapien
ttgtgttcagcacaagcttgagcta

SEQ ID NO: 4204466 - DNA, 25 bp, Homo sapien
ttcagcacaagcttgagctaaagcc

SEQ ID NO: 4204467 - DNA, 25 bp, Homo sapien
ggaagatacccctgaagatcgagaa

SEQ ID NO: 4204468 - DNA, 25 bp, Homo sapien
agagctggccggaagatacctcctc

SEQ ID NO: 4204469 - DNA, 25 bp, Homo sapien
tcttctaaacacaactcctagggtg

SEQ ID NO: 4204470 - DNA, 25 bp, Homo sapien
cctgtggtgagtgtaagattctccc

SEQ ID NO: 4204471 - DNA, 25 bp, Homo sapien
tctcgggttacagagcaagcctcca

SEQ ID NO: 4204472 - DNA, 25 bp, Homo sapien
tctggactgctgtgacttgtgactc

SEQ ID NO: 4204473 - DNA, 25 bp, Homo sapien
taagagcggctatgcgaaagttcac

SEQ ID NO: 4204474 - DNA, 25 bp, Homo sapien
gaagcagagcgtttgtctggactgc

SEQ ID NO: 4204475 - DNA, 25 bp, Homo sapien
ttggcttcagtgttacactcctaaa

SEQ ID NO: 4204476 - DNA, 25 bp, Homo sapien
aaattcaggaggtggaaacctgtga

SEQ ID NO: 4204477 - DNA, 25 bp, Homo sapien
tgccaactttggcttcagtgttaca

SEQ ID NO: 4204478 - DNA, 25 bp, Homo sapien
ctaaaattcaggaggtggaaacctg

SEQ ID NO: 4204479 - DNA, 25 bp, Homo sapien
tctgtgatagtaaagccaacctgaa

SEQ ID NO: 4204480 - DNA, 25 bp, Homo sapien
taacccgaagaacttggcaattgca

SEQ ID NO: 4204481 - DNA, 25 bp, Homo sapien
ccaacctgaagcgagagtgtgacta

SEQ ID NO: 4204482 - DNA, 25 bp, Homo sapien
tactgtaactggacacttaaggcct

SEQ ID NO: 4204483 - DNA, 25 bp, Homo sapien
tgtaattgattcaccggtaactcac

SEQ ID NO: 4204484 - DNA, 25 bp, Homo sapien
tgggtacctcttgtaattgattcac

SEQ ID NO: 4204485 - DNA, 25 bp, Homo sapien
gattcaccggtaactcacatgtcat

SEQ ID NO: 4204486 - DNA, 25 bp, Homo sapien
cctcttgtaattgattcaccggtaa

SEQ ID NO: 4204487 - DNA, 25 bp, Homo sapien
cacctggataggtgttggtccctgg

SEQ ID NO: 4204488 - DNA, 25 bp, Homo sapien
tccttcttctgtggccaaagaacag

SEQ ID NO: 4204489 - DNA, 25 bp, Homo sapien
ggatttaccatggatttcctcagag

SEQ ID NO: 4204490 - DNA, 25 bp, Homo sapien
tcaagtcgcagacaagtgtagttgc

SEQ ID NO: 4204491 - DNA, 25 bp, Homo sapien
caaaggcaacatggtctctggtctc

SEQ ID NO: 4204492 - DNA, 25 bp, Homo sapien
tgagccatctctgcatgatgctttt

SEQ ID NO: 4204493 - DNA, 25 bp, Homo sapien
ctgagccatctctgcatgatgcttt

SEQ ID NO: 4204494 - DNA, 25 bp, Homo sapien
cttattcacgtcttcagttccagga

SEQ ID NO: 4204495 - DNA, 25 bp, Homo sapien
ttcacgtcttcagttccaggaaaat

SEQ ID NO: 4204496 - DNA, 25 bp, Homo sapien
tcaatccttattcacgtcttcagtt

SEQ ID NO: 4204497 - DNA, 25 bp, Homo sapien
tccttattcacgtcttcagttccag

SEQ ID NO: 4204498 - DNA, 25 bp, Homo sapien
tgcacctgtttattcactgtcaagg

SEQ ID NO: 4204499 - DNA, 25 bp, Homo sapien
atgagtgactgaagtccatgcacct

SEQ ID NO: 4204500 - DNA, 25 bp, Homo sapien
cacctgtttattcactgtcaagggc

SEQ ID NO: 4204501 - DNA, 25 bp, Homo sapien
gactgaagtccatgcacctgtttat

SEQ ID NO: 4204502 - DNA, 25 bp, Homo sapien
gctctatgtcttttacttctcccca

SEQ ID NO: 4204503 - DNA, 25 bp, Homo sapien
gctaaaggattatccttggcttctg

SEQ ID NO: 4204504 - DNA, 25 bp, Homo sapien
ttcaggattatgatcaacactgcta

SEQ ID NO: 4204505 - DNA, 25 bp, Homo sapien
aaatgagctctatgtcttttacttc

SEQ ID NO: 4204506 - DNA, 25 bp, Homo sapien
gtgatgcttcattaaagtggctaag

SEQ ID NO: 4204507 - DNA, 25 bp, Homo sapien
ggcaagtgatgcttcattaaagtgg

SEQ ID NO: 4204508 - DNA, 25 bp, Homo sapien
tgcttcattaaagtggctaagaaca

SEQ ID NO: 4204509 - DNA, 25 bp, Homo sapien
caagtgatgcttcattaaagtggct

SEQ ID NO: 4204510 - DNA, 25 bp, Homo sapien
gacttgggaactctctcaggtgata

SEQ ID NO: 4204511 - DNA, 25 bp, Homo sapien
caaacagagagcttttagccccata

SEQ ID NO: 4204512 - DNA, 25 bp, Homo sapien
aacactgaatagtaactagtagagc

SEQ ID NO: 4204513 - DNA, 25 bp, Homo sapien
gcaattgtagacttgggaactctct

SEQ ID NO: 4204514 - DNA, 25 bp, Homo sapien
tttagcgatggcatccaaggccatt

SEQ ID NO: 4204515 - DNA, 25 bp, Homo sapien
cagctttcttcaatgttgtctggca

SEQ ID NO: 4204516 - DNA, 25 bp, Homo sapien
ttttccagctttcttcaatgttgtc

SEQ ID NO: 4204517 - DNA, 25 bp, Homo sapien
tgtacaagttttagcgatggcatcc

SEQ ID NO: 4204518 - DNA, 25 bp, Homo sapien
caatcgtactggaatgtcaacaaat

SEQ ID NO: 4204519 - DNA, 25 bp, Homo sapien
aaatatatcacagctcgccttcggg

SEQ ID NO: 4204520 - DNA, 25 bp, Homo sapien
gatgtattcatctgaaagtggttgg

SEQ ID NO: 4204521 - DNA, 25 bp, Homo sapien
tctttttggcaagtacaatcgtact

SEQ ID NO: 4204522 - DNA, 25 bp, Homo sapien
acaacagcatcaagcgtgtttgccg

SEQ ID NO: 4204523 - DNA, 25 bp, Homo sapien
cgtccatctattcaggaagtcaaaa

SEQ ID NO: 4204524 - DNA, 25 bp, Homo sapien
tattcaggaagtcaaaagccctctg

SEQ ID NO: 4204525 - DNA, 25 bp, Homo sapien
tcaagcgtgtttgccgtccatctat

SEQ ID NO: 4204526 - DNA, 25 bp, Homo sapien
tctcaaataccaaatagatgcaatt

SEQ ID NO: 4204527 - DNA, 25 bp, Homo sapien
cagtcttctaaaaatcaagcctaag

SEQ ID NO: 4204528 - DNA, 25 bp, Homo sapien
gttgtatctgtccatctaattctca

SEQ ID NO: 4204529 - DNA, 25 bp, Homo sapien
taatgccagtctttattgttcagtc

SEQ ID NO: 4204530 - DNA, 25 bp, Homo sapien
gcaggaaagtggtgttgaggagcca

SEQ ID NO: 4204531 - DNA, 25 bp, Homo sapien
gattcgggtgggatccactccatat

SEQ ID NO: 4204532 - DNA, 25 bp, Homo sapien
ccagaactgtctcccgcaatgcaga

SEQ ID NO: 4204533 - DNA, 25 bp, Homo sapien
gagtgaccgctgttgctaaattgcc

SEQ ID NO: 4204534 - DNA, 25 bp, Homo sapien
caagtgctactgtaattcaatggga

SEQ ID NO: 4204535 - DNA, 25 bp, Homo sapien
gaaatagtcacattaaggttaaata

SEQ ID NO: 4204536 - DNA, 25 bp, Homo sapien
ttggcagtaggatagacatgtagat

SEQ ID NO: 4204537 - DNA, 25 bp, Homo sapien
agtcagtgtagtattggcagtagga

SEQ ID NO: 4204538 - DNA, 25 bp, Homo sapien
cattgcccagggaagtgcttcatcc

SEQ ID NO: 4204539 - DNA, 25 bp, Homo sapien
taagccagggtaaagtaagacttgc

SEQ ID NO: 4204540 - DNA, 25 bp, Homo sapien
taaacagatgtcttgactccagagg

SEQ ID NO: 4204541 - DNA, 25 bp, Homo sapien
tggccaacaagggtaatgctctgct

SEQ ID NO: 4204542 - DNA, 25 bp, Homo sapien
ataaattcttatccagccaacttac

SEQ ID NO: 4204543 - DNA, 25 bp, Homo sapien
tataaattcttatccagccaactta

SEQ ID NO: 4204544 - DNA, 25 bp, Homo sapien
ttagataactcaaatgacattgttc

SEQ ID NO: 4204545 - DNA, 25 bp, Homo sapien
cattaactgctacaaatgttgcaaa

SEQ ID NO: 4204546 - DNA, 25 bp, Homo sapien
caatccactatgtaagggctataca

SEQ ID NO: 4204547 - DNA, 25 bp, Homo sapien
ctcttcaaggacacacattaactgc

SEQ ID NO: 4204548 - DNA, 25 bp, Homo sapien
ataagtaaggagaaaataggcagga

SEQ ID NO: 4204549 - DNA, 25 bp, Homo sapien
ttataagtaaggagaaaataggcag

SEQ ID NO: 4204550 - DNA, 25 bp, Homo sapien
attataagtaaggagaaaataggca

SEQ ID NO: 4204551 - DNA, 25 bp, Homo sapien
tataagtaaggagaaaataggcagg

SEQ ID NO: 4204552 - DNA, 25 bp, Homo sapien
caacttgggacttggactagtacac

SEQ ID NO: 4204553 - DNA, 25 bp, Homo sapien
ttttctaagagaagcccatagggag

SEQ ID NO: 4204554 - DNA, 25 bp, Homo sapien
ttgagatgatgtgccgattaccctg

SEQ ID NO: 4204555 - DNA, 25 bp, Homo sapien
tggagctgtatcgtcacaacttggg

SEQ ID NO: 4204556 - DNA, 25 bp, Homo sapien
tcactgcctgtgacaactgataggg

SEQ ID NO: 4204557 - DNA, 25 bp, Homo sapien
gaagattgccttattcggtgcaagc

SEQ ID NO: 4204558 - DNA, 25 bp, Homo sapien
cataggcctacaattgaaagcagtc

SEQ ID NO: 4204559 - DNA, 25 bp, Homo sapien
cattaacaggctcgaaggtatgcga

SEQ ID NO: 4204560 - DNA, 25 bp, Homo sapien
ccaaggacccctgcaatcagaaaca

SEQ ID NO: 4204561 - DNA, 25 bp, Homo sapien
taaacataatatgccccaaggaccc

SEQ ID NO: 4204562 - DNA, 25 bp, Homo sapien
caccagtcaccagagttcctcaata

SEQ ID NO: 4204563 - DNA, 25 bp, Homo sapien
tttcacaggtgtagctatccacacc

SEQ ID NO: 4204564 - DNA, 25 bp, Homo sapien
caaagaacgttgcagtattcatgaa

SEQ ID NO: 4204565 - DNA, 25 bp, Homo sapien
ttcccaagagttcaactaacaaagc

SEQ ID NO: 4204566 - DNA, 25 bp, Homo sapien
aaagaacgttgcagtattcatgaaa

SEQ ID NO: 4204567 - DNA, 25 bp, Homo sapien
gaacgttgcagtattcatgaaatga

SEQ ID NO: 4204568 - DNA, 25 bp, Homo sapien
tgttggcatgtatacacggacagga

SEQ ID NO: 4204569 - DNA, 25 bp, Homo sapien
tatctctgactttagtgttggcatg

SEQ ID NO: 4204570 - DNA, 25 bp, Homo sapien
ccaccaccatgaatataaactaagc

SEQ ID NO: 4204571 - DNA, 25 bp, Homo sapien
tactgaaagttgtctctatcatggt

SEQ ID NO: 4204572 - DNA, 25 bp, Homo sapien
ctgagatttgctacagcttttggta

SEQ ID NO: 4204573 - DNA, 25 bp, Homo sapien
tgttatctaacatgtttgtcttgat

SEQ ID NO: 4204574 - DNA, 25 bp, Homo sapien
tgatatgatggagtcaacatttcag

SEQ ID NO: 4204575 - DNA, 25 bp, Homo sapien
aataaattttggacagctgaagtgt

SEQ ID NO: 4204576 - DNA, 25 bp, Homo sapien
tggttgatacaacaacagcattaag

SEQ ID NO: 4204577 - DNA, 25 bp, Homo sapien
agctgttcatcttgacagaaagtca

SEQ ID NO: 4204578 - DNA, 25 bp, Homo sapien
caacaacagcattaagtctatcagc

SEQ ID NO: 4204579 - DNA, 25 bp, Homo sapien
cattaagtctatcagctgttcatct

SEQ ID NO: 4204580 - DNA, 25 bp, Homo sapien
aaaatgatatttaggtgctattctg

SEQ ID NO: 4204581 - DNA, 25 bp, Homo sapien
aatgatatttaggtgctattctgta

SEQ ID NO: 4204582 - DNA, 25 bp, Homo sapien
atgatatttaggtgctattctgtag

SEQ ID NO: 4204583 - DNA, 25 bp, Homo sapien
ggaaaatgatatttaggtgctattc

SEQ ID NO: 4204584 - DNA, 25 bp, Homo sapien
ccatcttagtgcattatatacatct

SEQ ID NO: 4204585 - DNA, 25 bp, Homo sapien
tttaggctctctacgatatttttca

SEQ ID NO: 4204586 - DNA, 25 bp, Homo sapien
gccaattcttttaggctctctacga

SEQ ID NO: 4204587 - DNA, 25 bp, Homo sapien
caagaatatcttggcataacaacca

SEQ ID NO: 4204588 - DNA, 25 bp, Homo sapien
taaatccatgtcaagcgtctgaagg

SEQ ID NO: 4204589 - DNA, 25 bp, Homo sapien
cgtctgaagggcaggatatattaaa

SEQ ID NO: 4204590 - DNA, 25 bp, Homo sapien
ttttttctgatgtgatagtaaatcc

SEQ ID NO: 4204591 - DNA, 25 bp, Homo sapien
ggtttggacagaactagagagtcta

SEQ ID NO: 4204592 - DNA, 25 bp, Homo sapien
taaagtattccctacagaacctgac

SEQ ID NO: 4204593 - DNA, 25 bp, Homo sapien
tctgtggtaaagtattccctacaga

SEQ ID NO: 4204594 - DNA, 25 bp, Homo sapien
tgtggtaaagtattccctacagaac

SEQ ID NO: 4204595 - DNA, 25 bp, Homo sapien
caagtgatctgtctgtggtaaagta

SEQ ID NO: 4204596 - DNA, 25 bp, Homo sapien
gaacagatggtttgattccattggt

SEQ ID NO: 4204597 - DNA, 25 bp, Homo sapien
tgaacagatggtttgattccattgg

SEQ ID NO: 4204598 - DNA, 25 bp, Homo sapien
ctgaacagatggtttgattccattg

SEQ ID NO: 4204599 - DNA, 25 bp, Homo sapien
acagatggtttgattccattggtac

SEQ ID NO: 4204600 - DNA, 25 bp, Homo sapien
taagcccattataggaaagtgctcc

SEQ ID NO: 4204601 - DNA, 25 bp, Homo sapien
ccactatggctatgaggaccttaga

SEQ ID NO: 4204602 - DNA, 25 bp, Homo sapien
gagaagaatttgctagcggccaata

SEQ ID NO: 4204603 - DNA, 25 bp, Homo sapien
gagttctaaagtcgcgtgatgtaca

SEQ ID NO: 4204604 - DNA, 25 bp, Homo sapien
cggcctgtatatctacatttttaca

SEQ ID NO: 4204605 - DNA, 25 bp, Homo sapien
ctgcacccggcctgtatatctacat

SEQ ID NO: 4204606 - DNA, 25 bp, Homo sapien
cacccggcctgtatatctacatttt

SEQ ID NO: 4204607 - DNA, 25 bp, Homo sapien
ggcctgtatatctacatttttacat

SEQ ID NO: 4204608 - DNA, 25 bp, Homo sapien
gaaacgccctccagcaaaatagttc

SEQ ID NO: 4204609 - DNA, 25 bp, Homo sapien
tgttaatctcccaagtgctcaagaa

SEQ ID NO: 4204610 - DNA, 25 bp, Homo sapien
tgtcacctattacgtcaaagactgc

SEQ ID NO: 4204611 - DNA, 25 bp, Homo sapien
gttcttgccttgaaactgtacagag

SEQ ID NO: 4204612 - DNA, 25 bp, Homo sapien
gaatatgacgactttccataacagc

SEQ ID NO: 4204613 - DNA, 25 bp, Homo sapien
cataacagcatttagcagcagtatt

SEQ ID NO: 4204614 - DNA, 25 bp, Homo sapien
gacgactttccataacagcatttag

SEQ ID NO: 4204615 - DNA, 25 bp, Homo sapien
tttccataacagcatttagcagcag

SEQ ID NO: 4204616 - DNA, 25 bp, Homo sapien
ccatctgtagtgtataccccaaatc

SEQ ID NO: 4204617 - DNA, 25 bp, Homo sapien
atctgtagtgtataccccaaatctt

SEQ ID NO: 4204618 - DNA, 25 bp, Homo sapien
ataccccaaatcttctattaatgat

SEQ ID NO: 4204619 - DNA, 25 bp, Homo sapien
ccccaaatcttctattaatgattaa

SEQ ID NO: 4204620 - DNA, 25 bp, Homo sapien
caatgttgttaaatttacttctcac

SEQ ID NO: 4204621 - DNA, 25 bp, Homo sapien
acattttcatctgaggttggtggaa

SEQ ID NO: 4204622 - DNA, 25 bp, Homo sapien
gcttgaaaggaacatcataggctct

SEQ ID NO: 4204623 - DNA, 25 bp, Homo sapien
tctatcaagttgtttggccccaaca

SEQ ID NO: 4204624 - DNA, 25 bp, Homo sapien
caaagcagtgatggcagatgggacc

SEQ ID NO: 4204625 - DNA, 25 bp, Homo sapien
tgttactggcagagttaccctgggc

SEQ ID NO: 4204626 - DNA, 25 bp, Homo sapien
tgtcattcttcagtggccagaccaa

SEQ ID NO: 4204627 - DNA, 25 bp, Homo sapien
ggccctgggctctgtcattcttcag

SEQ ID NO: 4204628 - DNA, 25 bp, Homo sapien
gatatgcctgaatagtgtactttaa

SEQ ID NO: 4204629 - DNA, 25 bp, Homo sapien
cctacatgatatgcctgaatagtgt

SEQ ID NO: 4204630 - DNA, 25 bp, Homo sapien
gtaaacctacatgatatgcctgaat

SEQ ID NO: 4204631 - DNA, 25 bp, Homo sapien
cctgaatagtgtactttaataagca

SEQ ID NO: 4204632 - DNA, 25 bp, Homo sapien
agttttcagatgtgcgtttatccac

SEQ ID NO: 4204633 - DNA, 25 bp, Homo sapien
tataatatgctatgaggatccccac

SEQ ID NO: 4204634 - DNA, 25 bp, Homo sapien
catggctcctcaacgttatctggga

SEQ ID NO: 4204635 - DNA, 25 bp, Homo sapien
tcagaaggtacagcgattttcttcc

SEQ ID NO: 4204636 - DNA, 25 bp, Homo sapien
ttaaaggaatccataaaatggtgaa

SEQ ID NO: 4204637 - DNA, 25 bp, Homo sapien
aaaggaatccataaaatggtgaagt

SEQ ID NO: 4204638 - DNA, 25 bp, Homo sapien
tccaccatggatgtaaaacaacccc

SEQ ID NO: 4204639 - DNA, 25 bp, Homo sapien
tttggcacatatacccgaacaagaa

SEQ ID NO: 4204640 - DNA, 25 bp, Homo sapien
ggacttcatcaaagctcccgacaac

SEQ ID NO: 4204641 - DNA, 25 bp, Homo sapien
ccttcttagtgcttcagactttctc

SEQ ID NO: 4204642 - DNA, 25 bp, Homo sapien
ttttgaccacctcagtgctttgctg

SEQ ID NO: 4204643 - DNA, 25 bp, Homo sapien
tctctacacgatgcaggacttctat

SEQ ID NO: 4204644 - DNA, 25 bp, Homo sapien
ctacacgatgcaggacttctattat

SEQ ID NO: 4204645 - DNA, 25 bp, Homo sapien
cgatgcaggacttctattatttcct

SEQ ID NO: 4204646 - DNA, 25 bp, Homo sapien
cacgatgcaggacttctattatttc

SEQ ID NO: 4204647 - DNA, 25 bp, Homo sapien
tccatcttgacagcaagtcataacc

SEQ ID NO: 4204648 - DNA, 25 bp, Homo sapien
gatacgacgacagcatcaagtctgt

SEQ ID NO: 4204649 - DNA, 25 bp, Homo sapien
ttggttgatacgacgacagcatcaa

SEQ ID NO: 4204650 - DNA, 25 bp, Homo sapien
tgctgtccatcttgacagcaagtca

SEQ ID NO: 4204651 - DNA, 25 bp, Homo sapien
ctgcttgcagtcttgggcacaaaca

SEQ ID NO: 4204652 - DNA, 25 bp, Homo sapien
caaacaagttgaataagctccacag

SEQ ID NO: 4204653 - DNA, 25 bp, Homo sapien
tgtacctacagtcaaaaataatgca

SEQ ID NO: 4204654 - DNA, 25 bp, Homo sapien
gggatttaggctgcttgcagtcttg

SEQ ID NO: 4204655 - DNA, 25 bp, Homo sapien
agaaataccgattctctcagggttc

SEQ ID NO: 4204656 - DNA, 25 bp, Homo sapien
tcctgcactatctccagaaataccg

SEQ ID NO: 4204657 - DNA, 25 bp, Homo sapien
gaaatgatacttaggtgctaatctg

SEQ ID NO: 4204658 - DNA, 25 bp, Homo sapien
tcaaattgaattgggaaatgatact

SEQ ID NO: 4204659 - DNA, 25 bp, Homo sapien
agctaccacatgcaggctataattt

SEQ ID NO: 4204660 - DNA, 25 bp, Homo sapien
catgcaggctataattttaaatgaa

SEQ ID NO: 4204661 - DNA, 25 bp, Homo sapien
aatcaatatctcctatttgcattca

SEQ ID NO: 4204662 - DNA, 25 bp, Homo sapien
cagaagcagggattgatattataat

SEQ ID NO: 4204663 - DNA, 25 bp, Homo sapien
acttaatagaggtttctgacatggc

SEQ ID NO: 4204664 - DNA, 25 bp, Homo sapien
ggcaagacttctgtgtgaaatggtc

SEQ ID NO: 4204665 - DNA, 25 bp, Homo sapien
gagggatataccaataccagggagg

SEQ ID NO: 4204666 - DNA, 25 bp, Homo sapien
gacatggctttgatgctaaagcgac

SEQ ID NO: 4204667 - DNA, 25 bp, Homo sapien
gatgatttgcacaaatcattttcat

SEQ ID NO: 4204668 - DNA, 25 bp, Homo sapien
gacggtaaatctacatcaagaggct

SEQ ID NO: 4204669 - DNA, 25 bp, Homo sapien
tgaaccccagtgttgcgaagtcggg

SEQ ID NO: 4204670 - DNA, 25 bp, Homo sapien
gaagagatgacttgattccacaggt

SEQ ID NO: 4204671 - DNA, 25 bp, Homo sapien
gaagtcgggtgacatacatgagtcc

SEQ ID NO: 4204672 - DNA, 25 bp, Homo sapien
atagattttcctttagccactcaat

SEQ ID NO: 4204673 - DNA, 25 bp, Homo sapien
tccatcctcaacatggttatgagtc

SEQ ID NO: 4204674 - DNA, 25 bp, Homo sapien
tagattttcctttagccactcaata

SEQ ID NO: 4204675 - DNA, 25 bp, Homo sapien
tggaatccatcctcaacatggttat

SEQ ID NO: 4204676 - DNA, 25 bp, Homo sapien
aaatatgttatagctacatgtttta

SEQ ID NO: 4204677 - DNA, 25 bp, Homo sapien
aaaatatgttatagctacatgtttt

SEQ ID NO: 4204678 - DNA, 25 bp, Homo sapien
tctcagaaaaagcagatagacaatg

SEQ ID NO: 4204679 - DNA, 25 bp, Homo sapien
tctcttgcatcgtaaatagtagcca

SEQ ID NO: 4204680 - DNA, 25 bp, Homo sapien
catgtggaacttaactagaccattc

SEQ ID NO: 4204681 - DNA, 25 bp, Homo sapien
aaagtgcctatttaagaattatgct

SEQ ID NO: 4204682 - DNA, 25 bp, Homo sapien
taaacatctctctgtatttaccaga

SEQ ID NO: 4204683 - DNA, 25 bp, Homo sapien
tattgtgtccttgtaattcgattgc

SEQ ID NO: 4204684 - DNA, 25 bp, Homo sapien
gaatatgtccaacttcgattcactg

SEQ ID NO: 4204685 - DNA, 25 bp, Homo sapien
tctttgctcatatatttcacactgg

SEQ ID NO: 4204686 - DNA, 25 bp, Homo sapien
gtaaacactgccactgtatttctat

SEQ ID NO: 4204687 - DNA, 25 bp, Homo sapien
agatgaaatgtaaacactgccactg

SEQ ID NO: 4204688 - DNA, 25 bp, Homo sapien
agtagcgtattgaccaaggtgtttc

SEQ ID NO: 4204689 - DNA, 25 bp, Homo sapien
aaggagtagcgtattgaccaaggtg

SEQ ID NO: 4204690 - DNA, 25 bp, Homo sapien
ttcaaatggttctcttagccaatag

SEQ ID NO: 4204691 - DNA, 25 bp, Homo sapien
ggttctcttagccaataggattgca

SEQ ID NO: 4204692 - DNA, 25 bp, Homo sapien
atggttctcttagccaataggattg

SEQ ID NO: 4204693 - DNA, 25 bp, Homo sapien
caaatggttctcttagccaatagga

SEQ ID NO: 4204694 - DNA, 25 bp, Homo sapien
taaaaggtcacgagtatttctgcta

SEQ ID NO: 4204695 - DNA, 25 bp, Homo sapien
tcacgagtatttctgctacaaagct

SEQ ID NO: 4204696 - DNA, 25 bp, Homo sapien
tacaaagctttatgcaggtctgcaa

SEQ ID NO: 4204697 - DNA, 25 bp, Homo sapien
gctacaaagctttatgcaggtctgc

SEQ ID NO: 4204698 - DNA, 25 bp, Homo sapien
ctggacatggttattacagtgtcct

SEQ ID NO: 4204699 - DNA, 25 bp, Homo sapien
ggacatggttattacagtgtcctat

SEQ ID NO: 4204700 - DNA, 25 bp, Homo sapien
tggacatggttattacagtgtccta

SEQ ID NO: 4204701 - DNA, 25 bp, Homo sapien
aagacttgatcccttgacaggaact

SEQ ID NO: 4204702 - DNA, 25 bp, Homo sapien
gctggatatagcttctgacccagtg

SEQ ID NO: 4204703 - DNA, 25 bp, Homo sapien
cttgatcccttgacaggaactctgc

SEQ ID NO: 4204704 - DNA, 25 bp, Homo sapien
gatcccttgacaggaactctgccag

SEQ ID NO: 4204705 - DNA, 25 bp, Homo sapien
caaattctgctgagttaaaccataa

SEQ ID NO: 4204706 - DNA, 25 bp, Homo sapien
aaattctgctgagttaaaccataac

SEQ ID NO: 4204707 - DNA, 25 bp, Homo sapien
agtttttgcaagttgcattccatgc

SEQ ID NO: 4204708 - DNA, 25 bp, Homo sapien
ccagtttttgcaagttgcattccat

SEQ ID NO: 4204709 - DNA, 25 bp, Homo sapien
cagtttttgcaagttgcattccatg

SEQ ID NO: 4204710 - DNA, 25 bp, Homo sapien
cactgttcagaaaggccaaaggccg

SEQ ID NO: 4204711 - DNA, 25 bp, Homo sapien
tcagagagaagatgtagccgtaaac

SEQ ID NO: 4204712 - DNA, 25 bp, Homo sapien
ggagttgatgacgacctgagtgcac

SEQ ID NO: 4204713 - DNA, 25 bp, Homo sapien
gcatgtccctgaagtgatctcccaa

SEQ ID NO: 4204714 - DNA, 25 bp, Homo sapien
ctgaatgaaagtaggagttcatgag

SEQ ID NO: 4204715 - DNA, 25 bp, Homo sapien
tctgaatgaaagtaggagttcatga

SEQ ID NO: 4204716 - DNA, 25 bp, Homo sapien
tgaatgaaagtaggagttcatgagc

SEQ ID NO: 4204717 - DNA, 25 bp, Homo sapien
gacactctctgattgatgtctatga

SEQ ID NO: 4204718 - DNA, 25 bp, Homo sapien
gattgatgtctatgagttaaggcaa

SEQ ID NO: 4204719 - DNA, 25 bp, Homo sapien
ggcaaactgtaactggcttacagat

SEQ ID NO: 4204720 - DNA, 25 bp, Homo sapien
catctgtagaacaatctgtttcaca

SEQ ID NO: 4204721 - DNA, 25 bp, Homo sapien
tcttttcacatactctgggtacaac

SEQ ID NO: 4204722 - DNA, 25 bp, Homo sapien
cagtacattcttgtcgtcccattct

SEQ ID NO: 4204723 - DNA, 25 bp, Homo sapien
catactctgggtacaacttgtcttt

SEQ ID NO: 4204724 - DNA, 25 bp, Homo sapien
tcttagaggaagaaaccagtacatt

SEQ ID NO: 4204725 - DNA, 25 bp, Homo sapien
tacatgcccaaacataaggcagttc

SEQ ID NO: 4204726 - DNA, 25 bp, Homo sapien
cctagtattttggagttacatgccc

SEQ ID NO: 4204727 - DNA, 25 bp, Homo sapien
tgaccagtgatcaaatgcagacaac

SEQ ID NO: 4204728 - DNA, 25 bp, Homo sapien
tgagaaagccttatactacctagta

SEQ ID NO: 4204729 - DNA, 25 bp, Homo sapien
aaatgtgaggcagtgcaatggcagc

SEQ ID NO: 4204730 - DNA, 25 bp, Homo sapien
tctttgatggaatgtaacagaatcc

SEQ ID NO: 4204731 - DNA, 25 bp, Homo sapien
tttggaactaggagacagagatttc

SEQ ID NO: 4204732 - DNA, 25 bp, Homo sapien
gaagaccaactccaagatgacccat

SEQ ID NO: 4204733 - DNA, 25 bp, Homo sapien
cgttttgaacaatcgctttgctcca

SEQ ID NO: 4204734 - DNA, 25 bp, Homo sapien
catggtcacccaacgcaagtattta

SEQ ID NO: 4204735 - DNA, 25 bp, Homo sapien
atatttatgtaaggccactgggatg

SEQ ID NO: 4204736 - DNA, 25 bp, Homo sapien
tagataagataaggctgaacttgcc

SEQ ID NO: 4204737 - DNA, 25 bp, Homo sapien
tgcatgggcaacacgtatgagttcc

SEQ ID NO: 4204738 - DNA, 25 bp, Homo sapien
tcaagcagacgtttttgagccactc

SEQ ID NO: 4204739 - DNA, 25 bp, Homo sapien
tccttgatgcagagttatctgggtc

SEQ ID NO: 4204740 - DNA, 25 bp, Homo sapien
ggaggacctgtaggaagtctccttg

SEQ ID NO: 4204741 - DNA, 25 bp, Homo sapien
gacgtcatgtaggtaacaagtctcc

SEQ ID NO: 4204742 - DNA, 25 bp, Homo sapien
cagattcctctaaggtcagattcat

SEQ ID NO: 4204743 - DNA, 25 bp, Homo sapien
ttcatgttgctgtagtccctggtct

SEQ ID NO: 4204744 - DNA, 25 bp, Homo sapien
gctctcagattcctctaaggtcaga

SEQ ID NO: 4204745 - DNA, 25 bp, Homo sapien
ccctggaggtgatagggtcactcgt

SEQ ID NO: 4204746 - DNA, 25 bp, Homo sapien
gaggtgatagggtcactcgtctctc

SEQ ID NO: 4204747 - DNA, 25 bp, Homo sapien
cctggaggtgatagggtcactcgtc

SEQ ID NO: 4204748 - DNA, 25 bp, Homo sapien
gatagggtcactcgtctctctccca

SEQ ID NO: 4204749 - DNA, 25 bp, Homo sapien
gccgagtcccgtgttcacaatgttg

SEQ ID NO: 4204750 - DNA, 25 bp, Homo sapien
actgcttgaccttgccgagtcccgt

SEQ ID NO: 4204751 - DNA, 25 bp, Homo sapien
tcacaatgttgtcgaaacctgtggg

SEQ ID NO: 4204752 - DNA, 25 bp, Homo sapien
caatgttgtcgaaacctgtgggtga

SEQ ID NO: 4204753 - DNA, 25 bp, Homo sapien
ttctgataaggatgcagtcagactc

SEQ ID NO: 4204754 - DNA, 25 bp, Homo sapien
cctatttagcaagacttctgttgct

SEQ ID NO: 4204755 - DNA, 25 bp, Homo sapien
tcctatttagcaagacttctgttgc

SEQ ID NO: 4204756 - DNA, 25 bp, Homo sapien
cctctttctgataaggatgcagtca

SEQ ID NO: 4204757 - DNA, 25 bp, Homo sapien
taaggggcaaggtgaccaccagcat

SEQ ID NO: 4204758 - DNA, 25 bp, Homo sapien
ctaaggggcaaggtgaccaccagca

SEQ ID NO: 4204759 - DNA, 25 bp, Homo sapien
cataggtgggtgtctatgattccat

SEQ ID NO: 4204760 - DNA, 25 bp, Homo sapien
tatgaattattccactcattgcagc

SEQ ID NO: 4204761 - DNA, 25 bp, Homo sapien
taaacctgcctaaaaccattctgtg

SEQ ID NO: 4204762 - DNA, 25 bp, Homo sapien
catgttggtcaatcttgctcatagg

SEQ ID NO: 4204763 - DNA, 25 bp, Homo sapien
aaaagggcacaaaagattataatga

SEQ ID NO: 4204764 - DNA, 25 bp, Homo sapien
taaaccagatggcaaaagggcacaa

SEQ ID NO: 4204765 - DNA, 25 bp, Homo sapien
ttataatgaattcttggtagaccat

SEQ ID NO: 4204766 - DNA, 25 bp, Homo sapien
agattataatgaattcttggtagac

SEQ ID NO: 4204767 - DNA, 25 bp, Homo sapien
gtccactgggaatgtaccatctcct

SEQ ID NO: 4204768 - DNA, 25 bp, Homo sapien
taccaagatgtaccagactgagttt

SEQ ID NO: 4204769 - DNA, 25 bp, Homo sapien
agctacttcagactgtaccaagatg

SEQ ID NO: 4204770 - DNA, 25 bp, Homo sapien
tgctctggtgcagctacttcagact

SEQ ID NO: 4204771 - DNA, 25 bp, Homo sapien
cattcccttgaaaattagagcatgg

SEQ ID NO: 4204772 - DNA, 25 bp, Homo sapien
cagcgttcattctgaaatagccctg

SEQ ID NO: 4204773 - DNA, 25 bp, Homo sapien
gatgtcattagctgtcccttctatt

SEQ ID NO: 4204774 - DNA, 25 bp, Homo sapien
ggaaagcaattggaaccagcgttca

SEQ ID NO: 4204775 - DNA, 25 bp, Homo sapien
gagaaccagatactacccaagtctt

SEQ ID NO: 4204776 - DNA, 25 bp, Homo sapien
tgagaaccagatactacccaagtct

SEQ ID NO: 4204777 - DNA, 25 bp, Homo sapien
tccttgagcaatctggatccaagaa

SEQ ID NO: 4204778 - DNA, 25 bp, Homo sapien
tgaatgcctgtgtaatctccatcca

SEQ ID NO: 4204779 - DNA, 25 bp, Homo sapien
tccttggatctagggatacacacat

SEQ ID NO: 4204780 - DNA, 25 bp, Homo sapien
tcttgtactgtgaatgcctgtgtaa

SEQ ID NO: 4204781 - DNA, 25 bp, Homo sapien
tctgtctccttggatctagggatac

SEQ ID NO: 4204782 - DNA, 25 bp, Homo sapien
tagatagttgtaaaccagaccctgg

SEQ ID NO: 4204783 - DNA, 25 bp, Homo sapien
atagacactcttgtttccaaccaag

SEQ ID NO: 4204784 - DNA, 25 bp, Homo sapien
gtagatagttgtaaaccagaccctg

SEQ ID NO: 4204785 - DNA, 25 bp, Homo sapien
tgtagatagttgtaaaccagaccct

SEQ ID NO: 4204786 - DNA, 25 bp, Homo sapien
tggtctccactgtcatccctaatac

SEQ ID NO: 4204787 - DNA, 25 bp, Homo sapien
gcccagaagacataatagcttcttg

SEQ ID NO: 4204788 - DNA, 25 bp, Homo sapien
ccagatttgtggcccagaagacata

SEQ ID NO: 4204789 - DNA, 25 bp, Homo sapien
atccctaataccagccagatttgtg

SEQ ID NO: 4204790 - DNA, 25 bp, Homo sapien
caacttggagggcatggaagataat

SEQ ID NO: 4204791 - DNA, 25 bp, Homo sapien
tccacatgccttcctaatgtgacac

SEQ ID NO: 4204792 - DNA, 25 bp, Homo sapien
taggtaaccttggtttctggaggca

SEQ ID NO: 4204793 - DNA, 25 bp, Homo sapien
gacactctcgcatcagaagttgtag

SEQ ID NO: 4204794 - DNA, 25 bp, Homo sapien
gtcactgaccttttcctcgtgaaga

SEQ ID NO: 4204795 - DNA, 25 bp, Homo sapien
gctgggctctgatacactgtgcagg

SEQ ID NO: 4204796 - DNA, 25 bp, Homo sapien
tgcagggatgttgctgtcactgacc

SEQ ID NO: 4204797 - DNA, 25 bp, Homo sapien
tgaagatactctgctcaccccattc

SEQ ID NO: 4204798 - DNA, 25 bp, Homo sapien
tctccttagttcatttggtctctgc

SEQ ID NO: 4204799 - DNA, 25 bp, Homo sapien
tccttagttcatttggtctctgctc

SEQ ID NO: 4204800 - DNA, 25 bp, Homo sapien
ccttagttcatttggtctctgctca

SEQ ID NO: 4204801 - DNA, 25 bp, Homo sapien
cttagttcatttggtctctgctcag

SEQ ID NO: 4204802 - DNA, 25 bp, Homo sapien
tctgggtagctgtttgaggatactg

SEQ ID NO: 4204803 - DNA, 25 bp, Homo sapien
gtttgaggatactggttgtgataag

SEQ ID NO: 4204804 - DNA, 25 bp, Homo sapien
tcgttggacaatcttaaacaattct

SEQ ID NO: 4204805 - DNA, 25 bp, Homo sapien
ccgtagtaaacttcatcgttggaca

SEQ ID NO: 4204806 - DNA, 25 bp, Homo sapien
ggtggcaggcgtctgaatcccactt

SEQ ID NO: 4204807 - DNA, 25 bp, Homo sapien
gctgagatcgcggccattgctttcc

SEQ ID NO: 4204808 - DNA, 25 bp, Homo sapien
ctctatgcttagttatagttgcttg

SEQ ID NO: 4204809 - DNA, 25 bp, Homo sapien
ttaagctgcttcatgggttgagaca

SEQ ID NO: 4204810 - DNA, 25 bp, Homo sapien
gagacaaactaccagcacttcaaag

SEQ ID NO: 4204811 - DNA, 25 bp, Homo sapien
ccagcacttcaaagagctcagttct

SEQ ID NO: 4204812 - DNA, 25 bp, Homo sapien
aacaacaacaaatctgtcttgccag

SEQ ID NO: 4204813 - DNA, 25 bp, Homo sapien
gtcttgccagaaagatagtatcttc

SEQ ID NO: 4204814 - DNA, 25 bp, Homo sapien
gtttccttgtgattgttagccatta

SEQ ID NO: 4204815 - DNA, 25 bp, Homo sapien
ccataatctagaactaggatgttca

SEQ ID NO: 4204816 - DNA, 25 bp, Homo sapien
ccctgtaataccagtagcacaatgg

SEQ ID NO: 4204817 - DNA, 25 bp, Homo sapien
tcttctgaagggtgatcataagccc

SEQ ID NO: 4204818 - DNA, 25 bp, Homo sapien
ggagtgctctctaatacttattgca

SEQ ID NO: 4204819 - DNA, 25 bp, Homo sapien
caataatccgatagtatggtggtca

SEQ ID NO: 4204820 - DNA, 25 bp, Homo sapien
ttcagcattgtaacctcgcggcggg

SEQ ID NO: 4204821 - DNA, 25 bp, Homo sapien
tgtcgccagagcaaataaaccgcag

SEQ ID NO: 4204822 - DNA, 25 bp, Homo sapien
gatctggtgagactgccgccttaaa

SEQ ID NO: 4204823 - DNA, 25 bp, Homo sapien
tgcccgcgacggaaaatggaacttg

SEQ ID NO: 4204824 - DNA, 25 bp, Homo sapien
cagagaattaacctttgcgtgcaca

SEQ ID NO: 4204825 - DNA, 25 bp, Homo sapien
gagtgacgcactacaaaacgatgaa

SEQ ID NO: 4204826 - DNA, 25 bp, Homo sapien
cagcccagctaaacatgtcatgcgt

SEQ ID NO: 4204827 - DNA, 25 bp, Homo sapien
cgtaatttatgggtagcaagcagag

SEQ ID NO: 4204828 - DNA, 25 bp, Homo sapien
ccaactgcggctccacccaaagagc

SEQ ID NO: 4204829 - DNA, 25 bp, Homo sapien
caactgcggctccacccaaagagct

SEQ ID NO: 4204830 - DNA, 25 bp, Homo sapien
aactgcggctccacccaaagagctt

SEQ ID NO: 4204831 - DNA, 25 bp, Homo sapien
accaactgcggctccacccaaagag

SEQ ID NO: 4204832 - DNA, 25 bp, Homo sapien
ggaagctatgcctcatctagtggaa

SEQ ID NO: 4204833 - DNA, 25 bp, Homo sapien
gatggcaccaagctgaggcaactct

SEQ ID NO: 4204834 - DNA, 25 bp, Homo sapien
cacacgcactgacactaatggaagc

SEQ ID NO: 4204835 - DNA, 25 bp, Homo sapien
tgtttccaggacctatgccattgtg

SEQ ID NO: 4204836 - DNA, 25 bp, Homo sapien
ccaagccaacactctggtggacctt

SEQ ID NO: 4204837 - DNA, 25 bp, Homo sapien
gtggacctttccaagatgcagaatg

SEQ ID NO: 4204838 - DNA, 25 bp, Homo sapien
gggtgtcagcgtggcagtgggcacc

SEQ ID NO: 4204839 - DNA, 25 bp, Homo sapien
gaagcagattggcagcctggagtcg

SEQ ID NO: 4204840 - DNA, 25 bp, Homo sapien
tcaatgaccggagcgaagacctgga

SEQ ID NO: 4204841 - DNA, 25 bp, Homo sapien
agctcaccaagcggatcaagaatgc

SEQ ID NO: 4204842 - DNA, 25 bp, Homo sapien
aagaatgctgcagccaatgtccttc

SEQ ID NO: 4204843 - DNA, 25 bp, Homo sapien
agctatccaccagttgaggagcgtc

SEQ ID NO: 4204844 - DNA, 25 bp, Homo sapien
aagcggagaagcacgttcataactt

SEQ ID NO: 4204845 - DNA, 25 bp, Homo sapien
gagtcgaagctggagcatctcaccg

SEQ ID NO: 4204846 - DNA, 25 bp, Homo sapien
cccaatctccgatagccccattggg

SEQ ID NO: 4204847 - DNA, 25 bp, Homo sapien
aaggtccaccagagtgttggcttgg

SEQ ID NO: 4204848 - DNA, 25 bp, Homo sapien
gaaggacattggctgcagcattctt

SEQ ID NO: 4204849 - DNA, 25 bp, Homo sapien
gacgctcctcaactggtggatagct

SEQ ID NO: 4204850 - DNA, 25 bp, Homo sapien
cattctgcatcttggaaaggtccac

SEQ ID NO: 4204851 - DNA, 25 bp, Homo sapien
cgactccaggctgccaatctgcttc

SEQ ID NO: 4204852 - DNA, 25 bp, Homo sapien
cggtgagatgctccagcttcgactc

SEQ ID NO: 4204853 - DNA, 25 bp, Homo sapien
gcattcttgatccgcttggtgagct

SEQ ID NO: 4204854 - DNA, 25 bp, Homo sapien
ggtgcccactgccacgctgacaccc

SEQ ID NO: 4204855 - DNA, 25 bp, Homo sapien
aagttatgaacgtgcttctccgctt

SEQ ID NO: 4204856 - DNA, 25 bp, Homo sapien
tccaggtcttcgctccggtcattga

SEQ ID NO: 4204857 - DNA, 25 bp, Homo sapien
cccaatggggctatcggagattggg

SEQ ID NO: 4204858 - DNA, 25 bp, Homo sapien
gcaatccccctgcctcagctcccaa

SEQ ID NO: 4204859 - DNA, 25 bp, Homo sapien
cagctcccaagtaactgggattaca

SEQ ID NO: 4204860 - DNA, 25 bp, Homo sapien
caatgacctcaaaagtgtagcacca

SEQ ID NO: 4204861 - DNA, 25 bp, Homo sapien
accaatctcccttgaacacctgatt

SEQ ID NO: 4204862 - DNA, 25 bp, Homo sapien
tcaaaagtgtagcaccaatctccct

SEQ ID NO: 4204863 - DNA, 25 bp, Homo sapien
tggtcatcaatgacctcaaaagtgt

SEQ ID NO: 4204864 - DNA, 25 bp, Homo sapien
tcactaaggataggttacacaggca

SEQ ID NO: 4204865 - DNA, 25 bp, Homo sapien
taatatccacatccagtcagctggt

SEQ ID NO: 4204866 - DNA, 25 bp, Homo sapien
gagaggagaactgcctggttgacat

SEQ ID NO: 4204867 - DNA, 25 bp, Homo sapien
tacacaggcattctgagcatggact

SEQ ID NO: 4204868 - DNA, 25 bp, Homo sapien
tacgctatttgtaacccatcatcaa

SEQ ID NO: 4204869 - DNA, 25 bp, Homo sapien
tgtcataaacatgccacactcattc

SEQ ID NO: 4204870 - DNA, 25 bp, Homo sapien
gcatttgtcaaacgatacgctattt

SEQ ID NO: 4204871 - DNA, 25 bp, Homo sapien
cattcccaacagaatcatgggatgg

SEQ ID NO: 4204872 - DNA, 25 bp, Homo sapien
tcactcagaagcgacatcagaaact

SEQ ID NO: 4204873 - DNA, 25 bp, Homo sapien
tcacaggtggtaatgattttgagtc

SEQ ID NO: 4204874 - DNA, 25 bp, Homo sapien
taatgattttgagtctaaaagtaga

SEQ ID NO: 4204875 - DNA, 25 bp, Homo sapien
cagaagcgacatcagaaacttcaca

SEQ ID NO: 4204876 - DNA, 25 bp, Homo sapien
aggcttccaaagctgcagatatttt

SEQ ID NO: 4204877 - DNA, 25 bp, Homo sapien
ccctggctgtcacagcattctgcat

SEQ ID NO: 4204878 - DNA, 25 bp, Homo sapien
tattttcagctgtatcagccctggc

SEQ ID NO: 4204879 - DNA, 25 bp, Homo sapien
tttcagctgtatcagccctggctgt

SEQ ID NO: 4204880 - DNA, 25 bp, Homo sapien
tatgttttagttctgcccagcagtt

SEQ ID NO: 4204881 - DNA, 25 bp, Homo sapien
ttaaaagagcaatcatgtagcaatc

SEQ ID NO: 4204882 - DNA, 25 bp, Homo sapien
atgcaaaagctacttcactggtaaa

SEQ ID NO: 4204883 - DNA, 25 bp, Homo sapien
gcccggccaccatatacaactatta

SEQ ID NO: 4204884 - DNA, 25 bp, Homo sapien
gcagcgtgatgcacttcagaagtac

SEQ ID NO: 4204885 - DNA, 25 bp, Homo sapien
gatgatacttcttcatgagccaaaa

SEQ ID NO: 4204886 - DNA, 25 bp, Homo sapien
caagactacttcttagagcagggca

SEQ ID NO: 4204887 - DNA, 25 bp, Homo sapien
tcaatcaagcttggtggatcacgcc

SEQ ID NO: 4204888 - DNA, 25 bp, Homo sapien
caagaggacgagcatgtgggttttg

SEQ ID NO: 4204889 - DNA, 25 bp, Homo sapien
tccactgcaagaggacgagcatgtg

SEQ ID NO: 4204890 - DNA, 25 bp, Homo sapien
aatgtccatcagatgtgacttattc

SEQ ID NO: 4204891 - DNA, 25 bp, Homo sapien
tgtccatcagatgtgacttattcca

SEQ ID NO: 4204892 - DNA, 25 bp, Homo sapien
tctgggcagaaagccaatagtgtgg

SEQ ID NO: 4204893 - DNA, 25 bp, Homo sapien
gcatattgcagccagccatcgtaga

SEQ ID NO: 4204894 - DNA, 25 bp, Homo sapien
ggttgtcttatgaaaggtcgcgcct

SEQ ID NO: 4204895 - DNA, 25 bp, Homo sapien
ggccgtttccccttgtgaagcaatg

SEQ ID NO: 4204896 - DNA, 25 bp, Homo sapien
taaaagtagggcctggtatcagcct

SEQ ID NO: 4204897 - DNA, 25 bp, Homo sapien
caagcatgaaaacgtggcagaccct

SEQ ID NO: 4204898 - DNA, 25 bp, Homo sapien
ttttaacactaaagcagcctagggc

SEQ ID NO: 4204899 - DNA, 25 bp, Homo sapien
tagggcaatgccagatacttagagc

SEQ ID NO: 4204900 - DNA, 25 bp, Homo sapien
tacattccgtgtctggccgtgagca

SEQ ID NO: 4204901 - DNA, 25 bp, Homo sapien
tgaatcaaagcaggcgattactcgt

SEQ ID NO: 4204902 - DNA, 25 bp, Homo sapien
cgaattggtgtgacactaacagcca

SEQ ID NO: 4204903 - DNA, 25 bp, Homo sapien
cttggcagcttttcgaaggatgtgc

SEQ ID NO: 4204904 - DNA, 25 bp, Homo sapien
gtttggccagacttgattctactgc

SEQ ID NO: 4204905 - DNA, 25 bp, Homo sapien
tatgcatatgctaaacactcacagg

SEQ ID NO: 4204906 - DNA, 25 bp, Homo sapien
catcctcattcagctattgccatgg

SEQ ID NO: 4204907 - DNA, 25 bp, Homo sapien
tactgcttctcgtaaagttccccag

SEQ ID NO: 4204908 - DNA, 25 bp, Homo sapien
aacaaagtttgtgcctcaggtaagg

SEQ ID NO: 4204909 - DNA, 25 bp, Homo sapien
gcagttcagcaccttacttctagtt

SEQ ID NO: 4204910 - DNA, 25 bp, Homo sapien
cctcaggtaaggtgctgtagcagca

SEQ ID NO: 4204911 - DNA, 25 bp, Homo sapien
tttccataaaatgcgtggctctggc

SEQ ID NO: 4204912 - DNA, 25 bp, Homo sapien
ccaagtaggctgaaagtacccagga

SEQ ID NO: 4204913 - DNA, 25 bp, Homo sapien
tattttagtattatggtgcccacaa

SEQ ID NO: 4204914 - DNA, 25 bp, Homo sapien
caagatggatctatgagacttttac

SEQ ID NO: 4204915 - DNA, 25 bp, Homo sapien
tacatatgtagaagtgatagtgtcc

SEQ ID NO: 4204916 - DNA, 25 bp, Homo sapien
gatcatattctcgaaatctttggca

SEQ ID NO: 4204917 - DNA, 25 bp, Homo sapien
tcatattctcgaaatctttggcaaa

SEQ ID NO: 4204918 - DNA, 25 bp, Homo sapien
cctttctgttcaactctaaagatca

SEQ ID NO: 4204919 - DNA, 25 bp, Homo sapien
caactctaaagatcatattctcgaa

SEQ ID NO: 4204920 - DNA, 25 bp, Homo sapien
tgcctctcaaaggaaagggtgaaga

SEQ ID NO: 4204921 - DNA, 25 bp, Homo sapien
ttcacggaggtacaaccactgtgcc

SEQ ID NO: 4204922 - DNA, 25 bp, Homo sapien
caaaacagggttacttatggccaca

SEQ ID NO: 4204923 - DNA, 25 bp, Homo sapien
ccacagctggttaccgacaagagta

SEQ ID NO: 4204924 - DNA, 25 bp, Homo sapien
tgcagctacgagtgcaccatcaact

SEQ ID NO: 4204925 - DNA, 25 bp, Homo sapien
cagctacgagtgcaccatcaactgt

SEQ ID NO: 4204926 - DNA, 25 bp, Homo sapien
gcagctacgagtgcaccatcaactg

SEQ ID NO: 4204927 - DNA, 25 bp, Homo sapien
caagactgaatacaagaggactgct

SEQ ID NO: 4204928 - DNA, 25 bp, Homo sapien
gctattaacgtaagtcacctgggag

SEQ ID NO: 4204929 - DNA, 25 bp, Homo sapien
aatagtagattacacaggccacctc

SEQ ID NO: 4204930 - DNA, 25 bp, Homo sapien
gatttaagcaatacacaggacacat

SEQ ID NO: 4204931 - DNA, 25 bp, Homo sapien
tcagcatgaaaggtaacggattagc

SEQ ID NO: 4204932 - DNA, 25 bp, Homo sapien
tatcatcagtgctaaatcaaaggcc

SEQ ID NO: 4204933 - DNA, 25 bp, Homo sapien
tttcacctgaactgggcatgtgtca

SEQ ID NO: 4204934 - DNA, 25 bp, Homo sapien
actaggtccctaggtgtctgtgcta

SEQ ID NO: 4204935 - DNA, 25 bp, Homo sapien
taacaccagtaactatctcgatgag

SEQ ID NO: 4204936 - DNA, 25 bp, Homo sapien
aaacaattaagagtacaggctgtga

SEQ ID NO: 4204937 - DNA, 25 bp, Homo sapien
gaaatcagattacgaggctccaagt

SEQ ID NO: 4204938 - DNA, 25 bp, Homo sapien
tcgaatccttagaatatgcatatgg

SEQ ID NO: 4204939 - DNA, 25 bp, Homo sapien
tgataagataacacttctatggagc

SEQ ID NO: 4204940 - DNA, 25 bp, Homo sapien
gaactataactcaagcatcctctgg

SEQ ID NO: 4204941 - DNA, 25 bp, Homo sapien
ccacagaaatagtttgacaaaagca

SEQ ID NO: 4204942 - DNA, 25 bp, Homo sapien
cagggttgacccgatgacttaatca

SEQ ID NO: 4204943 - DNA, 25 bp, Homo sapien
cctgtggctatgtgaagtcttttac

SEQ ID NO: 4204944 - DNA, 25 bp, Homo sapien
tggcctgtggctatgtgaagtcttt

SEQ ID NO: 4204945 - DNA, 25 bp, Homo sapien
agttcttttattcccacttgtgatg

SEQ ID NO: 4204946 - DNA, 25 bp, Homo sapien
gctgccacagtctggtggcctgtgg

SEQ ID NO: 4204947 - DNA, 25 bp, Homo sapien
cagtaatagggagtttcagagaagt

SEQ ID NO: 4204948 - DNA, 25 bp, Homo sapien
gcatctgctaaccaaataccaactg

SEQ ID NO: 4204949 - DNA, 25 bp, Homo sapien
ggcaccatttttggcaactgcgaaa

SEQ ID NO: 4204950 - DNA, 25 bp, Homo sapien
tccaggaaagccttacggcaccatt

SEQ ID NO: 4204951 - DNA, 25 bp, Homo sapien
tggagataactgtggagttatttca

SEQ ID NO: 4204952 - DNA, 25 bp, Homo sapien
ttggagataactgtggagttatttc

SEQ ID NO: 4204953 - DNA, 25 bp, Homo sapien
ggttacaatgtatcctttatcgtct

SEQ ID NO: 4204954 - DNA, 25 bp, Homo sapien
gaatcatttgtttgtgggtttacag

SEQ ID NO: 4204955 - DNA, 25 bp, Homo sapien
aacagaacttgatcgatgaagaatc

SEQ ID NO: 4204956 - DNA, 25 bp, Homo sapien
cgtctttttgaacatctcgttgaac

SEQ ID NO: 4204957 - DNA, 25 bp, Homo sapien
caaggcctcagaacagtcaagaaag

SEQ ID NO: 4204958 - DNA, 25 bp, Homo sapien
atctgtcaggtgtgtcaatgatgcc

SEQ ID NO: 4204959 - DNA, 25 bp, Homo sapien
cacttggactcgaccttaatagcag

SEQ ID NO: 4204960 - DNA, 25 bp, Homo sapien
tagaactttaatgccaccgtaacca

SEQ ID NO: 4204961 - DNA, 25 bp, Homo sapien
ggcttgatctactgtctcttgagca

SEQ ID NO: 4204962 - DNA, 25 bp, Homo sapien
cacaaaggcagaattactgaggaaa

SEQ ID NO: 4204963 - DNA, 25 bp, Homo sapien
gaaggaagacctctacactcatctc

SEQ ID NO: 4204964 - DNA, 25 bp, Homo sapien
gattagaaaattagacctgcttctc

SEQ ID NO: 4204965 - DNA, 25 bp, Homo sapien
tgtgtcagtcacaggatcctttgga

SEQ ID NO: 4204966 - DNA, 25 bp, Homo sapien
taacataaccctagattaacagtgc

SEQ ID NO: 4204967 - DNA, 25 bp, Homo sapien
tgataaggtactccagcaaagcaaa

SEQ ID NO: 4204968 - DNA, 25 bp, Homo sapien
gacattgctgtctgaccgaaaccaa

SEQ ID NO: 4204969 - DNA, 25 bp, Homo sapien
catttcctattcagttatgcccagg

SEQ ID NO: 4204970 - DNA, 25 bp, Homo sapien
aatacctaagaacactcagagtggc

SEQ ID NO: 4204971 - DNA, 25 bp, Homo sapien
cagcaaattatgtgtaagcaagcca

SEQ ID NO: 4204972 - DNA, 25 bp, Homo sapien
tgtcatgctaatataaccccagagg

SEQ ID NO: 4204973 - DNA, 25 bp, Homo sapien
ccagagaatgcagctcctgaaattg

SEQ ID NO: 4204974 - DNA, 25 bp, Homo sapien
caaagatgaaatctggacccagaga

SEQ ID NO: 4204975 - DNA, 25 bp, Homo sapien
tactgacacttgaaaactgatgaag

SEQ ID NO: 4204976 - DNA, 25 bp, Homo sapien
tggttttatgcccactctctactga

SEQ ID NO: 4204977 - DNA, 25 bp, Homo sapien
gaagattatacagttccagagctgg

SEQ ID NO: 4204978 - DNA, 25 bp, Homo sapien
tgtagactcattaagtgccaagcac

SEQ ID NO: 4204979 - DNA, 25 bp, Homo sapien
gtactgctcccattttggaaacaag

SEQ ID NO: 4204980 - DNA, 25 bp, Homo sapien
caatagctaacacacactgtagact

SEQ ID NO: 4204981 - DNA, 25 bp, Homo sapien
tgccatgaaaaggatccagaaggtt

SEQ ID NO: 4204982 - DNA, 25 bp, Homo sapien
ccatgaaaaggatccagaaggttcc

SEQ ID NO: 4204983 - DNA, 25 bp, Homo sapien
ggtgccatgaaaaggatccagaagg

SEQ ID NO: 4204984 - DNA, 25 bp, Homo sapien
catgaaaaggatccagaaggttccc

SEQ ID NO: 4204985 - DNA, 25 bp, Homo sapien
gcatccattagccaactccatgctt

SEQ ID NO: 4204986 - DNA, 25 bp, Homo sapien
tccattagccaactccatgctttat

SEQ ID NO: 4204987 - DNA, 25 bp, Homo sapien
ttagccaactccatgctttatcttc

SEQ ID NO: 4204988 - DNA, 25 bp, Homo sapien
cttccatagataagatacagcttct

SEQ ID NO: 4204989 - DNA, 25 bp, Homo sapien
tatttccagcacctagtttgcctag

SEQ ID NO: 4204990 - DNA, 25 bp, Homo sapien
taactgttgttaagcatcgcaaggg

SEQ ID NO: 4204991 - DNA, 25 bp, Homo sapien
taaacacttactgtccggtagtgcc

SEQ ID NO: 4204992 - DNA, 25 bp, Homo sapien
cggtagtgccacatgtggaaaggca

SEQ ID NO: 4204993 - DNA, 25 bp, Homo sapien
gacaattttgctttgatgagctgga

SEQ ID NO: 4204994 - DNA, 25 bp, Homo sapien
caagtcagaggttcagtataaactc

SEQ ID NO: 4204995 - DNA, 25 bp, Homo sapien
gaactcaccttaaggagcccactga

SEQ ID NO: 4204996 - DNA, 25 bp, Homo sapien
gatgataatagcttgttaaccacca

SEQ ID NO: 4204997 - DNA, 25 bp, Homo sapien
tcaaacttatcactttctgttatga

SEQ ID NO: 4204998 - DNA, 25 bp, Homo sapien
ttatgatcagatgaggcagacggaa

SEQ ID NO: 4204999 - DNA, 25 bp, Homo sapien
tgagaaaacggaaagacagagagaa

SEQ ID NO: 4205000 - DNA, 25 bp, Homo sapien
atcccagggtgctgatccgcaaggc

SEQ ID NO: 4205001 - DNA, 25 bp, Homo sapien
tcacaagggtttagaggcagccatc

SEQ ID NO: 4205002 - DNA, 25 bp, Homo sapien
taccactgagtgtccaggctaggaa

SEQ ID NO: 4205003 - DNA, 25 bp, Homo sapien
tagagggcaacatggtacccagcac

SEQ ID NO: 4205004 - DNA, 25 bp, Homo sapien
cactgagccacagccaaagcttggg

SEQ ID NO: 4205005 - DNA, 25 bp, Homo sapien
tactaagcagtaacttttgacaaag

SEQ ID NO: 4205006 - DNA, 25 bp, Homo sapien
taccaactaagatttgaactgctct

SEQ ID NO: 4205007 - DNA, 25 bp, Homo sapien
cagaggcaaataaaacatcggtatt

SEQ ID NO: 4205008 - DNA, 25 bp, Homo sapien
aaaggacagtaatgcatccctagca

SEQ ID NO: 4205009 - DNA, 25 bp, Homo sapien
gagcagtttatacagctgtctctct

SEQ ID NO: 4205010 - DNA, 25 bp, Homo sapien
acaaccagtaaacggcagaactagg

SEQ ID NO: 4205011 - DNA, 25 bp, Homo sapien
tgtacctttgcagttctacttggaa

SEQ ID NO: 4205012 - DNA, 25 bp, Homo sapien
agggtttgagcctgtgttatctggc

SEQ ID NO: 4205013 - DNA, 25 bp, Homo sapien
caatttggtaatgcagactgggaca

SEQ ID NO: 4205014 - DNA, 25 bp, Homo sapien
tgataatggtggcttcacatggccc

SEQ ID NO: 4205015 - DNA, 25 bp, Homo sapien
gacaatgtcactatacccactgagg

SEQ ID NO: 4205016 - DNA, 25 bp, Homo sapien
gagacatgagagctttccaacccaa

SEQ ID NO: 4205017 - DNA, 25 bp, Homo sapien
gaaacagcttttgaggttcacctag

SEQ ID NO: 4205018 - DNA, 25 bp, Homo sapien
cacctaggtagctaattagtcatca

SEQ ID NO: 4205019 - DNA, 25 bp, Homo sapien
taggcagggctatgaaacttcttcc

SEQ ID NO: 4205020 - DNA, 25 bp, Homo sapien
gatatatccacttctgaactctaag

SEQ ID NO: 4205021 - DNA, 25 bp, Homo sapien
caggagagtctacactaaagagtgg

SEQ ID NO: 4205022 - DNA, 25 bp, Homo sapien
gcagccctagagacgtgagccagga

SEQ ID NO: 4205023 - DNA, 25 bp, Homo sapien
agacagaaatgtgagacagggcgat

SEQ ID NO: 4205024 - DNA, 25 bp, Homo sapien
taaagagtggttcaaggcagcccta

SEQ ID NO: 4205025 - DNA, 25 bp, Homo sapien
aagagaccccaaatacagaattaag

SEQ ID NO: 4205026 - DNA, 25 bp, Homo sapien
taaaaccccaatgtaagataaagca

SEQ ID NO: 4205027 - DNA, 25 bp, Homo sapien
cctcagtctcctaaggtacgtaata

SEQ ID NO: 4205028 - DNA, 25 bp, Homo sapien
tctgtatgatccaaactcaagtacg

SEQ ID NO: 4205029 - DNA, 25 bp, Homo sapien
tatcttgtgctgcttccgcatgcta

SEQ ID NO: 4205030 - DNA, 25 bp, Homo sapien
caaattaaactggacgcaggcactg

SEQ ID NO: 4205031 - DNA, 25 bp, Homo sapien
tagtaaggtataaggccacgctggc

SEQ ID NO: 4205032 - DNA, 25 bp, Homo sapien
tactgacttggcacaacacatgttg

SEQ ID NO: 4205033 - DNA, 25 bp, Homo sapien
tatccactaatgagccaattctggc

SEQ ID NO: 4205034 - DNA, 25 bp, Homo sapien
taaacataaaagatgtaggcaccgc

SEQ ID NO: 4205035 - DNA, 25 bp, Homo sapien
ggcagatatgtttcaactcccacac

SEQ ID NO: 4205036 - DNA, 25 bp, Homo sapien
gattaatatatcacctgagtggcag

SEQ ID NO: 4205037 - DNA, 25 bp, Homo sapien
taaactacgtctaatgtattgttcc

SEQ ID NO: 4205038 - DNA, 25 bp, Homo sapien
ctcaatcacagaattatgaacactg

SEQ ID NO: 4205039 - DNA, 25 bp, Homo sapien
tcctaattggctgtgatattgtttc

SEQ ID NO: 4205040 - DNA, 25 bp, Homo sapien
tgtctaatattctgcaaactatccc

SEQ ID NO: 4205041 - DNA, 25 bp, Homo sapien
cagcactattccctatagtaaagac

SEQ ID NO: 4205042 - DNA, 25 bp, Homo sapien
tgctcatcaccactgttcattagag

SEQ ID NO: 4205043 - DNA, 25 bp, Homo sapien
attgcagcactattccctatagtaa

SEQ ID NO: 4205044 - DNA, 25 bp, Homo sapien
aagaagacatatacacagccaaaag

SEQ ID NO: 4205045 - DNA, 25 bp, Homo sapien
acagtggatttctctgcggaaacac

SEQ ID NO: 4205046 - DNA, 25 bp, Homo sapien
cagtggatttctctgcggaaacact

SEQ ID NO: 4205047 - DNA, 25 bp, Homo sapien
acctggaaggccagcgacagaactg

SEQ ID NO: 4205048 - DNA, 25 bp, Homo sapien
ctgggacagaggacctggcggaaga

SEQ ID NO: 4205049 - DNA, 25 bp, Homo sapien
cttctgggaagttcgaattgggcag

SEQ ID NO: 4205050 - DNA, 25 bp, Homo sapien
aagtggatcagtggatcccaccgcc

SEQ ID NO: 4205051 - DNA, 25 bp, Homo sapien
ctggagtgtagcagagcaatcacga

SEQ ID NO: 4205052 - DNA, 25 bp, Homo sapien
tgtgaagaagacctaataccaatca

SEQ ID NO: 4205053 - DNA, 25 bp, Homo sapien
tacaggcacacatcgaagacctggc

SEQ ID NO: 4205054 - DNA, 25 bp, Homo sapien
gaagacctaataccaatcactatgt

SEQ ID NO: 4205055 - DNA, 25 bp, Homo sapien
tactctgcagtctttagggcaaggg

SEQ ID NO: 4205056 - DNA, 25 bp, Homo sapien
tatctcggcctaagtcaccagagga

SEQ ID NO: 4205057 - DNA, 25 bp, Homo sapien
tcaagtatcctagtccattaacagt

SEQ ID NO: 4205058 - DNA, 25 bp, Homo sapien
taagctgggtctttccacaaagtgc

SEQ ID NO: 4205059 - DNA, 25 bp, Homo sapien
caactgggatgtcagcactttacta

SEQ ID NO: 4205060 - DNA, 25 bp, Homo sapien
tcccaccaaaagagaattggaatgc

SEQ ID NO: 4205061 - DNA, 25 bp, Homo sapien
tacttctcagtgcttccaactggga

SEQ ID NO: 4205062 - DNA, 25 bp, Homo sapien
tgggtatgggatagacagattcagc

SEQ ID NO: 4205063 - DNA, 25 bp, Homo sapien
caagaaacagtagctcctagagtag

SEQ ID NO: 4205064 - DNA, 25 bp, Homo sapien
tactgtaaagcttagtcactggtcc

SEQ ID NO: 4205065 - DNA, 25 bp, Homo sapien
caagccgtaccttcacttgggaaat

SEQ ID NO: 4205066 - DNA, 25 bp, Homo sapien
tcctcaggccaaagtaagaatcaac

SEQ ID NO: 4205067 - DNA, 25 bp, Homo sapien
tttgtcagagtttgccagctcacca

SEQ ID NO: 4205068 - DNA, 25 bp, Homo sapien
ctttgtcagagtttgccagctcacc

SEQ ID NO: 4205069 - DNA, 25 bp, Homo sapien
ttgtcagagtttgccagctcaccat

SEQ ID NO: 4205070 - DNA, 25 bp, Homo sapien
cttgcaacccctggttcccatcact

SEQ ID NO: 4205071 - DNA, 25 bp, Homo sapien
atcactcaggtcaatttctccagag

SEQ ID NO: 4205072 - DNA, 25 bp, Homo sapien
atttctccagagatgcttgaaagca

SEQ ID NO: 4205073 - DNA, 25 bp, Homo sapien
tggttcccatcactcaggtcaattt

SEQ ID NO: 4205074 - DNA, 25 bp, Homo sapien
tgcccacagtctatatcaggccaag

SEQ ID NO: 4205075 - DNA, 25 bp, Homo sapien
actctgctcgggtgcattaagtgag

SEQ ID NO: 4205076 - DNA, 25 bp, Homo sapien
tcaggccaagaaaaccccataagtg

SEQ ID NO: 4205077 - DNA, 25 bp, Homo sapien
aagcctggatctgctaaacactctg

SEQ ID NO: 4205078 - DNA, 25 bp, Homo sapien
agacaaattggctcatgagcccaga

SEQ ID NO: 4205079 - DNA, 25 bp, Homo sapien
tgagcccagaacatgtttctattgg

SEQ ID NO: 4205080 - DNA, 25 bp, Homo sapien
tttctattggatggactgcaacagc

SEQ ID NO: 4205081 - DNA, 25 bp, Homo sapien
cagcagcgaggggaaagacaaattg

SEQ ID NO: 4205082 - DNA, 25 bp, Homo sapien
cagtgaatggtttgccgcacctatc

SEQ ID NO: 4205083 - DNA, 25 bp, Homo sapien
tgtgtttagtatcatagcacccttg

SEQ ID NO: 4205084 - DNA, 25 bp, Homo sapien
tctttcaggtaacaccagcaacaaa

SEQ ID NO: 4205085 - DNA, 25 bp, Homo sapien
tctttgctattgtagtaacactaat

SEQ ID NO: 4205086 - DNA, 25 bp, Homo sapien
tcatctgcctgggatatcataacaa

SEQ ID NO: 4205087 - DNA, 25 bp, Homo sapien
gaggacagcatcaccctttgttgag

SEQ ID NO: 4205088 - DNA, 25 bp, Homo sapien
gttgagagccaaccgccactttaca

SEQ ID NO: 4205089 - DNA, 25 bp, Homo sapien
gacttgggttagcttacaagagcac

SEQ ID NO: 4205090 - DNA, 25 bp, Homo sapien
ttagtaagactacaggccatcctca

SEQ ID NO: 4205091 - DNA, 25 bp, Homo sapien
aatggcacctgtcgtaataggcagc

SEQ ID NO: 4205092 - DNA, 25 bp, Homo sapien
gactagcaggccactctatagagcc

SEQ ID NO: 4205093 - DNA, 25 bp, Homo sapien
tcccttaggctccattcaaggaggc

SEQ ID NO: 4205094 - DNA, 25 bp, Homo sapien
cttgatttgactgtgttgagccctt

SEQ ID NO: 4205095 - DNA, 25 bp, Homo sapien
ctttctatgctcagcttgatttgac

SEQ ID NO: 4205096 - DNA, 25 bp, Homo sapien
ctccaactgcgtttttaaatgtggg

SEQ ID NO: 4205097 - DNA, 25 bp, Homo sapien
gctagttgcatttgctgggccaaca

SEQ ID NO: 4205098 - DNA, 25 bp, Homo sapien
tctgctgaatcaagttattgcgtcc

SEQ ID NO: 4205099 - DNA, 25 bp, Homo sapien
ggccaacatggccatgttcttctgc

SEQ ID NO: 4205100 - DNA, 25 bp, Homo sapien
cctaacactaattcttataataatc

SEQ ID NO: 4205101 - DNA, 25 bp, Homo sapien
taaatgtagaattactatatcacaa

SEQ ID NO: 4205102 - DNA, 25 bp, Homo sapien
tcacaattaacgtcaaagcaccttt

SEQ ID NO: 4205103 - DNA, 25 bp, Homo sapien
tttcaacctaacactaattcttata

SEQ ID NO: 4205104 - DNA, 25 bp, Homo sapien
aaccaaggaccctgagttggccagt

SEQ ID NO: 4205105 - DNA, 25 bp, Homo sapien
gtgtgtctccaattaggtgcttcca

SEQ ID NO: 4205106 - DNA, 25 bp, Homo sapien
ttagcttcctaagttggtgtcttgc

SEQ ID NO: 4205107 - DNA, 25 bp, Homo sapien
cacccagctaggttagagatcttaa

SEQ ID NO: 4205108 - DNA, 25 bp, Homo sapien
tgaggtgacaccctaccatgcttct

SEQ ID NO: 4205109 - DNA, 25 bp, Homo sapien
ttaaacactataggccttccatttg

SEQ ID NO: 4205110 - DNA, 25 bp, Homo sapien
atcttgcccgggcaattccagaagt

SEQ ID NO: 4205111 - DNA, 25 bp, Homo sapien
tggacagcaccatccgtcacagcag

SEQ ID NO: 4205112 - DNA, 25 bp, Homo sapien
tgcctgggtatcactagcagaggct

SEQ ID NO: 4205113 - DNA, 25 bp, Homo sapien
tttgcctgggtatcactagcagagg

SEQ ID NO: 4205114 - DNA, 25 bp, Homo sapien
gcctgggtatcactagcagaggctg

SEQ ID NO: 4205115 - DNA, 25 bp, Homo sapien
ttgcctgggtatcactagcagaggc

SEQ ID NO: 4205116 - DNA, 25 bp, Homo sapien
acttatcagcggctttgtttacact

SEQ ID NO: 4205117 - DNA, 25 bp, Homo sapien
tgaattttctgcacccagtttaaac

SEQ ID NO: 4205118 - DNA, 25 bp, Homo sapien
gtaatagcaaatgccttcccccaac

SEQ ID NO: 4205119 - DNA, 25 bp, Homo sapien
cttagtcccgggttgacttcagact

SEQ ID NO: 4205120 - DNA, 25 bp, Homo sapien
ctcacaaaatgagtgatggaggagt

SEQ ID NO: 4205121 - DNA, 25 bp, Homo sapien
cctcacaaaatgagtgatggaggag

SEQ ID NO: 4205122 - DNA, 25 bp, Homo sapien
ctggttgataggctattataattac

SEQ ID NO: 4205123 - DNA, 25 bp, Homo sapien
ttttctggttgataggctattataa

SEQ ID NO: 4205124 - DNA, 25 bp, Homo sapien
ttcatatctctcgtaaattatatcc

SEQ ID NO: 4205125 - DNA, 25 bp, Homo sapien
ggtccttcatatctctcgtaaatta

SEQ ID NO: 4205126 - DNA, 25 bp, Homo sapien
catatctctcgtaaattatatccat

SEQ ID NO: 4205127 - DNA, 25 bp, Homo sapien
gaggtccttcatatctctcgtaaat

SEQ ID NO: 4205128 - DNA, 25 bp, Homo sapien
tgtattatatacagaatcctttccc

SEQ ID NO: 4205129 - DNA, 25 bp, Homo sapien
ccatgtattatatacagaatccttt

SEQ ID NO: 4205130 - DNA, 25 bp, Homo sapien
tcgtataaggtgcaagaaaggggtc

SEQ ID NO: 4205131 - DNA, 25 bp, Homo sapien
gtagtgccttggtcttctttttatg

SEQ ID NO: 4205132 - DNA, 25 bp, Homo sapien
taaagtggttttcacacaatgaacc

SEQ ID NO: 4205133 - DNA, 25 bp, Homo sapien
gccttctgaagtgggtattagcccc

SEQ ID NO: 4205134 - DNA, 25 bp, Homo sapien
ggatgtgaccacaggtatgtctgat

SEQ ID NO: 4205135 - DNA, 25 bp, Homo sapien
tgaatcaaaggcctaggatgtgacc

SEQ ID NO: 4205136 - DNA, 25 bp, Homo sapien
ggattccctgtaaccaacattggtg

SEQ ID NO: 4205137 - DNA, 25 bp, Homo sapien
tgcaggtacagggacacccggattc

SEQ ID NO: 4205138 - DNA, 25 bp, Homo sapien
tcccagatagggattaaaggcggct

SEQ ID NO: 4205139 - DNA, 25 bp, Homo sapien
cattggtgcagtcggcaagatctct

SEQ ID NO: 4205140 - DNA, 25 bp, Homo sapien
aagtatttcactatgccatgcacag

SEQ ID NO: 4205141 - DNA, 25 bp, Homo sapien
ttttaatacaagcaaacgcgaactg

SEQ ID NO: 4205142 - DNA, 25 bp, Homo sapien
tatcagaaaccaagtcgtttgccca

SEQ ID NO: 4205143 - DNA, 25 bp, Homo sapien
tgtctggaatacgtgtcccctggtt

SEQ ID NO: 4205144 - DNA, 25 bp, Homo sapien
tttctcctcggttgcaattgccacg

SEQ ID NO: 4205145 - DNA, 25 bp, Homo sapien
agtatttgcacttttcccgagagca

SEQ ID NO: 4205146 - DNA, 25 bp, Homo sapien
aattgccacgttggtactctcgaca

SEQ ID NO: 4205147 - DNA, 25 bp, Homo sapien
tcagcaggatgagcaaaccgacaat

SEQ ID NO: 4205148 - DNA, 25 bp, Homo sapien
aaaaaacaaatcatcggaatgccat

SEQ ID NO: 4205149 - DNA, 25 bp, Homo sapien
aaatcatcggaatgccatatacaac

SEQ ID NO: 4205150 - DNA, 25 bp, Homo sapien
acaacgaataacaagactaagcatg

SEQ ID NO: 4205151 - DNA, 25 bp, Homo sapien
gccatatacaacgaataacaagact

SEQ ID NO: 4205152 - DNA, 25 bp, Homo sapien
cagtggggttcaagcgcattaacat

SEQ ID NO: 4205153 - DNA, 25 bp, Homo sapien
agcacatgatggcaatgggccagtg

SEQ ID NO: 4205154 - DNA, 25 bp, Homo sapien
gggttcaagcgcattaacataaaca

SEQ ID NO: 4205155 - DNA, 25 bp, Homo sapien
ttaattagcaggcagcgagcacatg

SEQ ID NO: 4205156 - DNA, 25 bp, Homo sapien
cgaggggtcgcttcagtgatttgac

SEQ ID NO: 4205157 - DNA, 25 bp, Homo sapien
caggtcaaaggttgcctcgaggggt

SEQ ID NO: 4205158 - DNA, 25 bp, Homo sapien
ttgcctcgaggggtcgcttcagtga

SEQ ID NO: 4205159 - DNA, 25 bp, Homo sapien
tcagtgatttgacagccgactgagt

SEQ ID NO: 4205160 - DNA, 25 bp, Homo sapien
aatgggggaagtacagcttgaggaa

SEQ ID NO: 4205161 - DNA, 25 bp, Homo sapien
tggtaatgggggaagtacagcttga

SEQ ID NO: 4205162 - DNA, 25 bp, Homo sapien
ctttggtaatgggggaagtacagct

SEQ ID NO: 4205163 - DNA, 25 bp, Homo sapien
gtaatgggggaagtacagcttgagg

SEQ ID NO: 4205164 - DNA, 25 bp, Homo sapien
agtgttaaagactgcggtggcaccg

SEQ ID NO: 4205165 - DNA, 25 bp, Homo sapien
taactgcatgttggctagagcctgt

SEQ ID NO: 4205166 - DNA, 25 bp, Homo sapien
tggcaccgttggttttttcaagagc

SEQ ID NO: 4205167 - DNA, 25 bp, Homo sapien
gagcctgttggtattggaaaatacc

SEQ ID NO: 4205168 - DNA, 25 bp, Homo sapien
cagtaggactctctgtagatcatca

SEQ ID NO: 4205169 - DNA, 25 bp, Homo sapien
gactctctgtagatcatcagattca

SEQ ID NO: 4205170 - DNA, 25 bp, Homo sapien
tctgctctaacagtaggactctctg

SEQ ID NO: 4205171 - DNA, 25 bp, Homo sapien
ggggtgtggtttatctgctctaaca

SEQ ID NO: 4205172 - DNA, 25 bp, Homo sapien
aaccacatgagatacctcagataag

SEQ ID NO: 4205173 - DNA, 25 bp, Homo sapien
gcttgacagacatatataagtgttg

SEQ ID NO: 4205174 - DNA, 25 bp, Homo sapien
taactctatggaataatgaaggcaa

SEQ ID NO: 4205175 - DNA, 25 bp, Homo sapien
aaataccactgatctttaatccaca

SEQ ID NO: 4205176 - DNA, 25 bp, Homo sapien
gggcagcgaaaatctagggacacag

SEQ ID NO: 4205177 - DNA, 25 bp, Homo sapien
taagagctctagaacgcatagttgt

SEQ ID NO: 4205178 - DNA, 25 bp, Homo sapien
tttgttccaatatgggcaaactgca

SEQ ID NO: 4205179 - DNA, 25 bp, Homo sapien
gattgatgccaataagagccctttt

SEQ ID NO: 4205180 - DNA, 25 bp, Homo sapien
gacagcaatgagtagaacgaggagt

SEQ ID NO: 4205181 - DNA, 25 bp, Homo sapien
cagcaatgagtagaacgaggagttc

SEQ ID NO: 4205182 - DNA, 25 bp, Homo sapien
agacagcaatgagtagaacgaggag

SEQ ID NO: 4205183 - DNA, 25 bp, Homo sapien
acagcaatgagtagaacgaggagtt

SEQ ID NO: 4205184 - DNA, 25 bp, Homo sapien
tctagcatctttggctctatccaca

SEQ ID NO: 4205185 - DNA, 25 bp, Homo sapien
atccacagacaaaaagctattctag

SEQ ID NO: 4205186 - DNA, 25 bp, Homo sapien
tattctagggagacactagtgtcac

SEQ ID NO: 4205187 - DNA, 25 bp, Homo sapien
gcttaacctagcacagagagacaag

SEQ ID NO: 4205188 - DNA, 25 bp, Homo sapien
tacaaccaaccctatgaggcatata

SEQ ID NO: 4205189 - DNA, 25 bp, Homo sapien
tacaaatgtctagagtatctgggaa

SEQ ID NO: 4205190 - DNA, 25 bp, Homo sapien
gacctagcaacactgtatgtcaggg

SEQ ID NO: 4205191 - DNA, 25 bp, Homo sapien
tactgtgttaggttgtgcgggtttc

SEQ ID NO: 4205192 - DNA, 25 bp, Homo sapien
gataatgtaggcaaagcactcagtg

SEQ ID NO: 4205193 - DNA, 25 bp, Homo sapien
ggctggcttgtcactgaaccctgat

SEQ ID NO: 4205194 - DNA, 25 bp, Homo sapien
tattgagagactaaccaagtcagcc

SEQ ID NO: 4205195 - DNA, 25 bp, Homo sapien
tatctgaaacaacctggcctaaggc

SEQ ID NO: 4205196 - DNA, 25 bp, Homo sapien
ccacaggtagctgggtaggtagcct

SEQ ID NO: 4205197 - DNA, 25 bp, Homo sapien
cctggagggcatagacaaggaagcc

SEQ ID NO: 4205198 - DNA, 25 bp, Homo sapien
gactgtacaggacctcacattgagg

SEQ ID NO: 4205199 - DNA, 25 bp, Homo sapien
tcctcaagattgaagtggcaggcag

SEQ ID NO: 4205200 - DNA, 25 bp, Homo sapien
taatttgagacagtagagcaagcaa

SEQ ID NO: 4205201 - DNA, 25 bp, Homo sapien
ggacataatgctgtaggacccactt

SEQ ID NO: 4205202 - DNA, 25 bp, Homo sapien
tactagccagggtgcaataactcac

SEQ ID NO: 4205203 - DNA, 25 bp, Homo sapien
cataattaagtctgcacatgctgaa

SEQ ID NO: 4205204 - DNA, 25 bp, Homo sapien
cctgttcattgtagcagcaaccata

SEQ ID NO: 4205205 - DNA, 25 bp, Homo sapien
tattatgggaacagtggcatgtaac

SEQ ID NO: 4205206 - DNA, 25 bp, Homo sapien
gaattaaaacatcccatcacacgtg

SEQ ID NO: 4205207 - DNA, 25 bp, Homo sapien
aatctgattactaaccatctggtcg

SEQ ID NO: 4205208 - DNA, 25 bp, Homo sapien
tagcgggtgtcatgcacaatattga

SEQ ID NO: 4205209 - DNA, 25 bp, Homo sapien
gcgggtgtcatgcacaatattgagc

SEQ ID NO: 4205210 - DNA, 25 bp, Homo sapien
tgtagcgggtgtcatgcacaatatt

SEQ ID NO: 4205211 - DNA, 25 bp, Homo sapien
cacttgtagcgggtgtcatgcacaa

SEQ ID NO: 4205212 - DNA, 25 bp, Homo sapien
ggctgtgaggtacaccataggttta

SEQ ID NO: 4205213 - DNA, 25 bp, Homo sapien
tgtgagtccatgtcaattaaacaga

SEQ ID NO: 4205214 - DNA, 25 bp, Homo sapien
gtccaatcaaaatccaccaaaggtg

SEQ ID NO: 4205215 - DNA, 25 bp, Homo sapien
tggacttgcccaatagatataagtt

SEQ ID NO: 4205216 - DNA, 25 bp, Homo sapien
agcaatatggaaaccatggcaacat

SEQ ID NO: 4205217 - DNA, 25 bp, Homo sapien
tagcaatatggaaaccatggcaaca

SEQ ID NO: 4205218 - DNA, 25 bp, Homo sapien
gaaaatcatataagcgaacatacag

SEQ ID NO: 4205219 - DNA, 25 bp, Homo sapien
catataagcgaacatacagaagagt

SEQ ID NO: 4205220 - DNA, 25 bp, Homo sapien
ggctggcgtagcaccgtgcaccatg

SEQ ID NO: 4205221 - DNA, 25 bp, Homo sapien
cacttgtggcagatgttgttgctgc

SEQ ID NO: 4205222 - DNA, 25 bp, Homo sapien
tgttgcagcgaagggaacacttgtg

SEQ ID NO: 4205223 - DNA, 25 bp, Homo sapien
cggacacagtggctggcgtagcacc

SEQ ID NO: 4205224 - DNA, 25 bp, Homo sapien
aagaaacaaagctgtaaattagcaa

SEQ ID NO: 4205225 - DNA, 25 bp, Homo sapien
ttaagaaacaaagctgtaaattagc

SEQ ID NO: 4205226 - DNA, 25 bp, Homo sapien
gaaacaaagctgtaaattagcaaac

SEQ ID NO: 4205227 - DNA, 25 bp, Homo sapien
taagaaacaaagctgtaaattagca

SEQ ID NO: 4205228 - DNA, 25 bp, Homo sapien
tgcaaaaagtaaagtgtcccctaca

SEQ ID NO: 4205229 - DNA, 25 bp, Homo sapien
cccaggtggccaagggcatgttgaa

SEQ ID NO: 4205230 - DNA, 25 bp, Homo sapien
gattatgcatgaaatggtcacagca

SEQ ID NO: 4205231 - DNA, 25 bp, Homo sapien
ccaatcgatgcagatgaagggccag

SEQ ID NO: 4205232 - DNA, 25 bp, Homo sapien
ggacaggatgttgcacccaacagtg

SEQ ID NO: 4205233 - DNA, 25 bp, Homo sapien
aggacaggatgttgcacccaacagt

SEQ ID NO: 4205234 - DNA, 25 bp, Homo sapien
tgaatgatccatgcaagcaagccaa

SEQ ID NO: 4205235 - DNA, 25 bp, Homo sapien
gaaattaatgcctgctaacctgaga

SEQ ID NO: 4205236 - DNA, 25 bp, Homo sapien
catactacaatccacagtctggcgt

SEQ ID NO: 4205237 - DNA, 25 bp, Homo sapien
gaagccctttttgttggcctacaca

SEQ ID NO: 4205238 - DNA, 25 bp, Homo sapien
gatgttcggcagatattatgggtat

SEQ ID NO: 4205239 - DNA, 25 bp, Homo sapien
ctagtcagatgttcggcagatatta

SEQ ID NO: 4205240 - DNA, 25 bp, Homo sapien
tcagatgttcggcagatattatggg

SEQ ID NO: 4205241 - DNA, 25 bp, Homo sapien
tagtcagatgttcggcagatattat

SEQ ID NO: 4205242 - DNA, 25 bp, Homo sapien
ctacatctgggtaacatacttgtgg

SEQ ID NO: 4205243 - DNA, 25 bp, Homo sapien
catttgtttacggatcctgttggga

SEQ ID NO: 4205244 - DNA, 25 bp, Homo sapien
gcatgggctttgactttgtccagct

SEQ ID NO: 4205245 - DNA, 25 bp, Homo sapien
taaatgttgcaactcctcatgaaga

SEQ ID NO: 4205246 - DNA, 25 bp, Homo sapien
cagccatcatcgtttcctgacttgg

SEQ ID NO: 4205247 - DNA, 25 bp, Homo sapien
caacagtgtgcagtggatttccgga

SEQ ID NO: 4205248 - DNA, 25 bp, Homo sapien
tacaatatggctaatgacctcgtcc

SEQ ID NO: 4205249 - DNA, 25 bp, Homo sapien
tgcagcataatcaaccctcaagagt

SEQ ID NO: 4205250 - DNA, 25 bp, Homo sapien
tataactaccagtgacctggcccct

SEQ ID NO: 4205251 - DNA, 25 bp, Homo sapien
aatcctggcaaactacaagctgtcc

SEQ ID NO: 4205252 - DNA, 25 bp, Homo sapien
tcaccttaatggtagaagtacctgc

SEQ ID NO: 4205253 - DNA, 25 bp, Homo sapien
ggatggcgtatctttccagctgaaa

SEQ ID NO: 4205254 - DNA, 25 bp, Homo sapien
ggccccatggagtttttgtcagtca

SEQ ID NO: 4205255 - DNA, 25 bp, Homo sapien
tcaacctttctagatactgtgtctg

SEQ ID NO: 4205256 - DNA, 25 bp, Homo sapien
ctttctagatactgtgtctgcattg

SEQ ID NO: 4205257 - DNA, 25 bp, Homo sapien
tcaatcaacctttctagatactgtg

SEQ ID NO: 4205258 - DNA, 25 bp, Homo sapien
aacctttctagatactgtgtctgca

SEQ ID NO: 4205259 - DNA, 25 bp, Homo sapien
agcagcaaccagaataatccatctg

SEQ ID NO: 4205260 - DNA, 25 bp, Homo sapien
gcagcaaccagaataatccatctgt

SEQ ID NO: 4205261 - DNA, 25 bp, Homo sapien
tttctgtgcctttacacaatgtctt

SEQ ID NO: 4205262 - DNA, 25 bp, Homo sapien
tctgacgggtgggagaaagctccat

SEQ ID NO: 4205263 - DNA, 25 bp, Homo sapien
aacgtctgacgggtgggagaaagct

SEQ ID NO: 4205264 - DNA, 25 bp, Homo sapien
cgtctgacgggtgggagaaagctcc

SEQ ID NO: 4205265 - DNA, 25 bp, Homo sapien
tgcaagttactatggcccctatctg

SEQ ID NO: 4205266 - DNA, 25 bp, Homo sapien
catcagtttgcaagttactatggcc

SEQ ID NO: 4205267 - DNA, 25 bp, Homo sapien
gcaatgaaggtgtcttctggtcctt

SEQ ID NO: 4205268 - DNA, 25 bp, Homo sapien
aaacattggcaatgaaggtgtcttc

SEQ ID NO: 4205269 - DNA, 25 bp, Homo sapien
ggcctgcaatggcatcttgtttgct

SEQ ID NO: 4205270 - DNA, 25 bp, Homo sapien
tattaaggccagtgtatttctttgc

SEQ ID NO: 4205271 - DNA, 25 bp, Homo sapien
taaggccagtgtatttctttgcatt

SEQ ID NO: 4205272 - DNA, 25 bp, Homo sapien
tgtagagaaggcctgcaatggcatc

SEQ ID NO: 4205273 - DNA, 25 bp, Homo sapien
gcatctgcaacgttcttagaggaag

SEQ ID NO: 4205274 - DNA, 25 bp, Homo sapien
catctgcaacgttcttagaggaagg

SEQ ID NO: 4205275 - DNA, 25 bp, Homo sapien
aagcatctgcaacgttcttagagga

SEQ ID NO: 4205276 - DNA, 25 bp, Homo sapien
tcaagcatctgcaacgttcttagag

SEQ ID NO: 4205277 - DNA, 25 bp, Homo sapien
aggacagtttgccaagctttctcca

SEQ ID NO: 4205278 - DNA, 25 bp, Homo sapien
agtttgccaagctttctccatctcc

SEQ ID NO: 4205279 - DNA, 25 bp, Homo sapien
gacagtttgccaagctttctccatc

SEQ ID NO: 4205280 - DNA, 25 bp, Homo sapien
acagtttgccaagctttctccatct

SEQ ID NO: 4205281 - DNA, 25 bp, Homo sapien
gtattaatttatactgatcaagaac

SEQ ID NO: 4205282 - DNA, 25 bp, Homo sapien
gaacgttcactgtattctctttcca

SEQ ID NO: 4205283 - DNA, 25 bp, Homo sapien
tgccaaggagttagaacgttcactg

SEQ ID NO: 4205284 - DNA, 25 bp, Homo sapien
tagtcaagattcaattgtattaatt

SEQ ID NO: 4205285 - DNA, 25 bp, Homo sapien
gggctgcttaaggtttgagcaactg

SEQ ID NO: 4205286 - DNA, 25 bp, Homo sapien
gcttaaggtttgagcaactgccgta

SEQ ID NO: 4205287 - DNA, 25 bp, Homo sapien
ggtttgagcaactgccgtagaaaat

SEQ ID NO: 4205288 - DNA, 25 bp, Homo sapien
gagcaactgccgtagaaaatcttca

SEQ ID NO: 4205289 - DNA, 25 bp, Homo sapien
tatttgatcccgaattaaagtccac

SEQ ID NO: 4205290 - DNA, 25 bp, Homo sapien
caggaaactcgagataatgccaatt

SEQ ID NO: 4205291 - DNA, 25 bp, Homo sapien
taaagtccaccccaactttgctgat

SEQ ID NO: 4205292 - DNA, 25 bp, Homo sapien
tgtacttccggtgatcaaagcccag

SEQ ID NO: 4205293 - DNA, 25 bp, Homo sapien
tcttctaaggtttgctgtatgcagc

SEQ ID NO: 4205294 - DNA, 25 bp, Homo sapien
gatgcaagtttcacacataccacag

SEQ ID NO: 4205295 - DNA, 25 bp, Homo sapien
tagcatattttgcactctgctgcag

SEQ ID NO: 4205296 - DNA, 25 bp, Homo sapien
cataccacagcaaagatatggctgg

SEQ ID NO: 4205297 - DNA, 25 bp, Homo sapien
ggttagaatcagatgtatctacctg

SEQ ID NO: 4205298 - DNA, 25 bp, Homo sapien
ctggttagaatcagatgtatctacc

SEQ ID NO: 4205299 - DNA, 25 bp, Homo sapien
tagaatcagatgtatctacctgttt

SEQ ID NO: 4205300 - DNA, 25 bp, Homo sapien
gaatcagatgtatctacctgtttct

SEQ ID NO: 4205301 - DNA, 25 bp, Homo sapien
ctgctctgtccattgaaagaaaaca

SEQ ID NO: 4205302 - DNA, 25 bp, Homo sapien
cttactgctctgtccattgaaagaa

SEQ ID NO: 4205303 - DNA, 25 bp, Homo sapien
tactgctctgtccattgaaagaaaa

SEQ ID NO: 4205304 - DNA, 25 bp, Homo sapien
cattgaaagaaaacagcctatattt

SEQ ID NO: 4205305 - DNA, 25 bp, Homo sapien
taatagccctccttaaggacaccat

SEQ ID NO: 4205306 - DNA, 25 bp, Homo sapien
gaccattgtcatctttagctgtaaa

SEQ ID NO: 4205307 - DNA, 25 bp, Homo sapien
ccttctctattctgaccattgtcat

SEQ ID NO: 4205308 - DNA, 25 bp, Homo sapien
tagctgtaaagttgtagccaacacc

SEQ ID NO: 4205309 - DNA, 25 bp, Homo sapien
tttatgggaagtacatgggataccc

SEQ ID NO: 4205310 - DNA, 25 bp, Homo sapien
tatgggaagtacatgggataccctt

SEQ ID NO: 4205311 - DNA, 25 bp, Homo sapien
gaagtacatgggatacccttgtatc

SEQ ID NO: 4205312 - DNA, 25 bp, Homo sapien
tgggaagtacatgggatacccttgt

SEQ ID NO: 4205313 - DNA, 25 bp, Homo sapien
cgacccaacaatcattgaggagcaa

SEQ ID NO: 4205314 - DNA, 25 bp, Homo sapien
ttagcaccgcttttggtgtcccaga

SEQ ID NO: 4205315 - DNA, 25 bp, Homo sapien
attgatttcattttcgacccaacaa

SEQ ID NO: 4205316 - DNA, 25 bp, Homo sapien
tgtgattttatgttagattgtctat

SEQ ID NO: 4205317 - DNA, 25 bp, Homo sapien
ttggaattgtttcattgagattggt

SEQ ID NO: 4205318 - DNA, 25 bp, Homo sapien
gaattgtttcattgagattggtacc

SEQ ID NO: 4205319 - DNA, 25 bp, Homo sapien
attgtttcattgagattggtaccaa

SEQ ID NO: 4205320 - DNA, 25 bp, Homo sapien
tgtttcattgagattggtaccaatt

SEQ ID NO: 4205321 - DNA, 25 bp, Homo sapien
gactgaaaacttatgaggagggtga

SEQ ID NO: 4205322 - DNA, 25 bp, Homo sapien
tatgctctaacaacagatggtatat

SEQ ID NO: 4205323 - DNA, 25 bp, Homo sapien
gtgcccctcaacttgtaacttccag

SEQ ID NO: 4205324 - DNA, 25 bp, Homo sapien
aaataaatgcgtttagtgcccctca

SEQ ID NO: 4205325 - DNA, 25 bp, Homo sapien
gctgaggcacctaatgactgttact

SEQ ID NO: 4205326 - DNA, 25 bp, Homo sapien
tatgtgacctccaatctcaagatca

SEQ ID NO: 4205327 - DNA, 25 bp, Homo sapien
taggacttgcatagggctggatccc

SEQ ID NO: 4205328 - DNA, 25 bp, Homo sapien
cacttactatatagggtgaggttcc

SEQ ID NO: 4205329 - DNA, 25 bp, Homo sapien
gatttaggcttgtaaataagcttga

SEQ ID NO: 4205330 - DNA, 25 bp, Homo sapien
tgacagagagtccagcagatttaat

SEQ ID NO: 4205331 - DNA, 25 bp, Homo sapien
atgtctgctctggagagatgctcat

SEQ ID NO: 4205332 - DNA, 25 bp, Homo sapien
gagtgaagccagatttaggcttgta

SEQ ID NO: 4205333 - DNA, 25 bp, Homo sapien
tcaatctcgatagtcaccaagaaac

SEQ ID NO: 4205334 - DNA, 25 bp, Homo sapien
caatctcgatagtcaccaagaaaca

SEQ ID NO: 4205335 - DNA, 25 bp, Homo sapien
ccgtactccacaccatggtatgttg

SEQ ID NO: 4205336 - DNA, 25 bp, Homo sapien
cccgtactccacaccatggtatgtt

SEQ ID NO: 4205337 - DNA, 25 bp, Homo sapien
tcttttgctctctgcactcacatct

SEQ ID NO: 4205338 - DNA, 25 bp, Homo sapien
tctgcactcacatctcctccaggtc

SEQ ID NO: 4205339 - DNA, 25 bp, Homo sapien
tctgtcttttgctctctgcactcac

SEQ ID NO: 4205340 - DNA, 25 bp, Homo sapien
tgtcttttgctctctgcactcacat

SEQ ID NO: 4205341 - DNA, 25 bp, Homo sapien
cagctctgaaactctgaaccaggag

SEQ ID NO: 4205342 - DNA, 25 bp, Homo sapien
ccagctctgaaactctgaaccagga

SEQ ID NO: 4205343 - DNA, 25 bp, Homo sapien
gctctgaaactctgaaccaggagac

SEQ ID NO: 4205344 - DNA, 25 bp, Homo sapien
agctctgaaactctgaaccaggaga

SEQ ID NO: 4205345 - DNA, 25 bp, Homo sapien
cgagtccgcactccgcggggaggcg

SEQ ID NO: 4205346 - DNA, 25 bp, Homo sapien
cagtgggaagcaggaggcgtcttct

SEQ ID NO: 4205347 - DNA, 25 bp, Homo sapien
tgcctccgccgagctcgcccagcag

SEQ ID NO: 4205348 - DNA, 25 bp, Homo sapien
tagagggtgggcggagtttgggcac

SEQ ID NO: 4205349 - DNA, 25 bp, Homo sapien
aggcccagctctgtccggagtgccg

SEQ ID NO: 4205350 - DNA, 25 bp, Homo sapien
ttctgcagcgcgtcccgttcggcgt

SEQ ID NO: 4205351 - DNA, 25 bp, Homo sapien
gccgcagactcgtgcgcttctgcag

SEQ ID NO: 4205352 - DNA, 25 bp, Homo sapien
tcctggcagccatcggagcgcgcgt

SEQ ID NO: 4205353 - DNA, 25 bp, Homo sapien
ctcctccctaccttagaaacgtgca

SEQ ID NO: 4205354 - DNA, 25 bp, Homo sapien
tagaaacgtgcagctcagtttcggg

SEQ ID NO: 4205355 - DNA, 25 bp, Homo sapien
cctccttggctcaaagatcaactta

SEQ ID NO: 4205356 - DNA, 25 bp, Homo sapien
gtcaagggaaactcgctctgcaggg

SEQ ID NO: 4205357 - DNA, 25 bp, Homo sapien
gcggataactttccgactgcgcttt

SEQ ID NO: 4205358 - DNA, 25 bp, Homo sapien
aactttccgactgcgctttcccgag

SEQ ID NO: 4205359 - DNA, 25 bp, Homo sapien
cgcagggaaccgccgcggataactt

SEQ ID NO: 4205360 - DNA, 25 bp, Homo sapien
accgccgcggataactttccgactg

SEQ ID NO: 4205361 - DNA, 25 bp, Homo sapien
gaactgggctatcgggcaagccagc

SEQ ID NO: 4205362 - DNA, 25 bp, Homo sapien
gttcgccgcgggccatgaaatccgc

SEQ ID NO: 4205363 - DNA, 25 bp, Homo sapien
catcggaaaagccagcgagcggaag

SEQ ID NO: 4205364 - DNA, 25 bp, Homo sapien
caggggcgcagcaagcatcggaaaa

SEQ ID NO: 4205365 - DNA, 25 bp, Homo sapien
tcttctttttgagccggcccaggga

SEQ ID NO: 4205366 - DNA, 25 bp, Homo sapien
tcagcacgtacaagaagtcggccag

SEQ ID NO: 4205367 - DNA, 25 bp, Homo sapien
tgaacatgtacacggagatgccgct

SEQ ID NO: 4205368 - DNA, 25 bp, Homo sapien
taccaagatgtagacagccggcagg

SEQ ID NO: 4205369 - DNA, 25 bp, Homo sapien
caaacccaaacaagctaagtgtgga

SEQ ID NO: 4205370 - DNA, 25 bp, Homo sapien
tctgttaagcatcctaccatattac

SEQ ID NO: 4205371 - DNA, 25 bp, Homo sapien
ccatattacaacagagaggtgtttg

SEQ ID NO: 4205372 - DNA, 25 bp, Homo sapien
caagctaagtgtggatgtgggcatt

SEQ ID NO: 4205373 - DNA, 25 bp, Homo sapien
catttcaaggactagacatgcagca

SEQ ID NO: 4205374 - DNA, 25 bp, Homo sapien
taccagtacgataatatatgcaggc

SEQ ID NO: 4205375 - DNA, 25 bp, Homo sapien
tatcacaagatgtctaagagagctc

SEQ ID NO: 4205376 - DNA, 25 bp, Homo sapien
ctatgccttgtggatgactgtcaac

SEQ ID NO: 4205377 - DNA, 25 bp, Homo sapien
aacagtcacatagctggctgagcgg

SEQ ID NO: 4205378 - DNA, 25 bp, Homo sapien
gctgagcatcctgagacctaaaaga

SEQ ID NO: 4205379 - DNA, 25 bp, Homo sapien
tgtagacaatacagaccccatttgg

SEQ ID NO: 4205380 - DNA, 25 bp, Homo sapien
cattaggctacaagttcaagtctgg

SEQ ID NO: 4205381 - DNA, 25 bp, Homo sapien
cagttttaactgtccatggtaagta

SEQ ID NO: 4205382 - DNA, 25 bp, Homo sapien
caattatgaagctctgctcgtacta

SEQ ID NO: 4205383 - DNA, 25 bp, Homo sapien
aagtacagttctagtgaccacaatt

SEQ ID NO: 4205384 - DNA, 25 bp, Homo sapien
cagatacaaagttggctgccatgcc

SEQ ID NO: 4205385 - DNA, 25 bp, Homo sapien
gatcatctacgacaatcccatcctg

SEQ ID NO: 4205386 - DNA, 25 bp, Homo sapien
cagtcctggatcatctacgacaatc

SEQ ID NO: 4205387 - DNA, 25 bp, Homo sapien
atctacgacaatcccatcctgtctg

SEQ ID NO: 4205388 - DNA, 25 bp, Homo sapien
tcctggatcatctacgacaatccca

SEQ ID NO: 4205389 - DNA, 25 bp, Homo sapien
ttattgcctactgcaatgaatgcaa

SEQ ID NO: 4205390 - DNA, 25 bp, Homo sapien
cctttacagtgtggttttattctgc

SEQ ID NO: 4205391 - DNA, 25 bp, Homo sapien
gcctcgttatacttactttctttca

SEQ ID NO: 4205392 - DNA, 25 bp, Homo sapien
gtggttttattctgcctcgttatac

SEQ ID NO: 4205393 - DNA, 25 bp, Homo sapien
actgacaaatgtagatagacacctg

SEQ ID NO: 4205394 - DNA, 25 bp, Homo sapien
gtcactgcagccataatacgaaatg

SEQ ID NO: 4205395 - DNA, 25 bp, Homo sapien
gttttgcagtcagtccatcatctcc

SEQ ID NO: 4205396 - DNA, 25 bp, Homo sapien
ggaattcccttatgcagttttgcag

SEQ ID NO: 4205397 - DNA, 25 bp, Homo sapien
ttgccactttactcaaaagggattc

SEQ ID NO: 4205398 - DNA, 25 bp, Homo sapien
tcactttcgaatatatcctgtcttg

SEQ ID NO: 4205399 - DNA, 25 bp, Homo sapien
cgaatatatcctgtcttgagtgtct

SEQ ID NO: 4205400 - DNA, 25 bp, Homo sapien
ctcaaaagggattcctgggcacatt

SEQ ID NO: 4205401 - DNA, 25 bp, Homo sapien
ttaaccctaatctgacttcagtgaa

SEQ ID NO: 4205402 - DNA, 25 bp, Homo sapien
aagaaacctgtctgcacactttttg

SEQ ID NO: 4205403 - DNA, 25 bp, Homo sapien
gatgtaaactttaaccctaatctga

SEQ ID NO: 4205404 - DNA, 25 bp, Homo sapien
ttctgctcttcagatgtaaacttta

SEQ ID NO: 4205405 - DNA, 25 bp, Homo sapien
gcctggcctggagctgtcatgataa

SEQ ID NO: 4205406 - DNA, 25 bp, Homo sapien
cagtaggtcataggaagtttccagc

SEQ ID NO: 4205407 - DNA, 25 bp, Homo sapien
caacagctgcagtgtcagtaggtca

SEQ ID NO: 4205408 - DNA, 25 bp, Homo sapien
ggctctactttcatataactggcag

SEQ ID NO: 4205409 - DNA, 25 bp, Homo sapien
gccccgccttttgattgaagctgct

SEQ ID NO: 4205410 - DNA, 25 bp, Homo sapien
aagccccgccttttgattgaagctg

SEQ ID NO: 4205411 - DNA, 25 bp, Homo sapien
cccgccttttgattgaagctgctcc

SEQ ID NO: 4205412 - DNA, 25 bp, Homo sapien
agccccgccttttgattgaagctgc

SEQ ID NO: 4205413 - DNA, 25 bp, Homo sapien
ctagattggtggaattcaaatccat

SEQ ID NO: 4205414 - DNA, 25 bp, Homo sapien
aatccatgaaaatttagttaacagc

SEQ ID NO: 4205415 - DNA, 25 bp, Homo sapien
gattggtggaattcaaatccatgaa

SEQ ID NO: 4205416 - DNA, 25 bp, Homo sapien
tccatgaaaatttagttaacagcta

SEQ ID NO: 4205417 - DNA, 25 bp, Homo sapien
gctcttgaattcacttgccactgga

SEQ ID NO: 4205418 - DNA, 25 bp, Homo sapien
gctgttggctgttttatggttcttc

SEQ ID NO: 4205419 - DNA, 25 bp, Homo sapien
cacttgccactggagtgggtaaaac

SEQ ID NO: 4205420 - DNA, 25 bp, Homo sapien
actgccccacggcactttcgagtga

SEQ ID NO: 4205421 - DNA, 25 bp, Homo sapien
caaactgatgttcgcttagatatgc

SEQ ID NO: 4205422 - DNA, 25 bp, Homo sapien
gatggatgtcacactattgttgact

SEQ ID NO: 4205423 - DNA, 25 bp, Homo sapien
tttgctctgtcccttacccgaggag

SEQ ID NO: 4205424 - DNA, 25 bp, Homo sapien
aattcaattctagcttgtacaaaag

SEQ ID NO: 4205425 - DNA, 25 bp, Homo sapien
tctgtctgtggaaccatcatcttcc

SEQ ID NO: 4205426 - DNA, 25 bp, Homo sapien
tcttccgaggaggtggcctggtgct

SEQ ID NO: 4205427 - DNA, 25 bp, Homo sapien
ggtggcctggtgctcaagagtggtc

SEQ ID NO: 4205428 - DNA, 25 bp, Homo sapien
tgtggaaccatcatcttccgaggag

SEQ ID NO: 4205429 - DNA, 25 bp, Homo sapien
tctgaaaggaagtgaccctccacca

SEQ ID NO: 4205430 - DNA, 25 bp, Homo sapien
ctgaaaggaagtgaccctccaccac

SEQ ID NO: 4205431 - DNA, 25 bp, Homo sapien
gatctgaaaggaagtgaccctccac

SEQ ID NO: 4205432 - DNA, 25 bp, Homo sapien
atctgaaaggaagtgaccctccacc

SEQ ID NO: 4205433 - DNA, 25 bp, Homo sapien
ttctctcgatggagactacttgcca

SEQ ID NO: 4205434 - DNA, 25 bp, Homo sapien
gactacttgccatgatgagacccat

SEQ ID NO: 4205435 - DNA, 25 bp, Homo sapien
attcctggttctctcgatggagact

SEQ ID NO: 4205436 - DNA, 25 bp, Homo sapien
gatggagactacttgccatgatgag

SEQ ID NO: 4205437 - DNA, 25 bp, Homo sapien
cctccacatgattcagttgaggtga

SEQ ID NO: 4205438 - DNA, 25 bp, Homo sapien
ttccaccctccacatgattcagttg

SEQ ID NO: 4205439 - DNA, 25 bp, Homo sapien
tccaccctccacatgattcagttga

SEQ ID NO: 4205440 - DNA, 25 bp, Homo sapien
caccctccacatgattcagttgagg

SEQ ID NO: 4205441 - DNA, 25 bp, Homo sapien
ctgaacagggaaaagtggatgcaca

SEQ ID NO: 4205442 - DNA, 25 bp, Homo sapien
cagaaggggcaaagggcaattttat

SEQ ID NO: 4205443 - DNA, 25 bp, Homo sapien
aacagggaaaagtggatgcacagaa

SEQ ID NO: 4205444 - DNA, 25 bp, Homo sapien
gcacagaaggggcaaagggcaattt

SEQ ID NO: 4205445 - DNA, 25 bp, Homo sapien
aataagagcaataagtgccatagtt

SEQ ID NO: 4205446 - DNA, 25 bp, Homo sapien
cacaaaaataagagcaataagtgcc

SEQ ID NO: 4205447 - DNA, 25 bp, Homo sapien
caaaaataagagcaataagtgccat

SEQ ID NO: 4205448 - DNA, 25 bp, Homo sapien
aaaataagagcaataagtgccatag

SEQ ID NO: 4205449 - DNA, 25 bp, Homo sapien
tccacgctggttcttccatcagtgg

SEQ ID NO: 4205450 - DNA, 25 bp, Homo sapien
taaaagcttgttgccaaatgaatga

SEQ ID NO: 4205451 - DNA, 25 bp, Homo sapien
tgaatgaagatctccaaagaaatca

SEQ ID NO: 4205452 - DNA, 25 bp, Homo sapien
tagactctaagctccatgggtctcc

SEQ ID NO: 4205453 - DNA, 25 bp, Homo sapien
cgaacagccggtggaggaaggagac

SEQ ID NO: 4205454 - DNA, 25 bp, Homo sapien
gaacagccggtggaggaaggagaca

SEQ ID NO: 4205455 - DNA, 25 bp, Homo sapien
tgctggggtgggtggaatgagacag

SEQ ID NO: 4205456 - DNA, 25 bp, Homo sapien
agctgctggggtgggtggaatgaga

SEQ ID NO: 4205457 - DNA, 25 bp, Homo sapien
gcagctgctggggtgggtggaatga

SEQ ID NO: 4205458 - DNA, 25 bp, Homo sapien
ctgctggggtgggtggaatgagaca

SEQ ID NO: 4205459 - DNA, 25 bp, Homo sapien
gaatcaaggcataagttacacagct

SEQ ID NO: 4205460 - DNA, 25 bp, Homo sapien
gcagtactaatgaatcaaggcataa

SEQ ID NO: 4205461 - DNA, 25 bp, Homo sapien
ctaatgaatcaaggcataagttaca

SEQ ID NO: 4205462 - DNA, 25 bp, Homo sapien
atgcagtactaatgaatcaaggcat

SEQ ID NO: 4205463 - DNA, 25 bp, Homo sapien
ttcttctgacactaatctcagcttc

SEQ ID NO: 4205464 - DNA, 25 bp, Homo sapien
gtacttttcttctgacactaatctc

SEQ ID NO: 4205465 - DNA, 25 bp, Homo sapien
ctttggttgtacttttcttctgaca

SEQ ID NO: 4205466 - DNA, 25 bp, Homo sapien
ggttgtacttttcttctgacactaa

SEQ ID NO: 4205467 - DNA, 25 bp, Homo sapien
cttcctctcatttgtattttcttct

SEQ ID NO: 4205468 - DNA, 25 bp, Homo sapien
tcttccacttcttctcatgtttctc

SEQ ID NO: 4205469 - DNA, 25 bp, Homo sapien
tgtttctcttttccatatttctgca

SEQ ID NO: 4205470 - DNA, 25 bp, Homo sapien
catgtttctcttttccatatttctg

SEQ ID NO: 4205471 - DNA, 25 bp, Homo sapien
tgcttgccacgactctttcaacact

SEQ ID NO: 4205472 - DNA, 25 bp, Homo sapien
tgggcgcgaggtgcagcggcgtgca

SEQ ID NO: 4205473 - DNA, 25 bp, Homo sapien
ggcgtgcagcctttggtcggtccgg

SEQ ID NO: 4205474 - DNA, 25 bp, Homo sapien
ttcacactgcttgccacgactcttt

SEQ ID NO: 4205475 - DNA, 25 bp, Homo sapien
catggtggcggggatgacagccgtg

SEQ ID NO: 4205476 - DNA, 25 bp, Homo sapien
aggcatggtggcggggatgacagcc

SEQ ID NO: 4205477 - DNA, 25 bp, Homo sapien
ggcatggtggcggggatgacagccg

SEQ ID NO: 4205478 - DNA, 25 bp, Homo sapien
gcatggtggcggggatgacagccgt

SEQ ID NO: 4205479 - DNA, 25 bp, Homo sapien
agctttctgtgcctattctctttgg

SEQ ID NO: 4205480 - DNA, 25 bp, Homo sapien
tctttggcatctccattctctgcaa

SEQ ID NO: 4205481 - DNA, 25 bp, Homo sapien
cagctttctgtgcctattctctttg

SEQ ID NO: 4205482 - DNA, 25 bp, Homo sapien
ttctctgcaagtttattcccctcct

SEQ ID NO: 4205483 - DNA, 25 bp, Homo sapien
gtacacagttatcaaaaatacacac

SEQ ID NO: 4205484 - DNA, 25 bp, Homo sapien
gaagtacacagttatcaaaaataca

SEQ ID NO: 4205485 - DNA, 25 bp, Homo sapien
tcaccagaagtacacagttatcaaa

SEQ ID NO: 4205486 - DNA, 25 bp, Homo sapien
agaagtacacagttatcaaaaatac

SEQ ID NO: 4205487 - DNA, 25 bp, Homo sapien
aggaaattaagtctatgatgaaaga

SEQ ID NO: 4205488 - DNA, 25 bp, Homo sapien
acactggtaaccaataactgggagt

SEQ ID NO: 4205489 - DNA, 25 bp, Homo sapien
agacctctgcattcaaaattcctgg

SEQ ID NO: 4205490 - DNA, 25 bp, Homo sapien
gatggaagaaaattgtagacctctg

SEQ ID NO: 4205491 - DNA, 25 bp, Homo sapien
cagaagtagcctgtttagaaaatga

SEQ ID NO: 4205492 - DNA, 25 bp, Homo sapien
tgtttctcagaagtagcctgtttag

SEQ ID NO: 4205493 - DNA, 25 bp, Homo sapien
actccagggatgacttaatagactg

SEQ ID NO: 4205494 - DNA, 25 bp, Homo sapien
tcttattaagggctgtgccacagac

SEQ ID NO: 4205495 - DNA, 25 bp, Homo sapien
caactttttgtacagcaaactgtct

SEQ ID NO: 4205496 - DNA, 25 bp, Homo sapien
gcatctttatcttgtgatgcattgg

SEQ ID NO: 4205497 - DNA, 25 bp, Homo sapien
tggagtaggctgtggtcttgccaac

SEQ ID NO: 4205498 - DNA, 25 bp, Homo sapien
tctgaccgactctgtgcactgcagc

SEQ ID NO: 4205499 - DNA, 25 bp, Homo sapien
caactcccgttatcaaaggcccaag

SEQ ID NO: 4205500 - DNA, 25 bp, Homo sapien
gctgtaggaagcatgcaggccgctt

SEQ ID NO: 4205501 - DNA, 25 bp, Homo sapien
ctctactgggcgagggcttcctact

SEQ ID NO: 4205502 - DNA, 25 bp, Homo sapien
cctctactgggcgagggcttcctac

SEQ ID NO: 4205503 - DNA, 25 bp, Homo sapien
tcccacagcctctactgggcgaggg

SEQ ID NO: 4205504 - DNA, 25 bp, Homo sapien
acagcctctactgggcgagggcttc

SEQ ID NO: 4205505 - DNA, 25 bp, Homo sapien
cgtggcatgagtccccgcggaacgt

SEQ ID NO: 4205506 - DNA, 25 bp, Homo sapien
cgcggaacgtgcgcccaccgccgcg

SEQ ID NO: 4205507 - DNA, 25 bp, Homo sapien
gcgcgtggcatgagtccccgcggaa

SEQ ID NO: 4205508 - DNA, 25 bp, Homo sapien
cggaacgtgcgcccaccgccgcggc

SEQ ID NO: 4205509 - DNA, 25 bp, Homo sapien
acggctggagctcctagctgcggca

SEQ ID NO: 4205510 - DNA, 25 bp, Homo sapien
tcagctacgcaggaaaaacccagga

SEQ ID NO: 4205511 - DNA, 25 bp, Homo sapien
gcggcgaaccgagaggacaatgccc

SEQ ID NO: 4205512 - DNA, 25 bp, Homo sapien
gcttggcggctggacttctcttccc

SEQ ID NO: 4205513 - DNA, 25 bp, Homo sapien
ggctccgtcagcgctctcgccgcgc

SEQ ID NO: 4205514 - DNA, 25 bp, Homo sapien
gctccgtcagcgctctcgccgcgcc

SEQ ID NO: 4205515 - DNA, 25 bp, Homo sapien
cgtcggggctgcgcgccggggaagg

SEQ ID NO: 4205516 - DNA, 25 bp, Homo sapien
gccgcgcctgccgcggccccgtcgg

SEQ ID NO: 4205517 - DNA, 25 bp, Homo sapien
ctcaatctccttgcggtaaaagtct

SEQ ID NO: 4205518 - DNA, 25 bp, Homo sapien
ttcgatggtcgggtcgtacttctcg

SEQ ID NO: 4205519 - DNA, 25 bp, Homo sapien
actgcacggtgagcgcggacttgcc

SEQ ID NO: 4205520 - DNA, 25 bp, Homo sapien
acgaactgcacggtgagcgcggact

SEQ ID NO: 4205521 - DNA, 25 bp, Homo sapien
ttttggccgacgtctccatgaaggg

SEQ ID NO: 4205522 - DNA, 25 bp, Homo sapien
agcagcagccctcatcgccgttggg

SEQ ID NO: 4205523 - DNA, 25 bp, Homo sapien
ggctgcgccgcgtagttcatctgcc

SEQ ID NO: 4205524 - DNA, 25 bp, Homo sapien
gatctcggcaaatagctcgtctacc

SEQ ID NO: 4205525 - DNA, 25 bp, Homo sapien
aagtggtctccaatctcaaagcaag

SEQ ID NO: 4205526 - DNA, 25 bp, Homo sapien
tgggtgtcaagctgccgatactgcg

SEQ ID NO: 4205527 - DNA, 25 bp, Homo sapien
accagagtatcggatgggcaggacc

SEQ ID NO: 4205528 - DNA, 25 bp, Homo sapien
gaaacgtacatgctgcaaagagcca

SEQ ID NO: 4205529 - DNA, 25 bp, Homo sapien
ggaagttcacaggttggcaccggct

SEQ ID NO: 4205530 - DNA, 25 bp, Homo sapien
taatcagatggtaatggccataccc

SEQ ID NO: 4205531 - DNA, 25 bp, Homo sapien
tctggaggaacaccctacaacaggt

SEQ ID NO: 4205532 - DNA, 25 bp, Homo sapien
ggttactttcccagatctaaggcaa

SEQ ID NO: 4205533 - DNA, 25 bp, Homo sapien
gacagtacttgacatgacttcagca

SEQ ID NO: 4205534 - DNA, 25 bp, Homo sapien
tcctagactataaagaggtcctgca

SEQ ID NO: 4205535 - DNA, 25 bp, Homo sapien
tgggcggaggtgattaacgcaccca

SEQ ID NO: 4205536 - DNA, 25 bp, Homo sapien
tgcaagtgactaaatcctgggcgga

SEQ ID NO: 4205537 - DNA, 25 bp, Homo sapien
cacctggaagtctggctaagaaact

SEQ ID NO: 4205538 - DNA, 25 bp, Homo sapien
tagacagcactccaaaatgtgtgac

SEQ ID NO: 4205539 - DNA, 25 bp, Homo sapien
tactagaatatgacccaaaagaggg

SEQ ID NO: 4205540 - DNA, 25 bp, Homo sapien
tgaaaattgagaccctacccgagac

SEQ ID NO: 4205541 - DNA, 25 bp, Homo sapien
ggaagacatagctccaaagacaatc

SEQ ID NO: 4205542 - DNA, 25 bp, Homo sapien
gaatagtttcagatgtaacactcca

SEQ ID NO: 4205543 - DNA, 25 bp, Homo sapien
taataaatctatcatgggtagggaa

SEQ ID NO: 4205544 - DNA, 25 bp, Homo sapien
tatagagagctgtagactactgtgc

SEQ ID NO: 4205545 - DNA, 25 bp, Homo sapien
cctcttttaagtattagcgctcgca

SEQ ID NO: 4205546 - DNA, 25 bp, Homo sapien
gcgctcgcagtacagctattaataa

SEQ ID NO: 4205547 - DNA, 25 bp, Homo sapien
tgataattaaggttggtctcaggcc

SEQ ID NO: 4205548 - DNA, 25 bp, Homo sapien
cataaagctgttgcgccttcacctg

SEQ ID NO: 4205549 - DNA, 25 bp, Homo sapien
atcttctttacatgaagaaccagaa

SEQ ID NO: 4205550 - DNA, 25 bp, Homo sapien
acttcgaacacaaggaaatcctctg

SEQ ID NO: 4205551 - DNA, 25 bp, Homo sapien
tgagtcacagcagatcacaacttcg

SEQ ID NO: 4205552 - DNA, 25 bp, Homo sapien
cctctggtattggaggaacgtagga

SEQ ID NO: 4205553 - DNA, 25 bp, Homo sapien
gaagtgtgagctgaagaacaattcc

SEQ ID NO: 4205554 - DNA, 25 bp, Homo sapien
gcagggactgtattataaactttag

SEQ ID NO: 4205555 - DNA, 25 bp, Homo sapien
gattttagtcctagattccaaccag

SEQ ID NO: 4205556 - DNA, 25 bp, Homo sapien
cctgaatctatgtgtatattaatgc

SEQ ID NO: 4205557 - DNA, 25 bp, Homo sapien
tattagctgccaatttacaaatggg

SEQ ID NO: 4205558 - DNA, 25 bp, Homo sapien
caggcttgttgtctctctcagttac

SEQ ID NO: 4205559 - DNA, 25 bp, Homo sapien
gagatgcctgaagtcaataaccaga

SEQ ID NO: 4205560 - DNA, 25 bp, Homo sapien
gattgaccgatcatggccctgtttg

SEQ ID NO: 4205561 - DNA, 25 bp, Homo sapien
caggtgtaatgattgctgataccac

SEQ ID NO: 4205562 - DNA, 25 bp, Homo sapien
tcataacctgggtgactaagctcaa

SEQ ID NO: 4205563 - DNA, 25 bp, Homo sapien
ccacttattgtttgacttgcattcc

SEQ ID NO: 4205564 - DNA, 25 bp, Homo sapien
gggtgactaagctcaagagtcttcc

SEQ ID NO: 4205565 - DNA, 25 bp, Homo sapien
gactaagctcaagagtcttccactt

SEQ ID NO: 4205566 - DNA, 25 bp, Homo sapien
ctgctccattccaaatgctgccata

SEQ ID NO: 4205567 - DNA, 25 bp, Homo sapien
tccaaatgctgccataaggagtcaa

SEQ ID NO: 4205568 - DNA, 25 bp, Homo sapien
ccattccaaatgctgccataaggag

SEQ ID NO: 4205569 - DNA, 25 bp, Homo sapien
gctgccataaggagtcaaaaggcat

SEQ ID NO: 4205570 - DNA, 25 bp, Homo sapien
tcatgtactccaggagtacttattg

SEQ ID NO: 4205571 - DNA, 25 bp, Homo sapien
tgtactccaggagtacttattgaat

SEQ ID NO: 4205572 - DNA, 25 bp, Homo sapien
gtactccaggagtacttattgaata

SEQ ID NO: 4205573 - DNA, 25 bp, Homo sapien
ctgttcatgtactccaggagtactt

SEQ ID NO: 4205574 - DNA, 25 bp, Homo sapien
ccggcatttagaattcttctatcca

SEQ ID NO: 4205575 - DNA, 25 bp, Homo sapien
tcctccggcatttagaattcttcta

SEQ ID NO: 4205576 - DNA, 25 bp, Homo sapien
tgcacatcctccggcatttagaatt

SEQ ID NO: 4205577 - DNA, 25 bp, Homo sapien
catcctccggcatttagaattcttc

SEQ ID NO: 4205578 - DNA, 25 bp, Homo sapien
gaaatggattcacgtcagggccctg

SEQ ID NO: 4205579 - DNA, 25 bp, Homo sapien
gacagagcaactgcgatcagctctt

SEQ ID NO: 4205580 - DNA, 25 bp, Homo sapien
acaggccacaactagcctagagtct

SEQ ID NO: 4205581 - DNA, 25 bp, Homo sapien
tcttggtgagaacggctggagccag

SEQ ID NO: 4205582 - DNA, 25 bp, Homo sapien
gggatggttccggtttgacttcagc

SEQ ID NO: 4205583 - DNA, 25 bp, Homo sapien
gaagagcaacccctgaggatgtgca

SEQ ID NO: 4205584 - DNA, 25 bp, Homo sapien
tggtgagagcagttatcatgacgca

SEQ ID NO: 4205585 - DNA, 25 bp, Homo sapien
agtgtcttgctccataggcggaaga

SEQ ID NO: 4205586 - DNA, 25 bp, Homo sapien
tgttccgttacttctaattcttcaa

SEQ ID NO: 4205587 - DNA, 25 bp, Homo sapien
tcttctcaatatttcggcaggcact

SEQ ID NO: 4205588 - DNA, 25 bp, Homo sapien
tcatctgtagtgttccgttacttct

SEQ ID NO: 4205589 - DNA, 25 bp, Homo sapien
tgtagtgttccgttacttctaattc

SEQ ID NO: 4205590 - DNA, 25 bp, Homo sapien
taaaaggtaaggtagcactattcac

SEQ ID NO: 4205591 - DNA, 25 bp, Homo sapien
tatgttactagaccaattctgcagg

SEQ ID NO: 4205592 - DNA, 25 bp, Homo sapien
tgcgcaagagccaatgagattacaa

SEQ ID NO: 4205593 - DNA, 25 bp, Homo sapien
gagatcgctctcataaggactgaga

SEQ ID NO: 4205594 - DNA, 25 bp, Homo sapien
ggaaggacagtcgtgcaaataagcc

SEQ ID NO: 4205595 - DNA, 25 bp, Homo sapien
tgggaaggacagtcgtgcaaataag

SEQ ID NO: 4205596 - DNA, 25 bp, Homo sapien
ggacagtcgtgcaaataagccaaaa

SEQ ID NO: 4205597 - DNA, 25 bp, Homo sapien
gaaggacagtcgtgcaaataagcca

SEQ ID NO: 4205598 - DNA, 25 bp, Homo sapien
gttgagagaaggagagcagccgccc

SEQ ID NO: 4205599 - DNA, 25 bp, Homo sapien
gagaaggagagcagccgccctgctc

SEQ ID NO: 4205600 - DNA, 25 bp, Homo sapien
gagagaaggagagcagccgccctgc

SEQ ID NO: 4205601 - DNA, 25 bp, Homo sapien
ctgaagagagatggggttgagagaa

SEQ ID NO: 4205602 - DNA, 25 bp, Homo sapien
ccatggtggccttaagaacactgaa

SEQ ID NO: 4205603 - DNA, 25 bp, Homo sapien
catgggaccttttgggaagctgacc

SEQ ID NO: 4205604 - DNA, 25 bp, Homo sapien
agaaatcagacccatgaaacatggg

SEQ ID NO: 4205605 - DNA, 25 bp, Homo sapien
ttaagaacactgaatatgacattga

SEQ ID NO: 4205606 - DNA, 25 bp, Homo sapien
ttcccttctcaaatctaaagcctta

SEQ ID NO: 4205607 - DNA, 25 bp, Homo sapien
tcccttctcaaatctaaagccttac

SEQ ID NO: 4205608 - DNA, 25 bp, Homo sapien
tggaaacatgaacaacgtgatgagc

SEQ ID NO: 4205609 - DNA, 25 bp, Homo sapien
ggaaacatgaacaacgtgatgagca

SEQ ID NO: 4205610 - DNA, 25 bp, Homo sapien
gggagaggagtaacgaatgataaca

SEQ ID NO: 4205611 - DNA, 25 bp, Homo sapien
gaatccaaatcaggacagcatgctg

SEQ ID NO: 4205612 - DNA, 25 bp, Homo sapien
catgaggtcgctggaaggatcaaca

SEQ ID NO: 4205613 - DNA, 25 bp, Homo sapien
ggatcaacattatcaagcatgagac

SEQ ID NO: 4205614 - DNA, 25 bp, Homo sapien
tgaatctcccagcacagtagtccgc

SEQ ID NO: 4205615 - DNA, 25 bp, Homo sapien
aatctcccagcacagtagtccgcat

SEQ ID NO: 4205616 - DNA, 25 bp, Homo sapien
tctgaatctcccagcacagtagtcc

SEQ ID NO: 4205617 - DNA, 25 bp, Homo sapien
atcttctgaatctcccagcacagta

SEQ ID NO: 4205618 - DNA, 25 bp, Homo sapien
cagattaacttgatttacagcaata

SEQ ID NO: 4205619 - DNA, 25 bp, Homo sapien
gattaacttgatttacagcaatatg

SEQ ID NO: 4205620 - DNA, 25 bp, Homo sapien
tcacagattaacttgatttacagca

SEQ ID NO: 4205621 - DNA, 25 bp, Homo sapien
cacagattaacttgatttacagcaa

SEQ ID NO: 4205622 - DNA, 25 bp, Homo sapien
ttgttttggcacgaaatgtatcctc

SEQ ID NO: 4205623 - DNA, 25 bp, Homo sapien
ctaagcttgttttggcacgaaatgt

SEQ ID NO: 4205624 - DNA, 25 bp, Homo sapien
ggcacgaaatgtatcctcatgtggc

SEQ ID NO: 4205625 - DNA, 25 bp, Homo sapien
ttttggcacgaaatgtatcctcatg

SEQ ID NO: 4205626 - DNA, 25 bp, Homo sapien
ctgctccaaagtgcacagtttctcg

SEQ ID NO: 4205627 - DNA, 25 bp, Homo sapien
caaagtgcacagtttctcgtaatac

SEQ ID NO: 4205628 - DNA, 25 bp, Homo sapien
gcacagtttctcgtaatacactcag

SEQ ID NO: 4205629 - DNA, 25 bp, Homo sapien
tctcgtaatacactcaggacacttc

SEQ ID NO: 4205630 - DNA, 25 bp, Homo sapien
tctaggaagaattttctcactcatc

SEQ ID NO: 4205631 - DNA, 25 bp, Homo sapien
tcatctaggaagaattttctcactc

SEQ ID NO: 4205632 - DNA, 25 bp, Homo sapien
ggaagaattttctcactcatctcac

SEQ ID NO: 4205633 - DNA, 25 bp, Homo sapien
taggaagaattttctcactcatctc

SEQ ID NO: 4205634 - DNA, 25 bp, Homo sapien
ggaactgctttgttagatgagccct

SEQ ID NO: 4205635 - DNA, 25 bp, Homo sapien
tgttattgtatttctcttgaactct

SEQ ID NO: 4205636 - DNA, 25 bp, Homo sapien
gttagatgagccctttacattgctg

SEQ ID NO: 4205637 - DNA, 25 bp, Homo sapien
ttattgtatttctcttgaactctac

SEQ ID NO: 4205638 - DNA, 25 bp, Homo sapien
ccatgctaacgcctgtgggcagggc

SEQ ID NO: 4205639 - DNA, 25 bp, Homo sapien
gaaagtaaaagccacaccgcagtca

SEQ ID NO: 4205640 - DNA, 25 bp, Homo sapien
gtaaaagccacaccgcagtcatcaa

SEQ ID NO: 4205641 - DNA, 25 bp, Homo sapien
catcaagtccatgctaacgcctgtg

SEQ ID NO: 4205642 - DNA, 25 bp, Homo sapien
tcccatgccttgttcatggctctgg

SEQ ID NO: 4205643 - DNA, 25 bp, Homo sapien
tcatcatcttcaacgatttctattg

SEQ ID NO: 4205644 - DNA, 25 bp, Homo sapien
ttctattgtttcaacgtctacacag

SEQ ID NO: 4205645 - DNA, 25 bp, Homo sapien
caacgtctacacagttttcaaagtg

SEQ ID NO: 4205646 - DNA, 25 bp, Homo sapien
gttagagctgccaaaagaggaactc

SEQ ID NO: 4205647 - DNA, 25 bp, Homo sapien
gacatggtttccaagaccctaacag

SEQ ID NO: 4205648 - DNA, 25 bp, Homo sapien
tcaatcgactggttggaactagttc

SEQ ID NO: 4205649 - DNA, 25 bp, Homo sapien
aaatatgcttggagggtttcagctc

SEQ ID NO: 4205650 - DNA, 25 bp, Homo sapien
gtttctcgagctctccttcggtcac

SEQ ID NO: 4205651 - DNA, 25 bp, Homo sapien
tctctttccgtttctcgagctctcc

SEQ ID NO: 4205652 - DNA, 25 bp, Homo sapien
tccgtttctcgagctctccttcggt

SEQ ID NO: 4205653 - DNA, 25 bp, Homo sapien
tttccgtttctcgagctctccttcg

SEQ ID NO: 4205654 - DNA, 25 bp, Homo sapien
tctgactcacttttagagagatttc

SEQ ID NO: 4205655 - DNA, 25 bp, Homo sapien
gagaaggcacggaaatgcagcaata

SEQ ID NO: 4205656 - DNA, 25 bp, Homo sapien
taattcaggcctcaatattgtggag

SEQ ID NO: 4205657 - DNA, 25 bp, Homo sapien
gagagatttcaactacctacctaat

SEQ ID NO: 4205658 - DNA, 25 bp, Homo sapien
cagaagcctattcatgtggatgcgg

SEQ ID NO: 4205659 - DNA, 25 bp, Homo sapien
ccaccatggctcttagagttaaggg

SEQ ID NO: 4205660 - DNA, 25 bp, Homo sapien
tgcccggccaactaggtgcaaattt

SEQ ID NO: 4205661 - DNA, 25 bp, Homo sapien
tggatgcggcttttagaacagagaa

SEQ ID NO: 4205662 - DNA, 25 bp, Homo sapien
gacaataaggaatgcatcattccaa

SEQ ID NO: 4205663 - DNA, 25 bp, Homo sapien
taaggaatgcatcattccaatattc

SEQ ID NO: 4205664 - DNA, 25 bp, Homo sapien
cattccaatattcagagagggagac

SEQ ID NO: 4205665 - DNA, 25 bp, Homo sapien
caataaggaatgcatcattccaata

SEQ ID NO: 4205666 - DNA, 25 bp, Homo sapien
gaactgagcctatgcattcaaagtc

SEQ ID NO: 4205667 - DNA, 25 bp, Homo sapien
tcaggatttgtgtagaaagtgcaca

SEQ ID NO: 4205668 - DNA, 25 bp, Homo sapien
agaactgagcctatgcattcaaagt

SEQ ID NO: 4205669 - DNA, 25 bp, Homo sapien
aggcttggtcaggatttgtgtagaa

SEQ ID NO: 4205670 - DNA, 25 bp, Homo sapien
cacttcctttggtgattgagactca

SEQ ID NO: 4205671 - DNA, 25 bp, Homo sapien
cttcttgaattgctgccgtgccact

SEQ ID NO: 4205672 - DNA, 25 bp, Homo sapien
tctagaaattctacgaccttggtat

SEQ ID NO: 4205673 - DNA, 25 bp, Homo sapien
tactttctcacatgtgctcaggacg

SEQ ID NO: 4205674 - DNA, 25 bp, Homo sapien
cttgtgtttcttttcaaacttcttg

SEQ ID NO: 4205675 - DNA, 25 bp, Homo sapien
ttgtgtttcttttcaaacttcttga

SEQ ID NO: 4205676 - DNA, 25 bp, Homo sapien
tgtttcttttcaaacttcttgaaca

SEQ ID NO: 4205677 - DNA, 25 bp, Homo sapien
tgtgtttcttttcaaacttcttgaa

SEQ ID NO: 4205678 - DNA, 25 bp, Homo sapien
gatggaggagtttgtactatttttc

SEQ ID NO: 4205679 - DNA, 25 bp, Homo sapien
gtagtaaaactttccaatgacatcc

SEQ ID NO: 4205680 - DNA, 25 bp, Homo sapien
gtggctattggataagtttcttctt

SEQ ID NO: 4205681 - DNA, 25 bp, Homo sapien
tcccttagcacagcgtactcttcca

SEQ ID NO: 4205682 - DNA, 25 bp, Homo sapien
ctttctagcttggtcacactgcagg

SEQ ID NO: 4205683 - DNA, 25 bp, Homo sapien
ctgtactccccagtaacttttctgc

SEQ ID NO: 4205684 - DNA, 25 bp, Homo sapien
tgtactccccagtaacttttctgct

SEQ ID NO: 4205685 - DNA, 25 bp, Homo sapien
gtactccccagtaacttttctgctc

SEQ ID NO: 4205686 - DNA, 25 bp, Homo sapien
caagttggatcctgaccagcttctg

SEQ ID NO: 4205687 - DNA, 25 bp, Homo sapien
gaaatgtagtaaatgcaagttggat

SEQ ID NO: 4205688 - DNA, 25 bp, Homo sapien
tagtaaatgcaagttggatcctgac

SEQ ID NO: 4205689 - DNA, 25 bp, Homo sapien
aatgcaagttggatcctgaccagct

SEQ ID NO: 4205690 - DNA, 25 bp, Homo sapien
gcagggtgcccatataaaattggca

SEQ ID NO: 4205691 - DNA, 25 bp, Homo sapien
agggtgcccatataaaattggcatt

SEQ ID NO: 4205692 - DNA, 25 bp, Homo sapien
ggcagggtgcccatataaaattggc

SEQ ID NO: 4205693 - DNA, 25 bp, Homo sapien
tggcatttgggttagacaaccggaa

SEQ ID NO: 4205694 - DNA, 25 bp, Homo sapien
taaatctcgttgaccagaatgaagt

SEQ ID NO: 4205695 - DNA, 25 bp, Homo sapien
gcttaaatctcgttgaccagaatga

SEQ ID NO: 4205696 - DNA, 25 bp, Homo sapien
ctttgcttaaatctcgttgaccaga

SEQ ID NO: 4205697 - DNA, 25 bp, Homo sapien
atctcgttgaccagaatgaagttac

SEQ ID NO: 4205698 - DNA, 25 bp, Homo sapien
acagcggaggccaatccagcagcca

SEQ ID NO: 4205699 - DNA, 25 bp, Homo sapien
cagcacagcggaggccaatccagca

SEQ ID NO: 4205700 - DNA, 25 bp, Homo sapien
ctcagcacagcggaggccaatccag

SEQ ID NO: 4205701 - DNA, 25 bp, Homo sapien
ccactcagcacagcggaggccaatc

SEQ ID NO: 4205702 - DNA, 25 bp, Homo sapien
tccctaaagttcctagccttcacat

SEQ ID NO: 4205703 - DNA, 25 bp, Homo sapien
ttacaaagagggagttaagattgta

SEQ ID NO: 4205704 - DNA, 25 bp, Homo sapien
ttctccctaaagttcctagccttca

SEQ ID NO: 4205705 - DNA, 25 bp, Homo sapien
gagttaagattgtaagtcaagagta

SEQ ID NO: 4205706 - DNA, 25 bp, Homo sapien
catctgtttgatactggtttgcaaa

SEQ ID NO: 4205707 - DNA, 25 bp, Homo sapien
tggtttgcaaaggagcctctctgta

SEQ ID NO: 4205708 - DNA, 25 bp, Homo sapien
ggtttgcaaaggagcctctctgtat

SEQ ID NO: 4205709 - DNA, 25 bp, Homo sapien
ttacaagtgactggcatctgtttga

SEQ ID NO: 4205710 - DNA, 25 bp, Homo sapien
tgttattccaatggtagggcagatg

SEQ ID NO: 4205711 - DNA, 25 bp, Homo sapien
cagcagtgttcttattagtaactga

SEQ ID NO: 4205712 - DNA, 25 bp, Homo sapien
tgcccaggcctctcattatgttatt

SEQ ID NO: 4205713 - DNA, 25 bp, Homo sapien
tacacagcactctcataattagtat

SEQ ID NO: 4205714 - DNA, 25 bp, Homo sapien
ccatacatagcaatacccgtcagtg

SEQ ID NO: 4205715 - DNA, 25 bp, Homo sapien
tttaggaatgtacaacatacatggc

SEQ ID NO: 4205716 - DNA, 25 bp, Homo sapien
ggcaaagctgcacagccatacatag

SEQ ID NO: 4205717 - DNA, 25 bp, Homo sapien
ctatcttgtgctattgatgcaaata

SEQ ID NO: 4205718 - DNA, 25 bp, Homo sapien
acaagctgcattgccataaaagcca

SEQ ID NO: 4205719 - DNA, 25 bp, Homo sapien
ctctgggcaggtacaagctgcattg

SEQ ID NO: 4205720 - DNA, 25 bp, Homo sapien
tacaagctgcattgccataaaagcc

SEQ ID NO: 4205721 - DNA, 25 bp, Homo sapien
ctgctctgggcaggtacaagctgca

SEQ ID NO: 4205722 - DNA, 25 bp, Homo sapien
caagggtcacattctcatctgatga

SEQ ID NO: 4205723 - DNA, 25 bp, Homo sapien
aagggtcacattctcatctgatgac

SEQ ID NO: 4205724 - DNA, 25 bp, Homo sapien
agcctaggctctctgcaagctttga

SEQ ID NO: 4205725 - DNA, 25 bp, Homo sapien
cacagtgcctcccatgatgactctg

SEQ ID NO: 4205726 - DNA, 25 bp, Homo sapien
agtgcctcccatgatgactctggct

SEQ ID NO: 4205727 - DNA, 25 bp, Homo sapien
ctttgacaggcagccgttcacagtg

SEQ ID NO: 4205728 - DNA, 25 bp, Homo sapien
ctaaagtgcacagcctacgatgcac

SEQ ID NO: 4205729 - DNA, 25 bp, Homo sapien
cttctcagcaccacaaaaactgtgt

SEQ ID NO: 4205730 - DNA, 25 bp, Homo sapien
ggaaattacattcatggatgtcttc

SEQ ID NO: 4205731 - DNA, 25 bp, Homo sapien
tgcacactgtctccagtaggaaatt

SEQ ID NO: 4205732 - DNA, 25 bp, Homo sapien
ggttttctcggcatgcaatgctctc

SEQ ID NO: 4205733 - DNA, 25 bp, Homo sapien
ttttctcggcatgcaatgctctctg

SEQ ID NO: 4205734 - DNA, 25 bp, Homo sapien
gttttctcggcatgcaatgctctct

SEQ ID NO: 4205735 - DNA, 25 bp, Homo sapien
ttctcggcatgcaatgctctctgtg

SEQ ID NO: 4205736 - DNA, 25 bp, Homo sapien
atatcattatcagcacaccgggtca

SEQ ID NO: 4205737 - DNA, 25 bp, Homo sapien
gggtcagccgtatcatagaagaaaa

SEQ ID NO: 4205738 - DNA, 25 bp, Homo sapien
attatcagcacaccgggtcagccgt

SEQ ID NO: 4205739 - DNA, 25 bp, Homo sapien
gcacaccgggtcagccgtatcatag

SEQ ID NO: 4205740 - DNA, 25 bp, Homo sapien
gctgaaaactgccacaaagggactt

SEQ ID NO: 4205741 - DNA, 25 bp, Homo sapien
tgtcagatacttgtcattgtgcctg

SEQ ID NO: 4205742 - DNA, 25 bp, Homo sapien
ttgtgcctgccaaaccctgctaaga

SEQ ID NO: 4205743 - DNA, 25 bp, Homo sapien
tgaaagatttcgactatcaaagaga

SEQ ID NO: 4205744 - DNA, 25 bp, Homo sapien
tccacaactgtttgtaatcacttag

SEQ ID NO: 4205745 - DNA, 25 bp, Homo sapien
caactgtttgtaatcacttagttgc

SEQ ID NO: 4205746 - DNA, 25 bp, Homo sapien
gagatccacaactgtttgtaatcac

SEQ ID NO: 4205747 - DNA, 25 bp, Homo sapien
aaagagatccacaactgtttgtaat

SEQ ID NO: 4205748 - DNA, 25 bp, Homo sapien
gcaaataagcttctcaacctccatg

SEQ ID NO: 4205749 - DNA, 25 bp, Homo sapien
catcatcctgtagccaaactctctc

SEQ ID NO: 4205750 - DNA, 25 bp, Homo sapien
tattaacaatgctatcacatacccc

SEQ ID NO: 4205751 - DNA, 25 bp, Homo sapien
ctccatgttatgggaatagtaatat

SEQ ID NO: 4205752 - DNA, 25 bp, Homo sapien
actcttcccctagaataggaccatc

SEQ ID NO: 4205753 - DNA, 25 bp, Homo sapien
ccctagaataggaccatcactcatt

SEQ ID NO: 4205754 - DNA, 25 bp, Homo sapien
tcttcccctagaataggaccatcac

SEQ ID NO: 4205755 - DNA, 25 bp, Homo sapien
agaataggaccatcactcattcctg

SEQ ID NO: 4205756 - DNA, 25 bp, Homo sapien
catatttggatctctctatttctct

SEQ ID NO: 4205757 - DNA, 25 bp, Homo sapien
gcatccatatttggatctctctatt

SEQ ID NO: 4205758 - DNA, 25 bp, Homo sapien
catgtggcatccatatttggatctc

SEQ ID NO: 4205759 - DNA, 25 bp, Homo sapien
tggcatccatatttggatctctcta

SEQ ID NO: 4205760 - DNA, 25 bp, Homo sapien
tgttcctgagctgatgtaaagccct

SEQ ID NO: 4205761 - DNA, 25 bp, Homo sapien
tttctctccggaagcatcttcagct

SEQ ID NO: 4205762 - DNA, 25 bp, Homo sapien
agtaggcatcaaggaatagggcctc

SEQ ID NO: 4205763 - DNA, 25 bp, Homo sapien
ggtagtaggcatcaaggaatagggc

SEQ ID NO: 4205764 - DNA, 25 bp, Homo sapien
ctggtagtaggcatcaaggaatagg

SEQ ID NO: 4205765 - DNA, 25 bp, Homo sapien
tagtaggcatcaaggaatagggcct

SEQ ID NO: 4205766 - DNA, 25 bp, Homo sapien
caaaggcccaaccatgaggactggc

SEQ ID NO: 4205767 - DNA, 25 bp, Homo sapien
ctcctgtgggagatcagcatgtagg

SEQ ID NO: 4205768 - DNA, 25 bp, Homo sapien
ggtaattagagcaaaggcccaacca

SEQ ID NO: 4205769 - DNA, 25 bp, Homo sapien
catgtaggttcccatttcaatgaga

SEQ ID NO: 4205770 - DNA, 25 bp, Homo sapien
gccaatcccataacctctatgactt

SEQ ID NO: 4205771 - DNA, 25 bp, Homo sapien
caatcccataacctctatgactttt

SEQ ID NO: 4205772 - DNA, 25 bp, Homo sapien
aaactggtttcaagccaatcccata

SEQ ID NO: 4205773 - DNA, 25 bp, Homo sapien
atcccataacctctatgactttttt

SEQ ID NO: 4205774 - DNA, 25 bp, Homo sapien
gctccatctgcactcactatatcat

SEQ ID NO: 4205775 - DNA, 25 bp, Homo sapien
ctgctccatctgcactcactatatc

SEQ ID NO: 4205776 - DNA, 25 bp, Homo sapien
tgctccatctgcactcactatatca

SEQ ID NO: 4205777 - DNA, 25 bp, Homo sapien
caggggggttgctctcatcgttctt

SEQ ID NO: 4205778 - DNA, 25 bp, Homo sapien
ggggttgctctcatcgttcttttta

SEQ ID NO: 4205779 - DNA, 25 bp, Homo sapien
gttgctctcatcgttctttttaact

SEQ ID NO: 4205780 - DNA, 25 bp, Homo sapien
tcactcagcgatgagagcagggggg

SEQ ID NO: 4205781 - DNA, 25 bp, Homo sapien
agtgactgccaacctagaattctta

SEQ ID NO: 4205782 - DNA, 25 bp, Homo sapien
gggattcctcgagaataagggagaa

SEQ ID NO: 4205783 - DNA, 25 bp, Homo sapien
aaagcttcttcaaaagtagaggcga

SEQ ID NO: 4205784 - DNA, 25 bp, Homo sapien
tcagatagaaacatggaaatccagg

SEQ ID NO: 4205785 - DNA, 25 bp, Homo sapien
caatcatgatccttaaacgccagca

SEQ ID NO: 4205786 - DNA, 25 bp, Homo sapien
agtgtgttgcgcctccctctttgct

SEQ ID NO: 4205787 - DNA, 25 bp, Homo sapien
agcagagcagatgccagaattatgc

SEQ ID NO: 4205788 - DNA, 25 bp, Homo sapien
tgctcctgccatgaaaaaagcctgc

SEQ ID NO: 4205789 - DNA, 25 bp, Homo sapien
cctgctcttagatgacttccgctgg

SEQ ID NO: 4205790 - DNA, 25 bp, Homo sapien
tgcttttggacaacccctgctctta

SEQ ID NO: 4205791 - DNA, 25 bp, Homo sapien
gatgacttccgctggactccagcct

SEQ ID NO: 4205792 - DNA, 25 bp, Homo sapien
tttcctggggacgtgtagaatacat

SEQ ID NO: 4205793 - DNA, 25 bp, Homo sapien
taaatgacccatgtgtgggacacta

SEQ ID NO: 4205794 - DNA, 25 bp, Homo sapien
taatgatccttcagaaaggagcctc

SEQ ID NO: 4205795 - DNA, 25 bp, Homo sapien
gaggcagagtggtccagcacttcta

SEQ ID NO: 4205796 - DNA, 25 bp, Homo sapien
gagcctcctatttttggcgtcaggg

SEQ ID NO: 4205797 - DNA, 25 bp, Homo sapien
cagaggagacgaaggagccatgatg

SEQ ID NO: 4205798 - DNA, 25 bp, Homo sapien
agacgaaggagccatgatgactaaa

SEQ ID NO: 4205799 - DNA, 25 bp, Homo sapien
acgaaggagccatgatgactaaatg

SEQ ID NO: 4205800 - DNA, 25 bp, Homo sapien
aggagacgaaggagccatgatgact

SEQ ID NO: 4205801 - DNA, 25 bp, Homo sapien
tccaaacttgtgtgggggaatggta

SEQ ID NO: 4205802 - DNA, 25 bp, Homo sapien
gggaatggtagggatctgaggcacg

SEQ ID NO: 4205803 - DNA, 25 bp, Homo sapien
gatctgaggcacgacttctaaagga

SEQ ID NO: 4205804 - DNA, 25 bp, Homo sapien
gtagggatctgaggcacgacttcta

SEQ ID NO: 4205805 - DNA, 25 bp, Homo sapien
gacgttgtggaattttgttatgact

SEQ ID NO: 4205806 - DNA, 25 bp, Homo sapien
ggacgttgtggaattttgttatgac

SEQ ID NO: 4205807 - DNA, 25 bp, Homo sapien
cggacgttgtggaattttgttatga

SEQ ID NO: 4205808 - DNA, 25 bp, Homo sapien
cctctgtgaacacctctgggagata

SEQ ID NO: 4205809 - DNA, 25 bp, Homo sapien
tcatcaccagcagtgagcctcaact

SEQ ID NO: 4205810 - DNA, 25 bp, Homo sapien
gctcttgtgatttctgcatgctgcc

SEQ ID NO: 4205811 - DNA, 25 bp, Homo sapien
tgtgaacacctctgggagatatatt

SEQ ID NO: 4205812 - DNA, 25 bp, Homo sapien
ttctttccaccaaacccatgccctg

SEQ ID NO: 4205813 - DNA, 25 bp, Homo sapien
tacttgacatttctttccaccaaac

SEQ ID NO: 4205814 - DNA, 25 bp, Homo sapien
aaacccatgccctggcttttgctgc

SEQ ID NO: 4205815 - DNA, 25 bp, Homo sapien
aacccatgccctggcttttgctgca

SEQ ID NO: 4205816 - DNA, 25 bp, Homo sapien
ttgctggaagattggatatctgcat

SEQ ID NO: 4205817 - DNA, 25 bp, Homo sapien
tttgctggaagattggatatctgca

SEQ ID NO: 4205818 - DNA, 25 bp, Homo sapien
ttccctggactactatggcctgttg

SEQ ID NO: 4205819 - DNA, 25 bp, Homo sapien
ctggactactatggcctgttgacct

SEQ ID NO: 4205820 - DNA, 25 bp, Homo sapien
ctgaattggacccagtaaagagttt

SEQ ID NO: 4205821 - DNA, 25 bp, Homo sapien
agttttccctggactactatggcct

SEQ ID NO: 4205822 - DNA, 25 bp, Homo sapien
ctgtgtacccgcattttgactatca

SEQ ID NO: 4205823 - DNA, 25 bp, Homo sapien
ttttgactatcactttgacacacaa

SEQ ID NO: 4205824 - DNA, 25 bp, Homo sapien
ttgactatcactttgacacacaaac

SEQ ID NO: 4205825 - DNA, 25 bp, Homo sapien
gtgtacccgcattttgactatcact

SEQ ID NO: 4205826 - DNA, 25 bp, Homo sapien
caattgtaagagacttgaaagtgtc

SEQ ID NO: 4205827 - DNA, 25 bp, Homo sapien
tgtaagagacttgaaagtgtcgagc

SEQ ID NO: 4205828 - DNA, 25 bp, Homo sapien
tgaaagtgtcgagccgcttcaccat

SEQ ID NO: 4205829 - DNA, 25 bp, Homo sapien
gagacttgaaagtgtcgagccgctt

SEQ ID NO: 4205830 - DNA, 25 bp, Homo sapien
gtttgatatcatcatagtttctaga

SEQ ID NO: 4205831 - DNA, 25 bp, Homo sapien
tttgatatcatcatagtttctagaa

SEQ ID NO: 4205832 - DNA, 25 bp, Homo sapien
cagtgtagtagactcttcatgacct

SEQ ID NO: 4205833 - DNA, 25 bp, Homo sapien
ttttctgatgtggtgtgcaagctca

SEQ ID NO: 4205834 - DNA, 25 bp, Homo sapien
tactccgtgaattttgatgggttct

SEQ ID NO: 4205835 - DNA, 25 bp, Homo sapien
gaaaagacagcaatattactccgtg

SEQ ID NO: 4205836 - DNA, 25 bp, Homo sapien
tatgtctgcttaaaggagatggaga

SEQ ID NO: 4205837 - DNA, 25 bp, Homo sapien
cagtatatgtctgcttaaaggagat

SEQ ID NO: 4205838 - DNA, 25 bp, Homo sapien
aggcagtatatgtctgcttaaagga

SEQ ID NO: 4205839 - DNA, 25 bp, Homo sapien
tatatgtctgcttaaaggagatgga

SEQ ID NO: 4205840 - DNA, 25 bp, Homo sapien
gaaggcatcatgagtgcagggttct

SEQ ID NO: 4205841 - DNA, 25 bp, Homo sapien
tctgtattctggagttaatcaagga

SEQ ID NO: 4205842 - DNA, 25 bp, Homo sapien
ctgacttcttcaggatgtttgcttg

SEQ ID NO: 4205843 - DNA, 25 bp, Homo sapien
cagggttctgttatggttctgctac

SEQ ID NO: 4205844 - DNA, 25 bp, Homo sapien
gggactccttgatattgactgcttc

SEQ ID NO: 4205845 - DNA, 25 bp, Homo sapien
cactgggactccttgatattgactg

SEQ ID NO: 4205846 - DNA, 25 bp, Homo sapien
tattgactgcttcccgttattgcca

SEQ ID NO: 4205847 - DNA, 25 bp, Homo sapien
ttttactagtatcactgggactcct

SEQ ID NO: 4205848 - DNA, 25 bp, Homo sapien
ctagatcaatgtgtagactctcact

SEQ ID NO: 4205849 - DNA, 25 bp, Homo sapien
cactgctgacttgtggatcggccat

SEQ ID NO: 4205850 - DNA, 25 bp, Homo sapien
tcactgctgacttgtggatcggcca

SEQ ID NO: 4205851 - DNA, 25 bp, Homo sapien
agctagatcaatgtgtagactctca

SEQ ID NO: 4205852 - DNA, 25 bp, Homo sapien
tgtgacttaacttattattatactc

SEQ ID NO: 4205853 - DNA, 25 bp, Homo sapien
tgtagtagtctggatccaacccaca

SEQ ID NO: 4205854 - DNA, 25 bp, Homo sapien
gctccatcagccaaaagattataac

SEQ ID NO: 4205855 - DNA, 25 bp, Homo sapien
ccacaatatcttcgaggtatgccta

SEQ ID NO: 4205856 - DNA, 25 bp, Homo sapien
aatagcttcttagtagggcttcctg

SEQ ID NO: 4205857 - DNA, 25 bp, Homo sapien
tgctgctaccacacactagtccagg

SEQ ID NO: 4205858 - DNA, 25 bp, Homo sapien
caaaggatttttagctgaggagtgg

SEQ ID NO: 4205859 - DNA, 25 bp, Homo sapien
gacctgagtcatcggttgagaatga

SEQ ID NO: 4205860 - DNA, 25 bp, Homo sapien
caggttttattctagtgctattcat

SEQ ID NO: 4205861 - DNA, 25 bp, Homo sapien
caattttatattggtggatcaggac

SEQ ID NO: 4205862 - DNA, 25 bp, Homo sapien
gcagggttccccactcaagaacaat

SEQ ID NO: 4205863 - DNA, 25 bp, Homo sapien
gtgtctggtgcttccgtgggtttca

SEQ ID NO: 4205864 - DNA, 25 bp, Homo sapien
gcttccgtgggtttcagcagggttc

SEQ ID NO: 4205865 - DNA, 25 bp, Homo sapien
tatactcactccaactatgttccgg

SEQ ID NO: 4205866 - DNA, 25 bp, Homo sapien
tatgttccgggaatccagtcactgc

SEQ ID NO: 4205867 - DNA, 25 bp, Homo sapien
ctatgactgcgggaaagaaggtgaa

SEQ ID NO: 4205868 - DNA, 25 bp, Homo sapien
cagtcactgcgcgagtatctagaac

SEQ ID NO: 4205869 - DNA, 25 bp, Homo sapien
ctctgttaccagtatcttgtagact

SEQ ID NO: 4205870 - DNA, 25 bp, Homo sapien
ctttaattcagcagtagcaatctct

SEQ ID NO: 4205871 - DNA, 25 bp, Homo sapien
agcaatctctgttaccagtatcttg

SEQ ID NO: 4205872 - DNA, 25 bp, Homo sapien
gcagtagcaatctctgttaccagta

SEQ ID NO: 4205873 - DNA, 25 bp, Homo sapien
tgctggatttcccacttgttgcctc

SEQ ID NO: 4205874 - DNA, 25 bp, Homo sapien
tggatttcccacttgttgcctcttg

SEQ ID NO: 4205875 - DNA, 25 bp, Homo sapien
cttgctggatttcccacttgttgcc

SEQ ID NO: 4205876 - DNA, 25 bp, Homo sapien
ggatttcccacttgttgcctcttgc

SEQ ID NO: 4205877 - DNA, 25 bp, Homo sapien
tttcctgtttgtgaatactgaacct

SEQ ID NO: 4205878 - DNA, 25 bp, Homo sapien
tctatttcctgtttgtgaatactga

SEQ ID NO: 4205879 - DNA, 25 bp, Homo sapien
tgtccattgcttattctatttcctg

SEQ ID NO: 4205880 - DNA, 25 bp, Homo sapien
cctgtttgtgaatactgaaccttac

SEQ ID NO: 4205881 - DNA, 25 bp, Homo sapien
tatcgcctttcttgtggattcccat

SEQ ID NO: 4205882 - DNA, 25 bp, Homo sapien
cctttcttgtggattcccatgtatg

SEQ ID NO: 4205883 - DNA, 25 bp, Homo sapien
ttcttgtggattcccatgtatgtgg

SEQ ID NO: 4205884 - DNA, 25 bp, Homo sapien
tgtggattcccatgtatgtggccaa

SEQ ID NO: 4205885 - DNA, 25 bp, Homo sapien
gagctggctgacaccaagtaccttt

SEQ ID NO: 4205886 - DNA, 25 bp, Homo sapien
ggagctggctgacaccaagtacctt

SEQ ID NO: 4205887 - DNA, 25 bp, Homo sapien
agctggctgacaccaagtacctttg

SEQ ID NO: 4205888 - DNA, 25 bp, Homo sapien
gaagacatcagcgtgatcaggcaga

SEQ ID NO: 4205889 - DNA, 25 bp, Homo sapien
cttgaagacatcagcgtgatcaggc

SEQ ID NO: 4205890 - DNA, 25 bp, Homo sapien
tcagcgtgatcaggcagatcatcat

SEQ ID NO: 4205891 - DNA, 25 bp, Homo sapien
gacatcagcgtgatcaggcagatca

SEQ ID NO: 4205892 - DNA, 25 bp, Homo sapien
tgtaatttaatgctcctccatctgc

SEQ ID NO: 4205893 - DNA, 25 bp, Homo sapien
gtaatttaatgctcctccatctgca

SEQ ID NO: 4205894 - DNA, 25 bp, Homo sapien
gtgtaatttaatgctcctccatctg

SEQ ID NO: 4205895 - DNA, 25 bp, Homo sapien
ctgtgtaatttaatgctcctccatc

SEQ ID NO: 4205896 - DNA, 25 bp, Homo sapien
cttctagaactttcttcccgttcag

SEQ ID NO: 4205897 - DNA, 25 bp, Homo sapien
tcttctagaactttcttcccgttca

SEQ ID NO: 4205898 - DNA, 25 bp, Homo sapien
ctagaactttcttcccgttcagttg

SEQ ID NO: 4205899 - DNA, 25 bp, Homo sapien
caaagcaggaaagaagagtgtatca

SEQ ID NO: 4205900 - DNA, 25 bp, Homo sapien
agtttcaaagcaggaaagaagagtg

SEQ ID NO: 4205901 - DNA, 25 bp, Homo sapien
taaagtttcaaagcaggaaagaaga

SEQ ID NO: 4205902 - DNA, 25 bp, Homo sapien
ttcaaagcaggaaagaagagtgtat

SEQ ID NO: 4205903 - DNA, 25 bp, Homo sapien
tgtagccaatttggccttgccacat

SEQ ID NO: 4205904 - DNA, 25 bp, Homo sapien
ggtgtctgcttctcaactgcctgca

SEQ ID NO: 4205905 - DNA, 25 bp, Homo sapien
tagactctagactctgcccgggtgt

SEQ ID NO: 4205906 - DNA, 25 bp, Homo sapien
agatccctgtctgggccctttgtag

SEQ ID NO: 4205907 - DNA, 25 bp, Homo sapien
gctagttcctggtccgtaaaatata

SEQ ID NO: 4205908 - DNA, 25 bp, Homo sapien
tggcttcggccaattcataatttat

SEQ ID NO: 4205909 - DNA, 25 bp, Homo sapien
tataattttggcttcggccaattca

SEQ ID NO: 4205910 - DNA, 25 bp, Homo sapien
ttctgcttcaaaggctagttcctgg

SEQ ID NO: 4205911 - DNA, 25 bp, Homo sapien
caaacaagctttttatgcttcccca

SEQ ID NO: 4205912 - DNA, 25 bp, Homo sapien
tatttcattgttcggcaaacaagct

SEQ ID NO: 4205913 - DNA, 25 bp, Homo sapien
tccttctcttacaaccgaggtggga

SEQ ID NO: 4205914 - DNA, 25 bp, Homo sapien
ctggcacaggtatcagtaaaaatcc

SEQ ID NO: 4205915 - DNA, 25 bp, Homo sapien
gtcaactctcaatgtatgggagcca

SEQ ID NO: 4205916 - DNA, 25 bp, Homo sapien
aaggaatagaagtggtcaactctca

SEQ ID NO: 4205917 - DNA, 25 bp, Homo sapien
taccatgtcctacaacacagggaag

SEQ ID NO: 4205918 - DNA, 25 bp, Homo sapien
catgggaaatacgtgctgggaactc

SEQ ID NO: 4205919 - DNA, 25 bp, Homo sapien
ccacaggttgggcattgacaggcct

SEQ ID NO: 4205920 - DNA, 25 bp, Homo sapien
gagtaagcccttgaggccatatcag

SEQ ID NO: 4205921 - DNA, 25 bp, Homo sapien
taaagattcagctgggagtaagccc

SEQ ID NO: 4205922 - DNA, 25 bp, Homo sapien
tttatgcaggaagtaccacaggttg

SEQ ID NO: 4205923 - DNA, 25 bp, Homo sapien
cagccaggataccagccagccgcag

SEQ ID NO: 4205924 - DNA, 25 bp, Homo sapien
gccaggataccagccagccgcagag

SEQ ID NO: 4205925 - DNA, 25 bp, Homo sapien
tcaaggagcagccaggataccagcc

SEQ ID NO: 4205926 - DNA, 25 bp, Homo sapien
ggagcagccaggataccagccagcc

SEQ ID NO: 4205927 - DNA, 25 bp, Homo sapien
agtatcttgccctacaaatggattc

SEQ ID NO: 4205928 - DNA, 25 bp, Homo sapien
gcagtatcttgccctacaaatggat

SEQ ID NO: 4205929 - DNA, 25 bp, Homo sapien
gtatcttgccctacaaatggattct

SEQ ID NO: 4205930 - DNA, 25 bp, Homo sapien
cagtatcttgccctacaaatggatt

SEQ ID NO: 4205931 - DNA, 25 bp, Homo sapien
tcatggagccgtgagttcccaaggt

SEQ ID NO: 4205932 - DNA, 25 bp, Homo sapien
actgctgtttctacctgttgttgtc

SEQ ID NO: 4205933 - DNA, 25 bp, Homo sapien
tgtcactttgttctgaagaaccact

SEQ ID NO: 4205934 - DNA, 25 bp, Homo sapien
ggtacttgtaatcctttactactgc

SEQ ID NO: 4205935 - DNA, 25 bp, Homo sapien
tcaacatgctctaagcagggttctg

SEQ ID NO: 4205936 - DNA, 25 bp, Homo sapien
ttctggggaaattgggttgaggtgc

SEQ ID NO: 4205937 - DNA, 25 bp, Homo sapien
tgtgtcctttccgggatcctgctcc

SEQ ID NO: 4205938 - DNA, 25 bp, Homo sapien
ttttgtgtcctttccgggatcctgc

SEQ ID NO: 4205939 - DNA, 25 bp, Homo sapien
tgagaacaagcaagggagccctgct

SEQ ID NO: 4205940 - DNA, 25 bp, Homo sapien
gaatcctggaggtgcgttgaaaccg

SEQ ID NO: 4205941 - DNA, 25 bp, Homo sapien
gctgaattgcagcttaggaagccct

SEQ ID NO: 4205942 - DNA, 25 bp, Homo sapien
gttgaaaccgagaacgcgcggcgta

SEQ ID NO: 4205943 - DNA, 25 bp, Homo sapien
cagccgcgagagcttaggagagcgc

SEQ ID NO: 4205944 - DNA, 25 bp, Homo sapien
ggcttgcaatgtccggggccgagga

SEQ ID NO: 4205945 - DNA, 25 bp, Homo sapien
cttaggagagcgctgccgccgaccg

SEQ ID NO: 4205946 - DNA, 25 bp, Homo sapien
gggtccgggaccgaagcgcagccgc

SEQ ID NO: 4205947 - DNA, 25 bp, Homo sapien
agtcagcgccgggaggagcaacacc

SEQ ID NO: 4205948 - DNA, 25 bp, Homo sapien
aggagcaacaccgagttagtcttgc

SEQ ID NO: 4205949 - DNA, 25 bp, Homo sapien
agccgggcctcgaagtcagcgccgg

SEQ ID NO: 4205950 - DNA, 25 bp, Homo sapien
cgccgggaggagcaacaccgagtta

SEQ ID NO: 4205951 - DNA, 25 bp, Homo sapien
tgaccactgccctgcgataagacgt

SEQ ID NO: 4205952 - DNA, 25 bp, Homo sapien
gagtcgttattagcggcaaggccat

SEQ ID NO: 4205953 - DNA, 25 bp, Homo sapien
tgttgctagaaaaatccacctcgct

SEQ ID NO: 4205954 - DNA, 25 bp, Homo sapien
cacggaaggattctcgaggagctcg

SEQ ID NO: 4205955 - DNA, 25 bp, Homo sapien
catcaaatgttccttgtcctttcag

SEQ ID NO: 4205956 - DNA, 25 bp, Homo sapien
ttccccatcaaatgttccttgtcct

SEQ ID NO: 4205957 - DNA, 25 bp, Homo sapien
cccatcaaatgttccttgtcctttc

SEQ ID NO: 4205958 - DNA, 25 bp, Homo sapien
tccccatcaaatgttccttgtcctt

SEQ ID NO: 4205959 - DNA, 25 bp, Homo sapien
tactaagtcaaaggaaatgtgacct

SEQ ID NO: 4205960 - DNA, 25 bp, Homo sapien
gaaatatgggcagaatactaagtca

SEQ ID NO: 4205961 - DNA, 25 bp, Homo sapien
gccaggagagttagagtttccccaa

SEQ ID NO: 4205962 - DNA, 25 bp, Homo sapien
ttaaaaatcccaggacatcgactga

SEQ ID NO: 4205963 - DNA, 25 bp, Homo sapien
ttcatcagaatcaatgtcaagggcc

SEQ ID NO: 4205964 - DNA, 25 bp, Homo sapien
catcagaatcaatgtcaagggcctt

SEQ ID NO: 4205965 - DNA, 25 bp, Homo sapien
atctcaatggcttatggtgaatcac

SEQ ID NO: 4205966 - DNA, 25 bp, Homo sapien
ggatctcaatggcttatggtgaatc

SEQ ID NO: 4205967 - DNA, 25 bp, Homo sapien
tcaatggaccttgtcatcagttttt

SEQ ID NO: 4205968 - DNA, 25 bp, Homo sapien
atggaccttgtcatcagtttttcca

SEQ ID NO: 4205969 - DNA, 25 bp, Homo sapien
accttgtcatcagtttttccacata

SEQ ID NO: 4205970 - DNA, 25 bp, Homo sapien
ccttgtcatcagtttttccacatat

SEQ ID NO: 4205971 - DNA, 25 bp, Homo sapien
tgaccgcaccttgcccagacaggtg

SEQ ID NO: 4205972 - DNA, 25 bp, Homo sapien
cacagctttaccacaatagtaatta

SEQ ID NO: 4205973 - DNA, 25 bp, Homo sapien
cttttctagaagatcttgcagcagc

SEQ ID NO: 4205974 - DNA, 25 bp, Homo sapien
taagtcattcacagctttaccacaa

SEQ ID NO: 4205975 - DNA, 25 bp, Homo sapien
cttgtattctgattgagaaaactga

SEQ ID NO: 4205976 - DNA, 25 bp, Homo sapien
taaggtatgacaaagcggctcctca

SEQ ID NO: 4205977 - DNA, 25 bp, Homo sapien
ccgggaagccttcttgtattctgat

SEQ ID NO: 4205978 - DNA, 25 bp, Homo sapien
aaaactgaagtgtcacacatttggg

SEQ ID NO: 4205979 - DNA, 25 bp, Homo sapien
ctgagcaggaatttcacaggatttc

SEQ ID NO: 4205980 - DNA, 25 bp, Homo sapien
caggatttcctgcatgacccaaagt

SEQ ID NO: 4205981 - DNA, 25 bp, Homo sapien
cccaaagtccggcagatggatatac

SEQ ID NO: 4205982 - DNA, 25 bp, Homo sapien
ggatatacaggtgccatgcccacaa

SEQ ID NO: 4205983 - DNA, 25 bp, Homo sapien
gcttactgtctgagataatcccttt

SEQ ID NO: 4205984 - DNA, 25 bp, Homo sapien
ttactgtctgagataatccctttct

SEQ ID NO: 4205985 - DNA, 25 bp, Homo sapien
tggcttactgtctgagataatccct

SEQ ID NO: 4205986 - DNA, 25 bp, Homo sapien
ctggcttactgtctgagataatccc

SEQ ID NO: 4205987 - DNA, 25 bp, Homo sapien
tgcctctcggttttagtcattgtat

SEQ ID NO: 4205988 - DNA, 25 bp, Homo sapien
tttttgcttgcctcacagacatctg

SEQ ID NO: 4205989 - DNA, 25 bp, Homo sapien
tttaaacattcgtatcaagatctcc

SEQ ID NO: 4205990 - DNA, 25 bp, Homo sapien
ttggagaaaagatggtgcctctcgg

SEQ ID NO: 4205991 - DNA, 25 bp, Homo sapien
caaatacattggaggtgttcgccaa

SEQ ID NO: 4205992 - DNA, 25 bp, Homo sapien
ggaaagtgccctaaaacgcctctgc

SEQ ID NO: 4205993 - DNA, 25 bp, Homo sapien
ttcgccaactaccatgggtcccaag

SEQ ID NO: 4205994 - DNA, 25 bp, Homo sapien
gctgaaatgctttggaacttaggag

SEQ ID NO: 4205995 - DNA, 25 bp, Homo sapien
gaccatgtagaactcgaaatgccct

SEQ ID NO: 4205996 - DNA, 25 bp, Homo sapien
gaaacatctacgcaagaacttggaa

SEQ ID NO: 4205997 - DNA, 25 bp, Homo sapien
ccacttaagaagaggccggcagttc

SEQ ID NO: 4205998 - DNA, 25 bp, Homo sapien
taaagaggccagctgcaagtctaca

SEQ ID NO: 4205999 - DNA, 25 bp, Homo sapien
gtcccttgtaactcatgggccctac

SEQ ID NO: 4206000 - DNA, 25 bp, Homo sapien
tctgcatacgggtcccttgtaactc

SEQ ID NO: 4206001 - DNA, 25 bp, Homo sapien
catgggccctactatatatagcttc

SEQ ID NO: 4206002 - DNA, 25 bp, Homo sapien
atccagtatctgcatacgggtccct

SEQ ID NO: 4206003 - DNA, 25 bp, Homo sapien
tccacaatgtcacttatgtcatcta

SEQ ID NO: 4206004 - DNA, 25 bp, Homo sapien
caatttttgtagtgttcgttgttgg

SEQ ID NO: 4206005 - DNA, 25 bp, Homo sapien
tggtagacttcatttgtgcagtatt

SEQ ID NO: 4206006 - DNA, 25 bp, Homo sapien
gtcatctatgaagatattattctga

SEQ ID NO: 4206007 - DNA, 25 bp, Homo sapien
cttcatgggactcaatccttgacaa

SEQ ID NO: 4206008 - DNA, 25 bp, Homo sapien
caatacttccttaaaggatggattg

SEQ ID NO: 4206009 - DNA, 25 bp, Homo sapien
ttccttaaaggatggattggtagct

SEQ ID NO: 4206010 - DNA, 25 bp, Homo sapien
gggactcaatccttgacaatacttc

SEQ ID NO: 4206011 - DNA, 25 bp, Homo sapien
aggggaaggcgggtcaccctctgca

SEQ ID NO: 4206012 - DNA, 25 bp, Homo sapien
ggggaaggcgggtcaccctctgcat

SEQ ID NO: 4206013 - DNA, 25 bp, Homo sapien
agcaggggaaggcgggtcaccctct

SEQ ID NO: 4206014 - DNA, 25 bp, Homo sapien
atccatcagcaggggaaggcgggtc

SEQ ID NO: 4206015 - DNA, 25 bp, Homo sapien
catacttcggagagtccttaggtgt

SEQ ID NO: 4206016 - DNA, 25 bp, Homo sapien
cttccttcaaggctcttttgcagac

SEQ ID NO: 4206017 - DNA, 25 bp, Homo sapien
gacttcatacttcggagagtcctta

SEQ ID NO: 4206018 - DNA, 25 bp, Homo sapien
cttttgcagacttcatacttcggag

SEQ ID NO: 4206019 - DNA, 25 bp, Homo sapien
ggagcataccccaacatgataaaaa

SEQ ID NO: 4206020 - DNA, 25 bp, Homo sapien
ttcaacataggcaaaccaatcagtg

SEQ ID NO: 4206021 - DNA, 25 bp, Homo sapien
gagagattatcatggccaagcggga

SEQ ID NO: 4206022 - DNA, 25 bp, Homo sapien
aaggccaatatttccgtgataccaa

SEQ ID NO: 4206023 - DNA, 25 bp, Homo sapien
agagctgtacttagccttattactt

SEQ ID NO: 4206024 - DNA, 25 bp, Homo sapien
ctttaccacagctaacaatggttga

SEQ ID NO: 4206025 - DNA, 25 bp, Homo sapien
ctccctttaccacagctaacaatgg

SEQ ID NO: 4206026 - DNA, 25 bp, Homo sapien
tgtacttagccttattacttcctcc

SEQ ID NO: 4206027 - DNA, 25 bp, Homo sapien
tcctttccatcttccgggcgccctc

SEQ ID NO: 4206028 - DNA, 25 bp, Homo sapien
taaattccagctgggagttaattgt

SEQ ID NO: 4206029 - DNA, 25 bp, Homo sapien
ttaattgtgtacatcatctcagtcc

SEQ ID NO: 4206030 - DNA, 25 bp, Homo sapien
cgccctcattgcatagtcgaaccaa

SEQ ID NO: 4206031 - DNA, 25 bp, Homo sapien
gcaagtcaggacatctagaccttag

SEQ ID NO: 4206032 - DNA, 25 bp, Homo sapien
gattttatcaccactagccaagtga

SEQ ID NO: 4206033 - DNA, 25 bp, Homo sapien
actacatgacatggcagagaatctg

SEQ ID NO: 4206034 - DNA, 25 bp, Homo sapien
gaagagtttacactgacctgcaagt

SEQ ID NO: 4206035 - DNA, 25 bp, Homo sapien
ccagtgaccaaagctaaattgaaat

SEQ ID NO: 4206036 - DNA, 25 bp, Homo sapien
gataatgagcacatcgttaaagaga

SEQ ID NO: 4206037 - DNA, 25 bp, Homo sapien
gatgtccttcttgagaaaagcacag

SEQ ID NO: 4206038 - DNA, 25 bp, Homo sapien
cttcaacataggctgtcaattcacc

SEQ ID NO: 4206039 - DNA, 25 bp, Homo sapien
tagacttgctgtttggatgtccttc

SEQ ID NO: 4206040 - DNA, 25 bp, Homo sapien
ctgccagtctggatcggaggaggaa

SEQ ID NO: 4206041 - DNA, 25 bp, Homo sapien
cgagcagcttttctcagtagctgaa

SEQ ID NO: 4206042 - DNA, 25 bp, Homo sapien
ggaatgtgcccagtataaaccttct

SEQ ID NO: 4206043 - DNA, 25 bp, Homo sapien
gaagagtaactgtcctcccgagcag

SEQ ID NO: 4206044 - DNA, 25 bp, Homo sapien
acacatctgcatagttgtgtcattg

SEQ ID NO: 4206045 - DNA, 25 bp, Homo sapien
acatctgcatagttgtgtcattgaa

SEQ ID NO: 4206046 - DNA, 25 bp, Homo sapien
tgtcattgaatatgcctgaacaagg

SEQ ID NO: 4206047 - DNA, 25 bp, Homo sapien
gttgtgtcattgaatatgcctgaac

SEQ ID NO: 4206048 - DNA, 25 bp, Homo sapien
aatcattgacgttgtaactttcttc

SEQ ID NO: 4206049 - DNA, 25 bp, Homo sapien
caccaatagctgatctcttaaggaa

SEQ ID NO: 4206050 - DNA, 25 bp, Homo sapien
gaattaagctcttcattgtcacaag

SEQ ID NO: 4206051 - DNA, 25 bp, Homo sapien
tcttaaggaataatcattgacgttg

SEQ ID NO: 4206052 - DNA, 25 bp, Homo sapien
ggcagagctctgtcttgaatagagc

SEQ ID NO: 4206053 - DNA, 25 bp, Homo sapien
gcagagctctgtcttgaatagagca

SEQ ID NO: 4206054 - DNA, 25 bp, Homo sapien
cagagctctgtcttgaatagagcat

SEQ ID NO: 4206055 - DNA, 25 bp, Homo sapien
tggcagagctctgtcttgaatagag

SEQ ID NO: 4206056 - DNA, 25 bp, Homo sapien
ctgtcagagtaaagaggtgactgac

SEQ ID NO: 4206057 - DNA, 25 bp, Homo sapien
tctcagctcctagtagcatctccac

SEQ ID NO: 4206058 - DNA, 25 bp, Homo sapien
ctcagctcctagtagcatctccact

SEQ ID NO: 4206059 - DNA, 25 bp, Homo sapien
ctccactttctcattcgcgtggtta

SEQ ID NO: 4206060 - DNA, 25 bp, Homo sapien
catctccactttctcattcgcgtgg

SEQ ID NO: 4206061 - DNA, 25 bp, Homo sapien
tccagactggataacgcaaaagagt

SEQ ID NO: 4206062 - DNA, 25 bp, Homo sapien
gaaagccacgggcagtgttgatgtt

SEQ ID NO: 4206063 - DNA, 25 bp, Homo sapien
gatggatctgttctgacacagaagc

SEQ ID NO: 4206064 - DNA, 25 bp, Homo sapien
gagtgtcaatagtaccatttacaga

SEQ ID NO: 4206065 - DNA, 25 bp, Homo sapien
tgatttctctaaagtccttcgaacc

SEQ ID NO: 4206066 - DNA, 25 bp, Homo sapien
taggattgtgaagatagttgtttct

SEQ ID NO: 4206067 - DNA, 25 bp, Homo sapien
cttttgatttctctaaagtccttcg

SEQ ID NO: 4206068 - DNA, 25 bp, Homo sapien
cgaacctttgtaaagaataggattg

SEQ ID NO: 4206069 - DNA, 25 bp, Homo sapien
tcttatggaataccaggcatcagct

SEQ ID NO: 4206070 - DNA, 25 bp, Homo sapien
caaaacatttgacctacgtagagaa

SEQ ID NO: 4206071 - DNA, 25 bp, Homo sapien
cagtttcctatcagctatggtagca

SEQ ID NO: 4206072 - DNA, 25 bp, Homo sapien
gaacattggctgaggactccatcac

SEQ ID NO: 4206073 - DNA, 25 bp, Homo sapien
tcccagggcagttatccagcgggct

SEQ ID NO: 4206074 - DNA, 25 bp, Homo sapien
gtcccagggcagttatccagcgggc

SEQ ID NO: 4206075 - DNA, 25 bp, Homo sapien
cagttatccagcgggctcgctcgct

SEQ ID NO: 4206076 - DNA, 25 bp, Homo sapien
ggcagttatccagcgggctcgctcg

SEQ ID NO: 4206077 - DNA, 25 bp, Homo sapien
taaatgacctaacgatttccacctg

SEQ ID NO: 4206078 - DNA, 25 bp, Homo sapien
gcagtaaatgacctaacgatttcca

SEQ ID NO: 4206079 - DNA, 25 bp, Homo sapien
ctgcttagcagtaaatgacctaacg

SEQ ID NO: 4206080 - DNA, 25 bp, Homo sapien
tgacctaacgatttccacctgggtc

SEQ ID NO: 4206081 - DNA, 25 bp, Homo sapien
gatagatgaggacgacgtcagccac

SEQ ID NO: 4206082 - DNA, 25 bp, Homo sapien
cacgttgatagatgaggacgacgtc

SEQ ID NO: 4206083 - DNA, 25 bp, Homo sapien
catcgctgacacgttgatagatgag

SEQ ID NO: 4206084 - DNA, 25 bp, Homo sapien
cgctgacacgttgatagatgaggac

SEQ ID NO: 4206085 - DNA, 25 bp, Homo sapien
cctcgggtctatagcactctgcatc

SEQ ID NO: 4206086 - DNA, 25 bp, Homo sapien
tgacaaaatgacactcctcgggtct

SEQ ID NO: 4206087 - DNA, 25 bp, Homo sapien
gaccacgagtgtcccataagaacgc

SEQ ID NO: 4206088 - DNA, 25 bp, Homo sapien
gaaaacgtcatggtttagccttaga

SEQ ID NO: 4206089 - DNA, 25 bp, Homo sapien
tgttatctccttggcacattccata

SEQ ID NO: 4206090 - DNA, 25 bp, Homo sapien
tctttctccatctcgtagtcgttcc

SEQ ID NO: 4206091 - DNA, 25 bp, Homo sapien
ttggtctccagtcctagcaagcgtc

SEQ ID NO: 4206092 - DNA, 25 bp, Homo sapien
tccataggaaaccagcctctttctc

SEQ ID NO: 4206093 - DNA, 25 bp, Homo sapien
gagagagcagaacaacctggcaagc

SEQ ID NO: 4206094 - DNA, 25 bp, Homo sapien
gctattctgtgtacctcaggaggtc

SEQ ID NO: 4206095 - DNA, 25 bp, Homo sapien
aaccagcccggtaagtgtcgtgcaa

SEQ ID NO: 4206096 - DNA, 25 bp, Homo sapien
gagcagagatgacctgatccctgaa

SEQ ID NO: 4206097 - DNA, 25 bp, Homo sapien
tactgggagaaccatacaaggatgt

SEQ ID NO: 4206098 - DNA, 25 bp, Homo sapien
tcaagtgtcaatgtccccttcctgg

SEQ ID NO: 4206099 - DNA, 25 bp, Homo sapien
tagtaatgcaaggatagagaaaacc

SEQ ID NO: 4206100 - DNA, 25 bp, Homo sapien
tatacaatcttgctaatactgggag

SEQ ID NO: 4206101 - DNA, 25 bp, Homo sapien
cgtggtggcatactcttacaatccc

SEQ ID NO: 4206102 - DNA, 25 bp, Homo sapien
tggtggcatactcttacaatcccag

SEQ ID NO: 4206103 - DNA, 25 bp, Homo sapien
ggtggcatactcttacaatcccagc

SEQ ID NO: 4206104 - DNA, 25 bp, Homo sapien
ggcgtggtggcatactcttacaatc

SEQ ID NO: 4206105 - DNA, 25 bp, Homo sapien
ggcaaagcagcctcacgtcagtttt

SEQ ID NO: 4206106 - DNA, 25 bp, Homo sapien
tgctcagatctcaaggtactcacgg

SEQ ID NO: 4206107 - DNA, 25 bp, Homo sapien
tccaagggttagaagtccccagtgc

SEQ ID NO: 4206108 - DNA, 25 bp, Homo sapien
taatacaaaatgatccccgtgcaag

SEQ ID NO: 4206109 - DNA, 25 bp, Homo sapien
ttttcttctactacacagctgtgta

SEQ ID NO: 4206110 - DNA, 25 bp, Homo sapien
gtagttccgttatggctttatctcc

SEQ ID NO: 4206111 - DNA, 25 bp, Homo sapien
tccatcaacagcaatggtaagtact

SEQ ID NO: 4206112 - DNA, 25 bp, Homo sapien
taatctggcattaaacgcggttcca

SEQ ID NO: 4206113 - DNA, 25 bp, Homo sapien
cccagctgatatagaacatttgtat

SEQ ID NO: 4206114 - DNA, 25 bp, Homo sapien
tgatctgcgttttgtcacttttcgt

SEQ ID NO: 4206115 - DNA, 25 bp, Homo sapien
acacccagctgatatagaacatttg

SEQ ID NO: 4206116 - DNA, 25 bp, Homo sapien
ttctatcccctcgaaacccattgat

SEQ ID NO: 4206117 - DNA, 25 bp, Homo sapien
tatcttcaggctacttttctagctg

SEQ ID NO: 4206118 - DNA, 25 bp, Homo sapien
taaaaatctgtgtctgatgggatgc

SEQ ID NO: 4206119 - DNA, 25 bp, Homo sapien
tttgttaactccttgtatcttcagg

SEQ ID NO: 4206120 - DNA, 25 bp, Homo sapien
aaaaatttgaagcttgggatgaggg

SEQ ID NO: 4206121 - DNA, 25 bp, Homo sapien
caaatatgcagctaaatgatttatc

SEQ ID NO: 4206122 - DNA, 25 bp, Homo sapien
tcacaaaggaaggactatgtagtaa

SEQ ID NO: 4206123 - DNA, 25 bp, Homo sapien
tactggcgagtaaaacaaatatgca

SEQ ID NO: 4206124 - DNA, 25 bp, Homo sapien
tctttaattactggcgagtaaaaca

SEQ ID NO: 4206125 - DNA, 25 bp, Homo sapien
tggcgctccccgtagcgggtgtact

SEQ ID NO: 4206126 - DNA, 25 bp, Homo sapien
gaaatgtaaatgaggcgcaaatata

SEQ ID NO: 4206127 - DNA, 25 bp, Homo sapien
caaatatattatgctggcgctcccc

SEQ ID NO: 4206128 - DNA, 25 bp, Homo sapien
cgggtgtactgcgtaacattagcca

SEQ ID NO: 4206129 - DNA, 25 bp, Homo sapien
gggcacctgaaaggccgcgaaatcg

SEQ ID NO: 4206130 - DNA, 25 bp, Homo sapien
tcggcatgtggtacgcgaaaaaaca

SEQ ID NO: 4206131 - DNA, 25 bp, Homo sapien
tcatggaggtaaccgaggctccgga

SEQ ID NO: 4206132 - DNA, 25 bp, Homo sapien
taatctcggattcagtagtggagag

SEQ ID NO: 4206133 - DNA, 25 bp, Homo sapien
tgtgcggtgctacggaagcaaaacg

SEQ ID NO: 4206134 - DNA, 25 bp, Homo sapien
aaatggcccgccctcttgtgcggtg

SEQ ID NO: 4206135 - DNA, 25 bp, Homo sapien
gaaaccactgcttgtgacgctaaat

SEQ ID NO: 4206136 - DNA, 25 bp, Homo sapien
agcaaaacggaagtgggcgcacagt

SEQ ID NO: 4206137 - DNA, 25 bp, Homo sapien
gttgtatttctttctggaagccctg

SEQ ID NO: 4206138 - DNA, 25 bp, Homo sapien
tatggttgtatttctttctggaagc

SEQ ID NO: 4206139 - DNA, 25 bp, Homo sapien
agtatggttgtatttctttctggaa

SEQ ID NO: 4206140 - DNA, 25 bp, Homo sapien
tggttgtatttctttctggaagccc

SEQ ID NO: 4206141 - DNA, 25 bp, Homo sapien
tagatgagcaatgtgccgatgtcat

SEQ ID NO: 4206142 - DNA, 25 bp, Homo sapien
acatgtgcacgaatacccaatcatc

SEQ ID NO: 4206143 - DNA, 25 bp, Homo sapien
acacatgtgcacgaatacccaatca

SEQ ID NO: 4206144 - DNA, 25 bp, Homo sapien
ttagatgagcaatgtgccgatgtca

SEQ ID NO: 4206145 - DNA, 25 bp, Homo sapien
tttttaggatattctaagtcagtag

SEQ ID NO: 4206146 - DNA, 25 bp, Homo sapien
gatccacctgtcttttttaggatat

SEQ ID NO: 4206147 - DNA, 25 bp, Homo sapien
agtagttctcagatctggctatata

SEQ ID NO: 4206148 - DNA, 25 bp, Homo sapien
aggatattctaagtcagtagttctc

SEQ ID NO: 4206149 - DNA, 25 bp, Homo sapien
gtgcccagcagcttcgcttcttctc

SEQ ID NO: 4206150 - DNA, 25 bp, Homo sapien
gcccagcagcttcgcttcttctctc

SEQ ID NO: 4206151 - DNA, 25 bp, Homo sapien
tgcccagcagcttcgcttcttctct

SEQ ID NO: 4206152 - DNA, 25 bp, Homo sapien
ggtgcccagcagcttcgcttcttct

SEQ ID NO: 4206153 - DNA, 25 bp, Homo sapien
tgtgaggatcgagatgcctttcctg

SEQ ID NO: 4206154 - DNA, 25 bp, Homo sapien
tggctcgccaaaatgtaactccaaa

SEQ ID NO: 4206155 - DNA, 25 bp, Homo sapien
ctggctcgccaaaatgtaactccaa

SEQ ID NO: 4206156 - DNA, 25 bp, Homo sapien
catgtgaggatcgagatgcctttcc

SEQ ID NO: 4206157 - DNA, 25 bp, Homo sapien
ggaactggacggcagtcgttctggc

SEQ ID NO: 4206158 - DNA, 25 bp, Homo sapien
aactttttaggctagtcagagacca

SEQ ID NO: 4206159 - DNA, 25 bp, Homo sapien
cagagaccagtatgtcgatccaggg

SEQ ID NO: 4206160 - DNA, 25 bp, Homo sapien
ctgttgggaactggacggcagtcgt

SEQ ID NO: 4206161 - DNA, 25 bp, Homo sapien
cttttcgatgtaaatttcatcagcc

SEQ ID NO: 4206162 - DNA, 25 bp, Homo sapien
atcttccaagtgcttttcgatgtaa

SEQ ID NO: 4206163 - DNA, 25 bp, Homo sapien
taaagtacttggcaatccgtgatga

SEQ ID NO: 4206164 - DNA, 25 bp, Homo sapien
acttggcaatccgtgatgaaagctc

SEQ ID NO: 4206165 - DNA, 25 bp, Homo sapien
ctattcatggtaggttagctttacc

SEQ ID NO: 4206166 - DNA, 25 bp, Homo sapien
taaaatctcacacatcatactggtg

SEQ ID NO: 4206167 - DNA, 25 bp, Homo sapien
catactggtgcagaagatttgaggt

SEQ ID NO: 4206168 - DNA, 25 bp, Homo sapien
tgaggtatagatgcctgaataaagg

SEQ ID NO: 4206169 - DNA, 25 bp, Homo sapien
cttggttgagctctgctacatctga

SEQ ID NO: 4206170 - DNA, 25 bp, Homo sapien
accatccaccttggttgagctctgc

SEQ ID NO: 4206171 - DNA, 25 bp, Homo sapien
tgacccctggtgttgactggagaat

SEQ ID NO: 4206172 - DNA, 25 bp, Homo sapien
tctgctacatctgacccctggtgtt

SEQ ID NO: 4206173 - DNA, 25 bp, Homo sapien
ctacagtttgtgcaaaagtgttaca

SEQ ID NO: 4206174 - DNA, 25 bp, Homo sapien
gtgttacaggcacgggtaattttgc

SEQ ID NO: 4206175 - DNA, 25 bp, Homo sapien
tttgtgcaaaagtgttacaggcacg

SEQ ID NO: 4206176 - DNA, 25 bp, Homo sapien
gccttgaaaggaataatagttcacc

SEQ ID NO: 4206177 - DNA, 25 bp, Homo sapien
aaagaattttcaacccagaatgtca

SEQ ID NO: 4206178 - DNA, 25 bp, Homo sapien
tatccaaccaaactaagcttcataa

SEQ ID NO: 4206179 - DNA, 25 bp, Homo sapien
gccaataatcaacattcttaaaaga

SEQ ID NO: 4206180 - DNA, 25 bp, Homo sapien
ataagtgaaggagaaataaaatcct

SEQ ID NO: 4206181 - DNA, 25 bp, Homo sapien
tacatactggccgtctgtgaaacca

SEQ ID NO: 4206182 - DNA, 25 bp, Homo sapien
gttctgagagtgctacatactggcc

SEQ ID NO: 4206183 - DNA, 25 bp, Homo sapien
actggccctggaaactactgagctc

SEQ ID NO: 4206184 - DNA, 25 bp, Homo sapien
caagtttctaaagtacgtaggccag

SEQ ID NO: 4206185 - DNA, 25 bp, Homo sapien
tttccttgtatagccagcatctgtc

SEQ ID NO: 4206186 - DNA, 25 bp, Homo sapien
ttccttgtatagccagcatctgtcc

SEQ ID NO: 4206187 - DNA, 25 bp, Homo sapien
ttctgaattatgttctactttcttt

SEQ ID NO: 4206188 - DNA, 25 bp, Homo sapien
ctgtccttgaagtcacggttacaga

SEQ ID NO: 4206189 - DNA, 25 bp, Homo sapien
gactatgctaaacttatgcaaactg

SEQ ID NO: 4206190 - DNA, 25 bp, Homo sapien
gctgtccttgaagtcacggttacag

SEQ ID NO: 4206191 - DNA, 25 bp, Homo sapien
tgggttaagactatgctaaacttat

SEQ ID NO: 4206192 - DNA, 25 bp, Homo sapien
cacatgatgcaataccggatgggat

SEQ ID NO: 4206193 - DNA, 25 bp, Homo sapien
gagtagcacattccactgagtcctg

SEQ ID NO: 4206194 - DNA, 25 bp, Homo sapien
cggatgggattgtacttcctgtcaa

SEQ ID NO: 4206195 - DNA, 25 bp, Homo sapien
aagtgtttggcttcacgtgtgacag

SEQ ID NO: 4206196 - DNA, 25 bp, Homo sapien
tagaaaggagctggctaccatttgc

SEQ ID NO: 4206197 - DNA, 25 bp, Homo sapien
gagggacctcaactacaccaatgta

SEQ ID NO: 4206198 - DNA, 25 bp, Homo sapien
gaggctctcggctgataaatgatgg

SEQ ID NO: 4206199 - DNA, 25 bp, Homo sapien
tcatgtatggaacgtgacaaagggt

SEQ ID NO: 4206200 - DNA, 25 bp, Homo sapien
catccatgtcttcttaacttggaca

SEQ ID NO: 4206201 - DNA, 25 bp, Homo sapien
tccttcataaaactgcccaaatcag

SEQ ID NO: 4206202 - DNA, 25 bp, Homo sapien
aactgcccaaatcagctcttctgga

SEQ ID NO: 4206203 - DNA, 25 bp, Homo sapien
tcttctggatctatgaagtgtaagt

SEQ ID NO: 4206204 - DNA, 25 bp, Homo sapien
cttctttccgcccaatgatgtccca

SEQ ID NO: 4206205 - DNA, 25 bp, Homo sapien
tcaacttctttccgcccaatgatgt

SEQ ID NO: 4206206 - DNA, 25 bp, Homo sapien
aacttctttccgcccaatgatgtcc

SEQ ID NO: 4206207 - DNA, 25 bp, Homo sapien
ttctttccgcccaatgatgtcccaa

SEQ ID NO: 4206208 - DNA, 25 bp, Homo sapien
catattctagagtagtaagaacaag

SEQ ID NO: 4206209 - DNA, 25 bp, Homo sapien
tagtaagaacaaggggagatactac

SEQ ID NO: 4206210 - DNA, 25 bp, Homo sapien
gagtagtaagaacaaggggagatac

SEQ ID NO: 4206211 - DNA, 25 bp, Homo sapien
tattctagagtagtaagaacaaggg

SEQ ID NO: 4206212 - DNA, 25 bp, Homo sapien
tctaatgtgctcaagttaaaatgta

SEQ ID NO: 4206213 - DNA, 25 bp, Homo sapien
ctaatgtgctcaagttaaaatgtac

SEQ ID NO: 4206214 - DNA, 25 bp, Homo sapien
ctctaatgtgctcaagttaaaatgt

SEQ ID NO: 4206215 - DNA, 25 bp, Homo sapien
taatgtgctcaagttaaaatgtact

SEQ ID NO: 4206216 - DNA, 25 bp, Homo sapien
tctgaatttccctgcgatttgggta

SEQ ID NO: 4206217 - DNA, 25 bp, Homo sapien
tctcctcactgagtcttccggcatt

SEQ ID NO: 4206218 - DNA, 25 bp, Homo sapien
cgatttgggtagctctttcttctgg

SEQ ID NO: 4206219 - DNA, 25 bp, Homo sapien
ttactttcattagaggttctacatc

SEQ ID NO: 4206220 - DNA, 25 bp, Homo sapien
cttgccatggatgcggaaccagacc

SEQ ID NO: 4206221 - DNA, 25 bp, Homo sapien
aggctcacaaaagctccacgcacag

SEQ ID NO: 4206222 - DNA, 25 bp, Homo sapien
tggatgcggaaccagaccttcctgt

SEQ ID NO: 4206223 - DNA, 25 bp, Homo sapien
gaccttcctgtcacatttgataaga

SEQ ID NO: 4206224 - DNA, 25 bp, Homo sapien
cgccaacgtccatgttgctgtttct

SEQ ID NO: 4206225 - DNA, 25 bp, Homo sapien
gccaacgtccatgttgctgtttctc

SEQ ID NO: 4206226 - DNA, 25 bp, Homo sapien
tgtgtactttccttagcaaaggcac

SEQ ID NO: 4206227 - DNA, 25 bp, Homo sapien
ggcactacctccacgaattcctttg

SEQ ID NO: 4206228 - DNA, 25 bp, Homo sapien
gatttttgtcaactgaatgtcgctg

SEQ ID NO: 4206229 - DNA, 25 bp, Homo sapien
gaatgtcgctgtgtactttccttag

SEQ ID NO: 4206230 - DNA, 25 bp, Homo sapien
ttttcagtaataattctgtattgcc

SEQ ID NO: 4206231 - DNA, 25 bp, Homo sapien
agtaataattctgtattgccacaca

SEQ ID NO: 4206232 - DNA, 25 bp, Homo sapien
ttctgtattgccacacagtcatttc

SEQ ID NO: 4206233 - DNA, 25 bp, Homo sapien
ttcagtaataattctgtattgccac

SEQ ID NO: 4206234 - DNA, 25 bp, Homo sapien
tgtctaaagcagttagctggccatt

SEQ ID NO: 4206235 - DNA, 25 bp, Homo sapien
cagtttgtgttccatattattaatt

SEQ ID NO: 4206236 - DNA, 25 bp, Homo sapien
gctggccattagtgatgcacaaagc

SEQ ID NO: 4206237 - DNA, 25 bp, Homo sapien
gtgatgcacaaagcttttttcagtt

SEQ ID NO: 4206238 - DNA, 25 bp, Homo sapien
ctcctccagcaatgcctagtagttt

SEQ ID NO: 4206239 - DNA, 25 bp, Homo sapien
tcctccagcaatgcctagtagtttc

SEQ ID NO: 4206240 - DNA, 25 bp, Homo sapien
ctccagcaatgcctagtagtttcat

SEQ ID NO: 4206241 - DNA, 25 bp, Homo sapien
tctcctccagcaatgcctagtagtt

SEQ ID NO: 4206242 - DNA, 25 bp, Homo sapien
tattgctccgtaagggcccggtctc

SEQ ID NO: 4206243 - DNA, 25 bp, Homo sapien
catcatattcctattggaagaatct

SEQ ID NO: 4206244 - DNA, 25 bp, Homo sapien
cgtaagggcccggtctcagttgaca

SEQ ID NO: 4206245 - DNA, 25 bp, Homo sapien
gggcccggtctcagttgacaggaac

SEQ ID NO: 4206246 - DNA, 25 bp, Homo sapien
gtgtagttgtgttagtaggagtcat

SEQ ID NO: 4206247 - DNA, 25 bp, Homo sapien
agcagtggtaagagtagtatcatca

SEQ ID NO: 4206248 - DNA, 25 bp, Homo sapien
cttttactgatgttatgagcagaaa

SEQ ID NO: 4206249 - DNA, 25 bp, Homo sapien
tgttagtaggagtcataggagcagt

SEQ ID NO: 4206250 - DNA, 25 bp, Homo sapien
tttgaaccgagtcgccatccttctc

SEQ ID NO: 4206251 - DNA, 25 bp, Homo sapien
gatctcctttgaaccgagtcgccat

SEQ ID NO: 4206252 - DNA, 25 bp, Homo sapien
acactgtggctgctcgcttcactgg

SEQ ID NO: 4206253 - DNA, 25 bp, Homo sapien
ctccttcccttggctatgtgaaact

SEQ ID NO: 4206254 - DNA, 25 bp, Homo sapien
cagtcttgtctagctctgtaatgga

SEQ ID NO: 4206255 - DNA, 25 bp, Homo sapien
taatggagtaatggactgatggaat

SEQ ID NO: 4206256 - DNA, 25 bp, Homo sapien
agaaatgtcagtcttgtctagctct

SEQ ID NO: 4206257 - DNA, 25 bp, Homo sapien
aatgtcagtcttgtctagctctgta

SEQ ID NO: 4206258 - DNA, 25 bp, Homo sapien
atctagaagtgaggttaacaagggc

SEQ ID NO: 4206259 - DNA, 25 bp, Homo sapien
gtgaggttaacaagggcctctgatt

SEQ ID NO: 4206260 - DNA, 25 bp, Homo sapien
ttaacaagggcctctgattcactca

SEQ ID NO: 4206261 - DNA, 25 bp, Homo sapien
gaacaatctagaagtgaggttaaca

SEQ ID NO: 4206262 - DNA, 25 bp, Homo sapien
tgtttaagaaattaagattccatct

SEQ ID NO: 4206263 - DNA, 25 bp, Homo sapien
taagaaattaagattccatcttggg

SEQ ID NO: 4206264 - DNA, 25 bp, Homo sapien
gaaattaagattccatcttgggctt

SEQ ID NO: 4206265 - DNA, 25 bp, Homo sapien
tttaagaaattaagattccatcttg

SEQ ID NO: 4206266 - DNA, 25 bp, Homo sapien
cctttaggtacataacacgagtcat

SEQ ID NO: 4206267 - DNA, 25 bp, Homo sapien
ggcttcagatcctttaggtacataa

SEQ ID NO: 4206268 - DNA, 25 bp, Homo sapien
tcagatcctttaggtacataacacg

SEQ ID NO: 4206269 - DNA, 25 bp, Homo sapien
gatcctttaggtacataacacgagt

SEQ ID NO: 4206270 - DNA, 25 bp, Homo sapien
atgctggcagcgctcgcagccctcc

SEQ ID NO: 4206271 - DNA, 25 bp, Homo sapien
tcggcgcctactcggcctaggcgcc

SEQ ID NO: 4206272 - DNA, 25 bp, Homo sapien
tctcggcgcctactcggcctaggcg

SEQ ID NO: 4206273 - DNA, 25 bp, Homo sapien
cgcgcttgaggagctcttgagcccg

SEQ ID NO: 4206274 - DNA, 25 bp, Homo sapien
gtaagatcataatctatatgcttca

SEQ ID NO: 4206275 - DNA, 25 bp, Homo sapien
tgataagctttctctacacctaccc

SEQ ID NO: 4206276 - DNA, 25 bp, Homo sapien
accacactcctctgataagctttct

SEQ ID NO: 4206277 - DNA, 25 bp, Homo sapien
taccccaagacgatgtaagatcata

SEQ ID NO: 4206278 - DNA, 25 bp, Homo sapien
ttctgatttatgtccacagcactgc

SEQ ID NO: 4206279 - DNA, 25 bp, Homo sapien
tatgttctcccatacactgttctct

SEQ ID NO: 4206280 - DNA, 25 bp, Homo sapien
cttgtgcttgggcttcaagctctca

SEQ ID NO: 4206281 - DNA, 25 bp, Homo sapien
gcagaactgggaccaccctggttct

SEQ ID NO: 4206282 - DNA, 25 bp, Homo sapien
gactcatcagatttgtcgtcactgc

SEQ ID NO: 4206283 - DNA, 25 bp, Homo sapien
gaagatccaagatgacaccttaagg

SEQ ID NO: 4206284 - DNA, 25 bp, Homo sapien
ctatagcatctcaagaacagactca

SEQ ID NO: 4206285 - DNA, 25 bp, Homo sapien
tcactgcctgagaagatccaagatg

SEQ ID NO: 4206286 - DNA, 25 bp, Homo sapien
ccactcactgacaggccctgatgtg

SEQ ID NO: 4206287 - DNA, 25 bp, Homo sapien
ctaatgctatctgtcccccaggccc

SEQ ID NO: 4206288 - DNA, 25 bp, Homo sapien
gcccccactcactgacaggccctga

SEQ ID NO: 4206289 - DNA, 25 bp, Homo sapien
ccccactcactgacaggccctgatg

SEQ ID NO: 4206290 - DNA, 25 bp, Homo sapien
tcctttatgaactcatcatactcca

SEQ ID NO: 4206291 - DNA, 25 bp, Homo sapien
ggcaatgactccttcctttatgaac

SEQ ID NO: 4206292 - DNA, 25 bp, Homo sapien
aatgactccttcctttatgaactca

SEQ ID NO: 4206293 - DNA, 25 bp, Homo sapien
gactccttcctttatgaactcatca

SEQ ID NO: 4206294 - DNA, 25 bp, Homo sapien
tagtgatctgtccagatggagatga

SEQ ID NO: 4206295 - DNA, 25 bp, Homo sapien
caggaaggtggtcactggaatcaga

SEQ ID NO: 4206296 - DNA, 25 bp, Homo sapien
gacacagtggaaatagtgatctgtc

SEQ ID NO: 4206297 - DNA, 25 bp, Homo sapien
gggcaacacagtagctgcaaggaca

SEQ ID NO: 4206298 - DNA, 25 bp, Homo sapien
cctaggtataatgcctccttctttg

SEQ ID NO: 4206299 - DNA, 25 bp, Homo sapien
gagtcctaggtataatgcctccttc

SEQ ID NO: 4206300 - DNA, 25 bp, Homo sapien
tggagtcctaggtataatgcctcct

SEQ ID NO: 4206301 - DNA, 25 bp, Homo sapien
cctggagtcctaggtataatgcctc

SEQ ID NO: 4206302 - DNA, 25 bp, Homo sapien
ctttggcttccaggagagtgttgtg

SEQ ID NO: 4206303 - DNA, 25 bp, Homo sapien
ggcttccaggagagtgttgtgtcca

SEQ ID NO: 4206304 - DNA, 25 bp, Homo sapien
ttggcttccaggagagtgttgtgtc

SEQ ID NO: 4206305 - DNA, 25 bp, Homo sapien
tggcttccaggagagtgttgtgtcc

SEQ ID NO: 4206306 - DNA, 25 bp, Homo sapien
ctgtgtgggtggctttctgaagggc

SEQ ID NO: 4206307 - DNA, 25 bp, Homo sapien
actctgtgtgggtggctttctgaag

SEQ ID NO: 4206308 - DNA, 25 bp, Homo sapien
gtgtgggtggctttctgaagggctt

SEQ ID NO: 4206309 - DNA, 25 bp, Homo sapien
ttactctgtgtgggtggctttctga

SEQ ID NO: 4206310 - DNA, 25 bp, Homo sapien
tgttgcagatactctgctccacctt

SEQ ID NO: 4206311 - DNA, 25 bp, Homo sapien
tcctctcagagccagagtaagaggt

SEQ ID NO: 4206312 - DNA, 25 bp, Homo sapien
cccattggcaggcatatagtggcaa

SEQ ID NO: 4206313 - DNA, 25 bp, Homo sapien
tatagtggcaaaggctgggctgcac

SEQ ID NO: 4206314 - DNA, 25 bp, Homo sapien
aatctctgactttgcggctgcatgg

SEQ ID NO: 4206315 - DNA, 25 bp, Homo sapien
atctctgactttgcggctgcatggc

SEQ ID NO: 4206316 - DNA, 25 bp, Homo sapien
gactttgcggctgcatggccgtctt

SEQ ID NO: 4206317 - DNA, 25 bp, Homo sapien
tctgactttgcggctgcatggccgt

SEQ ID NO: 4206318 - DNA, 25 bp, Homo sapien
aggcggcagttacattccaaaagga

SEQ ID NO: 4206319 - DNA, 25 bp, Homo sapien
gaggcggcagttacattccaaaagg

SEQ ID NO: 4206320 - DNA, 25 bp, Homo sapien
ggtagaggcggcagttacattccaa

SEQ ID NO: 4206321 - DNA, 25 bp, Homo sapien
tagaggcggcagttacattccaaaa

SEQ ID NO: 4206322 - DNA, 25 bp, Homo sapien
tccagcctgctctcggtcaagcttc

SEQ ID NO: 4206323 - DNA, 25 bp, Homo sapien
tcagcagatcccgcgccaggagttg

SEQ ID NO: 4206324 - DNA, 25 bp, Homo sapien
gcgccaggagttgggcggctgctcc

SEQ ID NO: 4206325 - DNA, 25 bp, Homo sapien
gtcaagcttcgccacttgcacatct

SEQ ID NO: 4206326 - DNA, 25 bp, Homo sapien
aagcgcctctcagtccgtgcatccg

SEQ ID NO: 4206327 - DNA, 25 bp, Homo sapien
gctgagagcccagccaagcgcctct

SEQ ID NO: 4206328 - DNA, 25 bp, Homo sapien
tgggattcgggagaagttggaggct

SEQ ID NO: 4206329 - DNA, 25 bp, Homo sapien
acatcccgaccaatgagcgcacggg

SEQ ID NO: 4206330 - DNA, 25 bp, Homo sapien
gccctgggcgctcgcgccctttgga

SEQ ID NO: 4206331 - DNA, 25 bp, Homo sapien
tgggcgctcgcgccctttggacctt

SEQ ID NO: 4206332 - DNA, 25 bp, Homo sapien
cgccctgggcgctcgcgccctttgg

SEQ ID NO: 4206333 - DNA, 25 bp, Homo sapien
gcgctcgcgccctttggacctttct

SEQ ID NO: 4206334 - DNA, 25 bp, Homo sapien
tcttcaggtcccagtagcggctcct

SEQ ID NO: 4206335 - DNA, 25 bp, Homo sapien
cgctggaccttagctgcggaccctg

SEQ ID NO: 4206336 - DNA, 25 bp, Homo sapien
ttcaggtcccagtagcggctccttc

SEQ ID NO: 4206337 - DNA, 25 bp, Homo sapien
gggtcctgggcgctcggatcgcgct

SEQ ID NO: 4206338 - DNA, 25 bp, Homo sapien
cctgacgtgacttccagagccctcc

SEQ ID NO: 4206339 - DNA, 25 bp, Homo sapien
ctgacgtgacttccagagccctcct

SEQ ID NO: 4206340 - DNA, 25 bp, Homo sapien
acgtgacttccagagccctcctcca

SEQ ID NO: 4206341 - DNA, 25 bp, Homo sapien
gtgacttccagagccctcctccagg

SEQ ID NO: 4206342 - DNA, 25 bp, Homo sapien
gcgcggatctcggtaacaaaacata

SEQ ID NO: 4206343 - DNA, 25 bp, Homo sapien
acaaaacataactccccaaggcaga

SEQ ID NO: 4206344 - DNA, 25 bp, Homo sapien
aggccgcagggaactatggaaatga

SEQ ID NO: 4206345 - DNA, 25 bp, Homo sapien
aatcagccccggtgcaatctggtag

SEQ ID NO: 4206346 - DNA, 25 bp, Homo sapien
ggacagaggtactcaggataaatca

SEQ ID NO: 4206347 - DNA, 25 bp, Homo sapien
tgtttcccagacattaattaggtgt

SEQ ID NO: 4206348 - DNA, 25 bp, Homo sapien
cagcctgaaatacggagttctggac

SEQ ID NO: 4206349 - DNA, 25 bp, Homo sapien
agttctggacacgaagtgccaacca

SEQ ID NO: 4206350 - DNA, 25 bp, Homo sapien
cccaatcccatagagaagagtaagg

SEQ ID NO: 4206351 - DNA, 25 bp, Homo sapien
cactgtggaacatatgactaaaccc

SEQ ID NO: 4206352 - DNA, 25 bp, Homo sapien
ttcagctcgacaatattaccaacag

SEQ ID NO: 4206353 - DNA, 25 bp, Homo sapien
taaagcagggtacgcaaaaacatac

SEQ ID NO: 4206354 - DNA, 25 bp, Homo sapien
actgataccagtatctattaactgg

SEQ ID NO: 4206355 - DNA, 25 bp, Homo sapien
ttttatatcttgctccagtggcttc

SEQ ID NO: 4206356 - DNA, 25 bp, Homo sapien
taccttgaggttttgactaagcaat

SEQ ID NO: 4206357 - DNA, 25 bp, Homo sapien
tgaactctggactaacatcaatggt

SEQ ID NO: 4206358 - DNA, 25 bp, Homo sapien
catcgtaggttgcatagagtgcgat

SEQ ID NO: 4206359 - DNA, 25 bp, Homo sapien
tagagtgcgatcattgtcacagcta

SEQ ID NO: 4206360 - DNA, 25 bp, Homo sapien
tcacagctatgatggtgaggagcag

SEQ ID NO: 4206361 - DNA, 25 bp, Homo sapien
tccagtggagtccatcgctgtttct

SEQ ID NO: 4206362 - DNA, 25 bp, Homo sapien
cagtctgatgacttgcaaataccat

SEQ ID NO: 4206363 - DNA, 25 bp, Homo sapien
tttatgcagtctgatgacttgcaaa

SEQ ID NO: 4206364 - DNA, 25 bp, Homo sapien
ctgattttatgcagtctgatgactt

SEQ ID NO: 4206365 - DNA, 25 bp, Homo sapien
tgcagtctgatgacttgcaaatacc

SEQ ID NO: 4206366 - DNA, 25 bp, Homo sapien
ttatcctgcctaccgttaagaggga

SEQ ID NO: 4206367 - DNA, 25 bp, Homo sapien
taaaccagtggtacccagtcataag

SEQ ID NO: 4206368 - DNA, 25 bp, Homo sapien
aaggcaacatattcagaggctctgg

SEQ ID NO: 4206369 - DNA, 25 bp, Homo sapien
gagaggactgctactggacatctag

SEQ ID NO: 4206370 - DNA, 25 bp, Homo sapien
gctaccccatggatttgcttatgag

SEQ ID NO: 4206371 - DNA, 25 bp, Homo sapien
tatcaaaggcttaccagaaagcacc

SEQ ID NO: 4206372 - DNA, 25 bp, Homo sapien
ggagtaccacttagcttaccaggca

SEQ ID NO: 4206373 - DNA, 25 bp, Homo sapien
gtctaagctagtttgtatccacccc

SEQ ID NO: 4206374 - DNA, 25 bp, Homo sapien
cttcctctgtaagtgaaaccccagg

SEQ ID NO: 4206375 - DNA, 25 bp, Homo sapien
aaaacatctcgcagcacctgtgtga

SEQ ID NO: 4206376 - DNA, 25 bp, Homo sapien
gctaactgctctgtggtagaccaag

SEQ ID NO: 4206377 - DNA, 25 bp, Homo sapien
tgatccagatggctggtacacctgg

SEQ ID NO: 4206378 - DNA, 25 bp, Homo sapien
ccaggttcagcttgtccacgataag

SEQ ID NO: 4206379 - DNA, 25 bp, Homo sapien
tttaggaagatattccaggttcagc

SEQ ID NO: 4206380 - DNA, 25 bp, Homo sapien
aatagcatgcctgcattacactggg

SEQ ID NO: 4206381 - DNA, 25 bp, Homo sapien
taagcagaaaatcaggctcagtgtc

SEQ ID NO: 4206382 - DNA, 25 bp, Homo sapien
ggcaaccataatactcatccaaata

SEQ ID NO: 4206383 - DNA, 25 bp, Homo sapien
caaatccaggcaaccataatactca

SEQ ID NO: 4206384 - DNA, 25 bp, Homo sapien
tatttctattcagtgatctttctca

SEQ ID NO: 4206385 - DNA, 25 bp, Homo sapien
tcatccaaataagtgcagtagccca

SEQ ID NO: 4206386 - DNA, 25 bp, Homo sapien
tccagttcccgctgggtgctgaagc

SEQ ID NO: 4206387 - DNA, 25 bp, Homo sapien
cagttcccgctgggtgctgaagctg

SEQ ID NO: 4206388 - DNA, 25 bp, Homo sapien
ccagttcccgctgggtgctgaagct

SEQ ID NO: 4206389 - DNA, 25 bp, Homo sapien
tgtgtctcatgcataagcccacgac

SEQ ID NO: 4206390 - DNA, 25 bp, Homo sapien
tgtctcatgcataagcccacgaccc

SEQ ID NO: 4206391 - DNA, 25 bp, Homo sapien
tctcatgcataagcccacgacccca

SEQ ID NO: 4206392 - DNA, 25 bp, Homo sapien
atgtgtctcatgcataagcccacga

SEQ ID NO: 4206393 - DNA, 25 bp, Homo sapien
agcctctccactgtcggacttatca

SEQ ID NO: 4206394 - DNA, 25 bp, Homo sapien
tctccactgtcggacttatcaccaa

SEQ ID NO: 4206395 - DNA, 25 bp, Homo sapien
actgtcggacttatcaccaacaatt

SEQ ID NO: 4206396 - DNA, 25 bp, Homo sapien
tccactgtcggacttatcaccaaca

SEQ ID NO: 4206397 - DNA, 25 bp, Homo sapien
aatcttcttgtaacattctcccaac

SEQ ID NO: 4206398 - DNA, 25 bp, Homo sapien
ttcgagctgataataaatgacacca

SEQ ID NO: 4206399 - DNA, 25 bp, Homo sapien
cactgaaaagtctattgtgtgtgta

SEQ ID NO: 4206400 - DNA, 25 bp, Homo sapien
gcaagttcaactaccatctgggaag

SEQ ID NO: 4206401 - DNA, 25 bp, Homo sapien
aacaaatgtggtttaaaatcagact

SEQ ID NO: 4206402 - DNA, 25 bp, Homo sapien
tttaaaatcagactaaattgttcac

SEQ ID NO: 4206403 - DNA, 25 bp, Homo sapien
tgtggtttaaaatcagactaaattg

SEQ ID NO: 4206404 - DNA, 25 bp, Homo sapien
taaacaaatgtggtttaaaatcaga

SEQ ID NO: 4206405 - DNA, 25 bp, Homo sapien
tagaaggccgtaggaaacagacgta

SEQ ID NO: 4206406 - DNA, 25 bp, Homo sapien
ttttctttgaagtcagcggtagact

SEQ ID NO: 4206407 - DNA, 25 bp, Homo sapien
gcggtagacttgtgggtagaaggcc

SEQ ID NO: 4206408 - DNA, 25 bp, Homo sapien
cgtacaactgtcaaactggtcgtaa

SEQ ID NO: 4206409 - DNA, 25 bp, Homo sapien
cttcctttaatctcttatcgtgggt

SEQ ID NO: 4206410 - DNA, 25 bp, Homo sapien
ctcttatcgtgggtttgattctcgt

SEQ ID NO: 4206411 - DNA, 25 bp, Homo sapien
taatctcttatcgtgggtttgattc

SEQ ID NO: 4206412 - DNA, 25 bp, Homo sapien
cgtgggtttgattctcgttttgcac

SEQ ID NO: 4206413 - DNA, 25 bp, Homo sapien
gctactttctcgcatgagccatctg

SEQ ID NO: 4206414 - DNA, 25 bp, Homo sapien
taatagaacgaatgaagcttctcct

SEQ ID NO: 4206415 - DNA, 25 bp, Homo sapien
cagtttctgtgagacaccttatggt

SEQ ID NO: 4206416 - DNA, 25 bp, Homo sapien
gattccatagcacattctaacacta

SEQ ID NO: 4206417 - DNA, 25 bp, Homo sapien
ccacaggcagattcatattctcaaa

SEQ ID NO: 4206418 - DNA, 25 bp, Homo sapien
tccacaggcagattcatattctcaa

SEQ ID NO: 4206419 - DNA, 25 bp, Homo sapien
tcattgcctccagagtccattccat

SEQ ID NO: 4206420 - DNA, 25 bp, Homo sapien
ccttgccacagaggtcagatccgtt

SEQ ID NO: 4206421 - DNA, 25 bp, Homo sapien
gatccgttctcagttcattgcctcc

SEQ ID NO: 4206422 - DNA, 25 bp, Homo sapien
ctcagactctatttgtgcccttttg

SEQ ID NO: 4206423 - DNA, 25 bp, Homo sapien
aggcttattgctcccttttgattgc

SEQ ID NO: 4206424 - DNA, 25 bp, Homo sapien
caatttgtcggatgctccgttttct

SEQ ID NO: 4206425 - DNA, 25 bp, Homo sapien
tcttttccttcactatagttggttc

SEQ ID NO: 4206426 - DNA, 25 bp, Homo sapien
gatgaggaatactatctgtgtatag

SEQ ID NO: 4206427 - DNA, 25 bp, Homo sapien
gacattacgtttcaaccagcctccg

SEQ ID NO: 4206428 - DNA, 25 bp, Homo sapien
gctggtctcgggaatgacattacgt

SEQ ID NO: 4206429 - DNA, 25 bp, Homo sapien
cagcctccgcaagcatatttgaaaa

SEQ ID NO: 4206430 - DNA, 25 bp, Homo sapien
tccatgttttggatcagtcgagcag

SEQ ID NO: 4206431 - DNA, 25 bp, Homo sapien
agagaaatctttgatgcacagacac

SEQ ID NO: 4206432 - DNA, 25 bp, Homo sapien
gagagaaatctttgatgcacagaca

SEQ ID NO: 4206433 - DNA, 25 bp, Homo sapien
attaagagagaaatctttgatgcac

SEQ ID NO: 4206434 - DNA, 25 bp, Homo sapien
tattaagagagaaatctttgatgca

SEQ ID NO: 4206435 - DNA, 25 bp, Homo sapien
atacaagacctgtacaatgcttttg

SEQ ID NO: 4206436 - DNA, 25 bp, Homo sapien
tgcactgctactatatcttcagttt

SEQ ID NO: 4206437 - DNA, 25 bp, Homo sapien
tttgctttctgcactgctactatat

SEQ ID NO: 4206438 - DNA, 25 bp, Homo sapien
tcatttatacaagacctgtacaatg

SEQ ID NO: 4206439 - DNA, 25 bp, Homo sapien
tttctgttgctactggccacccata

SEQ ID NO: 4206440 - DNA, 25 bp, Homo sapien
tgctactggccacccatatatgtct

SEQ ID NO: 4206441 - DNA, 25 bp, Homo sapien
cccatatatgtctggtaacagtttg

SEQ ID NO: 4206442 - DNA, 25 bp, Homo sapien
taacagtttgagtagaggttctcca

SEQ ID NO: 4206443 - DNA, 25 bp, Homo sapien
tatcatcagtgccaacaaacaaatt

SEQ ID NO: 4206444 - DNA, 25 bp, Homo sapien
gttgtgcaatagctttttcagctgt

SEQ ID NO: 4206445 - DNA, 25 bp, Homo sapien
tcatcagtgccaacaaacaaattaa

SEQ ID NO: 4206446 - DNA, 25 bp, Homo sapien
gaattcagttgtgcaatagcttttt

SEQ ID NO: 4206447 - DNA, 25 bp, Homo sapien
tctttatagattccagtgcattcat

SEQ ID NO: 4206448 - DNA, 25 bp, Homo sapien
tagattccagtgcattcatagtaat

SEQ ID NO: 4206449 - DNA, 25 bp, Homo sapien
atagattccagtgcattcatagtaa

SEQ ID NO: 4206450 - DNA, 25 bp, Homo sapien
ggaagaacatttcatgctcatgggt

SEQ ID NO: 4206451 - DNA, 25 bp, Homo sapien
aatatcgtgaaaatggccatactgc

SEQ ID NO: 4206452 - DNA, 25 bp, Homo sapien
aggaagaatcaatatcgtgaaaatg

SEQ ID NO: 4206453 - DNA, 25 bp, Homo sapien
tggaagaacatttcatgctcatggg

SEQ ID NO: 4206454 - DNA, 25 bp, Homo sapien
tgaatagggcactggtgaaccaact

SEQ ID NO: 4206455 - DNA, 25 bp, Homo sapien
tcaaacctggagaacaaatgccctt

SEQ ID NO: 4206456 - DNA, 25 bp, Homo sapien
cctacaggagccgataagtcaatat

SEQ ID NO: 4206457 - DNA, 25 bp, Homo sapien
aaaatcaaagaaagccggctcccag

SEQ ID NO: 4206458 - DNA, 25 bp, Homo sapien
tccattatgagggtatccaaagcaa

SEQ ID NO: 4206459 - DNA, 25 bp, Homo sapien
acaaagatatagcacaagaagctcc

SEQ ID NO: 4206460 - DNA, 25 bp, Homo sapien
taatcagaatacctcagaactcagg

SEQ ID NO: 4206461 - DNA, 25 bp, Homo sapien
cagtttgttaggaagagcagacacg

SEQ ID NO: 4206462 - DNA, 25 bp, Homo sapien
ggcacacacaaagtagtccttagag

SEQ ID NO: 4206463 - DNA, 25 bp, Homo sapien
tgtacatgtgaggtgtttctgcaca

SEQ ID NO: 4206464 - DNA, 25 bp, Homo sapien
gcacagagccctgtaattggcacac

SEQ ID NO: 4206465 - DNA, 25 bp, Homo sapien
gggaagctttgagaccaattccaat

SEQ ID NO: 4206466 - DNA, 25 bp, Homo sapien
tcatcgatgggcaatctttcttcct

SEQ ID NO: 4206467 - DNA, 25 bp, Homo sapien
gccacagaaatcataaaatccacat

SEQ ID NO: 4206468 - DNA, 25 bp, Homo sapien
aagcaagctggttttcatcgatggg

SEQ ID NO: 4206469 - DNA, 25 bp, Homo sapien
tgacgaatcaatctggccacagaaa

SEQ ID NO: 4206470 - DNA, 25 bp, Homo sapien
ttcgatcttcaggtttagccgtagc

SEQ ID NO: 4206471 - DNA, 25 bp, Homo sapien
ttgttatacagaagcattggatcat

SEQ ID NO: 4206472 - DNA, 25 bp, Homo sapien
gatctgggccaatgtcatcttgtta

SEQ ID NO: 4206473 - DNA, 25 bp, Homo sapien
gcattggatcatttcgatcttcagg

SEQ ID NO: 4206474 - DNA, 25 bp, Homo sapien
taaatattctggagcataaacaacc

SEQ ID NO: 4206475 - DNA, 25 bp, Homo sapien
ttaaatattctggagcataaacaac

SEQ ID NO: 4206476 - DNA, 25 bp, Homo sapien
tattcacagttgacatgatttcatt

SEQ ID NO: 4206477 - DNA, 25 bp, Homo sapien
tgtaatactaatattcacagttgac

SEQ ID NO: 4206478 - DNA, 25 bp, Homo sapien
gaggctgcttacaagatccattatg

SEQ ID NO: 4206479 - DNA, 25 bp, Homo sapien
tccttgtaggttcggctgaggctgc

SEQ ID NO: 4206480 - DNA, 25 bp, Homo sapien
gatccattatgaatctccaggacat

SEQ ID NO: 4206481 - DNA, 25 bp, Homo sapien
agcatttctggactccttgtaggtt

SEQ ID NO: 4206482 - DNA, 25 bp, Homo sapien
taagaaaagagagattttttcttca

SEQ ID NO: 4206483 - DNA, 25 bp, Homo sapien
tgctttaagtcttaagaaaagagag

SEQ ID NO: 4206484 - DNA, 25 bp, Homo sapien
tatgctttaagtcttaagaaaagag

SEQ ID NO: 4206485 - DNA, 25 bp, Homo sapien
ttatgctttaagtcttaagaaaaga

SEQ ID NO: 4206486 - DNA, 25 bp, Homo sapien
tcccattgacatagtttgcacaacg

SEQ ID NO: 4206487 - DNA, 25 bp, Homo sapien
ttgcacaacgtctccaagttgctgt

SEQ ID NO: 4206488 - DNA, 25 bp, Homo sapien
gcttccacataaagcctccccacag

SEQ ID NO: 4206489 - DNA, 25 bp, Homo sapien
tccatattcccattgacatagtttg

SEQ ID NO: 4206490 - DNA, 25 bp, Homo sapien
ataaaaacttctcggatctgtgcaa

SEQ ID NO: 4206491 - DNA, 25 bp, Homo sapien
caagtgaggtcatctaaagtctgaa

SEQ ID NO: 4206492 - DNA, 25 bp, Homo sapien
ttttgtctcggcatccatccaagtg

SEQ ID NO: 4206493 - DNA, 25 bp, Homo sapien
ggatctgtgcaatcaaatcctcgac

SEQ ID NO: 4206494 - DNA, 25 bp, Homo sapien
gttctaggcctaacccactcagggc

SEQ ID NO: 4206495 - DNA, 25 bp, Homo sapien
tagtgcaccaccttacatttgcttg

SEQ ID NO: 4206496 - DNA, 25 bp, Homo sapien
gagctgaaaaaagatagtccttcca

SEQ ID NO: 4206497 - DNA, 25 bp, Homo sapien
gctgcacattatgggtgggcatgaa

SEQ ID NO: 4206498 - DNA, 25 bp, Homo sapien
ctgtgacatgaaaggagcaaatcca

SEQ ID NO: 4206499 - DNA, 25 bp, Homo sapien
tttaccaagcagagccatgtcatgc

SEQ ID NO: 4206500 - DNA, 25 bp, Homo sapien
catgagcctcttgtggaataacttg

SEQ ID NO: 4206501 - DNA, 25 bp, Homo sapien
gaaatgccgatccagaacaatccaa

SEQ ID NO: 4206502 - DNA, 25 bp, Homo sapien
gtcatcaggatagccgatcctttct

SEQ ID NO: 4206503 - DNA, 25 bp, Homo sapien
acaatgtcatcaggatagccgatcc

SEQ ID NO: 4206504 - DNA, 25 bp, Homo sapien
ggatagccgatcctttctttaattg

SEQ ID NO: 4206505 - DNA, 25 bp, Homo sapien
tcaggatagccgatcctttctttaa

SEQ ID NO: 4206506 - DNA, 25 bp, Homo sapien
gaattatgttctcgaagtattcatc

SEQ ID NO: 4206507 - DNA, 25 bp, Homo sapien
aattatgttctcgaagtattcatct

SEQ ID NO: 4206508 - DNA, 25 bp, Homo sapien
tgaattatgttctcgaagtattcat

SEQ ID NO: 4206509 - DNA, 25 bp, Homo sapien
ttgaattatgttctcgaagtattca

SEQ ID NO: 4206510 - DNA, 25 bp, Homo sapien
catgttgtatcctatagggctcagt

SEQ ID NO: 4206511 - DNA, 25 bp, Homo sapien
aagtcagtaactttccctgcaagaa

SEQ ID NO: 4206512 - DNA, 25 bp, Homo sapien
gatttgatgcaattactgtcagagg

SEQ ID NO: 4206513 - DNA, 25 bp, Homo sapien
gagaggagcttcgatcatgttgtat

SEQ ID NO: 4206514 - DNA, 25 bp, Homo sapien
agtaaaatgcattgactacagctgc

SEQ ID NO: 4206515 - DNA, 25 bp, Homo sapien
aaatgcattgactacagctgctcca

SEQ ID NO: 4206516 - DNA, 25 bp, Homo sapien
aaaatgcattgactacagctgctcc

SEQ ID NO: 4206517 - DNA, 25 bp, Homo sapien
taaaatgcattgactacagctgctc

SEQ ID NO: 4206518 - DNA, 25 bp, Homo sapien
cagttgagtacctttctaatgctaa

SEQ ID NO: 4206519 - DNA, 25 bp, Homo sapien
ccaatgtatgttcaaagatgtccag

SEQ ID NO: 4206520 - DNA, 25 bp, Homo sapien
acagactctgagctataagaagaat

SEQ ID NO: 4206521 - DNA, 25 bp, Homo sapien
cgtttagaaatgaagggcaggactg

SEQ ID NO: 4206522 - DNA, 25 bp, Homo sapien
cgatgcccccatagttcaatgagtt

SEQ ID NO: 4206523 - DNA, 25 bp, Homo sapien
gaagccatgggtgatttcgtgtcct

SEQ ID NO: 4206524 - DNA, 25 bp, Homo sapien
caatgagttggactgctgggcacta

SEQ ID NO: 4206525 - DNA, 25 bp, Homo sapien
gtgtcctatgaccatgccgatgccc

SEQ ID NO: 4206526 - DNA, 25 bp, Homo sapien
gacctagtattatcactgccgctga

SEQ ID NO: 4206527 - DNA, 25 bp, Homo sapien
tgccgctgacaaacaccatagtatt

SEQ ID NO: 4206528 - DNA, 25 bp, Homo sapien
tatgagcatatacctcagccaaagg

SEQ ID NO: 4206529 - DNA, 25 bp, Homo sapien
caagatacgtcatatacaaccagga

SEQ ID NO: 4206530 - DNA, 25 bp, Homo sapien
catactgatacaccatgcactggga

SEQ ID NO: 4206531 - DNA, 25 bp, Homo sapien
caccagtcaacgaggtctccatctt

SEQ ID NO: 4206532 - DNA, 25 bp, Homo sapien
ggattgctccttaaagttacttgca

SEQ ID NO: 4206533 - DNA, 25 bp, Homo sapien
tgcagactgttgagtccaccagtca

SEQ ID NO: 4206534 - DNA, 25 bp, Homo sapien
ttctcccagtgtattaattccatta

SEQ ID NO: 4206535 - DNA, 25 bp, Homo sapien
tttctcccagtgtattaattccatt

SEQ ID NO: 4206536 - DNA, 25 bp, Homo sapien
tctcccagtgtattaattccattaa

SEQ ID NO: 4206537 - DNA, 25 bp, Homo sapien
ttaaatatgagaaacactctaaatc

SEQ ID NO: 4206538 - DNA, 25 bp, Homo sapien
gaaacactctaaatcactaaaatgg

SEQ ID NO: 4206539 - DNA, 25 bp, Homo sapien
attattaaatatgagaaacactcta

SEQ ID NO: 4206540 - DNA, 25 bp, Homo sapien
aatatgagaaacactctaaatcact

SEQ ID NO: 4206541 - DNA, 25 bp, Homo sapien
agaaaaatagttgtttgtgatttag

SEQ ID NO: 4206542 - DNA, 25 bp, Homo sapien
tagttgtttgtgatttaggtcaagt

SEQ ID NO: 4206543 - DNA, 25 bp, Homo sapien
ttgtttgtgatttaggtcaagtcca

SEQ ID NO: 4206544 - DNA, 25 bp, Homo sapien
gttgtttgtgatttaggtcaagtcc

SEQ ID NO: 4206545 - DNA, 25 bp, Homo sapien
caaccaggaacatagttatttatca

SEQ ID NO: 4206546 - DNA, 25 bp, Homo sapien
gaaagtgaatcaagtcaaatgctct

SEQ ID NO: 4206547 - DNA, 25 bp, Homo sapien
gcatgtgacatctaacttactgtga

SEQ ID NO: 4206548 - DNA, 25 bp, Homo sapien
gcatgtactcaggttcaatcaagga

SEQ ID NO: 4206549 - DNA, 25 bp, Homo sapien
atggagttaaccgcatactctggcc

SEQ ID NO: 4206550 - DNA, 25 bp, Homo sapien
gagttaaccgcatactctggcctat

SEQ ID NO: 4206551 - DNA, 25 bp, Homo sapien
tctggcctataggttccacaccaca

SEQ ID NO: 4206552 - DNA, 25 bp, Homo sapien
ctctggcctataggttccacaccac

SEQ ID NO: 4206553 - DNA, 25 bp, Homo sapien
aatggacccaatataagagcacctt

SEQ ID NO: 4206554 - DNA, 25 bp, Homo sapien
agcaatggacccaatataagagcac

SEQ ID NO: 4206555 - DNA, 25 bp, Homo sapien
gaagcaatggacccaatataagagc

SEQ ID NO: 4206556 - DNA, 25 bp, Homo sapien
caatggacccaatataagagcacct

SEQ ID NO: 4206557 - DNA, 25 bp, Homo sapien
gttggaatagatcaagccctgagcc

SEQ ID NO: 4206558 - DNA, 25 bp, Homo sapien
gccctgagcctcgtagattctaagg

SEQ ID NO: 4206559 - DNA, 25 bp, Homo sapien
ccactgttctgaggcgacatctttg

SEQ ID NO: 4206560 - DNA, 25 bp, Homo sapien
gggtctgggcctaaaccattcacag

SEQ ID NO: 4206561 - DNA, 25 bp, Homo sapien
gatgagtcttaaagacgaaaaataa

SEQ ID NO: 4206562 - DNA, 25 bp, Homo sapien
tctcctatctttcatggaggatgta

SEQ ID NO: 4206563 - DNA, 25 bp, Homo sapien
gaggatgtaatcttttctggttgtt

SEQ ID NO: 4206564 - DNA, 25 bp, Homo sapien
gttttttaggattcctagatgagtc

SEQ ID NO: 4206565 - DNA, 25 bp, Homo sapien
gaatgccatctaaactaactcctct

SEQ ID NO: 4206566 - DNA, 25 bp, Homo sapien
gggactatccctatcaaagcactta

SEQ ID NO: 4206567 - DNA, 25 bp, Homo sapien
tactcaccagtcagtacatggctaa

SEQ ID NO: 4206568 - DNA, 25 bp, Homo sapien
taactcctcagccttcatgcctttg

SEQ ID NO: 4206569 - DNA, 25 bp, Homo sapien
gatactcacgtccataccacactgg

SEQ ID NO: 4206570 - DNA, 25 bp, Homo sapien
tgggagacagactacatggcttgaa

SEQ ID NO: 4206571 - DNA, 25 bp, Homo sapien
tcaccgtcagcatttgatactcacg

SEQ ID NO: 4206572 - DNA, 25 bp, Homo sapien
taacctggtacaatgagtcagtgcc

SEQ ID NO: 4206573 - DNA, 25 bp, Homo sapien
caaacccggcacttcttttctggat

SEQ ID NO: 4206574 - DNA, 25 bp, Homo sapien
tctggattcatgtatgaattcttgc

SEQ ID NO: 4206575 - DNA, 25 bp, Homo sapien
tctgaaaactctgcagagttctgca

SEQ ID NO: 4206576 - DNA, 25 bp, Homo sapien
gtatgaattcttgcggcagtgaaag

SEQ ID NO: 4206577 - DNA, 25 bp, Homo sapien
ttttctagggacatcagcaaactgg

SEQ ID NO: 4206578 - DNA, 25 bp, Homo sapien
tctagccaagggctgcaatgcttct

SEQ ID NO: 4206579 - DNA, 25 bp, Homo sapien
gattgacttgatagaccttagaccc

SEQ ID NO: 4206580 - DNA, 25 bp, Homo sapien
caagtcagtacagtgacccctaggg

SEQ ID NO: 4206581 - DNA, 25 bp, Homo sapien
aagacaggagatgcagagctacata

SEQ ID NO: 4206582 - DNA, 25 bp, Homo sapien
ttttatcagagacactctcagggac

SEQ ID NO: 4206583 - DNA, 25 bp, Homo sapien
tatctctagacaactgtccaatggc

SEQ ID NO: 4206584 - DNA, 25 bp, Homo sapien
gagctacataggtgcagatttgccc

SEQ ID NO: 4206585 - DNA, 25 bp, Homo sapien
ttctagaaggtccatcagaggcctc

SEQ ID NO: 4206586 - DNA, 25 bp, Homo sapien
ccaacgggtattgtcgagagcttct

SEQ ID NO: 4206587 - DNA, 25 bp, Homo sapien
gacagttgtcacagtcttagggagc

SEQ ID NO: 4206588 - DNA, 25 bp, Homo sapien
gatccacaatcagcacaatacagag

SEQ ID NO: 4206589 - DNA, 25 bp, Homo sapien
tacacaggagttggcagtttggaac

SEQ ID NO: 4206590 - DNA, 25 bp, Homo sapien
tgggaaatgcaagactacagagata

SEQ ID NO: 4206591 - DNA, 25 bp, Homo sapien
acagagttgactaggcataaaagca

SEQ ID NO: 4206592 - DNA, 25 bp, Homo sapien
tcaatttgaagctagtgggaaatgc

SEQ ID NO: 4206593 - DNA, 25 bp, Homo sapien
cagctcatctggacttgcgcaatgg

SEQ ID NO: 4206594 - DNA, 25 bp, Homo sapien
tgcgcaatggcaacataattctctg

SEQ ID NO: 4206595 - DNA, 25 bp, Homo sapien
ttcttaaccgcatccacagcatgag

SEQ ID NO: 4206596 - DNA, 25 bp, Homo sapien
ttctgcctcataagtagctcccaag

SEQ ID NO: 4206597 - DNA, 25 bp, Homo sapien
ccagaaatagcatttggtccaccaa

SEQ ID NO: 4206598 - DNA, 25 bp, Homo sapien
gacacaaacacgtatatgcttgttg

SEQ ID NO: 4206599 - DNA, 25 bp, Homo sapien
tggtccaccaatcccaatatgggta

SEQ ID NO: 4206600 - DNA, 25 bp, Homo sapien
caaacacgtatatgcttgttgcagc

SEQ ID NO: 4206601 - DNA, 25 bp, Homo sapien
ttatgatcccttcagaattatttgc

SEQ ID NO: 4206602 - DNA, 25 bp, Homo sapien
caaaacagtgaagtagttgaacaga

SEQ ID NO: 4206603 - DNA, 25 bp, Homo sapien
ttatttgcatcttatctaggactca

SEQ ID NO: 4206604 - DNA, 25 bp, Homo sapien
tgctgctctgcaataggcaggtgga

SEQ ID NO: 4206605 - DNA, 25 bp, Homo sapien
agttgaataccatggagtaagaggg

SEQ ID NO: 4206606 - DNA, 25 bp, Homo sapien
gcataggacctctagctcgggcttt

SEQ ID NO: 4206607 - DNA, 25 bp, Homo sapien
tattcttctcaatatctcttccctg

SEQ ID NO: 4206608 - DNA, 25 bp, Homo sapien
ttgcaggagaccttagaggcagtgc

SEQ ID NO: 4206609 - DNA, 25 bp, Homo sapien
ctggtggcgcagacaaaatatggca

SEQ ID NO: 4206610 - DNA, 25 bp, Homo sapien
ccttttgcttaaacatctcatggga

SEQ ID NO: 4206611 - DNA, 25 bp, Homo sapien
gggacataactaccatttagacagt

SEQ ID NO: 4206612 - DNA, 25 bp, Homo sapien
tgaaacaggtatatattttcttgcc

SEQ ID NO: 4206613 - DNA, 25 bp, Homo sapien
gaaaggggctgtaatgctgaagttg

SEQ ID NO: 4206614 - DNA, 25 bp, Homo sapien
actgccagaagttctgcccacaggg

SEQ ID NO: 4206615 - DNA, 25 bp, Homo sapien
aaggggctgtaatgctgaagttgtc

SEQ ID NO: 4206616 - DNA, 25 bp, Homo sapien
cagggttccaccaccatgatctcag

SEQ ID NO: 4206617 - DNA, 25 bp, Homo sapien
tcaccgagatgatgggtcttttcat

SEQ ID NO: 4206618 - DNA, 25 bp, Homo sapien
taccagtgattctgtgatcacttgg

SEQ ID NO: 4206619 - DNA, 25 bp, Homo sapien
ttccaggatccaaaccagggttcca

SEQ ID NO: 4206620 - DNA, 25 bp, Homo sapien
cagtaaaagacccatggtttgattc

SEQ ID NO: 4206621 - DNA, 25 bp, Homo sapien
caagcccagaattgccaaaggtcac

SEQ ID NO: 4206622 - DNA, 25 bp, Homo sapien
ccaaaggtcacataacagtaaaaga

SEQ ID NO: 4206623 - DNA, 25 bp, Homo sapien
cagtaggaaagttcaagcccagaat

SEQ ID NO: 4206624 - DNA, 25 bp, Homo sapien
tctgcagacaattggcagccaggag

SEQ ID NO: 4206625 - DNA, 25 bp, Homo sapien
ccaggagacgggcagctgccgcaat

SEQ ID NO: 4206626 - DNA, 25 bp, Homo sapien
tttctctctatttaaagttcaaaga

SEQ ID NO: 4206627 - DNA, 25 bp, Homo sapien
agacgggcagctgccgcaatcttca

SEQ ID NO: 4206628 - DNA, 25 bp, Homo sapien
tgatagcacttgtataggtggaatg

SEQ ID NO: 4206629 - DNA, 25 bp, Homo sapien
cacttgtataggtggaatgttgttt

SEQ ID NO: 4206630 - DNA, 25 bp, Homo sapien
aacccaagtctctccaacatcaaaa

SEQ ID NO: 4206631 - DNA, 25 bp, Homo sapien
tgtataggtggaatgttgtttttcc

SEQ ID NO: 4206632 - DNA, 25 bp, Homo sapien
taaggtatacctggactctgatagg

SEQ ID NO: 4206633 - DNA, 25 bp, Homo sapien
tctgataggtaaatttgaggctgct

SEQ ID NO: 4206634 - DNA, 25 bp, Homo sapien
gagagaattagctaggcttcctcag

SEQ ID NO: 4206635 - DNA, 25 bp, Homo sapien
ggtgagaaggagtatatgtattttg

SEQ ID NO: 4206636 - DNA, 25 bp, Homo sapien
ttcaagcagtagaaactttgtcagc

SEQ ID NO: 4206637 - DNA, 25 bp, Homo sapien
gcttcaagcagtagaaactttgtca

SEQ ID NO: 4206638 - DNA, 25 bp, Homo sapien
gagcttcaagcagtagaaactttgt

SEQ ID NO: 4206639 - DNA, 25 bp, Homo sapien
ctgagcttcaagcagtagaaacttt

SEQ ID NO: 4206640 - DNA, 25 bp, Homo sapien
tacaacagtttattcaggagttctg

SEQ ID NO: 4206641 - DNA, 25 bp, Homo sapien
gaagtgtcattctgctattccgtgt

SEQ ID NO: 4206642 - DNA, 25 bp, Homo sapien
tttcaaagaccgcacagaatgggtg

SEQ ID NO: 4206643 - DNA, 25 bp, Homo sapien
ttgctgctttatagctaacaacttt

SEQ ID NO: 4206644 - DNA, 25 bp, Homo sapien
ttataaacgggaagccagtacgcat

SEQ ID NO: 4206645 - DNA, 25 bp, Homo sapien
tgattttataaacgggaagccagta

SEQ ID NO: 4206646 - DNA, 25 bp, Homo sapien
tttataaacgggaagccagtacgca

SEQ ID NO: 4206647 - DNA, 25 bp, Homo sapien
gccagcggatgtggagtgcgctttg

SEQ ID NO: 4206648 - DNA, 25 bp, Homo sapien
gaacttccagcagccagcggatgtg

SEQ ID NO: 4206649 - DNA, 25 bp, Homo sapien
tgggctacgagtatgtgaacttcca

SEQ ID NO: 4206650 - DNA, 25 bp, Homo sapien
ctgccgctgcttgggctacgagtat

SEQ ID NO: 4206651 - DNA, 25 bp, Homo sapien
gcgatgctctaagctcagcgtggcc

SEQ ID NO: 4206652 - DNA, 25 bp, Homo sapien
gatgctctaagctcagcgtggccgg

SEQ ID NO: 4206653 - DNA, 25 bp, Homo sapien
gaggcgatgctctaagctcagcgtg

SEQ ID NO: 4206654 - DNA, 25 bp, Homo sapien
cgaggcgatgctctaagctcagcgt

SEQ ID NO: 4206655 - DNA, 25 bp, Homo sapien
ctgtcacggaaaggtggcggcctgt

SEQ ID NO: 4206656 - DNA, 25 bp, Homo sapien
cacggaaaggtggcggcctgtggcc

SEQ ID NO: 4206657 - DNA, 25 bp, Homo sapien
tgtcacggaaaggtggcggcctgtg

SEQ ID NO: 4206658 - DNA, 25 bp, Homo sapien
tcacggaaaggtggcggcctgtggc

SEQ ID NO: 4206659 - DNA, 25 bp, Homo sapien
cagtcctgcggccactgagttttcc

SEQ ID NO: 4206660 - DNA, 25 bp, Homo sapien
ccgactccctcccatcggctccggc

SEQ ID NO: 4206661 - DNA, 25 bp, Homo sapien
ccattctggattatttttgtctctc

SEQ ID NO: 4206662 - DNA, 25 bp, Homo sapien
tctctctgcgcttgccccgactccc

SEQ ID NO: 4206663 - DNA, 25 bp, Homo sapien
ttataaaataacccggtgaagcagc

SEQ ID NO: 4206664 - DNA, 25 bp, Homo sapien
taaaataacccggtgaagcagccga

SEQ ID NO: 4206665 - DNA, 25 bp, Homo sapien
ataacccggtgaagcagccgagacc

SEQ ID NO: 4206666 - DNA, 25 bp, Homo sapien
acccggtgaagcagccgagaccgac

SEQ ID NO: 4206667 - DNA, 25 bp, Homo sapien
gtctggaggcctcagtagtccacat

SEQ ID NO: 4206668 - DNA, 25 bp, Homo sapien
cgattcatggactcaaggattcgtg

SEQ ID NO: 4206669 - DNA, 25 bp, Homo sapien
catggactcaaggattcgtggtggt

SEQ ID NO: 4206670 - DNA, 25 bp, Homo sapien
ttcatggactcaaggattcgtggtg

SEQ ID NO: 4206671 - DNA, 25 bp, Homo sapien
cgtggtggtgtgagtgaattgggct

SEQ ID NO: 4206672 - DNA, 25 bp, Homo sapien
tcctcatgctctatggccgtcactt

SEQ ID NO: 4206673 - DNA, 25 bp, Homo sapien
cccaaagtcacttgtgaatgacagc

SEQ ID NO: 4206674 - DNA, 25 bp, Homo sapien
ctcatgctctatggccgtcacttgc

SEQ ID NO: 4206675 - DNA, 25 bp, Homo sapien
cattgtttaagatccagctggagtg

SEQ ID NO: 4206676 - DNA, 25 bp, Homo sapien
agcaacaaccaagtggcaatttctt

SEQ ID NO: 4206677 - DNA, 25 bp, Homo sapien
ttatagatgtaggcaccagccatga

SEQ ID NO: 4206678 - DNA, 25 bp, Homo sapien
ctttatagatgtaggcaccagccat

SEQ ID NO: 4206679 - DNA, 25 bp, Homo sapien
ttctttatagatgtaggcaccagcc

SEQ ID NO: 4206680 - DNA, 25 bp, Homo sapien
tccttccaattcttcatgattggat

SEQ ID NO: 4206681 - DNA, 25 bp, Homo sapien
ggatttccgatgtctaccacatgca

SEQ ID NO: 4206682 - DNA, 25 bp, Homo sapien
tgccaggaattgatcaatagtgtgg

SEQ ID NO: 4206683 - DNA, 25 bp, Homo sapien
taccacatgcatgttatgtgatgcc

SEQ ID NO: 4206684 - DNA, 25 bp, Homo sapien
taagtggctacagggtgagctgtca

SEQ ID NO: 4206685 - DNA, 25 bp, Homo sapien
gcatgtcttggtcataaatgtccag

SEQ ID NO: 4206686 - DNA, 25 bp, Homo sapien
tatgttgctgctgatttaagtggct

SEQ ID NO: 4206687 - DNA, 25 bp, Homo sapien
tcatttgtcaacgttatgttgctgc

SEQ ID NO: 4206688 - DNA, 25 bp, Homo sapien
gcaggatgcagtcagtcttgaagga

SEQ ID NO: 4206689 - DNA, 25 bp, Homo sapien
ggcactgagcaggatgcagtcagtc

SEQ ID NO: 4206690 - DNA, 25 bp, Homo sapien
ctggcactgagcaggatgcagtcag

SEQ ID NO: 4206691 - DNA, 25 bp, Homo sapien
atgcagtcagtcttgaaggacagat

SEQ ID NO: 4206692 - DNA, 25 bp, Homo sapien
gcaggcactccttaactgagaacag

SEQ ID NO: 4206693 - DNA, 25 bp, Homo sapien
aaggtactggtggaagcaggcactc

SEQ ID NO: 4206694 - DNA, 25 bp, Homo sapien
tagtgtaaagccatagcttctggga

SEQ ID NO: 4206695 - DNA, 25 bp, Homo sapien
aagcctgagagaagtttggtagatc

SEQ ID NO: 4206696 - DNA, 25 bp, Homo sapien
caggccctctttgtgctgctttcca

SEQ ID NO: 4206697 - DNA, 25 bp, Homo sapien
ctttgtgctgctttccattagggtt

SEQ ID NO: 4206698 - DNA, 25 bp, Homo sapien
tctttgtgctgctttccattagggt

SEQ ID NO: 4206699 - DNA, 25 bp, Homo sapien
tcacaggccctctttgtgctgcttt

SEQ ID NO: 4206700 - DNA, 25 bp, Homo sapien
tggccatgagatatgctttggactt

SEQ ID NO: 4206701 - DNA, 25 bp, Homo sapien
aacacttgacactcatggccatgag

SEQ ID NO: 4206702 - DNA, 25 bp, Homo sapien
gagatatgctttggactttgccaaa

SEQ ID NO: 4206703 - DNA, 25 bp, Homo sapien
tttcagagaaggacaggggactatt

SEQ ID NO: 4206704 - DNA, 25 bp, Homo sapien
aaacaagttcaaagaaggcagcaca

SEQ ID NO: 4206705 - DNA, 25 bp, Homo sapien
gaaggcagcacaattgctgaaaaca

SEQ ID NO: 4206706 - DNA, 25 bp, Homo sapien
aaacattccctcaaaaggagagctt

SEQ ID NO: 4206707 - DNA, 25 bp, Homo sapien
gaaacaggctgctggattaggagaa

SEQ ID NO: 4206708 - DNA, 25 bp, Homo sapien
gcctgtgacagctgatgtttgtagc

SEQ ID NO: 4206709 - DNA, 25 bp, Homo sapien
tatgcctgtgacagctgatgtttgt

SEQ ID NO: 4206710 - DNA, 25 bp, Homo sapien
cagctgatgtttgtagcaggacagc

SEQ ID NO: 4206711 - DNA, 25 bp, Homo sapien
acagctgatgtttgtagcaggacag

SEQ ID NO: 4206712 - DNA, 25 bp, Homo sapien
tttgctggctacatttgagctgtcc

SEQ ID NO: 4206713 - DNA, 25 bp, Homo sapien
ctacttctgcttggccctagagcct

SEQ ID NO: 4206714 - DNA, 25 bp, Homo sapien
gctgtcctgactacttctgcttggc

SEQ ID NO: 4206715 - DNA, 25 bp, Homo sapien
atttgagctgtcctgactacttctg

SEQ ID NO: 4206716 - DNA, 25 bp, Homo sapien
tagtagaaaggttttgcttgtagtc

SEQ ID NO: 4206717 - DNA, 25 bp, Homo sapien
tagaaaggttttgcttgtagtcctc

SEQ ID NO: 4206718 - DNA, 25 bp, Homo sapien
ggttttgcttgtagtcctcaaatct

SEQ ID NO: 4206719 - DNA, 25 bp, Homo sapien
ccttgatttgtaaaaccaagtcagt

SEQ ID NO: 4206720 - DNA, 25 bp, Homo sapien
caatctagatggttttggaggatgg

SEQ ID NO: 4206721 - DNA, 25 bp, Homo sapien
gatgggttctcatagaatttcagga

SEQ ID NO: 4206722 - DNA, 25 bp, Homo sapien
caacacatttgaatcaagtgggtcc

SEQ ID NO: 4206723 - DNA, 25 bp, Homo sapien
ttgtggactgattgctcgagtgacc

SEQ ID NO: 4206724 - DNA, 25 bp, Homo sapien
ttctctaaactggtagtagctggct

SEQ ID NO: 4206725 - DNA, 25 bp, Homo sapien
attttctaagacaggttattccatt

SEQ ID NO: 4206726 - DNA, 25 bp, Homo sapien
gctggctttctgttagaaacaaatt

SEQ ID NO: 4206727 - DNA, 25 bp, Homo sapien
aggctttggacatgctcatgtagaa

SEQ ID NO: 4206728 - DNA, 25 bp, Homo sapien
catgctcatgtagaactgatgcctg

SEQ ID NO: 4206729 - DNA, 25 bp, Homo sapien
catctgtaataaccatgttgtgatc

SEQ ID NO: 4206730 - DNA, 25 bp, Homo sapien
tgcatctgtaataaccatgttgtga

SEQ ID NO: 4206731 - DNA, 25 bp, Homo sapien
gcttgcactgtagttgttgagccga

SEQ ID NO: 4206732 - DNA, 25 bp, Homo sapien
tgcttcctccactaatacctctgaa

SEQ ID NO: 4206733 - DNA, 25 bp, Homo sapien
tctgaattacttttgcgaataaatt

SEQ ID NO: 4206734 - DNA, 25 bp, Homo sapien
tataagctgctaagggttcagggcg

SEQ ID NO: 4206735 - DNA, 25 bp, Homo sapien
tttgtagagaaagctagctggggct

SEQ ID NO: 4206736 - DNA, 25 bp, Homo sapien
gggctagacaaaatggtgtagactc

SEQ ID NO: 4206737 - DNA, 25 bp, Homo sapien
gactcagtttcagtgtgcaccaccc

SEQ ID NO: 4206738 - DNA, 25 bp, Homo sapien
tgtggggagaccctcttttgtagag

SEQ ID NO: 4206739 - DNA, 25 bp, Homo sapien
tagcttgggcatcccagataatcaa

SEQ ID NO: 4206740 - DNA, 25 bp, Homo sapien
tttggctcagaaattgtgctctttt

SEQ ID NO: 4206741 - DNA, 25 bp, Homo sapien
caccactagcttgggcatcccagat

SEQ ID NO: 4206742 - DNA, 25 bp, Homo sapien
ctttctagaggcaattacattcttg

SEQ ID NO: 4206743 - DNA, 25 bp, Homo sapien
cattagtgttctttgaagaagcatc

SEQ ID NO: 4206744 - DNA, 25 bp, Homo sapien
agtcattcattagtgttctttgaag

SEQ ID NO: 4206745 - DNA, 25 bp, Homo sapien
cattcattagtgttctttgaagaag

SEQ ID NO: 4206746 - DNA, 25 bp, Homo sapien
tctaatttcatcttgaatgggataa

SEQ ID NO: 4206747 - DNA, 25 bp, Homo sapien
gcttttccagaatcaggagggtccg

SEQ ID NO: 4206748 - DNA, 25 bp, Homo sapien
ttgttgagtgcaccatacatgggct

SEQ ID NO: 4206749 - DNA, 25 bp, Homo sapien
gtccgagaaacgtggtgttgtataa

SEQ ID NO: 4206750 - DNA, 25 bp, Homo sapien
catttggaaatagtgccctctggga

SEQ ID NO: 4206751 - DNA, 25 bp, Homo sapien
atttcatctaccgagtcatggagcc

SEQ ID NO: 4206752 - DNA, 25 bp, Homo sapien
gaagagcaggtagagagtcaaacac

SEQ ID NO: 4206753 - DNA, 25 bp, Homo sapien
agggttcaggcagctcgtcacagca

SEQ ID NO: 4206754 - DNA, 25 bp, Homo sapien
tcaaacacgagatagcacacgacgc

SEQ ID NO: 4206755 - DNA, 25 bp, Homo sapien
gacaatggagcacatgatgggcact

SEQ ID NO: 4206756 - DNA, 25 bp, Homo sapien
tcaagctcaggtttgtgcgccacag

SEQ ID NO: 4206757 - DNA, 25 bp, Homo sapien
cacagcatagaagcatggaggttca

SEQ ID NO: 4206758 - DNA, 25 bp, Homo sapien
caacagccgtgtttggatcagcagg

SEQ ID NO: 4206759 - DNA, 25 bp, Homo sapien
gggtgaggtgtgatctattgctgag

SEQ ID NO: 4206760 - DNA, 25 bp, Homo sapien
aggtgtgatctattgctgaggctgc

SEQ ID NO: 4206761 - DNA, 25 bp, Homo sapien
ggtgtgatctattgctgaggctgct

SEQ ID NO: 4206762 - DNA, 25 bp, Homo sapien
tgaggtgtgatctattgctgaggct

SEQ ID NO: 4206763 - DNA, 25 bp, Homo sapien
tgtgcacgggaactcctcagttggt

SEQ ID NO: 4206764 - DNA, 25 bp, Homo sapien
tctggcagattatgaagatctccct

SEQ ID NO: 4206765 - DNA, 25 bp, Homo sapien
ctttgtcatttggagctgtgcacgg

SEQ ID NO: 4206766 - DNA, 25 bp, Homo sapien
acagaagtttggatgtaatagccat

SEQ ID NO: 4206767 - DNA, 25 bp, Homo sapien
ttttctcagcgttggtttcttggag

SEQ ID NO: 4206768 - DNA, 25 bp, Homo sapien
cgttggtttcttggagtagacagca

SEQ ID NO: 4206769 - DNA, 25 bp, Homo sapien
ggtttcttggagtagacagcagaag

SEQ ID NO: 4206770 - DNA, 25 bp, Homo sapien
cagcgttggtttcttggagtagaca

SEQ ID NO: 4206771 - DNA, 25 bp, Homo sapien
gtgctgaggaggaccacacgcagtt

SEQ ID NO: 4206772 - DNA, 25 bp, Homo sapien
taaacccttctaggctgcatgtcag

SEQ ID NO: 4206773 - DNA, 25 bp, Homo sapien
agtttgcaagcacgccctgtctcta

SEQ ID NO: 4206774 - DNA, 25 bp, Homo sapien
gaaaccttctgggagctttgtcgct

SEQ ID NO: 4206775 - DNA, 25 bp, Homo sapien
tgtgcaaacatgctgtgagctgctg

SEQ ID NO: 4206776 - DNA, 25 bp, Homo sapien
tgtcatctctgggtaggaaacttct

SEQ ID NO: 4206777 - DNA, 25 bp, Homo sapien
gcatctgttgctttaaggcgcctga

SEQ ID NO: 4206778 - DNA, 25 bp, Homo sapien
catagcagtctatgagctgtggaga

SEQ ID NO: 4206779 - DNA, 25 bp, Homo sapien
catatctgtcagcaagggcgtggag

SEQ ID NO: 4206780 - DNA, 25 bp, Homo sapien
cataacttcctgtgtttagtcctgg

SEQ ID NO: 4206781 - DNA, 25 bp, Homo sapien
taagactcgtgaagttttataccat

SEQ ID NO: 4206782 - DNA, 25 bp, Homo sapien
ggatcctaatttctaagactcgtga

SEQ ID NO: 4206783 - DNA, 25 bp, Homo sapien
aagagcaagatacatatggctttca

SEQ ID NO: 4206784 - DNA, 25 bp, Homo sapien
acaaaagagcaagatacatatggct

SEQ ID NO: 4206785 - DNA, 25 bp, Homo sapien
atatggctttcagctgtggtccctg

SEQ ID NO: 4206786 - DNA, 25 bp, Homo sapien
ccattggcccagagaacaaaagagc

SEQ ID NO: 4206787 - DNA, 25 bp, Homo sapien
gagcagcacccaatttctccccttt

SEQ ID NO: 4206788 - DNA, 25 bp, Homo sapien
gggcatccttctgcatattcagcga

SEQ ID NO: 4206789 - DNA, 25 bp, Homo sapien
tctgcatattcagcgatgatttagc

SEQ ID NO: 4206790 - DNA, 25 bp, Homo sapien
tattcagcgatgatttagcttcatg

SEQ ID NO: 4206791 - DNA, 25 bp, Homo sapien
ccagggaagctgttggtgtagctca

SEQ ID NO: 4206792 - DNA, 25 bp, Homo sapien
ggccaagaagtcacatgataggtca

SEQ ID NO: 4206793 - DNA, 25 bp, Homo sapien
tacaaaggtggcagaaccttgggct

SEQ ID NO: 4206794 - DNA, 25 bp, Homo sapien
tgagcataggctcatttccctgtga

SEQ ID NO: 4206795 - DNA, 25 bp, Homo sapien
gttttgctttcagttgtgtcttcat

SEQ ID NO: 4206796 - DNA, 25 bp, Homo sapien
gttctttcttgatggctgtcttctt

SEQ ID NO: 4206797 - DNA, 25 bp, Homo sapien
tggctgtcttctttaccctcaaaag

SEQ ID NO: 4206798 - DNA, 25 bp, Homo sapien
ccctcaaaagttttgctttcagttg

SEQ ID NO: 4206799 - DNA, 25 bp, Homo sapien
ttttcccacattagaggaagtgtga

SEQ ID NO: 4206800 - DNA, 25 bp, Homo sapien
cttttcccacattagaggaagtgtg

SEQ ID NO: 4206801 - DNA, 25 bp, Homo sapien
tttcccacattagaggaagtgtgaa

SEQ ID NO: 4206802 - DNA, 25 bp, Homo sapien
tcttttcccacattagaggaagtgt

SEQ ID NO: 4206803 - DNA, 25 bp, Homo sapien
tcagatctggattgtggggataaat

SEQ ID NO: 4206804 - DNA, 25 bp, Homo sapien
tgtggggataaattctgatgtttga

SEQ ID NO: 4206805 - DNA, 25 bp, Homo sapien
gggataaattctgatgtttgaattg

SEQ ID NO: 4206806 - DNA, 25 bp, Homo sapien
cagatctggattgtggggataaatt

SEQ ID NO: 4206807 - DNA, 25 bp, Homo sapien
agaaggatgagctttgttggcaaag

SEQ ID NO: 4206808 - DNA, 25 bp, Homo sapien
ggatgagctttgttggcaaagtcag

SEQ ID NO: 4206809 - DNA, 25 bp, Homo sapien
gaaggatgagctttgttggcaaagt

SEQ ID NO: 4206810 - DNA, 25 bp, Homo sapien
aaggatgagctttgttggcaaagtc

SEQ ID NO: 4206811 - DNA, 25 bp, Homo sapien
ctctgtggactgtctctgctttggc

SEQ ID NO: 4206812 - DNA, 25 bp, Homo sapien
atgcaatttcctgttcattgtgtct

SEQ ID NO: 4206813 - DNA, 25 bp, Homo sapien
tctgtctgatctaacttggctgctt

SEQ ID NO: 4206814 - DNA, 25 bp, Homo sapien
ttcctaatgctctttgtggatcttt

SEQ ID NO: 4206815 - DNA, 25 bp, Homo sapien
cttttttctgtctgatctaacttgg

SEQ ID NO: 4206816 - DNA, 25 bp, Homo sapien
ttccagtctcttcttagtatccagc

SEQ ID NO: 4206817 - DNA, 25 bp, Homo sapien
tccagtctcttcttagtatccagcc

SEQ ID NO: 4206818 - DNA, 25 bp, Homo sapien
ctggaatacacagtagacagggaat

SEQ ID NO: 4206819 - DNA, 25 bp, Homo sapien
gacagggaatatctgccagttcctc

SEQ ID NO: 4206820 - DNA, 25 bp, Homo sapien
tacacagtagacagggaatatctgc

SEQ ID NO: 4206821 - DNA, 25 bp, Homo sapien
cagtagacagggaatatctgccagt

SEQ ID NO: 4206822 - DNA, 25 bp, Homo sapien
atttagtggcgagtacctcctcttg

SEQ ID NO: 4206823 - DNA, 25 bp, Homo sapien
cttgaatttagtggcgagtacctcc

SEQ ID NO: 4206824 - DNA, 25 bp, Homo sapien
tttagtggcgagtacctcctcttgt

SEQ ID NO: 4206825 - DNA, 25 bp, Homo sapien
gaatttagtggcgagtacctcctct

SEQ ID NO: 4206826 - DNA, 25 bp, Homo sapien
tgggtaccaccatccttgtcaccac

SEQ ID NO: 4206827 - DNA, 25 bp, Homo sapien
cagttgcatgaaccttttccttttc

SEQ ID NO: 4206828 - DNA, 25 bp, Homo sapien
aacagttgcatgaaccttttccttt

SEQ ID NO: 4206829 - DNA, 25 bp, Homo sapien
catccttgtcaccaccaaccggttt

SEQ ID NO: 4206830 - DNA, 25 bp, Homo sapien
atgatcagaacggtcccaagagtga

SEQ ID NO: 4206831 - DNA, 25 bp, Homo sapien
gaacggtcccaagagtgatgttgcc

SEQ ID NO: 4206832 - DNA, 25 bp, Homo sapien
tgttgcctcgcagtttcctctgtgc

SEQ ID NO: 4206833 - DNA, 25 bp, Homo sapien
ccaagagtgatgttgcctcgcagtt

SEQ ID NO: 4206834 - DNA, 25 bp, Homo sapien
aggaacttgattgagaactagagat

SEQ ID NO: 4206835 - DNA, 25 bp, Homo sapien
acttgattgagaactagagatccag

SEQ ID NO: 4206836 - DNA, 25 bp, Homo sapien
gaacttgattgagaactagagatcc

SEQ ID NO: 4206837 - DNA, 25 bp, Homo sapien
cttgattgagaactagagatccagt

SEQ ID NO: 4206838 - DNA, 25 bp, Homo sapien
tcaatttttgtggaggtggtgatga

SEQ ID NO: 4206839 - DNA, 25 bp, Homo sapien
ttttgtggaggtggtgatgacaaat

SEQ ID NO: 4206840 - DNA, 25 bp, Homo sapien
aatttttgtggaggtggtgatgaca

SEQ ID NO: 4206841 - DNA, 25 bp, Homo sapien
tggaggtggtgatgacaaatttctg

SEQ ID NO: 4206842 - DNA, 25 bp, Homo sapien
cttgaggttggtatcagtgagatgt

SEQ ID NO: 4206843 - DNA, 25 bp, Homo sapien
tggagatctcaccttcccgtgtctg

SEQ ID NO: 4206844 - DNA, 25 bp, Homo sapien
taatcaaacttgcaccgttctgtaa

SEQ ID NO: 4206845 - DNA, 25 bp, Homo sapien
gtgttggagatctcaccttcccgtg

SEQ ID NO: 4206846 - DNA, 25 bp, Homo sapien
acttgcaccgttctgtaatctcgta

SEQ ID NO: 4206847 - DNA, 25 bp, Homo sapien
tagtaaaatgtgcaagtccacatct

SEQ ID NO: 4206848 - DNA, 25 bp, Homo sapien
gtaaaatgtgcaagtccacatcttt

SEQ ID NO: 4206849 - DNA, 25 bp, Homo sapien
ttagtaaaatgtgcaagtccacatc

SEQ ID NO: 4206850 - DNA, 25 bp, Homo sapien
agtaaaatgtgcaagtccacatctt

SEQ ID NO: 4206851 - DNA, 25 bp, Homo sapien
gctccccctgggtaagtggcttggc

SEQ ID NO: 4206852 - DNA, 25 bp, Homo sapien
gtggcttggccctcaacggtgcccc

SEQ ID NO: 4206853 - DNA, 25 bp, Homo sapien
cttggccctcaacggtgccccagag

SEQ ID NO: 4206854 - DNA, 25 bp, Homo sapien
atgaagctgctatgtgctccccctg

SEQ ID NO: 4206855 - DNA, 25 bp, Homo sapien
gttggcctagttttgacatcgtaca

SEQ ID NO: 4206856 - DNA, 25 bp, Homo sapien
taaagattctaaggctgtaaggttg

SEQ ID NO: 4206857 - DNA, 25 bp, Homo sapien
ttgaggtgacccatcagaggaagca

SEQ ID NO: 4206858 - DNA, 25 bp, Homo sapien
ttgtccccaaagtctgttggcctag

SEQ ID NO: 4206859 - DNA, 25 bp, Homo sapien
gccaaagacttatgtggtgccagaa

SEQ ID NO: 4206860 - DNA, 25 bp, Homo sapien
gttactatcagggtggaggactgca

SEQ ID NO: 4206861 - DNA, 25 bp, Homo sapien
gacaaattgcctttaccctgctggt

SEQ ID NO: 4206862 - DNA, 25 bp, Homo sapien
tggagtaatctctatcagaggcctg

SEQ ID NO: 4206863 - DNA, 25 bp, Homo sapien
cttgtggtgggtctaagaggattcc

SEQ ID NO: 4206864 - DNA, 25 bp, Homo sapien
tggtgggtctaagaggattcctcat

SEQ ID NO: 4206865 - DNA, 25 bp, Homo sapien
gtggtgggtctaagaggattcctca

SEQ ID NO: 4206866 - DNA, 25 bp, Homo sapien
tgtggtgggtctaagaggattcctc

SEQ ID NO: 4206867 - DNA, 25 bp, Homo sapien
tggtaaggagttagaaaattcagtg

SEQ ID NO: 4206868 - DNA, 25 bp, Homo sapien
tctcgagcgttacaagaacaaatct

SEQ ID NO: 4206869 - DNA, 25 bp, Homo sapien
gaagtgattgttctcgagcgttaca

SEQ ID NO: 4206870 - DNA, 25 bp, Homo sapien
cgttacaagaacaaatctgtgcctc

SEQ ID NO: 4206871 - DNA, 25 bp, Homo sapien
gagagattagttattagggcagcaa

SEQ ID NO: 4206872 - DNA, 25 bp, Homo sapien
ttgatcacggacagaagaaaatggt

SEQ ID NO: 4206873 - DNA, 25 bp, Homo sapien
gttttgatcacggacagaagaaaat

SEQ ID NO: 4206874 - DNA, 25 bp, Homo sapien
agattagttattagggcagcaattg

SEQ ID NO: 4206875 - DNA, 25 bp, Homo sapien
ttcagggtcccataattcagaagga

SEQ ID NO: 4206876 - DNA, 25 bp, Homo sapien
tgtgtgtccgcgaaataatgtaact

SEQ ID NO: 4206877 - DNA, 25 bp, Homo sapien
taatgtaactctcgggtcccttgcg

SEQ ID NO: 4206878 - DNA, 25 bp, Homo sapien
gaaggtccagcctcgctgcaggatg

SEQ ID NO: 4206879 - DNA, 25 bp, Homo sapien
tgaggaggtcagtgctttcggggga

SEQ ID NO: 4206880 - DNA, 25 bp, Homo sapien
ctactgaacactcaaagctgaggag

SEQ ID NO: 4206881 - DNA, 25 bp, Homo sapien
tgctcttccccgctcgtctggggct

SEQ ID NO: 4206882 - DNA, 25 bp, Homo sapien
tccccgctcgtctggggcttctgct

SEQ ID NO: 4206883 - DNA, 25 bp, Homo sapien
agtgctcttctaggggggcttttct

SEQ ID NO: 4206884 - DNA, 25 bp, Homo sapien
gctagtggggagaagtgctcttcta

SEQ ID NO: 4206885 - DNA, 25 bp, Homo sapien
tctggcccttgccaagcggggagcc

SEQ ID NO: 4206886 - DNA, 25 bp, Homo sapien
tggggttccacgtgcagccctaggg

SEQ ID NO: 4206887 - DNA, 25 bp, Homo sapien
aggcgctccagtccgctctccgcaa

SEQ ID NO: 4206888 - DNA, 25 bp, Homo sapien
ctccagttcctgatttcctcggaag

SEQ ID NO: 4206889 - DNA, 25 bp, Homo sapien
ttcttcctggtactattggcaggaa

SEQ ID NO: 4206890 - DNA, 25 bp, Homo sapien
caagtgggtattctggtggcttttt

SEQ ID NO: 4206891 - DNA, 25 bp, Homo sapien
aaattcaagtgggtattctggtggc

SEQ ID NO: 4206892 - DNA, 25 bp, Homo sapien
gtactattggcaggaagaaattcaa

SEQ ID NO: 4206893 - DNA, 25 bp, Homo sapien
atgatggatttaggaaattcctctt

SEQ ID NO: 4206894 - DNA, 25 bp, Homo sapien
tactttgtagattaagtcatataca

SEQ ID NO: 4206895 - DNA, 25 bp, Homo sapien
ctcctcagtctcccatgatggattt

SEQ ID NO: 4206896 - DNA, 25 bp, Homo sapien
tacatatgaatcagtataaaggtgt

SEQ ID NO: 4206897 - DNA, 25 bp, Homo sapien
ctgttgatacgggttgagaagccca

SEQ ID NO: 4206898 - DNA, 25 bp, Homo sapien
tgttgatacgggttgagaagcccag

SEQ ID NO: 4206899 - DNA, 25 bp, Homo sapien
ggtcataccatctgggtgcctcagt

SEQ ID NO: 4206900 - DNA, 25 bp, Homo sapien
gaataatgatagctcctggtcctag

SEQ ID NO: 4206901 - DNA, 25 bp, Homo sapien
caccttttgagatctggacacctct

SEQ ID NO: 4206902 - DNA, 25 bp, Homo sapien
caaaaatagccattggagcagatcc

SEQ ID NO: 4206903 - DNA, 25 bp, Homo sapien
aagtgatacaccggccttggtcttc

SEQ ID NO: 4206904 - DNA, 25 bp, Homo sapien
tttgagattcagttatatacccaga

SEQ ID NO: 4206905 - DNA, 25 bp, Homo sapien
aagtggattagatggtcattgtgtt

SEQ ID NO: 4206906 - DNA, 25 bp, Homo sapien
ggattagatggtcattgtgttttta

SEQ ID NO: 4206907 - DNA, 25 bp, Homo sapien
cactgcgccggcctcttttttcctt

SEQ ID NO: 4206908 - DNA, 25 bp, Homo sapien
gatgtgtgctaccacgtccagctag

SEQ ID NO: 4206909 - DNA, 25 bp, Homo sapien
ttacagatgtgtgctaccacgtcca

SEQ ID NO: 4206910 - DNA, 25 bp, Homo sapien
gccactgcgccggcctcttttttcc

SEQ ID NO: 4206911 - DNA, 25 bp, Homo sapien
tatgtaatcaccatttggtttggga

SEQ ID NO: 4206912 - DNA, 25 bp, Homo sapien
ctttcattttctaccagtcaaacca

SEQ ID NO: 4206913 - DNA, 25 bp, Homo sapien
tatctgcctgatttgacaatgccaa

SEQ ID NO: 4206914 - DNA, 25 bp, Homo sapien
ggtttgggactgagagctctttcat

SEQ ID NO: 4206915 - DNA, 25 bp, Homo sapien
tactgtacattgtaactgctgagac

SEQ ID NO: 4206916 - DNA, 25 bp, Homo sapien
gattttgaatacctattgcaggctg

SEQ ID NO: 4206917 - DNA, 25 bp, Homo sapien
taaagctgtatgtcatagaccctgc

SEQ ID NO: 4206918 - DNA, 25 bp, Homo sapien
caatgtctttggtagatagcgaggc

SEQ ID NO: 4206919 - DNA, 25 bp, Homo sapien
gaaactttgaaggaattagagtaga

SEQ ID NO: 4206920 - DNA, 25 bp, Homo sapien
aagtagaccgtactataagccataa

SEQ ID NO: 4206921 - DNA, 25 bp, Homo sapien
taagccataatcacaaatctgaggt

SEQ ID NO: 4206922 - DNA, 25 bp, Homo sapien
tctctgcatatgttatactgtattg

SEQ ID NO: 4206923 - DNA, 25 bp, Homo sapien
aggtggggtccgctatattttccag

SEQ ID NO: 4206924 - DNA, 25 bp, Homo sapien
tattttccaggctagtcccaatctc

SEQ ID NO: 4206925 - DNA, 25 bp, Homo sapien
catagcttcaagcagtcgtccagcc

SEQ ID NO: 4206926 - DNA, 25 bp, Homo sapien
gtggtactacattcctgtctgggtg

SEQ ID NO: 4206927 - DNA, 25 bp, Homo sapien
tgggcatcgatgtcagatcctgaag

SEQ ID NO: 4206928 - DNA, 25 bp, Homo sapien
ggcaaggaggctacaccaaaccata

SEQ ID NO: 4206929 - DNA, 25 bp, Homo sapien
cattggaaagcctgtgttgggcatc

SEQ ID NO: 4206930 - DNA, 25 bp, Homo sapien
aaatcccatcctagaggcaaggagg

SEQ ID NO: 4206931 - DNA, 25 bp, Homo sapien
cgggtggtaaccatgtagtcaggta

SEQ ID NO: 4206932 - DNA, 25 bp, Homo sapien
gcaatgcagtagtcacgggtggtaa

SEQ ID NO: 4206933 - DNA, 25 bp, Homo sapien
tattagtacctatcactgctgagct

SEQ ID NO: 4206934 - DNA, 25 bp, Homo sapien
tgttttctgtcacaagtgcttcctg

SEQ ID NO: 4206935 - DNA, 25 bp, Homo sapien
cttagtttctggcttagcttctgct

SEQ ID NO: 4206936 - DNA, 25 bp, Homo sapien
cagtttatccctaggtttcagttca

SEQ ID NO: 4206937 - DNA, 25 bp, Homo sapien
gagaaatagtattggtcttagtttc

SEQ ID NO: 4206938 - DNA, 25 bp, Homo sapien
ccaaagccagcaaattctactcttg

SEQ ID NO: 4206939 - DNA, 25 bp, Homo sapien
tctggatatgaagagcggtcccctg

SEQ ID NO: 4206940 - DNA, 25 bp, Homo sapien
gcttccgggccgaactaagcagcat

SEQ ID NO: 4206941 - DNA, 25 bp, Homo sapien
gaacttcggtcgtcgcaaatcttgg

SEQ ID NO: 4206942 - DNA, 25 bp, Homo sapien
gataccggcactggcgacttcttaa

SEQ ID NO: 4206943 - DNA, 25 bp, Homo sapien
cctagcaccccttgagcagtttaat

SEQ ID NO: 4206944 - DNA, 25 bp, Homo sapien
cacgcgtcttccaccatgagggaga

SEQ ID NO: 4206945 - DNA, 25 bp, Homo sapien
gaaacggactgcagacaaacctagc

SEQ ID NO: 4206946 - DNA, 25 bp, Homo sapien
aatatgtaggcaccgtaaggacgcg

SEQ ID NO: 4206947 - DNA, 25 bp, Homo sapien
tctgaacttcaaggataaagcgaat

SEQ ID NO: 4206948 - DNA, 25 bp, Homo sapien
gcgaattttcacaagctttcaactg

SEQ ID NO: 4206949 - DNA, 25 bp, Homo sapien
atacatcctggtgaaaattctgaac

SEQ ID NO: 4206950 - DNA, 25 bp, Homo sapien
catcctggtgaaaattctgaacttc

SEQ ID NO: 4206951 - DNA, 25 bp, Homo sapien
ccagctgatccatcgaggacagggt

SEQ ID NO: 4206952 - DNA, 25 bp, Homo sapien
gccagctgatccatcgaggacaggg

SEQ ID NO: 4206953 - DNA, 25 bp, Homo sapien
ttgaatatttgaactctccaaagcc

SEQ ID NO: 4206954 - DNA, 25 bp, Homo sapien
attgaatatttgaactctccaaagc

SEQ ID NO: 4206955 - DNA, 25 bp, Homo sapien
ttggaaagttccgtggccatatctc

SEQ ID NO: 4206956 - DNA, 25 bp, Homo sapien
ggctgctttggaaagttccgtggcc

SEQ ID NO: 4206957 - DNA, 25 bp, Homo sapien
tgctttggaaagttccgtggccata

SEQ ID NO: 4206958 - DNA, 25 bp, Homo sapien
ggaaagttccgtggccatatctcaa

SEQ ID NO: 4206959 - DNA, 25 bp, Homo sapien
gaagccgaatccgagctagtttgct

SEQ ID NO: 4206960 - DNA, 25 bp, Homo sapien
tagccggtggcgtggccttatctca

SEQ ID NO: 4206961 - DNA, 25 bp, Homo sapien
taccttggatgacttcgggaggctg

SEQ ID NO: 4206962 - DNA, 25 bp, Homo sapien
gccggatttgcctgctaccttggat

SEQ ID NO: 4206963 - DNA, 25 bp, Homo sapien
ttcggcttggcagccgagcctcaga

SEQ ID NO: 4206964 - DNA, 25 bp, Homo sapien
agcccgttcggcttggcagccgagc

SEQ ID NO: 4206965 - DNA, 25 bp, Homo sapien
gcttggcagccgagcctcagatacc

SEQ ID NO: 4206966 - DNA, 25 bp, Homo sapien
agccagagcccgttcggcttggcag

SEQ ID NO: 4206967 - DNA, 25 bp, Homo sapien
ggagccagccgccagaaaagcgccg

SEQ ID NO: 4206968 - DNA, 25 bp, Homo sapien
gccggcagcggagaggagccagccg

SEQ ID NO: 4206969 - DNA, 25 bp, Homo sapien
agcgccgaatggagcaacagcagcg

SEQ ID NO: 4206970 - DNA, 25 bp, Homo sapien
cagaaaagcgccgaatggagcaaca

SEQ ID NO: 4206971 - DNA, 25 bp, Homo sapien
cggcgacagtacgagacggggcggg

SEQ ID NO: 4206972 - DNA, 25 bp, Homo sapien
tgacggcgacagtacgagacggggc

SEQ ID NO: 4206973 - DNA, 25 bp, Homo sapien
gacggcgacagtacgagacggggcg

SEQ ID NO: 4206974 - DNA, 25 bp, Homo sapien
cgacagtacgagacggggcgggagg

SEQ ID NO: 4206975 - DNA, 25 bp, Homo sapien
cttggagtctccgttgcacagagcc

SEQ ID NO: 4206976 - DNA, 25 bp, Homo sapien
ttggagtctccgttgcacagagcca

SEQ ID NO: 4206977 - DNA, 25 bp, Homo sapien
tggagtctccgttgcacagagccat

SEQ ID NO: 4206978 - DNA, 25 bp, Homo sapien
cagaaccggcctaaccgccgcggag

SEQ ID NO: 4206979 - DNA, 25 bp, Homo sapien
cagctccgaggggttcgtccagaac

SEQ ID NO: 4206980 - DNA, 25 bp, Homo sapien
cggcctaaccgccgcggagcccaag

SEQ ID NO: 4206981 - DNA, 25 bp, Homo sapien
gcagctccgaggggttcgtccagaa

SEQ ID NO: 4206982 - DNA, 25 bp, Homo sapien
tgagcagcagcggtcaaacgtgctc

SEQ ID NO: 4206983 - DNA, 25 bp, Homo sapien
gaggtgaaagcgaaggtgcccaatt

SEQ ID NO: 4206984 - DNA, 25 bp, Homo sapien
cgtcaaggcggcaacttttccagca

SEQ ID NO: 4206985 - DNA, 25 bp, Homo sapien
accagcaagctcgacagggagcaag

SEQ ID NO: 4206986 - DNA, 25 bp, Homo sapien
gaaaacttcacatgtccaggcagct

SEQ ID NO: 4206987 - DNA, 25 bp, Homo sapien
ttccagtgacaaacgggagtaacta

SEQ ID NO: 4206988 - DNA, 25 bp, Homo sapien
catggaccgctgtgagttttgagat

SEQ ID NO: 4206989 - DNA, 25 bp, Homo sapien
catcccttgcaagtgttatggcaga

SEQ ID NO: 4206990 - DNA, 25 bp, Homo sapien
catgagtctttcaagtttgtctaaa

SEQ ID NO: 4206991 - DNA, 25 bp, Homo sapien
cctatgtgtaagtagtacatgagtc

SEQ ID NO: 4206992 - DNA, 25 bp, Homo sapien
gattagtggcactcaaacagtaagt

SEQ ID NO: 4206993 - DNA, 25 bp, Homo sapien
cagttacacagttgttcattttagg

SEQ ID NO: 4206994 - DNA, 25 bp, Homo sapien
ttgtagaatgtcccacactggatct

SEQ ID NO: 4206995 - DNA, 25 bp, Homo sapien
tcttttatggcattgacctttttta

SEQ ID NO: 4206996 - DNA, 25 bp, Homo sapien
aacatcagtgaggaaactggttgtg

SEQ ID NO: 4206997 - DNA, 25 bp, Homo sapien
tgtgatggaaagaatggcaacgtcc

SEQ ID NO: 4206998 - DNA, 25 bp, Homo sapien
gaatggcaacgtcccaaaggaagtg

SEQ ID NO: 4206999 - DNA, 25 bp, Homo sapien
ggaaaatacttcacattaaagcaac

SEQ ID NO: 4207000 - DNA, 25 bp, Homo sapien
aacgaacaagcgttcaggcatggtg

SEQ ID NO: 4207001 - DNA, 25 bp, Homo sapien
ttgtgtgtaccctggaaatccactt

SEQ ID NO: 4207002 - DNA, 25 bp, Homo sapien
tccgtctgctgcaaaaacgaacaag

SEQ ID NO: 4207003 - DNA, 25 bp, Homo sapien
tccacttataggaagcatgtacagt

SEQ ID NO: 4207004 - DNA, 25 bp, Homo sapien
acaacagctccttcatagtggtggt

SEQ ID NO: 4207005 - DNA, 25 bp, Homo sapien
tggtggtggccatccttaaggtctc

SEQ ID NO: 4207006 - DNA, 25 bp, Homo sapien
atgactttcccgtactgagcaccag

SEQ ID NO: 4207007 - DNA, 25 bp, Homo sapien
ggaaaatttcagactgcacgaacag

SEQ ID NO: 4207008 - DNA, 25 bp, Homo sapien
aacaggcttgccaatagtgaatatt

SEQ ID NO: 4207009 - DNA, 25 bp, Homo sapien
gcatcttcagcatacacagaattag

SEQ ID NO: 4207010 - DNA, 25 bp, Homo sapien
attgctggatcaaaccagggagcat

SEQ ID NO: 4207011 - DNA, 25 bp, Homo sapien
tacacagaattaggtcctccagaga

SEQ ID NO: 4207012 - DNA, 25 bp, Homo sapien
tgtgcacagtacctccaaatacctt

SEQ ID NO: 4207013 - DNA, 25 bp, Homo sapien
cagtacctccaaataccttattcat

SEQ ID NO: 4207014 - DNA, 25 bp, Homo sapien
cactttttttgtgcacagtacctcc

SEQ ID NO: 4207015 - DNA, 25 bp, Homo sapien
tatccacactaatgttgaaaactcc

SEQ ID NO: 4207016 - DNA, 25 bp, Homo sapien
tgctactatgtttccagaacgtgcc

SEQ ID NO: 4207017 - DNA, 25 bp, Homo sapien
ccagaacgtgccacaaccttgaatc

SEQ ID NO: 4207018 - DNA, 25 bp, Homo sapien
gaatccatcagctactttgtctaca

SEQ ID NO: 4207019 - DNA, 25 bp, Homo sapien
ctttgtctacactatctccatgtgt

SEQ ID NO: 4207020 - DNA, 25 bp, Homo sapien
tgttctgcacggtgaaggttccact

SEQ ID NO: 4207021 - DNA, 25 bp, Homo sapien
gggtggaactgtgctccatataact

SEQ ID NO: 4207022 - DNA, 25 bp, Homo sapien
actgcatccagctatatcataaagg

SEQ ID NO: 4207023 - DNA, 25 bp, Homo sapien
caaaacttttgacgtgcctactctc

SEQ ID NO: 4207024 - DNA, 25 bp, Homo sapien
taaagccattatcaatgtgcacagc

SEQ ID NO: 4207025 - DNA, 25 bp, Homo sapien
tgttgagtctactccaccactgagt

SEQ ID NO: 4207026 - DNA, 25 bp, Homo sapien
ttgagggcctcttcaacagactggc

SEQ ID NO: 4207027 - DNA, 25 bp, Homo sapien
ggttcaaagcacgatttagcaaagc

SEQ ID NO: 4207028 - DNA, 25 bp, Homo sapien
tagaaagaatgagcagcatttatca

SEQ ID NO: 4207029 - DNA, 25 bp, Homo sapien
ctcttcaggacttgtggtcatattt

SEQ ID NO: 4207030 - DNA, 25 bp, Homo sapien
tcttttctcttcaggacttgtggtc

SEQ ID NO: 4207031 - DNA, 25 bp, Homo sapien
tattggtagggttgttgttccattg

SEQ ID NO: 4207032 - DNA, 25 bp, Homo sapien
tttctccaattacttcattggcaat

SEQ ID NO: 4207033 - DNA, 25 bp, Homo sapien
tcaggccgtaaagtaccttgggcaa

SEQ ID NO: 4207034 - DNA, 25 bp, Homo sapien
tttcaattagatcaggccgtaaagt

SEQ ID NO: 4207035 - DNA, 25 bp, Homo sapien
cttgggcaaggaaaacctcctctgg

SEQ ID NO: 4207036 - DNA, 25 bp, Homo sapien
gagctctgtgtcattgtgatgggtt

SEQ ID NO: 4207037 - DNA, 25 bp, Homo sapien
tgatgagctctgtgtcattgtgatg

SEQ ID NO: 4207038 - DNA, 25 bp, Homo sapien
tgatgggttttgatgagttcagctt

SEQ ID NO: 4207039 - DNA, 25 bp, Homo sapien
tctgtgtcattgtgatgggttttga

SEQ ID NO: 4207040 - DNA, 25 bp, Homo sapien
gatgcctggaaactaactcttctgg

SEQ ID NO: 4207041 - DNA, 25 bp, Homo sapien
tctttcagaggttctattacttttc

SEQ ID NO: 4207042 - DNA, 25 bp, Homo sapien
atggatgcctggaaactaactcttc

SEQ ID NO: 4207043 - DNA, 25 bp, Homo sapien
atctttcagaggttctattactttt

SEQ ID NO: 4207044 - DNA, 25 bp, Homo sapien
cgcactgcggtatggtacaaataat

SEQ ID NO: 4207045 - DNA, 25 bp, Homo sapien
acatcttccatggaacgcactgcgg

SEQ ID NO: 4207046 - DNA, 25 bp, Homo sapien
tggcaaattagtcgctgtccctaag

SEQ ID NO: 4207047 - DNA, 25 bp, Homo sapien
tagaacctgatgtacagacttgccc

SEQ ID NO: 4207048 - DNA, 25 bp, Homo sapien
tttcaaaatattgttggtttcagga

SEQ ID NO: 4207049 - DNA, 25 bp, Homo sapien
tatccctaggtattagtaatgcctg

SEQ ID NO: 4207050 - DNA, 25 bp, Homo sapien
aatcaatccctttgtggcttacatg

SEQ ID NO: 4207051 - DNA, 25 bp, Homo sapien
tgtccttctggcaaataacacagac

SEQ ID NO: 4207052 - DNA, 25 bp, Homo sapien
gaactggtgatttctcccagctcat

SEQ ID NO: 4207053 - DNA, 25 bp, Homo sapien
gtgaatgcagactggtaatttgcat

SEQ ID NO: 4207054 - DNA, 25 bp, Homo sapien
aatgcagactggtaatttgcatcag

SEQ ID NO: 4207055 - DNA, 25 bp, Homo sapien
atgcagactggtaatttgcatcagc

SEQ ID NO: 4207056 - DNA, 25 bp, Homo sapien
gaatgcagactggtaatttgcatca

SEQ ID NO: 4207057 - DNA, 25 bp, Homo sapien
gttgaactactgacacctcttctag

SEQ ID NO: 4207058 - DNA, 25 bp, Homo sapien
aggaattcagggctacagtacgcca

SEQ ID NO: 4207059 - DNA, 25 bp, Homo sapien
aactggcacttataccattttcgag

SEQ ID NO: 4207060 - DNA, 25 bp, Homo sapien
acattaacccaataactggcactta

SEQ ID NO: 4207061 - DNA, 25 bp, Homo sapien
cgtaactgtaggaacgacagtcacc

SEQ ID NO: 4207062 - DNA, 25 bp, Homo sapien
ccacacacgtaactgtaggaacgac

SEQ ID NO: 4207063 - DNA, 25 bp, Homo sapien
cacacgtaactgtaggaacgacagt

SEQ ID NO: 4207064 - DNA, 25 bp, Homo sapien
ataagcctagccagaaaaataagtg

SEQ ID NO: 4207065 - DNA, 25 bp, Homo sapien
gcctcaaaatcagcttggcgtaaag

SEQ ID NO: 4207066 - DNA, 25 bp, Homo sapien
gactccctgagaatgttatgggcct

SEQ ID NO: 4207067 - DNA, 25 bp, Homo sapien
aaagtactgagcacccctgttgtca

SEQ ID NO: 4207068 - DNA, 25 bp, Homo sapien
tgtcaagaaagtgggagtaacatct

SEQ ID NO: 4207069 - DNA, 25 bp, Homo sapien
tgccaggtgttgcaggtataccagt

SEQ ID NO: 4207070 - DNA, 25 bp, Homo sapien
gtcactagtaataaaggttcgaata

SEQ ID NO: 4207071 - DNA, 25 bp, Homo sapien
ggttcgaataaccacagatctctgg

SEQ ID NO: 4207072 - DNA, 25 bp, Homo sapien
gtgtcaaaatcaccggcatctggct

SEQ ID NO: 4207073 - DNA, 25 bp, Homo sapien
gtcatacataattcgagaaatacca

SEQ ID NO: 4207074 - DNA, 25 bp, Homo sapien
gggctttgatgttaagtcatacata

SEQ ID NO: 4207075 - DNA, 25 bp, Homo sapien
gaatcttcttaatctcagtgaccat

SEQ ID NO: 4207076 - DNA, 25 bp, Homo sapien
ttactcccactcagtagttcctggg

SEQ ID NO: 4207077 - DNA, 25 bp, Homo sapien
gacaatctggactaaggaaacctga

SEQ ID NO: 4207078 - DNA, 25 bp, Homo sapien
tacaccagaaacgtcattgagccag

SEQ ID NO: 4207079 - DNA, 25 bp, Homo sapien
gaaactttctatgcaaggctgtggg

SEQ ID NO: 4207080 - DNA, 25 bp, Homo sapien
gacaagtgagcttatgttccccaaa

SEQ ID NO: 4207081 - DNA, 25 bp, Homo sapien
aacacgcagtaaagagagattccta

SEQ ID NO: 4207082 - DNA, 25 bp, Homo sapien
ccctgaagggccctagagcatttcc

SEQ ID NO: 4207083 - DNA, 25 bp, Homo sapien
ggattctagctctagctcccaacaa

SEQ ID NO: 4207084 - DNA, 25 bp, Homo sapien
tcattagtgtcaaagccaaagcata

SEQ ID NO: 4207085 - DNA, 25 bp, Homo sapien
agacagggctatctctagaaactca

SEQ ID NO: 4207086 - DNA, 25 bp, Homo sapien
tgtgggaaagtggttataacattgc

SEQ ID NO: 4207087 - DNA, 25 bp, Homo sapien
tgaaagacagggctatctctagaaa

SEQ ID NO: 4207088 - DNA, 25 bp, Homo sapien
cattgcgcaagcagatgtcagagaa

SEQ ID NO: 4207089 - DNA, 25 bp, Homo sapien
ctggatttgggtcaatgaaagaagc

SEQ ID NO: 4207090 - DNA, 25 bp, Homo sapien
ttccaagggtggagacatccaactt

SEQ ID NO: 4207091 - DNA, 25 bp, Homo sapien
actacttcagtaagaacaaaagatg

SEQ ID NO: 4207092 - DNA, 25 bp, Homo sapien
cgtgtcctcgccacatatcaatgag

SEQ ID NO: 4207093 - DNA, 25 bp, Homo sapien
aagataccctgatcccttgatcatc

SEQ ID NO: 4207094 - DNA, 25 bp, Homo sapien
agaaagataccctgatcccttgatc

SEQ ID NO: 4207095 - DNA, 25 bp, Homo sapien
gaaagataccctgatcccttgatca

SEQ ID NO: 4207096 - DNA, 25 bp, Homo sapien
aaagataccctgatcccttgatcat

SEQ ID NO: 4207097 - DNA, 25 bp, Homo sapien
taataatacgcatccagtgttgagg

SEQ ID NO: 4207098 - DNA, 25 bp, Homo sapien
aaaactgtaaatgcttgccgggcgt

SEQ ID NO: 4207099 - DNA, 25 bp, Homo sapien
gaattggagcggtggctatagcaca

SEQ ID NO: 4207100 - DNA, 25 bp, Homo sapien
cataattttgctaaccaagggccct

SEQ ID NO: 4207101 - DNA, 25 bp, Homo sapien
cagttaacactagactgtcacagcc

SEQ ID NO: 4207102 - DNA, 25 bp, Homo sapien
tgtggatcctttgctctctggcttg

SEQ ID NO: 4207103 - DNA, 25 bp, Homo sapien
ttttggataataatgccaagttcct

SEQ ID NO: 4207104 - DNA, 25 bp, Homo sapien
ccttcatctgtggatcctttgctct

SEQ ID NO: 4207105 - DNA, 25 bp, Homo sapien
tctctggcttggttcttttggataa

SEQ ID NO: 4207106 - DNA, 25 bp, Homo sapien
gatctgatacagattagcttgaagg

SEQ ID NO: 4207107 - DNA, 25 bp, Homo sapien
actttttcaggtgatgtttgtctgc

SEQ ID NO: 4207108 - DNA, 25 bp, Homo sapien
aaaatcagtccctatgatctgatac

SEQ ID NO: 4207109 - DNA, 25 bp, Homo sapien
gtctgctaaaaggacgctggtcttt

SEQ ID NO: 4207110 - DNA, 25 bp, Homo sapien
caattagtgttgtagtatatcgtta

SEQ ID NO: 4207111 - DNA, 25 bp, Homo sapien
tccaattatgtgcacctttcaagag

SEQ ID NO: 4207112 - DNA, 25 bp, Homo sapien
tcgttaggtgtacaccatcgctccc

SEQ ID NO: 4207113 - DNA, 25 bp, Homo sapien
tacctgctacagaatgcatgttcaa

SEQ ID NO: 4207114 - DNA, 25 bp, Homo sapien
aaatagcttgagaaactatgaaagc

SEQ ID NO: 4207115 - DNA, 25 bp, Homo sapien
ttagatcaatgtaaaccagtttgtg

SEQ ID NO: 4207116 - DNA, 25 bp, Homo sapien
actctcatgtgacaacaaattttga

SEQ ID NO: 4207117 - DNA, 25 bp, Homo sapien
tctggttagggtaactattaatcac

SEQ ID NO: 4207118 - DNA, 25 bp, Homo sapien
ggataaaggaagagacataaaatgt

SEQ ID NO: 4207119 - DNA, 25 bp, Homo sapien
tggccactgccccttccgggaggtg

SEQ ID NO: 4207120 - DNA, 25 bp, Homo sapien
caatggacacggtattgataattca

SEQ ID NO: 4207121 - DNA, 25 bp, Homo sapien
tctggaatgcatagggaagacagtc

SEQ ID NO: 4207122 - DNA, 25 bp, Homo sapien
cattatctaaatcaaggatctgcat

SEQ ID NO: 4207123 - DNA, 25 bp, Homo sapien
catcattatctaaatcaaggatctg

SEQ ID NO: 4207124 - DNA, 25 bp, Homo sapien
tcattatctaaatcaaggatctgca

SEQ ID NO: 4207125 - DNA, 25 bp, Homo sapien
atcattatctaaatcaaggatctgc

SEQ ID NO: 4207126 - DNA, 25 bp, Homo sapien
tttttgtttcttcggctctcttcca

SEQ ID NO: 4207127 - DNA, 25 bp, Homo sapien
cacactgggtaaggacctggaaatg

SEQ ID NO: 4207128 - DNA, 25 bp, Homo sapien
tccattttcaataccatgaatcgtt

SEQ ID NO: 4207129 - DNA, 25 bp, Homo sapien
agagaatcagtgtgttagtgcccac

SEQ ID NO: 4207130 - DNA, 25 bp, Homo sapien
tggaggccactgtagactctagtat

SEQ ID NO: 4207131 - DNA, 25 bp, Homo sapien
ttccatagaggcaaggataatctgg

SEQ ID NO: 4207132 - DNA, 25 bp, Homo sapien
ggaatctggagcatatctctgggga

SEQ ID NO: 4207133 - DNA, 25 bp, Homo sapien
ggataggagagttccatagaggcaa

SEQ ID NO: 4207134 - DNA, 25 bp, Homo sapien
tatcactccacgatagcttcaaatc

SEQ ID NO: 4207135 - DNA, 25 bp, Homo sapien
ccatctaaggcttccttacaagaaa

SEQ ID NO: 4207136 - DNA, 25 bp, Homo sapien
tcttcataactcactggctgcataa

SEQ ID NO: 4207137 - DNA, 25 bp, Homo sapien
taaataatgggctaccatctaaggc

SEQ ID NO: 4207138 - DNA, 25 bp, Homo sapien
gaccactgacaggagaacagataag

SEQ ID NO: 4207139 - DNA, 25 bp, Homo sapien
cagcaatgcaaatgagtggatcaca

SEQ ID NO: 4207140 - DNA, 25 bp, Homo sapien
gatcacagctatacgcaacaacatg

SEQ ID NO: 4207141 - DNA, 25 bp, Homo sapien
tatgatagcaaggaactgggaacac

SEQ ID NO: 4207142 - DNA, 25 bp, Homo sapien
cgtaccttggaattacagctatatg

SEQ ID NO: 4207143 - DNA, 25 bp, Homo sapien
gtaccttggaattacagctatatga

SEQ ID NO: 4207144 - DNA, 25 bp, Homo sapien
ccaccatgcccagcatggggttttt

SEQ ID NO: 4207145 - DNA, 25 bp, Homo sapien
tccaggaacatatgcttacaccaag

SEQ ID NO: 4207146 - DNA, 25 bp, Homo sapien
agactccaggaacatatgcttacac

SEQ ID NO: 4207147 - DNA, 25 bp, Homo sapien
ggaacatatgcttacaccaaggact

SEQ ID NO: 4207148 - DNA, 25 bp, Homo sapien
acatatgcttacaccaaggacttcc

SEQ ID NO: 4207149 - DNA, 25 bp, Homo sapien
tattagggaagtcccagaaccagac

SEQ ID NO: 4207150 - DNA, 25 bp, Homo sapien
gccatgctattagggaagtcccaga

SEQ ID NO: 4207151 - DNA, 25 bp, Homo sapien
gcgtttaggcgccatgctattaggg

SEQ ID NO: 4207152 - DNA, 25 bp, Homo sapien
taggcgccatgctattagggaagtc

SEQ ID NO: 4207153 - DNA, 25 bp, Homo sapien
gatggctgacaaatgttgttaccca

SEQ ID NO: 4207154 - DNA, 25 bp, Homo sapien
aaatggttggcggagtttgttatat

SEQ ID NO: 4207155 - DNA, 25 bp, Homo sapien
tgttcattaagtctgtctgtttcat

SEQ ID NO: 4207156 - DNA, 25 bp, Homo sapien
catcaatgtgttcaatcgcttcttg

SEQ ID NO: 4207157 - DNA, 25 bp, Homo sapien
tctgtgtttgacttgaacgtttcgt

SEQ ID NO: 4207158 - DNA, 25 bp, Homo sapien
tgtttgacttgaacgtttcgtcaaa

SEQ ID NO: 4207159 - DNA, 25 bp, Homo sapien
tcttcctgctggctttattctgtgt

SEQ ID NO: 4207160 - DNA, 25 bp, Homo sapien
tcctgctggctttattctgtgtttg

SEQ ID NO: 4207161 - DNA, 25 bp, Homo sapien
gccagatatcatctttgatgacctc

SEQ ID NO: 4207162 - DNA, 25 bp, Homo sapien
ttggccagatatcatctttgatgac

SEQ ID NO: 4207163 - DNA, 25 bp, Homo sapien
tgtaatgggtttggccagatatcat

SEQ ID NO: 4207164 - DNA, 25 bp, Homo sapien
gggtttggccagatatcatctttga

SEQ ID NO: 4207165 - DNA, 25 bp, Homo sapien
tggagcagagaaaagagacctcaag

SEQ ID NO: 4207166 - DNA, 25 bp, Homo sapien
aagttgagaaccatggagcagagaa

SEQ ID NO: 4207167 - DNA, 25 bp, Homo sapien
gacctcaagaacagggtgacagagc

SEQ ID NO: 4207168 - DNA, 25 bp, Homo sapien
aagagacctcaagaacagggtgaca

SEQ ID NO: 4207169 - DNA, 25 bp, Homo sapien
accctccagcttctagcagagcgaa

SEQ ID NO: 4207170 - DNA, 25 bp, Homo sapien
ctagcagagcgaagggagcaggttt

SEQ ID NO: 4207171 - DNA, 25 bp, Homo sapien
ctccagcttctagcagagcgaaggg

SEQ ID NO: 4207172 - DNA, 25 bp, Homo sapien
agcttctagcagagcgaagggagca

SEQ ID NO: 4207173 - DNA, 25 bp, Homo sapien
tagacagatacatattggtaaatgc

SEQ ID NO: 4207174 - DNA, 25 bp, Homo sapien
acatctcaaaccaaccctttgctga

SEQ ID NO: 4207175 - DNA, 25 bp, Homo sapien
gaattctatgcactactacacaggg

SEQ ID NO: 4207176 - DNA, 25 bp, Homo sapien
gaagaaagctagaattctatgcact

SEQ ID NO: 4207177 - DNA, 25 bp, Homo sapien
tcgaaggtgcttcacacacttggct

SEQ ID NO: 4207178 - DNA, 25 bp, Homo sapien
ctcctcgaaggtgcttcacacactt

SEQ ID NO: 4207179 - DNA, 25 bp, Homo sapien
tcctcgaaggtgcttcacacacttg

SEQ ID NO: 4207180 - DNA, 25 bp, Homo sapien
aaggtgcttcacacacttggctaga

SEQ ID NO: 4207181 - DNA, 25 bp, Homo sapien
tgcaggaggagctacactcagcctc

SEQ ID NO: 4207182 - DNA, 25 bp, Homo sapien
gcaggaggagctacactcagcctct

SEQ ID NO: 4207183 - DNA, 25 bp, Homo sapien
cctgtgtgctccttgtacatactcg

SEQ ID NO: 4207184 - DNA, 25 bp, Homo sapien
cgtgggctccttatatgtatctgtg

SEQ ID NO: 4207185 - DNA, 25 bp, Homo sapien
ggcctccttattcatacctgtgtgc

SEQ ID NO: 4207186 - DNA, 25 bp, Homo sapien
tatgtatctgtgtggttctcataag

SEQ ID NO: 4207187 - DNA, 25 bp, Homo sapien
acacctacaccacccccttcataag

SEQ ID NO: 4207188 - DNA, 25 bp, Homo sapien
gtcttttcaacagatccaagacacc

SEQ ID NO: 4207189 - DNA, 25 bp, Homo sapien
ttcaacagatccaagacacctacac

SEQ ID NO: 4207190 - DNA, 25 bp, Homo sapien
aagacacctacaccacccccttcat

SEQ ID NO: 4207191 - DNA, 25 bp, Homo sapien
caggcttcattaagaccctggagag

SEQ ID NO: 4207192 - DNA, 25 bp, Homo sapien
cattaagaccctggagagtggattc

SEQ ID NO: 4207193 - DNA, 25 bp, Homo sapien
ggcaggcttcattaagaccctggag

SEQ ID NO: 4207194 - DNA, 25 bp, Homo sapien
gcttcattaagaccctggagagtgg

SEQ ID NO: 4207195 - DNA, 25 bp, Homo sapien
tgccggcctcaattcgtttggtcat

SEQ ID NO: 4207196 - DNA, 25 bp, Homo sapien
gtccttgccggcctcaattcgtttg

SEQ ID NO: 4207197 - DNA, 25 bp, Homo sapien
ctgtgtccttgccggcctcaattcg

SEQ ID NO: 4207198 - DNA, 25 bp, Homo sapien
tacaatgtggggaagagcctctggt

SEQ ID NO: 4207199 - DNA, 25 bp, Homo sapien
aagggtctcccattactacttgctg

SEQ ID NO: 4207200 - DNA, 25 bp, Homo sapien
ttattaacattaccagtcagctggg

SEQ ID NO: 4207201 - DNA, 25 bp, Homo sapien
ttgctggtgaaatcctaggcccatg

SEQ ID NO: 4207202 - DNA, 25 bp, Homo sapien
ctaagtgtaatctccacctgacctg

SEQ ID NO: 4207203 - DNA, 25 bp, Homo sapien
atgtttctgtgttcgtttccagttc

SEQ ID NO: 4207204 - DNA, 25 bp, Homo sapien
tttctgtgttcgtttccagttcaaa

SEQ ID NO: 4207205 - DNA, 25 bp, Homo sapien
tctgtgttcgtttccagttcaaaat

SEQ ID NO: 4207206 - DNA, 25 bp, Homo sapien
tcccactgccttaacaaaccaatca

SEQ ID NO: 4207207 - DNA, 25 bp, Homo sapien
caattatgatttattcacgtgatgt

SEQ ID NO: 4207208 - DNA, 25 bp, Homo sapien
tgctttaagtgaggataaccaattt

SEQ ID NO: 4207209 - DNA, 25 bp, Homo sapien
cgtgatgtaatgcaaaggagccatt

SEQ ID NO: 4207210 - DNA, 25 bp, Homo sapien
tattttatagctgtctttcacctat

SEQ ID NO: 4207211 - DNA, 25 bp, Homo sapien
ctcgtcttgctctttgcgcctctca

SEQ ID NO: 4207212 - DNA, 25 bp, Homo sapien
tggattcctggtccctcgtcttgct

SEQ ID NO: 4207213 - DNA, 25 bp, Homo sapien
catggattcctggtccctcgtcttg

SEQ ID NO: 4207214 - DNA, 25 bp, Homo sapien
tccctcgtcttgctctttgcgcctc

SEQ ID NO: 4207215 - DNA, 25 bp, Homo sapien
taacaagggaatggttttcggcatc

SEQ ID NO: 4207216 - DNA, 25 bp, Homo sapien
cagcaaccggcaggtccgttcttct

SEQ ID NO: 4207217 - DNA, 25 bp, Homo sapien
ttgcccagcaaccggcaggtccgtt

SEQ ID NO: 4207218 - DNA, 25 bp, Homo sapien
atggttttcggcatctacacacttg

SEQ ID NO: 4207219 - DNA, 25 bp, Homo sapien
cactgatttggagatggtaaaacag

SEQ ID NO: 4207220 - DNA, 25 bp, Homo sapien
aattcctgccggaaatgctccagtg

SEQ ID NO: 4207221 - DNA, 25 bp, Homo sapien
cagagtgatgttgggcaaaatatcc

SEQ ID NO: 4207222 - DNA, 25 bp, Homo sapien
taagaaataccaagactgcttccac

SEQ ID NO: 4207223 - DNA, 25 bp, Homo sapien
agcaggaactgataagaatgatcca

SEQ ID NO: 4207224 - DNA, 25 bp, Homo sapien
gcaggaactgataagaatgatccac

SEQ ID NO: 4207225 - DNA, 25 bp, Homo sapien
ggcaaataatataaccctagaattc

SEQ ID NO: 4207226 - DNA, 25 bp, Homo sapien
gctgcagtttccacaagcatggttt

SEQ ID NO: 4207227 - DNA, 25 bp, Homo sapien
ttccacaagcatggtttgtgttgtt

SEQ ID NO: 4207228 - DNA, 25 bp, Homo sapien
cagtttccacaagcatggtttgtgt

SEQ ID NO: 4207229 - DNA, 25 bp, Homo sapien
tgcagtttccacaagcatggtttgt

SEQ ID NO: 4207230 - DNA, 25 bp, Homo sapien
tcacgcaggtagaggtatagcccac

SEQ ID NO: 4207231 - DNA, 25 bp, Homo sapien
cacagccttcgactggatcttatcg

SEQ ID NO: 4207232 - DNA, 25 bp, Homo sapien
ttacacgaagataagatggaaactg

SEQ ID NO: 4207233 - DNA, 25 bp, Homo sapien
tatttgtcactaagaatcacgcagg

SEQ ID NO: 4207234 - DNA, 25 bp, Homo sapien
agaaagtgaaagtgttggatacgtt

SEQ ID NO: 4207235 - DNA, 25 bp, Homo sapien
ttatccaaagctctatagtactggg

SEQ ID NO: 4207236 - DNA, 25 bp, Homo sapien
cagttcatccggaagtaaatatgga

SEQ ID NO: 4207237 - DNA, 25 bp, Homo sapien
caaagctctatagtactgggccagg

SEQ ID NO: 4207238 - DNA, 25 bp, Homo sapien
tatggaactggattatccaaagctc

SEQ ID NO: 4207239 - DNA, 25 bp, Homo sapien
atctcaccactatactccagcatgg

SEQ ID NO: 4207240 - DNA, 25 bp, Homo sapien
gcatggcaacagagcgagactccgt

SEQ ID NO: 4207241 - DNA, 25 bp, Homo sapien
tcaccactatactccagcatggcaa

SEQ ID NO: 4207242 - DNA, 25 bp, Homo sapien
agcatggcaacagagcgagactccg

SEQ ID NO: 4207243 - DNA, 25 bp, Homo sapien
gcacatgggatggagtcaaagcagc

SEQ ID NO: 4207244 - DNA, 25 bp, Homo sapien
aagcagcatattggttccctctgaa

SEQ ID NO: 4207245 - DNA, 25 bp, Homo sapien
gacacgtgtccatcagcacatggga

SEQ ID NO: 4207246 - DNA, 25 bp, Homo sapien
ggacacacatcagtacacactgaat

SEQ ID NO: 4207247 - DNA, 25 bp, Homo sapien
tttgaaggaataggtagagagtaac

SEQ ID NO: 4207248 - DNA, 25 bp, Homo sapien
tcaatatcacccttatgaaagagaa

SEQ ID NO: 4207249 - DNA, 25 bp, Homo sapien
gaattgtaacaggaataaggttgat

SEQ ID NO: 4207250 - DNA, 25 bp, Homo sapien
ctttgcttactcagagcttttccct

SEQ ID NO: 4207251 - DNA, 25 bp, Homo sapien
aacagagaattgactgtaaagaaat

SEQ ID NO: 4207252 - DNA, 25 bp, Homo sapien
gactgtaaagaaatccaattgtccc

SEQ ID NO: 4207253 - DNA, 25 bp, Homo sapien
gaacagagaattgactgtaaagaaa

SEQ ID NO: 4207254 - DNA, 25 bp, Homo sapien
ctattgaacgaagaacagagaattg

SEQ ID NO: 4207255 - DNA, 25 bp, Homo sapien
ccatgcaggaccagttgtgtggctt

SEQ ID NO: 4207256 - DNA, 25 bp, Homo sapien
cctgaatgagaaagcccagctgcca

SEQ ID NO: 4207257 - DNA, 25 bp, Homo sapien
ccagggcctcatcataagcaaggta

SEQ ID NO: 4207258 - DNA, 25 bp, Homo sapien
aatgaaaagcatggacgacagcagc

SEQ ID NO: 4207259 - DNA, 25 bp, Homo sapien
ggcaaagagaaaagcccagtgccag

SEQ ID NO: 4207260 - DNA, 25 bp, Homo sapien
tttccaagaaggcaagacaggcaaa

SEQ ID NO: 4207261 - DNA, 25 bp, Homo sapien
gagaaaagcccagtgccagagtgac

SEQ ID NO: 4207262 - DNA, 25 bp, Homo sapien
aagagaaaagcccagtgccagagtg

SEQ ID NO: 4207263 - DNA, 25 bp, Homo sapien
atatcaagtaggctgtacatatgcc

SEQ ID NO: 4207264 - DNA, 25 bp, Homo sapien
ggtgcatggatgtaagttgagtttt

SEQ ID NO: 4207265 - DNA, 25 bp, Homo sapien
tgccaatctccgctagaacagagat

SEQ ID NO: 4207266 - DNA, 25 bp, Homo sapien
ttttggatttggaaattctgtaggc

SEQ ID NO: 4207267 - DNA, 25 bp, Homo sapien
caaggctaagaaggcatcaattcca

SEQ ID NO: 4207268 - DNA, 25 bp, Homo sapien
tcaattccaaacatcgagtacaaaa

SEQ ID NO: 4207269 - DNA, 25 bp, Homo sapien
cgagtacaaaaactctatggaaatt

SEQ ID NO: 4207270 - DNA, 25 bp, Homo sapien
tccaaacatcgagtacaaaaactct

SEQ ID NO: 4207271 - DNA, 25 bp, Homo sapien
ataaacagggacaaaagacatccaa

SEQ ID NO: 4207272 - DNA, 25 bp, Homo sapien
tacaacccaacaagccatggctgga

SEQ ID NO: 4207273 - DNA, 25 bp, Homo sapien
aattatctggtaactggcgagccac

SEQ ID NO: 4207274 - DNA, 25 bp, Homo sapien
gcctttggtgctcaaataaacaggg

SEQ ID NO: 4207275 - DNA, 25 bp, Homo sapien
gctgaggtcagttggatgcaattat

SEQ ID NO: 4207276 - DNA, 25 bp, Homo sapien
gacactgtggtattgttaagctcac

SEQ ID NO: 4207277 - DNA, 25 bp, Homo sapien
gtcatccagaacagttgacactgtg

SEQ ID NO: 4207278 - DNA, 25 bp, Homo sapien
aatttcactggtgttcctctctggc

SEQ ID NO: 4207279 - DNA, 25 bp, Homo sapien
aagggaatgttgaaccacatcatca

SEQ ID NO: 4207280 - DNA, 25 bp, Homo sapien
atgttgaaccacatcatcattgcag

SEQ ID NO: 4207281 - DNA, 25 bp, Homo sapien
attgcagcttcaaaggacacatgta

SEQ ID NO: 4207282 - DNA, 25 bp, Homo sapien
gcttcaaaggacacatgtaaatcaa

SEQ ID NO: 4207283 - DNA, 25 bp, Homo sapien
cctgcaccagtggatggaaagctct

SEQ ID NO: 4207284 - DNA, 25 bp, Homo sapien
accagtggatggaaagctctaagcc

SEQ ID NO: 4207285 - DNA, 25 bp, Homo sapien
ctgtcatgacctgcaccagtggatg

SEQ ID NO: 4207286 - DNA, 25 bp, Homo sapien
gtggatggaaagctctaagccagca

SEQ ID NO: 4207287 - DNA, 25 bp, Homo sapien
ctcagcaagttaagcataacatttt

SEQ ID NO: 4207288 - DNA, 25 bp, Homo sapien
gaagaatcaggaagttactggctgc

SEQ ID NO: 4207289 - DNA, 25 bp, Homo sapien
tgcataatgcctcccgtttgtcaca

SEQ ID NO: 4207290 - DNA, 25 bp, Homo sapien
gccacagctgtgatagaaaactcaa

SEQ ID NO: 4207291 - DNA, 25 bp, Homo sapien
cacaatccgtatcaaggtggagcca

SEQ ID NO: 4207292 - DNA, 25 bp, Homo sapien
aactcaggtttgctcagtcttgcag

SEQ ID NO: 4207293 - DNA, 25 bp, Homo sapien
tttagcaggtctaggcccagaaact

SEQ ID NO: 4207294 - DNA, 25 bp, Homo sapien
catcctgtgtcaaatatgatgcata

SEQ ID NO: 4207295 - DNA, 25 bp, Homo sapien
ctgtctactagctgagatggtattt

SEQ ID NO: 4207296 - DNA, 25 bp, Homo sapien
gtgcgatggacagccaggccgggtg

SEQ ID NO: 4207297 - DNA, 25 bp, Homo sapien
tgtgcgatggacagccaggccgggt

SEQ ID NO: 4207298 - DNA, 25 bp, Homo sapien
gcgatggacagccaggccgggtgcc

SEQ ID NO: 4207299 - DNA, 25 bp, Homo sapien
ctgtgcgatggacagccaggccggg

SEQ ID NO: 4207300 - DNA, 25 bp, Homo sapien
cctgctgagggctcgctgctgttac

SEQ ID NO: 4207301 - DNA, 25 bp, Homo sapien
ccagcgtgcctgctgagggctcgct

SEQ ID NO: 4207302 - DNA, 25 bp, Homo sapien
aggccagcgtgcctgctgagggctc

SEQ ID NO: 4207303 - DNA, 25 bp, Homo sapien
tgagggctcgctgctgttacggcaa

SEQ ID NO: 4207304 - DNA, 25 bp, Homo sapien
gctttttctgccctaaggagtttgc

SEQ ID NO: 4207305 - DNA, 25 bp, Homo sapien
gccctaaggagtttgctacatcaaa

SEQ ID NO: 4207306 - DNA, 25 bp, Homo sapien
atgtgctttttctgccctaaggagt

SEQ ID NO: 4207307 - DNA, 25 bp, Homo sapien
ggccatcacttctactccagccatg

SEQ ID NO: 4207308 - DNA, 25 bp, Homo sapien
cgtggagatctttcagagaagactg

SEQ ID NO: 4207309 - DNA, 25 bp, Homo sapien
agagaagactggaagtcactgtcat

SEQ ID NO: 4207310 - DNA, 25 bp, Homo sapien
gaagactggaagtcactgtcatcaa

SEQ ID NO: 4207311 - DNA, 25 bp, Homo sapien
aagactggaagtcactgtcatcaaa

SEQ ID NO: 4207312 - DNA, 25 bp, Homo sapien
agttgacgcgccctgagctggcttt

SEQ ID NO: 4207313 - DNA, 25 bp, Homo sapien
gacaggtcgcagagctttaggtacc

SEQ ID NO: 4207314 - DNA, 25 bp, Homo sapien
tcccctgagggactaaggctgctgt

SEQ ID NO: 4207315 - DNA, 25 bp, Homo sapien
ttcgcgcagcagagccagttgacgc

SEQ ID NO: 4207316 - DNA, 25 bp, Homo sapien
tttgccatttgcaccaagatcctgc

SEQ ID NO: 4207317 - DNA, 25 bp, Homo sapien
agatcctgctctttgtggttacaca

SEQ ID NO: 4207318 - DNA, 25 bp, Homo sapien
ttgccatttgcaccaagatcctgct

SEQ ID NO: 4207319 - DNA, 25 bp, Homo sapien
ttatttgccatttgcaccaagatcc

SEQ ID NO: 4207320 - DNA, 25 bp, Homo sapien
aataccttgggttatctggcttcag

SEQ ID NO: 4207321 - DNA, 25 bp, Homo sapien
gaagcaaagctaattgcacggtgct

SEQ ID NO: 4207322 - DNA, 25 bp, Homo sapien
tcctaagttcccgacagagctgttg

SEQ ID NO: 4207323 - DNA, 25 bp, Homo sapien
tggcttcagtatgtccctcaaaagg

SEQ ID NO: 4207324 - DNA, 25 bp, Homo sapien
ctacattttagagccgattcactgg

SEQ ID NO: 4207325 - DNA, 25 bp, Homo sapien
gctcgggatgtctgcacaggcaggt

SEQ ID NO: 4207326 - DNA, 25 bp, Homo sapien
gagccgattcactggattttggcag

SEQ ID NO: 4207327 - DNA, 25 bp, Homo sapien
tttagagccgattcactggattttg

SEQ ID NO: 4207328 - DNA, 25 bp, Homo sapien
ggtttcctgcaacgaaattccatga

SEQ ID NO: 4207329 - DNA, 25 bp, Homo sapien
tttctgttcggctgctccactgggc

SEQ ID NO: 4207330 - DNA, 25 bp, Homo sapien
tgccatgcccgtctctgctctggtg

SEQ ID NO: 4207331 - DNA, 25 bp, Homo sapien
tccatgaacacgtagaaacttttcc

SEQ ID NO: 4207332 - DNA, 25 bp, Homo sapien
tgtgtaagaatattccaggtaggaa

SEQ ID NO: 4207333 - DNA, 25 bp, Homo sapien
gaaaactaatgatgagtagagactc

SEQ ID NO: 4207334 - DNA, 25 bp, Homo sapien
gggtaagcatgcaaagcagcaggac

SEQ ID NO: 4207335 - DNA, 25 bp, Homo sapien
ctaggcaagtgggatgtgtaagaat

SEQ ID NO: 4207336 - DNA, 25 bp, Homo sapien
tcaaatttaagttcgagtctaggac

SEQ ID NO: 4207337 - DNA, 25 bp, Homo sapien
aaatttcccattgtcataatcaagg

SEQ ID NO: 4207338 - DNA, 25 bp, Homo sapien
tttctttatgaaatagcacatccca

SEQ ID NO: 4207339 - DNA, 25 bp, Homo sapien
cgtttcaggcaacagaagagcttcc

SEQ ID NO: 4207340 - DNA, 25 bp, Homo sapien
tgtaggctaataaggtcagcaggcc

SEQ ID NO: 4207341 - DNA, 25 bp, Homo sapien
tcagcaggcctatgagatccctcag

SEQ ID NO: 4207342 - DNA, 25 bp, Homo sapien
cacagtcgttgtcagggacacggta

SEQ ID NO: 4207343 - DNA, 25 bp, Homo sapien
tggtaaccctcgctgggtagctgtg

SEQ ID NO: 4207344 - DNA, 25 bp, Homo sapien
gaaatggaaggcccttggagaggta

SEQ ID NO: 4207345 - DNA, 25 bp, Homo sapien
tcagaaatggaaggcccttggagag

SEQ ID NO: 4207346 - DNA, 25 bp, Homo sapien
cagaaatggaaggcccttggagagg

SEQ ID NO: 4207347 - DNA, 25 bp, Homo sapien
agaaatggaaggcccttggagaggt

SEQ ID NO: 4207348 - DNA, 25 bp, Homo sapien
ctaacttgtgtctagcataatatct

SEQ ID NO: 4207349 - DNA, 25 bp, Homo sapien
tatcttccacgtagcaggtggtcaa

SEQ ID NO: 4207350 - DNA, 25 bp, Homo sapien
ttccacgtagcaggtggtcaaatac

SEQ ID NO: 4207351 - DNA, 25 bp, Homo sapien
gcataatatcttccacgtagcaggt

SEQ ID NO: 4207352 - DNA, 25 bp, Homo sapien
taaagcacagcatatcatctgagac

SEQ ID NO: 4207353 - DNA, 25 bp, Homo sapien
tcgtggcatattactttcccttaag

SEQ ID NO: 4207354 - DNA, 25 bp, Homo sapien
tacttctgctgtgtatcgtggcata

SEQ ID NO: 4207355 - DNA, 25 bp, Homo sapien
ggcatgacactgataattgttttca

SEQ ID NO: 4207356 - DNA, 25 bp, Homo sapien
tgcactagcagtgacgatggcacag

SEQ ID NO: 4207357 - DNA, 25 bp, Homo sapien
cacagttaagctttgggactctgga

SEQ ID NO: 4207358 - DNA, 25 bp, Homo sapien
gataattctgccatactgaaggaac

SEQ ID NO: 4207359 - DNA, 25 bp, Homo sapien
tacaacacagatggcagtatgctct

SEQ ID NO: 4207360 - DNA, 25 bp, Homo sapien
tcccttccggttttgacttgagagc

SEQ ID NO: 4207361 - DNA, 25 bp, Homo sapien
cttccggttttgacttgagagccca

SEQ ID NO: 4207362 - DNA, 25 bp, Homo sapien
tcttcctgtgaacagctcttgctgg

SEQ ID NO: 4207363 - DNA, 25 bp, Homo sapien
tcctgtgaacagctcttgctgggct

SEQ ID NO: 4207364 - DNA, 25 bp, Homo sapien
ccttgcaccccagtaaagagctcat

SEQ ID NO: 4207365 - DNA, 25 bp, Homo sapien
cagtaaagagctcatcagtatcatc

SEQ ID NO: 4207366 - DNA, 25 bp, Homo sapien
gatacctgaaatctggaggacaaaa

SEQ ID NO: 4207367 - DNA, 25 bp, Homo sapien
tctgtgcagccacattagccagcat

SEQ ID NO: 4207368 - DNA, 25 bp, Homo sapien
tacacaactccctgttgtaaatggg

SEQ ID NO: 4207369 - DNA, 25 bp, Homo sapien
tgtaaatgggacattatgaccagct

SEQ ID NO: 4207370 - DNA, 25 bp, Homo sapien
tttccagagacaccataacaggtat

SEQ ID NO: 4207371 - DNA, 25 bp, Homo sapien
ccaggtaactggaggtacacaactc

SEQ ID NO: 4207372 - DNA, 25 bp, Homo sapien
gtttcatttcataccctgtatcatg

SEQ ID NO: 4207373 - DNA, 25 bp, Homo sapien
cctttgtctgatgcctccttggtta

SEQ ID NO: 4207374 - DNA, 25 bp, Homo sapien
gtctgatgcctccttggttagccta

SEQ ID NO: 4207375 - DNA, 25 bp, Homo sapien
tttgtctgatgcctccttggttagc

SEQ ID NO: 4207376 - DNA, 25 bp, Homo sapien
ctctgaaccgggatggtgccctaaa

SEQ ID NO: 4207377 - DNA, 25 bp, Homo sapien
tagggtgagaacttaccactgtgcc

SEQ ID NO: 4207378 - DNA, 25 bp, Homo sapien
aaacagctctgaaccgggatggtgc

SEQ ID NO: 4207379 - DNA, 25 bp, Homo sapien
agtttagggtgagaacttaccactg

SEQ ID NO: 4207380 - DNA, 25 bp, Homo sapien
ccatattcattgctgactcagtgtc

SEQ ID NO: 4207381 - DNA, 25 bp, Homo sapien
tctgaccttgtattgatgacatggc

SEQ ID NO: 4207382 - DNA, 25 bp, Homo sapien
ccactgctaaatgtgcagataattc

SEQ ID NO: 4207383 - DNA, 25 bp, Homo sapien
cgtgcctctaggattccactgctaa

SEQ ID NO: 4207384 - DNA, 25 bp, Homo sapien
gggttcaggtatgccatggaactca

SEQ ID NO: 4207385 - DNA, 25 bp, Homo sapien
atggaactcagaggcgggcttgccc

SEQ ID NO: 4207386 - DNA, 25 bp, Homo sapien
gaatcttgacagtgggaaataacca

SEQ ID NO: 4207387 - DNA, 25 bp, Homo sapien
tctgtgtaaaccctagtctccgctg

SEQ ID NO: 4207388 - DNA, 25 bp, Homo sapien
ttttgtccagtagaatgctgcagaa

SEQ ID NO: 4207389 - DNA, 25 bp, Homo sapien
gactgtgtaccaattgctatcctag

SEQ ID NO: 4207390 - DNA, 25 bp, Homo sapien
ggcggtgcatgaactgagacttgaa

SEQ ID NO: 4207391 - DNA, 25 bp, Homo sapien
gccattgtgatcagctttgaacacg

SEQ ID NO: 4207392 - DNA, 25 bp, Homo sapien
gggaaaatactatcttgctgggcag

SEQ ID NO: 4207393 - DNA, 25 bp, Homo sapien
gaaaatactatcttgctgggcagca

SEQ ID NO: 4207394 - DNA, 25 bp, Homo sapien
ttgctgggcagcaagcttgtctacc

SEQ ID NO: 4207395 - DNA, 25 bp, Homo sapien
gctgggcagcaagcttgtctaccat

SEQ ID NO: 4207396 - DNA, 25 bp, Homo sapien
tgtatggcccagtgatgccctccgt

SEQ ID NO: 4207397 - DNA, 25 bp, Homo sapien
tagtgcctgagcacatgtttcctgc

SEQ ID NO: 4207398 - DNA, 25 bp, Homo sapien
gacattaagcgtgtgccagggaaca

SEQ ID NO: 4207399 - DNA, 25 bp, Homo sapien
ggtgcttctcacttgccatgcccat

SEQ ID NO: 4207400 - DNA, 25 bp, Homo sapien
cacaggcagtcacgagaggttgagc

SEQ ID NO: 4207401 - DNA, 25 bp, Homo sapien
gagcattcatggtgactgcacgcag

SEQ ID NO: 4207402 - DNA, 25 bp, Homo sapien
gatggctcaaatcagcgcaggctta

SEQ ID NO: 4207403 - DNA, 25 bp, Homo sapien
cattctcgagcgaaagcctgggttg

SEQ ID NO: 4207404 - DNA, 25 bp, Homo sapien
aatgtgatgctgaggcgtgaacgtc

SEQ ID NO: 4207405 - DNA, 25 bp, Homo sapien
catgccagtctgctttgcggtggac

SEQ ID NO: 4207406 - DNA, 25 bp, Homo sapien
gatagcgaccgtgcggaatttggcc

SEQ ID NO: 4207407 - DNA, 25 bp, Homo sapien
tgcttgctcagaagtcggtcctcac

SEQ ID NO: 4207408 - DNA, 25 bp, Homo sapien
ccatcccatggatgccagacttctg

SEQ ID NO: 4207409 - DNA, 25 bp, Homo sapien
accatcccatggatgccagacttct

SEQ ID NO: 4207410 - DNA, 25 bp, Homo sapien
catcccatggatgccagacttctga

SEQ ID NO: 4207411 - DNA, 25 bp, Homo sapien
tcaccatcccatggatgccagactt

SEQ ID NO: 4207412 - DNA, 25 bp, Homo sapien
ccagatggcctgtgtgaatgctctc

SEQ ID NO: 4207413 - DNA, 25 bp, Homo sapien
agaccagatggcctgtgtgaatgct

SEQ ID NO: 4207414 - DNA, 25 bp, Homo sapien
atgagggctagaccagatggcctgt

SEQ ID NO: 4207415 - DNA, 25 bp, Homo sapien
ggctagaccagatggcctgtgtgaa

SEQ ID NO: 4207416 - DNA, 25 bp, Homo sapien
gccagaggatgtacccattcagccc

SEQ ID NO: 4207417 - DNA, 25 bp, Homo sapien
gagtggggtcattatccctggaaga

SEQ ID NO: 4207418 - DNA, 25 bp, Homo sapien
ctttctgggacttcatacagaggga

SEQ ID NO: 4207419 - DNA, 25 bp, Homo sapien
gaggacaaaacacgcatgaagccag

SEQ ID NO: 4207420 - DNA, 25 bp, Homo sapien
cacgtagtccaaagggaagtgtagg

SEQ ID NO: 4207421 - DNA, 25 bp, Homo sapien
tccccaaacttggtcacgtagtcca

SEQ ID NO: 4207422 - DNA, 25 bp, Homo sapien
gttaggaaggatgggtgatggtccc

SEQ ID NO: 4207423 - DNA, 25 bp, Homo sapien
cttggtcacgtagtccaaagggaag

SEQ ID NO: 4207424 - DNA, 25 bp, Homo sapien
gctttctttgccattcatctgtttg

SEQ ID NO: 4207425 - DNA, 25 bp, Homo sapien
ttgaggtggcgtagaggaaaaaaga

SEQ ID NO: 4207426 - DNA, 25 bp, Homo sapien
ctgtggttgaggtggcgtagaggaa

SEQ ID NO: 4207427 - DNA, 25 bp, Homo sapien
tgtggttgaggtggcgtagaggaaa

SEQ ID NO: 4207428 - DNA, 25 bp, Homo sapien
tggttgaggtggcgtagaggaaaaa

SEQ ID NO: 4207429 - DNA, 25 bp, Homo sapien
tgaacgtctaaattcctttcaggtc

SEQ ID NO: 4207430 - DNA, 25 bp, Homo sapien
gaagtgtagtctacctctagcacca

SEQ ID NO: 4207431 - DNA, 25 bp, Homo sapien
taagatgatagtcagtgaagcttgc

SEQ ID NO: 4207432 - DNA, 25 bp, Homo sapien
tttctttggtgcactccctcggatt

SEQ ID NO: 4207433 - DNA, 25 bp, Homo sapien
tcatggaggccatggctaggcattg

SEQ ID NO: 4207434 - DNA, 25 bp, Homo sapien
ggcattgagatttgtccataaggag

SEQ ID NO: 4207435 - DNA, 25 bp, Homo sapien
tgtattgggaactatatggtgtgtc

SEQ ID NO: 4207436 - DNA, 25 bp, Homo sapien
ttgggaactatatggtgtgtcatgg

SEQ ID NO: 4207437 - DNA, 25 bp, Homo sapien
tgtggtgaggggtaggcagtcagca

SEQ ID NO: 4207438 - DNA, 25 bp, Homo sapien
gaaaatggctctcggcaggcgagga

SEQ ID NO: 4207439 - DNA, 25 bp, Homo sapien
gaacaggaaaatggctctcggcagg

SEQ ID NO: 4207440 - DNA, 25 bp, Homo sapien
ttcagaacaggaaaatggctctcgg

SEQ ID NO: 4207441 - DNA, 25 bp, Homo sapien
tgcacacatggcaagaatgttaaga

SEQ ID NO: 4207442 - DNA, 25 bp, Homo sapien
cacacatggcaagaatgttaagagg

SEQ ID NO: 4207443 - DNA, 25 bp, Homo sapien
gagggaggtacgcagcatctaagac

SEQ ID NO: 4207444 - DNA, 25 bp, Homo sapien
aatgttaagagggaggtacgcagca

SEQ ID NO: 4207445 - DNA, 25 bp, Homo sapien
caggcccactgaaacggaatctttg

SEQ ID NO: 4207446 - DNA, 25 bp, Homo sapien
taaagcggttaatatccttccatgg

SEQ ID NO: 4207447 - DNA, 25 bp, Homo sapien
ccttccatggattcttagacatatg

SEQ ID NO: 4207448 - DNA, 25 bp, Homo sapien
tcggaccatgttgctcagaatcact

SEQ ID NO: 4207449 - DNA, 25 bp, Homo sapien
gacaatggcatgctgacaagaacag

SEQ ID NO: 4207450 - DNA, 25 bp, Homo sapien
gaactgagtgagcaagatgtgtgac

SEQ ID NO: 4207451 - DNA, 25 bp, Homo sapien
gacttataagcaaatacactctgaa

SEQ ID NO: 4207452 - DNA, 25 bp, Homo sapien
tatctcagtaagagaggtggattca

SEQ ID NO: 4207453 - DNA, 25 bp, Homo sapien
atctgcatccatttggattgtatga

SEQ ID NO: 4207454 - DNA, 25 bp, Homo sapien
acctgtttgccttgattatgtctga

SEQ ID NO: 4207455 - DNA, 25 bp, Homo sapien
gattatgtctgatctgcatccattt

SEQ ID NO: 4207456 - DNA, 25 bp, Homo sapien
aacctgtttgccttgattatgtctg

SEQ ID NO: 4207457 - DNA, 25 bp, Homo sapien
agtgccttccactgttgctctcaca

SEQ ID NO: 4207458 - DNA, 25 bp, Homo sapien
tgcttctgaattccatctgggaatt

SEQ ID NO: 4207459 - DNA, 25 bp, Homo sapien
gaatttccaacttcctctgagtacc

SEQ ID NO: 4207460 - DNA, 25 bp, Homo sapien
ggcatgacttcttcatctactccag

SEQ ID NO: 4207461 - DNA, 25 bp, Homo sapien
tgaccctcctcgttcctgggcttgg

SEQ ID NO: 4207462 - DNA, 25 bp, Homo sapien
atggttcccatgccagcttgaggca

SEQ ID NO: 4207463 - DNA, 25 bp, Homo sapien
tggttcccatgccagcttgaggcac

SEQ ID NO: 4207464 - DNA, 25 bp, Homo sapien
tggctcttgaccctcctcgttcctg

SEQ ID NO: 4207465 - DNA, 25 bp, Homo sapien
tgtatcacagggatgcagtcttggt

SEQ ID NO: 4207466 - DNA, 25 bp, Homo sapien
gcaaatttacctcgacttcctctac

SEQ ID NO: 4207467 - DNA, 25 bp, Homo sapien
actttggccttagcaagaaatagac

SEQ ID NO: 4207468 - DNA, 25 bp, Homo sapien
ggttgggctcacaccagaacttccc

SEQ ID NO: 4207469 - DNA, 25 bp, Homo sapien
tctcaagagatttgctgtgcagctg

SEQ ID NO: 4207470 - DNA, 25 bp, Homo sapien
cctcaactgttgtgggcttctcaag

SEQ ID NO: 4207471 - DNA, 25 bp, Homo sapien
caaagagcttggatactaagccctc

SEQ ID NO: 4207472 - DNA, 25 bp, Homo sapien
gacagacttgtcaaagctggaggtt

SEQ ID NO: 4207473 - DNA, 25 bp, Homo sapien
gacatgtggctgtggaactggaggc

SEQ ID NO: 4207474 - DNA, 25 bp, Homo sapien
tagacatgtggctgtggaactggag

SEQ ID NO: 4207475 - DNA, 25 bp, Homo sapien
ggaactggaggcttcagtgaaacat

SEQ ID NO: 4207476 - DNA, 25 bp, Homo sapien
gtggaactggaggcttcagtgaaac

SEQ ID NO: 4207477 - DNA, 25 bp, Homo sapien
tgaccaggcaagggagaggacaggg

SEQ ID NO: 4207478 - DNA, 25 bp, Homo sapien
gaccaggcaagggagaggacagggg

SEQ ID NO: 4207479 - DNA, 25 bp, Homo sapien
ctgaccaggcaagggagaggacagg

SEQ ID NO: 4207480 - DNA, 25 bp, Homo sapien
aacttaaagagaattggactgtgcc

SEQ ID NO: 4207481 - DNA, 25 bp, Homo sapien
ttggactgtgcctttcactgcagct

SEQ ID NO: 4207482 - DNA, 25 bp, Homo sapien
catggcaaggcgaggagcttctggt

SEQ ID NO: 4207483 - DNA, 25 bp, Homo sapien
ggtgagagtaggacagccaaggagg

SEQ ID NO: 4207484 - DNA, 25 bp, Homo sapien
attagcctcttctctacacaaccga

SEQ ID NO: 4207485 - DNA, 25 bp, Homo sapien
tgctagtaacagtctctaccagagc

SEQ ID NO: 4207486 - DNA, 25 bp, Homo sapien
cttctgatctcagctagagctgctt

SEQ ID NO: 4207487 - DNA, 25 bp, Homo sapien
cattcctgtgaacctgcaaattctt

SEQ ID NO: 4207488 - DNA, 25 bp, Homo sapien
aaggagatcatcaagtaatgcctcc

SEQ ID NO: 4207489 - DNA, 25 bp, Homo sapien
gagatcatcaagtaatgcctcctta

SEQ ID NO: 4207490 - DNA, 25 bp, Homo sapien
tcatcaagtaatgcctccttacaaa

SEQ ID NO: 4207491 - DNA, 25 bp, Homo sapien
caagtaatgcctccttacaaataag

SEQ ID NO: 4207492 - DNA, 25 bp, Homo sapien
tgctcctgaatcttaagtacatctc

SEQ ID NO: 4207493 - DNA, 25 bp, Homo sapien
ctcttttacggctgataccttcctt

SEQ ID NO: 4207494 - DNA, 25 bp, Homo sapien
aaacagatacatgcagcatcaaagc

SEQ ID NO: 4207495 - DNA, 25 bp, Homo sapien
agtttataactgagctctcttgagc

SEQ ID NO: 4207496 - DNA, 25 bp, Homo sapien
gacccaagcaagaaactctgagtcc

SEQ ID NO: 4207497 - DNA, 25 bp, Homo sapien
caagcaagaaactctgagtcctgat

SEQ ID NO: 4207498 - DNA, 25 bp, Homo sapien
tctgagtcctgattttccaagattc

SEQ ID NO: 4207499 - DNA, 25 bp, Homo sapien
caagacccaagcaagaaactctgag

SEQ ID NO: 4207500 - DNA, 25 bp, Homo sapien
actgtccaggtgagcctagaaattc

SEQ ID NO: 4207501 - DNA, 25 bp, Homo sapien
cactgtccaggtgagcctagaaatt

SEQ ID NO: 4207502 - DNA, 25 bp, Homo sapien
attcacagtttgatccccagataaa

SEQ ID NO: 4207503 - DNA, 25 bp, Homo sapien
gataaacccatatgggtccactgtc

SEQ ID NO: 4207504 - DNA, 25 bp, Homo sapien
gaaaaagtgcctggccgtgctttac

SEQ ID NO: 4207505 - DNA, 25 bp, Homo sapien
tcacaaactgagacgcaggcaacat

SEQ ID NO: 4207506 - DNA, 25 bp, Homo sapien
aggcaacatccgaggcagcaaatcc

SEQ ID NO: 4207507 - DNA, 25 bp, Homo sapien
ttacagggatgaccgagtcagtcgc

SEQ ID NO: 4207508 - DNA, 25 bp, Homo sapien
aaatgttcccaggtactcaaagcct

SEQ ID NO: 4207509 - DNA, 25 bp, Homo sapien
gttcccaggtactcaaagcctccag

SEQ ID NO: 4207510 - DNA, 25 bp, Homo sapien
gtactcaaagcctccagtggactca

SEQ ID NO: 4207511 - DNA, 25 bp, Homo sapien
gaagaaaaatgttcccaggtactca

SEQ ID NO: 4207512 - DNA, 25 bp, Homo sapien
ggtcatcaaaagtggcatctgccct

SEQ ID NO: 4207513 - DNA, 25 bp, Homo sapien
tggtcatcaaaagtggcatctgccc

SEQ ID NO: 4207514 - DNA, 25 bp, Homo sapien
taagctccaggtcattaccctggtg

SEQ ID NO: 4207515 - DNA, 25 bp, Homo sapien
agatccttaagctccaggtcattac

SEQ ID NO: 4207516 - DNA, 25 bp, Homo sapien
ctgagatccttaagctccaggtcat

SEQ ID NO: 4207517 - DNA, 25 bp, Homo sapien
tccaggtcattaccctggtgagcat

SEQ ID NO: 4207518 - DNA, 25 bp, Homo sapien
ccattccagaatggaaatctccact

SEQ ID NO: 4207519 - DNA, 25 bp, Homo sapien
caaggggagagatgcacactcagca

SEQ ID NO: 4207520 - DNA, 25 bp, Homo sapien
actcaggaggtgacacttatgtgcc

SEQ ID NO: 4207521 - DNA, 25 bp, Homo sapien
cactcagcagccaaagacgtttgaa

SEQ ID NO: 4207522 - DNA, 25 bp, Homo sapien
tgacctccaaatgtcacccatgttc

SEQ ID NO: 4207523 - DNA, 25 bp, Homo sapien
atttgacctccaaatgtcacccatg

SEQ ID NO: 4207524 - DNA, 25 bp, Homo sapien
gaaatttgacctccaaatgtcaccc

SEQ ID NO: 4207525 - DNA, 25 bp, Homo sapien
tttgacctccaaatgtcacccatgt

SEQ ID NO: 4207526 - DNA, 25 bp, Homo sapien
tgagattatttgacgccagagagaa

SEQ ID NO: 4207527 - DNA, 25 bp, Homo sapien
gctacacggaaagcattgagctcaa

SEQ ID NO: 4207528 - DNA, 25 bp, Homo sapien
caggaaaatcgaggtaggtgaactc

SEQ ID NO: 4207529 - DNA, 25 bp, Homo sapien
ggtgaactcactgctattggtccgc

SEQ ID NO: 4207530 - DNA, 25 bp, Homo sapien
catagggcactgaggggttacttga

SEQ ID NO: 4207531 - DNA, 25 bp, Homo sapien
agaaagaagtctcagccagtatcca

SEQ ID NO: 4207532 - DNA, 25 bp, Homo sapien
aaagaagtctcagccagtatccata

SEQ ID NO: 4207533 - DNA, 25 bp, Homo sapien
tccttcagacatagggcactgaggg

SEQ ID NO: 4207534 - DNA, 25 bp, Homo sapien
cgatggtcatcagccgttcagcaac

SEQ ID NO: 4207535 - DNA, 25 bp, Homo sapien
agcagcatagacttcggcagtatca

SEQ ID NO: 4207536 - DNA, 25 bp, Homo sapien
actttcataggcgatggtcatcagc

SEQ ID NO: 4207537 - DNA, 25 bp, Homo sapien
tatcaaagaggttaacaccactttc

SEQ ID NO: 4207538 - DNA, 25 bp, Homo sapien
tatcccgaaaatagaagccgctctc

SEQ ID NO: 4207539 - DNA, 25 bp, Homo sapien
gtgcctgcaaaatcctgctccggag

SEQ ID NO: 4207540 - DNA, 25 bp, Homo sapien
caaatcctgacacgctggcaggaga

SEQ ID NO: 4207541 - DNA, 25 bp, Homo sapien
gccgctctcggctggtagcacagtt

SEQ ID NO: 4207542 - DNA, 25 bp, Homo sapien
cagataatgtcttagaatgcagtgt

SEQ ID NO: 4207543 - DNA, 25 bp, Homo sapien
aggggaaacagataatgtcttagaa

SEQ ID NO: 4207544 - DNA, 25 bp, Homo sapien
agataatgtcttagaatgcagtgtc

SEQ ID NO: 4207545 - DNA, 25 bp, Homo sapien
ggaaacagataatgtcttagaatgc

SEQ ID NO: 4207546 - DNA, 25 bp, Homo sapien
tcttcttgatgatgctccccagaat

SEQ ID NO: 4207547 - DNA, 25 bp, Homo sapien
gcctttcttcttgatgatgctcccc

SEQ ID NO: 4207548 - DNA, 25 bp, Homo sapien
tttcttcttgatgatgctccccaga

SEQ ID NO: 4207549 - DNA, 25 bp, Homo sapien
ctttcttcttgatgatgctccccag

SEQ ID NO: 4207550 - DNA, 25 bp, Homo sapien
cgtgtaagcacagcccctcatgttt

SEQ ID NO: 4207551 - DNA, 25 bp, Homo sapien
tgcttaattctgtactcgtgctggg

SEQ ID NO: 4207552 - DNA, 25 bp, Homo sapien
acttgttcagtaacctttgctgggc

SEQ ID NO: 4207553 - DNA, 25 bp, Homo sapien
cagataatagggttcctgggcacac

SEQ ID NO: 4207554 - DNA, 25 bp, Homo sapien
tagagtttggttgttatgaccagac

SEQ ID NO: 4207555 - DNA, 25 bp, Homo sapien
ccagtagagtttggttgttatgacc

SEQ ID NO: 4207556 - DNA, 25 bp, Homo sapien
ggttgttatgaccagactggacctc

SEQ ID NO: 4207557 - DNA, 25 bp, Homo sapien
caccccagtagagtttggttgttat

SEQ ID NO: 4207558 - DNA, 25 bp, Homo sapien
taatatgctttcttgacagccctct

SEQ ID NO: 4207559 - DNA, 25 bp, Homo sapien
cttcaataatatgctttcttgacag

SEQ ID NO: 4207560 - DNA, 25 bp, Homo sapien
aataatatgctttcttgacagccct

SEQ ID NO: 4207561 - DNA, 25 bp, Homo sapien
tcaataatatgctttcttgacagcc

SEQ ID NO: 4207562 - DNA, 25 bp, Homo sapien
tctttgctaactgccagtgtgaacc

SEQ ID NO: 4207563 - DNA, 25 bp, Homo sapien
ctgccagtgtgaaccattttccgaa

SEQ ID NO: 4207564 - DNA, 25 bp, Homo sapien
gctaactgccagtgtgaaccatttt

SEQ ID NO: 4207565 - DNA, 25 bp, Homo sapien
tgtgaaccattttccgaatctctct

SEQ ID NO: 4207566 - DNA, 25 bp, Homo sapien
ctggaactaatgatatggacttgat

SEQ ID NO: 4207567 - DNA, 25 bp, Homo sapien
cttgatcctaaggtcagcctcatgg

SEQ ID NO: 4207568 - DNA, 25 bp, Homo sapien
ggtcagcctcatggtatttggtcat

SEQ ID NO: 4207569 - DNA, 25 bp, Homo sapien
taatgatatggacttgatcctaagg

SEQ ID NO: 4207570 - DNA, 25 bp, Homo sapien
atggtgttcgcatctggaaagtttc

SEQ ID NO: 4207571 - DNA, 25 bp, Homo sapien
tggtgttcgcatctggaaagtttca

SEQ ID NO: 4207572 - DNA, 25 bp, Homo sapien
catggtgttcgcatctggaaagttt

SEQ ID NO: 4207573 - DNA, 25 bp, Homo sapien
gaccacatccacatactcgagctgc

SEQ ID NO: 4207574 - DNA, 25 bp, Homo sapien
cggtcgatttgcaaagaccacatcc

SEQ ID NO: 4207575 - DNA, 25 bp, Homo sapien
ccacatactcgagctgcagcctctg

SEQ ID NO: 4207576 - DNA, 25 bp, Homo sapien
tgggagtgttactgtccggtcgatt

SEQ ID NO: 4207577 - DNA, 25 bp, Homo sapien
gagcccaatgccttcaactgcttta

SEQ ID NO: 4207578 - DNA, 25 bp, Homo sapien
gagcactgtaaccagcgggagccac

SEQ ID NO: 4207579 - DNA, 25 bp, Homo sapien
tttaaaagaagaagacgcagcacgc

SEQ ID NO: 4207580 - DNA, 25 bp, Homo sapien
gacgcagcacgcagagcattggttt

SEQ ID NO: 4207581 - DNA, 25 bp, Homo sapien
tgtgacgcgatgatggctgagttat

SEQ ID NO: 4207582 - DNA, 25 bp, Homo sapien
ttactgtgacgcgatgatggctgag

SEQ ID NO: 4207583 - DNA, 25 bp, Homo sapien
gatggctgagttataaagccccttt

SEQ ID NO: 4207584 - DNA, 25 bp, Homo sapien
tactgtgacgcgatgatggctgagt

SEQ ID NO: 4207585 - DNA, 25 bp, Homo sapien
cacgctcatatctaattcaccagga

SEQ ID NO: 4207586 - DNA, 25 bp, Homo sapien
cattacagtccacggctagtgccct

SEQ ID NO: 4207587 - DNA, 25 bp, Homo sapien
tcagctttggtgtctaactccctac

SEQ ID NO: 4207588 - DNA, 25 bp, Homo sapien
tcatcccaagatggagtttcagctt

SEQ ID NO: 4207589 - DNA, 25 bp, Homo sapien
ttccttcctggttgtgccatggcac

SEQ ID NO: 4207590 - DNA, 25 bp, Homo sapien
tttaatagtgtagagctggccttcc

SEQ ID NO: 4207591 - DNA, 25 bp, Homo sapien
tctgctggtaaatccagtttcatgc

SEQ ID NO: 4207592 - DNA, 25 bp, Homo sapien
tataacaggaagcaatcttcattgc

SEQ ID NO: 4207593 - DNA, 25 bp, Homo sapien
acatctgattttcaataacctgatt

SEQ ID NO: 4207594 - DNA, 25 bp, Homo sapien
tccagtgaatgtaccagaatgaatg

SEQ ID NO: 4207595 - DNA, 25 bp, Homo sapien
ctgccattgatgatgatacttccac

SEQ ID NO: 4207596 - DNA, 25 bp, Homo sapien
tttttccagtgaatgtaccagaatg

SEQ ID NO: 4207597 - DNA, 25 bp, Homo sapien
gatggagctgagcaaatcctcttgg

SEQ ID NO: 4207598 - DNA, 25 bp, Homo sapien
ccagcgtgctcatcagcctcatgga

SEQ ID NO: 4207599 - DNA, 25 bp, Homo sapien
ggagctgagcaaatcctcttggcac

SEQ ID NO: 4207600 - DNA, 25 bp, Homo sapien
catggagctcgacatcacatttcct

SEQ ID NO: 4207601 - DNA, 25 bp, Homo sapien
ctaaagtgagaagtaagagaaggca

SEQ ID NO: 4207602 - DNA, 25 bp, Homo sapien
taaagtgagaagtaagagaaggcat

SEQ ID NO: 4207603 - DNA, 25 bp, Homo sapien
tttaagagcctgagtaccttcccga

SEQ ID NO: 4207604 - DNA, 25 bp, Homo sapien
ttacttttattgcttgatgattcct

SEQ ID NO: 4207605 - DNA, 25 bp, Homo sapien
tccatagcactccatctcgaggtgc

SEQ ID NO: 4207606 - DNA, 25 bp, Homo sapien
acatgtgtcatggctcggacaattt

SEQ ID NO: 4207607 - DNA, 25 bp, Homo sapien
tgccttggtttatcacatgtgtcat

SEQ ID NO: 4207608 - DNA, 25 bp, Homo sapien
gaggtgccccagtacatcgccatgc

SEQ ID NO: 4207609 - DNA, 25 bp, Homo sapien
ctctctggaaaagatggtactcagc

SEQ ID NO: 4207610 - DNA, 25 bp, Homo sapien
cagcttgttcacagaccggtgggat

SEQ ID NO: 4207611 - DNA, 25 bp, Homo sapien
tgaactgtcttgctacagaataggc

SEQ ID NO: 4207612 - DNA, 25 bp, Homo sapien
cttgttcacagaccggtgggatcat

SEQ ID NO: 4207613 - DNA, 25 bp, Homo sapien
cacaggcaagtggagaccatgtcat

SEQ ID NO: 4207614 - DNA, 25 bp, Homo sapien
ttcctgagatgattccacaggcaag

SEQ ID NO: 4207615 - DNA, 25 bp, Homo sapien
ccacaggcaagtggagaccatgtca

SEQ ID NO: 4207616 - DNA, 25 bp, Homo sapien
tccacaggcaagtggagaccatgtc

SEQ ID NO: 4207617 - DNA, 25 bp, Homo sapien
tcctactcccaggcttttttctaga

SEQ ID NO: 4207618 - DNA, 25 bp, Homo sapien
tgaggtagtgtgcatcccagacgct

SEQ ID NO: 4207619 - DNA, 25 bp, Homo sapien
ccagacgctccgcaattggggaaag

SEQ ID NO: 4207620 - DNA, 25 bp, Homo sapien
tagctgaggtagtgtgcatcccaga

SEQ ID NO: 4207621 - DNA, 25 bp, Homo sapien
caacagctagctgaggtagtgtgca

SEQ ID NO: 4207622 - DNA, 25 bp, Homo sapien
aaactatgatctcagcagaagtccc

SEQ ID NO: 4207623 - DNA, 25 bp, Homo sapien
gaacaacgtttatggccttcaagaa

SEQ ID NO: 4207624 - DNA, 25 bp, Homo sapien
ctctaggatcagcttttcatgtggc

SEQ ID NO: 4207625 - DNA, 25 bp, Homo sapien
ttatcatggtaagggtgtggtcagc

SEQ ID NO: 4207626 - DNA, 25 bp, Homo sapien
acagttgggttcaagtagtttgctt

SEQ ID NO: 4207627 - DNA, 25 bp, Homo sapien
agtagtttgctttctgccggaggat

SEQ ID NO: 4207628 - DNA, 25 bp, Homo sapien
tgctttctgccggaggatccctctc

SEQ ID NO: 4207629 - DNA, 25 bp, Homo sapien
cagttgggttcaagtagtttgcttt

SEQ ID NO: 4207630 - DNA, 25 bp, Homo sapien
tcaccaacagctgattcccctaatg

SEQ ID NO: 4207631 - DNA, 25 bp, Homo sapien
ccaacagctgattcccctaatgggc

SEQ ID NO: 4207632 - DNA, 25 bp, Homo sapien
caccaacagctgattcccctaatgg

SEQ ID NO: 4207633 - DNA, 25 bp, Homo sapien
accaacagctgattcccctaatggg

SEQ ID NO: 4207634 - DNA, 25 bp, Homo sapien
ctggactcatagatgcagtgtctgc

SEQ ID NO: 4207635 - DNA, 25 bp, Homo sapien
gagcctgctggtgattacagtggac

SEQ ID NO: 4207636 - DNA, 25 bp, Homo sapien
tgctgtgtccagaagctaaggtccc

SEQ ID NO: 4207637 - DNA, 25 bp, Homo sapien
ggaactcagtgttgctggactcata

SEQ ID NO: 4207638 - DNA, 25 bp, Homo sapien
caggagtggatgatcccaggagcac

SEQ ID NO: 4207639 - DNA, 25 bp, Homo sapien
atgagttgttcaggagtggatgatc

SEQ ID NO: 4207640 - DNA, 25 bp, Homo sapien
tcaggagtggatgatcccaggagca

SEQ ID NO: 4207641 - DNA, 25 bp, Homo sapien
gagttgttcaggagtggatgatccc

SEQ ID NO: 4207642 - DNA, 25 bp, Homo sapien
aattccctgatgttggaaggggctg

SEQ ID NO: 4207643 - DNA, 25 bp, Homo sapien
taaattccctgatgttggaaggggc

SEQ ID NO: 4207644 - DNA, 25 bp, Homo sapien
cattaaattccctgatgttggaagg

SEQ ID NO: 4207645 - DNA, 25 bp, Homo sapien
ttccctgatgttggaaggggctgca

SEQ ID NO: 4207646 - DNA, 25 bp, Homo sapien
tgcctggagatagcctcaaaggcac

SEQ ID NO: 4207647 - DNA, 25 bp, Homo sapien
agagatgggacactgcctggagata

SEQ ID NO: 4207648 - DNA, 25 bp, Homo sapien
gagatgggacactgcctggagatag

SEQ ID NO: 4207649 - DNA, 25 bp, Homo sapien
gagagatgggacactgcctggagat

SEQ ID NO: 4207650 - DNA, 25 bp, Homo sapien
gggatgggcctcctaaatttgcttc

SEQ ID NO: 4207651 - DNA, 25 bp, Homo sapien
tgccctggaccagtggccatctcat

SEQ ID NO: 4207652 - DNA, 25 bp, Homo sapien
tggccatctcatgggatagggaatg

SEQ ID NO: 4207653 - DNA, 25 bp, Homo sapien
tacaggctccccagaatatggctgc

SEQ ID NO: 4207654 - DNA, 25 bp, Homo sapien
gagtaggataggctcaggactagtt

SEQ ID NO: 4207655 - DNA, 25 bp, Homo sapien
aattgtgggcaggatcgttcctagg

SEQ ID NO: 4207656 - DNA, 25 bp, Homo sapien
cttttagcagggttgagagtaggat

SEQ ID NO: 4207657 - DNA, 25 bp, Homo sapien
caggtagtggctatggcaggaattg

SEQ ID NO: 4207658 - DNA, 25 bp, Homo sapien
cagagggccactgttatcgccgaag

SEQ ID NO: 4207659 - DNA, 25 bp, Homo sapien
tgagagcggctcaagattcagattc

SEQ ID NO: 4207660 - DNA, 25 bp, Homo sapien
tcgccgaagctctgagtggttgaga

SEQ ID NO: 4207661 - DNA, 25 bp, Homo sapien
atgaggcccgactgctgtggagcct

SEQ ID NO: 4207662 - DNA, 25 bp, Homo sapien
ccccacaggctactagttttgcaaa

SEQ ID NO: 4207663 - DNA, 25 bp, Homo sapien
tggctgggcattagtaaagtcctcc

SEQ ID NO: 4207664 - DNA, 25 bp, Homo sapien
tacagattttacaaacaccccacag

SEQ ID NO: 4207665 - DNA, 25 bp, Homo sapien
cttgatgttacactgcctgggatag

SEQ ID NO: 4207666 - DNA, 25 bp, Homo sapien
ggcttgttgcgcagtatgttatcaa

SEQ ID NO: 4207667 - DNA, 25 bp, Homo sapien
tcatttaccacatgtgatgtcatct

SEQ ID NO: 4207668 - DNA, 25 bp, Homo sapien
tatgatctatagtccttcttgctgt

SEQ ID NO: 4207669 - DNA, 25 bp, Homo sapien
cttgctgtagggcttgttgcgcagt

SEQ ID NO: 4207670 - DNA, 25 bp, Homo sapien
ggcacaggccgctattttaaccatg

SEQ ID NO: 4207671 - DNA, 25 bp, Homo sapien
cactagaggttgagcagcaagctgc

SEQ ID NO: 4207672 - DNA, 25 bp, Homo sapien
tgcacagtggtagcgacagcagaca

SEQ ID NO: 4207673 - DNA, 25 bp, Homo sapien
tagtaacacctttctgtactgggca

SEQ ID NO: 4207674 - DNA, 25 bp, Homo sapien
cagcagttcgctggattgaatacac

SEQ ID NO: 4207675 - DNA, 25 bp, Homo sapien
tggcagggctagatacacctcagat

SEQ ID NO: 4207676 - DNA, 25 bp, Homo sapien
cattctggataagttgtacaaggcc

SEQ ID NO: 4207677 - DNA, 25 bp, Homo sapien
ttcgagtgcaacaagggtaagcccc

SEQ ID NO: 4207678 - DNA, 25 bp, Homo sapien
gattattgcctaatttatggccaca

SEQ ID NO: 4207679 - DNA, 25 bp, Homo sapien
gagtattcagtgcagcttagctgcc

SEQ ID NO: 4207680 - DNA, 25 bp, Homo sapien
gtgcagcttagctgccaatataatt

SEQ ID NO: 4207681 - DNA, 25 bp, Homo sapien
taagccttacagtgaaagatcagat

SEQ ID NO: 4207682 - DNA, 25 bp, Homo sapien
ctcgttggccttcatgaattttcaa

SEQ ID NO: 4207683 - DNA, 25 bp, Homo sapien
catcttttcgctgacttatccctgt

SEQ ID NO: 4207684 - DNA, 25 bp, Homo sapien
aattttcagggcgatagaggctaac

SEQ ID NO: 4207685 - DNA, 25 bp, Homo sapien
tgtatcagagctctaagggattctc

SEQ ID NO: 4207686 - DNA, 25 bp, Homo sapien
ctggagacaggatggaaggatacat

SEQ ID NO: 4207687 - DNA, 25 bp, Homo sapien
tttgttttcagtgtgcatgccagtc

SEQ ID NO: 4207688 - DNA, 25 bp, Homo sapien
ttgttttcagtgtgcatgccagtca

SEQ ID NO: 4207689 - DNA, 25 bp, Homo sapien
tgttttcagtgtgcatgccagtcac

SEQ ID NO: 4207690 - DNA, 25 bp, Homo sapien
aatgaaaggcattgagcagttacag

SEQ ID NO: 4207691 - DNA, 25 bp, Homo sapien
taccaatcaaatgtatgtgaggcaa

SEQ ID NO: 4207692 - DNA, 25 bp, Homo sapien
gacatcaggcctctgccagtatgta

SEQ ID NO: 4207693 - DNA, 25 bp, Homo sapien
cagttacagtaaagggcagacatca

SEQ ID NO: 4207694 - DNA, 25 bp, Homo sapien
caaggtttgaagttaactgaaatat

SEQ ID NO: 4207695 - DNA, 25 bp, Homo sapien
tattattgaaacttggaaaggataa

SEQ ID NO: 4207696 - DNA, 25 bp, Homo sapien
cccggcctagattgatattcttaag

SEQ ID NO: 4207697 - DNA, 25 bp, Homo sapien
agtttactggttgtcctatttgcca

SEQ ID NO: 4207698 - DNA, 25 bp, Homo sapien
tgttaccagagttgggccactatct

SEQ ID NO: 4207699 - DNA, 25 bp, Homo sapien
tggtgaaaacttgccactagatggc

SEQ ID NO: 4207700 - DNA, 25 bp, Homo sapien
gtaatttcctacaagcagcacccca

SEQ ID NO: 4207701 - DNA, 25 bp, Homo sapien
tgttgggctccatgcaagaacttgg

SEQ ID NO: 4207702 - DNA, 25 bp, Homo sapien
ttttttacccgtgtatgtacagata

SEQ ID NO: 4207703 - DNA, 25 bp, Homo sapien
tttttacccgtgtatgtacagatat

SEQ ID NO: 4207704 - DNA, 25 bp, Homo sapien
atgacttgaaaaagtttgggaagct

SEQ ID NO: 4207705 - DNA, 25 bp, Homo sapien
tgacttgaaaaagtttgggaagctc

SEQ ID NO: 4207706 - DNA, 25 bp, Homo sapien
ggtctcacaccctggaggaatgtta

SEQ ID NO: 4207707 - DNA, 25 bp, Homo sapien
gcatatgagagttgtcctacgaggt

SEQ ID NO: 4207708 - DNA, 25 bp, Homo sapien
gaatcactgttttccttgaccaggg

SEQ ID NO: 4207709 - DNA, 25 bp, Homo sapien
gtaacctaaaaatagtgcccaggca

SEQ ID NO: 4207710 - DNA, 25 bp, Homo sapien
gactcatcgccctcctgtctactgg

SEQ ID NO: 4207711 - DNA, 25 bp, Homo sapien
aatagaccatgtcagcttcaccccc

SEQ ID NO: 4207712 - DNA, 25 bp, Homo sapien
gccctcctgtctactggctccaaat

SEQ ID NO: 4207713 - DNA, 25 bp, Homo sapien
taagtgcttcatcaggactcatcgc

SEQ ID NO: 4207714 - DNA, 25 bp, Homo sapien
tcctaaaggcagctccaaacagcag

SEQ ID NO: 4207715 - DNA, 25 bp, Homo sapien
gaaacgcgttcatcgtgtctgccat

SEQ ID NO: 4207716 - DNA, 25 bp, Homo sapien
gatttcagccgcaatctctcggcca

SEQ ID NO: 4207717 - DNA, 25 bp, Homo sapien
tccgcgctcttcttcggaaacgcgt

SEQ ID NO: 4207718 - DNA, 25 bp, Homo sapien
cttaggaagggcttctgttacttgt

SEQ ID NO: 4207719 - DNA, 25 bp, Homo sapien
ttctaaagaacctcttgacttagga

SEQ ID NO: 4207720 - DNA, 25 bp, Homo sapien
caggtaccctcccttggatttggtg

SEQ ID NO: 4207721 - DNA, 25 bp, Homo sapien
caccggcttttgtatgccaagcaag

SEQ ID NO: 4207722 - DNA, 25 bp, Homo sapien
cccgttgtctgagcctttgtagaat

SEQ ID NO: 4207723 - DNA, 25 bp, Homo sapien
tctgagcctttgtagaatgtagtca

SEQ ID NO: 4207724 - DNA, 25 bp, Homo sapien
ttgtctgagcctttgtagaatgtag

SEQ ID NO: 4207725 - DNA, 25 bp, Homo sapien
cccatgcccgttgtctgagcctttg

SEQ ID NO: 4207726 - DNA, 25 bp, Homo sapien
aatagtgtccagtctcatccaggtc

SEQ ID NO: 4207727 - DNA, 25 bp, Homo sapien
tagtgtccagtctcatccaggtcac

SEQ ID NO: 4207728 - DNA, 25 bp, Homo sapien
agctcccacatatcaataagaacat

SEQ ID NO: 4207729 - DNA, 25 bp, Homo sapien
cccacatatcaataagaacatatga

SEQ ID NO: 4207730 - DNA, 25 bp, Homo sapien
cttagggatgtgatcaagttcaaca

SEQ ID NO: 4207731 - DNA, 25 bp, Homo sapien
agggatgtgatcaagttcaacattg

SEQ ID NO: 4207732 - DNA, 25 bp, Homo sapien
cttcttagggatgtgatcaagttca

SEQ ID NO: 4207733 - DNA, 25 bp, Homo sapien
tcttagggatgtgatcaagttcaac

SEQ ID NO: 4207734 - DNA, 25 bp, Homo sapien
tctcctgtggagcatttagtactta

SEQ ID NO: 4207735 - DNA, 25 bp, Homo sapien
caggtctgcactgagcattcccatt

SEQ ID NO: 4207736 - DNA, 25 bp, Homo sapien
gagcactttgggcttgttctctcct

SEQ ID NO: 4207737 - DNA, 25 bp, Homo sapien
cattcccatttttgcactcctggag

SEQ ID NO: 4207738 - DNA, 25 bp, Homo sapien
cactggtagcctcaaatgtggactt

SEQ ID NO: 4207739 - DNA, 25 bp, Homo sapien
tttggtccaaactggtggtgaactg

SEQ ID NO: 4207740 - DNA, 25 bp, Homo sapien
tgccagttggactgtttggtccaaa

SEQ ID NO: 4207741 - DNA, 25 bp, Homo sapien
ggactttggttgtaatctccaatga

SEQ ID NO: 4207742 - DNA, 25 bp, Homo sapien
ttcggcacgtcctgtgtaccgacca

SEQ ID NO: 4207743 - DNA, 25 bp, Homo sapien
tctggtaatagccttctaataatcg

SEQ ID NO: 4207744 - DNA, 25 bp, Homo sapien
gtccccagtcgcaagctgtttgggt

SEQ ID NO: 4207745 - DNA, 25 bp, Homo sapien
taataatcgcacgttcggcacgtcc

SEQ ID NO: 4207746 - DNA, 25 bp, Homo sapien
ctgcaggaggttcccactttgccac

SEQ ID NO: 4207747 - DNA, 25 bp, Homo sapien
ttcactgtatattgtcggaggaatc

SEQ ID NO: 4207748 - DNA, 25 bp, Homo sapien
tgaacttcaggagcttcactgtata

SEQ ID NO: 4207749 - DNA, 25 bp, Homo sapien
tttgccacgccaatgaagcacttct

SEQ ID NO: 4207750 - DNA, 25 bp, Homo sapien
ttcagccttgtactctctttaatgg

SEQ ID NO: 4207751 - DNA, 25 bp, Homo sapien
ctgcctctggtttcagccttgtact

SEQ ID NO: 4207752 - DNA, 25 bp, Homo sapien
tctctttaatggcaaaaatctgatg

SEQ ID NO: 4207753 - DNA, 25 bp, Homo sapien
tcatgatccaacacagttaagagct

SEQ ID NO: 4207754 - DNA, 25 bp, Homo sapien
ctgccaaccctagtgaggcattctt

SEQ ID NO: 4207755 - DNA, 25 bp, Homo sapien
tctagaatgacagtccacagagatt

SEQ ID NO: 4207756 - DNA, 25 bp, Homo sapien
ggctctagaatgacagtccacagag

SEQ ID NO: 4207757 - DNA, 25 bp, Homo sapien
gaggcattcttaggaggctctagaa

SEQ ID NO: 4207758 - DNA, 25 bp, Homo sapien
tgatgagaggaacctcgtatatttc

SEQ ID NO: 4207759 - DNA, 25 bp, Homo sapien
gaggaacctcgtatatttcactttg

SEQ ID NO: 4207760 - DNA, 25 bp, Homo sapien
gtagggagggatgatgagaggaacc

SEQ ID NO: 4207761 - DNA, 25 bp, Homo sapien
gtcctcccgctacataccaccagct

SEQ ID NO: 4207762 - DNA, 25 bp, Homo sapien
tgaacagggaaccaaactcggactg

SEQ ID NO: 4207763 - DNA, 25 bp, Homo sapien
aggttaggttagttggctcagagcc

SEQ ID NO: 4207764 - DNA, 25 bp, Homo sapien
tacacattaagatcagggttggcag

SEQ ID NO: 4207765 - DNA, 25 bp, Homo sapien
ctcggactggaaatgcatggtcatc

SEQ ID NO: 4207766 - DNA, 25 bp, Homo sapien
ctgtgtctgtgcctaccaagtggga

SEQ ID NO: 4207767 - DNA, 25 bp, Homo sapien
tgtgtctgtgcctaccaagtgggac

SEQ ID NO: 4207768 - DNA, 25 bp, Homo sapien
agtgggaccttgatgacctctcctc

SEQ ID NO: 4207769 - DNA, 25 bp, Homo sapien
ctaccaagtgggaccttgatgacct

SEQ ID NO: 4207770 - DNA, 25 bp, Homo sapien
cagtctcttgtacacagcatacgtt

SEQ ID NO: 4207771 - DNA, 25 bp, Homo sapien
gcagtctcttgtacacagcatacgt

SEQ ID NO: 4207772 - DNA, 25 bp, Homo sapien
cctctgacaaggcaccagagtgctt

SEQ ID NO: 4207773 - DNA, 25 bp, Homo sapien
gcctctgacaaggcaccagagtgct

SEQ ID NO: 4207774 - DNA, 25 bp, Homo sapien
gaagatttcctatttccctgagaag

SEQ ID NO: 4207775 - DNA, 25 bp, Homo sapien
gaaggagttctgcactcgtgggatt

SEQ ID NO: 4207776 - DNA, 25 bp, Homo sapien
tatttccctgagaaggagttctgca

SEQ ID NO: 4207777 - DNA, 25 bp, Homo sapien
caaaggaagatttcctatttccctg

SEQ ID NO: 4207778 - DNA, 25 bp, Homo sapien
aatttcaagtgacccaaggcctccg

SEQ ID NO: 4207779 - DNA, 25 bp, Homo sapien
atttcaagtgacccaaggcctccgg

SEQ ID NO: 4207780 - DNA, 25 bp, Homo sapien
tagagtcaccccttgaatttcttcc

SEQ ID NO: 4207781 - DNA, 25 bp, Homo sapien
gcgtttcctttcctaatagagtcac

SEQ ID NO: 4207782 - DNA, 25 bp, Homo sapien
tgagatttctggaaaagcgtttcct

SEQ ID NO: 4207783 - DNA, 25 bp, Homo sapien
gcttgagatttctggaaaagcgttt

SEQ ID NO: 4207784 - DNA, 25 bp, Homo sapien
tgacagtgtgcctagctgaaaaatt

SEQ ID NO: 4207785 - DNA, 25 bp, Homo sapien
tcggacgtggcccatctttttttga

SEQ ID NO: 4207786 - DNA, 25 bp, Homo sapien
gccatgggatacacttctagacaca

SEQ ID NO: 4207787 - DNA, 25 bp, Homo sapien
tatggatggccatgggatacacttc

SEQ ID NO: 4207788 - DNA, 25 bp, Homo sapien
cggcggccgactatttcgtgggcct

SEQ ID NO: 4207789 - DNA, 25 bp, Homo sapien
ctgcggcggccgactatttcgtggg

SEQ ID NO: 4207790 - DNA, 25 bp, Homo sapien
cgactatttcgtgggccttgtacgc

SEQ ID NO: 4207791 - DNA, 25 bp, Homo sapien
gccgactatttcgtgggccttgtac

SEQ ID NO: 4207792 - DNA, 25 bp, Homo sapien
tcagtgggtgtcgggaagaagaccc

SEQ ID NO: 4207793 - DNA, 25 bp, Homo sapien
gggaggcgcgcgagttctgtgcggt

SEQ ID NO: 4207794 - DNA, 25 bp, Homo sapien
cgcgagttctgtgcggtggacttat

SEQ ID NO: 4207795 - DNA, 25 bp, Homo sapien
gcgcgcgtgcgcgttcgttcgaggg

SEQ ID NO: 4207796 - DNA, 25 bp, Homo sapien
ccgacggcccgtcgcggaggcggag

SEQ ID NO: 4207797 - DNA, 25 bp, Homo sapien
gctttaagtggcttccggtcgcctc

SEQ ID NO: 4207798 - DNA, 25 bp, Homo sapien
gcctgtcacctcgatctctgcttta

SEQ ID NO: 4207799 - DNA, 25 bp, Homo sapien
tccgagtccagccagctcgcctgtc

SEQ ID NO: 4207800 - DNA, 25 bp, Homo sapien
gggccattccgccgccgcgaacgca

SEQ ID NO: 4207801 - DNA, 25 bp, Homo sapien
attccgccgccgcgaacgcagaaag

SEQ ID NO: 4207802 - DNA, 25 bp, Homo sapien
gcgaacgcagaaagcctcgaccgcg

SEQ ID NO: 4207803 - DNA, 25 bp, Homo sapien
ccgccgcgaacgcagaaagcctcga

SEQ ID NO: 4207804 - DNA, 25 bp, Homo sapien
ggagccgacgtctagggaccacaga

SEQ ID NO: 4207805 - DNA, 25 bp, Homo sapien
gcgccggagatcagcgccgagggcg

SEQ ID NO: 4207806 - DNA, 25 bp, Homo sapien
ccgagtggaaagcagtgcccgcgcc

SEQ ID NO: 4207807 - DNA, 25 bp, Homo sapien
cctgagagaacggacgacaggagcc

SEQ ID NO: 4207808 - DNA, 25 bp, Homo sapien
cagagcacccggggtcggcccgcgg

SEQ ID NO: 4207809 - DNA, 25 bp, Homo sapien
cgggggaggccgcatagacgcgccc

SEQ ID NO: 4207810 - DNA, 25 bp, Homo sapien
ctcctaggcgcctcagagcacccgg

SEQ ID NO: 4207811 - DNA, 25 bp, Homo sapien
gctcctaggcgcctcagagcacccg

SEQ ID NO: 4207812 - DNA, 25 bp, Homo sapien
gtagccggaaggctcccgtagctgc

SEQ ID NO: 4207813 - DNA, 25 bp, Homo sapien
ctgcagcccgaaacgcggggtagcc

SEQ ID NO: 4207814 - DNA, 25 bp, Homo sapien
ggaaggctcccgtagctgccgtgcc

SEQ ID NO: 4207815 - DNA, 25 bp, Homo sapien
agccggaaggctcccgtagctgccg

SEQ ID NO: 4207816 - DNA, 25 bp, Homo sapien
gcagaactgagccgcgaagcgcggg

SEQ ID NO: 4207817 - DNA, 25 bp, Homo sapien
gacttgtgcgctctcaaagttaatg

SEQ ID NO: 4207818 - DNA, 25 bp, Homo sapien
gaggaagacgaagacttgtgcgctc

SEQ ID NO: 4207819 - DNA, 25 bp, Homo sapien
cccgaggagcgtccaacgggtcttg

SEQ ID NO: 4207820 - DNA, 25 bp, Homo sapien
gccaactccgcgcagtgcagctgag

SEQ ID NO: 4207821 - DNA, 25 bp, Homo sapien
cgcggcggtttgctcagctcctggt

SEQ ID NO: 4207822 - DNA, 25 bp, Homo sapien
tccgagtgacgcctcctgttggccg

SEQ ID NO: 4207823 - DNA, 25 bp, Homo sapien
gcactttccgaaaaaactgccgctc

SEQ ID NO: 4207824 - DNA, 25 bp, Homo sapien
tacgaggaaaggaaggaagatgatc

SEQ ID NO: 4207825 - DNA, 25 bp, Homo sapien
ctacgaggaaaggaaggaagatgat

SEQ ID NO: 4207826 - DNA, 25 bp, Homo sapien
acgaggaaaggaaggaagatgatca

SEQ ID NO: 4207827 - DNA, 25 bp, Homo sapien
cgaggaaaggaaggaagatgatcat

SEQ ID NO: 4207828 - DNA, 25 bp, Homo sapien
ccaactgctcctcagagtctaaaaa

SEQ ID NO: 4207829 - DNA, 25 bp, Homo sapien
aactgctcctcagagtctaaaaatc

SEQ ID NO: 4207830 - DNA, 25 bp, Homo sapien
tgtggattagctccaactgctcctc

SEQ ID NO: 4207831 - DNA, 25 bp, Homo sapien
aatgtggattagctccaactgctcc

SEQ ID NO: 4207832 - DNA, 25 bp, Homo sapien
cccatcaagtgagccagattctaga

SEQ ID NO: 4207833 - DNA, 25 bp, Homo sapien
tcatctgtactctggttcctagatc

SEQ ID NO: 4207834 - DNA, 25 bp, Homo sapien
gagggaggctgcactacacagtctg

SEQ ID NO: 4207835 - DNA, 25 bp, Homo sapien
tcttcaatggagtgatcttctcaga

SEQ ID NO: 4207836 - DNA, 25 bp, Homo sapien
gatgggcttccggtatctggtcccc

SEQ ID NO: 4207837 - DNA, 25 bp, Homo sapien
gaaccactcgttctggagcttcagt

SEQ ID NO: 4207838 - DNA, 25 bp, Homo sapien
tgtgatcttggattggaaccactcg

SEQ ID NO: 4207839 - DNA, 25 bp, Homo sapien
cagtcaggactagtaggaacatcac

SEQ ID NO: 4207840 - DNA, 25 bp, Homo sapien
acagttctacaagttgttataaata

SEQ ID NO: 4207841 - DNA, 25 bp, Homo sapien
caacagttctacaagttgttataaa

SEQ ID NO: 4207842 - DNA, 25 bp, Homo sapien
cagttctacaagttgttataaatac

SEQ ID NO: 4207843 - DNA, 25 bp, Homo sapien
aacagttctacaagttgttataaat

SEQ ID NO: 4207844 - DNA, 25 bp, Homo sapien
ctgaagtactcagcagactggaaat

SEQ ID NO: 4207845 - DNA, 25 bp, Homo sapien
gcagactggaaatttgcttcatgaa

SEQ ID NO: 4207846 - DNA, 25 bp, Homo sapien
gggagccgctgttctgcaaagtttt

SEQ ID NO: 4207847 - DNA, 25 bp, Homo sapien
ggtgaagtgggagccgctgttctgc

SEQ ID NO: 4207848 - DNA, 25 bp, Homo sapien
aaaaccaggttgcaatgaccacaag

SEQ ID NO: 4207849 - DNA, 25 bp, Homo sapien
ggttgcaatgaccacaagtcaactt

SEQ ID NO: 4207850 - DNA, 25 bp, Homo sapien
aaccaggttgcaatgaccacaagtc

SEQ ID NO: 4207851 - DNA, 25 bp, Homo sapien
caggttgcaatgaccacaagtcaac

SEQ ID NO: 4207852 - DNA, 25 bp, Homo sapien
acttcctggttatgcgcaatctgca

SEQ ID NO: 4207853 - DNA, 25 bp, Homo sapien
tcagcaaggctcaacatgccgttat

SEQ ID NO: 4207854 - DNA, 25 bp, Homo sapien
gcctgaccacagagattaatagctt

SEQ ID NO: 4207855 - DNA, 25 bp, Homo sapien
tagaccagctttacaggcctgacca

SEQ ID NO: 4207856 - DNA, 25 bp, Homo sapien
tgtaagaacagctgggatagaaggc

SEQ ID NO: 4207857 - DNA, 25 bp, Homo sapien
cacagaaggcactataaatgagaca

SEQ ID NO: 4207858 - DNA, 25 bp, Homo sapien
tagtcacatgtcctaagatcacaga

SEQ ID NO: 4207859 - DNA, 25 bp, Homo sapien
tacttctcaaccatagcctgatgag

SEQ ID NO: 4207860 - DNA, 25 bp, Homo sapien
tgctcccttggtacctcctgagaca

SEQ ID NO: 4207861 - DNA, 25 bp, Homo sapien
aatagtgccaactaggctcactgcc

SEQ ID NO: 4207862 - DNA, 25 bp, Homo sapien
gaagtgatcattaggccttgttgct

SEQ ID NO: 4207863 - DNA, 25 bp, Homo sapien
gagaaggatgctgtctgaaatcaca

SEQ ID NO: 4207864 - DNA, 25 bp, Homo sapien
ggcattcaaatctgcccaaaattct

SEQ ID NO: 4207865 - DNA, 25 bp, Homo sapien
tcaaatctgcccaaaattcttgtcc

SEQ ID NO: 4207866 - DNA, 25 bp, Homo sapien
cattcaaatctgcccaaaattcttg

SEQ ID NO: 4207867 - DNA, 25 bp, Homo sapien
ttcaaatctgcccaaaattcttgtc

SEQ ID NO: 4207868 - DNA, 25 bp, Homo sapien
aaatagagttgacattgctagaggg

SEQ ID NO: 4207869 - DNA, 25 bp, Homo sapien
tggacagccttcgtagttggtcaaa

SEQ ID NO: 4207870 - DNA, 25 bp, Homo sapien
catccaaagtggtccctacagaaga

SEQ ID NO: 4207871 - DNA, 25 bp, Homo sapien
tacagaagaatttccagactgtgtg

SEQ ID NO: 4207872 - DNA, 25 bp, Homo sapien
acctctttcagaccccgagagttgg

SEQ ID NO: 4207873 - DNA, 25 bp, Homo sapien
ggcttcttcaatcaatcgaatgaca

SEQ ID NO: 4207874 - DNA, 25 bp, Homo sapien
attgtggaggatgtagtggttattc

SEQ ID NO: 4207875 - DNA, 25 bp, Homo sapien
gtggttattccacatcataaatcga

SEQ ID NO: 4207876 - DNA, 25 bp, Homo sapien
tatcctctgcagaaacagggacttg

SEQ ID NO: 4207877 - DNA, 25 bp, Homo sapien
tcctgagatggatgcatataaaccc

SEQ ID NO: 4207878 - DNA, 25 bp, Homo sapien
gaggagcttgtgtgggaaccccacc

SEQ ID NO: 4207879 - DNA, 25 bp, Homo sapien
taaaagtttgctgaagtgaccccat

SEQ ID NO: 4207880 - DNA, 25 bp, Homo sapien
tatgttcctcatttgacactggcta

SEQ ID NO: 4207881 - DNA, 25 bp, Homo sapien
gaacataaattctgtgcaaatgttt

SEQ ID NO: 4207882 - DNA, 25 bp, Homo sapien
taaagctctcttgattcttgaactt

SEQ ID NO: 4207883 - DNA, 25 bp, Homo sapien
cgcccggccgtcttgaacttttcat

SEQ ID NO: 4207884 - DNA, 25 bp, Homo sapien
tattatcctgtcacggccaaacatt

SEQ ID NO: 4207885 - DNA, 25 bp, Homo sapien
tcctgtcacggccaaacattttcct

SEQ ID NO: 4207886 - DNA, 25 bp, Homo sapien
catttattatcctgtcacggccaaa

SEQ ID NO: 4207887 - DNA, 25 bp, Homo sapien
cctgtcacggccaaacattttcctg

SEQ ID NO: 4207888 - DNA, 25 bp, Homo sapien
gcatgctttccacagactcgagggt

SEQ ID NO: 4207889 - DNA, 25 bp, Homo sapien
catgctttccacagactcgagggtc

SEQ ID NO: 4207890 - DNA, 25 bp, Homo sapien
cacaagagtcataaaggtcactggt

SEQ ID NO: 4207891 - DNA, 25 bp, Homo sapien
gaaacatgaagtggactcctttgga

SEQ ID NO: 4207892 - DNA, 25 bp, Homo sapien
cgtcagcactttggccagaaacatg

SEQ ID NO: 4207893 - DNA, 25 bp, Homo sapien
tgactgcccattgtgtatctgcccg

SEQ ID NO: 4207894 - DNA, 25 bp, Homo sapien
ttcttcatattggataacaaaataa

SEQ ID NO: 4207895 - DNA, 25 bp, Homo sapien
cttcatattggataacaaaataagg

SEQ ID NO: 4207896 - DNA, 25 bp, Homo sapien
catattggataacaaaataagggta

SEQ ID NO: 4207897 - DNA, 25 bp, Homo sapien
tcatattggataacaaaataagggt

SEQ ID NO: 4207898 - DNA, 25 bp, Homo sapien
gctttggacagggaatacgcatggt

SEQ ID NO: 4207899 - DNA, 25 bp, Homo sapien
caagctaggtctggaacccgaaaag

SEQ ID NO: 4207900 - DNA, 25 bp, Homo sapien
gactgcctttaaccaaattagctgc

SEQ ID NO: 4207901 - DNA, 25 bp, Homo sapien
ggtcaaacttctaccaggcccaagc

SEQ ID NO: 4207902 - DNA, 25 bp, Homo sapien
tggaccactggcacaatttccaagt

SEQ ID NO: 4207903 - DNA, 25 bp, Homo sapien
tcaccaaacgttgtgctccagctgg

SEQ ID NO: 4207904 - DNA, 25 bp, Homo sapien
gaccactggcacaatttccaagttt

SEQ ID NO: 4207905 - DNA, 25 bp, Homo sapien
agctggaccactggcacaatttcca

SEQ ID NO: 4207906 - DNA, 25 bp, Homo sapien
aataaataagtgtgtggaagccctg

SEQ ID NO: 4207907 - DNA, 25 bp, Homo sapien
gtttacctagttgctacctctctga

SEQ ID NO: 4207908 - DNA, 25 bp, Homo sapien
ccaggagagcttggtaactgaaaga

SEQ ID NO: 4207909 - DNA, 25 bp, Homo sapien
taaccacaaacattaccaggagagc

SEQ ID NO: 4207910 - DNA, 25 bp, Homo sapien
cagtgatcttaaatggaaccaaaac

SEQ ID NO: 4207911 - DNA, 25 bp, Homo sapien
gcagaaaagtttaagcagcaagttc

SEQ ID NO: 4207912 - DNA, 25 bp, Homo sapien
tactttctgtagattcacactgcag

SEQ ID NO: 4207913 - DNA, 25 bp, Homo sapien
gataatgggctgctagataatgtac

SEQ ID NO: 4207914 - DNA, 25 bp, Homo sapien
tggtaatagcaacaacatacgtggt

SEQ ID NO: 4207915 - DNA, 25 bp, Homo sapien
catacgtggtatggattagattcca

SEQ ID NO: 4207916 - DNA, 25 bp, Homo sapien
gactgttagattcaaactaaggaaa

SEQ ID NO: 4207917 - DNA, 25 bp, Homo sapien
gatgagaaaactaaccatgtggtaa

SEQ ID NO: 4207918 - DNA, 25 bp, Homo sapien
cctattagctatctgatttaaggct

SEQ ID NO: 4207919 - DNA, 25 bp, Homo sapien
actgggttgaacctattagctatct

SEQ ID NO: 4207920 - DNA, 25 bp, Homo sapien
gaacctattagctatctgatttaag

SEQ ID NO: 4207921 - DNA, 25 bp, Homo sapien
gggttgaacctattagctatctgat

SEQ ID NO: 4207922 - DNA, 25 bp, Homo sapien
tggataagtgcccacagccgctggc

SEQ ID NO: 4207923 - DNA, 25 bp, Homo sapien
agaacctggataagtgcccacagcc

SEQ ID NO: 4207924 - DNA, 25 bp, Homo sapien
ataagtgcccacagccgctggctgc

SEQ ID NO: 4207925 - DNA, 25 bp, Homo sapien
ctgaagaacctggataagtgcccac

SEQ ID NO: 4207926 - DNA, 25 bp, Homo sapien
tggaatttgccaggaaaccttgcag

SEQ ID NO: 4207927 - DNA, 25 bp, Homo sapien
ttgtcctgagaaggctgtgcagcac

SEQ ID NO: 4207928 - DNA, 25 bp, Homo sapien
gacaccttgtcctgagaaggctgtg

SEQ ID NO: 4207929 - DNA, 25 bp, Homo sapien
tgtggaatttgccaggaaaccttgc

SEQ ID NO: 4207930 - DNA, 25 bp, Homo sapien
gaatggcatgttgcagcaggttctg

SEQ ID NO: 4207931 - DNA, 25 bp, Homo sapien
gaagtctcaggaagtctgggattga

SEQ ID NO: 4207932 - DNA, 25 bp, Homo sapien
tctatgaatccagggcaaaagatgg

SEQ ID NO: 4207933 - DNA, 25 bp, Homo sapien
caagggctcaagtccatggcagcag

SEQ ID NO: 4207934 - DNA, 25 bp, Homo sapien
ctgtagaaaaagaggggaatcttgg

SEQ ID NO: 4207935 - DNA, 25 bp, Homo sapien
tcctcaagtagcacatcctagtggc

SEQ ID NO: 4207936 - DNA, 25 bp, Homo sapien
acagcaagtaggtgaggcgaagccc

SEQ ID NO: 4207937 - DNA, 25 bp, Homo sapien
caagctctcacaagttgggtcaaag

SEQ ID NO: 4207938 - DNA, 25 bp, Homo sapien
tcctagtggccgcatgaagaggctt

SEQ ID NO: 4207939 - DNA, 25 bp, Homo sapien
gcactaatgaattctgtcacagatg

SEQ ID NO: 4207940 - DNA, 25 bp, Homo sapien
tgcaatctgcagaagcacatgttgg

SEQ ID NO: 4207941 - DNA, 25 bp, Homo sapien
ggaactgctgtatgcagagctcaca

SEQ ID NO: 4207942 - DNA, 25 bp, Homo sapien
gcatctttgagttgctataaaggga

SEQ ID NO: 4207943 - DNA, 25 bp, Homo sapien
ttctctggtggttgtagtgctgcaa

SEQ ID NO: 4207944 - DNA, 25 bp, Homo sapien
gctgcaagtttttctgatttagacc

SEQ ID NO: 4207945 - DNA, 25 bp, Homo sapien
tctgatttagaccagagaagaagaa

SEQ ID NO: 4207946 - DNA, 25 bp, Homo sapien
gaagaagaaatgtcaccattctcag

SEQ ID NO: 4207947 - DNA, 25 bp, Homo sapien
gcacaaaatttggattcgtgtcaac

SEQ ID NO: 4207948 - DNA, 25 bp, Homo sapien
ggtgctaatacaataacatgcctac

SEQ ID NO: 4207949 - DNA, 25 bp, Homo sapien
tgtgagttccatgagtagtctccgt

SEQ ID NO: 4207950 - DNA, 25 bp, Homo sapien
tggtttatggtgtgatgaactccag

SEQ ID NO: 4207951 - DNA, 25 bp, Homo sapien
ggaaacgcgttttgatgccatgccg

SEQ ID NO: 4207952 - DNA, 25 bp, Homo sapien
tgcaggacagagaaccactatttac

SEQ ID NO: 4207953 - DNA, 25 bp, Homo sapien
tggagtgcgccaaacatgaactgct

SEQ ID NO: 4207954 - DNA, 25 bp, Homo sapien
gagcctgacctctgcaagtctgaga

SEQ ID NO: 4207955 - DNA, 25 bp, Homo sapien
taagatggagggtgacatcgccaac

SEQ ID NO: 4207956 - DNA, 25 bp, Homo sapien
cacaagtgacacaagcctggaacaa

SEQ ID NO: 4207957 - DNA, 25 bp, Homo sapien
caaactatcgctgaggacctggtcg

SEQ ID NO: 4207958 - DNA, 25 bp, Homo sapien
tacgcctggtcaaacctggaaatca

SEQ ID NO: 4207959 - DNA, 25 bp, Homo sapien
caaactcctgcaggggagacgtgca

SEQ ID NO: 4207960 - DNA, 25 bp, Homo sapien
gtccaaactcctgcaggggagacgt

SEQ ID NO: 4207961 - DNA, 25 bp, Homo sapien
tagatgagccccaacaggacctgaa

SEQ ID NO: 4207962 - DNA, 25 bp, Homo sapien
gggagacgtgcaaatagatgagccc

SEQ ID NO: 4207963 - DNA, 25 bp, Homo sapien
ggagttgatccttagtgcctagcaa

SEQ ID NO: 4207964 - DNA, 25 bp, Homo sapien
ggtcagggctcatggcggcctctat

SEQ ID NO: 4207965 - DNA, 25 bp, Homo sapien
ggttagacctgtgaactgaagtgtc

SEQ ID NO: 4207966 - DNA, 25 bp, Homo sapien
gcttacaacatacctaccttggcag

SEQ ID NO: 4207967 - DNA, 25 bp, Homo sapien
aagcgcgtgtcgtgacgacctgcga

SEQ ID NO: 4207968 - DNA, 25 bp, Homo sapien
agccgctccgcgcttcgcagaggga

SEQ ID NO: 4207969 - DNA, 25 bp, Homo sapien
gatgagatcagtttgagtaaccaca

SEQ ID NO: 4207970 - DNA, 25 bp, Homo sapien
gagaaatgcagccagtcacgcagcg

SEQ ID NO: 4207971 - DNA, 25 bp, Homo sapien
tgtagcaggcaaagagactggtttg

SEQ ID NO: 4207972 - DNA, 25 bp, Homo sapien
ctgtagcaggcaaagagactggttt

SEQ ID NO: 4207973 - DNA, 25 bp, Homo sapien
aaggtcgaagtacagttcttccaag

SEQ ID NO: 4207974 - DNA, 25 bp, Homo sapien
aattagcaggtgactcattcgtagt

SEQ ID NO: 4207975 - DNA, 25 bp, Homo sapien
gactcattcgtagtccagatcttgc

SEQ ID NO: 4207976 - DNA, 25 bp, Homo sapien
aggattatataaggtcgaagtacag

SEQ ID NO: 4207977 - DNA, 25 bp, Homo sapien
gagatagggtgatactctgtgactg

SEQ ID NO: 4207978 - DNA, 25 bp, Homo sapien
cgagatagggtgatactctgtgact

SEQ ID NO: 4207979 - DNA, 25 bp, Homo sapien
tactctgtgactggtcaaggcagga

SEQ ID NO: 4207980 - DNA, 25 bp, Homo sapien
gggctcggaaggctgggctagtctt

SEQ ID NO: 4207981 - DNA, 25 bp, Homo sapien
aggctgggctagtcttacgcggaat

SEQ ID NO: 4207982 - DNA, 25 bp, Homo sapien
gctcggaaggctgggctagtcttac

SEQ ID NO: 4207983 - DNA, 25 bp, Homo sapien
ctggtggtggggctcggaaggctgg

SEQ ID NO: 4207984 - DNA, 25 bp, Homo sapien
ctcgacttcgactaggacgggtgtg

SEQ ID NO: 4207985 - DNA, 25 bp, Homo sapien
cttcgactaggacgggtgtgaaacg

SEQ ID NO: 4207986 - DNA, 25 bp, Homo sapien
cgactaggacgggtgtgaaacggct

SEQ ID NO: 4207987 - DNA, 25 bp, Homo sapien
gacttcgactaggacgggtgtgaaa

SEQ ID NO: 4207988 - DNA, 25 bp, Homo sapien
ttggaggaccgggtcatcccaggct

SEQ ID NO: 4207989 - DNA, 25 bp, Homo sapien
tgaggaagcagagccgcgcgttccc

SEQ ID NO: 4207990 - DNA, 25 bp, Homo sapien
gcctccactccggaactgcatttgg

SEQ ID NO: 4207991 - DNA, 25 bp, Homo sapien
cagaggagcgtggtggcggagtcca

SEQ ID NO: 4207992 - DNA, 25 bp, Homo sapien
gaaccattcccatggcgtgaatcac

SEQ ID NO: 4207993 - DNA, 25 bp, Homo sapien
gactttcctgaagcggcaggctctt

SEQ ID NO: 4207994 - DNA, 25 bp, Homo sapien
cgggagttcacatcctaagactttc

SEQ ID NO: 4207995 - DNA, 25 bp, Homo sapien
cgtgaatcacccacaacgagcaggt

SEQ ID NO: 4207996 - DNA, 25 bp, Homo sapien
ttctcattgcacgtatgtggaccgc

SEQ ID NO: 4207997 - DNA, 25 bp, Homo sapien
gctacgtgggtgtttgtgaacctcc

SEQ ID NO: 4207998 - DNA, 25 bp, Homo sapien
cactagtgtcacgtcaggccattaa

SEQ ID NO: 4207999 - DNA, 25 bp, Homo sapien
tgtggaccgcactttggcaagaggt

SEQ ID NO: 4208000 - DNA, 25 bp, Homo sapien
gaaactggtaacgtgtcctcatgta

SEQ ID NO: 4208001 - DNA, 25 bp, Homo sapien
cagctccataacgaaacaggtgttt

SEQ ID NO: 4208002 - DNA, 25 bp, Homo sapien
catcacggctaatctgctaatgagg

SEQ ID NO: 4208003 - DNA, 25 bp, Homo sapien
taaccacctgtgttagctaacggct

SEQ ID NO: 4208004 - DNA, 25 bp, Homo sapien
tgtgtagtgccttcattgtctgtga

SEQ ID NO: 4208005 - DNA, 25 bp, Homo sapien
gggaggaattggcaggttctgatta

SEQ ID NO: 4208006 - DNA, 25 bp, Homo sapien
aaagtcctgccaacccagaaaatgc

SEQ ID NO: 4208007 - DNA, 25 bp, Homo sapien
tattccaactttatggccttagcat

SEQ ID NO: 4208008 - DNA, 25 bp, Homo sapien
tatggtgagagagctttgaagccaa

SEQ ID NO: 4208009 - DNA, 25 bp, Homo sapien
aatatggtgagagagctttgaagcc

SEQ ID NO: 4208010 - DNA, 25 bp, Homo sapien
aaatatggtgagagagctttgaagc

SEQ ID NO: 4208011 - DNA, 25 bp, Homo sapien
atggtgagagagctttgaagccaaa

SEQ ID NO: 4208012 - DNA, 25 bp, Homo sapien
ggcaacgcatgcatgggaatgtgat

SEQ ID NO: 4208013 - DNA, 25 bp, Homo sapien
caggcaacgcatgcatgggaatgtg

SEQ ID NO: 4208014 - DNA, 25 bp, Homo sapien
ttcaggcaacgcatgcatgggaatg

SEQ ID NO: 4208015 - DNA, 25 bp, Homo sapien
tcaggcaacgcatgcatgggaatgt

SEQ ID NO: 4208016 - DNA, 25 bp, Homo sapien
ggctcctgttaccactataagctat

SEQ ID NO: 4208017 - DNA, 25 bp, Homo sapien
tataagctatatatctaatcagcag

SEQ ID NO: 4208018 - DNA, 25 bp, Homo sapien
tctaatcagcagtccccaatttttt

SEQ ID NO: 4208019 - DNA, 25 bp, Homo sapien
aatggttctaatctaaatggctcct

SEQ ID NO: 4208020 - DNA, 25 bp, Homo sapien
tccctgatttctacactcaccttcc

SEQ ID NO: 4208021 - DNA, 25 bp, Homo sapien
tgatttctacactcaccttccttgc

SEQ ID NO: 4208022 - DNA, 25 bp, Homo sapien
tctcttccctgatttctacactcac

SEQ ID NO: 4208023 - DNA, 25 bp, Homo sapien
cttctcttccctgatttctacactc

SEQ ID NO: 4208024 - DNA, 25 bp, Homo sapien
tgacactgtactttagttttgccag

SEQ ID NO: 4208025 - DNA, 25 bp, Homo sapien
tattggagaccagaccaatggttgc

SEQ ID NO: 4208026 - DNA, 25 bp, Homo sapien
tacacacaacctaatgaaactccag

SEQ ID NO: 4208027 - DNA, 25 bp, Homo sapien
gatgttaccactgcaggaagctaga

SEQ ID NO: 4208028 - DNA, 25 bp, Homo sapien
tgtgcaccagttccagtcctcttag

SEQ ID NO: 4208029 - DNA, 25 bp, Homo sapien
tcacaaatccgcctccctgaagtgt

SEQ ID NO: 4208030 - DNA, 25 bp, Homo sapien
tagaaaccatgtgggacatccccag

SEQ ID NO: 4208031 - DNA, 25 bp, Homo sapien
gacagctatcaggaacactccatgt

SEQ ID NO: 4208032 - DNA, 25 bp, Homo sapien
tgctccagggcactaaatttgaaat

SEQ ID NO: 4208033 - DNA, 25 bp, Homo sapien
tgtgtgacttttggccagcataggg

SEQ ID NO: 4208034 - DNA, 25 bp, Homo sapien
ccaaatcagttcttagtaggtacgg

SEQ ID NO: 4208035 - DNA, 25 bp, Homo sapien
taaccagctgatatgcggagaagct

SEQ ID NO: 4208036 - DNA, 25 bp, Homo sapien
cttggctaagagaatgcagcttttc

SEQ ID NO: 4208037 - DNA, 25 bp, Homo sapien
atagctgactccacagtacttacaa

SEQ ID NO: 4208038 - DNA, 25 bp, Homo sapien
gaagtctcttttcacgatctacact

SEQ ID NO: 4208039 - DNA, 25 bp, Homo sapien
tttggatttgttgtcaattttgtac

SEQ ID NO: 4208040 - DNA, 25 bp, Homo sapien
cactgaagtgtctttaggcaggcta

SEQ ID NO: 4208041 - DNA, 25 bp, Homo sapien
aaacgtaagatatatatacctggga

SEQ ID NO: 4208042 - DNA, 25 bp, Homo sapien
cagctggtggttactaaattaattg

SEQ ID NO: 4208043 - DNA, 25 bp, Homo sapien
cacacactaatttgaacgtcttggc

SEQ ID NO: 4208044 - DNA, 25 bp, Homo sapien
gtagttaaaagtgtggccctgactc

SEQ ID NO: 4208045 - DNA, 25 bp, Homo sapien
taataagtgatattgggccaacagc

SEQ ID NO: 4208046 - DNA, 25 bp, Homo sapien
cacagcatgttttatggaatcggaa

SEQ ID NO: 4208047 - DNA, 25 bp, Homo sapien
cagaccgtccagaaatacgctagaa

SEQ ID NO: 4208048 - DNA, 25 bp, Homo sapien
tttttagcataaatgccctttacac

SEQ ID NO: 4208049 - DNA, 25 bp, Homo sapien
aatgccctttacactacttccataa

SEQ ID NO: 4208050 - DNA, 25 bp, Homo sapien
tttagcataaatgccctttacacta

SEQ ID NO: 4208051 - DNA, 25 bp, Homo sapien
gcataaatgccctttacactacttc

SEQ ID NO: 4208052 - DNA, 25 bp, Homo sapien
cagtaggtaagatacattcctcatc

SEQ ID NO: 4208053 - DNA, 25 bp, Homo sapien
gcagtaggtaagatacattcctcat

SEQ ID NO: 4208054 - DNA, 25 bp, Homo sapien
tctctggcagtaggtaagatacatt

SEQ ID NO: 4208055 - DNA, 25 bp, Homo sapien
ctggcagtaggtaagatacattcct

SEQ ID NO: 4208056 - DNA, 25 bp, Homo sapien
ccagtctaagcatgagtctgaagta

SEQ ID NO: 4208057 - DNA, 25 bp, Homo sapien
cagacctatgtatggctcagtgaca

SEQ ID NO: 4208058 - DNA, 25 bp, Homo sapien
tcgttctttcagctggcaatgttct

SEQ ID NO: 4208059 - DNA, 25 bp, Homo sapien
cagaatgttgtagatctggcattcg

SEQ ID NO: 4208060 - DNA, 25 bp, Homo sapien
gacaaaacaagcaagtgcccaagct

SEQ ID NO: 4208061 - DNA, 25 bp, Homo sapien
tctattgagcattgagcatttacca

SEQ ID NO: 4208062 - DNA, 25 bp, Homo sapien
tgcaagcaagccaaacaaacaaggc

SEQ ID NO: 4208063 - DNA, 25 bp, Homo sapien
cactgtactttgaattccgccttga

SEQ ID NO: 4208064 - DNA, 25 bp, Homo sapien
agggaatttctgatagttggaacaa

SEQ ID NO: 4208065 - DNA, 25 bp, Homo sapien
gatagttggaacaaaaggctaggct

SEQ ID NO: 4208066 - DNA, 25 bp, Homo sapien
gaatttctgatagttggaacaaaag

SEQ ID NO: 4208067 - DNA, 25 bp, Homo sapien
tctgatagttggaacaaaaggctag

SEQ ID NO: 4208068 - DNA, 25 bp, Homo sapien
taagccaaagcacagtagcttaaaa

SEQ ID NO: 4208069 - DNA, 25 bp, Homo sapien
tattctggttaattcttagttgctc

SEQ ID NO: 4208070 - DNA, 25 bp, Homo sapien
ttctggttaattcttagttgctcac

SEQ ID NO: 4208071 - DNA, 25 bp, Homo sapien
tagcttaaaagaagatggcatattc

SEQ ID NO: 4208072 - DNA, 25 bp, Homo sapien
gccagataacgatcttttgaaagtt

SEQ ID NO: 4208073 - DNA, 25 bp, Homo sapien
tctattgagaaacatgccagataac

SEQ ID NO: 4208074 - DNA, 25 bp, Homo sapien
tccacaaagggctctattgagaaac

SEQ ID NO: 4208075 - DNA, 25 bp, Homo sapien
cttacaaggctccagtattccacaa

SEQ ID NO: 4208076 - DNA, 25 bp, Homo sapien
gtagttgggccatgtccattacccc

SEQ ID NO: 4208077 - DNA, 25 bp, Homo sapien
gaattgggagactcttcagcaagcc

SEQ ID NO: 4208078 - DNA, 25 bp, Homo sapien
ccttggcccactgctttagaattgg

SEQ ID NO: 4208079 - DNA, 25 bp, Homo sapien
tgtgtcccatcctgttcccaacttg

SEQ ID NO: 4208080 - DNA, 25 bp, Homo sapien
aagtcttcctaatcctaaagagatt

SEQ ID NO: 4208081 - DNA, 25 bp, Homo sapien
gattatctaagagtctagcactttt

SEQ ID NO: 4208082 - DNA, 25 bp, Homo sapien
ttccaagtcttcctaatcctaaaga

SEQ ID NO: 4208083 - DNA, 25 bp, Homo sapien
ccaagtcttcctaatcctaaagaga

SEQ ID NO: 4208084 - DNA, 25 bp, Homo sapien
gaacactatgttgatgtaaggacat

SEQ ID NO: 4208085 - DNA, 25 bp, Homo sapien
cacaattcggcacagaatgtgaaca

SEQ ID NO: 4208086 - DNA, 25 bp, Homo sapien
gttttctctaacagtcacaattcgg

SEQ ID NO: 4208087 - DNA, 25 bp, Homo sapien
aacagtcacaattcggcacagaatg

SEQ ID NO: 4208088 - DNA, 25 bp, Homo sapien
tgcaaatgactcagttgtttcttta

SEQ ID NO: 4208089 - DNA, 25 bp, Homo sapien
catcttgcaaatgactcagttgttt

SEQ ID NO: 4208090 - DNA, 25 bp, Homo sapien
gatgtatgattgtctatatttaatt

SEQ ID NO: 4208091 - DNA, 25 bp, Homo sapien
tgaagatgtatgattgtctatattt

SEQ ID NO: 4208092 - DNA, 25 bp, Homo sapien
agaaaatccttctgaccggcttaga

SEQ ID NO: 4208093 - DNA, 25 bp, Homo sapien
caattgaatatccacgtgaaacagg

SEQ ID NO: 4208094 - DNA, 25 bp, Homo sapien
taaaattcattatggagggcgcaga

SEQ ID NO: 4208095 - DNA, 25 bp, Homo sapien
gaaaaattggcctctaacaaacagc

SEQ ID NO: 4208096 - DNA, 25 bp, Homo sapien
gaagtccagttttggtaattatcat

SEQ ID NO: 4208097 - DNA, 25 bp, Homo sapien
gaaatatttgtactctgacaatctt

SEQ ID NO: 4208098 - DNA, 25 bp, Homo sapien
ctgtcaaggctgtttcacttataga

SEQ ID NO: 4208099 - DNA, 25 bp, Homo sapien
taatgaaagagtcttattccagaaa

SEQ ID NO: 4208100 - DNA, 25 bp, Homo sapien
tctgtttctcatagggtaggtgaca

SEQ ID NO: 4208101 - DNA, 25 bp, Homo sapien
caccctgtgggagagtagtacttgt

SEQ ID NO: 4208102 - DNA, 25 bp, Homo sapien
gcacatgtatttcagggataagcct

SEQ ID NO: 4208103 - DNA, 25 bp, Homo sapien
ttgcatggagcaaactgtaccttgc

SEQ ID NO: 4208104 - DNA, 25 bp, Homo sapien
ttcaagccacttcaaataactatgg

SEQ ID NO: 4208105 - DNA, 25 bp, Homo sapien
ttttactcctaagcaagggtgagga

SEQ ID NO: 4208106 - DNA, 25 bp, Homo sapien
catgtgcaaggctcaagatgacgct

SEQ ID NO: 4208107 - DNA, 25 bp, Homo sapien
cattgaataactcgagggctgattt

SEQ ID NO: 4208108 - DNA, 25 bp, Homo sapien
agtgctccaatttaactggaaaagc

SEQ ID NO: 4208109 - DNA, 25 bp, Homo sapien
gtgctccaatttaactggaaaagct

SEQ ID NO: 4208110 - DNA, 25 bp, Homo sapien
tcagtgctccaatttaactggaaaa

SEQ ID NO: 4208111 - DNA, 25 bp, Homo sapien
cagtgctccaatttaactggaaaag

SEQ ID NO: 4208112 - DNA, 25 bp, Homo sapien
aatgcaatgtgctataaaagtccat

SEQ ID NO: 4208113 - DNA, 25 bp, Homo sapien
caatgtgctataaaagtccatccag

SEQ ID NO: 4208114 - DNA, 25 bp, Homo sapien
gtaaatgcaatgtgctataaaagtc

SEQ ID NO: 4208115 - DNA, 25 bp, Homo sapien
tgcaatgtgctataaaagtccatcc

SEQ ID NO: 4208116 - DNA, 25 bp, Homo sapien
gttgtctagatgtccgaatctgctg

SEQ ID NO: 4208117 - DNA, 25 bp, Homo sapien
gatgtccgaatctgctgagatctca

SEQ ID NO: 4208118 - DNA, 25 bp, Homo sapien
tctggtttgcaagtttacttcctgt

SEQ ID NO: 4208119 - DNA, 25 bp, Homo sapien
tcctgttgtctagatgtccgaatct

SEQ ID NO: 4208120 - DNA, 25 bp, Homo sapien
tgtacttatataactagtcaccaaa

SEQ ID NO: 4208121 - DNA, 25 bp, Homo sapien
gtacttatataactagtcaccaaaa

SEQ ID NO: 4208122 - DNA, 25 bp, Homo sapien
tacttatataactagtcaccaaaaa

SEQ ID NO: 4208123 - DNA, 25 bp, Homo sapien
catgtacttatataactagtcacca

SEQ ID NO: 4208124 - DNA, 25 bp, Homo sapien
ggtctgagcccatatgataaatttt

SEQ ID NO: 4208125 - DNA, 25 bp, Homo sapien
caggatatgatcctaaactagatga

SEQ ID NO: 4208126 - DNA, 25 bp, Homo sapien
ttgtcaggatatgatcctaaactag

SEQ ID NO: 4208127 - DNA, 25 bp, Homo sapien
gatgaagcataggtctgagcccata

SEQ ID NO: 4208128 - DNA, 25 bp, Homo sapien
tgaagttttaatccaagtgcctcta

SEQ ID NO: 4208129 - DNA, 25 bp, Homo sapien
caagtgcctctactagacattgtaa

SEQ ID NO: 4208130 - DNA, 25 bp, Homo sapien
taatccaagtgcctctactagacat

SEQ ID NO: 4208131 - DNA, 25 bp, Homo sapien
tctgtcaccgccttctgaagtttta

SEQ ID NO: 4208132 - DNA, 25 bp, Homo sapien
tcttcaatatataatctaggccagt

SEQ ID NO: 4208133 - DNA, 25 bp, Homo sapien
atcacagagaacacaccagggtctt

SEQ ID NO: 4208134 - DNA, 25 bp, Homo sapien
gcagtaaactattacccacaccagt

SEQ ID NO: 4208135 - DNA, 25 bp, Homo sapien
tttgtaacacatctacagagcactg

SEQ ID NO: 4208136 - DNA, 25 bp, Homo sapien
taatctttggttgtgttgaatcctc

SEQ ID NO: 4208137 - DNA, 25 bp, Homo sapien
gatcctctgtttgcttgtctgcttt

SEQ ID NO: 4208138 - DNA, 25 bp, Homo sapien
ctagtaatctttggttgtgttgaat

SEQ ID NO: 4208139 - DNA, 25 bp, Homo sapien
tcctcagacttaagatcctctgttt

SEQ ID NO: 4208140 - DNA, 25 bp, Homo sapien
gattcagaagagttttggttatctc

SEQ ID NO: 4208141 - DNA, 25 bp, Homo sapien
agaagagttttggttatctccagtt

SEQ ID NO: 4208142 - DNA, 25 bp, Homo sapien
tcccttgtctgattcagaagagttt

SEQ ID NO: 4208143 - DNA, 25 bp, Homo sapien
tgtctgattcagaagagttttggtt

SEQ ID NO: 4208144 - DNA, 25 bp, Homo sapien
gttgttctcttagagatgtcttcac

SEQ ID NO: 4208145 - DNA, 25 bp, Homo sapien
tcacattgtcaatcaaagagataat

SEQ ID NO: 4208146 - DNA, 25 bp, Homo sapien
tcttcacattgtcaatcaaagagat

SEQ ID NO: 4208147 - DNA, 25 bp, Homo sapien
tttcacaagttgttctcttagagat

SEQ ID NO: 4208148 - DNA, 25 bp, Homo sapien
agttatcatcactcagcagcttctg

SEQ ID NO: 4208149 - DNA, 25 bp, Homo sapien
tctgtctaagggtttcttgcagctg

SEQ ID NO: 4208150 - DNA, 25 bp, Homo sapien
ctgatgtgaaatcagcatcaattcc

SEQ ID NO: 4208151 - DNA, 25 bp, Homo sapien
agctgctcgatgcttttctgatgtg

SEQ ID NO: 4208152 - DNA, 25 bp, Homo sapien
tataccctttacagaagaatgtggt

SEQ ID NO: 4208153 - DNA, 25 bp, Homo sapien
caagaaggtcacatatagagcagta

SEQ ID NO: 4208154 - DNA, 25 bp, Homo sapien
atatagagcagtaagggaggatggg

SEQ ID NO: 4208155 - DNA, 25 bp, Homo sapien
cgtataccctttacagaagaatgtg

SEQ ID NO: 4208156 - DNA, 25 bp, Homo sapien
agtgttgggccctttccttggcaag

SEQ ID NO: 4208157 - DNA, 25 bp, Homo sapien
tcaaattcaaccaagtgttgggccc

SEQ ID NO: 4208158 - DNA, 25 bp, Homo sapien
tcttcaaattcaaccaagtgttggg

SEQ ID NO: 4208159 - DNA, 25 bp, Homo sapien
gctcttcaaattcaaccaagtgttg

SEQ ID NO: 4208160 - DNA, 25 bp, Homo sapien
tcttcaagcgagattcaaattctgc

SEQ ID NO: 4208161 - DNA, 25 bp, Homo sapien
tcctgccttagatctcttgtagcgc

SEQ ID NO: 4208162 - DNA, 25 bp, Homo sapien
cttcctgggactggttaaattgctc

SEQ ID NO: 4208163 - DNA, 25 bp, Homo sapien
gattcttcagtgtaccgaatatggg

SEQ ID NO: 4208164 - DNA, 25 bp, Homo sapien
tcagactgatatgcttcagaggcag

SEQ ID NO: 4208165 - DNA, 25 bp, Homo sapien
taaggttctcaggtggtcagttcac

SEQ ID NO: 4208166 - DNA, 25 bp, Homo sapien
caagcctaggtatagtccctgtccc

SEQ ID NO: 4208167 - DNA, 25 bp, Homo sapien
gaaacaagtaagatggatgtcaggc

SEQ ID NO: 4208168 - DNA, 25 bp, Homo sapien
tgacaccccgcgcaggttgggaatt

SEQ ID NO: 4208169 - DNA, 25 bp, Homo sapien
tacgcactgtctcctgaagaaaagt

SEQ ID NO: 4208170 - DNA, 25 bp, Homo sapien
tgagaatggtaaacttccacgaagc

SEQ ID NO: 4208171 - DNA, 25 bp, Homo sapien
cccttgctgagggaacacggtgaga

SEQ ID NO: 4208172 - DNA, 25 bp, Homo sapien
tccgccttctcctaagaatggcagc

SEQ ID NO: 4208173 - DNA, 25 bp, Homo sapien
ctagtctcatttgctgaagatgctc

SEQ ID NO: 4208174 - DNA, 25 bp, Homo sapien
tgactccgccttctcctaagaatgg

SEQ ID NO: 4208175 - DNA, 25 bp, Homo sapien
ggagaatgggcacgcctgatctaac

SEQ ID NO: 4208176 - DNA, 25 bp, Homo sapien
cttctctatacatgctgcttagtct

SEQ ID NO: 4208177 - DNA, 25 bp, Homo sapien
aattccacgtcccaggatctaacac

SEQ ID NO: 4208178 - DNA, 25 bp, Homo sapien
agagagaattccacgtcccaggatc

SEQ ID NO: 4208179 - DNA, 25 bp, Homo sapien
tacatgctgcttagtcttctgacat

SEQ ID NO: 4208180 - DNA, 25 bp, Homo sapien
tctgttcgcgggtaccagaagcagc

SEQ ID NO: 4208181 - DNA, 25 bp, Homo sapien
tagccactgggatgaggcgtgattc

SEQ ID NO: 4208182 - DNA, 25 bp, Homo sapien
tttcttcctatcactgcctggctga

SEQ ID NO: 4208183 - DNA, 25 bp, Homo sapien
cacacgcagggccaatggcttcagt

SEQ ID NO: 4208184 - DNA, 25 bp, Homo sapien
tcgattgagtaaagggcccatggtt

SEQ ID NO: 4208185 - DNA, 25 bp, Homo sapien
tggtgcagggcatctcaagccaaca

SEQ ID NO: 4208186 - DNA, 25 bp, Homo sapien
ctgtgtaaggtgctggctcaatgcc

SEQ ID NO: 4208187 - DNA, 25 bp, Homo sapien
tcatcacgtcatttgcctgccgaga

SEQ ID NO: 4208188 - DNA, 25 bp, Homo sapien
ccaaacaccacgatcctgcacttca

SEQ ID NO: 4208189 - DNA, 25 bp, Homo sapien
caaacaccacgatcctgcacttcaa

SEQ ID NO: 4208190 - DNA, 25 bp, Homo sapien
gacacacagttactgtaatagaaaa

SEQ ID NO: 4208191 - DNA, 25 bp, Homo sapien
taagttctattacttgacacacagt

SEQ ID NO: 4208192 - DNA, 25 bp, Homo sapien
ttttgctggtaagttctattacttg

SEQ ID NO: 4208193 - DNA, 25 bp, Homo sapien
gatcagtgtgttaggtctgttacta

SEQ ID NO: 4208194 - DNA, 25 bp, Homo sapien
taatttgcggtgtctgcttcagtga

SEQ ID NO: 4208195 - DNA, 25 bp, Homo sapien
gagtgccagtcgttcccagtggaca

SEQ ID NO: 4208196 - DNA, 25 bp, Homo sapien
acacctttccagagtggccttcggt

SEQ ID NO: 4208197 - DNA, 25 bp, Homo sapien
tgttggtgtcccaaggcagagtgcc

SEQ ID NO: 4208198 - DNA, 25 bp, Homo sapien
tctgactgcttgttagcagctttgg

SEQ ID NO: 4208199 - DNA, 25 bp, Homo sapien
tgctggttcattgttggaggagaac

SEQ ID NO: 4208200 - DNA, 25 bp, Homo sapien
tctgtttccggctgctgacctttct

SEQ ID NO: 4208201 - DNA, 25 bp, Homo sapien
cactcacagggcagtctatctgact

SEQ ID NO: 4208202 - DNA, 25 bp, Homo sapien
caccggggaatgtcgctgccgccat

SEQ ID NO: 4208203 - DNA, 25 bp, Homo sapien
catcttctttctagggaacatttgc

SEQ ID NO: 4208204 - DNA, 25 bp, Homo sapien
ttctcttctgcgtttgcgtcttcca

SEQ ID NO: 4208205 - DNA, 25 bp, Homo sapien
tgccaggtccttggaaaaggtccac

SEQ ID NO: 4208206 - DNA, 25 bp, Homo sapien
catttgcggtcttgttatccacgcc

SEQ ID NO: 4208207 - DNA, 25 bp, Homo sapien
taatgtctcctttattaccacgagc

SEQ ID NO: 4208208 - DNA, 25 bp, Homo sapien
tccacgcctaatgtctcctttatta

SEQ ID NO: 4208209 - DNA, 25 bp, Homo sapien
tattaccacgagcaatcgagatgta

SEQ ID NO: 4208210 - DNA, 25 bp, Homo sapien
gaggtgttcatcctgcggaggctcc

SEQ ID NO: 4208211 - DNA, 25 bp, Homo sapien
gaggcagagcctcgattctccagga

SEQ ID NO: 4208212 - DNA, 25 bp, Homo sapien
tgactttgccggagaacaaggctgg

SEQ ID NO: 4208213 - DNA, 25 bp, Homo sapien
caagctcttcaaggcgggagcctca

SEQ ID NO: 4208214 - DNA, 25 bp, Homo sapien
gcaaggactcgcaacaaagccaaag

SEQ ID NO: 4208215 - DNA, 25 bp, Homo sapien
ctgagtcatctgaacaaagcggtga

SEQ ID NO: 4208216 - DNA, 25 bp, Homo sapien
gtgactggctttgcctggctctggc

SEQ ID NO: 4208217 - DNA, 25 bp, Homo sapien
ctctggcaaggactcgcaacaaagc

SEQ ID NO: 4208218 - DNA, 25 bp, Homo sapien
cacacaggctggtacagtcagatca

SEQ ID NO: 4208219 - DNA, 25 bp, Homo sapien
tctaagggagctcatggtgctgtct

SEQ ID NO: 4208220 - DNA, 25 bp, Homo sapien
catcatgccgatcgtcatctaaggg

SEQ ID NO: 4208221 - DNA, 25 bp, Homo sapien
cagatcattgtgacttggacaggga

SEQ ID NO: 4208222 - DNA, 25 bp, Homo sapien
gggcgcctgagtcatttgaaataat

SEQ ID NO: 4208223 - DNA, 25 bp, Homo sapien
gctcgccagtgcatgggactgtgca

SEQ ID NO: 4208224 - DNA, 25 bp, Homo sapien
taggcattcgatgtcaggccatggc

SEQ ID NO: 4208225 - DNA, 25 bp, Homo sapien
tgcaagtctgtacagagatcccaga

SEQ ID NO: 4208226 - DNA, 25 bp, Homo sapien
actctgctgcatagggcacctgacg

SEQ ID NO: 4208227 - DNA, 25 bp, Homo sapien
ggcacctgacggccaccattgctgt

SEQ ID NO: 4208228 - DNA, 25 bp, Homo sapien
ctggggcctctactcttggcggtgg

SEQ ID NO: 4208229 - DNA, 25 bp, Homo sapien
caccattgctgtgactgcccttgct

SEQ ID NO: 4208230 - DNA, 25 bp, Homo sapien
catcaaatcgtttcagatcactcaa

SEQ ID NO: 4208231 - DNA, 25 bp, Homo sapien
caatttactttgatttcgttcaacg

SEQ ID NO: 4208232 - DNA, 25 bp, Homo sapien
ttcgttcaacgtcatttcattttct

SEQ ID NO: 4208233 - DNA, 25 bp, Homo sapien
tgtgagctgtatggggaattcttgc

SEQ ID NO: 4208234 - DNA, 25 bp, Homo sapien
cctgtgcactgttgagtgtgacttt

SEQ ID NO: 4208235 - DNA, 25 bp, Homo sapien
tgtgcctgtgcactgttgagtgtga

SEQ ID NO: 4208236 - DNA, 25 bp, Homo sapien
cactgttgagtgtgactttgttctg

SEQ ID NO: 4208237 - DNA, 25 bp, Homo sapien
cattctcgatcccggcgtgtgcctg

SEQ ID NO: 4208238 - DNA, 25 bp, Homo sapien
gccttggtactctcagtccttcctc

SEQ ID NO: 4208239 - DNA, 25 bp, Homo sapien
ccaaggttgtcggtctgagtttgtc

SEQ ID NO: 4208240 - DNA, 25 bp, Homo sapien
gtgtgcagtcttttgaagtccaagg

SEQ ID NO: 4208241 - DNA, 25 bp, Homo sapien
tttgaagtccaaggttgtcggtctg

SEQ ID NO: 4208242 - DNA, 25 bp, Homo sapien
aaggaatgcagatcaaaacgtttcc

SEQ ID NO: 4208243 - DNA, 25 bp, Homo sapien
aaaggaatgcagatcaaaacgtttc

SEQ ID NO: 4208244 - DNA, 25 bp, Homo sapien
gggaaaaggaatgcagatcaaaacg

SEQ ID NO: 4208245 - DNA, 25 bp, Homo sapien
gaaaaggaatgcagatcaaaacgtt

SEQ ID NO: 4208246 - DNA, 25 bp, Homo sapien
ccccacaggagagcgtgttcccgcc

SEQ ID NO: 4208247 - DNA, 25 bp, Homo sapien
aaacgctctcgctctgcggcctggg

SEQ ID NO: 4208248 - DNA, 25 bp, Homo sapien
gcctggccctcgttaggcaaggtcc

SEQ ID NO: 4208249 - DNA, 25 bp, Homo sapien
agcacagatggaaacgctctcgctc

SEQ ID NO: 4208250 - DNA, 25 bp, Homo sapien
tgaccgctggattgcctcgctccag

SEQ ID NO: 4208251 - DNA, 25 bp, Homo sapien
gaggcagctcttttctgcgcacgcg

SEQ ID NO: 4208252 - DNA, 25 bp, Homo sapien
cagcggcacggctgacgcatgcgcc

SEQ ID NO: 4208253 - DNA, 25 bp, Homo sapien
tcagctctcctacgcggccccagcg

SEQ ID NO: 4208254 - DNA, 25 bp, Homo sapien
aagcgctgcacacgggaaagcacct

SEQ ID NO: 4208255 - DNA, 25 bp, Homo sapien
tcaccgtgagaactggaaagggaaa

SEQ ID NO: 4208256 - DNA, 25 bp, Homo sapien
gtctgtgtgagtctccccaagcgct

SEQ ID NO: 4208257 - DNA, 25 bp, Homo sapien
aagagtgcatgggaagggcgggaga

SEQ ID NO: 4208258 - DNA, 25 bp, Homo sapien
gggaggaccaggaattcttgttctc

SEQ ID NO: 4208259 - DNA, 25 bp, Homo sapien
tgggaggaccaggaattcttgttct

SEQ ID NO: 4208260 - DNA, 25 bp, Homo sapien
agggctcagctgtcaaagatttcca

SEQ ID NO: 4208261 - DNA, 25 bp, Homo sapien
tgacagtcaagagccaaactcaaag

SEQ ID NO: 4208262 - DNA, 25 bp, Homo sapien
gacggaatcctagcacagactccag

SEQ ID NO: 4208263 - DNA, 25 bp, Homo sapien
ttttggtgagcccactgtgcgcagc

SEQ ID NO: 4208264 - DNA, 25 bp, Homo sapien
tagggtttccctgctagtccactag

SEQ ID NO: 4208265 - DNA, 25 bp, Homo sapien
ggtaaagttgctctgtggattgtca

SEQ ID NO: 4208266 - DNA, 25 bp, Homo sapien
tcactttgaacctagctccctgcaa

SEQ ID NO: 4208267 - DNA, 25 bp, Homo sapien
gatacactacgcatgcacaaataaa

SEQ ID NO: 4208268 - DNA, 25 bp, Homo sapien
gctcatcagcaaatcaatgcccagg

SEQ ID NO: 4208269 - DNA, 25 bp, Homo sapien
gaacaggcaggaggtattttcttct

SEQ ID NO: 4208270 - DNA, 25 bp, Homo sapien
agaacaggcaggaggtattttcttc

SEQ ID NO: 4208271 - DNA, 25 bp, Homo sapien
ctgtcaagagccaatacagcacctg

SEQ ID NO: 4208272 - DNA, 25 bp, Homo sapien
agagctgtcaagagccaatacagca

SEQ ID NO: 4208273 - DNA, 25 bp, Homo sapien
ggacacagtccagcctataacacta

SEQ ID NO: 4208274 - DNA, 25 bp, Homo sapien
ggtactaggcgtccatatatgcatg

SEQ ID NO: 4208275 - DNA, 25 bp, Homo sapien
gagatcaaattgtctgcagggttgg

SEQ ID NO: 4208276 - DNA, 25 bp, Homo sapien
agatgaatcccatatgcttgctggc

SEQ ID NO: 4208277 - DNA, 25 bp, Homo sapien
gaatctgtagcctgaacacactggt

SEQ ID NO: 4208278 - DNA, 25 bp, Homo sapien
cagaatctgtagcctgaacacactg

SEQ ID NO: 4208279 - DNA, 25 bp, Homo sapien
gaaaagagcctctaacttagatttc

SEQ ID NO: 4208280 - DNA, 25 bp, Homo sapien
gagcctctaacttagatttctgctt

SEQ ID NO: 4208281 - DNA, 25 bp, Homo sapien
caatgtggacgaaatcagtatgcca

SEQ ID NO: 4208282 - DNA, 25 bp, Homo sapien
ctgcaatgtggacgaaatcagtatg

SEQ ID NO: 4208283 - DNA, 25 bp, Homo sapien
ggacgaaatcagtatgccatgagag

SEQ ID NO: 4208284 - DNA, 25 bp, Homo sapien
cgaaatcagtatgccatgagagaga

SEQ ID NO: 4208285 - DNA, 25 bp, Homo sapien
ttcagatttaaagctggcaatatct

SEQ ID NO: 4208286 - DNA, 25 bp, Homo sapien
ttaaattcaggaggttcctgtatgt

SEQ ID NO: 4208287 - DNA, 25 bp, Homo sapien
aattcaggaggttcctgtatgtggg

SEQ ID NO: 4208288 - DNA, 25 bp, Homo sapien
tcagatttaaagctggcaatatctt

SEQ ID NO: 4208289 - DNA, 25 bp, Homo sapien
ggagcccacgctgaatgggaagcac

SEQ ID NO: 4208290 - DNA, 25 bp, Homo sapien
gggagcccacgctgaatgggaagca

SEQ ID NO: 4208291 - DNA, 25 bp, Homo sapien
agggagcccacgctgaatgggaagc

SEQ ID NO: 4208292 - DNA, 25 bp, Homo sapien
tctggcactgattctgccccaatag

SEQ ID NO: 4208293 - DNA, 25 bp, Homo sapien
ttctggcactgattctgccccaata

SEQ ID NO: 4208294 - DNA, 25 bp, Homo sapien
ctggcactgattctgccccaatagg

SEQ ID NO: 4208295 - DNA, 25 bp, Homo sapien
tggcactgattctgccccaatagga

SEQ ID NO: 4208296 - DNA, 25 bp, Homo sapien
aaggagccggctaggcctgaggaca

SEQ ID NO: 4208297 - DNA, 25 bp, Homo sapien
aggtcagaacccagcaaggagccgg

SEQ ID NO: 4208298 - DNA, 25 bp, Homo sapien
tgacgccagaggtgaggtcagaacc

SEQ ID NO: 4208299 - DNA, 25 bp, Homo sapien
acccagcaaggagccggctaggcct

SEQ ID NO: 4208300 - DNA, 25 bp, Homo sapien
cagacccctgtggtcattttgattt

SEQ ID NO: 4208301 - DNA, 25 bp, Homo sapien
catcataccggatgaggcctgggtg

SEQ ID NO: 4208302 - DNA, 25 bp, Homo sapien
tcatggcttcgcttgcagacccctg

SEQ ID NO: 4208303 - DNA, 25 bp, Homo sapien
gagctggggagacgattctgtccac

SEQ ID NO: 4208304 - DNA, 25 bp, Homo sapien
gaaactattggagcattggcaatga

SEQ ID NO: 4208305 - DNA, 25 bp, Homo sapien
cggaaggaaaattgaccaggggcat

SEQ ID NO: 4208306 - DNA, 25 bp, Homo sapien
gacttagaaactattggagcattgg

SEQ ID NO: 4208307 - DNA, 25 bp, Homo sapien
tattggagcattggcaatgatttcc

SEQ ID NO: 4208308 - DNA, 25 bp, Homo sapien
caacccttgttaggggtgaacagct

SEQ ID NO: 4208309 - DNA, 25 bp, Homo sapien
cagtatgcaaatggcggtgtaggaa

SEQ ID NO: 4208310 - DNA, 25 bp, Homo sapien
gagctgtgagtcacaacccttgtta

SEQ ID NO: 4208311 - DNA, 25 bp, Homo sapien
ggacacagtatgcaaatggcggtgt

SEQ ID NO: 4208312 - DNA, 25 bp, Homo sapien
agaccagaggggccttgggccttgg

SEQ ID NO: 4208313 - DNA, 25 bp, Homo sapien
accagaggggccttgggccttggcg

SEQ ID NO: 4208314 - DNA, 25 bp, Homo sapien
ctaagcccagagaccagaggggcct

SEQ ID NO: 4208315 - DNA, 25 bp, Homo sapien
cagaggggccttgggccttggcgcg

SEQ ID NO: 4208316 - DNA, 25 bp, Homo sapien
tcccacgggctgataaccctgaacg

SEQ ID NO: 4208317 - DNA, 25 bp, Homo sapien
ttgcttcccacgggctgataaccct

SEQ ID NO: 4208318 - DNA, 25 bp, Homo sapien
tcccagcgggtagagggcttgccac

SEQ ID NO: 4208319 - DNA, 25 bp, Homo sapien
ccagcgggtagagggcttgccacct

SEQ ID NO: 4208320 - DNA, 25 bp, Homo sapien
cgttctgggtcgaaccggccattgt

SEQ ID NO: 4208321 - DNA, 25 bp, Homo sapien
gattcttgcaagctgcgggtcctac

SEQ ID NO: 4208322 - DNA, 25 bp, Homo sapien
cggccattgtaagccgcgccgctgg

SEQ ID NO: 4208323 - DNA, 25 bp, Homo sapien
gaacgccgttcccaccttgcagatt

SEQ ID NO: 4208324 - DNA, 25 bp, Homo sapien
gcaatcttgccggtgctgcttggat

SEQ ID NO: 4208325 - DNA, 25 bp, Homo sapien
gacctcctggcatcccgaatgcatg

SEQ ID NO: 4208326 - DNA, 25 bp, Homo sapien
gattgctgagcaaacacttgttatt

SEQ ID NO: 4208327 - DNA, 25 bp, Homo sapien
tcccttcaagttcgagggcagagtc

SEQ ID NO: 4208328 - DNA, 25 bp, Homo sapien
tctgggtatcagatggggcttccac

SEQ ID NO: 4208329 - DNA, 25 bp, Homo sapien
ggtctgggtatcagatggggcttcc

SEQ ID NO: 4208330 - DNA, 25 bp, Homo sapien
tgggtatcagatggggcttccacag

SEQ ID NO: 4208331 - DNA, 25 bp, Homo sapien
tgcattgcatcaggggtctgggtat

SEQ ID NO: 4208332 - DNA, 25 bp, Homo sapien
cttgagaactggcagacacctttga

SEQ ID NO: 4208333 - DNA, 25 bp, Homo sapien
ctcttgagaactggcagacaccttt

SEQ ID NO: 4208334 - DNA, 25 bp, Homo sapien
gaactggcagacacctttgactgaa

SEQ ID NO: 4208335 - DNA, 25 bp, Homo sapien
agaactggcagacacctttgactga

SEQ ID NO: 4208336 - DNA, 25 bp, Homo sapien
ctgtgttcaggaactctgatagagg

SEQ ID NO: 4208337 - DNA, 25 bp, Homo sapien
tgatagaggatgactgacttcagaa

SEQ ID NO: 4208338 - DNA, 25 bp, Homo sapien
ggctatccccggcagaaccagcctg

SEQ ID NO: 4208339 - DNA, 25 bp, Homo sapien
ctctcctgttggtactagaagggac

SEQ ID NO: 4208340 - DNA, 25 bp, Homo sapien
cctgacccctccacgggattggtga

SEQ ID NO: 4208341 - DNA, 25 bp, Homo sapien
tgacaggcctgccacacagatgagg

SEQ ID NO: 4208342 - DNA, 25 bp, Homo sapien
tctagttaggcaggcccgactggag

SEQ ID NO: 4208343 - DNA, 25 bp, Homo sapien
gagtcgcagttcatcgtttctggct

SEQ ID NO: 4208344 - DNA, 25 bp, Homo sapien
aacccggtcagtgatggattcccct

SEQ ID NO: 4208345 - DNA, 25 bp, Homo sapien
gctctcattcccatcaagataacag

SEQ ID NO: 4208346 - DNA, 25 bp, Homo sapien
tgctctcctcaccatgagaggtcag

SEQ ID NO: 4208347 - DNA, 25 bp, Homo sapien
gaggtcagtgcaagaccttggacaa

SEQ ID NO: 4208348 - DNA, 25 bp, Homo sapien
tagacgctgcttgccacgtgtgtgc

SEQ ID NO: 4208349 - DNA, 25 bp, Homo sapien
tcagagaacctgagggtgtcagctt

SEQ ID NO: 4208350 - DNA, 25 bp, Homo sapien
acccagcccgttgcttgtggttgca

SEQ ID NO: 4208351 - DNA, 25 bp, Homo sapien
accccattcagtgtggtgctcagag

SEQ ID NO: 4208352 - DNA, 25 bp, Homo sapien
atttgtcctttgcagctggtatctt

SEQ ID NO: 4208353 - DNA, 25 bp, Homo sapien
gatttttagtacaagtcctttcatg

SEQ ID NO: 4208354 - DNA, 25 bp, Homo sapien
taaaaatgactaattcttagaactg

SEQ ID NO: 4208355 - DNA, 25 bp, Homo sapien
tataaccccattattaacaccacag

SEQ ID NO: 4208356 - DNA, 25 bp, Homo sapien
tatacagataaaattgcagacactg

SEQ ID NO: 4208357 - DNA, 25 bp, Homo sapien
gaactggagcgtgaattctgtaaaa

SEQ ID NO: 4208358 - DNA, 25 bp, Homo sapien
cttaacactggtttgtctgcatgtg

SEQ ID NO: 4208359 - DNA, 25 bp, Homo sapien
gcacattaaaatgccctagcagtat

SEQ ID NO: 4208360 - DNA, 25 bp, Homo sapien
gacatcatagggacaggcgtgaacg

SEQ ID NO: 4208361 - DNA, 25 bp, Homo sapien
aagtctcgggatcactcagatgcag

SEQ ID NO: 4208362 - DNA, 25 bp, Homo sapien
gctcgagatcaagaagcaggtcccg

SEQ ID NO: 4208363 - DNA, 25 bp, Homo sapien
ttaaggccaagcataccagagatga

SEQ ID NO: 4208364 - DNA, 25 bp, Homo sapien
gcttgagggccatagtattgttcat

SEQ ID NO: 4208365 - DNA, 25 bp, Homo sapien
taaaaagcatagctctaggacacta

SEQ ID NO: 4208366 - DNA, 25 bp, Homo sapien
gtaggagctacccacaaagtgcttg

SEQ ID NO: 4208367 - DNA, 25 bp, Homo sapien
tatatataggcttgggcatacagca

SEQ ID NO: 4208368 - DNA, 25 bp, Homo sapien
ccagagactatagcatgtgcttgca

SEQ ID NO: 4208369 - DNA, 25 bp, Homo sapien
ggtttgtttacatgcaagcttatag

SEQ ID NO: 4208370 - DNA, 25 bp, Homo sapien
ccaatgtgtttgttcgatttcaacc

SEQ ID NO: 4208371 - DNA, 25 bp, Homo sapien
gaatgacagtcttcgaaccaatgtg

SEQ ID NO: 4208372 - DNA, 25 bp, Homo sapien
ggcagcatcttctagttctgtcggg

SEQ ID NO: 4208373 - DNA, 25 bp, Homo sapien
gatggcctgattggctaccctgctc

SEQ ID NO: 4208374 - DNA, 25 bp, Homo sapien
tctcatccgagattcactgaagtgg

SEQ ID NO: 4208375 - DNA, 25 bp, Homo sapien
gaagtggtccatatccatctggcag

SEQ ID NO: 4208376 - DNA, 25 bp, Homo sapien
actttagtgacactgatattagtaa

SEQ ID NO: 4208377 - DNA, 25 bp, Homo sapien
cagtcaaatagcagtgggagattgt

SEQ ID NO: 4208378 - DNA, 25 bp, Homo sapien
ccagtcaaatagcagtgggagattg

SEQ ID NO: 4208379 - DNA, 25 bp, Homo sapien
tcaaatagcagtgggagattgtata

SEQ ID NO: 4208380 - DNA, 25 bp, Homo sapien
cagcgaccagctacatttaccaaag

SEQ ID NO: 4208381 - DNA, 25 bp, Homo sapien
tttaccaaagcctgggtgatgtgga

SEQ ID NO: 4208382 - DNA, 25 bp, Homo sapien
tactcaagcacgtaacttgtatatg

SEQ ID NO: 4208383 - DNA, 25 bp, Homo sapien
ttgcaaccgactatacagcgaccag

SEQ ID NO: 4208384 - DNA, 25 bp, Homo sapien
tgacccctgcgcttccgttctcctc

SEQ ID NO: 4208385 - DNA, 25 bp, Homo sapien
ggcggcgcctggagcgggcccgcct

SEQ ID NO: 4208386 - DNA, 25 bp, Homo sapien
ctgcgcttccgttctcctctcttgt

SEQ ID NO: 4208387 - DNA, 25 bp, Homo sapien
ccctgcgcttccgttctcctctctt

SEQ ID NO: 4208388 - DNA, 25 bp, Homo sapien
ggcgatcgcctgtactcggaagttt

SEQ ID NO: 4208389 - DNA, 25 bp, Homo sapien
accacgacgacgaccacgacgggag

SEQ ID NO: 4208390 - DNA, 25 bp, Homo sapien
agctccgggacgacgaccacgacga

SEQ ID NO: 4208391 - DNA, 25 bp, Homo sapien
gagggatcctgatcggcgatcgcct

SEQ ID NO: 4208392 - DNA, 25 bp, Homo sapien
gtccgggcctcattcgacagctact

SEQ ID NO: 4208393 - DNA, 25 bp, Homo sapien
cttgtttcgggttccggctgcgttg

SEQ ID NO: 4208394 - DNA, 25 bp, Homo sapien
tcgctaagactatggcgtccgggcc

SEQ ID NO: 4208395 - DNA, 25 bp, Homo sapien
cgccgagaacgctggttagtcttgt

SEQ ID NO: 4208396 - DNA, 25 bp, Homo sapien
tatattacacattcgtccacacagg

SEQ ID NO: 4208397 - DNA, 25 bp, Homo sapien
tgaggatcccaaggtctgtcgcagc

SEQ ID NO: 4208398 - DNA, 25 bp, Homo sapien
tgtaaagctccgttattcgtgtggc

SEQ ID NO: 4208399 - DNA, 25 bp, Homo sapien
ttcgaccggccttggctagagaagg

SEQ ID NO: 4208400 - DNA, 25 bp, Homo sapien
aataggatacgagatttcagcgagg

SEQ ID NO: 4208401 - DNA, 25 bp, Homo sapien
aatcttgtgaaaaagtccctccagg

SEQ ID NO: 4208402 - DNA, 25 bp, Homo sapien
tcaagagtaaaacgtgatgcattcc

SEQ ID NO: 4208403 - DNA, 25 bp, Homo sapien
gaggcttctctagtcaggaaaggaa

SEQ ID NO: 4208404 - DNA, 25 bp, Homo sapien
ggctgggcccaccttaaatcagtga

SEQ ID NO: 4208405 - DNA, 25 bp, Homo sapien
caggcaaggctcaagtatcagtaca

SEQ ID NO: 4208406 - DNA, 25 bp, Homo sapien
tgacatcaacctctgcaggcaaggc

SEQ ID NO: 4208407 - DNA, 25 bp, Homo sapien
tgaagacagtgacatccagataggt

SEQ ID NO: 4208408 - DNA, 25 bp, Homo sapien
gggagtagagccactagccccaatg

SEQ ID NO: 4208409 - DNA, 25 bp, Homo sapien
cctccaattagggtatgtcatagat

SEQ ID NO: 4208410 - DNA, 25 bp, Homo sapien
cagagagtagaggtccactgggaac

SEQ ID NO: 4208411 - DNA, 25 bp, Homo sapien
atttgaccctgaaagaataggacag

SEQ ID NO: 4208412 - DNA, 25 bp, Homo sapien
ctaattctcaacagagtcagcagca

SEQ ID NO: 4208413 - DNA, 25 bp, Homo sapien
caaggagaccatttgggaggctact

SEQ ID NO: 4208414 - DNA, 25 bp, Homo sapien
tagaaggaaggaccaacagaacttg

SEQ ID NO: 4208415 - DNA, 25 bp, Homo sapien
gatgtaccaggcagcgtatgcctaa

SEQ ID NO: 4208416 - DNA, 25 bp, Homo sapien
gaggtcataaatgctaggagaggct

SEQ ID NO: 4208417 - DNA, 25 bp, Homo sapien
ctggttgtcccacgcagaatcagag

SEQ ID NO: 4208418 - DNA, 25 bp, Homo sapien
ttcctgtcttacaaagctccctctg

SEQ ID NO: 4208419 - DNA, 25 bp, Homo sapien
caggaaaactgtacgtagagaagct

SEQ ID NO: 4208420 - DNA, 25 bp, Homo sapien
ataaatacgcatttcttctcttcac

SEQ ID NO: 4208421 - DNA, 25 bp, Homo sapien
tatccagaagatgaagagcagagca

SEQ ID NO: 4208422 - DNA, 25 bp, Homo sapien
gcaaaaagcaaatgatagccgtggc

SEQ ID NO: 4208423 - DNA, 25 bp, Homo sapien
caagcagtgtgttacgaggtttatc

SEQ ID NO: 4208424 - DNA, 25 bp, Homo sapien
aaaaacagttcttaggcagcgccgg

SEQ ID NO: 4208425 - DNA, 25 bp, Homo sapien
tgacggggcgtaggcagcagactac

SEQ ID NO: 4208426 - DNA, 25 bp, Homo sapien
cggggcgtaggcagcagactaccac

SEQ ID NO: 4208427 - DNA, 25 bp, Homo sapien
ctgacggggcgtaggcagcagacta

SEQ ID NO: 4208428 - DNA, 25 bp, Homo sapien
acggggcgtaggcagcagactacca

SEQ ID NO: 4208429 - DNA, 25 bp, Homo sapien
tgcaggggttgcgggggactcaggc

SEQ ID NO: 4208430 - DNA, 25 bp, Homo sapien
ctgcaggggttgcgggggactcagg

SEQ ID NO: 4208431 - DNA, 25 bp, Homo sapien
tgaccgcgatcgttcctggcttgga

SEQ ID NO: 4208432 - DNA, 25 bp, Homo sapien
tgctgccgggtcttgcacatgttcc

SEQ ID NO: 4208433 - DNA, 25 bp, Homo sapien
cacatgttccgtggcagagctgacc

SEQ ID NO: 4208434 - DNA, 25 bp, Homo sapien
aacgctagcgggtaagttagatccg

SEQ ID NO: 4208435 - DNA, 25 bp, Homo sapien
ggcaatagagccgaactaagacaga

SEQ ID NO: 4208436 - DNA, 25 bp, Homo sapien
gaagagtcaagctcgcggcaataga

SEQ ID NO: 4208437 - DNA, 25 bp, Homo sapien
gattctgcggcttacgtcacaagag

SEQ ID NO: 4208438 - DNA, 25 bp, Homo sapien
taaaaggcgatgaactagctcgagg

SEQ ID NO: 4208439 - DNA, 25 bp, Homo sapien
taacggcggcagtattcaagcgggc

SEQ ID NO: 4208440 - DNA, 25 bp, Homo sapien
gcagacaaaaccttcggcccttata

SEQ ID NO: 4208441 - DNA, 25 bp, Homo sapien
tgtcatttcatatggctggcactcc

SEQ ID NO: 4208442 - DNA, 25 bp, Homo sapien
gccgagagaacgcatgaacacaacc

SEQ ID NO: 4208443 - DNA, 25 bp, Homo sapien
ccaccacactgaaaaggctactgaa

SEQ ID NO: 4208444 - DNA, 25 bp, Homo sapien
taacaatatccactggcagaactgg

SEQ ID NO: 4208445 - DNA, 25 bp, Homo sapien
taaaggactcaaatcacctaaggaa

SEQ ID NO: 4208446 - DNA, 25 bp, Homo sapien
tgaatagacaatgaacgcctgtgat

SEQ ID NO: 4208447 - DNA, 25 bp, Homo sapien
acggtgcttctgtgatttgtagagg

SEQ ID NO: 4208448 - DNA, 25 bp, Homo sapien
tagattgaagatcacagagagtatc

SEQ ID NO: 4208449 - DNA, 25 bp, Homo sapien
tattttctttcagtataggcagctg

SEQ ID NO: 4208450 - DNA, 25 bp, Homo sapien
gagaacaagatcgaataacggtgct

SEQ ID NO: 4208451 - DNA, 25 bp, Homo sapien
gctggaggttaggaccactagcaac

SEQ ID NO: 4208452 - DNA, 25 bp, Homo sapien
tagcaacaatactccaatgggtgat

SEQ ID NO: 4208453 - DNA, 25 bp, Homo sapien
aacagtggcagcaaggcgggtccat

SEQ ID NO: 4208454 - DNA, 25 bp, Homo sapien
tgggctgcatgctataactctaggg

SEQ ID NO: 4208455 - DNA, 25 bp, Homo sapien
gccatctgcagccatgtctaattca

SEQ ID NO: 4208456 - DNA, 25 bp, Homo sapien
tgcaggtgtcattttggtaggacca

SEQ ID NO: 4208457 - DNA, 25 bp, Homo sapien
caactgctttccatagggtctgaac

SEQ ID NO: 4208458 - DNA, 25 bp, Homo sapien
tctctctgcttagatgccatctgca

SEQ ID NO: 4208459 - DNA, 25 bp, Homo sapien
gctggctctgcaaatcctctggctc

SEQ ID NO: 4208460 - DNA, 25 bp, Homo sapien
gatccctggttggaggcctctggtt

SEQ ID NO: 4208461 - DNA, 25 bp, Homo sapien
ggcagagggtgtcttacccacatgt

SEQ ID NO: 4208462 - DNA, 25 bp, Homo sapien
ctggcaggcttgcaccagggagctt

SEQ ID NO: 4208463 - DNA, 25 bp, Homo sapien
actcacgatccatctgtggaatttc

SEQ ID NO: 4208464 - DNA, 25 bp, Homo sapien
cactcacgatccatctgtggaattt

SEQ ID NO: 4208465 - DNA, 25 bp, Homo sapien
ttgggaaaggcaggtacaagatcaa

SEQ ID NO: 4208466 - DNA, 25 bp, Homo sapien
tgggaaaggcaggtacaagatcaag

SEQ ID NO: 4208467 - DNA, 25 bp, Homo sapien
aaaaatctgggagaggacatcagcc

SEQ ID NO: 4208468 - DNA, 25 bp, Homo sapien
tttggcagaaccatgcagagtgtgg

SEQ ID NO: 4208469 - DNA, 25 bp, Homo sapien
tggcccaaatgggtactggcacatt

SEQ ID NO: 4208470 - DNA, 25 bp, Homo sapien
tgcaaccagtgggacaattgatccc

SEQ ID NO: 4208471 - DNA, 25 bp, Homo sapien
tcatttgagataacacgggctcctc

SEQ ID NO: 4208472 - DNA, 25 bp, Homo sapien
catttgagataacacgggctcctcc

SEQ ID NO: 4208473 - DNA, 25 bp, Homo sapien
tcctcctacactggaacactgtctg

SEQ ID NO: 4208474 - DNA, 25 bp, Homo sapien
cactttttgaccatgcagactttct

SEQ ID NO: 4208475 - DNA, 25 bp, Homo sapien
tcacagtagctctcgttggtgccct

SEQ ID NO: 4208476 - DNA, 25 bp, Homo sapien
gtggtgtggtgatctggaaagatcc

SEQ ID NO: 4208477 - DNA, 25 bp, Homo sapien
tcaaaacaataatccataaagaatc

SEQ ID NO: 4208478 - DNA, 25 bp, Homo sapien
tccataaagaatcaaagactagacc

SEQ ID NO: 4208479 - DNA, 25 bp, Homo sapien
acagactaagacatacatcaaaaca

SEQ ID NO: 4208480 - DNA, 25 bp, Homo sapien
tcaaagactagaccttttaagctaa

SEQ ID NO: 4208481 - DNA, 25 bp, Homo sapien
tgtactagcatgtcagaaacccaaa

SEQ ID NO: 4208482 - DNA, 25 bp, Homo sapien
gcagcatagccttttgagggcccta

SEQ ID NO: 4208483 - DNA, 25 bp, Homo sapien
caaggccttgcctattgtactagca

SEQ ID NO: 4208484 - DNA, 25 bp, Homo sapien
taaacctcaaagctgtgtatgggca

SEQ ID NO: 4208485 - DNA, 25 bp, Homo sapien
ggcactcgctatgcttgaactatgg

SEQ ID NO: 4208486 - DNA, 25 bp, Homo sapien
gccttgcagcgggaagaactttatc

SEQ ID NO: 4208487 - DNA, 25 bp, Homo sapien
tcccctgaggatcccaagagagttc

SEQ ID NO: 4208488 - DNA, 25 bp, Homo sapien
gatgaagaatgaagctcggagcctt

SEQ ID NO: 4208489 - DNA, 25 bp, Homo sapien
actgtggtcacttcaatgttggctc

SEQ ID NO: 4208490 - DNA, 25 bp, Homo sapien
gcaagaccatatggaactgtggtca

SEQ ID NO: 4208491 - DNA, 25 bp, Homo sapien
tggctctttcgttcactaatatcac

SEQ ID NO: 4208492 - DNA, 25 bp, Homo sapien
ttctgtgtacatgataactttttgt

SEQ ID NO: 4208493 - DNA, 25 bp, Homo sapien
tgcaggaccacaggatttaggactt

SEQ ID NO: 4208494 - DNA, 25 bp, Homo sapien
tggtccatttgcaaaacgtaagctt

SEQ ID NO: 4208495 - DNA, 25 bp, Homo sapien
gaaccacgctacaaatgcaaaagag

SEQ ID NO: 4208496 - DNA, 25 bp, Homo sapien
tggttccatgccaagggtctaaact

SEQ ID NO: 4208497 - DNA, 25 bp, Homo sapien
gaggacccagctaaatcacgtttgg

SEQ ID NO: 4208498 - DNA, 25 bp, Homo sapien
caagctgccatgagctctacggctg

SEQ ID NO: 4208499 - DNA, 25 bp, Homo sapien
tctacggctgcaaggaaataagttt

SEQ ID NO: 4208500 - DNA, 25 bp, Homo sapien
tgggtgggacatgtaacctgcttct

SEQ ID NO: 4208501 - DNA, 25 bp, Homo sapien
tgtgcacagatctagcctggtactt

SEQ ID NO: 4208502 - DNA, 25 bp, Homo sapien
gttccagttagaccctgtgcacaga

SEQ ID NO: 4208503 - DNA, 25 bp, Homo sapien
taagtgcctctcagtgtgttccagt

SEQ ID NO: 4208504 - DNA, 25 bp, Homo sapien
tgccccagtttagaataagtgcctc

SEQ ID NO: 4208505 - DNA, 25 bp, Homo sapien
gaggccctgacatgatttataattg

SEQ ID NO: 4208506 - DNA, 25 bp, Homo sapien
cagaaattgacagtatctcagctta

SEQ ID NO: 4208507 - DNA, 25 bp, Homo sapien
tacttcttaactgtgtagactcagc

SEQ ID NO: 4208508 - DNA, 25 bp, Homo sapien
ccagtaatgtacagatagtcagagg

SEQ ID NO: 4208509 - DNA, 25 bp, Homo sapien
agtatcagccattttgccctaaaag

SEQ ID NO: 4208510 - DNA, 25 bp, Homo sapien
ggaagcagtatcagccattttgccc

SEQ ID NO: 4208511 - DNA, 25 bp, Homo sapien
gccattttgccctaaaagtattcat

SEQ ID NO: 4208512 - DNA, 25 bp, Homo sapien
ctatatgtggttatcaaggaagcag

SEQ ID NO: 4208513 - DNA, 25 bp, Homo sapien
ctaagaaccatttgtgccccaaatt

SEQ ID NO: 4208514 - DNA, 25 bp, Homo sapien
gccccaaattacagggatctgtcag

SEQ ID NO: 4208515 - DNA, 25 bp, Homo sapien
ccatttgtgccccaaattacaggga

SEQ ID NO: 4208516 - DNA, 25 bp, Homo sapien
aaattacagggatctgtcagctcca

SEQ ID NO: 4208517 - DNA, 25 bp, Homo sapien
aaagcaactggtgagagacccttac

SEQ ID NO: 4208518 - DNA, 25 bp, Homo sapien
gagaaagcaactggtgagagaccct

SEQ ID NO: 4208519 - DNA, 25 bp, Homo sapien
agaaagcaactggtgagagaccctt

SEQ ID NO: 4208520 - DNA, 25 bp, Homo sapien
gaaagcaactggtgagagaccctta

SEQ ID NO: 4208521 - DNA, 25 bp, Homo sapien
tggcaatgcttcatgtgcaacaatc

SEQ ID NO: 4208522 - DNA, 25 bp, Homo sapien
tctcagaatgttaggtagcaggcag

SEQ ID NO: 4208523 - DNA, 25 bp, Homo sapien
caatgctgcctcttagtctttagta

SEQ ID NO: 4208524 - DNA, 25 bp, Homo sapien
gattgagcattgaccatcctgatcc

SEQ ID NO: 4208525 - DNA, 25 bp, Homo sapien
tttatatttggtttcatctttggct

SEQ ID NO: 4208526 - DNA, 25 bp, Homo sapien
ttttatatttggtttcatctttggc

SEQ ID NO: 4208527 - DNA, 25 bp, Homo sapien
gaagggtgattaggttccatggaac

SEQ ID NO: 4208528 - DNA, 25 bp, Homo sapien
taagttttaatgaccccagctatag

SEQ ID NO: 4208529 - DNA, 25 bp, Homo sapien
tttgggttacaagttatgctttaca

SEQ ID NO: 4208530 - DNA, 25 bp, Homo sapien
tctaatacttacattttgggttaca

SEQ ID NO: 4208531 - DNA, 25 bp, Homo sapien
acacagtagggtagagactcgggca

SEQ ID NO: 4208532 - DNA, 25 bp, Homo sapien
tcagcacgagatgtaggtaggagac

SEQ ID NO: 4208533 - DNA, 25 bp, Homo sapien
gacattgttatcagctttggagaca

SEQ ID NO: 4208534 - DNA, 25 bp, Homo sapien
ggagtgcgggcaatgtaatatcagc

SEQ ID NO: 4208535 - DNA, 25 bp, Homo sapien
ttttctaatgagctaaaagcatata

SEQ ID NO: 4208536 - DNA, 25 bp, Homo sapien
caaatacaatcagcctttctctttt

SEQ ID NO: 4208537 - DNA, 25 bp, Homo sapien
tctaatgagctaaaagcatatactt

SEQ ID NO: 4208538 - DNA, 25 bp, Homo sapien
tcctttttctaatgagctaaaagca

SEQ ID NO: 4208539 - DNA, 25 bp, Homo sapien
aggaaccataccttatacctcctcg

SEQ ID NO: 4208540 - DNA, 25 bp, Homo sapien
ccataccttatacctcctcgtggcc

SEQ ID NO: 4208541 - DNA, 25 bp, Homo sapien
ataccttatacctcctcgtggccct

SEQ ID NO: 4208542 - DNA, 25 bp, Homo sapien
gaaccataccttatacctcctcgtg

SEQ ID NO: 4208543 - DNA, 25 bp, Homo sapien
gcctggtccccgcagacttgatctt

SEQ ID NO: 4208544 - DNA, 25 bp, Homo sapien
acatagaaggagtgtctgcaagacc

SEQ ID NO: 4208545 - DNA, 25 bp, Homo sapien
tttggcaagtcccataacatggctg

SEQ ID NO: 4208546 - DNA, 25 bp, Homo sapien
ggatcaaactccagaaatcggcagc

SEQ ID NO: 4208547 - DNA, 25 bp, Homo sapien
taattattaactgtaatttgggcca

SEQ ID NO: 4208548 - DNA, 25 bp, Homo sapien
acttagggtacactgggagcttcca

SEQ ID NO: 4208549 - DNA, 25 bp, Homo sapien
gaagcatgtgaaggacctgctcagg

SEQ ID NO: 4208550 - DNA, 25 bp, Homo sapien
cacaagggcactatagactgagaag

SEQ ID NO: 4208551 - DNA, 25 bp, Homo sapien
cctgaaaggcatctagagcagcagt

SEQ ID NO: 4208552 - DNA, 25 bp, Homo sapien
gccatatatgccagggacctcgcat

SEQ ID NO: 4208553 - DNA, 25 bp, Homo sapien
acttctgccatatatgccagggacc

SEQ ID NO: 4208554 - DNA, 25 bp, Homo sapien
tgacacttctgccatatatgccagg

SEQ ID NO: 4208555 - DNA, 25 bp, Homo sapien
tctgccatatatgccagggacctcg

SEQ ID NO: 4208556 - DNA, 25 bp, Homo sapien
acttgcctccctcggctcttcgtgc

SEQ ID NO: 4208557 - DNA, 25 bp, Homo sapien
ccttcatggtaaagcagcctctcca

SEQ ID NO: 4208558 - DNA, 25 bp, Homo sapien
ttgtaatggggtattgtggagtccc

SEQ ID NO: 4208559 - DNA, 25 bp, Homo sapien
tcggctcttcgtgctctgttcctgc

SEQ ID NO: 4208560 - DNA, 25 bp, Homo sapien
ccttaataaatgctgaggaaagcct

SEQ ID NO: 4208561 - DNA, 25 bp, Homo sapien
ctggagagacgcaaagttctttcca

SEQ ID NO: 4208562 - DNA, 25 bp, Homo sapien
gagagacgcaaagttctttccacag

SEQ ID NO: 4208563 - DNA, 25 bp, Homo sapien
gcagagagtccttaataaatgctga

SEQ ID NO: 4208564 - DNA, 25 bp, Homo sapien
gagcacaaaacagaatcgcaaggag

SEQ ID NO: 4208565 - DNA, 25 bp, Homo sapien
acaaaacagaatcgcaaggagatgc

SEQ ID NO: 4208566 - DNA, 25 bp, Homo sapien
aaaacagaatcgcaaggagatgcat

SEQ ID NO: 4208567 - DNA, 25 bp, Homo sapien
gcacaaaacagaatcgcaaggagat

SEQ ID NO: 4208568 - DNA, 25 bp, Homo sapien
cgttgtccaaattcacatacatgag

SEQ ID NO: 4208569 - DNA, 25 bp, Homo sapien
gtccattgtctatttcgttgtccaa

SEQ ID NO: 4208570 - DNA, 25 bp, Homo sapien
agatcataatcatccgagttctcgg

SEQ ID NO: 4208571 - DNA, 25 bp, Homo sapien
taatcatccgagttctcggccaaca

SEQ ID NO: 4208572 - DNA, 25 bp, Homo sapien
cagcatgcgctctctcatctgcgag

SEQ ID NO: 4208573 - DNA, 25 bp, Homo sapien
aggacgtcgtccgtggcttgcagca

SEQ ID NO: 4208574 - DNA, 25 bp, Homo sapien
tcgtccagagcactggtcagcctgg

SEQ ID NO: 4208575 - DNA, 25 bp, Homo sapien
gatgaagagcttgtcccattccgag

SEQ ID NO: 4208576 - DNA, 25 bp, Homo sapien
catctcaacagtggtagccgccagt

SEQ ID NO: 4208577 - DNA, 25 bp, Homo sapien
tctgaattccaggtgccgcacaggt

SEQ ID NO: 4208578 - DNA, 25 bp, Homo sapien
aaaatcttcttggaacgcattggga

SEQ ID NO: 4208579 - DNA, 25 bp, Homo sapien
ctctttgtgccataggaaaacagga

SEQ ID NO: 4208580 - DNA, 25 bp, Homo sapien
gagtttatctgacagagacacagca

SEQ ID NO: 4208581 - DNA, 25 bp, Homo sapien
tatcttctcaaaaacgtgacattcg

SEQ ID NO: 4208582 - DNA, 25 bp, Homo sapien
gcaccatggcataaagtctagtaac

SEQ ID NO: 4208583 - DNA, 25 bp, Homo sapien
cagcattaaactgaaagcaccatgg

SEQ ID NO: 4208584 - DNA, 25 bp, Homo sapien
gatagcttatttagttgagtgtgta

SEQ ID NO: 4208585 - DNA, 25 bp, Homo sapien
atttagttgagtgtgtaatgaaagc

SEQ ID NO: 4208586 - DNA, 25 bp, Homo sapien
gctttggcttgtattttgaggccat

SEQ ID NO: 4208587 - DNA, 25 bp, Homo sapien
tgtgtaatgaaagctttggcttgta

SEQ ID NO: 4208588 - DNA, 25 bp, Homo sapien
tccctacagaaagctgattcgccag

SEQ ID NO: 4208589 - DNA, 25 bp, Homo sapien
gcaccggctccgcaatgaacaactt

SEQ ID NO: 4208590 - DNA, 25 bp, Homo sapien
taaagtcgagtttgcgcgggacagc

SEQ ID NO: 4208591 - DNA, 25 bp, Homo sapien
caagggcgcctttgaggagtagcac

SEQ ID NO: 4208592 - DNA, 25 bp, Homo sapien
acgcggctgcagcccacaggactgg

SEQ ID NO: 4208593 - DNA, 25 bp, Homo sapien
agggagacgcggctgcagcccacag

SEQ ID NO: 4208594 - DNA, 25 bp, Homo sapien
cactggcttgacaggcagctcaggg

SEQ ID NO: 4208595 - DNA, 25 bp, Homo sapien
cagctcagggagacgcggctgcagc

SEQ ID NO: 4208596 - DNA, 25 bp, Homo sapien
agaggaggagctttcactatcagcc

SEQ ID NO: 4208597 - DNA, 25 bp, Homo sapien
tctgagtcatcaggcgagactcctc

SEQ ID NO: 4208598 - DNA, 25 bp, Homo sapien
tcagatctctgtcacatgttcagcc

SEQ ID NO: 4208599 - DNA, 25 bp, Homo sapien
tgggcccaaatccttagacccttga

SEQ ID NO: 4208600 - DNA, 25 bp, Homo sapien
tagatgccatactgtgggtcaccga

SEQ ID NO: 4208601 - DNA, 25 bp, Homo sapien
tactgtgggtcaccgaggactggtc

SEQ ID NO: 4208602 - DNA, 25 bp, Homo sapien
tgtgggtcaccgaggactggtccat

SEQ ID NO: 4208603 - DNA, 25 bp, Homo sapien
gccatactgtgggtcaccgaggact

SEQ ID NO: 4208604 - DNA, 25 bp, Homo sapien
tggggacaccagtgcatacataaac

SEQ ID NO: 4208605 - DNA, 25 bp, Homo sapien
ctttggggacaccagtgcatacata

SEQ ID NO: 4208606 - DNA, 25 bp, Homo sapien
tctttggggacaccagtgcatacat

SEQ ID NO: 4208607 - DNA, 25 bp, Homo sapien
cagcaggatatgcactgccagaagt

SEQ ID NO: 4208608 - DNA, 25 bp, Homo sapien
tgagaagtcgctgaacaagagtgtc

SEQ ID NO: 4208609 - DNA, 25 bp, Homo sapien
tgagtgagaagtcgctgaacaagag

SEQ ID NO: 4208610 - DNA, 25 bp, Homo sapien
agtcgctgaacaagagtgtcaaatt

SEQ ID NO: 4208611 - DNA, 25 bp, Homo sapien
ttaatgagtgagaagtcgctgaaca

SEQ ID NO: 4208612 - DNA, 25 bp, Homo sapien
cttctctggatcctgttccttggag

SEQ ID NO: 4208613 - DNA, 25 bp, Homo sapien
taagtgattgtgtctataaagtctt

SEQ ID NO: 4208614 - DNA, 25 bp, Homo sapien
caaacaccactttcatctttatata

SEQ ID NO: 4208615 - DNA, 25 bp, Homo sapien
ccaaacaccactttcatctttatat

SEQ ID NO: 4208616 - DNA, 25 bp, Homo sapien
ataagtgattgtgtctataaagtct

SEQ ID NO: 4208617 - DNA, 25 bp, Homo sapien
tctcatcactacaattgcaccaaga

SEQ ID NO: 4208618 - DNA, 25 bp, Homo sapien
tcttaagtgctgaaataatcccagg

SEQ ID NO: 4208619 - DNA, 25 bp, Homo sapien
caatcctcactcttaagtgctgaaa

SEQ ID NO: 4208620 - DNA, 25 bp, Homo sapien
tttcaaattggcagctccccagcag

SEQ ID NO: 4208621 - DNA, 25 bp, Homo sapien
aggaggctgccctgcgttggccagc

SEQ ID NO: 4208622 - DNA, 25 bp, Homo sapien
caaggaaatgtaccgccgtgttcgg

SEQ ID NO: 4208623 - DNA, 25 bp, Homo sapien
agaaacccacagcacgcacgcagga

SEQ ID NO: 4208624 - DNA, 25 bp, Homo sapien
ccggcgcctccgagagatcagggaa

SEQ ID NO: 4208625 - DNA, 25 bp, Homo sapien
gcttctacagcatgaatgtagaaga

SEQ ID NO: 4208626 - DNA, 25 bp, Homo sapien
tatagtttcccacgactttcatagc

SEQ ID NO: 4208627 - DNA, 25 bp, Homo sapien
gctctccggacgtatcagtgcttga

SEQ ID NO: 4208628 - DNA, 25 bp, Homo sapien
cttctaaggcaggtcaagtgctctc

SEQ ID NO: 4208629 - DNA, 25 bp, Homo sapien
tgaagttggctacaaattgttttca

SEQ ID NO: 4208630 - DNA, 25 bp, Homo sapien
actgaagttggctacaaattgtttt

SEQ ID NO: 4208631 - DNA, 25 bp, Homo sapien
ctgaagttggctacaaattgttttc

SEQ ID NO: 4208632 - DNA, 25 bp, Homo sapien
cacaaatcttcctgtcctctactga

SEQ ID NO: 4208633 - DNA, 25 bp, Homo sapien
tctggatggttgatgttgctggttc

SEQ ID NO: 4208634 - DNA, 25 bp, Homo sapien
tgcaatttaatgtcagaaggaatct

SEQ ID NO: 4208635 - DNA, 25 bp, Homo sapien
gatacgcagttgcacctgtgattcc

SEQ ID NO: 4208636 - DNA, 25 bp, Homo sapien
cttaacttatgagagagcaacaaac

SEQ ID NO: 4208637 - DNA, 25 bp, Homo sapien
gaacatttgttcaatagcaagccca

SEQ ID NO: 4208638 - DNA, 25 bp, Homo sapien
gttacactatagacttgaaatccaa

SEQ ID NO: 4208639 - DNA, 25 bp, Homo sapien
tataatcatgctacagtattcccag

SEQ ID NO: 4208640 - DNA, 25 bp, Homo sapien
gaataggcagttggttagtcaggta

SEQ ID NO: 4208641 - DNA, 25 bp, Homo sapien
caggtagcagcctttgaaatttgtc

SEQ ID NO: 4208642 - DNA, 25 bp, Homo sapien
tgtcaggtctccacctatccagcaa

SEQ ID NO: 4208643 - DNA, 25 bp, Homo sapien
tccagaaaacccagagagactgctt

SEQ ID NO: 4208644 - DNA, 25 bp, Homo sapien
ttaacctgtagtacatgaattgtga

SEQ ID NO: 4208645 - DNA, 25 bp, Homo sapien
cgtgttcatgtcgaagatggctgta

SEQ ID NO: 4208646 - DNA, 25 bp, Homo sapien
tgattctttaacctgtagtacatga

SEQ ID NO: 4208647 - DNA, 25 bp, Homo sapien
aattgtgagagtatgattacatccg

SEQ ID NO: 4208648 - DNA, 25 bp, Homo sapien
tctaaaagcatttgactattcctgc

SEQ ID NO: 4208649 - DNA, 25 bp, Homo sapien
ctaaaagcatttgactattcctgcc

SEQ ID NO: 4208650 - DNA, 25 bp, Homo sapien
ctgcaggaacctctaaaagcatttg

SEQ ID NO: 4208651 - DNA, 25 bp, Homo sapien
gggattgagccctggcattctgtca

SEQ ID NO: 4208652 - DNA, 25 bp, Homo sapien
ataaagattaccttttttgcttctg

SEQ ID NO: 4208653 - DNA, 25 bp, Homo sapien
cagcacttctacaatatttttgtgg

SEQ ID NO: 4208654 - DNA, 25 bp, Homo sapien
aaaatacttcctggactaacctcag

SEQ ID NO: 4208655 - DNA, 25 bp, Homo sapien
ctgcctgtagatgggccaagtgggc

SEQ ID NO: 4208656 - DNA, 25 bp, Homo sapien
tctcttcagtctgggtcaagccttt

SEQ ID NO: 4208657 - DNA, 25 bp, Homo sapien
cttcagtctgggtcaagcctttctg

SEQ ID NO: 4208658 - DNA, 25 bp, Homo sapien
ggcaggttcaccagaagaatgggtc

SEQ ID NO: 4208659 - DNA, 25 bp, Homo sapien
gatttagacaacaattccagctgat

SEQ ID NO: 4208660 - DNA, 25 bp, Homo sapien
aatcgagatcccaagtagaatacac

SEQ ID NO: 4208661 - DNA, 25 bp, Homo sapien
tctgccattaatatgcaaacccagg

SEQ ID NO: 4208662 - DNA, 25 bp, Homo sapien
tgcctaaacttgaaggagcttaaca

SEQ ID NO: 4208663 - DNA, 25 bp, Homo sapien
taagccaaggaagatgatgcacaaa

SEQ ID NO: 4208664 - DNA, 25 bp, Homo sapien
gaagttcccaatcatggccaatgca

SEQ ID NO: 4208665 - DNA, 25 bp, Homo sapien
tcttgtgacacgtagcagctggtgc

SEQ ID NO: 4208666 - DNA, 25 bp, Homo sapien
taaaaccacaccaagtccatacgtg

SEQ ID NO: 4208667 - DNA, 25 bp, Homo sapien
gagattttcagagatggtatggttt

SEQ ID NO: 4208668 - DNA, 25 bp, Homo sapien
atttcaatgcttctaaacttggccc

SEQ ID NO: 4208669 - DNA, 25 bp, Homo sapien
gcattagctatttacacttcttaga

SEQ ID NO: 4208670 - DNA, 25 bp, Homo sapien
catctgaatttgatcgtttgctaga

SEQ ID NO: 4208671 - DNA, 25 bp, Homo sapien
tccgagcacttggatggctcagtgt

SEQ ID NO: 4208672 - DNA, 25 bp, Homo sapien
tggctcagtgtgaaaggaagagcta

SEQ ID NO: 4208673 - DNA, 25 bp, Homo sapien
cttaaaagacactgtttccgagcac

SEQ ID NO: 4208674 - DNA, 25 bp, Homo sapien
taactctccggagcaactctgattt

SEQ ID NO: 4208675 - DNA, 25 bp, Homo sapien
tttgtctacttgaaacacaagccaa

SEQ ID NO: 4208676 - DNA, 25 bp, Homo sapien
ttgggtccaagttatgaagcaaggt

SEQ ID NO: 4208677 - DNA, 25 bp, Homo sapien
ccaattgtttgggtccaagttatga

SEQ ID NO: 4208678 - DNA, 25 bp, Homo sapien
aaggctttgtctacttgaaacacaa

SEQ ID NO: 4208679 - DNA, 25 bp, Homo sapien
agtccactctgcagcgtttcatcca

SEQ ID NO: 4208680 - DNA, 25 bp, Homo sapien
aagtccactctgcagcgtttcatcc

SEQ ID NO: 4208681 - DNA, 25 bp, Homo sapien
ccactctgcagcgtttcatccaaca

SEQ ID NO: 4208682 - DNA, 25 bp, Homo sapien
gtccactctgcagcgtttcatccaa

SEQ ID NO: 4208683 - DNA, 25 bp, Homo sapien
gttctcccttctgcttgccgctagt

SEQ ID NO: 4208684 - DNA, 25 bp, Homo sapien
tgcttgccgctagtaccccaagggc

SEQ ID NO: 4208685 - DNA, 25 bp, Homo sapien
gctttctggagcttgtgtgcttcta

SEQ ID NO: 4208686 - DNA, 25 bp, Homo sapien
tccttcatgccctccgcagttctcc

SEQ ID NO: 4208687 - DNA, 25 bp, Homo sapien
tttgaggccctaccatgtgtcacgc

SEQ ID NO: 4208688 - DNA, 25 bp, Homo sapien
gaagacacttgcaggtgccacttgt

SEQ ID NO: 4208689 - DNA, 25 bp, Homo sapien
tacaaactgccacataacagggcct

SEQ ID NO: 4208690 - DNA, 25 bp, Homo sapien
gcctgaccaaagatagagtgattcc

SEQ ID NO: 4208691 - DNA, 25 bp, Homo sapien
gagcccctccgcagtgctcttgcag

SEQ ID NO: 4208692 - DNA, 25 bp, Homo sapien
cccctggtgacagcgtgtgggataa

SEQ ID NO: 4208693 - DNA, 25 bp, Homo sapien
gctgagtcagaagctctgaggtcct

SEQ ID NO: 4208694 - DNA, 25 bp, Homo sapien
cagtgctcttgcaggccagcagctt

SEQ ID NO: 4208695 - DNA, 25 bp, Homo sapien
ctggaatcgggcgagctcttgttaa

SEQ ID NO: 4208696 - DNA, 25 bp, Homo sapien
tggccttgacctgcaaagctctctc

SEQ ID NO: 4208697 - DNA, 25 bp, Homo sapien
tgccttcctcttggttatcaagaag

SEQ ID NO: 4208698 - DNA, 25 bp, Homo sapien
taattgattcaatggccttgacctg

SEQ ID NO: 4208699 - DNA, 25 bp, Homo sapien
ctgtactaacagctttcacaaatct

SEQ ID NO: 4208700 - DNA, 25 bp, Homo sapien
cttgtctccccggtcagattggaag

SEQ ID NO: 4208701 - DNA, 25 bp, Homo sapien
gtactaacagctttcacaaatcttg

SEQ ID NO: 4208702 - DNA, 25 bp, Homo sapien
tctccccggtcagattggaagccat

SEQ ID NO: 4208703 - DNA, 25 bp, Homo sapien
gggagtggagttccatttcctggtc

SEQ ID NO: 4208704 - DNA, 25 bp, Homo sapien
cagtttaccaaaccaggagcttcag

SEQ ID NO: 4208705 - DNA, 25 bp, Homo sapien
taccaaaccaggagcttcagacaag

SEQ ID NO: 4208706 - DNA, 25 bp, Homo sapien
ggagtggagttccatttcctggtcc

SEQ ID NO: 4208707 - DNA, 25 bp, Homo sapien
agcccaccggctagagtctttacct

SEQ ID NO: 4208708 - DNA, 25 bp, Homo sapien
tccagcccaccggctagagtcttta

SEQ ID NO: 4208709 - DNA, 25 bp, Homo sapien
caccggctagagtctttacctggag

SEQ ID NO: 4208710 - DNA, 25 bp, Homo sapien
tcctccagcccaccggctagagtct

SEQ ID NO: 4208711 - DNA, 25 bp, Homo sapien
tctgatataaagtgactctctgaat

SEQ ID NO: 4208712 - DNA, 25 bp, Homo sapien
cccctgtccccattaggcactgcat

SEQ ID NO: 4208713 - DNA, 25 bp, Homo sapien
gaatggttgcaaaatttttttgaca

SEQ ID NO: 4208714 - DNA, 25 bp, Homo sapien
ggcactgcatcattgactggttggt

SEQ ID NO: 4208715 - DNA, 25 bp, Homo sapien
cctctgggatgccattatggaataa

SEQ ID NO: 4208716 - DNA, 25 bp, Homo sapien
gaagctgtcaccagccttacctgga

SEQ ID NO: 4208717 - DNA, 25 bp, Homo sapien
tgccattatggaataagaagctgtc

SEQ ID NO: 4208718 - DNA, 25 bp, Homo sapien
cattatggaataagaagctgtcacc

SEQ ID NO: 4208719 - DNA, 25 bp, Homo sapien
ctgtactggaagtgggatctaccct

SEQ ID NO: 4208720 - DNA, 25 bp, Homo sapien
tccacaagatagtcacgggccttcc

SEQ ID NO: 4208721 - DNA, 25 bp, Homo sapien
gagcgtattcttggcctgacactgg

SEQ ID NO: 4208722 - DNA, 25 bp, Homo sapien
tcaacaggcctaagtaatagctggg

SEQ ID NO: 4208723 - DNA, 25 bp, Homo sapien
gactgacaacaggtttctgtcgccc

SEQ ID NO: 4208724 - DNA, 25 bp, Homo sapien
tggagttttttcagggactgacaac

SEQ ID NO: 4208725 - DNA, 25 bp, Homo sapien
acaggtttctgtcgccccttaactg

SEQ ID NO: 4208726 - DNA, 25 bp, Homo sapien
taactggccccttctaagatgttgg

SEQ ID NO: 4208727 - DNA, 25 bp, Homo sapien
ctgtggaactggtgttttccttagg

SEQ ID NO: 4208728 - DNA, 25 bp, Homo sapien
ccaggctccaaaagatagacctttg

SEQ ID NO: 4208729 - DNA, 25 bp, Homo sapien
gaggcatcggacacactaatagagg

SEQ ID NO: 4208730 - DNA, 25 bp, Homo sapien
gagcaaataatccacttggtcattc

SEQ ID NO: 4208731 - DNA, 25 bp, Homo sapien
tagacctttgaacaacgacagctgg

SEQ ID NO: 4208732 - DNA, 25 bp, Homo sapien
tgctcggagaacaccgtccaggctt

SEQ ID NO: 4208733 - DNA, 25 bp, Homo sapien
ggaatgagaatgatgctcggagaac

SEQ ID NO: 4208734 - DNA, 25 bp, Homo sapien
gaatgatgctcggagaacaccgtcc

SEQ ID NO: 4208735 - DNA, 25 bp, Homo sapien
tcggagaacaccgtccaggcttctg

SEQ ID NO: 4208736 - DNA, 25 bp, Homo sapien
cctcttgctctatcctcctctatct

SEQ ID NO: 4208737 - DNA, 25 bp, Homo sapien
ccctgtgtgagagtgccctcttgct

SEQ ID NO: 4208738 - DNA, 25 bp, Homo sapien
ggatggagcggaactccataactcc

SEQ ID NO: 4208739 - DNA, 25 bp, Homo sapien
ataactccctgtgtgagagtgccct

SEQ ID NO: 4208740 - DNA, 25 bp, Homo sapien
tctagagcaatggttcagtgacact

SEQ ID NO: 4208741 - DNA, 25 bp, Homo sapien
tgacactctgctcacaatgccaacg

SEQ ID NO: 4208742 - DNA, 25 bp, Homo sapien
aatgccaacgactagtccacagctg

SEQ ID NO: 4208743 - DNA, 25 bp, Homo sapien
gctgctgaagaagaggccaggatat

SEQ ID NO: 4208744 - DNA, 25 bp, Homo sapien
ttggcttcagctgtgaaccatcgtt

SEQ ID NO: 4208745 - DNA, 25 bp, Homo sapien
acagtcccggcccattggcttcagc

SEQ ID NO: 4208746 - DNA, 25 bp, Homo sapien
tcagctgtgaaccatcgttgtggag

SEQ ID NO: 4208747 - DNA, 25 bp, Homo sapien
gaaccatcgttgtggaggcaaatct

SEQ ID NO: 4208748 - DNA, 25 bp, Homo sapien
gcactttacaacacaaggtttgact

SEQ ID NO: 4208749 - DNA, 25 bp, Homo sapien
aggactgttcccttgatacaccctg

SEQ ID NO: 4208750 - DNA, 25 bp, Homo sapien
tacttaaatccagctgtacggctct

SEQ ID NO: 4208751 - DNA, 25 bp, Homo sapien
caacttgtgcaggtttgtgagagat

SEQ ID NO: 4208752 - DNA, 25 bp, Homo sapien
ggtatccaggactgacacaccccag

SEQ ID NO: 4208753 - DNA, 25 bp, Homo sapien
tctggtatccaggactgacacaccc

SEQ ID NO: 4208754 - DNA, 25 bp, Homo sapien
ttaatcattttgcatctggtatcca

SEQ ID NO: 4208755 - DNA, 25 bp, Homo sapien
tttgcatctggtatccaggactgac

SEQ ID NO: 4208756 - DNA, 25 bp, Homo sapien
gtgctaatcaataacgagtccaact

SEQ ID NO: 4208757 - DNA, 25 bp, Homo sapien
gaagtgctaatcaataacgagtcca

SEQ ID NO: 4208758 - DNA, 25 bp, Homo sapien
taatcaataacgagtccaacttgga

SEQ ID NO: 4208759 - DNA, 25 bp, Homo sapien
ttaggaagtgctaatcaataacgag

SEQ ID NO: 4208760 - DNA, 25 bp, Homo sapien
gtccatgggaacagcatattccatg

SEQ ID NO: 4208761 - DNA, 25 bp, Homo sapien
cttataagccttggtgtgttttcac

SEQ ID NO: 4208762 - DNA, 25 bp, Homo sapien
ttttcaccagactttttgcttctcc

SEQ ID NO: 4208763 - DNA, 25 bp, Homo sapien
gtgttttcaccagactttttgcttc

SEQ ID NO: 4208764 - DNA, 25 bp, Homo sapien
gatggagagaaccaagagtacaaag

SEQ ID NO: 4208765 - DNA, 25 bp, Homo sapien
gattcccctgatccatactggcatg

SEQ ID NO: 4208766 - DNA, 25 bp, Homo sapien
ttcaaggacaatgtcctcagattcc

SEQ ID NO: 4208767 - DNA, 25 bp, Homo sapien
ccaagagtacaaagatcctaagagt

SEQ ID NO: 4208768 - DNA, 25 bp, Homo sapien
aaggcagatttgtacccttctgctc

SEQ ID NO: 4208769 - DNA, 25 bp, Homo sapien
cattcaaggctttccttcatgtctt

SEQ ID NO: 4208770 - DNA, 25 bp, Homo sapien
ccaaaggcagatttgtacccttctg

SEQ ID NO: 4208771 - DNA, 25 bp, Homo sapien
tcccaaaggcagatttgtacccttc

SEQ ID NO: 4208772 - DNA, 25 bp, Homo sapien
cccagagtcttcaaggaaaaatgaa

SEQ ID NO: 4208773 - DNA, 25 bp, Homo sapien
tcccagagtcttcaaggaaaaatga

SEQ ID NO: 4208774 - DNA, 25 bp, Homo sapien
cagagtcttcaaggaaaaatgaaac

SEQ ID NO: 4208775 - DNA, 25 bp, Homo sapien
ccagagtcttcaaggaaaaatgaaa

SEQ ID NO: 4208776 - DNA, 25 bp, Homo sapien
aaaacccgatagatgggtccagaga

SEQ ID NO: 4208777 - DNA, 25 bp, Homo sapien
ctgtgatgagaaaacccgatagatg

SEQ ID NO: 4208778 - DNA, 25 bp, Homo sapien
tggtgcctgagagcatccgctggtg

SEQ ID NO: 4208779 - DNA, 25 bp, Homo sapien
caccacctgtgcagtgtagggtttc

SEQ ID NO: 4208780 - DNA, 25 bp, Homo sapien
tgaggctttgtcagaaggccttctt

SEQ ID NO: 4208781 - DNA, 25 bp, Homo sapien
gctttgtcagaaggccttcttgcct

SEQ ID NO: 4208782 - DNA, 25 bp, Homo sapien
tgtcagaaggccttcttgcctgcat

SEQ ID NO: 4208783 - DNA, 25 bp, Homo sapien
cttctctgaggctttgtcagaaggc

SEQ ID NO: 4208784 - DNA, 25 bp, Homo sapien
ccttgcaaggatccctgctgtgtct

SEQ ID NO: 4208785 - DNA, 25 bp, Homo sapien
tgtctaccatgcaaatggccatttc

SEQ ID NO: 4208786 - DNA, 25 bp, Homo sapien
ggatccctgctgtgtctaccatgca

SEQ ID NO: 4208787 - DNA, 25 bp, Homo sapien
gtgctttgccacttgtgctccacaa

SEQ ID NO: 4208788 - DNA, 25 bp, Homo sapien
gaatcagtcaaaagggttattttca

SEQ ID NO: 4208789 - DNA, 25 bp, Homo sapien
ttatattcaggttcaagctggtgaa

SEQ ID NO: 4208790 - DNA, 25 bp, Homo sapien
ctgtaactgaatttgactttgaatc

SEQ ID NO: 4208791 - DNA, 25 bp, Homo sapien
gggccttagttcatggtttgagatc

SEQ ID NO: 4208792 - DNA, 25 bp, Homo sapien
ttcgcttgagcagtcagagggtctc

SEQ ID NO: 4208793 - DNA, 25 bp, Homo sapien
aacagtagctgaagaacatttggag

SEQ ID NO: 4208794 - DNA, 25 bp, Homo sapien
ccatgccatggggaggttcgcttga

SEQ ID NO: 4208795 - DNA, 25 bp, Homo sapien
ggcagagctcccacaagattccatg

SEQ ID NO: 4208796 - DNA, 25 bp, Homo sapien
actggctatcaagttctatccattt

SEQ ID NO: 4208797 - DNA, 25 bp, Homo sapien
ctggctatcaagttctatccatttt

SEQ ID NO: 4208798 - DNA, 25 bp, Homo sapien
tcaaccatagcccagctcataatta

SEQ ID NO: 4208799 - DNA, 25 bp, Homo sapien
gcctgcttggtgcatttcaaatctg

SEQ ID NO: 4208800 - DNA, 25 bp, Homo sapien
ggattcctcccctcatcaaccatag

SEQ ID NO: 4208801 - DNA, 25 bp, Homo sapien
ccctcctttaggaggtgcatgtggg

SEQ ID NO: 4208802 - DNA, 25 bp, Homo sapien
tctgaaagactgttggcaagccgta

SEQ ID NO: 4208803 - DNA, 25 bp, Homo sapien
aagactgttggcaagccgtagttca

SEQ ID NO: 4208804 - DNA, 25 bp, Homo sapien
tcacagtctgaaagactgttggcaa

SEQ ID NO: 4208805 - DNA, 25 bp, Homo sapien
cagtctgaaagactgttggcaagcc

SEQ ID NO: 4208806 - DNA, 25 bp, Homo sapien
tatattcaggtgagcagtaagtcct

SEQ ID NO: 4208807 - DNA, 25 bp, Homo sapien
aatatattcaggtgagcagtaagtc

SEQ ID NO: 4208808 - DNA, 25 bp, Homo sapien
agaatatattcaggtgagcagtaag

SEQ ID NO: 4208809 - DNA, 25 bp, Homo sapien
atatattcaggtgagcagtaagtcc

SEQ ID NO: 4208810 - DNA, 25 bp, Homo sapien
cccttttcatttgataggcaccgtg

SEQ ID NO: 4208811 - DNA, 25 bp, Homo sapien
cttttttatcacagcgttggtgaag

SEQ ID NO: 4208812 - DNA, 25 bp, Homo sapien
ttgataggcaccgtggagagcccca

SEQ ID NO: 4208813 - DNA, 25 bp, Homo sapien
gaatttaggagagcaggattgtgaa

SEQ ID NO: 4208814 - DNA, 25 bp, Homo sapien
tccatggttccttgaccatatatac

SEQ ID NO: 4208815 - DNA, 25 bp, Homo sapien
caggggattgttggttcttgtccag

SEQ ID NO: 4208816 - DNA, 25 bp, Homo sapien
tattcatggatatgagatcagcagg

SEQ ID NO: 4208817 - DNA, 25 bp, Homo sapien
cagattattaaagcagtacttcctg

SEQ ID NO: 4208818 - DNA, 25 bp, Homo sapien
tgaactggatgatcaggcactggac

SEQ ID NO: 4208819 - DNA, 25 bp, Homo sapien
ggacacttaggctgcaagggcaggg

SEQ ID NO: 4208820 - DNA, 25 bp, Homo sapien
actggatgatcaggcactggacact

SEQ ID NO: 4208821 - DNA, 25 bp, Homo sapien
cctgaactggatgatcaggcactgg

SEQ ID NO: 4208822 - DNA, 25 bp, Homo sapien
ctttgtccaagactccggagccctg

SEQ ID NO: 4208823 - DNA, 25 bp, Homo sapien
tttgtccaagactccggagccctgt

SEQ ID NO: 4208824 - DNA, 25 bp, Homo sapien
actccggagccctgtggcgagtgct

SEQ ID NO: 4208825 - DNA, 25 bp, Homo sapien
ctgtggcgagtgctctctctggctg

SEQ ID NO: 4208826 - DNA, 25 bp, Homo sapien
tgggttgggtatattgcttggctcc

SEQ ID NO: 4208827 - DNA, 25 bp, Homo sapien
ggtatattgcttggctccatttctg

SEQ ID NO: 4208828 - DNA, 25 bp, Homo sapien
tggttcacaatacatgggttgggta

SEQ ID NO: 4208829 - DNA, 25 bp, Homo sapien
ctttccccatggttcacaatacatg

SEQ ID NO: 4208830 - DNA, 25 bp, Homo sapien
cattgaagtatgtttgcatgtggtc

SEQ ID NO: 4208831 - DNA, 25 bp, Homo sapien
acattgaagtatgtttgcatgtggt

SEQ ID NO: 4208832 - DNA, 25 bp, Homo sapien
ccagccatgcctatctttgtaggaa

SEQ ID NO: 4208833 - DNA, 25 bp, Homo sapien
ttgtaggaatgagtcagctcctttc

SEQ ID NO: 4208834 - DNA, 25 bp, Homo sapien
ctgttaaggcaaatatatcaagaag

SEQ ID NO: 4208835 - DNA, 25 bp, Homo sapien
aaatatatcaagaagaaaggccagc

SEQ ID NO: 4208836 - DNA, 25 bp, Homo sapien
accttcttcgttcagttcacaacca

SEQ ID NO: 4208837 - DNA, 25 bp, Homo sapien
tacaaaaccttcttcgttcagttca

SEQ ID NO: 4208838 - DNA, 25 bp, Homo sapien
ccttcttcgttcagttcacaaccag

SEQ ID NO: 4208839 - DNA, 25 bp, Homo sapien
caaaaccttcttcgttcagttcaca

SEQ ID NO: 4208840 - DNA, 25 bp, Homo sapien
tagcagttcttttatgaagaacaga

SEQ ID NO: 4208841 - DNA, 25 bp, Homo sapien
tggtgttgttgagagcggcctcatt

SEQ ID NO: 4208842 - DNA, 25 bp, Homo sapien
tacataaaactgagaaacgatggtg

SEQ ID NO: 4208843 - DNA, 25 bp, Homo sapien
catgtcactttgtaactggcaatgc

SEQ ID NO: 4208844 - DNA, 25 bp, Homo sapien
acaagtcaaaagccatgatttccat

SEQ ID NO: 4208845 - DNA, 25 bp, Homo sapien
tacaagtcaaaagccatgatttcca

SEQ ID NO: 4208846 - DNA, 25 bp, Homo sapien
ggtggagttgagcgaatgagcaact

SEQ ID NO: 4208847 - DNA, 25 bp, Homo sapien
ctgttggagatgtcggtggagttga

SEQ ID NO: 4208848 - DNA, 25 bp, Homo sapien
ggagttgagcgaatgagcaactgga

SEQ ID NO: 4208849 - DNA, 25 bp, Homo sapien
actgttggagatgtcggtggagttg

SEQ ID NO: 4208850 - DNA, 25 bp, Homo sapien
tgtaggtgaggcagagattttgcat

SEQ ID NO: 4208851 - DNA, 25 bp, Homo sapien
ctgtaggtgaggcagagattttgca

SEQ ID NO: 4208852 - DNA, 25 bp, Homo sapien
cttcttcatcattcacaactctctt

SEQ ID NO: 4208853 - DNA, 25 bp, Homo sapien
ttcttcatcattcacaactctcttc

SEQ ID NO: 4208854 - DNA, 25 bp, Homo sapien
catgtgtatgaaactgcctgatccc

SEQ ID NO: 4208855 - DNA, 25 bp, Homo sapien
tattgcctgtctgattgccactcca

SEQ ID NO: 4208856 - DNA, 25 bp, Homo sapien
ccactccacttgagatagtccagaa

SEQ ID NO: 4208857 - DNA, 25 bp, Homo sapien
cacggttggtattcttccagtgcag

SEQ ID NO: 4208858 - DNA, 25 bp, Homo sapien
tgctcatgccagtagaaacgtgcct

SEQ ID NO: 4208859 - DNA, 25 bp, Homo sapien
ttgatatgacggcatcttcacaagg

SEQ ID NO: 4208860 - DNA, 25 bp, Homo sapien
cagttctgtgggaaatgcgcaggcc

SEQ ID NO: 4208861 - DNA, 25 bp, Homo sapien
aaacgtgcctgcctcgattctgctg

SEQ ID NO: 4208862 - DNA, 25 bp, Homo sapien
cgtccatttgaagcagcgagtgtca

SEQ ID NO: 4208863 - DNA, 25 bp, Homo sapien
cctgtcagtagcgatgactgtcagc

SEQ ID NO: 4208864 - DNA, 25 bp, Homo sapien
gactgtcagctgcagcgtccatttg

SEQ ID NO: 4208865 - DNA, 25 bp, Homo sapien
tctggccttatgtaaaccatcggtg

SEQ ID NO: 4208866 - DNA, 25 bp, Homo sapien
caaatgcttattctagacgtattgg

SEQ ID NO: 4208867 - DNA, 25 bp, Homo sapien
tatgagcagctacggtatgaactgt

SEQ ID NO: 4208868 - DNA, 25 bp, Homo sapien
gaggtaccagattgccataccagga

SEQ ID NO: 4208869 - DNA, 25 bp, Homo sapien
ttttcaccaaataatgaggtaccag

SEQ ID NO: 4208870 - DNA, 25 bp, Homo sapien
gtatagtcccgttttatcacataaa

SEQ ID NO: 4208871 - DNA, 25 bp, Homo sapien
ctgtatagtcccgttttatcacata

SEQ ID NO: 4208872 - DNA, 25 bp, Homo sapien
tatagtcccgttttatcacataaat

SEQ ID NO: 4208873 - DNA, 25 bp, Homo sapien
tgtatagtcccgttttatcacataa

SEQ ID NO: 4208874 - DNA, 25 bp, Homo sapien
tatgctgagcccgaattccatgtaa

SEQ ID NO: 4208875 - DNA, 25 bp, Homo sapien
ccatgtcagatgaggctattatcac

SEQ ID NO: 4208876 - DNA, 25 bp, Homo sapien
agttcccttgttctccagattgagc

SEQ ID NO: 4208877 - DNA, 25 bp, Homo sapien
tgagcccgaattccatgtaaagttc

SEQ ID NO: 4208878 - DNA, 25 bp, Homo sapien
tggatagtgtaatggagcttagagt

SEQ ID NO: 4208879 - DNA, 25 bp, Homo sapien
gagcttagagttatcccaaggatgt

SEQ ID NO: 4208880 - DNA, 25 bp, Homo sapien
tttcttttggatagtgtaatggagc

SEQ ID NO: 4208881 - DNA, 25 bp, Homo sapien
caaggatgttatcgccgacatcttt

SEQ ID NO: 4208882 - DNA, 25 bp, Homo sapien
cctcacagtggagatcttcaatccc

SEQ ID NO: 4208883 - DNA, 25 bp, Homo sapien
agaatggagatgaccccacggagca

SEQ ID NO: 4208884 - DNA, 25 bp, Homo sapien
tatgagcaacgaattccccagagca

SEQ ID NO: 4208885 - DNA, 25 bp, Homo sapien
aatattcatgcccttatgagcaacg

SEQ ID NO: 4208886 - DNA, 25 bp, Homo sapien
tctggaaagagaataggccacaaag

SEQ ID NO: 4208887 - DNA, 25 bp, Homo sapien
gattatgattcgctttttaccctgc

SEQ ID NO: 4208888 - DNA, 25 bp, Homo sapien
ttggctctacttcttttgcctctgg

SEQ ID NO: 4208889 - DNA, 25 bp, Homo sapien
tttgtttgcatctccccagggtctg

SEQ ID NO: 4208890 - DNA, 25 bp, Homo sapien
cagggtctgattactcgtcccttca

SEQ ID NO: 4208891 - DNA, 25 bp, Homo sapien
cataaacttcgttatcactcttggt

SEQ ID NO: 4208892 - DNA, 25 bp, Homo sapien
gttctaaggtcaggttcctcataaa

SEQ ID NO: 4208893 - DNA, 25 bp, Homo sapien
cattctatttgacatattaagcttc

SEQ ID NO: 4208894 - DNA, 25 bp, Homo sapien
tctgtatcttggcataaaggacaca

SEQ ID NO: 4208895 - DNA, 25 bp, Homo sapien
caggtgttacacgtgtggttttata

SEQ ID NO: 4208896 - DNA, 25 bp, Homo sapien
tggttttgggactatcttcggctaa

SEQ ID NO: 4208897 - DNA, 25 bp, Homo sapien
aaatgattggatagctgtttaaggg

SEQ ID NO: 4208898 - DNA, 25 bp, Homo sapien
tgaacacttggctttggacaggtgt

SEQ ID NO: 4208899 - DNA, 25 bp, Homo sapien
gagaataatactggctgtctcttca

SEQ ID NO: 4208900 - DNA, 25 bp, Homo sapien
gcttagagcagcattctggcagttt

SEQ ID NO: 4208901 - DNA, 25 bp, Homo sapien
ctggcagtttcttgaagtcggtcgt

SEQ ID NO: 4208902 - DNA, 25 bp, Homo sapien
tcttgaagtcggtcgttttcactcg

SEQ ID NO: 4208903 - DNA, 25 bp, Homo sapien
tgtttttattactgcccaaagagcc

SEQ ID NO: 4208904 - DNA, 25 bp, Homo sapien
ttgtttttattactgcccaaagagc

SEQ ID NO: 4208905 - DNA, 25 bp, Homo sapien
tcaggtgcacctccttcccatattt

SEQ ID NO: 4208906 - DNA, 25 bp, Homo sapien
atagccctcaggtgcacctccttcc

SEQ ID NO: 4208907 - DNA, 25 bp, Homo sapien
gacagcatagccctcaggtgcacct

SEQ ID NO: 4208908 - DNA, 25 bp, Homo sapien
ggaggcctggacagcatagccctca

SEQ ID NO: 4208909 - DNA, 25 bp, Homo sapien
gacatggtaatgcaatgattctgag

SEQ ID NO: 4208910 - DNA, 25 bp, Homo sapien
tggctgacatggtaatgcaatgatt

SEQ ID NO: 4208911 - DNA, 25 bp, Homo sapien
ctgacatggtaatgcaatgattctg

SEQ ID NO: 4208912 - DNA, 25 bp, Homo sapien
catggtaatgcaatgattctgagaa

SEQ ID NO: 4208913 - DNA, 25 bp, Homo sapien
aaccataagccaacaccagccaaga

SEQ ID NO: 4208914 - DNA, 25 bp, Homo sapien
tccagccctttacagccataggcct

SEQ ID NO: 4208915 - DNA, 25 bp, Homo sapien
tgcattagaagactggaaccataag

SEQ ID NO: 4208916 - DNA, 25 bp, Homo sapien
ataagccaacaccagccaagactgc

SEQ ID NO: 4208917 - DNA, 25 bp, Homo sapien
gccaatggtagatctgattgcagct

SEQ ID NO: 4208918 - DNA, 25 bp, Homo sapien
tctgattgcagctttatagaattca

SEQ ID NO: 4208919 - DNA, 25 bp, Homo sapien
tgtggcttgccaatggtagatctga

SEQ ID NO: 4208920 - DNA, 25 bp, Homo sapien
ctgtgtcacataaagtacttgtggc

SEQ ID NO: 4208921 - DNA, 25 bp, Homo sapien
tttccctggaagttcgccactttca

SEQ ID NO: 4208922 - DNA, 25 bp, Homo sapien
gaagttcgccactttcaagtctcat

SEQ ID NO: 4208923 - DNA, 25 bp, Homo sapien
agctcgccttgccagttcttctaac

SEQ ID NO: 4208924 - DNA, 25 bp, Homo sapien
ctagctcgccttgccagttcttcta

SEQ ID NO: 4208925 - DNA, 25 bp, Homo sapien
gctctgcttgctctggaccgaccac

SEQ ID NO: 4208926 - DNA, 25 bp, Homo sapien
tctgcttgctctggaccgaccactt

SEQ ID NO: 4208927 - DNA, 25 bp, Homo sapien
ctggaccgaccacttccatgcaatg

SEQ ID NO: 4208928 - DNA, 25 bp, Homo sapien
ttgctctggaccgaccacttccatg

SEQ ID NO: 4208929 - DNA, 25 bp, Homo sapien
ttactgtctggctgttattttgaca

SEQ ID NO: 4208930 - DNA, 25 bp, Homo sapien
tactgtctggctgttattttgacag

SEQ ID NO: 4208931 - DNA, 25 bp, Homo sapien
aattgtcatgtgactcttatttttg

SEQ ID NO: 4208932 - DNA, 25 bp, Homo sapien
actcttatttttgatgggctgctct

SEQ ID NO: 4208933 - DNA, 25 bp, Homo sapien
catgaaataattgtcatgtgactct

SEQ ID NO: 4208934 - DNA, 25 bp, Homo sapien
ttgatgggctgctctgacttctctc

SEQ ID NO: 4208935 - DNA, 25 bp, Homo sapien
attagtagctaatacgatcagagaa

SEQ ID NO: 4208936 - DNA, 25 bp, Homo sapien
taacatctttgttaatattagtagc

SEQ ID NO: 4208937 - DNA, 25 bp, Homo sapien
aaaaagtacagtcttccaccatggg

SEQ ID NO: 4208938 - DNA, 25 bp, Homo sapien
gagaactattctgttcatcctgatc

SEQ ID NO: 4208939 - DNA, 25 bp, Homo sapien
ggaaacaatgtttacatcgatcagc

SEQ ID NO: 4208940 - DNA, 25 bp, Homo sapien
gcggacagtaactccacagggagct

SEQ ID NO: 4208941 - DNA, 25 bp, Homo sapien
gaattgtaagcggacagtaactcca

SEQ ID NO: 4208942 - DNA, 25 bp, Homo sapien
ggagtaatttcagcgaattgtaagc

SEQ ID NO: 4208943 - DNA, 25 bp, Homo sapien
taatttcagcgaattgtaagcggac

SEQ ID NO: 4208944 - DNA, 25 bp, Homo sapien
ttgtgtttccagcctacttttgctc

SEQ ID NO: 4208945 - DNA, 25 bp, Homo sapien
gtttccagcctacttttgctccctg

SEQ ID NO: 4208946 - DNA, 25 bp, Homo sapien
tgtttccagcctacttttgctccct

SEQ ID NO: 4208947 - DNA, 25 bp, Homo sapien
tgtgtttccagcctacttttgctcc

SEQ ID NO: 4208948 - DNA, 25 bp, Homo sapien
gtggttttgcctcagggatatcctt

SEQ ID NO: 4208949 - DNA, 25 bp, Homo sapien
cacatccttttgtgaccctgtctgt

SEQ ID NO: 4208950 - DNA, 25 bp, Homo sapien
tccacatccttttgtgaccctgtct

SEQ ID NO: 4208951 - DNA, 25 bp, Homo sapien
cctgtggttttgcctcagggatatc

SEQ ID NO: 4208952 - DNA, 25 bp, Homo sapien
cagttgttgaacctcatatatctga

SEQ ID NO: 4208953 - DNA, 25 bp, Homo sapien
caaccagttgttgaacctcatatat

SEQ ID NO: 4208954 - DNA, 25 bp, Homo sapien
gttgttgaacctcatatatctgagc

SEQ ID NO: 4208955 - DNA, 25 bp, Homo sapien
aaccagttgttgaacctcatatatc

SEQ ID NO: 4208956 - DNA, 25 bp, Homo sapien
tgctttaactgtcagactatccttt

SEQ ID NO: 4208957 - DNA, 25 bp, Homo sapien
ctactgggtgcttagactcttttcc

SEQ ID NO: 4208958 - DNA, 25 bp, Homo sapien
taactgtcagactatccttttctga

SEQ ID NO: 4208959 - DNA, 25 bp, Homo sapien
ttaaatacctactgggtgcttagac

SEQ ID NO: 4208960 - DNA, 25 bp, Homo sapien
caagactaacggaggacagaggccg

SEQ ID NO: 4208961 - DNA, 25 bp, Homo sapien
tgaacaagagttccaaactcgtagt

SEQ ID NO: 4208962 - DNA, 25 bp, Homo sapien
gcgcctcggtgtgtgaacaagagtt

SEQ ID NO: 4208963 - DNA, 25 bp, Homo sapien
tggagtctcgcccttcgggtccaga

SEQ ID NO: 4208964 - DNA, 25 bp, Homo sapien
caggtccggcgagaaaggccaaaat

SEQ ID NO: 4208965 - DNA, 25 bp, Homo sapien
tatcggtacagaggctcagtgacgc

SEQ ID NO: 4208966 - DNA, 25 bp, Homo sapien
ggaatgtcccgtgcgataggagcca

SEQ ID NO: 4208967 - DNA, 25 bp, Homo sapien
atttcttggccccattcgcagtgct

SEQ ID NO: 4208968 - DNA, 25 bp, Homo sapien
tccaagctccaaaccctaatcctaa

SEQ ID NO: 4208969 - DNA, 25 bp, Homo sapien
gctccaagctccaaaccctaatcct

SEQ ID NO: 4208970 - DNA, 25 bp, Homo sapien
gccaggccatccgccgtggtcctgt

SEQ ID NO: 4208971 - DNA, 25 bp, Homo sapien
atccgccgtggtcctgtggcctcca

SEQ ID NO: 4208972 - DNA, 25 bp, Homo sapien
ataaacatctgcctgcgggcatggt

SEQ ID NO: 4208973 - DNA, 25 bp, Homo sapien
ctagaattgggttttgtaggagcgg

SEQ ID NO: 4208974 - DNA, 25 bp, Homo sapien
gctggaaccgcggagtttggctcac

SEQ ID NO: 4208975 - DNA, 25 bp, Homo sapien
tcaccgcaaagctgcaacgatggac

SEQ ID NO: 4208976 - DNA, 25 bp, Homo sapien
tgcaacgatggactcttgcatagaa

SEQ ID NO: 4208977 - DNA, 25 bp, Homo sapien
tggctcctgcccgttttcctactcg

SEQ ID NO: 4208978 - DNA, 25 bp, Homo sapien
tcggaaagccagactccacgcagga

SEQ ID NO: 4208979 - DNA, 25 bp, Homo sapien
aggaccagggatctcacgaggcacg

SEQ ID NO: 4208980 - DNA, 25 bp, Homo sapien
tatcgcatcttggactcggaaagcc

SEQ ID NO: 4208981 - DNA, 25 bp, Homo sapien
gggagccggccctcttcccgcctca

SEQ ID NO: 4208982 - DNA, 25 bp, Homo sapien
aatgtcgcgcctgtcccgcggcact

SEQ ID NO: 4208983 - DNA, 25 bp, Homo sapien
ccgcgccccgctgcttctccgttac

SEQ ID NO: 4208984 - DNA, 25 bp, Homo sapien
aacgccagcaccaatgtcgcgcctg

SEQ ID NO: 4208985 - DNA, 25 bp, Homo sapien
tcctttcaggttcaggcgcagctgc

SEQ ID NO: 4208986 - DNA, 25 bp, Homo sapien
tcaccctaggatagtcattgcaacg

SEQ ID NO: 4208987 - DNA, 25 bp, Homo sapien
aacgtgacgcccttgtcctttcagg

SEQ ID NO: 4208988 - DNA, 25 bp, Homo sapien
gcatcgccgatctcagactgaaagc

SEQ ID NO: 4208989 - DNA, 25 bp, Homo sapien
taagccacacttagaggtatatttg

SEQ ID NO: 4208990 - DNA, 25 bp, Homo sapien
cacacttagaggtatatttgtttac

SEQ ID NO: 4208991 - DNA, 25 bp, Homo sapien
tgtcccctaagccacacttagaggt

SEQ ID NO: 4208992 - DNA, 25 bp, Homo sapien
cccctaagccacacttagaggtata

SEQ ID NO: 4208993 - DNA, 25 bp, Homo sapien
ggcgtccaccgaacttgcttcagtt

SEQ ID NO: 4208994 - DNA, 25 bp, Homo sapien
cgtttctttagatcagggcgccgcc

SEQ ID NO: 4208995 - DNA, 25 bp, Homo sapien
cagtttaagctcagcgccttcctgg

SEQ ID NO: 4208996 - DNA, 25 bp, Homo sapien
aagcgccgcagtccctgagtcgttt

SEQ ID NO: 4208997 - DNA, 25 bp, Homo sapien
tataagcataaatttgaagaatatt

SEQ ID NO: 4208998 - DNA, 25 bp, Homo sapien
ataagcataaatttgaagaatatta

SEQ ID NO: 4208999 - DNA, 25 bp, Homo sapien
taagcataaatttgaagaatattat

SEQ ID NO: 4209000 - DNA, 25 bp, Homo sapien
ctataagcataaatttgaagaatat

SEQ ID NO: 4209001 - DNA, 25 bp, Homo sapien
tcagtatctgatgaccgacgtccca

SEQ ID NO: 4209002 - DNA, 25 bp, Homo sapien
cctttctttcggctgtatgttctac

SEQ ID NO: 4209003 - DNA, 25 bp, Homo sapien
tctatcataagaatgtgaacgaggc

SEQ ID NO: 4209004 - DNA, 25 bp, Homo sapien
tgaagaactgctcgaggaggaccgt

SEQ ID NO: 4209005 - DNA, 25 bp, Homo sapien
tctgaactctataggatttccctcg

SEQ ID NO: 4209006 - DNA, 25 bp, Homo sapien
ggagccataagaagagctactgctt

SEQ ID NO: 4209007 - DNA, 25 bp, Homo sapien
tataggatttccctcgaccccttga

SEQ ID NO: 4209008 - DNA, 25 bp, Homo sapien
gctactgcttgatcgatgcctgcgt

SEQ ID NO: 4209009 - DNA, 25 bp, Homo sapien
ccacttttgatttatcagccgccgt

SEQ ID NO: 4209010 - DNA, 25 bp, Homo sapien
aacaagacattgacaaatagcaccc

SEQ ID NO: 4209011 - DNA, 25 bp, Homo sapien
tggactccataactcgacccaaacc

SEQ ID NO: 4209012 - DNA, 25 bp, Homo sapien
caaatagcacccagaatcacttcaa

SEQ ID NO: 4209013 - DNA, 25 bp, Homo sapien
tattgctcctgcatgatctccacac

SEQ ID NO: 4209014 - DNA, 25 bp, Homo sapien
ctattgctcctgcatgatctccaca

SEQ ID NO: 4209015 - DNA, 25 bp, Homo sapien
ctgcatgatctccacacccattgaa

SEQ ID NO: 4209016 - DNA, 25 bp, Homo sapien
catgatctccacacccattgaaaaa

SEQ ID NO: 4209017 - DNA, 25 bp, Homo sapien
tatctgtccaagaacaatgttgccc

SEQ ID NO: 4209018 - DNA, 25 bp, Homo sapien
tgcccagttttgctcgtccacaatt

SEQ ID NO: 4209019 - DNA, 25 bp, Homo sapien
cttattatcctcaagcaaacggctc

SEQ ID NO: 4209020 - DNA, 25 bp, Homo sapien
aaacggctcactttcagactatctg

SEQ ID NO: 4209021 - DNA, 25 bp, Homo sapien
tcttggttatgtccatatgcttgaa

SEQ ID NO: 4209022 - DNA, 25 bp, Homo sapien
ggctgtcttggttatgtccatatgc

SEQ ID NO: 4209023 - DNA, 25 bp, Homo sapien
tggttatgtccatatgcttgaagaa

SEQ ID NO: 4209024 - DNA, 25 bp, Homo sapien
gctgtcttggttatgtccatatgct

SEQ ID NO: 4209025 - DNA, 25 bp, Homo sapien
accagaggttcctgacgtagttgta

SEQ ID NO: 4209026 - DNA, 25 bp, Homo sapien
ggttcctgacgtagttgtaccacag

SEQ ID NO: 4209027 - DNA, 25 bp, Homo sapien
agcaagtgaagccaagccccaatgt

SEQ ID NO: 4209028 - DNA, 25 bp, Homo sapien
gacgtagttgtaccacagatccaaa

SEQ ID NO: 4209029 - DNA, 25 bp, Homo sapien
tacctaaggtttcacttgaagaagc

SEQ ID NO: 4209030 - DNA, 25 bp, Homo sapien
gatgcagataaagcaacgtttaggg

SEQ ID NO: 4209031 - DNA, 25 bp, Homo sapien
gaaaacctccagatatatggaaacc

SEQ ID NO: 4209032 - DNA, 25 bp, Homo sapien
taatccatgagtaaagtaagaaagc

SEQ ID NO: 4209033 - DNA, 25 bp, Homo sapien
gtcgttctctatcccgagaccgact

SEQ ID NO: 4209034 - DNA, 25 bp, Homo sapien
tacgactatgagaacggagacgagg

SEQ ID NO: 4209035 - DNA, 25 bp, Homo sapien
acggagacgaggtcttgacctggac

SEQ ID NO: 4209036 - DNA, 25 bp, Homo sapien
tacgcgttcttctgtgactggacct

SEQ ID NO: 4209037 - DNA, 25 bp, Homo sapien
cacgtttgatgttatgtaattcctt

SEQ ID NO: 4209038 - DNA, 25 bp, Homo sapien
ttgatgttatgtaattccttgtcct

SEQ ID NO: 4209039 - DNA, 25 bp, Homo sapien
gatgttatgtaattccttgtccttc

SEQ ID NO: 4209040 - DNA, 25 bp, Homo sapien
tgttatgtaattccttgtccttccc

SEQ ID NO: 4209041 - DNA, 25 bp, Homo sapien
ctactcccatcctctaacttcttca

SEQ ID NO: 4209042 - DNA, 25 bp, Homo sapien
ttcacatatccctaattcctcagcc

SEQ ID NO: 4209043 - DNA, 25 bp, Homo sapien
cacatatccctaattcctcagcctc

SEQ ID NO: 4209044 - DNA, 25 bp, Homo sapien
ctaacttcttcacatatccctaatt

SEQ ID NO: 4209045 - DNA, 25 bp, Homo sapien
catgatctatttccaggtggcctgt

SEQ ID NO: 4209046 - DNA, 25 bp, Homo sapien
tctatttccaggtggcctgtcacag

SEQ ID NO: 4209047 - DNA, 25 bp, Homo sapien
tggcctgtcacaggctggcatatcc

SEQ ID NO: 4209048 - DNA, 25 bp, Homo sapien
gtcacaggctggcatatccacaggg

SEQ ID NO: 4209049 - DNA, 25 bp, Homo sapien
tcctctcacaattcttttggtgaaa

SEQ ID NO: 4209050 - DNA, 25 bp, Homo sapien
ttcctctcacaattcttttggtgaa

SEQ ID NO: 4209051 - DNA, 25 bp, Homo sapien
ttctcttcctgttagatgtaagttt

SEQ ID NO: 4209052 - DNA, 25 bp, Homo sapien
tcttcctgttagatgtaagtttctt

SEQ ID NO: 4209053 - DNA, 25 bp, Homo sapien
ccttctcacttgcaacagtcagttt

SEQ ID NO: 4209054 - DNA, 25 bp, Homo sapien
cttctcacttgcaacagtcagtttg

SEQ ID NO: 4209055 - DNA, 25 bp, Homo sapien
ttctcacttgcaacagtcagtttgt

SEQ ID NO: 4209056 - DNA, 25 bp, Homo sapien
gagaatgaatatagcccagagcatg

SEQ ID NO: 4209057 - DNA, 25 bp, Homo sapien
tcagggttacacagatggaaattca

SEQ ID NO: 4209058 - DNA, 25 bp, Homo sapien
gactgcttaagaacatcagggttac

SEQ ID NO: 4209059 - DNA, 25 bp, Homo sapien
tgcagacagcaggttatccagggag

SEQ ID NO: 4209060 - DNA, 25 bp, Homo sapien
aacggcatcccttgtactactggca

SEQ ID NO: 4209061 - DNA, 25 bp, Homo sapien
gaaaaatcgctcactactactgggt

SEQ ID NO: 4209062 - DNA, 25 bp, Homo sapien
tcggcagttacctcatgctctgggc

SEQ ID NO: 4209063 - DNA, 25 bp, Homo sapien
taatgtccactgaactaaagcaacg

SEQ ID NO: 4209064 - DNA, 25 bp, Homo sapien
gcctgataaattgtgcagactgggc

SEQ ID NO: 4209065 - DNA, 25 bp, Homo sapien
gagaaagcagcctgatgtcatcatg

SEQ ID NO: 4209066 - DNA, 25 bp, Homo sapien
accccatctggcctgataaattgtg

SEQ ID NO: 4209067 - DNA, 25 bp, Homo sapien
gcagcctgatgtcatcatgcgcttt

SEQ ID NO: 4209068 - DNA, 25 bp, Homo sapien
tattctgggtctacattcagctcac

SEQ ID NO: 4209069 - DNA, 25 bp, Homo sapien
tcacccttataccatctacgtaatt

SEQ ID NO: 4209070 - DNA, 25 bp, Homo sapien
tgtgtacagtgtggtacatgtgcat

SEQ ID NO: 4209071 - DNA, 25 bp, Homo sapien
cagtatttgacagtgggattatgag

SEQ ID NO: 4209072 - DNA, 25 bp, Homo sapien
ttcccctcatgcagcacatcgattt

SEQ ID NO: 4209073 - DNA, 25 bp, Homo sapien
ttctgaattagactgcaatattaaa

SEQ ID NO: 4209074 - DNA, 25 bp, Homo sapien
cattccctgtcttaaatcttctggg

SEQ ID NO: 4209075 - DNA, 25 bp, Homo sapien
atcattccctgtcttaaatcttctg

SEQ ID NO: 4209076 - DNA, 25 bp, Homo sapien
actccttttgccctgtgctgaaagc

SEQ ID NO: 4209077 - DNA, 25 bp, Homo sapien
ttgggttgtccctgtcatgacttca

SEQ ID NO: 4209078 - DNA, 25 bp, Homo sapien
aattcaattataggtctcaaaactg

SEQ ID NO: 4209079 - DNA, 25 bp, Homo sapien
tgtgctgaaagcagacttaattcaa

SEQ ID NO: 4209080 - DNA, 25 bp, Homo sapien
ggaaaactgtactcatggcttccaa

SEQ ID NO: 4209081 - DNA, 25 bp, Homo sapien
tttgctctcactgcccagtctgaca

SEQ ID NO: 4209082 - DNA, 25 bp, Homo sapien
aactgtactcatggcttccaacctt

SEQ ID NO: 4209083 - DNA, 25 bp, Homo sapien
tgctggaaaactgtactcatggctt

SEQ ID NO: 4209084 - DNA, 25 bp, Homo sapien
ttgtcttgcttccaaatttctccat

SEQ ID NO: 4209085 - DNA, 25 bp, Homo sapien
ctgtttcctttgtcttgcttccaaa

SEQ ID NO: 4209086 - DNA, 25 bp, Homo sapien
ctttgtcttgcttccaaatttctcc

SEQ ID NO: 4209087 - DNA, 25 bp, Homo sapien
ttcctttgtcttgcttccaaatttc

SEQ ID NO: 4209088 - DNA, 25 bp, Homo sapien
tccagctttgatgtttccagattcc

SEQ ID NO: 4209089 - DNA, 25 bp, Homo sapien
agatgttctaatccagctttgatgt

SEQ ID NO: 4209090 - DNA, 25 bp, Homo sapien
taatccagctttgatgtttccagat

SEQ ID NO: 4209091 - DNA, 25 bp, Homo sapien
cagatgttctaatccagctttgatg

SEQ ID NO: 4209092 - DNA, 25 bp, Homo sapien
tcttaggtctatctgcactttccga

SEQ ID NO: 4209093 - DNA, 25 bp, Homo sapien
tgcaatcatcaagagataatgtctt

SEQ ID NO: 4209094 - DNA, 25 bp, Homo sapien
tgacatccacagataccattaagat

SEQ ID NO: 4209095 - DNA, 25 bp, Homo sapien
taatttcctccatgcccttgacatc

SEQ ID NO: 4209096 - DNA, 25 bp, Homo sapien
atgatggggaccattacatatgtac

SEQ ID NO: 4209097 - DNA, 25 bp, Homo sapien
gaatgtaaacaaccctgaataatga

SEQ ID NO: 4209098 - DNA, 25 bp, Homo sapien
catatgtacagctctgacaattgtg

SEQ ID NO: 4209099 - DNA, 25 bp, Homo sapien
tacatatgtacagctctgacaattg

SEQ ID NO: 4209100 - DNA, 25 bp, Homo sapien
ccagaggacaaccgcagcatcttcc

SEQ ID NO: 4209101 - DNA, 25 bp, Homo sapien
aggacaaccgcagcatcttcctcat

SEQ ID NO: 4209102 - DNA, 25 bp, Homo sapien
cagaggacaaccgcagcatcttcct

SEQ ID NO: 4209103 - DNA, 25 bp, Homo sapien
acaaccgcagcatcttcctcattgc

SEQ ID NO: 4209104 - DNA, 25 bp, Homo sapien
ctgctcctcaaatctttcgtaaggg

SEQ ID NO: 4209105 - DNA, 25 bp, Homo sapien
caaatagccttttcttagcgtgact

SEQ ID NO: 4209106 - DNA, 25 bp, Homo sapien
cgtgactggtgaataagttgaatga

SEQ ID NO: 4209107 - DNA, 25 bp, Homo sapien
ctcaaatctttcgtaagggctccct

SEQ ID NO: 4209108 - DNA, 25 bp, Homo sapien
ctggctttggcctgttcagctggtg

SEQ ID NO: 4209109 - DNA, 25 bp, Homo sapien
cagcttcaagaaccagctgtagtct

SEQ ID NO: 4209110 - DNA, 25 bp, Homo sapien
cagcagcttcaagaaccagctgtag

SEQ ID NO: 4209111 - DNA, 25 bp, Homo sapien
ccagctgtagtctggctttggcctg

SEQ ID NO: 4209112 - DNA, 25 bp, Homo sapien
tactggagttcccaatctttagact

SEQ ID NO: 4209113 - DNA, 25 bp, Homo sapien
taattcaggaagctagtataccgat

SEQ ID NO: 4209114 - DNA, 25 bp, Homo sapien
gtataccgatcatactggagttccc

SEQ ID NO: 4209115 - DNA, 25 bp, Homo sapien
gagttcccaatctttagactgtgga

SEQ ID NO: 4209116 - DNA, 25 bp, Homo sapien
gatcagacctgggaaagtattcatc

SEQ ID NO: 4209117 - DNA, 25 bp, Homo sapien
ggcactattatcataggaggtgaca

SEQ ID NO: 4209118 - DNA, 25 bp, Homo sapien
tattgataataatcctgaccctgtg

SEQ ID NO: 4209119 - DNA, 25 bp, Homo sapien
ctccaggagatattacagaaggcac

SEQ ID NO: 4209120 - DNA, 25 bp, Homo sapien
ggagatgggagacaatgatattgat

SEQ ID NO: 4209121 - DNA, 25 bp, Homo sapien
gaagggtcaatcataaactcatcaa

SEQ ID NO: 4209122 - DNA, 25 bp, Homo sapien
taacgacaatgactaatgggctctg

SEQ ID NO: 4209123 - DNA, 25 bp, Homo sapien
ctctgagttagaagggtcaatcata

SEQ ID NO: 4209124 - DNA, 25 bp, Homo sapien
gagttttctatgataacgacaatga

SEQ ID NO: 4209125 - DNA, 25 bp, Homo sapien
caacagcttggccatattgaggtcc

SEQ ID NO: 4209126 - DNA, 25 bp, Homo sapien
actacaagacctacgttaacagtgg

SEQ ID NO: 4209127 - DNA, 25 bp, Homo sapien
taacagtggtttagctatattcgtc

SEQ ID NO: 4209128 - DNA, 25 bp, Homo sapien
taatatagcctctagcaggtatctc

SEQ ID NO: 4209129 - DNA, 25 bp, Homo sapien
tcctcctggcaagtggtaggcattt

SEQ ID NO: 4209130 - DNA, 25 bp, Homo sapien
tggtataccattactagcaagctgt

SEQ ID NO: 4209131 - DNA, 25 bp, Homo sapien
tcccagtccctgagataaacaagta

SEQ ID NO: 4209132 - DNA, 25 bp, Homo sapien
tatttttactgagtcaacgtaccac

SEQ ID NO: 4209133 - DNA, 25 bp, Homo sapien
ggatccaactggaccaaaattattc

SEQ ID NO: 4209134 - DNA, 25 bp, Homo sapien
gccacagtagtaaaaggctttcact

SEQ ID NO: 4209135 - DNA, 25 bp, Homo sapien
attctcatagccacagtagtaaaag

SEQ ID NO: 4209136 - DNA, 25 bp, Homo sapien
caactggaccaaaattattctcata

SEQ ID NO: 4209137 - DNA, 25 bp, Homo sapien
actgtttcagttactgtgcccctga

SEQ ID NO: 4209138 - DNA, 25 bp, Homo sapien
gacttcgttaaagattgagtggttg

SEQ ID NO: 4209139 - DNA, 25 bp, Homo sapien
tatatctagccagttatttcagcac

SEQ ID NO: 4209140 - DNA, 25 bp, Homo sapien
tctctattctgttcctaagtatctg

SEQ ID NO: 4209141 - DNA, 25 bp, Homo sapien
tctacataaaagctacaggagagga

SEQ ID NO: 4209142 - DNA, 25 bp, Homo sapien
tattgcctccttagagaaatctcag

SEQ ID NO: 4209143 - DNA, 25 bp, Homo sapien
gataaactagaggtctcagatgtct

SEQ ID NO: 4209144 - DNA, 25 bp, Homo sapien
cagatgtctattccaactgcactgg

SEQ ID NO: 4209145 - DNA, 25 bp, Homo sapien
tggatcaacattacaactcagggca

SEQ ID NO: 4209146 - DNA, 25 bp, Homo sapien
ggtcacagccataagtactaatcag

SEQ ID NO: 4209147 - DNA, 25 bp, Homo sapien
taaaggtggcacaaaagtagggcac

SEQ ID NO: 4209148 - DNA, 25 bp, Homo sapien
ggaagaccctggtatctcacactaa

SEQ ID NO: 4209149 - DNA, 25 bp, Homo sapien
catgaacatctgtgacatgctgaat

SEQ ID NO: 4209150 - DNA, 25 bp, Homo sapien
tattcatgaacatctgtgacatgct

SEQ ID NO: 4209151 - DNA, 25 bp, Homo sapien
aacatctgtgacatgctgaatattc

SEQ ID NO: 4209152 - DNA, 25 bp, Homo sapien
ttaaatggacattattcatgaacat

SEQ ID NO: 4209153 - DNA, 25 bp, Homo sapien
tccatggctgtttcacttggatgat

SEQ ID NO: 4209154 - DNA, 25 bp, Homo sapien
gctttcaatgcttcatcagcttttg

SEQ ID NO: 4209155 - DNA, 25 bp, Homo sapien
ttctttggctttcaatgcttcatca

SEQ ID NO: 4209156 - DNA, 25 bp, Homo sapien
tctttctttggctttcaatgcttca

SEQ ID NO: 4209157 - DNA, 25 bp, Homo sapien
ggctttcaatgcttcatcagctttt

SEQ ID NO: 4209158 - DNA, 25 bp, Homo sapien
gcaatagcttaatagttacggcctg

SEQ ID NO: 4209159 - DNA, 25 bp, Homo sapien
tggaatcccgttgcaagctcaaaat

SEQ ID NO: 4209160 - DNA, 25 bp, Homo sapien
cagagtgaattactagtggcttaca

SEQ ID NO: 4209161 - DNA, 25 bp, Homo sapien
tacattaatcactctcagggaactg

SEQ ID NO: 4209162 - DNA, 25 bp, Homo sapien
aaaataaaggacatagcataccact

SEQ ID NO: 4209163 - DNA, 25 bp, Homo sapien
gcataccacttaatcccagaaaact

SEQ ID NO: 4209164 - DNA, 25 bp, Homo sapien
tcacatatgttgtattaatcctcca

SEQ ID NO: 4209165 - DNA, 25 bp, Homo sapien
caactaaattatactggaacaactg

SEQ ID NO: 4209166 - DNA, 25 bp, Homo sapien
ctgtgaattcaccatcagtatacag

SEQ ID NO: 4209167 - DNA, 25 bp, Homo sapien
acttgtatattcacagcaaattctg

SEQ ID NO: 4209168 - DNA, 25 bp, Homo sapien
tgtgaattcaccatcagtatacaga

SEQ ID NO: 4209169 - DNA, 25 bp, Homo sapien
gtgaattcaccatcagtatacagaa

SEQ ID NO: 4209170 - DNA, 25 bp, Homo sapien
tttatagcttaggaaagtctgagtc

SEQ ID NO: 4209171 - DNA, 25 bp, Homo sapien
cattcccaataagtctgcagaagtc

SEQ ID NO: 4209172 - DNA, 25 bp, Homo sapien
taagtctgcagaagtcgtttatagc

SEQ ID NO: 4209173 - DNA, 25 bp, Homo sapien
gcagaagtcgtttatagcttaggaa

SEQ ID NO: 4209174 - DNA, 25 bp, Homo sapien
caaagtggtaggagtgataagatcc

SEQ ID NO: 4209175 - DNA, 25 bp, Homo sapien
gtgatagtctagtgaaaatactaac

SEQ ID NO: 4209176 - DNA, 25 bp, Homo sapien
tgatcatctcaacaagacatagaaa

SEQ ID NO: 4209177 - DNA, 25 bp, Homo sapien
gtgctgagatcatagctctattatt

SEQ ID NO: 4209178 - DNA, 25 bp, Homo sapien
catgacatggctctacactgatact

SEQ ID NO: 4209179 - DNA, 25 bp, Homo sapien
gacaaggctggtgttacaaataaac

SEQ ID NO: 4209180 - DNA, 25 bp, Homo sapien
cactgatactaaagatggatgttga

SEQ ID NO: 4209181 - DNA, 25 bp, Homo sapien
cctattgtggatagacaaggctggt

SEQ ID NO: 4209182 - DNA, 25 bp, Homo sapien
tccttcctcacatagcaaggtggtt

SEQ ID NO: 4209183 - DNA, 25 bp, Homo sapien
tcctcacatagcaaggtggttttct

SEQ ID NO: 4209184 - DNA, 25 bp, Homo sapien
cttcctcacatagcaaggtggtttt

SEQ ID NO: 4209185 - DNA, 25 bp, Homo sapien
ttcctcacatagcaaggtggttttc

SEQ ID NO: 4209186 - DNA, 25 bp, Homo sapien
taaacgacactacttcctagcggcc

SEQ ID NO: 4209187 - DNA, 25 bp, Homo sapien
aatataaacgacactacttcctagc

SEQ ID NO: 4209188 - DNA, 25 bp, Homo sapien
tataaacgacactacttcctagcgg

SEQ ID NO: 4209189 - DNA, 25 bp, Homo sapien
tacttcctagcggcccacaaatcag

SEQ ID NO: 4209190 - DNA, 25 bp, Homo sapien
cttcaaatggctactgggagtatga

SEQ ID NO: 4209191 - DNA, 25 bp, Homo sapien
caggtcagctgtctgtagattctaa

SEQ ID NO: 4209192 - DNA, 25 bp, Homo sapien
ggcaggactacaatgaaacagaagc

SEQ ID NO: 4209193 - DNA, 25 bp, Homo sapien
tgtagggacaccataactataaagt

SEQ ID NO: 4209194 - DNA, 25 bp, Homo sapien
tacaaatcatccttgcaacaaggca

SEQ ID NO: 4209195 - DNA, 25 bp, Homo sapien
tcaatgggaattaccagatctgttg

SEQ ID NO: 4209196 - DNA, 25 bp, Homo sapien
caccgaagatctactgtctatgaaa

SEQ ID NO: 4209197 - DNA, 25 bp, Homo sapien
cagtaaattagcataggtccaatgg

SEQ ID NO: 4209198 - DNA, 25 bp, Homo sapien
tgttttgtaaaacagtgttcatgtc

SEQ ID NO: 4209199 - DNA, 25 bp, Homo sapien
atgttttgtaaaacagtgttcatgt

SEQ ID NO: 4209200 - DNA, 25 bp, Homo sapien
gttttgtaaaacagtgttcatgtcc

SEQ ID NO: 4209201 - DNA, 25 bp, Homo sapien
gttcagcacaaagggccaccaccaa

SEQ ID NO: 4209202 - DNA, 25 bp, Homo sapien
cagcacaaagggccaccaccaacat

SEQ ID NO: 4209203 - DNA, 25 bp, Homo sapien
gtgttcagcacaaagggccaccacc

SEQ ID NO: 4209204 - DNA, 25 bp, Homo sapien
cttaggtagatttggtgttcagcac

SEQ ID NO: 4209205 - DNA, 25 bp, Homo sapien
tactacacaattgcaaccaatgact

SEQ ID NO: 4209206 - DNA, 25 bp, Homo sapien
ctactacacaattgcaaccaatgac

SEQ ID NO: 4209207 - DNA, 25 bp, Homo sapien
cctctctctttttttccataagcca

SEQ ID NO: 4209208 - DNA, 25 bp, Homo sapien
tctctctttttttccataagccaaa

SEQ ID NO: 4209209 - DNA, 25 bp, Homo sapien
tttgcttattttttttgtatctgaa

SEQ ID NO: 4209210 - DNA, 25 bp, Homo sapien
tgcttattttttttgtatctgaagt

SEQ ID NO: 4209211 - DNA, 25 bp, Homo sapien
taagatctgactatacagtgggtag

SEQ ID NO: 4209212 - DNA, 25 bp, Homo sapien
gagaaaatagtctatggccccatgt

SEQ ID NO: 4209213 - DNA, 25 bp, Homo sapien
tagatacggtgatgactgacttgaa

SEQ ID NO: 4209214 - DNA, 25 bp, Homo sapien
gatgtcagaagcaaatggataccta

SEQ ID NO: 4209215 - DNA, 25 bp, Homo sapien
tctgctatgtaccagctgtgtggct

SEQ ID NO: 4209216 - DNA, 25 bp, Homo sapien
caagtggttcaagagtgttggtctc

SEQ ID NO: 4209217 - DNA, 25 bp, Homo sapien
taatagcctaaacatcatagggtgg

SEQ ID NO: 4209218 - DNA, 25 bp, Homo sapien
tatggcatggagatagtaatagcct

SEQ ID NO: 4209219 - DNA, 25 bp, Homo sapien
cttgcaaatctcttcttgagtgaaa

SEQ ID NO: 4209220 - DNA, 25 bp, Homo sapien
gccacctgtgagtaaaagggcctct

SEQ ID NO: 4209221 - DNA, 25 bp, Homo sapien
ttgagtgaaagcttcttctccccag

SEQ ID NO: 4209222 - DNA, 25 bp, Homo sapien
catttggcttttagcatatgctgcc

SEQ ID NO: 4209223 - DNA, 25 bp, Homo sapien
tgtcagcgtattttggtgtaagcat

SEQ ID NO: 4209224 - DNA, 25 bp, Homo sapien
ggtataatgtcagcgtattttggtg

SEQ ID NO: 4209225 - DNA, 25 bp, Homo sapien
ctgaaaaagagggtataatgtcagc

SEQ ID NO: 4209226 - DNA, 25 bp, Homo sapien
gagggtataatgtcagcgtattttg

SEQ ID NO: 4209227 - DNA, 25 bp, Homo sapien
tacttgttctaccagggtggcttgg

SEQ ID NO: 4209228 - DNA, 25 bp, Homo sapien
gtctgctgaacaaaagaatcacttt

SEQ ID NO: 4209229 - DNA, 25 bp, Homo sapien
acttctttacttgatctgaatgtct

SEQ ID NO: 4209230 - DNA, 25 bp, Homo sapien
caatagcttcaatttcttttactct

SEQ ID NO: 4209231 - DNA, 25 bp, Homo sapien
acttgatagcagtagggatgctggt

SEQ ID NO: 4209232 - DNA, 25 bp, Homo sapien
atgctggtaggatctatttcttttt

SEQ ID NO: 4209233 - DNA, 25 bp, Homo sapien
tacttgatagcagtagggatgctgg

SEQ ID NO: 4209234 - DNA, 25 bp, Homo sapien
gggatgctggtaggatctatttctt

SEQ ID NO: 4209235 - DNA, 25 bp, Homo sapien
ccttggtgttagcacaaaaggataa

SEQ ID NO: 4209236 - DNA, 25 bp, Homo sapien
gccagatgcctatttttagcaaggg

SEQ ID NO: 4209237 - DNA, 25 bp, Homo sapien
tgaacctgtttcctccaatggtctc

SEQ ID NO: 4209238 - DNA, 25 bp, Homo sapien
ttcagtaaattagacttcaactgac

SEQ ID NO: 4209239 - DNA, 25 bp, Homo sapien
ttcctcagcatcagctttctcgata

SEQ ID NO: 4209240 - DNA, 25 bp, Homo sapien
gagagcaattaatctcttgaaccat

SEQ ID NO: 4209241 - DNA, 25 bp, Homo sapien
cattagtctttcttgtcggagagca

SEQ ID NO: 4209242 - DNA, 25 bp, Homo sapien
cctcagcatcagctttctcgataaa

SEQ ID NO: 4209243 - DNA, 25 bp, Homo sapien
tgctgacaatccaatccaactatat

SEQ ID NO: 4209244 - DNA, 25 bp, Homo sapien
aaatttccaatgttactgctgacaa

SEQ ID NO: 4209245 - DNA, 25 bp, Homo sapien
ttcaagcctacatgagagacaaatg

SEQ ID NO: 4209246 - DNA, 25 bp, Homo sapien
tgagactacctttatatataatcag

SEQ ID NO: 4209247 - DNA, 25 bp, Homo sapien
catgttgtaaaggagcatctagtag

SEQ ID NO: 4209248 - DNA, 25 bp, Homo sapien
gctgagatctgctaacatgttgtaa

SEQ ID NO: 4209249 - DNA, 25 bp, Homo sapien
caactggttaggtctagcatgaaca

SEQ ID NO: 4209250 - DNA, 25 bp, Homo sapien
tggttgaataccatacggaagatga

SEQ ID NO: 4209251 - DNA, 25 bp, Homo sapien
caaggcctaaaagtcctatctctgg

SEQ ID NO: 4209252 - DNA, 25 bp, Homo sapien
gttgattgtcattcagctactagag

SEQ ID NO: 4209253 - DNA, 25 bp, Homo sapien
tgtcagctgttaaaaaccagttttg

SEQ ID NO: 4209254 - DNA, 25 bp, Homo sapien
tctggcatgtttagtatggaacgta

SEQ ID NO: 4209255 - DNA, 25 bp, Homo sapien
taaattagtgactggacaacagaag

SEQ ID NO: 4209256 - DNA, 25 bp, Homo sapien
ctttccaatagggtgatagtacttc

SEQ ID NO: 4209257 - DNA, 25 bp, Homo sapien
tctgagctacagtcttcgcagagac

SEQ ID NO: 4209258 - DNA, 25 bp, Homo sapien
tatgttggcagtcctaccctgaaga

SEQ ID NO: 4209259 - DNA, 25 bp, Homo sapien
tcagggatattgagaaaactgccta

SEQ ID NO: 4209260 - DNA, 25 bp, Homo sapien
atcagggatattgagaaaactgcct

SEQ ID NO: 4209261 - DNA, 25 bp, Homo sapien
tgtatttggggtacttgccacagag

SEQ ID NO: 4209262 - DNA, 25 bp, Homo sapien
caatgccaaggtgtagttggttgct

SEQ ID NO: 4209263 - DNA, 25 bp, Homo sapien
cacggagacaatgccaaggtgtagt

SEQ ID NO: 4209264 - DNA, 25 bp, Homo sapien
caaggtgtagttggttgctagccat

SEQ ID NO: 4209265 - DNA, 25 bp, Homo sapien
catttcctcttccacggagacaatg

SEQ ID NO: 4209266 - DNA, 25 bp, Homo sapien
agatgggaaaatggtgcataccgat

SEQ ID NO: 4209267 - DNA, 25 bp, Homo sapien
tatctttttgaaagatgggaaaatg

SEQ ID NO: 4209268 - DNA, 25 bp, Homo sapien
gggaaaatggtgcataccgattaag

SEQ ID NO: 4209269 - DNA, 25 bp, Homo sapien
aaatggtgcataccgattaagtgac

SEQ ID NO: 4209270 - DNA, 25 bp, Homo sapien
aagagctagcctccagtacggacga

SEQ ID NO: 4209271 - DNA, 25 bp, Homo sapien
gataggaggtgcgtgacaccgagct

SEQ ID NO: 4209272 - DNA, 25 bp, Homo sapien
aaacgatgttaactcgccgcggccg

SEQ ID NO: 4209273 - DNA, 25 bp, Homo sapien
gacaccgagctgctttcccattgga

SEQ ID NO: 4209274 - DNA, 25 bp, Homo sapien
caaaactgctgttcagcatcctgaa

SEQ ID NO: 4209275 - DNA, 25 bp, Homo sapien
aactgctgttcagcatcctgaacat

SEQ ID NO: 4209276 - DNA, 25 bp, Homo sapien
tcaaaactgctgttcagcatcctga

SEQ ID NO: 4209277 - DNA, 25 bp, Homo sapien
aaaactgctgttcagcatcctgaac

SEQ ID NO: 4209278 - DNA, 25 bp, Homo sapien
cgcgaccccggactcctggctcccg

SEQ ID NO: 4209279 - DNA, 25 bp, Homo sapien
cggactcctggctcccgtaactcac

SEQ ID NO: 4209280 - DNA, 25 bp, Homo sapien
ccggactcctggctcccgtaactca

SEQ ID NO: 4209281 - DNA, 25 bp, Homo sapien
attcccgcgcgaccccggactcctg

SEQ ID NO: 4209282 - DNA, 25 bp, Homo sapien
caatgtgtttgtaacaatggccaaa

SEQ ID NO: 4209283 - DNA, 25 bp, Homo sapien
gctctccaaattgcaaacctagaaa

SEQ ID NO: 4209284 - DNA, 25 bp, Homo sapien
gggatacaactagactatgtcaatg

SEQ ID NO: 4209285 - DNA, 25 bp, Homo sapien
tagggcatcacattacttcactggg

SEQ ID NO: 4209286 - DNA, 25 bp, Homo sapien
aaatgcacaaatgagttacccatgg

SEQ ID NO: 4209287 - DNA, 25 bp, Homo sapien
tacagatcaatagtacacacggagc

SEQ ID NO: 4209288 - DNA, 25 bp, Homo sapien
cacggagcagctcatgttttagcac

SEQ ID NO: 4209289 - DNA, 25 bp, Homo sapien
tcaaaatttggcatacgtatcactc

SEQ ID NO: 4209290 - DNA, 25 bp, Homo sapien
agtttctgacttgtatgattttcct

SEQ ID NO: 4209291 - DNA, 25 bp, Homo sapien
tgtctgagacagtctatttcttctt

SEQ ID NO: 4209292 - DNA, 25 bp, Homo sapien
tctgagacagtctatttcttcttga

SEQ ID NO: 4209293 - DNA, 25 bp, Homo sapien
tttgtctgagacagtctatttcttc

SEQ ID NO: 4209294 - DNA, 25 bp, Homo sapien
aattactgagcagacttaaggccgg

SEQ ID NO: 4209295 - DNA, 25 bp, Homo sapien
gaggtagattggcattcaatccatt

SEQ ID NO: 4209296 - DNA, 25 bp, Homo sapien
acttaaggccgggatatacacttgg

SEQ ID NO: 4209297 - DNA, 25 bp, Homo sapien
taaattcttcccgtcatatacagtc

SEQ ID NO: 4209298 - DNA, 25 bp, Homo sapien
gtgactgtggctatactgaactctg

SEQ ID NO: 4209299 - DNA, 25 bp, Homo sapien
tcttgcgtggtagctcaaatctcca

SEQ ID NO: 4209300 - DNA, 25 bp, Homo sapien
ggttaagccttagacagatttgtac

SEQ ID NO: 4209301 - DNA, 25 bp, Homo sapien
tgtcttatgcatacgtggttaagcc

SEQ ID NO: 4209302 - DNA, 25 bp, Homo sapien
cagcagcatgtatctctaactttga

SEQ ID NO: 4209303 - DNA, 25 bp, Homo sapien
aaatgttgatactctcagccttggg

SEQ ID NO: 4209304 - DNA, 25 bp, Homo sapien
ttctcgtaccccaagtacatgggca

SEQ ID NO: 4209305 - DNA, 25 bp, Homo sapien
aagccctggagctggttacctacgc

SEQ ID NO: 4209306 - DNA, 25 bp, Homo sapien
tcctgatgatagttccaagggcttc

SEQ ID NO: 4209307 - DNA, 25 bp, Homo sapien
tgatagttccaagggcttcttgtgc

SEQ ID NO: 4209308 - DNA, 25 bp, Homo sapien
tgatgatagttccaagggcttcttg

SEQ ID NO: 4209309 - DNA, 25 bp, Homo sapien
cctgatgatagttccaagggcttct

SEQ ID NO: 4209310 - DNA, 25 bp, Homo sapien
ttctcggtgtgcaagaatggactca

SEQ ID NO: 4209311 - DNA, 25 bp, Homo sapien
attttctcggtgtgcaagaatggac

SEQ ID NO: 4209312 - DNA, 25 bp, Homo sapien
tttctcggtgtgcaagaatggactc

SEQ ID NO: 4209313 - DNA, 25 bp, Homo sapien
ttttctcggtgtgcaagaatggact

SEQ ID NO: 4209314 - DNA, 25 bp, Homo sapien
gagatactgagcaagtctcttccaa

SEQ ID NO: 4209315 - DNA, 25 bp, Homo sapien
tctccctctaccatcagagatactg

SEQ ID NO: 4209316 - DNA, 25 bp, Homo sapien
cattatgtcctctacgattatgagc

SEQ ID NO: 4209317 - DNA, 25 bp, Homo sapien
aagaatcttcaccatcattatgtcc

SEQ ID NO: 4209318 - DNA, 25 bp, Homo sapien
aaggcacaagagaacaactcgttgc

SEQ ID NO: 4209319 - DNA, 25 bp, Homo sapien
caccaaaatcgccaaaaggcacaag

SEQ ID NO: 4209320 - DNA, 25 bp, Homo sapien
aaaggcacaagagaacaactcgttg

SEQ ID NO: 4209321 - DNA, 25 bp, Homo sapien
gattgttttgaccacctcactcctg

SEQ ID NO: 4209322 - DNA, 25 bp, Homo sapien
tacctagtagaagtaagccatcact

SEQ ID NO: 4209323 - DNA, 25 bp, Homo sapien
ttactctccttctacggtctaaaga

SEQ ID NO: 4209324 - DNA, 25 bp, Homo sapien
gaatcaatgccttatctcagtggca

SEQ ID NO: 4209325 - DNA, 25 bp, Homo sapien
atatttgacaccatttggtccattg

SEQ ID NO: 4209326 - DNA, 25 bp, Homo sapien
catatttgacaccatttggtccatt

SEQ ID NO: 4209327 - DNA, 25 bp, Homo sapien
tatttgacaccatttggtccattgt

SEQ ID NO: 4209328 - DNA, 25 bp, Homo sapien
caagtttcgtacctcctcctgtagg

SEQ ID NO: 4209329 - DNA, 25 bp, Homo sapien
ccttaagtctttgggtgctcgtggc

SEQ ID NO: 4209330 - DNA, 25 bp, Homo sapien
tgacccttgtgtgtaatcttgccaa

SEQ ID NO: 4209331 - DNA, 25 bp, Homo sapien
ctagagggtcctaacggtcgtccat

SEQ ID NO: 4209332 - DNA, 25 bp, Homo sapien
tcctcctggagctcgacgagtttga

SEQ ID NO: 4209333 - DNA, 25 bp, Homo sapien
tggaataagtcataactgaggaaga

SEQ ID NO: 4209334 - DNA, 25 bp, Homo sapien
cgacgagtttgagttgaggcctgaa

SEQ ID NO: 4209335 - DNA, 25 bp, Homo sapien
ctgaaaaacctttggcggttcatct

SEQ ID NO: 4209336 - DNA, 25 bp, Homo sapien
gacatgagctcggtcatggatatga

SEQ ID NO: 4209337 - DNA, 25 bp, Homo sapien
cattttttctagtccactgtcagaa

SEQ ID NO: 4209338 - DNA, 25 bp, Homo sapien
tcatggatatgatgaccaatagcca

SEQ ID NO: 4209339 - DNA, 25 bp, Homo sapien
tgactttttaatgacatgagctcgg

SEQ ID NO: 4209340 - DNA, 25 bp, Homo sapien
gattctcatggccaacacttctcat

SEQ ID NO: 4209341 - DNA, 25 bp, Homo sapien
taagttctcgggagccaggattctc

SEQ ID NO: 4209342 - DNA, 25 bp, Homo sapien
gtgtcgtcctggtttgtacttcaaa

SEQ ID NO: 4209343 - DNA, 25 bp, Homo sapien
tagtgtttcctagattgtgtcgtcc

SEQ ID NO: 4209344 - DNA, 25 bp, Homo sapien
gaaaatgccactgttagggccagaa

SEQ ID NO: 4209345 - DNA, 25 bp, Homo sapien
cagtgccggttaagagaaaatgcca

SEQ ID NO: 4209346 - DNA, 25 bp, Homo sapien
tcagaaaatgccattggacagtgcc

SEQ ID NO: 4209347 - DNA, 25 bp, Homo sapien
gccttctctaagtgcgacctggatt

SEQ ID NO: 4209348 - DNA, 25 bp, Homo sapien
ttccatgttcaatggctggactttg

SEQ ID NO: 4209349 - DNA, 25 bp, Homo sapien
tgtcccccaaaacatttgatctcct

SEQ ID NO: 4209350 - DNA, 25 bp, Homo sapien
agcctttgatgtggagtttgtcccc

SEQ ID NO: 4209351 - DNA, 25 bp, Homo sapien
ttcaatggctggactttgttgaggt

SEQ ID NO: 4209352 - DNA, 25 bp, Homo sapien
tcagatatcagaagaaagttgccaa

SEQ ID NO: 4209353 - DNA, 25 bp, Homo sapien
gattggtcttatgcttattacccag

SEQ ID NO: 4209354 - DNA, 25 bp, Homo sapien
gctaggaccttcatgaacattcaga

SEQ ID NO: 4209355 - DNA, 25 bp, Homo sapien
gacagaactgatttaacagcaagag

SEQ ID NO: 4209356 - DNA, 25 bp, Homo sapien
ctaattataagtgatagaactgctc

SEQ ID NO: 4209357 - DNA, 25 bp, Homo sapien
taaaagaatatttagccaacacaaa

SEQ ID NO: 4209358 - DNA, 25 bp, Homo sapien
tttattaatatcaccctagtacagt

SEQ ID NO: 4209359 - DNA, 25 bp, Homo sapien
gtacagtgttagtaaaaactgagac

SEQ ID NO: 4209360 - DNA, 25 bp, Homo sapien
aaacacccatcagctgtctaacaga

SEQ ID NO: 4209361 - DNA, 25 bp, Homo sapien
aaagctgagcagagtttctccaagg

SEQ ID NO: 4209362 - DNA, 25 bp, Homo sapien
ttaaccttggagacagatgaagctg

SEQ ID NO: 4209363 - DNA, 25 bp, Homo sapien
taagacgttgctcaaaaacacccat

SEQ ID NO: 4209364 - DNA, 25 bp, Homo sapien
cagaacttttctcggtactaccatc

SEQ ID NO: 4209365 - DNA, 25 bp, Homo sapien
ctctaactgcaatctgatgtacagg

SEQ ID NO: 4209366 - DNA, 25 bp, Homo sapien
tgcgcccggcatgtatatagtttta

SEQ ID NO: 4209367 - DNA, 25 bp, Homo sapien
cacccatcataagaagttgttgcaa

SEQ ID NO: 4209368 - DNA, 25 bp, Homo sapien
gaggctggagtattatgaaaagtcg

SEQ ID NO: 4209369 - DNA, 25 bp, Homo sapien
tatgctccatttgtttagaaccaga

SEQ ID NO: 4209370 - DNA, 25 bp, Homo sapien
tgtcctcaagaaatggttactccaa

SEQ ID NO: 4209371 - DNA, 25 bp, Homo sapien
gatgatgggataatgggtactttct

SEQ ID NO: 4209372 - DNA, 25 bp, Homo sapien
ggcttacattggaagctcctacaag

SEQ ID NO: 4209373 - DNA, 25 bp, Homo sapien
ggacatttccgggacattcattggt

SEQ ID NO: 4209374 - DNA, 25 bp, Homo sapien
cagtcacattgggatacttaacttg

SEQ ID NO: 4209375 - DNA, 25 bp, Homo sapien
taggaagaactaatgatatgacaag

SEQ ID NO: 4209376 - DNA, 25 bp, Homo sapien
gccaagtaataccaggcctcagcca

SEQ ID NO: 4209377 - DNA, 25 bp, Homo sapien
aggtcccggcaccacattgacggca

SEQ ID NO: 4209378 - DNA, 25 bp, Homo sapien
atagtacgccccagcggcaggcaaa

SEQ ID NO: 4209379 - DNA, 25 bp, Homo sapien
tccaagctcgtaattcgccggtggc

SEQ ID NO: 4209380 - DNA, 25 bp, Homo sapien
gcaacatgttgtcggcatcatccag

SEQ ID NO: 4209381 - DNA, 25 bp, Homo sapien
ccaatgttgtaagagcacttccggg

SEQ ID NO: 4209382 - DNA, 25 bp, Homo sapien
agtcacgccggcagccaatgttgta

SEQ ID NO: 4209383 - DNA, 25 bp, Homo sapien
cagctgccggtaacgcaccgggaag

SEQ ID NO: 4209384 - DNA, 25 bp, Homo sapien
aagcgcagagcacgcgtcaaagtcc

SEQ ID NO: 4209385 - DNA, 25 bp, Homo sapien
gcgccccagagccgcgacggctgca

SEQ ID NO: 4209386 - DNA, 25 bp, Homo sapien
gatcacaaggttccgggaatggtcc

SEQ ID NO: 4209387 - DNA, 25 bp, Homo sapien
tcggagctgtcagtcatgaggaccc

SEQ ID NO: 4209388 - DNA, 25 bp, Homo sapien
cttccattgcccagaagggatcaca

SEQ ID NO: 4209389 - DNA, 25 bp, Homo sapien
gagcgactgccagtattcggagctg

SEQ ID NO: 4209390 - DNA, 25 bp, Homo sapien
aaaaaatacgagagctcaattctat

SEQ ID NO: 4209391 - DNA, 25 bp, Homo sapien
aaaaatacgagagctcaattctatg

SEQ ID NO: 4209392 - DNA, 25 bp, Homo sapien
ttttttcattaggaatcacccctga

SEQ ID NO: 4209393 - DNA, 25 bp, Homo sapien
ttctgccagtgtagtaaaggactcg

SEQ ID NO: 4209394 - DNA, 25 bp, Homo sapien
gaagaccatcggcaggccttccaat

SEQ ID NO: 4209395 - DNA, 25 bp, Homo sapien
ttctgttaatgtagttttcccagaa

SEQ ID NO: 4209396 - DNA, 25 bp, Homo sapien
cacatggtgtaagtggctgctgact

SEQ ID NO: 4209397 - DNA, 25 bp, Homo sapien
atctttccacatggtgtaagtggct

SEQ ID NO: 4209398 - DNA, 25 bp, Homo sapien
ttgtctctctagttccatggaatcc

SEQ ID NO: 4209399 - DNA, 25 bp, Homo sapien
gctgactgaatagtgattcctcttt

SEQ ID NO: 4209400 - DNA, 25 bp, Homo sapien
catctgacgattgacagtcatggtc

SEQ ID NO: 4209401 - DNA, 25 bp, Homo sapien
gagcccattcggtccaatttgttaa

SEQ ID NO: 4209402 - DNA, 25 bp, Homo sapien
gtcatggtctggcactgtacccctc

SEQ ID NO: 4209403 - DNA, 25 bp, Homo sapien
tagaaacggaacgttgtagcgcttc

SEQ ID NO: 4209404 - DNA, 25 bp, Homo sapien
atcaaaatagatggctcgttcctca

SEQ ID NO: 4209405 - DNA, 25 bp, Homo sapien
catgggtatctgcataaacgctgca

SEQ ID NO: 4209406 - DNA, 25 bp, Homo sapien
cgctgcattatgatttagtttagac

SEQ ID NO: 4209407 - DNA, 25 bp, Homo sapien
aatagatggctcgttcctcaataag

SEQ ID NO: 4209408 - DNA, 25 bp, Homo sapien
taagagcagcatcaactggaaacct

SEQ ID NO: 4209409 - DNA, 25 bp, Homo sapien
tgtaggtaaaggtcactcaagagct

SEQ ID NO: 4209410 - DNA, 25 bp, Homo sapien
cagaggtcactcctcagaacaaagg

SEQ ID NO: 4209411 - DNA, 25 bp, Homo sapien
tgtggagaaacgaccaggctacaga

SEQ ID NO: 4209412 - DNA, 25 bp, Homo sapien
gatcccaattccatagcagaggaag

SEQ ID NO: 4209413 - DNA, 25 bp, Homo sapien
cagaggaaggaaatccctcaggaag

SEQ ID NO: 4209414 - DNA, 25 bp, Homo sapien
gaggaaggaaatccctcaggaagtg

SEQ ID NO: 4209415 - DNA, 25 bp, Homo sapien
cagacctgcgatcccaattccatag

SEQ ID NO: 4209416 - DNA, 25 bp, Homo sapien
gccttactgggccttatatcctaag

SEQ ID NO: 4209417 - DNA, 25 bp, Homo sapien
taagactccccacaactttcagatt

SEQ ID NO: 4209418 - DNA, 25 bp, Homo sapien
tgagagaaacaccttatccactgga

SEQ ID NO: 4209419 - DNA, 25 bp, Homo sapien
ccttggtaattctgggaaagtggat

SEQ ID NO: 4209420 - DNA, 25 bp, Homo sapien
ggccgccgcccttaattcagctgga

SEQ ID NO: 4209421 - DNA, 25 bp, Homo sapien
gtggccgccgcccttaattcagctg

SEQ ID NO: 4209422 - DNA, 25 bp, Homo sapien
caagctgttcatctgaattggcaac

SEQ ID NO: 4209423 - DNA, 25 bp, Homo sapien
cagctggaatctcaccatatcgaac

SEQ ID NO: 4209424 - DNA, 25 bp, Homo sapien
ctttaaatcagaaatcgaggggatt

SEQ ID NO: 4209425 - DNA, 25 bp, Homo sapien
tgttaacataagacttattttgaaa

SEQ ID NO: 4209426 - DNA, 25 bp, Homo sapien
ttaacataagacttattttgaaagc

SEQ ID NO: 4209427 - DNA, 25 bp, Homo sapien
tgttgttaacataagacttattttg

SEQ ID NO: 4209428 - DNA, 25 bp, Homo sapien
aacataagacttattttgaaagcac

SEQ ID NO: 4209429 - DNA, 25 bp, Homo sapien
tacaactgctttcgacactcttgga

SEQ ID NO: 4209430 - DNA, 25 bp, Homo sapien
cactgcaaacagtacgctacaattg

SEQ ID NO: 4209431 - DNA, 25 bp, Homo sapien
tggtacaccagaagctattaactgg

SEQ ID NO: 4209432 - DNA, 25 bp, Homo sapien
caaaagcctatggaatggtacacca

SEQ ID NO: 4209433 - DNA, 25 bp, Homo sapien
gagaatagcatagttctggacttca

SEQ ID NO: 4209434 - DNA, 25 bp, Homo sapien
gatggatttgggaggtattctaaaa

SEQ ID NO: 4209435 - DNA, 25 bp, Homo sapien
tcttcaaggcgcttcccaaaaatac

SEQ ID NO: 4209436 - DNA, 25 bp, Homo sapien
ggcgcttcccaaaaatacaggagta

SEQ ID NO: 4209437 - DNA, 25 bp, Homo sapien
tctatacgtcaaaattgttacccaa

SEQ ID NO: 4209438 - DNA, 25 bp, Homo sapien
aaatcatacttccaactcaaaacag

SEQ ID NO: 4209439 - DNA, 25 bp, Homo sapien
ctgaaaacagctagtcccaaatgag

SEQ ID NO: 4209440 - DNA, 25 bp, Homo sapien
tgatgtaaaccttgagagagagtaa

SEQ ID NO: 4209441 - DNA, 25 bp, Homo sapien
cctacaaatgggtgggaattgtctc

SEQ ID NO: 4209442 - DNA, 25 bp, Homo sapien
attgtctctactggagttcattagg

SEQ ID NO: 4209443 - DNA, 25 bp, Homo sapien
gtgggaattgtctctactggagttc

SEQ ID NO: 4209444 - DNA, 25 bp, Homo sapien
agccaggcctacaaatgggtgggaa

SEQ ID NO: 4209445 - DNA, 25 bp, Homo sapien
caactgagagttcccaatcgccaaa

SEQ ID NO: 4209446 - DNA, 25 bp, Homo sapien
tctagtgagacggaaaaaggaccta

SEQ ID NO: 4209447 - DNA, 25 bp, Homo sapien
tatacaagataagcctgaggcgtct

SEQ ID NO: 4209448 - DNA, 25 bp, Homo sapien
gaataacacttcacctcgatggcag

SEQ ID NO: 4209449 - DNA, 25 bp, Homo sapien
ttatagatggtgtcacccttcttta

SEQ ID NO: 4209450 - DNA, 25 bp, Homo sapien
tcttgtccttgtgttatagatggtg

SEQ ID NO: 4209451 - DNA, 25 bp, Homo sapien
ctccctgataactgcgaacataagt

SEQ ID NO: 4209452 - DNA, 25 bp, Homo sapien
taagttaattgtccaaatcgaccta

SEQ ID NO: 4209453 - DNA, 25 bp, Homo sapien
tgcgagccagccgttgcaaccgtac

SEQ ID NO: 4209454 - DNA, 25 bp, Homo sapien
gtcggcatgcatgcgagccagccgt

SEQ ID NO: 4209455 - DNA, 25 bp, Homo sapien
ccatcatgtcggcatgcatgcgagc

SEQ ID NO: 4209456 - DNA, 25 bp, Homo sapien
atgcatgcgagccagccgttgcaac

SEQ ID NO: 4209457 - DNA, 25 bp, Homo sapien
ggttttcagactgacaattcctctt

SEQ ID NO: 4209458 - DNA, 25 bp, Homo sapien
cgctgtcgggttttcagactgacaa

SEQ ID NO: 4209459 - DNA, 25 bp, Homo sapien
caacgctgtcgggttttcagactga

SEQ ID NO: 4209460 - DNA, 25 bp, Homo sapien
aaacagcaacgctgtcgggttttca

SEQ ID NO: 4209461 - DNA, 25 bp, Homo sapien
gtctgtgaatgtgtctccactagca

SEQ ID NO: 4209462 - DNA, 25 bp, Homo sapien
cactagcacagtcaatgccaaacaa

SEQ ID NO: 4209463 - DNA, 25 bp, Homo sapien
caatgccaaacaatgcacagatgtc

SEQ ID NO: 4209464 - DNA, 25 bp, Homo sapien
gatgtctccggcatatacttcctca

SEQ ID NO: 4209465 - DNA, 25 bp, Homo sapien
tgacaggatcaggaacatgaattga

SEQ ID NO: 4209466 - DNA, 25 bp, Homo sapien
gacaggatcaggaacatgaattgac

SEQ ID NO: 4209467 - DNA, 25 bp, Homo sapien
cttgttagaaggcttcattgctatt

SEQ ID NO: 4209468 - DNA, 25 bp, Homo sapien
gttagaaggcttcattgctattgaa

SEQ ID NO: 4209469 - DNA, 25 bp, Homo sapien
gcaagaaagggacttaaccagctgt

SEQ ID NO: 4209470 - DNA, 25 bp, Homo sapien
ggcaggagatatctgaagcaagaaa

SEQ ID NO: 4209471 - DNA, 25 bp, Homo sapien
gatatctgaagcaagaaagggactt

SEQ ID NO: 4209472 - DNA, 25 bp, Homo sapien
cttaaccagctgttgacggcactga

SEQ ID NO: 4209473 - DNA, 25 bp, Homo sapien
tccaggtgtaattctcccattccag

SEQ ID NO: 4209474 - DNA, 25 bp, Homo sapien
catagatttccaggtgtaattctcc

SEQ ID NO: 4209475 - DNA, 25 bp, Homo sapien
ctgagcatagatttccaggtgtaat

SEQ ID NO: 4209476 - DNA, 25 bp, Homo sapien
gatttccaggtgtaattctcccatt

SEQ ID NO: 4209477 - DNA, 25 bp, Homo sapien
ttaatgaaacagacagtaataaatt

SEQ ID NO: 4209478 - DNA, 25 bp, Homo sapien
tgaaacagacagtaataaattgatt

SEQ ID NO: 4209479 - DNA, 25 bp, Homo sapien
gacagtaataaattgatttcaactt

SEQ ID NO: 4209480 - DNA, 25 bp, Homo sapien
attgatttcaacttaacttccttat

SEQ ID NO: 4209481 - DNA, 25 bp, Homo sapien
ttcctgtgatacaaggacagccata

SEQ ID NO: 4209482 - DNA, 25 bp, Homo sapien
cctgtgatacaaggacagccatact

SEQ ID NO: 4209483 - DNA, 25 bp, Homo sapien
tctctcgaaaggcaacttttggctt

SEQ ID NO: 4209484 - DNA, 25 bp, Homo sapien
acaggggcagtaatggtctctcgaa

SEQ ID NO: 4209485 - DNA, 25 bp, Homo sapien
cctggcaaatgcaagttctctggca

SEQ ID NO: 4209486 - DNA, 25 bp, Homo sapien
ttattccctggcaaatgcaagttct

SEQ ID NO: 4209487 - DNA, 25 bp, Homo sapien
gttctctggcatccacaatacggca

SEQ ID NO: 4209488 - DNA, 25 bp, Homo sapien
ttccctggcaaatgcaagttctctg

SEQ ID NO: 4209489 - DNA, 25 bp, Homo sapien
aaactgagactccttgtatagccac

SEQ ID NO: 4209490 - DNA, 25 bp, Homo sapien
tcataatatagcatctcaggtaaag

SEQ ID NO: 4209491 - DNA, 25 bp, Homo sapien
tcatgtaaatccagataggcaccag

SEQ ID NO: 4209492 - DNA, 25 bp, Homo sapien
tttacctttatttgatgccattctg

SEQ ID NO: 4209493 - DNA, 25 bp, Homo sapien
tatgggcaaagtttacaaggatcag

SEQ ID NO: 4209494 - DNA, 25 bp, Homo sapien
agttgttgtgaaatacctgcctctg

SEQ ID NO: 4209495 - DNA, 25 bp, Homo sapien
tgaaaaacactgaccatatgggcaa

SEQ ID NO: 4209496 - DNA, 25 bp, Homo sapien
gaaaggaactgcaatctgtaccaca

SEQ ID NO: 4209497 - DNA, 25 bp, Homo sapien
ttgacctcgtgacccacctgcgttg

SEQ ID NO: 4209498 - DNA, 25 bp, Homo sapien
cttgacctcgtgacccacctgcgtt

SEQ ID NO: 4209499 - DNA, 25 bp, Homo sapien
gatctgtgatgtctatatggtaata

SEQ ID NO: 4209500 - DNA, 25 bp, Homo sapien
tctagatctgtgatgtctatatggt

SEQ ID NO: 4209501 - DNA, 25 bp, Homo sapien
tctgtgatgtctatatggtaataac

SEQ ID NO: 4209502 - DNA, 25 bp, Homo sapien
gatgtctatatggtaataactaacc

SEQ ID NO: 4209503 - DNA, 25 bp, Homo sapien
tatacacaacgttctctatgagaca

SEQ ID NO: 4209504 - DNA, 25 bp, Homo sapien
ttctcaagtatacacaacgttctct

SEQ ID NO: 4209505 - DNA, 25 bp, Homo sapien
tggaacgctgacatattctcaagta

SEQ ID NO: 4209506 - DNA, 25 bp, Homo sapien
caaaactgtggaacgctgacatatt

SEQ ID NO: 4209507 - DNA, 25 bp, Homo sapien
aatatgatggtcttgctataaaagt

SEQ ID NO: 4209508 - DNA, 25 bp, Homo sapien
tatgatggtcttgctataaaagttt

SEQ ID NO: 4209509 - DNA, 25 bp, Homo sapien
tgatggtcttgctataaaagtttat

SEQ ID NO: 4209510 - DNA, 25 bp, Homo sapien
tgaatatgatggtcttgctataaaa

SEQ ID NO: 4209511 - DNA, 25 bp, Homo sapien
atttgatccgaatgtttcatctgaa

SEQ ID NO: 4209512 - DNA, 25 bp, Homo sapien
tacttttccatactggcctgcacca

SEQ ID NO: 4209513 - DNA, 25 bp, Homo sapien
aatttagtgtagtcctctgggtcca

SEQ ID NO: 4209514 - DNA, 25 bp, Homo sapien
gacacctattacttttccatactgg

SEQ ID NO: 4209515 - DNA, 25 bp, Homo sapien
cttaatgaattagagattctaaatc

SEQ ID NO: 4209516 - DNA, 25 bp, Homo sapien
gtatgatttaatacctgataaactg

SEQ ID NO: 4209517 - DNA, 25 bp, Homo sapien
cattgtcacagcatggatttacagc

SEQ ID NO: 4209518 - DNA, 25 bp, Homo sapien
aaatcagatggaaagcttaacaatc

SEQ ID NO: 4209519 - DNA, 25 bp, Homo sapien
agtagtagacatgagacagtagcac

SEQ ID NO: 4209520 - DNA, 25 bp, Homo sapien
caggtgttgggaatctaaagaatga

SEQ ID NO: 4209521 - DNA, 25 bp, Homo sapien
ggtgttgggaatctaaagaatgatc

SEQ ID NO: 4209522 - DNA, 25 bp, Homo sapien
catgagacagtagcacccaggtgtt

SEQ ID NO: 4209523 - DNA, 25 bp, Homo sapien
caaggaaatgtcacatagtcttatc

SEQ ID NO: 4209524 - DNA, 25 bp, Homo sapien
tgtcacatagtcttatctgatcctc

SEQ ID NO: 4209525 - DNA, 25 bp, Homo sapien
catgcccggcctatgacagtcataa

SEQ ID NO: 4209526 - DNA, 25 bp, Homo sapien
ctaacccctcatatgtgcaaagcac

SEQ ID NO: 4209527 - DNA, 25 bp, Homo sapien
cccagagagcttgtgaccagaaaga

SEQ ID NO: 4209528 - DNA, 25 bp, Homo sapien
gaatcaaccatgtggtgtgctccat

SEQ ID NO: 4209529 - DNA, 25 bp, Homo sapien
tcctgctcggatgaaagagatttca

SEQ ID NO: 4209530 - DNA, 25 bp, Homo sapien
ttgcaggacaaaccggagcccagag

SEQ ID NO: 4209531 - DNA, 25 bp, Homo sapien
taaagatttgcccactacctacaat

SEQ ID NO: 4209532 - DNA, 25 bp, Homo sapien
tacctacaatattccctgtggagcc

SEQ ID NO: 4209533 - DNA, 25 bp, Homo sapien
gcctagtgctctgggtgaagaagac

SEQ ID NO: 4209534 - DNA, 25 bp, Homo sapien
gcataaggttctagttcatcagcat

SEQ ID NO: 4209535 - DNA, 25 bp, Homo sapien
cagtaagtcaagatcataacactgc

SEQ ID NO: 4209536 - DNA, 25 bp, Homo sapien
gagatggagaatcactttgagccca

SEQ ID NO: 4209537 - DNA, 25 bp, Homo sapien
ttgcagtaagtcaagatcataacac

SEQ ID NO: 4209538 - DNA, 25 bp, Homo sapien
tcaaaaatagaaaagtaatcccagc

SEQ ID NO: 4209539 - DNA, 25 bp, Homo sapien
caactcgcctgccatttttcaatag

SEQ ID NO: 4209540 - DNA, 25 bp, Homo sapien
tgtaactcactaaatctactccctg

SEQ ID NO: 4209541 - DNA, 25 bp, Homo sapien
cctataccataagataagattccaa

SEQ ID NO: 4209542 - DNA, 25 bp, Homo sapien
tgaatcttacccttacacatgcctt

SEQ ID NO: 4209543 - DNA, 25 bp, Homo sapien
gaatacataatgttgcatttgccaa

SEQ ID NO: 4209544 - DNA, 25 bp, Homo sapien
tccacagccataataggttcaagaa

SEQ ID NO: 4209545 - DNA, 25 bp, Homo sapien
tcaactccatcttgcccagtgatta

SEQ ID NO: 4209546 - DNA, 25 bp, Homo sapien
ccatggcgtcggttaattcctgcaa

SEQ ID NO: 4209547 - DNA, 25 bp, Homo sapien
cttctatggttaataaaagcaggac

SEQ ID NO: 4209548 - DNA, 25 bp, Homo sapien
gagttgctttaatagcaaattacag

SEQ ID NO: 4209549 - DNA, 25 bp, Homo sapien
ttaacttctgcacttaagagttgct

SEQ ID NO: 4209550 - DNA, 25 bp, Homo sapien
ttcagcaaggaaatgtgtccatttg

SEQ ID NO: 4209551 - DNA, 25 bp, Homo sapien
tttgacagtcgcaaccagaaaccaa

SEQ ID NO: 4209552 - DNA, 25 bp, Homo sapien
aatacagacgcattttagccattta

SEQ ID NO: 4209553 - DNA, 25 bp, Homo sapien
cacttcgtggagtgaacaccattga

SEQ ID NO: 4209554 - DNA, 25 bp, Homo sapien
tattccaagtggaaatcctatttga

SEQ ID NO: 4209555 - DNA, 25 bp, Homo sapien
cagtggaataaccaaacatatcatt

SEQ ID NO: 4209556 - DNA, 25 bp, Homo sapien
ctaagttcagtggaataaccaaaca

SEQ ID NO: 4209557 - DNA, 25 bp, Homo sapien
gttcagtggaataaccaaacatatc

SEQ ID NO: 4209558 - DNA, 25 bp, Homo sapien
taagttcagtggaataaccaaacat

SEQ ID NO: 4209559 - DNA, 25 bp, Homo sapien
ttaaactatcaagtaaaagtcatac

SEQ ID NO: 4209560 - DNA, 25 bp, Homo sapien
aatatgatcattctgtagggtggtc

SEQ ID NO: 4209561 - DNA, 25 bp, Homo sapien
aagtcatacaaggtcaagattttat

SEQ ID NO: 4209562 - DNA, 25 bp, Homo sapien
tttataatatgatcattctgtaggg

SEQ ID NO: 4209563 - DNA, 25 bp, Homo sapien
taatgacgtcttcttgtgtggatgg

SEQ ID NO: 4209564 - DNA, 25 bp, Homo sapien
taaacatggctgatacctgctatac

SEQ ID NO: 4209565 - DNA, 25 bp, Homo sapien
gacctgtagcttccaaatacttatt

SEQ ID NO: 4209566 - DNA, 25 bp, Homo sapien
taacaggaagttgacctgtagcttc

SEQ ID NO: 4209567 - DNA, 25 bp, Homo sapien
aaagtatcaaaaccacgcagattca

SEQ ID NO: 4209568 - DNA, 25 bp, Homo sapien
gcagattcaattagagtcagtcaac

SEQ ID NO: 4209569 - DNA, 25 bp, Homo sapien
ttgaatataacagaagctcctgaat

SEQ ID NO: 4209570 - DNA, 25 bp, Homo sapien
ttcagcagcctgaatttattccact

SEQ ID NO: 4209571 - DNA, 25 bp, Homo sapien
caatagagttgagatagacatagaa

SEQ ID NO: 4209572 - DNA, 25 bp, Homo sapien
caatgaactataaaaccaatcaata

SEQ ID NO: 4209573 - DNA, 25 bp, Homo sapien
agagttgagatagacatagaattac

SEQ ID NO: 4209574 - DNA, 25 bp, Homo sapien
accaatcaatagagttgagatagac

SEQ ID NO: 4209575 - DNA, 25 bp, Homo sapien
tatatgataaacaacccgttaacaa

SEQ ID NO: 4209576 - DNA, 25 bp, Homo sapien
ctaaaaatagagttatgagacttaa

SEQ ID NO: 4209577 - DNA, 25 bp, Homo sapien
gacttaaacagataatagacagtga

SEQ ID NO: 4209578 - DNA, 25 bp, Homo sapien
gaaagtatgtggttattctttgcat

SEQ ID NO: 4209579 - DNA, 25 bp, Homo sapien
tatgaagaacatacggaatccactc

SEQ ID NO: 4209580 - DNA, 25 bp, Homo sapien
ctccaagaagtgtcatgatatatgc

SEQ ID NO: 4209581 - DNA, 25 bp, Homo sapien
gatatatgcgattcactttcaagtc

SEQ ID NO: 4209582 - DNA, 25 bp, Homo sapien
gcctgcccattaatgacactccaag

SEQ ID NO: 4209583 - DNA, 25 bp, Homo sapien
taatagaactgcttgggaaagccca

SEQ ID NO: 4209584 - DNA, 25 bp, Homo sapien
tcacaatagaccacaaggaagtaat

SEQ ID NO: 4209585 - DNA, 25 bp, Homo sapien
tcaggtaatgaaaaggactaggatc

SEQ ID NO: 4209586 - DNA, 25 bp, Homo sapien
gactaggatccatctataccatcag

SEQ ID NO: 4209587 - DNA, 25 bp, Homo sapien
cacatccggcctcagaatatctttt

SEQ ID NO: 4209588 - DNA, 25 bp, Homo sapien
tgaaaaactattccctatgtcctct

SEQ ID NO: 4209589 - DNA, 25 bp, Homo sapien
tatgtcctcttttcattaacagtct

SEQ ID NO: 4209590 - DNA, 25 bp, Homo sapien
tatcttttctagcacaaactctaaa

SEQ ID NO: 4209591 - DNA, 25 bp, Homo sapien
ggaaatggttatctatcccaggatg

SEQ ID NO: 4209592 - DNA, 25 bp, Homo sapien
gctttctagagtcggagctttctca

SEQ ID NO: 4209593 - DNA, 25 bp, Homo sapien
tcttttagcgtcacattaaggacta

SEQ ID NO: 4209594 - DNA, 25 bp, Homo sapien
actgggcagctatcttgactttgga

SEQ ID NO: 4209595 - DNA, 25 bp, Homo sapien
ttttaactctggaagcgcatgcaca

SEQ ID NO: 4209596 - DNA, 25 bp, Homo sapien
gaagcctccggaactgaagaaggat

SEQ ID NO: 4209597 - DNA, 25 bp, Homo sapien
gaagaaggatcagctgtagtaccaa

SEQ ID NO: 4209598 - DNA, 25 bp, Homo sapien
tcagtgctaaacagtcaccagcagg

SEQ ID NO: 4209599 - DNA, 25 bp, Homo sapien
gagtcccagctctcaagcattgaag

SEQ ID NO: 4209600 - DNA, 25 bp, Homo sapien
ttcaagacacttggacagagttccc

SEQ ID NO: 4209601 - DNA, 25 bp, Homo sapien
tcaagctgacgccattgtgggcaga

SEQ ID NO: 4209602 - DNA, 25 bp, Homo sapien
caagcaggtgcacggtctatgtgac

SEQ ID NO: 4209603 - DNA, 25 bp, Homo sapien
gcagctgagtcatccaaggcaaatc

SEQ ID NO: 4209604 - DNA, 25 bp, Homo sapien
ggtttcaaggctgacacgcatttca

SEQ ID NO: 4209605 - DNA, 25 bp, Homo sapien
tctgagagactagcaacaggacact

SEQ ID NO: 4209606 - DNA, 25 bp, Homo sapien
cagtggccactaaggtctcctgtga

SEQ ID NO: 4209607 - DNA, 25 bp, Homo sapien
ccagtgctaggagggcagatatcaa

SEQ ID NO: 4209608 - DNA, 25 bp, Homo sapien
cataggtttacccagggatggatca

SEQ ID NO: 4209609 - DNA, 25 bp, Homo sapien
tgtcttctcagtgaaaaacgaggca

SEQ ID NO: 4209610 - DNA, 25 bp, Homo sapien
catactagggtacaaaaatagcagg

SEQ ID NO: 4209611 - DNA, 25 bp, Homo sapien
agtatgcttgcctataaaaactgca

SEQ ID NO: 4209612 - DNA, 25 bp, Homo sapien
ctgcaaacgaaagaaagagcatagc

SEQ ID NO: 4209613 - DNA, 25 bp, Homo sapien
ccacctagatctgggatggctgctt

SEQ ID NO: 4209614 - DNA, 25 bp, Homo sapien
ttgagatcgcctcgtgccaagcaag

SEQ ID NO: 4209615 - DNA, 25 bp, Homo sapien
tcacttcttcaacttccggtccggc

SEQ ID NO: 4209616 - DNA, 25 bp, Homo sapien
acggccttatttccgcgagcgccgg

SEQ ID NO: 4209617 - DNA, 25 bp, Homo sapien
tgtctgtcgggtgccgagccaactt

SEQ ID NO: 4209618 - DNA, 25 bp, Homo sapien
gagccaactttcctgcgtccatgca

SEQ ID NO: 4209619 - DNA, 25 bp, Homo sapien
gatgtttaagattgttcaccctcat

SEQ ID NO: 4209620 - DNA, 25 bp, Homo sapien
agagatgtttaagattgttcaccct

SEQ ID NO: 4209621 - DNA, 25 bp, Homo sapien
gtttaagattgttcaccctcattcc

SEQ ID NO: 4209622 - DNA, 25 bp, Homo sapien
ttaagattgttcaccctcattcccc

SEQ ID NO: 4209623 - DNA, 25 bp, Homo sapien
aaataaactccaggatccgctgatt

SEQ ID NO: 4209624 - DNA, 25 bp, Homo sapien
agaaataaactccaggatccgctga

SEQ ID NO: 4209625 - DNA, 25 bp, Homo sapien
aataaactccaggatccgctgattc

SEQ ID NO: 4209626 - DNA, 25 bp, Homo sapien
gaaataaactccaggatccgctgat

SEQ ID NO: 4209627 - DNA, 25 bp, Homo sapien
cactgccgtggaggagtttacaatc

SEQ ID NO: 4209628 - DNA, 25 bp, Homo sapien
taaactctcaaggtggaattgctgg

SEQ ID NO: 4209629 - DNA, 25 bp, Homo sapien
gaacctgctggctgatactttcctc

SEQ ID NO: 4209630 - DNA, 25 bp, Homo sapien
ggaacatgacatatcaggacaccct

SEQ ID NO: 4209631 - DNA, 25 bp, Homo sapien
ctcggatcacacaggtcaagcaggg

SEQ ID NO: 4209632 - DNA, 25 bp, Homo sapien
aagcagggctataaaaccgggcagc

SEQ ID NO: 4209633 - DNA, 25 bp, Homo sapien
agggctataaaaccgggcagcctgg

SEQ ID NO: 4209634 - DNA, 25 bp, Homo sapien
tcacacaggtcaagcagggctataa

SEQ ID NO: 4209635 - DNA, 25 bp, Homo sapien
ttgggtgttgacacttccaaacaca

SEQ ID NO: 4209636 - DNA, 25 bp, Homo sapien
gttgggtgttgacacttccaaacac

SEQ ID NO: 4209637 - DNA, 25 bp, Homo sapien
tgggtgttgacacttccaaacacat

SEQ ID NO: 4209638 - DNA, 25 bp, Homo sapien
gggtgttgacacttccaaacacatc

SEQ ID NO: 4209639 - DNA, 25 bp, Homo sapien
cctcgaccagttacttaattctctg

SEQ ID NO: 4209640 - DNA, 25 bp, Homo sapien
cagtttagtcctcaaacttgtggag

SEQ ID NO: 4209641 - DNA, 25 bp, Homo sapien
tacttaattctctgtggcacccagt

SEQ ID NO: 4209642 - DNA, 25 bp, Homo sapien
ttcttactgatacaacctcgaccag

SEQ ID NO: 4209643 - DNA, 25 bp, Homo sapien
gcattccagcccgggtgacagtgtg

SEQ ID NO: 4209644 - DNA, 25 bp, Homo sapien
actgcattccagcccgggtgacagt

SEQ ID NO: 4209645 - DNA, 25 bp, Homo sapien
caccactgcattccagcccgggtga

SEQ ID NO: 4209646 - DNA, 25 bp, Homo sapien
gaacctgggaggtgagccaagatca

SEQ ID NO: 4209647 - DNA, 25 bp, Homo sapien
agtttctccaggactacagagtcag

SEQ ID NO: 4209648 - DNA, 25 bp, Homo sapien
tacagagtcagcctcacaggggcct

SEQ ID NO: 4209649 - DNA, 25 bp, Homo sapien
acacaaatggtcctaagttcctggc

SEQ ID NO: 4209650 - DNA, 25 bp, Homo sapien
tcacaggggcctgaagtccaaccag

SEQ ID NO: 4209651 - DNA, 25 bp, Homo sapien
tgttcttaactagcatgacatgcca

SEQ ID NO: 4209652 - DNA, 25 bp, Homo sapien
gaattatttcatgccaccagtaagg

SEQ ID NO: 4209653 - DNA, 25 bp, Homo sapien
gtagtagagcaaataggctgtctcc

SEQ ID NO: 4209654 - DNA, 25 bp, Homo sapien
tggcaattacgtgtcaacatgggct

SEQ ID NO: 4209655 - DNA, 25 bp, Homo sapien
ttcactctgtaatgaatacaccatc

SEQ ID NO: 4209656 - DNA, 25 bp, Homo sapien
tctgtaatgaatacaccatcttctc

SEQ ID NO: 4209657 - DNA, 25 bp, Homo sapien
gtaatgaatacaccatcttctcaaa

SEQ ID NO: 4209658 - DNA, 25 bp, Homo sapien
tatttcactctgtaatgaatacacc

SEQ ID NO: 4209659 - DNA, 25 bp, Homo sapien
cctaacagcatggtctgagtgtgca

SEQ ID NO: 4209660 - DNA, 25 bp, Homo sapien
aaaactcagaccatcacagtaaggg

SEQ ID NO: 4209661 - DNA, 25 bp, Homo sapien
taaaaatccctcagtcctaacagca

SEQ ID NO: 4209662 - DNA, 25 bp, Homo sapien
gaaacagagagcacggtctgcctcg

SEQ ID NO: 4209663 - DNA, 25 bp, Homo sapien
gtggctggaaatccaagatcaaagt

SEQ ID NO: 4209664 - DNA, 25 bp, Homo sapien
tctggtggctggaaatccaagatca

SEQ ID NO: 4209665 - DNA, 25 bp, Homo sapien
ggttctggtggctggaaatccaaga

SEQ ID NO: 4209666 - DNA, 25 bp, Homo sapien
ggtggctggaaatccaagatcaaag

SEQ ID NO: 4209667 - DNA, 25 bp, Homo sapien
ggtcagtccagttcatctcctgcaa

SEQ ID NO: 4209668 - DNA, 25 bp, Homo sapien
ttctatccaccaatcatgaatgggt

SEQ ID NO: 4209669 - DNA, 25 bp, Homo sapien
aaggctgggctgcactaattacatt

SEQ ID NO: 4209670 - DNA, 25 bp, Homo sapien
taattacattccacagacacttgca

SEQ ID NO: 4209671 - DNA, 25 bp, Homo sapien
tagatttaatagacagacacagtag

SEQ ID NO: 4209672 - DNA, 25 bp, Homo sapien
gatttaatagacagacacagtagtt

SEQ ID NO: 4209673 - DNA, 25 bp, Homo sapien
agatttaatagacagacacagtagt

SEQ ID NO: 4209674 - DNA, 25 bp, Homo sapien
aatagatttaatagacagacacagt

SEQ ID NO: 4209675 - DNA, 25 bp, Homo sapien
tgccagcgtggaggaacggaccact

SEQ ID NO: 4209676 - DNA, 25 bp, Homo sapien
cagcgtggaggaacggaccactttg

SEQ ID NO: 4209677 - DNA, 25 bp, Homo sapien
gaggagagtgccagcgtggaggaac

SEQ ID NO: 4209678 - DNA, 25 bp, Homo sapien
accactttgggcctccttcgtggag

SEQ ID NO: 4209679 - DNA, 25 bp, Homo sapien
tctccatcctgtctcatggtcgtaa

SEQ ID NO: 4209680 - DNA, 25 bp, Homo sapien
tcgtaagatgatcgaagtaggtcct

SEQ ID NO: 4209681 - DNA, 25 bp, Homo sapien
gatcgaagtaggtcctgtccttcct

SEQ ID NO: 4209682 - DNA, 25 bp, Homo sapien
tccttcctgaacacgctgccaaact

SEQ ID NO: 4209683 - DNA, 25 bp, Homo sapien
ttaaattgtccagttgagataacag

SEQ ID NO: 4209684 - DNA, 25 bp, Homo sapien
aacagggtcccctttagtgccatga

SEQ ID NO: 4209685 - DNA, 25 bp, Homo sapien
tcttgactggattgcttaatattag

SEQ ID NO: 4209686 - DNA, 25 bp, Homo sapien
cgaaactttaggaagctcatttatc

SEQ ID NO: 4209687 - DNA, 25 bp, Homo sapien
aagagggcaaaaagaatgaatttga

SEQ ID NO: 4209688 - DNA, 25 bp, Homo sapien
agagggcaaaaagaatgaatttgat

SEQ ID NO: 4209689 - DNA, 25 bp, Homo sapien
caagagggcaaaaagaatgaatttg

SEQ ID NO: 4209690 - DNA, 25 bp, Homo sapien
ccaagagggcaaaaagaatgaattt

SEQ ID NO: 4209691 - DNA, 25 bp, Homo sapien
ataagtacatctgtttcccaaataa

SEQ ID NO: 4209692 - DNA, 25 bp, Homo sapien
cacacataagtacatctgtttccca

SEQ ID NO: 4209693 - DNA, 25 bp, Homo sapien
cataagtacatctgtttcccaaata

SEQ ID NO: 4209694 - DNA, 25 bp, Homo sapien
cacataagtacatctgtttcccaaa

SEQ ID NO: 4209695 - DNA, 25 bp, Homo sapien
gaatcctccagtggtacagcatcac

SEQ ID NO: 4209696 - DNA, 25 bp, Homo sapien
ggtggctttggaacttggcacaaac

SEQ ID NO: 4209697 - DNA, 25 bp, Homo sapien
caaaccacgctgttctttccttggg

SEQ ID NO: 4209698 - DNA, 25 bp, Homo sapien
cacatggattctgtgcccaatggcc

SEQ ID NO: 4209699 - DNA, 25 bp, Homo sapien
ctctagcatagatttggcgtgtagg

SEQ ID NO: 4209700 - DNA, 25 bp, Homo sapien
tagatttggcgtgtaggaaaatctc

SEQ ID NO: 4209701 - DNA, 25 bp, Homo sapien
accacgcaggccctctagcatagat

SEQ ID NO: 4209702 - DNA, 25 bp, Homo sapien
attttccttgaaccacgcaggccct

SEQ ID NO: 4209703 - DNA, 25 bp, Homo sapien
tcttgctctttccaaacgaagtact

SEQ ID NO: 4209704 - DNA, 25 bp, Homo sapien
tccaaacgaagtacttcttgagatc

SEQ ID NO: 4209705 - DNA, 25 bp, Homo sapien
ctctttccaaacgaagtacttcttg

SEQ ID NO: 4209706 - DNA, 25 bp, Homo sapien
acgaagtacttcttgagatcagcac

SEQ ID NO: 4209707 - DNA, 25 bp, Homo sapien
accaggtccaatgtcagccccatta

SEQ ID NO: 4209708 - DNA, 25 bp, Homo sapien
aaactgttccctgatctggacccct

SEQ ID NO: 4209709 - DNA, 25 bp, Homo sapien
ttttctagtgctggaattctgtgtc

SEQ ID NO: 4209710 - DNA, 25 bp, Homo sapien
tagtcaatatcagagcagccccttc

SEQ ID NO: 4209711 - DNA, 25 bp, Homo sapien
gaaaatttaaaccagtgaccacaga

SEQ ID NO: 4209712 - DNA, 25 bp, Homo sapien
ggtactacactgtttggctccagca

SEQ ID NO: 4209713 - DNA, 25 bp, Homo sapien
ccacatatgtgttcgtgccgaggat

SEQ ID NO: 4209714 - DNA, 25 bp, Homo sapien
tgatgtgccagggatactccccatc

SEQ ID NO: 4209715 - DNA, 25 bp, Homo sapien
ttctctgatgagaatggctgggtag

SEQ ID NO: 4209716 - DNA, 25 bp, Homo sapien
aagtcctccctagaagattgccaag

SEQ ID NO: 4209717 - DNA, 25 bp, Homo sapien
tagccgcgccagttgaaaatgggac

SEQ ID NO: 4209718 - DNA, 25 bp, Homo sapien
taggaaatggtaatctgtcagacca

SEQ ID NO: 4209719 - DNA, 25 bp, Homo sapien
gtgagggccttctggctatgccatt

SEQ ID NO: 4209720 - DNA, 25 bp, Homo sapien
tataaacgatgatttatttggctca

SEQ ID NO: 4209721 - DNA, 25 bp, Homo sapien
aggctggtgctggaatctggtgagg

SEQ ID NO: 4209722 - DNA, 25 bp, Homo sapien
atttataaacgatgatttatttggc

SEQ ID NO: 4209723 - DNA, 25 bp, Homo sapien
gacaccgaggttcttggcttgacca

SEQ ID NO: 4209724 - DNA, 25 bp, Homo sapien
gaatttaaggcatcagtgggtcttc

SEQ ID NO: 4209725 - DNA, 25 bp, Homo sapien
tccttcccgatgaaaagaactatgt

SEQ ID NO: 4209726 - DNA, 25 bp, Homo sapien
caactggttatatgagtctggagct

SEQ ID NO: 4209727 - DNA, 25 bp, Homo sapien
acctcccggacaacatcctctgttt

SEQ ID NO: 4209728 - DNA, 25 bp, Homo sapien
gacctcccggacaacatcctctgtt

SEQ ID NO: 4209729 - DNA, 25 bp, Homo sapien
ctgtttcttaatatgaggagagcac

SEQ ID NO: 4209730 - DNA, 25 bp, Homo sapien
gtttcttaatatgaggagagcacaa

SEQ ID NO: 4209731 - DNA, 25 bp, Homo sapien
gaaacaagcatgagacagacaatcc

SEQ ID NO: 4209732 - DNA, 25 bp, Homo sapien
tgaactaggcgcgtttttgtccata

SEQ ID NO: 4209733 - DNA, 25 bp, Homo sapien
caaattatgccaccctagttgtaac

SEQ ID NO: 4209734 - DNA, 25 bp, Homo sapien
tctaagatgatgttcaaatggactg

SEQ ID NO: 4209735 - DNA, 25 bp, Homo sapien
cagtcctcacaagggagttcctgga

SEQ ID NO: 4209736 - DNA, 25 bp, Homo sapien
caaggtcacctgaagggcagtcctc

SEQ ID NO: 4209737 - DNA, 25 bp, Homo sapien
ttctctctgcgctgtggaagttctg

SEQ ID NO: 4209738 - DNA, 25 bp, Homo sapien
ccagttgcaagatggtcctgagttc

SEQ ID NO: 4209739 - DNA, 25 bp, Homo sapien
tggagcaaagttagccacacagaca

SEQ ID NO: 4209740 - DNA, 25 bp, Homo sapien
cagcctctggagcaaagttagccac

SEQ ID NO: 4209741 - DNA, 25 bp, Homo sapien
tgtgggggtggttgcagcctctgga

SEQ ID NO: 4209742 - DNA, 25 bp, Homo sapien
cctctggagcaaagttagccacaca

SEQ ID NO: 4209743 - DNA, 25 bp, Homo sapien
catgtgtcacgtactgggaatacaa

SEQ ID NO: 4209744 - DNA, 25 bp, Homo sapien
tagaatgaggcaagctccctgacct

SEQ ID NO: 4209745 - DNA, 25 bp, Homo sapien
aatgaatgtggtgagaacagcggca

SEQ ID NO: 4209746 - DNA, 25 bp, Homo sapien
gactccggagtagttcgaactgcgc

SEQ ID NO: 4209747 - DNA, 25 bp, Homo sapien
acccagcggtcgatgacagggcctg

SEQ ID NO: 4209748 - DNA, 25 bp, Homo sapien
gcctggcgcggttcgcttttcctgg

SEQ ID NO: 4209749 - DNA, 25 bp, Homo sapien
ctgaggccctcgaggtgcccacttc

SEQ ID NO: 4209750 - DNA, 25 bp, Homo sapien
tgactgtgttcgtggggctgaggcc

SEQ ID NO: 4209751 - DNA, 25 bp, Homo sapien
tcaagacggcggtcacatgactccg

SEQ ID NO: 4209752 - DNA, 25 bp, Homo sapien
gaagcagcgcccgtggaacactgtc

SEQ ID NO: 4209753 - DNA, 25 bp, Homo sapien
gagctcacgtgacgccccggcaggt

SEQ ID NO: 4209754 - DNA, 25 bp, Homo sapien
catgactccgggagctcacgtgacg

SEQ ID NO: 4209755 - DNA, 25 bp, Homo sapien
tcagggccgcctgccaggagcgccc

SEQ ID NO: 4209756 - DNA, 25 bp, Homo sapien
caaagccaaggaagcacatcagtaa

SEQ ID NO: 4209757 - DNA, 25 bp, Homo sapien
tcagtaacagcaccaaaagccggtg

SEQ ID NO: 4209758 - DNA, 25 bp, Homo sapien
gggcacctctgtcggcctcgtcagg

SEQ ID NO: 4209759 - DNA, 25 bp, Homo sapien
aggtgtggctggaatcgatcgcaaa

SEQ ID NO: 4209760 - DNA, 25 bp, Homo sapien
ggaatcgatcgcaaaggggaaaata

SEQ ID NO: 4209761 - DNA, 25 bp, Homo sapien
caggtgtggctggaatcgatcgcaa

SEQ ID NO: 4209762 - DNA, 25 bp, Homo sapien
gctggaatcgatcgcaaaggggaaa

SEQ ID NO: 4209763 - DNA, 25 bp, Homo sapien
acaaaactcgcccagctcagtccct

SEQ ID NO: 4209764 - DNA, 25 bp, Homo sapien
gagcaaaggagtgccacaaaactcg

SEQ ID NO: 4209765 - DNA, 25 bp, Homo sapien
cgacctccacgttccggacgcggag

SEQ ID NO: 4209766 - DNA, 25 bp, Homo sapien
tcagtccctcgacctccacgttccg

SEQ ID NO: 4209767 - DNA, 25 bp, Homo sapien
ggcgagtcgctagcccctgggactt

SEQ ID NO: 4209768 - DNA, 25 bp, Homo sapien
ctatcgcctctagggcgagtcgcta

SEQ ID NO: 4209769 - DNA, 25 bp, Homo sapien
tctagggcgagtcgctagcccctgg

SEQ ID NO: 4209770 - DNA, 25 bp, Homo sapien
cttcatatctatcgcctctagggcg

SEQ ID NO: 4209771 - DNA, 25 bp, Homo sapien
tcgtttaacttgagtctgaagggca

SEQ ID NO: 4209772 - DNA, 25 bp, Homo sapien
ggttgataatgcctccaccgctaca

SEQ ID NO: 4209773 - DNA, 25 bp, Homo sapien
ctgagggttgataatgcctccaccg

SEQ ID NO: 4209774 - DNA, 25 bp, Homo sapien
gataatgcctccaccgctacacttg

SEQ ID NO: 4209775 - DNA, 25 bp, Homo sapien
agggttgataatgcctccaccgcta

SEQ ID NO: 4209776 - DNA, 25 bp, Homo sapien
tactcggtctatcaaaaagccacca

SEQ ID NO: 4209777 - DNA, 25 bp, Homo sapien
cagcatgaatttcgtggtattcact

SEQ ID NO: 4209778 - DNA, 25 bp, Homo sapien
catgaatttcgtggtattcacttgc

SEQ ID NO: 4209779 - DNA, 25 bp, Homo sapien
cgtattccaaatactcggtctatca

SEQ ID NO: 4209780 - DNA, 25 bp, Homo sapien
gcagctaaaaatgattgtgccccat

SEQ ID NO: 4209781 - DNA, 25 bp, Homo sapien
ctgtccaatgcaaacaaagcagcta

SEQ ID NO: 4209782 - DNA, 25 bp, Homo sapien
gtccaatgcaaacaaagcagctaaa

SEQ ID NO: 4209783 - DNA, 25 bp, Homo sapien
caatgcaaacaaagcagctaaaaat

SEQ ID NO: 4209784 - DNA, 25 bp, Homo sapien
attccatcagccaaaaagcattaaa

SEQ ID NO: 4209785 - DNA, 25 bp, Homo sapien
aactgctaaggactcgccaccaatc

SEQ ID NO: 4209786 - DNA, 25 bp, Homo sapien
tctagccatgctaagttgaagtcca

SEQ ID NO: 4209787 - DNA, 25 bp, Homo sapien
gctaagttgaagtccaaacaccagg

SEQ ID NO: 4209788 - DNA, 25 bp, Homo sapien
accagctcacagcatatgtattctg

SEQ ID NO: 4209789 - DNA, 25 bp, Homo sapien
gatcccgagggttgtgtgaccagca

SEQ ID NO: 4209790 - DNA, 25 bp, Homo sapien
gcagaacctaacaaagcttcaatct

SEQ ID NO: 4209791 - DNA, 25 bp, Homo sapien
catgaggttcatgtttactgtactt

SEQ ID NO: 4209792 - DNA, 25 bp, Homo sapien
aatcttagaatacagccatcccatg

SEQ ID NO: 4209793 - DNA, 25 bp, Homo sapien
cagactttgaaaagagaaccaaaca

SEQ ID NO: 4209794 - DNA, 25 bp, Homo sapien
ctttgaaaagagaaccaaacagaag

SEQ ID NO: 4209795 - DNA, 25 bp, Homo sapien
caaacagaaggttcctaaggagaag

SEQ ID NO: 4209796 - DNA, 25 bp, Homo sapien
agaaggttcctaaggagaagtacat

SEQ ID NO: 4209797 - DNA, 25 bp, Homo sapien
gagccaaggcacagattagtgaaag

SEQ ID NO: 4209798 - DNA, 25 bp, Homo sapien
tgctctctgatccaagtaggcaaga

SEQ ID NO: 4209799 - DNA, 25 bp, Homo sapien
ctgatccaagtaggcaagagccaag

SEQ ID NO: 4209800 - DNA, 25 bp, Homo sapien
tagtgaaagaatacacgttataccc

SEQ ID NO: 4209801 - DNA, 25 bp, Homo sapien
cagatgataaatataagccacaggg

SEQ ID NO: 4209802 - DNA, 25 bp, Homo sapien
aggagaagtcctttacatcagttaa

SEQ ID NO: 4209803 - DNA, 25 bp, Homo sapien
gagaagtcctttacatcagttaatt

SEQ ID NO: 4209804 - DNA, 25 bp, Homo sapien
acataatagcagacacagatgataa

SEQ ID NO: 4209805 - DNA, 25 bp, Homo sapien
ctgttaattgcacttgctgcctggg

SEQ ID NO: 4209806 - DNA, 25 bp, Homo sapien
ttaattgcacttgctgcctgggaag

SEQ ID NO: 4209807 - DNA, 25 bp, Homo sapien
gaaaatccaaatttctctgtaaaga

SEQ ID NO: 4209808 - DNA, 25 bp, Homo sapien
agaaaatccaaatttctctgtaaag

SEQ ID NO: 4209809 - DNA, 25 bp, Homo sapien
catagcaatccaagggttccacatc

SEQ ID NO: 4209810 - DNA, 25 bp, Homo sapien
tccaagggttccacatcgtaaaggc

SEQ ID NO: 4209811 - DNA, 25 bp, Homo sapien
cacaagagtggctgctactgcgcaa

SEQ ID NO: 4209812 - DNA, 25 bp, Homo sapien
ctgcgcaaagaacccagatgatgtt

SEQ ID NO: 4209813 - DNA, 25 bp, Homo sapien
tgttaaatacgcaaacccactgctg

SEQ ID NO: 4209814 - DNA, 25 bp, Homo sapien
cccaagatgcagtcaaggaccaagt

SEQ ID NO: 4209815 - DNA, 25 bp, Homo sapien
gaaagcaacgcagaaaaggtcacag

SEQ ID NO: 4209816 - DNA, 25 bp, Homo sapien
gaaatgcagcactagagcctcgggt

SEQ ID NO: 4209817 - DNA, 25 bp, Homo sapien
aatgccaccattggccacaatgcac

SEQ ID NO: 4209818 - DNA, 25 bp, Homo sapien
ggcaagcaatgagtaggagagtccc

SEQ ID NO: 4209819 - DNA, 25 bp, Homo sapien
caatgagtaggagagtcccagaaga

SEQ ID NO: 4209820 - DNA, 25 bp, Homo sapien
ctacaaatgccaccattggccacaa

SEQ ID NO: 4209821 - DNA, 25 bp, Homo sapien
aagccatatgcagttcccagctgat

SEQ ID NO: 4209822 - DNA, 25 bp, Homo sapien
gcagttcccagctgatgttcaggaa

SEQ ID NO: 4209823 - DNA, 25 bp, Homo sapien
ccatatgcagttcccagctgatgtt

SEQ ID NO: 4209824 - DNA, 25 bp, Homo sapien
tatgcagttcccagctgatgttcag

SEQ ID NO: 4209825 - DNA, 25 bp, Homo sapien
cccaagattctgaatggactgcatg

SEQ ID NO: 4209826 - DNA, 25 bp, Homo sapien
ggcaatgaagaacacttccaaaaac

SEQ ID NO: 4209827 - DNA, 25 bp, Homo sapien
gaatccagtatcataccagcaatga

SEQ ID NO: 4209828 - DNA, 25 bp, Homo sapien
gaaatgatggccaacccaagattct

SEQ ID NO: 4209829 - DNA, 25 bp, Homo sapien
caaatctgggagctatgcctaagta

SEQ ID NO: 4209830 - DNA, 25 bp, Homo sapien
aaatgttgtcatacggaatactcac

SEQ ID NO: 4209831 - DNA, 25 bp, Homo sapien
taggaatctcctaaaaaatgcctgt

SEQ ID NO: 4209832 - DNA, 25 bp, Homo sapien
tcttcagagggctagaaagtcacca

SEQ ID NO: 4209833 - DNA, 25 bp, Homo sapien
atcacctgaactccgcagttcaaag

SEQ ID NO: 4209834 - DNA, 25 bp, Homo sapien
ccaaatagagtaagaccacagataa

SEQ ID NO: 4209835 - DNA, 25 bp, Homo sapien
gagtaagaccacagataaaagtgac

SEQ ID NO: 4209836 - DNA, 25 bp, Homo sapien
cctgggcacgattcaccaaatagag

SEQ ID NO: 4209837 - DNA, 25 bp, Homo sapien
cgattcaccaaatagagtaagacca

SEQ ID NO: 4209838 - DNA, 25 bp, Homo sapien
ccctttgtcttgcagaataatttag

SEQ ID NO: 4209839 - DNA, 25 bp, Homo sapien
tccctttgtcttgcagaataattta

SEQ ID NO: 4209840 - DNA, 25 bp, Homo sapien
cttccctttgtcttgcagaataatt

SEQ ID NO: 4209841 - DNA, 25 bp, Homo sapien
tcttccctttgtcttgcagaataat

SEQ ID NO: 4209842 - DNA, 25 bp, Homo sapien
tctgagagaatggaagggtaagccc

SEQ ID NO: 4209843 - DNA, 25 bp, Homo sapien
gacctcaggacgaaggcctttcctc

SEQ ID NO: 4209844 - DNA, 25 bp, Homo sapien
tgtttacttagcatacggcatgtta

SEQ ID NO: 4209845 - DNA, 25 bp, Homo sapien
gaaccacatattggtaccagaagaa

SEQ ID NO: 4209846 - DNA, 25 bp, Homo sapien
aattgaaaagggtcattgctcggca

SEQ ID NO: 4209847 - DNA, 25 bp, Homo sapien
tcggcaatccacataactacagagt

SEQ ID NO: 4209848 - DNA, 25 bp, Homo sapien
taaaaggaaggcctatgacaatgcc

SEQ ID NO: 4209849 - DNA, 25 bp, Homo sapien
gaagttcacctggatgttccacagc

SEQ ID NO: 4209850 - DNA, 25 bp, Homo sapien
ttctactctggagaaaaagctaccc

SEQ ID NO: 4209851 - DNA, 25 bp, Homo sapien
cacttacaatatcatgccatgtgct

SEQ ID NO: 4209852 - DNA, 25 bp, Homo sapien
cagtgactgtaattgggcaagttct

SEQ ID NO: 4209853 - DNA, 25 bp, Homo sapien
gtcagagaagcttcatactcatatt

SEQ ID NO: 4209854 - DNA, 25 bp, Homo sapien
caataaactgtaagtcagaaaaaca

SEQ ID NO: 4209855 - DNA, 25 bp, Homo sapien
cacaataaactgtaagtcagaaaaa

SEQ ID NO: 4209856 - DNA, 25 bp, Homo sapien
tgcactctcccccacttgtgaggta

SEQ ID NO: 4209857 - DNA, 25 bp, Homo sapien
gaaacagtcatatggcgtcagagcc

SEQ ID NO: 4209858 - DNA, 25 bp, Homo sapien
caacacccatgtgctgaaacagtca

SEQ ID NO: 4209859 - DNA, 25 bp, Homo sapien
gagcctaaagaactaacaactcaat

SEQ ID NO: 4209860 - DNA, 25 bp, Homo sapien
aacagtgtggacaaagccgctggga

SEQ ID NO: 4209861 - DNA, 25 bp, Homo sapien
tcgataacaaaacggacgcagtccc

SEQ ID NO: 4209862 - DNA, 25 bp, Homo sapien
taaaaacaggttctagagagccttg

SEQ ID NO: 4209863 - DNA, 25 bp, Homo sapien
gaagaacccaatacaccctgaagga

SEQ ID NO: 4209864 - DNA, 25 bp, Homo sapien
tgcaagggcaggctacaatttttac

SEQ ID NO: 4209865 - DNA, 25 bp, Homo sapien
cattaacccgacagtcaaagcagca

SEQ ID NO: 4209866 - DNA, 25 bp, Homo sapien
ggtaatggcctcaaaaagaattcca

SEQ ID NO: 4209867 - DNA, 25 bp, Homo sapien
ccaaacttatgttcttgcagcaagc

SEQ ID NO: 4209868 - DNA, 25 bp, Homo sapien
gaaaaaaaacttcatcaatgtctta

SEQ ID NO: 4209869 - DNA, 25 bp, Homo sapien
gttaagatgcaaggtaatccaaaaa

SEQ ID NO: 4209870 - DNA, 25 bp, Homo sapien
aaaacttcatcaatgtcttaagtca

SEQ ID NO: 4209871 - DNA, 25 bp, Homo sapien
tttagttaagatgcaaggtaatcca

SEQ ID NO: 4209872 - DNA, 25 bp, Homo sapien
tatttagttcagttgggagcaggac

SEQ ID NO: 4209873 - DNA, 25 bp, Homo sapien
tattgaagcccaaatcactgttgtg

SEQ ID NO: 4209874 - DNA, 25 bp, Homo sapien
caacaacgatacaggttatgggctc

SEQ ID NO: 4209875 - DNA, 25 bp, Homo sapien
gaagagtgttgaatatgtgctgccc

SEQ ID NO: 4209876 - DNA, 25 bp, Homo sapien
gacaatgccacctcagagtccttgg

SEQ ID NO: 4209877 - DNA, 25 bp, Homo sapien
gctccgtggggtcattgtagacaat

SEQ ID NO: 4209878 - DNA, 25 bp, Homo sapien
tgtagacaatgccacctcagagtcc

SEQ ID NO: 4209879 - DNA, 25 bp, Homo sapien
tcattgtagacaatgccacctcaga

SEQ ID NO: 4209880 - DNA, 25 bp, Homo sapien
tgcccaagctggatgtgggggtcac

SEQ ID NO: 4209881 - DNA, 25 bp, Homo sapien
gggtcacattcccatggggagcctg

SEQ ID NO: 4209882 - DNA, 25 bp, Homo sapien
cccacagactcaagaggcatgcctt

SEQ ID NO: 4209883 - DNA, 25 bp, Homo sapien
ctggagatgccaaggttgtcacccc

SEQ ID NO: 4209884 - DNA, 25 bp, Homo sapien
taggaaccatgcctgacactgggag

SEQ ID NO: 4209885 - DNA, 25 bp, Homo sapien
gaaaaagtccaacagtcagaggagg

SEQ ID NO: 4209886 - DNA, 25 bp, Homo sapien
tgcctccacggaaagaactatgaat

SEQ ID NO: 4209887 - DNA, 25 bp, Homo sapien
agttggaccaacacagacgtcctgg

SEQ ID NO: 4209888 - DNA, 25 bp, Homo sapien
ccttcagtgtcaaggccctccttat

SEQ ID NO: 4209889 - DNA, 25 bp, Homo sapien
caacgggataatgcctgcttctacc

SEQ ID NO: 4209890 - DNA, 25 bp, Homo sapien
gtgacagtgccaatagcccaaggga

SEQ ID NO: 4209891 - DNA, 25 bp, Homo sapien
tgtataagcccaactgagacaacgg

SEQ ID NO: 4209892 - DNA, 25 bp, Homo sapien
ccaggaagagtgcatagggctgctg

SEQ ID NO: 4209893 - DNA, 25 bp, Homo sapien
ttacagccgggattggtgaggaaaa

SEQ ID NO: 4209894 - DNA, 25 bp, Homo sapien
caggatttgttacagccgggattgg

SEQ ID NO: 4209895 - DNA, 25 bp, Homo sapien
catagggctgctgtacaggatttgt

SEQ ID NO: 4209896 - DNA, 25 bp, Homo sapien
ctcagcttcccaactgcaactaaat

SEQ ID NO: 4209897 - DNA, 25 bp, Homo sapien
ctggaggtcagcactcagcttccca

SEQ ID NO: 4209898 - DNA, 25 bp, Homo sapien
gcactcagcttcccaactgcaacta

SEQ ID NO: 4209899 - DNA, 25 bp, Homo sapien
tggaggtcagcactcagcttcccaa

SEQ ID NO: 4209900 - DNA, 25 bp, Homo sapien
gaatccaaaagtttgctattaagcg

SEQ ID NO: 4209901 - DNA, 25 bp, Homo sapien
tgctattaagcgttgtgaagtggaa

SEQ ID NO: 4209902 - DNA, 25 bp, Homo sapien
cagaaatggcgcatattgaaacgaa

SEQ ID NO: 4209903 - DNA, 25 bp, Homo sapien
gtggaagatagcattctcctttaat

SEQ ID NO: 4209904 - DNA, 25 bp, Homo sapien
tattctccaggtctctactttcagc

SEQ ID NO: 4209905 - DNA, 25 bp, Homo sapien
gttctcccttggcttagatcctgac

SEQ ID NO: 4209906 - DNA, 25 bp, Homo sapien
agtcctctattctccaggtctctac

SEQ ID NO: 4209907 - DNA, 25 bp, Homo sapien
catccttactcatctgaatagttct

SEQ ID NO: 4209908 - DNA, 25 bp, Homo sapien
aagactataacccttgctcaactcc

SEQ ID NO: 4209909 - DNA, 25 bp, Homo sapien
ccctctccaagactataacccttgc

SEQ ID NO: 4209910 - DNA, 25 bp, Homo sapien
gactataacccttgctcaactcctg

SEQ ID NO: 4209911 - DNA, 25 bp, Homo sapien
tctccaagactataacccttgctca

SEQ ID NO: 4209912 - DNA, 25 bp, Homo sapien
gacctcggagctccctaatttggac

SEQ ID NO: 4209913 - DNA, 25 bp, Homo sapien
atcaccttcatcattggacccacgg

SEQ ID NO: 4209914 - DNA, 25 bp, Homo sapien
gtccaagacaaacttctagttcttc

SEQ ID NO: 4209915 - DNA, 25 bp, Homo sapien
accttcatcattggacccacggctg

SEQ ID NO: 4209916 - DNA, 25 bp, Homo sapien
ttcatcattggacccacggctgaca

SEQ ID NO: 4209917 - DNA, 25 bp, Homo sapien
tcctggatgtagagggagaatccca

SEQ ID NO: 4209918 - DNA, 25 bp, Homo sapien
aatcccagtgagtcacaggcccata

SEQ ID NO: 4209919 - DNA, 25 bp, Homo sapien
cccagtgagtcacaggcccatattt

SEQ ID NO: 4209920 - DNA, 25 bp, Homo sapien
cctggatgtagagggagaatcccag

SEQ ID NO: 4209921 - DNA, 25 bp, Homo sapien
tacttgaattgtgcgcagagtatgg

SEQ ID NO: 4209922 - DNA, 25 bp, Homo sapien
aattgtgcgcagagtatggagtaaa

SEQ ID NO: 4209923 - DNA, 25 bp, Homo sapien
atactacttgaattgtgcgcagagt

SEQ ID NO: 4209924 - DNA, 25 bp, Homo sapien
ttgaattgtgcgcagagtatggagt

SEQ ID NO: 4209925 - DNA, 25 bp, Homo sapien
gaaaagcatggctaagacgttttga

SEQ ID NO: 4209926 - DNA, 25 bp, Homo sapien
cctggtgctctatttgacatggcct

SEQ ID NO: 4209927 - DNA, 25 bp, Homo sapien
gccagcatcaacaccgtgatggatg

SEQ ID NO: 4209928 - DNA, 25 bp, Homo sapien
gctaagacgttttgactgagaggac

SEQ ID NO: 4209929 - DNA, 25 bp, Homo sapien
cctgaggagcatcagccatggtttg

SEQ ID NO: 4209930 - DNA, 25 bp, Homo sapien
cagcccctgaggagcatcagccatg

SEQ ID NO: 4209931 - DNA, 25 bp, Homo sapien
ggagcatcagccatggtttgtaaac

SEQ ID NO: 4209932 - DNA, 25 bp, Homo sapien
tcagcccctgaggagcatcagccat

SEQ ID NO: 4209933 - DNA, 25 bp, Homo sapien
gaagtcagccatctttctaaagtta

SEQ ID NO: 4209934 - DNA, 25 bp, Homo sapien
ggccaagatgtacagccctgttccc

SEQ ID NO: 4209935 - DNA, 25 bp, Homo sapien
tatgggccaagatgtacagccctgt

SEQ ID NO: 4209936 - DNA, 25 bp, Homo sapien
aaagttatgggccaagatgtacagc

SEQ ID NO: 4209937 - DNA, 25 bp, Homo sapien
gacacccttcccactggcattccct

SEQ ID NO: 4209938 - DNA, 25 bp, Homo sapien
tgcccaaagctcttacaactccctg

SEQ ID NO: 4209939 - DNA, 25 bp, Homo sapien
ggcattcccttccagatatcccaca

SEQ ID NO: 4209940 - DNA, 25 bp, Homo sapien
aaagctcttacaactccctggacac

SEQ ID NO: 4209941 - DNA, 25 bp, Homo sapien
ctcctatcctccttcttagttactc

SEQ ID NO: 4209942 - DNA, 25 bp, Homo sapien
ctatcctccttcttagttactccat

SEQ ID NO: 4209943 - DNA, 25 bp, Homo sapien
tatcctccttcttagttactccata

SEQ ID NO: 4209944 - DNA, 25 bp, Homo sapien
cctatcctccttcttagttactcca

SEQ ID NO: 4209945 - DNA, 25 bp, Homo sapien
ttggaagggctttgacagcaagctg

SEQ ID NO: 4209946 - DNA, 25 bp, Homo sapien
cagagagaaattgtgctcatggcat

SEQ ID NO: 4209947 - DNA, 25 bp, Homo sapien
agagaaattgtgctcatggcatccc

SEQ ID NO: 4209948 - DNA, 25 bp, Homo sapien
atccccttggaagggctttgacagc

SEQ ID NO: 4209949 - DNA, 25 bp, Homo sapien
ggcagaccctttctgccatttgcac

SEQ ID NO: 4209950 - DNA, 25 bp, Homo sapien
ctaagcaaagtgggcagaccctttc

SEQ ID NO: 4209951 - DNA, 25 bp, Homo sapien
gtgggcagaccctttctgccatttg

SEQ ID NO: 4209952 - DNA, 25 bp, Homo sapien
aagcaaagtgggcagaccctttctg

SEQ ID NO: 4209953 - DNA, 25 bp, Homo sapien
tcccagttcagtttgatcataaagt

SEQ ID NO: 4209954 - DNA, 25 bp, Homo sapien
aatgggcaagatgaaggccatgctt

SEQ ID NO: 4209955 - DNA, 25 bp, Homo sapien
cagcaggaatctcatggtcaaaaat

SEQ ID NO: 4209956 - DNA, 25 bp, Homo sapien
tttcttcccagttcagtttgatcat

SEQ ID NO: 4209957 - DNA, 25 bp, Homo sapien
tagctgtaactcaataaccagttgc

SEQ ID NO: 4209958 - DNA, 25 bp, Homo sapien
ctgcctccataggttcacaagatct

SEQ ID NO: 4209959 - DNA, 25 bp, Homo sapien
tcacaagatctagctgtaactcaat

SEQ ID NO: 4209960 - DNA, 25 bp, Homo sapien
cataggttcacaagatctagctgta

SEQ ID NO: 4209961 - DNA, 25 bp, Homo sapien
ttaagtctcccatcgctacagaggg

SEQ ID NO: 4209962 - DNA, 25 bp, Homo sapien
ccagtgtaggaggaagtagtgctct

SEQ ID NO: 4209963 - DNA, 25 bp, Homo sapien
gacaacggaaatggatccatgtgcc

SEQ ID NO: 4209964 - DNA, 25 bp, Homo sapien
tcagaaggatctcggttgttgttcc

SEQ ID NO: 4209965 - DNA, 25 bp, Homo sapien
gagactggatcggatgctggcacac

SEQ ID NO: 4209966 - DNA, 25 bp, Homo sapien
atcacagagcgcaatgtgactgtgg

SEQ ID NO: 4209967 - DNA, 25 bp, Homo sapien
tgtattcctcagaatcacagagcgc

SEQ ID NO: 4209968 - DNA, 25 bp, Homo sapien
aatgtgaggcgagtgtgaggctgga

SEQ ID NO: 4209969 - DNA, 25 bp, Homo sapien
gctgaaaaggttccaatcttcatgt

SEQ ID NO: 4209970 - DNA, 25 bp, Homo sapien
tcgtattcggaaggactgtgaagaa

SEQ ID NO: 4209971 - DNA, 25 bp, Homo sapien
cattcttggaaaaagtcgtattcgg

SEQ ID NO: 4209972 - DNA, 25 bp, Homo sapien
gacagggaatattgggttcttcttc

SEQ ID NO: 4209973 - DNA, 25 bp, Homo sapien
tacactaactctaatagacagggaa

SEQ ID NO: 4209974 - DNA, 25 bp, Homo sapien
tataaatggactaaattctgcaatt

SEQ ID NO: 4209975 - DNA, 25 bp, Homo sapien
ttaaatataaatggactaaattctg

SEQ ID NO: 4209976 - DNA, 25 bp, Homo sapien
taaatataaatggactaaattctgc

SEQ ID NO: 4209977 - DNA, 25 bp, Homo sapien
aatataaatggactaaattctgcaa

SEQ ID NO: 4209978 - DNA, 25 bp, Homo sapien
ccatcataataataacatcatcacc

SEQ ID NO: 4209979 - DNA, 25 bp, Homo sapien
caaggctgccattaatcagttccat

SEQ ID NO: 4209980 - DNA, 25 bp, Homo sapien
gtcaaggctgccattaatcagttcc

SEQ ID NO: 4209981 - DNA, 25 bp, Homo sapien
tcaaggctgccattaatcagttcca

SEQ ID NO: 4209982 - DNA, 25 bp, Homo sapien
tccaacctggttggaatacggatcc

SEQ ID NO: 4209983 - DNA, 25 bp, Homo sapien
cctgtgactctgctcctactggagg

SEQ ID NO: 4209984 - DNA, 25 bp, Homo sapien
tacggatcccacagcacacctgtga

SEQ ID NO: 4209985 - DNA, 25 bp, Homo sapien
tgctcctactggaggtgccccaggt

SEQ ID NO: 4209986 - DNA, 25 bp, Homo sapien
ttgagtgtagggattgtcttcactt

SEQ ID NO: 4209987 - DNA, 25 bp, Homo sapien
tgtagggattgtcttcacttctgat

SEQ ID NO: 4209988 - DNA, 25 bp, Homo sapien
agtgtagggattgtcttcacttctg

SEQ ID NO: 4209989 - DNA, 25 bp, Homo sapien
tagggattgtcttcacttctgattt

SEQ ID NO: 4209990 - DNA, 25 bp, Homo sapien
gtcactggcatcacccgacacagaa

SEQ ID NO: 4209991 - DNA, 25 bp, Homo sapien
ttcttaataccagtggtcactggca

SEQ ID NO: 4209992 - DNA, 25 bp, Homo sapien
taccagtggtcactggcatcacccg

SEQ ID NO: 4209993 - DNA, 25 bp, Homo sapien
agtggtcactggcatcacccgacac

SEQ ID NO: 4209994 - DNA, 25 bp, Homo sapien
aaaaagattgaaggtgaacatgacc

SEQ ID NO: 4209995 - DNA, 25 bp, Homo sapien
aggtgagctcagataccaagagtga

SEQ ID NO: 4209996 - DNA, 25 bp, Homo sapien
gattgaaggtgaacatgaccattaa

SEQ ID NO: 4209997 - DNA, 25 bp, Homo sapien
tgagctcagataccaagagtgaaaa

SEQ ID NO: 4209998 - DNA, 25 bp, Homo sapien
ttgtgctccatccacaactgctcat

SEQ ID NO: 4209999 - DNA, 25 bp, Homo sapien
gttgtgctccatccacaactgctca

SEQ ID NO: 4210000 - DNA, 25 bp, Homo sapien
ccatccacaactgctcatctctgga

SEQ ID NO: 4210001 - DNA, 25 bp, Homo sapien
tgctccatccacaactgctcatctc

SEQ ID NO: 4210002 - DNA, 25 bp, Homo sapien
gcttctcacggacaaagcccgtggg

SEQ ID NO: 4210003 - DNA, 25 bp, Homo sapien
catcatggatatctgaacaacgcag

SEQ ID NO: 4210004 - DNA, 25 bp, Homo sapien
gatatctgaacaacgcagcttctca

SEQ ID NO: 4210005 - DNA, 25 bp, Homo sapien
cagcttctcacggacaaagcccgtg

SEQ ID NO: 4210006 - DNA, 25 bp, Homo sapien
aaacaaatggcatcaatttgccaca

SEQ ID NO: 4210007 - DNA, 25 bp, Homo sapien
cactcaaacaaatggcatcaatttg

SEQ ID NO: 4210008 - DNA, 25 bp, Homo sapien
cctcacctccactcaaacaaatggc

SEQ ID NO: 4210009 - DNA, 25 bp, Homo sapien
tcacctccactcaaacaaatggcat

SEQ ID NO: 4210010 - DNA, 25 bp, Homo sapien
tctgaaccatgagagctgagtaggc

SEQ ID NO: 4210011 - DNA, 25 bp, Homo sapien
ggcacgggctgcaatatttatccat

SEQ ID NO: 4210012 - DNA, 25 bp, Homo sapien
gaaacatggatatgacgctctgaac

SEQ ID NO: 4210013 - DNA, 25 bp, Homo sapien
gcaccagggtagtcattcagaaaca

SEQ ID NO: 4210014 - DNA, 25 bp, Homo sapien
ccacacaactcccaacattggctac

SEQ ID NO: 4210015 - DNA, 25 bp, Homo sapien
acccattgccttggagttgggaagc

SEQ ID NO: 4210016 - DNA, 25 bp, Homo sapien
ttgccttggagttgggaagctttct

SEQ ID NO: 4210017 - DNA, 25 bp, Homo sapien
ccttggagttgggaagctttctggt

SEQ ID NO: 4210018 - DNA, 25 bp, Homo sapien
tctgggaacatctgccacccaatcc

SEQ ID NO: 4210019 - DNA, 25 bp, Homo sapien
acaaacctagaaattaggtatctgg

SEQ ID NO: 4210020 - DNA, 25 bp, Homo sapien
tcggaattcaccaaatcgagcatgg

SEQ ID NO: 4210021 - DNA, 25 bp, Homo sapien
aatcgagcatggatcacaaacctag

SEQ ID NO: 4210022 - DNA, 25 bp, Homo sapien
tccagtagagtgctttgtaacattc

SEQ ID NO: 4210023 - DNA, 25 bp, Homo sapien
tgcctctgcgggcccatctaggtgg

SEQ ID NO: 4210024 - DNA, 25 bp, Homo sapien
ctgcctctgcgggcccatctaggtg

SEQ ID NO: 4210025 - DNA, 25 bp, Homo sapien
ccacaatgtttcctgttttagacat

SEQ ID NO: 4210026 - DNA, 25 bp, Homo sapien
caccacaatgtttcctgttttagac

SEQ ID NO: 4210027 - DNA, 25 bp, Homo sapien
accacaatgtttcctgttttagaca

SEQ ID NO: 4210028 - DNA, 25 bp, Homo sapien
tgctatagctcttaactttcatatt

SEQ ID NO: 4210029 - DNA, 25 bp, Homo sapien
gatcattttatggtatcttgaattt

SEQ ID NO: 4210030 - DNA, 25 bp, Homo sapien
gctttgatcattttatggtatcttg

SEQ ID NO: 4210031 - DNA, 25 bp, Homo sapien
ttcattttgaaatgctatagctctt

SEQ ID NO: 4210032 - DNA, 25 bp, Homo sapien
aaggtctctggacttgatggtccat

SEQ ID NO: 4210033 - DNA, 25 bp, Homo sapien
cacactgaaaggtctctggacttga

SEQ ID NO: 4210034 - DNA, 25 bp, Homo sapien
aaaggtctctggacttgatggtcca

SEQ ID NO: 4210035 - DNA, 25 bp, Homo sapien
acactgaaaggtctctggacttgat

SEQ ID NO: 4210036 - DNA, 25 bp, Homo sapien
tagagcagcttggaaaccgcaaagc

SEQ ID NO: 4210037 - DNA, 25 bp, Homo sapien
tgtgggcagaccaatctgtggactc

SEQ ID NO: 4210038 - DNA, 25 bp, Homo sapien
gacctggtctctctcgacagaggga

SEQ ID NO: 4210039 - DNA, 25 bp, Homo sapien
tccttgaggaatagtctgggccctt

SEQ ID NO: 4210040 - DNA, 25 bp, Homo sapien
ggtgttgctggcaatgccctgaaga

SEQ ID NO: 4210041 - DNA, 25 bp, Homo sapien
gaagatccccctgataaggcaggac

SEQ ID NO: 4210042 - DNA, 25 bp, Homo sapien
ctgaagatccccctgataaggcagg

SEQ ID NO: 4210043 - DNA, 25 bp, Homo sapien
gttgctggcaatgccctgaagatcc

SEQ ID NO: 4210044 - DNA, 25 bp, Homo sapien
gccaactgaacacaccattaatggg

SEQ ID NO: 4210045 - DNA, 25 bp, Homo sapien
taccgactaatgagaatcctgcagg

SEQ ID NO: 4210046 - DNA, 25 bp, Homo sapien
caagcttgaattaagttaccgacta

SEQ ID NO: 4210047 - DNA, 25 bp, Homo sapien
gtcagtcagtcaagaaacaagtcac

SEQ ID NO: 4210048 - DNA, 25 bp, Homo sapien
ccttattggccgactggaatggcat

SEQ ID NO: 4210049 - DNA, 25 bp, Homo sapien
gggagttgctccttattggccgact

SEQ ID NO: 4210050 - DNA, 25 bp, Homo sapien
gttgctccttattggccgactggaa

SEQ ID NO: 4210051 - DNA, 25 bp, Homo sapien
cgctggggagttgctccttattggc

SEQ ID NO: 4210052 - DNA, 25 bp, Homo sapien
caaataaaagcccgggaccagacag

SEQ ID NO: 4210053 - DNA, 25 bp, Homo sapien
aatacaagctaccatcaaagaatat

SEQ ID NO: 4210054 - DNA, 25 bp, Homo sapien
gactaaatcaggaagaagtcacatc

SEQ ID NO: 4210055 - DNA, 25 bp, Homo sapien
caagctaccatcaaagaatattata

SEQ ID NO: 4210056 - DNA, 25 bp, Homo sapien
tgttctagaggattctgcaatcttt

SEQ ID NO: 4210057 - DNA, 25 bp, Homo sapien
cttgttctagaggattctgcaatct

SEQ ID NO: 4210058 - DNA, 25 bp, Homo sapien
aacttgttctagaggattctgcaat

SEQ ID NO: 4210059 - DNA, 25 bp, Homo sapien
tctagaggattctgcaatcttttca

SEQ ID NO: 4210060 - DNA, 25 bp, Homo sapien
tcatccccagtagtaccactgccac

SEQ ID NO: 4210061 - DNA, 25 bp, Homo sapien
tccactgggaacaaagcatggatct

SEQ ID NO: 4210062 - DNA, 25 bp, Homo sapien
ctgccactggacctttcctcctttc

SEQ ID NO: 4210063 - DNA, 25 bp, Homo sapien
tgggaacaaagcatggatctctgac

SEQ ID NO: 4210064 - DNA, 25 bp, Homo sapien
ctagtaagttgtagagaagacctta

SEQ ID NO: 4210065 - DNA, 25 bp, Homo sapien
tagtaagttgtagagaagaccttac

SEQ ID NO: 4210066 - DNA, 25 bp, Homo sapien
gattgaggggatacttttcaatatt

SEQ ID NO: 4210067 - DNA, 25 bp, Homo sapien
gctgtagattgaggggatacttttc

SEQ ID NO: 4210068 - DNA, 25 bp, Homo sapien
tccaagggctgtagattgaggggat

SEQ ID NO: 4210069 - DNA, 25 bp, Homo sapien
gaggggatacttttcaatattattc

SEQ ID NO: 4210070 - DNA, 25 bp, Homo sapien
cattcagagattgccttgccacagc

SEQ ID NO: 4210071 - DNA, 25 bp, Homo sapien
cctgtatgggaactgtttactcttt

SEQ ID NO: 4210072 - DNA, 25 bp, Homo sapien
tcagggcttgcagacactagactag

SEQ ID NO: 4210073 - DNA, 25 bp, Homo sapien
tagccagacaccctgtatgggaact

SEQ ID NO: 4210074 - DNA, 25 bp, Homo sapien
aagcttgttccagccttaaggctct

SEQ ID NO: 4210075 - DNA, 25 bp, Homo sapien
gcttgttccagccttaaggctctta

SEQ ID NO: 4210076 - DNA, 25 bp, Homo sapien
cttgttccagccttaaggctcttag

SEQ ID NO: 4210077 - DNA, 25 bp, Homo sapien
tcctttgctgtgcaccttcatcccc

SEQ ID NO: 4210078 - DNA, 25 bp, Homo sapien
ctgcctgtgctgcgaggccttctca

SEQ ID NO: 4210079 - DNA, 25 bp, Homo sapien
ctctgcctgtgctgcgaggccttct

SEQ ID NO: 4210080 - DNA, 25 bp, Homo sapien
tctgcctgtgctgcgaggccttctc

SEQ ID NO: 4210081 - DNA, 25 bp, Homo sapien
tgcctgtgctgcgaggccttctcac

SEQ ID NO: 4210082 - DNA, 25 bp, Homo sapien
gggtcctggatctataacactcttt

SEQ ID NO: 4210083 - DNA, 25 bp, Homo sapien
ttcagaaataatgcacccagggtta

SEQ ID NO: 4210084 - DNA, 25 bp, Homo sapien
tgagaatttgggcaatttgggtcct

SEQ ID NO: 4210085 - DNA, 25 bp, Homo sapien
ttctttatgaggactgagaaggtgc

SEQ ID NO: 4210086 - DNA, 25 bp, Homo sapien
cagtgcagtccgggttgccaatgca

SEQ ID NO: 4210087 - DNA, 25 bp, Homo sapien
agtgcagtccgggttgccaatgcat

SEQ ID NO: 4210088 - DNA, 25 bp, Homo sapien
ccagtgcagtccgggttgccaatgc

SEQ ID NO: 4210089 - DNA, 25 bp, Homo sapien
ctgccgctgcaggtactctcgccat

SEQ ID NO: 4210090 - DNA, 25 bp, Homo sapien
gtcggagaaggtgttcatgctgaca

SEQ ID NO: 4210091 - DNA, 25 bp, Homo sapien
ctgtcggagaaggtgttcatgctga

SEQ ID NO: 4210092 - DNA, 25 bp, Homo sapien
ctgctgtcggagaaggtgttcatgc

SEQ ID NO: 4210093 - DNA, 25 bp, Homo sapien
gatcttcactgtcacaaaccacctg

SEQ ID NO: 4210094 - DNA, 25 bp, Homo sapien
ttcagttgaatgtcaagtcaggaca

SEQ ID NO: 4210095 - DNA, 25 bp, Homo sapien
tgacaaaactctcaccatgggttcc

SEQ ID NO: 4210096 - DNA, 25 bp, Homo sapien
tgggttcctgggtagcaaataagct

SEQ ID NO: 4210097 - DNA, 25 bp, Homo sapien
ggtctatgttctccgtgtagccagg

SEQ ID NO: 4210098 - DNA, 25 bp, Homo sapien
caattgtggtctgtaggcatgctta

SEQ ID NO: 4210099 - DNA, 25 bp, Homo sapien
tcttaaactggtggcctgtaggtca

SEQ ID NO: 4210100 - DNA, 25 bp, Homo sapien
tgcctgcctgtatcgccacatggtg

SEQ ID NO: 4210101 - DNA, 25 bp, Homo sapien
ttcagcatttcagtgactggttaca

SEQ ID NO: 4210102 - DNA, 25 bp, Homo sapien
cagtgactggttacaaattatcaca

SEQ ID NO: 4210103 - DNA, 25 bp, Homo sapien
ctggttcataaatccctcatcactg

SEQ ID NO: 4210104 - DNA, 25 bp, Homo sapien
caaaatcctggttcataaatccctc

SEQ ID NO: 4210105 - DNA, 25 bp, Homo sapien
gcaatgcaaccatctgaaaacattt

SEQ ID NO: 4210106 - DNA, 25 bp, Homo sapien
gccacttttatttgcactgctataa

SEQ ID NO: 4210107 - DNA, 25 bp, Homo sapien
tattgaagaatatgcaatgcaacca

SEQ ID NO: 4210108 - DNA, 25 bp, Homo sapien
catatctaggcaaaaccatttattg

SEQ ID NO: 4210109 - DNA, 25 bp, Homo sapien
tagtgatagtgaggtcagttaggat

SEQ ID NO: 4210110 - DNA, 25 bp, Homo sapien
gtgatagtgaggtcagttaggataa

SEQ ID NO: 4210111 - DNA, 25 bp, Homo sapien
gatagtgaggtcagttaggataagc

SEQ ID NO: 4210112 - DNA, 25 bp, Homo sapien
ctagtgatagtgaggtcagttagga

SEQ ID NO: 4210113 - DNA, 25 bp, Homo sapien
catgagttagacacaaacgagaagc

SEQ ID NO: 4210114 - DNA, 25 bp, Homo sapien
ttccagtgtagttcacgagtgccct

SEQ ID NO: 4210115 - DNA, 25 bp, Homo sapien
tcatgagttagacacaaacgagaag

SEQ ID NO: 4210116 - DNA, 25 bp, Homo sapien
ggcattttccagtgtagttcacgag

SEQ ID NO: 4210117 - DNA, 25 bp, Homo sapien
ctcaaccagattagtgagctgattt

SEQ ID NO: 4210118 - DNA, 25 bp, Homo sapien
cacacaggaactcaaccagattagt

SEQ ID NO: 4210119 - DNA, 25 bp, Homo sapien
gaactcaaccagattagtgagctga

SEQ ID NO: 4210120 - DNA, 25 bp, Homo sapien
caggaactcaaccagattagtgagc

SEQ ID NO: 4210121 - DNA, 25 bp, Homo sapien
gaagacaaggctactcggagaacag

SEQ ID NO: 4210122 - DNA, 25 bp, Homo sapien
tcggttatcaaccaccatgctcaag

SEQ ID NO: 4210123 - DNA, 25 bp, Homo sapien
cattagtccaaagcagccgattcac

SEQ ID NO: 4210124 - DNA, 25 bp, Homo sapien
tgaaacgtataaagagccacatgac

SEQ ID NO: 4210125 - DNA, 25 bp, Homo sapien
gttgtaacacgctgcccggacctct

SEQ ID NO: 4210126 - DNA, 25 bp, Homo sapien
acagtcccacgttgtaacacgctgc

SEQ ID NO: 4210127 - DNA, 25 bp, Homo sapien
cacagtcccacgttgtaacacgctg

SEQ ID NO: 4210128 - DNA, 25 bp, Homo sapien
ccacgttgtaacacgctgcccggac

SEQ ID NO: 4210129 - DNA, 25 bp, Homo sapien
gggttacaggcaccttcattgattc

SEQ ID NO: 4210130 - DNA, 25 bp, Homo sapien
tgattctattgtcagtgcacatgcc

SEQ ID NO: 4210131 - DNA, 25 bp, Homo sapien
gacttcgtaggtatgctaatggaga

SEQ ID NO: 4210132 - DNA, 25 bp, Homo sapien
gcctctaagatcctagcaaaaggtt

SEQ ID NO: 4210133 - DNA, 25 bp, Homo sapien
gaattgcagtgtagcttcaggccac

SEQ ID NO: 4210134 - DNA, 25 bp, Homo sapien
tattgaggcagagatggaaccacac

SEQ ID NO: 4210135 - DNA, 25 bp, Homo sapien
taaagcatctcgttggcagttccag

SEQ ID NO: 4210136 - DNA, 25 bp, Homo sapien
tacaaatcatggtgtgccacttcag

SEQ ID NO: 4210137 - DNA, 25 bp, Homo sapien
gacacgtatgatttgctgcaagaaa

SEQ ID NO: 4210138 - DNA, 25 bp, Homo sapien
atcctggggagcctgtaggtgacac

SEQ ID NO: 4210139 - DNA, 25 bp, Homo sapien
taataacaattctaggtctatatgg

SEQ ID NO: 4210140 - DNA, 25 bp, Homo sapien
ctaggtctatatggttgatttgtga

SEQ ID NO: 4210141 - DNA, 25 bp, Homo sapien
ttcctgccctgtggcaacatcatct

SEQ ID NO: 4210142 - DNA, 25 bp, Homo sapien
catctcttgctacttcatgaccaca

SEQ ID NO: 4210143 - DNA, 25 bp, Homo sapien
cttctccggttccatcaattctctg

SEQ ID NO: 4210144 - DNA, 25 bp, Homo sapien
cacaccggagaccatcttttctttc

SEQ ID NO: 4210145 - DNA, 25 bp, Homo sapien
gaatttctagatgccacctgtgaac

SEQ ID NO: 4210146 - DNA, 25 bp, Homo sapien
gaaagtcataggctcttctcagcag

SEQ ID NO: 4210147 - DNA, 25 bp, Homo sapien
tagatgcatcacaaactaaccatgg

SEQ ID NO: 4210148 - DNA, 25 bp, Homo sapien
tatgatgcaggagcaactcttccag

SEQ ID NO: 4210149 - DNA, 25 bp, Homo sapien
gaagctagcccaacacttaacaact

SEQ ID NO: 4210150 - DNA, 25 bp, Homo sapien
ggaagaggaaagacctatggctcct

SEQ ID NO: 4210151 - DNA, 25 bp, Homo sapien
gaagctcgagaaagtggcaaaccct

SEQ ID NO: 4210152 - DNA, 25 bp, Homo sapien
gatgtctaggtaaacgaagctcgag

SEQ ID NO: 4210153 - DNA, 25 bp, Homo sapien
gagttcactcatgtactcccaatag

SEQ ID NO: 4210154 - DNA, 25 bp, Homo sapien
taggtgaaactaatggaatctaaat

SEQ ID NO: 4210155 - DNA, 25 bp, Homo sapien
gatttgataaccacaatcatcagtt

SEQ ID NO: 4210156 - DNA, 25 bp, Homo sapien
ttcatcataagcttaaacagttctg

SEQ ID NO: 4210157 - DNA, 25 bp, Homo sapien
taaagtacctctctagtatctatcc

SEQ ID NO: 4210158 - DNA, 25 bp, Homo sapien
catcgcttgcacgacatgggtgaaa

SEQ ID NO: 4210159 - DNA, 25 bp, Homo sapien
ggaaatttggttagcataccaatca

SEQ ID NO: 4210160 - DNA, 25 bp, Homo sapien
taaaggtgctgtctcatatcactgg

SEQ ID NO: 4210161 - DNA, 25 bp, Homo sapien
aaggtcccataatgaccccataagc

SEQ ID NO: 4210162 - DNA, 25 bp, Homo sapien
catcgtgatgcctgctacagctcca

SEQ ID NO: 4210163 - DNA, 25 bp, Homo sapien
cacgccccagtgctgaagcacaagg

SEQ ID NO: 4210164 - DNA, 25 bp, Homo sapien
tgccccaaaacatattagaggtgtg

SEQ ID NO: 4210165 - DNA, 25 bp, Homo sapien
caccatgcttgctcaaatgtacagg

SEQ ID NO: 4210166 - DNA, 25 bp, Homo sapien
taagccctaacaactggactggaag

SEQ ID NO: 4210167 - DNA, 25 bp, Homo sapien
actggaagtattggcttggaatgcc

SEQ ID NO: 4210168 - DNA, 25 bp, Homo sapien
tttcatgaaagctgtgtaccacctg

SEQ ID NO: 4210169 - DNA, 25 bp, Homo sapien
cattacttgaaagatacatatcacc

SEQ ID NO: 4210170 - DNA, 25 bp, Homo sapien
gattttgtgccaagctcattacttg

SEQ ID NO: 4210171 - DNA, 25 bp, Homo sapien
gggtctctctcctgaacttagattc

SEQ ID NO: 4210172 - DNA, 25 bp, Homo sapien
ggcactttctccttagtctcttctg

SEQ ID NO: 4210173 - DNA, 25 bp, Homo sapien
tgagtctgtcttcactgattttcca

SEQ ID NO: 4210174 - DNA, 25 bp, Homo sapien
tttccagtctgtgtgcatttgtaca

SEQ ID NO: 4210175 - DNA, 25 bp, Homo sapien
ttccagtctgtgtgcatttgtacat

SEQ ID NO: 4210176 - DNA, 25 bp, Homo sapien
gtcttcactgattttccagtctgtg

SEQ ID NO: 4210177 - DNA, 25 bp, Homo sapien
tctagtctacacagtaatttttcct

SEQ ID NO: 4210178 - DNA, 25 bp, Homo sapien
gagttcctgtcctctcattgataga

SEQ ID NO: 4210179 - DNA, 25 bp, Homo sapien
acaatctatttgaagaggcaagagt

SEQ ID NO: 4210180 - DNA, 25 bp, Homo sapien
ctttgattaggtatttgagtccttc

SEQ ID NO: 4210181 - DNA, 25 bp, Homo sapien
aatgtcacatgtctaatatctctct

SEQ ID NO: 4210182 - DNA, 25 bp, Homo sapien
cagtcaaatgacttcaccaactata

SEQ ID NO: 4210183 - DNA, 25 bp, Homo sapien
ccaagaagtctcaagtatccctaga

SEQ ID NO: 4210184 - DNA, 25 bp, Homo sapien
tagatcatacctctcttccaaactc

SEQ ID NO: 4210185 - DNA, 25 bp, Homo sapien
agtaacttgtaaagggcacagacgc

SEQ ID NO: 4210186 - DNA, 25 bp, Homo sapien
taagcctggagggacaagtctagac

SEQ ID NO: 4210187 - DNA, 25 bp, Homo sapien
cacagacgcaagtgctgacacaagg

SEQ ID NO: 4210188 - DNA, 25 bp, Homo sapien
tgtcccatgcaatctacaggcagga

SEQ ID NO: 4210189 - DNA, 25 bp, Homo sapien
gcactgatgtaattctggagtccag

SEQ ID NO: 4210190 - DNA, 25 bp, Homo sapien
gaatgattctcacctgcattgaaga

SEQ ID NO: 4210191 - DNA, 25 bp, Homo sapien
gattatggaggtctagatatccttc

SEQ ID NO: 4210192 - DNA, 25 bp, Homo sapien
tctgggccccaatgactgaatgatt

SEQ ID NO: 4210193 - DNA, 25 bp, Homo sapien
ctaatctacttattagtacccacag

SEQ ID NO: 4210194 - DNA, 25 bp, Homo sapien
tcttcgtgatatgtggagtgaccga

SEQ ID NO: 4210195 - DNA, 25 bp, Homo sapien
tatgtggagtgaccgaagaaaaaca

SEQ ID NO: 4210196 - DNA, 25 bp, Homo sapien
taactaatctacttattagtaccca

SEQ ID NO: 4210197 - DNA, 25 bp, Homo sapien
aatagcctttgcaacagaagccaca

SEQ ID NO: 4210198 - DNA, 25 bp, Homo sapien
tgggcaagtaccagaatcacagtgt

SEQ ID NO: 4210199 - DNA, 25 bp, Homo sapien
ggtgtccaggcccataagctgcggt

SEQ ID NO: 4210200 - DNA, 25 bp, Homo sapien
cacagtgtgcttactggagtaggac

SEQ ID NO: 4210201 - DNA, 25 bp, Homo sapien
ccccgacctctctttgaagtatcat

SEQ ID NO: 4210202 - DNA, 25 bp, Homo sapien
ttccccgacctctctttgaagtatc

SEQ ID NO: 4210203 - DNA, 25 bp, Homo sapien
tccccgacctctctttgaagtatca

SEQ ID NO: 4210204 - DNA, 25 bp, Homo sapien
acaatatggggatgccacctgcttc

SEQ ID NO: 4210205 - DNA, 25 bp, Homo sapien
taaatgatacggcataacctgttct

SEQ ID NO: 4210206 - DNA, 25 bp, Homo sapien
gacctcataaatgatacggcataac

SEQ ID NO: 4210207 - DNA, 25 bp, Homo sapien
ttgcaaatgagtgacacaatatggg

SEQ ID NO: 4210208 - DNA, 25 bp, Homo sapien
gaatgaaccttgaaattgtgaggcg

SEQ ID NO: 4210209 - DNA, 25 bp, Homo sapien
ttgaaattgtgaggcgccaaaggca

SEQ ID NO: 4210210 - DNA, 25 bp, Homo sapien
ttgtgaggcgccaaaggcaaagttc

SEQ ID NO: 4210211 - DNA, 25 bp, Homo sapien
gaaccttgaaattgtgaggcgccaa

SEQ ID NO: 4210212 - DNA, 25 bp, Homo sapien
catggatctgaccaggtgggtaccc

SEQ ID NO: 4210213 - DNA, 25 bp, Homo sapien
tggatctgaccaggtgggtacccag

SEQ ID NO: 4210214 - DNA, 25 bp, Homo sapien
gatctgaccaggtgggtacccagtt

SEQ ID NO: 4210215 - DNA, 25 bp, Homo sapien
tcatggatctgaccaggtgggtacc

SEQ ID NO: 4210216 - DNA, 25 bp, Homo sapien
agtagcctcttagcaaggccactgc

SEQ ID NO: 4210217 - DNA, 25 bp, Homo sapien
gcctcttagcaaggccactgcctct

SEQ ID NO: 4210218 - DNA, 25 bp, Homo sapien
ccacaaatgtctgcaaacctccctc

SEQ ID NO: 4210219 - DNA, 25 bp, Homo sapien
gccactgcctctcccacaaatgtct

SEQ ID NO: 4210220 - DNA, 25 bp, Homo sapien
gatgtagccccacccttgaagtgac

SEQ ID NO: 4210221 - DNA, 25 bp, Homo sapien
caatcctggaggttgcctgcagatg

SEQ ID NO: 4210222 - DNA, 25 bp, Homo sapien
catgcctcgcatgtgtttgggtgga

SEQ ID NO: 4210223 - DNA, 25 bp, Homo sapien
ttgtgtatacaaatggcttcttggg

SEQ ID NO: 4210224 - DNA, 25 bp, Homo sapien
tgcagctacaattggttgggaaacc

SEQ ID NO: 4210225 - DNA, 25 bp, Homo sapien
cttgtcccgtgcagtctccagctgt

SEQ ID NO: 4210226 - DNA, 25 bp, Homo sapien
cagctacaattggttgggaaaccct

SEQ ID NO: 4210227 - DNA, 25 bp, Homo sapien
acttttcttgtcccgtgcagtctcc

SEQ ID NO: 4210228 - DNA, 25 bp, Homo sapien
accatagagaagattagctgtgccc

SEQ ID NO: 4210229 - DNA, 25 bp, Homo sapien
tgtgaaatggtgttaacgtggccct

SEQ ID NO: 4210230 - DNA, 25 bp, Homo sapien
tagaggaaaaagcaacaccatagag

SEQ ID NO: 4210231 - DNA, 25 bp, Homo sapien
caattgattcaagctccgtgggtaa

SEQ ID NO: 4210232 - DNA, 25 bp, Homo sapien
catgcttatcccgaggtggtagttg

SEQ ID NO: 4210233 - DNA, 25 bp, Homo sapien
ctccactgtcatgcttatcccgagg

SEQ ID NO: 4210234 - DNA, 25 bp, Homo sapien
gtagttggagagtgtaagggaccat

SEQ ID NO: 4210235 - DNA, 25 bp, Homo sapien
tgtcatgcttatcccgaggtggtag

SEQ ID NO: 4210236 - DNA, 25 bp, Homo sapien
cttcaggttgttctcgtttctccca

SEQ ID NO: 4210237 - DNA, 25 bp, Homo sapien
cactgctttctgtggattaaataaa

SEQ ID NO: 4210238 - DNA, 25 bp, Homo sapien
ctcccactgctttctgtggattaaa

SEQ ID NO: 4210239 - DNA, 25 bp, Homo sapien
tgttctcgtttctcccactgctttc

SEQ ID NO: 4210240 - DNA, 25 bp, Homo sapien
gaactgaagcaatgaaactgacgca

SEQ ID NO: 4210241 - DNA, 25 bp, Homo sapien
catgggatacaggagtgtgtttgcc

SEQ ID NO: 4210242 - DNA, 25 bp, Homo sapien
ctccagccgtaaaccatgggataca

SEQ ID NO: 4210243 - DNA, 25 bp, Homo sapien
cctggacacctgaggcacttgcaaa

SEQ ID NO: 4210244 - DNA, 25 bp, Homo sapien
aaaagagggtccagaccaatgtggg

SEQ ID NO: 4210245 - DNA, 25 bp, Homo sapien
taaaaagagggtccagaccaatgtg

SEQ ID NO: 4210246 - DNA, 25 bp, Homo sapien
aaaaagagggtccagaccaatgtgg

SEQ ID NO: 4210247 - DNA, 25 bp, Homo sapien
aaagagggtccagaccaatgtgggg

SEQ ID NO: 4210248 - DNA, 25 bp, Homo sapien
tataaaagacaccagaccatatgca

SEQ ID NO: 4210249 - DNA, 25 bp, Homo sapien
gacaatagttagcaacaatgccttg

SEQ ID NO: 4210250 - DNA, 25 bp, Homo sapien
agtcatggcactcacagaacctggt

SEQ ID NO: 4210251 - DNA, 25 bp, Homo sapien
tctccagaggtaactagagctgata

SEQ ID NO: 4210252 - DNA, 25 bp, Homo sapien
aaaatattgactattggtcccccat

SEQ ID NO: 4210253 - DNA, 25 bp, Homo sapien
aatattgactattggtcccccatct

SEQ ID NO: 4210254 - DNA, 25 bp, Homo sapien
ttgactattggtcccccatctcttc

SEQ ID NO: 4210255 - DNA, 25 bp, Homo sapien
tattgactattggtcccccatctct

SEQ ID NO: 4210256 - DNA, 25 bp, Homo sapien
cacttataatctccagtactgaact

SEQ ID NO: 4210257 - DNA, 25 bp, Homo sapien
tcacgacacttataatctccagtac

SEQ ID NO: 4210258 - DNA, 25 bp, Homo sapien
tcatttcttcacgacacttataatc

SEQ ID NO: 4210259 - DNA, 25 bp, Homo sapien
tcttcacgacacttataatctccag

SEQ ID NO: 4210260 - DNA, 25 bp, Homo sapien
tttgccaaacaaaaatggacaggcc

SEQ ID NO: 4210261 - DNA, 25 bp, Homo sapien
gcctttccgacgcacattcatagtt

SEQ ID NO: 4210262 - DNA, 25 bp, Homo sapien
ttcatagttttccatgacggtggtg

SEQ ID NO: 4210263 - DNA, 25 bp, Homo sapien
catagttttccatgacggtggtggt

SEQ ID NO: 4210264 - DNA, 25 bp, Homo sapien
gacttggctacaaggcattcttggc

SEQ ID NO: 4210265 - DNA, 25 bp, Homo sapien
caagatgaagtctgagcaagtttga

SEQ ID NO: 4210266 - DNA, 25 bp, Homo sapien
actgcagattcccttgattggagca

SEQ ID NO: 4210267 - DNA, 25 bp, Homo sapien
attggagcaatacaggaatctgggc

SEQ ID NO: 4210268 - DNA, 25 bp, Homo sapien
gcagtgtagactgaagtaagcactg

SEQ ID NO: 4210269 - DNA, 25 bp, Homo sapien
tgtcatcaacaaagtctggtatcct

SEQ ID NO: 4210270 - DNA, 25 bp, Homo sapien
gggcatttcctataggcagtgtaga

SEQ ID NO: 4210271 - DNA, 25 bp, Homo sapien
gagccctcccatcagttctagtgat

SEQ ID NO: 4210272 - DNA, 25 bp, Homo sapien
tttccttggaactatgaccaaatca

SEQ ID NO: 4210273 - DNA, 25 bp, Homo sapien
agtcttggatgtttccttggaacta

SEQ ID NO: 4210274 - DNA, 25 bp, Homo sapien
aaggaagagtcttggatgtttcctt

SEQ ID NO: 4210275 - DNA, 25 bp, Homo sapien
ggatgtttccttggaactatgacca

SEQ ID NO: 4210276 - DNA, 25 bp, Homo sapien
gagtcaagctgacccagtttccagg

SEQ ID NO: 4210277 - DNA, 25 bp, Homo sapien
gctcagggtcactttgggccagaat

SEQ ID NO: 4210278 - DNA, 25 bp, Homo sapien
agtttccaggattaggatagtgacc

SEQ ID NO: 4210279 - DNA, 25 bp, Homo sapien
ggccagaattgctgctaggctgagt

SEQ ID NO: 4210280 - DNA, 25 bp, Homo sapien
taggtgccagaacaggaacatctgg

SEQ ID NO: 4210281 - DNA, 25 bp, Homo sapien
ataggtgccagaacaggaacatctg

SEQ ID NO: 4210282 - DNA, 25 bp, Homo sapien
tgagggctctcagtaataggtgcca

SEQ ID NO: 4210283 - DNA, 25 bp, Homo sapien
tttcccttgacaggcaagttgaggg

SEQ ID NO: 4210284 - DNA, 25 bp, Homo sapien
ctgtgatgagcatgactgaattcta

SEQ ID NO: 4210285 - DNA, 25 bp, Homo sapien
tgagcaagcaacaagcccagtggtg

SEQ ID NO: 4210286 - DNA, 25 bp, Homo sapien
tgtgatgagcatgactgaattctac

SEQ ID NO: 4210287 - DNA, 25 bp, Homo sapien
gcaacaagcccagtggtgctgcagg

SEQ ID NO: 4210288 - DNA, 25 bp, Homo sapien
gaggctgtgtcttgaccaaactgaa

SEQ ID NO: 4210289 - DNA, 25 bp, Homo sapien
ctgaggctgtgtcttgaccaaactg

SEQ ID NO: 4210290 - DNA, 25 bp, Homo sapien
tgaggctgtgtcttgaccaaactga

SEQ ID NO: 4210291 - DNA, 25 bp, Homo sapien
tgaattgatctagccatactttgac

SEQ ID NO: 4210292 - DNA, 25 bp, Homo sapien
aagttgccatttcttccgccttgta

SEQ ID NO: 4210293 - DNA, 25 bp, Homo sapien
gccttgtaaacacaggaagctagtg

SEQ ID NO: 4210294 - DNA, 25 bp, Homo sapien
tgttaattaatttcccagccatcaa

SEQ ID NO: 4210295 - DNA, 25 bp, Homo sapien
tgttttgaggacagttggagaagca

SEQ ID NO: 4210296 - DNA, 25 bp, Homo sapien
gagaagcaggggctcagtaggcatg

SEQ ID NO: 4210297 - DNA, 25 bp, Homo sapien
tcagtaggcatgagagttgctctgt

SEQ ID NO: 4210298 - DNA, 25 bp, Homo sapien
ctgttttgaggacagttggagaagc

SEQ ID NO: 4210299 - DNA, 25 bp, Homo sapien
gacagttaaataggccctcctgctc

SEQ ID NO: 4210300 - DNA, 25 bp, Homo sapien
ctctggacagttaaataggccctcc

SEQ ID NO: 4210301 - DNA, 25 bp, Homo sapien
ttgatagctatagatacctgttcct

SEQ ID NO: 4210302 - DNA, 25 bp, Homo sapien
ccttgatttgatagctatagatacc

SEQ ID NO: 4210303 - DNA, 25 bp, Homo sapien
tcctccttcaccattgaagcaggaa

SEQ ID NO: 4210304 - DNA, 25 bp, Homo sapien
ctcctccttcaccattgaagcagga

SEQ ID NO: 4210305 - DNA, 25 bp, Homo sapien
cctccttcaccattgaagcaggaat

SEQ ID NO: 4210306 - DNA, 25 bp, Homo sapien
cagcagtgttgaaaagacctttagg

SEQ ID NO: 4210307 - DNA, 25 bp, Homo sapien
tgtgagccccttaccatgtgatgtc

SEQ ID NO: 4210308 - DNA, 25 bp, Homo sapien
gagggctcattcatcgattcatggc

SEQ ID NO: 4210309 - DNA, 25 bp, Homo sapien
cagtttagccatccttgtgagcccc

SEQ ID NO: 4210310 - DNA, 25 bp, Homo sapien
ccgcagagtcctgtgaggtagttcc

SEQ ID NO: 4210311 - DNA, 25 bp, Homo sapien
gatgtcacagttcgagtgctttctg

SEQ ID NO: 4210312 - DNA, 25 bp, Homo sapien
agattcatgtaagaacactctgccc

SEQ ID NO: 4210313 - DNA, 25 bp, Homo sapien
gatttaagatttctgccgcagagtc

SEQ ID NO: 4210314 - DNA, 25 bp, Homo sapien
gtcatagcttccagatgaatcaaat

SEQ ID NO: 4210315 - DNA, 25 bp, Homo sapien
ccagttgaaattgggctttatgcat

SEQ ID NO: 4210316 - DNA, 25 bp, Homo sapien
aactcggatgaatgccattgtctat

SEQ ID NO: 4210317 - DNA, 25 bp, Homo sapien
ttccagtcaccacaaaactcggatg

SEQ ID NO: 4210318 - DNA, 25 bp, Homo sapien
tctttatccagttgaaattgggctt

SEQ ID NO: 4210319 - DNA, 25 bp, Homo sapien
gttttaggtgaacacgggagcacac

SEQ ID NO: 4210320 - DNA, 25 bp, Homo sapien
tgcagggttttaggtgaacacggga

SEQ ID NO: 4210321 - DNA, 25 bp, Homo sapien
acctgcagggttttaggtgaacacg

SEQ ID NO: 4210322 - DNA, 25 bp, Homo sapien
ggttttaggtgaacacgggagcaca

SEQ ID NO: 4210323 - DNA, 25 bp, Homo sapien
gattcctgtccactcatcaacttac

SEQ ID NO: 4210324 - DNA, 25 bp, Homo sapien
gtacaagtcttgcagattcctgtcc

SEQ ID NO: 4210325 - DNA, 25 bp, Homo sapien
catgtacaagtcttgcagattcctg

SEQ ID NO: 4210326 - DNA, 25 bp, Homo sapien
tgaaacatgtacaagtcttgcagat

SEQ ID NO: 4210327 - DNA, 25 bp, Homo sapien
tcttggacttgcacctcacatggcc

SEQ ID NO: 4210328 - DNA, 25 bp, Homo sapien
cacatggccccattcgtttctggtc

SEQ ID NO: 4210329 - DNA, 25 bp, Homo sapien
gccccattcgtttctggtcagctgt

SEQ ID NO: 4210330 - DNA, 25 bp, Homo sapien
gctgtcttggacttgcacctcacat

SEQ ID NO: 4210331 - DNA, 25 bp, Homo sapien
ggctccataggtggagagtggtgag

SEQ ID NO: 4210332 - DNA, 25 bp, Homo sapien
tccataggtggagagtggtgagatg

SEQ ID NO: 4210333 - DNA, 25 bp, Homo sapien
ctccataggtggagagtggtgagat

SEQ ID NO: 4210334 - DNA, 25 bp, Homo sapien
ccataggtggagagtggtgagatgc

SEQ ID NO: 4210335 - DNA, 25 bp, Homo sapien
ggggcattctgagctgctcacatcc

SEQ ID NO: 4210336 - DNA, 25 bp, Homo sapien
ggttttctcttgaggggcattctga

SEQ ID NO: 4210337 - DNA, 25 bp, Homo sapien
tgaaggttttctcttgaggggcatt

SEQ ID NO: 4210338 - DNA, 25 bp, Homo sapien
aaggttttctcttgaggggcattct

SEQ ID NO: 4210339 - DNA, 25 bp, Homo sapien
ttctcacaagcccattatgttcctc

SEQ ID NO: 4210340 - DNA, 25 bp, Homo sapien
cacaagcccattatgttcctctaac

SEQ ID NO: 4210341 - DNA, 25 bp, Homo sapien
gagaaggatctacagtccccttccc

SEQ ID NO: 4210342 - DNA, 25 bp, Homo sapien
aaaggacctgagaaggatctacagt

SEQ ID NO: 4210343 - DNA, 25 bp, Homo sapien
gtttctgtcagcaagtagacacaag

SEQ ID NO: 4210344 - DNA, 25 bp, Homo sapien
tctggaccaagatctccagaaaaat

SEQ ID NO: 4210345 - DNA, 25 bp, Homo sapien
ggaccaagatctccagaaaaatcag

SEQ ID NO: 4210346 - DNA, 25 bp, Homo sapien
tggaccaagatctccagaaaaatca

SEQ ID NO: 4210347 - DNA, 25 bp, Homo sapien
ttctggaccaagatctccagaaaaa

SEQ ID NO: 4210348 - DNA, 25 bp, Homo sapien
tttcctcgtcagttaatgccttatg

SEQ ID NO: 4210349 - DNA, 25 bp, Homo sapien
tcagttaatgccttatgacccttct

SEQ ID NO: 4210350 - DNA, 25 bp, Homo sapien
gtgcaagttttcctcgtcagttaat

SEQ ID NO: 4210351 - DNA, 25 bp, Homo sapien
taatgccttatgacccttcttggct

SEQ ID NO: 4210352 - DNA, 25 bp, Homo sapien
cctggccagatcattggatgccctg

SEQ ID NO: 4210353 - DNA, 25 bp, Homo sapien
tgtgcctacttcttggactcagtgt

SEQ ID NO: 4210354 - DNA, 25 bp, Homo sapien
ccttccagaggtcaacgatttagga

SEQ ID NO: 4210355 - DNA, 25 bp, Homo sapien
gatttaggactaggactatggctcc

SEQ ID NO: 4210356 - DNA, 25 bp, Homo sapien
tctcaggggcactttctgtaactgg

SEQ ID NO: 4210357 - DNA, 25 bp, Homo sapien
catgggctgtccagatgccctctca

SEQ ID NO: 4210358 - DNA, 25 bp, Homo sapien
tggatatgctagcagcagacactgg

SEQ ID NO: 4210359 - DNA, 25 bp, Homo sapien
gctggggacttagcttggtgcccct

SEQ ID NO: 4210360 - DNA, 25 bp, Homo sapien
ctccgtagatactgctgccattgta

SEQ ID NO: 4210361 - DNA, 25 bp, Homo sapien
ctgctgccattgtagggctcttcac

SEQ ID NO: 4210362 - DNA, 25 bp, Homo sapien
cttaaactccgtagatactgctgcc

SEQ ID NO: 4210363 - DNA, 25 bp, Homo sapien
gctgccattgtagggctcttcacca

SEQ ID NO: 4210364 - DNA, 25 bp, Homo sapien
tccaatgtagggtgtacatcaatgg

SEQ ID NO: 4210365 - DNA, 25 bp, Homo sapien
tgtagggtgtacatcaatggcagcc

SEQ ID NO: 4210366 - DNA, 25 bp, Homo sapien
ccttcctggtccaatgtagggtgta

SEQ ID NO: 4210367 - DNA, 25 bp, Homo sapien
cctggtccaatgtagggtgtacatc

SEQ ID NO: 4210368 - DNA, 25 bp, Homo sapien
tgaagcacagaaaaccgagagcaca

SEQ ID NO: 4210369 - DNA, 25 bp, Homo sapien
agcacagaaaaccgagagcacaaac

SEQ ID NO: 4210370 - DNA, 25 bp, Homo sapien
ctgaagcacagaaaaccgagagcac

SEQ ID NO: 4210371 - DNA, 25 bp, Homo sapien
gaagcacagaaaaccgagagcacaa

SEQ ID NO: 4210372 - DNA, 25 bp, Homo sapien
ctacttctgtctttgtcaagccctg

SEQ ID NO: 4210373 - DNA, 25 bp, Homo sapien
tgaggaaatgggacttgtaacagac

SEQ ID NO: 4210374 - DNA, 25 bp, Homo sapien
gagttcagacctgggtgagtggaaa

SEQ ID NO: 4210375 - DNA, 25 bp, Homo sapien
tgagtggaaatattggattgcttgc

SEQ ID NO: 4210376 - DNA, 25 bp, Homo sapien
taggacaatttatgggagttcagac

SEQ ID NO: 4210377 - DNA, 25 bp, Homo sapien
caccaggaatccattgtagccatag

SEQ ID NO: 4210378 - DNA, 25 bp, Homo sapien
tgggccttgggatatgatttccatc

SEQ ID NO: 4210379 - DNA, 25 bp, Homo sapien
tgtagccttttgtgttccagtttaa

SEQ ID NO: 4210380 - DNA, 25 bp, Homo sapien
cagtttcacagtccaaataggcaga

SEQ ID NO: 4210381 - DNA, 25 bp, Homo sapien
ttagtagtctccctctgccatcagc

SEQ ID NO: 4210382 - DNA, 25 bp, Homo sapien
tgcaccctgtgaaatgagatggcct

SEQ ID NO: 4210383 - DNA, 25 bp, Homo sapien
gagaagctctagcacaaactgcttg

SEQ ID NO: 4210384 - DNA, 25 bp, Homo sapien
gagccaattgtgtctggtgaaagca

SEQ ID NO: 4210385 - DNA, 25 bp, Homo sapien
tactgcaaaccgatcattatgtgga

SEQ ID NO: 4210386 - DNA, 25 bp, Homo sapien
ccccagcttagcctctggcactcaa

SEQ ID NO: 4210387 - DNA, 25 bp, Homo sapien
cagcttagcctctggcactcaacgt

SEQ ID NO: 4210388 - DNA, 25 bp, Homo sapien
ccagcttagcctctggcactcaacg

SEQ ID NO: 4210389 - DNA, 25 bp, Homo sapien
gtatggatatattcatgtgttcatt

SEQ ID NO: 4210390 - DNA, 25 bp, Homo sapien
tgcccgcaaacttcccagggactgt

SEQ ID NO: 4210391 - DNA, 25 bp, Homo sapien
gactgtctgcagccaaatctcttgg

SEQ ID NO: 4210392 - DNA, 25 bp, Homo sapien
gatggggctgcccgcaaacttccca

SEQ ID NO: 4210393 - DNA, 25 bp, Homo sapien
gggctgcccgcaaacttcccaggga

SEQ ID NO: 4210394 - DNA, 25 bp, Homo sapien
ggaagagctttcaaacagtgagact

SEQ ID NO: 4210395 - DNA, 25 bp, Homo sapien
gctacacagctggtttccgttttca

SEQ ID NO: 4210396 - DNA, 25 bp, Homo sapien
cgtctctgaacacaaaataagtgga

SEQ ID NO: 4210397 - DNA, 25 bp, Homo sapien
taactgtagtcctaaagctgagcta

SEQ ID NO: 4210398 - DNA, 25 bp, Homo sapien
tagcagttctagagctctctcccac

SEQ ID NO: 4210399 - DNA, 25 bp, Homo sapien
ttctaggtcctaacaaaattgatca

SEQ ID NO: 4210400 - DNA, 25 bp, Homo sapien
cccgcacccgtgcagtgtagcttag

SEQ ID NO: 4210401 - DNA, 25 bp, Homo sapien
tacaccttctcaaatataggctcaa

SEQ ID NO: 4210402 - DNA, 25 bp, Homo sapien
cagaggcacctaccactcagtggaa

SEQ ID NO: 4210403 - DNA, 25 bp, Homo sapien
cagtggaaccattcaccagtgtggg

SEQ ID NO: 4210404 - DNA, 25 bp, Homo sapien
tctccaagtgaactgacaagtttcc

SEQ ID NO: 4210405 - DNA, 25 bp, Homo sapien
cagtgttccttaggtgactccccaa

SEQ ID NO: 4210406 - DNA, 25 bp, Homo sapien
ccttgtttggggttgccacctctgc

SEQ ID NO: 4210407 - DNA, 25 bp, Homo sapien
tcaaatccatactcctggaaccaga

SEQ ID NO: 4210408 - DNA, 25 bp, Homo sapien
accacaccagcaagactttgccatt

SEQ ID NO: 4210409 - DNA, 25 bp, Homo sapien
tatctcagtcccctcaaatccatac

SEQ ID NO: 4210410 - DNA, 25 bp, Homo sapien
cactgataaatgacaagacaatgat

SEQ ID NO: 4210411 - DNA, 25 bp, Homo sapien
acaatgataggatgaggtagagaag

SEQ ID NO: 4210412 - DNA, 25 bp, Homo sapien
gtagagaaggatggaggaattcccc

SEQ ID NO: 4210413 - DNA, 25 bp, Homo sapien
gatggaggaattccccttctgtaaa

SEQ ID NO: 4210414 - DNA, 25 bp, Homo sapien
acttgaattgggtcttgaggtataa

SEQ ID NO: 4210415 - DNA, 25 bp, Homo sapien
ttgaattgggtcttgaggtataatc

SEQ ID NO: 4210416 - DNA, 25 bp, Homo sapien
catacttgaattgggtcttgaggta

SEQ ID NO: 4210417 - DNA, 25 bp, Homo sapien
tacttgaattgggtcttgaggtata

SEQ ID NO: 4210418 - DNA, 25 bp, Homo sapien
gttgctcccatgcttggtagcccag

SEQ ID NO: 4210419 - DNA, 25 bp, Homo sapien
catcctgagcattagtataattgcc

SEQ ID NO: 4210420 - DNA, 25 bp, Homo sapien
agtataattgcccaaacgttgctcc

SEQ ID NO: 4210421 - DNA, 25 bp, Homo sapien
aaaatgactttggtgagttacagcc

SEQ ID NO: 4210422 - DNA, 25 bp, Homo sapien
caactccccgctaccccaccagtag

SEQ ID NO: 4210423 - DNA, 25 bp, Homo sapien
tgaagagaataaattgaacaaaagg

SEQ ID NO: 4210424 - DNA, 25 bp, Homo sapien
agagaataaattgaacaaaagggca

SEQ ID NO: 4210425 - DNA, 25 bp, Homo sapien
agaataaattgaacaaaagggcatt

SEQ ID NO: 4210426 - DNA, 25 bp, Homo sapien
taaattgaacaaaagggcatttaga

SEQ ID NO: 4210427 - DNA, 25 bp, Homo sapien
tggaagcagcaatcttaggaataac

SEQ ID NO: 4210428 - DNA, 25 bp, Homo sapien
ctggaagcagcaatcttaggaataa

SEQ ID NO: 4210429 - DNA, 25 bp, Homo sapien
gctcggtggtcatgcaccatcattt

SEQ ID NO: 4210430 - DNA, 25 bp, Homo sapien
cgccgcatccccttccaagttcagg

SEQ ID NO: 4210431 - DNA, 25 bp, Homo sapien
gcgcagctccagccgccttgccgcc

SEQ ID NO: 4210432 - DNA, 25 bp, Homo sapien
cccgagtgacgtgtgctcggtggtc

SEQ ID NO: 4210433 - DNA, 25 bp, Homo sapien
cagtcccggttttcgcggcggcagg

SEQ ID NO: 4210434 - DNA, 25 bp, Homo sapien
cagtccgcagtcccggttttcgcgg

SEQ ID NO: 4210435 - DNA, 25 bp, Homo sapien
cgcagtcccggttttcgcggcggca

SEQ ID NO: 4210436 - DNA, 25 bp, Homo sapien
gcagtcccggttttcgcggcggcag

SEQ ID NO: 4210437 - DNA, 25 bp, Homo sapien
cgcctccgcgtctccctggccggcc

SEQ ID NO: 4210438 - DNA, 25 bp, Homo sapien
aaccgctggcagtcggaggtctcac

SEQ ID NO: 4210439 - DNA, 25 bp, Homo sapien
tggcagtcggaggtctcactcccgc

SEQ ID NO: 4210440 - DNA, 25 bp, Homo sapien
cgctggcagtcggaggtctcactcc

SEQ ID NO: 4210441 - DNA, 25 bp, Homo sapien
agcgcgcacacttttcatacaaggg

SEQ ID NO: 4210442 - DNA, 25 bp, Homo sapien
tcaaattagcaaaggggtgcccagc

SEQ ID NO: 4210443 - DNA, 25 bp, Homo sapien
tattaaccattttgcgccaggcgcg

SEQ ID NO: 4210444 - DNA, 25 bp, Homo sapien
cgcggcgcgcgcagactttgtatta

SEQ ID NO: 4210445 - DNA, 25 bp, Homo sapien
gggaggaggtagagagtgagctgct

SEQ ID NO: 4210446 - DNA, 25 bp, Homo sapien
gaggtagagagtgagctgctgggcc

SEQ ID NO: 4210447 - DNA, 25 bp, Homo sapien
aggaggtagagagtgagctgctggg

SEQ ID NO: 4210448 - DNA, 25 bp, Homo sapien
ggtagagagtgagctgctgggccaa

SEQ ID NO: 4210449 - DNA, 25 bp, Homo sapien
tgctgccggcgtcactgcctagatc

SEQ ID NO: 4210450 - DNA, 25 bp, Homo sapien
tgccggcgtcactgcctagatccat

SEQ ID NO: 4210451 - DNA, 25 bp, Homo sapien
tggactgtgaactggcgcggctgct

SEQ ID NO: 4210452 - DNA, 25 bp, Homo sapien
ctttggtggagttggactgtgaact

SEQ ID NO: 4210453 - DNA, 25 bp, Homo sapien
tgaagatttgcactcggagcaaggg

SEQ ID NO: 4210454 - DNA, 25 bp, Homo sapien
ccccggcgacgatgaagatttgcac

SEQ ID NO: 4210455 - DNA, 25 bp, Homo sapien
aagggctcctcatagtcctccaggg

SEQ ID NO: 4210456 - DNA, 25 bp, Homo sapien
tcttctggtagaccgggaagggctc

SEQ ID NO: 4210457 - DNA, 25 bp, Homo sapien
cctcctccggcgcccactcatcaat

SEQ ID NO: 4210458 - DNA, 25 bp, Homo sapien
tcctccggcgcccactcatcaatca

SEQ ID NO: 4210459 - DNA, 25 bp, Homo sapien
ctcctccggcgcccactcatcaatc

SEQ ID NO: 4210460 - DNA, 25 bp, Homo sapien
ccacgttgccattgtgcctgaggtc

SEQ ID NO: 4210461 - DNA, 25 bp, Homo sapien
caatccataggtggcaccgggggct

SEQ ID NO: 4210462 - DNA, 25 bp, Homo sapien
gcggcatggcggtggtggcgctcct

SEQ ID NO: 4210463 - DNA, 25 bp, Homo sapien
ttcccgggccggagagcggtcatcc

SEQ ID NO: 4210464 - DNA, 25 bp, Homo sapien
gaggtggagttggtcctcgcctggc

SEQ ID NO: 4210465 - DNA, 25 bp, Homo sapien
cgtgggcacgcaccccggccaactt

SEQ ID NO: 4210466 - DNA, 25 bp, Homo sapien
cgcgcgtgggcacgcaccccggcca

SEQ ID NO: 4210467 - DNA, 25 bp, Homo sapien
cgcgtgggcacgcaccccggccaac

SEQ ID NO: 4210468 - DNA, 25 bp, Homo sapien
gtgcgcgcgtgggcacgcaccccgg

SEQ ID NO: 4210469 - DNA, 25 bp, Homo sapien
agctcacagaccgagcaaccttatc

SEQ ID NO: 4210470 - DNA, 25 bp, Homo sapien
agaccgagcaaccttatccccaggg

SEQ ID NO: 4210471 - DNA, 25 bp, Homo sapien
gacagctcacagaccgagcaacctt

SEQ ID NO: 4210472 - DNA, 25 bp, Homo sapien
acagaccgagcaaccttatccccag

SEQ ID NO: 4210473 - DNA, 25 bp, Homo sapien
ttccactaacccgactttccgctgc

SEQ ID NO: 4210474 - DNA, 25 bp, Homo sapien
tgagtcgccggttccactaacccga

SEQ ID NO: 4210475 - DNA, 25 bp, Homo sapien
ccgactttccgctgccctctggctg

SEQ ID NO: 4210476 - DNA, 25 bp, Homo sapien
ttaaaatgagtcgccggttccacta

SEQ ID NO: 4210477 - DNA, 25 bp, Homo sapien
atttgaacagttccttcaaggcagg

SEQ ID NO: 4210478 - DNA, 25 bp, Homo sapien
aaattcccttacgtactccaggcag

SEQ ID NO: 4210479 - DNA, 25 bp, Homo sapien
ttctcttccacacggctcctttgtt

SEQ ID NO: 4210480 - DNA, 25 bp, Homo sapien
ttgaacagttccttcaaggcaggcc

SEQ ID NO: 4210481 - DNA, 25 bp, Homo sapien
aatgcgaactactggggatatggct

SEQ ID NO: 4210482 - DNA, 25 bp, Homo sapien
cacaatgcgaactactggggatatg

SEQ ID NO: 4210483 - DNA, 25 bp, Homo sapien
cacagtggagggctggaccaggtgc

SEQ ID NO: 4210484 - DNA, 25 bp, Homo sapien
tgccaggcacaatgcgaactactgg

SEQ ID NO: 4210485 - DNA, 25 bp, Homo sapien
cacatattctaactacgccaggcat

SEQ ID NO: 4210486 - DNA, 25 bp, Homo sapien
caagtcggaataagaagttctcaca

SEQ ID NO: 4210487 - DNA, 25 bp, Homo sapien
caaataattaaggacagttcagccc

SEQ ID NO: 4210488 - DNA, 25 bp, Homo sapien
tccgctagctttctatcatccaggg

SEQ ID NO: 4210489 - DNA, 25 bp, Homo sapien
caacaaacagtacaagagtgggcct

SEQ ID NO: 4210490 - DNA, 25 bp, Homo sapien
caacactggcacagctgggtggcta

SEQ ID NO: 4210491 - DNA, 25 bp, Homo sapien
gaggcaccctgtgctagatgagcca

SEQ ID NO: 4210492 - DNA, 25 bp, Homo sapien
gatgagccactttcttagggacttt

SEQ ID NO: 4210493 - DNA, 25 bp, Homo sapien
gacatcatgttctggcatggcacga

SEQ ID NO: 4210494 - DNA, 25 bp, Homo sapien
taagagcaacactccttcatgggtt

SEQ ID NO: 4210495 - DNA, 25 bp, Homo sapien
tacaatctcaccagacctcttggca

SEQ ID NO: 4210496 - DNA, 25 bp, Homo sapien
tccagtgggttatctatgtgacctc

SEQ ID NO: 4210497 - DNA, 25 bp, Homo sapien
tgaggatgctcctggtgcagtttcc

SEQ ID NO: 4210498 - DNA, 25 bp, Homo sapien
ggcagctcttgccatccctttcacc

SEQ ID NO: 4210499 - DNA, 25 bp, Homo sapien
gcagactcagatgcctgggatgtgt

SEQ ID NO: 4210500 - DNA, 25 bp, Homo sapien
gagtgattttggtgaggatgctcct

SEQ ID NO: 4210501 - DNA, 25 bp, Homo sapien
cacggtaattatcctttgctcctaa

SEQ ID NO: 4210502 - DNA, 25 bp, Homo sapien
caatcatcacatatgggatggaagg

SEQ ID NO: 4210503 - DNA, 25 bp, Homo sapien
tgttacaattcattggtcgtgctct

SEQ ID NO: 4210504 - DNA, 25 bp, Homo sapien
cattggtcgtgctctgacacggtaa

SEQ ID NO: 4210505 - DNA, 25 bp, Homo sapien
gatttctcagaagcggttttagggc

SEQ ID NO: 4210506 - DNA, 25 bp, Homo sapien
tgatttctcagaagcggttttaggg

SEQ ID NO: 4210507 - DNA, 25 bp, Homo sapien
tctgatttctcagaagcggttttag

SEQ ID NO: 4210508 - DNA, 25 bp, Homo sapien
ttctcagaagcggttttagggccaa

SEQ ID NO: 4210509 - DNA, 25 bp, Homo sapien
attttacatcgctgctttcctctgg

SEQ ID NO: 4210510 - DNA, 25 bp, Homo sapien
gctccagtcacgctatgttcacatt

SEQ ID NO: 4210511 - DNA, 25 bp, Homo sapien
ctgcagatgtcattgctccagtcac

SEQ ID NO: 4210512 - DNA, 25 bp, Homo sapien
ggaaatctgggaaggctgggtgcat

SEQ ID NO: 4210513 - DNA, 25 bp, Homo sapien
agctgtcaggatttctacagctgtg

SEQ ID NO: 4210514 - DNA, 25 bp, Homo sapien
tcagctcccagattgagaaatcctc

SEQ ID NO: 4210515 - DNA, 25 bp, Homo sapien
caccacgcgagtggagggccctgct

SEQ ID NO: 4210516 - DNA, 25 bp, Homo sapien
tgcctgccaagactgaacagctgtc

SEQ ID NO: 4210517 - DNA, 25 bp, Homo sapien
ctgaccgctatgatacttatctgcc

SEQ ID NO: 4210518 - DNA, 25 bp, Homo sapien
accgctatgatacttatctgcccat

SEQ ID NO: 4210519 - DNA, 25 bp, Homo sapien
gaccgctatgatacttatctgccca

SEQ ID NO: 4210520 - DNA, 25 bp, Homo sapien
tgaccgctatgatacttatctgccc

SEQ ID NO: 4210521 - DNA, 25 bp, Homo sapien
cacattaagaaaggtaggtgccttg

SEQ ID NO: 4210522 - DNA, 25 bp, Homo sapien
tgtgactaagccagcgtggagcctc

SEQ ID NO: 4210523 - DNA, 25 bp, Homo sapien
ccaggtcatccattacttgcccgtt

SEQ ID NO: 4210524 - DNA, 25 bp, Homo sapien
aggtgagttggctggcatgaacccc

SEQ ID NO: 4210525 - DNA, 25 bp, Homo sapien
gcctccaccacgctagtatgtgttc

SEQ ID NO: 4210526 - DNA, 25 bp, Homo sapien
gtatgtgttcttgccctcatggtca

SEQ ID NO: 4210527 - DNA, 25 bp, Homo sapien
ccttcctggctagatgaggagaaag

SEQ ID NO: 4210528 - DNA, 25 bp, Homo sapien
tttgtagtcattagagacccagact

SEQ ID NO: 4210529 - DNA, 25 bp, Homo sapien
ccatctcggcttacctgatggtggg

SEQ ID NO: 4210530 - DNA, 25 bp, Homo sapien
tctcggcttacctgatggtgggaac

SEQ ID NO: 4210531 - DNA, 25 bp, Homo sapien
ctcggcttacctgatggtgggaaca

SEQ ID NO: 4210532 - DNA, 25 bp, Homo sapien
catctcggcttacctgatggtggga

SEQ ID NO: 4210533 - DNA, 25 bp, Homo sapien
tccagcaggcttttgggcaggaatt

SEQ ID NO: 4210534 - DNA, 25 bp, Homo sapien
gcccctcaacgtgatctatagattc

SEQ ID NO: 4210535 - DNA, 25 bp, Homo sapien
attccagcaggcttttgggcaggaa

SEQ ID NO: 4210536 - DNA, 25 bp, Homo sapien
tattaaaatagcaatgcccctcaac

SEQ ID NO: 4210537 - DNA, 25 bp, Homo sapien
cggcacatgggccagctacagcttt

SEQ ID NO: 4210538 - DNA, 25 bp, Homo sapien
tcggcaaaatgtgcggcacatgggc

SEQ ID NO: 4210539 - DNA, 25 bp, Homo sapien
catgggccagctacagctttctggg

SEQ ID NO: 4210540 - DNA, 25 bp, Homo sapien
aaatgtgcggcacatgggccagcta

SEQ ID NO: 4210541 - DNA, 25 bp, Homo sapien
gttggcagtgaagatgagagctgat

SEQ ID NO: 4210542 - DNA, 25 bp, Homo sapien
tggcagtgaagatgagagctgatac

SEQ ID NO: 4210543 - DNA, 25 bp, Homo sapien
acagttggcagtgaagatgagagct

SEQ ID NO: 4210544 - DNA, 25 bp, Homo sapien
tgaagaggacagttggcagtgaaga

SEQ ID NO: 4210545 - DNA, 25 bp, Homo sapien
tcacaaagccacaaaattggcaagg

SEQ ID NO: 4210546 - DNA, 25 bp, Homo sapien
cagatcttccggttccagcttcagg

SEQ ID NO: 4210547 - DNA, 25 bp, Homo sapien
aatacaacttctagaatcacaaagc

SEQ ID NO: 4210548 - DNA, 25 bp, Homo sapien
tggcaagggagatctaaaatcagat

SEQ ID NO: 4210549 - DNA, 25 bp, Homo sapien
caggcttattaatgctccatggagg

SEQ ID NO: 4210550 - DNA, 25 bp, Homo sapien
taaggttagggcagtgcagaccacg

SEQ ID NO: 4210551 - DNA, 25 bp, Homo sapien
ggtgtccgcagcaagaagtcttcct

SEQ ID NO: 4210552 - DNA, 25 bp, Homo sapien
catgacactcatgaagagcccctga

SEQ ID NO: 4210553 - DNA, 25 bp, Homo sapien
gcttccctacggtcacacaaaggct

SEQ ID NO: 4210554 - DNA, 25 bp, Homo sapien
gatcaggattgcaaagcccctggca

SEQ ID NO: 4210555 - DNA, 25 bp, Homo sapien
cagcaagtgctgcttgcagtatgaa

SEQ ID NO: 4210556 - DNA, 25 bp, Homo sapien
cagtatgaaggctgcataagatcag

SEQ ID NO: 4210557 - DNA, 25 bp, Homo sapien
gaaaaggacctgtgatatgaccatg

SEQ ID NO: 4210558 - DNA, 25 bp, Homo sapien
gacctgtgatatgaccatggactag

SEQ ID NO: 4210559 - DNA, 25 bp, Homo sapien
aaaggaaaaggacctgtgatatgac

SEQ ID NO: 4210560 - DNA, 25 bp, Homo sapien
tatgaccatggactagagcagggcc

SEQ ID NO: 4210561 - DNA, 25 bp, Homo sapien
agccacctggtggcttcccttaggc

SEQ ID NO: 4210562 - DNA, 25 bp, Homo sapien
tcagccacctggtggcttcccttag

SEQ ID NO: 4210563 - DNA, 25 bp, Homo sapien
cagccacctggtggcttcccttagg

SEQ ID NO: 4210564 - DNA, 25 bp, Homo sapien
atgagctgggggctaaccctcatcc

SEQ ID NO: 4210565 - DNA, 25 bp, Homo sapien
gggggctaaccctcatcctctgagg

SEQ ID NO: 4210566 - DNA, 25 bp, Homo sapien
gcaggaatgagctgggggctaaccc

SEQ ID NO: 4210567 - DNA, 25 bp, Homo sapien
tgggggctaaccctcatcctctgag

SEQ ID NO: 4210568 - DNA, 25 bp, Homo sapien
cactgagctctaccataggattaac

SEQ ID NO: 4210569 - DNA, 25 bp, Homo sapien
gaacattaaaccaagagcagggcct

SEQ ID NO: 4210570 - DNA, 25 bp, Homo sapien
gactgtcccgtggtcatgtttcacc

SEQ ID NO: 4210571 - DNA, 25 bp, Homo sapien
gcagggcctttcaaagcctacggag

SEQ ID NO: 4210572 - DNA, 25 bp, Homo sapien
tggcactgcctgtgccgggaagcgc

SEQ ID NO: 4210573 - DNA, 25 bp, Homo sapien
taaaatggatgctgtttcgctgatc

SEQ ID NO: 4210574 - DNA, 25 bp, Homo sapien
gggctccccgcagattaaaatggat

SEQ ID NO: 4210575 - DNA, 25 bp, Homo sapien
gatcaacctgcgcagtggcactgcc

SEQ ID NO: 4210576 - DNA, 25 bp, Homo sapien
ccccaacgcaggactgctgagcgag

SEQ ID NO: 4210577 - DNA, 25 bp, Homo sapien
ctagggcgcagaccccaacgcagga

SEQ ID NO: 4210578 - DNA, 25 bp, Homo sapien
ctcagtgcatcctagggcgcagacc

SEQ ID NO: 4210579 - DNA, 25 bp, Homo sapien
aggcgcggagcatccaccggcgggc

SEQ ID NO: 4210580 - DNA, 25 bp, Homo sapien
acgagcagttatcctgatgtaccat

SEQ ID NO: 4210581 - DNA, 25 bp, Homo sapien
tacgagcagttatcctgatgtacca

SEQ ID NO: 4210582 - DNA, 25 bp, Homo sapien
ctgatacgagcagttatcctgatgt

SEQ ID NO: 4210583 - DNA, 25 bp, Homo sapien
gatacgagcagttatcctgatgtac

SEQ ID NO: 4210584 - DNA, 25 bp, Homo sapien
acaggtgcccgccaccttggccggc

SEQ ID NO: 4210585 - DNA, 25 bp, Homo sapien
aggtgcccgccaccttggccggctg

SEQ ID NO: 4210586 - DNA, 25 bp, Homo sapien
gacctcgtgatccgcagccctcggc

SEQ ID NO: 4210587 - DNA, 25 bp, Homo sapien
tgcccgccaccttggccggctgatt

SEQ ID NO: 4210588 - DNA, 25 bp, Homo sapien
tacgatgggaaaccctgatcctagg

SEQ ID NO: 4210589 - DNA, 25 bp, Homo sapien
ccaggtacatggacttctgaggtca

SEQ ID NO: 4210590 - DNA, 25 bp, Homo sapien
gatgtttaaagtgcgggcaactggc

SEQ ID NO: 4210591 - DNA, 25 bp, Homo sapien
ttcaagaagcctgttgtcggccagg

SEQ ID NO: 4210592 - DNA, 25 bp, Homo sapien
gataggctgatgtgccaattgccca

SEQ ID NO: 4210593 - DNA, 25 bp, Homo sapien
taacctcccatgaattctgataggc

SEQ ID NO: 4210594 - DNA, 25 bp, Homo sapien
ctttccttgctctggcaccgggcag

SEQ ID NO: 4210595 - DNA, 25 bp, Homo sapien
tgacacttggcttgctgactccggc

SEQ ID NO: 4210596 - DNA, 25 bp, Homo sapien
gctgtcagctccctgattctgtgca

SEQ ID NO: 4210597 - DNA, 25 bp, Homo sapien
ctgctgtcagctccctgattctgtg

SEQ ID NO: 4210598 - DNA, 25 bp, Homo sapien
ccctgctgtcagctccctgattctg

SEQ ID NO: 4210599 - DNA, 25 bp, Homo sapien
tgtcagctccctgattctgtgcaca

SEQ ID NO: 4210600 - DNA, 25 bp, Homo sapien
ttaatcagcagccaggaagctggtg

SEQ ID NO: 4210601 - DNA, 25 bp, Homo sapien
ccaggaagctggtgtcctcaacctc

SEQ ID NO: 4210602 - DNA, 25 bp, Homo sapien
aggaagctggtgtcctcaacctcct

SEQ ID NO: 4210603 - DNA, 25 bp, Homo sapien
agccaggaagctggtgtcctcaacc

SEQ ID NO: 4210604 - DNA, 25 bp, Homo sapien
catcaaagaagcttccaagtgccaa

SEQ ID NO: 4210605 - DNA, 25 bp, Homo sapien
gcttccaagtgccaacttctgtctg

SEQ ID NO: 4210606 - DNA, 25 bp, Homo sapien
tctgtctgatagactctctctcatt

SEQ ID NO: 4210607 - DNA, 25 bp, Homo sapien
gtgccaacttctgtctgatagactc

SEQ ID NO: 4210608 - DNA, 25 bp, Homo sapien
gcttggcttcccacttttgctacag

SEQ ID NO: 4210609 - DNA, 25 bp, Homo sapien
ggcttggcttcccacttttgctaca

SEQ ID NO: 4210610 - DNA, 25 bp, Homo sapien
cacttttgctacagctggtataaat

SEQ ID NO: 4210611 - DNA, 25 bp, Homo sapien
gctacagctggtataaattcctggg

SEQ ID NO: 4210612 - DNA, 25 bp, Homo sapien
ggagtaccatactggtgaactcaat

SEQ ID NO: 4210613 - DNA, 25 bp, Homo sapien
caaatactattatgtgctctggtac

SEQ ID NO: 4210614 - DNA, 25 bp, Homo sapien
gacatccctcaagtacttttgtaag

SEQ ID NO: 4210615 - DNA, 25 bp, Homo sapien
taaggtatttccagttcaatgaaga

SEQ ID NO: 4210616 - DNA, 25 bp, Homo sapien
ttggaatggttgagttaagtaaaca

SEQ ID NO: 4210617 - DNA, 25 bp, Homo sapien
gttaagtaaacagtaatcattattc

SEQ ID NO: 4210618 - DNA, 25 bp, Homo sapien
acagtaatcattattcaaagcagct

SEQ ID NO: 4210619 - DNA, 25 bp, Homo sapien
tgatgttggaatggttgagttaagt

SEQ ID NO: 4210620 - DNA, 25 bp, Homo sapien
cactgagttggaactagacaacctc

SEQ ID NO: 4210621 - DNA, 25 bp, Homo sapien
tggttcgacctgtgattcgtggcac

SEQ ID NO: 4210622 - DNA, 25 bp, Homo sapien
gataacagctcccagttagggtgcc

SEQ ID NO: 4210623 - DNA, 25 bp, Homo sapien
cgctgggcagatataaccgttgtgc

SEQ ID NO: 4210624 - DNA, 25 bp, Homo sapien
catggcagctctcaggtaaagtggt

SEQ ID NO: 4210625 - DNA, 25 bp, Homo sapien
ccaggtaataatccccaaggaggag

SEQ ID NO: 4210626 - DNA, 25 bp, Homo sapien
taaaatagggatgtatctcagctgc

SEQ ID NO: 4210627 - DNA, 25 bp, Homo sapien
gatggcccaaaagctgagacatggc

SEQ ID NO: 4210628 - DNA, 25 bp, Homo sapien
gccatgtctatgcagggacttttgt

SEQ ID NO: 4210629 - DNA, 25 bp, Homo sapien
aacatgacagcggagagtcagtgcc

SEQ ID NO: 4210630 - DNA, 25 bp, Homo sapien
gaaaatgttcatgcggactgggtaa

SEQ ID NO: 4210631 - DNA, 25 bp, Homo sapien
cctccttggatctgcagtaaattac

SEQ ID NO: 4210632 - DNA, 25 bp, Homo sapien
tatcctaacccgaatctccagagag

SEQ ID NO: 4210633 - DNA, 25 bp, Homo sapien
ttggagaaacatcgcccctgtatcc

SEQ ID NO: 4210634 - DNA, 25 bp, Homo sapien
ccctgtatcctaacccgaatctcca

SEQ ID NO: 4210635 - DNA, 25 bp, Homo sapien
ctttggagaaacatcgcccctgtat

SEQ ID NO: 4210636 - DNA, 25 bp, Homo sapien
ttctctcccggggctgtataatcac

SEQ ID NO: 4210637 - DNA, 25 bp, Homo sapien
attctctcccggggctgtataatca

SEQ ID NO: 4210638 - DNA, 25 bp, Homo sapien
ggtcattatgaattgggcctttgtt

SEQ ID NO: 4210639 - DNA, 25 bp, Homo sapien
tgggttgtagtgaccgggattgggc

SEQ ID NO: 4210640 - DNA, 25 bp, Homo sapien
tctagaggagcagtggtcattatga

SEQ ID NO: 4210641 - DNA, 25 bp, Homo sapien
cttggctttgggttgtagtgaccgg

SEQ ID NO: 4210642 - DNA, 25 bp, Homo sapien
gagtggcctcagtgtgacagtgcct

SEQ ID NO: 4210643 - DNA, 25 bp, Homo sapien
aaagtgtccttgacggagaatgccc

SEQ ID NO: 4210644 - DNA, 25 bp, Homo sapien
aaaacactggtgctgacttccaact

SEQ ID NO: 4210645 - DNA, 25 bp, Homo sapien
gagaatgcccggaaacatggagaga

SEQ ID NO: 4210646 - DNA, 25 bp, Homo sapien
tccaagctggtttcagtcttactgt

SEQ ID NO: 4210647 - DNA, 25 bp, Homo sapien
atcactgtccttatcactgccactg

SEQ ID NO: 4210648 - DNA, 25 bp, Homo sapien
ggtttcagtcttactgtcatcagca

SEQ ID NO: 4210649 - DNA, 25 bp, Homo sapien
tgtccttatcactgccactgtcgtt

SEQ ID NO: 4210650 - DNA, 25 bp, Homo sapien
gcaacaggcacccatgattattcag

SEQ ID NO: 4210651 - DNA, 25 bp, Homo sapien
tctaagcccaatagggaagaactgg

SEQ ID NO: 4210652 - DNA, 25 bp, Homo sapien
gattgcaaggcctcattagccatgt

SEQ ID NO: 4210653 - DNA, 25 bp, Homo sapien
taaatggcccggaaatcacaacacc

SEQ ID NO: 4210654 - DNA, 25 bp, Homo sapien
tctgatgtcgcactgcactcaacga

SEQ ID NO: 4210655 - DNA, 25 bp, Homo sapien
tcatgtatccagtgatgttctgatg

SEQ ID NO: 4210656 - DNA, 25 bp, Homo sapien
ggttctttgcgtggacaggatctca

SEQ ID NO: 4210657 - DNA, 25 bp, Homo sapien
tgcactcaacgacaacagtttcctc

SEQ ID NO: 4210658 - DNA, 25 bp, Homo sapien
tccctcaatgtgacttgctacttga

SEQ ID NO: 4210659 - DNA, 25 bp, Homo sapien
ttttagcataaacagagagagcagt

SEQ ID NO: 4210660 - DNA, 25 bp, Homo sapien
gatgggctacaacatcctctgagcc

SEQ ID NO: 4210661 - DNA, 25 bp, Homo sapien
tgcatgccagctagcatccacttag

SEQ ID NO: 4210662 - DNA, 25 bp, Homo sapien
tcagtagtgtctctatcagaatagg

SEQ ID NO: 4210663 - DNA, 25 bp, Homo sapien
gatcagcgacgggagactttttcct

SEQ ID NO: 4210664 - DNA, 25 bp, Homo sapien
tgtcatccaaggattcagactcctc

SEQ ID NO: 4210665 - DNA, 25 bp, Homo sapien
cttgtaaggaagtccatgtcatcca

SEQ ID NO: 4210666 - DNA, 25 bp, Homo sapien
gggacagtgtcaaccatttctggct

SEQ ID NO: 4210667 - DNA, 25 bp, Homo sapien
gaatttaaatattcccgtggcagct

SEQ ID NO: 4210668 - DNA, 25 bp, Homo sapien
caatgacaggactttttacaaaccg

SEQ ID NO: 4210669 - DNA, 25 bp, Homo sapien
tagaacttcatagcaggtcaatggc

SEQ ID NO: 4210670 - DNA, 25 bp, Homo sapien
ttcatcaagcattcacttatatgag

SEQ ID NO: 4210671 - DNA, 25 bp, Homo sapien
ctatctgggaatggagatcattgac

SEQ ID NO: 4210672 - DNA, 25 bp, Homo sapien
tgtctctcaggtcggtgggttttaa

SEQ ID NO: 4210673 - DNA, 25 bp, Homo sapien
cttgtagctgcccaatagtcatgtc

SEQ ID NO: 4210674 - DNA, 25 bp, Homo sapien
tccctgtttggctcataaatgctct

SEQ ID NO: 4210675 - DNA, 25 bp, Homo sapien
gaatttatcggcttaaccacactgc

SEQ ID NO: 4210676 - DNA, 25 bp, Homo sapien
attatacagactcattcctcccagg

SEQ ID NO: 4210677 - DNA, 25 bp, Homo sapien
tcatcaggacaagcaactaactgcc

SEQ ID NO: 4210678 - DNA, 25 bp, Homo sapien
cagctcatctcggatgagaagcagc

SEQ ID NO: 4210679 - DNA, 25 bp, Homo sapien
ctcatctcggatgagaagcagctgg

SEQ ID NO: 4210680 - DNA, 25 bp, Homo sapien
tgcagctcatctcggatgagaagca

SEQ ID NO: 4210681 - DNA, 25 bp, Homo sapien
gtgtgcagctcatctcggatgagaa

SEQ ID NO: 4210682 - DNA, 25 bp, Homo sapien
ttggcaagagtgaagccacactgac

SEQ ID NO: 4210683 - DNA, 25 bp, Homo sapien
aattcttagatttcagaccaccctg

SEQ ID NO: 4210684 - DNA, 25 bp, Homo sapien
ctaattcttagatttcagaccaccc

SEQ ID NO: 4210685 - DNA, 25 bp, Homo sapien
tcttctttggcaagagtgaagccac

SEQ ID NO: 4210686 - DNA, 25 bp, Homo sapien
catggcagaggcgatcaagaactgg

SEQ ID NO: 4210687 - DNA, 25 bp, Homo sapien
ggagaactcatcacatggctgcttg

SEQ ID NO: 4210688 - DNA, 25 bp, Homo sapien
catcattgtgccaagaggtgttcct

SEQ ID NO: 4210689 - DNA, 25 bp, Homo sapien
cagaactagacctgatttaggcgga

SEQ ID NO: 4210690 - DNA, 25 bp, Homo sapien
actcctctccttttaactccatggt

SEQ ID NO: 4210691 - DNA, 25 bp, Homo sapien
gtaggactgctccaattcaaagaat

SEQ ID NO: 4210692 - DNA, 25 bp, Homo sapien
catggtaggactgctccaattcaaa

SEQ ID NO: 4210693 - DNA, 25 bp, Homo sapien
gggcccatggtaggactgctccaat

SEQ ID NO: 4210694 - DNA, 25 bp, Homo sapien
catgccagcatggaatgaccctgac

SEQ ID NO: 4210695 - DNA, 25 bp, Homo sapien
catagtcacgttgggagagacagca

SEQ ID NO: 4210696 - DNA, 25 bp, Homo sapien
gaagaggtggaccacatgtcccagc

SEQ ID NO: 4210697 - DNA, 25 bp, Homo sapien
gttttgtagacccacgacatggctg

SEQ ID NO: 4210698 - DNA, 25 bp, Homo sapien
taaagctctattatgggccaggtcc

SEQ ID NO: 4210699 - DNA, 25 bp, Homo sapien
tatctaaagacccatgcagacacag

SEQ ID NO: 4210700 - DNA, 25 bp, Homo sapien
taagactcctgacagaaacctggag

SEQ ID NO: 4210701 - DNA, 25 bp, Homo sapien
taatcctaagggcatggtcttggca

SEQ ID NO: 4210702 - DNA, 25 bp, Homo sapien
ccatgtgcttctgctgactttcagc

SEQ ID NO: 4210703 - DNA, 25 bp, Homo sapien
ctctgccatgtgcttctgctgactt

SEQ ID NO: 4210704 - DNA, 25 bp, Homo sapien
caggcattttctctgccatgtgctt

SEQ ID NO: 4210705 - DNA, 25 bp, Homo sapien
tgccatgtgcttctgctgactttca

SEQ ID NO: 4210706 - DNA, 25 bp, Homo sapien
tttctgcgccacctttagcaacagc

SEQ ID NO: 4210707 - DNA, 25 bp, Homo sapien
tgcctgatattaagtggcacaagta

SEQ ID NO: 4210708 - DNA, 25 bp, Homo sapien
gacttgtatagcaccgtcatttaca

SEQ ID NO: 4210709 - DNA, 25 bp, Homo sapien
gccaatcactggacattaagcttca

SEQ ID NO: 4210710 - DNA, 25 bp, Homo sapien
tttcaaggaaccctctgaatccaac

SEQ ID NO: 4210711 - DNA, 25 bp, Homo sapien
tctaaaaaggaacttcaggtagtca

SEQ ID NO: 4210712 - DNA, 25 bp, Homo sapien
ggtagtcaacattcacaaaatgttg

SEQ ID NO: 4210713 - DNA, 25 bp, Homo sapien
actttcaaggaaccctctgaatcca

SEQ ID NO: 4210714 - DNA, 25 bp, Homo sapien
gaaggccacactaccttctcttgct

SEQ ID NO: 4210715 - DNA, 25 bp, Homo sapien
ggcagttctggcaaggattttaaaa

SEQ ID NO: 4210716 - DNA, 25 bp, Homo sapien
aatgtaagtcttttgtggtgggctg

SEQ ID NO: 4210717 - DNA, 25 bp, Homo sapien
tgtggtgggctgagttttagcgcca

SEQ ID NO: 4210718 - DNA, 25 bp, Homo sapien
tcttgtactgtggtgcagggaagtg

SEQ ID NO: 4210719 - DNA, 25 bp, Homo sapien
tgcagggaagtggattcagtcgttt

SEQ ID NO: 4210720 - DNA, 25 bp, Homo sapien
ctgtgttacaaccataggcagaaca

SEQ ID NO: 4210721 - DNA, 25 bp, Homo sapien
taaaacaaggactgtgttacaacca

SEQ ID NO: 4210722 - DNA, 25 bp, Homo sapien
gtgagagcctggatctgagttgact

SEQ ID NO: 4210723 - DNA, 25 bp, Homo sapien
ggatctgagttgactggtgatactg

SEQ ID NO: 4210724 - DNA, 25 bp, Homo sapien
gcctggatctgagttgactggtgat

SEQ ID NO: 4210725 - DNA, 25 bp, Homo sapien
gagttgactggtgatactgtcattc

SEQ ID NO: 4210726 - DNA, 25 bp, Homo sapien
catacacagaatgcccctgcagggc

SEQ ID NO: 4210727 - DNA, 25 bp, Homo sapien
ttcccatacacagaatgcccctgca

SEQ ID NO: 4210728 - DNA, 25 bp, Homo sapien
ctgcagggcaggaacctttcttatg

SEQ ID NO: 4210729 - DNA, 25 bp, Homo sapien
gggcaggaacctttcttatgcccat

SEQ ID NO: 4210730 - DNA, 25 bp, Homo sapien
atggatttgtggtcttgaggagcac

SEQ ID NO: 4210731 - DNA, 25 bp, Homo sapien
atcttaacagatggatttgtggtct

SEQ ID NO: 4210732 - DNA, 25 bp, Homo sapien
gatttgtggtcttgaggagcaccaa

SEQ ID NO: 4210733 - DNA, 25 bp, Homo sapien
acagatggatttgtggtcttgagga

SEQ ID NO: 4210734 - DNA, 25 bp, Homo sapien
tttagctttaaggactaggcaggcc

SEQ ID NO: 4210735 - DNA, 25 bp, Homo sapien
ggcttcctgggaatctttatccctc

SEQ ID NO: 4210736 - DNA, 25 bp, Homo sapien
ttaaggactaggcaggcctggcctt

SEQ ID NO: 4210737 - DNA, 25 bp, Homo sapien
ggccttcagaggcttcctgggaatc

SEQ ID NO: 4210738 - DNA, 25 bp, Homo sapien
tgctcaggagtctgtcccagatata

SEQ ID NO: 4210739 - DNA, 25 bp, Homo sapien
tgagaaactgggcttgacccctttc

SEQ ID NO: 4210740 - DNA, 25 bp, Homo sapien
ggtttccagtatggcatcccagcat

SEQ ID NO: 4210741 - DNA, 25 bp, Homo sapien
gagtctgtcccagatataattcttc

SEQ ID NO: 4210742 - DNA, 25 bp, Homo sapien
taatcttaaagctatctcggtgagg

SEQ ID NO: 4210743 - DNA, 25 bp, Homo sapien
gggaagttcacatttagcggactga

SEQ ID NO: 4210744 - DNA, 25 bp, Homo sapien
actgagaggagataggccctcccct

SEQ ID NO: 4210745 - DNA, 25 bp, Homo sapien
gctgctactgccatggtctcctctg

SEQ ID NO: 4210746 - DNA, 25 bp, Homo sapien
tttttctgagatccaagacccaact

SEQ ID NO: 4210747 - DNA, 25 bp, Homo sapien
tttctgagatccaagacccaactca

SEQ ID NO: 4210748 - DNA, 25 bp, Homo sapien
tctgagatccaagacccaactcaag

SEQ ID NO: 4210749 - DNA, 25 bp, Homo sapien
tgagatccaagacccaactcaagcc

SEQ ID NO: 4210750 - DNA, 25 bp, Homo sapien
taaggccagattgtcagctgatttg

SEQ ID NO: 4210751 - DNA, 25 bp, Homo sapien
ctgctgccctgttaaagaaatagtg

SEQ ID NO: 4210752 - DNA, 25 bp, Homo sapien
gctgatttggccatgtaggtgttga

SEQ ID NO: 4210753 - DNA, 25 bp, Homo sapien
caaggcagcatagacttcagtggaa

SEQ ID NO: 4210754 - DNA, 25 bp, Homo sapien
catgcgtttttggaggagtgtcact

SEQ ID NO: 4210755 - DNA, 25 bp, Homo sapien
aatcagtgtagggaacggtgctcat

SEQ ID NO: 4210756 - DNA, 25 bp, Homo sapien
ttcaaagtagtgaggaagcggtcgt

SEQ ID NO: 4210757 - DNA, 25 bp, Homo sapien
ttaggctgtgatccaagtacggcgg

SEQ ID NO: 4210758 - DNA, 25 bp, Homo sapien
tactgagatctcttgtgtggatagg

SEQ ID NO: 4210759 - DNA, 25 bp, Homo sapien
tatgtcgagggcagaaaacaccttt

SEQ ID NO: 4210760 - DNA, 25 bp, Homo sapien
ccaaataggctattatttttagaat

SEQ ID NO: 4210761 - DNA, 25 bp, Homo sapien
tggatagggtagttgagtgacttca

SEQ ID NO: 4210762 - DNA, 25 bp, Homo sapien
agcttcaatcctgaaaggtggcctg

SEQ ID NO: 4210763 - DNA, 25 bp, Homo sapien
tgagcttcaatcctgaaaggtggcc

SEQ ID NO: 4210764 - DNA, 25 bp, Homo sapien
ccagtgttacatgctgaggagcttg

SEQ ID NO: 4210765 - DNA, 25 bp, Homo sapien
ccccagtgttacatgctgaggagct

SEQ ID NO: 4210766 - DNA, 25 bp, Homo sapien
tccagggtcaggagtagagcagagg

SEQ ID NO: 4210767 - DNA, 25 bp, Homo sapien
cagcatgaaggatggatccagggtc

SEQ ID NO: 4210768 - DNA, 25 bp, Homo sapien
tttgcatgatggggggatcccttca

SEQ ID NO: 4210769 - DNA, 25 bp, Homo sapien
gggatcccttcagccacagcatgaa

SEQ ID NO: 4210770 - DNA, 25 bp, Homo sapien
tccagctcggcccaaaatgaaagcg

SEQ ID NO: 4210771 - DNA, 25 bp, Homo sapien
gcttgcggcgctttcggattaactc

SEQ ID NO: 4210772 - DNA, 25 bp, Homo sapien
ttttataattgtcccgaggcgcggc

SEQ ID NO: 4210773 - DNA, 25 bp, Homo sapien
agcttctcggtgacacgtgcggtgc

SEQ ID NO: 4210774 - DNA, 25 bp, Homo sapien
cctgtggccgcggcaggtgagggcg

SEQ ID NO: 4210775 - DNA, 25 bp, Homo sapien
ccgctggatgcagacctgtggccgc

SEQ ID NO: 4210776 - DNA, 25 bp, Homo sapien
ggatgcagacctgtggccgcggcag

SEQ ID NO: 4210777 - DNA, 25 bp, Homo sapien
gggacacagggcgagccgctggatg

SEQ ID NO: 4210778 - DNA, 25 bp, Homo sapien
agcatgttgctgacggccctcagca

SEQ ID NO: 4210779 - DNA, 25 bp, Homo sapien
gttgctgacggccctcagcaggttt

SEQ ID NO: 4210780 - DNA, 25 bp, Homo sapien
tggagtggccacggggaggtttctg

SEQ ID NO: 4210781 - DNA, 25 bp, Homo sapien
atgttgctgacggccctcagcaggt

SEQ ID NO: 4210782 - DNA, 25 bp, Homo sapien
cttcagaagtgcaagggtaaaattc

SEQ ID NO: 4210783 - DNA, 25 bp, Homo sapien
atctcttcagaagtgcaagggtaaa

SEQ ID NO: 4210784 - DNA, 25 bp, Homo sapien
gaagtgcaagggtaaaattctagag

SEQ ID NO: 4210785 - DNA, 25 bp, Homo sapien
agtgcaagggtaaaattctagagtt

SEQ ID NO: 4210786 - DNA, 25 bp, Homo sapien
tctgactcttcaggtctcaaatttt

SEQ ID NO: 4210787 - DNA, 25 bp, Homo sapien
tcccaaatctaacttctgaagtagg

SEQ ID NO: 4210788 - DNA, 25 bp, Homo sapien
tgatggataccagaaacgtgaattt

SEQ ID NO: 4210789 - DNA, 25 bp, Homo sapien
tgaagtaggaccagttaaaatccca

SEQ ID NO: 4210790 - DNA, 25 bp, Homo sapien
agttatgaaagaggtctctctggaa

SEQ ID NO: 4210791 - DNA, 25 bp, Homo sapien
gttatgaaagaggtctctctggaat

SEQ ID NO: 4210792 - DNA, 25 bp, Homo sapien
catcatacaggctgaaacttttcat

SEQ ID NO: 4210793 - DNA, 25 bp, Homo sapien
tcatcatacaggctgaaacttttca

SEQ ID NO: 4210794 - DNA, 25 bp, Homo sapien
aattcatcatacaggctgaaacttt

SEQ ID NO: 4210795 - DNA, 25 bp, Homo sapien
tgaattcatcatacaggctgaaact

SEQ ID NO: 4210796 - DNA, 25 bp, Homo sapien
ataaaagaggtctttctggaggcca

SEQ ID NO: 4210797 - DNA, 25 bp, Homo sapien
catcataaaagaggtctttctggag

SEQ ID NO: 4210798 - DNA, 25 bp, Homo sapien
aaagaggtctttctggaggccaggc

SEQ ID NO: 4210799 - DNA, 25 bp, Homo sapien
tcataaaagaggtctttctggaggc

SEQ ID NO: 4210800 - DNA, 25 bp, Homo sapien
gggaagtatccattgagatgggcta

SEQ ID NO: 4210801 - DNA, 25 bp, Homo sapien
caagatggggaagtatccattgaga

SEQ ID NO: 4210802 - DNA, 25 bp, Homo sapien
gaagtatccattgagatgggctaaa

SEQ ID NO: 4210803 - DNA, 25 bp, Homo sapien
agtatccattgagatgggctaaaaa

SEQ ID NO: 4210804 - DNA, 25 bp, Homo sapien
tctagaaagatctgcctcttaggat

SEQ ID NO: 4210805 - DNA, 25 bp, Homo sapien
ctagaaagatctgcctcttaggatc

SEQ ID NO: 4210806 - DNA, 25 bp, Homo sapien
ctccacctggtacatcttcaagtct

SEQ ID NO: 4210807 - DNA, 25 bp, Homo sapien
ctgcatcagctcatcaataactgcc

SEQ ID NO: 4210808 - DNA, 25 bp, Homo sapien
tcagctcatcaataactgccagcat

SEQ ID NO: 4210809 - DNA, 25 bp, Homo sapien
gcatcagctcatcaataactgccag

SEQ ID NO: 4210810 - DNA, 25 bp, Homo sapien
catcagctcatcaataactgccagc

SEQ ID NO: 4210811 - DNA, 25 bp, Homo sapien
tttgtggcacagtctcactgttgaa

SEQ ID NO: 4210812 - DNA, 25 bp, Homo sapien
tgtggcacagtctcactgttgaaat

SEQ ID NO: 4210813 - DNA, 25 bp, Homo sapien
aagggaggatttttgtggcacagtc

SEQ ID NO: 4210814 - DNA, 25 bp, Homo sapien
ttcaagggaggatttttgtggcaca

SEQ ID NO: 4210815 - DNA, 25 bp, Homo sapien
tagtcactgcccgaattctgaaagc

SEQ ID NO: 4210816 - DNA, 25 bp, Homo sapien
tcaatagtcactgcccgaattctga

SEQ ID NO: 4210817 - DNA, 25 bp, Homo sapien
tctatcaatagtcactgcccgaatt

SEQ ID NO: 4210818 - DNA, 25 bp, Homo sapien
gtcactgcccgaattctgaaagcat

SEQ ID NO: 4210819 - DNA, 25 bp, Homo sapien
taggaagcattcagatagctcatca

SEQ ID NO: 4210820 - DNA, 25 bp, Homo sapien
gtatcatgtggatgtaatagtccca

SEQ ID NO: 4210821 - DNA, 25 bp, Homo sapien
tgtttccacaaacactttggtacag

SEQ ID NO: 4210822 - DNA, 25 bp, Homo sapien
tgacaacggtttggagggacctcgc

SEQ ID NO: 4210823 - DNA, 25 bp, Homo sapien
ccacatcctatcaaagtttcctcat

SEQ ID NO: 4210824 - DNA, 25 bp, Homo sapien
gcttgtgccgaccacacttaatatg

SEQ ID NO: 4210825 - DNA, 25 bp, Homo sapien
accaggcagccgcttgtgccgacca

SEQ ID NO: 4210826 - DNA, 25 bp, Homo sapien
ttgccctcatacttcacaccaggca

SEQ ID NO: 4210827 - DNA, 25 bp, Homo sapien
gccgcttgtgccgaccacacttaat

SEQ ID NO: 4210828 - DNA, 25 bp, Homo sapien
ctgtggtgcaggaatgtgtttctaa

SEQ ID NO: 4210829 - DNA, 25 bp, Homo sapien
gaatgtgtttctaagacatctgcaa

SEQ ID NO: 4210830 - DNA, 25 bp, Homo sapien
tgcaggaatgtgtttctaagacatc

SEQ ID NO: 4210831 - DNA, 25 bp, Homo sapien
gtggtgcaggaatgtgtttctaaga

SEQ ID NO: 4210832 - DNA, 25 bp, Homo sapien
ttggaaaccagcagatcaggtcatt

SEQ ID NO: 4210833 - DNA, 25 bp, Homo sapien
gcttggaaaccagcagatcaggtca

SEQ ID NO: 4210834 - DNA, 25 bp, Homo sapien
ggaaaccagcagatcaggtcattat

SEQ ID NO: 4210835 - DNA, 25 bp, Homo sapien
aaccagcagatcaggtcattatttg

SEQ ID NO: 4210836 - DNA, 25 bp, Homo sapien
gagagggatttcgagggcttaccga

SEQ ID NO: 4210837 - DNA, 25 bp, Homo sapien
ggaacacgcactggtaaaatattca

SEQ ID NO: 4210838 - DNA, 25 bp, Homo sapien
gatttcgagggcttaccgaggagcc

SEQ ID NO: 4210839 - DNA, 25 bp, Homo sapien
tggaacacgcactggtaaaatattc

SEQ ID NO: 4210840 - DNA, 25 bp, Homo sapien
ggatttgcagaagtggagtcatggg

SEQ ID NO: 4210841 - DNA, 25 bp, Homo sapien
tattccaaagaagcagctttggagg

SEQ ID NO: 4210842 - DNA, 25 bp, Homo sapien
attgtcagacactcagaggatcctt

SEQ ID NO: 4210843 - DNA, 25 bp, Homo sapien
attttctgagctctatgggccctgg

SEQ ID NO: 4210844 - DNA, 25 bp, Homo sapien
catgaggatcagcatcaactgagag

SEQ ID NO: 4210845 - DNA, 25 bp, Homo sapien
gaggatcagcatcaactgagagcag

SEQ ID NO: 4210846 - DNA, 25 bp, Homo sapien
aggatcagcatcaactgagagcagc

SEQ ID NO: 4210847 - DNA, 25 bp, Homo sapien
tgaggatcagcatcaactgagagca

SEQ ID NO: 4210848 - DNA, 25 bp, Homo sapien
ctgaaggcagtgtgctgaaatgaag

SEQ ID NO: 4210849 - DNA, 25 bp, Homo sapien
gaaatgaagaggcacattcaacagc

SEQ ID NO: 4210850 - DNA, 25 bp, Homo sapien
cctgaaggcagtgtgctgaaatgaa

SEQ ID NO: 4210851 - DNA, 25 bp, Homo sapien
tcaacagcattgtcatacattggac

SEQ ID NO: 4210852 - DNA, 25 bp, Homo sapien
ggtgctacggatacaattcctctgc

SEQ ID NO: 4210853 - DNA, 25 bp, Homo sapien
tgctacggatacaattcctctgcag

SEQ ID NO: 4210854 - DNA, 25 bp, Homo sapien
gtgctacggatacaattcctctgca

SEQ ID NO: 4210855 - DNA, 25 bp, Homo sapien
caggtgctacggatacaattcctct

SEQ ID NO: 4210856 - DNA, 25 bp, Homo sapien
ggaccttgccaatcatgctgagcag

SEQ ID NO: 4210857 - DNA, 25 bp, Homo sapien
tctgggcactagtgctggcataagg

SEQ ID NO: 4210858 - DNA, 25 bp, Homo sapien
ctgagcaggagtgcctagcttccct

SEQ ID NO: 4210859 - DNA, 25 bp, Homo sapien
ttcacgcgaccctcccaaaggtggc

SEQ ID NO: 4210860 - DNA, 25 bp, Homo sapien
gagtaggttagatgccctccctggg

SEQ ID NO: 4210861 - DNA, 25 bp, Homo sapien
ggagaaatggcattcccactccagc

SEQ ID NO: 4210862 - DNA, 25 bp, Homo sapien
tccctgggctctcaacgtggaaagg

SEQ ID NO: 4210863 - DNA, 25 bp, Homo sapien
aggttgtatcattgaagtcgtgcat

SEQ ID NO: 4210864 - DNA, 25 bp, Homo sapien
catttgtttttggccagtgcccgtt

SEQ ID NO: 4210865 - DNA, 25 bp, Homo sapien
ttttggccagtgcccgtttgggagc

SEQ ID NO: 4210866 - DNA, 25 bp, Homo sapien
gccagtgcccgtttgggagccaaac

SEQ ID NO: 4210867 - DNA, 25 bp, Homo sapien
gccaaaccttgtcacctacctccag

SEQ ID NO: 4210868 - DNA, 25 bp, Homo sapien
gggatgtttgaaagtggtgaccgag

SEQ ID NO: 4210869 - DNA, 25 bp, Homo sapien
tgaaagtggtgaccgagtcacccac

SEQ ID NO: 4210870 - DNA, 25 bp, Homo sapien
gatgtttgaaagtggtgaccgagtc

SEQ ID NO: 4210871 - DNA, 25 bp, Homo sapien
tgtttgaaagtggtgaccgagtcac

SEQ ID NO: 4210872 - DNA, 25 bp, Homo sapien
ctaatagttcttgaggaatctgtat

SEQ ID NO: 4210873 - DNA, 25 bp, Homo sapien
tctgtatttttctgttcctagagga

SEQ ID NO: 4210874 - DNA, 25 bp, Homo sapien
tgtatttttctgttcctagaggaat

SEQ ID NO: 4210875 - DNA, 25 bp, Homo sapien
atagttcttgaggaatctgtatttt

SEQ ID NO: 4210876 - DNA, 25 bp, Homo sapien
cactcgagtgcgcttctgggttgaa

SEQ ID NO: 4210877 - DNA, 25 bp, Homo sapien
gcctgtgcctctgaggcttcctctt

SEQ ID NO: 4210878 - DNA, 25 bp, Homo sapien
cctcttaggttgtggatccgtggaa

SEQ ID NO: 4210879 - DNA, 25 bp, Homo sapien
tcaagtgcactgcactcgagtgcgc

SEQ ID NO: 4210880 - DNA, 25 bp, Homo sapien
gaagcctgtggacacatggtcaaca

SEQ ID NO: 4210881 - DNA, 25 bp, Homo sapien
tgccgacttgctcttggtctgcgaa

SEQ ID NO: 4210882 - DNA, 25 bp, Homo sapien
ccgcttcccgtcaggtctcgtggga

SEQ ID NO: 4210883 - DNA, 25 bp, Homo sapien
gcacccatgcgagtgcctgtcctgg

SEQ ID NO: 4210884 - DNA, 25 bp, Homo sapien
taatctccgtgtgctggtgctacgt

SEQ ID NO: 4210885 - DNA, 25 bp, Homo sapien
ggctcccgttgtccttgaagttgca

SEQ ID NO: 4210886 - DNA, 25 bp, Homo sapien
tgaggtcaagcgttctggctcccgt

SEQ ID NO: 4210887 - DNA, 25 bp, Homo sapien
tgcgttcctgtgactcggctgaggc

SEQ ID NO: 4210888 - DNA, 25 bp, Homo sapien
ccaggaattccacctaaaacaatct

SEQ ID NO: 4210889 - DNA, 25 bp, Homo sapien
gattcaacaccacattcccggtttg

SEQ ID NO: 4210890 - DNA, 25 bp, Homo sapien
caggtgtctatgtttcatgcagaac

SEQ ID NO: 4210891 - DNA, 25 bp, Homo sapien
gggagttccttctggacactttgct

SEQ ID NO: 4210892 - DNA, 25 bp, Homo sapien
gccaacaggacaggctatgcccttt

SEQ ID NO: 4210893 - DNA, 25 bp, Homo sapien
aacaggacaggctatgccctttcag

SEQ ID NO: 4210894 - DNA, 25 bp, Homo sapien
aggacaggctatgccctttcagtac

SEQ ID NO: 4210895 - DNA, 25 bp, Homo sapien
caggacaggctatgccctttcagta

SEQ ID NO: 4210896 - DNA, 25 bp, Homo sapien
gtcagcggttggtcgcctcgcggtg

SEQ ID NO: 4210897 - DNA, 25 bp, Homo sapien
tgcagtgctgggcacgcgagcccct

SEQ ID NO: 4210898 - DNA, 25 bp, Homo sapien
ccccaagccgcagaggtcgtgcgga

SEQ ID NO: 4210899 - DNA, 25 bp, Homo sapien
tgcggagcaggtaagcgcagcctcc

SEQ ID NO: 4210900 - DNA, 25 bp, Homo sapien
aggctgcgcgctggcgggtcggtgc

SEQ ID NO: 4210901 - DNA, 25 bp, Homo sapien
ccgcggctacaaaagctcgccgagt

SEQ ID NO: 4210902 - DNA, 25 bp, Homo sapien
aggctgtccctacccgcggctacaa

SEQ ID NO: 4210903 - DNA, 25 bp, Homo sapien
aaaagctcgccgagtcttcctgtcc

SEQ ID NO: 4210904 - DNA, 25 bp, Homo sapien
gatcccaaggcgcacaagtgctctc

SEQ ID NO: 4210905 - DNA, 25 bp, Homo sapien
tgttgtcaccaagcaggttccccct

SEQ ID NO: 4210906 - DNA, 25 bp, Homo sapien
taggcagagcgccaagaagcagccc

SEQ ID NO: 4210907 - DNA, 25 bp, Homo sapien
gaagcagcccaggcgatcccaaggc

SEQ ID NO: 4210908 - DNA, 25 bp, Homo sapien
tgttggaaccacaggggttatgact

SEQ ID NO: 4210909 - DNA, 25 bp, Homo sapien
acacaggcaggtgcattctggagag

SEQ ID NO: 4210910 - DNA, 25 bp, Homo sapien
tgactctaatggtgcttacccaaat

SEQ ID NO: 4210911 - DNA, 25 bp, Homo sapien
ttacccaaatgccatcccagacctc

SEQ ID NO: 4210912 - DNA, 25 bp, Homo sapien
cctgggataaactcccctgacatag

SEQ ID NO: 4210913 - DNA, 25 bp, Homo sapien
ggataaactcccctgacatagacag

SEQ ID NO: 4210914 - DNA, 25 bp, Homo sapien
gggataaactcccctgacatagaca

SEQ ID NO: 4210915 - DNA, 25 bp, Homo sapien
ctgggataaactcccctgacataga

SEQ ID NO: 4210916 - DNA, 25 bp, Homo sapien
tagcctgtgttagtcatgactgtca

SEQ ID NO: 4210917 - DNA, 25 bp, Homo sapien
tgtgatgtgattgtagcattagcga

SEQ ID NO: 4210918 - DNA, 25 bp, Homo sapien
gactgtcactactgcactaaagtca

SEQ ID NO: 4210919 - DNA, 25 bp, Homo sapien
tgtagcgtattgacacagcagtaaa

SEQ ID NO: 4210920 - DNA, 25 bp, Homo sapien
gtgaagacagtccagttactctgga

SEQ ID NO: 4210921 - DNA, 25 bp, Homo sapien
ggagatccataggaccccaaggaag

SEQ ID NO: 4210922 - DNA, 25 bp, Homo sapien
tggagatccataggaccccaaggaa

SEQ ID NO: 4210923 - DNA, 25 bp, Homo sapien
tgaagacagtccagttactctggaa

SEQ ID NO: 4210924 - DNA, 25 bp, Homo sapien
tgccatgaggataaggacgattaaa

SEQ ID NO: 4210925 - DNA, 25 bp, Homo sapien
gccagcaaattaaagggctacatgg

SEQ ID NO: 4210926 - DNA, 25 bp, Homo sapien
taacatcagatgggtcttgacagca

SEQ ID NO: 4210927 - DNA, 25 bp, Homo sapien
caataaggttaataaggtctgctga

SEQ ID NO: 4210928 - DNA, 25 bp, Homo sapien
agtaagaccagggtgtaaggatagg

SEQ ID NO: 4210929 - DNA, 25 bp, Homo sapien
ggagtaagaccagggtgtaaggata

SEQ ID NO: 4210930 - DNA, 25 bp, Homo sapien
taaggataggggagtaaggcctcat

SEQ ID NO: 4210931 - DNA, 25 bp, Homo sapien
tgtaaggataggggagtaaggcctc

SEQ ID NO: 4210932 - DNA, 25 bp, Homo sapien
cttccggtccgggccaggcgagcgg

SEQ ID NO: 4210933 - DNA, 25 bp, Homo sapien
tccggtccgggccaggcgagcggag

SEQ ID NO: 4210934 - DNA, 25 bp, Homo sapien
cggtccgggccaggcgagcggaggg

SEQ ID NO: 4210935 - DNA, 25 bp, Homo sapien
tccgggccaggcgagcggagggcgg

SEQ ID NO: 4210936 - DNA, 25 bp, Homo sapien
tgcttcttgcccatgtccgaccggg

SEQ ID NO: 4210937 - DNA, 25 bp, Homo sapien
ctcctcgtggaggtgtttgtccgac

SEQ ID NO: 4210938 - DNA, 25 bp, Homo sapien
gaggaccagcttcaatggcttctct

SEQ ID NO: 4210939 - DNA, 25 bp, Homo sapien
gaccagcttcaatggcttctctaca

SEQ ID NO: 4210940 - DNA, 25 bp, Homo sapien
tttgaggaccagcttcaatggcttc

SEQ ID NO: 4210941 - DNA, 25 bp, Homo sapien
tgaggaccagcttcaatggcttctc

SEQ ID NO: 4210942 - DNA, 25 bp, Homo sapien
ggtctcgatctcgcttctttttatc

SEQ ID NO: 4210943 - DNA, 25 bp, Homo sapien
gtctcgatctcgcttctttttatcc

SEQ ID NO: 4210944 - DNA, 25 bp, Homo sapien
tctcgatctcgcttctttttatcct

SEQ ID NO: 4210945 - DNA, 25 bp, Homo sapien
ctacaattgtctcatcagttgattc

SEQ ID NO: 4210946 - DNA, 25 bp, Homo sapien
agcttcttgaaggggtgtctgttct

SEQ ID NO: 4210947 - DNA, 25 bp, Homo sapien
catcagttgattcaaagcttcttga

SEQ ID NO: 4210948 - DNA, 25 bp, Homo sapien
cttcttgaaggggtgtctgttctac

SEQ ID NO: 4210949 - DNA, 25 bp, Homo sapien
tgtttaatgatcatggagtagccag

SEQ ID NO: 4210950 - DNA, 25 bp, Homo sapien
ctaaaatccattgggtgtttaatga

SEQ ID NO: 4210951 - DNA, 25 bp, Homo sapien
aatcagtcacaggaaatgaaaagaa

SEQ ID NO: 4210952 - DNA, 25 bp, Homo sapien
tagccaggagcaataaaatcagtca

SEQ ID NO: 4210953 - DNA, 25 bp, Homo sapien
gcaagtcagccatgaagtctatgct

SEQ ID NO: 4210954 - DNA, 25 bp, Homo sapien
ctgcaagtcagccatgaagtctatg

SEQ ID NO: 4210955 - DNA, 25 bp, Homo sapien
caagtcagccatgaagtctatgctc

SEQ ID NO: 4210956 - DNA, 25 bp, Homo sapien
aagtcagccatgaagtctatgctct

SEQ ID NO: 4210957 - DNA, 25 bp, Homo sapien
tctgtgaggtgtctgttccatcttt

SEQ ID NO: 4210958 - DNA, 25 bp, Homo sapien
ttccatctttctgctttcgagtttt

SEQ ID NO: 4210959 - DNA, 25 bp, Homo sapien
tgtgaggtgtctgttccatctttct

SEQ ID NO: 4210960 - DNA, 25 bp, Homo sapien
tgttccatctttctgctttcgagtt

SEQ ID NO: 4210961 - DNA, 25 bp, Homo sapien
tgccagcagcctccgtcctccccac

SEQ ID NO: 4210962 - DNA, 25 bp, Homo sapien
ctgccagcagcctccgtcctcccca

SEQ ID NO: 4210963 - DNA, 25 bp, Homo sapien
tgggactcttgaaggcgtgtgcttc

SEQ ID NO: 4210964 - DNA, 25 bp, Homo sapien
acttatcttcaagcgtatctttttc

SEQ ID NO: 4210965 - DNA, 25 bp, Homo sapien
ttaaacttatcttcaagcgtatctt

SEQ ID NO: 4210966 - DNA, 25 bp, Homo sapien
tatcttcaagcgtatctttttcttt

SEQ ID NO: 4210967 - DNA, 25 bp, Homo sapien
agtctcacagggcagtagcctggct

SEQ ID NO: 4210968 - DNA, 25 bp, Homo sapien
gccttcatcttcaggcaatgacatc

SEQ ID NO: 4210969 - DNA, 25 bp, Homo sapien
tctccatctcttgtagggtcctgga

SEQ ID NO: 4210970 - DNA, 25 bp, Homo sapien
tgctgtgtcaagtgtcttagtatgg

SEQ ID NO: 4210971 - DNA, 25 bp, Homo sapien
gtgtcttagtatggccttcatcttc

SEQ ID NO: 4210972 - DNA, 25 bp, Homo sapien
agtattggactccaaacgccctggg

SEQ ID NO: 4210973 - DNA, 25 bp, Homo sapien
gcttcttcagagtcaaaaacttcaa

SEQ ID NO: 4210974 - DNA, 25 bp, Homo sapien
tggaatatttcagcttcttcagagt

SEQ ID NO: 4210975 - DNA, 25 bp, Homo sapien
tcagcttcttcagagtcaaaaactt

SEQ ID NO: 4210976 - DNA, 25 bp, Homo sapien
ctggaatatttcagcttcttcagag

SEQ ID NO: 4210977 - DNA, 25 bp, Homo sapien
ctggtgctcaaacgttcattctggg

SEQ ID NO: 4210978 - DNA, 25 bp, Homo sapien
ggtctggtgctcaaacgttcattct

SEQ ID NO: 4210979 - DNA, 25 bp, Homo sapien
tggtgctcaaacgttcattctgggc

SEQ ID NO: 4210980 - DNA, 25 bp, Homo sapien
tctggtgctcaaacgttcattctgg

SEQ ID NO: 4210981 - DNA, 25 bp, Homo sapien
gctgtgcaagttctttaaggttatt

SEQ ID NO: 4210982 - DNA, 25 bp, Homo sapien
cacttgttcagcaagatgcatttct

SEQ ID NO: 4210983 - DNA, 25 bp, Homo sapien
cgaactccatacatgcttacgatat

SEQ ID NO: 4210984 - DNA, 25 bp, Homo sapien
agtgtcttctgtcaaatccacaaag

SEQ ID NO: 4210985 - DNA, 25 bp, Homo sapien
ttaatatcttctgaaaagcatttct

SEQ ID NO: 4210986 - DNA, 25 bp, Homo sapien
atatataatcaaataccaggcagcc

SEQ ID NO: 4210987 - DNA, 25 bp, Homo sapien
aatatcttctgaaaagcatttctaa

SEQ ID NO: 4210988 - DNA, 25 bp, Homo sapien
cttctgaaaagcatttctaagttaa

SEQ ID NO: 4210989 - DNA, 25 bp, Homo sapien
gtgggagctcactcggattaggcat

SEQ ID NO: 4210990 - DNA, 25 bp, Homo sapien
catttttgtaaactcaggtgggagc

SEQ ID NO: 4210991 - DNA, 25 bp, Homo sapien
catcagtgagacagacttgtaagac

SEQ ID NO: 4210992 - DNA, 25 bp, Homo sapien
agacttcttgtttatcctctgggag

SEQ ID NO: 4210993 - DNA, 25 bp, Homo sapien
cttctcaaaaagcaagctcctggat

SEQ ID NO: 4210994 - DNA, 25 bp, Homo sapien
ttgttgatcttctcaaaaagcaagc

SEQ ID NO: 4210995 - DNA, 25 bp, Homo sapien
gatcttctcaaaaagcaagctcctg

SEQ ID NO: 4210996 - DNA, 25 bp, Homo sapien
tgatcttctcaaaaagcaagctcct

SEQ ID NO: 4210997 - DNA, 25 bp, Homo sapien
aatgacaatcaggatcttaagagac

SEQ ID NO: 4210998 - DNA, 25 bp, Homo sapien
tgacaatcaggatcttaagagacat

SEQ ID NO: 4210999 - DNA, 25 bp, Homo sapien
ctaaaatgacaatcaggatcttaag

SEQ ID NO: 4211000 - DNA, 25 bp, Homo sapien
aaatgacaatcaggatcttaagaga

SEQ ID NO: 4211001 - DNA, 25 bp, Homo sapien
actcttcaaaagccgtagtctccca

SEQ ID NO: 4211002 - DNA, 25 bp, Homo sapien
tattcactctcaagctggttggctg

SEQ ID NO: 4211003 - DNA, 25 bp, Homo sapien
gactcttcaaaagccgtagtctccc

SEQ ID NO: 4211004 - DNA, 25 bp, Homo sapien
gcttcagctgtagatgcagctctcc

SEQ ID NO: 4211005 - DNA, 25 bp, Homo sapien
tgccttaggtccctctgtggctgac

SEQ ID NO: 4211006 - DNA, 25 bp, Homo sapien
gagagcctctatcttgttcaccaag

SEQ ID NO: 4211007 - DNA, 25 bp, Homo sapien
tgcagtcttgcttgtgacttgcctg

SEQ ID NO: 4211008 - DNA, 25 bp, Homo sapien
tgccgacttgatggctactaacact

SEQ ID NO: 4211009 - DNA, 25 bp, Homo sapien
tgctgctttgccgacttgatggcta

SEQ ID NO: 4211010 - DNA, 25 bp, Homo sapien
gttcatgctgctttgccgacttgat

SEQ ID NO: 4211011 - DNA, 25 bp, Homo sapien
gacttgatggctactaacactgtca

SEQ ID NO: 4211012 - DNA, 25 bp, Homo sapien
gaagaccttatcttggacttgtaac

SEQ ID NO: 4211013 - DNA, 25 bp, Homo sapien
gacttgtaacttccattcactaagg

SEQ ID NO: 4211014 - DNA, 25 bp, Homo sapien
gtaacttccattcactaagggcaat

SEQ ID NO: 4211015 - DNA, 25 bp, Homo sapien
ggaaaggctattttagcaggcccca

SEQ ID NO: 4211016 - DNA, 25 bp, Homo sapien
gcaaatcctaaacgctcctctgaaa

SEQ ID NO: 4211017 - DNA, 25 bp, Homo sapien
accggagccttggttggcaacttga

SEQ ID NO: 4211018 - DNA, 25 bp, Homo sapien
tcctgggtcttcagcgtttccccag

SEQ ID NO: 4211019 - DNA, 25 bp, Homo sapien
tgaaacctcctgacatccatgccat

SEQ ID NO: 4211020 - DNA, 25 bp, Homo sapien
ctaaactctttcacccattgtctta

SEQ ID NO: 4211021 - DNA, 25 bp, Homo sapien
ctttcacccattgtcttagccctaa

SEQ ID NO: 4211022 - DNA, 25 bp, Homo sapien
aactctttcacccattgtcttagcc

SEQ ID NO: 4211023 - DNA, 25 bp, Homo sapien
tttcacccattgtcttagccctaac

SEQ ID NO: 4211024 - DNA, 25 bp, Homo sapien
gagactgtcgtgagtcaccttgacc

SEQ ID NO: 4211025 - DNA, 25 bp, Homo sapien
tagagactgtcgtgagtcaccttga

SEQ ID NO: 4211026 - DNA, 25 bp, Homo sapien
tccatagagactgtcgtgagtcacc

SEQ ID NO: 4211027 - DNA, 25 bp, Homo sapien
gactgtcgtgagtcaccttgaccaa

SEQ ID NO: 4211028 - DNA, 25 bp, Homo sapien
cctccatagtggcttttccgtggac

SEQ ID NO: 4211029 - DNA, 25 bp, Homo sapien
ggtgagtctgccaacctttgatgac

SEQ ID NO: 4211030 - DNA, 25 bp, Homo sapien
tggcagtcccattgataggcttccc

SEQ ID NO: 4211031 - DNA, 25 bp, Homo sapien
ccggcagaggagcttggttatttat

SEQ ID NO: 4211032 - DNA, 25 bp, Homo sapien
gcaggttcctaaccagggcggtcat

SEQ ID NO: 4211033 - DNA, 25 bp, Homo sapien
taagaagcaggttcctaaccagggc

SEQ ID NO: 4211034 - DNA, 25 bp, Homo sapien
gcatctccaaataagaagcaggttc

SEQ ID NO: 4211035 - DNA, 25 bp, Homo sapien
caaataagaagcaggttcctaacca

SEQ ID NO: 4211036 - DNA, 25 bp, Homo sapien
gaatacccacaaggcagtatccata

SEQ ID NO: 4211037 - DNA, 25 bp, Homo sapien
catgttgcggcgttcagaaaactga

SEQ ID NO: 4211038 - DNA, 25 bp, Homo sapien
ttttttcatgttgcggcgttcagaa

SEQ ID NO: 4211039 - DNA, 25 bp, Homo sapien
cagagagcacaagttgaatacccac

SEQ ID NO: 4211040 - DNA, 25 bp, Homo sapien
tagagtctcagggaatatagttctc

SEQ ID NO: 4211041 - DNA, 25 bp, Homo sapien
ctaatctgctttgtatgggtcctga

SEQ ID NO: 4211042 - DNA, 25 bp, Homo sapien
tgcagcgtgtgaggaattgctccca

SEQ ID NO: 4211043 - DNA, 25 bp, Homo sapien
tgtttgggccaaaggttagagtctc

SEQ ID NO: 4211044 - DNA, 25 bp, Homo sapien
ggtggaggtcagcctcctgactcat

SEQ ID NO: 4211045 - DNA, 25 bp, Homo sapien
acaaggtggaggtcagcctcctgac

SEQ ID NO: 4211046 - DNA, 25 bp, Homo sapien
agttacaaggtggaggtcagcctcc

SEQ ID NO: 4211047 - DNA, 25 bp, Homo sapien
aaggtggaggtcagcctcctgactc

SEQ ID NO: 4211048 - DNA, 25 bp, Homo sapien
ttcaatcttaatgcctctcttctgc

SEQ ID NO: 4211049 - DNA, 25 bp, Homo sapien
cagcctttcttgcagttcacgggtg

SEQ ID NO: 4211050 - DNA, 25 bp, Homo sapien
gccactttcaatcttaatgcctctc

SEQ ID NO: 4211051 - DNA, 25 bp, Homo sapien
ggtggcagaagagatgtgccacttt

SEQ ID NO: 4211052 - DNA, 25 bp, Homo sapien
caggctgagctctctagaacaggct

SEQ ID NO: 4211053 - DNA, 25 bp, Homo sapien
ctcaggcctggcagtgcaatttgaa

SEQ ID NO: 4211054 - DNA, 25 bp, Homo sapien
gcaatttgaattttcatcccagatg

SEQ ID NO: 4211055 - DNA, 25 bp, Homo sapien
tctgtcataagggagtccagcccaa

SEQ ID NO: 4211056 - DNA, 25 bp, Homo sapien
tgatagtctcaaagggcgtggagat

SEQ ID NO: 4211057 - DNA, 25 bp, Homo sapien
ttctgtgatagtctcaaagggcgtg

SEQ ID NO: 4211058 - DNA, 25 bp, Homo sapien
ctgttctgtgatagtctcaaagggc

SEQ ID NO: 4211059 - DNA, 25 bp, Homo sapien
ctgtgatagtctcaaagggcgtgga

SEQ ID NO: 4211060 - DNA, 25 bp, Homo sapien
taggtccttgtccatcgctgagcag

SEQ ID NO: 4211061 - DNA, 25 bp, Homo sapien
cagtgagctaggtgatgccgagaaa

SEQ ID NO: 4211062 - DNA, 25 bp, Homo sapien
tgaacttcaagatgacaggctccct

SEQ ID NO: 4211063 - DNA, 25 bp, Homo sapien
accaggctgggtactcatcatggga

SEQ ID NO: 4211064 - DNA, 25 bp, Homo sapien
gactttcgactgagtttagcctttg

SEQ ID NO: 4211065 - DNA, 25 bp, Homo sapien
ttctttgcagccgtagactttcgac

SEQ ID NO: 4211066 - DNA, 25 bp, Homo sapien
gataaccatattctcaacaaaggcc

SEQ ID NO: 4211067 - DNA, 25 bp, Homo sapien
taaattctggtcagccattgaagag

SEQ ID NO: 4211068 - DNA, 25 bp, Homo sapien
acacaaataggctctcctgatggga

SEQ ID NO: 4211069 - DNA, 25 bp, Homo sapien
tggacacaaataggctctcctgatg

SEQ ID NO: 4211070 - DNA, 25 bp, Homo sapien
ctctcctgatgggatggtagtgttc

SEQ ID NO: 4211071 - DNA, 25 bp, Homo sapien
tttgtggacacaaataggctctcct

SEQ ID NO: 4211072 - DNA, 25 bp, Homo sapien
aatccaccttgtcggtgaagtatag

SEQ ID NO: 4211073 - DNA, 25 bp, Homo sapien
tccaccttgtcggtgaagtatagct

SEQ ID NO: 4211074 - DNA, 25 bp, Homo sapien
gaaaatccaccttgtcggtgaagta

SEQ ID NO: 4211075 - DNA, 25 bp, Homo sapien
accttgtcggtgaagtatagctctt

SEQ ID NO: 4211076 - DNA, 25 bp, Homo sapien
gacggaagctgtctccttaagcaag

SEQ ID NO: 4211077 - DNA, 25 bp, Homo sapien
tgacgcatccgtggctttcgtgtac

SEQ ID NO: 4211078 - DNA, 25 bp, Homo sapien
tctgatggttgtcaccactgatcca

SEQ ID NO: 4211079 - DNA, 25 bp, Homo sapien
gcaagagcatgcattagttgacgtt

SEQ ID NO: 4211080 - DNA, 25 bp, Homo sapien
agaagagtcaatggcccagatgagg

SEQ ID NO: 4211081 - DNA, 25 bp, Homo sapien
tctgggctgagtccagctgttccag

SEQ ID NO: 4211082 - DNA, 25 bp, Homo sapien
atctgggctgagtccagctgttcca

SEQ ID NO: 4211083 - DNA, 25 bp, Homo sapien
ggccaccactgttgagaagagtcaa

SEQ ID NO: 4211084 - DNA, 25 bp, Homo sapien
tattccaacattaatggcaatcact

SEQ ID NO: 4211085 - DNA, 25 bp, Homo sapien
ggagggctgccaatactgaagagat

SEQ ID NO: 4211086 - DNA, 25 bp, Homo sapien
tgctgtgccaaaaatagtctggtac

SEQ ID NO: 4211087 - DNA, 25 bp, Homo sapien
acaattccctactgctgtgccaaaa

SEQ ID NO: 4211088 - DNA, 25 bp, Homo sapien
tgtctgtccagggagatagctctct

SEQ ID NO: 4211089 - DNA, 25 bp, Homo sapien
cctcgcctgtcaataaggaaagccc

SEQ ID NO: 4211090 - DNA, 25 bp, Homo sapien
tagctctctgccgacagagcagaaa

SEQ ID NO: 4211091 - DNA, 25 bp, Homo sapien
cacagtctggacaaagcagctcctc

SEQ ID NO: 4211092 - DNA, 25 bp, Homo sapien
ctgcaggcaggccctggtcaaggct

SEQ ID NO: 4211093 - DNA, 25 bp, Homo sapien
cacaagcctgcaggcaggccctggt

SEQ ID NO: 4211094 - DNA, 25 bp, Homo sapien
tcacaagcctgcaggcaggccctgg

SEQ ID NO: 4211095 - DNA, 25 bp, Homo sapien
caggcaggccctggtcaaggctagc

SEQ ID NO: 4211096 - DNA, 25 bp, Homo sapien
tgttgatagcttcagaaagacttag

SEQ ID NO: 4211097 - DNA, 25 bp, Homo sapien
ctctgggagctgtgttgatagcttc

SEQ ID NO: 4211098 - DNA, 25 bp, Homo sapien
gggagctgtgttgatagcttcagaa

SEQ ID NO: 4211099 - DNA, 25 bp, Homo sapien
gctgtgttgatagcttcagaaagac

SEQ ID NO: 4211100 - DNA, 25 bp, Homo sapien
ggcggcccaagcagcttcccgagct

SEQ ID NO: 4211101 - DNA, 25 bp, Homo sapien
gcggcccaagcagcttcccgagctt

SEQ ID NO: 4211102 - DNA, 25 bp, Homo sapien
cggcccaagcagcttcccgagcttc

SEQ ID NO: 4211103 - DNA, 25 bp, Homo sapien
cagcagtgaccccgggtccccacat

SEQ ID NO: 4211104 - DNA, 25 bp, Homo sapien
tcgccgcacgccagctcagcgcagc

SEQ ID NO: 4211105 - DNA, 25 bp, Homo sapien
cggcgccggagccaccgacaggccc

SEQ ID NO: 4211106 - DNA, 25 bp, Homo sapien
ggcgccggagccaccgacaggccct

SEQ ID NO: 4211107 - DNA, 25 bp, Homo sapien
gaaatagccgatggcgaagagcacc

SEQ ID NO: 4211108 - DNA, 25 bp, Homo sapien
cacgttgtccaggaaggcgtgcagc

SEQ ID NO: 4211109 - DNA, 25 bp, Homo sapien
cagatgatgcgctgcaggaaatagc

SEQ ID NO: 4211110 - DNA, 25 bp, Homo sapien
ttgcggacgaaccagcccacgttgt

SEQ ID NO: 4211111 - DNA, 25 bp, Homo sapien
ccggctgccgcctcgtcgcgcagca

SEQ ID NO: 4211112 - DNA, 25 bp, Homo sapien
tcgcgcagcagagcgggcgagtcgt

SEQ ID NO: 4211113 - DNA, 25 bp, Homo sapien
tcgtcgcgcagcagagcgggcgagt

SEQ ID NO: 4211114 - DNA, 25 bp, Homo sapien
ctcgtcgcgcagcagagcgggcgag

SEQ ID NO: 4211115 - DNA, 25 bp, Homo sapien
caggaagaccggcgacactacacgc

SEQ ID NO: 4211116 - DNA, 25 bp, Homo sapien
ggaagaccggcgacactacacgcat

SEQ ID NO: 4211117 - DNA, 25 bp, Homo sapien
tgcaggaagaccggcgacactacac

SEQ ID NO: 4211118 - DNA, 25 bp, Homo sapien
aagaccggcgacactacacgcatct

SEQ ID NO: 4211119 - DNA, 25 bp, Homo sapien
tgggcagatacttgacctcctcgta

SEQ ID NO: 4211120 - DNA, 25 bp, Homo sapien
tcagataagagggtagcggccctcg

SEQ ID NO: 4211121 - DNA, 25 bp, Homo sapien
gcagccgcatggactcctcgtaggt

SEQ ID NO: 4211122 - DNA, 25 bp, Homo sapien
ggcggccaagcaccgacactggcag

SEQ ID NO: 4211123 - DNA, 25 bp, Homo sapien
tctttgaacggaatgaaacgcagag

SEQ ID NO: 4211124 - DNA, 25 bp, Homo sapien
tagtgaaccacaatacgaggcaagg

SEQ ID NO: 4211125 - DNA, 25 bp, Homo sapien
gagaaacataagatcccgggagaac

SEQ ID NO: 4211126 - DNA, 25 bp, Homo sapien
cagggacgtccttcgaaggtgcgct

SEQ ID NO: 4211127 - DNA, 25 bp, Homo sapien
taatgacagagtatgggcaatttcc

SEQ ID NO: 4211128 - DNA, 25 bp, Homo sapien
tgaacaatcaaaagtccagccgaat

SEQ ID NO: 4211129 - DNA, 25 bp, Homo sapien
tcatcataaccaagtggcgctctcc

SEQ ID NO: 4211130 - DNA, 25 bp, Homo sapien
tgctgaaataccctcctgttgcgtt

SEQ ID NO: 4211131 - DNA, 25 bp, Homo sapien
gatccatgtgtgtaatcgttcttga

SEQ ID NO: 4211132 - DNA, 25 bp, Homo sapien
ttttcttcaatacaagtcagatatt

SEQ ID NO: 4211133 - DNA, 25 bp, Homo sapien
ggagcatcagacttcttcaatcaga

SEQ ID NO: 4211134 - DNA, 25 bp, Homo sapien
gttctaaaaacatgtatgagatcca

SEQ ID NO: 4211135 - DNA, 25 bp, Homo sapien
ttttttattacaattcagacattta

SEQ ID NO: 4211136 - DNA, 25 bp, Homo sapien
ccatttttttattacaattcagaca

SEQ ID NO: 4211137 - DNA, 25 bp, Homo sapien
tttaaaaaattctcagaactgtcag

SEQ ID NO: 4211138 - DNA, 25 bp, Homo sapien
taaaaaattctcagaactgtcagac

SEQ ID NO: 4211139 - DNA, 25 bp, Homo sapien
tgatttttctttagtcacaaggtca

SEQ ID NO: 4211140 - DNA, 25 bp, Homo sapien
tctttagtcacaaggtcattagttt

SEQ ID NO: 4211141 - DNA, 25 bp, Homo sapien
tcacaaggtcattagtttttagaag

SEQ ID NO: 4211142 - DNA, 25 bp, Homo sapien
ttaatacacttcaaatgatttttct

SEQ ID NO: 4211143 - DNA, 25 bp, Homo sapien
ttgaaagaaaggtatgaataactta

SEQ ID NO: 4211144 - DNA, 25 bp, Homo sapien
tcatattttaagttaattgaaagaa

SEQ ID NO: 4211145 - DNA, 25 bp, Homo sapien
tgaaagaaaggtatgaataacttaa

SEQ ID NO: 4211146 - DNA, 25 bp, Homo sapien
ttcatattttaagttaattgaaaga

SEQ ID NO: 4211147 - DNA, 25 bp, Homo sapien
cccttgtggattacagcctaggatc

SEQ ID NO: 4211148 - DNA, 25 bp, Homo sapien
gggtgtcactgatatggaagtccag

SEQ ID NO: 4211149 - DNA, 25 bp, Homo sapien
ttttctgtgcagttggtgccaggcc

SEQ ID NO: 4211150 - DNA, 25 bp, Homo sapien
cctcccttgtggatgcctgtgctag

SEQ ID NO: 4211151 - DNA, 25 bp, Homo sapien
cactggctcagcttaggtttggtac

SEQ ID NO: 4211152 - DNA, 25 bp, Homo sapien
aacgctccctcagggaagggatcac

SEQ ID NO: 4211153 - DNA, 25 bp, Homo sapien
tctaatgagttgtgtctaggcaggt

SEQ ID NO: 4211154 - DNA, 25 bp, Homo sapien
tggtacacatgcctggtctaatgag

SEQ ID NO: 4211155 - DNA, 25 bp, Homo sapien
cgaaatctcgattgcatattttgcg

SEQ ID NO: 4211156 - DNA, 25 bp, Homo sapien
cgattgcatattttgcgtaagaaat

SEQ ID NO: 4211157 - DNA, 25 bp, Homo sapien
ttttgcgtaagaaattaatagtgca

SEQ ID NO: 4211158 - DNA, 25 bp, Homo sapien
aatacatgcaagaatttttcctcac

SEQ ID NO: 4211159 - DNA, 25 bp, Homo sapien
gaagtttctcagagtagtccagttg

SEQ ID NO: 4211160 - DNA, 25 bp, Homo sapien
gataccaaagaatgactgtatacca

SEQ ID NO: 4211161 - DNA, 25 bp, Homo sapien
gaaacttagaagaatatgacgaaca

SEQ ID NO: 4211162 - DNA, 25 bp, Homo sapien
gtagtccagttgtaaaccagacaca

SEQ ID NO: 4211163 - DNA, 25 bp, Homo sapien
cactgtggtaggtatgagatagtca

SEQ ID NO: 4211164 - DNA, 25 bp, Homo sapien
tatgttgataccctaaattacagtg

SEQ ID NO: 4211165 - DNA, 25 bp, Homo sapien
aactcttaagaatccatggctgggc

SEQ ID NO: 4211166 - DNA, 25 bp, Homo sapien
gcttcttgttcaaaggaattttaca

SEQ ID NO: 4211167 - DNA, 25 bp, Homo sapien
gaagataatgtcatggacgtctggc

SEQ ID NO: 4211168 - DNA, 25 bp, Homo sapien
cttcatcagaactaggaaagcactg

SEQ ID NO: 4211169 - DNA, 25 bp, Homo sapien
ggcagtcttctcatttctacgataa

SEQ ID NO: 4211170 - DNA, 25 bp, Homo sapien
gacgtctggcatgtacttatagcaa

SEQ ID NO: 4211171 - DNA, 25 bp, Homo sapien
ggtgttctgcgtagatctgtctcag

SEQ ID NO: 4211172 - DNA, 25 bp, Homo sapien
tgcgtagatctgtctcaggcaggtt

SEQ ID NO: 4211173 - DNA, 25 bp, Homo sapien
tacctagtggtgttctgcgtagatc

SEQ ID NO: 4211174 - DNA, 25 bp, Homo sapien
tgtctcaggcaggtttagaggactc

SEQ ID NO: 4211175 - DNA, 25 bp, Homo sapien
ctggaaaagactgggttacagtcat

SEQ ID NO: 4211176 - DNA, 25 bp, Homo sapien
cttttgggatgcgaaggaggaagcc

SEQ ID NO: 4211177 - DNA, 25 bp, Homo sapien
tggcggcagcggggctccgggtgta

SEQ ID NO: 4211178 - DNA, 25 bp, Homo sapien
ggcggcagcggggctccgggtgtag

SEQ ID NO: 4211179 - DNA, 25 bp, Homo sapien
tagccatcactggatcccatctttc

SEQ ID NO: 4211180 - DNA, 25 bp, Homo sapien
gtagccatcactggatcccatcttt

SEQ ID NO: 4211181 - DNA, 25 bp, Homo sapien
tgtagccatcactggatcccatctt

SEQ ID NO: 4211182 - DNA, 25 bp, Homo sapien
tggaacttgaggtaaatcccttcac

SEQ ID NO: 4211183 - DNA, 25 bp, Homo sapien
ctggaacttgaggtaaatcccttca

SEQ ID NO: 4211184 - DNA, 25 bp, Homo sapien
ggtatttgagagcaatcgccaccgc

SEQ ID NO: 4211185 - DNA, 25 bp, Homo sapien
tttgagagcaatcgccaccgctttc

SEQ ID NO: 4211186 - DNA, 25 bp, Homo sapien
ccatcttattgtcgctcctgcgcat

SEQ ID NO: 4211187 - DNA, 25 bp, Homo sapien
cgccatcttattgtcgctcctgcgc

SEQ ID NO: 4211188 - DNA, 25 bp, Homo sapien
gccatcttattgtcgctcctgcgca

SEQ ID NO: 4211189 - DNA, 25 bp, Homo sapien
gctccgggtccttcactcgaaaatg

SEQ ID NO: 4211190 - DNA, 25 bp, Homo sapien
tgtttcggctccgggtccttcactc

SEQ ID NO: 4211191 - DNA, 25 bp, Homo sapien
tcggctccgggtccttcactcgaaa

SEQ ID NO: 4211192 - DNA, 25 bp, Homo sapien
tccgggtccttcactcgaaaatggc

SEQ ID NO: 4211193 - DNA, 25 bp, Homo sapien
tcagaccaaggctggagacggttgt

SEQ ID NO: 4211194 - DNA, 25 bp, Homo sapien
ctggagacggttgtgtagtacccac

SEQ ID NO: 4211195 - DNA, 25 bp, Homo sapien
aggctggagacggttgtgtagtacc

SEQ ID NO: 4211196 - DNA, 25 bp, Homo sapien
caaggctggagacggttgtgtagta

SEQ ID NO: 4211197 - DNA, 25 bp, Homo sapien
taaggaactcccatacgccagcatt

SEQ ID NO: 4211198 - DNA, 25 bp, Homo sapien
cgaaggctgggactaaccactagca

SEQ ID NO: 4211199 - DNA, 25 bp, Homo sapien
tagcaacttcaagtcggacgctggc

SEQ ID NO: 4211200 - DNA, 25 bp, Homo sapien
ggtgaagactaactggcgactcgcc

SEQ ID NO: 4211201 - DNA, 25 bp, Homo sapien
tgtaagtgggaaaatctagacgtgc

SEQ ID NO: 4211202 - DNA, 25 bp, Homo sapien
ctatgtaagtgggaaaatctagacg

SEQ ID NO: 4211203 - DNA, 25 bp, Homo sapien
atgtaagtgggaaaatctagacgtg

SEQ ID NO: 4211204 - DNA, 25 bp, Homo sapien
tatgtaagtgggaaaatctagacgt

SEQ ID NO: 4211205 - DNA, 25 bp, Homo sapien
ggagccatcgaaagacacgagtggc

SEQ ID NO: 4211206 - DNA, 25 bp, Homo sapien
acacgagtggcaagaaggcaggact

SEQ ID NO: 4211207 - DNA, 25 bp, Homo sapien
aaatctcggtccaccggcttccgag

SEQ ID NO: 4211208 - DNA, 25 bp, Homo sapien
tccgcttagaggcagcgggacttcg

SEQ ID NO: 4211209 - DNA, 25 bp, Homo sapien
cgcgggccgctacaccgcgcccgcc

SEQ ID NO: 4211210 - DNA, 25 bp, Homo sapien
acagccgggagcaagtcagcccgcg

SEQ ID NO: 4211211 - DNA, 25 bp, Homo sapien
gggacagccgggagcaagtcagccc

SEQ ID NO: 4211212 - DNA, 25 bp, Homo sapien
gagcaagtcagcccgcgggccgcta

SEQ ID NO: 4211213 - DNA, 25 bp, Homo sapien
agggctgggtgcctttacggggcat

SEQ ID NO: 4211214 - DNA, 25 bp, Homo sapien
gagggctgggtgcctttacggggca

SEQ ID NO: 4211215 - DNA, 25 bp, Homo sapien
gctccgcgtcgctgctggcgccgtc

SEQ ID NO: 4211216 - DNA, 25 bp, Homo sapien
tctccgtgcggccggacggcggctc

SEQ ID NO: 4211217 - DNA, 25 bp, Homo sapien
ctcaggctccgcgtcgctgctggcg

SEQ ID NO: 4211218 - DNA, 25 bp, Homo sapien
cgcgtcgctgctggcgccgtcaggg

SEQ ID NO: 4211219 - DNA, 25 bp, Homo sapien
taacggcaatctaacaccacggagg

SEQ ID NO: 4211220 - DNA, 25 bp, Homo sapien
tggactcacaaaagctacagtggct

SEQ ID NO: 4211221 - DNA, 25 bp, Homo sapien
tagatgcaattctccgtaccgctga

SEQ ID NO: 4211222 - DNA, 25 bp, Homo sapien
gcgacactgccacgagggtttaata

SEQ ID NO: 4211223 - DNA, 25 bp, Homo sapien
tctaaacttctattatcaagttcct

SEQ ID NO: 4211224 - DNA, 25 bp, Homo sapien
taaacttctattatcaagttcctca

SEQ ID NO: 4211225 - DNA, 25 bp, Homo sapien
ctcttctaaacttctattatcaagt

SEQ ID NO: 4211226 - DNA, 25 bp, Homo sapien
cttctaaacttctattatcaagttc

SEQ ID NO: 4211227 - DNA, 25 bp, Homo sapien
cccagcataggatttgaagttctgg

SEQ ID NO: 4211228 - DNA, 25 bp, Homo sapien
tctccccagcataggatttgaagtt

SEQ ID NO: 4211229 - DNA, 25 bp, Homo sapien
tccccagcataggatttgaagttct

SEQ ID NO: 4211230 - DNA, 25 bp, Homo sapien
tttctccccagcataggatttgaag

SEQ ID NO: 4211231 - DNA, 25 bp, Homo sapien
ttgtgctcgatagccaaacacaaaa

SEQ ID NO: 4211232 - DNA, 25 bp, Homo sapien
ttggcccgataatacaggaaaagcg

SEQ ID NO: 4211233 - DNA, 25 bp, Homo sapien
gatcttattttttgtgctcgatagc

SEQ ID NO: 4211234 - DNA, 25 bp, Homo sapien
tgtacaactctgaatgtccttgtgt

SEQ ID NO: 4211235 - DNA, 25 bp, Homo sapien
cccaacttagcaaagaattgatact

SEQ ID NO: 4211236 - DNA, 25 bp, Homo sapien
aattgttggtattaagtcataggcc

SEQ ID NO: 4211237 - DNA, 25 bp, Homo sapien
tcataggcctacttcaaaattcact

SEQ ID NO: 4211238 - DNA, 25 bp, Homo sapien
catgctgttttggtccctttctcaa

SEQ ID NO: 4211239 - DNA, 25 bp, Homo sapien
tactgttaggaatgacttcataatc

SEQ ID NO: 4211240 - DNA, 25 bp, Homo sapien
ggatacatagaaattactgttagga

SEQ ID NO: 4211241 - DNA, 25 bp, Homo sapien
aattactgttaggaatgacttcata

SEQ ID NO: 4211242 - DNA, 25 bp, Homo sapien
ggaatgacttcataatcatcccctt

SEQ ID NO: 4211243 - DNA, 25 bp, Homo sapien
tttccacttatgtgatagacagaag

SEQ ID NO: 4211244 - DNA, 25 bp, Homo sapien
agaagtattatctctgcaggccgtt

SEQ ID NO: 4211245 - DNA, 25 bp, Homo sapien
taaaaatctattatggtccaagtca

SEQ ID NO: 4211246 - DNA, 25 bp, Homo sapien
tccatggcttcgaagaagatttcca

SEQ ID NO: 4211247 - DNA, 25 bp, Homo sapien
tgtaaaccatgatgtgctgctacag

SEQ ID NO: 4211248 - DNA, 25 bp, Homo sapien
ttccttaaatttctagagcagcaaa

SEQ ID NO: 4211249 - DNA, 25 bp, Homo sapien
tgattcgcatcttgactgtagcatg

SEQ ID NO: 4211250 - DNA, 25 bp, Homo sapien
ctgtagcatgtaaaccatgatgtgc

SEQ ID NO: 4211251 - DNA, 25 bp, Homo sapien
tatatatttcactacgccaatattt

SEQ ID NO: 4211252 - DNA, 25 bp, Homo sapien
tatatttcactacgccaatatttac

SEQ ID NO: 4211253 - DNA, 25 bp, Homo sapien
cactaaagcagcacagtaatattgg

SEQ ID NO: 4211254 - DNA, 25 bp, Homo sapien
taaagcagcacagtaatattggtgt

SEQ ID NO: 4211255 - DNA, 25 bp, Homo sapien
ataaaaatcagtttggcacaggtac

SEQ ID NO: 4211256 - DNA, 25 bp, Homo sapien
tcagtagtagtggttccaccaagta

SEQ ID NO: 4211257 - DNA, 25 bp, Homo sapien
ccaagccatgctggtagaatatact

SEQ ID NO: 4211258 - DNA, 25 bp, Homo sapien
ctaggtgcttaggtaaatcaaacac

SEQ ID NO: 4211259 - DNA, 25 bp, Homo sapien
gttagaggtagcttccttgctgctc

SEQ ID NO: 4211260 - DNA, 25 bp, Homo sapien
tagttgtggatattgaatcagacac

SEQ ID NO: 4211261 - DNA, 25 bp, Homo sapien
ttctggttggttagaggtagcttcc

SEQ ID NO: 4211262 - DNA, 25 bp, Homo sapien
accaccttcaccctagttgtggata

SEQ ID NO: 4211263 - DNA, 25 bp, Homo sapien
aatctgtagattgacagtctgtgcc

SEQ ID NO: 4211264 - DNA, 25 bp, Homo sapien
aagtcatatcaaggttcaatccaag

SEQ ID NO: 4211265 - DNA, 25 bp, Homo sapien
tgatccagttataccactctttgag

SEQ ID NO: 4211266 - DNA, 25 bp, Homo sapien
gacaaagtttcatatgttcccagtg

SEQ ID NO: 4211267 - DNA, 25 bp, Homo sapien
gatatttacaaagcaaaatagttac

SEQ ID NO: 4211268 - DNA, 25 bp, Homo sapien
atttacaaagcaaaatagttacatc

SEQ ID NO: 4211269 - DNA, 25 bp, Homo sapien
taaaggcaggatatttacaaagcaa

SEQ ID NO: 4211270 - DNA, 25 bp, Homo sapien
ttaaaggcaggatatttacaaagca

SEQ ID NO: 4211271 - DNA, 25 bp, Homo sapien
aaagttgggattcagtgtttaacag

SEQ ID NO: 4211272 - DNA, 25 bp, Homo sapien
cagtttacgctgacaaaaatattcc

SEQ ID NO: 4211273 - DNA, 25 bp, Homo sapien
aacttacatttgagtcaaatggcca

SEQ ID NO: 4211274 - DNA, 25 bp, Homo sapien
gatagagtacagctattaagaaaca

SEQ ID NO: 4211275 - DNA, 25 bp, Homo sapien
aagtgagaattgggagcagttaaat

SEQ ID NO: 4211276 - DNA, 25 bp, Homo sapien
gtgtatgtttagctaaatcaatctt

SEQ ID NO: 4211277 - DNA, 25 bp, Homo sapien
tagctaaatcaatcttaagtgagaa

SEQ ID NO: 4211278 - DNA, 25 bp, Homo sapien
gcagttaaataataaagccaagagt

SEQ ID NO: 4211279 - DNA, 25 bp, Homo sapien
ttggtttcatcatagcaatttgttc

SEQ ID NO: 4211280 - DNA, 25 bp, Homo sapien
tagccgtccacaaccaattatatct

SEQ ID NO: 4211281 - DNA, 25 bp, Homo sapien
taataggttcatttagccgtccaca

SEQ ID NO: 4211282 - DNA, 25 bp, Homo sapien
agactttaataggttcatttagccg

SEQ ID NO: 4211283 - DNA, 25 bp, Homo sapien
aactctccgacacaagactttaata

SEQ ID NO: 4211284 - DNA, 25 bp, Homo sapien
ttccaaggtaagaaattcgatagct

SEQ ID NO: 4211285 - DNA, 25 bp, Homo sapien
aaattcgatagctatgtttttctct

SEQ ID NO: 4211286 - DNA, 25 bp, Homo sapien
attcgatagctatgtttttctctcc

SEQ ID NO: 4211287 - DNA, 25 bp, Homo sapien
tttccaaggtaagaaattcgatagc

SEQ ID NO: 4211288 - DNA, 25 bp, Homo sapien
tggtaatatcaatcaaggcacttac

SEQ ID NO: 4211289 - DNA, 25 bp, Homo sapien
agagaagggctttgacttaatggtt

SEQ ID NO: 4211290 - DNA, 25 bp, Homo sapien
gagaagggctttgacttaatggtta

SEQ ID NO: 4211291 - DNA, 25 bp, Homo sapien
ttggtaatatcaatcaaggcactta

SEQ ID NO: 4211292 - DNA, 25 bp, Homo sapien
ggataagttcaccacataattcctt

SEQ ID NO: 4211293 - DNA, 25 bp, Homo sapien
tttaataaattcaaccctggtgatc

SEQ ID NO: 4211294 - DNA, 25 bp, Homo sapien
tcctcacattggataagttcaccac

SEQ ID NO: 4211295 - DNA, 25 bp, Homo sapien
agatagtcctcacattggataagtt

SEQ ID NO: 4211296 - DNA, 25 bp, Homo sapien
ttcagcaattcgtttctgcaactca

SEQ ID NO: 4211297 - DNA, 25 bp, Homo sapien
agcaattcgtttctgcaactcataa

SEQ ID NO: 4211298 - DNA, 25 bp, Homo sapien
cattaatttctttggtatcttcatg

SEQ ID NO: 4211299 - DNA, 25 bp, Homo sapien
taatttctttggtatcttcatgaat

SEQ ID NO: 4211300 - DNA, 25 bp, Homo sapien
tgtgctagaagtaactttatatata

SEQ ID NO: 4211301 - DNA, 25 bp, Homo sapien
taaatacacatgtaatacaattatc

SEQ ID NO: 4211302 - DNA, 25 bp, Homo sapien
caccacttgatatgctggcaaatgt

SEQ ID NO: 4211303 - DNA, 25 bp, Homo sapien
ggcaaatgtcttacactcacaatgt

SEQ ID NO: 4211304 - DNA, 25 bp, Homo sapien
tatgtccaggctcttaataaggcag

SEQ ID NO: 4211305 - DNA, 25 bp, Homo sapien
ttttccagtgactacaatgtctagg

SEQ ID NO: 4211306 - DNA, 25 bp, Homo sapien
gatgatccctctccccatagttgaa

SEQ ID NO: 4211307 - DNA, 25 bp, Homo sapien
ttgttactgtgctacgccactaggg

SEQ ID NO: 4211308 - DNA, 25 bp, Homo sapien
ccaaatctagctgtgtaaatttttc

SEQ ID NO: 4211309 - DNA, 25 bp, Homo sapien
ggctttactcgtggcatgttttaac

SEQ ID NO: 4211310 - DNA, 25 bp, Homo sapien
tattctcctcaataaattttgtaat

SEQ ID NO: 4211311 - DNA, 25 bp, Homo sapien
tttctctaacttgaacatcttccaa

SEQ ID NO: 4211312 - DNA, 25 bp, Homo sapien
caaacacctgacctcttatgaagga

SEQ ID NO: 4211313 - DNA, 25 bp, Homo sapien
tataaatatgctctgactacacgga

SEQ ID NO: 4211314 - DNA, 25 bp, Homo sapien
tatttaaaggcatttctcagggtcc

SEQ ID NO: 4211315 - DNA, 25 bp, Homo sapien
gtattttcccgactattcactgtaa

SEQ ID NO: 4211316 - DNA, 25 bp, Homo sapien
ctgtttaaggctatccataacttcc

SEQ ID NO: 4211317 - DNA, 25 bp, Homo sapien
tttcctgtttaaggctatccataac

SEQ ID NO: 4211318 - DNA, 25 bp, Homo sapien
cattaatgatattgttactcttggc

SEQ ID NO: 4211319 - DNA, 25 bp, Homo sapien
ttttccttctcgagggcattgtttc

SEQ ID NO: 4211320 - DNA, 25 bp, Homo sapien
ctaggttgactagttttaggaatgt

SEQ ID NO: 4211321 - DNA, 25 bp, Homo sapien
tcagcaggaattaaaagaatagtca

SEQ ID NO: 4211322 - DNA, 25 bp, Homo sapien
tccaaacttaccagttcaggtttca

SEQ ID NO: 4211323 - DNA, 25 bp, Homo sapien
gaatagtcatctaagtctaggttga

SEQ ID NO: 4211324 - DNA, 25 bp, Homo sapien
catttgaggcctagctttgtcatta

SEQ ID NO: 4211325 - DNA, 25 bp, Homo sapien
ttctcacaagtggactagattcagt

SEQ ID NO: 4211326 - DNA, 25 bp, Homo sapien
gaaagctactgcattatccattgac

SEQ ID NO: 4211327 - DNA, 25 bp, Homo sapien
tgagatcgatcattacgctgaggaa

SEQ ID NO: 4211328 - DNA, 25 bp, Homo sapien
gccttagttaattgagacactgcag

SEQ ID NO: 4211329 - DNA, 25 bp, Homo sapien
gctgcaattagagcttccttagcct

SEQ ID NO: 4211330 - DNA, 25 bp, Homo sapien
gatagatatcaagttctgactgggc

SEQ ID NO: 4211331 - DNA, 25 bp, Homo sapien
gctacatccatctttgaacgtgctt

SEQ ID NO: 4211332 - DNA, 25 bp, Homo sapien
tactgaggttttggagatctttgga

SEQ ID NO: 4211333 - DNA, 25 bp, Homo sapien
tactgaaatgctgacctcattcttt

SEQ ID NO: 4211334 - DNA, 25 bp, Homo sapien
gggacaggcaccgataagctataca

SEQ ID NO: 4211335 - DNA, 25 bp, Homo sapien
gatagtctcagttcacatatggaat

SEQ ID NO: 4211336 - DNA, 25 bp, Homo sapien
ttcttgaattattgcatcaaggact

SEQ ID NO: 4211337 - DNA, 25 bp, Homo sapien
ttcgattcattgctaatgagctctt

SEQ ID NO: 4211338 - DNA, 25 bp, Homo sapien
tcttgaattattgcatcaaggactt

SEQ ID NO: 4211339 - DNA, 25 bp, Homo sapien
ttccccctacttcgattcattgcta

SEQ ID NO: 4211340 - DNA, 25 bp, Homo sapien
tgtatttatctaaagctaagtaaac

SEQ ID NO: 4211341 - DNA, 25 bp, Homo sapien
agtgacacttgaaatatggttgtca

SEQ ID NO: 4211342 - DNA, 25 bp, Homo sapien
taattgtatttatctaaagctaagt

SEQ ID NO: 4211343 - DNA, 25 bp, Homo sapien
gtttgtgtgacattactagtatttt

SEQ ID NO: 4211344 - DNA, 25 bp, Homo sapien
caacaggatgatatagccacgtcgt

SEQ ID NO: 4211345 - DNA, 25 bp, Homo sapien
cacattcttgggctatatcaataga

SEQ ID NO: 4211346 - DNA, 25 bp, Homo sapien
caacaatgtagtccagtgcatgaca

SEQ ID NO: 4211347 - DNA, 25 bp, Homo sapien
tttcatcaatggctcctaagtcccc

SEQ ID NO: 4211348 - DNA, 25 bp, Homo sapien
tgatttgtccctgtaaagttaccac

SEQ ID NO: 4211349 - DNA, 25 bp, Homo sapien
ggtcatctttttcgcccatacagcc

SEQ ID NO: 4211350 - DNA, 25 bp, Homo sapien
tatgctactcttgtggcttgatcca

SEQ ID NO: 4211351 - DNA, 25 bp, Homo sapien
tgatccaagttgtcagctactaagg

SEQ ID NO: 4211352 - DNA, 25 bp, Homo sapien
ataacaagtgaggaacccattcttc

SEQ ID NO: 4211353 - DNA, 25 bp, Homo sapien
gatttgcattgcttttttagagtcg

SEQ ID NO: 4211354 - DNA, 25 bp, Homo sapien
gcattgcttttttagagtcgttttg

SEQ ID NO: 4211355 - DNA, 25 bp, Homo sapien
tggatttgcattgcttttttagagt

SEQ ID NO: 4211356 - DNA, 25 bp, Homo sapien
cttttttagagtcgttttgcaactg

SEQ ID NO: 4211357 - DNA, 25 bp, Homo sapien
taaatttttctagtgtgttcctcat

SEQ ID NO: 4211358 - DNA, 25 bp, Homo sapien
agtgtgttcctcatttctcgttcac
